(19) United States
(12) Patent Application Publication
(10) Pub. No.: US 2015/0153356 A1
(43) Pub. Date: Jun. 4, 2015

(54) PEPTIDE AND ANTIBODY LIBRARIES AND USES THEREOF

(71) Applicant: AbMART (SHANGHAI) Co., Ltd., Shanghai (CN)

(72) Inventors: Xun Meng, Shanghai (CN); Yang Li, Shanghai (CN); Xiaoqing Wang, Shanghai (CN)

(73) Assignee: AbMART (SHANGHAI) CO., LTD., Shanghai (CN)

(21) Appl. No.: 14/388,907

(22) PCT Filed: Apr. 1, 2013
(86) PCT No.: PCT/CN2013/073571

§ 371 Date: Sep. 29, 2014

(51) Int. Cl. G01N 33/68; C12N 5/16

(52) U.S. Cl. CPC G01N 33/6854; C12N 5/163; G01N 2333/91215; G01N 2333/9121; G01N 2333/4712; G01N 2333/28; G01N 2333/415; G01N 2333/475

(57) ABSTRACT

This invention relates generally to antibody libraries, polypeptide libraries and the uses thereof, including methods for producing antibody libraries, methods for identifying an antibody to a target, and methods for identifying a target associated with a condition. In specific embodiments, the present invention relates to an antibody library comprising at least 10,000 different members, which can be used for screening an antibody with high affinity against a protein of interest

### CROSS-REFERENCE TO RELATED APPLICATIONS

[0001] This application claims benefit of priority of PCT Application No. PCT/CN2012/000430, filed on Mar. 31, 2012, which is hereby incorporated by reference in its entirety.

### FIELD OF THE INVENTION

[0002] This invention relates generally to antibodies, antibody libraries, polypeptides, polypeptide libraries and the uses thereof, including methods for producing antibody libraries, methods for identifying an antibody to a target, and methods for identifying a target associated with a condition. In specific embodiments, the present invention relates to an antibody library comprising at least 10,000 different members, which can be used for screening an antibody with high affinity against a target, e.g., a protein, of interest.

### BACKGROUND OF THE INVENTION

[0003] In the fields of medicine, biology, pharmacy etc., the demand for various antibodies and antibody libraries is rapidly increasing. Currently, the commonly used methods for obtaining antibodies include hybridoma techniques, recombinant antibody techniques, various molecular display techniques, and those techniques combining the above techniques with high-throughput processes, etc.

[0004] In conventional antibody preparation techniques, it will generally be necessary to immunize an animal using a native or recombinant protein or fragment thereof, so as to allow the animal to produce an antibody that can specifically recognize and bind said protein. And the antibody can then be obtained from cells of the animal through various technical means according to different requirements.

[0005] The obtaining of an antibody can involve hybridoma techniques. In such processes, after immunizing the animal, it will be necessary to take animal cells and then conduct cell fusion, so as to obtain the hybridoma that produces antibody; the hybridoma is then cloned and established as a strain to produce antibodies, and subsequently the antibodies are purified and identified. According to the requirements, the epitope of the antigen can also be determined. The detailed procedure of such hybridoma techniques can be found in various textbooks and manuals (such as Bazin, Rat hybridomas and rat monoclonal antibodies, CRC Press, 1990; Goding, Monoclonal antibodies: principles and practice, 3^{rd} edition, Academic Press, 1996; Shepherd and Dean Monoclonal antibodies, Oxford University Press, 2000 etc). Currently these processes are still widely employed for antibody preparation, but they have many disadvantages, such as long preparation period, very complicated preparation techniques, and high cost. Furthermore, these processes cannot be applied to all the proteins, e.g., for some antigens with poor solubility, low immunogenicity, or toxicity, these processes are not applicable (Sinclair N R et al., 2004 B cell/antibody tolerance to our own antigens. Front Biosci 9: 3019-3028).

[0006] Additionally, in order to obtain monoclonal antibodies with specificity, the commonly used way is to couple the chemically synthesized peptide fragment into a carrier protein, and then use it to immunize a mouse. Such process can produce antibodies against a single epitope of the same protein. However, due to the difference in the immunogenicity of various peptide fragments, the overall success rate of such strategy is not good enough, especially for proteins showing high homology to the host, the peptides thereof will have very poor immunogenicity, and can hardly stimulate potent immune reaction in mouse. Another conventional strategy is using full length protein or fragment thereof as immunogen, this strategy partially solved the above mentioned problem, but there still exists some other defects, such as low overall success rate in protein expression (30-70% for normal expression and purification systems) (Thorsten Kohl, Christian Schmidt, Stefan Wiemann, Annemarie Poustka and Ulrike Korf. Drew, 2003). As for protein fragments with high homology to the host animal used, their immune response in the animal is normally weak, and the success rate for preparing monoclonal antibody is relatively low (Sinclair N R et al, 2004, Automated production of recombinant human proteins as resource for proteome research, Proteome Science 2008, 6:4; Sinclair N R (2004) B cell/antibody tolerance to our own antigens. Front Biosci 9: 3019-3028).

[0007] The recombinant antibody techniques can be combined with various molecular display techniques, so as to produce antibodies (with high affinity to the targets) against multiple antigens, epitopes of the antigens can be simultaneously determined, and thus this strategy is commonly used in drug development (Christine Rothe, Stefanie Urlinger, Makiko Yamashita et al. The Human Combinatorial Antibody Library HuCAL GOLD Combines Diversification of All Six CDRs According to the Natural Immune System with a Novel Display Method for Efficient Selection of High-Affinity Antibodies. J. Mol. Biol. (2008) 376, 1182-1200, 2007). But the operation of recombinant antibody technique is complicated, costly, the yield thereof is relatively low, and there often exists unspecific binding, such that these techniques cannot be widely used (Levitan, B. Stochastic modeling and optimization of phage display. J. Mol. Biol. 277, 893-916 (1998). Bradbury et al, 2004).

[0008] As such, all the conventional antibody preparation methods in the art typically involve complicated operational processes, such as immunizing animals, preparing hybridoma cells etc. Therefore they all have the disadvantages of long preparation period, complicated preparation techniques, and high cost etc.

[0009] Antibody library technique based on phage antibodies is a novel antibody preparation technique developed recently. The antibody gene fragments cloned in vitro are inserted into phage vectors, and are then expressed; subsequently, antigens are used to perform screening against the expressed antibody library, and thereby monoclonal phage antibodies with specificity are obtained. However, phage antibody library technique will need extremely large amount of antibodies in the library so as to obtain antibody with high affinity, and the antibody production procedure is still relatively complicated.

[0010] In order to solve the above problems, a novel method for preparing or screening antibodies is desired, so as to omit the complicated, time-consuming, and costly processes, and thus antibodies with high affinity can be rapidly and effectively prepared or screened. The present invention addresses the above and other related concerns in the art.

### BRIEF SUMMARY OF THE INVENTION

[0011] In one aspect, the present invention is directed to a method for identifying an antibody to a target, which method comprises: a) providing for an antibody library obtained from a subject, e.g., a mammal, wherein said antibody library comprises less than 10⁷ different kinds of antibodies; b) contacting said target with said antibody library under conditions suitable for binding between said target with an antibody in said antibody library, if such antibody existing in said antibody library; and c) assessing binding between said target and said antibody to identify said antibody as an antibody to said target. In some embodiments, the antibody library is obtained from a subject or mammal whose immune system has not been stimulated by a target exogenously. In another aspect, the present invention is directed to an antibody that specifically binds to the target, wherein the antibody is identified by the above method.

[0012] In still another aspect, the present invention is directed to an antibody library for identifying an antibody to a target, which antibody library is obtained from a subject or mammal and said antibody library comprises less than 10⁷ different kinds of antibodies. In some embodiments, the antibody library is obtained from a subject or mammal whose immune system has not been stimulated by a target exogenously.

[0013] In yet another aspect, the present invention is directed to a polypeptide library, which polypeptide library comprises a plurality of isolated polypeptides comprising different, random amino acid sequences, wherein the polypeptides comprise about 5-100 amino acids, preferably, 10-20, 10-30, 10-40, 10-50, 10-60, 10-70, 10-80, 10-90, or 10-100, amino acids, the polypeptides do not comprise Cys, do not comprise 3 or more identical, consecutive amino acids, and/or do not comprise 5 or more identical amino acids. In yet another aspect, the present invention is directed to a method for producing an antibody library, which method comprises: a) immunizing a subject with the above polypeptide library; and b) recovering antibodies from said subject. In yet another aspect, the present invention is directed to an antibody library that is produced by the above method.

[0014] In yet another aspect, the present invention is directed to an isolated polypeptide set forth in the sequence listing (SEQ ID: 1-55471). In some embodiments, the present invention is directed to at least 2, 3, 4, 5, 6, 7, 8, or 9 isolated polypeptides set forth in the sequence listing (SEQ ID: 1-55471).

[0015] In yet another aspect, the present invention is directed to a polypeptide library, which polypeptide library comprises at least 10, 100, 1,000, 10,000, 15,000, 20,000, 25,000, 30,000, 35,000, 40,000, 45,000, 50,000, or all isolated polypeptides set forth in the sequence listing (SEQ ID: 1-55471). In yet another aspect, the present invention is directed to a method for producing an antibody library, which method comprises a) immunizing a subject with the above polypeptide library; and b) recovering antibodies from said subject. In yet another aspect, the present invention is directed to an antibody library that is produced by the above method.

[0016] In yet another aspect, the present invention is directed to an isolated antibody that specifically binds to a polypeptide set forth in the sequence listing (SEQ ID: 1-55471). In some embodiments, the present invention is directed to isolated antibodies that specifically bind to at least 2, 3, 4, 5, 6, 7, 8, or 9 isolated polypeptides set forth in the sequence listing (SEQ ID: 1-55471).

[0017] In yet another aspect, the present invention is directed to an antibody library, which antibody library comprises antibodies that specifically bind to at least 10, 100, 1,000, 10,000, 15,000, 20,000, 25,000, 30,000, 35,000, 40,000, 45,000, 50,000, or all polypeptides set forth in the sequence listing (SEQ ID: 1-55471).

[0018] In yet another aspect, the present invention is directed to a method for identifying a peptidic antigenic sequence to a target antibody, which method comprises: a) contacting a target antibody with a polypeptide library comprising at least 10, 100, 1,000, 10,000, 15,000, 20,000, 25,000, 30,000, 35,000, 40,000, 45,000, 50,000, or all isolated polypeptides set forth in the sequence listing (SEQ ID: 1-55471) under conditions suitable for binding between said target antibody with a polypeptide in said polypeptide library, if such polypeptide existing in said polypeptide library; and c) assessing binding between said target antibody and said polypeptide to identify a peptidic antigenic sequence to said target antibody.

[0019] In yet another aspect, the present invention is directed to an isolated antibody that specifically binds to Akt, which isolated antibody specifically binds to an epitope comprised in the amino acid sequence QDGGQKAVKD.

[0020] In yet another aspect, the present invention is directed to an isolated antibody that specifically binds to ERK2, which isolated antibody specifically binds to an epitope comprised in the amino acid sequence HPLGSPGSAS.

[0021] In yet another aspect, the present invention is directed to an isolated antibody that specifically binds to Desmin, which isolated antibody specifically binds to an epitope comprised in the amino acid sequence REIRRYQKST.

[0022] In yet another aspect, the present invention is directed to an isolated antibody that specifically binds to CBL4, which isolated antibody specifically binds to an epitope comprised in the amino acid sequence RSRARKQAYT.

[0023] In yet another aspect, the present invention is directed to an isolated antibody that specifically binds to cholera toxin, which isolated antibody specifically binds to an epitope comprised in the amino acid sequence FEEREQANTA, EYQQAQLEAE or DSSMSMADSE.

[0024] In yet another aspect, the present invention is directed to an isolated antibody that specifically binds to VEGF, which isolated antibody specifically binds to an epitope comprised in the amino acid sequence VLDFILSMGL, AKRKAGTSPR or RNSDFSAGSP.

[0025] In yet another aspect, the present invention is directed to a method for identifying a target associated with a condition, which method comprises: a) contacting a sample obtained from a source that has a condition with an antibody library, and assessing binding, or a lack thereof, between a substance in said sample and an antibody in said antibody library, wherein said antibody library is obtained from a subject or mammal whose immune system has not been stimulated by a target exogenously and said antibody library comprises less than 10⁷ different kinds of antibodies, or said antibody library is obtained by immunizing a subject or mammal with a polypeptide library, said polypeptide library comprising a plurality of isolated polypeptides comprising different, random amino acid sequences, wherein the polypeptides comprise about 5-100 amino acids, preferably, 10-20, 10-30, 10-40, 10-50, 10-60, 10-70, 10-80, 10-90, or 10-100 amino acids, the polypeptides do not comprise Cys, do not comprise 3 or more identical, consecutive amino acids, and/or do not comprise 5 or more identical amino acids, or said antibody library is obtained by immunizing a subject or mammal with a polypeptide library, said polypeptide library comprising at least 10, 100, 1,000, 10,000, 15,000, 20,000, 25,000, 30,000, 35,000, 40,000, 45,000, 50,000, or all isolated polypeptides set forth in the sequence listing (SEQ ID: 1-55471); b) contacting a sample obtained from a source that does not have said condition with the above antibody library, and assessing binding, or a lack thereof, between a substance in said sample and an antibody in said antibody library; and c) identifying a substance as a target associated with said condition when there is a difference in said binding, or a lack thereof, between said substance and said antibody in steps a) and b).

[0026] In yet another aspect, the present invention is directed to a method for identifying a target associated with a condition, which method comprises: a) contacting a sample obtained from a source that has a condition with a polypeptide library, said polypeptide library comprising a plurality of isolated polypeptides comprising different, random amino acid sequences, wherein the polypeptides comprise about 5-100 amino acids, preferably, 10-20, 10-30, 10-40, 10-50, 10-60, 10-70, 10-80, 10-90, or 10-100 amino acids, the polypeptides do not comprise Cys, do not comprise 3 or more identical, consecutive amino acids, and/or do not comprise 5 or more identical amino acids, or a polypeptide library comprising at least 10, 100, 1,000, 10,000, 15,000, 20,000, 25,000, 30,000, 35,000, 40,000, 45,000, 50,000, or all isolated polypeptides set forth in the sequence listing (SEQ ID: 1-55471), and assessing binding, or a lack thereof, between a substance in said sample and a polypeptide in said polypeptide library; b) contacting a sample obtained from a source that does not have said condition with the above polypeptide library, and assessing binding, or a lack thereof, between a substance in said sample and a polypeptide in said polypeptide library; and c) identifying a substance as a target associated with said condition when there is a difference in said binding, or a lack thereof, between said substance and said polypeptide in steps a) and b).

[0027] In yet another aspect, the present invention provides an antibody library, comprising: (1) antibodies against random peptides with 10-20 amino acids, (2) IgG antibodies, secreted by hybridoma cells produced from spleen cells of naïve mammal, (3) IgG antibodies, secreted by hybridoma cells produced from spleen cells of mammal that are immunized by total protein extract, said protein extract is from a complete organism, one or more tissues thereof, and/or one or more cells thereof, (4) IgG antibodies, secreted by stable hybridoma stains established against one or more antigens; or any combination of (1)-(4).

[0028] In one embodiment, said antibody library comprises at least 10,000 different members, and said antibody library has a success rate of at least 85% when used for screening antibodies against a target or protein of interest.

[0029] In one embodiment, the antibody library according to the present invention is in the form of hybridoma cell library.

[0030] In one embodiment, the random peptides of the invention: 1) do not contain cysteine, 2) do not contain 3 or more consecutive same amino acids, 3) do not contain 5 or more same amino acids.

[0031] In one embodiment, the initial score of each random peptide is set as any value, and the random peptides are selected through the following process: 1) for amino acids with potential glycosylation site, each potential glycosylation site reduces one point from the score, 2) each amino acid K or R reduces 4 points from the score; based on the above score, desired amount of peptides with highest score are selected from the top to the bottom.

[0032] In one embodiment, e.g., 10,000 peptides with highest score are selected from the top. In another embodiment, e.g., 15,000, 20,000, 25,000, 30,000, 35,000, 40,000, 45,000, 50,000, 55,000, 60,000, 65,000, 70,000, 75,000, 80,000, 85,000, 90,000, 95,000, or 100,000 peptides with highest score are selected from the top. In one embodiment, the selected random peptides are chemically synthesized.

[0033] In one embodiment, naïve mammal is selected from mouse, rat, and rabbit.

[0034] In one embodiment, the complete organism is selected from Arabidopsis thaliana, mouse, rat, rabbit, cattle, caprine, Drosophila, zebrafish, threadworm, rice, or maize etc.

[0035] In one embodiment, the tissues are selected from blood tissue, Arabidopsis thaliana calyx, threadworm tissues in different developmental stages, or mouse brain tissue.

[0036] In one embodiment, said one or more cells are selected from spleen cells, tumor cells or cell lines, such as human tumor cell lines.

[0037] In one embodiment, the antibodies in the antibody library have been subjected to affinity maturation. In a specific embodiment, the antibody library of the invention can be used to obtain antibodies with high affinity based on relatively small amount of library members.

[0038] In yet another aspect, the invention provides a combination, comprising an antibody library of the invention.

[0039] In another aspect, the invention provides a biochip, comprising an antibody library of the invention.

[0040] In another aspect, the invention provides a method for screening antibody against a protein of interest, comprising using the antibody library of the invention, the combination of the invention, or the biochip of the invention to screen one or more antibodies against said protein of interest.

[0041] In one embodiment, the method of the invention comprises: (a) mixing said protein of interest with antibodies or antibody groups of said antibody library, (b) selecting antibodies or antibody groups capable of binding said protein of interest.

[0042] In one embodiment, the method of the invention comprises: (a) mixing said protein of interest with antibodies or antibody groups of said antibody library, (b) selecting antibodies or antibody groups capable of binding said protein of interest, (c) mixing said protein of interest with antibodies or antibody subgroups of the antibody groups selected in step (b), (d) selecting antibodies or antibody subgroups capable of binding said protein of interest. In another embodiment, the method of the invention further comprises using the antibody subgroups selected in step (d) to repeat steps (c) and (d) until an antibody capable of binding said protein of interest is selected.

[0043] In another embodiment, the method of the invention comprises simultaneous screening against several proteins of interest, comprising: (a) mixing said several proteins of interest with antibodies or antibody groups of said antibody library, (b) selecting antibodies or antibody groups capable of binding said several proteins of interest, (c) mixing each of said several proteins of interest, separately, with the antibodies or antibody groups capable of binding said several proteins of interest selected in step (b), and then respectively selecting antibodies or antibody groups capable of binding each of said several proteins of interest.

[0044] In another embodiment, the method of the invention comprises simultaneous screening against several proteins of interest, comprising: (a) mixing said several proteins of interest with antibodies or antibody groups of said antibody library, (b) selecting antibodies or antibody groups capable of binding said several proteins of interest, (c) mixing each of said several proteins of interest, separately, with the antibodies or antibody groups capable of binding said several proteins of interest selected in step (b), and then respectively selecting antibodies or antibody groups capable of binding each of said several proteins of interest, (d) mixing each of said several proteins of interest, separately, with antibodies or antibody subgroups of the antibody groups selected in step (c) capable of binging the respective protein of interest, (e) respectively selecting antibodies or antibody subgroups capable of binding each of said several proteins of interest. In another embodiment, the method of the invention further comprises using the antibody subgroups selected in step (e) to repeat steps (d) and (e) until antibodies capable of binding each said protein of interest are respectively selected.

[0045] In one embodiment, the method of the invention can be conducted using a high-throughput screening device.

[0046] In one embodiment, the high-throughput screening device used in the method of the invention is a biochip, such as a protein chip, or a lab-on-a-chip (LOC).

[0047] In another aspect, the present invention also relates to use of the antibody library of the invention in the preparation of a device or a kit for screening antibodies against a protein of interest. In one embodiment, the device is a high-throughput screening device. In another embodiment, the high-throughput screening device is a biochip, such as a protein chip, or a lab-on-a-chip (LOC).

[0048] In one embodiment, the protein of interest is a post-translational modified protein or polypeptide, or toxic protein or polypeptide.

### BRIEF DESCRIPTION OF THE DRAWINGS

[0049] FIG. 1 illustrates an assay for phosphorylation at SER473 in AKT protein.

[0050] FIG. 2 illustrates ERK2 protein Western blotting verification.

[0051] FIG. 3 illustrates VEGF protein Western blotting verification.

[0052] FIG. 4 illustrates CBL4 protein Western blotting verification.

[0053] FIG. 5 illustrates Plasmid pHG.

[0054] FIG. 6 illustrates Plasmid pHLDis-VL.

### DETAILED DESCRIPTION OF THE INVENTION

[0055] For clarity of disclosure, and not by way of limitation, the detailed description of the invention is divided into the subsections that follow.

### A. DEFINITIONS

[0056] Unless defined otherwise, all technical and scientific terms used herein have the same meaning as is commonly understood by one of ordinary skill in the art to which this invention belongs. All patents, applications, published applications and other publications referred to herein are incorporated by reference in their entireties. If a definition set forth in this section is contrary to or otherwise inconsistent with a definition set forth in the patents, applications, published applications and other publications that are herein incorporated by reference, the definition set forth in this section prevails over the definition that is incorporated herein by reference.

[0057] As used herein, “a” or “an” means “at least one” or “one or more.”

[0058] The terms “polypeptide”, “oligopeptide”, “peptide” and “protein” are used interchangeably herein to refer to polymers of amino acids of any length, e.g., at least 5, 6, 7, 8, 9, 10, 20, 30, 40, 50, 100, 200, 300, 400, 500, 1,000 or more amino acids. The polymer may be linear or branched, it may comprise modified amino acids, and it may be interrupted by non-amino acids. The terms also encompass an amino acid polymer that has been modified naturally or by intervention; for example, disulfide bond formation, glycosylation, lipidation, acetylation, phosphorylation, or any other manipulation or modification, such as conjugation with a labeling component. Also included within the definition are, for example, polypeptides containing one or more analogs of an amino acid (including, for example, unnatural amino acids, etc.), as well as other modifications known in the art.

[0059] An “antibody” is an immunoglobulin molecule capable of specific binding to a target, such as a carbohydrate, polynucleotide, lipid, polypeptide, etc., through at least one antigen recognition site, located in the variable region of the immunoglobulin molecule, and can be an immunoglobulin of any class, e.g., IgG, IgM, IgA, IgD and IgE. IgY, which is the major antibody type in avian species such as chicken, is also included within the definition. As used herein, the term encompasses not only intact polyclonal or monoclonal antibodies, but also fragments thereof (such as Fab, Fab′, F(ab′)2, Fv), single chain (ScFv), mutants thereof, naturally occurring variants, fusion proteins comprising an antibody portion with an antigen recognition site of the required specificity, humanized antibodies, chimeric antibodies, and any other modified configuration of the immunoglobulin molecule that comprises an antigen recognition site of the required specificity.

[0060] As used herein, the term “specific binding” refers to the specificity of an antibody such that it preferentially binds to a target antigen, such as a polypeptide antigen. Recognition by an antibody of a particular target in the presence of other potential interfering substances is one characteristic of such binding. Preferably, antibodies or antibody fragments that are specific for or bind specifically to a target antigen bind to the target antigen with higher affinity than binding to other non-target substances. Also preferably, antibodies or antibody fragments that are specific for or bind specifically to a target antigen avoid binding to a significant percentage of non-target substances, e.g., non-target substances present in a testing sample. In some embodiments, antibodies or antibody fragments of the present disclosure avoid binding greater than about 90% of non-target substances, although higher percentages are clearly contemplated and preferred. For example, antibodies or antibody fragments of the present disclosure avoid binding about 91%, about 92%, about 93%, about 94%, about 95%, about 96%, about 97%, about 98%, about 99%, and about 99% or more of non-target substances. In other embodiments, antibodies or antibody fragments of the present disclosure avoid binding greater than about 10%, 20%, 30%, 40%, 50%, 60%, or 70%, or greater than about 75%, or greater than about 80%, or greater than about 85% of non-target substances.

[0061] As used herein, the term “specific binding” also refers to the specificity of a polypeptide such that it preferentially binds to a target antibody, such as a target antibody in a testing sample. Recognition by a polypeptide of a particular target antibody in the presence of other antibodies or substances is one characteristic of such binding. Preferably, a polypeptide that is specific for or binds specifically to an antibody binds to the target antibody with higher affinity than binding to other non-target antibodies or substances. Also preferably, a polypeptide that is specific for or binds specifically to a target antibody avoids binding to a significant percentage of non-target antibodies or substances, e.g., non-target antibodies present in a testing sample. In some embodiments, polypeptides of the present disclosure avoid binding greater than about 90% of non-target antibodies or substances, although higher percentages are clearly contemplated and preferred. For example, polypeptides of the present disclosure avoid binding about 91%, about 92%, about 93%, about 94%, about 95%, about 96%, about 97%, about 98%, about 99%, and about 99% or more of non-target antibodies or substances. In other embodiments, polypeptides of the present disclosure avoid binding greater than about 10%, 20%, 30%, 40%, 50%, 60%, or 70%, or greater than about 75%, or greater than about 80%, or greater than about 85% of non-target antibodies or substances.

[0062] As used herein, the term “antigen” refers to a target molecule that is specifically bound by an antibody through its antigen recognition site. The antigen may be monovalent or polyvalent, i.e., it may have one or more epitopes recognized by one or more antibodies. Examples of kinds of antigens that can be recognized by antibodies include polypeptides, oligosaccharides, glycoproteins, polynucleotides, lipids, etc.

[0063] The terms “polynucleotide,” “oligonucleotide,” “nucleic acid” and “nucleic acid molecule” are used interchangeably herein to refer to a polymeric form of nucleotides of any length, e.g., at least 8, 9, 10, 20, 30, 40, 50, 100, 200, 300, 400, 500, 1,000 or more nucleotides, and may comprise ribonucleotides, deoxyribonucleotides, analogs thereof, or mixtures thereof. This term refers only to the primary structure of the molecule. Thus, the term includes triple-, double- and single-stranded deoxyribonucleic acid (“DNA”), as well as triple-, double- and single-stranded ribonucleic acid (“RNA”). It also includes modified, for example by alkylation, and/or by capping, and unmodified forms of the polynucleotide. More particularly, the terms “polynucleotide,” “oligonucleotide,” “nucleic acid” and “nucleic acid molecule” include polydeoxyribonucleotides (containing 2-deoxy-D-ribose), polyribonucleotides (containing D-ribose), including tRNA, rRNA, hRNA, and mRNA, whether spliced or unspliced, any other type of polynucleotide which is an N- or C-glycoside of a purine or pyrimidine base, and other polymers containing nonnucleotidic backbones, for example, polyamide (e.g., peptide nucleic acids (“PNAs”)) and polymorpholino (commercially available from the Anti-Virals, Inc., Corvallis, Oreg., as Neugene) polymers, and other synthetic sequence-specific nucleic acid polymers providing that the polymers contain nucleobases in a configuration which allows for base pairing and base stacking, such as is found in DNA and RNA. Thus, these terms include, for example, 3′-deoxy-2′,5′-DNA, oligodeoxyribonucleotide N3′ to P5′ phosphoramidates, 2′-O-alkyl-substituted RNA, hybrids between DNA and RNA or between PNAs and DNA or RNA, and also include known types of modifications, for example, labels, alkylation, “caps,” substitution of one or more of the nucleotides with an analog, internucleotide modifications such as, for example, those with uncharged linkages (e.g., methyl phosphonates, phosphotriesters, phosphoramidates, carbamates, etc.), with negatively charged linkages (e.g., phosphorothioates, phosphorodithioates, etc.), and with positively charged linkages (e.g., aminoalkylphosphoramidates, aminoalkylphosphotriesters), those containing pendant moieties, such as, for example, proteins (including enzymes (e.g. nucleases), toxins, antibodies, signal peptides, poly-L-lysine, etc.), those with intercalators (e.g., acridine, psoralen, etc.), those containing chelates (of, e.g., metals, radioactive metals, boron, oxidative metals, etc.), those containing alkylators, those with modified linkages (e.g., alpha anomeric nucleic acids, etc.), as well as unmodified forms of the polynucleotide or oligonucleotide.

[0064] It will be appreciated that, as used herein, the terms “nucleoside” and “nucleotide” will include those moieties which contain not only the known purine and pyrimidine bases, but also other heterocyclic bases which have been modified. Such modifications include methylated purines or pyrimidines, acylated purines or pyrimidines, or other heterocycles. Modified nucleosides or nucleotides can also include modifications on the sugar moiety, e.g., wherein one or more of the hydroxyl groups are replaced with halogen, aliphatic groups, or are functionalized as ethers, amines, or the like. The term “nucleotidic unit” is intended to encompass nucleosides and nucleotides.

[0065] As used herein, “biological sample” refers to any sample obtained from a living or viral source or other source of macromolecules and biomolecules, and includes any cell type or tissue of a subject from which nucleic acid or protein or other macromolecule can be obtained. The biological sample can be a sample obtained directly from a biological source or a sample that is processed. For example, isolated nucleic acids that are amplified constitute a biological sample. Biological samples include, but are not limited to, body fluids, such as blood, plasma, serum, cerebrospinal fluid, synovial fluid, urine and sweat, tissue and organ samples from animals and plants and processed samples derived therefrom. Also included are soil and water samples and other environmental samples, viruses, bacteria, fungi, algae, protozoa and components thereof.

[0066] As used herein the term “assessing” is intended to include quantitative and qualitative determination in the sense of obtaining an absolute value for the amount or concentration of the analyte present in the sample, and also of obtaining an index, ratio, percentage, visual or other value indicative of the level of analyte in the sample. Assessment may be direct or indirect and the chemical species actually detected need not of course be the analyte itself but may for example be a derivative thereof or some further substance.

[0067] As used herein, “serum” refers to the fluid portion of the blood obtained after removal of the fibrin clot and blood cells, distinguished from the plasma in circulating blood.

[0068] As used herein, “plasma” refers to the fluid, noncellular portion of the blood, distinguished from the serum obtained after coagulation.

[0069] As used herein, “production by recombinant means” refers to production methods that use recombinant nucleic acid methods that rely on well known methods of molecular biology for expressing proteins encoded by cloned nucleic acids.

[0070] As used herein, “fluid” refers to any composition that can flow. Fluids thus encompass compositions that are in the form of semi-solids, pastes, solutions, aqueous mixtures, gels, lotions, creams and other such compositions.

[0071] As used herein, “sample” refers to anything which may contain an analyte for which an analyte assay is desired. The sample may be a biological sample, such as a biological fluid or a biological tissue. Examples of biological fluids include urine, blood, plasma, serum, saliva, semen, stool, sputum, cerebral spinal fluid, tears, mucus, amniotic fluid or the like. Biological tissues are aggregates of cells, usually of a particular kind together with their intercellular substance that form one of the structural materials of a human, animal, plant, bacterial, fungal or viral structure, including connective, epithelium, muscle and nerve tissues. Examples of biological tissues also include organs, tumors, lymph nodes, arteries and individual cell(s).

[0072] As used herein, “disease or disorder” refers to a pathological condition in an organism resulting from, e.g., infection or genetic defect, and characterized by identifiable symptoms.

[0073] As used herein, “chip” refers to a solid substrate with a plurality of one-, two- or three-dimensional micro structures or micro-scale structures on which certain processes, such as physical, chemical, biological, biophysical or biochemical processes, etc., can be carried out. The micro structures or micro-scale structures such as, channels and wells, electrode elements, electromagnetic elements, are incorporated into, fabricated on or otherwise attached to the substrate for facilitating physical, biophysical, biological, biochemical, chemical reactions or processes on the chip. The chip may be thin in one dimension and may have various shapes in other dimensions, for example, a rectangle, a circle, an ellipse, or other irregular shapes. The size of the major surface of chips of the present invention can vary considerably, e.g., from about 1 mm² to about 0.25 m². Preferably, the size of the chips is from about 4 mm² to about 25 cm² with a characteristic dimension from about 1 mm to about 5 cm. The chip surfaces may be flat, or not flat. The chips with non-flat surfaces may include channels or wells fabricated on the surfaces.

[0074] It is understood that aspects and embodiments of the invention described herein include “consisting” and/or “consisting essentially of” aspects and embodiments.

[0075] Throughout this disclosure, various aspects of this invention are presented in a range format. It should be understood that the description in range format is merely for convenience and brevity and should not be construed as an inflexible limitation on the scope of the invention. Accordingly, the description of a range should be considered to have specifically disclosed all the possible sub-ranges as well as individual numerical values within that range. For example, description of a range such as from 1 to 6 should be considered to have specifically disclosed sub-ranges such as from 1 to 3, from 1 to 4, from 1 to 5, from 2 to 4, from 2 to 6, from 3 to 6 etc., as well as individual numbers within that range, for example, 1, 2, 3, 4, 5, and 6. This applies regardless of the breadth of the range.

[0076] Other objects, advantages and features of the present invention will become apparent from the following specification taken in conjunction with the accompanying drawings.

### B. METHODS FOR IDENTIFYING AN ANTIBODY TO A TARGET

[0077] In one aspect, the present invention is directed to a method for identifying an antibody to a target, which method comprises: a) providing for an antibody library obtained from a subject, e.g., a mammal, wherein said antibody library comprises less than 10⁷ different kinds of antibodies; b) contacting said target with said antibody library under conditions suitable for binding between said target with an antibody in said antibody library, if such antibody existing in said antibody library; and c) assessing binding between said target and said antibody to identify said antibody as an antibody to said target.

[0078] Any suitable antibody library can be used in the present methods. In some embodiments, the antibody library is obtained from a subject or mammal whose immune system has not been stimulated by a target exogenously. Typically, the subject or mammal has not been immunized, or at least not actively immunized, with the target in an isolated to purified form. In some examples, the subject or mammal has not been immunized, or at least not actively immunized, with a composition that contains the target. In other examples, the subject or mammal has not been immunized, or at least not actively immunized, with a composition wherein the target constitutes a significant portion or percentage thereof. For instances, if the target is a particular polypeptide, the subject or mammal may have been immunized with a cell, tissue or organism that contains the target polypeptide. However, because the cell, tissue or organism does not contain a significant amount of the target polypeptide, or target polypeptide does not constitute a significant portion or percentage of the cell, tissue or organism, the subject or mammal is still considered as not having stimulated by the target polypeptide exogenously.

[0079] In some embodiments, the amino acid sequences of antibodies in the antibody library are unknown priori. For example, the antibodies in the antibody library can be obtained from a host through proper immunization, and the amino acid sequences of antibodies remain unknown. In other examples, the antibodies in the antibody library can be obtained initially from a host through proper immunization. Once the antibodies are obtained, the amino acid sequences of antibodies can be determined by any suitable methods, e.g., protein sequencing. In this case, the amino acid sequences of antibodies in the antibody library are unknown priori because the antibodies are not synthesized de novo but are produced from the immunization with target libraries. In contrast, Mao et al., Nature, 28(11):1195-1178 (2010) describes de novo synthesis of an antibody library and the amino acid sequences of antibodies in its antibody library are known priori.

[0080] In some embodiments, the antibodies in the antibody library comprise intact (or complete) antibody molecules. For example, if the antibodies in the antibody library are obtained from a mammal, the antibodies in the antibody library can comprise intact (or complete) structure of IgG, IgM, IgA, IgD and/or IgE molecules. If the antibodies in the antibody library are obtained from an avian species such as chicken, the antibodies in the antibody library can comprise intact (or complete) structure of IgY molecules.

[0081] The antibody library can be produced by any suitable methods using any suitable immunogens. In some embodiments, the antibody library is produced by a mammal immunized with a plurality of polypeptides comprising different, random amino acid sequences. The polypeptides can comprise any suitable number of amino acids. In some embodiments, the polypeptides comprise about 5-100 amino acids, preferably, 10-20, 10-30, 10-40, 10-50, 10-60, 10-70, 10-80, 10-90, or 10-100, amino acids. The polypeptides can comprise any suitable types and/or sequences of amino acids. In some embodiments, the polypeptides do not comprise Cys, do not comprise 3 or more identical, consecutive amino acids, and/or do not comprise 5 or more identical amino acids.

[0082] The polypeptides used to produce the antibody library can be selected by any suitable standards or methods. In some embodiments, the polypeptides are selected by the standards: a) assigning an initial, identical score to all candidate polypeptides; b) reducing the initial score by 1 point for each potential glycosylation site in a candidate polypeptide; c) reducing the initial score by 4 points for each Lys or Arg residue in a candidate polypeptide; and d) selecting candidate polypeptide with highest possible scores for the desired number of polypeptides for immunizing the mammal.

[0083] Any suitable numbers of the polypeptides can be used to immunize mammals to produce the antibody library. In some embodiments, at least 10,000 polypeptides are used to immunize mammals to produce the antibody library. In some embodiments, at least 10,000, 15,000, 20,000, 25,000, 30,000, 35,000, 40,000, 45,000, 50,000, 55,000, 60,000, 65,000, 70,000, 75,000, 80,000, 85,000, 90,000, 95,000, or 100,000 different polypeptides are used to immunize mammals to produce the antibody library. Typically, a single mammal is immunized with smaller number of the polypeptides and multiple mammals are immunized to cover the intended numbers of immunization. In some embodiments, a single mammal can be immunized with about 1, 2, 3, 4, 5, 10, 15, 20 25 or 25 different polypeptides. For example, if a single mammal is immunized with 10 different polypeptides and 100,000 different polypeptides are intended to be used, 10,000 mammals can be immunized to cover the intended use of the 100,000 different polypeptides.

[0084] The polypeptides can comprise any suitable number of amino acids. In some embodiments, the polypeptides can comprise 5-100 amino acids, preferably, 10-20, 10-30, 10-40, 10-50, 10-60, 10-70, 10-80, 10-90, or 10-100, amino acids. In some embodiments, the polypeptides can comprise about 10, 11, 12, 13, 14, 15, 16, 17, 18, 19 or 20 amino acids. The polypeptides can comprise any suitable types of amino acids. In some embodiments, the polypeptides can comprise natural and/or non-natural amino acids. The polypeptides can be produced by any suitable methods. In some embodiments, the polypeptides are produced by chemical synthesis and/or recombinant production.

[0085] In some embodiments, the polypeptides are selected from candidate polypeptides by the following standard: a) each of the candidate polypeptides comprises about 10 amino acids that do not include Cys; b) each of the candidate polypeptides does not comprise 3 or more identical, consecutive amino acids, c) each of the candidate polypeptides does not comprise 5 or more identical amino acids; d) each of the candidate polypeptides is assigned an initial score of 10; e) reducing the initial score by 1 point for each potential glycosylation site in a candidate polypeptide; f) reducing the initial score by 4 points for each Lys or Arg residue in a candidate polypeptide; and g) selecting at least 10,000 candidate polypeptides with the highest scores.

[0086] Any suitable subject or mammal can be used to produce the antibody library. In some embodiments, the antibody library is produced by a subject or mammal whose immune system has not been purposely stimulated to produce antibody to the intended target. In some embodiments, the mammal is a mouse, a rat, a rabbit, a goat, a bovine species such as an ox, cow, or buffalo, a canine species such as a dog, a porcine or swine species such as a pig, or a horse. In some embodiments, the mammal can be a human. Other non-mammal subjects, e.g., an avian species such as a chicken (Gallus), can also be used to produce the antibody library. Other exemplary avian species includes a quail (Coturnix), a turkey (Meleagris gallopavo), a duck, a goose and a Japanese quail (Coturnix japonica).

[0087] In some embodiments, the antibody library can be produced by immunizing a subject or mammal with an intact organism, an tissue, an cell or a whole protein extract of the organism, tissue or cell, wherein the intact organism, tissue, cell is immunologically distinct from the target. For example, the target may not be, or may not be expected to be, comprised in the intact organism, tissue, cell or a whole protein extract of the organism, tissue or cell, used as the immuogens. In another example, the target may be comprised in the intact organism, tissue, cell or a whole protein extract of the organism, tissue or cell used as the immuogens, but only constitute a small or insignificant portion of the intact organism, tissue, cell or a whole protein extract of the organism, tissue or cell.

[0088] Any suitable intact organism can be used. In some embodiments, an Arabidopsis thaliana, a mouse, a rat, a rabbit, a bovine, a goat, a Drosophila, a zebrafish, a Caenorhabditis elegans, rice or corn can be used.

[0089] Any suitable tissue can be used. In some embodiments, blood, Arabidopsis thaliana bud, Caenorhabditis elegans tissues at different developmental stages, or a mouse brain tissue can be used.

[0090] Any suitable cell can be used. In some embodiments, a spleen cell, a tumor cell or a cell line, e.g., a human tumor cell line, can be used.

[0091] In some embodiments, the antibody library is produced by a mammal immunized with an antigen that is immunologically distinct from the target.

[0092] In some embodiments, the antibody library: a) is produced by a mammal immunized with a plurality of polypeptides comprising different, random amino acid sequences; b) is produced by a mammal whose immune system has not been purposely stimulated; c) is produced by a mammal immunized with an intact organism, an tissue, an cell or a whole protein extract of the organism, tissue or cell; d) is produced by a mammal immunized with an antigen that is immunologically distinct from the target; or e) a combination of any of a)-d).

[0093] The antibody library can comprises any suitable types of antibodies. For example, the antibody library can comprise polyclonal antibodies, monoclonal antibodies and/or hybridomas that produce monoclonal antibodies. The antibodies in the antibody library can be isolated, purified, treated and/or modified after they obtained from the subject or mammal.

[0094] In some embodiments, the antibodies in the antibody library are affinity matured. In immunology, affinity maturation is the process by which B cells produce antibodies with increased affinity for antigen during the course of an immune response. With repeated exposures to the same antigen, a host will produce antibodies of successively greater affinities. A secondary response can elicit antibodies with several log fold greater affinity than in a primary response. Like the natural prototype, the in vitro affinity maturation is based on the principles of mutation and selection. The in vitro affinity maturation has successfully been used to optimize antibodies, antibody fragments or other peptide molecules like antibody mimetics. Random mutations inside the CDRs can be introduced using any suitable methods, e.g., radiation, chemical mutagens or error-prone PCR. In addition, the genetical diversity can be increased by chain shuffling. Two or three rounds of mutation and selection using display methods like phage display often results in antibodies with affinities in the low nanomolar range. See e.g., Roskos et al., (2007). Stefan Dübel. ed. Handbook of Therapeutic Antibodies. Weinheim: Wiley-VCH. pp. 145-169.

[0095] The antibody library can comprise any suitable number of different antibodies. In some embodiments, the antibody library comprises at least 10,000, 15,000, 20,000, 25,000, 30,000, 35,000, 40,000, 45,000, 50,000, 55,000, 60,000, 65,000, 70,000, 75,000, 80,000, 85,000, 90,000, 95,000, or 100,000 different antibodies.

[0096] The antibodies in the antibody library can be stored, transported and/or used in any suitable form for format. In some embodiments, at least some of the antibodies are immobilized on a solid surface. In some embodiments, at least 1%, 5%, 10%, 20%, 30%, 40%, 50%, 60%, 70%, 80%, 90%, 95%, or all of the antibodies are immobilized on a solid surface. Any suitable solid surface can be used. For example, the solid surface can be a part of a tube, e.g., a test tube, a well on a plate, e.g., a microtiter plate, a bead, or a biochip.

[0097] The antibody library can be screened in any suitable manner or format. For example, hybridoma cells can be obtained and antibody genes can be cloned from the hybridoma cells. Antibody molecules can be expressed from the encoding genes. Antibody molecules can be placed in a suitable assay format, e.g., an ELISA plate, for the screening. In another example, ascites or purified antibodies can be used in the screening. In still another example, hybridoma cells can be directly cultured and the supernatants can be used in the screening.

[0098] The antibody library can be screened in any suitable assay format. In some embodiments, the target-antibody complex may be assessed by a format such as enzyme-linked immunosorbent assay (ELISA), immunoblotting, immunoprecipitation, radioimmunoassay (RIA), immunostaining, latex agglutination, indirect hemagglutination assay (IHA), complement fixation, indirect immunofluorescent assay (IFA), nephelometry, flow cytometry assay, plasmon resonance assay, chemiluminescence assay, lateral flow immunoassay, u-capture assay, inhibition assay or avidity assay. In some embodiments, the target-antibody complex may be assessed in a homogeneous or a heterogeneous assay format.

[0099] The target can be any suitable substances. Exemplary target includes a cell, cellular organelle, a viruse, a particle, a molecule, or an aggregate or complex thereof, or an aggregate or complex of molecules. Exemplary cell can be an organic or inorganic molecule. Exemplary organic molecule can be an amino acid, a peptide, a protein, e.g., an antibody or receptor, a nucleoside, a nucleotide, an oligonucleotide, a nucleic acid, e.g., DNA or RNA, a vitamin, a monosaccharide, an oligosaccharide, a carbohydrate, a lipid, or a complex thereof. In some embodiments, the target is a polypeptide. Exemplary polypeptide includes a linear polypeptide, a soluble polypeptide, a modified polypeptide, a toxic polypeptide or a polypeptide that causes autoimmunity in a subject.

[0100] The target can be contacted with the antibodies in the antibody library in any suitable manner or order. For example, the target can be contacted with all antibodies in the antibody library at once or at the same time. Alternatively, the target can be contacted with portions of the antibodies in the antibody library, either in parallel or sequentially.

[0101] In some embodiments, the target is contacted with a subgroup of antibodies in the antibody library to determine if the subgroup of antibodies comprises an antibody that specifically binds to the target. Once it is determined that the subgroup of antibodies comprises an antibody that specifically binds to the target, the method can further comprises the steps: a) dividing the subgroup of antibodies into a smaller subgroup of antibodies; and b) contacting the target to determine if the smaller subgroup of antibodies comprises an antibody that specifically binds to the target. In some embodiments, the steps a) and b) can be repeated until an individual antibody that specifically binds to the target is identified.

[0102] The present method can be used to identify antibodies that specifically bind to any suitable number of target. In some embodiments, the present method can be used to identify antibodies that specifically bind to a single target. In some embodiments, the present method can be used to identify antibodies that specifically bind to a plurality of the targets, e.g., 2, 3, 4, 5, 6, 7, 8, 9, 10, 20, 30, 40, 50, 60, 70, 80, 90, 100 or more targets.

[0103] In some embodiments, the antibody library is contacted with the plurality of the targets to identify antibodies or groups of antibodies that specifically bind to the plurality of the targets. In some embodiments, the method can further comprise contacting each of the plurality of the targets with the identified antibodies or groups of antibodies to identify antibodies or groups of antibodies that specifically bind to each of the plurality of the targets.

[0104] In some embodiments, the method can further comprise: a) dividing the identified antibodies or groups of antibodies into smaller subgroups of antibodies; and b) contacting each of the plurality of the targets with the smaller subgroups of antibodies to determine if the smaller subgroup of antibodies comprises an antibody that specifically binds to each of the plurality of the targets. In some embodiments, the steps a) and b) can be repeated until an individual antibody that specifically binds to each of the plurality of the targets is identified.

[0105] The present method can be conducted to achieve any suitable, intended or desired successful rate for identifying an antibody that specifically binds to the intended target. Generally, the successful rate depends on one or more factors, such as the type of target, the number of the target, the size of the antibody library, the types and quality of the antibodies in the antibody library, the procedures for producing the antibodies or the antibody library, and screening assay formats, etc. In some embodiments, the successful rate for identifying an antibody that specifically binds to the target is at least 10%, 20%, 30%, 40%, 50%, 60%, 70%, 80%, 90%, 95%, 96%, 97%, 98%, 99%, or 100%. In some embodiments, the antibody library comprises at least 10,000 different antibodies and the successful rate for identifying an antibody that specifically binds to the target is at least 80%, 85%, 90%, 95%, 96%, 97%, 98%, 99%, or 100%.

[0106] Although an antibody library obtained from a mammal is used above to describe or illustrate the method for identifying an antibody to a target, an antibody library obtained from a non-mammal subject, e.g., an avian species such as a chicken, can also be used in the present methods.

[0107] In another aspect, the present invention is directed to an antibody that specifically binds to the target, wherein the antibody is identified by the above method.

### C. ANTIBODIES, ANTIBODY LIBRARIES, POLYPEPTIDE, POLYPEPTIDE LIBRARIES AND USES THEREOF

[0108] In still another aspect, the present invention is directed to an antibody library for identifying an antibody to a target, which antibody library is obtained from a subject or an mammal and said antibody library comprises less than 10⁷ different kinds of antibodies. In some embodiments, the antibody library is obtained from a subject or an mammal whose immune system has not been stimulated by a target exogenously.

[0109] The antibody library can be produced by any suitable methods. In some embodiments, the antibody library: a) is produced by a mammal immunized with a plurality of polypeptides comprising different, random amino acid sequences; b) is produced by a mammal whose immune system has not been purposely stimulated; c) is produced by a mammal immunized with an intact organism, an tissue, an cell or a whole protein extract of the organism, tissue or cell; d) is produced by a mammal immunized with an antigen that is immunologically distinct from the target; or e) a combination of any of a)-d).

[0110] The antibody library can comprise any suitable number of antibodies. In some embodiments, the antibody library comprises at least 10,000, 15,000, 20,000, 25,000, 30,000, 35,000, 40,000, 45,000, 50,000, 55,000, 60,000, 65,000, 70,000, 75,000, 80,000, 85,000, 90,000, 95,000, or 100,000 different antibodies.

[0111] The antibody library can comprise any suitable types of antibodies. In some embodiments, the antibody library comprises polyclonal antibodies, monoclonal antibodies and/or hybridomas that produce monoclonal antibodies. In some embodiments, the amino acid sequences of antibodies in the antibody library are unknown priori. In some embodiments, the antibodies in the antibody library comprise intact (or complete) antibody molecules.

[0112] The antibodies in the antibody library can be isolated, purified, treated and/or modified after they obtained from the subject or mammal. In some embodiments, the antibodies in the antibody library are affinity matured.

[0113] In yet another aspect, the present invention is directed to a polypeptide library, which polypeptide library comprises a plurality of isolated polypeptides comprising different, random amino acid sequences, wherein the polypeptides comprise about 5-100 amino acids, preferably, 10-20, 10-30, 10-40, 10-50, 10-60, 10-70, 10-80, 10-90, or 10-100 amino acids, the polypeptides do not comprise Cys, do not comprise 3 or more identical, consecutive amino acids, and/or do not comprise 5 or more identical amino acids. In some embodiments, the polypeptides can comprise about 10, 11, 12, 13, 14, 15, 16, 17, 18, 19 or 20 amino acids.

[0114] The polypeptides can be selected by any suitable standards or methods. In some embodiments, the polypeptides are selected by the standards: a) assigning an initial, identical score to all candidate polypeptides; b) reducing the initial score by 1 point for each potential glycosylation site in a candidate polypeptide; c) reducing the initial score by 4 points for each Lys or Arg residue in a candidate polypeptide; and d) selecting candidate polypeptide with highest possible scores for the desired number of polypeptides.

[0115] The polypeptide library can comprise any suitable number of polypeptides. In some embodiments, the polypeptide library comprises at least 10, 100, 1,000, 10,000, 15,000, 20,000, 25,000, 30,000, 35,000, 40,000, 45,000, 50,000, 60,000, 70,000, 80,000, 90,000, 100,000 or more different polypeptides. In some embodiments, the polypeptide library comprises at least 10,000 different polypeptides.

[0116] The polypeptides can comprise any suitable types of amino acids. In some embodiments, the polypeptides can comprise natural and/or non-natural amino acids. The polypeptides can be produced by any suitable methods. In some embodiments, the polypeptides are produced by chemical synthesis and/or recombinant production.

[0117] The polypeptide library can be used for any suitable purposes. For example, the polypeptide library can be used to produce an antibody library.

[0118] In yet another aspect, the present invention is directed to a method for producing an antibody library, which method comprises: a) immunizing a subject with a polypeptide library as disclosed above; and b) recovering antibodies from said subject.

[0119] The antibodies in the antibody library can be isolated, purified, treated and/or modified after they obtained from the subject or mammal. In some embodiments, the antibodies in the antibody library are affinity matured. In some embodiments, the present method can further comprise affinity purifying antibodies recovered from the subject using a polypeptide library as disclosed above.

[0120] The subject can be immunized with the polypeptides in the library in any suitable manner or order. Typically, a single subject or mammal is immunized with smaller number of the polypeptides and multiple mammals are immunized to cover the intended numbers of immunization. In some embodiments, a single subject or mammal can be immunized with about 1, 2, 3, 4, 5, 10, 15, 20 25 or 25 different polypeptides. For example, if a single mammal is immunized with 10 different polypeptides and 100,000 different polypeptides are intended to be used, 10,000 mammals can be immunized to cover the intended use of the 100,000 different polypeptides. In some embodiments, a subject or mammal is immunized with a group of about 5-20 polypeptides, e.g., 5, 6, 7, 8, 9, 10, 11, 12, 13, 14, 15, 16, 17, 18, 19 or different polypeptides, in the library, and multiple subjects are immunized with multiple groups of about 5-20 polypeptides in the library, and the multiple groups of about 5-20 polypeptides encompass all the polypeptides in the library.

[0121] In yet another aspect, the present invention is directed to an antibody library, which is produced by the present methods.

[0122] The antibody library can comprise any suitable number of antibodies. In some embodiments, the antibody library comprises at least 10,000, 15,000, 20,000, 25,000, 30,000, 35,000, 40,000, 45,000, 50,000, 55,000, 60,000, 65,000, 70,000, 75,000, 80,000, 85,000, 90,000, 95,000, or 100,000 different antibodies. The antibody library can comprise any suitable types of antibodies. In some embodiments, the antibody library comprises polyclonal antibodies, monoclonal antibodies and/or hybridomas that produce monoclonal antibodies. In some embodiments, the amino acid sequences of antibodies in the antibody library are unknown priori. In some embodiments, the antibodies in the antibody library comprise intact (or complete) antibody molecules.

[0123] The antibodies in the antibody library can be isolated, purified, treated and/or modified after they obtained from the subject or mammal. In some embodiments, the antibodies in the antibody library are affinity matured.

[0124] In yet another aspect, the present invention is directed to an isolated polypeptide set forth in the sequence listing (SEQ ID: 1-55471). In some embodiments, the present invention is directed to at least 2, 3, 4, 5, 6, 7, 8, or 9 isolated polypeptides set forth in the sequence listing (SEQ ID: 1-55471). The isolated polypeptide(s) can be in any suitable form of composition, combination, complex, kit or article of manufactures. The isolated polypeptide(s) can be made by any suitable methods, e.g., chemical synthesis, recombinant production or a combination thereof.

[0125] In yet another aspect, the present invention is directed to a polypeptide library, which polypeptide library comprises at least 10, 100, 1,000, 10,000, 15,000, 20,000, 25,000, 30,000, 35,000, 40,000, 45,000, 50,000, or all isolated polypeptides set forth in the sequence listing (SEQ ID: 1-55471).

[0126] The polypeptide library can be used for any suitable purposes. For example, the polypeptide library can be used to produce an antibody library.

[0127] In yet another aspect, the present invention is directed to a method for producing an antibody library, which method comprises a) immunizing a subject with the polypeptide library as disclosed above; and b) recovering antibodies from said subject.

[0128] The antibodies in the antibody library can be isolated, purified, treated and/or modified after they obtained from the subject or mammal. In some embodiments, the antibodies in the antibody library are affinity matured. In some embodiments, the present method can further comprise affinity purifying antibodies recovered from the subject using a polypeptide library as disclosed above.

[0129] In yet another aspect, the present invention is directed to an antibody library, which is produced by the method as disclosed above.

[0130] The antibody library can comprise any suitable number of antibodies. In some embodiments, the antibody library comprises at least 10,000, 15,000, 20,000, 25,000, 30,000, 35,000, 40,000, 45,000, 50,000, 55,000, 60,000, 65,000, 70,000, 75,000, 80,000, 85,000, 90,000, 95,000, or 100,000 different antibodies.

[0131] The antibody library can comprise any suitable types of antibodies. In some embodiments, the antibody library comprises polyclonal antibodies, monoclonal antibodies and/or hybridomas that produce monoclonal antibodies. In some embodiments, the amino acid sequences of antibodies in the antibody library are unknown priori. In some embodiments, the antibodies in the antibody library comprise intact (or complete) antibody molecules.

[0132] The antibodies in the antibody library can be isolated, purified, treated and/or modified after they obtained from the subject or mammal. In some embodiments, the antibodies in the antibody library are affinity matured.

[0133] In yet another aspect, the present invention is directed to an isolated antibody that specifically binds to a polypeptide set forth in the sequence listing (SEQ ID: 1-55471). In some embodiments, the present invention is directed to isolated antibodies that specifically bind to at least 2, 3, 4, 5, 6, 7, 8, or 9 isolated polypeptides set forth in the sequence listing (SEQ ID: 1-55471). The isolated antibody or antibodies can be in any suitable form of composition, combination, complex, kit or article of manufactures. The isolated antibody or antibodies can be made by any suitable methods, e.g., immunization of a host, various display technology, e.g., phage display technology, hybridoma technology, recombinant production or a combination thereof.

[0134] In yet another aspect, the present invention is directed to an antibody library, which antibody library comprises antibodies that specifically bind to at least 10, 100, 1,000, 10,000, 15,000, 20,000, 25,000, 30,000, 35,000, 40,000, 45,000, 50,000, or all polypeptides set forth in the sequence listing (SEQ ID: 1-55471).

[0135] The antibody library can comprise any suitable types of antibodies. In some embodiments, the antibody library comprises polyclonal antibodies, monoclonal antibodies and/or hybridomas that produce monoclonal antibodies. In some embodiments, the amino acid sequences of antibodies in the antibody library are unknown priori. In some embodiments, the antibodies in the antibody library comprise intact (or complete) antibody molecules.

[0136] The antibodies in the antibody library can be isolated, purified, treated and/or modified after they obtained from the subject or mammal. In some embodiments, the antibodies in the antibody library are affinity matured.

### D. METHODS FOR IDENTIFYING A PEPTIDIC ANTIGENIC SEQUENCE TO A TARGET ANTIBODY

[0137] In yet another aspect, the present invention is directed to a method for identifying a peptidic antigenic sequence to a target antibody, which method comprises: a) contacting a target antibody with a polypeptide library comprising at least 10, 100, 1,000, 10,000, 15,000, 20,000, 25,000, 30,000, 35,000, 40,000, 45,000, 50,000, or all isolated polypeptides set forth in the sequence listing (SEQ ID: 1-55471) under conditions suitable for binding between said target antibody with a polypeptide in said polypeptide library, if such polypeptide existing in said polypeptide library; and c) assessing binding between said target antibody and said polypeptide to identify a peptidic antigenic sequence to said target antibody.

[0138] The target antibody can be contacted with the polypeptides in the polypeptide library in any suitable manner or order. For example, the target antibody can be contacted with all polypeptides in the polypeptide library at once or at the same time. Alternatively, the target antibody can be contacted with portions of the polypeptides in the polypeptide library, either in parallel or sequentially.

[0139] In some embodiments, the target antibody is contacted with a subgroup of polypeptides in the polypeptide library to determine if the subgroup of polypeptides comprises a polypeptide that specifically binds to the target antibody. Once it is determined that the subgroup of polypeptides comprises a polypeptide that specifically binds to the target antibody, and method can further comprise: a) dividing the subgroup of polypeptides into a smaller subgroup of polypeptides; and b) contacting the target antibody with the smaller subgroup of polypeptides to determine if the smaller subgroup of polypeptides comprises a polypeptide that specifically binds to the target antibody. The steps a) and b) can be repeated until an individual polypeptide that specifically binds to the target antibody is identified.

[0140] The present methods can be used to identify a peptidic antigenic sequence to a single target antibody. The present methods can also be used to identify peptidic antigenic sequences to a plurality of target antibodies.

[0141] Once the peptidic antigenic sequence to a target antibody is identified, the present methods can comprise further post-identification steps. In some embodiments, the method can further comprise isolating the polypeptide that specifically binds to the target antibody. In some embodiments, the method can further comprise determining amino acid sequence of the isolated polypeptide.

[0142] The present methods can be used for any suitable purposes. In some embodiments, the present methods can be used for identifying a peptidic antigenic sequence to a target antibody that is a biomarker, e.g., a diagnostic or prognostic biomarker.

### E. ISOLATED ANTIBODIES TO SPECIFIC TARGETS

[0143] In yet another aspect, the present invention is directed to an isolated antibody that specifically binds to Akt, which isolated antibody specifically binds to an epitope comprised in the amino acid sequence QDGGQKAVKD.

[0144] In yet another aspect, the present invention is directed to an isolated antibody that specifically binds to ERK2, which isolated antibody specifically binds to an epitope comprised in the amino acid sequence HPLGSPGSAS.

[0145] In yet another aspect, the present invention is directed to an isolated antibody that specifically binds to Desmin, which isolated antibody specifically binds to an epitope comprised in the amino acid sequence REIRRYQKST.

[0146] In yet another aspect, the present invention is directed to an isolated antibody that specifically binds to CBL4, which isolated antibody specifically binds to an epitope comprised in the amino acid sequence RSRARKQAYT.

[0147] In yet another aspect, the present invention is directed to an isolated antibody that specifically binds to cholera toxin, which isolated antibody specifically binds to an epitope comprised in the amino acid sequence FEEREQANTA, EYQQAQLEAE or DSSMSMADSE.

[0148] In yet another aspect, the present invention is directed to an isolated antibody that specifically binds to VEGF, which isolated antibody specifically binds to an epitope comprised in the amino acid sequence VLDFILSMGL, AKRKAGTSPR or RNSDFSAGSP.

[0149] The above antibody can be any suitable types of antibodies. In some embodiments, the antibody can be polyclonal antibodies, monoclonal antibodies and/or hybridomas that produce monoclonal antibodies.

[0150] The above antibody can be produced by any suitable methods, by immunizing a host with a target polypeptide, by phage display or recombinant production, etc. The above antibody can be further purified, treated and/or modified. In some embodiments, the above antibody can be affinity matured.

### F. METHODS FOR IDENTIFYING A TARGET ASSOCIATED WITH A CONDITION

[0151] In yet another aspect, the present invention is directed to a method for identifying a target associated with a condition, which method comprises: a) contacting a sample obtained from a source that has a condition with an antibody library, and assessing binding, or a lack thereof, between a substance in said sample and an antibody in said antibody library, wherein said antibody library is obtained from a subject or mammal, and preferably whose immune system has not been stimulated by a target exogenously, and said antibody library comprises less than 10⁷ different kinds of antibodies, or said antibody library is obtained by immunizing a subject or mammal with a polypeptide library, said polypeptide library comprising a plurality of isolated polypeptides comprising different, random amino acid sequences, wherein the polypeptides comprise about 10-20 amino acids, the polypeptides do not comprise Cys, do not comprise 3 or more identical, consecutive amino acids, and/or do not comprise 5 or more identical amino acids, or said antibody library is obtained by immunizing a subject with a polypeptide library, said polypeptide library comprising at least 10, 100, 1,000, 10,000, 15,000, 20,000, 25,000, 30,000, 35,000, 40,000, 45,000, 50,000, or all isolated polypeptides set forth in the sequence listing (SEQ ID: 1-55471); b) contacting a sample obtained from a source that does not have said condition with the above antibody library, and assessing binding, or a lack thereof, between a substance in said sample and an antibody in said antibody library; and c) identifying a substance as a target associated with said condition when there is a difference in said binding, or a lack thereof, between said substance and said antibody in steps a) and b).

[0152] The present methods can be used for any suitable purposes. In some embodiments, the present method is used for identifying a target associated with a condition in a subject. In some embodiments, the present method is used for identifying a target associated with a disease or disorder.

[0153] The present methods can be used for identifying a target associated with a single condition. Alternatively, the present methods can be used for identifying multiple targets associated with a condition. Still alternatively, the present methods can be used for identifying multiple targets associated with a single condition. Yet alternatively, the present methods can be used for identifying multiple targets associated with multiple conditions.

[0154] The difference in the binding, or a lack thereof, between the substance and the antibody can be assessed in any suitable manner. In some embodiments, the difference in the binding, or a lack thereof, between the substance and the antibody in steps a) and b) is qualitative. In some embodiments, the difference in the binding, or a lack thereof, between the substance and the antibody in steps a) and b) is quantitative. In some embodiments, binding between the substance and the antibody in step a) and lack of the binding between the substance and the antibody in step b) identify the substance as a target associated with the condition. In some embodiments, lack of binding between the substance and the antibody in step a) and binding between the substance and the antibody in step b) identify the substance as a target associated with the condition.

[0155] The target can be any suitable substances. Exemplary target includes a cell, cellular organelle, a viruse, a particle, a molecule, or an aggregate or complex thereof, or an aggregate or complex of molecules. Exemplary cell can be an organic or inorganic molecule. Exemplary organic molecule can be an amino acid, a peptide, a protein, e.g., an antibody or receptor, a nucleoside, a nucleotide, an oligonucleotide, a nucleic acid, e.g., DNA or RNA, a vitamin, a monosaccharide, an oligosaccharide, a carbohydrate, a lipid, or a complex thereof. In some embodiments, the target is a polypeptide. Exemplary polypeptide includes a linear polypeptide, a soluble polypeptide, a modified polypeptide, a toxic polypeptide or a polypeptide that causes autoimmunity in a subject.

[0156] In yet another aspect, the present invention is directed to a method for identifying a target associated with a condition, which method comprises: a) contacting a sample obtained from a source that has a condition with a polypeptide library, said polypeptide library comprising a plurality of isolated polypeptides comprising different, random amino acid sequences, wherein the polypeptides comprise about 10-20 amino acids, the polypeptides do not comprise Cys, do not comprise 3 or more identical, consecutive amino acids, and/or do not comprise 5 or more identical amino acids, or a polypeptide library comprising at least 10, 100, 1,000, 10,000, 15,000, 20,000, 25,000, 30,000, 35,000, 40,000, 45,000, 50,000, or all isolated polypeptides set forth in the sequence listing (SEQ ID: 1-55471), and assessing binding, or a lack thereof, between a substance in said sample and a polypeptide in said polypeptide library; b) contacting a sample obtained from a source that does not have said condition with the above polypeptide library, and assessing binding, or a lack thereof, between a substance in said sample and a polypeptide in said polypeptide library; and c) identifying a substance as a target associated with said condition when there is a difference in said binding, or a lack thereof, between said substance and said polypeptide in steps a) and b).

[0157] The present methods can be used for any suitable purposes. In some embodiments, the present method is used for identifying a target associated with a condition in a subject. In some embodiments, the present method is used for identifying a target associated with a disease or disorder.

[0158] The present methods can be used for identifying a target associated with a single condition. Alternatively, the present methods can be used for identifying multiple targets associated with a condition. Still alternatively, the present methods can be used for identifying multiple targets associated with a single condition. Yet alternatively, the present methods can be used for identifying multiple targets associated with multiple conditions.

[0159] The difference in the binding, or a lack thereof, between the substance and the antibody can be assessed in any suitable manner. In some embodiments, the difference in the binding, or a lack thereof, between the substance and the polypeptide in steps a) and b) is qualitative. In some embodiments, the difference in the binding, or a lack thereof, between the substance and the polypeptide in steps a) and b) is quantitative. In some embodiments, binding between the substance and the polypeptide in step a) and lack of binding between the substance and the polypeptide in step b) identify the substance as a target associated with the condition. In some embodiments, lack of binding between the substance and the polypeptide in step a) and binding between the substance and the polypeptide in step b) identify the substance as a target associated with the condition.

[0160] The target can be any suitable substances. Exemplary target includes a cell, cellular organelle, a viruse, a particle, a molecule, or an aggregate or complex thereof, or an aggregate or complex of molecules. Exemplary cell can be an organic or inorganic molecule. Exemplary organic molecule can be an amino acid, a peptide, a protein, e.g., an antibody or receptor, a nucleoside, a nucleotide, an oligonucleotide, a nucleic acid, e.g., DNA or RNA, a vitamin, a monosaccharide, an oligosaccharide, a carbohydrate, a lipid, or a complex thereof. In some embodiments, the target is a polypeptide. Exemplary polypeptide includes a linear polypeptide, a soluble polypeptide, a modified polypeptide, a toxic polypeptide or a polypeptide that causes autoimmunity in a subject. In some embodiments, the target comprises an antibody.

### G. EXAMPLARY EMBODIMENTS

[0161] Unless otherwise indicated, all the technical and scientific terms used herein will have their common meanings known in the art. All the patents, patent applications, publications, GenBank sequences, websites and other disclosed material will be incorporated herein as references, unless otherwise indicated.

[0162] With respect to any antibody against a protein, it generally recognizes only a few amino acids of the protein. When the number of different antibodies prepared against random amino acid sequences is sufficient, these antibodies can constitute an antibody library. Using such library, screening can be conducted against a protein of interest, so as to obtain antibodies capable of recognizing the protein.

[0163] Furthermore, as for a particular organism, such as a mouse, if the total protein extract from a certain tissue thereof is used to immunize an animal, and then a corresponding antibody library can be prepared, this antibody library can also be used for screening antibodies with high affinity to a certain protein of the organism. Naïve mammal can be employed for hybridoma fusion, so as to screen hybridoma cells that are capable of secreting IgG antibodies, these hybridoma cells can also be used to construct an antibody library for screening antibodies.

[0164] Accordingly, In some embodiments, the invention provides an antibody library for screening antibodies, and a method for screening antibodies against a protein of interest using said antibody library. Specifically, the invention relates to an antibody library with at least 10,000 different members, which can be used for screening antibodies with high affinity to a protein of interest.

[0165] In one aspect, the present invention provides an antibody library, comprising: (1) antibodies against random peptides with 10-20 amino acids, (2) IgG antibodies, secreted by hybridoma cells produced from spleen cells of naïve mammal, (3) IgG antibodies, secreted by hybridoma cells produced from spleen cells of mammal that are immunized by total protein extract, said protein extract is from a complete organism, one or more tissues thereof, and/or one or more cells thereof, (4) IgG antibodies, secreted by stable hybridoma stains established against one or more antigens; or any combination of (1)-(4).

[0166] In some embodiments, the term “antibody library” refers to a collection of a series of antibodies, it can contain antibodies of various origins, such as antibodies produced against specific epitopes, or antibodies produced against random peptides of a protein of interest.

[0167] The antibody library of the invention can be an antibody library with antibodies of a single origin; it can also be an antibody library mixture of antibodies of various origins.

[0168] In some embodiments, the term “naïve mammal” refers to an animal that has never been stimulated or treated using experimental means. In some embodiments, it specifically refers to an animal that has never been vaccinated or immunized by foreign antigens, said animal can be: mouse, rat, rabbit etc.

[0169] In some embodiments, the term “total protein extract” refers to the collection of all the proteins originated from a complete organism, a tissue thereof, or a cell thereof. Said organism can be various model organisms, such as, Arabidopsis thaliana, mouse, mice, rabbit, cattle, caprine, Drosophila, zebrafish, threadworm, maize, or rice etc.

[0170] In some embodiments, the term “random peptide” used herein refers to randomly generated amino acid sequence, wherein said amino acid is selected from natural amino acids or analogs thereof. In the present invention, the length of a random peptide can be e.g., 10-20 amino acids, such as a random peptide of 10 amino acids.

[0171] In one embodiment, the random peptides of the invention: 1) do not contain cysteine, 2) do not contain 3 or more consecutive same amino acids, and/or 3) do not contain 5 or more same amino acids.

[0172] In one embodiment, the initial score of each random peptide is set as any value, and the random peptides are selected through the following process: 1) for amino acids with potential glycosylation site, each potential glycosylation site reduces one point from the score, 2) each amino acid K or R reduces 4 points from the score; based on the above score, desired amount of peptides with highest score are selected from the top to the bottom.

[0173] In one embodiment, the random peptides of the invention are selected through the following steps: 1) randomly generating peptide sequences with 10-20 amino acids, which do not contain cysteine, 2) the initial score for each random peptide is equal to the number of amino acids contained therein; for amino acids with potential glycosylation site, each potential glycosylation site reduces one point from the score, 3) said peptide sequences with 10-20 amino acids are not allowed to contain 3 or more consecutive same amino acids, 4) said peptide sequences with 10-20 amino acids are not allowed to contain 5 or more same amino acids, 5) each amino acid K or R in said peptide sequences with 10-20 amino acids reduces 4 points from the score. Based on the above scoring principle, peptides with highest score are selected from the top to the bottom.

[0174] In one embodiment, e.g., 10,000 peptides with highest score are selected from the top. In another embodiment, e.g. 15,000, 20,000, 25,000, 30,000, 35,000, 40,000, 45,000, 50,000, 55,000, 60,000, 65,000, 70,000, 75,000, 80,000, 85,000, 90,000, 95,000, or 100,000 peptides with highest score are selected from the top. In one embodiment, the selected random peptides are chemically synthesized.

[0175] In a specific embodiment, using random peptides with 10 amino acids as examples, the selection of random peptides can e.g. comprise the following steps: 1) Randomly generating peptide sequences with 10 amino acids, which do not contain cysteine; 2) The sorting principle of the peptide sequences: the initial score for each of the randomly generated peptide is set as 10; for amino acids with potential glycosylation site, each potential glycosylation site reduces one point from the score; 3) Said peptide sequences with 10 amino acids are not allowed to contain 3 or more consecutive same amino acids; 4) Said peptide sequences with 10 amino acids are not allowed to contain 5 or more same amino acids; and 5) Each amino acid K or R in said peptide sequences will reduce 4 points from the score.

[0176] Based on the above scoring principle, 10,000 peptides with highest score can be selected from the top to the bottom, and can then be chemically synthesized.

[0177] In an embodiment of the invention, the random peptides can be obtained by various methods, such as chemical synthesis, recombinant expression etc. Such technical means are well known in the art.

[0178] The immunization of animals can be conducted using any methods known in the art. The animal used for immunization in the present invention can be animals commonly used in the art, such as mouse, rat, rabbit, sheep, goat, horse, cattle etc.

[0179] In one embodiment, said antibody library comprises at least 10,000 different members, and said antibody library has a success rate of at least 85% when used for screening antibodies against proteins of interest. In another embodiment, the number of the members in the antibody library according to the invention can be further increased with the addition of new antibodies, such as at least 15,000, 20,000, 25,000, 30,000, 35,000, 40,000, 45,000, 50,000, 55,000, 60,000, 65,000, 70,000, 75,000, 80,000, 85,000, 90,000, 95,000, 100,000 different antibodies, and even more. With the increase of the amount of antibodies in the antibody library, the success rate of the antibody library for screening antibodies against proteins of interest will increase accordingly, such as 86%, 87%, 88%, 89%, 90%, 91%, 92%, 93%, 94%, 95%, 96%, 97%, 98%, 99% and even high. With the increase of the library content, the success rate can approach 100%.

[0180] In one embodiment, the antibody library according to the present invention is in the form of hybridoma cell library.

[0181] Detailed introduction of hybridoma techniques can be found in, e.g., Bazin, Rat hybridomas and rat monoclonal antibodies, CRC Press, 1990; Goding, Monoclonal antibodies: principles and practice, 3^{rd} edition, Academic Press, 1996; Shepherd and Dean Monoclonal Antibodies, Oxford University Press, 2000 etc.

[0182] The antibody library of the invention produced using random peptides can contain various collections of antibodies, such as a collection of monoclonal antibodies, and a collection of polyclonal antibodies. In an embodiment, the antibody library of the invention contains antibodies against all the proteins of a species. In another embodiment, the antibody library of the invention contains antibodies against all the epitopes of one or more proteins of interest.

[0183] In one embodiment, the antibody library of the invention exists in a high-throughput screening device.

[0184] In one embodiment, the high-throughput screening device used in the invention is biochip, such as protein chip, or lab-on-a-chip (LOC).

[0185] In some embodiments, the term “high-throughput screening device” refers to a device that can be used to conduct High Throughput Screening (HTS). High Throughput Screening refers to using experimental means of molecular level or of cellular level as basis, conducting automatic operation to perform the experimental processes on experimental carriers in the form of micro-plate, and using detection instruments to collect experimental data, then using computer to analyze and process the experimental data. High-throughput screening devices and techniques can be used to simultaneously detect a great amount of different samples, and they can be combined with the antibody library of the invention so as to achieve the purpose of screening antibodies rapidly and effectively.

[0186] Commonly used high-throughput screening devices include biochip. Biochip is a microarray technique, and can be used for high-throughput screening of biological samples. Regarding biochip, with the help of micro-processing and microelectronic techniques, a great amount of nucleic acid or protein fragments with known sequences can be orderly arranged onto the surface of micro-slides. The corresponding components or activities of the sample to be tested can be analyzed through reactions with labeled nucleic acid or protein molecules. Biochip typically can be divided into three different types, i.e., gene chip, protein chip, and lab-on-a-chip (LOC).

[0187] Protein chip is a high-throughput technique for analyzing protein functions, which can be used for analyzing the expression profile of proteins, for studying the interactions between proteins, and for studying interactions between DNA and proteins as well as RNA and proteins.

[0188] Lab-on-a-chip is a micro-analyzing system using chip as the platform, which can integrate basic operation units like the preparation and/or screening of samples, and the separation and/or detection of products onto a biochip, so as to accomplish different biological or chemical reaction processes, and thereby analyze the products. Using lab-on-a-chip, the screening, detection and/or separation of antibodies in the present invention can be rapidly and effectively performed on one ship. Detailed descriptions about Lab-on-a-chip can be found in, e.g. Herold, K E; Rasooly, A (eds): Lab-on-a-Chip Technology: Biomolecular Separation and Analysi, Caister Academic Press (2009), and Edwin Oosterbroek & A. van den Berg (eds.): Lab-on-a-Chip: Miniaturized systems for (bio)chemical analysis and synthesis, Elsevier Science, second edition (2003) etc.

[0189] In one embodiment, the antibodies in the antibody library of the invention have been subjected to affinity maturation. In a specific embodiment, the antibody library of the invention can be used to obtain antibodies with high affinity based on relatively small amount of library members.

[0190] The meaning of the term “affinity maturation” is well known in the art, and can be found in, e.g., Dong, Zhiwei et al.: Antibody Engineering, Beijing Medical University Publications (2002). Typically, the term “affinity maturation” means that, after immunizing an animal by a particular antigen, the antibodies thus produced and separated are structurally rearranged and reconstituted, so that the affinity of the protein against the particular antigen can be increased, e.g., by 3-4 orders of magnitude. In some embodiments, the antibodies subjected to affinity maturation are all antibodies of IgG subtypes. Therefore, in the case the antibodies of the antibody library are subjected to affinity maturation, the possibility of screening an antibody with high affinity from this antibody library will be greatly increased.

[0191] In another aspect, the invention provides a combination, comprising an antibody library of the invention.

[0192] The antibody library of the invention can be in the form of a combination, e.g., the antibody members of an antibody library can be prepared as antibody solutions with certain concentrations (the preparation methods include ascites and in vitro culture etc.). The prepared antibody solutions can be stored in the form of ELISA plates (e.g. 96- or 384-well plate), or in the form of chips.

[0193] Alternatively, genes encoding the antibody members in an antibody library can also be cloned from the cell strain, and the genes can then be used to prepare the antibodies.

[0194] In another aspect, the invention provides a biochip, comprising an antibody library of the invention.

[0195] In another aspect, the invention provides a method for screening antibody against a protein of interest, comprising using the antibody library of the invention, the combination of the invention, or the biochip of the invention to screen one or more antibodies against said protein of interest.

[0196] In some embodiments, the terms “a protein of interest” or “a polypeptide of interest” or “a peptide of interest” can be interchangeably used herein, and they all refer to any natural protein or fragment thereof, or an isoform of a natural protein obtained through alternative splicing, or a mutant of a natural protein, or any combination of the above proteins.

[0197] In some embodiments, the “alternative splicing” used herein refers to the process of producing different mRNA splicing isoforms from a same mRNA precursor through different splicing modes (i.e. combining exons through different splicing sites). The protein products obtained through alternative splicing are isoforms to each other, they can exhibit different functions and structural properties, or they can lead to different phenotypes due to their different expression levels in same cells.

[0198] In one embodiment, the method of the invention comprises: (a) mixing said protein of interest with antibodies or antibody groups of said antibody library, and (b) selecting antibodies or antibody groups capable of binding said protein of interest.

[0199] In one embodiment, the method of the invention comprises: (a) mixing said protein of interest with antibodies or antibody groups of said antibody library, (b) selecting antibodies or antibody groups capable of binding said protein of interest, (c) mixing said protein of interest with antibodies or antibody subgroups of the antibody groups selected in step (b), and (d) selecting antibodies or antibody subgroups capable of binding said protein of interest. In another embodiment, the method of the invention further comprises using the antibody subgroups selected in step (d) to repeat steps (c) and (d) until an antibody capable of binding said protein of interest is selected.

[0200] In another embodiment, the method of the invention comprises simultaneous screening against several proteins of interest, comprising: (a) mixing said several proteins of interest with antibodies or antibody groups of said antibody library, (b) selecting antibodies or antibody groups capable of binding said several proteins of interest, and (c) mixing each of said several proteins of interest, separately, with the antibodies or antibody groups capable of binding said several proteins of interest selected in step (b), and then respectively selecting antibodies or antibody groups capable of binding each of said several proteins of interest.

[0201] In another embodiment, the method of the invention comprises simultaneous screening against several proteins of interest, comprising: (a) mixing said several proteins of interest with antibodies or antibody groups of said antibody library, (b) selecting antibodies or antibody groups capable of binding said several proteins of interest, (c) mixing each of said several proteins of interest, separately, with the antibodies or antibody groups capable of binding said several proteins of interest selected in step (b), and then respectively selecting antibodies or antibody groups capable of binding each of said several proteins of interest, (d) mixing each of said several proteins of interest, separately, with antibodies or antibody subgroups of the antibody groups selected in step (c) capable of binging the respective protein of interest, and (e) respectively selecting antibodies or antibody subgroups capable of binding each of said several proteins of interest. In another embodiment, the method of the invention further comprises using the antibody subgroups selected in step (e) to repeat steps (d) and (e) until antibodies capable of binding each said protein of interest are respectively selected.

[0202] In some embodiments, the term “antibody group” refers to the mixture of different antibodies, it can contain several, several tens of, several hundreds of, or several thousands of different antibodies. An antibody group can be further divided into several antibody sub-group containing different antibodies.

[0203] In a specific embodiment, a person skilled in the art can divide the antibody library into several antibody groups according to particular requirements, such as groups containing several, several tens of, several hundreds of, or several thousands of different antibodies. As for instance, an antibody library containing 10,000 antibodies can be divided into 100 groups, each group contains 100 different antibodies. The protein of interest is separately mixed with each of the groups, and then the groups that can bind the protein of interest are selected. Such groups can be used for further screening. For instance, the above selected antibody group containing 100 antibodies can be further divided into 10 sub-groups, each sub-group contains 10 antibodies. The protein of interest is separately mixed with each of the sub-groups, and then the sub-groups that can bind the protein of interest are selected. According to such strategy, the screening can be repeatedly conducted until antibodies that can bind the protein of interest are selected.

[0204] In one embodiment, the antibodies can be directly used or can be used after dilution, and preferably they are used in a same concentration. For example, different antibodies can be diluted to 100 μg/ml, and equal volume of the antibody solutions can be taken can then mixed, so as to obtain a group containing different antibodies. In this way, several tens of thousands of antibodies can be prepared as a combination of antibody groups. A person skilled in the art can select suitable dilution liquids for the antibodies, such as HEPES solution, e.g., a HEPES solution containing 2 mg/ml Proclin300, 1% BSA, pH7.4.

[0205] The screening methods used in the invention can be ELISA, Dotblot or protein chips as well as other detection methods that can demonstrate the interactions between a protein and an antibody. These methods are all technical means known in the art.

[0206] In one embodiment, the method of the invention can be used for screening antibodies against linear polypeptides.

[0207] The term “linear polypeptide” refers to a consecutive amino acid sequence in a protein.

[0208] In one embodiment, the method of the invention can be used for screening antibodies against soluble polypeptides.

[0209] In one embodiment, the method of the invention can be used for screening antibodies against modified polypeptides.

[0210] The term “modified polypeptide”, “modified protein”, and “modified peptide” are interchangeably used herein, they all refer to a protein or polypeptides that has been modified or post-translationally modified, such as proteins or polypeptides that have been phosphorylated, methylated, or acetylated.

[0211] The antibody library of the invention can be used to produce different antibodies respectively against modified polypeptides and unmodified precursor polypeptides (also referred to as distinguishing polypeptide, i.e., the form of the polypeptide that has not been post-translationally modified). A cell strain that is positive to the polypeptide can be used to test the titer of the modified polypeptide and the unmodified polypeptide, respectively. When the difference between these two titers reaches a certain extent, such as larger than 8 [units?], then the antibody is considered as being capable of distinguishing these two polypeptides.

[0212] In one embodiment, the method of the invention can be used fro screening antibodies against toxic polypeptides. The term “toxic polypeptide” and “toxic protein” is used interchangeably herein, and they both refer to a protein or a polypeptide that can produce toxicity in an animal or in a cell. Due to its toxicity, conventional antibody preparation method cannot be used to produce antibodies with high affinity to the toxic polypeptide

[0213] In one embodiment, the method of the invention can be conducted using a high-throughput screening device. In one embodiment, the high-throughput screening device used in the method of the invention is a biochip, such as protein chip, or lab-on-a-chip (LOC).

[0214] In another aspect, the present invention also relates to use of the antibody library of the invention in the preparation of device or kit for screening antibodies against a protein of interest. In one embodiment, the device is high-throughput screening device. In another embodiment, the high-throughput screening device is a biochip, such as protein chip, or lab-on-a-chip (LOC).

[0215] Using the antibody library of the invention, antibodies against different types of proteins (linear, soluble, unmodified, modified) can be obtained. More than 50% of the antibodies obtained using the antibody library of the invention have an affinity lower than 100 nM. And the possibility of obtaining an applicable cell strain is between several in ten thousands and one in several tens of thousands, which is much higher than conventional display techniques. As for conventional phage display library, even though the content of the library reaches the level of 10⁶, the success rate of screening an applicable antibody therefrom is almost 0, this is because the affinity of the obtained antibodies normally cannot fulfill the requirements for applications.

[0216] The antibody library of the invention is based on the principle of relative specificity, said antibody library contains antibodies against tens of thousands of antigens, and thereby monoclonal antibodies with high affinity against the target antigen can be obtained in a short time (e.g., one week). The time period and cost thereof are much lower than conventional monoclonal techniques. For normal protein antigens, the affinity of thus obtained antibody shows no substantive difference when compared to antibodies obtained in conventional methods. Furthermore, the content of the antibody library according to the present invention is continuously increasing, and with the increase in the content of the library, the success rate of screening antibodies will rapidly increase accordingly.

[0217] Additionally, the screening method of the invention can also be used for screening antibodies against antigens whose antibodies cannot be prepared using conventional methods, such as toxic, or autoimmune antigens.

[0218] The present invention accomplishes the technical method for preparing antibodies with high affinity in a low-cost and high-throughput way, which can be used to prepare antibodies in a short time. And the antibody library as well as the screening method of the invention can also be combined with high-throughput techniques like protein chip.

### D. EXAMPLES

[0219] The present invention will be further illustrated in detail through the following examples. These examples are provided merely for illustrative purpose, and they should not be considered as limitation for the scope of the invention. Specifically, the present invention contains the following examples:

[0220] Example 1 describes the construction of an antibody library containing 10000 antibodies, and verifies that the success rate of screening antibodies against 20 different proteins is 85%;

[0221] Example 2 describes the construction of an antibody library containing 50000 antibodies;

[0222] Example 3 describes the screening of antibodies against modified peptides;

[0223] Example 4 describes the screening and detection of antibodies against ERK2 protein;

[0224] Example 5 describes the screening and detection of antibodies against soluble protein Desmin;

[0225] Example 6 describes the screening of antibodies against toxic protein cholera toxin, and the affinity maturation of the obtained antibodies;

[0226] Example 7 describes the screening of antibody against insoluble protein; and

[0227] Example 8 describes the preparation of antibody biochip, and the screening of antibodies against human vascular endothelial growth factor (VEGF) using said biochip.

### Example 1

### The Construction of an Antibody Library

[0228] This example describes the construction of an exemplary antibody library.

### A. Producing Antibodies Using Random Peptides

[0229] The generation of random peptides:
[0230] i. Randomly generating peptide sequences with 10 amino acids, which do not contain cysteine;
[0231] ii. The sorting principle of the peptide sequences: the initial score for each of the randomly generated peptide was set as 10; for amino acids with potential glycosylation site, each potential glycosylation site reduced one point from the score;
[0232] iii. Said peptide sequences with 10 amino acids did not contain 3 or more consecutive same amino acids;
[0233] iv. Said peptide sequences with 10 amino acids did not contain 5 or more same amino acids;
[0234] v. Each amino acid K or R in said peptide sequences reduced 4 points from the score; and
[0235] vi. Based on the above score, 10,000 peptides with highest score were selected from the top to the bottom, and were then chemically synthesized (the synthetic methods can be found in Chemistry of Peptide Synthesis, N. Leo Benoiton, 2005).

[0236] The preparation of peptide antigens, the immunization method and the preparation of monoclonal antibodies are all common techniques known in the art, descriptions about these techniques can be found in relevant publications and textbooks, e.g., Bazin, Rat hybridomas and rat monoclonal antibodies, CRC Press, 1990; Goding, Monoclonal antibodies: principles and practice, 3^{rd} edition, Academic Press, 1996; Shepherd and Dean Monoclonal antibodies, Oxford University Press, 2000 etc.

B. Producing Antibodies Using Spleen Cells of Naïve Mice

[0237] The method for preparing monoclonal antibodies can be found in e.g., Bazin, Rat hybridomas and rat monoclonal antibodies, CRC Press, 1990; Goding, Monoclonal antibodies: principles and practice, 3^{rd} edition, Academic Press, 1996; Shepherd and Dean Monoclonal antibodies, Oxford University Press, 2000 etc.

[0238] Lymphocytes were taken from the spleen of a mouse that had not been subjected to immunization, and hybridoma cells were then prepared through cell fusion; caprine-anti-mouse IgG antibody (Abmart, 20100815) was used to detect hybridoma cells that can secret antibodies.

[0239] Specifically: the caprine-anti-mouse IgG antibody was diluted to 1 μg/ml using 0.01M Na₂CO₃/NaHCO₃ buffer (pH 9.0), and was then added into 96-well ELISA plate with high adsorption capacity (SYBIO, Hangzhou, China), 100 μl was added into each well, coating at 4° C. overnight, washing with PBST for 3 times, 250 μl/well washing solution was added each time. 250 μl blocking solution (PBST solution containing 1% BSA) was added into each well, blocking at 37° C. for 1 h, washing with PBST 3 times, 250 μl/well washing solution was added each time. 20 μl supernatant was taken from each well of the cell fusion plate, supplementing 80 μl blocking solution, incubating at 37° C. for 1 h, removing the remaining solution in the plate, washing with PBST 3 times, 250 μl/well washing solution was added each time. 100 μl HRP-labeled caprine-anti-mouse antibody (Abmart, 20110228) was added into each well, incubating at 37° C. for 1 h, washing with PBST for 5 times, 250 μl/well washing solution was added each time. Solution of horseradish peroxidase substrate TMB (Sigma) was added, incubating at 37° C. for 15 min, 50 μl 2M H₂SO₄ solution was added into each well to stop the reaction, the absorption value was read at 450 nm.

C. Producing Antibodies by Immunizing Animals with Total Protein Extract

[0240] Protein preparation: HeLa cells was lysed using RIPA buffer (50 mM Tris pH7.4, 150 mM NaCl, 1% Triton-X-100, 1% sodium deoxycholate 0.1% SDS lysis solution) containing protease inhibitor (Roche), and was quantitated by BCA (Biocolors, Shanghai, China).

[0241] The preparation of peptide antigens, the immunization method and the preparation of monoclonal antibodies are all common techniques known in the art, descriptions about these techniques can be found in relevant publications and textbooks, e.g., Bazin, Rat hybridomas and rat monoclonal antibodies, CRC Press, 1990; Goding, Monoclonal antibodies: principles and practice, 3^{rd} edition, Academic Press, 1996; Shepherd and Dean Monoclonal antibodies, Oxford University Press, 2000 etc.

### D. Constructing Antibody Library

[0242] The purified antibodies obtained in the above steps A, B, and C were taken and mixed, so as to constitute an antibody library. Each 100 different antibodies of the antibody library were mixed to form antibody sub-libraries, and altogether 100 sub-libraries were obtained.

### E. Screening Antibodies Against Proteins Using the Constructed Antibody Library Containing 10,000 Antibodies

[0243] Twenty (20) soluble proteins with 100-600 amino acids in length were used as target proteins, so as to verify the success rate of the antibody library containing 10,000 antibodies for screening antibodies against proteins with special conformation.

[0244] Said target proteins were all purchased from Shanghai PrimeGene Bio-Tech LTD, the specific proteins can be seen in Table 2 below.

TABLE 2
Screening specific antibodies for recombinant proteins

| | | The number of the |
|---|---|---|
| | | obtained positive |
| Protein No. | Protein Name | stains |
| 1 | Recombinant Human OSM | 3 |
| 2 | Recombinant Human Angiostatin | 1 |
| 3 | Recombinant Human BCMA | 2 |
| 4 | Recombinant Human EMAP-II | 2 |
| 5 | Recombinant Human IL-2 | 2 |
| 6 | Recombinant Human FGF-basic | 0 |
| 7 | Recombinant Human KGF1 | 1 |
| 8 | Recombinant Human FGF-9 | 1 |
| 9 | Recombinant Human IL-7 | 1 |
| 10 | Recombinant Human IL-6 | 2 |
| 11 | Recombinant Human IL-10 | 3 |
| 12 | Recombinant Human EGF | 4 |
| 13 | Recombinant Human IL-12 | 2 |
| 14 | Recombinant Human IL-13 | 1 |
| 15 | Recombinant Human EPG | 0 |
| 16 | Recombinant Human IL-15 | 1 |
| 17 | Recombinant Human IL-17 | 1 |
| 18 | Recombinant Human IFN-α1b | 0 |
| 19 | Recombinant Human IL-20 | 2 |
| 20 | Recombinant Human IL-21 | 3 |

[0245] The 20 proteins were formulated as antigens into solutions with the concentration thereof at 0.2 ug/ml, and they were separately used to coat 100 ELISA plates, 100 μl of said solutions were added into each well, coating at 4° C. overnight. ELISA method was adopted to screen positive antibody combinations (the specific method can be seen in step B of Example 1). The antibodies in the antibody library were diluted at 1:16,000 (0.02M PH7.4 phosphate buffer), and were then used to detect whether they can recognize the antigens. An ELISA OD value over 1.0 was defined as positive. The obtained antibody sub-library that can recognize a single protein was considered as an antibody sub-library of interest.

[0246] As for the antibody sub-library that can recognize a single protein, the respective protein was used as antigen to separately detect the 100 antibodies in the sub-library, so as to obtain positive cell strains that can recognize the respective protein. The specific screening results can be seen in Table 2. For the 20 proteins, the success rate of obtaining at least 1 specific antibody was 85%.

[0247] Additionally, with the increasing in the content of the library, the success rate for screening was further increased.

### Example 2

### The Construction of an Antibody Library with 50,000 Antibodies

[0248] The content of the antibody library was further increased. The new antibody library contained all the antibodies of the antibody library constructed in Example 1, antibodies derived from non-immunized mice and from mice immunized by total protein extracts, as well as monoclonal antibodies obtained by immunizing mice with more peptides. 15,000 peptides (the sequences of which are set forth in SEQ ID: 1-15,000) were used to immunize mice so as to prepare antibodies, 3 strains with highest titer were selected for each peptide, those peptides (3,000) that could not be successfully used to prepare antibodies were excluded, 36,000 strains were successfully obtained using the other 12,000 peptides (SEQ ID: 1-12,000). All the above monoclonal antibodies were collected to construct an antibody library containing 50,000 antibodies. The origins of the different antibodies are shown in Tables 3 and 4. According to the antigen design principle, altogether 54,771 peptides (SEQ ID: 1-55471) with 10 amino acids were collected in Abmart peptide library.

[0249] The antibody library containing 50,000 antibodies was divided into 500 antibody groups, each group contained 100 different antibodies.

TABLE 3
The origins of the different antibodies in
the antibody library with 50,000 members

| The origin of antibodies | The number of antibodies |
|---|---|
| Non-immniyed mice | 1,000 |
| The mice immunized by total protein extracts | 3,000 |
| Immunizing mice with peptides with 10 a.a. | 36,000 |
| Anidodies from Example 1 | 10,000 |

TABLE 4
Total protein extracts

| The origin of the antigens | Protein types |
|---|---|
| Huamn serum | Toal proteins(excluding seralbumin) |
| | glycoprotein |
| Arabidopsis thaliana | calyx |
| | immature stage lamina |
| | immature stage root |
| rice, maize | lamina |
| | root |
| | anther |
| mouse, rat, rabbit, cattle, caprine | brain tissue |
| | serum total proteins |
| | liver |
| | kidney |
| Drosophila, zebrafish, | total protein extacts |
| threadworm | |
| Cell lines | 293T |
| | HELA |
| | human cholangiocarcinoma cell RBE |
| | huamn breast cancer cell strain MCF-7 |
| | HEPG2 |

[0250] Based on antibody libraries with different contents, the success rates for different projects are summarized in Table 5. The increase of the library content could significantly increase the success rates for the screening against various antigens. Using the antibody library with 50,000 members as basis, 3,000-5,000 new monoclonal antibodies were added into the library each much (based on the 54,771 peptides). The higher level of the library content can further increase the success rate.

TABLE 5
The effects of different library contents on the success rate

| | The number of screening | Library content | | |
|---|---|---|---|---|
| Project types | projects | 1,000 | 10,000 | 50,000 |
| Modified | 100 | 0 | 10 | 43 |
| polypeptides | | | | |
| Soluble proteins | 100 | 26 | 87 | 98 |
| Insoluble proteins | 100 | 12 | 50 | 90 |

[0251] The antibody library used in the following Examples 3-8 was the antibody library with about 50,000 antibodies constructed in Example 2.

### Example 3

### Screening Antibodies Against Modified Peptides

[0252] This example describes the screening of antibodies against modified peptides. The obtained antibodies can distinguish the modified peptides from the respective unmodified ones.

[0253] The modified peptides and the respective unmodified peptides were synthesized by Scilight-Peptide Inc., Beijing, China, and the purities of all the synthesized peptides were more than 85%.

[0254] The peptide sequences were designated as: p-protein name-modification site.

TABLE 6
The modified peptide sequences

| | Sequence of the | Sequence of the |
|---|---|---|
| Name of the peptides | modified peptides | unmodified peptides |
| p-Smad2/3(Ser423/425) | PSIRCS(pS)V(pS) | PSIRCSSVS |
| p-Stat3 | C-SAAP(pY)LKTKFI | C-SAAPYLKTKFI |
| p-Stat1(Tyr701) | C-KGTG(pY)IKTELI | C-KGTGYIKTELI |
| p-Akt (Thr308) | ATMK(pT)FCGT | ATMKIFCGT |
| p-Akt (Ser473) | C-HFPQF(pS)YSAS | C-HFPQFSYSAS |
| p-JNK(Thr 183/Tyr 185) | C-SFMM(pT)P(pY)VVTR | C-SFMMTPYVVTR |
| p-ERK1/2(Thr202/Tyr204) | HTGFL(pT)E(pY)VAC | HTGFLTEYVAC |
| p-IRS1(Tyr989) | C-SRGD(pY)MTMQM | C-SRGDYMTMQM |
| p-IRS1(Tyr632) | C-GSGD(pY)MPMSP | C-GSGDYMPMSP |
| p-IRS1(Ser307) | C-SRTE(pS)ITATS | C-SRTESITATS |
| p-IRS1(Tyr941) | C-TGTEE(pY)MKMDL | C-TGTEEYMKMDL |
| P-C-Jun(C-J4C4/1) | C-HITT(pT)P(pT)PTQ | C-HITTTP(pT)PTQ |
| p-Cdk5(Ser159) | RCY(pS)AEVVTLW | RCYSAEVVTLW |
| p-Cdk5(Tyr15) | C-GEGT(pY)GTVFK | C-GEGTYGTVFK |
| p-EGFR(Tyr1172) | C-DNPD(pY)QQDF | C-DNPDYQQDF |
| p-EGFR(Ser1045) | C-ATSNN(pS)TVA | C-ATSNNSTVA |

### A. The Coupling of Peptide Antigens

[0255] The peptides as antigens were coupling with BAS through glutaral method, detailed description of the method can be seen in, e.g., The Protein Protocols Handbook, Cytogen, Princeton, Humana press.

### B. Screening the Peptide-Specific Antibodies

[0256] The screening method was similar to step E in Example 1.

[0257] Specifically: first, the 16 modified peptides were used as antigens, to separately screen positive antibody sub-libraries that recognize the respective antigen. According to the screening results, the screened positive antibody sub-libraries were used as the basis to further screen antibodies against a single modified peptide.

[0258] Based on the screened positive wells, the coupled modified peptides and coupled unmodified peptides were separately used as antigens to detect whether the screened antibodies can distinguish these two kinds of peptides. In the case the antibody to be tested can bind a modified peptide and show an OD value larger than 3 times of the corresponding OD value of the respective unmodified peptide, then the antibody was considered as capable of distinguishing these two kinds of peptides, i.e., the antibody can specifically recognize modified peptide.

[0259] The detailed screening results can be seen in Table 7.

TABLE 7
The screening results for modified peptides

| | The num- | The Number | The Number of |
|---|---|---|---|
| | ber of | of antibodies | antibodies that |
| | positive | that recog- | specifically |
| | sub- | nize modi- | recognize modi- |
| Protein | libraries | fied peptides | fied peptides |
| p-Smad2/3(Ser423/425) | 5 | 8 | 1 |
| p-Stat3 | 5 | 4 | 0 |
| p-Stat1(Tyr701) | 0 | 0 | 0 |
| p-Akt (Thr308) | 9 | 13 | 2 |
| p-Akt (Ser473) | 10 | 12 | 2 |
| p-JNK(Thr 183/Tyr 185) | 0 | 0 | 0 |
| p-ERK1/2(Thr202/Tyr204) | 0 | 0 | 0 |
| p-IRS1(Tyr989) | 6 | 8 | 1 |
| p-IRS1(Tyr632) | 7 | 7 | 2 |
| p-IRS1(Ser307) | 0 | 0 | 0 |
| p-IRS1(Tyr941) | 0 | 0 | 0 |
| P-C-Jun(C-J4C4/1) | 0 | 0 | 0 |
| p-Cdk5(Ser159) | 7 | 8 | 1 |
| p-Cdk5(Tyr15) | 0 | 0 | 0 |
| p-EGFR(Tyr1172) | 0 | 0 | 0 |
| p-EGFR(Ser1045) | 0 | 0 | 0 |

### C. The Screened Positive Antibodies can Recognize Phosphorylated Akt Protein

[0260] Western blotting process was as following: Insulin-treated and untreated 293T cells (ATCC, CRL-11268™) were lysed with RIPA buffer (50 mM Tris pH7.4, 150 mM NaCl, 1% Triton-X-100, 1% sodium deoxycholate 0.1% SDS lysis solution) containing protease inhibitor (Roche), and was quantitated by BCA (Biocolors, Shanghai, China), diluting with 5× loading buffer, after denaturing at 100° C. for 10 min, 20-30 ng sample was loaded in each lane, and 10% SDS-PAGE was used for gel electrophoresis, blocking with 5% skim milk after PVDF membrane transfer, the primary antibody was abmart-anti-Akt (Phospho-Ser473), after diluting the respective ascites of the mice at 1:500, incubating at room temperature for 1 h, washing with 1×PBST for 3 times, 5 min for each time; the secondary antibody was abmart-anti-mouse-HRP, after diluting with PBST solution of 5% skim milk at 1:5000, putting into incubation box, incubating at room temperature for 30 min, washing with 1×PBST for 3×5 min, ECL Plus (Amersham) was used for detection.

[0261] Western detection results showed that, the screened antibodies can specifically recognize phosphorylated Akt protein in the insulin induced 293T cells (see FIG. 1).

### Example 4

### Screening Antibodies Against ERK2 Protein

[0262] This example describes the screening and detection of antibodies against ERK2 protein.

### A. Screening Antibodies Against ERK2 Protein

[0263] ERK2 protein was purchased form Sino Biological Inc., Beijing, China. The method for screening antibodies can be seen in the above examples. Altogether 5 strains of positive antibodies were screened from the antibody library, wherein two of them had an affinity lower than 10 nM.

### B. Western Blotting Process

[0264] The cell line used for Western blotting detection was Hela cell line (ATCC, CCL-2.2™), the treating process was identical to Example 3.

[0265] Western detection results showed that, the screened antibodies can specifically recognize the ERK2 protein in Hela cells. Antibody 1937-1A5 (Abmart, 20100605) was a monoclonal antibody that had been proved to specifically recognize ERK2 protein (commercialized antibody for detecting ERK2); while antibody 2540-3B9 was a specific antibody screened from the antibody library (see FIG. 2), which can also recognize ERK2 protein.

### Example 5

### Screening Specific Antibody Against Soluble Protein Desmin

[0266] This example describes the screening and detection of antibodies against soluble protein Desmin.

### A. Screening Antibodies Against Desmin Protein

[0267] Desmin protein was purchased from ProSpec (USA). The method for screening antibodies can be seen in the above examples. Altogether 6 strains of positive antibodies were screened from the antibody library, wherein 1 of them had an affinity lower than 10 nM.

### B. Immunohistochemistry Verification of Desmin Protein

[0268] Desmin protein is specifically highly expressed protein in cervical cancer tissue, therefore cervical cancer tissue section was used to verify the specificity and efficacy of antibodies against Desmin protein. Cervical cancer tissue section was purchased from Fengfan Medical Science Development LTD., Luohe, China, the method concerning the section and the detection can be seen in, e.g. (Immunohistochemistry Experimental Techniques and Applications, 2006, Chemical Industry Publication, Beijing, China). The antibodies obtained from the screening in the antibody library were used to detect the tissue section, the clone number of said antibody was 1956-1NB-2E7. Said antibody (ascites) was diluted at 1:500 with PBST solution containing 5% skim milk), the secondary antibody was caprine-anti-mouse-labeled HRP (Abmart, 1:5000).

[0269] The tissue section was fixed and then placed on optical microscope for observation. The IHC results showed that, antibody 1956-1NB-2E7 can specifically detect Desmin protein in the tissue, i.e., it had good tissue-specificity.

### Example 6

### The Screening of Cholera Toxin-Specific Antibodies, and Affinity Maturation Thereof

[0270] This example describes the screening of antibodies against toxic protein cholera toxin, and the affinity maturation of the obtained antibodies.

[0271] As for bacterial toxins like cholera toxin and kreotoxin, due to their high toxicity, conventional method of immunizing mouse cannot be used to prepare specific antibodies against them. In order to demonstrate the distinct advantages of the antibody library for screening antibodies against such proteins, cholera toxin was selected as antigen for screening antibodies against it.

[0272] Cholera toxin was purchased from MACGENE TECH., Beijing, China. The method for screening antibodies was identical to step E in Example 1. Altogether 3 strains of positive antibodies were screened from the antibody library, wherein 1 of them had an affinity lower than 10 nM. In competitive ELISA process, this antibody can have a detection sensitivity of 10 ng/ml for standard.

[0273] Affinity maturation of cholera toxin-specific antibodies: The method for perdorming affinity maturation is light chain shuffling method, principle of this method can be seen in ANTIBODY ENGINEERING, Methods in Molecular Biology, 2004, Volume 248, III, 327-343.

[0274] 1. The obtaining of mouse variable region of light chain (VL) and variable region of heavy chain (VH). The amplification method: Rohatgi S, Ganju P, Sehgal D. Systematic design and testing of nested (RT-)PCR primers for specific amplification of mouse rearranged/expressed immunoglobulin variable region genes from small number of B cells. J Immunol Methods. 2008; 339(2):205-1. The obtained variable regions can be seen in Table 8 below.

TABLE 8
The obtained variable regions

| 1948-1- | |
|---|---|
| 1-3B5 | Sequnce |
| VH | GVQLQQSGAELVKPGASVKLSCTASGFKIKDTYMHWMKQR |
| | PEQGLEWIGRIDPANGNSHYDPKIQGKATMTADKSSNTAY |
| | LQLSSLTSEDTAVYYCASIYYGNNYVMDYWGQGTSVTVSS |
| VK | DVLMTQTPLSLPVSLGDQASISCRSSQTMVHSNGNTYLEW |
| | YLQKPGQSPKLLIYKVSNRFSGVPDRFSGSGSGTDFTLKI |
| | SRVEAEDLGVYYCFQGSLVPLTFGAGTKVELK |

[0275] 2. The VH genes were cloned through SalI and NheI restriction sites into the pHG vector (Abmart, see FIG. 5) of the double vector display system, the vector contained constant region of heavy chain CH1, which can be used to display Fab heavy chain antibody.

[0276] 3. The pHG plasmid containing the VH gene and the constructed humanized light chain antibody library pHLDis-VL (Abmart, de novo synthesized, see FIG. 6) were mixed at a ratio of 1:1, and the mixture was then electronically transformed into TransMax competent cells (Takara, Dalian, China), all the transformed strains were collected and formed an affinity-matured antibody library.

[0277] 4. Standard method was used to prepare affinity-matured phage antibody library, and to prepare phage antibody displaying library for screening (the method can be seen in Amersham biosciences: Expression Module/Recombinant Phage Antibody System).

[0278] 5. The screened phage library was used to infect TransMax strain containing pHG plasmid, performing the next round of screening, monoclones were picked for detection after 2-3 rounds of screeening, phage ELISA was used to detect and identify the sensitivity of the antibodies (the method can be seen in Amersham biosciences: Expression Module/Recombinant Phage Antibody System).

[0279] 6. After detecting the sensitivity of the phage antibodies against cholera toxin, the detection limit of the monoclonal 1948-3B5-1C12 against the target reached 1.2 ng/ml.

[0280] 7. After sequencing, the sequence of the Kappa chain in the obtained antibody with high affinity is shown in Table 9, with the amino acids in bold letters (and with underline) as the differences to the original sequence.

TABLE 9

| 1948-1-1- | |
|---|---|
| 3B5-1C13 | Sequence |
| Vκ-orig- | DVLMTQTPLSLPVSLGDQASISCRSSQTMVHSNGNTYL |
| inal cell | EWYLQKPGQSPKLLIYKVSNRFSGVPDRFSGSGSGTDF |
| strain | TLKISRVEAEDLGVYYCFQGSLVPLTFGAGTKVELK |
| Vκ-new | DVLMTQTPLSLPVSLGDQASISCRSSQSIVHSNGNTYL |
| cell | EWYLQKPGQSPKLLIYKVSNRFSGVPDRFSGSGSGTDF |
| strain | TLKISRVEAEDLGFYYCFQGSHLPLTFGAGTKLELK |

### Example 7

### Screening Specific Antibody Against Insoluble Protein

[0281] This example describes the screening of antibody against insoluble protein.

[0282] CBL4 protein (24 KD) of maize family, which have 211 amino acids in its full length format, was obtained through recombinant expression in E. coli. expression system (Abmart, 20100504). This protein can resolve in denaturation solution of 8M urea, but is insoluble in non-denaturation solution.

[0283] The method for screening antibodies was essentially identical to step E in Example 1, except that, PH 7.0 8M urea solution was used as coating solution for insoluble proteins, and the protein concentration of the coating solution was 0.2 ug/ml.

[0284] Altogether 5 strains of positive antibodies were screened from the antibody library, wherein one of them succeeded in a verification cell line in which the protein was over-expressed (the target protein was expressed with GFP as fusion protein-50 KD). Western blotting experiments were conducted in two modes, i.e., against said positive antibody (1233-6G5) and against GFP (Abmart, 1:1000) respectively. The bands showed in the two modes are identical and both of them are at the correct size, demonstrating that the antibody library at 50,000 level can be used for screening antibodies against insoluble proteins (see FIG. 4).

### Example 8

### The Preparation of Antibody Biochip and the Screening of Protein Specific Antibodies

[0285] This example describes the preparation of antibody biochip, and the screening of antibodies against human vascular endothelial growth factor (VEGF) using said biochip.

[0286] Preparing the antibody biochip: the antibody library sample was loaded in aliquots into 384-well cell culture plate, CapitalBio SmartArrayer™ 48 spotter and CapitalBio 3 dimensional H-group slides (CapitalBio, Beijing China) were used; blocking the chip: 30 ml PBS solution containing 10 mg/ml BSA was used to block the chip by shaking at room temperature for 1 h; washing: TBST solution (30 ml each time) was used to wash the chip twice, the interval between each time was 5 min; the chip was taken out and the water remaining on the surface was removed, the chip was kept as not completely dry, and was stored at −80° C.

[0287] Human vascular endothelial growth factor (VEGF) was purchased from PeproTech, the sample was dialyzed using PBS, and was then concentrated using ultrafiltration tube (10 K), the concentration of the protein was measured (determined as over 1 mg/ml); biotin labeling: Pierce NHS activated biotin was used, the required amount of the biotin was calculated (the biotin was kept as powder, and was freshly formulated before use). The sample was kept at room temperature for 1 h, and 1M Tris (pH 7.2, the molar ratio between Tris and biotin was 5:1) was then added to stop the reaction. Desalting column was used to conduct the desalinization for 4-5 times, the sample was then divided into aliquots and stored frozen.

[0288] Directly dropping 1 ml biotin-labeled antigens (<2 μg/ml, TBST solution containing 10 mg/ml BSA) or adding 100 μl with the help of cover slip; standing at room temperature for 1 h; washing with TBST solution for 5 times, shaking thoroughly during each washing; taking out the chip and removing the water remaining on the surface, and the chip was kept as not completely dry. Directly dropping 1 ml fluorescein-labeled streptavidin (1000 times diluted, TBST solution of 10 mg/ml), standing at room temperature for 1 h; washing with TBST solution for 4 times, 5 min each time, shaking thoroughly, then rinsing with distilled water for 3 times, 5 min each time, and douching for 30 s. In the end the chip was dried by centrifugation; scanning, reading the data.

[0289] Altogether 10 strains of positive antibodies (with fluorescence intensity larger than 200) were screened from the chip, wherein 3 strains were verified by Western blotting, demonstrating that they can specifically recognize VEGF protein (VEGF verification data).

[0290] As shown in FIG. 3, lanes 3, 4, 5 were screened specific monoclonal antibodies, lane 9 was previously successfully verified positive antibody. It can be seen from the Western blotting results, the screened antibodies can specifically recognize VEGF protein, as did the known positive antibody.

[0291] The above examples are included for illustrative purposes only and are not intended to limit the scope of the invention. Many variations to those described above are possible. Since modifications and variations to the examples described above will be apparent to those of skill in this art, it is intended that this invention be limited only by the scope of the appended claims.

The claimed invention is:

1-126. (canceled)

127. A method for identifying an antibody to a target, which method comprises:
a) providing for an antibody library obtained from a mammal whose immune system has not been stimulated by a target exogenously, wherein said antibody library comprises less than 10⁷ different kinds of antibodies;
b) contacting said target with said antibody library under conditions suitable for binding between said target with an antibody in said antibody library, if such antibody existing in said antibody library; and
c) assessing binding between said target and said antibody to identify said antibody as an antibody to said target.

128. The method of claim 127, wherein one or more of the following A) through CC) apply:
A) the antibody library is produced by a mammal immunized with a plurality of polypeptides comprising different, random amino acid sequences;
B) the polypeptides does not comprise Cys, does not comprise 3 or more identical, consecutive amino acids, and/or does not comprise 5 or more identical amino acids;
C) the polypeptides are selected by the standards:
a) assigning an initial, identical score to all candidate polypeptides;
b) reducing the initial score by 1 point for each potential glycosylation site in a candidate polypeptide;
c) reducing the initial score by 4 points for each Lys or Arg residue in a candidate polypeptide; and
d) selecting candidate polypeptide with highest possible scores for the desired number of polypeptides for immunizing the mammal;
D) the mammal is immunized with at least 10,000, 15,000, 20,000, 25,000, 30,000, 35,000, 40,000, 45,000, 50,000, 55,000, 60,000, 65,000, 70,000, 75,000, 80,000, 85,000, 90,000, 95,000, or 100,000 different polypeptides;
E) the polypeptides comprise about 10, 11, 12, 13, 14, 15, 16, 17, 18, 19 or 20 amino acids;
F) the polypeptides comprise natural and/or non-natural amino acids, and/or are produced by chemical synthesis and/or recombinant production;
G) the polypeptides are selected from candidate polypeptides by the following standard:
a) each of the candidate polypeptides comprises about 10 amino acids that do not include Cys;
b) each of the candidate polypeptides does not comprise 3 or more identical, consecutive amino acids,
c) each of the candidate polypeptides does not comprise 5 or more identical amino acids;
d) each of the candidate polypeptides is assigned an initial score of 10;
e) reducing the initial score by 1 point for each potential glycosylation site in a candidate polypeptide;
f) reducing the initial score by 4 points for each Lys or Arg residue in a candidate polypeptide; and
g) selecting at least 10,000 candidate polypeptides with the highest scores;
H) the antibody library is produced by a mammal whose immune system has not been purposely stimulated, preferably selected from the group consisting of a mouse, a rat and a rabbit;
I) the antibody library is produced by a mammal immunized with an intact organism, an tissue, an cell or a whole protein extract of the organism, tissue or cell, and the intact organism, tissue, cell is immunologically distinct from the target;
J) (i) the intact organism is selected from the group consisting of an Arabidopsis thaliana, a mouse, a rat, a rabbit, a bovine, a goat, a Drosophila, a zebrafish, a Caenorhabditis elegans, rice and corn;
(ii) the tissue is selected from the group consisting of blood, Arabidopsis thaliana bud, Caenorhabditis elegans tissues at different developmental stages, and a mouse brain tissue; and/or
(iii) the cell is selected from the group consisting of a spleen cell, a tumor cell and a cell line, e.g., a human tumor cell line;
K) the antibody library:
a) is produced by a mammal immunized with a plurality of polypeptides comprising different, random amino acid sequences;
b) is produced by a mammal whose immune system has not been purposely stimulated;
c) is produced by a mammal immunized with an intact organism, an tissue, an cell or a whole protein extract of the organism, tissue or cell;
d) is produced by a mammal immunized with an antigen that is immunologically distinct from the target; or
e) a combination of any of a)-d);
L) the antibodies in the antibody library comprise polyclonal antibodies, monoclonal antibodies and/or hybridomas that produce monoclonal antibodies, and/or are affinity matured;
M) the antibody library comprises at least 10,000, 15,000, 20,000, 25,000, 30,000, 35,000, 40,000, 45,000, 50,000, 55,000, 60,000, 65,000, 70,000, 75,000, 80,000, 85,000, 90,000, 95,000, or 100,000 different antibodies;
N) at least some of the antibodies are immobilized on a solid surface;
O) all of the antibodies are immobilized on a solid surface;
P) the solid surface is a part of a biochip;
Q) the target is a polypeptide, e.g. selected from the group consisting of a linear polypeptide, a soluble polypeptide, a modified polypeptide, a toxic polypeptide and a polypeptide that causes autoimmunity in a subject;
R) the target is contacted with a subgroup of antibodies in the antibody library to determine if the subgroup of antibodies comprises an antibody that specifically binds to the target;
S) the subgroup of antibodies comprises an antibody that specifically binds to the target, and further comprising:
a) dividing the subgroup of antibodies into a smaller subgroup of antibodies; and
b) contacting the target to determine if the smaller subgroup of antibodies comprises an antibody that specifically binds to the target;
T) the steps a) and b) are repeated until an individual antibody that specifically binds to the target is identified;
U) which is used to identify antibodies that specifically bind to a plurality of the targets;
V) the antibody library is contacted with the plurality of the targets to identify antibodies or groups of antibodies that specifically bind to the plurality of the targets;
W) which further comprises contacting each of the plurality of the targets with the identified antibodies or groups of antibodies to identify antibodies or groups of antibodies that specifically bind to each of the plurality of the targets;
X) which further comprises:
a) dividing the identified antibodies or groups of antibodies into smaller subgroups of antibodies; and
b) contacting each of the plurality of the targets with the smaller subgroups of antibodies to determine if the smaller subgroup of antibodies comprises an antibody that specifically binds to each of the plurality of the targets;
Y) the steps a) and b) are repeated until an individual antibody that specifically binds to each of the plurality of the targets is identified;
Z) the successful rate for identifying an antibody that specifically binds to the target is at least 10%, 20%, 30%, 40%, 50%, 60%, 70%, 80%, 90%, 95%, or 100%;
AA) the antibody library comprises at least 10,000 different antibodies and the successful rate for identifying an antibody that specifically binds to the target is at least 80%, 85%, 90%, 95%, or 100%;
BB) the amino acid sequences of antibodies in the antibody library are unknown priori;
CC) the antibodies in the antibody library comprise intact (or complete) antibody molecules.

129. A product, which is one of the following products I) through):
I) an antibody that specifically binds to the target, wherein the antibody is identified by a method, which comprises:
a) providing for an antibody library obtained from a mammal whose immune system has not been stimulated by a target exogenously, wherein said antibody library comprises less than 10⁷ different kinds of antibodies;
b) contacting said target with said antibody library under conditions suitable for binding between said target with an antibody in said antibody library, if such antibody existing in said antibody library; and
c) assessing binding between said target and said antibody to identify said antibody as an antibody to said target;
II) an antibody library for identifying an antibody to a target, which antibody library is obtained from an mammal whose immune system has not been stimulated by a target exogenously, wherein said antibody library comprises less than 10⁷ different kinds of antibodies;
III) a polypeptide library, which polypeptide library comprises a plurality of isolated polypeptides comprising different, random amino acid sequences, wherein the polypeptides comprise about 10-20 amino acids, the polypeptides do not comprise Cys, do not comprise 3 or more identical, consecutive amino acids, and/or do not comprise 5 or more identical amino acids;
IV) an antibody library, which is produced by a method, comprising
a) immunizing a subject with the above polypeptide library of the product III);
b) recovering antibodies from said subject;
and optionally said method further comprising affinity purifying antibodies recovered from the subject using said product, which is III) the polypeptide library;
V) a polypeptide library, which polypeptide library comprises at least 10, 100, 1,000, 10,000, 15,000, 20,000, 25,000, 30,000, 35,000, 40,000, 45,000, 50,000, or all isolated polypeptides set forth in SEQ ID NOs: 1-54808;
VI) an antibody library, which is produced by a method, comprising
a) immunizing a subject with the above polypeptide library of the product V;
b) recovering antibodies from said subject;
and optionally said method further comprising affinity purifying antibodies recovered from the subject using said product, which is V) the polypeptide library;
VII) an antibody library, which antibody library comprises antibodies that specifically bind to at least 10, 100, 1,000, 10,000, 15,000, 20,000, 25,000, 30,000, 35,000, 40,000, 45,000, 50,000, or all polypeptides set forth in SEQ ID NOs: 1-54808;
VIII) an isolated antibody that specifically binds to Akt, which isolated antibody specifically binds to an epitope comprised in the amino acid sequence QDGGQKAVKD;
IX) an isolated antibody that specifically binds to ERK2, which isolated antibody specifically binds to an epitope comprised in the amino acid sequence HPLGSPGSAS;
X) an isolated antibody that specifically binds to Desmin, which isolated antibody specifically binds to an epitope comprised in the amino acid sequence REIRRYQKST;
XI) an isolated antibody that specifically binds to CBL4, which isolated antibody specifically binds to an epitope comprised in the amino acid sequence RSRARKQAYT;
XII) an isolated antibody that specifically binds to cholera toxin, which isolated antibody specifically binds to an epitope comprised in the amino acid sequence FEEREQANTA, EYQQAQLEAE or DSSMSMADSE;
XIII) an isolated antibody that specifically binds to VEGF, which isolated antibody specifically binds to an epitope comprised in the amino acid sequence VLDFILSMGL, AKRKAGTSPR or RNSDFSAGSP;
XIV) an antibody library, comprising:
(1) antibodies against random peptides with 10-20 amino acids,
(2) IgG antibodies, secreted by hybridoma cells produced from spleen cells of naïve mammal,
(3) IgG antibodies, secreted by hybridoma cells produced from spleen cells of mammal that are immunized by total protein extract, said protein extract is from a complete organism, one or more tissues thereof, and/or one or more cells thereof,
(4) IgG antibodies, secreted by stable hybridoma stains established against one or more antigens, or
(5) any combination of (1)-(4);
wherein said antibody library comprises at least 10000 different members, and said antibody library has a success rate of at least 85% when used for screening antibodies against proteins of interest;
XV) a combination, comprising the antibody library XIV from above;
XVI) a biochip, comprising the antibody library XIV from above.

130. A product according to claim 129, which is II) the antibody library, to which one or more of the following 1) through 5) apply:
1) a) is produced by a mammal immunized with a plurality of polypeptides comprising different, random amino acid sequences;
b) is produced by a mammal whose immune system has not been purposely stimulated;
c) is produced by a mammal immunized with an intact organism, an tissue, an cell or a whole protein extract of the organism, tissue or cell;
d) is produced by a mammal immunized with an antigen that is immunologically distinct from the target; or
e) a combination of any of a)-d);
2) which comprises at least 10,000, 15,000, 20,000, 25,000, 30,000, 35,000, 40,000, 45,000, 50,000, 55,000, 60,000, 65,000, 70,000, 75,000, 80,000, 85,000, 90,000, 95,000, or 100,000 different antibodies;
3) the antibodies in the antibody library comprise polyclonal antibodies, monoclonal antibodies and/or hybridomas that produce monoclonal antibodies, and/or are affinity matured;
4) the amino acid sequences of antibodies in the antibody library are unknown priori;
5) the antibodies in the antibody library comprise intact (or complete) antibody molecules.

131. A product according to claim 129, which is Ill) the polypeptide library, to which one or more of the following 1) through 2) apply:
1) the polypeptides are selected by the standards:
a) assigning an initial, identical score to all candidate polypeptides;
b) reducing the initial score by 1 point for each potential glycosylation site in a candidate polypeptide;
c) reducing the initial score by 4 points for each Lys or Arg residue in a candidate polypeptide; and
d) selecting candidate polypeptide with highest possible scores for the desired number of polypeptides;
2) which comprises at least 10,000 polypeptides.

132. A method for producing an antibody library, comprising
a) immunizing a subject with a polypeptide library of a product according to claim 129, which is III) the polypeptide library;
b) recovering antibodies from said subject;
and optionally said method further comprising affinity purifying antibodies recovered from the subject using said product, which is III) the polypeptide library;
and optionally, wherein a subject is immunized with a group of about 5-20 polypeptides in the library, and multiple subjects are immunized with multiple groups of about 5-20 polypeptides in the library, and the multiple groups of about 5-20 polypeptides encompass all the polypeptides in the library.

133. A product according to claim 129, which is IV) the antibody library, to which one or more of the following 1) through 2) apply:
1) which comprises at least 10,000, 15,000, 20,000, 25,000, 30,000, 35,000, 40,000, 45,000, 50,000, 55,000, 60,000, 65,000, 70,000, 75,000, 80,000, 85,000, 90,000, 95,000, or 100,000 different antibodies;
2) the antibodies in the antibody library comprise polyclonal antibodies, monoclonal antibodies and/or hybridomas that produce monoclonal antibodies, and/or are affinity matured.

134. A method for producing an antibody library, comprising
a) immunizing a subject with a polypeptide library of a product according to claim 129, which is V) the polypeptide library;
b) recovering antibodies from said subject;
and optionally said method further comprising affinity purifying antibodies recovered from the subject using said product, which is V) the polypeptide library.

135. A product according to claim 129, which is VI) the antibody library, to which one or more of the following 1) through 2) apply:
1) which comprises at least 10,000, 15,000, 20,000, 25,000, 30,000, 35,000, 40,000, 45,000, 50,000, 55,000, 60,000, 65,000, 70,000, 75,000, 80,000, 85,000, 90,000, 95,000, or 100,000 different antibodies;
2) the antibodies in the antibody library comprise polyclonal antibodies, monoclonal antibodies and/or hybridomas that produce monoclonal antibodies, and/or are affinity matured.

136. A product according to claim 129, which is VI) the antibody library, to which the following applies:
the antibodies in the antibody library comprise polyclonal antibodies, monoclonal antibodies and/or hybridomas that produce monoclonal antibodies, and/or are affinity matured.

137. A method for identifying a peptidic antigenic sequence to a target antibody, which method comprises:
a) contacting a target antibody with a polypeptide library comprising at least 10, 100, 1,000, 10,000, 15,000, 20,000, 25,000, 30,000, 35,000, 40,000, 45,000, 50,000, or all isolated polypeptides set forth in SEQ ID NOs: 1-54808 under conditions suitable for binding between said target antibody with a polypeptide in said polypeptide library, if such polypeptide existing in said polypeptide library; and
c) assessing binding between said target antibody and said polypeptide to identify a peptidic antigenic sequence to said target antibody.

138. The method of claim 137, to which one or more of the following 1) through 6) apply:
1) the target antibody is contacted with a subgroup of polypeptides in the polypeptide library to determine if the subgroup of polypeptides comprises a polypeptide that specifically binds to the target antibody;
2) the subgroup of polypeptides comprises a polypeptide that specifically binds to the target antibody, and further comprising
a) dividing the subgroup of polypeptides into a smaller subgroup of polypeptides; and
b) contacting the target antibody with the smaller subgroup of polypeptides to determine if the smaller subgroup of polypeptides comprises a polypeptide that specifically binds to the target antibody;
3) the steps a) and b) are repeated until an individual polypeptide that specifically binds to the target antibody is identified;
4) which is used to identify peptidic antigenic sequences to a plurality of target antibodies;
5) which further comprises isolating the polypeptide that specifically binds to the target antibody, and optionally determining amino acid sequence of the isolated polypeptide;
6) the target antibody is a biomarker, e.g. a diagnostic or prognostic biomarker.

139. A method for identifying a target associated with a condition, which method comprises either A) or B):
A) a) contacting a sample obtained from a source that has a condition with an antibody library, which is for identifying an antibody to a target, which antibody library is obtained from an mammal whose immune system has not been stimulated by a target exogenously, wherein said antibody library comprises less than 10⁷ different kinds of antibodies, and assessing binding, or a lack thereof, between a substance in said sample and an antibody in said antibody library;
b) contacting a sample obtained from a source that does not have said condition with an antibody library, which is for identifying an antibody to a target, which antibody library is obtained from an mammal whose immune system has not been stimulated by a target exogenously, wherein said antibody library comprises less than 10⁷ different kinds of antibodies, and assessing binding, or a lack thereof, between a substance in said sample and an antibody in said antibody library; and
c) identifying a substance as a target associated with said condition when there is a difference in said binding, or a lack thereof, between said substance and said antibody in steps a) and b);
B) a) contacting a sample obtained from a source that has a condition with a polypeptide library, which polypeptide library comprises a plurality of isolated polypeptides comprising different, random amino acid sequences, wherein the polypeptides comprise about 10-20 amino acids, the polypeptides do not comprise Cys, do not comprise 3 or more identical, consecutive amino acids, and/or do not comprise 5 or more identical amino acids, and assessing binding, or a lack thereof, between a substance in said sample and a polypeptide in said polypeptide library;
b) contacting a sample obtained from a source that does not have said condition with a polypeptide library, which polypeptide library comprises a plurality of isolated polypeptides comprising different, random amino acid sequences, wherein the polypeptides comprise about 10-20 amino acids, the polypeptides do not comprise Cys, do not comprise 3 or more identical, consecutive amino acids, and/or do not comprise 5 or more identical amino acids, and assessing binding, or a lack thereof, between a substance in said sample and a polypeptide in said polypeptide library; and
c) identifying a substance as a target associated with said condition when there is a difference in said binding, or a lack thereof, between said substance and said polypeptide in steps a) and b).

140. A method claim 139, which is A), to which one or more of the following 1) through 5) apply:
1) which is used for identifying a target associated with a condition in a subject, a target associated with a disease or disorder, or multiple targets associated with a condition;
2) the difference in the binding, or a lack thereof, between the substance and the antibody in steps a) and b) is qualitative or quantitative;
3) binding between the substance and the antibody in step a) and lack of the binding between the substance and the antibody in step b) identify the substance as a target associated with the condition;
4) lack of binding between the substance and the antibody in step a) and binding between the substance and the antibody in step b) identify the substance as a target associated with the condition;
5) the target comprises a polypeptide.

141. A method claim 139, which is B), to which one or more of the following 1) through 5) apply:
1) which is used for identifying a target associated with a condition in a subject, a target associated with a disease or disorder, or multiple targets associated with a condition;
2) the difference in the binding, or a lack thereof, between the substance and the polypeptide in steps a) and b) is qualitative or is quantitative;
3) binding between the substance and the polypeptide in step a) and lack of binding between the substance and the polypeptide in step b) identify the substance as a target associated with the condition;
4) wherein lack of binding between the substance and the polypeptide in step a) and binding between the substance and the polypeptide in step b) identify the substance as a target associated with the condition;
5) the target comprises an antibody.

142. A product according to claim 129, which is XIV) the antibody library, to which one or more of the following 1) through 5) apply:
1) which is in the form of hybridoma cell library;
2) said random peptides:
1) do not contain cysteine,
2) do not contain 3 or more consecutive same amino acids,
3) do not contain 5 or more same amino acids;
3) wherein the initial score of each random peptide is set as any value, and the random peptides are selected through the following process:
1) for amino acids with potential glycosylation site, each potential glycosylation site reduces one point from the score,
2) each amino acid K or R reduces 4 points from the score;
based on the above score, desired amount of peptides with highest score are selected from the top to the bottom;
4) (i) said naïve mammal is selected from mouse, rat, rabbit;
(ii) said complete organism is selected from Arabidopsis thaliana, mouse, rat, rabbit, cattle, caprine, Drosophila, zebrafish, threadworm, rice, or maize;
(iii) said one or more tissues are selected from blood tissue, Arabidopsis thaliana calyx, threadworm tissues in different developmental stages, or mouse brain tissue;
(iv) said one or more cells are selected from spleen cells, tumor cells or cell lines, such as human tumor cell lines;
5) the antibodies have been subjected to affinity maturation;
6) said antibody library comprises at least 15,000, 20,000, 25,000, 30,000, 35,000, 40,000, 45,000, 50,000, 55,000, 60,000, 65,000, 70,000, 75,000, 80,000, 85,000, 90,000, 95,000, or 100,000 different members.

143. A method for screening antibody against a protein of interest, comprising using the product according to claim 129, which is XIV) the antibody library, or a combination or biochip comprising said product XIV) the antibody library to screen one or more antibodies against said protein of interest.

144. The method according to claim 143, comprising one or more of the following 1) through 7):
1) (a) mixing said protein of interest with antibodies or antibody groups of said antibody library,
(b) selecting antibodies or antibody groups capable of binding said protein of interest;
2) (c) mixing said protein of interest with antibodies or antibody subgroups of the antibody groups selected in step (b),
(d) selecting antibodies or antibody subgroups capable of binding said protein of interest;
3) using the antibody subgroups selected in step (d) to repeat steps (c) and (d) until an antibody capable of binding said protein of interest is selected;
4) the screening is simultaneously conducted against several proteins of interest, comprising:
(a) mixing said several proteins of interest with antibodies or antibody groups of said antibody library,
(b) selecting antibodies or antibody groups capable of binding said several proteins of interest,
(c) mixing each of said several proteins of interest, separately, with the antibodies or antibody groups capable of binding said several proteins of interest selected in step (b), and then respectively selecting antibodies or antibody groups capable of binding each of said several proteins of interest;
5) (d) mixing each of said several proteins of interest, separately, with antibodies or antibody subgroups of the antibody groups selected in step (c) capable of binging the respective protein of interest,
(e) respectively selecting antibodies or antibody subgroups capable of binding each of said several proteins of interest;
6) using the antibody subgroups selected in step (e) to repeat steps (d) and (e) until antibodies capable of binding each said protein of interest are respectively selected;
7) said protein of interest is post-translational modified protein or polypeptide, or toxic protein or polypeptide.

The application's sequence listing, which the Patent Office published only in electronic form, follows.

SEQUENCE LISTING (54808 sequences)

SEQ ID NO: 1 - protein, 10 aa, Artificial Sequence
  Description of Artificial Sequence: Synthetic epitope
AADALGTSVV

SEQ ID NO: 2 - protein, 10 aa, Artificial Sequence
  Description of Artificial Sequence: Synthetic epitope
AADASTTSPK

SEQ ID NO: 3 - protein, 10 aa, Artificial Sequence
  Description of Artificial Sequence: Synthetic epitope
AADDAERERR

SEQ ID NO: 4 - protein, 10 aa, Artificial Sequence
  Description of Artificial Sequence: Synthetic epitope
AADEEKQRKE

SEQ ID NO: 5 - protein, 10 aa, Artificial Sequence
  Description of Artificial Sequence: Synthetic epitope
AADGVLSEVR

SEQ ID NO: 6 - protein, 10 aa, Artificial Sequence
  Description of Artificial Sequence: Synthetic epitope
AADIDTRSEF

SEQ ID NO: 7 - protein, 10 aa, Artificial Sequence
  Description of Artificial Sequence: Synthetic epitope
AADKPLAFSG

SEQ ID NO: 8 - protein, 10 aa, Artificial Sequence
  Description of Artificial Sequence: Synthetic epitope
AADMSSISQG

SEQ ID NO: 9 - protein, 10 aa, Artificial Sequence
  Description of Artificial Sequence: Synthetic epitope
AADYFSRSNR

SEQ ID NO: 10 - protein, 10 aa, Artificial Sequence
  Description of Artificial Sequence: Synthetic epitope
AAEAESAQTR

SEQ ID NO: 11 - protein, 10 aa, Artificial Sequence
  Description of Artificial Sequence: Synthetic epitope
AAEAKGRLAE

SEQ ID NO: 12 - protein, 10 aa, Artificial Sequence
  Description of Artificial Sequence: Synthetic epitope
AAEAPTDDQP

SEQ ID NO: 13 - protein, 10 aa, Artificial Sequence
  Description of Artificial Sequence: Synthetic epitope
AAEARLSLPA

SEQ ID NO: 14 - protein, 10 aa, Artificial Sequence
  Description of Artificial Sequence: Synthetic epitope
AAEASAEPGG

SEQ ID NO: 15 - protein, 10 aa, Artificial Sequence
  Description of Artificial Sequence: Synthetic epitope
AAEEASSEDE

SEQ ID NO: 16 - protein, 10 aa, Artificial Sequence
  Description of Artificial Sequence: Synthetic epitope
AAEEDIADPF

SEQ ID NO: 17 - protein, 10 aa, Artificial Sequence
  Description of Artificial Sequence: Synthetic epitope
AAEESERPKP

SEQ ID NO: 18 - protein, 10 aa, Artificial Sequence
  Description of Artificial Sequence: Synthetic epitope
AAEFKEVGPN

SEQ ID NO: 19 - protein, 10 aa, Artificial Sequence
  Description of Artificial Sequence: Synthetic epitope
AAEHKVVTER

SEQ ID NO: 20 - protein, 10 aa, Artificial Sequence
  Description of Artificial Sequence: Synthetic epitope
AAEIASSDSA

SEQ ID NO: 21 - protein, 10 aa, Artificial Sequence
  Description of Artificial Sequence: Synthetic epitope
AAEIEGTMRK

SEQ ID NO: 22 - protein, 10 aa, Artificial Sequence
  Description of Artificial Sequence: Synthetic epitope
AAEISLKSPR

SEQ ID NO: 23 - protein, 10 aa, Artificial Sequence
  Description of Artificial Sequence: Synthetic epitope
AAEKATDATT

SEQ ID NO: 24 - protein, 10 aa, Artificial Sequence
  Description of Artificial Sequence: Synthetic epitope
AAEKHSMSSI

SEQ ID NO: 25 - protein, 10 aa, Artificial Sequence
  Description of Artificial Sequence: Synthetic epitope
AAEKKQTEQL

SEQ ID NO: 26 - protein, 10 aa, Artificial Sequence
  Description of Artificial Sequence: Synthetic epitope
AAELKALKET

SEQ ID NO: 27 - protein, 10 aa, Artificial Sequence
  Description of Artificial Sequence: Synthetic epitope
AAELLAQTTH

SEQ ID NO: 28 - protein, 10 aa, Artificial Sequence
  Description of Artificial Sequence: Synthetic epitope
AAELNHKEEH

SEQ ID NO: 29 - protein, 10 aa, Artificial Sequence
  Description of Artificial Sequence: Synthetic epitope
AAELSTSPAV

SEQ ID NO: 30 - protein, 10 aa, Artificial Sequence
  Description of Artificial Sequence: Synthetic epitope
AAEMAVEVAE

SEQ ID NO: 31 - protein, 10 aa, Artificial Sequence
  Description of Artificial Sequence: Synthetic epitope
AAEMLTAKVK

SEQ ID NO: 32 - protein, 10 aa, Artificial Sequence
  Description of Artificial Sequence: Synthetic epitope
AAEMNGVFDT

SEQ ID NO: 33 - protein, 10 aa, Artificial Sequence
  Description of Artificial Sequence: Synthetic epitope
AAENAALQQL

SEQ ID NO: 34 - protein, 10 aa, Artificial Sequence
  Description of Artificial Sequence: Synthetic epitope
AAENEEIGSH

SEQ ID NO: 35 - protein, 10 aa, Artificial Sequence
  Description of Artificial Sequence: Synthetic epitope
AAEQTAAREQ

SEQ ID NO: 36 - protein, 10 aa, Artificial Sequence
  Description of Artificial Sequence: Synthetic epitope
AAERIQVGYY

SEQ ID NO: 37 - protein, 10 aa, Artificial Sequence
  Description of Artificial Sequence: Synthetic epitope
AAERLQVLLT

SEQ ID NO: 38 - protein, 10 aa, Artificial Sequence
  Description of Artificial Sequence: Synthetic epitope
AAESGAKEEL

SEQ ID NO: 39 - protein, 10 aa, Artificial Sequence
  Description of Artificial Sequence: Synthetic epitope
AAESLVLEQS

SEQ ID NO: 40 - protein, 10 aa, Artificial Sequence
  Description of Artificial Sequence: Synthetic epitope
AAESTEDLKA

SEQ ID NO: 41 - protein, 10 aa, Artificial Sequence
  Description of Artificial Sequence: Synthetic epitope
AAESVSLSRH

SEQ ID NO: 42 - protein, 10 aa, Artificial Sequence
  Description of Artificial Sequence: Synthetic epitope
AAETITTDSE

SEQ ID NO: 43 - protein, 10 aa, Artificial Sequence
  Description of Artificial Sequence: Synthetic epitope
AAETKVYSLP

SEQ ID NO: 44 - protein, 10 aa, Artificial Sequence
  Description of Artificial Sequence: Synthetic epitope
AAEVAAEKSF

SEQ ID NO: 45 - protein, 10 aa, Artificial Sequence
  Description of Artificial Sequence: Synthetic epitope
AAEVHEEVHE

SEQ ID NO: 46 - protein, 10 aa, Artificial Sequence
  Description of Artificial Sequence: Synthetic epitope
AAFMAVFILE

SEQ ID NO: 47 - protein, 10 aa, Artificial Sequence
  Description of Artificial Sequence: Synthetic epitope
AAFNKDALLN

SEQ ID NO: 48 - protein, 10 aa, Artificial Sequence
  Description of Artificial Sequence: Synthetic epitope
AAFNKDALLN

SEQ ID NO: 49 - protein, 10 aa, Artificial Sequence
  Description of Artificial Sequence: Synthetic epitope
AAFQEQLASE

SEQ ID NO: 50 - protein, 10 aa, Artificial Sequence
  Description of Artificial Sequence: Synthetic epitope
AAFQLRLAEL

SEQ ID NO: 51 - protein, 10 aa, Artificial Sequence
  Description of Artificial Sequence: Synthetic epitope
AAFSESEKDT

SEQ ID NO: 52 - protein, 10 aa, Artificial Sequence
  Description of Artificial Sequence: Synthetic epitope
AAGAASLPSE

SEQ ID NO: 53 - protein, 10 aa, Artificial Sequence
  Description of Artificial Sequence: Synthetic epitope
AAGALSTSIP

SEQ ID NO: 54 - protein, 10 aa, Artificial Sequence
  Description of Artificial Sequence: Synthetic epitope
AAGDAVRSPA

SEQ ID NO: 55 - protein, 10 aa, Artificial Sequence
  Description of Artificial Sequence: Synthetic epitope
AAGEAKVKKQ

SEQ ID NO: 56 - protein, 10 aa, Artificial Sequence
  Description of Artificial Sequence: Synthetic epitope
AAGEMSDEEI

SEQ ID NO: 57 - protein, 10 aa, Artificial Sequence
  Description of Artificial Sequence: Synthetic epitope
AAGLAENLGL

SEQ ID NO: 58 - protein, 10 aa, Artificial Sequence
  Description of Artificial Sequence: Synthetic epitope
AAGLQSANTE

SEQ ID NO: 59 - protein, 10 aa, Artificial Sequence
  Description of Artificial Sequence: Synthetic epitope
AAGLVQGLAI

SEQ ID NO: 60 - protein, 10 aa, Artificial Sequence
  Description of Artificial Sequence: Synthetic epitope
AAGPSTRASS

SEQ ID NO: 61 - protein, 10 aa, Artificial Sequence
  Description of Artificial Sequence: Synthetic epitope
AAGQNKQHSI

SEQ ID NO: 62 - protein, 10 aa, Artificial Sequence
  Description of Artificial Sequence: Synthetic epitope
AAGRDSTKAF

SEQ ID NO: 63 - protein, 10 aa, Artificial Sequence
  Description of Artificial Sequence: Synthetic epitope
AAGRNTSAEK

SEQ ID NO: 64 - protein, 10 aa, Artificial Sequence
  Description of Artificial Sequence: Synthetic epitope
AAGSADEAHG

SEQ ID NO: 65 - protein, 10 aa, Artificial Sequence
  Description of Artificial Sequence: Synthetic epitope
AAGSLLAEKS

SEQ ID NO: 66 - protein, 10 aa, Artificial Sequence
  Description of Artificial Sequence: Synthetic epitope
AAGSSKREPS

SEQ ID NO: 67 - protein, 10 aa, Artificial Sequence
  Description of Artificial Sequence: Synthetic epitope
AAGSVKAALQ

SEQ ID NO: 68 - protein, 10 aa, Artificial Sequence
  Description of Artificial Sequence: Synthetic epitope
AAGTATSQRF

SEQ ID NO: 69 - protein, 10 aa, Artificial Sequence
  Description of Artificial Sequence: Synthetic epitope
AAGTSTISQD

SEQ ID NO: 70 - protein, 10 aa, Artificial Sequence
  Description of Artificial Sequence: Synthetic epitope
AAGVKITAVR

SEQ ID NO: 71 - protein, 10 aa, Artificial Sequence
  Description of Artificial Sequence: Synthetic epitope
AAGVTKQSTS

SEQ ID NO: 72 - protein, 10 aa, Artificial Sequence
  Description of Artificial Sequence: Synthetic epitope
AAHATDSALS

SEQ ID NO: 73 - protein, 10 aa, Artificial Sequence
  Description of Artificial Sequence: Synthetic epitope
AAHIASLKAS

SEQ ID NO: 74 - protein, 10 aa, Artificial Sequence
  Description of Artificial Sequence: Synthetic epitope
AAIASMKSPE

SEQ ID NO: 75 - protein, 10 aa, Artificial Sequence
  Description of Artificial Sequence: Synthetic epitope
AAIHRSMANP

SEQ ID NO: 76 - protein, 10 aa, Artificial Sequence
  Description of Artificial Sequence: Synthetic epitope
AAIISSMAEL

SEQ ID NO: 77 - protein, 10 aa, Artificial Sequence
  Description of Artificial Sequence: Synthetic epitope
AAILGETEVQ

SEQ ID NO: 78 - protein, 10 aa, Artificial Sequence
  Description of Artificial Sequence: Synthetic epitope
AAILMKGTAA

SEQ ID NO: 79 - protein, 10 aa, Artificial Sequence
  Description of Artificial Sequence: Synthetic epitope
AAILRSQQFD

SEQ ID NO: 80 - protein, 10 aa, Artificial Sequence
  Description of Artificial Sequence: Synthetic epitope
AAIMRITADM

SEQ ID NO: 81 - protein, 10 aa, Artificial Sequence
  Description of Artificial Sequence: Synthetic epitope
AAINSTYNTS

SEQ ID NO: 82 - protein, 10 aa, Artificial Sequence
  Description of Artificial Sequence: Synthetic epitope
AAIPHVPRYH

SEQ ID NO: 83 - protein, 10 aa, Artificial Sequence
  Description of Artificial Sequence: Synthetic epitope
AAIRQAAKNG

SEQ ID NO: 84 - protein, 10 aa, Artificial Sequence
  Description of Artificial Sequence: Synthetic epitope
AAITQRGNSS

SEQ ID NO: 85 - protein, 10 aa, Artificial Sequence
  Description of Artificial Sequence: Synthetic epitope
AAKAEMQLMS

SEQ ID NO: 86 - protein, 10 aa, Artificial Sequence
  Description of Artificial Sequence: Synthetic epitope
AAKAQQEQEL

SEQ ID NO: 87 - protein, 10 aa, Artificial Sequence
  Description of Artificial Sequence: Synthetic epitope
AAKDKSSDKK

SEQ ID NO: 88 - protein, 10 aa, Artificial Sequence
  Description of Artificial Sequence: Synthetic epitope
AAKDQATAEQ

SEQ ID NO: 89 - protein, 10 aa, Artificial Sequence
  Description of Artificial Sequence: Synthetic epitope
AAKEMTTKDK

SEQ ID NO: 90 - protein, 10 aa, Artificial Sequence
  Description of Artificial Sequence: Synthetic epitope
AAKGLVVGLQ

SEQ ID NO: 91 - protein, 10 aa, Artificial Sequence
  Description of Artificial Sequence: Synthetic epitope
AAKGVLSEKL

SEQ ID NO: 92 - protein, 10 aa, Artificial Sequence
  Description of Artificial Sequence: Synthetic epitope
AAKKAKSETV

SEQ ID NO: 93 - protein, 10 aa, Artificial Sequence
  Description of Artificial Sequence: Synthetic epitope
AAKKLKEESR

SEQ ID NO: 94 - protein, 10 aa, Artificial Sequence
  Description of Artificial Sequence: Synthetic epitope
AAKKQARSLQ

SEQ ID NO: 95 - protein, 10 aa, Artificial Sequence
  Description of Artificial Sequence: Synthetic epitope
AAKKQEKQKD

SEQ ID NO: 96 - protein, 10 aa, Artificial Sequence
  Description of Artificial Sequence: Synthetic epitope
AAKKRERATS

SEQ ID NO: 97 - protein, 10 aa, Artificial Sequence
  Description of Artificial Sequence: Synthetic epitope
AAKKRQEEQE

SEQ ID NO: 98 - protein, 10 aa, Artificial Sequence
  Description of Artificial Sequence: Synthetic epitope
AAKLKLNEEQ

SEQ ID NO: 99 - protein, 10 aa, Artificial Sequence
  Description of Artificial Sequence: Synthetic epitope
AAKLVKRNFL

SEQ ID NO: 100 - protein, 10 aa, Artificial Sequence
  Description of Artificial Sequence: Synthetic epitope
AAKMADEAIL

SEQ ID NO: 101 - protein, 10 aa, Artificial Sequence
  Description of Artificial Sequence: Synthetic epitope
AAKMQGKVVL

SEQ ID NO: 102 - protein, 10 aa, Artificial Sequence
  Description of Artificial Sequence: Synthetic epitope
AAKPKAAKPK

SEQ ID NO: 103 - protein, 10 aa, Artificial Sequence
  Description of Artificial Sequence: Synthetic epitope
AAKPKTAKPK

SEQ ID NO: 104 - protein, 10 aa, Artificial Sequence
  Description of Artificial Sequence: Synthetic epitope
AAKQAEKRSE

SEQ ID NO: 105 - protein, 10 aa, Artificial Sequence
  Description of Artificial Sequence: Synthetic epitope
AAKRASRIYN

SEQ ID NO: 106 - protein, 10 aa, Artificial Sequence
  Description of Artificial Sequence: Synthetic epitope
AAKRLSLESE

SEQ ID NO: 107 - protein, 10 aa, Artificial Sequence
  Description of Artificial Sequence: Synthetic epitope
AAKRTTAATL

SEQ ID NO: 108 - protein, 10 aa, Artificial Sequence
  Description of Artificial Sequence: Synthetic epitope
AAKTANEGGL

SEQ ID NO: 109 - protein, 10 aa, Artificial Sequence
  Description of Artificial Sequence: Synthetic epitope
AAKTKGLAGG

SEQ ID NO: 110 - protein, 10 aa, Artificial Sequence
  Description of Artificial Sequence: Synthetic epitope
AAKTSSAGPS

SEQ ID NO: 111 - protein, 10 aa, Artificial Sequence
  Description of Artificial Sequence: Synthetic epitope
AAKTTASNHA

SEQ ID NO: 112 - protein, 10 aa, Artificial Sequence
  Description of Artificial Sequence: Synthetic epitope
AAKVAKTRKE

SEQ ID NO: 113 - protein, 10 aa, Artificial Sequence
  Description of Artificial Sequence: Synthetic epitope
AALAKTLQQT

SEQ ID NO: 114 - protein, 10 aa, Artificial Sequence
  Description of Artificial Sequence: Synthetic epitope
AALALSESEQ

SEQ ID NO: 115 - protein, 10 aa, Artificial Sequence
  Description of Artificial Sequence: Synthetic epitope
AALASRARVL

SEQ ID NO: 116 - protein, 10 aa, Artificial Sequence
  Description of Artificial Sequence: Synthetic epitope
AALATILSGE

SEQ ID NO: 117 - protein, 10 aa, Artificial Sequence
  Description of Artificial Sequence: Synthetic epitope
AALDDQDKVQ

SEQ ID NO: 118 - protein, 10 aa, Artificial Sequence
  Description of Artificial Sequence: Synthetic epitope
AALEAAQDLI

SEQ ID NO: 119 - protein, 10 aa, Artificial Sequence
  Description of Artificial Sequence: Synthetic epitope
AALEEVASSD

SEQ ID NO: 120 - protein, 10 aa, Artificial Sequence
  Description of Artificial Sequence: Synthetic epitope
AALELSSDEA

SEQ ID NO: 121 - protein, 10 aa, Artificial Sequence
  Description of Artificial Sequence: Synthetic epitope
AALEQMASEA

SEQ ID NO: 122 - protein, 10 aa, Artificial Sequence
  Description of Artificial Sequence: Synthetic epitope
AALEQQVLML

SEQ ID NO: 123 - protein, 10 aa, Artificial Sequence
  Description of Artificial Sequence: Synthetic epitope
AALESKLAQA

SEQ ID NO: 124 - protein, 10 aa, Artificial Sequence
  Description of Artificial Sequence: Synthetic epitope
AALEVVSEPF

SEQ ID NO: 125 - protein, 10 aa, Artificial Sequence
  Description of Artificial Sequence: Synthetic epitope
AALGNKVVES

SEQ ID NO: 126 - protein, 10 aa, Artificial Sequence
  Description of Artificial Sequence: Synthetic epitope
AALLAKQAEM

SEQ ID NO: 127 - protein, 10 aa, Artificial Sequence
  Description of Artificial Sequence: Synthetic epitope
AALLHALPLK

SEQ ID NO: 128 - protein, 10 aa, Artificial Sequence
  Description of Artificial Sequence: Synthetic epitope
AALLQASSKT

SEQ ID NO: 129 - protein, 10 aa, Artificial Sequence
  Description of Artificial Sequence: Synthetic epitope
AALNSQTAVQ

SEQ ID NO: 130 - protein, 10 aa, Artificial Sequence
  Description of Artificial Sequence: Synthetic epitope
AALNTSAGNS

SEQ ID NO: 131 - protein, 10 aa, Artificial Sequence
  Description of Artificial Sequence: Synthetic epitope
AALPLMSVED

SEQ ID NO: 132 - protein, 10 aa, Artificial Sequence
  Description of Artificial Sequence: Synthetic epitope
AALPQSSEKL

SEQ ID NO: 133 - protein, 10 aa, Artificial Sequence
  Description of Artificial Sequence: Synthetic epitope
AALQAHVAQE

SEQ ID NO: 134 - protein, 10 aa, Artificial Sequence
  Description of Artificial Sequence: Synthetic epitope
AALQAQKAQD

SEQ ID NO: 135 - protein, 10 aa, Artificial Sequence
  Description of Artificial Sequence: Synthetic epitope
AALQLFLSRA

SEQ ID NO: 136 - protein, 10 aa, Artificial Sequence
  Description of Artificial Sequence: Synthetic epitope
AALQSSVSQE

SEQ ID NO: 137 - protein, 10 aa, Artificial Sequence
  Description of Artificial Sequence: Synthetic epitope
AALRANLKMK

SEQ ID NO: 138 - protein, 10 aa, Artificial Sequence
  Description of Artificial Sequence: Synthetic epitope
AALRATQEEL

SEQ ID NO: 139 - protein, 10 aa, Artificial Sequence
  Description of Artificial Sequence: Synthetic epitope
AALREAATSE

SEQ ID NO: 140 - protein, 10 aa, Artificial Sequence
  Description of Artificial Sequence: Synthetic epitope
AALRELELVA

SEQ ID NO: 141 - protein, 10 aa, Artificial Sequence
  Description of Artificial Sequence: Synthetic epitope
AALSESSEQE

SEQ ID NO: 142 - protein, 10 aa, Artificial Sequence
  Description of Artificial Sequence: Synthetic epitope
AALSPMSAAT

SEQ ID NO: 143 - protein, 10 aa, Artificial Sequence
  Description of Artificial Sequence: Synthetic epitope
AALTGLQAEA

SEQ ID NO: 144 - protein, 10 aa, Artificial Sequence
  Description of Artificial Sequence: Synthetic epitope
AALTQLRALV

SEQ ID NO: 145 - protein, 10 aa, Artificial Sequence
  Description of Artificial Sequence: Synthetic epitope
AALVAKGTSS

SEQ ID NO: 146 - protein, 10 aa, Artificial Sequence
  Description of Artificial Sequence: Synthetic epitope
AALVGIQAVE

SEQ ID NO: 147 - protein, 10 aa, Artificial Sequence
  Description of Artificial Sequence: Synthetic epitope
AAMADVSERT

SEQ ID NO: 148 - protein, 10 aa, Artificial Sequence
  Description of Artificial Sequence: Synthetic epitope
AAMEASAYGD

SEQ ID NO: 149 - protein, 10 aa, Artificial Sequence
  Description of Artificial Sequence: Synthetic epitope
AAMEKLSSIK

SEQ ID NO: 150 - protein, 10 aa, Artificial Sequence
  Description of Artificial Sequence: Synthetic epitope
AAMESNVKVQ

SEQ ID NO: 151 - protein, 10 aa, Artificial Sequence
  Description of Artificial Sequence: Synthetic epitope
AAMETDITEQ

SEQ ID NO: 152 - protein, 10 aa, Artificial Sequence
  Description of Artificial Sequence: Synthetic epitope
AAMKADSGSS

SEQ ID NO: 153 - protein, 10 aa, Artificial Sequence
  Description of Artificial Sequence: Synthetic epitope
AAMKELYESN

SEQ ID NO: 154 - protein, 10 aa, Artificial Sequence
  Description of Artificial Sequence: Synthetic epitope
AAMLESLTSA

SEQ ID NO: 155 - protein, 10 aa, Artificial Sequence
  Description of Artificial Sequence: Synthetic epitope
AAMLNDGSSA

SEQ ID NO: 156 - protein, 10 aa, Artificial Sequence
  Description of Artificial Sequence: Synthetic epitope
AAMRTLVKEH

SEQ ID NO: 157 - protein, 10 aa, Artificial Sequence
  Description of Artificial Sequence: Synthetic epitope
AAMSSKLSPE

SEQ ID NO: 158 - protein, 10 aa, Artificial Sequence
  Description of Artificial Sequence: Synthetic epitope
AAMSSKTLKK

SEQ ID NO: 159 - protein, 10 aa, Artificial Sequence
  Description of Artificial Sequence: Synthetic epitope
AANAARERSR

SEQ ID NO: 160 - protein, 10 aa, Artificial Sequence
  Description of Artificial Sequence: Synthetic epitope
AANKMEAGIK

SEQ ID NO: 161 - protein, 10 aa, Artificial Sequence
  Description of Artificial Sequence: Synthetic epitope
AANQVMEIFP

SEQ ID NO: 162 - protein, 10 aa, Artificial Sequence
  Description of Artificial Sequence: Synthetic epitope
AANWTVRGEE

SEQ ID NO: 163 - protein, 10 aa, Artificial Sequence
  Description of Artificial Sequence: Synthetic epitope
AAPAETPHEK

SEQ ID NO: 164 - protein, 10 aa, Artificial Sequence
  Description of Artificial Sequence: Synthetic epitope
AAPAGTTSSR

SEQ ID NO: 165 - protein, 10 aa, Artificial Sequence
  Description of Artificial Sequence: Synthetic epitope
AAPAVKVARG

SEQ ID NO: 166 - protein, 10 aa, Artificial Sequence
  Description of Artificial Sequence: Synthetic epitope
AAPDSVRKMP

SEQ ID NO: 167 - protein, 10 aa, Artificial Sequence
  Description of Artificial Sequence: Synthetic epitope
AAPIKTRTRR

SEQ ID NO: 168 - protein, 10 aa, Artificial Sequence
  Description of Artificial Sequence: Synthetic epitope
AAPKQFLAKQ

SEQ ID NO: 169 - protein, 10 aa, Artificial Sequence
  Description of Artificial Sequence: Synthetic epitope
AAPLARAESS

SEQ ID NO: 170 - protein, 10 aa, Artificial Sequence
  Description of Artificial Sequence: Synthetic epitope
AAPLIKVQSD

SEQ ID NO: 171 - protein, 10 aa, Artificial Sequence
  Description of Artificial Sequence: Synthetic epitope
AAPLSVASKA

SEQ ID NO: 172 - protein, 10 aa, Artificial Sequence
  Description of Artificial Sequence: Synthetic epitope
AAPNMKAMEK

SEQ ID NO: 173 - protein, 10 aa, Artificial Sequence
  Description of Artificial Sequence: Synthetic epitope
AAPPKQMPAE

SEQ ID NO: 174 - protein, 10 aa, Artificial Sequence
  Description of Artificial Sequence: Synthetic epitope
AAPQRQAYLK

SEQ ID NO: 175 - protein, 10 aa, Artificial Sequence
  Description of Artificial Sequence: Synthetic epitope
AAPTAASDQP

SEQ ID NO: 176 - protein, 10 aa, Artificial Sequence
  Description of Artificial Sequence: Synthetic epitope
AAPTDSRDDQ

SEQ ID NO: 177 - protein, 10 aa, Artificial Sequence
  Description of Artificial Sequence: Synthetic epitope
AAPTNVVENP

SEQ ID NO: 178 - protein, 10 aa, Artificial Sequence
  Description of Artificial Sequence: Synthetic epitope
AAPTSESSLS

SEQ ID NO: 179 - protein, 10 aa, Artificial Sequence
  Description of Artificial Sequence: Synthetic epitope
AAPTSSALSS

SEQ ID NO: 180 - protein, 10 aa, Artificial Sequence
  Description of Artificial Sequence: Synthetic epitope
AAPVAEVPTA

SEQ ID NO: 181 - protein, 10 aa, Artificial Sequence
  Description of Artificial Sequence: Synthetic epitope
AAPVMNVIHS

SEQ ID NO: 182 - protein, 10 aa, Artificial Sequence
  Description of Artificial Sequence: Synthetic epitope
AAQAQVQGAS

SEQ ID NO: 183 - protein, 10 aa, Artificial Sequence
  Description of Artificial Sequence: Synthetic epitope
AAQATLRQTE

SEQ ID NO: 184 - protein, 10 aa, Artificial Sequence
  Description of Artificial Sequence: Synthetic epitope
AAQEAARLRQ

SEQ ID NO: 185 - protein, 10 aa, Artificial Sequence
  Description of Artificial Sequence: Synthetic epitope
AAQEKMIQQE

SEQ ID NO: 186 - protein, 10 aa, Artificial Sequence
  Description of Artificial Sequence: Synthetic epitope
AAQEKNSKLE

SEQ ID NO: 187 - protein, 10 aa, Artificial Sequence
  Description of Artificial Sequence: Synthetic epitope
AAQKTSEGLE

SEQ ID NO: 188 - protein, 10 aa, Artificial Sequence
  Description of Artificial Sequence: Synthetic epitope
AAQLELQMTA

SEQ ID NO: 189 - protein, 10 aa, Artificial Sequence
  Description of Artificial Sequence: Synthetic epitope
AAQMHNKNQD

SEQ ID NO: 190 - protein, 10 aa, Artificial Sequence
  Description of Artificial Sequence: Synthetic epitope
AAQNKPDQVA

SEQ ID NO: 191 - protein, 10 aa, Artificial Sequence
  Description of Artificial Sequence: Synthetic epitope
AAQNRQEFAV

SEQ ID NO: 192 - protein, 10 aa, Artificial Sequence
  Description of Artificial Sequence: Synthetic epitope
AAQPTRTKAA

SEQ ID NO: 193 - protein, 10 aa, Artificial Sequence
  Description of Artificial Sequence: Synthetic epitope
AAQPVDEVPF

SEQ ID NO: 194 - protein, 10 aa, Artificial Sequence
  Description of Artificial Sequence: Synthetic epitope
AAQQTISASE

SEQ ID NO: 195 - protein, 10 aa, Artificial Sequence
  Description of Artificial Sequence: Synthetic epitope
AAQRQRYEQY

SEQ ID NO: 196 - protein, 10 aa, Artificial Sequence
  Description of Artificial Sequence: Synthetic epitope
AAQSMIPINE

SEQ ID NO: 197 - protein, 10 aa, Artificial Sequence
  Description of Artificial Sequence: Synthetic epitope
AAQSTLNRKD

SEQ ID NO: 198 - protein, 10 aa, Artificial Sequence
  Description of Artificial Sequence: Synthetic epitope
AAQTATKTLQ

SEQ ID NO: 199 - protein, 10 aa, Artificial Sequence
  Description of Artificial Sequence: Synthetic epitope
AAQTDAVQDA

SEQ ID NO: 200 - protein, 10 aa, Artificial Sequence
  Description of Artificial Sequence: Synthetic epitope
AAQTRAMKQV

SEQ ID NO: 201 - protein, 10 aa, Artificial Sequence
  Description of Artificial Sequence: Synthetic epitope
AARAAEGESR

SEQ ID NO: 202 - protein, 10 aa, Artificial Sequence
  Description of Artificial Sequence: Synthetic epitope
AARAEQLEGE

SEQ ID NO: 203 - protein, 10 aa, Artificial Sequence
  Description of Artificial Sequence: Synthetic epitope
AAREDVQMKL

SEQ ID NO: 204 - protein, 10 aa, Artificial Sequence
  Description of Artificial Sequence: Synthetic epitope
AAREEAEQAL

SEQ ID NO: 205 - protein, 10 aa, Artificial Sequence
  Description of Artificial Sequence: Synthetic epitope
AARELLTLDE

SEQ ID NO: 206 - protein, 10 aa, Artificial Sequence
  Description of Artificial Sequence: Synthetic epitope
AARPKSAFKV

SEQ ID NO: 207 - protein, 10 aa, Artificial Sequence
  Description of Artificial Sequence: Synthetic epitope
AARQTTEMLK

SEQ ID NO: 208 - protein, 10 aa, Artificial Sequence
  Description of Artificial Sequence: Synthetic epitope
AARRLAAQES

SEQ ID NO: 209 - protein, 10 aa, Artificial Sequence
  Description of Artificial Sequence: Synthetic epitope
AARRLAAQES

SEQ ID NO: 210 - protein, 10 aa, Artificial Sequence
  Description of Artificial Sequence: Synthetic epitope
AARRLAAQES

SEQ ID NO: 211 - protein, 10 aa, Artificial Sequence
  Description of Artificial Sequence: Synthetic epitope
AARRQEQRAT

SEQ ID NO: 212 - protein, 10 aa, Artificial Sequence
  Description of Artificial Sequence: Synthetic epitope
AARRSADIGA

SEQ ID NO: 213 - protein, 10 aa, Artificial Sequence
  Description of Artificial Sequence: Synthetic epitope
AARSVVMSTK

SEQ ID NO: 214 - protein, 10 aa, Artificial Sequence
  Description of Artificial Sequence: Synthetic epitope
AARTAKIKEG

SEQ ID NO: 215 - protein, 10 aa, Artificial Sequence
  Description of Artificial Sequence: Synthetic epitope
AARTKSRKAS

SEQ ID NO: 216 - protein, 10 aa, Artificial Sequence
  Description of Artificial Sequence: Synthetic epitope
AARTRVAREQ

SEQ ID NO: 217 - protein, 10 aa, Artificial Sequence
  Description of Artificial Sequence: Synthetic epitope
AASAAHTPTT

SEQ ID NO: 218 - protein, 10 aa, Artificial Sequence
  Description of Artificial Sequence: Synthetic epitope
AASAAVPVRP

SEQ ID NO: 219 - protein, 10 aa, Artificial Sequence
  Description of Artificial Sequence: Synthetic epitope
AASAAVTYET

SEQ ID NO: 220 - protein, 10 aa, Artificial Sequence
  Description of Artificial Sequence: Synthetic epitope
AASADFTAVT

SEQ ID NO: 221 - protein, 10 aa, Artificial Sequence
  Description of Artificial Sequence: Synthetic epitope
AASADLKIQI

SEQ ID NO: 222 - protein, 10 aa, Artificial Sequence
  Description of Artificial Sequence: Synthetic epitope
AASAEPKIMK

SEQ ID NO: 223 - protein, 10 aa, Artificial Sequence
  Description of Artificial Sequence: Synthetic epitope
AASAEPQSKN

SEQ ID NO: 224 - protein, 10 aa, Artificial Sequence
  Description of Artificial Sequence: Synthetic epitope
AASAFLASSV

SEQ ID NO: 225 - protein, 10 aa, Artificial Sequence
  Description of Artificial Sequence: Synthetic epitope
AASANAKSRR

SEQ ID NO: 226 - protein, 10 aa, Artificial Sequence
  Description of Artificial Sequence: Synthetic epitope
AASASAIDIS

SEQ ID NO: 227 - protein, 10 aa, Artificial Sequence
  Description of Artificial Sequence: Synthetic epitope
AASASLFPLK

SEQ ID NO: 228 - protein, 10 aa, Artificial Sequence
  Description of Artificial Sequence: Synthetic epitope
AASATPSRLR

SEQ ID NO: 229 - protein, 10 aa, Artificial Sequence
  Description of Artificial Sequence: Synthetic epitope
AASAYNYAEQ

SEQ ID NO: 230 - protein, 10 aa, Artificial Sequence
  Description of Artificial Sequence: Synthetic epitope
AASDDIEIVV

SEQ ID NO: 231 - protein, 10 aa, Artificial Sequence
  Description of Artificial Sequence: Synthetic epitope
AASEASQDVT

SEQ ID NO: 232 - protein, 10 aa, Artificial Sequence
  Description of Artificial Sequence: Synthetic epitope
AASEIAVGHQ

SEQ ID NO: 233 - protein, 10 aa, Artificial Sequence
  Description of Artificial Sequence: Synthetic epitope
AASEIEAVSV

SEQ ID NO: 234 - protein, 10 aa, Artificial Sequence
  Description of Artificial Sequence: Synthetic epitope
AASEPSLDLD

SEQ ID NO: 235 - protein, 10 aa, Artificial Sequence
  Description of Artificial Sequence: Synthetic epitope
AASEQQVAAR

SEQ ID NO: 236 - protein, 10 aa, Artificial Sequence
  Description of Artificial Sequence: Synthetic epitope
AASGKRVSKA

SEQ ID NO: 237 - protein, 10 aa, Artificial Sequence
  Description of Artificial Sequence: Synthetic epitope
AASGRLAASQ

SEQ ID NO: 238 - protein, 10 aa, Artificial Sequence
  Description of Artificial Sequence: Synthetic epitope
AASGSGLEKP

SEQ ID NO: 239 - protein, 10 aa, Artificial Sequence
  Description of Artificial Sequence: Synthetic epitope
AASHSSAFTP

SEQ ID NO: 240 - protein, 10 aa, Artificial Sequence
  Description of Artificial Sequence: Synthetic epitope
AASKARLEAK

SEQ ID NO: 241 - protein, 10 aa, Artificial Sequence
  Description of Artificial Sequence: Synthetic epitope
AASKNLQTSA

SEQ ID NO: 242 - protein, 10 aa, Artificial Sequence
  Description of Artificial Sequence: Synthetic epitope
AASKNTTEKE

SEQ ID NO: 243 - protein, 10 aa, Artificial Sequence
  Description of Artificial Sequence: Synthetic epitope
AASKSKEKVP

SEQ ID NO: 244 - protein, 10 aa, Artificial Sequence
  Description of Artificial Sequence: Synthetic epitope
AASKVKQDMP

SEQ ID NO: 245 - protein, 10 aa, Artificial Sequence
  Description of Artificial Sequence: Synthetic epitope
AASLENSASS

SEQ ID NO: 246 - protein, 10 aa, Artificial Sequence
  Description of Artificial Sequence: Synthetic epitope
AASLETLEAQ

SEQ ID NO: 247 - protein, 10 aa, Artificial Sequence
  Description of Artificial Sequence: Synthetic epitope
AASLSLQLSL

SEQ ID NO: 248 - protein, 10 aa, Artificial Sequence
  Description of Artificial Sequence: Synthetic epitope
AASMDRVPKV

SEQ ID NO: 249 - protein, 10 aa, Artificial Sequence
  Description of Artificial Sequence: Synthetic epitope
AASPMAAKPD

SEQ ID NO: 250 - protein, 10 aa, Artificial Sequence
  Description of Artificial Sequence: Synthetic epitope
AASPTTSVSS

SEQ ID NO: 251 - protein, 10 aa, Artificial Sequence
  Description of Artificial Sequence: Synthetic epitope
AASPVASLLE

SEQ ID NO: 252 - protein, 10 aa, Artificial Sequence
  Description of Artificial Sequence: Synthetic epitope
AASQAHQASH

SEQ ID NO: 253 - protein, 10 aa, Artificial Sequence
  Description of Artificial Sequence: Synthetic epitope
AASQASAPIL

SEQ ID NO: 254 - protein, 10 aa, Artificial Sequence
  Description of Artificial Sequence: Synthetic epitope
AASQLAVPST

SEQ ID NO: 255 - protein, 10 aa, Artificial Sequence
  Description of Artificial Sequence: Synthetic epitope
AASQQEIEQS

SEQ ID NO: 256 - protein, 10 aa, Artificial Sequence
  Description of Artificial Sequence: Synthetic epitope
AASRATTLSN

SEQ ID NO: 257 - protein, 10 aa, Artificial Sequence
  Description of Artificial Sequence: Synthetic epitope
AASRFPKLSR

SEQ ID NO: 258 - protein, 10 aa, Artificial Sequence
  Description of Artificial Sequence: Synthetic epitope
AASRQPELGE

SEQ ID NO: 259 - protein, 10 aa, Artificial Sequence
  Description of Artificial Sequence: Synthetic epitope
AASRQSDTSG

SEQ ID NO: 260 - protein, 10 aa, Artificial Sequence
  Description of Artificial Sequence: Synthetic epitope
AASRSGLSKA

SEQ ID NO: 261 - protein, 10 aa, Artificial Sequence
  Description of Artificial Sequence: Synthetic epitope
AASSAAFSTR

SEQ ID NO: 262 - protein, 10 aa, Artificial Sequence
  Description of Artificial Sequence: Synthetic epitope
AASSFPLLEQ

SEQ ID NO: 263 - protein, 10 aa, Artificial Sequence
  Description of Artificial Sequence: Synthetic epitope
AASSGQATTQ

SEQ ID NO: 264 - protein, 10 aa, Artificial Sequence
  Description of Artificial Sequence: Synthetic epitope
AASSLIMEDK

SEQ ID NO: 265 - protein, 10 aa, Artificial Sequence
  Description of Artificial Sequence: Synthetic epitope
AASSRASLDP

SEQ ID NO: 266 - protein, 10 aa, Artificial Sequence
  Description of Artificial Sequence: Synthetic epitope
AASSRLAAIP

SEQ ID NO: 267 - protein, 10 aa, Artificial Sequence
  Description of Artificial Sequence: Synthetic epitope
AASSRRVVPT

SEQ ID NO: 268 - protein, 10 aa, Artificial Sequence
  Description of Artificial Sequence: Synthetic epitope
AASSTKKDKK

SEQ ID NO: 269 - protein, 10 aa, Artificial Sequence
  Description of Artificial Sequence: Synthetic epitope
AASTEEKEAG

SEQ ID NO: 270 - protein, 10 aa, Artificial Sequence
  Description of Artificial Sequence: Synthetic epitope
AASTREIPRA

SEQ ID NO: 271 - protein, 10 aa, Artificial Sequence
  Description of Artificial Sequence: Synthetic epitope
AASTSDVQDR

SEQ ID NO: 272 - protein, 10 aa, Artificial Sequence
  Description of Artificial Sequence: Synthetic epitope
AASVITYTAP

SEQ ID NO: 273 - protein, 10 aa, Artificial Sequence
  Description of Artificial Sequence: Synthetic epitope
AASVLEPLKV

SEQ ID NO: 274 - protein, 10 aa, Artificial Sequence
  Description of Artificial Sequence: Synthetic epitope
AASVQEAASV

SEQ ID NO: 275 - protein, 10 aa, Artificial Sequence
  Description of Artificial Sequence: Synthetic epitope
AASVSIPSEK

SEQ ID NO: 276 - protein, 10 aa, Artificial Sequence
  Description of Artificial Sequence: Synthetic epitope
AATDIVDSQY

SEQ ID NO: 277 - protein, 10 aa, Artificial Sequence
  Description of Artificial Sequence: Synthetic epitope
AATDSMRGEA

SEQ ID NO: 278 - protein, 10 aa, Artificial Sequence
  Description of Artificial Sequence: Synthetic epitope
AATEKQTLYK

SEQ ID NO: 279 - protein, 10 aa, Artificial Sequence
  Description of Artificial Sequence: Synthetic epitope
AATELNSWSV

SEQ ID NO: 280 - protein, 10 aa, Artificial Sequence
  Description of Artificial Sequence: Synthetic epitope
AATKSAKKTK

SEQ ID NO: 281 - protein, 10 aa, Artificial Sequence
  Description of Artificial Sequence: Synthetic epitope
AATLSAERVR

SEQ ID NO: 282 - protein, 10 aa, Artificial Sequence
  Description of Artificial Sequence: Synthetic epitope
AATLSQSAAE

SEQ ID NO: 283 - protein, 10 aa, Artificial Sequence
  Description of Artificial Sequence: Synthetic epitope
AATMEIPIHG

SEQ ID NO: 284 - protein, 10 aa, Artificial Sequence
  Description of Artificial Sequence: Synthetic epitope
AATPVIASTK

SEQ ID NO: 285 - protein, 10 aa, Artificial Sequence
  Description of Artificial Sequence: Synthetic epitope
AATQKLRPAS

SEQ ID NO: 286 - protein, 10 aa, Artificial Sequence
  Description of Artificial Sequence: Synthetic epitope
AATRTHKRSV

SEQ ID NO: 287 - protein, 10 aa, Artificial Sequence
  Description of Artificial Sequence: Synthetic epitope
AATSELEEIL

SEQ ID NO: 288 - protein, 10 aa, Artificial Sequence
  Description of Artificial Sequence: Synthetic epitope
AATTALAGLE

SEQ ID NO: 289 - protein, 10 aa, Artificial Sequence
  Description of Artificial Sequence: Synthetic epitope
AATTIANRTA

SEQ ID NO: 290 - protein, 10 aa, Artificial Sequence
  Description of Artificial Sequence: Synthetic epitope
AATTKGLATD

SEQ ID NO: 291 - protein, 10 aa, Artificial Sequence
  Description of Artificial Sequence: Synthetic epitope
AATTQTLEGD

SEQ ID NO: 292 - protein, 10 aa, Artificial Sequence
  Description of Artificial Sequence: Synthetic epitope
AATVSSADGK

SEQ ID NO: 293 - protein, 10 aa, Artificial Sequence
  Description of Artificial Sequence: Synthetic epitope
AAVDKLLAGD

SEQ ID NO: 294 - protein, 10 aa, Artificial Sequence
  Description of Artificial Sequence: Synthetic epitope
AAVEAKQVAQ

SEQ ID NO: 295 - protein, 10 aa, Artificial Sequence
  Description of Artificial Sequence: Synthetic epitope
AAVEQRSRFE

SEQ ID NO: 296 - protein, 10 aa, Artificial Sequence
  Description of Artificial Sequence: Synthetic epitope
AAVEVLNLVA

SEQ ID NO: 297 - protein, 10 aa, Artificial Sequence
  Description of Artificial Sequence: Synthetic epitope
AAVFSLAIKL

SEQ ID NO: 298 - protein, 10 aa, Artificial Sequence
  Description of Artificial Sequence: Synthetic epitope
AAVGAEVSMT

SEQ ID NO: 299 - protein, 10 aa, Artificial Sequence
  Description of Artificial Sequence: Synthetic epitope
AAVHGLSMQQ

SEQ ID NO: 300 - protein, 10 aa, Artificial Sequence
  Description of Artificial Sequence: Synthetic epitope
AAVIKARKLS

SEQ ID NO: 301 - protein, 10 aa, Artificial Sequence
  Description of Artificial Sequence: Synthetic epitope
AAVLSQGESS

SEQ ID NO: 302 - protein, 10 aa, Artificial Sequence
  Description of Artificial Sequence: Synthetic epitope
AAVPKSAKYI

SEQ ID NO: 303 - protein, 10 aa, Artificial Sequence
  Description of Artificial Sequence: Synthetic epitope
AAVPSMTQLL

SEQ ID NO: 304 - protein, 10 aa, Artificial Sequence
  Description of Artificial Sequence: Synthetic epitope
AAVQKMDQAE

SEQ ID NO: 305 - protein, 10 aa, Artificial Sequence
  Description of Artificial Sequence: Synthetic epitope
AAVQKSAEEL

SEQ ID NO: 306 - protein, 10 aa, Artificial Sequence
  Description of Artificial Sequence: Synthetic epitope
AAVQMTTEQL

SEQ ID NO: 307 - protein, 10 aa, Artificial Sequence
  Description of Artificial Sequence: Synthetic epitope
AAVQPQSFQQ

SEQ ID NO: 308 - protein, 10 aa, Artificial Sequence
  Description of Artificial Sequence: Synthetic epitope
AAVQVEVVRA

SEQ ID NO: 309 - protein, 10 aa, Artificial Sequence
  Description of Artificial Sequence: Synthetic epitope
AAVRKAQANV

SEQ ID NO: 310 - protein, 10 aa, Artificial Sequence
  Description of Artificial Sequence: Synthetic epitope
AAVRTLGQQA

SEQ ID NO: 311 - protein, 10 aa, Artificial Sequence
  Description of Artificial Sequence: Synthetic epitope
AAVSKASGRF

SEQ ID NO: 312 - protein, 10 aa, Artificial Sequence
  Description of Artificial Sequence: Synthetic epitope
AAVSSAPATS

SEQ ID NO: 313 - protein, 10 aa, Artificial Sequence
  Description of Artificial Sequence: Synthetic epitope
AAVSTHVALG

SEQ ID NO: 314 - protein, 10 aa, Artificial Sequence
  Description of Artificial Sequence: Synthetic epitope
AAVTGQLALV

SEQ ID NO: 315 - protein, 10 aa, Artificial Sequence
  Description of Artificial Sequence: Synthetic epitope
AAVTPPLFAA

SEQ ID NO: 316 - protein, 10 aa, Artificial Sequence
  Description of Artificial Sequence: Synthetic epitope
AAVTSALSPE

SEQ ID NO: 317 - protein, 10 aa, Artificial Sequence
  Description of Artificial Sequence: Synthetic epitope
AAVVDSAPRP

SEQ ID NO: 318 - protein, 10 aa, Artificial Sequence
  Description of Artificial Sequence: Synthetic epitope
AAWKISIPYV

SEQ ID NO: 319 - protein, 10 aa, Artificial Sequence
  Description of Artificial Sequence: Synthetic epitope
AAYEYMAAYI

SEQ ID NO: 320 - protein, 10 aa, Artificial Sequence
  Description of Artificial Sequence: Synthetic epitope
AAYGYNVSKG

SEQ ID NO: 321 - protein, 10 aa, Artificial Sequence
  Description of Artificial Sequence: Synthetic epitope
AAYKQTKAQR

SEQ ID NO: 322 - protein, 10 aa, Artificial Sequence
  Description of Artificial Sequence: Synthetic epitope
AAYREKNSKP

SEQ ID NO: 323 - protein, 10 aa, Artificial Sequence
  Description of Artificial Sequence: Synthetic epitope
AAYRERTKAE

SEQ ID NO: 324 - protein, 10 aa, Artificial Sequence
  Description of Artificial Sequence: Synthetic epitope
ADAHEKISVQ

SEQ ID NO: 325 - protein, 10 aa, Artificial Sequence
  Description of Artificial Sequence: Synthetic epitope
ADAKQFAAIQ

SEQ ID NO: 326 - protein, 10 aa, Artificial Sequence
  Description of Artificial Sequence: Synthetic epitope
ADAKQNSEWM

SEQ ID NO: 327 - protein, 10 aa, Artificial Sequence
  Description of Artificial Sequence: Synthetic epitope
ADALSSTSNI

SEQ ID NO: 328 - protein, 10 aa, Artificial Sequence
  Description of Artificial Sequence: Synthetic epitope
ADAQDRIKAA

SEQ ID NO: 329 - protein, 10 aa, Artificial Sequence
  Description of Artificial Sequence: Synthetic epitope
ADAQIGTADP

SEQ ID NO: 330 - protein, 10 aa, Artificial Sequence
  Description of Artificial Sequence: Synthetic epitope
ADAQNLLSSL

SEQ ID NO: 331 - protein, 10 aa, Artificial Sequence
  Description of Artificial Sequence: Synthetic epitope
ADAQSAIEKR

SEQ ID NO: 332 - protein, 10 aa, Artificial Sequence
  Description of Artificial Sequence: Synthetic epitope
ADARQSIDVG

SEQ ID NO: 333 - protein, 10 aa, Artificial Sequence
  Description of Artificial Sequence: Synthetic epitope
ADASASKDSA

SEQ ID NO: 334 - protein, 10 aa, Artificial Sequence
  Description of Artificial Sequence: Synthetic epitope
ADASKLPNLK

SEQ ID NO: 335 - protein, 10 aa, Artificial Sequence
  Description of Artificial Sequence: Synthetic epitope
ADATAEMLEE

SEQ ID NO: 336 - protein, 10 aa, Artificial Sequence
  Description of Artificial Sequence: Synthetic epitope
ADAVQTVTGG

SEQ ID NO: 337 - protein, 10 aa, Artificial Sequence
  Description of Artificial Sequence: Synthetic epitope
ADAVSVYKRG

SEQ ID NO: 338 - protein, 10 aa, Artificial Sequence
  Description of Artificial Sequence: Synthetic epitope
ADDAMESSKP

SEQ ID NO: 339 - protein, 10 aa, Artificial Sequence
  Description of Artificial Sequence: Synthetic epitope
ADDIASSEIT

SEQ ID NO: 340 - protein, 10 aa, Artificial Sequence
  Description of Artificial Sequence: Synthetic epitope
ADDKATEPLP

SEQ ID NO: 341 - protein, 10 aa, Artificial Sequence
  Description of Artificial Sequence: Synthetic epitope
ADDKSVAKAA

SEQ ID NO: 342 - protein, 10 aa, Artificial Sequence
  Description of Artificial Sequence: Synthetic epitope
ADDVSALLTA

SEQ ID NO: 343 - protein, 10 aa, Artificial Sequence
  Description of Artificial Sequence: Synthetic epitope
ADEAAPFEAD

SEQ ID NO: 344 - protein, 10 aa, Artificial Sequence
  Description of Artificial Sequence: Synthetic epitope
ADEADRARAK

SEQ ID NO: 345 - protein, 10 aa, Artificial Sequence
  Description of Artificial Sequence: Synthetic epitope
ADEATTQKQS

SEQ ID NO: 346 - protein, 10 aa, Artificial Sequence
  Description of Artificial Sequence: Synthetic epitope
ADEAVTIHPV

SEQ ID NO: 347 - protein, 10 aa, Artificial Sequence
  Description of Artificial Sequence: Synthetic epitope
ADEGSAEKQA

SEQ ID NO: 348 - protein, 10 aa, Artificial Sequence
  Description of Artificial Sequence: Synthetic epitope
ADEGTSASPG

SEQ ID NO: 349 - protein, 10 aa, Artificial Sequence
  Description of Artificial Sequence: Synthetic epitope
ADEHSVLAEE

SEQ ID NO: 350 - protein, 10 aa, Artificial Sequence
  Description of Artificial Sequence: Synthetic epitope
ADEKLVMDTW

SEQ ID NO: 351 - protein, 10 aa, Artificial Sequence
  Description of Artificial Sequence: Synthetic epitope
ADELTNSRAA

SEQ ID NO: 352 - protein, 10 aa, Artificial Sequence
  Description of Artificial Sequence: Synthetic epitope
ADESAENVID

SEQ ID NO: 353 - protein, 10 aa, Artificial Sequence
  Description of Artificial Sequence: Synthetic epitope
ADETRNLPHS

SEQ ID NO: 354 - protein, 10 aa, Artificial Sequence
  Description of Artificial Sequence: Synthetic epitope
ADFEEAEIQE

SEQ ID NO: 355 - protein, 10 aa, Artificial Sequence
  Description of Artificial Sequence: Synthetic epitope
ADFEQQKAKE

SEQ ID NO: 356 - protein, 10 aa, Artificial Sequence
  Description of Artificial Sequence: Synthetic epitope
ADFKTINQIG

SEQ ID NO: 357 - protein, 10 aa, Artificial Sequence
  Description of Artificial Sequence: Synthetic epitope
ADFSESVSGT

SEQ ID NO: 358 - protein, 10 aa, Artificial Sequence
  Description of Artificial Sequence: Synthetic epitope
ADGGRESKRK

SEQ ID NO: 359 - protein, 10 aa, Artificial Sequence
  Description of Artificial Sequence: Synthetic epitope
ADGRKAAEPE

SEQ ID NO: 360 - protein, 10 aa, Artificial Sequence
  Description of Artificial Sequence: Synthetic epitope
ADGTAINKPL

SEQ ID NO: 361 - protein, 10 aa, Artificial Sequence
  Description of Artificial Sequence: Synthetic epitope
ADHKVLPSTQ

SEQ ID NO: 362 - protein, 10 aa, Artificial Sequence
  Description of Artificial Sequence: Synthetic epitope
ADIHPIQVQP

SEQ ID NO: 363 - protein, 10 aa, Artificial Sequence
  Description of Artificial Sequence: Synthetic epitope
ADIKYTQSAS

SEQ ID NO: 364 - protein, 10 aa, Artificial Sequence
  Description of Artificial Sequence: Synthetic epitope
ADIQQYSSDK

SEQ ID NO: 365 - protein, 10 aa, Artificial Sequence
  Description of Artificial Sequence: Synthetic epitope
ADIRMVFNGP

SEQ ID NO: 366 - protein, 10 aa, Artificial Sequence
  Description of Artificial Sequence: Synthetic epitope
ADITLMSQAQ

SEQ ID NO: 367 - protein, 10 aa, Artificial Sequence
  Description of Artificial Sequence: Synthetic epitope
ADKEEGGDVK

SEQ ID NO: 368 - protein, 10 aa, Artificial Sequence
  Description of Artificial Sequence: Synthetic epitope
ADKESEVSPS

SEQ ID NO: 369 - protein, 10 aa, Artificial Sequence
  Description of Artificial Sequence: Synthetic epitope
ADKLLKSEKQ

SEQ ID NO: 370 - protein, 10 aa, Artificial Sequence
  Description of Artificial Sequence: Synthetic epitope
ADKQTLQSEQ

SEQ ID NO: 371 - protein, 10 aa, Artificial Sequence
  Description of Artificial Sequence: Synthetic epitope
ADKSIEVRKF

SEQ ID NO: 372 - protein, 10 aa, Artificial Sequence
  Description of Artificial Sequence: Synthetic epitope
ADKSLLENAE

SEQ ID NO: 373 - protein, 10 aa, Artificial Sequence
  Description of Artificial Sequence: Synthetic epitope
ADKTALKMRI

SEQ ID NO: 374 - protein, 10 aa, Artificial Sequence
  Description of Artificial Sequence: Synthetic epitope
ADKTRRTVVQ

SEQ ID NO: 375 - protein, 10 aa, Artificial Sequence
  Description of Artificial Sequence: Synthetic epitope
ADLAFSTTLL

SEQ ID NO: 376 - protein, 10 aa, Artificial Sequence
  Description of Artificial Sequence: Synthetic epitope
ADLARANIVE

SEQ ID NO: 377 - protein, 10 aa, Artificial Sequence
  Description of Artificial Sequence: Synthetic epitope
ADLIEHIEDN

SEQ ID NO: 378 - protein, 10 aa, Artificial Sequence
  Description of Artificial Sequence: Synthetic epitope
ADLKELSLVE

SEQ ID NO: 379 - protein, 10 aa, Artificial Sequence
  Description of Artificial Sequence: Synthetic epitope
ADLMDNSELI

SEQ ID NO: 380 - protein, 10 aa, Artificial Sequence
  Description of Artificial Sequence: Synthetic epitope
ADLMMFAHKD

SEQ ID NO: 381 - protein, 10 aa, Artificial Sequence
  Description of Artificial Sequence: Synthetic epitope
ADLSSRSRMA

SEQ ID NO: 382 - protein, 10 aa, Artificial Sequence
  Description of Artificial Sequence: Synthetic epitope
ADLSTLKVMP

SEQ ID NO: 383 - protein, 10 aa, Artificial Sequence
  Description of Artificial Sequence: Synthetic epitope
ADLTAQFSLP

SEQ ID NO: 384 - protein, 10 aa, Artificial Sequence
  Description of Artificial Sequence: Synthetic epitope
ADLTSTATVV

SEQ ID NO: 385 - protein, 10 aa, Artificial Sequence
  Description of Artificial Sequence: Synthetic epitope
ADMKNATLSL

SEQ ID NO: 386 - protein, 10 aa, Artificial Sequence
  Description of Artificial Sequence: Synthetic epitope
ADNTVMFMQG

SEQ ID NO: 387 - protein, 10 aa, Artificial Sequence
  Description of Artificial Sequence: Synthetic epitope
ADPIKLGAGT

SEQ ID NO: 388 - protein, 10 aa, Artificial Sequence
  Description of Artificial Sequence: Synthetic epitope
ADPKDTKSSM

SEQ ID NO: 389 - protein, 10 aa, Artificial Sequence
  Description of Artificial Sequence: Synthetic epitope
ADQEVRLENR

SEQ ID NO: 390 - protein, 10 aa, Artificial Sequence
  Description of Artificial Sequence: Synthetic epitope
ADQIDVVQPG

SEQ ID NO: 391 - protein, 10 aa, Artificial Sequence
  Description of Artificial Sequence: Synthetic epitope
ADQPKDDTKK

SEQ ID NO: 392 - protein, 10 aa, Artificial Sequence
  Description of Artificial Sequence: Synthetic epitope
ADQRITESRQ

SEQ ID NO: 393 - protein, 10 aa, Artificial Sequence
  Description of Artificial Sequence: Synthetic epitope
ADQRRIVALA

SEQ ID NO: 394 - protein, 10 aa, Artificial Sequence
  Description of Artificial Sequence: Synthetic epitope
ADREEAFKEK

SEQ ID NO: 395 - protein, 10 aa, Artificial Sequence
  Description of Artificial Sequence: Synthetic epitope
ADRESSRGKN

SEQ ID NO: 396 - protein, 10 aa, Artificial Sequence
  Description of Artificial Sequence: Synthetic epitope
ADRIAVGLEE

SEQ ID NO: 397 - protein, 10 aa, Artificial Sequence
  Description of Artificial Sequence: Synthetic epitope
ADRINRLQAA

SEQ ID NO: 398 - protein, 10 aa, Artificial Sequence
  Description of Artificial Sequence: Synthetic epitope
ADRSLIDRTR

SEQ ID NO: 399 - protein, 10 aa, Artificial Sequence
  Description of Artificial Sequence: Synthetic epitope
ADRTAELERV

SEQ ID NO: 400 - protein, 10 aa, Artificial Sequence
  Description of Artificial Sequence: Synthetic epitope
ADSDAASSGG

SEQ ID NO: 401 - protein, 10 aa, Artificial Sequence
  Description of Artificial Sequence: Synthetic epitope
ADSESRFQRL

SEQ ID NO: 402 - protein, 10 aa, Artificial Sequence
  Description of Artificial Sequence: Synthetic epitope
ADSKASQQKI

SEQ ID NO: 403 - protein, 10 aa, Artificial Sequence
  Description of Artificial Sequence: Synthetic epitope
ADSKKDAKKN

SEQ ID NO: 404 - protein, 10 aa, Artificial Sequence
  Description of Artificial Sequence: Synthetic epitope
ADSLASVQLG

SEQ ID NO: 405 - protein, 10 aa, Artificial Sequence
  Description of Artificial Sequence: Synthetic epitope
ADSLKKLTML

SEQ ID NO: 406 - protein, 10 aa, Artificial Sequence
  Description of Artificial Sequence: Synthetic epitope
ADSQKLSMGG

SEQ ID NO: 407 - protein, 10 aa, Artificial Sequence
  Description of Artificial Sequence: Synthetic epitope
ADSQQKIRDQ

SEQ ID NO: 408 - protein, 10 aa, Artificial Sequence
  Description of Artificial Sequence: Synthetic epitope
ADSRAKRKRN

SEQ ID NO: 409 - protein, 10 aa, Artificial Sequence
  Description of Artificial Sequence: Synthetic epitope
ADSTAGSKSS

SEQ ID NO: 410 - protein, 10 aa, Artificial Sequence
  Description of Artificial Sequence: Synthetic epitope
ADSVSLLPAA

SEQ ID NO: 411 - protein, 10 aa, Artificial Sequence
  Description of Artificial Sequence: Synthetic epitope
ADTAAESASL

SEQ ID NO: 412 - protein, 10 aa, Artificial Sequence
  Description of Artificial Sequence: Synthetic epitope
ADTRDQADGS

SEQ ID NO: 413 - protein, 10 aa, Artificial Sequence
  Description of Artificial Sequence: Synthetic epitope
ADTRKMDPSK

SEQ ID NO: 414 - protein, 10 aa, Artificial Sequence
  Description of Artificial Sequence: Synthetic epitope
ADTRKMDPSK

SEQ ID NO: 415 - protein, 10 aa, Artificial Sequence
  Description of Artificial Sequence: Synthetic epitope
ADTSPSTATK

SEQ ID NO: 416 - protein, 10 aa, Artificial Sequence
  Description of Artificial Sequence: Synthetic epitope
ADTSSELAKK

SEQ ID NO: 417 - protein, 10 aa, Artificial Sequence
  Description of Artificial Sequence: Synthetic epitope
ADTSTIITEA

SEQ ID NO: 418 - protein, 10 aa, Artificial Sequence
  Description of Artificial Sequence: Synthetic epitope
ADTSTSGKAS

SEQ ID NO: 419 - protein, 10 aa, Artificial Sequence
  Description of Artificial Sequence: Synthetic epitope
ADVDSLSESS

SEQ ID NO: 420 - protein, 10 aa, Artificial Sequence
  Description of Artificial Sequence: Synthetic epitope
ADVESQVSAQ

SEQ ID NO: 421 - protein, 10 aa, Artificial Sequence
  Description of Artificial Sequence: Synthetic epitope
ADVPLSVRLQ

SEQ ID NO: 422 - protein, 10 aa, Artificial Sequence
  Description of Artificial Sequence: Synthetic epitope
ADVPSYTVEE

SEQ ID NO: 423 - protein, 10 aa, Artificial Sequence
  Description of Artificial Sequence: Synthetic epitope
ADVQTSNLLI

SEQ ID NO: 424 - protein, 10 aa, Artificial Sequence
  Description of Artificial Sequence: Synthetic epitope
ADVRIYKQRP

SEQ ID NO: 425 - protein, 10 aa, Artificial Sequence
  Description of Artificial Sequence: Synthetic epitope
ADVSSVLTNK

SEQ ID NO: 426 - protein, 10 aa, Artificial Sequence
  Description of Artificial Sequence: Synthetic epitope
ADWKVMAFSK

SEQ ID NO: 427 - protein, 10 aa, Artificial Sequence
  Description of Artificial Sequence: Synthetic epitope
ADYKKSAEQM

SEQ ID NO: 428 - protein, 10 aa, Artificial Sequence
  Description of Artificial Sequence: Synthetic epitope
ADYLVYKVTD

SEQ ID NO: 429 - protein, 10 aa, Artificial Sequence
  Description of Artificial Sequence: Synthetic epitope
ADYRSLAQRS

SEQ ID NO: 430 - protein, 10 aa, Artificial Sequence
  Description of Artificial Sequence: Synthetic epitope
AEAAIKSLQG

SEQ ID NO: 431 - protein, 10 aa, Artificial Sequence
  Description of Artificial Sequence: Synthetic epitope
AEAALVITPQ

SEQ ID NO: 432 - protein, 10 aa, Artificial Sequence
  Description of Artificial Sequence: Synthetic epitope
AEAALYTDAF

SEQ ID NO: 433 - protein, 10 aa, Artificial Sequence
  Description of Artificial Sequence: Synthetic epitope
AEAAQSLSHE

SEQ ID NO: 434 - protein, 10 aa, Artificial Sequence
  Description of Artificial Sequence: Synthetic epitope
AEAASAEQRN

SEQ ID NO: 435 - protein, 10 aa, Artificial Sequence
  Description of Artificial Sequence: Synthetic epitope
AEAATNIQTQ

SEQ ID NO: 436 - protein, 10 aa, Artificial Sequence
  Description of Artificial Sequence: Synthetic epitope
AEADWHKTDL

SEQ ID NO: 437 - protein, 10 aa, Artificial Sequence
  Description of Artificial Sequence: Synthetic epitope
AEAEERMATE

SEQ ID NO: 438 - protein, 10 aa, Artificial Sequence
  Description of Artificial Sequence: Synthetic epitope
AEAEGESLES

SEQ ID NO: 439 - protein, 10 aa, Artificial Sequence
  Description of Artificial Sequence: Synthetic epitope
AEAEKRVKAS

SEQ ID NO: 440 - protein, 10 aa, Artificial Sequence
  Description of Artificial Sequence: Synthetic epitope
AEAETTLAEV

SEQ ID NO: 441 - protein, 10 aa, Artificial Sequence
  Description of Artificial Sequence: Synthetic epitope
AEAEVDNSKQ

SEQ ID NO: 442 - protein, 10 aa, Artificial Sequence
  Description of Artificial Sequence: Synthetic epitope
AEAGAASGEQ

SEQ ID NO: 443 - protein, 10 aa, Artificial Sequence
  Description of Artificial Sequence: Synthetic epitope
AEAHGNLWDI

SEQ ID NO: 444 - protein, 10 aa, Artificial Sequence
  Description of Artificial Sequence: Synthetic epitope
AEAITARKSS

SEQ ID NO: 445 - protein, 10 aa, Artificial Sequence
  Description of Artificial Sequence: Synthetic epitope
AEAKATTVPD

SEQ ID NO: 446 - protein, 10 aa, Artificial Sequence
  Description of Artificial Sequence: Synthetic epitope
AEAKRQEPAQ

SEQ ID NO: 447 - protein, 10 aa, Artificial Sequence
  Description of Artificial Sequence: Synthetic epitope
AEALAKLQKD

SEQ ID NO: 448 - protein, 10 aa, Artificial Sequence
  Description of Artificial Sequence: Synthetic epitope
AEALYRLSLA

SEQ ID NO: 449 - protein, 10 aa, Artificial Sequence
  Description of Artificial Sequence: Synthetic epitope
AEAMSKLDEG

SEQ ID NO: 450 - protein, 10 aa, Artificial Sequence
  Description of Artificial Sequence: Synthetic epitope
AEANALRNEN

SEQ ID NO: 451 - protein, 10 aa, Artificial Sequence
  Description of Artificial Sequence: Synthetic epitope
AEANATEKES

SEQ ID NO: 452 - protein, 10 aa, Artificial Sequence
  Description of Artificial Sequence: Synthetic epitope
AEANTEAIQE

SEQ ID NO: 453 - protein, 10 aa, Artificial Sequence
  Description of Artificial Sequence: Synthetic epitope
AEAPREAETS

SEQ ID NO: 454 - protein, 10 aa, Artificial Sequence
  Description of Artificial Sequence: Synthetic epitope
AEAQITFQTK

SEQ ID NO: 455 - protein, 10 aa, Artificial Sequence
  Description of Artificial Sequence: Synthetic epitope
AEAQLLNKQI

SEQ ID NO: 456 - protein, 10 aa, Artificial Sequence
  Description of Artificial Sequence: Synthetic epitope
AEARQNRHID

SEQ ID NO: 457 - protein, 10 aa, Artificial Sequence
  Description of Artificial Sequence: Synthetic epitope
AEASEDTKAQ

SEQ ID NO: 458 - protein, 10 aa, Artificial Sequence
  Description of Artificial Sequence: Synthetic epitope
AEATAETVAE

SEQ ID NO: 459 - protein, 10 aa, Artificial Sequence
  Description of Artificial Sequence: Synthetic epitope
AEATDTEATE

SEQ ID NO: 460 - protein, 10 aa, Artificial Sequence
  Description of Artificial Sequence: Synthetic epitope
AEATETQAKL

SEQ ID NO: 461 - protein, 10 aa, Artificial Sequence
  Description of Artificial Sequence: Synthetic epitope
AEAVEPAARE

SEQ ID NO: 462 - protein, 10 aa, Artificial Sequence
  Description of Artificial Sequence: Synthetic epitope
AEDATVYEYD

SEQ ID NO: 463 - protein, 10 aa, Artificial Sequence
  Description of Artificial Sequence: Synthetic epitope
AEDELNIEAK

SEQ ID NO: 464 - protein, 10 aa, Artificial Sequence
  Description of Artificial Sequence: Synthetic epitope
AEDEVLLQKL

SEQ ID NO: 465 - protein, 10 aa, Artificial Sequence
  Description of Artificial Sequence: Synthetic epitope
AEDISLLQQA

SEQ ID NO: 466 - protein, 10 aa, Artificial Sequence
  Description of Artificial Sequence: Synthetic epitope
AEDKPSSHDV

SEQ ID NO: 467 - protein, 10 aa, Artificial Sequence
  Description of Artificial Sequence: Synthetic epitope
AEDLAEDSGS

SEQ ID NO: 468 - protein, 10 aa, Artificial Sequence
  Description of Artificial Sequence: Synthetic epitope
AEDMTARPTG

SEQ ID NO: 469 - protein, 10 aa, Artificial Sequence
  Description of Artificial Sequence: Synthetic epitope
AEDNELTFKA

SEQ ID NO: 470 - protein, 10 aa, Artificial Sequence
  Description of Artificial Sequence: Synthetic epitope
AEDTDAKRTA

SEQ ID NO: 471 - protein, 10 aa, Artificial Sequence
  Description of Artificial Sequence: Synthetic epitope
AEEAKTVQEK

SEQ ID NO: 472 - protein, 10 aa, Artificial Sequence
  Description of Artificial Sequence: Synthetic epitope
AEEALNKRAS

SEQ ID NO: 473 - protein, 10 aa, Artificial Sequence
  Description of Artificial Sequence: Synthetic epitope
AEEAQEERGS

SEQ ID NO: 474 - protein, 10 aa, Artificial Sequence
  Description of Artificial Sequence: Synthetic epitope
AEEATEKTKV

SEQ ID NO: 475 - protein, 10 aa, Artificial Sequence
  Description of Artificial Sequence: Synthetic epitope
AEEATEKTKV

SEQ ID NO: 476 - protein, 10 aa, Artificial Sequence
  Description of Artificial Sequence: Synthetic epitope
AEEATEKTKV

SEQ ID NO: 477 - protein, 10 aa, Artificial Sequence
  Description of Artificial Sequence: Synthetic epitope
AEEAWNETEK

SEQ ID NO: 478 - protein, 10 aa, Artificial Sequence
  Description of Artificial Sequence: Synthetic epitope
AEEDLELRET

SEQ ID NO: 479 - protein, 10 aa, Artificial Sequence
  Description of Artificial Sequence: Synthetic epitope
AEEDRRKKER

SEQ ID NO: 480 - protein, 10 aa, Artificial Sequence
  Description of Artificial Sequence: Synthetic epitope
AEEDSNKKID

SEQ ID NO: 481 - protein, 10 aa, Artificial Sequence
  Description of Artificial Sequence: Synthetic epitope
AEEIANYRPT

SEQ ID NO: 482 - protein, 10 aa, Artificial Sequence
  Description of Artificial Sequence: Synthetic epitope
AEEIKVARIH

SEQ ID NO: 483 - protein, 10 aa, Artificial Sequence
  Description of Artificial Sequence: Synthetic epitope
AEEKLEERLK

SEQ ID NO: 484 - protein, 10 aa, Artificial Sequence
  Description of Artificial Sequence: Synthetic epitope
AEEKSSIHDA

SEQ ID NO: 485 - protein, 10 aa, Artificial Sequence
  Description of Artificial Sequence: Synthetic epitope
AEELGASKVR

SEQ ID NO: 486 - protein, 10 aa, Artificial Sequence
  Description of Artificial Sequence: Synthetic epitope
AEELKAIVSS

SEQ ID NO: 487 - protein, 10 aa, Artificial Sequence
  Description of Artificial Sequence: Synthetic epitope
AEEMVKNKLE

SEQ ID NO: 488 - protein, 10 aa, Artificial Sequence
  Description of Artificial Sequence: Synthetic epitope
AEENQTIVHS

SEQ ID NO: 489 - protein, 10 aa, Artificial Sequence
  Description of Artificial Sequence: Synthetic epitope
AEEQFATQEK

SEQ ID NO: 490 - protein, 10 aa, Artificial Sequence
  Description of Artificial Sequence: Synthetic epitope
AEERVATRTQ

SEQ ID NO: 491 - protein, 10 aa, Artificial Sequence
  Description of Artificial Sequence: Synthetic epitope
AEESTKKNKK

SEQ ID NO: 492 - protein, 10 aa, Artificial Sequence
  Description of Artificial Sequence: Synthetic epitope
AEETGEALSE

SEQ ID NO: 493 - protein, 10 aa, Artificial Sequence
  Description of Artificial Sequence: Synthetic epitope
AEETVTTILG

SEQ ID NO: 494 - protein, 10 aa, Artificial Sequence
  Description of Artificial Sequence: Synthetic epitope
AEEVKSSEQK

SEQ ID NO: 495 - protein, 10 aa, Artificial Sequence
  Description of Artificial Sequence: Synthetic epitope
AEFAELEKER

SEQ ID NO: 496 - protein, 10 aa, Artificial Sequence
  Description of Artificial Sequence: Synthetic epitope
AEFARMKPRK

SEQ ID NO: 497 - protein, 10 aa, Artificial Sequence
  Description of Artificial Sequence: Synthetic epitope
AEFASRQKSF

SEQ ID NO: 498 - protein, 10 aa, Artificial Sequence
  Description of Artificial Sequence: Synthetic epitope
AEFFELMKGQ

SEQ ID NO: 499 - protein, 10 aa, Artificial Sequence
  Description of Artificial Sequence: Synthetic epitope
AEFHARFVAS

SEQ ID NO: 500 - protein, 10 aa, Artificial Sequence
  Description of Artificial Sequence: Synthetic epitope
AEFKASLSPV

SEQ ID NO: 501 - protein, 10 aa, Artificial Sequence
  Description of Artificial Sequence: Synthetic epitope
AEFRKKFGKS

SEQ ID NO: 502 - protein, 10 aa, Artificial Sequence
  Description of Artificial Sequence: Synthetic epitope
AEFSSRKEQL

SEQ ID NO: 503 - protein, 10 aa, Artificial Sequence
  Description of Artificial Sequence: Synthetic epitope
AEFTEADEAM

SEQ ID NO: 504 - protein, 10 aa, Artificial Sequence
  Description of Artificial Sequence: Synthetic epitope
AEGASGSNTE

SEQ ID NO: 505 - protein, 10 aa, Artificial Sequence
  Description of Artificial Sequence: Synthetic epitope
AEGEEVKASA

SEQ ID NO: 506 - protein, 10 aa, Artificial Sequence
  Description of Artificial Sequence: Synthetic epitope
AEGEVTMETS

SEQ ID NO: 507 - protein, 10 aa, Artificial Sequence
  Description of Artificial Sequence: Synthetic epitope
AEGITKIKRD

SEQ ID NO: 508 - protein, 10 aa, Artificial Sequence
  Description of Artificial Sequence: Synthetic epitope
AEGLSTALQL

SEQ ID NO: 509 - protein, 10 aa, Artificial Sequence
  Description of Artificial Sequence: Synthetic epitope
AEGQKITPAS

SEQ ID NO: 510 - protein, 10 aa, Artificial Sequence
  Description of Artificial Sequence: Synthetic epitope
AEGRAVTNEP

SEQ ID NO: 511 - protein, 10 aa, Artificial Sequence
  Description of Artificial Sequence: Synthetic epitope
AEGVTVEEPA

SEQ ID NO: 512 - protein, 10 aa, Artificial Sequence
  Description of Artificial Sequence: Synthetic epitope
AEHALAVTEA

SEQ ID NO: 513 - protein, 10 aa, Artificial Sequence
  Description of Artificial Sequence: Synthetic epitope
AEHDKNQSAK

SEQ ID NO: 514 - protein, 10 aa, Artificial Sequence
  Description of Artificial Sequence: Synthetic epitope
AEHDLHQKEQ

SEQ ID NO: 515 - protein, 10 aa, Artificial Sequence
  Description of Artificial Sequence: Synthetic epitope
AEHKLKTMYK

SEQ ID NO: 516 - protein, 10 aa, Artificial Sequence
  Description of Artificial Sequence: Synthetic epitope
AEHKSRRSSD

SEQ ID NO: 517 - protein, 10 aa, Artificial Sequence
  Description of Artificial Sequence: Synthetic epitope
AEHSAKPSDA

SEQ ID NO: 518 - protein, 10 aa, Artificial Sequence
  Description of Artificial Sequence: Synthetic epitope
AEHSQVAELQ

SEQ ID NO: 519 - protein, 10 aa, Artificial Sequence
  Description of Artificial Sequence: Synthetic epitope
AEHSSINQEN

SEQ ID NO: 520 - protein, 10 aa, Artificial Sequence
  Description of Artificial Sequence: Synthetic epitope
AEHVEVEDTT

SEQ ID NO: 521 - protein, 10 aa, Artificial Sequence
  Description of Artificial Sequence: Synthetic epitope
AEIAASRTSH

SEQ ID NO: 522 - protein, 10 aa, Artificial Sequence
  Description of Artificial Sequence: Synthetic epitope
AEIAQVVEKV

SEQ ID NO: 523 - protein, 10 aa, Artificial Sequence
  Description of Artificial Sequence: Synthetic epitope
AEIASLKTLM

SEQ ID NO: 524 - protein, 10 aa, Artificial Sequence
  Description of Artificial Sequence: Synthetic epitope
AEIATAKSRV

SEQ ID NO: 525 - protein, 10 aa, Artificial Sequence
  Description of Artificial Sequence: Synthetic epitope
AEIERNQTKL

SEQ ID NO: 526 - protein, 10 aa, Artificial Sequence
  Description of Artificial Sequence: Synthetic epitope
AEIKAQKKEL

SEQ ID NO: 527 - protein, 10 aa, Artificial Sequence
  Description of Artificial Sequence: Synthetic epitope
AEIKTNVLKQ

SEQ ID NO: 528 - protein, 10 aa, Artificial Sequence
  Description of Artificial Sequence: Synthetic epitope
AEILVILQEA

SEQ ID NO: 529 - protein, 10 aa, Artificial Sequence
  Description of Artificial Sequence: Synthetic epitope
AEINSSKVVP

SEQ ID NO: 530 - protein, 10 aa, Artificial Sequence
  Description of Artificial Sequence: Synthetic epitope
AEIPSTVSQH

SEQ ID NO: 531 - protein, 10 aa, Artificial Sequence
  Description of Artificial Sequence: Synthetic epitope
AEIQSLRQAA

SEQ ID NO: 532 - protein, 10 aa, Artificial Sequence
  Description of Artificial Sequence: Synthetic epitope
AEISQLAART

SEQ ID NO: 533 - protein, 10 aa, Artificial Sequence
  Description of Artificial Sequence: Synthetic epitope
AEISSKSPVA

SEQ ID NO: 534 - protein, 10 aa, Artificial Sequence
  Description of Artificial Sequence: Synthetic epitope
AEITGVRSET

SEQ ID NO: 535 - protein, 10 aa, Artificial Sequence
  Description of Artificial Sequence: Synthetic epitope
AEKAASANNE

SEQ ID NO: 536 - protein, 10 aa, Artificial Sequence
  Description of Artificial Sequence: Synthetic epitope
AEKAQLKSEA

SEQ ID NO: 537 - protein, 10 aa, Artificial Sequence
  Description of Artificial Sequence: Synthetic epitope
AEKATEEVSK

SEQ ID NO: 538 - protein, 10 aa, Artificial Sequence
  Description of Artificial Sequence: Synthetic epitope
AEKDANSVTS

SEQ ID NO: 539 - protein, 10 aa, Artificial Sequence
  Description of Artificial Sequence: Synthetic epitope
AEKDSASTEP

SEQ ID NO: 540 - protein, 10 aa, Artificial Sequence
  Description of Artificial Sequence: Synthetic epitope
AEKDSERDEL

SEQ ID NO: 541 - protein, 10 aa, Artificial Sequence
  Description of Artificial Sequence: Synthetic epitope
AEKEAKPSIG

SEQ ID NO: 542 - protein, 10 aa, Artificial Sequence
  Description of Artificial Sequence: Synthetic epitope
AEKEDTQMLP

SEQ ID NO: 543 - protein, 10 aa, Artificial Sequence
  Description of Artificial Sequence: Synthetic epitope
AEKEMLGSSL

SEQ ID NO: 544 - protein, 10 aa, Artificial Sequence
  Description of Artificial Sequence: Synthetic epitope
AEKEVMEEQM

SEQ ID NO: 545 - protein, 10 aa, Artificial Sequence
  Description of Artificial Sequence: Synthetic epitope
AEKINAFRAK

SEQ ID NO: 546 - protein, 10 aa, Artificial Sequence
  Description of Artificial Sequence: Synthetic epitope
AEKKVLAEKQ

SEQ ID NO: 547 - protein, 10 aa, Artificial Sequence
  Description of Artificial Sequence: Synthetic epitope
AEKLAEVQQM

SEQ ID NO: 548 - protein, 10 aa, Artificial Sequence
  Description of Artificial Sequence: Synthetic epitope
AEKLSVDEVS

SEQ ID NO: 549 - protein, 10 aa, Artificial Sequence
  Description of Artificial Sequence: Synthetic epitope
AEKPARVSKD

SEQ ID NO: 550 - protein, 10 aa, Artificial Sequence
  Description of Artificial Sequence: Synthetic epitope
AEKPSVRLTP

SEQ ID NO: 551 - protein, 10 aa, Artificial Sequence
  Description of Artificial Sequence: Synthetic epitope
AEKQKDDEAE

SEQ ID NO: 552 - protein, 10 aa, Artificial Sequence
  Description of Artificial Sequence: Synthetic epitope
AEKRLEGQEE

SEQ ID NO: 553 - protein, 10 aa, Artificial Sequence
  Description of Artificial Sequence: Synthetic epitope
AEKRSLFSEE

SEQ ID NO: 554 - protein, 10 aa, Artificial Sequence
  Description of Artificial Sequence: Synthetic epitope
AEKSATKKED

SEQ ID NO: 555 - protein, 10 aa, Artificial Sequence
  Description of Artificial Sequence: Synthetic epitope
AEKSEAAPPA

SEQ ID NO: 556 - protein, 10 aa, Artificial Sequence
  Description of Artificial Sequence: Synthetic epitope
AEKSEDSSGA

SEQ ID NO: 557 - protein, 10 aa, Artificial Sequence
  Description of Artificial Sequence: Synthetic epitope
AEKSQKLKEA

SEQ ID NO: 558 - protein, 10 aa, Artificial Sequence
  Description of Artificial Sequence: Synthetic epitope
AEKTAAKMEK

SEQ ID NO: 559 - protein, 10 aa, Artificial Sequence
  Description of Artificial Sequence: Synthetic epitope
AEKTADNVSS

SEQ ID NO: 560 - protein, 10 aa, Artificial Sequence
  Description of Artificial Sequence: Synthetic epitope
AELAALSQDE

SEQ ID NO: 561 - protein, 10 aa, Artificial Sequence
  Description of Artificial Sequence: Synthetic epitope
AELADDEKVF

SEQ ID NO: 562 - protein, 10 aa, Artificial Sequence
  Description of Artificial Sequence: Synthetic epitope
AELADVLTEA

SEQ ID NO: 563 - protein, 10 aa, Artificial Sequence
  Description of Artificial Sequence: Synthetic epitope
AELAELVPME

SEQ ID NO: 564 - protein, 10 aa, Artificial Sequence
  Description of Artificial Sequence: Synthetic epitope
AELAGALAEM

SEQ ID NO: 565 - protein, 10 aa, Artificial Sequence
  Description of Artificial Sequence: Synthetic epitope
AELALSLSST

SEQ ID NO: 566 - protein, 10 aa, Artificial Sequence
  Description of Artificial Sequence: Synthetic epitope
AELAQASNSL

SEQ ID NO: 567 - protein, 10 aa, Artificial Sequence
  Description of Artificial Sequence: Synthetic epitope
AELASAALQG

SEQ ID NO: 568 - protein, 10 aa, Artificial Sequence
  Description of Artificial Sequence: Synthetic epitope
AELAVVQPTA

SEQ ID NO: 569 - protein, 10 aa, Artificial Sequence
  Description of Artificial Sequence: Synthetic epitope
AELDITMATL

SEQ ID NO: 570 - protein, 10 aa, Artificial Sequence
  Description of Artificial Sequence: Synthetic epitope
AELDTEAKNE

SEQ ID NO: 571 - protein, 10 aa, Artificial Sequence
  Description of Artificial Sequence: Synthetic epitope
AELEATLLER

SEQ ID NO: 572 - protein, 10 aa, Artificial Sequence
  Description of Artificial Sequence: Synthetic epitope
AELEIKRKER

SEQ ID NO: 573 - protein, 10 aa, Artificial Sequence
  Description of Artificial Sequence: Synthetic epitope
AELESSALKI

SEQ ID NO: 574 - protein, 10 aa, Artificial Sequence
  Description of Artificial Sequence: Synthetic epitope
AELGDDKSGD

SEQ ID NO: 575 - protein, 10 aa, Artificial Sequence
  Description of Artificial Sequence: Synthetic epitope
AELGEQNQEL

SEQ ID NO: 576 - protein, 10 aa, Artificial Sequence
  Description of Artificial Sequence: Synthetic epitope
AELGGLVLLT

SEQ ID NO: 577 - protein, 10 aa, Artificial Sequence
  Description of Artificial Sequence: Synthetic epitope
AELGSSTSLE

SEQ ID NO: 578 - protein, 10 aa, Artificial Sequence
  Description of Artificial Sequence: Synthetic epitope
AELIAELEGR

SEQ ID NO: 579 - protein, 10 aa, Artificial Sequence
  Description of Artificial Sequence: Synthetic epitope
AELIRQEKLE

SEQ ID NO: 580 - protein, 10 aa, Artificial Sequence
  Description of Artificial Sequence: Synthetic epitope
AELKELSSAL

SEQ ID NO: 581 - protein, 10 aa, Artificial Sequence
  Description of Artificial Sequence: Synthetic epitope
AELLKEKESK

SEQ ID NO: 582 - protein, 10 aa, Artificial Sequence
  Description of Artificial Sequence: Synthetic epitope
AELLKEKESK

SEQ ID NO: 583 - protein, 10 aa, Artificial Sequence
  Description of Artificial Sequence: Synthetic epitope
AELLKEKESK

SEQ ID NO: 584 - protein, 10 aa, Artificial Sequence
  Description of Artificial Sequence: Synthetic epitope
AELLSEPNQT

SEQ ID NO: 585 - protein, 10 aa, Artificial Sequence
  Description of Artificial Sequence: Synthetic epitope
AELNAQYRAR

SEQ ID NO: 586 - protein, 10 aa, Artificial Sequence
  Description of Artificial Sequence: Synthetic epitope
AELNGSIGNY

SEQ ID NO: 587 - protein, 10 aa, Artificial Sequence
  Description of Artificial Sequence: Synthetic epitope
AELNSTTEEL

SEQ ID NO: 588 - protein, 10 aa, Artificial Sequence
  Description of Artificial Sequence: Synthetic epitope
AELQAKKNSL

SEQ ID NO: 589 - protein, 10 aa, Artificial Sequence
  Description of Artificial Sequence: Synthetic epitope
AELQKEVVLL

SEQ ID NO: 590 - protein, 10 aa, Artificial Sequence
  Description of Artificial Sequence: Synthetic epitope
AELQQAVVEE

SEQ ID NO: 591 - protein, 10 aa, Artificial Sequence
  Description of Artificial Sequence: Synthetic epitope
AELQTKHAAD

SEQ ID NO: 592 - protein, 10 aa, Artificial Sequence
  Description of Artificial Sequence: Synthetic epitope
AELRAASATR

SEQ ID NO: 593 - protein, 10 aa, Artificial Sequence
  Description of Artificial Sequence: Synthetic epitope
AELRAQLAKA

SEQ ID NO: 594 - protein, 10 aa, Artificial Sequence
  Description of Artificial Sequence: Synthetic epitope
AELRASIKEK

SEQ ID NO: 595 - protein, 10 aa, Artificial Sequence
  Description of Artificial Sequence: Synthetic epitope
AELSAQLSRR

SEQ ID NO: 596 - protein, 10 aa, Artificial Sequence
  Description of Artificial Sequence: Synthetic epitope
AELSATAQEI

SEQ ID NO: 597 - protein, 10 aa, Artificial Sequence
  Description of Artificial Sequence: Synthetic epitope
AELSKDSASQ

SEQ ID NO: 598 - protein, 10 aa, Artificial Sequence
  Description of Artificial Sequence: Synthetic epitope
AELTAAGSEE

SEQ ID NO: 599 - protein, 10 aa, Artificial Sequence
  Description of Artificial Sequence: Synthetic epitope
AELTAQHQRR

SEQ ID NO: 600 - protein, 10 aa, Artificial Sequence
  Description of Artificial Sequence: Synthetic epitope
AELTATQVEE

SEQ ID NO: 601 - protein, 10 aa, Artificial Sequence
  Description of Artificial Sequence: Synthetic epitope
AELTKINLDA

SEQ ID NO: 602 - protein, 10 aa, Artificial Sequence
  Description of Artificial Sequence: Synthetic epitope
AEMADRNKEV

SEQ ID NO: 603 - protein, 10 aa, Artificial Sequence
  Description of Artificial Sequence: Synthetic epitope
AEMANILVIH

SEQ ID NO: 604 - protein, 10 aa, Artificial Sequence
  Description of Artificial Sequence: Synthetic epitope
AEMEAERDSA

SEQ ID NO: 605 - protein, 10 aa, Artificial Sequence
  Description of Artificial Sequence: Synthetic epitope
AEMKMKKDLF

SEQ ID NO: 606 - protein, 10 aa, Artificial Sequence
  Description of Artificial Sequence: Synthetic epitope
AEMLKIISKK

SEQ ID NO: 607 - protein, 10 aa, Artificial Sequence
  Description of Artificial Sequence: Synthetic epitope
AEMREAMYNQ

SEQ ID NO: 608 - protein, 10 aa, Artificial Sequence
  Description of Artificial Sequence: Synthetic epitope
AEMSLFLQGP

SEQ ID NO: 609 - protein, 10 aa, Artificial Sequence
  Description of Artificial Sequence: Synthetic epitope
AENAFSDPAG

SEQ ID NO: 610 - protein, 10 aa, Artificial Sequence
  Description of Artificial Sequence: Synthetic epitope
AENASLLSLS

SEQ ID NO: 611 - protein, 10 aa, Artificial Sequence
  Description of Artificial Sequence: Synthetic epitope
AENKAKTRLS

SEQ ID NO: 612 - protein, 10 aa, Artificial Sequence
  Description of Artificial Sequence: Synthetic epitope
AENKNTQVYL

SEQ ID NO: 613 - protein, 10 aa, Artificial Sequence
  Description of Artificial Sequence: Synthetic epitope
AENKYIATDF

SEQ ID NO: 614 - protein, 10 aa, Artificial Sequence
  Description of Artificial Sequence: Synthetic epitope
AENQEESFGS

SEQ ID NO: 615 - protein, 10 aa, Artificial Sequence
  Description of Artificial Sequence: Synthetic epitope
AENQISNKGA

SEQ ID NO: 616 - protein, 10 aa, Artificial Sequence
  Description of Artificial Sequence: Synthetic epitope
AENQKQIAQF

SEQ ID NO: 617 - protein, 10 aa, Artificial Sequence
  Description of Artificial Sequence: Synthetic epitope
AENRKLLTEK

SEQ ID NO: 618 - protein, 10 aa, Artificial Sequence
  Description of Artificial Sequence: Synthetic epitope
AENSVVISNG

SEQ ID NO: 619 - protein, 10 aa, Artificial Sequence
  Description of Artificial Sequence: Synthetic epitope
AENTMVAHHI

SEQ ID NO: 620 - protein, 10 aa, Artificial Sequence
  Description of Artificial Sequence: Synthetic epitope
AENTTEKKRD

SEQ ID NO: 621 - protein, 10 aa, Artificial Sequence
  Description of Artificial Sequence: Synthetic epitope
AEPALSAGSL

SEQ ID NO: 622 - protein, 10 aa, Artificial Sequence
  Description of Artificial Sequence: Synthetic epitope
AEPGLMLNFS

SEQ ID NO: 623 - protein, 10 aa, Artificial Sequence
  Description of Artificial Sequence: Synthetic epitope
AEPQLREEND

SEQ ID NO: 624 - protein, 10 aa, Artificial Sequence
  Description of Artificial Sequence: Synthetic epitope
AEPQQATTPK

SEQ ID NO: 625 - protein, 10 aa, Artificial Sequence
  Description of Artificial Sequence: Synthetic epitope
AEPSQVAISK

SEQ ID NO: 626 - protein, 10 aa, Artificial Sequence
  Description of Artificial Sequence: Synthetic epitope
AEPSSVHVAI

SEQ ID NO: 627 - protein, 10 aa, Artificial Sequence
  Description of Artificial Sequence: Synthetic epitope
AEPTAEGEPH

SEQ ID NO: 628 - protein, 10 aa, Artificial Sequence
  Description of Artificial Sequence: Synthetic epitope
AEPTLLALPS

SEQ ID NO: 629 - protein, 10 aa, Artificial Sequence
  Description of Artificial Sequence: Synthetic epitope
AEQDKRAVER

SEQ ID NO: 630 - protein, 10 aa, Artificial Sequence
  Description of Artificial Sequence: Synthetic epitope
AEQGETSGRE

SEQ ID NO: 631 - protein, 10 aa, Artificial Sequence
  Description of Artificial Sequence: Synthetic epitope
AEQGGDSTEA

SEQ ID NO: 632 - protein, 10 aa, Artificial Sequence
  Description of Artificial Sequence: Synthetic epitope
AEQGTLMRAQ

SEQ ID NO: 633 - protein, 10 aa, Artificial Sequence
  Description of Artificial Sequence: Synthetic epitope
AEQIAKAKFI

SEQ ID NO: 634 - protein, 10 aa, Artificial Sequence
  Description of Artificial Sequence: Synthetic epitope
AEQIEAIQQA

SEQ ID NO: 635 - protein, 10 aa, Artificial Sequence
  Description of Artificial Sequence: Synthetic epitope
AEQINQAAGE

SEQ ID NO: 636 - protein, 10 aa, Artificial Sequence
  Description of Artificial Sequence: Synthetic epitope
AEQKVIAKLD

SEQ ID NO: 637 - protein, 10 aa, Artificial Sequence
  Description of Artificial Sequence: Synthetic epitope
AEQLMGSDGN

SEQ ID NO: 638 - protein, 10 aa, Artificial Sequence
  Description of Artificial Sequence: Synthetic epitope
AEQNEEDEPK

SEQ ID NO: 639 - protein, 10 aa, Artificial Sequence
  Description of Artificial Sequence: Synthetic epitope
AEQNESSDEE

SEQ ID NO: 640 - protein, 10 aa, Artificial Sequence
  Description of Artificial Sequence: Synthetic epitope
AEQQKAQFTA

SEQ ID NO: 641 - protein, 10 aa, Artificial Sequence
  Description of Artificial Sequence: Synthetic epitope
AEQQTLLAEN

SEQ ID NO: 642 - protein, 10 aa, Artificial Sequence
  Description of Artificial Sequence: Synthetic epitope
AEQREQDEKT

SEQ ID NO: 643 - protein, 10 aa, Artificial Sequence
  Description of Artificial Sequence: Synthetic epitope
AEQSGTEKEV

SEQ ID NO: 644 - protein, 10 aa, Artificial Sequence
  Description of Artificial Sequence: Synthetic epitope
AEQSLEVEMM

SEQ ID NO: 645 - protein, 10 aa, Artificial Sequence
  Description of Artificial Sequence: Synthetic epitope
AEQTEMEGEK

SEQ ID NO: 646 - protein, 10 aa, Artificial Sequence
  Description of Artificial Sequence: Synthetic epitope
AERALQVDTQ

SEQ ID NO: 647 - protein, 10 aa, Artificial Sequence
  Description of Artificial Sequence: Synthetic epitope
AERAQALLAD

SEQ ID NO: 648 - protein, 10 aa, Artificial Sequence
  Description of Artificial Sequence: Synthetic epitope
AEREKEFVAR

SEQ ID NO: 649 - protein, 10 aa, Artificial Sequence
  Description of Artificial Sequence: Synthetic epitope
AERLSAVEAI

SEQ ID NO: 650 - protein, 10 aa, Artificial Sequence
  Description of Artificial Sequence: Synthetic epitope
AERLTLLTVG

SEQ ID NO: 651 - protein, 10 aa, Artificial Sequence
  Description of Artificial Sequence: Synthetic epitope
AERQKSKKDT

SEQ ID NO: 652 - protein, 10 aa, Artificial Sequence
  Description of Artificial Sequence: Synthetic epitope
AERQSSKPEV

SEQ ID NO: 653 - protein, 10 aa, Artificial Sequence
  Description of Artificial Sequence: Synthetic epitope
AERREVSQQR

SEQ ID NO: 654 - protein, 10 aa, Artificial Sequence
  Description of Artificial Sequence: Synthetic epitope
AERRLTARQS

SEQ ID NO: 655 - protein, 10 aa, Artificial Sequence
  Description of Artificial Sequence: Synthetic epitope
AERYVASESS

SEQ ID NO: 656 - protein, 10 aa, Artificial Sequence
  Description of Artificial Sequence: Synthetic epitope
AESAEAQTIR

SEQ ID NO: 657 - protein, 10 aa, Artificial Sequence
  Description of Artificial Sequence: Synthetic epitope
AESASAGATL

SEQ ID NO: 658 - protein, 10 aa, Artificial Sequence
  Description of Artificial Sequence: Synthetic epitope
AESEITIAPL

SEQ ID NO: 659 - protein, 10 aa, Artificial Sequence
  Description of Artificial Sequence: Synthetic epitope
AESEKSQKLE

SEQ ID NO: 660 - protein, 10 aa, Artificial Sequence
  Description of Artificial Sequence: Synthetic epitope
AESESSAGDD

SEQ ID NO: 661 - protein, 10 aa, Artificial Sequence
  Description of Artificial Sequence: Synthetic epitope
AESETFLTST

SEQ ID NO: 662 - protein, 10 aa, Artificial Sequence
  Description of Artificial Sequence: Synthetic epitope
AESGKSEKGQ

SEQ ID NO: 663 - protein, 10 aa, Artificial Sequence
  Description of Artificial Sequence: Synthetic epitope
AESHRKNRSI

SEQ ID NO: 664 - protein, 10 aa, Artificial Sequence
  Description of Artificial Sequence: Synthetic epitope
AESIKNQMTV

SEQ ID NO: 665 - protein, 10 aa, Artificial Sequence
  Description of Artificial Sequence: Synthetic epitope
AESKGTSAQT

SEQ ID NO: 666 - protein, 10 aa, Artificial Sequence
  Description of Artificial Sequence: Synthetic epitope
AESKVAIVSQ

SEQ ID NO: 667 - protein, 10 aa, Artificial Sequence
  Description of Artificial Sequence: Synthetic epitope
AESKVVLVQG

SEQ ID NO: 668 - protein, 10 aa, Artificial Sequence
  Description of Artificial Sequence: Synthetic epitope
AESLLKAASS

SEQ ID NO: 669 - protein, 10 aa, Artificial Sequence
  Description of Artificial Sequence: Synthetic epitope
AESLQRAEAT

SEQ ID NO: 670 - protein, 10 aa, Artificial Sequence
  Description of Artificial Sequence: Synthetic epitope
AESLSVLSVP

SEQ ID NO: 671 - protein, 10 aa, Artificial Sequence
  Description of Artificial Sequence: Synthetic epitope
AESNEANSKW

SEQ ID NO: 672 - protein, 10 aa, Artificial Sequence
  Description of Artificial Sequence: Synthetic epitope
AESQNAETEF

SEQ ID NO: 673 - protein, 10 aa, Artificial Sequence
  Description of Artificial Sequence: Synthetic epitope
AESSAIQSIS

SEQ ID NO: 674 - protein, 10 aa, Artificial Sequence
  Description of Artificial Sequence: Synthetic epitope
AESSDHVEKS

SEQ ID NO: 675 - protein, 10 aa, Artificial Sequence
  Description of Artificial Sequence: Synthetic epitope
AESSERRKRN

SEQ ID NO: 676 - protein, 10 aa, Artificial Sequence
  Description of Artificial Sequence: Synthetic epitope
AESSQEYVTL

SEQ ID NO: 677 - protein, 10 aa, Artificial Sequence
  Description of Artificial Sequence: Synthetic epitope
AESSWRAQEG

SEQ ID NO: 678 - protein, 10 aa, Artificial Sequence
  Description of Artificial Sequence: Synthetic epitope
AESTDANQPD

SEQ ID NO: 679 - protein, 10 aa, Artificial Sequence
  Description of Artificial Sequence: Synthetic epitope
AESTRPRMTV

SEQ ID NO: 680 - protein, 10 aa, Artificial Sequence
  Description of Artificial Sequence: Synthetic epitope
AESTSPVQSM

SEQ ID NO: 681 - protein, 10 aa, Artificial Sequence
  Description of Artificial Sequence: Synthetic epitope
AESVRSLLSA

SEQ ID NO: 682 - protein, 10 aa, Artificial Sequence
  Description of Artificial Sequence: Synthetic epitope
AESVSSLTIA

SEQ ID NO: 683 - protein, 10 aa, Artificial Sequence
  Description of Artificial Sequence: Synthetic epitope
AETAEAVELS

SEQ ID NO: 684 - protein, 10 aa, Artificial Sequence
  Description of Artificial Sequence: Synthetic epitope
AETALTSGSS

SEQ ID NO: 685 - protein, 10 aa, Artificial Sequence
  Description of Artificial Sequence: Synthetic epitope
AETASQSQRS

SEQ ID NO: 686 - protein, 10 aa, Artificial Sequence
  Description of Artificial Sequence: Synthetic epitope
AETDPHKSSE

SEQ ID NO: 687 - protein, 10 aa, Artificial Sequence
  Description of Artificial Sequence: Synthetic epitope
AETEEAAHSV

SEQ ID NO: 688 - protein, 10 aa, Artificial Sequence
  Description of Artificial Sequence: Synthetic epitope
AETEGTIMEE

SEQ ID NO: 689 - protein, 10 aa, Artificial Sequence
  Description of Artificial Sequence: Synthetic epitope
AETGSLSTES

SEQ ID NO: 690 - protein, 10 aa, Artificial Sequence
  Description of Artificial Sequence: Synthetic epitope
AETKDNEKRE

SEQ ID NO: 691 - protein, 10 aa, Artificial Sequence
  Description of Artificial Sequence: Synthetic epitope
AETKQEAVVE

SEQ ID NO: 692 - protein, 10 aa, Artificial Sequence
  Description of Artificial Sequence: Synthetic epitope
AETLESSQSQ

SEQ ID NO: 693 - protein, 10 aa, Artificial Sequence
  Description of Artificial Sequence: Synthetic epitope
AETLGLSAAL

SEQ ID NO: 694 - protein, 10 aa, Artificial Sequence
  Description of Artificial Sequence: Synthetic epitope
AETPVATSPT

SEQ ID NO: 695 - protein, 10 aa, Artificial Sequence
  Description of Artificial Sequence: Synthetic epitope
AETQSLREQP

SEQ ID NO: 696 - protein, 10 aa, Artificial Sequence
  Description of Artificial Sequence: Synthetic epitope
AETQWKDRAE

SEQ ID NO: 697 - protein, 10 aa, Artificial Sequence
  Description of Artificial Sequence: Synthetic epitope
AETRAEQEQD

SEQ ID NO: 698 - protein, 10 aa, Artificial Sequence
  Description of Artificial Sequence: Synthetic epitope
AETRRQASEA

SEQ ID NO: 699 - protein, 10 aa, Artificial Sequence
  Description of Artificial Sequence: Synthetic epitope
AETTDKVKQG

SEQ ID NO: 700 - protein, 10 aa, Artificial Sequence
  Description of Artificial Sequence: Synthetic epitope
AETVAPDNTA

SEQ ID NO: 701 - protein, 10 aa, Artificial Sequence
  Description of Artificial Sequence: Synthetic epitope
AETVKLKHKR

SEQ ID NO: 702 - protein, 10 aa, Artificial Sequence
  Description of Artificial Sequence: Synthetic epitope
AEVASDLASS

SEQ ID NO: 703 - protein, 10 aa, Artificial Sequence
  Description of Artificial Sequence: Synthetic epitope
AEVEAEAELA

SEQ ID NO: 704 - protein, 10 aa, Artificial Sequence
  Description of Artificial Sequence: Synthetic epitope
AEVESSAKSG

SEQ ID NO: 705 - protein, 10 aa, Artificial Sequence
  Description of Artificial Sequence: Synthetic epitope
AEVETRIEAL

SEQ ID NO: 706 - protein, 10 aa, Artificial Sequence
  Description of Artificial Sequence: Synthetic epitope
AEVHKAITIS

SEQ ID NO: 707 - protein, 10 aa, Artificial Sequence
  Description of Artificial Sequence: Synthetic epitope
AEVKTMESHP

SEQ ID NO: 708 - protein, 10 aa, Artificial Sequence
  Description of Artificial Sequence: Synthetic epitope
AEVKTQETHE

SEQ ID NO: 709 - protein, 10 aa, Artificial Sequence
  Description of Artificial Sequence: Synthetic epitope
AEVLAARHQA

SEQ ID NO: 710 - protein, 10 aa, Artificial Sequence
  Description of Artificial Sequence: Synthetic epitope
AEVLPEAESV

SEQ ID NO: 711 - protein, 10 aa, Artificial Sequence
  Description of Artificial Sequence: Synthetic epitope
AEVLQSVREL

SEQ ID NO: 712 - protein, 10 aa, Artificial Sequence
  Description of Artificial Sequence: Synthetic epitope
AEVQMSVKEH

SEQ ID NO: 713 - protein, 10 aa, Artificial Sequence
  Description of Artificial Sequence: Synthetic epitope
AEVRLGVLSA

SEQ ID NO: 714 - protein, 10 aa, Artificial Sequence
  Description of Artificial Sequence: Synthetic epitope
AEVSAEVRER

SEQ ID NO: 715 - protein, 10 aa, Artificial Sequence
  Description of Artificial Sequence: Synthetic epitope
AEVTEVAALR

SEQ ID NO: 716 - protein, 10 aa, Artificial Sequence
  Description of Artificial Sequence: Synthetic epitope
AEVTQEVEVA

SEQ ID NO: 717 - protein, 10 aa, Artificial Sequence
  Description of Artificial Sequence: Synthetic epitope
AEVVQDAQVE

SEQ ID NO: 718 - protein, 10 aa, Artificial Sequence
  Description of Artificial Sequence: Synthetic epitope
AEVVTEIQLE

SEQ ID NO: 719 - protein, 10 aa, Artificial Sequence
  Description of Artificial Sequence: Synthetic epitope
AEWEESQTQK

SEQ ID NO: 720 - protein, 10 aa, Artificial Sequence
  Description of Artificial Sequence: Synthetic epitope
AEWLDDAKQK

SEQ ID NO: 721 - protein, 10 aa, Artificial Sequence
  Description of Artificial Sequence: Synthetic epitope
AEWLLFFTNT

SEQ ID NO: 722 - protein, 10 aa, Artificial Sequence
  Description of Artificial Sequence: Synthetic epitope
AEWRTVQASR

SEQ ID NO: 723 - protein, 10 aa, Artificial Sequence
  Description of Artificial Sequence: Synthetic epitope
AEYAKESKAM

SEQ ID NO: 724 - protein, 10 aa, Artificial Sequence
  Description of Artificial Sequence: Synthetic epitope
AEYDKTGEYP

SEQ ID NO: 725 - protein, 10 aa, Artificial Sequence
  Description of Artificial Sequence: Synthetic epitope
AEYEALQSPS

SEQ ID NO: 726 - protein, 10 aa, Artificial Sequence
  Description of Artificial Sequence: Synthetic epitope
AEYEVNSSAL

SEQ ID NO: 727 - protein, 10 aa, Artificial Sequence
  Description of Artificial Sequence: Synthetic epitope
AEYISTVKTL

SEQ ID NO: 728 - protein, 10 aa, Artificial Sequence
  Description of Artificial Sequence: Synthetic epitope
AEYPEEDASA

SEQ ID NO: 729 - protein, 10 aa, Artificial Sequence
  Description of Artificial Sequence: Synthetic epitope
AFAARMAEIG

SEQ ID NO: 730 - protein, 10 aa, Artificial Sequence
  Description of Artificial Sequence: Synthetic epitope
AFAFQASQDK

SEQ ID NO: 731 - protein, 10 aa, Artificial Sequence
  Description of Artificial Sequence: Synthetic epitope
AFAGTVTIHN

SEQ ID NO: 732 - protein, 10 aa, Artificial Sequence
  Description of Artificial Sequence: Synthetic epitope
AFDTRYQHKN

SEQ ID NO: 733 - protein, 10 aa, Artificial Sequence
  Description of Artificial Sequence: Synthetic epitope
AFEKQVAVRY

SEQ ID NO: 734 - protein, 10 aa, Artificial Sequence
  Description of Artificial Sequence: Synthetic epitope
AFFQGLMLLE

SEQ ID NO: 735 - protein, 10 aa, Artificial Sequence
  Description of Artificial Sequence: Synthetic epitope
AFGGINWSEI

SEQ ID NO: 736 - protein, 10 aa, Artificial Sequence
  Description of Artificial Sequence: Synthetic epitope
AFGSVATRIE

SEQ ID NO: 737 - protein, 10 aa, Artificial Sequence
  Description of Artificial Sequence: Synthetic epitope
AFINKFVQFI

SEQ ID NO: 738 - protein, 10 aa, Artificial Sequence
  Description of Artificial Sequence: Synthetic epitope
AFISGMIGID

SEQ ID NO: 739 - protein, 10 aa, Artificial Sequence
  Description of Artificial Sequence: Synthetic epitope
AFKEKEVRAK

SEQ ID NO: 740 - protein, 10 aa, Artificial Sequence
  Description of Artificial Sequence: Synthetic epitope
AFKKLLTSSA

SEQ ID NO: 741 - protein, 10 aa, Artificial Sequence
  Description of Artificial Sequence: Synthetic epitope
AFLAEMLLQA

SEQ ID NO: 742 - protein, 10 aa, Artificial Sequence
  Description of Artificial Sequence: Synthetic epitope
AFLAQALLED

SEQ ID NO: 743 - protein, 10 aa, Artificial Sequence
  Description of Artificial Sequence: Synthetic epitope
AFLLRRSQAA

SEQ ID NO: 744 - protein, 10 aa, Artificial Sequence
  Description of Artificial Sequence: Synthetic epitope
AFLNSALVSA

SEQ ID NO: 745 - protein, 10 aa, Artificial Sequence
  Description of Artificial Sequence: Synthetic epitope
AFLSSVAGDA

SEQ ID NO: 746 - protein, 10 aa, Artificial Sequence
  Description of Artificial Sequence: Synthetic epitope
AFLTQAARGL

SEQ ID NO: 747 - protein, 10 aa, Artificial Sequence
  Description of Artificial Sequence: Synthetic epitope
AFMNIIKLSD

SEQ ID NO: 748 - protein, 10 aa, Artificial Sequence
  Description of Artificial Sequence: Synthetic epitope
AFMNSSFGKI

SEQ ID NO: 749 - protein, 10 aa, Artificial Sequence
  Description of Artificial Sequence: Synthetic epitope
AFRKAASQNS

SEQ ID NO: 750 - protein, 10 aa, Artificial Sequence
  Description of Artificial Sequence: Synthetic epitope
AFRSETAKAQ

SEQ ID NO: 751 - protein, 10 aa, Artificial Sequence
  Description of Artificial Sequence: Synthetic epitope
AFTAEVLAQS

SEQ ID NO: 752 - protein, 10 aa, Artificial Sequence
  Description of Artificial Sequence: Synthetic epitope
AFVEAMVNEN

SEQ ID NO: 753 - protein, 10 aa, Artificial Sequence
  Description of Artificial Sequence: Synthetic epitope
AFWVQHDMKD

SEQ ID NO: 754 - protein, 10 aa, Artificial Sequence
  Description of Artificial Sequence: Synthetic epitope
AFYREKISRL

SEQ ID NO: 755 - protein, 10 aa, Artificial Sequence
  Description of Artificial Sequence: Synthetic epitope
AGAARAQYSL

SEQ ID NO: 756 - protein, 10 aa, Artificial Sequence
  Description of Artificial Sequence: Synthetic epitope
AGAATQASLE

SEQ ID NO: 757 - protein, 10 aa, Artificial Sequence
  Description of Artificial Sequence: Synthetic epitope
AGADLNVEVV

SEQ ID NO: 758 - protein, 10 aa, Artificial Sequence
  Description of Artificial Sequence: Synthetic epitope
AGAGWDTPMR

SEQ ID NO: 759 - protein, 10 aa, Artificial Sequence
  Description of Artificial Sequence: Synthetic epitope
AGAIKNKAQS

SEQ ID NO: 760 - protein, 10 aa, Artificial Sequence
  Description of Artificial Sequence: Synthetic epitope
AGAISAATYS

SEQ ID NO: 761 - protein, 10 aa, Artificial Sequence
  Description of Artificial Sequence: Synthetic epitope
AGAKKTKGTK

SEQ ID NO: 762 - protein, 10 aa, Artificial Sequence
  Description of Artificial Sequence: Synthetic epitope
AGAMAGGYRS

SEQ ID NO: 763 - protein, 10 aa, Artificial Sequence
  Description of Artificial Sequence: Synthetic epitope
AGANVLAKNK

SEQ ID NO: 764 - protein, 10 aa, Artificial Sequence
  Description of Artificial Sequence: Synthetic epitope
AGAQSAGTQQ

SEQ ID NO: 765 - protein, 10 aa, Artificial Sequence
  Description of Artificial Sequence: Synthetic epitope
AGAQVLLRAR

SEQ ID NO: 766 - protein, 10 aa, Artificial Sequence
  Description of Artificial Sequence: Synthetic epitope
AGAREEAMKE

SEQ ID NO: 767 - protein, 10 aa, Artificial Sequence
  Description of Artificial Sequence: Synthetic epitope
AGASAAEPLD

SEQ ID NO: 768 - protein, 10 aa, Artificial Sequence
  Description of Artificial Sequence: Synthetic epitope
AGASALLRSG

SEQ ID NO: 769 - protein, 10 aa, Artificial Sequence
  Description of Artificial Sequence: Synthetic epitope
AGASATDEEA

SEQ ID NO: 770 - protein, 10 aa, Artificial Sequence
  Description of Artificial Sequence: Synthetic epitope
AGASETAQAT

SEQ ID NO: 771 - protein, 10 aa, Artificial Sequence
  Description of Artificial Sequence: Synthetic epitope
AGASRVTIKQ

SEQ ID NO: 772 - protein, 10 aa, Artificial Sequence
  Description of Artificial Sequence: Synthetic epitope
AGATKASSRR

SEQ ID NO: 773 - protein, 10 aa, Artificial Sequence
  Description of Artificial Sequence: Synthetic epitope
AGATQEAQQE

SEQ ID NO: 774 - protein, 10 aa, Artificial Sequence
  Description of Artificial Sequence: Synthetic epitope
AGAVQNTNDS

SEQ ID NO: 775 - protein, 10 aa, Artificial Sequence
  Description of Artificial Sequence: Synthetic epitope
AGDFALTIHT

SEQ ID NO: 776 - protein, 10 aa, Artificial Sequence
  Description of Artificial Sequence: Synthetic epitope
AGDKKANDEA

SEQ ID NO: 777 - protein, 10 aa, Artificial Sequence
  Description of Artificial Sequence: Synthetic epitope
AGDSAVLGEA

SEQ ID NO: 778 - protein, 10 aa, Artificial Sequence
  Description of Artificial Sequence: Synthetic epitope
AGDSSQDEAE

SEQ ID NO: 779 - protein, 10 aa, Artificial Sequence
  Description of Artificial Sequence: Synthetic epitope
AGDVRPIMHH

SEQ ID NO: 780 - protein, 10 aa, Artificial Sequence
  Description of Artificial Sequence: Synthetic epitope
AGDVVATKIV

SEQ ID NO: 781 - protein, 10 aa, Artificial Sequence
  Description of Artificial Sequence: Synthetic epitope
AGEDAREGAA

SEQ ID NO: 782 - protein, 10 aa, Artificial Sequence
  Description of Artificial Sequence: Synthetic epitope
AGEGEMAQPA

SEQ ID NO: 783 - protein, 10 aa, Artificial Sequence
  Description of Artificial Sequence: Synthetic epitope
AGEIRETSQT

SEQ ID NO: 784 - protein, 10 aa, Artificial Sequence
  Description of Artificial Sequence: Synthetic epitope
AGEIYVMVND

SEQ ID NO: 785 - protein, 10 aa, Artificial Sequence
  Description of Artificial Sequence: Synthetic epitope
AGEQQLSEPE

SEQ ID NO: 786 - protein, 10 aa, Artificial Sequence
  Description of Artificial Sequence: Synthetic epitope
AGETLSVLNQ

SEQ ID NO: 787 - protein, 10 aa, Artificial Sequence
  Description of Artificial Sequence: Synthetic epitope
AGEVAIVRDP

SEQ ID NO: 788 - protein, 10 aa, Artificial Sequence
  Description of Artificial Sequence: Synthetic epitope
AGFQFTQWDS

SEQ ID NO: 789 - protein, 10 aa, Artificial Sequence
  Description of Artificial Sequence: Synthetic epitope
AGFTEVAALL

SEQ ID NO: 790 - protein, 10 aa, Artificial Sequence
  Description of Artificial Sequence: Synthetic epitope
AGGRVTNAAL

SEQ ID NO: 791 - protein, 10 aa, Artificial Sequence
  Description of Artificial Sequence: Synthetic epitope
AGGSARRSAA

SEQ ID NO: 792 - protein, 10 aa, Artificial Sequence
  Description of Artificial Sequence: Synthetic epitope
AGHATSSQEP

SEQ ID NO: 793 - protein, 10 aa, Artificial Sequence
  Description of Artificial Sequence: Synthetic epitope
AGILENPKNQ

SEQ ID NO: 794 - protein, 10 aa, Artificial Sequence
  Description of Artificial Sequence: Synthetic epitope
AGKAAVLAQQ

SEQ ID NO: 795 - protein, 10 aa, Artificial Sequence
  Description of Artificial Sequence: Synthetic epitope
AGKEENSSGL

SEQ ID NO: 796 - protein, 10 aa, Artificial Sequence
  Description of Artificial Sequence: Synthetic epitope
AGKESEETET

SEQ ID NO: 797 - protein, 10 aa, Artificial Sequence
  Description of Artificial Sequence: Synthetic epitope
AGKKAVAEED

SEQ ID NO: 798 - protein, 10 aa, Artificial Sequence
  Description of Artificial Sequence: Synthetic epitope
AGKKHSSEKR

SEQ ID NO: 799 - protein, 10 aa, Artificial Sequence
  Description of Artificial Sequence: Synthetic epitope
AGKSKSNDSE

SEQ ID NO: 800 - protein, 10 aa, Artificial Sequence
  Description of Artificial Sequence: Synthetic epitope
AGKTNTVKRQ

SEQ ID NO: 801 - protein, 10 aa, Artificial Sequence
  Description of Artificial Sequence: Synthetic epitope
AGKTSSISDL

SEQ ID NO: 802 - protein, 10 aa, Artificial Sequence
  Description of Artificial Sequence: Synthetic epitope
AGKTVPIVKG

SEQ ID NO: 803 - protein, 10 aa, Artificial Sequence
  Description of Artificial Sequence: Synthetic epitope
AGLARSSVRH

SEQ ID NO: 804 - protein, 10 aa, Artificial Sequence
  Description of Artificial Sequence: Synthetic epitope
AGLASANSNV

SEQ ID NO: 805 - protein, 10 aa, Artificial Sequence
  Description of Artificial Sequence: Synthetic epitope
AGLDKVASDL

SEQ ID NO: 806 - protein, 10 aa, Artificial Sequence
  Description of Artificial Sequence: Synthetic epitope
AGLDSNEMSL

SEQ ID NO: 807 - protein, 10 aa, Artificial Sequence
  Description of Artificial Sequence: Synthetic epitope
AGLFAEQSLQ

SEQ ID NO: 808 - protein, 10 aa, Artificial Sequence
  Description of Artificial Sequence: Synthetic epitope
AGLGKLIATL

SEQ ID NO: 809 - protein, 10 aa, Artificial Sequence
  Description of Artificial Sequence: Synthetic epitope
AGLLNIATAE

SEQ ID NO: 810 - protein, 10 aa, Artificial Sequence
  Description of Artificial Sequence: Synthetic epitope
AGLNSSATST

SEQ ID NO: 811 - protein, 10 aa, Artificial Sequence
  Description of Artificial Sequence: Synthetic epitope
AGLPQAVSSG

SEQ ID NO: 812 - protein, 10 aa, Artificial Sequence
  Description of Artificial Sequence: Synthetic epitope
AGLQTASVEK

SEQ ID NO: 813 - protein, 10 aa, Artificial Sequence
  Description of Artificial Sequence: Synthetic epitope
AGLSSELRSV

SEQ ID NO: 814 - protein, 10 aa, Artificial Sequence
  Description of Artificial Sequence: Synthetic epitope
AGLSSTKKAP

SEQ ID NO: 815 - protein, 10 aa, Artificial Sequence
  Description of Artificial Sequence: Synthetic epitope
AGLTLETRLQ

SEQ ID NO: 816 - protein, 10 aa, Artificial Sequence
  Description of Artificial Sequence: Synthetic epitope
AGMAALTQDI

SEQ ID NO: 817 - protein, 10 aa, Artificial Sequence
  Description of Artificial Sequence: Synthetic epitope
AGMAASLTVD

SEQ ID NO: 818 - protein, 10 aa, Artificial Sequence
  Description of Artificial Sequence: Synthetic epitope
AGMANKVEKP

SEQ ID NO: 819 - protein, 10 aa, Artificial Sequence
  Description of Artificial Sequence: Synthetic epitope
AGMKEQKLEA

SEQ ID NO: 820 - protein, 10 aa, Artificial Sequence
  Description of Artificial Sequence: Synthetic epitope
AGMKTPGQRQ

SEQ ID NO: 821 - protein, 10 aa, Artificial Sequence
  Description of Artificial Sequence: Synthetic epitope
AGMQKLLSEE

SEQ ID NO: 822 - protein, 10 aa, Artificial Sequence
  Description of Artificial Sequence: Synthetic epitope
AGNAATLLSY

SEQ ID NO: 823 - protein, 10 aa, Artificial Sequence
  Description of Artificial Sequence: Synthetic epitope
AGNATVKQSR

SEQ ID NO: 824 - protein, 10 aa, Artificial Sequence
  Description of Artificial Sequence: Synthetic epitope
AGNLINSIGR

SEQ ID NO: 825 - protein, 10 aa, Artificial Sequence
  Description of Artificial Sequence: Synthetic epitope
AGNNQLSLEK

SEQ ID NO: 826 - protein, 10 aa, Artificial Sequence
  Description of Artificial Sequence: Synthetic epitope
AGPATAEPHE

SEQ ID NO: 827 - protein, 10 aa, Artificial Sequence
  Description of Artificial Sequence: Synthetic epitope
AGPIKAQKLP

SEQ ID NO: 828 - protein, 10 aa, Artificial Sequence
  Description of Artificial Sequence: Synthetic epitope
AGPLNGASEV

SEQ ID NO: 829 - protein, 10 aa, Artificial Sequence
  Description of Artificial Sequence: Synthetic epitope
AGQDASEREE

SEQ ID NO: 830 - protein, 10 aa, Artificial Sequence
  Description of Artificial Sequence: Synthetic epitope
AGQKASKQEL

SEQ ID NO: 831 - protein, 10 aa, Artificial Sequence
  Description of Artificial Sequence: Synthetic epitope
AGQKASLSVS

SEQ ID NO: 832 - protein, 10 aa, Artificial Sequence
  Description of Artificial Sequence: Synthetic epitope
AGQLTLPMEA

SEQ ID NO: 833 - protein, 10 aa, Artificial Sequence
  Description of Artificial Sequence: Synthetic epitope
AGQRSETRDS

SEQ ID NO: 834 - protein, 10 aa, Artificial Sequence
  Description of Artificial Sequence: Synthetic epitope
AGQSGSTATS

SEQ ID NO: 835 - protein, 10 aa, Artificial Sequence
  Description of Artificial Sequence: Synthetic epitope
AGRANVITST

SEQ ID NO: 836 - protein, 10 aa, Artificial Sequence
  Description of Artificial Sequence: Synthetic epitope
AGRNVMVPAA

SEQ ID NO: 837 - protein, 10 aa, Artificial Sequence
  Description of Artificial Sequence: Synthetic epitope
AGRSVSTQTG

SEQ ID NO: 838 - protein, 10 aa, Artificial Sequence
  Description of Artificial Sequence: Synthetic epitope
AGSAKGAVPA

SEQ ID NO: 839 - protein, 10 aa, Artificial Sequence
  Description of Artificial Sequence: Synthetic epitope
AGSASAKRVW

SEQ ID NO: 840 - protein, 10 aa, Artificial Sequence
  Description of Artificial Sequence: Synthetic epitope
AGSDASSKLR

SEQ ID NO: 841 - protein, 10 aa, Artificial Sequence
  Description of Artificial Sequence: Synthetic epitope
AGSEAMATEE

SEQ ID NO: 842 - protein, 10 aa, Artificial Sequence
  Description of Artificial Sequence: Synthetic epitope
AGSERLRAVK

SEQ ID NO: 843 - protein, 10 aa, Artificial Sequence
  Description of Artificial Sequence: Synthetic epitope
AGSERTLDRL

SEQ ID NO: 844 - protein, 10 aa, Artificial Sequence
  Description of Artificial Sequence: Synthetic epitope
AGSESKEMTQ

SEQ ID NO: 845 - protein, 10 aa, Artificial Sequence
  Description of Artificial Sequence: Synthetic epitope
AGSFKVATQE

SEQ ID NO: 846 - protein, 10 aa, Artificial Sequence
  Description of Artificial Sequence: Synthetic epitope
AGSGRYRYQK

SEQ ID NO: 847 - protein, 10 aa, Artificial Sequence
  Description of Artificial Sequence: Synthetic epitope
AGSKITARGI

SEQ ID NO: 848 - protein, 10 aa, Artificial Sequence
  Description of Artificial Sequence: Synthetic epitope
AGSMMKKDAL

SEQ ID NO: 849 - protein, 10 aa, Artificial Sequence
  Description of Artificial Sequence: Synthetic epitope
AGSQAVQLTS

SEQ ID NO: 850 - protein, 10 aa, Artificial Sequence
  Description of Artificial Sequence: Synthetic epitope
AGSRKTSSEK

SEQ ID NO: 851 - protein, 10 aa, Artificial Sequence
  Description of Artificial Sequence: Synthetic epitope
AGSSISYELK

SEQ ID NO: 852 - protein, 10 aa, Artificial Sequence
  Description of Artificial Sequence: Synthetic epitope
AGSSKEEAGE

SEQ ID NO: 853 - protein, 10 aa, Artificial Sequence
  Description of Artificial Sequence: Synthetic epitope
AGSTVNALTQ

SEQ ID NO: 854 - protein, 10 aa, Artificial Sequence
  Description of Artificial Sequence: Synthetic epitope
AGSVKLLKLF

SEQ ID NO: 855 - protein, 10 aa, Artificial Sequence
  Description of Artificial Sequence: Synthetic epitope
AGTASTLEAK

SEQ ID NO: 856 - protein, 10 aa, Artificial Sequence
  Description of Artificial Sequence: Synthetic epitope
AGTATQMRQS

SEQ ID NO: 857 - protein, 10 aa, Artificial Sequence
  Description of Artificial Sequence: Synthetic epitope
AGTLAVSHDP

SEQ ID NO: 858 - protein, 10 aa, Artificial Sequence
  Description of Artificial Sequence: Synthetic epitope
AGTSARVLAA

SEQ ID NO: 859 - protein, 10 aa, Artificial Sequence
  Description of Artificial Sequence: Synthetic epitope
AGTSTSRSSE

SEQ ID NO: 860 - protein, 10 aa, Artificial Sequence
  Description of Artificial Sequence: Synthetic epitope
AGTWGIVQGQ

SEQ ID NO: 861 - protein, 10 aa, Artificial Sequence
  Description of Artificial Sequence: Synthetic epitope
AGVAELSSVV

SEQ ID NO: 862 - protein, 10 aa, Artificial Sequence
  Description of Artificial Sequence: Synthetic epitope
AGVAKLEGDN

SEQ ID NO: 863 - protein, 10 aa, Artificial Sequence
  Description of Artificial Sequence: Synthetic epitope
AGVANALAHK

SEQ ID NO: 864 - protein, 10 aa, Artificial Sequence
  Description of Artificial Sequence: Synthetic epitope
AGVSASIDTD

SEQ ID NO: 865 - protein, 10 aa, Artificial Sequence
  Description of Artificial Sequence: Synthetic epitope
AGVSQSDAEN

SEQ ID NO: 866 - protein, 10 aa, Artificial Sequence
  Description of Artificial Sequence: Synthetic epitope
AGVSRQRAAT

SEQ ID NO: 867 - protein, 10 aa, Artificial Sequence
  Description of Artificial Sequence: Synthetic epitope
AGVSSTAPLG

SEQ ID NO: 868 - protein, 10 aa, Artificial Sequence
  Description of Artificial Sequence: Synthetic epitope
AGVSTVQKAK

SEQ ID NO: 869 - protein, 10 aa, Artificial Sequence
  Description of Artificial Sequence: Synthetic epitope
AGVSVTSLKD

SEQ ID NO: 870 - protein, 10 aa, Artificial Sequence
  Description of Artificial Sequence: Synthetic epitope
AGWMRVQDTS

SEQ ID NO: 871 - protein, 10 aa, Artificial Sequence
  Description of Artificial Sequence: Synthetic epitope
AGYESALQVR

SEQ ID NO: 872 - protein, 10 aa, Artificial Sequence
  Description of Artificial Sequence: Synthetic epitope
AGYLEQVKRQ

SEQ ID NO: 873 - protein, 10 aa, Artificial Sequence
  Description of Artificial Sequence: Synthetic epitope
AGYLSIVVLL

SEQ ID NO: 874 - protein, 10 aa, Artificial Sequence
  Description of Artificial Sequence: Synthetic epitope
AGYVAQLSEI

SEQ ID NO: 875 - protein, 10 aa, Artificial Sequence
  Description of Artificial Sequence: Synthetic epitope
AHAASRIKTI

SEQ ID NO: 876 - protein, 10 aa, Artificial Sequence
  Description of Artificial Sequence: Synthetic epitope
AHAMSANMNK

SEQ ID NO: 877 - protein, 10 aa, Artificial Sequence
  Description of Artificial Sequence: Synthetic epitope
AHANEQAEYE

SEQ ID NO: 878 - protein, 10 aa, Artificial Sequence
  Description of Artificial Sequence: Synthetic epitope
AHASRQLGKP

SEQ ID NO: 879 - protein, 10 aa, Artificial Sequence
  Description of Artificial Sequence: Synthetic epitope
AHATARGELS

SEQ ID NO: 880 - protein, 10 aa, Artificial Sequence
  Description of Artificial Sequence: Synthetic epitope
AHDQATMAKW

SEQ ID NO: 881 - protein, 10 aa, Artificial Sequence
  Description of Artificial Sequence: Synthetic epitope
AHDRQYVRSV

SEQ ID NO: 882 - protein, 10 aa, Artificial Sequence
  Description of Artificial Sequence: Synthetic epitope
AHEEPLKAPP

SEQ ID NO: 883 - protein, 10 aa, Artificial Sequence
  Description of Artificial Sequence: Synthetic epitope
AHEEVMTSVA

SEQ ID NO: 884 - protein, 10 aa, Artificial Sequence
  Description of Artificial Sequence: Synthetic epitope
AHETSQAVHQ

SEQ ID NO: 885 - protein, 10 aa, Artificial Sequence
  Description of Artificial Sequence: Synthetic epitope
AHEVAQAKHK

SEQ ID NO: 886 - protein, 10 aa, Artificial Sequence
  Description of Artificial Sequence: Synthetic epitope
AHIMVEKERV

SEQ ID NO: 887 - protein, 10 aa, Artificial Sequence
  Description of Artificial Sequence: Synthetic epitope
AHIQNTAAKK

SEQ ID NO: 888 - protein, 10 aa, Artificial Sequence
  Description of Artificial Sequence: Synthetic epitope
AHISKSPRNM

SEQ ID NO: 889 - protein, 10 aa, Artificial Sequence
  Description of Artificial Sequence: Synthetic epitope
AHKASSIAKS

SEQ ID NO: 890 - protein, 10 aa, Artificial Sequence
  Description of Artificial Sequence: Synthetic epitope
AHKELSKEIK

SEQ ID NO: 891 - protein, 10 aa, Artificial Sequence
  Description of Artificial Sequence: Synthetic epitope
AHKIRAVEKK

SEQ ID NO: 892 - protein, 10 aa, Artificial Sequence
  Description of Artificial Sequence: Synthetic epitope
AHKVVEIKSK

SEQ ID NO: 893 - protein, 10 aa, Artificial Sequence
  Description of Artificial Sequence: Synthetic epitope
AHLSANARRL

SEQ ID NO: 894 - protein, 10 aa, Artificial Sequence
  Description of Artificial Sequence: Synthetic epitope
AHLSSRDSQS

SEQ ID NO: 895 - protein, 10 aa, Artificial Sequence
  Description of Artificial Sequence: Synthetic epitope
AHMPDVFTPL

SEQ ID NO: 896 - protein, 10 aa, Artificial Sequence
  Description of Artificial Sequence: Synthetic epitope
AHNDDPTDQM

SEQ ID NO: 897 - protein, 10 aa, Artificial Sequence
  Description of Artificial Sequence: Synthetic epitope
AHNHLIDSSI

SEQ ID NO: 898 - protein, 10 aa, Artificial Sequence
  Description of Artificial Sequence: Synthetic epitope
AHNKKASSRS

SEQ ID NO: 899 - protein, 10 aa, Artificial Sequence
  Description of Artificial Sequence: Synthetic epitope
AHNRTKKHDL

SEQ ID NO: 900 - protein, 10 aa, Artificial Sequence
  Description of Artificial Sequence: Synthetic epitope
AHNTSSIGKE

SEQ ID NO: 901 - protein, 10 aa, Artificial Sequence
  Description of Artificial Sequence: Synthetic epitope
AHNTTRTAAP

SEQ ID NO: 902 - protein, 10 aa, Artificial Sequence
  Description of Artificial Sequence: Synthetic epitope
AHPGMMQELQ

SEQ ID NO: 903 - protein, 10 aa, Artificial Sequence
  Description of Artificial Sequence: Synthetic epitope
AHPYSQALIQ

SEQ ID NO: 904 - protein, 10 aa, Artificial Sequence
  Description of Artificial Sequence: Synthetic epitope
AHQDTAEKNA

SEQ ID NO: 905 - protein, 10 aa, Artificial Sequence
  Description of Artificial Sequence: Synthetic epitope
AHQRQNSSNN

SEQ ID NO: 906 - protein, 10 aa, Artificial Sequence
  Description of Artificial Sequence: Synthetic epitope
AHRAEMEILP

SEQ ID NO: 907 - protein, 10 aa, Artificial Sequence
  Description of Artificial Sequence: Synthetic epitope
AHRKKSGALP

SEQ ID NO: 908 - protein, 10 aa, Artificial Sequence
  Description of Artificial Sequence: Synthetic epitope
AHRKSLSQKE

SEQ ID NO: 909 - protein, 10 aa, Artificial Sequence
  Description of Artificial Sequence: Synthetic epitope
AHRSTSADSA

SEQ ID NO: 910 - protein, 10 aa, Artificial Sequence
  Description of Artificial Sequence: Synthetic epitope
AHSIAQLQKK

SEQ ID NO: 911 - protein, 10 aa, Artificial Sequence
  Description of Artificial Sequence: Synthetic epitope
AHSNQKSAAG

SEQ ID NO: 912 - protein, 10 aa, Artificial Sequence
  Description of Artificial Sequence: Synthetic epitope
AHSQLRAAVA

SEQ ID NO: 913 - protein, 10 aa, Artificial Sequence
  Description of Artificial Sequence: Synthetic epitope
AHSRGNAPEG

SEQ ID NO: 914 - protein, 10 aa, Artificial Sequence
  Description of Artificial Sequence: Synthetic epitope
AHTPNQHHAA

SEQ ID NO: 915 - protein, 10 aa, Artificial Sequence
  Description of Artificial Sequence: Synthetic epitope
AHTRAVKERM

SEQ ID NO: 916 - protein, 10 aa, Artificial Sequence
  Description of Artificial Sequence: Synthetic epitope
AHVLMPHEST

SEQ ID NO: 917 - protein, 10 aa, Artificial Sequence
  Description of Artificial Sequence: Synthetic epitope
AHVSAAVAKT

SEQ ID NO: 918 - protein, 10 aa, Artificial Sequence
  Description of Artificial Sequence: Synthetic epitope
AHVTSKVNTG

SEQ ID NO: 919 - protein, 10 aa, Artificial Sequence
  Description of Artificial Sequence: Synthetic epitope
AHWSNINDVY

SEQ ID NO: 920 - protein, 10 aa, Artificial Sequence
  Description of Artificial Sequence: Synthetic epitope
AIAARVAGQT

SEQ ID NO: 921 - protein, 10 aa, Artificial Sequence
  Description of Artificial Sequence: Synthetic epitope
AIAASDFRTS

SEQ ID NO: 922 - protein, 10 aa, Artificial Sequence
  Description of Artificial Sequence: Synthetic epitope
AIADQLQKAQ

SEQ ID NO: 923 - protein, 10 aa, Artificial Sequence
  Description of Artificial Sequence: Synthetic epitope
AIAEQNESER

SEQ ID NO: 924 - protein, 10 aa, Artificial Sequence
  Description of Artificial Sequence: Synthetic epitope
AIAIALVSNM

SEQ ID NO: 925 - protein, 10 aa, Artificial Sequence
  Description of Artificial Sequence: Synthetic epitope
AIAKAGAVKD

SEQ ID NO: 926 - protein, 10 aa, Artificial Sequence
  Description of Artificial Sequence: Synthetic epitope
AIAKELIKRA

SEQ ID NO: 927 - protein, 10 aa, Artificial Sequence
  Description of Artificial Sequence: Synthetic epitope
AIAQMTQSLL

SEQ ID NO: 928 - protein, 10 aa, Artificial Sequence
  Description of Artificial Sequence: Synthetic epitope
AIASDAEQEP

SEQ ID NO: 929 - protein, 10 aa, Artificial Sequence
  Description of Artificial Sequence: Synthetic epitope
AIASEGKAEE

SEQ ID NO: 930 - protein, 10 aa, Artificial Sequence
  Description of Artificial Sequence: Synthetic epitope
AIATASSASG

SEQ ID NO: 931 - protein, 10 aa, Artificial Sequence
  Description of Artificial Sequence: Synthetic epitope
AIAVKRAQDK

SEQ ID NO: 932 - protein, 10 aa, Artificial Sequence
  Description of Artificial Sequence: Synthetic epitope
AIDATVAAEL

SEQ ID NO: 933 - protein, 10 aa, Artificial Sequence
  Description of Artificial Sequence: Synthetic epitope
AIDMMDSRTS

SEQ ID NO: 934 - protein, 10 aa, Artificial Sequence
  Description of Artificial Sequence: Synthetic epitope
AIEDLKDQKQ

SEQ ID NO: 935 - protein, 10 aa, Artificial Sequence
  Description of Artificial Sequence: Synthetic epitope
AIEEQIASNT

SEQ ID NO: 936 - protein, 10 aa, Artificial Sequence
  Description of Artificial Sequence: Synthetic epitope
AIENITASYD

SEQ ID NO: 937 - protein, 10 aa, Artificial Sequence
  Description of Artificial Sequence: Synthetic epitope
AIERKVEIHS

SEQ ID NO: 938 - protein, 10 aa, Artificial Sequence
  Description of Artificial Sequence: Synthetic epitope
AIETKQEKAM

SEQ ID NO: 939 - protein, 10 aa, Artificial Sequence
  Description of Artificial Sequence: Synthetic epitope
AIFVSFNITI

SEQ ID NO: 940 - protein, 10 aa, Artificial Sequence
  Description of Artificial Sequence: Synthetic epitope
AIGSSTEVQK

SEQ ID NO: 941 - protein, 10 aa, Artificial Sequence
  Description of Artificial Sequence: Synthetic epitope
AIIKAALEPF

SEQ ID NO: 942 - protein, 10 aa, Artificial Sequence
  Description of Artificial Sequence: Synthetic epitope
AIIKAALEPF

SEQ ID NO: 943 - protein, 10 aa, Artificial Sequence
  Description of Artificial Sequence: Synthetic epitope
AIIKAALEPF

SEQ ID NO: 944 - protein, 10 aa, Artificial Sequence
  Description of Artificial Sequence: Synthetic epitope
AIIKAALEPF

SEQ ID NO: 945 - protein, 10 aa, Artificial Sequence
  Description of Artificial Sequence: Synthetic epitope
AIISKKQVEA

SEQ ID NO: 946 - protein, 10 aa, Artificial Sequence
  Description of Artificial Sequence: Synthetic epitope
AIISSLKSKS

SEQ ID NO: 947 - protein, 10 aa, Artificial Sequence
  Description of Artificial Sequence: Synthetic epitope
AIKAKIMAKK

SEQ ID NO: 948 - protein, 10 aa, Artificial Sequence
  Description of Artificial Sequence: Synthetic epitope
AIKALTRSRS

SEQ ID NO: 949 - protein, 10 aa, Artificial Sequence
  Description of Artificial Sequence: Synthetic epitope
AIKGASPIET

SEQ ID NO: 950 - protein, 10 aa, Artificial Sequence
  Description of Artificial Sequence: Synthetic epitope
AIKKASNLQK

SEQ ID NO: 951 - protein, 10 aa, Artificial Sequence
  Description of Artificial Sequence: Synthetic epitope
AIKKRRNEIA

SEQ ID NO: 952 - protein, 10 aa, Artificial Sequence
  Description of Artificial Sequence: Synthetic epitope
AIKNIIPTKG

SEQ ID NO: 953 - protein, 10 aa, Artificial Sequence
  Description of Artificial Sequence: Synthetic epitope
AILASLTARQ

SEQ ID NO: 954 - protein, 10 aa, Artificial Sequence
  Description of Artificial Sequence: Synthetic epitope
AILDNSLDFS

SEQ ID NO: 955 - protein, 10 aa, Artificial Sequence
  Description of Artificial Sequence: Synthetic epitope
AILGVSESFI

SEQ ID NO: 956 - protein, 10 aa, Artificial Sequence
  Description of Artificial Sequence: Synthetic epitope
AILLTEVSQQ

SEQ ID NO: 957 - protein, 10 aa, Artificial Sequence
  Description of Artificial Sequence: Synthetic epitope
AILREETAKK

SEQ ID NO: 958 - protein, 10 aa, Artificial Sequence
  Description of Artificial Sequence: Synthetic epitope
AILSAANIQI

SEQ ID NO: 959 - protein, 10 aa, Artificial Sequence
  Description of Artificial Sequence: Synthetic epitope
AILSKVNLSV

SEQ ID NO: 960 - protein, 10 aa, Artificial Sequence
  Description of Artificial Sequence: Synthetic epitope
AILSSTNVGS

SEQ ID NO: 961 - protein, 10 aa, Artificial Sequence
  Description of Artificial Sequence: Synthetic epitope
AIMASVYKKA

SEQ ID NO: 962 - protein, 10 aa, Artificial Sequence
  Description of Artificial Sequence: Synthetic epitope
AIMSEHKKTI

SEQ ID NO: 963 - protein, 10 aa, Artificial Sequence
  Description of Artificial Sequence: Synthetic epitope
AINRMVIDEQ

SEQ ID NO: 964 - protein, 10 aa, Artificial Sequence
  Description of Artificial Sequence: Synthetic epitope
AIPLRQVNET

SEQ ID NO: 965 - protein, 10 aa, Artificial Sequence
  Description of Artificial Sequence: Synthetic epitope
AIQAAKSGGD

SEQ ID NO: 966 - protein, 10 aa, Artificial Sequence
  Description of Artificial Sequence: Synthetic epitope
AIQKAQKENS

SEQ ID NO: 967 - protein, 10 aa, Artificial Sequence
  Description of Artificial Sequence: Synthetic epitope
AIQKITLKKP

SEQ ID NO: 968 - protein, 10 aa, Artificial Sequence
  Description of Artificial Sequence: Synthetic epitope
AIREFQKTED

SEQ ID NO: 969 - protein, 10 aa, Artificial Sequence
  Description of Artificial Sequence: Synthetic epitope
AIREGVIKTE

SEQ ID NO: 970 - protein, 10 aa, Artificial Sequence
  Description of Artificial Sequence: Synthetic epitope
AIREVDSSED

SEQ ID NO: 971 - protein, 10 aa, Artificial Sequence
  Description of Artificial Sequence: Synthetic epitope
AIRNLKVDQL

SEQ ID NO: 972 - protein, 10 aa, Artificial Sequence
  Description of Artificial Sequence: Synthetic epitope
AIRSSNLKQL

SEQ ID NO: 973 - protein, 10 aa, Artificial Sequence
  Description of Artificial Sequence: Synthetic epitope
AISASEKVDG

SEQ ID NO: 974 - protein, 10 aa, Artificial Sequence
  Description of Artificial Sequence: Synthetic epitope
AISETEENSD

SEQ ID NO: 975 - protein, 10 aa, Artificial Sequence
  Description of Artificial Sequence: Synthetic epitope
AISFISAVNR

SEQ ID NO: 976 - protein, 10 aa, Artificial Sequence
  Description of Artificial Sequence: Synthetic epitope
AISGVALRSF

SEQ ID NO: 977 - protein, 10 aa, Artificial Sequence
  Description of Artificial Sequence: Synthetic epitope
AISLKANIPE

SEQ ID NO: 978 - protein, 10 aa, Artificial Sequence
  Description of Artificial Sequence: Synthetic epitope
AISLSKMYIE

SEQ ID NO: 979 - protein, 10 aa, Artificial Sequence
  Description of Artificial Sequence: Synthetic epitope
AISRSKLEDI

SEQ ID NO: 980 - protein, 10 aa, Artificial Sequence
  Description of Artificial Sequence: Synthetic epitope
AISTSETTYK

SEQ ID NO: 981 - protein, 10 aa, Artificial Sequence
  Description of Artificial Sequence: Synthetic epitope
AITKDAEVTI

SEQ ID NO: 982 - protein, 10 aa, Artificial Sequence
  Description of Artificial Sequence: Synthetic epitope
AITSAQGEHQ

SEQ ID NO: 983 - protein, 10 aa, Artificial Sequence
  Description of Artificial Sequence: Synthetic epitope
AITSDDESQA

SEQ ID NO: 984 - protein, 10 aa, Artificial Sequence
  Description of Artificial Sequence: Synthetic epitope
AITSYEKSDG

SEQ ID NO: 985 - protein, 10 aa, Artificial Sequence
  Description of Artificial Sequence: Synthetic epitope
AITVKVPNNS

SEQ ID NO: 986 - protein, 10 aa, Artificial Sequence
  Description of Artificial Sequence: Synthetic epitope
AIVAESLNNT

SEQ ID NO: 987 - protein, 10 aa, Artificial Sequence
  Description of Artificial Sequence: Synthetic epitope
AIVETAQVQI

SEQ ID NO: 988 - protein, 10 aa, Artificial Sequence
  Description of Artificial Sequence: Synthetic epitope
AIVKTLAATG

SEQ ID NO: 989 - protein, 10 aa, Artificial Sequence
  Description of Artificial Sequence: Synthetic epitope
AIVRQTFNKE

SEQ ID NO: 990 - protein, 10 aa, Artificial Sequence
  Description of Artificial Sequence: Synthetic epitope
AIYGYTSSIQ

SEQ ID NO: 991 - protein, 10 aa, Artificial Sequence
  Description of Artificial Sequence: Synthetic epitope
AKAAISDSAD

SEQ ID NO: 992 - protein, 10 aa, Artificial Sequence
  Description of Artificial Sequence: Synthetic epitope
AKAAKVQRAP

SEQ ID NO: 993 - protein, 10 aa, Artificial Sequence
  Description of Artificial Sequence: Synthetic epitope
AKAASEQQAD

SEQ ID NO: 994 - protein, 10 aa, Artificial Sequence
  Description of Artificial Sequence: Synthetic epitope
AKAATEEASS

SEQ ID NO: 995 - protein, 10 aa, Artificial Sequence
  Description of Artificial Sequence: Synthetic epitope
AKAEEAKDEP

SEQ ID NO: 996 - protein, 10 aa, Artificial Sequence
  Description of Artificial Sequence: Synthetic epitope
AKAEQNTTEA

SEQ ID NO: 997 - protein, 10 aa, Artificial Sequence
  Description of Artificial Sequence: Synthetic epitope
AKAGKGMHGG

SEQ ID NO: 998 - protein, 10 aa, Artificial Sequence
  Description of Artificial Sequence: Synthetic epitope
AKAHKAVGQP

SEQ ID NO: 999 - protein, 10 aa, Artificial Sequence
  Description of Artificial Sequence: Synthetic epitope
AKAKNLRAQA

SEQ ID NO: 1000 - protein, 10 aa, Artificial Sequence
  Description of Artificial Sequence: Synthetic epitope
AKALLQAKAS

SEQ ID NO: 1001 - protein, 10 aa, Artificial Sequence
  Description of Artificial Sequence: Synthetic epitope
AKANARARRT

SEQ ID NO: 1002 - protein, 10 aa, Artificial Sequence
  Description of Artificial Sequence: Synthetic epitope
AKAQKSSGPV

SEQ ID NO: 1003 - protein, 10 aa, Artificial Sequence
  Description of Artificial Sequence: Synthetic epitope
AKAQQKLQAS

SEQ ID NO: 1004 - protein, 10 aa, Artificial Sequence
  Description of Artificial Sequence: Synthetic epitope
AKARAEASMR

SEQ ID NO: 1005 - protein, 10 aa, Artificial Sequence
  Description of Artificial Sequence: Synthetic epitope
AKARKTEARG

SEQ ID NO: 1006 - protein, 10 aa, Artificial Sequence
  Description of Artificial Sequence: Synthetic epitope
AKASELHSVR

SEQ ID NO: 1007 - protein, 10 aa, Artificial Sequence
  Description of Artificial Sequence: Synthetic epitope
AKASMENQPH

SEQ ID NO: 1008 - protein, 10 aa, Artificial Sequence
  Description of Artificial Sequence: Synthetic epitope
AKASRSVAGS

SEQ ID NO: 1009 - protein, 10 aa, Artificial Sequence
  Description of Artificial Sequence: Synthetic epitope
AKATSSHPNS

SEQ ID NO: 1010 - protein, 10 aa, Artificial Sequence
  Description of Artificial Sequence: Synthetic epitope
AKAVEKRGQQ

SEQ ID NO: 1011 - protein, 10 aa, Artificial Sequence
  Description of Artificial Sequence: Synthetic epitope
AKAVLEQEET

SEQ ID NO: 1012 - protein, 10 aa, Artificial Sequence
  Description of Artificial Sequence: Synthetic epitope
AKDKYQLASG

SEQ ID NO: 1013 - protein, 10 aa, Artificial Sequence
  Description of Artificial Sequence: Synthetic epitope
AKDNKGVDPH

SEQ ID NO: 1014 - protein, 10 aa, Artificial Sequence
  Description of Artificial Sequence: Synthetic epitope
AKDSIAAVSG

SEQ ID NO: 1015 - protein, 10 aa, Artificial Sequence
  Description of Artificial Sequence: Synthetic epitope
AKDTNPTAAV

SEQ ID NO: 1016 - protein, 10 aa, Artificial Sequence
  Description of Artificial Sequence: Synthetic epitope
AKEAAQKAVN

SEQ ID NO: 1017 - protein, 10 aa, Artificial Sequence
  Description of Artificial Sequence: Synthetic epitope
AKEATQKAVN

SEQ ID NO: 1018 - protein, 10 aa, Artificial Sequence
  Description of Artificial Sequence: Synthetic epitope
AKEAVTKSEK

SEQ ID NO: 1019 - protein, 10 aa, Artificial Sequence
  Description of Artificial Sequence: Synthetic epitope
AKEDSRKAEG

SEQ ID NO: 1020 - protein, 10 aa, Artificial Sequence
  Description of Artificial Sequence: Synthetic epitope
AKEEASAMEE

SEQ ID NO: 1021 - protein, 10 aa, Artificial Sequence
  Description of Artificial Sequence: Synthetic epitope
AKEHALAQAE

SEQ ID NO: 1022 - protein, 10 aa, Artificial Sequence
  Description of Artificial Sequence: Synthetic epitope
AKEKDVNKSA

SEQ ID NO: 1023 - protein, 10 aa, Artificial Sequence
  Description of Artificial Sequence: Synthetic epitope
AKEKQLLKEG

SEQ ID NO: 1024 - protein, 10 aa, Artificial Sequence
  Description of Artificial Sequence: Synthetic epitope
AKEKVVTALN

SEQ ID NO: 1025 - protein, 10 aa, Artificial Sequence
  Description of Artificial Sequence: Synthetic epitope
AKENTEEASH

SEQ ID NO: 1026 - protein, 10 aa, Artificial Sequence
  Description of Artificial Sequence: Synthetic epitope
AKEQLQKVQA

SEQ ID NO: 1027 - protein, 10 aa, Artificial Sequence
  Description of Artificial Sequence: Synthetic epitope
AKERENTENN

SEQ ID NO: 1028 - protein, 10 aa, Artificial Sequence
  Description of Artificial Sequence: Synthetic epitope
AKESSDRTGD

SEQ ID NO: 1029 - protein, 10 aa, Artificial Sequence
  Description of Artificial Sequence: Synthetic epitope
AKETLLRLSS

SEQ ID NO: 1030 - protein, 10 aa, Artificial Sequence
  Description of Artificial Sequence: Synthetic epitope
AKFAPDNEQN

SEQ ID NO: 1031 - protein, 10 aa, Artificial Sequence
  Description of Artificial Sequence: Synthetic epitope
AKFDKKIMQK

SEQ ID NO: 1032 - protein, 10 aa, Artificial Sequence
  Description of Artificial Sequence: Synthetic epitope
AKFENASEET

SEQ ID NO: 1033 - protein, 10 aa, Artificial Sequence
  Description of Artificial Sequence: Synthetic epitope
AKFGSLAKQN

SEQ ID NO: 1034 - protein, 10 aa, Artificial Sequence
  Description of Artificial Sequence: Synthetic epitope
AKFKRVGKEK

SEQ ID NO: 1035 - protein, 10 aa, Artificial Sequence
  Description of Artificial Sequence: Synthetic epitope
AKFQQSLLDL

SEQ ID NO: 1036 - protein, 10 aa, Artificial Sequence
  Description of Artificial Sequence: Synthetic epitope
AKGENDETVS

SEQ ID NO: 1037 - protein, 10 aa, Artificial Sequence
  Description of Artificial Sequence: Synthetic epitope
AKGKMEKQQE

SEQ ID NO: 1038 - protein, 10 aa, Artificial Sequence
  Description of Artificial Sequence: Synthetic epitope
AKGLRGEASS

SEQ ID NO: 1039 - protein, 10 aa, Artificial Sequence
  Description of Artificial Sequence: Synthetic epitope
AKGMTVRQSK

SEQ ID NO: 1040 - protein, 10 aa, Artificial Sequence
  Description of Artificial Sequence: Synthetic epitope
AKGSISQSKA

SEQ ID NO: 1041 - protein, 10 aa, Artificial Sequence
  Description of Artificial Sequence: Synthetic epitope
AKHAKDSRFK

SEQ ID NO: 1042 - protein, 10 aa, Artificial Sequence
  Description of Artificial Sequence: Synthetic epitope
AKHGAALQRS

SEQ ID NO: 1043 - protein, 10 aa, Artificial Sequence
  Description of Artificial Sequence: Synthetic epitope
AKHKNNKVNV

SEQ ID NO: 1044 - protein, 10 aa, Artificial Sequence
  Description of Artificial Sequence: Synthetic epitope
AKHSEASVLT

SEQ ID NO: 1045 - protein, 10 aa, Artificial Sequence
  Description of Artificial Sequence: Synthetic epitope
AKHTKQSLQV

SEQ ID NO: 1046 - protein, 10 aa, Artificial Sequence
  Description of Artificial Sequence: Synthetic epitope
AKIEEVLMTA

SEQ ID NO: 1047 - protein, 10 aa, Artificial Sequence
  Description of Artificial Sequence: Synthetic epitope
AKIHISVSEP

SEQ ID NO: 1048 - protein, 10 aa, Artificial Sequence
  Description of Artificial Sequence: Synthetic epitope
AKIQEVAMNT

SEQ ID NO: 1049 - protein, 10 aa, Artificial Sequence
  Description of Artificial Sequence: Synthetic epitope
AKIQQSTVGN

SEQ ID NO: 1050 - protein, 10 aa, Artificial Sequence
  Description of Artificial Sequence: Synthetic epitope
AKIRIAREAP

SEQ ID NO: 1051 - protein, 10 aa, Artificial Sequence
  Description of Artificial Sequence: Synthetic epitope
AKISTQADTI

SEQ ID NO: 1052 - protein, 10 aa, Artificial Sequence
  Description of Artificial Sequence: Synthetic epitope
AKITALSEKQ

SEQ ID NO: 1053 - protein, 10 aa, Artificial Sequence
  Description of Artificial Sequence: Synthetic epitope
AKIVNSRDAK

SEQ ID NO: 1054 - protein, 10 aa, Artificial Sequence
  Description of Artificial Sequence: Synthetic epitope
AKIVRLTEYQ

SEQ ID NO: 1055 - protein, 10 aa, Artificial Sequence
  Description of Artificial Sequence: Synthetic epitope
AKKAALSSVK

SEQ ID NO: 1056 - protein, 10 aa, Artificial Sequence
  Description of Artificial Sequence: Synthetic epitope
AKKAGIVLDV

SEQ ID NO: 1057 - protein, 10 aa, Artificial Sequence
  Description of Artificial Sequence: Synthetic epitope
AKKEQSKELQ

SEQ ID NO: 1058 - protein, 10 aa, Artificial Sequence
  Description of Artificial Sequence: Synthetic epitope
AKKESYSALM

SEQ ID NO: 1059 - protein, 10 aa, Artificial Sequence
  Description of Artificial Sequence: Synthetic epitope
AKKGRGYARK

SEQ ID NO: 1060 - protein, 10 aa, Artificial Sequence
  Description of Artificial Sequence: Synthetic epitope
AKKGRTIVKT

SEQ ID NO: 1061 - protein, 10 aa, Artificial Sequence
  Description of Artificial Sequence: Synthetic epitope
AKKIEFEQFL

SEQ ID NO: 1062 - protein, 10 aa, Artificial Sequence
  Description of Artificial Sequence: Synthetic epitope
AKKIMMSKEE

SEQ ID NO: 1063 - protein, 10 aa, Artificial Sequence
  Description of Artificial Sequence: Synthetic epitope
AKKLAGTNSS

SEQ ID NO: 1064 - protein, 10 aa, Artificial Sequence
  Description of Artificial Sequence: Synthetic epitope
AKKPKLALED

SEQ ID NO: 1065 - protein, 10 aa, Artificial Sequence
  Description of Artificial Sequence: Synthetic epitope
AKKQEQTVEE

SEQ ID NO: 1066 - protein, 10 aa, Artificial Sequence
  Description of Artificial Sequence: Synthetic epitope
AKKRTELVAK

SEQ ID NO: 1067 - protein, 10 aa, Artificial Sequence
  Description of Artificial Sequence: Synthetic epitope
AKKSVSAKTK

SEQ ID NO: 1068 - protein, 10 aa, Artificial Sequence
  Description of Artificial Sequence: Synthetic epitope
AKKTALLPAA

SEQ ID NO: 1069 - protein, 10 aa, Artificial Sequence
  Description of Artificial Sequence: Synthetic epitope
AKKTGPTIFS

SEQ ID NO: 1070 - protein, 10 aa, Artificial Sequence
  Description of Artificial Sequence: Synthetic epitope
AKKVHSTIQK

SEQ ID NO: 1071 - protein, 10 aa, Artificial Sequence
  Description of Artificial Sequence: Synthetic epitope
AKKVQRTVLE

SEQ ID NO: 1072 - protein, 10 aa, Artificial Sequence
  Description of Artificial Sequence: Synthetic epitope
AKLAAESKSL

SEQ ID NO: 1073 - protein, 10 aa, Artificial Sequence
  Description of Artificial Sequence: Synthetic epitope
AKLASTIADN

SEQ ID NO: 1074 - protein, 10 aa, Artificial Sequence
  Description of Artificial Sequence: Synthetic epitope
AKLDAQLRDK

SEQ ID NO: 1075 - protein, 10 aa, Artificial Sequence
  Description of Artificial Sequence: Synthetic epitope
AKLDISAIKE

SEQ ID NO: 1076 - protein, 10 aa, Artificial Sequence
  Description of Artificial Sequence: Synthetic epitope
AKLDVKILLD

SEQ ID NO: 1077 - protein, 10 aa, Artificial Sequence
  Description of Artificial Sequence: Synthetic epitope
AKLEESLLET

SEQ ID NO: 1078 - protein, 10 aa, Artificial Sequence
  Description of Artificial Sequence: Synthetic epitope
AKLEKAKAKE

SEQ ID NO: 1079 - protein, 10 aa, Artificial Sequence
  Description of Artificial Sequence: Synthetic epitope
AKLEMIKPEE

SEQ ID NO: 1080 - protein, 10 aa, Artificial Sequence
  Description of Artificial Sequence: Synthetic epitope
AKLERALEKV

SEQ ID NO: 1081 - protein, 10 aa, Artificial Sequence
  Description of Artificial Sequence: Synthetic epitope
AKLGLVLDQA

SEQ ID NO: 1082 - protein, 10 aa, Artificial Sequence
  Description of Artificial Sequence: Synthetic epitope
AKLKQATSKH

SEQ ID NO: 1083 - protein, 10 aa, Artificial Sequence
  Description of Artificial Sequence: Synthetic epitope
AKLKSDGTIA

SEQ ID NO: 1084 - protein, 10 aa, Artificial Sequence
  Description of Artificial Sequence: Synthetic epitope
AKLKTMRQED

SEQ ID NO: 1085 - protein, 10 aa, Artificial Sequence
  Description of Artificial Sequence: Synthetic epitope
AKLLNSSKAR

SEQ ID NO: 1086 - protein, 10 aa, Artificial Sequence
  Description of Artificial Sequence: Synthetic epitope
AKLLSVLAQV

SEQ ID NO: 1087 - protein, 10 aa, Artificial Sequence
  Description of Artificial Sequence: Synthetic epitope
AKLNVNENVE

SEQ ID NO: 1088 - protein, 10 aa, Artificial Sequence
  Description of Artificial Sequence: Synthetic epitope
AKLQQTLNAL

SEQ ID NO: 1089 - protein, 10 aa, Artificial Sequence
  Description of Artificial Sequence: Synthetic epitope
AKLQVTLKKY

SEQ ID NO: 1090 - protein, 10 aa, Artificial Sequence
  Description of Artificial Sequence: Synthetic epitope
AKLRKTIINE

SEQ ID NO: 1091 - protein, 10 aa, Artificial Sequence
  Description of Artificial Sequence: Synthetic epitope
AKLVSEMKIK

SEQ ID NO: 1092 - protein, 10 aa, Artificial Sequence
  Description of Artificial Sequence: Synthetic epitope
AKLYKLLMND

SEQ ID NO: 1093 - protein, 10 aa, Artificial Sequence
  Description of Artificial Sequence: Synthetic epitope
AKMAEMLVEL

SEQ ID NO: 1094 - protein, 10 aa, Artificial Sequence
  Description of Artificial Sequence: Synthetic epitope
AKMERALAEA

SEQ ID NO: 1095 - protein, 10 aa, Artificial Sequence
  Description of Artificial Sequence: Synthetic epitope
AKMGITEYNN

SEQ ID NO: 1096 - protein, 10 aa, Artificial Sequence
  Description of Artificial Sequence: Synthetic epitope
AKMIEEDTEE

SEQ ID NO: 1097 - protein, 10 aa, Artificial Sequence
  Description of Artificial Sequence: Synthetic epitope
AKMISDIEKK

SEQ ID NO: 1098 - protein, 10 aa, Artificial Sequence
  Description of Artificial Sequence: Synthetic epitope
AKMLSPEQTV

SEQ ID NO: 1099 - protein, 10 aa, Artificial Sequence
  Description of Artificial Sequence: Synthetic epitope
AKMLSSKEAG

SEQ ID NO: 1100 - protein, 10 aa, Artificial Sequence
  Description of Artificial Sequence: Synthetic epitope
AKMNAQGNLD

SEQ ID NO: 1101 - protein, 10 aa, Artificial Sequence
  Description of Artificial Sequence: Synthetic epitope
AKMNSNKMVN

SEQ ID NO: 1102 - protein, 10 aa, Artificial Sequence
  Description of Artificial Sequence: Synthetic epitope
AKMSGQEQDW

SEQ ID NO: 1103 - protein, 10 aa, Artificial Sequence
  Description of Artificial Sequence: Synthetic epitope
AKMSTKNSTD

SEQ ID NO: 1104 - protein, 10 aa, Artificial Sequence
  Description of Artificial Sequence: Synthetic epitope
AKMVAIVGLT

SEQ ID NO: 1105 - protein, 10 aa, Artificial Sequence
  Description of Artificial Sequence: Synthetic epitope
AKNAVSAATF

SEQ ID NO: 1106 - protein, 10 aa, Artificial Sequence
  Description of Artificial Sequence: Synthetic epitope
AKNKKTRKQR

SEQ ID NO: 1107 - protein, 10 aa, Artificial Sequence
  Description of Artificial Sequence: Synthetic epitope
AKNLRVNAGD

SEQ ID NO: 1108 - protein, 10 aa, Artificial Sequence
  Description of Artificial Sequence: Synthetic epitope
AKNPVVRIFI

SEQ ID NO: 1109 - protein, 10 aa, Artificial Sequence
  Description of Artificial Sequence: Synthetic epitope
AKNQDAQPIT

SEQ ID NO: 1110 - protein, 10 aa, Artificial Sequence
  Description of Artificial Sequence: Synthetic epitope
AKNSFVASSV

SEQ ID NO: 1111 - protein, 10 aa, Artificial Sequence
  Description of Artificial Sequence: Synthetic epitope
AKNSKAAGGP

SEQ ID NO: 1112 - protein, 10 aa, Artificial Sequence
  Description of Artificial Sequence: Synthetic epitope
AKNWLGLGMS

SEQ ID NO: 1113 - protein, 10 aa, Artificial Sequence
  Description of Artificial Sequence: Synthetic epitope
AKPKRKIPTS

SEQ ID NO: 1114 - protein, 10 aa, Artificial Sequence
  Description of Artificial Sequence: Synthetic epitope
AKPKVEMYSG

SEQ ID NO: 1115 - protein, 10 aa, Artificial Sequence
  Description of Artificial Sequence: Synthetic epitope
AKPKYMATKS

SEQ ID NO: 1116 - protein, 10 aa, Artificial Sequence
  Description of Artificial Sequence: Synthetic epitope
AKPLSVRTLL

SEQ ID NO: 1117 - protein, 10 aa, Artificial Sequence
  Description of Artificial Sequence: Synthetic epitope
AKPPAKVEAK

SEQ ID NO: 1118 - protein, 10 aa, Artificial Sequence
  Description of Artificial Sequence: Synthetic epitope
AKPQGHIGVD

SEQ ID NO: 1119 - protein, 10 aa, Artificial Sequence
  Description of Artificial Sequence: Synthetic epitope
AKPSAMKVGE

SEQ ID NO: 1120 - protein, 10 aa, Artificial Sequence
  Description of Artificial Sequence: Synthetic epitope
AKPSELLTSV

SEQ ID NO: 1121 - protein, 10 aa, Artificial Sequence
  Description of Artificial Sequence: Synthetic epitope
AKPSRQVPQV

SEQ ID NO: 1122 - protein, 10 aa, Artificial Sequence
  Description of Artificial Sequence: Synthetic epitope
AKPYVYTTPP

SEQ ID NO: 1123 - protein, 10 aa, Artificial Sequence
  Description of Artificial Sequence: Synthetic epitope
AKQARNSQFD

SEQ ID NO: 1124 - protein, 10 aa, Artificial Sequence
  Description of Artificial Sequence: Synthetic epitope
AKQESVVRRA

SEQ ID NO: 1125 - protein, 10 aa, Artificial Sequence
  Description of Artificial Sequence: Synthetic epitope
AKQIEAKDNK

SEQ ID NO: 1126 - protein, 10 aa, Artificial Sequence
  Description of Artificial Sequence: Synthetic epitope
AKQKTNEKGT

SEQ ID NO: 1127 - protein, 10 aa, Artificial Sequence
  Description of Artificial Sequence: Synthetic epitope
AKQQINLEMP

SEQ ID NO: 1128 - protein, 10 aa, Artificial Sequence
  Description of Artificial Sequence: Synthetic epitope
AKQQKVANEK

SEQ ID NO: 1129 - protein, 10 aa, Artificial Sequence
  Description of Artificial Sequence: Synthetic epitope
AKQSLVMDAD

SEQ ID NO: 1130 - protein, 10 aa, Artificial Sequence
  Description of Artificial Sequence: Synthetic epitope
AKQSTSKVQV

SEQ ID NO: 1131 - protein, 10 aa, Artificial Sequence
  Description of Artificial Sequence: Synthetic epitope
AKQVQPLVLL

SEQ ID NO: 1132 - protein, 10 aa, Artificial Sequence
  Description of Artificial Sequence: Synthetic epitope
AKQVTSQSSL

SEQ ID NO: 1133 - protein, 10 aa, Artificial Sequence
  Description of Artificial Sequence: Synthetic epitope
AKRASMLSKH

SEQ ID NO: 1134 - protein, 10 aa, Artificial Sequence
  Description of Artificial Sequence: Synthetic epitope
AKREALGAVG

SEQ ID NO: 1135 - protein, 10 aa, Artificial Sequence
  Description of Artificial Sequence: Synthetic epitope
AKRFEIARSQ

SEQ ID NO: 1136 - protein, 10 aa, Artificial Sequence
  Description of Artificial Sequence: Synthetic epitope
AKRINRTSLS

SEQ ID NO: 1137 - protein, 10 aa, Artificial Sequence
  Description of Artificial Sequence: Synthetic epitope
AKRIQAKKER

SEQ ID NO: 1138 - protein, 10 aa, Artificial Sequence
  Description of Artificial Sequence: Synthetic epitope
AKRKRMKMDK

SEQ ID NO: 1139 - protein, 10 aa, Artificial Sequence
  Description of Artificial Sequence: Synthetic epitope
AKRKWVSVRP

SEQ ID NO: 1140 - protein, 10 aa, Artificial Sequence
  Description of Artificial Sequence: Synthetic epitope
AKRNDELMVS

SEQ ID NO: 1141 - protein, 10 aa, Artificial Sequence
  Description of Artificial Sequence: Synthetic epitope
AKRRLTEQKG

SEQ ID NO: 1142 - protein, 10 aa, Artificial Sequence
  Description of Artificial Sequence: Synthetic epitope
AKRYAFFMPT

SEQ ID NO: 1143 - protein, 10 aa, Artificial Sequence
  Description of Artificial Sequence: Synthetic epitope
AKSDVETAKK

SEQ ID NO: 1144 - protein, 10 aa, Artificial Sequence
  Description of Artificial Sequence: Synthetic epitope
AKSEENTKEE

SEQ ID NO: 1145 - protein, 10 aa, Artificial Sequence
  Description of Artificial Sequence: Synthetic epitope
AKSEGKLAKQ

SEQ ID NO: 1146 - protein, 10 aa, Artificial Sequence
  Description of Artificial Sequence: Synthetic epitope
AKSELTDSAS

SEQ ID NO: 1147 - protein, 10 aa, Artificial Sequence
  Description of Artificial Sequence: Synthetic epitope
AKSKHLIHSK

SEQ ID NO: 1148 - protein, 10 aa, Artificial Sequence
  Description of Artificial Sequence: Synthetic epitope
AKSKREEAAD

SEQ ID NO: 1149 - protein, 10 aa, Artificial Sequence
  Description of Artificial Sequence: Synthetic epitope
AKSKSEETQE

SEQ ID NO: 1150 - protein, 10 aa, Artificial Sequence
  Description of Artificial Sequence: Synthetic epitope
AKSLLVKAEK

SEQ ID NO: 1151 - protein, 10 aa, Artificial Sequence
  Description of Artificial Sequence: Synthetic epitope
AKSLTQVRAM

SEQ ID NO: 1152 - protein, 10 aa, Artificial Sequence
  Description of Artificial Sequence: Synthetic epitope
AKSMQTLQDL

SEQ ID NO: 1153 - protein, 10 aa, Artificial Sequence
  Description of Artificial Sequence: Synthetic epitope
AKSNSANISQ

SEQ ID NO: 1154 - protein, 10 aa, Artificial Sequence
  Description of Artificial Sequence: Synthetic epitope
AKSPKKAKVA

SEQ ID NO: 1155 - protein, 10 aa, Artificial Sequence
  Description of Artificial Sequence: Synthetic epitope
AKSQALYSAQ

SEQ ID NO: 1156 - protein, 10 aa, Artificial Sequence
  Description of Artificial Sequence: Synthetic epitope
AKSQERVEGK

SEQ ID NO: 1157 - protein, 10 aa, Artificial Sequence
  Description of Artificial Sequence: Synthetic epitope
AKSQSSTSTT

SEQ ID NO: 1158 - protein, 10 aa, Artificial Sequence
  Description of Artificial Sequence: Synthetic epitope
AKSRVTQSNF

SEQ ID NO: 1159 - protein, 10 aa, Artificial Sequence
  Description of Artificial Sequence: Synthetic epitope
AKSSDTLAGA

SEQ ID NO: 1160 - protein, 10 aa, Artificial Sequence
  Description of Artificial Sequence: Synthetic epitope
AKSSEREAYS

SEQ ID NO: 1161 - protein, 10 aa, Artificial Sequence
  Description of Artificial Sequence: Synthetic epitope
AKSTKNETIT

SEQ ID NO: 1162 - protein, 10 aa, Artificial Sequence
  Description of Artificial Sequence: Synthetic epitope
AKTAAQNLYE

SEQ ID NO: 1163 - protein, 10 aa, Artificial Sequence
  Description of Artificial Sequence: Synthetic epitope
AKTAVTATNV

SEQ ID NO: 1164 - protein, 10 aa, Artificial Sequence
  Description of Artificial Sequence: Synthetic epitope
AKTHTTALAG

SEQ ID NO: 1165 - protein, 10 aa, Artificial Sequence
  Description of Artificial Sequence: Synthetic epitope
AKTIQDKNKE

SEQ ID NO: 1166 - protein, 10 aa, Artificial Sequence
  Description of Artificial Sequence: Synthetic epitope
AKTKEEVEAA

SEQ ID NO: 1167 - protein, 10 aa, Artificial Sequence
  Description of Artificial Sequence: Synthetic epitope
AKTKPVTEPK

SEQ ID NO: 1168 - protein, 10 aa, Artificial Sequence
  Description of Artificial Sequence: Synthetic epitope
  MOD_RES (9)..(10): Any amino acid
AKTPTTNLXX

SEQ ID NO: 1169 - protein, 10 aa, Artificial Sequence
  Description of Artificial Sequence: Synthetic epitope
AKTQENELPE

SEQ ID NO: 1170 - protein, 10 aa, Artificial Sequence
  Description of Artificial Sequence: Synthetic epitope
AKTQPAVKNM

SEQ ID NO: 1171 - protein, 10 aa, Artificial Sequence
  Description of Artificial Sequence: Synthetic epitope
AKTRDFTSSR

SEQ ID NO: 1172 - protein, 10 aa, Artificial Sequence
  Description of Artificial Sequence: Synthetic epitope
AKTSPAKQQA

SEQ ID NO: 1173 - protein, 10 aa, Artificial Sequence
  Description of Artificial Sequence: Synthetic epitope
AKTSVYSHIV

SEQ ID NO: 1174 - protein, 10 aa, Artificial Sequence
  Description of Artificial Sequence: Synthetic epitope
AKTTKKRPQR

SEQ ID NO: 1175 - protein, 10 aa, Artificial Sequence
  Description of Artificial Sequence: Synthetic epitope
AKTVAEVDSE

SEQ ID NO: 1176 - protein, 10 aa, Artificial Sequence
  Description of Artificial Sequence: Synthetic epitope
AKTVAFLRNL

SEQ ID NO: 1177 - protein, 10 aa, Artificial Sequence
  Description of Artificial Sequence: Synthetic epitope
AKVAELLSEE

SEQ ID NO: 1178 - protein, 10 aa, Artificial Sequence
  Description of Artificial Sequence: Synthetic epitope
AKVARKKVEE

SEQ ID NO: 1179 - protein, 10 aa, Artificial Sequence
  Description of Artificial Sequence: Synthetic epitope
AKVDEVKSTI

SEQ ID NO: 1180 - protein, 10 aa, Artificial Sequence
  Description of Artificial Sequence: Synthetic epitope
AKVGQYVSRA

SEQ ID NO: 1181 - protein, 10 aa, Artificial Sequence
  Description of Artificial Sequence: Synthetic epitope
AKVGSVGHKM

SEQ ID NO: 1182 - protein, 10 aa, Artificial Sequence
  Description of Artificial Sequence: Synthetic epitope
AKVKAGSVKQ

SEQ ID NO: 1183 - protein, 10 aa, Artificial Sequence
  Description of Artificial Sequence: Synthetic epitope
AKVKAQTAPN

SEQ ID NO: 1184 - protein, 10 aa, Artificial Sequence
  Description of Artificial Sequence: Synthetic epitope
AKVKERLEPR

SEQ ID NO: 1185 - protein, 10 aa, Artificial Sequence
  Description of Artificial Sequence: Synthetic epitope
AKVKGANDGI

SEQ ID NO: 1186 - protein, 10 aa, Artificial Sequence
  Description of Artificial Sequence: Synthetic epitope
AKVKSLLNKD

SEQ ID NO: 1187 - protein, 10 aa, Artificial Sequence
  Description of Artificial Sequence: Synthetic epitope
AKVKVSRPRA

SEQ ID NO: 1188 - protein, 10 aa, Artificial Sequence
  Description of Artificial Sequence: Synthetic epitope
AKVLLVFRKL

SEQ ID NO: 1189 - protein, 10 aa, Artificial Sequence
  Description of Artificial Sequence: Synthetic epitope
AKVLQRTNGD

SEQ ID NO: 1190 - protein, 10 aa, Artificial Sequence
  Description of Artificial Sequence: Synthetic epitope
AKVNAAMNGQ

SEQ ID NO: 1191 - protein, 10 aa, Artificial Sequence
  Description of Artificial Sequence: Synthetic epitope
AKVQADEQFG

SEQ ID NO: 1192 - protein, 10 aa, Artificial Sequence
  Description of Artificial Sequence: Synthetic epitope
AKVRKVATAP

SEQ ID NO: 1193 - protein, 10 aa, Artificial Sequence
  Description of Artificial Sequence: Synthetic epitope
AKVSAQVFQE

SEQ ID NO: 1194 - protein, 10 aa, Artificial Sequence
  Description of Artificial Sequence: Synthetic epitope
AKVSDSISAQ

SEQ ID NO: 1195 - protein, 10 aa, Artificial Sequence
  Description of Artificial Sequence: Synthetic epitope
AKVSHMTSDR

SEQ ID NO: 1196 - protein, 10 aa, Artificial Sequence
  Description of Artificial Sequence: Synthetic epitope
AKVSKQTKAL

SEQ ID NO: 1197 - protein, 10 aa, Artificial Sequence
  Description of Artificial Sequence: Synthetic epitope
AKVVESKRTR

SEQ ID NO: 1198 - protein, 10 aa, Artificial Sequence
  Description of Artificial Sequence: Synthetic epitope
AKWQWETHDP

SEQ ID NO: 1199 - protein, 10 aa, Artificial Sequence
  Description of Artificial Sequence: Synthetic epitope
AKYHAMISEN

SEQ ID NO: 1200 - protein, 10 aa, Artificial Sequence
  Description of Artificial Sequence: Synthetic epitope
AKYKFSRERA

SEQ ID NO: 1201 - protein, 10 aa, Artificial Sequence
  Description of Artificial Sequence: Synthetic epitope
AKYNRLGQLS

SEQ ID NO: 1202 - protein, 10 aa, Artificial Sequence
  Description of Artificial Sequence: Synthetic epitope
ALAAEARETR

SEQ ID NO: 1203 - protein, 10 aa, Artificial Sequence
  Description of Artificial Sequence: Synthetic epitope
ALAALRIDFH

SEQ ID NO: 1204 - protein, 10 aa, Artificial Sequence
  Description of Artificial Sequence: Synthetic epitope
ALAAVNQKAF

SEQ ID NO: 1205 - protein, 10 aa, Artificial Sequence
  Description of Artificial Sequence: Synthetic epitope
ALAAYRLEDT

SEQ ID NO: 1206 - protein, 10 aa, Artificial Sequence
  Description of Artificial Sequence: Synthetic epitope
ALADAAEELL

SEQ ID NO: 1207 - protein, 10 aa, Artificial Sequence
  Description of Artificial Sequence: Synthetic epitope
ALADKTKARI

SEQ ID NO: 1208 - protein, 10 aa, Artificial Sequence
  Description of Artificial Sequence: Synthetic epitope
ALADQQKAQQ

SEQ ID NO: 1209 - protein, 10 aa, Artificial Sequence
  Description of Artificial Sequence: Synthetic epitope
ALAFEQSVLQ

SEQ ID NO: 1210 - protein, 10 aa, Artificial Sequence
  Description of Artificial Sequence: Synthetic epitope
ALAGLKTVSS

SEQ ID NO: 1211 - protein, 10 aa, Artificial Sequence
  Description of Artificial Sequence: Synthetic epitope
ALAGTRTAQG

SEQ ID NO: 1212 - protein, 10 aa, Artificial Sequence
  Description of Artificial Sequence: Synthetic epitope
ALAKKLLAKL

SEQ ID NO: 1213 - protein, 10 aa, Artificial Sequence
  Description of Artificial Sequence: Synthetic epitope
ALALASSQSH

SEQ ID NO: 1214 - protein, 10 aa, Artificial Sequence
  Description of Artificial Sequence: Synthetic epitope
ALAQALSASE

SEQ ID NO: 1215 - protein, 10 aa, Artificial Sequence
  Description of Artificial Sequence: Synthetic epitope
ALAQETSLGA

SEQ ID NO: 1216 - protein, 10 aa, Artificial Sequence
  Description of Artificial Sequence: Synthetic epitope
ALAQLSSRQG

SEQ ID NO: 1217 - protein, 10 aa, Artificial Sequence
  Description of Artificial Sequence: Synthetic epitope
ALASEELAKG

SEQ ID NO: 1218 - protein, 10 aa, Artificial Sequence
  Description of Artificial Sequence: Synthetic epitope
ALASQLLDQS

SEQ ID NO: 1219 - protein, 10 aa, Artificial Sequence
  Description of Artificial Sequence: Synthetic epitope
ALATASLQTE

SEQ ID NO: 1220 - protein, 10 aa, Artificial Sequence
  Description of Artificial Sequence: Synthetic epitope
ALATESGHPD

SEQ ID NO: 1221 - protein, 10 aa, Artificial Sequence
  Description of Artificial Sequence: Synthetic epitope
ALATETVDMF

SEQ ID NO: 1222 - protein, 10 aa, Artificial Sequence
  Description of Artificial Sequence: Synthetic epitope
ALDVSASDDE

SEQ ID NO: 1223 - protein, 10 aa, Artificial Sequence
  Description of Artificial Sequence: Synthetic epitope
ALEAALVEKG

SEQ ID NO: 1224 - protein, 10 aa, Artificial Sequence
  Description of Artificial Sequence: Synthetic epitope
ALEAASTRQR

SEQ ID NO: 1225 - protein, 10 aa, Artificial Sequence
  Description of Artificial Sequence: Synthetic epitope
ALEAAVLNKE

SEQ ID NO: 1226 - protein, 10 aa, Artificial Sequence
  Description of Artificial Sequence: Synthetic epitope
ALEAQRGREQ

SEQ ID NO: 1227 - protein, 10 aa, Artificial Sequence
  Description of Artificial Sequence: Synthetic epitope
ALEDMMTLSA

SEQ ID NO: 1228 - protein, 10 aa, Artificial Sequence
  Description of Artificial Sequence: Synthetic epitope
ALEENATSQK

SEQ ID NO: 1229 - protein, 10 aa, Artificial Sequence
  Description of Artificial Sequence: Synthetic epitope
ALEEQRMEGK

SEQ ID NO: 1230 - protein, 10 aa, Artificial Sequence
  Description of Artificial Sequence: Synthetic epitope
ALEGELAEPL

SEQ ID NO: 1231 - protein, 10 aa, Artificial Sequence
  Description of Artificial Sequence: Synthetic epitope
ALEIEKNSRK

SEQ ID NO: 1232 - protein, 10 aa, Artificial Sequence
  Description of Artificial Sequence: Synthetic epitope
ALEILTNATQ

SEQ ID NO: 1233 - protein, 10 aa, Artificial Sequence
  Description of Artificial Sequence: Synthetic epitope
ALEKFAQTSE

SEQ ID NO: 1234 - protein, 10 aa, Artificial Sequence
  Description of Artificial Sequence: Synthetic epitope
ALELAKAKAV

SEQ ID NO: 1235 - protein, 10 aa, Artificial Sequence
  Description of Artificial Sequence: Synthetic epitope
ALELHKTQGT

SEQ ID NO: 1236 - protein, 10 aa, Artificial Sequence
  Description of Artificial Sequence: Synthetic epitope
ALELSSREQE

SEQ ID NO: 1237 - protein, 10 aa, Artificial Sequence
  Description of Artificial Sequence: Synthetic epitope
ALENKSKQRT

SEQ ID NO: 1238 - protein, 10 aa, Artificial Sequence
  Description of Artificial Sequence: Synthetic epitope
ALENRLSGED

SEQ ID NO: 1239 - protein, 10 aa, Artificial Sequence
  Description of Artificial Sequence: Synthetic epitope
ALERASFSKL

SEQ ID NO: 1240 - protein, 10 aa, Artificial Sequence
  Description of Artificial Sequence: Synthetic epitope
ALERQATFER

SEQ ID NO: 1241 - protein, 10 aa, Artificial Sequence
  Description of Artificial Sequence: Synthetic epitope
ALERQEFLRE

SEQ ID NO: 1242 - protein, 10 aa, Artificial Sequence
  Description of Artificial Sequence: Synthetic epitope
ALESAFVPYE

SEQ ID NO: 1243 - protein, 10 aa, Artificial Sequence
  Description of Artificial Sequence: Synthetic epitope
ALESRVESIQ

SEQ ID NO: 1244 - protein, 10 aa, Artificial Sequence
  Description of Artificial Sequence: Synthetic epitope
ALESTARHDE

SEQ ID NO: 1245 - protein, 10 aa, Artificial Sequence
  Description of Artificial Sequence: Synthetic epitope
ALEVILLSWN

SEQ ID NO: 1246 - protein, 10 aa, Artificial Sequence
  Description of Artificial Sequence: Synthetic epitope
ALEVSYFKSS

SEQ ID NO: 1247 - protein, 10 aa, Artificial Sequence
  Description of Artificial Sequence: Synthetic epitope
ALFEAQYLAQ

SEQ ID NO: 1248 - protein, 10 aa, Artificial Sequence
  Description of Artificial Sequence: Synthetic epitope
ALFTADSQAM

SEQ ID NO: 1249 - protein, 10 aa, Artificial Sequence
  Description of Artificial Sequence: Synthetic epitope
ALGAALASEP

SEQ ID NO: 1250 - protein, 10 aa, Artificial Sequence
  Description of Artificial Sequence: Synthetic epitope
ALGKNRSADF

SEQ ID NO: 1251 - protein, 10 aa, Artificial Sequence
  Description of Artificial Sequence: Synthetic epitope
ALGKSLRPSA

SEQ ID NO: 1252 - protein, 10 aa, Artificial Sequence
  Description of Artificial Sequence: Synthetic epitope
ALGLLSSLES

SEQ ID NO: 1253 - protein, 10 aa, Artificial Sequence
  Description of Artificial Sequence: Synthetic epitope
ALGMNGAKAR

SEQ ID NO: 1254 - protein, 10 aa, Artificial Sequence
  Description of Artificial Sequence: Synthetic epitope
ALGRLAAEEP

SEQ ID NO: 1255 - protein, 10 aa, Artificial Sequence
  Description of Artificial Sequence: Synthetic epitope
ALGYMERAAE

SEQ ID NO: 1256 - protein, 10 aa, Artificial Sequence
  Description of Artificial Sequence: Synthetic epitope
ALHARTGDSR

SEQ ID NO: 1257 - protein, 10 aa, Artificial Sequence
  Description of Artificial Sequence: Synthetic epitope
ALHSSVQSVN

SEQ ID NO: 1258 - protein, 10 aa, Artificial Sequence
  Description of Artificial Sequence: Synthetic epitope
ALHSSVQSVN

SEQ ID NO: 1259 - protein, 10 aa, Artificial Sequence
  Description of Artificial Sequence: Synthetic epitope
ALHTQSSETA

SEQ ID NO: 1260 - protein, 10 aa, Artificial Sequence
  Description of Artificial Sequence: Synthetic epitope
ALIAEQGLEN

SEQ ID NO: 1261 - protein, 10 aa, Artificial Sequence
  Description of Artificial Sequence: Synthetic epitope
ALIKKLTKQD

SEQ ID NO: 1262 - protein, 10 aa, Artificial Sequence
  Description of Artificial Sequence: Synthetic epitope
ALIKSAAVAE

SEQ ID NO: 1263 - protein, 10 aa, Artificial Sequence
  Description of Artificial Sequence: Synthetic epitope
ALILESLNTN

SEQ ID NO: 1264 - protein, 10 aa, Artificial Sequence
  Description of Artificial Sequence: Synthetic epitope
ALINSRKSRN

SEQ ID NO: 1265 - protein, 10 aa, Artificial Sequence
  Description of Artificial Sequence: Synthetic epitope
ALINSSIYAM

SEQ ID NO: 1266 - protein, 10 aa, Artificial Sequence
  Description of Artificial Sequence: Synthetic epitope
ALISSKSLSE

SEQ ID NO: 1267 - protein, 10 aa, Artificial Sequence
  Description of Artificial Sequence: Synthetic epitope
ALKAASGTQN

SEQ ID NO: 1268 - protein, 10 aa, Artificial Sequence
  Description of Artificial Sequence: Synthetic epitope
ALKAIRDRKA

SEQ ID NO: 1269 - protein, 10 aa, Artificial Sequence
  Description of Artificial Sequence: Synthetic epitope
ALKDALVSTD

SEQ ID NO: 1270 - protein, 10 aa, Artificial Sequence
  Description of Artificial Sequence: Synthetic epitope
ALKEQREEAA

SEQ ID NO: 1271 - protein, 10 aa, Artificial Sequence
  Description of Artificial Sequence: Synthetic epitope
ALKISVASEP

SEQ ID NO: 1272 - protein, 10 aa, Artificial Sequence
  Description of Artificial Sequence: Synthetic epitope
ALKKELMVQK

SEQ ID NO: 1273 - protein, 10 aa, Artificial Sequence
  Description of Artificial Sequence: Synthetic epitope
ALKMEADEKK

SEQ ID NO: 1274 - protein, 10 aa, Artificial Sequence
  Description of Artificial Sequence: Synthetic epitope
ALKQQLVASH

SEQ ID NO: 1275 - protein, 10 aa, Artificial Sequence
  Description of Artificial Sequence: Synthetic epitope
ALKRALVSAL

SEQ ID NO: 1276 - protein, 10 aa, Artificial Sequence
  Description of Artificial Sequence: Synthetic epitope
ALKSESAASS

SEQ ID NO: 1277 - protein, 10 aa, Artificial Sequence
  Description of Artificial Sequence: Synthetic epitope
ALKSLAEPAT

SEQ ID NO: 1278 - protein, 10 aa, Artificial Sequence
  Description of Artificial Sequence: Synthetic epitope
ALKSNSKVGQ

SEQ ID NO: 1279 - protein, 10 aa, Artificial Sequence
  Description of Artificial Sequence: Synthetic epitope
ALKTEFKANA

SEQ ID NO: 1280 - protein, 10 aa, Artificial Sequence
  Description of Artificial Sequence: Synthetic epitope
ALLAETALRF

SEQ ID NO: 1281 - protein, 10 aa, Artificial Sequence
  Description of Artificial Sequence: Synthetic epitope
ALLAVPDMSS

SEQ ID NO: 1282 - protein, 10 aa, Artificial Sequence
  Description of Artificial Sequence: Synthetic epitope
ALLDEALLAK

SEQ ID NO: 1283 - protein, 10 aa, Artificial Sequence
  Description of Artificial Sequence: Synthetic epitope
ALLEEPELSD

SEQ ID NO: 1284 - protein, 10 aa, Artificial Sequence
  Description of Artificial Sequence: Synthetic epitope
ALLESAANKT

SEQ ID NO: 1285 - protein, 10 aa, Artificial Sequence
  Description of Artificial Sequence: Synthetic epitope
ALLIQRQKSA

SEQ ID NO: 1286 - protein, 10 aa, Artificial Sequence
  Description of Artificial Sequence: Synthetic epitope
ALLKANVEKP

SEQ ID NO: 1287 - protein, 10 aa, Artificial Sequence
  Description of Artificial Sequence: Synthetic epitope
ALLKLKAEQE

SEQ ID NO: 1288 - protein, 10 aa, Artificial Sequence
  Description of Artificial Sequence: Synthetic epitope
ALLKSKLRAL

SEQ ID NO: 1289 - protein, 10 aa, Artificial Sequence
  Description of Artificial Sequence: Synthetic epitope
ALLMKAGVQP

SEQ ID NO: 1290 - protein, 10 aa, Artificial Sequence
  Description of Artificial Sequence: Synthetic epitope
ALLRNALANQ

SEQ ID NO: 1291 - protein, 10 aa, Artificial Sequence
  Description of Artificial Sequence: Synthetic epitope
ALLSNSELAE

SEQ ID NO: 1292 - protein, 10 aa, Artificial Sequence
  Description of Artificial Sequence: Synthetic epitope
ALLVTSKEEK

SEQ ID NO: 1293 - protein, 10 aa, Artificial Sequence
  Description of Artificial Sequence: Synthetic epitope
ALMASNDNAN

SEQ ID NO: 1294 - protein, 10 aa, Artificial Sequence
  Description of Artificial Sequence: Synthetic epitope
ALMGSRKQIQ

SEQ ID NO: 1295 - protein, 10 aa, Artificial Sequence
  Description of Artificial Sequence: Synthetic epitope
ALMHSESMEE

SEQ ID NO: 1296 - protein, 10 aa, Artificial Sequence
  Description of Artificial Sequence: Synthetic epitope
ALMKMWQEKE

SEQ ID NO: 1297 - protein, 10 aa, Artificial Sequence
  Description of Artificial Sequence: Synthetic epitope
ALMNSRSLEL

SEQ ID NO: 1298 - protein, 10 aa, Artificial Sequence
  Description of Artificial Sequence: Synthetic epitope
ALMPQETQAL

SEQ ID NO: 1299 - protein, 10 aa, Artificial Sequence
  Description of Artificial Sequence: Synthetic epitope
ALMTLQLQDL

SEQ ID NO: 1300 - protein, 10 aa, Artificial Sequence
  Description of Artificial Sequence: Synthetic epitope
ALNASLQAAL

SEQ ID NO: 1301 - protein, 10 aa, Artificial Sequence
  Description of Artificial Sequence: Synthetic epitope
ALNESKPDEV

SEQ ID NO: 1302 - protein, 10 aa, Artificial Sequence
  Description of Artificial Sequence: Synthetic epitope
ALNESLAQDK

SEQ ID NO: 1303 - protein, 10 aa, Artificial Sequence
  Description of Artificial Sequence: Synthetic epitope
ALNKKTLEAE

SEQ ID NO: 1304 - protein, 10 aa, Artificial Sequence
  Description of Artificial Sequence: Synthetic epitope
ALNPINVKRP

SEQ ID NO: 1305 - protein, 10 aa, Artificial Sequence
  Description of Artificial Sequence: Synthetic epitope
ALNQAKYIPE

SEQ ID NO: 1306 - protein, 10 aa, Artificial Sequence
  Description of Artificial Sequence: Synthetic epitope
ALNRRTEATK

SEQ ID NO: 1307 - protein, 10 aa, Artificial Sequence
  Description of Artificial Sequence: Synthetic epitope
ALNSIVSLQA

SEQ ID NO: 1308 - protein, 10 aa, Artificial Sequence
  Description of Artificial Sequence: Synthetic epitope
ALPHDESVTQ

SEQ ID NO: 1309 - protein, 10 aa, Artificial Sequence
  Description of Artificial Sequence: Synthetic epitope
ALPLLGDIGA

SEQ ID NO: 1310 - protein, 10 aa, Artificial Sequence
  Description of Artificial Sequence: Synthetic epitope
ALQAEKLVVI

SEQ ID NO: 1311 - protein, 10 aa, Artificial Sequence
  Description of Artificial Sequence: Synthetic epitope
ALQAKRVASV

SEQ ID NO: 1312 - protein, 10 aa, Artificial Sequence
  Description of Artificial Sequence: Synthetic epitope
ALQAKSDEKA

SEQ ID NO: 1313 - protein, 10 aa, Artificial Sequence
  Description of Artificial Sequence: Synthetic epitope
ALQARKKRTK

SEQ ID NO: 1314 - protein, 10 aa, Artificial Sequence
  Description of Artificial Sequence: Synthetic epitope
ALQDAASGLQ

SEQ ID NO: 1315 - protein, 10 aa, Artificial Sequence
  Description of Artificial Sequence: Synthetic epitope
ALQEVYTLAE

SEQ ID NO: 1316 - protein, 10 aa, Artificial Sequence
  Description of Artificial Sequence: Synthetic epitope
ALQGSLKRKQ

SEQ ID NO: 1317 - protein, 10 aa, Artificial Sequence
  Description of Artificial Sequence: Synthetic epitope
ALQMVQLRPV

SEQ ID NO: 1318 - protein, 10 aa, Artificial Sequence
  Description of Artificial Sequence: Synthetic epitope
ALQQLIRVTQ

SEQ ID NO: 1319 - protein, 10 aa, Artificial Sequence
  Description of Artificial Sequence: Synthetic epitope
ALQQTALQED

SEQ ID NO: 1320 - protein, 10 aa, Artificial Sequence
  Description of Artificial Sequence: Synthetic epitope
ALQRNTTVLN

SEQ ID NO: 1321 - protein, 10 aa, Artificial Sequence
  Description of Artificial Sequence: Synthetic epitope
ALQTAFADAR

SEQ ID NO: 1322 - protein, 10 aa, Artificial Sequence
  Description of Artificial Sequence: Synthetic epitope
ALQTQLSTDT

SEQ ID NO: 1323 - protein, 10 aa, Artificial Sequence
  Description of Artificial Sequence: Synthetic epitope
ALQVAEGFIS

SEQ ID NO: 1324 - protein, 10 aa, Artificial Sequence
  Description of Artificial Sequence: Synthetic epitope
ALQVATTSPT

SEQ ID NO: 1325 - protein, 10 aa, Artificial Sequence
  Description of Artificial Sequence: Synthetic epitope
ALQYITTSSM

SEQ ID NO: 1326 - protein, 10 aa, Artificial Sequence
  Description of Artificial Sequence: Synthetic epitope
ALREKAATRR

SEQ ID NO: 1327 - protein, 10 aa, Artificial Sequence
  Description of Artificial Sequence: Synthetic epitope
ALRETVRLDT

SEQ ID NO: 1328 - protein, 10 aa, Artificial Sequence
  Description of Artificial Sequence: Synthetic epitope
ALRKSEIEYY

SEQ ID NO: 1329 - protein, 10 aa, Artificial Sequence
  Description of Artificial Sequence: Synthetic epitope
ALRLQQTQSL

SEQ ID NO: 1330 - protein, 10 aa, Artificial Sequence
  Description of Artificial Sequence: Synthetic epitope
ALRNRTADQK

SEQ ID NO: 1331 - protein, 10 aa, Artificial Sequence
  Description of Artificial Sequence: Synthetic epitope
ALRSLAVLEG

SEQ ID NO: 1332 - protein, 10 aa, Artificial Sequence
  Description of Artificial Sequence: Synthetic epitope
ALRSQSSTVA

SEQ ID NO: 1333 - protein, 10 aa, Artificial Sequence
  Description of Artificial Sequence: Synthetic epitope
ALSDITSSGA

SEQ ID NO: 1334 - protein, 10 aa, Artificial Sequence
  Description of Artificial Sequence: Synthetic epitope
ALSGQFDAIY

SEQ ID NO: 1335 - protein, 10 aa, Artificial Sequence
  Description of Artificial Sequence: Synthetic epitope
ALSHRKTMKK

SEQ ID NO: 1336 - protein, 10 aa, Artificial Sequence
  Description of Artificial Sequence: Synthetic epitope
ALSLAVDKQF

SEQ ID NO: 1337 - protein, 10 aa, Artificial Sequence
  Description of Artificial Sequence: Synthetic epitope
ALSLEEAKEE

SEQ ID NO: 1338 - protein, 10 aa, Artificial Sequence
  Description of Artificial Sequence: Synthetic epitope
ALSLSSLRSD

SEQ ID NO: 1339 - protein, 10 aa, Artificial Sequence
  Description of Artificial Sequence: Synthetic epitope
ALSRQLSSGV

SEQ ID NO: 1340 - protein, 10 aa, Artificial Sequence
  Description of Artificial Sequence: Synthetic epitope
ALSSPSKSAE

SEQ ID NO: 1341 - protein, 10 aa, Artificial Sequence
  Description of Artificial Sequence: Synthetic epitope
ALSSQLSVAD

SEQ ID NO: 1342 - protein, 10 aa, Artificial Sequence
  Description of Artificial Sequence: Synthetic epitope
ALSSRAASVS

SEQ ID NO: 1343 - protein, 10 aa, Artificial Sequence
  Description of Artificial Sequence: Synthetic epitope
ALSSTKTLEE

SEQ ID NO: 1344 - protein, 10 aa, Artificial Sequence
  Description of Artificial Sequence: Synthetic epitope
ALSSTSAIID

SEQ ID NO: 1345 - protein, 10 aa, Artificial Sequence
  Description of Artificial Sequence: Synthetic epitope
ALSTIVSTSQ

SEQ ID NO: 1346 - protein, 10 aa, Artificial Sequence
  Description of Artificial Sequence: Synthetic epitope
ALSTQVANLP

SEQ ID NO: 1347 - protein, 10 aa, Artificial Sequence
  Description of Artificial Sequence: Synthetic epitope
ALTETTLRLA

SEQ ID NO: 1348 - protein, 10 aa, Artificial Sequence
  Description of Artificial Sequence: Synthetic epitope
ALTILQSLSQ

SEQ ID NO: 1349 - protein, 10 aa, Artificial Sequence
  Description of Artificial Sequence: Synthetic epitope
ALTISLQEES

SEQ ID NO: 1350 - protein, 10 aa, Artificial Sequence
  Description of Artificial Sequence: Synthetic epitope
ALTQMKESAE

SEQ ID NO: 1351 - protein, 10 aa, Artificial Sequence
  Description of Artificial Sequence: Synthetic epitope
ALTQSQSAKQ

SEQ ID NO: 1352 - protein, 10 aa, Artificial Sequence
  Description of Artificial Sequence: Synthetic epitope
ALTSLVDEVK

SEQ ID NO: 1353 - protein, 10 aa, Artificial Sequence
  Description of Artificial Sequence: Synthetic epitope
ALTVSASSPG

SEQ ID NO: 1354 - protein, 10 aa, Artificial Sequence
  Description of Artificial Sequence: Synthetic epitope
ALTVSSVKTL

SEQ ID NO: 1355 - protein, 10 aa, Artificial Sequence
  Description of Artificial Sequence: Synthetic epitope
ALVAMNENLK

SEQ ID NO: 1356 - protein, 10 aa, Artificial Sequence
  Description of Artificial Sequence: Synthetic epitope
ALVAPLLRLE

SEQ ID NO: 1357 - protein, 10 aa, Artificial Sequence
  Description of Artificial Sequence: Synthetic epitope
ALVASSQSVR

SEQ ID NO: 1358 - protein, 10 aa, Artificial Sequence
  Description of Artificial Sequence: Synthetic epitope
ALVDSTAYLA

SEQ ID NO: 1359 - protein, 10 aa, Artificial Sequence
  Description of Artificial Sequence: Synthetic epitope
ALVGKLPGDH

SEQ ID NO: 1360 - protein, 10 aa, Artificial Sequence
  Description of Artificial Sequence: Synthetic epitope
ALVKAKSVDE

SEQ ID NO: 1361 - protein, 10 aa, Artificial Sequence
  Description of Artificial Sequence: Synthetic epitope
ALVNRERNKK

SEQ ID NO: 1362 - protein, 10 aa, Artificial Sequence
  Description of Artificial Sequence: Synthetic epitope
ALVQAKEVTR

SEQ ID NO: 1363 - protein, 10 aa, Artificial Sequence
  Description of Artificial Sequence: Synthetic epitope
ALVQEKLAEP

SEQ ID NO: 1364 - protein, 10 aa, Artificial Sequence
  Description of Artificial Sequence: Synthetic epitope
ALVRKAIVDL

SEQ ID NO: 1365 - protein, 10 aa, Artificial Sequence
  Description of Artificial Sequence: Synthetic epitope
ALVRSASSDT

SEQ ID NO: 1366 - protein, 10 aa, Artificial Sequence
  Description of Artificial Sequence: Synthetic epitope
ALVSVRVAAP

SEQ ID NO: 1367 - protein, 10 aa, Artificial Sequence
  Description of Artificial Sequence: Synthetic epitope
ALVTESIPAE

SEQ ID NO: 1368 - protein, 10 aa, Artificial Sequence
  Description of Artificial Sequence: Synthetic epitope
ALWIERWGKL

SEQ ID NO: 1369 - protein, 10 aa, Artificial Sequence
  Description of Artificial Sequence: Synthetic epitope
ALYVELVVKN

SEQ ID NO: 1370 - protein, 10 aa, Artificial Sequence
  Description of Artificial Sequence: Synthetic epitope
AMADNQSKNL

SEQ ID NO: 1371 - protein, 10 aa, Artificial Sequence
  Description of Artificial Sequence: Synthetic epitope
AMAEQESARN

SEQ ID NO: 1372 - protein, 10 aa, Artificial Sequence
  Description of Artificial Sequence: Synthetic epitope
AMAESTEKHA

SEQ ID NO: 1373 - protein, 10 aa, Artificial Sequence
  Description of Artificial Sequence: Synthetic epitope
AMAGVWIKTD

SEQ ID NO: 1374 - protein, 10 aa, Artificial Sequence
  Description of Artificial Sequence: Synthetic epitope
AMAPVLSDVT

SEQ ID NO: 1375 - protein, 10 aa, Artificial Sequence
  Description of Artificial Sequence: Synthetic epitope
AMAQLVKTLS

SEQ ID NO: 1376 - protein, 10 aa, Artificial Sequence
  Description of Artificial Sequence: Synthetic epitope
AMAQLVKTLS

SEQ ID NO: 1377 - protein, 10 aa, Artificial Sequence
  Description of Artificial Sequence: Synthetic epitope
AMASTSGLVI

SEQ ID NO: 1378 - protein, 10 aa, Artificial Sequence
  Description of Artificial Sequence: Synthetic epitope
AMAVSHIMLE

SEQ ID NO: 1379 - protein, 10 aa, Artificial Sequence
  Description of Artificial Sequence: Synthetic epitope
AMEKATAAEV

SEQ ID NO: 1380 - protein, 10 aa, Artificial Sequence
  Description of Artificial Sequence: Synthetic epitope
AMELAVARRE

SEQ ID NO: 1381 - protein, 10 aa, Artificial Sequence
  Description of Artificial Sequence: Synthetic epitope
AMELSELARE

SEQ ID NO: 1382 - protein, 10 aa, Artificial Sequence
  Description of Artificial Sequence: Synthetic epitope
AMELTEQPVT

SEQ ID NO: 1383 - protein, 10 aa, Artificial Sequence
  Description of Artificial Sequence: Synthetic epitope
AMESKIQRSD

SEQ ID NO: 1384 - protein, 10 aa, Artificial Sequence
  Description of Artificial Sequence: Synthetic epitope
AMFGVGKTSS

SEQ ID NO: 1385 - protein, 10 aa, Artificial Sequence
  Description of Artificial Sequence: Synthetic epitope
AMGKRLSREQ

SEQ ID NO: 1386 - protein, 10 aa, Artificial Sequence
  Description of Artificial Sequence: Synthetic epitope
AMGPSALGQS

SEQ ID NO: 1387 - protein, 10 aa, Artificial Sequence
  Description of Artificial Sequence: Synthetic epitope
AMGRKSVKSV

SEQ ID NO: 1388 - protein, 10 aa, Artificial Sequence
  Description of Artificial Sequence: Synthetic epitope
AMIESTQQAR

SEQ ID NO: 1389 - protein, 10 aa, Artificial Sequence
  Description of Artificial Sequence: Synthetic epitope
AMIKENLEKM

SEQ ID NO: 1390 - protein, 10 aa, Artificial Sequence
  Description of Artificial Sequence: Synthetic epitope
AMIKRVRLAK

SEQ ID NO: 1391 - protein, 10 aa, Artificial Sequence
  Description of Artificial Sequence: Synthetic epitope
AMKDQARDLA

SEQ ID NO: 1392 - protein, 10 aa, Artificial Sequence
  Description of Artificial Sequence: Synthetic epitope
AMKVGSLASN

SEQ ID NO: 1393 - protein, 10 aa, Artificial Sequence
  Description of Artificial Sequence: Synthetic epitope
AMKYDKDEVD

SEQ ID NO: 1394 - protein, 10 aa, Artificial Sequence
  Description of Artificial Sequence: Synthetic epitope
AMLASRSASL

SEQ ID NO: 1395 - protein, 10 aa, Artificial Sequence
  Description of Artificial Sequence: Synthetic epitope
AMLKASAASP

SEQ ID NO: 1396 - protein, 10 aa, Artificial Sequence
  Description of Artificial Sequence: Synthetic epitope
AMLLDTVQKV

SEQ ID NO: 1397 - protein, 10 aa, Artificial Sequence
  Description of Artificial Sequence: Synthetic epitope
AMLMAASVAR

SEQ ID NO: 1398 - protein, 10 aa, Artificial Sequence
  Description of Artificial Sequence: Synthetic epitope
AMLQEQVLKT

SEQ ID NO: 1399 - protein, 10 aa, Artificial Sequence
  Description of Artificial Sequence: Synthetic epitope
AMLVAEKAAL

SEQ ID NO: 1400 - protein, 10 aa, Artificial Sequence
  Description of Artificial Sequence: Synthetic epitope
AMNLDQVSKD

SEQ ID NO: 1401 - protein, 10 aa, Artificial Sequence
  Description of Artificial Sequence: Synthetic epitope
AMNNAQRIEK

SEQ ID NO: 1402 - protein, 10 aa, Artificial Sequence
  Description of Artificial Sequence: Synthetic epitope
AMNSARKPVT

SEQ ID NO: 1403 - protein, 10 aa, Artificial Sequence
  Description of Artificial Sequence: Synthetic epitope
AMPRVLRHRH

SEQ ID NO: 1404 - protein, 10 aa, Artificial Sequence
  Description of Artificial Sequence: Synthetic epitope
AMQAAKRANI

SEQ ID NO: 1405 - protein, 10 aa, Artificial Sequence
  Description of Artificial Sequence: Synthetic epitope
AMQAQQGRSS

SEQ ID NO: 1406 - protein, 10 aa, Artificial Sequence
  Description of Artificial Sequence: Synthetic epitope
AMQEFTLRER

SEQ ID NO: 1407 - protein, 10 aa, Artificial Sequence
  Description of Artificial Sequence: Synthetic epitope
AMQSEGPVEH

SEQ ID NO: 1408 - protein, 10 aa, Artificial Sequence
  Description of Artificial Sequence: Synthetic epitope
AMREAIQSYP

SEQ ID NO: 1409 - protein, 10 aa, Artificial Sequence
  Description of Artificial Sequence: Synthetic epitope
AMRRERNRNK

SEQ ID NO: 1410 - protein, 10 aa, Artificial Sequence
  Description of Artificial Sequence: Synthetic epitope
AMSLGSVTFT

SEQ ID NO: 1411 - protein, 10 aa, Artificial Sequence
  Description of Artificial Sequence: Synthetic epitope
AMTKQMESMK

SEQ ID NO: 1412 - protein, 10 aa, Artificial Sequence
  Description of Artificial Sequence: Synthetic epitope
AMTQTKAETH

SEQ ID NO: 1413 - protein, 10 aa, Artificial Sequence
  Description of Artificial Sequence: Synthetic epitope
AMTRARALRS

SEQ ID NO: 1414 - protein, 10 aa, Artificial Sequence
  Description of Artificial Sequence: Synthetic epitope
AMVAHELSNR

SEQ ID NO: 1415 - protein, 10 aa, Artificial Sequence
  Description of Artificial Sequence: Synthetic epitope
AMVEAVTGRS

SEQ ID NO: 1416 - protein, 10 aa, Artificial Sequence
  Description of Artificial Sequence: Synthetic epitope
AMVSKAARQE

SEQ ID NO: 1417 - protein, 10 aa, Artificial Sequence
  Description of Artificial Sequence: Synthetic epitope
ANAAKHTQDS

SEQ ID NO: 1418 - protein, 10 aa, Artificial Sequence
  Description of Artificial Sequence: Synthetic epitope
ANAATVSIEM

SEQ ID NO: 1419 - protein, 10 aa, Artificial Sequence
  Description of Artificial Sequence: Synthetic epitope
ANAHDVLARS

SEQ ID NO: 1420 - protein, 10 aa, Artificial Sequence
  Description of Artificial Sequence: Synthetic epitope
ANAVVLIKPS

SEQ ID NO: 1421 - protein, 10 aa, Artificial Sequence
  Description of Artificial Sequence: Synthetic epitope
ANDALLQSSP

SEQ ID NO: 1422 - protein, 10 aa, Artificial Sequence
  Description of Artificial Sequence: Synthetic epitope
ANDLKAVQQN

SEQ ID NO: 1423 - protein, 10 aa, Artificial Sequence
  Description of Artificial Sequence: Synthetic epitope
ANDVAMEEIE

SEQ ID NO: 1424 - protein, 10 aa, Artificial Sequence
  Description of Artificial Sequence: Synthetic epitope
ANEKARILAE

SEQ ID NO: 1425 - protein, 10 aa, Artificial Sequence
  Description of Artificial Sequence: Synthetic epitope
ANELKSVLPA

SEQ ID NO: 1426 - protein, 10 aa, Artificial Sequence
  Description of Artificial Sequence: Synthetic epitope
ANENDGYVDM

SEQ ID NO: 1427 - protein, 10 aa, Artificial Sequence
  Description of Artificial Sequence: Synthetic epitope
ANERFKKPTK

SEQ ID NO: 1428 - protein, 10 aa, Artificial Sequence
  Description of Artificial Sequence: Synthetic epitope
ANESRLEEAD

SEQ ID NO: 1429 - protein, 10 aa, Artificial Sequence
  Description of Artificial Sequence: Synthetic epitope
ANETLRIPVP

SEQ ID NO: 1430 - protein, 10 aa, Artificial Sequence
  Description of Artificial Sequence: Synthetic epitope
ANEVEAVKVH

SEQ ID NO: 1431 - protein, 10 aa, Artificial Sequence
  Description of Artificial Sequence: Synthetic epitope
ANEVLKMEMP

SEQ ID NO: 1432 - protein, 10 aa, Artificial Sequence
  Description of Artificial Sequence: Synthetic epitope
ANFEKNVSQA

SEQ ID NO: 1433 - protein, 10 aa, Artificial Sequence
  Description of Artificial Sequence: Synthetic epitope
ANGAIAEMGS

SEQ ID NO: 1434 - protein, 10 aa, Artificial Sequence
  Description of Artificial Sequence: Synthetic epitope
ANGDELVAAV

SEQ ID NO: 1435 - protein, 10 aa, Artificial Sequence
  Description of Artificial Sequence: Synthetic epitope
ANGENSNLSR

SEQ ID NO: 1436 - protein, 10 aa, Artificial Sequence
  Description of Artificial Sequence: Synthetic epitope
ANGFSEINSK

SEQ ID NO: 1437 - protein, 10 aa, Artificial Sequence
  Description of Artificial Sequence: Synthetic epitope
ANGRSVARAA

SEQ ID NO: 1438 - protein, 10 aa, Artificial Sequence
  Description of Artificial Sequence: Synthetic epitope
ANGRVKFRVE

SEQ ID NO: 1439 - protein, 10 aa, Artificial Sequence
  Description of Artificial Sequence: Synthetic epitope
ANGSRTETQV

SEQ ID NO: 1440 - protein, 10 aa, Artificial Sequence
  Description of Artificial Sequence: Synthetic epitope
ANHASKTQSK

SEQ ID NO: 1441 - protein, 10 aa, Artificial Sequence
  Description of Artificial Sequence: Synthetic epitope
ANHEEVLAAG

SEQ ID NO: 1442 - protein, 10 aa, Artificial Sequence
  Description of Artificial Sequence: Synthetic epitope
ANHLVPEVPT

SEQ ID NO: 1443 - protein, 10 aa, Artificial Sequence
  Description of Artificial Sequence: Synthetic epitope
ANILKNEEKI

SEQ ID NO: 1444 - protein, 10 aa, Artificial Sequence
  Description of Artificial Sequence: Synthetic epitope
ANINANLQGK

SEQ ID NO: 1445 - protein, 10 aa, Artificial Sequence
  Description of Artificial Sequence: Synthetic epitope
ANINESTHIS

SEQ ID NO: 1446 - protein, 10 aa, Artificial Sequence
  Description of Artificial Sequence: Synthetic epitope
ANIPSVSLSK

SEQ ID NO: 1447 - protein, 10 aa, Artificial Sequence
  Description of Artificial Sequence: Synthetic epitope
ANIQEVSINI

SEQ ID NO: 1448 - protein, 10 aa, Artificial Sequence
  Description of Artificial Sequence: Synthetic epitope
ANITFAQNET

SEQ ID NO: 1449 - protein, 10 aa, Artificial Sequence
  Description of Artificial Sequence: Synthetic epitope
ANIVSQDGEQ

SEQ ID NO: 1450 - protein, 10 aa, Artificial Sequence
  Description of Artificial Sequence: Synthetic epitope
ANKALTESTL

SEQ ID NO: 1451 - protein, 10 aa, Artificial Sequence
  Description of Artificial Sequence: Synthetic epitope
ANKDSLALWT

SEQ ID NO: 1452 - protein, 10 aa, Artificial Sequence
  Description of Artificial Sequence: Synthetic epitope
ANKKDEKEKQ

SEQ ID NO: 1453 - protein, 10 aa, Artificial Sequence
  Description of Artificial Sequence: Synthetic epitope
ANKMAAPSQQ

SEQ ID NO: 1454 - protein, 10 aa, Artificial Sequence
  Description of Artificial Sequence: Synthetic epitope
ANKNVAKVPP

SEQ ID NO: 1455 - protein, 10 aa, Artificial Sequence
  Description of Artificial Sequence: Synthetic epitope
ANKRISQIKS

SEQ ID NO: 1456 - protein, 10 aa, Artificial Sequence
  Description of Artificial Sequence: Synthetic epitope
ANKRMVEYEE

SEQ ID NO: 1457 - protein, 10 aa, Artificial Sequence
  Description of Artificial Sequence: Synthetic epitope
ANKRTRSVTS

SEQ ID NO: 1458 - protein, 10 aa, Artificial Sequence
  Description of Artificial Sequence: Synthetic epitope
ANLASRAKAQ

SEQ ID NO: 1459 - protein, 10 aa, Artificial Sequence
  Description of Artificial Sequence: Synthetic epitope
ANLEAKSRQV

SEQ ID NO: 1460 - protein, 10 aa, Artificial Sequence
  Description of Artificial Sequence: Synthetic epitope
ANLESLAKLG

SEQ ID NO: 1461 - protein, 10 aa, Artificial Sequence
  Description of Artificial Sequence: Synthetic epitope
ANLMSETNGS

SEQ ID NO: 1462 - protein, 10 aa, Artificial Sequence
  Description of Artificial Sequence: Synthetic epitope
ANLNESVEKE

SEQ ID NO: 1463 - protein, 10 aa, Artificial Sequence
  Description of Artificial Sequence: Synthetic epitope
ANLNLSNSMT

SEQ ID NO: 1464 - protein, 10 aa, Artificial Sequence
  Description of Artificial Sequence: Synthetic epitope
ANLQSTSRLT

SEQ ID NO: 1465 - protein, 10 aa, Artificial Sequence
  Description of Artificial Sequence: Synthetic epitope
ANLRLELVEQ

SEQ ID NO: 1466 - protein, 10 aa, Artificial Sequence
  Description of Artificial Sequence: Synthetic epitope
ANLRRDESNH

SEQ ID NO: 1467 - protein, 10 aa, Artificial Sequence
  Description of Artificial Sequence: Synthetic epitope
ANLSAEELKE

SEQ ID NO: 1468 - protein, 10 aa, Artificial Sequence
  Description of Artificial Sequence: Synthetic epitope
ANLSVLGTEE

SEQ ID NO: 1469 - protein, 10 aa, Artificial Sequence
  Description of Artificial Sequence: Synthetic epitope
ANLTQLIGGA

SEQ ID NO: 1470 - protein, 10 aa, Artificial Sequence
  Description of Artificial Sequence: Synthetic epitope
ANMDQIRVKQ

SEQ ID NO: 1471 - protein, 10 aa, Artificial Sequence
  Description of Artificial Sequence: Synthetic epitope
ANNKQDQDYY

SEQ ID NO: 1472 - protein, 10 aa, Artificial Sequence
  Description of Artificial Sequence: Synthetic epitope
ANNREIINQQ

SEQ ID NO: 1473 - protein, 10 aa, Artificial Sequence
  Description of Artificial Sequence: Synthetic epitope
ANNSSIELEK

SEQ ID NO: 1474 - protein, 10 aa, Artificial Sequence
  Description of Artificial Sequence: Synthetic epitope
ANNTKFLDHI

SEQ ID NO: 1475 - protein, 10 aa, Artificial Sequence
  Description of Artificial Sequence: Synthetic epitope
ANPAASTSPS

SEQ ID NO: 1476 - protein, 10 aa, Artificial Sequence
  Description of Artificial Sequence: Synthetic epitope
ANQASATSEE

SEQ ID NO: 1477 - protein, 10 aa, Artificial Sequence
  Description of Artificial Sequence: Synthetic epitope
ANQRSALGSA

SEQ ID NO: 1478 - protein, 10 aa, Artificial Sequence
  Description of Artificial Sequence: Synthetic epitope
ANQSKQILAS

SEQ ID NO: 1479 - protein, 10 aa, Artificial Sequence
  Description of Artificial Sequence: Synthetic epitope
ANQTHRTKFI

SEQ ID NO: 1480 - protein, 10 aa, Artificial Sequence
  Description of Artificial Sequence: Synthetic epitope
ANRADVGHRQ

SEQ ID NO: 1481 - protein, 10 aa, Artificial Sequence
  Description of Artificial Sequence: Synthetic epitope
ANRDQDSSDD

SEQ ID NO: 1482 - protein, 10 aa, Artificial Sequence
  Description of Artificial Sequence: Synthetic epitope
ANRMDQTSSE

SEQ ID NO: 1483 - protein, 10 aa, Artificial Sequence
  Description of Artificial Sequence: Synthetic epitope
ANRQSKSESD

SEQ ID NO: 1484 - protein, 10 aa, Artificial Sequence
  Description of Artificial Sequence: Synthetic epitope
ANRRSNSKKS

SEQ ID NO: 1485 - protein, 10 aa, Artificial Sequence
  Description of Artificial Sequence: Synthetic epitope
ANRSLTVQPY

SEQ ID NO: 1486 - protein, 10 aa, Artificial Sequence
  Description of Artificial Sequence: Synthetic epitope
ANRTLLETLL

SEQ ID NO: 1487 - protein, 10 aa, Artificial Sequence
  Description of Artificial Sequence: Synthetic epitope
ANSDQESGVE

SEQ ID NO: 1488 - protein, 10 aa, Artificial Sequence
  Description of Artificial Sequence: Synthetic epitope
ANSDSSEDAD

SEQ ID NO: 1489 - protein, 10 aa, Artificial Sequence
  Description of Artificial Sequence: Synthetic epitope
ANSEGTFSFE

SEQ ID NO: 1490 - protein, 10 aa, Artificial Sequence
  Description of Artificial Sequence: Synthetic epitope
ANSKQTSLHQ

SEQ ID NO: 1491 - protein, 10 aa, Artificial Sequence
  Description of Artificial Sequence: Synthetic epitope
ANSKVRAFPV

SEQ ID NO: 1492 - protein, 10 aa, Artificial Sequence
  Description of Artificial Sequence: Synthetic epitope
ANSLEAKLKE

SEQ ID NO: 1493 - protein, 10 aa, Artificial Sequence
  Description of Artificial Sequence: Synthetic epitope
ANSNKAHPAS

SEQ ID NO: 1494 - protein, 10 aa, Artificial Sequence
  Description of Artificial Sequence: Synthetic epitope
ANSPIKAQQD

SEQ ID NO: 1495 - protein, 10 aa, Artificial Sequence
  Description of Artificial Sequence: Synthetic epitope
ANSSEIKVKV

SEQ ID NO: 1496 - protein, 10 aa, Artificial Sequence
  Description of Artificial Sequence: Synthetic epitope
ANSSFSQSFA

SEQ ID NO: 1497 - protein, 10 aa, Artificial Sequence
  Description of Artificial Sequence: Synthetic epitope
ANSSPPENSN

SEQ ID NO: 1498 - protein, 10 aa, Artificial Sequence
  Description of Artificial Sequence: Synthetic epitope
ANSSQLRRAH

SEQ ID NO: 1499 - protein, 10 aa, Artificial Sequence
  Description of Artificial Sequence: Synthetic epitope
ANTGHFKGNV

SEQ ID NO: 1500 - protein, 10 aa, Artificial Sequence
  Description of Artificial Sequence: Synthetic epitope
ANTGSSVISS

SEQ ID NO: 1501 - protein, 10 aa, Artificial Sequence
  Description of Artificial Sequence: Synthetic epitope
ANTLATSDVS

SEQ ID NO: 1502 - protein, 10 aa, Artificial Sequence
  Description of Artificial Sequence: Synthetic epitope
ANVADVVSKG

SEQ ID NO: 1503 - protein, 10 aa, Artificial Sequence
  Description of Artificial Sequence: Synthetic epitope
ANVANNHKQN

SEQ ID NO: 1504 - protein, 10 aa, Artificial Sequence
  Description of Artificial Sequence: Synthetic epitope
ANVASSILSH

SEQ ID NO: 1505 - protein, 10 aa, Artificial Sequence
  Description of Artificial Sequence: Synthetic epitope
ANVNVRAVRV

SEQ ID NO: 1506 - protein, 10 aa, Artificial Sequence
  Description of Artificial Sequence: Synthetic epitope
ANVQELAEGA

SEQ ID NO: 1507 - protein, 10 aa, Artificial Sequence
  Description of Artificial Sequence: Synthetic epitope
ANVSLLQATE

SEQ ID NO: 1508 - protein, 10 aa, Artificial Sequence
  Description of Artificial Sequence: Synthetic epitope
ANYRKGQEEI

SEQ ID NO: 1509 - protein, 10 aa, Artificial Sequence
  Description of Artificial Sequence: Synthetic epitope
ANYVMDETLG

SEQ ID NO: 1510 - protein, 10 aa, Artificial Sequence
  Description of Artificial Sequence: Synthetic epitope
APAIVWRLAK

SEQ ID NO: 1511 - protein, 10 aa, Artificial Sequence
  Description of Artificial Sequence: Synthetic epitope
APATALLIQK

SEQ ID NO: 1512 - protein, 10 aa, Artificial Sequence
  Description of Artificial Sequence: Synthetic epitope
APATTALRTF

SEQ ID NO: 1513 - protein, 10 aa, Artificial Sequence
  Description of Artificial Sequence: Synthetic epitope
APDDRSYKSQ

SEQ ID NO: 1514 - protein, 10 aa, Artificial Sequence
  Description of Artificial Sequence: Synthetic epitope
APDMFTESDD

SEQ ID NO: 1515 - protein, 10 aa, Artificial Sequence
  Description of Artificial Sequence: Synthetic epitope
APDSAKFPNG

SEQ ID NO: 1516 - protein, 10 aa, Artificial Sequence
  Description of Artificial Sequence: Synthetic epitope
APDTTVTVSI

SEQ ID NO: 1517 - protein, 10 aa, Artificial Sequence
  Description of Artificial Sequence: Synthetic epitope
APDVTKLSDS

SEQ ID NO: 1518 - protein, 10 aa, Artificial Sequence
  Description of Artificial Sequence: Synthetic epitope
APEALMANSG

SEQ ID NO: 1519 - protein, 10 aa, Artificial Sequence
  Description of Artificial Sequence: Synthetic epitope
APEALMANSG

SEQ ID NO: 1520 - protein, 10 aa, Artificial Sequence
  Description of Artificial Sequence: Synthetic epitope
APEAQAKPSA

SEQ ID NO: 1521 - protein, 10 aa, Artificial Sequence
  Description of Artificial Sequence: Synthetic epitope
APEMDSVPHF

SEQ ID NO: 1522 - protein, 10 aa, Artificial Sequence
  Description of Artificial Sequence: Synthetic epitope
APEVQSSEEY

SEQ ID NO: 1523 - protein, 10 aa, Artificial Sequence
  Description of Artificial Sequence: Synthetic epitope
APGHVAKLPQ

SEQ ID NO: 1524 - protein, 10 aa, Artificial Sequence
  Description of Artificial Sequence: Synthetic epitope
APHTLKLPEE

SEQ ID NO: 1525 - protein, 10 aa, Artificial Sequence
  Description of Artificial Sequence: Synthetic epitope
APHVAQRSTS

SEQ ID NO: 1526 - protein, 10 aa, Artificial Sequence
  Description of Artificial Sequence: Synthetic epitope
APINFHQNDP

SEQ ID NO: 1527 - protein, 10 aa, Artificial Sequence
  Description of Artificial Sequence: Synthetic epitope
APIVTVGVNN

SEQ ID NO: 1528 - protein, 10 aa, Artificial Sequence
  Description of Artificial Sequence: Synthetic epitope
APKALETVQE

SEQ ID NO: 1529 - protein, 10 aa, Artificial Sequence
  Description of Artificial Sequence: Synthetic epitope
APKRATASEQ

SEQ ID NO: 1530 - protein, 10 aa, Artificial Sequence
  Description of Artificial Sequence: Synthetic epitope
APKRSRLETR

SEQ ID NO: 1531 - protein, 10 aa, Artificial Sequence
  Description of Artificial Sequence: Synthetic epitope
APKSDTSISD

SEQ ID NO: 1532 - protein, 10 aa, Artificial Sequence
  Description of Artificial Sequence: Synthetic epitope
APLQSIQTLH

SEQ ID NO: 1533 - protein, 10 aa, Artificial Sequence
  Description of Artificial Sequence: Synthetic epitope
APLRASLVPM

SEQ ID NO: 1534 - protein, 10 aa, Artificial Sequence
  Description of Artificial Sequence: Synthetic epitope
APLWQIRGTE

SEQ ID NO: 1535 - protein, 10 aa, Artificial Sequence
  Description of Artificial Sequence: Synthetic epitope
APMENAMSPD

SEQ ID NO: 1536 - protein, 10 aa, Artificial Sequence
  Description of Artificial Sequence: Synthetic epitope
APNKAVQNDS

SEQ ID NO: 1537 - protein, 10 aa, Artificial Sequence
  Description of Artificial Sequence: Synthetic epitope
APNRKSFTKK

SEQ ID NO: 1538 - protein, 10 aa, Artificial Sequence
  Description of Artificial Sequence: Synthetic epitope
APNSDSAEEG

SEQ ID NO: 1539 - protein, 10 aa, Artificial Sequence
  Description of Artificial Sequence: Synthetic epitope
APPAWVKAVA

SEQ ID NO: 1540 - protein, 10 aa, Artificial Sequence
  Description of Artificial Sequence: Synthetic epitope
APPKMANITS

SEQ ID NO: 1541 - protein, 10 aa, Artificial Sequence
  Description of Artificial Sequence: Synthetic epitope
APPSLSKMIQ

SEQ ID NO: 1542 - protein, 10 aa, Artificial Sequence
  Description of Artificial Sequence: Synthetic epitope
APQAEAEARS

SEQ ID NO: 1543 - protein, 10 aa, Artificial Sequence
  Description of Artificial Sequence: Synthetic epitope
APQISFAPEI

SEQ ID NO: 1544 - protein, 10 aa, Artificial Sequence
  Description of Artificial Sequence: Synthetic epitope
APRALTSKER

SEQ ID NO: 1545 - protein, 10 aa, Artificial Sequence
  Description of Artificial Sequence: Synthetic epitope
APRETPSEMA

SEQ ID NO: 1546 - protein, 10 aa, Artificial Sequence
  Description of Artificial Sequence: Synthetic epitope
APRFVAKGID

SEQ ID NO: 1547 - protein, 10 aa, Artificial Sequence
  Description of Artificial Sequence: Synthetic epitope
APRRKAVARE

SEQ ID NO: 1548 - protein, 10 aa, Artificial Sequence
  Description of Artificial Sequence: Synthetic epitope
APRSVMKSFI

SEQ ID NO: 1549 - protein, 10 aa, Artificial Sequence
  Description of Artificial Sequence: Synthetic epitope
APSDEASFPG

SEQ ID NO: 1550 - protein, 10 aa, Artificial Sequence
  Description of Artificial Sequence: Synthetic epitope
APSDVVSNMT

SEQ ID NO: 1551 - protein, 10 aa, Artificial Sequence
  Description of Artificial Sequence: Synthetic epitope
APSEASAQEQ

SEQ ID NO: 1552 - protein, 10 aa, Artificial Sequence
  Description of Artificial Sequence: Synthetic epitope
APSEAVKSAA

SEQ ID NO: 1553 - protein, 10 aa, Artificial Sequence
  Description of Artificial Sequence: Synthetic epitope
APSEQQTYDY

SEQ ID NO: 1554 - protein, 10 aa, Artificial Sequence
  Description of Artificial Sequence: Synthetic epitope
APSKKADSVA

SEQ ID NO: 1555 - protein, 10 aa, Artificial Sequence
  Description of Artificial Sequence: Synthetic epitope
APSMVDRLQR

SEQ ID NO: 1556 - protein, 10 aa, Artificial Sequence
  Description of Artificial Sequence: Synthetic epitope
APSQAQDFSI

SEQ ID NO: 1557 - protein, 10 aa, Artificial Sequence
  Description of Artificial Sequence: Synthetic epitope
APSQQLQRPD

SEQ ID NO: 1558 - protein, 10 aa, Artificial Sequence
  Description of Artificial Sequence: Synthetic epitope
APSSPIKTNK

SEQ ID NO: 1559 - protein, 10 aa, Artificial Sequence
  Description of Artificial Sequence: Synthetic epitope
APSTKLRPAA

SEQ ID NO: 1560 - protein, 10 aa, Artificial Sequence
  Description of Artificial Sequence: Synthetic epitope
APSTTSEVVK

SEQ ID NO: 1561 - protein, 10 aa, Artificial Sequence
  Description of Artificial Sequence: Synthetic epitope
APTKKPKATP

SEQ ID NO: 1562 - protein, 10 aa, Artificial Sequence
  Description of Artificial Sequence: Synthetic epitope
APTSSATTGL

SEQ ID NO: 1563 - protein, 10 aa, Artificial Sequence
  Description of Artificial Sequence: Synthetic epitope
APTSTAAPEA

SEQ ID NO: 1564 - protein, 10 aa, Artificial Sequence
  Description of Artificial Sequence: Synthetic epitope
APTTDSTDSI

SEQ ID NO: 1565 - protein, 10 aa, Artificial Sequence
  Description of Artificial Sequence: Synthetic epitope
APTTQSKLSR

SEQ ID NO: 1566 - protein, 10 aa, Artificial Sequence
  Description of Artificial Sequence: Synthetic epitope
APVEAALDEL

SEQ ID NO: 1567 - protein, 10 aa, Artificial Sequence
  Description of Artificial Sequence: Synthetic epitope
APVKASSPIK

SEQ ID NO: 1568 - protein, 10 aa, Artificial Sequence
  Description of Artificial Sequence: Synthetic epitope
APVKSQAIAQ

SEQ ID NO: 1569 - protein, 10 aa, Artificial Sequence
  Description of Artificial Sequence: Synthetic epitope
APVKSTENPE

SEQ ID NO: 1570 - protein, 10 aa, Artificial Sequence
  Description of Artificial Sequence: Synthetic epitope
APVLTVVSKF

SEQ ID NO: 1571 - protein, 10 aa, Artificial Sequence
  Description of Artificial Sequence: Synthetic epitope
APVSESLSRL

SEQ ID NO: 1572 - protein, 10 aa, Artificial Sequence
  Description of Artificial Sequence: Synthetic epitope
APVVTQAAPP

SEQ ID NO: 1573 - protein, 10 aa, Artificial Sequence
  Description of Artificial Sequence: Synthetic epitope
APVVTSTTQE

SEQ ID NO: 1574 - protein, 10 aa, Artificial Sequence
  Description of Artificial Sequence: Synthetic epitope
APWKRSRSRA

SEQ ID NO: 1575 - protein, 10 aa, Artificial Sequence
  Description of Artificial Sequence: Synthetic epitope
APWPKATDGD

SEQ ID NO: 1576 - protein, 10 aa, Artificial Sequence
  Description of Artificial Sequence: Synthetic epitope
APYDSSAIEM

SEQ ID NO: 1577 - protein, 10 aa, Artificial Sequence
  Description of Artificial Sequence: Synthetic epitope
APYSSFMQAP

SEQ ID NO: 1578 - protein, 10 aa, Artificial Sequence
  Description of Artificial Sequence: Synthetic epitope
AQAAISQEEL

SEQ ID NO: 1579 - protein, 10 aa, Artificial Sequence
  Description of Artificial Sequence: Synthetic epitope
AQAEALRISD

SEQ ID NO: 1580 - protein, 10 aa, Artificial Sequence
  Description of Artificial Sequence: Synthetic epitope
AQAEEQLEQE

SEQ ID NO: 1581 - protein, 10 aa, Artificial Sequence
  Description of Artificial Sequence: Synthetic epitope
AQAERTEKSK

SEQ ID NO: 1582 - protein, 10 aa, Artificial Sequence
  Description of Artificial Sequence: Synthetic epitope
AQAEVRSRQI

SEQ ID NO: 1583 - protein, 10 aa, Artificial Sequence
  Description of Artificial Sequence: Synthetic epitope
AQAIEVVQGT

SEQ ID NO: 1584 - protein, 10 aa, Artificial Sequence
  Description of Artificial Sequence: Synthetic epitope
AQALEALQPA

SEQ ID NO: 1585 - protein, 10 aa, Artificial Sequence
  Description of Artificial Sequence: Synthetic epitope
AQALLNAEKN

SEQ ID NO: 1586 - protein, 10 aa, Artificial Sequence
  Description of Artificial Sequence: Synthetic epitope
AQAMTEVEAV

SEQ ID NO: 1587 - protein, 10 aa, Artificial Sequence
  Description of Artificial Sequence: Synthetic epitope
AQANSKLQLL

SEQ ID NO: 1588 - protein, 10 aa, Artificial Sequence
  Description of Artificial Sequence: Synthetic epitope
AQAQAQHELE

SEQ ID NO: 1589 - protein, 10 aa, Artificial Sequence
  Description of Artificial Sequence: Synthetic epitope
AQAQAQVPAK

SEQ ID NO: 1590 - protein, 10 aa, Artificial Sequence
  Description of Artificial Sequence: Synthetic epitope
AQAQASQASQ

SEQ ID NO: 1591 - protein, 10 aa, Artificial Sequence
  Description of Artificial Sequence: Synthetic epitope
AQAREALALE

SEQ ID NO: 1592 - protein, 10 aa, Artificial Sequence
  Description of Artificial Sequence: Synthetic epitope
AQARLTRAPG

SEQ ID NO: 1593 - protein, 10 aa, Artificial Sequence
  Description of Artificial Sequence: Synthetic epitope
AQASAAGILE

SEQ ID NO: 1594 - protein, 10 aa, Artificial Sequence
  Description of Artificial Sequence: Synthetic epitope
AQASKESKEK

SEQ ID NO: 1595 - protein, 10 aa, Artificial Sequence
  Description of Artificial Sequence: Synthetic epitope
AQASSGSTSV

SEQ ID NO: 1596 - protein, 10 aa, Artificial Sequence
  Description of Artificial Sequence: Synthetic epitope
AQASSPAAST

SEQ ID NO: 1597 - protein, 10 aa, Artificial Sequence
  Description of Artificial Sequence: Synthetic epitope
AQATIVDDVE

SEQ ID NO: 1598 - protein, 10 aa, Artificial Sequence
  Description of Artificial Sequence: Synthetic epitope
AQATLSSTTK

SEQ ID NO: 1599 - protein, 10 aa, Artificial Sequence
  Description of Artificial Sequence: Synthetic epitope
AQAVARASTK

SEQ ID NO: 1600 - protein, 10 aa, Artificial Sequence
  Description of Artificial Sequence: Synthetic epitope
AQAVETNKTL

SEQ ID NO: 1601 - protein, 10 aa, Artificial Sequence
  Description of Artificial Sequence: Synthetic epitope
AQAYVKITQD

SEQ ID NO: 1602 - protein, 10 aa, Artificial Sequence
  Description of Artificial Sequence: Synthetic epitope
AQDEALTKRQ

SEQ ID NO: 1603 - protein, 10 aa, Artificial Sequence
  Description of Artificial Sequence: Synthetic epitope
AQDIQDKFSS

SEQ ID NO: 1604 - protein, 10 aa, Artificial Sequence
  Description of Artificial Sequence: Synthetic epitope
AQDKARSNKG

SEQ ID NO: 1605 - protein, 10 aa, Artificial Sequence
  Description of Artificial Sequence: Synthetic epitope
AQDKEAADAI

SEQ ID NO: 1606 - protein, 10 aa, Artificial Sequence
  Description of Artificial Sequence: Synthetic epitope
AQDQEDPEEF

SEQ ID NO: 1607 - protein, 10 aa, Artificial Sequence
  Description of Artificial Sequence: Synthetic epitope
AQDQVTEAEE

SEQ ID NO: 1608 - protein, 10 aa, Artificial Sequence
  Description of Artificial Sequence: Synthetic epitope
AQDRIATTDD

SEQ ID NO: 1609 - protein, 10 aa, Artificial Sequence
  Description of Artificial Sequence: Synthetic epitope
AQEAQKKDTI

SEQ ID NO: 1610 - protein, 10 aa, Artificial Sequence
  Description of Artificial Sequence: Synthetic epitope
AQEAQLLSQP

SEQ ID NO: 1611 - protein, 10 aa, Artificial Sequence
  Description of Artificial Sequence: Synthetic epitope
AQEARTSSQK

SEQ ID NO: 1612 - protein, 10 aa, Artificial Sequence
  Description of Artificial Sequence: Synthetic epitope
AQEAVHSAKE

SEQ ID NO: 1613 - protein, 10 aa, Artificial Sequence
  Description of Artificial Sequence: Synthetic epitope
AQEELTKKEA

SEQ ID NO: 1614 - protein, 10 aa, Artificial Sequence
  Description of Artificial Sequence: Synthetic epitope
AQEGLSNDGE

SEQ ID NO: 1615 - protein, 10 aa, Artificial Sequence
  Description of Artificial Sequence: Synthetic epitope
AQEKAARQRE

SEQ ID NO: 1616 - protein, 10 aa, Artificial Sequence
  Description of Artificial Sequence: Synthetic epitope
AQELSLEKLQ

SEQ ID NO: 1617 - protein, 10 aa, Artificial Sequence
  Description of Artificial Sequence: Synthetic epitope
AQESMKNTED

SEQ ID NO: 1618 - protein, 10 aa, Artificial Sequence
  Description of Artificial Sequence: Synthetic epitope
AQFEIMLKAK

SEQ ID NO: 1619 - protein, 10 aa, Artificial Sequence
  Description of Artificial Sequence: Synthetic epitope
AQFGERASEV

SEQ ID NO: 1620 - protein, 10 aa, Artificial Sequence
  Description of Artificial Sequence: Synthetic epitope
AQFGGKILRK

SEQ ID NO: 1621 - protein, 10 aa, Artificial Sequence
  Description of Artificial Sequence: Synthetic epitope
AQFLYPAAQL

SEQ ID NO: 1622 - protein, 10 aa, Artificial Sequence
  Description of Artificial Sequence: Synthetic epitope
AQFPDKSKVT

SEQ ID NO: 1623 - protein, 10 aa, Artificial Sequence
  Description of Artificial Sequence: Synthetic epitope
AQFSKGSDQL

SEQ ID NO: 1624 - protein, 10 aa, Artificial Sequence
  Description of Artificial Sequence: Synthetic epitope
AQGASIALMD

SEQ ID NO: 1625 - protein, 10 aa, Artificial Sequence
  Description of Artificial Sequence: Synthetic epitope
AQGESVDSAV

SEQ ID NO: 1626 - protein, 10 aa, Artificial Sequence
  Description of Artificial Sequence: Synthetic epitope
AQGGQTQSPT

SEQ ID NO: 1627 - protein, 10 aa, Artificial Sequence
  Description of Artificial Sequence: Synthetic epitope
AQGIQELSAE

SEQ ID NO: 1628 - protein, 10 aa, Artificial Sequence
  Description of Artificial Sequence: Synthetic epitope
AQGKRGKKSA

SEQ ID NO: 1629 - protein, 10 aa, Artificial Sequence
  Description of Artificial Sequence: Synthetic epitope
AQGLRSAAEE

SEQ ID NO: 1630 - protein, 10 aa, Artificial Sequence
  Description of Artificial Sequence: Synthetic epitope
AQGNASKKVE

SEQ ID NO: 1631 - protein, 10 aa, Artificial Sequence
  Description of Artificial Sequence: Synthetic epitope
AQGQMQTQAP

SEQ ID NO: 1632 - protein, 10 aa, Artificial Sequence
  Description of Artificial Sequence: Synthetic epitope
AQGQNEAAVD

SEQ ID NO: 1633 - protein, 10 aa, Artificial Sequence
  Description of Artificial Sequence: Synthetic epitope
AQGQRKFQAH

SEQ ID NO: 1634 - protein, 10 aa, Artificial Sequence
  Description of Artificial Sequence: Synthetic epitope
AQGRADSQAQ

SEQ ID NO: 1635 - protein, 10 aa, Artificial Sequence
  Description of Artificial Sequence: Synthetic epitope
AQGRTRIGKK

SEQ ID NO: 1636 - protein, 10 aa, Artificial Sequence
  Description of Artificial Sequence: Synthetic epitope
AQGVAIKFGK

SEQ ID NO: 1637 - protein, 10 aa, Artificial Sequence
  Description of Artificial Sequence: Synthetic epitope
AQGVSTSAIK

SEQ ID NO: 1638 - protein, 10 aa, Artificial Sequence
  Description of Artificial Sequence: Synthetic epitope
AQHKEKMPEE

SEQ ID NO: 1639 - protein, 10 aa, Artificial Sequence
  Description of Artificial Sequence: Synthetic epitope
AQIHEQNPSV

SEQ ID NO: 1640 - protein, 10 aa, Artificial Sequence
  Description of Artificial Sequence: Synthetic epitope
AQIIAAQEEM

SEQ ID NO: 1641 - protein, 10 aa, Artificial Sequence
  Description of Artificial Sequence: Synthetic epitope
AQIKAAYYRQ

SEQ ID NO: 1642 - protein, 10 aa, Artificial Sequence
  Description of Artificial Sequence: Synthetic epitope
AQIQLLPEES

SEQ ID NO: 1643 - protein, 10 aa, Artificial Sequence
  Description of Artificial Sequence: Synthetic epitope
AQIREEKKRK

SEQ ID NO: 1644 - protein, 10 aa, Artificial Sequence
  Description of Artificial Sequence: Synthetic epitope
AQITEAKRPV

SEQ ID NO: 1645 - protein, 10 aa, Artificial Sequence
  Description of Artificial Sequence: Synthetic epitope
AQITEAQVAE

SEQ ID NO: 1646 - protein, 10 aa, Artificial Sequence
  Description of Artificial Sequence: Synthetic epitope
AQIVNPARVK

SEQ ID NO: 1647 - protein, 10 aa, Artificial Sequence
  Description of Artificial Sequence: Synthetic epitope
AQKAAGNQMN

SEQ ID NO: 1648 - protein, 10 aa, Artificial Sequence
  Description of Artificial Sequence: Synthetic epitope
AQKAAVQSRE

SEQ ID NO: 1649 - protein, 10 aa, Artificial Sequence
  Description of Artificial Sequence: Synthetic epitope
AQKAKAEEKK

SEQ ID NO: 1650 - protein, 10 aa, Artificial Sequence
  Description of Artificial Sequence: Synthetic epitope
AQKITLASNN

SEQ ID NO: 1651 - protein, 10 aa, Artificial Sequence
  Description of Artificial Sequence: Synthetic epitope
AQKKFHVPRQ

SEQ ID NO: 1652 - protein, 10 aa, Artificial Sequence
  Description of Artificial Sequence: Synthetic epitope
AQKKLISQVQ

SEQ ID NO: 1653 - protein, 10 aa, Artificial Sequence
  Description of Artificial Sequence: Synthetic epitope
AQKNNKKLKA

SEQ ID NO: 1654 - protein, 10 aa, Artificial Sequence
  Description of Artificial Sequence: Synthetic epitope
AQKPDLKIHD

SEQ ID NO: 1655 - protein, 10 aa, Artificial Sequence
  Description of Artificial Sequence: Synthetic epitope
AQKQEAALLT

SEQ ID NO: 1656 - protein, 10 aa, Artificial Sequence
  Description of Artificial Sequence: Synthetic epitope
AQKREEYMQM

SEQ ID NO: 1657 - protein, 10 aa, Artificial Sequence
  Description of Artificial Sequence: Synthetic epitope
AQKTEALSRE

SEQ ID NO: 1658 - protein, 10 aa, Artificial Sequence
  Description of Artificial Sequence: Synthetic epitope
AQKTSKIRMA

SEQ ID NO: 1659 - protein, 10 aa, Artificial Sequence
  Description of Artificial Sequence: Synthetic epitope
AQKTTLTSII

SEQ ID NO: 1660 - protein, 10 aa, Artificial Sequence
  Description of Artificial Sequence: Synthetic epitope
AQLAENIASS

SEQ ID NO: 1661 - protein, 10 aa, Artificial Sequence
  Description of Artificial Sequence: Synthetic epitope
AQLAKNAKTS

SEQ ID NO: 1662 - protein, 10 aa, Artificial Sequence
  Description of Artificial Sequence: Synthetic epitope
AQLANQNKLA

SEQ ID NO: 1663 - protein, 10 aa, Artificial Sequence
  Description of Artificial Sequence: Synthetic epitope
AQLDDNVDDN

SEQ ID NO: 1664 - protein, 10 aa, Artificial Sequence
  Description of Artificial Sequence: Synthetic epitope
AQLEGAEKDR

SEQ ID NO: 1665 - protein, 10 aa, Artificial Sequence
  Description of Artificial Sequence: Synthetic epitope
AQLEGIIAPK

SEQ ID NO: 1666 - protein, 10 aa, Artificial Sequence
  Description of Artificial Sequence: Synthetic epitope
AQLEITKKQE

SEQ ID NO: 1667 - protein, 10 aa, Artificial Sequence
  Description of Artificial Sequence: Synthetic epitope
AQLFQLKNEP

SEQ ID NO: 1668 - protein, 10 aa, Artificial Sequence
  Description of Artificial Sequence: Synthetic epitope
AQLGYKIAAS

SEQ ID NO: 1669 - protein, 10 aa, Artificial Sequence
  Description of Artificial Sequence: Synthetic epitope
AQLISRSQAS

SEQ ID NO: 1670 - protein, 10 aa, Artificial Sequence
  Description of Artificial Sequence: Synthetic epitope
AQLKARSLAQ

SEQ ID NO: 1671 - protein, 10 aa, Artificial Sequence
  Description of Artificial Sequence: Synthetic epitope
AQLLAKAERV

SEQ ID NO: 1672 - protein, 10 aa, Artificial Sequence
  Description of Artificial Sequence: Synthetic epitope
AQLLARVNKE

SEQ ID NO: 1673 - protein, 10 aa, Artificial Sequence
  Description of Artificial Sequence: Synthetic epitope
AQLLAVLRLD

SEQ ID NO: 1674 - protein, 10 aa, Artificial Sequence
  Description of Artificial Sequence: Synthetic epitope
AQLLGLIQRV

SEQ ID NO: 1675 - protein, 10 aa, Artificial Sequence
  Description of Artificial Sequence: Synthetic epitope
AQLLKMLQEG

SEQ ID NO: 1676 - protein, 10 aa, Artificial Sequence
  Description of Artificial Sequence: Synthetic epitope
AQLQFLEAKE

SEQ ID NO: 1677 - protein, 10 aa, Artificial Sequence
  Description of Artificial Sequence: Synthetic epitope
AQLQLRAGLQ

SEQ ID NO: 1678 - protein, 10 aa, Artificial Sequence
  Description of Artificial Sequence: Synthetic epitope
AQLRLDKTSR

SEQ ID NO: 1679 - protein, 10 aa, Artificial Sequence
  Description of Artificial Sequence: Synthetic epitope
AQLSQKEQAA

SEQ ID NO: 1680 - protein, 10 aa, Artificial Sequence
  Description of Artificial Sequence: Synthetic epitope
AQLSRLLAEA

SEQ ID NO: 1681 - protein, 10 aa, Artificial Sequence
  Description of Artificial Sequence: Synthetic epitope
AQLSRNSSDT

SEQ ID NO: 1682 - protein, 10 aa, Artificial Sequence
  Description of Artificial Sequence: Synthetic epitope
AQLSRVLKNQ

SEQ ID NO: 1683 - protein, 10 aa, Artificial Sequence
  Description of Artificial Sequence: Synthetic epitope
AQLSSKLREN

SEQ ID NO: 1684 - protein, 10 aa, Artificial Sequence
  Description of Artificial Sequence: Synthetic epitope
AQLVKDLLVM

SEQ ID NO: 1685 - protein, 10 aa, Artificial Sequence
  Description of Artificial Sequence: Synthetic epitope
AQLYSAAPSN

SEQ ID NO: 1686 - protein, 10 aa, Artificial Sequence
  Description of Artificial Sequence: Synthetic epitope
AQMAASEEGN

SEQ ID NO: 1687 - protein, 10 aa, Artificial Sequence
  Description of Artificial Sequence: Synthetic epitope
AQMDRSLALP

SEQ ID NO: 1688 - protein, 10 aa, Artificial Sequence
  Description of Artificial Sequence: Synthetic epitope
AQMKIQRANH

SEQ ID NO: 1689 - protein, 10 aa, Artificial Sequence
  Description of Artificial Sequence: Synthetic epitope
AQMKQAALPA

SEQ ID NO: 1690 - protein, 10 aa, Artificial Sequence
  Description of Artificial Sequence: Synthetic epitope
AQMLAMRGEQ

SEQ ID NO: 1691 - protein, 10 aa, Artificial Sequence
  Description of Artificial Sequence: Synthetic epitope
AQMMKSLQVD

SEQ ID NO: 1692 - protein, 10 aa, Artificial Sequence
  Description of Artificial Sequence: Synthetic epitope
AQMQAFVSES

SEQ ID NO: 1693 - protein, 10 aa, Artificial Sequence
  Description of Artificial Sequence: Synthetic epitope
AQMREATTLA

SEQ ID NO: 1694 - protein, 10 aa, Artificial Sequence
  Description of Artificial Sequence: Synthetic epitope
AQMVESNLQD

SEQ ID NO: 1695 - protein, 10 aa, Artificial Sequence
  Description of Artificial Sequence: Synthetic epitope
AQNEAKEIQD

SEQ ID NO: 1696 - protein, 10 aa, Artificial Sequence
  Description of Artificial Sequence: Synthetic epitope
AQNEEHRVTI

SEQ ID NO: 1697 - protein, 10 aa, Artificial Sequence
  Description of Artificial Sequence: Synthetic epitope
AQNEGAQNSA

SEQ ID NO: 1698 - protein, 10 aa, Artificial Sequence
  Description of Artificial Sequence: Synthetic epitope
AQNQEKLMKE

SEQ ID NO: 1699 - protein, 10 aa, Artificial Sequence
  Description of Artificial Sequence: Synthetic epitope
AQNRGSAVAR

SEQ ID NO: 1700 - protein, 10 aa, Artificial Sequence
  Description of Artificial Sequence: Synthetic epitope
AQNRQRQRET

SEQ ID NO: 1701 - protein, 10 aa, Artificial Sequence
  Description of Artificial Sequence: Synthetic epitope
AQNTDAQAVL

SEQ ID NO: 1702 - protein, 10 aa, Artificial Sequence
  Description of Artificial Sequence: Synthetic epitope
AQNTEAARLS

SEQ ID NO: 1703 - protein, 10 aa, Artificial Sequence
  Description of Artificial Sequence: Synthetic epitope
AQNVHNDRGK

SEQ ID NO: 1704 - protein, 10 aa, Artificial Sequence
  Description of Artificial Sequence: Synthetic epitope
AQNVVSMSKH

SEQ ID NO: 1705 - protein, 10 aa, Artificial Sequence
  Description of Artificial Sequence: Synthetic epitope
AQPAARSMDS

SEQ ID NO: 1706 - protein, 10 aa, Artificial Sequence
  Description of Artificial Sequence: Synthetic epitope
AQPPTTMTNS

SEQ ID NO: 1707 - protein, 10 aa, Artificial Sequence
  Description of Artificial Sequence: Synthetic epitope
AQPQDALSQE

SEQ ID NO: 1708 - protein, 10 aa, Artificial Sequence
  Description of Artificial Sequence: Synthetic epitope
AQQAKHFSAL

SEQ ID NO: 1709 - protein, 10 aa, Artificial Sequence
  Description of Artificial Sequence: Synthetic epitope
AQQDSIKKAN

SEQ ID NO: 1710 - protein, 10 aa, Artificial Sequence
  Description of Artificial Sequence: Synthetic epitope
AQQEASVVQY

SEQ ID NO: 1711 - protein, 10 aa, Artificial Sequence
  Description of Artificial Sequence: Synthetic epitope
AQQEKQEQVK

SEQ ID NO: 1712 - protein, 10 aa, Artificial Sequence
  Description of Artificial Sequence: Synthetic epitope
AQQGKIKEKM

SEQ ID NO: 1713 - protein, 10 aa, Artificial Sequence
  Description of Artificial Sequence: Synthetic epitope
AQQIWVRDTS

SEQ ID NO: 1714 - protein, 10 aa, Artificial Sequence
  Description of Artificial Sequence: Synthetic epitope
AQQKADTASD

SEQ ID NO: 1715 - protein, 10 aa, Artificial Sequence
  Description of Artificial Sequence: Synthetic epitope
AQQKSASQEE

SEQ ID NO: 1716 - protein, 10 aa, Artificial Sequence
  Description of Artificial Sequence: Synthetic epitope
AQQLQRLALP

SEQ ID NO: 1717 - protein, 10 aa, Artificial Sequence
  Description of Artificial Sequence: Synthetic epitope
AQQLSLLIAE

SEQ ID NO: 1718 - protein, 10 aa, Artificial Sequence
  Description of Artificial Sequence: Synthetic epitope
AQQLSVANMW

SEQ ID NO: 1719 - protein, 10 aa, Artificial Sequence
  Description of Artificial Sequence: Synthetic epitope
AQQMAMERAE

SEQ ID NO: 1720 - protein, 10 aa, Artificial Sequence
  Description of Artificial Sequence: Synthetic epitope
AQQRAESPES

SEQ ID NO: 1721 - protein, 10 aa, Artificial Sequence
  Description of Artificial Sequence: Synthetic epitope
AQQSATVANP

SEQ ID NO: 1722 - protein, 10 aa, Artificial Sequence
  Description of Artificial Sequence: Synthetic epitope
AQQSRSLQQA

SEQ ID NO: 1723 - protein, 10 aa, Artificial Sequence
  Description of Artificial Sequence: Synthetic epitope
AQQTADSSEA

SEQ ID NO: 1724 - protein, 10 aa, Artificial Sequence
  Description of Artificial Sequence: Synthetic epitope
AQRAVVTESS

SEQ ID NO: 1725 - protein, 10 aa, Artificial Sequence
  Description of Artificial Sequence: Synthetic epitope
AQREEISILG

SEQ ID NO: 1726 - protein, 10 aa, Artificial Sequence
  Description of Artificial Sequence: Synthetic epitope
AQRGLKLTQP

SEQ ID NO: 1727 - protein, 10 aa, Artificial Sequence
  Description of Artificial Sequence: Synthetic epitope
AQRIAQLQEA

SEQ ID NO: 1728 - protein, 10 aa, Artificial Sequence
  Description of Artificial Sequence: Synthetic epitope
AQRIAQLQEA

SEQ ID NO: 1729 - protein, 10 aa, Artificial Sequence
  Description of Artificial Sequence: Synthetic epitope
AQRKTQKKTF

SEQ ID NO: 1730 - protein, 10 aa, Artificial Sequence
  Description of Artificial Sequence: Synthetic epitope
AQRLGSRSQQ

SEQ ID NO: 1731 - protein, 10 aa, Artificial Sequence
  Description of Artificial Sequence: Synthetic epitope
AQRMEQANKK

SEQ ID NO: 1732 - protein, 10 aa, Artificial Sequence
  Description of Artificial Sequence: Synthetic epitope
AQRMSQTRES

SEQ ID NO: 1733 - protein, 10 aa, Artificial Sequence
  Description of Artificial Sequence: Synthetic epitope
AQRQKRSQGS

SEQ ID NO: 1734 - protein, 10 aa, Artificial Sequence
  Description of Artificial Sequence: Synthetic epitope
AQRQQTLEDA

SEQ ID NO: 1735 - protein, 10 aa, Artificial Sequence
  Description of Artificial Sequence: Synthetic epitope
AQRRVRKLPS

SEQ ID NO: 1736 - protein, 10 aa, Artificial Sequence
  Description of Artificial Sequence: Synthetic epitope
AQRSARGSTF

SEQ ID NO: 1737 - protein, 10 aa, Artificial Sequence
  Description of Artificial Sequence: Synthetic epitope
AQRSQSVPLT

SEQ ID NO: 1738 - protein, 10 aa, Artificial Sequence
  Description of Artificial Sequence: Synthetic epitope
AQRSSIDNEN

SEQ ID NO: 1739 - protein, 10 aa, Artificial Sequence
  Description of Artificial Sequence: Synthetic epitope
AQRTLTARFQ

SEQ ID NO: 1740 - protein, 10 aa, Artificial Sequence
  Description of Artificial Sequence: Synthetic epitope
AQSALKVAGK

SEQ ID NO: 1741 - protein, 10 aa, Artificial Sequence
  Description of Artificial Sequence: Synthetic epitope
AQSASVEEVF

SEQ ID NO: 1742 - protein, 10 aa, Artificial Sequence
  Description of Artificial Sequence: Synthetic epitope
AQSDAEALAG

SEQ ID NO: 1743 - protein, 10 aa, Artificial Sequence
  Description of Artificial Sequence: Synthetic epitope
AQSEAELKQV

SEQ ID NO: 1744 - protein, 10 aa, Artificial Sequence
  Description of Artificial Sequence: Synthetic epitope
AQSFILLKPV

SEQ ID NO: 1745 - protein, 10 aa, Artificial Sequence
  Description of Artificial Sequence: Synthetic epitope
AQSGDAVSVK

SEQ ID NO: 1746 - protein, 10 aa, Artificial Sequence
  Description of Artificial Sequence: Synthetic epitope
AQSIELSRHV

SEQ ID NO: 1747 - protein, 10 aa, Artificial Sequence
  Description of Artificial Sequence: Synthetic epitope
AQSLLNAKEQ

SEQ ID NO: 1748 - protein, 10 aa, Artificial Sequence
  Description of Artificial Sequence: Synthetic epitope
AQSLRLRTIR

SEQ ID NO: 1749 - protein, 10 aa, Artificial Sequence
  Description of Artificial Sequence: Synthetic epitope
AQSLTKDVQS

SEQ ID NO: 1750 - protein, 10 aa, Artificial Sequence
  Description of Artificial Sequence: Synthetic epitope
AQSMITESMA

SEQ ID NO: 1751 - protein, 10 aa, Artificial Sequence
  Description of Artificial Sequence: Synthetic epitope
AQSNFAETVK

SEQ ID NO: 1752 - protein, 10 aa, Artificial Sequence
  Description of Artificial Sequence: Synthetic epitope
AQSQEKTRRE

SEQ ID NO: 1753 - protein, 10 aa, Artificial Sequence
  Description of Artificial Sequence: Synthetic epitope
AQSQPMAALD

SEQ ID NO: 1754 - protein, 10 aa, Artificial Sequence
  Description of Artificial Sequence: Synthetic epitope
AQSQQLSSHT

SEQ ID NO: 1755 - protein, 10 aa, Artificial Sequence
  Description of Artificial Sequence: Synthetic epitope
AQSQSVQESL

SEQ ID NO: 1756 - protein, 10 aa, Artificial Sequence
  Description of Artificial Sequence: Synthetic epitope
AQSQSVQESL

SEQ ID NO: 1757 - protein, 10 aa, Artificial Sequence
  Description of Artificial Sequence: Synthetic epitope
AQSQTQKMPQ

SEQ ID NO: 1758 - protein, 10 aa, Artificial Sequence
  Description of Artificial Sequence: Synthetic epitope
AQSRRDEQDD

SEQ ID NO: 1759 - protein, 10 aa, Artificial Sequence
  Description of Artificial Sequence: Synthetic epitope
AQSRSLTLRL

SEQ ID NO: 1760 - protein, 10 aa, Artificial Sequence
  Description of Artificial Sequence: Synthetic epitope
AQSRSSKPSN

SEQ ID NO: 1761 - protein, 10 aa, Artificial Sequence
  Description of Artificial Sequence: Synthetic epitope
AQSSPQLDIQ

SEQ ID NO: 1762 - protein, 10 aa, Artificial Sequence
  Description of Artificial Sequence: Synthetic epitope
AQSTAHGTDD

SEQ ID NO: 1763 - protein, 10 aa, Artificial Sequence
  Description of Artificial Sequence: Synthetic epitope
AQSVTTKKVS

SEQ ID NO: 1764 - protein, 10 aa, Artificial Sequence
  Description of Artificial Sequence: Synthetic epitope
AQSYRDKKDH

SEQ ID NO: 1765 - protein, 10 aa, Artificial Sequence
  Description of Artificial Sequence: Synthetic epitope
AQTAQPTSAI

SEQ ID NO: 1766 - protein, 10 aa, Artificial Sequence
  Description of Artificial Sequence: Synthetic epitope
AQTDKETSEE

SEQ ID NO: 1767 - protein, 10 aa, Artificial Sequence
  Description of Artificial Sequence: Synthetic epitope
AQTERSNISS

SEQ ID NO: 1768 - protein, 10 aa, Artificial Sequence
  Description of Artificial Sequence: Synthetic epitope
AQTIKKSFSG

SEQ ID NO: 1769 - protein, 10 aa, Artificial Sequence
  Description of Artificial Sequence: Synthetic epitope
AQTITDTPIT

SEQ ID NO: 1770 - protein, 10 aa, Artificial Sequence
  Description of Artificial Sequence: Synthetic epitope
AQTKLSNQGD

SEQ ID NO: 1771 - protein, 10 aa, Artificial Sequence
  Description of Artificial Sequence: Synthetic epitope
AQTKTSKAKK

SEQ ID NO: 1772 - protein, 10 aa, Artificial Sequence
  Description of Artificial Sequence: Synthetic epitope
AQTRSIMQPK

SEQ ID NO: 1773 - protein, 10 aa, Artificial Sequence
  Description of Artificial Sequence: Synthetic epitope
AQTSGSTSTL

SEQ ID NO: 1774 - protein, 10 aa, Artificial Sequence
  Description of Artificial Sequence: Synthetic epitope
AQTTLVDRLA

SEQ ID NO: 1775 - protein, 10 aa, Artificial Sequence
  Description of Artificial Sequence: Synthetic epitope
AQTTREANMG

SEQ ID NO: 1776 - protein, 10 aa, Artificial Sequence
  Description of Artificial Sequence: Synthetic epitope
AQTTSEAAME

SEQ ID NO: 1777 - protein, 10 aa, Artificial Sequence
  Description of Artificial Sequence: Synthetic epitope
AQTVGVVSPE

SEQ ID NO: 1778 - protein, 10 aa, Artificial Sequence
  Description of Artificial Sequence: Synthetic epitope
AQTVTQTSAD

SEQ ID NO: 1779 - protein, 10 aa, Artificial Sequence
  Description of Artificial Sequence: Synthetic epitope
AQVAAWFFAT

SEQ ID NO: 1780 - protein, 10 aa, Artificial Sequence
  Description of Artificial Sequence: Synthetic epitope
AQVASLKKNV

SEQ ID NO: 1781 - protein, 10 aa, Artificial Sequence
  Description of Artificial Sequence: Synthetic epitope
AQVEEAEELF

SEQ ID NO: 1782 - protein, 10 aa, Artificial Sequence
  Description of Artificial Sequence: Synthetic epitope
AQVGQLQARE

SEQ ID NO: 1783 - protein, 10 aa, Artificial Sequence
  Description of Artificial Sequence: Synthetic epitope
AQVKAMIETK

SEQ ID NO: 1784 - protein, 10 aa, Artificial Sequence
  Description of Artificial Sequence: Synthetic epitope
AQVKATNESE

SEQ ID NO: 1785 - protein, 10 aa, Artificial Sequence
  Description of Artificial Sequence: Synthetic epitope
AQVNAMLREQ

SEQ ID NO: 1786 - protein, 10 aa, Artificial Sequence
  Description of Artificial Sequence: Synthetic epitope
AQVQLVVAAE

SEQ ID NO: 1787 - protein, 10 aa, Artificial Sequence
  Description of Artificial Sequence: Synthetic epitope
AQVQQESSQA

SEQ ID NO: 1788 - protein, 10 aa, Artificial Sequence
  Description of Artificial Sequence: Synthetic epitope
AQVQRSAGDN

SEQ ID NO: 1789 - protein, 10 aa, Artificial Sequence
  Description of Artificial Sequence: Synthetic epitope
AQVSNGSNSG

SEQ ID NO: 1790 - protein, 10 aa, Artificial Sequence
  Description of Artificial Sequence: Synthetic epitope
AQVSQMQQAL

SEQ ID NO: 1791 - protein, 10 aa, Artificial Sequence
  Description of Artificial Sequence: Synthetic epitope
AQVSQSSLPM

SEQ ID NO: 1792 - protein, 10 aa, Artificial Sequence
  Description of Artificial Sequence: Synthetic epitope
AQWMAIPDHA

SEQ ID NO: 1793 - protein, 10 aa, Artificial Sequence
  Description of Artificial Sequence: Synthetic epitope
AQWQSSIEDW

SEQ ID NO: 1794 - protein, 10 aa, Artificial Sequence
  Description of Artificial Sequence: Synthetic epitope
AQYMPKYSEG

SEQ ID NO: 1795 - protein, 10 aa, Artificial Sequence
  Description of Artificial Sequence: Synthetic epitope
AQYNASKKSL

SEQ ID NO: 1796 - protein, 10 aa, Artificial Sequence
  Description of Artificial Sequence: Synthetic epitope
AQYNRHDSPE

SEQ ID NO: 1797 - protein, 10 aa, Artificial Sequence
  Description of Artificial Sequence: Synthetic epitope
ARADEASEGD

SEQ ID NO: 1798 - protein, 10 aa, Artificial Sequence
  Description of Artificial Sequence: Synthetic epitope
ARAEGAFNYT

SEQ ID NO: 1799 - protein, 10 aa, Artificial Sequence
  Description of Artificial Sequence: Synthetic epitope
ARAEKSRTAW

SEQ ID NO: 1800 - protein, 10 aa, Artificial Sequence
  Description of Artificial Sequence: Synthetic epitope
ARAEQQVNQL

SEQ ID NO: 1801 - protein, 10 aa, Artificial Sequence
  Description of Artificial Sequence: Synthetic epitope
ARAEQSIAEL

SEQ ID NO: 1802 - protein, 10 aa, Artificial Sequence
  Description of Artificial Sequence: Synthetic epitope
ARAERELKPA

SEQ ID NO: 1803 - protein, 10 aa, Artificial Sequence
  Description of Artificial Sequence: Synthetic epitope
ARALAILRAR

SEQ ID NO: 1804 - protein, 10 aa, Artificial Sequence
  Description of Artificial Sequence: Synthetic epitope
ARALLRARLD

SEQ ID NO: 1805 - protein, 10 aa, Artificial Sequence
  Description of Artificial Sequence: Synthetic epitope
ARAMRVNKRA

SEQ ID NO: 1806 - protein, 10 aa, Artificial Sequence
  Description of Artificial Sequence: Synthetic epitope
ARAQEARKMR

SEQ ID NO: 1807 - protein, 10 aa, Artificial Sequence
  Description of Artificial Sequence: Synthetic epitope
ARARTSVSQQ

SEQ ID NO: 1808 - protein, 10 aa, Artificial Sequence
  Description of Artificial Sequence: Synthetic epitope
ARASKEQKDK

SEQ ID NO: 1809 - protein, 10 aa, Artificial Sequence
  Description of Artificial Sequence: Synthetic epitope
ARASLFTVNS

SEQ ID NO: 1810 - protein, 10 aa, Artificial Sequence
  Description of Artificial Sequence: Synthetic epitope
ARASVSVLGD

SEQ ID NO: 1811 - protein, 10 aa, Artificial Sequence
  Description of Artificial Sequence: Synthetic epitope
ARDEAARLEE

SEQ ID NO: 1812 - protein, 10 aa, Artificial Sequence
  Description of Artificial Sequence: Synthetic epitope
ARDEWDRQNA

SEQ ID NO: 1813 - protein, 10 aa, Artificial Sequence
  Description of Artificial Sequence: Synthetic epitope
ARDKRESDSE

SEQ ID NO: 1814 - protein, 10 aa, Artificial Sequence
  Description of Artificial Sequence: Synthetic epitope
ARDRMLAQVQ

SEQ ID NO: 1815 - protein, 10 aa, Artificial Sequence
  Description of Artificial Sequence: Synthetic epitope
ARDYESLIDL

SEQ ID NO: 1816 - protein, 10 aa, Artificial Sequence
  Description of Artificial Sequence: Synthetic epitope
AREARMAEVA

SEQ ID NO: 1817 - protein, 10 aa, Artificial Sequence
  Description of Artificial Sequence: Synthetic epitope
AREAVLSQSQ

SEQ ID NO: 1818 - protein, 10 aa, Artificial Sequence
  Description of Artificial Sequence: Synthetic epitope
AREKGERAVK

SEQ ID NO: 1819 - protein, 10 aa, Artificial Sequence
  Description of Artificial Sequence: Synthetic epitope
ARELMKMLKD

SEQ ID NO: 1820 - protein, 10 aa, Artificial Sequence
  Description of Artificial Sequence: Synthetic epitope
AREMSEVTAE

SEQ ID NO: 1821 - protein, 10 aa, Artificial Sequence
  Description of Artificial Sequence: Synthetic epitope
AREQEKRKAA

SEQ ID NO: 1822 - protein, 10 aa, Artificial Sequence
  Description of Artificial Sequence: Synthetic epitope
AREQLRAAKQ

SEQ ID NO: 1823 - protein, 10 aa, Artificial Sequence
  Description of Artificial Sequence: Synthetic epitope
ARESLSEVQS

SEQ ID NO: 1824 - protein, 10 aa, Artificial Sequence
  Description of Artificial Sequence: Synthetic epitope
ARESLSSGSD

SEQ ID NO: 1825 - protein, 10 aa, Artificial Sequence
  Description of Artificial Sequence: Synthetic epitope
AREVKKVDAQ

SEQ ID NO: 1826 - protein, 10 aa, Artificial Sequence
  Description of Artificial Sequence: Synthetic epitope
AREYRVNAQG

SEQ ID NO: 1827 - protein, 10 aa, Artificial Sequence
  Description of Artificial Sequence: Synthetic epitope
ARFDRKAAMR

SEQ ID NO: 1828 - protein, 10 aa, Artificial Sequence
  Description of Artificial Sequence: Synthetic epitope
ARFNQYKYNQ

SEQ ID NO: 1829 - protein, 10 aa, Artificial Sequence
  Description of Artificial Sequence: Synthetic epitope
ARGELNVIET

SEQ ID NO: 1830 - protein, 10 aa, Artificial Sequence
  Description of Artificial Sequence: Synthetic epitope
ARGGYAAEKE

SEQ ID NO: 1831 - protein, 10 aa, Artificial Sequence
  Description of Artificial Sequence: Synthetic epitope
ARGIAKVLAD

SEQ ID NO: 1832 - protein, 10 aa, Artificial Sequence
  Description of Artificial Sequence: Synthetic epitope
ARGKVQEGSA

SEQ ID NO: 1833 - protein, 10 aa, Artificial Sequence
  Description of Artificial Sequence: Synthetic epitope
ARGQESQQMS

SEQ ID NO: 1834 - protein, 10 aa, Artificial Sequence
  Description of Artificial Sequence: Synthetic epitope
ARGTQASHQV

SEQ ID NO: 1835 - protein, 10 aa, Artificial Sequence
  Description of Artificial Sequence: Synthetic epitope
ARGTVKVKSS

SEQ ID NO: 1836 - protein, 10 aa, Artificial Sequence
  Description of Artificial Sequence: Synthetic epitope
ARILQSREVP

SEQ ID NO: 1837 - protein, 10 aa, Artificial Sequence
  Description of Artificial Sequence: Synthetic epitope
ARIRAAKSGS

SEQ ID NO: 1838 - protein, 10 aa, Artificial Sequence
  Description of Artificial Sequence: Synthetic epitope
ARKARTGDSS

SEQ ID NO: 1839 - protein, 10 aa, Artificial Sequence
  Description of Artificial Sequence: Synthetic epitope
ARKEISLSEP

SEQ ID NO: 1840 - protein, 10 aa, Artificial Sequence
  Description of Artificial Sequence: Synthetic epitope
ARKESSDSFV

SEQ ID NO: 1841 - protein, 10 aa, Artificial Sequence
  Description of Artificial Sequence: Synthetic epitope
ARKEYASLIE

SEQ ID NO: 1842 - protein, 10 aa, Artificial Sequence
  Description of Artificial Sequence: Synthetic epitope
ARKFIWTNHK

SEQ ID NO: 1843 - protein, 10 aa, Artificial Sequence
  Description of Artificial Sequence: Synthetic epitope
ARKKYRMSAR

SEQ ID NO: 1844 - protein, 10 aa, Artificial Sequence
  Description of Artificial Sequence: Synthetic epitope
ARKLSSVRSD

SEQ ID NO: 1845 - protein, 10 aa, Artificial Sequence
  Description of Artificial Sequence: Synthetic epitope
ARKQSVKSRK

SEQ ID NO: 1846 - protein, 10 aa, Artificial Sequence
  Description of Artificial Sequence: Synthetic epitope
ARKRFLNKSS

SEQ ID NO: 1847 - protein, 10 aa, Artificial Sequence
  Description of Artificial Sequence: Synthetic epitope
ARKSELIELG

SEQ ID NO: 1848 - protein, 10 aa, Artificial Sequence
  Description of Artificial Sequence: Synthetic epitope
ARKVKSGIRQ

SEQ ID NO: 1849 - protein, 10 aa, Artificial Sequence
  Description of Artificial Sequence: Synthetic epitope
ARKWSNSQPA

SEQ ID NO: 1850 - protein, 10 aa, Artificial Sequence
  Description of Artificial Sequence: Synthetic epitope
ARLALLEVQE

SEQ ID NO: 1851 - protein, 10 aa, Artificial Sequence
  Description of Artificial Sequence: Synthetic epitope
ARLALVISEL

SEQ ID NO: 1852 - protein, 10 aa, Artificial Sequence
  Description of Artificial Sequence: Synthetic epitope
ARLDAMSQRE

SEQ ID NO: 1853 - protein, 10 aa, Artificial Sequence
  Description of Artificial Sequence: Synthetic epitope
ARLGERSART

SEQ ID NO: 1854 - protein, 10 aa, Artificial Sequence
  Description of Artificial Sequence: Synthetic epitope
ARLKTSMKFV

SEQ ID NO: 1855 - protein, 10 aa, Artificial Sequence
  Description of Artificial Sequence: Synthetic epitope
ARLLVSRQAD

SEQ ID NO: 1856 - protein, 10 aa, Artificial Sequence
  Description of Artificial Sequence: Synthetic epitope
ARLNAALATP

SEQ ID NO: 1857 - protein, 10 aa, Artificial Sequence
  Description of Artificial Sequence: Synthetic epitope
ARLNLELYGE

SEQ ID NO: 1858 - protein, 10 aa, Artificial Sequence
  Description of Artificial Sequence: Synthetic epitope
ARLQAMAPEE

SEQ ID NO: 1859 - protein, 10 aa, Artificial Sequence
  Description of Artificial Sequence: Synthetic epitope
ARLRKVASAL

SEQ ID NO: 1860 - protein, 10 aa, Artificial Sequence
  Description of Artificial Sequence: Synthetic epitope
ARLSAKTSEQ

SEQ ID NO: 1861 - protein, 10 aa, Artificial Sequence
  Description of Artificial Sequence: Synthetic epitope
ARLSASTASE

SEQ ID NO: 1862 - protein, 10 aa, Artificial Sequence
  Description of Artificial Sequence: Synthetic epitope
ARLVLEVQFQ

SEQ ID NO: 1863 - protein, 10 aa, Artificial Sequence
  Description of Artificial Sequence: Synthetic epitope
ARLVTDTAEI

SEQ ID NO: 1864 - protein, 10 aa, Artificial Sequence
  Description of Artificial Sequence: Synthetic epitope
ARMAANVENP

SEQ ID NO: 1865 - protein, 10 aa, Artificial Sequence
  Description of Artificial Sequence: Synthetic epitope
ARMEAQLKEQ

SEQ ID NO: 1866 - protein, 10 aa, Artificial Sequence
  Description of Artificial Sequence: Synthetic epitope
ARMLAQRMAK

SEQ ID NO: 1867 - protein, 10 aa, Artificial Sequence
  Description of Artificial Sequence: Synthetic epitope
ARMMSTESAN

SEQ ID NO: 1868 - protein, 10 aa, Artificial Sequence
  Description of Artificial Sequence: Synthetic epitope
ARMSTTLELH

SEQ ID NO: 1869 - protein, 10 aa, Artificial Sequence
  Description of Artificial Sequence: Synthetic epitope
ARPHYTEERE

SEQ ID NO: 1870 - protein, 10 aa, Artificial Sequence
  Description of Artificial Sequence: Synthetic epitope
ARPKLKAFLA

SEQ ID NO: 1871 - protein, 10 aa, Artificial Sequence
  Description of Artificial Sequence: Synthetic epitope
ARPQIFRPRE

SEQ ID NO: 1872 - protein, 10 aa, Artificial Sequence
  Description of Artificial Sequence: Synthetic epitope
ARPRFSATRT

SEQ ID NO: 1873 - protein, 10 aa, Artificial Sequence
  Description of Artificial Sequence: Synthetic epitope
ARPTGTASTA

SEQ ID NO: 1874 - protein, 10 aa, Artificial Sequence
  Description of Artificial Sequence: Synthetic epitope
ARQAQSRAQE

SEQ ID NO: 1875 - protein, 10 aa, Artificial Sequence
  Description of Artificial Sequence: Synthetic epitope
ARQEHHYQID

SEQ ID NO: 1876 - protein, 10 aa, Artificial Sequence
  Description of Artificial Sequence: Synthetic epitope
ARQKRQGYSK

SEQ ID NO: 1877 - protein, 10 aa, Artificial Sequence
  Description of Artificial Sequence: Synthetic epitope
ARQMARVNAK

SEQ ID NO: 1878 - protein, 10 aa, Artificial Sequence
  Description of Artificial Sequence: Synthetic epitope
ARQMSRDTPV

SEQ ID NO: 1879 - protein, 10 aa, Artificial Sequence
  Description of Artificial Sequence: Synthetic epitope
ARQPIELLSM

SEQ ID NO: 1880 - protein, 10 aa, Artificial Sequence
  Description of Artificial Sequence: Synthetic epitope
ARQQALQHAQ

SEQ ID NO: 1881 - protein, 10 aa, Artificial Sequence
  Description of Artificial Sequence: Synthetic epitope
ARQRAARDEN

SEQ ID NO: 1882 - protein, 10 aa, Artificial Sequence
  Description of Artificial Sequence: Synthetic epitope
ARQRQLAAEE

SEQ ID NO: 1883 - protein, 10 aa, Artificial Sequence
  Description of Artificial Sequence: Synthetic epitope
ARQTELVEVA

SEQ ID NO: 1884 - protein, 10 aa, Artificial Sequence
  Description of Artificial Sequence: Synthetic epitope
ARRAKASEDQ

SEQ ID NO: 1885 - protein, 10 aa, Artificial Sequence
  Description of Artificial Sequence: Synthetic epitope
ARRAKSQYSG

SEQ ID NO: 1886 - protein, 10 aa, Artificial Sequence
  Description of Artificial Sequence: Synthetic epitope
ARRGVETSKS

SEQ ID NO: 1887 - protein, 10 aa, Artificial Sequence
  Description of Artificial Sequence: Synthetic epitope
ARRKRLPEMA

SEQ ID NO: 1888 - protein, 10 aa, Artificial Sequence
  Description of Artificial Sequence: Synthetic epitope
ARRMVTAKDS

SEQ ID NO: 1889 - protein, 10 aa, Artificial Sequence
  Description of Artificial Sequence: Synthetic epitope
ARRQKTVAKH

SEQ ID NO: 1890 - protein, 10 aa, Artificial Sequence
  Description of Artificial Sequence: Synthetic epitope
ARRSAGKKPT

SEQ ID NO: 1891 - protein, 10 aa, Artificial Sequence
  Description of Artificial Sequence: Synthetic epitope
ARRSQESDGV

SEQ ID NO: 1892 - protein, 10 aa, Artificial Sequence
  Description of Artificial Sequence: Synthetic epitope
ARRVLQLEKQ

SEQ ID NO: 1893 - protein, 10 aa, Artificial Sequence
  Description of Artificial Sequence: Synthetic epitope
ARSASTESGF

SEQ ID NO: 1894 - protein, 10 aa, Artificial Sequence
  Description of Artificial Sequence: Synthetic epitope
ARSEQHEHVA

SEQ ID NO: 1895 - protein, 10 aa, Artificial Sequence
  Description of Artificial Sequence: Synthetic epitope
ARSGLTEVYQ

SEQ ID NO: 1896 - protein, 10 aa, Artificial Sequence
  Description of Artificial Sequence: Synthetic epitope
ARSGSARYTS

SEQ ID NO: 1897 - protein, 10 aa, Artificial Sequence
  Description of Artificial Sequence: Synthetic epitope
ARSLNRSSFT

SEQ ID NO: 1898 - protein, 10 aa, Artificial Sequence
  Description of Artificial Sequence: Synthetic epitope
ARSLSILEQK

SEQ ID NO: 1899 - protein, 10 aa, Artificial Sequence
  Description of Artificial Sequence: Synthetic epitope
ARSLSLSKER

SEQ ID NO: 1900 - protein, 10 aa, Artificial Sequence
  Description of Artificial Sequence: Synthetic epitope
ARSQRSRQTS

SEQ ID NO: 1901 - protein, 10 aa, Artificial Sequence
  Description of Artificial Sequence: Synthetic epitope
ARSQSARTYL

SEQ ID NO: 1902 - protein, 10 aa, Artificial Sequence
  Description of Artificial Sequence: Synthetic epitope
ARSRQERASR

SEQ ID NO: 1903 - protein, 10 aa, Artificial Sequence
  Description of Artificial Sequence: Synthetic epitope
ARSSEQNLQV

SEQ ID NO: 1904 - protein, 10 aa, Artificial Sequence
  Description of Artificial Sequence: Synthetic epitope
ARSSLSTSEV

SEQ ID NO: 1905 - protein, 10 aa, Artificial Sequence
  Description of Artificial Sequence: Synthetic epitope
ARSSRSAIRH

SEQ ID NO: 1906 - protein, 10 aa, Artificial Sequence
  Description of Artificial Sequence: Synthetic epitope
ARSVARLSPE

SEQ ID NO: 1907 - protein, 10 aa, Artificial Sequence
  Description of Artificial Sequence: Synthetic epitope
ARSVDFVSSA

SEQ ID NO: 1908 - protein, 10 aa, Artificial Sequence
  Description of Artificial Sequence: Synthetic epitope
ARSWRTSQRD

SEQ ID NO: 1909 - protein, 10 aa, Artificial Sequence
  Description of Artificial Sequence: Synthetic epitope
ARTAKDIDVL

SEQ ID NO: 1910 - protein, 10 aa, Artificial Sequence
  Description of Artificial Sequence: Synthetic epitope
ARTATSTKNK

SEQ ID NO: 1911 - protein, 10 aa, Artificial Sequence
  Description of Artificial Sequence: Synthetic epitope
ARTLILVAKS

SEQ ID NO: 1912 - protein, 10 aa, Artificial Sequence
  Description of Artificial Sequence: Synthetic epitope
ARTLLVFEVQ

SEQ ID NO: 1913 - protein, 10 aa, Artificial Sequence
  Description of Artificial Sequence: Synthetic epitope
ARTLVSEPAA

SEQ ID NO: 1914 - protein, 10 aa, Artificial Sequence
  Description of Artificial Sequence: Synthetic epitope
ARTQEIIESK

SEQ ID NO: 1915 - protein, 10 aa, Artificial Sequence
  Description of Artificial Sequence: Synthetic epitope
ARTRQSERVR

SEQ ID NO: 1916 - protein, 10 aa, Artificial Sequence
  Description of Artificial Sequence: Synthetic epitope
ARTSAELLAV

SEQ ID NO: 1917 - protein, 10 aa, Artificial Sequence
  Description of Artificial Sequence: Synthetic epitope
ARTSNAKTLK

SEQ ID NO: 1918 - protein, 10 aa, Artificial Sequence
  Description of Artificial Sequence: Synthetic epitope
ARTVGSTSTP

SEQ ID NO: 1919 - protein, 10 aa, Artificial Sequence
  Description of Artificial Sequence: Synthetic epitope
ARVALLSAAL

SEQ ID NO: 1920 - protein, 10 aa, Artificial Sequence
  Description of Artificial Sequence: Synthetic epitope
ARVDAKSRVL

SEQ ID NO: 1921 - protein, 10 aa, Artificial Sequence
  Description of Artificial Sequence: Synthetic epitope
ARVHGHRVLW

SEQ ID NO: 1922 - protein, 10 aa, Artificial Sequence
  Description of Artificial Sequence: Synthetic epitope
ARVIVLLQEF

SEQ ID NO: 1923 - protein, 10 aa, Artificial Sequence
  Description of Artificial Sequence: Synthetic epitope
ARVKLVTELL

SEQ ID NO: 1924 - protein, 10 aa, Artificial Sequence
  Description of Artificial Sequence: Synthetic epitope
ARVVTLLGKM

SEQ ID NO: 1925 - protein, 10 aa, Artificial Sequence
  Description of Artificial Sequence: Synthetic epitope
ARWIQRTHGK

SEQ ID NO: 1926 - protein, 10 aa, Artificial Sequence
  Description of Artificial Sequence: Synthetic epitope
ARWKREAEKK

SEQ ID NO: 1927 - protein, 10 aa, Artificial Sequence
  Description of Artificial Sequence: Synthetic epitope
ARWRLSVFVN

SEQ ID NO: 1928 - protein, 10 aa, Artificial Sequence
  Description of Artificial Sequence: Synthetic epitope
ASAALLDKLY

SEQ ID NO: 1929 - protein, 10 aa, Artificial Sequence
  Description of Artificial Sequence: Synthetic epitope
ASAALLSTKE

SEQ ID NO: 1930 - protein, 10 aa, Artificial Sequence
  Description of Artificial Sequence: Synthetic epitope
ASAASASPRK

SEQ ID NO: 1931 - protein, 10 aa, Artificial Sequence
  Description of Artificial Sequence: Synthetic epitope
ASAASDVSVE

SEQ ID NO: 1932 - protein, 10 aa, Artificial Sequence
  Description of Artificial Sequence: Synthetic epitope
ASAASIPAGT

SEQ ID NO: 1933 - protein, 10 aa, Artificial Sequence
  Description of Artificial Sequence: Synthetic epitope
ASAASLSKPA

SEQ ID NO: 1934 - protein, 10 aa, Artificial Sequence
  Description of Artificial Sequence: Synthetic epitope
ASAASTSTST

SEQ ID NO: 1935 - protein, 10 aa, Artificial Sequence
  Description of Artificial Sequence: Synthetic epitope
ASAESGTILE

SEQ ID NO: 1936 - protein, 10 aa, Artificial Sequence
  Description of Artificial Sequence: Synthetic epitope
ASAESKAVQE

SEQ ID NO: 1937 - protein, 10 aa, Artificial Sequence
  Description of Artificial Sequence: Synthetic epitope
ASAETNSQQP

SEQ ID NO: 1938 - protein, 10 aa, Artificial Sequence
  Description of Artificial Sequence: Synthetic epitope
ASAFVASQEA

SEQ ID NO: 1939 - protein, 10 aa, Artificial Sequence
  Description of Artificial Sequence: Synthetic epitope
ASAGLESHGR

SEQ ID NO: 1940 - protein, 10 aa, Artificial Sequence
  Description of Artificial Sequence: Synthetic epitope
ASAHNKNLDV

SEQ ID NO: 1941 - protein, 10 aa, Artificial Sequence
  Description of Artificial Sequence: Synthetic epitope
ASALETVSEK

SEQ ID NO: 1942 - protein, 10 aa, Artificial Sequence
  Description of Artificial Sequence: Synthetic epitope
ASALMYHRNE

SEQ ID NO: 1943 - protein, 10 aa, Artificial Sequence
  Description of Artificial Sequence: Synthetic epitope
ASALTSSESQ

SEQ ID NO: 1944 - protein, 10 aa, Artificial Sequence
  Description of Artificial Sequence: Synthetic epitope
ASANAGSLQS

SEQ ID NO: 1945 - protein, 10 aa, Artificial Sequence
  Description of Artificial Sequence: Synthetic epitope
ASANSKDTTK

SEQ ID NO: 1946 - protein, 10 aa, Artificial Sequence
  Description of Artificial Sequence: Synthetic epitope
ASAPEEAKSK

SEQ ID NO: 1947 - protein, 10 aa, Artificial Sequence
  Description of Artificial Sequence: Synthetic epitope
ASAPGSKMSQ

SEQ ID NO: 1948 - protein, 10 aa, Artificial Sequence
  Description of Artificial Sequence: Synthetic epitope
ASAQQENSST

SEQ ID NO: 1949 - protein, 10 aa, Artificial Sequence
  Description of Artificial Sequence: Synthetic epitope
ASAQQSEFKH

SEQ ID NO: 1950 - protein, 10 aa, Artificial Sequence
  Description of Artificial Sequence: Synthetic epitope
ASAQRGISGG

SEQ ID NO: 1951 - protein, 10 aa, Artificial Sequence
  Description of Artificial Sequence: Synthetic epitope
ASAQSKTLEA

SEQ ID NO: 1952 - protein, 10 aa, Artificial Sequence
  Description of Artificial Sequence: Synthetic epitope
ASASADRNDQ

SEQ ID NO: 1953 - protein, 10 aa, Artificial Sequence
  Description of Artificial Sequence: Synthetic epitope
ASASASNQAG

SEQ ID NO: 1954 - protein, 10 aa, Artificial Sequence
  Description of Artificial Sequence: Synthetic epitope
ASASMAVDAV

SEQ ID NO: 1955 - protein, 10 aa, Artificial Sequence
  Description of Artificial Sequence: Synthetic epitope
ASATSAVAPI

SEQ ID NO: 1956 - protein, 10 aa, Artificial Sequence
  Description of Artificial Sequence: Synthetic epitope
ASAVAESPGT

SEQ ID NO: 1957 - protein, 10 aa, Artificial Sequence
  Description of Artificial Sequence: Synthetic epitope
ASDAPLSQQH

SEQ ID NO: 1958 - protein, 10 aa, Artificial Sequence
  Description of Artificial Sequence: Synthetic epitope
ASDGEQTTRE

SEQ ID NO: 1959 - protein, 10 aa, Artificial Sequence
  Description of Artificial Sequence: Synthetic epitope
ASDHADSQKM

SEQ ID NO: 1960 - protein, 10 aa, Artificial Sequence
  Description of Artificial Sequence: Synthetic epitope
ASDNASAEKK

SEQ ID NO: 1961 - protein, 10 aa, Artificial Sequence
  Description of Artificial Sequence: Synthetic epitope
ASDRMESDSD

SEQ ID NO: 1962 - protein, 10 aa, Artificial Sequence
  Description of Artificial Sequence: Synthetic epitope
ASDRSHMKDS

SEQ ID NO: 1963 - protein, 10 aa, Artificial Sequence
  Description of Artificial Sequence: Synthetic epitope
ASDSTVESSD

SEQ ID NO: 1964 - protein, 10 aa, Artificial Sequence
  Description of Artificial Sequence: Synthetic epitope
ASDVEQQGAD

SEQ ID NO: 1965 - protein, 10 aa, Artificial Sequence
  Description of Artificial Sequence: Synthetic epitope
ASEAEMVSAI

SEQ ID NO: 1966 - protein, 10 aa, Artificial Sequence
  Description of Artificial Sequence: Synthetic epitope
ASEALYVTDN

SEQ ID NO: 1967 - protein, 10 aa, Artificial Sequence
  Description of Artificial Sequence: Synthetic epitope
ASEDILTTFQ

SEQ ID NO: 1968 - protein, 10 aa, Artificial Sequence
  Description of Artificial Sequence: Synthetic epitope
ASEDSLDSKE

SEQ ID NO: 1969 - protein, 10 aa, Artificial Sequence
  Description of Artificial Sequence: Synthetic epitope
ASEEALGRER

SEQ ID NO: 1970 - protein, 10 aa, Artificial Sequence
  Description of Artificial Sequence: Synthetic epitope
ASEESETDSS

SEQ ID NO: 1971 - protein, 10 aa, Artificial Sequence
  Description of Artificial Sequence: Synthetic epitope
ASEHSHRSHH

SEQ ID NO: 1972 - protein, 10 aa, Artificial Sequence
  Description of Artificial Sequence: Synthetic epitope
ASEKEPTQKK

SEQ ID NO: 1973 - protein, 10 aa, Artificial Sequence
  Description of Artificial Sequence: Synthetic epitope
ASEKKSLASR

SEQ ID NO: 1974 - protein, 10 aa, Artificial Sequence
  Description of Artificial Sequence: Synthetic epitope
ASEKNKEELK

SEQ ID NO: 1975 - protein, 10 aa, Artificial Sequence
  Description of Artificial Sequence: Synthetic epitope
ASEKVQEKEE

SEQ ID NO: 1976 - protein, 10 aa, Artificial Sequence
  Description of Artificial Sequence: Synthetic epitope
ASELQAATAG

SEQ ID NO: 1977 - protein, 10 aa, Artificial Sequence
  Description of Artificial Sequence: Synthetic epitope
ASEPLIQESE

SEQ ID NO: 1978 - protein, 10 aa, Artificial Sequence
  Description of Artificial Sequence: Synthetic epitope
ASEPLTLEQE

SEQ ID NO: 1979 - protein, 10 aa, Artificial Sequence
  Description of Artificial Sequence: Synthetic epitope
ASEQFAARQK

SEQ ID NO: 1980 - protein, 10 aa, Artificial Sequence
  Description of Artificial Sequence: Synthetic epitope
ASERNDADEK

SEQ ID NO: 1981 - protein, 10 aa, Artificial Sequence
  Description of Artificial Sequence: Synthetic epitope
ASESQQGIAD

SEQ ID NO: 1982 - protein, 10 aa, Artificial Sequence
  Description of Artificial Sequence: Synthetic epitope
ASESQTRSDF

SEQ ID NO: 1983 - protein, 10 aa, Artificial Sequence
  Description of Artificial Sequence: Synthetic epitope
ASESTLLAQE

SEQ ID NO: 1984 - protein, 10 aa, Artificial Sequence
  Description of Artificial Sequence: Synthetic epitope
ASETVSEASP

SEQ ID NO: 1985 - protein, 10 aa, Artificial Sequence
  Description of Artificial Sequence: Synthetic epitope
ASEVAGVVAN

SEQ ID NO: 1986 - protein, 10 aa, Artificial Sequence
  Description of Artificial Sequence: Synthetic epitope
ASEVEVSSTS

SEQ ID NO: 1987 - protein, 10 aa, Artificial Sequence
  Description of Artificial Sequence: Synthetic epitope
ASEVEVSSTS

SEQ ID NO: 1988 - protein, 10 aa, Artificial Sequence
  Description of Artificial Sequence: Synthetic epitope
ASEVKALNAN

SEQ ID NO: 1989 - protein, 10 aa, Artificial Sequence
  Description of Artificial Sequence: Synthetic epitope
ASEVSTTSST

SEQ ID NO: 1990 - protein, 10 aa, Artificial Sequence
  Description of Artificial Sequence: Synthetic epitope
ASEVTLKDST

SEQ ID NO: 1991 - protein, 10 aa, Artificial Sequence
  Description of Artificial Sequence: Synthetic epitope
ASFGNFANDN

SEQ ID NO: 1992 - protein, 10 aa, Artificial Sequence
  Description of Artificial Sequence: Synthetic epitope
ASFKLQRQNR

SEQ ID NO: 1993 - protein, 10 aa, Artificial Sequence
  Description of Artificial Sequence: Synthetic epitope
ASFQLSVEEA

SEQ ID NO: 1994 - protein, 10 aa, Artificial Sequence
  Description of Artificial Sequence: Synthetic epitope
ASFSMAGMYE

SEQ ID NO: 1995 - protein, 10 aa, Artificial Sequence
  Description of Artificial Sequence: Synthetic epitope
ASFTQAATQA

SEQ ID NO: 1996 - protein, 10 aa, Artificial Sequence
  Description of Artificial Sequence: Synthetic epitope
ASGALLGADE

SEQ ID NO: 1997 - protein, 10 aa, Artificial Sequence
  Description of Artificial Sequence: Synthetic epitope
ASGARSTSFM

SEQ ID NO: 1998 - protein, 10 aa, Artificial Sequence
  Description of Artificial Sequence: Synthetic epitope
ASGDALVDRQ

SEQ ID NO: 1999 - protein, 10 aa, Artificial Sequence
  Description of Artificial Sequence: Synthetic epitope
ASGEEGEAGE

SEQ ID NO: 2000 - protein, 10 aa, Artificial Sequence
  Description of Artificial Sequence: Synthetic epitope
ASGKSVQVSD

SEQ ID NO: 2001 - protein, 10 aa, Artificial Sequence
  Description of Artificial Sequence: Synthetic epitope
ASGPLRTRRG

SEQ ID NO: 2002 - protein, 10 aa, Artificial Sequence
  Description of Artificial Sequence: Synthetic epitope
ASGQAIGKKV

SEQ ID NO: 2003 - protein, 10 aa, Artificial Sequence
  Description of Artificial Sequence: Synthetic epitope
ASGQQVQTLQ

SEQ ID NO: 2004 - protein, 10 aa, Artificial Sequence
  Description of Artificial Sequence: Synthetic epitope
ASGSGTKNLD

SEQ ID NO: 2005 - protein, 10 aa, Artificial Sequence
  Description of Artificial Sequence: Synthetic epitope
ASGSLSNNGD

SEQ ID NO: 2006 - protein, 10 aa, Artificial Sequence
  Description of Artificial Sequence: Synthetic epitope
ASGSQSSNGP

SEQ ID NO: 2007 - protein, 10 aa, Artificial Sequence
  Description of Artificial Sequence: Synthetic epitope
ASGTASRSED

SEQ ID NO: 2008 - protein, 10 aa, Artificial Sequence
  Description of Artificial Sequence: Synthetic epitope
ASGTEHNKKG

SEQ ID NO: 2009 - protein, 10 aa, Artificial Sequence
  Description of Artificial Sequence: Synthetic epitope
ASGVQVRARQ

SEQ ID NO: 2010 - protein, 10 aa, Artificial Sequence
  Description of Artificial Sequence: Synthetic epitope
ASGYLSARKI

SEQ ID NO: 2011 - protein, 10 aa, Artificial Sequence
  Description of Artificial Sequence: Synthetic epitope
ASGYLSARKI

SEQ ID NO: 2012 - protein, 10 aa, Artificial Sequence
  Description of Artificial Sequence: Synthetic epitope
ASHEIEIGTI

SEQ ID NO: 2013 - protein, 10 aa, Artificial Sequence
  Description of Artificial Sequence: Synthetic epitope
ASHQVLNGGI

SEQ ID NO: 2014 - protein, 10 aa, Artificial Sequence
  Description of Artificial Sequence: Synthetic epitope
ASIADRSWPD

SEQ ID NO: 2015 - protein, 10 aa, Artificial Sequence
  Description of Artificial Sequence: Synthetic epitope
ASIDQSRQMK

SEQ ID NO: 2016 - protein, 10 aa, Artificial Sequence
  Description of Artificial Sequence: Synthetic epitope
ASIDSKLNQA

SEQ ID NO: 2017 - protein, 10 aa, Artificial Sequence
  Description of Artificial Sequence: Synthetic epitope
ASIKEITEKN

SEQ ID NO: 2018 - protein, 10 aa, Artificial Sequence
  Description of Artificial Sequence: Synthetic epitope
ASILSLVTKI

SEQ ID NO: 2019 - protein, 10 aa, Artificial Sequence
  Description of Artificial Sequence: Synthetic epitope
ASIPAQYKAS

SEQ ID NO: 2020 - protein, 10 aa, Artificial Sequence
  Description of Artificial Sequence: Synthetic epitope
ASIQPSKVGK

SEQ ID NO: 2021 - protein, 10 aa, Artificial Sequence
  Description of Artificial Sequence: Synthetic epitope
ASISEELAKK

SEQ ID NO: 2022 - protein, 10 aa, Artificial Sequence
  Description of Artificial Sequence: Synthetic epitope
ASISLAQLTK

SEQ ID NO: 2023 - protein, 10 aa, Artificial Sequence
  Description of Artificial Sequence: Synthetic epitope
ASISPKLNVE

SEQ ID NO: 2024 - protein, 10 aa, Artificial Sequence
  Description of Artificial Sequence: Synthetic epitope
ASITMRRENS

SEQ ID NO: 2025 - protein, 10 aa, Artificial Sequence
  Description of Artificial Sequence: Synthetic epitope
ASITSKPATL

SEQ ID NO: 2026 - protein, 10 aa, Artificial Sequence
  Description of Artificial Sequence: Synthetic epitope
ASIWSNELIE

SEQ ID NO: 2027 - protein, 10 aa, Artificial Sequence
  Description of Artificial Sequence: Synthetic epitope
ASKADVQKRV

SEQ ID NO: 2028 - protein, 10 aa, Artificial Sequence
  Description of Artificial Sequence: Synthetic epitope
ASKAQSIIDA

SEQ ID NO: 2029 - protein, 10 aa, Artificial Sequence
  Description of Artificial Sequence: Synthetic epitope
ASKAYFTTIP

SEQ ID NO: 2030 - protein, 10 aa, Artificial Sequence
  Description of Artificial Sequence: Synthetic epitope
ASKDAKKISK

SEQ ID NO: 2031 - protein, 10 aa, Artificial Sequence
  Description of Artificial Sequence: Synthetic epitope
ASKDKTPKSK

SEQ ID NO: 2032 - protein, 10 aa, Artificial Sequence
  Description of Artificial Sequence: Synthetic epitope
ASKEIGKRKL

SEQ ID NO: 2033 - protein, 10 aa, Artificial Sequence
  Description of Artificial Sequence: Synthetic epitope
ASKEKETSAE

SEQ ID NO: 2034 - protein, 10 aa, Artificial Sequence
  Description of Artificial Sequence: Synthetic epitope
ASKGEMSPMV

SEQ ID NO: 2035 - protein, 10 aa, Artificial Sequence
  Description of Artificial Sequence: Synthetic epitope
ASKGKQQTSE

SEQ ID NO: 2036 - protein, 10 aa, Artificial Sequence
  Description of Artificial Sequence: Synthetic epitope
ASKHTTKEAS

SEQ ID NO: 2037 - protein, 10 aa, Artificial Sequence
  Description of Artificial Sequence: Synthetic epitope
ASKIETRGTR

SEQ ID NO: 2038 - protein, 10 aa, Artificial Sequence
  Description of Artificial Sequence: Synthetic epitope
ASKIFSIKES

SEQ ID NO: 2039 - protein, 10 aa, Artificial Sequence
  Description of Artificial Sequence: Synthetic epitope
ASKIIKTDFG

SEQ ID NO: 2040 - protein, 10 aa, Artificial Sequence
  Description of Artificial Sequence: Synthetic epitope
ASKKAVEELA

SEQ ID NO: 2041 - protein, 10 aa, Artificial Sequence
  Description of Artificial Sequence: Synthetic epitope
ASKKHEAAKE

SEQ ID NO: 2042 - protein, 10 aa, Artificial Sequence
  Description of Artificial Sequence: Synthetic epitope
ASKLGGYFTA

SEQ ID NO: 2043 - protein, 10 aa, Artificial Sequence
  Description of Artificial Sequence: Synthetic epitope
ASKNRHEIAV

SEQ ID NO: 2044 - protein, 10 aa, Artificial Sequence
  Description of Artificial Sequence: Synthetic epitope
ASKQKQIPIQ

SEQ ID NO: 2045 - protein, 10 aa, Artificial Sequence
  Description of Artificial Sequence: Synthetic epitope
ASKSATSAKA

SEQ ID NO: 2046 - protein, 10 aa, Artificial Sequence
  Description of Artificial Sequence: Synthetic epitope
ASKSSAIKLE

SEQ ID NO: 2047 - protein, 10 aa, Artificial Sequence
  Description of Artificial Sequence: Synthetic epitope
ASKSSAIKLE

SEQ ID NO: 2048 - protein, 10 aa, Artificial Sequence
  Description of Artificial Sequence: Synthetic epitope
ASKSSFPDKD

SEQ ID NO: 2049 - protein, 10 aa, Artificial Sequence
  Description of Artificial Sequence: Synthetic epitope
ASKTLKTRPK

SEQ ID NO: 2050 - protein, 10 aa, Artificial Sequence
  Description of Artificial Sequence: Synthetic epitope
ASKVFRSSYE

SEQ ID NO: 2051 - protein, 10 aa, Artificial Sequence
  Description of Artificial Sequence: Synthetic epitope
ASLAEETRGA

SEQ ID NO: 2052 - protein, 10 aa, Artificial Sequence
  Description of Artificial Sequence: Synthetic epitope
ASLAKAIEAE

SEQ ID NO: 2053 - protein, 10 aa, Artificial Sequence
  Description of Artificial Sequence: Synthetic epitope
ASLAREVYTE

SEQ ID NO: 2054 - protein, 10 aa, Artificial Sequence
  Description of Artificial Sequence: Synthetic epitope
ASLATAAGSE

SEQ ID NO: 2055 - protein, 10 aa, Artificial Sequence
  Description of Artificial Sequence: Synthetic epitope
ASLEAEADQG

SEQ ID NO: 2056 - protein, 10 aa, Artificial Sequence
  Description of Artificial Sequence: Synthetic epitope
ASLEDKSSNS

SEQ ID NO: 2057 - protein, 10 aa, Artificial Sequence
  Description of Artificial Sequence: Synthetic epitope
ASLEERAVSR

SEQ ID NO: 2058 - protein, 10 aa, Artificial Sequence
  Description of Artificial Sequence: Synthetic epitope
ASLEQQLEQV

SEQ ID NO: 2059 - protein, 10 aa, Artificial Sequence
  Description of Artificial Sequence: Synthetic epitope
ASLERKNIEI

SEQ ID NO: 2060 - protein, 10 aa, Artificial Sequence
  Description of Artificial Sequence: Synthetic epitope
ASLGKTNVKD

SEQ ID NO: 2061 - protein, 10 aa, Artificial Sequence
  Description of Artificial Sequence: Synthetic epitope
ASLISAVSDK

SEQ ID NO: 2062 - protein, 10 aa, Artificial Sequence
  Description of Artificial Sequence: Synthetic epitope
ASLKNKADYV

SEQ ID NO: 2063 - protein, 10 aa, Artificial Sequence
  Description of Artificial Sequence: Synthetic epitope
ASLKREGISQ

SEQ ID NO: 2064 - protein, 10 aa, Artificial Sequence
  Description of Artificial Sequence: Synthetic epitope
ASLLEKSEGA

SEQ ID NO: 2065 - protein, 10 aa, Artificial Sequence
  Description of Artificial Sequence: Synthetic epitope
ASLLRLAVKL

SEQ ID NO: 2066 - protein, 10 aa, Artificial Sequence
  Description of Artificial Sequence: Synthetic epitope
ASLNIKTTVP

SEQ ID NO: 2067 - protein, 10 aa, Artificial Sequence
  Description of Artificial Sequence: Synthetic epitope
ASLPTTSQRK

SEQ ID NO: 2068 - protein, 10 aa, Artificial Sequence
  Description of Artificial Sequence: Synthetic epitope
ASLQEMTKKQ

SEQ ID NO: 2069 - protein, 10 aa, Artificial Sequence
  Description of Artificial Sequence: Synthetic epitope
ASLQETEEIK

SEQ ID NO: 2070 - protein, 10 aa, Artificial Sequence
  Description of Artificial Sequence: Synthetic epitope
ASLQIVIQST

SEQ ID NO: 2071 - protein, 10 aa, Artificial Sequence
  Description of Artificial Sequence: Synthetic epitope
ASLQKVSGSS

SEQ ID NO: 2072 - protein, 10 aa, Artificial Sequence
  Description of Artificial Sequence: Synthetic epitope
ASLQQARARS

SEQ ID NO: 2073 - protein, 10 aa, Artificial Sequence
  Description of Artificial Sequence: Synthetic epitope
ASLQRLRLEE

SEQ ID NO: 2074 - protein, 10 aa, Artificial Sequence
  Description of Artificial Sequence: Synthetic epitope
ASLQSDIIES

SEQ ID NO: 2075 - protein, 10 aa, Artificial Sequence
  Description of Artificial Sequence: Synthetic epitope
ASLRASILAR

SEQ ID NO: 2076 - protein, 10 aa, Artificial Sequence
  Description of Artificial Sequence: Synthetic epitope
ASLRATSSTQ

SEQ ID NO: 2077 - protein, 10 aa, Artificial Sequence
  Description of Artificial Sequence: Synthetic epitope
ASLRLATGLG

SEQ ID NO: 2078 - protein, 10 aa, Artificial Sequence
  Description of Artificial Sequence: Synthetic epitope
ASLRLELLFP

SEQ ID NO: 2079 - protein, 10 aa, Artificial Sequence
  Description of Artificial Sequence: Synthetic epitope
ASLRRQIIKL

SEQ ID NO: 2080 - protein, 10 aa, Artificial Sequence
  Description of Artificial Sequence: Synthetic epitope
ASLSADKKGA

SEQ ID NO: 2081 - protein, 10 aa, Artificial Sequence
  Description of Artificial Sequence: Synthetic epitope
ASLTAILKTN

SEQ ID NO: 2082 - protein, 10 aa, Artificial Sequence
  Description of Artificial Sequence: Synthetic epitope
ASLTDSSEKE

SEQ ID NO: 2083 - protein, 10 aa, Artificial Sequence
  Description of Artificial Sequence: Synthetic epitope
ASLTLSTLMS

SEQ ID NO: 2084 - protein, 10 aa, Artificial Sequence
  Description of Artificial Sequence: Synthetic epitope
ASLTVAEQYV

SEQ ID NO: 2085 - protein, 10 aa, Artificial Sequence
  Description of Artificial Sequence: Synthetic epitope
ASMAAVAQRS

SEQ ID NO: 2086 - protein, 10 aa, Artificial Sequence
  Description of Artificial Sequence: Synthetic epitope
ASMDQISAIT

SEQ ID NO: 2087 - protein, 10 aa, Artificial Sequence
  Description of Artificial Sequence: Synthetic epitope
ASMISKLKQA

SEQ ID NO: 2088 - protein, 10 aa, Artificial Sequence
  Description of Artificial Sequence: Synthetic epitope
ASMNKPAFQA

SEQ ID NO: 2089 - protein, 10 aa, Artificial Sequence
  Description of Artificial Sequence: Synthetic epitope
ASMPHALSYF

SEQ ID NO: 2090 - protein, 10 aa, Artificial Sequence
  Description of Artificial Sequence: Synthetic epitope
ASMRAILESL

SEQ ID NO: 2091 - protein, 10 aa, Artificial Sequence
  Description of Artificial Sequence: Synthetic epitope
ASMTSSAALL

SEQ ID NO: 2092 - protein, 10 aa, Artificial Sequence
  Description of Artificial Sequence: Synthetic epitope
ASMVEKRASP

SEQ ID NO: 2093 - protein, 10 aa, Artificial Sequence
  Description of Artificial Sequence: Synthetic epitope
ASNASITVEE

SEQ ID NO: 2094 - protein, 10 aa, Artificial Sequence
  Description of Artificial Sequence: Synthetic epitope
ASNDSSAQSV

SEQ ID NO: 2095 - protein, 10 aa, Artificial Sequence
  Description of Artificial Sequence: Synthetic epitope
ASNHETAHNV

SEQ ID NO: 2096 - protein, 10 aa, Artificial Sequence
  Description of Artificial Sequence: Synthetic epitope
ASNKLQIVFD

SEQ ID NO: 2097 - protein, 10 aa, Artificial Sequence
  Description of Artificial Sequence: Synthetic epitope
ASNKSPLVLE

SEQ ID NO: 2098 - protein, 10 aa, Artificial Sequence
  Description of Artificial Sequence: Synthetic epitope
ASNLKLMPSN

SEQ ID NO: 2099 - protein, 10 aa, Artificial Sequence
  Description of Artificial Sequence: Synthetic epitope
ASNQFKVHGQ

SEQ ID NO: 2100 - protein, 10 aa, Artificial Sequence
  Description of Artificial Sequence: Synthetic epitope
ASNQGQSTLQ

SEQ ID NO: 2101 - protein, 10 aa, Artificial Sequence
  Description of Artificial Sequence: Synthetic epitope
ASNRLSVSSL

SEQ ID NO: 2102 - protein, 10 aa, Artificial Sequence
  Description of Artificial Sequence: Synthetic epitope
ASNTHIFTFQ

SEQ ID NO: 2103 - protein, 10 aa, Artificial Sequence
  Description of Artificial Sequence: Synthetic epitope
ASNTQSEGSD

SEQ ID NO: 2104 - protein, 10 aa, Artificial Sequence
  Description of Artificial Sequence: Synthetic epitope
ASPALASLSR

SEQ ID NO: 2105 - protein, 10 aa, Artificial Sequence
  Description of Artificial Sequence: Synthetic epitope
ASPDKASSPE

SEQ ID NO: 2106 - protein, 10 aa, Artificial Sequence
  Description of Artificial Sequence: Synthetic epitope
ASPLSSNKLI

SEQ ID NO: 2107 - protein, 10 aa, Artificial Sequence
  Description of Artificial Sequence: Synthetic epitope
ASPLTFTVQL

SEQ ID NO: 2108 - protein, 10 aa, Artificial Sequence
  Description of Artificial Sequence: Synthetic epitope
ASPNVEAPQP

SEQ ID NO: 2109 - protein, 10 aa, Artificial Sequence
  Description of Artificial Sequence: Synthetic epitope
ASPVTLTKGT

SEQ ID NO: 2110 - protein, 10 aa, Artificial Sequence
  Description of Artificial Sequence: Synthetic epitope
ASQAGSKSQA

SEQ ID NO: 2111 - protein, 10 aa, Artificial Sequence
  Description of Artificial Sequence: Synthetic epitope
ASQASTTSNP

SEQ ID NO: 2112 - protein, 10 aa, Artificial Sequence
  Description of Artificial Sequence: Synthetic epitope
ASQDKTLTAE

SEQ ID NO: 2113 - protein, 10 aa, Artificial Sequence
  Description of Artificial Sequence: Synthetic epitope
ASQHLATESP

SEQ ID NO: 2114 - protein, 10 aa, Artificial Sequence
  Description of Artificial Sequence: Synthetic epitope
ASQLAALEGV

SEQ ID NO: 2115 - protein, 10 aa, Artificial Sequence
  Description of Artificial Sequence: Synthetic epitope
ASQLARAQKQ

SEQ ID NO: 2116 - protein, 10 aa, Artificial Sequence
  Description of Artificial Sequence: Synthetic epitope
ASQPARVVDE

SEQ ID NO: 2117 - protein, 10 aa, Artificial Sequence
  Description of Artificial Sequence: Synthetic epitope
ASQPDSVDAA

SEQ ID NO: 2118 - protein, 10 aa, Artificial Sequence
  Description of Artificial Sequence: Synthetic epitope
ASQPKVVGRH

SEQ ID NO: 2119 - protein, 10 aa, Artificial Sequence
  Description of Artificial Sequence: Synthetic epitope
ASQPRDHISH

SEQ ID NO: 2120 - protein, 10 aa, Artificial Sequence
  Description of Artificial Sequence: Synthetic epitope
ASQSSRENQS

SEQ ID NO: 2121 - protein, 10 aa, Artificial Sequence
  Description of Artificial Sequence: Synthetic epitope
ASQSTSASPA

SEQ ID NO: 2122 - protein, 10 aa, Artificial Sequence
  Description of Artificial Sequence: Synthetic epitope
ASQVVKLTKQ

SEQ ID NO: 2123 - protein, 10 aa, Artificial Sequence
  Description of Artificial Sequence: Synthetic epitope
ASRADTQAQA

SEQ ID NO: 2124 - protein, 10 aa, Artificial Sequence
  Description of Artificial Sequence: Synthetic epitope
ASRAESVSAP

SEQ ID NO: 2125 - protein, 10 aa, Artificial Sequence
  Description of Artificial Sequence: Synthetic epitope
ASRESVTSDG

SEQ ID NO: 2126 - protein, 10 aa, Artificial Sequence
  Description of Artificial Sequence: Synthetic epitope
ASRGVGAKLG

SEQ ID NO: 2127 - protein, 10 aa, Artificial Sequence
  Description of Artificial Sequence: Synthetic epitope
ASRKPTMAEA

SEQ ID NO: 2128 - protein, 10 aa, Artificial Sequence
  Description of Artificial Sequence: Synthetic epitope
ASRLSSTSFM

SEQ ID NO: 2129 - protein, 10 aa, Artificial Sequence
  Description of Artificial Sequence: Synthetic epitope
ASRNRDRAEE

SEQ ID NO: 2130 - protein, 10 aa, Artificial Sequence
  Description of Artificial Sequence: Synthetic epitope
ASRNVSNDPD

SEQ ID NO: 2131 - protein, 10 aa, Artificial Sequence
  Description of Artificial Sequence: Synthetic epitope
ASRPKSIKEK

SEQ ID NO: 2132 - protein, 10 aa, Artificial Sequence
  Description of Artificial Sequence: Synthetic epitope
ASRSAVMSGN

SEQ ID NO: 2133 - protein, 10 aa, Artificial Sequence
  Description of Artificial Sequence: Synthetic epitope
ASRSHSRREE

SEQ ID NO: 2134 - protein, 10 aa, Artificial Sequence
  Description of Artificial Sequence: Synthetic epitope
ASRSPSLALS

SEQ ID NO: 2135 - protein, 10 aa, Artificial Sequence
  Description of Artificial Sequence: Synthetic epitope
ASRTHTLKSS

SEQ ID NO: 2136 - protein, 10 aa, Artificial Sequence
  Description of Artificial Sequence: Synthetic epitope
ASRTLARIDL

SEQ ID NO: 2137 - protein, 10 aa, Artificial Sequence
  Description of Artificial Sequence: Synthetic epitope
ASRVDKSTQT

SEQ ID NO: 2138 - protein, 10 aa, Artificial Sequence
  Description of Artificial Sequence: Synthetic epitope
ASRVKSLNQN

SEQ ID NO: 2139 - protein, 10 aa, Artificial Sequence
  Description of Artificial Sequence: Synthetic epitope
ASSAAMKATG

SEQ ID NO: 2140 - protein, 10 aa, Artificial Sequence
  Description of Artificial Sequence: Synthetic epitope
ASSAAVGSGP

SEQ ID NO: 2141 - protein, 10 aa, Artificial Sequence
  Description of Artificial Sequence: Synthetic epitope
ASSAESQDSK

SEQ ID NO: 2142 - protein, 10 aa, Artificial Sequence
  Description of Artificial Sequence: Synthetic epitope
ASSAGGAASS

SEQ ID NO: 2143 - protein, 10 aa, Artificial Sequence
  Description of Artificial Sequence: Synthetic epitope
ASSAGHSTAS

SEQ ID NO: 2144 - protein, 10 aa, Artificial Sequence
  Description of Artificial Sequence: Synthetic epitope
ASSAITLNIY

SEQ ID NO: 2145 - protein, 10 aa, Artificial Sequence
  Description of Artificial Sequence: Synthetic epitope
ASSAQARLLQ

SEQ ID NO: 2146 - protein, 10 aa, Artificial Sequence
  Description of Artificial Sequence: Synthetic epitope
ASSASKTASP

SEQ ID NO: 2147 - protein, 10 aa, Artificial Sequence
  Description of Artificial Sequence: Synthetic epitope
ASSASPMFKP

SEQ ID NO: 2148 - protein, 10 aa, Artificial Sequence
  Description of Artificial Sequence: Synthetic epitope
ASSATDTDTN

SEQ ID NO: 2149 - protein, 10 aa, Artificial Sequence
  Description of Artificial Sequence: Synthetic epitope
ASSAYALSPF

SEQ ID NO: 2150 - protein, 10 aa, Artificial Sequence
  Description of Artificial Sequence: Synthetic epitope
ASSDSGSTDE

SEQ ID NO: 2151 - protein, 10 aa, Artificial Sequence
  Description of Artificial Sequence: Synthetic epitope
ASSDVVLLEG

SEQ ID NO: 2152 - protein, 10 aa, Artificial Sequence
  Description of Artificial Sequence: Synthetic epitope
ASSEDLGHQI

SEQ ID NO: 2153 - protein, 10 aa, Artificial Sequence
  Description of Artificial Sequence: Synthetic epitope
ASSELEATAE

SEQ ID NO: 2154 - protein, 10 aa, Artificial Sequence
  Description of Artificial Sequence: Synthetic epitope
ASSGESKYTG

SEQ ID NO: 2155 - protein, 10 aa, Artificial Sequence
  Description of Artificial Sequence: Synthetic epitope
ASSGSALQYD

SEQ ID NO: 2156 - protein, 10 aa, Artificial Sequence
  Description of Artificial Sequence: Synthetic epitope
ASSHRSAAVS

SEQ ID NO: 2157 - protein, 10 aa, Artificial Sequence
  Description of Artificial Sequence: Synthetic epitope
ASSIKDLTKQ

SEQ ID NO: 2158 - protein, 10 aa, Artificial Sequence
  Description of Artificial Sequence: Synthetic epitope
ASSIKQILLE

SEQ ID NO: 2159 - protein, 10 aa, Artificial Sequence
  Description of Artificial Sequence: Synthetic epitope
ASSKEADEKK

SEQ ID NO: 2160 - protein, 10 aa, Artificial Sequence
  Description of Artificial Sequence: Synthetic epitope
ASSKLLKISM

SEQ ID NO: 2161 - protein, 10 aa, Artificial Sequence
  Description of Artificial Sequence: Synthetic epitope
ASSKRLSKSN

SEQ ID NO: 2162 - protein, 10 aa, Artificial Sequence
  Description of Artificial Sequence: Synthetic epitope
ASSLLSVEDT

SEQ ID NO: 2163 - protein, 10 aa, Artificial Sequence
  Description of Artificial Sequence: Synthetic epitope
ASSLSDTNKD

SEQ ID NO: 2164 - protein, 10 aa, Artificial Sequence
  Description of Artificial Sequence: Synthetic epitope
ASSLSSGQLK

SEQ ID NO: 2165 - protein, 10 aa, Artificial Sequence
  Description of Artificial Sequence: Synthetic epitope
ASSLVSKISA

SEQ ID NO: 2166 - protein, 10 aa, Artificial Sequence
  Description of Artificial Sequence: Synthetic epitope
ASSMTKLPQQ

SEQ ID NO: 2167 - protein, 10 aa, Artificial Sequence
  Description of Artificial Sequence: Synthetic epitope
ASSPYVYRDP

SEQ ID NO: 2168 - protein, 10 aa, Artificial Sequence
  Description of Artificial Sequence: Synthetic epitope
ASSQLSTALS

SEQ ID NO: 2169 - protein, 10 aa, Artificial Sequence
  Description of Artificial Sequence: Synthetic epitope
ASSQRKTEGD

SEQ ID NO: 2170 - protein, 10 aa, Artificial Sequence
  Description of Artificial Sequence: Synthetic epitope
ASSQRLVSTG

SEQ ID NO: 2171 - protein, 10 aa, Artificial Sequence
  Description of Artificial Sequence: Synthetic epitope
ASSQSSENLE

SEQ ID NO: 2172 - protein, 10 aa, Artificial Sequence
  Description of Artificial Sequence: Synthetic epitope
ASSQTAPSSQ

SEQ ID NO: 2173 - protein, 10 aa, Artificial Sequence
  Description of Artificial Sequence: Synthetic epitope
ASSQVELVEA

SEQ ID NO: 2174 - protein, 10 aa, Artificial Sequence
  Description of Artificial Sequence: Synthetic epitope
ASSQYHARKS

SEQ ID NO: 2175 - protein, 10 aa, Artificial Sequence
  Description of Artificial Sequence: Synthetic epitope
ASSRSSVLKD

SEQ ID NO: 2176 - protein, 10 aa, Artificial Sequence
  Description of Artificial Sequence: Synthetic epitope
ASSRSTTKKR

SEQ ID NO: 2177 - protein, 10 aa, Artificial Sequence
  Description of Artificial Sequence: Synthetic epitope
ASSTATSNTE

SEQ ID NO: 2178 - protein, 10 aa, Artificial Sequence
  Description of Artificial Sequence: Synthetic epitope
ASSTGTESSD

SEQ ID NO: 2179 - protein, 10 aa, Artificial Sequence
  Description of Artificial Sequence: Synthetic epitope
ASSTPSADSR

SEQ ID NO: 2180 - protein, 10 aa, Artificial Sequence
  Description of Artificial Sequence: Synthetic epitope
ASSTSLSDLQ

SEQ ID NO: 2181 - protein, 10 aa, Artificial Sequence
  Description of Artificial Sequence: Synthetic epitope
ASSTSVTGQV

SEQ ID NO: 2182 - protein, 10 aa, Artificial Sequence
  Description of Artificial Sequence: Synthetic epitope
ASSVIFGLKG

SEQ ID NO: 2183 - protein, 10 aa, Artificial Sequence
  Description of Artificial Sequence: Synthetic epitope
ASSVLKMKNF

SEQ ID NO: 2184 - protein, 10 aa, Artificial Sequence
  Description of Artificial Sequence: Synthetic epitope
ASSVNKASTV

SEQ ID NO: 2185 - protein, 10 aa, Artificial Sequence
  Description of Artificial Sequence: Synthetic epitope
ASSVRSGKNS

SEQ ID NO: 2186 - protein, 10 aa, Artificial Sequence
  Description of Artificial Sequence: Synthetic epitope
ASSVTYNAYI

SEQ ID NO: 2187 - protein, 10 aa, Artificial Sequence
  Description of Artificial Sequence: Synthetic epitope
ASSWRSNNSR

SEQ ID NO: 2188 - protein, 10 aa, Artificial Sequence
  Description of Artificial Sequence: Synthetic epitope
ASTDFSSASA

SEQ ID NO: 2189 - protein, 10 aa, Artificial Sequence
  Description of Artificial Sequence: Synthetic epitope
ASTEATELLQ

SEQ ID NO: 2190 - protein, 10 aa, Artificial Sequence
  Description of Artificial Sequence: Synthetic epitope
ASTEMVTPVT

SEQ ID NO: 2191 - protein, 10 aa, Artificial Sequence
  Description of Artificial Sequence: Synthetic epitope
ASTFTLAMAE

SEQ ID NO: 2192 - protein, 10 aa, Artificial Sequence
  Description of Artificial Sequence: Synthetic epitope
ASTKISEDAM

SEQ ID NO: 2193 - protein, 10 aa, Artificial Sequence
  Description of Artificial Sequence: Synthetic epitope
ASTKKVELDN

SEQ ID NO: 2194 - protein, 10 aa, Artificial Sequence
  Description of Artificial Sequence: Synthetic epitope
ASTKVMKAQQ

SEQ ID NO: 2195 - protein, 10 aa, Artificial Sequence
  Description of Artificial Sequence: Synthetic epitope
ASTLQQLSFP

SEQ ID NO: 2196 - protein, 10 aa, Artificial Sequence
  Description of Artificial Sequence: Synthetic epitope
ASTPKSITSA

SEQ ID NO: 2197 - protein, 10 aa, Artificial Sequence
  Description of Artificial Sequence: Synthetic epitope
ASTRLESIQQ

SEQ ID NO: 2198 - protein, 10 aa, Artificial Sequence
  Description of Artificial Sequence: Synthetic epitope
ASTSEKVENE

SEQ ID NO: 2199 - protein, 10 aa, Artificial Sequence
  Description of Artificial Sequence: Synthetic epitope
ASTSTLSSAK

SEQ ID NO: 2200 - protein, 10 aa, Artificial Sequence
  Description of Artificial Sequence: Synthetic epitope
ASTTAVKIDQ

SEQ ID NO: 2201 - protein, 10 aa, Artificial Sequence
  Description of Artificial Sequence: Synthetic epitope
ASTTSLSGSD

SEQ ID NO: 2202 - protein, 10 aa, Artificial Sequence
  Description of Artificial Sequence: Synthetic epitope
ASTVSEAEPE

SEQ ID NO: 2203 - protein, 10 aa, Artificial Sequence
  Description of Artificial Sequence: Synthetic epitope
ASTVSLSAES

SEQ ID NO: 2204 - protein, 10 aa, Artificial Sequence
  Description of Artificial Sequence: Synthetic epitope
ASTYSEFAKD

SEQ ID NO: 2205 - protein, 10 aa, Artificial Sequence
  Description of Artificial Sequence: Synthetic epitope
ASVASTLETT

SEQ ID NO: 2206 - protein, 10 aa, Artificial Sequence
  Description of Artificial Sequence: Synthetic epitope
ASVAVSSFEH

SEQ ID NO: 2207 - protein, 10 aa, Artificial Sequence
  Description of Artificial Sequence: Synthetic epitope
ASVDRKQKVL

SEQ ID NO: 2208 - protein, 10 aa, Artificial Sequence
  Description of Artificial Sequence: Synthetic epitope
ASVHKVTIKI

SEQ ID NO: 2209 - protein, 10 aa, Artificial Sequence
  Description of Artificial Sequence: Synthetic epitope
ASVIESLGWS

SEQ ID NO: 2210 - protein, 10 aa, Artificial Sequence
  Description of Artificial Sequence: Synthetic epitope
ASVKTSAGTT

SEQ ID NO: 2211 - protein, 10 aa, Artificial Sequence
  Description of Artificial Sequence: Synthetic epitope
ASVLINDVDT

SEQ ID NO: 2212 - protein, 10 aa, Artificial Sequence
  Description of Artificial Sequence: Synthetic epitope
ASVRANNHQQ

SEQ ID NO: 2213 - protein, 10 aa, Artificial Sequence
  Description of Artificial Sequence: Synthetic epitope
ASVTVSSFPD

SEQ ID NO: 2214 - protein, 10 aa, Artificial Sequence
  Description of Artificial Sequence: Synthetic epitope
ASVVSSKTQQ

SEQ ID NO: 2215 - protein, 10 aa, Artificial Sequence
  Description of Artificial Sequence: Synthetic epitope
ASWQQWVADG

SEQ ID NO: 2216 - protein, 10 aa, Artificial Sequence
  Description of Artificial Sequence: Synthetic epitope
ASYSKSLIKL

SEQ ID NO: 2217 - protein, 10 aa, Artificial Sequence
  Description of Artificial Sequence: Synthetic epitope
ATAAEEREAS

SEQ ID NO: 2218 - protein, 10 aa, Artificial Sequence
  Description of Artificial Sequence: Synthetic epitope
ATAAERAVLE

SEQ ID NO: 2219 - protein, 10 aa, Artificial Sequence
  Description of Artificial Sequence: Synthetic epitope
ATAAEVTKAE

SEQ ID NO: 2220 - protein, 10 aa, Artificial Sequence
  Description of Artificial Sequence: Synthetic epitope
ATAAHKDSQS

SEQ ID NO: 2221 - protein, 10 aa, Artificial Sequence
  Description of Artificial Sequence: Synthetic epitope
ATAALARREE

SEQ ID NO: 2222 - protein, 10 aa, Artificial Sequence
  Description of Artificial Sequence: Synthetic epitope
ATAALATSLQ

SEQ ID NO: 2223 - protein, 10 aa, Artificial Sequence
  Description of Artificial Sequence: Synthetic epitope
ATAATAMNQR

SEQ ID NO: 2224 - protein, 10 aa, Artificial Sequence
  Description of Artificial Sequence: Synthetic epitope
ATAATTVLRQ

SEQ ID NO: 2225 - protein, 10 aa, Artificial Sequence
  Description of Artificial Sequence: Synthetic epitope
ATAGASSELD

SEQ ID NO: 2226 - protein, 10 aa, Artificial Sequence
  Description of Artificial Sequence: Synthetic epitope
ATALAEGERD

SEQ ID NO: 2227 - protein, 10 aa, Artificial Sequence
  Description of Artificial Sequence: Synthetic epitope
ATAMAMGRGE

SEQ ID NO: 2228 - protein, 10 aa, Artificial Sequence
  Description of Artificial Sequence: Synthetic epitope
ATANITVEDS

SEQ ID NO: 2229 - protein, 10 aa, Artificial Sequence
  Description of Artificial Sequence: Synthetic epitope
ATASSKKTIE

SEQ ID NO: 2230 - protein, 10 aa, Artificial Sequence
  Description of Artificial Sequence: Synthetic epitope
ATASVKMEPE

SEQ ID NO: 2231 - protein, 10 aa, Artificial Sequence
  Description of Artificial Sequence: Synthetic epitope
ATATAEVLAT

SEQ ID NO: 2232 - protein, 10 aa, Artificial Sequence
  Description of Artificial Sequence: Synthetic epitope
ATATPSAGAS

SEQ ID NO: 2233 - protein, 10 aa, Artificial Sequence
  Description of Artificial Sequence: Synthetic epitope
ATATTDAAQT

SEQ ID NO: 2234 - protein, 10 aa, Artificial Sequence
  Description of Artificial Sequence: Synthetic epitope
ATDFGQTNQK

SEQ ID NO: 2235 - protein, 10 aa, Artificial Sequence
  Description of Artificial Sequence: Synthetic epitope
ATDKTLAPSS

SEQ ID NO: 2236 - protein, 10 aa, Artificial Sequence
  Description of Artificial Sequence: Synthetic epitope
ATDRSYVSRR

SEQ ID NO: 2237 - protein, 10 aa, Artificial Sequence
  Description of Artificial Sequence: Synthetic epitope
ATDSKAETSQ

SEQ ID NO: 2238 - protein, 10 aa, Artificial Sequence
  Description of Artificial Sequence: Synthetic epitope
ATDTEILERK

SEQ ID NO: 2239 - protein, 10 aa, Artificial Sequence
  Description of Artificial Sequence: Synthetic epitope
ATEAQVTQEL

SEQ ID NO: 2240 - protein, 10 aa, Artificial Sequence
  Description of Artificial Sequence: Synthetic epitope
ATEASETQSG

SEQ ID NO: 2241 - protein, 10 aa, Artificial Sequence
  Description of Artificial Sequence: Synthetic epitope
ATEAVSMAAQ

SEQ ID NO: 2242 - protein, 10 aa, Artificial Sequence
  Description of Artificial Sequence: Synthetic epitope
ATEDITSSIS

SEQ ID NO: 2243 - protein, 10 aa, Artificial Sequence
  Description of Artificial Sequence: Synthetic epitope
ATEDQLSERP

SEQ ID NO: 2244 - protein, 10 aa, Artificial Sequence
  Description of Artificial Sequence: Synthetic epitope
ATEDQQHKQE

SEQ ID NO: 2245 - protein, 10 aa, Artificial Sequence
  Description of Artificial Sequence: Synthetic epitope
ATEEKLLDLD

SEQ ID NO: 2246 - protein, 10 aa, Artificial Sequence
  Description of Artificial Sequence: Synthetic epitope
ATEEQVSEPK

SEQ ID NO: 2247 - protein, 10 aa, Artificial Sequence
  Description of Artificial Sequence: Synthetic epitope
ATETAAVGAD

SEQ ID NO: 2248 - protein, 10 aa, Artificial Sequence
  Description of Artificial Sequence: Synthetic epitope
ATETSEAWDP

SEQ ID NO: 2249 - protein, 10 aa, Artificial Sequence
  Description of Artificial Sequence: Synthetic epitope
ATETTQLTAD

SEQ ID NO: 2250 - protein, 10 aa, Artificial Sequence
  Description of Artificial Sequence: Synthetic epitope
ATETTSLSSK

SEQ ID NO: 2251 - protein, 10 aa, Artificial Sequence
  Description of Artificial Sequence: Synthetic epitope
ATFLKEAAKE

SEQ ID NO: 2252 - protein, 10 aa, Artificial Sequence
  Description of Artificial Sequence: Synthetic epitope
ATFLSSEAAN

SEQ ID NO: 2253 - protein, 10 aa, Artificial Sequence
  Description of Artificial Sequence: Synthetic epitope
ATFNKSTLVE

SEQ ID NO: 2254 - protein, 10 aa, Artificial Sequence
  Description of Artificial Sequence: Synthetic epitope
ATFRAITSTL

SEQ ID NO: 2255 - protein, 10 aa, Artificial Sequence
  Description of Artificial Sequence: Synthetic epitope
ATFRANDHQH

SEQ ID NO: 2256 - protein, 10 aa, Artificial Sequence
  Description of Artificial Sequence: Synthetic epitope
ATFSANPEAK

SEQ ID NO: 2257 - protein, 10 aa, Artificial Sequence
  Description of Artificial Sequence: Synthetic epitope
ATFSVTEGKK

SEQ ID NO: 2258 - protein, 10 aa, Artificial Sequence
  Description of Artificial Sequence: Synthetic epitope
ATFTAASRDA

SEQ ID NO: 2259 - protein, 10 aa, Artificial Sequence
  Description of Artificial Sequence: Synthetic epitope
ATGATRAVDG

SEQ ID NO: 2260 - protein, 10 aa, Artificial Sequence
  Description of Artificial Sequence: Synthetic epitope
ATGAVAENDS

SEQ ID NO: 2261 - protein, 10 aa, Artificial Sequence
  Description of Artificial Sequence: Synthetic epitope
ATGEESTQAE

SEQ ID NO: 2262 - protein, 10 aa, Artificial Sequence
  Description of Artificial Sequence: Synthetic epitope
ATGESEKQFQ

SEQ ID NO: 2263 - protein, 10 aa, Artificial Sequence
  Description of Artificial Sequence: Synthetic epitope
ATGKLTKAKR

SEQ ID NO: 2264 - protein, 10 aa, Artificial Sequence
  Description of Artificial Sequence: Synthetic epitope
ATGKMLSLAE

SEQ ID NO: 2265 - protein, 10 aa, Artificial Sequence
  Description of Artificial Sequence: Synthetic epitope
ATGMTKKTYV

SEQ ID NO: 2266 - protein, 10 aa, Artificial Sequence
  Description of Artificial Sequence: Synthetic epitope
ATGRAQALVT

SEQ ID NO: 2267 - protein, 10 aa, Artificial Sequence
  Description of Artificial Sequence: Synthetic epitope
ATGRNMEQFQ

SEQ ID NO: 2268 - protein, 10 aa, Artificial Sequence
  Description of Artificial Sequence: Synthetic epitope
ATHALSAPAE

SEQ ID NO: 2269 - protein, 10 aa, Artificial Sequence
  Description of Artificial Sequence: Synthetic epitope
ATHLQKAPAR

SEQ ID NO: 2270 - protein, 10 aa, Artificial Sequence
  Description of Artificial Sequence: Synthetic epitope
ATHMRPYRKK

SEQ ID NO: 2271 - protein, 10 aa, Artificial Sequence
  Description of Artificial Sequence: Synthetic epitope
ATIAKQKAEI

SEQ ID NO: 2272 - protein, 10 aa, Artificial Sequence
  Description of Artificial Sequence: Synthetic epitope
ATIASAVSKA

SEQ ID NO: 2273 - protein, 10 aa, Artificial Sequence
  Description of Artificial Sequence: Synthetic epitope
ATIINSSTSI

SEQ ID NO: 2274 - protein, 10 aa, Artificial Sequence
  Description of Artificial Sequence: Synthetic epitope
ATIITQLKLE

SEQ ID NO: 2275 - protein, 10 aa, Artificial Sequence
  Description of Artificial Sequence: Synthetic epitope
ATIKDASLQP

SEQ ID NO: 2276 - protein, 10 aa, Artificial Sequence
  Description of Artificial Sequence: Synthetic epitope
ATIKSMKEEG

SEQ ID NO: 2277 - protein, 10 aa, Artificial Sequence
  Description of Artificial Sequence: Synthetic epitope
ATIPREVEME

SEQ ID NO: 2278 - protein, 10 aa, Artificial Sequence
  Description of Artificial Sequence: Synthetic epitope
ATKDNQIDVD

SEQ ID NO: 2279 - protein, 10 aa, Artificial Sequence
  Description of Artificial Sequence: Synthetic epitope
ATKEIQLHQM

SEQ ID NO: 2280 - protein, 10 aa, Artificial Sequence
  Description of Artificial Sequence: Synthetic epitope
ATKKQPQNKS

SEQ ID NO: 2281 - protein, 10 aa, Artificial Sequence
  Description of Artificial Sequence: Synthetic epitope
ATKQKGTQLH

SEQ ID NO: 2282 - protein, 10 aa, Artificial Sequence
  Description of Artificial Sequence: Synthetic epitope
ATKSLSQKQD

SEQ ID NO: 2283 - protein, 10 aa, Artificial Sequence
  Description of Artificial Sequence: Synthetic epitope
ATKTKTLQGP

SEQ ID NO: 2284 - protein, 10 aa, Artificial Sequence
  Description of Artificial Sequence: Synthetic epitope
ATKVPKTERK

SEQ ID NO: 2285 - protein, 10 aa, Artificial Sequence
  Description of Artificial Sequence: Synthetic epitope
ATKVTADVIN

SEQ ID NO: 2286 - protein, 10 aa, Artificial Sequence
  Description of Artificial Sequence: Synthetic epitope
ATKYNSEVVD

SEQ ID NO: 2287 - protein, 10 aa, Artificial Sequence
  Description of Artificial Sequence: Synthetic epitope
ATLEGQSTAA

SEQ ID NO: 2288 - protein, 10 aa, Artificial Sequence
  Description of Artificial Sequence: Synthetic epitope
ATLEILTLKD

SEQ ID NO: 2289 - protein, 10 aa, Artificial Sequence
  Description of Artificial Sequence: Synthetic epitope
ATLEILTLKD

SEQ ID NO: 2290 - protein, 10 aa, Artificial Sequence
  Description of Artificial Sequence: Synthetic epitope
ATLEITKRLV

SEQ ID NO: 2291 - protein, 10 aa, Artificial Sequence
  Description of Artificial Sequence: Synthetic epitope
ATLEMLFPSR

SEQ ID NO: 2292 - protein, 10 aa, Artificial Sequence
  Description of Artificial Sequence: Synthetic epitope
ATLEQDSAKK

SEQ ID NO: 2293 - protein, 10 aa, Artificial Sequence
  Description of Artificial Sequence: Synthetic epitope
ATLHAQVADM

SEQ ID NO: 2294 - protein, 10 aa, Artificial Sequence
  Description of Artificial Sequence: Synthetic epitope
ATLKIASQTK

SEQ ID NO: 2295 - protein, 10 aa, Artificial Sequence
  Description of Artificial Sequence: Synthetic epitope
ATLKSTKASS

SEQ ID NO: 2296 - protein, 10 aa, Artificial Sequence
  Description of Artificial Sequence: Synthetic epitope
ATLKVSTIKR

SEQ ID NO: 2297 - protein, 10 aa, Artificial Sequence
  Description of Artificial Sequence: Synthetic epitope
ATLPSKRSSN

SEQ ID NO: 2298 - protein, 10 aa, Artificial Sequence
  Description of Artificial Sequence: Synthetic epitope
ATLPSLAIQS

SEQ ID NO: 2299 - protein, 10 aa, Artificial Sequence
  Description of Artificial Sequence: Synthetic epitope
ATLQASSQAA

SEQ ID NO: 2300 - protein, 10 aa, Artificial Sequence
  Description of Artificial Sequence: Synthetic epitope
ATLSKAALNE

SEQ ID NO: 2301 - protein, 10 aa, Artificial Sequence
  Description of Artificial Sequence: Synthetic epitope
ATLSKVEGTD

SEQ ID NO: 2302 - protein, 10 aa, Artificial Sequence
  Description of Artificial Sequence: Synthetic epitope
ATLTLKQFVR

SEQ ID NO: 2303 - protein, 10 aa, Artificial Sequence
  Description of Artificial Sequence: Synthetic epitope
ATLTQNADEA

SEQ ID NO: 2304 - protein, 10 aa, Artificial Sequence
  Description of Artificial Sequence: Synthetic epitope
ATLTSLLAQA

SEQ ID NO: 2305 - protein, 10 aa, Artificial Sequence
  Description of Artificial Sequence: Synthetic epitope
ATLYDSPKDQ

SEQ ID NO: 2306 - protein, 10 aa, Artificial Sequence
  Description of Artificial Sequence: Synthetic epitope
ATMESLSDTE

SEQ ID NO: 2307 - protein, 10 aa, Artificial Sequence
  Description of Artificial Sequence: Synthetic epitope
ATMKATSVKG

SEQ ID NO: 2308 - protein, 10 aa, Artificial Sequence
  Description of Artificial Sequence: Synthetic epitope
ATMLLKKQLP

SEQ ID NO: 2309 - protein, 10 aa, Artificial Sequence
  Description of Artificial Sequence: Synthetic epitope
ATMLWKSKGR

SEQ ID NO: 2310 - protein, 10 aa, Artificial Sequence
  Description of Artificial Sequence: Synthetic epitope
ATMQTVRAAD

SEQ ID NO: 2311 - protein, 10 aa, Artificial Sequence
  Description of Artificial Sequence: Synthetic epitope
ATNDKLEVLT

SEQ ID NO: 2312 - protein, 10 aa, Artificial Sequence
  Description of Artificial Sequence: Synthetic epitope
ATNRSVQAHE

SEQ ID NO: 2313 - protein, 10 aa, Artificial Sequence
  Description of Artificial Sequence: Synthetic epitope
ATPAKPTKSE

SEQ ID NO: 2314 - protein, 10 aa, Artificial Sequence
  Description of Artificial Sequence: Synthetic epitope
ATPAVSGSNS

SEQ ID NO: 2315 - protein, 10 aa, Artificial Sequence
  Description of Artificial Sequence: Synthetic epitope
ATPKKASKPK

SEQ ID NO: 2316 - protein, 10 aa, Artificial Sequence
  Description of Artificial Sequence: Synthetic epitope
ATPQAQSSQP

SEQ ID NO: 2317 - protein, 10 aa, Artificial Sequence
  Description of Artificial Sequence: Synthetic epitope
ATPTATQAGH

SEQ ID NO: 2318 - protein, 10 aa, Artificial Sequence
  Description of Artificial Sequence: Synthetic epitope
ATPTSLMEAQ

SEQ ID NO: 2319 - protein, 10 aa, Artificial Sequence
  Description of Artificial Sequence: Synthetic epitope
ATQLTSRYQA

SEQ ID NO: 2320 - protein, 10 aa, Artificial Sequence
  Description of Artificial Sequence: Synthetic epitope
ATQMVAAQLA

SEQ ID NO: 2321 - protein, 10 aa, Artificial Sequence
  Description of Artificial Sequence: Synthetic epitope
ATQQEASGHP

SEQ ID NO: 2322 - protein, 10 aa, Artificial Sequence
  Description of Artificial Sequence: Synthetic epitope
ATQQSSQADE

SEQ ID NO: 2323 - protein, 10 aa, Artificial Sequence
  Description of Artificial Sequence: Synthetic epitope
ATQSGSQDLK

SEQ ID NO: 2324 - protein, 10 aa, Artificial Sequence
  Description of Artificial Sequence: Synthetic epitope
ATQSHQVDKQ

SEQ ID NO: 2325 - protein, 10 aa, Artificial Sequence
  Description of Artificial Sequence: Synthetic epitope
ATQVKFKMSE

SEQ ID NO: 2326 - protein, 10 aa, Artificial Sequence
  Description of Artificial Sequence: Synthetic epitope
ATREQERNRP

SEQ ID NO: 2327 - protein, 10 aa, Artificial Sequence
  Description of Artificial Sequence: Synthetic epitope
ATRIFASNLK

SEQ ID NO: 2328 - protein, 10 aa, Artificial Sequence
  Description of Artificial Sequence: Synthetic epitope
ATRQAHDLSP

SEQ ID NO: 2329 - protein, 10 aa, Artificial Sequence
  Description of Artificial Sequence: Synthetic epitope
ATRSTTQSNR

SEQ ID NO: 2330 - protein, 10 aa, Artificial Sequence
  Description of Artificial Sequence: Synthetic epitope
ATSAAQLKLS

SEQ ID NO: 2331 - protein, 10 aa, Artificial Sequence
  Description of Artificial Sequence: Synthetic epitope
ATSAKILRNP

SEQ ID NO: 2332 - protein, 10 aa, Artificial Sequence
  Description of Artificial Sequence: Synthetic epitope
ATSAVTVTRG

SEQ ID NO: 2333 - protein, 10 aa, Artificial Sequence
  Description of Artificial Sequence: Synthetic epitope
ATSDKANKLE

SEQ ID NO: 2334 - protein, 10 aa, Artificial Sequence
  Description of Artificial Sequence: Synthetic epitope
ATSDSEQSFD

SEQ ID NO: 2335 - protein, 10 aa, Artificial Sequence
  Description of Artificial Sequence: Synthetic epitope
ATSDTQDSMS

SEQ ID NO: 2336 - protein, 10 aa, Artificial Sequence
  Description of Artificial Sequence: Synthetic epitope
ATSESSQSEA

SEQ ID NO: 2337 - protein, 10 aa, Artificial Sequence
  Description of Artificial Sequence: Synthetic epitope
ATSNANQDNQ

SEQ ID NO: 2338 - protein, 10 aa, Artificial Sequence
  Description of Artificial Sequence: Synthetic epitope
ATSPASKAAR

SEQ ID NO: 2339 - protein, 10 aa, Artificial Sequence
  Description of Artificial Sequence: Synthetic epitope
ATSQSSGFST

SEQ ID NO: 2340 - protein, 10 aa, Artificial Sequence
  Description of Artificial Sequence: Synthetic epitope
ATSRAGVRAR

SEQ ID NO: 2341 - protein, 10 aa, Artificial Sequence
  Description of Artificial Sequence: Synthetic epitope
ATSREIMWIN

SEQ ID NO: 2342 - protein, 10 aa, Artificial Sequence
  Description of Artificial Sequence: Synthetic epitope
ATSRTAKQRS

SEQ ID NO: 2343 - protein, 10 aa, Artificial Sequence
  Description of Artificial Sequence: Synthetic epitope
ATSSQKASLL

SEQ ID NO: 2344 - protein, 10 aa, Artificial Sequence
  Description of Artificial Sequence: Synthetic epitope
ATSTLQTSVA

SEQ ID NO: 2345 - protein, 10 aa, Artificial Sequence
  Description of Artificial Sequence: Synthetic epitope
ATSVFSIAIP

SEQ ID NO: 2346 - protein, 10 aa, Artificial Sequence
  Description of Artificial Sequence: Synthetic epitope
ATSVSVQDDR

SEQ ID NO: 2347 - protein, 10 aa, Artificial Sequence
  Description of Artificial Sequence: Synthetic epitope
ATTISNQNGS

SEQ ID NO: 2348 - protein, 10 aa, Artificial Sequence
  Description of Artificial Sequence: Synthetic epitope
ATTKTSETNH

SEQ ID NO: 2349 - protein, 10 aa, Artificial Sequence
  Description of Artificial Sequence: Synthetic epitope
ATTLAYLKRV

SEQ ID NO: 2350 - protein, 10 aa, Artificial Sequence
  Description of Artificial Sequence: Synthetic epitope
ATTPTATSSK

SEQ ID NO: 2351 - protein, 10 aa, Artificial Sequence
  Description of Artificial Sequence: Synthetic epitope
ATTQATRQES

SEQ ID NO: 2352 - protein, 10 aa, Artificial Sequence
  Description of Artificial Sequence: Synthetic epitope
ATTSESSTTS

SEQ ID NO: 2353 - protein, 10 aa, Artificial Sequence
  Description of Artificial Sequence: Synthetic epitope
ATTSLVQRRK

SEQ ID NO: 2354 - protein, 10 aa, Artificial Sequence
  Description of Artificial Sequence: Synthetic epitope
ATTVAAVQSD

SEQ ID NO: 2355 - protein, 10 aa, Artificial Sequence
  Description of Artificial Sequence: Synthetic epitope
ATTVKASPPA

SEQ ID NO: 2356 - protein, 10 aa, Artificial Sequence
  Description of Artificial Sequence: Synthetic epitope
ATTVKFAKYD

SEQ ID NO: 2357 - protein, 10 aa, Artificial Sequence
  Description of Artificial Sequence: Synthetic epitope
ATTVNELEEL

SEQ ID NO: 2358 - protein, 10 aa, Artificial Sequence
  Description of Artificial Sequence: Synthetic epitope
ATVAKSIVES

SEQ ID NO: 2359 - protein, 10 aa, Artificial Sequence
  Description of Artificial Sequence: Synthetic epitope
ATVGETKGKD

SEQ ID NO: 2360 - protein, 10 aa, Artificial Sequence
  Description of Artificial Sequence: Synthetic epitope
ATVKLTEATQ

SEQ ID NO: 2361 - protein, 10 aa, Artificial Sequence
  Description of Artificial Sequence: Synthetic epitope
ATVNAWAEQT

SEQ ID NO: 2362 - protein, 10 aa, Artificial Sequence
  Description of Artificial Sequence: Synthetic epitope
ATVSEKAAFQ

SEQ ID NO: 2363 - protein, 10 aa, Artificial Sequence
  Description of Artificial Sequence: Synthetic epitope
ATVSSDTSTR

SEQ ID NO: 2364 - protein, 10 aa, Artificial Sequence
  Description of Artificial Sequence: Synthetic epitope
ATWISSDTES

SEQ ID NO: 2365 - protein, 10 aa, Artificial Sequence
  Description of Artificial Sequence: Synthetic epitope
ATWLSVQQTS

SEQ ID NO: 2366 - protein, 10 aa, Artificial Sequence
  Description of Artificial Sequence: Synthetic epitope
ATWTSVTRPI

SEQ ID NO: 2367 - protein, 10 aa, Artificial Sequence
  Description of Artificial Sequence: Synthetic epitope
ATYKRSRTRE

SEQ ID NO: 2368 - protein, 10 aa, Artificial Sequence
  Description of Artificial Sequence: Synthetic epitope
ATYKSDRQRE

SEQ ID NO: 2369 - protein, 10 aa, Artificial Sequence
  Description of Artificial Sequence: Synthetic epitope
ATYQDQKNKK

SEQ ID NO: 2370 - protein, 10 aa, Artificial Sequence
  Description of Artificial Sequence: Synthetic epitope
ATYTPQAPKK

SEQ ID NO: 2371 - protein, 10 aa, Artificial Sequence
  Description of Artificial Sequence: Synthetic epitope
AVAASTEWGA

SEQ ID NO: 2372 - protein, 10 aa, Artificial Sequence
  Description of Artificial Sequence: Synthetic epitope
AVADGEVEQN

SEQ ID NO: 2373 - protein, 10 aa, Artificial Sequence
  Description of Artificial Sequence: Synthetic epitope
AVADSVLTKV

SEQ ID NO: 2374 - protein, 10 aa, Artificial Sequence
  Description of Artificial Sequence: Synthetic epitope
AVAEDGGLKK

SEQ ID NO: 2375 - protein, 10 aa, Artificial Sequence
  Description of Artificial Sequence: Synthetic epitope
AVAESGQQAA

SEQ ID NO: 2376 - protein, 10 aa, Artificial Sequence
  Description of Artificial Sequence: Synthetic epitope
AVAGDVVSKV

SEQ ID NO: 2377 - protein, 10 aa, Artificial Sequence
  Description of Artificial Sequence: Synthetic epitope
AVAIQSAVGT

SEQ ID NO: 2378 - protein, 10 aa, Artificial Sequence
  Description of Artificial Sequence: Synthetic epitope
AVAIVSTPRS

SEQ ID NO: 2379 - protein, 10 aa, Artificial Sequence
  Description of Artificial Sequence: Synthetic epitope
AVAKTKAGKK

SEQ ID NO: 2380 - protein, 10 aa, Artificial Sequence
  Description of Artificial Sequence: Synthetic epitope
AVANAELGKA

SEQ ID NO: 2381 - protein, 10 aa, Artificial Sequence
  Description of Artificial Sequence: Synthetic epitope
AVAPVASALE

SEQ ID NO: 2382 - protein, 10 aa, Artificial Sequence
  Description of Artificial Sequence: Synthetic epitope
AVAQAPEATV

SEQ ID NO: 2383 - protein, 10 aa, Artificial Sequence
  Description of Artificial Sequence: Synthetic epitope
AVASAYQRFE

SEQ ID NO: 2384 - protein, 10 aa, Artificial Sequence
  Description of Artificial Sequence: Synthetic epitope
AVASGMALHF

SEQ ID NO: 2385 - protein, 10 aa, Artificial Sequence
  Description of Artificial Sequence: Synthetic epitope
AVDERMSKQE

SEQ ID NO: 2386 - protein, 10 aa, Artificial Sequence
  Description of Artificial Sequence: Synthetic epitope
AVDKMAGEVK

SEQ ID NO: 2387 - protein, 10 aa, Artificial Sequence
  Description of Artificial Sequence: Synthetic epitope
AVDQESADQV

SEQ ID NO: 2388 - protein, 10 aa, Artificial Sequence
  Description of Artificial Sequence: Synthetic epitope
AVDQTYKLKA

SEQ ID NO: 2389 - protein, 10 aa, Artificial Sequence
  Description of Artificial Sequence: Synthetic epitope
AVDSVVSLLD

SEQ ID NO: 2390 - protein, 10 aa, Artificial Sequence
  Description of Artificial Sequence: Synthetic epitope
AVDVFSVEGA

SEQ ID NO: 2391 - protein, 10 aa, Artificial Sequence
  Description of Artificial Sequence: Synthetic epitope
AVEAGSEVSE

SEQ ID NO: 2392 - protein, 10 aa, Artificial Sequence
  Description of Artificial Sequence: Synthetic epitope
AVEAREIMWF

SEQ ID NO: 2393 - protein, 10 aa, Artificial Sequence
  Description of Artificial Sequence: Synthetic epitope
AVEDFVVDIV

SEQ ID NO: 2394 - protein, 10 aa, Artificial Sequence
  Description of Artificial Sequence: Synthetic epitope
AVEGTQSRAS

SEQ ID NO: 2395 - protein, 10 aa, Artificial Sequence
  Description of Artificial Sequence: Synthetic epitope
AVEIEALTPH

SEQ ID NO: 2396 - protein, 10 aa, Artificial Sequence
  Description of Artificial Sequence: Synthetic epitope
AVELSKAEGV

SEQ ID NO: 2397 - protein, 10 aa, Artificial Sequence
  Description of Artificial Sequence: Synthetic epitope
AVENSKSTGA

SEQ ID NO: 2398 - protein, 10 aa, Artificial Sequence
  Description of Artificial Sequence: Synthetic epitope
AVERQAALES

SEQ ID NO: 2399 - protein, 10 aa, Artificial Sequence
  Description of Artificial Sequence: Synthetic epitope
AVESAGVSSA

SEQ ID NO: 2400 - protein, 10 aa, Artificial Sequence
  Description of Artificial Sequence: Synthetic epitope
AVESAVAGPQ

SEQ ID NO: 2401 - protein, 10 aa, Artificial Sequence
  Description of Artificial Sequence: Synthetic epitope
AVESVDSSEE

SEQ ID NO: 2402 - protein, 10 aa, Artificial Sequence
  Description of Artificial Sequence: Synthetic epitope
AVEVAEEKEQ

SEQ ID NO: 2403 - protein, 10 aa, Artificial Sequence
  Description of Artificial Sequence: Synthetic epitope
AVEVKKSQHK

SEQ ID NO: 2404 - protein, 10 aa, Artificial Sequence
  Description of Artificial Sequence: Synthetic epitope
AVFKKQLQMK

SEQ ID NO: 2405 - protein, 10 aa, Artificial Sequence
  Description of Artificial Sequence: Synthetic epitope
AVFPETAQQD

SEQ ID NO: 2406 - protein, 10 aa, Artificial Sequence
  Description of Artificial Sequence: Synthetic epitope
AVGKTTSFAG

SEQ ID NO: 2407 - protein, 10 aa, Artificial Sequence
  Description of Artificial Sequence: Synthetic epitope
AVGLKSTQNK

SEQ ID NO: 2408 - protein, 10 aa, Artificial Sequence
  Description of Artificial Sequence: Synthetic epitope
AVGSSMSGEG

SEQ ID NO: 2409 - protein, 10 aa, Artificial Sequence
  Description of Artificial Sequence: Synthetic epitope
AVGTISETHR

SEQ ID NO: 2410 - protein, 10 aa, Artificial Sequence
  Description of Artificial Sequence: Synthetic epitope
AVGVASVGVG

SEQ ID NO: 2411 - protein, 10 aa, Artificial Sequence
  Description of Artificial Sequence: Synthetic epitope
AVHTRRENPA

SEQ ID NO: 2412 - protein, 10 aa, Artificial Sequence
  Description of Artificial Sequence: Synthetic epitope
AVIKEKIEEK

SEQ ID NO: 2413 - protein, 10 aa, Artificial Sequence
  Description of Artificial Sequence: Synthetic epitope
AVILTVESEE

SEQ ID NO: 2414 - protein, 10 aa, Artificial Sequence
  Description of Artificial Sequence: Synthetic epitope
AVINEVEVQQ

SEQ ID NO: 2415 - protein, 10 aa, Artificial Sequence
  Description of Artificial Sequence: Synthetic epitope
AVISSAGTHS

SEQ ID NO: 2416 - protein, 10 aa, Artificial Sequence
  Description of Artificial Sequence: Synthetic epitope
AVISVVGSRH

SEQ ID NO: 2417 - protein, 10 aa, Artificial Sequence
  Description of Artificial Sequence: Synthetic epitope
AVITKELIEI

SEQ ID NO: 2418 - protein, 10 aa, Artificial Sequence
  Description of Artificial Sequence: Synthetic epitope
AVKEEITSIY

SEQ ID NO: 2419 - protein, 10 aa, Artificial Sequence
  Description of Artificial Sequence: Synthetic epitope
AVKEGKTEKT

SEQ ID NO: 2420 - protein, 10 aa, Artificial Sequence
  Description of Artificial Sequence: Synthetic epitope
AVKMLVQLIN

SEQ ID NO: 2421 - protein, 10 aa, Artificial Sequence
  Description of Artificial Sequence: Synthetic epitope
AVKSLETEIL

SEQ ID NO: 2422 - protein, 10 aa, Artificial Sequence
  Description of Artificial Sequence: Synthetic epitope
AVKTDSTTEV

SEQ ID NO: 2423 - protein, 10 aa, Artificial Sequence
  Description of Artificial Sequence: Synthetic epitope
AVKTEAVSGD

SEQ ID NO: 2424 - protein, 10 aa, Artificial Sequence
  Description of Artificial Sequence: Synthetic epitope
AVKTVFKATL

SEQ ID NO: 2425 - protein, 10 aa, Artificial Sequence
  Description of Artificial Sequence: Synthetic epitope
AVLAAESMVV

SEQ ID NO: 2426 - protein, 10 aa, Artificial Sequence
  Description of Artificial Sequence: Synthetic epitope
AVLHQHKEWI

SEQ ID NO: 2427 - protein, 10 aa, Artificial Sequence
  Description of Artificial Sequence: Synthetic epitope
AVLKHDDQHT

SEQ ID NO: 2428 - protein, 10 aa, Artificial Sequence
  Description of Artificial Sequence: Synthetic epitope
AVLKTMEEKQ

SEQ ID NO: 2429 - protein, 10 aa, Artificial Sequence
  Description of Artificial Sequence: Synthetic epitope
AVLNQSAESL

SEQ ID NO: 2430 - protein, 10 aa, Artificial Sequence
  Description of Artificial Sequence: Synthetic epitope
AVLRELSTQA

SEQ ID NO: 2431 - protein, 10 aa, Artificial Sequence
  Description of Artificial Sequence: Synthetic epitope
AVLSRLGANM

SEQ ID NO: 2432 - protein, 10 aa, Artificial Sequence
  Description of Artificial Sequence: Synthetic epitope
AVLSTQLADA

SEQ ID NO: 2433 - protein, 10 aa, Artificial Sequence
  Description of Artificial Sequence: Synthetic epitope
AVLTAEITSK

SEQ ID NO: 2434 - protein, 10 aa, Artificial Sequence
  Description of Artificial Sequence: Synthetic epitope
AVLTAHYSAV

SEQ ID NO: 2435 - protein, 10 aa, Artificial Sequence
  Description of Artificial Sequence: Synthetic epitope
AVMAALGVAV

SEQ ID NO: 2436 - protein, 10 aa, Artificial Sequence
  Description of Artificial Sequence: Synthetic epitope
AVMETAVEAL

SEQ ID NO: 2437 - protein, 10 aa, Artificial Sequence
  Description of Artificial Sequence: Synthetic epitope
AVMEYEKIAE

SEQ ID NO: 2438 - protein, 10 aa, Artificial Sequence
  Description of Artificial Sequence: Synthetic epitope
AVMLKTAESH

SEQ ID NO: 2439 - protein, 10 aa, Artificial Sequence
  Description of Artificial Sequence: Synthetic epitope
AVMPEPSMTK

SEQ ID NO: 2440 - protein, 10 aa, Artificial Sequence
  Description of Artificial Sequence: Synthetic epitope
AVMTAMGNAL

SEQ ID NO: 2441 - protein, 10 aa, Artificial Sequence
  Description of Artificial Sequence: Synthetic epitope
AVNKDGKDSE

SEQ ID NO: 2442 - protein, 10 aa, Artificial Sequence
  Description of Artificial Sequence: Synthetic epitope
AVNKKSKKQT

SEQ ID NO: 2443 - protein, 10 aa, Artificial Sequence
  Description of Artificial Sequence: Synthetic epitope
AVNKLAEIMN

SEQ ID NO: 2444 - protein, 10 aa, Artificial Sequence
  Description of Artificial Sequence: Synthetic epitope
AVNRVDPRSK

SEQ ID NO: 2445 - protein, 10 aa, Artificial Sequence
  Description of Artificial Sequence: Synthetic epitope
AVNSQSESIS

SEQ ID NO: 2446 - protein, 10 aa, Artificial Sequence
  Description of Artificial Sequence: Synthetic epitope
AVNTSEYKIL

SEQ ID NO: 2447 - protein, 10 aa, Artificial Sequence
  Description of Artificial Sequence: Synthetic epitope
AVNVALIRDT

SEQ ID NO: 2448 - protein, 10 aa, Artificial Sequence
  Description of Artificial Sequence: Synthetic epitope
AVPIQMTQEK

SEQ ID NO: 2449 - protein, 10 aa, Artificial Sequence
  Description of Artificial Sequence: Synthetic epitope
AVPSATSLNK

SEQ ID NO: 2450 - protein, 10 aa, Artificial Sequence
  Description of Artificial Sequence: Synthetic epitope
AVPSRNTSKQ

SEQ ID NO: 2451 - protein, 10 aa, Artificial Sequence
  Description of Artificial Sequence: Synthetic epitope
AVPTADTRSQ

SEQ ID NO: 2452 - protein, 10 aa, Artificial Sequence
  Description of Artificial Sequence: Synthetic epitope
AVPVQNKMNP

SEQ ID NO: 2453 - protein, 10 aa, Artificial Sequence
  Description of Artificial Sequence: Synthetic epitope
AVQKNSEKYL

SEQ ID NO: 2454 - protein, 10 aa, Artificial Sequence
  Description of Artificial Sequence: Synthetic epitope
AVQQASLVSN

SEQ ID NO: 2455 - protein, 10 aa, Artificial Sequence
  Description of Artificial Sequence: Synthetic epitope
AVQQATIAAS

SEQ ID NO: 2456 - protein, 10 aa, Artificial Sequence
  Description of Artificial Sequence: Synthetic epitope
AVQREEGISE

SEQ ID NO: 2457 - protein, 10 aa, Artificial Sequence
  Description of Artificial Sequence: Synthetic epitope
AVQREYQLVV

SEQ ID NO: 2458 - protein, 10 aa, Artificial Sequence
  Description of Artificial Sequence: Synthetic epitope
AVQRVSKTQA

SEQ ID NO: 2459 - protein, 10 aa, Artificial Sequence
  Description of Artificial Sequence: Synthetic epitope
AVQSEQGEAG

SEQ ID NO: 2460 - protein, 10 aa, Artificial Sequence
  Description of Artificial Sequence: Synthetic epitope
AVQVIEKGKA

SEQ ID NO: 2461 - protein, 10 aa, Artificial Sequence
  Description of Artificial Sequence: Synthetic epitope
AVRAKATRIS

SEQ ID NO: 2462 - protein, 10 aa, Artificial Sequence
  Description of Artificial Sequence: Synthetic epitope
AVRKTGEFAI

SEQ ID NO: 2463 - protein, 10 aa, Artificial Sequence
  Description of Artificial Sequence: Synthetic epitope
AVRRAQTASS

SEQ ID NO: 2464 - protein, 10 aa, Artificial Sequence
  Description of Artificial Sequence: Synthetic epitope
AVRSSARLKA

SEQ ID NO: 2465 - protein, 10 aa, Artificial Sequence
  Description of Artificial Sequence: Synthetic epitope
AVRSSQGGSP

SEQ ID NO: 2466 - protein, 10 aa, Artificial Sequence
  Description of Artificial Sequence: Synthetic epitope
AVRTAAITLL

SEQ ID NO: 2467 - protein, 10 aa, Artificial Sequence
  Description of Artificial Sequence: Synthetic epitope
AVSDQESQDG

SEQ ID NO: 2468 - protein, 10 aa, Artificial Sequence
  Description of Artificial Sequence: Synthetic epitope
AVSENDSDEL

SEQ ID NO: 2469 - protein, 10 aa, Artificial Sequence
  Description of Artificial Sequence: Synthetic epitope
AVSEPASESV

SEQ ID NO: 2470 - protein, 10 aa, Artificial Sequence
  Description of Artificial Sequence: Synthetic epitope
AVSETTERTV

SEQ ID NO: 2471 - protein, 10 aa, Artificial Sequence
  Description of Artificial Sequence: Synthetic epitope
AVSGTSLSSD

SEQ ID NO: 2472 - protein, 10 aa, Artificial Sequence
  Description of Artificial Sequence: Synthetic epitope
AVSKRPEKVI

SEQ ID NO: 2473 - protein, 10 aa, Artificial Sequence
  Description of Artificial Sequence: Synthetic epitope
AVSKTVAVAS

SEQ ID NO: 2474 - protein, 10 aa, Artificial Sequence
  Description of Artificial Sequence: Synthetic epitope
AVSLSSPLLS

SEQ ID NO: 2475 - protein, 10 aa, Artificial Sequence
  Description of Artificial Sequence: Synthetic epitope
AVSNQINSSG

SEQ ID NO: 2476 - protein, 10 aa, Artificial Sequence
  Description of Artificial Sequence: Synthetic epitope
AVSRDFVSVL

SEQ ID NO: 2477 - protein, 10 aa, Artificial Sequence
  Description of Artificial Sequence: Synthetic epitope
AVSSRLSRHE

SEQ ID NO: 2478 - protein, 10 aa, Artificial Sequence
  Description of Artificial Sequence: Synthetic epitope
AVSTVSMQNI

SEQ ID NO: 2479 - protein, 10 aa, Artificial Sequence
  Description of Artificial Sequence: Synthetic epitope
AVSVLAAVRG

SEQ ID NO: 2480 - protein, 10 aa, Artificial Sequence
  Description of Artificial Sequence: Synthetic epitope
AVTANLIDSE

SEQ ID NO: 2481 - protein, 10 aa, Artificial Sequence
  Description of Artificial Sequence: Synthetic epitope
AVTANNTEES

SEQ ID NO: 2482 - protein, 10 aa, Artificial Sequence
  Description of Artificial Sequence: Synthetic epitope
AVTEAQVDDE

SEQ ID NO: 2483 - protein, 10 aa, Artificial Sequence
  Description of Artificial Sequence: Synthetic epitope
AVTIANSPSK

SEQ ID NO: 2484 - protein, 10 aa, Artificial Sequence
  Description of Artificial Sequence: Synthetic epitope
AVTKTAHTQQ

SEQ ID NO: 2485 - protein, 10 aa, Artificial Sequence
  Description of Artificial Sequence: Synthetic epitope
AVTKVQKKDG

SEQ ID NO: 2486 - protein, 10 aa, Artificial Sequence
  Description of Artificial Sequence: Synthetic epitope
AVTQTLPNAA

SEQ ID NO: 2487 - protein, 10 aa, Artificial Sequence
  Description of Artificial Sequence: Synthetic epitope
AVTRPDSESS

SEQ ID NO: 2488 - protein, 10 aa, Artificial Sequence
  Description of Artificial Sequence: Synthetic epitope
AVTSDQKSQK

SEQ ID NO: 2489 - protein, 10 aa, Artificial Sequence
  Description of Artificial Sequence: Synthetic epitope
AVTSQTKKMS

SEQ ID NO: 2490 - protein, 10 aa, Artificial Sequence
  Description of Artificial Sequence: Synthetic epitope
AVVETSSLSS

SEQ ID NO: 2491 - protein, 10 aa, Artificial Sequence
  Description of Artificial Sequence: Synthetic epitope
AVVGPAAEAK

SEQ ID NO: 2492 - protein, 10 aa, Artificial Sequence
  Description of Artificial Sequence: Synthetic epitope
AVVKKQEAKK

SEQ ID NO: 2493 - protein, 10 aa, Artificial Sequence
  Description of Artificial Sequence: Synthetic epitope
AVVKMDWREN

SEQ ID NO: 2494 - protein, 10 aa, Artificial Sequence
  Description of Artificial Sequence: Synthetic epitope
AVVKTQKKEG

SEQ ID NO: 2495 - protein, 10 aa, Artificial Sequence
  Description of Artificial Sequence: Synthetic epitope
AVVQLGKAQP

SEQ ID NO: 2496 - protein, 10 aa, Artificial Sequence
  Description of Artificial Sequence: Synthetic epitope
AVVQVRTIVG

SEQ ID NO: 2497 - protein, 10 aa, Artificial Sequence
  Description of Artificial Sequence: Synthetic epitope
AVVSKATTKP

SEQ ID NO: 2498 - protein, 10 aa, Artificial Sequence
  Description of Artificial Sequence: Synthetic epitope
AVVSNDMEEH

SEQ ID NO: 2499 - protein, 10 aa, Artificial Sequence
  Description of Artificial Sequence: Synthetic epitope
AVYHQDAFMQ

SEQ ID NO: 2500 - protein, 10 aa, Artificial Sequence
  Description of Artificial Sequence: Synthetic epitope
AVYMVVTSHG

SEQ ID NO: 2501 - protein, 10 aa, Artificial Sequence
  Description of Artificial Sequence: Synthetic epitope
AVYSSRLVMV

SEQ ID NO: 2502 - protein, 10 aa, Artificial Sequence
  Description of Artificial Sequence: Synthetic epitope
AWALAMAGED

SEQ ID NO: 2503 - protein, 10 aa, Artificial Sequence
  Description of Artificial Sequence: Synthetic epitope
AWARNQKKPF

SEQ ID NO: 2504 - protein, 10 aa, Artificial Sequence
  Description of Artificial Sequence: Synthetic epitope
AWARVSNITD

SEQ ID NO: 2505 - protein, 10 aa, Artificial Sequence
  Description of Artificial Sequence: Synthetic epitope
AWDKSSALQV

SEQ ID NO: 2506 - protein, 10 aa, Artificial Sequence
  Description of Artificial Sequence: Synthetic epitope
AWIHRTVGLI

SEQ ID NO: 2507 - protein, 10 aa, Artificial Sequence
  Description of Artificial Sequence: Synthetic epitope
AWKGKPSMIH

SEQ ID NO: 2508 - protein, 10 aa, Artificial Sequence
  Description of Artificial Sequence: Synthetic epitope
AWLSITQKAV

SEQ ID NO: 2509 - protein, 10 aa, Artificial Sequence
  Description of Artificial Sequence: Synthetic epitope
AWLSMEMEAL

SEQ ID NO: 2510 - protein, 10 aa, Artificial Sequence
  Description of Artificial Sequence: Synthetic epitope
AWMLDILKIV

SEQ ID NO: 2511 - protein, 10 aa, Artificial Sequence
  Description of Artificial Sequence: Synthetic epitope
AWTSETMSTP

SEQ ID NO: 2512 - protein, 10 aa, Artificial Sequence
  Description of Artificial Sequence: Synthetic epitope
AYAKEYRKYL

SEQ ID NO: 2513 - protein, 10 aa, Artificial Sequence
  Description of Artificial Sequence: Synthetic epitope
AYDQLKIQVA

SEQ ID NO: 2514 - protein, 10 aa, Artificial Sequence
  Description of Artificial Sequence: Synthetic epitope
AYEEVPTSMM

SEQ ID NO: 2515 - protein, 10 aa, Artificial Sequence
  Description of Artificial Sequence: Synthetic epitope
AYELYQIEIT

SEQ ID NO: 2516 - protein, 10 aa, Artificial Sequence
  Description of Artificial Sequence: Synthetic epitope
AYFITEEVPE

SEQ ID NO: 2517 - protein, 10 aa, Artificial Sequence
  Description of Artificial Sequence: Synthetic epitope
AYGPDQRAQK

SEQ ID NO: 2518 - protein, 10 aa, Artificial Sequence
  Description of Artificial Sequence: Synthetic epitope
AYGSASQLLR

SEQ ID NO: 2519 - protein, 10 aa, Artificial Sequence
  Description of Artificial Sequence: Synthetic epitope
AYHLQKMQDT

SEQ ID NO: 2520 - protein, 10 aa, Artificial Sequence
  Description of Artificial Sequence: Synthetic epitope
AYIGHSVEKH

SEQ ID NO: 2521 - protein, 10 aa, Artificial Sequence
  Description of Artificial Sequence: Synthetic epitope
AYIVQAKERS

SEQ ID NO: 2522 - protein, 10 aa, Artificial Sequence
  Description of Artificial Sequence: Synthetic epitope
AYKFRLVVKA

SEQ ID NO: 2523 - protein, 10 aa, Artificial Sequence
  Description of Artificial Sequence: Synthetic epitope
AYKKSIMKEE

SEQ ID NO: 2524 - protein, 10 aa, Artificial Sequence
  Description of Artificial Sequence: Synthetic epitope
AYLKEQHIET

SEQ ID NO: 2525 - protein, 10 aa, Artificial Sequence
  Description of Artificial Sequence: Synthetic epitope
AYLRNAAMGL

SEQ ID NO: 2526 - protein, 10 aa, Artificial Sequence
  Description of Artificial Sequence: Synthetic epitope
AYLSEAMKLT

SEQ ID NO: 2527 - protein, 10 aa, Artificial Sequence
  Description of Artificial Sequence: Synthetic epitope
AYNTLKTNLE

SEQ ID NO: 2528 - protein, 10 aa, Artificial Sequence
  Description of Artificial Sequence: Synthetic epitope
AYNTMNLAID

SEQ ID NO: 2529 - protein, 10 aa, Artificial Sequence
  Description of Artificial Sequence: Synthetic epitope
AYPAQAQSSR

SEQ ID NO: 2530 - protein, 10 aa, Artificial Sequence
  Description of Artificial Sequence: Synthetic epitope
AYQRHQKELG

SEQ ID NO: 2531 - protein, 10 aa, Artificial Sequence
  Description of Artificial Sequence: Synthetic epitope
AYTITTSSRM

SEQ ID NO: 2532 - protein, 10 aa, Artificial Sequence
  Description of Artificial Sequence: Synthetic epitope
AYTTFISGSA

SEQ ID NO: 2533 - protein, 10 aa, Artificial Sequence
  Description of Artificial Sequence: Synthetic epitope
AYVQQAVKGE

SEQ ID NO: 2534 - protein, 10 aa, Artificial Sequence
  Description of Artificial Sequence: Synthetic epitope
CDIGDFRRWM

SEQ ID NO: 2535 - protein, 10 aa, Artificial Sequence
  Description of Artificial Sequence: Synthetic epitope
CDLIKETKLS

SEQ ID NO: 2536 - protein, 10 aa, Artificial Sequence
  Description of Artificial Sequence: Synthetic epitope
CPTELVVKGE

SEQ ID NO: 2537 - protein, 10 aa, Artificial Sequence
  Description of Artificial Sequence: Synthetic epitope
CRLLTNAPRT

SEQ ID NO: 2538 - protein, 10 aa, Artificial Sequence
  Description of Artificial Sequence: Synthetic epitope
CRTKSTSDNE

SEQ ID NO: 2539 - protein, 10 aa, Artificial Sequence
  Description of Artificial Sequence: Synthetic epitope
CSDVETVPQT

SEQ ID NO: 2540 - protein, 10 aa, Artificial Sequence
  Description of Artificial Sequence: Synthetic epitope
CTSKLRVKPG

SEQ ID NO: 2541 - protein, 10 aa, Artificial Sequence
  Description of Artificial Sequence: Synthetic epitope
CVDNTLTRIR

SEQ ID NO: 2542 - protein, 10 aa, Artificial Sequence
  Description of Artificial Sequence: Synthetic epitope
CYETSTMKRK

SEQ ID NO: 2543 - protein, 10 aa, Artificial Sequence
  Description of Artificial Sequence: Synthetic epitope
DAAFSALTES

SEQ ID NO: 2544 - protein, 10 aa, Artificial Sequence
  Description of Artificial Sequence: Synthetic epitope
DAAIFEAKKS

SEQ ID NO: 2545 - protein, 10 aa, Artificial Sequence
  Description of Artificial Sequence: Synthetic epitope
DAAKRLNVTP

SEQ ID NO: 2546 - protein, 10 aa, Artificial Sequence
  Description of Artificial Sequence: Synthetic epitope
DAAKSEAQKQ

SEQ ID NO: 2547 - protein, 10 aa, Artificial Sequence
  Description of Artificial Sequence: Synthetic epitope
DAAKVEAKEP

SEQ ID NO: 2548 - protein, 10 aa, Artificial Sequence
  Description of Artificial Sequence: Synthetic epitope
DAALALLRKE

SEQ ID NO: 2549 - protein, 10 aa, Artificial Sequence
  Description of Artificial Sequence: Synthetic epitope
DAALAQKDSS

SEQ ID NO: 2550 - protein, 10 aa, Artificial Sequence
  Description of Artificial Sequence: Synthetic epitope
DAALAQMNSE

SEQ ID NO: 2551 - protein, 10 aa, Artificial Sequence
  Description of Artificial Sequence: Synthetic epitope
DAALDTVSET

SEQ ID NO: 2552 - protein, 10 aa, Artificial Sequence
  Description of Artificial Sequence: Synthetic epitope
DAALLSSLVA

SEQ ID NO: 2553 - protein, 10 aa, Artificial Sequence
  Description of Artificial Sequence: Synthetic epitope
DAALLYAKNM

SEQ ID NO: 2554 - protein, 10 aa, Artificial Sequence
  Description of Artificial Sequence: Synthetic epitope
DAAMAQAQGL

SEQ ID NO: 2555 - protein, 10 aa, Artificial Sequence
  Description of Artificial Sequence: Synthetic epitope
DAAMSLQKYG

SEQ ID NO: 2556 - protein, 10 aa, Artificial Sequence
  Description of Artificial Sequence: Synthetic epitope
DAANAILMSL

SEQ ID NO: 2557 - protein, 10 aa, Artificial Sequence
  Description of Artificial Sequence: Synthetic epitope
DAANNGPSKG

SEQ ID NO: 2558 - protein, 10 aa, Artificial Sequence
  Description of Artificial Sequence: Synthetic epitope
DAARSNRVTV

SEQ ID NO: 2559 - protein, 10 aa, Artificial Sequence
  Description of Artificial Sequence: Synthetic epitope
DAASIRSRAT

SEQ ID NO: 2560 - protein, 10 aa, Artificial Sequence
  Description of Artificial Sequence: Synthetic epitope
DAASLLASKQ

SEQ ID NO: 2561 - protein, 10 aa, Artificial Sequence
  Description of Artificial Sequence: Synthetic epitope
DAATATVESE

SEQ ID NO: 2562 - protein, 10 aa, Artificial Sequence
  Description of Artificial Sequence: Synthetic epitope
DAAVTAYITT

SEQ ID NO: 2563 - protein, 10 aa, Artificial Sequence
  Description of Artificial Sequence: Synthetic epitope
DADKEDIAES

SEQ ID NO: 2564 - protein, 10 aa, Artificial Sequence
  Description of Artificial Sequence: Synthetic epitope
DADKSVEKDK

SEQ ID NO: 2565 - protein, 10 aa, Artificial Sequence
  Description of Artificial Sequence: Synthetic epitope
DADLHVIMNA

SEQ ID NO: 2566 - protein, 10 aa, Artificial Sequence
  Description of Artificial Sequence: Synthetic epitope
DAEASDILKE

SEQ ID NO: 2567 - protein, 10 aa, Artificial Sequence
  Description of Artificial Sequence: Synthetic epitope
DAEDAHHQRE

SEQ ID NO: 2568 - protein, 10 aa, Artificial Sequence
  Description of Artificial Sequence: Synthetic epitope
DAEDMVALKV

SEQ ID NO: 2569 - protein, 10 aa, Artificial Sequence
  Description of Artificial Sequence: Synthetic epitope
DAELPRAKRN

SEQ ID NO: 2570 - protein, 10 aa, Artificial Sequence
  Description of Artificial Sequence: Synthetic epitope
DAESTAVHLE

SEQ ID NO: 2571 - protein, 10 aa, Artificial Sequence
  Description of Artificial Sequence: Synthetic epitope
DAETSSRTHF

SEQ ID NO: 2572 - protein, 10 aa, Artificial Sequence
  Description of Artificial Sequence: Synthetic epitope
DAETTNVAAD

SEQ ID NO: 2573 - protein, 10 aa, Artificial Sequence
  Description of Artificial Sequence: Synthetic epitope
DAEVEERRSW

SEQ ID NO: 2574 - protein, 10 aa, Artificial Sequence
  Description of Artificial Sequence: Synthetic epitope
DAEVVAIAQK

SEQ ID NO: 2575 - protein, 10 aa, Artificial Sequence
  Description of Artificial Sequence: Synthetic epitope
DAFAEALSRS

SEQ ID NO: 2576 - protein, 10 aa, Artificial Sequence
  Description of Artificial Sequence: Synthetic epitope
DAFENETAKK

SEQ ID NO: 2577 - protein, 10 aa, Artificial Sequence
  Description of Artificial Sequence: Synthetic epitope
DAFNKLTASS

SEQ ID NO: 2578 - protein, 10 aa, Artificial Sequence
  Description of Artificial Sequence: Synthetic epitope
DAFQHSSQSI

SEQ ID NO: 2579 - protein, 10 aa, Artificial Sequence
  Description of Artificial Sequence: Synthetic epitope
DAFRSEKSRQ

SEQ ID NO: 2580 - protein, 10 aa, Artificial Sequence
  Description of Artificial Sequence: Synthetic epitope
DAFRVNVIHA

SEQ ID NO: 2581 - protein, 10 aa, Artificial Sequence
  Description of Artificial Sequence: Synthetic epitope
DAFTLAPAST

SEQ ID NO: 2582 - protein, 10 aa, Artificial Sequence
  Description of Artificial Sequence: Synthetic epitope
DAGAALIQED

SEQ ID NO: 2583 - protein, 10 aa, Artificial Sequence
  Description of Artificial Sequence: Synthetic epitope
DAGASSTYPM

SEQ ID NO: 2584 - protein, 10 aa, Artificial Sequence
  Description of Artificial Sequence: Synthetic epitope
DAGATSEIKT

SEQ ID NO: 2585 - protein, 10 aa, Artificial Sequence
  Description of Artificial Sequence: Synthetic epitope
DAGKVDDARA

SEQ ID NO: 2586 - protein, 10 aa, Artificial Sequence
  Description of Artificial Sequence: Synthetic epitope
DAGNLNFEFQ

SEQ ID NO: 2587 - protein, 10 aa, Artificial Sequence
  Description of Artificial Sequence: Synthetic epitope
DAGQSEIASM

SEQ ID NO: 2588 - protein, 10 aa, Artificial Sequence
  Description of Artificial Sequence: Synthetic epitope
DAGQSTEEVQ

SEQ ID NO: 2589 - protein, 10 aa, Artificial Sequence
  Description of Artificial Sequence: Synthetic epitope
DAGTVQEMLR

SEQ ID NO: 2590 - protein, 10 aa, Artificial Sequence
  Description of Artificial Sequence: Synthetic epitope
DAIASSATTH

SEQ ID NO: 2591 - protein, 10 aa, Artificial Sequence
  Description of Artificial Sequence: Synthetic epitope
DAIIELQLLP

SEQ ID NO: 2592 - protein, 10 aa, Artificial Sequence
  Description of Artificial Sequence: Synthetic epitope
DAILEEMSST

SEQ ID NO: 2593 - protein, 10 aa, Artificial Sequence
  Description of Artificial Sequence: Synthetic epitope
DAILSKILVR

SEQ ID NO: 2594 - protein, 10 aa, Artificial Sequence
  Description of Artificial Sequence: Synthetic epitope
DAINITQPRF

SEQ ID NO: 2595 - protein, 10 aa, Artificial Sequence
  Description of Artificial Sequence: Synthetic epitope
DAIRRQGAYN

SEQ ID NO: 2596 - protein, 10 aa, Artificial Sequence
  Description of Artificial Sequence: Synthetic epitope
DAIRSNNINT

SEQ ID NO: 2597 - protein, 10 aa, Artificial Sequence
  Description of Artificial Sequence: Synthetic epitope
DAKEEKRAHY

SEQ ID NO: 2598 - protein, 10 aa, Artificial Sequence
  Description of Artificial Sequence: Synthetic epitope
DAKEQEMTEM

SEQ ID NO: 2599 - protein, 10 aa, Artificial Sequence
  Description of Artificial Sequence: Synthetic epitope
DAKKTFKESR

SEQ ID NO: 2600 - protein, 10 aa, Artificial Sequence
  Description of Artificial Sequence: Synthetic epitope
DAKLDVGTIE

SEQ ID NO: 2601 - protein, 10 aa, Artificial Sequence
  Description of Artificial Sequence: Synthetic epitope
DAKLKEIVTN

SEQ ID NO: 2602 - protein, 10 aa, Artificial Sequence
  Description of Artificial Sequence: Synthetic epitope
DAKLTAQSEE

SEQ ID NO: 2603 - protein, 10 aa, Artificial Sequence
  Description of Artificial Sequence: Synthetic epitope
DAKMAAVESQ

SEQ ID NO: 2604 - protein, 10 aa, Artificial Sequence
  Description of Artificial Sequence: Synthetic epitope
DAKPQGRDDR

SEQ ID NO: 2605 - protein, 10 aa, Artificial Sequence
  Description of Artificial Sequence: Synthetic epitope
DAKRTGMQKV

SEQ ID NO: 2606 - protein, 10 aa, Artificial Sequence
  Description of Artificial Sequence: Synthetic epitope
DAKSKEFAQI

SEQ ID NO: 2607 - protein, 10 aa, Artificial Sequence
  Description of Artificial Sequence: Synthetic epitope
DAKSTSIQVI

SEQ ID NO: 2608 - protein, 10 aa, Artificial Sequence
  Description of Artificial Sequence: Synthetic epitope
DAKVALDSVT

SEQ ID NO: 2609 - protein, 10 aa, Artificial Sequence
  Description of Artificial Sequence: Synthetic epitope
DALAQAAGLV

SEQ ID NO: 2610 - protein, 10 aa, Artificial Sequence
  Description of Artificial Sequence: Synthetic epitope
DALAQSGQEG

SEQ ID NO: 2611 - protein, 10 aa, Artificial Sequence
  Description of Artificial Sequence: Synthetic epitope
DALASQVKPP

SEQ ID NO: 2612 - protein, 10 aa, Artificial Sequence
  Description of Artificial Sequence: Synthetic epitope
DALASRGRIR

SEQ ID NO: 2613 - protein, 10 aa, Artificial Sequence
  Description of Artificial Sequence: Synthetic epitope
DALDQAQQVE

SEQ ID NO: 2614 - protein, 10 aa, Artificial Sequence
  Description of Artificial Sequence: Synthetic epitope
DALERTMGRA

SEQ ID NO: 2615 - protein, 10 aa, Artificial Sequence
  Description of Artificial Sequence: Synthetic epitope
DALESAQSEE

SEQ ID NO: 2616 - protein, 10 aa, Artificial Sequence
  Description of Artificial Sequence: Synthetic epitope
DALETLGERL

SEQ ID NO: 2617 - protein, 10 aa, Artificial Sequence
  Description of Artificial Sequence: Synthetic epitope
DALGAAFATR

SEQ ID NO: 2618 - protein, 10 aa, Artificial Sequence
  Description of Artificial Sequence: Synthetic epitope
DALHDSESPL

SEQ ID NO: 2619 - protein, 10 aa, Artificial Sequence
  Description of Artificial Sequence: Synthetic epitope
DALIETESKR

SEQ ID NO: 2620 - protein, 10 aa, Artificial Sequence
  Description of Artificial Sequence: Synthetic epitope
DALISLQMVY

SEQ ID NO: 2621 - protein, 10 aa, Artificial Sequence
  Description of Artificial Sequence: Synthetic epitope
DALKMPIIQD

SEQ ID NO: 2622 - protein, 10 aa, Artificial Sequence
  Description of Artificial Sequence: Synthetic epitope
DALKSESTSF

SEQ ID NO: 2623 - protein, 10 aa, Artificial Sequence
  Description of Artificial Sequence: Synthetic epitope
DALLKAVAAS

SEQ ID NO: 2624 - protein, 10 aa, Artificial Sequence
  Description of Artificial Sequence: Synthetic epitope
DALLKPSASQ

SEQ ID NO: 2625 - protein, 10 aa, Artificial Sequence
  Description of Artificial Sequence: Synthetic epitope
DALPTVAAPR

SEQ ID NO: 2626 - protein, 10 aa, Artificial Sequence
  Description of Artificial Sequence: Synthetic epitope
DALQQEAGAK

SEQ ID NO: 2627 - protein, 10 aa, Artificial Sequence
  Description of Artificial Sequence: Synthetic epitope
DALSIYHILP

SEQ ID NO: 2628 - protein, 10 aa, Artificial Sequence
  Description of Artificial Sequence: Synthetic epitope
DALVALEEDQ

SEQ ID NO: 2629 - protein, 10 aa, Artificial Sequence
  Description of Artificial Sequence: Synthetic epitope
DALVIATGLV

SEQ ID NO: 2630 - protein, 10 aa, Artificial Sequence
  Description of Artificial Sequence: Synthetic epitope
DALVKAKELK

SEQ ID NO: 2631 - protein, 10 aa, Artificial Sequence
  Description of Artificial Sequence: Synthetic epitope
DAMDNDIVQG

SEQ ID NO: 2632 - protein, 10 aa, Artificial Sequence
  Description of Artificial Sequence: Synthetic epitope
DAMEQVGLES

SEQ ID NO: 2633 - protein, 10 aa, Artificial Sequence
  Description of Artificial Sequence: Synthetic epitope
DAMLVALKSL

SEQ ID NO: 2634 - protein, 10 aa, Artificial Sequence
  Description of Artificial Sequence: Synthetic epitope
DAMPGMQNMH

SEQ ID NO: 2635 - protein, 10 aa, Artificial Sequence
  Description of Artificial Sequence: Synthetic epitope
DANDAHQTET

SEQ ID NO: 2636 - protein, 10 aa, Artificial Sequence
  Description of Artificial Sequence: Synthetic epitope
DANEASSMVE

SEQ ID NO: 2637 - protein, 10 aa, Artificial Sequence
  Description of Artificial Sequence: Synthetic epitope
DANEKQDGSN

SEQ ID NO: 2638 - protein, 10 aa, Artificial Sequence
  Description of Artificial Sequence: Synthetic epitope
DANLGLKSRA

SEQ ID NO: 2639 - protein, 10 aa, Artificial Sequence
  Description of Artificial Sequence: Synthetic epitope
DANNTENSTT

SEQ ID NO: 2640 - protein, 10 aa, Artificial Sequence
  Description of Artificial Sequence: Synthetic epitope
DANQSFKKSP

SEQ ID NO: 2641 - protein, 10 aa, Artificial Sequence
  Description of Artificial Sequence: Synthetic epitope
DANQSSLSDS

SEQ ID NO: 2642 - protein, 10 aa, Artificial Sequence
  Description of Artificial Sequence: Synthetic epitope
DANSSFFDNS

SEQ ID NO: 2643 - protein, 10 aa, Artificial Sequence
  Description of Artificial Sequence: Synthetic epitope
DANVRLAAVQ

SEQ ID NO: 2644 - protein, 10 aa, Artificial Sequence
  Description of Artificial Sequence: Synthetic epitope
DAPALLASND

SEQ ID NO: 2645 - protein, 10 aa, Artificial Sequence
  Description of Artificial Sequence: Synthetic epitope
DAPEATTHTQ

SEQ ID NO: 2646 - protein, 10 aa, Artificial Sequence
  Description of Artificial Sequence: Synthetic epitope
DAPHKNTQEK

SEQ ID NO: 2647 - protein, 10 aa, Artificial Sequence
  Description of Artificial Sequence: Synthetic epitope
DAQQKLLSEK

SEQ ID NO: 2648 - protein, 10 aa, Artificial Sequence
  Description of Artificial Sequence: Synthetic epitope
DAQQMEILAE

SEQ ID NO: 2649 - protein, 10 aa, Artificial Sequence
  Description of Artificial Sequence: Synthetic epitope
DAQTKLLAVS

SEQ ID NO: 2650 - protein, 10 aa, Artificial Sequence
  Description of Artificial Sequence: Synthetic epitope
DAQTQIQNIA

SEQ ID NO: 2651 - protein, 10 aa, Artificial Sequence
  Description of Artificial Sequence: Synthetic epitope
DAQVQRSIQK

SEQ ID NO: 2652 - protein, 10 aa, Artificial Sequence
  Description of Artificial Sequence: Synthetic epitope
DARAKTTEAD

SEQ ID NO: 2653 - protein, 10 aa, Artificial Sequence
  Description of Artificial Sequence: Synthetic epitope
DARIQVAQEK

SEQ ID NO: 2654 - protein, 10 aa, Artificial Sequence
  Description of Artificial Sequence: Synthetic epitope
DARNDSRNLK

SEQ ID NO: 2655 - protein, 10 aa, Artificial Sequence
  Description of Artificial Sequence: Synthetic epitope
DARQPSEVSR

SEQ ID NO: 2656 - protein, 10 aa, Artificial Sequence
  Description of Artificial Sequence: Synthetic epitope
DARSESSTEW

SEQ ID NO: 2657 - protein, 10 aa, Artificial Sequence
  Description of Artificial Sequence: Synthetic epitope
DARTDDRPHY

SEQ ID NO: 2658 - protein, 10 aa, Artificial Sequence
  Description of Artificial Sequence: Synthetic epitope
DARTGRETAA

SEQ ID NO: 2659 - protein, 10 aa, Artificial Sequence
  Description of Artificial Sequence: Synthetic epitope
DASAKFKELG

SEQ ID NO: 2660 - protein, 10 aa, Artificial Sequence
  Description of Artificial Sequence: Synthetic epitope
DASASTDSNT

SEQ ID NO: 2661 - protein, 10 aa, Artificial Sequence
  Description of Artificial Sequence: Synthetic epitope
DASATEMRTT

SEQ ID NO: 2662 - protein, 10 aa, Artificial Sequence
  Description of Artificial Sequence: Synthetic epitope
DASATKSYEN

SEQ ID NO: 2663 - protein, 10 aa, Artificial Sequence
  Description of Artificial Sequence: Synthetic epitope
DASDQVSDIK

SEQ ID NO: 2664 - protein, 10 aa, Artificial Sequence
  Description of Artificial Sequence: Synthetic epitope
DASDVMETPA

SEQ ID NO: 2665 - protein, 10 aa, Artificial Sequence
  Description of Artificial Sequence: Synthetic epitope
DASESTSLSA

SEQ ID NO: 2666 - protein, 10 aa, Artificial Sequence
  Description of Artificial Sequence: Synthetic epitope
DASETKEDKS

SEQ ID NO: 2667 - protein, 10 aa, Artificial Sequence
  Description of Artificial Sequence: Synthetic epitope
DASETTSTRK

SEQ ID NO: 2668 - protein, 10 aa, Artificial Sequence
  Description of Artificial Sequence: Synthetic epitope
DASILNVAMI

SEQ ID NO: 2669 - protein, 10 aa, Artificial Sequence
  Description of Artificial Sequence: Synthetic epitope
DASIVEQKWW

SEQ ID NO: 2670 - protein, 10 aa, Artificial Sequence
  Description of Artificial Sequence: Synthetic epitope
DASIVIGKWW

SEQ ID NO: 2671 - protein, 10 aa, Artificial Sequence
  Description of Artificial Sequence: Synthetic epitope
DASKAHTKAT

SEQ ID NO: 2672 - protein, 10 aa, Artificial Sequence
  Description of Artificial Sequence: Synthetic epitope
DASLRNMVQA

SEQ ID NO: 2673 - protein, 10 aa, Artificial Sequence
  Description of Artificial Sequence: Synthetic epitope
DASPTSTSKA

SEQ ID NO: 2674 - protein, 10 aa, Artificial Sequence
  Description of Artificial Sequence: Synthetic epitope
DASQFRELFA

SEQ ID NO: 2675 - protein, 10 aa, Artificial Sequence
  Description of Artificial Sequence: Synthetic epitope
DASQQTNYGV

SEQ ID NO: 2676 - protein, 10 aa, Artificial Sequence
  Description of Artificial Sequence: Synthetic epitope
DASSASEESP

SEQ ID NO: 2677 - protein, 10 aa, Artificial Sequence
  Description of Artificial Sequence: Synthetic epitope
DASSASSFLD

SEQ ID NO: 2678 - protein, 10 aa, Artificial Sequence
  Description of Artificial Sequence: Synthetic epitope
DASSQTQGAG

SEQ ID NO: 2679 - protein, 10 aa, Artificial Sequence
  Description of Artificial Sequence: Synthetic epitope
DASSTQQRRQ

SEQ ID NO: 2680 - protein, 10 aa, Artificial Sequence
  Description of Artificial Sequence: Synthetic epitope
DASTAQPPES

SEQ ID NO: 2681 - protein, 10 aa, Artificial Sequence
  Description of Artificial Sequence: Synthetic epitope
DASTDEAATE

SEQ ID NO: 2682 - protein, 10 aa, Artificial Sequence
  Description of Artificial Sequence: Synthetic epitope
DASTDLAMRS

SEQ ID NO: 2683 - protein, 10 aa, Artificial Sequence
  Description of Artificial Sequence: Synthetic epitope
DASYSSKAEK

SEQ ID NO: 2684 - protein, 10 aa, Artificial Sequence
  Description of Artificial Sequence: Synthetic epitope
DATALERASN

SEQ ID NO: 2685 - protein, 10 aa, Artificial Sequence
  Description of Artificial Sequence: Synthetic epitope
DATDQESLEL

SEQ ID NO: 2686 - protein, 10 aa, Artificial Sequence
  Description of Artificial Sequence: Synthetic epitope
DATGSSLLRL

SEQ ID NO: 2687 - protein, 10 aa, Artificial Sequence
  Description of Artificial Sequence: Synthetic epitope
DATKDAKKVA

SEQ ID NO: 2688 - protein, 10 aa, Artificial Sequence
  Description of Artificial Sequence: Synthetic epitope
DATKTDAESD

SEQ ID NO: 2689 - protein, 10 aa, Artificial Sequence
  Description of Artificial Sequence: Synthetic epitope
DATLVQITSN

SEQ ID NO: 2690 - protein, 10 aa, Artificial Sequence
  Description of Artificial Sequence: Synthetic epitope
DATSGSLSEE

SEQ ID NO: 2691 - protein, 10 aa, Artificial Sequence
  Description of Artificial Sequence: Synthetic epitope
DATSRNITEA

SEQ ID NO: 2692 - protein, 10 aa, Artificial Sequence
  Description of Artificial Sequence: Synthetic epitope
DAVAEKAGKV

SEQ ID NO: 2693 - protein, 10 aa, Artificial Sequence
  Description of Artificial Sequence: Synthetic epitope
DAVARVTGQH

SEQ ID NO: 2694 - protein, 10 aa, Artificial Sequence
  Description of Artificial Sequence: Synthetic epitope
DAVEAELKSS

SEQ ID NO: 2695 - protein, 10 aa, Artificial Sequence
  Description of Artificial Sequence: Synthetic epitope
DAVISKKVLE

SEQ ID NO: 2696 - protein, 10 aa, Artificial Sequence
  Description of Artificial Sequence: Synthetic epitope
DAVKLERMLT

SEQ ID NO: 2697 - protein, 10 aa, Artificial Sequence
  Description of Artificial Sequence: Synthetic epitope
DAVKMTIIRD

SEQ ID NO: 2698 - protein, 10 aa, Artificial Sequence
  Description of Artificial Sequence: Synthetic epitope
DAVKQAMQKH

SEQ ID NO: 2699 - protein, 10 aa, Artificial Sequence
  Description of Artificial Sequence: Synthetic epitope
DAVLRFAERQ

SEQ ID NO: 2700 - protein, 10 aa, Artificial Sequence
  Description of Artificial Sequence: Synthetic epitope
DAVNVDLSAA

SEQ ID NO: 2701 - protein, 10 aa, Artificial Sequence
  Description of Artificial Sequence: Synthetic epitope
DAVPTVEREA

SEQ ID NO: 2702 - protein, 10 aa, Artificial Sequence
  Description of Artificial Sequence: Synthetic epitope
DAVQENQHKM

SEQ ID NO: 2703 - protein, 10 aa, Artificial Sequence
  Description of Artificial Sequence: Synthetic epitope
DAVRTVALNA

SEQ ID NO: 2704 - protein, 10 aa, Artificial Sequence
  Description of Artificial Sequence: Synthetic epitope
DAVSAARQER

SEQ ID NO: 2705 - protein, 10 aa, Artificial Sequence
  Description of Artificial Sequence: Synthetic epitope
DAVSSEAPLS

SEQ ID NO: 2706 - protein, 10 aa, Artificial Sequence
  Description of Artificial Sequence: Synthetic epitope
DAVTKAAKQP

SEQ ID NO: 2707 - protein, 10 aa, Artificial Sequence
  Description of Artificial Sequence: Synthetic epitope
DAVTSAQTSD

SEQ ID NO: 2708 - protein, 10 aa, Artificial Sequence
  Description of Artificial Sequence: Synthetic epitope
DAVTTSQSQY

SEQ ID NO: 2709 - protein, 10 aa, Artificial Sequence
  Description of Artificial Sequence: Synthetic epitope
DAVVTYTAES

SEQ ID NO: 2710 - protein, 10 aa, Artificial Sequence
  Description of Artificial Sequence: Synthetic epitope
DAWASDQKVK

SEQ ID NO: 2711 - protein, 10 aa, Artificial Sequence
  Description of Artificial Sequence: Synthetic epitope
DAWLMLVEKM

SEQ ID NO: 2712 - protein, 10 aa, Artificial Sequence
  Description of Artificial Sequence: Synthetic epitope
DAWNAIPDNL

SEQ ID NO: 2713 - protein, 10 aa, Artificial Sequence
  Description of Artificial Sequence: Synthetic epitope
DAYTQISDLK

SEQ ID NO: 2714 - protein, 10 aa, Artificial Sequence
  Description of Artificial Sequence: Synthetic epitope
DAYVRAMTEK

SEQ ID NO: 2715 - protein, 10 aa, Artificial Sequence
  Description of Artificial Sequence: Synthetic epitope
DDAEAALKKE

SEQ ID NO: 2716 - protein, 10 aa, Artificial Sequence
  Description of Artificial Sequence: Synthetic epitope
DDAEAVTALN

SEQ ID NO: 2717 - protein, 10 aa, Artificial Sequence
  Description of Artificial Sequence: Synthetic epitope
DDALTTLIEQ

SEQ ID NO: 2718 - protein, 10 aa, Artificial Sequence
  Description of Artificial Sequence: Synthetic epitope
DDANVLVWHA

SEQ ID NO: 2719 - protein, 10 aa, Artificial Sequence
  Description of Artificial Sequence: Synthetic epitope
DDATFEEWFP

SEQ ID NO: 2720 - protein, 10 aa, Artificial Sequence
  Description of Artificial Sequence: Synthetic epitope
DDATQQLVHR

SEQ ID NO: 2721 - protein, 10 aa, Artificial Sequence
  Description of Artificial Sequence: Synthetic epitope
DDATRGSAVK

SEQ ID NO: 2722 - protein, 10 aa, Artificial Sequence
  Description of Artificial Sequence: Synthetic epitope
DDEAAELMQQ

SEQ ID NO: 2723 - protein, 10 aa, Artificial Sequence
  Description of Artificial Sequence: Synthetic epitope
DDEAAQELMP

SEQ ID NO: 2724 - protein, 10 aa, Artificial Sequence
  Description of Artificial Sequence: Synthetic epitope
DDEAMLQKRI

SEQ ID NO: 2725 - protein, 10 aa, Artificial Sequence
  Description of Artificial Sequence: Synthetic epitope
DDEARVQYEG

SEQ ID NO: 2726 - protein, 10 aa, Artificial Sequence
  Description of Artificial Sequence: Synthetic epitope
DDEEFAEVDE

SEQ ID NO: 2727 - protein, 10 aa, Artificial Sequence
  Description of Artificial Sequence: Synthetic epitope
DDEKIEVDDP

SEQ ID NO: 2728 - protein, 10 aa, Artificial Sequence
  Description of Artificial Sequence: Synthetic epitope
DDEMDPNYAR

SEQ ID NO: 2729 - protein, 10 aa, Artificial Sequence
  Description of Artificial Sequence: Synthetic epitope
DDEQSSADKE

SEQ ID NO: 2730 - protein, 10 aa, Artificial Sequence
  Description of Artificial Sequence: Synthetic epitope
DDEQSTQMAA

SEQ ID NO: 2731 - protein, 10 aa, Artificial Sequence
  Description of Artificial Sequence: Synthetic epitope
DDESKHSTLK

SEQ ID NO: 2732 - protein, 10 aa, Artificial Sequence
  Description of Artificial Sequence: Synthetic epitope
DDESLSVSKP

SEQ ID NO: 2733 - protein, 10 aa, Artificial Sequence
  Description of Artificial Sequence: Synthetic epitope
DDESMQRFHN

SEQ ID NO: 2734 - protein, 10 aa, Artificial Sequence
  Description of Artificial Sequence: Synthetic epitope
DDESQSSHTG

SEQ ID NO: 2735 - protein, 10 aa, Artificial Sequence
  Description of Artificial Sequence: Synthetic epitope
DDFIDFNIIE

SEQ ID NO: 2736 - protein, 10 aa, Artificial Sequence
  Description of Artificial Sequence: Synthetic epitope
DDFPSASSLA

SEQ ID NO: 2737 - protein, 10 aa, Artificial Sequence
  Description of Artificial Sequence: Synthetic epitope
DDGDTRSEHS

SEQ ID NO: 2738 - protein, 10 aa, Artificial Sequence
  Description of Artificial Sequence: Synthetic epitope
DDGERAANRE

SEQ ID NO: 2739 - protein, 10 aa, Artificial Sequence
  Description of Artificial Sequence: Synthetic epitope
DDGKSMRVKH

SEQ ID NO: 2740 - protein, 10 aa, Artificial Sequence
  Description of Artificial Sequence: Synthetic epitope
DDGQDNNTQI

SEQ ID NO: 2741 - protein, 10 aa, Artificial Sequence
  Description of Artificial Sequence: Synthetic epitope
DDGQFQERQS

SEQ ID NO: 2742 - protein, 10 aa, Artificial Sequence
  Description of Artificial Sequence: Synthetic epitope
DDGQKKIVKV

SEQ ID NO: 2743 - protein, 10 aa, Artificial Sequence
  Description of Artificial Sequence: Synthetic epitope
DDHKIKFQTS

SEQ ID NO: 2744 - protein, 10 aa, Artificial Sequence
  Description of Artificial Sequence: Synthetic epitope
DDIEASRMKR

SEQ ID NO: 2745 - protein, 10 aa, Artificial Sequence
  Description of Artificial Sequence: Synthetic epitope
DDIEFAKGRG

SEQ ID NO: 2746 - protein, 10 aa, Artificial Sequence
  Description of Artificial Sequence: Synthetic epitope
DDIENEADIS

SEQ ID NO: 2747 - protein, 10 aa, Artificial Sequence
  Description of Artificial Sequence: Synthetic epitope
DDIKATQTDI

SEQ ID NO: 2748 - protein, 10 aa, Artificial Sequence
  Description of Artificial Sequence: Synthetic epitope
DDILAAVRPT

SEQ ID NO: 2749 - protein, 10 aa, Artificial Sequence
  Description of Artificial Sequence: Synthetic epitope
DDILETSADS

SEQ ID NO: 2750 - protein, 10 aa, Artificial Sequence
  Description of Artificial Sequence: Synthetic epitope
DDIPQEETEE

SEQ ID NO: 2751 - protein, 10 aa, Artificial Sequence
  Description of Artificial Sequence: Synthetic epitope
DDIPSALRIA

SEQ ID NO: 2752 - protein, 10 aa, Artificial Sequence
  Description of Artificial Sequence: Synthetic epitope
DDIQQAINRM

SEQ ID NO: 2753 - protein, 10 aa, Artificial Sequence
  Description of Artificial Sequence: Synthetic epitope
DDISRDSDGM

SEQ ID NO: 2754 - protein, 10 aa, Artificial Sequence
  Description of Artificial Sequence: Synthetic epitope
DDISSTSDQE

SEQ ID NO: 2755 - protein, 10 aa, Artificial Sequence
  Description of Artificial Sequence: Synthetic epitope
DDKDIESAKS

SEQ ID NO: 2756 - protein, 10 aa, Artificial Sequence
  Description of Artificial Sequence: Synthetic epitope
DDKEDEVGYI

SEQ ID NO: 2757 - protein, 10 aa, Artificial Sequence
  Description of Artificial Sequence: Synthetic epitope
DDKESRNKGQ

SEQ ID NO: 2758 - protein, 10 aa, Artificial Sequence
  Description of Artificial Sequence: Synthetic epitope
DDKGPAKIHQ

SEQ ID NO: 2759 - protein, 10 aa, Artificial Sequence
  Description of Artificial Sequence: Synthetic epitope
DDKINSEPKI

SEQ ID NO: 2760 - protein, 10 aa, Artificial Sequence
  Description of Artificial Sequence: Synthetic epitope
DDKKDIKSIT

SEQ ID NO: 2761 - protein, 10 aa, Artificial Sequence
  Description of Artificial Sequence: Synthetic epitope
DDKLSESKSD

SEQ ID NO: 2762 - protein, 10 aa, Artificial Sequence
  Description of Artificial Sequence: Synthetic epitope
DDKLSKPVAK

SEQ ID NO: 2763 - protein, 10 aa, Artificial Sequence
  Description of Artificial Sequence: Synthetic epitope
DDKMLLVKNI

SEQ ID NO: 2764 - protein, 10 aa, Artificial Sequence
  Description of Artificial Sequence: Synthetic epitope
DDKPTSSPDT

SEQ ID NO: 2765 - protein, 10 aa, Artificial Sequence
  Description of Artificial Sequence: Synthetic epitope
DDKRKKEDKE

SEQ ID NO: 2766 - protein, 10 aa, Artificial Sequence
  Description of Artificial Sequence: Synthetic epitope
DDKVKLQNNI

SEQ ID NO: 2767 - protein, 10 aa, Artificial Sequence
  Description of Artificial Sequence: Synthetic epitope
DDLETVHESD

SEQ ID NO: 2768 - protein, 10 aa, Artificial Sequence
  Description of Artificial Sequence: Synthetic epitope
DDLNQVDVGS

SEQ ID NO: 2769 - protein, 10 aa, Artificial Sequence
  Description of Artificial Sequence: Synthetic epitope
DDLQAETQGQ

SEQ ID NO: 2770 - protein, 10 aa, Artificial Sequence
  Description of Artificial Sequence: Synthetic epitope
DDLRMSSLPP

SEQ ID NO: 2771 - protein, 10 aa, Artificial Sequence
  Description of Artificial Sequence: Synthetic epitope
DDLSLKILRE

SEQ ID NO: 2772 - protein, 10 aa, Artificial Sequence
  Description of Artificial Sequence: Synthetic epitope
DDLSTDSEQI

SEQ ID NO: 2773 - protein, 10 aa, Artificial Sequence
  Description of Artificial Sequence: Synthetic epitope
DDLTAVQGTT

SEQ ID NO: 2774 - protein, 10 aa, Artificial Sequence
  Description of Artificial Sequence: Synthetic epitope
DDLTMKLTEI

SEQ ID NO: 2775 - protein, 10 aa, Artificial Sequence
  Description of Artificial Sequence: Synthetic epitope
DDLTQALEKL

SEQ ID NO: 2776 - protein, 10 aa, Artificial Sequence
  Description of Artificial Sequence: Synthetic epitope
DDLVELSKAK

SEQ ID NO: 2777 - protein, 10 aa, Artificial Sequence
  Description of Artificial Sequence: Synthetic epitope
DDMASLVFHS

SEQ ID NO: 2778 - protein, 10 aa, Artificial Sequence
  Description of Artificial Sequence: Synthetic epitope
DDMGENMTDD

SEQ ID NO: 2779 - protein, 10 aa, Artificial Sequence
  Description of Artificial Sequence: Synthetic epitope
DDMLEAAKAS

SEQ ID NO: 2780 - protein, 10 aa, Artificial Sequence
  Description of Artificial Sequence: Synthetic epitope
DDMPVKPYSD

SEQ ID NO: 2781 - protein, 10 aa, Artificial Sequence
  Description of Artificial Sequence: Synthetic epitope
DDMQVVIGQQ

SEQ ID NO: 2782 - protein, 10 aa, Artificial Sequence
  Description of Artificial Sequence: Synthetic epitope
DDMSSRIDDL

SEQ ID NO: 2783 - protein, 10 aa, Artificial Sequence
  Description of Artificial Sequence: Synthetic epitope
DDNANPAHGN

SEQ ID NO: 2784 - protein, 10 aa, Artificial Sequence
  Description of Artificial Sequence: Synthetic epitope
DDNKQILKQR

SEQ ID NO: 2785 - protein, 10 aa, Artificial Sequence
  Description of Artificial Sequence: Synthetic epitope
DDNKSVKGVN

SEQ ID NO: 2786 - protein, 10 aa, Artificial Sequence
  Description of Artificial Sequence: Synthetic epitope
DDNLVKGPEE

SEQ ID NO: 2787 - protein, 10 aa, Artificial Sequence
  Description of Artificial Sequence: Synthetic epitope
DDNQVMVSEG

SEQ ID NO: 2788 - protein, 10 aa, Artificial Sequence
  Description of Artificial Sequence: Synthetic epitope
DDNRSAEMME

SEQ ID NO: 2789 - protein, 10 aa, Artificial Sequence
  Description of Artificial Sequence: Synthetic epitope
DDNSNKPDHE

SEQ ID NO: 2790 - protein, 10 aa, Artificial Sequence
  Description of Artificial Sequence: Synthetic epitope
DDPKEEVMVL

SEQ ID NO: 2791 - protein, 10 aa, Artificial Sequence
  Description of Artificial Sequence: Synthetic epitope
DDPKYSSDED

SEQ ID NO: 2792 - protein, 10 aa, Artificial Sequence
  Description of Artificial Sequence: Synthetic epitope
DDPMPLQKFH

SEQ ID NO: 2793 - protein, 10 aa, Artificial Sequence
  Description of Artificial Sequence: Synthetic epitope
DDPRSNDGNS

SEQ ID NO: 2794 - protein, 10 aa, Artificial Sequence
  Description of Artificial Sequence: Synthetic epitope
DDQEQASSGW

SEQ ID NO: 2795 - protein, 10 aa, Artificial Sequence
  Description of Artificial Sequence: Synthetic epitope
DDQGETTLAS

SEQ ID NO: 2796 - protein, 10 aa, Artificial Sequence
  Description of Artificial Sequence: Synthetic epitope
DDQLTINIDE

SEQ ID NO: 2797 - protein, 10 aa, Artificial Sequence
  Description of Artificial Sequence: Synthetic epitope
DDQMLSRESS

SEQ ID NO: 2798 - protein, 10 aa, Artificial Sequence
  Description of Artificial Sequence: Synthetic epitope
DDQNTRDELA

SEQ ID NO: 2799 - protein, 10 aa, Artificial Sequence
  Description of Artificial Sequence: Synthetic epitope
DDQPAKLEKE

SEQ ID NO: 2800 - protein, 10 aa, Artificial Sequence
  Description of Artificial Sequence: Synthetic epitope
DDQQVKQNSP

SEQ ID NO: 2801 - protein, 10 aa, Artificial Sequence
  Description of Artificial Sequence: Synthetic epitope
DDQTDTSSAE

SEQ ID NO: 2802 - protein, 10 aa, Artificial Sequence
  Description of Artificial Sequence: Synthetic epitope
DDQTETIRKL

SEQ ID NO: 2803 - protein, 10 aa, Artificial Sequence
  Description of Artificial Sequence: Synthetic epitope
DDRATSSTTD

SEQ ID NO: 2804 - protein, 10 aa, Artificial Sequence
  Description of Artificial Sequence: Synthetic epitope
DDRIRVERMD

SEQ ID NO: 2805 - protein, 10 aa, Artificial Sequence
  Description of Artificial Sequence: Synthetic epitope
DDRLETQSLP

SEQ ID NO: 2806 - protein, 10 aa, Artificial Sequence
  Description of Artificial Sequence: Synthetic epitope
DDRNKMSVVT

SEQ ID NO: 2807 - protein, 10 aa, Artificial Sequence
  Description of Artificial Sequence: Synthetic epitope
DDRRDERARE

SEQ ID NO: 2808 - protein, 10 aa, Artificial Sequence
  Description of Artificial Sequence: Synthetic epitope
DDRRKKLGKR

SEQ ID NO: 2809 - protein, 10 aa, Artificial Sequence
  Description of Artificial Sequence: Synthetic epitope
DDRRNAVRAL

SEQ ID NO: 2810 - protein, 10 aa, Artificial Sequence
  Description of Artificial Sequence: Synthetic epitope
DDRSWSSRDD

SEQ ID NO: 2811 - protein, 10 aa, Artificial Sequence
  Description of Artificial Sequence: Synthetic epitope
DDSAFKKIDT

SEQ ID NO: 2812 - protein, 10 aa, Artificial Sequence
  Description of Artificial Sequence: Synthetic epitope
DDSAIRALTQ

SEQ ID NO: 2813 - protein, 10 aa, Artificial Sequence
  Description of Artificial Sequence: Synthetic epitope
DDSEITKEDD

SEQ ID NO: 2814 - protein, 10 aa, Artificial Sequence
  Description of Artificial Sequence: Synthetic epitope
DDSEITKEDD

SEQ ID NO: 2815 - protein, 10 aa, Artificial Sequence
  Description of Artificial Sequence: Synthetic epitope
DDSGRMALSK

SEQ ID NO: 2816 - protein, 10 aa, Artificial Sequence
  Description of Artificial Sequence: Synthetic epitope
DDSIEAVIVS

SEQ ID NO: 2817 - protein, 10 aa, Artificial Sequence
  Description of Artificial Sequence: Synthetic epitope
DDSISAATNK

SEQ ID NO: 2818 - protein, 10 aa, Artificial Sequence
  Description of Artificial Sequence: Synthetic epitope
DDSKRLKTIS

SEQ ID NO: 2819 - protein, 10 aa, Artificial Sequence
  Description of Artificial Sequence: Synthetic epitope
DDSKTSKVNA

SEQ ID NO: 2820 - protein, 10 aa, Artificial Sequence
  Description of Artificial Sequence: Synthetic epitope
DDSLETSSAL

SEQ ID NO: 2821 - protein, 10 aa, Artificial Sequence
  Description of Artificial Sequence: Synthetic epitope
DDSLGSANSL

SEQ ID NO: 2822 - protein, 10 aa, Artificial Sequence
  Description of Artificial Sequence: Synthetic epitope
DDSLQAIKLQ

SEQ ID NO: 2823 - protein, 10 aa, Artificial Sequence
  Description of Artificial Sequence: Synthetic epitope
DDSRRTTSSA

SEQ ID NO: 2824 - protein, 10 aa, Artificial Sequence
  Description of Artificial Sequence: Synthetic epitope
DDSRSYASSF

SEQ ID NO: 2825 - protein, 10 aa, Artificial Sequence
  Description of Artificial Sequence: Synthetic epitope
DDSSASSLKN

SEQ ID NO: 2826 - protein, 10 aa, Artificial Sequence
  Description of Artificial Sequence: Synthetic epitope
DDSSTKVDIK

SEQ ID NO: 2827 - protein, 10 aa, Artificial Sequence
  Description of Artificial Sequence: Synthetic epitope
DDSSTQNKRA

SEQ ID NO: 2828 - protein, 10 aa, Artificial Sequence
  Description of Artificial Sequence: Synthetic epitope
DDSVAKTSQL

SEQ ID NO: 2829 - protein, 10 aa, Artificial Sequence
  Description of Artificial Sequence: Synthetic epitope
DDSVFTRSSQ

SEQ ID NO: 2830 - protein, 10 aa, Artificial Sequence
  Description of Artificial Sequence: Synthetic epitope
DDTAAMLADF

SEQ ID NO: 2831 - protein, 10 aa, Artificial Sequence
  Description of Artificial Sequence: Synthetic epitope
DDTDTENERR

SEQ ID NO: 2832 - protein, 10 aa, Artificial Sequence
  Description of Artificial Sequence: Synthetic epitope
DDTEDTVVSQ

SEQ ID NO: 2833 - protein, 10 aa, Artificial Sequence
  Description of Artificial Sequence: Synthetic epitope
DDTEREPDQT

SEQ ID NO: 2834 - protein, 10 aa, Artificial Sequence
  Description of Artificial Sequence: Synthetic epitope
DDTFLTAQDG

SEQ ID NO: 2835 - protein, 10 aa, Artificial Sequence
  Description of Artificial Sequence: Synthetic epitope
DDTGQKEIPI

SEQ ID NO: 2836 - protein, 10 aa, Artificial Sequence
  Description of Artificial Sequence: Synthetic epitope
DDTLISTPDL

SEQ ID NO: 2837 - protein, 10 aa, Artificial Sequence
  Description of Artificial Sequence: Synthetic epitope
DDTLSSVDEK

SEQ ID NO: 2838 - protein, 10 aa, Artificial Sequence
  Description of Artificial Sequence: Synthetic epitope
DDTMVAKRHP

SEQ ID NO: 2839 - protein, 10 aa, Artificial Sequence
  Description of Artificial Sequence: Synthetic epitope
DDTQKSRSSQ

SEQ ID NO: 2840 - protein, 10 aa, Artificial Sequence
  Description of Artificial Sequence: Synthetic epitope
DDTREAEKVL

SEQ ID NO: 2841 - protein, 10 aa, Artificial Sequence
  Description of Artificial Sequence: Synthetic epitope
DDTSAASSDS

SEQ ID NO: 2842 - protein, 10 aa, Artificial Sequence
  Description of Artificial Sequence: Synthetic epitope
DDTSASIISD

SEQ ID NO: 2843 - protein, 10 aa, Artificial Sequence
  Description of Artificial Sequence: Synthetic epitope
DDTTRVDESL

SEQ ID NO: 2844 - protein, 10 aa, Artificial Sequence
  Description of Artificial Sequence: Synthetic epitope
DDVAMVLDEE

SEQ ID NO: 2845 - protein, 10 aa, Artificial Sequence
  Description of Artificial Sequence: Synthetic epitope
DDVEAMSSQP

SEQ ID NO: 2846 - protein, 10 aa, Artificial Sequence
  Description of Artificial Sequence: Synthetic epitope
DDVHRFSSQV

SEQ ID NO: 2847 - protein, 10 aa, Artificial Sequence
  Description of Artificial Sequence: Synthetic epitope
DDVKKESKKD

SEQ ID NO: 2848 - protein, 10 aa, Artificial Sequence
  Description of Artificial Sequence: Synthetic epitope
DDVTDEYLMS

SEQ ID NO: 2849 - protein, 10 aa, Artificial Sequence
  Description of Artificial Sequence: Synthetic epitope
DDVTSSTGPH

SEQ ID NO: 2850 - protein, 10 aa, Artificial Sequence
  Description of Artificial Sequence: Synthetic epitope
DDVVAKRTRQ

SEQ ID NO: 2851 - protein, 10 aa, Artificial Sequence
  Description of Artificial Sequence: Synthetic epitope
DDWAAKKSPK

SEQ ID NO: 2852 - protein, 10 aa, Artificial Sequence
  Description of Artificial Sequence: Synthetic epitope
DDYDLNQETS

SEQ ID NO: 2853 - protein, 10 aa, Artificial Sequence
  Description of Artificial Sequence: Synthetic epitope
DDYHAWNINY

SEQ ID NO: 2854 - protein, 10 aa, Artificial Sequence
  Description of Artificial Sequence: Synthetic epitope
DDYKNRARSQ

SEQ ID NO: 2855 - protein, 10 aa, Artificial Sequence
  Description of Artificial Sequence: Synthetic epitope
DEAAKLQTTK

SEQ ID NO: 2856 - protein, 10 aa, Artificial Sequence
  Description of Artificial Sequence: Synthetic epitope
DEAALKEPII

SEQ ID NO: 2857 - protein, 10 aa, Artificial Sequence
  Description of Artificial Sequence: Synthetic epitope
DEAASEARST

SEQ ID NO: 2858 - protein, 10 aa, Artificial Sequence
  Description of Artificial Sequence: Synthetic epitope
DEAASLVEGT

SEQ ID NO: 2859 - protein, 10 aa, Artificial Sequence
  Description of Artificial Sequence: Synthetic epitope
DEAIEALDAA

SEQ ID NO: 2860 - protein, 10 aa, Artificial Sequence
  Description of Artificial Sequence: Synthetic epitope
DEAKQSAEDI

SEQ ID NO: 2861 - protein, 10 aa, Artificial Sequence
  Description of Artificial Sequence: Synthetic epitope
DEAKTAKAEE

SEQ ID NO: 2862 - protein, 10 aa, Artificial Sequence
  Description of Artificial Sequence: Synthetic epitope
DEALNTAHHS

SEQ ID NO: 2863 - protein, 10 aa, Artificial Sequence
  Description of Artificial Sequence: Synthetic epitope
DEAMLDEISL

SEQ ID NO: 2864 - protein, 10 aa, Artificial Sequence
  Description of Artificial Sequence: Synthetic epitope
DEANAALDSA

SEQ ID NO: 2865 - protein, 10 aa, Artificial Sequence
  Description of Artificial Sequence: Synthetic epitope
DEAQADLALR

SEQ ID NO: 2866 - protein, 10 aa, Artificial Sequence
  Description of Artificial Sequence: Synthetic epitope
DEARASRLLA

SEQ ID NO: 2867 - protein, 10 aa, Artificial Sequence
  Description of Artificial Sequence: Synthetic epitope
DEASESEMRK

SEQ ID NO: 2868 - protein, 10 aa, Artificial Sequence
  Description of Artificial Sequence: Synthetic epitope
DEASKKEIKD

SEQ ID NO: 2869 - protein, 10 aa, Artificial Sequence
  Description of Artificial Sequence: Synthetic epitope
DEASNLVGEE

SEQ ID NO: 2870 - protein, 10 aa, Artificial Sequence
  Description of Artificial Sequence: Synthetic epitope
DEATGALASA

SEQ ID NO: 2871 - protein, 10 aa, Artificial Sequence
  Description of Artificial Sequence: Synthetic epitope
DEATTSKDGG

SEQ ID NO: 2872 - protein, 10 aa, Artificial Sequence
  Description of Artificial Sequence: Synthetic epitope
DEDDSAAPST

SEQ ID NO: 2873 - protein, 10 aa, Artificial Sequence
  Description of Artificial Sequence: Synthetic epitope
DEDDSLKDRE

SEQ ID NO: 2874 - protein, 10 aa, Artificial Sequence
  Description of Artificial Sequence: Synthetic epitope
DEDEAEAEDP

SEQ ID NO: 2875 - protein, 10 aa, Artificial Sequence
  Description of Artificial Sequence: Synthetic epitope
DEDEESTDTS

SEQ ID NO: 2876 - protein, 10 aa, Artificial Sequence
  Description of Artificial Sequence: Synthetic epitope
DEDIDAKQKE

SEQ ID NO: 2877 - protein, 10 aa, Artificial Sequence
  Description of Artificial Sequence: Synthetic epitope
DEDISRTSGP

SEQ ID NO: 2878 - protein, 10 aa, Artificial Sequence
  Description of Artificial Sequence: Synthetic epitope
DEDLAQVVDE

SEQ ID NO: 2879 - protein, 10 aa, Artificial Sequence
  Description of Artificial Sequence: Synthetic epitope
DEDLQDEPLQ

SEQ ID NO: 2880 - protein, 10 aa, Artificial Sequence
  Description of Artificial Sequence: Synthetic epitope
DEDQNSLALG

SEQ ID NO: 2881 - protein, 10 aa, Artificial Sequence
  Description of Artificial Sequence: Synthetic epitope
DEDRGQGDSS

SEQ ID NO: 2882 - protein, 10 aa, Artificial Sequence
  Description of Artificial Sequence: Synthetic epitope
DEDSSARSAA

SEQ ID NO: 2883 - protein, 10 aa, Artificial Sequence
  Description of Artificial Sequence: Synthetic epitope
DEEADESLLA

SEQ ID NO: 2884 - protein, 10 aa, Artificial Sequence
  Description of Artificial Sequence: Synthetic epitope
DEEAMESDPA

SEQ ID NO: 2885 - protein, 10 aa, Artificial Sequence
  Description of Artificial Sequence: Synthetic epitope
DEEDASVTVG

SEQ ID NO: 2886 - protein, 10 aa, Artificial Sequence
  Description of Artificial Sequence: Synthetic epitope
DEEDQSDKKE

SEQ ID NO: 2887 - protein, 10 aa, Artificial Sequence
  Description of Artificial Sequence: Synthetic epitope
DEEKNESGLT

SEQ ID NO: 2888 - protein, 10 aa, Artificial Sequence
  Description of Artificial Sequence: Synthetic epitope
DEEMSDSNSP

SEQ ID NO: 2889 - protein, 10 aa, Artificial Sequence
  Description of Artificial Sequence: Synthetic epitope
DEENAYFEDE

SEQ ID NO: 2890 - protein, 10 aa, Artificial Sequence
  Description of Artificial Sequence: Synthetic epitope
DEENEANLLA

SEQ ID NO: 2891 - protein, 10 aa, Artificial Sequence
  Description of Artificial Sequence: Synthetic epitope
DEEQRTQARA

SEQ ID NO: 2892 - protein, 10 aa, Artificial Sequence
  Description of Artificial Sequence: Synthetic epitope
DEERAQQEDA

SEQ ID NO: 2893 - protein, 10 aa, Artificial Sequence
  Description of Artificial Sequence: Synthetic epitope
DEEREQRLEK

SEQ ID NO: 2894 - protein, 10 aa, Artificial Sequence
  Description of Artificial Sequence: Synthetic epitope
DEESSESSTY

SEQ ID NO: 2895 - protein, 10 aa, Artificial Sequence
  Description of Artificial Sequence: Synthetic epitope
DEESVSASQK

SEQ ID NO: 2896 - protein, 10 aa, Artificial Sequence
  Description of Artificial Sequence: Synthetic epitope
DEETADVSPQ

SEQ ID NO: 2897 - protein, 10 aa, Artificial Sequence
  Description of Artificial Sequence: Synthetic epitope
DEETDVSDEQ

SEQ ID NO: 2898 - protein, 10 aa, Artificial Sequence
  Description of Artificial Sequence: Synthetic epitope
DEETKEPLVQ

SEQ ID NO: 2899 - protein, 10 aa, Artificial Sequence
  Description of Artificial Sequence: Synthetic epitope
DEETSSRNLV

SEQ ID NO: 2900 - protein, 10 aa, Artificial Sequence
  Description of Artificial Sequence: Synthetic epitope
DEETSVVIVG

SEQ ID NO: 2901 - protein, 10 aa, Artificial Sequence
  Description of Artificial Sequence: Synthetic epitope
DEETTSAGSG

SEQ ID NO: 2902 - protein, 10 aa, Artificial Sequence
  Description of Artificial Sequence: Synthetic epitope
DEEVEGMQST

SEQ ID NO: 2903 - protein, 10 aa, Artificial Sequence
  Description of Artificial Sequence: Synthetic epitope
DEEVQQSRFQ

SEQ ID NO: 2904 - protein, 10 aa, Artificial Sequence
  Description of Artificial Sequence: Synthetic epitope
DEFFADVWRI

SEQ ID NO: 2905 - protein, 10 aa, Artificial Sequence
  Description of Artificial Sequence: Synthetic epitope
DEFKSQIDVA

SEQ ID NO: 2906 - protein, 10 aa, Artificial Sequence
  Description of Artificial Sequence: Synthetic epitope
DEFKSVSKFK

SEQ ID NO: 2907 - protein, 10 aa, Artificial Sequence
  Description of Artificial Sequence: Synthetic epitope
DEFLASIASP

SEQ ID NO: 2908 - protein, 10 aa, Artificial Sequence
  Description of Artificial Sequence: Synthetic epitope
DEFQKVMIEQ

SEQ ID NO: 2909 - protein, 10 aa, Artificial Sequence
  Description of Artificial Sequence: Synthetic epitope
DEGAEKVMAY

SEQ ID NO: 2910 - protein, 10 aa, Artificial Sequence
  Description of Artificial Sequence: Synthetic epitope
DEGKSIAIRL

SEQ ID NO: 2911 - protein, 10 aa, Artificial Sequence
  Description of Artificial Sequence: Synthetic epitope
DEGLNHIMPR

SEQ ID NO: 2912 - protein, 10 aa, Artificial Sequence
  Description of Artificial Sequence: Synthetic epitope
DEGQIENYQM

SEQ ID NO: 2913 - protein, 10 aa, Artificial Sequence
  Description of Artificial Sequence: Synthetic epitope
DEGRDAELTR

SEQ ID NO: 2914 - protein, 10 aa, Artificial Sequence
  Description of Artificial Sequence: Synthetic epitope
DEGSVDDTSS

SEQ ID NO: 2915 - protein, 10 aa, Artificial Sequence
  Description of Artificial Sequence: Synthetic epitope
DEHDNEIKIK

SEQ ID NO: 2916 - protein, 10 aa, Artificial Sequence
  Description of Artificial Sequence: Synthetic epitope
DEHSQIFARK

SEQ ID NO: 2917 - protein, 10 aa, Artificial Sequence
  Description of Artificial Sequence: Synthetic epitope
DEIADVSTGL

SEQ ID NO: 2918 - protein, 10 aa, Artificial Sequence
  Description of Artificial Sequence: Synthetic epitope
DEIILLRSLE

SEQ ID NO: 2919 - protein, 10 aa, Artificial Sequence
  Description of Artificial Sequence: Synthetic epitope
DEILGALTEE

SEQ ID NO: 2920 - protein, 10 aa, Artificial Sequence
  Description of Artificial Sequence: Synthetic epitope
DEILGSEKAK

SEQ ID NO: 2921 - protein, 10 aa, Artificial Sequence
  Description of Artificial Sequence: Synthetic epitope
DEILSKVTEV

SEQ ID NO: 2922 - protein, 10 aa, Artificial Sequence
  Description of Artificial Sequence: Synthetic epitope
DEILYVNMDE

SEQ ID NO: 2923 - protein, 10 aa, Artificial Sequence
  Description of Artificial Sequence: Synthetic epitope
DEIMRLTPLS

SEQ ID NO: 2924 - protein, 10 aa, Artificial Sequence
  Description of Artificial Sequence: Synthetic epitope
DEIQVNKTQI

SEQ ID NO: 2925 - protein, 10 aa, Artificial Sequence
  Description of Artificial Sequence: Synthetic epitope
DEISDSTSTP

SEQ ID NO: 2926 - protein, 10 aa, Artificial Sequence
  Description of Artificial Sequence: Synthetic epitope
DEIYEEASSE

SEQ ID NO: 2927 - protein, 10 aa, Artificial Sequence
  Description of Artificial Sequence: Synthetic epitope
DEKATSISTP

SEQ ID NO: 2928 - protein, 10 aa, Artificial Sequence
  Description of Artificial Sequence: Synthetic epitope
DEKDQTRKED

SEQ ID NO: 2929 - protein, 10 aa, Artificial Sequence
  Description of Artificial Sequence: Synthetic epitope
DEKEEQDQKE

SEQ ID NO: 2930 - protein, 10 aa, Artificial Sequence
  Description of Artificial Sequence: Synthetic epitope
DEKESLSEEQ

SEQ ID NO: 2931 - protein, 10 aa, Artificial Sequence
  Description of Artificial Sequence: Synthetic epitope
DEKFLTKREQ

SEQ ID NO: 2932 - protein, 10 aa, Artificial Sequence
  Description of Artificial Sequence: Synthetic epitope
DEKGRANLGV

SEQ ID NO: 2933 - protein, 10 aa, Artificial Sequence
  Description of Artificial Sequence: Synthetic epitope
DEKIEKGRDY

SEQ ID NO: 2934 - protein, 10 aa, Artificial Sequence
  Description of Artificial Sequence: Synthetic epitope
DEKIKLDSTE

SEQ ID NO: 2935 - protein, 10 aa, Artificial Sequence
  Description of Artificial Sequence: Synthetic epitope
DEKIRMNRVV

SEQ ID NO: 2936 - protein, 10 aa, Artificial Sequence
  Description of Artificial Sequence: Synthetic epitope
DEKKISLKHE

SEQ ID NO: 2937 - protein, 10 aa, Artificial Sequence
  Description of Artificial Sequence: Synthetic epitope
DEKKNMNWKQ

SEQ ID NO: 2938 - protein, 10 aa, Artificial Sequence
  Description of Artificial Sequence: Synthetic epitope
DEKRSNVRWD

SEQ ID NO: 2939 - protein, 10 aa, Artificial Sequence
  Description of Artificial Sequence: Synthetic epitope
DEKRSQANGA

SEQ ID NO: 2940 - protein, 10 aa, Artificial Sequence
  Description of Artificial Sequence: Synthetic epitope
DEKVDTKLSE

SEQ ID NO: 2941 - protein, 10 aa, Artificial Sequence
  Description of Artificial Sequence: Synthetic epitope
DELADSVSKA

SEQ ID NO: 2942 - protein, 10 aa, Artificial Sequence
  Description of Artificial Sequence: Synthetic epitope
DELAKITMKD

SEQ ID NO: 2943 - protein, 10 aa, Artificial Sequence
  Description of Artificial Sequence: Synthetic epitope
DELELSNMVI

SEQ ID NO: 2944 - protein, 10 aa, Artificial Sequence
  Description of Artificial Sequence: Synthetic epitope
DELEPETDTR

SEQ ID NO: 2945 - protein, 10 aa, Artificial Sequence
  Description of Artificial Sequence: Synthetic epitope
DELIQSQQIT

SEQ ID NO: 2946 - protein, 10 aa, Artificial Sequence
  Description of Artificial Sequence: Synthetic epitope
DELKNPHAKI

SEQ ID NO: 2947 - protein, 10 aa, Artificial Sequence
  Description of Artificial Sequence: Synthetic epitope
DELKTVTKDR

SEQ ID NO: 2948 - protein, 10 aa, Artificial Sequence
  Description of Artificial Sequence: Synthetic epitope
DELLVKSDLE

SEQ ID NO: 2949 - protein, 10 aa, Artificial Sequence
  Description of Artificial Sequence: Synthetic epitope
DELMHRRVKL

SEQ ID NO: 2950 - protein, 10 aa, Artificial Sequence
  Description of Artificial Sequence: Synthetic epitope
DELMSEEAYE

SEQ ID NO: 2951 - protein, 10 aa, Artificial Sequence
  Description of Artificial Sequence: Synthetic epitope
DELMSESDSS

SEQ ID NO: 2952 - protein, 10 aa, Artificial Sequence
  Description of Artificial Sequence: Synthetic epitope
DELMTDITEQ

SEQ ID NO: 2953 - protein, 10 aa, Artificial Sequence
  Description of Artificial Sequence: Synthetic epitope
DELMYMLRKL

SEQ ID NO: 2954 - protein, 10 aa, Artificial Sequence
  Description of Artificial Sequence: Synthetic epitope
DELNATLKEE

SEQ ID NO: 2955 - protein, 10 aa, Artificial Sequence
  Description of Artificial Sequence: Synthetic epitope
DELRQSSERA

SEQ ID NO: 2956 - protein, 10 aa, Artificial Sequence
  Description of Artificial Sequence: Synthetic epitope
DELSEPEHEA

SEQ ID NO: 2957 - protein, 10 aa, Artificial Sequence
  Description of Artificial Sequence: Synthetic epitope
DELSEQLESR

SEQ ID NO: 2958 - protein, 10 aa, Artificial Sequence
  Description of Artificial Sequence: Synthetic epitope
DELSMVFGNS

SEQ ID NO: 2959 - protein, 10 aa, Artificial Sequence
  Description of Artificial Sequence: Synthetic epitope
DELTASEAST

SEQ ID NO: 2960 - protein, 10 aa, Artificial Sequence
  Description of Artificial Sequence: Synthetic epitope
DELVSRSLQS

SEQ ID NO: 2961 - protein, 10 aa, Artificial Sequence
  Description of Artificial Sequence: Synthetic epitope
DELVTRITMP

SEQ ID NO: 2962 - protein, 10 aa, Artificial Sequence
  Description of Artificial Sequence: Synthetic epitope
DEMKQILTPM

SEQ ID NO: 2963 - protein, 10 aa, Artificial Sequence
  Description of Artificial Sequence: Synthetic epitope
DEMSSASEES

SEQ ID NO: 2964 - protein, 10 aa, Artificial Sequence
  Description of Artificial Sequence: Synthetic epitope
DEMTGLVMTK

SEQ ID NO: 2965 - protein, 10 aa, Artificial Sequence
  Description of Artificial Sequence: Synthetic epitope
DEMVMIMGGK

SEQ ID NO: 2966 - protein, 10 aa, Artificial Sequence
  Description of Artificial Sequence: Synthetic epitope
DENETLIVSK

SEQ ID NO: 2967 - protein, 10 aa, Artificial Sequence
  Description of Artificial Sequence: Synthetic epitope
DENIATKRSD

SEQ ID NO: 2968 - protein, 10 aa, Artificial Sequence
  Description of Artificial Sequence: Synthetic epitope
DENIPMETEE

SEQ ID NO: 2969 - protein, 10 aa, Artificial Sequence
  Description of Artificial Sequence: Synthetic epitope
DENKSAMLEA

SEQ ID NO: 2970 - protein, 10 aa, Artificial Sequence
  Description of Artificial Sequence: Synthetic epitope
DENLVEVKFA

SEQ ID NO: 2971 - protein, 10 aa, Artificial Sequence
  Description of Artificial Sequence: Synthetic epitope
DENNTILGRN

SEQ ID NO: 2972 - protein, 10 aa, Artificial Sequence
  Description of Artificial Sequence: Synthetic epitope
DENQFTLTIA

SEQ ID NO: 2973 - protein, 10 aa, Artificial Sequence
  Description of Artificial Sequence: Synthetic epitope
DENQTSAITQ

SEQ ID NO: 2974 - protein, 10 aa, Artificial Sequence
  Description of Artificial Sequence: Synthetic epitope
DENRIAVISD

SEQ ID NO: 2975 - protein, 10 aa, Artificial Sequence
  Description of Artificial Sequence: Synthetic epitope
DENRPIMKSL

SEQ ID NO: 2976 - protein, 10 aa, Artificial Sequence
  Description of Artificial Sequence: Synthetic epitope
DENSQKYGSK

SEQ ID NO: 2977 - protein, 10 aa, Artificial Sequence
  Description of Artificial Sequence: Synthetic epitope
DENVRAIAVQ

SEQ ID NO: 2978 - protein, 10 aa, Artificial Sequence
  Description of Artificial Sequence: Synthetic epitope
DEPAVATGAA

SEQ ID NO: 2979 - protein, 10 aa, Artificial Sequence
  Description of Artificial Sequence: Synthetic epitope
DEPLSSVWVP

SEQ ID NO: 2980 - protein, 10 aa, Artificial Sequence
  Description of Artificial Sequence: Synthetic epitope
DEPSSEIMTS

SEQ ID NO: 2981 - protein, 10 aa, Artificial Sequence
  Description of Artificial Sequence: Synthetic epitope
DEQESSGAII

SEQ ID NO: 2982 - protein, 10 aa, Artificial Sequence
  Description of Artificial Sequence: Synthetic epitope
DEQHSQYSKL

SEQ ID NO: 2983 - protein, 10 aa, Artificial Sequence
  Description of Artificial Sequence: Synthetic epitope
DEQKKVREAD

SEQ ID NO: 2984 - protein, 10 aa, Artificial Sequence
  Description of Artificial Sequence: Synthetic epitope
DEQKTQALQS

SEQ ID NO: 2985 - protein, 10 aa, Artificial Sequence
  Description of Artificial Sequence: Synthetic epitope
DEQLGMKKEQ

SEQ ID NO: 2986 - protein, 10 aa, Artificial Sequence
  Description of Artificial Sequence: Synthetic epitope
DEQPESESEP

SEQ ID NO: 2987 - protein, 10 aa, Artificial Sequence
  Description of Artificial Sequence: Synthetic epitope
DEQQELVERD

SEQ ID NO: 2988 - protein, 10 aa, Artificial Sequence
  Description of Artificial Sequence: Synthetic epitope
DEQVIDSLTV

SEQ ID NO: 2989 - protein, 10 aa, Artificial Sequence
  Description of Artificial Sequence: Synthetic epitope
DEQYSKKIDA

SEQ ID NO: 2990 - protein, 10 aa, Artificial Sequence
  Description of Artificial Sequence: Synthetic epitope
DERERSTSKK

SEQ ID NO: 2991 - protein, 10 aa, Artificial Sequence
  Description of Artificial Sequence: Synthetic epitope
DERFVSKAGK

SEQ ID NO: 2992 - protein, 10 aa, Artificial Sequence
  Description of Artificial Sequence: Synthetic epitope
DERPKAIVED

SEQ ID NO: 2993 - protein, 10 aa, Artificial Sequence
  Description of Artificial Sequence: Synthetic epitope
DERTKLSNEV

SEQ ID NO: 2994 - protein, 10 aa, Artificial Sequence
  Description of Artificial Sequence: Synthetic epitope
DESALAAQAY

SEQ ID NO: 2995 - protein, 10 aa, Artificial Sequence
  Description of Artificial Sequence: Synthetic epitope
DESANKDNAT

SEQ ID NO: 2996 - protein, 10 aa, Artificial Sequence
  Description of Artificial Sequence: Synthetic epitope
DESANQEEPE

SEQ ID NO: 2997 - protein, 10 aa, Artificial Sequence
  Description of Artificial Sequence: Synthetic epitope
DESATNSGTG

SEQ ID NO: 2998 - protein, 10 aa, Artificial Sequence
  Description of Artificial Sequence: Synthetic epitope
DESAVAESRE

SEQ ID NO: 2999 - protein, 10 aa, Artificial Sequence
  Description of Artificial Sequence: Synthetic epitope
DESDNEVMGK

SEQ ID NO: 3000 - protein, 10 aa, Artificial Sequence
  Description of Artificial Sequence: Synthetic epitope
DESDNITAQP

SEQ ID NO: 3001 - protein, 10 aa, Artificial Sequence
  Description of Artificial Sequence: Synthetic epitope
DESHKESSQH

SEQ ID NO: 3002 - protein, 10 aa, Artificial Sequence
  Description of Artificial Sequence: Synthetic epitope
DESKAKLSSD

SEQ ID NO: 3003 - protein, 10 aa, Artificial Sequence
  Description of Artificial Sequence: Synthetic epitope
DESKLTLTTQ

SEQ ID NO: 3004 - protein, 10 aa, Artificial Sequence
  Description of Artificial Sequence: Synthetic epitope
DESLDMIDDE

SEQ ID NO: 3005 - protein, 10 aa, Artificial Sequence
  Description of Artificial Sequence: Synthetic epitope
DESLIVVLSN

SEQ ID NO: 3006 - protein, 10 aa, Artificial Sequence
  Description of Artificial Sequence: Synthetic epitope
DESLSVDDSD

SEQ ID NO: 3007 - protein, 10 aa, Artificial Sequence
  Description of Artificial Sequence: Synthetic epitope
DESLSVSFEQ

SEQ ID NO: 3008 - protein, 10 aa, Artificial Sequence
  Description of Artificial Sequence: Synthetic epitope
DESSVSLRSL

SEQ ID NO: 3009 - protein, 10 aa, Artificial Sequence
  Description of Artificial Sequence: Synthetic epitope
DESTMINEIT

SEQ ID NO: 3010 - protein, 10 aa, Artificial Sequence
  Description of Artificial Sequence: Synthetic epitope
DESTTASILE

SEQ ID NO: 3011 - protein, 10 aa, Artificial Sequence
  Description of Artificial Sequence: Synthetic epitope
DESVAEAVAN

SEQ ID NO: 3012 - protein, 10 aa, Artificial Sequence
  Description of Artificial Sequence: Synthetic epitope
DESVAKQKKS

SEQ ID NO: 3013 - protein, 10 aa, Artificial Sequence
  Description of Artificial Sequence: Synthetic epitope
DESVKDHTTA

SEQ ID NO: 3014 - protein, 10 aa, Artificial Sequence
  Description of Artificial Sequence: Synthetic epitope
DESVSAMEKQ

SEQ ID NO: 3015 - protein, 10 aa, Artificial Sequence
  Description of Artificial Sequence: Synthetic epitope
DESVTAGTSN

SEQ ID NO: 3016 - protein, 10 aa, Artificial Sequence
  Description of Artificial Sequence: Synthetic epitope
DETALQAIVE

SEQ ID NO: 3017 - protein, 10 aa, Artificial Sequence
  Description of Artificial Sequence: Synthetic epitope
DETDLSIPTS

SEQ ID NO: 3018 - protein, 10 aa, Artificial Sequence
  Description of Artificial Sequence: Synthetic epitope
DETEKKVLTV

SEQ ID NO: 3019 - protein, 10 aa, Artificial Sequence
  Description of Artificial Sequence: Synthetic epitope
DETESQKTIV

SEQ ID NO: 3020 - protein, 10 aa, Artificial Sequence
  Description of Artificial Sequence: Synthetic epitope
DETILIQTDI

SEQ ID NO: 3021 - protein, 10 aa, Artificial Sequence
  Description of Artificial Sequence: Synthetic epitope
DETLDKVPKS

SEQ ID NO: 3022 - protein, 10 aa, Artificial Sequence
  Description of Artificial Sequence: Synthetic epitope
DETNARDTYV

SEQ ID NO: 3023 - protein, 10 aa, Artificial Sequence
  Description of Artificial Sequence: Synthetic epitope
DETNSIKREQ

SEQ ID NO: 3024 - protein, 10 aa, Artificial Sequence
  Description of Artificial Sequence: Synthetic epitope
DETQDMLLEM

SEQ ID NO: 3025 - protein, 10 aa, Artificial Sequence
  Description of Artificial Sequence: Synthetic epitope
DETSINTRSF

SEQ ID NO: 3026 - protein, 10 aa, Artificial Sequence
  Description of Artificial Sequence: Synthetic epitope
DETSKSGKQS

SEQ ID NO: 3027 - protein, 10 aa, Artificial Sequence
  Description of Artificial Sequence: Synthetic epitope
DETSLTTFST

SEQ ID NO: 3028 - protein, 10 aa, Artificial Sequence
  Description of Artificial Sequence: Synthetic epitope
DETSQIVELQ

SEQ ID NO: 3029 - protein, 10 aa, Artificial Sequence
  Description of Artificial Sequence: Synthetic epitope
DETSSQGKAE

SEQ ID NO: 3030 - protein, 10 aa, Artificial Sequence
  Description of Artificial Sequence: Synthetic epitope
DETSTQSEVF

SEQ ID NO: 3031 - protein, 10 aa, Artificial Sequence
  Description of Artificial Sequence: Synthetic epitope
DETTVPAWRP

SEQ ID NO: 3032 - protein, 10 aa, Artificial Sequence
  Description of Artificial Sequence: Synthetic epitope
DETYNIVWGH

SEQ ID NO: 3033 - protein, 10 aa, Artificial Sequence
  Description of Artificial Sequence: Synthetic epitope
DETYSADLES

SEQ ID NO: 3034 - protein, 10 aa, Artificial Sequence
  Description of Artificial Sequence: Synthetic epitope
DEVAASQLTF

SEQ ID NO: 3035 - protein, 10 aa, Artificial Sequence
  Description of Artificial Sequence: Synthetic epitope
DEVAHHQTIP

SEQ ID NO: 3036 - protein, 10 aa, Artificial Sequence
  Description of Artificial Sequence: Synthetic epitope
DEVAKIQTPP

SEQ ID NO: 3037 - protein, 10 aa, Artificial Sequence
  Description of Artificial Sequence: Synthetic epitope
DEVDKDSDTE

SEQ ID NO: 3038 - protein, 10 aa, Artificial Sequence
  Description of Artificial Sequence: Synthetic epitope
DEVETDVVEI

SEQ ID NO: 3039 - protein, 10 aa, Artificial Sequence
  Description of Artificial Sequence: Synthetic epitope
DEVHTYEQVI

SEQ ID NO: 3040 - protein, 10 aa, Artificial Sequence
  Description of Artificial Sequence: Synthetic epitope
DEVKRNMRQR

SEQ ID NO: 3041 - protein, 10 aa, Artificial Sequence
  Description of Artificial Sequence: Synthetic epitope
DEVKSKLDIW

SEQ ID NO: 3042 - protein, 10 aa, Artificial Sequence
  Description of Artificial Sequence: Synthetic epitope
DEVKTIVKSS

SEQ ID NO: 3043 - protein, 10 aa, Artificial Sequence
  Description of Artificial Sequence: Synthetic epitope
DEVLTELEKA

SEQ ID NO: 3044 - protein, 10 aa, Artificial Sequence
  Description of Artificial Sequence: Synthetic epitope
DEVMSSTLQQ

SEQ ID NO: 3045 - protein, 10 aa, Artificial Sequence
  Description of Artificial Sequence: Synthetic epitope
DEVNVENRQK

SEQ ID NO: 3046 - protein, 10 aa, Artificial Sequence
  Description of Artificial Sequence: Synthetic epitope
DEVQIIHQIG

SEQ ID NO: 3047 - protein, 10 aa, Artificial Sequence
  Description of Artificial Sequence: Synthetic epitope
DEVRQRAQRI

SEQ ID NO: 3048 - protein, 10 aa, Artificial Sequence
  Description of Artificial Sequence: Synthetic epitope
DEVSMNKVTE

SEQ ID NO: 3049 - protein, 10 aa, Artificial Sequence
  Description of Artificial Sequence: Synthetic epitope
DEVTHGYLHS

SEQ ID NO: 3050 - protein, 10 aa, Artificial Sequence
  Description of Artificial Sequence: Synthetic epitope
DEVTVTEDKI

SEQ ID NO: 3051 - protein, 10 aa, Artificial Sequence
  Description of Artificial Sequence: Synthetic epitope
DEVVASAALR

SEQ ID NO: 3052 - protein, 10 aa, Artificial Sequence
  Description of Artificial Sequence: Synthetic epitope
DEVVKYIDTK

SEQ ID NO: 3053 - protein, 10 aa, Artificial Sequence
  Description of Artificial Sequence: Synthetic epitope
DEYEISEMVG

SEQ ID NO: 3054 - protein, 10 aa, Artificial Sequence
  Description of Artificial Sequence: Synthetic epitope
DEYESAIDHN

SEQ ID NO: 3055 - protein, 10 aa, Artificial Sequence
  Description of Artificial Sequence: Synthetic epitope
DEYKKINNVM

SEQ ID NO: 3056 - protein, 10 aa, Artificial Sequence
  Description of Artificial Sequence: Synthetic epitope
DEYKTEVPHH

SEQ ID NO: 3057 - protein, 10 aa, Artificial Sequence
  Description of Artificial Sequence: Synthetic epitope
DEYRNISQKD

SEQ ID NO: 3058 - protein, 10 aa, Artificial Sequence
  Description of Artificial Sequence: Synthetic epitope
DEYTKSLDNR

SEQ ID NO: 3059 - protein, 10 aa, Artificial Sequence
  Description of Artificial Sequence: Synthetic epitope
DFAAIKLQVI

SEQ ID NO: 3060 - protein, 10 aa, Artificial Sequence
  Description of Artificial Sequence: Synthetic epitope
DFEDGIRSAQ

SEQ ID NO: 3061 - protein, 10 aa, Artificial Sequence
  Description of Artificial Sequence: Synthetic epitope
DFEQLAEREG

SEQ ID NO: 3062 - protein, 10 aa, Artificial Sequence
  Description of Artificial Sequence: Synthetic epitope
DFERSELSSD

SEQ ID NO: 3063 - protein, 10 aa, Artificial Sequence
  Description of Artificial Sequence: Synthetic epitope
DFESKKNELP

SEQ ID NO: 3064 - protein, 10 aa, Artificial Sequence
  Description of Artificial Sequence: Synthetic epitope
DFEVGGAAPF

SEQ ID NO: 3065 - protein, 10 aa, Artificial Sequence
  Description of Artificial Sequence: Synthetic epitope
DFGYLTLVEQ

SEQ ID NO: 3066 - protein, 10 aa, Artificial Sequence
  Description of Artificial Sequence: Synthetic epitope
DFHDQALSSH

SEQ ID NO: 3067 - protein, 10 aa, Artificial Sequence
  Description of Artificial Sequence: Synthetic epitope
DFIEKAKASN

SEQ ID NO: 3068 - protein, 10 aa, Artificial Sequence
  Description of Artificial Sequence: Synthetic epitope
DFILQAERET

SEQ ID NO: 3069 - protein, 10 aa, Artificial Sequence
  Description of Artificial Sequence: Synthetic epitope
DFISGESEKQ

SEQ ID NO: 3070 - protein, 10 aa, Artificial Sequence
  Description of Artificial Sequence: Synthetic epitope
DFKWPHSQIR

SEQ ID NO: 3071 - protein, 10 aa, Artificial Sequence
  Description of Artificial Sequence: Synthetic epitope
DFLKEKPQTE

SEQ ID NO: 3072 - protein, 10 aa, Artificial Sequence
  Description of Artificial Sequence: Synthetic epitope
DFLKQIIGRP

SEQ ID NO: 3073 - protein, 10 aa, Artificial Sequence
  Description of Artificial Sequence: Synthetic epitope
DFLQEEQKER

SEQ ID NO: 3074 - protein, 10 aa, Artificial Sequence
  Description of Artificial Sequence: Synthetic epitope
DFLTQISRSP

SEQ ID NO: 3075 - protein, 10 aa, Artificial Sequence
  Description of Artificial Sequence: Synthetic epitope
DFMSKGNEQE

SEQ ID NO: 3076 - protein, 10 aa, Artificial Sequence
  Description of Artificial Sequence: Synthetic epitope
DFNKSGSSTA

SEQ ID NO: 3077 - protein, 10 aa, Artificial Sequence
  Description of Artificial Sequence: Synthetic epitope
DFNLISIMSI

SEQ ID NO: 3078 - protein, 10 aa, Artificial Sequence
  Description of Artificial Sequence: Synthetic epitope
DFNLTTKEGA

SEQ ID NO: 3079 - protein, 10 aa, Artificial Sequence
  Description of Artificial Sequence: Synthetic epitope
DFNMTTNHSF

SEQ ID NO: 3080 - protein, 10 aa, Artificial Sequence
  Description of Artificial Sequence: Synthetic epitope
DFNSKATKLH

SEQ ID NO: 3081 - protein, 10 aa, Artificial Sequence
  Description of Artificial Sequence: Synthetic epitope
DFPSTSIKTE

SEQ ID NO: 3082 - protein, 10 aa, Artificial Sequence
  Description of Artificial Sequence: Synthetic epitope
DFQTSARRMG

SEQ ID NO: 3083 - protein, 10 aa, Artificial Sequence
  Description of Artificial Sequence: Synthetic epitope
DFRETADVIA

SEQ ID NO: 3084 - protein, 10 aa, Artificial Sequence
  Description of Artificial Sequence: Synthetic epitope
DFRKAVMVLP

SEQ ID NO: 3085 - protein, 10 aa, Artificial Sequence
  Description of Artificial Sequence: Synthetic epitope
DFRTGINLPY

SEQ ID NO: 3086 - protein, 10 aa, Artificial Sequence
  Description of Artificial Sequence: Synthetic epitope
DFSALMRSSY

SEQ ID NO: 3087 - protein, 10 aa, Artificial Sequence
  Description of Artificial Sequence: Synthetic epitope
DFSASVKKPH

SEQ ID NO: 3088 - protein, 10 aa, Artificial Sequence
  Description of Artificial Sequence: Synthetic epitope
DFSDRETKNT

SEQ ID NO: 3089 - protein, 10 aa, Artificial Sequence
  Description of Artificial Sequence: Synthetic epitope
DFSEDMLQEK

SEQ ID NO: 3090 - protein, 10 aa, Artificial Sequence
  Description of Artificial Sequence: Synthetic epitope
DFSKASEAAS

SEQ ID NO: 3091 - protein, 10 aa, Artificial Sequence
  Description of Artificial Sequence: Synthetic epitope
DFSKELKKTE

SEQ ID NO: 3092 - protein, 10 aa, Artificial Sequence
  Description of Artificial Sequence: Synthetic epitope
DFTELWRNMK

SEQ ID NO: 3093 - protein, 10 aa, Artificial Sequence
  Description of Artificial Sequence: Synthetic epitope
DFTKTQMKPG

SEQ ID NO: 3094 - protein, 10 aa, Artificial Sequence
  Description of Artificial Sequence: Synthetic epitope
DFTVKTNISE

SEQ ID NO: 3095 - protein, 10 aa, Artificial Sequence
  Description of Artificial Sequence: Synthetic epitope
DFVSLSKSKN

SEQ ID NO: 3096 - protein, 10 aa, Artificial Sequence
  Description of Artificial Sequence: Synthetic epitope
DFVVASETSD

SEQ ID NO: 3097 - protein, 10 aa, Artificial Sequence
  Description of Artificial Sequence: Synthetic epitope
DFVYNLQVLE

SEQ ID NO: 3098 - protein, 10 aa, Artificial Sequence
  Description of Artificial Sequence: Synthetic epitope
DFWLIVRVLQ

SEQ ID NO: 3099 - protein, 10 aa, Artificial Sequence
  Description of Artificial Sequence: Synthetic epitope
DFYEYMSPRP

SEQ ID NO: 3100 - protein, 10 aa, Artificial Sequence
  Description of Artificial Sequence: Synthetic epitope
DGAASELSSI

SEQ ID NO: 3101 - protein, 10 aa, Artificial Sequence
  Description of Artificial Sequence: Synthetic epitope
DGAFVASARQ

SEQ ID NO: 3102 - protein, 10 aa, Artificial Sequence
  Description of Artificial Sequence: Synthetic epitope
DGAMMEAASV

SEQ ID NO: 3103 - protein, 10 aa, Artificial Sequence
  Description of Artificial Sequence: Synthetic epitope
DGAQTKELQI

SEQ ID NO: 3104 - protein, 10 aa, Artificial Sequence
  Description of Artificial Sequence: Synthetic epitope
DGASDSGESA

SEQ ID NO: 3105 - protein, 10 aa, Artificial Sequence
  Description of Artificial Sequence: Synthetic epitope
DGASSELGKE

SEQ ID NO: 3106 - protein, 10 aa, Artificial Sequence
  Description of Artificial Sequence: Synthetic epitope
DGASSGGAQW

SEQ ID NO: 3107 - protein, 10 aa, Artificial Sequence
  Description of Artificial Sequence: Synthetic epitope
DGAVKKLTKL

SEQ ID NO: 3108 - protein, 10 aa, Artificial Sequence
  Description of Artificial Sequence: Synthetic epitope
DGAVQSASQE

SEQ ID NO: 3109 - protein, 10 aa, Artificial Sequence
  Description of Artificial Sequence: Synthetic epitope
DGDFAREKTK

SEQ ID NO: 3110 - protein, 10 aa, Artificial Sequence
  Description of Artificial Sequence: Synthetic epitope
DGDKIQVQDD

SEQ ID NO: 3111 - protein, 10 aa, Artificial Sequence
  Description of Artificial Sequence: Synthetic epitope
DGDKKTLTRK

SEQ ID NO: 3112 - protein, 10 aa, Artificial Sequence
  Description of Artificial Sequence: Synthetic epitope
DGDQSVVDAS

SEQ ID NO: 3113 - protein, 10 aa, Artificial Sequence
  Description of Artificial Sequence: Synthetic epitope
DGDVSEVSES

SEQ ID NO: 3114 - protein, 10 aa, Artificial Sequence
  Description of Artificial Sequence: Synthetic epitope
DGEASINNRK

SEQ ID NO: 3115 - protein, 10 aa, Artificial Sequence
  Description of Artificial Sequence: Synthetic epitope
DGEKKSKKIR

SEQ ID NO: 3116 - protein, 10 aa, Artificial Sequence
  Description of Artificial Sequence: Synthetic epitope
DGERSVLSEV

SEQ ID NO: 3117 - protein, 10 aa, Artificial Sequence
  Description of Artificial Sequence: Synthetic epitope
DGESATSKNG

SEQ ID NO: 3118 - protein, 10 aa, Artificial Sequence
  Description of Artificial Sequence: Synthetic epitope
DGEVTVAEQK

SEQ ID NO: 3119 - protein, 10 aa, Artificial Sequence
  Description of Artificial Sequence: Synthetic epitope
DGEVVSEATQ

SEQ ID NO: 3120 - protein, 10 aa, Artificial Sequence
  Description of Artificial Sequence: Synthetic epitope
DGFDNESSNK

SEQ ID NO: 3121 - protein, 10 aa, Artificial Sequence
  Description of Artificial Sequence: Synthetic epitope
DGGAESEQTV

SEQ ID NO: 3122 - protein, 10 aa, Artificial Sequence
  Description of Artificial Sequence: Synthetic epitope
DGGAVRLVAQ

SEQ ID NO: 3123 - protein, 10 aa, Artificial Sequence
  Description of Artificial Sequence: Synthetic epitope
DGGESSKEKK

SEQ ID NO: 3124 - protein, 10 aa, Artificial Sequence
  Description of Artificial Sequence: Synthetic epitope
DGGSNVKARS

SEQ ID NO: 3125 - protein, 10 aa, Artificial Sequence
  Description of Artificial Sequence: Synthetic epitope
DGGVHTPSSG

SEQ ID NO: 3126 - protein, 10 aa, Artificial Sequence
  Description of Artificial Sequence: Synthetic epitope
DGGVSKSTTS

SEQ ID NO: 3127 - protein, 10 aa, Artificial Sequence
  Description of Artificial Sequence: Synthetic epitope
DGGVTKLQAV

SEQ ID NO: 3128 - protein, 10 aa, Artificial Sequence
  Description of Artificial Sequence: Synthetic epitope
DGIKKQQIDS

SEQ ID NO: 3129 - protein, 10 aa, Artificial Sequence
  Description of Artificial Sequence: Synthetic epitope
DGIKTEHYKT

SEQ ID NO: 3130 - protein, 10 aa, Artificial Sequence
  Description of Artificial Sequence: Synthetic epitope
DGILTNKKMI

SEQ ID NO: 3131 - protein, 10 aa, Artificial Sequence
  Description of Artificial Sequence: Synthetic epitope
DGKASLVSEE

SEQ ID NO: 3132 - protein, 10 aa, Artificial Sequence
  Description of Artificial Sequence: Synthetic epitope
DGKIAEAVTL

SEQ ID NO: 3133 - protein, 10 aa, Artificial Sequence
  Description of Artificial Sequence: Synthetic epitope
DGKNQKGAQT

SEQ ID NO: 3134 - protein, 10 aa, Artificial Sequence
  Description of Artificial Sequence: Synthetic epitope
DGKSTATDIT

SEQ ID NO: 3135 - protein, 10 aa, Artificial Sequence
  Description of Artificial Sequence: Synthetic epitope
DGKTAVTEIV

SEQ ID NO: 3136 - protein, 10 aa, Artificial Sequence
  Description of Artificial Sequence: Synthetic epitope
DGKVWILESQ

SEQ ID NO: 3137 - protein, 10 aa, Artificial Sequence
  Description of Artificial Sequence: Synthetic epitope
DGKWSRSDQQ

SEQ ID NO: 3138 - protein, 10 aa, Artificial Sequence
  Description of Artificial Sequence: Synthetic epitope
DGLETSQMST

SEQ ID NO: 3139 - protein, 10 aa, Artificial Sequence
  Description of Artificial Sequence: Synthetic epitope
DGLKFASVQA

SEQ ID NO: 3140 - protein, 10 aa, Artificial Sequence
  Description of Artificial Sequence: Synthetic epitope
DGLKSGTTIA

SEQ ID NO: 3141 - protein, 10 aa, Artificial Sequence
  Description of Artificial Sequence: Synthetic epitope
DGLNILNSVE

SEQ ID NO: 3142 - protein, 10 aa, Artificial Sequence
  Description of Artificial Sequence: Synthetic epitope
DGLSMMINRK

SEQ ID NO: 3143 - protein, 10 aa, Artificial Sequence
  Description of Artificial Sequence: Synthetic epitope
DGMQSARTQA

SEQ ID NO: 3144 - protein, 10 aa, Artificial Sequence
  Description of Artificial Sequence: Synthetic epitope
DGMRSVRAFH

SEQ ID NO: 3145 - protein, 10 aa, Artificial Sequence
  Description of Artificial Sequence: Synthetic epitope
DGMSSVNFQT

SEQ ID NO: 3146 - protein, 10 aa, Artificial Sequence
  Description of Artificial Sequence: Synthetic epitope
DGNFIYSQAD

SEQ ID NO: 3147 - protein, 10 aa, Artificial Sequence
  Description of Artificial Sequence: Synthetic epitope
DGNITIEGAS

SEQ ID NO: 3148 - protein, 10 aa, Artificial Sequence
  Description of Artificial Sequence: Synthetic epitope
DGPFVYGRTQ

SEQ ID NO: 3149 - protein, 10 aa, Artificial Sequence
  Description of Artificial Sequence: Synthetic epitope
DGPLDAALDH

SEQ ID NO: 3150 - protein, 10 aa, Artificial Sequence
  Description of Artificial Sequence: Synthetic epitope
DGPVTIELES

SEQ ID NO: 3151 - protein, 10 aa, Artificial Sequence
  Description of Artificial Sequence: Synthetic epitope
DGQLQVKVYW

SEQ ID NO: 3152 - protein, 10 aa, Artificial Sequence
  Description of Artificial Sequence: Synthetic epitope
DGQNTRDTRE

SEQ ID NO: 3153 - protein, 10 aa, Artificial Sequence
  Description of Artificial Sequence: Synthetic epitope
DGQTLLKSHR

SEQ ID NO: 3154 - protein, 10 aa, Artificial Sequence
  Description of Artificial Sequence: Synthetic epitope
DGRADKSKGQ

SEQ ID NO: 3155 - protein, 10 aa, Artificial Sequence
  Description of Artificial Sequence: Synthetic epitope
DGRDKIDDSQ

SEQ ID NO: 3156 - protein, 10 aa, Artificial Sequence
  Description of Artificial Sequence: Synthetic epitope
DGRESEEAAG

SEQ ID NO: 3157 - protein, 10 aa, Artificial Sequence
  Description of Artificial Sequence: Synthetic epitope
DGRGKATISN

SEQ ID NO: 3158 - protein, 10 aa, Artificial Sequence
  Description of Artificial Sequence: Synthetic epitope
DGRLMLSLMG

SEQ ID NO: 3159 - protein, 10 aa, Artificial Sequence
  Description of Artificial Sequence: Synthetic epitope
DGRRLLTQEA

SEQ ID NO: 3160 - protein, 10 aa, Artificial Sequence
  Description of Artificial Sequence: Synthetic epitope
DGSGLWFGYG

SEQ ID NO: 3161 - protein, 10 aa, Artificial Sequence
  Description of Artificial Sequence: Synthetic epitope
DGSHASQRPH

SEQ ID NO: 3162 - protein, 10 aa, Artificial Sequence
  Description of Artificial Sequence: Synthetic epitope
DGSHKNMQRD

SEQ ID NO: 3163 - protein, 10 aa, Artificial Sequence
  Description of Artificial Sequence: Synthetic epitope
DGSKLTEKVE

SEQ ID NO: 3164 - protein, 10 aa, Artificial Sequence
  Description of Artificial Sequence: Synthetic epitope
DGSLRMDDPK

SEQ ID NO: 3165 - protein, 10 aa, Artificial Sequence
  Description of Artificial Sequence: Synthetic epitope
DGSLSAKRAA

SEQ ID NO: 3166 - protein, 10 aa, Artificial Sequence
  Description of Artificial Sequence: Synthetic epitope
DGSPKSQGVK

SEQ ID NO: 3167 - protein, 10 aa, Artificial Sequence
  Description of Artificial Sequence: Synthetic epitope
DGSQKSLRRG

SEQ ID NO: 3168 - protein, 10 aa, Artificial Sequence
  Description of Artificial Sequence: Synthetic epitope
DGSQTETEKK

SEQ ID NO: 3169 - protein, 10 aa, Artificial Sequence
  Description of Artificial Sequence: Synthetic epitope
DGSQVSSGPR

SEQ ID NO: 3170 - protein, 10 aa, Artificial Sequence
  Description of Artificial Sequence: Synthetic epitope
DGSSESLKNE

SEQ ID NO: 3171 - protein, 10 aa, Artificial Sequence
  Description of Artificial Sequence: Synthetic epitope
DGSTNETASS

SEQ ID NO: 3172 - protein, 10 aa, Artificial Sequence
  Description of Artificial Sequence: Synthetic epitope
DGTDAIEKQL

SEQ ID NO: 3173 - protein, 10 aa, Artificial Sequence
  Description of Artificial Sequence: Synthetic epitope
DGTISKLQTD

SEQ ID NO: 3174 - protein, 10 aa, Artificial Sequence
  Description of Artificial Sequence: Synthetic epitope
DGTKNEVTAH

SEQ ID NO: 3175 - protein, 10 aa, Artificial Sequence
  Description of Artificial Sequence: Synthetic epitope
DGTMARKLRY

SEQ ID NO: 3176 - protein, 10 aa, Artificial Sequence
  Description of Artificial Sequence: Synthetic epitope
DGTPTMSLER

SEQ ID NO: 3177 - protein, 10 aa, Artificial Sequence
  Description of Artificial Sequence: Synthetic epitope
DGTQVASSLD

SEQ ID NO: 3178 - protein, 10 aa, Artificial Sequence
  Description of Artificial Sequence: Synthetic epitope
DGTRQKSYAK

SEQ ID NO: 3179 - protein, 10 aa, Artificial Sequence
  Description of Artificial Sequence: Synthetic epitope
DGTSANSKME

SEQ ID NO: 3180 - protein, 10 aa, Artificial Sequence
  Description of Artificial Sequence: Synthetic epitope
DGTSLSLALR

SEQ ID NO: 3181 - protein, 10 aa, Artificial Sequence
  Description of Artificial Sequence: Synthetic epitope
DGTSTASSQQ

SEQ ID NO: 3182 - protein, 10 aa, Artificial Sequence
  Description of Artificial Sequence: Synthetic epitope
DGVDSRIDER

SEQ ID NO: 3183 - protein, 10 aa, Artificial Sequence
  Description of Artificial Sequence: Synthetic epitope
DGVEKMKSMS

SEQ ID NO: 3184 - protein, 10 aa, Artificial Sequence
  Description of Artificial Sequence: Synthetic epitope
DGVKVSVKLQ

SEQ ID NO: 3185 - protein, 10 aa, Artificial Sequence
  Description of Artificial Sequence: Synthetic epitope
DGVTMAQYQQ

SEQ ID NO: 3186 - protein, 10 aa, Artificial Sequence
  Description of Artificial Sequence: Synthetic epitope
DGYESSLNFH

SEQ ID NO: 3187 - protein, 10 aa, Artificial Sequence
  Description of Artificial Sequence: Synthetic epitope
DGYQLSHSAI

SEQ ID NO: 3188 - protein, 10 aa, Artificial Sequence
  Description of Artificial Sequence: Synthetic epitope
DGYSRNKMST

SEQ ID NO: 3189 - protein, 10 aa, Artificial Sequence
  Description of Artificial Sequence: Synthetic epitope
DHALVYQKYV

SEQ ID NO: 3190 - protein, 10 aa, Artificial Sequence
  Description of Artificial Sequence: Synthetic epitope
DHAMSVASDH

SEQ ID NO: 3191 - protein, 10 aa, Artificial Sequence
  Description of Artificial Sequence: Synthetic epitope
DHANVNAMPR

SEQ ID NO: 3192 - protein, 10 aa, Artificial Sequence
  Description of Artificial Sequence: Synthetic epitope
DHATSQQKRD

SEQ ID NO: 3193 - protein, 10 aa, Artificial Sequence
  Description of Artificial Sequence: Synthetic epitope
DHDRPMNTLT

SEQ ID NO: 3194 - protein, 10 aa, Artificial Sequence
  Description of Artificial Sequence: Synthetic epitope
DHDSSDVSSE

SEQ ID NO: 3195 - protein, 10 aa, Artificial Sequence
  Description of Artificial Sequence: Synthetic epitope
DHDVSQSYQP

SEQ ID NO: 3196 - protein, 10 aa, Artificial Sequence
  Description of Artificial Sequence: Synthetic epitope
DHEASSAESG

SEQ ID NO: 3197 - protein, 10 aa, Artificial Sequence
  Description of Artificial Sequence: Synthetic epitope
DHEVKEAQTL

SEQ ID NO: 3198 - protein, 10 aa, Artificial Sequence
  Description of Artificial Sequence: Synthetic epitope
DHGAAEKHME

SEQ ID NO: 3199 - protein, 10 aa, Artificial Sequence
  Description of Artificial Sequence: Synthetic epitope
DHGRRFTMGE

SEQ ID NO: 3200 - protein, 10 aa, Artificial Sequence
  Description of Artificial Sequence: Synthetic epitope
DHIGKSMPNV

SEQ ID NO: 3201 - protein, 10 aa, Artificial Sequence
  Description of Artificial Sequence: Synthetic epitope
DHILSGATIK

SEQ ID NO: 3202 - protein, 10 aa, Artificial Sequence
  Description of Artificial Sequence: Synthetic epitope
DHIQSTLLKT

SEQ ID NO: 3203 - protein, 10 aa, Artificial Sequence
  Description of Artificial Sequence: Synthetic epitope
DHITKAIKSK

SEQ ID NO: 3204 - protein, 10 aa, Artificial Sequence
  Description of Artificial Sequence: Synthetic epitope
DHKQKATALQ

SEQ ID NO: 3205 - protein, 10 aa, Artificial Sequence
  Description of Artificial Sequence: Synthetic epitope
DHKSVTADTE

SEQ ID NO: 3206 - protein, 10 aa, Artificial Sequence
  Description of Artificial Sequence: Synthetic epitope
DHLMTKVEEL

SEQ ID NO: 3207 - protein, 10 aa, Artificial Sequence
  Description of Artificial Sequence: Synthetic epitope
DHLRDSARKP

SEQ ID NO: 3208 - protein, 10 aa, Artificial Sequence
  Description of Artificial Sequence: Synthetic epitope
DHLSESESEE

SEQ ID NO: 3209 - protein, 10 aa, Artificial Sequence
  Description of Artificial Sequence: Synthetic epitope
DHLTHVTRLP

SEQ ID NO: 3210 - protein, 10 aa, Artificial Sequence
  Description of Artificial Sequence: Synthetic epitope
DHLTLSVSRP

SEQ ID NO: 3211 - protein, 10 aa, Artificial Sequence
  Description of Artificial Sequence: Synthetic epitope
DHMDSWTAKF

SEQ ID NO: 3212 - protein, 10 aa, Artificial Sequence
  Description of Artificial Sequence: Synthetic epitope
DHMEGLEHVE

SEQ ID NO: 3213 - protein, 10 aa, Artificial Sequence
  Description of Artificial Sequence: Synthetic epitope
DHMFTSEFDA

SEQ ID NO: 3214 - protein, 10 aa, Artificial Sequence
  Description of Artificial Sequence: Synthetic epitope
DHMIKPVEVT

SEQ ID NO: 3215 - protein, 10 aa, Artificial Sequence
  Description of Artificial Sequence: Synthetic epitope
DHMVVSSELD

SEQ ID NO: 3216 - protein, 10 aa, Artificial Sequence
  Description of Artificial Sequence: Synthetic epitope
DHPEIGIKGS

SEQ ID NO: 3217 - protein, 10 aa, Artificial Sequence
  Description of Artificial Sequence: Synthetic epitope
DHQMRENHSP

SEQ ID NO: 3218 - protein, 10 aa, Artificial Sequence
  Description of Artificial Sequence: Synthetic epitope
DHRELGKMMN

SEQ ID NO: 3219 - protein, 10 aa, Artificial Sequence
  Description of Artificial Sequence: Synthetic epitope
DHRSKEELHQ

SEQ ID NO: 3220 - protein, 10 aa, Artificial Sequence
  Description of Artificial Sequence: Synthetic epitope
DHRSTLTKKM

SEQ ID NO: 3221 - protein, 10 aa, Artificial Sequence
  Description of Artificial Sequence: Synthetic epitope
DHRVVGTIDQ

SEQ ID NO: 3222 - protein, 10 aa, Artificial Sequence
  Description of Artificial Sequence: Synthetic epitope
DHSALSTMSG

SEQ ID NO: 3223 - protein, 10 aa, Artificial Sequence
  Description of Artificial Sequence: Synthetic epitope
DHSEILDTTN

SEQ ID NO: 3224 - protein, 10 aa, Artificial Sequence
  Description of Artificial Sequence: Synthetic epitope
DHSFEDRMID

SEQ ID NO: 3225 - protein, 10 aa, Artificial Sequence
  Description of Artificial Sequence: Synthetic epitope
DHSGIIDGSP

SEQ ID NO: 3226 - protein, 10 aa, Artificial Sequence
  Description of Artificial Sequence: Synthetic epitope
DHSGSVVSEP

SEQ ID NO: 3227 - protein, 10 aa, Artificial Sequence
  Description of Artificial Sequence: Synthetic epitope
DHSKLSAMMG

SEQ ID NO: 3228 - protein, 10 aa, Artificial Sequence
  Description of Artificial Sequence: Synthetic epitope
DHSLHQIETQ

SEQ ID NO: 3229 - protein, 10 aa, Artificial Sequence
  Description of Artificial Sequence: Synthetic epitope
DHSLMTSKRD

SEQ ID NO: 3230 - protein, 10 aa, Artificial Sequence
  Description of Artificial Sequence: Synthetic epitope
DHSSMKLVEE

SEQ ID NO: 3231 - protein, 10 aa, Artificial Sequence
  Description of Artificial Sequence: Synthetic epitope
DHSTTLTSSL

SEQ ID NO: 3232 - protein, 10 aa, Artificial Sequence
  Description of Artificial Sequence: Synthetic epitope
DHTAVALRAM

SEQ ID NO: 3233 - protein, 10 aa, Artificial Sequence
  Description of Artificial Sequence: Synthetic epitope
DHWETAPRHM

SEQ ID NO: 3234 - protein, 10 aa, Artificial Sequence
  Description of Artificial Sequence: Synthetic epitope
DIAALLIAAG

SEQ ID NO: 3235 - protein, 10 aa, Artificial Sequence
  Description of Artificial Sequence: Synthetic epitope
DIAKTAVPTE

SEQ ID NO: 3236 - protein, 10 aa, Artificial Sequence
  Description of Artificial Sequence: Synthetic epitope
DIANDNISSA

SEQ ID NO: 3237 - protein, 10 aa, Artificial Sequence
  Description of Artificial Sequence: Synthetic epitope
DIASQSLDQE

SEQ ID NO: 3238 - protein, 10 aa, Artificial Sequence
  Description of Artificial Sequence: Synthetic epitope
DIASVVKELG

SEQ ID NO: 3239 - protein, 10 aa, Artificial Sequence
  Description of Artificial Sequence: Synthetic epitope
DIDEWMTKYS

SEQ ID NO: 3240 - protein, 10 aa, Artificial Sequence
  Description of Artificial Sequence: Synthetic epitope
DIDLTIDKEI

SEQ ID NO: 3241 - protein, 10 aa, Artificial Sequence
  Description of Artificial Sequence: Synthetic epitope
DIDLTRMEYI

SEQ ID NO: 3242 - protein, 10 aa, Artificial Sequence
  Description of Artificial Sequence: Synthetic epitope
DIDSTRVVDQ

SEQ ID NO: 3243 - protein, 10 aa, Artificial Sequence
  Description of Artificial Sequence: Synthetic epitope
DIEENLSVTP

SEQ ID NO: 3244 - protein, 10 aa, Artificial Sequence
  Description of Artificial Sequence: Synthetic epitope
DIEHKKRKAK

SEQ ID NO: 3245 - protein, 10 aa, Artificial Sequence
  Description of Artificial Sequence: Synthetic epitope
DIEKETAKDE

SEQ ID NO: 3246 - protein, 10 aa, Artificial Sequence
  Description of Artificial Sequence: Synthetic epitope
DIESSKSSTR

SEQ ID NO: 3247 - protein, 10 aa, Artificial Sequence
  Description of Artificial Sequence: Synthetic epitope
DIFAEALKIQ

SEQ ID NO: 3248 - protein, 10 aa, Artificial Sequence
  Description of Artificial Sequence: Synthetic epitope
DIGEIKKRPM

SEQ ID NO: 3249 - protein, 10 aa, Artificial Sequence
  Description of Artificial Sequence: Synthetic epitope
DIHSSNAVES

SEQ ID NO: 3250 - protein, 10 aa, Artificial Sequence
  Description of Artificial Sequence: Synthetic epitope
DIIQLKPDVV

SEQ ID NO: 3251 - protein, 10 aa, Artificial Sequence
  Description of Artificial Sequence: Synthetic epitope
DIIRSMPEQT

SEQ ID NO: 3252 - protein, 10 aa, Artificial Sequence
  Description of Artificial Sequence: Synthetic epitope
DIITAMSNID

SEQ ID NO: 3253 - protein, 10 aa, Artificial Sequence
  Description of Artificial Sequence: Synthetic epitope
DIITASYAPE

SEQ ID NO: 3254 - protein, 10 aa, Artificial Sequence
  Description of Artificial Sequence: Synthetic epitope
DIKATQQNTE

SEQ ID NO: 3255 - protein, 10 aa, Artificial Sequence
  Description of Artificial Sequence: Synthetic epitope
DIKDKAEKSE

SEQ ID NO: 3256 - protein, 10 aa, Artificial Sequence
  Description of Artificial Sequence: Synthetic epitope
DIKEESSAKQ

SEQ ID NO: 3257 - protein, 10 aa, Artificial Sequence
  Description of Artificial Sequence: Synthetic epitope
DIKFSTRKFL

SEQ ID NO: 3258 - protein, 10 aa, Artificial Sequence
  Description of Artificial Sequence: Synthetic epitope
DIKGGYQKPQ

SEQ ID NO: 3259 - protein, 10 aa, Artificial Sequence
  Description of Artificial Sequence: Synthetic epitope
DIKKTETVQE

SEQ ID NO: 3260 - protein, 10 aa, Artificial Sequence
  Description of Artificial Sequence: Synthetic epitope
DIKMQIGSRN

SEQ ID NO: 3261 - protein, 10 aa, Artificial Sequence
  Description of Artificial Sequence: Synthetic epitope
DIKPSLAASD

SEQ ID NO: 3262 - protein, 10 aa, Artificial Sequence
  Description of Artificial Sequence: Synthetic epitope
DIKVLQSALA

SEQ ID NO: 3263 - protein, 10 aa, Artificial Sequence
  Description of Artificial Sequence: Synthetic epitope
DILDANVNVI

SEQ ID NO: 3264 - protein, 10 aa, Artificial Sequence
  Description of Artificial Sequence: Synthetic epitope
DIMASNLNSA

SEQ ID NO: 3265 - protein, 10 aa, Artificial Sequence
  Description of Artificial Sequence: Synthetic epitope
DIMDAQRRQR

SEQ ID NO: 3266 - protein, 10 aa, Artificial Sequence
  Description of Artificial Sequence: Synthetic epitope
DIMEKDTISY

SEQ ID NO: 3267 - protein, 10 aa, Artificial Sequence
  Description of Artificial Sequence: Synthetic epitope
DIMQQAQYDQ

SEQ ID NO: 3268 - protein, 10 aa, Artificial Sequence
  Description of Artificial Sequence: Synthetic epitope
DIMTMKTSGA

SEQ ID NO: 3269 - protein, 10 aa, Artificial Sequence
  Description of Artificial Sequence: Synthetic epitope
DIMVQQRMSL

SEQ ID NO: 3270 - protein, 10 aa, Artificial Sequence
  Description of Artificial Sequence: Synthetic epitope
DINAKANAKK

SEQ ID NO: 3271 - protein, 10 aa, Artificial Sequence
  Description of Artificial Sequence: Synthetic epitope
DINQESAPKA

SEQ ID NO: 3272 - protein, 10 aa, Artificial Sequence
  Description of Artificial Sequence: Synthetic epitope
DINTIGQTGF

SEQ ID NO: 3273 - protein, 10 aa, Artificial Sequence
  Description of Artificial Sequence: Synthetic epitope
DINWMEYLHG

SEQ ID NO: 3274 - protein, 10 aa, Artificial Sequence
  Description of Artificial Sequence: Synthetic epitope
DIPIVEKEAQ

SEQ ID NO: 3275 - protein, 10 aa, Artificial Sequence
  Description of Artificial Sequence: Synthetic epitope
DIPKERKNAE

SEQ ID NO: 3276 - protein, 10 aa, Artificial Sequence
  Description of Artificial Sequence: Synthetic epitope
DIPNFVNTDQ

SEQ ID NO: 3277 - protein, 10 aa, Artificial Sequence
  Description of Artificial Sequence: Synthetic epitope
DIQALSPQVQ

SEQ ID NO: 3278 - protein, 10 aa, Artificial Sequence
  Description of Artificial Sequence: Synthetic epitope
DIQLSSKHTH

SEQ ID NO: 3279 - protein, 10 aa, Artificial Sequence
  Description of Artificial Sequence: Synthetic epitope
DIQMITELKA

SEQ ID NO: 3280 - protein, 10 aa, Artificial Sequence
  Description of Artificial Sequence: Synthetic epitope
DIQQMNRPSN

SEQ ID NO: 3281 - protein, 10 aa, Artificial Sequence
  Description of Artificial Sequence: Synthetic epitope
DIQQSASGER

SEQ ID NO: 3282 - protein, 10 aa, Artificial Sequence
  Description of Artificial Sequence: Synthetic epitope
DIQSFYIDRL

SEQ ID NO: 3283 - protein, 10 aa, Artificial Sequence
  Description of Artificial Sequence: Synthetic epitope
DIRESSVEED

SEQ ID NO: 3284 - protein, 10 aa, Artificial Sequence
  Description of Artificial Sequence: Synthetic epitope
DIRILMAKSV

SEQ ID NO: 3285 - protein, 10 aa, Artificial Sequence
  Description of Artificial Sequence: Synthetic epitope
DIRLQLMEQK

SEQ ID NO: 3286 - protein, 10 aa, Artificial Sequence
  Description of Artificial Sequence: Synthetic epitope
DIRMKVSQHE

SEQ ID NO: 3287 - protein, 10 aa, Artificial Sequence
  Description of Artificial Sequence: Synthetic epitope
DIRTKSLQPR

SEQ ID NO: 3288 - protein, 10 aa, Artificial Sequence
  Description of Artificial Sequence: Synthetic epitope
DIRYDEAMGY

SEQ ID NO: 3289 - protein, 10 aa, Artificial Sequence
  Description of Artificial Sequence: Synthetic epitope
DISAKAVQDK

SEQ ID NO: 3290 - protein, 10 aa, Artificial Sequence
  Description of Artificial Sequence: Synthetic epitope
DISASLQTIT

SEQ ID NO: 3291 - protein, 10 aa, Artificial Sequence
  Description of Artificial Sequence: Synthetic epitope
DISEDSTKDN

SEQ ID NO: 3292 - protein, 10 aa, Artificial Sequence
  Description of Artificial Sequence: Synthetic epitope
DISESSTQSD

SEQ ID NO: 3293 - protein, 10 aa, Artificial Sequence
  Description of Artificial Sequence: Synthetic epitope
DISEVLNTDD

SEQ ID NO: 3294 - protein, 10 aa, Artificial Sequence
  Description of Artificial Sequence: Synthetic epitope
DISIQLSSAQ

SEQ ID NO: 3295 - protein, 10 aa, Artificial Sequence
  Description of Artificial Sequence: Synthetic epitope
DISKQASLSD

SEQ ID NO: 3296 - protein, 10 aa, Artificial Sequence
  Description of Artificial Sequence: Synthetic epitope
DISNARAFKE

SEQ ID NO: 3297 - protein, 10 aa, Artificial Sequence
  Description of Artificial Sequence: Synthetic epitope
DISPPTYVKE

SEQ ID NO: 3298 - protein, 10 aa, Artificial Sequence
  Description of Artificial Sequence: Synthetic epitope
DISQSRSWLT

SEQ ID NO: 3299 - protein, 10 aa, Artificial Sequence
  Description of Artificial Sequence: Synthetic epitope
DISSAKAFNT

SEQ ID NO: 3300 - protein, 10 aa, Artificial Sequence
  Description of Artificial Sequence: Synthetic epitope
DISSELQNRE

SEQ ID NO: 3301 - protein, 10 aa, Artificial Sequence
  Description of Artificial Sequence: Synthetic epitope
DISSVNSLAE

SEQ ID NO: 3302 - protein, 10 aa, Artificial Sequence
  Description of Artificial Sequence: Synthetic epitope
DISVLVTSRV

SEQ ID NO: 3303 - protein, 10 aa, Artificial Sequence
  Description of Artificial Sequence: Synthetic epitope
DISVNTVDEE

SEQ ID NO: 3304 - protein, 10 aa, Artificial Sequence
  Description of Artificial Sequence: Synthetic epitope
DITEEIKEDS

SEQ ID NO: 3305 - protein, 10 aa, Artificial Sequence
  Description of Artificial Sequence: Synthetic epitope
DITLKSKKSP

SEQ ID NO: 3306 - protein, 10 aa, Artificial Sequence
  Description of Artificial Sequence: Synthetic epitope
DITMKESLTT

SEQ ID NO: 3307 - protein, 10 aa, Artificial Sequence
  Description of Artificial Sequence: Synthetic epitope
DITSLDIQQV

SEQ ID NO: 3308 - protein, 10 aa, Artificial Sequence
  Description of Artificial Sequence: Synthetic epitope
DIVAGNAGEI

SEQ ID NO: 3309 - protein, 10 aa, Artificial Sequence
  Description of Artificial Sequence: Synthetic epitope
DIVEGKVNKG

SEQ ID NO: 3310 - protein, 10 aa, Artificial Sequence
  Description of Artificial Sequence: Synthetic epitope
DIVEVSSMIS

SEQ ID NO: 3311 - protein, 10 aa, Artificial Sequence
  Description of Artificial Sequence: Synthetic epitope
DIVKKQSTQF

SEQ ID NO: 3312 - protein, 10 aa, Artificial Sequence
  Description of Artificial Sequence: Synthetic epitope
DIVQDQTSPA

SEQ ID NO: 3313 - protein, 10 aa, Artificial Sequence
  Description of Artificial Sequence: Synthetic epitope
DIYEQQVMTA

SEQ ID NO: 3314 - protein, 10 aa, Artificial Sequence
  Description of Artificial Sequence: Synthetic epitope
DIYLASRKVK

SEQ ID NO: 3315 - protein, 10 aa, Artificial Sequence
  Description of Artificial Sequence: Synthetic epitope
DIYQKDEDSA

SEQ ID NO: 3316 - protein, 10 aa, Artificial Sequence
  Description of Artificial Sequence: Synthetic epitope
DKAAEATNDY

SEQ ID NO: 3317 - protein, 10 aa, Artificial Sequence
  Description of Artificial Sequence: Synthetic epitope
DKADSMLTWE

SEQ ID NO: 3318 - protein, 10 aa, Artificial Sequence
  Description of Artificial Sequence: Synthetic epitope
DKAFERASDK

SEQ ID NO: 3319 - protein, 10 aa, Artificial Sequence
  Description of Artificial Sequence: Synthetic epitope
DKAHSLMELS

SEQ ID NO: 3320 - protein, 10 aa, Artificial Sequence
  Description of Artificial Sequence: Synthetic epitope
DKAIALQPEN

SEQ ID NO: 3321 - protein, 10 aa, Artificial Sequence
  Description of Artificial Sequence: Synthetic epitope
DKAIAQLAAN

SEQ ID NO: 3322 - protein, 10 aa, Artificial Sequence
  Description of Artificial Sequence: Synthetic epitope
DKAIKPSVEA

SEQ ID NO: 3323 - protein, 10 aa, Artificial Sequence
  Description of Artificial Sequence: Synthetic epitope
DKARKENKPI

SEQ ID NO: 3324 - protein, 10 aa, Artificial Sequence
  Description of Artificial Sequence: Synthetic epitope
DKARRYLRAE

SEQ ID NO: 3325 - protein, 10 aa, Artificial Sequence
  Description of Artificial Sequence: Synthetic epitope
DKASDTSSET

SEQ ID NO: 3326 - protein, 10 aa, Artificial Sequence
  Description of Artificial Sequence: Synthetic epitope
DKASSETAAS

SEQ ID NO: 3327 - protein, 10 aa, Artificial Sequence
  Description of Artificial Sequence: Synthetic epitope
DKAVATSQLQ

SEQ ID NO: 3328 - protein, 10 aa, Artificial Sequence
  Description of Artificial Sequence: Synthetic epitope
DKAWQNYDKI

SEQ ID NO: 3329 - protein, 10 aa, Artificial Sequence
  Description of Artificial Sequence: Synthetic epitope
DKDDLVKSIE

SEQ ID NO: 3330 - protein, 10 aa, Artificial Sequence
  Description of Artificial Sequence: Synthetic epitope
DKDDSVDAQN

SEQ ID NO: 3331 - protein, 10 aa, Artificial Sequence
  Description of Artificial Sequence: Synthetic epitope
DKDKIKITPN

SEQ ID NO: 3332 - protein, 10 aa, Artificial Sequence
  Description of Artificial Sequence: Synthetic epitope
DKDKSLEVSK

SEQ ID NO: 3333 - protein, 10 aa, Artificial Sequence
  Description of Artificial Sequence: Synthetic epitope
DKDKTVFSQD

SEQ ID NO: 3334 - protein, 10 aa, Artificial Sequence
  Description of Artificial Sequence: Synthetic epitope
DKDRRNKRKH

SEQ ID NO: 3335 - protein, 10 aa, Artificial Sequence
  Description of Artificial Sequence: Synthetic epitope
DKDTSLLKEI

SEQ ID NO: 3336 - protein, 10 aa, Artificial Sequence
  Description of Artificial Sequence: Synthetic epitope
DKDVETLEAP

SEQ ID NO: 3337 - protein, 10 aa, Artificial Sequence
  Description of Artificial Sequence: Synthetic epitope
DKDVQSSLTH

SEQ ID NO: 3338 - protein, 10 aa, Artificial Sequence
  Description of Artificial Sequence: Synthetic epitope
DKEDIIFDIE

SEQ ID NO: 3339 - protein, 10 aa, Artificial Sequence
  Description of Artificial Sequence: Synthetic epitope
DKEELLSSEA

SEQ ID NO: 3340 - protein, 10 aa, Artificial Sequence
  Description of Artificial Sequence: Synthetic epitope
DKEGALTAFR

SEQ ID NO: 3341 - protein, 10 aa, Artificial Sequence
  Description of Artificial Sequence: Synthetic epitope
DKEKKWIFQI

SEQ ID NO: 3342 - protein, 10 aa, Artificial Sequence
  Description of Artificial Sequence: Synthetic epitope
DKEKSLSDQR

SEQ ID NO: 3343 - protein, 10 aa, Artificial Sequence
  Description of Artificial Sequence: Synthetic epitope
DKEKVAIIEE

SEQ ID NO: 3344 - protein, 10 aa, Artificial Sequence
  Description of Artificial Sequence: Synthetic epitope
DKELGEAKKE

SEQ ID NO: 3345 - protein, 10 aa, Artificial Sequence
  Description of Artificial Sequence: Synthetic epitope
DKELIDHSPK

SEQ ID NO: 3346 - protein, 10 aa, Artificial Sequence
  Description of Artificial Sequence: Synthetic epitope
DKELLAYAKA

SEQ ID NO: 3347 - protein, 10 aa, Artificial Sequence
  Description of Artificial Sequence: Synthetic epitope
DKENLDAKIS

SEQ ID NO: 3348 - protein, 10 aa, Artificial Sequence
  Description of Artificial Sequence: Synthetic epitope
DKENREVDRN

SEQ ID NO: 3349 - protein, 10 aa, Artificial Sequence
  Description of Artificial Sequence: Synthetic epitope
DKEPINVQVG

SEQ ID NO: 3350 - protein, 10 aa, Artificial Sequence
  Description of Artificial Sequence: Synthetic epitope
DKEPRDRRKD

SEQ ID NO: 3351 - protein, 10 aa, Artificial Sequence
  Description of Artificial Sequence: Synthetic epitope
DKEQNSNEED

SEQ ID NO: 3352 - protein, 10 aa, Artificial Sequence
  Description of Artificial Sequence: Synthetic epitope
DKERAEKNVE

SEQ ID NO: 3353 - protein, 10 aa, Artificial Sequence
  Description of Artificial Sequence: Synthetic epitope
DKERNWKERQ

SEQ ID NO: 3354 - protein, 10 aa, Artificial Sequence
  Description of Artificial Sequence: Synthetic epitope
DKESLDLAFK

SEQ ID NO: 3355 - protein, 10 aa, Artificial Sequence
  Description of Artificial Sequence: Synthetic epitope
DKETSLNKAR

SEQ ID NO: 3356 - protein, 10 aa, Artificial Sequence
  Description of Artificial Sequence: Synthetic epitope
DKFVGIKDED

SEQ ID NO: 3357 - protein, 10 aa, Artificial Sequence
  Description of Artificial Sequence: Synthetic epitope
DKGASANQEK

SEQ ID NO: 3358 - protein, 10 aa, Artificial Sequence
  Description of Artificial Sequence: Synthetic epitope
DKGDTMFTPA

SEQ ID NO: 3359 - protein, 10 aa, Artificial Sequence
  Description of Artificial Sequence: Synthetic epitope
DKGKMNTVIA

SEQ ID NO: 3360 - protein, 10 aa, Artificial Sequence
  Description of Artificial Sequence: Synthetic epitope
DKGNQTAAIR

SEQ ID NO: 3361 - protein, 10 aa, Artificial Sequence
  Description of Artificial Sequence: Synthetic epitope
DKHATLQKST

SEQ ID NO: 3362 - protein, 10 aa, Artificial Sequence
  Description of Artificial Sequence: Synthetic epitope
DKHIKSAIDM

SEQ ID NO: 3363 - protein, 10 aa, Artificial Sequence
  Description of Artificial Sequence: Synthetic epitope
DKHMSKEETQ

SEQ ID NO: 3364 - protein, 10 aa, Artificial Sequence
  Description of Artificial Sequence: Synthetic epitope
DKHQPVSTAG

SEQ ID NO: 3365 - protein, 10 aa, Artificial Sequence
  Description of Artificial Sequence: Synthetic epitope
DKHRVVIQRD

SEQ ID NO: 3366 - protein, 10 aa, Artificial Sequence
  Description of Artificial Sequence: Synthetic epitope
DKHSQIINKF

SEQ ID NO: 3367 - protein, 10 aa, Artificial Sequence
  Description of Artificial Sequence: Synthetic epitope
DKIEAISVDE

SEQ ID NO: 3368 - protein, 10 aa, Artificial Sequence
  Description of Artificial Sequence: Synthetic epitope
DKIGQILLTK

SEQ ID NO: 3369 - protein, 10 aa, Artificial Sequence
  Description of Artificial Sequence: Synthetic epitope
DKILIVGRES

SEQ ID NO: 3370 - protein, 10 aa, Artificial Sequence
  Description of Artificial Sequence: Synthetic epitope
DKIMATTIDN

SEQ ID NO: 3371 - protein, 10 aa, Artificial Sequence
  Description of Artificial Sequence: Synthetic epitope
DKIWAFNKKV

SEQ ID NO: 3372 - protein, 10 aa, Artificial Sequence
  Description of Artificial Sequence: Synthetic epitope
DKKDMQGTEE

SEQ ID NO: 3373 - protein, 10 aa, Artificial Sequence
  Description of Artificial Sequence: Synthetic epitope
DKKERMAKAS

SEQ ID NO: 3374 - protein, 10 aa, Artificial Sequence
  Description of Artificial Sequence: Synthetic epitope
DKKIDVIRRK

SEQ ID NO: 3375 - protein, 10 aa, Artificial Sequence
  Description of Artificial Sequence: Synthetic epitope
DKKIGVNQPK

SEQ ID NO: 3376 - protein, 10 aa, Artificial Sequence
  Description of Artificial Sequence: Synthetic epitope
DKKIITNHQK

SEQ ID NO: 3377 - protein, 10 aa, Artificial Sequence
  Description of Artificial Sequence: Synthetic epitope
DKKIKKTFFE

SEQ ID NO: 3378 - protein, 10 aa, Artificial Sequence
  Description of Artificial Sequence: Synthetic epitope
DKKNISEKKG

SEQ ID NO: 3379 - protein, 10 aa, Artificial Sequence
  Description of Artificial Sequence: Synthetic epitope
DKKQAQIQLE

SEQ ID NO: 3380 - protein, 10 aa, Artificial Sequence
  Description of Artificial Sequence: Synthetic epitope
DKKQRTFQPP

SEQ ID NO: 3381 - protein, 10 aa, Artificial Sequence
  Description of Artificial Sequence: Synthetic epitope
DKKRAKKDTY

SEQ ID NO: 3382 - protein, 10 aa, Artificial Sequence
  Description of Artificial Sequence: Synthetic epitope
DKKRKKIPQQ

SEQ ID NO: 3383 - protein, 10 aa, Artificial Sequence
  Description of Artificial Sequence: Synthetic epitope
DKKRRNESVT

SEQ ID NO: 3384 - protein, 10 aa, Artificial Sequence
  Description of Artificial Sequence: Synthetic epitope
DKKRTKSPKL

SEQ ID NO: 3385 - protein, 10 aa, Artificial Sequence
  Description of Artificial Sequence: Synthetic epitope
DKKTTDQAPN

SEQ ID NO: 3386 - protein, 10 aa, Artificial Sequence
  Description of Artificial Sequence: Synthetic epitope
DKKVKTLTEE

SEQ ID NO: 3387 - protein, 10 aa, Artificial Sequence
  Description of Artificial Sequence: Synthetic epitope
DKLEAVARAV

SEQ ID NO: 3388 - protein, 10 aa, Artificial Sequence
  Description of Artificial Sequence: Synthetic epitope
DKLISAQHNQ

SEQ ID NO: 3389 - protein, 10 aa, Artificial Sequence
  Description of Artificial Sequence: Synthetic epitope
DKLKASAPSR

SEQ ID NO: 3390 - protein, 10 aa, Artificial Sequence
  Description of Artificial Sequence: Synthetic epitope
DKLKDSNARH

SEQ ID NO: 3391 - protein, 10 aa, Artificial Sequence
  Description of Artificial Sequence: Synthetic epitope
DKLKQDTTQK

SEQ ID NO: 3392 - protein, 10 aa, Artificial Sequence
  Description of Artificial Sequence: Synthetic epitope
DKLKQDTTQK

SEQ ID NO: 3393 - protein, 10 aa, Artificial Sequence
  Description of Artificial Sequence: Synthetic epitope
DKLKSARDVV

SEQ ID NO: 3394 - protein, 10 aa, Artificial Sequence
  Description of Artificial Sequence: Synthetic epitope
DKLLADSKTA

SEQ ID NO: 3395 - protein, 10 aa, Artificial Sequence
  Description of Artificial Sequence: Synthetic epitope
DKLLAKIAKL

SEQ ID NO: 3396 - protein, 10 aa, Artificial Sequence
  Description of Artificial Sequence: Synthetic epitope
DKLLAVSDRY

SEQ ID NO: 3397 - protein, 10 aa, Artificial Sequence
  Description of Artificial Sequence: Synthetic epitope
DKLMSMRKDM

SEQ ID NO: 3398 - protein, 10 aa, Artificial Sequence
  Description of Artificial Sequence: Synthetic epitope
DKLRATTQNL

SEQ ID NO: 3399 - protein, 10 aa, Artificial Sequence
  Description of Artificial Sequence: Synthetic epitope
DKLSSIRLED

SEQ ID NO: 3400 - protein, 10 aa, Artificial Sequence
  Description of Artificial Sequence: Synthetic epitope
DKLTSKKQAH

SEQ ID NO: 3401 - protein, 10 aa, Artificial Sequence
  Description of Artificial Sequence: Synthetic epitope
DKLVGTAHLK

SEQ ID NO: 3402 - protein, 10 aa, Artificial Sequence
  Description of Artificial Sequence: Synthetic epitope
DKLVSSTSDL

SEQ ID NO: 3403 - protein, 10 aa, Artificial Sequence
  Description of Artificial Sequence: Synthetic epitope
DKMKKEVLQS

SEQ ID NO: 3404 - protein, 10 aa, Artificial Sequence
  Description of Artificial Sequence: Synthetic epitope
DKMMKAPAGR

SEQ ID NO: 3405 - protein, 10 aa, Artificial Sequence
  Description of Artificial Sequence: Synthetic epitope
DKMNESTRSV

SEQ ID NO: 3406 - protein, 10 aa, Artificial Sequence
  Description of Artificial Sequence: Synthetic epitope
DKNDSRGQEA

SEQ ID NO: 3407 - protein, 10 aa, Artificial Sequence
  Description of Artificial Sequence: Synthetic epitope
DKNEKHRLLS

SEQ ID NO: 3408 - protein, 10 aa, Artificial Sequence
  Description of Artificial Sequence: Synthetic epitope
DKNHAKQQVI

SEQ ID NO: 3409 - protein, 10 aa, Artificial Sequence
  Description of Artificial Sequence: Synthetic epitope
DKNHQVKITL

SEQ ID NO: 3410 - protein, 10 aa, Artificial Sequence
  Description of Artificial Sequence: Synthetic epitope
DKNIKQSKET

SEQ ID NO: 3411 - protein, 10 aa, Artificial Sequence
  Description of Artificial Sequence: Synthetic epitope
DKNKEKIPRK

SEQ ID NO: 3412 - protein, 10 aa, Artificial Sequence
  Description of Artificial Sequence: Synthetic epitope
DKNLVSIETV

SEQ ID NO: 3413 - protein, 10 aa, Artificial Sequence
  Description of Artificial Sequence: Synthetic epitope
DKNQLATANK

SEQ ID NO: 3414 - protein, 10 aa, Artificial Sequence
  Description of Artificial Sequence: Synthetic epitope
DKNSSQEKSK

SEQ ID NO: 3415 - protein, 10 aa, Artificial Sequence
  Description of Artificial Sequence: Synthetic epitope
DKNSTLVKID

SEQ ID NO: 3416 - protein, 10 aa, Artificial Sequence
  Description of Artificial Sequence: Synthetic epitope
DKNTLADAVD

SEQ ID NO: 3417 - protein, 10 aa, Artificial Sequence
  Description of Artificial Sequence: Synthetic epitope
DKPAARSVQE

SEQ ID NO: 3418 - protein, 10 aa, Artificial Sequence
  Description of Artificial Sequence: Synthetic epitope
DKPGARTLKS

SEQ ID NO: 3419 - protein, 10 aa, Artificial Sequence
  Description of Artificial Sequence: Synthetic epitope
DKPPEMEAEN

SEQ ID NO: 3420 - protein, 10 aa, Artificial Sequence
  Description of Artificial Sequence: Synthetic epitope
DKPRHIQMKL

SEQ ID NO: 3421 - protein, 10 aa, Artificial Sequence
  Description of Artificial Sequence: Synthetic epitope
DKQAVLSGAQ

SEQ ID NO: 3422 - protein, 10 aa, Artificial Sequence
  Description of Artificial Sequence: Synthetic epitope
DKQAVSGQAA

SEQ ID NO: 3423 - protein, 10 aa, Artificial Sequence
  Description of Artificial Sequence: Synthetic epitope
DKQEQPSRNS

SEQ ID NO: 3424 - protein, 10 aa, Artificial Sequence
  Description of Artificial Sequence: Synthetic epitope
DKQIEHMTVE

SEQ ID NO: 3425 - protein, 10 aa, Artificial Sequence
  Description of Artificial Sequence: Synthetic epitope
DKRFVNDTLR

SEQ ID NO: 3426 - protein, 10 aa, Artificial Sequence
  Description of Artificial Sequence: Synthetic epitope
DKRGKFSEFK

SEQ ID NO: 3427 - protein, 10 aa, Artificial Sequence
  Description of Artificial Sequence: Synthetic epitope
DKRIKSGKQS

SEQ ID NO: 3428 - protein, 10 aa, Artificial Sequence
  Description of Artificial Sequence: Synthetic epitope
DKRITLAAFK

SEQ ID NO: 3429 - protein, 10 aa, Artificial Sequence
  Description of Artificial Sequence: Synthetic epitope
DKRLAAKQSS

SEQ ID NO: 3430 - protein, 10 aa, Artificial Sequence
  Description of Artificial Sequence: Synthetic epitope
DKRLATKQSS

SEQ ID NO: 3431 - protein, 10 aa, Artificial Sequence
  Description of Artificial Sequence: Synthetic epitope
DKSATSLKQD

SEQ ID NO: 3432 - protein, 10 aa, Artificial Sequence
  Description of Artificial Sequence: Synthetic epitope
DKSDAVSHTG

SEQ ID NO: 3433 - protein, 10 aa, Artificial Sequence
  Description of Artificial Sequence: Synthetic epitope
DKSDTAYQWN

SEQ ID NO: 3434 - protein, 10 aa, Artificial Sequence
  Description of Artificial Sequence: Synthetic epitope
DKSEEIAQIN

SEQ ID NO: 3435 - protein, 10 aa, Artificial Sequence
  Description of Artificial Sequence: Synthetic epitope
DKSILKVVIN

SEQ ID NO: 3436 - protein, 10 aa, Artificial Sequence
  Description of Artificial Sequence: Synthetic epitope
DKSIVKKTPQ

SEQ ID NO: 3437 - protein, 10 aa, Artificial Sequence
  Description of Artificial Sequence: Synthetic epitope
DKSLLILFAE

SEQ ID NO: 3438 - protein, 10 aa, Artificial Sequence
  Description of Artificial Sequence: Synthetic epitope
DKSLSRNISL

SEQ ID NO: 3439 - protein, 10 aa, Artificial Sequence
  Description of Artificial Sequence: Synthetic epitope
DKSLSTSIFE

SEQ ID NO: 3440 - protein, 10 aa, Artificial Sequence
  Description of Artificial Sequence: Synthetic epitope
DKSLSTSIFE

SEQ ID NO: 3441 - protein, 10 aa, Artificial Sequence
  Description of Artificial Sequence: Synthetic epitope
DKSLTKSNYQ

SEQ ID NO: 3442 - protein, 10 aa, Artificial Sequence
  Description of Artificial Sequence: Synthetic epitope
DKSMFVKIKT

SEQ ID NO: 3443 - protein, 10 aa, Artificial Sequence
  Description of Artificial Sequence: Synthetic epitope
DKSNLTSKVS

SEQ ID NO: 3444 - protein, 10 aa, Artificial Sequence
  Description of Artificial Sequence: Synthetic epitope
DKSQKSLSDS

SEQ ID NO: 3445 - protein, 10 aa, Artificial Sequence
  Description of Artificial Sequence: Synthetic epitope
DKSQLSLTEE

SEQ ID NO: 3446 - protein, 10 aa, Artificial Sequence
  Description of Artificial Sequence: Synthetic epitope
DKSRSSLKPI

SEQ ID NO: 3447 - protein, 10 aa, Artificial Sequence
  Description of Artificial Sequence: Synthetic epitope
DKSSKVPSAL

SEQ ID NO: 3448 - protein, 10 aa, Artificial Sequence
  Description of Artificial Sequence: Synthetic epitope
DKSTEEPIVK

SEQ ID NO: 3449 - protein, 10 aa, Artificial Sequence
  Description of Artificial Sequence: Synthetic epitope
DKSTGALNVL

SEQ ID NO: 3450 - protein, 10 aa, Artificial Sequence
  Description of Artificial Sequence: Synthetic epitope
DKSVAASGAG

SEQ ID NO: 3451 - protein, 10 aa, Artificial Sequence
  Description of Artificial Sequence: Synthetic epitope
DKSVVASSAT

SEQ ID NO: 3452 - protein, 10 aa, Artificial Sequence
  Description of Artificial Sequence: Synthetic epitope
DKTDKGGEKG

SEQ ID NO: 3453 - protein, 10 aa, Artificial Sequence
  Description of Artificial Sequence: Synthetic epitope
DKTESVTSGP

SEQ ID NO: 3454 - protein, 10 aa, Artificial Sequence
  Description of Artificial Sequence: Synthetic epitope
DKTILVKNEN

SEQ ID NO: 3455 - protein, 10 aa, Artificial Sequence
  Description of Artificial Sequence: Synthetic epitope
DKTIVTKMLS

SEQ ID NO: 3456 - protein, 10 aa, Artificial Sequence
  Description of Artificial Sequence: Synthetic epitope
DKTSDYEMHK

SEQ ID NO: 3457 - protein, 10 aa, Artificial Sequence
  Description of Artificial Sequence: Synthetic epitope
DKTSVLFRQV

SEQ ID NO: 3458 - protein, 10 aa, Artificial Sequence
  Description of Artificial Sequence: Synthetic epitope
DKTTLLMQED

SEQ ID NO: 3459 - protein, 10 aa, Artificial Sequence
  Description of Artificial Sequence: Synthetic epitope
DKTTNVSLYP

SEQ ID NO: 3460 - protein, 10 aa, Artificial Sequence
  Description of Artificial Sequence: Synthetic epitope
DKTTYPIDET

SEQ ID NO: 3461 - protein, 10 aa, Artificial Sequence
  Description of Artificial Sequence: Synthetic epitope
DKVEKIGLVE

SEQ ID NO: 3462 - protein, 10 aa, Artificial Sequence
  Description of Artificial Sequence: Synthetic epitope
DKVERMHITD

SEQ ID NO: 3463 - protein, 10 aa, Artificial Sequence
  Description of Artificial Sequence: Synthetic epitope
DKVIVTSKHN

SEQ ID NO: 3464 - protein, 10 aa, Artificial Sequence
  Description of Artificial Sequence: Synthetic epitope
DKVLLVMDTR

SEQ ID NO: 3465 - protein, 10 aa, Artificial Sequence
  Description of Artificial Sequence: Synthetic epitope
DKVNENAKKD

SEQ ID NO: 3466 - protein, 10 aa, Artificial Sequence
  Description of Artificial Sequence: Synthetic epitope
DKVNVLLEVM

SEQ ID NO: 3467 - protein, 10 aa, Artificial Sequence
  Description of Artificial Sequence: Synthetic epitope
DKVPSKDAEE

SEQ ID NO: 3468 - protein, 10 aa, Artificial Sequence
  Description of Artificial Sequence: Synthetic epitope
DKVSVTDLAI

SEQ ID NO: 3469 - protein, 10 aa, Artificial Sequence
  Description of Artificial Sequence: Synthetic epitope
DKVVASVKEG

SEQ ID NO: 3470 - protein, 10 aa, Artificial Sequence
  Description of Artificial Sequence: Synthetic epitope
DKVVKMSPIE

SEQ ID NO: 3471 - protein, 10 aa, Artificial Sequence
  Description of Artificial Sequence: Synthetic epitope
DKVVTTNYKP

SEQ ID NO: 3472 - protein, 10 aa, Artificial Sequence
  Description of Artificial Sequence: Synthetic epitope
DKWSMDKLAN

SEQ ID NO: 3473 - protein, 10 aa, Artificial Sequence
  Description of Artificial Sequence: Synthetic epitope
DKYQMSGPID

SEQ ID NO: 3474 - protein, 10 aa, Artificial Sequence
  Description of Artificial Sequence: Synthetic epitope
DKYSDLRYDP

SEQ ID NO: 3475 - protein, 10 aa, Artificial Sequence
  Description of Artificial Sequence: Synthetic epitope
DLAEQLLVYS

SEQ ID NO: 3476 - protein, 10 aa, Artificial Sequence
  Description of Artificial Sequence: Synthetic epitope
DLAIKRRQIL

SEQ ID NO: 3477 - protein, 10 aa, Artificial Sequence
  Description of Artificial Sequence: Synthetic epitope
DLAKVVSKEE

SEQ ID NO: 3478 - protein, 10 aa, Artificial Sequence
  Description of Artificial Sequence: Synthetic epitope
DLALALETTN

SEQ ID NO: 3479 - protein, 10 aa, Artificial Sequence
  Description of Artificial Sequence: Synthetic epitope
DLALNATVLM

SEQ ID NO: 3480 - protein, 10 aa, Artificial Sequence
  Description of Artificial Sequence: Synthetic epitope
DLANTAQQSE

SEQ ID NO: 3481 - protein, 10 aa, Artificial Sequence
  Description of Artificial Sequence: Synthetic epitope
DLAQQLMADA

SEQ ID NO: 3482 - protein, 10 aa, Artificial Sequence
  Description of Artificial Sequence: Synthetic epitope
DLDLVMSEGL

SEQ ID NO: 3483 - protein, 10 aa, Artificial Sequence
  Description of Artificial Sequence: Synthetic epitope
DLDSTSLTSE

SEQ ID NO: 3484 - protein, 10 aa, Artificial Sequence
  Description of Artificial Sequence: Synthetic epitope
DLEADRIRQE

SEQ ID NO: 3485 - protein, 10 aa, Artificial Sequence
  Description of Artificial Sequence: Synthetic epitope
DLEDSVKPTQ

SEQ ID NO: 3486 - protein, 10 aa, Artificial Sequence
  Description of Artificial Sequence: Synthetic epitope
DLEEVQSNSE

SEQ ID NO: 3487 - protein, 10 aa, Artificial Sequence
  Description of Artificial Sequence: Synthetic epitope
DLEISSASRT

SEQ ID NO: 3488 - protein, 10 aa, Artificial Sequence
  Description of Artificial Sequence: Synthetic epitope
DLEKGAEAVE

SEQ ID NO: 3489 - protein, 10 aa, Artificial Sequence
  Description of Artificial Sequence: Synthetic epitope
DLENIMRKFS

SEQ ID NO: 3490 - protein, 10 aa, Artificial Sequence
  Description of Artificial Sequence: Synthetic epitope
DLERASQLAR

SEQ ID NO: 3491 - protein, 10 aa, Artificial Sequence
  Description of Artificial Sequence: Synthetic epitope
DLERDSLTEK

SEQ ID NO: 3492 - protein, 10 aa, Artificial Sequence
  Description of Artificial Sequence: Synthetic epitope
DLERPQSNSS

SEQ ID NO: 3493 - protein, 10 aa, Artificial Sequence
  Description of Artificial Sequence: Synthetic epitope
DLESSVQSSP

SEQ ID NO: 3494 - protein, 10 aa, Artificial Sequence
  Description of Artificial Sequence: Synthetic epitope
DLETLSAQAS

SEQ ID NO: 3495 - protein, 10 aa, Artificial Sequence
  Description of Artificial Sequence: Synthetic epitope
DLFTDAAETE

SEQ ID NO: 3496 - protein, 10 aa, Artificial Sequence
  Description of Artificial Sequence: Synthetic epitope
DLGAINQEQA

SEQ ID NO: 3497 - protein, 10 aa, Artificial Sequence
  Description of Artificial Sequence: Synthetic epitope
DLGDSSESAA

SEQ ID NO: 3498 - protein, 10 aa, Artificial Sequence
  Description of Artificial Sequence: Synthetic epitope
DLGESTASLD

SEQ ID NO: 3499 - protein, 10 aa, Artificial Sequence
  Description of Artificial Sequence: Synthetic epitope
DLGLSAVQAS

SEQ ID NO: 3500 - protein, 10 aa, Artificial Sequence
  Description of Artificial Sequence: Synthetic epitope
DLGNSDNMFF

SEQ ID NO: 3501 - protein, 10 aa, Artificial Sequence
  Description of Artificial Sequence: Synthetic epitope
DLHDQFQHQL

SEQ ID NO: 3502 - protein, 10 aa, Artificial Sequence
  Description of Artificial Sequence: Synthetic epitope
DLHGKIQMPV

SEQ ID NO: 3503 - protein, 10 aa, Artificial Sequence
  Description of Artificial Sequence: Synthetic epitope
DLHMTYKIGL

SEQ ID NO: 3504 - protein, 10 aa, Artificial Sequence
  Description of Artificial Sequence: Synthetic epitope
DLHYSKAAKL

SEQ ID NO: 3505 - protein, 10 aa, Artificial Sequence
  Description of Artificial Sequence: Synthetic epitope
DLIAQRVTRV

SEQ ID NO: 3506 - protein, 10 aa, Artificial Sequence
  Description of Artificial Sequence: Synthetic epitope
DLIKENNATR

SEQ ID NO: 3507 - protein, 10 aa, Artificial Sequence
  Description of Artificial Sequence: Synthetic epitope
DLISAGLKEF

SEQ ID NO: 3508 - protein, 10 aa, Artificial Sequence
  Description of Artificial Sequence: Synthetic epitope
DLISASADLE

SEQ ID NO: 3509 - protein, 10 aa, Artificial Sequence
  Description of Artificial Sequence: Synthetic epitope
DLISQMIIRW

SEQ ID NO: 3510 - protein, 10 aa, Artificial Sequence
  Description of Artificial Sequence: Synthetic epitope
DLIVQRIITN

SEQ ID NO: 3511 - protein, 10 aa, Artificial Sequence
  Description of Artificial Sequence: Synthetic epitope
DLKALQQEKQ

SEQ ID NO: 3512 - protein, 10 aa, Artificial Sequence
  Description of Artificial Sequence: Synthetic epitope
DLKATLTARN

SEQ ID NO: 3513 - protein, 10 aa, Artificial Sequence
  Description of Artificial Sequence: Synthetic epitope
DLKDTDKSST

SEQ ID NO: 3514 - protein, 10 aa, Artificial Sequence
  Description of Artificial Sequence: Synthetic epitope
DLKEEHKSSM

SEQ ID NO: 3515 - protein, 10 aa, Artificial Sequence
  Description of Artificial Sequence: Synthetic epitope
DLKFAIPKEK

SEQ ID NO: 3516 - protein, 10 aa, Artificial Sequence
  Description of Artificial Sequence: Synthetic epitope
DLKFQRSVLD

SEQ ID NO: 3517 - protein, 10 aa, Artificial Sequence
  Description of Artificial Sequence: Synthetic epitope
DLKLMVAKRE

SEQ ID NO: 3518 - protein, 10 aa, Artificial Sequence
  Description of Artificial Sequence: Synthetic epitope
DLKNTEEATF

SEQ ID NO: 3519 - protein, 10 aa, Artificial Sequence
  Description of Artificial Sequence: Synthetic epitope
DLKQSEGSEE

SEQ ID NO: 3520 - protein, 10 aa, Artificial Sequence
  Description of Artificial Sequence: Synthetic epitope
DLKQTMKKEQ

SEQ ID NO: 3521 - protein, 10 aa, Artificial Sequence
  Description of Artificial Sequence: Synthetic epitope
DLKSLATALL

SEQ ID NO: 3522 - protein, 10 aa, Artificial Sequence
  Description of Artificial Sequence: Synthetic epitope
DLKVASDTQF

SEQ ID NO: 3523 - protein, 10 aa, Artificial Sequence
  Description of Artificial Sequence: Synthetic epitope
DLLDQIQASE

SEQ ID NO: 3524 - protein, 10 aa, Artificial Sequence
  Description of Artificial Sequence: Synthetic epitope
DLLDVLKSKQ

SEQ ID NO: 3525 - protein, 10 aa, Artificial Sequence
  Description of Artificial Sequence: Synthetic epitope
DLLEREEASF

SEQ ID NO: 3526 - protein, 10 aa, Artificial Sequence
  Description of Artificial Sequence: Synthetic epitope
DLLESSNISE

SEQ ID NO: 3527 - protein, 10 aa, Artificial Sequence
  Description of Artificial Sequence: Synthetic epitope
DLLKGAFRSS

SEQ ID NO: 3528 - protein, 10 aa, Artificial Sequence
  Description of Artificial Sequence: Synthetic epitope
DLLKKMVLKK

SEQ ID NO: 3529 - protein, 10 aa, Artificial Sequence
  Description of Artificial Sequence: Synthetic epitope
DLLMSTKVSD

SEQ ID NO: 3530 - protein, 10 aa, Artificial Sequence
  Description of Artificial Sequence: Synthetic epitope
DLLQALFKEA

SEQ ID NO: 3531 - protein, 10 aa, Artificial Sequence
  Description of Artificial Sequence: Synthetic epitope
DLLQAQSQQL

SEQ ID NO: 3532 - protein, 10 aa, Artificial Sequence
  Description of Artificial Sequence: Synthetic epitope
DLLQSKIDEL

SEQ ID NO: 3533 - protein, 10 aa, Artificial Sequence
  Description of Artificial Sequence: Synthetic epitope
DLLQVKTGLS

SEQ ID NO: 3534 - protein, 10 aa, Artificial Sequence
  Description of Artificial Sequence: Synthetic epitope
DLLQVNVYVL

SEQ ID NO: 3535 - protein, 10 aa, Artificial Sequence
  Description of Artificial Sequence: Synthetic epitope
DLLRVADTIV

SEQ ID NO: 3536 - protein, 10 aa, Artificial Sequence
  Description of Artificial Sequence: Synthetic epitope
DLLSAVEAKE

SEQ ID NO: 3537 - protein, 10 aa, Artificial Sequence
  Description of Artificial Sequence: Synthetic epitope
DLLSNLNIWK

SEQ ID NO: 3538 - protein, 10 aa, Artificial Sequence
  Description of Artificial Sequence: Synthetic epitope
DLLSVASSKL

SEQ ID NO: 3539 - protein, 10 aa, Artificial Sequence
  Description of Artificial Sequence: Synthetic epitope
DLLVPASVKV

SEQ ID NO: 3540 - protein, 10 aa, Artificial Sequence
  Description of Artificial Sequence: Synthetic epitope
DLMFKVSSPH

SEQ ID NO: 3541 - protein, 10 aa, Artificial Sequence
  Description of Artificial Sequence: Synthetic epitope
DLNAWTKSAE

SEQ ID NO: 3542 - protein, 10 aa, Artificial Sequence
  Description of Artificial Sequence: Synthetic epitope
DLNGAQIKLR

SEQ ID NO: 3543 - protein, 10 aa, Artificial Sequence
  Description of Artificial Sequence: Synthetic epitope
DLNKLNEIEG

SEQ ID NO: 3544 - protein, 10 aa, Artificial Sequence
  Description of Artificial Sequence: Synthetic epitope
DLNSGSKAGS

SEQ ID NO: 3545 - protein, 10 aa, Artificial Sequence
  Description of Artificial Sequence: Synthetic epitope
DLNSSIDLQS

SEQ ID NO: 3546 - protein, 10 aa, Artificial Sequence
  Description of Artificial Sequence: Synthetic epitope
DLQAAQLWAG

SEQ ID NO: 3547 - protein, 10 aa, Artificial Sequence
  Description of Artificial Sequence: Synthetic epitope
DLQAKESASK

SEQ ID NO: 3548 - protein, 10 aa, Artificial Sequence
  Description of Artificial Sequence: Synthetic epitope
DLQALLYKKI

SEQ ID NO: 3549 - protein, 10 aa, Artificial Sequence
  Description of Artificial Sequence: Synthetic epitope
DLQFNISQVS

SEQ ID NO: 3550 - protein, 10 aa, Artificial Sequence
  Description of Artificial Sequence: Synthetic epitope
DLQKLISTQS

SEQ ID NO: 3551 - protein, 10 aa, Artificial Sequence
  Description of Artificial Sequence: Synthetic epitope
DLQLSAASVG

SEQ ID NO: 3552 - protein, 10 aa, Artificial Sequence
  Description of Artificial Sequence: Synthetic epitope
DLQRVHKRIQ

SEQ ID NO: 3553 - protein, 10 aa, Artificial Sequence
  Description of Artificial Sequence: Synthetic epitope
DLQSSQLSLP

SEQ ID NO: 3554 - protein, 10 aa, Artificial Sequence
  Description of Artificial Sequence: Synthetic epitope
DLQTITRDSQ

SEQ ID NO: 3555 - protein, 10 aa, Artificial Sequence
  Description of Artificial Sequence: Synthetic epitope
DLQVEESSQE

SEQ ID NO: 3556 - protein, 10 aa, Artificial Sequence
  Description of Artificial Sequence: Synthetic epitope
DLRAALQSSD

SEQ ID NO: 3557 - protein, 10 aa, Artificial Sequence
  Description of Artificial Sequence: Synthetic epitope
DLRAKTIVKF

SEQ ID NO: 3558 - protein, 10 aa, Artificial Sequence
  Description of Artificial Sequence: Synthetic epitope
DLRDAVTSVK

SEQ ID NO: 3559 - protein, 10 aa, Artificial Sequence
  Description of Artificial Sequence: Synthetic epitope
DLRHSSEVKR

SEQ ID NO: 3560 - protein, 10 aa, Artificial Sequence
  Description of Artificial Sequence: Synthetic epitope
DLRLSDVAQE

SEQ ID NO: 3561 - protein, 10 aa, Artificial Sequence
  Description of Artificial Sequence: Synthetic epitope
DLRNAQVTEL

SEQ ID NO: 3562 - protein, 10 aa, Artificial Sequence
  Description of Artificial Sequence: Synthetic epitope
DLRRTTGMSN

SEQ ID NO: 3563 - protein, 10 aa, Artificial Sequence
  Description of Artificial Sequence: Synthetic epitope
DLRSEASFQL

SEQ ID NO: 3564 - protein, 10 aa, Artificial Sequence
  Description of Artificial Sequence: Synthetic epitope
DLRVSLTTRV

SEQ ID NO: 3565 - protein, 10 aa, Artificial Sequence
  Description of Artificial Sequence: Synthetic epitope
DLRVTSVVTG

SEQ ID NO: 3566 - protein, 10 aa, Artificial Sequence
  Description of Artificial Sequence: Synthetic epitope
DLSAETMAKD

SEQ ID NO: 3567 - protein, 10 aa, Artificial Sequence
  Description of Artificial Sequence: Synthetic epitope
DLSALEAHWS

SEQ ID NO: 3568 - protein, 10 aa, Artificial Sequence
  Description of Artificial Sequence: Synthetic epitope
DLSAQLALII

SEQ ID NO: 3569 - protein, 10 aa, Artificial Sequence
  Description of Artificial Sequence: Synthetic epitope
DLSASQDHSQ

SEQ ID NO: 3570 - protein, 10 aa, Artificial Sequence
  Description of Artificial Sequence: Synthetic epitope
DLSAYVVNNA

SEQ ID NO: 3571 - protein, 10 aa, Artificial Sequence
  Description of Artificial Sequence: Synthetic epitope
DLSEAASHSA

SEQ ID NO: 3572 - protein, 10 aa, Artificial Sequence
  Description of Artificial Sequence: Synthetic epitope
DLSEGSAESK

SEQ ID NO: 3573 - protein, 10 aa, Artificial Sequence
  Description of Artificial Sequence: Synthetic epitope
DLSELSATGR

SEQ ID NO: 3574 - protein, 10 aa, Artificial Sequence
  Description of Artificial Sequence: Synthetic epitope
DLSETIYQEP

SEQ ID NO: 3575 - protein, 10 aa, Artificial Sequence
  Description of Artificial Sequence: Synthetic epitope
DLSHVASGES

SEQ ID NO: 3576 - protein, 10 aa, Artificial Sequence
  Description of Artificial Sequence: Synthetic epitope
DLSIDGQVKR

SEQ ID NO: 3577 - protein, 10 aa, Artificial Sequence
  Description of Artificial Sequence: Synthetic epitope
DLSITYAKPL

SEQ ID NO: 3578 - protein, 10 aa, Artificial Sequence
  Description of Artificial Sequence: Synthetic epitope
DLSKKSSDDG

SEQ ID NO: 3579 - protein, 10 aa, Artificial Sequence
  Description of Artificial Sequence: Synthetic epitope
DLSLPESSQD

SEQ ID NO: 3580 - protein, 10 aa, Artificial Sequence
  Description of Artificial Sequence: Synthetic epitope
DLSLVEMTEV

SEQ ID NO: 3581 - protein, 10 aa, Artificial Sequence
  Description of Artificial Sequence: Synthetic epitope
DLSMDSDNSM

SEQ ID NO: 3582 - protein, 10 aa, Artificial Sequence
  Description of Artificial Sequence: Synthetic epitope
DLSMTNDESS

SEQ ID NO: 3583 - protein, 10 aa, Artificial Sequence
  Description of Artificial Sequence: Synthetic epitope
DLSQILVNIK

SEQ ID NO: 3584 - protein, 10 aa, Artificial Sequence
  Description of Artificial Sequence: Synthetic epitope
DLSRQEGHAS

SEQ ID NO: 3585 - protein, 10 aa, Artificial Sequence
  Description of Artificial Sequence: Synthetic epitope
DLSSAGTAGV

SEQ ID NO: 3586 - protein, 10 aa, Artificial Sequence
  Description of Artificial Sequence: Synthetic epitope
DLSSATLDIS

SEQ ID NO: 3587 - protein, 10 aa, Artificial Sequence
  Description of Artificial Sequence: Synthetic epitope
DLSSENELAS

SEQ ID NO: 3588 - protein, 10 aa, Artificial Sequence
  Description of Artificial Sequence: Synthetic epitope
DLSSKTAQLK

SEQ ID NO: 3589 - protein, 10 aa, Artificial Sequence
  Description of Artificial Sequence: Synthetic epitope
DLSTILSPIK

SEQ ID NO: 3590 - protein, 10 aa, Artificial Sequence
  Description of Artificial Sequence: Synthetic epitope
DLSTSVLGQR

SEQ ID NO: 3591 - protein, 10 aa, Artificial Sequence
  Description of Artificial Sequence: Synthetic epitope
DLSTTLSDVA

SEQ ID NO: 3592 - protein, 10 aa, Artificial Sequence
  Description of Artificial Sequence: Synthetic epitope
DLSTTSSMKS

SEQ ID NO: 3593 - protein, 10 aa, Artificial Sequence
  Description of Artificial Sequence: Synthetic epitope
DLSVTTVTKT

SEQ ID NO: 3594 - protein, 10 aa, Artificial Sequence
  Description of Artificial Sequence: Synthetic epitope
DLSWEATSSQ

SEQ ID NO: 3595 - protein, 10 aa, Artificial Sequence
  Description of Artificial Sequence: Synthetic epitope
DLTASDVGVE

SEQ ID NO: 3596 - protein, 10 aa, Artificial Sequence
  Description of Artificial Sequence: Synthetic epitope
DLTENSKSRS

SEQ ID NO: 3597 - protein, 10 aa, Artificial Sequence
  Description of Artificial Sequence: Synthetic epitope
DLTKTSEHIQ

SEQ ID NO: 3598 - protein, 10 aa, Artificial Sequence
  Description of Artificial Sequence: Synthetic epitope
DLTLQLAGTS

SEQ ID NO: 3599 - protein, 10 aa, Artificial Sequence
  Description of Artificial Sequence: Synthetic epitope
DLTLSSETGD

SEQ ID NO: 3600 - protein, 10 aa, Artificial Sequence
  Description of Artificial Sequence: Synthetic epitope
DLTSAASAPS

SEQ ID NO: 3601 - protein, 10 aa, Artificial Sequence
  Description of Artificial Sequence: Synthetic epitope
DLTTKKVVDY

SEQ ID NO: 3602 - protein, 10 aa, Artificial Sequence
  Description of Artificial Sequence: Synthetic epitope
DLTTRLILEG

SEQ ID NO: 3603 - protein, 10 aa, Artificial Sequence
  Description of Artificial Sequence: Synthetic epitope
DLTVQVEFAA

SEQ ID NO: 3604 - protein, 10 aa, Artificial Sequence
  Description of Artificial Sequence: Synthetic epitope
DLTVRSSTGD

SEQ ID NO: 3605 - protein, 10 aa, Artificial Sequence
  Description of Artificial Sequence: Synthetic epitope
DLVAIVTQLE

SEQ ID NO: 3606 - protein, 10 aa, Artificial Sequence
  Description of Artificial Sequence: Synthetic epitope
DLVDSVDDAE

SEQ ID NO: 3607 - protein, 10 aa, Artificial Sequence
  Description of Artificial Sequence: Synthetic epitope
DLVHAKNSYM

SEQ ID NO: 3608 - protein, 10 aa, Artificial Sequence
  Description of Artificial Sequence: Synthetic epitope
DLVLSKSSRH

SEQ ID NO: 3609 - protein, 10 aa, Artificial Sequence
  Description of Artificial Sequence: Synthetic epitope
DLVQSLSPNS

SEQ ID NO: 3610 - protein, 10 aa, Artificial Sequence
  Description of Artificial Sequence: Synthetic epitope
DLVSAKLISD

SEQ ID NO: 3611 - protein, 10 aa, Artificial Sequence
  Description of Artificial Sequence: Synthetic epitope
DLYDQHIFTP

SEQ ID NO: 3612 - protein, 10 aa, Artificial Sequence
  Description of Artificial Sequence: Synthetic epitope
DLYEEAVGEK

SEQ ID NO: 3613 - protein, 10 aa, Artificial Sequence
  Description of Artificial Sequence: Synthetic epitope
DLYQRQTHEY

SEQ ID NO: 3614 - protein, 10 aa, Artificial Sequence
  Description of Artificial Sequence: Synthetic epitope
DMAAEASPDA

SEQ ID NO: 3615 - protein, 10 aa, Artificial Sequence
  Description of Artificial Sequence: Synthetic epitope
DMDEGNINSE

SEQ ID NO: 3616 - protein, 10 aa, Artificial Sequence
  Description of Artificial Sequence: Synthetic epitope
DMDFSALLSQ

SEQ ID NO: 3617 - protein, 10 aa, Artificial Sequence
  Description of Artificial Sequence: Synthetic epitope
DMDSQTRHMA

SEQ ID NO: 3618 - protein, 10 aa, Artificial Sequence
  Description of Artificial Sequence: Synthetic epitope
DMEISSAEPE

SEQ ID NO: 3619 - protein, 10 aa, Artificial Sequence
  Description of Artificial Sequence: Synthetic epitope
DMELEVLRYT

SEQ ID NO: 3620 - protein, 10 aa, Artificial Sequence
  Description of Artificial Sequence: Synthetic epitope
DMERKNDPLP

SEQ ID NO: 3621 - protein, 10 aa, Artificial Sequence
  Description of Artificial Sequence: Synthetic epitope
DMESTDNGAS

SEQ ID NO: 3622 - protein, 10 aa, Artificial Sequence
  Description of Artificial Sequence: Synthetic epitope
DMETRAGFIE

SEQ ID NO: 3623 - protein, 10 aa, Artificial Sequence
  Description of Artificial Sequence: Synthetic epitope
DMFDYIMKHE

SEQ ID NO: 3624 - protein, 10 aa, Artificial Sequence
  Description of Artificial Sequence: Synthetic epitope
DMFKLLMFPE

SEQ ID NO: 3625 - protein, 10 aa, Artificial Sequence
  Description of Artificial Sequence: Synthetic epitope
DMFNDEIEEV

SEQ ID NO: 3626 - protein, 10 aa, Artificial Sequence
  Description of Artificial Sequence: Synthetic epitope
DMFNDEIEEV

SEQ ID NO: 3627 - protein, 10 aa, Artificial Sequence
  Description of Artificial Sequence: Synthetic epitope
DMFPIEMSSD

SEQ ID NO: 3628 - protein, 10 aa, Artificial Sequence
  Description of Artificial Sequence: Synthetic epitope
DMGKNVSATD

SEQ ID NO: 3629 - protein, 10 aa, Artificial Sequence
  Description of Artificial Sequence: Synthetic epitope
DMGSTTQSPS

SEQ ID NO: 3630 - protein, 10 aa, Artificial Sequence
  Description of Artificial Sequence: Synthetic epitope
DMIIRRHTIQ

SEQ ID NO: 3631 - protein, 10 aa, Artificial Sequence
  Description of Artificial Sequence: Synthetic epitope
DMIKNNVEQV

SEQ ID NO: 3632 - protein, 10 aa, Artificial Sequence
  Description of Artificial Sequence: Synthetic epitope
DMILDQTKTE

SEQ ID NO: 3633 - protein, 10 aa, Artificial Sequence
  Description of Artificial Sequence: Synthetic epitope
DMKDRALESD

SEQ ID NO: 3634 - protein, 10 aa, Artificial Sequence
  Description of Artificial Sequence: Synthetic epitope
DMKDTASVKS

SEQ ID NO: 3635 - protein, 10 aa, Artificial Sequence
  Description of Artificial Sequence: Synthetic epitope
DMKESRQVPG

SEQ ID NO: 3636 - protein, 10 aa, Artificial Sequence
  Description of Artificial Sequence: Synthetic epitope
DMKEVIEIDQ

SEQ ID NO: 3637 - protein, 10 aa, Artificial Sequence
  Description of Artificial Sequence: Synthetic epitope
DMKHKLIQLM

SEQ ID NO: 3638 - protein, 10 aa, Artificial Sequence
  Description of Artificial Sequence: Synthetic epitope
DMKLRFSHSV

SEQ ID NO: 3639 - protein, 10 aa, Artificial Sequence
  Description of Artificial Sequence: Synthetic epitope
DMKQHSTKVF

SEQ ID NO: 3640 - protein, 10 aa, Artificial Sequence
  Description of Artificial Sequence: Synthetic epitope
DMKSSRIRSA

SEQ ID NO: 3641 - protein, 10 aa, Artificial Sequence
  Description of Artificial Sequence: Synthetic epitope
DMKVIQQRNE

SEQ ID NO: 3642 - protein, 10 aa, Artificial Sequence
  Description of Artificial Sequence: Synthetic epitope
DMLAKASKIE

SEQ ID NO: 3643 - protein, 10 aa, Artificial Sequence
  Description of Artificial Sequence: Synthetic epitope
DMLKNTMTTK

SEQ ID NO: 3644 - protein, 10 aa, Artificial Sequence
  Description of Artificial Sequence: Synthetic epitope
DMLKNTMTTK

SEQ ID NO: 3645 - protein, 10 aa, Artificial Sequence
  Description of Artificial Sequence: Synthetic epitope
DMLLKIKAVR

SEQ ID NO: 3646 - protein, 10 aa, Artificial Sequence
  Description of Artificial Sequence: Synthetic epitope
DMLNVFDFEK

SEQ ID NO: 3647 - protein, 10 aa, Artificial Sequence
  Description of Artificial Sequence: Synthetic epitope
DMLQVRKVME

SEQ ID NO: 3648 - protein, 10 aa, Artificial Sequence
  Description of Artificial Sequence: Synthetic epitope
DMMLNIINSS

SEQ ID NO: 3649 - protein, 10 aa, Artificial Sequence
  Description of Artificial Sequence: Synthetic epitope
DMMTKNLAGK

SEQ ID NO: 3650 - protein, 10 aa, Artificial Sequence
  Description of Artificial Sequence: Synthetic epitope
DMPTKSTVSL

SEQ ID NO: 3651 - protein, 10 aa, Artificial Sequence
  Description of Artificial Sequence: Synthetic epitope
DMQTDTQDHQ

SEQ ID NO: 3652 - protein, 10 aa, Artificial Sequence
  Description of Artificial Sequence: Synthetic epitope
DMSKSAVDGT

SEQ ID NO: 3653 - protein, 10 aa, Artificial Sequence
  Description of Artificial Sequence: Synthetic epitope
DMSTVMSRKG

SEQ ID NO: 3654 - protein, 10 aa, Artificial Sequence
  Description of Artificial Sequence: Synthetic epitope
DMVAQVLKSS

SEQ ID NO: 3655 - protein, 10 aa, Artificial Sequence
  Description of Artificial Sequence: Synthetic epitope
DMVKGKSLTG

SEQ ID NO: 3656 - protein, 10 aa, Artificial Sequence
  Description of Artificial Sequence: Synthetic epitope
DMVKSSETTS

SEQ ID NO: 3657 - protein, 10 aa, Artificial Sequence
  Description of Artificial Sequence: Synthetic epitope
DMVRTIFDDK

SEQ ID NO: 3658 - protein, 10 aa, Artificial Sequence
  Description of Artificial Sequence: Synthetic epitope
DMVSITFIKQ

SEQ ID NO: 3659 - protein, 10 aa, Artificial Sequence
  Description of Artificial Sequence: Synthetic epitope
DMVVSRVKGH

SEQ ID NO: 3660 - protein, 10 aa, Artificial Sequence
  Description of Artificial Sequence: Synthetic epitope
DMYAEKMQAL

SEQ ID NO: 3661 - protein, 10 aa, Artificial Sequence
  Description of Artificial Sequence: Synthetic epitope
DMYLFSLGSE

SEQ ID NO: 3662 - protein, 10 aa, Artificial Sequence
  Description of Artificial Sequence: Synthetic epitope
DNALDMFQKH

SEQ ID NO: 3663 - protein, 10 aa, Artificial Sequence
  Description of Artificial Sequence: Synthetic epitope
DNALQSGNSQ

SEQ ID NO: 3664 - protein, 10 aa, Artificial Sequence
  Description of Artificial Sequence: Synthetic epitope
DNANLTNEEQ

SEQ ID NO: 3665 - protein, 10 aa, Artificial Sequence
  Description of Artificial Sequence: Synthetic epitope
DNASDTVESS

SEQ ID NO: 3666 - protein, 10 aa, Artificial Sequence
  Description of Artificial Sequence: Synthetic epitope
DNATEVVKEK

SEQ ID NO: 3667 - protein, 10 aa, Artificial Sequence
  Description of Artificial Sequence: Synthetic epitope
DNAVSTAAEP

SEQ ID NO: 3668 - protein, 10 aa, Artificial Sequence
  Description of Artificial Sequence: Synthetic epitope
DNAWWVGDEF

SEQ ID NO: 3669 - protein, 10 aa, Artificial Sequence
  Description of Artificial Sequence: Synthetic epitope
DNDKNMSTED

SEQ ID NO: 3670 - protein, 10 aa, Artificial Sequence
  Description of Artificial Sequence: Synthetic epitope
DNDMERKKVL

SEQ ID NO: 3671 - protein, 10 aa, Artificial Sequence
  Description of Artificial Sequence: Synthetic epitope
DNEATSEEFE

SEQ ID NO: 3672 - protein, 10 aa, Artificial Sequence
  Description of Artificial Sequence: Synthetic epitope
DNEDKISIKK

SEQ ID NO: 3673 - protein, 10 aa, Artificial Sequence
  Description of Artificial Sequence: Synthetic epitope
DNELMTVDSA

SEQ ID NO: 3674 - protein, 10 aa, Artificial Sequence
  Description of Artificial Sequence: Synthetic epitope
DNFDIQSQRM

SEQ ID NO: 3675 - protein, 10 aa, Artificial Sequence
  Description of Artificial Sequence: Synthetic epitope
DNFFAKRDKK

SEQ ID NO: 3676 - protein, 10 aa, Artificial Sequence
  Description of Artificial Sequence: Synthetic epitope
DNFLKASIDK

SEQ ID NO: 3677 - protein, 10 aa, Artificial Sequence
  Description of Artificial Sequence: Synthetic epitope
DNFPQVDKAM

SEQ ID NO: 3678 - protein, 10 aa, Artificial Sequence
  Description of Artificial Sequence: Synthetic epitope
DNFSSKVVQR

SEQ ID NO: 3679 - protein, 10 aa, Artificial Sequence
  Description of Artificial Sequence: Synthetic epitope
DNGFATQQAE

SEQ ID NO: 3680 - protein, 10 aa, Artificial Sequence
  Description of Artificial Sequence: Synthetic epitope
DNGHSAIQTG

SEQ ID NO: 3681 - protein, 10 aa, Artificial Sequence
  Description of Artificial Sequence: Synthetic epitope
DNGSKSLKPD

SEQ ID NO: 3682 - protein, 10 aa, Artificial Sequence
  Description of Artificial Sequence: Synthetic epitope
DNHIEYLQDD

SEQ ID NO: 3683 - protein, 10 aa, Artificial Sequence
  Description of Artificial Sequence: Synthetic epitope
DNIDQAQLDW

SEQ ID NO: 3684 - protein, 10 aa, Artificial Sequence
  Description of Artificial Sequence: Synthetic epitope
DNIEKNTDSN

SEQ ID NO: 3685 - protein, 10 aa, Artificial Sequence
  Description of Artificial Sequence: Synthetic epitope
DNIIQAGNNL

SEQ ID NO: 3686 - protein, 10 aa, Artificial Sequence
  Description of Artificial Sequence: Synthetic epitope
DNIRNNQEPA

SEQ ID NO: 3687 - protein, 10 aa, Artificial Sequence
  Description of Artificial Sequence: Synthetic epitope
DNISESTDKS

SEQ ID NO: 3688 - protein, 10 aa, Artificial Sequence
  Description of Artificial Sequence: Synthetic epitope
DNITLLQSVS

SEQ ID NO: 3689 - protein, 10 aa, Artificial Sequence
  Description of Artificial Sequence: Synthetic epitope
DNITRQNQFY

SEQ ID NO: 3690 - protein, 10 aa, Artificial Sequence
  Description of Artificial Sequence: Synthetic epitope
DNITSSVLFN

SEQ ID NO: 3691 - protein, 10 aa, Artificial Sequence
  Description of Artificial Sequence: Synthetic epitope
DNKEMYVKGM

SEQ ID NO: 3692 - protein, 10 aa, Artificial Sequence
  Description of Artificial Sequence: Synthetic epitope
DNKENSLENE

SEQ ID NO: 3693 - protein, 10 aa, Artificial Sequence
  Description of Artificial Sequence: Synthetic epitope
DNKIIQEPKV

SEQ ID NO: 3694 - protein, 10 aa, Artificial Sequence
  Description of Artificial Sequence: Synthetic epitope
DNKKVMKDSA

SEQ ID NO: 3695 - protein, 10 aa, Artificial Sequence
  Description of Artificial Sequence: Synthetic epitope
DNKLSQSSIQ

SEQ ID NO: 3696 - protein, 10 aa, Artificial Sequence
  Description of Artificial Sequence: Synthetic epitope
DNKRHEKDVR

SEQ ID NO: 3697 - protein, 10 aa, Artificial Sequence
  Description of Artificial Sequence: Synthetic epitope
DNKSATVELE

SEQ ID NO: 3698 - protein, 10 aa, Artificial Sequence
  Description of Artificial Sequence: Synthetic epitope
DNKSTNPVFS

SEQ ID NO: 3699 - protein, 10 aa, Artificial Sequence
  Description of Artificial Sequence: Synthetic epitope
DNLAKSASEE

SEQ ID NO: 3700 - protein, 10 aa, Artificial Sequence
  Description of Artificial Sequence: Synthetic epitope
DNLHQIDAVE

SEQ ID NO: 3701 - protein, 10 aa, Artificial Sequence
  Description of Artificial Sequence: Synthetic epitope
DNLKLKMRIE

SEQ ID NO: 3702 - protein, 10 aa, Artificial Sequence
  Description of Artificial Sequence: Synthetic epitope
DNLTKDDLDE

SEQ ID NO: 3703 - protein, 10 aa, Artificial Sequence
  Description of Artificial Sequence: Synthetic epitope
DNLTLTVARS

SEQ ID NO: 3704 - protein, 10 aa, Artificial Sequence
  Description of Artificial Sequence: Synthetic epitope
DNLVMVLSDH

SEQ ID NO: 3705 - protein, 10 aa, Artificial Sequence
  Description of Artificial Sequence: Synthetic epitope
DNMGEQAQEQ

SEQ ID NO: 3706 - protein, 10 aa, Artificial Sequence
  Description of Artificial Sequence: Synthetic epitope
DNMLSNKISP

SEQ ID NO: 3707 - protein, 10 aa, Artificial Sequence
  Description of Artificial Sequence: Synthetic epitope
DNMTDGVAEP

SEQ ID NO: 3708 - protein, 10 aa, Artificial Sequence
  Description of Artificial Sequence: Synthetic epitope
DNNGSSMDDW

SEQ ID NO: 3709 - protein, 10 aa, Artificial Sequence
  Description of Artificial Sequence: Synthetic epitope
DNNSGQSAIK

SEQ ID NO: 3710 - protein, 10 aa, Artificial Sequence
  Description of Artificial Sequence: Synthetic epitope
DNNSNISAKR

SEQ ID NO: 3711 - protein, 10 aa, Artificial Sequence
  Description of Artificial Sequence: Synthetic epitope
DNNVVAGDRP

SEQ ID NO: 3712 - protein, 10 aa, Artificial Sequence
  Description of Artificial Sequence: Synthetic epitope
DNPATEMSKQ

SEQ ID NO: 3713 - protein, 10 aa, Artificial Sequence
  Description of Artificial Sequence: Synthetic epitope
DNPKSLKSGD

SEQ ID NO: 3714 - protein, 10 aa, Artificial Sequence
  Description of Artificial Sequence: Synthetic epitope
DNPQVSVPFE

SEQ ID NO: 3715 - protein, 10 aa, Artificial Sequence
  Description of Artificial Sequence: Synthetic epitope
DNPSQSRTVE

SEQ ID NO: 3716 - protein, 10 aa, Artificial Sequence
  Description of Artificial Sequence: Synthetic epitope
DNQALKSQRD

SEQ ID NO: 3717 - protein, 10 aa, Artificial Sequence
  Description of Artificial Sequence: Synthetic epitope
DNQDNPSYIG

SEQ ID NO: 3718 - protein, 10 aa, Artificial Sequence
  Description of Artificial Sequence: Synthetic epitope
DNQSRSNDDY

SEQ ID NO: 3719 - protein, 10 aa, Artificial Sequence
  Description of Artificial Sequence: Synthetic epitope
DNREQVQSGL

SEQ ID NO: 3720 - protein, 10 aa, Artificial Sequence
  Description of Artificial Sequence: Synthetic epitope
DNRISTISSP

SEQ ID NO: 3721 - protein, 10 aa, Artificial Sequence
  Description of Artificial Sequence: Synthetic epitope
DNRKTKSIVT

SEQ ID NO: 3722 - protein, 10 aa, Artificial Sequence
  Description of Artificial Sequence: Synthetic epitope
DNRSRKRVSE

SEQ ID NO: 3723 - protein, 10 aa, Artificial Sequence
  Description of Artificial Sequence: Synthetic epitope
DNSDTTDSHA

SEQ ID NO: 3724 - protein, 10 aa, Artificial Sequence
  Description of Artificial Sequence: Synthetic epitope
DNSLSATSRN

SEQ ID NO: 3725 - protein, 10 aa, Artificial Sequence
  Description of Artificial Sequence: Synthetic epitope
DNTIMDLQTQ

SEQ ID NO: 3726 - protein, 10 aa, Artificial Sequence
  Description of Artificial Sequence: Synthetic epitope
DNTISRSSEE

SEQ ID NO: 3727 - protein, 10 aa, Artificial Sequence
  Description of Artificial Sequence: Synthetic epitope
DNTQLQLKAE

SEQ ID NO: 3728 - protein, 10 aa, Artificial Sequence
  Description of Artificial Sequence: Synthetic epitope
DNTSAEIQFL

SEQ ID NO: 3729 - protein, 10 aa, Artificial Sequence
  Description of Artificial Sequence: Synthetic epitope
DNTTGKQWKN

SEQ ID NO: 3730 - protein, 10 aa, Artificial Sequence
  Description of Artificial Sequence: Synthetic epitope
DNVGSKQMQQ

SEQ ID NO: 3731 - protein, 10 aa, Artificial Sequence
  Description of Artificial Sequence: Synthetic epitope
DNVGSKQMQQ

SEQ ID NO: 3732 - protein, 10 aa, Artificial Sequence
  Description of Artificial Sequence: Synthetic epitope
DNVIKQQSDH

SEQ ID NO: 3733 - protein, 10 aa, Artificial Sequence
  Description of Artificial Sequence: Synthetic epitope
DNVQSISTEN

SEQ ID NO: 3734 - protein, 10 aa, Artificial Sequence
  Description of Artificial Sequence: Synthetic epitope
DNYQRAVAKA

SEQ ID NO: 3735 - protein, 10 aa, Artificial Sequence
  Description of Artificial Sequence: Synthetic epitope
DPAFQMITIA

SEQ ID NO: 3736 - protein, 10 aa, Artificial Sequence
  Description of Artificial Sequence: Synthetic epitope
DPAKDLSRSS

SEQ ID NO: 3737 - protein, 10 aa, Artificial Sequence
  Description of Artificial Sequence: Synthetic epitope
DPAKVAEEDE

SEQ ID NO: 3738 - protein, 10 aa, Artificial Sequence
  Description of Artificial Sequence: Synthetic epitope
DPALTSGDET

SEQ ID NO: 3739 - protein, 10 aa, Artificial Sequence
  Description of Artificial Sequence: Synthetic epitope
DPATATSVDL

SEQ ID NO: 3740 - protein, 10 aa, Artificial Sequence
  Description of Artificial Sequence: Synthetic epitope
DPDDVASTTS

SEQ ID NO: 3741 - protein, 10 aa, Artificial Sequence
  Description of Artificial Sequence: Synthetic epitope
DPDFIMAKQV

SEQ ID NO: 3742 - protein, 10 aa, Artificial Sequence
  Description of Artificial Sequence: Synthetic epitope
DPDQMNEDKR

SEQ ID NO: 3743 - protein, 10 aa, Artificial Sequence
  Description of Artificial Sequence: Synthetic epitope
DPDSEQTKAF

SEQ ID NO: 3744 - protein, 10 aa, Artificial Sequence
  Description of Artificial Sequence: Synthetic epitope
DPEEKKEVTE

SEQ ID NO: 3745 - protein, 10 aa, Artificial Sequence
  Description of Artificial Sequence: Synthetic epitope
DPEGAASTTA

SEQ ID NO: 3746 - protein, 10 aa, Artificial Sequence
  Description of Artificial Sequence: Synthetic epitope
DPELMASTLE

SEQ ID NO: 3747 - protein, 10 aa, Artificial Sequence
  Description of Artificial Sequence: Synthetic epitope
DPELSATESP

SEQ ID NO: 3748 - protein, 10 aa, Artificial Sequence
  Description of Artificial Sequence: Synthetic epitope
DPFFKMLNRS

SEQ ID NO: 3749 - protein, 10 aa, Artificial Sequence
  Description of Artificial Sequence: Synthetic epitope
DPFKGIGQEH

SEQ ID NO: 3750 - protein, 10 aa, Artificial Sequence
  Description of Artificial Sequence: Synthetic epitope
DPFLSQLHQV

SEQ ID NO: 3751 - protein, 10 aa, Artificial Sequence
  Description of Artificial Sequence: Synthetic epitope
DPGEAASMSM

SEQ ID NO: 3752 - protein, 10 aa, Artificial Sequence
  Description of Artificial Sequence: Synthetic epitope
DPGSQVEPSW

SEQ ID NO: 3753 - protein, 10 aa, Artificial Sequence
  Description of Artificial Sequence: Synthetic epitope
DPHQTKEQKI

SEQ ID NO: 3754 - protein, 10 aa, Artificial Sequence
  Description of Artificial Sequence: Synthetic epitope
DPIKISIPRY

SEQ ID NO: 3755 - protein, 10 aa, Artificial Sequence
  Description of Artificial Sequence: Synthetic epitope
DPILSLSNQQ

SEQ ID NO: 3756 - protein, 10 aa, Artificial Sequence
  Description of Artificial Sequence: Synthetic epitope
DPKLSAAVTE

SEQ ID NO: 3757 - protein, 10 aa, Artificial Sequence
  Description of Artificial Sequence: Synthetic epitope
DPKQEESQIS

SEQ ID NO: 3758 - protein, 10 aa, Artificial Sequence
  Description of Artificial Sequence: Synthetic epitope
DPLAAKVFKP

SEQ ID NO: 3759 - protein, 10 aa, Artificial Sequence
  Description of Artificial Sequence: Synthetic epitope
DPLALAALPR

SEQ ID NO: 3760 - protein, 10 aa, Artificial Sequence
  Description of Artificial Sequence: Synthetic epitope
DPLKKAQYDK

SEQ ID NO: 3761 - protein, 10 aa, Artificial Sequence
  Description of Artificial Sequence: Synthetic epitope
DPLNIAIDKM

SEQ ID NO: 3762 - protein, 10 aa, Artificial Sequence
  Description of Artificial Sequence: Synthetic epitope
DPLQTSGKAA

SEQ ID NO: 3763 - protein, 10 aa, Artificial Sequence
  Description of Artificial Sequence: Synthetic epitope
DPLSALKYLQ

SEQ ID NO: 3764 - protein, 10 aa, Artificial Sequence
  Description of Artificial Sequence: Synthetic epitope
DPLSSAENSL

SEQ ID NO: 3765 - protein, 10 aa, Artificial Sequence
  Description of Artificial Sequence: Synthetic epitope
DPMEQNVAEL

SEQ ID NO: 3766 - protein, 10 aa, Artificial Sequence
  Description of Artificial Sequence: Synthetic epitope
DPMESVREET

SEQ ID NO: 3767 - protein, 10 aa, Artificial Sequence
  Description of Artificial Sequence: Synthetic epitope
DPNARMVTHI

SEQ ID NO: 3768 - protein, 10 aa, Artificial Sequence
  Description of Artificial Sequence: Synthetic epitope
DPNASAAQQA

SEQ ID NO: 3769 - protein, 10 aa, Artificial Sequence
  Description of Artificial Sequence: Synthetic epitope
DPNLATSNAE

SEQ ID NO: 3770 - protein, 10 aa, Artificial Sequence
  Description of Artificial Sequence: Synthetic epitope
DPNSESLISA

SEQ ID NO: 3771 - protein, 10 aa, Artificial Sequence
  Description of Artificial Sequence: Synthetic epitope
DPQVSTKTGE

SEQ ID NO: 3772 - protein, 10 aa, Artificial Sequence
  Description of Artificial Sequence: Synthetic epitope
DPRKNDRPKP

SEQ ID NO: 3773 - protein, 10 aa, Artificial Sequence
  Description of Artificial Sequence: Synthetic epitope
DPRSARFQEL

SEQ ID NO: 3774 - protein, 10 aa, Artificial Sequence
  Description of Artificial Sequence: Synthetic epitope
DPSLIMRSIV

SEQ ID NO: 3775 - protein, 10 aa, Artificial Sequence
  Description of Artificial Sequence: Synthetic epitope
DPSLKDVEDT

SEQ ID NO: 3776 - protein, 10 aa, Artificial Sequence
  Description of Artificial Sequence: Synthetic epitope
DPSLVDMKQA

SEQ ID NO: 3777 - protein, 10 aa, Artificial Sequence
  Description of Artificial Sequence: Synthetic epitope
DPSSLSTSET

SEQ ID NO: 3778 - protein, 10 aa, Artificial Sequence
  Description of Artificial Sequence: Synthetic epitope
DPSVNSQAQE

SEQ ID NO: 3779 - protein, 10 aa, Artificial Sequence
  Description of Artificial Sequence: Synthetic epitope
DPSVSADGDT

SEQ ID NO: 3780 - protein, 10 aa, Artificial Sequence
  Description of Artificial Sequence: Synthetic epitope
DPSVSQQINP

SEQ ID NO: 3781 - protein, 10 aa, Artificial Sequence
  Description of Artificial Sequence: Synthetic epitope
DPTAALRKLP

SEQ ID NO: 3782 - protein, 10 aa, Artificial Sequence
  Description of Artificial Sequence: Synthetic epitope
DPVERNSHAP

SEQ ID NO: 3783 - protein, 10 aa, Artificial Sequence
  Description of Artificial Sequence: Synthetic epitope
DPVLAEAVTG

SEQ ID NO: 3784 - protein, 10 aa, Artificial Sequence
  Description of Artificial Sequence: Synthetic epitope
DPVQATASQG

SEQ ID NO: 3785 - protein, 10 aa, Artificial Sequence
  Description of Artificial Sequence: Synthetic epitope
DPVSTRVKLK

SEQ ID NO: 3786 - protein, 10 aa, Artificial Sequence
  Description of Artificial Sequence: Synthetic epitope
DPWKTNYRMY

SEQ ID NO: 3787 - protein, 10 aa, Artificial Sequence
  Description of Artificial Sequence: Synthetic epitope
DPYEIRQWNT

SEQ ID NO: 3788 - protein, 10 aa, Artificial Sequence
  Description of Artificial Sequence: Synthetic epitope
DPYSKASVAP

SEQ ID NO: 3789 - protein, 10 aa, Artificial Sequence
  Description of Artificial Sequence: Synthetic epitope
DQAGQVASAS

SEQ ID NO: 3790 - protein, 10 aa, Artificial Sequence
  Description of Artificial Sequence: Synthetic epitope
DQAGREKIIG

SEQ ID NO: 3791 - protein, 10 aa, Artificial Sequence
  Description of Artificial Sequence: Synthetic epitope
DQAIGLLVAI

SEQ ID NO: 3792 - protein, 10 aa, Artificial Sequence
  Description of Artificial Sequence: Synthetic epitope
DQALAQKNGR

SEQ ID NO: 3793 - protein, 10 aa, Artificial Sequence
  Description of Artificial Sequence: Synthetic epitope
DQALQLTQMD

SEQ ID NO: 3794 - protein, 10 aa, Artificial Sequence
  Description of Artificial Sequence: Synthetic epitope
DQAQKEPAMR

SEQ ID NO: 3795 - protein, 10 aa, Artificial Sequence
  Description of Artificial Sequence: Synthetic epitope
DQASDLVTTV

SEQ ID NO: 3796 - protein, 10 aa, Artificial Sequence
  Description of Artificial Sequence: Synthetic epitope
DQASDRPRSS

SEQ ID NO: 3797 - protein, 10 aa, Artificial Sequence
  Description of Artificial Sequence: Synthetic epitope
DQASVTREEV

SEQ ID NO: 3798 - protein, 10 aa, Artificial Sequence
  Description of Artificial Sequence: Synthetic epitope
DQATQDESAA

SEQ ID NO: 3799 - protein, 10 aa, Artificial Sequence
  Description of Artificial Sequence: Synthetic epitope
DQAYQMRPSI

SEQ ID NO: 3800 - protein, 10 aa, Artificial Sequence
  Description of Artificial Sequence: Synthetic epitope
DQDEENQSME

SEQ ID NO: 3801 - protein, 10 aa, Artificial Sequence
  Description of Artificial Sequence: Synthetic epitope
DQDNVYKKSV

SEQ ID NO: 3802 - protein, 10 aa, Artificial Sequence
  Description of Artificial Sequence: Synthetic epitope
DQDVLLKKAK

SEQ ID NO: 3803 - protein, 10 aa, Artificial Sequence
  Description of Artificial Sequence: Synthetic epitope
DQDVNSLAAQ

SEQ ID NO: 3804 - protein, 10 aa, Artificial Sequence
  Description of Artificial Sequence: Synthetic epitope
DQEATLRNRV

SEQ ID NO: 3805 - protein, 10 aa, Artificial Sequence
  Description of Artificial Sequence: Synthetic epitope
DQEEADDQQL

SEQ ID NO: 3806 - protein, 10 aa, Artificial Sequence
  Description of Artificial Sequence: Synthetic epitope
DQENHPSKAP

SEQ ID NO: 3807 - protein, 10 aa, Artificial Sequence
  Description of Artificial Sequence: Synthetic epitope
DQEQKVEMTS

SEQ ID NO: 3808 - protein, 10 aa, Artificial Sequence
  Description of Artificial Sequence: Synthetic epitope
DQEQQGKHEL

SEQ ID NO: 3809 - protein, 10 aa, Artificial Sequence
  Description of Artificial Sequence: Synthetic epitope
DQERPRSDLS

SEQ ID NO: 3810 - protein, 10 aa, Artificial Sequence
  Description of Artificial Sequence: Synthetic epitope
DQETIAVDEW

SEQ ID NO: 3811 - protein, 10 aa, Artificial Sequence
  Description of Artificial Sequence: Synthetic epitope
DQEVKLKVDS

SEQ ID NO: 3812 - protein, 10 aa, Artificial Sequence
  Description of Artificial Sequence: Synthetic epitope
DQEVNHYKGK

SEQ ID NO: 3813 - protein, 10 aa, Artificial Sequence
  Description of Artificial Sequence: Synthetic epitope
DQEYDSESSQ

SEQ ID NO: 3814 - protein, 10 aa, Artificial Sequence
  Description of Artificial Sequence: Synthetic epitope
DQFGHVNMVM

SEQ ID NO: 3815 - protein, 10 aa, Artificial Sequence
  Description of Artificial Sequence: Synthetic epitope
DQFSSESSLE

SEQ ID NO: 3816 - protein, 10 aa, Artificial Sequence
  Description of Artificial Sequence: Synthetic epitope
DQFYTSLSYS

SEQ ID NO: 3817 - protein, 10 aa, Artificial Sequence
  Description of Artificial Sequence: Synthetic epitope
DQFYVANEFL

SEQ ID NO: 3818 - protein, 10 aa, Artificial Sequence
  Description of Artificial Sequence: Synthetic epitope
DQGLISKLKE

SEQ ID NO: 3819 - protein, 10 aa, Artificial Sequence
  Description of Artificial Sequence: Synthetic epitope
DQHSDIAQRY

SEQ ID NO: 3820 - protein, 10 aa, Artificial Sequence
  Description of Artificial Sequence: Synthetic epitope
DQHYTVDMTE

SEQ ID NO: 3821 - protein, 10 aa, Artificial Sequence
  Description of Artificial Sequence: Synthetic epitope
DQIAFQAAGG

SEQ ID NO: 3822 - protein, 10 aa, Artificial Sequence
  Description of Artificial Sequence: Synthetic epitope
DQIETVNGGS

SEQ ID NO: 3823 - protein, 10 aa, Artificial Sequence
  Description of Artificial Sequence: Synthetic epitope
DQIKDHNSSE

SEQ ID NO: 3824 - protein, 10 aa, Artificial Sequence
  Description of Artificial Sequence: Synthetic epitope
DQIRQRESDI

SEQ ID NO: 3825 - protein, 10 aa, Artificial Sequence
  Description of Artificial Sequence: Synthetic epitope
DQISEESHNI

SEQ ID NO: 3826 - protein, 10 aa, Artificial Sequence
  Description of Artificial Sequence: Synthetic epitope
DQISGLSQSE

SEQ ID NO: 3827 - protein, 10 aa, Artificial Sequence
  Description of Artificial Sequence: Synthetic epitope
DQIVRIRGTR

SEQ ID NO: 3828 - protein, 10 aa, Artificial Sequence
  Description of Artificial Sequence: Synthetic epitope
DQKAFSVEHT

SEQ ID NO: 3829 - protein, 10 aa, Artificial Sequence
  Description of Artificial Sequence: Synthetic epitope
DQKAGSESAE

SEQ ID NO: 3830 - protein, 10 aa, Artificial Sequence
  Description of Artificial Sequence: Synthetic epitope
DQKHKKASGT

SEQ ID NO: 3831 - protein, 10 aa, Artificial Sequence
  Description of Artificial Sequence: Synthetic epitope
DQKPSQKQSI

SEQ ID NO: 3832 - protein, 10 aa, Artificial Sequence
  Description of Artificial Sequence: Synthetic epitope
DQKRIAAQKQ

SEQ ID NO: 3833 - protein, 10 aa, Artificial Sequence
  Description of Artificial Sequence: Synthetic epitope
DQKSSRSKDK

SEQ ID NO: 3834 - protein, 10 aa, Artificial Sequence
  Description of Artificial Sequence: Synthetic epitope
DQKSTSVKKD

SEQ ID NO: 3835 - protein, 10 aa, Artificial Sequence
  Description of Artificial Sequence: Synthetic epitope
DQKVRSVEHK

SEQ ID NO: 3836 - protein, 10 aa, Artificial Sequence
  Description of Artificial Sequence: Synthetic epitope
DQKVTPEQTT

SEQ ID NO: 3837 - protein, 10 aa, Artificial Sequence
  Description of Artificial Sequence: Synthetic epitope
DQLAHASSKE

SEQ ID NO: 3838 - protein, 10 aa, Artificial Sequence
  Description of Artificial Sequence: Synthetic epitope
DQLAVSAQEH

SEQ ID NO: 3839 - protein, 10 aa, Artificial Sequence
  Description of Artificial Sequence: Synthetic epitope
DQLDSKSKSK

SEQ ID NO: 3840 - protein, 10 aa, Artificial Sequence
  Description of Artificial Sequence: Synthetic epitope
DQLEETQLEE

SEQ ID NO: 3841 - protein, 10 aa, Artificial Sequence
  Description of Artificial Sequence: Synthetic epitope
DQLEQVSVNL

SEQ ID NO: 3842 - protein, 10 aa, Artificial Sequence
  Description of Artificial Sequence: Synthetic epitope
DQLIFPKLQK

SEQ ID NO: 3843 - protein, 10 aa, Artificial Sequence
  Description of Artificial Sequence: Synthetic epitope
DQLIKIHYRY

SEQ ID NO: 3844 - protein, 10 aa, Artificial Sequence
  Description of Artificial Sequence: Synthetic epitope
DQLLQIISVE

SEQ ID NO: 3845 - protein, 10 aa, Artificial Sequence
  Description of Artificial Sequence: Synthetic epitope
DQLQNWFTIV

SEQ ID NO: 3846 - protein, 10 aa, Artificial Sequence
  Description of Artificial Sequence: Synthetic epitope
DQLRTQVNTQ

SEQ ID NO: 3847 - protein, 10 aa, Artificial Sequence
  Description of Artificial Sequence: Synthetic epitope
DQLTSIIQID

SEQ ID NO: 3848 - protein, 10 aa, Artificial Sequence
  Description of Artificial Sequence: Synthetic epitope
DQLVNSTAEA

SEQ ID NO: 3849 - protein, 10 aa, Artificial Sequence
  Description of Artificial Sequence: Synthetic epitope
DQMEASLLAV

SEQ ID NO: 3850 - protein, 10 aa, Artificial Sequence
  Description of Artificial Sequence: Synthetic epitope
DQMFQRFGSP

SEQ ID NO: 3851 - protein, 10 aa, Artificial Sequence
  Description of Artificial Sequence: Synthetic epitope
DQMIKGAIEV

SEQ ID NO: 3852 - protein, 10 aa, Artificial Sequence
  Description of Artificial Sequence: Synthetic epitope
DQMKKNQAAD

SEQ ID NO: 3853 - protein, 10 aa, Artificial Sequence
  Description of Artificial Sequence: Synthetic epitope
DQMRMLNFPQ

SEQ ID NO: 3854 - protein, 10 aa, Artificial Sequence
  Description of Artificial Sequence: Synthetic epitope
DQMSLQKRSL

SEQ ID NO: 3855 - protein, 10 aa, Artificial Sequence
  Description of Artificial Sequence: Synthetic epitope
DQMVQSLVSH

SEQ ID NO: 3856 - protein, 10 aa, Artificial Sequence
  Description of Artificial Sequence: Synthetic epitope
DQNTGAIENI

SEQ ID NO: 3857 - protein, 10 aa, Artificial Sequence
  Description of Artificial Sequence: Synthetic epitope
DQNVPSSNFP

SEQ ID NO: 3858 - protein, 10 aa, Artificial Sequence
  Description of Artificial Sequence: Synthetic epitope
DQPTQVSKMQ

SEQ ID NO: 3859 - protein, 10 aa, Artificial Sequence
  Description of Artificial Sequence: Synthetic epitope
DQPVKMNSLP

SEQ ID NO: 3860 - protein, 10 aa, Artificial Sequence
  Description of Artificial Sequence: Synthetic epitope
DQQEAVRQGQ

SEQ ID NO: 3861 - protein, 10 aa, Artificial Sequence
  Description of Artificial Sequence: Synthetic epitope
DQQELIQQIP

SEQ ID NO: 3862 - protein, 10 aa, Artificial Sequence
  Description of Artificial Sequence: Synthetic epitope
DQQHKNIQLQ

SEQ ID NO: 3863 - protein, 10 aa, Artificial Sequence
  Description of Artificial Sequence: Synthetic epitope
DQQSLSDVEG

SEQ ID NO: 3864 - protein, 10 aa, Artificial Sequence
  Description of Artificial Sequence: Synthetic epitope
DQREEVRQSK

SEQ ID NO: 3865 - protein, 10 aa, Artificial Sequence
  Description of Artificial Sequence: Synthetic epitope
DQRIQVAKTK

SEQ ID NO: 3866 - protein, 10 aa, Artificial Sequence
  Description of Artificial Sequence: Synthetic epitope
DQRLAISHSQ

SEQ ID NO: 3867 - protein, 10 aa, Artificial Sequence
  Description of Artificial Sequence: Synthetic epitope
DQRPAWYDLP

SEQ ID NO: 3868 - protein, 10 aa, Artificial Sequence
  Description of Artificial Sequence: Synthetic epitope
DQRRHAMRGR

SEQ ID NO: 3869 - protein, 10 aa, Artificial Sequence
  Description of Artificial Sequence: Synthetic epitope
DQRRMTEITG

SEQ ID NO: 3870 - protein, 10 aa, Artificial Sequence
  Description of Artificial Sequence: Synthetic epitope
DQRSTSVDHS

SEQ ID NO: 3871 - protein, 10 aa, Artificial Sequence
  Description of Artificial Sequence: Synthetic epitope
DQRSVISDEK

SEQ ID NO: 3872 - protein, 10 aa, Artificial Sequence
  Description of Artificial Sequence: Synthetic epitope
DQRTKAEQGN

SEQ ID NO: 3873 - protein, 10 aa, Artificial Sequence
  Description of Artificial Sequence: Synthetic epitope
DQSALQAVQL

SEQ ID NO: 3874 - protein, 10 aa, Artificial Sequence
  Description of Artificial Sequence: Synthetic epitope
DQSFQAALQF

SEQ ID NO: 3875 - protein, 10 aa, Artificial Sequence
  Description of Artificial Sequence: Synthetic epitope
DQSLEVSLEL

SEQ ID NO: 3876 - protein, 10 aa, Artificial Sequence
  Description of Artificial Sequence: Synthetic epitope
DQSLIYTLLT

SEQ ID NO: 3877 - protein, 10 aa, Artificial Sequence
  Description of Artificial Sequence: Synthetic epitope
DQSNPSTVKH

SEQ ID NO: 3878 - protein, 10 aa, Artificial Sequence
  Description of Artificial Sequence: Synthetic epitope
DQSSKASAQD

SEQ ID NO: 3879 - protein, 10 aa, Artificial Sequence
  Description of Artificial Sequence: Synthetic epitope
DQSTATSQAG

SEQ ID NO: 3880 - protein, 10 aa, Artificial Sequence
  Description of Artificial Sequence: Synthetic epitope
DQSVATELNA

SEQ ID NO: 3881 - protein, 10 aa, Artificial Sequence
  Description of Artificial Sequence: Synthetic epitope
DQSVSSVNKG

SEQ ID NO: 3882 - protein, 10 aa, Artificial Sequence
  Description of Artificial Sequence: Synthetic epitope
DQTAVHSKNE

SEQ ID NO: 3883 - protein, 10 aa, Artificial Sequence
  Description of Artificial Sequence: Synthetic epitope
DQTGIQSLIE

SEQ ID NO: 3884 - protein, 10 aa, Artificial Sequence
  Description of Artificial Sequence: Synthetic epitope
DQTKHEMKDK

SEQ ID NO: 3885 - protein, 10 aa, Artificial Sequence
  Description of Artificial Sequence: Synthetic epitope
DQTSVLDSSA

SEQ ID NO: 3886 - protein, 10 aa, Artificial Sequence
  Description of Artificial Sequence: Synthetic epitope
DQTTQKSLIA

SEQ ID NO: 3887 - protein, 10 aa, Artificial Sequence
  Description of Artificial Sequence: Synthetic epitope
DQTVSQPEDQ

SEQ ID NO: 3888 - protein, 10 aa, Artificial Sequence
  Description of Artificial Sequence: Synthetic epitope
DQVENSKNSW

SEQ ID NO: 3889 - protein, 10 aa, Artificial Sequence
  Description of Artificial Sequence: Synthetic epitope
DQVETASWAE

SEQ ID NO: 3890 - protein, 10 aa, Artificial Sequence
  Description of Artificial Sequence: Synthetic epitope
DQVHVFKPAT

SEQ ID NO: 3891 - protein, 10 aa, Artificial Sequence
  Description of Artificial Sequence: Synthetic epitope
DQVIPKQRAA

SEQ ID NO: 3892 - protein, 10 aa, Artificial Sequence
  Description of Artificial Sequence: Synthetic epitope
DQVKKNQLIQ

SEQ ID NO: 3893 - protein, 10 aa, Artificial Sequence
  Description of Artificial Sequence: Synthetic epitope
DQVKSQGADL

SEQ ID NO: 3894 - protein, 10 aa, Artificial Sequence
  Description of Artificial Sequence: Synthetic epitope
DQVKVIMDAL

SEQ ID NO: 3895 - protein, 10 aa, Artificial Sequence
  Description of Artificial Sequence: Synthetic epitope
DQVQKSSKLY

SEQ ID NO: 3896 - protein, 10 aa, Artificial Sequence
  Description of Artificial Sequence: Synthetic epitope
DQVQKVARLE

SEQ ID NO: 3897 - protein, 10 aa, Artificial Sequence
  Description of Artificial Sequence: Synthetic epitope
DQVSIQSLHM

SEQ ID NO: 3898 - protein, 10 aa, Artificial Sequence
  Description of Artificial Sequence: Synthetic epitope
DQWHLLSGST

SEQ ID NO: 3899 - protein, 10 aa, Artificial Sequence
  Description of Artificial Sequence: Synthetic epitope
DQWSELTEAE

SEQ ID NO: 3900 - protein, 10 aa, Artificial Sequence
  Description of Artificial Sequence: Synthetic epitope
DQYQRSTGQE

SEQ ID NO: 3901 - protein, 10 aa, Artificial Sequence
  Description of Artificial Sequence: Synthetic epitope
DRAAEEANAV

SEQ ID NO: 3902 - protein, 10 aa, Artificial Sequence
  Description of Artificial Sequence: Synthetic epitope
DRAASSASGS

SEQ ID NO: 3903 - protein, 10 aa, Artificial Sequence
  Description of Artificial Sequence: Synthetic epitope
DRAFATARLN

SEQ ID NO: 3904 - protein, 10 aa, Artificial Sequence
  Description of Artificial Sequence: Synthetic epitope
DRAITTLPRV

SEQ ID NO: 3905 - protein, 10 aa, Artificial Sequence
  Description of Artificial Sequence: Synthetic epitope
DRALKVLTRR

SEQ ID NO: 3906 - protein, 10 aa, Artificial Sequence
  Description of Artificial Sequence: Synthetic epitope
DRALNITSLQ

SEQ ID NO: 3907 - protein, 10 aa, Artificial Sequence
  Description of Artificial Sequence: Synthetic epitope
DRALVPMVEQ

SEQ ID NO: 3908 - protein, 10 aa, Artificial Sequence
  Description of Artificial Sequence: Synthetic epitope
DRATSEVPGS

SEQ ID NO: 3909 - protein, 10 aa, Artificial Sequence
  Description of Artificial Sequence: Synthetic epitope
DRDAIAQAVR

SEQ ID NO: 3910 - protein, 10 aa, Artificial Sequence
  Description of Artificial Sequence: Synthetic epitope
DRDQKIIYSN

SEQ ID NO: 3911 - protein, 10 aa, Artificial Sequence
  Description of Artificial Sequence: Synthetic epitope
DRDSANSAPK

SEQ ID NO: 3912 - protein, 10 aa, Artificial Sequence
  Description of Artificial Sequence: Synthetic epitope
DRDTQLARLM

SEQ ID NO: 3913 - protein, 10 aa, Artificial Sequence
  Description of Artificial Sequence: Synthetic epitope
DRDVSSDSSM

SEQ ID NO: 3914 - protein, 10 aa, Artificial Sequence
  Description of Artificial Sequence: Synthetic epitope
DREAKKQGPV

SEQ ID NO: 3915 - protein, 10 aa, Artificial Sequence
  Description of Artificial Sequence: Synthetic epitope
DREANLTSSV

SEQ ID NO: 3916 - protein, 10 aa, Artificial Sequence
  Description of Artificial Sequence: Synthetic epitope
DREDKASDDE

SEQ ID NO: 3917 - protein, 10 aa, Artificial Sequence
  Description of Artificial Sequence: Synthetic epitope
DRESALASAD

SEQ ID NO: 3918 - protein, 10 aa, Artificial Sequence
  Description of Artificial Sequence: Synthetic epitope
DRETAASLLQ

SEQ ID NO: 3919 - protein, 10 aa, Artificial Sequence
  Description of Artificial Sequence: Synthetic epitope
DREVQAGRQA

SEQ ID NO: 3920 - protein, 10 aa, Artificial Sequence
  Description of Artificial Sequence: Synthetic epitope
DREVSSLNSK

SEQ ID NO: 3921 - protein, 10 aa, Artificial Sequence
  Description of Artificial Sequence: Synthetic epitope
DRFIDTTLAI

SEQ ID NO: 3922 - protein, 10 aa, Artificial Sequence
  Description of Artificial Sequence: Synthetic epitope
DRFQVPTTEV

SEQ ID NO: 3923 - protein, 10 aa, Artificial Sequence
  Description of Artificial Sequence: Synthetic epitope
DRGDTETTMP

SEQ ID NO: 3924 - protein, 10 aa, Artificial Sequence
  Description of Artificial Sequence: Synthetic epitope
DRGHDWGAPP

SEQ ID NO: 3925 - protein, 10 aa, Artificial Sequence
  Description of Artificial Sequence: Synthetic epitope
DRGISNMLDV

SEQ ID NO: 3926 - protein, 10 aa, Artificial Sequence
  Description of Artificial Sequence: Synthetic epitope
DRGKTNADSK

SEQ ID NO: 3927 - protein, 10 aa, Artificial Sequence
  Description of Artificial Sequence: Synthetic epitope
DRGSSIYRSS

SEQ ID NO: 3928 - protein, 10 aa, Artificial Sequence
  Description of Artificial Sequence: Synthetic epitope
DRGTEKSVMN

SEQ ID NO: 3929 - protein, 10 aa, Artificial Sequence
  Description of Artificial Sequence: Synthetic epitope
DRHEENQLTA

SEQ ID NO: 3930 - protein, 10 aa, Artificial Sequence
  Description of Artificial Sequence: Synthetic epitope
DRHKQLRATA

SEQ ID NO: 3931 - protein, 10 aa, Artificial Sequence
  Description of Artificial Sequence: Synthetic epitope
DRHKRERSRA

SEQ ID NO: 3932 - protein, 10 aa, Artificial Sequence
  Description of Artificial Sequence: Synthetic epitope
DRHLELPGQP

SEQ ID NO: 3933 - protein, 10 aa, Artificial Sequence
  Description of Artificial Sequence: Synthetic epitope
DRHQARERAG

SEQ ID NO: 3934 - protein, 10 aa, Artificial Sequence
  Description of Artificial Sequence: Synthetic epitope
DRIASVAVQQ

SEQ ID NO: 3935 - protein, 10 aa, Artificial Sequence
  Description of Artificial Sequence: Synthetic epitope
DRIGKTKRTG

SEQ ID NO: 3936 - protein, 10 aa, Artificial Sequence
  Description of Artificial Sequence: Synthetic epitope
DRIIAQLSHS

SEQ ID NO: 3937 - protein, 10 aa, Artificial Sequence
  Description of Artificial Sequence: Synthetic epitope
DRIIGMRTQL

SEQ ID NO: 3938 - protein, 10 aa, Artificial Sequence
  Description of Artificial Sequence: Synthetic epitope
DRIQYYQLDE

SEQ ID NO: 3939 - protein, 10 aa, Artificial Sequence
  Description of Artificial Sequence: Synthetic epitope
DRKAEDARRD

SEQ ID NO: 3940 - protein, 10 aa, Artificial Sequence
  Description of Artificial Sequence: Synthetic epitope
DRKALAEATN

SEQ ID NO: 3941 - protein, 10 aa, Artificial Sequence
  Description of Artificial Sequence: Synthetic epitope
DRKDRASVDS

SEQ ID NO: 3942 - protein, 10 aa, Artificial Sequence
  Description of Artificial Sequence: Synthetic epitope
DRKEALEDRQ

SEQ ID NO: 3943 - protein, 10 aa, Artificial Sequence
  Description of Artificial Sequence: Synthetic epitope
DRKFQPYKPF

SEQ ID NO: 3944 - protein, 10 aa, Artificial Sequence
  Description of Artificial Sequence: Synthetic epitope
DRKGAKKSQG

SEQ ID NO: 3945 - protein, 10 aa, Artificial Sequence
  Description of Artificial Sequence: Synthetic epitope
DRKSNTRNNM

SEQ ID NO: 3946 - protein, 10 aa, Artificial Sequence
  Description of Artificial Sequence: Synthetic epitope
DRKSRIIAKN

SEQ ID NO: 3947 - protein, 10 aa, Artificial Sequence
  Description of Artificial Sequence: Synthetic epitope
DRKVIEKDEE

SEQ ID NO: 3948 - protein, 10 aa, Artificial Sequence
  Description of Artificial Sequence: Synthetic epitope
DRKVMEYENR

SEQ ID NO: 3949 - protein, 10 aa, Artificial Sequence
  Description of Artificial Sequence: Synthetic epitope
DRLEKASSNQ

SEQ ID NO: 3950 - protein, 10 aa, Artificial Sequence
  Description of Artificial Sequence: Synthetic epitope
DRLHKKINHA

SEQ ID NO: 3951 - protein, 10 aa, Artificial Sequence
  Description of Artificial Sequence: Synthetic epitope
DRLKEKMVVE

SEQ ID NO: 3952 - protein, 10 aa, Artificial Sequence
  Description of Artificial Sequence: Synthetic epitope
DRLLSALNSG

SEQ ID NO: 3953 - protein, 10 aa, Artificial Sequence
  Description of Artificial Sequence: Synthetic epitope
DRLQMKDLNN

SEQ ID NO: 3954 - protein, 10 aa, Artificial Sequence
  Description of Artificial Sequence: Synthetic epitope
DRLSLAVQKG

SEQ ID NO: 3955 - protein, 10 aa, Artificial Sequence
  Description of Artificial Sequence: Synthetic epitope
DRLTAALSPF

SEQ ID NO: 3956 - protein, 10 aa, Artificial Sequence
  Description of Artificial Sequence: Synthetic epitope
DRLVVKSIEP

SEQ ID NO: 3957 - protein, 10 aa, Artificial Sequence
  Description of Artificial Sequence: Synthetic epitope
DRNAEMLSTQ

SEQ ID NO: 3958 - protein, 10 aa, Artificial Sequence
  Description of Artificial Sequence: Synthetic epitope
DRNATVDKLE

SEQ ID NO: 3959 - protein, 10 aa, Artificial Sequence
  Description of Artificial Sequence: Synthetic epitope
DRNSAIKSSI

SEQ ID NO: 3960 - protein, 10 aa, Artificial Sequence
  Description of Artificial Sequence: Synthetic epitope
DRNWKSKEWP

SEQ ID NO: 3961 - protein, 10 aa, Artificial Sequence
  Description of Artificial Sequence: Synthetic epitope
DRPEASMTPD

SEQ ID NO: 3962 - protein, 10 aa, Artificial Sequence
  Description of Artificial Sequence: Synthetic epitope
DRPIRDTRHY

SEQ ID NO: 3963 - protein, 10 aa, Artificial Sequence
  Description of Artificial Sequence: Synthetic epitope
DRPSETHADY

SEQ ID NO: 3964 - protein, 10 aa, Artificial Sequence
  Description of Artificial Sequence: Synthetic epitope
DRQKEQTFRE

SEQ ID NO: 3965 - protein, 10 aa, Artificial Sequence
  Description of Artificial Sequence: Synthetic epitope
DRQKVLTLEE

SEQ ID NO: 3966 - protein, 10 aa, Artificial Sequence
  Description of Artificial Sequence: Synthetic epitope
DRQLANSLSG

SEQ ID NO: 3967 - protein, 10 aa, Artificial Sequence
  Description of Artificial Sequence: Synthetic epitope
DRQLMSQVAV

SEQ ID NO: 3968 - protein, 10 aa, Artificial Sequence
  Description of Artificial Sequence: Synthetic epitope
DRQSTLKKTN

SEQ ID NO: 3969 - protein, 10 aa, Artificial Sequence
  Description of Artificial Sequence: Synthetic epitope
DRRAKSEAPA

SEQ ID NO: 3970 - protein, 10 aa, Artificial Sequence
  Description of Artificial Sequence: Synthetic epitope
DRRGALKAQT

SEQ ID NO: 3971 - protein, 10 aa, Artificial Sequence
  Description of Artificial Sequence: Synthetic epitope
DRRKSQMEEV

SEQ ID NO: 3972 - protein, 10 aa, Artificial Sequence
  Description of Artificial Sequence: Synthetic epitope
DRRSKQSKSP

SEQ ID NO: 3973 - protein, 10 aa, Artificial Sequence
  Description of Artificial Sequence: Synthetic epitope
DRRSVLQRIM

SEQ ID NO: 3974 - protein, 10 aa, Artificial Sequence
  Description of Artificial Sequence: Synthetic epitope
DRRVNDNKTA

SEQ ID NO: 3975 - protein, 10 aa, Artificial Sequence
  Description of Artificial Sequence: Synthetic epitope
DRSAASTPSK

SEQ ID NO: 3976 - protein, 10 aa, Artificial Sequence
  Description of Artificial Sequence: Synthetic epitope
DRSGADELEN

SEQ ID NO: 3977 - protein, 10 aa, Artificial Sequence
  Description of Artificial Sequence: Synthetic epitope
DRSHYSDSQL

SEQ ID NO: 3978 - protein, 10 aa, Artificial Sequence
  Description of Artificial Sequence: Synthetic epitope
DRSILTLSKE

SEQ ID NO: 3979 - protein, 10 aa, Artificial Sequence
  Description of Artificial Sequence: Synthetic epitope
DRSKTSARIY

SEQ ID NO: 3980 - protein, 10 aa, Artificial Sequence
  Description of Artificial Sequence: Synthetic epitope
DRSKYLLVKE

SEQ ID NO: 3981 - protein, 10 aa, Artificial Sequence
  Description of Artificial Sequence: Synthetic epitope
DRSLAAGLNK

SEQ ID NO: 3982 - protein, 10 aa, Artificial Sequence
  Description of Artificial Sequence: Synthetic epitope
DRSLGSMKEE

SEQ ID NO: 3983 - protein, 10 aa, Artificial Sequence
  Description of Artificial Sequence: Synthetic epitope
DRSLQLSRQR

SEQ ID NO: 3984 - protein, 10 aa, Artificial Sequence
  Description of Artificial Sequence: Synthetic epitope
DRSMTASLSD

SEQ ID NO: 3985 - protein, 10 aa, Artificial Sequence
  Description of Artificial Sequence: Synthetic epitope
DRSNAESLDR

SEQ ID NO: 3986 - protein, 10 aa, Artificial Sequence
  Description of Artificial Sequence: Synthetic epitope
DRSSDNSHQD

SEQ ID NO: 3987 - protein, 10 aa, Artificial Sequence
  Description of Artificial Sequence: Synthetic epitope
DRSSTIASDH

SEQ ID NO: 3988 - protein, 10 aa, Artificial Sequence
  Description of Artificial Sequence: Synthetic epitope
DRSTSLESSD

SEQ ID NO: 3989 - protein, 10 aa, Artificial Sequence
  Description of Artificial Sequence: Synthetic epitope
DRSVVASREG

SEQ ID NO: 3990 - protein, 10 aa, Artificial Sequence
  Description of Artificial Sequence: Synthetic epitope
DRTLMKSDVQ

SEQ ID NO: 3991 - protein, 10 aa, Artificial Sequence
  Description of Artificial Sequence: Synthetic epitope
DRTLVESVTQ

SEQ ID NO: 3992 - protein, 10 aa, Artificial Sequence
  Description of Artificial Sequence: Synthetic epitope
DRTRLRKAQS

SEQ ID NO: 3993 - protein, 10 aa, Artificial Sequence
  Description of Artificial Sequence: Synthetic epitope
DRVALDLATA

SEQ ID NO: 3994 - protein, 10 aa, Artificial Sequence
  Description of Artificial Sequence: Synthetic epitope
DRVAMYVHAY

SEQ ID NO: 3995 - protein, 10 aa, Artificial Sequence
  Description of Artificial Sequence: Synthetic epitope
DRVDYDRQSG

SEQ ID NO: 3996 - protein, 10 aa, Artificial Sequence
  Description of Artificial Sequence: Synthetic epitope
DRVLSLETSV

SEQ ID NO: 3997 - protein, 10 aa, Artificial Sequence
  Description of Artificial Sequence: Synthetic epitope
DRVRTADHHQ

SEQ ID NO: 3998 - protein, 10 aa, Artificial Sequence
  Description of Artificial Sequence: Synthetic epitope
DRVSLNHRQD

SEQ ID NO: 3999 - protein, 10 aa, Artificial Sequence
  Description of Artificial Sequence: Synthetic epitope
DRVSRKEAKP

SEQ ID NO: 4000 - protein, 10 aa, Artificial Sequence
  Description of Artificial Sequence: Synthetic epitope
DRVSSASSTA

SEQ ID NO: 4001 - protein, 10 aa, Artificial Sequence
  Description of Artificial Sequence: Synthetic epitope
DRVTNDTESD

SEQ ID NO: 4002 - protein, 10 aa, Artificial Sequence
  Description of Artificial Sequence: Synthetic epitope
DRVYGESKLG

SEQ ID NO: 4003 - protein, 10 aa, Artificial Sequence
  Description of Artificial Sequence: Synthetic epitope
DRWADVRFPE

SEQ ID NO: 4004 - protein, 10 aa, Artificial Sequence
  Description of Artificial Sequence: Synthetic epitope
DRWTEHHGRY

SEQ ID NO: 4005 - protein, 10 aa, Artificial Sequence
  Description of Artificial Sequence: Synthetic epitope
DRYMDAWNTV

SEQ ID NO: 4006 - protein, 10 aa, Artificial Sequence
  Description of Artificial Sequence: Synthetic epitope
DRYSTVQAAR

SEQ ID NO: 4007 - protein, 10 aa, Artificial Sequence
  Description of Artificial Sequence: Synthetic epitope
DSADTTVGNS

SEQ ID NO: 4008 - protein, 10 aa, Artificial Sequence
  Description of Artificial Sequence: Synthetic epitope
DSADVKPNRR

SEQ ID NO: 4009 - protein, 10 aa, Artificial Sequence
  Description of Artificial Sequence: Synthetic epitope
DSAETASTRF

SEQ ID NO: 4010 - protein, 10 aa, Artificial Sequence
  Description of Artificial Sequence: Synthetic epitope
DSAHSDVASG

SEQ ID NO: 4011 - protein, 10 aa, Artificial Sequence
  Description of Artificial Sequence: Synthetic epitope
DSAKLSSDQN

SEQ ID NO: 4012 - protein, 10 aa, Artificial Sequence
  Description of Artificial Sequence: Synthetic epitope
DSAKRAVQDD

SEQ ID NO: 4013 - protein, 10 aa, Artificial Sequence
  Description of Artificial Sequence: Synthetic epitope
DSALQQLRTA

SEQ ID NO: 4014 - protein, 10 aa, Artificial Sequence
  Description of Artificial Sequence: Synthetic epitope
DSALWKSSAP

SEQ ID NO: 4015 - protein, 10 aa, Artificial Sequence
  Description of Artificial Sequence: Synthetic epitope
DSAMEMLSAK

SEQ ID NO: 4016 - protein, 10 aa, Artificial Sequence
  Description of Artificial Sequence: Synthetic epitope
DSAMKVTSQG

SEQ ID NO: 4017 - protein, 10 aa, Artificial Sequence
  Description of Artificial Sequence: Synthetic epitope
DSAPAAVKSE

SEQ ID NO: 4018 - protein, 10 aa, Artificial Sequence
  Description of Artificial Sequence: Synthetic epitope
DSARLSAAKS

SEQ ID NO: 4019 - protein, 10 aa, Artificial Sequence
  Description of Artificial Sequence: Synthetic epitope
DSARQSTLDK

SEQ ID NO: 4020 - protein, 10 aa, Artificial Sequence
  Description of Artificial Sequence: Synthetic epitope
DSARSARHAL

SEQ ID NO: 4021 - protein, 10 aa, Artificial Sequence
  Description of Artificial Sequence: Synthetic epitope
DSARSILNKF

SEQ ID NO: 4022 - protein, 10 aa, Artificial Sequence
  Description of Artificial Sequence: Synthetic epitope
DSASLSKIQD

SEQ ID NO: 4023 - protein, 10 aa, Artificial Sequence
  Description of Artificial Sequence: Synthetic epitope
DSASQAAHPQ

SEQ ID NO: 4024 - protein, 10 aa, Artificial Sequence
  Description of Artificial Sequence: Synthetic epitope
DSATFASPQD

SEQ ID NO: 4025 - protein, 10 aa, Artificial Sequence
  Description of Artificial Sequence: Synthetic epitope
DSATSADTTL

SEQ ID NO: 4026 - protein, 10 aa, Artificial Sequence
  Description of Artificial Sequence: Synthetic epitope
DSATSEAAGQ

SEQ ID NO: 4027 - protein, 10 aa, Artificial Sequence
  Description of Artificial Sequence: Synthetic epitope
DSAVAINDLS

SEQ ID NO: 4028 - protein, 10 aa, Artificial Sequence
  Description of Artificial Sequence: Synthetic epitope
DSAVNNTQNE

SEQ ID NO: 4029 - protein, 10 aa, Artificial Sequence
  Description of Artificial Sequence: Synthetic epitope
DSDHMRHEAS

SEQ ID NO: 4030 - protein, 10 aa, Artificial Sequence
  Description of Artificial Sequence: Synthetic epitope
DSDKTQASES

SEQ ID NO: 4031 - protein, 10 aa, Artificial Sequence
  Description of Artificial Sequence: Synthetic epitope
DSDLESEQEE

SEQ ID NO: 4032 - protein, 10 aa, Artificial Sequence
  Description of Artificial Sequence: Synthetic epitope
DSDLKKSDID

SEQ ID NO: 4033 - protein, 10 aa, Artificial Sequence
  Description of Artificial Sequence: Synthetic epitope
DSDNVESGLN

SEQ ID NO: 4034 - protein, 10 aa, Artificial Sequence
  Description of Artificial Sequence: Synthetic epitope
DSDSAASISL

SEQ ID NO: 4035 - protein, 10 aa, Artificial Sequence
  Description of Artificial Sequence: Synthetic epitope
DSDSSAEYGG

SEQ ID NO: 4036 - protein, 10 aa, Artificial Sequence
  Description of Artificial Sequence: Synthetic epitope
DSDSSTDDSE

SEQ ID NO: 4037 - protein, 10 aa, Artificial Sequence
  Description of Artificial Sequence: Synthetic epitope
DSDSSVLTRS

SEQ ID NO: 4038 - protein, 10 aa, Artificial Sequence
  Description of Artificial Sequence: Synthetic epitope
DSDTKKSYVN

SEQ ID NO: 4039 - protein, 10 aa, Artificial Sequence
  Description of Artificial Sequence: Synthetic epitope
DSDTTMLESE

SEQ ID NO: 4040 - protein, 10 aa, Artificial Sequence
  Description of Artificial Sequence: Synthetic epitope
DSDVASASSP

SEQ ID NO: 4041 - protein, 10 aa, Artificial Sequence
  Description of Artificial Sequence: Synthetic epitope
DSDVKSQERP

SEQ ID NO: 4042 - protein, 10 aa, Artificial Sequence
  Description of Artificial Sequence: Synthetic epitope
DSDVSGSKRR

SEQ ID NO: 4043 - protein, 10 aa, Artificial Sequence
  Description of Artificial Sequence: Synthetic epitope
DSDVTLKNKE

SEQ ID NO: 4044 - protein, 10 aa, Artificial Sequence
  Description of Artificial Sequence: Synthetic epitope
DSEAKSRIEV

SEQ ID NO: 4045 - protein, 10 aa, Artificial Sequence
  Description of Artificial Sequence: Synthetic epitope
DSEASQEETT

SEQ ID NO: 4046 - protein, 10 aa, Artificial Sequence
  Description of Artificial Sequence: Synthetic epitope
DSEDTDSNTS

SEQ ID NO: 4047 - protein, 10 aa, Artificial Sequence
  Description of Artificial Sequence: Synthetic epitope
DSEELSAKKR

SEQ ID NO: 4048 - protein, 10 aa, Artificial Sequence
  Description of Artificial Sequence: Synthetic epitope
DSEGRTETTV

SEQ ID NO: 4049 - protein, 10 aa, Artificial Sequence
  Description of Artificial Sequence: Synthetic epitope
DSEIKIMKSE

SEQ ID NO: 4050 - protein, 10 aa, Artificial Sequence
  Description of Artificial Sequence: Synthetic epitope
DSEKRSTTDE

SEQ ID NO: 4051 - protein, 10 aa, Artificial Sequence
  Description of Artificial Sequence: Synthetic epitope
DSELQQSSHN

SEQ ID NO: 4052 - protein, 10 aa, Artificial Sequence
  Description of Artificial Sequence: Synthetic epitope
DSEMSKLAVS

SEQ ID NO: 4053 - protein, 10 aa, Artificial Sequence
  Description of Artificial Sequence: Synthetic epitope
DSEPSAVALE

SEQ ID NO: 4054 - protein, 10 aa, Artificial Sequence
  Description of Artificial Sequence: Synthetic epitope
DSEQEDESED

SEQ ID NO: 4055 - protein, 10 aa, Artificial Sequence
  Description of Artificial Sequence: Synthetic epitope
DSEQTQSPQQ

SEQ ID NO: 4056 - protein, 10 aa, Artificial Sequence
  Description of Artificial Sequence: Synthetic epitope
DSESKEFNAE

SEQ ID NO: 4057 - protein, 10 aa, Artificial Sequence
  Description of Artificial Sequence: Synthetic epitope
DSESQIQQYQ

SEQ ID NO: 4058 - protein, 10 aa, Artificial Sequence
  Description of Artificial Sequence: Synthetic epitope
DSESTRHDSE

SEQ ID NO: 4059 - protein, 10 aa, Artificial Sequence
  Description of Artificial Sequence: Synthetic epitope
DSETSKEEQE

SEQ ID NO: 4060 - protein, 10 aa, Artificial Sequence
  Description of Artificial Sequence: Synthetic epitope
DSETSSLNQQ

SEQ ID NO: 4061 - protein, 10 aa, Artificial Sequence
  Description of Artificial Sequence: Synthetic epitope
DSETYDATLE

SEQ ID NO: 4062 - protein, 10 aa, Artificial Sequence
  Description of Artificial Sequence: Synthetic epitope
DSEVAGYIRQ

SEQ ID NO: 4063 - protein, 10 aa, Artificial Sequence
  Description of Artificial Sequence: Synthetic epitope
DSEVVGAVDI

SEQ ID NO: 4064 - protein, 10 aa, Artificial Sequence
  Description of Artificial Sequence: Synthetic epitope
DSFAASSTVP

SEQ ID NO: 4065 - protein, 10 aa, Artificial Sequence
  Description of Artificial Sequence: Synthetic epitope
DSFAKLKAAI

SEQ ID NO: 4066 - protein, 10 aa, Artificial Sequence
  Description of Artificial Sequence: Synthetic epitope
DSFAKLKAAI

SEQ ID NO: 4067 - protein, 10 aa, Artificial Sequence
  Description of Artificial Sequence: Synthetic epitope
DSFDMKDLNA

SEQ ID NO: 4068 - protein, 10 aa, Artificial Sequence
  Description of Artificial Sequence: Synthetic epitope
DSFGLTNDFV

SEQ ID NO: 4069 - protein, 10 aa, Artificial Sequence
  Description of Artificial Sequence: Synthetic epitope
DSFIENLFAL

SEQ ID NO: 4070 - protein, 10 aa, Artificial Sequence
  Description of Artificial Sequence: Synthetic epitope
DSFTQVFANQ

SEQ ID NO: 4071 - protein, 10 aa, Artificial Sequence
  Description of Artificial Sequence: Synthetic epitope
DSGAGISEKV

SEQ ID NO: 4072 - protein, 10 aa, Artificial Sequence
  Description of Artificial Sequence: Synthetic epitope
DSGAQLSSRT

SEQ ID NO: 4073 - protein, 10 aa, Artificial Sequence
  Description of Artificial Sequence: Synthetic epitope
DSGASAITRE

SEQ ID NO: 4074 - protein, 10 aa, Artificial Sequence
  Description of Artificial Sequence: Synthetic epitope
DSGRKTRSAR

SEQ ID NO: 4075 - protein, 10 aa, Artificial Sequence
  Description of Artificial Sequence: Synthetic epitope
DSGRQIEYEY

SEQ ID NO: 4076 - protein, 10 aa, Artificial Sequence
  Description of Artificial Sequence: Synthetic epitope
DSGTAIFLKP

SEQ ID NO: 4077 - protein, 10 aa, Artificial Sequence
  Description of Artificial Sequence: Synthetic epitope
DSGTKHMAAG

SEQ ID NO: 4078 - protein, 10 aa, Artificial Sequence
  Description of Artificial Sequence: Synthetic epitope
DSGTVSQSHS

SEQ ID NO: 4079 - protein, 10 aa, Artificial Sequence
  Description of Artificial Sequence: Synthetic epitope
DSGVIDVQST

SEQ ID NO: 4080 - protein, 10 aa, Artificial Sequence
  Description of Artificial Sequence: Synthetic epitope
DSHAEALRVV

SEQ ID NO: 4081 - protein, 10 aa, Artificial Sequence
  Description of Artificial Sequence: Synthetic epitope
DSHEKTISED

SEQ ID NO: 4082 - protein, 10 aa, Artificial Sequence
  Description of Artificial Sequence: Synthetic epitope
DSHKSHGSTS

SEQ ID NO: 4083 - protein, 10 aa, Artificial Sequence
  Description of Artificial Sequence: Synthetic epitope
DSHSAVSGNA

SEQ ID NO: 4084 - protein, 10 aa, Artificial Sequence
  Description of Artificial Sequence: Synthetic epitope
DSHSRREHKA

SEQ ID NO: 4085 - protein, 10 aa, Artificial Sequence
  Description of Artificial Sequence: Synthetic epitope
DSHVQYRLGN

SEQ ID NO: 4086 - protein, 10 aa, Artificial Sequence
  Description of Artificial Sequence: Synthetic epitope
DSIAVEVYSV

SEQ ID NO: 4087 - protein, 10 aa, Artificial Sequence
  Description of Artificial Sequence: Synthetic epitope
DSIIQQATKN

SEQ ID NO: 4088 - protein, 10 aa, Artificial Sequence
  Description of Artificial Sequence: Synthetic epitope
DSIISNANVK

SEQ ID NO: 4089 - protein, 10 aa, Artificial Sequence
  Description of Artificial Sequence: Synthetic epitope
DSIKPEETEQ

SEQ ID NO: 4090 - protein, 10 aa, Artificial Sequence
  Description of Artificial Sequence: Synthetic epitope
DSILSMGAEA

SEQ ID NO: 4091 - protein, 10 aa, Artificial Sequence
  Description of Artificial Sequence: Synthetic epitope
DSIMSSASEN

SEQ ID NO: 4092 - protein, 10 aa, Artificial Sequence
  Description of Artificial Sequence: Synthetic epitope
DSINVIDVNK

SEQ ID NO: 4093 - protein, 10 aa, Artificial Sequence
  Description of Artificial Sequence: Synthetic epitope
DSIVKLLKLV

SEQ ID NO: 4094 - protein, 10 aa, Artificial Sequence
  Description of Artificial Sequence: Synthetic epitope
DSKASLGNKL

SEQ ID NO: 4095 - protein, 10 aa, Artificial Sequence
  Description of Artificial Sequence: Synthetic epitope
DSKDSASELL

SEQ ID NO: 4096 - protein, 10 aa, Artificial Sequence
  Description of Artificial Sequence: Synthetic epitope
DSKEAGGQSS

SEQ ID NO: 4097 - protein, 10 aa, Artificial Sequence
  Description of Artificial Sequence: Synthetic epitope
DSKKHSLKKM

SEQ ID NO: 4098 - protein, 10 aa, Artificial Sequence
  Description of Artificial Sequence: Synthetic epitope
DSKKSSTLQQ

SEQ ID NO: 4099 - protein, 10 aa, Artificial Sequence
  Description of Artificial Sequence: Synthetic epitope
DSKKTVESKE

SEQ ID NO: 4100 - protein, 10 aa, Artificial Sequence
  Description of Artificial Sequence: Synthetic epitope
DSKLAVSLAE

SEQ ID NO: 4101 - protein, 10 aa, Artificial Sequence
  Description of Artificial Sequence: Synthetic epitope
DSKSQAQSTD

SEQ ID NO: 4102 - protein, 10 aa, Artificial Sequence
  Description of Artificial Sequence: Synthetic epitope
DSKSSKLTKD

SEQ ID NO: 4103 - protein, 10 aa, Artificial Sequence
  Description of Artificial Sequence: Synthetic epitope
DSKTIPRTKK

SEQ ID NO: 4104 - protein, 10 aa, Artificial Sequence
  Description of Artificial Sequence: Synthetic epitope
DSKTVQRTQD

SEQ ID NO: 4105 - protein, 10 aa, Artificial Sequence
  Description of Artificial Sequence: Synthetic epitope
DSKVANLTFV

SEQ ID NO: 4106 - protein, 10 aa, Artificial Sequence
  Description of Artificial Sequence: Synthetic epitope
DSKVEVLTYK

SEQ ID NO: 4107 - protein, 10 aa, Artificial Sequence
  Description of Artificial Sequence: Synthetic epitope
DSKVGTQFIR

SEQ ID NO: 4108 - protein, 10 aa, Artificial Sequence
  Description of Artificial Sequence: Synthetic epitope
DSKVKLKYQH

SEQ ID NO: 4109 - protein, 10 aa, Artificial Sequence
  Description of Artificial Sequence: Synthetic epitope
DSKYGEYEWV

SEQ ID NO: 4110 - protein, 10 aa, Artificial Sequence
  Description of Artificial Sequence: Synthetic epitope
DSLDLPSLSK

SEQ ID NO: 4111 - protein, 10 aa, Artificial Sequence
  Description of Artificial Sequence: Synthetic epitope
DSLDLRVKGI

SEQ ID NO: 4112 - protein, 10 aa, Artificial Sequence
  Description of Artificial Sequence: Synthetic epitope
DSLESGKQQD

SEQ ID NO: 4113 - protein, 10 aa, Artificial Sequence
  Description of Artificial Sequence: Synthetic epitope
DSLFNLDSKS

SEQ ID NO: 4114 - protein, 10 aa, Artificial Sequence
  Description of Artificial Sequence: Synthetic epitope
DSLIAATRAQ

SEQ ID NO: 4115 - protein, 10 aa, Artificial Sequence
  Description of Artificial Sequence: Synthetic epitope
DSLIVQVTFD

SEQ ID NO: 4116 - protein, 10 aa, Artificial Sequence
  Description of Artificial Sequence: Synthetic epitope
DSLKATVNRT

SEQ ID NO: 4117 - protein, 10 aa, Artificial Sequence
  Description of Artificial Sequence: Synthetic epitope
DSLKRNTEVK

SEQ ID NO: 4118 - protein, 10 aa, Artificial Sequence
  Description of Artificial Sequence: Synthetic epitope
DSLLEQANNA

SEQ ID NO: 4119 - protein, 10 aa, Artificial Sequence
  Description of Artificial Sequence: Synthetic epitope
DSLLRILKTL

SEQ ID NO: 4120 - protein, 10 aa, Artificial Sequence
  Description of Artificial Sequence: Synthetic epitope
DSLLSNKKAI

SEQ ID NO: 4121 - protein, 10 aa, Artificial Sequence
  Description of Artificial Sequence: Synthetic epitope
DSLNLQNSSQ

SEQ ID NO: 4122 - protein, 10 aa, Artificial Sequence
  Description of Artificial Sequence: Synthetic epitope
DSLNSETFND

SEQ ID NO: 4123 - protein, 10 aa, Artificial Sequence
  Description of Artificial Sequence: Synthetic epitope
DSLNSSKSPH

SEQ ID NO: 4124 - protein, 10 aa, Artificial Sequence
  Description of Artificial Sequence: Synthetic epitope
DSLQASMEKD

SEQ ID NO: 4125 - protein, 10 aa, Artificial Sequence
  Description of Artificial Sequence: Synthetic epitope
DSLQKIVEKQ

SEQ ID NO: 4126 - protein, 10 aa, Artificial Sequence
  Description of Artificial Sequence: Synthetic epitope
DSLQKMSFSR

SEQ ID NO: 4127 - protein, 10 aa, Artificial Sequence
  Description of Artificial Sequence: Synthetic epitope
DSLQTEAESL

SEQ ID NO: 4128 - protein, 10 aa, Artificial Sequence
  Description of Artificial Sequence: Synthetic epitope
DSLQVSKATH

SEQ ID NO: 4129 - protein, 10 aa, Artificial Sequence
  Description of Artificial Sequence: Synthetic epitope
DSLSEKQLKN

SEQ ID NO: 4130 - protein, 10 aa, Artificial Sequence
  Description of Artificial Sequence: Synthetic epitope
DSLSLSTLSR

SEQ ID NO: 4131 - protein, 10 aa, Artificial Sequence
  Description of Artificial Sequence: Synthetic epitope
DSLSMTSEAG

SEQ ID NO: 4132 - protein, 10 aa, Artificial Sequence
  Description of Artificial Sequence: Synthetic epitope
DSLSVEEAVE

SEQ ID NO: 4133 - protein, 10 aa, Artificial Sequence
  Description of Artificial Sequence: Synthetic epitope
DSLSVGVSSE

SEQ ID NO: 4134 - protein, 10 aa, Artificial Sequence
  Description of Artificial Sequence: Synthetic epitope
DSLTDRETSV

SEQ ID NO: 4135 - protein, 10 aa, Artificial Sequence
  Description of Artificial Sequence: Synthetic epitope
DSLTETDTLE

SEQ ID NO: 4136 - protein, 10 aa, Artificial Sequence
  Description of Artificial Sequence: Synthetic epitope
DSLTPANEDQ

SEQ ID NO: 4137 - protein, 10 aa, Artificial Sequence
  Description of Artificial Sequence: Synthetic epitope
DSLVIESLRN

SEQ ID NO: 4138 - protein, 10 aa, Artificial Sequence
  Description of Artificial Sequence: Synthetic epitope
DSLWALEEVK

SEQ ID NO: 4139 - protein, 10 aa, Artificial Sequence
  Description of Artificial Sequence: Synthetic epitope
DSMDQSAFAG

SEQ ID NO: 4140 - protein, 10 aa, Artificial Sequence
  Description of Artificial Sequence: Synthetic epitope
DSMDSETSSM

SEQ ID NO: 4141 - protein, 10 aa, Artificial Sequence
  Description of Artificial Sequence: Synthetic epitope
DSMENSERIK

SEQ ID NO: 4142 - protein, 10 aa, Artificial Sequence
  Description of Artificial Sequence: Synthetic epitope
DSMGDERTAV

SEQ ID NO: 4143 - protein, 10 aa, Artificial Sequence
  Description of Artificial Sequence: Synthetic epitope
DSMGDERTAV

SEQ ID NO: 4144 - protein, 10 aa, Artificial Sequence
  Description of Artificial Sequence: Synthetic epitope
DSMKLESSHS

SEQ ID NO: 4145 - protein, 10 aa, Artificial Sequence
  Description of Artificial Sequence: Synthetic epitope
DSMLQKYKVK

SEQ ID NO: 4146 - protein, 10 aa, Artificial Sequence
  Description of Artificial Sequence: Synthetic epitope
DSMMSSTSTR

SEQ ID NO: 4147 - protein, 10 aa, Artificial Sequence
  Description of Artificial Sequence: Synthetic epitope
DSMQEKQRMA

SEQ ID NO: 4148 - protein, 10 aa, Artificial Sequence
  Description of Artificial Sequence: Synthetic epitope
DSNKDKSSNI

SEQ ID NO: 4149 - protein, 10 aa, Artificial Sequence
  Description of Artificial Sequence: Synthetic epitope
DSNKNSISEK

SEQ ID NO: 4150 - protein, 10 aa, Artificial Sequence
  Description of Artificial Sequence: Synthetic epitope
DSNKTLEKME

SEQ ID NO: 4151 - protein, 10 aa, Artificial Sequence
  Description of Artificial Sequence: Synthetic epitope
DSNKTRIDEA

SEQ ID NO: 4152 - protein, 10 aa, Artificial Sequence
  Description of Artificial Sequence: Synthetic epitope
DSNLSVDSST

SEQ ID NO: 4153 - protein, 10 aa, Artificial Sequence
  Description of Artificial Sequence: Synthetic epitope
DSNPSASQPT

SEQ ID NO: 4154 - protein, 10 aa, Artificial Sequence
  Description of Artificial Sequence: Synthetic epitope
DSNQREEQEK

SEQ ID NO: 4155 - protein, 10 aa, Artificial Sequence
  Description of Artificial Sequence: Synthetic epitope
DSNTKYVGNN

SEQ ID NO: 4156 - protein, 10 aa, Artificial Sequence
  Description of Artificial Sequence: Synthetic epitope
DSNVKLVSID

SEQ ID NO: 4157 - protein, 10 aa, Artificial Sequence
  Description of Artificial Sequence: Synthetic epitope
DSNVSSGKIS

SEQ ID NO: 4158 - protein, 10 aa, Artificial Sequence
  Description of Artificial Sequence: Synthetic epitope
DSPDLISKSH

SEQ ID NO: 4159 - protein, 10 aa, Artificial Sequence
  Description of Artificial Sequence: Synthetic epitope
DSPETASKIY

SEQ ID NO: 4160 - protein, 10 aa, Artificial Sequence
  Description of Artificial Sequence: Synthetic epitope
DSPKRVLVSV

SEQ ID NO: 4161 - protein, 10 aa, Artificial Sequence
  Description of Artificial Sequence: Synthetic epitope
DSPLAQLADS

SEQ ID NO: 4162 - protein, 10 aa, Artificial Sequence
  Description of Artificial Sequence: Synthetic epitope
DSPLEQSGHE

SEQ ID NO: 4163 - protein, 10 aa, Artificial Sequence
  Description of Artificial Sequence: Synthetic epitope
DSPLFSSEKK

SEQ ID NO: 4164 - protein, 10 aa, Artificial Sequence
  Description of Artificial Sequence: Synthetic epitope
DSPSAELDKK

SEQ ID NO: 4165 - protein, 10 aa, Artificial Sequence
  Description of Artificial Sequence: Synthetic epitope
DSQADGSVAA

SEQ ID NO: 4166 - protein, 10 aa, Artificial Sequence
  Description of Artificial Sequence: Synthetic epitope
DSQAEAKLSS

SEQ ID NO: 4167 - protein, 10 aa, Artificial Sequence
  Description of Artificial Sequence: Synthetic epitope
DSQDHSAFEM

SEQ ID NO: 4168 - protein, 10 aa, Artificial Sequence
  Description of Artificial Sequence: Synthetic epitope
DSQERDNVNS

SEQ ID NO: 4169 - protein, 10 aa, Artificial Sequence
  Description of Artificial Sequence: Synthetic epitope
DSQESQVFSG

SEQ ID NO: 4170 - protein, 10 aa, Artificial Sequence
  Description of Artificial Sequence: Synthetic epitope
DSQHVSSVTQ

SEQ ID NO: 4171 - protein, 10 aa, Artificial Sequence
  Description of Artificial Sequence: Synthetic epitope
DSQISNTEFL

SEQ ID NO: 4172 - protein, 10 aa, Artificial Sequence
  Description of Artificial Sequence: Synthetic epitope
DSQRLVEQEV

SEQ ID NO: 4173 - protein, 10 aa, Artificial Sequence
  Description of Artificial Sequence: Synthetic epitope
DSQSDLARDF

SEQ ID NO: 4174 - protein, 10 aa, Artificial Sequence
  Description of Artificial Sequence: Synthetic epitope
DSQVIMADSE

SEQ ID NO: 4175 - protein, 10 aa, Artificial Sequence
  Description of Artificial Sequence: Synthetic epitope
DSQVNTLFMK

SEQ ID NO: 4176 - protein, 10 aa, Artificial Sequence
  Description of Artificial Sequence: Synthetic epitope
DSREKMNRGE

SEQ ID NO: 4177 - protein, 10 aa, Artificial Sequence
  Description of Artificial Sequence: Synthetic epitope
DSRMAADASL

SEQ ID NO: 4178 - protein, 10 aa, Artificial Sequence
  Description of Artificial Sequence: Synthetic epitope
DSRSEAEAAK

SEQ ID NO: 4179 - protein, 10 aa, Artificial Sequence
  Description of Artificial Sequence: Synthetic epitope
DSRSVEISQL

SEQ ID NO: 4180 - protein, 10 aa, Artificial Sequence
  Description of Artificial Sequence: Synthetic epitope
DSRTVRLLKE

SEQ ID NO: 4181 - protein, 10 aa, Artificial Sequence
  Description of Artificial Sequence: Synthetic epitope
DSRVLHAVKY

SEQ ID NO: 4182 - protein, 10 aa, Artificial Sequence
  Description of Artificial Sequence: Synthetic epitope
DSRVQKKLGP

SEQ ID NO: 4183 - protein, 10 aa, Artificial Sequence
  Description of Artificial Sequence: Synthetic epitope
DSSAMESLTK

SEQ ID NO: 4184 - protein, 10 aa, Artificial Sequence
  Description of Artificial Sequence: Synthetic epitope
DSSAMEVEPK

SEQ ID NO: 4185 - protein, 10 aa, Artificial Sequence
  Description of Artificial Sequence: Synthetic epitope
DSSAQLSSGE

SEQ ID NO: 4186 - protein, 10 aa, Artificial Sequence
  Description of Artificial Sequence: Synthetic epitope
DSSARSSLHT

SEQ ID NO: 4187 - protein, 10 aa, Artificial Sequence
  Description of Artificial Sequence: Synthetic epitope
DSSATAYGST

SEQ ID NO: 4188 - protein, 10 aa, Artificial Sequence
  Description of Artificial Sequence: Synthetic epitope
DSSATLITNE

SEQ ID NO: 4189 - protein, 10 aa, Artificial Sequence
  Description of Artificial Sequence: Synthetic epitope
DSSDGITGKK

SEQ ID NO: 4190 - protein, 10 aa, Artificial Sequence
  Description of Artificial Sequence: Synthetic epitope
DSSDIVQNED

SEQ ID NO: 4191 - protein, 10 aa, Artificial Sequence
  Description of Artificial Sequence: Synthetic epitope
DSSDLNENQH

SEQ ID NO: 4192 - protein, 10 aa, Artificial Sequence
  Description of Artificial Sequence: Synthetic epitope
DSSEATGWEE

SEQ ID NO: 4193 - protein, 10 aa, Artificial Sequence
  Description of Artificial Sequence: Synthetic epitope
DSSEVANIEE

SEQ ID NO: 4194 - protein, 10 aa, Artificial Sequence
  Description of Artificial Sequence: Synthetic epitope
DSSFIMDSDP

SEQ ID NO: 4195 - protein, 10 aa, Artificial Sequence
  Description of Artificial Sequence: Synthetic epitope
DSSGAEANSE

SEQ ID NO: 4196 - protein, 10 aa, Artificial Sequence
  Description of Artificial Sequence: Synthetic epitope
DSSGETEKKD

SEQ ID NO: 4197 - protein, 10 aa, Artificial Sequence
  Description of Artificial Sequence: Synthetic epitope
DSSGQFVSSQ

SEQ ID NO: 4198 - protein, 10 aa, Artificial Sequence
  Description of Artificial Sequence: Synthetic epitope
DSSITSVTKS

SEQ ID NO: 4199 - protein, 10 aa, Artificial Sequence
  Description of Artificial Sequence: Synthetic epitope
DSSIYSNRPK

SEQ ID NO: 4200 - protein, 10 aa, Artificial Sequence
  Description of Artificial Sequence: Synthetic epitope
DSSKELSVSE

SEQ ID NO: 4201 - protein, 10 aa, Artificial Sequence
  Description of Artificial Sequence: Synthetic epitope
DSSKTDKKLQ

SEQ ID NO: 4202 - protein, 10 aa, Artificial Sequence
  Description of Artificial Sequence: Synthetic epitope
DSSKTDTLNS

SEQ ID NO: 4203 - protein, 10 aa, Artificial Sequence
  Description of Artificial Sequence: Synthetic epitope
DSSLVNEQSQ

SEQ ID NO: 4204 - protein, 10 aa, Artificial Sequence
  Description of Artificial Sequence: Synthetic epitope
DSSNTALRDN

SEQ ID NO: 4205 - protein, 10 aa, Artificial Sequence
  Description of Artificial Sequence: Synthetic epitope
DSSPAKKTRR

SEQ ID NO: 4206 - protein, 10 aa, Artificial Sequence
  Description of Artificial Sequence: Synthetic epitope
DSSQAVTPKS

SEQ ID NO: 4207 - protein, 10 aa, Artificial Sequence
  Description of Artificial Sequence: Synthetic epitope
DSSQPSSLLE

SEQ ID NO: 4208 - protein, 10 aa, Artificial Sequence
  Description of Artificial Sequence: Synthetic epitope
DSSQVESDVN

SEQ ID NO: 4209 - protein, 10 aa, Artificial Sequence
  Description of Artificial Sequence: Synthetic epitope
DSSQYRSPSD

SEQ ID NO: 4210 - protein, 10 aa, Artificial Sequence
  Description of Artificial Sequence: Synthetic epitope
DSSRSVSEKN

SEQ ID NO: 4211 - protein, 10 aa, Artificial Sequence
  Description of Artificial Sequence: Synthetic epitope
DSSTASFDPP

SEQ ID NO: 4212 - protein, 10 aa, Artificial Sequence
  Description of Artificial Sequence: Synthetic epitope
DSSTATTSSK

SEQ ID NO: 4213 - protein, 10 aa, Artificial Sequence
  Description of Artificial Sequence: Synthetic epitope
DSSTLAKKSL

SEQ ID NO: 4214 - protein, 10 aa, Artificial Sequence
  Description of Artificial Sequence: Synthetic epitope
DSSTLLSAHM

SEQ ID NO: 4215 - protein, 10 aa, Artificial Sequence
  Description of Artificial Sequence: Synthetic epitope
DSSTRRMESE

SEQ ID NO: 4216 - protein, 10 aa, Artificial Sequence
  Description of Artificial Sequence: Synthetic epitope
DSSTSQETDS

SEQ ID NO: 4217 - protein, 10 aa, Artificial Sequence
  Description of Artificial Sequence: Synthetic epitope
DSSVSSNNVL

SEQ ID NO: 4218 - protein, 10 aa, Artificial Sequence
  Description of Artificial Sequence: Synthetic epitope
DSSWRHSQVP

SEQ ID NO: 4219 - protein, 10 aa, Artificial Sequence
  Description of Artificial Sequence: Synthetic epitope
DSTDSVISSE

SEQ ID NO: 4220 - protein, 10 aa, Artificial Sequence
  Description of Artificial Sequence: Synthetic epitope
DSTDTSPVAI

SEQ ID NO: 4221 - protein, 10 aa, Artificial Sequence
  Description of Artificial Sequence: Synthetic epitope
DSTEEIKSEI

SEQ ID NO: 4222 - protein, 10 aa, Artificial Sequence
  Description of Artificial Sequence: Synthetic epitope
DSTETQEDQI

SEQ ID NO: 4223 - protein, 10 aa, Artificial Sequence
  Description of Artificial Sequence: Synthetic epitope
DSTIRTENEQ

SEQ ID NO: 4224 - protein, 10 aa, Artificial Sequence
  Description of Artificial Sequence: Synthetic epitope
DSTKSGLDHK

SEQ ID NO: 4225 - protein, 10 aa, Artificial Sequence
  Description of Artificial Sequence: Synthetic epitope
DSTKTLTKQQ

SEQ ID NO: 4226 - protein, 10 aa, Artificial Sequence
  Description of Artificial Sequence: Synthetic epitope
DSTMVDVRVM

SEQ ID NO: 4227 - protein, 10 aa, Artificial Sequence
  Description of Artificial Sequence: Synthetic epitope
DSTNRTKKHT

SEQ ID NO: 4228 - protein, 10 aa, Artificial Sequence
  Description of Artificial Sequence: Synthetic epitope
DSTQKSGLDS

SEQ ID NO: 4229 - protein, 10 aa, Artificial Sequence
  Description of Artificial Sequence: Synthetic epitope
DSTQLNSDLK

SEQ ID NO: 4230 - protein, 10 aa, Artificial Sequence
  Description of Artificial Sequence: Synthetic epitope
DSTQNTENKP

SEQ ID NO: 4231 - protein, 10 aa, Artificial Sequence
  Description of Artificial Sequence: Synthetic epitope
DSTQTASFQL

SEQ ID NO: 4232 - protein, 10 aa, Artificial Sequence
  Description of Artificial Sequence: Synthetic epitope
DSTRIRITDN

SEQ ID NO: 4233 - protein, 10 aa, Artificial Sequence
  Description of Artificial Sequence: Synthetic epitope
DSTRVLSYQQ

SEQ ID NO: 4234 - protein, 10 aa, Artificial Sequence
  Description of Artificial Sequence: Synthetic epitope
DSTSASFLQS

SEQ ID NO: 4235 - protein, 10 aa, Artificial Sequence
  Description of Artificial Sequence: Synthetic epitope
DSTSHSDHQD

SEQ ID NO: 4236 - protein, 10 aa, Artificial Sequence
  Description of Artificial Sequence: Synthetic epitope
DSTTMSVSMP

SEQ ID NO: 4237 - protein, 10 aa, Artificial Sequence
  Description of Artificial Sequence: Synthetic epitope
DSVALAVQNQ

SEQ ID NO: 4238 - protein, 10 aa, Artificial Sequence
  Description of Artificial Sequence: Synthetic epitope
DSVAMKLLHQ

SEQ ID NO: 4239 - protein, 10 aa, Artificial Sequence
  Description of Artificial Sequence: Synthetic epitope
DSVARKSEEH

SEQ ID NO: 4240 - protein, 10 aa, Artificial Sequence
  Description of Artificial Sequence: Synthetic epitope
DSVEDSESEE

SEQ ID NO: 4241 - protein, 10 aa, Artificial Sequence
  Description of Artificial Sequence: Synthetic epitope
DSVFLRIKQQ

SEQ ID NO: 4242 - protein, 10 aa, Artificial Sequence
  Description of Artificial Sequence: Synthetic epitope
DSVIRKGAPA

SEQ ID NO: 4243 - protein, 10 aa, Artificial Sequence
  Description of Artificial Sequence: Synthetic epitope
DSVKIVGSTS

SEQ ID NO: 4244 - protein, 10 aa, Artificial Sequence
  Description of Artificial Sequence: Synthetic epitope
DSVKTISAKT

SEQ ID NO: 4245 - protein, 10 aa, Artificial Sequence
  Description of Artificial Sequence: Synthetic epitope
DSVKTVLQDE

SEQ ID NO: 4246 - protein, 10 aa, Artificial Sequence
  Description of Artificial Sequence: Synthetic epitope
DSVLASLPWI

SEQ ID NO: 4247 - protein, 10 aa, Artificial Sequence
  Description of Artificial Sequence: Synthetic epitope
DSVLMEMKRE

SEQ ID NO: 4248 - protein, 10 aa, Artificial Sequence
  Description of Artificial Sequence: Synthetic epitope
DSVLVVSEDV

SEQ ID NO: 4249 - protein, 10 aa, Artificial Sequence
  Description of Artificial Sequence: Synthetic epitope
DSVMSANGKP

SEQ ID NO: 4250 - protein, 10 aa, Artificial Sequence
  Description of Artificial Sequence: Synthetic epitope
DSVNLAAEDK

SEQ ID NO: 4251 - protein, 10 aa, Artificial Sequence
  Description of Artificial Sequence: Synthetic epitope
DSVPPTAISH

SEQ ID NO: 4252 - protein, 10 aa, Artificial Sequence
  Description of Artificial Sequence: Synthetic epitope
DSVQASQKRI

SEQ ID NO: 4253 - protein, 10 aa, Artificial Sequence
  Description of Artificial Sequence: Synthetic epitope
DSVRSSNLSL

SEQ ID NO: 4254 - protein, 10 aa, Artificial Sequence
  Description of Artificial Sequence: Synthetic epitope
DSVSSQNVGL

SEQ ID NO: 4255 - protein, 10 aa, Artificial Sequence
  Description of Artificial Sequence: Synthetic epitope
DSVVLVSQSR

SEQ ID NO: 4256 - protein, 10 aa, Artificial Sequence
  Description of Artificial Sequence: Synthetic epitope
DSVVSMFKIE

SEQ ID NO: 4257 - protein, 10 aa, Artificial Sequence
  Description of Artificial Sequence: Synthetic epitope
DSWTSSRRTD

SEQ ID NO: 4258 - protein, 10 aa, Artificial Sequence
  Description of Artificial Sequence: Synthetic epitope
DSYASEIKEL

SEQ ID NO: 4259 - protein, 10 aa, Artificial Sequence
  Description of Artificial Sequence: Synthetic epitope
DSYQTSSPAS

SEQ ID NO: 4260 - protein, 10 aa, Artificial Sequence
  Description of Artificial Sequence: Synthetic epitope
DTAAQTNSRL

SEQ ID NO: 4261 - protein, 10 aa, Artificial Sequence
  Description of Artificial Sequence: Synthetic epitope
DTAELLSLEN

SEQ ID NO: 4262 - protein, 10 aa, Artificial Sequence
  Description of Artificial Sequence: Synthetic epitope
DTAHAHQSIH

SEQ ID NO: 4263 - protein, 10 aa, Artificial Sequence
  Description of Artificial Sequence: Synthetic epitope
DTAKILESER

SEQ ID NO: 4264 - protein, 10 aa, Artificial Sequence
  Description of Artificial Sequence: Synthetic epitope
DTAKKLEKNF

SEQ ID NO: 4265 - protein, 10 aa, Artificial Sequence
  Description of Artificial Sequence: Synthetic epitope
DTAKSLAESL

SEQ ID NO: 4266 - protein, 10 aa, Artificial Sequence
  Description of Artificial Sequence: Synthetic epitope
DTALEARIQK

SEQ ID NO: 4267 - protein, 10 aa, Artificial Sequence
  Description of Artificial Sequence: Synthetic epitope
DTALSMKSKK

SEQ ID NO: 4268 - protein, 10 aa, Artificial Sequence
  Description of Artificial Sequence: Synthetic epitope
DTAMASTLTN

SEQ ID NO: 4269 - protein, 10 aa, Artificial Sequence
  Description of Artificial Sequence: Synthetic epitope
DTAMTTDDTE

SEQ ID NO: 4270 - protein, 10 aa, Artificial Sequence
  Description of Artificial Sequence: Synthetic epitope
DTATILSNQH

SEQ ID NO: 4271 - protein, 10 aa, Artificial Sequence
  Description of Artificial Sequence: Synthetic epitope
DTATKIAATA

SEQ ID NO: 4272 - protein, 10 aa, Artificial Sequence
  Description of Artificial Sequence: Synthetic epitope
DTAVDGSGVE

SEQ ID NO: 4273 - protein, 10 aa, Artificial Sequence
  Description of Artificial Sequence: Synthetic epitope
DTAWSNLTHP

SEQ ID NO: 4274 - protein, 10 aa, Artificial Sequence
  Description of Artificial Sequence: Synthetic epitope
DTDENLEKRQ

SEQ ID NO: 4275 - protein, 10 aa, Artificial Sequence
  Description of Artificial Sequence: Synthetic epitope
DTDETELARQ

SEQ ID NO: 4276 - protein, 10 aa, Artificial Sequence
  Description of Artificial Sequence: Synthetic epitope
DTDKNKSQES

SEQ ID NO: 4277 - protein, 10 aa, Artificial Sequence
  Description of Artificial Sequence: Synthetic epitope
DTDLAGMSSE

SEQ ID NO: 4278 - protein, 10 aa, Artificial Sequence
  Description of Artificial Sequence: Synthetic epitope
DTDSLQSQIE

SEQ ID NO: 4279 - protein, 10 aa, Artificial Sequence
  Description of Artificial Sequence: Synthetic epitope
DTDSTKSSGQ

SEQ ID NO: 4280 - protein, 10 aa, Artificial Sequence
  Description of Artificial Sequence: Synthetic epitope
DTDVDTSKDK

SEQ ID NO: 4281 - protein, 10 aa, Artificial Sequence
  Description of Artificial Sequence: Synthetic epitope
DTEAAVSGEV

SEQ ID NO: 4282 - protein, 10 aa, Artificial Sequence
  Description of Artificial Sequence: Synthetic epitope
DTEALQHGAE

SEQ ID NO: 4283 - protein, 10 aa, Artificial Sequence
  Description of Artificial Sequence: Synthetic epitope
DTEDMRSKTV

SEQ ID NO: 4284 - protein, 10 aa, Artificial Sequence
  Description of Artificial Sequence: Synthetic epitope
DTEDQVEIEK

SEQ ID NO: 4285 - protein, 10 aa, Artificial Sequence
  Description of Artificial Sequence: Synthetic epitope
DTEHKESETA

SEQ ID NO: 4286 - protein, 10 aa, Artificial Sequence
  Description of Artificial Sequence: Synthetic epitope
DTEIMTLVDE

SEQ ID NO: 4287 - protein, 10 aa, Artificial Sequence
  Description of Artificial Sequence: Synthetic epitope
DTEMGEKQEE

SEQ ID NO: 4288 - protein, 10 aa, Artificial Sequence
  Description of Artificial Sequence: Synthetic epitope
DTENHTSVDG

SEQ ID NO: 4289 - protein, 10 aa, Artificial Sequence
  Description of Artificial Sequence: Synthetic epitope
DTENQTLNYG

SEQ ID NO: 4290 - protein, 10 aa, Artificial Sequence
  Description of Artificial Sequence: Synthetic epitope
DTESVSSAST

SEQ ID NO: 4291 - protein, 10 aa, Artificial Sequence
  Description of Artificial Sequence: Synthetic epitope
DTETINMMSE

SEQ ID NO: 4292 - protein, 10 aa, Artificial Sequence
  Description of Artificial Sequence: Synthetic epitope
DTEVSNQITL

SEQ ID NO: 4293 - protein, 10 aa, Artificial Sequence
  Description of Artificial Sequence: Synthetic epitope
DTEVTTAKES

SEQ ID NO: 4294 - protein, 10 aa, Artificial Sequence
  Description of Artificial Sequence: Synthetic epitope
DTFKIKFKKN

SEQ ID NO: 4295 - protein, 10 aa, Artificial Sequence
  Description of Artificial Sequence: Synthetic epitope
DTFLSKEFNP

SEQ ID NO: 4296 - protein, 10 aa, Artificial Sequence
  Description of Artificial Sequence: Synthetic epitope
DTFSVAFIKK

SEQ ID NO: 4297 - protein, 10 aa, Artificial Sequence
  Description of Artificial Sequence: Synthetic epitope
DTFTIDEVSE

SEQ ID NO: 4298 - protein, 10 aa, Artificial Sequence
  Description of Artificial Sequence: Synthetic epitope
DTGHADRQAS

SEQ ID NO: 4299 - protein, 10 aa, Artificial Sequence
  Description of Artificial Sequence: Synthetic epitope
DTGKAETYGH

SEQ ID NO: 4300 - protein, 10 aa, Artificial Sequence
  Description of Artificial Sequence: Synthetic epitope
DTGMNRSQSE

SEQ ID NO: 4301 - protein, 10 aa, Artificial Sequence
  Description of Artificial Sequence: Synthetic epitope
DTGNDKNGKE

SEQ ID NO: 4302 - protein, 10 aa, Artificial Sequence
  Description of Artificial Sequence: Synthetic epitope
DTGQTTLEGE

SEQ ID NO: 4303 - protein, 10 aa, Artificial Sequence
  Description of Artificial Sequence: Synthetic epitope
DTHKIKSSPS

SEQ ID NO: 4304 - protein, 10 aa, Artificial Sequence
  Description of Artificial Sequence: Synthetic epitope
DTHRKNVIDP

SEQ ID NO: 4305 - protein, 10 aa, Artificial Sequence
  Description of Artificial Sequence: Synthetic epitope
DTIDNSSKAE

SEQ ID NO: 4306 - protein, 10 aa, Artificial Sequence
  Description of Artificial Sequence: Synthetic epitope
DTIRKTRHLG

SEQ ID NO: 4307 - protein, 10 aa, Artificial Sequence
  Description of Artificial Sequence: Synthetic epitope
DTISEKTSDQ

SEQ ID NO: 4308 - protein, 10 aa, Artificial Sequence
  Description of Artificial Sequence: Synthetic epitope
DTISMAQTQL

SEQ ID NO: 4309 - protein, 10 aa, Artificial Sequence
  Description of Artificial Sequence: Synthetic epitope
DTITRSAKPL

SEQ ID NO: 4310 - protein, 10 aa, Artificial Sequence
  Description of Artificial Sequence: Synthetic epitope
DTKDKSLKTV

SEQ ID NO: 4311 - protein, 10 aa, Artificial Sequence
  Description of Artificial Sequence: Synthetic epitope
DTKESVITSP

SEQ ID NO: 4312 - protein, 10 aa, Artificial Sequence
  Description of Artificial Sequence: Synthetic epitope
DTKKSSTSAT

SEQ ID NO: 4313 - protein, 10 aa, Artificial Sequence
  Description of Artificial Sequence: Synthetic epitope
DTKKTGSRPK

SEQ ID NO: 4314 - protein, 10 aa, Artificial Sequence
  Description of Artificial Sequence: Synthetic epitope
DTKMSELVEV

SEQ ID NO: 4315 - protein, 10 aa, Artificial Sequence
  Description of Artificial Sequence: Synthetic epitope
DTKRLKDSAV

SEQ ID NO: 4316 - protein, 10 aa, Artificial Sequence
  Description of Artificial Sequence: Synthetic epitope
DTKSKLRPKR

SEQ ID NO: 4317 - protein, 10 aa, Artificial Sequence
  Description of Artificial Sequence: Synthetic epitope
DTKVVTQVIN

SEQ ID NO: 4318 - protein, 10 aa, Artificial Sequence
  Description of Artificial Sequence: Synthetic epitope
DTLADNTSNY

SEQ ID NO: 4319 - protein, 10 aa, Artificial Sequence
  Description of Artificial Sequence: Synthetic epitope
DTLAETMKHY

SEQ ID NO: 4320 - protein, 10 aa, Artificial Sequence
  Description of Artificial Sequence: Synthetic epitope
DTLASEQKKS

SEQ ID NO: 4321 - protein, 10 aa, Artificial Sequence
  Description of Artificial Sequence: Synthetic epitope
DTLASQALSQ

SEQ ID NO: 4322 - protein, 10 aa, Artificial Sequence
  Description of Artificial Sequence: Synthetic epitope
DTLDASLQSF

SEQ ID NO: 4323 - protein, 10 aa, Artificial Sequence
  Description of Artificial Sequence: Synthetic epitope
DTLEKSELTV

SEQ ID NO: 4324 - protein, 10 aa, Artificial Sequence
  Description of Artificial Sequence: Synthetic epitope
DTLKAAVHRN

SEQ ID NO: 4325 - protein, 10 aa, Artificial Sequence
  Description of Artificial Sequence: Synthetic epitope
DTLKTLTAQK

SEQ ID NO: 4326 - protein, 10 aa, Artificial Sequence
  Description of Artificial Sequence: Synthetic epitope
DTLKVTYDSF

SEQ ID NO: 4327 - protein, 10 aa, Artificial Sequence
  Description of Artificial Sequence: Synthetic epitope
DTLLAASIQP

SEQ ID NO: 4328 - protein, 10 aa, Artificial Sequence
  Description of Artificial Sequence: Synthetic epitope
DTLLARIERM

SEQ ID NO: 4329 - protein, 10 aa, Artificial Sequence
  Description of Artificial Sequence: Synthetic epitope
DTLLSAMLKS

SEQ ID NO: 4330 - protein, 10 aa, Artificial Sequence
  Description of Artificial Sequence: Synthetic epitope
DTLNIETLLN

SEQ ID NO: 4331 - protein, 10 aa, Artificial Sequence
  Description of Artificial Sequence: Synthetic epitope
DTLQTLLEFQ

SEQ ID NO: 4332 - protein, 10 aa, Artificial Sequence
  Description of Artificial Sequence: Synthetic epitope
DTLREDQMRD

SEQ ID NO: 4333 - protein, 10 aa, Artificial Sequence
  Description of Artificial Sequence: Synthetic epitope
DTLREVKTGA

SEQ ID NO: 4334 - protein, 10 aa, Artificial Sequence
  Description of Artificial Sequence: Synthetic epitope
DTLSASEPME

SEQ ID NO: 4335 - protein, 10 aa, Artificial Sequence
  Description of Artificial Sequence: Synthetic epitope
DTLSRTDALE

SEQ ID NO: 4336 - protein, 10 aa, Artificial Sequence
  Description of Artificial Sequence: Synthetic epitope
DTLSTSVAKS

SEQ ID NO: 4337 - protein, 10 aa, Artificial Sequence
  Description of Artificial Sequence: Synthetic epitope
DTLTFQSQSL

SEQ ID NO: 4338 - protein, 10 aa, Artificial Sequence
  Description of Artificial Sequence: Synthetic epitope
DTLVSTTAPS

SEQ ID NO: 4339 - protein, 10 aa, Artificial Sequence
  Description of Artificial Sequence: Synthetic epitope
DTLVSVAARE

SEQ ID NO: 4340 - protein, 10 aa, Artificial Sequence
  Description of Artificial Sequence: Synthetic epitope
DTMLAAMFSG

SEQ ID NO: 4341 - protein, 10 aa, Artificial Sequence
  Description of Artificial Sequence: Synthetic epitope
DTNELKIKTL

SEQ ID NO: 4342 - protein, 10 aa, Artificial Sequence
  Description of Artificial Sequence: Synthetic epitope
DTQAMPAIEL

SEQ ID NO: 4343 - protein, 10 aa, Artificial Sequence
  Description of Artificial Sequence: Synthetic epitope
DTQDIEASHY

SEQ ID NO: 4344 - protein, 10 aa, Artificial Sequence
  Description of Artificial Sequence: Synthetic epitope
DTQIVSDAEV

SEQ ID NO: 4345 - protein, 10 aa, Artificial Sequence
  Description of Artificial Sequence: Synthetic epitope
DTQKKAIRSI

SEQ ID NO: 4346 - protein, 10 aa, Artificial Sequence
  Description of Artificial Sequence: Synthetic epitope
DTQMAITKGS

SEQ ID NO: 4347 - protein, 10 aa, Artificial Sequence
  Description of Artificial Sequence: Synthetic epitope
DTQMPLVAPV

SEQ ID NO: 4348 - protein, 10 aa, Artificial Sequence
  Description of Artificial Sequence: Synthetic epitope
DTQNMVSEEP

SEQ ID NO: 4349 - protein, 10 aa, Artificial Sequence
  Description of Artificial Sequence: Synthetic epitope
DTQSRLVAFS

SEQ ID NO: 4350 - protein, 10 aa, Artificial Sequence
  Description of Artificial Sequence: Synthetic epitope
DTRMSSFVEP

SEQ ID NO: 4351 - protein, 10 aa, Artificial Sequence
  Description of Artificial Sequence: Synthetic epitope
DTRTSGTDVS

SEQ ID NO: 4352 - protein, 10 aa, Artificial Sequence
  Description of Artificial Sequence: Synthetic epitope
DTSAEQDLIR

SEQ ID NO: 4353 - protein, 10 aa, Artificial Sequence
  Description of Artificial Sequence: Synthetic epitope
DTSATPQSAS

SEQ ID NO: 4354 - protein, 10 aa, Artificial Sequence
  Description of Artificial Sequence: Synthetic epitope
DTSDLEVAED

SEQ ID NO: 4355 - protein, 10 aa, Artificial Sequence
  Description of Artificial Sequence: Synthetic epitope
DTSESDSQES

SEQ ID NO: 4356 - protein, 10 aa, Artificial Sequence
  Description of Artificial Sequence: Synthetic epitope
DTSESSAAEF

SEQ ID NO: 4357 - protein, 10 aa, Artificial Sequence
  Description of Artificial Sequence: Synthetic epitope
DTSESSAAGG

SEQ ID NO: 4358 - protein, 10 aa, Artificial Sequence
  Description of Artificial Sequence: Synthetic epitope
DTSESSAAGG

SEQ ID NO: 4359 - protein, 10 aa, Artificial Sequence
  Description of Artificial Sequence: Synthetic epitope
DTSETSLSNQ

SEQ ID NO: 4360 - protein, 10 aa, Artificial Sequence
  Description of Artificial Sequence: Synthetic epitope
DTSEWISSTT

SEQ ID NO: 4361 - protein, 10 aa, Artificial Sequence
  Description of Artificial Sequence: Synthetic epitope
DTSGPYSESS

SEQ ID NO: 4362 - protein, 10 aa, Artificial Sequence
  Description of Artificial Sequence: Synthetic epitope
DTSHVTRMTK

SEQ ID NO: 4363 - protein, 10 aa, Artificial Sequence
  Description of Artificial Sequence: Synthetic epitope
DTSKHEKKED

SEQ ID NO: 4364 - protein, 10 aa, Artificial Sequence
  Description of Artificial Sequence: Synthetic epitope
DTSKNKLLRT

SEQ ID NO: 4365 - protein, 10 aa, Artificial Sequence
  Description of Artificial Sequence: Synthetic epitope
DTSLDAKVLG

SEQ ID NO: 4366 - protein, 10 aa, Artificial Sequence
  Description of Artificial Sequence: Synthetic epitope
DTSLVEVAPT

SEQ ID NO: 4367 - protein, 10 aa, Artificial Sequence
  Description of Artificial Sequence: Synthetic epitope
DTSNSEAISS

SEQ ID NO: 4368 - protein, 10 aa, Artificial Sequence
  Description of Artificial Sequence: Synthetic epitope
DTSQTRFNVR

SEQ ID NO: 4369 - protein, 10 aa, Artificial Sequence
  Description of Artificial Sequence: Synthetic epitope
DTSRREELWA

SEQ ID NO: 4370 - protein, 10 aa, Artificial Sequence
  Description of Artificial Sequence: Synthetic epitope
DTSSEEVNLS

SEQ ID NO: 4371 - protein, 10 aa, Artificial Sequence
  Description of Artificial Sequence: Synthetic epitope
DTSSEISSAQ

SEQ ID NO: 4372 - protein, 10 aa, Artificial Sequence
  Description of Artificial Sequence: Synthetic epitope
DTSSMSRMND

SEQ ID NO: 4373 - protein, 10 aa, Artificial Sequence
  Description of Artificial Sequence: Synthetic epitope
DTSSNQQKNF

SEQ ID NO: 4374 - protein, 10 aa, Artificial Sequence
  Description of Artificial Sequence: Synthetic epitope
DTSSQSKSDI

SEQ ID NO: 4375 - protein, 10 aa, Artificial Sequence
  Description of Artificial Sequence: Synthetic epitope
DTSTFEATSE

SEQ ID NO: 4376 - protein, 10 aa, Artificial Sequence
  Description of Artificial Sequence: Synthetic epitope
DTSWRRTNSD

SEQ ID NO: 4377 - protein, 10 aa, Artificial Sequence
  Description of Artificial Sequence: Synthetic epitope
DTTFTSTDKA

SEQ ID NO: 4378 - protein, 10 aa, Artificial Sequence
  Description of Artificial Sequence: Synthetic epitope
DTTKAVITLQ

SEQ ID NO: 4379 - protein, 10 aa, Artificial Sequence
  Description of Artificial Sequence: Synthetic epitope
DTTLSRTTYR

SEQ ID NO: 4380 - protein, 10 aa, Artificial Sequence
  Description of Artificial Sequence: Synthetic epitope
DTTMKEMMHI

SEQ ID NO: 4381 - protein, 10 aa, Artificial Sequence
  Description of Artificial Sequence: Synthetic epitope
DTTMTAEEFT

SEQ ID NO: 4382 - protein, 10 aa, Artificial Sequence
  Description of Artificial Sequence: Synthetic epitope
DTTNKVKASE

SEQ ID NO: 4383 - protein, 10 aa, Artificial Sequence
  Description of Artificial Sequence: Synthetic epitope
DTTRQVQRIS

SEQ ID NO: 4384 - protein, 10 aa, Artificial Sequence
  Description of Artificial Sequence: Synthetic epitope
DTTSSPMITS

SEQ ID NO: 4385 - protein, 10 aa, Artificial Sequence
  Description of Artificial Sequence: Synthetic epitope
DTVASFKESN

SEQ ID NO: 4386 - protein, 10 aa, Artificial Sequence
  Description of Artificial Sequence: Synthetic epitope
DTVATMMREK

SEQ ID NO: 4387 - protein, 10 aa, Artificial Sequence
  Description of Artificial Sequence: Synthetic epitope
DTVDMATTKD

SEQ ID NO: 4388 - protein, 10 aa, Artificial Sequence
  Description of Artificial Sequence: Synthetic epitope
DTVESSLHRH

SEQ ID NO: 4389 - protein, 10 aa, Artificial Sequence
  Description of Artificial Sequence: Synthetic epitope
DTVEVLKAIQ

SEQ ID NO: 4390 - protein, 10 aa, Artificial Sequence
  Description of Artificial Sequence: Synthetic epitope
DTVKAKVFKD

SEQ ID NO: 4391 - protein, 10 aa, Artificial Sequence
  Description of Artificial Sequence: Synthetic epitope
DTVKLKINFH

SEQ ID NO: 4392 - protein, 10 aa, Artificial Sequence
  Description of Artificial Sequence: Synthetic epitope
DTVMALLASD

SEQ ID NO: 4393 - protein, 10 aa, Artificial Sequence
  Description of Artificial Sequence: Synthetic epitope
DTVRVIAEKD

SEQ ID NO: 4394 - protein, 10 aa, Artificial Sequence
  Description of Artificial Sequence: Synthetic epitope
DTVSSESLQS

SEQ ID NO: 4395 - protein, 10 aa, Artificial Sequence
  Description of Artificial Sequence: Synthetic epitope
DTWKALKKEA

SEQ ID NO: 4396 - protein, 10 aa, Artificial Sequence
  Description of Artificial Sequence: Synthetic epitope
DTYKANSAKN

SEQ ID NO: 4397 - protein, 10 aa, Artificial Sequence
  Description of Artificial Sequence: Synthetic epitope
DVAAQQSLRQ

SEQ ID NO: 4398 - protein, 10 aa, Artificial Sequence
  Description of Artificial Sequence: Synthetic epitope
DVAEVVDSQL

SEQ ID NO: 4399 - protein, 10 aa, Artificial Sequence
  Description of Artificial Sequence: Synthetic epitope
DVALKSSPTE

SEQ ID NO: 4400 - protein, 10 aa, Artificial Sequence
  Description of Artificial Sequence: Synthetic epitope
DVANLENESK

SEQ ID NO: 4401 - protein, 10 aa, Artificial Sequence
  Description of Artificial Sequence: Synthetic epitope
DVASSTTRER

SEQ ID NO: 4402 - protein, 10 aa, Artificial Sequence
  Description of Artificial Sequence: Synthetic epitope
DVAVEMMWKP

SEQ ID NO: 4403 - protein, 10 aa, Artificial Sequence
  Description of Artificial Sequence: Synthetic epitope
DVAVIAESIR

SEQ ID NO: 4404 - protein, 10 aa, Artificial Sequence
  Description of Artificial Sequence: Synthetic epitope
DVDFAALKAV

SEQ ID NO: 4405 - protein, 10 aa, Artificial Sequence
  Description of Artificial Sequence: Synthetic epitope
DVDFNKAKSP

SEQ ID NO: 4406 - protein, 10 aa, Artificial Sequence
  Description of Artificial Sequence: Synthetic epitope
DVDHRRDDPY

SEQ ID NO: 4407 - protein, 10 aa, Artificial Sequence
  Description of Artificial Sequence: Synthetic epitope
DVDQRSTTFE

SEQ ID NO: 4408 - protein, 10 aa, Artificial Sequence
  Description of Artificial Sequence: Synthetic epitope
DVDSTNSRLR

SEQ ID NO: 4409 - protein, 10 aa, Artificial Sequence
  Description of Artificial Sequence: Synthetic epitope
DVDTQEFNLE

SEQ ID NO: 4410 - protein, 10 aa, Artificial Sequence
  Description of Artificial Sequence: Synthetic epitope
DVDTTQESVF

SEQ ID NO: 4411 - protein, 10 aa, Artificial Sequence
  Description of Artificial Sequence: Synthetic epitope
DVDVSAVQAK

SEQ ID NO: 4412 - protein, 10 aa, Artificial Sequence
  Description of Artificial Sequence: Synthetic epitope
DVEAKMPLSA

SEQ ID NO: 4413 - protein, 10 aa, Artificial Sequence
  Description of Artificial Sequence: Synthetic epitope
DVEALKQEAS

SEQ ID NO: 4414 - protein, 10 aa, Artificial Sequence
  Description of Artificial Sequence: Synthetic epitope
DVEESIEWKT

SEQ ID NO: 4415 - protein, 10 aa, Artificial Sequence
  Description of Artificial Sequence: Synthetic epitope
DVEGVRPDDA

SEQ ID NO: 4416 - protein, 10 aa, Artificial Sequence
  Description of Artificial Sequence: Synthetic epitope
DVEIEYVTEE

SEQ ID NO: 4417 - protein, 10 aa, Artificial Sequence
  Description of Artificial Sequence: Synthetic epitope
DVEISVEPSD

SEQ ID NO: 4418 - protein, 10 aa, Artificial Sequence
  Description of Artificial Sequence: Synthetic epitope
DVEKLNAAKA

SEQ ID NO: 4419 - protein, 10 aa, Artificial Sequence
  Description of Artificial Sequence: Synthetic epitope
DVEKSERVVE

SEQ ID NO: 4420 - protein, 10 aa, Artificial Sequence
  Description of Artificial Sequence: Synthetic epitope
DVEKSGKVSK

SEQ ID NO: 4421 - protein, 10 aa, Artificial Sequence
  Description of Artificial Sequence: Synthetic epitope
DVEKTPTPLM

SEQ ID NO: 4422 - protein, 10 aa, Artificial Sequence
  Description of Artificial Sequence: Synthetic epitope
DVEKTRRAIR

SEQ ID NO: 4423 - protein, 10 aa, Artificial Sequence
  Description of Artificial Sequence: Synthetic epitope
DVELIVERNF

SEQ ID NO: 4424 - protein, 10 aa, Artificial Sequence
  Description of Artificial Sequence: Synthetic epitope
DVESLAQTLE

SEQ ID NO: 4425 - protein, 10 aa, Artificial Sequence
  Description of Artificial Sequence: Synthetic epitope
DVFAEKTKAE

SEQ ID NO: 4426 - protein, 10 aa, Artificial Sequence
  Description of Artificial Sequence: Synthetic epitope
DVFEKTILES

SEQ ID NO: 4427 - protein, 10 aa, Artificial Sequence
  Description of Artificial Sequence: Synthetic epitope
DVFGTNQLVG

SEQ ID NO: 4428 - protein, 10 aa, Artificial Sequence
  Description of Artificial Sequence: Synthetic epitope
DVFPANALLE

SEQ ID NO: 4429 - protein, 10 aa, Artificial Sequence
  Description of Artificial Sequence: Synthetic epitope
DVFQRNQQDG

SEQ ID NO: 4430 - protein, 10 aa, Artificial Sequence
  Description of Artificial Sequence: Synthetic epitope
DVFQVQKAKK

SEQ ID NO: 4431 - protein, 10 aa, Artificial Sequence
  Description of Artificial Sequence: Synthetic epitope
DVFSEKSLSY

SEQ ID NO: 4432 - protein, 10 aa, Artificial Sequence
  Description of Artificial Sequence: Synthetic epitope
DVHKSYEMSQ

SEQ ID NO: 4433 - protein, 10 aa, Artificial Sequence
  Description of Artificial Sequence: Synthetic epitope
DVINTVLSNR

SEQ ID NO: 4434 - protein, 10 aa, Artificial Sequence
  Description of Artificial Sequence: Synthetic epitope
DVIPSEAINE

SEQ ID NO: 4435 - protein, 10 aa, Artificial Sequence
  Description of Artificial Sequence: Synthetic epitope
DVIVTAADEN

SEQ ID NO: 4436 - protein, 10 aa, Artificial Sequence
  Description of Artificial Sequence: Synthetic epitope
DVKEAETDSD

SEQ ID NO: 4437 - protein, 10 aa, Artificial Sequence
  Description of Artificial Sequence: Synthetic epitope
DVKLLARRSN

SEQ ID NO: 4438 - protein, 10 aa, Artificial Sequence
  Description of Artificial Sequence: Synthetic epitope
DVKVEDKKNE

SEQ ID NO: 4439 - protein, 10 aa, Artificial Sequence
  Description of Artificial Sequence: Synthetic epitope
DVLALWFRSS

SEQ ID NO: 4440 - protein, 10 aa, Artificial Sequence
  Description of Artificial Sequence: Synthetic epitope
DVLHIRLLVG

SEQ ID NO: 4441 - protein, 10 aa, Artificial Sequence
  Description of Artificial Sequence: Synthetic epitope
DVLKGESAAS

SEQ ID NO: 4442 - protein, 10 aa, Artificial Sequence
  Description of Artificial Sequence: Synthetic epitope
DVLLVAQGEM

SEQ ID NO: 4443 - protein, 10 aa, Artificial Sequence
  Description of Artificial Sequence: Synthetic epitope
DVLMKFSTNA

SEQ ID NO: 4444 - protein, 10 aa, Artificial Sequence
  Description of Artificial Sequence: Synthetic epitope
DVLMKQIHKT

SEQ ID NO: 4445 - protein, 10 aa, Artificial Sequence
  Description of Artificial Sequence: Synthetic epitope
DVLMSLAKAV

SEQ ID NO: 4446 - protein, 10 aa, Artificial Sequence
  Description of Artificial Sequence: Synthetic epitope
DVLNDTAPRA

SEQ ID NO: 4447 - protein, 10 aa, Artificial Sequence
  Description of Artificial Sequence: Synthetic epitope
DVLNLSLDSS

SEQ ID NO: 4448 - protein, 10 aa, Artificial Sequence
  Description of Artificial Sequence: Synthetic epitope
DVLQAADVDK

SEQ ID NO: 4449 - protein, 10 aa, Artificial Sequence
  Description of Artificial Sequence: Synthetic epitope
DVLQDTRQEP

SEQ ID NO: 4450 - protein, 10 aa, Artificial Sequence
  Description of Artificial Sequence: Synthetic epitope
DVLSAAEVMQ

SEQ ID NO: 4451 - protein, 10 aa, Artificial Sequence
  Description of Artificial Sequence: Synthetic epitope
DVLSQVLMQL

SEQ ID NO: 4452 - protein, 10 aa, Artificial Sequence
  Description of Artificial Sequence: Synthetic epitope
DVMEEMVEKT

SEQ ID NO: 4453 - protein, 10 aa, Artificial Sequence
  Description of Artificial Sequence: Synthetic epitope
DVMIARLKPS

SEQ ID NO: 4454 - protein, 10 aa, Artificial Sequence
  Description of Artificial Sequence: Synthetic epitope
DVNAEAAEIA

SEQ ID NO: 4455 - protein, 10 aa, Artificial Sequence
  Description of Artificial Sequence: Synthetic epitope
DVNRDTNTSI

SEQ ID NO: 4456 - protein, 10 aa, Artificial Sequence
  Description of Artificial Sequence: Synthetic epitope
DVNSAAFRLW

SEQ ID NO: 4457 - protein, 10 aa, Artificial Sequence
  Description of Artificial Sequence: Synthetic epitope
DVNSAVAMGE

SEQ ID NO: 4458 - protein, 10 aa, Artificial Sequence
  Description of Artificial Sequence: Synthetic epitope
DVNVVMLQES

SEQ ID NO: 4459 - protein, 10 aa, Artificial Sequence
  Description of Artificial Sequence: Synthetic epitope
DVQDGMTIAK

SEQ ID NO: 4460 - protein, 10 aa, Artificial Sequence
  Description of Artificial Sequence: Synthetic epitope
DVQLMKGKQE

SEQ ID NO: 4461 - protein, 10 aa, Artificial Sequence
  Description of Artificial Sequence: Synthetic epitope
DVQSQISKIG

SEQ ID NO: 4462 - protein, 10 aa, Artificial Sequence
  Description of Artificial Sequence: Synthetic epitope
DVQSVQEKRK

SEQ ID NO: 4463 - protein, 10 aa, Artificial Sequence
  Description of Artificial Sequence: Synthetic epitope
DVRAFIYKTL

SEQ ID NO: 4464 - protein, 10 aa, Artificial Sequence
  Description of Artificial Sequence: Synthetic epitope
DVRGAETLSQ

SEQ ID NO: 4465 - protein, 10 aa, Artificial Sequence
  Description of Artificial Sequence: Synthetic epitope
DVRIRHLEMD

SEQ ID NO: 4466 - protein, 10 aa, Artificial Sequence
  Description of Artificial Sequence: Synthetic epitope
DVRKSLSERG

SEQ ID NO: 4467 - protein, 10 aa, Artificial Sequence
  Description of Artificial Sequence: Synthetic epitope
DVRNVSARTD

SEQ ID NO: 4468 - protein, 10 aa, Artificial Sequence
  Description of Artificial Sequence: Synthetic epitope
DVRVATQKIS

SEQ ID NO: 4469 - protein, 10 aa, Artificial Sequence
  Description of Artificial Sequence: Synthetic epitope
DVRVLQTEQA

SEQ ID NO: 4470 - protein, 10 aa, Artificial Sequence
  Description of Artificial Sequence: Synthetic epitope
DVRVSQTTWD

SEQ ID NO: 4471 - protein, 10 aa, Artificial Sequence
  Description of Artificial Sequence: Synthetic epitope
DVSAKDSSQE

SEQ ID NO: 4472 - protein, 10 aa, Artificial Sequence
  Description of Artificial Sequence: Synthetic epitope
DVSGQSSNDK

SEQ ID NO: 4473 - protein, 10 aa, Artificial Sequence
  Description of Artificial Sequence: Synthetic epitope
DVSKRTKSKI

SEQ ID NO: 4474 - protein, 10 aa, Artificial Sequence
  Description of Artificial Sequence: Synthetic epitope
DVSNLSSTTM

SEQ ID NO: 4475 - protein, 10 aa, Artificial Sequence
  Description of Artificial Sequence: Synthetic epitope
DVSPVKINQI

SEQ ID NO: 4476 - protein, 10 aa, Artificial Sequence
  Description of Artificial Sequence: Synthetic epitope
DVSRGQEEPH

SEQ ID NO: 4477 - protein, 10 aa, Artificial Sequence
  Description of Artificial Sequence: Synthetic epitope
DVSRNARHAD

SEQ ID NO: 4478 - protein, 10 aa, Artificial Sequence
  Description of Artificial Sequence: Synthetic epitope
DVSSDRSHLQ

SEQ ID NO: 4479 - protein, 10 aa, Artificial Sequence
  Description of Artificial Sequence: Synthetic epitope
DVSSEPKGHA

SEQ ID NO: 4480 - protein, 10 aa, Artificial Sequence
  Description of Artificial Sequence: Synthetic epitope
DVSSESQSAT

SEQ ID NO: 4481 - protein, 10 aa, Artificial Sequence
  Description of Artificial Sequence: Synthetic epitope
DVSSISVEHG

SEQ ID NO: 4482 - protein, 10 aa, Artificial Sequence
  Description of Artificial Sequence: Synthetic epitope
DVSSPQRAQS

SEQ ID NO: 4483 - protein, 10 aa, Artificial Sequence
  Description of Artificial Sequence: Synthetic epitope
DVSTIIGSRE

SEQ ID NO: 4484 - protein, 10 aa, Artificial Sequence
  Description of Artificial Sequence: Synthetic epitope
DVSTLKYFTI

SEQ ID NO: 4485 - protein, 10 aa, Artificial Sequence
  Description of Artificial Sequence: Synthetic epitope
DVSWRLEYQI

SEQ ID NO: 4486 - protein, 10 aa, Artificial Sequence
  Description of Artificial Sequence: Synthetic epitope
DVTAKSITPL

SEQ ID NO: 4487 - protein, 10 aa, Artificial Sequence
  Description of Artificial Sequence: Synthetic epitope
DVTRASAGTT

SEQ ID NO: 4488 - protein, 10 aa, Artificial Sequence
  Description of Artificial Sequence: Synthetic epitope
DVTSGFSRIG

SEQ ID NO: 4489 - protein, 10 aa, Artificial Sequence
  Description of Artificial Sequence: Synthetic epitope
DVTSIIRSSQ

SEQ ID NO: 4490 - protein, 10 aa, Artificial Sequence
  Description of Artificial Sequence: Synthetic epitope
DVTSRAVMEI

SEQ ID NO: 4491 - protein, 10 aa, Artificial Sequence
  Description of Artificial Sequence: Synthetic epitope
DVVEKSLEGP

SEQ ID NO: 4492 - protein, 10 aa, Artificial Sequence
  Description of Artificial Sequence: Synthetic epitope
DVVGIEKMSS

SEQ ID NO: 4493 - protein, 10 aa, Artificial Sequence
  Description of Artificial Sequence: Synthetic epitope
DVVGQAGKPK

SEQ ID NO: 4494 - protein, 10 aa, Artificial Sequence
  Description of Artificial Sequence: Synthetic epitope
DVVIDLYTEE

SEQ ID NO: 4495 - protein, 10 aa, Artificial Sequence
  Description of Artificial Sequence: Synthetic epitope
DVVNIWAGQG

SEQ ID NO: 4496 - protein, 10 aa, Artificial Sequence
  Description of Artificial Sequence: Synthetic epitope
DVVRLEIESN

SEQ ID NO: 4497 - protein, 10 aa, Artificial Sequence
  Description of Artificial Sequence: Synthetic epitope
DVVTIMTNSY

SEQ ID NO: 4498 - protein, 10 aa, Artificial Sequence
  Description of Artificial Sequence: Synthetic epitope
DVYVSKDSVT

SEQ ID NO: 4499 - protein, 10 aa, Artificial Sequence
  Description of Artificial Sequence: Synthetic epitope
DWDQKSHDVS

SEQ ID NO: 4500 - protein, 10 aa, Artificial Sequence
  Description of Artificial Sequence: Synthetic epitope
DWEDVKTAQG

SEQ ID NO: 4501 - protein, 10 aa, Artificial Sequence
  Description of Artificial Sequence: Synthetic epitope
DWFSERMQVA

SEQ ID NO: 4502 - protein, 10 aa, Artificial Sequence
  Description of Artificial Sequence: Synthetic epitope
DWGMEWAQPR

SEQ ID NO: 4503 - protein, 10 aa, Artificial Sequence
  Description of Artificial Sequence: Synthetic epitope
DWIHDTAQDS

SEQ ID NO: 4504 - protein, 10 aa, Artificial Sequence
  Description of Artificial Sequence: Synthetic epitope
DWIHEQMERD

SEQ ID NO: 4505 - protein, 10 aa, Artificial Sequence
  Description of Artificial Sequence: Synthetic epitope
DWIVERNKRG

SEQ ID NO: 4506 - protein, 10 aa, Artificial Sequence
  Description of Artificial Sequence: Synthetic epitope
DWLKSAERTA

SEQ ID NO: 4507 - protein, 10 aa, Artificial Sequence
  Description of Artificial Sequence: Synthetic epitope
DWNRNVLKRE

SEQ ID NO: 4508 - protein, 10 aa, Artificial Sequence
  Description of Artificial Sequence: Synthetic epitope
DWPEAQRISA

SEQ ID NO: 4509 - protein, 10 aa, Artificial Sequence
  Description of Artificial Sequence: Synthetic epitope
DWQAKSVHAE

SEQ ID NO: 4510 - protein, 10 aa, Artificial Sequence
  Description of Artificial Sequence: Synthetic epitope
DWQIRMVFVG

SEQ ID NO: 4511 - protein, 10 aa, Artificial Sequence
  Description of Artificial Sequence: Synthetic epitope
DWSRTVQKQG

SEQ ID NO: 4512 - protein, 10 aa, Artificial Sequence
  Description of Artificial Sequence: Synthetic epitope
DWVDDQRPEN

SEQ ID NO: 4513 - protein, 10 aa, Artificial Sequence
  Description of Artificial Sequence: Synthetic epitope
DWWYLRTKYQ

SEQ ID NO: 4514 - protein, 10 aa, Artificial Sequence
  Description of Artificial Sequence: Synthetic epitope
DWYGSTHKNF

SEQ ID NO: 4515 - protein, 10 aa, Artificial Sequence
  Description of Artificial Sequence: Synthetic epitope
DWYIKTSHNH

SEQ ID NO: 4516 - protein, 10 aa, Artificial Sequence
  Description of Artificial Sequence: Synthetic epitope
DYAKLISLLT

SEQ ID NO: 4517 - protein, 10 aa, Artificial Sequence
  Description of Artificial Sequence: Synthetic epitope
DYASESPADE

SEQ ID NO: 4518 - protein, 10 aa, Artificial Sequence
  Description of Artificial Sequence: Synthetic epitope
DYASTSASVS

SEQ ID NO: 4519 - protein, 10 aa, Artificial Sequence
  Description of Artificial Sequence: Synthetic epitope
DYAVHPMSPV

SEQ ID NO: 4520 - protein, 10 aa, Artificial Sequence
  Description of Artificial Sequence: Synthetic epitope
DYDKISSQLP

SEQ ID NO: 4521 - protein, 10 aa, Artificial Sequence
  Description of Artificial Sequence: Synthetic epitope
DYDPSSLRDA

SEQ ID NO: 4522 - protein, 10 aa, Artificial Sequence
  Description of Artificial Sequence: Synthetic epitope
DYEILTIPVK

SEQ ID NO: 4523 - protein, 10 aa, Artificial Sequence
  Description of Artificial Sequence: Synthetic epitope
DYEKLNVSKA

SEQ ID NO: 4524 - protein, 10 aa, Artificial Sequence
  Description of Artificial Sequence: Synthetic epitope
DYENTQSGDP

SEQ ID NO: 4525 - protein, 10 aa, Artificial Sequence
  Description of Artificial Sequence: Synthetic epitope
DYEQSTGMQE

SEQ ID NO: 4526 - protein, 10 aa, Artificial Sequence
  Description of Artificial Sequence: Synthetic epitope
DYGENEKQKK

SEQ ID NO: 4527 - protein, 10 aa, Artificial Sequence
  Description of Artificial Sequence: Synthetic epitope
DYGKTKNNKN

SEQ ID NO: 4528 - protein, 10 aa, Artificial Sequence
  Description of Artificial Sequence: Synthetic epitope
DYGLVSQALH

SEQ ID NO: 4529 - protein, 10 aa, Artificial Sequence
  Description of Artificial Sequence: Synthetic epitope
DYKIQMNKSG

SEQ ID NO: 4530 - protein, 10 aa, Artificial Sequence
  Description of Artificial Sequence: Synthetic epitope
DYLLSNQELT

SEQ ID NO: 4531 - protein, 10 aa, Artificial Sequence
  Description of Artificial Sequence: Synthetic epitope
DYLRVNNMPM

SEQ ID NO: 4532 - protein, 10 aa, Artificial Sequence
  Description of Artificial Sequence: Synthetic epitope
DYLTNSASLQ

SEQ ID NO: 4533 - protein, 10 aa, Artificial Sequence
  Description of Artificial Sequence: Synthetic epitope
DYLVTQIMDQ

SEQ ID NO: 4534 - protein, 10 aa, Artificial Sequence
  Description of Artificial Sequence: Synthetic epitope
DYLYPGWNME

SEQ ID NO: 4535 - protein, 10 aa, Artificial Sequence
  Description of Artificial Sequence: Synthetic epitope
DYMSNLRRDK

SEQ ID NO: 4536 - protein, 10 aa, Artificial Sequence
  Description of Artificial Sequence: Synthetic epitope
DYPEQMSDKQ

SEQ ID NO: 4537 - protein, 10 aa, Artificial Sequence
  Description of Artificial Sequence: Synthetic epitope
DYQEEIAIAQ

SEQ ID NO: 4538 - protein, 10 aa, Artificial Sequence
  Description of Artificial Sequence: Synthetic epitope
DYQTQETKSS

SEQ ID NO: 4539 - protein, 10 aa, Artificial Sequence
  Description of Artificial Sequence: Synthetic epitope
DYRNDQRNRP

SEQ ID NO: 4540 - protein, 10 aa, Artificial Sequence
  Description of Artificial Sequence: Synthetic epitope
DYRVSASKKD

SEQ ID NO: 4541 - protein, 10 aa, Artificial Sequence
  Description of Artificial Sequence: Synthetic epitope
DYSETSSLAD

SEQ ID NO: 4542 - protein, 10 aa, Artificial Sequence
  Description of Artificial Sequence: Synthetic epitope
DYTEQLNFSD

SEQ ID NO: 4543 - protein, 10 aa, Artificial Sequence
  Description of Artificial Sequence: Synthetic epitope
DYVNARQKQG

SEQ ID NO: 4544 - protein, 10 aa, Artificial Sequence
  Description of Artificial Sequence: Synthetic epitope
DYVSEVVKKG

SEQ ID NO: 4545 - protein, 10 aa, Artificial Sequence
  Description of Artificial Sequence: Synthetic epitope
DYYDMVGIQG

SEQ ID NO: 4546 - protein, 10 aa, Artificial Sequence
  Description of Artificial Sequence: Synthetic epitope
DYYESKIRKI

SEQ ID NO: 4547 - protein, 10 aa, Artificial Sequence
  Description of Artificial Sequence: Synthetic epitope
EAAELAERIE

SEQ ID NO: 4548 - protein, 10 aa, Artificial Sequence
  Description of Artificial Sequence: Synthetic epitope
EAAELGEISD

SEQ ID NO: 4549 - protein, 10 aa, Artificial Sequence
  Description of Artificial Sequence: Synthetic epitope
EAAEPEARLA

SEQ ID NO: 4550 - protein, 10 aa, Artificial Sequence
  Description of Artificial Sequence: Synthetic epitope
EAAERFTRIS

SEQ ID NO: 4551 - protein, 10 aa, Artificial Sequence
  Description of Artificial Sequence: Synthetic epitope
EAAERLTQAL

SEQ ID NO: 4552 - protein, 10 aa, Artificial Sequence
  Description of Artificial Sequence: Synthetic epitope
EAAESELLAT

SEQ ID NO: 4553 - protein, 10 aa, Artificial Sequence
  Description of Artificial Sequence: Synthetic epitope
EAAESSLTKD

SEQ ID NO: 4554 - protein, 10 aa, Artificial Sequence
  Description of Artificial Sequence: Synthetic epitope
EAAETHDDVI

SEQ ID NO: 4555 - protein, 10 aa, Artificial Sequence
  Description of Artificial Sequence: Synthetic epitope
EAAFDEVKMA

SEQ ID NO: 4556 - protein, 10 aa, Artificial Sequence
  Description of Artificial Sequence: Synthetic epitope
EAAGEGRNQQ

SEQ ID NO: 4557 - protein, 10 aa, Artificial Sequence
  Description of Artificial Sequence: Synthetic epitope
EAAHHASAVR

SEQ ID NO: 4558 - protein, 10 aa, Artificial Sequence
  Description of Artificial Sequence: Synthetic epitope
EAAIGKSKDS

SEQ ID NO: 4559 - protein, 10 aa, Artificial Sequence
  Description of Artificial Sequence: Synthetic epitope
EAAIQVDPIE

SEQ ID NO: 4560 - protein, 10 aa, Artificial Sequence
  Description of Artificial Sequence: Synthetic epitope
EAAKDASSVK

SEQ ID NO: 4561 - protein, 10 aa, Artificial Sequence
  Description of Artificial Sequence: Synthetic epitope
EAAKETTEVP

SEQ ID NO: 4562 - protein, 10 aa, Artificial Sequence
  Description of Artificial Sequence: Synthetic epitope
EAAKFLDIID

SEQ ID NO: 4563 - protein, 10 aa, Artificial Sequence
  Description of Artificial Sequence: Synthetic epitope
EAAKKEKVEQ

SEQ ID NO: 4564 - protein, 10 aa, Artificial Sequence
  Description of Artificial Sequence: Synthetic epitope
EAAKMLSFTE

SEQ ID NO: 4565 - protein, 10 aa, Artificial Sequence
  Description of Artificial Sequence: Synthetic epitope
EAAKQAKVKL

SEQ ID NO: 4566 - protein, 10 aa, Artificial Sequence
  Description of Artificial Sequence: Synthetic epitope
EAALALQPGG

SEQ ID NO: 4567 - protein, 10 aa, Artificial Sequence
  Description of Artificial Sequence: Synthetic epitope
EAALKLNKDL

SEQ ID NO: 4568 - protein, 10 aa, Artificial Sequence
  Description of Artificial Sequence: Synthetic epitope
EAALRLVKPG

SEQ ID NO: 4569 - protein, 10 aa, Artificial Sequence
  Description of Artificial Sequence: Synthetic epitope
EAALRNIQAG

SEQ ID NO: 4570 - protein, 10 aa, Artificial Sequence
  Description of Artificial Sequence: Synthetic epitope
EAALSREMKA

SEQ ID NO: 4571 - protein, 10 aa, Artificial Sequence
  Description of Artificial Sequence: Synthetic epitope
EAALTSTISL

SEQ ID NO: 4572 - protein, 10 aa, Artificial Sequence
  Description of Artificial Sequence: Synthetic epitope
EAAMADRPQP

SEQ ID NO: 4573 - protein, 10 aa, Artificial Sequence
  Description of Artificial Sequence: Synthetic epitope
EAAMPEIQEQ

SEQ ID NO: 4574 - protein, 10 aa, Artificial Sequence
  Description of Artificial Sequence: Synthetic epitope
EAANDSASAT

SEQ ID NO: 4575 - protein, 10 aa, Artificial Sequence
  Description of Artificial Sequence: Synthetic epitope
EAANSLIQNL

SEQ ID NO: 4576 - protein, 10 aa, Artificial Sequence
  Description of Artificial Sequence: Synthetic epitope
EAAPSARQGI

SEQ ID NO: 4577 - protein, 10 aa, Artificial Sequence
  Description of Artificial Sequence: Synthetic epitope
EAAPSTQLGE

SEQ ID NO: 4578 - protein, 10 aa, Artificial Sequence
  Description of Artificial Sequence: Synthetic epitope
EAAQPQAQVA

SEQ ID NO: 4579 - protein, 10 aa, Artificial Sequence
  Description of Artificial Sequence: Synthetic epitope
EAAQSYRREL

SEQ ID NO: 4580 - protein, 10 aa, Artificial Sequence
  Description of Artificial Sequence: Synthetic epitope
EAARGATENS

SEQ ID NO: 4581 - protein, 10 aa, Artificial Sequence
  Description of Artificial Sequence: Synthetic epitope
EAARLTADKD

SEQ ID NO: 4582 - protein, 10 aa, Artificial Sequence
  Description of Artificial Sequence: Synthetic epitope
EAASAAGVVG

SEQ ID NO: 4583 - protein, 10 aa, Artificial Sequence
  Description of Artificial Sequence: Synthetic epitope
EAASLQAIPT

SEQ ID NO: 4584 - protein, 10 aa, Artificial Sequence
  Description of Artificial Sequence: Synthetic epitope
EAASPSQTVQ

SEQ ID NO: 4585 - protein, 10 aa, Artificial Sequence
  Description of Artificial Sequence: Synthetic epitope
EAASQASPSA

SEQ ID NO: 4586 - protein, 10 aa, Artificial Sequence
  Description of Artificial Sequence: Synthetic epitope
EAASRTFSSL

SEQ ID NO: 4587 - protein, 10 aa, Artificial Sequence
  Description of Artificial Sequence: Synthetic epitope
EAASSGTRGL

SEQ ID NO: 4588 - protein, 10 aa, Artificial Sequence
  Description of Artificial Sequence: Synthetic epitope
EAASSKLQSS

SEQ ID NO: 4589 - protein, 10 aa, Artificial Sequence
  Description of Artificial Sequence: Synthetic epitope
EAASTFSKDP

SEQ ID NO: 4590 - protein, 10 aa, Artificial Sequence
  Description of Artificial Sequence: Synthetic epitope
EAATPVGKVM

SEQ ID NO: 4591 - protein, 10 aa, Artificial Sequence
  Description of Artificial Sequence: Synthetic epitope
EAATRNMEKI

SEQ ID NO: 4592 - protein, 10 aa, Artificial Sequence
  Description of Artificial Sequence: Synthetic epitope
EAATSSDDEE

SEQ ID NO: 4593 - protein, 10 aa, Artificial Sequence
  Description of Artificial Sequence: Synthetic epitope
EAAVAQSEQQ

SEQ ID NO: 4594 - protein, 10 aa, Artificial Sequence
  Description of Artificial Sequence: Synthetic epitope
EAAVAQSEQQ

SEQ ID NO: 4595 - protein, 10 aa, Artificial Sequence
  Description of Artificial Sequence: Synthetic epitope
EAAVSKDEPK

SEQ ID NO: 4596 - protein, 10 aa, Artificial Sequence
  Description of Artificial Sequence: Synthetic epitope
EADATLPLPK

SEQ ID NO: 4597 - protein, 10 aa, Artificial Sequence
  Description of Artificial Sequence: Synthetic epitope
EADDVMRSGP

SEQ ID NO: 4598 - protein, 10 aa, Artificial Sequence
  Description of Artificial Sequence: Synthetic epitope
EADEEDKAED

SEQ ID NO: 4599 - protein, 10 aa, Artificial Sequence
  Description of Artificial Sequence: Synthetic epitope
EADETTRSDI

SEQ ID NO: 4600 - protein, 10 aa, Artificial Sequence
  Description of Artificial Sequence: Synthetic epitope
EADGVEVKRP

SEQ ID NO: 4601 - protein, 10 aa, Artificial Sequence
  Description of Artificial Sequence: Synthetic epitope
EADKQKAKGK

SEQ ID NO: 4602 - protein, 10 aa, Artificial Sequence
  Description of Artificial Sequence: Synthetic epitope
EADLAEQQHL

SEQ ID NO: 4603 - protein, 10 aa, Artificial Sequence
  Description of Artificial Sequence: Synthetic epitope
EADPKGMNEV

SEQ ID NO: 4604 - protein, 10 aa, Artificial Sequence
  Description of Artificial Sequence: Synthetic epitope
EADPLAASEA

SEQ ID NO: 4605 - protein, 10 aa, Artificial Sequence
  Description of Artificial Sequence: Synthetic epitope
EADRAEVSRF

SEQ ID NO: 4606 - protein, 10 aa, Artificial Sequence
  Description of Artificial Sequence: Synthetic epitope
EADRNSMHVD

SEQ ID NO: 4607 - protein, 10 aa, Artificial Sequence
  Description of Artificial Sequence: Synthetic epitope
EADSSTASGS

SEQ ID NO: 4608 - protein, 10 aa, Artificial Sequence
  Description of Artificial Sequence: Synthetic epitope
EADTLDKEGL

SEQ ID NO: 4609 - protein, 10 aa, Artificial Sequence
  Description of Artificial Sequence: Synthetic epitope
EAEAAKMLGE

SEQ ID NO: 4610 - protein, 10 aa, Artificial Sequence
  Description of Artificial Sequence: Synthetic epitope
EAEAASSGVP

SEQ ID NO: 4611 - protein, 10 aa, Artificial Sequence
  Description of Artificial Sequence: Synthetic epitope
EAEAELDLGP

SEQ ID NO: 4612 - protein, 10 aa, Artificial Sequence
  Description of Artificial Sequence: Synthetic epitope
EAEAMKATED

SEQ ID NO: 4613 - protein, 10 aa, Artificial Sequence
  Description of Artificial Sequence: Synthetic epitope
EAEANRVAQD

SEQ ID NO: 4614 - protein, 10 aa, Artificial Sequence
  Description of Artificial Sequence: Synthetic epitope
EAEARQQRDS

SEQ ID NO: 4615 - protein, 10 aa, Artificial Sequence
  Description of Artificial Sequence: Synthetic epitope
EAEARSSFSD

SEQ ID NO: 4616 - protein, 10 aa, Artificial Sequence
  Description of Artificial Sequence: Synthetic epitope
EAEAVSAQAD

SEQ ID NO: 4617 - protein, 10 aa, Artificial Sequence
  Description of Artificial Sequence: Synthetic epitope
EAEDASLLSF

SEQ ID NO: 4618 - protein, 10 aa, Artificial Sequence
  Description of Artificial Sequence: Synthetic epitope
EAEDIFDSDK

SEQ ID NO: 4619 - protein, 10 aa, Artificial Sequence
  Description of Artificial Sequence: Synthetic epitope
EAEEATEQTH

SEQ ID NO: 4620 - protein, 10 aa, Artificial Sequence
  Description of Artificial Sequence: Synthetic epitope
EAEEKAKKAI

SEQ ID NO: 4621 - protein, 10 aa, Artificial Sequence
  Description of Artificial Sequence: Synthetic epitope
EAEENSLTET

SEQ ID NO: 4622 - protein, 10 aa, Artificial Sequence
  Description of Artificial Sequence: Synthetic epitope
EAEESNVEDL

SEQ ID NO: 4623 - protein, 10 aa, Artificial Sequence
  Description of Artificial Sequence: Synthetic epitope
EAEFKKSETS

SEQ ID NO: 4624 - protein, 10 aa, Artificial Sequence
  Description of Artificial Sequence: Synthetic epitope
EAEFSRAEYQ

SEQ ID NO: 4625 - protein, 10 aa, Artificial Sequence
  Description of Artificial Sequence: Synthetic epitope
EAEGREREAR

SEQ ID NO: 4626 - protein, 10 aa, Artificial Sequence
  Description of Artificial Sequence: Synthetic epitope
EAEHAEATHR

SEQ ID NO: 4627 - protein, 10 aa, Artificial Sequence
  Description of Artificial Sequence: Synthetic epitope
EAEHFKTWEE

SEQ ID NO: 4628 - protein, 10 aa, Artificial Sequence
  Description of Artificial Sequence: Synthetic epitope
EAEIVEADKE

SEQ ID NO: 4629 - protein, 10 aa, Artificial Sequence
  Description of Artificial Sequence: Synthetic epitope
EAEKAATITP

SEQ ID NO: 4630 - protein, 10 aa, Artificial Sequence
  Description of Artificial Sequence: Synthetic epitope
EAEKAQVAAE

SEQ ID NO: 4631 - protein, 10 aa, Artificial Sequence
  Description of Artificial Sequence: Synthetic epitope
EAEKASSQEV

SEQ ID NO: 4632 - protein, 10 aa, Artificial Sequence
  Description of Artificial Sequence: Synthetic epitope
EAEKATVPAG

SEQ ID NO: 4633 - protein, 10 aa, Artificial Sequence
  Description of Artificial Sequence: Synthetic epitope
EAEKKAISLL

SEQ ID NO: 4634 - protein, 10 aa, Artificial Sequence
  Description of Artificial Sequence: Synthetic epitope
EAELLVLRQK

SEQ ID NO: 4635 - protein, 10 aa, Artificial Sequence
  Description of Artificial Sequence: Synthetic epitope
EAELQLAAEA

SEQ ID NO: 4636 - protein, 10 aa, Artificial Sequence
  Description of Artificial Sequence: Synthetic epitope
EAELQVAQQE

SEQ ID NO: 4637 - protein, 10 aa, Artificial Sequence
  Description of Artificial Sequence: Synthetic epitope
EAELRSKASE

SEQ ID NO: 4638 - protein, 10 aa, Artificial Sequence
  Description of Artificial Sequence: Synthetic epitope
EAELSPVEQK

SEQ ID NO: 4639 - protein, 10 aa, Artificial Sequence
  Description of Artificial Sequence: Synthetic epitope
EAENNVGTEG

SEQ ID NO: 4640 - protein, 10 aa, Artificial Sequence
  Description of Artificial Sequence: Synthetic epitope
EAEQATRTMQ

SEQ ID NO: 4641 - protein, 10 aa, Artificial Sequence
  Description of Artificial Sequence: Synthetic epitope
EAEQDEVAAL

SEQ ID NO: 4642 - protein, 10 aa, Artificial Sequence
  Description of Artificial Sequence: Synthetic epitope
EAEQSGAAEG

SEQ ID NO: 4643 - protein, 10 aa, Artificial Sequence
  Description of Artificial Sequence: Synthetic epitope
EAERAAEAER

SEQ ID NO: 4644 - protein, 10 aa, Artificial Sequence
  Description of Artificial Sequence: Synthetic epitope
EAERAERAKE

SEQ ID NO: 4645 - protein, 10 aa, Artificial Sequence
  Description of Artificial Sequence: Synthetic epitope
EAERATRAKT

SEQ ID NO: 4646 - protein, 10 aa, Artificial Sequence
  Description of Artificial Sequence: Synthetic epitope
EAERLFSKSS

SEQ ID NO: 4647 - protein, 10 aa, Artificial Sequence
  Description of Artificial Sequence: Synthetic epitope
EAERVSLELE

SEQ ID NO: 4648 - protein, 10 aa, Artificial Sequence
  Description of Artificial Sequence: Synthetic epitope
EAESALSSVG

SEQ ID NO: 4649 - protein, 10 aa, Artificial Sequence
  Description of Artificial Sequence: Synthetic epitope
EAESDVKHRT

SEQ ID NO: 4650 - protein, 10 aa, Artificial Sequence
  Description of Artificial Sequence: Synthetic epitope
EAESKDALKD

SEQ ID NO: 4651 - protein, 10 aa, Artificial Sequence
  Description of Artificial Sequence: Synthetic epitope
EAESKLSFAT

SEQ ID NO: 4652 - protein, 10 aa, Artificial Sequence
  Description of Artificial Sequence: Synthetic epitope
EAESSQIQPT

SEQ ID NO: 4653 - protein, 10 aa, Artificial Sequence
  Description of Artificial Sequence: Synthetic epitope
EAESTTLSPQ

SEQ ID NO: 4654 - protein, 10 aa, Artificial Sequence
  Description of Artificial Sequence: Synthetic epitope
EAETGQLGSL

SEQ ID NO: 4655 - protein, 10 aa, Artificial Sequence
  Description of Artificial Sequence: Synthetic epitope
EAETTDITEE

SEQ ID NO: 4656 - protein, 10 aa, Artificial Sequence
  Description of Artificial Sequence: Synthetic epitope
EAEVLAKDSA

SEQ ID NO: 4657 - protein, 10 aa, Artificial Sequence
  Description of Artificial Sequence: Synthetic epitope
EAEVSRRLEN

SEQ ID NO: 4658 - protein, 10 aa, Artificial Sequence
  Description of Artificial Sequence: Synthetic epitope
EAEWEAGMTD

SEQ ID NO: 4659 - protein, 10 aa, Artificial Sequence
  Description of Artificial Sequence: Synthetic epitope
EAFAKAKGSG

SEQ ID NO: 4660 - protein, 10 aa, Artificial Sequence
  Description of Artificial Sequence: Synthetic epitope
EAFEEAKAED

SEQ ID NO: 4661 - protein, 10 aa, Artificial Sequence
  Description of Artificial Sequence: Synthetic epitope
EAFGKKAANR

SEQ ID NO: 4662 - protein, 10 aa, Artificial Sequence
  Description of Artificial Sequence: Synthetic epitope
EAFILRLQTQ

SEQ ID NO: 4663 - protein, 10 aa, Artificial Sequence
  Description of Artificial Sequence: Synthetic epitope
EAFKTAKEPI

SEQ ID NO: 4664 - protein, 10 aa, Artificial Sequence
  Description of Artificial Sequence: Synthetic epitope
EAFLMQASGV

SEQ ID NO: 4665 - protein, 10 aa, Artificial Sequence
  Description of Artificial Sequence: Synthetic epitope
EAFQFEKSQA

SEQ ID NO: 4666 - protein, 10 aa, Artificial Sequence
  Description of Artificial Sequence: Synthetic epitope
EAFRALASAQ

SEQ ID NO: 4667 - protein, 10 aa, Artificial Sequence
  Description of Artificial Sequence: Synthetic epitope
EAFTTSVRSY

SEQ ID NO: 4668 - protein, 10 aa, Artificial Sequence
  Description of Artificial Sequence: Synthetic epitope
EAFVSMIDNG

SEQ ID NO: 4669 - protein, 10 aa, Artificial Sequence
  Description of Artificial Sequence: Synthetic epitope
EAFVTSAYKK

SEQ ID NO: 4670 - protein, 10 aa, Artificial Sequence
  Description of Artificial Sequence: Synthetic epitope
EAGAGEQHQD

SEQ ID NO: 4671 - protein, 10 aa, Artificial Sequence
  Description of Artificial Sequence: Synthetic epitope
EAGASLQAYQ

SEQ ID NO: 4672 - protein, 10 aa, Artificial Sequence
  Description of Artificial Sequence: Synthetic epitope
EAGAVHEAPL

SEQ ID NO: 4673 - protein, 10 aa, Artificial Sequence
  Description of Artificial Sequence: Synthetic epitope
EAGEEVPDAG

SEQ ID NO: 4674 - protein, 10 aa, Artificial Sequence
  Description of Artificial Sequence: Synthetic epitope
EAGENDETVQ

SEQ ID NO: 4675 - protein, 10 aa, Artificial Sequence
  Description of Artificial Sequence: Synthetic epitope
EAGETQSQKT

SEQ ID NO: 4676 - protein, 10 aa, Artificial Sequence
  Description of Artificial Sequence: Synthetic epitope
EAGGRSQISV

SEQ ID NO: 4677 - protein, 10 aa, Artificial Sequence
  Description of Artificial Sequence: Synthetic epitope
EAGIQALKPP

SEQ ID NO: 4678 - protein, 10 aa, Artificial Sequence
  Description of Artificial Sequence: Synthetic epitope
EAGKAKIEEL

SEQ ID NO: 4679 - protein, 10 aa, Artificial Sequence
  Description of Artificial Sequence: Synthetic epitope
EAGKKHKVED

SEQ ID NO: 4680 - protein, 10 aa, Artificial Sequence
  Description of Artificial Sequence: Synthetic epitope
EAGKSVEKAD

SEQ ID NO: 4681 - protein, 10 aa, Artificial Sequence
  Description of Artificial Sequence: Synthetic epitope
EAGKVAIKES

SEQ ID NO: 4682 - protein, 10 aa, Artificial Sequence
  Description of Artificial Sequence: Synthetic epitope
EAGQSNIAPQ

SEQ ID NO: 4683 - protein, 10 aa, Artificial Sequence
  Description of Artificial Sequence: Synthetic epitope
EAGQSRSSPL

SEQ ID NO: 4684 - protein, 10 aa, Artificial Sequence
  Description of Artificial Sequence: Synthetic epitope
EAGSHSHASS

SEQ ID NO: 4685 - protein, 10 aa, Artificial Sequence
  Description of Artificial Sequence: Synthetic epitope
EAGTEAEQVT

SEQ ID NO: 4686 - protein, 10 aa, Artificial Sequence
  Description of Artificial Sequence: Synthetic epitope
EAHGEATATA

SEQ ID NO: 4687 - protein, 10 aa, Artificial Sequence
  Description of Artificial Sequence: Synthetic epitope
EAHGTIQTEK

SEQ ID NO: 4688 - protein, 10 aa, Artificial Sequence
  Description of Artificial Sequence: Synthetic epitope
EAHKQEKKEK

SEQ ID NO: 4689 - protein, 10 aa, Artificial Sequence
  Description of Artificial Sequence: Synthetic epitope
EAHKSLSTVE

SEQ ID NO: 4690 - protein, 10 aa, Artificial Sequence
  Description of Artificial Sequence: Synthetic epitope
EAHSIILSIL

SEQ ID NO: 4691 - protein, 10 aa, Artificial Sequence
  Description of Artificial Sequence: Synthetic epitope
EAHSIILSIL

SEQ ID NO: 4692 - protein, 10 aa, Artificial Sequence
  Description of Artificial Sequence: Synthetic epitope
EAHSTDEFKD

SEQ ID NO: 4693 - protein, 10 aa, Artificial Sequence
  Description of Artificial Sequence: Synthetic epitope
EAHVRLSWRL

SEQ ID NO: 4694 - protein, 10 aa, Artificial Sequence
  Description of Artificial Sequence: Synthetic epitope
EAIATARSAK

SEQ ID NO: 4695 - protein, 10 aa, Artificial Sequence
  Description of Artificial Sequence: Synthetic epitope
EAIDAIFLTT

SEQ ID NO: 4696 - protein, 10 aa, Artificial Sequence
  Description of Artificial Sequence: Synthetic epitope
EAIDVKLLSA

SEQ ID NO: 4697 - protein, 10 aa, Artificial Sequence
  Description of Artificial Sequence: Synthetic epitope
EAIELKLSES

SEQ ID NO: 4698 - protein, 10 aa, Artificial Sequence
  Description of Artificial Sequence: Synthetic epitope
EAIESAIGGN

SEQ ID NO: 4699 - protein, 10 aa, Artificial Sequence
  Description of Artificial Sequence: Synthetic epitope
EAIESSLEVE

SEQ ID NO: 4700 - protein, 10 aa, Artificial Sequence
  Description of Artificial Sequence: Synthetic epitope
EAIETQLAEY

SEQ ID NO: 4701 - protein, 10 aa, Artificial Sequence
  Description of Artificial Sequence: Synthetic epitope
EAIGMSTEEL

SEQ ID NO: 4702 - protein, 10 aa, Artificial Sequence
  Description of Artificial Sequence: Synthetic epitope
EAIIQAKNKE

SEQ ID NO: 4703 - protein, 10 aa, Artificial Sequence
  Description of Artificial Sequence: Synthetic epitope
EAIKKQDNNT

SEQ ID NO: 4704 - protein, 10 aa, Artificial Sequence
  Description of Artificial Sequence: Synthetic epitope
EAIKKTRAQA

SEQ ID NO: 4705 - protein, 10 aa, Artificial Sequence
  Description of Artificial Sequence: Synthetic epitope
EAILNLMENS

SEQ ID NO: 4706 - protein, 10 aa, Artificial Sequence
  Description of Artificial Sequence: Synthetic epitope
EAILRRLVAL

SEQ ID NO: 4707 - protein, 10 aa, Artificial Sequence
  Description of Artificial Sequence: Synthetic epitope
EAILSRASVK

SEQ ID NO: 4708 - protein, 10 aa, Artificial Sequence
  Description of Artificial Sequence: Synthetic epitope
EAINQAIANE

SEQ ID NO: 4709 - protein, 10 aa, Artificial Sequence
  Description of Artificial Sequence: Synthetic epitope
EAIQRNSASQ

SEQ ID NO: 4710 - protein, 10 aa, Artificial Sequence
  Description of Artificial Sequence: Synthetic epitope
EAIRASREEI

SEQ ID NO: 4711 - protein, 10 aa, Artificial Sequence
  Description of Artificial Sequence: Synthetic epitope
EAISKEPIVM

SEQ ID NO: 4712 - protein, 10 aa, Artificial Sequence
  Description of Artificial Sequence: Synthetic epitope
EAISNQVIES

SEQ ID NO: 4713 - protein, 10 aa, Artificial Sequence
  Description of Artificial Sequence: Synthetic epitope
EAISSEQRAM

SEQ ID NO: 4714 - protein, 10 aa, Artificial Sequence
  Description of Artificial Sequence: Synthetic epitope
EAISVKQEVT

SEQ ID NO: 4715 - protein, 10 aa, Artificial Sequence
  Description of Artificial Sequence: Synthetic epitope
EAITEAAVDS

SEQ ID NO: 4716 - protein, 10 aa, Artificial Sequence
  Description of Artificial Sequence: Synthetic epitope
EAITVQQKQM

SEQ ID NO: 4717 - protein, 10 aa, Artificial Sequence
  Description of Artificial Sequence: Synthetic epitope
EAIVKTASRT

SEQ ID NO: 4718 - protein, 10 aa, Artificial Sequence
  Description of Artificial Sequence: Synthetic epitope
EAIVSASSLP

SEQ ID NO: 4719 - protein, 10 aa, Artificial Sequence
  Description of Artificial Sequence: Synthetic epitope
EAIVSHEKNL

SEQ ID NO: 4720 - protein, 10 aa, Artificial Sequence
  Description of Artificial Sequence: Synthetic epitope
EAIVSVIAER

SEQ ID NO: 4721 - protein, 10 aa, Artificial Sequence
  Description of Artificial Sequence: Synthetic epitope
EAKAEKETEL

SEQ ID NO: 4722 - protein, 10 aa, Artificial Sequence
  Description of Artificial Sequence: Synthetic epitope
EAKAHHIGWQ

SEQ ID NO: 4723 - protein, 10 aa, Artificial Sequence
  Description of Artificial Sequence: Synthetic epitope
EAKEATKNGD

SEQ ID NO: 4724 - protein, 10 aa, Artificial Sequence
  Description of Artificial Sequence: Synthetic epitope
EAKEDIKSHS

SEQ ID NO: 4725 - protein, 10 aa, Artificial Sequence
  Description of Artificial Sequence: Synthetic epitope
EAKEISGVED

SEQ ID NO: 4726 - protein, 10 aa, Artificial Sequence
  Description of Artificial Sequence: Synthetic epitope
EAKENERKIN

SEQ ID NO: 4727 - protein, 10 aa, Artificial Sequence
  Description of Artificial Sequence: Synthetic epitope
EAKGLIFYDT

SEQ ID NO: 4728 - protein, 10 aa, Artificial Sequence
  Description of Artificial Sequence: Synthetic epitope
EAKHIHQQVK

SEQ ID NO: 4729 - protein, 10 aa, Artificial Sequence
  Description of Artificial Sequence: Synthetic epitope
EAKIKELTST

SEQ ID NO: 4730 - protein, 10 aa, Artificial Sequence
  Description of Artificial Sequence: Synthetic epitope
EAKKDRVAVQ

SEQ ID NO: 4731 - protein, 10 aa, Artificial Sequence
  Description of Artificial Sequence: Synthetic epitope
EAKKENISKE

SEQ ID NO: 4732 - protein, 10 aa, Artificial Sequence
  Description of Artificial Sequence: Synthetic epitope
EAKKPAALKP

SEQ ID NO: 4733 - protein, 10 aa, Artificial Sequence
  Description of Artificial Sequence: Synthetic epitope
EAKKQQAIMA

SEQ ID NO: 4734 - protein, 10 aa, Artificial Sequence
  Description of Artificial Sequence: Synthetic epitope
EAKLQQTEAE

SEQ ID NO: 4735 - protein, 10 aa, Artificial Sequence
  Description of Artificial Sequence: Synthetic epitope
EAKLSKTKKR

SEQ ID NO: 4736 - protein, 10 aa, Artificial Sequence
  Description of Artificial Sequence: Synthetic epitope
EAKMMIRPKH

SEQ ID NO: 4737 - protein, 10 aa, Artificial Sequence
  Description of Artificial Sequence: Synthetic epitope
EAKMMVANKP

SEQ ID NO: 4738 - protein, 10 aa, Artificial Sequence
  Description of Artificial Sequence: Synthetic epitope
EAKMRIIESN

SEQ ID NO: 4739 - protein, 10 aa, Artificial Sequence
  Description of Artificial Sequence: Synthetic epitope
EAKQAGETIA

SEQ ID NO: 4740 - protein, 10 aa, Artificial Sequence
  Description of Artificial Sequence: Synthetic epitope
EAKQDKSKEA

SEQ ID NO: 4741 - protein, 10 aa, Artificial Sequence
  Description of Artificial Sequence: Synthetic epitope
EAKQQAALSA

SEQ ID NO: 4742 - protein, 10 aa, Artificial Sequence
  Description of Artificial Sequence: Synthetic epitope
EAKQSESLSE

SEQ ID NO: 4743 - protein, 10 aa, Artificial Sequence
  Description of Artificial Sequence: Synthetic epitope
EAKRSSADKG

SEQ ID NO: 4744 - protein, 10 aa, Artificial Sequence
  Description of Artificial Sequence: Synthetic epitope
EAKTGADTTA

SEQ ID NO: 4745 - protein, 10 aa, Artificial Sequence
  Description of Artificial Sequence: Synthetic epitope
EAKTRRKVAG

SEQ ID NO: 4746 - protein, 10 aa, Artificial Sequence
  Description of Artificial Sequence: Synthetic epitope
EAKVAMLSGA

SEQ ID NO: 4747 - protein, 10 aa, Artificial Sequence
  Description of Artificial Sequence: Synthetic epitope
EAKVTANNDK

SEQ ID NO: 4748 - protein, 10 aa, Artificial Sequence
  Description of Artificial Sequence: Synthetic epitope
EALAEELEAP

SEQ ID NO: 4749 - protein, 10 aa, Artificial Sequence
  Description of Artificial Sequence: Synthetic epitope
EALANRAATT

SEQ ID NO: 4750 - protein, 10 aa, Artificial Sequence
  Description of Artificial Sequence: Synthetic epitope
EALARSANAL

SEQ ID NO: 4751 - protein, 10 aa, Artificial Sequence
  Description of Artificial Sequence: Synthetic epitope
EALASTVTLT

SEQ ID NO: 4752 - protein, 10 aa, Artificial Sequence
  Description of Artificial Sequence: Synthetic epitope
EALDDSEDIL

SEQ ID NO: 4753 - protein, 10 aa, Artificial Sequence
  Description of Artificial Sequence: Synthetic epitope
EALDVLGAVL

SEQ ID NO: 4754 - protein, 10 aa, Artificial Sequence
  Description of Artificial Sequence: Synthetic epitope
EALEAKINKK

SEQ ID NO: 4755 - protein, 10 aa, Artificial Sequence
  Description of Artificial Sequence: Synthetic epitope
EALEEASSIK

SEQ ID NO: 4756 - protein, 10 aa, Artificial Sequence
  Description of Artificial Sequence: Synthetic epitope
EALEKNDMEQ

SEQ ID NO: 4757 - protein, 10 aa, Artificial Sequence
  Description of Artificial Sequence: Synthetic epitope
EALEKQKKVR

SEQ ID NO: 4758 - protein, 10 aa, Artificial Sequence
  Description of Artificial Sequence: Synthetic epitope
EALELSEKLY

SEQ ID NO: 4759 - protein, 10 aa, Artificial Sequence
  Description of Artificial Sequence: Synthetic epitope
EALFRQAGTR

SEQ ID NO: 4760 - protein, 10 aa, Artificial Sequence
  Description of Artificial Sequence: Synthetic epitope
EALFSKSSRG

SEQ ID NO: 4761 - protein, 10 aa, Artificial Sequence
  Description of Artificial Sequence: Synthetic epitope
EALGAIARPA

SEQ ID NO: 4762 - protein, 10 aa, Artificial Sequence
  Description of Artificial Sequence: Synthetic epitope
EALGFMRNQH

SEQ ID NO: 4763 - protein, 10 aa, Artificial Sequence
  Description of Artificial Sequence: Synthetic epitope
EALKALSTFF

SEQ ID NO: 4764 - protein, 10 aa, Artificial Sequence
  Description of Artificial Sequence: Synthetic epitope
EALKKAIDTS

SEQ ID NO: 4765 - protein, 10 aa, Artificial Sequence
  Description of Artificial Sequence: Synthetic epitope
EALKLARQIA

SEQ ID NO: 4766 - protein, 10 aa, Artificial Sequence
  Description of Artificial Sequence: Synthetic epitope
EALKRRTVAN

SEQ ID NO: 4767 - protein, 10 aa, Artificial Sequence
  Description of Artificial Sequence: Synthetic epitope
EALKTISESS

SEQ ID NO: 4768 - protein, 10 aa, Artificial Sequence
  Description of Artificial Sequence: Synthetic epitope
EALKVADSKT

SEQ ID NO: 4769 - protein, 10 aa, Artificial Sequence
  Description of Artificial Sequence: Synthetic epitope
EALLNKAETR

SEQ ID NO: 4770 - protein, 10 aa, Artificial Sequence
  Description of Artificial Sequence: Synthetic epitope
EALLSGISAL

SEQ ID NO: 4771 - protein, 10 aa, Artificial Sequence
  Description of Artificial Sequence: Synthetic epitope
EALLSSAVDH

SEQ ID NO: 4772 - protein, 10 aa, Artificial Sequence
  Description of Artificial Sequence: Synthetic epitope
EALLSTLTSD

SEQ ID NO: 4773 - protein, 10 aa, Artificial Sequence
  Description of Artificial Sequence: Synthetic epitope
EALLTTQNKL

SEQ ID NO: 4774 - protein, 10 aa, Artificial Sequence
  Description of Artificial Sequence: Synthetic epitope
EALMAALRQA

SEQ ID NO: 4775 - protein, 10 aa, Artificial Sequence
  Description of Artificial Sequence: Synthetic epitope
EALMRRAVSL

SEQ ID NO: 4776 - protein, 10 aa, Artificial Sequence
  Description of Artificial Sequence: Synthetic epitope
EALNERHSII

SEQ ID NO: 4777 - protein, 10 aa, Artificial Sequence
  Description of Artificial Sequence: Synthetic epitope
EALPEQVAPE

SEQ ID NO: 4778 - protein, 10 aa, Artificial Sequence
  Description of Artificial Sequence: Synthetic epitope
EALPQVESQV

SEQ ID NO: 4779 - protein, 10 aa, Artificial Sequence
  Description of Artificial Sequence: Synthetic epitope
EALQQAQEID

SEQ ID NO: 4780 - protein, 10 aa, Artificial Sequence
  Description of Artificial Sequence: Synthetic epitope
EALQTTVSRW

SEQ ID NO: 4781 - protein, 10 aa, Artificial Sequence
  Description of Artificial Sequence: Synthetic epitope
EALQVSANKV

SEQ ID NO: 4782 - protein, 10 aa, Artificial Sequence
  Description of Artificial Sequence: Synthetic epitope
EALREQMVGM

SEQ ID NO: 4783 - protein, 10 aa, Artificial Sequence
  Description of Artificial Sequence: Synthetic epitope
EALRSASYTV

SEQ ID NO: 4784 - protein, 10 aa, Artificial Sequence
  Description of Artificial Sequence: Synthetic epitope
EALRSLQQLQ

SEQ ID NO: 4785 - protein, 10 aa, Artificial Sequence
  Description of Artificial Sequence: Synthetic epitope
EALRTAFESG

SEQ ID NO: 4786 - protein, 10 aa, Artificial Sequence
  Description of Artificial Sequence: Synthetic epitope
EALRTEADTI

SEQ ID NO: 4787 - protein, 10 aa, Artificial Sequence
  Description of Artificial Sequence: Synthetic epitope
EALSFSKAKE

SEQ ID NO: 4788 - protein, 10 aa, Artificial Sequence
  Description of Artificial Sequence: Synthetic epitope
EALSGAGSSK

SEQ ID NO: 4789 - protein, 10 aa, Artificial Sequence
  Description of Artificial Sequence: Synthetic epitope
EALSIESVAS

SEQ ID NO: 4790 - protein, 10 aa, Artificial Sequence
  Description of Artificial Sequence: Synthetic epitope
EALSKSKSNI

SEQ ID NO: 4791 - protein, 10 aa, Artificial Sequence
  Description of Artificial Sequence: Synthetic epitope
EALTKAEGRG

SEQ ID NO: 4792 - protein, 10 aa, Artificial Sequence
  Description of Artificial Sequence: Synthetic epitope
EALTKTITRY

SEQ ID NO: 4793 - protein, 10 aa, Artificial Sequence
  Description of Artificial Sequence: Synthetic epitope
EALVAEKEKE

SEQ ID NO: 4794 - protein, 10 aa, Artificial Sequence
  Description of Artificial Sequence: Synthetic epitope
EALVEGVKAI

SEQ ID NO: 4795 - protein, 10 aa, Artificial Sequence
  Description of Artificial Sequence: Synthetic epitope
EALVKLMEIF

SEQ ID NO: 4796 - protein, 10 aa, Artificial Sequence
  Description of Artificial Sequence: Synthetic epitope
EALVSAAVKA

SEQ ID NO: 4797 - protein, 10 aa, Artificial Sequence
  Description of Artificial Sequence: Synthetic epitope
EALVTVTNIE

SEQ ID NO: 4798 - protein, 10 aa, Artificial Sequence
  Description of Artificial Sequence: Synthetic epitope
EAMAELAIAD

SEQ ID NO: 4799 - protein, 10 aa, Artificial Sequence
  Description of Artificial Sequence: Synthetic epitope
EAMARITGAE

SEQ ID NO: 4800 - protein, 10 aa, Artificial Sequence
  Description of Artificial Sequence: Synthetic epitope
EAMASSNMHE

SEQ ID NO: 4801 - protein, 10 aa, Artificial Sequence
  Description of Artificial Sequence: Synthetic epitope
EAMEELLQNE

SEQ ID NO: 4802 - protein, 10 aa, Artificial Sequence
  Description of Artificial Sequence: Synthetic epitope
EAMEMMESQT

SEQ ID NO: 4803 - protein, 10 aa, Artificial Sequence
  Description of Artificial Sequence: Synthetic epitope
EAMKAKATEL

SEQ ID NO: 4804 - protein, 10 aa, Artificial Sequence
  Description of Artificial Sequence: Synthetic epitope
EAMPMVRIVP

SEQ ID NO: 4805 - protein, 10 aa, Artificial Sequence
  Description of Artificial Sequence: Synthetic epitope
EAMSASLQQH

SEQ ID NO: 4806 - protein, 10 aa, Artificial Sequence
  Description of Artificial Sequence: Synthetic epitope
EANAKAPREA

SEQ ID NO: 4807 - protein, 10 aa, Artificial Sequence
  Description of Artificial Sequence: Synthetic epitope
EANAQLAEQA

SEQ ID NO: 4808 - protein, 10 aa, Artificial Sequence
  Description of Artificial Sequence: Synthetic epitope
EANEALVKAL

SEQ ID NO: 4809 - protein, 10 aa, Artificial Sequence
  Description of Artificial Sequence: Synthetic epitope
EANEYTASNQ

SEQ ID NO: 4810 - protein, 10 aa, Artificial Sequence
  Description of Artificial Sequence: Synthetic epitope
EANMDIVYKD

SEQ ID NO: 4811 - protein, 10 aa, Artificial Sequence
  Description of Artificial Sequence: Synthetic epitope
EANQLMQYDQ

SEQ ID NO: 4812 - protein, 10 aa, Artificial Sequence
  Description of Artificial Sequence: Synthetic epitope
EANQSDTSVS

SEQ ID NO: 4813 - protein, 10 aa, Artificial Sequence
  Description of Artificial Sequence: Synthetic epitope
EANRIEDARE

SEQ ID NO: 4814 - protein, 10 aa, Artificial Sequence
  Description of Artificial Sequence: Synthetic epitope
EANRRFTPTT

SEQ ID NO: 4815 - protein, 10 aa, Artificial Sequence
  Description of Artificial Sequence: Synthetic epitope
EANSFETSQQ

SEQ ID NO: 4816 - protein, 10 aa, Artificial Sequence
  Description of Artificial Sequence: Synthetic epitope
EANSTKAQKQ

SEQ ID NO: 4817 - protein, 10 aa, Artificial Sequence
  Description of Artificial Sequence: Synthetic epitope
EANVAERAAL

SEQ ID NO: 4818 - protein, 10 aa, Artificial Sequence
  Description of Artificial Sequence: Synthetic epitope
EAPAKNIATS

SEQ ID NO: 4819 - protein, 10 aa, Artificial Sequence
  Description of Artificial Sequence: Synthetic epitope
EAPLASSANG

SEQ ID NO: 4820 - protein, 10 aa, Artificial Sequence
  Description of Artificial Sequence: Synthetic epitope
EAPQGSATAA

SEQ ID NO: 4821 - protein, 10 aa, Artificial Sequence
  Description of Artificial Sequence: Synthetic epitope
EAPRMRSDNK

SEQ ID NO: 4822 - protein, 10 aa, Artificial Sequence
  Description of Artificial Sequence: Synthetic epitope
EAPSAKKAEI

SEQ ID NO: 4823 - protein, 10 aa, Artificial Sequence
  Description of Artificial Sequence: Synthetic epitope
EAPSNKATAA

SEQ ID NO: 4824 - protein, 10 aa, Artificial Sequence
  Description of Artificial Sequence: Synthetic epitope
EAPTLATLDP

SEQ ID NO: 4825 - protein, 10 aa, Artificial Sequence
  Description of Artificial Sequence: Synthetic epitope
EAQAKLAEEQ

SEQ ID NO: 4826 - protein, 10 aa, Artificial Sequence
  Description of Artificial Sequence: Synthetic epitope
EAQDVKDVDQ

SEQ ID NO: 4827 - protein, 10 aa, Artificial Sequence
  Description of Artificial Sequence: Synthetic epitope
EAQEAQAGKK

SEQ ID NO: 4828 - protein, 10 aa, Artificial Sequence
  Description of Artificial Sequence: Synthetic epitope
EAQEASFQKK

SEQ ID NO: 4829 - protein, 10 aa, Artificial Sequence
  Description of Artificial Sequence: Synthetic epitope
EAQEVEGETQ

SEQ ID NO: 4830 - protein, 10 aa, Artificial Sequence
  Description of Artificial Sequence: Synthetic epitope
EAQFSKAASS

SEQ ID NO: 4831 - protein, 10 aa, Artificial Sequence
  Description of Artificial Sequence: Synthetic epitope
EAQHRQSAAL

SEQ ID NO: 4832 - protein, 10 aa, Artificial Sequence
  Description of Artificial Sequence: Synthetic epitope
EAQKAEKLLE

SEQ ID NO: 4833 - protein, 10 aa, Artificial Sequence
  Description of Artificial Sequence: Synthetic epitope
EAQKQSIESG

SEQ ID NO: 4834 - protein, 10 aa, Artificial Sequence
  Description of Artificial Sequence: Synthetic epitope
EAQLDDAVAE

SEQ ID NO: 4835 - protein, 10 aa, Artificial Sequence
  Description of Artificial Sequence: Synthetic epitope
EAQLEKSRLL

SEQ ID NO: 4836 - protein, 10 aa, Artificial Sequence
  Description of Artificial Sequence: Synthetic epitope
EAQLGDVRAD

SEQ ID NO: 4837 - protein, 10 aa, Artificial Sequence
  Description of Artificial Sequence: Synthetic epitope
EAQNKITVPF

SEQ ID NO: 4838 - protein, 10 aa, Artificial Sequence
  Description of Artificial Sequence: Synthetic epitope
EAQPTARLPS

SEQ ID NO: 4839 - protein, 10 aa, Artificial Sequence
  Description of Artificial Sequence: Synthetic epitope
EAQQALGSAA

SEQ ID NO: 4840 - protein, 10 aa, Artificial Sequence
  Description of Artificial Sequence: Synthetic epitope
EAQQESKGED

SEQ ID NO: 4841 - protein, 10 aa, Artificial Sequence
  Description of Artificial Sequence: Synthetic epitope
EAQQLAGVRR

SEQ ID NO: 4842 - protein, 10 aa, Artificial Sequence
  Description of Artificial Sequence: Synthetic epitope
EAQSNSFSES

SEQ ID NO: 4843 - protein, 10 aa, Artificial Sequence
  Description of Artificial Sequence: Synthetic epitope
EAQSSALFKQ

SEQ ID NO: 4844 - protein, 10 aa, Artificial Sequence
  Description of Artificial Sequence: Synthetic epitope
EAQTKAQHQQ

SEQ ID NO: 4845 - protein, 10 aa, Artificial Sequence
  Description of Artificial Sequence: Synthetic epitope
EAQTPEASQA

SEQ ID NO: 4846 - protein, 10 aa, Artificial Sequence
  Description of Artificial Sequence: Synthetic epitope
EAQTTLTTND

SEQ ID NO: 4847 - protein, 10 aa, Artificial Sequence
  Description of Artificial Sequence: Synthetic epitope
EAQVSVQPNF

SEQ ID NO: 4848 - protein, 10 aa, Artificial Sequence
  Description of Artificial Sequence: Synthetic epitope
EARAEAEHQR

SEQ ID NO: 4849 - protein, 10 aa, Artificial Sequence
  Description of Artificial Sequence: Synthetic epitope
EARAKTGGTV

SEQ ID NO: 4850 - protein, 10 aa, Artificial Sequence
  Description of Artificial Sequence: Synthetic epitope
EAREQKERFE

SEQ ID NO: 4851 - protein, 10 aa, Artificial Sequence
  Description of Artificial Sequence: Synthetic epitope
EARETARRLL

SEQ ID NO: 4852 - protein, 10 aa, Artificial Sequence
  Description of Artificial Sequence: Synthetic epitope
EARFSTRATK

SEQ ID NO: 4853 - protein, 10 aa, Artificial Sequence
  Description of Artificial Sequence: Synthetic epitope
EARLSSAAEK

SEQ ID NO: 4854 - protein, 10 aa, Artificial Sequence
  Description of Artificial Sequence: Synthetic epitope
EARLVESNNA

SEQ ID NO: 4855 - protein, 10 aa, Artificial Sequence
  Description of Artificial Sequence: Synthetic epitope
EARQHALARQ

SEQ ID NO: 4856 - protein, 10 aa, Artificial Sequence
  Description of Artificial Sequence: Synthetic epitope
EARRLVSTED

SEQ ID NO: 4857 - protein, 10 aa, Artificial Sequence
  Description of Artificial Sequence: Synthetic epitope
EARSELAKEL

SEQ ID NO: 4858 - protein, 10 aa, Artificial Sequence
  Description of Artificial Sequence: Synthetic epitope
EARSKMDVAQ

SEQ ID NO: 4859 - protein, 10 aa, Artificial Sequence
  Description of Artificial Sequence: Synthetic epitope
EARTPQRDLV

SEQ ID NO: 4860 - protein, 10 aa, Artificial Sequence
  Description of Artificial Sequence: Synthetic epitope
EARTTNLRMD

SEQ ID NO: 4861 - protein, 10 aa, Artificial Sequence
  Description of Artificial Sequence: Synthetic epitope
EASAAGLIRS

SEQ ID NO: 4862 - protein, 10 aa, Artificial Sequence
  Description of Artificial Sequence: Synthetic epitope
EASAAPHAMR

SEQ ID NO: 4863 - protein, 10 aa, Artificial Sequence
  Description of Artificial Sequence: Synthetic epitope
EASAAQASLS

SEQ ID NO: 4864 - protein, 10 aa, Artificial Sequence
  Description of Artificial Sequence: Synthetic epitope
EASAASSDTS

SEQ ID NO: 4865 - protein, 10 aa, Artificial Sequence
  Description of Artificial Sequence: Synthetic epitope
EASASKGLEK

SEQ ID NO: 4866 - protein, 10 aa, Artificial Sequence
  Description of Artificial Sequence: Synthetic epitope
EASASSAFFD

SEQ ID NO: 4867 - protein, 10 aa, Artificial Sequence
  Description of Artificial Sequence: Synthetic epitope
EASEAKTSSL

SEQ ID NO: 4868 - protein, 10 aa, Artificial Sequence
  Description of Artificial Sequence: Synthetic epitope
EASEEAASLE

SEQ ID NO: 4869 - protein, 10 aa, Artificial Sequence
  Description of Artificial Sequence: Synthetic epitope
EASEEAASLE

SEQ ID NO: 4870 - protein, 10 aa, Artificial Sequence
  Description of Artificial Sequence: Synthetic epitope
EASEENASSG

SEQ ID NO: 4871 - protein, 10 aa, Artificial Sequence
  Description of Artificial Sequence: Synthetic epitope
EASEKSEQAA

SEQ ID NO: 4872 - protein, 10 aa, Artificial Sequence
  Description of Artificial Sequence: Synthetic epitope
EASESSLDEA

SEQ ID NO: 4873 - protein, 10 aa, Artificial Sequence
  Description of Artificial Sequence: Synthetic epitope
EASGLSADSL

SEQ ID NO: 4874 - protein, 10 aa, Artificial Sequence
  Description of Artificial Sequence: Synthetic epitope
EASGTLAALY

SEQ ID NO: 4875 - protein, 10 aa, Artificial Sequence
  Description of Artificial Sequence: Synthetic epitope
EASHLTTSQE

SEQ ID NO: 4876 - protein, 10 aa, Artificial Sequence
  Description of Artificial Sequence: Synthetic epitope
EASKAYSSVD

SEQ ID NO: 4877 - protein, 10 aa, Artificial Sequence
  Description of Artificial Sequence: Synthetic epitope
EASKEAALAN

SEQ ID NO: 4878 - protein, 10 aa, Artificial Sequence
  Description of Artificial Sequence: Synthetic epitope
EASKTLELID

SEQ ID NO: 4879 - protein, 10 aa, Artificial Sequence
  Description of Artificial Sequence: Synthetic epitope
EASKVLMLLS

SEQ ID NO: 4880 - protein, 10 aa, Artificial Sequence
  Description of Artificial Sequence: Synthetic epitope
EASLESAKVE

SEQ ID NO: 4881 - protein, 10 aa, Artificial Sequence
  Description of Artificial Sequence: Synthetic epitope
EASLQDSLSK

SEQ ID NO: 4882 - protein, 10 aa, Artificial Sequence
  Description of Artificial Sequence: Synthetic epitope
EASNAKQSIQ

SEQ ID NO: 4883 - protein, 10 aa, Artificial Sequence
  Description of Artificial Sequence: Synthetic epitope
EASNGSTVAA

SEQ ID NO: 4884 - protein, 10 aa, Artificial Sequence
  Description of Artificial Sequence: Synthetic epitope
EASNSSRETE

SEQ ID NO: 4885 - protein, 10 aa, Artificial Sequence
  Description of Artificial Sequence: Synthetic epitope
EASQEESAGF

SEQ ID NO: 4886 - protein, 10 aa, Artificial Sequence
  Description of Artificial Sequence: Synthetic epitope
EASQELLAQL

SEQ ID NO: 4887 - protein, 10 aa, Artificial Sequence
  Description of Artificial Sequence: Synthetic epitope
EASQSAEISE

SEQ ID NO: 4888 - protein, 10 aa, Artificial Sequence
  Description of Artificial Sequence: Synthetic epitope
EASQTQNPRS

SEQ ID NO: 4889 - protein, 10 aa, Artificial Sequence
  Description of Artificial Sequence: Synthetic epitope
EASQVLSASE

SEQ ID NO: 4890 - protein, 10 aa, Artificial Sequence
  Description of Artificial Sequence: Synthetic epitope
EASRTEARDQ

SEQ ID NO: 4891 - protein, 10 aa, Artificial Sequence
  Description of Artificial Sequence: Synthetic epitope
EASSDQTAQG

SEQ ID NO: 4892 - protein, 10 aa, Artificial Sequence
  Description of Artificial Sequence: Synthetic epitope
EASSEELAEA

SEQ ID NO: 4893 - protein, 10 aa, Artificial Sequence
  Description of Artificial Sequence: Synthetic epitope
EASSESSGHK

SEQ ID NO: 4894 - protein, 10 aa, Artificial Sequence
  Description of Artificial Sequence: Synthetic epitope
EASSETTSEE

SEQ ID NO: 4895 - protein, 10 aa, Artificial Sequence
  Description of Artificial Sequence: Synthetic epitope
EASSKDHASQ

SEQ ID NO: 4896 - protein, 10 aa, Artificial Sequence
  Description of Artificial Sequence: Synthetic epitope
EASSKTTSVL

SEQ ID NO: 4897 - protein, 10 aa, Artificial Sequence
  Description of Artificial Sequence: Synthetic epitope
EASSLLSSGV

SEQ ID NO: 4898 - protein, 10 aa, Artificial Sequence
  Description of Artificial Sequence: Synthetic epitope
EASSRHVESS

SEQ ID NO: 4899 - protein, 10 aa, Artificial Sequence
  Description of Artificial Sequence: Synthetic epitope
EASSTYQRIA

SEQ ID NO: 4900 - protein, 10 aa, Artificial Sequence
  Description of Artificial Sequence: Synthetic epitope
EASTMTNQAE

SEQ ID NO: 4901 - protein, 10 aa, Artificial Sequence
  Description of Artificial Sequence: Synthetic epitope
EASTSPTATK

SEQ ID NO: 4902 - protein, 10 aa, Artificial Sequence
  Description of Artificial Sequence: Synthetic epitope
EASVEDLLND

SEQ ID NO: 4903 - protein, 10 aa, Artificial Sequence
  Description of Artificial Sequence: Synthetic epitope
EASVLRTAVA

SEQ ID NO: 4904 - protein, 10 aa, Artificial Sequence
  Description of Artificial Sequence: Synthetic epitope
EASVPKYKKH

SEQ ID NO: 4905 - protein, 10 aa, Artificial Sequence
  Description of Artificial Sequence: Synthetic epitope
EATAAMKFIA

SEQ ID NO: 4906 - protein, 10 aa, Artificial Sequence
  Description of Artificial Sequence: Synthetic epitope
EATAATEKGE

SEQ ID NO: 4907 - protein, 10 aa, Artificial Sequence
  Description of Artificial Sequence: Synthetic epitope
EATADDAETS

SEQ ID NO: 4908 - protein, 10 aa, Artificial Sequence
  Description of Artificial Sequence: Synthetic epitope
EATAETTSSE

SEQ ID NO: 4909 - protein, 10 aa, Artificial Sequence
  Description of Artificial Sequence: Synthetic epitope
EATAEVLGEV

SEQ ID NO: 4910 - protein, 10 aa, Artificial Sequence
  Description of Artificial Sequence: Synthetic epitope
EATAGAAINN

SEQ ID NO: 4911 - protein, 10 aa, Artificial Sequence
  Description of Artificial Sequence: Synthetic epitope
EATASSRARI

SEQ ID NO: 4912 - protein, 10 aa, Artificial Sequence
  Description of Artificial Sequence: Synthetic epitope
EATATDAEAR

SEQ ID NO: 4913 - protein, 10 aa, Artificial Sequence
  Description of Artificial Sequence: Synthetic epitope
EATDKIREAN

SEQ ID NO: 4914 - protein, 10 aa, Artificial Sequence
  Description of Artificial Sequence: Synthetic epitope
EATEAAEYQE

SEQ ID NO: 4915 - protein, 10 aa, Artificial Sequence
  Description of Artificial Sequence: Synthetic epitope
EATERTTSIA

SEQ ID NO: 4916 - protein, 10 aa, Artificial Sequence
  Description of Artificial Sequence: Synthetic epitope
EATESRHKYE

SEQ ID NO: 4917 - protein, 10 aa, Artificial Sequence
  Description of Artificial Sequence: Synthetic epitope
EATESSKTEF

SEQ ID NO: 4918 - protein, 10 aa, Artificial Sequence
  Description of Artificial Sequence: Synthetic epitope
EATEVKYNAS

SEQ ID NO: 4919 - protein, 10 aa, Artificial Sequence
  Description of Artificial Sequence: Synthetic epitope
EATGAKVTET

SEQ ID NO: 4920 - protein, 10 aa, Artificial Sequence
  Description of Artificial Sequence: Synthetic epitope
EATKKSKEKE

SEQ ID NO: 4921 - protein, 10 aa, Artificial Sequence
  Description of Artificial Sequence: Synthetic epitope
EATKTLNRGI

SEQ ID NO: 4922 - protein, 10 aa, Artificial Sequence
  Description of Artificial Sequence: Synthetic epitope
EATLNEATDS

SEQ ID NO: 4923 - protein, 10 aa, Artificial Sequence
  Description of Artificial Sequence: Synthetic epitope
EATLRSLTAG

SEQ ID NO: 4924 - protein, 10 aa, Artificial Sequence
  Description of Artificial Sequence: Synthetic epitope
EATNSMNKNE

SEQ ID NO: 4925 - protein, 10 aa, Artificial Sequence
  Description of Artificial Sequence: Synthetic epitope
EATRISRTDS

SEQ ID NO: 4926 - protein, 10 aa, Artificial Sequence
  Description of Artificial Sequence: Synthetic epitope
EATSESATEL

SEQ ID NO: 4927 - protein, 10 aa, Artificial Sequence
  Description of Artificial Sequence: Synthetic epitope
EATSGTSELV

SEQ ID NO: 4928 - protein, 10 aa, Artificial Sequence
  Description of Artificial Sequence: Synthetic epitope
EATSLFIKLN

SEQ ID NO: 4929 - protein, 10 aa, Artificial Sequence
  Description of Artificial Sequence: Synthetic epitope
EATTDTYKAI

SEQ ID NO: 4930 - protein, 10 aa, Artificial Sequence
  Description of Artificial Sequence: Synthetic epitope
EATTESANGI

SEQ ID NO: 4931 - protein, 10 aa, Artificial Sequence
  Description of Artificial Sequence: Synthetic epitope
EATTKGISAR

SEQ ID NO: 4932 - protein, 10 aa, Artificial Sequence
  Description of Artificial Sequence: Synthetic epitope
EATTSTTGEG

SEQ ID NO: 4933 - protein, 10 aa, Artificial Sequence
  Description of Artificial Sequence: Synthetic epitope
EATVGEITHA

SEQ ID NO: 4934 - protein, 10 aa, Artificial Sequence
  Description of Artificial Sequence: Synthetic epitope
EATVRMAVQD

SEQ ID NO: 4935 - protein, 10 aa, Artificial Sequence
  Description of Artificial Sequence: Synthetic epitope
EATWLDQAIQ

SEQ ID NO: 4936 - protein, 10 aa, Artificial Sequence
  Description of Artificial Sequence: Synthetic epitope
EATYAYGGPE

SEQ ID NO: 4937 - protein, 10 aa, Artificial Sequence
  Description of Artificial Sequence: Synthetic epitope
EAVAAEIATE

SEQ ID NO: 4938 - protein, 10 aa, Artificial Sequence
  Description of Artificial Sequence: Synthetic epitope
EAVANSVKKG

SEQ ID NO: 4939 - protein, 10 aa, Artificial Sequence
  Description of Artificial Sequence: Synthetic epitope
EAVASTSGTL

SEQ ID NO: 4940 - protein, 10 aa, Artificial Sequence
  Description of Artificial Sequence: Synthetic epitope
EAVEAISLPS

SEQ ID NO: 4941 - protein, 10 aa, Artificial Sequence
  Description of Artificial Sequence: Synthetic epitope
EAVEQQDMDA

SEQ ID NO: 4942 - protein, 10 aa, Artificial Sequence
  Description of Artificial Sequence: Synthetic epitope
EAVEQQKVKN

SEQ ID NO: 4943 - protein, 10 aa, Artificial Sequence
  Description of Artificial Sequence: Synthetic epitope
EAVEWQQKAQ

SEQ ID NO: 4944 - protein, 10 aa, Artificial Sequence
  Description of Artificial Sequence: Synthetic epitope
EAVFKMLSNK

SEQ ID NO: 4945 - protein, 10 aa, Artificial Sequence
  Description of Artificial Sequence: Synthetic epitope
EAVGSYAENQ

SEQ ID NO: 4946 - protein, 10 aa, Artificial Sequence
  Description of Artificial Sequence: Synthetic epitope
EAVGVQLEPE

SEQ ID NO: 4947 - protein, 10 aa, Artificial Sequence
  Description of Artificial Sequence: Synthetic epitope
EAVGVTTSTT

SEQ ID NO: 4948 - protein, 10 aa, Artificial Sequence
  Description of Artificial Sequence: Synthetic epitope
EAVIEGLASD

SEQ ID NO: 4949 - protein, 10 aa, Artificial Sequence
  Description of Artificial Sequence: Synthetic epitope
EAVILLQEIG

SEQ ID NO: 4950 - protein, 10 aa, Artificial Sequence
  Description of Artificial Sequence: Synthetic epitope
EAVKAASDEL

SEQ ID NO: 4951 - protein, 10 aa, Artificial Sequence
  Description of Artificial Sequence: Synthetic epitope
EAVKEFIEPE

SEQ ID NO: 4952 - protein, 10 aa, Artificial Sequence
  Description of Artificial Sequence: Synthetic epitope
EAVKNATNEQ

SEQ ID NO: 4953 - protein, 10 aa, Artificial Sequence
  Description of Artificial Sequence: Synthetic epitope
EAVKQTENRH

SEQ ID NO: 4954 - protein, 10 aa, Artificial Sequence
  Description of Artificial Sequence: Synthetic epitope
EAVLGSALDL

SEQ ID NO: 4955 - protein, 10 aa, Artificial Sequence
  Description of Artificial Sequence: Synthetic epitope
EAVLLTESSE

SEQ ID NO: 4956 - protein, 10 aa, Artificial Sequence
  Description of Artificial Sequence: Synthetic epitope
EAVMAVLREL

SEQ ID NO: 4957 - protein, 10 aa, Artificial Sequence
  Description of Artificial Sequence: Synthetic epitope
EAVQIKSQVP

SEQ ID NO: 4958 - protein, 10 aa, Artificial Sequence
  Description of Artificial Sequence: Synthetic epitope
EAVQKNQGRK

SEQ ID NO: 4959 - protein, 10 aa, Artificial Sequence
  Description of Artificial Sequence: Synthetic epitope
EAVRDKAAEE

SEQ ID NO: 4960 - protein, 10 aa, Artificial Sequence
  Description of Artificial Sequence: Synthetic epitope
EAVRQEKQKE

SEQ ID NO: 4961 - protein, 10 aa, Artificial Sequence
  Description of Artificial Sequence: Synthetic epitope
EAVRTIDNAD

SEQ ID NO: 4962 - protein, 10 aa, Artificial Sequence
  Description of Artificial Sequence: Synthetic epitope
EAVRTQSQLA

SEQ ID NO: 4963 - protein, 10 aa, Artificial Sequence
  Description of Artificial Sequence: Synthetic epitope
EAVSADSSDA

SEQ ID NO: 4964 - protein, 10 aa, Artificial Sequence
  Description of Artificial Sequence: Synthetic epitope
EAVSARRALE

SEQ ID NO: 4965 - protein, 10 aa, Artificial Sequence
  Description of Artificial Sequence: Synthetic epitope
EAVTQSLLSS

SEQ ID NO: 4966 - protein, 10 aa, Artificial Sequence
  Description of Artificial Sequence: Synthetic epitope
EAVVRTLMKI

SEQ ID NO: 4967 - protein, 10 aa, Artificial Sequence
  Description of Artificial Sequence: Synthetic epitope
EAVWKTEVAS

SEQ ID NO: 4968 - protein, 10 aa, Artificial Sequence
  Description of Artificial Sequence: Synthetic epitope
EAWKNRISTD

SEQ ID NO: 4969 - protein, 10 aa, Artificial Sequence
  Description of Artificial Sequence: Synthetic epitope
EAYKREIYQL

SEQ ID NO: 4970 - protein, 10 aa, Artificial Sequence
  Description of Artificial Sequence: Synthetic epitope
EAYLENIEKE

SEQ ID NO: 4971 - protein, 10 aa, Artificial Sequence
  Description of Artificial Sequence: Synthetic epitope
EAYVKEAEQQ

SEQ ID NO: 4972 - protein, 10 aa, Artificial Sequence
  Description of Artificial Sequence: Synthetic epitope
EAYVTETAEE

SEQ ID NO: 4973 - protein, 10 aa, Artificial Sequence
  Description of Artificial Sequence: Synthetic epitope
EAYWAQYRAN

SEQ ID NO: 4974 - protein, 10 aa, Artificial Sequence
  Description of Artificial Sequence: Synthetic epitope
EDAAEKAETD

SEQ ID NO: 4975 - protein, 10 aa, Artificial Sequence
  Description of Artificial Sequence: Synthetic epitope
EDAALTEALS

SEQ ID NO: 4976 - protein, 10 aa, Artificial Sequence
  Description of Artificial Sequence: Synthetic epitope
EDAAMKTEEP

SEQ ID NO: 4977 - protein, 10 aa, Artificial Sequence
  Description of Artificial Sequence: Synthetic epitope
EDADMLESEE

SEQ ID NO: 4978 - protein, 10 aa, Artificial Sequence
  Description of Artificial Sequence: Synthetic epitope
EDADSSVKED

SEQ ID NO: 4979 - protein, 10 aa, Artificial Sequence
  Description of Artificial Sequence: Synthetic epitope
EDAESLAPRS

SEQ ID NO: 4980 - protein, 10 aa, Artificial Sequence
  Description of Artificial Sequence: Synthetic epitope
EDAKAHRRNK

SEQ ID NO: 4981 - protein, 10 aa, Artificial Sequence
  Description of Artificial Sequence: Synthetic epitope
EDALSSQEVE

SEQ ID NO: 4982 - protein, 10 aa, Artificial Sequence
  Description of Artificial Sequence: Synthetic epitope
EDAMEQYKLQ

SEQ ID NO: 4983 - protein, 10 aa, Artificial Sequence
  Description of Artificial Sequence: Synthetic epitope
EDAMSTSMSK

SEQ ID NO: 4984 - protein, 10 aa, Artificial Sequence
  Description of Artificial Sequence: Synthetic epitope
EDAQSQSQAD

SEQ ID NO: 4985 - protein, 10 aa, Artificial Sequence
  Description of Artificial Sequence: Synthetic epitope
EDASEAQEVT

SEQ ID NO: 4986 - protein, 10 aa, Artificial Sequence
  Description of Artificial Sequence: Synthetic epitope
EDASSTEAAG

SEQ ID NO: 4987 - protein, 10 aa, Artificial Sequence
  Description of Artificial Sequence: Synthetic epitope
EDASTVKSAW

SEQ ID NO: 4988 - protein, 10 aa, Artificial Sequence
  Description of Artificial Sequence: Synthetic epitope
EDATKQAERY

SEQ ID NO: 4989 - protein, 10 aa, Artificial Sequence
  Description of Artificial Sequence: Synthetic epitope
EDAVRMQQLK

SEQ ID NO: 4990 - protein, 10 aa, Artificial Sequence
  Description of Artificial Sequence: Synthetic epitope
EDDARIVQRH

SEQ ID NO: 4991 - protein, 10 aa, Artificial Sequence
  Description of Artificial Sequence: Synthetic epitope
EDDEASRASK

SEQ ID NO: 4992 - protein, 10 aa, Artificial Sequence
  Description of Artificial Sequence: Synthetic epitope
EDDKEKMVGT

SEQ ID NO: 4993 - protein, 10 aa, Artificial Sequence
  Description of Artificial Sequence: Synthetic epitope
EDDNAQWHME

SEQ ID NO: 4994 - protein, 10 aa, Artificial Sequence
  Description of Artificial Sequence: Synthetic epitope
EDDQASTSTA

SEQ ID NO: 4995 - protein, 10 aa, Artificial Sequence
  Description of Artificial Sequence: Synthetic epitope
EDDSVKETDS

SEQ ID NO: 4996 - protein, 10 aa, Artificial Sequence
  Description of Artificial Sequence: Synthetic epitope
EDDTARKEKT

SEQ ID NO: 4997 - protein, 10 aa, Artificial Sequence
  Description of Artificial Sequence: Synthetic epitope
EDDTIQVNEP

SEQ ID NO: 4998 - protein, 10 aa, Artificial Sequence
  Description of Artificial Sequence: Synthetic epitope
EDDTTVKEQN

SEQ ID NO: 4999 - protein, 10 aa, Artificial Sequence
  Description of Artificial Sequence: Synthetic epitope
EDDVIQSQNA

SEQ ID NO: 5000 - protein, 10 aa, Artificial Sequence
  Description of Artificial Sequence: Synthetic epitope
EDEAGRREAT

SEQ ID NO: 5001 - protein, 10 aa, Artificial Sequence
  Description of Artificial Sequence: Synthetic epitope
EDEAIEVEAT

SEQ ID NO: 5002 - protein, 10 aa, Artificial Sequence
  Description of Artificial Sequence: Synthetic epitope
EDEAQEAKDS

SEQ ID NO: 5003 - protein, 10 aa, Artificial Sequence
  Description of Artificial Sequence: Synthetic epitope
EDEASETDYS

SEQ ID NO: 5004 - protein, 10 aa, Artificial Sequence
  Description of Artificial Sequence: Synthetic epitope
EDEASVAARR

SEQ ID NO: 5005 - protein, 10 aa, Artificial Sequence
  Description of Artificial Sequence: Synthetic epitope
EDEEQTRSGA

SEQ ID NO: 5006 - protein, 10 aa, Artificial Sequence
  Description of Artificial Sequence: Synthetic epitope
EDEEVVATAG

SEQ ID NO: 5007 - protein, 10 aa, Artificial Sequence
  Description of Artificial Sequence: Synthetic epitope
EDEFTKNGIT

SEQ ID NO: 5008 - protein, 10 aa, Artificial Sequence
  Description of Artificial Sequence: Synthetic epitope
EDEGAAEAKP

SEQ ID NO: 5009 - protein, 10 aa, Artificial Sequence
  Description of Artificial Sequence: Synthetic epitope
EDEHPKIEEP

SEQ ID NO: 5010 - protein, 10 aa, Artificial Sequence
  Description of Artificial Sequence: Synthetic epitope
EDEHSGSESE

SEQ ID NO: 5011 - protein, 10 aa, Artificial Sequence
  Description of Artificial Sequence: Synthetic epitope
EDEKESSDEA

SEQ ID NO: 5012 - protein, 10 aa, Artificial Sequence
  Description of Artificial Sequence: Synthetic epitope
EDEKHIQEML

SEQ ID NO: 5013 - protein, 10 aa, Artificial Sequence
  Description of Artificial Sequence: Synthetic epitope
EDEKSIQSQE

SEQ ID NO: 5014 - protein, 10 aa, Artificial Sequence
  Description of Artificial Sequence: Synthetic epitope
EDELGARSSM

SEQ ID NO: 5015 - protein, 10 aa, Artificial Sequence
  Description of Artificial Sequence: Synthetic epitope
EDELVAAEAL

SEQ ID NO: 5016 - protein, 10 aa, Artificial Sequence
  Description of Artificial Sequence: Synthetic epitope
EDEQAVEIQL

SEQ ID NO: 5017 - protein, 10 aa, Artificial Sequence
  Description of Artificial Sequence: Synthetic epitope
EDEQEQGTSA

SEQ ID NO: 5018 - protein, 10 aa, Artificial Sequence
  Description of Artificial Sequence: Synthetic epitope
EDEQLEVREM

SEQ ID NO: 5019 - protein, 10 aa, Artificial Sequence
  Description of Artificial Sequence: Synthetic epitope
EDERAEQDLP

SEQ ID NO: 5020 - protein, 10 aa, Artificial Sequence
  Description of Artificial Sequence: Synthetic epitope
EDESAKLGFE

SEQ ID NO: 5021 - protein, 10 aa, Artificial Sequence
  Description of Artificial Sequence: Synthetic epitope
EDESALKRSE

SEQ ID NO: 5022 - protein, 10 aa, Artificial Sequence
  Description of Artificial Sequence: Synthetic epitope
EDESESKTSE

SEQ ID NO: 5023 - protein, 10 aa, Artificial Sequence
  Description of Artificial Sequence: Synthetic epitope
EDESSARFVP

SEQ ID NO: 5024 - protein, 10 aa, Artificial Sequence
  Description of Artificial Sequence: Synthetic epitope
EDETLARQLV

SEQ ID NO: 5025 - protein, 10 aa, Artificial Sequence
  Description of Artificial Sequence: Synthetic epitope
EDETRNQERQ

SEQ ID NO: 5026 - protein, 10 aa, Artificial Sequence
  Description of Artificial Sequence: Synthetic epitope
EDETTESAVK

SEQ ID NO: 5027 - protein, 10 aa, Artificial Sequence
  Description of Artificial Sequence: Synthetic epitope
EDEVNSSFTS

SEQ ID NO: 5028 - protein, 10 aa, Artificial Sequence
  Description of Artificial Sequence: Synthetic epitope
EDEVSIGSAP

SEQ ID NO: 5029 - protein, 10 aa, Artificial Sequence
  Description of Artificial Sequence: Synthetic epitope
EDFKFLAVLG

SEQ ID NO: 5030 - protein, 10 aa, Artificial Sequence
  Description of Artificial Sequence: Synthetic epitope
EDFKTKAKEN

SEQ ID NO: 5031 - protein, 10 aa, Artificial Sequence
  Description of Artificial Sequence: Synthetic epitope
EDFNVKEEAN

SEQ ID NO: 5032 - protein, 10 aa, Artificial Sequence
  Description of Artificial Sequence: Synthetic epitope
EDFSSMSAQL

SEQ ID NO: 5033 - protein, 10 aa, Artificial Sequence
  Description of Artificial Sequence: Synthetic epitope
EDFSTTGTAY

SEQ ID NO: 5034 - protein, 10 aa, Artificial Sequence
  Description of Artificial Sequence: Synthetic epitope
EDGAREQENM

SEQ ID NO: 5035 - protein, 10 aa, Artificial Sequence
  Description of Artificial Sequence: Synthetic epitope
EDGEVAQAEA

SEQ ID NO: 5036 - protein, 10 aa, Artificial Sequence
  Description of Artificial Sequence: Synthetic epitope
EDGIATMQAK

SEQ ID NO: 5037 - protein, 10 aa, Artificial Sequence
  Description of Artificial Sequence: Synthetic epitope
EDGLANVEES

SEQ ID NO: 5038 - protein, 10 aa, Artificial Sequence
  Description of Artificial Sequence: Synthetic epitope
EDGLITSGDS

SEQ ID NO: 5039 - protein, 10 aa, Artificial Sequence
  Description of Artificial Sequence: Synthetic epitope
EDGTRAVRAA

SEQ ID NO: 5040 - protein, 10 aa, Artificial Sequence
  Description of Artificial Sequence: Synthetic epitope
EDGTTRRTET

SEQ ID NO: 5041 - protein, 10 aa, Artificial Sequence
  Description of Artificial Sequence: Synthetic epitope
EDGVLMRLKS

SEQ ID NO: 5042 - protein, 10 aa, Artificial Sequence
  Description of Artificial Sequence: Synthetic epitope
EDHENSQNNS

SEQ ID NO: 5043 - protein, 10 aa, Artificial Sequence
  Description of Artificial Sequence: Synthetic epitope
EDHQVQQAKK

SEQ ID NO: 5044 - protein, 10 aa, Artificial Sequence
  Description of Artificial Sequence: Synthetic epitope
EDHSQMRQME

SEQ ID NO: 5045 - protein, 10 aa, Artificial Sequence
  Description of Artificial Sequence: Synthetic epitope
EDHVEAVKKL

SEQ ID NO: 5046 - protein, 10 aa, Artificial Sequence
  Description of Artificial Sequence: Synthetic epitope
EDIIKKGETQ

SEQ ID NO: 5047 - protein, 10 aa, Artificial Sequence
  Description of Artificial Sequence: Synthetic epitope
EDIIVSKRRF

SEQ ID NO: 5048 - protein, 10 aa, Artificial Sequence
  Description of Artificial Sequence: Synthetic epitope
EDIKAVSKDE

SEQ ID NO: 5049 - protein, 10 aa, Artificial Sequence
  Description of Artificial Sequence: Synthetic epitope
EDIKILIASP

SEQ ID NO: 5050 - protein, 10 aa, Artificial Sequence
  Description of Artificial Sequence: Synthetic epitope
EDILSLAEEK

SEQ ID NO: 5051 - protein, 10 aa, Artificial Sequence
  Description of Artificial Sequence: Synthetic epitope
EDISASRFED

SEQ ID NO: 5052 - protein, 10 aa, Artificial Sequence
  Description of Artificial Sequence: Synthetic epitope
EDISTADFEE

SEQ ID NO: 5053 - protein, 10 aa, Artificial Sequence
  Description of Artificial Sequence: Synthetic epitope
EDIVASEQSL

SEQ ID NO: 5054 - protein, 10 aa, Artificial Sequence
  Description of Artificial Sequence: Synthetic epitope
EDIVASKGSG

SEQ ID NO: 5055 - protein, 10 aa, Artificial Sequence
  Description of Artificial Sequence: Synthetic epitope
EDIVQSVLRP

SEQ ID NO: 5056 - protein, 10 aa, Artificial Sequence
  Description of Artificial Sequence: Synthetic epitope
EDIVSIIKRS

SEQ ID NO: 5057 - protein, 10 aa, Artificial Sequence
  Description of Artificial Sequence: Synthetic epitope
EDKAIQKDKS

SEQ ID NO: 5058 - protein, 10 aa, Artificial Sequence
  Description of Artificial Sequence: Synthetic epitope
EDKAKIAKSK

SEQ ID NO: 5059 - protein, 10 aa, Artificial Sequence
  Description of Artificial Sequence: Synthetic epitope
EDKDQAVESA

SEQ ID NO: 5060 - protein, 10 aa, Artificial Sequence
  Description of Artificial Sequence: Synthetic epitope
EDKEAKSGKL

SEQ ID NO: 5061 - protein, 10 aa, Artificial Sequence
  Description of Artificial Sequence: Synthetic epitope
EDKEFVKSNR

SEQ ID NO: 5062 - protein, 10 aa, Artificial Sequence
  Description of Artificial Sequence: Synthetic epitope
EDKERAEAER

SEQ ID NO: 5063 - protein, 10 aa, Artificial Sequence
  Description of Artificial Sequence: Synthetic epitope
EDKEVIIDST

SEQ ID NO: 5064 - protein, 10 aa, Artificial Sequence
  Description of Artificial Sequence: Synthetic epitope
EDKIERFKKA

SEQ ID NO: 5065 - protein, 10 aa, Artificial Sequence
  Description of Artificial Sequence: Synthetic epitope
EDKITTPKTE

SEQ ID NO: 5066 - protein, 10 aa, Artificial Sequence
  Description of Artificial Sequence: Synthetic epitope
EDKKNTMGPA

SEQ ID NO: 5067 - protein, 10 aa, Artificial Sequence
  Description of Artificial Sequence: Synthetic epitope
EDKLAKATRD

SEQ ID NO: 5068 - protein, 10 aa, Artificial Sequence
  Description of Artificial Sequence: Synthetic epitope
EDKLSGSNNA

SEQ ID NO: 5069 - protein, 10 aa, Artificial Sequence
  Description of Artificial Sequence: Synthetic epitope
EDKNRDEQLK

SEQ ID NO: 5070 - protein, 10 aa, Artificial Sequence
  Description of Artificial Sequence: Synthetic epitope
EDKPKLEKDK

SEQ ID NO: 5071 - protein, 10 aa, Artificial Sequence
  Description of Artificial Sequence: Synthetic epitope
EDKPLSSESL

SEQ ID NO: 5072 - protein, 10 aa, Artificial Sequence
  Description of Artificial Sequence: Synthetic epitope
EDKSDAASNS

SEQ ID NO: 5073 - protein, 10 aa, Artificial Sequence
  Description of Artificial Sequence: Synthetic epitope
EDKSINAFRE

SEQ ID NO: 5074 - protein, 10 aa, Artificial Sequence
  Description of Artificial Sequence: Synthetic epitope
EDKSKSKDRK

SEQ ID NO: 5075 - protein, 10 aa, Artificial Sequence
  Description of Artificial Sequence: Synthetic epitope
EDKSVTVPEA

SEQ ID NO: 5076 - protein, 10 aa, Artificial Sequence
  Description of Artificial Sequence: Synthetic epitope
EDKTASVKVD

SEQ ID NO: 5077 - protein, 10 aa, Artificial Sequence
  Description of Artificial Sequence: Synthetic epitope
EDKTFVAETL

SEQ ID NO: 5078 - protein, 10 aa, Artificial Sequence
  Description of Artificial Sequence: Synthetic epitope
EDKVAQSEAL

SEQ ID NO: 5079 - protein, 10 aa, Artificial Sequence
  Description of Artificial Sequence: Synthetic epitope
EDKVGQSEAL

SEQ ID NO: 5080 - protein, 10 aa, Artificial Sequence
  Description of Artificial Sequence: Synthetic epitope
EDLAIQKDLE

SEQ ID NO: 5081 - protein, 10 aa, Artificial Sequence
  Description of Artificial Sequence: Synthetic epitope
EDLLKKQEGA

SEQ ID NO: 5082 - protein, 10 aa, Artificial Sequence
  Description of Artificial Sequence: Synthetic epitope
EDLLNESIKA

SEQ ID NO: 5083 - protein, 10 aa, Artificial Sequence
  Description of Artificial Sequence: Synthetic epitope
EDLNKLDDKE

SEQ ID NO: 5084 - protein, 10 aa, Artificial Sequence
  Description of Artificial Sequence: Synthetic epitope
EDLQEELSSR

SEQ ID NO: 5085 - protein, 10 aa, Artificial Sequence
  Description of Artificial Sequence: Synthetic epitope
EDLRKGKDQM

SEQ ID NO: 5086 - protein, 10 aa, Artificial Sequence
  Description of Artificial Sequence: Synthetic epitope
EDLRTLSPRG

SEQ ID NO: 5087 - protein, 10 aa, Artificial Sequence
  Description of Artificial Sequence: Synthetic epitope
EDLSKLSLDK

SEQ ID NO: 5088 - protein, 10 aa, Artificial Sequence
  Description of Artificial Sequence: Synthetic epitope
EDLSSLNGQL

SEQ ID NO: 5089 - protein, 10 aa, Artificial Sequence
  Description of Artificial Sequence: Synthetic epitope
EDLSTGKYLL

SEQ ID NO: 5090 - protein, 10 aa, Artificial Sequence
  Description of Artificial Sequence: Synthetic epitope
EDLVKSGSKH

SEQ ID NO: 5091 - protein, 10 aa, Artificial Sequence
  Description of Artificial Sequence: Synthetic epitope
EDLVQDQDLE

SEQ ID NO: 5092 - protein, 10 aa, Artificial Sequence
  Description of Artificial Sequence: Synthetic epitope
EDLVVGEMNQ

SEQ ID NO: 5093 - protein, 10 aa, Artificial Sequence
  Description of Artificial Sequence: Synthetic epitope
EDMAMNAQQD

SEQ ID NO: 5094 - protein, 10 aa, Artificial Sequence
  Description of Artificial Sequence: Synthetic epitope
EDMFSEKQDI

SEQ ID NO: 5095 - protein, 10 aa, Artificial Sequence
  Description of Artificial Sequence: Synthetic epitope
EDMQAKVDQQ

SEQ ID NO: 5096 - protein, 10 aa, Artificial Sequence
  Description of Artificial Sequence: Synthetic epitope
EDMRQQEKVE

SEQ ID NO: 5097 - protein, 10 aa, Artificial Sequence
  Description of Artificial Sequence: Synthetic epitope
EDMTTGTESE

SEQ ID NO: 5098 - protein, 10 aa, Artificial Sequence
  Description of Artificial Sequence: Synthetic epitope
EDMVHAILEK

SEQ ID NO: 5099 - protein, 10 aa, Artificial Sequence
  Description of Artificial Sequence: Synthetic epitope
EDNAVSAATA

SEQ ID NO: 5100 - protein, 10 aa, Artificial Sequence
  Description of Artificial Sequence: Synthetic epitope
EDNAVVKTAH

SEQ ID NO: 5101 - protein, 10 aa, Artificial Sequence
  Description of Artificial Sequence: Synthetic epitope
EDNDPSDVDQ

SEQ ID NO: 5102 - protein, 10 aa, Artificial Sequence
  Description of Artificial Sequence: Synthetic epitope
EDNDYESKMM

SEQ ID NO: 5103 - protein, 10 aa, Artificial Sequence
  Description of Artificial Sequence: Synthetic epitope
EDNEKEQITQ

SEQ ID NO: 5104 - protein, 10 aa, Artificial Sequence
  Description of Artificial Sequence: Synthetic epitope
EDNKIEIREM

SEQ ID NO: 5105 - protein, 10 aa, Artificial Sequence
  Description of Artificial Sequence: Synthetic epitope
EDNKQEENKE

SEQ ID NO: 5106 - protein, 10 aa, Artificial Sequence
  Description of Artificial Sequence: Synthetic epitope
EDNQDVSAHR

SEQ ID NO: 5107 - protein, 10 aa, Artificial Sequence
  Description of Artificial Sequence: Synthetic epitope
EDNSATTIIP

SEQ ID NO: 5108 - protein, 10 aa, Artificial Sequence
  Description of Artificial Sequence: Synthetic epitope
EDNSQLEMLG

SEQ ID NO: 5109 - protein, 10 aa, Artificial Sequence
  Description of Artificial Sequence: Synthetic epitope
EDNVKSAPPQ

SEQ ID NO: 5110 - protein, 10 aa, Artificial Sequence
  Description of Artificial Sequence: Synthetic epitope
EDNVTVEAAS

SEQ ID NO: 5111 - protein, 10 aa, Artificial Sequence
  Description of Artificial Sequence: Synthetic epitope
EDPDKKGESK

SEQ ID NO: 5112 - protein, 10 aa, Artificial Sequence
  Description of Artificial Sequence: Synthetic epitope
EDPEIAAETP

SEQ ID NO: 5113 - protein, 10 aa, Artificial Sequence
  Description of Artificial Sequence: Synthetic epitope
EDPHEKDKST

SEQ ID NO: 5114 - protein, 10 aa, Artificial Sequence
  Description of Artificial Sequence: Synthetic epitope
EDPIQMSMII

SEQ ID NO: 5115 - protein, 10 aa, Artificial Sequence
  Description of Artificial Sequence: Synthetic epitope
EDPIQVERVK

SEQ ID NO: 5116 - protein, 10 aa, Artificial Sequence
  Description of Artificial Sequence: Synthetic epitope
EDPMNKLKGQ

SEQ ID NO: 5117 - protein, 10 aa, Artificial Sequence
  Description of Artificial Sequence: Synthetic epitope
EDPQQESKDD

SEQ ID NO: 5118 - protein, 10 aa, Artificial Sequence
  Description of Artificial Sequence: Synthetic epitope
EDPSSMNDVQ

SEQ ID NO: 5119 - protein, 10 aa, Artificial Sequence
  Description of Artificial Sequence: Synthetic epitope
EDQAAVALER

SEQ ID NO: 5120 - protein, 10 aa, Artificial Sequence
  Description of Artificial Sequence: Synthetic epitope
EDQAGPEESE

SEQ ID NO: 5121 - protein, 10 aa, Artificial Sequence
  Description of Artificial Sequence: Synthetic epitope
EDQALVSSVE

SEQ ID NO: 5122 - protein, 10 aa, Artificial Sequence
  Description of Artificial Sequence: Synthetic epitope
EDQDNQDDSS

SEQ ID NO: 5123 - protein, 10 aa, Artificial Sequence
  Description of Artificial Sequence: Synthetic epitope
EDQGGLEAVR

SEQ ID NO: 5124 - protein, 10 aa, Artificial Sequence
  Description of Artificial Sequence: Synthetic epitope
EDQIMSLHAE

SEQ ID NO: 5125 - protein, 10 aa, Artificial Sequence
  Description of Artificial Sequence: Synthetic epitope
EDQKKREQNQ

SEQ ID NO: 5126 - protein, 10 aa, Artificial Sequence
  Description of Artificial Sequence: Synthetic epitope
EDQLQRKAVV

SEQ ID NO: 5127 - protein, 10 aa, Artificial Sequence
  Description of Artificial Sequence: Synthetic epitope
EDQLVQQEAA

SEQ ID NO: 5128 - protein, 10 aa, Artificial Sequence
  Description of Artificial Sequence: Synthetic epitope
EDQQDINKDV

SEQ ID NO: 5129 - protein, 10 aa, Artificial Sequence
  Description of Artificial Sequence: Synthetic epitope
EDQTAVSVRE

SEQ ID NO: 5130 - protein, 10 aa, Artificial Sequence
  Description of Artificial Sequence: Synthetic epitope
EDRDIRHQEK

SEQ ID NO: 5131 - protein, 10 aa, Artificial Sequence
  Description of Artificial Sequence: Synthetic epitope
EDRESQSPSS

SEQ ID NO: 5132 - protein, 10 aa, Artificial Sequence
  Description of Artificial Sequence: Synthetic epitope
EDRETSDRAH

SEQ ID NO: 5133 - protein, 10 aa, Artificial Sequence
  Description of Artificial Sequence: Synthetic epitope
EDRIAENLSS

SEQ ID NO: 5134 - protein, 10 aa, Artificial Sequence
  Description of Artificial Sequence: Synthetic epitope
EDRKQQLMLQ

SEQ ID NO: 5135 - protein, 10 aa, Artificial Sequence
  Description of Artificial Sequence: Synthetic epitope
EDRKTTQALR

SEQ ID NO: 5136 - protein, 10 aa, Artificial Sequence
  Description of Artificial Sequence: Synthetic epitope
EDRLNETELT

SEQ ID NO: 5137 - protein, 10 aa, Artificial Sequence
  Description of Artificial Sequence: Synthetic epitope
EDRRGFWVSE

SEQ ID NO: 5138 - protein, 10 aa, Artificial Sequence
  Description of Artificial Sequence: Synthetic epitope
EDRSDQSSLK

SEQ ID NO: 5139 - protein, 10 aa, Artificial Sequence
  Description of Artificial Sequence: Synthetic epitope
EDRSDSSEGW

SEQ ID NO: 5140 - protein, 10 aa, Artificial Sequence
  Description of Artificial Sequence: Synthetic epitope
EDRTKDVLTK

SEQ ID NO: 5141 - protein, 10 aa, Artificial Sequence
  Description of Artificial Sequence: Synthetic epitope
EDRTQNIIMV

SEQ ID NO: 5142 - protein, 10 aa, Artificial Sequence
  Description of Artificial Sequence: Synthetic epitope
EDSAAVTSMQ

SEQ ID NO: 5143 - protein, 10 aa, Artificial Sequence
  Description of Artificial Sequence: Synthetic epitope
EDSALSKYDA

SEQ ID NO: 5144 - protein, 10 aa, Artificial Sequence
  Description of Artificial Sequence: Synthetic epitope
EDSAVTTFEA

SEQ ID NO: 5145 - protein, 10 aa, Artificial Sequence
  Description of Artificial Sequence: Synthetic epitope
EDSDARVEAA

SEQ ID NO: 5146 - protein, 10 aa, Artificial Sequence
  Description of Artificial Sequence: Synthetic epitope
EDSEKKRTNY

SEQ ID NO: 5147 - protein, 10 aa, Artificial Sequence
  Description of Artificial Sequence: Synthetic epitope
EDSESIATRE

SEQ ID NO: 5148 - protein, 10 aa, Artificial Sequence
  Description of Artificial Sequence: Synthetic epitope
EDSFVSDSSD

SEQ ID NO: 5149 - protein, 10 aa, Artificial Sequence
  Description of Artificial Sequence: Synthetic epitope
EDSIQTSKMG

SEQ ID NO: 5150 - protein, 10 aa, Artificial Sequence
  Description of Artificial Sequence: Synthetic epitope
EDSKASSIPT

SEQ ID NO: 5151 - protein, 10 aa, Artificial Sequence
  Description of Artificial Sequence: Synthetic epitope
EDSKATTSEA

SEQ ID NO: 5152 - protein, 10 aa, Artificial Sequence
  Description of Artificial Sequence: Synthetic epitope
EDSKKTKKPA

SEQ ID NO: 5153 - protein, 10 aa, Artificial Sequence
  Description of Artificial Sequence: Synthetic epitope
EDSKNLSVAA

SEQ ID NO: 5154 - protein, 10 aa, Artificial Sequence
  Description of Artificial Sequence: Synthetic epitope
EDSLATSLSS

SEQ ID NO: 5155 - protein, 10 aa, Artificial Sequence
  Description of Artificial Sequence: Synthetic epitope
EDSLATVKVV

SEQ ID NO: 5156 - protein, 10 aa, Artificial Sequence
  Description of Artificial Sequence: Synthetic epitope
EDSLKSQEGE

SEQ ID NO: 5157 - protein, 10 aa, Artificial Sequence
  Description of Artificial Sequence: Synthetic epitope
EDSLRASTQI

SEQ ID NO: 5158 - protein, 10 aa, Artificial Sequence
  Description of Artificial Sequence: Synthetic epitope
EDSLSEESAD

SEQ ID NO: 5159 - protein, 10 aa, Artificial Sequence
  Description of Artificial Sequence: Synthetic epitope
EDSNESLSSD

SEQ ID NO: 5160 - protein, 10 aa, Artificial Sequence
  Description of Artificial Sequence: Synthetic epitope
EDSNLESSQL

SEQ ID NO: 5161 - protein, 10 aa, Artificial Sequence
  Description of Artificial Sequence: Synthetic epitope
EDSNRAKLPR

SEQ ID NO: 5162 - protein, 10 aa, Artificial Sequence
  Description of Artificial Sequence: Synthetic epitope
EDSQIEKERD

SEQ ID NO: 5163 - protein, 10 aa, Artificial Sequence
  Description of Artificial Sequence: Synthetic epitope
EDSRQARTET

SEQ ID NO: 5164 - protein, 10 aa, Artificial Sequence
  Description of Artificial Sequence: Synthetic epitope
EDSRSMDQDQ

SEQ ID NO: 5165 - protein, 10 aa, Artificial Sequence
  Description of Artificial Sequence: Synthetic epitope
EDSSEADTRE

SEQ ID NO: 5166 - protein, 10 aa, Artificial Sequence
  Description of Artificial Sequence: Synthetic epitope
EDSSGSSELQ

SEQ ID NO: 5167 - protein, 10 aa, Artificial Sequence
  Description of Artificial Sequence: Synthetic epitope
EDSSLQEKFF

SEQ ID NO: 5168 - protein, 10 aa, Artificial Sequence
  Description of Artificial Sequence: Synthetic epitope
EDSSTSLFKD

SEQ ID NO: 5169 - protein, 10 aa, Artificial Sequence
  Description of Artificial Sequence: Synthetic epitope
EDSTKALAES

SEQ ID NO: 5170 - protein, 10 aa, Artificial Sequence
  Description of Artificial Sequence: Synthetic epitope
EDSTTDTDGA

SEQ ID NO: 5171 - protein, 10 aa, Artificial Sequence
  Description of Artificial Sequence: Synthetic epitope
EDSTVAKVEK

SEQ ID NO: 5172 - protein, 10 aa, Artificial Sequence
  Description of Artificial Sequence: Synthetic epitope
EDSWKTTEFV

SEQ ID NO: 5173 - protein, 10 aa, Artificial Sequence
  Description of Artificial Sequence: Synthetic epitope
EDTADTLSVE

SEQ ID NO: 5174 - protein, 10 aa, Artificial Sequence
  Description of Artificial Sequence: Synthetic epitope
EDTDSHSSEE

SEQ ID NO: 5175 - protein, 10 aa, Artificial Sequence
  Description of Artificial Sequence: Synthetic epitope
EDTEPPVQTA

SEQ ID NO: 5176 - protein, 10 aa, Artificial Sequence
  Description of Artificial Sequence: Synthetic epitope
EDTHKVQPQP

SEQ ID NO: 5177 - protein, 10 aa, Artificial Sequence
  Description of Artificial Sequence: Synthetic epitope
EDTLVTALNA

SEQ ID NO: 5178 - protein, 10 aa, Artificial Sequence
  Description of Artificial Sequence: Synthetic epitope
EDTSAKQSGE

SEQ ID NO: 5179 - protein, 10 aa, Artificial Sequence
  Description of Artificial Sequence: Synthetic epitope
EDTSLTFGTS

SEQ ID NO: 5180 - protein, 10 aa, Artificial Sequence
  Description of Artificial Sequence: Synthetic epitope
EDTSPNMNDN

SEQ ID NO: 5181 - protein, 10 aa, Artificial Sequence
  Description of Artificial Sequence: Synthetic epitope
EDTSRSFKAH

SEQ ID NO: 5182 - protein, 10 aa, Artificial Sequence
  Description of Artificial Sequence: Synthetic epitope
EDTTAIYMMK

SEQ ID NO: 5183 - protein, 10 aa, Artificial Sequence
  Description of Artificial Sequence: Synthetic epitope
EDTTQLETDK

SEQ ID NO: 5184 - protein, 10 aa, Artificial Sequence
  Description of Artificial Sequence: Synthetic epitope
EDTVLSTTEV

SEQ ID NO: 5185 - protein, 10 aa, Artificial Sequence
  Description of Artificial Sequence: Synthetic epitope
EDVAAESPEA

SEQ ID NO: 5186 - protein, 10 aa, Artificial Sequence
  Description of Artificial Sequence: Synthetic epitope
EDVAVESSES

SEQ ID NO: 5187 - protein, 10 aa, Artificial Sequence
  Description of Artificial Sequence: Synthetic epitope
EDVAVVQEDG

SEQ ID NO: 5188 - protein, 10 aa, Artificial Sequence
  Description of Artificial Sequence: Synthetic epitope
EDVDSAQEKM

SEQ ID NO: 5189 - protein, 10 aa, Artificial Sequence
  Description of Artificial Sequence: Synthetic epitope
EDVGNASTEN

SEQ ID NO: 5190 - protein, 10 aa, Artificial Sequence
  Description of Artificial Sequence: Synthetic epitope
EDVIASERAA

SEQ ID NO: 5191 - protein, 10 aa, Artificial Sequence
  Description of Artificial Sequence: Synthetic epitope
EDVLQTNIEE

SEQ ID NO: 5192 - protein, 10 aa, Artificial Sequence
  Description of Artificial Sequence: Synthetic epitope
EDVRARLDLA

SEQ ID NO: 5193 - protein, 10 aa, Artificial Sequence
  Description of Artificial Sequence: Synthetic epitope
EDVRKYAGSN

SEQ ID NO: 5194 - protein, 10 aa, Artificial Sequence
  Description of Artificial Sequence: Synthetic epitope
EDVSGFGAWH

SEQ ID NO: 5195 - protein, 10 aa, Artificial Sequence
  Description of Artificial Sequence: Synthetic epitope
EDVSITEGSP

SEQ ID NO: 5196 - protein, 10 aa, Artificial Sequence
  Description of Artificial Sequence: Synthetic epitope
EDWGRQTIPD

SEQ ID NO: 5197 - protein, 10 aa, Artificial Sequence
  Description of Artificial Sequence: Synthetic epitope
EDWITFRTKT

SEQ ID NO: 5198 - protein, 10 aa, Artificial Sequence
  Description of Artificial Sequence: Synthetic epitope
EDWVTAAYMD

SEQ ID NO: 5199 - protein, 10 aa, Artificial Sequence
  Description of Artificial Sequence: Synthetic epitope
EDYDLQKLVD

SEQ ID NO: 5200 - protein, 10 aa, Artificial Sequence
  Description of Artificial Sequence: Synthetic epitope
EDYGVSAYRT

SEQ ID NO: 5201 - protein, 10 aa, Artificial Sequence
  Description of Artificial Sequence: Synthetic epitope
EDYHHELSDG

SEQ ID NO: 5202 - protein, 10 aa, Artificial Sequence
  Description of Artificial Sequence: Synthetic epitope
EDYIAISKIR

SEQ ID NO: 5203 - protein, 10 aa, Artificial Sequence
  Description of Artificial Sequence: Synthetic epitope
EDYQAAEETA

SEQ ID NO: 5204 - protein, 10 aa, Artificial Sequence
  Description of Artificial Sequence: Synthetic epitope
EDYSIEINQE

SEQ ID NO: 5205 - protein, 10 aa, Artificial Sequence
  Description of Artificial Sequence: Synthetic epitope
EDYTIQALLE

SEQ ID NO: 5206 - protein, 10 aa, Artificial Sequence
  Description of Artificial Sequence: Synthetic epitope
EDYTMGLKNA

SEQ ID NO: 5207 - protein, 10 aa, Artificial Sequence
  Description of Artificial Sequence: Synthetic epitope
EDYVVLMKRG

SEQ ID NO: 5208 - protein, 10 aa, Artificial Sequence
  Description of Artificial Sequence: Synthetic epitope
EEAADLSSLK

SEQ ID NO: 5209 - protein, 10 aa, Artificial Sequence
  Description of Artificial Sequence: Synthetic epitope
EEAAEKATSR

SEQ ID NO: 5210 - protein, 10 aa, Artificial Sequence
  Description of Artificial Sequence: Synthetic epitope
EEAAERTPTG

SEQ ID NO: 5211 - protein, 10 aa, Artificial Sequence
  Description of Artificial Sequence: Synthetic epitope
EEAALTASQI

SEQ ID NO: 5212 - protein, 10 aa, Artificial Sequence
  Description of Artificial Sequence: Synthetic epitope
EEAANAKLLE

SEQ ID NO: 5213 - protein, 10 aa, Artificial Sequence
  Description of Artificial Sequence: Synthetic epitope
EEAAPKKIKA

SEQ ID NO: 5214 - protein, 10 aa, Artificial Sequence
  Description of Artificial Sequence: Synthetic epitope
EEAASSLKHL

SEQ ID NO: 5215 - protein, 10 aa, Artificial Sequence
  Description of Artificial Sequence: Synthetic epitope
EEAATAKERS

SEQ ID NO: 5216 - protein, 10 aa, Artificial Sequence
  Description of Artificial Sequence: Synthetic epitope
EEAATQSSEK

SEQ ID NO: 5217 - protein, 10 aa, Artificial Sequence
  Description of Artificial Sequence: Synthetic epitope
EEAATVTSYL

SEQ ID NO: 5218 - protein, 10 aa, Artificial Sequence
  Description of Artificial Sequence: Synthetic epitope
EEAAVLQYAS

SEQ ID NO: 5219 - protein, 10 aa, Artificial Sequence
  Description of Artificial Sequence: Synthetic epitope
EEADSTAKAM

SEQ ID NO: 5220 - protein, 10 aa, Artificial Sequence
  Description of Artificial Sequence: Synthetic epitope
EEAEAVLATP

SEQ ID NO: 5221 - protein, 10 aa, Artificial Sequence
  Description of Artificial Sequence: Synthetic epitope
EEAEGISSML

SEQ ID NO: 5222 - protein, 10 aa, Artificial Sequence
  Description of Artificial Sequence: Synthetic epitope
EEAEHPIKIS

SEQ ID NO: 5223 - protein, 10 aa, Artificial Sequence
  Description of Artificial Sequence: Synthetic epitope
EEAEKAQADF

SEQ ID NO: 5224 - protein, 10 aa, Artificial Sequence
  Description of Artificial Sequence: Synthetic epitope
EEAELEANSV

SEQ ID NO: 5225 - protein, 10 aa, Artificial Sequence
  Description of Artificial Sequence: Synthetic epitope
EEAELFSPDS

SEQ ID NO: 5226 - protein, 10 aa, Artificial Sequence
  Description of Artificial Sequence: Synthetic epitope
EEAEMLSTEA

SEQ ID NO: 5227 - protein, 10 aa, Artificial Sequence
  Description of Artificial Sequence: Synthetic epitope
EEAENAPRMH

SEQ ID NO: 5228 - protein, 10 aa, Artificial Sequence
  Description of Artificial Sequence: Synthetic epitope
EEAERKASAT

SEQ ID NO: 5229 - protein, 10 aa, Artificial Sequence
  Description of Artificial Sequence: Synthetic epitope
EEAESSISST

SEQ ID NO: 5230 - protein, 10 aa, Artificial Sequence
  Description of Artificial Sequence: Synthetic epitope
EEAETLLKSK

SEQ ID NO: 5231 - protein, 10 aa, Artificial Sequence
  Description of Artificial Sequence: Synthetic epitope
EEAEVAAPTK

SEQ ID NO: 5232 - protein, 10 aa, Artificial Sequence
  Description of Artificial Sequence: Synthetic epitope
EEAEVVDTDL

SEQ ID NO: 5233 - protein, 10 aa, Artificial Sequence
  Description of Artificial Sequence: Synthetic epitope
EEAGLINHPP

SEQ ID NO: 5234 - protein, 10 aa, Artificial Sequence
  Description of Artificial Sequence: Synthetic epitope
EEAIEQADPE

SEQ ID NO: 5235 - protein, 10 aa, Artificial Sequence
  Description of Artificial Sequence: Synthetic epitope
EEAKAQARGL

SEQ ID NO: 5236 - protein, 10 aa, Artificial Sequence
  Description of Artificial Sequence: Synthetic epitope
EEAKEALLQA

SEQ ID NO: 5237 - protein, 10 aa, Artificial Sequence
  Description of Artificial Sequence: Synthetic epitope
EEAKESPSAA

SEQ ID NO: 5238 - protein, 10 aa, Artificial Sequence
  Description of Artificial Sequence: Synthetic epitope
EEAKLDKEKK

SEQ ID NO: 5239 - protein, 10 aa, Artificial Sequence
  Description of Artificial Sequence: Synthetic epitope
EEAKLGVSGS

SEQ ID NO: 5240 - protein, 10 aa, Artificial Sequence
  Description of Artificial Sequence: Synthetic epitope
EEAKNRDHRK

SEQ ID NO: 5241 - protein, 10 aa, Artificial Sequence
  Description of Artificial Sequence: Synthetic epitope
EEAKSEAMKE

SEQ ID NO: 5242 - protein, 10 aa, Artificial Sequence
  Description of Artificial Sequence: Synthetic epitope
EEAKSIITGA

SEQ ID NO: 5243 - protein, 10 aa, Artificial Sequence
  Description of Artificial Sequence: Synthetic epitope
EEAKVASALE

SEQ ID NO: 5244 - protein, 10 aa, Artificial Sequence
  Description of Artificial Sequence: Synthetic epitope
EEALAAFAQE

SEQ ID NO: 5245 - protein, 10 aa, Artificial Sequence
  Description of Artificial Sequence: Synthetic epitope
EEALAIAMAM

SEQ ID NO: 5246 - protein, 10 aa, Artificial Sequence
  Description of Artificial Sequence: Synthetic epitope
EEALASSLSS

SEQ ID NO: 5247 - protein, 10 aa, Artificial Sequence
  Description of Artificial Sequence: Synthetic epitope
EEALAVSVSD

SEQ ID NO: 5248 - protein, 10 aa, Artificial Sequence
  Description of Artificial Sequence: Synthetic epitope
EEALKALDVA

SEQ ID NO: 5249 - protein, 10 aa, Artificial Sequence
  Description of Artificial Sequence: Synthetic epitope
EEALMAAEIS

SEQ ID NO: 5250 - protein, 10 aa, Artificial Sequence
  Description of Artificial Sequence: Synthetic epitope
EEALNASQEE

SEQ ID NO: 5251 - protein, 10 aa, Artificial Sequence
  Description of Artificial Sequence: Synthetic epitope
EEALQALSQE

SEQ ID NO: 5252 - protein, 10 aa, Artificial Sequence
  Description of Artificial Sequence: Synthetic epitope
EEALQSQASS

SEQ ID NO: 5253 - protein, 10 aa, Artificial Sequence
  Description of Artificial Sequence: Synthetic epitope
EEALRALADD

SEQ ID NO: 5254 - protein, 10 aa, Artificial Sequence
  Description of Artificial Sequence: Synthetic epitope
EEALRKNTEE

SEQ ID NO: 5255 - protein, 10 aa, Artificial Sequence
  Description of Artificial Sequence: Synthetic epitope
EEALSAHYSE

SEQ ID NO: 5256 - protein, 10 aa, Artificial Sequence
  Description of Artificial Sequence: Synthetic epitope
EEALSALGLQ

SEQ ID NO: 5257 - protein, 10 aa, Artificial Sequence
  Description of Artificial Sequence: Synthetic epitope
EEALSFQLPS

SEQ ID NO: 5258 - protein, 10 aa, Artificial Sequence
  Description of Artificial Sequence: Synthetic epitope
EEALSSNRQS

SEQ ID NO: 5259 - protein, 10 aa, Artificial Sequence
  Description of Artificial Sequence: Synthetic epitope
EEALTSISSQ

SEQ ID NO: 5260 - protein, 10 aa, Artificial Sequence
  Description of Artificial Sequence: Synthetic epitope
EEALVAKQEV

SEQ ID NO: 5261 - protein, 10 aa, Artificial Sequence
  Description of Artificial Sequence: Synthetic epitope
EEALYKSKTS

SEQ ID NO: 5262 - protein, 10 aa, Artificial Sequence
  Description of Artificial Sequence: Synthetic epitope
EEAMEQKAEL

SEQ ID NO: 5263 - protein, 10 aa, Artificial Sequence
  Description of Artificial Sequence: Synthetic epitope
EEAMIAYVEE

SEQ ID NO: 5264 - protein, 10 aa, Artificial Sequence
  Description of Artificial Sequence: Synthetic epitope
EEAMTRLVNI

SEQ ID NO: 5265 - protein, 10 aa, Artificial Sequence
  Description of Artificial Sequence: Synthetic epitope
EEANMETKPT

SEQ ID NO: 5266 - protein, 10 aa, Artificial Sequence
  Description of Artificial Sequence: Synthetic epitope
EEANSKQNIT

SEQ ID NO: 5267 - protein, 10 aa, Artificial Sequence
  Description of Artificial Sequence: Synthetic epitope
EEAQHRARQA

SEQ ID NO: 5268 - protein, 10 aa, Artificial Sequence
  Description of Artificial Sequence: Synthetic epitope
EEAQLLQLKV

SEQ ID NO: 5269 - protein, 10 aa, Artificial Sequence
  Description of Artificial Sequence: Synthetic epitope
EEAQLMAKHP

SEQ ID NO: 5270 - protein, 10 aa, Artificial Sequence
  Description of Artificial Sequence: Synthetic epitope
EEAQPELEGV

SEQ ID NO: 5271 - protein, 10 aa, Artificial Sequence
  Description of Artificial Sequence: Synthetic epitope
EEAQVEFMAS

SEQ ID NO: 5272 - protein, 10 aa, Artificial Sequence
  Description of Artificial Sequence: Synthetic epitope
EEARLASMPA

SEQ ID NO: 5273 - protein, 10 aa, Artificial Sequence
  Description of Artificial Sequence: Synthetic epitope
EEARLEQSRE

SEQ ID NO: 5274 - protein, 10 aa, Artificial Sequence
  Description of Artificial Sequence: Synthetic epitope
EEARQVVLRS

SEQ ID NO: 5275 - protein, 10 aa, Artificial Sequence
  Description of Artificial Sequence: Synthetic epitope
EEASASQAGS

SEQ ID NO: 5276 - protein, 10 aa, Artificial Sequence
  Description of Artificial Sequence: Synthetic epitope
EEASAVSTAA

SEQ ID NO: 5277 - protein, 10 aa, Artificial Sequence
  Description of Artificial Sequence: Synthetic epitope
EEASESVSST

SEQ ID NO: 5278 - protein, 10 aa, Artificial Sequence
  Description of Artificial Sequence: Synthetic epitope
EEASGLKEEL

SEQ ID NO: 5279 - protein, 10 aa, Artificial Sequence
  Description of Artificial Sequence: Synthetic epitope
EEASGSSVTA

SEQ ID NO: 5280 - protein, 10 aa, Artificial Sequence
  Description of Artificial Sequence: Synthetic epitope
EEASKLPSTS

SEQ ID NO: 5281 - protein, 10 aa, Artificial Sequence
  Description of Artificial Sequence: Synthetic epitope
EEASKVASKK

SEQ ID NO: 5282 - protein, 10 aa, Artificial Sequence
  Description of Artificial Sequence: Synthetic epitope
EEASQSRHRH

SEQ ID NO: 5283 - protein, 10 aa, Artificial Sequence
  Description of Artificial Sequence: Synthetic epitope
EEASSASSTL

SEQ ID NO: 5284 - protein, 10 aa, Artificial Sequence
  Description of Artificial Sequence: Synthetic epitope
EEASSEGEPR

SEQ ID NO: 5285 - protein, 10 aa, Artificial Sequence
  Description of Artificial Sequence: Synthetic epitope
EEASYMASDR

SEQ ID NO: 5286 - protein, 10 aa, Artificial Sequence
  Description of Artificial Sequence: Synthetic epitope
EEATATELTT

SEQ ID NO: 5287 - protein, 10 aa, Artificial Sequence
  Description of Artificial Sequence: Synthetic epitope
EEATGALTLT

SEQ ID NO: 5288 - protein, 10 aa, Artificial Sequence
  Description of Artificial Sequence: Synthetic epitope
EEATSSVEIA

SEQ ID NO: 5289 - protein, 10 aa, Artificial Sequence
  Description of Artificial Sequence: Synthetic epitope
EEATTLQGLA

SEQ ID NO: 5290 - protein, 10 aa, Artificial Sequence
  Description of Artificial Sequence: Synthetic epitope
EEATTQSRAG

SEQ ID NO: 5291 - protein, 10 aa, Artificial Sequence
  Description of Artificial Sequence: Synthetic epitope
EEAVAAWPET

SEQ ID NO: 5292 - protein, 10 aa, Artificial Sequence
  Description of Artificial Sequence: Synthetic epitope
EEAVATLEAQ

SEQ ID NO: 5293 - protein, 10 aa, Artificial Sequence
  Description of Artificial Sequence: Synthetic epitope
EEAVSVQRSM

SEQ ID NO: 5294 - protein, 10 aa, Artificial Sequence
  Description of Artificial Sequence: Synthetic epitope
EEAVSYNELD

SEQ ID NO: 5295 - protein, 10 aa, Artificial Sequence
  Description of Artificial Sequence: Synthetic epitope
EEAWTKYPRG

SEQ ID NO: 5296 - protein, 10 aa, Artificial Sequence
  Description of Artificial Sequence: Synthetic epitope
EEDADNHDSK

SEQ ID NO: 5297 - protein, 10 aa, Artificial Sequence
  Description of Artificial Sequence: Synthetic epitope
EEDATKAEGF

SEQ ID NO: 5298 - protein, 10 aa, Artificial Sequence
  Description of Artificial Sequence: Synthetic epitope
EEDATSLITE

SEQ ID NO: 5299 - protein, 10 aa, Artificial Sequence
  Description of Artificial Sequence: Synthetic epitope
EEDATVLAKD

SEQ ID NO: 5300 - protein, 10 aa, Artificial Sequence
  Description of Artificial Sequence: Synthetic epitope
EEDAVDAAST

SEQ ID NO: 5301 - protein, 10 aa, Artificial Sequence
  Description of Artificial Sequence: Synthetic epitope
EEDDAAEQEK

SEQ ID NO: 5302 - protein, 10 aa, Artificial Sequence
  Description of Artificial Sequence: Synthetic epitope
EEDDKSSEKS

SEQ ID NO: 5303 - protein, 10 aa, Artificial Sequence
  Description of Artificial Sequence: Synthetic epitope
EEDDQEAYFR

SEQ ID NO: 5304 - protein, 10 aa, Artificial Sequence
  Description of Artificial Sequence: Synthetic epitope
EEDEAGSATS

SEQ ID NO: 5305 - protein, 10 aa, Artificial Sequence
  Description of Artificial Sequence: Synthetic epitope
EEDEASSQTD

SEQ ID NO: 5306 - protein, 10 aa, Artificial Sequence
  Description of Artificial Sequence: Synthetic epitope
EEDEPTDLVE

SEQ ID NO: 5307 - protein, 10 aa, Artificial Sequence
  Description of Artificial Sequence: Synthetic epitope
EEDEQKEPML

SEQ ID NO: 5308 - protein, 10 aa, Artificial Sequence
  Description of Artificial Sequence: Synthetic epitope
EEDEVRSSAD

SEQ ID NO: 5309 - protein, 10 aa, Artificial Sequence
  Description of Artificial Sequence: Synthetic epitope
EEDIEIIPIQ

SEQ ID NO: 5310 - protein, 10 aa, Artificial Sequence
  Description of Artificial Sequence: Synthetic epitope
EEDKATAAEM

SEQ ID NO: 5311 - protein, 10 aa, Artificial Sequence
  Description of Artificial Sequence: Synthetic epitope
EEDKMSSMSL

SEQ ID NO: 5312 - protein, 10 aa, Artificial Sequence
  Description of Artificial Sequence: Synthetic epitope
EEDKRTSVPY

SEQ ID NO: 5313 - protein, 10 aa, Artificial Sequence
  Description of Artificial Sequence: Synthetic epitope
EEDKTMLAER

SEQ ID NO: 5314 - protein, 10 aa, Artificial Sequence
  Description of Artificial Sequence: Synthetic epitope
EEDLEQIKLS

SEQ ID NO: 5315 - protein, 10 aa, Artificial Sequence
  Description of Artificial Sequence: Synthetic epitope
EEDLQSLSVK

SEQ ID NO: 5316 - protein, 10 aa, Artificial Sequence
  Description of Artificial Sequence: Synthetic epitope
EEDLVAAQDL

SEQ ID NO: 5317 - protein, 10 aa, Artificial Sequence
  Description of Artificial Sequence: Synthetic epitope
EEDNEVVTRA

SEQ ID NO: 5318 - protein, 10 aa, Artificial Sequence
  Description of Artificial Sequence: Synthetic epitope
EEDRALPENE

SEQ ID NO: 5319 - protein, 10 aa, Artificial Sequence
  Description of Artificial Sequence: Synthetic epitope
EEDRIVTQNR

SEQ ID NO: 5320 - protein, 10 aa, Artificial Sequence
  Description of Artificial Sequence: Synthetic epitope
EEDRKLNLSL

SEQ ID NO: 5321 - protein, 10 aa, Artificial Sequence
  Description of Artificial Sequence: Synthetic epitope
EEDSELVAKD

SEQ ID NO: 5322 - protein, 10 aa, Artificial Sequence
  Description of Artificial Sequence: Synthetic epitope
EEDSIVDDAE

SEQ ID NO: 5323 - protein, 10 aa, Artificial Sequence
  Description of Artificial Sequence: Synthetic epitope
EEDSNSRESL

SEQ ID NO: 5324 - protein, 10 aa, Artificial Sequence
  Description of Artificial Sequence: Synthetic epitope
EEDTSLSESE

SEQ ID NO: 5325 - protein, 10 aa, Artificial Sequence
  Description of Artificial Sequence: Synthetic epitope
EEDTSVTEQD

SEQ ID NO: 5326 - protein, 10 aa, Artificial Sequence
  Description of Artificial Sequence: Synthetic epitope
EEDVEMSEDA

SEQ ID NO: 5327 - protein, 10 aa, Artificial Sequence
  Description of Artificial Sequence: Synthetic epitope
EEFISTEDVE

SEQ ID NO: 5328 - protein, 10 aa, Artificial Sequence
  Description of Artificial Sequence: Synthetic epitope
EEFKQEVEAT

SEQ ID NO: 5329 - protein, 10 aa, Artificial Sequence
  Description of Artificial Sequence: Synthetic epitope
EEFPQIEGSA

SEQ ID NO: 5330 - protein, 10 aa, Artificial Sequence
  Description of Artificial Sequence: Synthetic epitope
EEFQKIVTDT

SEQ ID NO: 5331 - protein, 10 aa, Artificial Sequence
  Description of Artificial Sequence: Synthetic epitope
EEFRTSLPKS

SEQ ID NO: 5332 - protein, 10 aa, Artificial Sequence
  Description of Artificial Sequence: Synthetic epitope
EEFTAAQDSS

SEQ ID NO: 5333 - protein, 10 aa, Artificial Sequence
  Description of Artificial Sequence: Synthetic epitope
EEFTEMDPTY

SEQ ID NO: 5334 - protein, 10 aa, Artificial Sequence
  Description of Artificial Sequence: Synthetic epitope
EEFTSSAEGS

SEQ ID NO: 5335 - protein, 10 aa, Artificial Sequence
  Description of Artificial Sequence: Synthetic epitope
EEFVVLSQEP

SEQ ID NO: 5336 - protein, 10 aa, Artificial Sequence
  Description of Artificial Sequence: Synthetic epitope
EEGAIFKKEP

SEQ ID NO: 5337 - protein, 10 aa, Artificial Sequence
  Description of Artificial Sequence: Synthetic epitope
EEGDVSTLEQ

SEQ ID NO: 5338 - protein, 10 aa, Artificial Sequence
  Description of Artificial Sequence: Synthetic epitope
EEGEDKMKER

SEQ ID NO: 5339 - protein, 10 aa, Artificial Sequence
  Description of Artificial Sequence: Synthetic epitope
EEGEIHEKAR

SEQ ID NO: 5340 - protein, 10 aa, Artificial Sequence
  Description of Artificial Sequence: Synthetic epitope
EEGELMKMKG

SEQ ID NO: 5341 - protein, 10 aa, Artificial Sequence
  Description of Artificial Sequence: Synthetic epitope
EEGKAKEQIR

SEQ ID NO: 5342 - protein, 10 aa, Artificial Sequence
  Description of Artificial Sequence: Synthetic epitope
EEGMMINISI

SEQ ID NO: 5343 - protein, 10 aa, Artificial Sequence
  Description of Artificial Sequence: Synthetic epitope
EEGMMINISI

SEQ ID NO: 5344 - protein, 10 aa, Artificial Sequence
  Description of Artificial Sequence: Synthetic epitope
EEGMMINISI

SEQ ID NO: 5345 - protein, 10 aa, Artificial Sequence
  Description of Artificial Sequence: Synthetic epitope
EEGMMINISI

SEQ ID NO: 5346 - protein, 10 aa, Artificial Sequence
  Description of Artificial Sequence: Synthetic epitope
EEGMMINISI

SEQ ID NO: 5347 - protein, 10 aa, Artificial Sequence
  Description of Artificial Sequence: Synthetic epitope
EEGNIQAAEA

SEQ ID NO: 5348 - protein, 10 aa, Artificial Sequence
  Description of Artificial Sequence: Synthetic epitope
EEGNTMVPKN

SEQ ID NO: 5349 - protein, 10 aa, Artificial Sequence
  Description of Artificial Sequence: Synthetic epitope
EEGPESEQKK

SEQ ID NO: 5350 - protein, 10 aa, Artificial Sequence
  Description of Artificial Sequence: Synthetic epitope
EEGPKRELGV

SEQ ID NO: 5351 - protein, 10 aa, Artificial Sequence
  Description of Artificial Sequence: Synthetic epitope
EEGPRQSLQQ

SEQ ID NO: 5352 - protein, 10 aa, Artificial Sequence
  Description of Artificial Sequence: Synthetic epitope
EEGQPQTRQE

SEQ ID NO: 5353 - protein, 10 aa, Artificial Sequence
  Description of Artificial Sequence: Synthetic epitope
EEGRATVNQD

SEQ ID NO: 5354 - protein, 10 aa, Artificial Sequence
  Description of Artificial Sequence: Synthetic epitope
EEGSANRRPE

SEQ ID NO: 5355 - protein, 10 aa, Artificial Sequence
  Description of Artificial Sequence: Synthetic epitope
EEGSDSQQKK

SEQ ID NO: 5356 - protein, 10 aa, Artificial Sequence
  Description of Artificial Sequence: Synthetic epitope
EEGSSASGLA

SEQ ID NO: 5357 - protein, 10 aa, Artificial Sequence
  Description of Artificial Sequence: Synthetic epitope
EEGSSDASQE

SEQ ID NO: 5358 - protein, 10 aa, Artificial Sequence
  Description of Artificial Sequence: Synthetic epitope
EEGSTSLDDE

SEQ ID NO: 5359 - protein, 10 aa, Artificial Sequence
  Description of Artificial Sequence: Synthetic epitope
EEGSVSQRST

SEQ ID NO: 5360 - protein, 10 aa, Artificial Sequence
  Description of Artificial Sequence: Synthetic epitope
EEGTDLEGDM

SEQ ID NO: 5361 - protein, 10 aa, Artificial Sequence
  Description of Artificial Sequence: Synthetic epitope
EEGTSSQAEA

SEQ ID NO: 5362 - protein, 10 aa, Artificial Sequence
  Description of Artificial Sequence: Synthetic epitope
EEGTTDTATS

SEQ ID NO: 5363 - protein, 10 aa, Artificial Sequence
  Description of Artificial Sequence: Synthetic epitope
EEGTVQATSS

SEQ ID NO: 5364 - protein, 10 aa, Artificial Sequence
  Description of Artificial Sequence: Synthetic epitope
EEGVKKDSEE

SEQ ID NO: 5365 - protein, 10 aa, Artificial Sequence
  Description of Artificial Sequence: Synthetic epitope
EEGYEADSES

SEQ ID NO: 5366 - protein, 10 aa, Artificial Sequence
  Description of Artificial Sequence: Synthetic epitope
EEHEATFGEK

SEQ ID NO: 5367 - protein, 10 aa, Artificial Sequence
  Description of Artificial Sequence: Synthetic epitope
EEHGSGAADA

SEQ ID NO: 5368 - protein, 10 aa, Artificial Sequence
  Description of Artificial Sequence: Synthetic epitope
EEHGSSQKII

SEQ ID NO: 5369 - protein, 10 aa, Artificial Sequence
  Description of Artificial Sequence: Synthetic epitope
EEHHMKRMMA

SEQ ID NO: 5370 - protein, 10 aa, Artificial Sequence
  Description of Artificial Sequence: Synthetic epitope
EEHKATEKIL

SEQ ID NO: 5371 - protein, 10 aa, Artificial Sequence
  Description of Artificial Sequence: Synthetic epitope
EEHLAETVKE

SEQ ID NO: 5372 - protein, 10 aa, Artificial Sequence
  Description of Artificial Sequence: Synthetic epitope
EEHLKSAQYK

SEQ ID NO: 5373 - protein, 10 aa, Artificial Sequence
  Description of Artificial Sequence: Synthetic epitope
EEHSKLIAKV

SEQ ID NO: 5374 - protein, 10 aa, Artificial Sequence
  Description of Artificial Sequence: Synthetic epitope
EEHTAVEKIS

SEQ ID NO: 5375 - protein, 10 aa, Artificial Sequence
  Description of Artificial Sequence: Synthetic epitope
EEHVDKMYLN

SEQ ID NO: 5376 - protein, 10 aa, Artificial Sequence
  Description of Artificial Sequence: Synthetic epitope
EEHVDVLMTS

SEQ ID NO: 5377 - protein, 10 aa, Artificial Sequence
  Description of Artificial Sequence: Synthetic epitope
EEHVSSATSI

SEQ ID NO: 5378 - protein, 10 aa, Artificial Sequence
  Description of Artificial Sequence: Synthetic epitope
EEHVTTFEDE

SEQ ID NO: 5379 - protein, 10 aa, Artificial Sequence
  Description of Artificial Sequence: Synthetic epitope
EEIAAKYKHS

SEQ ID NO: 5380 - protein, 10 aa, Artificial Sequence
  Description of Artificial Sequence: Synthetic epitope
EEIAAQVRNS

SEQ ID NO: 5381 - protein, 10 aa, Artificial Sequence
  Description of Artificial Sequence: Synthetic epitope
EEIAEQLQSS

SEQ ID NO: 5382 - protein, 10 aa, Artificial Sequence
  Description of Artificial Sequence: Synthetic epitope
EEIDSTSDST

SEQ ID NO: 5383 - protein, 10 aa, Artificial Sequence
  Description of Artificial Sequence: Synthetic epitope
EEIIVKAMSD

SEQ ID NO: 5384 - protein, 10 aa, Artificial Sequence
  Description of Artificial Sequence: Synthetic epitope
EEIIVKAMSD

SEQ ID NO: 5385 - protein, 10 aa, Artificial Sequence
  Description of Artificial Sequence: Synthetic epitope
EEIIVKNKDE

SEQ ID NO: 5386 - protein, 10 aa, Artificial Sequence
  Description of Artificial Sequence: Synthetic epitope
EEIIVSDNEG

SEQ ID NO: 5387 - protein, 10 aa, Artificial Sequence
  Description of Artificial Sequence: Synthetic epitope
EEIKEQEVVD

SEQ ID NO: 5388 - protein, 10 aa, Artificial Sequence
  Description of Artificial Sequence: Synthetic epitope
EEIKKANQAA

SEQ ID NO: 5389 - protein, 10 aa, Artificial Sequence
  Description of Artificial Sequence: Synthetic epitope
EEIKSKKMKE

SEQ ID NO: 5390 - protein, 10 aa, Artificial Sequence
  Description of Artificial Sequence: Synthetic epitope
EEIKSQNSQE

SEQ ID NO: 5391 - protein, 10 aa, Artificial Sequence
  Description of Artificial Sequence: Synthetic epitope
EEILESSLLP

SEQ ID NO: 5392 - protein, 10 aa, Artificial Sequence
  Description of Artificial Sequence: Synthetic epitope
EEINRAGMEW

SEQ ID NO: 5393 - protein, 10 aa, Artificial Sequence
  Description of Artificial Sequence: Synthetic epitope
EEINYLTRIH

SEQ ID NO: 5394 - protein, 10 aa, Artificial Sequence
  Description of Artificial Sequence: Synthetic epitope
EEIPESQTNN

SEQ ID NO: 5395 - protein, 10 aa, Artificial Sequence
  Description of Artificial Sequence: Synthetic epitope
EEIPRNQMGK

SEQ ID NO: 5396 - protein, 10 aa, Artificial Sequence
  Description of Artificial Sequence: Synthetic epitope
EEIPSSDSSA

SEQ ID NO: 5397 - protein, 10 aa, Artificial Sequence
  Description of Artificial Sequence: Synthetic epitope
EEIQEVMKGR

SEQ ID NO: 5398 - protein, 10 aa, Artificial Sequence
  Description of Artificial Sequence: Synthetic epitope
EEIQSNAVRS

SEQ ID NO: 5399 - protein, 10 aa, Artificial Sequence
  Description of Artificial Sequence: Synthetic epitope
EEIQYTSIKT

SEQ ID NO: 5400 - protein, 10 aa, Artificial Sequence
  Description of Artificial Sequence: Synthetic epitope
EEIRNRKDVK

SEQ ID NO: 5401 - protein, 10 aa, Artificial Sequence
  Description of Artificial Sequence: Synthetic epitope
EEISGSGTQP

SEQ ID NO: 5402 - protein, 10 aa, Artificial Sequence
  Description of Artificial Sequence: Synthetic epitope
EEISLHEEQY

SEQ ID NO: 5403 - protein, 10 aa, Artificial Sequence
  Description of Artificial Sequence: Synthetic epitope
EEISQQKNAA

SEQ ID NO: 5404 - protein, 10 aa, Artificial Sequence
  Description of Artificial Sequence: Synthetic epitope
EEISSTEIQV

SEQ ID NO: 5405 - protein, 10 aa, Artificial Sequence
  Description of Artificial Sequence: Synthetic epitope
EEITKQQTKQ

SEQ ID NO: 5406 - protein, 10 aa, Artificial Sequence
  Description of Artificial Sequence: Synthetic epitope
EEITLKQETL

SEQ ID NO: 5407 - protein, 10 aa, Artificial Sequence
  Description of Artificial Sequence: Synthetic epitope
EEIVIGTEQV

SEQ ID NO: 5408 - protein, 10 aa, Artificial Sequence
  Description of Artificial Sequence: Synthetic epitope
EEIVQLKQRR

SEQ ID NO: 5409 - protein, 10 aa, Artificial Sequence
  Description of Artificial Sequence: Synthetic epitope
EEKAAKVATK

SEQ ID NO: 5410 - protein, 10 aa, Artificial Sequence
  Description of Artificial Sequence: Synthetic epitope
EEKAAQVEEN

SEQ ID NO: 5411 - protein, 10 aa, Artificial Sequence
  Description of Artificial Sequence: Synthetic epitope
EEKAKKGEVD

SEQ ID NO: 5412 - protein, 10 aa, Artificial Sequence
  Description of Artificial Sequence: Synthetic epitope
EEKAKKLLSS

SEQ ID NO: 5413 - protein, 10 aa, Artificial Sequence
  Description of Artificial Sequence: Synthetic epitope
EEKANDSNPN

SEQ ID NO: 5414 - protein, 10 aa, Artificial Sequence
  Description of Artificial Sequence: Synthetic epitope
EEKAPVTLLD

SEQ ID NO: 5415 - protein, 10 aa, Artificial Sequence
  Description of Artificial Sequence: Synthetic epitope
EEKAQDKFMT

SEQ ID NO: 5416 - protein, 10 aa, Artificial Sequence
  Description of Artificial Sequence: Synthetic epitope
EEKASQLEKT

SEQ ID NO: 5417 - protein, 10 aa, Artificial Sequence
  Description of Artificial Sequence: Synthetic epitope
EEKATMKNVP

SEQ ID NO: 5418 - protein, 10 aa, Artificial Sequence
  Description of Artificial Sequence: Synthetic epitope
EEKDIAANEE

SEQ ID NO: 5419 - protein, 10 aa, Artificial Sequence
  Description of Artificial Sequence: Synthetic epitope
EEKDKSKELH

SEQ ID NO: 5420 - protein, 10 aa, Artificial Sequence
  Description of Artificial Sequence: Synthetic epitope
EEKDLRSSNE

SEQ ID NO: 5421 - protein, 10 aa, Artificial Sequence
  Description of Artificial Sequence: Synthetic epitope
EEKDSFFPMD

SEQ ID NO: 5422 - protein, 10 aa, Artificial Sequence
  Description of Artificial Sequence: Synthetic epitope
EEKDSRDVLD

SEQ ID NO: 5423 - protein, 10 aa, Artificial Sequence
  Description of Artificial Sequence: Synthetic epitope
EEKEAEAGTS

SEQ ID NO: 5424 - protein, 10 aa, Artificial Sequence
  Description of Artificial Sequence: Synthetic epitope
EEKEAINQET

SEQ ID NO: 5425 - protein, 10 aa, Artificial Sequence
  Description of Artificial Sequence: Synthetic epitope
EEKEEQSTNS

SEQ ID NO: 5426 - protein, 10 aa, Artificial Sequence
  Description of Artificial Sequence: Synthetic epitope
EEKEEVIDDQ

SEQ ID NO: 5427 - protein, 10 aa, Artificial Sequence
  Description of Artificial Sequence: Synthetic epitope
EEKEIQSSNL

SEQ ID NO: 5428 - protein, 10 aa, Artificial Sequence
  Description of Artificial Sequence: Synthetic epitope
EEKERALGLQ

SEQ ID NO: 5429 - protein, 10 aa, Artificial Sequence
  Description of Artificial Sequence: Synthetic epitope
EEKETLKQSK

SEQ ID NO: 5430 - protein, 10 aa, Artificial Sequence
  Description of Artificial Sequence: Synthetic epitope
EEKEVKQILS

SEQ ID NO: 5431 - protein, 10 aa, Artificial Sequence
  Description of Artificial Sequence: Synthetic epitope
EEKFTSLNKS

SEQ ID NO: 5432 - protein, 10 aa, Artificial Sequence
  Description of Artificial Sequence: Synthetic epitope
EEKGETQVKE

SEQ ID NO: 5433 - protein, 10 aa, Artificial Sequence
  Description of Artificial Sequence: Synthetic epitope
EEKHSSEATE

SEQ ID NO: 5434 - protein, 10 aa, Artificial Sequence
  Description of Artificial Sequence: Synthetic epitope
EEKILESVAE

SEQ ID NO: 5435 - protein, 10 aa, Artificial Sequence
  Description of Artificial Sequence: Synthetic epitope
EEKINAVVET

SEQ ID NO: 5436 - protein, 10 aa, Artificial Sequence
  Description of Artificial Sequence: Synthetic epitope
EEKIQSAQIN

SEQ ID NO: 5437 - protein, 10 aa, Artificial Sequence
  Description of Artificial Sequence: Synthetic epitope
EEKIQSAQIN

SEQ ID NO: 5438 - protein, 10 aa, Artificial Sequence
  Description of Artificial Sequence: Synthetic epitope
EEKIQSAQIN

SEQ ID NO: 5439 - protein, 10 aa, Artificial Sequence
  Description of Artificial Sequence: Synthetic epitope
EEKIQSAQIN

SEQ ID NO: 5440 - protein, 10 aa, Artificial Sequence
  Description of Artificial Sequence: Synthetic epitope
EEKISRATEG

SEQ ID NO: 5441 - protein, 10 aa, Artificial Sequence
  Description of Artificial Sequence: Synthetic epitope
EEKKAQNSEM

SEQ ID NO: 5442 - protein, 10 aa, Artificial Sequence
  Description of Artificial Sequence: Synthetic epitope
EEKKARHMRK

SEQ ID NO: 5443 - protein, 10 aa, Artificial Sequence
  Description of Artificial Sequence: Synthetic epitope
EEKKDADRKR

SEQ ID NO: 5444 - protein, 10 aa, Artificial Sequence
  Description of Artificial Sequence: Synthetic epitope
EEKKENKELT

SEQ ID NO: 5445 - protein, 10 aa, Artificial Sequence
  Description of Artificial Sequence: Synthetic epitope
EEKKEQTIEI

SEQ ID NO: 5446 - protein, 10 aa, Artificial Sequence
  Description of Artificial Sequence: Synthetic epitope
EEKKGRLTVD

SEQ ID NO: 5447 - protein, 10 aa, Artificial Sequence
  Description of Artificial Sequence: Synthetic epitope
EEKKIISEEH

SEQ ID NO: 5448 - protein, 10 aa, Artificial Sequence
  Description of Artificial Sequence: Synthetic epitope
EEKKLENERM

SEQ ID NO: 5449 - protein, 10 aa, Artificial Sequence
  Description of Artificial Sequence: Synthetic epitope
EEKKNLSAST

SEQ ID NO: 5450 - protein, 10 aa, Artificial Sequence
  Description of Artificial Sequence: Synthetic epitope
EEKKQPDEEP

SEQ ID NO: 5451 - protein, 10 aa, Artificial Sequence
  Description of Artificial Sequence: Synthetic epitope
EEKKQVKEEA

SEQ ID NO: 5452 - protein, 10 aa, Artificial Sequence
  Description of Artificial Sequence: Synthetic epitope
EEKKTATQLH

SEQ ID NO: 5453 - protein, 10 aa, Artificial Sequence
  Description of Artificial Sequence: Synthetic epitope
EEKLAISREA

SEQ ID NO: 5454 - protein, 10 aa, Artificial Sequence
  Description of Artificial Sequence: Synthetic epitope
EEKLAKAKGS

SEQ ID NO: 5455 - protein, 10 aa, Artificial Sequence
  Description of Artificial Sequence: Synthetic epitope
EEKLDIEAVV

SEQ ID NO: 5456 - protein, 10 aa, Artificial Sequence
  Description of Artificial Sequence: Synthetic epitope
EEKLISKFDK

SEQ ID NO: 5457 - protein, 10 aa, Artificial Sequence
  Description of Artificial Sequence: Synthetic epitope
EEKLLAEKRM

SEQ ID NO: 5458 - protein, 10 aa, Artificial Sequence
  Description of Artificial Sequence: Synthetic epitope
EEKLSAALQA

SEQ ID NO: 5459 - protein, 10 aa, Artificial Sequence
  Description of Artificial Sequence: Synthetic epitope
EEKLSSLSKA

SEQ ID NO: 5460 - protein, 10 aa, Artificial Sequence
  Description of Artificial Sequence: Synthetic epitope
EEKLTELLVK

SEQ ID NO: 5461 - protein, 10 aa, Artificial Sequence
  Description of Artificial Sequence: Synthetic epitope
EEKLVKANIT

SEQ ID NO: 5462 - protein, 10 aa, Artificial Sequence
  Description of Artificial Sequence: Synthetic epitope
EEKNATIIYD

SEQ ID NO: 5463 - protein, 10 aa, Artificial Sequence
  Description of Artificial Sequence: Synthetic epitope
EEKNEILQGK

SEQ ID NO: 5464 - protein, 10 aa, Artificial Sequence
  Description of Artificial Sequence: Synthetic epitope
EEKNEKRQKL

SEQ ID NO: 5465 - protein, 10 aa, Artificial Sequence
  Description of Artificial Sequence: Synthetic epitope
EEKNQVAEML

SEQ ID NO: 5466 - protein, 10 aa, Artificial Sequence
  Description of Artificial Sequence: Synthetic epitope
EEKPAVTAAP

SEQ ID NO: 5467 - protein, 10 aa, Artificial Sequence
  Description of Artificial Sequence: Synthetic epitope
EEKPKKEEVK

SEQ ID NO: 5468 - protein, 10 aa, Artificial Sequence
  Description of Artificial Sequence: Synthetic epitope
EEKQIEVAEN

SEQ ID NO: 5469 - protein, 10 aa, Artificial Sequence
  Description of Artificial Sequence: Synthetic epitope
EEKQIKKEGA

SEQ ID NO: 5470 - protein, 10 aa, Artificial Sequence
  Description of Artificial Sequence: Synthetic epitope
EEKQKSTWKK

SEQ ID NO: 5471 - protein, 10 aa, Artificial Sequence
  Description of Artificial Sequence: Synthetic epitope
EEKQQTERVT

SEQ ID NO: 5472 - protein, 10 aa, Artificial Sequence
  Description of Artificial Sequence: Synthetic epitope
EEKQSLLVKE

SEQ ID NO: 5473 - protein, 10 aa, Artificial Sequence
  Description of Artificial Sequence: Synthetic epitope
EEKRKQKEQI

SEQ ID NO: 5474 - protein, 10 aa, Artificial Sequence
  Description of Artificial Sequence: Synthetic epitope
EEKRLAQETD

SEQ ID NO: 5475 - protein, 10 aa, Artificial Sequence
  Description of Artificial Sequence: Synthetic epitope
EEKRQRVIRR

SEQ ID NO: 5476 - protein, 10 aa, Artificial Sequence
  Description of Artificial Sequence: Synthetic epitope
EEKSKSEESK

SEQ ID NO: 5477 - protein, 10 aa, Artificial Sequence
  Description of Artificial Sequence: Synthetic epitope
EEKSNMIRKS

SEQ ID NO: 5478 - protein, 10 aa, Artificial Sequence
  Description of Artificial Sequence: Synthetic epitope
EEKSTIQSKL

SEQ ID NO: 5479 - protein, 10 aa, Artificial Sequence
  Description of Artificial Sequence: Synthetic epitope
EEKTDNATLL

SEQ ID NO: 5480 - protein, 10 aa, Artificial Sequence
  Description of Artificial Sequence: Synthetic epitope
EEKTDQPSDS

SEQ ID NO: 5481 - protein, 10 aa, Artificial Sequence
  Description of Artificial Sequence: Synthetic epitope
EEKTSKMTNG

SEQ ID NO: 5482 - protein, 10 aa, Artificial Sequence
  Description of Artificial Sequence: Synthetic epitope
EEKTSKNFEE

SEQ ID NO: 5483 - protein, 10 aa, Artificial Sequence
  Description of Artificial Sequence: Synthetic epitope
EEKVKKQRSA

SEQ ID NO: 5484 - protein, 10 aa, Artificial Sequence
  Description of Artificial Sequence: Synthetic epitope
EEKVVKQEGK

SEQ ID NO: 5485 - protein, 10 aa, Artificial Sequence
  Description of Artificial Sequence: Synthetic epitope
EEKWSKQKAK

SEQ ID NO: 5486 - protein, 10 aa, Artificial Sequence
  Description of Artificial Sequence: Synthetic epitope
EELAAMKQIL

SEQ ID NO: 5487 - protein, 10 aa, Artificial Sequence
  Description of Artificial Sequence: Synthetic epitope
EELADTVVSM

SEQ ID NO: 5488 - protein, 10 aa, Artificial Sequence
  Description of Artificial Sequence: Synthetic epitope
EELAELSKKS

SEQ ID NO: 5489 - protein, 10 aa, Artificial Sequence
  Description of Artificial Sequence: Synthetic epitope
EELASSYERK

SEQ ID NO: 5490 - protein, 10 aa, Artificial Sequence
  Description of Artificial Sequence: Synthetic epitope
EELDLLRIDR

SEQ ID NO: 5491 - protein, 10 aa, Artificial Sequence
  Description of Artificial Sequence: Synthetic epitope
EELDLMKMRE

SEQ ID NO: 5492 - protein, 10 aa, Artificial Sequence
  Description of Artificial Sequence: Synthetic epitope
EELELEQTKM

SEQ ID NO: 5493 - protein, 10 aa, Artificial Sequence
  Description of Artificial Sequence: Synthetic epitope
EELELSNQET

SEQ ID NO: 5494 - protein, 10 aa, Artificial Sequence
  Description of Artificial Sequence: Synthetic epitope
EELEQLKLTT

SEQ ID NO: 5495 - protein, 10 aa, Artificial Sequence
  Description of Artificial Sequence: Synthetic epitope
EELFSLSESA

SEQ ID NO: 5496 - protein, 10 aa, Artificial Sequence
  Description of Artificial Sequence: Synthetic epitope
EELGIAAVSQ

SEQ ID NO: 5497 - protein, 10 aa, Artificial Sequence
  Description of Artificial Sequence: Synthetic epitope
EELGKQSRKA

SEQ ID NO: 5498 - protein, 10 aa, Artificial Sequence
  Description of Artificial Sequence: Synthetic epitope
EELGTSRSAF

SEQ ID NO: 5499 - protein, 10 aa, Artificial Sequence
  Description of Artificial Sequence: Synthetic epitope
EELHAARVGK

SEQ ID NO: 5500 - protein, 10 aa, Artificial Sequence
  Description of Artificial Sequence: Synthetic epitope
EELKARISAS

SEQ ID NO: 5501 - protein, 10 aa, Artificial Sequence
  Description of Artificial Sequence: Synthetic epitope
EELKESKKPK

SEQ ID NO: 5502 - protein, 10 aa, Artificial Sequence
  Description of Artificial Sequence: Synthetic epitope
EELKSRRDLE

SEQ ID NO: 5503 - protein, 10 aa, Artificial Sequence
  Description of Artificial Sequence: Synthetic epitope
EELLANSLTV

SEQ ID NO: 5504 - protein, 10 aa, Artificial Sequence
  Description of Artificial Sequence: Synthetic epitope
EELLAVEAGA

SEQ ID NO: 5505 - protein, 10 aa, Artificial Sequence
  Description of Artificial Sequence: Synthetic epitope
EELLERADRA

SEQ ID NO: 5506 - protein, 10 aa, Artificial Sequence
  Description of Artificial Sequence: Synthetic epitope
EELLFQSAIR

SEQ ID NO: 5507 - protein, 10 aa, Artificial Sequence
  Description of Artificial Sequence: Synthetic epitope
EELLKVLGVN

SEQ ID NO: 5508 - protein, 10 aa, Artificial Sequence
  Description of Artificial Sequence: Synthetic epitope
EELLTMKVEA

SEQ ID NO: 5509 - protein, 10 aa, Artificial Sequence
  Description of Artificial Sequence: Synthetic epitope
EELLVIFNKK

SEQ ID NO: 5510 - protein, 10 aa, Artificial Sequence
  Description of Artificial Sequence: Synthetic epitope
EELMEATPPN

SEQ ID NO: 5511 - protein, 10 aa, Artificial Sequence
  Description of Artificial Sequence: Synthetic epitope
EELMVLSSNS

SEQ ID NO: 5512 - protein, 10 aa, Artificial Sequence
  Description of Artificial Sequence: Synthetic epitope
EELNPLKQQK

SEQ ID NO: 5513 - protein, 10 aa, Artificial Sequence
  Description of Artificial Sequence: Synthetic epitope
EELQATDKKR

SEQ ID NO: 5514 - protein, 10 aa, Artificial Sequence
  Description of Artificial Sequence: Synthetic epitope
EELQAVLRSS

SEQ ID NO: 5515 - protein, 10 aa, Artificial Sequence
  Description of Artificial Sequence: Synthetic epitope
EELQQVAAQF

SEQ ID NO: 5516 - protein, 10 aa, Artificial Sequence
  Description of Artificial Sequence: Synthetic epitope
EELQSLAGKH

SEQ ID NO: 5517 - protein, 10 aa, Artificial Sequence
  Description of Artificial Sequence: Synthetic epitope
EELRWQEVDE

SEQ ID NO: 5518 - protein, 10 aa, Artificial Sequence
  Description of Artificial Sequence: Synthetic epitope
EELSEASRNT

SEQ ID NO: 5519 - protein, 10 aa, Artificial Sequence
  Description of Artificial Sequence: Synthetic epitope
EELSFNQTTA

SEQ ID NO: 5520 - protein, 10 aa, Artificial Sequence
  Description of Artificial Sequence: Synthetic epitope
EELSLELSEA

SEQ ID NO: 5521 - protein, 10 aa, Artificial Sequence
  Description of Artificial Sequence: Synthetic epitope
EELSLSFNAT

SEQ ID NO: 5522 - protein, 10 aa, Artificial Sequence
  Description of Artificial Sequence: Synthetic epitope
EELSSAANSI

SEQ ID NO: 5523 - protein, 10 aa, Artificial Sequence
  Description of Artificial Sequence: Synthetic epitope
EELSSQMSSF

SEQ ID NO: 5524 - protein, 10 aa, Artificial Sequence
  Description of Artificial Sequence: Synthetic epitope
EELTQPTESQ

SEQ ID NO: 5525 - protein, 10 aa, Artificial Sequence
  Description of Artificial Sequence: Synthetic epitope
EELVARSETH

SEQ ID NO: 5526 - protein, 10 aa, Artificial Sequence
  Description of Artificial Sequence: Synthetic epitope
EELVIFSFHE

SEQ ID NO: 5527 - protein, 10 aa, Artificial Sequence
  Description of Artificial Sequence: Synthetic epitope
EELVQAMVQE

SEQ ID NO: 5528 - protein, 10 aa, Artificial Sequence
  Description of Artificial Sequence: Synthetic epitope
EELVSSRERA

SEQ ID NO: 5529 - protein, 10 aa, Artificial Sequence
  Description of Artificial Sequence: Synthetic epitope
EELVVGYETS

SEQ ID NO: 5530 - protein, 10 aa, Artificial Sequence
  Description of Artificial Sequence: Synthetic epitope
EELVVIDLQT

SEQ ID NO: 5531 - protein, 10 aa, Artificial Sequence
  Description of Artificial Sequence: Synthetic epitope
EELVVQVDGQ

SEQ ID NO: 5532 - protein, 10 aa, Artificial Sequence
  Description of Artificial Sequence: Synthetic epitope
EELYAFMPAR

SEQ ID NO: 5533 - protein, 10 aa, Artificial Sequence
  Description of Artificial Sequence: Synthetic epitope
EELYKSITAL

SEQ ID NO: 5534 - protein, 10 aa, Artificial Sequence
  Description of Artificial Sequence: Synthetic epitope
EEMALAEEQL

SEQ ID NO: 5535 - protein, 10 aa, Artificial Sequence
  Description of Artificial Sequence: Synthetic epitope
EEMETAKKGL

SEQ ID NO: 5536 - protein, 10 aa, Artificial Sequence
  Description of Artificial Sequence: Synthetic epitope
EEMGHLMQAE

SEQ ID NO: 5537 - protein, 10 aa, Artificial Sequence
  Description of Artificial Sequence: Synthetic epitope
EEMLEHAESA

SEQ ID NO: 5538 - protein, 10 aa, Artificial Sequence
  Description of Artificial Sequence: Synthetic epitope
EEMLELSLSS

SEQ ID NO: 5539 - protein, 10 aa, Artificial Sequence
  Description of Artificial Sequence: Synthetic epitope
EEMMLLSNGA

SEQ ID NO: 5540 - protein, 10 aa, Artificial Sequence
  Description of Artificial Sequence: Synthetic epitope
EEMMQESPDP

SEQ ID NO: 5541 - protein, 10 aa, Artificial Sequence
  Description of Artificial Sequence: Synthetic epitope
EEMNDINAPY

SEQ ID NO: 5542 - protein, 10 aa, Artificial Sequence
  Description of Artificial Sequence: Synthetic epitope
EEMRETLKND

SEQ ID NO: 5543 - protein, 10 aa, Artificial Sequence
  Description of Artificial Sequence: Synthetic epitope
EEMRIAMETY

SEQ ID NO: 5544 - protein, 10 aa, Artificial Sequence
  Description of Artificial Sequence: Synthetic epitope
EEMSDEYSDI

SEQ ID NO: 5545 - protein, 10 aa, Artificial Sequence
  Description of Artificial Sequence: Synthetic epitope
EEMSKVITTF

SEQ ID NO: 5546 - protein, 10 aa, Artificial Sequence
  Description of Artificial Sequence: Synthetic epitope
EEMTELESPK

SEQ ID NO: 5547 - protein, 10 aa, Artificial Sequence
  Description of Artificial Sequence: Synthetic epitope
EENAEKAFYG

SEQ ID NO: 5548 - protein, 10 aa, Artificial Sequence
  Description of Artificial Sequence: Synthetic epitope
EENAESLSST

SEQ ID NO: 5549 - protein, 10 aa, Artificial Sequence
  Description of Artificial Sequence: Synthetic epitope
EENASNVNKH

SEQ ID NO: 5550 - protein, 10 aa, Artificial Sequence
  Description of Artificial Sequence: Synthetic epitope
EENENSELGD

SEQ ID NO: 5551 - protein, 10 aa, Artificial Sequence
  Description of Artificial Sequence: Synthetic epitope
EENERALESK

SEQ ID NO: 5552 - protein, 10 aa, Artificial Sequence
  Description of Artificial Sequence: Synthetic epitope
EENESLTAML

SEQ ID NO: 5553 - protein, 10 aa, Artificial Sequence
  Description of Artificial Sequence: Synthetic epitope
EENETKKESS

SEQ ID NO: 5554 - protein, 10 aa, Artificial Sequence
  Description of Artificial Sequence: Synthetic epitope
EENGSTSKTI

SEQ ID NO: 5555 - protein, 10 aa, Artificial Sequence
  Description of Artificial Sequence: Synthetic epitope
EENIVSRSEF

SEQ ID NO: 5556 - protein, 10 aa, Artificial Sequence
  Description of Artificial Sequence: Synthetic epitope
EENKVSKNTG

SEQ ID NO: 5557 - protein, 10 aa, Artificial Sequence
  Description of Artificial Sequence: Synthetic epitope
EENMALRSKA

SEQ ID NO: 5558 - protein, 10 aa, Artificial Sequence
  Description of Artificial Sequence: Synthetic epitope
EENMDDQWMQ

SEQ ID NO: 5559 - protein, 10 aa, Artificial Sequence
  Description of Artificial Sequence: Synthetic epitope
EENNKQKAND

SEQ ID NO: 5560 - protein, 10 aa, Artificial Sequence
  Description of Artificial Sequence: Synthetic epitope
EENNVKIGNL

SEQ ID NO: 5561 - protein, 10 aa, Artificial Sequence
  Description of Artificial Sequence: Synthetic epitope
EENPRRASKA

SEQ ID NO: 5562 - protein, 10 aa, Artificial Sequence
  Description of Artificial Sequence: Synthetic epitope
EENQVLELLI

SEQ ID NO: 5563 - protein, 10 aa, Artificial Sequence
  Description of Artificial Sequence: Synthetic epitope
EENREAAYNA

SEQ ID NO: 5564 - protein, 10 aa, Artificial Sequence
  Description of Artificial Sequence: Synthetic epitope
EENRSKTEDR

SEQ ID NO: 5565 - protein, 10 aa, Artificial Sequence
  Description of Artificial Sequence: Synthetic epitope
EENSENRISK

SEQ ID NO: 5566 - protein, 10 aa, Artificial Sequence
  Description of Artificial Sequence: Synthetic epitope
EENSESALRK

SEQ ID NO: 5567 - protein, 10 aa, Artificial Sequence
  Description of Artificial Sequence: Synthetic epitope
EENSESQSPQ

SEQ ID NO: 5568 - protein, 10 aa, Artificial Sequence
  Description of Artificial Sequence: Synthetic epitope
EENSLAEYHS

SEQ ID NO: 5569 - protein, 10 aa, Artificial Sequence
  Description of Artificial Sequence: Synthetic epitope
EENSLASEPQ

SEQ ID NO: 5570 - protein, 10 aa, Artificial Sequence
  Description of Artificial Sequence: Synthetic epitope
EENSLRANLG

SEQ ID NO: 5571 - protein, 10 aa, Artificial Sequence
  Description of Artificial Sequence: Synthetic epitope
EENSNLRKVE

SEQ ID NO: 5572 - protein, 10 aa, Artificial Sequence
  Description of Artificial Sequence: Synthetic epitope
EENSQNSSEK

SEQ ID NO: 5573 - protein, 10 aa, Artificial Sequence
  Description of Artificial Sequence: Synthetic epitope
EENSSMVLGA

SEQ ID NO: 5574 - protein, 10 aa, Artificial Sequence
  Description of Artificial Sequence: Synthetic epitope
EENSTRQSED

SEQ ID NO: 5575 - protein, 10 aa, Artificial Sequence
  Description of Artificial Sequence: Synthetic epitope
EENSVHILDE

SEQ ID NO: 5576 - protein, 10 aa, Artificial Sequence
  Description of Artificial Sequence: Synthetic epitope
EENTKEEKPD

SEQ ID NO: 5577 - protein, 10 aa, Artificial Sequence
  Description of Artificial Sequence: Synthetic epitope
EENTKTKNKP

SEQ ID NO: 5578 - protein, 10 aa, Artificial Sequence
  Description of Artificial Sequence: Synthetic epitope
EENTSINLSK

SEQ ID NO: 5579 - protein, 10 aa, Artificial Sequence
  Description of Artificial Sequence: Synthetic epitope
EENTVVSSDP

SEQ ID NO: 5580 - protein, 10 aa, Artificial Sequence
  Description of Artificial Sequence: Synthetic epitope
EENVRATEAV

SEQ ID NO: 5581 - protein, 10 aa, Artificial Sequence
  Description of Artificial Sequence: Synthetic epitope
EENVVLRSEA

SEQ ID NO: 5582 - protein, 10 aa, Artificial Sequence
  Description of Artificial Sequence: Synthetic epitope
EEPAQKLKDK

SEQ ID NO: 5583 - protein, 10 aa, Artificial Sequence
  Description of Artificial Sequence: Synthetic epitope
EEPASTEGLD

SEQ ID NO: 5584 - protein, 10 aa, Artificial Sequence
  Description of Artificial Sequence: Synthetic epitope
EEPKIAQLQD

SEQ ID NO: 5585 - protein, 10 aa, Artificial Sequence
  Description of Artificial Sequence: Synthetic epitope
EEPKKSTTSA

SEQ ID NO: 5586 - protein, 10 aa, Artificial Sequence
  Description of Artificial Sequence: Synthetic epitope
EEPKVKTQWP

SEQ ID NO: 5587 - protein, 10 aa, Artificial Sequence
  Description of Artificial Sequence: Synthetic epitope
EEPLTISELV

SEQ ID NO: 5588 - protein, 10 aa, Artificial Sequence
  Description of Artificial Sequence: Synthetic epitope
EEPNLDKKPS

SEQ ID NO: 5589 - protein, 10 aa, Artificial Sequence
  Description of Artificial Sequence: Synthetic epitope
EEPPNYDEEM

SEQ ID NO: 5590 - protein, 10 aa, Artificial Sequence
  Description of Artificial Sequence: Synthetic epitope
EEPQSNRSVT

SEQ ID NO: 5591 - protein, 10 aa, Artificial Sequence
  Description of Artificial Sequence: Synthetic epitope
EEPQSSQLLP

SEQ ID NO: 5592 - protein, 10 aa, Artificial Sequence
  Description of Artificial Sequence: Synthetic epitope
EEPSADAKLA

SEQ ID NO: 5593 - protein, 10 aa, Artificial Sequence
  Description of Artificial Sequence: Synthetic epitope
EEPSKQREKN

SEQ ID NO: 5594 - protein, 10 aa, Artificial Sequence
  Description of Artificial Sequence: Synthetic epitope
EEPSSQLTSV

SEQ ID NO: 5595 - protein, 10 aa, Artificial Sequence
  Description of Artificial Sequence: Synthetic epitope
EEPSSRKESR

SEQ ID NO: 5596 - protein, 10 aa, Artificial Sequence
  Description of Artificial Sequence: Synthetic epitope
EEPTASIHLN

SEQ ID NO: 5597 - protein, 10 aa, Artificial Sequence
  Description of Artificial Sequence: Synthetic epitope
EEPTNWSTET

SEQ ID NO: 5598 - protein, 10 aa, Artificial Sequence
  Description of Artificial Sequence: Synthetic epitope
EEPVQASDES

SEQ ID NO: 5599 - protein, 10 aa, Artificial Sequence
  Description of Artificial Sequence: Synthetic epitope
EEPYTVREAR

SEQ ID NO: 5600 - protein, 10 aa, Artificial Sequence
  Description of Artificial Sequence: Synthetic epitope
EEQAARSAEY

SEQ ID NO: 5601 - protein, 10 aa, Artificial Sequence
  Description of Artificial Sequence: Synthetic epitope
EEQAAVVTAM

SEQ ID NO: 5602 - protein, 10 aa, Artificial Sequence
  Description of Artificial Sequence: Synthetic epitope
EEQADSESSE

SEQ ID NO: 5603 - protein, 10 aa, Artificial Sequence
  Description of Artificial Sequence: Synthetic epitope
EEQAEVSLQD

SEQ ID NO: 5604 - protein, 10 aa, Artificial Sequence
  Description of Artificial Sequence: Synthetic epitope
EEQAVSKVDG

SEQ ID NO: 5605 - protein, 10 aa, Artificial Sequence
  Description of Artificial Sequence: Synthetic epitope
EEQDASSNDN

SEQ ID NO: 5606 - protein, 10 aa, Artificial Sequence
  Description of Artificial Sequence: Synthetic epitope
EEQDIVMKKQ

SEQ ID NO: 5607 - protein, 10 aa, Artificial Sequence
  Description of Artificial Sequence: Synthetic epitope
EEQDKSQPYF

SEQ ID NO: 5608 - protein, 10 aa, Artificial Sequence
  Description of Artificial Sequence: Synthetic epitope
EEQDLSMADF

SEQ ID NO: 5609 - protein, 10 aa, Artificial Sequence
  Description of Artificial Sequence: Synthetic epitope
EEQDSQNEGS

SEQ ID NO: 5610 - protein, 10 aa, Artificial Sequence
  Description of Artificial Sequence: Synthetic epitope
EEQDTQESLP

SEQ ID NO: 5611 - protein, 10 aa, Artificial Sequence
  Description of Artificial Sequence: Synthetic epitope
EEQEESVYNL

SEQ ID NO: 5612 - protein, 10 aa, Artificial Sequence
  Description of Artificial Sequence: Synthetic epitope
EEQEGKAELQ

SEQ ID NO: 5613 - protein, 10 aa, Artificial Sequence
  Description of Artificial Sequence: Synthetic epitope
EEQFRSSIQE

SEQ ID NO: 5614 - protein, 10 aa, Artificial Sequence
  Description of Artificial Sequence: Synthetic epitope
EEQHEVSVNK

SEQ ID NO: 5615 - protein, 10 aa, Artificial Sequence
  Description of Artificial Sequence: Synthetic epitope
EEQHSARAPL

SEQ ID NO: 5616 - protein, 10 aa, Artificial Sequence
  Description of Artificial Sequence: Synthetic epitope
EEQINEGEQQ

SEQ ID NO: 5617 - protein, 10 aa, Artificial Sequence
  Description of Artificial Sequence: Synthetic epitope
EEQIQELMEA

SEQ ID NO: 5618 - protein, 10 aa, Artificial Sequence
  Description of Artificial Sequence: Synthetic epitope
EEQISELTAI

SEQ ID NO: 5619 - protein, 10 aa, Artificial Sequence
  Description of Artificial Sequence: Synthetic epitope
EEQISFKLEE

SEQ ID NO: 5620 - protein, 10 aa, Artificial Sequence
  Description of Artificial Sequence: Synthetic epitope
EEQITKLLIL

SEQ ID NO: 5621 - protein, 10 aa, Artificial Sequence
  Description of Artificial Sequence: Synthetic epitope
EEQKASETPP

SEQ ID NO: 5622 - protein, 10 aa, Artificial Sequence
  Description of Artificial Sequence: Synthetic epitope
EEQKIVVKVL

SEQ ID NO: 5623 - protein, 10 aa, Artificial Sequence
  Description of Artificial Sequence: Synthetic epitope
EEQKSNTAGS

SEQ ID NO: 5624 - protein, 10 aa, Artificial Sequence
  Description of Artificial Sequence: Synthetic epitope
EEQKTVLQEK

SEQ ID NO: 5625 - protein, 10 aa, Artificial Sequence
  Description of Artificial Sequence: Synthetic epitope
EEQLEIALAP

SEQ ID NO: 5626 - protein, 10 aa, Artificial Sequence
  Description of Artificial Sequence: Synthetic epitope
EEQLITQEPK

SEQ ID NO: 5627 - protein, 10 aa, Artificial Sequence
  Description of Artificial Sequence: Synthetic epitope
EEQLNQLTED

SEQ ID NO: 5628 - protein, 10 aa, Artificial Sequence
  Description of Artificial Sequence: Synthetic epitope
EEQLQLLVEQ

SEQ ID NO: 5629 - protein, 10 aa, Artificial Sequence
  Description of Artificial Sequence: Synthetic epitope
EEQLVASEEQ

SEQ ID NO: 5630 - protein, 10 aa, Artificial Sequence
  Description of Artificial Sequence: Synthetic epitope
EEQNKNVAAE

SEQ ID NO: 5631 - protein, 10 aa, Artificial Sequence
  Description of Artificial Sequence: Synthetic epitope
EEQNLNHYIQ

SEQ ID NO: 5632 - protein, 10 aa, Artificial Sequence
  Description of Artificial Sequence: Synthetic epitope
EEQNLSVAEG

SEQ ID NO: 5633 - protein, 10 aa, Artificial Sequence
  Description of Artificial Sequence: Synthetic epitope
EEQPFAMKSW

SEQ ID NO: 5634 - protein, 10 aa, Artificial Sequence
  Description of Artificial Sequence: Synthetic epitope
EEQQGEEQPQ

SEQ ID NO: 5635 - protein, 10 aa, Artificial Sequence
  Description of Artificial Sequence: Synthetic epitope
EEQQHRNREE

SEQ ID NO: 5636 - protein, 10 aa, Artificial Sequence
  Description of Artificial Sequence: Synthetic epitope
EEQQLRSQES

SEQ ID NO: 5637 - protein, 10 aa, Artificial Sequence
  Description of Artificial Sequence: Synthetic epitope
EEQQRSLVYL

SEQ ID NO: 5638 - protein, 10 aa, Artificial Sequence
  Description of Artificial Sequence: Synthetic epitope
EEQQSAQLPQ

SEQ ID NO: 5639 - protein, 10 aa, Artificial Sequence
  Description of Artificial Sequence: Synthetic epitope
EEQQSILLAQ

SEQ ID NO: 5640 - protein, 10 aa, Artificial Sequence
  Description of Artificial Sequence: Synthetic epitope
EEQRDVEVVA

SEQ ID NO: 5641 - protein, 10 aa, Artificial Sequence
  Description of Artificial Sequence: Synthetic epitope
EEQRKVTAQQ

SEQ ID NO: 5642 - protein, 10 aa, Artificial Sequence
  Description of Artificial Sequence: Synthetic epitope
EEQSEVLAKL

SEQ ID NO: 5643 - protein, 10 aa, Artificial Sequence
  Description of Artificial Sequence: Synthetic epitope
EEQVAALEQA

SEQ ID NO: 5644 - protein, 10 aa, Artificial Sequence
  Description of Artificial Sequence: Synthetic epitope
EEQVYEQGTT

SEQ ID NO: 5645 - protein, 10 aa, Artificial Sequence
  Description of Artificial Sequence: Synthetic epitope
EERAASASQQ

SEQ ID NO: 5646 - protein, 10 aa, Artificial Sequence
  Description of Artificial Sequence: Synthetic epitope
EERAKAAEMV

SEQ ID NO: 5647 - protein, 10 aa, Artificial Sequence
  Description of Artificial Sequence: Synthetic epitope
EERASELSRQ

SEQ ID NO: 5648 - protein, 10 aa, Artificial Sequence
  Description of Artificial Sequence: Synthetic epitope
EERATAQRPA

SEQ ID NO: 5649 - protein, 10 aa, Artificial Sequence
  Description of Artificial Sequence: Synthetic epitope
EERAVATKKE

SEQ ID NO: 5650 - protein, 10 aa, Artificial Sequence
  Description of Artificial Sequence: Synthetic epitope
EERDDEMENK

SEQ ID NO: 5651 - protein, 10 aa, Artificial Sequence
  Description of Artificial Sequence: Synthetic epitope
EEREERSGLQ

SEQ ID NO: 5652 - protein, 10 aa, Artificial Sequence
  Description of Artificial Sequence: Synthetic epitope
EEREHEVMTA

SEQ ID NO: 5653 - protein, 10 aa, Artificial Sequence
  Description of Artificial Sequence: Synthetic epitope
EERESESGGL

SEQ ID NO: 5654 - protein, 10 aa, Artificial Sequence
  Description of Artificial Sequence: Synthetic epitope
EERETRLFPA

SEQ ID NO: 5655 - protein, 10 aa, Artificial Sequence
  Description of Artificial Sequence: Synthetic epitope
EERFEVDQLQ

SEQ ID NO: 5656 - protein, 10 aa, Artificial Sequence
  Description of Artificial Sequence: Synthetic epitope
EERFGTSDEM

SEQ ID NO: 5657 - protein, 10 aa, Artificial Sequence
  Description of Artificial Sequence: Synthetic epitope
EERFISIRRP

SEQ ID NO: 5658 - protein, 10 aa, Artificial Sequence
  Description of Artificial Sequence: Synthetic epitope
EERGSSRQRM

SEQ ID NO: 5659 - protein, 10 aa, Artificial Sequence
  Description of Artificial Sequence: Synthetic epitope
EERHLRLQSE

SEQ ID NO: 5660 - protein, 10 aa, Artificial Sequence
  Description of Artificial Sequence: Synthetic epitope
EERHRILNET

SEQ ID NO: 5661 - protein, 10 aa, Artificial Sequence
  Description of Artificial Sequence: Synthetic epitope
EERIKRSAKR

SEQ ID NO: 5662 - protein, 10 aa, Artificial Sequence
  Description of Artificial Sequence: Synthetic epitope
EERKKQEEQA

SEQ ID NO: 5663 - protein, 10 aa, Artificial Sequence
  Description of Artificial Sequence: Synthetic epitope
EERKKREDDE

SEQ ID NO: 5664 - protein, 10 aa, Artificial Sequence
  Description of Artificial Sequence: Synthetic epitope
EERLQAKKEE

SEQ ID NO: 5665 - protein, 10 aa, Artificial Sequence
  Description of Artificial Sequence: Synthetic epitope
EERLQVVKLL

SEQ ID NO: 5666 - protein, 10 aa, Artificial Sequence
  Description of Artificial Sequence: Synthetic epitope
EERLSQLQSE

SEQ ID NO: 5667 - protein, 10 aa, Artificial Sequence
  Description of Artificial Sequence: Synthetic epitope
EERLSSKLTA

SEQ ID NO: 5668 - protein, 10 aa, Artificial Sequence
  Description of Artificial Sequence: Synthetic epitope
EERLVTIQKQ

SEQ ID NO: 5669 - protein, 10 aa, Artificial Sequence
  Description of Artificial Sequence: Synthetic epitope
EERMQVLESE

SEQ ID NO: 5670 - protein, 10 aa, Artificial Sequence
  Description of Artificial Sequence: Synthetic epitope
EERNLVPTAH

SEQ ID NO: 5671 - protein, 10 aa, Artificial Sequence
  Description of Artificial Sequence: Synthetic epitope
EERPQETTNQ

SEQ ID NO: 5672 - protein, 10 aa, Artificial Sequence
  Description of Artificial Sequence: Synthetic epitope
EERQALVENL

SEQ ID NO: 5673 - protein, 10 aa, Artificial Sequence
  Description of Artificial Sequence: Synthetic epitope
EERQDGGQNE

SEQ ID NO: 5674 - protein, 10 aa, Artificial Sequence
  Description of Artificial Sequence: Synthetic epitope
EERQLALVKG

SEQ ID NO: 5675 - protein, 10 aa, Artificial Sequence
  Description of Artificial Sequence: Synthetic epitope
EERRAEMKTR

SEQ ID NO: 5676 - protein, 10 aa, Artificial Sequence
  Description of Artificial Sequence: Synthetic epitope
EERRAETVSS

SEQ ID NO: 5677 - protein, 10 aa, Artificial Sequence
  Description of Artificial Sequence: Synthetic epitope
EERRNAEAQQ

SEQ ID NO: 5678 - protein, 10 aa, Artificial Sequence
  Description of Artificial Sequence: Synthetic epitope
EERSAEESKP

SEQ ID NO: 5679 - protein, 10 aa, Artificial Sequence
  Description of Artificial Sequence: Synthetic epitope
EERSASASNP

SEQ ID NO: 5680 - protein, 10 aa, Artificial Sequence
  Description of Artificial Sequence: Synthetic epitope
EERSSMASSP

SEQ ID NO: 5681 - protein, 10 aa, Artificial Sequence
  Description of Artificial Sequence: Synthetic epitope
EERTIADSLI

SEQ ID NO: 5682 - protein, 10 aa, Artificial Sequence
  Description of Artificial Sequence: Synthetic epitope
EERTLKQKVE

SEQ ID NO: 5683 - protein, 10 aa, Artificial Sequence
  Description of Artificial Sequence: Synthetic epitope
EERTLSLTSL

SEQ ID NO: 5684 - protein, 10 aa, Artificial Sequence
  Description of Artificial Sequence: Synthetic epitope
EERTLSRGAL

SEQ ID NO: 5685 - protein, 10 aa, Artificial Sequence
  Description of Artificial Sequence: Synthetic epitope
EERVNASTTE

SEQ ID NO: 5686 - protein, 10 aa, Artificial Sequence
  Description of Artificial Sequence: Synthetic epitope
EESAALSTSK

SEQ ID NO: 5687 - protein, 10 aa, Artificial Sequence
  Description of Artificial Sequence: Synthetic epitope
EESAATTSAS

SEQ ID NO: 5688 - protein, 10 aa, Artificial Sequence
  Description of Artificial Sequence: Synthetic epitope
EESAETTKET

SEQ ID NO: 5689 - protein, 10 aa, Artificial Sequence
  Description of Artificial Sequence: Synthetic epitope
EESALQNTNN

SEQ ID NO: 5690 - protein, 10 aa, Artificial Sequence
  Description of Artificial Sequence: Synthetic epitope
EESAMSSDRM

SEQ ID NO: 5691 - protein, 10 aa, Artificial Sequence
  Description of Artificial Sequence: Synthetic epitope
EESASKEKGE

SEQ ID NO: 5692 - protein, 10 aa, Artificial Sequence
  Description of Artificial Sequence: Synthetic epitope
EESASSVTPS

SEQ ID NO: 5693 - protein, 10 aa, Artificial Sequence
  Description of Artificial Sequence: Synthetic epitope
EESDWTENSF

SEQ ID NO: 5694 - protein, 10 aa, Artificial Sequence
  Description of Artificial Sequence: Synthetic epitope
EESEDSKMDS

SEQ ID NO: 5695 - protein, 10 aa, Artificial Sequence
  Description of Artificial Sequence: Synthetic epitope
EESEEDWKLQ

SEQ ID NO: 5696 - protein, 10 aa, Artificial Sequence
  Description of Artificial Sequence: Synthetic epitope
EESEESNVSM

SEQ ID NO: 5697 - protein, 10 aa, Artificial Sequence
  Description of Artificial Sequence: Synthetic epitope
EESEHSHKHL

SEQ ID NO: 5698 - protein, 10 aa, Artificial Sequence
  Description of Artificial Sequence: Synthetic epitope
EESEINEAKK

SEQ ID NO: 5699 - protein, 10 aa, Artificial Sequence
  Description of Artificial Sequence: Synthetic epitope
EESELALESQ

SEQ ID NO: 5700 - protein, 10 aa, Artificial Sequence
  Description of Artificial Sequence: Synthetic epitope
EESELTSADE

SEQ ID NO: 5701 - protein, 10 aa, Artificial Sequence
  Description of Artificial Sequence: Synthetic epitope
EESEQATEML

SEQ ID NO: 5702 - protein, 10 aa, Artificial Sequence
  Description of Artificial Sequence: Synthetic epitope
EESERAKSDE

SEQ ID NO: 5703 - protein, 10 aa, Artificial Sequence
  Description of Artificial Sequence: Synthetic epitope
EESESFSPRN

SEQ ID NO: 5704 - protein, 10 aa, Artificial Sequence
  Description of Artificial Sequence: Synthetic epitope
EESESTSSAR

SEQ ID NO: 5705 - protein, 10 aa, Artificial Sequence
  Description of Artificial Sequence: Synthetic epitope
EESETAFSAL

SEQ ID NO: 5706 - protein, 10 aa, Artificial Sequence
  Description of Artificial Sequence: Synthetic epitope
EESGIQKSEE

SEQ ID NO: 5707 - protein, 10 aa, Artificial Sequence
  Description of Artificial Sequence: Synthetic epitope
EESHKKFNIK

SEQ ID NO: 5708 - protein, 10 aa, Artificial Sequence
  Description of Artificial Sequence: Synthetic epitope
EESHVEVTDT

SEQ ID NO: 5709 - protein, 10 aa, Artificial Sequence
  Description of Artificial Sequence: Synthetic epitope
EESIAKIGKK

SEQ ID NO: 5710 - protein, 10 aa, Artificial Sequence
  Description of Artificial Sequence: Synthetic epitope
EESIDFDQGE

SEQ ID NO: 5711 - protein, 10 aa, Artificial Sequence
  Description of Artificial Sequence: Synthetic epitope
EESIPSRSSP

SEQ ID NO: 5712 - protein, 10 aa, Artificial Sequence
  Description of Artificial Sequence: Synthetic epitope
EESIRQNREE

SEQ ID NO: 5713 - protein, 10 aa, Artificial Sequence
  Description of Artificial Sequence: Synthetic epitope
EESISSGTST

SEQ ID NO: 5714 - protein, 10 aa, Artificial Sequence
  Description of Artificial Sequence: Synthetic epitope
EESISSTMAF

SEQ ID NO: 5715 - protein, 10 aa, Artificial Sequence
  Description of Artificial Sequence: Synthetic epitope
EESITLSSNL

SEQ ID NO: 5716 - protein, 10 aa, Artificial Sequence
  Description of Artificial Sequence: Synthetic epitope
EESKEQVAAM

SEQ ID NO: 5717 - protein, 10 aa, Artificial Sequence
  Description of Artificial Sequence: Synthetic epitope
EESKPDDAVH

SEQ ID NO: 5718 - protein, 10 aa, Artificial Sequence
  Description of Artificial Sequence: Synthetic epitope
EESKTTKSSL

SEQ ID NO: 5719 - protein, 10 aa, Artificial Sequence
  Description of Artificial Sequence: Synthetic epitope
EESKVSPRTT

SEQ ID NO: 5720 - protein, 10 aa, Artificial Sequence
  Description of Artificial Sequence: Synthetic epitope
EESLARKLLE

SEQ ID NO: 5721 - protein, 10 aa, Artificial Sequence
  Description of Artificial Sequence: Synthetic epitope
EESMGSNSMR

SEQ ID NO: 5722 - protein, 10 aa, Artificial Sequence
  Description of Artificial Sequence: Synthetic epitope
EESNIIMSTK

SEQ ID NO: 5723 - protein, 10 aa, Artificial Sequence
  Description of Artificial Sequence: Synthetic epitope
EESPSAIDSD

SEQ ID NO: 5724 - protein, 10 aa, Artificial Sequence
  Description of Artificial Sequence: Synthetic epitope
EESQAVAQAV

SEQ ID NO: 5725 - protein, 10 aa, Artificial Sequence
  Description of Artificial Sequence: Synthetic epitope
EESQKKREHH

SEQ ID NO: 5726 - protein, 10 aa, Artificial Sequence
  Description of Artificial Sequence: Synthetic epitope
EESQKSKLES

SEQ ID NO: 5727 - protein, 10 aa, Artificial Sequence
  Description of Artificial Sequence: Synthetic epitope
EESRAQQKET

SEQ ID NO: 5728 - protein, 10 aa, Artificial Sequence
  Description of Artificial Sequence: Synthetic epitope
EESRLMAKKQ

SEQ ID NO: 5729 - protein, 10 aa, Artificial Sequence
  Description of Artificial Sequence: Synthetic epitope
EESSAESLVG

SEQ ID NO: 5730 - protein, 10 aa, Artificial Sequence
  Description of Artificial Sequence: Synthetic epitope
EESSKQKGIL

SEQ ID NO: 5731 - protein, 10 aa, Artificial Sequence
  Description of Artificial Sequence: Synthetic epitope
EESSLDVNVL

SEQ ID NO: 5732 - protein, 10 aa, Artificial Sequence
  Description of Artificial Sequence: Synthetic epitope
EESSLLTSEL

SEQ ID NO: 5733 - protein, 10 aa, Artificial Sequence
  Description of Artificial Sequence: Synthetic epitope
EESSTLSVKM

SEQ ID NO: 5734 - protein, 10 aa, Artificial Sequence
  Description of Artificial Sequence: Synthetic epitope
EESSWVITEY

SEQ ID NO: 5735 - protein, 10 aa, Artificial Sequence
  Description of Artificial Sequence: Synthetic epitope
EESTALSINE

SEQ ID NO: 5736 - protein, 10 aa, Artificial Sequence
  Description of Artificial Sequence: Synthetic epitope
EESTAMATQT

SEQ ID NO: 5737 - protein, 10 aa, Artificial Sequence
  Description of Artificial Sequence: Synthetic epitope
EESTARNLNQ

SEQ ID NO: 5738 - protein, 10 aa, Artificial Sequence
  Description of Artificial Sequence: Synthetic epitope
EESTKDAQKT

SEQ ID NO: 5739 - protein, 10 aa, Artificial Sequence
  Description of Artificial Sequence: Synthetic epitope
EESTKKLPND

SEQ ID NO: 5740 - protein, 10 aa, Artificial Sequence
  Description of Artificial Sequence: Synthetic epitope
EESTNHTERW

SEQ ID NO: 5741 - protein, 10 aa, Artificial Sequence
  Description of Artificial Sequence: Synthetic epitope
EESTSRNTSL

SEQ ID NO: 5742 - protein, 10 aa, Artificial Sequence
  Description of Artificial Sequence: Synthetic epitope
EESVAEDDAE

SEQ ID NO: 5743 - protein, 10 aa, Artificial Sequence
  Description of Artificial Sequence: Synthetic epitope
EESVALEQAQ

SEQ ID NO: 5744 - protein, 10 aa, Artificial Sequence
  Description of Artificial Sequence: Synthetic epitope
EESVTVDMSV

SEQ ID NO: 5745 - protein, 10 aa, Artificial Sequence
  Description of Artificial Sequence: Synthetic epitope
EETAGSVPAE

SEQ ID NO: 5746 - protein, 10 aa, Artificial Sequence
  Description of Artificial Sequence: Synthetic epitope
EETANFESNA

SEQ ID NO: 5747 - protein, 10 aa, Artificial Sequence
  Description of Artificial Sequence: Synthetic epitope
EETANVEMSE

SEQ ID NO: 5748 - protein, 10 aa, Artificial Sequence
  Description of Artificial Sequence: Synthetic epitope
EETAQNLKRN

SEQ ID NO: 5749 - protein, 10 aa, Artificial Sequence
  Description of Artificial Sequence: Synthetic epitope
EETASADKQL

SEQ ID NO: 5750 - protein, 10 aa, Artificial Sequence
  Description of Artificial Sequence: Synthetic epitope
EETATTVVAA

SEQ ID NO: 5751 - protein, 10 aa, Artificial Sequence
  Description of Artificial Sequence: Synthetic epitope
EETAVARARR

SEQ ID NO: 5752 - protein, 10 aa, Artificial Sequence
  Description of Artificial Sequence: Synthetic epitope
EETDASFNVF

SEQ ID NO: 5753 - protein, 10 aa, Artificial Sequence
  Description of Artificial Sequence: Synthetic epitope
EETDSTAGQE

SEQ ID NO: 5754 - protein, 10 aa, Artificial Sequence
  Description of Artificial Sequence: Synthetic epitope
EETEAAIGAP

SEQ ID NO: 5755 - protein, 10 aa, Artificial Sequence
  Description of Artificial Sequence: Synthetic epitope
EETEEIVDSP

SEQ ID NO: 5756 - protein, 10 aa, Artificial Sequence
  Description of Artificial Sequence: Synthetic epitope
EETESVDNRE

SEQ ID NO: 5757 - protein, 10 aa, Artificial Sequence
  Description of Artificial Sequence: Synthetic epitope
EETEVELGQQ

SEQ ID NO: 5758 - protein, 10 aa, Artificial Sequence
  Description of Artificial Sequence: Synthetic epitope
EETGINRERK

SEQ ID NO: 5759 - protein, 10 aa, Artificial Sequence
  Description of Artificial Sequence: Synthetic epitope
EETGRRDRSS

SEQ ID NO: 5760 - protein, 10 aa, Artificial Sequence
  Description of Artificial Sequence: Synthetic epitope
EETHMKKSES

SEQ ID NO: 5761 - protein, 10 aa, Artificial Sequence
  Description of Artificial Sequence: Synthetic epitope
EETKAKEKEK

SEQ ID NO: 5762 - protein, 10 aa, Artificial Sequence
  Description of Artificial Sequence: Synthetic epitope
EETKEMPKLQ

SEQ ID NO: 5763 - protein, 10 aa, Artificial Sequence
  Description of Artificial Sequence: Synthetic epitope
EETKLTLLTL

SEQ ID NO: 5764 - protein, 10 aa, Artificial Sequence
  Description of Artificial Sequence: Synthetic epitope
EETKMVIKKG

SEQ ID NO: 5765 - protein, 10 aa, Artificial Sequence
  Description of Artificial Sequence: Synthetic epitope
EETKQSSGEK

SEQ ID NO: 5766 - protein, 10 aa, Artificial Sequence
  Description of Artificial Sequence: Synthetic epitope
EETLESLEKQ

SEQ ID NO: 5767 - protein, 10 aa, Artificial Sequence
  Description of Artificial Sequence: Synthetic epitope
EETNRQETEK

SEQ ID NO: 5768 - protein, 10 aa, Artificial Sequence
  Description of Artificial Sequence: Synthetic epitope
EETNTKEASQ

SEQ ID NO: 5769 - protein, 10 aa, Artificial Sequence
  Description of Artificial Sequence: Synthetic epitope
EETPKQEEQK

SEQ ID NO: 5770 - protein, 10 aa, Artificial Sequence
  Description of Artificial Sequence: Synthetic epitope
EETPNHAAEA

SEQ ID NO: 5771 - protein, 10 aa, Artificial Sequence
  Description of Artificial Sequence: Synthetic epitope
EETQGLSAST

SEQ ID NO: 5772 - protein, 10 aa, Artificial Sequence
  Description of Artificial Sequence: Synthetic epitope
EETQSTLQAE

SEQ ID NO: 5773 - protein, 10 aa, Artificial Sequence
  Description of Artificial Sequence: Synthetic epitope
EETQYERTEP

SEQ ID NO: 5774 - protein, 10 aa, Artificial Sequence
  Description of Artificial Sequence: Synthetic epitope
EETRNKAAQV

SEQ ID NO: 5775 - protein, 10 aa, Artificial Sequence
  Description of Artificial Sequence: Synthetic epitope
EETRVGKKLK

SEQ ID NO: 5776 - protein, 10 aa, Artificial Sequence
  Description of Artificial Sequence: Synthetic epitope
EETSAPAITT

SEQ ID NO: 5777 - protein, 10 aa, Artificial Sequence
  Description of Artificial Sequence: Synthetic epitope
EETSDLRNKW

SEQ ID NO: 5778 - protein, 10 aa, Artificial Sequence
  Description of Artificial Sequence: Synthetic epitope
EETSGAQQVE

SEQ ID NO: 5779 - protein, 10 aa, Artificial Sequence
  Description of Artificial Sequence: Synthetic epitope
EETSIHMVGE

SEQ ID NO: 5780 - protein, 10 aa, Artificial Sequence
  Description of Artificial Sequence: Synthetic epitope
EETSLLEDSS

SEQ ID NO: 5781 - protein, 10 aa, Artificial Sequence
  Description of Artificial Sequence: Synthetic epitope
EETSSPVIGE

SEQ ID NO: 5782 - protein, 10 aa, Artificial Sequence
  Description of Artificial Sequence: Synthetic epitope
EETSTSRQTD

SEQ ID NO: 5783 - protein, 10 aa, Artificial Sequence
  Description of Artificial Sequence: Synthetic epitope
EETSVTILDS

SEQ ID NO: 5784 - protein, 10 aa, Artificial Sequence
  Description of Artificial Sequence: Synthetic epitope
EETTALLKEA

SEQ ID NO: 5785 - protein, 10 aa, Artificial Sequence
  Description of Artificial Sequence: Synthetic epitope
EETTAQQEMM

SEQ ID NO: 5786 - protein, 10 aa, Artificial Sequence
  Description of Artificial Sequence: Synthetic epitope
EETTASENTE

SEQ ID NO: 5787 - protein, 10 aa, Artificial Sequence
  Description of Artificial Sequence: Synthetic epitope
EETTDDELGT

SEQ ID NO: 5788 - protein, 10 aa, Artificial Sequence
  Description of Artificial Sequence: Synthetic epitope
EETTENSTLE

SEQ ID NO: 5789 - protein, 10 aa, Artificial Sequence
  Description of Artificial Sequence: Synthetic epitope
EETTEVTSAS

SEQ ID NO: 5790 - protein, 10 aa, Artificial Sequence
  Description of Artificial Sequence: Synthetic epitope
EETTGDISDS

SEQ ID NO: 5791 - protein, 10 aa, Artificial Sequence
  Description of Artificial Sequence: Synthetic epitope
EETTNAVESN

SEQ ID NO: 5792 - protein, 10 aa, Artificial Sequence
  Description of Artificial Sequence: Synthetic epitope
EETVSAEASG

SEQ ID NO: 5793 - protein, 10 aa, Artificial Sequence
  Description of Artificial Sequence: Synthetic epitope
EETVVLLQLL

SEQ ID NO: 5794 - protein, 10 aa, Artificial Sequence
  Description of Artificial Sequence: Synthetic epitope
EETYSQKVES

SEQ ID NO: 5795 - protein, 10 aa, Artificial Sequence
  Description of Artificial Sequence: Synthetic epitope
EEVADGARQQ

SEQ ID NO: 5796 - protein, 10 aa, Artificial Sequence
  Description of Artificial Sequence: Synthetic epitope
EEVAEAAGGS

SEQ ID NO: 5797 - protein, 10 aa, Artificial Sequence
  Description of Artificial Sequence: Synthetic epitope
EEVAKLAKKQ

SEQ ID NO: 5798 - protein, 10 aa, Artificial Sequence
  Description of Artificial Sequence: Synthetic epitope
EEVAKQTIRM

SEQ ID NO: 5799 - protein, 10 aa, Artificial Sequence
  Description of Artificial Sequence: Synthetic epitope
EEVALIMREK

SEQ ID NO: 5800 - protein, 10 aa, Artificial Sequence
  Description of Artificial Sequence: Synthetic epitope
EEVAPAVESI

SEQ ID NO: 5801 - protein, 10 aa, Artificial Sequence
  Description of Artificial Sequence: Synthetic epitope
EEVDLLYVQT

SEQ ID NO: 5802 - protein, 10 aa, Artificial Sequence
  Description of Artificial Sequence: Synthetic epitope
EEVEFISVPV

SEQ ID NO: 5803 - protein, 10 aa, Artificial Sequence
  Description of Artificial Sequence: Synthetic epitope
EEVEVAGIKL

SEQ ID NO: 5804 - protein, 10 aa, Artificial Sequence
  Description of Artificial Sequence: Synthetic epitope
EEVEYYQSEA

SEQ ID NO: 5805 - protein, 10 aa, Artificial Sequence
  Description of Artificial Sequence: Synthetic epitope
EEVFESSVPQ

SEQ ID NO: 5806 - protein, 10 aa, Artificial Sequence
  Description of Artificial Sequence: Synthetic epitope
EEVGEVENNP

SEQ ID NO: 5807 - protein, 10 aa, Artificial Sequence
  Description of Artificial Sequence: Synthetic epitope
EEVGGSSLAQ

SEQ ID NO: 5808 - protein, 10 aa, Artificial Sequence
  Description of Artificial Sequence: Synthetic epitope
EEVGLEVESL

SEQ ID NO: 5809 - protein, 10 aa, Artificial Sequence
  Description of Artificial Sequence: Synthetic epitope
EEVIDKFNTM

SEQ ID NO: 5810 - protein, 10 aa, Artificial Sequence
  Description of Artificial Sequence: Synthetic epitope
EEVISKMRKA

SEQ ID NO: 5811 - protein, 10 aa, Artificial Sequence
  Description of Artificial Sequence: Synthetic epitope
EEVKISKKSK

SEQ ID NO: 5812 - protein, 10 aa, Artificial Sequence
  Description of Artificial Sequence: Synthetic epitope
EEVKQITIAN

SEQ ID NO: 5813 - protein, 10 aa, Artificial Sequence
  Description of Artificial Sequence: Synthetic epitope
EEVKSSLHES

SEQ ID NO: 5814 - protein, 10 aa, Artificial Sequence
  Description of Artificial Sequence: Synthetic epitope
EEVKSTTKTQ

SEQ ID NO: 5815 - protein, 10 aa, Artificial Sequence
  Description of Artificial Sequence: Synthetic epitope
EEVKTATATL

SEQ ID NO: 5816 - protein, 10 aa, Artificial Sequence
  Description of Artificial Sequence: Synthetic epitope
EEVKTRKPKK

SEQ ID NO: 5817 - protein, 10 aa, Artificial Sequence
  Description of Artificial Sequence: Synthetic epitope
EEVKTRKPKK

SEQ ID NO: 5818 - protein, 10 aa, Artificial Sequence
  Description of Artificial Sequence: Synthetic epitope
EEVKTRKPKK

SEQ ID NO: 5819 - protein, 10 aa, Artificial Sequence
  Description of Artificial Sequence: Synthetic epitope
EEVLEGKQRV

SEQ ID NO: 5820 - protein, 10 aa, Artificial Sequence
  Description of Artificial Sequence: Synthetic epitope
EEVLNLAQSK

SEQ ID NO: 5821 - protein, 10 aa, Artificial Sequence
  Description of Artificial Sequence: Synthetic epitope
EEVLSKVQQV

SEQ ID NO: 5822 - protein, 10 aa, Artificial Sequence
  Description of Artificial Sequence: Synthetic epitope
EEVLSLASLE

SEQ ID NO: 5823 - protein, 10 aa, Artificial Sequence
  Description of Artificial Sequence: Synthetic epitope
EEVLSSEKQL

SEQ ID NO: 5824 - protein, 10 aa, Artificial Sequence
  Description of Artificial Sequence: Synthetic epitope
EEVLSTQIAH

SEQ ID NO: 5825 - protein, 10 aa, Artificial Sequence
  Description of Artificial Sequence: Synthetic epitope
EEVNNLVKST

SEQ ID NO: 5826 - protein, 10 aa, Artificial Sequence
  Description of Artificial Sequence: Synthetic epitope
EEVPIHIEDP

SEQ ID NO: 5827 - protein, 10 aa, Artificial Sequence
  Description of Artificial Sequence: Synthetic epitope
EEVPLTAFAL

SEQ ID NO: 5828 - protein, 10 aa, Artificial Sequence
  Description of Artificial Sequence: Synthetic epitope
EEVRQQALLA

SEQ ID NO: 5829 - protein, 10 aa, Artificial Sequence
  Description of Artificial Sequence: Synthetic epitope
EEVSALSTEE

SEQ ID NO: 5830 - protein, 10 aa, Artificial Sequence
  Description of Artificial Sequence: Synthetic epitope
EEVSEIKSSY

SEQ ID NO: 5831 - protein, 10 aa, Artificial Sequence
  Description of Artificial Sequence: Synthetic epitope
EEVSNSELVL

SEQ ID NO: 5832 - protein, 10 aa, Artificial Sequence
  Description of Artificial Sequence: Synthetic epitope
EEVSPMQLIK

SEQ ID NO: 5833 - protein, 10 aa, Artificial Sequence
  Description of Artificial Sequence: Synthetic epitope
EEVSRSLRFI

SEQ ID NO: 5834 - protein, 10 aa, Artificial Sequence
  Description of Artificial Sequence: Synthetic epitope
EEVSSLVINA

SEQ ID NO: 5835 - protein, 10 aa, Artificial Sequence
  Description of Artificial Sequence: Synthetic epitope
EEVTASQGNQ

SEQ ID NO: 5836 - protein, 10 aa, Artificial Sequence
  Description of Artificial Sequence: Synthetic epitope
EEVTREEMAA

SEQ ID NO: 5837 - protein, 10 aa, Artificial Sequence
  Description of Artificial Sequence: Synthetic epitope
EEVTSVLEAN

SEQ ID NO: 5838 - protein, 10 aa, Artificial Sequence
  Description of Artificial Sequence: Synthetic epitope
EEVVIINFYN

SEQ ID NO: 5839 - protein, 10 aa, Artificial Sequence
  Description of Artificial Sequence: Synthetic epitope
EEVVKDTTNK

SEQ ID NO: 5840 - protein, 10 aa, Artificial Sequence
  Description of Artificial Sequence: Synthetic epitope
EEVVLSENKV

SEQ ID NO: 5841 - protein, 10 aa, Artificial Sequence
  Description of Artificial Sequence: Synthetic epitope
EEVVQEAAGE

SEQ ID NO: 5842 - protein, 10 aa, Artificial Sequence
  Description of Artificial Sequence: Synthetic epitope
EEWLANETMQ

SEQ ID NO: 5843 - protein, 10 aa, Artificial Sequence
  Description of Artificial Sequence: Synthetic epitope
EEWNRTAPAS

SEQ ID NO: 5844 - protein, 10 aa, Artificial Sequence
  Description of Artificial Sequence: Synthetic epitope
EEYDTDEIDS

SEQ ID NO: 5845 - protein, 10 aa, Artificial Sequence
  Description of Artificial Sequence: Synthetic epitope
EEYDTRQASN

SEQ ID NO: 5846 - protein, 10 aa, Artificial Sequence
  Description of Artificial Sequence: Synthetic epitope
EEYEHMESLD

SEQ ID NO: 5847 - protein, 10 aa, Artificial Sequence
  Description of Artificial Sequence: Synthetic epitope
EEYEREATKK

SEQ ID NO: 5848 - protein, 10 aa, Artificial Sequence
  Description of Artificial Sequence: Synthetic epitope
EEYIKMGKWV

SEQ ID NO: 5849 - protein, 10 aa, Artificial Sequence
  Description of Artificial Sequence: Synthetic epitope
EEYISAENGK

SEQ ID NO: 5850 - protein, 10 aa, Artificial Sequence
  Description of Artificial Sequence: Synthetic epitope
EEYITSALES

SEQ ID NO: 5851 - protein, 10 aa, Artificial Sequence
  Description of Artificial Sequence: Synthetic epitope
EEYKDATVSL

SEQ ID NO: 5852 - protein, 10 aa, Artificial Sequence
  Description of Artificial Sequence: Synthetic epitope
EFAARQVDGP

SEQ ID NO: 5853 - protein, 10 aa, Artificial Sequence
  Description of Artificial Sequence: Synthetic epitope
EFAIQSQITE

SEQ ID NO: 5854 - protein, 10 aa, Artificial Sequence
  Description of Artificial Sequence: Synthetic epitope
EFAKMLRLSY

SEQ ID NO: 5855 - protein, 10 aa, Artificial Sequence
  Description of Artificial Sequence: Synthetic epitope
EFALQSTSEP

SEQ ID NO: 5856 - protein, 10 aa, Artificial Sequence
  Description of Artificial Sequence: Synthetic epitope
EFDAAYKQKE

SEQ ID NO: 5857 - protein, 10 aa, Artificial Sequence
  Description of Artificial Sequence: Synthetic epitope
EFDARKLHKL

SEQ ID NO: 5858 - protein, 10 aa, Artificial Sequence
  Description of Artificial Sequence: Synthetic epitope
EFEKEKGNKS

SEQ ID NO: 5859 - protein, 10 aa, Artificial Sequence
  Description of Artificial Sequence: Synthetic epitope
EFEQSVQGGS

SEQ ID NO: 5860 - protein, 10 aa, Artificial Sequence
  Description of Artificial Sequence: Synthetic epitope
EFESAAFSQG

SEQ ID NO: 5861 - protein, 10 aa, Artificial Sequence
  Description of Artificial Sequence: Synthetic epitope
EFESAIVEAA

SEQ ID NO: 5862 - protein, 10 aa, Artificial Sequence
  Description of Artificial Sequence: Synthetic epitope
EFESKLSASQ

SEQ ID NO: 5863 - protein, 10 aa, Artificial Sequence
  Description of Artificial Sequence: Synthetic epitope
EFFKLRFNRK

SEQ ID NO: 5864 - protein, 10 aa, Artificial Sequence
  Description of Artificial Sequence: Synthetic epitope
EFFRAKMRAR

SEQ ID NO: 5865 - protein, 10 aa, Artificial Sequence
  Description of Artificial Sequence: Synthetic epitope
EFFVYKYEIP

SEQ ID NO: 5866 - protein, 10 aa, Artificial Sequence
  Description of Artificial Sequence: Synthetic epitope
EFGESIMSEN

SEQ ID NO: 5867 - protein, 10 aa, Artificial Sequence
  Description of Artificial Sequence: Synthetic epitope
EFGVLSAKKE

SEQ ID NO: 5868 - protein, 10 aa, Artificial Sequence
  Description of Artificial Sequence: Synthetic epitope
EFIIGMMGTL

SEQ ID NO: 5869 - protein, 10 aa, Artificial Sequence
  Description of Artificial Sequence: Synthetic epitope
EFIMSATPTM

SEQ ID NO: 5870 - protein, 10 aa, Artificial Sequence
  Description of Artificial Sequence: Synthetic epitope
EFIQQSSMKS

SEQ ID NO: 5871 - protein, 10 aa, Artificial Sequence
  Description of Artificial Sequence: Synthetic epitope
EFKGKKESRR

SEQ ID NO: 5872 - protein, 10 aa, Artificial Sequence
  Description of Artificial Sequence: Synthetic epitope
EFKMKMKPDI

SEQ ID NO: 5873 - protein, 10 aa, Artificial Sequence
  Description of Artificial Sequence: Synthetic epitope
EFKNSGKKSA

SEQ ID NO: 5874 - protein, 10 aa, Artificial Sequence
  Description of Artificial Sequence: Synthetic epitope
EFKTQETTHK

SEQ ID NO: 5875 - protein, 10 aa, Artificial Sequence
  Description of Artificial Sequence: Synthetic epitope
EFLEEQSLHP

SEQ ID NO: 5876 - protein, 10 aa, Artificial Sequence
  Description of Artificial Sequence: Synthetic epitope
EFLEIAQAKE

SEQ ID NO: 5877 - protein, 10 aa, Artificial Sequence
  Description of Artificial Sequence: Synthetic epitope
EFLSSAEIRE

SEQ ID NO: 5878 - protein, 10 aa, Artificial Sequence
  Description of Artificial Sequence: Synthetic epitope
EFLSTATTEV

SEQ ID NO: 5879 - protein, 10 aa, Artificial Sequence
  Description of Artificial Sequence: Synthetic epitope
EFMKEALDQS

SEQ ID NO: 5880 - protein, 10 aa, Artificial Sequence
  Description of Artificial Sequence: Synthetic epitope
EFMLDKLQNE

SEQ ID NO: 5881 - protein, 10 aa, Artificial Sequence
  Description of Artificial Sequence: Synthetic epitope
EFMPVETFSE

SEQ ID NO: 5882 - protein, 10 aa, Artificial Sequence
  Description of Artificial Sequence: Synthetic epitope
EFMTIQRLKG

SEQ ID NO: 5883 - protein, 10 aa, Artificial Sequence
  Description of Artificial Sequence: Synthetic epitope
EFNFSSKTYQ

SEQ ID NO: 5884 - protein, 10 aa, Artificial Sequence
  Description of Artificial Sequence: Synthetic epitope
EFNKTESVQN

SEQ ID NO: 5885 - protein, 10 aa, Artificial Sequence
  Description of Artificial Sequence: Synthetic epitope
EFNSAAKQLI

SEQ ID NO: 5886 - protein, 10 aa, Artificial Sequence
  Description of Artificial Sequence: Synthetic epitope
EFNSDAQEIL

SEQ ID NO: 5887 - protein, 10 aa, Artificial Sequence
  Description of Artificial Sequence: Synthetic epitope
EFPSLRVSAG

SEQ ID NO: 5888 - protein, 10 aa, Artificial Sequence
  Description of Artificial Sequence: Synthetic epitope
EFQKTSNMVD

SEQ ID NO: 5889 - protein, 10 aa, Artificial Sequence
  Description of Artificial Sequence: Synthetic epitope
EFQSTLTKSN

SEQ ID NO: 5890 - protein, 10 aa, Artificial Sequence
  Description of Artificial Sequence: Synthetic epitope
EFQVMTQTQS

SEQ ID NO: 5891 - protein, 10 aa, Artificial Sequence
  Description of Artificial Sequence: Synthetic epitope
EFRAAEQEAA

SEQ ID NO: 5892 - protein, 10 aa, Artificial Sequence
  Description of Artificial Sequence: Synthetic epitope
EFRNYIRNNE

SEQ ID NO: 5893 - protein, 10 aa, Artificial Sequence
  Description of Artificial Sequence: Synthetic epitope
EFRQKDIFAM

SEQ ID NO: 5894 - protein, 10 aa, Artificial Sequence
  Description of Artificial Sequence: Synthetic epitope
EFRSQALIEE

SEQ ID NO: 5895 - protein, 10 aa, Artificial Sequence
  Description of Artificial Sequence: Synthetic epitope
EFSEEAESLT

SEQ ID NO: 5896 - protein, 10 aa, Artificial Sequence
  Description of Artificial Sequence: Synthetic epitope
EFSQLSVKDS

SEQ ID NO: 5897 - protein, 10 aa, Artificial Sequence
  Description of Artificial Sequence: Synthetic epitope
EFSQMEKSTK

SEQ ID NO: 5898 - protein, 10 aa, Artificial Sequence
  Description of Artificial Sequence: Synthetic epitope
EFSSGSESEG

SEQ ID NO: 5899 - protein, 10 aa, Artificial Sequence
  Description of Artificial Sequence: Synthetic epitope
EFSSTVVEYE

SEQ ID NO: 5900 - protein, 10 aa, Artificial Sequence
  Description of Artificial Sequence: Synthetic epitope
EFTALRLYSE

SEQ ID NO: 5901 - protein, 10 aa, Artificial Sequence
  Description of Artificial Sequence: Synthetic epitope
EFTASKKRRK

SEQ ID NO: 5902 - protein, 10 aa, Artificial Sequence
  Description of Artificial Sequence: Synthetic epitope
EFTASTFAGE

SEQ ID NO: 5903 - protein, 10 aa, Artificial Sequence
  Description of Artificial Sequence: Synthetic epitope
EFTAWYSDME

SEQ ID NO: 5904 - protein, 10 aa, Artificial Sequence
  Description of Artificial Sequence: Synthetic epitope
EFTENSLNSI

SEQ ID NO: 5905 - protein, 10 aa, Artificial Sequence
  Description of Artificial Sequence: Synthetic epitope
EFTIESVTMR

SEQ ID NO: 5906 - protein, 10 aa, Artificial Sequence
  Description of Artificial Sequence: Synthetic epitope
EFTPSKLDSE

SEQ ID NO: 5907 - protein, 10 aa, Artificial Sequence
  Description of Artificial Sequence: Synthetic epitope
EFTSAQRRGE

SEQ ID NO: 5908 - protein, 10 aa, Artificial Sequence
  Description of Artificial Sequence: Synthetic epitope
EFTTYGSEES

SEQ ID NO: 5909 - protein, 10 aa, Artificial Sequence
  Description of Artificial Sequence: Synthetic epitope
EFTYTTSVFG

SEQ ID NO: 5910 - protein, 10 aa, Artificial Sequence
  Description of Artificial Sequence: Synthetic epitope
EFVKRPGGQH

SEQ ID NO: 5911 - protein, 10 aa, Artificial Sequence
  Description of Artificial Sequence: Synthetic epitope
EFVMSEIRTV

SEQ ID NO: 5912 - protein, 10 aa, Artificial Sequence
  Description of Artificial Sequence: Synthetic epitope
EFVQRETDIE

SEQ ID NO: 5913 - protein, 10 aa, Artificial Sequence
  Description of Artificial Sequence: Synthetic epitope
EFVRSTDRKI

SEQ ID NO: 5914 - protein, 10 aa, Artificial Sequence
  Description of Artificial Sequence: Synthetic epitope
EFVSQAQYPH

SEQ ID NO: 5915 - protein, 10 aa, Artificial Sequence
  Description of Artificial Sequence: Synthetic epitope
EFVTSNESTE

SEQ ID NO: 5916 - protein, 10 aa, Artificial Sequence
  Description of Artificial Sequence: Synthetic epitope
EGAAETDQEA

SEQ ID NO: 5917 - protein, 10 aa, Artificial Sequence
  Description of Artificial Sequence: Synthetic epitope
EGAASKKEVQ

SEQ ID NO: 5918 - protein, 10 aa, Artificial Sequence
  Description of Artificial Sequence: Synthetic epitope
EGADKRKRSR

SEQ ID NO: 5919 - protein, 10 aa, Artificial Sequence
  Description of Artificial Sequence: Synthetic epitope
EGADYSYGAI

SEQ ID NO: 5920 - protein, 10 aa, Artificial Sequence
  Description of Artificial Sequence: Synthetic epitope
EGAEMLSHVS

SEQ ID NO: 5921 - protein, 10 aa, Artificial Sequence
  Description of Artificial Sequence: Synthetic epitope
EGAEQWQQKG

SEQ ID NO: 5922 - protein, 10 aa, Artificial Sequence
  Description of Artificial Sequence: Synthetic epitope
EGAETAPVQN

SEQ ID NO: 5923 - protein, 10 aa, Artificial Sequence
  Description of Artificial Sequence: Synthetic epitope
EGAETDLLQN

SEQ ID NO: 5924 - protein, 10 aa, Artificial Sequence
  Description of Artificial Sequence: Synthetic epitope
EGAIISRDSP

SEQ ID NO: 5925 - protein, 10 aa, Artificial Sequence
  Description of Artificial Sequence: Synthetic epitope
EGAKASKQGV

SEQ ID NO: 5926 - protein, 10 aa, Artificial Sequence
  Description of Artificial Sequence: Synthetic epitope
EGAKEALKEA

SEQ ID NO: 5927 - protein, 10 aa, Artificial Sequence
  Description of Artificial Sequence: Synthetic epitope
EGALASKSKK

SEQ ID NO: 5928 - protein, 10 aa, Artificial Sequence
  Description of Artificial Sequence: Synthetic epitope
EGALNAARVA

SEQ ID NO: 5929 - protein, 10 aa, Artificial Sequence
  Description of Artificial Sequence: Synthetic epitope
EGAPASFGKS

SEQ ID NO: 5930 - protein, 10 aa, Artificial Sequence
  Description of Artificial Sequence: Synthetic epitope
EGARLLASKS

SEQ ID NO: 5931 - protein, 10 aa, Artificial Sequence
  Description of Artificial Sequence: Synthetic epitope
EGARSDVAKA

SEQ ID NO: 5932 - protein, 10 aa, Artificial Sequence
  Description of Artificial Sequence: Synthetic epitope
EGATTAGQAA

SEQ ID NO: 5933 - protein, 10 aa, Artificial Sequence
  Description of Artificial Sequence: Synthetic epitope
EGAVGTTEAY

SEQ ID NO: 5934 - protein, 10 aa, Artificial Sequence
  Description of Artificial Sequence: Synthetic epitope
EGAVQSIQGE

SEQ ID NO: 5935 - protein, 10 aa, Artificial Sequence
  Description of Artificial Sequence: Synthetic epitope
EGAVSRLGGE

SEQ ID NO: 5936 - protein, 10 aa, Artificial Sequence
  Description of Artificial Sequence: Synthetic epitope
EGDASYLASE

SEQ ID NO: 5937 - protein, 10 aa, Artificial Sequence
  Description of Artificial Sequence: Synthetic epitope
EGDIDKQRKL

SEQ ID NO: 5938 - protein, 10 aa, Artificial Sequence
  Description of Artificial Sequence: Synthetic epitope
EGDQVVEEDP

SEQ ID NO: 5939 - protein, 10 aa, Artificial Sequence
  Description of Artificial Sequence: Synthetic epitope
EGDSEVIMES

SEQ ID NO: 5940 - protein, 10 aa, Artificial Sequence
  Description of Artificial Sequence: Synthetic epitope
EGDSIQAGEE

SEQ ID NO: 5941 - protein, 10 aa, Artificial Sequence
  Description of Artificial Sequence: Synthetic epitope
EGDSSEVGDQ

SEQ ID NO: 5942 - protein, 10 aa, Artificial Sequence
  Description of Artificial Sequence: Synthetic epitope
EGEAKFEEVS

SEQ ID NO: 5943 - protein, 10 aa, Artificial Sequence
  Description of Artificial Sequence: Synthetic epitope
EGEEKEAATL

SEQ ID NO: 5944 - protein, 10 aa, Artificial Sequence
  Description of Artificial Sequence: Synthetic epitope
EGEEKRNEVA

SEQ ID NO: 5945 - protein, 10 aa, Artificial Sequence
  Description of Artificial Sequence: Synthetic epitope
EGEETFEAAM

SEQ ID NO: 5946 - protein, 10 aa, Artificial Sequence
  Description of Artificial Sequence: Synthetic epitope
EGEILSASKM

SEQ ID NO: 5947 - protein, 10 aa, Artificial Sequence
  Description of Artificial Sequence: Synthetic epitope
EGEKTTSLKW

SEQ ID NO: 5948 - protein, 10 aa, Artificial Sequence
  Description of Artificial Sequence: Synthetic epitope
EGEKTTSTDT

SEQ ID NO: 5949 - protein, 10 aa, Artificial Sequence
  Description of Artificial Sequence: Synthetic epitope
EGEQYTSNQP

SEQ ID NO: 5950 - protein, 10 aa, Artificial Sequence
  Description of Artificial Sequence: Synthetic epitope
EGEREVSYGE

SEQ ID NO: 5951 - protein, 10 aa, Artificial Sequence
  Description of Artificial Sequence: Synthetic epitope
EGERSQVSTN

SEQ ID NO: 5952 - protein, 10 aa, Artificial Sequence
  Description of Artificial Sequence: Synthetic epitope
EGESKVMSSR

SEQ ID NO: 5953 - protein, 10 aa, Artificial Sequence
  Description of Artificial Sequence: Synthetic epitope
EGESSQQLND

SEQ ID NO: 5954 - protein, 10 aa, Artificial Sequence
  Description of Artificial Sequence: Synthetic epitope
EGETMTKTDK

SEQ ID NO: 5955 - protein, 10 aa, Artificial Sequence
  Description of Artificial Sequence: Synthetic epitope
EGETSVSAEA

SEQ ID NO: 5956 - protein, 10 aa, Artificial Sequence
  Description of Artificial Sequence: Synthetic epitope
EGEVMENKRP

SEQ ID NO: 5957 - protein, 10 aa, Artificial Sequence
  Description of Artificial Sequence: Synthetic epitope
EGFDQSQSHK

SEQ ID NO: 5958 - protein, 10 aa, Artificial Sequence
  Description of Artificial Sequence: Synthetic epitope
EGFFKVDYSQ

SEQ ID NO: 5959 - protein, 10 aa, Artificial Sequence
  Description of Artificial Sequence: Synthetic epitope
EGFLAESSPQ

SEQ ID NO: 5960 - protein, 10 aa, Artificial Sequence
  Description of Artificial Sequence: Synthetic epitope
EGFNQADKAI

SEQ ID NO: 5961 - protein, 10 aa, Artificial Sequence
  Description of Artificial Sequence: Synthetic epitope
EGGAAKGNTE

SEQ ID NO: 5962 - protein, 10 aa, Artificial Sequence
  Description of Artificial Sequence: Synthetic epitope
EGGAEAAEGE

SEQ ID NO: 5963 - protein, 10 aa, Artificial Sequence
  Description of Artificial Sequence: Synthetic epitope
EGGFEINLDH

SEQ ID NO: 5964 - protein, 10 aa, Artificial Sequence
  Description of Artificial Sequence: Synthetic epitope
EGGKTSEPEN

SEQ ID NO: 5965 - protein, 10 aa, Artificial Sequence
  Description of Artificial Sequence: Synthetic epitope
EGGQMSRADA

SEQ ID NO: 5966 - protein, 10 aa, Artificial Sequence
  Description of Artificial Sequence: Synthetic epitope
EGGQSSATDA

SEQ ID NO: 5967 - protein, 10 aa, Artificial Sequence
  Description of Artificial Sequence: Synthetic epitope
EGGTASVATG

SEQ ID NO: 5968 - protein, 10 aa, Artificial Sequence
  Description of Artificial Sequence: Synthetic epitope
EGHFRSQHKR

SEQ ID NO: 5969 - protein, 10 aa, Artificial Sequence
  Description of Artificial Sequence: Synthetic epitope
EGHKQELAES

SEQ ID NO: 5970 - protein, 10 aa, Artificial Sequence
  Description of Artificial Sequence: Synthetic epitope
EGHQLATNET

SEQ ID NO: 5971 - protein, 10 aa, Artificial Sequence
  Description of Artificial Sequence: Synthetic epitope
EGHSENSDTQ

SEQ ID NO: 5972 - protein, 10 aa, Artificial Sequence
  Description of Artificial Sequence: Synthetic epitope
EGIATAIMNS

SEQ ID NO: 5973 - protein, 10 aa, Artificial Sequence
  Description of Artificial Sequence: Synthetic epitope
EGIDIMAIKF

SEQ ID NO: 5974 - protein, 10 aa, Artificial Sequence
  Description of Artificial Sequence: Synthetic epitope
EGIKVLETLV

SEQ ID NO: 5975 - protein, 10 aa, Artificial Sequence
  Description of Artificial Sequence: Synthetic epitope
EGIQALSNSE

SEQ ID NO: 5976 - protein, 10 aa, Artificial Sequence
  Description of Artificial Sequence: Synthetic epitope
EGIQTQAMAI

SEQ ID NO: 5977 - protein, 10 aa, Artificial Sequence
  Description of Artificial Sequence: Synthetic epitope
EGISLTMNSK

SEQ ID NO: 5978 - protein, 10 aa, Artificial Sequence
  Description of Artificial Sequence: Synthetic epitope
EGITQQEILG

SEQ ID NO: 5979 - protein, 10 aa, Artificial Sequence
  Description of Artificial Sequence: Synthetic epitope
EGKAEDVKPE

SEQ ID NO: 5980 - protein, 10 aa, Artificial Sequence
  Description of Artificial Sequence: Synthetic epitope
EGKDKALKSS

SEQ ID NO: 5981 - protein, 10 aa, Artificial Sequence
  Description of Artificial Sequence: Synthetic epitope
EGKDKEKEST

SEQ ID NO: 5982 - protein, 10 aa, Artificial Sequence
  Description of Artificial Sequence: Synthetic epitope
EGKDNIAGTQ

SEQ ID NO: 5983 - protein, 10 aa, Artificial Sequence
  Description of Artificial Sequence: Synthetic epitope
EGKEEIVKVT

SEQ ID NO: 5984 - protein, 10 aa, Artificial Sequence
  Description of Artificial Sequence: Synthetic epitope
EGKFSRSGLM

SEQ ID NO: 5985 - protein, 10 aa, Artificial Sequence
  Description of Artificial Sequence: Synthetic epitope
EGKGKKSSAH

SEQ ID NO: 5986 - protein, 10 aa, Artificial Sequence
  Description of Artificial Sequence: Synthetic epitope
EGKKFENTEM

SEQ ID NO: 5987 - protein, 10 aa, Artificial Sequence
  Description of Artificial Sequence: Synthetic epitope
EGKKSSDILS

SEQ ID NO: 5988 - protein, 10 aa, Artificial Sequence
  Description of Artificial Sequence: Synthetic epitope
EGKQDILNQT

SEQ ID NO: 5989 - protein, 10 aa, Artificial Sequence
  Description of Artificial Sequence: Synthetic epitope
EGKQKAADFE

SEQ ID NO: 5990 - protein, 10 aa, Artificial Sequence
  Description of Artificial Sequence: Synthetic epitope
EGKQVSVTND

SEQ ID NO: 5991 - protein, 10 aa, Artificial Sequence
  Description of Artificial Sequence: Synthetic epitope
EGKSSQFPKH

SEQ ID NO: 5992 - protein, 10 aa, Artificial Sequence
  Description of Artificial Sequence: Synthetic epitope
EGKTAVIEKR

SEQ ID NO: 5993 - protein, 10 aa, Artificial Sequence
  Description of Artificial Sequence: Synthetic epitope
EGLEIEKLSE

SEQ ID NO: 5994 - protein, 10 aa, Artificial Sequence
  Description of Artificial Sequence: Synthetic epitope
EGLEMKSTRY

SEQ ID NO: 5995 - protein, 10 aa, Artificial Sequence
  Description of Artificial Sequence: Synthetic epitope
EGLKFARKHS

SEQ ID NO: 5996 - protein, 10 aa, Artificial Sequence
  Description of Artificial Sequence: Synthetic epitope
EGLPLLADST

SEQ ID NO: 5997 - protein, 10 aa, Artificial Sequence
  Description of Artificial Sequence: Synthetic epitope
EGLQSTVTGH

SEQ ID NO: 5998 - protein, 10 aa, Artificial Sequence
  Description of Artificial Sequence: Synthetic epitope
EGLRMATNAA

SEQ ID NO: 5999 - protein, 10 aa, Artificial Sequence
  Description of Artificial Sequence: Synthetic epitope
EGLRSTLAES

SEQ ID NO: 6000 - protein, 10 aa, Artificial Sequence
  Description of Artificial Sequence: Synthetic epitope
EGLSEAVTTK

SEQ ID NO: 6001 - protein, 10 aa, Artificial Sequence
  Description of Artificial Sequence: Synthetic epitope
EGLSLAQEYN

SEQ ID NO: 6002 - protein, 10 aa, Artificial Sequence
  Description of Artificial Sequence: Synthetic epitope
EGLSSQALST

SEQ ID NO: 6003 - protein, 10 aa, Artificial Sequence
  Description of Artificial Sequence: Synthetic epitope
EGLTSVLELG

SEQ ID NO: 6004 - protein, 10 aa, Artificial Sequence
  Description of Artificial Sequence: Synthetic epitope
EGMDGSADWP

SEQ ID NO: 6005 - protein, 10 aa, Artificial Sequence
  Description of Artificial Sequence: Synthetic epitope
EGMKMRSTKQ

SEQ ID NO: 6006 - protein, 10 aa, Artificial Sequence
  Description of Artificial Sequence: Synthetic epitope
EGMLSQSVSS

SEQ ID NO: 6007 - protein, 10 aa, Artificial Sequence
  Description of Artificial Sequence: Synthetic epitope
EGMRSKASSP

SEQ ID NO: 6008 - protein, 10 aa, Artificial Sequence
  Description of Artificial Sequence: Synthetic epitope
EGMTNGRKAI

SEQ ID NO: 6009 - protein, 10 aa, Artificial Sequence
  Description of Artificial Sequence: Synthetic epitope
EGNRWSNSTK

SEQ ID NO: 6010 - protein, 10 aa, Artificial Sequence
  Description of Artificial Sequence: Synthetic epitope
EGNSDELDEP

SEQ ID NO: 6011 - protein, 10 aa, Artificial Sequence
  Description of Artificial Sequence: Synthetic epitope
EGNSSTAATT

SEQ ID NO: 6012 - protein, 10 aa, Artificial Sequence
  Description of Artificial Sequence: Synthetic epitope
EGNVRNVSEV

SEQ ID NO: 6013 - protein, 10 aa, Artificial Sequence
  Description of Artificial Sequence: Synthetic epitope
EGPAAQEAWV

SEQ ID NO: 6014 - protein, 10 aa, Artificial Sequence
  Description of Artificial Sequence: Synthetic epitope
EGPAKSALRK

SEQ ID NO: 6015 - protein, 10 aa, Artificial Sequence
  Description of Artificial Sequence: Synthetic epitope
EGPAQAAVAS

SEQ ID NO: 6016 - protein, 10 aa, Artificial Sequence
  Description of Artificial Sequence: Synthetic epitope
EGPTNQKGYT

SEQ ID NO: 6017 - protein, 10 aa, Artificial Sequence
  Description of Artificial Sequence: Synthetic epitope
EGQAFLGETG

SEQ ID NO: 6018 - protein, 10 aa, Artificial Sequence
  Description of Artificial Sequence: Synthetic epitope
EGQDIKMESQ

SEQ ID NO: 6019 - protein, 10 aa, Artificial Sequence
  Description of Artificial Sequence: Synthetic epitope
EGQEKEKSTK

SEQ ID NO: 6020 - protein, 10 aa, Artificial Sequence
  Description of Artificial Sequence: Synthetic epitope
EGQETGKKET

SEQ ID NO: 6021 - protein, 10 aa, Artificial Sequence
  Description of Artificial Sequence: Synthetic epitope
EGQGGEKNIQ

SEQ ID NO: 6022 - protein, 10 aa, Artificial Sequence
  Description of Artificial Sequence: Synthetic epitope
EGQKAIQIKH

SEQ ID NO: 6023 - protein, 10 aa, Artificial Sequence
  Description of Artificial Sequence: Synthetic epitope
EGQKEEGSQQ

SEQ ID NO: 6024 - protein, 10 aa, Artificial Sequence
  Description of Artificial Sequence: Synthetic epitope
EGQKESLEKR

SEQ ID NO: 6025 - protein, 10 aa, Artificial Sequence
  Description of Artificial Sequence: Synthetic epitope
EGQLESFSQE

SEQ ID NO: 6026 - protein, 10 aa, Artificial Sequence
  Description of Artificial Sequence: Synthetic epitope
EGQLQSLKAQ

SEQ ID NO: 6027 - protein, 10 aa, Artificial Sequence
  Description of Artificial Sequence: Synthetic epitope
EGQLQSLVLS

SEQ ID NO: 6028 - protein, 10 aa, Artificial Sequence
  Description of Artificial Sequence: Synthetic epitope
EGQLQVAKVS

SEQ ID NO: 6029 - protein, 10 aa, Artificial Sequence
  Description of Artificial Sequence: Synthetic epitope
EGQLRQAAKP

SEQ ID NO: 6030 - protein, 10 aa, Artificial Sequence
  Description of Artificial Sequence: Synthetic epitope
EGQRETQRVA

SEQ ID NO: 6031 - protein, 10 aa, Artificial Sequence
  Description of Artificial Sequence: Synthetic epitope
EGQSAKEMLS

SEQ ID NO: 6032 - protein, 10 aa, Artificial Sequence
  Description of Artificial Sequence: Synthetic epitope
EGQSGVTIKH

SEQ ID NO: 6033 - protein, 10 aa, Artificial Sequence
  Description of Artificial Sequence: Synthetic epitope
EGQSLSVGTS

SEQ ID NO: 6034 - protein, 10 aa, Artificial Sequence
  Description of Artificial Sequence: Synthetic epitope
EGQTAVKTEE

SEQ ID NO: 6035 - protein, 10 aa, Artificial Sequence
  Description of Artificial Sequence: Synthetic epitope
EGQVIRMSHK

SEQ ID NO: 6036 - protein, 10 aa, Artificial Sequence
  Description of Artificial Sequence: Synthetic epitope
EGRANASEGT

SEQ ID NO: 6037 - protein, 10 aa, Artificial Sequence
  Description of Artificial Sequence: Synthetic epitope
EGREERIYNQ

SEQ ID NO: 6038 - protein, 10 aa, Artificial Sequence
  Description of Artificial Sequence: Synthetic epitope
EGRELQSVKP

SEQ ID NO: 6039 - protein, 10 aa, Artificial Sequence
  Description of Artificial Sequence: Synthetic epitope
EGRENSEKQK

SEQ ID NO: 6040 - protein, 10 aa, Artificial Sequence
  Description of Artificial Sequence: Synthetic epitope
EGRFAQVSDP

SEQ ID NO: 6041 - protein, 10 aa, Artificial Sequence
  Description of Artificial Sequence: Synthetic epitope
EGRIKTREMK

SEQ ID NO: 6042 - protein, 10 aa, Artificial Sequence
  Description of Artificial Sequence: Synthetic epitope
EGRITATPKE

SEQ ID NO: 6043 - protein, 10 aa, Artificial Sequence
  Description of Artificial Sequence: Synthetic epitope
EGRKEHITLD

SEQ ID NO: 6044 - protein, 10 aa, Artificial Sequence
  Description of Artificial Sequence: Synthetic epitope
EGRLAKNRKG

SEQ ID NO: 6045 - protein, 10 aa, Artificial Sequence
  Description of Artificial Sequence: Synthetic epitope
EGRLQQKSGS

SEQ ID NO: 6046 - protein, 10 aa, Artificial Sequence
  Description of Artificial Sequence: Synthetic epitope
EGRPVVANIE

SEQ ID NO: 6047 - protein, 10 aa, Artificial Sequence
  Description of Artificial Sequence: Synthetic epitope
EGRRGSLSNA

SEQ ID NO: 6048 - protein, 10 aa, Artificial Sequence
  Description of Artificial Sequence: Synthetic epitope
EGRTMTSRAS

SEQ ID NO: 6049 - protein, 10 aa, Artificial Sequence
  Description of Artificial Sequence: Synthetic epitope
EGSAKELQAP

SEQ ID NO: 6050 - protein, 10 aa, Artificial Sequence
  Description of Artificial Sequence: Synthetic epitope
EGSASEVLKE

SEQ ID NO: 6051 - protein, 10 aa, Artificial Sequence
  Description of Artificial Sequence: Synthetic epitope
EGSETMTLGT

SEQ ID NO: 6052 - protein, 10 aa, Artificial Sequence
  Description of Artificial Sequence: Synthetic epitope
EGSEYDAKSD

SEQ ID NO: 6053 - protein, 10 aa, Artificial Sequence
  Description of Artificial Sequence: Synthetic epitope
EGSIDIIVEL

SEQ ID NO: 6054 - protein, 10 aa, Artificial Sequence
  Description of Artificial Sequence: Synthetic epitope
EGSISIYKSS

SEQ ID NO: 6055 - protein, 10 aa, Artificial Sequence
  Description of Artificial Sequence: Synthetic epitope
EGSKRSSHSN

SEQ ID NO: 6056 - protein, 10 aa, Artificial Sequence
  Description of Artificial Sequence: Synthetic epitope
EGSLQALFQH

SEQ ID NO: 6057 - protein, 10 aa, Artificial Sequence
  Description of Artificial Sequence: Synthetic epitope
EGSLSKFALP

SEQ ID NO: 6058 - protein, 10 aa, Artificial Sequence
  Description of Artificial Sequence: Synthetic epitope
EGSLTSSLDS

SEQ ID NO: 6059 - protein, 10 aa, Artificial Sequence
  Description of Artificial Sequence: Synthetic epitope
EGSMDGEEQA

SEQ ID NO: 6060 - protein, 10 aa, Artificial Sequence
  Description of Artificial Sequence: Synthetic epitope
EGSQKSQPRR

SEQ ID NO: 6061 - protein, 10 aa, Artificial Sequence
  Description of Artificial Sequence: Synthetic epitope
EGSRNLDDMA

SEQ ID NO: 6062 - protein, 10 aa, Artificial Sequence
  Description of Artificial Sequence: Synthetic epitope
EGSRQQSSVT

SEQ ID NO: 6063 - protein, 10 aa, Artificial Sequence
  Description of Artificial Sequence: Synthetic epitope
EGSSKKVKTD

SEQ ID NO: 6064 - protein, 10 aa, Artificial Sequence
  Description of Artificial Sequence: Synthetic epitope
EGSSQEVSES

SEQ ID NO: 6065 - protein, 10 aa, Artificial Sequence
  Description of Artificial Sequence: Synthetic epitope
EGSTLKLAKQ

SEQ ID NO: 6066 - protein, 10 aa, Artificial Sequence
  Description of Artificial Sequence: Synthetic epitope
EGSTQKVESP

SEQ ID NO: 6067 - protein, 10 aa, Artificial Sequence
  Description of Artificial Sequence: Synthetic epitope
EGSTQTYASQ

SEQ ID NO: 6068 - protein, 10 aa, Artificial Sequence
  Description of Artificial Sequence: Synthetic epitope
EGSVSAVTEE

SEQ ID NO: 6069 - protein, 10 aa, Artificial Sequence
  Description of Artificial Sequence: Synthetic epitope
EGTAAVAAVS

SEQ ID NO: 6070 - protein, 10 aa, Artificial Sequence
  Description of Artificial Sequence: Synthetic epitope
EGTAKLTLAQ

SEQ ID NO: 6071 - protein, 10 aa, Artificial Sequence
  Description of Artificial Sequence: Synthetic epitope
EGTALAIDSN

SEQ ID NO: 6072 - protein, 10 aa, Artificial Sequence
  Description of Artificial Sequence: Synthetic epitope
EGTELASNTH

SEQ ID NO: 6073 - protein, 10 aa, Artificial Sequence
  Description of Artificial Sequence: Synthetic epitope
EGTGSEASST

SEQ ID NO: 6074 - protein, 10 aa, Artificial Sequence
  Description of Artificial Sequence: Synthetic epitope
EGTIQVQGQA

SEQ ID NO: 6075 - protein, 10 aa, Artificial Sequence
  Description of Artificial Sequence: Synthetic epitope
EGTKNNMDEN

SEQ ID NO: 6076 - protein, 10 aa, Artificial Sequence
  Description of Artificial Sequence: Synthetic epitope
EGTMQVAQSR

SEQ ID NO: 6077 - protein, 10 aa, Artificial Sequence
  Description of Artificial Sequence: Synthetic epitope
EGTPAQTESE

SEQ ID NO: 6078 - protein, 10 aa, Artificial Sequence
  Description of Artificial Sequence: Synthetic epitope
EGTQESQMVG

SEQ ID NO: 6079 - protein, 10 aa, Artificial Sequence
  Description of Artificial Sequence: Synthetic epitope
EGTSLETKTP

SEQ ID NO: 6080 - protein, 10 aa, Artificial Sequence
  Description of Artificial Sequence: Synthetic epitope
EGTSTQKEFE

SEQ ID NO: 6081 - protein, 10 aa, Artificial Sequence
  Description of Artificial Sequence: Synthetic epitope
EGTSTSMAGA

SEQ ID NO: 6082 - protein, 10 aa, Artificial Sequence
  Description of Artificial Sequence: Synthetic epitope
EGTSTSSIYQ

SEQ ID NO: 6083 - protein, 10 aa, Artificial Sequence
  Description of Artificial Sequence: Synthetic epitope
EGTTLVKEEG

SEQ ID NO: 6084 - protein, 10 aa, Artificial Sequence
  Description of Artificial Sequence: Synthetic epitope
EGTVSDKSAT

SEQ ID NO: 6085 - protein, 10 aa, Artificial Sequence
  Description of Artificial Sequence: Synthetic epitope
EGVEKPAETH

SEQ ID NO: 6086 - protein, 10 aa, Artificial Sequence
  Description of Artificial Sequence: Synthetic epitope
EGVEPANLKA

SEQ ID NO: 6087 - protein, 10 aa, Artificial Sequence
  Description of Artificial Sequence: Synthetic epitope
EGVIKKDAKA

SEQ ID NO: 6088 - protein, 10 aa, Artificial Sequence
  Description of Artificial Sequence: Synthetic epitope
EGVKTEVEDT

SEQ ID NO: 6089 - protein, 10 aa, Artificial Sequence
  Description of Artificial Sequence: Synthetic epitope
EGVLDVKASN

SEQ ID NO: 6090 - protein, 10 aa, Artificial Sequence
  Description of Artificial Sequence: Synthetic epitope
EGVMNQADAP

SEQ ID NO: 6091 - protein, 10 aa, Artificial Sequence
  Description of Artificial Sequence: Synthetic epitope
EGVNNSNEDF

SEQ ID NO: 6092 - protein, 10 aa, Artificial Sequence
  Description of Artificial Sequence: Synthetic epitope
EGVSAADMAK

SEQ ID NO: 6093 - protein, 10 aa, Artificial Sequence
  Description of Artificial Sequence: Synthetic epitope
EGVVALSTTD

SEQ ID NO: 6094 - protein, 10 aa, Artificial Sequence
  Description of Artificial Sequence: Synthetic epitope
EGWEVFAKPK

SEQ ID NO: 6095 - protein, 10 aa, Artificial Sequence
  Description of Artificial Sequence: Synthetic epitope
EHAAVKNDTE

SEQ ID NO: 6096 - protein, 10 aa, Artificial Sequence
  Description of Artificial Sequence: Synthetic epitope
EHAQSWPSIN

SEQ ID NO: 6097 - protein, 10 aa, Artificial Sequence
  Description of Artificial Sequence: Synthetic epitope
EHASSAFKES

SEQ ID NO: 6098 - protein, 10 aa, Artificial Sequence
  Description of Artificial Sequence: Synthetic epitope
EHAVMLAKDS

SEQ ID NO: 6099 - protein, 10 aa, Artificial Sequence
  Description of Artificial Sequence: Synthetic epitope
EHDFTQVEAT

SEQ ID NO: 6100 - protein, 10 aa, Artificial Sequence
  Description of Artificial Sequence: Synthetic epitope
EHDKAANKMP

SEQ ID NO: 6101 - protein, 10 aa, Artificial Sequence
  Description of Artificial Sequence: Synthetic epitope
EHDKQIWESK

SEQ ID NO: 6102 - protein, 10 aa, Artificial Sequence
  Description of Artificial Sequence: Synthetic epitope
EHDLQASEHV

SEQ ID NO: 6103 - protein, 10 aa, Artificial Sequence
  Description of Artificial Sequence: Synthetic epitope
EHDVVMKASS

SEQ ID NO: 6104 - protein, 10 aa, Artificial Sequence
  Description of Artificial Sequence: Synthetic epitope
EHEAITKVKY

SEQ ID NO: 6105 - protein, 10 aa, Artificial Sequence
  Description of Artificial Sequence: Synthetic epitope
EHEEQKVKPK

SEQ ID NO: 6106 - protein, 10 aa, Artificial Sequence
  Description of Artificial Sequence: Synthetic epitope
EHELAIKANT

SEQ ID NO: 6107 - protein, 10 aa, Artificial Sequence
  Description of Artificial Sequence: Synthetic epitope
EHEVSIQRTE

SEQ ID NO: 6108 - protein, 10 aa, Artificial Sequence
  Description of Artificial Sequence: Synthetic epitope
EHFRAKQKEE

SEQ ID NO: 6109 - protein, 10 aa, Artificial Sequence
  Description of Artificial Sequence: Synthetic epitope
EHFSWVFLDD

SEQ ID NO: 6110 - protein, 10 aa, Artificial Sequence
  Description of Artificial Sequence: Synthetic epitope
EHGLKIQQAA

SEQ ID NO: 6111 - protein, 10 aa, Artificial Sequence
  Description of Artificial Sequence: Synthetic epitope
EHGMLTRQLQ

SEQ ID NO: 6112 - protein, 10 aa, Artificial Sequence
  Description of Artificial Sequence: Synthetic epitope
EHGYSRQLHI

SEQ ID NO: 6113 - protein, 10 aa, Artificial Sequence
  Description of Artificial Sequence: Synthetic epitope
EHIATEITAK

SEQ ID NO: 6114 - protein, 10 aa, Artificial Sequence
  Description of Artificial Sequence: Synthetic epitope
EHIEHEQQKL

SEQ ID NO: 6115 - protein, 10 aa, Artificial Sequence
  Description of Artificial Sequence: Synthetic epitope
EHIKNLVQKE

SEQ ID NO: 6116 - protein, 10 aa, Artificial Sequence
  Description of Artificial Sequence: Synthetic epitope
EHKASRFSQE

SEQ ID NO: 6117 - protein, 10 aa, Artificial Sequence
  Description of Artificial Sequence: Synthetic epitope
EHKEAFMDNE

SEQ ID NO: 6118 - protein, 10 aa, Artificial Sequence
  Description of Artificial Sequence: Synthetic epitope
EHKETRDSED

SEQ ID NO: 6119 - protein, 10 aa, Artificial Sequence
  Description of Artificial Sequence: Synthetic epitope
EHKIQTNRYT

SEQ ID NO: 6120 - protein, 10 aa, Artificial Sequence
  Description of Artificial Sequence: Synthetic epitope
EHKKLQKVQA

SEQ ID NO: 6121 - protein, 10 aa, Artificial Sequence
  Description of Artificial Sequence: Synthetic epitope
EHKSKISVKM

SEQ ID NO: 6122 - protein, 10 aa, Artificial Sequence
  Description of Artificial Sequence: Synthetic epitope
EHLKLAGMAD

SEQ ID NO: 6123 - protein, 10 aa, Artificial Sequence
  Description of Artificial Sequence: Synthetic epitope
EHLRSTIELS

SEQ ID NO: 6124 - protein, 10 aa, Artificial Sequence
  Description of Artificial Sequence: Synthetic epitope
EHLSAKLQKI

SEQ ID NO: 6125 - protein, 10 aa, Artificial Sequence
  Description of Artificial Sequence: Synthetic epitope
EHLTFVNTDV

SEQ ID NO: 6126 - protein, 10 aa, Artificial Sequence
  Description of Artificial Sequence: Synthetic epitope
EHLVADSHES

SEQ ID NO: 6127 - protein, 10 aa, Artificial Sequence
  Description of Artificial Sequence: Synthetic epitope
EHMESDELGL

SEQ ID NO: 6128 - protein, 10 aa, Artificial Sequence
  Description of Artificial Sequence: Synthetic epitope
EHMESRMVTE

SEQ ID NO: 6129 - protein, 10 aa, Artificial Sequence
  Description of Artificial Sequence: Synthetic epitope
EHMNDLSALA

SEQ ID NO: 6130 - protein, 10 aa, Artificial Sequence
  Description of Artificial Sequence: Synthetic epitope
EHNAERERIV

SEQ ID NO: 6131 - protein, 10 aa, Artificial Sequence
  Description of Artificial Sequence: Synthetic epitope
EHNAYHPIEW

SEQ ID NO: 6132 - protein, 10 aa, Artificial Sequence
  Description of Artificial Sequence: Synthetic epitope
EHNDLVKVNF

SEQ ID NO: 6133 - protein, 10 aa, Artificial Sequence
  Description of Artificial Sequence: Synthetic epitope
EHNEAKYTER

SEQ ID NO: 6134 - protein, 10 aa, Artificial Sequence
  Description of Artificial Sequence: Synthetic epitope
EHNSTMLESD

SEQ ID NO: 6135 - protein, 10 aa, Artificial Sequence
  Description of Artificial Sequence: Synthetic epitope
EHPEEVTTQA

SEQ ID NO: 6136 - protein, 10 aa, Artificial Sequence
  Description of Artificial Sequence: Synthetic epitope
EHPLSRAEAA

SEQ ID NO: 6137 - protein, 10 aa, Artificial Sequence
  Description of Artificial Sequence: Synthetic epitope
EHPQEENEPS

SEQ ID NO: 6138 - protein, 10 aa, Artificial Sequence
  Description of Artificial Sequence: Synthetic epitope
EHPRSTELPK

SEQ ID NO: 6139 - protein, 10 aa, Artificial Sequence
  Description of Artificial Sequence: Synthetic epitope
EHPTAGNTEA

SEQ ID NO: 6140 - protein, 10 aa, Artificial Sequence
  Description of Artificial Sequence: Synthetic epitope
EHQADFQIYS

SEQ ID NO: 6141 - protein, 10 aa, Artificial Sequence
  Description of Artificial Sequence: Synthetic epitope
EHQAKAGSDK

SEQ ID NO: 6142 - protein, 10 aa, Artificial Sequence
  Description of Artificial Sequence: Synthetic epitope
EHQDKTVGLE

SEQ ID NO: 6143 - protein, 10 aa, Artificial Sequence
  Description of Artificial Sequence: Synthetic epitope
EHQERQNKDP

SEQ ID NO: 6144 - protein, 10 aa, Artificial Sequence
  Description of Artificial Sequence: Synthetic epitope
EHQFETLDVQ

SEQ ID NO: 6145 - protein, 10 aa, Artificial Sequence
  Description of Artificial Sequence: Synthetic epitope
EHQLMKRIAD

SEQ ID NO: 6146 - protein, 10 aa, Artificial Sequence
  Description of Artificial Sequence: Synthetic epitope
EHQQSSEAQD

SEQ ID NO: 6147 - protein, 10 aa, Artificial Sequence
  Description of Artificial Sequence: Synthetic epitope
EHREIADDPL

SEQ ID NO: 6148 - protein, 10 aa, Artificial Sequence
  Description of Artificial Sequence: Synthetic epitope
EHRLSAADEK

SEQ ID NO: 6149 - protein, 10 aa, Artificial Sequence
  Description of Artificial Sequence: Synthetic epitope
EHRNEAELSL

SEQ ID NO: 6150 - protein, 10 aa, Artificial Sequence
  Description of Artificial Sequence: Synthetic epitope
EHRQQRIAEV

SEQ ID NO: 6151 - protein, 10 aa, Artificial Sequence
  Description of Artificial Sequence: Synthetic epitope
EHRRTVAEAK

SEQ ID NO: 6152 - protein, 10 aa, Artificial Sequence
  Description of Artificial Sequence: Synthetic epitope
EHSASARKLS

SEQ ID NO: 6153 - protein, 10 aa, Artificial Sequence
  Description of Artificial Sequence: Synthetic epitope
EHSDFIANPT

SEQ ID NO: 6154 - protein, 10 aa, Artificial Sequence
  Description of Artificial Sequence: Synthetic epitope
EHSEMKSDEG

SEQ ID NO: 6155 - protein, 10 aa, Artificial Sequence
  Description of Artificial Sequence: Synthetic epitope
EHSIQVERPQ

SEQ ID NO: 6156 - protein, 10 aa, Artificial Sequence
  Description of Artificial Sequence: Synthetic epitope
EHSKGAGSKT

SEQ ID NO: 6157 - protein, 10 aa, Artificial Sequence
  Description of Artificial Sequence: Synthetic epitope
EHSLIEDLIL

SEQ ID NO: 6158 - protein, 10 aa, Artificial Sequence
  Description of Artificial Sequence: Synthetic epitope
EHSSGSLTGE

SEQ ID NO: 6159 - protein, 10 aa, Artificial Sequence
  Description of Artificial Sequence: Synthetic epitope
EHSSTESSFD

SEQ ID NO: 6160 - protein, 10 aa, Artificial Sequence
  Description of Artificial Sequence: Synthetic epitope
EHSSTSDYSL

SEQ ID NO: 6161 - protein, 10 aa, Artificial Sequence
  Description of Artificial Sequence: Synthetic epitope
EHSVLSEVEA

SEQ ID NO: 6162 - protein, 10 aa, Artificial Sequence
  Description of Artificial Sequence: Synthetic epitope
EHTKAFSGKH

SEQ ID NO: 6163 - protein, 10 aa, Artificial Sequence
  Description of Artificial Sequence: Synthetic epitope
EHTNDFALYT

SEQ ID NO: 6164 - protein, 10 aa, Artificial Sequence
  Description of Artificial Sequence: Synthetic epitope
EHTNSTVLEK

SEQ ID NO: 6165 - protein, 10 aa, Artificial Sequence
  Description of Artificial Sequence: Synthetic epitope
EHTQQMKLKE

SEQ ID NO: 6166 - protein, 10 aa, Artificial Sequence
  Description of Artificial Sequence: Synthetic epitope
EHTTLRKVTA

SEQ ID NO: 6167 - protein, 10 aa, Artificial Sequence
  Description of Artificial Sequence: Synthetic epitope
EHVAEFIEIP

SEQ ID NO: 6168 - protein, 10 aa, Artificial Sequence
  Description of Artificial Sequence: Synthetic epitope
EHVESASKVS

SEQ ID NO: 6169 - protein, 10 aa, Artificial Sequence
  Description of Artificial Sequence: Synthetic epitope
EHVLRATNQI

SEQ ID NO: 6170 - protein, 10 aa, Artificial Sequence
  Description of Artificial Sequence: Synthetic epitope
EHVLSLLENV

SEQ ID NO: 6171 - protein, 10 aa, Artificial Sequence
  Description of Artificial Sequence: Synthetic epitope
EHVMPYAANK

SEQ ID NO: 6172 - protein, 10 aa, Artificial Sequence
  Description of Artificial Sequence: Synthetic epitope
EHVPKKQHKD

SEQ ID NO: 6173 - protein, 10 aa, Artificial Sequence
  Description of Artificial Sequence: Synthetic epitope
EHVQKEMNQQ

SEQ ID NO: 6174 - protein, 10 aa, Artificial Sequence
  Description of Artificial Sequence: Synthetic epitope
EHVQTQMSLM

SEQ ID NO: 6175 - protein, 10 aa, Artificial Sequence
  Description of Artificial Sequence: Synthetic epitope
EHVSISIDQI

SEQ ID NO: 6176 - protein, 10 aa, Artificial Sequence
  Description of Artificial Sequence: Synthetic epitope
EHYEQMEYLG

SEQ ID NO: 6177 - protein, 10 aa, Artificial Sequence
  Description of Artificial Sequence: Synthetic epitope
EIAAQEEAYE

SEQ ID NO: 6178 - protein, 10 aa, Artificial Sequence
  Description of Artificial Sequence: Synthetic epitope
EIAASEKEHI

SEQ ID NO: 6179 - protein, 10 aa, Artificial Sequence
  Description of Artificial Sequence: Synthetic epitope
EIAAVFQDNR

SEQ ID NO: 6180 - protein, 10 aa, Artificial Sequence
  Description of Artificial Sequence: Synthetic epitope
EIADDLSASH

SEQ ID NO: 6181 - protein, 10 aa, Artificial Sequence
  Description of Artificial Sequence: Synthetic epitope
EIAESVQAFV

SEQ ID NO: 6182 - protein, 10 aa, Artificial Sequence
  Description of Artificial Sequence: Synthetic epitope
EIAGYSMSED

SEQ ID NO: 6183 - protein, 10 aa, Artificial Sequence
  Description of Artificial Sequence: Synthetic epitope
EIAIDQESQK

SEQ ID NO: 6184 - protein, 10 aa, Artificial Sequence
  Description of Artificial Sequence: Synthetic epitope
EIAKSESGRV

SEQ ID NO: 6185 - protein, 10 aa, Artificial Sequence
  Description of Artificial Sequence: Synthetic epitope
EIALQKESLM

SEQ ID NO: 6186 - protein, 10 aa, Artificial Sequence
  Description of Artificial Sequence: Synthetic epitope
EIALQQVSMF

SEQ ID NO: 6187 - protein, 10 aa, Artificial Sequence
  Description of Artificial Sequence: Synthetic epitope
EIALSSKMAD

SEQ ID NO: 6188 - protein, 10 aa, Artificial Sequence
  Description of Artificial Sequence: Synthetic epitope
EIARLAERAQ

SEQ ID NO: 6189 - protein, 10 aa, Artificial Sequence
  Description of Artificial Sequence: Synthetic epitope
EIARQTAEES

SEQ ID NO: 6190 - protein, 10 aa, Artificial Sequence
  Description of Artificial Sequence: Synthetic epitope
EIAVEEAVRL

SEQ ID NO: 6191 - protein, 10 aa, Artificial Sequence
  Description of Artificial Sequence: Synthetic epitope
EIAVKLSVEI

SEQ ID NO: 6192 - protein, 10 aa, Artificial Sequence
  Description of Artificial Sequence: Synthetic epitope
EIAYLFAEFF

SEQ ID NO: 6193 - protein, 10 aa, Artificial Sequence
  Description of Artificial Sequence: Synthetic epitope
EIDDMQVFRI

SEQ ID NO: 6194 - protein, 10 aa, Artificial Sequence
  Description of Artificial Sequence: Synthetic epitope
EIDEIAAPRS

SEQ ID NO: 6195 - protein, 10 aa, Artificial Sequence
  Description of Artificial Sequence: Synthetic epitope
EIDGESENLS

SEQ ID NO: 6196 - protein, 10 aa, Artificial Sequence
  Description of Artificial Sequence: Synthetic epitope
EIDKRYVESQ

SEQ ID NO: 6197 - protein, 10 aa, Artificial Sequence
  Description of Artificial Sequence: Synthetic epitope
EIDLESSEAN

SEQ ID NO: 6198 - protein, 10 aa, Artificial Sequence
  Description of Artificial Sequence: Synthetic epitope
EIDLTELVKL

SEQ ID NO: 6199 - protein, 10 aa, Artificial Sequence
  Description of Artificial Sequence: Synthetic epitope
EIDNKVSDEE

SEQ ID NO: 6200 - protein, 10 aa, Artificial Sequence
  Description of Artificial Sequence: Synthetic epitope
EIDQFNDDTF

SEQ ID NO: 6201 - protein, 10 aa, Artificial Sequence
  Description of Artificial Sequence: Synthetic epitope
EIDVALEGVK

SEQ ID NO: 6202 - protein, 10 aa, Artificial Sequence
  Description of Artificial Sequence: Synthetic epitope
EIEGVTKTSD

SEQ ID NO: 6203 - protein, 10 aa, Artificial Sequence
  Description of Artificial Sequence: Synthetic epitope
EIEHGQRNAQ

SEQ ID NO: 6204 - protein, 10 aa, Artificial Sequence
  Description of Artificial Sequence: Synthetic epitope
EIEIGVPNAQ

SEQ ID NO: 6205 - protein, 10 aa, Artificial Sequence
  Description of Artificial Sequence: Synthetic epitope
EIEINYLNQQ

SEQ ID NO: 6206 - protein, 10 aa, Artificial Sequence
  Description of Artificial Sequence: Synthetic epitope
EIEKVALPTN

SEQ ID NO: 6207 - protein, 10 aa, Artificial Sequence
  Description of Artificial Sequence: Synthetic epitope
EIEMIMTDLE

SEQ ID NO: 6208 - protein, 10 aa, Artificial Sequence
  Description of Artificial Sequence: Synthetic epitope
EIENANTNNP

SEQ ID NO: 6209 - protein, 10 aa, Artificial Sequence
  Description of Artificial Sequence: Synthetic epitope
EIEPRLETAE

SEQ ID NO: 6210 - protein, 10 aa, Artificial Sequence
  Description of Artificial Sequence: Synthetic epitope
EIEQASLDKP

SEQ ID NO: 6211 - protein, 10 aa, Artificial Sequence
  Description of Artificial Sequence: Synthetic epitope
EIESESVSEK

SEQ ID NO: 6212 - protein, 10 aa, Artificial Sequence
  Description of Artificial Sequence: Synthetic epitope
EIESKAANLN

SEQ ID NO: 6213 - protein, 10 aa, Artificial Sequence
  Description of Artificial Sequence: Synthetic epitope
EIESVKELKD

SEQ ID NO: 6214 - protein, 10 aa, Artificial Sequence
  Description of Artificial Sequence: Synthetic epitope
EIESVVNFGT

SEQ ID NO: 6215 - protein, 10 aa, Artificial Sequence
  Description of Artificial Sequence: Synthetic epitope
EIETRSKNFS

SEQ ID NO: 6216 - protein, 10 aa, Artificial Sequence
  Description of Artificial Sequence: Synthetic epitope
EIETSKRVQM

SEQ ID NO: 6217 - protein, 10 aa, Artificial Sequence
  Description of Artificial Sequence: Synthetic epitope
EIETSQLEPE

SEQ ID NO: 6218 - protein, 10 aa, Artificial Sequence
  Description of Artificial Sequence: Synthetic epitope
EIEVLKKDKE

SEQ ID NO: 6219 - protein, 10 aa, Artificial Sequence
  Description of Artificial Sequence: Synthetic epitope
EIFDGNVAHI

SEQ ID NO: 6220 - protein, 10 aa, Artificial Sequence
  Description of Artificial Sequence: Synthetic epitope
EIFKDAERTK

SEQ ID NO: 6221 - protein, 10 aa, Artificial Sequence
  Description of Artificial Sequence: Synthetic epitope
EIFQSTLINQ

SEQ ID NO: 6222 - protein, 10 aa, Artificial Sequence
  Description of Artificial Sequence: Synthetic epitope
EIGATAFAEV

SEQ ID NO: 6223 - protein, 10 aa, Artificial Sequence
  Description of Artificial Sequence: Synthetic epitope
EIGELIRMPK

SEQ ID NO: 6224 - protein, 10 aa, Artificial Sequence
  Description of Artificial Sequence: Synthetic epitope
EIGIQDASSE

SEQ ID NO: 6225 - protein, 10 aa, Artificial Sequence
  Description of Artificial Sequence: Synthetic epitope
EIGLIRLLRR

SEQ ID NO: 6226 - protein, 10 aa, Artificial Sequence
  Description of Artificial Sequence: Synthetic epitope
EIGSQRYKLG

SEQ ID NO: 6227 - protein, 10 aa, Artificial Sequence
  Description of Artificial Sequence: Synthetic epitope
EIIDTANTTE

SEQ ID NO: 6228 - protein, 10 aa, Artificial Sequence
  Description of Artificial Sequence: Synthetic epitope
EIIGNIMEIS

SEQ ID NO: 6229 - protein, 10 aa, Artificial Sequence
  Description of Artificial Sequence: Synthetic epitope
EIIKAWSVQK

SEQ ID NO: 6230 - protein, 10 aa, Artificial Sequence
  Description of Artificial Sequence: Synthetic epitope
EIIKQMDSAV

SEQ ID NO: 6231 - protein, 10 aa, Artificial Sequence
  Description of Artificial Sequence: Synthetic epitope
EIIKTAKIED

SEQ ID NO: 6232 - protein, 10 aa, Artificial Sequence
  Description of Artificial Sequence: Synthetic epitope
EIILILVKIK

SEQ ID NO: 6233 - protein, 10 aa, Artificial Sequence
  Description of Artificial Sequence: Synthetic epitope
EIILKAAQEL

SEQ ID NO: 6234 - protein, 10 aa, Artificial Sequence
  Description of Artificial Sequence: Synthetic epitope
EIIPQNQKAI

SEQ ID NO: 6235 - protein, 10 aa, Artificial Sequence
  Description of Artificial Sequence: Synthetic epitope
EIIQEKQNKH

SEQ ID NO: 6236 - protein, 10 aa, Artificial Sequence
  Description of Artificial Sequence: Synthetic epitope
EIIQQAFINV

SEQ ID NO: 6237 - protein, 10 aa, Artificial Sequence
  Description of Artificial Sequence: Synthetic epitope
EIIRGTSLDL

SEQ ID NO: 6238 - protein, 10 aa, Artificial Sequence
  Description of Artificial Sequence: Synthetic epitope
EIISSKLEVQ

SEQ ID NO: 6239 - protein, 10 aa, Artificial Sequence
  Description of Artificial Sequence: Synthetic epitope
EIITSSIKKI

SEQ ID NO: 6240 - protein, 10 aa, Artificial Sequence
  Description of Artificial Sequence: Synthetic epitope
EIKDLMTKSD

SEQ ID NO: 6241 - protein, 10 aa, Artificial Sequence
  Description of Artificial Sequence: Synthetic epitope
EIKDRNKRDT

SEQ ID NO: 6242 - protein, 10 aa, Artificial Sequence
  Description of Artificial Sequence: Synthetic epitope
EIKEIFIPEH

SEQ ID NO: 6243 - protein, 10 aa, Artificial Sequence
  Description of Artificial Sequence: Synthetic epitope
EIKERVGTSK

SEQ ID NO: 6244 - protein, 10 aa, Artificial Sequence
  Description of Artificial Sequence: Synthetic epitope
EIKKIGDEYF

SEQ ID NO: 6245 - protein, 10 aa, Artificial Sequence
  Description of Artificial Sequence: Synthetic epitope
EIKKLALDRM

SEQ ID NO: 6246 - protein, 10 aa, Artificial Sequence
  Description of Artificial Sequence: Synthetic epitope
EIKNEMATSE

SEQ ID NO: 6247 - protein, 10 aa, Artificial Sequence
  Description of Artificial Sequence: Synthetic epitope
EIKNRSQHEL

SEQ ID NO: 6248 - protein, 10 aa, Artificial Sequence
  Description of Artificial Sequence: Synthetic epitope
EIKNSVEFTG

SEQ ID NO: 6249 - protein, 10 aa, Artificial Sequence
  Description of Artificial Sequence: Synthetic epitope
EIKPKLKLNP

SEQ ID NO: 6250 - protein, 10 aa, Artificial Sequence
  Description of Artificial Sequence: Synthetic epitope
EIKPKREKVA

SEQ ID NO: 6251 - protein, 10 aa, Artificial Sequence
  Description of Artificial Sequence: Synthetic epitope
EIKSTSAKSS

SEQ ID NO: 6252 - protein, 10 aa, Artificial Sequence
  Description of Artificial Sequence: Synthetic epitope
EIKVNKLELE

SEQ ID NO: 6253 - protein, 10 aa, Artificial Sequence
  Description of Artificial Sequence: Synthetic epitope
EIKVQEANIH

SEQ ID NO: 6254 - protein, 10 aa, Artificial Sequence
  Description of Artificial Sequence: Synthetic epitope
EILAAQEVSL

SEQ ID NO: 6255 - protein, 10 aa, Artificial Sequence
  Description of Artificial Sequence: Synthetic epitope
EILAETKLTP

SEQ ID NO: 6256 - protein, 10 aa, Artificial Sequence
  Description of Artificial Sequence: Synthetic epitope
EILAKQAGED

SEQ ID NO: 6257 - protein, 10 aa, Artificial Sequence
  Description of Artificial Sequence: Synthetic epitope
EILAVVRKEK

SEQ ID NO: 6258 - protein, 10 aa, Artificial Sequence
  Description of Artificial Sequence: Synthetic epitope
EILAWKVSLS

SEQ ID NO: 6259 - protein, 10 aa, Artificial Sequence
  Description of Artificial Sequence: Synthetic epitope
EILEAISQNS

SEQ ID NO: 6260 - protein, 10 aa, Artificial Sequence
  Description of Artificial Sequence: Synthetic epitope
EILEQLAQTF

SEQ ID NO: 6261 - protein, 10 aa, Artificial Sequence
  Description of Artificial Sequence: Synthetic epitope
EILMIASKGQ

SEQ ID NO: 6262 - protein, 10 aa, Artificial Sequence
  Description of Artificial Sequence: Synthetic epitope
EILNEKMTVQ

SEQ ID NO: 6263 - protein, 10 aa, Artificial Sequence
  Description of Artificial Sequence: Synthetic epitope
EILNVAKGIR

SEQ ID NO: 6264 - protein, 10 aa, Artificial Sequence
  Description of Artificial Sequence: Synthetic epitope
EILPVSVESS

SEQ ID NO: 6265 - protein, 10 aa, Artificial Sequence
  Description of Artificial Sequence: Synthetic epitope
EILQLAQAQG

SEQ ID NO: 6266 - protein, 10 aa, Artificial Sequence
  Description of Artificial Sequence: Synthetic epitope
EILRFNVQEN

SEQ ID NO: 6267 - protein, 10 aa, Artificial Sequence
  Description of Artificial Sequence: Synthetic epitope
EILVASSLDV

SEQ ID NO: 6268 - protein, 10 aa, Artificial Sequence
  Description of Artificial Sequence: Synthetic epitope
EIMDEDQLIK

SEQ ID NO: 6269 - protein, 10 aa, Artificial Sequence
  Description of Artificial Sequence: Synthetic epitope
EIMERSKTQD

SEQ ID NO: 6270 - protein, 10 aa, Artificial Sequence
  Description of Artificial Sequence: Synthetic epitope
EIMKHHQEQQ

SEQ ID NO: 6271 - protein, 10 aa, Artificial Sequence
  Description of Artificial Sequence: Synthetic epitope
EIMLASLPGN

SEQ ID NO: 6272 - protein, 10 aa, Artificial Sequence
  Description of Artificial Sequence: Synthetic epitope
EIMLSKKVSR

SEQ ID NO: 6273 - protein, 10 aa, Artificial Sequence
  Description of Artificial Sequence: Synthetic epitope
EINAALQVSL

SEQ ID NO: 6274 - protein, 10 aa, Artificial Sequence
  Description of Artificial Sequence: Synthetic epitope
EINFSTSIKN

SEQ ID NO: 6275 - protein, 10 aa, Artificial Sequence
  Description of Artificial Sequence: Synthetic epitope
EININLFTRD

SEQ ID NO: 6276 - protein, 10 aa, Artificial Sequence
  Description of Artificial Sequence: Synthetic epitope
EINKSDHVAA

SEQ ID NO: 6277 - protein, 10 aa, Artificial Sequence
  Description of Artificial Sequence: Synthetic epitope
EINQYIDHMQ

SEQ ID NO: 6278 - protein, 10 aa, Artificial Sequence
  Description of Artificial Sequence: Synthetic epitope
EINRENYWVT

SEQ ID NO: 6279 - protein, 10 aa, Artificial Sequence
  Description of Artificial Sequence: Synthetic epitope
EINRGTMNRK

SEQ ID NO: 6280 - protein, 10 aa, Artificial Sequence
  Description of Artificial Sequence: Synthetic epitope
EINTEPAVEY

SEQ ID NO: 6281 - protein, 10 aa, Artificial Sequence
  Description of Artificial Sequence: Synthetic epitope
EIPANTEKAS

SEQ ID NO: 6282 - protein, 10 aa, Artificial Sequence
  Description of Artificial Sequence: Synthetic epitope
EIPKGDDELA

SEQ ID NO: 6283 - protein, 10 aa, Artificial Sequence
  Description of Artificial Sequence: Synthetic epitope
EIPQAMTKPE

SEQ ID NO: 6284 - protein, 10 aa, Artificial Sequence
  Description of Artificial Sequence: Synthetic epitope
EIPQEVSQSE

SEQ ID NO: 6285 - protein, 10 aa, Artificial Sequence
  Description of Artificial Sequence: Synthetic epitope
EIPTSEIQTP

SEQ ID NO: 6286 - protein, 10 aa, Artificial Sequence
  Description of Artificial Sequence: Synthetic epitope
EIPVEENEVN

SEQ ID NO: 6287 - protein, 10 aa, Artificial Sequence
  Description of Artificial Sequence: Synthetic epitope
EIQAKSLTSY

SEQ ID NO: 6288 - protein, 10 aa, Artificial Sequence
  Description of Artificial Sequence: Synthetic epitope
EIQDHSQDQQ

SEQ ID NO: 6289 - protein, 10 aa, Artificial Sequence
  Description of Artificial Sequence: Synthetic epitope
EIQDLMFEEM

SEQ ID NO: 6290 - protein, 10 aa, Artificial Sequence
  Description of Artificial Sequence: Synthetic epitope
EIQHTTALRS

SEQ ID NO: 6291 - protein, 10 aa, Artificial Sequence
  Description of Artificial Sequence: Synthetic epitope
EIQKLRSLEK

SEQ ID NO: 6292 - protein, 10 aa, Artificial Sequence
  Description of Artificial Sequence: Synthetic epitope
EIQMSTKESD

SEQ ID NO: 6293 - protein, 10 aa, Artificial Sequence
  Description of Artificial Sequence: Synthetic epitope
EIQQRKAKDS

SEQ ID NO: 6294 - protein, 10 aa, Artificial Sequence
  Description of Artificial Sequence: Synthetic epitope
EIQQTPNTVA

SEQ ID NO: 6295 - protein, 10 aa, Artificial Sequence
  Description of Artificial Sequence: Synthetic epitope
EIQTSAKSRE

SEQ ID NO: 6296 - protein, 10 aa, Artificial Sequence
  Description of Artificial Sequence: Synthetic epitope
EIQYIFPNAS

SEQ ID NO: 6297 - protein, 10 aa, Artificial Sequence
  Description of Artificial Sequence: Synthetic epitope
EIRAIQYLET

SEQ ID NO: 6298 - protein, 10 aa, Artificial Sequence
  Description of Artificial Sequence: Synthetic epitope
EIRMMSTGSK

SEQ ID NO: 6299 - protein, 10 aa, Artificial Sequence
  Description of Artificial Sequence: Synthetic epitope
EIRNESRNES

SEQ ID NO: 6300 - protein, 10 aa, Artificial Sequence
  Description of Artificial Sequence: Synthetic epitope
EIRNETSGSE

SEQ ID NO: 6301 - protein, 10 aa, Artificial Sequence
  Description of Artificial Sequence: Synthetic epitope
EIRQGFFTDE

SEQ ID NO: 6302 - protein, 10 aa, Artificial Sequence
  Description of Artificial Sequence: Synthetic epitope
EIRRNEIRKM

SEQ ID NO: 6303 - protein, 10 aa, Artificial Sequence
  Description of Artificial Sequence: Synthetic epitope
EIRTIKEVDS

SEQ ID NO: 6304 - protein, 10 aa, Artificial Sequence
  Description of Artificial Sequence: Synthetic epitope
EIRTLSRPSE

SEQ ID NO: 6305 - protein, 10 aa, Artificial Sequence
  Description of Artificial Sequence: Synthetic epitope
EIRTQKLTSG

SEQ ID NO: 6306 - protein, 10 aa, Artificial Sequence
  Description of Artificial Sequence: Synthetic epitope
EIRVRLQSAS

SEQ ID NO: 6307 - protein, 10 aa, Artificial Sequence
  Description of Artificial Sequence: Synthetic epitope
EISAEAVSET

SEQ ID NO: 6308 - protein, 10 aa, Artificial Sequence
  Description of Artificial Sequence: Synthetic epitope
EISDAVSERD

SEQ ID NO: 6309 - protein, 10 aa, Artificial Sequence
  Description of Artificial Sequence: Synthetic epitope
EISDKWQYIR

SEQ ID NO: 6310 - protein, 10 aa, Artificial Sequence
  Description of Artificial Sequence: Synthetic epitope
EISESVGKNQ

SEQ ID NO: 6311 - protein, 10 aa, Artificial Sequence
  Description of Artificial Sequence: Synthetic epitope
EISFEVVMDI

SEQ ID NO: 6312 - protein, 10 aa, Artificial Sequence
  Description of Artificial Sequence: Synthetic epitope
EISHSESEHL

SEQ ID NO: 6313 - protein, 10 aa, Artificial Sequence
  Description of Artificial Sequence: Synthetic epitope
EISIEVSNPS

SEQ ID NO: 6314 - protein, 10 aa, Artificial Sequence
  Description of Artificial Sequence: Synthetic epitope
EISLATAQKR

SEQ ID NO: 6315 - protein, 10 aa, Artificial Sequence
  Description of Artificial Sequence: Synthetic epitope
EISLSPMTVK

SEQ ID NO: 6316 - protein, 10 aa, Artificial Sequence
  Description of Artificial Sequence: Synthetic epitope
EISPETAQLR

SEQ ID NO: 6317 - protein, 10 aa, Artificial Sequence
  Description of Artificial Sequence: Synthetic epitope
EISQKNIKRH

SEQ ID NO: 6318 - protein, 10 aa, Artificial Sequence
  Description of Artificial Sequence: Synthetic epitope
EISSDDSKED

SEQ ID NO: 6319 - protein, 10 aa, Artificial Sequence
  Description of Artificial Sequence: Synthetic epitope
EISSGAASKN

SEQ ID NO: 6320 - protein, 10 aa, Artificial Sequence
  Description of Artificial Sequence: Synthetic epitope
EISSKLGSTQ

SEQ ID NO: 6321 - protein, 10 aa, Artificial Sequence
  Description of Artificial Sequence: Synthetic epitope
EITASEYEST

SEQ ID NO: 6322 - protein, 10 aa, Artificial Sequence
  Description of Artificial Sequence: Synthetic epitope
EITDQGATLI

SEQ ID NO: 6323 - protein, 10 aa, Artificial Sequence
  Description of Artificial Sequence: Synthetic epitope
EITEKSTEET

SEQ ID NO: 6324 - protein, 10 aa, Artificial Sequence
  Description of Artificial Sequence: Synthetic epitope
EITIGAEPKE

SEQ ID NO: 6325 - protein, 10 aa, Artificial Sequence
  Description of Artificial Sequence: Synthetic epitope
EITKGTAALS

SEQ ID NO: 6326 - protein, 10 aa, Artificial Sequence
  Description of Artificial Sequence: Synthetic epitope
EITLPQVQFS

SEQ ID NO: 6327 - protein, 10 aa, Artificial Sequence
  Description of Artificial Sequence: Synthetic epitope
EITLSLKQDA

SEQ ID NO: 6328 - protein, 10 aa, Artificial Sequence
  Description of Artificial Sequence: Synthetic epitope
EITQEVAAEV

SEQ ID NO: 6329 - protein, 10 aa, Artificial Sequence
  Description of Artificial Sequence: Synthetic epitope
EITQNLLNSP

SEQ ID NO: 6330 - protein, 10 aa, Artificial Sequence
  Description of Artificial Sequence: Synthetic epitope
EITSANTEDD

SEQ ID NO: 6331 - protein, 10 aa, Artificial Sequence
  Description of Artificial Sequence: Synthetic epitope
EITSEVKRVA

SEQ ID NO: 6332 - protein, 10 aa, Artificial Sequence
  Description of Artificial Sequence: Synthetic epitope
EITSLDEQIV

SEQ ID NO: 6333 - protein, 10 aa, Artificial Sequence
  Description of Artificial Sequence: Synthetic epitope
EITVQQVHEE

SEQ ID NO: 6334 - protein, 10 aa, Artificial Sequence
  Description of Artificial Sequence: Synthetic epitope
EIVDQLEVEI

SEQ ID NO: 6335 - protein, 10 aa, Artificial Sequence
  Description of Artificial Sequence: Synthetic epitope
EIVEETAETF

SEQ ID NO: 6336 - protein, 10 aa, Artificial Sequence
  Description of Artificial Sequence: Synthetic epitope
EIVGMISSEK

SEQ ID NO: 6337 - protein, 10 aa, Artificial Sequence
  Description of Artificial Sequence: Synthetic epitope
EIVHEPNHQE

SEQ ID NO: 6338 - protein, 10 aa, Artificial Sequence
  Description of Artificial Sequence: Synthetic epitope
EIVINKAYQK

SEQ ID NO: 6339 - protein, 10 aa, Artificial Sequence
  Description of Artificial Sequence: Synthetic epitope
EIVKRTETKS

SEQ ID NO: 6340 - protein, 10 aa, Artificial Sequence
  Description of Artificial Sequence: Synthetic epitope
EIVNLSKEAQ

SEQ ID NO: 6341 - protein, 10 aa, Artificial Sequence
  Description of Artificial Sequence: Synthetic epitope
EIVQLVGKAS

SEQ ID NO: 6342 - protein, 10 aa, Artificial Sequence
  Description of Artificial Sequence: Synthetic epitope
EIVQQVKQQE

SEQ ID NO: 6343 - protein, 10 aa, Artificial Sequence
  Description of Artificial Sequence: Synthetic epitope
EIWYRTEQAA

SEQ ID NO: 6344 - protein, 10 aa, Artificial Sequence
  Description of Artificial Sequence: Synthetic epitope
EIYQEALKQA

SEQ ID NO: 6345 - protein, 10 aa, Artificial Sequence
  Description of Artificial Sequence: Synthetic epitope
EIYQKNLEIE

SEQ ID NO: 6346 - protein, 10 aa, Artificial Sequence
  Description of Artificial Sequence: Synthetic epitope
EKAANAAGKK

SEQ ID NO: 6347 - protein, 10 aa, Artificial Sequence
  Description of Artificial Sequence: Synthetic epitope
EKAANDTSKA

SEQ ID NO: 6348 - protein, 10 aa, Artificial Sequence
  Description of Artificial Sequence: Synthetic epitope
EKAATHAEKE

SEQ ID NO: 6349 - protein, 10 aa, Artificial Sequence
  Description of Artificial Sequence: Synthetic epitope
EKAATMTAAG

SEQ ID NO: 6350 - protein, 10 aa, Artificial Sequence
  Description of Artificial Sequence: Synthetic epitope
EKADALEAKK

SEQ ID NO: 6351 - protein, 10 aa, Artificial Sequence
  Description of Artificial Sequence: Synthetic epitope
EKAEPASAAE

SEQ ID NO: 6352 - protein, 10 aa, Artificial Sequence
  Description of Artificial Sequence: Synthetic epitope
EKAEQQKKAA

SEQ ID NO: 6353 - protein, 10 aa, Artificial Sequence
  Description of Artificial Sequence: Synthetic epitope
EKAIQLSGAE

SEQ ID NO: 6354 - protein, 10 aa, Artificial Sequence
  Description of Artificial Sequence: Synthetic epitope
EKAKAAKLEQ

SEQ ID NO: 6355 - protein, 10 aa, Artificial Sequence
  Description of Artificial Sequence: Synthetic epitope
EKAKESLDTA

SEQ ID NO: 6356 - protein, 10 aa, Artificial Sequence
  Description of Artificial Sequence: Synthetic epitope
EKAKSLIEEG

SEQ ID NO: 6357 - protein, 10 aa, Artificial Sequence
  Description of Artificial Sequence: Synthetic epitope
EKAKVSKVSE

SEQ ID NO: 6358 - protein, 10 aa, Artificial Sequence
  Description of Artificial Sequence: Synthetic epitope
EKAKYSLDSV

SEQ ID NO: 6359 - protein, 10 aa, Artificial Sequence
  Description of Artificial Sequence: Synthetic epitope
EKALAEQGQD

SEQ ID NO: 6360 - protein, 10 aa, Artificial Sequence
  Description of Artificial Sequence: Synthetic epitope
EKALAILSQP

SEQ ID NO: 6361 - protein, 10 aa, Artificial Sequence
  Description of Artificial Sequence: Synthetic epitope
EKALDVMVST

SEQ ID NO: 6362 - protein, 10 aa, Artificial Sequence
  Description of Artificial Sequence: Synthetic epitope
EKALKIDTPQ

SEQ ID NO: 6363 - protein, 10 aa, Artificial Sequence
  Description of Artificial Sequence: Synthetic epitope
EKALKMTREE

SEQ ID NO: 6364 - protein, 10 aa, Artificial Sequence
  Description of Artificial Sequence: Synthetic epitope
EKALKVSTGP

SEQ ID NO: 6365 - protein, 10 aa, Artificial Sequence
  Description of Artificial Sequence: Synthetic epitope
EKALSAKHKG

SEQ ID NO: 6366 - protein, 10 aa, Artificial Sequence
  Description of Artificial Sequence: Synthetic epitope
EKALSSLQEE

SEQ ID NO: 6367 - protein, 10 aa, Artificial Sequence
  Description of Artificial Sequence: Synthetic epitope
EKALVLANPE

SEQ ID NO: 6368 - protein, 10 aa, Artificial Sequence
  Description of Artificial Sequence: Synthetic epitope
EKAMAHLRAE

SEQ ID NO: 6369 - protein, 10 aa, Artificial Sequence
  Description of Artificial Sequence: Synthetic epitope
EKANASNSPS

SEQ ID NO: 6370 - protein, 10 aa, Artificial Sequence
  Description of Artificial Sequence: Synthetic epitope
EKANELASVE

SEQ ID NO: 6371 - protein, 10 aa, Artificial Sequence
  Description of Artificial Sequence: Synthetic epitope
EKANQEEDIP

SEQ ID NO: 6372 - protein, 10 aa, Artificial Sequence
  Description of Artificial Sequence: Synthetic epitope
EKAPKEATVM

SEQ ID NO: 6373 - protein, 10 aa, Artificial Sequence
  Description of Artificial Sequence: Synthetic epitope
EKAPQGKVKV

SEQ ID NO: 6374 - protein, 10 aa, Artificial Sequence
  Description of Artificial Sequence: Synthetic epitope
EKAQESVGIY

SEQ ID NO: 6375 - protein, 10 aa, Artificial Sequence
  Description of Artificial Sequence: Synthetic epitope
EKARALTEGR

SEQ ID NO: 6376 - protein, 10 aa, Artificial Sequence
  Description of Artificial Sequence: Synthetic epitope
EKARKEAVTD

SEQ ID NO: 6377 - protein, 10 aa, Artificial Sequence
  Description of Artificial Sequence: Synthetic epitope
EKASDMLIRQ

SEQ ID NO: 6378 - protein, 10 aa, Artificial Sequence
  Description of Artificial Sequence: Synthetic epitope
EKASESLKGN

SEQ ID NO: 6379 - protein, 10 aa, Artificial Sequence
  Description of Artificial Sequence: Synthetic epitope
EKASGFEESM

SEQ ID NO: 6380 - protein, 10 aa, Artificial Sequence
  Description of Artificial Sequence: Synthetic epitope
EKASHRMKTP

SEQ ID NO: 6381 - protein, 10 aa, Artificial Sequence
  Description of Artificial Sequence: Synthetic epitope
EKASKTTEAK

SEQ ID NO: 6382 - protein, 10 aa, Artificial Sequence
  Description of Artificial Sequence: Synthetic epitope
EKASMVVPEE

SEQ ID NO: 6383 - protein, 10 aa, Artificial Sequence
  Description of Artificial Sequence: Synthetic epitope
EKATRKRVRD

SEQ ID NO: 6384 - protein, 10 aa, Artificial Sequence
  Description of Artificial Sequence: Synthetic epitope
EKATTEFKDA

SEQ ID NO: 6385 - protein, 10 aa, Artificial Sequence
  Description of Artificial Sequence: Synthetic epitope
EKAVASSTTS

SEQ ID NO: 6386 - protein, 10 aa, Artificial Sequence
  Description of Artificial Sequence: Synthetic epitope
EKAYKTEMQD

SEQ ID NO: 6387 - protein, 10 aa, Artificial Sequence
  Description of Artificial Sequence: Synthetic epitope
EKDADSSERI

SEQ ID NO: 6388 - protein, 10 aa, Artificial Sequence
  Description of Artificial Sequence: Synthetic epitope
EKDAQIAMMQ

SEQ ID NO: 6389 - protein, 10 aa, Artificial Sequence
  Description of Artificial Sequence: Synthetic epitope
EKDEMEKPAK

SEQ ID NO: 6390 - protein, 10 aa, Artificial Sequence
  Description of Artificial Sequence: Synthetic epitope
EKDEVAVETT

SEQ ID NO: 6391 - protein, 10 aa, Artificial Sequence
  Description of Artificial Sequence: Synthetic epitope
EKDIAMRERQ

SEQ ID NO: 6392 - protein, 10 aa, Artificial Sequence
  Description of Artificial Sequence: Synthetic epitope
EKDIITLEMR

SEQ ID NO: 6393 - protein, 10 aa, Artificial Sequence
  Description of Artificial Sequence: Synthetic epitope
EKDITSFKEV

SEQ ID NO: 6394 - protein, 10 aa, Artificial Sequence
  Description of Artificial Sequence: Synthetic epitope
EKDKITTRTL

SEQ ID NO: 6395 - protein, 10 aa, Artificial Sequence
  Description of Artificial Sequence: Synthetic epitope
EKDMSQSPTS

SEQ ID NO: 6396 - protein, 10 aa, Artificial Sequence
  Description of Artificial Sequence: Synthetic epitope
EKDQHHPKHH

SEQ ID NO: 6397 - protein, 10 aa, Artificial Sequence
  Description of Artificial Sequence: Synthetic epitope
EKDQLNMAKN

SEQ ID NO: 6398 - protein, 10 aa, Artificial Sequence
  Description of Artificial Sequence: Synthetic epitope
EKDRFKIKKT

SEQ ID NO: 6399 - protein, 10 aa, Artificial Sequence
  Description of Artificial Sequence: Synthetic epitope
EKDRSKEIDE

SEQ ID NO: 6400 - protein, 10 aa, Artificial Sequence
  Description of Artificial Sequence: Synthetic epitope
EKDSDDKTPD

SEQ ID NO: 6401 - protein, 10 aa, Artificial Sequence
  Description of Artificial Sequence: Synthetic epitope
EKDSNAENMN

SEQ ID NO: 6402 - protein, 10 aa, Artificial Sequence
  Description of Artificial Sequence: Synthetic epitope
EKDSNDKNAA

SEQ ID NO: 6403 - protein, 10 aa, Artificial Sequence
  Description of Artificial Sequence: Synthetic epitope
EKEAALQLQT

SEQ ID NO: 6404 - protein, 10 aa, Artificial Sequence
  Description of Artificial Sequence: Synthetic epitope
EKEAALTSEE

SEQ ID NO: 6405 - protein, 10 aa, Artificial Sequence
  Description of Artificial Sequence: Synthetic epitope
EKEAASEKQQ

SEQ ID NO: 6406 - protein, 10 aa, Artificial Sequence
  Description of Artificial Sequence: Synthetic epitope
EKEAAYQERL

SEQ ID NO: 6407 - protein, 10 aa, Artificial Sequence
  Description of Artificial Sequence: Synthetic epitope
EKEADISAFA

SEQ ID NO: 6408 - protein, 10 aa, Artificial Sequence
  Description of Artificial Sequence: Synthetic epitope
EKEAEKEKKP

SEQ ID NO: 6409 - protein, 10 aa, Artificial Sequence
  Description of Artificial Sequence: Synthetic epitope
EKEAIELREA

SEQ ID NO: 6410 - protein, 10 aa, Artificial Sequence
  Description of Artificial Sequence: Synthetic epitope
EKEAQSKEPE

SEQ ID NO: 6411 - protein, 10 aa, Artificial Sequence
  Description of Artificial Sequence: Synthetic epitope
EKEDKEKAAV

SEQ ID NO: 6412 - protein, 10 aa, Artificial Sequence
  Description of Artificial Sequence: Synthetic epitope
EKEDTIKQRT

SEQ ID NO: 6413 - protein, 10 aa, Artificial Sequence
  Description of Artificial Sequence: Synthetic epitope
EKEEADRTRQ

SEQ ID NO: 6414 - protein, 10 aa, Artificial Sequence
  Description of Artificial Sequence: Synthetic epitope
EKEEAKKTED

SEQ ID NO: 6415 - protein, 10 aa, Artificial Sequence
  Description of Artificial Sequence: Synthetic epitope
EKEEDKAEKT

SEQ ID NO: 6416 - protein, 10 aa, Artificial Sequence
  Description of Artificial Sequence: Synthetic epitope
EKEEIRTSNE

SEQ ID NO: 6417 - protein, 10 aa, Artificial Sequence
  Description of Artificial Sequence: Synthetic epitope
EKEESKASTD

SEQ ID NO: 6418 - protein, 10 aa, Artificial Sequence
  Description of Artificial Sequence: Synthetic epitope
EKEEVAAVKI

SEQ ID NO: 6419 - protein, 10 aa, Artificial Sequence
  Description of Artificial Sequence: Synthetic epitope
EKEEVKVSGT

SEQ ID NO: 6420 - protein, 10 aa, Artificial Sequence
  Description of Artificial Sequence: Synthetic epitope
EKEFKAKEAA

SEQ ID NO: 6421 - protein, 10 aa, Artificial Sequence
  Description of Artificial Sequence: Synthetic epitope
EKEGKKERAV

SEQ ID NO: 6422 - protein, 10 aa, Artificial Sequence
  Description of Artificial Sequence: Synthetic epitope
EKEGVIQNFK

SEQ ID NO: 6423 - protein, 10 aa, Artificial Sequence
  Description of Artificial Sequence: Synthetic epitope
EKEIKTTLVH

SEQ ID NO: 6424 - protein, 10 aa, Artificial Sequence
  Description of Artificial Sequence: Synthetic epitope
EKEKASRKGS

SEQ ID NO: 6425 - protein, 10 aa, Artificial Sequence
  Description of Artificial Sequence: Synthetic epitope
EKEKEANSEK

SEQ ID NO: 6426 - protein, 10 aa, Artificial Sequence
  Description of Artificial Sequence: Synthetic epitope
EKEKKASPSQ

SEQ ID NO: 6427 - protein, 10 aa, Artificial Sequence
  Description of Artificial Sequence: Synthetic epitope
EKEKNILTAQ

SEQ ID NO: 6428 - protein, 10 aa, Artificial Sequence
  Description of Artificial Sequence: Synthetic epitope
EKEKSLLSQE

SEQ ID NO: 6429 - protein, 10 aa, Artificial Sequence
  Description of Artificial Sequence: Synthetic epitope
EKEKSSLAKA

SEQ ID NO: 6430 - protein, 10 aa, Artificial Sequence
  Description of Artificial Sequence: Synthetic epitope
EKEKTIILQE

SEQ ID NO: 6431 - protein, 10 aa, Artificial Sequence
  Description of Artificial Sequence: Synthetic epitope
EKEKVSASSE

SEQ ID NO: 6432 - protein, 10 aa, Artificial Sequence
  Description of Artificial Sequence: Synthetic epitope
EKELDALQQI

SEQ ID NO: 6433 - protein, 10 aa, Artificial Sequence
  Description of Artificial Sequence: Synthetic epitope
EKELKKLAGL

SEQ ID NO: 6434 - protein, 10 aa, Artificial Sequence
  Description of Artificial Sequence: Synthetic epitope
EKELKSVETL

SEQ ID NO: 6435 - protein, 10 aa, Artificial Sequence
  Description of Artificial Sequence: Synthetic epitope
EKELQAALTA

SEQ ID NO: 6436 - protein, 10 aa, Artificial Sequence
  Description of Artificial Sequence: Synthetic epitope
EKELSEKSGQ

SEQ ID NO: 6437 - protein, 10 aa, Artificial Sequence
  Description of Artificial Sequence: Synthetic epitope
EKELTASVTE

SEQ ID NO: 6438 - protein, 10 aa, Artificial Sequence
  Description of Artificial Sequence: Synthetic epitope
EKEMKSSIKQ

SEQ ID NO: 6439 - protein, 10 aa, Artificial Sequence
  Description of Artificial Sequence: Synthetic epitope
EKENIFQRTP

SEQ ID NO: 6440 - protein, 10 aa, Artificial Sequence
  Description of Artificial Sequence: Synthetic epitope
EKEPAAMDQE

SEQ ID NO: 6441 - protein, 10 aa, Artificial Sequence
  Description of Artificial Sequence: Synthetic epitope
EKEPSQLSNT

SEQ ID NO: 6442 - protein, 10 aa, Artificial Sequence
  Description of Artificial Sequence: Synthetic epitope
EKEQSHLKKR

SEQ ID NO: 6443 - protein, 10 aa, Artificial Sequence
  Description of Artificial Sequence: Synthetic epitope
EKEQTGSKTL

SEQ ID NO: 6444 - protein, 10 aa, Artificial Sequence
  Description of Artificial Sequence: Synthetic epitope
EKERANNFEH

SEQ ID NO: 6445 - protein, 10 aa, Artificial Sequence
  Description of Artificial Sequence: Synthetic epitope
EKERLSSIEK

SEQ ID NO: 6446 - protein, 10 aa, Artificial Sequence
  Description of Artificial Sequence: Synthetic epitope
EKERLSSIEK

SEQ ID NO: 6447 - protein, 10 aa, Artificial Sequence
  Description of Artificial Sequence: Synthetic epitope
EKERQSIRSS

SEQ ID NO: 6448 - protein, 10 aa, Artificial Sequence
  Description of Artificial Sequence: Synthetic epitope
EKESAAHILN

SEQ ID NO: 6449 - protein, 10 aa, Artificial Sequence
  Description of Artificial Sequence: Synthetic epitope
EKESLGKLTT

SEQ ID NO: 6450 - protein, 10 aa, Artificial Sequence
  Description of Artificial Sequence: Synthetic epitope
EKESVEVAKT

SEQ ID NO: 6451 - protein, 10 aa, Artificial Sequence
  Description of Artificial Sequence: Synthetic epitope
EKETIVKESG

SEQ ID NO: 6452 - protein, 10 aa, Artificial Sequence
  Description of Artificial Sequence: Synthetic epitope
EKETKSSRIK

SEQ ID NO: 6453 - protein, 10 aa, Artificial Sequence
  Description of Artificial Sequence: Synthetic epitope
EKETSSGEDQ

SEQ ID NO: 6454 - protein, 10 aa, Artificial Sequence
  Description of Artificial Sequence: Synthetic epitope
EKEVGNDLKS

SEQ ID NO: 6455 - protein, 10 aa, Artificial Sequence
  Description of Artificial Sequence: Synthetic epitope
EKEYHTMREQ

SEQ ID NO: 6456 - protein, 10 aa, Artificial Sequence
  Description of Artificial Sequence: Synthetic epitope
EKFEILSVES

SEQ ID NO: 6457 - protein, 10 aa, Artificial Sequence
  Description of Artificial Sequence: Synthetic epitope
EKFEKEAAEM

SEQ ID NO: 6458 - protein, 10 aa, Artificial Sequence
  Description of Artificial Sequence: Synthetic epitope
EKFEKEAAEM

SEQ ID NO: 6459 - protein, 10 aa, Artificial Sequence
  Description of Artificial Sequence: Synthetic epitope
EKFHSPRERE

SEQ ID NO: 6460 - protein, 10 aa, Artificial Sequence
  Description of Artificial Sequence: Synthetic epitope
EKFSIEIETY

SEQ ID NO: 6461 - protein, 10 aa, Artificial Sequence
  Description of Artificial Sequence: Synthetic epitope
EKFSKAIYKY

SEQ ID NO: 6462 - protein, 10 aa, Artificial Sequence
  Description of Artificial Sequence: Synthetic epitope
EKFSKKLASS

SEQ ID NO: 6463 - protein, 10 aa, Artificial Sequence
  Description of Artificial Sequence: Synthetic epitope
EKFSLSQESS

SEQ ID NO: 6464 - protein, 10 aa, Artificial Sequence
  Description of Artificial Sequence: Synthetic epitope
EKFSRVLVEQ

SEQ ID NO: 6465 - protein, 10 aa, Artificial Sequence
  Description of Artificial Sequence: Synthetic epitope
EKFVVDKSTA

SEQ ID NO: 6466 - protein, 10 aa, Artificial Sequence
  Description of Artificial Sequence: Synthetic epitope
EKGAIDKDNV

SEQ ID NO: 6467 - protein, 10 aa, Artificial Sequence
  Description of Artificial Sequence: Synthetic epitope
EKGDKQTVVS

SEQ ID NO: 6468 - protein, 10 aa, Artificial Sequence
  Description of Artificial Sequence: Synthetic epitope
EKGFIHPEKK

SEQ ID NO: 6469 - protein, 10 aa, Artificial Sequence
  Description of Artificial Sequence: Synthetic epitope
EKGGEKGETG

SEQ ID NO: 6470 - protein, 10 aa, Artificial Sequence
  Description of Artificial Sequence: Synthetic epitope
EKGGETAQSA

SEQ ID NO: 6471 - protein, 10 aa, Artificial Sequence
  Description of Artificial Sequence: Synthetic epitope
EKGKEKQKPE

SEQ ID NO: 6472 - protein, 10 aa, Artificial Sequence
  Description of Artificial Sequence: Synthetic epitope
EKGKQTGLEQ

SEQ ID NO: 6473 - protein, 10 aa, Artificial Sequence
  Description of Artificial Sequence: Synthetic epitope
EKGKQTRFTN

SEQ ID NO: 6474 - protein, 10 aa, Artificial Sequence
  Description of Artificial Sequence: Synthetic epitope
EKGLAAQEAE

SEQ ID NO: 6475 - protein, 10 aa, Artificial Sequence
  Description of Artificial Sequence: Synthetic epitope
EKGMVVNSKE

SEQ ID NO: 6476 - protein, 10 aa, Artificial Sequence
  Description of Artificial Sequence: Synthetic epitope
EKGNQSIEQH

SEQ ID NO: 6477 - protein, 10 aa, Artificial Sequence
  Description of Artificial Sequence: Synthetic epitope
EKGSKYMSES

SEQ ID NO: 6478 - protein, 10 aa, Artificial Sequence
  Description of Artificial Sequence: Synthetic epitope
EKGSSATPDQ

SEQ ID NO: 6479 - protein, 10 aa, Artificial Sequence
  Description of Artificial Sequence: Synthetic epitope
EKGVAASSAQ

SEQ ID NO: 6480 - protein, 10 aa, Artificial Sequence
  Description of Artificial Sequence: Synthetic epitope
EKHDEEYRSE

SEQ ID NO: 6481 - protein, 10 aa, Artificial Sequence
  Description of Artificial Sequence: Synthetic epitope
EKHDEVTPNE

SEQ ID NO: 6482 - protein, 10 aa, Artificial Sequence
  Description of Artificial Sequence: Synthetic epitope
EKHHVSVRLG

SEQ ID NO: 6483 - protein, 10 aa, Artificial Sequence
  Description of Artificial Sequence: Synthetic epitope
EKHIETQKML

SEQ ID NO: 6484 - protein, 10 aa, Artificial Sequence
  Description of Artificial Sequence: Synthetic epitope
EKHKSITEAL

SEQ ID NO: 6485 - protein, 10 aa, Artificial Sequence
  Description of Artificial Sequence: Synthetic epitope
EKHNEARAVK

SEQ ID NO: 6486 - protein, 10 aa, Artificial Sequence
  Description of Artificial Sequence: Synthetic epitope
EKHQSSIGFS

SEQ ID NO: 6487 - protein, 10 aa, Artificial Sequence
  Description of Artificial Sequence: Synthetic epitope
EKHSSQSVDM

SEQ ID NO: 6488 - protein, 10 aa, Artificial Sequence
  Description of Artificial Sequence: Synthetic epitope
EKHTNMNLTQ

SEQ ID NO: 6489 - protein, 10 aa, Artificial Sequence
  Description of Artificial Sequence: Synthetic epitope
EKIAQEDPEK

SEQ ID NO: 6490 - protein, 10 aa, Artificial Sequence
  Description of Artificial Sequence: Synthetic epitope
EKIERAITQE

SEQ ID NO: 6491 - protein, 10 aa, Artificial Sequence
  Description of Artificial Sequence: Synthetic epitope
EKIESSIDEQ

SEQ ID NO: 6492 - protein, 10 aa, Artificial Sequence
  Description of Artificial Sequence: Synthetic epitope
EKIFEEKREL

SEQ ID NO: 6493 - protein, 10 aa, Artificial Sequence
  Description of Artificial Sequence: Synthetic epitope
EKIFSKHVAH

SEQ ID NO: 6494 - protein, 10 aa, Artificial Sequence
  Description of Artificial Sequence: Synthetic epitope
EKIGITLSNA

SEQ ID NO: 6495 - protein, 10 aa, Artificial Sequence
  Description of Artificial Sequence: Synthetic epitope
EKIHQSTNQT

SEQ ID NO: 6496 - protein, 10 aa, Artificial Sequence
  Description of Artificial Sequence: Synthetic epitope
EKIIAINSEL

SEQ ID NO: 6497 - protein, 10 aa, Artificial Sequence
  Description of Artificial Sequence: Synthetic epitope
EKIISAELQK

SEQ ID NO: 6498 - protein, 10 aa, Artificial Sequence
  Description of Artificial Sequence: Synthetic epitope
EKIKAAYLST

SEQ ID NO: 6499 - protein, 10 aa, Artificial Sequence
  Description of Artificial Sequence: Synthetic epitope
EKIKEAQVKK

SEQ ID NO: 6500 - protein, 10 aa, Artificial Sequence
  Description of Artificial Sequence: Synthetic epitope
EKIKSQSGAE

SEQ ID NO: 6501 - protein, 10 aa, Artificial Sequence
  Description of Artificial Sequence: Synthetic epitope
EKILLNISAD

SEQ ID NO: 6502 - protein, 10 aa, Artificial Sequence
  Description of Artificial Sequence: Synthetic epitope
EKILLNISAD

SEQ ID NO: 6503 - protein, 10 aa, Artificial Sequence
  Description of Artificial Sequence: Synthetic epitope
EKILSAGESS

SEQ ID NO: 6504 - protein, 10 aa, Artificial Sequence
  Description of Artificial Sequence: Synthetic epitope
EKILSKNMEL

SEQ ID NO: 6505 - protein, 10 aa, Artificial Sequence
  Description of Artificial Sequence: Synthetic epitope
EKILSVDSVA

SEQ ID NO: 6506 - protein, 10 aa, Artificial Sequence
  Description of Artificial Sequence: Synthetic epitope
EKIMKHVINE

SEQ ID NO: 6507 - protein, 10 aa, Artificial Sequence
  Description of Artificial Sequence: Synthetic epitope
EKINQQENSL

SEQ ID NO: 6508 - protein, 10 aa, Artificial Sequence
  Description of Artificial Sequence: Synthetic epitope
EKIPPQFAQA

SEQ ID NO: 6509 - protein, 10 aa, Artificial Sequence
  Description of Artificial Sequence: Synthetic epitope
EKIQKEPTAV

SEQ ID NO: 6510 - protein, 10 aa, Artificial Sequence
  Description of Artificial Sequence: Synthetic epitope
EKIRSLETNI

SEQ ID NO: 6511 - protein, 10 aa, Artificial Sequence
  Description of Artificial Sequence: Synthetic epitope
EKISALQSAG

SEQ ID NO: 6512 - protein, 10 aa, Artificial Sequence
  Description of Artificial Sequence: Synthetic epitope
EKISAMGKAL

SEQ ID NO: 6513 - protein, 10 aa, Artificial Sequence
  Description of Artificial Sequence: Synthetic epitope
EKISLLTDSL

SEQ ID NO: 6514 - protein, 10 aa, Artificial Sequence
  Description of Artificial Sequence: Synthetic epitope
EKISMKIKDN

SEQ ID NO: 6515 - protein, 10 aa, Artificial Sequence
  Description of Artificial Sequence: Synthetic epitope
EKITFKYDIE

SEQ ID NO: 6516 - protein, 10 aa, Artificial Sequence
  Description of Artificial Sequence: Synthetic epitope
EKITKSDKKI

SEQ ID NO: 6517 - protein, 10 aa, Artificial Sequence
  Description of Artificial Sequence: Synthetic epitope
EKITQVSMAS

SEQ ID NO: 6518 - protein, 10 aa, Artificial Sequence
  Description of Artificial Sequence: Synthetic epitope
EKITSEMGSA

SEQ ID NO: 6519 - protein, 10 aa, Artificial Sequence
  Description of Artificial Sequence: Synthetic epitope
EKITSMTHDS

SEQ ID NO: 6520 - protein, 10 aa, Artificial Sequence
  Description of Artificial Sequence: Synthetic epitope
EKIVSSTSSE

SEQ ID NO: 6521 - protein, 10 aa, Artificial Sequence
  Description of Artificial Sequence: Synthetic epitope
EKKAANEEME

SEQ ID NO: 6522 - protein, 10 aa, Artificial Sequence
  Description of Artificial Sequence: Synthetic epitope
EKKAEAQNHH

SEQ ID NO: 6523 - protein, 10 aa, Artificial Sequence
  Description of Artificial Sequence: Synthetic epitope
EKKAQIVTEK

SEQ ID NO: 6524 - protein, 10 aa, Artificial Sequence
  Description of Artificial Sequence: Synthetic epitope
EKKDAKVLGF

SEQ ID NO: 6525 - protein, 10 aa, Artificial Sequence
  Description of Artificial Sequence: Synthetic epitope
EKKDILKESN

SEQ ID NO: 6526 - protein, 10 aa, Artificial Sequence
  Description of Artificial Sequence: Synthetic epitope
EKKDKAEQLD

SEQ ID NO: 6527 - protein, 10 aa, Artificial Sequence
  Description of Artificial Sequence: Synthetic epitope
EKKDKESTEK

SEQ ID NO: 6528 - protein, 10 aa, Artificial Sequence
  Description of Artificial Sequence: Synthetic epitope
EKKDQSKTEG

SEQ ID NO: 6529 - protein, 10 aa, Artificial Sequence
  Description of Artificial Sequence: Synthetic epitope
EKKDQVERSS

SEQ ID NO: 6530 - protein, 10 aa, Artificial Sequence
  Description of Artificial Sequence: Synthetic epitope
EKKDVVGRAR

SEQ ID NO: 6531 - protein, 10 aa, Artificial Sequence
  Description of Artificial Sequence: Synthetic epitope
EKKEDSEKEA

SEQ ID NO: 6532 - protein, 10 aa, Artificial Sequence
  Description of Artificial Sequence: Synthetic epitope
EKKEEKKPIE

SEQ ID NO: 6533 - protein, 10 aa, Artificial Sequence
  Description of Artificial Sequence: Synthetic epitope
EKKEKQIEQQ

SEQ ID NO: 6534 - protein, 10 aa, Artificial Sequence
  Description of Artificial Sequence: Synthetic epitope
EKKELSEDIR

SEQ ID NO: 6535 - protein, 10 aa, Artificial Sequence
  Description of Artificial Sequence: Synthetic epitope
EKKESLGAAQ

SEQ ID NO: 6536 - protein, 10 aa, Artificial Sequence
  Description of Artificial Sequence: Synthetic epitope
EKKESTPSTA

SEQ ID NO: 6537 - protein, 10 aa, Artificial Sequence
  Description of Artificial Sequence: Synthetic epitope
EKKEVADLSM

SEQ ID NO: 6538 - protein, 10 aa, Artificial Sequence
  Description of Artificial Sequence: Synthetic epitope
EKKHDKYRVE

SEQ ID NO: 6539 - protein, 10 aa, Artificial Sequence
  Description of Artificial Sequence: Synthetic epitope
EKKHDKYRVE

SEQ ID NO: 6540 - protein, 10 aa, Artificial Sequence
  Description of Artificial Sequence: Synthetic epitope
EKKHNEEIQF

SEQ ID NO: 6541 - protein, 10 aa, Artificial Sequence
  Description of Artificial Sequence: Synthetic epitope
EKKIHLLNTK

SEQ ID NO: 6542 - protein, 10 aa, Artificial Sequence
  Description of Artificial Sequence: Synthetic epitope
EKKIRAKAFQ

SEQ ID NO: 6543 - protein, 10 aa, Artificial Sequence
  Description of Artificial Sequence: Synthetic epitope
EKKISILLKT

SEQ ID NO: 6544 - protein, 10 aa, Artificial Sequence
  Description of Artificial Sequence: Synthetic epitope
EKKITGKEKE

SEQ ID NO: 6545 - protein, 10 aa, Artificial Sequence
  Description of Artificial Sequence: Synthetic epitope
EKKLTSDLGR

SEQ ID NO: 6546 - protein, 10 aa, Artificial Sequence
  Description of Artificial Sequence: Synthetic epitope
EKKMFTQQFE

SEQ ID NO: 6547 - protein, 10 aa, Artificial Sequence
  Description of Artificial Sequence: Synthetic epitope
EKKNTPAAQK

SEQ ID NO: 6548 - protein, 10 aa, Artificial Sequence
  Description of Artificial Sequence: Synthetic epitope
EKKPATEVDP

SEQ ID NO: 6549 - protein, 10 aa, Artificial Sequence
  Description of Artificial Sequence: Synthetic epitope
EKKRRDTKTP

SEQ ID NO: 6550 - protein, 10 aa, Artificial Sequence
  Description of Artificial Sequence: Synthetic epitope
EKKTADLAPH

SEQ ID NO: 6551 - protein, 10 aa, Artificial Sequence
  Description of Artificial Sequence: Synthetic epitope
EKKTFATRQV

SEQ ID NO: 6552 - protein, 10 aa, Artificial Sequence
  Description of Artificial Sequence: Synthetic epitope
EKKTMEGRSS

SEQ ID NO: 6553 - protein, 10 aa, Artificial Sequence
  Description of Artificial Sequence: Synthetic epitope
EKKVQTLIRD

SEQ ID NO: 6554 - protein, 10 aa, Artificial Sequence
  Description of Artificial Sequence: Synthetic epitope
EKKWAFSDEW

SEQ ID NO: 6555 - protein, 10 aa, Artificial Sequence
  Description of Artificial Sequence: Synthetic epitope
EKLAAKNMQN

SEQ ID NO: 6556 - protein, 10 aa, Artificial Sequence
  Description of Artificial Sequence: Synthetic epitope
EKLAEKKELL

SEQ ID NO: 6557 - protein, 10 aa, Artificial Sequence
  Description of Artificial Sequence: Synthetic epitope
EKLALSSKEE

SEQ ID NO: 6558 - protein, 10 aa, Artificial Sequence
  Description of Artificial Sequence: Synthetic epitope
EKLAQELAAS

SEQ ID NO: 6559 - protein, 10 aa, Artificial Sequence
  Description of Artificial Sequence: Synthetic epitope
EKLDNEEDRL

SEQ ID NO: 6560 - protein, 10 aa, Artificial Sequence
  Description of Artificial Sequence: Synthetic epitope
EKLDSTDFTG

SEQ ID NO: 6561 - protein, 10 aa, Artificial Sequence
  Description of Artificial Sequence: Synthetic epitope
EKLESAVEKK

SEQ ID NO: 6562 - protein, 10 aa, Artificial Sequence
  Description of Artificial Sequence: Synthetic epitope
EKLFTAKAND

SEQ ID NO: 6563 - protein, 10 aa, Artificial Sequence
  Description of Artificial Sequence: Synthetic epitope
EKLGTSQLHR

SEQ ID NO: 6564 - protein, 10 aa, Artificial Sequence
  Description of Artificial Sequence: Synthetic epitope
EKLKAITSKS

SEQ ID NO: 6565 - protein, 10 aa, Artificial Sequence
  Description of Artificial Sequence: Synthetic epitope
EKLKESAPSR

SEQ ID NO: 6566 - protein, 10 aa, Artificial Sequence
  Description of Artificial Sequence: Synthetic epitope
EKLKESISPE

SEQ ID NO: 6567 - protein, 10 aa, Artificial Sequence
  Description of Artificial Sequence: Synthetic epitope
EKLKETEAAM

SEQ ID NO: 6568 - protein, 10 aa, Artificial Sequence
  Description of Artificial Sequence: Synthetic epitope
EKLKFSDEED

SEQ ID NO: 6569 - protein, 10 aa, Artificial Sequence
  Description of Artificial Sequence: Synthetic epitope
EKLKKSLFML

SEQ ID NO: 6570 - protein, 10 aa, Artificial Sequence
  Description of Artificial Sequence: Synthetic epitope
EKLKNQNSFM

SEQ ID NO: 6571 - protein, 10 aa, Artificial Sequence
  Description of Artificial Sequence: Synthetic epitope
EKLKNTELTS

SEQ ID NO: 6572 - protein, 10 aa, Artificial Sequence
  Description of Artificial Sequence: Synthetic epitope
EKLKSAVNEI

SEQ ID NO: 6573 - protein, 10 aa, Artificial Sequence
  Description of Artificial Sequence: Synthetic epitope
EKLLKTSNSY

SEQ ID NO: 6574 - protein, 10 aa, Artificial Sequence
  Description of Artificial Sequence: Synthetic epitope
EKLLTKKDQA

SEQ ID NO: 6575 - protein, 10 aa, Artificial Sequence
  Description of Artificial Sequence: Synthetic epitope
EKLLVQAENR

SEQ ID NO: 6576 - protein, 10 aa, Artificial Sequence
  Description of Artificial Sequence: Synthetic epitope
EKLLVSSAPT

SEQ ID NO: 6577 - protein, 10 aa, Artificial Sequence
  Description of Artificial Sequence: Synthetic epitope
EKLLYEHVTE

SEQ ID NO: 6578 - protein, 10 aa, Artificial Sequence
  Description of Artificial Sequence: Synthetic epitope
EKLMNQMNAR

SEQ ID NO: 6579 - protein, 10 aa, Artificial Sequence
  Description of Artificial Sequence: Synthetic epitope
EKLNMLSIDH

SEQ ID NO: 6580 - protein, 10 aa, Artificial Sequence
  Description of Artificial Sequence: Synthetic epitope
EKLPFTVVHE

SEQ ID NO: 6581 - protein, 10 aa, Artificial Sequence
  Description of Artificial Sequence: Synthetic epitope
EKLQMFETSL

SEQ ID NO: 6582 - protein, 10 aa, Artificial Sequence
  Description of Artificial Sequence: Synthetic epitope
EKLQSKTSSK

SEQ ID NO: 6583 - protein, 10 aa, Artificial Sequence
  Description of Artificial Sequence: Synthetic epitope
EKLQVRLATK

SEQ ID NO: 6584 - protein, 10 aa, Artificial Sequence
  Description of Artificial Sequence: Synthetic epitope
EKLRASQMAE

SEQ ID NO: 6585 - protein, 10 aa, Artificial Sequence
  Description of Artificial Sequence: Synthetic epitope
EKLREEKTLK

SEQ ID NO: 6586 - protein, 10 aa, Artificial Sequence
  Description of Artificial Sequence: Synthetic epitope
EKLRLSAHTI

SEQ ID NO: 6587 - protein, 10 aa, Artificial Sequence
  Description of Artificial Sequence: Synthetic epitope
EKLSAKSLQT

SEQ ID NO: 6588 - protein, 10 aa, Artificial Sequence
  Description of Artificial Sequence: Synthetic epitope
EKLSALKISN

SEQ ID NO: 6589 - protein, 10 aa, Artificial Sequence
  Description of Artificial Sequence: Synthetic epitope
EKLSEKEYWE

SEQ ID NO: 6590 - protein, 10 aa, Artificial Sequence
  Description of Artificial Sequence: Synthetic epitope
EKLSEQETEA

SEQ ID NO: 6591 - protein, 10 aa, Artificial Sequence
  Description of Artificial Sequence: Synthetic epitope
EKLTILAKRK

SEQ ID NO: 6592 - protein, 10 aa, Artificial Sequence
  Description of Artificial Sequence: Synthetic epitope
EKLTKLKQNV

SEQ ID NO: 6593 - protein, 10 aa, Artificial Sequence
  Description of Artificial Sequence: Synthetic epitope
EKLTVELTVS

SEQ ID NO: 6594 - protein, 10 aa, Artificial Sequence
  Description of Artificial Sequence: Synthetic epitope
EKLVAMTMGS

SEQ ID NO: 6595 - protein, 10 aa, Artificial Sequence
  Description of Artificial Sequence: Synthetic epitope
EKLVLYPSAQ

SEQ ID NO: 6596 - protein, 10 aa, Artificial Sequence
  Description of Artificial Sequence: Synthetic epitope
EKLVMQETLS

SEQ ID NO: 6597 - protein, 10 aa, Artificial Sequence
  Description of Artificial Sequence: Synthetic epitope
EKLVVTKLIY

SEQ ID NO: 6598 - protein, 10 aa, Artificial Sequence
  Description of Artificial Sequence: Synthetic epitope
EKMAKSTKII

SEQ ID NO: 6599 - protein, 10 aa, Artificial Sequence
  Description of Artificial Sequence: Synthetic epitope
EKMASESETP

SEQ ID NO: 6600 - protein, 10 aa, Artificial Sequence
  Description of Artificial Sequence: Synthetic epitope
EKMASKSGFS

SEQ ID NO: 6601 - protein, 10 aa, Artificial Sequence
  Description of Artificial Sequence: Synthetic epitope
EKMDHVYGLS

SEQ ID NO: 6602 - protein, 10 aa, Artificial Sequence
  Description of Artificial Sequence: Synthetic epitope
EKMFVKRSFR

SEQ ID NO: 6603 - protein, 10 aa, Artificial Sequence
  Description of Artificial Sequence: Synthetic epitope
EKMISDAIPE

SEQ ID NO: 6604 - protein, 10 aa, Artificial Sequence
  Description of Artificial Sequence: Synthetic epitope
EKMKKSKDAA

SEQ ID NO: 6605 - protein, 10 aa, Artificial Sequence
  Description of Artificial Sequence: Synthetic epitope
EKMKTDIQRG

SEQ ID NO: 6606 - protein, 10 aa, Artificial Sequence
  Description of Artificial Sequence: Synthetic epitope
EKMKVSEKIV

SEQ ID NO: 6607 - protein, 10 aa, Artificial Sequence
  Description of Artificial Sequence: Synthetic epitope
EKMMDSSRSV

SEQ ID NO: 6608 - protein, 10 aa, Artificial Sequence
  Description of Artificial Sequence: Synthetic epitope
EKMMKTTANR

SEQ ID NO: 6609 - protein, 10 aa, Artificial Sequence
  Description of Artificial Sequence: Synthetic epitope
EKMQQRRGDS

SEQ ID NO: 6610 - protein, 10 aa, Artificial Sequence
  Description of Artificial Sequence: Synthetic epitope
EKMSAEINEI

SEQ ID NO: 6611 - protein, 10 aa, Artificial Sequence
  Description of Artificial Sequence: Synthetic epitope
EKMSSKSDTR

SEQ ID NO: 6612 - protein, 10 aa, Artificial Sequence
  Description of Artificial Sequence: Synthetic epitope
EKMTAARIRK

SEQ ID NO: 6613 - protein, 10 aa, Artificial Sequence
  Description of Artificial Sequence: Synthetic epitope
EKNAKIVEEY

SEQ ID NO: 6614 - protein, 10 aa, Artificial Sequence
  Description of Artificial Sequence: Synthetic epitope
EKNALAVRGD

SEQ ID NO: 6615 - protein, 10 aa, Artificial Sequence
  Description of Artificial Sequence: Synthetic epitope
EKNEANGRET

SEQ ID NO: 6616 - protein, 10 aa, Artificial Sequence
  Description of Artificial Sequence: Synthetic epitope
EKNEIQNRLE

SEQ ID NO: 6617 - protein, 10 aa, Artificial Sequence
  Description of Artificial Sequence: Synthetic epitope
EKNGHSQAQS

SEQ ID NO: 6618 - protein, 10 aa, Artificial Sequence
  Description of Artificial Sequence: Synthetic epitope
EKNIKMLSSY

SEQ ID NO: 6619 - protein, 10 aa, Artificial Sequence
  Description of Artificial Sequence: Synthetic epitope
EKNIKVSQGR

SEQ ID NO: 6620 - protein, 10 aa, Artificial Sequence
  Description of Artificial Sequence: Synthetic epitope
EKNKSVSYEQ

SEQ ID NO: 6621 - protein, 10 aa, Artificial Sequence
  Description of Artificial Sequence: Synthetic epitope
EKNPVLVSPE

SEQ ID NO: 6622 - protein, 10 aa, Artificial Sequence
  Description of Artificial Sequence: Synthetic epitope
EKNQGTQQRQ

SEQ ID NO: 6623 - protein, 10 aa, Artificial Sequence
  Description of Artificial Sequence: Synthetic epitope
EKNRLNWPHM

SEQ ID NO: 6624 - protein, 10 aa, Artificial Sequence
  Description of Artificial Sequence: Synthetic epitope
EKNSQSLSTE

SEQ ID NO: 6625 - protein, 10 aa, Artificial Sequence
  Description of Artificial Sequence: Synthetic epitope
EKNTKEHKVI

SEQ ID NO: 6626 - protein, 10 aa, Artificial Sequence
  Description of Artificial Sequence: Synthetic epitope
EKNVESTRTF

SEQ ID NO: 6627 - protein, 10 aa, Artificial Sequence
  Description of Artificial Sequence: Synthetic epitope
EKNVSIEDYY

SEQ ID NO: 6628 - protein, 10 aa, Artificial Sequence
  Description of Artificial Sequence: Synthetic epitope
EKPDEMKENG

SEQ ID NO: 6629 - protein, 10 aa, Artificial Sequence
  Description of Artificial Sequence: Synthetic epitope
EKPKATELIE

SEQ ID NO: 6630 - protein, 10 aa, Artificial Sequence
  Description of Artificial Sequence: Synthetic epitope
EKPKIKENDS

SEQ ID NO: 6631 - protein, 10 aa, Artificial Sequence
  Description of Artificial Sequence: Synthetic epitope
EKPKQKATSK

SEQ ID NO: 6632 - protein, 10 aa, Artificial Sequence
  Description of Artificial Sequence: Synthetic epitope
EKPKRRVSDS

SEQ ID NO: 6633 - protein, 10 aa, Artificial Sequence
  Description of Artificial Sequence: Synthetic epitope
EKPKSATLPP

SEQ ID NO: 6634 - protein, 10 aa, Artificial Sequence
  Description of Artificial Sequence: Synthetic epitope
EKPKVNFTTK

SEQ ID NO: 6635 - protein, 10 aa, Artificial Sequence
  Description of Artificial Sequence: Synthetic epitope
EKPNMQRNNT

SEQ ID NO: 6636 - protein, 10 aa, Artificial Sequence
  Description of Artificial Sequence: Synthetic epitope
EKPQTRSTSP

SEQ ID NO: 6637 - protein, 10 aa, Artificial Sequence
  Description of Artificial Sequence: Synthetic epitope
EKPSRSKRTI

SEQ ID NO: 6638 - protein, 10 aa, Artificial Sequence
  Description of Artificial Sequence: Synthetic epitope
EKPVKTNFHE

SEQ ID NO: 6639 - protein, 10 aa, Artificial Sequence
  Description of Artificial Sequence: Synthetic epitope
EKPYMNYTTQ

SEQ ID NO: 6640 - protein, 10 aa, Artificial Sequence
  Description of Artificial Sequence: Synthetic epitope
EKQAEEMASD

SEQ ID NO: 6641 - protein, 10 aa, Artificial Sequence
  Description of Artificial Sequence: Synthetic epitope
EKQALLRQVE

SEQ ID NO: 6642 - protein, 10 aa, Artificial Sequence
  Description of Artificial Sequence: Synthetic epitope
EKQAMYSSTD

SEQ ID NO: 6643 - protein, 10 aa, Artificial Sequence
  Description of Artificial Sequence: Synthetic epitope
EKQAYSFQLS

SEQ ID NO: 6644 - protein, 10 aa, Artificial Sequence
  Description of Artificial Sequence: Synthetic epitope
EKQEAQLELP

SEQ ID NO: 6645 - protein, 10 aa, Artificial Sequence
  Description of Artificial Sequence: Synthetic epitope
EKQEKEAGRD

SEQ ID NO: 6646 - protein, 10 aa, Artificial Sequence
  Description of Artificial Sequence: Synthetic epitope
EKQESLSSEE

SEQ ID NO: 6647 - protein, 10 aa, Artificial Sequence
  Description of Artificial Sequence: Synthetic epitope
EKQIEKRDKY

SEQ ID NO: 6648 - protein, 10 aa, Artificial Sequence
  Description of Artificial Sequence: Synthetic epitope
EKQKAAQQFS

SEQ ID NO: 6649 - protein, 10 aa, Artificial Sequence
  Description of Artificial Sequence: Synthetic epitope
EKQKKEEIKA

SEQ ID NO: 6650 - protein, 10 aa, Artificial Sequence
  Description of Artificial Sequence: Synthetic epitope
EKQKLAETSS

SEQ ID NO: 6651 - protein, 10 aa, Artificial Sequence
  Description of Artificial Sequence: Synthetic epitope
EKQKSGKQTD

SEQ ID NO: 6652 - protein, 10 aa, Artificial Sequence
  Description of Artificial Sequence: Synthetic epitope
EKQLQGIQIQ

SEQ ID NO: 6653 - protein, 10 aa, Artificial Sequence
  Description of Artificial Sequence: Synthetic epitope
EKQLTARPAK

SEQ ID NO: 6654 - protein, 10 aa, Artificial Sequence
  Description of Artificial Sequence: Synthetic epitope
EKQNAKKAQE

SEQ ID NO: 6655 - protein, 10 aa, Artificial Sequence
  Description of Artificial Sequence: Synthetic epitope
EKQQEEKQQT

SEQ ID NO: 6656 - protein, 10 aa, Artificial Sequence
  Description of Artificial Sequence: Synthetic epitope
EKQQVKDVQK

SEQ ID NO: 6657 - protein, 10 aa, Artificial Sequence
  Description of Artificial Sequence: Synthetic epitope
EKQSQALQQE

SEQ ID NO: 6658 - protein, 10 aa, Artificial Sequence
  Description of Artificial Sequence: Synthetic epitope
EKQTKEQSQL

SEQ ID NO: 6659 - protein, 10 aa, Artificial Sequence
  Description of Artificial Sequence: Synthetic epitope
EKQTRQAPKR

SEQ ID NO: 6660 - protein, 10 aa, Artificial Sequence
  Description of Artificial Sequence: Synthetic epitope
EKQVEVKEGL

SEQ ID NO: 6661 - protein, 10 aa, Artificial Sequence
  Description of Artificial Sequence: Synthetic epitope
EKQVQFPVIQ

SEQ ID NO: 6662 - protein, 10 aa, Artificial Sequence
  Description of Artificial Sequence: Synthetic epitope
EKQVSKLEQE

SEQ ID NO: 6663 - protein, 10 aa, Artificial Sequence
  Description of Artificial Sequence: Synthetic epitope
EKRAEFVWHK

SEQ ID NO: 6664 - protein, 10 aa, Artificial Sequence
  Description of Artificial Sequence: Synthetic epitope
EKRAKAEDEN

SEQ ID NO: 6665 - protein, 10 aa, Artificial Sequence
  Description of Artificial Sequence: Synthetic epitope
EKRAKVRTKK

SEQ ID NO: 6666 - protein, 10 aa, Artificial Sequence
  Description of Artificial Sequence: Synthetic epitope
EKRAQADARQ

SEQ ID NO: 6667 - protein, 10 aa, Artificial Sequence
  Description of Artificial Sequence: Synthetic epitope
EKRAVLAHVD

SEQ ID NO: 6668 - protein, 10 aa, Artificial Sequence
  Description of Artificial Sequence: Synthetic epitope
EKRGYKTAKA

SEQ ID NO: 6669 - protein, 10 aa, Artificial Sequence
  Description of Artificial Sequence: Synthetic epitope
EKRIISETVG

SEQ ID NO: 6670 - protein, 10 aa, Artificial Sequence
  Description of Artificial Sequence: Synthetic epitope
EKRIKLLNNS

SEQ ID NO: 6671 - protein, 10 aa, Artificial Sequence
  Description of Artificial Sequence: Synthetic epitope
EKRNETFKAA

SEQ ID NO: 6672 - protein, 10 aa, Artificial Sequence
  Description of Artificial Sequence: Synthetic epitope
EKRPKAEVEP

SEQ ID NO: 6673 - protein, 10 aa, Artificial Sequence
  Description of Artificial Sequence: Synthetic epitope
EKRQRSSNLV

SEQ ID NO: 6674 - protein, 10 aa, Artificial Sequence
  Description of Artificial Sequence: Synthetic epitope
EKRREQKVTS

SEQ ID NO: 6675 - protein, 10 aa, Artificial Sequence
  Description of Artificial Sequence: Synthetic epitope
EKRRKALYEA

SEQ ID NO: 6676 - protein, 10 aa, Artificial Sequence
  Description of Artificial Sequence: Synthetic epitope
EKRRVGTAER

SEQ ID NO: 6677 - protein, 10 aa, Artificial Sequence
  Description of Artificial Sequence: Synthetic epitope
EKRSRASGSS

SEQ ID NO: 6678 - protein, 10 aa, Artificial Sequence
  Description of Artificial Sequence: Synthetic epitope
EKRSSTRPPA

SEQ ID NO: 6679 - protein, 10 aa, Artificial Sequence
  Description of Artificial Sequence: Synthetic epitope
EKRTAEAELS

SEQ ID NO: 6680 - protein, 10 aa, Artificial Sequence
  Description of Artificial Sequence: Synthetic epitope
EKRTKFSRHN

SEQ ID NO: 6681 - protein, 10 aa, Artificial Sequence
  Description of Artificial Sequence: Synthetic epitope
EKRTSQKGES

SEQ ID NO: 6682 - protein, 10 aa, Artificial Sequence
  Description of Artificial Sequence: Synthetic epitope
EKRTTSNTLH

SEQ ID NO: 6683 - protein, 10 aa, Artificial Sequence
  Description of Artificial Sequence: Synthetic epitope
EKRVFNIVDR

SEQ ID NO: 6684 - protein, 10 aa, Artificial Sequence
  Description of Artificial Sequence: Synthetic epitope
EKRVNSNKLR

SEQ ID NO: 6685 - protein, 10 aa, Artificial Sequence
  Description of Artificial Sequence: Synthetic epitope
EKSAHLLSPI

SEQ ID NO: 6686 - protein, 10 aa, Artificial Sequence
  Description of Artificial Sequence: Synthetic epitope
EKSATSNKSA

SEQ ID NO: 6687 - protein, 10 aa, Artificial Sequence
  Description of Artificial Sequence: Synthetic epitope
EKSDTNSIPQ

SEQ ID NO: 6688 - protein, 10 aa, Artificial Sequence
  Description of Artificial Sequence: Synthetic epitope
EKSEEISLQQ

SEQ ID NO: 6689 - protein, 10 aa, Artificial Sequence
  Description of Artificial Sequence: Synthetic epitope
EKSEGIASTV

SEQ ID NO: 6690 - protein, 10 aa, Artificial Sequence
  Description of Artificial Sequence: Synthetic epitope
EKSETKKQQK

SEQ ID NO: 6691 - protein, 10 aa, Artificial Sequence
  Description of Artificial Sequence: Synthetic epitope
EKSETPYNFE

SEQ ID NO: 6692 - protein, 10 aa, Artificial Sequence
  Description of Artificial Sequence: Synthetic epitope
EKSGGSKEAT

SEQ ID NO: 6693 - protein, 10 aa, Artificial Sequence
  Description of Artificial Sequence: Synthetic epitope
EKSGISRKND

SEQ ID NO: 6694 - protein, 10 aa, Artificial Sequence
  Description of Artificial Sequence: Synthetic epitope
EKSGVTHAAE

SEQ ID NO: 6695 - protein, 10 aa, Artificial Sequence
  Description of Artificial Sequence: Synthetic epitope
EKSHKALSKE

SEQ ID NO: 6696 - protein, 10 aa, Artificial Sequence
  Description of Artificial Sequence: Synthetic epitope
EKSIAVAEAA

SEQ ID NO: 6697 - protein, 10 aa, Artificial Sequence
  Description of Artificial Sequence: Synthetic epitope
EKSILFQQSQ

SEQ ID NO: 6698 - protein, 10 aa, Artificial Sequence
  Description of Artificial Sequence: Synthetic epitope
EKSINSEVLK

SEQ ID NO: 6699 - protein, 10 aa, Artificial Sequence
  Description of Artificial Sequence: Synthetic epitope
EKSITGEEMS

SEQ ID NO: 6700 - protein, 10 aa, Artificial Sequence
  Description of Artificial Sequence: Synthetic epitope
EKSKAAKELA

SEQ ID NO: 6701 - protein, 10 aa, Artificial Sequence
  Description of Artificial Sequence: Synthetic epitope
EKSKFSQKDL

SEQ ID NO: 6702 - protein, 10 aa, Artificial Sequence
  Description of Artificial Sequence: Synthetic epitope
EKSKRESFGK

SEQ ID NO: 6703 - protein, 10 aa, Artificial Sequence
  Description of Artificial Sequence: Synthetic epitope
EKSKSLKQTD

SEQ ID NO: 6704 - protein, 10 aa, Artificial Sequence
  Description of Artificial Sequence: Synthetic epitope
EKSLGEADKA

SEQ ID NO: 6705 - protein, 10 aa, Artificial Sequence
  Description of Artificial Sequence: Synthetic epitope
EKSLKMVQQE

SEQ ID NO: 6706 - protein, 10 aa, Artificial Sequence
  Description of Artificial Sequence: Synthetic epitope
EKSLQENKNQ

SEQ ID NO: 6707 - protein, 10 aa, Artificial Sequence
  Description of Artificial Sequence: Synthetic epitope
EKSLQLSTEG

SEQ ID NO: 6708 - protein, 10 aa, Artificial Sequence
  Description of Artificial Sequence: Synthetic epitope
EKSLSSEAFS

SEQ ID NO: 6709 - protein, 10 aa, Artificial Sequence
  Description of Artificial Sequence: Synthetic epitope
EKSLVLAEKG

SEQ ID NO: 6710 - protein, 10 aa, Artificial Sequence
  Description of Artificial Sequence: Synthetic epitope
EKSMILSNVE

SEQ ID NO: 6711 - protein, 10 aa, Artificial Sequence
  Description of Artificial Sequence: Synthetic epitope
EKSMSTLDKT

SEQ ID NO: 6712 - protein, 10 aa, Artificial Sequence
  Description of Artificial Sequence: Synthetic epitope
EKSQSSKKPY

SEQ ID NO: 6713 - protein, 10 aa, Artificial Sequence
  Description of Artificial Sequence: Synthetic epitope
EKSRAAERKR

SEQ ID NO: 6714 - protein, 10 aa, Artificial Sequence
  Description of Artificial Sequence: Synthetic epitope
EKSRKKPEQV

SEQ ID NO: 6715 - protein, 10 aa, Artificial Sequence
  Description of Artificial Sequence: Synthetic epitope
EKSRKQIELE

SEQ ID NO: 6716 - protein, 10 aa, Artificial Sequence
  Description of Artificial Sequence: Synthetic epitope
EKSRRVKEEN

SEQ ID NO: 6717 - protein, 10 aa, Artificial Sequence
  Description of Artificial Sequence: Synthetic epitope
EKSRSETGEE

SEQ ID NO: 6718 - protein, 10 aa, Artificial Sequence
  Description of Artificial Sequence: Synthetic epitope
EKSRSFSASQ

SEQ ID NO: 6719 - protein, 10 aa, Artificial Sequence
  Description of Artificial Sequence: Synthetic epitope
EKSSEKNEDF

SEQ ID NO: 6720 - protein, 10 aa, Artificial Sequence
  Description of Artificial Sequence: Synthetic epitope
EKSSGKLQAA

SEQ ID NO: 6721 - protein, 10 aa, Artificial Sequence
  Description of Artificial Sequence: Synthetic epitope
EKSSLQMQNP

SEQ ID NO: 6722 - protein, 10 aa, Artificial Sequence
  Description of Artificial Sequence: Synthetic epitope
EKSSPASSQE

SEQ ID NO: 6723 - protein, 10 aa, Artificial Sequence
  Description of Artificial Sequence: Synthetic epitope
EKSSQESGEE

SEQ ID NO: 6724 - protein, 10 aa, Artificial Sequence
  Description of Artificial Sequence: Synthetic epitope
EKSSQVRTVS

SEQ ID NO: 6725 - protein, 10 aa, Artificial Sequence
  Description of Artificial Sequence: Synthetic epitope
EKSSRAASSL

SEQ ID NO: 6726 - protein, 10 aa, Artificial Sequence
  Description of Artificial Sequence: Synthetic epitope
EKSSRVHITR

SEQ ID NO: 6727 - protein, 10 aa, Artificial Sequence
  Description of Artificial Sequence: Synthetic epitope
EKSSWEIHER

SEQ ID NO: 6728 - protein, 10 aa, Artificial Sequence
  Description of Artificial Sequence: Synthetic epitope
EKSTALQEGD

SEQ ID NO: 6729 - protein, 10 aa, Artificial Sequence
  Description of Artificial Sequence: Synthetic epitope
EKSTASAQNK

SEQ ID NO: 6730 - protein, 10 aa, Artificial Sequence
  Description of Artificial Sequence: Synthetic epitope
EKSTFQSVVS

SEQ ID NO: 6731 - protein, 10 aa, Artificial Sequence
  Description of Artificial Sequence: Synthetic epitope
EKSTNKQIHS

SEQ ID NO: 6732 - protein, 10 aa, Artificial Sequence
  Description of Artificial Sequence: Synthetic epitope
EKSTYMNSYS

SEQ ID NO: 6733 - protein, 10 aa, Artificial Sequence
  Description of Artificial Sequence: Synthetic epitope
EKSVKGSNAD

SEQ ID NO: 6734 - protein, 10 aa, Artificial Sequence
  Description of Artificial Sequence: Synthetic epitope
EKSVSSKEKN

SEQ ID NO: 6735 - protein, 10 aa, Artificial Sequence
  Description of Artificial Sequence: Synthetic epitope
EKSVSVQTNL

SEQ ID NO: 6736 - protein, 10 aa, Artificial Sequence
  Description of Artificial Sequence: Synthetic epitope
EKSVTSNRQT

SEQ ID NO: 6737 - protein, 10 aa, Artificial Sequence
  Description of Artificial Sequence: Synthetic epitope
EKSYEKSELS

SEQ ID NO: 6738 - protein, 10 aa, Artificial Sequence
  Description of Artificial Sequence: Synthetic epitope
EKTARHSVLS

SEQ ID NO: 6739 - protein, 10 aa, Artificial Sequence
  Description of Artificial Sequence: Synthetic epitope
EKTATDKKRE

SEQ ID NO: 6740 - protein, 10 aa, Artificial Sequence
  Description of Artificial Sequence: Synthetic epitope
EKTAVLRVPV

SEQ ID NO: 6741 - protein, 10 aa, Artificial Sequence
  Description of Artificial Sequence: Synthetic epitope
EKTDETRLQK

SEQ ID NO: 6742 - protein, 10 aa, Artificial Sequence
  Description of Artificial Sequence: Synthetic epitope
EKTEKNKNKQ

SEQ ID NO: 6743 - protein, 10 aa, Artificial Sequence
  Description of Artificial Sequence: Synthetic epitope
EKTERSNSED

SEQ ID NO: 6744 - protein, 10 aa, Artificial Sequence
  Description of Artificial Sequence: Synthetic epitope
EKTESDEKSS

SEQ ID NO: 6745 - protein, 10 aa, Artificial Sequence
  Description of Artificial Sequence: Synthetic epitope
EKTGNDLGVT

SEQ ID NO: 6746 - protein, 10 aa, Artificial Sequence
  Description of Artificial Sequence: Synthetic epitope
EKTIRQLNDQ

SEQ ID NO: 6747 - protein, 10 aa, Artificial Sequence
  Description of Artificial Sequence: Synthetic epitope
EKTISSEKAS

SEQ ID NO: 6748 - protein, 10 aa, Artificial Sequence
  Description of Artificial Sequence: Synthetic epitope
EKTKALTTSS

SEQ ID NO: 6749 - protein, 10 aa, Artificial Sequence
  Description of Artificial Sequence: Synthetic epitope
EKTKELAEKQ

SEQ ID NO: 6750 - protein, 10 aa, Artificial Sequence
  Description of Artificial Sequence: Synthetic epitope
EKTLGLAGKT

SEQ ID NO: 6751 - protein, 10 aa, Artificial Sequence
  Description of Artificial Sequence: Synthetic epitope
EKTLNKIEVK

SEQ ID NO: 6752 - protein, 10 aa, Artificial Sequence
  Description of Artificial Sequence: Synthetic epitope
EKTLNLLQKA

SEQ ID NO: 6753 - protein, 10 aa, Artificial Sequence
  Description of Artificial Sequence: Synthetic epitope
EKTPDKTDQK

SEQ ID NO: 6754 - protein, 10 aa, Artificial Sequence
  Description of Artificial Sequence: Synthetic epitope
EKTQVAVLEE

SEQ ID NO: 6755 - protein, 10 aa, Artificial Sequence
  Description of Artificial Sequence: Synthetic epitope
EKTRAELKTA

SEQ ID NO: 6756 - protein, 10 aa, Artificial Sequence
  Description of Artificial Sequence: Synthetic epitope
EKTRLKTKEN

SEQ ID NO: 6757 - protein, 10 aa, Artificial Sequence
  Description of Artificial Sequence: Synthetic epitope
EKTRPEGEPS

SEQ ID NO: 6758 - protein, 10 aa, Artificial Sequence
  Description of Artificial Sequence: Synthetic epitope
EKTRSIMAEE

SEQ ID NO: 6759 - protein, 10 aa, Artificial Sequence
  Description of Artificial Sequence: Synthetic epitope
EKTSRMLSST

SEQ ID NO: 6760 - protein, 10 aa, Artificial Sequence
  Description of Artificial Sequence: Synthetic epitope
EKTSVFITQL

SEQ ID NO: 6761 - protein, 10 aa, Artificial Sequence
  Description of Artificial Sequence: Synthetic epitope
EKTSVMVNSF

SEQ ID NO: 6762 - protein, 10 aa, Artificial Sequence
  Description of Artificial Sequence: Synthetic epitope
EKTVEAFAEA

SEQ ID NO: 6763 - protein, 10 aa, Artificial Sequence
  Description of Artificial Sequence: Synthetic epitope
EKTVEKKGKT

SEQ ID NO: 6764 - protein, 10 aa, Artificial Sequence
  Description of Artificial Sequence: Synthetic epitope
EKTYSESPYD

SEQ ID NO: 6765 - protein, 10 aa, Artificial Sequence
  Description of Artificial Sequence: Synthetic epitope
EKVAAVKQLE

SEQ ID NO: 6766 - protein, 10 aa, Artificial Sequence
  Description of Artificial Sequence: Synthetic epitope
EKVAKASGAN

SEQ ID NO: 6767 - protein, 10 aa, Artificial Sequence
  Description of Artificial Sequence: Synthetic epitope
EKVASYGVKP

SEQ ID NO: 6768 - protein, 10 aa, Artificial Sequence
  Description of Artificial Sequence: Synthetic epitope
EKVAVSDSES

SEQ ID NO: 6769 - protein, 10 aa, Artificial Sequence
  Description of Artificial Sequence: Synthetic epitope
EKVEENSTLQ

SEQ ID NO: 6770 - protein, 10 aa, Artificial Sequence
  Description of Artificial Sequence: Synthetic epitope
EKVEQKIEGK

SEQ ID NO: 6771 - protein, 10 aa, Artificial Sequence
  Description of Artificial Sequence: Synthetic epitope
EKVFKTDVSK

SEQ ID NO: 6772 - protein, 10 aa, Artificial Sequence
  Description of Artificial Sequence: Synthetic epitope
EKVGGTNLGA

SEQ ID NO: 6773 - protein, 10 aa, Artificial Sequence
  Description of Artificial Sequence: Synthetic epitope
EKVGQLSQLT

SEQ ID NO: 6774 - protein, 10 aa, Artificial Sequence
  Description of Artificial Sequence: Synthetic epitope
EKVGVEAKQP

SEQ ID NO: 6775 - protein, 10 aa, Artificial Sequence
  Description of Artificial Sequence: Synthetic epitope
EKVIEIQSKH

SEQ ID NO: 6776 - protein, 10 aa, Artificial Sequence
  Description of Artificial Sequence: Synthetic epitope
EKVKLQSGAV

SEQ ID NO: 6777 - protein, 10 aa, Artificial Sequence
  Description of Artificial Sequence: Synthetic epitope
EKVKMKEKEE

SEQ ID NO: 6778 - protein, 10 aa, Artificial Sequence
  Description of Artificial Sequence: Synthetic epitope
EKVKNIHGYM

SEQ ID NO: 6779 - protein, 10 aa, Artificial Sequence
  Description of Artificial Sequence: Synthetic epitope
EKVLATVTKP

SEQ ID NO: 6780 - protein, 10 aa, Artificial Sequence
  Description of Artificial Sequence: Synthetic epitope
EKVLLEEGEA

SEQ ID NO: 6781 - protein, 10 aa, Artificial Sequence
  Description of Artificial Sequence: Synthetic epitope
EKVLLSRSES

SEQ ID NO: 6782 - protein, 10 aa, Artificial Sequence
  Description of Artificial Sequence: Synthetic epitope
EKVLQSVVLL

SEQ ID NO: 6783 - protein, 10 aa, Artificial Sequence
  Description of Artificial Sequence: Synthetic epitope
EKVMDDFRTS

SEQ ID NO: 6784 - protein, 10 aa, Artificial Sequence
  Description of Artificial Sequence: Synthetic epitope
EKVMRIAIKE

SEQ ID NO: 6785 - protein, 10 aa, Artificial Sequence
  Description of Artificial Sequence: Synthetic epitope
EKVNAVKEAI

SEQ ID NO: 6786 - protein, 10 aa, Artificial Sequence
  Description of Artificial Sequence: Synthetic epitope
EKVPMLVPVP

SEQ ID NO: 6787 - protein, 10 aa, Artificial Sequence
  Description of Artificial Sequence: Synthetic epitope
EKVQTMFTAI

SEQ ID NO: 6788 - protein, 10 aa, Artificial Sequence
  Description of Artificial Sequence: Synthetic epitope
EKVRAKFQEQ

SEQ ID NO: 6789 - protein, 10 aa, Artificial Sequence
  Description of Artificial Sequence: Synthetic epitope
EKVRYSSTET

SEQ ID NO: 6790 - protein, 10 aa, Artificial Sequence
  Description of Artificial Sequence: Synthetic epitope
EKVSIAAEDD

SEQ ID NO: 6791 - protein, 10 aa, Artificial Sequence
  Description of Artificial Sequence: Synthetic epitope
EKVSSNSVSN

SEQ ID NO: 6792 - protein, 10 aa, Artificial Sequence
  Description of Artificial Sequence: Synthetic epitope
EKVVAKEDSE

SEQ ID NO: 6793 - protein, 10 aa, Artificial Sequence
  Description of Artificial Sequence: Synthetic epitope
EKVVDLLSNR

SEQ ID NO: 6794 - protein, 10 aa, Artificial Sequence
  Description of Artificial Sequence: Synthetic epitope
EKVYTMAQKN

SEQ ID NO: 6795 - protein, 10 aa, Artificial Sequence
  Description of Artificial Sequence: Synthetic epitope
EKWYLKLQTD

SEQ ID NO: 6796 - protein, 10 aa, Artificial Sequence
  Description of Artificial Sequence: Synthetic epitope
EKYEGYLRRK

SEQ ID NO: 6797 - protein, 10 aa, Artificial Sequence
  Description of Artificial Sequence: Synthetic epitope
EKYETDAQEV

SEQ ID NO: 6798 - protein, 10 aa, Artificial Sequence
  Description of Artificial Sequence: Synthetic epitope
EKYFENSAET

SEQ ID NO: 6799 - protein, 10 aa, Artificial Sequence
  Description of Artificial Sequence: Synthetic epitope
EKYLAMKTKS

SEQ ID NO: 6800 - protein, 10 aa, Artificial Sequence
  Description of Artificial Sequence: Synthetic epitope
EKYPLSQYKY

SEQ ID NO: 6801 - protein, 10 aa, Artificial Sequence
  Description of Artificial Sequence: Synthetic epitope
EKYTTIKDLT

SEQ ID NO: 6802 - protein, 10 aa, Artificial Sequence
  Description of Artificial Sequence: Synthetic epitope
ELAAEEASAL

SEQ ID NO: 6803 - protein, 10 aa, Artificial Sequence
  Description of Artificial Sequence: Synthetic epitope
ELADEQQDEM

SEQ ID NO: 6804 - protein, 10 aa, Artificial Sequence
  Description of Artificial Sequence: Synthetic epitope
ELAEIALKLL

SEQ ID NO: 6805 - protein, 10 aa, Artificial Sequence
  Description of Artificial Sequence: Synthetic epitope
ELAEKMRRTS

SEQ ID NO: 6806 - protein, 10 aa, Artificial Sequence
  Description of Artificial Sequence: Synthetic epitope
ELAFQRARDE

SEQ ID NO: 6807 - protein, 10 aa, Artificial Sequence
  Description of Artificial Sequence: Synthetic epitope
ELAGLSNLVA

SEQ ID NO: 6808 - protein, 10 aa, Artificial Sequence
  Description of Artificial Sequence: Synthetic epitope
ELAGSRKQGA

SEQ ID NO: 6809 - protein, 10 aa, Artificial Sequence
  Description of Artificial Sequence: Synthetic epitope
ELAKLSADVT

SEQ ID NO: 6810 - protein, 10 aa, Artificial Sequence
  Description of Artificial Sequence: Synthetic epitope
ELAKSKAEVA

SEQ ID NO: 6811 - protein, 10 aa, Artificial Sequence
  Description of Artificial Sequence: Synthetic epitope
ELAKSKAEVA

SEQ ID NO: 6812 - protein, 10 aa, Artificial Sequence
  Description of Artificial Sequence: Synthetic epitope
ELAKSRLAGA

SEQ ID NO: 6813 - protein, 10 aa, Artificial Sequence
  Description of Artificial Sequence: Synthetic epitope
ELAKTTQAPH

SEQ ID NO: 6814 - protein, 10 aa, Artificial Sequence
  Description of Artificial Sequence: Synthetic epitope
ELAKVTIKKE

SEQ ID NO: 6815 - protein, 10 aa, Artificial Sequence
  Description of Artificial Sequence: Synthetic epitope
ELALAKGITE

SEQ ID NO: 6816 - protein, 10 aa, Artificial Sequence
  Description of Artificial Sequence: Synthetic epitope
ELALAQVKAR

SEQ ID NO: 6817 - protein, 10 aa, Artificial Sequence
  Description of Artificial Sequence: Synthetic epitope
ELALASQARL

SEQ ID NO: 6818 - protein, 10 aa, Artificial Sequence
  Description of Artificial Sequence: Synthetic epitope
ELALGAASLT

SEQ ID NO: 6819 - protein, 10 aa, Artificial Sequence
  Description of Artificial Sequence: Synthetic epitope
ELALKTLSKV

SEQ ID NO: 6820 - protein, 10 aa, Artificial Sequence
  Description of Artificial Sequence: Synthetic epitope
ELALNQTAEV

SEQ ID NO: 6821 - protein, 10 aa, Artificial Sequence
  Description of Artificial Sequence: Synthetic epitope
ELALTREVQA

SEQ ID NO: 6822 - protein, 10 aa, Artificial Sequence
  Description of Artificial Sequence: Synthetic epitope
ELALWMIWNG

SEQ ID NO: 6823 - protein, 10 aa, Artificial Sequence
  Description of Artificial Sequence: Synthetic epitope
ELANDQTLEE

SEQ ID NO: 6824 - protein, 10 aa, Artificial Sequence
  Description of Artificial Sequence: Synthetic epitope
ELAPAQAVQL

SEQ ID NO: 6825 - protein, 10 aa, Artificial Sequence
  Description of Artificial Sequence: Synthetic epitope
ELAQGFLANQ

SEQ ID NO: 6826 - protein, 10 aa, Artificial Sequence
  Description of Artificial Sequence: Synthetic epitope
ELAQQVLYMQ

SEQ ID NO: 6827 - protein, 10 aa, Artificial Sequence
  Description of Artificial Sequence: Synthetic epitope
ELARMLMGLD

SEQ ID NO: 6828 - protein, 10 aa, Artificial Sequence
  Description of Artificial Sequence: Synthetic epitope
ELARSLFNRM

SEQ ID NO: 6829 - protein, 10 aa, Artificial Sequence
  Description of Artificial Sequence: Synthetic epitope
ELASAVLEDT

SEQ ID NO: 6830 - protein, 10 aa, Artificial Sequence
  Description of Artificial Sequence: Synthetic epitope
ELASAVLKRD

SEQ ID NO: 6831 - protein, 10 aa, Artificial Sequence
  Description of Artificial Sequence: Synthetic epitope
ELASAVRNAK

SEQ ID NO: 6832 - protein, 10 aa, Artificial Sequence
  Description of Artificial Sequence: Synthetic epitope
ELASLLVADQ

SEQ ID NO: 6833 - protein, 10 aa, Artificial Sequence
  Description of Artificial Sequence: Synthetic epitope
ELASVASSET

SEQ ID NO: 6834 - protein, 10 aa, Artificial Sequence
  Description of Artificial Sequence: Synthetic epitope
ELATKAQSLQ

SEQ ID NO: 6835 - protein, 10 aa, Artificial Sequence
  Description of Artificial Sequence: Synthetic epitope
ELATREKAQS

SEQ ID NO: 6836 - protein, 10 aa, Artificial Sequence
  Description of Artificial Sequence: Synthetic epitope
ELAVEAVLQP

SEQ ID NO: 6837 - protein, 10 aa, Artificial Sequence
  Description of Artificial Sequence: Synthetic epitope
ELAVLAQKIG

SEQ ID NO: 6838 - protein, 10 aa, Artificial Sequence
  Description of Artificial Sequence: Synthetic epitope
ELAVTPSTAK

SEQ ID NO: 6839 - protein, 10 aa, Artificial Sequence
  Description of Artificial Sequence: Synthetic epitope
ELDEKDEKSM

SEQ ID NO: 6840 - protein, 10 aa, Artificial Sequence
  Description of Artificial Sequence: Synthetic epitope
ELDIKKRLSQ

SEQ ID NO: 6841 - protein, 10 aa, Artificial Sequence
  Description of Artificial Sequence: Synthetic epitope
ELDITSLASD

SEQ ID NO: 6842 - protein, 10 aa, Artificial Sequence
  Description of Artificial Sequence: Synthetic epitope
ELDLASRSFP

SEQ ID NO: 6843 - protein, 10 aa, Artificial Sequence
  Description of Artificial Sequence: Synthetic epitope
ELDLSKLSPS

SEQ ID NO: 6844 - protein, 10 aa, Artificial Sequence
  Description of Artificial Sequence: Synthetic epitope
ELDLVYDVKD

SEQ ID NO: 6845 - protein, 10 aa, Artificial Sequence
  Description of Artificial Sequence: Synthetic epitope
ELEARLEDRA

SEQ ID NO: 6846 - protein, 10 aa, Artificial Sequence
  Description of Artificial Sequence: Synthetic epitope
ELEATRQNQS

SEQ ID NO: 6847 - protein, 10 aa, Artificial Sequence
  Description of Artificial Sequence: Synthetic epitope
ELEDIAKLKM

SEQ ID NO: 6848 - protein, 10 aa, Artificial Sequence
  Description of Artificial Sequence: Synthetic epitope
ELEFPQFETL

SEQ ID NO: 6849 - protein, 10 aa, Artificial Sequence
  Description of Artificial Sequence: Synthetic epitope
ELEHALEKNE

SEQ ID NO: 6850 - protein, 10 aa, Artificial Sequence
  Description of Artificial Sequence: Synthetic epitope
ELEHRVERTQ

SEQ ID NO: 6851 - protein, 10 aa, Artificial Sequence
  Description of Artificial Sequence: Synthetic epitope
ELEKEKSERR

SEQ ID NO: 6852 - protein, 10 aa, Artificial Sequence
  Description of Artificial Sequence: Synthetic epitope
ELEKLKMAAK

SEQ ID NO: 6853 - protein, 10 aa, Artificial Sequence
  Description of Artificial Sequence: Synthetic epitope
ELEKQIIEDN

SEQ ID NO: 6854 - protein, 10 aa, Artificial Sequence
  Description of Artificial Sequence: Synthetic epitope
ELEKSQKHKH

SEQ ID NO: 6855 - protein, 10 aa, Artificial Sequence
  Description of Artificial Sequence: Synthetic epitope
ELELMELNSS

SEQ ID NO: 6856 - protein, 10 aa, Artificial Sequence
  Description of Artificial Sequence: Synthetic epitope
ELEQISRTSE

SEQ ID NO: 6857 - protein, 10 aa, Artificial Sequence
  Description of Artificial Sequence: Synthetic epitope
ELEQKVPAAK

SEQ ID NO: 6858 - protein, 10 aa, Artificial Sequence
  Description of Artificial Sequence: Synthetic epitope
ELERQDEALD

SEQ ID NO: 6859 - protein, 10 aa, Artificial Sequence
  Description of Artificial Sequence: Synthetic epitope
ELESERRADE

SEQ ID NO: 6860 - protein, 10 aa, Artificial Sequence
  Description of Artificial Sequence: Synthetic epitope
ELESIISKRN

SEQ ID NO: 6861 - protein, 10 aa, Artificial Sequence
  Description of Artificial Sequence: Synthetic epitope
ELESILVALL

SEQ ID NO: 6862 - protein, 10 aa, Artificial Sequence
  Description of Artificial Sequence: Synthetic epitope
ELESSDQVRE

SEQ ID NO: 6863 - protein, 10 aa, Artificial Sequence
  Description of Artificial Sequence: Synthetic epitope
ELESTVAHIQ

SEQ ID NO: 6864 - protein, 10 aa, Artificial Sequence
  Description of Artificial Sequence: Synthetic epitope
ELEVENTEMQ

SEQ ID NO: 6865 - protein, 10 aa, Artificial Sequence
  Description of Artificial Sequence: Synthetic epitope
ELFAAVVSLI

SEQ ID NO: 6866 - protein, 10 aa, Artificial Sequence
  Description of Artificial Sequence: Synthetic epitope
ELFAEGQGRA

SEQ ID NO: 6867 - protein, 10 aa, Artificial Sequence
  Description of Artificial Sequence: Synthetic epitope
ELFDFHIGDR

SEQ ID NO: 6868 - protein, 10 aa, Artificial Sequence
  Description of Artificial Sequence: Synthetic epitope
ELFDQHEESE

SEQ ID NO: 6869 - protein, 10 aa, Artificial Sequence
  Description of Artificial Sequence: Synthetic epitope
ELFEKQKFKS

SEQ ID NO: 6870 - protein, 10 aa, Artificial Sequence
  Description of Artificial Sequence: Synthetic epitope
ELFKSSALDD

SEQ ID NO: 6871 - protein, 10 aa, Artificial Sequence
  Description of Artificial Sequence: Synthetic epitope
ELFMMEATLN

SEQ ID NO: 6872 - protein, 10 aa, Artificial Sequence
  Description of Artificial Sequence: Synthetic epitope
ELFQATIVKA

SEQ ID NO: 6873 - protein, 10 aa, Artificial Sequence
  Description of Artificial Sequence: Synthetic epitope
ELFSSLKKGK

SEQ ID NO: 6874 - protein, 10 aa, Artificial Sequence
  Description of Artificial Sequence: Synthetic epitope
ELGAVEAALP

SEQ ID NO: 6875 - protein, 10 aa, Artificial Sequence
  Description of Artificial Sequence: Synthetic epitope
ELGELSGFED

SEQ ID NO: 6876 - protein, 10 aa, Artificial Sequence
  Description of Artificial Sequence: Synthetic epitope
ELGIANDQKV

SEQ ID NO: 6877 - protein, 10 aa, Artificial Sequence
  Description of Artificial Sequence: Synthetic epitope
ELGKSSKREK

SEQ ID NO: 6878 - protein, 10 aa, Artificial Sequence
  Description of Artificial Sequence: Synthetic epitope
ELGQSKSSLE

SEQ ID NO: 6879 - protein, 10 aa, Artificial Sequence
  Description of Artificial Sequence: Synthetic epitope
ELGQSLAQEV

SEQ ID NO: 6880 - protein, 10 aa, Artificial Sequence
  Description of Artificial Sequence: Synthetic epitope
ELGQSRMYFN

SEQ ID NO: 6881 - protein, 10 aa, Artificial Sequence
  Description of Artificial Sequence: Synthetic epitope
ELGSIDGVQQ

SEQ ID NO: 6882 - protein, 10 aa, Artificial Sequence
  Description of Artificial Sequence: Synthetic epitope
ELGSKKELKS

SEQ ID NO: 6883 - protein, 10 aa, Artificial Sequence
  Description of Artificial Sequence: Synthetic epitope
ELGSMSYKLG

SEQ ID NO: 6884 - protein, 10 aa, Artificial Sequence
  Description of Artificial Sequence: Synthetic epitope
ELHEKRDFVK

SEQ ID NO: 6885 - protein, 10 aa, Artificial Sequence
  Description of Artificial Sequence: Synthetic epitope
ELHKEVGTTP

SEQ ID NO: 6886 - protein, 10 aa, Artificial Sequence
  Description of Artificial Sequence: Synthetic epitope
ELHLSLSEQS

SEQ ID NO: 6887 - protein, 10 aa, Artificial Sequence
  Description of Artificial Sequence: Synthetic epitope
ELIEMNLQIV

SEQ ID NO: 6888 - protein, 10 aa, Artificial Sequence
  Description of Artificial Sequence: Synthetic epitope
ELIERKTSSL

SEQ ID NO: 6889 - protein, 10 aa, Artificial Sequence
  Description of Artificial Sequence: Synthetic epitope
ELIGALDSHP

SEQ ID NO: 6890 - protein, 10 aa, Artificial Sequence
  Description of Artificial Sequence: Synthetic epitope
ELIGEAAKSV

SEQ ID NO: 6891 - protein, 10 aa, Artificial Sequence
  Description of Artificial Sequence: Synthetic epitope
ELIKSKKMAG

SEQ ID NO: 6892 - protein, 10 aa, Artificial Sequence
  Description of Artificial Sequence: Synthetic epitope
ELIKVEVKEM

SEQ ID NO: 6893 - protein, 10 aa, Artificial Sequence
  Description of Artificial Sequence: Synthetic epitope
ELIMQLLEET

SEQ ID NO: 6894 - protein, 10 aa, Artificial Sequence
  Description of Artificial Sequence: Synthetic epitope
ELIPLTARMV

SEQ ID NO: 6895 - protein, 10 aa, Artificial Sequence
  Description of Artificial Sequence: Synthetic epitope
ELISDHLLAV

SEQ ID NO: 6896 - protein, 10 aa, Artificial Sequence
  Description of Artificial Sequence: Synthetic epitope
ELISLPLANK

SEQ ID NO: 6897 - protein, 10 aa, Artificial Sequence
  Description of Artificial Sequence: Synthetic epitope
ELITSESKMM

SEQ ID NO: 6898 - protein, 10 aa, Artificial Sequence
  Description of Artificial Sequence: Synthetic epitope
ELITTDGQVE

SEQ ID NO: 6899 - protein, 10 aa, Artificial Sequence
  Description of Artificial Sequence: Synthetic epitope
ELKAKLSGVE

SEQ ID NO: 6900 - protein, 10 aa, Artificial Sequence
  Description of Artificial Sequence: Synthetic epitope
ELKAPLKQEP

SEQ ID NO: 6901 - protein, 10 aa, Artificial Sequence
  Description of Artificial Sequence: Synthetic epitope
ELKAVEVFLK

SEQ ID NO: 6902 - protein, 10 aa, Artificial Sequence
  Description of Artificial Sequence: Synthetic epitope
ELKDLTSSLQ

SEQ ID NO: 6903 - protein, 10 aa, Artificial Sequence
  Description of Artificial Sequence: Synthetic epitope
ELKEALQLNS

SEQ ID NO: 6904 - protein, 10 aa, Artificial Sequence
  Description of Artificial Sequence: Synthetic epitope
ELKEKKIKEL

SEQ ID NO: 6905 - protein, 10 aa, Artificial Sequence
  Description of Artificial Sequence: Synthetic epitope
ELKEKRSRTQ

SEQ ID NO: 6906 - protein, 10 aa, Artificial Sequence
  Description of Artificial Sequence: Synthetic epitope
ELKELSLQQH

SEQ ID NO: 6907 - protein, 10 aa, Artificial Sequence
  Description of Artificial Sequence: Synthetic epitope
ELKGSETTFM

SEQ ID NO: 6908 - protein, 10 aa, Artificial Sequence
  Description of Artificial Sequence: Synthetic epitope
ELKHRSSKKD

SEQ ID NO: 6909 - protein, 10 aa, Artificial Sequence
  Description of Artificial Sequence: Synthetic epitope
ELKILKDKKD

SEQ ID NO: 6910 - protein, 10 aa, Artificial Sequence
  Description of Artificial Sequence: Synthetic epitope
ELKISASLKQ

SEQ ID NO: 6911 - protein, 10 aa, Artificial Sequence
  Description of Artificial Sequence: Synthetic epitope
ELKITQQGTD

SEQ ID NO: 6912 - protein, 10 aa, Artificial Sequence
  Description of Artificial Sequence: Synthetic epitope
ELKKFSGSSG

SEQ ID NO: 6913 - protein, 10 aa, Artificial Sequence
  Description of Artificial Sequence: Synthetic epitope
ELKKILANGQ

SEQ ID NO: 6914 - protein, 10 aa, Artificial Sequence
  Description of Artificial Sequence: Synthetic epitope
ELKKMKKNRD

SEQ ID NO: 6915 - protein, 10 aa, Artificial Sequence
  Description of Artificial Sequence: Synthetic epitope
ELKKMTLQTG

SEQ ID NO: 6916 - protein, 10 aa, Artificial Sequence
  Description of Artificial Sequence: Synthetic epitope
ELKNSERTNN

SEQ ID NO: 6917 - protein, 10 aa, Artificial Sequence
  Description of Artificial Sequence: Synthetic epitope
ELKQSAKRMV

SEQ ID NO: 6918 - protein, 10 aa, Artificial Sequence
  Description of Artificial Sequence: Synthetic epitope
ELKQSSEQKK

SEQ ID NO: 6919 - protein, 10 aa, Artificial Sequence
  Description of Artificial Sequence: Synthetic epitope
ELKSEANDAV

SEQ ID NO: 6920 - protein, 10 aa, Artificial Sequence
  Description of Artificial Sequence: Synthetic epitope
ELKSKEAYEK

SEQ ID NO: 6921 - protein, 10 aa, Artificial Sequence
  Description of Artificial Sequence: Synthetic epitope
ELKSKNLSLE

SEQ ID NO: 6922 - protein, 10 aa, Artificial Sequence
  Description of Artificial Sequence: Synthetic epitope
ELKSQEAQSL

SEQ ID NO: 6923 - protein, 10 aa, Artificial Sequence
  Description of Artificial Sequence: Synthetic epitope
ELKSQLQKEE

SEQ ID NO: 6924 - protein, 10 aa, Artificial Sequence
  Description of Artificial Sequence: Synthetic epitope
ELKSRMLESL

SEQ ID NO: 6925 - protein, 10 aa, Artificial Sequence
  Description of Artificial Sequence: Synthetic epitope
ELKSSMLKNK

SEQ ID NO: 6926 - protein, 10 aa, Artificial Sequence
  Description of Artificial Sequence: Synthetic epitope
ELKSTELQEK

SEQ ID NO: 6927 - protein, 10 aa, Artificial Sequence
  Description of Artificial Sequence: Synthetic epitope
ELKSTQEQSV

SEQ ID NO: 6928 - protein, 10 aa, Artificial Sequence
  Description of Artificial Sequence: Synthetic epitope
ELKTITQLQE

SEQ ID NO: 6929 - protein, 10 aa, Artificial Sequence
  Description of Artificial Sequence: Synthetic epitope
ELKVAAQKNF

SEQ ID NO: 6930 - protein, 10 aa, Artificial Sequence
  Description of Artificial Sequence: Synthetic epitope
ELKVHLAKSL

SEQ ID NO: 6931 - protein, 10 aa, Artificial Sequence
  Description of Artificial Sequence: Synthetic epitope
ELKVMKRSIE

SEQ ID NO: 6932 - protein, 10 aa, Artificial Sequence
  Description of Artificial Sequence: Synthetic epitope
ELKVSVQNEA

SEQ ID NO: 6933 - protein, 10 aa, Artificial Sequence
  Description of Artificial Sequence: Synthetic epitope
ELLARMIKGK

SEQ ID NO: 6934 - protein, 10 aa, Artificial Sequence
  Description of Artificial Sequence: Synthetic epitope
ELLASALMDL

SEQ ID NO: 6935 - protein, 10 aa, Artificial Sequence
  Description of Artificial Sequence: Synthetic epitope
ELLASNIIDA

SEQ ID NO: 6936 - protein, 10 aa, Artificial Sequence
  Description of Artificial Sequence: Synthetic epitope
ELLDEFAREN

SEQ ID NO: 6937 - protein, 10 aa, Artificial Sequence
  Description of Artificial Sequence: Synthetic epitope
ELLEANREIS

SEQ ID NO: 6938 - protein, 10 aa, Artificial Sequence
  Description of Artificial Sequence: Synthetic epitope
ELLEIQLLTD

SEQ ID NO: 6939 - protein, 10 aa, Artificial Sequence
  Description of Artificial Sequence: Synthetic epitope
ELLELQSQQA

SEQ ID NO: 6940 - protein, 10 aa, Artificial Sequence
  Description of Artificial Sequence: Synthetic epitope
ELLEQQAASE

SEQ ID NO: 6941 - protein, 10 aa, Artificial Sequence
  Description of Artificial Sequence: Synthetic epitope
ELLEREARGE

SEQ ID NO: 6942 - protein, 10 aa, Artificial Sequence
  Description of Artificial Sequence: Synthetic epitope
ELLESSLFEA

SEQ ID NO: 6943 - protein, 10 aa, Artificial Sequence
  Description of Artificial Sequence: Synthetic epitope
ELLEVKEEML

SEQ ID NO: 6944 - protein, 10 aa, Artificial Sequence
  Description of Artificial Sequence: Synthetic epitope
ELLIQTATRD

SEQ ID NO: 6945 - protein, 10 aa, Artificial Sequence
  Description of Artificial Sequence: Synthetic epitope
ELLKISVIEL

SEQ ID NO: 6946 - protein, 10 aa, Artificial Sequence
  Description of Artificial Sequence: Synthetic epitope
ELLKLQSMVD

SEQ ID NO: 6947 - protein, 10 aa, Artificial Sequence
  Description of Artificial Sequence: Synthetic epitope
ELLKSLEASG

SEQ ID NO: 6948 - protein, 10 aa, Artificial Sequence
  Description of Artificial Sequence: Synthetic epitope
ELLKTVSYKA

SEQ ID NO: 6949 - protein, 10 aa, Artificial Sequence
  Description of Artificial Sequence: Synthetic epitope
ELLMKMLALS

SEQ ID NO: 6950 - protein, 10 aa, Artificial Sequence
  Description of Artificial Sequence: Synthetic epitope
ELLMSLIQTK

SEQ ID NO: 6951 - protein, 10 aa, Artificial Sequence
  Description of Artificial Sequence: Synthetic epitope
ELLMTYFIQL

SEQ ID NO: 6952 - protein, 10 aa, Artificial Sequence
  Description of Artificial Sequence: Synthetic epitope
ELLNLNRTSI

SEQ ID NO: 6953 - protein, 10 aa, Artificial Sequence
  Description of Artificial Sequence: Synthetic epitope
ELLPEAAIND

SEQ ID NO: 6954 - protein, 10 aa, Artificial Sequence
  Description of Artificial Sequence: Synthetic epitope
ELLQMVLNFD

SEQ ID NO: 6955 - protein, 10 aa, Artificial Sequence
  Description of Artificial Sequence: Synthetic epitope
ELLRAALKIR

SEQ ID NO: 6956 - protein, 10 aa, Artificial Sequence
  Description of Artificial Sequence: Synthetic epitope
ELLRSTTSTI

SEQ ID NO: 6957 - protein, 10 aa, Artificial Sequence
  Description of Artificial Sequence: Synthetic epitope
ELLSAELGGL

SEQ ID NO: 6958 - protein, 10 aa, Artificial Sequence
  Description of Artificial Sequence: Synthetic epitope
ELLSAKLRMY

SEQ ID NO: 6959 - protein, 10 aa, Artificial Sequence
  Description of Artificial Sequence: Synthetic epitope
ELLSLASSNH

SEQ ID NO: 6960 - protein, 10 aa, Artificial Sequence
  Description of Artificial Sequence: Synthetic epitope
ELLSLKLKFG

SEQ ID NO: 6961 - protein, 10 aa, Artificial Sequence
  Description of Artificial Sequence: Synthetic epitope
ELLSMLTAAL

SEQ ID NO: 6962 - protein, 10 aa, Artificial Sequence
  Description of Artificial Sequence: Synthetic epitope
ELLSNSKFDV

SEQ ID NO: 6963 - protein, 10 aa, Artificial Sequence
  Description of Artificial Sequence: Synthetic epitope
ELLSPKKDTT

SEQ ID NO: 6964 - protein, 10 aa, Artificial Sequence
  Description of Artificial Sequence: Synthetic epitope
ELLSRTVEVD

SEQ ID NO: 6965 - protein, 10 aa, Artificial Sequence
  Description of Artificial Sequence: Synthetic epitope
ELLSTAKQDL

SEQ ID NO: 6966 - protein, 10 aa, Artificial Sequence
  Description of Artificial Sequence: Synthetic epitope
ELLSTKTDMV

SEQ ID NO: 6967 - protein, 10 aa, Artificial Sequence
  Description of Artificial Sequence: Synthetic epitope
ELLTLETRRN

SEQ ID NO: 6968 - protein, 10 aa, Artificial Sequence
  Description of Artificial Sequence: Synthetic epitope
ELLVAAQRQD

SEQ ID NO: 6969 - protein, 10 aa, Artificial Sequence
  Description of Artificial Sequence: Synthetic epitope
ELLYAALTSS

SEQ ID NO: 6970 - protein, 10 aa, Artificial Sequence
  Description of Artificial Sequence: Synthetic epitope
ELMARMAKTI

SEQ ID NO: 6971 - protein, 10 aa, Artificial Sequence
  Description of Artificial Sequence: Synthetic epitope
ELMEVQLERK

SEQ ID NO: 6972 - protein, 10 aa, Artificial Sequence
  Description of Artificial Sequence: Synthetic epitope
ELMKVKAKEA

SEQ ID NO: 6973 - protein, 10 aa, Artificial Sequence
  Description of Artificial Sequence: Synthetic epitope
ELMLTHVARH

SEQ ID NO: 6974 - protein, 10 aa, Artificial Sequence
  Description of Artificial Sequence: Synthetic epitope
ELMMVIAQEN

SEQ ID NO: 6975 - protein, 10 aa, Artificial Sequence
  Description of Artificial Sequence: Synthetic epitope
ELMMVLASLE

SEQ ID NO: 6976 - protein, 10 aa, Artificial Sequence
  Description of Artificial Sequence: Synthetic epitope
ELMRGYMTQF

SEQ ID NO: 6977 - protein, 10 aa, Artificial Sequence
  Description of Artificial Sequence: Synthetic epitope
ELMSQKKFEE

SEQ ID NO: 6978 - protein, 10 aa, Artificial Sequence
  Description of Artificial Sequence: Synthetic epitope
ELNAAQTSVA

SEQ ID NO: 6979 - protein, 10 aa, Artificial Sequence
  Description of Artificial Sequence: Synthetic epitope
ELNAKSKELH

SEQ ID NO: 6980 - protein, 10 aa, Artificial Sequence
  Description of Artificial Sequence: Synthetic epitope
ELNAVQSLLG

SEQ ID NO: 6981 - protein, 10 aa, Artificial Sequence
  Description of Artificial Sequence: Synthetic epitope
ELNEEIKQSH

SEQ ID NO: 6982 - protein, 10 aa, Artificial Sequence
  Description of Artificial Sequence: Synthetic epitope
ELNLLHTELA

SEQ ID NO: 6983 - protein, 10 aa, Artificial Sequence
  Description of Artificial Sequence: Synthetic epitope
ELNSTKTVDG

SEQ ID NO: 6984 - protein, 10 aa, Artificial Sequence
  Description of Artificial Sequence: Synthetic epitope
ELNVTSPSKE

SEQ ID NO: 6985 - protein, 10 aa, Artificial Sequence
  Description of Artificial Sequence: Synthetic epitope
ELPAAPKSTK

SEQ ID NO: 6986 - protein, 10 aa, Artificial Sequence
  Description of Artificial Sequence: Synthetic epitope
ELPETHIEEK

SEQ ID NO: 6987 - protein, 10 aa, Artificial Sequence
  Description of Artificial Sequence: Synthetic epitope
ELPKEKTRSE

SEQ ID NO: 6988 - protein, 10 aa, Artificial Sequence
  Description of Artificial Sequence: Synthetic epitope
ELPSQKSQQE

SEQ ID NO: 6989 - protein, 10 aa, Artificial Sequence
  Description of Artificial Sequence: Synthetic epitope
ELPVTDKSDD

SEQ ID NO: 6990 - protein, 10 aa, Artificial Sequence
  Description of Artificial Sequence: Synthetic epitope
ELQAKEHLVQ

SEQ ID NO: 6991 - protein, 10 aa, Artificial Sequence
  Description of Artificial Sequence: Synthetic epitope
ELQAQNSEHQ

SEQ ID NO: 6992 - protein, 10 aa, Artificial Sequence
  Description of Artificial Sequence: Synthetic epitope
ELQFAPDREE

SEQ ID NO: 6993 - protein, 10 aa, Artificial Sequence
  Description of Artificial Sequence: Synthetic epitope
ELQIAFMASL

SEQ ID NO: 6994 - protein, 10 aa, Artificial Sequence
  Description of Artificial Sequence: Synthetic epitope
ELQIGEASIT

SEQ ID NO: 6995 - protein, 10 aa, Artificial Sequence
  Description of Artificial Sequence: Synthetic epitope
ELQISIVELE

SEQ ID NO: 6996 - protein, 10 aa, Artificial Sequence
  Description of Artificial Sequence: Synthetic epitope
ELQLFLSSVE

SEQ ID NO: 6997 - protein, 10 aa, Artificial Sequence
  Description of Artificial Sequence: Synthetic epitope
ELQLRSEQQK

SEQ ID NO: 6998 - protein, 10 aa, Artificial Sequence
  Description of Artificial Sequence: Synthetic epitope
ELQLSMLEIV

SEQ ID NO: 6999 - protein, 10 aa, Artificial Sequence
  Description of Artificial Sequence: Synthetic epitope
ELQQKISVLY

SEQ ID NO: 7000 - protein, 10 aa, Artificial Sequence
  Description of Artificial Sequence: Synthetic epitope
ELQRLQQAET

SEQ ID NO: 7001 - protein, 10 aa, Artificial Sequence
  Description of Artificial Sequence: Synthetic epitope
ELQRRSLEGE

SEQ ID NO: 7002 - protein, 10 aa, Artificial Sequence
  Description of Artificial Sequence: Synthetic epitope
ELQSERSAVA

SEQ ID NO: 7003 - protein, 10 aa, Artificial Sequence
  Description of Artificial Sequence: Synthetic epitope
ELQSRKAIDA

SEQ ID NO: 7004 - protein, 10 aa, Artificial Sequence
  Description of Artificial Sequence: Synthetic epitope
ELQSRKKRKD

SEQ ID NO: 7005 - protein, 10 aa, Artificial Sequence
  Description of Artificial Sequence: Synthetic epitope
ELQSSLYSGI

SEQ ID NO: 7006 - protein, 10 aa, Artificial Sequence
  Description of Artificial Sequence: Synthetic epitope
ELQSSTSLEH

SEQ ID NO: 7007 - protein, 10 aa, Artificial Sequence
  Description of Artificial Sequence: Synthetic epitope
ELQTKQLQSN

SEQ ID NO: 7008 - protein, 10 aa, Artificial Sequence
  Description of Artificial Sequence: Synthetic epitope
ELRAQMLIRI

SEQ ID NO: 7009 - protein, 10 aa, Artificial Sequence
  Description of Artificial Sequence: Synthetic epitope
ELRDIDALSQ

SEQ ID NO: 7010 - protein, 10 aa, Artificial Sequence
  Description of Artificial Sequence: Synthetic epitope
ELREQEVSEV

SEQ ID NO: 7011 - protein, 10 aa, Artificial Sequence
  Description of Artificial Sequence: Synthetic epitope
ELRHSAASAA

SEQ ID NO: 7012 - protein, 10 aa, Artificial Sequence
  Description of Artificial Sequence: Synthetic epitope
ELRIKSGLEK

SEQ ID NO: 7013 - protein, 10 aa, Artificial Sequence
  Description of Artificial Sequence: Synthetic epitope
ELRKQSSQIQ

SEQ ID NO: 7014 - protein, 10 aa, Artificial Sequence
  Description of Artificial Sequence: Synthetic epitope
ELRKRSDVEE

SEQ ID NO: 7015 - protein, 10 aa, Artificial Sequence
  Description of Artificial Sequence: Synthetic epitope
ELRKTAIEDS

SEQ ID NO: 7016 - protein, 10 aa, Artificial Sequence
  Description of Artificial Sequence: Synthetic epitope
ELRLRLPATA

SEQ ID NO: 7017 - protein, 10 aa, Artificial Sequence
  Description of Artificial Sequence: Synthetic epitope
ELRMISSTFL

SEQ ID NO: 7018 - protein, 10 aa, Artificial Sequence
  Description of Artificial Sequence: Synthetic epitope
ELRMTRAIQP

SEQ ID NO: 7019 - protein, 10 aa, Artificial Sequence
  Description of Artificial Sequence: Synthetic epitope
ELRPQLMTSQ

SEQ ID NO: 7020 - protein, 10 aa, Artificial Sequence
  Description of Artificial Sequence: Synthetic epitope
ELRSEKLETD

SEQ ID NO: 7021 - protein, 10 aa, Artificial Sequence
  Description of Artificial Sequence: Synthetic epitope
ELRSELSQSQ

SEQ ID NO: 7022 - protein, 10 aa, Artificial Sequence
  Description of Artificial Sequence: Synthetic epitope
ELRTASQKAH

SEQ ID NO: 7023 - protein, 10 aa, Artificial Sequence
  Description of Artificial Sequence: Synthetic epitope
ELRTEEKVVA

SEQ ID NO: 7024 - protein, 10 aa, Artificial Sequence
  Description of Artificial Sequence: Synthetic epitope
ELRTKVVEEV

SEQ ID NO: 7025 - protein, 10 aa, Artificial Sequence
  Description of Artificial Sequence: Synthetic epitope
ELSAAREKHE

SEQ ID NO: 7026 - protein, 10 aa, Artificial Sequence
  Description of Artificial Sequence: Synthetic epitope
ELSDMKIMSQ

SEQ ID NO: 7027 - protein, 10 aa, Artificial Sequence
  Description of Artificial Sequence: Synthetic epitope
ELSEITTAEA

SEQ ID NO: 7028 - protein, 10 aa, Artificial Sequence
  Description of Artificial Sequence: Synthetic epitope
ELSGMQLAIQ

SEQ ID NO: 7029 - protein, 10 aa, Artificial Sequence
  Description of Artificial Sequence: Synthetic epitope
ELSKREVVAV

SEQ ID NO: 7030 - protein, 10 aa, Artificial Sequence
  Description of Artificial Sequence: Synthetic epitope
ELSKSTESDA

SEQ ID NO: 7031 - protein, 10 aa, Artificial Sequence
  Description of Artificial Sequence: Synthetic epitope
ELSLDRLAQA

SEQ ID NO: 7032 - protein, 10 aa, Artificial Sequence
  Description of Artificial Sequence: Synthetic epitope
ELSLNKLATS

SEQ ID NO: 7033 - protein, 10 aa, Artificial Sequence
  Description of Artificial Sequence: Synthetic epitope
ELSLQQAFSD

SEQ ID NO: 7034 - protein, 10 aa, Artificial Sequence
  Description of Artificial Sequence: Synthetic epitope
ELSLRLAEKE

SEQ ID NO: 7035 - protein, 10 aa, Artificial Sequence
  Description of Artificial Sequence: Synthetic epitope
ELSLVSATLE

SEQ ID NO: 7036 - protein, 10 aa, Artificial Sequence
  Description of Artificial Sequence: Synthetic epitope
ELSMSSGELA

SEQ ID NO: 7037 - protein, 10 aa, Artificial Sequence
  Description of Artificial Sequence: Synthetic epitope
ELSPISKYDE

SEQ ID NO: 7038 - protein, 10 aa, Artificial Sequence
  Description of Artificial Sequence: Synthetic epitope
ELSQLQFSEP

SEQ ID NO: 7039 - protein, 10 aa, Artificial Sequence
  Description of Artificial Sequence: Synthetic epitope
ELSQLQLLQV

SEQ ID NO: 7040 - protein, 10 aa, Artificial Sequence
  Description of Artificial Sequence: Synthetic epitope
ELSQVLTQRQ

SEQ ID NO: 7041 - protein, 10 aa, Artificial Sequence
  Description of Artificial Sequence: Synthetic epitope
ELSQWSSTEY

SEQ ID NO: 7042 - protein, 10 aa, Artificial Sequence
  Description of Artificial Sequence: Synthetic epitope
ELSSEFDITE

SEQ ID NO: 7043 - protein, 10 aa, Artificial Sequence
  Description of Artificial Sequence: Synthetic epitope
ELSSHKKQGP

SEQ ID NO: 7044 - protein, 10 aa, Artificial Sequence
  Description of Artificial Sequence: Synthetic epitope
ELSSVTVEKS

SEQ ID NO: 7045 - protein, 10 aa, Artificial Sequence
  Description of Artificial Sequence: Synthetic epitope
ELSVAFSTLT

SEQ ID NO: 7046 - protein, 10 aa, Artificial Sequence
  Description of Artificial Sequence: Synthetic epitope
ELSVGLLSNS

SEQ ID NO: 7047 - protein, 10 aa, Artificial Sequence
  Description of Artificial Sequence: Synthetic epitope
ELSVLIGEQY

SEQ ID NO: 7048 - protein, 10 aa, Artificial Sequence
  Description of Artificial Sequence: Synthetic epitope
ELSVSQLTDM

SEQ ID NO: 7049 - protein, 10 aa, Artificial Sequence
  Description of Artificial Sequence: Synthetic epitope
ELSWIIELLE

SEQ ID NO: 7050 - protein, 10 aa, Artificial Sequence
  Description of Artificial Sequence: Synthetic epitope
ELSYKLEANS

SEQ ID NO: 7051 - protein, 10 aa, Artificial Sequence
  Description of Artificial Sequence: Synthetic epitope
ELTAKMETQS

SEQ ID NO: 7052 - protein, 10 aa, Artificial Sequence
  Description of Artificial Sequence: Synthetic epitope
ELTALSTTQQ

SEQ ID NO: 7053 - protein, 10 aa, Artificial Sequence
  Description of Artificial Sequence: Synthetic epitope
ELTARKELEQ

SEQ ID NO: 7054 - protein, 10 aa, Artificial Sequence
  Description of Artificial Sequence: Synthetic epitope
ELTDVANKKL

SEQ ID NO: 7055 - protein, 10 aa, Artificial Sequence
  Description of Artificial Sequence: Synthetic epitope
ELTDVTYTSN

SEQ ID NO: 7056 - protein, 10 aa, Artificial Sequence
  Description of Artificial Sequence: Synthetic epitope
ELTEAGETKK

SEQ ID NO: 7057 - protein, 10 aa, Artificial Sequence
  Description of Artificial Sequence: Synthetic epitope
ELTESLKTKA

SEQ ID NO: 7058 - protein, 10 aa, Artificial Sequence
  Description of Artificial Sequence: Synthetic epitope
ELTKYPELDK

SEQ ID NO: 7059 - protein, 10 aa, Artificial Sequence
  Description of Artificial Sequence: Synthetic epitope
ELTMRKSWIP

SEQ ID NO: 7060 - protein, 10 aa, Artificial Sequence
  Description of Artificial Sequence: Synthetic epitope
ELTMSQKNGG

SEQ ID NO: 7061 - protein, 10 aa, Artificial Sequence
  Description of Artificial Sequence: Synthetic epitope
ELTPTEDEKQ

SEQ ID NO: 7062 - protein, 10 aa, Artificial Sequence
  Description of Artificial Sequence: Synthetic epitope
ELTPVELGAQ

SEQ ID NO: 7063 - protein, 10 aa, Artificial Sequence
  Description of Artificial Sequence: Synthetic epitope
ELTQSRAKVS

SEQ ID NO: 7064 - protein, 10 aa, Artificial Sequence
  Description of Artificial Sequence: Synthetic epitope
ELTSQLLAAE

SEQ ID NO: 7065 - protein, 10 aa, Artificial Sequence
  Description of Artificial Sequence: Synthetic epitope
ELTSSEVATE

SEQ ID NO: 7066 - protein, 10 aa, Artificial Sequence
  Description of Artificial Sequence: Synthetic epitope
ELTTLNATIQ

SEQ ID NO: 7067 - protein, 10 aa, Artificial Sequence
  Description of Artificial Sequence: Synthetic epitope
ELTTNVKALR

SEQ ID NO: 7068 - protein, 10 aa, Artificial Sequence
  Description of Artificial Sequence: Synthetic epitope
ELTVLLTQAI

SEQ ID NO: 7069 - protein, 10 aa, Artificial Sequence
  Description of Artificial Sequence: Synthetic epitope
ELVAENLSVR

SEQ ID NO: 7070 - protein, 10 aa, Artificial Sequence
  Description of Artificial Sequence: Synthetic epitope
ELVAFEVERI

SEQ ID NO: 7071 - protein, 10 aa, Artificial Sequence
  Description of Artificial Sequence: Synthetic epitope
ELVAGDSAVR

SEQ ID NO: 7072 - protein, 10 aa, Artificial Sequence
  Description of Artificial Sequence: Synthetic epitope
ELVAKSLLNL

SEQ ID NO: 7073 - protein, 10 aa, Artificial Sequence
  Description of Artificial Sequence: Synthetic epitope
ELVALMSAIR

SEQ ID NO: 7074 - protein, 10 aa, Artificial Sequence
  Description of Artificial Sequence: Synthetic epitope
ELVESLSLQG

SEQ ID NO: 7075 - protein, 10 aa, Artificial Sequence
  Description of Artificial Sequence: Synthetic epitope
ELVGSLLEQS

SEQ ID NO: 7076 - protein, 10 aa, Artificial Sequence
  Description of Artificial Sequence: Synthetic epitope
ELVKDNELLP

SEQ ID NO: 7077 - protein, 10 aa, Artificial Sequence
  Description of Artificial Sequence: Synthetic epitope
ELVKKTDSQP

SEQ ID NO: 7078 - protein, 10 aa, Artificial Sequence
  Description of Artificial Sequence: Synthetic epitope
ELVKQVSHST

SEQ ID NO: 7079 - protein, 10 aa, Artificial Sequence
  Description of Artificial Sequence: Synthetic epitope
ELVKVSAMSS

SEQ ID NO: 7080 - protein, 10 aa, Artificial Sequence
  Description of Artificial Sequence: Synthetic epitope
ELVLQAAKEE

SEQ ID NO: 7081 - protein, 10 aa, Artificial Sequence
  Description of Artificial Sequence: Synthetic epitope
ELVLSELSQG

SEQ ID NO: 7082 - protein, 10 aa, Artificial Sequence
  Description of Artificial Sequence: Synthetic epitope
ELVPIEVFEA

SEQ ID NO: 7083 - protein, 10 aa, Artificial Sequence
  Description of Artificial Sequence: Synthetic epitope
ELVQNYWSKQ

SEQ ID NO: 7084 - protein, 10 aa, Artificial Sequence
  Description of Artificial Sequence: Synthetic epitope
ELVQVPGQSS

SEQ ID NO: 7085 - protein, 10 aa, Artificial Sequence
  Description of Artificial Sequence: Synthetic epitope
ELVRLEIQAA

SEQ ID NO: 7086 - protein, 10 aa, Artificial Sequence
  Description of Artificial Sequence: Synthetic epitope
ELVSALTFRE

SEQ ID NO: 7087 - protein, 10 aa, Artificial Sequence
  Description of Artificial Sequence: Synthetic epitope
ELVSKATHMK

SEQ ID NO: 7088 - protein, 10 aa, Artificial Sequence
  Description of Artificial Sequence: Synthetic epitope
ELVSVLIARD

SEQ ID NO: 7089 - protein, 10 aa, Artificial Sequence
  Description of Artificial Sequence: Synthetic epitope
ELVTGSAKNG

SEQ ID NO: 7090 - protein, 10 aa, Artificial Sequence
  Description of Artificial Sequence: Synthetic epitope
ELVTSTSADS

SEQ ID NO: 7091 - protein, 10 aa, Artificial Sequence
  Description of Artificial Sequence: Synthetic epitope
ELWLQKVSDS

SEQ ID NO: 7092 - protein, 10 aa, Artificial Sequence
  Description of Artificial Sequence: Synthetic epitope
ELWSVASPLI

SEQ ID NO: 7093 - protein, 10 aa, Artificial Sequence
  Description of Artificial Sequence: Synthetic epitope
ELYAEKVATR

SEQ ID NO: 7094 - protein, 10 aa, Artificial Sequence
  Description of Artificial Sequence: Synthetic epitope
ELYLLKKSST

SEQ ID NO: 7095 - protein, 10 aa, Artificial Sequence
  Description of Artificial Sequence: Synthetic epitope
ELYVSDREGS

SEQ ID NO: 7096 - protein, 10 aa, Artificial Sequence
  Description of Artificial Sequence: Synthetic epitope
EMAATIERTT

SEQ ID NO: 7097 - protein, 10 aa, Artificial Sequence
  Description of Artificial Sequence: Synthetic epitope
EMAAVMSQHS

SEQ ID NO: 7098 - protein, 10 aa, Artificial Sequence
  Description of Artificial Sequence: Synthetic epitope
EMADQYQYQV

SEQ ID NO: 7099 - protein, 10 aa, Artificial Sequence
  Description of Artificial Sequence: Synthetic epitope
EMAEKMFSSE

SEQ ID NO: 7100 - protein, 10 aa, Artificial Sequence
  Description of Artificial Sequence: Synthetic epitope
EMAELTARIS

SEQ ID NO: 7101 - protein, 10 aa, Artificial Sequence
  Description of Artificial Sequence: Synthetic epitope
EMAGKRSGVE

SEQ ID NO: 7102 - protein, 10 aa, Artificial Sequence
  Description of Artificial Sequence: Synthetic epitope
EMAMKELSTL

SEQ ID NO: 7103 - protein, 10 aa, Artificial Sequence
  Description of Artificial Sequence: Synthetic epitope
EMANASLTLE

SEQ ID NO: 7104 - protein, 10 aa, Artificial Sequence
  Description of Artificial Sequence: Synthetic epitope
EMASARIGDE

SEQ ID NO: 7105 - protein, 10 aa, Artificial Sequence
  Description of Artificial Sequence: Synthetic epitope
EMASTEKLTD

SEQ ID NO: 7106 - protein, 10 aa, Artificial Sequence
  Description of Artificial Sequence: Synthetic epitope
EMAVAKVMQK

SEQ ID NO: 7107 - protein, 10 aa, Artificial Sequence
  Description of Artificial Sequence: Synthetic epitope
EMAVVLLANL

SEQ ID NO: 7108 - protein, 10 aa, Artificial Sequence
  Description of Artificial Sequence: Synthetic epitope
EMAWTTSMPA

SEQ ID NO: 7109 - protein, 10 aa, Artificial Sequence
  Description of Artificial Sequence: Synthetic epitope
EMDDVAIEDE

SEQ ID NO: 7110 - protein, 10 aa, Artificial Sequence
  Description of Artificial Sequence: Synthetic epitope
EMDGHNQDHL

SEQ ID NO: 7111 - protein, 10 aa, Artificial Sequence
  Description of Artificial Sequence: Synthetic epitope
EMDKREGKYD

SEQ ID NO: 7112 - protein, 10 aa, Artificial Sequence
  Description of Artificial Sequence: Synthetic epitope
EMDSHEEKVF

SEQ ID NO: 7113 - protein, 10 aa, Artificial Sequence
  Description of Artificial Sequence: Synthetic epitope
EMDSLMDMLA

SEQ ID NO: 7114 - protein, 10 aa, Artificial Sequence
  Description of Artificial Sequence: Synthetic epitope
EMDSQFDSTT

SEQ ID NO: 7115 - protein, 10 aa, Artificial Sequence
  Description of Artificial Sequence: Synthetic epitope
EMDTFSTVIS

SEQ ID NO: 7116 - protein, 10 aa, Artificial Sequence
  Description of Artificial Sequence: Synthetic epitope
EMEDTTQQSS

SEQ ID NO: 7117 - protein, 10 aa, Artificial Sequence
  Description of Artificial Sequence: Synthetic epitope
EMELRDEILP

SEQ ID NO: 7118 - protein, 10 aa, Artificial Sequence
  Description of Artificial Sequence: Synthetic epitope
EMEQAEAQLA

SEQ ID NO: 7119 - protein, 10 aa, Artificial Sequence
  Description of Artificial Sequence: Synthetic epitope
EMEQKARLQT

SEQ ID NO: 7120 - protein, 10 aa, Artificial Sequence
  Description of Artificial Sequence: Synthetic epitope
EMEQMAKTAK

SEQ ID NO: 7121 - protein, 10 aa, Artificial Sequence
  Description of Artificial Sequence: Synthetic epitope
EMESFAATAD

SEQ ID NO: 7122 - protein, 10 aa, Artificial Sequence
  Description of Artificial Sequence: Synthetic epitope
EMESNENFEG

SEQ ID NO: 7123 - protein, 10 aa, Artificial Sequence
  Description of Artificial Sequence: Synthetic epitope
EMETGLKAMG

SEQ ID NO: 7124 - protein, 10 aa, Artificial Sequence
  Description of Artificial Sequence: Synthetic epitope
EMEVSALEKT

SEQ ID NO: 7125 - protein, 10 aa, Artificial Sequence
  Description of Artificial Sequence: Synthetic epitope
EMEVSQEEAQ

SEQ ID NO: 7126 - protein, 10 aa, Artificial Sequence
  Description of Artificial Sequence: Synthetic epitope
EMEYQSGVTA

SEQ ID NO: 7127 - protein, 10 aa, Artificial Sequence
  Description of Artificial Sequence: Synthetic epitope
EMFRVKEESS

SEQ ID NO: 7128 - protein, 10 aa, Artificial Sequence
  Description of Artificial Sequence: Synthetic epitope
EMFTSESAQT

SEQ ID NO: 7129 - protein, 10 aa, Artificial Sequence
  Description of Artificial Sequence: Synthetic epitope
EMHLKSLEFW

SEQ ID NO: 7130 - protein, 10 aa, Artificial Sequence
  Description of Artificial Sequence: Synthetic epitope
EMHRFLYDQD

SEQ ID NO: 7131 - protein, 10 aa, Artificial Sequence
  Description of Artificial Sequence: Synthetic epitope
EMHSINDKQV

SEQ ID NO: 7132 - protein, 10 aa, Artificial Sequence
  Description of Artificial Sequence: Synthetic epitope
EMIARDRQNH

SEQ ID NO: 7133 - protein, 10 aa, Artificial Sequence
  Description of Artificial Sequence: Synthetic epitope
EMIEKRQPPK

SEQ ID NO: 7134 - protein, 10 aa, Artificial Sequence
  Description of Artificial Sequence: Synthetic epitope
EMIETAYGEN

SEQ ID NO: 7135 - protein, 10 aa, Artificial Sequence
  Description of Artificial Sequence: Synthetic epitope
EMIKDLSSDT

SEQ ID NO: 7136 - protein, 10 aa, Artificial Sequence
  Description of Artificial Sequence: Synthetic epitope
EMILSSATAD

SEQ ID NO: 7137 - protein, 10 aa, Artificial Sequence
  Description of Artificial Sequence: Synthetic epitope
EMIQTYVEHI

SEQ ID NO: 7138 - protein, 10 aa, Artificial Sequence
  Description of Artificial Sequence: Synthetic epitope
EMISKQAGDS

SEQ ID NO: 7139 - protein, 10 aa, Artificial Sequence
  Description of Artificial Sequence: Synthetic epitope
EMKKENDEKS

SEQ ID NO: 7140 - protein, 10 aa, Artificial Sequence
  Description of Artificial Sequence: Synthetic epitope
EMKLSTLASK

SEQ ID NO: 7141 - protein, 10 aa, Artificial Sequence
  Description of Artificial Sequence: Synthetic epitope
EMKNSMSETV

SEQ ID NO: 7142 - protein, 10 aa, Artificial Sequence
  Description of Artificial Sequence: Synthetic epitope
EMKQKSLMSL

SEQ ID NO: 7143 - protein, 10 aa, Artificial Sequence
  Description of Artificial Sequence: Synthetic epitope
EMKRRNKIQP

SEQ ID NO: 7144 - protein, 10 aa, Artificial Sequence
  Description of Artificial Sequence: Synthetic epitope
EMLAISRNQK

SEQ ID NO: 7145 - protein, 10 aa, Artificial Sequence
  Description of Artificial Sequence: Synthetic epitope
EMLAQAKMEK

SEQ ID NO: 7146 - protein, 10 aa, Artificial Sequence
  Description of Artificial Sequence: Synthetic epitope
EMLESSDASQ

SEQ ID NO: 7147 - protein, 10 aa, Artificial Sequence
  Description of Artificial Sequence: Synthetic epitope
EMLEVVANTR

SEQ ID NO: 7148 - protein, 10 aa, Artificial Sequence
  Description of Artificial Sequence: Synthetic epitope
EMLKSEMTQN

SEQ ID NO: 7149 - protein, 10 aa, Artificial Sequence
  Description of Artificial Sequence: Synthetic epitope
EMLLSVISSP

SEQ ID NO: 7150 - protein, 10 aa, Artificial Sequence
  Description of Artificial Sequence: Synthetic epitope
EMLQQVTQLE

SEQ ID NO: 7151 - protein, 10 aa, Artificial Sequence
  Description of Artificial Sequence: Synthetic epitope
EMLSSLSSDP

SEQ ID NO: 7152 - protein, 10 aa, Artificial Sequence
  Description of Artificial Sequence: Synthetic epitope
EMLVKLAKQN

SEQ ID NO: 7153 - protein, 10 aa, Artificial Sequence
  Description of Artificial Sequence: Synthetic epitope
EMMELGSRSR

SEQ ID NO: 7154 - protein, 10 aa, Artificial Sequence
  Description of Artificial Sequence: Synthetic epitope
EMMESHRHRI

SEQ ID NO: 7155 - protein, 10 aa, Artificial Sequence
  Description of Artificial Sequence: Synthetic epitope
EMMKNFTPIE

SEQ ID NO: 7156 - protein, 10 aa, Artificial Sequence
  Description of Artificial Sequence: Synthetic epitope
EMMSAMKQHQ

SEQ ID NO: 7157 - protein, 10 aa, Artificial Sequence
  Description of Artificial Sequence: Synthetic epitope
EMMSMKPAKG

SEQ ID NO: 7158 - protein, 10 aa, Artificial Sequence
  Description of Artificial Sequence: Synthetic epitope
EMMYEAELEH

SEQ ID NO: 7159 - protein, 10 aa, Artificial Sequence
  Description of Artificial Sequence: Synthetic epitope
EMNASKSLKS

SEQ ID NO: 7160 - protein, 10 aa, Artificial Sequence
  Description of Artificial Sequence: Synthetic epitope
EMNENEEVIN

SEQ ID NO: 7161 - protein, 10 aa, Artificial Sequence
  Description of Artificial Sequence: Synthetic epitope
EMNERAEETN

SEQ ID NO: 7162 - protein, 10 aa, Artificial Sequence
  Description of Artificial Sequence: Synthetic epitope
EMNKGKSRNY

SEQ ID NO: 7163 - protein, 10 aa, Artificial Sequence
  Description of Artificial Sequence: Synthetic epitope
EMNNQIDIMQ

SEQ ID NO: 7164 - protein, 10 aa, Artificial Sequence
  Description of Artificial Sequence: Synthetic epitope
EMNQPQHATE

SEQ ID NO: 7165 - protein, 10 aa, Artificial Sequence
  Description of Artificial Sequence: Synthetic epitope
EMNTAKSTSR

SEQ ID NO: 7166 - protein, 10 aa, Artificial Sequence
  Description of Artificial Sequence: Synthetic epitope
EMPAYTHASP

SEQ ID NO: 7167 - protein, 10 aa, Artificial Sequence
  Description of Artificial Sequence: Synthetic epitope
EMPLSSANVT

SEQ ID NO: 7168 - protein, 10 aa, Artificial Sequence
  Description of Artificial Sequence: Synthetic epitope
EMQAQLLSRE

SEQ ID NO: 7169 - protein, 10 aa, Artificial Sequence
  Description of Artificial Sequence: Synthetic epitope
EMQKNKISKD

SEQ ID NO: 7170 - protein, 10 aa, Artificial Sequence
  Description of Artificial Sequence: Synthetic epitope
EMQQEIVKKQ

SEQ ID NO: 7171 - protein, 10 aa, Artificial Sequence
  Description of Artificial Sequence: Synthetic epitope
EMRALRSARA

SEQ ID NO: 7172 - protein, 10 aa, Artificial Sequence
  Description of Artificial Sequence: Synthetic epitope
EMRARAIKAL

SEQ ID NO: 7173 - protein, 10 aa, Artificial Sequence
  Description of Artificial Sequence: Synthetic epitope
EMRATHGSNS

SEQ ID NO: 7174 - protein, 10 aa, Artificial Sequence
  Description of Artificial Sequence: Synthetic epitope
EMRDTNESTN

SEQ ID NO: 7175 - protein, 10 aa, Artificial Sequence
  Description of Artificial Sequence: Synthetic epitope
EMRTAEARQI

SEQ ID NO: 7176 - protein, 10 aa, Artificial Sequence
  Description of Artificial Sequence: Synthetic epitope
EMRTSSKEKD

SEQ ID NO: 7177 - protein, 10 aa, Artificial Sequence
  Description of Artificial Sequence: Synthetic epitope
EMSEDIDHNL

SEQ ID NO: 7178 - protein, 10 aa, Artificial Sequence
  Description of Artificial Sequence: Synthetic epitope
EMSEFIREAT

SEQ ID NO: 7179 - protein, 10 aa, Artificial Sequence
  Description of Artificial Sequence: Synthetic epitope
EMSEIEAKVK

SEQ ID NO: 7180 - protein, 10 aa, Artificial Sequence
  Description of Artificial Sequence: Synthetic epitope
EMSEVQLMRL

SEQ ID NO: 7181 - protein, 10 aa, Artificial Sequence
  Description of Artificial Sequence: Synthetic epitope
EMSHQSQSEL

SEQ ID NO: 7182 - protein, 10 aa, Artificial Sequence
  Description of Artificial Sequence: Synthetic epitope
EMSKEFIEAE

SEQ ID NO: 7183 - protein, 10 aa, Artificial Sequence
  Description of Artificial Sequence: Synthetic epitope
EMSKISSKEP

SEQ ID NO: 7184 - protein, 10 aa, Artificial Sequence
  Description of Artificial Sequence: Synthetic epitope
EMSLAETKPQ

SEQ ID NO: 7185 - protein, 10 aa, Artificial Sequence
  Description of Artificial Sequence: Synthetic epitope
EMSLVVRTSF

SEQ ID NO: 7186 - protein, 10 aa, Artificial Sequence
  Description of Artificial Sequence: Synthetic epitope
EMSMALLSNL

SEQ ID NO: 7187 - protein, 10 aa, Artificial Sequence
  Description of Artificial Sequence: Synthetic epitope
EMSQTVSTGE

SEQ ID NO: 7188 - protein, 10 aa, Artificial Sequence
  Description of Artificial Sequence: Synthetic epitope
EMSSEAKATS

SEQ ID NO: 7189 - protein, 10 aa, Artificial Sequence
  Description of Artificial Sequence: Synthetic epitope
EMSSGSEISP

SEQ ID NO: 7190 - protein, 10 aa, Artificial Sequence
  Description of Artificial Sequence: Synthetic epitope
EMSTESYDQG

SEQ ID NO: 7191 - protein, 10 aa, Artificial Sequence
  Description of Artificial Sequence: Synthetic epitope
EMTIKETINK

SEQ ID NO: 7192 - protein, 10 aa, Artificial Sequence
  Description of Artificial Sequence: Synthetic epitope
EMTLIETTAE

SEQ ID NO: 7193 - protein, 10 aa, Artificial Sequence
  Description of Artificial Sequence: Synthetic epitope
EMTLMVHVPK

SEQ ID NO: 7194 - protein, 10 aa, Artificial Sequence
  Description of Artificial Sequence: Synthetic epitope
EMTLQATALQ

SEQ ID NO: 7195 - protein, 10 aa, Artificial Sequence
  Description of Artificial Sequence: Synthetic epitope
EMTSAEASVE

SEQ ID NO: 7196 - protein, 10 aa, Artificial Sequence
  Description of Artificial Sequence: Synthetic epitope
EMTSPLVSDD

SEQ ID NO: 7197 - protein, 10 aa, Artificial Sequence
  Description of Artificial Sequence: Synthetic epitope
EMTSSLLKNS

SEQ ID NO: 7198 - protein, 10 aa, Artificial Sequence
  Description of Artificial Sequence: Synthetic epitope
EMTSTGALKS

SEQ ID NO: 7199 - protein, 10 aa, Artificial Sequence
  Description of Artificial Sequence: Synthetic epitope
EMTTGTFVEE

SEQ ID NO: 7200 - protein, 10 aa, Artificial Sequence
  Description of Artificial Sequence: Synthetic epitope
EMTTQMKSLQ

SEQ ID NO: 7201 - protein, 10 aa, Artificial Sequence
  Description of Artificial Sequence: Synthetic epitope
EMVALSDNIP

SEQ ID NO: 7202 - protein, 10 aa, Artificial Sequence
  Description of Artificial Sequence: Synthetic epitope
EMVEKQKQQE

SEQ ID NO: 7203 - protein, 10 aa, Artificial Sequence
  Description of Artificial Sequence: Synthetic epitope
EMVETQINSV

SEQ ID NO: 7204 - protein, 10 aa, Artificial Sequence
  Description of Artificial Sequence: Synthetic epitope
EMVHSAFQAQ

SEQ ID NO: 7205 - protein, 10 aa, Artificial Sequence
  Description of Artificial Sequence: Synthetic epitope
EMVKEKTAEE

SEQ ID NO: 7206 - protein, 10 aa, Artificial Sequence
  Description of Artificial Sequence: Synthetic epitope
EMVKKNSAKS

SEQ ID NO: 7207 - protein, 10 aa, Artificial Sequence
  Description of Artificial Sequence: Synthetic epitope
EMVLRERSYD

SEQ ID NO: 7208 - protein, 10 aa, Artificial Sequence
  Description of Artificial Sequence: Synthetic epitope
EMVLSTKESK

SEQ ID NO: 7209 - protein, 10 aa, Artificial Sequence
  Description of Artificial Sequence: Synthetic epitope
EMVTMNSLMS

SEQ ID NO: 7210 - protein, 10 aa, Artificial Sequence
  Description of Artificial Sequence: Synthetic epitope
EMVTPVRQVA

SEQ ID NO: 7211 - protein, 10 aa, Artificial Sequence
  Description of Artificial Sequence: Synthetic epitope
EMYEYSKVRS

SEQ ID NO: 7212 - protein, 10 aa, Artificial Sequence
  Description of Artificial Sequence: Synthetic epitope
EMYFTKITDF

SEQ ID NO: 7213 - protein, 10 aa, Artificial Sequence
  Description of Artificial Sequence: Synthetic epitope
EMYINSSQRV

SEQ ID NO: 7214 - protein, 10 aa, Artificial Sequence
  Description of Artificial Sequence: Synthetic epitope
ENAAESTEVN

SEQ ID NO: 7215 - protein, 10 aa, Artificial Sequence
  Description of Artificial Sequence: Synthetic epitope
ENAAQALHLG

SEQ ID NO: 7216 - protein, 10 aa, Artificial Sequence
  Description of Artificial Sequence: Synthetic epitope
ENAARERSRV

SEQ ID NO: 7217 - protein, 10 aa, Artificial Sequence
  Description of Artificial Sequence: Synthetic epitope
ENAASAQKAT

SEQ ID NO: 7218 - protein, 10 aa, Artificial Sequence
  Description of Artificial Sequence: Synthetic epitope
ENAASEKSQG

SEQ ID NO: 7219 - protein, 10 aa, Artificial Sequence
  Description of Artificial Sequence: Synthetic epitope
ENAASSMTER

SEQ ID NO: 7220 - protein, 10 aa, Artificial Sequence
  Description of Artificial Sequence: Synthetic epitope
ENAELFRADT

SEQ ID NO: 7221 - protein, 10 aa, Artificial Sequence
  Description of Artificial Sequence: Synthetic epitope
ENAEQSRAAI

SEQ ID NO: 7222 - protein, 10 aa, Artificial Sequence
  Description of Artificial Sequence: Synthetic epitope
ENAESIDLKQ

SEQ ID NO: 7223 - protein, 10 aa, Artificial Sequence
  Description of Artificial Sequence: Synthetic epitope
ENAGFSADSY

SEQ ID NO: 7224 - protein, 10 aa, Artificial Sequence
  Description of Artificial Sequence: Synthetic epitope
ENAGLSSTAG

SEQ ID NO: 7225 - protein, 10 aa, Artificial Sequence
  Description of Artificial Sequence: Synthetic epitope
ENAIALLSAA

SEQ ID NO: 7226 - protein, 10 aa, Artificial Sequence
  Description of Artificial Sequence: Synthetic epitope
ENALAVSTKY

SEQ ID NO: 7227 - protein, 10 aa, Artificial Sequence
  Description of Artificial Sequence: Synthetic epitope
ENALSKGREK

SEQ ID NO: 7228 - protein, 10 aa, Artificial Sequence
  Description of Artificial Sequence: Synthetic epitope
ENALSVAEEQ

SEQ ID NO: 7229 - protein, 10 aa, Artificial Sequence
  Description of Artificial Sequence: Synthetic epitope
ENALTKSELL

SEQ ID NO: 7230 - protein, 10 aa, Artificial Sequence
  Description of Artificial Sequence: Synthetic epitope
ENAQISLDGD

SEQ ID NO: 7231 - protein, 10 aa, Artificial Sequence
  Description of Artificial Sequence: Synthetic epitope
ENAQSSEKTE

SEQ ID NO: 7232 - protein, 10 aa, Artificial Sequence
  Description of Artificial Sequence: Synthetic epitope
ENAREKILSN

SEQ ID NO: 7233 - protein, 10 aa, Artificial Sequence
  Description of Artificial Sequence: Synthetic epitope
ENATPTRNTI

SEQ ID NO: 7234 - protein, 10 aa, Artificial Sequence
  Description of Artificial Sequence: Synthetic epitope
ENAVITLAQR

SEQ ID NO: 7235 - protein, 10 aa, Artificial Sequence
  Description of Artificial Sequence: Synthetic epitope
ENAVQGSAVE

SEQ ID NO: 7236 - protein, 10 aa, Artificial Sequence
  Description of Artificial Sequence: Synthetic epitope
ENDELSQDVA

SEQ ID NO: 7237 - protein, 10 aa, Artificial Sequence
  Description of Artificial Sequence: Synthetic epitope
ENDISSRSAT

SEQ ID NO: 7238 - protein, 10 aa, Artificial Sequence
  Description of Artificial Sequence: Synthetic epitope
ENDMLSHTAN

SEQ ID NO: 7239 - protein, 10 aa, Artificial Sequence
  Description of Artificial Sequence: Synthetic epitope
ENDSIAGTIK

SEQ ID NO: 7240 - protein, 10 aa, Artificial Sequence
  Description of Artificial Sequence: Synthetic epitope
ENEAEALRGE

SEQ ID NO: 7241 - protein, 10 aa, Artificial Sequence
  Description of Artificial Sequence: Synthetic epitope
ENEEKIVNLE

SEQ ID NO: 7242 - protein, 10 aa, Artificial Sequence
  Description of Artificial Sequence: Synthetic epitope
ENEESAGTDS

SEQ ID NO: 7243 - protein, 10 aa, Artificial Sequence
  Description of Artificial Sequence: Synthetic epitope
ENEIEEVKVA

SEQ ID NO: 7244 - protein, 10 aa, Artificial Sequence
  Description of Artificial Sequence: Synthetic epitope
ENEKALKKLY

SEQ ID NO: 7245 - protein, 10 aa, Artificial Sequence
  Description of Artificial Sequence: Synthetic epitope
ENEKDATTEK

SEQ ID NO: 7246 - protein, 10 aa, Artificial Sequence
  Description of Artificial Sequence: Synthetic epitope
ENEKDRADQT

SEQ ID NO: 7247 - protein, 10 aa, Artificial Sequence
  Description of Artificial Sequence: Synthetic epitope
ENEKTEGTNL

SEQ ID NO: 7248 - protein, 10 aa, Artificial Sequence
  Description of Artificial Sequence: Synthetic epitope
ENEKTRTSID

SEQ ID NO: 7249 - protein, 10 aa, Artificial Sequence
  Description of Artificial Sequence: Synthetic epitope
ENELAAEFTN

SEQ ID NO: 7250 - protein, 10 aa, Artificial Sequence
  Description of Artificial Sequence: Synthetic epitope
ENELAKVRNH

SEQ ID NO: 7251 - protein, 10 aa, Artificial Sequence
  Description of Artificial Sequence: Synthetic epitope
ENEMASILEK

SEQ ID NO: 7252 - protein, 10 aa, Artificial Sequence
  Description of Artificial Sequence: Synthetic epitope
ENEMKVAKNP

SEQ ID NO: 7253 - protein, 10 aa, Artificial Sequence
  Description of Artificial Sequence: Synthetic epitope
ENENEQAAIV

SEQ ID NO: 7254 - protein, 10 aa, Artificial Sequence
  Description of Artificial Sequence: Synthetic epitope
ENENESVIKE

SEQ ID NO: 7255 - protein, 10 aa, Artificial Sequence
  Description of Artificial Sequence: Synthetic epitope
ENEPDLDALA

SEQ ID NO: 7256 - protein, 10 aa, Artificial Sequence
  Description of Artificial Sequence: Synthetic epitope
ENERRLVSKE

SEQ ID NO: 7257 - protein, 10 aa, Artificial Sequence
  Description of Artificial Sequence: Synthetic epitope
ENESARNRRE

SEQ ID NO: 7258 - protein, 10 aa, Artificial Sequence
  Description of Artificial Sequence: Synthetic epitope
ENESKVSKKE

SEQ ID NO: 7259 - protein, 10 aa, Artificial Sequence
  Description of Artificial Sequence: Synthetic epitope
ENESQASQAV

SEQ ID NO: 7260 - protein, 10 aa, Artificial Sequence
  Description of Artificial Sequence: Synthetic epitope
ENESVKSVRA

SEQ ID NO: 7261 - protein, 10 aa, Artificial Sequence
  Description of Artificial Sequence: Synthetic epitope
ENETLNKEED

SEQ ID NO: 7262 - protein, 10 aa, Artificial Sequence
  Description of Artificial Sequence: Synthetic epitope
ENEVIEVKSM

SEQ ID NO: 7263 - protein, 10 aa, Artificial Sequence
  Description of Artificial Sequence: Synthetic epitope
ENEVKTSQDK

SEQ ID NO: 7264 - protein, 10 aa, Artificial Sequence
  Description of Artificial Sequence: Synthetic epitope
ENEVSRLEDI

SEQ ID NO: 7265 - protein, 10 aa, Artificial Sequence
  Description of Artificial Sequence: Synthetic epitope
ENEYKAVNNS

SEQ ID NO: 7266 - protein, 10 aa, Artificial Sequence
  Description of Artificial Sequence: Synthetic epitope
ENFDDEQIWQ

SEQ ID NO: 7267 - protein, 10 aa, Artificial Sequence
  Description of Artificial Sequence: Synthetic epitope
ENFDHTYMDE

SEQ ID NO: 7268 - protein, 10 aa, Artificial Sequence
  Description of Artificial Sequence: Synthetic epitope
ENFLSNSESK

SEQ ID NO: 7269 - protein, 10 aa, Artificial Sequence
  Description of Artificial Sequence: Synthetic epitope
ENFNKESKKS

SEQ ID NO: 7270 - protein, 10 aa, Artificial Sequence
  Description of Artificial Sequence: Synthetic epitope
ENFSSAKRAK

SEQ ID NO: 7271 - protein, 10 aa, Artificial Sequence
  Description of Artificial Sequence: Synthetic epitope
ENGIVTRNED

SEQ ID NO: 7272 - protein, 10 aa, Artificial Sequence
  Description of Artificial Sequence: Synthetic epitope
ENGKAKLSFQ

SEQ ID NO: 7273 - protein, 10 aa, Artificial Sequence
  Description of Artificial Sequence: Synthetic epitope
ENGKEGTAKE

SEQ ID NO: 7274 - protein, 10 aa, Artificial Sequence
  Description of Artificial Sequence: Synthetic epitope
ENGKIENKQI

SEQ ID NO: 7275 - protein, 10 aa, Artificial Sequence
  Description of Artificial Sequence: Synthetic epitope
ENGKQIKSID

SEQ ID NO: 7276 - protein, 10 aa, Artificial Sequence
  Description of Artificial Sequence: Synthetic epitope
ENGKTQRADD

SEQ ID NO: 7277 - protein, 10 aa, Artificial Sequence
  Description of Artificial Sequence: Synthetic epitope
ENGVELSKEE

SEQ ID NO: 7278 - protein, 10 aa, Artificial Sequence
  Description of Artificial Sequence: Synthetic epitope
ENHATDVHQA

SEQ ID NO: 7279 - protein, 10 aa, Artificial Sequence
  Description of Artificial Sequence: Synthetic epitope
ENHIFVGSKT

SEQ ID NO: 7280 - protein, 10 aa, Artificial Sequence
  Description of Artificial Sequence: Synthetic epitope
ENHKFTKESH

SEQ ID NO: 7281 - protein, 10 aa, Artificial Sequence
  Description of Artificial Sequence: Synthetic epitope
ENHQSESSDL

SEQ ID NO: 7282 - protein, 10 aa, Artificial Sequence
  Description of Artificial Sequence: Synthetic epitope
ENHVNDIKKP

SEQ ID NO: 7283 - protein, 10 aa, Artificial Sequence
  Description of Artificial Sequence: Synthetic epitope
ENIETENIRL

SEQ ID NO: 7284 - protein, 10 aa, Artificial Sequence
  Description of Artificial Sequence: Synthetic epitope
ENIFKSVSFR

SEQ ID NO: 7285 - protein, 10 aa, Artificial Sequence
  Description of Artificial Sequence: Synthetic epitope
ENIKQTKDAQ

SEQ ID NO: 7286 - protein, 10 aa, Artificial Sequence
  Description of Artificial Sequence: Synthetic epitope
ENIRIYGIHA

SEQ ID NO: 7287 - protein, 10 aa, Artificial Sequence
  Description of Artificial Sequence: Synthetic epitope
ENISISQIIE

SEQ ID NO: 7288 - protein, 10 aa, Artificial Sequence
  Description of Artificial Sequence: Synthetic epitope
ENITAKASSE

SEQ ID NO: 7289 - protein, 10 aa, Artificial Sequence
  Description of Artificial Sequence: Synthetic epitope
ENITTQTLTR

SEQ ID NO: 7290 - protein, 10 aa, Artificial Sequence
  Description of Artificial Sequence: Synthetic epitope
ENIVFAVTRF

SEQ ID NO: 7291 - protein, 10 aa, Artificial Sequence
  Description of Artificial Sequence: Synthetic epitope
ENIVLYQKGQ

SEQ ID NO: 7292 - protein, 10 aa, Artificial Sequence
  Description of Artificial Sequence: Synthetic epitope
ENIVNTVLSS

SEQ ID NO: 7293 - protein, 10 aa, Artificial Sequence
  Description of Artificial Sequence: Synthetic epitope
ENIYALNSQL

SEQ ID NO: 7294 - protein, 10 aa, Artificial Sequence
  Description of Artificial Sequence: Synthetic epitope
ENKAEVQMKE

SEQ ID NO: 7295 - protein, 10 aa, Artificial Sequence
  Description of Artificial Sequence: Synthetic epitope
ENKDDKTLNL

SEQ ID NO: 7296 - protein, 10 aa, Artificial Sequence
  Description of Artificial Sequence: Synthetic epitope
ENKDREDKRS

SEQ ID NO: 7297 - protein, 10 aa, Artificial Sequence
  Description of Artificial Sequence: Synthetic epitope
ENKDYLMVTA

SEQ ID NO: 7298 - protein, 10 aa, Artificial Sequence
  Description of Artificial Sequence: Synthetic epitope
ENKEAQSSQA

SEQ ID NO: 7299 - protein, 10 aa, Artificial Sequence
  Description of Artificial Sequence: Synthetic epitope
ENKELSLIRA

SEQ ID NO: 7300 - protein, 10 aa, Artificial Sequence
  Description of Artificial Sequence: Synthetic epitope
ENKETNVLDD

SEQ ID NO: 7301 - protein, 10 aa, Artificial Sequence
  Description of Artificial Sequence: Synthetic epitope
ENKIESHRHE

SEQ ID NO: 7302 - protein, 10 aa, Artificial Sequence
  Description of Artificial Sequence: Synthetic epitope
ENKILETEKT

SEQ ID NO: 7303 - protein, 10 aa, Artificial Sequence
  Description of Artificial Sequence: Synthetic epitope
ENKKLKLKYQ

SEQ ID NO: 7304 - protein, 10 aa, Artificial Sequence
  Description of Artificial Sequence: Synthetic epitope
ENKLIALGEE

SEQ ID NO: 7305 - protein, 10 aa, Artificial Sequence
  Description of Artificial Sequence: Synthetic epitope
ENKLKVQAQK

SEQ ID NO: 7306 - protein, 10 aa, Artificial Sequence
  Description of Artificial Sequence: Synthetic epitope
ENKLVKKIKD

SEQ ID NO: 7307 - protein, 10 aa, Artificial Sequence
  Description of Artificial Sequence: Synthetic epitope
ENKLWDDAKN

SEQ ID NO: 7308 - protein, 10 aa, Artificial Sequence
  Description of Artificial Sequence: Synthetic epitope
ENKMKSLASK

SEQ ID NO: 7309 - protein, 10 aa, Artificial Sequence
  Description of Artificial Sequence: Synthetic epitope
ENKNVSVDME

SEQ ID NO: 7310 - protein, 10 aa, Artificial Sequence
  Description of Artificial Sequence: Synthetic epitope
ENKRNTGIKL

SEQ ID NO: 7311 - protein, 10 aa, Artificial Sequence
  Description of Artificial Sequence: Synthetic epitope
ENKSHDSSTY

SEQ ID NO: 7312 - protein, 10 aa, Artificial Sequence
  Description of Artificial Sequence: Synthetic epitope
ENKSKSGVGR

SEQ ID NO: 7313 - protein, 10 aa, Artificial Sequence
  Description of Artificial Sequence: Synthetic epitope
ENKVFTEPQQ

SEQ ID NO: 7314 - protein, 10 aa, Artificial Sequence
  Description of Artificial Sequence: Synthetic epitope
ENKVVDNQAG

SEQ ID NO: 7315 - protein, 10 aa, Artificial Sequence
  Description of Artificial Sequence: Synthetic epitope
ENKYKILEKE

SEQ ID NO: 7316 - protein, 10 aa, Artificial Sequence
  Description of Artificial Sequence: Synthetic epitope
ENKYYAKASE

SEQ ID NO: 7317 - protein, 10 aa, Artificial Sequence
  Description of Artificial Sequence: Synthetic epitope
ENLALETSSP

SEQ ID NO: 7318 - protein, 10 aa, Artificial Sequence
  Description of Artificial Sequence: Synthetic epitope
ENLEALTELE

SEQ ID NO: 7319 - protein, 10 aa, Artificial Sequence
  Description of Artificial Sequence: Synthetic epitope
ENLEYNVEPQ

SEQ ID NO: 7320 - protein, 10 aa, Artificial Sequence
  Description of Artificial Sequence: Synthetic epitope
ENLFGAEYQL

SEQ ID NO: 7321 - protein, 10 aa, Artificial Sequence
  Description of Artificial Sequence: Synthetic epitope
ENLHEMAKHN

SEQ ID NO: 7322 - protein, 10 aa, Artificial Sequence
  Description of Artificial Sequence: Synthetic epitope
ENLITRSQSS

SEQ ID NO: 7323 - protein, 10 aa, Artificial Sequence
  Description of Artificial Sequence: Synthetic epitope
ENLKTSKSIF

SEQ ID NO: 7324 - protein, 10 aa, Artificial Sequence
  Description of Artificial Sequence: Synthetic epitope
ENLLADVKGA

SEQ ID NO: 7325 - protein, 10 aa, Artificial Sequence
  Description of Artificial Sequence: Synthetic epitope
ENLLAKLLEK

SEQ ID NO: 7326 - protein, 10 aa, Artificial Sequence
  Description of Artificial Sequence: Synthetic epitope
ENLLASIRKG

SEQ ID NO: 7327 - protein, 10 aa, Artificial Sequence
  Description of Artificial Sequence: Synthetic epitope
ENLLSARKRA

SEQ ID NO: 7328 - protein, 10 aa, Artificial Sequence
  Description of Artificial Sequence: Synthetic epitope
ENLLSDLSLQ

SEQ ID NO: 7329 - protein, 10 aa, Artificial Sequence
  Description of Artificial Sequence: Synthetic epitope
ENLQSSKSTR

SEQ ID NO: 7330 - protein, 10 aa, Artificial Sequence
  Description of Artificial Sequence: Synthetic epitope
ENLSTASSRS

SEQ ID NO: 7331 - protein, 10 aa, Artificial Sequence
  Description of Artificial Sequence: Synthetic epitope
ENLSTEEKSI

SEQ ID NO: 7332 - protein, 10 aa, Artificial Sequence
  Description of Artificial Sequence: Synthetic epitope
ENLSVTLEVI

SEQ ID NO: 7333 - protein, 10 aa, Artificial Sequence
  Description of Artificial Sequence: Synthetic epitope
ENLVEKEISG

SEQ ID NO: 7334 - protein, 10 aa, Artificial Sequence
  Description of Artificial Sequence: Synthetic epitope
ENLVELQLNY

SEQ ID NO: 7335 - protein, 10 aa, Artificial Sequence
  Description of Artificial Sequence: Synthetic epitope
ENLVSQMALS

SEQ ID NO: 7336 - protein, 10 aa, Artificial Sequence
  Description of Artificial Sequence: Synthetic epitope
ENLYTIQTLK

SEQ ID NO: 7337 - protein, 10 aa, Artificial Sequence
  Description of Artificial Sequence: Synthetic epitope
ENMASQIIVD

SEQ ID NO: 7338 - protein, 10 aa, Artificial Sequence
  Description of Artificial Sequence: Synthetic epitope
ENMNLRTLSE

SEQ ID NO: 7339 - protein, 10 aa, Artificial Sequence
  Description of Artificial Sequence: Synthetic epitope
ENMRNDIASH

SEQ ID NO: 7340 - protein, 10 aa, Artificial Sequence
  Description of Artificial Sequence: Synthetic epitope
ENMSDGDTSA

SEQ ID NO: 7341 - protein, 10 aa, Artificial Sequence
  Description of Artificial Sequence: Synthetic epitope
ENNFASMKSQ

SEQ ID NO: 7342 - protein, 10 aa, Artificial Sequence
  Description of Artificial Sequence: Synthetic epitope
ENNKSRTEVE

SEQ ID NO: 7343 - protein, 10 aa, Artificial Sequence
  Description of Artificial Sequence: Synthetic epitope
ENNSSRRANR

SEQ ID NO: 7344 - protein, 10 aa, Artificial Sequence
  Description of Artificial Sequence: Synthetic epitope
ENPEMVDLPE

SEQ ID NO: 7345 - protein, 10 aa, Artificial Sequence
  Description of Artificial Sequence: Synthetic epitope
ENPHNVVNVA

SEQ ID NO: 7346 - protein, 10 aa, Artificial Sequence
  Description of Artificial Sequence: Synthetic epitope
ENPKKAALVM

SEQ ID NO: 7347 - protein, 10 aa, Artificial Sequence
  Description of Artificial Sequence: Synthetic epitope
ENPQQAASSF

SEQ ID NO: 7348 - protein, 10 aa, Artificial Sequence
  Description of Artificial Sequence: Synthetic epitope
ENPQVAQHPM

SEQ ID NO: 7349 - protein, 10 aa, Artificial Sequence
  Description of Artificial Sequence: Synthetic epitope
ENPYVDAIKS

SEQ ID NO: 7350 - protein, 10 aa, Artificial Sequence
  Description of Artificial Sequence: Synthetic epitope
ENQDKEKDSN

SEQ ID NO: 7351 - protein, 10 aa, Artificial Sequence
  Description of Artificial Sequence: Synthetic epitope
ENQEDNNERF

SEQ ID NO: 7352 - protein, 10 aa, Artificial Sequence
  Description of Artificial Sequence: Synthetic epitope
ENQEEKAKEN

SEQ ID NO: 7353 - protein, 10 aa, Artificial Sequence
  Description of Artificial Sequence: Synthetic epitope
ENQEISLELE

SEQ ID NO: 7354 - protein, 10 aa, Artificial Sequence
  Description of Artificial Sequence: Synthetic epitope
ENQEQEEVIT

SEQ ID NO: 7355 - protein, 10 aa, Artificial Sequence
  Description of Artificial Sequence: Synthetic epitope
ENQHFIGSED

SEQ ID NO: 7356 - protein, 10 aa, Artificial Sequence
  Description of Artificial Sequence: Synthetic epitope
ENQIAQLNKE

SEQ ID NO: 7357 - protein, 10 aa, Artificial Sequence
  Description of Artificial Sequence: Synthetic epitope
ENQKEYENKK

SEQ ID NO: 7358 - protein, 10 aa, Artificial Sequence
  Description of Artificial Sequence: Synthetic epitope
ENQKNLESVM

SEQ ID NO: 7359 - protein, 10 aa, Artificial Sequence
  Description of Artificial Sequence: Synthetic epitope
ENQRVSMSRN

SEQ ID NO: 7360 - protein, 10 aa, Artificial Sequence
  Description of Artificial Sequence: Synthetic epitope
ENQSLKSVKF

SEQ ID NO: 7361 - protein, 10 aa, Artificial Sequence
  Description of Artificial Sequence: Synthetic epitope
ENQTNKTIDA

SEQ ID NO: 7362 - protein, 10 aa, Artificial Sequence
  Description of Artificial Sequence: Synthetic epitope
ENQTSSVSDD

SEQ ID NO: 7363 - protein, 10 aa, Artificial Sequence
  Description of Artificial Sequence: Synthetic epitope
ENQYQREMMA

SEQ ID NO: 7364 - protein, 10 aa, Artificial Sequence
  Description of Artificial Sequence: Synthetic epitope
ENRAARRLGK

SEQ ID NO: 7365 - protein, 10 aa, Artificial Sequence
  Description of Artificial Sequence: Synthetic epitope
ENRATDSATI

SEQ ID NO: 7366 - protein, 10 aa, Artificial Sequence
  Description of Artificial Sequence: Synthetic epitope
ENRITSLPAM

SEQ ID NO: 7367 - protein, 10 aa, Artificial Sequence
  Description of Artificial Sequence: Synthetic epitope
ENRKMITNEK

SEQ ID NO: 7368 - protein, 10 aa, Artificial Sequence
  Description of Artificial Sequence: Synthetic epitope
ENRLQNMEVT

SEQ ID NO: 7369 - protein, 10 aa, Artificial Sequence
  Description of Artificial Sequence: Synthetic epitope
ENRNQELSQS

SEQ ID NO: 7370 - protein, 10 aa, Artificial Sequence
  Description of Artificial Sequence: Synthetic epitope
ENRQTKTATS

SEQ ID NO: 7371 - protein, 10 aa, Artificial Sequence
  Description of Artificial Sequence: Synthetic epitope
ENRQVATKRA

SEQ ID NO: 7372 - protein, 10 aa, Artificial Sequence
  Description of Artificial Sequence: Synthetic epitope
ENRRDMEAEE

SEQ ID NO: 7373 - protein, 10 aa, Artificial Sequence
  Description of Artificial Sequence: Synthetic epitope
ENRRQQNTQE

SEQ ID NO: 7374 - protein, 10 aa, Artificial Sequence
  Description of Artificial Sequence: Synthetic epitope
ENRSEPESDG

SEQ ID NO: 7375 - protein, 10 aa, Artificial Sequence
  Description of Artificial Sequence: Synthetic epitope
ENRSNSRPLE

SEQ ID NO: 7376 - protein, 10 aa, Artificial Sequence
  Description of Artificial Sequence: Synthetic epitope
ENRSQGEALQ

SEQ ID NO: 7377 - protein, 10 aa, Artificial Sequence
  Description of Artificial Sequence: Synthetic epitope
ENRTAQITST

SEQ ID NO: 7378 - protein, 10 aa, Artificial Sequence
  Description of Artificial Sequence: Synthetic epitope
ENRTSITETD

SEQ ID NO: 7379 - protein, 10 aa, Artificial Sequence
  Description of Artificial Sequence: Synthetic epitope
ENRVSIALKK

SEQ ID NO: 7380 - protein, 10 aa, Artificial Sequence
  Description of Artificial Sequence: Synthetic epitope
ENSDYKFDSS

SEQ ID NO: 7381 - protein, 10 aa, Artificial Sequence
  Description of Artificial Sequence: Synthetic epitope
ENSEEHSAKY

SEQ ID NO: 7382 - protein, 10 aa, Artificial Sequence
  Description of Artificial Sequence: Synthetic epitope
ENSESKSTPK

SEQ ID NO: 7383 - protein, 10 aa, Artificial Sequence
  Description of Artificial Sequence: Synthetic epitope
ENSETLSAPL

SEQ ID NO: 7384 - protein, 10 aa, Artificial Sequence
  Description of Artificial Sequence: Synthetic epitope
ENSFASASSA

SEQ ID NO: 7385 - protein, 10 aa, Artificial Sequence
  Description of Artificial Sequence: Synthetic epitope
ENSGGKKNRR

SEQ ID NO: 7386 - protein, 10 aa, Artificial Sequence
  Description of Artificial Sequence: Synthetic epitope
ENSGIQMVSK

SEQ ID NO: 7387 - protein, 10 aa, Artificial Sequence
  Description of Artificial Sequence: Synthetic epitope
ENSHEDESPM

SEQ ID NO: 7388 - protein, 10 aa, Artificial Sequence
  Description of Artificial Sequence: Synthetic epitope
ENSIKKNTRP

SEQ ID NO: 7389 - protein, 10 aa, Artificial Sequence
  Description of Artificial Sequence: Synthetic epitope
ENSKLSIGQQ

SEQ ID NO: 7390 - protein, 10 aa, Artificial Sequence
  Description of Artificial Sequence: Synthetic epitope
ENSKSKRKKP

SEQ ID NO: 7391 - protein, 10 aa, Artificial Sequence
  Description of Artificial Sequence: Synthetic epitope
ENSLKSGKGA

SEQ ID NO: 7392 - protein, 10 aa, Artificial Sequence
  Description of Artificial Sequence: Synthetic epitope
ENSLREVEAR

SEQ ID NO: 7393 - protein, 10 aa, Artificial Sequence
  Description of Artificial Sequence: Synthetic epitope
ENSLRQSKAS

SEQ ID NO: 7394 - protein, 10 aa, Artificial Sequence
  Description of Artificial Sequence: Synthetic epitope
ENSLSARQSA

SEQ ID NO: 7395 - protein, 10 aa, Artificial Sequence
  Description of Artificial Sequence: Synthetic epitope
ENSPSSQSAG

SEQ ID NO: 7396 - protein, 10 aa, Artificial Sequence
  Description of Artificial Sequence: Synthetic epitope
ENSQDALRVV

SEQ ID NO: 7397 - protein, 10 aa, Artificial Sequence
  Description of Artificial Sequence: Synthetic epitope
ENSQEENSEP

SEQ ID NO: 7398 - protein, 10 aa, Artificial Sequence
  Description of Artificial Sequence: Synthetic epitope
ENSQWSLWPE

SEQ ID NO: 7399 - protein, 10 aa, Artificial Sequence
  Description of Artificial Sequence: Synthetic epitope
ENSRMEENAE

SEQ ID NO: 7400 - protein, 10 aa, Artificial Sequence
  Description of Artificial Sequence: Synthetic epitope
ENSRSVVKTP

SEQ ID NO: 7401 - protein, 10 aa, Artificial Sequence
  Description of Artificial Sequence: Synthetic epitope
ENSSESEDED

SEQ ID NO: 7402 - protein, 10 aa, Artificial Sequence
  Description of Artificial Sequence: Synthetic epitope
ENSSPSKSEK

SEQ ID NO: 7403 - protein, 10 aa, Artificial Sequence
  Description of Artificial Sequence: Synthetic epitope
ENSSVGLASP

SEQ ID NO: 7404 - protein, 10 aa, Artificial Sequence
  Description of Artificial Sequence: Synthetic epitope
ENSSVYAEVS

SEQ ID NO: 7405 - protein, 10 aa, Artificial Sequence
  Description of Artificial Sequence: Synthetic epitope
ENSTIPDIQK

SEQ ID NO: 7406 - protein, 10 aa, Artificial Sequence
  Description of Artificial Sequence: Synthetic epitope
ENSTLSSQSA

SEQ ID NO: 7407 - protein, 10 aa, Artificial Sequence
  Description of Artificial Sequence: Synthetic epitope
ENSVTFTKDI

SEQ ID NO: 7408 - protein, 10 aa, Artificial Sequence
  Description of Artificial Sequence: Synthetic epitope
ENTAELEIFQ

SEQ ID NO: 7409 - protein, 10 aa, Artificial Sequence
  Description of Artificial Sequence: Synthetic epitope
ENTEVMIKGG

SEQ ID NO: 7410 - protein, 10 aa, Artificial Sequence
  Description of Artificial Sequence: Synthetic epitope
ENTISEMSPK

SEQ ID NO: 7411 - protein, 10 aa, Artificial Sequence
  Description of Artificial Sequence: Synthetic epitope
ENTKQQLQLP

SEQ ID NO: 7412 - protein, 10 aa, Artificial Sequence
  Description of Artificial Sequence: Synthetic epitope
ENTKSASDII

SEQ ID NO: 7413 - protein, 10 aa, Artificial Sequence
  Description of Artificial Sequence: Synthetic epitope
ENTKSNVTHK

SEQ ID NO: 7414 - protein, 10 aa, Artificial Sequence
  Description of Artificial Sequence: Synthetic epitope
ENTMEDHAAE

SEQ ID NO: 7415 - protein, 10 aa, Artificial Sequence
  Description of Artificial Sequence: Synthetic epitope
ENTPDLVSDS

SEQ ID NO: 7416 - protein, 10 aa, Artificial Sequence
  Description of Artificial Sequence: Synthetic epitope
ENTPSQIDSS

SEQ ID NO: 7417 - protein, 10 aa, Artificial Sequence
  Description of Artificial Sequence: Synthetic epitope
ENTRKYAKAE

SEQ ID NO: 7418 - protein, 10 aa, Artificial Sequence
  Description of Artificial Sequence: Synthetic epitope
ENTSGTRKSE

SEQ ID NO: 7419 - protein, 10 aa, Artificial Sequence
  Description of Artificial Sequence: Synthetic epitope
ENTSLSSTTN

SEQ ID NO: 7420 - protein, 10 aa, Artificial Sequence
  Description of Artificial Sequence: Synthetic epitope
ENTVRESPNI

SEQ ID NO: 7421 - protein, 10 aa, Artificial Sequence
  Description of Artificial Sequence: Synthetic epitope
ENVAFEQEKE

SEQ ID NO: 7422 - protein, 10 aa, Artificial Sequence
  Description of Artificial Sequence: Synthetic epitope
ENVALSLANI

SEQ ID NO: 7423 - protein, 10 aa, Artificial Sequence
  Description of Artificial Sequence: Synthetic epitope
ENVDLTSVVS

SEQ ID NO: 7424 - protein, 10 aa, Artificial Sequence
  Description of Artificial Sequence: Synthetic epitope
ENVEALEFRT

SEQ ID NO: 7425 - protein, 10 aa, Artificial Sequence
  Description of Artificial Sequence: Synthetic epitope
ENVGQVNEHD

SEQ ID NO: 7426 - protein, 10 aa, Artificial Sequence
  Description of Artificial Sequence: Synthetic epitope
ENVIELDWWE

SEQ ID NO: 7427 - protein, 10 aa, Artificial Sequence
  Description of Artificial Sequence: Synthetic epitope
ENVIETISSL

SEQ ID NO: 7428 - protein, 10 aa, Artificial Sequence
  Description of Artificial Sequence: Synthetic epitope
ENVKRRTHNV

SEQ ID NO: 7429 - protein, 10 aa, Artificial Sequence
  Description of Artificial Sequence: Synthetic epitope
ENVKRSLTQG

SEQ ID NO: 7430 - protein, 10 aa, Artificial Sequence
  Description of Artificial Sequence: Synthetic epitope
ENVLAALEDL

SEQ ID NO: 7431 - protein, 10 aa, Artificial Sequence
  Description of Artificial Sequence: Synthetic epitope
ENVRKENNKK

SEQ ID NO: 7432 - protein, 10 aa, Artificial Sequence
  Description of Artificial Sequence: Synthetic epitope
ENVSILAEDL

SEQ ID NO: 7433 - protein, 10 aa, Artificial Sequence
  Description of Artificial Sequence: Synthetic epitope
ENVSQLSLDK

SEQ ID NO: 7434 - protein, 10 aa, Artificial Sequence
  Description of Artificial Sequence: Synthetic epitope
ENVSVESVDS

SEQ ID NO: 7435 - protein, 10 aa, Artificial Sequence
  Description of Artificial Sequence: Synthetic epitope
ENVTKTKTPE

SEQ ID NO: 7436 - protein, 10 aa, Artificial Sequence
  Description of Artificial Sequence: Synthetic epitope
ENVVASIQPA

SEQ ID NO: 7437 - protein, 10 aa, Artificial Sequence
  Description of Artificial Sequence: Synthetic epitope
ENVVNEYSSE

SEQ ID NO: 7438 - protein, 10 aa, Artificial Sequence
  Description of Artificial Sequence: Synthetic epitope
ENVVSFNAKE

SEQ ID NO: 7439 - protein, 10 aa, Artificial Sequence
  Description of Artificial Sequence: Synthetic epitope
ENWARSIELD

SEQ ID NO: 7440 - protein, 10 aa, Artificial Sequence
  Description of Artificial Sequence: Synthetic epitope
ENYAQIQNPS

SEQ ID NO: 7441 - protein, 10 aa, Artificial Sequence
  Description of Artificial Sequence: Synthetic epitope
ENYDIKKQAE

SEQ ID NO: 7442 - protein, 10 aa, Artificial Sequence
  Description of Artificial Sequence: Synthetic epitope
ENYDYQILHK

SEQ ID NO: 7443 - protein, 10 aa, Artificial Sequence
  Description of Artificial Sequence: Synthetic epitope
ENYHRETNEN

SEQ ID NO: 7444 - protein, 10 aa, Artificial Sequence
  Description of Artificial Sequence: Synthetic epitope
ENYPKNNHTA

SEQ ID NO: 7445 - protein, 10 aa, Artificial Sequence
  Description of Artificial Sequence: Synthetic epitope
EPAAKSAFGQ

SEQ ID NO: 7446 - protein, 10 aa, Artificial Sequence
  Description of Artificial Sequence: Synthetic epitope
EPAAVSEQGD

SEQ ID NO: 7447 - protein, 10 aa, Artificial Sequence
  Description of Artificial Sequence: Synthetic epitope
EPADRFKTKR

SEQ ID NO: 7448 - protein, 10 aa, Artificial Sequence
  Description of Artificial Sequence: Synthetic epitope
EPAEFQAKTQ

SEQ ID NO: 7449 - protein, 10 aa, Artificial Sequence
  Description of Artificial Sequence: Synthetic epitope
EPAELIRRAH

SEQ ID NO: 7450 - protein, 10 aa, Artificial Sequence
  Description of Artificial Sequence: Synthetic epitope
EPAHAQENWL

SEQ ID NO: 7451 - protein, 10 aa, Artificial Sequence
  Description of Artificial Sequence: Synthetic epitope
EPAKAIKPID

SEQ ID NO: 7452 - protein, 10 aa, Artificial Sequence
  Description of Artificial Sequence: Synthetic epitope
EPALQEVQQV

SEQ ID NO: 7453 - protein, 10 aa, Artificial Sequence
  Description of Artificial Sequence: Synthetic epitope
EPALSMLQKA

SEQ ID NO: 7454 - protein, 10 aa, Artificial Sequence
  Description of Artificial Sequence: Synthetic epitope
EPALVKISEE

SEQ ID NO: 7455 - protein, 10 aa, Artificial Sequence
  Description of Artificial Sequence: Synthetic epitope
EPAQSAETIE

SEQ ID NO: 7456 - protein, 10 aa, Artificial Sequence
  Description of Artificial Sequence: Synthetic epitope
EPASAQKSKI

SEQ ID NO: 7457 - protein, 10 aa, Artificial Sequence
  Description of Artificial Sequence: Synthetic epitope
EPATLLADTP

SEQ ID NO: 7458 - protein, 10 aa, Artificial Sequence
  Description of Artificial Sequence: Synthetic epitope
EPDDAQLQPP

SEQ ID NO: 7459 - protein, 10 aa, Artificial Sequence
  Description of Artificial Sequence: Synthetic epitope
EPDKAVRRSE

SEQ ID NO: 7460 - protein, 10 aa, Artificial Sequence
  Description of Artificial Sequence: Synthetic epitope
EPDNSSQATG

SEQ ID NO: 7461 - protein, 10 aa, Artificial Sequence
  Description of Artificial Sequence: Synthetic epitope
EPEAEGSRAA

SEQ ID NO: 7462 - protein, 10 aa, Artificial Sequence
  Description of Artificial Sequence: Synthetic epitope
EPEESEPAAH

SEQ ID NO: 7463 - protein, 10 aa, Artificial Sequence
  Description of Artificial Sequence: Synthetic epitope
EPEESMSTSP

SEQ ID NO: 7464 - protein, 10 aa, Artificial Sequence
  Description of Artificial Sequence: Synthetic epitope
EPEINLVTEN

SEQ ID NO: 7465 - protein, 10 aa, Artificial Sequence
  Description of Artificial Sequence: Synthetic epitope
EPELTLAELR

SEQ ID NO: 7466 - protein, 10 aa, Artificial Sequence
  Description of Artificial Sequence: Synthetic epitope
EPENELTKQH

SEQ ID NO: 7467 - protein, 10 aa, Artificial Sequence
  Description of Artificial Sequence: Synthetic epitope
EPEQQNKSSA

SEQ ID NO: 7468 - protein, 10 aa, Artificial Sequence
  Description of Artificial Sequence: Synthetic epitope
EPERQVQHEE

SEQ ID NO: 7469 - protein, 10 aa, Artificial Sequence
  Description of Artificial Sequence: Synthetic epitope
EPESKSEPRP

SEQ ID NO: 7470 - protein, 10 aa, Artificial Sequence
  Description of Artificial Sequence: Synthetic epitope
EPFAAEAKFF

SEQ ID NO: 7471 - protein, 10 aa, Artificial Sequence
  Description of Artificial Sequence: Synthetic epitope
EPFSSKSLLE

SEQ ID NO: 7472 - protein, 10 aa, Artificial Sequence
  Description of Artificial Sequence: Synthetic epitope
EPGLAQSQAG

SEQ ID NO: 7473 - protein, 10 aa, Artificial Sequence
  Description of Artificial Sequence: Synthetic epitope
EPGQKVHEKR

SEQ ID NO: 7474 - protein, 10 aa, Artificial Sequence
  Description of Artificial Sequence: Synthetic epitope
EPGTAKKHKG

SEQ ID NO: 7475 - protein, 10 aa, Artificial Sequence
  Description of Artificial Sequence: Synthetic epitope
EPHAVSSQES

SEQ ID NO: 7476 - protein, 10 aa, Artificial Sequence
  Description of Artificial Sequence: Synthetic epitope
EPHKKQLHVT

SEQ ID NO: 7477 - protein, 10 aa, Artificial Sequence
  Description of Artificial Sequence: Synthetic epitope
EPHRKHKDKQ

SEQ ID NO: 7478 - protein, 10 aa, Artificial Sequence
  Description of Artificial Sequence: Synthetic epitope
EPIEDMQLTS

SEQ ID NO: 7479 - protein, 10 aa, Artificial Sequence
  Description of Artificial Sequence: Synthetic epitope
EPIKTVFADV

SEQ ID NO: 7480 - protein, 10 aa, Artificial Sequence
  Description of Artificial Sequence: Synthetic epitope
EPIPISKAHE

SEQ ID NO: 7481 - protein, 10 aa, Artificial Sequence
  Description of Artificial Sequence: Synthetic epitope
EPIQVKQLDI

SEQ ID NO: 7482 - protein, 10 aa, Artificial Sequence
  Description of Artificial Sequence: Synthetic epitope
EPISLDVKNS

SEQ ID NO: 7483 - protein, 10 aa, Artificial Sequence
  Description of Artificial Sequence: Synthetic epitope
EPITLQDPEA

SEQ ID NO: 7484 - protein, 10 aa, Artificial Sequence
  Description of Artificial Sequence: Synthetic epitope
EPITSQEEPV

SEQ ID NO: 7485 - protein, 10 aa, Artificial Sequence
  Description of Artificial Sequence: Synthetic epitope
EPKAASLSAS

SEQ ID NO: 7486 - protein, 10 aa, Artificial Sequence
  Description of Artificial Sequence: Synthetic epitope
EPKEQKSDEK

SEQ ID NO: 7487 - protein, 10 aa, Artificial Sequence
  Description of Artificial Sequence: Synthetic epitope
EPKEQRTASS

SEQ ID NO: 7488 - protein, 10 aa, Artificial Sequence
  Description of Artificial Sequence: Synthetic epitope
EPKGAADVEK

SEQ ID NO: 7489 - protein, 10 aa, Artificial Sequence
  Description of Artificial Sequence: Synthetic epitope
EPKHETKKLK

SEQ ID NO: 7490 - protein, 10 aa, Artificial Sequence
  Description of Artificial Sequence: Synthetic epitope
EPKKAKRSSK

SEQ ID NO: 7491 - protein, 10 aa, Artificial Sequence
  Description of Artificial Sequence: Synthetic epitope
EPKKGRMDLL

SEQ ID NO: 7492 - protein, 10 aa, Artificial Sequence
  Description of Artificial Sequence: Synthetic epitope
EPKLSLKKSH

SEQ ID NO: 7493 - protein, 10 aa, Artificial Sequence
  Description of Artificial Sequence: Synthetic epitope
EPKMTRSKLK

SEQ ID NO: 7494 - protein, 10 aa, Artificial Sequence
  Description of Artificial Sequence: Synthetic epitope
EPLEADRTSE

SEQ ID NO: 7495 - protein, 10 aa, Artificial Sequence
  Description of Artificial Sequence: Synthetic epitope
EPLEAKSAVE

SEQ ID NO: 7496 - protein, 10 aa, Artificial Sequence
  Description of Artificial Sequence: Synthetic epitope
EPLEIKGAKK

SEQ ID NO: 7497 - protein, 10 aa, Artificial Sequence
  Description of Artificial Sequence: Synthetic epitope
EPLETIMEEK

SEQ ID NO: 7498 - protein, 10 aa, Artificial Sequence
  Description of Artificial Sequence: Synthetic epitope
EPLGNSTSGE

SEQ ID NO: 7499 - protein, 10 aa, Artificial Sequence
  Description of Artificial Sequence: Synthetic epitope
EPLGSKTETL

SEQ ID NO: 7500 - protein, 10 aa, Artificial Sequence
  Description of Artificial Sequence: Synthetic epitope
EPLKLKQRSL

SEQ ID NO: 7501 - protein, 10 aa, Artificial Sequence
  Description of Artificial Sequence: Synthetic epitope
EPLPTKADAL

SEQ ID NO: 7502 - protein, 10 aa, Artificial Sequence
  Description of Artificial Sequence: Synthetic epitope
EPLQGKQQDV

SEQ ID NO: 7503 - protein, 10 aa, Artificial Sequence
  Description of Artificial Sequence: Synthetic epitope
EPLQVLSVSR

SEQ ID NO: 7504 - protein, 10 aa, Artificial Sequence
  Description of Artificial Sequence: Synthetic epitope
EPLRSVASTS

SEQ ID NO: 7505 - protein, 10 aa, Artificial Sequence
  Description of Artificial Sequence: Synthetic epitope
EPLSEPKEDQ

SEQ ID NO: 7506 - protein, 10 aa, Artificial Sequence
  Description of Artificial Sequence: Synthetic epitope
EPLTAARHAQ

SEQ ID NO: 7507 - protein, 10 aa, Artificial Sequence
  Description of Artificial Sequence: Synthetic epitope
EPLTEAEASE

SEQ ID NO: 7508 - protein, 10 aa, Artificial Sequence
  Description of Artificial Sequence: Synthetic epitope
EPLVVMAPSP

SEQ ID NO: 7509 - protein, 10 aa, Artificial Sequence
  Description of Artificial Sequence: Synthetic epitope
EPLWWEMSSA

SEQ ID NO: 7510 - protein, 10 aa, Artificial Sequence
  Description of Artificial Sequence: Synthetic epitope
EPMKLALSIE

SEQ ID NO: 7511 - protein, 10 aa, Artificial Sequence
  Description of Artificial Sequence: Synthetic epitope
EPNKSQSAED

SEQ ID NO: 7512 - protein, 10 aa, Artificial Sequence
  Description of Artificial Sequence: Synthetic epitope
EPNLLMIPVR

SEQ ID NO: 7513 - protein, 10 aa, Artificial Sequence
  Description of Artificial Sequence: Synthetic epitope
EPNLNEVIFE

SEQ ID NO: 7514 - protein, 10 aa, Artificial Sequence
  Description of Artificial Sequence: Synthetic epitope
EPNMASISGQ

SEQ ID NO: 7515 - protein, 10 aa, Artificial Sequence
  Description of Artificial Sequence: Synthetic epitope
EPPHLSIEVS

SEQ ID NO: 7516 - protein, 10 aa, Artificial Sequence
  Description of Artificial Sequence: Synthetic epitope
EPPKSTALAA

SEQ ID NO: 7517 - protein, 10 aa, Artificial Sequence
  Description of Artificial Sequence: Synthetic epitope
EPPLAKEMKE

SEQ ID NO: 7518 - protein, 10 aa, Artificial Sequence
  Description of Artificial Sequence: Synthetic epitope
EPPSTVEIRQ

SEQ ID NO: 7519 - protein, 10 aa, Artificial Sequence
  Description of Artificial Sequence: Synthetic epitope
EPPSVITKWG

SEQ ID NO: 7520 - protein, 10 aa, Artificial Sequence
  Description of Artificial Sequence: Synthetic epitope
EPPSVTSGKI

SEQ ID NO: 7521 - protein, 10 aa, Artificial Sequence
  Description of Artificial Sequence: Synthetic epitope
EPQAAEAAEN

SEQ ID NO: 7522 - protein, 10 aa, Artificial Sequence
  Description of Artificial Sequence: Synthetic epitope
EPQEDAKELQ

SEQ ID NO: 7523 - protein, 10 aa, Artificial Sequence
  Description of Artificial Sequence: Synthetic epitope
EPQEQNLQNK

SEQ ID NO: 7524 - protein, 10 aa, Artificial Sequence
  Description of Artificial Sequence: Synthetic epitope
EPQFRSELSS

SEQ ID NO: 7525 - protein, 10 aa, Artificial Sequence
  Description of Artificial Sequence: Synthetic epitope
EPQLAAKKAA

SEQ ID NO: 7526 - protein, 10 aa, Artificial Sequence
  Description of Artificial Sequence: Synthetic epitope
EPQLRLLSQA

SEQ ID NO: 7527 - protein, 10 aa, Artificial Sequence
  Description of Artificial Sequence: Synthetic epitope
EPQMKETIMN

SEQ ID NO: 7528 - protein, 10 aa, Artificial Sequence
  Description of Artificial Sequence: Synthetic epitope
EPQMKVAALR

SEQ ID NO: 7529 - protein, 10 aa, Artificial Sequence
  Description of Artificial Sequence: Synthetic epitope
EPQNLRTLQG

SEQ ID NO: 7530 - protein, 10 aa, Artificial Sequence
  Description of Artificial Sequence: Synthetic epitope
EPREMKHMPE

SEQ ID NO: 7531 - protein, 10 aa, Artificial Sequence
  Description of Artificial Sequence: Synthetic epitope
EPRGSSLSSE

SEQ ID NO: 7532 - protein, 10 aa, Artificial Sequence
  Description of Artificial Sequence: Synthetic epitope
EPRLAEAGES

SEQ ID NO: 7533 - protein, 10 aa, Artificial Sequence
  Description of Artificial Sequence: Synthetic epitope
EPRQTVLTAA

SEQ ID NO: 7534 - protein, 10 aa, Artificial Sequence
  Description of Artificial Sequence: Synthetic epitope
EPRSNISSGG

SEQ ID NO: 7535 - protein, 10 aa, Artificial Sequence
  Description of Artificial Sequence: Synthetic epitope
EPSATEALSM

SEQ ID NO: 7536 - protein, 10 aa, Artificial Sequence
  Description of Artificial Sequence: Synthetic epitope
EPSDGVSDSH

SEQ ID NO: 7537 - protein, 10 aa, Artificial Sequence
  Description of Artificial Sequence: Synthetic epitope
EPSEIVEEQM

SEQ ID NO: 7538 - protein, 10 aa, Artificial Sequence
  Description of Artificial Sequence: Synthetic epitope
EPSISKKLNK

SEQ ID NO: 7539 - protein, 10 aa, Artificial Sequence
  Description of Artificial Sequence: Synthetic epitope
EPSKASVPNE

SEQ ID NO: 7540 - protein, 10 aa, Artificial Sequence
  Description of Artificial Sequence: Synthetic epitope
EPSKSASSKG

SEQ ID NO: 7541 - protein, 10 aa, Artificial Sequence
  Description of Artificial Sequence: Synthetic epitope
EPSLGTSAAQ

SEQ ID NO: 7542 - protein, 10 aa, Artificial Sequence
  Description of Artificial Sequence: Synthetic epitope
EPSNIFEKID

SEQ ID NO: 7543 - protein, 10 aa, Artificial Sequence
  Description of Artificial Sequence: Synthetic epitope
EPSQETASHN

SEQ ID NO: 7544 - protein, 10 aa, Artificial Sequence
  Description of Artificial Sequence: Synthetic epitope
EPSQNKQKGV

SEQ ID NO: 7545 - protein, 10 aa, Artificial Sequence
  Description of Artificial Sequence: Synthetic epitope
EPSSVASDVS

SEQ ID NO: 7546 - protein, 10 aa, Artificial Sequence
  Description of Artificial Sequence: Synthetic epitope
EPSVEQDAES

SEQ ID NO: 7547 - protein, 10 aa, Artificial Sequence
  Description of Artificial Sequence: Synthetic epitope
EPTEARVVPG

SEQ ID NO: 7548 - protein, 10 aa, Artificial Sequence
  Description of Artificial Sequence: Synthetic epitope
EPTKIGSGRS

SEQ ID NO: 7549 - protein, 10 aa, Artificial Sequence
  Description of Artificial Sequence: Synthetic epitope
EPTKTTMQGH

SEQ ID NO: 7550 - protein, 10 aa, Artificial Sequence
  Description of Artificial Sequence: Synthetic epitope
EPTLLREPQA

SEQ ID NO: 7551 - protein, 10 aa, Artificial Sequence
  Description of Artificial Sequence: Synthetic epitope
EPTQNITTKG

SEQ ID NO: 7552 - protein, 10 aa, Artificial Sequence
  Description of Artificial Sequence: Synthetic epitope
EPTSESSMED

SEQ ID NO: 7553 - protein, 10 aa, Artificial Sequence
  Description of Artificial Sequence: Synthetic epitope
EPTVTTSDAA

SEQ ID NO: 7554 - protein, 10 aa, Artificial Sequence
  Description of Artificial Sequence: Synthetic epitope
EPVASGWELA

SEQ ID NO: 7555 - protein, 10 aa, Artificial Sequence
  Description of Artificial Sequence: Synthetic epitope
EPVETAVDNN

SEQ ID NO: 7556 - protein, 10 aa, Artificial Sequence
  Description of Artificial Sequence: Synthetic epitope
EPVGSAFTKF

SEQ ID NO: 7557 - protein, 10 aa, Artificial Sequence
  Description of Artificial Sequence: Synthetic epitope
EPVKTEMGPP

SEQ ID NO: 7558 - protein, 10 aa, Artificial Sequence
  Description of Artificial Sequence: Synthetic epitope
EPVKTSALIP

SEQ ID NO: 7559 - protein, 10 aa, Artificial Sequence
  Description of Artificial Sequence: Synthetic epitope
EPVLTRIKEN

SEQ ID NO: 7560 - protein, 10 aa, Artificial Sequence
  Description of Artificial Sequence: Synthetic epitope
EPVQVASRWH

SEQ ID NO: 7561 - protein, 10 aa, Artificial Sequence
  Description of Artificial Sequence: Synthetic epitope
EPVRQSSDKM

SEQ ID NO: 7562 - protein, 10 aa, Artificial Sequence
  Description of Artificial Sequence: Synthetic epitope
EPVTEINEDS

SEQ ID NO: 7563 - protein, 10 aa, Artificial Sequence
  Description of Artificial Sequence: Synthetic epitope
EPYGSQRDIA

SEQ ID NO: 7564 - protein, 10 aa, Artificial Sequence
  Description of Artificial Sequence: Synthetic epitope
EPYLEKGSAL

SEQ ID NO: 7565 - protein, 10 aa, Artificial Sequence
  Description of Artificial Sequence: Synthetic epitope
EPYQYTLAST

SEQ ID NO: 7566 - protein, 10 aa, Artificial Sequence
  Description of Artificial Sequence: Synthetic epitope
EPYSTTMLQV

SEQ ID NO: 7567 - protein, 10 aa, Artificial Sequence
  Description of Artificial Sequence: Synthetic epitope
EPYYKMQTRA

SEQ ID NO: 7568 - protein, 10 aa, Artificial Sequence
  Description of Artificial Sequence: Synthetic epitope
EQAALAANQE

SEQ ID NO: 7569 - protein, 10 aa, Artificial Sequence
  Description of Artificial Sequence: Synthetic epitope
EQAASANKPN

SEQ ID NO: 7570 - protein, 10 aa, Artificial Sequence
  Description of Artificial Sequence: Synthetic epitope
EQAATGKQLE

SEQ ID NO: 7571 - protein, 10 aa, Artificial Sequence
  Description of Artificial Sequence: Synthetic epitope
EQAAVLLQRS

SEQ ID NO: 7572 - protein, 10 aa, Artificial Sequence
  Description of Artificial Sequence: Synthetic epitope
EQADIALTRG

SEQ ID NO: 7573 - protein, 10 aa, Artificial Sequence
  Description of Artificial Sequence: Synthetic epitope
EQAEALKAKG

SEQ ID NO: 7574 - protein, 10 aa, Artificial Sequence
  Description of Artificial Sequence: Synthetic epitope
EQAEASEFPV

SEQ ID NO: 7575 - protein, 10 aa, Artificial Sequence
  Description of Artificial Sequence: Synthetic epitope
EQAESNMKRY

SEQ ID NO: 7576 - protein, 10 aa, Artificial Sequence
  Description of Artificial Sequence: Synthetic epitope
EQAFQASQIK

SEQ ID NO: 7577 - protein, 10 aa, Artificial Sequence
  Description of Artificial Sequence: Synthetic epitope
EQAFSSHILE

SEQ ID NO: 7578 - protein, 10 aa, Artificial Sequence
  Description of Artificial Sequence: Synthetic epitope
EQAKAAKKGM

SEQ ID NO: 7579 - protein, 10 aa, Artificial Sequence
  Description of Artificial Sequence: Synthetic epitope
EQAKKEIESQ

SEQ ID NO: 7580 - protein, 10 aa, Artificial Sequence
  Description of Artificial Sequence: Synthetic epitope
EQAKKESEDQ

SEQ ID NO: 7581 - protein, 10 aa, Artificial Sequence
  Description of Artificial Sequence: Synthetic epitope
EQAKKLEKRN

SEQ ID NO: 7582 - protein, 10 aa, Artificial Sequence
  Description of Artificial Sequence: Synthetic epitope
EQAKTQNINK

SEQ ID NO: 7583 - protein, 10 aa, Artificial Sequence
  Description of Artificial Sequence: Synthetic epitope
EQAKVVRGFQ

SEQ ID NO: 7584 - protein, 10 aa, Artificial Sequence
  Description of Artificial Sequence: Synthetic epitope
EQALAVTDDK

SEQ ID NO: 7585 - protein, 10 aa, Artificial Sequence
  Description of Artificial Sequence: Synthetic epitope
EQALEKTKAN

SEQ ID NO: 7586 - protein, 10 aa, Artificial Sequence
  Description of Artificial Sequence: Synthetic epitope
EQALNQNPKD

SEQ ID NO: 7587 - protein, 10 aa, Artificial Sequence
  Description of Artificial Sequence: Synthetic epitope
EQALQTTLQE

SEQ ID NO: 7588 - protein, 10 aa, Artificial Sequence
  Description of Artificial Sequence: Synthetic epitope
EQALSEVASS

SEQ ID NO: 7589 - protein, 10 aa, Artificial Sequence
  Description of Artificial Sequence: Synthetic epitope
EQALSTLQLE

SEQ ID NO: 7590 - protein, 10 aa, Artificial Sequence
  Description of Artificial Sequence: Synthetic epitope
EQANLSVSAA

SEQ ID NO: 7591 - protein, 10 aa, Artificial Sequence
  Description of Artificial Sequence: Synthetic epitope
EQAQARAQAQ

SEQ ID NO: 7592 - protein, 10 aa, Artificial Sequence
  Description of Artificial Sequence: Synthetic epitope
EQAQEHEVET

SEQ ID NO: 7593 - protein, 10 aa, Artificial Sequence
  Description of Artificial Sequence: Synthetic epitope
EQAQKLTATQ

SEQ ID NO: 7594 - protein, 10 aa, Artificial Sequence
  Description of Artificial Sequence: Synthetic epitope
EQAQQEEQRE

SEQ ID NO: 7595 - protein, 10 aa, Artificial Sequence
  Description of Artificial Sequence: Synthetic epitope
EQAQTTDWRA

SEQ ID NO: 7596 - protein, 10 aa, Artificial Sequence
  Description of Artificial Sequence: Synthetic epitope
EQARAEIEKM

SEQ ID NO: 7597 - protein, 10 aa, Artificial Sequence
  Description of Artificial Sequence: Synthetic epitope
EQARAELLSL

SEQ ID NO: 7598 - protein, 10 aa, Artificial Sequence
  Description of Artificial Sequence: Synthetic epitope
EQARERIKSR

SEQ ID NO: 7599 - protein, 10 aa, Artificial Sequence
  Description of Artificial Sequence: Synthetic epitope
EQARGWAHIE

SEQ ID NO: 7600 - protein, 10 aa, Artificial Sequence
  Description of Artificial Sequence: Synthetic epitope
EQASDTANYG

SEQ ID NO: 7601 - protein, 10 aa, Artificial Sequence
  Description of Artificial Sequence: Synthetic epitope
EQASLDASSN

SEQ ID NO: 7602 - protein, 10 aa, Artificial Sequence
  Description of Artificial Sequence: Synthetic epitope
EQASQAHGAR

SEQ ID NO: 7603 - protein, 10 aa, Artificial Sequence
  Description of Artificial Sequence: Synthetic epitope
EQASVMQKRK

SEQ ID NO: 7604 - protein, 10 aa, Artificial Sequence
  Description of Artificial Sequence: Synthetic epitope
EQAVLAVKAL

SEQ ID NO: 7605 - protein, 10 aa, Artificial Sequence
  Description of Artificial Sequence: Synthetic epitope
EQDASSAKLL

SEQ ID NO: 7606 - protein, 10 aa, Artificial Sequence
  Description of Artificial Sequence: Synthetic epitope
EQDDISSHSQ

SEQ ID NO: 7607 - protein, 10 aa, Artificial Sequence
  Description of Artificial Sequence: Synthetic epitope
EQDEDDSQEE

SEQ ID NO: 7608 - protein, 10 aa, Artificial Sequence
  Description of Artificial Sequence: Synthetic epitope
EQDGRLATYS

SEQ ID NO: 7609 - protein, 10 aa, Artificial Sequence
  Description of Artificial Sequence: Synthetic epitope
EQDIEAASSQ

SEQ ID NO: 7610 - protein, 10 aa, Artificial Sequence
  Description of Artificial Sequence: Synthetic epitope
EQDLAALDAE

SEQ ID NO: 7611 - protein, 10 aa, Artificial Sequence
  Description of Artificial Sequence: Synthetic epitope
EQDLANDTVQ

SEQ ID NO: 7612 - protein, 10 aa, Artificial Sequence
  Description of Artificial Sequence: Synthetic epitope
EQDMDSMTDS

SEQ ID NO: 7613 - protein, 10 aa, Artificial Sequence
  Description of Artificial Sequence: Synthetic epitope
EQDMVNGIML

SEQ ID NO: 7614 - protein, 10 aa, Artificial Sequence
  Description of Artificial Sequence: Synthetic epitope
EQDQGSDKGE

SEQ ID NO: 7615 - protein, 10 aa, Artificial Sequence
  Description of Artificial Sequence: Synthetic epitope
EQDQKEVEAE

SEQ ID NO: 7616 - protein, 10 aa, Artificial Sequence
  Description of Artificial Sequence: Synthetic epitope
EQDVSAEQSL

SEQ ID NO: 7617 - protein, 10 aa, Artificial Sequence
  Description of Artificial Sequence: Synthetic epitope
EQEAAEADLS

SEQ ID NO: 7618 - protein, 10 aa, Artificial Sequence
  Description of Artificial Sequence: Synthetic epitope
EQEAISFQDR

SEQ ID NO: 7619 - protein, 10 aa, Artificial Sequence
  Description of Artificial Sequence: Synthetic epitope
EQEAKQINKP

SEQ ID NO: 7620 - protein, 10 aa, Artificial Sequence
  Description of Artificial Sequence: Synthetic epitope
EQEEDDEKSD

SEQ ID NO: 7621 - protein, 10 aa, Artificial Sequence
  Description of Artificial Sequence: Synthetic epitope
EQEELMQQLT

SEQ ID NO: 7622 - protein, 10 aa, Artificial Sequence
  Description of Artificial Sequence: Synthetic epitope
EQEEQLGEMI

SEQ ID NO: 7623 - protein, 10 aa, Artificial Sequence
  Description of Artificial Sequence: Synthetic epitope
EQEESRTVQR

SEQ ID NO: 7624 - protein, 10 aa, Artificial Sequence
  Description of Artificial Sequence: Synthetic epitope
EQEGKSANYH

SEQ ID NO: 7625 - protein, 10 aa, Artificial Sequence
  Description of Artificial Sequence: Synthetic epitope
EQEGMEESPQ

SEQ ID NO: 7626 - protein, 10 aa, Artificial Sequence
  Description of Artificial Sequence: Synthetic epitope
EQEGSRSKLA

SEQ ID NO: 7627 - protein, 10 aa, Artificial Sequence
  Description of Artificial Sequence: Synthetic epitope
EQEIEKAKTE

SEQ ID NO: 7628 - protein, 10 aa, Artificial Sequence
  Description of Artificial Sequence: Synthetic epitope
EQEIRSTSLH

SEQ ID NO: 7629 - protein, 10 aa, Artificial Sequence
  Description of Artificial Sequence: Synthetic epitope
EQEKLASMKK

SEQ ID NO: 7630 - protein, 10 aa, Artificial Sequence
  Description of Artificial Sequence: Synthetic epitope
EQELASLEKG

SEQ ID NO: 7631 - protein, 10 aa, Artificial Sequence
  Description of Artificial Sequence: Synthetic epitope
EQELQALIQQ

SEQ ID NO: 7632 - protein, 10 aa, Artificial Sequence
  Description of Artificial Sequence: Synthetic epitope
EQELQQTQES

SEQ ID NO: 7633 - protein, 10 aa, Artificial Sequence
  Description of Artificial Sequence: Synthetic epitope
EQELRAVVES

SEQ ID NO: 7634 - protein, 10 aa, Artificial Sequence
  Description of Artificial Sequence: Synthetic epitope
EQELSEKNVQ

SEQ ID NO: 7635 - protein, 10 aa, Artificial Sequence
  Description of Artificial Sequence: Synthetic epitope
EQEMSKLLDD

SEQ ID NO: 7636 - protein, 10 aa, Artificial Sequence
  Description of Artificial Sequence: Synthetic epitope
EQEMSPTRTE

SEQ ID NO: 7637 - protein, 10 aa, Artificial Sequence
  Description of Artificial Sequence: Synthetic epitope
EQENMKELVV

SEQ ID NO: 7638 - protein, 10 aa, Artificial Sequence
  Description of Artificial Sequence: Synthetic epitope
EQENQQLKEG

SEQ ID NO: 7639 - protein, 10 aa, Artificial Sequence
  Description of Artificial Sequence: Synthetic epitope
EQEPEERASL

SEQ ID NO: 7640 - protein, 10 aa, Artificial Sequence
  Description of Artificial Sequence: Synthetic epitope
EQEQDEKEAI

SEQ ID NO: 7641 - protein, 10 aa, Artificial Sequence
  Description of Artificial Sequence: Synthetic epitope
EQEQEKGQED

SEQ ID NO: 7642 - protein, 10 aa, Artificial Sequence
  Description of Artificial Sequence: Synthetic epitope
EQEQISEALN

SEQ ID NO: 7643 - protein, 10 aa, Artificial Sequence
  Description of Artificial Sequence: Synthetic epitope
EQEQRRLSQE

SEQ ID NO: 7644 - protein, 10 aa, Artificial Sequence
  Description of Artificial Sequence: Synthetic epitope
EQEQSSKRLS

SEQ ID NO: 7645 - protein, 10 aa, Artificial Sequence
  Description of Artificial Sequence: Synthetic epitope
EQEQVRATSQ

SEQ ID NO: 7646 - protein, 10 aa, Artificial Sequence
  Description of Artificial Sequence: Synthetic epitope
EQERRLQAER

SEQ ID NO: 7647 - protein, 10 aa, Artificial Sequence
  Description of Artificial Sequence: Synthetic epitope
EQESRFVDWP

SEQ ID NO: 7648 - protein, 10 aa, Artificial Sequence
  Description of Artificial Sequence: Synthetic epitope
EQESTLGQKH

SEQ ID NO: 7649 - protein, 10 aa, Artificial Sequence
  Description of Artificial Sequence: Synthetic epitope
EQFEKNTKSD

SEQ ID NO: 7650 - protein, 10 aa, Artificial Sequence
  Description of Artificial Sequence: Synthetic epitope
EQFFQLVKLR

SEQ ID NO: 7651 - protein, 10 aa, Artificial Sequence
  Description of Artificial Sequence: Synthetic epitope
EQFLKALQNA

SEQ ID NO: 7652 - protein, 10 aa, Artificial Sequence
  Description of Artificial Sequence: Synthetic epitope
EQFQTLVQVA

SEQ ID NO: 7653 - protein, 10 aa, Artificial Sequence
  Description of Artificial Sequence: Synthetic epitope
EQFSQEHSVK

SEQ ID NO: 7654 - protein, 10 aa, Artificial Sequence
  Description of Artificial Sequence: Synthetic epitope
EQFSQNAFQV

SEQ ID NO: 7655 - protein, 10 aa, Artificial Sequence
  Description of Artificial Sequence: Synthetic epitope
EQFSSPSVKK

SEQ ID NO: 7656 - protein, 10 aa, Artificial Sequence
  Description of Artificial Sequence: Synthetic epitope
EQGAAVAQPN

SEQ ID NO: 7657 - protein, 10 aa, Artificial Sequence
  Description of Artificial Sequence: Synthetic epitope
EQGARTNEID

SEQ ID NO: 7658 - protein, 10 aa, Artificial Sequence
  Description of Artificial Sequence: Synthetic epitope
EQGATDHIKV

SEQ ID NO: 7659 - protein, 10 aa, Artificial Sequence
  Description of Artificial Sequence: Synthetic epitope
EQGDSRNNSS

SEQ ID NO: 7660 - protein, 10 aa, Artificial Sequence
  Description of Artificial Sequence: Synthetic epitope
EQGDSSQQSL

SEQ ID NO: 7661 - protein, 10 aa, Artificial Sequence
  Description of Artificial Sequence: Synthetic epitope
EQGFKSSQGD

SEQ ID NO: 7662 - protein, 10 aa, Artificial Sequence
  Description of Artificial Sequence: Synthetic epitope
EQGIHPPQAQ

SEQ ID NO: 7663 - protein, 10 aa, Artificial Sequence
  Description of Artificial Sequence: Synthetic epitope
EQGIKEPQLD

SEQ ID NO: 7664 - protein, 10 aa, Artificial Sequence
  Description of Artificial Sequence: Synthetic epitope
EQGKASLIRD

SEQ ID NO: 7665 - protein, 10 aa, Artificial Sequence
  Description of Artificial Sequence: Synthetic epitope
EQGKDIDLNK

SEQ ID NO: 7666 - protein, 10 aa, Artificial Sequence
  Description of Artificial Sequence: Synthetic epitope
EQGKEQAMFD

SEQ ID NO: 7667 - protein, 10 aa, Artificial Sequence
  Description of Artificial Sequence: Synthetic epitope
EQGPAEMMKK

SEQ ID NO: 7668 - protein, 10 aa, Artificial Sequence
  Description of Artificial Sequence: Synthetic epitope
EQGRKASTAF

SEQ ID NO: 7669 - protein, 10 aa, Artificial Sequence
  Description of Artificial Sequence: Synthetic epitope
EQGSGLSMDQ

SEQ ID NO: 7670 - protein, 10 aa, Artificial Sequence
  Description of Artificial Sequence: Synthetic epitope
EQGSKSEGES

SEQ ID NO: 7671 - protein, 10 aa, Artificial Sequence
  Description of Artificial Sequence: Synthetic epitope
EQGSSRESVA

SEQ ID NO: 7672 - protein, 10 aa, Artificial Sequence
  Description of Artificial Sequence: Synthetic epitope
EQGTLAEEHA

SEQ ID NO: 7673 - protein, 10 aa, Artificial Sequence
  Description of Artificial Sequence: Synthetic epitope
EQGTSADEAF

SEQ ID NO: 7674 - protein, 10 aa, Artificial Sequence
  Description of Artificial Sequence: Synthetic epitope
EQHAKVYEQL

SEQ ID NO: 7675 - protein, 10 aa, Artificial Sequence
  Description of Artificial Sequence: Synthetic epitope
EQHASVAGQH

SEQ ID NO: 7676 - protein, 10 aa, Artificial Sequence
  Description of Artificial Sequence: Synthetic epitope
EQHIRRDKAT

SEQ ID NO: 7677 - protein, 10 aa, Artificial Sequence
  Description of Artificial Sequence: Synthetic epitope
EQHMLAVSEE

SEQ ID NO: 7678 - protein, 10 aa, Artificial Sequence
  Description of Artificial Sequence: Synthetic epitope
EQHVHNEKSV

SEQ ID NO: 7679 - protein, 10 aa, Artificial Sequence
  Description of Artificial Sequence: Synthetic epitope
EQIALLVKDM

SEQ ID NO: 7680 - protein, 10 aa, Artificial Sequence
  Description of Artificial Sequence: Synthetic epitope
EQIALNVDGA

SEQ ID NO: 7681 - protein, 10 aa, Artificial Sequence
  Description of Artificial Sequence: Synthetic epitope
EQIATDQHAI

SEQ ID NO: 7682 - protein, 10 aa, Artificial Sequence
  Description of Artificial Sequence: Synthetic epitope
EQIEESKEQQ

SEQ ID NO: 7683 - protein, 10 aa, Artificial Sequence
  Description of Artificial Sequence: Synthetic epitope
EQIEKFQEKA

SEQ ID NO: 7684 - protein, 10 aa, Artificial Sequence
  Description of Artificial Sequence: Synthetic epitope
EQIGALADQH

SEQ ID NO: 7685 - protein, 10 aa, Artificial Sequence
  Description of Artificial Sequence: Synthetic epitope
EQIKIMKQQE

SEQ ID NO: 7686 - protein, 10 aa, Artificial Sequence
  Description of Artificial Sequence: Synthetic epitope
EQILSLTAKK

SEQ ID NO: 7687 - protein, 10 aa, Artificial Sequence
  Description of Artificial Sequence: Synthetic epitope
EQINISQDWS

SEQ ID NO: 7688 - protein, 10 aa, Artificial Sequence
  Description of Artificial Sequence: Synthetic epitope
EQINSVSEHE

SEQ ID NO: 7689 - protein, 10 aa, Artificial Sequence
  Description of Artificial Sequence: Synthetic epitope
EQISDIDDAV

SEQ ID NO: 7690 - protein, 10 aa, Artificial Sequence
  Description of Artificial Sequence: Synthetic epitope
EQITGQIDKS

SEQ ID NO: 7691 - protein, 10 aa, Artificial Sequence
  Description of Artificial Sequence: Synthetic epitope
EQIVKQSTEL

SEQ ID NO: 7692 - protein, 10 aa, Artificial Sequence
  Description of Artificial Sequence: Synthetic epitope
EQIVVALGGE

SEQ ID NO: 7693 - protein, 10 aa, Artificial Sequence
  Description of Artificial Sequence: Synthetic epitope
EQKAITAPVS

SEQ ID NO: 7694 - protein, 10 aa, Artificial Sequence
  Description of Artificial Sequence: Synthetic epitope
EQKARRSGNP

SEQ ID NO: 7695 - protein, 10 aa, Artificial Sequence
  Description of Artificial Sequence: Synthetic epitope
EQKATKKSKV

SEQ ID NO: 7696 - protein, 10 aa, Artificial Sequence
  Description of Artificial Sequence: Synthetic epitope
EQKENTKEQA

SEQ ID NO: 7697 - protein, 10 aa, Artificial Sequence
  Description of Artificial Sequence: Synthetic epitope
EQKENVEKEG

SEQ ID NO: 7698 - protein, 10 aa, Artificial Sequence
  Description of Artificial Sequence: Synthetic epitope
EQKESVAATP

SEQ ID NO: 7699 - protein, 10 aa, Artificial Sequence
  Description of Artificial Sequence: Synthetic epitope
EQKFGLFSAE

SEQ ID NO: 7700 - protein, 10 aa, Artificial Sequence
  Description of Artificial Sequence: Synthetic epitope
EQKFGLFSAE

SEQ ID NO: 7701 - protein, 10 aa, Artificial Sequence
  Description of Artificial Sequence: Synthetic epitope
EQKGKVLHEE

SEQ ID NO: 7702 - protein, 10 aa, Artificial Sequence
  Description of Artificial Sequence: Synthetic epitope
EQKKAAKREE

SEQ ID NO: 7703 - protein, 10 aa, Artificial Sequence
  Description of Artificial Sequence: Synthetic epitope
EQKKISSKIN

SEQ ID NO: 7704 - protein, 10 aa, Artificial Sequence
  Description of Artificial Sequence: Synthetic epitope
EQKKPLAKKV

SEQ ID NO: 7705 - protein, 10 aa, Artificial Sequence
  Description of Artificial Sequence: Synthetic epitope
EQKLKKLTED

SEQ ID NO: 7706 - protein, 10 aa, Artificial Sequence
  Description of Artificial Sequence: Synthetic epitope
EQKLQLLEEK

SEQ ID NO: 7707 - protein, 10 aa, Artificial Sequence
  Description of Artificial Sequence: Synthetic epitope
EQKLREVSSP

SEQ ID NO: 7708 - protein, 10 aa, Artificial Sequence
  Description of Artificial Sequence: Synthetic epitope
EQKPIQDPQP

SEQ ID NO: 7709 - protein, 10 aa, Artificial Sequence
  Description of Artificial Sequence: Synthetic epitope
EQKQRSQPIS

SEQ ID NO: 7710 - protein, 10 aa, Artificial Sequence
  Description of Artificial Sequence: Synthetic epitope
EQKQYQDSTE

SEQ ID NO: 7711 - protein, 10 aa, Artificial Sequence
  Description of Artificial Sequence: Synthetic epitope
EQKRQVGREQ

SEQ ID NO: 7712 - protein, 10 aa, Artificial Sequence
  Description of Artificial Sequence: Synthetic epitope
EQKSKSKQHR

SEQ ID NO: 7713 - protein, 10 aa, Artificial Sequence
  Description of Artificial Sequence: Synthetic epitope
EQKSTAVKAL

SEQ ID NO: 7714 - protein, 10 aa, Artificial Sequence
  Description of Artificial Sequence: Synthetic epitope
EQKTDEERLA

SEQ ID NO: 7715 - protein, 10 aa, Artificial Sequence
  Description of Artificial Sequence: Synthetic epitope
EQKTDTRENP

SEQ ID NO: 7716 - protein, 10 aa, Artificial Sequence
  Description of Artificial Sequence: Synthetic epitope
EQKTDTSDKK

SEQ ID NO: 7717 - protein, 10 aa, Artificial Sequence
  Description of Artificial Sequence: Synthetic epitope
EQKTERMDKV

SEQ ID NO: 7718 - protein, 10 aa, Artificial Sequence
  Description of Artificial Sequence: Synthetic epitope
EQKVELAQLQ

SEQ ID NO: 7719 - protein, 10 aa, Artificial Sequence
  Description of Artificial Sequence: Synthetic epitope
EQKVVELYKQ

SEQ ID NO: 7720 - protein, 10 aa, Artificial Sequence
  Description of Artificial Sequence: Synthetic epitope
EQKYLTLNTE

SEQ ID NO: 7721 - protein, 10 aa, Artificial Sequence
  Description of Artificial Sequence: Synthetic epitope
EQLALAGDKI

SEQ ID NO: 7722 - protein, 10 aa, Artificial Sequence
  Description of Artificial Sequence: Synthetic epitope
EQLANTGAQA

SEQ ID NO: 7723 - protein, 10 aa, Artificial Sequence
  Description of Artificial Sequence: Synthetic epitope
EQLASRSNSL

SEQ ID NO: 7724 - protein, 10 aa, Artificial Sequence
  Description of Artificial Sequence: Synthetic epitope
EQLASVQYTL

SEQ ID NO: 7725 - protein, 10 aa, Artificial Sequence
  Description of Artificial Sequence: Synthetic epitope
EQLDILSVGI

SEQ ID NO: 7726 - protein, 10 aa, Artificial Sequence
  Description of Artificial Sequence: Synthetic epitope
EQLDQAGSAN

SEQ ID NO: 7727 - protein, 10 aa, Artificial Sequence
  Description of Artificial Sequence: Synthetic epitope
EQLDQEREKR

SEQ ID NO: 7728 - protein, 10 aa, Artificial Sequence
  Description of Artificial Sequence: Synthetic epitope
EQLDTETSTT

SEQ ID NO: 7729 - protein, 10 aa, Artificial Sequence
  Description of Artificial Sequence: Synthetic epitope
EQLEGLKHAQ

SEQ ID NO: 7730 - protein, 10 aa, Artificial Sequence
  Description of Artificial Sequence: Synthetic epitope
EQLELLSEKK

SEQ ID NO: 7731 - protein, 10 aa, Artificial Sequence
  Description of Artificial Sequence: Synthetic epitope
EQLELRGSKV

SEQ ID NO: 7732 - protein, 10 aa, Artificial Sequence
  Description of Artificial Sequence: Synthetic epitope
EQLFLVKEAE

SEQ ID NO: 7733 - protein, 10 aa, Artificial Sequence
  Description of Artificial Sequence: Synthetic epitope
EQLGAYIQES

SEQ ID NO: 7734 - protein, 10 aa, Artificial Sequence
  Description of Artificial Sequence: Synthetic epitope
EQLGMTNRLP

SEQ ID NO: 7735 - protein, 10 aa, Artificial Sequence
  Description of Artificial Sequence: Synthetic epitope
EQLHLKEATE

SEQ ID NO: 7736 - protein, 10 aa, Artificial Sequence
  Description of Artificial Sequence: Synthetic epitope
EQLIKKSQQK

SEQ ID NO: 7737 - protein, 10 aa, Artificial Sequence
  Description of Artificial Sequence: Synthetic epitope
EQLILILELY

SEQ ID NO: 7738 - protein, 10 aa, Artificial Sequence
  Description of Artificial Sequence: Synthetic epitope
EQLKLLKEKY

SEQ ID NO: 7739 - protein, 10 aa, Artificial Sequence
  Description of Artificial Sequence: Synthetic epitope
EQLKSSLIML

SEQ ID NO: 7740 - protein, 10 aa, Artificial Sequence
  Description of Artificial Sequence: Synthetic epitope
EQLLESEPQT

SEQ ID NO: 7741 - protein, 10 aa, Artificial Sequence
  Description of Artificial Sequence: Synthetic epitope
EQLLNYNVSR

SEQ ID NO: 7742 - protein, 10 aa, Artificial Sequence
  Description of Artificial Sequence: Synthetic epitope
EQLLQEEQSE

SEQ ID NO: 7743 - protein, 10 aa, Artificial Sequence
  Description of Artificial Sequence: Synthetic epitope
EQLLQLMTSR

SEQ ID NO: 7744 - protein, 10 aa, Artificial Sequence
  Description of Artificial Sequence: Synthetic epitope
EQLLSSLTSS

SEQ ID NO: 7745 - protein, 10 aa, Artificial Sequence
  Description of Artificial Sequence: Synthetic epitope
EQLNAMITES

SEQ ID NO: 7746 - protein, 10 aa, Artificial Sequence
  Description of Artificial Sequence: Synthetic epitope
EQLNEALTTY

SEQ ID NO: 7747 - protein, 10 aa, Artificial Sequence
  Description of Artificial Sequence: Synthetic epitope
EQLQADYLAG

SEQ ID NO: 7748 - protein, 10 aa, Artificial Sequence
  Description of Artificial Sequence: Synthetic epitope
EQLQEIGQEK

SEQ ID NO: 7749 - protein, 10 aa, Artificial Sequence
  Description of Artificial Sequence: Synthetic epitope
EQLQLEEQEQ

SEQ ID NO: 7750 - protein, 10 aa, Artificial Sequence
  Description of Artificial Sequence: Synthetic epitope
EQLSEAALKA

SEQ ID NO: 7751 - protein, 10 aa, Artificial Sequence
  Description of Artificial Sequence: Synthetic epitope
EQLSPQAATS

SEQ ID NO: 7752 - protein, 10 aa, Artificial Sequence
  Description of Artificial Sequence: Synthetic epitope
EQLSTGASQA

SEQ ID NO: 7753 - protein, 10 aa, Artificial Sequence
  Description of Artificial Sequence: Synthetic epitope
EQLTAIEGAV

SEQ ID NO: 7754 - protein, 10 aa, Artificial Sequence
  Description of Artificial Sequence: Synthetic epitope
EQLTDADTKD

SEQ ID NO: 7755 - protein, 10 aa, Artificial Sequence
  Description of Artificial Sequence: Synthetic epitope
EQLTKMGRGK

SEQ ID NO: 7756 - protein, 10 aa, Artificial Sequence
  Description of Artificial Sequence: Synthetic epitope
EQLVAEVVEK

SEQ ID NO: 7757 - protein, 10 aa, Artificial Sequence
  Description of Artificial Sequence: Synthetic epitope
EQLVNEMASD

SEQ ID NO: 7758 - protein, 10 aa, Artificial Sequence
  Description of Artificial Sequence: Synthetic epitope
EQLVRLESNA

SEQ ID NO: 7759 - protein, 10 aa, Artificial Sequence
  Description of Artificial Sequence: Synthetic epitope
EQLVTSLTLH

SEQ ID NO: 7760 - protein, 10 aa, Artificial Sequence
  Description of Artificial Sequence: Synthetic epitope
EQMAEKKSKK

SEQ ID NO: 7761 - protein, 10 aa, Artificial Sequence
  Description of Artificial Sequence: Synthetic epitope
EQMALLQETA

SEQ ID NO: 7762 - protein, 10 aa, Artificial Sequence
  Description of Artificial Sequence: Synthetic epitope
EQMGQVTSGP

SEQ ID NO: 7763 - protein, 10 aa, Artificial Sequence
  Description of Artificial Sequence: Synthetic epitope
EQMMKAGEQG

SEQ ID NO: 7764 - protein, 10 aa, Artificial Sequence
  Description of Artificial Sequence: Synthetic epitope
EQMSATASRV

SEQ ID NO: 7765 - protein, 10 aa, Artificial Sequence
  Description of Artificial Sequence: Synthetic epitope
EQNARMLQDG

SEQ ID NO: 7766 - protein, 10 aa, Artificial Sequence
  Description of Artificial Sequence: Synthetic epitope
EQNAVEEAMG

SEQ ID NO: 7767 - protein, 10 aa, Artificial Sequence
  Description of Artificial Sequence: Synthetic epitope
EQNGSKVEGN

SEQ ID NO: 7768 - protein, 10 aa, Artificial Sequence
  Description of Artificial Sequence: Synthetic epitope
EQNKESQNIK

SEQ ID NO: 7769 - protein, 10 aa, Artificial Sequence
  Description of Artificial Sequence: Synthetic epitope
EQNKESQNIK

SEQ ID NO: 7770 - protein, 10 aa, Artificial Sequence
  Description of Artificial Sequence: Synthetic epitope
EQNKESQNIK

SEQ ID NO: 7771 - protein, 10 aa, Artificial Sequence
  Description of Artificial Sequence: Synthetic epitope
EQNKNQKEAT

SEQ ID NO: 7772 - protein, 10 aa, Artificial Sequence
  Description of Artificial Sequence: Synthetic epitope
EQNKSFEAEL

SEQ ID NO: 7773 - protein, 10 aa, Artificial Sequence
  Description of Artificial Sequence: Synthetic epitope
EQNMMTKVRE

SEQ ID NO: 7774 - protein, 10 aa, Artificial Sequence
  Description of Artificial Sequence: Synthetic epitope
EQNRNGKSDT

SEQ ID NO: 7775 - protein, 10 aa, Artificial Sequence
  Description of Artificial Sequence: Synthetic epitope
EQNSEATAGG

SEQ ID NO: 7776 - protein, 10 aa, Artificial Sequence
  Description of Artificial Sequence: Synthetic epitope
EQNSKKQTQD

SEQ ID NO: 7777 - protein, 10 aa, Artificial Sequence
  Description of Artificial Sequence: Synthetic epitope
EQNTIEKEEF

SEQ ID NO: 7778 - protein, 10 aa, Artificial Sequence
  Description of Artificial Sequence: Synthetic epitope
EQNTKELKAS

SEQ ID NO: 7779 - protein, 10 aa, Artificial Sequence
  Description of Artificial Sequence: Synthetic epitope
EQNVISVITE

SEQ ID NO: 7780 - protein, 10 aa, Artificial Sequence
  Description of Artificial Sequence: Synthetic epitope
EQPLTSTKTP

SEQ ID NO: 7781 - protein, 10 aa, Artificial Sequence
  Description of Artificial Sequence: Synthetic epitope
EQPRLSTSKG

SEQ ID NO: 7782 - protein, 10 aa, Artificial Sequence
  Description of Artificial Sequence: Synthetic epitope
EQPSSIVHRY

SEQ ID NO: 7783 - protein, 10 aa, Artificial Sequence
  Description of Artificial Sequence: Synthetic epitope
EQPTTSQPET

SEQ ID NO: 7784 - protein, 10 aa, Artificial Sequence
  Description of Artificial Sequence: Synthetic epitope
EQPVEITKPK

SEQ ID NO: 7785 - protein, 10 aa, Artificial Sequence
  Description of Artificial Sequence: Synthetic epitope
EQQAADAKKQ

SEQ ID NO: 7786 - protein, 10 aa, Artificial Sequence
  Description of Artificial Sequence: Synthetic epitope
EQQALAKVLI

SEQ ID NO: 7787 - protein, 10 aa, Artificial Sequence
  Description of Artificial Sequence: Synthetic epitope
EQQALEVKER

SEQ ID NO: 7788 - protein, 10 aa, Artificial Sequence
  Description of Artificial Sequence: Synthetic epitope
EQQASGQQKL

SEQ ID NO: 7789 - protein, 10 aa, Artificial Sequence
  Description of Artificial Sequence: Synthetic epitope
EQQATDQRSN

SEQ ID NO: 7790 - protein, 10 aa, Artificial Sequence
  Description of Artificial Sequence: Synthetic epitope
EQQDQRPDQE

SEQ ID NO: 7791 - protein, 10 aa, Artificial Sequence
  Description of Artificial Sequence: Synthetic epitope
EQQEEGINRL

SEQ ID NO: 7792 - protein, 10 aa, Artificial Sequence
  Description of Artificial Sequence: Synthetic epitope
EQQEIELQKK

SEQ ID NO: 7793 - protein, 10 aa, Artificial Sequence
  Description of Artificial Sequence: Synthetic epitope
EQQGEKTEVL

SEQ ID NO: 7794 - protein, 10 aa, Artificial Sequence
  Description of Artificial Sequence: Synthetic epitope
EQQHGVIPDR

SEQ ID NO: 7795 - protein, 10 aa, Artificial Sequence
  Description of Artificial Sequence: Synthetic epitope
EQQKAVTANS

SEQ ID NO: 7796 - protein, 10 aa, Artificial Sequence
  Description of Artificial Sequence: Synthetic epitope
EQQKKVDAET

SEQ ID NO: 7797 - protein, 10 aa, Artificial Sequence
  Description of Artificial Sequence: Synthetic epitope
EQQKRQSLEQ

SEQ ID NO: 7798 - protein, 10 aa, Artificial Sequence
  Description of Artificial Sequence: Synthetic epitope
EQQLQSTQRS

SEQ ID NO: 7799 - protein, 10 aa, Artificial Sequence
  Description of Artificial Sequence: Synthetic epitope
EQQLVELRAD

SEQ ID NO: 7800 - protein, 10 aa, Artificial Sequence
  Description of Artificial Sequence: Synthetic epitope
EQQRQEQAGK

SEQ ID NO: 7801 - protein, 10 aa, Artificial Sequence
  Description of Artificial Sequence: Synthetic epitope
EQQSESRLQL

SEQ ID NO: 7802 - protein, 10 aa, Artificial Sequence
  Description of Artificial Sequence: Synthetic epitope
EQQSTSLGQD

SEQ ID NO: 7803 - protein, 10 aa, Artificial Sequence
  Description of Artificial Sequence: Synthetic epitope
EQRATLMGGQ

SEQ ID NO: 7804 - protein, 10 aa, Artificial Sequence
  Description of Artificial Sequence: Synthetic epitope
EQRDEQTSRN

SEQ ID NO: 7805 - protein, 10 aa, Artificial Sequence
  Description of Artificial Sequence: Synthetic epitope
EQRDILALME

SEQ ID NO: 7806 - protein, 10 aa, Artificial Sequence
  Description of Artificial Sequence: Synthetic epitope
EQRGLASKAA

SEQ ID NO: 7807 - protein, 10 aa, Artificial Sequence
  Description of Artificial Sequence: Synthetic epitope
EQRIVELSEA

SEQ ID NO: 7808 - protein, 10 aa, Artificial Sequence
  Description of Artificial Sequence: Synthetic epitope
EQRLAAVSKA

SEQ ID NO: 7809 - protein, 10 aa, Artificial Sequence
  Description of Artificial Sequence: Synthetic epitope
EQRLKNEEHI

SEQ ID NO: 7810 - protein, 10 aa, Artificial Sequence
  Description of Artificial Sequence: Synthetic epitope
EQRLKREEVE

SEQ ID NO: 7811 - protein, 10 aa, Artificial Sequence
  Description of Artificial Sequence: Synthetic epitope
EQRQKPATET

SEQ ID NO: 7812 - protein, 10 aa, Artificial Sequence
  Description of Artificial Sequence: Synthetic epitope
EQRRTVQDKK

SEQ ID NO: 7813 - protein, 10 aa, Artificial Sequence
  Description of Artificial Sequence: Synthetic epitope
EQRSINSVTS

SEQ ID NO: 7814 - protein, 10 aa, Artificial Sequence
  Description of Artificial Sequence: Synthetic epitope
EQRSKVRHVD

SEQ ID NO: 7815 - protein, 10 aa, Artificial Sequence
  Description of Artificial Sequence: Synthetic epitope
EQSAFKAQVS

SEQ ID NO: 7816 - protein, 10 aa, Artificial Sequence
  Description of Artificial Sequence: Synthetic epitope
EQSAQAAQQV

SEQ ID NO: 7817 - protein, 10 aa, Artificial Sequence
  Description of Artificial Sequence: Synthetic epitope
EQSEKAARKS

SEQ ID NO: 7818 - protein, 10 aa, Artificial Sequence
  Description of Artificial Sequence: Synthetic epitope
EQSIFKKAMD

SEQ ID NO: 7819 - protein, 10 aa, Artificial Sequence
  Description of Artificial Sequence: Synthetic epitope
EQSKQKKVAP

SEQ ID NO: 7820 - protein, 10 aa, Artificial Sequence
  Description of Artificial Sequence: Synthetic epitope
EQSKSKREPE

SEQ ID NO: 7821 - protein, 10 aa, Artificial Sequence
  Description of Artificial Sequence: Synthetic epitope
EQSKSLEKPK

SEQ ID NO: 7822 - protein, 10 aa, Artificial Sequence
  Description of Artificial Sequence: Synthetic epitope
EQSKTSNNGG

SEQ ID NO: 7823 - protein, 10 aa, Artificial Sequence
  Description of Artificial Sequence: Synthetic epitope
EQSNKNLDIS

SEQ ID NO: 7824 - protein, 10 aa, Artificial Sequence
  Description of Artificial Sequence: Synthetic epitope
EQSPRASEET

SEQ ID NO: 7825 - protein, 10 aa, Artificial Sequence
  Description of Artificial Sequence: Synthetic epitope
EQSPVSYSKR

SEQ ID NO: 7826 - protein, 10 aa, Artificial Sequence
  Description of Artificial Sequence: Synthetic epitope
EQSQETKQRA

SEQ ID NO: 7827 - protein, 10 aa, Artificial Sequence
  Description of Artificial Sequence: Synthetic epitope
EQSRAANQEQ

SEQ ID NO: 7828 - protein, 10 aa, Artificial Sequence
  Description of Artificial Sequence: Synthetic epitope
EQSRGAGKNR

SEQ ID NO: 7829 - protein, 10 aa, Artificial Sequence
  Description of Artificial Sequence: Synthetic epitope
EQSRNSLRKE

SEQ ID NO: 7830 - protein, 10 aa, Artificial Sequence
  Description of Artificial Sequence: Synthetic epitope
EQSRSAVQAK

SEQ ID NO: 7831 - protein, 10 aa, Artificial Sequence
  Description of Artificial Sequence: Synthetic epitope
EQSSAASELA

SEQ ID NO: 7832 - protein, 10 aa, Artificial Sequence
  Description of Artificial Sequence: Synthetic epitope
EQSSKLLAEK

SEQ ID NO: 7833 - protein, 10 aa, Artificial Sequence
  Description of Artificial Sequence: Synthetic epitope
EQSSQAYEQR

SEQ ID NO: 7834 - protein, 10 aa, Artificial Sequence
  Description of Artificial Sequence: Synthetic epitope
EQSSVQATQS

SEQ ID NO: 7835 - protein, 10 aa, Artificial Sequence
  Description of Artificial Sequence: Synthetic epitope
EQSTFKVLST

SEQ ID NO: 7836 - protein, 10 aa, Artificial Sequence
  Description of Artificial Sequence: Synthetic epitope
EQSTIFMLSQ

SEQ ID NO: 7837 - protein, 10 aa, Artificial Sequence
  Description of Artificial Sequence: Synthetic epitope
EQSTIGTTNQ

SEQ ID NO: 7838 - protein, 10 aa, Artificial Sequence
  Description of Artificial Sequence: Synthetic epitope
EQSTRMQYIE

SEQ ID NO: 7839 - protein, 10 aa, Artificial Sequence
  Description of Artificial Sequence: Synthetic epitope
EQSTVINGIT

SEQ ID NO: 7840 - protein, 10 aa, Artificial Sequence
  Description of Artificial Sequence: Synthetic epitope
EQSVSIQVRT

SEQ ID NO: 7841 - protein, 10 aa, Artificial Sequence
  Description of Artificial Sequence: Synthetic epitope
EQSYSSGDSD

SEQ ID NO: 7842 - protein, 10 aa, Artificial Sequence
  Description of Artificial Sequence: Synthetic epitope
EQTAKGPIAA

SEQ ID NO: 7843 - protein, 10 aa, Artificial Sequence
  Description of Artificial Sequence: Synthetic epitope
EQTAVETKKQ

SEQ ID NO: 7844 - protein, 10 aa, Artificial Sequence
  Description of Artificial Sequence: Synthetic epitope
EQTDAESKDA

SEQ ID NO: 7845 - protein, 10 aa, Artificial Sequence
  Description of Artificial Sequence: Synthetic epitope
EQTDEELAVD

SEQ ID NO: 7846 - protein, 10 aa, Artificial Sequence
  Description of Artificial Sequence: Synthetic epitope
EQTERRLPTQ

SEQ ID NO: 7847 - protein, 10 aa, Artificial Sequence
  Description of Artificial Sequence: Synthetic epitope
EQTETESTLS

SEQ ID NO: 7848 - protein, 10 aa, Artificial Sequence
  Description of Artificial Sequence: Synthetic epitope
EQTFATMVSS

SEQ ID NO: 7849 - protein, 10 aa, Artificial Sequence
  Description of Artificial Sequence: Synthetic epitope
EQTIQKLQQD

SEQ ID NO: 7850 - protein, 10 aa, Artificial Sequence
  Description of Artificial Sequence: Synthetic epitope
EQTKDNKAQD

SEQ ID NO: 7851 - protein, 10 aa, Artificial Sequence
  Description of Artificial Sequence: Synthetic epitope
EQTLSAQGVS

SEQ ID NO: 7852 - protein, 10 aa, Artificial Sequence
  Description of Artificial Sequence: Synthetic epitope
EQTMQKNAIH

SEQ ID NO: 7853 - protein, 10 aa, Artificial Sequence
  Description of Artificial Sequence: Synthetic epitope
EQTVAKAQTV

SEQ ID NO: 7854 - protein, 10 aa, Artificial Sequence
  Description of Artificial Sequence: Synthetic epitope
EQTVQLQSEL

SEQ ID NO: 7855 - protein, 10 aa, Artificial Sequence
  Description of Artificial Sequence: Synthetic epitope
EQTVTLLQKD

SEQ ID NO: 7856 - protein, 10 aa, Artificial Sequence
  Description of Artificial Sequence: Synthetic epitope
EQVATLELIR

SEQ ID NO: 7857 - protein, 10 aa, Artificial Sequence
  Description of Artificial Sequence: Synthetic epitope
EQVDEITTST

SEQ ID NO: 7858 - protein, 10 aa, Artificial Sequence
  Description of Artificial Sequence: Synthetic epitope
EQVDREQQGR

SEQ ID NO: 7859 - protein, 10 aa, Artificial Sequence
  Description of Artificial Sequence: Synthetic epitope
EQVEQQIQKK

SEQ ID NO: 7860 - protein, 10 aa, Artificial Sequence
  Description of Artificial Sequence: Synthetic epitope
EQVESYDEAG

SEQ ID NO: 7861 - protein, 10 aa, Artificial Sequence
  Description of Artificial Sequence: Synthetic epitope
EQVFKVASSD

SEQ ID NO: 7862 - protein, 10 aa, Artificial Sequence
  Description of Artificial Sequence: Synthetic epitope
EQVIEVVKSA

SEQ ID NO: 7863 - protein, 10 aa, Artificial Sequence
  Description of Artificial Sequence: Synthetic epitope
EQVINLVTYR

SEQ ID NO: 7864 - protein, 10 aa, Artificial Sequence
  Description of Artificial Sequence: Synthetic epitope
EQVLAKLENR

SEQ ID NO: 7865 - protein, 10 aa, Artificial Sequence
  Description of Artificial Sequence: Synthetic epitope
EQVRTKRFTD

SEQ ID NO: 7866 - protein, 10 aa, Artificial Sequence
  Description of Artificial Sequence: Synthetic epitope
EQVSGVLGIE

SEQ ID NO: 7867 - protein, 10 aa, Artificial Sequence
  Description of Artificial Sequence: Synthetic epitope
EQVSLEKNMQ

SEQ ID NO: 7868 - protein, 10 aa, Artificial Sequence
  Description of Artificial Sequence: Synthetic epitope
EQVSQSSQPR

SEQ ID NO: 7869 - protein, 10 aa, Artificial Sequence
  Description of Artificial Sequence: Synthetic epitope
EQVTIVNPEP

SEQ ID NO: 7870 - protein, 10 aa, Artificial Sequence
  Description of Artificial Sequence: Synthetic epitope
EQVTKVTVGR

SEQ ID NO: 7871 - protein, 10 aa, Artificial Sequence
  Description of Artificial Sequence: Synthetic epitope
EQVVDTMALS

SEQ ID NO: 7872 - protein, 10 aa, Artificial Sequence
  Description of Artificial Sequence: Synthetic epitope
EQVVMGNKLL

SEQ ID NO: 7873 - protein, 10 aa, Artificial Sequence
  Description of Artificial Sequence: Synthetic epitope
EQVVSEQTLV

SEQ ID NO: 7874 - protein, 10 aa, Artificial Sequence
  Description of Artificial Sequence: Synthetic epitope
EQVYPSSVEE

SEQ ID NO: 7875 - protein, 10 aa, Artificial Sequence
  Description of Artificial Sequence: Synthetic epitope
EQVYQQDWAQ

SEQ ID NO: 7876 - protein, 10 aa, Artificial Sequence
  Description of Artificial Sequence: Synthetic epitope
EQWADAADVS

SEQ ID NO: 7877 - protein, 10 aa, Artificial Sequence
  Description of Artificial Sequence: Synthetic epitope
EQWLSAAERL

SEQ ID NO: 7878 - protein, 10 aa, Artificial Sequence
  Description of Artificial Sequence: Synthetic epitope
EQWQTMEINM

SEQ ID NO: 7879 - protein, 10 aa, Artificial Sequence
  Description of Artificial Sequence: Synthetic epitope
EQYELSMSSA

SEQ ID NO: 7880 - protein, 10 aa, Artificial Sequence
  Description of Artificial Sequence: Synthetic epitope
EQYKLLIKAL

SEQ ID NO: 7881 - protein, 10 aa, Artificial Sequence
  Description of Artificial Sequence: Synthetic epitope
EQYLSVAQSL

SEQ ID NO: 7882 - protein, 10 aa, Artificial Sequence
  Description of Artificial Sequence: Synthetic epitope
EQYQAMVTSL

SEQ ID NO: 7883 - protein, 10 aa, Artificial Sequence
  Description of Artificial Sequence: Synthetic epitope
EQYTTATEGI

SEQ ID NO: 7884 - protein, 10 aa, Artificial Sequence
  Description of Artificial Sequence: Synthetic epitope
ERAAKAAVNK

SEQ ID NO: 7885 - protein, 10 aa, Artificial Sequence
  Description of Artificial Sequence: Synthetic epitope
ERAARLRTAS

SEQ ID NO: 7886 - protein, 10 aa, Artificial Sequence
  Description of Artificial Sequence: Synthetic epitope
ERAATVTKKT

SEQ ID NO: 7887 - protein, 10 aa, Artificial Sequence
  Description of Artificial Sequence: Synthetic epitope
ERADSSHLSI

SEQ ID NO: 7888 - protein, 10 aa, Artificial Sequence
  Description of Artificial Sequence: Synthetic epitope
ERADTAEKAL

SEQ ID NO: 7889 - protein, 10 aa, Artificial Sequence
  Description of Artificial Sequence: Synthetic epitope
ERAEKEEAQS

SEQ ID NO: 7890 - protein, 10 aa, Artificial Sequence
  Description of Artificial Sequence: Synthetic epitope
ERAESEQEAY

SEQ ID NO: 7891 - protein, 10 aa, Artificial Sequence
  Description of Artificial Sequence: Synthetic epitope
ERAEVLKSED

SEQ ID NO: 7892 - protein, 10 aa, Artificial Sequence
  Description of Artificial Sequence: Synthetic epitope
ERAHDERSEA

SEQ ID NO: 7893 - protein, 10 aa, Artificial Sequence
  Description of Artificial Sequence: Synthetic epitope
ERAHDGVHFE

SEQ ID NO: 7894 - protein, 10 aa, Artificial Sequence
  Description of Artificial Sequence: Synthetic epitope
ERAISSVEPK

SEQ ID NO: 7895 - protein, 10 aa, Artificial Sequence
  Description of Artificial Sequence: Synthetic epitope
ERAISTLLKK

SEQ ID NO: 7896 - protein, 10 aa, Artificial Sequence
  Description of Artificial Sequence: Synthetic epitope
ERAITEASPA

SEQ ID NO: 7897 - protein, 10 aa, Artificial Sequence
  Description of Artificial Sequence: Synthetic epitope
ERAKEFKTRL

SEQ ID NO: 7898 - protein, 10 aa, Artificial Sequence
  Description of Artificial Sequence: Synthetic epitope
ERAKVNPITF

SEQ ID NO: 7899 - protein, 10 aa, Artificial Sequence
  Description of Artificial Sequence: Synthetic epitope
ERALAKLTRL

SEQ ID NO: 7900 - protein, 10 aa, Artificial Sequence
  Description of Artificial Sequence: Synthetic epitope
ERALPAMMQW

SEQ ID NO: 7901 - protein, 10 aa, Artificial Sequence
  Description of Artificial Sequence: Synthetic epitope
ERALRAMQVA

SEQ ID NO: 7902 - protein, 10 aa, Artificial Sequence
  Description of Artificial Sequence: Synthetic epitope
ERALTESKET

SEQ ID NO: 7903 - protein, 10 aa, Artificial Sequence
  Description of Artificial Sequence: Synthetic epitope
ERAQEAMMDE

SEQ ID NO: 7904 - protein, 10 aa, Artificial Sequence
  Description of Artificial Sequence: Synthetic epitope
ERARKLSQGI

SEQ ID NO: 7905 - protein, 10 aa, Artificial Sequence
  Description of Artificial Sequence: Synthetic epitope
ERASARSKRS

SEQ ID NO: 7906 - protein, 10 aa, Artificial Sequence
  Description of Artificial Sequence: Synthetic epitope
ERDAKERDTM

SEQ ID NO: 7907 - protein, 10 aa, Artificial Sequence
  Description of Artificial Sequence: Synthetic epitope
ERDAQFTQRK

SEQ ID NO: 7908 - protein, 10 aa, Artificial Sequence
  Description of Artificial Sequence: Synthetic epitope
ERDERHKTKG

SEQ ID NO: 7909 - protein, 10 aa, Artificial Sequence
  Description of Artificial Sequence: Synthetic epitope
ERDEVFEKEP

SEQ ID NO: 7910 - protein, 10 aa, Artificial Sequence
  Description of Artificial Sequence: Synthetic epitope
ERDLKLQEDL

SEQ ID NO: 7911 - protein, 10 aa, Artificial Sequence
  Description of Artificial Sequence: Synthetic epitope
ERDQFFSELQ

SEQ ID NO: 7912 - protein, 10 aa, Artificial Sequence
  Description of Artificial Sequence: Synthetic epitope
ERDRAQLMAE

SEQ ID NO: 7913 - protein, 10 aa, Artificial Sequence
  Description of Artificial Sequence: Synthetic epitope
ERDRQHFDKE

SEQ ID NO: 7914 - protein, 10 aa, Artificial Sequence
  Description of Artificial Sequence: Synthetic epitope
ERDRQSQIQK

SEQ ID NO: 7915 - protein, 10 aa, Artificial Sequence
  Description of Artificial Sequence: Synthetic epitope
ERDSREEVER

SEQ ID NO: 7916 - protein, 10 aa, Artificial Sequence
  Description of Artificial Sequence: Synthetic epitope
ERDTKEAIAN

SEQ ID NO: 7917 - protein, 10 aa, Artificial Sequence
  Description of Artificial Sequence: Synthetic epitope
EREAEPAKEA

SEQ ID NO: 7918 - protein, 10 aa, Artificial Sequence
  Description of Artificial Sequence: Synthetic epitope
EREAILAIHK

SEQ ID NO: 7919 - protein, 10 aa, Artificial Sequence
  Description of Artificial Sequence: Synthetic epitope
EREALQQEQR

SEQ ID NO: 7920 - protein, 10 aa, Artificial Sequence
  Description of Artificial Sequence: Synthetic epitope
EREAQASLRE

SEQ ID NO: 7921 - protein, 10 aa, Artificial Sequence
  Description of Artificial Sequence: Synthetic epitope
EREATSKNDQ

SEQ ID NO: 7922 - protein, 10 aa, Artificial Sequence
  Description of Artificial Sequence: Synthetic epitope
EREDEIATME

SEQ ID NO: 7923 - protein, 10 aa, Artificial Sequence
  Description of Artificial Sequence: Synthetic epitope
EREEGALRRA

SEQ ID NO: 7924 - protein, 10 aa, Artificial Sequence
  Description of Artificial Sequence: Synthetic epitope
EREEQETTSS

SEQ ID NO: 7925 - protein, 10 aa, Artificial Sequence
  Description of Artificial Sequence: Synthetic epitope
EREETSKLSA

SEQ ID NO: 7926 - protein, 10 aa, Artificial Sequence
  Description of Artificial Sequence: Synthetic epitope
EREETVVSPW

SEQ ID NO: 7927 - protein, 10 aa, Artificial Sequence
  Description of Artificial Sequence: Synthetic epitope
EREMQEMSGE

SEQ ID NO: 7928 - protein, 10 aa, Artificial Sequence
  Description of Artificial Sequence: Synthetic epitope
EREPVAERHL

SEQ ID NO: 7929 - protein, 10 aa, Artificial Sequence
  Description of Artificial Sequence: Synthetic epitope
EREQAKEKVK

SEQ ID NO: 7930 - protein, 10 aa, Artificial Sequence
  Description of Artificial Sequence: Synthetic epitope
EREQLQTIYG

SEQ ID NO: 7931 - protein, 10 aa, Artificial Sequence
  Description of Artificial Sequence: Synthetic epitope
EREQQVTQKK

SEQ ID NO: 7932 - protein, 10 aa, Artificial Sequence
  Description of Artificial Sequence: Synthetic epitope
EREQSRRSLR

SEQ ID NO: 7933 - protein, 10 aa, Artificial Sequence
  Description of Artificial Sequence: Synthetic epitope
ERERASQEEQ

SEQ ID NO: 7934 - protein, 10 aa, Artificial Sequence
  Description of Artificial Sequence: Synthetic epitope
ERERQLREEQ

SEQ ID NO: 7935 - protein, 10 aa, Artificial Sequence
  Description of Artificial Sequence: Synthetic epitope
ERESAKLRKK

SEQ ID NO: 7936 - protein, 10 aa, Artificial Sequence
  Description of Artificial Sequence: Synthetic epitope
ERESKRTSEN

SEQ ID NO: 7937 - protein, 10 aa, Artificial Sequence
  Description of Artificial Sequence: Synthetic epitope
ERESVSTSQS

SEQ ID NO: 7938 - protein, 10 aa, Artificial Sequence
  Description of Artificial Sequence: Synthetic epitope
ERETRREKIL

SEQ ID NO: 7939 - protein, 10 aa, Artificial Sequence
  Description of Artificial Sequence: Synthetic epitope
ERETVESEPW

SEQ ID NO: 7940 - protein, 10 aa, Artificial Sequence
  Description of Artificial Sequence: Synthetic epitope
ERETVPVELE

SEQ ID NO: 7941 - protein, 10 aa, Artificial Sequence
  Description of Artificial Sequence: Synthetic epitope
ERFAEAVDPA

SEQ ID NO: 7942 - protein, 10 aa, Artificial Sequence
  Description of Artificial Sequence: Synthetic epitope
ERFFTSSTSL

SEQ ID NO: 7943 - protein, 10 aa, Artificial Sequence
  Description of Artificial Sequence: Synthetic epitope
ERFGEASLQG

SEQ ID NO: 7944 - protein, 10 aa, Artificial Sequence
  Description of Artificial Sequence: Synthetic epitope
ERFGSTQEYE

SEQ ID NO: 7945 - protein, 10 aa, Artificial Sequence
  Description of Artificial Sequence: Synthetic epitope
ERFLSTSSTG

SEQ ID NO: 7946 - protein, 10 aa, Artificial Sequence
  Description of Artificial Sequence: Synthetic epitope
ERFMTLAANH

SEQ ID NO: 7947 - protein, 10 aa, Artificial Sequence
  Description of Artificial Sequence: Synthetic epitope
ERFNKLVVRM

SEQ ID NO: 7948 - protein, 10 aa, Artificial Sequence
  Description of Artificial Sequence: Synthetic epitope
ERFRLTSEST

SEQ ID NO: 7949 - protein, 10 aa, Artificial Sequence
  Description of Artificial Sequence: Synthetic epitope
ERFRQTSEST

SEQ ID NO: 7950 - protein, 10 aa, Artificial Sequence
  Description of Artificial Sequence: Synthetic epitope
ERFSDAALVS

SEQ ID NO: 7951 - protein, 10 aa, Artificial Sequence
  Description of Artificial Sequence: Synthetic epitope
ERFTFAFEKD

SEQ ID NO: 7952 - protein, 10 aa, Artificial Sequence
  Description of Artificial Sequence: Synthetic epitope
ERGASVTLRT

SEQ ID NO: 7953 - protein, 10 aa, Artificial Sequence
  Description of Artificial Sequence: Synthetic epitope
ERGDDIQKDL

SEQ ID NO: 7954 - protein, 10 aa, Artificial Sequence
  Description of Artificial Sequence: Synthetic epitope
ERGGQELRKE

SEQ ID NO: 7955 - protein, 10 aa, Artificial Sequence
  Description of Artificial Sequence: Synthetic epitope
ERGKDKISEE

SEQ ID NO: 7956 - protein, 10 aa, Artificial Sequence
  Description of Artificial Sequence: Synthetic epitope
ERGQQEKEAS

SEQ ID NO: 7957 - protein, 10 aa, Artificial Sequence
  Description of Artificial Sequence: Synthetic epitope
ERGSNTSMLR

SEQ ID NO: 7958 - protein, 10 aa, Artificial Sequence
  Description of Artificial Sequence: Synthetic epitope
ERHAAVLVET

SEQ ID NO: 7959 - protein, 10 aa, Artificial Sequence
  Description of Artificial Sequence: Synthetic epitope
ERHQKKANTN

SEQ ID NO: 7960 - protein, 10 aa, Artificial Sequence
  Description of Artificial Sequence: Synthetic epitope
ERHTQIQWKK

SEQ ID NO: 7961 - protein, 10 aa, Artificial Sequence
  Description of Artificial Sequence: Synthetic epitope
ERIETDIKQP

SEQ ID NO: 7962 - protein, 10 aa, Artificial Sequence
  Description of Artificial Sequence: Synthetic epitope
ERIGARALVA

SEQ ID NO: 7963 - protein, 10 aa, Artificial Sequence
  Description of Artificial Sequence: Synthetic epitope
ERIMTRKELL

SEQ ID NO: 7964 - protein, 10 aa, Artificial Sequence
  Description of Artificial Sequence: Synthetic epitope
ERIPQTSRTV

SEQ ID NO: 7965 - protein, 10 aa, Artificial Sequence
  Description of Artificial Sequence: Synthetic epitope
ERIPRADELN

SEQ ID NO: 7966 - protein, 10 aa, Artificial Sequence
  Description of Artificial Sequence: Synthetic epitope
ERIQMINGSD

SEQ ID NO: 7967 - protein, 10 aa, Artificial Sequence
  Description of Artificial Sequence: Synthetic epitope
ERIQQSLSNP

SEQ ID NO: 7968 - protein, 10 aa, Artificial Sequence
  Description of Artificial Sequence: Synthetic epitope
ERIRRWVSEK

SEQ ID NO: 7969 - protein, 10 aa, Artificial Sequence
  Description of Artificial Sequence: Synthetic epitope
ERISTAKTEV

SEQ ID NO: 7970 - protein, 10 aa, Artificial Sequence
  Description of Artificial Sequence: Synthetic epitope
ERISTVVRKE

SEQ ID NO: 7971 - protein, 10 aa, Artificial Sequence
  Description of Artificial Sequence: Synthetic epitope
ERITPFTKGK

SEQ ID NO: 7972 - protein, 10 aa, Artificial Sequence
  Description of Artificial Sequence: Synthetic epitope
ERIYNISDAN

SEQ ID NO: 7973 - protein, 10 aa, Artificial Sequence
  Description of Artificial Sequence: Synthetic epitope
ERKAAGSRDV

SEQ ID NO: 7974 - protein, 10 aa, Artificial Sequence
  Description of Artificial Sequence: Synthetic epitope
ERKADALKAM

SEQ ID NO: 7975 - protein, 10 aa, Artificial Sequence
  Description of Artificial Sequence: Synthetic epitope
ERKAGNQAIQ

SEQ ID NO: 7976 - protein, 10 aa, Artificial Sequence
  Description of Artificial Sequence: Synthetic epitope
ERKAITLDLK

SEQ ID NO: 7977 - protein, 10 aa, Artificial Sequence
  Description of Artificial Sequence: Synthetic epitope
ERKAKRTRAV

SEQ ID NO: 7978 - protein, 10 aa, Artificial Sequence
  Description of Artificial Sequence: Synthetic epitope
ERKAQANEQR

SEQ ID NO: 7979 - protein, 10 aa, Artificial Sequence
  Description of Artificial Sequence: Synthetic epitope
ERKEQTYVQK

SEQ ID NO: 7980 - protein, 10 aa, Artificial Sequence
  Description of Artificial Sequence: Synthetic epitope
ERKESHGINN

SEQ ID NO: 7981 - protein, 10 aa, Artificial Sequence
  Description of Artificial Sequence: Synthetic epitope
ERKETRAGNP

SEQ ID NO: 7982 - protein, 10 aa, Artificial Sequence
  Description of Artificial Sequence: Synthetic epitope
ERKGAAQEKK

SEQ ID NO: 7983 - protein, 10 aa, Artificial Sequence
  Description of Artificial Sequence: Synthetic epitope
ERKGTSLSSE

SEQ ID NO: 7984 - protein, 10 aa, Artificial Sequence
  Description of Artificial Sequence: Synthetic epitope
ERKIPLKQLQ

SEQ ID NO: 7985 - protein, 10 aa, Artificial Sequence
  Description of Artificial Sequence: Synthetic epitope
ERKKEEVGVE

SEQ ID NO: 7986 - protein, 10 aa, Artificial Sequence
  Description of Artificial Sequence: Synthetic epitope
ERKKSLQAGV

SEQ ID NO: 7987 - protein, 10 aa, Artificial Sequence
  Description of Artificial Sequence: Synthetic epitope
ERKMSKKFVE

SEQ ID NO: 7988 - protein, 10 aa, Artificial Sequence
  Description of Artificial Sequence: Synthetic epitope
ERKNGSTAVA

SEQ ID NO: 7989 - protein, 10 aa, Artificial Sequence
  Description of Artificial Sequence: Synthetic epitope
ERKNKSRTSQ

SEQ ID NO: 7990 - protein, 10 aa, Artificial Sequence
  Description of Artificial Sequence: Synthetic epitope
ERKNSARKAS

SEQ ID NO: 7991 - protein, 10 aa, Artificial Sequence
  Description of Artificial Sequence: Synthetic epitope
ERKQESEPRI

SEQ ID NO: 7992 - protein, 10 aa, Artificial Sequence
  Description of Artificial Sequence: Synthetic epitope
ERKSKRSETD

SEQ ID NO: 7993 - protein, 10 aa, Artificial Sequence
  Description of Artificial Sequence: Synthetic epitope
ERKSSKPHED

SEQ ID NO: 7994 - protein, 10 aa, Artificial Sequence
  Description of Artificial Sequence: Synthetic epitope
ERKTSSAESS

SEQ ID NO: 7995 - protein, 10 aa, Artificial Sequence
  Description of Artificial Sequence: Synthetic epitope
ERKTSSAESS

SEQ ID NO: 7996 - protein, 10 aa, Artificial Sequence
  Description of Artificial Sequence: Synthetic epitope
ERKVEKLIVP

SEQ ID NO: 7997 - protein, 10 aa, Artificial Sequence
  Description of Artificial Sequence: Synthetic epitope
ERKVLSILSR

SEQ ID NO: 7998 - protein, 10 aa, Artificial Sequence
  Description of Artificial Sequence: Synthetic epitope
ERKVTAIQTE

SEQ ID NO: 7999 - protein, 10 aa, Artificial Sequence
  Description of Artificial Sequence: Synthetic epitope
ERLAALSSRV

SEQ ID NO: 8000 - protein, 10 aa, Artificial Sequence
  Description of Artificial Sequence: Synthetic epitope
ERLALLVDTV

SEQ ID NO: 8001 - protein, 10 aa, Artificial Sequence
  Description of Artificial Sequence: Synthetic epitope
ERLDAESDLQ

SEQ ID NO: 8002 - protein, 10 aa, Artificial Sequence
  Description of Artificial Sequence: Synthetic epitope
ERLEHKKAKE

SEQ ID NO: 8003 - protein, 10 aa, Artificial Sequence
  Description of Artificial Sequence: Synthetic epitope
ERLEMPVARE

SEQ ID NO: 8004 - protein, 10 aa, Artificial Sequence
  Description of Artificial Sequence: Synthetic epitope
ERLEQWAGQA

SEQ ID NO: 8005 - protein, 10 aa, Artificial Sequence
  Description of Artificial Sequence: Synthetic epitope
ERLGSSVLSN

SEQ ID NO: 8006 - protein, 10 aa, Artificial Sequence
  Description of Artificial Sequence: Synthetic epitope
ERLIKKLSMT

SEQ ID NO: 8007 - protein, 10 aa, Artificial Sequence
  Description of Artificial Sequence: Synthetic epitope
ERLKIRWHTS

SEQ ID NO: 8008 - protein, 10 aa, Artificial Sequence
  Description of Artificial Sequence: Synthetic epitope
ERLKTKQKEL

SEQ ID NO: 8009 - protein, 10 aa, Artificial Sequence
  Description of Artificial Sequence: Synthetic epitope
ERLKYEIAEV

SEQ ID NO: 8010 - protein, 10 aa, Artificial Sequence
  Description of Artificial Sequence: Synthetic epitope
ERLLAMLEQK

SEQ ID NO: 8011 - protein, 10 aa, Artificial Sequence
  Description of Artificial Sequence: Synthetic epitope
ERLNAVVRRL

SEQ ID NO: 8012 - protein, 10 aa, Artificial Sequence
  Description of Artificial Sequence: Synthetic epitope
ERLRILAQSN

SEQ ID NO: 8013 - protein, 10 aa, Artificial Sequence
  Description of Artificial Sequence: Synthetic epitope
ERLSDSAKQE

SEQ ID NO: 8014 - protein, 10 aa, Artificial Sequence
  Description of Artificial Sequence: Synthetic epitope
ERLSIRKEGD

SEQ ID NO: 8015 - protein, 10 aa, Artificial Sequence
  Description of Artificial Sequence: Synthetic epitope
ERLSRPSTTH

SEQ ID NO: 8016 - protein, 10 aa, Artificial Sequence
  Description of Artificial Sequence: Synthetic epitope
ERLTQDAVAK

SEQ ID NO: 8017 - protein, 10 aa, Artificial Sequence
  Description of Artificial Sequence: Synthetic epitope
ERLVAEADEG

SEQ ID NO: 8018 - protein, 10 aa, Artificial Sequence
  Description of Artificial Sequence: Synthetic epitope
ERLVNAIESK

SEQ ID NO: 8019 - protein, 10 aa, Artificial Sequence
  Description of Artificial Sequence: Synthetic epitope
ERLVRAYELM

SEQ ID NO: 8020 - protein, 10 aa, Artificial Sequence
  Description of Artificial Sequence: Synthetic epitope
ERMAAPTKKE

SEQ ID NO: 8021 - protein, 10 aa, Artificial Sequence
  Description of Artificial Sequence: Synthetic epitope
ERMAHQQRKS

SEQ ID NO: 8022 - protein, 10 aa, Artificial Sequence
  Description of Artificial Sequence: Synthetic epitope
ERMLKTAVSE

SEQ ID NO: 8023 - protein, 10 aa, Artificial Sequence
  Description of Artificial Sequence: Synthetic epitope
ERMLTATESR

SEQ ID NO: 8024 - protein, 10 aa, Artificial Sequence
  Description of Artificial Sequence: Synthetic epitope
ERMTQALALQ

SEQ ID NO: 8025 - protein, 10 aa, Artificial Sequence
  Description of Artificial Sequence: Synthetic epitope
ERMVQSQKSS

SEQ ID NO: 8026 - protein, 10 aa, Artificial Sequence
  Description of Artificial Sequence: Synthetic epitope
ERNAEAKRKM

SEQ ID NO: 8027 - protein, 10 aa, Artificial Sequence
  Description of Artificial Sequence: Synthetic epitope
ERNAERTATA

SEQ ID NO: 8028 - protein, 10 aa, Artificial Sequence
  Description of Artificial Sequence: Synthetic epitope
ERNEKEGSDA

SEQ ID NO: 8029 - protein, 10 aa, Artificial Sequence
  Description of Artificial Sequence: Synthetic epitope
ERNILAATFI

SEQ ID NO: 8030 - protein, 10 aa, Artificial Sequence
  Description of Artificial Sequence: Synthetic epitope
ERNKAILSEK

SEQ ID NO: 8031 - protein, 10 aa, Artificial Sequence
  Description of Artificial Sequence: Synthetic epitope
ERNLLQQSWE

SEQ ID NO: 8032 - protein, 10 aa, Artificial Sequence
  Description of Artificial Sequence: Synthetic epitope
ERNVQIEMAH

SEQ ID NO: 8033 - protein, 10 aa, Artificial Sequence
  Description of Artificial Sequence: Synthetic epitope
ERNYSQMRIR

SEQ ID NO: 8034 - protein, 10 aa, Artificial Sequence
  Description of Artificial Sequence: Synthetic epitope
ERPAKKIREE

SEQ ID NO: 8035 - protein, 10 aa, Artificial Sequence
  Description of Artificial Sequence: Synthetic epitope
ERPAKKIREE

SEQ ID NO: 8036 - protein, 10 aa, Artificial Sequence
  Description of Artificial Sequence: Synthetic epitope
ERPDAETQKS

SEQ ID NO: 8037 - protein, 10 aa, Artificial Sequence
  Description of Artificial Sequence: Synthetic epitope
ERPEESISNE

SEQ ID NO: 8038 - protein, 10 aa, Artificial Sequence
  Description of Artificial Sequence: Synthetic epitope
ERPLDDIIAQ

SEQ ID NO: 8039 - protein, 10 aa, Artificial Sequence
  Description of Artificial Sequence: Synthetic epitope
ERPLILAEVA

SEQ ID NO: 8040 - protein, 10 aa, Artificial Sequence
  Description of Artificial Sequence: Synthetic epitope
ERPLTFTRTG

SEQ ID NO: 8041 - protein, 10 aa, Artificial Sequence
  Description of Artificial Sequence: Synthetic epitope
ERPRQKLSRK

SEQ ID NO: 8042 - protein, 10 aa, Artificial Sequence
  Description of Artificial Sequence: Synthetic epitope
ERPRSRSPVS

SEQ ID NO: 8043 - protein, 10 aa, Artificial Sequence
  Description of Artificial Sequence: Synthetic epitope
ERPSAGSKAN

SEQ ID NO: 8044 - protein, 10 aa, Artificial Sequence
  Description of Artificial Sequence: Synthetic epitope
ERPTLVELPH

SEQ ID NO: 8045 - protein, 10 aa, Artificial Sequence
  Description of Artificial Sequence: Synthetic epitope
ERPVTIQDTW

SEQ ID NO: 8046 - protein, 10 aa, Artificial Sequence
  Description of Artificial Sequence: Synthetic epitope
ERQALYQSKG

SEQ ID NO: 8047 - protein, 10 aa, Artificial Sequence
  Description of Artificial Sequence: Synthetic epitope
ERQAVNATGH

SEQ ID NO: 8048 - protein, 10 aa, Artificial Sequence
  Description of Artificial Sequence: Synthetic epitope
ERQHAQAARQ

SEQ ID NO: 8049 - protein, 10 aa, Artificial Sequence
  Description of Artificial Sequence: Synthetic epitope
ERQHRQMAIH

SEQ ID NO: 8050 - protein, 10 aa, Artificial Sequence
  Description of Artificial Sequence: Synthetic epitope
ERQIRYLNHQ

SEQ ID NO: 8051 - protein, 10 aa, Artificial Sequence
  Description of Artificial Sequence: Synthetic epitope
ERQKAAQRGQ

SEQ ID NO: 8052 - protein, 10 aa, Artificial Sequence
  Description of Artificial Sequence: Synthetic epitope
ERQKLGKNQQ

SEQ ID NO: 8053 - protein, 10 aa, Artificial Sequence
  Description of Artificial Sequence: Synthetic epitope
ERQKSIQRQE

SEQ ID NO: 8054 - protein, 10 aa, Artificial Sequence
  Description of Artificial Sequence: Synthetic epitope
ERQKTAEKER

SEQ ID NO: 8055 - protein, 10 aa, Artificial Sequence
  Description of Artificial Sequence: Synthetic epitope
ERQLILKQQE

SEQ ID NO: 8056 - protein, 10 aa, Artificial Sequence
  Description of Artificial Sequence: Synthetic epitope
ERQLISMKVK

SEQ ID NO: 8057 - protein, 10 aa, Artificial Sequence
  Description of Artificial Sequence: Synthetic epitope
ERQLLKARKL

SEQ ID NO: 8058 - protein, 10 aa, Artificial Sequence
  Description of Artificial Sequence: Synthetic epitope
ERQLLSVVKW

SEQ ID NO: 8059 - protein, 10 aa, Artificial Sequence
  Description of Artificial Sequence: Synthetic epitope
ERQNVEGGPE

SEQ ID NO: 8060 - protein, 10 aa, Artificial Sequence
  Description of Artificial Sequence: Synthetic epitope
ERQPRKMLMK

SEQ ID NO: 8061 - protein, 10 aa, Artificial Sequence
  Description of Artificial Sequence: Synthetic epitope
ERQQSQVHDT

SEQ ID NO: 8062 - protein, 10 aa, Artificial Sequence
  Description of Artificial Sequence: Synthetic epitope
ERQRTDLETL

SEQ ID NO: 8063 - protein, 10 aa, Artificial Sequence
  Description of Artificial Sequence: Synthetic epitope
ERQTNPSAME

SEQ ID NO: 8064 - protein, 10 aa, Artificial Sequence
  Description of Artificial Sequence: Synthetic epitope
ERQVEMTPEK

SEQ ID NO: 8065 - protein, 10 aa, Artificial Sequence
  Description of Artificial Sequence: Synthetic epitope
ERQVKFRRWK

SEQ ID NO: 8066 - protein, 10 aa, Artificial Sequence
  Description of Artificial Sequence: Synthetic epitope
ERRDASEETS

SEQ ID NO: 8067 - protein, 10 aa, Artificial Sequence
  Description of Artificial Sequence: Synthetic epitope
ERRDSIDEKY

SEQ ID NO: 8068 - protein, 10 aa, Artificial Sequence
  Description of Artificial Sequence: Synthetic epitope
ERRIVRMGES

SEQ ID NO: 8069 - protein, 10 aa, Artificial Sequence
  Description of Artificial Sequence: Synthetic epitope
ERRKSGLSSR

SEQ ID NO: 8070 - protein, 10 aa, Artificial Sequence
  Description of Artificial Sequence: Synthetic epitope
ERRLANKIEH

SEQ ID NO: 8071 - protein, 10 aa, Artificial Sequence
  Description of Artificial Sequence: Synthetic epitope
ERRNAASSEE

SEQ ID NO: 8072 - protein, 10 aa, Artificial Sequence
  Description of Artificial Sequence: Synthetic epitope
ERRNVATSTE

SEQ ID NO: 8073 - protein, 10 aa, Artificial Sequence
  Description of Artificial Sequence: Synthetic epitope
ERRSQNSSIS

SEQ ID NO: 8074 - protein, 10 aa, Artificial Sequence
  Description of Artificial Sequence: Synthetic epitope
ERRSSTAKPE

SEQ ID NO: 8075 - protein, 10 aa, Artificial Sequence
  Description of Artificial Sequence: Synthetic epitope
ERRTDSSISN

SEQ ID NO: 8076 - protein, 10 aa, Artificial Sequence
  Description of Artificial Sequence: Synthetic epitope
ERRVSNAGGP

SEQ ID NO: 8077 - protein, 10 aa, Artificial Sequence
  Description of Artificial Sequence: Synthetic epitope
ERSDSKQDKS

SEQ ID NO: 8078 - protein, 10 aa, Artificial Sequence
  Description of Artificial Sequence: Synthetic epitope
ERSESAELVA

SEQ ID NO: 8079 - protein, 10 aa, Artificial Sequence
  Description of Artificial Sequence: Synthetic epitope
ERSGQQIVGP

SEQ ID NO: 8080 - protein, 10 aa, Artificial Sequence
  Description of Artificial Sequence: Synthetic epitope
ERSGSADGEQ

SEQ ID NO: 8081 - protein, 10 aa, Artificial Sequence
  Description of Artificial Sequence: Synthetic epitope
ERSINLQFLD

SEQ ID NO: 8082 - protein, 10 aa, Artificial Sequence
  Description of Artificial Sequence: Synthetic epitope
ERSKTVTSFY

SEQ ID NO: 8083 - protein, 10 aa, Artificial Sequence
  Description of Artificial Sequence: Synthetic epitope
ERSLAIARGR

SEQ ID NO: 8084 - protein, 10 aa, Artificial Sequence
  Description of Artificial Sequence: Synthetic epitope
ERSLGERTQE

SEQ ID NO: 8085 - protein, 10 aa, Artificial Sequence
  Description of Artificial Sequence: Synthetic epitope
ERSLQATESE

SEQ ID NO: 8086 - protein, 10 aa, Artificial Sequence
  Description of Artificial Sequence: Synthetic epitope
ERSNFFAIIR

SEQ ID NO: 8087 - protein, 10 aa, Artificial Sequence
  Description of Artificial Sequence: Synthetic epitope
ERSQFVVTSN

SEQ ID NO: 8088 - protein, 10 aa, Artificial Sequence
  Description of Artificial Sequence: Synthetic epitope
ERSQVDQLLN

SEQ ID NO: 8089 - protein, 10 aa, Artificial Sequence
  Description of Artificial Sequence: Synthetic epitope
ERSRSKSRSE

SEQ ID NO: 8090 - protein, 10 aa, Artificial Sequence
  Description of Artificial Sequence: Synthetic epitope
ERSRSVASPS

SEQ ID NO: 8091 - protein, 10 aa, Artificial Sequence
  Description of Artificial Sequence: Synthetic epitope
ERSSPQRKSQ

SEQ ID NO: 8092 - protein, 10 aa, Artificial Sequence
  Description of Artificial Sequence: Synthetic epitope
ERSTDTTKTH

SEQ ID NO: 8093 - protein, 10 aa, Artificial Sequence
  Description of Artificial Sequence: Synthetic epitope
ERSTRTQQKE

SEQ ID NO: 8094 - protein, 10 aa, Artificial Sequence
  Description of Artificial Sequence: Synthetic epitope
ERSVDRPRTS

SEQ ID NO: 8095 - protein, 10 aa, Artificial Sequence
  Description of Artificial Sequence: Synthetic epitope
ERSVKRIEEG

SEQ ID NO: 8096 - protein, 10 aa, Artificial Sequence
  Description of Artificial Sequence: Synthetic epitope
ERSWSVKSAA

SEQ ID NO: 8097 - protein, 10 aa, Artificial Sequence
  Description of Artificial Sequence: Synthetic epitope
ERSYEGEEDT

SEQ ID NO: 8098 - protein, 10 aa, Artificial Sequence
  Description of Artificial Sequence: Synthetic epitope
ERSYKSQIST

SEQ ID NO: 8099 - protein, 10 aa, Artificial Sequence
  Description of Artificial Sequence: Synthetic epitope
ERTAKYTMEG

SEQ ID NO: 8100 - protein, 10 aa, Artificial Sequence
  Description of Artificial Sequence: Synthetic epitope
ERTASRVREL

SEQ ID NO: 8101 - protein, 10 aa, Artificial Sequence
  Description of Artificial Sequence: Synthetic epitope
ERTELTLSPE

SEQ ID NO: 8102 - protein, 10 aa, Artificial Sequence
  Description of Artificial Sequence: Synthetic epitope
ERTFKRFAPR

SEQ ID NO: 8103 - protein, 10 aa, Artificial Sequence
  Description of Artificial Sequence: Synthetic epitope
ERTKSLETDM

SEQ ID NO: 8104 - protein, 10 aa, Artificial Sequence
  Description of Artificial Sequence: Synthetic epitope
ERTLRSRQRQ

SEQ ID NO: 8105 - protein, 10 aa, Artificial Sequence
  Description of Artificial Sequence: Synthetic epitope
ERTMSVTTDS

SEQ ID NO: 8106 - protein, 10 aa, Artificial Sequence
  Description of Artificial Sequence: Synthetic epitope
ERTPAAVEKR

SEQ ID NO: 8107 - protein, 10 aa, Artificial Sequence
  Description of Artificial Sequence: Synthetic epitope
ERTPKLSSII

SEQ ID NO: 8108 - protein, 10 aa, Artificial Sequence
  Description of Artificial Sequence: Synthetic epitope
ERTPLSNSRS

SEQ ID NO: 8109 - protein, 10 aa, Artificial Sequence
  Description of Artificial Sequence: Synthetic epitope
ERTQQVARGE

SEQ ID NO: 8110 - protein, 10 aa, Artificial Sequence
  Description of Artificial Sequence: Synthetic epitope
ERTQSSNMET

SEQ ID NO: 8111 - protein, 10 aa, Artificial Sequence
  Description of Artificial Sequence: Synthetic epitope
ERTRNEMTAE

SEQ ID NO: 8112 - protein, 10 aa, Artificial Sequence
  Description of Artificial Sequence: Synthetic epitope
ERTRQMKMKV

SEQ ID NO: 8113 - protein, 10 aa, Artificial Sequence
  Description of Artificial Sequence: Synthetic epitope
ERTRSQLSAL

SEQ ID NO: 8114 - protein, 10 aa, Artificial Sequence
  Description of Artificial Sequence: Synthetic epitope
ERTSLMSAES

SEQ ID NO: 8115 - protein, 10 aa, Artificial Sequence
  Description of Artificial Sequence: Synthetic epitope
ERTSRQLLSS

SEQ ID NO: 8116 - protein, 10 aa, Artificial Sequence
  Description of Artificial Sequence: Synthetic epitope
ERTTEGTSQQ

SEQ ID NO: 8117 - protein, 10 aa, Artificial Sequence
  Description of Artificial Sequence: Synthetic epitope
ERTTGILTSE

SEQ ID NO: 8118 - protein, 10 aa, Artificial Sequence
  Description of Artificial Sequence: Synthetic epitope
ERTTKTMAML

SEQ ID NO: 8119 - protein, 10 aa, Artificial Sequence
  Description of Artificial Sequence: Synthetic epitope
ERTVHAQAER

SEQ ID NO: 8120 - protein, 10 aa, Artificial Sequence
  Description of Artificial Sequence: Synthetic epitope
ERVDSTAHKK

SEQ ID NO: 8121 - protein, 10 aa, Artificial Sequence
  Description of Artificial Sequence: Synthetic epitope
ERVESAIKAV

SEQ ID NO: 8122 - protein, 10 aa, Artificial Sequence
  Description of Artificial Sequence: Synthetic epitope
ERVILHIQVS

SEQ ID NO: 8123 - protein, 10 aa, Artificial Sequence
  Description of Artificial Sequence: Synthetic epitope
ERVKISGQLS

SEQ ID NO: 8124 - protein, 10 aa, Artificial Sequence
  Description of Artificial Sequence: Synthetic epitope
ERVLSAVAAY

SEQ ID NO: 8125 - protein, 10 aa, Artificial Sequence
  Description of Artificial Sequence: Synthetic epitope
ERVQIQSNRE

SEQ ID NO: 8126 - protein, 10 aa, Artificial Sequence
  Description of Artificial Sequence: Synthetic epitope
ERVQLQMAEL

SEQ ID NO: 8127 - protein, 10 aa, Artificial Sequence
  Description of Artificial Sequence: Synthetic epitope
ERVSRSYLAL

SEQ ID NO: 8128 - protein, 10 aa, Artificial Sequence
  Description of Artificial Sequence: Synthetic epitope
ERVVFKVLRR

SEQ ID NO: 8129 - protein, 10 aa, Artificial Sequence
  Description of Artificial Sequence: Synthetic epitope
ERVVSPGIDL

SEQ ID NO: 8130 - protein, 10 aa, Artificial Sequence
  Description of Artificial Sequence: Synthetic epitope
ERVVTHSDRV

SEQ ID NO: 8131 - protein, 10 aa, Artificial Sequence
  Description of Artificial Sequence: Synthetic epitope
ERWKEKQEQG

SEQ ID NO: 8132 - protein, 10 aa, Artificial Sequence
  Description of Artificial Sequence: Synthetic epitope
ERYHQLEIKK

SEQ ID NO: 8133 - protein, 10 aa, Artificial Sequence
  Description of Artificial Sequence: Synthetic epitope
ERYKAAMRRA

SEQ ID NO: 8134 - protein, 10 aa, Artificial Sequence
  Description of Artificial Sequence: Synthetic epitope
ERYKMVQAIK

SEQ ID NO: 8135 - protein, 10 aa, Artificial Sequence
  Description of Artificial Sequence: Synthetic epitope
ERYLKQNEMN

SEQ ID NO: 8136 - protein, 10 aa, Artificial Sequence
  Description of Artificial Sequence: Synthetic epitope
ERYLSVKSLP

SEQ ID NO: 8137 - protein, 10 aa, Artificial Sequence
  Description of Artificial Sequence: Synthetic epitope
ERYRREMLAH

SEQ ID NO: 8138 - protein, 10 aa, Artificial Sequence
  Description of Artificial Sequence: Synthetic epitope
ERYRYSQPHK

SEQ ID NO: 8139 - protein, 10 aa, Artificial Sequence
  Description of Artificial Sequence: Synthetic epitope
ERYSVILLDT

SEQ ID NO: 8140 - protein, 10 aa, Artificial Sequence
  Description of Artificial Sequence: Synthetic epitope
ESAAEQGAVE

SEQ ID NO: 8141 - protein, 10 aa, Artificial Sequence
  Description of Artificial Sequence: Synthetic epitope
ESAAESSFLS

SEQ ID NO: 8142 - protein, 10 aa, Artificial Sequence
  Description of Artificial Sequence: Synthetic epitope
ESAAKKSESA

SEQ ID NO: 8143 - protein, 10 aa, Artificial Sequence
  Description of Artificial Sequence: Synthetic epitope
ESADSRAAGR

SEQ ID NO: 8144 - protein, 10 aa, Artificial Sequence
  Description of Artificial Sequence: Synthetic epitope
ESAFRPDKDA

SEQ ID NO: 8145 - protein, 10 aa, Artificial Sequence
  Description of Artificial Sequence: Synthetic epitope
ESAGAATTEA

SEQ ID NO: 8146 - protein, 10 aa, Artificial Sequence
  Description of Artificial Sequence: Synthetic epitope
ESAGSVSEGE

SEQ ID NO: 8147 - protein, 10 aa, Artificial Sequence
  Description of Artificial Sequence: Synthetic epitope
ESAHNPQQIY

SEQ ID NO: 8148 - protein, 10 aa, Artificial Sequence
  Description of Artificial Sequence: Synthetic epitope
ESAHSMRKQN

SEQ ID NO: 8149 - protein, 10 aa, Artificial Sequence
  Description of Artificial Sequence: Synthetic epitope
ESAHTELAKD

SEQ ID NO: 8150 - protein, 10 aa, Artificial Sequence
  Description of Artificial Sequence: Synthetic epitope
ESAIATVGAA

SEQ ID NO: 8151 - protein, 10 aa, Artificial Sequence
  Description of Artificial Sequence: Synthetic epitope
ESAKAQLSSP

SEQ ID NO: 8152 - protein, 10 aa, Artificial Sequence
  Description of Artificial Sequence: Synthetic epitope
ESAKDQKAAN

SEQ ID NO: 8153 - protein, 10 aa, Artificial Sequence
  Description of Artificial Sequence: Synthetic epitope
ESAKQGTLAQ

SEQ ID NO: 8154 - protein, 10 aa, Artificial Sequence
  Description of Artificial Sequence: Synthetic epitope
ESAKVDSKLI

SEQ ID NO: 8155 - protein, 10 aa, Artificial Sequence
  Description of Artificial Sequence: Synthetic epitope
ESALASFQEE

SEQ ID NO: 8156 - protein, 10 aa, Artificial Sequence
  Description of Artificial Sequence: Synthetic epitope
ESALKALNSD

SEQ ID NO: 8157 - protein, 10 aa, Artificial Sequence
  Description of Artificial Sequence: Synthetic epitope
ESANAAKQAI

SEQ ID NO: 8158 - protein, 10 aa, Artificial Sequence
  Description of Artificial Sequence: Synthetic epitope
ESANRRLASK

SEQ ID NO: 8159 - protein, 10 aa, Artificial Sequence
  Description of Artificial Sequence: Synthetic epitope
ESAPEGQAQQ

SEQ ID NO: 8160 - protein, 10 aa, Artificial Sequence
  Description of Artificial Sequence: Synthetic epitope
ESAQAENHLN

SEQ ID NO: 8161 - protein, 10 aa, Artificial Sequence
  Description of Artificial Sequence: Synthetic epitope
ESAQKDSGST

SEQ ID NO: 8162 - protein, 10 aa, Artificial Sequence
  Description of Artificial Sequence: Synthetic epitope
ESAQRQKTAG

SEQ ID NO: 8163 - protein, 10 aa, Artificial Sequence
  Description of Artificial Sequence: Synthetic epitope
ESARSKTEEA

SEQ ID NO: 8164 - protein, 10 aa, Artificial Sequence
  Description of Artificial Sequence: Synthetic epitope
ESASAHLSDL

SEQ ID NO: 8165 - protein, 10 aa, Artificial Sequence
  Description of Artificial Sequence: Synthetic epitope
ESASEGQEAH

SEQ ID NO: 8166 - protein, 10 aa, Artificial Sequence
  Description of Artificial Sequence: Synthetic epitope
ESASRGSVAE

SEQ ID NO: 8167 - protein, 10 aa, Artificial Sequence
  Description of Artificial Sequence: Synthetic epitope
ESASRSSVTR

SEQ ID NO: 8168 - protein, 10 aa, Artificial Sequence
  Description of Artificial Sequence: Synthetic epitope
ESASSTSGQE

SEQ ID NO: 8169 - protein, 10 aa, Artificial Sequence
  Description of Artificial Sequence: Synthetic epitope
ESATLTRLAA

SEQ ID NO: 8170 - protein, 10 aa, Artificial Sequence
  Description of Artificial Sequence: Synthetic epitope
ESATSKKIAH

SEQ ID NO: 8171 - protein, 10 aa, Artificial Sequence
  Description of Artificial Sequence: Synthetic epitope
ESAVELPKIL

SEQ ID NO: 8172 - protein, 10 aa, Artificial Sequence
  Description of Artificial Sequence: Synthetic epitope
ESAVKTNPSK

SEQ ID NO: 8173 - protein, 10 aa, Artificial Sequence
  Description of Artificial Sequence: Synthetic epitope
ESAVNAERGG

SEQ ID NO: 8174 - protein, 10 aa, Artificial Sequence
  Description of Artificial Sequence: Synthetic epitope
ESAVSQMQSV

SEQ ID NO: 8175 - protein, 10 aa, Artificial Sequence
  Description of Artificial Sequence: Synthetic epitope
ESAVTKQDQI

SEQ ID NO: 8176 - protein, 10 aa, Artificial Sequence
  Description of Artificial Sequence: Synthetic epitope
ESDAEAEAVR

SEQ ID NO: 8177 - protein, 10 aa, Artificial Sequence
  Description of Artificial Sequence: Synthetic epitope
ESDEEKKVAS

SEQ ID NO: 8178 - protein, 10 aa, Artificial Sequence
  Description of Artificial Sequence: Synthetic epitope
ESDGLEMTDV

SEQ ID NO: 8179 - protein, 10 aa, Artificial Sequence
  Description of Artificial Sequence: Synthetic epitope
ESDKLRMDRA

SEQ ID NO: 8180 - protein, 10 aa, Artificial Sequence
  Description of Artificial Sequence: Synthetic epitope
ESDLRSVVKQ

SEQ ID NO: 8181 - protein, 10 aa, Artificial Sequence
  Description of Artificial Sequence: Synthetic epitope
ESDPALGMPD

SEQ ID NO: 8182 - protein, 10 aa, Artificial Sequence
  Description of Artificial Sequence: Synthetic epitope
ESDRELNEDD

SEQ ID NO: 8183 - protein, 10 aa, Artificial Sequence
  Description of Artificial Sequence: Synthetic epitope
ESDSSEAKEE

SEQ ID NO: 8184 - protein, 10 aa, Artificial Sequence
  Description of Artificial Sequence: Synthetic epitope
ESDSSENSKE

SEQ ID NO: 8185 - protein, 10 aa, Artificial Sequence
  Description of Artificial Sequence: Synthetic epitope
ESDSSQSAKK

SEQ ID NO: 8186 - protein, 10 aa, Artificial Sequence
  Description of Artificial Sequence: Synthetic epitope
ESDTSLAEGS

SEQ ID NO: 8187 - protein, 10 aa, Artificial Sequence
  Description of Artificial Sequence: Synthetic epitope
ESDTVVASSI

SEQ ID NO: 8188 - protein, 10 aa, Artificial Sequence
  Description of Artificial Sequence: Synthetic epitope
ESDVSAQMEY

SEQ ID NO: 8189 - protein, 10 aa, Artificial Sequence
  Description of Artificial Sequence: Synthetic epitope
ESEAEPVQRT

SEQ ID NO: 8190 - protein, 10 aa, Artificial Sequence
  Description of Artificial Sequence: Synthetic epitope
ESEALEAGEV

SEQ ID NO: 8191 - protein, 10 aa, Artificial Sequence
  Description of Artificial Sequence: Synthetic epitope
ESEASDSANT

SEQ ID NO: 8192 - protein, 10 aa, Artificial Sequence
  Description of Artificial Sequence: Synthetic epitope
ESEDISLETT

SEQ ID NO: 8193 - protein, 10 aa, Artificial Sequence
  Description of Artificial Sequence: Synthetic epitope
ESEDSQESVD

SEQ ID NO: 8194 - protein, 10 aa, Artificial Sequence
  Description of Artificial Sequence: Synthetic epitope
ESEDSQKHNQ

SEQ ID NO: 8195 - protein, 10 aa, Artificial Sequence
  Description of Artificial Sequence: Synthetic epitope
ESEDVAKIVA

SEQ ID NO: 8196 - protein, 10 aa, Artificial Sequence
  Description of Artificial Sequence: Synthetic epitope
ESEEAEKVTQ

SEQ ID NO: 8197 - protein, 10 aa, Artificial Sequence
  Description of Artificial Sequence: Synthetic epitope
ESEEIGTKVE

SEQ ID NO: 8198 - protein, 10 aa, Artificial Sequence
  Description of Artificial Sequence: Synthetic epitope
ESEEKESHVA

SEQ ID NO: 8199 - protein, 10 aa, Artificial Sequence
  Description of Artificial Sequence: Synthetic epitope
ESEEKTNRTW

SEQ ID NO: 8200 - protein, 10 aa, Artificial Sequence
  Description of Artificial Sequence: Synthetic epitope
ESEELEAASR

SEQ ID NO: 8201 - protein, 10 aa, Artificial Sequence
  Description of Artificial Sequence: Synthetic epitope
ESEESQDSSD

SEQ ID NO: 8202 - protein, 10 aa, Artificial Sequence
  Description of Artificial Sequence: Synthetic epitope
ESEFLDTWNR

SEQ ID NO: 8203 - protein, 10 aa, Artificial Sequence
  Description of Artificial Sequence: Synthetic epitope
ESEISRIKTS

SEQ ID NO: 8204 - protein, 10 aa, Artificial Sequence
  Description of Artificial Sequence: Synthetic epitope
ESEISTTADD

SEQ ID NO: 8205 - protein, 10 aa, Artificial Sequence
  Description of Artificial Sequence: Synthetic epitope
ESEIVVISRP

SEQ ID NO: 8206 - protein, 10 aa, Artificial Sequence
  Description of Artificial Sequence: Synthetic epitope
ESEKEQIRED

SEQ ID NO: 8207 - protein, 10 aa, Artificial Sequence
  Description of Artificial Sequence: Synthetic epitope
ESEKLLEALQ

SEQ ID NO: 8208 - protein, 10 aa, Artificial Sequence
  Description of Artificial Sequence: Synthetic epitope
ESEKSATPEP

SEQ ID NO: 8209 - protein, 10 aa, Artificial Sequence
  Description of Artificial Sequence: Synthetic epitope
ESEKTPNVEP

SEQ ID NO: 8210 - protein, 10 aa, Artificial Sequence
  Description of Artificial Sequence: Synthetic epitope
ESELAQTRAE

SEQ ID NO: 8211 - protein, 10 aa, Artificial Sequence
  Description of Artificial Sequence: Synthetic epitope
ESELFASSGS

SEQ ID NO: 8212 - protein, 10 aa, Artificial Sequence
  Description of Artificial Sequence: Synthetic epitope
ESELGESSAT

SEQ ID NO: 8213 - protein, 10 aa, Artificial Sequence
  Description of Artificial Sequence: Synthetic epitope
ESELRTVLSF

SEQ ID NO: 8214 - protein, 10 aa, Artificial Sequence
  Description of Artificial Sequence: Synthetic epitope
ESELSKKRKK

SEQ ID NO: 8215 - protein, 10 aa, Artificial Sequence
  Description of Artificial Sequence: Synthetic epitope
ESENASLREK

SEQ ID NO: 8216 - protein, 10 aa, Artificial Sequence
  Description of Artificial Sequence: Synthetic epitope
ESENINSEIH

SEQ ID NO: 8217 - protein, 10 aa, Artificial Sequence
  Description of Artificial Sequence: Synthetic epitope
ESENQIQPQS

SEQ ID NO: 8218 - protein, 10 aa, Artificial Sequence
  Description of Artificial Sequence: Synthetic epitope
ESENRVSEGR

SEQ ID NO: 8219 - protein, 10 aa, Artificial Sequence
  Description of Artificial Sequence: Synthetic epitope
ESEQKLSKMT

SEQ ID NO: 8220 - protein, 10 aa, Artificial Sequence
  Description of Artificial Sequence: Synthetic epitope
ESERASDKAK

SEQ ID NO: 8221 - protein, 10 aa, Artificial Sequence
  Description of Artificial Sequence: Synthetic epitope
ESERVYVAES

SEQ ID NO: 8222 - protein, 10 aa, Artificial Sequence
  Description of Artificial Sequence: Synthetic epitope
ESESAAKLAE

SEQ ID NO: 8223 - protein, 10 aa, Artificial Sequence
  Description of Artificial Sequence: Synthetic epitope
ESESAMESHS

SEQ ID NO: 8224 - protein, 10 aa, Artificial Sequence
  Description of Artificial Sequence: Synthetic epitope
ESESDDSEMG

SEQ ID NO: 8225 - protein, 10 aa, Artificial Sequence
  Description of Artificial Sequence: Synthetic epitope
ESESERKAFI

SEQ ID NO: 8226 - protein, 10 aa, Artificial Sequence
  Description of Artificial Sequence: Synthetic epitope
ESESESAGSK

SEQ ID NO: 8227 - protein, 10 aa, Artificial Sequence
  Description of Artificial Sequence: Synthetic epitope
ESESLSSLTN

SEQ ID NO: 8228 - protein, 10 aa, Artificial Sequence
  Description of Artificial Sequence: Synthetic epitope
ESESQLSSER

SEQ ID NO: 8229 - protein, 10 aa, Artificial Sequence
  Description of Artificial Sequence: Synthetic epitope
ESESRTLAAK

SEQ ID NO: 8230 - protein, 10 aa, Artificial Sequence
  Description of Artificial Sequence: Synthetic epitope
ESESSEFFSQ

SEQ ID NO: 8231 - protein, 10 aa, Artificial Sequence
  Description of Artificial Sequence: Synthetic epitope
ESESSESGED

SEQ ID NO: 8232 - protein, 10 aa, Artificial Sequence
  Description of Artificial Sequence: Synthetic epitope
ESESSKESEG

SEQ ID NO: 8233 - protein, 10 aa, Artificial Sequence
  Description of Artificial Sequence: Synthetic epitope
ESESSLEMDD

SEQ ID NO: 8234 - protein, 10 aa, Artificial Sequence
  Description of Artificial Sequence: Synthetic epitope
ESESSLSGEE

SEQ ID NO: 8235 - protein, 10 aa, Artificial Sequence
  Description of Artificial Sequence: Synthetic epitope
ESESTTARQP

SEQ ID NO: 8236 - protein, 10 aa, Artificial Sequence
  Description of Artificial Sequence: Synthetic epitope
ESETEAAVPK

SEQ ID NO: 8237 - protein, 10 aa, Artificial Sequence
  Description of Artificial Sequence: Synthetic epitope
ESETGSEFVD

SEQ ID NO: 8238 - protein, 10 aa, Artificial Sequence
  Description of Artificial Sequence: Synthetic epitope
ESETGTTEEH

SEQ ID NO: 8239 - protein, 10 aa, Artificial Sequence
  Description of Artificial Sequence: Synthetic epitope
ESETLKSEEF

SEQ ID NO: 8240 - protein, 10 aa, Artificial Sequence
  Description of Artificial Sequence: Synthetic epitope
ESEVAISEEL

SEQ ID NO: 8241 - protein, 10 aa, Artificial Sequence
  Description of Artificial Sequence: Synthetic epitope
ESEVESLQYD

SEQ ID NO: 8242 - protein, 10 aa, Artificial Sequence
  Description of Artificial Sequence: Synthetic epitope
ESEVIESQEA

SEQ ID NO: 8243 - protein, 10 aa, Artificial Sequence
  Description of Artificial Sequence: Synthetic epitope
ESEVKLKKSK

SEQ ID NO: 8244 - protein, 10 aa, Artificial Sequence
  Description of Artificial Sequence: Synthetic epitope
ESEVSGTQKV

SEQ ID NO: 8245 - protein, 10 aa, Artificial Sequence
  Description of Artificial Sequence: Synthetic epitope
ESEVSSVSPL

SEQ ID NO: 8246 - protein, 10 aa, Artificial Sequence
  Description of Artificial Sequence: Synthetic epitope
ESFALMVKQT

SEQ ID NO: 8247 - protein, 10 aa, Artificial Sequence
  Description of Artificial Sequence: Synthetic epitope
ESFIIEEQSF

SEQ ID NO: 8248 - protein, 10 aa, Artificial Sequence
  Description of Artificial Sequence: Synthetic epitope
ESFLETLLQN

SEQ ID NO: 8249 - protein, 10 aa, Artificial Sequence
  Description of Artificial Sequence: Synthetic epitope
ESFPAALAKT

SEQ ID NO: 8250 - protein, 10 aa, Artificial Sequence
  Description of Artificial Sequence: Synthetic epitope
ESFSSIEKPS

SEQ ID NO: 8251 - protein, 10 aa, Artificial Sequence
  Description of Artificial Sequence: Synthetic epitope
ESGALARLTG

SEQ ID NO: 8252 - protein, 10 aa, Artificial Sequence
  Description of Artificial Sequence: Synthetic epitope
ESGDASIHDT

SEQ ID NO: 8253 - protein, 10 aa, Artificial Sequence
  Description of Artificial Sequence: Synthetic epitope
ESGDVFRATY

SEQ ID NO: 8254 - protein, 10 aa, Artificial Sequence
  Description of Artificial Sequence: Synthetic epitope
ESGDVNTVWK

SEQ ID NO: 8255 - protein, 10 aa, Artificial Sequence
  Description of Artificial Sequence: Synthetic epitope
ESGEEAAEAM

SEQ ID NO: 8256 - protein, 10 aa, Artificial Sequence
  Description of Artificial Sequence: Synthetic epitope
ESGEEYESGS

SEQ ID NO: 8257 - protein, 10 aa, Artificial Sequence
  Description of Artificial Sequence: Synthetic epitope
ESGEKSTKSV

SEQ ID NO: 8258 - protein, 10 aa, Artificial Sequence
  Description of Artificial Sequence: Synthetic epitope
ESGERTKLKD

SEQ ID NO: 8259 - protein, 10 aa, Artificial Sequence
  Description of Artificial Sequence: Synthetic epitope
ESGGFEARLY

SEQ ID NO: 8260 - protein, 10 aa, Artificial Sequence
  Description of Artificial Sequence: Synthetic epitope
ESGKVVLPDE

SEQ ID NO: 8261 - protein, 10 aa, Artificial Sequence
  Description of Artificial Sequence: Synthetic epitope
ESGLRSAEGS

SEQ ID NO: 8262 - protein, 10 aa, Artificial Sequence
  Description of Artificial Sequence: Synthetic epitope
ESGLSMVDWH

SEQ ID NO: 8263 - protein, 10 aa, Artificial Sequence
  Description of Artificial Sequence: Synthetic epitope
ESGREDERLR

SEQ ID NO: 8264 - protein, 10 aa, Artificial Sequence
  Description of Artificial Sequence: Synthetic epitope
ESGSELSKTV

SEQ ID NO: 8265 - protein, 10 aa, Artificial Sequence
  Description of Artificial Sequence: Synthetic epitope
ESGSSALQSL

SEQ ID NO: 8266 - protein, 10 aa, Artificial Sequence
  Description of Artificial Sequence: Synthetic epitope
ESGTFAFRTP

SEQ ID NO: 8267 - protein, 10 aa, Artificial Sequence
  Description of Artificial Sequence: Synthetic epitope
ESGVSLIATV

SEQ ID NO: 8268 - protein, 10 aa, Artificial Sequence
  Description of Artificial Sequence: Synthetic epitope
ESHATKGHMN

SEQ ID NO: 8269 - protein, 10 aa, Artificial Sequence
  Description of Artificial Sequence: Synthetic epitope
ESHEKGENVK

SEQ ID NO: 8270 - protein, 10 aa, Artificial Sequence
  Description of Artificial Sequence: Synthetic epitope
ESHEQSAEQG

SEQ ID NO: 8271 - protein, 10 aa, Artificial Sequence
  Description of Artificial Sequence: Synthetic epitope
ESHHLQAKSG

SEQ ID NO: 8272 - protein, 10 aa, Artificial Sequence
  Description of Artificial Sequence: Synthetic epitope
ESHIKNIISE

SEQ ID NO: 8273 - protein, 10 aa, Artificial Sequence
  Description of Artificial Sequence: Synthetic epitope
ESHKIDQKHR

SEQ ID NO: 8274 - protein, 10 aa, Artificial Sequence
  Description of Artificial Sequence: Synthetic epitope
ESHNMSKGPE

SEQ ID NO: 8275 - protein, 10 aa, Artificial Sequence
  Description of Artificial Sequence: Synthetic epitope
ESHQEAASNE

SEQ ID NO: 8276 - protein, 10 aa, Artificial Sequence
  Description of Artificial Sequence: Synthetic epitope
ESIAEQMENP

SEQ ID NO: 8277 - protein, 10 aa, Artificial Sequence
  Description of Artificial Sequence: Synthetic epitope
ESIDALVSSQ

SEQ ID NO: 8278 - protein, 10 aa, Artificial Sequence
  Description of Artificial Sequence: Synthetic epitope
ESIDDALAEK

SEQ ID NO: 8279 - protein, 10 aa, Artificial Sequence
  Description of Artificial Sequence: Synthetic epitope
ESIEASKTAL

SEQ ID NO: 8280 - protein, 10 aa, Artificial Sequence
  Description of Artificial Sequence: Synthetic epitope
ESIETVVTTF

SEQ ID NO: 8281 - protein, 10 aa, Artificial Sequence
  Description of Artificial Sequence: Synthetic epitope
ESIKLKLEQA

SEQ ID NO: 8282 - protein, 10 aa, Artificial Sequence
  Description of Artificial Sequence: Synthetic epitope
ESILKAIEEI

SEQ ID NO: 8283 - protein, 10 aa, Artificial Sequence
  Description of Artificial Sequence: Synthetic epitope
ESILKMTKKG

SEQ ID NO: 8284 - protein, 10 aa, Artificial Sequence
  Description of Artificial Sequence: Synthetic epitope
ESILLTIKDD

SEQ ID NO: 8285 - protein, 10 aa, Artificial Sequence
  Description of Artificial Sequence: Synthetic epitope
ESIMKILRPK

SEQ ID NO: 8286 - protein, 10 aa, Artificial Sequence
  Description of Artificial Sequence: Synthetic epitope
ESINLKASKS

SEQ ID NO: 8287 - protein, 10 aa, Artificial Sequence
  Description of Artificial Sequence: Synthetic epitope
ESIQKKVTFQ

SEQ ID NO: 8288 - protein, 10 aa, Artificial Sequence
  Description of Artificial Sequence: Synthetic epitope
ESIQLLNSME

SEQ ID NO: 8289 - protein, 10 aa, Artificial Sequence
  Description of Artificial Sequence: Synthetic epitope
ESIRGIGPKR

SEQ ID NO: 8290 - protein, 10 aa, Artificial Sequence
  Description of Artificial Sequence: Synthetic epitope
ESISEEADSE

SEQ ID NO: 8291 - protein, 10 aa, Artificial Sequence
  Description of Artificial Sequence: Synthetic epitope
ESISLTKLES

SEQ ID NO: 8292 - protein, 10 aa, Artificial Sequence
  Description of Artificial Sequence: Synthetic epitope
ESISSDQQVI

SEQ ID NO: 8293 - protein, 10 aa, Artificial Sequence
  Description of Artificial Sequence: Synthetic epitope
ESISTLISQP

SEQ ID NO: 8294 - protein, 10 aa, Artificial Sequence
  Description of Artificial Sequence: Synthetic epitope
ESISVKKPKE

SEQ ID NO: 8295 - protein, 10 aa, Artificial Sequence
  Description of Artificial Sequence: Synthetic epitope
ESIVAQALAG

SEQ ID NO: 8296 - protein, 10 aa, Artificial Sequence
  Description of Artificial Sequence: Synthetic epitope
ESIVNASKLP

SEQ ID NO: 8297 - protein, 10 aa, Artificial Sequence
  Description of Artificial Sequence: Synthetic epitope
ESKAISDAQI

SEQ ID NO: 8298 - protein, 10 aa, Artificial Sequence
  Description of Artificial Sequence: Synthetic epitope
ESKALARKVS

SEQ ID NO: 8299 - protein, 10 aa, Artificial Sequence
  Description of Artificial Sequence: Synthetic epitope
ESKAQTEVQL

SEQ ID NO: 8300 - protein, 10 aa, Artificial Sequence
  Description of Artificial Sequence: Synthetic epitope
ESKAVQVIGN

SEQ ID NO: 8301 - protein, 10 aa, Artificial Sequence
  Description of Artificial Sequence: Synthetic epitope
ESKDRQVDLS

SEQ ID NO: 8302 - protein, 10 aa, Artificial Sequence
  Description of Artificial Sequence: Synthetic epitope
ESKEKTLKRQ

SEQ ID NO: 8303 - protein, 10 aa, Artificial Sequence
  Description of Artificial Sequence: Synthetic epitope
ESKERALNSA

SEQ ID NO: 8304 - protein, 10 aa, Artificial Sequence
  Description of Artificial Sequence: Synthetic epitope
ESKESSDELD

SEQ ID NO: 8305 - protein, 10 aa, Artificial Sequence
  Description of Artificial Sequence: Synthetic epitope
ESKESSKEKK

SEQ ID NO: 8306 - protein, 10 aa, Artificial Sequence
  Description of Artificial Sequence: Synthetic epitope
ESKHEVTILG

SEQ ID NO: 8307 - protein, 10 aa, Artificial Sequence
  Description of Artificial Sequence: Synthetic epitope
ESKIATTKYP

SEQ ID NO: 8308 - protein, 10 aa, Artificial Sequence
  Description of Artificial Sequence: Synthetic epitope
ESKIQMYDEQ

SEQ ID NO: 8309 - protein, 10 aa, Artificial Sequence
  Description of Artificial Sequence: Synthetic epitope
ESKKGLSFFA

SEQ ID NO: 8310 - protein, 10 aa, Artificial Sequence
  Description of Artificial Sequence: Synthetic epitope
ESKKIKMERG

SEQ ID NO: 8311 - protein, 10 aa, Artificial Sequence
  Description of Artificial Sequence: Synthetic epitope
ESKKTKRAGE

SEQ ID NO: 8312 - protein, 10 aa, Artificial Sequence
  Description of Artificial Sequence: Synthetic epitope
ESKLEAKKLA

SEQ ID NO: 8313 - protein, 10 aa, Artificial Sequence
  Description of Artificial Sequence: Synthetic epitope
ESKLESTLKK

SEQ ID NO: 8314 - protein, 10 aa, Artificial Sequence
  Description of Artificial Sequence: Synthetic epitope
ESKLKSSTSE

SEQ ID NO: 8315 - protein, 10 aa, Artificial Sequence
  Description of Artificial Sequence: Synthetic epitope
ESKLQALQKQ

SEQ ID NO: 8316 - protein, 10 aa, Artificial Sequence
  Description of Artificial Sequence: Synthetic epitope
ESKLSDTIEV

SEQ ID NO: 8317 - protein, 10 aa, Artificial Sequence
  Description of Artificial Sequence: Synthetic epitope
ESKLYVSSDL

SEQ ID NO: 8318 - protein, 10 aa, Artificial Sequence
  Description of Artificial Sequence: Synthetic epitope
ESKNVKLAQH

SEQ ID NO: 8319 - protein, 10 aa, Artificial Sequence
  Description of Artificial Sequence: Synthetic epitope
ESKQAQQKRD

SEQ ID NO: 8320 - protein, 10 aa, Artificial Sequence
  Description of Artificial Sequence: Synthetic epitope
ESKQHKSKVS

SEQ ID NO: 8321 - protein, 10 aa, Artificial Sequence
  Description of Artificial Sequence: Synthetic epitope
ESKQSLNKQL

SEQ ID NO: 8322 - protein, 10 aa, Artificial Sequence
  Description of Artificial Sequence: Synthetic epitope
ESKSAATKEE

SEQ ID NO: 8323 - protein, 10 aa, Artificial Sequence
  Description of Artificial Sequence: Synthetic epitope
ESKSEQTKSK

SEQ ID NO: 8324 - protein, 10 aa, Artificial Sequence
  Description of Artificial Sequence: Synthetic epitope
ESKSFNVLKQ

SEQ ID NO: 8325 - protein, 10 aa, Artificial Sequence
  Description of Artificial Sequence: Synthetic epitope
ESKSVQRVTR

SEQ ID NO: 8326 - protein, 10 aa, Artificial Sequence
  Description of Artificial Sequence: Synthetic epitope
ESKTKNVLWR

SEQ ID NO: 8327 - protein, 10 aa, Artificial Sequence
  Description of Artificial Sequence: Synthetic epitope
ESKVQSFLAS

SEQ ID NO: 8328 - protein, 10 aa, Artificial Sequence
  Description of Artificial Sequence: Synthetic epitope
ESLAAELPVS

SEQ ID NO: 8329 - protein, 10 aa, Artificial Sequence
  Description of Artificial Sequence: Synthetic epitope
ESLAHALVEI

SEQ ID NO: 8330 - protein, 10 aa, Artificial Sequence
  Description of Artificial Sequence: Synthetic epitope
ESLAKIKSKA

SEQ ID NO: 8331 - protein, 10 aa, Artificial Sequence
  Description of Artificial Sequence: Synthetic epitope
ESLAYSESEW

SEQ ID NO: 8332 - protein, 10 aa, Artificial Sequence
  Description of Artificial Sequence: Synthetic epitope
ESLEAQGSHL

SEQ ID NO: 8333 - protein, 10 aa, Artificial Sequence
  Description of Artificial Sequence: Synthetic epitope
ESLEEAEYRR

SEQ ID NO: 8334 - protein, 10 aa, Artificial Sequence
  Description of Artificial Sequence: Synthetic epitope
ESLESEGKNS

SEQ ID NO: 8335 - protein, 10 aa, Artificial Sequence
  Description of Artificial Sequence: Synthetic epitope
ESLGKSVFMR

SEQ ID NO: 8336 - protein, 10 aa, Artificial Sequence
  Description of Artificial Sequence: Synthetic epitope
ESLHASTRSS

SEQ ID NO: 8337 - protein, 10 aa, Artificial Sequence
  Description of Artificial Sequence: Synthetic epitope
ESLIQRKDIM

SEQ ID NO: 8338 - protein, 10 aa, Artificial Sequence
  Description of Artificial Sequence: Synthetic epitope
ESLKAELGTD

SEQ ID NO: 8339 - protein, 10 aa, Artificial Sequence
  Description of Artificial Sequence: Synthetic epitope
ESLKDSATSK

SEQ ID NO: 8340 - protein, 10 aa, Artificial Sequence
  Description of Artificial Sequence: Synthetic epitope
ESLKNSATEA

SEQ ID NO: 8341 - protein, 10 aa, Artificial Sequence
  Description of Artificial Sequence: Synthetic epitope
ESLKVKKGKN

SEQ ID NO: 8342 - protein, 10 aa, Artificial Sequence
  Description of Artificial Sequence: Synthetic epitope
ESLLDIAARR

SEQ ID NO: 8343 - protein, 10 aa, Artificial Sequence
  Description of Artificial Sequence: Synthetic epitope
ESLLEQKEKE

SEQ ID NO: 8344 - protein, 10 aa, Artificial Sequence
  Description of Artificial Sequence: Synthetic epitope
ESLLGKAAKR

SEQ ID NO: 8345 - protein, 10 aa, Artificial Sequence
  Description of Artificial Sequence: Synthetic epitope
ESLLHSNSSF

SEQ ID NO: 8346 - protein, 10 aa, Artificial Sequence
  Description of Artificial Sequence: Synthetic epitope
ESLLMKMRSV

SEQ ID NO: 8347 - protein, 10 aa, Artificial Sequence
  Description of Artificial Sequence: Synthetic epitope
ESLLSKLFPK

SEQ ID NO: 8348 - protein, 10 aa, Artificial Sequence
  Description of Artificial Sequence: Synthetic epitope
ESLLSRNSES

SEQ ID NO: 8349 - protein, 10 aa, Artificial Sequence
  Description of Artificial Sequence: Synthetic epitope
ESLLTSTEGL

SEQ ID NO: 8350 - protein, 10 aa, Artificial Sequence
  Description of Artificial Sequence: Synthetic epitope
ESLQASKEKE

SEQ ID NO: 8351 - protein, 10 aa, Artificial Sequence
  Description of Artificial Sequence: Synthetic epitope
ESLQEKSIKE

SEQ ID NO: 8352 - protein, 10 aa, Artificial Sequence
  Description of Artificial Sequence: Synthetic epitope
ESLQVAVKAS

SEQ ID NO: 8353 - protein, 10 aa, Artificial Sequence
  Description of Artificial Sequence: Synthetic epitope
ESLRVALSNE

SEQ ID NO: 8354 - protein, 10 aa, Artificial Sequence
  Description of Artificial Sequence: Synthetic epitope
ESLRVLKLFL

SEQ ID NO: 8355 - protein, 10 aa, Artificial Sequence
  Description of Artificial Sequence: Synthetic epitope
ESLSARHSHS

SEQ ID NO: 8356 - protein, 10 aa, Artificial Sequence
  Description of Artificial Sequence: Synthetic epitope
ESLSASKLAK

SEQ ID NO: 8357 - protein, 10 aa, Artificial Sequence
  Description of Artificial Sequence: Synthetic epitope
ESLSASRSTN

SEQ ID NO: 8358 - protein, 10 aa, Artificial Sequence
  Description of Artificial Sequence: Synthetic epitope
ESLSDKIQKK

SEQ ID NO: 8359 - protein, 10 aa, Artificial Sequence
  Description of Artificial Sequence: Synthetic epitope
ESLSSRRGPS

SEQ ID NO: 8360 - protein, 10 aa, Artificial Sequence
  Description of Artificial Sequence: Synthetic epitope
ESLSTQIRAL

SEQ ID NO: 8361 - protein, 10 aa, Artificial Sequence
  Description of Artificial Sequence: Synthetic epitope
ESLSTRGADS

SEQ ID NO: 8362 - protein, 10 aa, Artificial Sequence
  Description of Artificial Sequence: Synthetic epitope
ESLSTSLQSK

SEQ ID NO: 8363 - protein, 10 aa, Artificial Sequence
  Description of Artificial Sequence: Synthetic epitope
ESLSVLRSSN

SEQ ID NO: 8364 - protein, 10 aa, Artificial Sequence
  Description of Artificial Sequence: Synthetic epitope
ESLSVMSSNV

SEQ ID NO: 8365 - protein, 10 aa, Artificial Sequence
  Description of Artificial Sequence: Synthetic epitope
ESLTKDKVQA

SEQ ID NO: 8366 - protein, 10 aa, Artificial Sequence
  Description of Artificial Sequence: Synthetic epitope
ESLVEIISQK

SEQ ID NO: 8367 - protein, 10 aa, Artificial Sequence
  Description of Artificial Sequence: Synthetic epitope
ESLVQILQPQ

SEQ ID NO: 8368 - protein, 10 aa, Artificial Sequence
  Description of Artificial Sequence: Synthetic epitope
ESLVSKAMEY

SEQ ID NO: 8369 - protein, 10 aa, Artificial Sequence
  Description of Artificial Sequence: Synthetic epitope
ESMGEQSSTA

SEQ ID NO: 8370 - protein, 10 aa, Artificial Sequence
  Description of Artificial Sequence: Synthetic epitope
ESMIAAKMET

SEQ ID NO: 8371 - protein, 10 aa, Artificial Sequence
  Description of Artificial Sequence: Synthetic epitope
ESMKDNVLRD

SEQ ID NO: 8372 - protein, 10 aa, Artificial Sequence
  Description of Artificial Sequence: Synthetic epitope
ESMNSSRFVL

SEQ ID NO: 8373 - protein, 10 aa, Artificial Sequence
  Description of Artificial Sequence: Synthetic epitope
ESMTPTATSE

SEQ ID NO: 8374 - protein, 10 aa, Artificial Sequence
  Description of Artificial Sequence: Synthetic epitope
ESMVSLTQEL

SEQ ID NO: 8375 - protein, 10 aa, Artificial Sequence
  Description of Artificial Sequence: Synthetic epitope
ESNDISEETI

SEQ ID NO: 8376 - protein, 10 aa, Artificial Sequence
  Description of Artificial Sequence: Synthetic epitope
ESNKLINLPE

SEQ ID NO: 8377 - protein, 10 aa, Artificial Sequence
  Description of Artificial Sequence: Synthetic epitope
ESNKQMMPLK

SEQ ID NO: 8378 - protein, 10 aa, Artificial Sequence
  Description of Artificial Sequence: Synthetic epitope
ESNKSVLQFQ

SEQ ID NO: 8379 - protein, 10 aa, Artificial Sequence
  Description of Artificial Sequence: Synthetic epitope
ESNLDSGEHK

SEQ ID NO: 8380 - protein, 10 aa, Artificial Sequence
  Description of Artificial Sequence: Synthetic epitope
ESNPYRSRKQ

SEQ ID NO: 8381 - protein, 10 aa, Artificial Sequence
  Description of Artificial Sequence: Synthetic epitope
ESNRISRESS

SEQ ID NO: 8382 - protein, 10 aa, Artificial Sequence
  Description of Artificial Sequence: Synthetic epitope
ESNRSKLEQE

SEQ ID NO: 8383 - protein, 10 aa, Artificial Sequence
  Description of Artificial Sequence: Synthetic epitope
ESNSQTSPLN

SEQ ID NO: 8384 - protein, 10 aa, Artificial Sequence
  Description of Artificial Sequence: Synthetic epitope
ESNSSASVRP

SEQ ID NO: 8385 - protein, 10 aa, Artificial Sequence
  Description of Artificial Sequence: Synthetic epitope
ESNSSKIQSQ

SEQ ID NO: 8386 - protein, 10 aa, Artificial Sequence
  Description of Artificial Sequence: Synthetic epitope
ESNVELIAKN

SEQ ID NO: 8387 - protein, 10 aa, Artificial Sequence
  Description of Artificial Sequence: Synthetic epitope
ESNVVASPEP

SEQ ID NO: 8388 - protein, 10 aa, Artificial Sequence
  Description of Artificial Sequence: Synthetic epitope
ESPATFSTEE

SEQ ID NO: 8389 - protein, 10 aa, Artificial Sequence
  Description of Artificial Sequence: Synthetic epitope
ESPDQMRRNT

SEQ ID NO: 8390 - protein, 10 aa, Artificial Sequence
  Description of Artificial Sequence: Synthetic epitope
ESPKEALSAQ

SEQ ID NO: 8391 - protein, 10 aa, Artificial Sequence
  Description of Artificial Sequence: Synthetic epitope
ESPKETFNAS

SEQ ID NO: 8392 - protein, 10 aa, Artificial Sequence
  Description of Artificial Sequence: Synthetic epitope
ESPLLVTKSQ

SEQ ID NO: 8393 - protein, 10 aa, Artificial Sequence
  Description of Artificial Sequence: Synthetic epitope
ESPRKSIIFE

SEQ ID NO: 8394 - protein, 10 aa, Artificial Sequence
  Description of Artificial Sequence: Synthetic epitope
ESPSKMKRSK

SEQ ID NO: 8395 - protein, 10 aa, Artificial Sequence
  Description of Artificial Sequence: Synthetic epitope
ESPVSAGNDA

SEQ ID NO: 8396 - protein, 10 aa, Artificial Sequence
  Description of Artificial Sequence: Synthetic epitope
ESQAQSVHHQ

SEQ ID NO: 8397 - protein, 10 aa, Artificial Sequence
  Description of Artificial Sequence: Synthetic epitope
ESQEHIHGLD

SEQ ID NO: 8398 - protein, 10 aa, Artificial Sequence
  Description of Artificial Sequence: Synthetic epitope
ESQETMKRQL

SEQ ID NO: 8399 - protein, 10 aa, Artificial Sequence
  Description of Artificial Sequence: Synthetic epitope
ESQEVLSDIY

SEQ ID NO: 8400 - protein, 10 aa, Artificial Sequence
  Description of Artificial Sequence: Synthetic epitope
ESQGKSRENK

SEQ ID NO: 8401 - protein, 10 aa, Artificial Sequence
  Description of Artificial Sequence: Synthetic epitope
ESQHTVEPLG

SEQ ID NO: 8402 - protein, 10 aa, Artificial Sequence
  Description of Artificial Sequence: Synthetic epitope
ESQIMSVAFK

SEQ ID NO: 8403 - protein, 10 aa, Artificial Sequence
  Description of Artificial Sequence: Synthetic epitope
ESQINNSAVE

SEQ ID NO: 8404 - protein, 10 aa, Artificial Sequence
  Description of Artificial Sequence: Synthetic epitope
ESQKVMVTVG

SEQ ID NO: 8405 - protein, 10 aa, Artificial Sequence
  Description of Artificial Sequence: Synthetic epitope
ESQNINELKS

SEQ ID NO: 8406 - protein, 10 aa, Artificial Sequence
  Description of Artificial Sequence: Synthetic epitope
ESQNVDFRGK

SEQ ID NO: 8407 - protein, 10 aa, Artificial Sequence
  Description of Artificial Sequence: Synthetic epitope
ESQQKAERAS

SEQ ID NO: 8408 - protein, 10 aa, Artificial Sequence
  Description of Artificial Sequence: Synthetic epitope
ESQSRQRPPL

SEQ ID NO: 8409 - protein, 10 aa, Artificial Sequence
  Description of Artificial Sequence: Synthetic epitope
ESQSSASQPR

SEQ ID NO: 8410 - protein, 10 aa, Artificial Sequence
  Description of Artificial Sequence: Synthetic epitope
ESQTEVSSEY

SEQ ID NO: 8411 - protein, 10 aa, Artificial Sequence
  Description of Artificial Sequence: Synthetic epitope
ESREDKIFQK

SEQ ID NO: 8412 - protein, 10 aa, Artificial Sequence
  Description of Artificial Sequence: Synthetic epitope
ESREKKEAED

SEQ ID NO: 8413 - protein, 10 aa, Artificial Sequence
  Description of Artificial Sequence: Synthetic epitope
ESRETGEVVS

SEQ ID NO: 8414 - protein, 10 aa, Artificial Sequence
  Description of Artificial Sequence: Synthetic epitope
ESRHEIKLPV

SEQ ID NO: 8415 - protein, 10 aa, Artificial Sequence
  Description of Artificial Sequence: Synthetic epitope
ESRKAAEEKF

SEQ ID NO: 8416 - protein, 10 aa, Artificial Sequence
  Description of Artificial Sequence: Synthetic epitope
ESRKSARKLY

SEQ ID NO: 8417 - protein, 10 aa, Artificial Sequence
  Description of Artificial Sequence: Synthetic epitope
ESRLAELYVE

SEQ ID NO: 8418 - protein, 10 aa, Artificial Sequence
  Description of Artificial Sequence: Synthetic epitope
ESRLQLMSMD

SEQ ID NO: 8419 - protein, 10 aa, Artificial Sequence
  Description of Artificial Sequence: Synthetic epitope
ESRNSSHIKR

SEQ ID NO: 8420 - protein, 10 aa, Artificial Sequence
  Description of Artificial Sequence: Synthetic epitope
ESRQIGPRTL

SEQ ID NO: 8421 - protein, 10 aa, Artificial Sequence
  Description of Artificial Sequence: Synthetic epitope
ESRRAGAADS

SEQ ID NO: 8422 - protein, 10 aa, Artificial Sequence
  Description of Artificial Sequence: Synthetic epitope
ESRSRSRSTN

SEQ ID NO: 8423 - protein, 10 aa, Artificial Sequence
  Description of Artificial Sequence: Synthetic epitope
ESRVLKYTAQ

SEQ ID NO: 8424 - protein, 10 aa, Artificial Sequence
  Description of Artificial Sequence: Synthetic epitope
ESSANSLKDE

SEQ ID NO: 8425 - protein, 10 aa, Artificial Sequence
  Description of Artificial Sequence: Synthetic epitope
ESSDLVDQTE

SEQ ID NO: 8426 - protein, 10 aa, Artificial Sequence
  Description of Artificial Sequence: Synthetic epitope
ESSDSESEIL

SEQ ID NO: 8427 - protein, 10 aa, Artificial Sequence
  Description of Artificial Sequence: Synthetic epitope
ESSDSMAPVG

SEQ ID NO: 8428 - protein, 10 aa, Artificial Sequence
  Description of Artificial Sequence: Synthetic epitope
ESSDTQSERG

SEQ ID NO: 8429 - protein, 10 aa, Artificial Sequence
  Description of Artificial Sequence: Synthetic epitope
ESSEAPLVQK

SEQ ID NO: 8430 - protein, 10 aa, Artificial Sequence
  Description of Artificial Sequence: Synthetic epitope
ESSEEDLSAE

SEQ ID NO: 8431 - protein, 10 aa, Artificial Sequence
  Description of Artificial Sequence: Synthetic epitope
ESSEELLETA

SEQ ID NO: 8432 - protein, 10 aa, Artificial Sequence
  Description of Artificial Sequence: Synthetic epitope
ESSEKAYSEA

SEQ ID NO: 8433 - protein, 10 aa, Artificial Sequence
  Description of Artificial Sequence: Synthetic epitope
ESSEQIKRLL

SEQ ID NO: 8434 - protein, 10 aa, Artificial Sequence
  Description of Artificial Sequence: Synthetic epitope
ESSETLDVFA

SEQ ID NO: 8435 - protein, 10 aa, Artificial Sequence
  Description of Artificial Sequence: Synthetic epitope
ESSETWDSSM

SEQ ID NO: 8436 - protein, 10 aa, Artificial Sequence
  Description of Artificial Sequence: Synthetic epitope
ESSEYQSYSQ

SEQ ID NO: 8437 - protein, 10 aa, Artificial Sequence
  Description of Artificial Sequence: Synthetic epitope
ESSHHEAEFQ

SEQ ID NO: 8438 - protein, 10 aa, Artificial Sequence
  Description of Artificial Sequence: Synthetic epitope
ESSILTAQEE

SEQ ID NO: 8439 - protein, 10 aa, Artificial Sequence
  Description of Artificial Sequence: Synthetic epitope
ESSIRKRLKL

SEQ ID NO: 8440 - protein, 10 aa, Artificial Sequence
  Description of Artificial Sequence: Synthetic epitope
ESSIRKRLKL

SEQ ID NO: 8441 - protein, 10 aa, Artificial Sequence
  Description of Artificial Sequence: Synthetic epitope
ESSKEAVRRH

SEQ ID NO: 8442 - protein, 10 aa, Artificial Sequence
  Description of Artificial Sequence: Synthetic epitope
ESSKENQQPE

SEQ ID NO: 8443 - protein, 10 aa, Artificial Sequence
  Description of Artificial Sequence: Synthetic epitope
ESSKKLLVDS

SEQ ID NO: 8444 - protein, 10 aa, Artificial Sequence
  Description of Artificial Sequence: Synthetic epitope
ESSKNTKKLD

SEQ ID NO: 8445 - protein, 10 aa, Artificial Sequence
  Description of Artificial Sequence: Synthetic epitope
ESSKSQVKKR

SEQ ID NO: 8446 - protein, 10 aa, Artificial Sequence
  Description of Artificial Sequence: Synthetic epitope
ESSKVKLRTD

SEQ ID NO: 8447 - protein, 10 aa, Artificial Sequence
  Description of Artificial Sequence: Synthetic epitope
ESSLEKERET

SEQ ID NO: 8448 - protein, 10 aa, Artificial Sequence
  Description of Artificial Sequence: Synthetic epitope
ESSLELLQKD

SEQ ID NO: 8449 - protein, 10 aa, Artificial Sequence
  Description of Artificial Sequence: Synthetic epitope
ESSLIMNKLK

SEQ ID NO: 8450 - protein, 10 aa, Artificial Sequence
  Description of Artificial Sequence: Synthetic epitope
ESSLQVITVT

SEQ ID NO: 8451 - protein, 10 aa, Artificial Sequence
  Description of Artificial Sequence: Synthetic epitope
ESSQQEPITK

SEQ ID NO: 8452 - protein, 10 aa, Artificial Sequence
  Description of Artificial Sequence: Synthetic epitope
ESSQSLAAQK

SEQ ID NO: 8453 - protein, 10 aa, Artificial Sequence
  Description of Artificial Sequence: Synthetic epitope
ESSQSSVIND

SEQ ID NO: 8454 - protein, 10 aa, Artificial Sequence
  Description of Artificial Sequence: Synthetic epitope
ESSQVDVVNV

SEQ ID NO: 8455 - protein, 10 aa, Artificial Sequence
  Description of Artificial Sequence: Synthetic epitope
ESSQVTSRSA

SEQ ID NO: 8456 - protein, 10 aa, Artificial Sequence
  Description of Artificial Sequence: Synthetic epitope
ESSRLEKRSV

SEQ ID NO: 8457 - protein, 10 aa, Artificial Sequence
  Description of Artificial Sequence: Synthetic epitope
ESSRSMQKKQ

SEQ ID NO: 8458 - protein, 10 aa, Artificial Sequence
  Description of Artificial Sequence: Synthetic epitope
ESSRSSQEIE

SEQ ID NO: 8459 - protein, 10 aa, Artificial Sequence
  Description of Artificial Sequence: Synthetic epitope
ESSRTHSLAV

SEQ ID NO: 8460 - protein, 10 aa, Artificial Sequence
  Description of Artificial Sequence: Synthetic epitope
ESSTATDVFW

SEQ ID NO: 8461 - protein, 10 aa, Artificial Sequence
  Description of Artificial Sequence: Synthetic epitope
ESSTSSHMKI

SEQ ID NO: 8462 - protein, 10 aa, Artificial Sequence
  Description of Artificial Sequence: Synthetic epitope
ESSVEMTKSF

SEQ ID NO: 8463 - protein, 10 aa, Artificial Sequence
  Description of Artificial Sequence: Synthetic epitope
ESSVGAVSSL

SEQ ID NO: 8464 - protein, 10 aa, Artificial Sequence
  Description of Artificial Sequence: Synthetic epitope
ESSVGKSLSK

SEQ ID NO: 8465 - protein, 10 aa, Artificial Sequence
  Description of Artificial Sequence: Synthetic epitope
ESSVLTSFYN

SEQ ID NO: 8466 - protein, 10 aa, Artificial Sequence
  Description of Artificial Sequence: Synthetic epitope
ESSVNMDLYS

SEQ ID NO: 8467 - protein, 10 aa, Artificial Sequence
  Description of Artificial Sequence: Synthetic epitope
ESSVRQIIAN

SEQ ID NO: 8468 - protein, 10 aa, Artificial Sequence
  Description of Artificial Sequence: Synthetic epitope
ESSVSGSTGQ

SEQ ID NO: 8469 - protein, 10 aa, Artificial Sequence
  Description of Artificial Sequence: Synthetic epitope
ESSVSNTEEV

SEQ ID NO: 8470 - protein, 10 aa, Artificial Sequence
  Description of Artificial Sequence: Synthetic epitope
ESSYKFGDDV

SEQ ID NO: 8471 - protein, 10 aa, Artificial Sequence
  Description of Artificial Sequence: Synthetic epitope
ESTALKYSAI

SEQ ID NO: 8472 - protein, 10 aa, Artificial Sequence
  Description of Artificial Sequence: Synthetic epitope
ESTASKHSDH

SEQ ID NO: 8473 - protein, 10 aa, Artificial Sequence
  Description of Artificial Sequence: Synthetic epitope
ESTAVGQAHS

SEQ ID NO: 8474 - protein, 10 aa, Artificial Sequence
  Description of Artificial Sequence: Synthetic epitope
ESTDAHHERT

SEQ ID NO: 8475 - protein, 10 aa, Artificial Sequence
  Description of Artificial Sequence: Synthetic epitope
ESTEDEVTES

SEQ ID NO: 8476 - protein, 10 aa, Artificial Sequence
  Description of Artificial Sequence: Synthetic epitope
ESTEKKLKLH

SEQ ID NO: 8477 - protein, 10 aa, Artificial Sequence
  Description of Artificial Sequence: Synthetic epitope
ESTGTAKAEA

SEQ ID NO: 8478 - protein, 10 aa, Artificial Sequence
  Description of Artificial Sequence: Synthetic epitope
ESTILSKQMI

SEQ ID NO: 8479 - protein, 10 aa, Artificial Sequence
  Description of Artificial Sequence: Synthetic epitope
ESTISAVQQV

SEQ ID NO: 8480 - protein, 10 aa, Artificial Sequence
  Description of Artificial Sequence: Synthetic epitope
ESTISGAKEE

SEQ ID NO: 8481 - protein, 10 aa, Artificial Sequence
  Description of Artificial Sequence: Synthetic epitope
ESTKAEAVAA

SEQ ID NO: 8482 - protein, 10 aa, Artificial Sequence
  Description of Artificial Sequence: Synthetic epitope
ESTKASELDL

SEQ ID NO: 8483 - protein, 10 aa, Artificial Sequence
  Description of Artificial Sequence: Synthetic epitope
ESTKEAQNEL

SEQ ID NO: 8484 - protein, 10 aa, Artificial Sequence
  Description of Artificial Sequence: Synthetic epitope
ESTLGSKDTL

SEQ ID NO: 8485 - protein, 10 aa, Artificial Sequence
  Description of Artificial Sequence: Synthetic epitope
ESTLISSKPQ

SEQ ID NO: 8486 - protein, 10 aa, Artificial Sequence
  Description of Artificial Sequence: Synthetic epitope
ESTLLQLQEQ

SEQ ID NO: 8487 - protein, 10 aa, Artificial Sequence
  Description of Artificial Sequence: Synthetic epitope
ESTLSKSNQL

SEQ ID NO: 8488 - protein, 10 aa, Artificial Sequence
  Description of Artificial Sequence: Synthetic epitope
ESTMASISES

SEQ ID NO: 8489 - protein, 10 aa, Artificial Sequence
  Description of Artificial Sequence: Synthetic epitope
ESTMKIIKEE

SEQ ID NO: 8490 - protein, 10 aa, Artificial Sequence
  Description of Artificial Sequence: Synthetic epitope
ESTNSTERNV

SEQ ID NO: 8491 - protein, 10 aa, Artificial Sequence
  Description of Artificial Sequence: Synthetic epitope
ESTNVQDSSE

SEQ ID NO: 8492 - protein, 10 aa, Artificial Sequence
  Description of Artificial Sequence: Synthetic epitope
ESTPHQSKET

SEQ ID NO: 8493 - protein, 10 aa, Artificial Sequence
  Description of Artificial Sequence: Synthetic epitope
ESTQATVEMT

SEQ ID NO: 8494 - protein, 10 aa, Artificial Sequence
  Description of Artificial Sequence: Synthetic epitope
ESTQDGKSGS

SEQ ID NO: 8495 - protein, 10 aa, Artificial Sequence
  Description of Artificial Sequence: Synthetic epitope
ESTQDVSSQV

SEQ ID NO: 8496 - protein, 10 aa, Artificial Sequence
  Description of Artificial Sequence: Synthetic epitope
ESTQELHASD

SEQ ID NO: 8497 - protein, 10 aa, Artificial Sequence
  Description of Artificial Sequence: Synthetic epitope
ESTRIMTKLR

SEQ ID NO: 8498 - protein, 10 aa, Artificial Sequence
  Description of Artificial Sequence: Synthetic epitope
ESTSESSDLD

SEQ ID NO: 8499 - protein, 10 aa, Artificial Sequence
  Description of Artificial Sequence: Synthetic epitope
ESTSFSAPRK

SEQ ID NO: 8500 - protein, 10 aa, Artificial Sequence
  Description of Artificial Sequence: Synthetic epitope
ESTSKLKNMV

SEQ ID NO: 8501 - protein, 10 aa, Artificial Sequence
  Description of Artificial Sequence: Synthetic epitope
ESTSPQIIEP

SEQ ID NO: 8502 - protein, 10 aa, Artificial Sequence
  Description of Artificial Sequence: Synthetic epitope
ESTVNSELKA

SEQ ID NO: 8503 - protein, 10 aa, Artificial Sequence
  Description of Artificial Sequence: Synthetic epitope
ESVAEKLSKL

SEQ ID NO: 8504 - protein, 10 aa, Artificial Sequence
  Description of Artificial Sequence: Synthetic epitope
ESVANSTVAY

SEQ ID NO: 8505 - protein, 10 aa, Artificial Sequence
  Description of Artificial Sequence: Synthetic epitope
ESVARIVKVQ

SEQ ID NO: 8506 - protein, 10 aa, Artificial Sequence
  Description of Artificial Sequence: Synthetic epitope
ESVASSRPQE

SEQ ID NO: 8507 - protein, 10 aa, Artificial Sequence
  Description of Artificial Sequence: Synthetic epitope
ESVATNIDEI

SEQ ID NO: 8508 - protein, 10 aa, Artificial Sequence
  Description of Artificial Sequence: Synthetic epitope
ESVEPEADVK

SEQ ID NO: 8509 - protein, 10 aa, Artificial Sequence
  Description of Artificial Sequence: Synthetic epitope
ESVESMDSAE

SEQ ID NO: 8510 - protein, 10 aa, Artificial Sequence
  Description of Artificial Sequence: Synthetic epitope
ESVEVIRATP

SEQ ID NO: 8511 - protein, 10 aa, Artificial Sequence
  Description of Artificial Sequence: Synthetic epitope
ESVIWAVNAG

SEQ ID NO: 8512 - protein, 10 aa, Artificial Sequence
  Description of Artificial Sequence: Synthetic epitope
ESVKKTKKSP

SEQ ID NO: 8513 - protein, 10 aa, Artificial Sequence
  Description of Artificial Sequence: Synthetic epitope
ESVKLIPKIE

SEQ ID NO: 8514 - protein, 10 aa, Artificial Sequence
  Description of Artificial Sequence: Synthetic epitope
ESVKQSRSPV

SEQ ID NO: 8515 - protein, 10 aa, Artificial Sequence
  Description of Artificial Sequence: Synthetic epitope
ESVKSSATRL

SEQ ID NO: 8516 - protein, 10 aa, Artificial Sequence
  Description of Artificial Sequence: Synthetic epitope
ESVLARLSKF

SEQ ID NO: 8517 - protein, 10 aa, Artificial Sequence
  Description of Artificial Sequence: Synthetic epitope
ESVLARVEEL

SEQ ID NO: 8518 - protein, 10 aa, Artificial Sequence
  Description of Artificial Sequence: Synthetic epitope
ESVLDLQEVT

SEQ ID NO: 8519 - protein, 10 aa, Artificial Sequence
  Description of Artificial Sequence: Synthetic epitope
ESVLIKMEQE

SEQ ID NO: 8520 - protein, 10 aa, Artificial Sequence
  Description of Artificial Sequence: Synthetic epitope
ESVLKILVNQ

SEQ ID NO: 8521 - protein, 10 aa, Artificial Sequence
  Description of Artificial Sequence: Synthetic epitope
ESVLKKLSKD

SEQ ID NO: 8522 - protein, 10 aa, Artificial Sequence
  Description of Artificial Sequence: Synthetic epitope
ESVNQDKESQ

SEQ ID NO: 8523 - protein, 10 aa, Artificial Sequence
  Description of Artificial Sequence: Synthetic epitope
ESVPSAKSAN

SEQ ID NO: 8524 - protein, 10 aa, Artificial Sequence
  Description of Artificial Sequence: Synthetic epitope
ESVPSRSRRG

SEQ ID NO: 8525 - protein, 10 aa, Artificial Sequence
  Description of Artificial Sequence: Synthetic epitope
ESVQKGFQML

SEQ ID NO: 8526 - protein, 10 aa, Artificial Sequence
  Description of Artificial Sequence: Synthetic epitope
ESVQLKTSRS

SEQ ID NO: 8527 - protein, 10 aa, Artificial Sequence
  Description of Artificial Sequence: Synthetic epitope
ESVQQEPERE

SEQ ID NO: 8528 - protein, 10 aa, Artificial Sequence
  Description of Artificial Sequence: Synthetic epitope
ESVQSKVKGP

SEQ ID NO: 8529 - protein, 10 aa, Artificial Sequence
  Description of Artificial Sequence: Synthetic epitope
ESVSALDIKE

SEQ ID NO: 8530 - protein, 10 aa, Artificial Sequence
  Description of Artificial Sequence: Synthetic epitope
ESVSEELLQL

SEQ ID NO: 8531 - protein, 10 aa, Artificial Sequence
  Description of Artificial Sequence: Synthetic epitope
ESVSKEEKEQ

SEQ ID NO: 8532 - protein, 10 aa, Artificial Sequence
  Description of Artificial Sequence: Synthetic epitope
ESVSLSGSPK

SEQ ID NO: 8533 - protein, 10 aa, Artificial Sequence
  Description of Artificial Sequence: Synthetic epitope
ESVSQTDKTE

SEQ ID NO: 8534 - protein, 10 aa, Artificial Sequence
  Description of Artificial Sequence: Synthetic epitope
ESVSVNIALG

SEQ ID NO: 8535 - protein, 10 aa, Artificial Sequence
  Description of Artificial Sequence: Synthetic epitope
ESVSWREIIT

SEQ ID NO: 8536 - protein, 10 aa, Artificial Sequence
  Description of Artificial Sequence: Synthetic epitope
ESVTEQDSKD

SEQ ID NO: 8537 - protein, 10 aa, Artificial Sequence
  Description of Artificial Sequence: Synthetic epitope
ESVTRSSTET

SEQ ID NO: 8538 - protein, 10 aa, Artificial Sequence
  Description of Artificial Sequence: Synthetic epitope
ESVTSESNFH

SEQ ID NO: 8539 - protein, 10 aa, Artificial Sequence
  Description of Artificial Sequence: Synthetic epitope
ESVTSLLEHL

SEQ ID NO: 8540 - protein, 10 aa, Artificial Sequence
  Description of Artificial Sequence: Synthetic epitope
ESVTTSTQTE

SEQ ID NO: 8541 - protein, 10 aa, Artificial Sequence
  Description of Artificial Sequence: Synthetic epitope
ESVVEVQAAW

SEQ ID NO: 8542 - protein, 10 aa, Artificial Sequence
  Description of Artificial Sequence: Synthetic epitope
ESVVLTNLTG

SEQ ID NO: 8543 - protein, 10 aa, Artificial Sequence
  Description of Artificial Sequence: Synthetic epitope
ESVWQISLQK

SEQ ID NO: 8544 - protein, 10 aa, Artificial Sequence
  Description of Artificial Sequence: Synthetic epitope
ESVYSRVIQV

SEQ ID NO: 8545 - protein, 10 aa, Artificial Sequence
  Description of Artificial Sequence: Synthetic epitope
ESVYVLANEP

SEQ ID NO: 8546 - protein, 10 aa, Artificial Sequence
  Description of Artificial Sequence: Synthetic epitope
ESWTTESAIS

SEQ ID NO: 8547 - protein, 10 aa, Artificial Sequence
  Description of Artificial Sequence: Synthetic epitope
ESYAGSEKKH

SEQ ID NO: 8548 - protein, 10 aa, Artificial Sequence
  Description of Artificial Sequence: Synthetic epitope
ESYEKAMDKA

SEQ ID NO: 8549 - protein, 10 aa, Artificial Sequence
  Description of Artificial Sequence: Synthetic epitope
ESYEMTAELD

SEQ ID NO: 8550 - protein, 10 aa, Artificial Sequence
  Description of Artificial Sequence: Synthetic epitope
ESYISQQKTG

SEQ ID NO: 8551 - protein, 10 aa, Artificial Sequence
  Description of Artificial Sequence: Synthetic epitope
ESYRNMKMKD

SEQ ID NO: 8552 - protein, 10 aa, Artificial Sequence
  Description of Artificial Sequence: Synthetic epitope
ETAATLTTKH

SEQ ID NO: 8553 - protein, 10 aa, Artificial Sequence
  Description of Artificial Sequence: Synthetic epitope
ETAAVMSLLT

SEQ ID NO: 8554 - protein, 10 aa, Artificial Sequence
  Description of Artificial Sequence: Synthetic epitope
ETAAWFSHDE

SEQ ID NO: 8555 - protein, 10 aa, Artificial Sequence
  Description of Artificial Sequence: Synthetic epitope
ETADASLSKH

SEQ ID NO: 8556 - protein, 10 aa, Artificial Sequence
  Description of Artificial Sequence: Synthetic epitope
ETADEFYSTM

SEQ ID NO: 8557 - protein, 10 aa, Artificial Sequence
  Description of Artificial Sequence: Synthetic epitope
ETADETSHLQ

SEQ ID NO: 8558 - protein, 10 aa, Artificial Sequence
  Description of Artificial Sequence: Synthetic epitope
ETAEMAEEAQ

SEQ ID NO: 8559 - protein, 10 aa, Artificial Sequence
  Description of Artificial Sequence: Synthetic epitope
ETAENVNNGN

SEQ ID NO: 8560 - protein, 10 aa, Artificial Sequence
  Description of Artificial Sequence: Synthetic epitope
ETAESKEKMA

SEQ ID NO: 8561 - protein, 10 aa, Artificial Sequence
  Description of Artificial Sequence: Synthetic epitope
ETAGSTSIPK

SEQ ID NO: 8562 - protein, 10 aa, Artificial Sequence
  Description of Artificial Sequence: Synthetic epitope
ETAIRQLTEP

SEQ ID NO: 8563 - protein, 10 aa, Artificial Sequence
  Description of Artificial Sequence: Synthetic epitope
ETAKKRNSIS

SEQ ID NO: 8564 - protein, 10 aa, Artificial Sequence
  Description of Artificial Sequence: Synthetic epitope
ETALQQKQVS

SEQ ID NO: 8565 - protein, 10 aa, Artificial Sequence
  Description of Artificial Sequence: Synthetic epitope
ETALSELVAN

SEQ ID NO: 8566 - protein, 10 aa, Artificial Sequence
  Description of Artificial Sequence: Synthetic epitope
ETANATSTLK

SEQ ID NO: 8567 - protein, 10 aa, Artificial Sequence
  Description of Artificial Sequence: Synthetic epitope
ETANRTFQEK

SEQ ID NO: 8568 - protein, 10 aa, Artificial Sequence
  Description of Artificial Sequence: Synthetic epitope
ETAPAARTPQ

SEQ ID NO: 8569 - protein, 10 aa, Artificial Sequence
  Description of Artificial Sequence: Synthetic epitope
ETAREHSKGQ

SEQ ID NO: 8570 - protein, 10 aa, Artificial Sequence
  Description of Artificial Sequence: Synthetic epitope
ETASAASSLA

SEQ ID NO: 8571 - protein, 10 aa, Artificial Sequence
  Description of Artificial Sequence: Synthetic epitope
ETASEADSSE

SEQ ID NO: 8572 - protein, 10 aa, Artificial Sequence
  Description of Artificial Sequence: Synthetic epitope
ETASKSANPP

SEQ ID NO: 8573 - protein, 10 aa, Artificial Sequence
  Description of Artificial Sequence: Synthetic epitope
ETASSLVKNA

SEQ ID NO: 8574 - protein, 10 aa, Artificial Sequence
  Description of Artificial Sequence: Synthetic epitope
ETASSTIDGL

SEQ ID NO: 8575 - protein, 10 aa, Artificial Sequence
  Description of Artificial Sequence: Synthetic epitope
ETASVSDMGS

SEQ ID NO: 8576 - protein, 10 aa, Artificial Sequence
  Description of Artificial Sequence: Synthetic epitope
ETATESALQN

SEQ ID NO: 8577 - protein, 10 aa, Artificial Sequence
  Description of Artificial Sequence: Synthetic epitope
ETATRSITNN

SEQ ID NO: 8578 - protein, 10 aa, Artificial Sequence
  Description of Artificial Sequence: Synthetic epitope
ETAVSVIPKE

SEQ ID NO: 8579 - protein, 10 aa, Artificial Sequence
  Description of Artificial Sequence: Synthetic epitope
ETDALQKNSQ

SEQ ID NO: 8580 - protein, 10 aa, Artificial Sequence
  Description of Artificial Sequence: Synthetic epitope
ETDANLGKSS

SEQ ID NO: 8581 - protein, 10 aa, Artificial Sequence
  Description of Artificial Sequence: Synthetic epitope
ETDEAAFEPD

SEQ ID NO: 8582 - protein, 10 aa, Artificial Sequence
  Description of Artificial Sequence: Synthetic epitope
ETDEGDKAQD

SEQ ID NO: 8583 - protein, 10 aa, Artificial Sequence
  Description of Artificial Sequence: Synthetic epitope
ETDQSTQEPF

SEQ ID NO: 8584 - protein, 10 aa, Artificial Sequence
  Description of Artificial Sequence: Synthetic epitope
ETDSAVATAR

SEQ ID NO: 8585 - protein, 10 aa, Artificial Sequence
  Description of Artificial Sequence: Synthetic epitope
ETDSMSLSEK

SEQ ID NO: 8586 - protein, 10 aa, Artificial Sequence
  Description of Artificial Sequence: Synthetic epitope
ETDSTVKSQE

SEQ ID NO: 8587 - protein, 10 aa, Artificial Sequence
  Description of Artificial Sequence: Synthetic epitope
ETDTAISYKE

SEQ ID NO: 8588 - protein, 10 aa, Artificial Sequence
  Description of Artificial Sequence: Synthetic epitope
ETDVAKKISH

SEQ ID NO: 8589 - protein, 10 aa, Artificial Sequence
  Description of Artificial Sequence: Synthetic epitope
ETDVLSSWRE

SEQ ID NO: 8590 - protein, 10 aa, Artificial Sequence
  Description of Artificial Sequence: Synthetic epitope
ETEAEDAALD

SEQ ID NO: 8591 - protein, 10 aa, Artificial Sequence
  Description of Artificial Sequence: Synthetic epitope
ETEAGETDSA

SEQ ID NO: 8592 - protein, 10 aa, Artificial Sequence
  Description of Artificial Sequence: Synthetic epitope
ETEASTSGEV

SEQ ID NO: 8593 - protein, 10 aa, Artificial Sequence
  Description of Artificial Sequence: Synthetic epitope
ETEDSASENT

SEQ ID NO: 8594 - protein, 10 aa, Artificial Sequence
  Description of Artificial Sequence: Synthetic epitope
ETEEKFDDGG

SEQ ID NO: 8595 - protein, 10 aa, Artificial Sequence
  Description of Artificial Sequence: Synthetic epitope
ETEFKPVAQQ

SEQ ID NO: 8596 - protein, 10 aa, Artificial Sequence
  Description of Artificial Sequence: Synthetic epitope
ETEIKNKMQQ

SEQ ID NO: 8597 - protein, 10 aa, Artificial Sequence
  Description of Artificial Sequence: Synthetic epitope
ETEINITKTT

SEQ ID NO: 8598 - protein, 10 aa, Artificial Sequence
  Description of Artificial Sequence: Synthetic epitope
ETEKFMNRNM

SEQ ID NO: 8599 - protein, 10 aa, Artificial Sequence
  Description of Artificial Sequence: Synthetic epitope
ETEKKERYIV

SEQ ID NO: 8600 - protein, 10 aa, Artificial Sequence
  Description of Artificial Sequence: Synthetic epitope
ETELSVSAEL

SEQ ID NO: 8601 - protein, 10 aa, Artificial Sequence
  Description of Artificial Sequence: Synthetic epitope
ETENNDSETA

SEQ ID NO: 8602 - protein, 10 aa, Artificial Sequence
  Description of Artificial Sequence: Synthetic epitope
ETENSALQLQ

SEQ ID NO: 8603 - protein, 10 aa, Artificial Sequence
  Description of Artificial Sequence: Synthetic epitope
ETEPGTSTKD

SEQ ID NO: 8604 - protein, 10 aa, Artificial Sequence
  Description of Artificial Sequence: Synthetic epitope
ETEPVKLGGH

SEQ ID NO: 8605 - protein, 10 aa, Artificial Sequence
  Description of Artificial Sequence: Synthetic epitope
ETEQALQEQE

SEQ ID NO: 8606 - protein, 10 aa, Artificial Sequence
  Description of Artificial Sequence: Synthetic epitope
ETEQDTEKMK

SEQ ID NO: 8607 - protein, 10 aa, Artificial Sequence
  Description of Artificial Sequence: Synthetic epitope
ETERGQQEAK

SEQ ID NO: 8608 - protein, 10 aa, Artificial Sequence
  Description of Artificial Sequence: Synthetic epitope
ETESDSESNH

SEQ ID NO: 8609 - protein, 10 aa, Artificial Sequence
  Description of Artificial Sequence: Synthetic epitope
ETESLRKIAL

SEQ ID NO: 8610 - protein, 10 aa, Artificial Sequence
  Description of Artificial Sequence: Synthetic epitope
ETESTQAQQE

SEQ ID NO: 8611 - protein, 10 aa, Artificial Sequence
  Description of Artificial Sequence: Synthetic epitope
ETETAQHSGL

SEQ ID NO: 8612 - protein, 10 aa, Artificial Sequence
  Description of Artificial Sequence: Synthetic epitope
ETETINQQLN

SEQ ID NO: 8613 - protein, 10 aa, Artificial Sequence
  Description of Artificial Sequence: Synthetic epitope
ETETSRSREE

SEQ ID NO: 8614 - protein, 10 aa, Artificial Sequence
  Description of Artificial Sequence: Synthetic epitope
ETETSSTHSE

SEQ ID NO: 8615 - protein, 10 aa, Artificial Sequence
  Description of Artificial Sequence: Synthetic epitope
ETEVKQNGSS

SEQ ID NO: 8616 - protein, 10 aa, Artificial Sequence
  Description of Artificial Sequence: Synthetic epitope
ETEVLLVKKQ

SEQ ID NO: 8617 - protein, 10 aa, Artificial Sequence
  Description of Artificial Sequence: Synthetic epitope
ETEVRESEKQ

SEQ ID NO: 8618 - protein, 10 aa, Artificial Sequence
  Description of Artificial Sequence: Synthetic epitope
ETEYIHDETG

SEQ ID NO: 8619 - protein, 10 aa, Artificial Sequence
  Description of Artificial Sequence: Synthetic epitope
ETFASTASQL

SEQ ID NO: 8620 - protein, 10 aa, Artificial Sequence
  Description of Artificial Sequence: Synthetic epitope
ETFATSKVKS

SEQ ID NO: 8621 - protein, 10 aa, Artificial Sequence
  Description of Artificial Sequence: Synthetic epitope
ETFELHRTNQ

SEQ ID NO: 8622 - protein, 10 aa, Artificial Sequence
  Description of Artificial Sequence: Synthetic epitope
ETFKNQMSTI

SEQ ID NO: 8623 - protein, 10 aa, Artificial Sequence
  Description of Artificial Sequence: Synthetic epitope
ETFQTITSYI

SEQ ID NO: 8624 - protein, 10 aa, Artificial Sequence
  Description of Artificial Sequence: Synthetic epitope
ETFSSATKRL

SEQ ID NO: 8625 - protein, 10 aa, Artificial Sequence
  Description of Artificial Sequence: Synthetic epitope
ETGAAELYDQ

SEQ ID NO: 8626 - protein, 10 aa, Artificial Sequence
  Description of Artificial Sequence: Synthetic epitope
ETGALSQTSQ

SEQ ID NO: 8627 - protein, 10 aa, Artificial Sequence
  Description of Artificial Sequence: Synthetic epitope
ETGEKEEQLI

SEQ ID NO: 8628 - protein, 10 aa, Artificial Sequence
  Description of Artificial Sequence: Synthetic epitope
ETGFAKKTFI

SEQ ID NO: 8629 - protein, 10 aa, Artificial Sequence
  Description of Artificial Sequence: Synthetic epitope
ETGHTSTARL

SEQ ID NO: 8630 - protein, 10 aa, Artificial Sequence
  Description of Artificial Sequence: Synthetic epitope
ETGKRYWQPW

SEQ ID NO: 8631 - protein, 10 aa, Artificial Sequence
  Description of Artificial Sequence: Synthetic epitope
ETGLLAASSK

SEQ ID NO: 8632 - protein, 10 aa, Artificial Sequence
  Description of Artificial Sequence: Synthetic epitope
ETGLSTINQT

SEQ ID NO: 8633 - protein, 10 aa, Artificial Sequence
  Description of Artificial Sequence: Synthetic epitope
ETGMESVIEA

SEQ ID NO: 8634 - protein, 10 aa, Artificial Sequence
  Description of Artificial Sequence: Synthetic epitope
ETGQFQKIVL

SEQ ID NO: 8635 - protein, 10 aa, Artificial Sequence
  Description of Artificial Sequence: Synthetic epitope
ETGRLMSKKP

SEQ ID NO: 8636 - protein, 10 aa, Artificial Sequence
  Description of Artificial Sequence: Synthetic epitope
ETGRTLQAIS

SEQ ID NO: 8637 - protein, 10 aa, Artificial Sequence
  Description of Artificial Sequence: Synthetic epitope
ETGSENENVS

SEQ ID NO: 8638 - protein, 10 aa, Artificial Sequence
  Description of Artificial Sequence: Synthetic epitope
ETGVTISQVD

SEQ ID NO: 8639 - protein, 10 aa, Artificial Sequence
  Description of Artificial Sequence: Synthetic epitope
ETHARHQALG

SEQ ID NO: 8640 - protein, 10 aa, Artificial Sequence
  Description of Artificial Sequence: Synthetic epitope
ETHHIDIKGP

SEQ ID NO: 8641 - protein, 10 aa, Artificial Sequence
  Description of Artificial Sequence: Synthetic epitope
ETHNVIASDK

SEQ ID NO: 8642 - protein, 10 aa, Artificial Sequence
  Description of Artificial Sequence: Synthetic epitope
ETHRTQVITQ

SEQ ID NO: 8643 - protein, 10 aa, Artificial Sequence
  Description of Artificial Sequence: Synthetic epitope
ETIAASSTPT

SEQ ID NO: 8644 - protein, 10 aa, Artificial Sequence
  Description of Artificial Sequence: Synthetic epitope
ETIAESSAQS

SEQ ID NO: 8645 - protein, 10 aa, Artificial Sequence
  Description of Artificial Sequence: Synthetic epitope
ETIAPKIARP

SEQ ID NO: 8646 - protein, 10 aa, Artificial Sequence
  Description of Artificial Sequence: Synthetic epitope
ETIEEQESPV

SEQ ID NO: 8647 - protein, 10 aa, Artificial Sequence
  Description of Artificial Sequence: Synthetic epitope
ETIEQEEASS

SEQ ID NO: 8648 - protein, 10 aa, Artificial Sequence
  Description of Artificial Sequence: Synthetic epitope
ETIEQKTKIE

SEQ ID NO: 8649 - protein, 10 aa, Artificial Sequence
  Description of Artificial Sequence: Synthetic epitope
ETIFTPSSVK

SEQ ID NO: 8650 - protein, 10 aa, Artificial Sequence
  Description of Artificial Sequence: Synthetic epitope
ETIIQKIKQQ

SEQ ID NO: 8651 - protein, 10 aa, Artificial Sequence
  Description of Artificial Sequence: Synthetic epitope
ETIKKDRRTT

SEQ ID NO: 8652 - protein, 10 aa, Artificial Sequence
  Description of Artificial Sequence: Synthetic epitope
ETIKSLLIRR

SEQ ID NO: 8653 - protein, 10 aa, Artificial Sequence
  Description of Artificial Sequence: Synthetic epitope
ETIMASSNES

SEQ ID NO: 8654 - protein, 10 aa, Artificial Sequence
  Description of Artificial Sequence: Synthetic epitope
ETIQEMENST

SEQ ID NO: 8655 - protein, 10 aa, Artificial Sequence
  Description of Artificial Sequence: Synthetic epitope
ETIRSQNVMA

SEQ ID NO: 8656 - protein, 10 aa, Artificial Sequence
  Description of Artificial Sequence: Synthetic epitope
ETISMTGLNL

SEQ ID NO: 8657 - protein, 10 aa, Artificial Sequence
  Description of Artificial Sequence: Synthetic epitope
ETISVPQEIK

SEQ ID NO: 8658 - protein, 10 aa, Artificial Sequence
  Description of Artificial Sequence: Synthetic epitope
ETKARRAGQS

SEQ ID NO: 8659 - protein, 10 aa, Artificial Sequence
  Description of Artificial Sequence: Synthetic epitope
ETKEIQSLSG

SEQ ID NO: 8660 - protein, 10 aa, Artificial Sequence
  Description of Artificial Sequence: Synthetic epitope
ETKENNLSEE

SEQ ID NO: 8661 - protein, 10 aa, Artificial Sequence
  Description of Artificial Sequence: Synthetic epitope
ETKFLLKLVK

SEQ ID NO: 8662 - protein, 10 aa, Artificial Sequence
  Description of Artificial Sequence: Synthetic epitope
ETKGAALSQT

SEQ ID NO: 8663 - protein, 10 aa, Artificial Sequence
  Description of Artificial Sequence: Synthetic epitope
ETKIKDAEGQ

SEQ ID NO: 8664 - protein, 10 aa, Artificial Sequence
  Description of Artificial Sequence: Synthetic epitope
ETKILLDHEK

SEQ ID NO: 8665 - protein, 10 aa, Artificial Sequence
  Description of Artificial Sequence: Synthetic epitope
ETKKHLVQLP

SEQ ID NO: 8666 - protein, 10 aa, Artificial Sequence
  Description of Artificial Sequence: Synthetic epitope
ETKKISEVSS

SEQ ID NO: 8667 - protein, 10 aa, Artificial Sequence
  Description of Artificial Sequence: Synthetic epitope
ETKPAQLVTS

SEQ ID NO: 8668 - protein, 10 aa, Artificial Sequence
  Description of Artificial Sequence: Synthetic epitope
ETKRNDDKGD

SEQ ID NO: 8669 - protein, 10 aa, Artificial Sequence
  Description of Artificial Sequence: Synthetic epitope
ETKSLSNTQL

SEQ ID NO: 8670 - protein, 10 aa, Artificial Sequence
  Description of Artificial Sequence: Synthetic epitope
ETKSVTEVDT

SEQ ID NO: 8671 - protein, 10 aa, Artificial Sequence
  Description of Artificial Sequence: Synthetic epitope
ETKTVSRSNR

SEQ ID NO: 8672 - protein, 10 aa, Artificial Sequence
  Description of Artificial Sequence: Synthetic epitope
ETKVNETKKH

SEQ ID NO: 8673 - protein, 10 aa, Artificial Sequence
  Description of Artificial Sequence: Synthetic epitope
ETKVQSLNIE

SEQ ID NO: 8674 - protein, 10 aa, Artificial Sequence
  Description of Artificial Sequence: Synthetic epitope
ETKVQTEHKR

SEQ ID NO: 8675 - protein, 10 aa, Artificial Sequence
  Description of Artificial Sequence: Synthetic epitope
ETLAKLYLKA

SEQ ID NO: 8676 - protein, 10 aa, Artificial Sequence
  Description of Artificial Sequence: Synthetic epitope
ETLALELKKL

SEQ ID NO: 8677 - protein, 10 aa, Artificial Sequence
  Description of Artificial Sequence: Synthetic epitope
ETLALKFENA

SEQ ID NO: 8678 - protein, 10 aa, Artificial Sequence
  Description of Artificial Sequence: Synthetic epitope
ETLAMRLTAL

SEQ ID NO: 8679 - protein, 10 aa, Artificial Sequence
  Description of Artificial Sequence: Synthetic epitope
ETLERAIKLV

SEQ ID NO: 8680 - protein, 10 aa, Artificial Sequence
  Description of Artificial Sequence: Synthetic epitope
ETLGVLARAV

SEQ ID NO: 8681 - protein, 10 aa, Artificial Sequence
  Description of Artificial Sequence: Synthetic epitope
ETLKAVAQDN

SEQ ID NO: 8682 - protein, 10 aa, Artificial Sequence
  Description of Artificial Sequence: Synthetic epitope
ETLKFEAIMM

SEQ ID NO: 8683 - protein, 10 aa, Artificial Sequence
  Description of Artificial Sequence: Synthetic epitope
ETLKFSTEHR

SEQ ID NO: 8684 - protein, 10 aa, Artificial Sequence
  Description of Artificial Sequence: Synthetic epitope
ETLKLSMSLQ

SEQ ID NO: 8685 - protein, 10 aa, Artificial Sequence
  Description of Artificial Sequence: Synthetic epitope
ETLKSRKKSD

SEQ ID NO: 8686 - protein, 10 aa, Artificial Sequence
  Description of Artificial Sequence: Synthetic epitope
ETLNKSIRQR

SEQ ID NO: 8687 - protein, 10 aa, Artificial Sequence
  Description of Artificial Sequence: Synthetic epitope
ETLNLREQLS

SEQ ID NO: 8688 - protein, 10 aa, Artificial Sequence
  Description of Artificial Sequence: Synthetic epitope
ETLPLTKTEE

SEQ ID NO: 8689 - protein, 10 aa, Artificial Sequence
  Description of Artificial Sequence: Synthetic epitope
ETLRIGKLKA

SEQ ID NO: 8690 - protein, 10 aa, Artificial Sequence
  Description of Artificial Sequence: Synthetic epitope
ETLRLQALRK

SEQ ID NO: 8691 - protein, 10 aa, Artificial Sequence
  Description of Artificial Sequence: Synthetic epitope
ETLRTENEHR

SEQ ID NO: 8692 - protein, 10 aa, Artificial Sequence
  Description of Artificial Sequence: Synthetic epitope
ETLRTLSEMR

SEQ ID NO: 8693 - protein, 10 aa, Artificial Sequence
  Description of Artificial Sequence: Synthetic epitope
ETLSAQNHSA

SEQ ID NO: 8694 - protein, 10 aa, Artificial Sequence
  Description of Artificial Sequence: Synthetic epitope
ETLSGTDTFS

SEQ ID NO: 8695 - protein, 10 aa, Artificial Sequence
  Description of Artificial Sequence: Synthetic epitope
ETLSLAVGSS

SEQ ID NO: 8696 - protein, 10 aa, Artificial Sequence
  Description of Artificial Sequence: Synthetic epitope
ETLSLEKKEM

SEQ ID NO: 8697 - protein, 10 aa, Artificial Sequence
  Description of Artificial Sequence: Synthetic epitope
ETLSSAKLAV

SEQ ID NO: 8698 - protein, 10 aa, Artificial Sequence
  Description of Artificial Sequence: Synthetic epitope
ETLSSALSKG

SEQ ID NO: 8699 - protein, 10 aa, Artificial Sequence
  Description of Artificial Sequence: Synthetic epitope
ETLTALQAKS

SEQ ID NO: 8700 - protein, 10 aa, Artificial Sequence
  Description of Artificial Sequence: Synthetic epitope
ETLTRARDTI

SEQ ID NO: 8701 - protein, 10 aa, Artificial Sequence
  Description of Artificial Sequence: Synthetic epitope
ETLVKEEVEA

SEQ ID NO: 8702 - protein, 10 aa, Artificial Sequence
  Description of Artificial Sequence: Synthetic epitope
ETMDSENANS

SEQ ID NO: 8703 - protein, 10 aa, Artificial Sequence
  Description of Artificial Sequence: Synthetic epitope
ETMFKKAKTK

SEQ ID NO: 8704 - protein, 10 aa, Artificial Sequence
  Description of Artificial Sequence: Synthetic epitope
ETMIKTYGQT

SEQ ID NO: 8705 - protein, 10 aa, Artificial Sequence
  Description of Artificial Sequence: Synthetic epitope
ETMKGIVAAS

SEQ ID NO: 8706 - protein, 10 aa, Artificial Sequence
  Description of Artificial Sequence: Synthetic epitope
ETMLSQADSL

SEQ ID NO: 8707 - protein, 10 aa, Artificial Sequence
  Description of Artificial Sequence: Synthetic epitope
ETMSTNDTIV

SEQ ID NO: 8708 - protein, 10 aa, Artificial Sequence
  Description of Artificial Sequence: Synthetic epitope
ETMTVSSLAI

SEQ ID NO: 8709 - protein, 10 aa, Artificial Sequence
  Description of Artificial Sequence: Synthetic epitope
ETNHVSLKID

SEQ ID NO: 8710 - protein, 10 aa, Artificial Sequence
  Description of Artificial Sequence: Synthetic epitope
ETNIKISIAE

SEQ ID NO: 8711 - protein, 10 aa, Artificial Sequence
  Description of Artificial Sequence: Synthetic epitope
ETNKGTKTEG

SEQ ID NO: 8712 - protein, 10 aa, Artificial Sequence
  Description of Artificial Sequence: Synthetic epitope
ETNKSSFSMS

SEQ ID NO: 8713 - protein, 10 aa, Artificial Sequence
  Description of Artificial Sequence: Synthetic epitope
ETNLASKDSH

SEQ ID NO: 8714 - protein, 10 aa, Artificial Sequence
  Description of Artificial Sequence: Synthetic epitope
ETNPESQNSK

SEQ ID NO: 8715 - protein, 10 aa, Artificial Sequence
  Description of Artificial Sequence: Synthetic epitope
ETNPYQHHFI

SEQ ID NO: 8716 - protein, 10 aa, Artificial Sequence
  Description of Artificial Sequence: Synthetic epitope
ETNQHDSKNQ

SEQ ID NO: 8717 - protein, 10 aa, Artificial Sequence
  Description of Artificial Sequence: Synthetic epitope
ETNRENDKQE

SEQ ID NO: 8718 - protein, 10 aa, Artificial Sequence
  Description of Artificial Sequence: Synthetic epitope
ETNRKTDDPE

SEQ ID NO: 8719 - protein, 10 aa, Artificial Sequence
  Description of Artificial Sequence: Synthetic epitope
ETNSSRSTSE

SEQ ID NO: 8720 - protein, 10 aa, Artificial Sequence
  Description of Artificial Sequence: Synthetic epitope
ETNTSTSVTS

SEQ ID NO: 8721 - protein, 10 aa, Artificial Sequence
  Description of Artificial Sequence: Synthetic epitope
ETPATRMSII

SEQ ID NO: 8722 - protein, 10 aa, Artificial Sequence
  Description of Artificial Sequence: Synthetic epitope
ETPEVTKVNH

SEQ ID NO: 8723 - protein, 10 aa, Artificial Sequence
  Description of Artificial Sequence: Synthetic epitope
ETPLSASTKM

SEQ ID NO: 8724 - protein, 10 aa, Artificial Sequence
  Description of Artificial Sequence: Synthetic epitope
ETPRTSDGEK

SEQ ID NO: 8725 - protein, 10 aa, Artificial Sequence
  Description of Artificial Sequence: Synthetic epitope
ETPSMMAKHL

SEQ ID NO: 8726 - protein, 10 aa, Artificial Sequence
  Description of Artificial Sequence: Synthetic epitope
ETPTKVARPT

SEQ ID NO: 8727 - protein, 10 aa, Artificial Sequence
  Description of Artificial Sequence: Synthetic epitope
ETPVRLYQNM

SEQ ID NO: 8728 - protein, 10 aa, Artificial Sequence
  Description of Artificial Sequence: Synthetic epitope
ETPVSRLRPQ

SEQ ID NO: 8729 - protein, 10 aa, Artificial Sequence
  Description of Artificial Sequence: Synthetic epitope
ETPVVSLAEA

SEQ ID NO: 8730 - protein, 10 aa, Artificial Sequence
  Description of Artificial Sequence: Synthetic epitope
ETQALALRVI

SEQ ID NO: 8731 - protein, 10 aa, Artificial Sequence
  Description of Artificial Sequence: Synthetic epitope
ETQANQEKVL

SEQ ID NO: 8732 - protein, 10 aa, Artificial Sequence
  Description of Artificial Sequence: Synthetic epitope
ETQDSSQKKS

SEQ ID NO: 8733 - protein, 10 aa, Artificial Sequence
  Description of Artificial Sequence: Synthetic epitope
ETQEREAKAE

SEQ ID NO: 8734 - protein, 10 aa, Artificial Sequence
  Description of Artificial Sequence: Synthetic epitope
ETQETGSFSK

SEQ ID NO: 8735 - protein, 10 aa, Artificial Sequence
  Description of Artificial Sequence: Synthetic epitope
ETQGQSWTRD

SEQ ID NO: 8736 - protein, 10 aa, Artificial Sequence
  Description of Artificial Sequence: Synthetic epitope
ETQLAQVSQH

SEQ ID NO: 8737 - protein, 10 aa, Artificial Sequence
  Description of Artificial Sequence: Synthetic epitope
ETQPQQEKQD

SEQ ID NO: 8738 - protein, 10 aa, Artificial Sequence
  Description of Artificial Sequence: Synthetic epitope
ETQPSSTTPK

SEQ ID NO: 8739 - protein, 10 aa, Artificial Sequence
  Description of Artificial Sequence: Synthetic epitope
ETQQPEATAA

SEQ ID NO: 8740 - protein, 10 aa, Artificial Sequence
  Description of Artificial Sequence: Synthetic epitope
ETQRSYTALA

SEQ ID NO: 8741 - protein, 10 aa, Artificial Sequence
  Description of Artificial Sequence: Synthetic epitope
ETQRTPMNHQ

SEQ ID NO: 8742 - protein, 10 aa, Artificial Sequence
  Description of Artificial Sequence: Synthetic epitope
ETQSARAEEG

SEQ ID NO: 8743 - protein, 10 aa, Artificial Sequence
  Description of Artificial Sequence: Synthetic epitope
ETQTFSSKTE

SEQ ID NO: 8744 - protein, 10 aa, Artificial Sequence
  Description of Artificial Sequence: Synthetic epitope
ETQTGSRIQP

SEQ ID NO: 8745 - protein, 10 aa, Artificial Sequence
  Description of Artificial Sequence: Synthetic epitope
ETQTMSSGFE

SEQ ID NO: 8746 - protein, 10 aa, Artificial Sequence
  Description of Artificial Sequence: Synthetic epitope
ETQTQEITED

SEQ ID NO: 8747 - protein, 10 aa, Artificial Sequence
  Description of Artificial Sequence: Synthetic epitope
ETQTTEERTQ

SEQ ID NO: 8748 - protein, 10 aa, Artificial Sequence
  Description of Artificial Sequence: Synthetic epitope
ETRAAENTAI

SEQ ID NO: 8749 - protein, 10 aa, Artificial Sequence
  Description of Artificial Sequence: Synthetic epitope
ETRAIDEPNN

SEQ ID NO: 8750 - protein, 10 aa, Artificial Sequence
  Description of Artificial Sequence: Synthetic epitope
ETRASANAPR

SEQ ID NO: 8751 - protein, 10 aa, Artificial Sequence
  Description of Artificial Sequence: Synthetic epitope
ETRDISLIKQ

SEQ ID NO: 8752 - protein, 10 aa, Artificial Sequence
  Description of Artificial Sequence: Synthetic epitope
ETRGRGTSQL

SEQ ID NO: 8753 - protein, 10 aa, Artificial Sequence
  Description of Artificial Sequence: Synthetic epitope
ETRISSLEKD

SEQ ID NO: 8754 - protein, 10 aa, Artificial Sequence
  Description of Artificial Sequence: Synthetic epitope
ETRLARVNEQ

SEQ ID NO: 8755 - protein, 10 aa, Artificial Sequence
  Description of Artificial Sequence: Synthetic epitope
ETRQQLAQYQ

SEQ ID NO: 8756 - protein, 10 aa, Artificial Sequence
  Description of Artificial Sequence: Synthetic epitope
ETRRSQEVTD

SEQ ID NO: 8757 - protein, 10 aa, Artificial Sequence
  Description of Artificial Sequence: Synthetic epitope
ETRSQRKVGG

SEQ ID NO: 8758 - protein, 10 aa, Artificial Sequence
  Description of Artificial Sequence: Synthetic epitope
ETRTTLLDPD

SEQ ID NO: 8759 - protein, 10 aa, Artificial Sequence
  Description of Artificial Sequence: Synthetic epitope
ETRVAGRMVA

SEQ ID NO: 8760 - protein, 10 aa, Artificial Sequence
  Description of Artificial Sequence: Synthetic epitope
ETRVAQKLAE

SEQ ID NO: 8761 - protein, 10 aa, Artificial Sequence
  Description of Artificial Sequence: Synthetic epitope
ETSAGSELGE

SEQ ID NO: 8762 - protein, 10 aa, Artificial Sequence
  Description of Artificial Sequence: Synthetic epitope
ETSDDKAPVT

SEQ ID NO: 8763 - protein, 10 aa, Artificial Sequence
  Description of Artificial Sequence: Synthetic epitope
ETSDSHLTKA

SEQ ID NO: 8764 - protein, 10 aa, Artificial Sequence
  Description of Artificial Sequence: Synthetic epitope
ETSDSISLET

SEQ ID NO: 8765 - protein, 10 aa, Artificial Sequence
  Description of Artificial Sequence: Synthetic epitope
ETSDSSEPEE

SEQ ID NO: 8766 - protein, 10 aa, Artificial Sequence
  Description of Artificial Sequence: Synthetic epitope
ETSEDQLSEP

SEQ ID NO: 8767 - protein, 10 aa, Artificial Sequence
  Description of Artificial Sequence: Synthetic epitope
ETSEIKFPTA

SEQ ID NO: 8768 - protein, 10 aa, Artificial Sequence
  Description of Artificial Sequence: Synthetic epitope
ETSEKEALAR

SEQ ID NO: 8769 - protein, 10 aa, Artificial Sequence
  Description of Artificial Sequence: Synthetic epitope
ETSELVHSLT

SEQ ID NO: 8770 - protein, 10 aa, Artificial Sequence
  Description of Artificial Sequence: Synthetic epitope
ETSEMRSAPG

SEQ ID NO: 8771 - protein, 10 aa, Artificial Sequence
  Description of Artificial Sequence: Synthetic epitope
ETSEQKTNLE

SEQ ID NO: 8772 - protein, 10 aa, Artificial Sequence
  Description of Artificial Sequence: Synthetic epitope
ETSEQTAEAM

SEQ ID NO: 8773 - protein, 10 aa, Artificial Sequence
  Description of Artificial Sequence: Synthetic epitope
ETSESSVTEG

SEQ ID NO: 8774 - protein, 10 aa, Artificial Sequence
  Description of Artificial Sequence: Synthetic epitope
ETSFLRNTIA

SEQ ID NO: 8775 - protein, 10 aa, Artificial Sequence
  Description of Artificial Sequence: Synthetic epitope
ETSFNLISEK

SEQ ID NO: 8776 - protein, 10 aa, Artificial Sequence
  Description of Artificial Sequence: Synthetic epitope
ETSGAISITQ

SEQ ID NO: 8777 - protein, 10 aa, Artificial Sequence
  Description of Artificial Sequence: Synthetic epitope
ETSGSSASEE

SEQ ID NO: 8778 - protein, 10 aa, Artificial Sequence
  Description of Artificial Sequence: Synthetic epitope
ETSGSSTIGE

SEQ ID NO: 8779 - protein, 10 aa, Artificial Sequence
  Description of Artificial Sequence: Synthetic epitope
ETSHEKSETE

SEQ ID NO: 8780 - protein, 10 aa, Artificial Sequence
  Description of Artificial Sequence: Synthetic epitope
ETSKLGKQSS

SEQ ID NO: 8781 - protein, 10 aa, Artificial Sequence
  Description of Artificial Sequence: Synthetic epitope
ETSKLSSKSA

SEQ ID NO: 8782 - protein, 10 aa, Artificial Sequence
  Description of Artificial Sequence: Synthetic epitope
ETSKVTLKEQ

SEQ ID NO: 8783 - protein, 10 aa, Artificial Sequence
  Description of Artificial Sequence: Synthetic epitope
ETSNSESKQD

SEQ ID NO: 8784 - protein, 10 aa, Artificial Sequence
  Description of Artificial Sequence: Synthetic epitope
ETSNSTTKRQ

SEQ ID NO: 8785 - protein, 10 aa, Artificial Sequence
  Description of Artificial Sequence: Synthetic epitope
ETSQAKGEKN

SEQ ID NO: 8786 - protein, 10 aa, Artificial Sequence
  Description of Artificial Sequence: Synthetic epitope
ETSQAQRKWT

SEQ ID NO: 8787 - protein, 10 aa, Artificial Sequence
  Description of Artificial Sequence: Synthetic epitope
ETSQRRSEGP

SEQ ID NO: 8788 - protein, 10 aa, Artificial Sequence
  Description of Artificial Sequence: Synthetic epitope
ETSRETSQEG

SEQ ID NO: 8789 - protein, 10 aa, Artificial Sequence
  Description of Artificial Sequence: Synthetic epitope
ETSRQTYDDK

SEQ ID NO: 8790 - protein, 10 aa, Artificial Sequence
  Description of Artificial Sequence: Synthetic epitope
ETSSDSVIAE

SEQ ID NO: 8791 - protein, 10 aa, Artificial Sequence
  Description of Artificial Sequence: Synthetic epitope
ETSSLTESVS

SEQ ID NO: 8792 - protein, 10 aa, Artificial Sequence
  Description of Artificial Sequence: Synthetic epitope
ETSSQESAEE

SEQ ID NO: 8793 - protein, 10 aa, Artificial Sequence
  Description of Artificial Sequence: Synthetic epitope
ETSSQSEESY

SEQ ID NO: 8794 - protein, 10 aa, Artificial Sequence
  Description of Artificial Sequence: Synthetic epitope
ETSSRYSGAQ

SEQ ID NO: 8795 - protein, 10 aa, Artificial Sequence
  Description of Artificial Sequence: Synthetic epitope
ETSSTINTSA

SEQ ID NO: 8796 - protein, 10 aa, Artificial Sequence
  Description of Artificial Sequence: Synthetic epitope
ETSSTQKKSS

SEQ ID NO: 8797 - protein, 10 aa, Artificial Sequence
  Description of Artificial Sequence: Synthetic epitope
ETSSVVSGSE

SEQ ID NO: 8798 - protein, 10 aa, Artificial Sequence
  Description of Artificial Sequence: Synthetic epitope
ETSTGTSVAA

SEQ ID NO: 8799 - protein, 10 aa, Artificial Sequence
  Description of Artificial Sequence: Synthetic epitope
ETSTSTTHSV

SEQ ID NO: 8800 - protein, 10 aa, Artificial Sequence
  Description of Artificial Sequence: Synthetic epitope
ETSTTALQAS

SEQ ID NO: 8801 - protein, 10 aa, Artificial Sequence
  Description of Artificial Sequence: Synthetic epitope
ETSTTVEEAT

SEQ ID NO: 8802 - protein, 10 aa, Artificial Sequence
  Description of Artificial Sequence: Synthetic epitope
ETTATKNRVP

SEQ ID NO: 8803 - protein, 10 aa, Artificial Sequence
  Description of Artificial Sequence: Synthetic epitope
ETTDPSTASS

SEQ ID NO: 8804 - protein, 10 aa, Artificial Sequence
  Description of Artificial Sequence: Synthetic epitope
ETTEEAGREP

SEQ ID NO: 8805 - protein, 10 aa, Artificial Sequence
  Description of Artificial Sequence: Synthetic epitope
ETTEHLVTKS

SEQ ID NO: 8806 - protein, 10 aa, Artificial Sequence
  Description of Artificial Sequence: Synthetic epitope
ETTIKFAPAN

SEQ ID NO: 8807 - protein, 10 aa, Artificial Sequence
  Description of Artificial Sequence: Synthetic epitope
ETTKRKTSSD

SEQ ID NO: 8808 - protein, 10 aa, Artificial Sequence
  Description of Artificial Sequence: Synthetic epitope
ETTKTARATG

SEQ ID NO: 8809 - protein, 10 aa, Artificial Sequence
  Description of Artificial Sequence: Synthetic epitope
ETTKVTMQKS

SEQ ID NO: 8810 - protein, 10 aa, Artificial Sequence
  Description of Artificial Sequence: Synthetic epitope
ETTLSERASR

SEQ ID NO: 8811 - protein, 10 aa, Artificial Sequence
  Description of Artificial Sequence: Synthetic epitope
ETTLTQSPAF

SEQ ID NO: 8812 - protein, 10 aa, Artificial Sequence
  Description of Artificial Sequence: Synthetic epitope
ETTMDFGMEP

SEQ ID NO: 8813 - protein, 10 aa, Artificial Sequence
  Description of Artificial Sequence: Synthetic epitope
ETTPTETASR

SEQ ID NO: 8814 - protein, 10 aa, Artificial Sequence
  Description of Artificial Sequence: Synthetic epitope
ETTQKKIKGQ

SEQ ID NO: 8815 - protein, 10 aa, Artificial Sequence
  Description of Artificial Sequence: Synthetic epitope
ETTQPDMSSP

SEQ ID NO: 8816 - protein, 10 aa, Artificial Sequence
  Description of Artificial Sequence: Synthetic epitope
ETTSKNTTDD

SEQ ID NO: 8817 - protein, 10 aa, Artificial Sequence
  Description of Artificial Sequence: Synthetic epitope
ETTSLLVNQE

SEQ ID NO: 8818 - protein, 10 aa, Artificial Sequence
  Description of Artificial Sequence: Synthetic epitope
ETTSQATASE

SEQ ID NO: 8819 - protein, 10 aa, Artificial Sequence
  Description of Artificial Sequence: Synthetic epitope
ETTSSTPRIS

SEQ ID NO: 8820 - protein, 10 aa, Artificial Sequence
  Description of Artificial Sequence: Synthetic epitope
ETTVHASGWN

SEQ ID NO: 8821 - protein, 10 aa, Artificial Sequence
  Description of Artificial Sequence: Synthetic epitope
ETTVKFTSTS

SEQ ID NO: 8822 - protein, 10 aa, Artificial Sequence
  Description of Artificial Sequence: Synthetic epitope
ETTVQVLSSG

SEQ ID NO: 8823 - protein, 10 aa, Artificial Sequence
  Description of Artificial Sequence: Synthetic epitope
ETVAKDVVSQ

SEQ ID NO: 8824 - protein, 10 aa, Artificial Sequence
  Description of Artificial Sequence: Synthetic epitope
ETVAKEISEA

SEQ ID NO: 8825 - protein, 10 aa, Artificial Sequence
  Description of Artificial Sequence: Synthetic epitope
ETVAKTLQET

SEQ ID NO: 8826 - protein, 10 aa, Artificial Sequence
  Description of Artificial Sequence: Synthetic epitope
ETVELKIPEE

SEQ ID NO: 8827 - protein, 10 aa, Artificial Sequence
  Description of Artificial Sequence: Synthetic epitope
ETVKSDNKDD

SEQ ID NO: 8828 - protein, 10 aa, Artificial Sequence
  Description of Artificial Sequence: Synthetic epitope
ETVLQSAIKL

SEQ ID NO: 8829 - protein, 10 aa, Artificial Sequence
  Description of Artificial Sequence: Synthetic epitope
ETVMESNNMP

SEQ ID NO: 8830 - protein, 10 aa, Artificial Sequence
  Description of Artificial Sequence: Synthetic epitope
ETVMGQLDAH

SEQ ID NO: 8831 - protein, 10 aa, Artificial Sequence
  Description of Artificial Sequence: Synthetic epitope
ETVQRIKKTR

SEQ ID NO: 8832 - protein, 10 aa, Artificial Sequence
  Description of Artificial Sequence: Synthetic epitope
ETVRNTATKA

SEQ ID NO: 8833 - protein, 10 aa, Artificial Sequence
  Description of Artificial Sequence: Synthetic epitope
ETVRVLMSYA

SEQ ID NO: 8834 - protein, 10 aa, Artificial Sequence
  Description of Artificial Sequence: Synthetic epitope
ETVSETAFGM

SEQ ID NO: 8835 - protein, 10 aa, Artificial Sequence
  Description of Artificial Sequence: Synthetic epitope
ETVSRVSSVL

SEQ ID NO: 8836 - protein, 10 aa, Artificial Sequence
  Description of Artificial Sequence: Synthetic epitope
ETVSVLGEKN

SEQ ID NO: 8837 - protein, 10 aa, Artificial Sequence
  Description of Artificial Sequence: Synthetic epitope
ETVTTAAMQK

SEQ ID NO: 8838 - protein, 10 aa, Artificial Sequence
  Description of Artificial Sequence: Synthetic epitope
ETVTTIEIDE

SEQ ID NO: 8839 - protein, 10 aa, Artificial Sequence
  Description of Artificial Sequence: Synthetic epitope
ETVVEKATER

SEQ ID NO: 8840 - protein, 10 aa, Artificial Sequence
  Description of Artificial Sequence: Synthetic epitope
ETVWVSRANV

SEQ ID NO: 8841 - protein, 10 aa, Artificial Sequence
  Description of Artificial Sequence: Synthetic epitope
ETYTTSVKPV

SEQ ID NO: 8842 - protein, 10 aa, Artificial Sequence
  Description of Artificial Sequence: Synthetic epitope
EVAADALGEE

SEQ ID NO: 8843 - protein, 10 aa, Artificial Sequence
  Description of Artificial Sequence: Synthetic epitope
EVAAEALKAT

SEQ ID NO: 8844 - protein, 10 aa, Artificial Sequence
  Description of Artificial Sequence: Synthetic epitope
EVAAETEADR

SEQ ID NO: 8845 - protein, 10 aa, Artificial Sequence
  Description of Artificial Sequence: Synthetic epitope
EVAAQKPSED

SEQ ID NO: 8846 - protein, 10 aa, Artificial Sequence
  Description of Artificial Sequence: Synthetic epitope
EVAARVTSTG

SEQ ID NO: 8847 - protein, 10 aa, Artificial Sequence
  Description of Artificial Sequence: Synthetic epitope
EVAEEAQSGG

SEQ ID NO: 8848 - protein, 10 aa, Artificial Sequence
  Description of Artificial Sequence: Synthetic epitope
EVAEGKLNDH

SEQ ID NO: 8849 - protein, 10 aa, Artificial Sequence
  Description of Artificial Sequence: Synthetic epitope
EVAEKLEMLK

SEQ ID NO: 8850 - protein, 10 aa, Artificial Sequence
  Description of Artificial Sequence: Synthetic epitope
EVAEVAEEAM

SEQ ID NO: 8851 - protein, 10 aa, Artificial Sequence
  Description of Artificial Sequence: Synthetic epitope
EVAFSSAEML

SEQ ID NO: 8852 - protein, 10 aa, Artificial Sequence
  Description of Artificial Sequence: Synthetic epitope
EVAGSTSAKT

SEQ ID NO: 8853 - protein, 10 aa, Artificial Sequence
  Description of Artificial Sequence: Synthetic epitope
EVAILNSTTI

SEQ ID NO: 8854 - protein, 10 aa, Artificial Sequence
  Description of Artificial Sequence: Synthetic epitope
EVAKSKETKT

SEQ ID NO: 8855 - protein, 10 aa, Artificial Sequence
  Description of Artificial Sequence: Synthetic epitope
EVANLSAHSA

SEQ ID NO: 8856 - protein, 10 aa, Artificial Sequence
  Description of Artificial Sequence: Synthetic epitope
EVAPITRGQG

SEQ ID NO: 8857 - protein, 10 aa, Artificial Sequence
  Description of Artificial Sequence: Synthetic epitope
EVAQEAAEEP

SEQ ID NO: 8858 - protein, 10 aa, Artificial Sequence
  Description of Artificial Sequence: Synthetic epitope
EVAQQAVDAD

SEQ ID NO: 8859 - protein, 10 aa, Artificial Sequence
  Description of Artificial Sequence: Synthetic epitope
EVAQQFTHAG

SEQ ID NO: 8860 - protein, 10 aa, Artificial Sequence
  Description of Artificial Sequence: Synthetic epitope
EVAQRTSEGA

SEQ ID NO: 8861 - protein, 10 aa, Artificial Sequence
  Description of Artificial Sequence: Synthetic epitope
EVAQTLLTQD

SEQ ID NO: 8862 - protein, 10 aa, Artificial Sequence
  Description of Artificial Sequence: Synthetic epitope
EVARLTQERG

SEQ ID NO: 8863 - protein, 10 aa, Artificial Sequence
  Description of Artificial Sequence: Synthetic epitope
EVASAKEFQI

SEQ ID NO: 8864 - protein, 10 aa, Artificial Sequence
  Description of Artificial Sequence: Synthetic epitope
EVASIVLKFK

SEQ ID NO: 8865 - protein, 10 aa, Artificial Sequence
  Description of Artificial Sequence: Synthetic epitope
EVASSLTLQP

SEQ ID NO: 8866 - protein, 10 aa, Artificial Sequence
  Description of Artificial Sequence: Synthetic epitope
EVASVLFKAE

SEQ ID NO: 8867 - protein, 10 aa, Artificial Sequence
  Description of Artificial Sequence: Synthetic epitope
EVATDVFNSK

SEQ ID NO: 8868 - protein, 10 aa, Artificial Sequence
  Description of Artificial Sequence: Synthetic epitope
EVATLKSRVT

SEQ ID NO: 8869 - protein, 10 aa, Artificial Sequence
  Description of Artificial Sequence: Synthetic epitope
EVAVNDDEMD

SEQ ID NO: 8870 - protein, 10 aa, Artificial Sequence
  Description of Artificial Sequence: Synthetic epitope
EVAVSKARAK

SEQ ID NO: 8871 - protein, 10 aa, Artificial Sequence
  Description of Artificial Sequence: Synthetic epitope
EVDATSKYSV

SEQ ID NO: 8872 - protein, 10 aa, Artificial Sequence
  Description of Artificial Sequence: Synthetic epitope
EVDGQTKLIT

SEQ ID NO: 8873 - protein, 10 aa, Artificial Sequence
  Description of Artificial Sequence: Synthetic epitope
EVDKVSMLSR

SEQ ID NO: 8874 - protein, 10 aa, Artificial Sequence
  Description of Artificial Sequence: Synthetic epitope
EVDQREEDYA

SEQ ID NO: 8875 - protein, 10 aa, Artificial Sequence
  Description of Artificial Sequence: Synthetic epitope
EVDVAATRLG

SEQ ID NO: 8876 - protein, 10 aa, Artificial Sequence
  Description of Artificial Sequence: Synthetic epitope
EVDYSATVDQ

SEQ ID NO: 8877 - protein, 10 aa, Artificial Sequence
  Description of Artificial Sequence: Synthetic epitope
EVEAKNKIEE

SEQ ID NO: 8878 - protein, 10 aa, Artificial Sequence
  Description of Artificial Sequence: Synthetic epitope
EVEDESAQTG

SEQ ID NO: 8879 - protein, 10 aa, Artificial Sequence
  Description of Artificial Sequence: Synthetic epitope
EVEDGYDLEA

SEQ ID NO: 8880 - protein, 10 aa, Artificial Sequence
  Description of Artificial Sequence: Synthetic epitope
EVEDLSLIFT

SEQ ID NO: 8881 - protein, 10 aa, Artificial Sequence
  Description of Artificial Sequence: Synthetic epitope
EVEETSMPMT

SEQ ID NO: 8882 - protein, 10 aa, Artificial Sequence
  Description of Artificial Sequence: Synthetic epitope
EVEGAEAEIP

SEQ ID NO: 8883 - protein, 10 aa, Artificial Sequence
  Description of Artificial Sequence: Synthetic epitope
EVEHLSLKKY

SEQ ID NO: 8884 - protein, 10 aa, Artificial Sequence
  Description of Artificial Sequence: Synthetic epitope
EVEIKGTKHG

SEQ ID NO: 8885 - protein, 10 aa, Artificial Sequence
  Description of Artificial Sequence: Synthetic epitope
EVEILSAVNF

SEQ ID NO: 8886 - protein, 10 aa, Artificial Sequence
  Description of Artificial Sequence: Synthetic epitope
EVEKMRRAEA

SEQ ID NO: 8887 - protein, 10 aa, Artificial Sequence
  Description of Artificial Sequence: Synthetic epitope
EVEQVANEKL

SEQ ID NO: 8888 - protein, 10 aa, Artificial Sequence
  Description of Artificial Sequence: Synthetic epitope
EVERAQSEYS

SEQ ID NO: 8889 - protein, 10 aa, Artificial Sequence
  Description of Artificial Sequence: Synthetic epitope
EVEREQLPDK

SEQ ID NO: 8890 - protein, 10 aa, Artificial Sequence
  Description of Artificial Sequence: Synthetic epitope
EVERSLSNTE

SEQ ID NO: 8891 - protein, 10 aa, Artificial Sequence
  Description of Artificial Sequence: Synthetic epitope
EVESASVTSQ

SEQ ID NO: 8892 - protein, 10 aa, Artificial Sequence
  Description of Artificial Sequence: Synthetic epitope
EVESRSSGLE

SEQ ID NO: 8893 - protein, 10 aa, Artificial Sequence
  Description of Artificial Sequence: Synthetic epitope
EVETVSQQYL

SEQ ID NO: 8894 - protein, 10 aa, Artificial Sequence
  Description of Artificial Sequence: Synthetic epitope
EVEVKSTEEA

SEQ ID NO: 8895 - protein, 10 aa, Artificial Sequence
  Description of Artificial Sequence: Synthetic epitope
EVEYEQKRAQ

SEQ ID NO: 8896 - protein, 10 aa, Artificial Sequence
  Description of Artificial Sequence: Synthetic epitope
EVFGAVLRQE

SEQ ID NO: 8897 - protein, 10 aa, Artificial Sequence
  Description of Artificial Sequence: Synthetic epitope
EVFIASISLK

SEQ ID NO: 8898 - protein, 10 aa, Artificial Sequence
  Description of Artificial Sequence: Synthetic epitope
EVFKSSQEIQ

SEQ ID NO: 8899 - protein, 10 aa, Artificial Sequence
  Description of Artificial Sequence: Synthetic epitope
EVFLKVLTAQ

SEQ ID NO: 8900 - protein, 10 aa, Artificial Sequence
  Description of Artificial Sequence: Synthetic epitope
EVFNESLLTE

SEQ ID NO: 8901 - protein, 10 aa, Artificial Sequence
  Description of Artificial Sequence: Synthetic epitope
EVFRDNNGTA

SEQ ID NO: 8902 - protein, 10 aa, Artificial Sequence
  Description of Artificial Sequence: Synthetic epitope
EVFRSIVLNE

SEQ ID NO: 8903 - protein, 10 aa, Artificial Sequence
  Description of Artificial Sequence: Synthetic epitope
EVGAGTAVKD

SEQ ID NO: 8904 - protein, 10 aa, Artificial Sequence
  Description of Artificial Sequence: Synthetic epitope
EVGANAVTPM

SEQ ID NO: 8905 - protein, 10 aa, Artificial Sequence
  Description of Artificial Sequence: Synthetic epitope
EVGKLQKEVV

SEQ ID NO: 8906 - protein, 10 aa, Artificial Sequence
  Description of Artificial Sequence: Synthetic epitope
EVGKPSRVQK

SEQ ID NO: 8907 - protein, 10 aa, Artificial Sequence
  Description of Artificial Sequence: Synthetic epitope
EVGLSSQAEA

SEQ ID NO: 8908 - protein, 10 aa, Artificial Sequence
  Description of Artificial Sequence: Synthetic epitope
EVGNDLDIAH

SEQ ID NO: 8909 - protein, 10 aa, Artificial Sequence
  Description of Artificial Sequence: Synthetic epitope
EVGSSQFNNE

SEQ ID NO: 8910 - protein, 10 aa, Artificial Sequence
  Description of Artificial Sequence: Synthetic epitope
EVGWQHVPII

SEQ ID NO: 8911 - protein, 10 aa, Artificial Sequence
  Description of Artificial Sequence: Synthetic epitope
EVHDKLSKLS

SEQ ID NO: 8912 - protein, 10 aa, Artificial Sequence
  Description of Artificial Sequence: Synthetic epitope
EVHGRERIHG

SEQ ID NO: 8913 - protein, 10 aa, Artificial Sequence
  Description of Artificial Sequence: Synthetic epitope
EVHSISNSSH

SEQ ID NO: 8914 - protein, 10 aa, Artificial Sequence
  Description of Artificial Sequence: Synthetic epitope
EVIAIPTAQS

SEQ ID NO: 8915 - protein, 10 aa, Artificial Sequence
  Description of Artificial Sequence: Synthetic epitope
EVIAQQVSDK

SEQ ID NO: 8916 - protein, 10 aa, Artificial Sequence
  Description of Artificial Sequence: Synthetic epitope
EVIGDEVSAS

SEQ ID NO: 8917 - protein, 10 aa, Artificial Sequence
  Description of Artificial Sequence: Synthetic epitope
EVIGSVSLSL

SEQ ID NO: 8918 - protein, 10 aa, Artificial Sequence
  Description of Artificial Sequence: Synthetic epitope
EVIKNLSLEA

SEQ ID NO: 8919 - protein, 10 aa, Artificial Sequence
  Description of Artificial Sequence: Synthetic epitope
EVILKKQQAA

SEQ ID NO: 8920 - protein, 10 aa, Artificial Sequence
  Description of Artificial Sequence: Synthetic epitope
EVILTSSKQI

SEQ ID NO: 8921 - protein, 10 aa, Artificial Sequence
  Description of Artificial Sequence: Synthetic epitope
EVINKSSVKY

SEQ ID NO: 8922 - protein, 10 aa, Artificial Sequence
  Description of Artificial Sequence: Synthetic epitope
EVINTVKHQM

SEQ ID NO: 8923 - protein, 10 aa, Artificial Sequence
  Description of Artificial Sequence: Synthetic epitope
EVIPEKANDE

SEQ ID NO: 8924 - protein, 10 aa, Artificial Sequence
  Description of Artificial Sequence: Synthetic epitope
EVIRSQGGKE

SEQ ID NO: 8925 - protein, 10 aa, Artificial Sequence
  Description of Artificial Sequence: Synthetic epitope
EVIRTTASSE

SEQ ID NO: 8926 - protein, 10 aa, Artificial Sequence
  Description of Artificial Sequence: Synthetic epitope
EVISKRITLI

SEQ ID NO: 8927 - protein, 10 aa, Artificial Sequence
  Description of Artificial Sequence: Synthetic epitope
EVIVEESIRT

SEQ ID NO: 8928 - protein, 10 aa, Artificial Sequence
  Description of Artificial Sequence: Synthetic epitope
EVKAATTEPT

SEQ ID NO: 8929 - protein, 10 aa, Artificial Sequence
  Description of Artificial Sequence: Synthetic epitope
EVKEKVAKPD

SEQ ID NO: 8930 - protein, 10 aa, Artificial Sequence
  Description of Artificial Sequence: Synthetic epitope
EVKFEVSKWE

SEQ ID NO: 8931 - protein, 10 aa, Artificial Sequence
  Description of Artificial Sequence: Synthetic epitope
EVKHGYKLNK

SEQ ID NO: 8932 - protein, 10 aa, Artificial Sequence
  Description of Artificial Sequence: Synthetic epitope
EVKIKPSTLQ

SEQ ID NO: 8933 - protein, 10 aa, Artificial Sequence
  Description of Artificial Sequence: Synthetic epitope
EVKISRSEKE

SEQ ID NO: 8934 - protein, 10 aa, Artificial Sequence
  Description of Artificial Sequence: Synthetic epitope
EVKSELQSRD

SEQ ID NO: 8935 - protein, 10 aa, Artificial Sequence
  Description of Artificial Sequence: Synthetic epitope
EVKSVFMVEI

SEQ ID NO: 8936 - protein, 10 aa, Artificial Sequence
  Description of Artificial Sequence: Synthetic epitope
EVKVFEDISA

SEQ ID NO: 8937 - protein, 10 aa, Artificial Sequence
  Description of Artificial Sequence: Synthetic epitope
EVKVSVVDTE

SEQ ID NO: 8938 - protein, 10 aa, Artificial Sequence
  Description of Artificial Sequence: Synthetic epitope
EVLAGPLAQR

SEQ ID NO: 8939 - protein, 10 aa, Artificial Sequence
  Description of Artificial Sequence: Synthetic epitope
EVLAIRTIHE

SEQ ID NO: 8940 - protein, 10 aa, Artificial Sequence
  Description of Artificial Sequence: Synthetic epitope
EVLAKAGTEE

SEQ ID NO: 8941 - protein, 10 aa, Artificial Sequence
  Description of Artificial Sequence: Synthetic epitope
EVLAKEDTEA

SEQ ID NO: 8942 - protein, 10 aa, Artificial Sequence
  Description of Artificial Sequence: Synthetic epitope
EVLEILKLRE

SEQ ID NO: 8943 - protein, 10 aa, Artificial Sequence
  Description of Artificial Sequence: Synthetic epitope
EVLEKLESDP

SEQ ID NO: 8944 - protein, 10 aa, Artificial Sequence
  Description of Artificial Sequence: Synthetic epitope
EVLEMARAEQ

SEQ ID NO: 8945 - protein, 10 aa, Artificial Sequence
  Description of Artificial Sequence: Synthetic epitope
EVLESTTQTK

SEQ ID NO: 8946 - protein, 10 aa, Artificial Sequence
  Description of Artificial Sequence: Synthetic epitope
EVLFSQTLDK

SEQ ID NO: 8947 - protein, 10 aa, Artificial Sequence
  Description of Artificial Sequence: Synthetic epitope
EVLKEVVESE

SEQ ID NO: 8948 - protein, 10 aa, Artificial Sequence
  Description of Artificial Sequence: Synthetic epitope
EVLKFATREN

SEQ ID NO: 8949 - protein, 10 aa, Artificial Sequence
  Description of Artificial Sequence: Synthetic epitope
EVLKSSPSYA

SEQ ID NO: 8950 - protein, 10 aa, Artificial Sequence
  Description of Artificial Sequence: Synthetic epitope
EVLLVSEIDW

SEQ ID NO: 8951 - protein, 10 aa, Artificial Sequence
  Description of Artificial Sequence: Synthetic epitope
EVLMSDSGSE

SEQ ID NO: 8952 - protein, 10 aa, Artificial Sequence
  Description of Artificial Sequence: Synthetic epitope
EVLNAMLKEV

SEQ ID NO: 8953 - protein, 10 aa, Artificial Sequence
  Description of Artificial Sequence: Synthetic epitope
EVLNLGVLNR

SEQ ID NO: 8954 - protein, 10 aa, Artificial Sequence
  Description of Artificial Sequence: Synthetic epitope
EVLPLKANLA

SEQ ID NO: 8955 - protein, 10 aa, Artificial Sequence
  Description of Artificial Sequence: Synthetic epitope
EVLPSKKAGE

SEQ ID NO: 8956 - protein, 10 aa, Artificial Sequence
  Description of Artificial Sequence: Synthetic epitope
EVLQDAEAAV

SEQ ID NO: 8957 - protein, 10 aa, Artificial Sequence
  Description of Artificial Sequence: Synthetic epitope
EVLQSLEEAE

SEQ ID NO: 8958 - protein, 10 aa, Artificial Sequence
  Description of Artificial Sequence: Synthetic epitope
EVLRGIASET

SEQ ID NO: 8959 - protein, 10 aa, Artificial Sequence
  Description of Artificial Sequence: Synthetic epitope
EVLRVTAFST

SEQ ID NO: 8960 - protein, 10 aa, Artificial Sequence
  Description of Artificial Sequence: Synthetic epitope
EVLVFAIQKS

SEQ ID NO: 8961 - protein, 10 aa, Artificial Sequence
  Description of Artificial Sequence: Synthetic epitope
EVLVSKVSKH

SEQ ID NO: 8962 - protein, 10 aa, Artificial Sequence
  Description of Artificial Sequence: Synthetic epitope
EVLVSNATQF

SEQ ID NO: 8963 - protein, 10 aa, Artificial Sequence
  Description of Artificial Sequence: Synthetic epitope
EVMAATQAEG

SEQ ID NO: 8964 - protein, 10 aa, Artificial Sequence
  Description of Artificial Sequence: Synthetic epitope
EVMESAVGNS

SEQ ID NO: 8965 - protein, 10 aa, Artificial Sequence
  Description of Artificial Sequence: Synthetic epitope
EVMISSLGDV

SEQ ID NO: 8966 - protein, 10 aa, Artificial Sequence
  Description of Artificial Sequence: Synthetic epitope
EVMVDALVSN

SEQ ID NO: 8967 - protein, 10 aa, Artificial Sequence
  Description of Artificial Sequence: Synthetic epitope
EVMVHKLQNE

SEQ ID NO: 8968 - protein, 10 aa, Artificial Sequence
  Description of Artificial Sequence: Synthetic epitope
EVNANKHKAN

SEQ ID NO: 8969 - protein, 10 aa, Artificial Sequence
  Description of Artificial Sequence: Synthetic epitope
EVNETQYNEM

SEQ ID NO: 8970 - protein, 10 aa, Artificial Sequence
  Description of Artificial Sequence: Synthetic epitope
EVNEVKLQAQ

SEQ ID NO: 8971 - protein, 10 aa, Artificial Sequence
  Description of Artificial Sequence: Synthetic epitope
EVNQNTAENI

SEQ ID NO: 8972 - protein, 10 aa, Artificial Sequence
  Description of Artificial Sequence: Synthetic epitope
EVNSSDALAG

SEQ ID NO: 8973 - protein, 10 aa, Artificial Sequence
  Description of Artificial Sequence: Synthetic epitope
EVNTRRAQAD

SEQ ID NO: 8974 - protein, 10 aa, Artificial Sequence
  Description of Artificial Sequence: Synthetic epitope
EVPAQQAQTG

SEQ ID NO: 8975 - protein, 10 aa, Artificial Sequence
  Description of Artificial Sequence: Synthetic epitope
EVPQALGRSS

SEQ ID NO: 8976 - protein, 10 aa, Artificial Sequence
  Description of Artificial Sequence: Synthetic epitope
EVPQRTNDLK

SEQ ID NO: 8977 - protein, 10 aa, Artificial Sequence
  Description of Artificial Sequence: Synthetic epitope
EVPQSSNTSL

SEQ ID NO: 8978 - protein, 10 aa, Artificial Sequence
  Description of Artificial Sequence: Synthetic epitope
EVPREATISY

SEQ ID NO: 8979 - protein, 10 aa, Artificial Sequence
  Description of Artificial Sequence: Synthetic epitope
EVPSSEAAED

SEQ ID NO: 8980 - protein, 10 aa, Artificial Sequence
  Description of Artificial Sequence: Synthetic epitope
EVPTSKSSNS

SEQ ID NO: 8981 - protein, 10 aa, Artificial Sequence
  Description of Artificial Sequence: Synthetic epitope
EVPVLQIVPV

SEQ ID NO: 8982 - protein, 10 aa, Artificial Sequence
  Description of Artificial Sequence: Synthetic epitope
EVQAEQEPTR

SEQ ID NO: 8983 - protein, 10 aa, Artificial Sequence
  Description of Artificial Sequence: Synthetic epitope
EVQAFASNKK

SEQ ID NO: 8984 - protein, 10 aa, Artificial Sequence
  Description of Artificial Sequence: Synthetic epitope
EVQAKTVTEL

SEQ ID NO: 8985 - protein, 10 aa, Artificial Sequence
  Description of Artificial Sequence: Synthetic epitope
EVQAVKSEIA

SEQ ID NO: 8986 - protein, 10 aa, Artificial Sequence
  Description of Artificial Sequence: Synthetic epitope
EVQEKFQEQK

SEQ ID NO: 8987 - protein, 10 aa, Artificial Sequence
  Description of Artificial Sequence: Synthetic epitope
EVQEKKSEAG

SEQ ID NO: 8988 - protein, 10 aa, Artificial Sequence
  Description of Artificial Sequence: Synthetic epitope
EVQSESAQEP

SEQ ID NO: 8989 - protein, 10 aa, Artificial Sequence
  Description of Artificial Sequence: Synthetic epitope
EVQSSILYKG

SEQ ID NO: 8990 - protein, 10 aa, Artificial Sequence
  Description of Artificial Sequence: Synthetic epitope
EVQSSKVPNL

SEQ ID NO: 8991 - protein, 10 aa, Artificial Sequence
  Description of Artificial Sequence: Synthetic epitope
EVQVASQSSQ

SEQ ID NO: 8992 - protein, 10 aa, Artificial Sequence
  Description of Artificial Sequence: Synthetic epitope
EVQVTQNPAN

SEQ ID NO: 8993 - protein, 10 aa, Artificial Sequence
  Description of Artificial Sequence: Synthetic epitope
EVRANATAKA

SEQ ID NO: 8994 - protein, 10 aa, Artificial Sequence
  Description of Artificial Sequence: Synthetic epitope
EVREVAMSKN

SEQ ID NO: 8995 - protein, 10 aa, Artificial Sequence
  Description of Artificial Sequence: Synthetic epitope
EVRHTYSLES

SEQ ID NO: 8996 - protein, 10 aa, Artificial Sequence
  Description of Artificial Sequence: Synthetic epitope
EVRIDKEIKG

SEQ ID NO: 8997 - protein, 10 aa, Artificial Sequence
  Description of Artificial Sequence: Synthetic epitope
EVRKEVASSV

SEQ ID NO: 8998 - protein, 10 aa, Artificial Sequence
  Description of Artificial Sequence: Synthetic epitope
EVRNGASALE

SEQ ID NO: 8999 - protein, 10 aa, Artificial Sequence
  Description of Artificial Sequence: Synthetic epitope
EVRTRDKKGV

SEQ ID NO: 9000 - protein, 10 aa, Artificial Sequence
  Description of Artificial Sequence: Synthetic epitope
EVRWPSLDTD

SEQ ID NO: 9001 - protein, 10 aa, Artificial Sequence
  Description of Artificial Sequence: Synthetic epitope
EVSAALQSRQ

SEQ ID NO: 9002 - protein, 10 aa, Artificial Sequence
  Description of Artificial Sequence: Synthetic epitope
EVSAKERSSL

SEQ ID NO: 9003 - protein, 10 aa, Artificial Sequence
  Description of Artificial Sequence: Synthetic epitope
EVSEAAKATD

SEQ ID NO: 9004 - protein, 10 aa, Artificial Sequence
  Description of Artificial Sequence: Synthetic epitope
EVSEDSTTGE

SEQ ID NO: 9005 - protein, 10 aa, Artificial Sequence
  Description of Artificial Sequence: Synthetic epitope
EVSEKKERLV

SEQ ID NO: 9006 - protein, 10 aa, Artificial Sequence
  Description of Artificial Sequence: Synthetic epitope
EVSEQENSKE

SEQ ID NO: 9007 - protein, 10 aa, Artificial Sequence
  Description of Artificial Sequence: Synthetic epitope
EVSESTVQNA

SEQ ID NO: 9008 - protein, 10 aa, Artificial Sequence
  Description of Artificial Sequence: Synthetic epitope
EVSEVAVPEV

SEQ ID NO: 9009 - protein, 10 aa, Artificial Sequence
  Description of Artificial Sequence: Synthetic epitope
EVSGISEADP

SEQ ID NO: 9010 - protein, 10 aa, Artificial Sequence
  Description of Artificial Sequence: Synthetic epitope
EVSKDSSTSL

SEQ ID NO: 9011 - protein, 10 aa, Artificial Sequence
  Description of Artificial Sequence: Synthetic epitope
EVSKELQIPA

SEQ ID NO: 9012 - protein, 10 aa, Artificial Sequence
  Description of Artificial Sequence: Synthetic epitope
EVSKFEALEE

SEQ ID NO: 9013 - protein, 10 aa, Artificial Sequence
  Description of Artificial Sequence: Synthetic epitope
EVSKLSNKIG

SEQ ID NO: 9014 - protein, 10 aa, Artificial Sequence
  Description of Artificial Sequence: Synthetic epitope
EVSLSGIDSE

SEQ ID NO: 9015 - protein, 10 aa, Artificial Sequence
  Description of Artificial Sequence: Synthetic epitope
EVSPSQVSIT

SEQ ID NO: 9016 - protein, 10 aa, Artificial Sequence
  Description of Artificial Sequence: Synthetic epitope
EVSQASQLLQ

SEQ ID NO: 9017 - protein, 10 aa, Artificial Sequence
  Description of Artificial Sequence: Synthetic epitope
EVSQHIKMRM

SEQ ID NO: 9018 - protein, 10 aa, Artificial Sequence
  Description of Artificial Sequence: Synthetic epitope
EVSRANAAQD

SEQ ID NO: 9019 - protein, 10 aa, Artificial Sequence
  Description of Artificial Sequence: Synthetic epitope
EVSRISKPND

SEQ ID NO: 9020 - protein, 10 aa, Artificial Sequence
  Description of Artificial Sequence: Synthetic epitope
EVSSANAEEL

SEQ ID NO: 9021 - protein, 10 aa, Artificial Sequence
  Description of Artificial Sequence: Synthetic epitope
EVSSEQSIFV

SEQ ID NO: 9022 - protein, 10 aa, Artificial Sequence
  Description of Artificial Sequence: Synthetic epitope
EVSSTSETTP

SEQ ID NO: 9023 - protein, 10 aa, Artificial Sequence
  Description of Artificial Sequence: Synthetic epitope
EVSSVSRMRV

SEQ ID NO: 9024 - protein, 10 aa, Artificial Sequence
  Description of Artificial Sequence: Synthetic epitope
EVSTKTGLDT

SEQ ID NO: 9025 - protein, 10 aa, Artificial Sequence
  Description of Artificial Sequence: Synthetic epitope
EVSVNNVTHK

SEQ ID NO: 9026 - protein, 10 aa, Artificial Sequence
  Description of Artificial Sequence: Synthetic epitope
EVSYQNDYIS

SEQ ID NO: 9027 - protein, 10 aa, Artificial Sequence
  Description of Artificial Sequence: Synthetic epitope
EVTDMIELEQ

SEQ ID NO: 9028 - protein, 10 aa, Artificial Sequence
  Description of Artificial Sequence: Synthetic epitope
EVTDSSDITN

SEQ ID NO: 9029 - protein, 10 aa, Artificial Sequence
  Description of Artificial Sequence: Synthetic epitope
EVTEIFELSE

SEQ ID NO: 9030 - protein, 10 aa, Artificial Sequence
  Description of Artificial Sequence: Synthetic epitope
EVTEMAHTET

SEQ ID NO: 9031 - protein, 10 aa, Artificial Sequence
  Description of Artificial Sequence: Synthetic epitope
EVTGQAEKEA

SEQ ID NO: 9032 - protein, 10 aa, Artificial Sequence
  Description of Artificial Sequence: Synthetic epitope
EVTGVTLTGE

SEQ ID NO: 9033 - protein, 10 aa, Artificial Sequence
  Description of Artificial Sequence: Synthetic epitope
EVTKEPEHMA

SEQ ID NO: 9034 - protein, 10 aa, Artificial Sequence
  Description of Artificial Sequence: Synthetic epitope
EVTKHMKLNK

SEQ ID NO: 9035 - protein, 10 aa, Artificial Sequence
  Description of Artificial Sequence: Synthetic epitope
EVTKKLVRQA

SEQ ID NO: 9036 - protein, 10 aa, Artificial Sequence
  Description of Artificial Sequence: Synthetic epitope
EVTKNKEKLR

SEQ ID NO: 9037 - protein, 10 aa, Artificial Sequence
  Description of Artificial Sequence: Synthetic epitope
EVTNKTRADV

SEQ ID NO: 9038 - protein, 10 aa, Artificial Sequence
  Description of Artificial Sequence: Synthetic epitope
EVTPQSKIAW

SEQ ID NO: 9039 - protein, 10 aa, Artificial Sequence
  Description of Artificial Sequence: Synthetic epitope
EVTQRAWFQG

SEQ ID NO: 9040 - protein, 10 aa, Artificial Sequence
  Description of Artificial Sequence: Synthetic epitope
EVTSALLSRV

SEQ ID NO: 9041 - protein, 10 aa, Artificial Sequence
  Description of Artificial Sequence: Synthetic epitope
EVTSDQIVEH

SEQ ID NO: 9042 - protein, 10 aa, Artificial Sequence
  Description of Artificial Sequence: Synthetic epitope
EVTSHAASGA

SEQ ID NO: 9043 - protein, 10 aa, Artificial Sequence
  Description of Artificial Sequence: Synthetic epitope
EVTTAVTEKV

SEQ ID NO: 9044 - protein, 10 aa, Artificial Sequence
  Description of Artificial Sequence: Synthetic epitope
EVTTSDRKAS

SEQ ID NO: 9045 - protein, 10 aa, Artificial Sequence
  Description of Artificial Sequence: Synthetic epitope
EVVADAELSP

SEQ ID NO: 9046 - protein, 10 aa, Artificial Sequence
  Description of Artificial Sequence: Synthetic epitope
EVVDLSTTKS

SEQ ID NO: 9047 - protein, 10 aa, Artificial Sequence
  Description of Artificial Sequence: Synthetic epitope
EVVDNVQDAI

SEQ ID NO: 9048 - protein, 10 aa, Artificial Sequence
  Description of Artificial Sequence: Synthetic epitope
EVVESKLKLP

SEQ ID NO: 9049 - protein, 10 aa, Artificial Sequence
  Description of Artificial Sequence: Synthetic epitope
EVVESSLRSL

SEQ ID NO: 9050 - protein, 10 aa, Artificial Sequence
  Description of Artificial Sequence: Synthetic epitope
EVVGQRQSSM

SEQ ID NO: 9051 - protein, 10 aa, Artificial Sequence
  Description of Artificial Sequence: Synthetic epitope
EVVIETLSVG

SEQ ID NO: 9052 - protein, 10 aa, Artificial Sequence
  Description of Artificial Sequence: Synthetic epitope
EVVKNASDTN

SEQ ID NO: 9053 - protein, 10 aa, Artificial Sequence
  Description of Artificial Sequence: Synthetic epitope
EVVKSKLSKE

SEQ ID NO: 9054 - protein, 10 aa, Artificial Sequence
  Description of Artificial Sequence: Synthetic epitope
EVVKSQIASM

SEQ ID NO: 9055 - protein, 10 aa, Artificial Sequence
  Description of Artificial Sequence: Synthetic epitope
EVVLRTRTAS

SEQ ID NO: 9056 - protein, 10 aa, Artificial Sequence
  Description of Artificial Sequence: Synthetic epitope
EVVNRILSNS

SEQ ID NO: 9057 - protein, 10 aa, Artificial Sequence
  Description of Artificial Sequence: Synthetic epitope
EVVPALAEEA

SEQ ID NO: 9058 - protein, 10 aa, Artificial Sequence
  Description of Artificial Sequence: Synthetic epitope
EVVQGDQDDQ

SEQ ID NO: 9059 - protein, 10 aa, Artificial Sequence
  Description of Artificial Sequence: Synthetic epitope
EVVRKAKLGT

SEQ ID NO: 9060 - protein, 10 aa, Artificial Sequence
  Description of Artificial Sequence: Synthetic epitope
EVVSSQQPTT

SEQ ID NO: 9061 - protein, 10 aa, Artificial Sequence
  Description of Artificial Sequence: Synthetic epitope
EVWQKVSQQD

SEQ ID NO: 9062 - protein, 10 aa, Artificial Sequence
  Description of Artificial Sequence: Synthetic epitope
EVWTAALRAG

SEQ ID NO: 9063 - protein, 10 aa, Artificial Sequence
  Description of Artificial Sequence: Synthetic epitope
EVYERAIANV

SEQ ID NO: 9064 - protein, 10 aa, Artificial Sequence
  Description of Artificial Sequence: Synthetic epitope
EVYKSNQAQT

SEQ ID NO: 9065 - protein, 10 aa, Artificial Sequence
  Description of Artificial Sequence: Synthetic epitope
EVYMAMRGNF

SEQ ID NO: 9066 - protein, 10 aa, Artificial Sequence
  Description of Artificial Sequence: Synthetic epitope
EVYNLAATLK

SEQ ID NO: 9067 - protein, 10 aa, Artificial Sequence
  Description of Artificial Sequence: Synthetic epitope
EVYSGKTNSN

SEQ ID NO: 9068 - protein, 10 aa, Artificial Sequence
  Description of Artificial Sequence: Synthetic epitope
EVYTVAIQSY

SEQ ID NO: 9069 - protein, 10 aa, Artificial Sequence
  Description of Artificial Sequence: Synthetic epitope
EWAALAITVP

SEQ ID NO: 9070 - protein, 10 aa, Artificial Sequence
  Description of Artificial Sequence: Synthetic epitope
EWAQKVLSQP

SEQ ID NO: 9071 - protein, 10 aa, Artificial Sequence
  Description of Artificial Sequence: Synthetic epitope
EWERQEIQRF

SEQ ID NO: 9072 - protein, 10 aa, Artificial Sequence
  Description of Artificial Sequence: Synthetic epitope
EWGSSLLDSL

SEQ ID NO: 9073 - protein, 10 aa, Artificial Sequence
  Description of Artificial Sequence: Synthetic epitope
EWISEMLPTA

SEQ ID NO: 9074 - protein, 10 aa, Artificial Sequence
  Description of Artificial Sequence: Synthetic epitope
EWISLTVGVP

SEQ ID NO: 9075 - protein, 10 aa, Artificial Sequence
  Description of Artificial Sequence: Synthetic epitope
EWLSELLDAL

SEQ ID NO: 9076 - protein, 10 aa, Artificial Sequence
  Description of Artificial Sequence: Synthetic epitope
EWMRRSVAAG

SEQ ID NO: 9077 - protein, 10 aa, Artificial Sequence
  Description of Artificial Sequence: Synthetic epitope
EWNDVTLYQA

SEQ ID NO: 9078 - protein, 10 aa, Artificial Sequence
  Description of Artificial Sequence: Synthetic epitope
EWNQTVIYKS

SEQ ID NO: 9079 - protein, 10 aa, Artificial Sequence
  Description of Artificial Sequence: Synthetic epitope
EWQNIAIMTE

SEQ ID NO: 9080 - protein, 10 aa, Artificial Sequence
  Description of Artificial Sequence: Synthetic epitope
EWRRQLVRLE

SEQ ID NO: 9081 - protein, 10 aa, Artificial Sequence
  Description of Artificial Sequence: Synthetic epitope
EWSRSNLDTE

SEQ ID NO: 9082 - protein, 10 aa, Artificial Sequence
  Description of Artificial Sequence: Synthetic epitope
EWTAGQQGSV

SEQ ID NO: 9083 - protein, 10 aa, Artificial Sequence
  Description of Artificial Sequence: Synthetic epitope
EWVAAIAHAS

SEQ ID NO: 9084 - protein, 10 aa, Artificial Sequence
  Description of Artificial Sequence: Synthetic epitope
EWVESELQNM

SEQ ID NO: 9085 - protein, 10 aa, Artificial Sequence
  Description of Artificial Sequence: Synthetic epitope
EYAQSDFISA

SEQ ID NO: 9086 - protein, 10 aa, Artificial Sequence
  Description of Artificial Sequence: Synthetic epitope
EYDEFTTLMN

SEQ ID NO: 9087 - protein, 10 aa, Artificial Sequence
  Description of Artificial Sequence: Synthetic epitope
EYDNVGEASE

SEQ ID NO: 9088 - protein, 10 aa, Artificial Sequence
  Description of Artificial Sequence: Synthetic epitope
EYDQYSLEDE

SEQ ID NO: 9089 - protein, 10 aa, Artificial Sequence
  Description of Artificial Sequence: Synthetic epitope
EYEAWSQRGD

SEQ ID NO: 9090 - protein, 10 aa, Artificial Sequence
  Description of Artificial Sequence: Synthetic epitope
EYEIAIRKVP

SEQ ID NO: 9091 - protein, 10 aa, Artificial Sequence
  Description of Artificial Sequence: Synthetic epitope
EYEISMLNQM

SEQ ID NO: 9092 - protein, 10 aa, Artificial Sequence
  Description of Artificial Sequence: Synthetic epitope
EYEVSISYAV

SEQ ID NO: 9093 - protein, 10 aa, Artificial Sequence
  Description of Artificial Sequence: Synthetic epitope
EYFLSSNTLQ

SEQ ID NO: 9094 - protein, 10 aa, Artificial Sequence
  Description of Artificial Sequence: Synthetic epitope
EYGNSSVFLE

SEQ ID NO: 9095 - protein, 10 aa, Artificial Sequence
  Description of Artificial Sequence: Synthetic epitope
EYHGQPQVES

SEQ ID NO: 9096 - protein, 10 aa, Artificial Sequence
  Description of Artificial Sequence: Synthetic epitope
EYHLAINKEP

SEQ ID NO: 9097 - protein, 10 aa, Artificial Sequence
  Description of Artificial Sequence: Synthetic epitope
EYIAQMSQLE

SEQ ID NO: 9098 - protein, 10 aa, Artificial Sequence
  Description of Artificial Sequence: Synthetic epitope
EYIHAQVASG

SEQ ID NO: 9099 - protein, 10 aa, Artificial Sequence
  Description of Artificial Sequence: Synthetic epitope
EYIITAIKEV

SEQ ID NO: 9100 - protein, 10 aa, Artificial Sequence
  Description of Artificial Sequence: Synthetic epitope
EYIQKNVQLY

SEQ ID NO: 9101 - protein, 10 aa, Artificial Sequence
  Description of Artificial Sequence: Synthetic epitope
EYKAIETLVG

SEQ ID NO: 9102 - protein, 10 aa, Artificial Sequence
  Description of Artificial Sequence: Synthetic epitope
EYKKPEERSP

SEQ ID NO: 9103 - protein, 10 aa, Artificial Sequence
  Description of Artificial Sequence: Synthetic epitope
EYKTSVLVQQ

SEQ ID NO: 9104 - protein, 10 aa, Artificial Sequence
  Description of Artificial Sequence: Synthetic epitope
EYKWMASAWK

SEQ ID NO: 9105 - protein, 10 aa, Artificial Sequence
  Description of Artificial Sequence: Synthetic epitope
EYLEATQTNA

SEQ ID NO: 9106 - protein, 10 aa, Artificial Sequence
  Description of Artificial Sequence: Synthetic epitope
EYLIKKINAE

SEQ ID NO: 9107 - protein, 10 aa, Artificial Sequence
  Description of Artificial Sequence: Synthetic epitope
EYLSALNPSD

SEQ ID NO: 9108 - protein, 10 aa, Artificial Sequence
  Description of Artificial Sequence: Synthetic epitope
EYLVTLAKGD

SEQ ID NO: 9109 - protein, 10 aa, Artificial Sequence
  Description of Artificial Sequence: Synthetic epitope
EYMASKAMME

SEQ ID NO: 9110 - protein, 10 aa, Artificial Sequence
  Description of Artificial Sequence: Synthetic epitope
EYMEILEQNY

SEQ ID NO: 9111 - protein, 10 aa, Artificial Sequence
  Description of Artificial Sequence: Synthetic epitope
EYMGSKMLIL

SEQ ID NO: 9112 - protein, 10 aa, Artificial Sequence
  Description of Artificial Sequence: Synthetic epitope
EYMIRIMKKW

SEQ ID NO: 9113 - protein, 10 aa, Artificial Sequence
  Description of Artificial Sequence: Synthetic epitope
EYMVLELSEP

SEQ ID NO: 9114 - protein, 10 aa, Artificial Sequence
  Description of Artificial Sequence: Synthetic epitope
EYNKVINKDE

SEQ ID NO: 9115 - protein, 10 aa, Artificial Sequence
  Description of Artificial Sequence: Synthetic epitope
EYNMIKIKLE

SEQ ID NO: 9116 - protein, 10 aa, Artificial Sequence
  Description of Artificial Sequence: Synthetic epitope
EYNTYDTISS

SEQ ID NO: 9117 - protein, 10 aa, Artificial Sequence
  Description of Artificial Sequence: Synthetic epitope
EYQEQKQRSS

SEQ ID NO: 9118 - protein, 10 aa, Artificial Sequence
  Description of Artificial Sequence: Synthetic epitope
EYQKNNKDSH

SEQ ID NO: 9119 - protein, 10 aa, Artificial Sequence
  Description of Artificial Sequence: Synthetic epitope
EYQNYDKAHG

SEQ ID NO: 9120 - protein, 10 aa, Artificial Sequence
  Description of Artificial Sequence: Synthetic epitope
EYQQAQLEAE

SEQ ID NO: 9121 - protein, 10 aa, Artificial Sequence
  Description of Artificial Sequence: Synthetic epitope
EYRVKLEEAQ

SEQ ID NO: 9122 - protein, 10 aa, Artificial Sequence
  Description of Artificial Sequence: Synthetic epitope
EYSEAAITIR

SEQ ID NO: 9123 - protein, 10 aa, Artificial Sequence
  Description of Artificial Sequence: Synthetic epitope
EYSGSETAVE

SEQ ID NO: 9124 - protein, 10 aa, Artificial Sequence
  Description of Artificial Sequence: Synthetic epitope
EYSIKHSSEV

SEQ ID NO: 9125 - protein, 10 aa, Artificial Sequence
  Description of Artificial Sequence: Synthetic epitope
EYSKSLQWGI

SEQ ID NO: 9126 - protein, 10 aa, Artificial Sequence
  Description of Artificial Sequence: Synthetic epitope
EYSPMERFKE

SEQ ID NO: 9127 - protein, 10 aa, Artificial Sequence
  Description of Artificial Sequence: Synthetic epitope
EYSRSSADQE

SEQ ID NO: 9128 - protein, 10 aa, Artificial Sequence
  Description of Artificial Sequence: Synthetic epitope
EYSVLSQETE

SEQ ID NO: 9129 - protein, 10 aa, Artificial Sequence
  Description of Artificial Sequence: Synthetic epitope
EYTEVELKQP

SEQ ID NO: 9130 - protein, 10 aa, Artificial Sequence
  Description of Artificial Sequence: Synthetic epitope
EYTLESMLHE

SEQ ID NO: 9131 - protein, 10 aa, Artificial Sequence
  Description of Artificial Sequence: Synthetic epitope
EYTMHIERRE

SEQ ID NO: 9132 - protein, 10 aa, Artificial Sequence
  Description of Artificial Sequence: Synthetic epitope
EYTRASVEER

SEQ ID NO: 9133 - protein, 10 aa, Artificial Sequence
  Description of Artificial Sequence: Synthetic epitope
EYTSDYEFSN

SEQ ID NO: 9134 - protein, 10 aa, Artificial Sequence
  Description of Artificial Sequence: Synthetic epitope
EYTSQLLKRR

SEQ ID NO: 9135 - protein, 10 aa, Artificial Sequence
  Description of Artificial Sequence: Synthetic epitope
EYVIKVSARV

SEQ ID NO: 9136 - protein, 10 aa, Artificial Sequence
  Description of Artificial Sequence: Synthetic epitope
EYWMFKLRNS

SEQ ID NO: 9137 - protein, 10 aa, Artificial Sequence
  Description of Artificial Sequence: Synthetic epitope
EYYGPYSSQY

SEQ ID NO: 9138 - protein, 10 aa, Artificial Sequence
  Description of Artificial Sequence: Synthetic epitope
EYYKHHSLKE

SEQ ID NO: 9139 - protein, 10 aa, Artificial Sequence
  Description of Artificial Sequence: Synthetic epitope
EYYTHEKQEK

SEQ ID NO: 9140 - protein, 10 aa, Artificial Sequence
  Description of Artificial Sequence: Synthetic epitope
FAAREMAPNM

SEQ ID NO: 9141 - protein, 10 aa, Artificial Sequence
  Description of Artificial Sequence: Synthetic epitope
FAATEFVYPA

SEQ ID NO: 9142 - protein, 10 aa, Artificial Sequence
  Description of Artificial Sequence: Synthetic epitope
FAATIPRPFS

SEQ ID NO: 9143 - protein, 10 aa, Artificial Sequence
  Description of Artificial Sequence: Synthetic epitope
FADRALINSM

SEQ ID NO: 9144 - protein, 10 aa, Artificial Sequence
  Description of Artificial Sequence: Synthetic epitope
FAEKKVEGVY

SEQ ID NO: 9145 - protein, 10 aa, Artificial Sequence
  Description of Artificial Sequence: Synthetic epitope
FAEKLISPSR

SEQ ID NO: 9146 - protein, 10 aa, Artificial Sequence
  Description of Artificial Sequence: Synthetic epitope
FAEMLMQRPV

SEQ ID NO: 9147 - protein, 10 aa, Artificial Sequence
  Description of Artificial Sequence: Synthetic epitope
FAHQAMVEQL

SEQ ID NO: 9148 - protein, 10 aa, Artificial Sequence
  Description of Artificial Sequence: Synthetic epitope
FAIGGIARTY

SEQ ID NO: 9149 - protein, 10 aa, Artificial Sequence
  Description of Artificial Sequence: Synthetic epitope
FAKKLYLLKT

SEQ ID NO: 9150 - protein, 10 aa, Artificial Sequence
  Description of Artificial Sequence: Synthetic epitope
FAKLSSQTPS

SEQ ID NO: 9151 - protein, 10 aa, Artificial Sequence
  Description of Artificial Sequence: Synthetic epitope
FALEATADQS

SEQ ID NO: 9152 - protein, 10 aa, Artificial Sequence
  Description of Artificial Sequence: Synthetic epitope
FALKTRSQIT

SEQ ID NO: 9153 - protein, 10 aa, Artificial Sequence
  Description of Artificial Sequence: Synthetic epitope
FANDSAAGLT

SEQ ID NO: 9154 - protein, 10 aa, Artificial Sequence
  Description of Artificial Sequence: Synthetic epitope
FANEKYKSAL

SEQ ID NO: 9155 - protein, 10 aa, Artificial Sequence
  Description of Artificial Sequence: Synthetic epitope
FANEVAAKIM

SEQ ID NO: 9156 - protein, 10 aa, Artificial Sequence
  Description of Artificial Sequence: Synthetic epitope
FANSSTSSPA

SEQ ID NO: 9157 - protein, 10 aa, Artificial Sequence
  Description of Artificial Sequence: Synthetic epitope
FAPHAAVSIS

SEQ ID NO: 9158 - protein, 10 aa, Artificial Sequence
  Description of Artificial Sequence: Synthetic epitope
FAQSLMTTER

SEQ ID NO: 9159 - protein, 10 aa, Artificial Sequence
  Description of Artificial Sequence: Synthetic epitope
FARTDSVKRE

SEQ ID NO: 9160 - protein, 10 aa, Artificial Sequence
  Description of Artificial Sequence: Synthetic epitope
FASSLAAVRR

SEQ ID NO: 9161 - protein, 10 aa, Artificial Sequence
  Description of Artificial Sequence: Synthetic epitope
FATQIKVQKN

SEQ ID NO: 9162 - protein, 10 aa, Artificial Sequence
  Description of Artificial Sequence: Synthetic epitope
FATSVAEDQS

SEQ ID NO: 9163 - protein, 10 aa, Artificial Sequence
  Description of Artificial Sequence: Synthetic epitope
FAVREAEDTT

SEQ ID NO: 9164 - protein, 10 aa, Artificial Sequence
  Description of Artificial Sequence: Synthetic epitope
FAYPMASIEW

SEQ ID NO: 9165 - protein, 10 aa, Artificial Sequence
  Description of Artificial Sequence: Synthetic epitope
FAYTKYERIN

SEQ ID NO: 9166 - protein, 10 aa, Artificial Sequence
  Description of Artificial Sequence: Synthetic epitope
FDDIAKEMDI

SEQ ID NO: 9167 - protein, 10 aa, Artificial Sequence
  Description of Artificial Sequence: Synthetic epitope
FDDVWPMDPH

SEQ ID NO: 9168 - protein, 10 aa, Artificial Sequence
  Description of Artificial Sequence: Synthetic epitope
FDEIILSTAR

SEQ ID NO: 9169 - protein, 10 aa, Artificial Sequence
  Description of Artificial Sequence: Synthetic epitope
FDIARLTVNA

SEQ ID NO: 9170 - protein, 10 aa, Artificial Sequence
  Description of Artificial Sequence: Synthetic epitope
FDMLYKIEDV

SEQ ID NO: 9171 - protein, 10 aa, Artificial Sequence
  Description of Artificial Sequence: Synthetic epitope
FDNMMRNHKI

SEQ ID NO: 9172 - protein, 10 aa, Artificial Sequence
  Description of Artificial Sequence: Synthetic epitope
FDNRSYDSLH

SEQ ID NO: 9173 - protein, 10 aa, Artificial Sequence
  Description of Artificial Sequence: Synthetic epitope
FDTRAKIEAS

SEQ ID NO: 9174 - protein, 10 aa, Artificial Sequence
  Description of Artificial Sequence: Synthetic epitope
FDVIYPKHKI

SEQ ID NO: 9175 - protein, 10 aa, Artificial Sequence
  Description of Artificial Sequence: Synthetic epitope
FDVSSILDLQ

SEQ ID NO: 9176 - protein, 10 aa, Artificial Sequence
  Description of Artificial Sequence: Synthetic epitope
FEELSSAGSG

SEQ ID NO: 9177 - protein, 10 aa, Artificial Sequence
  Description of Artificial Sequence: Synthetic epitope
FEEREQANTA

SEQ ID NO: 9178 - protein, 10 aa, Artificial Sequence
  Description of Artificial Sequence: Synthetic epitope
FEERRAKQTE

SEQ ID NO: 9179 - protein, 10 aa, Artificial Sequence
  Description of Artificial Sequence: Synthetic epitope
FEESSAYGKA

SEQ ID NO: 9180 - protein, 10 aa, Artificial Sequence
  Description of Artificial Sequence: Synthetic epitope
FEGIKDSQAQ

SEQ ID NO: 9181 - protein, 10 aa, Artificial Sequence
  Description of Artificial Sequence: Synthetic epitope
FEILKAQMFA

SEQ ID NO: 9182 - protein, 10 aa, Artificial Sequence
  Description of Artificial Sequence: Synthetic epitope
FEISVSRSQS

SEQ ID NO: 9183 - protein, 10 aa, Artificial Sequence
  Description of Artificial Sequence: Synthetic epitope
FEKFLIKSIA

SEQ ID NO: 9184 - protein, 10 aa, Artificial Sequence
  Description of Artificial Sequence: Synthetic epitope
FEKKPTATGT

SEQ ID NO: 9185 - protein, 10 aa, Artificial Sequence
  Description of Artificial Sequence: Synthetic epitope
FEKVSALADL

SEQ ID NO: 9186 - protein, 10 aa, Artificial Sequence
  Description of Artificial Sequence: Synthetic epitope
FELDATTLQR

SEQ ID NO: 9187 - protein, 10 aa, Artificial Sequence
  Description of Artificial Sequence: Synthetic epitope
FENDMSKSAR

SEQ ID NO: 9188 - protein, 10 aa, Artificial Sequence
  Description of Artificial Sequence: Synthetic epitope
FENLAEIVKA

SEQ ID NO: 9189 - protein, 10 aa, Artificial Sequence
  Description of Artificial Sequence: Synthetic epitope
FENLNTALTP

SEQ ID NO: 9190 - protein, 10 aa, Artificial Sequence
  Description of Artificial Sequence: Synthetic epitope
FERIASEASR

SEQ ID NO: 9191 - protein, 10 aa, Artificial Sequence
  Description of Artificial Sequence: Synthetic epitope
FERIASEASR

SEQ ID NO: 9192 - protein, 10 aa, Artificial Sequence
  Description of Artificial Sequence: Synthetic epitope
FERQEQEGEQ

SEQ ID NO: 9193 - protein, 10 aa, Artificial Sequence
  Description of Artificial Sequence: Synthetic epitope
FESHQELASH

SEQ ID NO: 9194 - protein, 10 aa, Artificial Sequence
  Description of Artificial Sequence: Synthetic epitope
FESMYTSVDT

SEQ ID NO: 9195 - protein, 10 aa, Artificial Sequence
  Description of Artificial Sequence: Synthetic epitope
FESSENIEDS

SEQ ID NO: 9196 - protein, 10 aa, Artificial Sequence
  Description of Artificial Sequence: Synthetic epitope
FETSSTSKLE

SEQ ID NO: 9197 - protein, 10 aa, Artificial Sequence
  Description of Artificial Sequence: Synthetic epitope
FFKLEAMKQT

SEQ ID NO: 9198 - protein, 10 aa, Artificial Sequence
  Description of Artificial Sequence: Synthetic epitope
FFKLSQTSSK

SEQ ID NO: 9199 - protein, 10 aa, Artificial Sequence
  Description of Artificial Sequence: Synthetic epitope
FFKTLVSPNK

SEQ ID NO: 9200 - protein, 10 aa, Artificial Sequence
  Description of Artificial Sequence: Synthetic epitope
FFLWHIVSKV

SEQ ID NO: 9201 - protein, 10 aa, Artificial Sequence
  Description of Artificial Sequence: Synthetic epitope
FFQEKSQIQK

SEQ ID NO: 9202 - protein, 10 aa, Artificial Sequence
  Description of Artificial Sequence: Synthetic epitope
FFSGYDKKQT

SEQ ID NO: 9203 - protein, 10 aa, Artificial Sequence
  Description of Artificial Sequence: Synthetic epitope
FFSLSNKVKD

SEQ ID NO: 9204 - protein, 10 aa, Artificial Sequence
  Description of Artificial Sequence: Synthetic epitope
FGAGKTKEVI

SEQ ID NO: 9205 - protein, 10 aa, Artificial Sequence
  Description of Artificial Sequence: Synthetic epitope
FGDASVIALE

SEQ ID NO: 9206 - protein, 10 aa, Artificial Sequence
  Description of Artificial Sequence: Synthetic epitope
FGDTAESIPE

SEQ ID NO: 9207 - protein, 10 aa, Artificial Sequence
  Description of Artificial Sequence: Synthetic epitope
FGGASEASAR

SEQ ID NO: 9208 - protein, 10 aa, Artificial Sequence
  Description of Artificial Sequence: Synthetic epitope
FGKFARTVIP

SEQ ID NO: 9209 - protein, 10 aa, Artificial Sequence
  Description of Artificial Sequence: Synthetic epitope
FGMGSKSAAT

SEQ ID NO: 9210 - protein, 10 aa, Artificial Sequence
  Description of Artificial Sequence: Synthetic epitope
FGPESSAERP

SEQ ID NO: 9211 - protein, 10 aa, Artificial Sequence
  Description of Artificial Sequence: Synthetic epitope
FGQSAFSQLR

SEQ ID NO: 9212 - protein, 10 aa, Artificial Sequence
  Description of Artificial Sequence: Synthetic epitope
FGSAAEMLSE

SEQ ID NO: 9213 - protein, 10 aa, Artificial Sequence
  Description of Artificial Sequence: Synthetic epitope
FGSALLSSRY

SEQ ID NO: 9214 - protein, 10 aa, Artificial Sequence
  Description of Artificial Sequence: Synthetic epitope
FGSRKAQREA

SEQ ID NO: 9215 - protein, 10 aa, Artificial Sequence
  Description of Artificial Sequence: Synthetic epitope
FGSSEKETIE

SEQ ID NO: 9216 - protein, 10 aa, Artificial Sequence
  Description of Artificial Sequence: Synthetic epitope
FGSTESITDE

SEQ ID NO: 9217 - protein, 10 aa, Artificial Sequence
  Description of Artificial Sequence: Synthetic epitope
FGTFRPWGKF

SEQ ID NO: 9218 - protein, 10 aa, Artificial Sequence
  Description of Artificial Sequence: Synthetic epitope
FGVEELSKAY

SEQ ID NO: 9219 - protein, 10 aa, Artificial Sequence
  Description of Artificial Sequence: Synthetic epitope
FHFATSAKAF

SEQ ID NO: 9220 - protein, 10 aa, Artificial Sequence
  Description of Artificial Sequence: Synthetic epitope
FHKEQQRTSA

SEQ ID NO: 9221 - protein, 10 aa, Artificial Sequence
  Description of Artificial Sequence: Synthetic epitope
FHLLSRLRKA

SEQ ID NO: 9222 - protein, 10 aa, Artificial Sequence
  Description of Artificial Sequence: Synthetic epitope
FHLQQAKLRS

SEQ ID NO: 9223 - protein, 10 aa, Artificial Sequence
  Description of Artificial Sequence: Synthetic epitope
FHNMAILEAL

SEQ ID NO: 9224 - protein, 10 aa, Artificial Sequence
  Description of Artificial Sequence: Synthetic epitope
FHRISKSATR

SEQ ID NO: 9225 - protein, 10 aa, Artificial Sequence
  Description of Artificial Sequence: Synthetic epitope
FHRLHVQQHQ

SEQ ID NO: 9226 - protein, 10 aa, Artificial Sequence
  Description of Artificial Sequence: Synthetic epitope
FIAAGESSAP

SEQ ID NO: 9227 - protein, 10 aa, Artificial Sequence
  Description of Artificial Sequence: Synthetic epitope
FIAKAVSEEG

SEQ ID NO: 9228 - protein, 10 aa, Artificial Sequence
  Description of Artificial Sequence: Synthetic epitope
FIDFTYVRVS

SEQ ID NO: 9229 - protein, 10 aa, Artificial Sequence
  Description of Artificial Sequence: Synthetic epitope
FIEKVKTKSR

SEQ ID NO: 9230 - protein, 10 aa, Artificial Sequence
  Description of Artificial Sequence: Synthetic epitope
FINIKLNSAS

SEQ ID NO: 9231 - protein, 10 aa, Artificial Sequence
  Description of Artificial Sequence: Synthetic epitope
FISMIFRLDY

SEQ ID NO: 9232 - protein, 10 aa, Artificial Sequence
  Description of Artificial Sequence: Synthetic epitope
FITKAVKVEK

SEQ ID NO: 9233 - protein, 10 aa, Artificial Sequence
  Description of Artificial Sequence: Synthetic epitope
FITQQGIKSQ

SEQ ID NO: 9234 - protein, 10 aa, Artificial Sequence
  Description of Artificial Sequence: Synthetic epitope
FKAESMFTNA

SEQ ID NO: 9235 - protein, 10 aa, Artificial Sequence
  Description of Artificial Sequence: Synthetic epitope
FKAQTQLNKK

SEQ ID NO: 9236 - protein, 10 aa, Artificial Sequence
  Description of Artificial Sequence: Synthetic epitope
FKATEIIEPS

SEQ ID NO: 9237 - protein, 10 aa, Artificial Sequence
  Description of Artificial Sequence: Synthetic epitope
FKENLTNKKE

SEQ ID NO: 9238 - protein, 10 aa, Artificial Sequence
  Description of Artificial Sequence: Synthetic epitope
FKHKEQLRAE

SEQ ID NO: 9239 - protein, 10 aa, Artificial Sequence
  Description of Artificial Sequence: Synthetic epitope
FKITAPLINK

SEQ ID NO: 9240 - protein, 10 aa, Artificial Sequence
  Description of Artificial Sequence: Synthetic epitope
FKKEAVLIQA

SEQ ID NO: 9241 - protein, 10 aa, Artificial Sequence
  Description of Artificial Sequence: Synthetic epitope
FKKSISLSSL

SEQ ID NO: 9242 - protein, 10 aa, Artificial Sequence
  Description of Artificial Sequence: Synthetic epitope
FKKSMVKGLD

SEQ ID NO: 9243 - protein, 10 aa, Artificial Sequence
  Description of Artificial Sequence: Synthetic epitope
FKKTKILSDS

SEQ ID NO: 9244 - protein, 10 aa, Artificial Sequence
  Description of Artificial Sequence: Synthetic epitope
FKKWKPIMKG

SEQ ID NO: 9245 - protein, 10 aa, Artificial Sequence
  Description of Artificial Sequence: Synthetic epitope
FKLNTKVTGA

SEQ ID NO: 9246 - protein, 10 aa, Artificial Sequence
  Description of Artificial Sequence: Synthetic epitope
FKMDVHITPG

SEQ ID NO: 9247 - protein, 10 aa, Artificial Sequence
  Description of Artificial Sequence: Synthetic epitope
FKMVTKIKMF

SEQ ID NO: 9248 - protein, 10 aa, Artificial Sequence
  Description of Artificial Sequence: Synthetic epitope
FKNEIDTVVS

SEQ ID NO: 9249 - protein, 10 aa, Artificial Sequence
  Description of Artificial Sequence: Synthetic epitope
FKNEIWPKMT

SEQ ID NO: 9250 - protein, 10 aa, Artificial Sequence
  Description of Artificial Sequence: Synthetic epitope
FKNYERQKVF

SEQ ID NO: 9251 - protein, 10 aa, Artificial Sequence
  Description of Artificial Sequence: Synthetic epitope
FKPALSARLA

SEQ ID NO: 9252 - protein, 10 aa, Artificial Sequence
  Description of Artificial Sequence: Synthetic epitope
FKPMVSEPIH

SEQ ID NO: 9253 - protein, 10 aa, Artificial Sequence
  Description of Artificial Sequence: Synthetic epitope
FKPQMDLEVK

SEQ ID NO: 9254 - protein, 10 aa, Artificial Sequence
  Description of Artificial Sequence: Synthetic epitope
FKQEEKLLKS

SEQ ID NO: 9255 - protein, 10 aa, Artificial Sequence
  Description of Artificial Sequence: Synthetic epitope
FKQVNVTYGH

SEQ ID NO: 9256 - protein, 10 aa, Artificial Sequence
  Description of Artificial Sequence: Synthetic epitope
FKRVGESGVS

SEQ ID NO: 9257 - protein, 10 aa, Artificial Sequence
  Description of Artificial Sequence: Synthetic epitope
FKSEVAVLSP

SEQ ID NO: 9258 - protein, 10 aa, Artificial Sequence
  Description of Artificial Sequence: Synthetic epitope
FKSQVSRKAS

SEQ ID NO: 9259 - protein, 10 aa, Artificial Sequence
  Description of Artificial Sequence: Synthetic epitope
FKSRASNAQA

SEQ ID NO: 9260 - protein, 10 aa, Artificial Sequence
  Description of Artificial Sequence: Synthetic epitope
FKTAVPTEQK

SEQ ID NO: 9261 - protein, 10 aa, Artificial Sequence
  Description of Artificial Sequence: Synthetic epitope
FKTHFISNTK

SEQ ID NO: 9262 - protein, 10 aa, Artificial Sequence
  Description of Artificial Sequence: Synthetic epitope
FKTKTTSTFR

SEQ ID NO: 9263 - protein, 10 aa, Artificial Sequence
  Description of Artificial Sequence: Synthetic epitope
FKTRRTQKSS

SEQ ID NO: 9264 - protein, 10 aa, Artificial Sequence
  Description of Artificial Sequence: Synthetic epitope
FKVAKARLEE

SEQ ID NO: 9265 - protein, 10 aa, Artificial Sequence
  Description of Artificial Sequence: Synthetic epitope
FKWDNVFSYE

SEQ ID NO: 9266 - protein, 10 aa, Artificial Sequence
  Description of Artificial Sequence: Synthetic epitope
FLAQAEVYKE

SEQ ID NO: 9267 - protein, 10 aa, Artificial Sequence
  Description of Artificial Sequence: Synthetic epitope
FLASLTELEQ

SEQ ID NO: 9268 - protein, 10 aa, Artificial Sequence
  Description of Artificial Sequence: Synthetic epitope
FLDAASQLQK

SEQ ID NO: 9269 - protein, 10 aa, Artificial Sequence
  Description of Artificial Sequence: Synthetic epitope
FLDIAVEVNI

SEQ ID NO: 9270 - protein, 10 aa, Artificial Sequence
  Description of Artificial Sequence: Synthetic epitope
FLDITIETDI

SEQ ID NO: 9271 - protein, 10 aa, Artificial Sequence
  Description of Artificial Sequence: Synthetic epitope
FLDNVMPHTT

SEQ ID NO: 9272 - protein, 10 aa, Artificial Sequence
  Description of Artificial Sequence: Synthetic epitope
FLEAKAENLH

SEQ ID NO: 9273 - protein, 10 aa, Artificial Sequence
  Description of Artificial Sequence: Synthetic epitope
FLGATASSAI

SEQ ID NO: 9274 - protein, 10 aa, Artificial Sequence
  Description of Artificial Sequence: Synthetic epitope
FLGRFDVAAE

SEQ ID NO: 9275 - protein, 10 aa, Artificial Sequence
  Description of Artificial Sequence: Synthetic epitope
FLGRTITSKE

SEQ ID NO: 9276 - protein, 10 aa, Artificial Sequence
  Description of Artificial Sequence: Synthetic epitope
FLISSMSTRM

SEQ ID NO: 9277 - protein, 10 aa, Artificial Sequence
  Description of Artificial Sequence: Synthetic epitope
FLKNSIAKKL

SEQ ID NO: 9278 - protein, 10 aa, Artificial Sequence
  Description of Artificial Sequence: Synthetic epitope
FLKSSTTQSE

SEQ ID NO: 9279 - protein, 10 aa, Artificial Sequence
  Description of Artificial Sequence: Synthetic epitope
FLKVAEKNEI

SEQ ID NO: 9280 - protein, 10 aa, Artificial Sequence
  Description of Artificial Sequence: Synthetic epitope
FLLTELYLIE

SEQ ID NO: 9281 - protein, 10 aa, Artificial Sequence
  Description of Artificial Sequence: Synthetic epitope
FLPSESKNHL

SEQ ID NO: 9282 - protein, 10 aa, Artificial Sequence
  Description of Artificial Sequence: Synthetic epitope
FLQQTTSKIY

SEQ ID NO: 9283 - protein, 10 aa, Artificial Sequence
  Description of Artificial Sequence: Synthetic epitope
FLSKRSLSRS

SEQ ID NO: 9284 - protein, 10 aa, Artificial Sequence
  Description of Artificial Sequence: Synthetic epitope
FLTAFLVQIS

SEQ ID NO: 9285 - protein, 10 aa, Artificial Sequence
  Description of Artificial Sequence: Synthetic epitope
FLTISNEGSE

SEQ ID NO: 9286 - protein, 10 aa, Artificial Sequence
  Description of Artificial Sequence: Synthetic epitope
FLTKQMEKIQ

SEQ ID NO: 9287 - protein, 10 aa, Artificial Sequence
  Description of Artificial Sequence: Synthetic epitope
FLTVMQISEK

SEQ ID NO: 9288 - protein, 10 aa, Artificial Sequence
  Description of Artificial Sequence: Synthetic epitope
FLTWVNKPMD

SEQ ID NO: 9289 - protein, 10 aa, Artificial Sequence
  Description of Artificial Sequence: Synthetic epitope
FLVNSAFDGH

SEQ ID NO: 9290 - protein, 10 aa, Artificial Sequence
  Description of Artificial Sequence: Synthetic epitope
FLVRDIKVRE

SEQ ID NO: 9291 - protein, 10 aa, Artificial Sequence
  Description of Artificial Sequence: Synthetic epitope
FMAPDIEAAH

SEQ ID NO: 9292 - protein, 10 aa, Artificial Sequence
  Description of Artificial Sequence: Synthetic epitope
FMDWEFKISV

SEQ ID NO: 9293 - protein, 10 aa, Artificial Sequence
  Description of Artificial Sequence: Synthetic epitope
FMKLAALQLM

SEQ ID NO: 9294 - protein, 10 aa, Artificial Sequence
  Description of Artificial Sequence: Synthetic epitope
FMLSHSAQHK

SEQ ID NO: 9295 - protein, 10 aa, Artificial Sequence
  Description of Artificial Sequence: Synthetic epitope
FMNVKLLIQD

SEQ ID NO: 9296 - protein, 10 aa, Artificial Sequence
  Description of Artificial Sequence: Synthetic epitope
FMREGIVTAT

SEQ ID NO: 9297 - protein, 10 aa, Artificial Sequence
  Description of Artificial Sequence: Synthetic epitope
FMRSLQKMVR

SEQ ID NO: 9298 - protein, 10 aa, Artificial Sequence
  Description of Artificial Sequence: Synthetic epitope
FNAIRLVQSV

SEQ ID NO: 9299 - protein, 10 aa, Artificial Sequence
  Description of Artificial Sequence: Synthetic epitope
FNAKKMWPQY

SEQ ID NO: 9300 - protein, 10 aa, Artificial Sequence
  Description of Artificial Sequence: Synthetic epitope
FNFASAATKK

SEQ ID NO: 9301 - protein, 10 aa, Artificial Sequence
  Description of Artificial Sequence: Synthetic epitope
FNGSDNMWQG

SEQ ID NO: 9302 - protein, 10 aa, Artificial Sequence
  Description of Artificial Sequence: Synthetic epitope
FNISNLLVLH

SEQ ID NO: 9303 - protein, 10 aa, Artificial Sequence
  Description of Artificial Sequence: Synthetic epitope
FNISRAESLP

SEQ ID NO: 9304 - protein, 10 aa, Artificial Sequence
  Description of Artificial Sequence: Synthetic epitope
FNMKSVVSDE

SEQ ID NO: 9305 - protein, 10 aa, Artificial Sequence
  Description of Artificial Sequence: Synthetic epitope
FNNPTTKTAD

SEQ ID NO: 9306 - protein, 10 aa, Artificial Sequence
  Description of Artificial Sequence: Synthetic epitope
FNQMQIAESS

SEQ ID NO: 9307 - protein, 10 aa, Artificial Sequence
  Description of Artificial Sequence: Synthetic epitope
FNRASELKEE

SEQ ID NO: 9308 - protein, 10 aa, Artificial Sequence
  Description of Artificial Sequence: Synthetic epitope
FNSKETFVPH

SEQ ID NO: 9309 - protein, 10 aa, Artificial Sequence
  Description of Artificial Sequence: Synthetic epitope
FNSRVIDQKT

SEQ ID NO: 9310 - protein, 10 aa, Artificial Sequence
  Description of Artificial Sequence: Synthetic epitope
FNTLSTINLK

SEQ ID NO: 9311 - protein, 10 aa, Artificial Sequence
  Description of Artificial Sequence: Synthetic epitope
FNTSSDAVNL

SEQ ID NO: 9312 - protein, 10 aa, Artificial Sequence
  Description of Artificial Sequence: Synthetic epitope
FNTTSVIKIA

SEQ ID NO: 9313 - protein, 10 aa, Artificial Sequence
  Description of Artificial Sequence: Synthetic epitope
FNVKAKTLEE

SEQ ID NO: 9314 - protein, 10 aa, Artificial Sequence
  Description of Artificial Sequence: Synthetic epitope
FNYIKGSYPQ

SEQ ID NO: 9315 - protein, 10 aa, Artificial Sequence
  Description of Artificial Sequence: Synthetic epitope
FPAIAKPINK

SEQ ID NO: 9316 - protein, 10 aa, Artificial Sequence
  Description of Artificial Sequence: Synthetic epitope
FPRHTNASAR

SEQ ID NO: 9317 - protein, 10 aa, Artificial Sequence
  Description of Artificial Sequence: Synthetic epitope
FPTKRSKKAG

SEQ ID NO: 9318 - protein, 10 aa, Artificial Sequence
  Description of Artificial Sequence: Synthetic epitope
FQAEQKIKAD

SEQ ID NO: 9319 - protein, 10 aa, Artificial Sequence
  Description of Artificial Sequence: Synthetic epitope
FQDSNSSLRP

SEQ ID NO: 9320 - protein, 10 aa, Artificial Sequence
  Description of Artificial Sequence: Synthetic epitope
FQEVKESENV

SEQ ID NO: 9321 - protein, 10 aa, Artificial Sequence
  Description of Artificial Sequence: Synthetic epitope
FQIVGTLSKP

SEQ ID NO: 9322 - protein, 10 aa, Artificial Sequence
  Description of Artificial Sequence: Synthetic epitope
FQIVSATHKK

SEQ ID NO: 9323 - protein, 10 aa, Artificial Sequence
  Description of Artificial Sequence: Synthetic epitope
FQLIDPWKFQ

SEQ ID NO: 9324 - protein, 10 aa, Artificial Sequence
  Description of Artificial Sequence: Synthetic epitope
FQLRHILKAR

SEQ ID NO: 9325 - protein, 10 aa, Artificial Sequence
  Description of Artificial Sequence: Synthetic epitope
FQQKSRQKDQ

SEQ ID NO: 9326 - protein, 10 aa, Artificial Sequence
  Description of Artificial Sequence: Synthetic epitope
FQQRQVNQES

SEQ ID NO: 9327 - protein, 10 aa, Artificial Sequence
  Description of Artificial Sequence: Synthetic epitope
FQTSTMTSFM

SEQ ID NO: 9328 - protein, 10 aa, Artificial Sequence
  Description of Artificial Sequence: Synthetic epitope
FQVLVILKND

SEQ ID NO: 9329 - protein, 10 aa, Artificial Sequence
  Description of Artificial Sequence: Synthetic epitope
FQYQLVIKNH

SEQ ID NO: 9330 - protein, 10 aa, Artificial Sequence
  Description of Artificial Sequence: Synthetic epitope
FRADNLNKLK

SEQ ID NO: 9331 - protein, 10 aa, Artificial Sequence
  Description of Artificial Sequence: Synthetic epitope
FRANTPIEIG

SEQ ID NO: 9332 - protein, 10 aa, Artificial Sequence
  Description of Artificial Sequence: Synthetic epitope
FRDHKLIRTK

SEQ ID NO: 9333 - protein, 10 aa, Artificial Sequence
  Description of Artificial Sequence: Synthetic epitope
FREKDLTEVS

SEQ ID NO: 9334 - protein, 10 aa, Artificial Sequence
  Description of Artificial Sequence: Synthetic epitope
FREPFPVQPQ

SEQ ID NO: 9335 - protein, 10 aa, Artificial Sequence
  Description of Artificial Sequence: Synthetic epitope
FRFIWLTKPP

SEQ ID NO: 9336 - protein, 10 aa, Artificial Sequence
  Description of Artificial Sequence: Synthetic epitope
FRGAAEETKS

SEQ ID NO: 9337 - protein, 10 aa, Artificial Sequence
  Description of Artificial Sequence: Synthetic epitope
FRIFDNMKLP

SEQ ID NO: 9338 - protein, 10 aa, Artificial Sequence
  Description of Artificial Sequence: Synthetic epitope
FRIFTILVEF

SEQ ID NO: 9339 - protein, 10 aa, Artificial Sequence
  Description of Artificial Sequence: Synthetic epitope
FRPAKIMRAW

SEQ ID NO: 9340 - protein, 10 aa, Artificial Sequence
  Description of Artificial Sequence: Synthetic epitope
FRRQRDISHS

SEQ ID NO: 9341 - protein, 10 aa, Artificial Sequence
  Description of Artificial Sequence: Synthetic epitope
FRSEIVSVRE

SEQ ID NO: 9342 - protein, 10 aa, Artificial Sequence
  Description of Artificial Sequence: Synthetic epitope
FRVNKPESGV

SEQ ID NO: 9343 - protein, 10 aa, Artificial Sequence
  Description of Artificial Sequence: Synthetic epitope
FSASAKSSPV

SEQ ID NO: 9344 - protein, 10 aa, Artificial Sequence
  Description of Artificial Sequence: Synthetic epitope
FSEDTLMDGP

SEQ ID NO: 9345 - protein, 10 aa, Artificial Sequence
  Description of Artificial Sequence: Synthetic epitope
FSEISKLLME

SEQ ID NO: 9346 - protein, 10 aa, Artificial Sequence
  Description of Artificial Sequence: Synthetic epitope
FSEKSKTTKD

SEQ ID NO: 9347 - protein, 10 aa, Artificial Sequence
  Description of Artificial Sequence: Synthetic epitope
FSERTEESSA

SEQ ID NO: 9348 - protein, 10 aa, Artificial Sequence
  Description of Artificial Sequence: Synthetic epitope
FSESNSSFPQ

SEQ ID NO: 9349 - protein, 10 aa, Artificial Sequence
  Description of Artificial Sequence: Synthetic epitope
FSGLSLTSAT

SEQ ID NO: 9350 - protein, 10 aa, Artificial Sequence
  Description of Artificial Sequence: Synthetic epitope
FSHNEVLMQY

SEQ ID NO: 9351 - protein, 10 aa, Artificial Sequence
  Description of Artificial Sequence: Synthetic epitope
FSIKRSSQKL

SEQ ID NO: 9352 - protein, 10 aa, Artificial Sequence
  Description of Artificial Sequence: Synthetic epitope
FSISSMSENG

SEQ ID NO: 9353 - protein, 10 aa, Artificial Sequence
  Description of Artificial Sequence: Synthetic epitope
FSKLKMEIKK

SEQ ID NO: 9354 - protein, 10 aa, Artificial Sequence
  Description of Artificial Sequence: Synthetic epitope
FSKQVDRIDW

SEQ ID NO: 9355 - protein, 10 aa, Artificial Sequence
  Description of Artificial Sequence: Synthetic epitope
FSKSATEHVQ

SEQ ID NO: 9356 - protein, 10 aa, Artificial Sequence
  Description of Artificial Sequence: Synthetic epitope
FSKTRSTKVK

SEQ ID NO: 9357 - protein, 10 aa, Artificial Sequence
  Description of Artificial Sequence: Synthetic epitope
FSLLETSNET

SEQ ID NO: 9358 - protein, 10 aa, Artificial Sequence
  Description of Artificial Sequence: Synthetic epitope
FSNISAAKAV

SEQ ID NO: 9359 - protein, 10 aa, Artificial Sequence
  Description of Artificial Sequence: Synthetic epitope
FSNKSLNRQL

SEQ ID NO: 9360 - protein, 10 aa, Artificial Sequence
  Description of Artificial Sequence: Synthetic epitope
FSQGKMYGYV

SEQ ID NO: 9361 - protein, 10 aa, Artificial Sequence
  Description of Artificial Sequence: Synthetic epitope
FSSMAEVDAA

SEQ ID NO: 9362 - protein, 10 aa, Artificial Sequence
  Description of Artificial Sequence: Synthetic epitope
FSSQNRKSGS

SEQ ID NO: 9363 - protein, 10 aa, Artificial Sequence
  Description of Artificial Sequence: Synthetic epitope
FSSRTLISHK

SEQ ID NO: 9364 - protein, 10 aa, Artificial Sequence
  Description of Artificial Sequence: Synthetic epitope
FSTGDTKKQP

SEQ ID NO: 9365 - protein, 10 aa, Artificial Sequence
  Description of Artificial Sequence: Synthetic epitope
FSTSAQNNAK

SEQ ID NO: 9366 - protein, 10 aa, Artificial Sequence
  Description of Artificial Sequence: Synthetic epitope
FSTSKITSGK

SEQ ID NO: 9367 - protein, 10 aa, Artificial Sequence
  Description of Artificial Sequence: Synthetic epitope
FSVDKEASAH

SEQ ID NO: 9368 - protein, 10 aa, Artificial Sequence
  Description of Artificial Sequence: Synthetic epitope
FSVMLQSATS

SEQ ID NO: 9369 - protein, 10 aa, Artificial Sequence
  Description of Artificial Sequence: Synthetic epitope
FTAPAATALR

SEQ ID NO: 9370 - protein, 10 aa, Artificial Sequence
  Description of Artificial Sequence: Synthetic epitope
FTASFTSVSL

SEQ ID NO: 9371 - protein, 10 aa, Artificial Sequence
  Description of Artificial Sequence: Synthetic epitope
FTDQALSQIL

SEQ ID NO: 9372 - protein, 10 aa, Artificial Sequence
  Description of Artificial Sequence: Synthetic epitope
FTKQSISLAS

SEQ ID NO: 9373 - protein, 10 aa, Artificial Sequence
  Description of Artificial Sequence: Synthetic epitope
FTKRVALEEM

SEQ ID NO: 9374 - protein, 10 aa, Artificial Sequence
  Description of Artificial Sequence: Synthetic epitope
FTNAVMLQQH

SEQ ID NO: 9375 - protein, 10 aa, Artificial Sequence
  Description of Artificial Sequence: Synthetic epitope
FTQRKAVIHE

SEQ ID NO: 9376 - protein, 10 aa, Artificial Sequence
  Description of Artificial Sequence: Synthetic epitope
FTSARSSPKE

SEQ ID NO: 9377 - protein, 10 aa, Artificial Sequence
  Description of Artificial Sequence: Synthetic epitope
FTSIEVVKKA

SEQ ID NO: 9378 - protein, 10 aa, Artificial Sequence
  Description of Artificial Sequence: Synthetic epitope
FTSIKAITQE

SEQ ID NO: 9379 - protein, 10 aa, Artificial Sequence
  Description of Artificial Sequence: Synthetic epitope
FTSKKVSDTP

SEQ ID NO: 9380 - protein, 10 aa, Artificial Sequence
  Description of Artificial Sequence: Synthetic epitope
FTSKSAISKT

SEQ ID NO: 9381 - protein, 10 aa, Artificial Sequence
  Description of Artificial Sequence: Synthetic epitope
FTSKSNSVSP

SEQ ID NO: 9382 - protein, 10 aa, Artificial Sequence
  Description of Artificial Sequence: Synthetic epitope
FTSQAQLDSH

SEQ ID NO: 9383 - protein, 10 aa, Artificial Sequence
  Description of Artificial Sequence: Synthetic epitope
FTSSKLLPAE

SEQ ID NO: 9384 - protein, 10 aa, Artificial Sequence
  Description of Artificial Sequence: Synthetic epitope
FTSSQVQRYA

SEQ ID NO: 9385 - protein, 10 aa, Artificial Sequence
  Description of Artificial Sequence: Synthetic epitope
FTTKVLSAPT

SEQ ID NO: 9386 - protein, 10 aa, Artificial Sequence
  Description of Artificial Sequence: Synthetic epitope
FVAIISSTKR

SEQ ID NO: 9387 - protein, 10 aa, Artificial Sequence
  Description of Artificial Sequence: Synthetic epitope
FVETKQSQTT

SEQ ID NO: 9388 - protein, 10 aa, Artificial Sequence
  Description of Artificial Sequence: Synthetic epitope
FVITSLKELG

SEQ ID NO: 9389 - protein, 10 aa, Artificial Sequence
  Description of Artificial Sequence: Synthetic epitope
FVKEIQNQTL

SEQ ID NO: 9390 - protein, 10 aa, Artificial Sequence
  Description of Artificial Sequence: Synthetic epitope
FVQTLKIEKS

SEQ ID NO: 9391 - protein, 10 aa, Artificial Sequence
  Description of Artificial Sequence: Synthetic epitope
FVRGLLVNEE

SEQ ID NO: 9392 - protein, 10 aa, Artificial Sequence
  Description of Artificial Sequence: Synthetic epitope
FVSNHTASTM

SEQ ID NO: 9393 - protein, 10 aa, Artificial Sequence
  Description of Artificial Sequence: Synthetic epitope
FVSNNSSATH

SEQ ID NO: 9394 - protein, 10 aa, Artificial Sequence
  Description of Artificial Sequence: Synthetic epitope
FVTTATVDTS

SEQ ID NO: 9395 - protein, 10 aa, Artificial Sequence
  Description of Artificial Sequence: Synthetic epitope
FVVARILADL

SEQ ID NO: 9396 - protein, 10 aa, Artificial Sequence
  Description of Artificial Sequence: Synthetic epitope
FVVRVPKADE

SEQ ID NO: 9397 - protein, 10 aa, Artificial Sequence
  Description of Artificial Sequence: Synthetic epitope
FWPASTIKVE

SEQ ID NO: 9398 - protein, 10 aa, Artificial Sequence
  Description of Artificial Sequence: Synthetic epitope
FWQSSQSQNF

SEQ ID NO: 9399 - protein, 10 aa, Artificial Sequence
  Description of Artificial Sequence: Synthetic epitope
FYEKTAISSK

SEQ ID NO: 9400 - protein, 10 aa, Artificial Sequence
  Description of Artificial Sequence: Synthetic epitope
FYEVLSEIKR

SEQ ID NO: 9401 - protein, 10 aa, Artificial Sequence
  Description of Artificial Sequence: Synthetic epitope
FYMRFTASLD

SEQ ID NO: 9402 - protein, 10 aa, Artificial Sequence
  Description of Artificial Sequence: Synthetic epitope
FYRGEKLVNL

SEQ ID NO: 9403 - protein, 10 aa, Artificial Sequence
  Description of Artificial Sequence: Synthetic epitope
FYRKRVQGTH

SEQ ID NO: 9404 - protein, 10 aa, Artificial Sequence
  Description of Artificial Sequence: Synthetic epitope
FYRKSQLQRP

SEQ ID NO: 9405 - protein, 10 aa, Artificial Sequence
  Description of Artificial Sequence: Synthetic epitope
GAAESFGEKK

SEQ ID NO: 9406 - protein, 10 aa, Artificial Sequence
  Description of Artificial Sequence: Synthetic epitope
GAAESRGLRV

SEQ ID NO: 9407 - protein, 10 aa, Artificial Sequence
  Description of Artificial Sequence: Synthetic epitope
GAAKAKKPAG

SEQ ID NO: 9408 - protein, 10 aa, Artificial Sequence
  Description of Artificial Sequence: Synthetic epitope
GAASLKFGAR

SEQ ID NO: 9409 - protein, 10 aa, Artificial Sequence
  Description of Artificial Sequence: Synthetic epitope
GAASNVAEPV

SEQ ID NO: 9410 - protein, 10 aa, Artificial Sequence
  Description of Artificial Sequence: Synthetic epitope
GAASTKSGKA

SEQ ID NO: 9411 - protein, 10 aa, Artificial Sequence
  Description of Artificial Sequence: Synthetic epitope
GAASTQSLFT

SEQ ID NO: 9412 - protein, 10 aa, Artificial Sequence
  Description of Artificial Sequence: Synthetic epitope
GAAVSEQSRA

SEQ ID NO: 9413 - protein, 10 aa, Artificial Sequence
  Description of Artificial Sequence: Synthetic epitope
GADAADELSV

SEQ ID NO: 9414 - protein, 10 aa, Artificial Sequence
  Description of Artificial Sequence: Synthetic epitope
GADAVEQKAQ

SEQ ID NO: 9415 - protein, 10 aa, Artificial Sequence
  Description of Artificial Sequence: Synthetic epitope
GADSQSVQNS

SEQ ID NO: 9416 - protein, 10 aa, Artificial Sequence
  Description of Artificial Sequence: Synthetic epitope
GADVTSANAK

SEQ ID NO: 9417 - protein, 10 aa, Artificial Sequence
  Description of Artificial Sequence: Synthetic epitope
GAEAKLEVSS

SEQ ID NO: 9418 - protein, 10 aa, Artificial Sequence
  Description of Artificial Sequence: Synthetic epitope
GAEALELLEH

SEQ ID NO: 9419 - protein, 10 aa, Artificial Sequence
  Description of Artificial Sequence: Synthetic epitope
GAEETLMHDQ

SEQ ID NO: 9420 - protein, 10 aa, Artificial Sequence
  Description of Artificial Sequence: Synthetic epitope
GAEGLSVRRA

SEQ ID NO: 9421 - protein, 10 aa, Artificial Sequence
  Description of Artificial Sequence: Synthetic epitope
GAELRAVLAL

SEQ ID NO: 9422 - protein, 10 aa, Artificial Sequence
  Description of Artificial Sequence: Synthetic epitope
GAENASSKES

SEQ ID NO: 9423 - protein, 10 aa, Artificial Sequence
  Description of Artificial Sequence: Synthetic epitope
GAENIQQKTD

SEQ ID NO: 9424 - protein, 10 aa, Artificial Sequence
  Description of Artificial Sequence: Synthetic epitope
GAESGTLARA

SEQ ID NO: 9425 - protein, 10 aa, Artificial Sequence
  Description of Artificial Sequence: Synthetic epitope
GAESKAEAKT

SEQ ID NO: 9426 - protein, 10 aa, Artificial Sequence
  Description of Artificial Sequence: Synthetic epitope
GAESSAAKTS

SEQ ID NO: 9427 - protein, 10 aa, Artificial Sequence
  Description of Artificial Sequence: Synthetic epitope
GAETQQSKVA

SEQ ID NO: 9428 - protein, 10 aa, Artificial Sequence
  Description of Artificial Sequence: Synthetic epitope
GAETREGLRS

SEQ ID NO: 9429 - protein, 10 aa, Artificial Sequence
  Description of Artificial Sequence: Synthetic epitope
GAETSAASVP

SEQ ID NO: 9430 - protein, 10 aa, Artificial Sequence
  Description of Artificial Sequence: Synthetic epitope
GAFPARLKKV

SEQ ID NO: 9431 - protein, 10 aa, Artificial Sequence
  Description of Artificial Sequence: Synthetic epitope
GAGLQQLLAS

SEQ ID NO: 9432 - protein, 10 aa, Artificial Sequence
  Description of Artificial Sequence: Synthetic epitope
GAGQAKQKKR

SEQ ID NO: 9433 - protein, 10 aa, Artificial Sequence
  Description of Artificial Sequence: Synthetic epitope
GAGRLTLDKA

SEQ ID NO: 9434 - protein, 10 aa, Artificial Sequence
  Description of Artificial Sequence: Synthetic epitope
GAGRMETKAR

SEQ ID NO: 9435 - protein, 10 aa, Artificial Sequence
  Description of Artificial Sequence: Synthetic epitope
GAGRRGDSQE

SEQ ID NO: 9436 - protein, 10 aa, Artificial Sequence
  Description of Artificial Sequence: Synthetic epitope
GAHPLEKSKW

SEQ ID NO: 9437 - protein, 10 aa, Artificial Sequence
  Description of Artificial Sequence: Synthetic epitope
GAIEERTAPT

SEQ ID NO: 9438 - protein, 10 aa, Artificial Sequence
  Description of Artificial Sequence: Synthetic epitope
GAISAELEAT

SEQ ID NO: 9439 - protein, 10 aa, Artificial Sequence
  Description of Artificial Sequence: Synthetic epitope
GAKAAQQDSD

SEQ ID NO: 9440 - protein, 10 aa, Artificial Sequence
  Description of Artificial Sequence: Synthetic epitope
GAKADTGLDD

SEQ ID NO: 9441 - protein, 10 aa, Artificial Sequence
  Description of Artificial Sequence: Synthetic epitope
GAKAIFGYIR

SEQ ID NO: 9442 - protein, 10 aa, Artificial Sequence
  Description of Artificial Sequence: Synthetic epitope
GAKASAKGEQ

SEQ ID NO: 9443 - protein, 10 aa, Artificial Sequence
  Description of Artificial Sequence: Synthetic epitope
GAKDEALGEE

SEQ ID NO: 9444 - protein, 10 aa, Artificial Sequence
  Description of Artificial Sequence: Synthetic epitope
GAKFRNEDIV

SEQ ID NO: 9445 - protein, 10 aa, Artificial Sequence
  Description of Artificial Sequence: Synthetic epitope
GAKISERIQG

SEQ ID NO: 9446 - protein, 10 aa, Artificial Sequence
  Description of Artificial Sequence: Synthetic epitope
GAKIVMREDR

SEQ ID NO: 9447 - protein, 10 aa, Artificial Sequence
  Description of Artificial Sequence: Synthetic epitope
GAKKALNKVK

SEQ ID NO: 9448 - protein, 10 aa, Artificial Sequence
  Description of Artificial Sequence: Synthetic epitope
GAKKSRLRQS

SEQ ID NO: 9449 - protein, 10 aa, Artificial Sequence
  Description of Artificial Sequence: Synthetic epitope
GAKKTLFPPQ

SEQ ID NO: 9450 - protein, 10 aa, Artificial Sequence
  Description of Artificial Sequence: Synthetic epitope
GAKNIEIDSP

SEQ ID NO: 9451 - protein, 10 aa, Artificial Sequence
  Description of Artificial Sequence: Synthetic epitope
GAKNSVSLMK

SEQ ID NO: 9452 - protein, 10 aa, Artificial Sequence
  Description of Artificial Sequence: Synthetic epitope
GAKVEQKYLR

SEQ ID NO: 9453 - protein, 10 aa, Artificial Sequence
  Description of Artificial Sequence: Synthetic epitope
GALEAKTGVE

SEQ ID NO: 9454 - protein, 10 aa, Artificial Sequence
  Description of Artificial Sequence: Synthetic epitope
GALEALSVSE

SEQ ID NO: 9455 - protein, 10 aa, Artificial Sequence
  Description of Artificial Sequence: Synthetic epitope
GALEMFTQEE

SEQ ID NO: 9456 - protein, 10 aa, Artificial Sequence
  Description of Artificial Sequence: Synthetic epitope
GALKRQNLSE

SEQ ID NO: 9457 - protein, 10 aa, Artificial Sequence
  Description of Artificial Sequence: Synthetic epitope
GALLMPQVSR

SEQ ID NO: 9458 - protein, 10 aa, Artificial Sequence
  Description of Artificial Sequence: Synthetic epitope
GALNTSSETV

SEQ ID NO: 9459 - protein, 10 aa, Artificial Sequence
  Description of Artificial Sequence: Synthetic epitope
GAMEMLGISE

SEQ ID NO: 9460 - protein, 10 aa, Artificial Sequence
  Description of Artificial Sequence: Synthetic epitope
GANENLESQS

SEQ ID NO: 9461 - protein, 10 aa, Artificial Sequence
  Description of Artificial Sequence: Synthetic epitope
GANQRQDARG

SEQ ID NO: 9462 - protein, 10 aa, Artificial Sequence
  Description of Artificial Sequence: Synthetic epitope
GANSKPAQKK

SEQ ID NO: 9463 - protein, 10 aa, Artificial Sequence
  Description of Artificial Sequence: Synthetic epitope
GANVEASDAE

SEQ ID NO: 9464 - protein, 10 aa, Artificial Sequence
  Description of Artificial Sequence: Synthetic epitope
GAPNKEETPA

SEQ ID NO: 9465 - protein, 10 aa, Artificial Sequence
  Description of Artificial Sequence: Synthetic epitope
GAPTVSSENF

SEQ ID NO: 9466 - protein, 10 aa, Artificial Sequence
  Description of Artificial Sequence: Synthetic epitope
GAQDLTEAEG

SEQ ID NO: 9467 - protein, 10 aa, Artificial Sequence
  Description of Artificial Sequence: Synthetic epitope
GAQGTILSSE

SEQ ID NO: 9468 - protein, 10 aa, Artificial Sequence
  Description of Artificial Sequence: Synthetic epitope
GAQNTSVTTG

SEQ ID NO: 9469 - protein, 10 aa, Artificial Sequence
  Description of Artificial Sequence: Synthetic epitope
GAQQTSARSA

SEQ ID NO: 9470 - protein, 10 aa, Artificial Sequence
  Description of Artificial Sequence: Synthetic epitope
GAQSELETAL

SEQ ID NO: 9471 - protein, 10 aa, Artificial Sequence
  Description of Artificial Sequence: Synthetic epitope
GAQSLSTSGG

SEQ ID NO: 9472 - protein, 10 aa, Artificial Sequence
  Description of Artificial Sequence: Synthetic epitope
GAQSMAEDLD

SEQ ID NO: 9473 - protein, 10 aa, Artificial Sequence
  Description of Artificial Sequence: Synthetic epitope
GAQVSALRQE

SEQ ID NO: 9474 - protein, 10 aa, Artificial Sequence
  Description of Artificial Sequence: Synthetic epitope
GARASLKENS

SEQ ID NO: 9475 - protein, 10 aa, Artificial Sequence
  Description of Artificial Sequence: Synthetic epitope
GAREEVVMVP

SEQ ID NO: 9476 - protein, 10 aa, Artificial Sequence
  Description of Artificial Sequence: Synthetic epitope
GARIAYKNWE

SEQ ID NO: 9477 - protein, 10 aa, Artificial Sequence
  Description of Artificial Sequence: Synthetic epitope
GARKAKYNVH

SEQ ID NO: 9478 - protein, 10 aa, Artificial Sequence
  Description of Artificial Sequence: Synthetic epitope
GARLDRDQEK

SEQ ID NO: 9479 - protein, 10 aa, Artificial Sequence
  Description of Artificial Sequence: Synthetic epitope
GARSANQSPQ

SEQ ID NO: 9480 - protein, 10 aa, Artificial Sequence
  Description of Artificial Sequence: Synthetic epitope
GASARSSRPS

SEQ ID NO: 9481 - protein, 10 aa, Artificial Sequence
  Description of Artificial Sequence: Synthetic epitope
GASFSSLRQS

SEQ ID NO: 9482 - protein, 10 aa, Artificial Sequence
  Description of Artificial Sequence: Synthetic epitope
GASKQDQSAN

SEQ ID NO: 9483 - protein, 10 aa, Artificial Sequence
  Description of Artificial Sequence: Synthetic epitope
GASLEAKQVL

SEQ ID NO: 9484 - protein, 10 aa, Artificial Sequence
  Description of Artificial Sequence: Synthetic epitope
GASQITEFPD

SEQ ID NO: 9485 - protein, 10 aa, Artificial Sequence
  Description of Artificial Sequence: Synthetic epitope
GASSEISGSE

SEQ ID NO: 9486 - protein, 10 aa, Artificial Sequence
  Description of Artificial Sequence: Synthetic epitope
GASSNSSNAT

SEQ ID NO: 9487 - protein, 10 aa, Artificial Sequence
  Description of Artificial Sequence: Synthetic epitope
GASSQRSVAR

SEQ ID NO: 9488 - protein, 10 aa, Artificial Sequence
  Description of Artificial Sequence: Synthetic epitope
GASTTRISET

SEQ ID NO: 9489 - protein, 10 aa, Artificial Sequence
  Description of Artificial Sequence: Synthetic epitope
GATEHVSYIQ

SEQ ID NO: 9490 - protein, 10 aa, Artificial Sequence
  Description of Artificial Sequence: Synthetic epitope
GATGLRDKAQ

SEQ ID NO: 9491 - protein, 10 aa, Artificial Sequence
  Description of Artificial Sequence: Synthetic epitope
GATIEMASKD

SEQ ID NO: 9492 - protein, 10 aa, Artificial Sequence
  Description of Artificial Sequence: Synthetic epitope
GATKIAVHSP

SEQ ID NO: 9493 - protein, 10 aa, Artificial Sequence
  Description of Artificial Sequence: Synthetic epitope
GATKNLRQQI

SEQ ID NO: 9494 - protein, 10 aa, Artificial Sequence
  Description of Artificial Sequence: Synthetic epitope
GATTKITTSH

SEQ ID NO: 9495 - protein, 10 aa, Artificial Sequence
  Description of Artificial Sequence: Synthetic epitope
GATVSETRLR

SEQ ID NO: 9496 - protein, 10 aa, Artificial Sequence
  Description of Artificial Sequence: Synthetic epitope
GAVDDIFVEA

SEQ ID NO: 9497 - protein, 10 aa, Artificial Sequence
  Description of Artificial Sequence: Synthetic epitope
GAVETSVLRD

SEQ ID NO: 9498 - protein, 10 aa, Artificial Sequence
  Description of Artificial Sequence: Synthetic epitope
GAVFNQVAFP

SEQ ID NO: 9499 - protein, 10 aa, Artificial Sequence
  Description of Artificial Sequence: Synthetic epitope
GAVSAEQVIA

SEQ ID NO: 9500 - protein, 10 aa, Artificial Sequence
  Description of Artificial Sequence: Synthetic epitope
GAVSSKKAVP

SEQ ID NO: 9501 - protein, 10 aa, Artificial Sequence
  Description of Artificial Sequence: Synthetic epitope
GAVTASKHSN

SEQ ID NO: 9502 - protein, 10 aa, Artificial Sequence
  Description of Artificial Sequence: Synthetic epitope
GAVVIAKTSL

SEQ ID NO: 9503 - protein, 10 aa, Artificial Sequence
  Description of Artificial Sequence: Synthetic epitope
GAYLMSQDAP

SEQ ID NO: 9504 - protein, 10 aa, Artificial Sequence
  Description of Artificial Sequence: Synthetic epitope
GAYREVEAED

SEQ ID NO: 9505 - protein, 10 aa, Artificial Sequence
  Description of Artificial Sequence: Synthetic epitope
GDAAFLAVRV

SEQ ID NO: 9506 - protein, 10 aa, Artificial Sequence
  Description of Artificial Sequence: Synthetic epitope
GDAKNEKEAP

SEQ ID NO: 9507 - protein, 10 aa, Artificial Sequence
  Description of Artificial Sequence: Synthetic epitope
GDDIALQMEK

SEQ ID NO: 9508 - protein, 10 aa, Artificial Sequence
  Description of Artificial Sequence: Synthetic epitope
GDDSDAATFK

SEQ ID NO: 9509 - protein, 10 aa, Artificial Sequence
  Description of Artificial Sequence: Synthetic epitope
GDEASSVGAG

SEQ ID NO: 9510 - protein, 10 aa, Artificial Sequence
  Description of Artificial Sequence: Synthetic epitope
GDEKTLSSGE

SEQ ID NO: 9511 - protein, 10 aa, Artificial Sequence
  Description of Artificial Sequence: Synthetic epitope
GDESLVSDES

SEQ ID NO: 9512 - protein, 10 aa, Artificial Sequence
  Description of Artificial Sequence: Synthetic epitope
GDESMTKASD

SEQ ID NO: 9513 - protein, 10 aa, Artificial Sequence
  Description of Artificial Sequence: Synthetic epitope
GDEYRIKPVE

SEQ ID NO: 9514 - protein, 10 aa, Artificial Sequence
  Description of Artificial Sequence: Synthetic epitope
GDFNMIEFYQ

SEQ ID NO: 9515 - protein, 10 aa, Artificial Sequence
  Description of Artificial Sequence: Synthetic epitope
GDFRFKHMQI

SEQ ID NO: 9516 - protein, 10 aa, Artificial Sequence
  Description of Artificial Sequence: Synthetic epitope
GDGKSADNTE

SEQ ID NO: 9517 - protein, 10 aa, Artificial Sequence
  Description of Artificial Sequence: Synthetic epitope
GDGVIKSHMT

SEQ ID NO: 9518 - protein, 10 aa, Artificial Sequence
  Description of Artificial Sequence: Synthetic epitope
GDHTIKSQRP

SEQ ID NO: 9519 - protein, 10 aa, Artificial Sequence
  Description of Artificial Sequence: Synthetic epitope
GDIGERVKSA

SEQ ID NO: 9520 - protein, 10 aa, Artificial Sequence
  Description of Artificial Sequence: Synthetic epitope
GDILVVATGQ

SEQ ID NO: 9521 - protein, 10 aa, Artificial Sequence
  Description of Artificial Sequence: Synthetic epitope
GDIPPSNNYY

SEQ ID NO: 9522 - protein, 10 aa, Artificial Sequence
  Description of Artificial Sequence: Synthetic epitope
GDISSLESSQ

SEQ ID NO: 9523 - protein, 10 aa, Artificial Sequence
  Description of Artificial Sequence: Synthetic epitope
GDKAKSESLE

SEQ ID NO: 9524 - protein, 10 aa, Artificial Sequence
  Description of Artificial Sequence: Synthetic epitope
GDKASKRLTE

SEQ ID NO: 9525 - protein, 10 aa, Artificial Sequence
  Description of Artificial Sequence: Synthetic epitope
GDKKSGTSPA

SEQ ID NO: 9526 - protein, 10 aa, Artificial Sequence
  Description of Artificial Sequence: Synthetic epitope
GDKTINSKAH

SEQ ID NO: 9527 - protein, 10 aa, Artificial Sequence
  Description of Artificial Sequence: Synthetic epitope
GDKVRSAVQK

SEQ ID NO: 9528 - protein, 10 aa, Artificial Sequence
  Description of Artificial Sequence: Synthetic epitope
GDKVSKKDEI

SEQ ID NO: 9529 - protein, 10 aa, Artificial Sequence
  Description of Artificial Sequence: Synthetic epitope
GDMKSSARVG

SEQ ID NO: 9530 - protein, 10 aa, Artificial Sequence
  Description of Artificial Sequence: Synthetic epitope
GDMSAADTFL

SEQ ID NO: 9531 - protein, 10 aa, Artificial Sequence
  Description of Artificial Sequence: Synthetic epitope
GDMSLLSNLE

SEQ ID NO: 9532 - protein, 10 aa, Artificial Sequence
  Description of Artificial Sequence: Synthetic epitope
GDMTLSMTGR

SEQ ID NO: 9533 - protein, 10 aa, Artificial Sequence
  Description of Artificial Sequence: Synthetic epitope
GDNSSLKASQ

SEQ ID NO: 9534 - protein, 10 aa, Artificial Sequence
  Description of Artificial Sequence: Synthetic epitope
GDNSSQLTKM

SEQ ID NO: 9535 - protein, 10 aa, Artificial Sequence
  Description of Artificial Sequence: Synthetic epitope
GDPSAKTDEV

SEQ ID NO: 9536 - protein, 10 aa, Artificial Sequence
  Description of Artificial Sequence: Synthetic epitope
GDQLYISEKE

SEQ ID NO: 9537 - protein, 10 aa, Artificial Sequence
  Description of Artificial Sequence: Synthetic epitope
GDQREMEFPS

SEQ ID NO: 9538 - protein, 10 aa, Artificial Sequence
  Description of Artificial Sequence: Synthetic epitope
GDRASLDAAD

SEQ ID NO: 9539 - protein, 10 aa, Artificial Sequence
  Description of Artificial Sequence: Synthetic epitope
GDRELKSSKA

SEQ ID NO: 9540 - protein, 10 aa, Artificial Sequence
  Description of Artificial Sequence: Synthetic epitope
GDRFGQIMIE

SEQ ID NO: 9541 - protein, 10 aa, Artificial Sequence
  Description of Artificial Sequence: Synthetic epitope
GDRIITPYTP

SEQ ID NO: 9542 - protein, 10 aa, Artificial Sequence
  Description of Artificial Sequence: Synthetic epitope
GDSAKAAGAK

SEQ ID NO: 9543 - protein, 10 aa, Artificial Sequence
  Description of Artificial Sequence: Synthetic epitope
GDSKAAQKLL

SEQ ID NO: 9544 - protein, 10 aa, Artificial Sequence
  Description of Artificial Sequence: Synthetic epitope
GDSLSSTKQP

SEQ ID NO: 9545 - protein, 10 aa, Artificial Sequence
  Description of Artificial Sequence: Synthetic epitope
GDSQTMLLQR

SEQ ID NO: 9546 - protein, 10 aa, Artificial Sequence
  Description of Artificial Sequence: Synthetic epitope
GDSREINLLQ

SEQ ID NO: 9547 - protein, 10 aa, Artificial Sequence
  Description of Artificial Sequence: Synthetic epitope
GDSSKNSDSQ

SEQ ID NO: 9548 - protein, 10 aa, Artificial Sequence
  Description of Artificial Sequence: Synthetic epitope
GDSSTEQFSS

SEQ ID NO: 9549 - protein, 10 aa, Artificial Sequence
  Description of Artificial Sequence: Synthetic epitope
GDSSTLTKQE

SEQ ID NO: 9550 - protein, 10 aa, Artificial Sequence
  Description of Artificial Sequence: Synthetic epitope
GDSTDLQLVP

SEQ ID NO: 9551 - protein, 10 aa, Artificial Sequence
  Description of Artificial Sequence: Synthetic epitope
GDSTQVSNGG

SEQ ID NO: 9552 - protein, 10 aa, Artificial Sequence
  Description of Artificial Sequence: Synthetic epitope
GDSVNSLPQS

SEQ ID NO: 9553 - protein, 10 aa, Artificial Sequence
  Description of Artificial Sequence: Synthetic epitope
GDTEQLIQAQ

SEQ ID NO: 9554 - protein, 10 aa, Artificial Sequence
  Description of Artificial Sequence: Synthetic epitope
GDTGIYESDD

SEQ ID NO: 9555 - protein, 10 aa, Artificial Sequence
  Description of Artificial Sequence: Synthetic epitope
GDTLSTAEES

SEQ ID NO: 9556 - protein, 10 aa, Artificial Sequence
  Description of Artificial Sequence: Synthetic epitope
GDTSAAGSSE

SEQ ID NO: 9557 - protein, 10 aa, Artificial Sequence
  Description of Artificial Sequence: Synthetic epitope
GDTSKGGIAK

SEQ ID NO: 9558 - protein, 10 aa, Artificial Sequence
  Description of Artificial Sequence: Synthetic epitope
GDVLLAEPAD

SEQ ID NO: 9559 - protein, 10 aa, Artificial Sequence
  Description of Artificial Sequence: Synthetic epitope
GDYSSETSED

SEQ ID NO: 9560 - protein, 10 aa, Artificial Sequence
  Description of Artificial Sequence: Synthetic epitope
GEAEGDAMAQ

SEQ ID NO: 9561 - protein, 10 aa, Artificial Sequence
  Description of Artificial Sequence: Synthetic epitope
GEAEKIIHAS

SEQ ID NO: 9562 - protein, 10 aa, Artificial Sequence
  Description of Artificial Sequence: Synthetic epitope
GEAEQAADQQ

SEQ ID NO: 9563 - protein, 10 aa, Artificial Sequence
  Description of Artificial Sequence: Synthetic epitope
GEAESVEVTP

SEQ ID NO: 9564 - protein, 10 aa, Artificial Sequence
  Description of Artificial Sequence: Synthetic epitope
GEAKVVLLKA

SEQ ID NO: 9565 - protein, 10 aa, Artificial Sequence
  Description of Artificial Sequence: Synthetic epitope
GEALAEASGD

SEQ ID NO: 9566 - protein, 10 aa, Artificial Sequence
  Description of Artificial Sequence: Synthetic epitope
GEALTNAAQP

SEQ ID NO: 9567 - protein, 10 aa, Artificial Sequence
  Description of Artificial Sequence: Synthetic epitope
GEAMKVVQSS

SEQ ID NO: 9568 - protein, 10 aa, Artificial Sequence
  Description of Artificial Sequence: Synthetic epitope
GEAPTATAAT

SEQ ID NO: 9569 - protein, 10 aa, Artificial Sequence
  Description of Artificial Sequence: Synthetic epitope
GEARKAATLP

SEQ ID NO: 9570 - protein, 10 aa, Artificial Sequence
  Description of Artificial Sequence: Synthetic epitope
GEASAANAPE

SEQ ID NO: 9571 - protein, 10 aa, Artificial Sequence
  Description of Artificial Sequence: Synthetic epitope
GEASASIPTT

SEQ ID NO: 9572 - protein, 10 aa, Artificial Sequence
  Description of Artificial Sequence: Synthetic epitope
GEASTSASID

SEQ ID NO: 9573 - protein, 10 aa, Artificial Sequence
  Description of Artificial Sequence: Synthetic epitope
GEATATADRR

SEQ ID NO: 9574 - protein, 10 aa, Artificial Sequence
  Description of Artificial Sequence: Synthetic epitope
GEATATDQTM

SEQ ID NO: 9575 - protein, 10 aa, Artificial Sequence
  Description of Artificial Sequence: Synthetic epitope
GEATFIARMA

SEQ ID NO: 9576 - protein, 10 aa, Artificial Sequence
  Description of Artificial Sequence: Synthetic epitope
GEDEDMVSSE

SEQ ID NO: 9577 - protein, 10 aa, Artificial Sequence
  Description of Artificial Sequence: Synthetic epitope
GEDIHVIEKM

SEQ ID NO: 9578 - protein, 10 aa, Artificial Sequence
  Description of Artificial Sequence: Synthetic epitope
GEDLSSATHD

SEQ ID NO: 9579 - protein, 10 aa, Artificial Sequence
  Description of Artificial Sequence: Synthetic epitope
GEDQSEQEKQ

SEQ ID NO: 9580 - protein, 10 aa, Artificial Sequence
  Description of Artificial Sequence: Synthetic epitope
GEEASESLMN

SEQ ID NO: 9581 - protein, 10 aa, Artificial Sequence
  Description of Artificial Sequence: Synthetic epitope
GEEMMKRALQ

SEQ ID NO: 9582 - protein, 10 aa, Artificial Sequence
  Description of Artificial Sequence: Synthetic epitope
GEERSLFALS

SEQ ID NO: 9583 - protein, 10 aa, Artificial Sequence
  Description of Artificial Sequence: Synthetic epitope
GEESRLADRL

SEQ ID NO: 9584 - protein, 10 aa, Artificial Sequence
  Description of Artificial Sequence: Synthetic epitope
GEESVNLNDA

SEQ ID NO: 9585 - protein, 10 aa, Artificial Sequence
  Description of Artificial Sequence: Synthetic epitope
GEETEPQSSE

SEQ ID NO: 9586 - protein, 10 aa, Artificial Sequence
  Description of Artificial Sequence: Synthetic epitope
GEETKYESIR

SEQ ID NO: 9587 - protein, 10 aa, Artificial Sequence
  Description of Artificial Sequence: Synthetic epitope
GEETSLASVQ

SEQ ID NO: 9588 - protein, 10 aa, Artificial Sequence
  Description of Artificial Sequence: Synthetic epitope
GEFKESIPKM

SEQ ID NO: 9589 - protein, 10 aa, Artificial Sequence
  Description of Artificial Sequence: Synthetic epitope
GEGSQTERFH

SEQ ID NO: 9590 - protein, 10 aa, Artificial Sequence
  Description of Artificial Sequence: Synthetic epitope
GEIATSQERL

SEQ ID NO: 9591 - protein, 10 aa, Artificial Sequence
  Description of Artificial Sequence: Synthetic epitope
GEIEASSMFS

SEQ ID NO: 9592 - protein, 10 aa, Artificial Sequence
  Description of Artificial Sequence: Synthetic epitope
GEIKSIAAKY

SEQ ID NO: 9593 - protein, 10 aa, Artificial Sequence
  Description of Artificial Sequence: Synthetic epitope
GEIMTFEKVK

SEQ ID NO: 9594 - protein, 10 aa, Artificial Sequence
  Description of Artificial Sequence: Synthetic epitope
GEIQQYQNQP

SEQ ID NO: 9595 - protein, 10 aa, Artificial Sequence
  Description of Artificial Sequence: Synthetic epitope
GEIRKNEGQI

SEQ ID NO: 9596 - protein, 10 aa, Artificial Sequence
  Description of Artificial Sequence: Synthetic epitope
GEISALTSKL

SEQ ID NO: 9597 - protein, 10 aa, Artificial Sequence
  Description of Artificial Sequence: Synthetic epitope
GEKAKAALDL

SEQ ID NO: 9598 - protein, 10 aa, Artificial Sequence
  Description of Artificial Sequence: Synthetic epitope
GEKEAKLAQQ

SEQ ID NO: 9599 - protein, 10 aa, Artificial Sequence
  Description of Artificial Sequence: Synthetic epitope
GEKEANIQAV

SEQ ID NO: 9600 - protein, 10 aa, Artificial Sequence
  Description of Artificial Sequence: Synthetic epitope
GEKEETTVGS

SEQ ID NO: 9601 - protein, 10 aa, Artificial Sequence
  Description of Artificial Sequence: Synthetic epitope
GEKLTADDEA

SEQ ID NO: 9602 - protein, 10 aa, Artificial Sequence
  Description of Artificial Sequence: Synthetic epitope
GEKRQELLAQ

SEQ ID NO: 9603 - protein, 10 aa, Artificial Sequence
  Description of Artificial Sequence: Synthetic epitope
GEKSEQSGLS

SEQ ID NO: 9604 - protein, 10 aa, Artificial Sequence
  Description of Artificial Sequence: Synthetic epitope
GEKVSLAQAK

SEQ ID NO: 9605 - protein, 10 aa, Artificial Sequence
  Description of Artificial Sequence: Synthetic epitope
GEKVSLAQAK

SEQ ID NO: 9606 - protein, 10 aa, Artificial Sequence
  Description of Artificial Sequence: Synthetic epitope
GELAQSSVPP

SEQ ID NO: 9607 - protein, 10 aa, Artificial Sequence
  Description of Artificial Sequence: Synthetic epitope
GELASAISSG

SEQ ID NO: 9608 - protein, 10 aa, Artificial Sequence
  Description of Artificial Sequence: Synthetic epitope
GELDQIDRKP

SEQ ID NO: 9609 - protein, 10 aa, Artificial Sequence
  Description of Artificial Sequence: Synthetic epitope
GELIMSALDS

SEQ ID NO: 9610 - protein, 10 aa, Artificial Sequence
  Description of Artificial Sequence: Synthetic epitope
GELLEESQME

SEQ ID NO: 9611 - protein, 10 aa, Artificial Sequence
  Description of Artificial Sequence: Synthetic epitope
GELLSTLLTK

SEQ ID NO: 9612 - protein, 10 aa, Artificial Sequence
  Description of Artificial Sequence: Synthetic epitope
GELMTVARWM

SEQ ID NO: 9613 - protein, 10 aa, Artificial Sequence
  Description of Artificial Sequence: Synthetic epitope
GELNSREQTN

SEQ ID NO: 9614 - protein, 10 aa, Artificial Sequence
  Description of Artificial Sequence: Synthetic epitope
GELSEKMFHT

SEQ ID NO: 9615 - protein, 10 aa, Artificial Sequence
  Description of Artificial Sequence: Synthetic epitope
GELSLARVLR

SEQ ID NO: 9616 - protein, 10 aa, Artificial Sequence
  Description of Artificial Sequence: Synthetic epitope
GELTALEFSA

SEQ ID NO: 9617 - protein, 10 aa, Artificial Sequence
  Description of Artificial Sequence: Synthetic epitope
GELTEATPNR

SEQ ID NO: 9618 - protein, 10 aa, Artificial Sequence
  Description of Artificial Sequence: Synthetic epitope
GEMKESSIDD

SEQ ID NO: 9619 - protein, 10 aa, Artificial Sequence
  Description of Artificial Sequence: Synthetic epitope
GEMNATHIAQ

SEQ ID NO: 9620 - protein, 10 aa, Artificial Sequence
  Description of Artificial Sequence: Synthetic epitope
GEMVAAVAEV

SEQ ID NO: 9621 - protein, 10 aa, Artificial Sequence
  Description of Artificial Sequence: Synthetic epitope
GEMVSAETKV

SEQ ID NO: 9622 - protein, 10 aa, Artificial Sequence
  Description of Artificial Sequence: Synthetic epitope
GENELIVNDQ

SEQ ID NO: 9623 - protein, 10 aa, Artificial Sequence
  Description of Artificial Sequence: Synthetic epitope
GENKTLGGVI

SEQ ID NO: 9624 - protein, 10 aa, Artificial Sequence
  Description of Artificial Sequence: Synthetic epitope
GENTEGGVES

SEQ ID NO: 9625 - protein, 10 aa, Artificial Sequence
  Description of Artificial Sequence: Synthetic epitope
GENTQVAEPE

SEQ ID NO: 9626 - protein, 10 aa, Artificial Sequence
  Description of Artificial Sequence: Synthetic epitope
GEPEKEQRVQ

SEQ ID NO: 9627 - protein, 10 aa, Artificial Sequence
  Description of Artificial Sequence: Synthetic epitope
GEPHSQMGSL

SEQ ID NO: 9628 - protein, 10 aa, Artificial Sequence
  Description of Artificial Sequence: Synthetic epitope
GEPQTEHQQE

SEQ ID NO: 9629 - protein, 10 aa, Artificial Sequence
  Description of Artificial Sequence: Synthetic epitope
GEQELLMMSE

SEQ ID NO: 9630 - protein, 10 aa, Artificial Sequence
  Description of Artificial Sequence: Synthetic epitope
GEQGKAISSA

SEQ ID NO: 9631 - protein, 10 aa, Artificial Sequence
  Description of Artificial Sequence: Synthetic epitope
GEQQSKVSIE

SEQ ID NO: 9632 - protein, 10 aa, Artificial Sequence
  Description of Artificial Sequence: Synthetic epitope
GEQVVSSPAD

SEQ ID NO: 9633 - protein, 10 aa, Artificial Sequence
  Description of Artificial Sequence: Synthetic epitope
GEQWKILAPY

SEQ ID NO: 9634 - protein, 10 aa, Artificial Sequence
  Description of Artificial Sequence: Synthetic epitope
GERAEKLERE

SEQ ID NO: 9635 - protein, 10 aa, Artificial Sequence
  Description of Artificial Sequence: Synthetic epitope
GERDIASKKP

SEQ ID NO: 9636 - protein, 10 aa, Artificial Sequence
  Description of Artificial Sequence: Synthetic epitope
GERQPIQITM

SEQ ID NO: 9637 - protein, 10 aa, Artificial Sequence
  Description of Artificial Sequence: Synthetic epitope
GESAGRSAES

SEQ ID NO: 9638 - protein, 10 aa, Artificial Sequence
  Description of Artificial Sequence: Synthetic epitope
GESARAASEE

SEQ ID NO: 9639 - protein, 10 aa, Artificial Sequence
  Description of Artificial Sequence: Synthetic epitope
GESGDSESTV

SEQ ID NO: 9640 - protein, 10 aa, Artificial Sequence
  Description of Artificial Sequence: Synthetic epitope
GESKAMNLYE

SEQ ID NO: 9641 - protein, 10 aa, Artificial Sequence
  Description of Artificial Sequence: Synthetic epitope
GESKNLGQKE

SEQ ID NO: 9642 - protein, 10 aa, Artificial Sequence
  Description of Artificial Sequence: Synthetic epitope
GESLADSVQT

SEQ ID NO: 9643 - protein, 10 aa, Artificial Sequence
  Description of Artificial Sequence: Synthetic epitope
GESLAKINEE

SEQ ID NO: 9644 - protein, 10 aa, Artificial Sequence
  Description of Artificial Sequence: Synthetic epitope
GESLSLAEVA

SEQ ID NO: 9645 - protein, 10 aa, Artificial Sequence
  Description of Artificial Sequence: Synthetic epitope
GESLSLIGHR

SEQ ID NO: 9646 - protein, 10 aa, Artificial Sequence
  Description of Artificial Sequence: Synthetic epitope
GESLSSQYKS

SEQ ID NO: 9647 - protein, 10 aa, Artificial Sequence
  Description of Artificial Sequence: Synthetic epitope
GESLSSTALG

SEQ ID NO: 9648 - protein, 10 aa, Artificial Sequence
  Description of Artificial Sequence: Synthetic epitope
GESPMDDKSM

SEQ ID NO: 9649 - protein, 10 aa, Artificial Sequence
  Description of Artificial Sequence: Synthetic epitope
GESQVEKTKL

SEQ ID NO: 9650 - protein, 10 aa, Artificial Sequence
  Description of Artificial Sequence: Synthetic epitope
GESSRMGIKD

SEQ ID NO: 9651 - protein, 10 aa, Artificial Sequence
  Description of Artificial Sequence: Synthetic epitope
GESTLEIRKM

SEQ ID NO: 9652 - protein, 10 aa, Artificial Sequence
  Description of Artificial Sequence: Synthetic epitope
GETAKSSTLD

SEQ ID NO: 9653 - protein, 10 aa, Artificial Sequence
  Description of Artificial Sequence: Synthetic epitope
GETASKERVI

SEQ ID NO: 9654 - protein, 10 aa, Artificial Sequence
  Description of Artificial Sequence: Synthetic epitope
GETHIVVPLR

SEQ ID NO: 9655 - protein, 10 aa, Artificial Sequence
  Description of Artificial Sequence: Synthetic epitope
GETLKVQELK

SEQ ID NO: 9656 - protein, 10 aa, Artificial Sequence
  Description of Artificial Sequence: Synthetic epitope
GETPLSEQRK

SEQ ID NO: 9657 - protein, 10 aa, Artificial Sequence
  Description of Artificial Sequence: Synthetic epitope
GETSARAKAL

SEQ ID NO: 9658 - protein, 10 aa, Artificial Sequence
  Description of Artificial Sequence: Synthetic epitope
GETSMLKRPV

SEQ ID NO: 9659 - protein, 10 aa, Artificial Sequence
  Description of Artificial Sequence: Synthetic epitope
GETSTATPRR

SEQ ID NO: 9660 - protein, 10 aa, Artificial Sequence
  Description of Artificial Sequence: Synthetic epitope
GETVNNYRST

SEQ ID NO: 9661 - protein, 10 aa, Artificial Sequence
  Description of Artificial Sequence: Synthetic epitope
GETYSPAEQS

SEQ ID NO: 9662 - protein, 10 aa, Artificial Sequence
  Description of Artificial Sequence: Synthetic epitope
GEVADAAKLT

SEQ ID NO: 9663 - protein, 10 aa, Artificial Sequence
  Description of Artificial Sequence: Synthetic epitope
GEVDATASSI

SEQ ID NO: 9664 - protein, 10 aa, Artificial Sequence
  Description of Artificial Sequence: Synthetic epitope
GEVELLQQKL

SEQ ID NO: 9665 - protein, 10 aa, Artificial Sequence
  Description of Artificial Sequence: Synthetic epitope
GEVEQIVSAL

SEQ ID NO: 9666 - protein, 10 aa, Artificial Sequence
  Description of Artificial Sequence: Synthetic epitope
GEVHQAREDK

SEQ ID NO: 9667 - protein, 10 aa, Artificial Sequence
  Description of Artificial Sequence: Synthetic epitope
GEVLQIQVEE

SEQ ID NO: 9668 - protein, 10 aa, Artificial Sequence
  Description of Artificial Sequence: Synthetic epitope
GEVMHDSSFS

SEQ ID NO: 9669 - protein, 10 aa, Artificial Sequence
  Description of Artificial Sequence: Synthetic epitope
GEVREEASDD

SEQ ID NO: 9670 - protein, 10 aa, Artificial Sequence
  Description of Artificial Sequence: Synthetic epitope
GEWVSQNDHV

SEQ ID NO: 9671 - protein, 10 aa, Artificial Sequence
  Description of Artificial Sequence: Synthetic epitope
GEYNAADLRN

SEQ ID NO: 9672 - protein, 10 aa, Artificial Sequence
  Description of Artificial Sequence: Synthetic epitope
GFAAEQGVSV

SEQ ID NO: 9673 - protein, 10 aa, Artificial Sequence
  Description of Artificial Sequence: Synthetic epitope
GFASKELSSR

SEQ ID NO: 9674 - protein, 10 aa, Artificial Sequence
  Description of Artificial Sequence: Synthetic epitope
GFDSIFKKEG

SEQ ID NO: 9675 - protein, 10 aa, Artificial Sequence
  Description of Artificial Sequence: Synthetic epitope
GFEATLVQEA

SEQ ID NO: 9676 - protein, 10 aa, Artificial Sequence
  Description of Artificial Sequence: Synthetic epitope
GFEGEASSTS

SEQ ID NO: 9677 - protein, 10 aa, Artificial Sequence
  Description of Artificial Sequence: Synthetic epitope
GFEINFIKSQ

SEQ ID NO: 9678 - protein, 10 aa, Artificial Sequence
  Description of Artificial Sequence: Synthetic epitope
GFEKASRMVK

SEQ ID NO: 9679 - protein, 10 aa, Artificial Sequence
  Description of Artificial Sequence: Synthetic epitope
GFFEQAQESY

SEQ ID NO: 9680 - protein, 10 aa, Artificial Sequence
  Description of Artificial Sequence: Synthetic epitope
GFGASTEFRT

SEQ ID NO: 9681 - protein, 10 aa, Artificial Sequence
  Description of Artificial Sequence: Synthetic epitope
GFGKKSKDMS

SEQ ID NO: 9682 - protein, 10 aa, Artificial Sequence
  Description of Artificial Sequence: Synthetic epitope
GFITTEVVNE

SEQ ID NO: 9683 - protein, 10 aa, Artificial Sequence
  Description of Artificial Sequence: Synthetic epitope
GFKAMLAAFL

SEQ ID NO: 9684 - protein, 10 aa, Artificial Sequence
  Description of Artificial Sequence: Synthetic epitope
GFKGKSGYKV

SEQ ID NO: 9685 - protein, 10 aa, Artificial Sequence
  Description of Artificial Sequence: Synthetic epitope
GFKIVSKDLT

SEQ ID NO: 9686 - protein, 10 aa, Artificial Sequence
  Description of Artificial Sequence: Synthetic epitope
GFKSVMSSTE

SEQ ID NO: 9687 - protein, 10 aa, Artificial Sequence
  Description of Artificial Sequence: Synthetic epitope
GFKVSIGSSK

SEQ ID NO: 9688 - protein, 10 aa, Artificial Sequence
  Description of Artificial Sequence: Synthetic epitope
GFKYSVKHRP

SEQ ID NO: 9689 - protein, 10 aa, Artificial Sequence
  Description of Artificial Sequence: Synthetic epitope
GFLGSSQDRS

SEQ ID NO: 9690 - protein, 10 aa, Artificial Sequence
  Description of Artificial Sequence: Synthetic epitope
GFLKAQALTQ

SEQ ID NO: 9691 - protein, 10 aa, Artificial Sequence
  Description of Artificial Sequence: Synthetic epitope
GFLQTKAQQG

SEQ ID NO: 9692 - protein, 10 aa, Artificial Sequence
  Description of Artificial Sequence: Synthetic epitope
GFNRQVVRDN

SEQ ID NO: 9693 - protein, 10 aa, Artificial Sequence
  Description of Artificial Sequence: Synthetic epitope
GFNSVATARI

SEQ ID NO: 9694 - protein, 10 aa, Artificial Sequence
  Description of Artificial Sequence: Synthetic epitope
GFQIEETIDR

SEQ ID NO: 9695 - protein, 10 aa, Artificial Sequence
  Description of Artificial Sequence: Synthetic epitope
GFQLKQSKLS

SEQ ID NO: 9696 - protein, 10 aa, Artificial Sequence
  Description of Artificial Sequence: Synthetic epitope
GFSQITGSTV

SEQ ID NO: 9697 - protein, 10 aa, Artificial Sequence
  Description of Artificial Sequence: Synthetic epitope
GFSSKKRKSI

SEQ ID NO: 9698 - protein, 10 aa, Artificial Sequence
  Description of Artificial Sequence: Synthetic epitope
GFSSRASDKD

SEQ ID NO: 9699 - protein, 10 aa, Artificial Sequence
  Description of Artificial Sequence: Synthetic epitope
GFTEATGWTH

SEQ ID NO: 9700 - protein, 10 aa, Artificial Sequence
  Description of Artificial Sequence: Synthetic epitope
GFVKVAKEQG

SEQ ID NO: 9701 - protein, 10 aa, Artificial Sequence
  Description of Artificial Sequence: Synthetic epitope
GFVVRIFATS

SEQ ID NO: 9702 - protein, 10 aa, Artificial Sequence
  Description of Artificial Sequence: Synthetic epitope
GFWLTAALTS

SEQ ID NO: 9703 - protein, 10 aa, Artificial Sequence
  Description of Artificial Sequence: Synthetic epitope
GGAGRLSMQE

SEQ ID NO: 9704 - protein, 10 aa, Artificial Sequence
  Description of Artificial Sequence: Synthetic epitope
GGAKSAEESE

SEQ ID NO: 9705 - protein, 10 aa, Artificial Sequence
  Description of Artificial Sequence: Synthetic epitope
GGANIEAIIA

SEQ ID NO: 9706 - protein, 10 aa, Artificial Sequence
  Description of Artificial Sequence: Synthetic epitope
GGAQSQHQNV

SEQ ID NO: 9707 - protein, 10 aa, Artificial Sequence
  Description of Artificial Sequence: Synthetic epitope
GGASPLTSAQ

SEQ ID NO: 9708 - protein, 10 aa, Artificial Sequence
  Description of Artificial Sequence: Synthetic epitope
GGASSISREE

SEQ ID NO: 9709 - protein, 10 aa, Artificial Sequence
  Description of Artificial Sequence: Synthetic epitope
GGATLLQAEE

SEQ ID NO: 9710 - protein, 10 aa, Artificial Sequence
  Description of Artificial Sequence: Synthetic epitope
GGDETAERTE

SEQ ID NO: 9711 - protein, 10 aa, Artificial Sequence
  Description of Artificial Sequence: Synthetic epitope
GGDGAAQAAR

SEQ ID NO: 9712 - protein, 10 aa, Artificial Sequence
  Description of Artificial Sequence: Synthetic epitope
GGDLNLKKSW

SEQ ID NO: 9713 - protein, 10 aa, Artificial Sequence
  Description of Artificial Sequence: Synthetic epitope
GGDQKMEDWQ

SEQ ID NO: 9714 - protein, 10 aa, Artificial Sequence
  Description of Artificial Sequence: Synthetic epitope
GGEDASEGGA

SEQ ID NO: 9715 - protein, 10 aa, Artificial Sequence
  Description of Artificial Sequence: Synthetic epitope
GGELASKRNV

SEQ ID NO: 9716 - protein, 10 aa, Artificial Sequence
  Description of Artificial Sequence: Synthetic epitope
GGEQSANEFR

SEQ ID NO: 9717 - protein, 10 aa, Artificial Sequence
  Description of Artificial Sequence: Synthetic epitope
GGESDASPEA

SEQ ID NO: 9718 - protein, 10 aa, Artificial Sequence
  Description of Artificial Sequence: Synthetic epitope
GGESRSSGAA

SEQ ID NO: 9719 - protein, 10 aa, Artificial Sequence
  Description of Artificial Sequence: Synthetic epitope
GGEVAESAQK

SEQ ID NO: 9720 - protein, 10 aa, Artificial Sequence
  Description of Artificial Sequence: Synthetic epitope
GGIAEEPSTS

SEQ ID NO: 9721 - protein, 10 aa, Artificial Sequence
  Description of Artificial Sequence: Synthetic epitope
GGISVLNAET

SEQ ID NO: 9722 - protein, 10 aa, Artificial Sequence
  Description of Artificial Sequence: Synthetic epitope
GGITVVSTKS

SEQ ID NO: 9723 - protein, 10 aa, Artificial Sequence
  Description of Artificial Sequence: Synthetic epitope
GGKARVFREG

SEQ ID NO: 9724 - protein, 10 aa, Artificial Sequence
  Description of Artificial Sequence: Synthetic epitope
GGKKSALKKE

SEQ ID NO: 9725 - protein, 10 aa, Artificial Sequence
  Description of Artificial Sequence: Synthetic epitope
GGKKSKAAKP

SEQ ID NO: 9726 - protein, 10 aa, Artificial Sequence
  Description of Artificial Sequence: Synthetic epitope
GGKMKVNGAP

SEQ ID NO: 9727 - protein, 10 aa, Artificial Sequence
  Description of Artificial Sequence: Synthetic epitope
GGKQSKQEIH

SEQ ID NO: 9728 - protein, 10 aa, Artificial Sequence
  Description of Artificial Sequence: Synthetic epitope
GGKTERARKA

SEQ ID NO: 9729 - protein, 10 aa, Artificial Sequence
  Description of Artificial Sequence: Synthetic epitope
GGLAMLAATF

SEQ ID NO: 9730 - protein, 10 aa, Artificial Sequence
  Description of Artificial Sequence: Synthetic epitope
GGLGLAEREA

SEQ ID NO: 9731 - protein, 10 aa, Artificial Sequence
  Description of Artificial Sequence: Synthetic epitope
GGLGTSRSSA

SEQ ID NO: 9732 - protein, 10 aa, Artificial Sequence
  Description of Artificial Sequence: Synthetic epitope
GGLLSSKAKR

SEQ ID NO: 9733 - protein, 10 aa, Artificial Sequence
  Description of Artificial Sequence: Synthetic epitope
GGLRMNKGAI

SEQ ID NO: 9734 - protein, 10 aa, Artificial Sequence
  Description of Artificial Sequence: Synthetic epitope
GGLSAQAFVR

SEQ ID NO: 9735 - protein, 10 aa, Artificial Sequence
  Description of Artificial Sequence: Synthetic epitope
GGLSRSSTVA

SEQ ID NO: 9736 - protein, 10 aa, Artificial Sequence
  Description of Artificial Sequence: Synthetic epitope
GGLSVVLADR

SEQ ID NO: 9737 - protein, 10 aa, Artificial Sequence
  Description of Artificial Sequence: Synthetic epitope
GGLTQQVEKK

SEQ ID NO: 9738 - protein, 10 aa, Artificial Sequence
  Description of Artificial Sequence: Synthetic epitope
GGLVRAVGLR

SEQ ID NO: 9739 - protein, 10 aa, Artificial Sequence
  Description of Artificial Sequence: Synthetic epitope
GGNATTQTTS

SEQ ID NO: 9740 - protein, 10 aa, Artificial Sequence
  Description of Artificial Sequence: Synthetic epitope
GGNQAASQLE

SEQ ID NO: 9741 - protein, 10 aa, Artificial Sequence
  Description of Artificial Sequence: Synthetic epitope
GGNTESSESS

SEQ ID NO: 9742 - protein, 10 aa, Artificial Sequence
  Description of Artificial Sequence: Synthetic epitope
GGNTVESTGD

SEQ ID NO: 9743 - protein, 10 aa, Artificial Sequence
  Description of Artificial Sequence: Synthetic epitope
GGQADSVGLQ

SEQ ID NO: 9744 - protein, 10 aa, Artificial Sequence
  Description of Artificial Sequence: Synthetic epitope
GGQDQSKEPP

SEQ ID NO: 9745 - protein, 10 aa, Artificial Sequence
  Description of Artificial Sequence: Synthetic epitope
GGQFESLTFD

SEQ ID NO: 9746 - protein, 10 aa, Artificial Sequence
  Description of Artificial Sequence: Synthetic epitope
GGQSKPSNAS

SEQ ID NO: 9747 - protein, 10 aa, Artificial Sequence
  Description of Artificial Sequence: Synthetic epitope
GGQSMTERQA

SEQ ID NO: 9748 - protein, 10 aa, Artificial Sequence
  Description of Artificial Sequence: Synthetic epitope
GGQSQKAVQP

SEQ ID NO: 9749 - protein, 10 aa, Artificial Sequence
  Description of Artificial Sequence: Synthetic epitope
GGRVTQESAK

SEQ ID NO: 9750 - protein, 10 aa, Artificial Sequence
  Description of Artificial Sequence: Synthetic epitope
GGSAAQKQKI

SEQ ID NO: 9751 - protein, 10 aa, Artificial Sequence
  Description of Artificial Sequence: Synthetic epitope
GGSESEFESE

SEQ ID NO: 9752 - protein, 10 aa, Artificial Sequence
  Description of Artificial Sequence: Synthetic epitope
GGSFRTASNK

SEQ ID NO: 9753 - protein, 10 aa, Artificial Sequence
  Description of Artificial Sequence: Synthetic epitope
GGSHKSKKMK

SEQ ID NO: 9754 - protein, 10 aa, Artificial Sequence
  Description of Artificial Sequence: Synthetic epitope
GGSKARVQAR

SEQ ID NO: 9755 - protein, 10 aa, Artificial Sequence
  Description of Artificial Sequence: Synthetic epitope
GGSKSLLPDF

SEQ ID NO: 9756 - protein, 10 aa, Artificial Sequence
  Description of Artificial Sequence: Synthetic epitope
GGSSGTSNSG

SEQ ID NO: 9757 - protein, 10 aa, Artificial Sequence
  Description of Artificial Sequence: Synthetic epitope
GGSVVSSQST

SEQ ID NO: 9758 - protein, 10 aa, Artificial Sequence
  Description of Artificial Sequence: Synthetic epitope
GGTMSTSAST

SEQ ID NO: 9759 - protein, 10 aa, Artificial Sequence
  Description of Artificial Sequence: Synthetic epitope
GGTNQVTKAR

SEQ ID NO: 9760 - protein, 10 aa, Artificial Sequence
  Description of Artificial Sequence: Synthetic epitope
GGTSAASKPK

SEQ ID NO: 9761 - protein, 10 aa, Artificial Sequence
  Description of Artificial Sequence: Synthetic epitope
GGTSEQSSVG

SEQ ID NO: 9762 - protein, 10 aa, Artificial Sequence
  Description of Artificial Sequence: Synthetic epitope
GGTSSESIPQ

SEQ ID NO: 9763 - protein, 10 aa, Artificial Sequence
  Description of Artificial Sequence: Synthetic epitope
GGTTRTETSE

SEQ ID NO: 9764 - protein, 10 aa, Artificial Sequence
  Description of Artificial Sequence: Synthetic epitope
GGTVVAASDS

SEQ ID NO: 9765 - protein, 10 aa, Artificial Sequence
  Description of Artificial Sequence: Synthetic epitope
GGVNSNQFEE

SEQ ID NO: 9766 - protein, 10 aa, Artificial Sequence
  Description of Artificial Sequence: Synthetic epitope
GGVTTNRRED

SEQ ID NO: 9767 - protein, 10 aa, Artificial Sequence
  Description of Artificial Sequence: Synthetic epitope
GGWDATLTGE

SEQ ID NO: 9768 - protein, 10 aa, Artificial Sequence
  Description of Artificial Sequence: Synthetic epitope
GHASSGAAPA

SEQ ID NO: 9769 - protein, 10 aa, Artificial Sequence
  Description of Artificial Sequence: Synthetic epitope
GHGHTQINSQ

SEQ ID NO: 9770 - protein, 10 aa, Artificial Sequence
  Description of Artificial Sequence: Synthetic epitope
GHGSAKLARQ

SEQ ID NO: 9771 - protein, 10 aa, Artificial Sequence
  Description of Artificial Sequence: Synthetic epitope
GHGTIRQAKA

SEQ ID NO: 9772 - protein, 10 aa, Artificial Sequence
  Description of Artificial Sequence: Synthetic epitope
GHIEAIFLKW

SEQ ID NO: 9773 - protein, 10 aa, Artificial Sequence
  Description of Artificial Sequence: Synthetic epitope
GHINDSQAAP

SEQ ID NO: 9774 - protein, 10 aa, Artificial Sequence
  Description of Artificial Sequence: Synthetic epitope
GHIQDSTEDH

SEQ ID NO: 9775 - protein, 10 aa, Artificial Sequence
  Description of Artificial Sequence: Synthetic epitope
GHKHALTDHL

SEQ ID NO: 9776 - protein, 10 aa, Artificial Sequence
  Description of Artificial Sequence: Synthetic epitope
GHKTGKDAHA

SEQ ID NO: 9777 - protein, 10 aa, Artificial Sequence
  Description of Artificial Sequence: Synthetic epitope
GHPQYEVVEI

SEQ ID NO: 9778 - protein, 10 aa, Artificial Sequence
  Description of Artificial Sequence: Synthetic epitope
GHRSNLAEHA

SEQ ID NO: 9779 - protein, 10 aa, Artificial Sequence
  Description of Artificial Sequence: Synthetic epitope
GHRSTSTTPG

SEQ ID NO: 9780 - protein, 10 aa, Artificial Sequence
  Description of Artificial Sequence: Synthetic epitope
GHSEVSTAIA

SEQ ID NO: 9781 - protein, 10 aa, Artificial Sequence
  Description of Artificial Sequence: Synthetic epitope
GHSFSSATEI

SEQ ID NO: 9782 - protein, 10 aa, Artificial Sequence
  Description of Artificial Sequence: Synthetic epitope
GHSHSMHQNK

SEQ ID NO: 9783 - protein, 10 aa, Artificial Sequence
  Description of Artificial Sequence: Synthetic epitope
GHSQSALASA

SEQ ID NO: 9784 - protein, 10 aa, Artificial Sequence
  Description of Artificial Sequence: Synthetic epitope
GHSQTQAKAR

SEQ ID NO: 9785 - protein, 10 aa, Artificial Sequence
  Description of Artificial Sequence: Synthetic epitope
GHTAAEASYA

SEQ ID NO: 9786 - protein, 10 aa, Artificial Sequence
  Description of Artificial Sequence: Synthetic epitope
GHTNEMKHTT

SEQ ID NO: 9787 - protein, 10 aa, Artificial Sequence
  Description of Artificial Sequence: Synthetic epitope
GHTRSSTEQI

SEQ ID NO: 9788 - protein, 10 aa, Artificial Sequence
  Description of Artificial Sequence: Synthetic epitope
GHVDKAIESR

SEQ ID NO: 9789 - protein, 10 aa, Artificial Sequence
  Description of Artificial Sequence: Synthetic epitope
GHVEQKRLSN

SEQ ID NO: 9790 - protein, 10 aa, Artificial Sequence
  Description of Artificial Sequence: Synthetic epitope
GIAIREASSG

SEQ ID NO: 9791 - protein, 10 aa, Artificial Sequence
  Description of Artificial Sequence: Synthetic epitope
GIDAVLIATW

SEQ ID NO: 9792 - protein, 10 aa, Artificial Sequence
  Description of Artificial Sequence: Synthetic epitope
GIDKEVNDSK

SEQ ID NO: 9793 - protein, 10 aa, Artificial Sequence
  Description of Artificial Sequence: Synthetic epitope
GIDMIEFPKK

SEQ ID NO: 9794 - protein, 10 aa, Artificial Sequence
  Description of Artificial Sequence: Synthetic epitope
GIEKDAVTQE

SEQ ID NO: 9795 - protein, 10 aa, Artificial Sequence
  Description of Artificial Sequence: Synthetic epitope
GIEKQLQEHE

SEQ ID NO: 9796 - protein, 10 aa, Artificial Sequence
  Description of Artificial Sequence: Synthetic epitope
GIEMASSFSK

SEQ ID NO: 9797 - protein, 10 aa, Artificial Sequence
  Description of Artificial Sequence: Synthetic epitope
GIGVAASSVP

SEQ ID NO: 9798 - protein, 10 aa, Artificial Sequence
  Description of Artificial Sequence: Synthetic epitope
GIIEAEGTVG

SEQ ID NO: 9799 - protein, 10 aa, Artificial Sequence
  Description of Artificial Sequence: Synthetic epitope
GIIKASLREK

SEQ ID NO: 9800 - protein, 10 aa, Artificial Sequence
  Description of Artificial Sequence: Synthetic epitope
GIISTVEVLK

SEQ ID NO: 9801 - protein, 10 aa, Artificial Sequence
  Description of Artificial Sequence: Synthetic epitope
GIKETRKYKK

SEQ ID NO: 9802 - protein, 10 aa, Artificial Sequence
  Description of Artificial Sequence: Synthetic epitope
GIKGEAIDTA

SEQ ID NO: 9803 - protein, 10 aa, Artificial Sequence
  Description of Artificial Sequence: Synthetic epitope
GIKGTSISSE

SEQ ID NO: 9804 - protein, 10 aa, Artificial Sequence
  Description of Artificial Sequence: Synthetic epitope
GIKVGKAKLL

SEQ ID NO: 9805 - protein, 10 aa, Artificial Sequence
  Description of Artificial Sequence: Synthetic epitope
GIMRDIAHLE

SEQ ID NO: 9806 - protein, 10 aa, Artificial Sequence
  Description of Artificial Sequence: Synthetic epitope
GIMRNETETA

SEQ ID NO: 9807 - protein, 10 aa, Artificial Sequence
  Description of Artificial Sequence: Synthetic epitope
GIPDEASRER

SEQ ID NO: 9808 - protein, 10 aa, Artificial Sequence
  Description of Artificial Sequence: Synthetic epitope
GIPVSSMSKL

SEQ ID NO: 9809 - protein, 10 aa, Artificial Sequence
  Description of Artificial Sequence: Synthetic epitope
GIQKGNQPEG

SEQ ID NO: 9810 - protein, 10 aa, Artificial Sequence
  Description of Artificial Sequence: Synthetic epitope
GIQQAKVQIL

SEQ ID NO: 9811 - protein, 10 aa, Artificial Sequence
  Description of Artificial Sequence: Synthetic epitope
GIREAKAKQE

SEQ ID NO: 9812 - protein, 10 aa, Artificial Sequence
  Description of Artificial Sequence: Synthetic epitope
GIRVTKVDWQ

SEQ ID NO: 9813 - protein, 10 aa, Artificial Sequence
  Description of Artificial Sequence: Synthetic epitope
GISESIASQI

SEQ ID NO: 9814 - protein, 10 aa, Artificial Sequence
  Description of Artificial Sequence: Synthetic epitope
GISLAQQESV

SEQ ID NO: 9815 - protein, 10 aa, Artificial Sequence
  Description of Artificial Sequence: Synthetic epitope
GISLLAQNTS

SEQ ID NO: 9816 - protein, 10 aa, Artificial Sequence
  Description of Artificial Sequence: Synthetic epitope
GISLNEAQEV

SEQ ID NO: 9817 - protein, 10 aa, Artificial Sequence
  Description of Artificial Sequence: Synthetic epitope
GISQTNLITT

SEQ ID NO: 9818 - protein, 10 aa, Artificial Sequence
  Description of Artificial Sequence: Synthetic epitope
GISSQEKMQS

SEQ ID NO: 9819 - protein, 10 aa, Artificial Sequence
  Description of Artificial Sequence: Synthetic epitope
GITALTSKHE

SEQ ID NO: 9820 - protein, 10 aa, Artificial Sequence
  Description of Artificial Sequence: Synthetic epitope
GITLKELTVR

SEQ ID NO: 9821 - protein, 10 aa, Artificial Sequence
  Description of Artificial Sequence: Synthetic epitope
GITMKAKLAR

SEQ ID NO: 9822 - protein, 10 aa, Artificial Sequence
  Description of Artificial Sequence: Synthetic epitope
GIVGANLKRS

SEQ ID NO: 9823 - protein, 10 aa, Artificial Sequence
  Description of Artificial Sequence: Synthetic epitope
GIVKREMHGH

SEQ ID NO: 9824 - protein, 10 aa, Artificial Sequence
  Description of Artificial Sequence: Synthetic epitope
GIVNVSERHS

SEQ ID NO: 9825 - protein, 10 aa, Artificial Sequence
  Description of Artificial Sequence: Synthetic epitope
GIYLQVKSLT

SEQ ID NO: 9826 - protein, 10 aa, Artificial Sequence
  Description of Artificial Sequence: Synthetic epitope
GKAEASATDA

SEQ ID NO: 9827 - protein, 10 aa, Artificial Sequence
  Description of Artificial Sequence: Synthetic epitope
GKAGAPSSER

SEQ ID NO: 9828 - protein, 10 aa, Artificial Sequence
  Description of Artificial Sequence: Synthetic epitope
GKAGNVKKAE

SEQ ID NO: 9829 - protein, 10 aa, Artificial Sequence
  Description of Artificial Sequence: Synthetic epitope
GKAKEKEDSK

SEQ ID NO: 9830 - protein, 10 aa, Artificial Sequence
  Description of Artificial Sequence: Synthetic epitope
GKALRVVKFP

SEQ ID NO: 9831 - protein, 10 aa, Artificial Sequence
  Description of Artificial Sequence: Synthetic epitope
GKARKEAVQT

SEQ ID NO: 9832 - protein, 10 aa, Artificial Sequence
  Description of Artificial Sequence: Synthetic epitope
GKATSHTQAV

SEQ ID NO: 9833 - protein, 10 aa, Artificial Sequence
  Description of Artificial Sequence: Synthetic epitope
GKAVAKEVPP

SEQ ID NO: 9834 - protein, 10 aa, Artificial Sequence
  Description of Artificial Sequence: Synthetic epitope
GKDESTSRNR

SEQ ID NO: 9835 - protein, 10 aa, Artificial Sequence
  Description of Artificial Sequence: Synthetic epitope
GKDGALVQPK

SEQ ID NO: 9836 - protein, 10 aa, Artificial Sequence
  Description of Artificial Sequence: Synthetic epitope
GKDGGAQHAQ

SEQ ID NO: 9837 - protein, 10 aa, Artificial Sequence
  Description of Artificial Sequence: Synthetic epitope
GKDSAARSLN

SEQ ID NO: 9838 - protein, 10 aa, Artificial Sequence
  Description of Artificial Sequence: Synthetic epitope
GKDSQSQLPP

SEQ ID NO: 9839 - protein, 10 aa, Artificial Sequence
  Description of Artificial Sequence: Synthetic epitope
GKDTTSPMEL

SEQ ID NO: 9840 - protein, 10 aa, Artificial Sequence
  Description of Artificial Sequence: Synthetic epitope
GKEAAQEAVK

SEQ ID NO: 9841 - protein, 10 aa, Artificial Sequence
  Description of Artificial Sequence: Synthetic epitope
GKEAKRSSDT

SEQ ID NO: 9842 - protein, 10 aa, Artificial Sequence
  Description of Artificial Sequence: Synthetic epitope
GKEDEENQED

SEQ ID NO: 9843 - protein, 10 aa, Artificial Sequence
  Description of Artificial Sequence: Synthetic epitope
GKEGLSKVKS

SEQ ID NO: 9844 - protein, 10 aa, Artificial Sequence
  Description of Artificial Sequence: Synthetic epitope
GKEIMTAAPQ

SEQ ID NO: 9845 - protein, 10 aa, Artificial Sequence
  Description of Artificial Sequence: Synthetic epitope
GKELRDEEQT

SEQ ID NO: 9846 - protein, 10 aa, Artificial Sequence
  Description of Artificial Sequence: Synthetic epitope
GKEQRMKDEK

SEQ ID NO: 9847 - protein, 10 aa, Artificial Sequence
  Description of Artificial Sequence: Synthetic epitope
GKETEVSSNQ

SEQ ID NO: 9848 - protein, 10 aa, Artificial Sequence
  Description of Artificial Sequence: Synthetic epitope
GKFGRLKDDR

SEQ ID NO: 9849 - protein, 10 aa, Artificial Sequence
  Description of Artificial Sequence: Synthetic epitope
GKFLKAQEAL

SEQ ID NO: 9850 - protein, 10 aa, Artificial Sequence
  Description of Artificial Sequence: Synthetic epitope
GKFNEVSSQQ

SEQ ID NO: 9851 - protein, 10 aa, Artificial Sequence
  Description of Artificial Sequence: Synthetic epitope
GKFQMQVLPQ

SEQ ID NO: 9852 - protein, 10 aa, Artificial Sequence
  Description of Artificial Sequence: Synthetic epitope
GKFSKSATSP

SEQ ID NO: 9853 - protein, 10 aa, Artificial Sequence
  Description of Artificial Sequence: Synthetic epitope
GKFTSRRMVS

SEQ ID NO: 9854 - protein, 10 aa, Artificial Sequence
  Description of Artificial Sequence: Synthetic epitope
GKGELPMKEK

SEQ ID NO: 9855 - protein, 10 aa, Artificial Sequence
  Description of Artificial Sequence: Synthetic epitope
GKGKSESELP

SEQ ID NO: 9856 - protein, 10 aa, Artificial Sequence
  Description of Artificial Sequence: Synthetic epitope
GKGSVEVAEM

SEQ ID NO: 9857 - protein, 10 aa, Artificial Sequence
  Description of Artificial Sequence: Synthetic epitope
GKHKDRRKGS

SEQ ID NO: 9858 - protein, 10 aa, Artificial Sequence
  Description of Artificial Sequence: Synthetic epitope
GKIQKALGEY

SEQ ID NO: 9859 - protein, 10 aa, Artificial Sequence
  Description of Artificial Sequence: Synthetic epitope
GKIVPVEITI

SEQ ID NO: 9860 - protein, 10 aa, Artificial Sequence
  Description of Artificial Sequence: Synthetic epitope
GKKAKEVTTK

SEQ ID NO: 9861 - protein, 10 aa, Artificial Sequence
  Description of Artificial Sequence: Synthetic epitope
GKKGAAIPAK

SEQ ID NO: 9862 - protein, 10 aa, Artificial Sequence
  Description of Artificial Sequence: Synthetic epitope
GKKGASATKH

SEQ ID NO: 9863 - protein, 10 aa, Artificial Sequence
  Description of Artificial Sequence: Synthetic epitope
GKKRKAQREE

SEQ ID NO: 9864 - protein, 10 aa, Artificial Sequence
  Description of Artificial Sequence: Synthetic epitope
GKKTGLASSY

SEQ ID NO: 9865 - protein, 10 aa, Artificial Sequence
  Description of Artificial Sequence: Synthetic epitope
GKKVAVADVQ

SEQ ID NO: 9866 - protein, 10 aa, Artificial Sequence
  Description of Artificial Sequence: Synthetic epitope
GKKVEQTIQY

SEQ ID NO: 9867 - protein, 10 aa, Artificial Sequence
  Description of Artificial Sequence: Synthetic epitope
GKKVIKEVKI

SEQ ID NO: 9868 - protein, 10 aa, Artificial Sequence
  Description of Artificial Sequence: Synthetic epitope
GKLAAIQSER

SEQ ID NO: 9869 - protein, 10 aa, Artificial Sequence
  Description of Artificial Sequence: Synthetic epitope
GKLASMSPIG

SEQ ID NO: 9870 - protein, 10 aa, Artificial Sequence
  Description of Artificial Sequence: Synthetic epitope
GKLATNQIMK

SEQ ID NO: 9871 - protein, 10 aa, Artificial Sequence
  Description of Artificial Sequence: Synthetic epitope
GKLELAQELR

SEQ ID NO: 9872 - protein, 10 aa, Artificial Sequence
  Description of Artificial Sequence: Synthetic epitope
GKLITSHAIN

SEQ ID NO: 9873 - protein, 10 aa, Artificial Sequence
  Description of Artificial Sequence: Synthetic epitope
GKLQKAVSEE

SEQ ID NO: 9874 - protein, 10 aa, Artificial Sequence
  Description of Artificial Sequence: Synthetic epitope
GKLSTSQDAA

SEQ ID NO: 9875 - protein, 10 aa, Artificial Sequence
  Description of Artificial Sequence: Synthetic epitope
GKMKSSKSEG

SEQ ID NO: 9876 - protein, 10 aa, Artificial Sequence
  Description of Artificial Sequence: Synthetic epitope
GKMNYRLMML

SEQ ID NO: 9877 - protein, 10 aa, Artificial Sequence
  Description of Artificial Sequence: Synthetic epitope
GKMSVSKAQG

SEQ ID NO: 9878 - protein, 10 aa, Artificial Sequence
  Description of Artificial Sequence: Synthetic epitope
GKMTITEQKY

SEQ ID NO: 9879 - protein, 10 aa, Artificial Sequence
  Description of Artificial Sequence: Synthetic epitope
GKNANKNMNK

SEQ ID NO: 9880 - protein, 10 aa, Artificial Sequence
  Description of Artificial Sequence: Synthetic epitope
GKNNSSENKL

SEQ ID NO: 9881 - protein, 10 aa, Artificial Sequence
  Description of Artificial Sequence: Synthetic epitope
GKNQSMRGNG

SEQ ID NO: 9882 - protein, 10 aa, Artificial Sequence
  Description of Artificial Sequence: Synthetic epitope
GKNSEAQLED

SEQ ID NO: 9883 - protein, 10 aa, Artificial Sequence
  Description of Artificial Sequence: Synthetic epitope
GKNSKITEDF

SEQ ID NO: 9884 - protein, 10 aa, Artificial Sequence
  Description of Artificial Sequence: Synthetic epitope
GKNTKRREIK

SEQ ID NO: 9885 - protein, 10 aa, Artificial Sequence
  Description of Artificial Sequence: Synthetic epitope
GKNVESTNSN

SEQ ID NO: 9886 - protein, 10 aa, Artificial Sequence
  Description of Artificial Sequence: Synthetic epitope
GKNVIISSAA

SEQ ID NO: 9887 - protein, 10 aa, Artificial Sequence
  Description of Artificial Sequence: Synthetic epitope
GKPSSKKSRA

SEQ ID NO: 9888 - protein, 10 aa, Artificial Sequence
  Description of Artificial Sequence: Synthetic epitope
GKPTSLKTAQ

SEQ ID NO: 9889 - protein, 10 aa, Artificial Sequence
  Description of Artificial Sequence: Synthetic epitope
GKQAMPEKHE

SEQ ID NO: 9890 - protein, 10 aa, Artificial Sequence
  Description of Artificial Sequence: Synthetic epitope
GKQIAKVPGN

SEQ ID NO: 9891 - protein, 10 aa, Artificial Sequence
  Description of Artificial Sequence: Synthetic epitope
GKQISIRYLD

SEQ ID NO: 9892 - protein, 10 aa, Artificial Sequence
  Description of Artificial Sequence: Synthetic epitope
GKQPDMETDS

SEQ ID NO: 9893 - protein, 10 aa, Artificial Sequence
  Description of Artificial Sequence: Synthetic epitope
GKQRTENVLR

SEQ ID NO: 9894 - protein, 10 aa, Artificial Sequence
  Description of Artificial Sequence: Synthetic epitope
GKQSLSAEKV

SEQ ID NO: 9895 - protein, 10 aa, Artificial Sequence
  Description of Artificial Sequence: Synthetic epitope
GKQSTKRHEK

SEQ ID NO: 9896 - protein, 10 aa, Artificial Sequence
  Description of Artificial Sequence: Synthetic epitope
GKQVATDKVA

SEQ ID NO: 9897 - protein, 10 aa, Artificial Sequence
  Description of Artificial Sequence: Synthetic epitope
GKREKEVVLP

SEQ ID NO: 9898 - protein, 10 aa, Artificial Sequence
  Description of Artificial Sequence: Synthetic epitope
GKRFAVKPKR

SEQ ID NO: 9899 - protein, 10 aa, Artificial Sequence
  Description of Artificial Sequence: Synthetic epitope
GKRKASTAKK

SEQ ID NO: 9900 - protein, 10 aa, Artificial Sequence
  Description of Artificial Sequence: Synthetic epitope
GKRKGRKTVE

SEQ ID NO: 9901 - protein, 10 aa, Artificial Sequence
  Description of Artificial Sequence: Synthetic epitope
GKRRSQKEED

SEQ ID NO: 9902 - protein, 10 aa, Artificial Sequence
  Description of Artificial Sequence: Synthetic epitope
GKRSAVVMGR

SEQ ID NO: 9903 - protein, 10 aa, Artificial Sequence
  Description of Artificial Sequence: Synthetic epitope
GKRSSAFVFE

SEQ ID NO: 9904 - protein, 10 aa, Artificial Sequence
  Description of Artificial Sequence: Synthetic epitope
GKSAYASGTT

SEQ ID NO: 9905 - protein, 10 aa, Artificial Sequence
  Description of Artificial Sequence: Synthetic epitope
GKSDILIEDE

SEQ ID NO: 9906 - protein, 10 aa, Artificial Sequence
  Description of Artificial Sequence: Synthetic epitope
GKSEEVTGKQ

SEQ ID NO: 9907 - protein, 10 aa, Artificial Sequence
  Description of Artificial Sequence: Synthetic epitope
GKSENRTNKF

SEQ ID NO: 9908 - protein, 10 aa, Artificial Sequence
  Description of Artificial Sequence: Synthetic epitope
GKSIVSLELT

SEQ ID NO: 9909 - protein, 10 aa, Artificial Sequence
  Description of Artificial Sequence: Synthetic epitope
GKSLVALGPD

SEQ ID NO: 9910 - protein, 10 aa, Artificial Sequence
  Description of Artificial Sequence: Synthetic epitope
GKSRLVLLSE

SEQ ID NO: 9911 - protein, 10 aa, Artificial Sequence
  Description of Artificial Sequence: Synthetic epitope
GKSSKKSTAL

SEQ ID NO: 9912 - protein, 10 aa, Artificial Sequence
  Description of Artificial Sequence: Synthetic epitope
GKSSRSRMSD

SEQ ID NO: 9913 - protein, 10 aa, Artificial Sequence
  Description of Artificial Sequence: Synthetic epitope
GKSSVTALDE

SEQ ID NO: 9914 - protein, 10 aa, Artificial Sequence
  Description of Artificial Sequence: Synthetic epitope
GKSTVTRKSD

SEQ ID NO: 9915 - protein, 10 aa, Artificial Sequence
  Description of Artificial Sequence: Synthetic epitope
GKSVADLITE

SEQ ID NO: 9916 - protein, 10 aa, Artificial Sequence
  Description of Artificial Sequence: Synthetic epitope
GKSVQKKQAE

SEQ ID NO: 9917 - protein, 10 aa, Artificial Sequence
  Description of Artificial Sequence: Synthetic epitope
GKSVQKKTMV

SEQ ID NO: 9918 - protein, 10 aa, Artificial Sequence
  Description of Artificial Sequence: Synthetic epitope
GKTEASETRK

SEQ ID NO: 9919 - protein, 10 aa, Artificial Sequence
  Description of Artificial Sequence: Synthetic epitope
GKTLKWRKTQ

SEQ ID NO: 9920 - protein, 10 aa, Artificial Sequence
  Description of Artificial Sequence: Synthetic epitope
GKTLVTRTQG

SEQ ID NO: 9921 - protein, 10 aa, Artificial Sequence
  Description of Artificial Sequence: Synthetic epitope
GKTQGSETAG

SEQ ID NO: 9922 - protein, 10 aa, Artificial Sequence
  Description of Artificial Sequence: Synthetic epitope
GKTSTNSSKN

SEQ ID NO: 9923 - protein, 10 aa, Artificial Sequence
  Description of Artificial Sequence: Synthetic epitope
GKTSTSFRRN

SEQ ID NO: 9924 - protein, 10 aa, Artificial Sequence
  Description of Artificial Sequence: Synthetic epitope
GKTVSRFRKA

SEQ ID NO: 9925 - protein, 10 aa, Artificial Sequence
  Description of Artificial Sequence: Synthetic epitope
GKTWSAFQNG

SEQ ID NO: 9926 - protein, 10 aa, Artificial Sequence
  Description of Artificial Sequence: Synthetic epitope
GKVAIQKEDL

SEQ ID NO: 9927 - protein, 10 aa, Artificial Sequence
  Description of Artificial Sequence: Synthetic epitope
GKVIVKVKTE

SEQ ID NO: 9928 - protein, 10 aa, Artificial Sequence
  Description of Artificial Sequence: Synthetic epitope
GKVKFTAEEL

SEQ ID NO: 9929 - protein, 10 aa, Artificial Sequence
  Description of Artificial Sequence: Synthetic epitope
GKVKVSAPNL

SEQ ID NO: 9930 - protein, 10 aa, Artificial Sequence
  Description of Artificial Sequence: Synthetic epitope
GKVSSFEEKM

SEQ ID NO: 9931 - protein, 10 aa, Artificial Sequence
  Description of Artificial Sequence: Synthetic epitope
GKVSSPVASG

SEQ ID NO: 9932 - protein, 10 aa, Artificial Sequence
  Description of Artificial Sequence: Synthetic epitope
GKVTATTFSL

SEQ ID NO: 9933 - protein, 10 aa, Artificial Sequence
  Description of Artificial Sequence: Synthetic epitope
GKVTSASFGE

SEQ ID NO: 9934 - protein, 10 aa, Artificial Sequence
  Description of Artificial Sequence: Synthetic epitope
GKWTSLNFNR

SEQ ID NO: 9935 - protein, 10 aa, Artificial Sequence
  Description of Artificial Sequence: Synthetic epitope
GKYIASTQRP

SEQ ID NO: 9936 - protein, 10 aa, Artificial Sequence
  Description of Artificial Sequence: Synthetic epitope
GLASRAEAGA

SEQ ID NO: 9937 - protein, 10 aa, Artificial Sequence
  Description of Artificial Sequence: Synthetic epitope
GLAVQAVTQH

SEQ ID NO: 9938 - protein, 10 aa, Artificial Sequence
  Description of Artificial Sequence: Synthetic epitope
GLDEKVSEPL

SEQ ID NO: 9939 - protein, 10 aa, Artificial Sequence
  Description of Artificial Sequence: Synthetic epitope
GLEAMALKST

SEQ ID NO: 9940 - protein, 10 aa, Artificial Sequence
  Description of Artificial Sequence: Synthetic epitope
GLELRTQDLE

SEQ ID NO: 9941 - protein, 10 aa, Artificial Sequence
  Description of Artificial Sequence: Synthetic epitope
GLEQATTDLR

SEQ ID NO: 9942 - protein, 10 aa, Artificial Sequence
  Description of Artificial Sequence: Synthetic epitope
GLETSTETEA

SEQ ID NO: 9943 - protein, 10 aa, Artificial Sequence
  Description of Artificial Sequence: Synthetic epitope
GLFRVNQPDR

SEQ ID NO: 9944 - protein, 10 aa, Artificial Sequence
  Description of Artificial Sequence: Synthetic epitope
GLGNEHAVKQ

SEQ ID NO: 9945 - protein, 10 aa, Artificial Sequence
  Description of Artificial Sequence: Synthetic epitope
GLGSHRTQVP

SEQ ID NO: 9946 - protein, 10 aa, Artificial Sequence
  Description of Artificial Sequence: Synthetic epitope
GLGYANHGLQ

SEQ ID NO: 9947 - protein, 10 aa, Artificial Sequence
  Description of Artificial Sequence: Synthetic epitope
GLITINSSQE

SEQ ID NO: 9948 - protein, 10 aa, Artificial Sequence
  Description of Artificial Sequence: Synthetic epitope
GLKALAEDQI

SEQ ID NO: 9949 - protein, 10 aa, Artificial Sequence
  Description of Artificial Sequence: Synthetic epitope
GLKASAALGE

SEQ ID NO: 9950 - protein, 10 aa, Artificial Sequence
  Description of Artificial Sequence: Synthetic epitope
GLKATASAFG

SEQ ID NO: 9951 - protein, 10 aa, Artificial Sequence
  Description of Artificial Sequence: Synthetic epitope
GLKDETVGRL

SEQ ID NO: 9952 - protein, 10 aa, Artificial Sequence
  Description of Artificial Sequence: Synthetic epitope
GLKKTKGITV

SEQ ID NO: 9953 - protein, 10 aa, Artificial Sequence
  Description of Artificial Sequence: Synthetic epitope
GLKNKKGAKQ

SEQ ID NO: 9954 - protein, 10 aa, Artificial Sequence
  Description of Artificial Sequence: Synthetic epitope
GLKSLELEVE

SEQ ID NO: 9955 - protein, 10 aa, Artificial Sequence
  Description of Artificial Sequence: Synthetic epitope
GLKSSLLKDT

SEQ ID NO: 9956 - protein, 10 aa, Artificial Sequence
  Description of Artificial Sequence: Synthetic epitope
GLLHKKTQQE

SEQ ID NO: 9957 - protein, 10 aa, Artificial Sequence
  Description of Artificial Sequence: Synthetic epitope
GLLQKEKVAV

SEQ ID NO: 9958 - protein, 10 aa, Artificial Sequence
  Description of Artificial Sequence: Synthetic epitope
GLLSQEAAQK

SEQ ID NO: 9959 - protein, 10 aa, Artificial Sequence
  Description of Artificial Sequence: Synthetic epitope
GLLSVLARGA

SEQ ID NO: 9960 - protein, 10 aa, Artificial Sequence
  Description of Artificial Sequence: Synthetic epitope
GLLTAEASAV

SEQ ID NO: 9961 - protein, 10 aa, Artificial Sequence
  Description of Artificial Sequence: Synthetic epitope
GLMRTSVGHQ

SEQ ID NO: 9962 - protein, 10 aa, Artificial Sequence
  Description of Artificial Sequence: Synthetic epitope
GLMSSVVAPA

SEQ ID NO: 9963 - protein, 10 aa, Artificial Sequence
  Description of Artificial Sequence: Synthetic epitope
GLNAESSKAT

SEQ ID NO: 9964 - protein, 10 aa, Artificial Sequence
  Description of Artificial Sequence: Synthetic epitope
GLNTEKYAET

SEQ ID NO: 9965 - protein, 10 aa, Artificial Sequence
  Description of Artificial Sequence: Synthetic epitope
GLPAEVVEPE

SEQ ID NO: 9966 - protein, 10 aa, Artificial Sequence
  Description of Artificial Sequence: Synthetic epitope
GLPQSQSAQA

SEQ ID NO: 9967 - protein, 10 aa, Artificial Sequence
  Description of Artificial Sequence: Synthetic epitope
GLQALSLRKE

SEQ ID NO: 9968 - protein, 10 aa, Artificial Sequence
  Description of Artificial Sequence: Synthetic epitope
GLQEQQMSRG

SEQ ID NO: 9969 - protein, 10 aa, Artificial Sequence
  Description of Artificial Sequence: Synthetic epitope
GLQERKETIR

SEQ ID NO: 9970 - protein, 10 aa, Artificial Sequence
  Description of Artificial Sequence: Synthetic epitope
GLQFEIIAMS

SEQ ID NO: 9971 - protein, 10 aa, Artificial Sequence
  Description of Artificial Sequence: Synthetic epitope
GLQKQASAAE

SEQ ID NO: 9972 - protein, 10 aa, Artificial Sequence
  Description of Artificial Sequence: Synthetic epitope
GLRLVRLRLD

SEQ ID NO: 9973 - protein, 10 aa, Artificial Sequence
  Description of Artificial Sequence: Synthetic epitope
GLRMHYKYFE

SEQ ID NO: 9974 - protein, 10 aa, Artificial Sequence
  Description of Artificial Sequence: Synthetic epitope
GLRTASKSKL

SEQ ID NO: 9975 - protein, 10 aa, Artificial Sequence
  Description of Artificial Sequence: Synthetic epitope
GLRVEELAAR

SEQ ID NO: 9976 - protein, 10 aa, Artificial Sequence
  Description of Artificial Sequence: Synthetic epitope
GLSANLVRKD

SEQ ID NO: 9977 - protein, 10 aa, Artificial Sequence
  Description of Artificial Sequence: Synthetic epitope
GLSARTTETS

SEQ ID NO: 9978 - protein, 10 aa, Artificial Sequence
  Description of Artificial Sequence: Synthetic epitope
GLSDSARDEV

SEQ ID NO: 9979 - protein, 10 aa, Artificial Sequence
  Description of Artificial Sequence: Synthetic epitope
GLSEMAAEAA

SEQ ID NO: 9980 - protein, 10 aa, Artificial Sequence
  Description of Artificial Sequence: Synthetic epitope
GLSEQAGVTP

SEQ ID NO: 9981 - protein, 10 aa, Artificial Sequence
  Description of Artificial Sequence: Synthetic epitope
GLSGRNLRAA

SEQ ID NO: 9982 - protein, 10 aa, Artificial Sequence
  Description of Artificial Sequence: Synthetic epitope
GLSIEQTMLK

SEQ ID NO: 9983 - protein, 10 aa, Artificial Sequence
  Description of Artificial Sequence: Synthetic epitope
GLSLRMVPPV

SEQ ID NO: 9984 - protein, 10 aa, Artificial Sequence
  Description of Artificial Sequence: Synthetic epitope
GLSLSLIKSE

SEQ ID NO: 9985 - protein, 10 aa, Artificial Sequence
  Description of Artificial Sequence: Synthetic epitope
GLSNALSQAS

SEQ ID NO: 9986 - protein, 10 aa, Artificial Sequence
  Description of Artificial Sequence: Synthetic epitope
GLSRQTAKSS

SEQ ID NO: 9987 - protein, 10 aa, Artificial Sequence
  Description of Artificial Sequence: Synthetic epitope
GLSSKKASSR

SEQ ID NO: 9988 - protein, 10 aa, Artificial Sequence
  Description of Artificial Sequence: Synthetic epitope
GLSSKTAQLK

SEQ ID NO: 9989 - protein, 10 aa, Artificial Sequence
  Description of Artificial Sequence: Synthetic epitope
GLSSLTVNST

SEQ ID NO: 9990 - protein, 10 aa, Artificial Sequence
  Description of Artificial Sequence: Synthetic epitope
GLSVSZSYAB

SEQ ID NO: 9991 - protein, 10 aa, Artificial Sequence
  Description of Artificial Sequence: Synthetic epitope
GLTEKSLSRD

SEQ ID NO: 9992 - protein, 10 aa, Artificial Sequence
  Description of Artificial Sequence: Synthetic epitope
GLTEKTVLVA

SEQ ID NO: 9993 - protein, 10 aa, Artificial Sequence
  Description of Artificial Sequence: Synthetic epitope
GLTEKTVLVA

SEQ ID NO: 9994 - protein, 10 aa, Artificial Sequence
  Description of Artificial Sequence: Synthetic epitope
GLTEQAMGTS

SEQ ID NO: 9995 - protein, 10 aa, Artificial Sequence
  Description of Artificial Sequence: Synthetic epitope
GLTRRMSKSP

SEQ ID NO: 9996 - protein, 10 aa, Artificial Sequence
  Description of Artificial Sequence: Synthetic epitope
GLTSELETSQ

SEQ ID NO: 9997 - protein, 10 aa, Artificial Sequence
  Description of Artificial Sequence: Synthetic epitope
GLVAPATAAY

SEQ ID NO: 9998 - protein, 10 aa, Artificial Sequence
  Description of Artificial Sequence: Synthetic epitope
GLWGTRLMEE

SEQ ID NO: 9999 - protein, 10 aa, Artificial Sequence
  Description of Artificial Sequence: Synthetic epitope
GMAISPSRMP

SEQ ID NO: 10000 - protein, 10 aa, Artificial Sequence
  Description of Artificial Sequence: Synthetic epitope
GMALNDTKQV

SEQ ID NO: 10001 - protein, 10 aa, Artificial Sequence
  Description of Artificial Sequence: Synthetic epitope
GMAQTLLYTY

SEQ ID NO: 10002 - protein, 10 aa, Artificial Sequence
  Description of Artificial Sequence: Synthetic epitope
GMDAISRRAI

SEQ ID NO: 10003 - protein, 10 aa, Artificial Sequence
  Description of Artificial Sequence: Synthetic epitope
GMDVELTVEE

SEQ ID NO: 10004 - protein, 10 aa, Artificial Sequence
  Description of Artificial Sequence: Synthetic epitope
GMEDTSLSSG

SEQ ID NO: 10005 - protein, 10 aa, Artificial Sequence
  Description of Artificial Sequence: Synthetic epitope
GMELIVSQVH

SEQ ID NO: 10006 - protein, 10 aa, Artificial Sequence
  Description of Artificial Sequence: Synthetic epitope
GMEQEERTAV

SEQ ID NO: 10007 - protein, 10 aa, Artificial Sequence
  Description of Artificial Sequence: Synthetic epitope
GMKIVIKPSS

SEQ ID NO: 10008 - protein, 10 aa, Artificial Sequence
  Description of Artificial Sequence: Synthetic epitope
GMKRTESRQH

SEQ ID NO: 10009 - protein, 10 aa, Artificial Sequence
  Description of Artificial Sequence: Synthetic epitope
GMKSDSDQKK

SEQ ID NO: 10010 - protein, 10 aa, Artificial Sequence
  Description of Artificial Sequence: Synthetic epitope
GMKTTVSEAE

SEQ ID NO: 10011 - protein, 10 aa, Artificial Sequence
  Description of Artificial Sequence: Synthetic epitope
GMLIKGKLTK

SEQ ID NO: 10012 - protein, 10 aa, Artificial Sequence
  Description of Artificial Sequence: Synthetic epitope
GMLQVSTDEL

SEQ ID NO: 10013 - protein, 10 aa, Artificial Sequence
  Description of Artificial Sequence: Synthetic epitope
GMMRKDWASQ

SEQ ID NO: 10014 - protein, 10 aa, Artificial Sequence
  Description of Artificial Sequence: Synthetic epitope
GMNITVLRSQ

SEQ ID NO: 10015 - protein, 10 aa, Artificial Sequence
  Description of Artificial Sequence: Synthetic epitope
GMNQSGLMAS

SEQ ID NO: 10016 - protein, 10 aa, Artificial Sequence
  Description of Artificial Sequence: Synthetic epitope
GMNSSKTKLE

SEQ ID NO: 10017 - protein, 10 aa, Artificial Sequence
  Description of Artificial Sequence: Synthetic epitope
GMRHAIYDKL

SEQ ID NO: 10018 - protein, 10 aa, Artificial Sequence
  Description of Artificial Sequence: Synthetic epitope
GMSSTARRSR

SEQ ID NO: 10019 - protein, 10 aa, Artificial Sequence
  Description of Artificial Sequence: Synthetic epitope
GMTKTMNVIQ

SEQ ID NO: 10020 - protein, 10 aa, Artificial Sequence
  Description of Artificial Sequence: Synthetic epitope
GMTLLKSSKT

SEQ ID NO: 10021 - protein, 10 aa, Artificial Sequence
  Description of Artificial Sequence: Synthetic epitope
GMTSAGSDIN

SEQ ID NO: 10022 - protein, 10 aa, Artificial Sequence
  Description of Artificial Sequence: Synthetic epitope
GMTYSKGKIY

SEQ ID NO: 10023 - protein, 10 aa, Artificial Sequence
  Description of Artificial Sequence: Synthetic epitope
GMVLVRSENG

SEQ ID NO: 10024 - protein, 10 aa, Artificial Sequence
  Description of Artificial Sequence: Synthetic epitope
GMYDVQSTTE

SEQ ID NO: 10025 - protein, 10 aa, Artificial Sequence
  Description of Artificial Sequence: Synthetic epitope
GMYNMSTGMT

SEQ ID NO: 10026 - protein, 10 aa, Artificial Sequence
  Description of Artificial Sequence: Synthetic epitope
GNASKILKME

SEQ ID NO: 10027 - protein, 10 aa, Artificial Sequence
  Description of Artificial Sequence: Synthetic epitope
GNDLSGSQLA

SEQ ID NO: 10028 - protein, 10 aa, Artificial Sequence
  Description of Artificial Sequence: Synthetic epitope
GNDMLMNTPR

SEQ ID NO: 10029 - protein, 10 aa, Artificial Sequence
  Description of Artificial Sequence: Synthetic epitope
GNDSSAELSE

SEQ ID NO: 10030 - protein, 10 aa, Artificial Sequence
  Description of Artificial Sequence: Synthetic epitope
GNDTSSRIMP

SEQ ID NO: 10031 - protein, 10 aa, Artificial Sequence
  Description of Artificial Sequence: Synthetic epitope
GNDVKSSVSS

SEQ ID NO: 10032 - protein, 10 aa, Artificial Sequence
  Description of Artificial Sequence: Synthetic epitope
GNEASTVQEE

SEQ ID NO: 10033 - protein, 10 aa, Artificial Sequence
  Description of Artificial Sequence: Synthetic epitope
GNEDIMITVI

SEQ ID NO: 10034 - protein, 10 aa, Artificial Sequence
  Description of Artificial Sequence: Synthetic epitope
GNEHNQTTEK

SEQ ID NO: 10035 - protein, 10 aa, Artificial Sequence
  Description of Artificial Sequence: Synthetic epitope
GNEIESGKII

SEQ ID NO: 10036 - protein, 10 aa, Artificial Sequence
  Description of Artificial Sequence: Synthetic epitope
GNEIISERTK

SEQ ID NO: 10037 - protein, 10 aa, Artificial Sequence
  Description of Artificial Sequence: Synthetic epitope
GNEISRLSRG

SEQ ID NO: 10038 - protein, 10 aa, Artificial Sequence
  Description of Artificial Sequence: Synthetic epitope
GNELKLNISQ

SEQ ID NO: 10039 - protein, 10 aa, Artificial Sequence
  Description of Artificial Sequence: Synthetic epitope
GNESSKLENE

SEQ ID NO: 10040 - protein, 10 aa, Artificial Sequence
  Description of Artificial Sequence: Synthetic epitope
GNFNERELTG

SEQ ID NO: 10041 - protein, 10 aa, Artificial Sequence
  Description of Artificial Sequence: Synthetic epitope
GNGTRKSPEM

SEQ ID NO: 10042 - protein, 10 aa, Artificial Sequence
  Description of Artificial Sequence: Synthetic epitope
GNIINATFFE

SEQ ID NO: 10043 - protein, 10 aa, Artificial Sequence
  Description of Artificial Sequence: Synthetic epitope
GNITSRLMEK

SEQ ID NO: 10044 - protein, 10 aa, Artificial Sequence
  Description of Artificial Sequence: Synthetic epitope
GNKEVMDTTK

SEQ ID NO: 10045 - protein, 10 aa, Artificial Sequence
  Description of Artificial Sequence: Synthetic epitope
GNKIVLHTEQ

SEQ ID NO: 10046 - protein, 10 aa, Artificial Sequence
  Description of Artificial Sequence: Synthetic epitope
GNKLLMSSPN

SEQ ID NO: 10047 - protein, 10 aa, Artificial Sequence
  Description of Artificial Sequence: Synthetic epitope
GNKTASSVIE

SEQ ID NO: 10048 - protein, 10 aa, Artificial Sequence
  Description of Artificial Sequence: Synthetic epitope
GNKTETRFNQ

SEQ ID NO: 10049 - protein, 10 aa, Artificial Sequence
  Description of Artificial Sequence: Synthetic epitope
GNLEQLLDSN

SEQ ID NO: 10050 - protein, 10 aa, Artificial Sequence
  Description of Artificial Sequence: Synthetic epitope
GNLKTTVEGL

SEQ ID NO: 10051 - protein, 10 aa, Artificial Sequence
  Description of Artificial Sequence: Synthetic epitope
GNMLYKSIKK

SEQ ID NO: 10052 - protein, 10 aa, Artificial Sequence
  Description of Artificial Sequence: Synthetic epitope
GNPLFSKALA

SEQ ID NO: 10053 - protein, 10 aa, Artificial Sequence
  Description of Artificial Sequence: Synthetic epitope
GNPMHVAVVI

SEQ ID NO: 10054 - protein, 10 aa, Artificial Sequence
  Description of Artificial Sequence: Synthetic epitope
GNQDTSSQLK

SEQ ID NO: 10055 - protein, 10 aa, Artificial Sequence
  Description of Artificial Sequence: Synthetic epitope
GNQVVSELGP

SEQ ID NO: 10056 - protein, 10 aa, Artificial Sequence
  Description of Artificial Sequence: Synthetic epitope
GNRAAVAVAV

SEQ ID NO: 10057 - protein, 10 aa, Artificial Sequence
  Description of Artificial Sequence: Synthetic epitope
GNRISSNNLE

SEQ ID NO: 10058 - protein, 10 aa, Artificial Sequence
  Description of Artificial Sequence: Synthetic epitope
GNRPSSAASA

SEQ ID NO: 10059 - protein, 10 aa, Artificial Sequence
  Description of Artificial Sequence: Synthetic epitope
GNRTATRVAS

SEQ ID NO: 10060 - protein, 10 aa, Artificial Sequence
  Description of Artificial Sequence: Synthetic epitope
GNSAERTDHS

SEQ ID NO: 10061 - protein, 10 aa, Artificial Sequence
  Description of Artificial Sequence: Synthetic epitope
GNSEKAAMSS

SEQ ID NO: 10062 - protein, 10 aa, Artificial Sequence
  Description of Artificial Sequence: Synthetic epitope
GNSGAAQART

SEQ ID NO: 10063 - protein, 10 aa, Artificial Sequence
  Description of Artificial Sequence: Synthetic epitope
GNSGSVEHPF

SEQ ID NO: 10064 - protein, 10 aa, Artificial Sequence
  Description of Artificial Sequence: Synthetic epitope
GNSHLSQNSH

SEQ ID NO: 10065 - protein, 10 aa, Artificial Sequence
  Description of Artificial Sequence: Synthetic epitope
GNSIMVMKMN

SEQ ID NO: 10066 - protein, 10 aa, Artificial Sequence
  Description of Artificial Sequence: Synthetic epitope
GNSLASKIMT

SEQ ID NO: 10067 - protein, 10 aa, Artificial Sequence
  Description of Artificial Sequence: Synthetic epitope
GNSLIAAPLS

SEQ ID NO: 10068 - protein, 10 aa, Artificial Sequence
  Description of Artificial Sequence: Synthetic epitope
GNSLNNLIEL

SEQ ID NO: 10069 - protein, 10 aa, Artificial Sequence
  Description of Artificial Sequence: Synthetic epitope
GNSNKDKSQQ

SEQ ID NO: 10070 - protein, 10 aa, Artificial Sequence
  Description of Artificial Sequence: Synthetic epitope
GNSQEAAWNL

SEQ ID NO: 10071 - protein, 10 aa, Artificial Sequence
  Description of Artificial Sequence: Synthetic epitope
GNSSRTADKE

SEQ ID NO: 10072 - protein, 10 aa, Artificial Sequence
  Description of Artificial Sequence: Synthetic epitope
GNTEHKQTFP

SEQ ID NO: 10073 - protein, 10 aa, Artificial Sequence
  Description of Artificial Sequence: Synthetic epitope
GNVDAFQLAD

SEQ ID NO: 10074 - protein, 10 aa, Artificial Sequence
  Description of Artificial Sequence: Synthetic epitope
GNYTASKQVI

SEQ ID NO: 10075 - protein, 10 aa, Artificial Sequence
  Description of Artificial Sequence: Synthetic epitope
GPAKIFSSVQ

SEQ ID NO: 10076 - protein, 10 aa, Artificial Sequence
  Description of Artificial Sequence: Synthetic epitope
GPATLYQEVD

SEQ ID NO: 10077 - protein, 10 aa, Artificial Sequence
  Description of Artificial Sequence: Synthetic epitope
GPDNRISSIG

SEQ ID NO: 10078 - protein, 10 aa, Artificial Sequence
  Description of Artificial Sequence: Synthetic epitope
GPEARLAFSA

SEQ ID NO: 10079 - protein, 10 aa, Artificial Sequence
  Description of Artificial Sequence: Synthetic epitope
GPEKENVRTV

SEQ ID NO: 10080 - protein, 10 aa, Artificial Sequence
  Description of Artificial Sequence: Synthetic epitope
GPEKMALAFS

SEQ ID NO: 10081 - protein, 10 aa, Artificial Sequence
  Description of Artificial Sequence: Synthetic epitope
GPELQTVTTQ

SEQ ID NO: 10082 - protein, 10 aa, Artificial Sequence
  Description of Artificial Sequence: Synthetic epitope
GPEVTMLKDA

SEQ ID NO: 10083 - protein, 10 aa, Artificial Sequence
  Description of Artificial Sequence: Synthetic epitope
GPFQSQKKNL

SEQ ID NO: 10084 - protein, 10 aa, Artificial Sequence
  Description of Artificial Sequence: Synthetic epitope
GPGQVMASQA

SEQ ID NO: 10085 - protein, 10 aa, Artificial Sequence
  Description of Artificial Sequence: Synthetic epitope
GPINVNVGPQ

SEQ ID NO: 10086 - protein, 10 aa, Artificial Sequence
  Description of Artificial Sequence: Synthetic epitope
GPLGTLLRAV

SEQ ID NO: 10087 - protein, 10 aa, Artificial Sequence
  Description of Artificial Sequence: Synthetic epitope
GPLKDMQFGN

SEQ ID NO: 10088 - protein, 10 aa, Artificial Sequence
  Description of Artificial Sequence: Synthetic epitope
GPRAAILEQA

SEQ ID NO: 10089 - protein, 10 aa, Artificial Sequence
  Description of Artificial Sequence: Synthetic epitope
GPRISRSQSE

SEQ ID NO: 10090 - protein, 10 aa, Artificial Sequence
  Description of Artificial Sequence: Synthetic epitope
GPRQSSTSQA

SEQ ID NO: 10091 - protein, 10 aa, Artificial Sequence
  Description of Artificial Sequence: Synthetic epitope
GPRSDNSKSN

SEQ ID NO: 10092 - protein, 10 aa, Artificial Sequence
  Description of Artificial Sequence: Synthetic epitope
GPRYYAFDLI

SEQ ID NO: 10093 - protein, 10 aa, Artificial Sequence
  Description of Artificial Sequence: Synthetic epitope
GPSLLTLRAL

SEQ ID NO: 10094 - protein, 10 aa, Artificial Sequence
  Description of Artificial Sequence: Synthetic epitope
GPSSESSQEA

SEQ ID NO: 10095 - protein, 10 aa, Artificial Sequence
  Description of Artificial Sequence: Synthetic epitope
GPSTKIKAED

SEQ ID NO: 10096 - protein, 10 aa, Artificial Sequence
  Description of Artificial Sequence: Synthetic epitope
GPTESTFSTS

SEQ ID NO: 10097 - protein, 10 aa, Artificial Sequence
  Description of Artificial Sequence: Synthetic epitope
GPYVSGAQII

SEQ ID NO: 10098 - protein, 10 aa, Artificial Sequence
  Description of Artificial Sequence: Synthetic epitope
GQAAKKTQEL

SEQ ID NO: 10099 - protein, 10 aa, Artificial Sequence
  Description of Artificial Sequence: Synthetic epitope
GQAANESHNG

SEQ ID NO: 10100 - protein, 10 aa, Artificial Sequence
  Description of Artificial Sequence: Synthetic epitope
GQAASSATTR

SEQ ID NO: 10101 - protein, 10 aa, Artificial Sequence
  Description of Artificial Sequence: Synthetic epitope
GQADLATKVE

SEQ ID NO: 10102 - protein, 10 aa, Artificial Sequence
  Description of Artificial Sequence: Synthetic epitope
GQAEASEALE

SEQ ID NO: 10103 - protein, 10 aa, Artificial Sequence
  Description of Artificial Sequence: Synthetic epitope
GQAEELAAKD

SEQ ID NO: 10104 - protein, 10 aa, Artificial Sequence
  Description of Artificial Sequence: Synthetic epitope
GQAESLAVKI

SEQ ID NO: 10105 - protein, 10 aa, Artificial Sequence
  Description of Artificial Sequence: Synthetic epitope
GQASMTASPP

SEQ ID NO: 10106 - protein, 10 aa, Artificial Sequence
  Description of Artificial Sequence: Synthetic epitope
GQAVSGAQVS

SEQ ID NO: 10107 - protein, 10 aa, Artificial Sequence
  Description of Artificial Sequence: Synthetic epitope
GQDGYAQYAQ

SEQ ID NO: 10108 - protein, 10 aa, Artificial Sequence
  Description of Artificial Sequence: Synthetic epitope
GQDKLLTDDG

SEQ ID NO: 10109 - protein, 10 aa, Artificial Sequence
  Description of Artificial Sequence: Synthetic epitope
GQDQLDSQQE

SEQ ID NO: 10110 - protein, 10 aa, Artificial Sequence
  Description of Artificial Sequence: Synthetic epitope
GQDTQSKPLN

SEQ ID NO: 10111 - protein, 10 aa, Artificial Sequence
  Description of Artificial Sequence: Synthetic epitope
GQEADDSSTS

SEQ ID NO: 10112 - protein, 10 aa, Artificial Sequence
  Description of Artificial Sequence: Synthetic epitope
GQEALQQAMW

SEQ ID NO: 10113 - protein, 10 aa, Artificial Sequence
  Description of Artificial Sequence: Synthetic epitope
GQEKLKLEAE

SEQ ID NO: 10114 - protein, 10 aa, Artificial Sequence
  Description of Artificial Sequence: Synthetic epitope
GQELESASQE

SEQ ID NO: 10115 - protein, 10 aa, Artificial Sequence
  Description of Artificial Sequence: Synthetic epitope
GQESAQNTKF

SEQ ID NO: 10116 - protein, 10 aa, Artificial Sequence
  Description of Artificial Sequence: Synthetic epitope
GQESDSATAQ

SEQ ID NO: 10117 - protein, 10 aa, Artificial Sequence
  Description of Artificial Sequence: Synthetic epitope
GQESSTKGMP

SEQ ID NO: 10118 - protein, 10 aa, Artificial Sequence
  Description of Artificial Sequence: Synthetic epitope
GQFSTKKNKQ

SEQ ID NO: 10119 - protein, 10 aa, Artificial Sequence
  Description of Artificial Sequence: Synthetic epitope
GQGKDESKVE

SEQ ID NO: 10120 - protein, 10 aa, Artificial Sequence
  Description of Artificial Sequence: Synthetic epitope
GQGNSQERVE

SEQ ID NO: 10121 - protein, 10 aa, Artificial Sequence
  Description of Artificial Sequence: Synthetic epitope
GQGQLLIKTV

SEQ ID NO: 10122 - protein, 10 aa, Artificial Sequence
  Description of Artificial Sequence: Synthetic epitope
GQHWSITNVL

SEQ ID NO: 10123 - protein, 10 aa, Artificial Sequence
  Description of Artificial Sequence: Synthetic epitope
GQIDALQSKI

SEQ ID NO: 10124 - protein, 10 aa, Artificial Sequence
  Description of Artificial Sequence: Synthetic epitope
GQIQEGIGEA

SEQ ID NO: 10125 - protein, 10 aa, Artificial Sequence
  Description of Artificial Sequence: Synthetic epitope
GQIQGAIHTQ

SEQ ID NO: 10126 - protein, 10 aa, Artificial Sequence
  Description of Artificial Sequence: Synthetic epitope
GQKISTVAVQ

SEQ ID NO: 10127 - protein, 10 aa, Artificial Sequence
  Description of Artificial Sequence: Synthetic epitope
GQKKRSQVSK

SEQ ID NO: 10128 - protein, 10 aa, Artificial Sequence
  Description of Artificial Sequence: Synthetic epitope
GQKLPIAHTP

SEQ ID NO: 10129 - protein, 10 aa, Artificial Sequence
  Description of Artificial Sequence: Synthetic epitope
GQKMSLSVLE

SEQ ID NO: 10130 - protein, 10 aa, Artificial Sequence
  Description of Artificial Sequence: Synthetic epitope
GQKNKYRAPR

SEQ ID NO: 10131 - protein, 10 aa, Artificial Sequence
  Description of Artificial Sequence: Synthetic epitope
GQKNTENAKQ

SEQ ID NO: 10132 - protein, 10 aa, Artificial Sequence
  Description of Artificial Sequence: Synthetic epitope
GQKQHQKALP

SEQ ID NO: 10133 - protein, 10 aa, Artificial Sequence
  Description of Artificial Sequence: Synthetic epitope
GQKQVDPVQK

SEQ ID NO: 10134 - protein, 10 aa, Artificial Sequence
  Description of Artificial Sequence: Synthetic epitope
GQKRVVKGEK

SEQ ID NO: 10135 - protein, 10 aa, Artificial Sequence
  Description of Artificial Sequence: Synthetic epitope
GQKSISRVIE

SEQ ID NO: 10136 - protein, 10 aa, Artificial Sequence
  Description of Artificial Sequence: Synthetic epitope
GQKSRTNKMP

SEQ ID NO: 10137 - protein, 10 aa, Artificial Sequence
  Description of Artificial Sequence: Synthetic epitope
GQKTEEVKQD

SEQ ID NO: 10138 - protein, 10 aa, Artificial Sequence
  Description of Artificial Sequence: Synthetic epitope
GQKVMEKETE

SEQ ID NO: 10139 - protein, 10 aa, Artificial Sequence
  Description of Artificial Sequence: Synthetic epitope
GQLAASVLRQ

SEQ ID NO: 10140 - protein, 10 aa, Artificial Sequence
  Description of Artificial Sequence: Synthetic epitope
GQLQNIAKKE

SEQ ID NO: 10141 - protein, 10 aa, Artificial Sequence
  Description of Artificial Sequence: Synthetic epitope
GQLSGRSVSL

SEQ ID NO: 10142 - protein, 10 aa, Artificial Sequence
  Description of Artificial Sequence: Synthetic epitope
GQLSKVMIIE

SEQ ID NO: 10143 - protein, 10 aa, Artificial Sequence
  Description of Artificial Sequence: Synthetic epitope
GQLSNSVATK

SEQ ID NO: 10144 - protein, 10 aa, Artificial Sequence
  Description of Artificial Sequence: Synthetic epitope
GQLTKSPLAQ

SEQ ID NO: 10145 - protein, 10 aa, Artificial Sequence
  Description of Artificial Sequence: Synthetic epitope
GQLTTAVNAV

SEQ ID NO: 10146 - protein, 10 aa, Artificial Sequence
  Description of Artificial Sequence: Synthetic epitope
GQLVGNQPQN

SEQ ID NO: 10147 - protein, 10 aa, Artificial Sequence
  Description of Artificial Sequence: Synthetic epitope
GQLWSQKPVQ

SEQ ID NO: 10148 - protein, 10 aa, Artificial Sequence
  Description of Artificial Sequence: Synthetic epitope
GQMKVKGSNT

SEQ ID NO: 10149 - protein, 10 aa, Artificial Sequence
  Description of Artificial Sequence: Synthetic epitope
GQNFSMEIQK

SEQ ID NO: 10150 - protein, 10 aa, Artificial Sequence
  Description of Artificial Sequence: Synthetic epitope
GQPKKQIVPK

SEQ ID NO: 10151 - protein, 10 aa, Artificial Sequence
  Description of Artificial Sequence: Synthetic epitope
GQPNWDMRDG

SEQ ID NO: 10152 - protein, 10 aa, Artificial Sequence
  Description of Artificial Sequence: Synthetic epitope
GQPQKAAGQT

SEQ ID NO: 10153 - protein, 10 aa, Artificial Sequence
  Description of Artificial Sequence: Synthetic epitope
GQPSSRTSQK

SEQ ID NO: 10154 - protein, 10 aa, Artificial Sequence
  Description of Artificial Sequence: Synthetic epitope
GQQSLVKLSE

SEQ ID NO: 10155 - protein, 10 aa, Artificial Sequence
  Description of Artificial Sequence: Synthetic epitope
GQQTGSTAST

SEQ ID NO: 10156 - protein, 10 aa, Artificial Sequence
  Description of Artificial Sequence: Synthetic epitope
GQREAISSHP

SEQ ID NO: 10157 - protein, 10 aa, Artificial Sequence
  Description of Artificial Sequence: Synthetic epitope
GQRRESSRPV

SEQ ID NO: 10158 - protein, 10 aa, Artificial Sequence
  Description of Artificial Sequence: Synthetic epitope
GQRVGQMPLK

SEQ ID NO: 10159 - protein, 10 aa, Artificial Sequence
  Description of Artificial Sequence: Synthetic epitope
GQSASLNPPT

SEQ ID NO: 10160 - protein, 10 aa, Artificial Sequence
  Description of Artificial Sequence: Synthetic epitope
GQSAVKSGTT

SEQ ID NO: 10161 - protein, 10 aa, Artificial Sequence
  Description of Artificial Sequence: Synthetic epitope
GQSAVRNGSM

SEQ ID NO: 10162 - protein, 10 aa, Artificial Sequence
  Description of Artificial Sequence: Synthetic epitope
GQSEPIEEIL

SEQ ID NO: 10163 - protein, 10 aa, Artificial Sequence
  Description of Artificial Sequence: Synthetic epitope
GQSHKEPIQV

SEQ ID NO: 10164 - protein, 10 aa, Artificial Sequence
  Description of Artificial Sequence: Synthetic epitope
GQSIKTQTDS

SEQ ID NO: 10165 - protein, 10 aa, Artificial Sequence
  Description of Artificial Sequence: Synthetic epitope
GQSIMPPAIP

SEQ ID NO: 10166 - protein, 10 aa, Artificial Sequence
  Description of Artificial Sequence: Synthetic epitope
GQSLKSLNAS

SEQ ID NO: 10167 - protein, 10 aa, Artificial Sequence
  Description of Artificial Sequence: Synthetic epitope
GQSLSIDVRQ

SEQ ID NO: 10168 - protein, 10 aa, Artificial Sequence
  Description of Artificial Sequence: Synthetic epitope
GQSMNHTSAT

SEQ ID NO: 10169 - protein, 10 aa, Artificial Sequence
  Description of Artificial Sequence: Synthetic epitope
GQSQGASQPN

SEQ ID NO: 10170 - protein, 10 aa, Artificial Sequence
  Description of Artificial Sequence: Synthetic epitope
GQSQKTKTEK

SEQ ID NO: 10171 - protein, 10 aa, Artificial Sequence
  Description of Artificial Sequence: Synthetic epitope
GQSTIEQDFE

SEQ ID NO: 10172 - protein, 10 aa, Artificial Sequence
  Description of Artificial Sequence: Synthetic epitope
GQSVSHDPHS

SEQ ID NO: 10173 - protein, 10 aa, Artificial Sequence
  Description of Artificial Sequence: Synthetic epitope
GQSVSSNQRP

SEQ ID NO: 10174 - protein, 10 aa, Artificial Sequence
  Description of Artificial Sequence: Synthetic epitope
GQSVTSVLPS

SEQ ID NO: 10175 - protein, 10 aa, Artificial Sequence
  Description of Artificial Sequence: Synthetic epitope
GQTEQLELEN

SEQ ID NO: 10176 - protein, 10 aa, Artificial Sequence
  Description of Artificial Sequence: Synthetic epitope
GQTVRAVASS

SEQ ID NO: 10177 - protein, 10 aa, Artificial Sequence
  Description of Artificial Sequence: Synthetic epitope
GQVAKLLEAE

SEQ ID NO: 10178 - protein, 10 aa, Artificial Sequence
  Description of Artificial Sequence: Synthetic epitope
GQVKAKLAGG

SEQ ID NO: 10179 - protein, 10 aa, Artificial Sequence
  Description of Artificial Sequence: Synthetic epitope
GQVLMSSELE

SEQ ID NO: 10180 - protein, 10 aa, Artificial Sequence
  Description of Artificial Sequence: Synthetic epitope
GQVQPQASNM

SEQ ID NO: 10181 - protein, 10 aa, Artificial Sequence
  Description of Artificial Sequence: Synthetic epitope
GQVRADVKTK

SEQ ID NO: 10182 - protein, 10 aa, Artificial Sequence
  Description of Artificial Sequence: Synthetic epitope
GQVVQLLQAP

SEQ ID NO: 10183 - protein, 10 aa, Artificial Sequence
  Description of Artificial Sequence: Synthetic epitope
GQWQKQVPLA

SEQ ID NO: 10184 - protein, 10 aa, Artificial Sequence
  Description of Artificial Sequence: Synthetic epitope
GQYMGALQSI

SEQ ID NO: 10185 - protein, 10 aa, Artificial Sequence
  Description of Artificial Sequence: Synthetic epitope
GRAAKLAPEF

SEQ ID NO: 10186 - protein, 10 aa, Artificial Sequence
  Description of Artificial Sequence: Synthetic epitope
GRAARSSQSP

SEQ ID NO: 10187 - protein, 10 aa, Artificial Sequence
  Description of Artificial Sequence: Synthetic epitope
GRAMQVAKVS

SEQ ID NO: 10188 - protein, 10 aa, Artificial Sequence
  Description of Artificial Sequence: Synthetic epitope
GRASRKLGRL

SEQ ID NO: 10189 - protein, 10 aa, Artificial Sequence
  Description of Artificial Sequence: Synthetic epitope
GRAVTVNGVS

SEQ ID NO: 10190 - protein, 10 aa, Artificial Sequence
  Description of Artificial Sequence: Synthetic epitope
GREGRLSAAI

SEQ ID NO: 10191 - protein, 10 aa, Artificial Sequence
  Description of Artificial Sequence: Synthetic epitope
GREHHINTDN

SEQ ID NO: 10192 - protein, 10 aa, Artificial Sequence
  Description of Artificial Sequence: Synthetic epitope
GREIKASEGE

SEQ ID NO: 10193 - protein, 10 aa, Artificial Sequence
  Description of Artificial Sequence: Synthetic epitope
GREIMTMQRP

SEQ ID NO: 10194 - protein, 10 aa, Artificial Sequence
  Description of Artificial Sequence: Synthetic epitope
GRETVTRKEG

SEQ ID NO: 10195 - protein, 10 aa, Artificial Sequence
  Description of Artificial Sequence: Synthetic epitope
GRFLKLESHS

SEQ ID NO: 10196 - protein, 10 aa, Artificial Sequence
  Description of Artificial Sequence: Synthetic epitope
GRGFASQVEQ

SEQ ID NO: 10197 - protein, 10 aa, Artificial Sequence
  Description of Artificial Sequence: Synthetic epitope
GRGKAQFNKA

SEQ ID NO: 10198 - protein, 10 aa, Artificial Sequence
  Description of Artificial Sequence: Synthetic epitope
GRHMVEISTP

SEQ ID NO: 10199 - protein, 10 aa, Artificial Sequence
  Description of Artificial Sequence: Synthetic epitope
GRIEKTLLGE

SEQ ID NO: 10200 - protein, 10 aa, Artificial Sequence
  Description of Artificial Sequence: Synthetic epitope
GRIETVAQSM

SEQ ID NO: 10201 - protein, 10 aa, Artificial Sequence
  Description of Artificial Sequence: Synthetic epitope
GRKKQSRVTE

SEQ ID NO: 10202 - protein, 10 aa, Artificial Sequence
  Description of Artificial Sequence: Synthetic epitope
GRKMAQVFDL

SEQ ID NO: 10203 - protein, 10 aa, Artificial Sequence
  Description of Artificial Sequence: Synthetic epitope
GRKRQQNTEL

SEQ ID NO: 10204 - protein, 10 aa, Artificial Sequence
  Description of Artificial Sequence: Synthetic epitope
GRKSELSLDL

SEQ ID NO: 10205 - protein, 10 aa, Artificial Sequence
  Description of Artificial Sequence: Synthetic epitope
GRKSLNQRTT

SEQ ID NO: 10206 - protein, 10 aa, Artificial Sequence
  Description of Artificial Sequence: Synthetic epitope
GRLAEAAVAE

SEQ ID NO: 10207 - protein, 10 aa, Artificial Sequence
  Description of Artificial Sequence: Synthetic epitope
GRLAESLARP

SEQ ID NO: 10208 - protein, 10 aa, Artificial Sequence
  Description of Artificial Sequence: Synthetic epitope
GRLAHIRTEH

SEQ ID NO: 10209 - protein, 10 aa, Artificial Sequence
  Description of Artificial Sequence: Synthetic epitope
GRLASEAKPA

SEQ ID NO: 10210 - protein, 10 aa, Artificial Sequence
  Description of Artificial Sequence: Synthetic epitope
GRLSSQQRLR

SEQ ID NO: 10211 - protein, 10 aa, Artificial Sequence
  Description of Artificial Sequence: Synthetic epitope
GRNESIASTP

SEQ ID NO: 10212 - protein, 10 aa, Artificial Sequence
  Description of Artificial Sequence: Synthetic epitope
GRNIEDEAQI

SEQ ID NO: 10213 - protein, 10 aa, Artificial Sequence
  Description of Artificial Sequence: Synthetic epitope
GRNLSKVELA

SEQ ID NO: 10214 - protein, 10 aa, Artificial Sequence
  Description of Artificial Sequence: Synthetic epitope
GRNPWTGVSQ

SEQ ID NO: 10215 - protein, 10 aa, Artificial Sequence
  Description of Artificial Sequence: Synthetic epitope
GRNSKFRDNS

SEQ ID NO: 10216 - protein, 10 aa, Artificial Sequence
  Description of Artificial Sequence: Synthetic epitope
GRPLSRQLMS

SEQ ID NO: 10217 - protein, 10 aa, Artificial Sequence
  Description of Artificial Sequence: Synthetic epitope
GRRAFILPAM

SEQ ID NO: 10218 - protein, 10 aa, Artificial Sequence
  Description of Artificial Sequence: Synthetic epitope
GRRDSSRAAS

SEQ ID NO: 10219 - protein, 10 aa, Artificial Sequence
  Description of Artificial Sequence: Synthetic epitope
GRRLEAVLAS

SEQ ID NO: 10220 - protein, 10 aa, Artificial Sequence
  Description of Artificial Sequence: Synthetic epitope
GRRTELTTES

SEQ ID NO: 10221 - protein, 10 aa, Artificial Sequence
  Description of Artificial Sequence: Synthetic epitope
GRRVSSKTSL

SEQ ID NO: 10222 - protein, 10 aa, Artificial Sequence
  Description of Artificial Sequence: Synthetic epitope
GRSAAMDLGP

SEQ ID NO: 10223 - protein, 10 aa, Artificial Sequence
  Description of Artificial Sequence: Synthetic epitope
GRSDESAAKK

SEQ ID NO: 10224 - protein, 10 aa, Artificial Sequence
  Description of Artificial Sequence: Synthetic epitope
GRSDHMSYPE

SEQ ID NO: 10225 - protein, 10 aa, Artificial Sequence
  Description of Artificial Sequence: Synthetic epitope
GRSFSTAVTE

SEQ ID NO: 10226 - protein, 10 aa, Artificial Sequence
  Description of Artificial Sequence: Synthetic epitope
GRSFTALRSS

SEQ ID NO: 10227 - protein, 10 aa, Artificial Sequence
  Description of Artificial Sequence: Synthetic epitope
GRSLQSALDV

SEQ ID NO: 10228 - protein, 10 aa, Artificial Sequence
  Description of Artificial Sequence: Synthetic epitope
GRSQQPSQGQ

SEQ ID NO: 10229 - protein, 10 aa, Artificial Sequence
  Description of Artificial Sequence: Synthetic epitope
GRSQREVQTV

SEQ ID NO: 10230 - protein, 10 aa, Artificial Sequence
  Description of Artificial Sequence: Synthetic epitope
GRSRKSTAGS

SEQ ID NO: 10231 - protein, 10 aa, Artificial Sequence
  Description of Artificial Sequence: Synthetic epitope
GRSRSAQEPA

SEQ ID NO: 10232 - protein, 10 aa, Artificial Sequence
  Description of Artificial Sequence: Synthetic epitope
GRSSPSQIAT

SEQ ID NO: 10233 - protein, 10 aa, Artificial Sequence
  Description of Artificial Sequence: Synthetic epitope
GRSSTTSPFV

SEQ ID NO: 10234 - protein, 10 aa, Artificial Sequence
  Description of Artificial Sequence: Synthetic epitope
GRTLESSTLH

SEQ ID NO: 10235 - protein, 10 aa, Artificial Sequence
  Description of Artificial Sequence: Synthetic epitope
GRTLRSMASG

SEQ ID NO: 10236 - protein, 10 aa, Artificial Sequence
  Description of Artificial Sequence: Synthetic epitope
GRTMESTKEF

SEQ ID NO: 10237 - protein, 10 aa, Artificial Sequence
  Description of Artificial Sequence: Synthetic epitope
GRTSLGALED

SEQ ID NO: 10238 - protein, 10 aa, Artificial Sequence
  Description of Artificial Sequence: Synthetic epitope
GRTSNQLRSF

SEQ ID NO: 10239 - protein, 10 aa, Artificial Sequence
  Description of Artificial Sequence: Synthetic epitope
GRVMLPYSSG

SEQ ID NO: 10240 - protein, 10 aa, Artificial Sequence
  Description of Artificial Sequence: Synthetic epitope
GRWVEGITSE

SEQ ID NO: 10241 - protein, 10 aa, Artificial Sequence
  Description of Artificial Sequence: Synthetic epitope
GRYEASMYQT

SEQ ID NO: 10242 - protein, 10 aa, Artificial Sequence
  Description of Artificial Sequence: Synthetic epitope
GRYRSQSGED

SEQ ID NO: 10243 - protein, 10 aa, Artificial Sequence
  Description of Artificial Sequence: Synthetic epitope
GSAEAEQLLQ

SEQ ID NO: 10244 - protein, 10 aa, Artificial Sequence
  Description of Artificial Sequence: Synthetic epitope
GSAEQLQVGP

SEQ ID NO: 10245 - protein, 10 aa, Artificial Sequence
  Description of Artificial Sequence: Synthetic epitope
GSAGMIDSAT

SEQ ID NO: 10246 - protein, 10 aa, Artificial Sequence
  Description of Artificial Sequence: Synthetic epitope
GSANQLQQLQ

SEQ ID NO: 10247 - protein, 10 aa, Artificial Sequence
  Description of Artificial Sequence: Synthetic epitope
GSANSASSQA

SEQ ID NO: 10248 - protein, 10 aa, Artificial Sequence
  Description of Artificial Sequence: Synthetic epitope
GSAPVTAGAA

SEQ ID NO: 10249 - protein, 10 aa, Artificial Sequence
  Description of Artificial Sequence: Synthetic epitope
GSASKRMALV

SEQ ID NO: 10250 - protein, 10 aa, Artificial Sequence
  Description of Artificial Sequence: Synthetic epitope
GSASSLNNVV

SEQ ID NO: 10251 - protein, 10 aa, Artificial Sequence
  Description of Artificial Sequence: Synthetic epitope
GSAVDASVQE

SEQ ID NO: 10252 - protein, 10 aa, Artificial Sequence
  Description of Artificial Sequence: Synthetic epitope
GSDDPIKFVD

SEQ ID NO: 10253 - protein, 10 aa, Artificial Sequence
  Description of Artificial Sequence: Synthetic epitope
GSDEEVRVRS

SEQ ID NO: 10254 - protein, 10 aa, Artificial Sequence
  Description of Artificial Sequence: Synthetic epitope
GSDLSLLVPE

SEQ ID NO: 10255 - protein, 10 aa, Artificial Sequence
  Description of Artificial Sequence: Synthetic epitope
GSDSESETSE

SEQ ID NO: 10256 - protein, 10 aa, Artificial Sequence
  Description of Artificial Sequence: Synthetic epitope
GSDSSQSMNG

SEQ ID NO: 10257 - protein, 10 aa, Artificial Sequence
  Description of Artificial Sequence: Synthetic epitope
GSDVEEAVAD

SEQ ID NO: 10258 - protein, 10 aa, Artificial Sequence
  Description of Artificial Sequence: Synthetic epitope
GSEADNEASS

SEQ ID NO: 10259 - protein, 10 aa, Artificial Sequence
  Description of Artificial Sequence: Synthetic epitope
GSEASSKKLM

SEQ ID NO: 10260 - protein, 10 aa, Artificial Sequence
  Description of Artificial Sequence: Synthetic epitope
GSEHQAIVQH

SEQ ID NO: 10261 - protein, 10 aa, Artificial Sequence
  Description of Artificial Sequence: Synthetic epitope
GSEISSIGVS

SEQ ID NO: 10262 - protein, 10 aa, Artificial Sequence
  Description of Artificial Sequence: Synthetic epitope
GSEKVSDRKF

SEQ ID NO: 10263 - protein, 10 aa, Artificial Sequence
  Description of Artificial Sequence: Synthetic epitope
GSELNSRSST

SEQ ID NO: 10264 - protein, 10 aa, Artificial Sequence
  Description of Artificial Sequence: Synthetic epitope
GSEMALSTGD

SEQ ID NO: 10265 - protein, 10 aa, Artificial Sequence
  Description of Artificial Sequence: Synthetic epitope
GSESQGASES

SEQ ID NO: 10266 - protein, 10 aa, Artificial Sequence
  Description of Artificial Sequence: Synthetic epitope
GSETKQGVQQ

SEQ ID NO: 10267 - protein, 10 aa, Artificial Sequence
  Description of Artificial Sequence: Synthetic epitope
GSETRAIYSI

SEQ ID NO: 10268 - protein, 10 aa, Artificial Sequence
  Description of Artificial Sequence: Synthetic epitope
GSETSDMRDE

SEQ ID NO: 10269 - protein, 10 aa, Artificial Sequence
  Description of Artificial Sequence: Synthetic epitope
GSEVGAAHPE

SEQ ID NO: 10270 - protein, 10 aa, Artificial Sequence
  Description of Artificial Sequence: Synthetic epitope
GSEVGNSQAV

SEQ ID NO: 10271 - protein, 10 aa, Artificial Sequence
  Description of Artificial Sequence: Synthetic epitope
GSFPYVTMDI

SEQ ID NO: 10272 - protein, 10 aa, Artificial Sequence
  Description of Artificial Sequence: Synthetic epitope
GSGSTMMQTK

SEQ ID NO: 10273 - protein, 10 aa, Artificial Sequence
  Description of Artificial Sequence: Synthetic epitope
GSHSSLSTHP

SEQ ID NO: 10274 - protein, 10 aa, Artificial Sequence
  Description of Artificial Sequence: Synthetic epitope
GSINTVLGSR

SEQ ID NO: 10275 - protein, 10 aa, Artificial Sequence
  Description of Artificial Sequence: Synthetic epitope
GSIQAVRLNL

SEQ ID NO: 10276 - protein, 10 aa, Artificial Sequence
  Description of Artificial Sequence: Synthetic epitope
GSISARKTMA

SEQ ID NO: 10277 - protein, 10 aa, Artificial Sequence
  Description of Artificial Sequence: Synthetic epitope
GSISSTSEVH

SEQ ID NO: 10278 - protein, 10 aa, Artificial Sequence
  Description of Artificial Sequence: Synthetic epitope
GSISTLVTLP

SEQ ID NO: 10279 - protein, 10 aa, Artificial Sequence
  Description of Artificial Sequence: Synthetic epitope
GSKAGSNKST

SEQ ID NO: 10280 - protein, 10 aa, Artificial Sequence
  Description of Artificial Sequence: Synthetic epitope
GSKDTESLEP

SEQ ID NO: 10281 - protein, 10 aa, Artificial Sequence
  Description of Artificial Sequence: Synthetic epitope
GSKGFYYKDP

SEQ ID NO: 10282 - protein, 10 aa, Artificial Sequence
  Description of Artificial Sequence: Synthetic epitope
GSKHKSNLKQ

SEQ ID NO: 10283 - protein, 10 aa, Artificial Sequence
  Description of Artificial Sequence: Synthetic epitope
GSKKSLLSHE

SEQ ID NO: 10284 - protein, 10 aa, Artificial Sequence
  Description of Artificial Sequence: Synthetic epitope
GSKLIQTAGN

SEQ ID NO: 10285 - protein, 10 aa, Artificial Sequence
  Description of Artificial Sequence: Synthetic epitope
GSKLNDMIDA

SEQ ID NO: 10286 - protein, 10 aa, Artificial Sequence
  Description of Artificial Sequence: Synthetic epitope
GSKQKVQQHQ

SEQ ID NO: 10287 - protein, 10 aa, Artificial Sequence
  Description of Artificial Sequence: Synthetic epitope
GSKSASSKNK

SEQ ID NO: 10288 - protein, 10 aa, Artificial Sequence
  Description of Artificial Sequence: Synthetic epitope
GSKTQQTFGS

SEQ ID NO: 10289 - protein, 10 aa, Artificial Sequence
  Description of Artificial Sequence: Synthetic epitope
GSLAKATTAP

SEQ ID NO: 10290 - protein, 10 aa, Artificial Sequence
  Description of Artificial Sequence: Synthetic epitope
GSLEHNKANK

SEQ ID NO: 10291 - protein, 10 aa, Artificial Sequence
  Description of Artificial Sequence: Synthetic epitope
GSLEKVLSTH

SEQ ID NO: 10292 - protein, 10 aa, Artificial Sequence
  Description of Artificial Sequence: Synthetic epitope
GSLELTMETQ

SEQ ID NO: 10293 - protein, 10 aa, Artificial Sequence
  Description of Artificial Sequence: Synthetic epitope
GSLETKSSAG

SEQ ID NO: 10294 - protein, 10 aa, Artificial Sequence
  Description of Artificial Sequence: Synthetic epitope
GSLKAITAGS

SEQ ID NO: 10295 - protein, 10 aa, Artificial Sequence
  Description of Artificial Sequence: Synthetic epitope
GSLQKQTKFV

SEQ ID NO: 10296 - protein, 10 aa, Artificial Sequence
  Description of Artificial Sequence: Synthetic epitope
GSLRASESNR

SEQ ID NO: 10297 - protein, 10 aa, Artificial Sequence
  Description of Artificial Sequence: Synthetic epitope
GSLRSNAGAE

SEQ ID NO: 10298 - protein, 10 aa, Artificial Sequence
  Description of Artificial Sequence: Synthetic epitope
GSLSALLRSK

SEQ ID NO: 10299 - protein, 10 aa, Artificial Sequence
  Description of Artificial Sequence: Synthetic epitope
GSLSQGEKDD

SEQ ID NO: 10300 - protein, 10 aa, Artificial Sequence
  Description of Artificial Sequence: Synthetic epitope
GSLVAELSTI

SEQ ID NO: 10301 - protein, 10 aa, Artificial Sequence
  Description of Artificial Sequence: Synthetic epitope
GSLVVKSGQS

SEQ ID NO: 10302 - protein, 10 aa, Artificial Sequence
  Description of Artificial Sequence: Synthetic epitope
GSMEAPLLSS

SEQ ID NO: 10303 - protein, 10 aa, Artificial Sequence
  Description of Artificial Sequence: Synthetic epitope
GSMKIKKNSA

SEQ ID NO: 10304 - protein, 10 aa, Artificial Sequence
  Description of Artificial Sequence: Synthetic epitope
GSMKVSRDKD

SEQ ID NO: 10305 - protein, 10 aa, Artificial Sequence
  Description of Artificial Sequence: Synthetic epitope
GSMTQKSDLS

SEQ ID NO: 10306 - protein, 10 aa, Artificial Sequence
  Description of Artificial Sequence: Synthetic epitope
GSNAQSSEPP

SEQ ID NO: 10307 - protein, 10 aa, Artificial Sequence
  Description of Artificial Sequence: Synthetic epitope
GSNSNKAVKE

SEQ ID NO: 10308 - protein, 10 aa, Artificial Sequence
  Description of Artificial Sequence: Synthetic epitope
GSNSTVTAST

SEQ ID NO: 10309 - protein, 10 aa, Artificial Sequence
  Description of Artificial Sequence: Synthetic epitope
GSPLENTETE

SEQ ID NO: 10310 - protein, 10 aa, Artificial Sequence
  Description of Artificial Sequence: Synthetic epitope
GSPSSIEVTR

SEQ ID NO: 10311 - protein, 10 aa, Artificial Sequence
  Description of Artificial Sequence: Synthetic epitope
GSQAALIKSG

SEQ ID NO: 10312 - protein, 10 aa, Artificial Sequence
  Description of Artificial Sequence: Synthetic epitope
GSQAGEAAKV

SEQ ID NO: 10313 - protein, 10 aa, Artificial Sequence
  Description of Artificial Sequence: Synthetic epitope
GSQEMTGRKE

SEQ ID NO: 10314 - protein, 10 aa, Artificial Sequence
  Description of Artificial Sequence: Synthetic epitope
GSQGRTDSVE

SEQ ID NO: 10315 - protein, 10 aa, Artificial Sequence
  Description of Artificial Sequence: Synthetic epitope
GSQKRTHSRV

SEQ ID NO: 10316 - protein, 10 aa, Artificial Sequence
  Description of Artificial Sequence: Synthetic epitope
GSQQSASAAE

SEQ ID NO: 10317 - protein, 10 aa, Artificial Sequence
  Description of Artificial Sequence: Synthetic epitope
GSQRSKTVDD

SEQ ID NO: 10318 - protein, 10 aa, Artificial Sequence
  Description of Artificial Sequence: Synthetic epitope
GSQSKSKMKR

SEQ ID NO: 10319 - protein, 10 aa, Artificial Sequence
  Description of Artificial Sequence: Synthetic epitope
GSQSLSRESP

SEQ ID NO: 10320 - protein, 10 aa, Artificial Sequence
  Description of Artificial Sequence: Synthetic epitope
GSQSQKFSSE

SEQ ID NO: 10321 - protein, 10 aa, Artificial Sequence
  Description of Artificial Sequence: Synthetic epitope
GSQVSAAPAP

SEQ ID NO: 10322 - protein, 10 aa, Artificial Sequence
  Description of Artificial Sequence: Synthetic epitope
GSQVVATTAR

SEQ ID NO: 10323 - protein, 10 aa, Artificial Sequence
  Description of Artificial Sequence: Synthetic epitope
GSRDDKDKMS

SEQ ID NO: 10324 - protein, 10 aa, Artificial Sequence
  Description of Artificial Sequence: Synthetic epitope
GSRIAKMEKI

SEQ ID NO: 10325 - protein, 10 aa, Artificial Sequence
  Description of Artificial Sequence: Synthetic epitope
GSRISVLSAS

SEQ ID NO: 10326 - protein, 10 aa, Artificial Sequence
  Description of Artificial Sequence: Synthetic epitope
GSRLLSQLER

SEQ ID NO: 10327 - protein, 10 aa, Artificial Sequence
  Description of Artificial Sequence: Synthetic epitope
GSRSDSESEE

SEQ ID NO: 10328 - protein, 10 aa, Artificial Sequence
  Description of Artificial Sequence: Synthetic epitope
GSRTDSQSVR

SEQ ID NO: 10329 - protein, 10 aa, Artificial Sequence
  Description of Artificial Sequence: Synthetic epitope
GSRVSSGRDL

SEQ ID NO: 10330 - protein, 10 aa, Artificial Sequence
  Description of Artificial Sequence: Synthetic epitope
GSSAASTALE

SEQ ID NO: 10331 - protein, 10 aa, Artificial Sequence
  Description of Artificial Sequence: Synthetic epitope
GSSAAVSGTT

SEQ ID NO: 10332 - protein, 10 aa, Artificial Sequence
  Description of Artificial Sequence: Synthetic epitope
GSSASVKRKE

SEQ ID NO: 10333 - protein, 10 aa, Artificial Sequence
  Description of Artificial Sequence: Synthetic epitope
GSSDNSSPQP

SEQ ID NO: 10334 - protein, 10 aa, Artificial Sequence
  Description of Artificial Sequence: Synthetic epitope
GSSEKQIVSE

SEQ ID NO: 10335 - protein, 10 aa, Artificial Sequence
  Description of Artificial Sequence: Synthetic epitope
GSSGAKVARP

SEQ ID NO: 10336 - protein, 10 aa, Artificial Sequence
  Description of Artificial Sequence: Synthetic epitope
GSSKDADAKK

SEQ ID NO: 10337 - protein, 10 aa, Artificial Sequence
  Description of Artificial Sequence: Synthetic epitope
GSSKISERRD

SEQ ID NO: 10338 - protein, 10 aa, Artificial Sequence
  Description of Artificial Sequence: Synthetic epitope
GSSKTEADVE

SEQ ID NO: 10339 - protein, 10 aa, Artificial Sequence
  Description of Artificial Sequence: Synthetic epitope
GSSLNSRLLE

SEQ ID NO: 10340 - protein, 10 aa, Artificial Sequence
  Description of Artificial Sequence: Synthetic epitope
GSSLNSRLLE

SEQ ID NO: 10341 - protein, 10 aa, Artificial Sequence
  Description of Artificial Sequence: Synthetic epitope
GSSMTSATTP

SEQ ID NO: 10342 - protein, 10 aa, Artificial Sequence
  Description of Artificial Sequence: Synthetic epitope
GSSNLFVMQV

SEQ ID NO: 10343 - protein, 10 aa, Artificial Sequence
  Description of Artificial Sequence: Synthetic epitope
GSSNLFVMQV

SEQ ID NO: 10344 - protein, 10 aa, Artificial Sequence
  Description of Artificial Sequence: Synthetic epitope
GSSQAAKEDE

SEQ ID NO: 10345 - protein, 10 aa, Artificial Sequence
  Description of Artificial Sequence: Synthetic epitope
GSSQTSISGD

SEQ ID NO: 10346 - protein, 10 aa, Artificial Sequence
  Description of Artificial Sequence: Synthetic epitope
GSSQVSVQSI

SEQ ID NO: 10347 - protein, 10 aa, Artificial Sequence
  Description of Artificial Sequence: Synthetic epitope
GSSRSKRKPS

SEQ ID NO: 10348 - protein, 10 aa, Artificial Sequence
  Description of Artificial Sequence: Synthetic epitope
GSSTDDVELA

SEQ ID NO: 10349 - protein, 10 aa, Artificial Sequence
  Description of Artificial Sequence: Synthetic epitope
GSSTLSKKRP

SEQ ID NO: 10350 - protein, 10 aa, Artificial Sequence
  Description of Artificial Sequence: Synthetic epitope
GSSTQLASDG

SEQ ID NO: 10351 - protein, 10 aa, Artificial Sequence
  Description of Artificial Sequence: Synthetic epitope
GSSTTKSEES

SEQ ID NO: 10352 - protein, 10 aa, Artificial Sequence
  Description of Artificial Sequence: Synthetic epitope
GSSTTSINVP

SEQ ID NO: 10353 - protein, 10 aa, Artificial Sequence
  Description of Artificial Sequence: Synthetic epitope
GSSVDSATKK

SEQ ID NO: 10354 - protein, 10 aa, Artificial Sequence
  Description of Artificial Sequence: Synthetic epitope
GSSVKSVQPE

SEQ ID NO: 10355 - protein, 10 aa, Artificial Sequence
  Description of Artificial Sequence: Synthetic epitope
GSSVTSNGVS

SEQ ID NO: 10356 - protein, 10 aa, Artificial Sequence
  Description of Artificial Sequence: Synthetic epitope
GSSYAYSRPA

SEQ ID NO: 10357 - protein, 10 aa, Artificial Sequence
  Description of Artificial Sequence: Synthetic epitope
GSTEAADPSA

SEQ ID NO: 10358 - protein, 10 aa, Artificial Sequence
  Description of Artificial Sequence: Synthetic epitope
GSTEERKNMQ

SEQ ID NO: 10359 - protein, 10 aa, Artificial Sequence
  Description of Artificial Sequence: Synthetic epitope
GSTGDQKVQI

SEQ ID NO: 10360 - protein, 10 aa, Artificial Sequence
  Description of Artificial Sequence: Synthetic epitope
GSTISETTSE

SEQ ID NO: 10361 - protein, 10 aa, Artificial Sequence
  Description of Artificial Sequence: Synthetic epitope
GSTISQSLAQ

SEQ ID NO: 10362 - protein, 10 aa, Artificial Sequence
  Description of Artificial Sequence: Synthetic epitope
GSTKDVSEEA

SEQ ID NO: 10363 - protein, 10 aa, Artificial Sequence
  Description of Artificial Sequence: Synthetic epitope
GSTKLQQEST

SEQ ID NO: 10364 - protein, 10 aa, Artificial Sequence
  Description of Artificial Sequence: Synthetic epitope
GSTKSAYNQK

SEQ ID NO: 10365 - protein, 10 aa, Artificial Sequence
  Description of Artificial Sequence: Synthetic epitope
GSTLQQSLEL

SEQ ID NO: 10366 - protein, 10 aa, Artificial Sequence
  Description of Artificial Sequence: Synthetic epitope
GSTNTVASEG

SEQ ID NO: 10367 - protein, 10 aa, Artificial Sequence
  Description of Artificial Sequence: Synthetic epitope
GSTRVEQRQA

SEQ ID NO: 10368 - protein, 10 aa, Artificial Sequence
  Description of Artificial Sequence: Synthetic epitope
GSTSRLQQSS

SEQ ID NO: 10369 - protein, 10 aa, Artificial Sequence
  Description of Artificial Sequence: Synthetic epitope
GSTSSTLRAA

SEQ ID NO: 10370 - protein, 10 aa, Artificial Sequence
  Description of Artificial Sequence: Synthetic epitope
GSTTVGSKSE

SEQ ID NO: 10371 - protein, 10 aa, Artificial Sequence
  Description of Artificial Sequence: Synthetic epitope
GSTYNLQILT

SEQ ID NO: 10372 - protein, 10 aa, Artificial Sequence
  Description of Artificial Sequence: Synthetic epitope
GSVAKVEQVK

SEQ ID NO: 10373 - protein, 10 aa, Artificial Sequence
  Description of Artificial Sequence: Synthetic epitope
GSVEESEAEA

SEQ ID NO: 10374 - protein, 10 aa, Artificial Sequence
  Description of Artificial Sequence: Synthetic epitope
GSVKKSSGSK

SEQ ID NO: 10375 - protein, 10 aa, Artificial Sequence
  Description of Artificial Sequence: Synthetic epitope
GSVQLSSGNS

SEQ ID NO: 10376 - protein, 10 aa, Artificial Sequence
  Description of Artificial Sequence: Synthetic epitope
GSVRAALVDQ

SEQ ID NO: 10377 - protein, 10 aa, Artificial Sequence
  Description of Artificial Sequence: Synthetic epitope
GSVSASEQGT

SEQ ID NO: 10378 - protein, 10 aa, Artificial Sequence
  Description of Artificial Sequence: Synthetic epitope
GSVSLTTGQP

SEQ ID NO: 10379 - protein, 10 aa, Artificial Sequence
  Description of Artificial Sequence: Synthetic epitope
GSVSSAASQY

SEQ ID NO: 10380 - protein, 10 aa, Artificial Sequence
  Description of Artificial Sequence: Synthetic epitope
GSVSSLISGH

SEQ ID NO: 10381 - protein, 10 aa, Artificial Sequence
  Description of Artificial Sequence: Synthetic epitope
GSVSSVTKTA

SEQ ID NO: 10382 - protein, 10 aa, Artificial Sequence
  Description of Artificial Sequence: Synthetic epitope
GSVTAVNRGL

SEQ ID NO: 10383 - protein, 10 aa, Artificial Sequence
  Description of Artificial Sequence: Synthetic epitope
GSWDASKPRA

SEQ ID NO: 10384 - protein, 10 aa, Artificial Sequence
  Description of Artificial Sequence: Synthetic epitope
GSYQVLEKTE

SEQ ID NO: 10385 - protein, 10 aa, Artificial Sequence
  Description of Artificial Sequence: Synthetic epitope
GSYRISLKKF

SEQ ID NO: 10386 - protein, 10 aa, Artificial Sequence
  Description of Artificial Sequence: Synthetic epitope
GTADTADKTE

SEQ ID NO: 10387 - protein, 10 aa, Artificial Sequence
  Description of Artificial Sequence: Synthetic epitope
GTANARMPEK

SEQ ID NO: 10388 - protein, 10 aa, Artificial Sequence
  Description of Artificial Sequence: Synthetic epitope
GTASSIIDEG

SEQ ID NO: 10389 - protein, 10 aa, Artificial Sequence
  Description of Artificial Sequence: Synthetic epitope
GTASSLTGST

SEQ ID NO: 10390 - protein, 10 aa, Artificial Sequence
  Description of Artificial Sequence: Synthetic epitope
GTASTGSAGN

SEQ ID NO: 10391 - protein, 10 aa, Artificial Sequence
  Description of Artificial Sequence: Synthetic epitope
GTDIELDAAR

SEQ ID NO: 10392 - protein, 10 aa, Artificial Sequence
  Description of Artificial Sequence: Synthetic epitope
GTDMSDRRAA

SEQ ID NO: 10393 - protein, 10 aa, Artificial Sequence
  Description of Artificial Sequence: Synthetic epitope
GTDSQADLED

SEQ ID NO: 10394 - protein, 10 aa, Artificial Sequence
  Description of Artificial Sequence: Synthetic epitope
GTEAESTQAT

SEQ ID NO: 10395 - protein, 10 aa, Artificial Sequence
  Description of Artificial Sequence: Synthetic epitope
GTEHEQINGQ

SEQ ID NO: 10396 - protein, 10 aa, Artificial Sequence
  Description of Artificial Sequence: Synthetic epitope
GTFYTTRQQK

SEQ ID NO: 10397 - protein, 10 aa, Artificial Sequence
  Description of Artificial Sequence: Synthetic epitope
GTGTSSEDLA

SEQ ID NO: 10398 - protein, 10 aa, Artificial Sequence
  Description of Artificial Sequence: Synthetic epitope
GTIENERGKP

SEQ ID NO: 10399 - protein, 10 aa, Artificial Sequence
  Description of Artificial Sequence: Synthetic epitope
GTIETKSASV

SEQ ID NO: 10400 - protein, 10 aa, Artificial Sequence
  Description of Artificial Sequence: Synthetic epitope
GTIPWFMEIR

SEQ ID NO: 10401 - protein, 10 aa, Artificial Sequence
  Description of Artificial Sequence: Synthetic epitope
GTIRKQRDKL

SEQ ID NO: 10402 - protein, 10 aa, Artificial Sequence
  Description of Artificial Sequence: Synthetic epitope
GTIVDKVKEV

SEQ ID NO: 10403 - protein, 10 aa, Artificial Sequence
  Description of Artificial Sequence: Synthetic epitope
GTKEAIVPME

SEQ ID NO: 10404 - protein, 10 aa, Artificial Sequence
  Description of Artificial Sequence: Synthetic epitope
GTKKALTNEA

SEQ ID NO: 10405 - protein, 10 aa, Artificial Sequence
  Description of Artificial Sequence: Synthetic epitope
GTKPKTTAIQ

SEQ ID NO: 10406 - protein, 10 aa, Artificial Sequence
  Description of Artificial Sequence: Synthetic epitope
GTKTSASKTG

SEQ ID NO: 10407 - protein, 10 aa, Artificial Sequence
  Description of Artificial Sequence: Synthetic epitope
GTLASLISDY

SEQ ID NO: 10408 - protein, 10 aa, Artificial Sequence
  Description of Artificial Sequence: Synthetic epitope
GTLETKAARE

SEQ ID NO: 10409 - protein, 10 aa, Artificial Sequence
  Description of Artificial Sequence: Synthetic epitope
GTLGQTSKLD

SEQ ID NO: 10410 - protein, 10 aa, Artificial Sequence
  Description of Artificial Sequence: Synthetic epitope
GTLHRLAQAG

SEQ ID NO: 10411 - protein, 10 aa, Artificial Sequence
  Description of Artificial Sequence: Synthetic epitope
GTLNLALVAE

SEQ ID NO: 10412 - protein, 10 aa, Artificial Sequence
  Description of Artificial Sequence: Synthetic epitope
GTLQSSPATT

SEQ ID NO: 10413 - protein, 10 aa, Artificial Sequence
  Description of Artificial Sequence: Synthetic epitope
GTLQTLAPAT

SEQ ID NO: 10414 - protein, 10 aa, Artificial Sequence
  Description of Artificial Sequence: Synthetic epitope
GTLVESRTIN

SEQ ID NO: 10415 - protein, 10 aa, Artificial Sequence
  Description of Artificial Sequence: Synthetic epitope
GTMKDKIVAN

SEQ ID NO: 10416 - protein, 10 aa, Artificial Sequence
  Description of Artificial Sequence: Synthetic epitope
GTNLVEVRSV

SEQ ID NO: 10417 - protein, 10 aa, Artificial Sequence
  Description of Artificial Sequence: Synthetic epitope
GTPDATAASG

SEQ ID NO: 10418 - protein, 10 aa, Artificial Sequence
  Description of Artificial Sequence: Synthetic epitope
GTPKIVFNDA

SEQ ID NO: 10419 - protein, 10 aa, Artificial Sequence
  Description of Artificial Sequence: Synthetic epitope
GTPMVAASPE

SEQ ID NO: 10420 - protein, 10 aa, Artificial Sequence
  Description of Artificial Sequence: Synthetic epitope
GTPQKLVESE

SEQ ID NO: 10421 - protein, 10 aa, Artificial Sequence
  Description of Artificial Sequence: Synthetic epitope
GTPVTSKGGD

SEQ ID NO: 10422 - protein, 10 aa, Artificial Sequence
  Description of Artificial Sequence: Synthetic epitope
GTQETKKTED

SEQ ID NO: 10423 - protein, 10 aa, Artificial Sequence
  Description of Artificial Sequence: Synthetic epitope
GTQFASKTLP

SEQ ID NO: 10424 - protein, 10 aa, Artificial Sequence
  Description of Artificial Sequence: Synthetic epitope
GTQMSDPTSV

SEQ ID NO: 10425 - protein, 10 aa, Artificial Sequence
  Description of Artificial Sequence: Synthetic epitope
GTQQTDAMKT

SEQ ID NO: 10426 - protein, 10 aa, Artificial Sequence
  Description of Artificial Sequence: Synthetic epitope
GTQTSDIGVS

SEQ ID NO: 10427 - protein, 10 aa, Artificial Sequence
  Description of Artificial Sequence: Synthetic epitope
GTQVHMNNVT

SEQ ID NO: 10428 - protein, 10 aa, Artificial Sequence
  Description of Artificial Sequence: Synthetic epitope
GTQVSTAMEM

SEQ ID NO: 10429 - protein, 10 aa, Artificial Sequence
  Description of Artificial Sequence: Synthetic epitope
GTRDAETDGP

SEQ ID NO: 10430 - protein, 10 aa, Artificial Sequence
  Description of Artificial Sequence: Synthetic epitope
GTRTAGESDM

SEQ ID NO: 10431 - protein, 10 aa, Artificial Sequence
  Description of Artificial Sequence: Synthetic epitope
GTSAIGQKNK

SEQ ID NO: 10432 - protein, 10 aa, Artificial Sequence
  Description of Artificial Sequence: Synthetic epitope
GTSGEQQAAD

SEQ ID NO: 10433 - protein, 10 aa, Artificial Sequence
  Description of Artificial Sequence: Synthetic epitope
GTSKEKAKTV

SEQ ID NO: 10434 - protein, 10 aa, Artificial Sequence
  Description of Artificial Sequence: Synthetic epitope
GTSLLEIMQI

SEQ ID NO: 10435 - protein, 10 aa, Artificial Sequence
  Description of Artificial Sequence: Synthetic epitope
GTSPKASLEL

SEQ ID NO: 10436 - protein, 10 aa, Artificial Sequence
  Description of Artificial Sequence: Synthetic epitope
GTSPVTQSVP

SEQ ID NO: 10437 - protein, 10 aa, Artificial Sequence
  Description of Artificial Sequence: Synthetic epitope
GTSRRLSALG

SEQ ID NO: 10438 - protein, 10 aa, Artificial Sequence
  Description of Artificial Sequence: Synthetic epitope
GTSSISGTNN

SEQ ID NO: 10439 - protein, 10 aa, Artificial Sequence
  Description of Artificial Sequence: Synthetic epitope
GTSSKAEASV

SEQ ID NO: 10440 - protein, 10 aa, Artificial Sequence
  Description of Artificial Sequence: Synthetic epitope
GTSTQILQIV

SEQ ID NO: 10441 - protein, 10 aa, Artificial Sequence
  Description of Artificial Sequence: Synthetic epitope
GTSTSYLSLA

SEQ ID NO: 10442 - protein, 10 aa, Artificial Sequence
  Description of Artificial Sequence: Synthetic epitope
GTSTTSSRNA

SEQ ID NO: 10443 - protein, 10 aa, Artificial Sequence
  Description of Artificial Sequence: Synthetic epitope
GTSVASAEQD

SEQ ID NO: 10444 - protein, 10 aa, Artificial Sequence
  Description of Artificial Sequence: Synthetic epitope
GTTETSVVDE

SEQ ID NO: 10445 - protein, 10 aa, Artificial Sequence
  Description of Artificial Sequence: Synthetic epitope
GTTIAELTTK

SEQ ID NO: 10446 - protein, 10 aa, Artificial Sequence
  Description of Artificial Sequence: Synthetic epitope
GTTISFERIN

SEQ ID NO: 10447 - protein, 10 aa, Artificial Sequence
  Description of Artificial Sequence: Synthetic epitope
GTTITSMSVS

SEQ ID NO: 10448 - protein, 10 aa, Artificial Sequence
  Description of Artificial Sequence: Synthetic epitope
GTTLLSSEVQ

SEQ ID NO: 10449 - protein, 10 aa, Artificial Sequence
  Description of Artificial Sequence: Synthetic epitope
GTTLNAQPAA

SEQ ID NO: 10450 - protein, 10 aa, Artificial Sequence
  Description of Artificial Sequence: Synthetic epitope
GTTQNSLTEA

SEQ ID NO: 10451 - protein, 10 aa, Artificial Sequence
  Description of Artificial Sequence: Synthetic epitope
GTTSAKQPTQ

SEQ ID NO: 10452 - protein, 10 aa, Artificial Sequence
  Description of Artificial Sequence: Synthetic epitope
GTVAETSKEK

SEQ ID NO: 10453 - protein, 10 aa, Artificial Sequence
  Description of Artificial Sequence: Synthetic epitope
GTVQMLTIIE

SEQ ID NO: 10454 - protein, 10 aa, Artificial Sequence
  Description of Artificial Sequence: Synthetic epitope
GTVSATSPNK

SEQ ID NO: 10455 - protein, 10 aa, Artificial Sequence
  Description of Artificial Sequence: Synthetic epitope
GTVTLREDSA

SEQ ID NO: 10456 - protein, 10 aa, Artificial Sequence
  Description of Artificial Sequence: Synthetic epitope
GVASDVVRKV

SEQ ID NO: 10457 - protein, 10 aa, Artificial Sequence
  Description of Artificial Sequence: Synthetic epitope
GVDISATKAV

SEQ ID NO: 10458 - protein, 10 aa, Artificial Sequence
  Description of Artificial Sequence: Synthetic epitope
GVEPYISSNS

SEQ ID NO: 10459 - protein, 10 aa, Artificial Sequence
  Description of Artificial Sequence: Synthetic epitope
GVERIMKKTE

SEQ ID NO: 10460 - protein, 10 aa, Artificial Sequence
  Description of Artificial Sequence: Synthetic epitope
GVETGETKKE

SEQ ID NO: 10461 - protein, 10 aa, Artificial Sequence
  Description of Artificial Sequence: Synthetic epitope
GVEVSDSSVN

SEQ ID NO: 10462 - protein, 10 aa, Artificial Sequence
  Description of Artificial Sequence: Synthetic epitope
GVGDQALIDQ

SEQ ID NO: 10463 - protein, 10 aa, Artificial Sequence
  Description of Artificial Sequence: Synthetic epitope
GVGTSNFEPQ

SEQ ID NO: 10464 - protein, 10 aa, Artificial Sequence
  Description of Artificial Sequence: Synthetic epitope
GVGYFNSIGT

SEQ ID NO: 10465 - protein, 10 aa, Artificial Sequence
  Description of Artificial Sequence: Synthetic epitope
GVKIQTNESH

SEQ ID NO: 10466 - protein, 10 aa, Artificial Sequence
  Description of Artificial Sequence: Synthetic epitope
GVKRNAKKQE

SEQ ID NO: 10467 - protein, 10 aa, Artificial Sequence
  Description of Artificial Sequence: Synthetic epitope
GVKSQEASQT

SEQ ID NO: 10468 - protein, 10 aa, Artificial Sequence
  Description of Artificial Sequence: Synthetic epitope
GVKTSMGDRD

SEQ ID NO: 10469 - protein, 10 aa, Artificial Sequence
  Description of Artificial Sequence: Synthetic epitope
GVKVETTEDL

SEQ ID NO: 10470 - protein, 10 aa, Artificial Sequence
  Description of Artificial Sequence: Synthetic epitope
GVKVLKQELG

SEQ ID NO: 10471 - protein, 10 aa, Artificial Sequence
  Description of Artificial Sequence: Synthetic epitope
GVKVQQATIA

SEQ ID NO: 10472 - protein, 10 aa, Artificial Sequence
  Description of Artificial Sequence: Synthetic epitope
GVKVVKALKR

SEQ ID NO: 10473 - protein, 10 aa, Artificial Sequence
  Description of Artificial Sequence: Synthetic epitope
GVMTLSQVKG

SEQ ID NO: 10474 - protein, 10 aa, Artificial Sequence
  Description of Artificial Sequence: Synthetic epitope
GVNASAVVNV

SEQ ID NO: 10475 - protein, 10 aa, Artificial Sequence
  Description of Artificial Sequence: Synthetic epitope
GVNSAASSPE

SEQ ID NO: 10476 - protein, 10 aa, Artificial Sequence
  Description of Artificial Sequence: Synthetic epitope
GVNSSTSPQS

SEQ ID NO: 10477 - protein, 10 aa, Artificial Sequence
  Description of Artificial Sequence: Synthetic epitope
GVQPSKTEQQ

SEQ ID NO: 10478 - protein, 10 aa, Artificial Sequence
  Description of Artificial Sequence: Synthetic epitope
GVQQDASSAD

SEQ ID NO: 10479 - protein, 10 aa, Artificial Sequence
  Description of Artificial Sequence: Synthetic epitope
GVQRKRADKY

SEQ ID NO: 10480 - protein, 10 aa, Artificial Sequence
  Description of Artificial Sequence: Synthetic epitope
GVQTSSKKSL

SEQ ID NO: 10481 - protein, 10 aa, Artificial Sequence
  Description of Artificial Sequence: Synthetic epitope
GVRPKNQPIA

SEQ ID NO: 10482 - protein, 10 aa, Artificial Sequence
  Description of Artificial Sequence: Synthetic epitope
GVRTSVSVII

SEQ ID NO: 10483 - protein, 10 aa, Artificial Sequence
  Description of Artificial Sequence: Synthetic epitope
GVSAQKLVFI

SEQ ID NO: 10484 - protein, 10 aa, Artificial Sequence
  Description of Artificial Sequence: Synthetic epitope
GVSATGVENP

SEQ ID NO: 10485 - protein, 10 aa, Artificial Sequence
  Description of Artificial Sequence: Synthetic epitope
GVSGFQTTEH

SEQ ID NO: 10486 - protein, 10 aa, Artificial Sequence
  Description of Artificial Sequence: Synthetic epitope
GVSKTASSRE

SEQ ID NO: 10487 - protein, 10 aa, Artificial Sequence
  Description of Artificial Sequence: Synthetic epitope
GVSLSSVASE

SEQ ID NO: 10488 - protein, 10 aa, Artificial Sequence
  Description of Artificial Sequence: Synthetic epitope
GVSRTASQAD

SEQ ID NO: 10489 - protein, 10 aa, Artificial Sequence
  Description of Artificial Sequence: Synthetic epitope
GVSSAEQLIE

SEQ ID NO: 10490 - protein, 10 aa, Artificial Sequence
  Description of Artificial Sequence: Synthetic epitope
GVSSEGSVGA

SEQ ID NO: 10491 - protein, 10 aa, Artificial Sequence
  Description of Artificial Sequence: Synthetic epitope
GVSSEHVSGH

SEQ ID NO: 10492 - protein, 10 aa, Artificial Sequence
  Description of Artificial Sequence: Synthetic epitope
GVSSTIKGAP

SEQ ID NO: 10493 - protein, 10 aa, Artificial Sequence
  Description of Artificial Sequence: Synthetic epitope
GVSVTSSNTG

SEQ ID NO: 10494 - protein, 10 aa, Artificial Sequence
  Description of Artificial Sequence: Synthetic epitope
GVVESAALVV

SEQ ID NO: 10495 - protein, 10 aa, Artificial Sequence
  Description of Artificial Sequence: Synthetic epitope
GVVNVKKVLQ

SEQ ID NO: 10496 - protein, 10 aa, Artificial Sequence
  Description of Artificial Sequence: Synthetic epitope
GWDHISVRAN

SEQ ID NO: 10497 - protein, 10 aa, Artificial Sequence
  Description of Artificial Sequence: Synthetic epitope
GWDLASDQSS

SEQ ID NO: 10498 - protein, 10 aa, Artificial Sequence
  Description of Artificial Sequence: Synthetic epitope
GWDMTMVTHD

SEQ ID NO: 10499 - protein, 10 aa, Artificial Sequence
  Description of Artificial Sequence: Synthetic epitope
GWEGGTTAEG

SEQ ID NO: 10500 - protein, 10 aa, Artificial Sequence
  Description of Artificial Sequence: Synthetic epitope
GWERLEQRAA

SEQ ID NO: 10501 - protein, 10 aa, Artificial Sequence
  Description of Artificial Sequence: Synthetic epitope
GWILEIMSSQ

SEQ ID NO: 10502 - protein, 10 aa, Artificial Sequence
  Description of Artificial Sequence: Synthetic epitope
GWKADLRNPQ

SEQ ID NO: 10503 - protein, 10 aa, Artificial Sequence
  Description of Artificial Sequence: Synthetic epitope
GWPEVVEMEG

SEQ ID NO: 10504 - protein, 10 aa, Artificial Sequence
  Description of Artificial Sequence: Synthetic epitope
GWRAINPSMA

SEQ ID NO: 10505 - protein, 10 aa, Artificial Sequence
  Description of Artificial Sequence: Synthetic epitope
GYDLKIGLSL

SEQ ID NO: 10506 - protein, 10 aa, Artificial Sequence
  Description of Artificial Sequence: Synthetic epitope
GYDQAESEVE

SEQ ID NO: 10507 - protein, 10 aa, Artificial Sequence
  Description of Artificial Sequence: Synthetic epitope
GYFSSVKMPS

SEQ ID NO: 10508 - protein, 10 aa, Artificial Sequence
  Description of Artificial Sequence: Synthetic epitope
GYGASVEAAG

SEQ ID NO: 10509 - protein, 10 aa, Artificial Sequence
  Description of Artificial Sequence: Synthetic epitope
GYKLVELEPK

SEQ ID NO: 10510 - protein, 10 aa, Artificial Sequence
  Description of Artificial Sequence: Synthetic epitope
GYKQEQSSAE

SEQ ID NO: 10511 - protein, 10 aa, Artificial Sequence
  Description of Artificial Sequence: Synthetic epitope
GYLAKKLHSP

SEQ ID NO: 10512 - protein, 10 aa, Artificial Sequence
  Description of Artificial Sequence: Synthetic epitope
GYLASTATND

SEQ ID NO: 10513 - protein, 10 aa, Artificial Sequence
  Description of Artificial Sequence: Synthetic epitope
GYLSTNTQQF

SEQ ID NO: 10514 - protein, 10 aa, Artificial Sequence
  Description of Artificial Sequence: Synthetic epitope
GYNLATKQTP

SEQ ID NO: 10515 - protein, 10 aa, Artificial Sequence
  Description of Artificial Sequence: Synthetic epitope
GYRVMSKTKI

SEQ ID NO: 10516 - protein, 10 aa, Artificial Sequence
  Description of Artificial Sequence: Synthetic epitope
GYSKKDSRQK

SEQ ID NO: 10517 - protein, 10 aa, Artificial Sequence
  Description of Artificial Sequence: Synthetic epitope
GYTASQPLYQ

SEQ ID NO: 10518 - protein, 10 aa, Artificial Sequence
  Description of Artificial Sequence: Synthetic epitope
GYTKDDKHEQ

SEQ ID NO: 10519 - protein, 10 aa, Artificial Sequence
  Description of Artificial Sequence: Synthetic epitope
GYYLTSAQER

SEQ ID NO: 10520 - protein, 10 aa, Artificial Sequence
  Description of Artificial Sequence: Synthetic epitope
HAAEQESLKR

SEQ ID NO: 10521 - protein, 10 aa, Artificial Sequence
  Description of Artificial Sequence: Synthetic epitope
HAAPHQAVAE

SEQ ID NO: 10522 - protein, 10 aa, Artificial Sequence
  Description of Artificial Sequence: Synthetic epitope
HAARSMQPVH

SEQ ID NO: 10523 - protein, 10 aa, Artificial Sequence
  Description of Artificial Sequence: Synthetic epitope
HAASKQKYLE

SEQ ID NO: 10524 - protein, 10 aa, Artificial Sequence
  Description of Artificial Sequence: Synthetic epitope
HAASQAATQR

SEQ ID NO: 10525 - protein, 10 aa, Artificial Sequence
  Description of Artificial Sequence: Synthetic epitope
HADQAVLDER

SEQ ID NO: 10526 - protein, 10 aa, Artificial Sequence
  Description of Artificial Sequence: Synthetic epitope
HAEKQRTLSK

SEQ ID NO: 10527 - protein, 10 aa, Artificial Sequence
  Description of Artificial Sequence: Synthetic epitope
HAERSAAQLS

SEQ ID NO: 10528 - protein, 10 aa, Artificial Sequence
  Description of Artificial Sequence: Synthetic epitope
HAHKATEALK

SEQ ID NO: 10529 - protein, 10 aa, Artificial Sequence
  Description of Artificial Sequence: Synthetic epitope
HAHKELSGQG

SEQ ID NO: 10530 - protein, 10 aa, Artificial Sequence
  Description of Artificial Sequence: Synthetic epitope
HAIEGNKKSS

SEQ ID NO: 10531 - protein, 10 aa, Artificial Sequence
  Description of Artificial Sequence: Synthetic epitope
HAIIERTASF

SEQ ID NO: 10532 - protein, 10 aa, Artificial Sequence
  Description of Artificial Sequence: Synthetic epitope
HAIILLEKHL

SEQ ID NO: 10533 - protein, 10 aa, Artificial Sequence
  Description of Artificial Sequence: Synthetic epitope
HAIPIETAKQ

SEQ ID NO: 10534 - protein, 10 aa, Artificial Sequence
  Description of Artificial Sequence: Synthetic epitope
HAKNAVSSED

SEQ ID NO: 10535 - protein, 10 aa, Artificial Sequence
  Description of Artificial Sequence: Synthetic epitope
HALEVLNLSN

SEQ ID NO: 10536 - protein, 10 aa, Artificial Sequence
  Description of Artificial Sequence: Synthetic epitope
HALQASELVV

SEQ ID NO: 10537 - protein, 10 aa, Artificial Sequence
  Description of Artificial Sequence: Synthetic epitope
HALQNYSQAV

SEQ ID NO: 10538 - protein, 10 aa, Artificial Sequence
  Description of Artificial Sequence: Synthetic epitope
HALRTATILK

SEQ ID NO: 10539 - protein, 10 aa, Artificial Sequence
  Description of Artificial Sequence: Synthetic epitope
HALSEAAEVY

SEQ ID NO: 10540 - protein, 10 aa, Artificial Sequence
  Description of Artificial Sequence: Synthetic epitope
HAMAAMPSSQ

SEQ ID NO: 10541 - protein, 10 aa, Artificial Sequence
  Description of Artificial Sequence: Synthetic epitope
HANEAAFPFY

SEQ ID NO: 10542 - protein, 10 aa, Artificial Sequence
  Description of Artificial Sequence: Synthetic epitope
HAPKASINGA

SEQ ID NO: 10543 - protein, 10 aa, Artificial Sequence
  Description of Artificial Sequence: Synthetic epitope
HAQLENKEKT

SEQ ID NO: 10544 - protein, 10 aa, Artificial Sequence
  Description of Artificial Sequence: Synthetic epitope
HAQNQLTEEQ

SEQ ID NO: 10545 - protein, 10 aa, Artificial Sequence
  Description of Artificial Sequence: Synthetic epitope
HAQVSITNEI

SEQ ID NO: 10546 - protein, 10 aa, Artificial Sequence
  Description of Artificial Sequence: Synthetic epitope
HARELPKKRN

SEQ ID NO: 10547 - protein, 10 aa, Artificial Sequence
  Description of Artificial Sequence: Synthetic epitope
HARIIVRHMA

SEQ ID NO: 10548 - protein, 10 aa, Artificial Sequence
  Description of Artificial Sequence: Synthetic epitope
HASASASLPT

SEQ ID NO: 10549 - protein, 10 aa, Artificial Sequence
  Description of Artificial Sequence: Synthetic epitope
HASAVASKED

SEQ ID NO: 10550 - protein, 10 aa, Artificial Sequence
  Description of Artificial Sequence: Synthetic epitope
HASIREKAGH

SEQ ID NO: 10551 - protein, 10 aa, Artificial Sequence
  Description of Artificial Sequence: Synthetic epitope
HASKLSIDEE

SEQ ID NO: 10552 - protein, 10 aa, Artificial Sequence
  Description of Artificial Sequence: Synthetic epitope
HASKMSSYLP

SEQ ID NO: 10553 - protein, 10 aa, Artificial Sequence
  Description of Artificial Sequence: Synthetic epitope
HASLSGILRQ

SEQ ID NO: 10554 - protein, 10 aa, Artificial Sequence
  Description of Artificial Sequence: Synthetic epitope
HASSAIVSLA

SEQ ID NO: 10555 - protein, 10 aa, Artificial Sequence
  Description of Artificial Sequence: Synthetic epitope
HASYSSTTSD

SEQ ID NO: 10556 - protein, 10 aa, Artificial Sequence
  Description of Artificial Sequence: Synthetic epitope
HATAQLSLEH

SEQ ID NO: 10557 - protein, 10 aa, Artificial Sequence
  Description of Artificial Sequence: Synthetic epitope
HATEQEKTEE

SEQ ID NO: 10558 - protein, 10 aa, Artificial Sequence
  Description of Artificial Sequence: Synthetic epitope
HATGMTLAFP

SEQ ID NO: 10559 - protein, 10 aa, Artificial Sequence
  Description of Artificial Sequence: Synthetic epitope
HATSQTLLAK

SEQ ID NO: 10560 - protein, 10 aa, Artificial Sequence
  Description of Artificial Sequence: Synthetic epitope
HATTFRRGFQ

SEQ ID NO: 10561 - protein, 10 aa, Artificial Sequence
  Description of Artificial Sequence: Synthetic epitope
HATTVAVAHG

SEQ ID NO: 10562 - protein, 10 aa, Artificial Sequence
  Description of Artificial Sequence: Synthetic epitope
HAVLKALNAT

SEQ ID NO: 10563 - protein, 10 aa, Artificial Sequence
  Description of Artificial Sequence: Synthetic epitope
HAVQDKKPKE

SEQ ID NO: 10564 - protein, 10 aa, Artificial Sequence
  Description of Artificial Sequence: Synthetic epitope
HAVVQASKLP

SEQ ID NO: 10565 - protein, 10 aa, Artificial Sequence
  Description of Artificial Sequence: Synthetic epitope
HDALRLAYQT

SEQ ID NO: 10566 - protein, 10 aa, Artificial Sequence
  Description of Artificial Sequence: Synthetic epitope
HDASSAEETI

SEQ ID NO: 10567 - protein, 10 aa, Artificial Sequence
  Description of Artificial Sequence: Synthetic epitope
HDDESTINSS

SEQ ID NO: 10568 - protein, 10 aa, Artificial Sequence
  Description of Artificial Sequence: Synthetic epitope
HDDKVVTTER

SEQ ID NO: 10569 - protein, 10 aa, Artificial Sequence
  Description of Artificial Sequence: Synthetic epitope
HDKFVQMANL

SEQ ID NO: 10570 - protein, 10 aa, Artificial Sequence
  Description of Artificial Sequence: Synthetic epitope
HDKSRTDLEQ

SEQ ID NO: 10571 - protein, 10 aa, Artificial Sequence
  Description of Artificial Sequence: Synthetic epitope
HDKYNIRSHG

SEQ ID NO: 10572 - protein, 10 aa, Artificial Sequence
  Description of Artificial Sequence: Synthetic epitope
HDLAELPVSS

SEQ ID NO: 10573 - protein, 10 aa, Artificial Sequence
  Description of Artificial Sequence: Synthetic epitope
HDLASQAATI

SEQ ID NO: 10574 - protein, 10 aa, Artificial Sequence
  Description of Artificial Sequence: Synthetic epitope
HDLKMNSGAK

SEQ ID NO: 10575 - protein, 10 aa, Artificial Sequence
  Description of Artificial Sequence: Synthetic epitope
HDMVATHSTV

SEQ ID NO: 10576 - protein, 10 aa, Artificial Sequence
  Description of Artificial Sequence: Synthetic epitope
HDNEDLLASR

SEQ ID NO: 10577 - protein, 10 aa, Artificial Sequence
  Description of Artificial Sequence: Synthetic epitope
HDNEPSESQE

SEQ ID NO: 10578 - protein, 10 aa, Artificial Sequence
  Description of Artificial Sequence: Synthetic epitope
HDNIQTIQHQ

SEQ ID NO: 10579 - protein, 10 aa, Artificial Sequence
  Description of Artificial Sequence: Synthetic epitope
HDNISLKRVS

SEQ ID NO: 10580 - protein, 10 aa, Artificial Sequence
  Description of Artificial Sequence: Synthetic epitope
HDNLNAEAQG

SEQ ID NO: 10581 - protein, 10 aa, Artificial Sequence
  Description of Artificial Sequence: Synthetic epitope
HDNLSSNDTK

SEQ ID NO: 10582 - protein, 10 aa, Artificial Sequence
  Description of Artificial Sequence: Synthetic epitope
HDNVDAEFVE

SEQ ID NO: 10583 - protein, 10 aa, Artificial Sequence
  Description of Artificial Sequence: Synthetic epitope
HDPMTLDMDA

SEQ ID NO: 10584 - protein, 10 aa, Artificial Sequence
  Description of Artificial Sequence: Synthetic epitope
HDQKETSELY

SEQ ID NO: 10585 - protein, 10 aa, Artificial Sequence
  Description of Artificial Sequence: Synthetic epitope
HDRNTASHTA

SEQ ID NO: 10586 - protein, 10 aa, Artificial Sequence
  Description of Artificial Sequence: Synthetic epitope
HDSAVVAPVK

SEQ ID NO: 10587 - protein, 10 aa, Artificial Sequence
  Description of Artificial Sequence: Synthetic epitope
HDSNSQASDS

SEQ ID NO: 10588 - protein, 10 aa, Artificial Sequence
  Description of Artificial Sequence: Synthetic epitope
HDSRSQRAAS

SEQ ID NO: 10589 - protein, 10 aa, Artificial Sequence
  Description of Artificial Sequence: Synthetic epitope
HDTPQMSSMD

SEQ ID NO: 10590 - protein, 10 aa, Artificial Sequence
  Description of Artificial Sequence: Synthetic epitope
HDVQAEMESK

SEQ ID NO: 10591 - protein, 10 aa, Artificial Sequence
  Description of Artificial Sequence: Synthetic epitope
HEAKAVRAHM

SEQ ID NO: 10592 - protein, 10 aa, Artificial Sequence
  Description of Artificial Sequence: Synthetic epitope
HEAKKALAGQ

SEQ ID NO: 10593 - protein, 10 aa, Artificial Sequence
  Description of Artificial Sequence: Synthetic epitope
HEAKQRSVQR

SEQ ID NO: 10594 - protein, 10 aa, Artificial Sequence
  Description of Artificial Sequence: Synthetic epitope
HEALEAADHL

SEQ ID NO: 10595 - protein, 10 aa, Artificial Sequence
  Description of Artificial Sequence: Synthetic epitope
HEAPIAKKEI

SEQ ID NO: 10596 - protein, 10 aa, Artificial Sequence
  Description of Artificial Sequence: Synthetic epitope
HEASGVTVKN

SEQ ID NO: 10597 - protein, 10 aa, Artificial Sequence
  Description of Artificial Sequence: Synthetic epitope
HEASLKRKAE

SEQ ID NO: 10598 - protein, 10 aa, Artificial Sequence
  Description of Artificial Sequence: Synthetic epitope
HEDTKEINEK

SEQ ID NO: 10599 - protein, 10 aa, Artificial Sequence
  Description of Artificial Sequence: Synthetic epitope
HEEMKNQIIA

SEQ ID NO: 10600 - protein, 10 aa, Artificial Sequence
  Description of Artificial Sequence: Synthetic epitope
HEETEREPAN

SEQ ID NO: 10601 - protein, 10 aa, Artificial Sequence
  Description of Artificial Sequence: Synthetic epitope
HEEYTRQTAA

SEQ ID NO: 10602 - protein, 10 aa, Artificial Sequence
  Description of Artificial Sequence: Synthetic epitope
HEFRLQADNM

SEQ ID NO: 10603 - protein, 10 aa, Artificial Sequence
  Description of Artificial Sequence: Synthetic epitope
HEGLVLTKLL

SEQ ID NO: 10604 - protein, 10 aa, Artificial Sequence
  Description of Artificial Sequence: Synthetic epitope
HEHAPAHSNP

SEQ ID NO: 10605 - protein, 10 aa, Artificial Sequence
  Description of Artificial Sequence: Synthetic epitope
HEIEVETIPV

SEQ ID NO: 10606 - protein, 10 aa, Artificial Sequence
  Description of Artificial Sequence: Synthetic epitope
HEIGEKQGRS

SEQ ID NO: 10607 - protein, 10 aa, Artificial Sequence
  Description of Artificial Sequence: Synthetic epitope
HEIGLELKTT

SEQ ID NO: 10608 - protein, 10 aa, Artificial Sequence
  Description of Artificial Sequence: Synthetic epitope
HEKEEFKALK

SEQ ID NO: 10609 - protein, 10 aa, Artificial Sequence
  Description of Artificial Sequence: Synthetic epitope
HEKTSAEVFQ

SEQ ID NO: 10610 - protein, 10 aa, Artificial Sequence
  Description of Artificial Sequence: Synthetic epitope
HEKVTEALQL

SEQ ID NO: 10611 - protein, 10 aa, Artificial Sequence
  Description of Artificial Sequence: Synthetic epitope
HELIEYVIAK

SEQ ID NO: 10612 - protein, 10 aa, Artificial Sequence
  Description of Artificial Sequence: Synthetic epitope
HELKQAKVST

SEQ ID NO: 10613 - protein, 10 aa, Artificial Sequence
  Description of Artificial Sequence: Synthetic epitope
HELMNKEDQL

SEQ ID NO: 10614 - protein, 10 aa, Artificial Sequence
  Description of Artificial Sequence: Synthetic epitope
HELNEVKERA

SEQ ID NO: 10615 - protein, 10 aa, Artificial Sequence
  Description of Artificial Sequence: Synthetic epitope
HELQDTTGDI

SEQ ID NO: 10616 - protein, 10 aa, Artificial Sequence
  Description of Artificial Sequence: Synthetic epitope
HELSSEPKRS

SEQ ID NO: 10617 - protein, 10 aa, Artificial Sequence
  Description of Artificial Sequence: Synthetic epitope
HELSSILPIK

SEQ ID NO: 10618 - protein, 10 aa, Artificial Sequence
  Description of Artificial Sequence: Synthetic epitope
HEMESMLAKD

SEQ ID NO: 10619 - protein, 10 aa, Artificial Sequence
  Description of Artificial Sequence: Synthetic epitope
HENQLQMATS

SEQ ID NO: 10620 - protein, 10 aa, Artificial Sequence
  Description of Artificial Sequence: Synthetic epitope
HEQAESSRDL

SEQ ID NO: 10621 - protein, 10 aa, Artificial Sequence
  Description of Artificial Sequence: Synthetic epitope
HEQANVESLK

SEQ ID NO: 10622 - protein, 10 aa, Artificial Sequence
  Description of Artificial Sequence: Synthetic epitope
HEQIKSLERA

SEQ ID NO: 10623 - protein, 10 aa, Artificial Sequence
  Description of Artificial Sequence: Synthetic epitope
HEQKGRHQHG

SEQ ID NO: 10624 - protein, 10 aa, Artificial Sequence
  Description of Artificial Sequence: Synthetic epitope
HEQKLKKEDQ

SEQ ID NO: 10625 - protein, 10 aa, Artificial Sequence
  Description of Artificial Sequence: Synthetic epitope
HEQLSALKGS

SEQ ID NO: 10626 - protein, 10 aa, Artificial Sequence
  Description of Artificial Sequence: Synthetic epitope
HEQQLSLNQH

SEQ ID NO: 10627 - protein, 10 aa, Artificial Sequence
  Description of Artificial Sequence: Synthetic epitope
HERARLRSTR

SEQ ID NO: 10628 - protein, 10 aa, Artificial Sequence
  Description of Artificial Sequence: Synthetic epitope
HERKLVTKLQ

SEQ ID NO: 10629 - protein, 10 aa, Artificial Sequence
  Description of Artificial Sequence: Synthetic epitope
HERQSAEYEA

SEQ ID NO: 10630 - protein, 10 aa, Artificial Sequence
  Description of Artificial Sequence: Synthetic epitope
HESEGSFSMN

SEQ ID NO: 10631 - protein, 10 aa, Artificial Sequence
  Description of Artificial Sequence: Synthetic epitope
HESLRPAAGQ

SEQ ID NO: 10632 - protein, 10 aa, Artificial Sequence
  Description of Artificial Sequence: Synthetic epitope
HESNSSLHHV

SEQ ID NO: 10633 - protein, 10 aa, Artificial Sequence
  Description of Artificial Sequence: Synthetic epitope
HESVISESSA

SEQ ID NO: 10634 - protein, 10 aa, Artificial Sequence
  Description of Artificial Sequence: Synthetic epitope
HETNEHTLPK

SEQ ID NO: 10635 - protein, 10 aa, Artificial Sequence
  Description of Artificial Sequence: Synthetic epitope
HETNEIADQV

SEQ ID NO: 10636 - protein, 10 aa, Artificial Sequence
  Description of Artificial Sequence: Synthetic epitope
HEVMAVENYA

SEQ ID NO: 10637 - protein, 10 aa, Artificial Sequence
  Description of Artificial Sequence: Synthetic epitope
HEVTTVGTAE

SEQ ID NO: 10638 - protein, 10 aa, Artificial Sequence
  Description of Artificial Sequence: Synthetic epitope
HEVVSETAAG

SEQ ID NO: 10639 - protein, 10 aa, Artificial Sequence
  Description of Artificial Sequence: Synthetic epitope
HEWEIANNTF

SEQ ID NO: 10640 - protein, 10 aa, Artificial Sequence
  Description of Artificial Sequence: Synthetic epitope
HEYYHTHIPN

SEQ ID NO: 10641 - protein, 10 aa, Artificial Sequence
  Description of Artificial Sequence: Synthetic epitope
HFANPTEALD

SEQ ID NO: 10642 - protein, 10 aa, Artificial Sequence
  Description of Artificial Sequence: Synthetic epitope
HFDNYTHEDT

SEQ ID NO: 10643 - protein, 10 aa, Artificial Sequence
  Description of Artificial Sequence: Synthetic epitope
HFEQQTLYHQ

SEQ ID NO: 10644 - protein, 10 aa, Artificial Sequence
  Description of Artificial Sequence: Synthetic epitope
HFISSESVRD

SEQ ID NO: 10645 - protein, 10 aa, Artificial Sequence
  Description of Artificial Sequence: Synthetic epitope
HFPTAMTSAT

SEQ ID NO: 10646 - protein, 10 aa, Artificial Sequence
  Description of Artificial Sequence: Synthetic epitope
HFTSSADKLT

SEQ ID NO: 10647 - protein, 10 aa, Artificial Sequence
  Description of Artificial Sequence: Synthetic epitope
HGARSLSMEE

SEQ ID NO: 10648 - protein, 10 aa, Artificial Sequence
  Description of Artificial Sequence: Synthetic epitope
HGESSKAVHK

SEQ ID NO: 10649 - protein, 10 aa, Artificial Sequence
  Description of Artificial Sequence: Synthetic epitope
HGFNAITQTI

SEQ ID NO: 10650 - protein, 10 aa, Artificial Sequence
  Description of Artificial Sequence: Synthetic epitope
HGGQASLMKI

SEQ ID NO: 10651 - protein, 10 aa, Artificial Sequence
  Description of Artificial Sequence: Synthetic epitope
HGIKIVIQLK

SEQ ID NO: 10652 - protein, 10 aa, Artificial Sequence
  Description of Artificial Sequence: Synthetic epitope
HGIQRKTDEE

SEQ ID NO: 10653 - protein, 10 aa, Artificial Sequence
  Description of Artificial Sequence: Synthetic epitope
HGIVGTIVKA

SEQ ID NO: 10654 - protein, 10 aa, Artificial Sequence
  Description of Artificial Sequence: Synthetic epitope
HGKEISESEH

SEQ ID NO: 10655 - protein, 10 aa, Artificial Sequence
  Description of Artificial Sequence: Synthetic epitope
HGKEMSKIAR

SEQ ID NO: 10656 - protein, 10 aa, Artificial Sequence
  Description of Artificial Sequence: Synthetic epitope
HGKKPVKENQ

SEQ ID NO: 10657 - protein, 10 aa, Artificial Sequence
  Description of Artificial Sequence: Synthetic epitope
HGKRVTTSSN

SEQ ID NO: 10658 - protein, 10 aa, Artificial Sequence
  Description of Artificial Sequence: Synthetic epitope
HGKTDEIIMK

SEQ ID NO: 10659 - protein, 10 aa, Artificial Sequence
  Description of Artificial Sequence: Synthetic epitope
HGKVEMLLYA

SEQ ID NO: 10660 - protein, 10 aa, Artificial Sequence
  Description of Artificial Sequence: Synthetic epitope
HGLKLVKTKK

SEQ ID NO: 10661 - protein, 10 aa, Artificial Sequence
  Description of Artificial Sequence: Synthetic epitope
HGLNLDDGKE

SEQ ID NO: 10662 - protein, 10 aa, Artificial Sequence
  Description of Artificial Sequence: Synthetic epitope
HGMTLKSVTE

SEQ ID NO: 10663 - protein, 10 aa, Artificial Sequence
  Description of Artificial Sequence: Synthetic epitope
HGNKSLNTEE

SEQ ID NO: 10664 - protein, 10 aa, Artificial Sequence
  Description of Artificial Sequence: Synthetic epitope
HGNRNKKEKS

SEQ ID NO: 10665 - protein, 10 aa, Artificial Sequence
  Description of Artificial Sequence: Synthetic epitope
HGPLLKDQDE

SEQ ID NO: 10666 - protein, 10 aa, Artificial Sequence
  Description of Artificial Sequence: Synthetic epitope
HGQDQNPNHH

SEQ ID NO: 10667 - protein, 10 aa, Artificial Sequence
  Description of Artificial Sequence: Synthetic epitope
HGQELLSDTK

SEQ ID NO: 10668 - protein, 10 aa, Artificial Sequence
  Description of Artificial Sequence: Synthetic epitope
HGRGGISGYT

SEQ ID NO: 10669 - protein, 10 aa, Artificial Sequence
  Description of Artificial Sequence: Synthetic epitope
HGRMLAIKAS

SEQ ID NO: 10670 - protein, 10 aa, Artificial Sequence
  Description of Artificial Sequence: Synthetic epitope
HGSKSHSTEQ

SEQ ID NO: 10671 - protein, 10 aa, Artificial Sequence
  Description of Artificial Sequence: Synthetic epitope
HGTKLNVSTE

SEQ ID NO: 10672 - protein, 10 aa, Artificial Sequence
  Description of Artificial Sequence: Synthetic epitope
HGVIISSTVD

SEQ ID NO: 10673 - protein, 10 aa, Artificial Sequence
  Description of Artificial Sequence: Synthetic epitope
HGVRIDTSHR

SEQ ID NO: 10674 - protein, 10 aa, Artificial Sequence
  Description of Artificial Sequence: Synthetic epitope
HGYTLSNSKG

SEQ ID NO: 10675 - protein, 10 aa, Artificial Sequence
  Description of Artificial Sequence: Synthetic epitope
HHAANSVKRV

SEQ ID NO: 10676 - protein, 10 aa, Artificial Sequence
  Description of Artificial Sequence: Synthetic epitope
HHAQTSKTER

SEQ ID NO: 10677 - protein, 10 aa, Artificial Sequence
  Description of Artificial Sequence: Synthetic epitope
HHDERLNATH

SEQ ID NO: 10678 - protein, 10 aa, Artificial Sequence
  Description of Artificial Sequence: Synthetic epitope
HHGAIISPAG

SEQ ID NO: 10679 - protein, 10 aa, Artificial Sequence
  Description of Artificial Sequence: Synthetic epitope
HHGTAQLQAL

SEQ ID NO: 10680 - protein, 10 aa, Artificial Sequence
  Description of Artificial Sequence: Synthetic epitope
HHIASDIASD

SEQ ID NO: 10681 - protein, 10 aa, Artificial Sequence
  Description of Artificial Sequence: Synthetic epitope
HHIVSIEVQR

SEQ ID NO: 10682 - protein, 10 aa, Artificial Sequence
  Description of Artificial Sequence: Synthetic epitope
HHKHDKRKRQ

SEQ ID NO: 10683 - protein, 10 aa, Artificial Sequence
  Description of Artificial Sequence: Synthetic epitope
HHKNEESWHD

SEQ ID NO: 10684 - protein, 10 aa, Artificial Sequence
  Description of Artificial Sequence: Synthetic epitope
HHKQESIMDA

SEQ ID NO: 10685 - protein, 10 aa, Artificial Sequence
  Description of Artificial Sequence: Synthetic epitope
HHKRNEEAQD

SEQ ID NO: 10686 - protein, 10 aa, Artificial Sequence
  Description of Artificial Sequence: Synthetic epitope
HHNPSKFGIQ

SEQ ID NO: 10687 - protein, 10 aa, Artificial Sequence
  Description of Artificial Sequence: Synthetic epitope
HHNSALVIHK

SEQ ID NO: 10688 - protein, 10 aa, Artificial Sequence
  Description of Artificial Sequence: Synthetic epitope
HHNVAKKPLE

SEQ ID NO: 10689 - protein, 10 aa, Artificial Sequence
  Description of Artificial Sequence: Synthetic epitope
HHPSTNQNQT

SEQ ID NO: 10690 - protein, 10 aa, Artificial Sequence
  Description of Artificial Sequence: Synthetic epitope
HHQGLSRSEL

SEQ ID NO: 10691 - protein, 10 aa, Artificial Sequence
  Description of Artificial Sequence: Synthetic epitope
HHRSMESANI

SEQ ID NO: 10692 - protein, 10 aa, Artificial Sequence
  Description of Artificial Sequence: Synthetic epitope
HHSAHSSQLD

SEQ ID NO: 10693 - protein, 10 aa, Artificial Sequence
  Description of Artificial Sequence: Synthetic epitope
HHSLASSLRS

SEQ ID NO: 10694 - protein, 10 aa, Artificial Sequence
  Description of Artificial Sequence: Synthetic epitope
HHSSTSNQET

SEQ ID NO: 10695 - protein, 10 aa, Artificial Sequence
  Description of Artificial Sequence: Synthetic epitope
HHSYDHVIYS

SEQ ID NO: 10696 - protein, 10 aa, Artificial Sequence
  Description of Artificial Sequence: Synthetic epitope
HHTVQNMRAT

SEQ ID NO: 10697 - protein, 10 aa, Artificial Sequence
  Description of Artificial Sequence: Synthetic epitope
HHVADAYTSS

SEQ ID NO: 10698 - protein, 10 aa, Artificial Sequence
  Description of Artificial Sequence: Synthetic epitope
HIAQEAIQAQ

SEQ ID NO: 10699 - protein, 10 aa, Artificial Sequence
  Description of Artificial Sequence: Synthetic epitope
HIELKQRPPE

SEQ ID NO: 10700 - protein, 10 aa, Artificial Sequence
  Description of Artificial Sequence: Synthetic epitope
HIFDKLHTSP

SEQ ID NO: 10701 - protein, 10 aa, Artificial Sequence
  Description of Artificial Sequence: Synthetic epitope
HIHIKFRKAL

SEQ ID NO: 10702 - protein, 10 aa, Artificial Sequence
  Description of Artificial Sequence: Synthetic epitope
HIHNKSNAAK

SEQ ID NO: 10703 - protein, 10 aa, Artificial Sequence
  Description of Artificial Sequence: Synthetic epitope
HIHQARTRSF

SEQ ID NO: 10704 - protein, 10 aa, Artificial Sequence
  Description of Artificial Sequence: Synthetic epitope
HIKMKKQPKG

SEQ ID NO: 10705 - protein, 10 aa, Artificial Sequence
  Description of Artificial Sequence: Synthetic epitope
HIKSMKLKSR

SEQ ID NO: 10706 - protein, 10 aa, Artificial Sequence
  Description of Artificial Sequence: Synthetic epitope
HILKNEHIKN

SEQ ID NO: 10707 - protein, 10 aa, Artificial Sequence
  Description of Artificial Sequence: Synthetic epitope
HILSMSAEKR

SEQ ID NO: 10708 - protein, 10 aa, Artificial Sequence
  Description of Artificial Sequence: Synthetic epitope
HIMVSVSPPE

SEQ ID NO: 10709 - protein, 10 aa, Artificial Sequence
  Description of Artificial Sequence: Synthetic epitope
HINSKRLNND

SEQ ID NO: 10710 - protein, 10 aa, Artificial Sequence
  Description of Artificial Sequence: Synthetic epitope
HIPEESTNKW

SEQ ID NO: 10711 - protein, 10 aa, Artificial Sequence
  Description of Artificial Sequence: Synthetic epitope
HIPWGDNSNQ

SEQ ID NO: 10712 - protein, 10 aa, Artificial Sequence
  Description of Artificial Sequence: Synthetic epitope
HIQESRVTIS

SEQ ID NO: 10713 - protein, 10 aa, Artificial Sequence
  Description of Artificial Sequence: Synthetic epitope
HIQNNSDSGA

SEQ ID NO: 10714 - protein, 10 aa, Artificial Sequence
  Description of Artificial Sequence: Synthetic epitope
HIQVEKIEPS

SEQ ID NO: 10715 - protein, 10 aa, Artificial Sequence
  Description of Artificial Sequence: Synthetic epitope
HISADEKAAE

SEQ ID NO: 10716 - protein, 10 aa, Artificial Sequence
  Description of Artificial Sequence: Synthetic epitope
HISANKLTTS

SEQ ID NO: 10717 - protein, 10 aa, Artificial Sequence
  Description of Artificial Sequence: Synthetic epitope
HISARSTTSG

SEQ ID NO: 10718 - protein, 10 aa, Artificial Sequence
  Description of Artificial Sequence: Synthetic epitope
HISDENEGKE

SEQ ID NO: 10719 - protein, 10 aa, Artificial Sequence
  Description of Artificial Sequence: Synthetic epitope
HISPSNMTNQ

SEQ ID NO: 10720 - protein, 10 aa, Artificial Sequence
  Description of Artificial Sequence: Synthetic epitope
HITRKKLKGE

SEQ ID NO: 10721 - protein, 10 aa, Artificial Sequence
  Description of Artificial Sequence: Synthetic epitope
HITSNTMAAE

SEQ ID NO: 10722 - protein, 10 aa, Artificial Sequence
  Description of Artificial Sequence: Synthetic epitope
HITYKMMKSF

SEQ ID NO: 10723 - protein, 10 aa, Artificial Sequence
  Description of Artificial Sequence: Synthetic epitope
HKANGQHEIS

SEQ ID NO: 10724 - protein, 10 aa, Artificial Sequence
  Description of Artificial Sequence: Synthetic epitope
HKAQTNEALK

SEQ ID NO: 10725 - protein, 10 aa, Artificial Sequence
  Description of Artificial Sequence: Synthetic epitope
HKASVVQVGF

SEQ ID NO: 10726 - protein, 10 aa, Artificial Sequence
  Description of Artificial Sequence: Synthetic epitope
HKDEMSSKAS

SEQ ID NO: 10727 - protein, 10 aa, Artificial Sequence
  Description of Artificial Sequence: Synthetic epitope
HKEASLRKDP

SEQ ID NO: 10728 - protein, 10 aa, Artificial Sequence
  Description of Artificial Sequence: Synthetic epitope
HKEDAIGYDK

SEQ ID NO: 10729 - protein, 10 aa, Artificial Sequence
  Description of Artificial Sequence: Synthetic epitope
HKEISQRSTA

SEQ ID NO: 10730 - protein, 10 aa, Artificial Sequence
  Description of Artificial Sequence: Synthetic epitope
HKERPQKHSH

SEQ ID NO: 10731 - protein, 10 aa, Artificial Sequence
  Description of Artificial Sequence: Synthetic epitope
HKERTARQAK

SEQ ID NO: 10732 - protein, 10 aa, Artificial Sequence
  Description of Artificial Sequence: Synthetic epitope
HKFAFPTTGS

SEQ ID NO: 10733 - protein, 10 aa, Artificial Sequence
  Description of Artificial Sequence: Synthetic epitope
HKFPDEDSYQ

SEQ ID NO: 10734 - protein, 10 aa, Artificial Sequence
  Description of Artificial Sequence: Synthetic epitope
HKFQPVESEA

SEQ ID NO: 10735 - protein, 10 aa, Artificial Sequence
  Description of Artificial Sequence: Synthetic epitope
HKFRRKSKVK

SEQ ID NO: 10736 - protein, 10 aa, Artificial Sequence
  Description of Artificial Sequence: Synthetic epitope
HKGERQRGTR

SEQ ID NO: 10737 - protein, 10 aa, Artificial Sequence
  Description of Artificial Sequence: Synthetic epitope
HKGWETDGPP

SEQ ID NO: 10738 - protein, 10 aa, Artificial Sequence
  Description of Artificial Sequence: Synthetic epitope
HKHADATGGL

SEQ ID NO: 10739 - protein, 10 aa, Artificial Sequence
  Description of Artificial Sequence: Synthetic epitope
HKHESTIVGD

SEQ ID NO: 10740 - protein, 10 aa, Artificial Sequence
  Description of Artificial Sequence: Synthetic epitope
HKHKMNTERI

SEQ ID NO: 10741 - protein, 10 aa, Artificial Sequence
  Description of Artificial Sequence: Synthetic epitope
HKIAAVEKSQ

SEQ ID NO: 10742 - protein, 10 aa, Artificial Sequence
  Description of Artificial Sequence: Synthetic epitope
HKILLQSAQI

SEQ ID NO: 10743 - protein, 10 aa, Artificial Sequence
  Description of Artificial Sequence: Synthetic epitope
HKITKYIDFD

SEQ ID NO: 10744 - protein, 10 aa, Artificial Sequence
  Description of Artificial Sequence: Synthetic epitope
HKIVDAIGAI

SEQ ID NO: 10745 - protein, 10 aa, Artificial Sequence
  Description of Artificial Sequence: Synthetic epitope
HKKGAGAKKD

SEQ ID NO: 10746 - protein, 10 aa, Artificial Sequence
  Description of Artificial Sequence: Synthetic epitope
HKKQAVKTEP

SEQ ID NO: 10747 - protein, 10 aa, Artificial Sequence
  Description of Artificial Sequence: Synthetic epitope
HKKSSLQTSA

SEQ ID NO: 10748 - protein, 10 aa, Artificial Sequence
  Description of Artificial Sequence: Synthetic epitope
HKLAELRKET

SEQ ID NO: 10749 - protein, 10 aa, Artificial Sequence
  Description of Artificial Sequence: Synthetic epitope
HKLAMERLYA

SEQ ID NO: 10750 - protein, 10 aa, Artificial Sequence
  Description of Artificial Sequence: Synthetic epitope
HKLKESTTEE

SEQ ID NO: 10751 - protein, 10 aa, Artificial Sequence
  Description of Artificial Sequence: Synthetic epitope
HKLLKITKTQ

SEQ ID NO: 10752 - protein, 10 aa, Artificial Sequence
  Description of Artificial Sequence: Synthetic epitope
HKLSEKEKKQ

SEQ ID NO: 10753 - protein, 10 aa, Artificial Sequence
  Description of Artificial Sequence: Synthetic epitope
HKLSITEKVV

SEQ ID NO: 10754 - protein, 10 aa, Artificial Sequence
  Description of Artificial Sequence: Synthetic epitope
HKLTKKGLQQ

SEQ ID NO: 10755 - protein, 10 aa, Artificial Sequence
  Description of Artificial Sequence: Synthetic epitope
HKMDDPQRSQ

SEQ ID NO: 10756 - protein, 10 aa, Artificial Sequence
  Description of Artificial Sequence: Synthetic epitope
HKMESKSSNQ

SEQ ID NO: 10757 - protein, 10 aa, Artificial Sequence
  Description of Artificial Sequence: Synthetic epitope
HKMQSESSGV

SEQ ID NO: 10758 - protein, 10 aa, Artificial Sequence
  Description of Artificial Sequence: Synthetic epitope
HKMVPIKGTR

SEQ ID NO: 10759 - protein, 10 aa, Artificial Sequence
  Description of Artificial Sequence: Synthetic epitope
HKNKSEAKKR

SEQ ID NO: 10760 - protein, 10 aa, Artificial Sequence
  Description of Artificial Sequence: Synthetic epitope
HKPEKAFQQS

SEQ ID NO: 10761 - protein, 10 aa, Artificial Sequence
  Description of Artificial Sequence: Synthetic epitope
HKPITISKRL

SEQ ID NO: 10762 - protein, 10 aa, Artificial Sequence
  Description of Artificial Sequence: Synthetic epitope
HKQSLKQHQI

SEQ ID NO: 10763 - protein, 10 aa, Artificial Sequence
  Description of Artificial Sequence: Synthetic epitope
HKRNRSESSR

SEQ ID NO: 10764 - protein, 10 aa, Artificial Sequence
  Description of Artificial Sequence: Synthetic epitope
HKSAAETSAQ

SEQ ID NO: 10765 - protein, 10 aa, Artificial Sequence
  Description of Artificial Sequence: Synthetic epitope
HKSEEHNDKE

SEQ ID NO: 10766 - protein, 10 aa, Artificial Sequence
  Description of Artificial Sequence: Synthetic epitope
HKSIRSKYKP

SEQ ID NO: 10767 - protein, 10 aa, Artificial Sequence
  Description of Artificial Sequence: Synthetic epitope
HKSLVRAEAA

SEQ ID NO: 10768 - protein, 10 aa, Artificial Sequence
  Description of Artificial Sequence: Synthetic epitope
HKSRSTYDQR

SEQ ID NO: 10769 - protein, 10 aa, Artificial Sequence
  Description of Artificial Sequence: Synthetic epitope
HKSSAPKRSI

SEQ ID NO: 10770 - protein, 10 aa, Artificial Sequence
  Description of Artificial Sequence: Synthetic epitope
HKSSKSNEGS

SEQ ID NO: 10771 - protein, 10 aa, Artificial Sequence
  Description of Artificial Sequence: Synthetic epitope
HKSSVYKLNV

SEQ ID NO: 10772 - protein, 10 aa, Artificial Sequence
  Description of Artificial Sequence: Synthetic epitope
HKTARIFTHH

SEQ ID NO: 10773 - protein, 10 aa, Artificial Sequence
  Description of Artificial Sequence: Synthetic epitope
HKTKEMAANN

SEQ ID NO: 10774 - protein, 10 aa, Artificial Sequence
  Description of Artificial Sequence: Synthetic epitope
HKVDKASVRH

SEQ ID NO: 10775 - protein, 10 aa, Artificial Sequence
  Description of Artificial Sequence: Synthetic epitope
HKVEQLDKMV

SEQ ID NO: 10776 - protein, 10 aa, Artificial Sequence
  Description of Artificial Sequence: Synthetic epitope
HKVKRELRSK

SEQ ID NO: 10777 - protein, 10 aa, Artificial Sequence
  Description of Artificial Sequence: Synthetic epitope
HKVNEHEQDG

SEQ ID NO: 10778 - protein, 10 aa, Artificial Sequence
  Description of Artificial Sequence: Synthetic epitope
HKVQQELESE

SEQ ID NO: 10779 - protein, 10 aa, Artificial Sequence
  Description of Artificial Sequence: Synthetic epitope
HKVRVINSVE

SEQ ID NO: 10780 - protein, 10 aa, Artificial Sequence
  Description of Artificial Sequence: Synthetic epitope
HKVTAQRRTL

SEQ ID NO: 10781 - protein, 10 aa, Artificial Sequence
  Description of Artificial Sequence: Synthetic epitope
HKWEAREKEH

SEQ ID NO: 10782 - protein, 10 aa, Artificial Sequence
  Description of Artificial Sequence: Synthetic epitope
HKWFDDEVIA

SEQ ID NO: 10783 - protein, 10 aa, Artificial Sequence
  Description of Artificial Sequence: Synthetic epitope
HKWSYSFIKK

SEQ ID NO: 10784 - protein, 10 aa, Artificial Sequence
  Description of Artificial Sequence: Synthetic epitope
HKYEQESKKA

SEQ ID NO: 10785 - protein, 10 aa, Artificial Sequence
  Description of Artificial Sequence: Synthetic epitope
HKYQKMLEPP

SEQ ID NO: 10786 - protein, 10 aa, Artificial Sequence
  Description of Artificial Sequence: Synthetic epitope
HLAATSSIND

SEQ ID NO: 10787 - protein, 10 aa, Artificial Sequence
  Description of Artificial Sequence: Synthetic epitope
HLATAQEKQS

SEQ ID NO: 10788 - protein, 10 aa, Artificial Sequence
  Description of Artificial Sequence: Synthetic epitope
HLDEAKDHNS

SEQ ID NO: 10789 - protein, 10 aa, Artificial Sequence
  Description of Artificial Sequence: Synthetic epitope
HLDESLQKKA

SEQ ID NO: 10790 - protein, 10 aa, Artificial Sequence
  Description of Artificial Sequence: Synthetic epitope
HLDLLITATQ

SEQ ID NO: 10791 - protein, 10 aa, Artificial Sequence
  Description of Artificial Sequence: Synthetic epitope
HLDSEASVRL

SEQ ID NO: 10792 - protein, 10 aa, Artificial Sequence
  Description of Artificial Sequence: Synthetic epitope
HLDTKNQILQ

SEQ ID NO: 10793 - protein, 10 aa, Artificial Sequence
  Description of Artificial Sequence: Synthetic epitope
HLDTTQQMIA

SEQ ID NO: 10794 - protein, 10 aa, Artificial Sequence
  Description of Artificial Sequence: Synthetic epitope
HLEARSAVTG

SEQ ID NO: 10795 - protein, 10 aa, Artificial Sequence
  Description of Artificial Sequence: Synthetic epitope
HLEHDLVHVT

SEQ ID NO: 10796 - protein, 10 aa, Artificial Sequence
  Description of Artificial Sequence: Synthetic epitope
HLGLANASAP

SEQ ID NO: 10797 - protein, 10 aa, Artificial Sequence
  Description of Artificial Sequence: Synthetic epitope
HLGLNTMKSA

SEQ ID NO: 10798 - protein, 10 aa, Artificial Sequence
  Description of Artificial Sequence: Synthetic epitope
HLGRAAQSPR

SEQ ID NO: 10799 - protein, 10 aa, Artificial Sequence
  Description of Artificial Sequence: Synthetic epitope
HLIKNDSSFL

SEQ ID NO: 10800 - protein, 10 aa, Artificial Sequence
  Description of Artificial Sequence: Synthetic epitope
HLKDLSSEGQ

SEQ ID NO: 10801 - protein, 10 aa, Artificial Sequence
  Description of Artificial Sequence: Synthetic epitope
HLKERQYQYE

SEQ ID NO: 10802 - protein, 10 aa, Artificial Sequence
  Description of Artificial Sequence: Synthetic epitope
HLKKVASRYQ

SEQ ID NO: 10803 - protein, 10 aa, Artificial Sequence
  Description of Artificial Sequence: Synthetic epitope
HLKSKALRER

SEQ ID NO: 10804 - protein, 10 aa, Artificial Sequence
  Description of Artificial Sequence: Synthetic epitope
HLLEKSNIYS

SEQ ID NO: 10805 - protein, 10 aa, Artificial Sequence
  Description of Artificial Sequence: Synthetic epitope
HLLESEANSA

SEQ ID NO: 10806 - protein, 10 aa, Artificial Sequence
  Description of Artificial Sequence: Synthetic epitope
HLLSLASASD

SEQ ID NO: 10807 - protein, 10 aa, Artificial Sequence
  Description of Artificial Sequence: Synthetic epitope
HLLVEAEQAK

SEQ ID NO: 10808 - protein, 10 aa, Artificial Sequence
  Description of Artificial Sequence: Synthetic epitope
HLMFSLMDKV

SEQ ID NO: 10809 - protein, 10 aa, Artificial Sequence
  Description of Artificial Sequence: Synthetic epitope
HLMFTRWKQQ

SEQ ID NO: 10810 - protein, 10 aa, Artificial Sequence
  Description of Artificial Sequence: Synthetic epitope
HLMKMEFLEL

SEQ ID NO: 10811 - protein, 10 aa, Artificial Sequence
  Description of Artificial Sequence: Synthetic epitope
HLMPLSQIKK

SEQ ID NO: 10812 - protein, 10 aa, Artificial Sequence
  Description of Artificial Sequence: Synthetic epitope
HLNAVALGDG

SEQ ID NO: 10813 - protein, 10 aa, Artificial Sequence
  Description of Artificial Sequence: Synthetic epitope
HLNSESSIPE

SEQ ID NO: 10814 - protein, 10 aa, Artificial Sequence
  Description of Artificial Sequence: Synthetic epitope
HLQAKSKTHL

SEQ ID NO: 10815 - protein, 10 aa, Artificial Sequence
  Description of Artificial Sequence: Synthetic epitope
HLRASVSFLN

SEQ ID NO: 10816 - protein, 10 aa, Artificial Sequence
  Description of Artificial Sequence: Synthetic epitope
HLRSQPQSSQ

SEQ ID NO: 10817 - protein, 10 aa, Artificial Sequence
  Description of Artificial Sequence: Synthetic epitope
HLSAASKGSN

SEQ ID NO: 10818 - protein, 10 aa, Artificial Sequence
  Description of Artificial Sequence: Synthetic epitope
HLSARDAREA

SEQ ID NO: 10819 - protein, 10 aa, Artificial Sequence
  Description of Artificial Sequence: Synthetic epitope
HLSELSVNSQ

SEQ ID NO: 10820 - protein, 10 aa, Artificial Sequence
  Description of Artificial Sequence: Synthetic epitope
HLTEQINVEE

SEQ ID NO: 10821 - protein, 10 aa, Artificial Sequence
  Description of Artificial Sequence: Synthetic epitope
HLTLSANLEK

SEQ ID NO: 10822 - protein, 10 aa, Artificial Sequence
  Description of Artificial Sequence: Synthetic epitope
HLTLTSIMKS

SEQ ID NO: 10823 - protein, 10 aa, Artificial Sequence
  Description of Artificial Sequence: Synthetic epitope
HLVDPLNMHV

SEQ ID NO: 10824 - protein, 10 aa, Artificial Sequence
  Description of Artificial Sequence: Synthetic epitope
HLVLSVSSDA

SEQ ID NO: 10825 - protein, 10 aa, Artificial Sequence
  Description of Artificial Sequence: Synthetic epitope
HLVSRKSISA

SEQ ID NO: 10826 - protein, 10 aa, Artificial Sequence
  Description of Artificial Sequence: Synthetic epitope
HLYNIKDHEH

SEQ ID NO: 10827 - protein, 10 aa, Artificial Sequence
  Description of Artificial Sequence: Synthetic epitope
HLYQNTRSYH

SEQ ID NO: 10828 - protein, 10 aa, Artificial Sequence
  Description of Artificial Sequence: Synthetic epitope
HLYVIDSQQA

SEQ ID NO: 10829 - protein, 10 aa, Artificial Sequence
  Description of Artificial Sequence: Synthetic epitope
HMAASNLESL

SEQ ID NO: 10830 - protein, 10 aa, Artificial Sequence
  Description of Artificial Sequence: Synthetic epitope
HMATKEVVDM

SEQ ID NO: 10831 - protein, 10 aa, Artificial Sequence
  Description of Artificial Sequence: Synthetic epitope
HMGLSTILEA

SEQ ID NO: 10832 - protein, 10 aa, Artificial Sequence
  Description of Artificial Sequence: Synthetic epitope
HMHGTENGLQ

SEQ ID NO: 10833 - protein, 10 aa, Artificial Sequence
  Description of Artificial Sequence: Synthetic epitope
HMHQGYDKYD

SEQ ID NO: 10834 - protein, 10 aa, Artificial Sequence
  Description of Artificial Sequence: Synthetic epitope
HMIPRQTDFN

SEQ ID NO: 10835 - protein, 10 aa, Artificial Sequence
  Description of Artificial Sequence: Synthetic epitope
HMIQTKERSE

SEQ ID NO: 10836 - protein, 10 aa, Artificial Sequence
  Description of Artificial Sequence: Synthetic epitope
HMKAQKSGKE

SEQ ID NO: 10837 - protein, 10 aa, Artificial Sequence
  Description of Artificial Sequence: Synthetic epitope
HMNLSALAEG

SEQ ID NO: 10838 - protein, 10 aa, Artificial Sequence
  Description of Artificial Sequence: Synthetic epitope
HMNQSTAMRQ

SEQ ID NO: 10839 - protein, 10 aa, Artificial Sequence
  Description of Artificial Sequence: Synthetic epitope
HMRSKEHERP

SEQ ID NO: 10840 - protein, 10 aa, Artificial Sequence
  Description of Artificial Sequence: Synthetic epitope
HMSSTMKPNT

SEQ ID NO: 10841 - protein, 10 aa, Artificial Sequence
  Description of Artificial Sequence: Synthetic epitope
HMVSRLAKNR

SEQ ID NO: 10842 - protein, 10 aa, Artificial Sequence
  Description of Artificial Sequence: Synthetic epitope
HMYAQSLQVP

SEQ ID NO: 10843 - protein, 10 aa, Artificial Sequence
  Description of Artificial Sequence: Synthetic epitope
HMYSGAKTGL

SEQ ID NO: 10844 - protein, 10 aa, Artificial Sequence
  Description of Artificial Sequence: Synthetic epitope
HNAATKRQSS

SEQ ID NO: 10845 - protein, 10 aa, Artificial Sequence
  Description of Artificial Sequence: Synthetic epitope
HNAEAKIQQY

SEQ ID NO: 10846 - protein, 10 aa, Artificial Sequence
  Description of Artificial Sequence: Synthetic epitope
HNAQEVEKEP

SEQ ID NO: 10847 - protein, 10 aa, Artificial Sequence
  Description of Artificial Sequence: Synthetic epitope
HNAQNLMQSV

SEQ ID NO: 10848 - protein, 10 aa, Artificial Sequence
  Description of Artificial Sequence: Synthetic epitope
HNASEEATEQ

SEQ ID NO: 10849 - protein, 10 aa, Artificial Sequence
  Description of Artificial Sequence: Synthetic epitope
HNAVAEMEQE

SEQ ID NO: 10850 - protein, 10 aa, Artificial Sequence
  Description of Artificial Sequence: Synthetic epitope
HNAWYAALAT

SEQ ID NO: 10851 - protein, 10 aa, Artificial Sequence
  Description of Artificial Sequence: Synthetic epitope
HNDASTKKAR

SEQ ID NO: 10852 - protein, 10 aa, Artificial Sequence
  Description of Artificial Sequence: Synthetic epitope
HNDHIQIANR

SEQ ID NO: 10853 - protein, 10 aa, Artificial Sequence
  Description of Artificial Sequence: Synthetic epitope
HNDSTSQMSL

SEQ ID NO: 10854 - protein, 10 aa, Artificial Sequence
  Description of Artificial Sequence: Synthetic epitope
HNEINNSQQK

SEQ ID NO: 10855 - protein, 10 aa, Artificial Sequence
  Description of Artificial Sequence: Synthetic epitope
HNELSQLSDK

SEQ ID NO: 10856 - protein, 10 aa, Artificial Sequence
  Description of Artificial Sequence: Synthetic epitope
HNENAEMDSD

SEQ ID NO: 10857 - protein, 10 aa, Artificial Sequence
  Description of Artificial Sequence: Synthetic epitope
HNISVTKTDT

SEQ ID NO: 10858 - protein, 10 aa, Artificial Sequence
  Description of Artificial Sequence: Synthetic epitope
HNKKSQASVS

SEQ ID NO: 10859 - protein, 10 aa, Artificial Sequence
  Description of Artificial Sequence: Synthetic epitope
HNKQEDNQKQ

SEQ ID NO: 10860 - protein, 10 aa, Artificial Sequence
  Description of Artificial Sequence: Synthetic epitope
HNKTRLTKNE

SEQ ID NO: 10861 - protein, 10 aa, Artificial Sequence
  Description of Artificial Sequence: Synthetic epitope
HNLSGLLGLS

SEQ ID NO: 10862 - protein, 10 aa, Artificial Sequence
  Description of Artificial Sequence: Synthetic epitope
HNLTWEESKQ

SEQ ID NO: 10863 - protein, 10 aa, Artificial Sequence
  Description of Artificial Sequence: Synthetic epitope
HNLVKAAQSL

SEQ ID NO: 10864 - protein, 10 aa, Artificial Sequence
  Description of Artificial Sequence: Synthetic epitope
HNMVNGMGPM

SEQ ID NO: 10865 - protein, 10 aa, Artificial Sequence
  Description of Artificial Sequence: Synthetic epitope
HNMVQFSHSK

SEQ ID NO: 10866 - protein, 10 aa, Artificial Sequence
  Description of Artificial Sequence: Synthetic epitope
HNQRGLSTSA

SEQ ID NO: 10867 - protein, 10 aa, Artificial Sequence
  Description of Artificial Sequence: Synthetic epitope
HNQRLVEQVG

SEQ ID NO: 10868 - protein, 10 aa, Artificial Sequence
  Description of Artificial Sequence: Synthetic epitope
HNSISQESAL

SEQ ID NO: 10869 - protein, 10 aa, Artificial Sequence
  Description of Artificial Sequence: Synthetic epitope
HNSKHNKSPT

SEQ ID NO: 10870 - protein, 10 aa, Artificial Sequence
  Description of Artificial Sequence: Synthetic epitope
HNSVSHPSAD

SEQ ID NO: 10871 - protein, 10 aa, Artificial Sequence
  Description of Artificial Sequence: Synthetic epitope
HNTKTIQAEF

SEQ ID NO: 10872 - protein, 10 aa, Artificial Sequence
  Description of Artificial Sequence: Synthetic epitope
HNTVNLGMLP

SEQ ID NO: 10873 - protein, 10 aa, Artificial Sequence
  Description of Artificial Sequence: Synthetic epitope
HNVEGPFSKA

SEQ ID NO: 10874 - protein, 10 aa, Artificial Sequence
  Description of Artificial Sequence: Synthetic epitope
HNWLLRISAT

SEQ ID NO: 10875 - protein, 10 aa, Artificial Sequence
  Description of Artificial Sequence: Synthetic epitope
HNYKMSAFKE

SEQ ID NO: 10876 - protein, 10 aa, Artificial Sequence
  Description of Artificial Sequence: Synthetic epitope
HNYKMTDKNF

SEQ ID NO: 10877 - protein, 10 aa, Artificial Sequence
  Description of Artificial Sequence: Synthetic epitope
HPAISAIAND

SEQ ID NO: 10878 - protein, 10 aa, Artificial Sequence
  Description of Artificial Sequence: Synthetic epitope
HPAKRTAEVE

SEQ ID NO: 10879 - protein, 10 aa, Artificial Sequence
  Description of Artificial Sequence: Synthetic epitope
HPASTAVPKS

SEQ ID NO: 10880 - protein, 10 aa, Artificial Sequence
  Description of Artificial Sequence: Synthetic epitope
HPDETKNMLE

SEQ ID NO: 10881 - protein, 10 aa, Artificial Sequence
  Description of Artificial Sequence: Synthetic epitope
HPGQALSSEP

SEQ ID NO: 10882 - protein, 10 aa, Artificial Sequence
  Description of Artificial Sequence: Synthetic epitope
HPGTKFLNNG

SEQ ID NO: 10883 - protein, 10 aa, Artificial Sequence
  Description of Artificial Sequence: Synthetic epitope
HPLAEKTQFT

SEQ ID NO: 10884 - protein, 10 aa, Artificial Sequence
  Description of Artificial Sequence: Synthetic epitope
HPLQKYAPSS

SEQ ID NO: 10885 - protein, 10 aa, Artificial Sequence
  Description of Artificial Sequence: Synthetic epitope
HPLQRIDMGR

SEQ ID NO: 10886 - protein, 10 aa, Artificial Sequence
  Description of Artificial Sequence: Synthetic epitope
HPNTQQRASK

SEQ ID NO: 10887 - protein, 10 aa, Artificial Sequence
  Description of Artificial Sequence: Synthetic epitope
HPPTESSKTP

SEQ ID NO: 10888 - protein, 10 aa, Artificial Sequence
  Description of Artificial Sequence: Synthetic epitope
HPQLKVASKE

SEQ ID NO: 10889 - protein, 10 aa, Artificial Sequence
  Description of Artificial Sequence: Synthetic epitope
HPRNVKSIQG

SEQ ID NO: 10890 - protein, 10 aa, Artificial Sequence
  Description of Artificial Sequence: Synthetic epitope
HPSAQSLSQP

SEQ ID NO: 10891 - protein, 10 aa, Artificial Sequence
  Description of Artificial Sequence: Synthetic epitope
HPSINKQEWS

SEQ ID NO: 10892 - protein, 10 aa, Artificial Sequence
  Description of Artificial Sequence: Synthetic epitope
HPSNQSQQTT

SEQ ID NO: 10893 - protein, 10 aa, Artificial Sequence
  Description of Artificial Sequence: Synthetic epitope
HPSQSRNTPP

SEQ ID NO: 10894 - protein, 10 aa, Artificial Sequence
  Description of Artificial Sequence: Synthetic epitope
HPTATASSQL

SEQ ID NO: 10895 - protein, 10 aa, Artificial Sequence
  Description of Artificial Sequence: Synthetic epitope
HPTQESTKEQ

SEQ ID NO: 10896 - protein, 10 aa, Artificial Sequence
  Description of Artificial Sequence: Synthetic epitope
HPVESAKIEP

SEQ ID NO: 10897 - protein, 10 aa, Artificial Sequence
  Description of Artificial Sequence: Synthetic epitope
HPWGTIKAQH

SEQ ID NO: 10898 - protein, 10 aa, Artificial Sequence
  Description of Artificial Sequence: Synthetic epitope
HPYEALEAQL

SEQ ID NO: 10899 - protein, 10 aa, Artificial Sequence
  Description of Artificial Sequence: Synthetic epitope
HQAESTVESQ

SEQ ID NO: 10900 - protein, 10 aa, Artificial Sequence
  Description of Artificial Sequence: Synthetic epitope
HQATSASESA

SEQ ID NO: 10901 - protein, 10 aa, Artificial Sequence
  Description of Artificial Sequence: Synthetic epitope
HQDGKIIHNF

SEQ ID NO: 10902 - protein, 10 aa, Artificial Sequence
  Description of Artificial Sequence: Synthetic epitope
HQEMASASPF

SEQ ID NO: 10903 - protein, 10 aa, Artificial Sequence
  Description of Artificial Sequence: Synthetic epitope
HQEYARVKEE

SEQ ID NO: 10904 - protein, 10 aa, Artificial Sequence
  Description of Artificial Sequence: Synthetic epitope
HQFMAQFHEK

SEQ ID NO: 10905 - protein, 10 aa, Artificial Sequence
  Description of Artificial Sequence: Synthetic epitope
HQFNKNNSNQ

SEQ ID NO: 10906 - protein, 10 aa, Artificial Sequence
  Description of Artificial Sequence: Synthetic epitope
HQGAEELLDE

SEQ ID NO: 10907 - protein, 10 aa, Artificial Sequence
  Description of Artificial Sequence: Synthetic epitope
HQGLRKERQR

SEQ ID NO: 10908 - protein, 10 aa, Artificial Sequence
  Description of Artificial Sequence: Synthetic epitope
HQGQSGLKHG

SEQ ID NO: 10909 - protein, 10 aa, Artificial Sequence
  Description of Artificial Sequence: Synthetic epitope
HQHIQVSTSS

SEQ ID NO: 10910 - protein, 10 aa, Artificial Sequence
  Description of Artificial Sequence: Synthetic epitope
HQIKQTVPIH

SEQ ID NO: 10911 - protein, 10 aa, Artificial Sequence
  Description of Artificial Sequence: Synthetic epitope
HQIMSASTIS

SEQ ID NO: 10912 - protein, 10 aa, Artificial Sequence
  Description of Artificial Sequence: Synthetic epitope
HQKERQRQFK

SEQ ID NO: 10913 - protein, 10 aa, Artificial Sequence
  Description of Artificial Sequence: Synthetic epitope
HQKFIDADVE

SEQ ID NO: 10914 - protein, 10 aa, Artificial Sequence
  Description of Artificial Sequence: Synthetic epitope
HQKGQSNQAQ

SEQ ID NO: 10915 - protein, 10 aa, Artificial Sequence
  Description of Artificial Sequence: Synthetic epitope
HQKKVGSENK

SEQ ID NO: 10916 - protein, 10 aa, Artificial Sequence
  Description of Artificial Sequence: Synthetic epitope
HQKLLSIDLD

SEQ ID NO: 10917 - protein, 10 aa, Artificial Sequence
  Description of Artificial Sequence: Synthetic epitope
HQKTKVQEEK

SEQ ID NO: 10918 - protein, 10 aa, Artificial Sequence
  Description of Artificial Sequence: Synthetic epitope
HQKVSEEAKS

SEQ ID NO: 10919 - protein, 10 aa, Artificial Sequence
  Description of Artificial Sequence: Synthetic epitope
HQLGTAMPMS

SEQ ID NO: 10920 - protein, 10 aa, Artificial Sequence
  Description of Artificial Sequence: Synthetic epitope
HQLGVFKVKQ

SEQ ID NO: 10921 - protein, 10 aa, Artificial Sequence
  Description of Artificial Sequence: Synthetic epitope
HQLHAASRAL

SEQ ID NO: 10922 - protein, 10 aa, Artificial Sequence
  Description of Artificial Sequence: Synthetic epitope
HQLIDQQARL

SEQ ID NO: 10923 - protein, 10 aa, Artificial Sequence
  Description of Artificial Sequence: Synthetic epitope
HQLIKSKTSL

SEQ ID NO: 10924 - protein, 10 aa, Artificial Sequence
  Description of Artificial Sequence: Synthetic epitope
HQLKQKLQTV

SEQ ID NO: 10925 - protein, 10 aa, Artificial Sequence
  Description of Artificial Sequence: Synthetic epitope
HQLLAQAATL

SEQ ID NO: 10926 - protein, 10 aa, Artificial Sequence
  Description of Artificial Sequence: Synthetic epitope
HQLVTKIQQE

SEQ ID NO: 10927 - protein, 10 aa, Artificial Sequence
  Description of Artificial Sequence: Synthetic epitope
HQNKIILEQE

SEQ ID NO: 10928 - protein, 10 aa, Artificial Sequence
  Description of Artificial Sequence: Synthetic epitope
HQNLAESAAD

SEQ ID NO: 10929 - protein, 10 aa, Artificial Sequence
  Description of Artificial Sequence: Synthetic epitope
HQPIKLASRD

SEQ ID NO: 10930 - protein, 10 aa, Artificial Sequence
  Description of Artificial Sequence: Synthetic epitope
HQQDETTIDT

SEQ ID NO: 10931 - protein, 10 aa, Artificial Sequence
  Description of Artificial Sequence: Synthetic epitope
HQQEIERLEH

SEQ ID NO: 10932 - protein, 10 aa, Artificial Sequence
  Description of Artificial Sequence: Synthetic epitope
HQQGDESQKM

SEQ ID NO: 10933 - protein, 10 aa, Artificial Sequence
  Description of Artificial Sequence: Synthetic epitope
HQQIKNRSSI

SEQ ID NO: 10934 - protein, 10 aa, Artificial Sequence
  Description of Artificial Sequence: Synthetic epitope
HQQKEQSLSS

SEQ ID NO: 10935 - protein, 10 aa, Artificial Sequence
  Description of Artificial Sequence: Synthetic epitope
HQQLEYLEAL

SEQ ID NO: 10936 - protein, 10 aa, Artificial Sequence
  Description of Artificial Sequence: Synthetic epitope
HQQNQLSFRS

SEQ ID NO: 10937 - protein, 10 aa, Artificial Sequence
  Description of Artificial Sequence: Synthetic epitope
HQQSSVDSQI

SEQ ID NO: 10938 - protein, 10 aa, Artificial Sequence
  Description of Artificial Sequence: Synthetic epitope
HQRHDGKLWN

SEQ ID NO: 10939 - protein, 10 aa, Artificial Sequence
  Description of Artificial Sequence: Synthetic epitope
HQRLSLRQAV

SEQ ID NO: 10940 - protein, 10 aa, Artificial Sequence
  Description of Artificial Sequence: Synthetic epitope
HQRQATMRET

SEQ ID NO: 10941 - protein, 10 aa, Artificial Sequence
  Description of Artificial Sequence: Synthetic epitope
HQSDEQKLEK

SEQ ID NO: 10942 - protein, 10 aa, Artificial Sequence
  Description of Artificial Sequence: Synthetic epitope
HQSKLSFKYD

SEQ ID NO: 10943 - protein, 10 aa, Artificial Sequence
  Description of Artificial Sequence: Synthetic epitope
HQSQLRLEEK

SEQ ID NO: 10944 - protein, 10 aa, Artificial Sequence
  Description of Artificial Sequence: Synthetic epitope
HQSSMPTRNG

SEQ ID NO: 10945 - protein, 10 aa, Artificial Sequence
  Description of Artificial Sequence: Synthetic epitope
HQTIANMQAR

SEQ ID NO: 10946 - protein, 10 aa, Artificial Sequence
  Description of Artificial Sequence: Synthetic epitope
HQTSTLARDN

SEQ ID NO: 10947 - protein, 10 aa, Artificial Sequence
  Description of Artificial Sequence: Synthetic epitope
HQVSKRLRGE

SEQ ID NO: 10948 - protein, 10 aa, Artificial Sequence
  Description of Artificial Sequence: Synthetic epitope
HQVSKTAPTG

SEQ ID NO: 10949 - protein, 10 aa, Artificial Sequence
  Description of Artificial Sequence: Synthetic epitope
HQYNWIEESN

SEQ ID NO: 10950 - protein, 10 aa, Artificial Sequence
  Description of Artificial Sequence: Synthetic epitope
HQYQNRHMKS

SEQ ID NO: 10951 - protein, 10 aa, Artificial Sequence
  Description of Artificial Sequence: Synthetic epitope
HRAGMRYKRR

SEQ ID NO: 10952 - protein, 10 aa, Artificial Sequence
  Description of Artificial Sequence: Synthetic epitope
HRAHSSMVGV

SEQ ID NO: 10953 - protein, 10 aa, Artificial Sequence
  Description of Artificial Sequence: Synthetic epitope
HRALGQARDH

SEQ ID NO: 10954 - protein, 10 aa, Artificial Sequence
  Description of Artificial Sequence: Synthetic epitope
HRALSSKPQH

SEQ ID NO: 10955 - protein, 10 aa, Artificial Sequence
  Description of Artificial Sequence: Synthetic epitope
HRANSQAKAM

SEQ ID NO: 10956 - protein, 10 aa, Artificial Sequence
  Description of Artificial Sequence: Synthetic epitope
HRDRFEDHEI

SEQ ID NO: 10957 - protein, 10 aa, Artificial Sequence
  Description of Artificial Sequence: Synthetic epitope
HRDRLNTGSK

SEQ ID NO: 10958 - protein, 10 aa, Artificial Sequence
  Description of Artificial Sequence: Synthetic epitope
HREDAAELDD

SEQ ID NO: 10959 - protein, 10 aa, Artificial Sequence
  Description of Artificial Sequence: Synthetic epitope
HREIKSIQDD

SEQ ID NO: 10960 - protein, 10 aa, Artificial Sequence
  Description of Artificial Sequence: Synthetic epitope
HRELRSNSMK

SEQ ID NO: 10961 - protein, 10 aa, Artificial Sequence
  Description of Artificial Sequence: Synthetic epitope
HRFAAFGESS

SEQ ID NO: 10962 - protein, 10 aa, Artificial Sequence
  Description of Artificial Sequence: Synthetic epitope
HRFGVSELVH

SEQ ID NO: 10963 - protein, 10 aa, Artificial Sequence
  Description of Artificial Sequence: Synthetic epitope
HRGVGSQTAS

SEQ ID NO: 10964 - protein, 10 aa, Artificial Sequence
  Description of Artificial Sequence: Synthetic epitope
HRHIAVVLEE

SEQ ID NO: 10965 - protein, 10 aa, Artificial Sequence
  Description of Artificial Sequence: Synthetic epitope
HRHLQVSKQW

SEQ ID NO: 10966 - protein, 10 aa, Artificial Sequence
  Description of Artificial Sequence: Synthetic epitope
HRHYIQTMQE

SEQ ID NO: 10967 - protein, 10 aa, Artificial Sequence
  Description of Artificial Sequence: Synthetic epitope
HRIYRPMIGK

SEQ ID NO: 10968 - protein, 10 aa, Artificial Sequence
  Description of Artificial Sequence: Synthetic epitope
HRKMMRTELY

SEQ ID NO: 10969 - protein, 10 aa, Artificial Sequence
  Description of Artificial Sequence: Synthetic epitope
HRLKKEEQQP

SEQ ID NO: 10970 - protein, 10 aa, Artificial Sequence
  Description of Artificial Sequence: Synthetic epitope
HRMPTLKANI

SEQ ID NO: 10971 - protein, 10 aa, Artificial Sequence
  Description of Artificial Sequence: Synthetic epitope
HRNKLNTTQN

SEQ ID NO: 10972 - protein, 10 aa, Artificial Sequence
  Description of Artificial Sequence: Synthetic epitope
HRPQESQRRT

SEQ ID NO: 10973 - protein, 10 aa, Artificial Sequence
  Description of Artificial Sequence: Synthetic epitope
HRPRQGVGEN

SEQ ID NO: 10974 - protein, 10 aa, Artificial Sequence
  Description of Artificial Sequence: Synthetic epitope
HRRTSLKSPI

SEQ ID NO: 10975 - protein, 10 aa, Artificial Sequence
  Description of Artificial Sequence: Synthetic epitope
HRSETRIIHR

SEQ ID NO: 10976 - protein, 10 aa, Artificial Sequence
  Description of Artificial Sequence: Synthetic epitope
HRSRSLSSNR

SEQ ID NO: 10977 - protein, 10 aa, Artificial Sequence
  Description of Artificial Sequence: Synthetic epitope
HRTTEVAHRD

SEQ ID NO: 10978 - protein, 10 aa, Artificial Sequence
  Description of Artificial Sequence: Synthetic epitope
HRVLKSVESE

SEQ ID NO: 10979 - protein, 10 aa, Artificial Sequence
  Description of Artificial Sequence: Synthetic epitope
HRVNAGTLAV

SEQ ID NO: 10980 - protein, 10 aa, Artificial Sequence
  Description of Artificial Sequence: Synthetic epitope
HSAQSSNTVS

SEQ ID NO: 10981 - protein, 10 aa, Artificial Sequence
  Description of Artificial Sequence: Synthetic epitope
HSASESHKKQ

SEQ ID NO: 10982 - protein, 10 aa, Artificial Sequence
  Description of Artificial Sequence: Synthetic epitope
HSASTAVSEA

SEQ ID NO: 10983 - protein, 10 aa, Artificial Sequence
  Description of Artificial Sequence: Synthetic epitope
HSASVTARQV

SEQ ID NO: 10984 - protein, 10 aa, Artificial Sequence
  Description of Artificial Sequence: Synthetic epitope
HSAVQSKSAD

SEQ ID NO: 10985 - protein, 10 aa, Artificial Sequence
  Description of Artificial Sequence: Synthetic epitope
HSDDSQVKAD

SEQ ID NO: 10986 - protein, 10 aa, Artificial Sequence
  Description of Artificial Sequence: Synthetic epitope
HSDELRTLSN

SEQ ID NO: 10987 - protein, 10 aa, Artificial Sequence
  Description of Artificial Sequence: Synthetic epitope
HSEAEATRAR

SEQ ID NO: 10988 - protein, 10 aa, Artificial Sequence
  Description of Artificial Sequence: Synthetic epitope
HSEEKASNVL

SEQ ID NO: 10989 - protein, 10 aa, Artificial Sequence
  Description of Artificial Sequence: Synthetic epitope
HSEKSSVFYQ

SEQ ID NO: 10990 - protein, 10 aa, Artificial Sequence
  Description of Artificial Sequence: Synthetic epitope
HSERSDNRSE

SEQ ID NO: 10991 - protein, 10 aa, Artificial Sequence
  Description of Artificial Sequence: Synthetic epitope
HSESSTLIGR

SEQ ID NO: 10992 - protein, 10 aa, Artificial Sequence
  Description of Artificial Sequence: Synthetic epitope
HSFQKKTSGL

SEQ ID NO: 10993 - protein, 10 aa, Artificial Sequence
  Description of Artificial Sequence: Synthetic epitope
HSGAAVQAAG

SEQ ID NO: 10994 - protein, 10 aa, Artificial Sequence
  Description of Artificial Sequence: Synthetic epitope
HSGGASLRTL

SEQ ID NO: 10995 - protein, 10 aa, Artificial Sequence
  Description of Artificial Sequence: Synthetic epitope
HSIAIGEVPA

SEQ ID NO: 10996 - protein, 10 aa, Artificial Sequence
  Description of Artificial Sequence: Synthetic epitope
HSIESSGKLK

SEQ ID NO: 10997 - protein, 10 aa, Artificial Sequence
  Description of Artificial Sequence: Synthetic epitope
HSIKKIEHEG

SEQ ID NO: 10998 - protein, 10 aa, Artificial Sequence
  Description of Artificial Sequence: Synthetic epitope
HSIKTRTPSE

SEQ ID NO: 10999 - protein, 10 aa, Artificial Sequence
  Description of Artificial Sequence: Synthetic epitope
HSISAQTSKH

SEQ ID NO: 11000 - protein, 10 aa, Artificial Sequence
  Description of Artificial Sequence: Synthetic epitope
HSISNRVEAW

SEQ ID NO: 11001 - protein, 10 aa, Artificial Sequence
  Description of Artificial Sequence: Synthetic epitope
HSITVTTVAS

SEQ ID NO: 11002 - protein, 10 aa, Artificial Sequence
  Description of Artificial Sequence: Synthetic epitope
HSKESIVATT

SEQ ID NO: 11003 - protein, 10 aa, Artificial Sequence
  Description of Artificial Sequence: Synthetic epitope
HSKLDLERSS

SEQ ID NO: 11004 - protein, 10 aa, Artificial Sequence
  Description of Artificial Sequence: Synthetic epitope
HSKLYEAIMR

SEQ ID NO: 11005 - protein, 10 aa, Artificial Sequence
  Description of Artificial Sequence: Synthetic epitope
HSKNVNTEKL

SEQ ID NO: 11006 - protein, 10 aa, Artificial Sequence
  Description of Artificial Sequence: Synthetic epitope
HSKPPKPTQA

SEQ ID NO: 11007 - protein, 10 aa, Artificial Sequence
  Description of Artificial Sequence: Synthetic epitope
HSKRASTMAA

SEQ ID NO: 11008 - protein, 10 aa, Artificial Sequence
  Description of Artificial Sequence: Synthetic epitope
HSKRVELEAA

SEQ ID NO: 11009 - protein, 10 aa, Artificial Sequence
  Description of Artificial Sequence: Synthetic epitope
HSKTKSRKQL

SEQ ID NO: 11010 - protein, 10 aa, Artificial Sequence
  Description of Artificial Sequence: Synthetic epitope
HSKVHRSHSH

SEQ ID NO: 11011 - protein, 10 aa, Artificial Sequence
  Description of Artificial Sequence: Synthetic epitope
HSLEASENIR

SEQ ID NO: 11012 - protein, 10 aa, Artificial Sequence
  Description of Artificial Sequence: Synthetic epitope
HSLMVLEKII

SEQ ID NO: 11013 - protein, 10 aa, Artificial Sequence
  Description of Artificial Sequence: Synthetic epitope
HSLQEQEIEH

SEQ ID NO: 11014 - protein, 10 aa, Artificial Sequence
  Description of Artificial Sequence: Synthetic epitope
HSLRMVLPSR

SEQ ID NO: 11015 - protein, 10 aa, Artificial Sequence
  Description of Artificial Sequence: Synthetic epitope
HSLWYSTAQI

SEQ ID NO: 11016 - protein, 10 aa, Artificial Sequence
  Description of Artificial Sequence: Synthetic epitope
HSNETDRLPR

SEQ ID NO: 11017 - protein, 10 aa, Artificial Sequence
  Description of Artificial Sequence: Synthetic epitope
HSNIYQSITK

SEQ ID NO: 11018 - protein, 10 aa, Artificial Sequence
  Description of Artificial Sequence: Synthetic epitope
HSNKALMAPN

SEQ ID NO: 11019 - protein, 10 aa, Artificial Sequence
  Description of Artificial Sequence: Synthetic epitope
HSNKVENHGL

SEQ ID NO: 11020 - protein, 10 aa, Artificial Sequence
  Description of Artificial Sequence: Synthetic epitope
HSNRIDSIHH

SEQ ID NO: 11021 - protein, 10 aa, Artificial Sequence
  Description of Artificial Sequence: Synthetic epitope
HSPATSSTHS

SEQ ID NO: 11022 - protein, 10 aa, Artificial Sequence
  Description of Artificial Sequence: Synthetic epitope
HSPTILEALE

SEQ ID NO: 11023 - protein, 10 aa, Artificial Sequence
  Description of Artificial Sequence: Synthetic epitope
HSPTMSQRSA

SEQ ID NO: 11024 - protein, 10 aa, Artificial Sequence
  Description of Artificial Sequence: Synthetic epitope
HSQESNSLQQ

SEQ ID NO: 11025 - protein, 10 aa, Artificial Sequence
  Description of Artificial Sequence: Synthetic epitope
HSQIAAQTSA

SEQ ID NO: 11026 - protein, 10 aa, Artificial Sequence
  Description of Artificial Sequence: Synthetic epitope
HSQQSSATKD

SEQ ID NO: 11027 - protein, 10 aa, Artificial Sequence
  Description of Artificial Sequence: Synthetic epitope
HSREAKESSA

SEQ ID NO: 11028 - protein, 10 aa, Artificial Sequence
  Description of Artificial Sequence: Synthetic epitope
HSRRAATSPA

SEQ ID NO: 11029 - protein, 10 aa, Artificial Sequence
  Description of Artificial Sequence: Synthetic epitope
HSRSELLQQA

SEQ ID NO: 11030 - protein, 10 aa, Artificial Sequence
  Description of Artificial Sequence: Synthetic epitope
HSSAALAQRQ

SEQ ID NO: 11031 - protein, 10 aa, Artificial Sequence
  Description of Artificial Sequence: Synthetic epitope
HSSAMQIVDE

SEQ ID NO: 11032 - protein, 10 aa, Artificial Sequence
  Description of Artificial Sequence: Synthetic epitope
HSSAQAMSPT

SEQ ID NO: 11033 - protein, 10 aa, Artificial Sequence
  Description of Artificial Sequence: Synthetic epitope
HSSEEVVKSE

SEQ ID NO: 11034 - protein, 10 aa, Artificial Sequence
  Description of Artificial Sequence: Synthetic epitope
HSSFSTATAS

SEQ ID NO: 11035 - protein, 10 aa, Artificial Sequence
  Description of Artificial Sequence: Synthetic epitope
HSSHQETESK

SEQ ID NO: 11036 - protein, 10 aa, Artificial Sequence
  Description of Artificial Sequence: Synthetic epitope
HSSIPSIENK

SEQ ID NO: 11037 - protein, 10 aa, Artificial Sequence
  Description of Artificial Sequence: Synthetic epitope
HSSKTTSLEQ

SEQ ID NO: 11038 - protein, 10 aa, Artificial Sequence
  Description of Artificial Sequence: Synthetic epitope
HSSKVSKSLI

SEQ ID NO: 11039 - protein, 10 aa, Artificial Sequence
  Description of Artificial Sequence: Synthetic epitope
HSSLQALTAS

SEQ ID NO: 11040 - protein, 10 aa, Artificial Sequence
  Description of Artificial Sequence: Synthetic epitope
HSSLSQIPSA

SEQ ID NO: 11041 - protein, 10 aa, Artificial Sequence
  Description of Artificial Sequence: Synthetic epitope
HSSQQRQDSL

SEQ ID NO: 11042 - protein, 10 aa, Artificial Sequence
  Description of Artificial Sequence: Synthetic epitope
HSSQTDAAKG

SEQ ID NO: 11043 - protein, 10 aa, Artificial Sequence
  Description of Artificial Sequence: Synthetic epitope
HSSRHDSHQL

SEQ ID NO: 11044 - protein, 10 aa, Artificial Sequence
  Description of Artificial Sequence: Synthetic epitope
HSSTTAQSSQ

SEQ ID NO: 11045 - protein, 10 aa, Artificial Sequence
  Description of Artificial Sequence: Synthetic epitope
HSTAATSGLS

SEQ ID NO: 11046 - protein, 10 aa, Artificial Sequence
  Description of Artificial Sequence: Synthetic epitope
HSTALDSLEI

SEQ ID NO: 11047 - protein, 10 aa, Artificial Sequence
  Description of Artificial Sequence: Synthetic epitope
HSTKNMQTTQ

SEQ ID NO: 11048 - protein, 10 aa, Artificial Sequence
  Description of Artificial Sequence: Synthetic epitope
HSTKYNRQNQ

SEQ ID NO: 11049 - protein, 10 aa, Artificial Sequence
  Description of Artificial Sequence: Synthetic epitope
HSTLLSKKET

SEQ ID NO: 11050 - protein, 10 aa, Artificial Sequence
  Description of Artificial Sequence: Synthetic epitope
HSTSASATYG

SEQ ID NO: 11051 - protein, 10 aa, Artificial Sequence
  Description of Artificial Sequence: Synthetic epitope
HSVDQKVFTT

SEQ ID NO: 11052 - protein, 10 aa, Artificial Sequence
  Description of Artificial Sequence: Synthetic epitope
HSVFVNVSKG

SEQ ID NO: 11053 - protein, 10 aa, Artificial Sequence
  Description of Artificial Sequence: Synthetic epitope
HSVLKKTLQD

SEQ ID NO: 11054 - protein, 10 aa, Artificial Sequence
  Description of Artificial Sequence: Synthetic epitope
HSVNQGQNIH

SEQ ID NO: 11055 - protein, 10 aa, Artificial Sequence
  Description of Artificial Sequence: Synthetic epitope
HSVSTLEKTL

SEQ ID NO: 11056 - protein, 10 aa, Artificial Sequence
  Description of Artificial Sequence: Synthetic epitope
HSVVKMITKK

SEQ ID NO: 11057 - protein, 10 aa, Artificial Sequence
  Description of Artificial Sequence: Synthetic epitope
HSWADVARRQ

SEQ ID NO: 11058 - protein, 10 aa, Artificial Sequence
  Description of Artificial Sequence: Synthetic epitope
HSWHESDSFT

SEQ ID NO: 11059 - protein, 10 aa, Artificial Sequence
  Description of Artificial Sequence: Synthetic epitope
HSYSTQDEHF

SEQ ID NO: 11060 - protein, 10 aa, Artificial Sequence
  Description of Artificial Sequence: Synthetic epitope
HTALELAVDQ

SEQ ID NO: 11061 - protein, 10 aa, Artificial Sequence
  Description of Artificial Sequence: Synthetic epitope
HTARSKAARR

SEQ ID NO: 11062 - protein, 10 aa, Artificial Sequence
  Description of Artificial Sequence: Synthetic epitope
HTAVPTATSS

SEQ ID NO: 11063 - protein, 10 aa, Artificial Sequence
  Description of Artificial Sequence: Synthetic epitope
HTDKSPQHSS

SEQ ID NO: 11064 - protein, 10 aa, Artificial Sequence
  Description of Artificial Sequence: Synthetic epitope
HTEAESEQEG

SEQ ID NO: 11065 - protein, 10 aa, Artificial Sequence
  Description of Artificial Sequence: Synthetic epitope
HTEKAEDKQK

SEQ ID NO: 11066 - protein, 10 aa, Artificial Sequence
  Description of Artificial Sequence: Synthetic epitope
HTETILTAPE

SEQ ID NO: 11067 - protein, 10 aa, Artificial Sequence
  Description of Artificial Sequence: Synthetic epitope
HTEVHWHEAH

SEQ ID NO: 11068 - protein, 10 aa, Artificial Sequence
  Description of Artificial Sequence: Synthetic epitope
HTFAYQNTIY

SEQ ID NO: 11069 - protein, 10 aa, Artificial Sequence
  Description of Artificial Sequence: Synthetic epitope
HTGDELLSYE

SEQ ID NO: 11070 - protein, 10 aa, Artificial Sequence
  Description of Artificial Sequence: Synthetic epitope
HTGSISQSND

SEQ ID NO: 11071 - protein, 10 aa, Artificial Sequence
  Description of Artificial Sequence: Synthetic epitope
HTGTAIRQSS

SEQ ID NO: 11072 - protein, 10 aa, Artificial Sequence
  Description of Artificial Sequence: Synthetic epitope
HTIEMIEKEQ

SEQ ID NO: 11073 - protein, 10 aa, Artificial Sequence
  Description of Artificial Sequence: Synthetic epitope
HTISLSENGE

SEQ ID NO: 11074 - protein, 10 aa, Artificial Sequence
  Description of Artificial Sequence: Synthetic epitope
HTKEELLESE

SEQ ID NO: 11075 - protein, 10 aa, Artificial Sequence
  Description of Artificial Sequence: Synthetic epitope
HTLASNGANS

SEQ ID NO: 11076 - protein, 10 aa, Artificial Sequence
  Description of Artificial Sequence: Synthetic epitope
HTLSQPLTDE

SEQ ID NO: 11077 - protein, 10 aa, Artificial Sequence
  Description of Artificial Sequence: Synthetic epitope
HTNAARQPEL

SEQ ID NO: 11078 - protein, 10 aa, Artificial Sequence
  Description of Artificial Sequence: Synthetic epitope
HTNETLGLDS

SEQ ID NO: 11079 - protein, 10 aa, Artificial Sequence
  Description of Artificial Sequence: Synthetic epitope
HTNIMALLPQ

SEQ ID NO: 11080 - protein, 10 aa, Artificial Sequence
  Description of Artificial Sequence: Synthetic epitope
HTPETSYGKL

SEQ ID NO: 11081 - protein, 10 aa, Artificial Sequence
  Description of Artificial Sequence: Synthetic epitope
HTPKAQSQPQ

SEQ ID NO: 11082 - protein, 10 aa, Artificial Sequence
  Description of Artificial Sequence: Synthetic epitope
HTQGWQIVAQ

SEQ ID NO: 11083 - protein, 10 aa, Artificial Sequence
  Description of Artificial Sequence: Synthetic epitope
HTQVNTNTTL

SEQ ID NO: 11084 - protein, 10 aa, Artificial Sequence
  Description of Artificial Sequence: Synthetic epitope
HTRISELKAE

SEQ ID NO: 11085 - protein, 10 aa, Artificial Sequence
  Description of Artificial Sequence: Synthetic epitope
HTSMNKGGKD

SEQ ID NO: 11086 - protein, 10 aa, Artificial Sequence
  Description of Artificial Sequence: Synthetic epitope
HTSNVKMEKL

SEQ ID NO: 11087 - protein, 10 aa, Artificial Sequence
  Description of Artificial Sequence: Synthetic epitope
HTSPSQSYRS

SEQ ID NO: 11088 - protein, 10 aa, Artificial Sequence
  Description of Artificial Sequence: Synthetic epitope
HTSSAPITGQ

SEQ ID NO: 11089 - protein, 10 aa, Artificial Sequence
  Description of Artificial Sequence: Synthetic epitope
HTSSTSTSLE

SEQ ID NO: 11090 - protein, 10 aa, Artificial Sequence
  Description of Artificial Sequence: Synthetic epitope
HTSTVLTTKA

SEQ ID NO: 11091 - protein, 10 aa, Artificial Sequence
  Description of Artificial Sequence: Synthetic epitope
HTSTVLTTKA

SEQ ID NO: 11092 - protein, 10 aa, Artificial Sequence
  Description of Artificial Sequence: Synthetic epitope
HTSVVANSVA

SEQ ID NO: 11093 - protein, 10 aa, Artificial Sequence
  Description of Artificial Sequence: Synthetic epitope
HTTSLLTLDI

SEQ ID NO: 11094 - protein, 10 aa, Artificial Sequence
  Description of Artificial Sequence: Synthetic epitope
HTTVTASVSA

SEQ ID NO: 11095 - protein, 10 aa, Artificial Sequence
  Description of Artificial Sequence: Synthetic epitope
HTVAMSTNSV

SEQ ID NO: 11096 - protein, 10 aa, Artificial Sequence
  Description of Artificial Sequence: Synthetic epitope
HTVQSTEKQE

SEQ ID NO: 11097 - protein, 10 aa, Artificial Sequence
  Description of Artificial Sequence: Synthetic epitope
HVAEQLKVSQ

SEQ ID NO: 11098 - protein, 10 aa, Artificial Sequence
  Description of Artificial Sequence: Synthetic epitope
HVEKSISDNS

SEQ ID NO: 11099 - protein, 10 aa, Artificial Sequence
  Description of Artificial Sequence: Synthetic epitope
HVESSTLSNR

SEQ ID NO: 11100 - protein, 10 aa, Artificial Sequence
  Description of Artificial Sequence: Synthetic epitope
HVEVESKAVK

SEQ ID NO: 11101 - protein, 10 aa, Artificial Sequence
  Description of Artificial Sequence: Synthetic epitope
HVFQKVQTSP

SEQ ID NO: 11102 - protein, 10 aa, Artificial Sequence
  Description of Artificial Sequence: Synthetic epitope
HVGETRKEDD

SEQ ID NO: 11103 - protein, 10 aa, Artificial Sequence
  Description of Artificial Sequence: Synthetic epitope
HVGHVDVTYG

SEQ ID NO: 11104 - protein, 10 aa, Artificial Sequence
  Description of Artificial Sequence: Synthetic epitope
HVGSSAEFME

SEQ ID NO: 11105 - protein, 10 aa, Artificial Sequence
  Description of Artificial Sequence: Synthetic epitope
HVHAQMAENE

SEQ ID NO: 11106 - protein, 10 aa, Artificial Sequence
  Description of Artificial Sequence: Synthetic epitope
HVIAIKMKQP

SEQ ID NO: 11107 - protein, 10 aa, Artificial Sequence
  Description of Artificial Sequence: Synthetic epitope
HVKFKSKADL

SEQ ID NO: 11108 - protein, 10 aa, Artificial Sequence
  Description of Artificial Sequence: Synthetic epitope
HVKKLSKSQN

SEQ ID NO: 11109 - protein, 10 aa, Artificial Sequence
  Description of Artificial Sequence: Synthetic epitope
HVLIEAKTIF

SEQ ID NO: 11110 - protein, 10 aa, Artificial Sequence
  Description of Artificial Sequence: Synthetic epitope
HVLNSKARRD

SEQ ID NO: 11111 - protein, 10 aa, Artificial Sequence
  Description of Artificial Sequence: Synthetic epitope
HVPSLKQRSS

SEQ ID NO: 11112 - protein, 10 aa, Artificial Sequence
  Description of Artificial Sequence: Synthetic epitope
HVQKSKNQEQ

SEQ ID NO: 11113 - protein, 10 aa, Artificial Sequence
  Description of Artificial Sequence: Synthetic epitope
HVQPALAVSM

SEQ ID NO: 11114 - protein, 10 aa, Artificial Sequence
  Description of Artificial Sequence: Synthetic epitope
HVQRFFYRIY

SEQ ID NO: 11115 - protein, 10 aa, Artificial Sequence
  Description of Artificial Sequence: Synthetic epitope
HVRKAQDKAE

SEQ ID NO: 11116 - protein, 10 aa, Artificial Sequence
  Description of Artificial Sequence: Synthetic epitope
HVSEETLDES

SEQ ID NO: 11117 - protein, 10 aa, Artificial Sequence
  Description of Artificial Sequence: Synthetic epitope
HVSLETEWGQ

SEQ ID NO: 11118 - protein, 10 aa, Artificial Sequence
  Description of Artificial Sequence: Synthetic epitope
HVSQTAEEFY

SEQ ID NO: 11119 - protein, 10 aa, Artificial Sequence
  Description of Artificial Sequence: Synthetic epitope
HVSRQDTLQQ

SEQ ID NO: 11120 - protein, 10 aa, Artificial Sequence
  Description of Artificial Sequence: Synthetic epitope
HVTDYKTSES

SEQ ID NO: 11121 - protein, 10 aa, Artificial Sequence
  Description of Artificial Sequence: Synthetic epitope
HVTITTKTAD

SEQ ID NO: 11122 - protein, 10 aa, Artificial Sequence
  Description of Artificial Sequence: Synthetic epitope
HVTKSATSSV

SEQ ID NO: 11123 - protein, 10 aa, Artificial Sequence
  Description of Artificial Sequence: Synthetic epitope
HVVAKLIKIL

SEQ ID NO: 11124 - protein, 10 aa, Artificial Sequence
  Description of Artificial Sequence: Synthetic epitope
HVVDTSMADV

SEQ ID NO: 11125 - protein, 10 aa, Artificial Sequence
  Description of Artificial Sequence: Synthetic epitope
HWFSQASTTR

SEQ ID NO: 11126 - protein, 10 aa, Artificial Sequence
  Description of Artificial Sequence: Synthetic epitope
HWHTQYSNNI

SEQ ID NO: 11127 - protein, 10 aa, Artificial Sequence
  Description of Artificial Sequence: Synthetic epitope
HWNEDIGEWQ

SEQ ID NO: 11128 - protein, 10 aa, Artificial Sequence
  Description of Artificial Sequence: Synthetic epitope
HWSVESYSDF

SEQ ID NO: 11129 - protein, 10 aa, Artificial Sequence
  Description of Artificial Sequence: Synthetic epitope
HWTVNWRFLP

SEQ ID NO: 11130 - protein, 10 aa, Artificial Sequence
  Description of Artificial Sequence: Synthetic epitope
HWVFNVAKKY

SEQ ID NO: 11131 - protein, 10 aa, Artificial Sequence
  Description of Artificial Sequence: Synthetic epitope
HYFNQFHRRN

SEQ ID NO: 11132 - protein, 10 aa, Artificial Sequence
  Description of Artificial Sequence: Synthetic epitope
HYFSQRTSEA

SEQ ID NO: 11133 - protein, 10 aa, Artificial Sequence
  Description of Artificial Sequence: Synthetic epitope
HYNSKTLKTE

SEQ ID NO: 11134 - protein, 10 aa, Artificial Sequence
  Description of Artificial Sequence: Synthetic epitope
HYQQALTSAQ

SEQ ID NO: 11135 - protein, 10 aa, Artificial Sequence
  Description of Artificial Sequence: Synthetic epitope
HYTFKFPQAM

SEQ ID NO: 11136 - protein, 10 aa, Artificial Sequence
  Description of Artificial Sequence: Synthetic epitope
HYVAYHVESK

SEQ ID NO: 11137 - protein, 10 aa, Artificial Sequence
  Description of Artificial Sequence: Synthetic epitope
HYVSQSLVTL

SEQ ID NO: 11138 - protein, 10 aa, Artificial Sequence
  Description of Artificial Sequence: Synthetic epitope
HYVTETLSEE

SEQ ID NO: 11139 - protein, 10 aa, Artificial Sequence
  Description of Artificial Sequence: Synthetic epitope
IAAEFQKKSG

SEQ ID NO: 11140 - protein, 10 aa, Artificial Sequence
  Description of Artificial Sequence: Synthetic epitope
IAAMIDTEFA

SEQ ID NO: 11141 - protein, 10 aa, Artificial Sequence
  Description of Artificial Sequence: Synthetic epitope
IAAVGKYGTL

SEQ ID NO: 11142 - protein, 10 aa, Artificial Sequence
  Description of Artificial Sequence: Synthetic epitope
IAAYENSKWE

SEQ ID NO: 11143 - protein, 10 aa, Artificial Sequence
  Description of Artificial Sequence: Synthetic epitope
IADNNRVREE

SEQ ID NO: 11144 - protein, 10 aa, Artificial Sequence
  Description of Artificial Sequence: Synthetic epitope
IADQWMKVYE

SEQ ID NO: 11145 - protein, 10 aa, Artificial Sequence
  Description of Artificial Sequence: Synthetic epitope
IAEGQSEEGR

SEQ ID NO: 11146 - protein, 10 aa, Artificial Sequence
  Description of Artificial Sequence: Synthetic epitope
IAEGQTSIKD

SEQ ID NO: 11147 - protein, 10 aa, Artificial Sequence
  Description of Artificial Sequence: Synthetic epitope
IAETSNVITE

SEQ ID NO: 11148 - protein, 10 aa, Artificial Sequence
  Description of Artificial Sequence: Synthetic epitope
IAGDLMKLIE

SEQ ID NO: 11149 - protein, 10 aa, Artificial Sequence
  Description of Artificial Sequence: Synthetic epitope
IAGKLTSQAF

SEQ ID NO: 11150 - protein, 10 aa, Artificial Sequence
  Description of Artificial Sequence: Synthetic epitope
IAGQSARAIM

SEQ ID NO: 11151 - protein, 10 aa, Artificial Sequence
  Description of Artificial Sequence: Synthetic epitope
IAKAMRLKIS

SEQ ID NO: 11152 - protein, 10 aa, Artificial Sequence
  Description of Artificial Sequence: Synthetic epitope
IAKEAKRSNS

SEQ ID NO: 11153 - protein, 10 aa, Artificial Sequence
  Description of Artificial Sequence: Synthetic epitope
IAKQALKKPI

SEQ ID NO: 11154 - protein, 10 aa, Artificial Sequence
  Description of Artificial Sequence: Synthetic epitope
IAKSKQEKRE

SEQ ID NO: 11155 - protein, 10 aa, Artificial Sequence
  Description of Artificial Sequence: Synthetic epitope
IAKVETVPKE

SEQ ID NO: 11156 - protein, 10 aa, Artificial Sequence
  Description of Artificial Sequence: Synthetic epitope
IALETSTQVA

SEQ ID NO: 11157 - protein, 10 aa, Artificial Sequence
  Description of Artificial Sequence: Synthetic epitope
IALKKILSSG

SEQ ID NO: 11158 - protein, 10 aa, Artificial Sequence
  Description of Artificial Sequence: Synthetic epitope
IALKSISATE

SEQ ID NO: 11159 - protein, 10 aa, Artificial Sequence
  Description of Artificial Sequence: Synthetic epitope
IALSRYATAL

SEQ ID NO: 11160 - protein, 10 aa, Artificial Sequence
  Description of Artificial Sequence: Synthetic epitope
IAMASIAKQT

SEQ ID NO: 11161 - protein, 10 aa, Artificial Sequence
  Description of Artificial Sequence: Synthetic epitope
IAMSTMHTDV

SEQ ID NO: 11162 - protein, 10 aa, Artificial Sequence
  Description of Artificial Sequence: Synthetic epitope
IAPTAVDSNS

SEQ ID NO: 11163 - protein, 10 aa, Artificial Sequence
  Description of Artificial Sequence: Synthetic epitope
IAQAMDTKMK

SEQ ID NO: 11164 - protein, 10 aa, Artificial Sequence
  Description of Artificial Sequence: Synthetic epitope
IAQEIASLSK

SEQ ID NO: 11165 - protein, 10 aa, Artificial Sequence
  Description of Artificial Sequence: Synthetic epitope
IAQKPVGEMK

SEQ ID NO: 11166 - protein, 10 aa, Artificial Sequence
  Description of Artificial Sequence: Synthetic epitope
IAQLASQKHT

SEQ ID NO: 11167 - protein, 10 aa, Artificial Sequence
  Description of Artificial Sequence: Synthetic epitope
IAQRRILPKP

SEQ ID NO: 11168 - protein, 10 aa, Artificial Sequence
  Description of Artificial Sequence: Synthetic epitope
IARATEALQT

SEQ ID NO: 11169 - protein, 10 aa, Artificial Sequence
  Description of Artificial Sequence: Synthetic epitope
IARLAQATQE

SEQ ID NO: 11170 - protein, 10 aa, Artificial Sequence
  Description of Artificial Sequence: Synthetic epitope
IASIQSDDAE

SEQ ID NO: 11171 - protein, 10 aa, Artificial Sequence
  Description of Artificial Sequence: Synthetic epitope
IASKLARSQD

SEQ ID NO: 11172 - protein, 10 aa, Artificial Sequence
  Description of Artificial Sequence: Synthetic epitope
IASRELEKAK

SEQ ID NO: 11173 - protein, 10 aa, Artificial Sequence
  Description of Artificial Sequence: Synthetic epitope
IASSLASQNE

SEQ ID NO: 11174 - protein, 10 aa, Artificial Sequence
  Description of Artificial Sequence: Synthetic epitope
IASSQAFGNA

SEQ ID NO: 11175 - protein, 10 aa, Artificial Sequence
  Description of Artificial Sequence: Synthetic epitope
IASTTAASSA

SEQ ID NO: 11176 - protein, 10 aa, Artificial Sequence
  Description of Artificial Sequence: Synthetic epitope
IASVKLTYLK

SEQ ID NO: 11177 - protein, 10 aa, Artificial Sequence
  Description of Artificial Sequence: Synthetic epitope
IATAENMKNS

SEQ ID NO: 11178 - protein, 10 aa, Artificial Sequence
  Description of Artificial Sequence: Synthetic epitope
IATDLGKKSE

SEQ ID NO: 11179 - protein, 10 aa, Artificial Sequence
  Description of Artificial Sequence: Synthetic epitope
IATEEKSKKF

SEQ ID NO: 11180 - protein, 10 aa, Artificial Sequence
  Description of Artificial Sequence: Synthetic epitope
IATEKKNSLK

SEQ ID NO: 11181 - protein, 10 aa, Artificial Sequence
  Description of Artificial Sequence: Synthetic epitope
IATMTSVGKS

SEQ ID NO: 11182 - protein, 10 aa, Artificial Sequence
  Description of Artificial Sequence: Synthetic epitope
IATSQKKPTR

SEQ ID NO: 11183 - protein, 10 aa, Artificial Sequence
  Description of Artificial Sequence: Synthetic epitope
IATVEELTDT

SEQ ID NO: 11184 - protein, 10 aa, Artificial Sequence
  Description of Artificial Sequence: Synthetic epitope
IAVETEMKKE

SEQ ID NO: 11185 - protein, 10 aa, Artificial Sequence
  Description of Artificial Sequence: Synthetic epitope
IAVRLTQTKV

SEQ ID NO: 11186 - protein, 10 aa, Artificial Sequence
  Description of Artificial Sequence: Synthetic epitope
IAVSAAVFPT

SEQ ID NO: 11187 - protein, 10 aa, Artificial Sequence
  Description of Artificial Sequence: Synthetic epitope
IAVSKLLKSS

SEQ ID NO: 11188 - protein, 10 aa, Artificial Sequence
  Description of Artificial Sequence: Synthetic epitope
IAWHKKTQED

SEQ ID NO: 11189 - protein, 10 aa, Artificial Sequence
  Description of Artificial Sequence: Synthetic epitope
IAWKYYKFPK

SEQ ID NO: 11190 - protein, 10 aa, Artificial Sequence
  Description of Artificial Sequence: Synthetic epitope
IDAASAMMLL

SEQ ID NO: 11191 - protein, 10 aa, Artificial Sequence
  Description of Artificial Sequence: Synthetic epitope
IDASNEQSST

SEQ ID NO: 11192 - protein, 10 aa, Artificial Sequence
  Description of Artificial Sequence: Synthetic epitope
IDDEITEAKS

SEQ ID NO: 11193 - protein, 10 aa, Artificial Sequence
  Description of Artificial Sequence: Synthetic epitope
IDEDIGEQFA

SEQ ID NO: 11194 - protein, 10 aa, Artificial Sequence
  Description of Artificial Sequence: Synthetic epitope
IDEEASMMED

SEQ ID NO: 11195 - protein, 10 aa, Artificial Sequence
  Description of Artificial Sequence: Synthetic epitope
IDEKSLIKGK

SEQ ID NO: 11196 - protein, 10 aa, Artificial Sequence
  Description of Artificial Sequence: Synthetic epitope
IDELELVKYK

SEQ ID NO: 11197 - protein, 10 aa, Artificial Sequence
  Description of Artificial Sequence: Synthetic epitope
IDHEALNKQI

SEQ ID NO: 11198 - protein, 10 aa, Artificial Sequence
  Description of Artificial Sequence: Synthetic epitope
IDIKQLIAKK

SEQ ID NO: 11199 - protein, 10 aa, Artificial Sequence
  Description of Artificial Sequence: Synthetic epitope
IDIQSSLSKG

SEQ ID NO: 11200 - protein, 10 aa, Artificial Sequence
  Description of Artificial Sequence: Synthetic epitope
IDKAQAVTQP

SEQ ID NO: 11201 - protein, 10 aa, Artificial Sequence
  Description of Artificial Sequence: Synthetic epitope
IDKNKMQRAN

SEQ ID NO: 11202 - protein, 10 aa, Artificial Sequence
  Description of Artificial Sequence: Synthetic epitope
IDKWGTDDML

SEQ ID NO: 11203 - protein, 10 aa, Artificial Sequence
  Description of Artificial Sequence: Synthetic epitope
IDNAGATNRS

SEQ ID NO: 11204 - protein, 10 aa, Artificial Sequence
  Description of Artificial Sequence: Synthetic epitope
IDPAVSKELA

SEQ ID NO: 11205 - protein, 10 aa, Artificial Sequence
  Description of Artificial Sequence: Synthetic epitope
IDPLMEQDEG

SEQ ID NO: 11206 - protein, 10 aa, Artificial Sequence
  Description of Artificial Sequence: Synthetic epitope
IDQMLKSNIV

SEQ ID NO: 11207 - protein, 10 aa, Artificial Sequence
  Description of Artificial Sequence: Synthetic epitope
IDRQESSRQQ

SEQ ID NO: 11208 - protein, 10 aa, Artificial Sequence
  Description of Artificial Sequence: Synthetic epitope
IDRTATLRKT

SEQ ID NO: 11209 - protein, 10 aa, Artificial Sequence
  Description of Artificial Sequence: Synthetic epitope
IDSESTLIQG

SEQ ID NO: 11210 - protein, 10 aa, Artificial Sequence
  Description of Artificial Sequence: Synthetic epitope
IDSILNLQQA

SEQ ID NO: 11211 - protein, 10 aa, Artificial Sequence
  Description of Artificial Sequence: Synthetic epitope
IDSTIQSEFP

SEQ ID NO: 11212 - protein, 10 aa, Artificial Sequence
  Description of Artificial Sequence: Synthetic epitope
IDSTVSDQRQ

SEQ ID NO: 11213 - protein, 10 aa, Artificial Sequence
  Description of Artificial Sequence: Synthetic epitope
IDSVASLQHK

SEQ ID NO: 11214 - protein, 10 aa, Artificial Sequence
  Description of Artificial Sequence: Synthetic epitope
IDTGITVSRE

SEQ ID NO: 11215 - protein, 10 aa, Artificial Sequence
  Description of Artificial Sequence: Synthetic epitope
IDTKGVTALV

SEQ ID NO: 11216 - protein, 10 aa, Artificial Sequence
  Description of Artificial Sequence: Synthetic epitope
IDVGSSVMSP

SEQ ID NO: 11217 - protein, 10 aa, Artificial Sequence
  Description of Artificial Sequence: Synthetic epitope
IDVTKSYYQK

SEQ ID NO: 11218 - protein, 10 aa, Artificial Sequence
  Description of Artificial Sequence: Synthetic epitope
IDWERHVVKA

SEQ ID NO: 11219 - protein, 10 aa, Artificial Sequence
  Description of Artificial Sequence: Synthetic epitope
IDWWGFRVKK

SEQ ID NO: 11220 - protein, 10 aa, Artificial Sequence
  Description of Artificial Sequence: Synthetic epitope
IDYTGGLKHE

SEQ ID NO: 11221 - protein, 10 aa, Artificial Sequence
  Description of Artificial Sequence: Synthetic epitope
IEAANLSEEL

SEQ ID NO: 11222 - protein, 10 aa, Artificial Sequence
  Description of Artificial Sequence: Synthetic epitope
IEAESSYSRA

SEQ ID NO: 11223 - protein, 10 aa, Artificial Sequence
  Description of Artificial Sequence: Synthetic epitope
IEAKALKVRQ

SEQ ID NO: 11224 - protein, 10 aa, Artificial Sequence
  Description of Artificial Sequence: Synthetic epitope
IEALAMIKQR

SEQ ID NO: 11225 - protein, 10 aa, Artificial Sequence
  Description of Artificial Sequence: Synthetic epitope
IEATTRARAT

SEQ ID NO: 11226 - protein, 10 aa, Artificial Sequence
  Description of Artificial Sequence: Synthetic epitope
IEDDMLKEEM

SEQ ID NO: 11227 - protein, 10 aa, Artificial Sequence
  Description of Artificial Sequence: Synthetic epitope
IEEIARSQET

SEQ ID NO: 11228 - protein, 10 aa, Artificial Sequence
  Description of Artificial Sequence: Synthetic epitope
IEEKKALEAE

SEQ ID NO: 11229 - protein, 10 aa, Artificial Sequence
  Description of Artificial Sequence: Synthetic epitope
IEELAIAKNN

SEQ ID NO: 11230 - protein, 10 aa, Artificial Sequence
  Description of Artificial Sequence: Synthetic epitope
IEENEMKKPY

SEQ ID NO: 11231 - protein, 10 aa, Artificial Sequence
  Description of Artificial Sequence: Synthetic epitope
IEFKKSTVIL

SEQ ID NO: 11232 - protein, 10 aa, Artificial Sequence
  Description of Artificial Sequence: Synthetic epitope
IEFRVSLLRD

SEQ ID NO: 11233 - protein, 10 aa, Artificial Sequence
  Description of Artificial Sequence: Synthetic epitope
IEFTEQTAPK

SEQ ID NO: 11234 - protein, 10 aa, Artificial Sequence
  Description of Artificial Sequence: Synthetic epitope
IEGVQSEGQD

SEQ ID NO: 11235 - protein, 10 aa, Artificial Sequence
  Description of Artificial Sequence: Synthetic epitope
IEHISVFSET

SEQ ID NO: 11236 - protein, 10 aa, Artificial Sequence
  Description of Artificial Sequence: Synthetic epitope
IEHSAQLKAQ

SEQ ID NO: 11237 - protein, 10 aa, Artificial Sequence
  Description of Artificial Sequence: Synthetic epitope
IEIINAMVEE

SEQ ID NO: 11238 - protein, 10 aa, Artificial Sequence
  Description of Artificial Sequence: Synthetic epitope
IEIQSMSLKF

SEQ ID NO: 11239 - protein, 10 aa, Artificial Sequence
  Description of Artificial Sequence: Synthetic epitope
IEISKLTDKV

SEQ ID NO: 11240 - protein, 10 aa, Artificial Sequence
  Description of Artificial Sequence: Synthetic epitope
IEISTIASNY

SEQ ID NO: 11241 - protein, 10 aa, Artificial Sequence
  Description of Artificial Sequence: Synthetic epitope
IEKAKKARST

SEQ ID NO: 11242 - protein, 10 aa, Artificial Sequence
  Description of Artificial Sequence: Synthetic epitope
IEKGKEKNRL

SEQ ID NO: 11243 - protein, 10 aa, Artificial Sequence
  Description of Artificial Sequence: Synthetic epitope
IEKGVEIEEK

SEQ ID NO: 11244 - protein, 10 aa, Artificial Sequence
  Description of Artificial Sequence: Synthetic epitope
IEKIKAEQSK

SEQ ID NO: 11245 - protein, 10 aa, Artificial Sequence
  Description of Artificial Sequence: Synthetic epitope
IEKIMLKGVQ

SEQ ID NO: 11246 - protein, 10 aa, Artificial Sequence
  Description of Artificial Sequence: Synthetic epitope
IEKIRYVPEQ

SEQ ID NO: 11247 - protein, 10 aa, Artificial Sequence
  Description of Artificial Sequence: Synthetic epitope
IEKLTLNDSS

SEQ ID NO: 11248 - protein, 10 aa, Artificial Sequence
  Description of Artificial Sequence: Synthetic epitope
IEKVKESDKL

SEQ ID NO: 11249 - protein, 10 aa, Artificial Sequence
  Description of Artificial Sequence: Synthetic epitope
IEKVVASVKR

SEQ ID NO: 11250 - protein, 10 aa, Artificial Sequence
  Description of Artificial Sequence: Synthetic epitope
IELAETEEAS

SEQ ID NO: 11251 - protein, 10 aa, Artificial Sequence
  Description of Artificial Sequence: Synthetic epitope
IELSNESQPT

SEQ ID NO: 11252 - protein, 10 aa, Artificial Sequence
  Description of Artificial Sequence: Synthetic epitope
IELSSKAAVN

SEQ ID NO: 11253 - protein, 10 aa, Artificial Sequence
  Description of Artificial Sequence: Synthetic epitope
IELSSTALSS

SEQ ID NO: 11254 - protein, 10 aa, Artificial Sequence
  Description of Artificial Sequence: Synthetic epitope
IENNVSKLSL

SEQ ID NO: 11255 - protein, 10 aa, Artificial Sequence
  Description of Artificial Sequence: Synthetic epitope
IENPNRVAQT

SEQ ID NO: 11256 - protein, 10 aa, Artificial Sequence
  Description of Artificial Sequence: Synthetic epitope
IEPRITLRGT

SEQ ID NO: 11257 - protein, 10 aa, Artificial Sequence
  Description of Artificial Sequence: Synthetic epitope
IEQAKVEEKI

SEQ ID NO: 11258 - protein, 10 aa, Artificial Sequence
  Description of Artificial Sequence: Synthetic epitope
IEQTKIKGDV

SEQ ID NO: 11259 - protein, 10 aa, Artificial Sequence
  Description of Artificial Sequence: Synthetic epitope
IERKQKTDGS

SEQ ID NO: 11260 - protein, 10 aa, Artificial Sequence
  Description of Artificial Sequence: Synthetic epitope
IERKSLAINE

SEQ ID NO: 11261 - protein, 10 aa, Artificial Sequence
  Description of Artificial Sequence: Synthetic epitope
IERTAAMSNL

SEQ ID NO: 11262 - protein, 10 aa, Artificial Sequence
  Description of Artificial Sequence: Synthetic epitope
IERVAEATRM

SEQ ID NO: 11263 - protein, 10 aa, Artificial Sequence
  Description of Artificial Sequence: Synthetic epitope
IESETTSEEQ

SEQ ID NO: 11264 - protein, 10 aa, Artificial Sequence
  Description of Artificial Sequence: Synthetic epitope
IESLKLNISQ

SEQ ID NO: 11265 - protein, 10 aa, Artificial Sequence
  Description of Artificial Sequence: Synthetic epitope
IESNRARVKI

SEQ ID NO: 11266 - protein, 10 aa, Artificial Sequence
  Description of Artificial Sequence: Synthetic epitope
IESSDSEEIE

SEQ ID NO: 11267 - protein, 10 aa, Artificial Sequence
  Description of Artificial Sequence: Synthetic epitope
IESSQASVET

SEQ ID NO: 11268 - protein, 10 aa, Artificial Sequence
  Description of Artificial Sequence: Synthetic epitope
IETEELKSKQ

SEQ ID NO: 11269 - protein, 10 aa, Artificial Sequence
  Description of Artificial Sequence: Synthetic epitope
IETKVVKEEK

SEQ ID NO: 11270 - protein, 10 aa, Artificial Sequence
  Description of Artificial Sequence: Synthetic epitope
IETMFTSKAP

SEQ ID NO: 11271 - protein, 10 aa, Artificial Sequence
  Description of Artificial Sequence: Synthetic epitope
IETSEVKKVT

SEQ ID NO: 11272 - protein, 10 aa, Artificial Sequence
  Description of Artificial Sequence: Synthetic epitope
IETSILNSKD

SEQ ID NO: 11273 - protein, 10 aa, Artificial Sequence
  Description of Artificial Sequence: Synthetic epitope
IETSTKIQNE

SEQ ID NO: 11274 - protein, 10 aa, Artificial Sequence
  Description of Artificial Sequence: Synthetic epitope
IEVEKERLLD

SEQ ID NO: 11275 - protein, 10 aa, Artificial Sequence
  Description of Artificial Sequence: Synthetic epitope
IFAKVSKQRQ

SEQ ID NO: 11276 - protein, 10 aa, Artificial Sequence
  Description of Artificial Sequence: Synthetic epitope
IFDTSVSKEI

SEQ ID NO: 11277 - protein, 10 aa, Artificial Sequence
  Description of Artificial Sequence: Synthetic epitope
IFDVLKEQAQ

SEQ ID NO: 11278 - protein, 10 aa, Artificial Sequence
  Description of Artificial Sequence: Synthetic epitope
IFKSRKTDHT

SEQ ID NO: 11279 - protein, 10 aa, Artificial Sequence
  Description of Artificial Sequence: Synthetic epitope
IFQINMIKYI

SEQ ID NO: 11280 - protein, 10 aa, Artificial Sequence
  Description of Artificial Sequence: Synthetic epitope
IFSQRRGAKT

SEQ ID NO: 11281 - protein, 10 aa, Artificial Sequence
  Description of Artificial Sequence: Synthetic epitope
IFVDVTSSVE

SEQ ID NO: 11282 - protein, 10 aa, Artificial Sequence
  Description of Artificial Sequence: Synthetic epitope
IGANWRKTDI

SEQ ID NO: 11283 - protein, 10 aa, Artificial Sequence
  Description of Artificial Sequence: Synthetic epitope
IGDQLAQLNT

SEQ ID NO: 11284 - protein, 10 aa, Artificial Sequence
  Description of Artificial Sequence: Synthetic epitope
IGEEARRYQG

SEQ ID NO: 11285 - protein, 10 aa, Artificial Sequence
  Description of Artificial Sequence: Synthetic epitope
IGISQRVRMN

SEQ ID NO: 11286 - protein, 10 aa, Artificial Sequence
  Description of Artificial Sequence: Synthetic epitope
IGKETIKSST

SEQ ID NO: 11287 - protein, 10 aa, Artificial Sequence
  Description of Artificial Sequence: Synthetic epitope
IGKIGISSEE

SEQ ID NO: 11288 - protein, 10 aa, Artificial Sequence
  Description of Artificial Sequence: Synthetic epitope
IGLSVSEVIE

SEQ ID NO: 11289 - protein, 10 aa, Artificial Sequence
  Description of Artificial Sequence: Synthetic epitope
IGQKGGLEKV

SEQ ID NO: 11290 - protein, 10 aa, Artificial Sequence
  Description of Artificial Sequence: Synthetic epitope
IGQTSNSLTN

SEQ ID NO: 11291 - protein, 10 aa, Artificial Sequence
  Description of Artificial Sequence: Synthetic epitope
IGQWVMDKKA

SEQ ID NO: 11292 - protein, 10 aa, Artificial Sequence
  Description of Artificial Sequence: Synthetic epitope
IGRHTLSSHQ

SEQ ID NO: 11293 - protein, 10 aa, Artificial Sequence
  Description of Artificial Sequence: Synthetic epitope
IGSKMMFQDG

SEQ ID NO: 11294 - protein, 10 aa, Artificial Sequence
  Description of Artificial Sequence: Synthetic epitope
IGSLVELEQV

SEQ ID NO: 11295 - protein, 10 aa, Artificial Sequence
  Description of Artificial Sequence: Synthetic epitope
IGSMESLEQP

SEQ ID NO: 11296 - protein, 10 aa, Artificial Sequence
  Description of Artificial Sequence: Synthetic epitope
IGTDLTQRIE

SEQ ID NO: 11297 - protein, 10 aa, Artificial Sequence
  Description of Artificial Sequence: Synthetic epitope
IGTHKIARET

SEQ ID NO: 11298 - protein, 10 aa, Artificial Sequence
  Description of Artificial Sequence: Synthetic epitope
IGTIEQKSSE

SEQ ID NO: 11299 - protein, 10 aa, Artificial Sequence
  Description of Artificial Sequence: Synthetic epitope
IGTKQAKSPI

SEQ ID NO: 11300 - protein, 10 aa, Artificial Sequence
  Description of Artificial Sequence: Synthetic epitope
IGTLDLASSR

SEQ ID NO: 11301 - protein, 10 aa, Artificial Sequence
  Description of Artificial Sequence: Synthetic epitope
IGTYMSVVDD

SEQ ID NO: 11302 - protein, 10 aa, Artificial Sequence
  Description of Artificial Sequence: Synthetic epitope
IHAASLKLLQ

SEQ ID NO: 11303 - protein, 10 aa, Artificial Sequence
  Description of Artificial Sequence: Synthetic epitope
IHAEESKKIQ

SEQ ID NO: 11304 - protein, 10 aa, Artificial Sequence
  Description of Artificial Sequence: Synthetic epitope
IHKIVARPPA

SEQ ID NO: 11305 - protein, 10 aa, Artificial Sequence
  Description of Artificial Sequence: Synthetic epitope
IHQQRQEDEE

SEQ ID NO: 11306 - protein, 10 aa, Artificial Sequence
  Description of Artificial Sequence: Synthetic epitope
IHQSLVESSH

SEQ ID NO: 11307 - protein, 10 aa, Artificial Sequence
  Description of Artificial Sequence: Synthetic epitope
IHRNSLYSET

SEQ ID NO: 11308 - protein, 10 aa, Artificial Sequence
  Description of Artificial Sequence: Synthetic epitope
IHSQQSTPFP

SEQ ID NO: 11309 - protein, 10 aa, Artificial Sequence
  Description of Artificial Sequence: Synthetic epitope
IHVSARSKLI

SEQ ID NO: 11310 - protein, 10 aa, Artificial Sequence
  Description of Artificial Sequence: Synthetic epitope
IIASPKATYV

SEQ ID NO: 11311 - protein, 10 aa, Artificial Sequence
  Description of Artificial Sequence: Synthetic epitope
IIEEVVIKRP

SEQ ID NO: 11312 - protein, 10 aa, Artificial Sequence
  Description of Artificial Sequence: Synthetic epitope
IIGKMLPLEP

SEQ ID NO: 11313 - protein, 10 aa, Artificial Sequence
  Description of Artificial Sequence: Synthetic epitope
IIHTKTTQIG

SEQ ID NO: 11314 - protein, 10 aa, Artificial Sequence
  Description of Artificial Sequence: Synthetic epitope
IIKEPESAAE

SEQ ID NO: 11315 - protein, 10 aa, Artificial Sequence
  Description of Artificial Sequence: Synthetic epitope
IIKIELSYNK

SEQ ID NO: 11316 - protein, 10 aa, Artificial Sequence
  Description of Artificial Sequence: Synthetic epitope
IIKIIRDEQY

SEQ ID NO: 11317 - protein, 10 aa, Artificial Sequence
  Description of Artificial Sequence: Synthetic epitope
IIKTAMNSQI

SEQ ID NO: 11318 - protein, 10 aa, Artificial Sequence
  Description of Artificial Sequence: Synthetic epitope
IIKVLVLREG

SEQ ID NO: 11319 - protein, 10 aa, Artificial Sequence
  Description of Artificial Sequence: Synthetic epitope
IILSERKNVP

SEQ ID NO: 11320 - protein, 10 aa, Artificial Sequence
  Description of Artificial Sequence: Synthetic epitope
IINAVRIEQE

SEQ ID NO: 11321 - protein, 10 aa, Artificial Sequence
  Description of Artificial Sequence: Synthetic epitope
IINGKISFFH

SEQ ID NO: 11322 - protein, 10 aa, Artificial Sequence
  Description of Artificial Sequence: Synthetic epitope
IINKVASVAE

SEQ ID NO: 11323 - protein, 10 aa, Artificial Sequence
  Description of Artificial Sequence: Synthetic epitope
IIPIDEKLYT

SEQ ID NO: 11324 - protein, 10 aa, Artificial Sequence
  Description of Artificial Sequence: Synthetic epitope
IIQPGIAKAN

SEQ ID NO: 11325 - protein, 10 aa, Artificial Sequence
  Description of Artificial Sequence: Synthetic epitope
IIQSPISQVP

SEQ ID NO: 11326 - protein, 10 aa, Artificial Sequence
  Description of Artificial Sequence: Synthetic epitope
IISNSERVVS

SEQ ID NO: 11327 - protein, 10 aa, Artificial Sequence
  Description of Artificial Sequence: Synthetic epitope
IITQARREDA

SEQ ID NO: 11328 - protein, 10 aa, Artificial Sequence
  Description of Artificial Sequence: Synthetic epitope
IKADKDQAND

SEQ ID NO: 11329 - protein, 10 aa, Artificial Sequence
  Description of Artificial Sequence: Synthetic epitope
IKAESAEAAK

SEQ ID NO: 11330 - protein, 10 aa, Artificial Sequence
  Description of Artificial Sequence: Synthetic epitope
IKAKSQARLE

SEQ ID NO: 11331 - protein, 10 aa, Artificial Sequence
  Description of Artificial Sequence: Synthetic epitope
IKAQELHALT

SEQ ID NO: 11332 - protein, 10 aa, Artificial Sequence
  Description of Artificial Sequence: Synthetic epitope
IKAQELHALT

SEQ ID NO: 11333 - protein, 10 aa, Artificial Sequence
  Description of Artificial Sequence: Synthetic epitope
IKAQELHALT

SEQ ID NO: 11334 - protein, 10 aa, Artificial Sequence
  Description of Artificial Sequence: Synthetic epitope
IKAQELHALT

SEQ ID NO: 11335 - protein, 10 aa, Artificial Sequence
  Description of Artificial Sequence: Synthetic epitope
IKDKTRSLEK

SEQ ID NO: 11336 - protein, 10 aa, Artificial Sequence
  Description of Artificial Sequence: Synthetic epitope
IKDSKTQSTE

SEQ ID NO: 11337 - protein, 10 aa, Artificial Sequence
  Description of Artificial Sequence: Synthetic epitope
IKEIRRSGSS

SEQ ID NO: 11338 - protein, 10 aa, Artificial Sequence
  Description of Artificial Sequence: Synthetic epitope
IKEQPQAQEK

SEQ ID NO: 11339 - protein, 10 aa, Artificial Sequence
  Description of Artificial Sequence: Synthetic epitope
IKEVIVAAEA

SEQ ID NO: 11340 - protein, 10 aa, Artificial Sequence
  Description of Artificial Sequence: Synthetic epitope
IKEVSSEKDA

SEQ ID NO: 11341 - protein, 10 aa, Artificial Sequence
  Description of Artificial Sequence: Synthetic epitope
IKFYETVGQD

SEQ ID NO: 11342 - protein, 10 aa, Artificial Sequence
  Description of Artificial Sequence: Synthetic epitope
IKGIREKQEK

SEQ ID NO: 11343 - protein, 10 aa, Artificial Sequence
  Description of Artificial Sequence: Synthetic epitope
IKGKYVSARA

SEQ ID NO: 11344 - protein, 10 aa, Artificial Sequence
  Description of Artificial Sequence: Synthetic epitope
IKHEKAHAEE

SEQ ID NO: 11345 - protein, 10 aa, Artificial Sequence
  Description of Artificial Sequence: Synthetic epitope
IKHRNIDLQD

SEQ ID NO: 11346 - protein, 10 aa, Artificial Sequence
  Description of Artificial Sequence: Synthetic epitope
IKIHTAMKES

SEQ ID NO: 11347 - protein, 10 aa, Artificial Sequence
  Description of Artificial Sequence: Synthetic epitope
IKILKYEKKL

SEQ ID NO: 11348 - protein, 10 aa, Artificial Sequence
  Description of Artificial Sequence: Synthetic epitope
IKINSRKGPA

SEQ ID NO: 11349 - protein, 10 aa, Artificial Sequence
  Description of Artificial Sequence: Synthetic epitope
IKKEQVETVP

SEQ ID NO: 11350 - protein, 10 aa, Artificial Sequence
  Description of Artificial Sequence: Synthetic epitope
IKKHEAVSQL

SEQ ID NO: 11351 - protein, 10 aa, Artificial Sequence
  Description of Artificial Sequence: Synthetic epitope
IKKLALKLST

SEQ ID NO: 11352 - protein, 10 aa, Artificial Sequence
  Description of Artificial Sequence: Synthetic epitope
IKKLNQLRAS

SEQ ID NO: 11353 - protein, 10 aa, Artificial Sequence
  Description of Artificial Sequence: Synthetic epitope
IKKMNDNDKD

SEQ ID NO: 11354 - protein, 10 aa, Artificial Sequence
  Description of Artificial Sequence: Synthetic epitope
IKKNVMEDPF

SEQ ID NO: 11355 - protein, 10 aa, Artificial Sequence
  Description of Artificial Sequence: Synthetic epitope
IKKSEGQKIP

SEQ ID NO: 11356 - protein, 10 aa, Artificial Sequence
  Description of Artificial Sequence: Synthetic epitope
IKKVTWTMNG

SEQ ID NO: 11357 - protein, 10 aa, Artificial Sequence
  Description of Artificial Sequence: Synthetic epitope
IKLEKALRVQ

SEQ ID NO: 11358 - protein, 10 aa, Artificial Sequence
  Description of Artificial Sequence: Synthetic epitope
IKLTKIFQEP

SEQ ID NO: 11359 - protein, 10 aa, Artificial Sequence
  Description of Artificial Sequence: Synthetic epitope
IKLTMKFQAL

SEQ ID NO: 11360 - protein, 10 aa, Artificial Sequence
  Description of Artificial Sequence: Synthetic epitope
IKNEFLTQGE

SEQ ID NO: 11361 - protein, 10 aa, Artificial Sequence
  Description of Artificial Sequence: Synthetic epitope
IKNEGLVIKQ

SEQ ID NO: 11362 - protein, 10 aa, Artificial Sequence
  Description of Artificial Sequence: Synthetic epitope
IKNGSRLSEL

SEQ ID NO: 11363 - protein, 10 aa, Artificial Sequence
  Description of Artificial Sequence: Synthetic epitope
IKNQQGIKAE

SEQ ID NO: 11364 - protein, 10 aa, Artificial Sequence
  Description of Artificial Sequence: Synthetic epitope
IKPQVTLQGG

SEQ ID NO: 11365 - protein, 10 aa, Artificial Sequence
  Description of Artificial Sequence: Synthetic epitope
IKPRPQVVKQ

SEQ ID NO: 11366 - protein, 10 aa, Artificial Sequence
  Description of Artificial Sequence: Synthetic epitope
IKQETIESRL

SEQ ID NO: 11367 - protein, 10 aa, Artificial Sequence
  Description of Artificial Sequence: Synthetic epitope
IKRERHGNVA

SEQ ID NO: 11368 - protein, 10 aa, Artificial Sequence
  Description of Artificial Sequence: Synthetic epitope
IKRLKLIVQE

SEQ ID NO: 11369 - protein, 10 aa, Artificial Sequence
  Description of Artificial Sequence: Synthetic epitope
IKRRANIEAA

SEQ ID NO: 11370 - protein, 10 aa, Artificial Sequence
  Description of Artificial Sequence: Synthetic epitope
IKRSVENQES

SEQ ID NO: 11371 - protein, 10 aa, Artificial Sequence
  Description of Artificial Sequence: Synthetic epitope
IKSIQSEQIN

SEQ ID NO: 11372 - protein, 10 aa, Artificial Sequence
  Description of Artificial Sequence: Synthetic epitope
IKSKTSKRKI

SEQ ID NO: 11373 - protein, 10 aa, Artificial Sequence
  Description of Artificial Sequence: Synthetic epitope
IKSLAEKQNL

SEQ ID NO: 11374 - protein, 10 aa, Artificial Sequence
  Description of Artificial Sequence: Synthetic epitope
IKSPQVQSFD

SEQ ID NO: 11375 - protein, 10 aa, Artificial Sequence
  Description of Artificial Sequence: Synthetic epitope
IKSYSRTQTS

SEQ ID NO: 11376 - protein, 10 aa, Artificial Sequence
  Description of Artificial Sequence: Synthetic epitope
IKTAKSTETR

SEQ ID NO: 11377 - protein, 10 aa, Artificial Sequence
  Description of Artificial Sequence: Synthetic epitope
IKTAQGSLSL

SEQ ID NO: 11378 - protein, 10 aa, Artificial Sequence
  Description of Artificial Sequence: Synthetic epitope
IKTELNSSAE

SEQ ID NO: 11379 - protein, 10 aa, Artificial Sequence
  Description of Artificial Sequence: Synthetic epitope
IKTGKLEMSY

SEQ ID NO: 11380 - protein, 10 aa, Artificial Sequence
  Description of Artificial Sequence: Synthetic epitope
IKTILLSKEI

SEQ ID NO: 11381 - protein, 10 aa, Artificial Sequence
  Description of Artificial Sequence: Synthetic epitope
IKTKMYTQNN

SEQ ID NO: 11382 - protein, 10 aa, Artificial Sequence
  Description of Artificial Sequence: Synthetic epitope
IKTKPQVEIG

SEQ ID NO: 11383 - protein, 10 aa, Artificial Sequence
  Description of Artificial Sequence: Synthetic epitope
IKTNRFVPDK

SEQ ID NO: 11384 - protein, 10 aa, Artificial Sequence
  Description of Artificial Sequence: Synthetic epitope
IKTSKQNGRS

SEQ ID NO: 11385 - protein, 10 aa, Artificial Sequence
  Description of Artificial Sequence: Synthetic epitope
IKTSTTAEKT

SEQ ID NO: 11386 - protein, 10 aa, Artificial Sequence
  Description of Artificial Sequence: Synthetic epitope
IKTVEVESSK

SEQ ID NO: 11387 - protein, 10 aa, Artificial Sequence
  Description of Artificial Sequence: Synthetic epitope
IKVFSSAKYP

SEQ ID NO: 11388 - protein, 10 aa, Artificial Sequence
  Description of Artificial Sequence: Synthetic epitope
IKVFSSAKYP

SEQ ID NO: 11389 - protein, 10 aa, Artificial Sequence
  Description of Artificial Sequence: Synthetic epitope
IKVKTIAARN

SEQ ID NO: 11390 - protein, 10 aa, Artificial Sequence
  Description of Artificial Sequence: Synthetic epitope
IKVMTIIESE

SEQ ID NO: 11391 - protein, 10 aa, Artificial Sequence
  Description of Artificial Sequence: Synthetic epitope
IKWKQSIGQN

SEQ ID NO: 11392 - protein, 10 aa, Artificial Sequence
  Description of Artificial Sequence: Synthetic epitope
IKWNEANRPG

SEQ ID NO: 11393 - protein, 10 aa, Artificial Sequence
  Description of Artificial Sequence: Synthetic epitope
IKYGMTVVQH

SEQ ID NO: 11394 - protein, 10 aa, Artificial Sequence
  Description of Artificial Sequence: Synthetic epitope
IKYSEQVYDA

SEQ ID NO: 11395 - protein, 10 aa, Artificial Sequence
  Description of Artificial Sequence: Synthetic epitope
ILDSVSDGQS

SEQ ID NO: 11396 - protein, 10 aa, Artificial Sequence
  Description of Artificial Sequence: Synthetic epitope
ILEAKTKQLP

SEQ ID NO: 11397 - protein, 10 aa, Artificial Sequence
  Description of Artificial Sequence: Synthetic epitope
ILGPPMYEME

SEQ ID NO: 11398 - protein, 10 aa, Artificial Sequence
  Description of Artificial Sequence: Synthetic epitope
ILKASEIIGK

SEQ ID NO: 11399 - protein, 10 aa, Artificial Sequence
  Description of Artificial Sequence: Synthetic epitope
ILKEATKGQK

SEQ ID NO: 11400 - protein, 10 aa, Artificial Sequence
  Description of Artificial Sequence: Synthetic epitope
ILKPQLKSES

SEQ ID NO: 11401 - protein, 10 aa, Artificial Sequence
  Description of Artificial Sequence: Synthetic epitope
ILKRAETHEN

SEQ ID NO: 11402 - protein, 10 aa, Artificial Sequence
  Description of Artificial Sequence: Synthetic epitope
ILKSLEKSEL

SEQ ID NO: 11403 - protein, 10 aa, Artificial Sequence
  Description of Artificial Sequence: Synthetic epitope
ILLILAIKRN

SEQ ID NO: 11404 - protein, 10 aa, Artificial Sequence
  Description of Artificial Sequence: Synthetic epitope
ILLKDSLAKS

SEQ ID NO: 11405 - protein, 10 aa, Artificial Sequence
  Description of Artificial Sequence: Synthetic epitope
ILLKLVMAGE

SEQ ID NO: 11406 - protein, 10 aa, Artificial Sequence
  Description of Artificial Sequence: Synthetic epitope
ILMKQTWQSK

SEQ ID NO: 11407 - protein, 10 aa, Artificial Sequence
  Description of Artificial Sequence: Synthetic epitope
ILNQMNLSSY

SEQ ID NO: 11408 - protein, 10 aa, Artificial Sequence
  Description of Artificial Sequence: Synthetic epitope
ILNTVLSQIE

SEQ ID NO: 11409 - protein, 10 aa, Artificial Sequence
  Description of Artificial Sequence: Synthetic epitope
ILQANIRWQQ

SEQ ID NO: 11410 - protein, 10 aa, Artificial Sequence
  Description of Artificial Sequence: Synthetic epitope
ILQIKLNAEE

SEQ ID NO: 11411 - protein, 10 aa, Artificial Sequence
  Description of Artificial Sequence: Synthetic epitope
ILQTSQSIVR

SEQ ID NO: 11412 - protein, 10 aa, Artificial Sequence
  Description of Artificial Sequence: Synthetic epitope
ILRAALKLEP

SEQ ID NO: 11413 - protein, 10 aa, Artificial Sequence
  Description of Artificial Sequence: Synthetic epitope
ILRKTLNEHQ

SEQ ID NO: 11414 - protein, 10 aa, Artificial Sequence
  Description of Artificial Sequence: Synthetic epitope
ILRQSFMFYG

SEQ ID NO: 11415 - protein, 10 aa, Artificial Sequence
  Description of Artificial Sequence: Synthetic epitope
ILSENIVDLV

SEQ ID NO: 11416 - protein, 10 aa, Artificial Sequence
  Description of Artificial Sequence: Synthetic epitope
ILSETKAALV

SEQ ID NO: 11417 - protein, 10 aa, Artificial Sequence
  Description of Artificial Sequence: Synthetic epitope
ILSKTEGTQE

SEQ ID NO: 11418 - protein, 10 aa, Artificial Sequence
  Description of Artificial Sequence: Synthetic epitope
ILSNQTSKSS

SEQ ID NO: 11419 - protein, 10 aa, Artificial Sequence
  Description of Artificial Sequence: Synthetic epitope
ILSPSSDLTL

SEQ ID NO: 11420 - protein, 10 aa, Artificial Sequence
  Description of Artificial Sequence: Synthetic epitope
ILSQMGRHSQ

SEQ ID NO: 11421 - protein, 10 aa, Artificial Sequence
  Description of Artificial Sequence: Synthetic epitope
ILSYAASSQQ

SEQ ID NO: 11422 - protein, 10 aa, Artificial Sequence
  Description of Artificial Sequence: Synthetic epitope
ILSYAASSQQ

SEQ ID NO: 11423 - protein, 10 aa, Artificial Sequence
  Description of Artificial Sequence: Synthetic epitope
ILTDNLTNQL

SEQ ID NO: 11424 - protein, 10 aa, Artificial Sequence
  Description of Artificial Sequence: Synthetic epitope
ILTHDVQSQL

SEQ ID NO: 11425 - protein, 10 aa, Artificial Sequence
  Description of Artificial Sequence: Synthetic epitope
ILTKLKAKTD

SEQ ID NO: 11426 - protein, 10 aa, Artificial Sequence
  Description of Artificial Sequence: Synthetic epitope
ILTKSTLENQ

SEQ ID NO: 11427 - protein, 10 aa, Artificial Sequence
  Description of Artificial Sequence: Synthetic epitope
ILTVNAVNSL

SEQ ID NO: 11428 - protein, 10 aa, Artificial Sequence
  Description of Artificial Sequence: Synthetic epitope
ILYNLESLIN

SEQ ID NO: 11429 - protein, 10 aa, Artificial Sequence
  Description of Artificial Sequence: Synthetic epitope
IMGEKIEMIA

SEQ ID NO: 11430 - protein, 10 aa, Artificial Sequence
  Description of Artificial Sequence: Synthetic epitope
IMHHNKQATE

SEQ ID NO: 11431 - protein, 10 aa, Artificial Sequence
  Description of Artificial Sequence: Synthetic epitope
IMKGKAEAKK

SEQ ID NO: 11432 - protein, 10 aa, Artificial Sequence
  Description of Artificial Sequence: Synthetic epitope
IMLSLVSTGD

SEQ ID NO: 11433 - protein, 10 aa, Artificial Sequence
  Description of Artificial Sequence: Synthetic epitope
IMPGHIHKKG

SEQ ID NO: 11434 - protein, 10 aa, Artificial Sequence
  Description of Artificial Sequence: Synthetic epitope
IMQDTEKDDN

SEQ ID NO: 11435 - protein, 10 aa, Artificial Sequence
  Description of Artificial Sequence: Synthetic epitope
IMSLAQSQFI

SEQ ID NO: 11436 - protein, 10 aa, Artificial Sequence
  Description of Artificial Sequence: Synthetic epitope
IMSLRKAAMA

SEQ ID NO: 11437 - protein, 10 aa, Artificial Sequence
  Description of Artificial Sequence: Synthetic epitope
IMSQMSDIED

SEQ ID NO: 11438 - protein, 10 aa, Artificial Sequence
  Description of Artificial Sequence: Synthetic epitope
IMSSGNVNSS

SEQ ID NO: 11439 - protein, 10 aa, Artificial Sequence
  Description of Artificial Sequence: Synthetic epitope
INAATGTSAS

SEQ ID NO: 11440 - protein, 10 aa, Artificial Sequence
  Description of Artificial Sequence: Synthetic epitope
INAKRSKEKN

SEQ ID NO: 11441 - protein, 10 aa, Artificial Sequence
  Description of Artificial Sequence: Synthetic epitope
INARSSWPNS

SEQ ID NO: 11442 - protein, 10 aa, Artificial Sequence
  Description of Artificial Sequence: Synthetic epitope
INASLILTSQ

SEQ ID NO: 11443 - protein, 10 aa, Artificial Sequence
  Description of Artificial Sequence: Synthetic epitope
INDIIRAPTI

SEQ ID NO: 11444 - protein, 10 aa, Artificial Sequence
  Description of Artificial Sequence: Synthetic epitope
INDMTNVEDE

SEQ ID NO: 11445 - protein, 10 aa, Artificial Sequence
  Description of Artificial Sequence: Synthetic epitope
INEESVEGTA

SEQ ID NO: 11446 - protein, 10 aa, Artificial Sequence
  Description of Artificial Sequence: Synthetic epitope
INEVKESWAE

SEQ ID NO: 11447 - protein, 10 aa, Artificial Sequence
  Description of Artificial Sequence: Synthetic epitope
INFEEASTDE

SEQ ID NO: 11448 - protein, 10 aa, Artificial Sequence
  Description of Artificial Sequence: Synthetic epitope
INHSIFWTNL

SEQ ID NO: 11449 - protein, 10 aa, Artificial Sequence
  Description of Artificial Sequence: Synthetic epitope
INIEQSQSDR

SEQ ID NO: 11450 - protein, 10 aa, Artificial Sequence
  Description of Artificial Sequence: Synthetic epitope
INKAQSNGSG

SEQ ID NO: 11451 - protein, 10 aa, Artificial Sequence
  Description of Artificial Sequence: Synthetic epitope
INKARTSPTA

SEQ ID NO: 11452 - protein, 10 aa, Artificial Sequence
  Description of Artificial Sequence: Synthetic epitope
INKASNSVLQ

SEQ ID NO: 11453 - protein, 10 aa, Artificial Sequence
  Description of Artificial Sequence: Synthetic epitope
INKFARNTSR

SEQ ID NO: 11454 - protein, 10 aa, Artificial Sequence
  Description of Artificial Sequence: Synthetic epitope
INKKNTSNKI

SEQ ID NO: 11455 - protein, 10 aa, Artificial Sequence
  Description of Artificial Sequence: Synthetic epitope
INLAKFTLGK

SEQ ID NO: 11456 - protein, 10 aa, Artificial Sequence
  Description of Artificial Sequence: Synthetic epitope
INLSASSALE

SEQ ID NO: 11457 - protein, 10 aa, Artificial Sequence
  Description of Artificial Sequence: Synthetic epitope
INLTPLKTDT

SEQ ID NO: 11458 - protein, 10 aa, Artificial Sequence
  Description of Artificial Sequence: Synthetic epitope
INMSSATSKQ

SEQ ID NO: 11459 - protein, 10 aa, Artificial Sequence
  Description of Artificial Sequence: Synthetic epitope
INNQDYRNNH

SEQ ID NO: 11460 - protein, 10 aa, Artificial Sequence
  Description of Artificial Sequence: Synthetic epitope
INNSLVQLQA

SEQ ID NO: 11461 - protein, 10 aa, Artificial Sequence
  Description of Artificial Sequence: Synthetic epitope
INPSKASTNP

SEQ ID NO: 11462 - protein, 10 aa, Artificial Sequence
  Description of Artificial Sequence: Synthetic epitope
INRSLIVGLK

SEQ ID NO: 11463 - protein, 10 aa, Artificial Sequence
  Description of Artificial Sequence: Synthetic epitope
INSDNIVSSG

SEQ ID NO: 11464 - protein, 10 aa, Artificial Sequence
  Description of Artificial Sequence: Synthetic epitope
INSRTTSEGA

SEQ ID NO: 11465 - protein, 10 aa, Artificial Sequence
  Description of Artificial Sequence: Synthetic epitope
INSSISSFKR

SEQ ID NO: 11466 - protein, 10 aa, Artificial Sequence
  Description of Artificial Sequence: Synthetic epitope
INSVSAMKLS

SEQ ID NO: 11467 - protein, 10 aa, Artificial Sequence
  Description of Artificial Sequence: Synthetic epitope
INTNLDRENE

SEQ ID NO: 11468 - protein, 10 aa, Artificial Sequence
  Description of Artificial Sequence: Synthetic epitope
INVSEIKMED

SEQ ID NO: 11469 - protein, 10 aa, Artificial Sequence
  Description of Artificial Sequence: Synthetic epitope
IPALAYKSSQ

SEQ ID NO: 11470 - protein, 10 aa, Artificial Sequence
  Description of Artificial Sequence: Synthetic epitope
IPARSQSQEN

SEQ ID NO: 11471 - protein, 10 aa, Artificial Sequence
  Description of Artificial Sequence: Synthetic epitope
IPDMLATAEP

SEQ ID NO: 11472 - protein, 10 aa, Artificial Sequence
  Description of Artificial Sequence: Synthetic epitope
IPDQLLKEPP

SEQ ID NO: 11473 - protein, 10 aa, Artificial Sequence
  Description of Artificial Sequence: Synthetic epitope
IPFQRKKPYE

SEQ ID NO: 11474 - protein, 10 aa, Artificial Sequence
  Description of Artificial Sequence: Synthetic epitope
IPHLKTSTLP

SEQ ID NO: 11475 - protein, 10 aa, Artificial Sequence
  Description of Artificial Sequence: Synthetic epitope
IPILASALAS

SEQ ID NO: 11476 - protein, 10 aa, Artificial Sequence
  Description of Artificial Sequence: Synthetic epitope
IPKSLAVASK

SEQ ID NO: 11477 - protein, 10 aa, Artificial Sequence
  Description of Artificial Sequence: Synthetic epitope
IPLSIKTSSG

SEQ ID NO: 11478 - protein, 10 aa, Artificial Sequence
  Description of Artificial Sequence: Synthetic epitope
IPLWRMVLYS

SEQ ID NO: 11479 - protein, 10 aa, Artificial Sequence
  Description of Artificial Sequence: Synthetic epitope
IPRANHWDLE

SEQ ID NO: 11480 - protein, 10 aa, Artificial Sequence
  Description of Artificial Sequence: Synthetic epitope
IPRVAATALS

SEQ ID NO: 11481 - protein, 10 aa, Artificial Sequence
  Description of Artificial Sequence: Synthetic epitope
IPSMSVSTGS

SEQ ID NO: 11482 - protein, 10 aa, Artificial Sequence
  Description of Artificial Sequence: Synthetic epitope
IPSSKTTVAS

SEQ ID NO: 11483 - protein, 10 aa, Artificial Sequence
  Description of Artificial Sequence: Synthetic epitope
IPSSQNEVEL

SEQ ID NO: 11484 - protein, 10 aa, Artificial Sequence
  Description of Artificial Sequence: Synthetic epitope
IPTLASLASP

SEQ ID NO: 11485 - protein, 10 aa, Artificial Sequence
  Description of Artificial Sequence: Synthetic epitope
IPTSDTSSRS

SEQ ID NO: 11486 - protein, 10 aa, Artificial Sequence
  Description of Artificial Sequence: Synthetic epitope
IPTTSTSVSE

SEQ ID NO: 11487 - protein, 10 aa, Artificial Sequence
  Description of Artificial Sequence: Synthetic epitope
IPYKLELKNE

SEQ ID NO: 11488 - protein, 10 aa, Artificial Sequence
  Description of Artificial Sequence: Synthetic epitope
IQAIMKIQKE

SEQ ID NO: 11489 - protein, 10 aa, Artificial Sequence
  Description of Artificial Sequence: Synthetic epitope
IQALTLTKEK

SEQ ID NO: 11490 - protein, 10 aa, Artificial Sequence
  Description of Artificial Sequence: Synthetic epitope
IQAQNTLKQN

SEQ ID NO: 11491 - protein, 10 aa, Artificial Sequence
  Description of Artificial Sequence: Synthetic epitope
IQASEASETP

SEQ ID NO: 11492 - protein, 10 aa, Artificial Sequence
  Description of Artificial Sequence: Synthetic epitope
IQASGVAART

SEQ ID NO: 11493 - protein, 10 aa, Artificial Sequence
  Description of Artificial Sequence: Synthetic epitope
IQASLNQGSV

SEQ ID NO: 11494 - protein, 10 aa, Artificial Sequence
  Description of Artificial Sequence: Synthetic epitope
IQASTKKFSL

SEQ ID NO: 11495 - protein, 10 aa, Artificial Sequence
  Description of Artificial Sequence: Synthetic epitope
IQAVANRRFK

SEQ ID NO: 11496 - protein, 10 aa, Artificial Sequence
  Description of Artificial Sequence: Synthetic epitope
IQEASLSTES

SEQ ID NO: 11497 - protein, 10 aa, Artificial Sequence
  Description of Artificial Sequence: Synthetic epitope
IQEEKTTLAL

SEQ ID NO: 11498 - protein, 10 aa, Artificial Sequence
  Description of Artificial Sequence: Synthetic epitope
IQEEQSAPSS

SEQ ID NO: 11499 - protein, 10 aa, Artificial Sequence
  Description of Artificial Sequence: Synthetic epitope
IQEPTANATT

SEQ ID NO: 11500 - protein, 10 aa, Artificial Sequence
  Description of Artificial Sequence: Synthetic epitope
IQESVLRKDM

SEQ ID NO: 11501 - protein, 10 aa, Artificial Sequence
  Description of Artificial Sequence: Synthetic epitope
IQEVLEEQSE

SEQ ID NO: 11502 - protein, 10 aa, Artificial Sequence
  Description of Artificial Sequence: Synthetic epitope
IQFQEGLASS

SEQ ID NO: 11503 - protein, 10 aa, Artificial Sequence
  Description of Artificial Sequence: Synthetic epitope
IQGLYFTETQ

SEQ ID NO: 11504 - protein, 10 aa, Artificial Sequence
  Description of Artificial Sequence: Synthetic epitope
IQGMSVFTYV

SEQ ID NO: 11505 - protein, 10 aa, Artificial Sequence
  Description of Artificial Sequence: Synthetic epitope
IQGQVQAVKQ

SEQ ID NO: 11506 - protein, 10 aa, Artificial Sequence
  Description of Artificial Sequence: Synthetic epitope
IQHEENHNIE

SEQ ID NO: 11507 - protein, 10 aa, Artificial Sequence
  Description of Artificial Sequence: Synthetic epitope
IQHPSKKTTN

SEQ ID NO: 11508 - protein, 10 aa, Artificial Sequence
  Description of Artificial Sequence: Synthetic epitope
IQHVQSFRSK

SEQ ID NO: 11509 - protein, 10 aa, Artificial Sequence
  Description of Artificial Sequence: Synthetic epitope
IQKATESLKS

SEQ ID NO: 11510 - protein, 10 aa, Artificial Sequence
  Description of Artificial Sequence: Synthetic epitope
IQKEKLSTPE

SEQ ID NO: 11511 - protein, 10 aa, Artificial Sequence
  Description of Artificial Sequence: Synthetic epitope
IQKESEVAHV

SEQ ID NO: 11512 - protein, 10 aa, Artificial Sequence
  Description of Artificial Sequence: Synthetic epitope
IQKNLNDNEM

SEQ ID NO: 11513 - protein, 10 aa, Artificial Sequence
  Description of Artificial Sequence: Synthetic epitope
IQKRSMEASE

SEQ ID NO: 11514 - protein, 10 aa, Artificial Sequence
  Description of Artificial Sequence: Synthetic epitope
IQKSDDKVTL

SEQ ID NO: 11515 - protein, 10 aa, Artificial Sequence
  Description of Artificial Sequence: Synthetic epitope
IQLAKEKKQR

SEQ ID NO: 11516 - protein, 10 aa, Artificial Sequence
  Description of Artificial Sequence: Synthetic epitope
IQLLSDQSDQ

SEQ ID NO: 11517 - protein, 10 aa, Artificial Sequence
  Description of Artificial Sequence: Synthetic epitope
IQLSNSLSSA

SEQ ID NO: 11518 - protein, 10 aa, Artificial Sequence
  Description of Artificial Sequence: Synthetic epitope
IQLTAITTSE

SEQ ID NO: 11519 - protein, 10 aa, Artificial Sequence
  Description of Artificial Sequence: Synthetic epitope
IQLVDEEAGV

SEQ ID NO: 11520 - protein, 10 aa, Artificial Sequence
  Description of Artificial Sequence: Synthetic epitope
IQLVIMWKNS

SEQ ID NO: 11521 - protein, 10 aa, Artificial Sequence
  Description of Artificial Sequence: Synthetic epitope
IQMLAQLETL

SEQ ID NO: 11522 - protein, 10 aa, Artificial Sequence
  Description of Artificial Sequence: Synthetic epitope
IQNGVKQDLE

SEQ ID NO: 11523 - protein, 10 aa, Artificial Sequence
  Description of Artificial Sequence: Synthetic epitope
IQQAIKAQPS

SEQ ID NO: 11524 - protein, 10 aa, Artificial Sequence
  Description of Artificial Sequence: Synthetic epitope
IQQAIKSHEI

SEQ ID NO: 11525 - protein, 10 aa, Artificial Sequence
  Description of Artificial Sequence: Synthetic epitope
IQQIAEGEKV

SEQ ID NO: 11526 - protein, 10 aa, Artificial Sequence
  Description of Artificial Sequence: Synthetic epitope
IQQMENEIHY

SEQ ID NO: 11527 - protein, 10 aa, Artificial Sequence
  Description of Artificial Sequence: Synthetic epitope
IQQSVSEFED

SEQ ID NO: 11528 - protein, 10 aa, Artificial Sequence
  Description of Artificial Sequence: Synthetic epitope
IQRNQPQRPE

SEQ ID NO: 11529 - protein, 10 aa, Artificial Sequence
  Description of Artificial Sequence: Synthetic epitope
IQRYVQLKQE

SEQ ID NO: 11530 - protein, 10 aa, Artificial Sequence
  Description of Artificial Sequence: Synthetic epitope
IQSIALKEKG

SEQ ID NO: 11531 - protein, 10 aa, Artificial Sequence
  Description of Artificial Sequence: Synthetic epitope
IQSITQALQK

SEQ ID NO: 11532 - protein, 10 aa, Artificial Sequence
  Description of Artificial Sequence: Synthetic epitope
IQSRIHQDET

SEQ ID NO: 11533 - protein, 10 aa, Artificial Sequence
  Description of Artificial Sequence: Synthetic epitope
IQSRKVERKP

SEQ ID NO: 11534 - protein, 10 aa, Artificial Sequence
  Description of Artificial Sequence: Synthetic epitope
IQSRQALNSV

SEQ ID NO: 11535 - protein, 10 aa, Artificial Sequence
  Description of Artificial Sequence: Synthetic epitope
IQSVKGKVVI

SEQ ID NO: 11536 - protein, 10 aa, Artificial Sequence
  Description of Artificial Sequence: Synthetic epitope
IQTDGDKYGG

SEQ ID NO: 11537 - protein, 10 aa, Artificial Sequence
  Description of Artificial Sequence: Synthetic epitope
IQTEGKTDRA

SEQ ID NO: 11538 - protein, 10 aa, Artificial Sequence
  Description of Artificial Sequence: Synthetic epitope
IQTTVNISDE

SEQ ID NO: 11539 - protein, 10 aa, Artificial Sequence
  Description of Artificial Sequence: Synthetic epitope
IQVKAIPVEF

SEQ ID NO: 11540 - protein, 10 aa, Artificial Sequence
  Description of Artificial Sequence: Synthetic epitope
IQVKAIPVEF

SEQ ID NO: 11541 - protein, 10 aa, Artificial Sequence
  Description of Artificial Sequence: Synthetic epitope
IQWERDVEKN

SEQ ID NO: 11542 - protein, 10 aa, Artificial Sequence
  Description of Artificial Sequence: Synthetic epitope
IRAELLEIIK

SEQ ID NO: 11543 - protein, 10 aa, Artificial Sequence
  Description of Artificial Sequence: Synthetic epitope
IRAKKRLRQS

SEQ ID NO: 11544 - protein, 10 aa, Artificial Sequence
  Description of Artificial Sequence: Synthetic epitope
IRALVAFIPA

SEQ ID NO: 11545 - protein, 10 aa, Artificial Sequence
  Description of Artificial Sequence: Synthetic epitope
IRATATALER

SEQ ID NO: 11546 - protein, 10 aa, Artificial Sequence
  Description of Artificial Sequence: Synthetic epitope
IRDAEQRKIQ

SEQ ID NO: 11547 - protein, 10 aa, Artificial Sequence
  Description of Artificial Sequence: Synthetic epitope
IRENSYSYNK

SEQ ID NO: 11548 - protein, 10 aa, Artificial Sequence
  Description of Artificial Sequence: Synthetic epitope
IRETAINSLT

SEQ ID NO: 11549 - protein, 10 aa, Artificial Sequence
  Description of Artificial Sequence: Synthetic epitope
IRHKSIAEVS

SEQ ID NO: 11550 - protein, 10 aa, Artificial Sequence
  Description of Artificial Sequence: Synthetic epitope
IRHYNMHKKR

SEQ ID NO: 11551 - protein, 10 aa, Artificial Sequence
  Description of Artificial Sequence: Synthetic epitope
IRKLAALSQY

SEQ ID NO: 11552 - protein, 10 aa, Artificial Sequence
  Description of Artificial Sequence: Synthetic epitope
IRKLIAVLES

SEQ ID NO: 11553 - protein, 10 aa, Artificial Sequence
  Description of Artificial Sequence: Synthetic epitope
IRKQELTAQI

SEQ ID NO: 11554 - protein, 10 aa, Artificial Sequence
  Description of Artificial Sequence: Synthetic epitope
IRKSNEKKNP

SEQ ID NO: 11555 - protein, 10 aa, Artificial Sequence
  Description of Artificial Sequence: Synthetic epitope
IRKSQARHVG

SEQ ID NO: 11556 - protein, 10 aa, Artificial Sequence
  Description of Artificial Sequence: Synthetic epitope
IRLKTEMAVP

SEQ ID NO: 11557 - protein, 10 aa, Artificial Sequence
  Description of Artificial Sequence: Synthetic epitope
IRLLSLVDSA

SEQ ID NO: 11558 - protein, 10 aa, Artificial Sequence
  Description of Artificial Sequence: Synthetic epitope
IRLQAVLEII

SEQ ID NO: 11559 - protein, 10 aa, Artificial Sequence
  Description of Artificial Sequence: Synthetic epitope
IRQKLQTKQA

SEQ ID NO: 11560 - protein, 10 aa, Artificial Sequence
  Description of Artificial Sequence: Synthetic epitope
IRQRSYYSQV

SEQ ID NO: 11561 - protein, 10 aa, Artificial Sequence
  Description of Artificial Sequence: Synthetic epitope
IRSAEALAFS

SEQ ID NO: 11562 - protein, 10 aa, Artificial Sequence
  Description of Artificial Sequence: Synthetic epitope
IRSFSSTARN

SEQ ID NO: 11563 - protein, 10 aa, Artificial Sequence
  Description of Artificial Sequence: Synthetic epitope
IRSIQTDKRE

SEQ ID NO: 11564 - protein, 10 aa, Artificial Sequence
  Description of Artificial Sequence: Synthetic epitope
IRSQKLIESH

SEQ ID NO: 11565 - protein, 10 aa, Artificial Sequence
  Description of Artificial Sequence: Synthetic epitope
IRSQSLIFLN

SEQ ID NO: 11566 - protein, 10 aa, Artificial Sequence
  Description of Artificial Sequence: Synthetic epitope
IRSRDYTSES

SEQ ID NO: 11567 - protein, 10 aa, Artificial Sequence
  Description of Artificial Sequence: Synthetic epitope
IRSSAENMDL

SEQ ID NO: 11568 - protein, 10 aa, Artificial Sequence
  Description of Artificial Sequence: Synthetic epitope
IRSVLTDKRE

SEQ ID NO: 11569 - protein, 10 aa, Artificial Sequence
  Description of Artificial Sequence: Synthetic epitope
IRTLTPVLTP

SEQ ID NO: 11570 - protein, 10 aa, Artificial Sequence
  Description of Artificial Sequence: Synthetic epitope
IRTVAVTKSQ

SEQ ID NO: 11571 - protein, 10 aa, Artificial Sequence
  Description of Artificial Sequence: Synthetic epitope
IRVEEMKKPS

SEQ ID NO: 11572 - protein, 10 aa, Artificial Sequence
  Description of Artificial Sequence: Synthetic epitope
ISAELAIATA

SEQ ID NO: 11573 - protein, 10 aa, Artificial Sequence
  Description of Artificial Sequence: Synthetic epitope
ISAKQQLQTQ

SEQ ID NO: 11574 - protein, 10 aa, Artificial Sequence
  Description of Artificial Sequence: Synthetic epitope
ISAKSASDNS

SEQ ID NO: 11575 - protein, 10 aa, Artificial Sequence
  Description of Artificial Sequence: Synthetic epitope
ISALDDANKG

SEQ ID NO: 11576 - protein, 10 aa, Artificial Sequence
  Description of Artificial Sequence: Synthetic epitope
ISALENSKNS

SEQ ID NO: 11577 - protein, 10 aa, Artificial Sequence
  Description of Artificial Sequence: Synthetic epitope
ISANQLKRHM

SEQ ID NO: 11578 - protein, 10 aa, Artificial Sequence
  Description of Artificial Sequence: Synthetic epitope
ISARSSKNRR

SEQ ID NO: 11579 - protein, 10 aa, Artificial Sequence
  Description of Artificial Sequence: Synthetic epitope
ISASDLSSTH

SEQ ID NO: 11580 - protein, 10 aa, Artificial Sequence
  Description of Artificial Sequence: Synthetic epitope
ISAVEVFLQD

SEQ ID NO: 11581 - protein, 10 aa, Artificial Sequence
  Description of Artificial Sequence: Synthetic epitope
ISDDLAKSVD

SEQ ID NO: 11582 - protein, 10 aa, Artificial Sequence
  Description of Artificial Sequence: Synthetic epitope
ISDKQTEWIE

SEQ ID NO: 11583 - protein, 10 aa, Artificial Sequence
  Description of Artificial Sequence: Synthetic epitope
ISEERSGDSD

SEQ ID NO: 11584 - protein, 10 aa, Artificial Sequence
  Description of Artificial Sequence: Synthetic epitope
ISEKEAMSTI

SEQ ID NO: 11585 - protein, 10 aa, Artificial Sequence
  Description of Artificial Sequence: Synthetic epitope
ISEKLYESHE

SEQ ID NO: 11586 - protein, 10 aa, Artificial Sequence
  Description of Artificial Sequence: Synthetic epitope
ISEMDIKQQK

SEQ ID NO: 11587 - protein, 10 aa, Artificial Sequence
  Description of Artificial Sequence: Synthetic epitope
ISERQARFSS

SEQ ID NO: 11588 - protein, 10 aa, Artificial Sequence
  Description of Artificial Sequence: Synthetic epitope
ISESALPTSL

SEQ ID NO: 11589 - protein, 10 aa, Artificial Sequence
  Description of Artificial Sequence: Synthetic epitope
ISESLVRHAS

SEQ ID NO: 11590 - protein, 10 aa, Artificial Sequence
  Description of Artificial Sequence: Synthetic epitope
ISETSKIETQ

SEQ ID NO: 11591 - protein, 10 aa, Artificial Sequence
  Description of Artificial Sequence: Synthetic epitope
ISFKANDIEK

SEQ ID NO: 11592 - protein, 10 aa, Artificial Sequence
  Description of Artificial Sequence: Synthetic epitope
ISFPVSSVES

SEQ ID NO: 11593 - protein, 10 aa, Artificial Sequence
  Description of Artificial Sequence: Synthetic epitope
ISGELELSYP

SEQ ID NO: 11594 - protein, 10 aa, Artificial Sequence
  Description of Artificial Sequence: Synthetic epitope
ISGEQSSEQT

SEQ ID NO: 11595 - protein, 10 aa, Artificial Sequence
  Description of Artificial Sequence: Synthetic epitope
ISGKAAKIAS

SEQ ID NO: 11596 - protein, 10 aa, Artificial Sequence
  Description of Artificial Sequence: Synthetic epitope
ISGSKEVQEQ

SEQ ID NO: 11597 - protein, 10 aa, Artificial Sequence
  Description of Artificial Sequence: Synthetic epitope
ISHLVSLVTG

SEQ ID NO: 11598 - protein, 10 aa, Artificial Sequence
  Description of Artificial Sequence: Synthetic epitope
ISHSSQVARK

SEQ ID NO: 11599 - protein, 10 aa, Artificial Sequence
  Description of Artificial Sequence: Synthetic epitope
ISHTSVLTHM

SEQ ID NO: 11600 - protein, 10 aa, Artificial Sequence
  Description of Artificial Sequence: Synthetic epitope
ISIKSEAPES

SEQ ID NO: 11601 - protein, 10 aa, Artificial Sequence
  Description of Artificial Sequence: Synthetic epitope
ISITNESQNA

SEQ ID NO: 11602 - protein, 10 aa, Artificial Sequence
  Description of Artificial Sequence: Synthetic epitope
ISKEHTSETT

SEQ ID NO: 11603 - protein, 10 aa, Artificial Sequence
  Description of Artificial Sequence: Synthetic epitope
ISKLAKFDGE

SEQ ID NO: 11604 - protein, 10 aa, Artificial Sequence
  Description of Artificial Sequence: Synthetic epitope
ISKLKEVTLF

SEQ ID NO: 11605 - protein, 10 aa, Artificial Sequence
  Description of Artificial Sequence: Synthetic epitope
ISKLQSQRKS

SEQ ID NO: 11606 - protein, 10 aa, Artificial Sequence
  Description of Artificial Sequence: Synthetic epitope
ISKQGSNLVQ

SEQ ID NO: 11607 - protein, 10 aa, Artificial Sequence
  Description of Artificial Sequence: Synthetic epitope
ISKQKTSKEY

SEQ ID NO: 11608 - protein, 10 aa, Artificial Sequence
  Description of Artificial Sequence: Synthetic epitope
ISKTATKAYP

SEQ ID NO: 11609 - protein, 10 aa, Artificial Sequence
  Description of Artificial Sequence: Synthetic epitope
ISLASQATDT

SEQ ID NO: 11610 - protein, 10 aa, Artificial Sequence
  Description of Artificial Sequence: Synthetic epitope
ISLQVEVESR

SEQ ID NO: 11611 - protein, 10 aa, Artificial Sequence
  Description of Artificial Sequence: Synthetic epitope
ISLTKQIDQL

SEQ ID NO: 11612 - protein, 10 aa, Artificial Sequence
  Description of Artificial Sequence: Synthetic epitope
ISLTQKFQFA

SEQ ID NO: 11613 - protein, 10 aa, Artificial Sequence
  Description of Artificial Sequence: Synthetic epitope
ISNAENSVSQ

SEQ ID NO: 11614 - protein, 10 aa, Artificial Sequence
  Description of Artificial Sequence: Synthetic epitope
ISNEVEMESE

SEQ ID NO: 11615 - protein, 10 aa, Artificial Sequence
  Description of Artificial Sequence: Synthetic epitope
ISNLTIVQAE

SEQ ID NO: 11616 - protein, 10 aa, Artificial Sequence
  Description of Artificial Sequence: Synthetic epitope
ISNSSTFTKS

SEQ ID NO: 11617 - protein, 10 aa, Artificial Sequence
  Description of Artificial Sequence: Synthetic epitope
ISPQIQLSGQ

SEQ ID NO: 11618 - protein, 10 aa, Artificial Sequence
  Description of Artificial Sequence: Synthetic epitope
ISPWKVTSIN

SEQ ID NO: 11619 - protein, 10 aa, Artificial Sequence
  Description of Artificial Sequence: Synthetic epitope
ISQDAFQSKS

SEQ ID NO: 11620 - protein, 10 aa, Artificial Sequence
  Description of Artificial Sequence: Synthetic epitope
ISQDEQLSKS

SEQ ID NO: 11621 - protein, 10 aa, Artificial Sequence
  Description of Artificial Sequence: Synthetic epitope
ISQENEIGKK

SEQ ID NO: 11622 - protein, 10 aa, Artificial Sequence
  Description of Artificial Sequence: Synthetic epitope
ISQSLLYRGP

SEQ ID NO: 11623 - protein, 10 aa, Artificial Sequence
  Description of Artificial Sequence: Synthetic epitope
ISRMAQTQRT

SEQ ID NO: 11624 - protein, 10 aa, Artificial Sequence
  Description of Artificial Sequence: Synthetic epitope
ISRQSEKAHS

SEQ ID NO: 11625 - protein, 10 aa, Artificial Sequence
  Description of Artificial Sequence: Synthetic epitope
ISRVLKKNNR

SEQ ID NO: 11626 - protein, 10 aa, Artificial Sequence
  Description of Artificial Sequence: Synthetic epitope
ISSAQKVQIK

SEQ ID NO: 11627 - protein, 10 aa, Artificial Sequence
  Description of Artificial Sequence: Synthetic epitope
ISSAVKSAPE

SEQ ID NO: 11628 - protein, 10 aa, Artificial Sequence
  Description of Artificial Sequence: Synthetic epitope
ISSESLQARK

SEQ ID NO: 11629 - protein, 10 aa, Artificial Sequence
  Description of Artificial Sequence: Synthetic epitope
ISSFEQSKKE

SEQ ID NO: 11630 - protein, 10 aa, Artificial Sequence
  Description of Artificial Sequence: Synthetic epitope
ISSGMSSHKQ

SEQ ID NO: 11631 - protein, 10 aa, Artificial Sequence
  Description of Artificial Sequence: Synthetic epitope
ISSKKNRTMK

SEQ ID NO: 11632 - protein, 10 aa, Artificial Sequence
  Description of Artificial Sequence: Synthetic epitope
ISSPTTSQPP

SEQ ID NO: 11633 - protein, 10 aa, Artificial Sequence
  Description of Artificial Sequence: Synthetic epitope
ISSQISGSVT

SEQ ID NO: 11634 - protein, 10 aa, Artificial Sequence
  Description of Artificial Sequence: Synthetic epitope
ISSTLVPSKH

SEQ ID NO: 11635 - protein, 10 aa, Artificial Sequence
  Description of Artificial Sequence: Synthetic epitope
ISSTNSLSAA

SEQ ID NO: 11636 - protein, 10 aa, Artificial Sequence
  Description of Artificial Sequence: Synthetic epitope
ISTEGEQDEA

SEQ ID NO: 11637 - protein, 10 aa, Artificial Sequence
  Description of Artificial Sequence: Synthetic epitope
ISTETEETEG

SEQ ID NO: 11638 - protein, 10 aa, Artificial Sequence
  Description of Artificial Sequence: Synthetic epitope
ISTKLMNIFL

SEQ ID NO: 11639 - protein, 10 aa, Artificial Sequence
  Description of Artificial Sequence: Synthetic epitope
ISTLKKLKQG

SEQ ID NO: 11640 - protein, 10 aa, Artificial Sequence
  Description of Artificial Sequence: Synthetic epitope
ISVEDKKALH

SEQ ID NO: 11641 - protein, 10 aa, Artificial Sequence
  Description of Artificial Sequence: Synthetic epitope
ISVSDDRAEQ

SEQ ID NO: 11642 - protein, 10 aa, Artificial Sequence
  Description of Artificial Sequence: Synthetic epitope
ITAKNKKPSG

SEQ ID NO: 11643 - protein, 10 aa, Artificial Sequence
  Description of Artificial Sequence: Synthetic epitope
ITAQSTPQEA

SEQ ID NO: 11644 - protein, 10 aa, Artificial Sequence
  Description of Artificial Sequence: Synthetic epitope
ITARLSLPES

SEQ ID NO: 11645 - protein, 10 aa, Artificial Sequence
  Description of Artificial Sequence: Synthetic epitope
ITATMEFSAL

SEQ ID NO: 11646 - protein, 10 aa, Artificial Sequence
  Description of Artificial Sequence: Synthetic epitope
ITDADKIEDE

SEQ ID NO: 11647 - protein, 10 aa, Artificial Sequence
  Description of Artificial Sequence: Synthetic epitope
ITDMRSWERE

SEQ ID NO: 11648 - protein, 10 aa, Artificial Sequence
  Description of Artificial Sequence: Synthetic epitope
ITEKAVFSRW

SEQ ID NO: 11649 - protein, 10 aa, Artificial Sequence
  Description of Artificial Sequence: Synthetic epitope
ITEKLSLSLG

SEQ ID NO: 11650 - protein, 10 aa, Artificial Sequence
  Description of Artificial Sequence: Synthetic epitope
ITHPRVTYRT

SEQ ID NO: 11651 - protein, 10 aa, Artificial Sequence
  Description of Artificial Sequence: Synthetic epitope
ITIKTKSIFK

SEQ ID NO: 11652 - protein, 10 aa, Artificial Sequence
  Description of Artificial Sequence: Synthetic epitope
ITITESNMKS

SEQ ID NO: 11653 - protein, 10 aa, Artificial Sequence
  Description of Artificial Sequence: Synthetic epitope
ITKDKKSISD

SEQ ID NO: 11654 - protein, 10 aa, Artificial Sequence
  Description of Artificial Sequence: Synthetic epitope
ITKEDESTEK

SEQ ID NO: 11655 - protein, 10 aa, Artificial Sequence
  Description of Artificial Sequence: Synthetic epitope
ITKEIPKIID

SEQ ID NO: 11656 - protein, 10 aa, Artificial Sequence
  Description of Artificial Sequence: Synthetic epitope
ITKNLHYKDG

SEQ ID NO: 11657 - protein, 10 aa, Artificial Sequence
  Description of Artificial Sequence: Synthetic epitope
ITKNLLSEKN

SEQ ID NO: 11658 - protein, 10 aa, Artificial Sequence
  Description of Artificial Sequence: Synthetic epitope
ITKRVASSPA

SEQ ID NO: 11659 - protein, 10 aa, Artificial Sequence
  Description of Artificial Sequence: Synthetic epitope
ITKSVAVNPK

SEQ ID NO: 11660 - protein, 10 aa, Artificial Sequence
  Description of Artificial Sequence: Synthetic epitope
ITLESSILLQ

SEQ ID NO: 11661 - protein, 10 aa, Artificial Sequence
  Description of Artificial Sequence: Synthetic epitope
ITLKSMAGSG

SEQ ID NO: 11662 - protein, 10 aa, Artificial Sequence
  Description of Artificial Sequence: Synthetic epitope
ITLMLDSRIE

SEQ ID NO: 11663 - protein, 10 aa, Artificial Sequence
  Description of Artificial Sequence: Synthetic epitope
ITLQDKQNMV

SEQ ID NO: 11664 - protein, 10 aa, Artificial Sequence
  Description of Artificial Sequence: Synthetic epitope
ITLTKFIQTT

SEQ ID NO: 11665 - protein, 10 aa, Artificial Sequence
  Description of Artificial Sequence: Synthetic epitope
ITMSEAPRAE

SEQ ID NO: 11666 - protein, 10 aa, Artificial Sequence
  Description of Artificial Sequence: Synthetic epitope
ITQQSTNQSR

SEQ ID NO: 11667 - protein, 10 aa, Artificial Sequence
  Description of Artificial Sequence: Synthetic epitope
ITRVMKEGKF

SEQ ID NO: 11668 - protein, 10 aa, Artificial Sequence
  Description of Artificial Sequence: Synthetic epitope
ITSSWNRIPT

SEQ ID NO: 11669 - protein, 10 aa, Artificial Sequence
  Description of Artificial Sequence: Synthetic epitope
ITSTTRALTF

SEQ ID NO: 11670 - protein, 10 aa, Artificial Sequence
  Description of Artificial Sequence: Synthetic epitope
ITTKLVLDED

SEQ ID NO: 11671 - protein, 10 aa, Artificial Sequence
  Description of Artificial Sequence: Synthetic epitope
ITVQGSAKAT

SEQ ID NO: 11672 - protein, 10 aa, Artificial Sequence
  Description of Artificial Sequence: Synthetic epitope
ITVRPKNAAL

SEQ ID NO: 11673 - protein, 10 aa, Artificial Sequence
  Description of Artificial Sequence: Synthetic epitope
IVAAKKSAVS

SEQ ID NO: 11674 - protein, 10 aa, Artificial Sequence
  Description of Artificial Sequence: Synthetic epitope
IVAFTVVEVA

SEQ ID NO: 11675 - protein, 10 aa, Artificial Sequence
  Description of Artificial Sequence: Synthetic epitope
IVAPKKIKLA

SEQ ID NO: 11676 - protein, 10 aa, Artificial Sequence
  Description of Artificial Sequence: Synthetic epitope
IVENLETQSK

SEQ ID NO: 11677 - protein, 10 aa, Artificial Sequence
  Description of Artificial Sequence: Synthetic epitope
IVHQRTIWER

SEQ ID NO: 11678 - protein, 10 aa, Artificial Sequence
  Description of Artificial Sequence: Synthetic epitope
IVKLMISSYS

SEQ ID NO: 11679 - protein, 10 aa, Artificial Sequence
  Description of Artificial Sequence: Synthetic epitope
IVKMVMISLE

SEQ ID NO: 11680 - protein, 10 aa, Artificial Sequence
  Description of Artificial Sequence: Synthetic epitope
IVKVKSLKFA

SEQ ID NO: 11681 - protein, 10 aa, Artificial Sequence
  Description of Artificial Sequence: Synthetic epitope
IVLESSPSQE

SEQ ID NO: 11682 - protein, 10 aa, Artificial Sequence
  Description of Artificial Sequence: Synthetic epitope
IVLVHGYYKI

SEQ ID NO: 11683 - protein, 10 aa, Artificial Sequence
  Description of Artificial Sequence: Synthetic epitope
IVNRYIQEIP

SEQ ID NO: 11684 - protein, 10 aa, Artificial Sequence
  Description of Artificial Sequence: Synthetic epitope
IVNSKAISRE

SEQ ID NO: 11685 - protein, 10 aa, Artificial Sequence
  Description of Artificial Sequence: Synthetic epitope
IVQAIRMEAT

SEQ ID NO: 11686 - protein, 10 aa, Artificial Sequence
  Description of Artificial Sequence: Synthetic epitope
IVQERKLQSM

SEQ ID NO: 11687 - protein, 10 aa, Artificial Sequence
  Description of Artificial Sequence: Synthetic epitope
IVQLLTMKPF

SEQ ID NO: 11688 - protein, 10 aa, Artificial Sequence
  Description of Artificial Sequence: Synthetic epitope
IVSIKLLAAI

SEQ ID NO: 11689 - protein, 10 aa, Artificial Sequence
  Description of Artificial Sequence: Synthetic epitope
IVSYIEKGLF

SEQ ID NO: 11690 - protein, 10 aa, Artificial Sequence
  Description of Artificial Sequence: Synthetic epitope
IVTLKSTKIH

SEQ ID NO: 11691 - protein, 10 aa, Artificial Sequence
  Description of Artificial Sequence: Synthetic epitope
IVTSIEINHK

SEQ ID NO: 11692 - protein, 10 aa, Artificial Sequence
  Description of Artificial Sequence: Synthetic epitope
IVTSKAEATS

SEQ ID NO: 11693 - protein, 10 aa, Artificial Sequence
  Description of Artificial Sequence: Synthetic epitope
IVTTSNNHIE

SEQ ID NO: 11694 - protein, 10 aa, Artificial Sequence
  Description of Artificial Sequence: Synthetic epitope
IVYTGTESTQ

SEQ ID NO: 11695 - protein, 10 aa, Artificial Sequence
  Description of Artificial Sequence: Synthetic epitope
IWLSSQQKTS

SEQ ID NO: 11696 - protein, 10 aa, Artificial Sequence
  Description of Artificial Sequence: Synthetic epitope
IYAVSIREME

SEQ ID NO: 11697 - protein, 10 aa, Artificial Sequence
  Description of Artificial Sequence: Synthetic epitope
IYEKTIRKVE

SEQ ID NO: 11698 - protein, 10 aa, Artificial Sequence
  Description of Artificial Sequence: Synthetic epitope
IYEVAALKWK

SEQ ID NO: 11699 - protein, 10 aa, Artificial Sequence
  Description of Artificial Sequence: Synthetic epitope
IYLNSSLVQF

SEQ ID NO: 11700 - protein, 10 aa, Artificial Sequence
  Description of Artificial Sequence: Synthetic epitope
IYNALIENEL

SEQ ID NO: 11701 - protein, 10 aa, Artificial Sequence
  Description of Artificial Sequence: Synthetic epitope
IYNIKSLMIK

SEQ ID NO: 11702 - protein, 10 aa, Artificial Sequence
  Description of Artificial Sequence: Synthetic epitope
IYVITWADGA

SEQ ID NO: 11703 - protein, 10 aa, Artificial Sequence
  Description of Artificial Sequence: Synthetic epitope
KAAEAFLRQQ

SEQ ID NO: 11704 - protein, 10 aa, Artificial Sequence
  Description of Artificial Sequence: Synthetic epitope
KAAEIASEKD

SEQ ID NO: 11705 - protein, 10 aa, Artificial Sequence
  Description of Artificial Sequence: Synthetic epitope
KAAFAITSRR

SEQ ID NO: 11706 - protein, 10 aa, Artificial Sequence
  Description of Artificial Sequence: Synthetic epitope
KAAGRTSIKV

SEQ ID NO: 11707 - protein, 10 aa, Artificial Sequence
  Description of Artificial Sequence: Synthetic epitope
KAAIEKQKSA

SEQ ID NO: 11708 - protein, 10 aa, Artificial Sequence
  Description of Artificial Sequence: Synthetic epitope
KAAIIEEQKR

SEQ ID NO: 11709 - protein, 10 aa, Artificial Sequence
  Description of Artificial Sequence: Synthetic epitope
KAAIRVQPQD

SEQ ID NO: 11710 - protein, 10 aa, Artificial Sequence
  Description of Artificial Sequence: Synthetic epitope
KAAKDTKDNY

SEQ ID NO: 11711 - protein, 10 aa, Artificial Sequence
  Description of Artificial Sequence: Synthetic epitope
KAAKEGNRKE

SEQ ID NO: 11712 - protein, 10 aa, Artificial Sequence
  Description of Artificial Sequence: Synthetic epitope
KAAKGSATKD

SEQ ID NO: 11713 - protein, 10 aa, Artificial Sequence
  Description of Artificial Sequence: Synthetic epitope
KAAKKAGGTP

SEQ ID NO: 11714 - protein, 10 aa, Artificial Sequence
  Description of Artificial Sequence: Synthetic epitope
KAAKKPTAAE

SEQ ID NO: 11715 - protein, 10 aa, Artificial Sequence
  Description of Artificial Sequence: Synthetic epitope
KAAKKSYEED

SEQ ID NO: 11716 - protein, 10 aa, Artificial Sequence
  Description of Artificial Sequence: Synthetic epitope
KAAKLMTEKA

SEQ ID NO: 11717 - protein, 10 aa, Artificial Sequence
  Description of Artificial Sequence: Synthetic epitope
KAAKSAKLRK

SEQ ID NO: 11718 - protein, 10 aa, Artificial Sequence
  Description of Artificial Sequence: Synthetic epitope
KAALATKLLS

SEQ ID NO: 11719 - protein, 10 aa, Artificial Sequence
  Description of Artificial Sequence: Synthetic epitope
KAALGVLRQS

SEQ ID NO: 11720 - protein, 10 aa, Artificial Sequence
  Description of Artificial Sequence: Synthetic epitope
KAALSSNRAI

SEQ ID NO: 11721 - protein, 10 aa, Artificial Sequence
  Description of Artificial Sequence: Synthetic epitope
KAAMALEKKL

SEQ ID NO: 11722 - protein, 10 aa, Artificial Sequence
  Description of Artificial Sequence: Synthetic epitope
KAAMIELVER

SEQ ID NO: 11723 - protein, 10 aa, Artificial Sequence
  Description of Artificial Sequence: Synthetic epitope
KAAQKAPSKA

SEQ ID NO: 11724 - protein, 10 aa, Artificial Sequence
  Description of Artificial Sequence: Synthetic epitope
KAAQKEIRST

SEQ ID NO: 11725 - protein, 10 aa, Artificial Sequence
  Description of Artificial Sequence: Synthetic epitope
KAAQRSKQGA

SEQ ID NO: 11726 - protein, 10 aa, Artificial Sequence
  Description of Artificial Sequence: Synthetic epitope
KAAQSANISV

SEQ ID NO: 11727 - protein, 10 aa, Artificial Sequence
  Description of Artificial Sequence: Synthetic epitope
KAAQVAKEKK

SEQ ID NO: 11728 - protein, 10 aa, Artificial Sequence
  Description of Artificial Sequence: Synthetic epitope
KAASEKDYNL

SEQ ID NO: 11729 - protein, 10 aa, Artificial Sequence
  Description of Artificial Sequence: Synthetic epitope
KAASLDVSGT

SEQ ID NO: 11730 - protein, 10 aa, Artificial Sequence
  Description of Artificial Sequence: Synthetic epitope
KAASLMNLEN

SEQ ID NO: 11731 - protein, 10 aa, Artificial Sequence
  Description of Artificial Sequence: Synthetic epitope
KAASTLSDTK

SEQ ID NO: 11732 - protein, 10 aa, Artificial Sequence
  Description of Artificial Sequence: Synthetic epitope
KAASVIAKYP

SEQ ID NO: 11733 - protein, 10 aa, Artificial Sequence
  Description of Artificial Sequence: Synthetic epitope
KAASVPKVET

SEQ ID NO: 11734 - protein, 10 aa, Artificial Sequence
  Description of Artificial Sequence: Synthetic epitope
KAATQGVVEN

SEQ ID NO: 11735 - protein, 10 aa, Artificial Sequence
  Description of Artificial Sequence: Synthetic epitope
KAAVESDTEF

SEQ ID NO: 11736 - protein, 10 aa, Artificial Sequence
  Description of Artificial Sequence: Synthetic epitope
KAAYEKGQAP

SEQ ID NO: 11737 - protein, 10 aa, Artificial Sequence
  Description of Artificial Sequence: Synthetic epitope
KAAYRKTKNT

SEQ ID NO: 11738 - protein, 10 aa, Artificial Sequence
  Description of Artificial Sequence: Synthetic epitope
KAAYSSLDTS

SEQ ID NO: 11739 - protein, 10 aa, Artificial Sequence
  Description of Artificial Sequence: Synthetic epitope
KADEANDNLF

SEQ ID NO: 11740 - protein, 10 aa, Artificial Sequence
  Description of Artificial Sequence: Synthetic epitope
KADEKASEHH

SEQ ID NO: 11741 - protein, 10 aa, Artificial Sequence
  Description of Artificial Sequence: Synthetic epitope
KADEPIADYA

SEQ ID NO: 11742 - protein, 10 aa, Artificial Sequence
  Description of Artificial Sequence: Synthetic epitope
KADKARQIKD

SEQ ID NO: 11743 - protein, 10 aa, Artificial Sequence
  Description of Artificial Sequence: Synthetic epitope
KADKMKEGSD

SEQ ID NO: 11744 - protein, 10 aa, Artificial Sequence
  Description of Artificial Sequence: Synthetic epitope
KADKPKVDEE

SEQ ID NO: 11745 - protein, 10 aa, Artificial Sequence
  Description of Artificial Sequence: Synthetic epitope
KADNLATQML

SEQ ID NO: 11746 - protein, 10 aa, Artificial Sequence
  Description of Artificial Sequence: Synthetic epitope
KADSKAITTS

SEQ ID NO: 11747 - protein, 10 aa, Artificial Sequence
  Description of Artificial Sequence: Synthetic epitope
KADTIDTIEK

SEQ ID NO: 11748 - protein, 10 aa, Artificial Sequence
  Description of Artificial Sequence: Synthetic epitope
KADTRTEILE

SEQ ID NO: 11749 - protein, 10 aa, Artificial Sequence
  Description of Artificial Sequence: Synthetic epitope
KADTTSTVTP

SEQ ID NO: 11750 - protein, 10 aa, Artificial Sequence
  Description of Artificial Sequence: Synthetic epitope
KAEAEAAREK

SEQ ID NO: 11751 - protein, 10 aa, Artificial Sequence
  Description of Artificial Sequence: Synthetic epitope
KAEAEKAEAQ

SEQ ID NO: 11752 - protein, 10 aa, Artificial Sequence
  Description of Artificial Sequence: Synthetic epitope
KAEAEKTEQE

SEQ ID NO: 11753 - protein, 10 aa, Artificial Sequence
  Description of Artificial Sequence: Synthetic epitope
KAEAEKTEQE

SEQ ID NO: 11754 - protein, 10 aa, Artificial Sequence
  Description of Artificial Sequence: Synthetic epitope
KAEAEQNWWE

SEQ ID NO: 11755 - protein, 10 aa, Artificial Sequence
  Description of Artificial Sequence: Synthetic epitope
KAEALVAALQ

SEQ ID NO: 11756 - protein, 10 aa, Artificial Sequence
  Description of Artificial Sequence: Synthetic epitope
KAEAQAQYSA

SEQ ID NO: 11757 - protein, 10 aa, Artificial Sequence
  Description of Artificial Sequence: Synthetic epitope
KAEAQIAAKN

SEQ ID NO: 11758 - protein, 10 aa, Artificial Sequence
  Description of Artificial Sequence: Synthetic epitope
KAEASLMDQM

SEQ ID NO: 11759 - protein, 10 aa, Artificial Sequence
  Description of Artificial Sequence: Synthetic epitope
KAEEATEAQE

SEQ ID NO: 11760 - protein, 10 aa, Artificial Sequence
  Description of Artificial Sequence: Synthetic epitope
KAEEIRIKGK

SEQ ID NO: 11761 - protein, 10 aa, Artificial Sequence
  Description of Artificial Sequence: Synthetic epitope
KAEENASQEE

SEQ ID NO: 11762 - protein, 10 aa, Artificial Sequence
  Description of Artificial Sequence: Synthetic epitope
KAEESQMKTQ

SEQ ID NO: 11763 - protein, 10 aa, Artificial Sequence
  Description of Artificial Sequence: Synthetic epitope
KAEGFTASTK

SEQ ID NO: 11764 - protein, 10 aa, Artificial Sequence
  Description of Artificial Sequence: Synthetic epitope
KAEIAMNMGE

SEQ ID NO: 11765 - protein, 10 aa, Artificial Sequence
  Description of Artificial Sequence: Synthetic epitope
KAEIARSNAS

SEQ ID NO: 11766 - protein, 10 aa, Artificial Sequence
  Description of Artificial Sequence: Synthetic epitope
KAEIKAAKAD

SEQ ID NO: 11767 - protein, 10 aa, Artificial Sequence
  Description of Artificial Sequence: Synthetic epitope
KAEKPMTSQP

SEQ ID NO: 11768 - protein, 10 aa, Artificial Sequence
  Description of Artificial Sequence: Synthetic epitope
KAELIPLMEV

SEQ ID NO: 11769 - protein, 10 aa, Artificial Sequence
  Description of Artificial Sequence: Synthetic epitope
KAELKTIAEY

SEQ ID NO: 11770 - protein, 10 aa, Artificial Sequence
  Description of Artificial Sequence: Synthetic epitope
KAEMEAVFLE

SEQ ID NO: 11771 - protein, 10 aa, Artificial Sequence
  Description of Artificial Sequence: Synthetic epitope
KAEMVTNQEE

SEQ ID NO: 11772 - protein, 10 aa, Artificial Sequence
  Description of Artificial Sequence: Synthetic epitope
KAERKITSRP

SEQ ID NO: 11773 - protein, 10 aa, Artificial Sequence
  Description of Artificial Sequence: Synthetic epitope
KAETARESKQ

SEQ ID NO: 11774 - protein, 10 aa, Artificial Sequence
  Description of Artificial Sequence: Synthetic epitope
KAETEKQSPP

SEQ ID NO: 11775 - protein, 10 aa, Artificial Sequence
  Description of Artificial Sequence: Synthetic epitope
KAEVMADTAV

SEQ ID NO: 11776 - protein, 10 aa, Artificial Sequence
  Description of Artificial Sequence: Synthetic epitope
KAEVRGAEIE

SEQ ID NO: 11777 - protein, 10 aa, Artificial Sequence
  Description of Artificial Sequence: Synthetic epitope
KAFEELLVTK

SEQ ID NO: 11778 - protein, 10 aa, Artificial Sequence
  Description of Artificial Sequence: Synthetic epitope
KAFESRLASS

SEQ ID NO: 11779 - protein, 10 aa, Artificial Sequence
  Description of Artificial Sequence: Synthetic epitope
KAFPRIVRES

SEQ ID NO: 11780 - protein, 10 aa, Artificial Sequence
  Description of Artificial Sequence: Synthetic epitope
KAGAATVKKP

SEQ ID NO: 11781 - protein, 10 aa, Artificial Sequence
  Description of Artificial Sequence: Synthetic epitope
KAGERISQKS

SEQ ID NO: 11782 - protein, 10 aa, Artificial Sequence
  Description of Artificial Sequence: Synthetic epitope
KAGGKSASAP

SEQ ID NO: 11783 - protein, 10 aa, Artificial Sequence
  Description of Artificial Sequence: Synthetic epitope
KAGGNSSTSI

SEQ ID NO: 11784 - protein, 10 aa, Artificial Sequence
  Description of Artificial Sequence: Synthetic epitope
KAGKQEVTEA

SEQ ID NO: 11785 - protein, 10 aa, Artificial Sequence
  Description of Artificial Sequence: Synthetic epitope
KAGLALSKHY

SEQ ID NO: 11786 - protein, 10 aa, Artificial Sequence
  Description of Artificial Sequence: Synthetic epitope
KAGLIASNQT

SEQ ID NO: 11787 - protein, 10 aa, Artificial Sequence
  Description of Artificial Sequence: Synthetic epitope
KAGMSQKESS

SEQ ID NO: 11788 - protein, 10 aa, Artificial Sequence
  Description of Artificial Sequence: Synthetic epitope
KAGNEQSVHQ

SEQ ID NO: 11789 - protein, 10 aa, Artificial Sequence
  Description of Artificial Sequence: Synthetic epitope
KAGSSAHHSG

SEQ ID NO: 11790 - protein, 10 aa, Artificial Sequence
  Description of Artificial Sequence: Synthetic epitope
KAGSSTADGN

SEQ ID NO: 11791 - protein, 10 aa, Artificial Sequence
  Description of Artificial Sequence: Synthetic epitope
KAHIKLNTKK

SEQ ID NO: 11792 - protein, 10 aa, Artificial Sequence
  Description of Artificial Sequence: Synthetic epitope
KAHIRKKTDE

SEQ ID NO: 11793 - protein, 10 aa, Artificial Sequence
  Description of Artificial Sequence: Synthetic epitope
KAHKSIGLEL

SEQ ID NO: 11794 - protein, 10 aa, Artificial Sequence
  Description of Artificial Sequence: Synthetic epitope
KAHLKRAILG

SEQ ID NO: 11795 - protein, 10 aa, Artificial Sequence
  Description of Artificial Sequence: Synthetic epitope
KAHVMSSLKQ

SEQ ID NO: 11796 - protein, 10 aa, Artificial Sequence
  Description of Artificial Sequence: Synthetic epitope
KAIATHQKRD

SEQ ID NO: 11797 - protein, 10 aa, Artificial Sequence
  Description of Artificial Sequence: Synthetic epitope
KAIDSSKKLR

SEQ ID NO: 11798 - protein, 10 aa, Artificial Sequence
  Description of Artificial Sequence: Synthetic epitope
KAIEENITTE

SEQ ID NO: 11799 - protein, 10 aa, Artificial Sequence
  Description of Artificial Sequence: Synthetic epitope
KAIEPNDYTG

SEQ ID NO: 11800 - protein, 10 aa, Artificial Sequence
  Description of Artificial Sequence: Synthetic epitope
KAIFAVLTSV

SEQ ID NO: 11801 - protein, 10 aa, Artificial Sequence
  Description of Artificial Sequence: Synthetic epitope
KAIGRLAMAG

SEQ ID NO: 11802 - protein, 10 aa, Artificial Sequence
  Description of Artificial Sequence: Synthetic epitope
KAIHFREHAT

SEQ ID NO: 11803 - protein, 10 aa, Artificial Sequence
  Description of Artificial Sequence: Synthetic epitope
KAIKEDSVDV

SEQ ID NO: 11804 - protein, 10 aa, Artificial Sequence
  Description of Artificial Sequence: Synthetic epitope
KAIKFSEADY

SEQ ID NO: 11805 - protein, 10 aa, Artificial Sequence
  Description of Artificial Sequence: Synthetic epitope
KAIKKSLTEE

SEQ ID NO: 11806 - protein, 10 aa, Artificial Sequence
  Description of Artificial Sequence: Synthetic epitope
KAILQKESDI

SEQ ID NO: 11807 - protein, 10 aa, Artificial Sequence
  Description of Artificial Sequence: Synthetic epitope
KAILTELKSI

SEQ ID NO: 11808 - protein, 10 aa, Artificial Sequence
  Description of Artificial Sequence: Synthetic epitope
KAIMIEVDDR

SEQ ID NO: 11809 - protein, 10 aa, Artificial Sequence
  Description of Artificial Sequence: Synthetic epitope
KAINAIQKSW

SEQ ID NO: 11810 - protein, 10 aa, Artificial Sequence
  Description of Artificial Sequence: Synthetic epitope
KAIPVAKINS

SEQ ID NO: 11811 - protein, 10 aa, Artificial Sequence
  Description of Artificial Sequence: Synthetic epitope
KAIQGILGKS

SEQ ID NO: 11812 - protein, 10 aa, Artificial Sequence
  Description of Artificial Sequence: Synthetic epitope
KAIQLQPSAR

SEQ ID NO: 11813 - protein, 10 aa, Artificial Sequence
  Description of Artificial Sequence: Synthetic epitope
KAIQSKMASP

SEQ ID NO: 11814 - protein, 10 aa, Artificial Sequence
  Description of Artificial Sequence: Synthetic epitope
KAISDEMFKT

SEQ ID NO: 11815 - protein, 10 aa, Artificial Sequence
  Description of Artificial Sequence: Synthetic epitope
KAISSAVRKA

SEQ ID NO: 11816 - protein, 10 aa, Artificial Sequence
  Description of Artificial Sequence: Synthetic epitope
KAISSPTVSR

SEQ ID NO: 11817 - protein, 10 aa, Artificial Sequence
  Description of Artificial Sequence: Synthetic epitope
KAIVEPEKTT

SEQ ID NO: 11818 - protein, 10 aa, Artificial Sequence
  Description of Artificial Sequence: Synthetic epitope
KAIYNKSIIE

SEQ ID NO: 11819 - protein, 10 aa, Artificial Sequence
  Description of Artificial Sequence: Synthetic epitope
KAKAAQVKAK

SEQ ID NO: 11820 - protein, 10 aa, Artificial Sequence
  Description of Artificial Sequence: Synthetic epitope
KAKAKKESVD

SEQ ID NO: 11821 - protein, 10 aa, Artificial Sequence
  Description of Artificial Sequence: Synthetic epitope
KAKATVNVKQ

SEQ ID NO: 11822 - protein, 10 aa, Artificial Sequence
  Description of Artificial Sequence: Synthetic epitope
KAKAVKPKAA

SEQ ID NO: 11823 - protein, 10 aa, Artificial Sequence
  Description of Artificial Sequence: Synthetic epitope
KAKDQTKAQA

SEQ ID NO: 11824 - protein, 10 aa, Artificial Sequence
  Description of Artificial Sequence: Synthetic epitope
KAKDSTYQTL

SEQ ID NO: 11825 - protein, 10 aa, Artificial Sequence
  Description of Artificial Sequence: Synthetic epitope
KAKEKALQRK

SEQ ID NO: 11826 - protein, 10 aa, Artificial Sequence
  Description of Artificial Sequence: Synthetic epitope
KAKELISADL

SEQ ID NO: 11827 - protein, 10 aa, Artificial Sequence
  Description of Artificial Sequence: Synthetic epitope
KAKESEDKEN

SEQ ID NO: 11828 - protein, 10 aa, Artificial Sequence
  Description of Artificial Sequence: Synthetic epitope
KAKIAENPAN

SEQ ID NO: 11829 - protein, 10 aa, Artificial Sequence
  Description of Artificial Sequence: Synthetic epitope
KAKIKVKVEE

SEQ ID NO: 11830 - protein, 10 aa, Artificial Sequence
  Description of Artificial Sequence: Synthetic epitope
KAKIVSREGG

SEQ ID NO: 11831 - protein, 10 aa, Artificial Sequence
  Description of Artificial Sequence: Synthetic epitope
KAKKAAQEQV

SEQ ID NO: 11832 - protein, 10 aa, Artificial Sequence
  Description of Artificial Sequence: Synthetic epitope
KAKKAGAAKP

SEQ ID NO: 11833 - protein, 10 aa, Artificial Sequence
  Description of Artificial Sequence: Synthetic epitope
KAKKELDSSR

SEQ ID NO: 11834 - protein, 10 aa, Artificial Sequence
  Description of Artificial Sequence: Synthetic epitope
KAKKPAGAAK

SEQ ID NO: 11835 - protein, 10 aa, Artificial Sequence
  Description of Artificial Sequence: Synthetic epitope
KAKKQSRPGA

SEQ ID NO: 11836 - protein, 10 aa, Artificial Sequence
  Description of Artificial Sequence: Synthetic epitope
KAKKSSVSKR

SEQ ID NO: 11837 - protein, 10 aa, Artificial Sequence
  Description of Artificial Sequence: Synthetic epitope
KAKLAAQEVE

SEQ ID NO: 11838 - protein, 10 aa, Artificial Sequence
  Description of Artificial Sequence: Synthetic epitope
KAKLLKLTSS

SEQ ID NO: 11839 - protein, 10 aa, Artificial Sequence
  Description of Artificial Sequence: Synthetic epitope
KAKLSSTQQS

SEQ ID NO: 11840 - protein, 10 aa, Artificial Sequence
  Description of Artificial Sequence: Synthetic epitope
KAKMASATSS

SEQ ID NO: 11841 - protein, 10 aa, Artificial Sequence
  Description of Artificial Sequence: Synthetic epitope
KAKMKSEEKR

SEQ ID NO: 11842 - protein, 10 aa, Artificial Sequence
  Description of Artificial Sequence: Synthetic epitope
KAKNKSESEN

SEQ ID NO: 11843 - protein, 10 aa, Artificial Sequence
  Description of Artificial Sequence: Synthetic epitope
KAKNVAEDED

SEQ ID NO: 11844 - protein, 10 aa, Artificial Sequence
  Description of Artificial Sequence: Synthetic epitope
KAKNYDKVEK

SEQ ID NO: 11845 - protein, 10 aa, Artificial Sequence
  Description of Artificial Sequence: Synthetic epitope
KAKPVNSKPD

SEQ ID NO: 11846 - protein, 10 aa, Artificial Sequence
  Description of Artificial Sequence: Synthetic epitope
KAKPVSSLNE

SEQ ID NO: 11847 - protein, 10 aa, Artificial Sequence
  Description of Artificial Sequence: Synthetic epitope
KAKQEKRSEK

SEQ ID NO: 11848 - protein, 10 aa, Artificial Sequence
  Description of Artificial Sequence: Synthetic epitope
KAKQKSAQQE

SEQ ID NO: 11849 - protein, 10 aa, Artificial Sequence
  Description of Artificial Sequence: Synthetic epitope
KAKQNVAKYQ

SEQ ID NO: 11850 - protein, 10 aa, Artificial Sequence
  Description of Artificial Sequence: Synthetic epitope
KAKREAAKEI

SEQ ID NO: 11851 - protein, 10 aa, Artificial Sequence
  Description of Artificial Sequence: Synthetic epitope
KAKRKKINQN

SEQ ID NO: 11852 - protein, 10 aa, Artificial Sequence
  Description of Artificial Sequence: Synthetic epitope
KAKSEESFVL

SEQ ID NO: 11853 - protein, 10 aa, Artificial Sequence
  Description of Artificial Sequence: Synthetic epitope
KAKTAVTELP

SEQ ID NO: 11854 - protein, 10 aa, Artificial Sequence
  Description of Artificial Sequence: Synthetic epitope
KAKTERAKEE

SEQ ID NO: 11855 - protein, 10 aa, Artificial Sequence
  Description of Artificial Sequence: Synthetic epitope
KAKTITQREK

SEQ ID NO: 11856 - protein, 10 aa, Artificial Sequence
  Description of Artificial Sequence: Synthetic epitope
KAKTQNKEES

SEQ ID NO: 11857 - protein, 10 aa, Artificial Sequence
  Description of Artificial Sequence: Synthetic epitope
KAKVPKEKSR

SEQ ID NO: 11858 - protein, 10 aa, Artificial Sequence
  Description of Artificial Sequence: Synthetic epitope
KAKVSSIAQE

SEQ ID NO: 11859 - protein, 10 aa, Artificial Sequence
  Description of Artificial Sequence: Synthetic epitope
KAKVVWEKFS

SEQ ID NO: 11860 - protein, 10 aa, Artificial Sequence
  Description of Artificial Sequence: Synthetic epitope
KALAEEASEE

SEQ ID NO: 11861 - protein, 10 aa, Artificial Sequence
  Description of Artificial Sequence: Synthetic epitope
KALARSLLVN

SEQ ID NO: 11862 - protein, 10 aa, Artificial Sequence
  Description of Artificial Sequence: Synthetic epitope
KALASILLQD

SEQ ID NO: 11863 - protein, 10 aa, Artificial Sequence
  Description of Artificial Sequence: Synthetic epitope
KALASQAAQD

SEQ ID NO: 11864 - protein, 10 aa, Artificial Sequence
  Description of Artificial Sequence: Synthetic epitope
KALDAWQWEK

SEQ ID NO: 11865 - protein, 10 aa, Artificial Sequence
  Description of Artificial Sequence: Synthetic epitope
KALEITKASH

SEQ ID NO: 11866 - protein, 10 aa, Artificial Sequence
  Description of Artificial Sequence: Synthetic epitope
KALESTSSPR

SEQ ID NO: 11867 - protein, 10 aa, Artificial Sequence
  Description of Artificial Sequence: Synthetic epitope
KALETQIQAL

SEQ ID NO: 11868 - protein, 10 aa, Artificial Sequence
  Description of Artificial Sequence: Synthetic epitope
KALFKSSGAS

SEQ ID NO: 11869 - protein, 10 aa, Artificial Sequence
  Description of Artificial Sequence: Synthetic epitope
KALGSKATEP

SEQ ID NO: 11870 - protein, 10 aa, Artificial Sequence
  Description of Artificial Sequence: Synthetic epitope
KALIEFASQH

SEQ ID NO: 11871 - protein, 10 aa, Artificial Sequence
  Description of Artificial Sequence: Synthetic epitope
KALIKKSREL

SEQ ID NO: 11872 - protein, 10 aa, Artificial Sequence
  Description of Artificial Sequence: Synthetic epitope
KALITKQNVQ

SEQ ID NO: 11873 - protein, 10 aa, Artificial Sequence
  Description of Artificial Sequence: Synthetic epitope
KALKSAAPEI

SEQ ID NO: 11874 - protein, 10 aa, Artificial Sequence
  Description of Artificial Sequence: Synthetic epitope
KALLAQEQVS

SEQ ID NO: 11875 - protein, 10 aa, Artificial Sequence
  Description of Artificial Sequence: Synthetic epitope
KALNKGDANS

SEQ ID NO: 11876 - protein, 10 aa, Artificial Sequence
  Description of Artificial Sequence: Synthetic epitope
KALQARQASP

SEQ ID NO: 11877 - protein, 10 aa, Artificial Sequence
  Description of Artificial Sequence: Synthetic epitope
KALQDTTVRE

SEQ ID NO: 11878 - protein, 10 aa, Artificial Sequence
  Description of Artificial Sequence: Synthetic epitope
KALQVWPLIE

SEQ ID NO: 11879 - protein, 10 aa, Artificial Sequence
  Description of Artificial Sequence: Synthetic epitope
KALRAQQRQA

SEQ ID NO: 11880 - protein, 10 aa, Artificial Sequence
  Description of Artificial Sequence: Synthetic epitope
KALRKKSVLL

SEQ ID NO: 11881 - protein, 10 aa, Artificial Sequence
  Description of Artificial Sequence: Synthetic epitope
KALRLAMQLE

SEQ ID NO: 11882 - protein, 10 aa, Artificial Sequence
  Description of Artificial Sequence: Synthetic epitope
KALRTLADEA

SEQ ID NO: 11883 - protein, 10 aa, Artificial Sequence
  Description of Artificial Sequence: Synthetic epitope
KALSAVSAQA

SEQ ID NO: 11884 - protein, 10 aa, Artificial Sequence
  Description of Artificial Sequence: Synthetic epitope
KALSGGLYPV

SEQ ID NO: 11885 - protein, 10 aa, Artificial Sequence
  Description of Artificial Sequence: Synthetic epitope
KALSITLVQE

SEQ ID NO: 11886 - protein, 10 aa, Artificial Sequence
  Description of Artificial Sequence: Synthetic epitope
KALSSAVQAS

SEQ ID NO: 11887 - protein, 10 aa, Artificial Sequence
  Description of Artificial Sequence: Synthetic epitope
KALSSRRLFV

SEQ ID NO: 11888 - protein, 10 aa, Artificial Sequence
  Description of Artificial Sequence: Synthetic epitope
KALTAGEKAI

SEQ ID NO: 11889 - protein, 10 aa, Artificial Sequence
  Description of Artificial Sequence: Synthetic epitope
KALTRRLQVE

SEQ ID NO: 11890 - protein, 10 aa, Artificial Sequence
  Description of Artificial Sequence: Synthetic epitope
KALVAQVIKE

SEQ ID NO: 11891 - protein, 10 aa, Artificial Sequence
  Description of Artificial Sequence: Synthetic epitope
KALVAVLREV

SEQ ID NO: 11892 - protein, 10 aa, Artificial Sequence
  Description of Artificial Sequence: Synthetic epitope
KALVSSVIDN

SEQ ID NO: 11893 - protein, 10 aa, Artificial Sequence
  Description of Artificial Sequence: Synthetic epitope
KALWPAQMSA

SEQ ID NO: 11894 - protein, 10 aa, Artificial Sequence
  Description of Artificial Sequence: Synthetic epitope
KAMDSDWFAE

SEQ ID NO: 11895 - protein, 10 aa, Artificial Sequence
  Description of Artificial Sequence: Synthetic epitope
KAMERSEQQP

SEQ ID NO: 11896 - protein, 10 aa, Artificial Sequence
  Description of Artificial Sequence: Synthetic epitope
KAMIKTYVVP

SEQ ID NO: 11897 - protein, 10 aa, Artificial Sequence
  Description of Artificial Sequence: Synthetic epitope
KAMKKVLSSV

SEQ ID NO: 11898 - protein, 10 aa, Artificial Sequence
  Description of Artificial Sequence: Synthetic epitope
KAMLSEQNRA

SEQ ID NO: 11899 - protein, 10 aa, Artificial Sequence
  Description of Artificial Sequence: Synthetic epitope
KAMQSLKSRG

SEQ ID NO: 11900 - protein, 10 aa, Artificial Sequence
  Description of Artificial Sequence: Synthetic epitope
KAMTSNVASV

SEQ ID NO: 11901 - protein, 10 aa, Artificial Sequence
  Description of Artificial Sequence: Synthetic epitope
KAMTTGAIAA

SEQ ID NO: 11902 - protein, 10 aa, Artificial Sequence
  Description of Artificial Sequence: Synthetic epitope
KAMVAQPAEK

SEQ ID NO: 11903 - protein, 10 aa, Artificial Sequence
  Description of Artificial Sequence: Synthetic epitope
KAMVTISNTA

SEQ ID NO: 11904 - protein, 10 aa, Artificial Sequence
  Description of Artificial Sequence: Synthetic epitope
KANETKLEGD

SEQ ID NO: 11905 - protein, 10 aa, Artificial Sequence
  Description of Artificial Sequence: Synthetic epitope
KANGKYWPID

SEQ ID NO: 11906 - protein, 10 aa, Artificial Sequence
  Description of Artificial Sequence: Synthetic epitope
KANLDTLKST

SEQ ID NO: 11907 - protein, 10 aa, Artificial Sequence
  Description of Artificial Sequence: Synthetic epitope
KANNFPINHK

SEQ ID NO: 11908 - protein, 10 aa, Artificial Sequence
  Description of Artificial Sequence: Synthetic epitope
KANNLPKAIA

SEQ ID NO: 11909 - protein, 10 aa, Artificial Sequence
  Description of Artificial Sequence: Synthetic epitope
KANPVNRYMY

SEQ ID NO: 11910 - protein, 10 aa, Artificial Sequence
  Description of Artificial Sequence: Synthetic epitope
KANQAENDPT

SEQ ID NO: 11911 - protein, 10 aa, Artificial Sequence
  Description of Artificial Sequence: Synthetic epitope
KANQISPSNS

SEQ ID NO: 11912 - protein, 10 aa, Artificial Sequence
  Description of Artificial Sequence: Synthetic epitope
KANRAENPGI

SEQ ID NO: 11913 - protein, 10 aa, Artificial Sequence
  Description of Artificial Sequence: Synthetic epitope
KANSLARLAH

SEQ ID NO: 11914 - protein, 10 aa, Artificial Sequence
  Description of Artificial Sequence: Synthetic epitope
KANVSKLVAH

SEQ ID NO: 11915 - protein, 10 aa, Artificial Sequence
  Description of Artificial Sequence: Synthetic epitope
KAPAAEKLEP

SEQ ID NO: 11916 - protein, 10 aa, Artificial Sequence
  Description of Artificial Sequence: Synthetic epitope
KAPDVTTLPR

SEQ ID NO: 11917 - protein, 10 aa, Artificial Sequence
  Description of Artificial Sequence: Synthetic epitope
KAPEATVTLP

SEQ ID NO: 11918 - protein, 10 aa, Artificial Sequence
  Description of Artificial Sequence: Synthetic epitope
KAPKSEKEMD

SEQ ID NO: 11919 - protein, 10 aa, Artificial Sequence
  Description of Artificial Sequence: Synthetic epitope
KAPLAYKRKK

SEQ ID NO: 11920 - protein, 10 aa, Artificial Sequence
  Description of Artificial Sequence: Synthetic epitope
KAPRTRAVRN

SEQ ID NO: 11921 - protein, 10 aa, Artificial Sequence
  Description of Artificial Sequence: Synthetic epitope
KAPSLYTEQR

SEQ ID NO: 11922 - protein, 10 aa, Artificial Sequence
  Description of Artificial Sequence: Synthetic epitope
KAPTDSVSDE

SEQ ID NO: 11923 - protein, 10 aa, Artificial Sequence
  Description of Artificial Sequence: Synthetic epitope
KAPVKARILP

SEQ ID NO: 11924 - protein, 10 aa, Artificial Sequence
  Description of Artificial Sequence: Synthetic epitope
KAPVQNEAPA

SEQ ID NO: 11925 - protein, 10 aa, Artificial Sequence
  Description of Artificial Sequence: Synthetic epitope
KAPVSDPQAA

SEQ ID NO: 11926 - protein, 10 aa, Artificial Sequence
  Description of Artificial Sequence: Synthetic epitope
KAQALAIETE

SEQ ID NO: 11927 - protein, 10 aa, Artificial Sequence
  Description of Artificial Sequence: Synthetic epitope
KAQDTPARKT

SEQ ID NO: 11928 - protein, 10 aa, Artificial Sequence
  Description of Artificial Sequence: Synthetic epitope
KAQGKSVGVG

SEQ ID NO: 11929 - protein, 10 aa, Artificial Sequence
  Description of Artificial Sequence: Synthetic epitope
KAQGQEQEQE

SEQ ID NO: 11930 - protein, 10 aa, Artificial Sequence
  Description of Artificial Sequence: Synthetic epitope
KAQILALAED

SEQ ID NO: 11931 - protein, 10 aa, Artificial Sequence
  Description of Artificial Sequence: Synthetic epitope
KAQINKQAEK

SEQ ID NO: 11932 - protein, 10 aa, Artificial Sequence
  Description of Artificial Sequence: Synthetic epitope
KAQLNELVNS

SEQ ID NO: 11933 - protein, 10 aa, Artificial Sequence
  Description of Artificial Sequence: Synthetic epitope
KAQLRGTRQR

SEQ ID NO: 11934 - protein, 10 aa, Artificial Sequence
  Description of Artificial Sequence: Synthetic epitope
KAQLRTALAS

SEQ ID NO: 11935 - protein, 10 aa, Artificial Sequence
  Description of Artificial Sequence: Synthetic epitope
KAQLVKAQRA

SEQ ID NO: 11936 - protein, 10 aa, Artificial Sequence
  Description of Artificial Sequence: Synthetic epitope
KAQMTNILQQ

SEQ ID NO: 11937 - protein, 10 aa, Artificial Sequence
  Description of Artificial Sequence: Synthetic epitope
KAQPVKYKTE

SEQ ID NO: 11938 - protein, 10 aa, Artificial Sequence
  Description of Artificial Sequence: Synthetic epitope
KAQQLGTEEK

SEQ ID NO: 11939 - protein, 10 aa, Artificial Sequence
  Description of Artificial Sequence: Synthetic epitope
KAQQNNVEHK

SEQ ID NO: 11940 - protein, 10 aa, Artificial Sequence
  Description of Artificial Sequence: Synthetic epitope
KAQQRDVDGA

SEQ ID NO: 11941 - protein, 10 aa, Artificial Sequence
  Description of Artificial Sequence: Synthetic epitope
KAQRKSETQH

SEQ ID NO: 11942 - protein, 10 aa, Artificial Sequence
  Description of Artificial Sequence: Synthetic epitope
KAQRQNLSQA

SEQ ID NO: 11943 - protein, 10 aa, Artificial Sequence
  Description of Artificial Sequence: Synthetic epitope
KAQRVNSTTE

SEQ ID NO: 11944 - protein, 10 aa, Artificial Sequence
  Description of Artificial Sequence: Synthetic epitope
KAQSMPVFKE

SEQ ID NO: 11945 - protein, 10 aa, Artificial Sequence
  Description of Artificial Sequence: Synthetic epitope
KAQVQRSKSQ

SEQ ID NO: 11946 - protein, 10 aa, Artificial Sequence
  Description of Artificial Sequence: Synthetic epitope
KAQVRSIYSL

SEQ ID NO: 11947 - protein, 10 aa, Artificial Sequence
  Description of Artificial Sequence: Synthetic epitope
KAQVSKKQYN

SEQ ID NO: 11948 - protein, 10 aa, Artificial Sequence
  Description of Artificial Sequence: Synthetic epitope
KAQVVKASGQ

SEQ ID NO: 11949 - protein, 10 aa, Artificial Sequence
  Description of Artificial Sequence: Synthetic epitope
KARASKVEAA

SEQ ID NO: 11950 - protein, 10 aa, Artificial Sequence
  Description of Artificial Sequence: Synthetic epitope
KARGNEYQPS

SEQ ID NO: 11951 - protein, 10 aa, Artificial Sequence
  Description of Artificial Sequence: Synthetic epitope
KARKLRKGSE

SEQ ID NO: 11952 - protein, 10 aa, Artificial Sequence
  Description of Artificial Sequence: Synthetic epitope
KARQAAKTEI

SEQ ID NO: 11953 - protein, 10 aa, Artificial Sequence
  Description of Artificial Sequence: Synthetic epitope
KARQAEAAER

SEQ ID NO: 11954 - protein, 10 aa, Artificial Sequence
  Description of Artificial Sequence: Synthetic epitope
KARRAQVKHR

SEQ ID NO: 11955 - protein, 10 aa, Artificial Sequence
  Description of Artificial Sequence: Synthetic epitope
KARRMAANVR

SEQ ID NO: 11956 - protein, 10 aa, Artificial Sequence
  Description of Artificial Sequence: Synthetic epitope
KARSEQTKEI

SEQ ID NO: 11957 - protein, 10 aa, Artificial Sequence
  Description of Artificial Sequence: Synthetic epitope
KARSNSTLSK

SEQ ID NO: 11958 - protein, 10 aa, Artificial Sequence
  Description of Artificial Sequence: Synthetic epitope
KARVAEPGAE

SEQ ID NO: 11959 - protein, 10 aa, Artificial Sequence
  Description of Artificial Sequence: Synthetic epitope
KARVKSRLAF

SEQ ID NO: 11960 - protein, 10 aa, Artificial Sequence
  Description of Artificial Sequence: Synthetic epitope
KARVSATAGA

SEQ ID NO: 11961 - protein, 10 aa, Artificial Sequence
  Description of Artificial Sequence: Synthetic epitope
KARYERATSE

SEQ ID NO: 11962 - protein, 10 aa, Artificial Sequence
  Description of Artificial Sequence: Synthetic epitope
KASATVDIVQ

SEQ ID NO: 11963 - protein, 10 aa, Artificial Sequence
  Description of Artificial Sequence: Synthetic epitope
KASDASFRAK

SEQ ID NO: 11964 - protein, 10 aa, Artificial Sequence
  Description of Artificial Sequence: Synthetic epitope
KASEGASSES

SEQ ID NO: 11965 - protein, 10 aa, Artificial Sequence
  Description of Artificial Sequence: Synthetic epitope
KASEKDAKHR

SEQ ID NO: 11966 - protein, 10 aa, Artificial Sequence
  Description of Artificial Sequence: Synthetic epitope
KASENRKKRR

SEQ ID NO: 11967 - protein, 10 aa, Artificial Sequence
  Description of Artificial Sequence: Synthetic epitope
KASGSLQQLS

SEQ ID NO: 11968 - protein, 10 aa, Artificial Sequence
  Description of Artificial Sequence: Synthetic epitope
KASIVPSTHH

SEQ ID NO: 11969 - protein, 10 aa, Artificial Sequence
  Description of Artificial Sequence: Synthetic epitope
KASKAASVLL

SEQ ID NO: 11970 - protein, 10 aa, Artificial Sequence
  Description of Artificial Sequence: Synthetic epitope
KASKKNGNVG

SEQ ID NO: 11971 - protein, 10 aa, Artificial Sequence
  Description of Artificial Sequence: Synthetic epitope
KASLHNVKSS

SEQ ID NO: 11972 - protein, 10 aa, Artificial Sequence
  Description of Artificial Sequence: Synthetic epitope
KASLLQLTRE

SEQ ID NO: 11973 - protein, 10 aa, Artificial Sequence
  Description of Artificial Sequence: Synthetic epitope
KASLSAKGTH

SEQ ID NO: 11974 - protein, 10 aa, Artificial Sequence
  Description of Artificial Sequence: Synthetic epitope
KASPAASALI

SEQ ID NO: 11975 - protein, 10 aa, Artificial Sequence
  Description of Artificial Sequence: Synthetic epitope
KASPSSLLAK

SEQ ID NO: 11976 - protein, 10 aa, Artificial Sequence
  Description of Artificial Sequence: Synthetic epitope
KASQMGAVSQ

SEQ ID NO: 11977 - protein, 10 aa, Artificial Sequence
  Description of Artificial Sequence: Synthetic epitope
KASQSSRDTL

SEQ ID NO: 11978 - protein, 10 aa, Artificial Sequence
  Description of Artificial Sequence: Synthetic epitope
KASRKHKSKS

SEQ ID NO: 11979 - protein, 10 aa, Artificial Sequence
  Description of Artificial Sequence: Synthetic epitope
KASRQQLQAQ

SEQ ID NO: 11980 - protein, 10 aa, Artificial Sequence
  Description of Artificial Sequence: Synthetic epitope
KASRSVEHAK

SEQ ID NO: 11981 - protein, 10 aa, Artificial Sequence
  Description of Artificial Sequence: Synthetic epitope
KASSEEDDHN

SEQ ID NO: 11982 - protein, 10 aa, Artificial Sequence
  Description of Artificial Sequence: Synthetic epitope
KASTAQAGED

SEQ ID NO: 11983 - protein, 10 aa, Artificial Sequence
  Description of Artificial Sequence: Synthetic epitope
KASVAKVNKS

SEQ ID NO: 11984 - protein, 10 aa, Artificial Sequence
  Description of Artificial Sequence: Synthetic epitope
KASVEDADTQ

SEQ ID NO: 11985 - protein, 10 aa, Artificial Sequence
  Description of Artificial Sequence: Synthetic epitope
KASVKSLTTQ

SEQ ID NO: 11986 - protein, 10 aa, Artificial Sequence
  Description of Artificial Sequence: Synthetic epitope
KASVLGQLAS

SEQ ID NO: 11987 - protein, 10 aa, Artificial Sequence
  Description of Artificial Sequence: Synthetic epitope
KASVMIQNNA

SEQ ID NO: 11988 - protein, 10 aa, Artificial Sequence
  Description of Artificial Sequence: Synthetic epitope
KASVQVTTID

SEQ ID NO: 11989 - protein, 10 aa, Artificial Sequence
  Description of Artificial Sequence: Synthetic epitope
KATADRKSAS

SEQ ID NO: 11990 - protein, 10 aa, Artificial Sequence
  Description of Artificial Sequence: Synthetic epitope
KATAETAATK

SEQ ID NO: 11991 - protein, 10 aa, Artificial Sequence
  Description of Artificial Sequence: Synthetic epitope
KATGAEQEAQ

SEQ ID NO: 11992 - protein, 10 aa, Artificial Sequence
  Description of Artificial Sequence: Synthetic epitope
KATGKISKLG

SEQ ID NO: 11993 - protein, 10 aa, Artificial Sequence
  Description of Artificial Sequence: Synthetic epitope
KATIEERMQA

SEQ ID NO: 11994 - protein, 10 aa, Artificial Sequence
  Description of Artificial Sequence: Synthetic epitope
KATMQGDREQ

SEQ ID NO: 11995 - protein, 10 aa, Artificial Sequence
  Description of Artificial Sequence: Synthetic epitope
KATMYSYDSA

SEQ ID NO: 11996 - protein, 10 aa, Artificial Sequence
  Description of Artificial Sequence: Synthetic epitope
KATSGKKGGK

SEQ ID NO: 11997 - protein, 10 aa, Artificial Sequence
  Description of Artificial Sequence: Synthetic epitope
KATSSATTAA

SEQ ID NO: 11998 - protein, 10 aa, Artificial Sequence
  Description of Artificial Sequence: Synthetic epitope
KATSVQQIEM

SEQ ID NO: 11999 - protein, 10 aa, Artificial Sequence
  Description of Artificial Sequence: Synthetic epitope
KATTASQAKA

SEQ ID NO: 12000 - protein, 10 aa, Artificial Sequence
  Description of Artificial Sequence: Synthetic epitope
KATTLGVSSD

SEQ ID NO: 12001 - protein, 10 aa, Artificial Sequence
  Description of Artificial Sequence: Synthetic epitope
AADAQRAKNG

SEQ ID NO: 12002 - protein, 10 aa, Artificial Sequence
  Description of Artificial Sequence: Synthetic epitope
AADASPSLNR

SEQ ID NO: 12003 - protein, 10 aa, Artificial Sequence
  Description of Artificial Sequence: Synthetic epitope
AADATEAKNK

SEQ ID NO: 12004 - protein, 10 aa, Artificial Sequence
  Description of Artificial Sequence: Synthetic epitope
AADESKSEID

SEQ ID NO: 12005 - protein, 10 aa, Artificial Sequence
  Description of Artificial Sequence: Synthetic epitope
AADIPITETE

SEQ ID NO: 12006 - protein, 10 aa, Artificial Sequence
  Description of Artificial Sequence: Synthetic epitope
AADISARKMA

SEQ ID NO: 12007 - protein, 10 aa, Artificial Sequence
  Description of Artificial Sequence: Synthetic epitope
AADKERAAGG

SEQ ID NO: 12008 - protein, 10 aa, Artificial Sequence
  Description of Artificial Sequence: Synthetic epitope
AADLVTETDH

SEQ ID NO: 12009 - protein, 10 aa, Artificial Sequence
  Description of Artificial Sequence: Synthetic epitope
AADSKKSQPK

SEQ ID NO: 12010 - protein, 10 aa, Artificial Sequence
  Description of Artificial Sequence: Synthetic epitope
AADSNTTAAS

SEQ ID NO: 12011 - protein, 10 aa, Artificial Sequence
  Description of Artificial Sequence: Synthetic epitope
AADVDARKQA

SEQ ID NO: 12012 - protein, 10 aa, Artificial Sequence
  Description of Artificial Sequence: Synthetic epitope
AAEAAVPRTI

SEQ ID NO: 12013 - protein, 10 aa, Artificial Sequence
  Description of Artificial Sequence: Synthetic epitope
AAEAEPRALE

SEQ ID NO: 12014 - protein, 10 aa, Artificial Sequence
  Description of Artificial Sequence: Synthetic epitope
AAEALALSSP

SEQ ID NO: 12015 - protein, 10 aa, Artificial Sequence
  Description of Artificial Sequence: Synthetic epitope
AAEDQRTSTY

SEQ ID NO: 12016 - protein, 10 aa, Artificial Sequence
  Description of Artificial Sequence: Synthetic epitope
AAEEASTTKG

SEQ ID NO: 12017 - protein, 10 aa, Artificial Sequence
  Description of Artificial Sequence: Synthetic epitope
AAEEDSTSGN

SEQ ID NO: 12018 - protein, 10 aa, Artificial Sequence
  Description of Artificial Sequence: Synthetic epitope
AAEESASQIQ

SEQ ID NO: 12019 - protein, 10 aa, Artificial Sequence
  Description of Artificial Sequence: Synthetic epitope
AAEESLRSLA

SEQ ID NO: 12020 - protein, 10 aa, Artificial Sequence
  Description of Artificial Sequence: Synthetic epitope
AAEFQTKTEE

SEQ ID NO: 12021 - protein, 10 aa, Artificial Sequence
  Description of Artificial Sequence: Synthetic epitope
AAEIEAKEKM

SEQ ID NO: 12022 - protein, 10 aa, Artificial Sequence
  Description of Artificial Sequence: Synthetic epitope
AAEIMQRYKK

SEQ ID NO: 12023 - protein, 10 aa, Artificial Sequence
  Description of Artificial Sequence: Synthetic epitope
AAEMIETKSS

SEQ ID NO: 12024 - protein, 10 aa, Artificial Sequence
  Description of Artificial Sequence: Synthetic epitope
AAENNKLKEE

SEQ ID NO: 12025 - protein, 10 aa, Artificial Sequence
  Description of Artificial Sequence: Synthetic epitope
AAEQTQVPKE

SEQ ID NO: 12026 - protein, 10 aa, Artificial Sequence
  Description of Artificial Sequence: Synthetic epitope
AAESITPTVE

SEQ ID NO: 12027 - protein, 10 aa, Artificial Sequence
  Description of Artificial Sequence: Synthetic epitope
AAESTETQES

SEQ ID NO: 12028 - protein, 10 aa, Artificial Sequence
  Description of Artificial Sequence: Synthetic epitope
AAETRNSSEQ

SEQ ID NO: 12029 - protein, 10 aa, Artificial Sequence
  Description of Artificial Sequence: Synthetic epitope
AAETSASEPE

SEQ ID NO: 12030 - protein, 10 aa, Artificial Sequence
  Description of Artificial Sequence: Synthetic epitope
AAEVAATEIK

SEQ ID NO: 12031 - protein, 10 aa, Artificial Sequence
  Description of Artificial Sequence: Synthetic epitope
AAFASGLAQD

SEQ ID NO: 12032 - protein, 10 aa, Artificial Sequence
  Description of Artificial Sequence: Synthetic epitope
AAFKSSAVQQ

SEQ ID NO: 12033 - protein, 10 aa, Artificial Sequence
  Description of Artificial Sequence: Synthetic epitope
AAFRLVSELL

SEQ ID NO: 12034 - protein, 10 aa, Artificial Sequence
  Description of Artificial Sequence: Synthetic epitope
AAFSTLTTAS

SEQ ID NO: 12035 - protein, 10 aa, Artificial Sequence
  Description of Artificial Sequence: Synthetic epitope
AAGENTSVSA

SEQ ID NO: 12036 - protein, 10 aa, Artificial Sequence
  Description of Artificial Sequence: Synthetic epitope
AAGGSSAKPS

SEQ ID NO: 12037 - protein, 10 aa, Artificial Sequence
  Description of Artificial Sequence: Synthetic epitope
AAGGSSGTTA

SEQ ID NO: 12038 - protein, 10 aa, Artificial Sequence
  Description of Artificial Sequence: Synthetic epitope
AAGKMTTEEQ

SEQ ID NO: 12039 - protein, 10 aa, Artificial Sequence
  Description of Artificial Sequence: Synthetic epitope
AAGQPDIGEE

SEQ ID NO: 12040 - protein, 10 aa, Artificial Sequence
  Description of Artificial Sequence: Synthetic epitope
AAGSRNKVQE

SEQ ID NO: 12041 - protein, 10 aa, Artificial Sequence
  Description of Artificial Sequence: Synthetic epitope
AAGSSVVSES

SEQ ID NO: 12042 - protein, 10 aa, Artificial Sequence
  Description of Artificial Sequence: Synthetic epitope
AAGTEQKTEA

SEQ ID NO: 12043 - protein, 10 aa, Artificial Sequence
  Description of Artificial Sequence: Synthetic epitope
AAGTKKQFQK

SEQ ID NO: 12044 - protein, 10 aa, Artificial Sequence
  Description of Artificial Sequence: Synthetic epitope
AAGVKKVAKS

SEQ ID NO: 12045 - protein, 10 aa, Artificial Sequence
  Description of Artificial Sequence: Synthetic epitope
AAHGDTAQDS

SEQ ID NO: 12046 - protein, 10 aa, Artificial Sequence
  Description of Artificial Sequence: Synthetic epitope
AAHNHHGENK

SEQ ID NO: 12047 - protein, 10 aa, Artificial Sequence
  Description of Artificial Sequence: Synthetic epitope
AAHQVDSESP

SEQ ID NO: 12048 - protein, 10 aa, Artificial Sequence
  Description of Artificial Sequence: Synthetic epitope
AAHVSAQQVA

SEQ ID NO: 12049 - protein, 10 aa, Artificial Sequence
  Description of Artificial Sequence: Synthetic epitope
AAIATAKRSG

SEQ ID NO: 12050 - protein, 10 aa, Artificial Sequence
  Description of Artificial Sequence: Synthetic epitope
AAIKAQFEKQ

SEQ ID NO: 12051 - protein, 10 aa, Artificial Sequence
  Description of Artificial Sequence: Synthetic epitope
AAINEAIEAE

SEQ ID NO: 12052 - protein, 10 aa, Artificial Sequence
  Description of Artificial Sequence: Synthetic epitope
AAINIKLTEQ

SEQ ID NO: 12053 - protein, 10 aa, Artificial Sequence
  Description of Artificial Sequence: Synthetic epitope
AAIPLQKKSD

SEQ ID NO: 12054 - protein, 10 aa, Artificial Sequence
  Description of Artificial Sequence: Synthetic epitope
AAIQEVTQPG

SEQ ID NO: 12055 - protein, 10 aa, Artificial Sequence
  Description of Artificial Sequence: Synthetic epitope
AAIQKGVAEK

SEQ ID NO: 12056 - protein, 10 aa, Artificial Sequence
  Description of Artificial Sequence: Synthetic epitope
AAISEVVSQT

SEQ ID NO: 12057 - protein, 10 aa, Artificial Sequence
  Description of Artificial Sequence: Synthetic epitope
AAISSRSVIH

SEQ ID NO: 12058 - protein, 10 aa, Artificial Sequence
  Description of Artificial Sequence: Synthetic epitope
AAITTKTPSD

SEQ ID NO: 12059 - protein, 10 aa, Artificial Sequence
  Description of Artificial Sequence: Synthetic epitope
AAIVQAESEE

SEQ ID NO: 12060 - protein, 10 aa, Artificial Sequence
  Description of Artificial Sequence: Synthetic epitope
AAKATTSTNW

SEQ ID NO: 12061 - protein, 10 aa, Artificial Sequence
  Description of Artificial Sequence: Synthetic epitope
AAKETVAIGR

SEQ ID NO: 12062 - protein, 10 aa, Artificial Sequence
  Description of Artificial Sequence: Synthetic epitope
AAKGKHASEK

SEQ ID NO: 12063 - protein, 10 aa, Artificial Sequence
  Description of Artificial Sequence: Synthetic epitope
AAKHVQSKAI

SEQ ID NO: 12064 - protein, 10 aa, Artificial Sequence
  Description of Artificial Sequence: Synthetic epitope
AAKKEESETA

SEQ ID NO: 12065 - protein, 10 aa, Artificial Sequence
  Description of Artificial Sequence: Synthetic epitope
AAKKMEEVEA

SEQ ID NO: 12066 - protein, 10 aa, Artificial Sequence
  Description of Artificial Sequence: Synthetic epitope
AAKKQLADET

SEQ ID NO: 12067 - protein, 10 aa, Artificial Sequence
  Description of Artificial Sequence: Synthetic epitope
AAKKSKRKQE

SEQ ID NO: 12068 - protein, 10 aa, Artificial Sequence
  Description of Artificial Sequence: Synthetic epitope
AAKQLEMQNK

SEQ ID NO: 12069 - protein, 10 aa, Artificial Sequence
  Description of Artificial Sequence: Synthetic epitope
AAKQPQTSVV

SEQ ID NO: 12070 - protein, 10 aa, Artificial Sequence
  Description of Artificial Sequence: Synthetic epitope
AAKQQELVEQ

SEQ ID NO: 12071 - protein, 10 aa, Artificial Sequence
  Description of Artificial Sequence: Synthetic epitope
AAKRRSEYWR

SEQ ID NO: 12072 - protein, 10 aa, Artificial Sequence
  Description of Artificial Sequence: Synthetic epitope
AAKTTSKNSS

SEQ ID NO: 12073 - protein, 10 aa, Artificial Sequence
  Description of Artificial Sequence: Synthetic epitope
AAKVALTKRA

SEQ ID NO: 12074 - protein, 10 aa, Artificial Sequence
  Description of Artificial Sequence: Synthetic epitope
AAKVVPVKAK

SEQ ID NO: 12075 - protein, 10 aa, Artificial Sequence
  Description of Artificial Sequence: Synthetic epitope
AALAASSGSS

SEQ ID NO: 12076 - protein, 10 aa, Artificial Sequence
  Description of Artificial Sequence: Synthetic epitope
AALAHSREQY

SEQ ID NO: 12077 - protein, 10 aa, Artificial Sequence
  Description of Artificial Sequence: Synthetic epitope
AALDLAAKKG

SEQ ID NO: 12078 - protein, 10 aa, Artificial Sequence
  Description of Artificial Sequence: Synthetic epitope
AALDLGVQLT

SEQ ID NO: 12079 - protein, 10 aa, Artificial Sequence
  Description of Artificial Sequence: Synthetic epitope
AALDTLTAQD

SEQ ID NO: 12080 - protein, 10 aa, Artificial Sequence
  Description of Artificial Sequence: Synthetic epitope
AALEAAQDLI

SEQ ID NO: 12081 - protein, 10 aa, Artificial Sequence
  Description of Artificial Sequence: Synthetic epitope
AALEASNASS

SEQ ID NO: 12082 - protein, 10 aa, Artificial Sequence
  Description of Artificial Sequence: Synthetic epitope
AALEATENEP

SEQ ID NO: 12083 - protein, 10 aa, Artificial Sequence
  Description of Artificial Sequence: Synthetic epitope
AALEEAELES

SEQ ID NO: 12084 - protein, 10 aa, Artificial Sequence
  Description of Artificial Sequence: Synthetic epitope
AALEGMSSQQ

SEQ ID NO: 12085 - protein, 10 aa, Artificial Sequence
  Description of Artificial Sequence: Synthetic epitope
AALERGQLEA

SEQ ID NO: 12086 - protein, 10 aa, Artificial Sequence
  Description of Artificial Sequence: Synthetic epitope
AALESLIKSL

SEQ ID NO: 12087 - protein, 10 aa, Artificial Sequence
  Description of Artificial Sequence: Synthetic epitope
AALETVQLKA

SEQ ID NO: 12088 - protein, 10 aa, Artificial Sequence
  Description of Artificial Sequence: Synthetic epitope
AALGEIVPTA

SEQ ID NO: 12089 - protein, 10 aa, Artificial Sequence
  Description of Artificial Sequence: Synthetic epitope
AALHSERMSG

SEQ ID NO: 12090 - protein, 10 aa, Artificial Sequence
  Description of Artificial Sequence: Synthetic epitope
AALKSKIVAE

SEQ ID NO: 12091 - protein, 10 aa, Artificial Sequence
  Description of Artificial Sequence: Synthetic epitope
AALKVDLLQG

SEQ ID NO: 12092 - protein, 10 aa, Artificial Sequence
  Description of Artificial Sequence: Synthetic epitope
AALLAATVPE

SEQ ID NO: 12093 - protein, 10 aa, Artificial Sequence
  Description of Artificial Sequence: Synthetic epitope
AALLKAKSQE

SEQ ID NO: 12094 - protein, 10 aa, Artificial Sequence
  Description of Artificial Sequence: Synthetic epitope
AALMAVSGLP

SEQ ID NO: 12095 - protein, 10 aa, Artificial Sequence
  Description of Artificial Sequence: Synthetic epitope
AALMEMSGPY

SEQ ID NO: 12096 - protein, 10 aa, Artificial Sequence
  Description of Artificial Sequence: Synthetic epitope
AALNNDSSQN

SEQ ID NO: 12097 - protein, 10 aa, Artificial Sequence
  Description of Artificial Sequence: Synthetic epitope
AALQEKQSQE

SEQ ID NO: 12098 - protein, 10 aa, Artificial Sequence
  Description of Artificial Sequence: Synthetic epitope
AALQGSISQP

SEQ ID NO: 12099 - protein, 10 aa, Artificial Sequence
  Description of Artificial Sequence: Synthetic epitope
AALSKLRVVE

SEQ ID NO: 12100 - protein, 10 aa, Artificial Sequence
  Description of Artificial Sequence: Synthetic epitope
AALSKVIRGT

SEQ ID NO: 12101 - protein, 10 aa, Artificial Sequence
  Description of Artificial Sequence: Synthetic epitope
AALSRPSGAA

SEQ ID NO: 12102 - protein, 10 aa, Artificial Sequence
  Description of Artificial Sequence: Synthetic epitope
AALSSRDVSG

SEQ ID NO: 12103 - protein, 10 aa, Artificial Sequence
  Description of Artificial Sequence: Synthetic epitope
AALVKAELGF

SEQ ID NO: 12104 - protein, 10 aa, Artificial Sequence
  Description of Artificial Sequence: Synthetic epitope
AALVMDLIDL

SEQ ID NO: 12105 - protein, 10 aa, Artificial Sequence
  Description of Artificial Sequence: Synthetic epitope
AAMAAPSSDE

SEQ ID NO: 12106 - protein, 10 aa, Artificial Sequence
  Description of Artificial Sequence: Synthetic epitope
AAMAIDPVMD

SEQ ID NO: 12107 - protein, 10 aa, Artificial Sequence
  Description of Artificial Sequence: Synthetic epitope
AAMEALSTEP

SEQ ID NO: 12108 - protein, 10 aa, Artificial Sequence
  Description of Artificial Sequence: Synthetic epitope
AAMEEDSEAS

SEQ ID NO: 12109 - protein, 10 aa, Artificial Sequence
  Description of Artificial Sequence: Synthetic epitope
AAMLVLAEKL

SEQ ID NO: 12110 - protein, 10 aa, Artificial Sequence
  Description of Artificial Sequence: Synthetic epitope
AAMNIARALQ

SEQ ID NO: 12111 - protein, 10 aa, Artificial Sequence
  Description of Artificial Sequence: Synthetic epitope
AAMRAINIAD

SEQ ID NO: 12112 - protein, 10 aa, Artificial Sequence
  Description of Artificial Sequence: Synthetic epitope
AAMSKLKSRY

SEQ ID NO: 12113 - protein, 10 aa, Artificial Sequence
  Description of Artificial Sequence: Synthetic epitope
AAMVQLQSQI

SEQ ID NO: 12114 - protein, 10 aa, Artificial Sequence
  Description of Artificial Sequence: Synthetic epitope
AAMWNPREAQ

SEQ ID NO: 12115 - protein, 10 aa, Artificial Sequence
  Description of Artificial Sequence: Synthetic epitope
AANAEDIKSG

SEQ ID NO: 12116 - protein, 10 aa, Artificial Sequence
  Description of Artificial Sequence: Synthetic epitope
AANLLATYAS

SEQ ID NO: 12117 - protein, 10 aa, Artificial Sequence
  Description of Artificial Sequence: Synthetic epitope
AANQAISTTS

SEQ ID NO: 12118 - protein, 10 aa, Artificial Sequence
  Description of Artificial Sequence: Synthetic epitope
AANRASQHEL

SEQ ID NO: 12119 - protein, 10 aa, Artificial Sequence
  Description of Artificial Sequence: Synthetic epitope
AANVETLTRA

SEQ ID NO: 12120 - protein, 10 aa, Artificial Sequence
  Description of Artificial Sequence: Synthetic epitope
AAPEVSEEPR

SEQ ID NO: 12121 - protein, 10 aa, Artificial Sequence
  Description of Artificial Sequence: Synthetic epitope
AAPLTYVTMS

SEQ ID NO: 12122 - protein, 10 aa, Artificial Sequence
  Description of Artificial Sequence: Synthetic epitope
AAPPLSKAEY

SEQ ID NO: 12123 - protein, 10 aa, Artificial Sequence
  Description of Artificial Sequence: Synthetic epitope
AAPQLIMLAN

SEQ ID NO: 12124 - protein, 10 aa, Artificial Sequence
  Description of Artificial Sequence: Synthetic epitope
AAPTAVQQAP

SEQ ID NO: 12125 - protein, 10 aa, Artificial Sequence
  Description of Artificial Sequence: Synthetic epitope
AAPTLVQLEE

SEQ ID NO: 12126 - protein, 10 aa, Artificial Sequence
  Description of Artificial Sequence: Synthetic epitope
AAPTSATRVP

SEQ ID NO: 12127 - protein, 10 aa, Artificial Sequence
  Description of Artificial Sequence: Synthetic epitope
AAQAALRTEL

SEQ ID NO: 12128 - protein, 10 aa, Artificial Sequence
  Description of Artificial Sequence: Synthetic epitope
AAQAAQQKFH

SEQ ID NO: 12129 - protein, 10 aa, Artificial Sequence
  Description of Artificial Sequence: Synthetic epitope
AAQAAQRENQ

SEQ ID NO: 12130 - protein, 10 aa, Artificial Sequence
  Description of Artificial Sequence: Synthetic epitope
AAQAAQRIQV

SEQ ID NO: 12131 - protein, 10 aa, Artificial Sequence
  Description of Artificial Sequence: Synthetic epitope
AAQEAAVGQN

SEQ ID NO: 12132 - protein, 10 aa, Artificial Sequence
  Description of Artificial Sequence: Synthetic epitope
AAQGATKEGS

SEQ ID NO: 12133 - protein, 10 aa, Artificial Sequence
  Description of Artificial Sequence: Synthetic epitope
AAQIGAHTLS

SEQ ID NO: 12134 - protein, 10 aa, Artificial Sequence
  Description of Artificial Sequence: Synthetic epitope
AAQKEILSQQ

SEQ ID NO: 12135 - protein, 10 aa, Artificial Sequence
  Description of Artificial Sequence: Synthetic epitope
AAQKMQTVTA

SEQ ID NO: 12136 - protein, 10 aa, Artificial Sequence
  Description of Artificial Sequence: Synthetic epitope
AAQLALSQAQ

SEQ ID NO: 12137 - protein, 10 aa, Artificial Sequence
  Description of Artificial Sequence: Synthetic epitope
AAQMEVSISK

SEQ ID NO: 12138 - protein, 10 aa, Artificial Sequence
  Description of Artificial Sequence: Synthetic epitope
AAQPENHASA

SEQ ID NO: 12139 - protein, 10 aa, Artificial Sequence
  Description of Artificial Sequence: Synthetic epitope
AAQQSETARL

SEQ ID NO: 12140 - protein, 10 aa, Artificial Sequence
  Description of Artificial Sequence: Synthetic epitope
AAQQSVLEDT

SEQ ID NO: 12141 - protein, 10 aa, Artificial Sequence
  Description of Artificial Sequence: Synthetic epitope
AAQSLAVALP

SEQ ID NO: 12142 - protein, 10 aa, Artificial Sequence
  Description of Artificial Sequence: Synthetic epitope
AAQSSTAPKH

SEQ ID NO: 12143 - protein, 10 aa, Artificial Sequence
  Description of Artificial Sequence: Synthetic epitope
AAQSVLRLSE

SEQ ID NO: 12144 - protein, 10 aa, Artificial Sequence
  Description of Artificial Sequence: Synthetic epitope
AAQTAEDAMQ

SEQ ID NO: 12145 - protein, 10 aa, Artificial Sequence
  Description of Artificial Sequence: Synthetic epitope
AAQTQVAEYK

SEQ ID NO: 12146 - protein, 10 aa, Artificial Sequence
  Description of Artificial Sequence: Synthetic epitope
AARAEERKAS

SEQ ID NO: 12147 - protein, 10 aa, Artificial Sequence
  Description of Artificial Sequence: Synthetic epitope
AARATLRRSN

SEQ ID NO: 12148 - protein, 10 aa, Artificial Sequence
  Description of Artificial Sequence: Synthetic epitope
AAREEAKNIK

SEQ ID NO: 12149 - protein, 10 aa, Artificial Sequence
  Description of Artificial Sequence: Synthetic epitope
AAREQRSQAE

SEQ ID NO: 12150 - protein, 10 aa, Artificial Sequence
  Description of Artificial Sequence: Synthetic epitope
AAREVAPERT

SEQ ID NO: 12151 - protein, 10 aa, Artificial Sequence
  Description of Artificial Sequence: Synthetic epitope
AARGLEATAS

SEQ ID NO: 12152 - protein, 10 aa, Artificial Sequence
  Description of Artificial Sequence: Synthetic epitope
AARIPAVTLA

SEQ ID NO: 12153 - protein, 10 aa, Artificial Sequence
  Description of Artificial Sequence: Synthetic epitope
AARLNVARDS

SEQ ID NO: 12154 - protein, 10 aa, Artificial Sequence
  Description of Artificial Sequence: Synthetic epitope
AARMQEQQVS

SEQ ID NO: 12155 - protein, 10 aa, Artificial Sequence
  Description of Artificial Sequence: Synthetic epitope
AARPRQHQKS

SEQ ID NO: 12156 - protein, 10 aa, Artificial Sequence
  Description of Artificial Sequence: Synthetic epitope
AARQAASDVQ

SEQ ID NO: 12157 - protein, 10 aa, Artificial Sequence
  Description of Artificial Sequence: Synthetic epitope
AARQKQLEDI

SEQ ID NO: 12158 - protein, 10 aa, Artificial Sequence
  Description of Artificial Sequence: Synthetic epitope
AARQKQLEDI

SEQ ID NO: 12159 - protein, 10 aa, Artificial Sequence
  Description of Artificial Sequence: Synthetic epitope
AARQQARHLR

SEQ ID NO: 12160 - protein, 10 aa, Artificial Sequence
  Description of Artificial Sequence: Synthetic epitope
AARRLAAQES

SEQ ID NO: 12161 - protein, 10 aa, Artificial Sequence
  Description of Artificial Sequence: Synthetic epitope
AARRQREEQQ

SEQ ID NO: 12162 - protein, 10 aa, Artificial Sequence
  Description of Artificial Sequence: Synthetic epitope
AARSLLQAGA

SEQ ID NO: 12163 - protein, 10 aa, Artificial Sequence
  Description of Artificial Sequence: Synthetic epitope
AASAAEESPP

SEQ ID NO: 12164 - protein, 10 aa, Artificial Sequence
  Description of Artificial Sequence: Synthetic epitope
AASAKSKVSS

SEQ ID NO: 12165 - protein, 10 aa, Artificial Sequence
  Description of Artificial Sequence: Synthetic epitope
AASAQFRRAS

SEQ ID NO: 12166 - protein, 10 aa, Artificial Sequence
  Description of Artificial Sequence: Synthetic epitope
AASEETRAAK

SEQ ID NO: 12167 - protein, 10 aa, Artificial Sequence
  Description of Artificial Sequence: Synthetic epitope
AASEGLSSAQ

SEQ ID NO: 12168 - protein, 10 aa, Artificial Sequence
  Description of Artificial Sequence: Synthetic epitope
AASETKIEVK

SEQ ID NO: 12169 - protein, 10 aa, Artificial Sequence
  Description of Artificial Sequence: Synthetic epitope
AASGMKVQGD

SEQ ID NO: 12170 - protein, 10 aa, Artificial Sequence
  Description of Artificial Sequence: Synthetic epitope
AASGSTREQT

SEQ ID NO: 12171 - protein, 10 aa, Artificial Sequence
  Description of Artificial Sequence: Synthetic epitope
AASGVHDAPP

SEQ ID NO: 12172 - protein, 10 aa, Artificial Sequence
  Description of Artificial Sequence: Synthetic epitope
AASHLFPFEQ

SEQ ID NO: 12173 - protein, 10 aa, Artificial Sequence
  Description of Artificial Sequence: Synthetic epitope
AASHLSEPAK

SEQ ID NO: 12174 - protein, 10 aa, Artificial Sequence
  Description of Artificial Sequence: Synthetic epitope
AASIRERQTV

SEQ ID NO: 12175 - protein, 10 aa, Artificial Sequence
  Description of Artificial Sequence: Synthetic epitope
AASKAASKQR

SEQ ID NO: 12176 - protein, 10 aa, Artificial Sequence
  Description of Artificial Sequence: Synthetic epitope
AASKNQHFRE

SEQ ID NO: 12177 - protein, 10 aa, Artificial Sequence
  Description of Artificial Sequence: Synthetic epitope
AASKNSVQSG

SEQ ID NO: 12178 - protein, 10 aa, Artificial Sequence
  Description of Artificial Sequence: Synthetic epitope
AASKSNEVVA

SEQ ID NO: 12179 - protein, 10 aa, Artificial Sequence
  Description of Artificial Sequence: Synthetic epitope
AASLKSLTRD

SEQ ID NO: 12180 - protein, 10 aa, Artificial Sequence
  Description of Artificial Sequence: Synthetic epitope
AASLLEAGEE

SEQ ID NO: 12181 - protein, 10 aa, Artificial Sequence
  Description of Artificial Sequence: Synthetic epitope
AASLSSKAAT

SEQ ID NO: 12182 - protein, 10 aa, Artificial Sequence
  Description of Artificial Sequence: Synthetic epitope
AASQKDASVG

SEQ ID NO: 12183 - protein, 10 aa, Artificial Sequence
  Description of Artificial Sequence: Synthetic epitope
AASQNAAVSN

SEQ ID NO: 12184 - protein, 10 aa, Artificial Sequence
  Description of Artificial Sequence: Synthetic epitope
AASRTTSEPG

SEQ ID NO: 12185 - protein, 10 aa, Artificial Sequence
  Description of Artificial Sequence: Synthetic epitope
AASSASPVSR

SEQ ID NO: 12186 - protein, 10 aa, Artificial Sequence
  Description of Artificial Sequence: Synthetic epitope
AASSAVRLTP

SEQ ID NO: 12187 - protein, 10 aa, Artificial Sequence
  Description of Artificial Sequence: Synthetic epitope
AASSLKSQAA

SEQ ID NO: 12188 - protein, 10 aa, Artificial Sequence
  Description of Artificial Sequence: Synthetic epitope
AASSQAAVEE

SEQ ID NO: 12189 - protein, 10 aa, Artificial Sequence
  Description of Artificial Sequence: Synthetic epitope
AASSRISKTK

SEQ ID NO: 12190 - protein, 10 aa, Artificial Sequence
  Description of Artificial Sequence: Synthetic epitope
AASTASFSAV

SEQ ID NO: 12191 - protein, 10 aa, Artificial Sequence
  Description of Artificial Sequence: Synthetic epitope
AASTLGSQGQ

SEQ ID NO: 12192 - protein, 10 aa, Artificial Sequence
  Description of Artificial Sequence: Synthetic epitope
AASTQPSRPQ

SEQ ID NO: 12193 - protein, 10 aa, Artificial Sequence
  Description of Artificial Sequence: Synthetic epitope
AASTRFHQPH

SEQ ID NO: 12194 - protein, 10 aa, Artificial Sequence
  Description of Artificial Sequence: Synthetic epitope
AASTRMVLIS

SEQ ID NO: 12195 - protein, 10 aa, Artificial Sequence
  Description of Artificial Sequence: Synthetic epitope
AASTSNPNSA

SEQ ID NO: 12196 - protein, 10 aa, Artificial Sequence
  Description of Artificial Sequence: Synthetic epitope
AASVASRGHP

SEQ ID NO: 12197 - protein, 10 aa, Artificial Sequence
  Description of Artificial Sequence: Synthetic epitope
AATAAREREP

SEQ ID NO: 12198 - protein, 10 aa, Artificial Sequence
  Description of Artificial Sequence: Synthetic epitope
AATAAWTGTT

SEQ ID NO: 12199 - protein, 10 aa, Artificial Sequence
  Description of Artificial Sequence: Synthetic epitope
AATALSRKDN

SEQ ID NO: 12200 - protein, 10 aa, Artificial Sequence
  Description of Artificial Sequence: Synthetic epitope
AATAPRIKKF

SEQ ID NO: 12201 - protein, 10 aa, Artificial Sequence
  Description of Artificial Sequence: Synthetic epitope
AATAQLETAV

SEQ ID NO: 12202 - protein, 10 aa, Artificial Sequence
  Description of Artificial Sequence: Synthetic epitope
AATAVVAPTS

SEQ ID NO: 12203 - protein, 10 aa, Artificial Sequence
  Description of Artificial Sequence: Synthetic epitope
AATERIILFG

SEQ ID NO: 12204 - protein, 10 aa, Artificial Sequence
  Description of Artificial Sequence: Synthetic epitope
AATETAESRR

SEQ ID NO: 12205 - protein, 10 aa, Artificial Sequence
  Description of Artificial Sequence: Synthetic epitope
AATKERTESE

SEQ ID NO: 12206 - protein, 10 aa, Artificial Sequence
  Description of Artificial Sequence: Synthetic epitope
AATPKKAKKP

SEQ ID NO: 12207 - protein, 10 aa, Artificial Sequence
  Description of Artificial Sequence: Synthetic epitope
AATPSTTGTK

SEQ ID NO: 12208 - protein, 10 aa, Artificial Sequence
  Description of Artificial Sequence: Synthetic epitope
AATQKSLDRK

SEQ ID NO: 12209 - protein, 10 aa, Artificial Sequence
  Description of Artificial Sequence: Synthetic epitope
AATQQFSGTD

SEQ ID NO: 12210 - protein, 10 aa, Artificial Sequence
  Description of Artificial Sequence: Synthetic epitope
AATQVSVPLP

SEQ ID NO: 12211 - protein, 10 aa, Artificial Sequence
  Description of Artificial Sequence: Synthetic epitope
AATSAHPSSR

SEQ ID NO: 12212 - protein, 10 aa, Artificial Sequence
  Description of Artificial Sequence: Synthetic epitope
AATSSKATSS

SEQ ID NO: 12213 - protein, 10 aa, Artificial Sequence
  Description of Artificial Sequence: Synthetic epitope
AATSVLKTRF

SEQ ID NO: 12214 - protein, 10 aa, Artificial Sequence
  Description of Artificial Sequence: Synthetic epitope
AATTSSTSLP

SEQ ID NO: 12215 - protein, 10 aa, Artificial Sequence
  Description of Artificial Sequence: Synthetic epitope
AATVTKKVAK

SEQ ID NO: 12216 - protein, 10 aa, Artificial Sequence
  Description of Artificial Sequence: Synthetic epitope
AAVAALMSST

SEQ ID NO: 12217 - protein, 10 aa, Artificial Sequence
  Description of Artificial Sequence: Synthetic epitope
AAVADRRVGQ

SEQ ID NO: 12218 - protein, 10 aa, Artificial Sequence
  Description of Artificial Sequence: Synthetic epitope
AAVAERESAE

SEQ ID NO: 12219 - protein, 10 aa, Artificial Sequence
  Description of Artificial Sequence: Synthetic epitope
AAVAKSKLRE

SEQ ID NO: 12220 - protein, 10 aa, Artificial Sequence
  Description of Artificial Sequence: Synthetic epitope
AAVASTSGIN

SEQ ID NO: 12221 - protein, 10 aa, Artificial Sequence
  Description of Artificial Sequence: Synthetic epitope
AAVAVSSRQQ

SEQ ID NO: 12222 - protein, 10 aa, Artificial Sequence
  Description of Artificial Sequence: Synthetic epitope
AAVDKLNVID

SEQ ID NO: 12223 - protein, 10 aa, Artificial Sequence
  Description of Artificial Sequence: Synthetic epitope
AAVEKTDSET

SEQ ID NO: 12224 - protein, 10 aa, Artificial Sequence
  Description of Artificial Sequence: Synthetic epitope
AAVELGLTAS

SEQ ID NO: 12225 - protein, 10 aa, Artificial Sequence
  Description of Artificial Sequence: Synthetic epitope
AAVGAMEDKS

SEQ ID NO: 12226 - protein, 10 aa, Artificial Sequence
  Description of Artificial Sequence: Synthetic epitope
AAVGYSKADI

SEQ ID NO: 12227 - protein, 10 aa, Artificial Sequence
  Description of Artificial Sequence: Synthetic epitope
AAVIAAVKPL

SEQ ID NO: 12228 - protein, 10 aa, Artificial Sequence
  Description of Artificial Sequence: Synthetic epitope
AAVKKVPNSE

SEQ ID NO: 12229 - protein, 10 aa, Artificial Sequence
  Description of Artificial Sequence: Synthetic epitope
AAVLDMVRPK

SEQ ID NO: 12230 - protein, 10 aa, Artificial Sequence
  Description of Artificial Sequence: Synthetic epitope
AAVMEANQTG

SEQ ID NO: 12231 - protein, 10 aa, Artificial Sequence
  Description of Artificial Sequence: Synthetic epitope
AAVNSSASAD

SEQ ID NO: 12232 - protein, 10 aa, Artificial Sequence
  Description of Artificial Sequence: Synthetic epitope
AAVPYRAEYE

SEQ ID NO: 12233 - protein, 10 aa, Artificial Sequence
  Description of Artificial Sequence: Synthetic epitope
AAVRDTVSAS

SEQ ID NO: 12234 - protein, 10 aa, Artificial Sequence
  Description of Artificial Sequence: Synthetic epitope
AAVSQHDSSD

SEQ ID NO: 12235 - protein, 10 aa, Artificial Sequence
  Description of Artificial Sequence: Synthetic epitope
AAVTAASTSY

SEQ ID NO: 12236 - protein, 10 aa, Artificial Sequence
  Description of Artificial Sequence: Synthetic epitope
AAVVNVRGLM

SEQ ID NO: 12237 - protein, 10 aa, Artificial Sequence
  Description of Artificial Sequence: Synthetic epitope
AAVYEATMPT

SEQ ID NO: 12238 - protein, 10 aa, Artificial Sequence
  Description of Artificial Sequence: Synthetic epitope
AAWRTTSEEK

SEQ ID NO: 12239 - protein, 10 aa, Artificial Sequence
  Description of Artificial Sequence: Synthetic epitope
AAYLLKDVAK

SEQ ID NO: 12240 - protein, 10 aa, Artificial Sequence
  Description of Artificial Sequence: Synthetic epitope
AAYLTVFKSS

SEQ ID NO: 12241 - protein, 10 aa, Artificial Sequence
  Description of Artificial Sequence: Synthetic epitope
AAYQQVIQPA

SEQ ID NO: 12242 - protein, 10 aa, Artificial Sequence
  Description of Artificial Sequence: Synthetic epitope
AAYTKATARK

SEQ ID NO: 12243 - protein, 10 aa, Artificial Sequence
  Description of Artificial Sequence: Synthetic epitope
ACGMQQSVRT

SEQ ID NO: 12244 - protein, 10 aa, Artificial Sequence
  Description of Artificial Sequence: Synthetic epitope
ADADAPTARS

SEQ ID NO: 12245 - protein, 10 aa, Artificial Sequence
  Description of Artificial Sequence: Synthetic epitope
ADAKALEEAR

SEQ ID NO: 12246 - protein, 10 aa, Artificial Sequence
  Description of Artificial Sequence: Synthetic epitope
ADAKLSSQGN

SEQ ID NO: 12247 - protein, 10 aa, Artificial Sequence
  Description of Artificial Sequence: Synthetic epitope
ADANDSKAEY

SEQ ID NO: 12248 - protein, 10 aa, Artificial Sequence
  Description of Artificial Sequence: Synthetic epitope
ADAVATFRKN

SEQ ID NO: 12249 - protein, 10 aa, Artificial Sequence
  Description of Artificial Sequence: Synthetic epitope
ADDADNASKL

SEQ ID NO: 12250 - protein, 10 aa, Artificial Sequence
  Description of Artificial Sequence: Synthetic epitope
ADDSITRDDN

SEQ ID NO: 12251 - protein, 10 aa, Artificial Sequence
  Description of Artificial Sequence: Synthetic epitope
ADDTEAELIR

SEQ ID NO: 12252 - protein, 10 aa, Artificial Sequence
  Description of Artificial Sequence: Synthetic epitope
ADEATAKTQL

SEQ ID NO: 12253 - protein, 10 aa, Artificial Sequence
  Description of Artificial Sequence: Synthetic epitope
ADEGVSEKAE

SEQ ID NO: 12254 - protein, 10 aa, Artificial Sequence
  Description of Artificial Sequence: Synthetic epitope
ADEKAEDNLK

SEQ ID NO: 12255 - protein, 10 aa, Artificial Sequence
  Description of Artificial Sequence: Synthetic epitope
ADERESQFPS

SEQ ID NO: 12256 - protein, 10 aa, Artificial Sequence
  Description of Artificial Sequence: Synthetic epitope
ADETLGHSKH

SEQ ID NO: 12257 - protein, 10 aa, Artificial Sequence
  Description of Artificial Sequence: Synthetic epitope
ADETNLAVKG

SEQ ID NO: 12258 - protein, 10 aa, Artificial Sequence
  Description of Artificial Sequence: Synthetic epitope
ADFQSTSAQQ

SEQ ID NO: 12259 - protein, 10 aa, Artificial Sequence
  Description of Artificial Sequence: Synthetic epitope
ADGASTETSA

SEQ ID NO: 12260 - protein, 10 aa, Artificial Sequence
  Description of Artificial Sequence: Synthetic epitope
ADGFTSMSDR

SEQ ID NO: 12261 - protein, 10 aa, Artificial Sequence
  Description of Artificial Sequence: Synthetic epitope
ADGRRIVANS

SEQ ID NO: 12262 - protein, 10 aa, Artificial Sequence
  Description of Artificial Sequence: Synthetic epitope
ADGSSILDRA

SEQ ID NO: 12263 - protein, 10 aa, Artificial Sequence
  Description of Artificial Sequence: Synthetic epitope
ADHEVHFPGG

SEQ ID NO: 12264 - protein, 10 aa, Artificial Sequence
  Description of Artificial Sequence: Synthetic epitope
ADHQVNGSTT

SEQ ID NO: 12265 - protein, 10 aa, Artificial Sequence
  Description of Artificial Sequence: Synthetic epitope
ADHSNKEEIE

SEQ ID NO: 12266 - protein, 10 aa, Artificial Sequence
  Description of Artificial Sequence: Synthetic epitope
ADIRLVTGPM

SEQ ID NO: 12267 - protein, 10 aa, Artificial Sequence
  Description of Artificial Sequence: Synthetic epitope
ADISEAEQRT

SEQ ID NO: 12268 - protein, 10 aa, Artificial Sequence
  Description of Artificial Sequence: Synthetic epitope
ADKMHDKVFA

SEQ ID NO: 12269 - protein, 10 aa, Artificial Sequence
  Description of Artificial Sequence: Synthetic epitope
ADKSLATRTD

SEQ ID NO: 12270 - protein, 10 aa, Artificial Sequence
  Description of Artificial Sequence: Synthetic epitope
ADLASRDEPQ

SEQ ID NO: 12271 - protein, 10 aa, Artificial Sequence
  Description of Artificial Sequence: Synthetic epitope
ADLEDQVATA

SEQ ID NO: 12272 - protein, 10 aa, Artificial Sequence
  Description of Artificial Sequence: Synthetic epitope
ADLESLLQTP

SEQ ID NO: 12273 - protein, 10 aa, Artificial Sequence
  Description of Artificial Sequence: Synthetic epitope
ADLKHAIQSK

SEQ ID NO: 12274 - protein, 10 aa, Artificial Sequence
  Description of Artificial Sequence: Synthetic epitope
ADLNTITESS

SEQ ID NO: 12275 - protein, 10 aa, Artificial Sequence
  Description of Artificial Sequence: Synthetic epitope
ADLSEAANRN

SEQ ID NO: 12276 - protein, 10 aa, Artificial Sequence
  Description of Artificial Sequence: Synthetic epitope
ADMKEMDYRQ

SEQ ID NO: 12277 - protein, 10 aa, Artificial Sequence
  Description of Artificial Sequence: Synthetic epitope
ADMKVTLKEL

SEQ ID NO: 12278 - protein, 10 aa, Artificial Sequence
  Description of Artificial Sequence: Synthetic epitope
ADNTVKMATQ

SEQ ID NO: 12279 - protein, 10 aa, Artificial Sequence
  Description of Artificial Sequence: Synthetic epitope
ADPGAQAQQG

SEQ ID NO: 12280 - protein, 10 aa, Artificial Sequence
  Description of Artificial Sequence: Synthetic epitope
ADPYVETPTS

SEQ ID NO: 12281 - protein, 10 aa, Artificial Sequence
  Description of Artificial Sequence: Synthetic epitope
ADQVLTLKTQ

SEQ ID NO: 12282 - protein, 10 aa, Artificial Sequence
  Description of Artificial Sequence: Synthetic epitope
ADREPWETQD

SEQ ID NO: 12283 - protein, 10 aa, Artificial Sequence
  Description of Artificial Sequence: Synthetic epitope
ADRFSSFEEA

SEQ ID NO: 12284 - protein, 10 aa, Artificial Sequence
  Description of Artificial Sequence: Synthetic epitope
ADRINRLQAA

SEQ ID NO: 12285 - protein, 10 aa, Artificial Sequence
  Description of Artificial Sequence: Synthetic epitope
ADRKNTSTRV

SEQ ID NO: 12286 - protein, 10 aa, Artificial Sequence
  Description of Artificial Sequence: Synthetic epitope
ADRRGITSEN

SEQ ID NO: 12287 - protein, 10 aa, Artificial Sequence
  Description of Artificial Sequence: Synthetic epitope
ADRVAESNKI

SEQ ID NO: 12288 - protein, 10 aa, Artificial Sequence
  Description of Artificial Sequence: Synthetic epitope
ADRVHDSHPT

SEQ ID NO: 12289 - protein, 10 aa, Artificial Sequence
  Description of Artificial Sequence: Synthetic epitope
ADSAILTDQT

SEQ ID NO: 12290 - protein, 10 aa, Artificial Sequence
  Description of Artificial Sequence: Synthetic epitope
ADSAQEASPA

SEQ ID NO: 12291 - protein, 10 aa, Artificial Sequence
  Description of Artificial Sequence: Synthetic epitope
ADSDQASKVQ

SEQ ID NO: 12292 - protein, 10 aa, Artificial Sequence
  Description of Artificial Sequence: Synthetic epitope
ADSEVAQAGK

SEQ ID NO: 12293 - protein, 10 aa, Artificial Sequence
  Description of Artificial Sequence: Synthetic epitope
ADSKDVMDST

SEQ ID NO: 12294 - protein, 10 aa, Artificial Sequence
  Description of Artificial Sequence: Synthetic epitope
ADSQDEKSQT

SEQ ID NO: 12295 - protein, 10 aa, Artificial Sequence
  Description of Artificial Sequence: Synthetic epitope
ADTATSKVSG

SEQ ID NO: 12296 - protein, 10 aa, Artificial Sequence
  Description of Artificial Sequence: Synthetic epitope
ADTKKSREDS

SEQ ID NO: 12297 - protein, 10 aa, Artificial Sequence
  Description of Artificial Sequence: Synthetic epitope
ADTQDEATGA

SEQ ID NO: 12298 - protein, 10 aa, Artificial Sequence
  Description of Artificial Sequence: Synthetic epitope
ADTSALKAAP

SEQ ID NO: 12299 - protein, 10 aa, Artificial Sequence
  Description of Artificial Sequence: Synthetic epitope
ADTYVATQSK

SEQ ID NO: 12300 - protein, 10 aa, Artificial Sequence
  Description of Artificial Sequence: Synthetic epitope
ADVESAKKLG

SEQ ID NO: 12301 - protein, 10 aa, Artificial Sequence
  Description of Artificial Sequence: Synthetic epitope
ADVFSVKTEM

SEQ ID NO: 12302 - protein, 10 aa, Artificial Sequence
  Description of Artificial Sequence: Synthetic epitope
ADVQEVKAST

SEQ ID NO: 12303 - protein, 10 aa, Artificial Sequence
  Description of Artificial Sequence: Synthetic epitope
ADVQTDFIDH

SEQ ID NO: 12304 - protein, 10 aa, Artificial Sequence
  Description of Artificial Sequence: Synthetic epitope
ADVVRSSRKS

SEQ ID NO: 12305 - protein, 10 aa, Artificial Sequence
  Description of Artificial Sequence: Synthetic epitope
ADWVKKTGDK

SEQ ID NO: 12306 - protein, 10 aa, Artificial Sequence
  Description of Artificial Sequence: Synthetic epitope
ADYDWTMSEP

SEQ ID NO: 12307 - protein, 10 aa, Artificial Sequence
  Description of Artificial Sequence: Synthetic epitope
AEAAMMTIAT

SEQ ID NO: 12308 - protein, 10 aa, Artificial Sequence
  Description of Artificial Sequence: Synthetic epitope
AEAAMRNGGQ

SEQ ID NO: 12309 - protein, 10 aa, Artificial Sequence
  Description of Artificial Sequence: Synthetic epitope
AEAAPTESDQ

SEQ ID NO: 12310 - protein, 10 aa, Artificial Sequence
  Description of Artificial Sequence: Synthetic epitope
AEAAPVVKRE

SEQ ID NO: 12311 - protein, 10 aa, Artificial Sequence
  Description of Artificial Sequence: Synthetic epitope
AEAAQDATLT

SEQ ID NO: 12312 - protein, 10 aa, Artificial Sequence
  Description of Artificial Sequence: Synthetic epitope
AEADEPNVTS

SEQ ID NO: 12313 - protein, 10 aa, Artificial Sequence
  Description of Artificial Sequence: Synthetic epitope
AEAEASREAR

SEQ ID NO: 12314 - protein, 10 aa, Artificial Sequence
  Description of Artificial Sequence: Synthetic epitope
AEAEATREAR

SEQ ID NO: 12315 - protein, 10 aa, Artificial Sequence
  Description of Artificial Sequence: Synthetic epitope
AEAEKKVQLA

SEQ ID NO: 12316 - protein, 10 aa, Artificial Sequence
  Description of Artificial Sequence: Synthetic epitope
AEAEKQYEDS

SEQ ID NO: 12317 - protein, 10 aa, Artificial Sequence
  Description of Artificial Sequence: Synthetic epitope
AEAFLSSAGL

SEQ ID NO: 12318 - protein, 10 aa, Artificial Sequence
  Description of Artificial Sequence: Synthetic epitope
AEAGAETEAM

SEQ ID NO: 12319 - protein, 10 aa, Artificial Sequence
  Description of Artificial Sequence: Synthetic epitope
AEAGPLASVP

SEQ ID NO: 12320 - protein, 10 aa, Artificial Sequence
  Description of Artificial Sequence: Synthetic epitope
AEAGVKREDA

SEQ ID NO: 12321 - protein, 10 aa, Artificial Sequence
  Description of Artificial Sequence: Synthetic epitope
AEAKAQIEAF

SEQ ID NO: 12322 - protein, 10 aa, Artificial Sequence
  Description of Artificial Sequence: Synthetic epitope
AEAKIPSVIE

SEQ ID NO: 12323 - protein, 10 aa, Artificial Sequence
  Description of Artificial Sequence: Synthetic epitope
AEALAAPSRF

SEQ ID NO: 12324 - protein, 10 aa, Artificial Sequence
  Description of Artificial Sequence: Synthetic epitope
AEALRLSKDI

SEQ ID NO: 12325 - protein, 10 aa, Artificial Sequence
  Description of Artificial Sequence: Synthetic epitope
AEAQDTATRV

SEQ ID NO: 12326 - protein, 10 aa, Artificial Sequence
  Description of Artificial Sequence: Synthetic epitope
AEAQQELQML

SEQ ID NO: 12327 - protein, 10 aa, Artificial Sequence
  Description of Artificial Sequence: Synthetic epitope
AEAQRFARME

SEQ ID NO: 12328 - protein, 10 aa, Artificial Sequence
  Description of Artificial Sequence: Synthetic epitope
AEARAVSRKA

SEQ ID NO: 12329 - protein, 10 aa, Artificial Sequence
  Description of Artificial Sequence: Synthetic epitope
AEAREKAAKE

SEQ ID NO: 12330 - protein, 10 aa, Artificial Sequence
  Description of Artificial Sequence: Synthetic epitope
AEAREKETKA

SEQ ID NO: 12331 - protein, 10 aa, Artificial Sequence
  Description of Artificial Sequence: Synthetic epitope
AEARRSKTKE

SEQ ID NO: 12332 - protein, 10 aa, Artificial Sequence
  Description of Artificial Sequence: Synthetic epitope
AEARSSTHGR

SEQ ID NO: 12333 - protein, 10 aa, Artificial Sequence
  Description of Artificial Sequence: Synthetic epitope
AEASGLKKET

SEQ ID NO: 12334 - protein, 10 aa, Artificial Sequence
  Description of Artificial Sequence: Synthetic epitope
AEASLRRNSP

SEQ ID NO: 12335 - protein, 10 aa, Artificial Sequence
  Description of Artificial Sequence: Synthetic epitope
AEASSPVSAS

SEQ ID NO: 12336 - protein, 10 aa, Artificial Sequence
  Description of Artificial Sequence: Synthetic epitope
AEATQETVES

SEQ ID NO: 12337 - protein, 10 aa, Artificial Sequence
  Description of Artificial Sequence: Synthetic epitope
AEAVKSNYSP

SEQ ID NO: 12338 - protein, 10 aa, Artificial Sequence
  Description of Artificial Sequence: Synthetic epitope
AEDDVKQITV

SEQ ID NO: 12339 - protein, 10 aa, Artificial Sequence
  Description of Artificial Sequence: Synthetic epitope
AEDEGVSQRK

SEQ ID NO: 12340 - protein, 10 aa, Artificial Sequence
  Description of Artificial Sequence: Synthetic epitope
AEDQAASSDL

SEQ ID NO: 12341 - protein, 10 aa, Artificial Sequence
  Description of Artificial Sequence: Synthetic epitope
AEEDHGRKST

SEQ ID NO: 12342 - protein, 10 aa, Artificial Sequence
  Description of Artificial Sequence: Synthetic epitope
AEEGQKLISK

SEQ ID NO: 12343 - protein, 10 aa, Artificial Sequence
  Description of Artificial Sequence: Synthetic epitope
AEEINIQMTD

SEQ ID NO: 12344 - protein, 10 aa, Artificial Sequence
  Description of Artificial Sequence: Synthetic epitope
AEEKSRAQEK

SEQ ID NO: 12345 - protein, 10 aa, Artificial Sequence
  Description of Artificial Sequence: Synthetic epitope
AEEQDLSEVE

SEQ ID NO: 12346 - protein, 10 aa, Artificial Sequence
  Description of Artificial Sequence: Synthetic epitope
AEERSAQKEK

SEQ ID NO: 12347 - protein, 10 aa, Artificial Sequence
  Description of Artificial Sequence: Synthetic epitope
AEESVSQNVE

SEQ ID NO: 12348 - protein, 10 aa, Artificial Sequence
  Description of Artificial Sequence: Synthetic epitope
AEETAATISA

SEQ ID NO: 12349 - protein, 10 aa, Artificial Sequence
  Description of Artificial Sequence: Synthetic epitope
AEETQLVKES

SEQ ID NO: 12350 - protein, 10 aa, Artificial Sequence
  Description of Artificial Sequence: Synthetic epitope
AEETQNVETK

SEQ ID NO: 12351 - protein, 10 aa, Artificial Sequence
  Description of Artificial Sequence: Synthetic epitope
AEEVKVAETI

SEQ ID NO: 12352 - protein, 10 aa, Artificial Sequence
  Description of Artificial Sequence: Synthetic epitope
AEEWEAESVL

SEQ ID NO: 12353 - protein, 10 aa, Artificial Sequence
  Description of Artificial Sequence: Synthetic epitope
AEFHVSLLSI

SEQ ID NO: 12354 - protein, 10 aa, Artificial Sequence
  Description of Artificial Sequence: Synthetic epitope
AEGARARDMP

SEQ ID NO: 12355 - protein, 10 aa, Artificial Sequence
  Description of Artificial Sequence: Synthetic epitope
AEGHESNFIA

SEQ ID NO: 12356 - protein, 10 aa, Artificial Sequence
  Description of Artificial Sequence: Synthetic epitope
AEGKNNQQVP

SEQ ID NO: 12357 - protein, 10 aa, Artificial Sequence
  Description of Artificial Sequence: Synthetic epitope
AEGLEAASAS

SEQ ID NO: 12358 - protein, 10 aa, Artificial Sequence
  Description of Artificial Sequence: Synthetic epitope
AEGQELKDKS

SEQ ID NO: 12359 - protein, 10 aa, Artificial Sequence
  Description of Artificial Sequence: Synthetic epitope
AEGSEAAELA

SEQ ID NO: 12360 - protein, 10 aa, Artificial Sequence
  Description of Artificial Sequence: Synthetic epitope
AEGTSTRLIS

SEQ ID NO: 12361 - protein, 10 aa, Artificial Sequence
  Description of Artificial Sequence: Synthetic epitope
AEGVALRSAK

SEQ ID NO: 12362 - protein, 10 aa, Artificial Sequence
  Description of Artificial Sequence: Synthetic epitope
AEGVMLNTER

SEQ ID NO: 12363 - protein, 10 aa, Artificial Sequence
  Description of Artificial Sequence: Synthetic epitope
AEHIVSPSAP

SEQ ID NO: 12364 - protein, 10 aa, Artificial Sequence
  Description of Artificial Sequence: Synthetic epitope
AEHKAKSREK

SEQ ID NO: 12365 - protein, 10 aa, Artificial Sequence
  Description of Artificial Sequence: Synthetic epitope
AEHKAQHRTF

SEQ ID NO: 12366 - protein, 10 aa, Artificial Sequence
  Description of Artificial Sequence: Synthetic epitope
AEHKRAVRPK

SEQ ID NO: 12367 - protein, 10 aa, Artificial Sequence
  Description of Artificial Sequence: Synthetic epitope
AEHLQLLEEA

SEQ ID NO: 12368 - protein, 10 aa, Artificial Sequence
  Description of Artificial Sequence: Synthetic epitope
AEHTQAQVSF

SEQ ID NO: 12369 - protein, 10 aa, Artificial Sequence
  Description of Artificial Sequence: Synthetic epitope
AEHVAATQAL

SEQ ID NO: 12370 - protein, 10 aa, Artificial Sequence
  Description of Artificial Sequence: Synthetic epitope
AEIAQLANEK

SEQ ID NO: 12371 - protein, 10 aa, Artificial Sequence
  Description of Artificial Sequence: Synthetic epitope
AEIDAITAPQ

SEQ ID NO: 12372 - protein, 10 aa, Artificial Sequence
  Description of Artificial Sequence: Synthetic epitope
AEIEAQAALG

SEQ ID NO: 12373 - protein, 10 aa, Artificial Sequence
  Description of Artificial Sequence: Synthetic epitope
AEIENLSQVD

SEQ ID NO: 12374 - protein, 10 aa, Artificial Sequence
  Description of Artificial Sequence: Synthetic epitope
AEIERETSVR

SEQ ID NO: 12375 - protein, 10 aa, Artificial Sequence
  Description of Artificial Sequence: Synthetic epitope
AEIFRQIAEA

SEQ ID NO: 12376 - protein, 10 aa, Artificial Sequence
  Description of Artificial Sequence: Synthetic epitope
AEIIKQLKIE

SEQ ID NO: 12377 - protein, 10 aa, Artificial Sequence
  Description of Artificial Sequence: Synthetic epitope
AEIKAQLETA

SEQ ID NO: 12378 - protein, 10 aa, Artificial Sequence
  Description of Artificial Sequence: Synthetic epitope
AEISKQEQKK

SEQ ID NO: 12379 - protein, 10 aa, Artificial Sequence
  Description of Artificial Sequence: Synthetic epitope
AEISSLQRAQ

SEQ ID NO: 12380 - protein, 10 aa, Artificial Sequence
  Description of Artificial Sequence: Synthetic epitope
AEISSVSRDE

SEQ ID NO: 12381 - protein, 10 aa, Artificial Sequence
  Description of Artificial Sequence: Synthetic epitope
AEIVRLVQRF

SEQ ID NO: 12382 - protein, 10 aa, Artificial Sequence
  Description of Artificial Sequence: Synthetic epitope
AEKASLQSQL

SEQ ID NO: 12383 - protein, 10 aa, Artificial Sequence
  Description of Artificial Sequence: Synthetic epitope
AEKDDIKYRT

SEQ ID NO: 12384 - protein, 10 aa, Artificial Sequence
  Description of Artificial Sequence: Synthetic epitope
AEKEEAKLPP

SEQ ID NO: 12385 - protein, 10 aa, Artificial Sequence
  Description of Artificial Sequence: Synthetic epitope
AEKEGNEMEG

SEQ ID NO: 12386 - protein, 10 aa, Artificial Sequence
  Description of Artificial Sequence: Synthetic epitope
AEKETLKQKQ

SEQ ID NO: 12387 - protein, 10 aa, Artificial Sequence
  Description of Artificial Sequence: Synthetic epitope
AEKIEEVKKE

SEQ ID NO: 12388 - protein, 10 aa, Artificial Sequence
  Description of Artificial Sequence: Synthetic epitope
AEKKDSYETE

SEQ ID NO: 12389 - protein, 10 aa, Artificial Sequence
  Description of Artificial Sequence: Synthetic epitope
AEKKMYNFEN

SEQ ID NO: 12390 - protein, 10 aa, Artificial Sequence
  Description of Artificial Sequence: Synthetic epitope
AEKLSEKLHK

SEQ ID NO: 12391 - protein, 10 aa, Artificial Sequence
  Description of Artificial Sequence: Synthetic epitope
AEKPKYQINN

SEQ ID NO: 12392 - protein, 10 aa, Artificial Sequence
  Description of Artificial Sequence: Synthetic epitope
AEKQQRDERQ

SEQ ID NO: 12393 - protein, 10 aa, Artificial Sequence
  Description of Artificial Sequence: Synthetic epitope
AEKRSSLTTA

SEQ ID NO: 12394 - protein, 10 aa, Artificial Sequence
  Description of Artificial Sequence: Synthetic epitope
AEKSATEYAD

SEQ ID NO: 12395 - protein, 10 aa, Artificial Sequence
  Description of Artificial Sequence: Synthetic epitope
AEKSSASSKL

SEQ ID NO: 12396 - protein, 10 aa, Artificial Sequence
  Description of Artificial Sequence: Synthetic epitope
AEKSSTDFRD

SEQ ID NO: 12397 - protein, 10 aa, Artificial Sequence
  Description of Artificial Sequence: Synthetic epitope
AEKTKKEEYM

SEQ ID NO: 12398 - protein, 10 aa, Artificial Sequence
  Description of Artificial Sequence: Synthetic epitope
AEKTKSLTVD

SEQ ID NO: 12399 - protein, 10 aa, Artificial Sequence
  Description of Artificial Sequence: Synthetic epitope
AEKVRDDLQK

SEQ ID NO: 12400 - protein, 10 aa, Artificial Sequence
  Description of Artificial Sequence: Synthetic epitope
AEKYLSASEY

SEQ ID NO: 12401 - protein, 10 aa, Artificial Sequence
  Description of Artificial Sequence: Synthetic epitope
AELAKELPQV

SEQ ID NO: 12402 - protein, 10 aa, Artificial Sequence
  Description of Artificial Sequence: Synthetic epitope
AELATARSTN

SEQ ID NO: 12403 - protein, 10 aa, Artificial Sequence
  Description of Artificial Sequence: Synthetic epitope
AELDSSESEE

SEQ ID NO: 12404 - protein, 10 aa, Artificial Sequence
  Description of Artificial Sequence: Synthetic epitope
AELEAARLAK

SEQ ID NO: 12405 - protein, 10 aa, Artificial Sequence
  Description of Artificial Sequence: Synthetic epitope
AELEADLKLI

SEQ ID NO: 12406 - protein, 10 aa, Artificial Sequence
  Description of Artificial Sequence: Synthetic epitope
AELEADLPRS

SEQ ID NO: 12407 - protein, 10 aa, Artificial Sequence
  Description of Artificial Sequence: Synthetic epitope
AELEEASAES

SEQ ID NO: 12408 - protein, 10 aa, Artificial Sequence
  Description of Artificial Sequence: Synthetic epitope
AELEGKESAS

SEQ ID NO: 12409 - protein, 10 aa, Artificial Sequence
  Description of Artificial Sequence: Synthetic epitope
AELEKLKMAA

SEQ ID NO: 12410 - protein, 10 aa, Artificial Sequence
  Description of Artificial Sequence: Synthetic epitope
AELEMELNEH

SEQ ID NO: 12411 - protein, 10 aa, Artificial Sequence
  Description of Artificial Sequence: Synthetic epitope
AELETTLLER

SEQ ID NO: 12412 - protein, 10 aa, Artificial Sequence
  Description of Artificial Sequence: Synthetic epitope
AELHLSTERA

SEQ ID NO: 12413 - protein, 10 aa, Artificial Sequence
  Description of Artificial Sequence: Synthetic epitope
AELIEQAAQY

SEQ ID NO: 12414 - protein, 10 aa, Artificial Sequence
  Description of Artificial Sequence: Synthetic epitope
AELKKASKED

SEQ ID NO: 12415 - protein, 10 aa, Artificial Sequence
  Description of Artificial Sequence: Synthetic epitope
AELLKEKESK

SEQ ID NO: 12416 - protein, 10 aa, Artificial Sequence
  Description of Artificial Sequence: Synthetic epitope
AELLRAVTEI

SEQ ID NO: 12417 - protein, 10 aa, Artificial Sequence
  Description of Artificial Sequence: Synthetic epitope
AELNANLSNL

SEQ ID NO: 12418 - protein, 10 aa, Artificial Sequence
  Description of Artificial Sequence: Synthetic epitope
AELNASLLGM

SEQ ID NO: 12419 - protein, 10 aa, Artificial Sequence
  Description of Artificial Sequence: Synthetic epitope
AELPALVNES

SEQ ID NO: 12420 - protein, 10 aa, Artificial Sequence
  Description of Artificial Sequence: Synthetic epitope
AELPIMQAGA

SEQ ID NO: 12421 - protein, 10 aa, Artificial Sequence
  Description of Artificial Sequence: Synthetic epitope
AELSATLEQA

SEQ ID NO: 12422 - protein, 10 aa, Artificial Sequence
  Description of Artificial Sequence: Synthetic epitope
AELSEVLVLR

SEQ ID NO: 12423 - protein, 10 aa, Artificial Sequence
  Description of Artificial Sequence: Synthetic epitope
AELSKSNKQN

SEQ ID NO: 12424 - protein, 10 aa, Artificial Sequence
  Description of Artificial Sequence: Synthetic epitope
AELSVDMEKI

SEQ ID NO: 12425 - protein, 10 aa, Artificial Sequence
  Description of Artificial Sequence: Synthetic epitope
AELSVVSTSV

SEQ ID NO: 12426 - protein, 10 aa, Artificial Sequence
  Description of Artificial Sequence: Synthetic epitope
AELTAMAGES

SEQ ID NO: 12427 - protein, 10 aa, Artificial Sequence
  Description of Artificial Sequence: Synthetic epitope
AELTKSDWER

SEQ ID NO: 12428 - protein, 10 aa, Artificial Sequence
  Description of Artificial Sequence: Synthetic epitope
AELTSQNNRD

SEQ ID NO: 12429 - protein, 10 aa, Artificial Sequence
  Description of Artificial Sequence: Synthetic epitope
AELVAEEVTR

SEQ ID NO: 12430 - protein, 10 aa, Artificial Sequence
  Description of Artificial Sequence: Synthetic epitope
AELWQATNRW

SEQ ID NO: 12431 - protein, 10 aa, Artificial Sequence
  Description of Artificial Sequence: Synthetic epitope
AEMDRIFANT

SEQ ID NO: 12432 - protein, 10 aa, Artificial Sequence
  Description of Artificial Sequence: Synthetic epitope
AEMEEQAERD

SEQ ID NO: 12433 - protein, 10 aa, Artificial Sequence
  Description of Artificial Sequence: Synthetic epitope
AEMEKEEKQG

SEQ ID NO: 12434 - protein, 10 aa, Artificial Sequence
  Description of Artificial Sequence: Synthetic epitope
AEMIPKLKTR

SEQ ID NO: 12435 - protein, 10 aa, Artificial Sequence
  Description of Artificial Sequence: Synthetic epitope
AEMLHMYSQK

SEQ ID NO: 12436 - protein, 10 aa, Artificial Sequence
  Description of Artificial Sequence: Synthetic epitope
AEMRERTTKK

SEQ ID NO: 12437 - protein, 10 aa, Artificial Sequence
  Description of Artificial Sequence: Synthetic epitope
AEMTSKHQEY

SEQ ID NO: 12438 - protein, 10 aa, Artificial Sequence
  Description of Artificial Sequence: Synthetic epitope
AEMVESLQSV

SEQ ID NO: 12439 - protein, 10 aa, Artificial Sequence
  Description of Artificial Sequence: Synthetic epitope
AEMVNKNSEL

SEQ ID NO: 12440 - protein, 10 aa, Artificial Sequence
  Description of Artificial Sequence: Synthetic epitope
AENAETQVGV

SEQ ID NO: 12441 - protein, 10 aa, Artificial Sequence
  Description of Artificial Sequence: Synthetic epitope
AENEASQESA

SEQ ID NO: 12442 - protein, 10 aa, Artificial Sequence
  Description of Artificial Sequence: Synthetic epitope
AENINTTSLT

SEQ ID NO: 12443 - protein, 10 aa, Artificial Sequence
  Description of Artificial Sequence: Synthetic epitope
AENLVEEFEM

SEQ ID NO: 12444 - protein, 10 aa, Artificial Sequence
  Description of Artificial Sequence: Synthetic epitope
AENSTGASQA

SEQ ID NO: 12445 - protein, 10 aa, Artificial Sequence
  Description of Artificial Sequence: Synthetic epitope
AENTKGSQTS

SEQ ID NO: 12446 - protein, 10 aa, Artificial Sequence
  Description of Artificial Sequence: Synthetic epitope
AEPEVVAELA

SEQ ID NO: 12447 - protein, 10 aa, Artificial Sequence
  Description of Artificial Sequence: Synthetic epitope
AEPGEQLQTQ

SEQ ID NO: 12448 - protein, 10 aa, Artificial Sequence
  Description of Artificial Sequence: Synthetic epitope
AEPKKAIPSS

SEQ ID NO: 12449 - protein, 10 aa, Artificial Sequence
  Description of Artificial Sequence: Synthetic epitope
AEPTNTVEKG

SEQ ID NO: 12450 - protein, 10 aa, Artificial Sequence
  Description of Artificial Sequence: Synthetic epitope
AEPVMAQSTQ

SEQ ID NO: 12451 - protein, 10 aa, Artificial Sequence
  Description of Artificial Sequence: Synthetic epitope
AEPVMAQSTQ

SEQ ID NO: 12452 - protein, 10 aa, Artificial Sequence
  Description of Artificial Sequence: Synthetic epitope
AEQAKQLVSR

SEQ ID NO: 12453 - protein, 10 aa, Artificial Sequence
  Description of Artificial Sequence: Synthetic epitope
AEQALALGQS

SEQ ID NO: 12454 - protein, 10 aa, Artificial Sequence
  Description of Artificial Sequence: Synthetic epitope
AEQDSELTSE

SEQ ID NO: 12455 - protein, 10 aa, Artificial Sequence
  Description of Artificial Sequence: Synthetic epitope
AEQIEKDDRE

SEQ ID NO: 12456 - protein, 10 aa, Artificial Sequence
  Description of Artificial Sequence: Synthetic epitope
AEQLSLVQAE

SEQ ID NO: 12457 - protein, 10 aa, Artificial Sequence
  Description of Artificial Sequence: Synthetic epitope
AEQQKAQAEV

SEQ ID NO: 12458 - protein, 10 aa, Artificial Sequence
  Description of Artificial Sequence: Synthetic epitope
AEQQSRLPLP

SEQ ID NO: 12459 - protein, 10 aa, Artificial Sequence
  Description of Artificial Sequence: Synthetic epitope
AEQSPSMEEN

SEQ ID NO: 12460 - protein, 10 aa, Artificial Sequence
  Description of Artificial Sequence: Synthetic epitope
AEQWSGKKGD

SEQ ID NO: 12461 - protein, 10 aa, Artificial Sequence
  Description of Artificial Sequence: Synthetic epitope
AEREKAATLE

SEQ ID NO: 12462 - protein, 10 aa, Artificial Sequence
  Description of Artificial Sequence: Synthetic epitope
AEREMVLAQE

SEQ ID NO: 12463 - protein, 10 aa, Artificial Sequence
  Description of Artificial Sequence: Synthetic epitope
AERLKSVVGN

SEQ ID NO: 12464 - protein, 10 aa, Artificial Sequence
  Description of Artificial Sequence: Synthetic epitope
AERMSTIRMK

SEQ ID NO: 12465 - protein, 10 aa, Artificial Sequence
  Description of Artificial Sequence: Synthetic epitope
AERQKMSALV

SEQ ID NO: 12466 - protein, 10 aa, Artificial Sequence
  Description of Artificial Sequence: Synthetic epitope
AERQQGKVQK

SEQ ID NO: 12467 - protein, 10 aa, Artificial Sequence
  Description of Artificial Sequence: Synthetic epitope
AERQQKLRSQ

SEQ ID NO: 12468 - protein, 10 aa, Artificial Sequence
  Description of Artificial Sequence: Synthetic epitope
AERSEVAAGG

SEQ ID NO: 12469 - protein, 10 aa, Artificial Sequence
  Description of Artificial Sequence: Synthetic epitope
AERSLAPTAA

SEQ ID NO: 12470 - protein, 10 aa, Artificial Sequence
  Description of Artificial Sequence: Synthetic epitope
AESAQQASTQ

SEQ ID NO: 12471 - protein, 10 aa, Artificial Sequence
  Description of Artificial Sequence: Synthetic epitope
AESEITIAPL

SEQ ID NO: 12472 - protein, 10 aa, Artificial Sequence
  Description of Artificial Sequence: Synthetic epitope
AESEPVEIEV

SEQ ID NO: 12473 - protein, 10 aa, Artificial Sequence
  Description of Artificial Sequence: Synthetic epitope
AESIKSKSPD

SEQ ID NO: 12474 - protein, 10 aa, Artificial Sequence
  Description of Artificial Sequence: Synthetic epitope
AESKQLNVYE

SEQ ID NO: 12475 - protein, 10 aa, Artificial Sequence
  Description of Artificial Sequence: Synthetic epitope
AESLALSESK

SEQ ID NO: 12476 - protein, 10 aa, Artificial Sequence
  Description of Artificial Sequence: Synthetic epitope
AESLISSAGE

SEQ ID NO: 12477 - protein, 10 aa, Artificial Sequence
  Description of Artificial Sequence: Synthetic epitope
AESMPTLTPA

SEQ ID NO: 12478 - protein, 10 aa, Artificial Sequence
  Description of Artificial Sequence: Synthetic epitope
AESMSRESDI

SEQ ID NO: 12479 - protein, 10 aa, Artificial Sequence
  Description of Artificial Sequence: Synthetic epitope
AESNTEETKR

SEQ ID NO: 12480 - protein, 10 aa, Artificial Sequence
  Description of Artificial Sequence: Synthetic epitope
AESPALAASP

SEQ ID NO: 12481 - protein, 10 aa, Artificial Sequence
  Description of Artificial Sequence: Synthetic epitope
AESPSSESKG

SEQ ID NO: 12482 - protein, 10 aa, Artificial Sequence
  Description of Artificial Sequence: Synthetic epitope
AESPYSQSSE

SEQ ID NO: 12483 - protein, 10 aa, Artificial Sequence
  Description of Artificial Sequence: Synthetic epitope
AESSESSDDE

SEQ ID NO: 12484 - protein, 10 aa, Artificial Sequence
  Description of Artificial Sequence: Synthetic epitope
AESSLALEIQ

SEQ ID NO: 12485 - protein, 10 aa, Artificial Sequence
  Description of Artificial Sequence: Synthetic epitope
AESSQKKTSL

SEQ ID NO: 12486 - protein, 10 aa, Artificial Sequence
  Description of Artificial Sequence: Synthetic epitope
AESSTSLQSA

SEQ ID NO: 12487 - protein, 10 aa, Artificial Sequence
  Description of Artificial Sequence: Synthetic epitope
AESTERESQD

SEQ ID NO: 12488 - protein, 10 aa, Artificial Sequence
  Description of Artificial Sequence: Synthetic epitope
AESVSNNVTE

SEQ ID NO: 12489 - protein, 10 aa, Artificial Sequence
  Description of Artificial Sequence: Synthetic epitope
AESVTSTAMT

SEQ ID NO: 12490 - protein, 10 aa, Artificial Sequence
  Description of Artificial Sequence: Synthetic epitope
AETERSNDSG

SEQ ID NO: 12491 - protein, 10 aa, Artificial Sequence
  Description of Artificial Sequence: Synthetic epitope
AETGLQLSKR

SEQ ID NO: 12492 - protein, 10 aa, Artificial Sequence
  Description of Artificial Sequence: Synthetic epitope
AETKAEATPR

SEQ ID NO: 12493 - protein, 10 aa, Artificial Sequence
  Description of Artificial Sequence: Synthetic epitope
AETKEKSKHL

SEQ ID NO: 12494 - protein, 10 aa, Artificial Sequence
  Description of Artificial Sequence: Synthetic epitope
AETLAETEPE

SEQ ID NO: 12495 - protein, 10 aa, Artificial Sequence
  Description of Artificial Sequence: Synthetic epitope
AETNSALEEL

SEQ ID NO: 12496 - protein, 10 aa, Artificial Sequence
  Description of Artificial Sequence: Synthetic epitope
AETQGTTEAR

SEQ ID NO: 12497 - protein, 10 aa, Artificial Sequence
  Description of Artificial Sequence: Synthetic epitope
AETQSMFSID

SEQ ID NO: 12498 - protein, 10 aa, Artificial Sequence
  Description of Artificial Sequence: Synthetic epitope
AETRVTIEVT

SEQ ID NO: 12499 - protein, 10 aa, Artificial Sequence
  Description of Artificial Sequence: Synthetic epitope
AEVATTNEER

SEQ ID NO: 12500 - protein, 10 aa, Artificial Sequence
  Description of Artificial Sequence: Synthetic epitope
AEVAVSVHLS

SEQ ID NO: 12501 - protein, 10 aa, Artificial Sequence
  Description of Artificial Sequence: Synthetic epitope
AEVENSIQES

SEQ ID NO: 12502 - protein, 10 aa, Artificial Sequence
  Description of Artificial Sequence: Synthetic epitope
AEVEQATRRQ

SEQ ID NO: 12503 - protein, 10 aa, Artificial Sequence
  Description of Artificial Sequence: Synthetic epitope
AEVESEASPP

SEQ ID NO: 12504 - protein, 10 aa, Artificial Sequence
  Description of Artificial Sequence: Synthetic epitope
AEVGAAETTL

SEQ ID NO: 12505 - protein, 10 aa, Artificial Sequence
  Description of Artificial Sequence: Synthetic epitope
AEVIKHSRGT

SEQ ID NO: 12506 - protein, 10 aa, Artificial Sequence
  Description of Artificial Sequence: Synthetic epitope
AEVLKLMDAV

SEQ ID NO: 12507 - protein, 10 aa, Artificial Sequence
  Description of Artificial Sequence: Synthetic epitope
AEVNANEQPE

SEQ ID NO: 12508 - protein, 10 aa, Artificial Sequence
  Description of Artificial Sequence: Synthetic epitope
AEVNAVTSNR

SEQ ID NO: 12509 - protein, 10 aa, Artificial Sequence
  Description of Artificial Sequence: Synthetic epitope
AEVQSQGEET

SEQ ID NO: 12510 - protein, 10 aa, Artificial Sequence
  Description of Artificial Sequence: Synthetic epitope
AEVRQQSAEA

SEQ ID NO: 12511 - protein, 10 aa, Artificial Sequence
  Description of Artificial Sequence: Synthetic epitope
AEVSTAAQTV

SEQ ID NO: 12512 - protein, 10 aa, Artificial Sequence
  Description of Artificial Sequence: Synthetic epitope
AEVSVEHVQN

SEQ ID NO: 12513 - protein, 10 aa, Artificial Sequence
  Description of Artificial Sequence: Synthetic epitope
AEVSVSSPEV

SEQ ID NO: 12514 - protein, 10 aa, Artificial Sequence
  Description of Artificial Sequence: Synthetic epitope
AEVTKAAQDQ

SEQ ID NO: 12515 - protein, 10 aa, Artificial Sequence
  Description of Artificial Sequence: Synthetic epitope
AEVTQQLKAR

SEQ ID NO: 12516 - protein, 10 aa, Artificial Sequence
  Description of Artificial Sequence: Synthetic epitope
AEVYTRLKSR

SEQ ID NO: 12517 - protein, 10 aa, Artificial Sequence
  Description of Artificial Sequence: Synthetic epitope
AEWRAAQKYA

SEQ ID NO: 12518 - protein, 10 aa, Artificial Sequence
  Description of Artificial Sequence: Synthetic epitope
AEWRLALEKE

SEQ ID NO: 12519 - protein, 10 aa, Artificial Sequence
  Description of Artificial Sequence: Synthetic epitope
AEWSSARGSR

SEQ ID NO: 12520 - protein, 10 aa, Artificial Sequence
  Description of Artificial Sequence: Synthetic epitope
AEWYHEGNVK

SEQ ID NO: 12521 - protein, 10 aa, Artificial Sequence
  Description of Artificial Sequence: Synthetic epitope
AEYDVAYGES

SEQ ID NO: 12522 - protein, 10 aa, Artificial Sequence
  Description of Artificial Sequence: Synthetic epitope
AEYESSVSED

SEQ ID NO: 12523 - protein, 10 aa, Artificial Sequence
  Description of Artificial Sequence: Synthetic epitope
AEYKVITVIE

SEQ ID NO: 12524 - protein, 10 aa, Artificial Sequence
  Description of Artificial Sequence: Synthetic epitope
AEYLAALERA

SEQ ID NO: 12525 - protein, 10 aa, Artificial Sequence
  Description of Artificial Sequence: Synthetic epitope
AEYNRTAIPV

SEQ ID NO: 12526 - protein, 10 aa, Artificial Sequence
  Description of Artificial Sequence: Synthetic epitope
AEYTGAQQKL

SEQ ID NO: 12527 - protein, 10 aa, Artificial Sequence
  Description of Artificial Sequence: Synthetic epitope
AEYTSKVQIF

SEQ ID NO: 12528 - protein, 10 aa, Artificial Sequence
  Description of Artificial Sequence: Synthetic epitope
AFAESLRTSL

SEQ ID NO: 12529 - protein, 10 aa, Artificial Sequence
  Description of Artificial Sequence: Synthetic epitope
AFAGTVTIHN

SEQ ID NO: 12530 - protein, 10 aa, Artificial Sequence
  Description of Artificial Sequence: Synthetic epitope
AFAQRERIQE

SEQ ID NO: 12531 - protein, 10 aa, Artificial Sequence
  Description of Artificial Sequence: Synthetic epitope
AFATATASGV

SEQ ID NO: 12532 - protein, 10 aa, Artificial Sequence
  Description of Artificial Sequence: Synthetic epitope
AFEAEFQYAE

SEQ ID NO: 12533 - protein, 10 aa, Artificial Sequence
  Description of Artificial Sequence: Synthetic epitope
AFEEQQGNIN

SEQ ID NO: 12534 - protein, 10 aa, Artificial Sequence
  Description of Artificial Sequence: Synthetic epitope
AFETLKVQSA

SEQ ID NO: 12535 - protein, 10 aa, Artificial Sequence
  Description of Artificial Sequence: Synthetic epitope
AFIGQARAEG

SEQ ID NO: 12536 - protein, 10 aa, Artificial Sequence
  Description of Artificial Sequence: Synthetic epitope
AFIRSILSKP

SEQ ID NO: 12537 - protein, 10 aa, Artificial Sequence
  Description of Artificial Sequence: Synthetic epitope
AFKERQSSKN

SEQ ID NO: 12538 - protein, 10 aa, Artificial Sequence
  Description of Artificial Sequence: Synthetic epitope
AFKLESLEAK

SEQ ID NO: 12539 - protein, 10 aa, Artificial Sequence
  Description of Artificial Sequence: Synthetic epitope
AFKTWRQQDS

SEQ ID NO: 12540 - protein, 10 aa, Artificial Sequence
  Description of Artificial Sequence: Synthetic epitope
AFLGNLVSAQ

SEQ ID NO: 12541 - protein, 10 aa, Artificial Sequence
  Description of Artificial Sequence: Synthetic epitope
AFLLSLSEEI

SEQ ID NO: 12542 - protein, 10 aa, Artificial Sequence
  Description of Artificial Sequence: Synthetic epitope
AFLRRERLAR

SEQ ID NO: 12543 - protein, 10 aa, Artificial Sequence
  Description of Artificial Sequence: Synthetic epitope
AFLVEFTSKV

SEQ ID NO: 12544 - protein, 10 aa, Artificial Sequence
  Description of Artificial Sequence: Synthetic epitope
AFMAHTMPKL

SEQ ID NO: 12545 - protein, 10 aa, Artificial Sequence
  Description of Artificial Sequence: Synthetic epitope
AFMDLTLMAS

SEQ ID NO: 12546 - protein, 10 aa, Artificial Sequence
  Description of Artificial Sequence: Synthetic epitope
AFNRTLALLR

SEQ ID NO: 12547 - protein, 10 aa, Artificial Sequence
  Description of Artificial Sequence: Synthetic epitope
AFQKAYYNLE

SEQ ID NO: 12548 - protein, 10 aa, Artificial Sequence
  Description of Artificial Sequence: Synthetic epitope
AFQRENKLAS

SEQ ID NO: 12549 - protein, 10 aa, Artificial Sequence
  Description of Artificial Sequence: Synthetic epitope
AFRPVKKSTE

SEQ ID NO: 12550 - protein, 10 aa, Artificial Sequence
  Description of Artificial Sequence: Synthetic epitope
AFRPVKSVKM

SEQ ID NO: 12551 - protein, 10 aa, Artificial Sequence
  Description of Artificial Sequence: Synthetic epitope
AFRSVSMAIQ

SEQ ID NO: 12552 - protein, 10 aa, Artificial Sequence
  Description of Artificial Sequence: Synthetic epitope
AFSEEASIYD

SEQ ID NO: 12553 - protein, 10 aa, Artificial Sequence
  Description of Artificial Sequence: Synthetic epitope
AFSSQSTTSR

SEQ ID NO: 12554 - protein, 10 aa, Artificial Sequence
  Description of Artificial Sequence: Synthetic epitope
AFSSTSAESD

SEQ ID NO: 12555 - protein, 10 aa, Artificial Sequence
  Description of Artificial Sequence: Synthetic epitope
AFTVAAVQQT

SEQ ID NO: 12556 - protein, 10 aa, Artificial Sequence
  Description of Artificial Sequence: Synthetic epitope
AFVKNIITTE

SEQ ID NO: 12557 - protein, 10 aa, Artificial Sequence
  Description of Artificial Sequence: Synthetic epitope
AFVRPRWIYS

SEQ ID NO: 12558 - protein, 10 aa, Artificial Sequence
  Description of Artificial Sequence: Synthetic epitope
AFYQEQSQLQ

SEQ ID NO: 12559 - protein, 10 aa, Artificial Sequence
  Description of Artificial Sequence: Synthetic epitope
AGAEVQAKLE

SEQ ID NO: 12560 - protein, 10 aa, Artificial Sequence
  Description of Artificial Sequence: Synthetic epitope
AGARVAGTQA

SEQ ID NO: 12561 - protein, 10 aa, Artificial Sequence
  Description of Artificial Sequence: Synthetic epitope
AGASESTRSN

SEQ ID NO: 12562 - protein, 10 aa, Artificial Sequence
  Description of Artificial Sequence: Synthetic epitope
AGATATTSTS

SEQ ID NO: 12563 - protein, 10 aa, Artificial Sequence
  Description of Artificial Sequence: Synthetic epitope
AGAVFQSFAK

SEQ ID NO: 12564 - protein, 10 aa, Artificial Sequence
  Description of Artificial Sequence: Synthetic epitope
AGDAEKREDQ

SEQ ID NO: 12565 - protein, 10 aa, Artificial Sequence
  Description of Artificial Sequence: Synthetic epitope
AGDEKETEHK

SEQ ID NO: 12566 - protein, 10 aa, Artificial Sequence
  Description of Artificial Sequence: Synthetic epitope
AGDLQGLSRG

SEQ ID NO: 12567 - protein, 10 aa, Artificial Sequence
  Description of Artificial Sequence: Synthetic epitope
AGDTSTVSPP

SEQ ID NO: 12568 - protein, 10 aa, Artificial Sequence
  Description of Artificial Sequence: Synthetic epitope
AGEHQSTDSK

SEQ ID NO: 12569 - protein, 10 aa, Artificial Sequence
  Description of Artificial Sequence: Synthetic epitope
AGESESLQED

SEQ ID NO: 12570 - protein, 10 aa, Artificial Sequence
  Description of Artificial Sequence: Synthetic epitope
AGFESITPLT

SEQ ID NO: 12571 - protein, 10 aa, Artificial Sequence
  Description of Artificial Sequence: Synthetic epitope
AGGAASASTD

SEQ ID NO: 12572 - protein, 10 aa, Artificial Sequence
  Description of Artificial Sequence: Synthetic epitope
AGGFASALER

SEQ ID NO: 12573 - protein, 10 aa, Artificial Sequence
  Description of Artificial Sequence: Synthetic epitope
AGGSGAISTA

SEQ ID NO: 12574 - protein, 10 aa, Artificial Sequence
  Description of Artificial Sequence: Synthetic epitope
AGGSKKAEQK

SEQ ID NO: 12575 - protein, 10 aa, Artificial Sequence
  Description of Artificial Sequence: Synthetic epitope
AGGTMKSAEE

SEQ ID NO: 12576 - protein, 10 aa, Artificial Sequence
  Description of Artificial Sequence: Synthetic epitope
AGGTNVTKAW

SEQ ID NO: 12577 - protein, 10 aa, Artificial Sequence
  Description of Artificial Sequence: Synthetic epitope
AGHQGRTTQQ

SEQ ID NO: 12578 - protein, 10 aa, Artificial Sequence
  Description of Artificial Sequence: Synthetic epitope
AGIAVSQRKV

SEQ ID NO: 12579 - protein, 10 aa, Artificial Sequence
  Description of Artificial Sequence: Synthetic epitope
AGILSTVTTS

SEQ ID NO: 12580 - protein, 10 aa, Artificial Sequence
  Description of Artificial Sequence: Synthetic epitope
AGISEGAEGV

SEQ ID NO: 12581 - protein, 10 aa, Artificial Sequence
  Description of Artificial Sequence: Synthetic epitope
AGKAETSEGS

SEQ ID NO: 12582 - protein, 10 aa, Artificial Sequence
  Description of Artificial Sequence: Synthetic epitope
AGKAVEQGGA

SEQ ID NO: 12583 - protein, 10 aa, Artificial Sequence
  Description of Artificial Sequence: Synthetic epitope
AGKELRAEDI

SEQ ID NO: 12584 - protein, 10 aa, Artificial Sequence
  Description of Artificial Sequence: Synthetic epitope
AGKEVFLVMP

SEQ ID NO: 12585 - protein, 10 aa, Artificial Sequence
  Description of Artificial Sequence: Synthetic epitope
AGKIPEKVTP

SEQ ID NO: 12586 - protein, 10 aa, Artificial Sequence
  Description of Artificial Sequence: Synthetic epitope
AGKITAKELE

SEQ ID NO: 12587 - protein, 10 aa, Artificial Sequence
  Description of Artificial Sequence: Synthetic epitope
AGKQAAQKLE

SEQ ID NO: 12588 - protein, 10 aa, Artificial Sequence
  Description of Artificial Sequence: Synthetic epitope
AGLATVATED

SEQ ID NO: 12589 - protein, 10 aa, Artificial Sequence
  Description of Artificial Sequence: Synthetic epitope
AGLDSASLSD

SEQ ID NO: 12590 - protein, 10 aa, Artificial Sequence
  Description of Artificial Sequence: Synthetic epitope
AGLEAAERES

SEQ ID NO: 12591 - protein, 10 aa, Artificial Sequence
  Description of Artificial Sequence: Synthetic epitope
AGLGATEQTQ

SEQ ID NO: 12592 - protein, 10 aa, Artificial Sequence
  Description of Artificial Sequence: Synthetic epitope
AGLPLTNALE

SEQ ID NO: 12593 - protein, 10 aa, Artificial Sequence
  Description of Artificial Sequence: Synthetic epitope
AGLTTSNFSL

SEQ ID NO: 12594 - protein, 10 aa, Artificial Sequence
  Description of Artificial Sequence: Synthetic epitope
AGMFGKETYV

SEQ ID NO: 12595 - protein, 10 aa, Artificial Sequence
  Description of Artificial Sequence: Synthetic epitope
AGMPSLLQSS

SEQ ID NO: 12596 - protein, 10 aa, Artificial Sequence
  Description of Artificial Sequence: Synthetic epitope
AGMPVSADAA

SEQ ID NO: 12597 - protein, 10 aa, Artificial Sequence
  Description of Artificial Sequence: Synthetic epitope
AGNAKKNWQR

SEQ ID NO: 12598 - protein, 10 aa, Artificial Sequence
  Description of Artificial Sequence: Synthetic epitope
AGNANSKTGE

SEQ ID NO: 12599 - protein, 10 aa, Artificial Sequence
  Description of Artificial Sequence: Synthetic epitope
AGNAQMSHLQ

SEQ ID NO: 12600 - protein, 10 aa, Artificial Sequence
  Description of Artificial Sequence: Synthetic epitope
AGNSVETRGE

SEQ ID NO: 12601 - protein, 10 aa, Artificial Sequence
  Description of Artificial Sequence: Synthetic epitope
AGPIIGQIIN

SEQ ID NO: 12602 - protein, 10 aa, Artificial Sequence
  Description of Artificial Sequence: Synthetic epitope
AGPKESSEEG

SEQ ID NO: 12603 - protein, 10 aa, Artificial Sequence
  Description of Artificial Sequence: Synthetic epitope
AGPSTEGAEG

SEQ ID NO: 12604 - protein, 10 aa, Artificial Sequence
  Description of Artificial Sequence: Synthetic epitope
AGQLRRTGQR

SEQ ID NO: 12605 - protein, 10 aa, Artificial Sequence
  Description of Artificial Sequence: Synthetic epitope
AGQSDSSVDP

SEQ ID NO: 12606 - protein, 10 aa, Artificial Sequence
  Description of Artificial Sequence: Synthetic epitope
AGQVSVAYNS

SEQ ID NO: 12607 - protein, 10 aa, Artificial Sequence
  Description of Artificial Sequence: Synthetic epitope
AGRKWGWKMT

SEQ ID NO: 12608 - protein, 10 aa, Artificial Sequence
  Description of Artificial Sequence: Synthetic epitope
AGRLFSTQER

SEQ ID NO: 12609 - protein, 10 aa, Artificial Sequence
  Description of Artificial Sequence: Synthetic epitope
AGRLVQTAAQ

SEQ ID NO: 12610 - protein, 10 aa, Artificial Sequence
  Description of Artificial Sequence: Synthetic epitope
AGRNSASPKH

SEQ ID NO: 12611 - protein, 10 aa, Artificial Sequence
  Description of Artificial Sequence: Synthetic epitope
AGRQSSAKRH

SEQ ID NO: 12612 - protein, 10 aa, Artificial Sequence
  Description of Artificial Sequence: Synthetic epitope
AGSASTAGAP

SEQ ID NO: 12613 - protein, 10 aa, Artificial Sequence
  Description of Artificial Sequence: Synthetic epitope
AGSETAEEKT

SEQ ID NO: 12614 - protein, 10 aa, Artificial Sequence
  Description of Artificial Sequence: Synthetic epitope
AGSIISLNAA

SEQ ID NO: 12615 - protein, 10 aa, Artificial Sequence
  Description of Artificial Sequence: Synthetic epitope
AGSKLAKKRE

SEQ ID NO: 12616 - protein, 10 aa, Artificial Sequence
  Description of Artificial Sequence: Synthetic epitope
AGSLSSQQVT

SEQ ID NO: 12617 - protein, 10 aa, Artificial Sequence
  Description of Artificial Sequence: Synthetic epitope
AGSMSTQANT

SEQ ID NO: 12618 - protein, 10 aa, Artificial Sequence
  Description of Artificial Sequence: Synthetic epitope
AGSNARAEFW

SEQ ID NO: 12619 - protein, 10 aa, Artificial Sequence
  Description of Artificial Sequence: Synthetic epitope
AGSQESSPSN

SEQ ID NO: 12620 - protein, 10 aa, Artificial Sequence
  Description of Artificial Sequence: Synthetic epitope
AGSSGVKATG

SEQ ID NO: 12621 - protein, 10 aa, Artificial Sequence
  Description of Artificial Sequence: Synthetic epitope
AGSSKASSLP

SEQ ID NO: 12622 - protein, 10 aa, Artificial Sequence
  Description of Artificial Sequence: Synthetic epitope
AGSTSRILDI

SEQ ID NO: 12623 - protein, 10 aa, Artificial Sequence
  Description of Artificial Sequence: Synthetic epitope
AGTAVVTSSE

SEQ ID NO: 12624 - protein, 10 aa, Artificial Sequence
  Description of Artificial Sequence: Synthetic epitope
AGTKRKAKEK

SEQ ID NO: 12625 - protein, 10 aa, Artificial Sequence
  Description of Artificial Sequence: Synthetic epitope
AGTNQETRSR

SEQ ID NO: 12626 - protein, 10 aa, Artificial Sequence
  Description of Artificial Sequence: Synthetic epitope
AGTNRSVKTT

SEQ ID NO: 12627 - protein, 10 aa, Artificial Sequence
  Description of Artificial Sequence: Synthetic epitope
AGTPQLASVG

SEQ ID NO: 12628 - protein, 10 aa, Artificial Sequence
  Description of Artificial Sequence: Synthetic epitope
AGTRPSVRNG

SEQ ID NO: 12629 - protein, 10 aa, Artificial Sequence
  Description of Artificial Sequence: Synthetic epitope
AGTSLDRLVT

SEQ ID NO: 12630 - protein, 10 aa, Artificial Sequence
  Description of Artificial Sequence: Synthetic epitope
AGTSSASTDE

SEQ ID NO: 12631 - protein, 10 aa, Artificial Sequence
  Description of Artificial Sequence: Synthetic epitope
AGTSYAWERT

SEQ ID NO: 12632 - protein, 10 aa, Artificial Sequence
  Description of Artificial Sequence: Synthetic epitope
AGTTGMVDVK

SEQ ID NO: 12633 - protein, 10 aa, Artificial Sequence
  Description of Artificial Sequence: Synthetic epitope
AGVANALAHK

SEQ ID NO: 12634 - protein, 10 aa, Artificial Sequence
  Description of Artificial Sequence: Synthetic epitope
AGYINEFVSI

SEQ ID NO: 12635 - protein, 10 aa, Artificial Sequence
  Description of Artificial Sequence: Synthetic epitope
AHAAQAHRER

SEQ ID NO: 12636 - protein, 10 aa, Artificial Sequence
  Description of Artificial Sequence: Synthetic epitope
AHADVRAIDL

SEQ ID NO: 12637 - protein, 10 aa, Artificial Sequence
  Description of Artificial Sequence: Synthetic epitope
AHAKNPTHSN

SEQ ID NO: 12638 - protein, 10 aa, Artificial Sequence
  Description of Artificial Sequence: Synthetic epitope
AHALKYSVVL

SEQ ID NO: 12639 - protein, 10 aa, Artificial Sequence
  Description of Artificial Sequence: Synthetic epitope
AHDQLKLDKE

SEQ ID NO: 12640 - protein, 10 aa, Artificial Sequence
  Description of Artificial Sequence: Synthetic epitope
AHEFMITESQ

SEQ ID NO: 12641 - protein, 10 aa, Artificial Sequence
  Description of Artificial Sequence: Synthetic epitope
AHEVSASEAE

SEQ ID NO: 12642 - protein, 10 aa, Artificial Sequence
  Description of Artificial Sequence: Synthetic epitope
AHFPTADIRE

SEQ ID NO: 12643 - protein, 10 aa, Artificial Sequence
  Description of Artificial Sequence: Synthetic epitope
AHGASALIKE

SEQ ID NO: 12644 - protein, 10 aa, Artificial Sequence
  Description of Artificial Sequence: Synthetic epitope
AHIKSIEITS

SEQ ID NO: 12645 - protein, 10 aa, Artificial Sequence
  Description of Artificial Sequence: Synthetic epitope
AHIQEVTHNQ

SEQ ID NO: 12646 - protein, 10 aa, Artificial Sequence
  Description of Artificial Sequence: Synthetic epitope
AHIQSGLSQM

SEQ ID NO: 12647 - protein, 10 aa, Artificial Sequence
  Description of Artificial Sequence: Synthetic epitope
AHKATQTESQ

SEQ ID NO: 12648 - protein, 10 aa, Artificial Sequence
  Description of Artificial Sequence: Synthetic epitope
AHKHSESKSG

SEQ ID NO: 12649 - protein, 10 aa, Artificial Sequence
  Description of Artificial Sequence: Synthetic epitope
AHLAQAENLQ

SEQ ID NO: 12650 - protein, 10 aa, Artificial Sequence
  Description of Artificial Sequence: Synthetic epitope
AHLSHSQDIK

SEQ ID NO: 12651 - protein, 10 aa, Artificial Sequence
  Description of Artificial Sequence: Synthetic epitope
AHMSQTQEEK

SEQ ID NO: 12652 - protein, 10 aa, Artificial Sequence
  Description of Artificial Sequence: Synthetic epitope
AHPQESHPFP

SEQ ID NO: 12653 - protein, 10 aa, Artificial Sequence
  Description of Artificial Sequence: Synthetic epitope
AHQAPEAALQ

SEQ ID NO: 12654 - protein, 10 aa, Artificial Sequence
  Description of Artificial Sequence: Synthetic epitope
AHRNAKETMT

SEQ ID NO: 12655 - protein, 10 aa, Artificial Sequence
  Description of Artificial Sequence: Synthetic epitope
AHRVVKRKSA

SEQ ID NO: 12656 - protein, 10 aa, Artificial Sequence
  Description of Artificial Sequence: Synthetic epitope
AHSTVGQTLL

SEQ ID NO: 12657 - protein, 10 aa, Artificial Sequence
  Description of Artificial Sequence: Synthetic epitope
AHSVHDHQAS

SEQ ID NO: 12658 - protein, 10 aa, Artificial Sequence
  Description of Artificial Sequence: Synthetic epitope
AHTTLSVNSA

SEQ ID NO: 12659 - protein, 10 aa, Artificial Sequence
  Description of Artificial Sequence: Synthetic epitope
AHTVEAPSPE

SEQ ID NO: 12660 - protein, 10 aa, Artificial Sequence
  Description of Artificial Sequence: Synthetic epitope
AHVSKAVQFL

SEQ ID NO: 12661 - protein, 10 aa, Artificial Sequence
  Description of Artificial Sequence: Synthetic epitope
AIAAKQAKKE

SEQ ID NO: 12662 - protein, 10 aa, Artificial Sequence
  Description of Artificial Sequence: Synthetic epitope
AIADQREGAA

SEQ ID NO: 12663 - protein, 10 aa, Artificial Sequence
  Description of Artificial Sequence: Synthetic epitope
AIATELAQAH

SEQ ID NO: 12664 - protein, 10 aa, Artificial Sequence
  Description of Artificial Sequence: Synthetic epitope
AIEASEAAEQ

SEQ ID NO: 12665 - protein, 10 aa, Artificial Sequence
  Description of Artificial Sequence: Synthetic epitope
AIEIVESDVK

SEQ ID NO: 12666 - protein, 10 aa, Artificial Sequence
  Description of Artificial Sequence: Synthetic epitope
AIEKAESSNN

SEQ ID NO: 12667 - protein, 10 aa, Artificial Sequence
  Description of Artificial Sequence: Synthetic epitope
AIEKKTPASL

SEQ ID NO: 12668 - protein, 10 aa, Artificial Sequence
  Description of Artificial Sequence: Synthetic epitope
AIEKSETTSE

SEQ ID NO: 12669 - protein, 10 aa, Artificial Sequence
  Description of Artificial Sequence: Synthetic epitope
AIELKLVRFP

SEQ ID NO: 12670 - protein, 10 aa, Artificial Sequence
  Description of Artificial Sequence: Synthetic epitope
AIETRKTLAA

SEQ ID NO: 12671 - protein, 10 aa, Artificial Sequence
  Description of Artificial Sequence: Synthetic epitope
AIHKKILQSG

SEQ ID NO: 12672 - protein, 10 aa, Artificial Sequence
  Description of Artificial Sequence: Synthetic epitope
AIHVEEQSDQ

SEQ ID NO: 12673 - protein, 10 aa, Artificial Sequence
  Description of Artificial Sequence: Synthetic epitope
AIIKAALEPF

SEQ ID NO: 12674 - protein, 10 aa, Artificial Sequence
  Description of Artificial Sequence: Synthetic epitope
AIIKAALEPF

SEQ ID NO: 12675 - protein, 10 aa, Artificial Sequence
  Description of Artificial Sequence: Synthetic epitope
AIIKAALEPF

SEQ ID NO: 12676 - protein, 10 aa, Artificial Sequence
  Description of Artificial Sequence: Synthetic epitope
AIKKTSKKVT

SEQ ID NO: 12677 - protein, 10 aa, Artificial Sequence
  Description of Artificial Sequence: Synthetic epitope
AIKSRVVLPY

SEQ ID NO: 12678 - protein, 10 aa, Artificial Sequence
  Description of Artificial Sequence: Synthetic epitope
AIKTQLKRKS

SEQ ID NO: 12679 - protein, 10 aa, Artificial Sequence
  Description of Artificial Sequence: Synthetic epitope
AILRSATGMV

SEQ ID NO: 12680 - protein, 10 aa, Artificial Sequence
  Description of Artificial Sequence: Synthetic epitope
AILTDATKRN

SEQ ID NO: 12681 - protein, 10 aa, Artificial Sequence
  Description of Artificial Sequence: Synthetic epitope
AINIAQAELN

SEQ ID NO: 12682 - protein, 10 aa, Artificial Sequence
  Description of Artificial Sequence: Synthetic epitope
AINIQSTAPE

SEQ ID NO: 12683 - protein, 10 aa, Artificial Sequence
  Description of Artificial Sequence: Synthetic epitope
AINRLSNTGS

SEQ ID NO: 12684 - protein, 10 aa, Artificial Sequence
  Description of Artificial Sequence: Synthetic epitope
AIPEWFLSEN

SEQ ID NO: 12685 - protein, 10 aa, Artificial Sequence
  Description of Artificial Sequence: Synthetic epitope
AIPKATSATG

SEQ ID NO: 12686 - protein, 10 aa, Artificial Sequence
  Description of Artificial Sequence: Synthetic epitope
AIQTVRARQS

SEQ ID NO: 12687 - protein, 10 aa, Artificial Sequence
  Description of Artificial Sequence: Synthetic epitope
AIRAARAQHT

SEQ ID NO: 12688 - protein, 10 aa, Artificial Sequence
  Description of Artificial Sequence: Synthetic epitope
AIRNTGDADQ

SEQ ID NO: 12689 - protein, 10 aa, Artificial Sequence
  Description of Artificial Sequence: Synthetic epitope
AIRSSVQTAH

SEQ ID NO: 12690 - protein, 10 aa, Artificial Sequence
  Description of Artificial Sequence: Synthetic epitope
AISELRLSST

SEQ ID NO: 12691 - protein, 10 aa, Artificial Sequence
  Description of Artificial Sequence: Synthetic epitope
AISKRFKFEE

SEQ ID NO: 12692 - protein, 10 aa, Artificial Sequence
  Description of Artificial Sequence: Synthetic epitope
AISQTALQQK

SEQ ID NO: 12693 - protein, 10 aa, Artificial Sequence
  Description of Artificial Sequence: Synthetic epitope
AISRTDAENL

SEQ ID NO: 12694 - protein, 10 aa, Artificial Sequence
  Description of Artificial Sequence: Synthetic epitope
AISSESTEPS

SEQ ID NO: 12695 - protein, 10 aa, Artificial Sequence
  Description of Artificial Sequence: Synthetic epitope
AISTSSLGEK

SEQ ID NO: 12696 - protein, 10 aa, Artificial Sequence
  Description of Artificial Sequence: Synthetic epitope
AISVSEILQA

SEQ ID NO: 12697 - protein, 10 aa, Artificial Sequence
  Description of Artificial Sequence: Synthetic epitope
AITSISKLPP

SEQ ID NO: 12698 - protein, 10 aa, Artificial Sequence
  Description of Artificial Sequence: Synthetic epitope
AIVANVESMD

SEQ ID NO: 12699 - protein, 10 aa, Artificial Sequence
  Description of Artificial Sequence: Synthetic epitope
AKAALKQLQE

SEQ ID NO: 12700 - protein, 10 aa, Artificial Sequence
  Description of Artificial Sequence: Synthetic epitope
AKAARNDVYR

SEQ ID NO: 12701 - protein, 10 aa, Artificial Sequence
  Description of Artificial Sequence: Synthetic epitope
AKAEAEKIKA

SEQ ID NO: 12702 - protein, 10 aa, Artificial Sequence
  Description of Artificial Sequence: Synthetic epitope
AKAEVTEEVE

SEQ ID NO: 12703 - protein, 10 aa, Artificial Sequence
  Description of Artificial Sequence: Synthetic epitope
AKALETNTHV

SEQ ID NO: 12704 - protein, 10 aa, Artificial Sequence
  Description of Artificial Sequence: Synthetic epitope
AKAPLSTVSA

SEQ ID NO: 12705 - protein, 10 aa, Artificial Sequence
  Description of Artificial Sequence: Synthetic epitope
AKAPSSEKLP

SEQ ID NO: 12706 - protein, 10 aa, Artificial Sequence
  Description of Artificial Sequence: Synthetic epitope
AKARNQLDAV

SEQ ID NO: 12707 - protein, 10 aa, Artificial Sequence
  Description of Artificial Sequence: Synthetic epitope
AKARSSAPTA

SEQ ID NO: 12708 - protein, 10 aa, Artificial Sequence
  Description of Artificial Sequence: Synthetic epitope
AKASKNLMST

SEQ ID NO: 12709 - protein, 10 aa, Artificial Sequence
  Description of Artificial Sequence: Synthetic epitope
AKASMMQQPA

SEQ ID NO: 12710 - protein, 10 aa, Artificial Sequence
  Description of Artificial Sequence: Synthetic epitope
AKASRTSSKH

SEQ ID NO: 12711 - protein, 10 aa, Artificial Sequence
  Description of Artificial Sequence: Synthetic epitope
AKASVNSETE

SEQ ID NO: 12712 - protein, 10 aa, Artificial Sequence
  Description of Artificial Sequence: Synthetic epitope
AKAVLEEDEE

SEQ ID NO: 12713 - protein, 10 aa, Artificial Sequence
  Description of Artificial Sequence: Synthetic epitope
AKAVLSAEQL

SEQ ID NO: 12714 - protein, 10 aa, Artificial Sequence
  Description of Artificial Sequence: Synthetic epitope
AKDENITKGG

SEQ ID NO: 12715 - protein, 10 aa, Artificial Sequence
  Description of Artificial Sequence: Synthetic epitope
AKDNGEAEDQ

SEQ ID NO: 12716 - protein, 10 aa, Artificial Sequence
  Description of Artificial Sequence: Synthetic epitope
AKEDKKAGRP

SEQ ID NO: 12717 - protein, 10 aa, Artificial Sequence
  Description of Artificial Sequence: Synthetic epitope
AKEELSAALE

SEQ ID NO: 12718 - protein, 10 aa, Artificial Sequence
  Description of Artificial Sequence: Synthetic epitope
AKEETVMMEG

SEQ ID NO: 12719 - protein, 10 aa, Artificial Sequence
  Description of Artificial Sequence: Synthetic epitope
AKEHDVQNTF

SEQ ID NO: 12720 - protein, 10 aa, Artificial Sequence
  Description of Artificial Sequence: Synthetic epitope
AKELINKVGA

SEQ ID NO: 12721 - protein, 10 aa, Artificial Sequence
  Description of Artificial Sequence: Synthetic epitope
AKELNAREDY

SEQ ID NO: 12722 - protein, 10 aa, Artificial Sequence
  Description of Artificial Sequence: Synthetic epitope
AKETETDIDR

SEQ ID NO: 12723 - protein, 10 aa, Artificial Sequence
  Description of Artificial Sequence: Synthetic epitope
AKEVMESSAK

SEQ ID NO: 12724 - protein, 10 aa, Artificial Sequence
  Description of Artificial Sequence: Synthetic epitope
AKFDFLTRKH

SEQ ID NO: 12725 - protein, 10 aa, Artificial Sequence
  Description of Artificial Sequence: Synthetic epitope
AKFLRDTKHD

SEQ ID NO: 12726 - protein, 10 aa, Artificial Sequence
  Description of Artificial Sequence: Synthetic epitope
AKFVIAGRAD

SEQ ID NO: 12727 - protein, 10 aa, Artificial Sequence
  Description of Artificial Sequence: Synthetic epitope
AKGEHTSRKD

SEQ ID NO: 12728 - protein, 10 aa, Artificial Sequence
  Description of Artificial Sequence: Synthetic epitope
AKGTLKAEVI

SEQ ID NO: 12729 - protein, 10 aa, Artificial Sequence
  Description of Artificial Sequence: Synthetic epitope
AKGVKSSDVS

SEQ ID NO: 12730 - protein, 10 aa, Artificial Sequence
  Description of Artificial Sequence: Synthetic epitope
AKHAEELAAQ

SEQ ID NO: 12731 - protein, 10 aa, Artificial Sequence
  Description of Artificial Sequence: Synthetic epitope
AKHIMSEPEE

SEQ ID NO: 12732 - protein, 10 aa, Artificial Sequence
  Description of Artificial Sequence: Synthetic epitope
AKHKRNITEM

SEQ ID NO: 12733 - protein, 10 aa, Artificial Sequence
  Description of Artificial Sequence: Synthetic epitope
AKIDIKSIKE

SEQ ID NO: 12734 - protein, 10 aa, Artificial Sequence
  Description of Artificial Sequence: Synthetic epitope
AKILYTSKTT

SEQ ID NO: 12735 - protein, 10 aa, Artificial Sequence
  Description of Artificial Sequence: Synthetic epitope
AKISQMTNLQ

SEQ ID NO: 12736 - protein, 10 aa, Artificial Sequence
  Description of Artificial Sequence: Synthetic epitope
AKKAEQGSEE

SEQ ID NO: 12737 - protein, 10 aa, Artificial Sequence
  Description of Artificial Sequence: Synthetic epitope
AKKEQSLALS

SEQ ID NO: 12738 - protein, 10 aa, Artificial Sequence
  Description of Artificial Sequence: Synthetic epitope
AKKIKLTAEA

SEQ ID NO: 12739 - protein, 10 aa, Artificial Sequence
  Description of Artificial Sequence: Synthetic epitope
AKKLALARKI

SEQ ID NO: 12740 - protein, 10 aa, Artificial Sequence
  Description of Artificial Sequence: Synthetic epitope
AKKLEQLKPR

SEQ ID NO: 12741 - protein, 10 aa, Artificial Sequence
  Description of Artificial Sequence: Synthetic epitope
AKKRIDEDDF

SEQ ID NO: 12742 - protein, 10 aa, Artificial Sequence
  Description of Artificial Sequence: Synthetic epitope
AKKSVASKTE

SEQ ID NO: 12743 - protein, 10 aa, Artificial Sequence
  Description of Artificial Sequence: Synthetic epitope
AKKTEDAARQ

SEQ ID NO: 12744 - protein, 10 aa, Artificial Sequence
  Description of Artificial Sequence: Synthetic epitope
AKLAEQVGKQ

SEQ ID NO: 12745 - protein, 10 aa, Artificial Sequence
  Description of Artificial Sequence: Synthetic epitope
AKLDQAPKVP

SEQ ID NO: 12746 - protein, 10 aa, Artificial Sequence
  Description of Artificial Sequence: Synthetic epitope
AKLEAKTGVN

SEQ ID NO: 12747 - protein, 10 aa, Artificial Sequence
  Description of Artificial Sequence: Synthetic epitope
AKLEKEAVKD

SEQ ID NO: 12748 - protein, 10 aa, Artificial Sequence
  Description of Artificial Sequence: Synthetic epitope
AKLEYLSLVS

SEQ ID NO: 12749 - protein, 10 aa, Artificial Sequence
  Description of Artificial Sequence: Synthetic epitope
AKLGSSEEVR

SEQ ID NO: 12750 - protein, 10 aa, Artificial Sequence
  Description of Artificial Sequence: Synthetic epitope
AKLGTSAEGA

SEQ ID NO: 12751 - protein, 10 aa, Artificial Sequence
  Description of Artificial Sequence: Synthetic epitope
AKLISQKQVV

SEQ ID NO: 12752 - protein, 10 aa, Artificial Sequence
  Description of Artificial Sequence: Synthetic epitope
AKLKREESKP

SEQ ID NO: 12753 - protein, 10 aa, Artificial Sequence
  Description of Artificial Sequence: Synthetic epitope
AKLKRVTIPS

SEQ ID NO: 12754 - protein, 10 aa, Artificial Sequence
  Description of Artificial Sequence: Synthetic epitope
AKLLTAAELL

SEQ ID NO: 12755 - protein, 10 aa, Artificial Sequence
  Description of Artificial Sequence: Synthetic epitope
AKLLTKVTKE

SEQ ID NO: 12756 - protein, 10 aa, Artificial Sequence
  Description of Artificial Sequence: Synthetic epitope
AKLMEQESAL

SEQ ID NO: 12757 - protein, 10 aa, Artificial Sequence
  Description of Artificial Sequence: Synthetic epitope
AKLNKELASS

SEQ ID NO: 12758 - protein, 10 aa, Artificial Sequence
  Description of Artificial Sequence: Synthetic epitope
AKLNMSFGDR

SEQ ID NO: 12759 - protein, 10 aa, Artificial Sequence
  Description of Artificial Sequence: Synthetic epitope
AKLNSNLDAK

SEQ ID NO: 12760 - protein, 10 aa, Artificial Sequence
  Description of Artificial Sequence: Synthetic epitope
AKLQAKVHES

SEQ ID NO: 12761 - protein, 10 aa, Artificial Sequence
  Description of Artificial Sequence: Synthetic epitope
AKLQEAVEAN

SEQ ID NO: 12762 - protein, 10 aa, Artificial Sequence
  Description of Artificial Sequence: Synthetic epitope
AKMAEMLVEL

SEQ ID NO: 12763 - protein, 10 aa, Artificial Sequence
  Description of Artificial Sequence: Synthetic epitope
AKMATKLSGL

SEQ ID NO: 12764 - protein, 10 aa, Artificial Sequence
  Description of Artificial Sequence: Synthetic epitope
AKMEVNSEST

SEQ ID NO: 12765 - protein, 10 aa, Artificial Sequence
  Description of Artificial Sequence: Synthetic epitope
AKMIVESSQA

SEQ ID NO: 12766 - protein, 10 aa, Artificial Sequence
  Description of Artificial Sequence: Synthetic epitope
AKMKKMEMEM

SEQ ID NO: 12767 - protein, 10 aa, Artificial Sequence
  Description of Artificial Sequence: Synthetic epitope
AKMMVKIEAE

SEQ ID NO: 12768 - protein, 10 aa, Artificial Sequence
  Description of Artificial Sequence: Synthetic epitope
AKMSKSDPDK

SEQ ID NO: 12769 - protein, 10 aa, Artificial Sequence
  Description of Artificial Sequence: Synthetic epitope
AKNDKESEAQ

SEQ ID NO: 12770 - protein, 10 aa, Artificial Sequence
  Description of Artificial Sequence: Synthetic epitope
AKNRAKKQEA

SEQ ID NO: 12771 - protein, 10 aa, Artificial Sequence
  Description of Artificial Sequence: Synthetic epitope
AKNTDWEHKE

SEQ ID NO: 12772 - protein, 10 aa, Artificial Sequence
  Description of Artificial Sequence: Synthetic epitope
AKNTESSAFG

SEQ ID NO: 12773 - protein, 10 aa, Artificial Sequence
  Description of Artificial Sequence: Synthetic epitope
AKNTNNKISR

SEQ ID NO: 12774 - protein, 10 aa, Artificial Sequence
  Description of Artificial Sequence: Synthetic epitope
AKNTQTLTAD

SEQ ID NO: 12775 - protein, 10 aa, Artificial Sequence
  Description of Artificial Sequence: Synthetic epitope
AKNTRTIQRR

SEQ ID NO: 12776 - protein, 10 aa, Artificial Sequence
  Description of Artificial Sequence: Synthetic epitope
AKPAHSQNQS

SEQ ID NO: 12777 - protein, 10 aa, Artificial Sequence
  Description of Artificial Sequence: Synthetic epitope
AKPEKAAVAQ

SEQ ID NO: 12778 - protein, 10 aa, Artificial Sequence
  Description of Artificial Sequence: Synthetic epitope
AKPSSRSSDG

SEQ ID NO: 12779 - protein, 10 aa, Artificial Sequence
  Description of Artificial Sequence: Synthetic epitope
AKQKASQQRQ

SEQ ID NO: 12780 - protein, 10 aa, Artificial Sequence
  Description of Artificial Sequence: Synthetic epitope
AKQKFQVVKH

SEQ ID NO: 12781 - protein, 10 aa, Artificial Sequence
  Description of Artificial Sequence: Synthetic epitope
AKQKNGILAQ

SEQ ID NO: 12782 - protein, 10 aa, Artificial Sequence
  Description of Artificial Sequence: Synthetic epitope
AKQLVSLEAS

SEQ ID NO: 12783 - protein, 10 aa, Artificial Sequence
  Description of Artificial Sequence: Synthetic epitope
AKQRKEKEQN

SEQ ID NO: 12784 - protein, 10 aa, Artificial Sequence
  Description of Artificial Sequence: Synthetic epitope
AKQSNSSQPK

SEQ ID NO: 12785 - protein, 10 aa, Artificial Sequence
  Description of Artificial Sequence: Synthetic epitope
AKREKLILEI

SEQ ID NO: 12786 - protein, 10 aa, Artificial Sequence
  Description of Artificial Sequence: Synthetic epitope
AKRKAGTSPR

SEQ ID NO: 12787 - protein, 10 aa, Artificial Sequence
  Description of Artificial Sequence: Synthetic epitope
AKRKSVSTPV

SEQ ID NO: 12788 - protein, 10 aa, Artificial Sequence
  Description of Artificial Sequence: Synthetic epitope
AKRYQEFQNR

SEQ ID NO: 12789 - protein, 10 aa, Artificial Sequence
  Description of Artificial Sequence: Synthetic epitope
AKSAKKVKTP

SEQ ID NO: 12790 - protein, 10 aa, Artificial Sequence
  Description of Artificial Sequence: Synthetic epitope
AKSEHNPSTS

SEQ ID NO: 12791 - protein, 10 aa, Artificial Sequence
  Description of Artificial Sequence: Synthetic epitope
AKSKHKEKSD

SEQ ID NO: 12792 - protein, 10 aa, Artificial Sequence
  Description of Artificial Sequence: Synthetic epitope
AKSKNKVRGV

SEQ ID NO: 12793 - protein, 10 aa, Artificial Sequence
  Description of Artificial Sequence: Synthetic epitope
AKSLLTIQEV

SEQ ID NO: 12794 - protein, 10 aa, Artificial Sequence
  Description of Artificial Sequence: Synthetic epitope
AKSLSRPTTE

SEQ ID NO: 12795 - protein, 10 aa, Artificial Sequence
  Description of Artificial Sequence: Synthetic epitope
AKSPLAAKSP

SEQ ID NO: 12796 - protein, 10 aa, Artificial Sequence
  Description of Artificial Sequence: Synthetic epitope
AKSPSVKNDP

SEQ ID NO: 12797 - protein, 10 aa, Artificial Sequence
  Description of Artificial Sequence: Synthetic epitope
AKSQHSTKGP

SEQ ID NO: 12798 - protein, 10 aa, Artificial Sequence
  Description of Artificial Sequence: Synthetic epitope
AKSSLKESSR

SEQ ID NO: 12799 - protein, 10 aa, Artificial Sequence
  Description of Artificial Sequence: Synthetic epitope
AKSSPSKHQP

SEQ ID NO: 12800 - protein, 10 aa, Artificial Sequence
  Description of Artificial Sequence: Synthetic epitope
AKSSQIKTVS

SEQ ID NO: 12801 - protein, 10 aa, Artificial Sequence
  Description of Artificial Sequence: Synthetic epitope
AKSSQRKQRD

SEQ ID NO: 12802 - protein, 10 aa, Artificial Sequence
  Description of Artificial Sequence: Synthetic epitope
AKSSRGNGHF

SEQ ID NO: 12803 - protein, 10 aa, Artificial Sequence
  Description of Artificial Sequence: Synthetic epitope
AKSTSSKEAE

SEQ ID NO: 12804 - protein, 10 aa, Artificial Sequence
  Description of Artificial Sequence: Synthetic epitope
AKTKENVVQS

SEQ ID NO: 12805 - protein, 10 aa, Artificial Sequence
  Description of Artificial Sequence: Synthetic epitope
AKTKSLVQDL

SEQ ID NO: 12806 - protein, 10 aa, Artificial Sequence
  Description of Artificial Sequence: Synthetic epitope
AKTMALTKAR

SEQ ID NO: 12807 - protein, 10 aa, Artificial Sequence
  Description of Artificial Sequence: Synthetic epitope
AKTPQKSVSF

SEQ ID NO: 12808 - protein, 10 aa, Artificial Sequence
  Description of Artificial Sequence: Synthetic epitope
AKTRQEKAQE

SEQ ID NO: 12809 - protein, 10 aa, Artificial Sequence
  Description of Artificial Sequence: Synthetic epitope
AKTSFSLSRP

SEQ ID NO: 12810 - protein, 10 aa, Artificial Sequence
  Description of Artificial Sequence: Synthetic epitope
AKTSKGSSKK

SEQ ID NO: 12811 - protein, 10 aa, Artificial Sequence
  Description of Artificial Sequence: Synthetic epitope
AKTSNLENVK

SEQ ID NO: 12812 - protein, 10 aa, Artificial Sequence
  Description of Artificial Sequence: Synthetic epitope
AKTVEQTATT

SEQ ID NO: 12813 - protein, 10 aa, Artificial Sequence
  Description of Artificial Sequence: Synthetic epitope
AKTVMNSKTH

SEQ ID NO: 12814 - protein, 10 aa, Artificial Sequence
  Description of Artificial Sequence: Synthetic epitope
AKVAKIGTDV

SEQ ID NO: 12815 - protein, 10 aa, Artificial Sequence
  Description of Artificial Sequence: Synthetic epitope
AKVASERDTD

SEQ ID NO: 12816 - protein, 10 aa, Artificial Sequence
  Description of Artificial Sequence: Synthetic epitope
AKVASSRKQH

SEQ ID NO: 12817 - protein, 10 aa, Artificial Sequence
  Description of Artificial Sequence: Synthetic epitope
AKVEEVVRNY

SEQ ID NO: 12818 - protein, 10 aa, Artificial Sequence
  Description of Artificial Sequence: Synthetic epitope
AKVEPAVSSV

SEQ ID NO: 12819 - protein, 10 aa, Artificial Sequence
  Description of Artificial Sequence: Synthetic epitope
AKVGMDSTTV

SEQ ID NO: 12820 - protein, 10 aa, Artificial Sequence
  Description of Artificial Sequence: Synthetic epitope
AKVILQVKES

SEQ ID NO: 12821 - protein, 10 aa, Artificial Sequence
  Description of Artificial Sequence: Synthetic epitope
AKVKKTLALE

SEQ ID NO: 12822 - protein, 10 aa, Artificial Sequence
  Description of Artificial Sequence: Synthetic epitope
AKVLSRSETS

SEQ ID NO: 12823 - protein, 10 aa, Artificial Sequence
  Description of Artificial Sequence: Synthetic epitope
AKVLTQLQSV

SEQ ID NO: 12824 - protein, 10 aa, Artificial Sequence
  Description of Artificial Sequence: Synthetic epitope
AKVNKEDMSQ

SEQ ID NO: 12825 - protein, 10 aa, Artificial Sequence
  Description of Artificial Sequence: Synthetic epitope
AKVRKRASEK

SEQ ID NO: 12826 - protein, 10 aa, Artificial Sequence
  Description of Artificial Sequence: Synthetic epitope
AKVTETKGAS

SEQ ID NO: 12827 - protein, 10 aa, Artificial Sequence
  Description of Artificial Sequence: Synthetic epitope
AKVTSRKKTD

SEQ ID NO: 12828 - protein, 10 aa, Artificial Sequence
  Description of Artificial Sequence: Synthetic epitope
AKVYEASQTL

SEQ ID NO: 12829 - protein, 10 aa, Artificial Sequence
  Description of Artificial Sequence: Synthetic epitope
AKWLMMAEKS

SEQ ID NO: 12830 - protein, 10 aa, Artificial Sequence
  Description of Artificial Sequence: Synthetic epitope
AKYAEQIQKV

SEQ ID NO: 12831 - protein, 10 aa, Artificial Sequence
  Description of Artificial Sequence: Synthetic epitope
AKYSSLEAKL

SEQ ID NO: 12832 - protein, 10 aa, Artificial Sequence
  Description of Artificial Sequence: Synthetic epitope
ALAASFSEGK

SEQ ID NO: 12833 - protein, 10 aa, Artificial Sequence
  Description of Artificial Sequence: Synthetic epitope
ALAEAATPYG

SEQ ID NO: 12834 - protein, 10 aa, Artificial Sequence
  Description of Artificial Sequence: Synthetic epitope
ALAEKALYPV

SEQ ID NO: 12835 - protein, 10 aa, Artificial Sequence
  Description of Artificial Sequence: Synthetic epitope
ALAGALSKSS

SEQ ID NO: 12836 - protein, 10 aa, Artificial Sequence
  Description of Artificial Sequence: Synthetic epitope
ALAQSNEQGQ

SEQ ID NO: 12837 - protein, 10 aa, Artificial Sequence
  Description of Artificial Sequence: Synthetic epitope
ALAQVPKSSA

SEQ ID NO: 12838 - protein, 10 aa, Artificial Sequence
  Description of Artificial Sequence: Synthetic epitope
ALDERAKVLH

SEQ ID NO: 12839 - protein, 10 aa, Artificial Sequence
  Description of Artificial Sequence: Synthetic epitope
ALDTRMAAES

SEQ ID NO: 12840 - protein, 10 aa, Artificial Sequence
  Description of Artificial Sequence: Synthetic epitope
ALDVLSVVTK

SEQ ID NO: 12841 - protein, 10 aa, Artificial Sequence
  Description of Artificial Sequence: Synthetic epitope
ALEASVAQLA

SEQ ID NO: 12842 - protein, 10 aa, Artificial Sequence
  Description of Artificial Sequence: Synthetic epitope
ALEEATLSTD

SEQ ID NO: 12843 - protein, 10 aa, Artificial Sequence
  Description of Artificial Sequence: Synthetic epitope
ALEEKIRTTE

SEQ ID NO: 12844 - protein, 10 aa, Artificial Sequence
  Description of Artificial Sequence: Synthetic epitope
ALEINNANVQ

SEQ ID NO: 12845 - protein, 10 aa, Artificial Sequence
  Description of Artificial Sequence: Synthetic epitope
ALEKVSTSNE

SEQ ID NO: 12846 - protein, 10 aa, Artificial Sequence
  Description of Artificial Sequence: Synthetic epitope
ALENAAEKRE

SEQ ID NO: 12847 - protein, 10 aa, Artificial Sequence
  Description of Artificial Sequence: Synthetic epitope
ALEQKIQDSS

SEQ ID NO: 12848 - protein, 10 aa, Artificial Sequence
  Description of Artificial Sequence: Synthetic epitope
ALESLVARES

SEQ ID NO: 12849 - protein, 10 aa, Artificial Sequence
  Description of Artificial Sequence: Synthetic epitope
ALESQLMKFR

SEQ ID NO: 12850 - protein, 10 aa, Artificial Sequence
  Description of Artificial Sequence: Synthetic epitope
ALFKSSDIRS

SEQ ID NO: 12851 - protein, 10 aa, Artificial Sequence
  Description of Artificial Sequence: Synthetic epitope
ALFSSLLRQD

SEQ ID NO: 12852 - protein, 10 aa, Artificial Sequence
  Description of Artificial Sequence: Synthetic epitope
ALGAYPQIED

SEQ ID NO: 12853 - protein, 10 aa, Artificial Sequence
  Description of Artificial Sequence: Synthetic epitope
ALHSAWVTMP

SEQ ID NO: 12854 - protein, 10 aa, Artificial Sequence
  Description of Artificial Sequence: Synthetic epitope
ALIFKIASAT

SEQ ID NO: 12855 - protein, 10 aa, Artificial Sequence
  Description of Artificial Sequence: Synthetic epitope
ALIKLNKDNL

SEQ ID NO: 12856 - protein, 10 aa, Artificial Sequence
  Description of Artificial Sequence: Synthetic epitope
ALIRAEAAKI

SEQ ID NO: 12857 - protein, 10 aa, Artificial Sequence
  Description of Artificial Sequence: Synthetic epitope
ALKDKSKSGM

SEQ ID NO: 12858 - protein, 10 aa, Artificial Sequence
  Description of Artificial Sequence: Synthetic epitope
ALKISVASEP

SEQ ID NO: 12859 - protein, 10 aa, Artificial Sequence
  Description of Artificial Sequence: Synthetic epitope
ALKKILSLSE

SEQ ID NO: 12860 - protein, 10 aa, Artificial Sequence
  Description of Artificial Sequence: Synthetic epitope
ALKKSEKALD

SEQ ID NO: 12861 - protein, 10 aa, Artificial Sequence
  Description of Artificial Sequence: Synthetic epitope
ALKNYSVSRE

SEQ ID NO: 12862 - protein, 10 aa, Artificial Sequence
  Description of Artificial Sequence: Synthetic epitope
ALKQKLAQAQ

SEQ ID NO: 12863 - protein, 10 aa, Artificial Sequence
  Description of Artificial Sequence: Synthetic epitope
ALKQSKDHAA

SEQ ID NO: 12864 - protein, 10 aa, Artificial Sequence
  Description of Artificial Sequence: Synthetic epitope
ALKRSRSEEP

SEQ ID NO: 12865 - protein, 10 aa, Artificial Sequence
  Description of Artificial Sequence: Synthetic epitope
ALKSKDRKES

SEQ ID NO: 12866 - protein, 10 aa, Artificial Sequence
  Description of Artificial Sequence: Synthetic epitope
ALKTEFKANA

SEQ ID NO: 12867 - protein, 10 aa, Artificial Sequence
  Description of Artificial Sequence: Synthetic epitope
ALKTKLDLSS

SEQ ID NO: 12868 - protein, 10 aa, Artificial Sequence
  Description of Artificial Sequence: Synthetic epitope
ALKVGKQQII

SEQ ID NO: 12869 - protein, 10 aa, Artificial Sequence
  Description of Artificial Sequence: Synthetic epitope
ALKVVKKVKS

SEQ ID NO: 12870 - protein, 10 aa, Artificial Sequence
  Description of Artificial Sequence: Synthetic epitope
ALKYQIQQVD

SEQ ID NO: 12871 - protein, 10 aa, Artificial Sequence
  Description of Artificial Sequence: Synthetic epitope
ALKYSMKTSS

SEQ ID NO: 12872 - protein, 10 aa, Artificial Sequence
  Description of Artificial Sequence: Synthetic epitope
ALLADKAAQQ

SEQ ID NO: 12873 - protein, 10 aa, Artificial Sequence
  Description of Artificial Sequence: Synthetic epitope
ALLALKKQSS

SEQ ID NO: 12874 - protein, 10 aa, Artificial Sequence
  Description of Artificial Sequence: Synthetic epitope
ALLASVIQTG

SEQ ID NO: 12875 - protein, 10 aa, Artificial Sequence
  Description of Artificial Sequence: Synthetic epitope
ALLETEFSLK

SEQ ID NO: 12876 - protein, 10 aa, Artificial Sequence
  Description of Artificial Sequence: Synthetic epitope
ALLGQKSNTD

SEQ ID NO: 12877 - protein, 10 aa, Artificial Sequence
  Description of Artificial Sequence: Synthetic epitope
ALLKKTKNSE

SEQ ID NO: 12878 - protein, 10 aa, Artificial Sequence
  Description of Artificial Sequence: Synthetic epitope
ALLQARSTAE

SEQ ID NO: 12879 - protein, 10 aa, Artificial Sequence
  Description of Artificial Sequence: Synthetic epitope
ALLQSAELLE

SEQ ID NO: 12880 - protein, 10 aa, Artificial Sequence
  Description of Artificial Sequence: Synthetic epitope
ALLQVIFSPL

SEQ ID NO: 12881 - protein, 10 aa, Artificial Sequence
  Description of Artificial Sequence: Synthetic epitope
ALLQVIFSPL

SEQ ID NO: 12882 - protein, 10 aa, Artificial Sequence
  Description of Artificial Sequence: Synthetic epitope
ALLSLLFSET

SEQ ID NO: 12883 - protein, 10 aa, Artificial Sequence
  Description of Artificial Sequence: Synthetic epitope
ALLTETVRSQ

SEQ ID NO: 12884 - protein, 10 aa, Artificial Sequence
  Description of Artificial Sequence: Synthetic epitope
ALMNSVKTQL

SEQ ID NO: 12885 - protein, 10 aa, Artificial Sequence
  Description of Artificial Sequence: Synthetic epitope
ALNLIYKPYQ

SEQ ID NO: 12886 - protein, 10 aa, Artificial Sequence
  Description of Artificial Sequence: Synthetic epitope
ALNQTTESSQ

SEQ ID NO: 12887 - protein, 10 aa, Artificial Sequence
  Description of Artificial Sequence: Synthetic epitope
ALPKTAAQLK

SEQ ID NO: 12888 - protein, 10 aa, Artificial Sequence
  Description of Artificial Sequence: Synthetic epitope
ALPLIEDSSN

SEQ ID NO: 12889 - protein, 10 aa, Artificial Sequence
  Description of Artificial Sequence: Synthetic epitope
ALPLLSSQTS

SEQ ID NO: 12890 - protein, 10 aa, Artificial Sequence
  Description of Artificial Sequence: Synthetic epitope
ALPTKATKQA

SEQ ID NO: 12891 - protein, 10 aa, Artificial Sequence
  Description of Artificial Sequence: Synthetic epitope
ALQALVELGS

SEQ ID NO: 12892 - protein, 10 aa, Artificial Sequence
  Description of Artificial Sequence: Synthetic epitope
ALQEKLLASQ

SEQ ID NO: 12893 - protein, 10 aa, Artificial Sequence
  Description of Artificial Sequence: Synthetic epitope
ALQGQVLAER

SEQ ID NO: 12894 - protein, 10 aa, Artificial Sequence
  Description of Artificial Sequence: Synthetic epitope
ALQISAILDT

SEQ ID NO: 12895 - protein, 10 aa, Artificial Sequence
  Description of Artificial Sequence: Synthetic epitope
ALQKIAADMS

SEQ ID NO: 12896 - protein, 10 aa, Artificial Sequence
  Description of Artificial Sequence: Synthetic epitope
ALQKSASERA

SEQ ID NO: 12897 - protein, 10 aa, Artificial Sequence
  Description of Artificial Sequence: Synthetic epitope
ALQLLAREQQ

SEQ ID NO: 12898 - protein, 10 aa, Artificial Sequence
  Description of Artificial Sequence: Synthetic epitope
ALRARKEIAA

SEQ ID NO: 12899 - protein, 10 aa, Artificial Sequence
  Description of Artificial Sequence: Synthetic epitope
ALRDIHLEIW

SEQ ID NO: 12900 - protein, 10 aa, Artificial Sequence
  Description of Artificial Sequence: Synthetic epitope
ALRFHMAAEE

SEQ ID NO: 12901 - protein, 10 aa, Artificial Sequence
  Description of Artificial Sequence: Synthetic epitope
ALRIISVEYD

SEQ ID NO: 12902 - protein, 10 aa, Artificial Sequence
  Description of Artificial Sequence: Synthetic epitope
ALRLTARSQE

SEQ ID NO: 12903 - protein, 10 aa, Artificial Sequence
  Description of Artificial Sequence: Synthetic epitope
ALRNEEAENE

SEQ ID NO: 12904 - protein, 10 aa, Artificial Sequence
  Description of Artificial Sequence: Synthetic epitope
ALRQTNASAH

SEQ ID NO: 12905 - protein, 10 aa, Artificial Sequence
  Description of Artificial Sequence: Synthetic epitope
ALSASLARVV

SEQ ID NO: 12906 - protein, 10 aa, Artificial Sequence
  Description of Artificial Sequence: Synthetic epitope
ALSEALTELG

SEQ ID NO: 12907 - protein, 10 aa, Artificial Sequence
  Description of Artificial Sequence: Synthetic epitope
ALSFSSASDA

SEQ ID NO: 12908 - protein, 10 aa, Artificial Sequence
  Description of Artificial Sequence: Synthetic epitope
ALSKSKKAQE

SEQ ID NO: 12909 - protein, 10 aa, Artificial Sequence
  Description of Artificial Sequence: Synthetic epitope
ALSLETSEQL

SEQ ID NO: 12910 - protein, 10 aa, Artificial Sequence
  Description of Artificial Sequence: Synthetic epitope
ALSMNIVSSY

SEQ ID NO: 12911 - protein, 10 aa, Artificial Sequence
  Description of Artificial Sequence: Synthetic epitope
ALSQASTDPK

SEQ ID NO: 12912 - protein, 10 aa, Artificial Sequence
  Description of Artificial Sequence: Synthetic epitope
ALSQSLQQRS

SEQ ID NO: 12913 - protein, 10 aa, Artificial Sequence
  Description of Artificial Sequence: Synthetic epitope
ALTLASARGP

SEQ ID NO: 12914 - protein, 10 aa, Artificial Sequence
  Description of Artificial Sequence: Synthetic epitope
ALTLYRETKE

SEQ ID NO: 12915 - protein, 10 aa, Artificial Sequence
  Description of Artificial Sequence: Synthetic epitope
ALTQRLLQAL

SEQ ID NO: 12916 - protein, 10 aa, Artificial Sequence
  Description of Artificial Sequence: Synthetic epitope
ALTRYDAHKM

SEQ ID NO: 12917 - protein, 10 aa, Artificial Sequence
  Description of Artificial Sequence: Synthetic epitope
ALVKNKTAAT

SEQ ID NO: 12918 - protein, 10 aa, Artificial Sequence
  Description of Artificial Sequence: Synthetic epitope
ALVLEKTNNL

SEQ ID NO: 12919 - protein, 10 aa, Artificial Sequence
  Description of Artificial Sequence: Synthetic epitope
ALVQSSVDIK

SEQ ID NO: 12920 - protein, 10 aa, Artificial Sequence
  Description of Artificial Sequence: Synthetic epitope
ALVRQISSAM

SEQ ID NO: 12921 - protein, 10 aa, Artificial Sequence
  Description of Artificial Sequence: Synthetic epitope
ALVVETSTAA

SEQ ID NO: 12922 - protein, 10 aa, Artificial Sequence
  Description of Artificial Sequence: Synthetic epitope
ALWVKKEFSK

SEQ ID NO: 12923 - protein, 10 aa, Artificial Sequence
  Description of Artificial Sequence: Synthetic epitope
ALYTMLSEAG

SEQ ID NO: 12924 - protein, 10 aa, Artificial Sequence
  Description of Artificial Sequence: Synthetic epitope
AMAGRASSKD

SEQ ID NO: 12925 - protein, 10 aa, Artificial Sequence
  Description of Artificial Sequence: Synthetic epitope
AMAPLSSGIN

SEQ ID NO: 12926 - protein, 10 aa, Artificial Sequence
  Description of Artificial Sequence: Synthetic epitope
AMASYAASPS

SEQ ID NO: 12927 - protein, 10 aa, Artificial Sequence
  Description of Artificial Sequence: Synthetic epitope
AMATEIFQPP

SEQ ID NO: 12928 - protein, 10 aa, Artificial Sequence
  Description of Artificial Sequence: Synthetic epitope
AMATLPVKPD

SEQ ID NO: 12929 - protein, 10 aa, Artificial Sequence
  Description of Artificial Sequence: Synthetic epitope
AMAVETGLLP

SEQ ID NO: 12930 - protein, 10 aa, Artificial Sequence
  Description of Artificial Sequence: Synthetic epitope
AMDMQISQIK

SEQ ID NO: 12931 - protein, 10 aa, Artificial Sequence
  Description of Artificial Sequence: Synthetic epitope
AMEELITKQR

SEQ ID NO: 12932 - protein, 10 aa, Artificial Sequence
  Description of Artificial Sequence: Synthetic epitope
AMEKNASNLV

SEQ ID NO: 12933 - protein, 10 aa, Artificial Sequence
  Description of Artificial Sequence: Synthetic epitope
AMELEQSRNL

SEQ ID NO: 12934 - protein, 10 aa, Artificial Sequence
  Description of Artificial Sequence: Synthetic epitope
AMHNKAAPPQ

SEQ ID NO: 12935 - protein, 10 aa, Artificial Sequence
  Description of Artificial Sequence: Synthetic epitope
AMKRAALLEK

SEQ ID NO: 12936 - protein, 10 aa, Artificial Sequence
  Description of Artificial Sequence: Synthetic epitope
AMKWLEFDQK

SEQ ID NO: 12937 - protein, 10 aa, Artificial Sequence
  Description of Artificial Sequence: Synthetic epitope
AMLNASKQQV

SEQ ID NO: 12938 - protein, 10 aa, Artificial Sequence
  Description of Artificial Sequence: Synthetic epitope
AMLNQLSQLN

SEQ ID NO: 12939 - protein, 10 aa, Artificial Sequence
  Description of Artificial Sequence: Synthetic epitope
AMLTELRKEV

SEQ ID NO: 12940 - protein, 10 aa, Artificial Sequence
  Description of Artificial Sequence: Synthetic epitope
AMLVEITERA

SEQ ID NO: 12941 - protein, 10 aa, Artificial Sequence
  Description of Artificial Sequence: Synthetic epitope
AMMNRKDELE

SEQ ID NO: 12942 - protein, 10 aa, Artificial Sequence
  Description of Artificial Sequence: Synthetic epitope
AMQKDGTSST

SEQ ID NO: 12943 - protein, 10 aa, Artificial Sequence
  Description of Artificial Sequence: Synthetic epitope
AMRAKSQDTH

SEQ ID NO: 12944 - protein, 10 aa, Artificial Sequence
  Description of Artificial Sequence: Synthetic epitope
AMRITKWKEK

SEQ ID NO: 12945 - protein, 10 aa, Artificial Sequence
  Description of Artificial Sequence: Synthetic epitope
AMRVMSIERK

SEQ ID NO: 12946 - protein, 10 aa, Artificial Sequence
  Description of Artificial Sequence: Synthetic epitope
AMSFKEKQLV

SEQ ID NO: 12947 - protein, 10 aa, Artificial Sequence
  Description of Artificial Sequence: Synthetic epitope
AMSSDGSLAE

SEQ ID NO: 12948 - protein, 10 aa, Artificial Sequence
  Description of Artificial Sequence: Synthetic epitope
AMSSMEEIQV

SEQ ID NO: 12949 - protein, 10 aa, Artificial Sequence
  Description of Artificial Sequence: Synthetic epitope
AMSTDAYPKN

SEQ ID NO: 12950 - protein, 10 aa, Artificial Sequence
  Description of Artificial Sequence: Synthetic epitope
AMSTQMFQTK

SEQ ID NO: 12951 - protein, 10 aa, Artificial Sequence
  Description of Artificial Sequence: Synthetic epitope
AMTLAARKSG

SEQ ID NO: 12952 - protein, 10 aa, Artificial Sequence
  Description of Artificial Sequence: Synthetic epitope
AMTLKTNQVA

SEQ ID NO: 12953 - protein, 10 aa, Artificial Sequence
  Description of Artificial Sequence: Synthetic epitope
AMTSVSQASL

SEQ ID NO: 12954 - protein, 10 aa, Artificial Sequence
  Description of Artificial Sequence: Synthetic epitope
AMTTAMADER

SEQ ID NO: 12955 - protein, 10 aa, Artificial Sequence
  Description of Artificial Sequence: Synthetic epitope
AMTTSLMTVP

SEQ ID NO: 12956 - protein, 10 aa, Artificial Sequence
  Description of Artificial Sequence: Synthetic epitope
AMTVSIKNMK

SEQ ID NO: 12957 - protein, 10 aa, Artificial Sequence
  Description of Artificial Sequence: Synthetic epitope
AMVAKVNTSK

SEQ ID NO: 12958 - protein, 10 aa, Artificial Sequence
  Description of Artificial Sequence: Synthetic epitope
AMVALSNKLK

SEQ ID NO: 12959 - protein, 10 aa, Artificial Sequence
  Description of Artificial Sequence: Synthetic epitope
AMVEAAMEEG

SEQ ID NO: 12960 - protein, 10 aa, Artificial Sequence
  Description of Artificial Sequence: Synthetic epitope
AMVIEISNKT

SEQ ID NO: 12961 - protein, 10 aa, Artificial Sequence
  Description of Artificial Sequence: Synthetic epitope
AMVQQLLQKK

SEQ ID NO: 12962 - protein, 10 aa, Artificial Sequence
  Description of Artificial Sequence: Synthetic epitope
ANAELSEKSG

SEQ ID NO: 12963 - protein, 10 aa, Artificial Sequence
  Description of Artificial Sequence: Synthetic epitope
ANASPLTLMT

SEQ ID NO: 12964 - protein, 10 aa, Artificial Sequence
  Description of Artificial Sequence: Synthetic epitope
ANASSKLQEA

SEQ ID NO: 12965 - protein, 10 aa, Artificial Sequence
  Description of Artificial Sequence: Synthetic epitope
ANATSLPVQD

SEQ ID NO: 12966 - protein, 10 aa, Artificial Sequence
  Description of Artificial Sequence: Synthetic epitope
ANDDHSVRVA

SEQ ID NO: 12967 - protein, 10 aa, Artificial Sequence
  Description of Artificial Sequence: Synthetic epitope
ANDIAKMSRK

SEQ ID NO: 12968 - protein, 10 aa, Artificial Sequence
  Description of Artificial Sequence: Synthetic epitope
ANDMKVSLGK

SEQ ID NO: 12969 - protein, 10 aa, Artificial Sequence
  Description of Artificial Sequence: Synthetic epitope
ANDRDQEMHI

SEQ ID NO: 12970 - protein, 10 aa, Artificial Sequence
  Description of Artificial Sequence: Synthetic epitope
ANDSSKAIGL

SEQ ID NO: 12971 - protein, 10 aa, Artificial Sequence
  Description of Artificial Sequence: Synthetic epitope
ANERVGQREQ

SEQ ID NO: 12972 - protein, 10 aa, Artificial Sequence
  Description of Artificial Sequence: Synthetic epitope
ANESVSLKLT

SEQ ID NO: 12973 - protein, 10 aa, Artificial Sequence
  Description of Artificial Sequence: Synthetic epitope
ANFASSARAG

SEQ ID NO: 12974 - protein, 10 aa, Artificial Sequence
  Description of Artificial Sequence: Synthetic epitope
ANGIVVPSTI

SEQ ID NO: 12975 - protein, 10 aa, Artificial Sequence
  Description of Artificial Sequence: Synthetic epitope
ANGLAKSSTT

SEQ ID NO: 12976 - protein, 10 aa, Artificial Sequence
  Description of Artificial Sequence: Synthetic epitope
ANHLTTSMSG

SEQ ID NO: 12977 - protein, 10 aa, Artificial Sequence
  Description of Artificial Sequence: Synthetic epitope
ANHTGYIKVD

SEQ ID NO: 12978 - protein, 10 aa, Artificial Sequence
  Description of Artificial Sequence: Synthetic epitope
ANHVKYFKVR

SEQ ID NO: 12979 - protein, 10 aa, Artificial Sequence
  Description of Artificial Sequence: Synthetic epitope
ANIGQKTSMN

SEQ ID NO: 12980 - protein, 10 aa, Artificial Sequence
  Description of Artificial Sequence: Synthetic epitope
ANIKRQLMTN

SEQ ID NO: 12981 - protein, 10 aa, Artificial Sequence
  Description of Artificial Sequence: Synthetic epitope
ANINSTSISD

SEQ ID NO: 12982 - protein, 10 aa, Artificial Sequence
  Description of Artificial Sequence: Synthetic epitope
ANISEKSVMH

SEQ ID NO: 12983 - protein, 10 aa, Artificial Sequence
  Description of Artificial Sequence: Synthetic epitope
ANIVDQSHLH

SEQ ID NO: 12984 - protein, 10 aa, Artificial Sequence
  Description of Artificial Sequence: Synthetic epitope
ANKDKLLRLK

SEQ ID NO: 12985 - protein, 10 aa, Artificial Sequence
  Description of Artificial Sequence: Synthetic epitope
ANKGVIAALQ

SEQ ID NO: 12986 - protein, 10 aa, Artificial Sequence
  Description of Artificial Sequence: Synthetic epitope
ANKHIDQVYN

SEQ ID NO: 12987 - protein, 10 aa, Artificial Sequence
  Description of Artificial Sequence: Synthetic epitope
ANKRFQAEGG

SEQ ID NO: 12988 - protein, 10 aa, Artificial Sequence
  Description of Artificial Sequence: Synthetic epitope
ANLENKLLGK

SEQ ID NO: 12989 - protein, 10 aa, Artificial Sequence
  Description of Artificial Sequence: Synthetic epitope
ANLKEKKERN

SEQ ID NO: 12990 - protein, 10 aa, Artificial Sequence
  Description of Artificial Sequence: Synthetic epitope
ANLTNSTEEL

SEQ ID NO: 12991 - protein, 10 aa, Artificial Sequence
  Description of Artificial Sequence: Synthetic epitope
ANLTSWPRWL

SEQ ID NO: 12992 - protein, 10 aa, Artificial Sequence
  Description of Artificial Sequence: Synthetic epitope
ANMKIQKRIP

SEQ ID NO: 12993 - protein, 10 aa, Artificial Sequence
  Description of Artificial Sequence: Synthetic epitope
ANMKSSQYIP

SEQ ID NO: 12994 - protein, 10 aa, Artificial Sequence
  Description of Artificial Sequence: Synthetic epitope
ANMRSAKSAS

SEQ ID NO: 12995 - protein, 10 aa, Artificial Sequence
  Description of Artificial Sequence: Synthetic epitope
ANNLQVNALV

SEQ ID NO: 12996 - protein, 10 aa, Artificial Sequence
  Description of Artificial Sequence: Synthetic epitope
ANNSMSKKLM

SEQ ID NO: 12997 - protein, 10 aa, Artificial Sequence
  Description of Artificial Sequence: Synthetic epitope
ANQIADLERQ

SEQ ID NO: 12998 - protein, 10 aa, Artificial Sequence
  Description of Artificial Sequence: Synthetic epitope
ANRAKDIKSS

SEQ ID NO: 12999 - protein, 10 aa, Artificial Sequence
  Description of Artificial Sequence: Synthetic epitope
ANRDAALSSH

SEQ ID NO: 13000 - protein, 10 aa, Artificial Sequence
  Description of Artificial Sequence: Synthetic epitope
ANRELKKDAQ

SEQ ID NO: 13001 - protein, 10 aa, Artificial Sequence
  Description of Artificial Sequence: Synthetic epitope
ANRLNVNATD

SEQ ID NO: 13002 - protein, 10 aa, Artificial Sequence
  Description of Artificial Sequence: Synthetic epitope
ANRSSNVFTE

SEQ ID NO: 13003 - protein, 10 aa, Artificial Sequence
  Description of Artificial Sequence: Synthetic epitope
ANRSVSAADV

SEQ ID NO: 13004 - protein, 10 aa, Artificial Sequence
  Description of Artificial Sequence: Synthetic epitope
ANRVKTSQPP

SEQ ID NO: 13005 - protein, 10 aa, Artificial Sequence
  Description of Artificial Sequence: Synthetic epitope
ANRVSVSQRR

SEQ ID NO: 13006 - protein, 10 aa, Artificial Sequence
  Description of Artificial Sequence: Synthetic epitope
ANSESKTANK

SEQ ID NO: 13007 - protein, 10 aa, Artificial Sequence
  Description of Artificial Sequence: Synthetic epitope
ANSLVTLGSH

SEQ ID NO: 13008 - protein, 10 aa, Artificial Sequence
  Description of Artificial Sequence: Synthetic epitope
ANSQNQSLSE

SEQ ID NO: 13009 - protein, 10 aa, Artificial Sequence
  Description of Artificial Sequence: Synthetic epitope
ANSRGREKPR

SEQ ID NO: 13010 - protein, 10 aa, Artificial Sequence
  Description of Artificial Sequence: Synthetic epitope
ANSRSAATVR

SEQ ID NO: 13011 - protein, 10 aa, Artificial Sequence
  Description of Artificial Sequence: Synthetic epitope
ANTFITYTTQ

SEQ ID NO: 13012 - protein, 10 aa, Artificial Sequence
  Description of Artificial Sequence: Synthetic epitope
ANTKATSQFK

SEQ ID NO: 13013 - protein, 10 aa, Artificial Sequence
  Description of Artificial Sequence: Synthetic epitope
ANTLEDGGMT

SEQ ID NO: 13014 - protein, 10 aa, Artificial Sequence
  Description of Artificial Sequence: Synthetic epitope
ANVPNMPALQ

SEQ ID NO: 13015 - protein, 10 aa, Artificial Sequence
  Description of Artificial Sequence: Synthetic epitope
ANVVRQVQTS

SEQ ID NO: 13016 - protein, 10 aa, Artificial Sequence
  Description of Artificial Sequence: Synthetic epitope
ANYNSAKMAL

SEQ ID NO: 13017 - protein, 10 aa, Artificial Sequence
  Description of Artificial Sequence: Synthetic epitope
APAANSDQTV

SEQ ID NO: 13018 - protein, 10 aa, Artificial Sequence
  Description of Artificial Sequence: Synthetic epitope
APADRSATPA

SEQ ID NO: 13019 - protein, 10 aa, Artificial Sequence
  Description of Artificial Sequence: Synthetic epitope
APADSLNDPA

SEQ ID NO: 13020 - protein, 10 aa, Artificial Sequence
  Description of Artificial Sequence: Synthetic epitope
APALATVSLA

SEQ ID NO: 13021 - protein, 10 aa, Artificial Sequence
  Description of Artificial Sequence: Synthetic epitope
APAQASSNSS

SEQ ID NO: 13022 - protein, 10 aa, Artificial Sequence
  Description of Artificial Sequence: Synthetic epitope
APASEVEGQK

SEQ ID NO: 13023 - protein, 10 aa, Artificial Sequence
  Description of Artificial Sequence: Synthetic epitope
APASSASQAL

SEQ ID NO: 13024 - protein, 10 aa, Artificial Sequence
  Description of Artificial Sequence: Synthetic epitope
APASTNTTAT

SEQ ID NO: 13025 - protein, 10 aa, Artificial Sequence
  Description of Artificial Sequence: Synthetic epitope
APASVHSEIT

SEQ ID NO: 13026 - protein, 10 aa, Artificial Sequence
  Description of Artificial Sequence: Synthetic epitope
APDTLKESQA

SEQ ID NO: 13027 - protein, 10 aa, Artificial Sequence
  Description of Artificial Sequence: Synthetic epitope
APEAETERVE

SEQ ID NO: 13028 - protein, 10 aa, Artificial Sequence
  Description of Artificial Sequence: Synthetic epitope
APEEAIATQI

SEQ ID NO: 13029 - protein, 10 aa, Artificial Sequence
  Description of Artificial Sequence: Synthetic epitope
APEHVTAQKM

SEQ ID NO: 13030 - protein, 10 aa, Artificial Sequence
  Description of Artificial Sequence: Synthetic epitope
APELSLSSQD

SEQ ID NO: 13031 - protein, 10 aa, Artificial Sequence
  Description of Artificial Sequence: Synthetic epitope
APEQEQAAPG

SEQ ID NO: 13032 - protein, 10 aa, Artificial Sequence
  Description of Artificial Sequence: Synthetic epitope
APEQVETEAT

SEQ ID NO: 13033 - protein, 10 aa, Artificial Sequence
  Description of Artificial Sequence: Synthetic epitope
APETFVQLDQ

SEQ ID NO: 13034 - protein, 10 aa, Artificial Sequence
  Description of Artificial Sequence: Synthetic epitope
APGLAVAPRQ

SEQ ID NO: 13035 - protein, 10 aa, Artificial Sequence
  Description of Artificial Sequence: Synthetic epitope
APITVSKEAP

SEQ ID NO: 13036 - protein, 10 aa, Artificial Sequence
  Description of Artificial Sequence: Synthetic epitope
APKIIDEQLV

SEQ ID NO: 13037 - protein, 10 aa, Artificial Sequence
  Description of Artificial Sequence: Synthetic epitope
APKKDVKQPE

SEQ ID NO: 13038 - protein, 10 aa, Artificial Sequence
  Description of Artificial Sequence: Synthetic epitope
APKKQLLSRL

SEQ ID NO: 13039 - protein, 10 aa, Artificial Sequence
  Description of Artificial Sequence: Synthetic epitope
APKKSVSKAG

SEQ ID NO: 13040 - protein, 10 aa, Artificial Sequence
  Description of Artificial Sequence: Synthetic epitope
APKVLLAEEG

SEQ ID NO: 13041 - protein, 10 aa, Artificial Sequence
  Description of Artificial Sequence: Synthetic epitope
APKYAATHPK

SEQ ID NO: 13042 - protein, 10 aa, Artificial Sequence
  Description of Artificial Sequence: Synthetic epitope
APLADQILAG

SEQ ID NO: 13043 - protein, 10 aa, Artificial Sequence
  Description of Artificial Sequence: Synthetic epitope
APLVASGAVQ

SEQ ID NO: 13044 - protein, 10 aa, Artificial Sequence
  Description of Artificial Sequence: Synthetic epitope
APNAASLAPT

SEQ ID NO: 13045 - protein, 10 aa, Artificial Sequence
  Description of Artificial Sequence: Synthetic epitope
APNNGARLSS

SEQ ID NO: 13046 - protein, 10 aa, Artificial Sequence
  Description of Artificial Sequence: Synthetic epitope
APNSYIDIEA

SEQ ID NO: 13047 - protein, 10 aa, Artificial Sequence
  Description of Artificial Sequence: Synthetic epitope
APNTFKTLDS

SEQ ID NO: 13048 - protein, 10 aa, Artificial Sequence
  Description of Artificial Sequence: Synthetic epitope
APQNAVSSEE

SEQ ID NO: 13049 - protein, 10 aa, Artificial Sequence
  Description of Artificial Sequence: Synthetic epitope
APQSLGSSAS

SEQ ID NO: 13050 - protein, 10 aa, Artificial Sequence
  Description of Artificial Sequence: Synthetic epitope
APRASAAKPP

SEQ ID NO: 13051 - protein, 10 aa, Artificial Sequence
  Description of Artificial Sequence: Synthetic epitope
APRVTISPEF

SEQ ID NO: 13052 - protein, 10 aa, Artificial Sequence
  Description of Artificial Sequence: Synthetic epitope
APSASKLKKL

SEQ ID NO: 13053 - protein, 10 aa, Artificial Sequence
  Description of Artificial Sequence: Synthetic epitope
APSESLLREH

SEQ ID NO: 13054 - protein, 10 aa, Artificial Sequence
  Description of Artificial Sequence: Synthetic epitope
APSLKSSKVR

SEQ ID NO: 13055 - protein, 10 aa, Artificial Sequence
  Description of Artificial Sequence: Synthetic epitope
APSLTDKAQM

SEQ ID NO: 13056 - protein, 10 aa, Artificial Sequence
  Description of Artificial Sequence: Synthetic epitope
APSTAVTARL

SEQ ID NO: 13057 - protein, 10 aa, Artificial Sequence
  Description of Artificial Sequence: Synthetic epitope
APSTSNSQSD

SEQ ID NO: 13058 - protein, 10 aa, Artificial Sequence
  Description of Artificial Sequence: Synthetic epitope
APSVLESVKE

SEQ ID NO: 13059 - protein, 10 aa, Artificial Sequence
  Description of Artificial Sequence: Synthetic epitope
APTESDQSFP

SEQ ID NO: 13060 - protein, 10 aa, Artificial Sequence
  Description of Artificial Sequence: Synthetic epitope
APTSRLSVKQ

SEQ ID NO: 13061 - protein, 10 aa, Artificial Sequence
  Description of Artificial Sequence: Synthetic epitope
APVASASPKL

SEQ ID NO: 13062 - protein, 10 aa, Artificial Sequence
  Description of Artificial Sequence: Synthetic epitope
APVDFQLLTQ

SEQ ID NO: 13063 - protein, 10 aa, Artificial Sequence
  Description of Artificial Sequence: Synthetic epitope
APVETLENII

SEQ ID NO: 13064 - protein, 10 aa, Artificial Sequence
  Description of Artificial Sequence: Synthetic epitope
APVTSTGSTT

SEQ ID NO: 13065 - protein, 10 aa, Artificial Sequence
  Description of Artificial Sequence: Synthetic epitope
AQAEEDLRAS

SEQ ID NO: 13066 - protein, 10 aa, Artificial Sequence
  Description of Artificial Sequence: Synthetic epitope
AQAEELAGYE

SEQ ID NO: 13067 - protein, 10 aa, Artificial Sequence
  Description of Artificial Sequence: Synthetic epitope
AQAKALAQED

SEQ ID NO: 13068 - protein, 10 aa, Artificial Sequence
  Description of Artificial Sequence: Synthetic epitope
AQAKKFNDPN

SEQ ID NO: 13069 - protein, 10 aa, Artificial Sequence
  Description of Artificial Sequence: Synthetic epitope
AQAKRKSIYE

SEQ ID NO: 13070 - protein, 10 aa, Artificial Sequence
  Description of Artificial Sequence: Synthetic epitope
AQALEKLEAA

SEQ ID NO: 13071 - protein, 10 aa, Artificial Sequence
  Description of Artificial Sequence: Synthetic epitope
AQALSTVEEK

SEQ ID NO: 13072 - protein, 10 aa, Artificial Sequence
  Description of Artificial Sequence: Synthetic epitope
AQAMSLSLEQ

SEQ ID NO: 13073 - protein, 10 aa, Artificial Sequence
  Description of Artificial Sequence: Synthetic epitope
AQANDQMEIL

SEQ ID NO: 13074 - protein, 10 aa, Artificial Sequence
  Description of Artificial Sequence: Synthetic epitope
AQAPVRNGRY

SEQ ID NO: 13075 - protein, 10 aa, Artificial Sequence
  Description of Artificial Sequence: Synthetic epitope
AQAQEQERRE

SEQ ID NO: 13076 - protein, 10 aa, Artificial Sequence
  Description of Artificial Sequence: Synthetic epitope
AQAQESSLRQ

SEQ ID NO: 13077 - protein, 10 aa, Artificial Sequence
  Description of Artificial Sequence: Synthetic epitope
AQAQQARQDA

SEQ ID NO: 13078 - protein, 10 aa, Artificial Sequence
  Description of Artificial Sequence: Synthetic epitope
AQARAIAENE

SEQ ID NO: 13079 - protein, 10 aa, Artificial Sequence
  Description of Artificial Sequence: Synthetic epitope
AQARDQTAAL

SEQ ID NO: 13080 - protein, 10 aa, Artificial Sequence
  Description of Artificial Sequence: Synthetic epitope
AQASAGHKAK

SEQ ID NO: 13081 - protein, 10 aa, Artificial Sequence
  Description of Artificial Sequence: Synthetic epitope
AQASSRNSKK

SEQ ID NO: 13082 - protein, 10 aa, Artificial Sequence
  Description of Artificial Sequence: Synthetic epitope
AQASVGSRSE

SEQ ID NO: 13083 - protein, 10 aa, Artificial Sequence
  Description of Artificial Sequence: Synthetic epitope
AQDGAISTDA

SEQ ID NO: 13084 - protein, 10 aa, Artificial Sequence
  Description of Artificial Sequence: Synthetic epitope
AQDLATVRQK

SEQ ID NO: 13085 - protein, 10 aa, Artificial Sequence
  Description of Artificial Sequence: Synthetic epitope
AQDLFLDGVP

SEQ ID NO: 13086 - protein, 10 aa, Artificial Sequence
  Description of Artificial Sequence: Synthetic epitope
AQDSAFLNDA

SEQ ID NO: 13087 - protein, 10 aa, Artificial Sequence
  Description of Artificial Sequence: Synthetic epitope
AQDVIWQNAS

SEQ ID NO: 13088 - protein, 10 aa, Artificial Sequence
  Description of Artificial Sequence: Synthetic epitope
AQEESARTNA

SEQ ID NO: 13089 - protein, 10 aa, Artificial Sequence
  Description of Artificial Sequence: Synthetic epitope
AQEGQFTEPR

SEQ ID NO: 13090 - protein, 10 aa, Artificial Sequence
  Description of Artificial Sequence: Synthetic epitope
AQEGSAKAER

SEQ ID NO: 13091 - protein, 10 aa, Artificial Sequence
  Description of Artificial Sequence: Synthetic epitope
AQEKAADVEN

SEQ ID NO: 13092 - protein, 10 aa, Artificial Sequence
  Description of Artificial Sequence: Synthetic epitope
AQEKDQEMER

SEQ ID NO: 13093 - protein, 10 aa, Artificial Sequence
  Description of Artificial Sequence: Synthetic epitope
AQEKGTADAA

SEQ ID NO: 13094 - protein, 10 aa, Artificial Sequence
  Description of Artificial Sequence: Synthetic epitope
AQEQESEREL

SEQ ID NO: 13095 - protein, 10 aa, Artificial Sequence
  Description of Artificial Sequence: Synthetic epitope
AQEVAELIDQ

SEQ ID NO: 13096 - protein, 10 aa, Artificial Sequence
  Description of Artificial Sequence: Synthetic epitope
AQEVRSATDG

SEQ ID NO: 13097 - protein, 10 aa, Artificial Sequence
  Description of Artificial Sequence: Synthetic epitope
AQFPERIATR

SEQ ID NO: 13098 - protein, 10 aa, Artificial Sequence
  Description of Artificial Sequence: Synthetic epitope
AQFQTSQFWI

SEQ ID NO: 13099 - protein, 10 aa, Artificial Sequence
  Description of Artificial Sequence: Synthetic epitope
AQFRQRSQAE

SEQ ID NO: 13100 - protein, 10 aa, Artificial Sequence
  Description of Artificial Sequence: Synthetic epitope
AQFSKSIEVI

SEQ ID NO: 13101 - protein, 10 aa, Artificial Sequence
  Description of Artificial Sequence: Synthetic epitope
AQFSSETALK

SEQ ID NO: 13102 - protein, 10 aa, Artificial Sequence
  Description of Artificial Sequence: Synthetic epitope
AQGIQKSPKG

SEQ ID NO: 13103 - protein, 10 aa, Artificial Sequence
  Description of Artificial Sequence: Synthetic epitope
AQGQAQNSAQ

SEQ ID NO: 13104 - protein, 10 aa, Artificial Sequence
  Description of Artificial Sequence: Synthetic epitope
AQGVALQTMK

SEQ ID NO: 13105 - protein, 10 aa, Artificial Sequence
  Description of Artificial Sequence: Synthetic epitope
AQHRKAVSDM

SEQ ID NO: 13106 - protein, 10 aa, Artificial Sequence
  Description of Artificial Sequence: Synthetic epitope
AQIEDSSVVK

SEQ ID NO: 13107 - protein, 10 aa, Artificial Sequence
  Description of Artificial Sequence: Synthetic epitope
AQIKATVKRK

SEQ ID NO: 13108 - protein, 10 aa, Artificial Sequence
  Description of Artificial Sequence: Synthetic epitope
AQIKHENEQD

SEQ ID NO: 13109 - protein, 10 aa, Artificial Sequence
  Description of Artificial Sequence: Synthetic epitope
AQIREEKKRK

SEQ ID NO: 13110 - protein, 10 aa, Artificial Sequence
  Description of Artificial Sequence: Synthetic epitope
AQKAAEAEQE

SEQ ID NO: 13111 - protein, 10 aa, Artificial Sequence
  Description of Artificial Sequence: Synthetic epitope
AQKASEASKV

SEQ ID NO: 13112 - protein, 10 aa, Artificial Sequence
  Description of Artificial Sequence: Synthetic epitope
AQKETIAKLE

SEQ ID NO: 13113 - protein, 10 aa, Artificial Sequence
  Description of Artificial Sequence: Synthetic epitope
AQKGPTLTTK

SEQ ID NO: 13114 - protein, 10 aa, Artificial Sequence
  Description of Artificial Sequence: Synthetic epitope
AQKGVGAEST

SEQ ID NO: 13115 - protein, 10 aa, Artificial Sequence
  Description of Artificial Sequence: Synthetic epitope
AQKLKESAVR

SEQ ID NO: 13116 - protein, 10 aa, Artificial Sequence
  Description of Artificial Sequence: Synthetic epitope
AQKLRSVKIE

SEQ ID NO: 13117 - protein, 10 aa, Artificial Sequence
  Description of Artificial Sequence: Synthetic epitope
AQKPAADADL

SEQ ID NO: 13118 - protein, 10 aa, Artificial Sequence
  Description of Artificial Sequence: Synthetic epitope
AQKRKKSTKE

SEQ ID NO: 13119 - protein, 10 aa, Artificial Sequence
  Description of Artificial Sequence: Synthetic epitope
AQKTALRISQ

SEQ ID NO: 13120 - protein, 10 aa, Artificial Sequence
  Description of Artificial Sequence: Synthetic epitope
AQKVDNAQAF

SEQ ID NO: 13121 - protein, 10 aa, Artificial Sequence
  Description of Artificial Sequence: Synthetic epitope
AQLDAISEKV

SEQ ID NO: 13122 - protein, 10 aa, Artificial Sequence
  Description of Artificial Sequence: Synthetic epitope
AQLESILKEA

SEQ ID NO: 13123 - protein, 10 aa, Artificial Sequence
  Description of Artificial Sequence: Synthetic epitope
AQLETSSEVQ

SEQ ID NO: 13124 - protein, 10 aa, Artificial Sequence
  Description of Artificial Sequence: Synthetic epitope
AQLEVKVASE

SEQ ID NO: 13125 - protein, 10 aa, Artificial Sequence
  Description of Artificial Sequence: Synthetic epitope
AQLIEKEEQR

SEQ ID NO: 13126 - protein, 10 aa, Artificial Sequence
  Description of Artificial Sequence: Synthetic epitope
AQLIKEKMNT

SEQ ID NO: 13127 - protein, 10 aa, Artificial Sequence
  Description of Artificial Sequence: Synthetic epitope
AQLKEEKMEE

SEQ ID NO: 13128 - protein, 10 aa, Artificial Sequence
  Description of Artificial Sequence: Synthetic epitope
AQLKSQVNAL

SEQ ID NO: 13129 - protein, 10 aa, Artificial Sequence
  Description of Artificial Sequence: Synthetic epitope
AQLKSSKVVH

SEQ ID NO: 13130 - protein, 10 aa, Artificial Sequence
  Description of Artificial Sequence: Synthetic epitope
AQLLESSVQN

SEQ ID NO: 13131 - protein, 10 aa, Artificial Sequence
  Description of Artificial Sequence: Synthetic epitope
AQLLSKADDL

SEQ ID NO: 13132 - protein, 10 aa, Artificial Sequence
  Description of Artificial Sequence: Synthetic epitope
AQLLTSFSEK

SEQ ID NO: 13133 - protein, 10 aa, Artificial Sequence
  Description of Artificial Sequence: Synthetic epitope
AQLYSTLKEG

SEQ ID NO: 13134 - protein, 10 aa, Artificial Sequence
  Description of Artificial Sequence: Synthetic epitope
AQMPALFPRE

SEQ ID NO: 13135 - protein, 10 aa, Artificial Sequence
  Description of Artificial Sequence: Synthetic epitope
AQNELSAATH

SEQ ID NO: 13136 - protein, 10 aa, Artificial Sequence
  Description of Artificial Sequence: Synthetic epitope
AQNLVDLPMF

SEQ ID NO: 13137 - protein, 10 aa, Artificial Sequence
  Description of Artificial Sequence: Synthetic epitope
AQNSKASSKG

SEQ ID NO: 13138 - protein, 10 aa, Artificial Sequence
  Description of Artificial Sequence: Synthetic epitope
AQNSLEQMSS

SEQ ID NO: 13139 - protein, 10 aa, Artificial Sequence
  Description of Artificial Sequence: Synthetic epitope
AQPGALKSQR

SEQ ID NO: 13140 - protein, 10 aa, Artificial Sequence
  Description of Artificial Sequence: Synthetic epitope
AQPKEAAVQS

SEQ ID NO: 13141 - protein, 10 aa, Artificial Sequence
  Description of Artificial Sequence: Synthetic epitope
AQPQVKSQPP

SEQ ID NO: 13142 - protein, 10 aa, Artificial Sequence
  Description of Artificial Sequence: Synthetic epitope
AQPSQNNYWK

SEQ ID NO: 13143 - protein, 10 aa, Artificial Sequence
  Description of Artificial Sequence: Synthetic epitope
AQQAELSQAA

SEQ ID NO: 13144 - protein, 10 aa, Artificial Sequence
  Description of Artificial Sequence: Synthetic epitope
AQQAKGSSVH

SEQ ID NO: 13145 - protein, 10 aa, Artificial Sequence
  Description of Artificial Sequence: Synthetic epitope
AQQAQVVTTV

SEQ ID NO: 13146 - protein, 10 aa, Artificial Sequence
  Description of Artificial Sequence: Synthetic epitope
AQQEKEDAKR

SEQ ID NO: 13147 - protein, 10 aa, Artificial Sequence
  Description of Artificial Sequence: Synthetic epitope
AQQERHKSQD

SEQ ID NO: 13148 - protein, 10 aa, Artificial Sequence
  Description of Artificial Sequence: Synthetic epitope
AQQGKQEEND

SEQ ID NO: 13149 - protein, 10 aa, Artificial Sequence
  Description of Artificial Sequence: Synthetic epitope
AQQITTPGAQ

SEQ ID NO: 13150 - protein, 10 aa, Artificial Sequence
  Description of Artificial Sequence: Synthetic epitope
AQQIYIVLTA

SEQ ID NO: 13151 - protein, 10 aa, Artificial Sequence
  Description of Artificial Sequence: Synthetic epitope
AQQKSLLQQL

SEQ ID NO: 13152 - protein, 10 aa, Artificial Sequence
  Description of Artificial Sequence: Synthetic epitope
AQQKTVSSTK

SEQ ID NO: 13153 - protein, 10 aa, Artificial Sequence
  Description of Artificial Sequence: Synthetic epitope
AQQNRERPLL

SEQ ID NO: 13154 - protein, 10 aa, Artificial Sequence
  Description of Artificial Sequence: Synthetic epitope
AQQPQAQVED

SEQ ID NO: 13155 - protein, 10 aa, Artificial Sequence
  Description of Artificial Sequence: Synthetic epitope
AQQRSSLATA

SEQ ID NO: 13156 - protein, 10 aa, Artificial Sequence
  Description of Artificial Sequence: Synthetic epitope
AQQRSSQVHK

SEQ ID NO: 13157 - protein, 10 aa, Artificial Sequence
  Description of Artificial Sequence: Synthetic epitope
AQQSKLSKPR

SEQ ID NO: 13158 - protein, 10 aa, Artificial Sequence
  Description of Artificial Sequence: Synthetic epitope
AQQVATQATA

SEQ ID NO: 13159 - protein, 10 aa, Artificial Sequence
  Description of Artificial Sequence: Synthetic epitope
AQRAAERKRK

SEQ ID NO: 13160 - protein, 10 aa, Artificial Sequence
  Description of Artificial Sequence: Synthetic epitope
AQRLQAAEEH

SEQ ID NO: 13161 - protein, 10 aa, Artificial Sequence
  Description of Artificial Sequence: Synthetic epitope
AQRMMIAEAY

SEQ ID NO: 13162 - protein, 10 aa, Artificial Sequence
  Description of Artificial Sequence: Synthetic epitope
AQRMSQTRES

SEQ ID NO: 13163 - protein, 10 aa, Artificial Sequence
  Description of Artificial Sequence: Synthetic epitope
AQRRAQSIER

SEQ ID NO: 13164 - protein, 10 aa, Artificial Sequence
  Description of Artificial Sequence: Synthetic epitope
AQRRLSEALK

SEQ ID NO: 13165 - protein, 10 aa, Artificial Sequence
  Description of Artificial Sequence: Synthetic epitope
AQRTDALQPP

SEQ ID NO: 13166 - protein, 10 aa, Artificial Sequence
  Description of Artificial Sequence: Synthetic epitope
AQRVALIKNE

SEQ ID NO: 13167 - protein, 10 aa, Artificial Sequence
  Description of Artificial Sequence: Synthetic epitope
AQSAGTVRSA

SEQ ID NO: 13168 - protein, 10 aa, Artificial Sequence
  Description of Artificial Sequence: Synthetic epitope
AQSDASEIRQ

SEQ ID NO: 13169 - protein, 10 aa, Artificial Sequence
  Description of Artificial Sequence: Synthetic epitope
AQSDQGAMND

SEQ ID NO: 13170 - protein, 10 aa, Artificial Sequence
  Description of Artificial Sequence: Synthetic epitope
AQSEEKRGIT

SEQ ID NO: 13171 - protein, 10 aa, Artificial Sequence
  Description of Artificial Sequence: Synthetic epitope
AQSESLSDLT

SEQ ID NO: 13172 - protein, 10 aa, Artificial Sequence
  Description of Artificial Sequence: Synthetic epitope
AQSPAIVAAV

SEQ ID NO: 13173 - protein, 10 aa, Artificial Sequence
  Description of Artificial Sequence: Synthetic epitope
AQSQRSPSEL

SEQ ID NO: 13174 - protein, 10 aa, Artificial Sequence
  Description of Artificial Sequence: Synthetic epitope
AQSRRVSVAE

SEQ ID NO: 13175 - protein, 10 aa, Artificial Sequence
  Description of Artificial Sequence: Synthetic epitope
AQTDTLTQMM

SEQ ID NO: 13176 - protein, 10 aa, Artificial Sequence
  Description of Artificial Sequence: Synthetic epitope
AQTFGAKQPT

SEQ ID NO: 13177 - protein, 10 aa, Artificial Sequence
  Description of Artificial Sequence: Synthetic epitope
AQTIDVNQET

SEQ ID NO: 13178 - protein, 10 aa, Artificial Sequence
  Description of Artificial Sequence: Synthetic epitope
AQTPVTISAN

SEQ ID NO: 13179 - protein, 10 aa, Artificial Sequence
  Description of Artificial Sequence: Synthetic epitope
AQTQPSQSSH

SEQ ID NO: 13180 - protein, 10 aa, Artificial Sequence
  Description of Artificial Sequence: Synthetic epitope
AQTSNKAAQT

SEQ ID NO: 13181 - protein, 10 aa, Artificial Sequence
  Description of Artificial Sequence: Synthetic epitope
AQTSNTDTTS

SEQ ID NO: 13182 - protein, 10 aa, Artificial Sequence
  Description of Artificial Sequence: Synthetic epitope
AQTSQLTFKD

SEQ ID NO: 13183 - protein, 10 aa, Artificial Sequence
  Description of Artificial Sequence: Synthetic epitope
AQTVATTANT

SEQ ID NO: 13184 - protein, 10 aa, Artificial Sequence
  Description of Artificial Sequence: Synthetic epitope
AQVAKAVSHS

SEQ ID NO: 13185 - protein, 10 aa, Artificial Sequence
  Description of Artificial Sequence: Synthetic epitope
AQVAPATKRL

SEQ ID NO: 13186 - protein, 10 aa, Artificial Sequence
  Description of Artificial Sequence: Synthetic epitope
AQVEHKIENQ

SEQ ID NO: 13187 - protein, 10 aa, Artificial Sequence
  Description of Artificial Sequence: Synthetic epitope
AQVIQMLAQN

SEQ ID NO: 13188 - protein, 10 aa, Artificial Sequence
  Description of Artificial Sequence: Synthetic epitope
AQVKAKAKAK

SEQ ID NO: 13189 - protein, 10 aa, Artificial Sequence
  Description of Artificial Sequence: Synthetic epitope
AQVLDAHTRV

SEQ ID NO: 13190 - protein, 10 aa, Artificial Sequence
  Description of Artificial Sequence: Synthetic epitope
AQVQAHLQQE

SEQ ID NO: 13191 - protein, 10 aa, Artificial Sequence
  Description of Artificial Sequence: Synthetic epitope
AQVQASVVKV

SEQ ID NO: 13192 - protein, 10 aa, Artificial Sequence
  Description of Artificial Sequence: Synthetic epitope
AQVQSVDGNA

SEQ ID NO: 13193 - protein, 10 aa, Artificial Sequence
  Description of Artificial Sequence: Synthetic epitope
AQVRAAGTAL

SEQ ID NO: 13194 - protein, 10 aa, Artificial Sequence
  Description of Artificial Sequence: Synthetic epitope
AQVRKRITQR

SEQ ID NO: 13195 - protein, 10 aa, Artificial Sequence
  Description of Artificial Sequence: Synthetic epitope
AQVSAVHISQ

SEQ ID NO: 13196 - protein, 10 aa, Artificial Sequence
  Description of Artificial Sequence: Synthetic epitope
AQVWDLIAGH

SEQ ID NO: 13197 - protein, 10 aa, Artificial Sequence
  Description of Artificial Sequence: Synthetic epitope
AQYKRDKFKK

SEQ ID NO: 13198 - protein, 10 aa, Artificial Sequence
  Description of Artificial Sequence: Synthetic epitope
AQYRQVTKAE

SEQ ID NO: 13199 - protein, 10 aa, Artificial Sequence
  Description of Artificial Sequence: Synthetic epitope
AQYSQKMLLE

SEQ ID NO: 13200 - protein, 10 aa, Artificial Sequence
  Description of Artificial Sequence: Synthetic epitope
ARAAREQATT

SEQ ID NO: 13201 - protein, 10 aa, Artificial Sequence
  Description of Artificial Sequence: Synthetic epitope
ARADKKAPRP

SEQ ID NO: 13202 - protein, 10 aa, Artificial Sequence
  Description of Artificial Sequence: Synthetic epitope
ARAEKKALKK

SEQ ID NO: 13203 - protein, 10 aa, Artificial Sequence
  Description of Artificial Sequence: Synthetic epitope
ARAEVLRQAK

SEQ ID NO: 13204 - protein, 10 aa, Artificial Sequence
  Description of Artificial Sequence: Synthetic epitope
ARAGIPTSSV

SEQ ID NO: 13205 - protein, 10 aa, Artificial Sequence
  Description of Artificial Sequence: Synthetic epitope
ARAIESSRDL

SEQ ID NO: 13206 - protein, 10 aa, Artificial Sequence
  Description of Artificial Sequence: Synthetic epitope
ARAKSSMGSK

SEQ ID NO: 13207 - protein, 10 aa, Artificial Sequence
  Description of Artificial Sequence: Synthetic epitope
ARAQAVLEED

SEQ ID NO: 13208 - protein, 10 aa, Artificial Sequence
  Description of Artificial Sequence: Synthetic epitope
ARARELSSGQ

SEQ ID NO: 13209 - protein, 10 aa, Artificial Sequence
  Description of Artificial Sequence: Synthetic epitope
ARASLLQSKL

SEQ ID NO: 13210 - protein, 10 aa, Artificial Sequence
  Description of Artificial Sequence: Synthetic epitope
ARASQVRSDY

SEQ ID NO: 13211 - protein, 10 aa, Artificial Sequence
  Description of Artificial Sequence: Synthetic epitope
ARAVALSDKK

SEQ ID NO: 13212 - protein, 10 aa, Artificial Sequence
  Description of Artificial Sequence: Synthetic epitope
AREEAKLLAG

SEQ ID NO: 13213 - protein, 10 aa, Artificial Sequence
  Description of Artificial Sequence: Synthetic epitope
AREEKALLPL

SEQ ID NO: 13214 - protein, 10 aa, Artificial Sequence
  Description of Artificial Sequence: Synthetic epitope
AREGRIIFQQ

SEQ ID NO: 13215 - protein, 10 aa, Artificial Sequence
  Description of Artificial Sequence: Synthetic epitope
ARETSLAENI

SEQ ID NO: 13216 - protein, 10 aa, Artificial Sequence
  Description of Artificial Sequence: Synthetic epitope
AREVLKIAKE

SEQ ID NO: 13217 - protein, 10 aa, Artificial Sequence
  Description of Artificial Sequence: Synthetic epitope
ARFRQLRLDA

SEQ ID NO: 13218 - protein, 10 aa, Artificial Sequence
  Description of Artificial Sequence: Synthetic epitope
ARFSMKKSTS

SEQ ID NO: 13219 - protein, 10 aa, Artificial Sequence
  Description of Artificial Sequence: Synthetic epitope
ARGEAQSQNQ

SEQ ID NO: 13220 - protein, 10 aa, Artificial Sequence
  Description of Artificial Sequence: Synthetic epitope
ARGKSKSKAP

SEQ ID NO: 13221 - protein, 10 aa, Artificial Sequence
  Description of Artificial Sequence: Synthetic epitope
ARIEASLRER

SEQ ID NO: 13222 - protein, 10 aa, Artificial Sequence
  Description of Artificial Sequence: Synthetic epitope
ARIIVILQEF

SEQ ID NO: 13223 - protein, 10 aa, Artificial Sequence
  Description of Artificial Sequence: Synthetic epitope
ARIRREASSG

SEQ ID NO: 13224 - protein, 10 aa, Artificial Sequence
  Description of Artificial Sequence: Synthetic epitope
ARISAMSKDT

SEQ ID NO: 13225 - protein, 10 aa, Artificial Sequence
  Description of Artificial Sequence: Synthetic epitope
ARIVAASEAL

SEQ ID NO: 13226 - protein, 10 aa, Artificial Sequence
  Description of Artificial Sequence: Synthetic epitope
ARKASRSQSE

SEQ ID NO: 13227 - protein, 10 aa, Artificial Sequence
  Description of Artificial Sequence: Synthetic epitope
ARKQVNRKKA

SEQ ID NO: 13228 - protein, 10 aa, Artificial Sequence
  Description of Artificial Sequence: Synthetic epitope
ARKRFLNKSS

SEQ ID NO: 13229 - protein, 10 aa, Artificial Sequence
  Description of Artificial Sequence: Synthetic epitope
ARLAEKSRAE

SEQ ID NO: 13230 - protein, 10 aa, Artificial Sequence
  Description of Artificial Sequence: Synthetic epitope
ARLASAQEVA

SEQ ID NO: 13231 - protein, 10 aa, Artificial Sequence
  Description of Artificial Sequence: Synthetic epitope
ARLASLFGLD

SEQ ID NO: 13232 - protein, 10 aa, Artificial Sequence
  Description of Artificial Sequence: Synthetic epitope
ARLEKGLTSS

SEQ ID NO: 13233 - protein, 10 aa, Artificial Sequence
  Description of Artificial Sequence: Synthetic epitope
ARLQTQASAT

SEQ ID NO: 13234 - protein, 10 aa, Artificial Sequence
  Description of Artificial Sequence: Synthetic epitope
ARLSAESKDL

SEQ ID NO: 13235 - protein, 10 aa, Artificial Sequence
  Description of Artificial Sequence: Synthetic epitope
ARLTTALQES

SEQ ID NO: 13236 - protein, 10 aa, Artificial Sequence
  Description of Artificial Sequence: Synthetic epitope
ARLYSTSQTT

SEQ ID NO: 13237 - protein, 10 aa, Artificial Sequence
  Description of Artificial Sequence: Synthetic epitope
ARNIVQSTEH

SEQ ID NO: 13238 - protein, 10 aa, Artificial Sequence
  Description of Artificial Sequence: Synthetic epitope
ARNKIRTLKN

SEQ ID NO: 13239 - protein, 10 aa, Artificial Sequence
  Description of Artificial Sequence: Synthetic epitope
ARNMKEIQPM

SEQ ID NO: 13240 - protein, 10 aa, Artificial Sequence
  Description of Artificial Sequence: Synthetic epitope
ARPDLNHRFQ

SEQ ID NO: 13241 - protein, 10 aa, Artificial Sequence
  Description of Artificial Sequence: Synthetic epitope
ARPEVNLKKY

SEQ ID NO: 13242 - protein, 10 aa, Artificial Sequence
  Description of Artificial Sequence: Synthetic epitope
ARPKSQAVKN

SEQ ID NO: 13243 - protein, 10 aa, Artificial Sequence
  Description of Artificial Sequence: Synthetic epitope
ARPMMVPTRP

SEQ ID NO: 13244 - protein, 10 aa, Artificial Sequence
  Description of Artificial Sequence: Synthetic epitope
ARPNTVISQE

SEQ ID NO: 13245 - protein, 10 aa, Artificial Sequence
  Description of Artificial Sequence: Synthetic epitope
ARPQRRTKSV

SEQ ID NO: 13246 - protein, 10 aa, Artificial Sequence
  Description of Artificial Sequence: Synthetic epitope
ARPRVKSSYS

SEQ ID NO: 13247 - protein, 10 aa, Artificial Sequence
  Description of Artificial Sequence: Synthetic epitope
ARQASASRAW

SEQ ID NO: 13248 - protein, 10 aa, Artificial Sequence
  Description of Artificial Sequence: Synthetic epitope
ARQDEQLQKT

SEQ ID NO: 13249 - protein, 10 aa, Artificial Sequence
  Description of Artificial Sequence: Synthetic epitope
ARQEAERREK

SEQ ID NO: 13250 - protein, 10 aa, Artificial Sequence
  Description of Artificial Sequence: Synthetic epitope
ARQLEGVDTQ

SEQ ID NO: 13251 - protein, 10 aa, Artificial Sequence
  Description of Artificial Sequence: Synthetic epitope
ARQLISEKGT

SEQ ID NO: 13252 - protein, 10 aa, Artificial Sequence
  Description of Artificial Sequence: Synthetic epitope
ARQRLSQKEQ

SEQ ID NO: 13253 - protein, 10 aa, Artificial Sequence
  Description of Artificial Sequence: Synthetic epitope
ARQVVKLNAS

SEQ ID NO: 13254 - protein, 10 aa, Artificial Sequence
  Description of Artificial Sequence: Synthetic epitope
ARRFTTRRSS

SEQ ID NO: 13255 - protein, 10 aa, Artificial Sequence
  Description of Artificial Sequence: Synthetic epitope
ARRGTTAMTS

SEQ ID NO: 13256 - protein, 10 aa, Artificial Sequence
  Description of Artificial Sequence: Synthetic epitope
ARRISSASSL

SEQ ID NO: 13257 - protein, 10 aa, Artificial Sequence
  Description of Artificial Sequence: Synthetic epitope
ARRMPMNKNE

SEQ ID NO: 13258 - protein, 10 aa, Artificial Sequence
  Description of Artificial Sequence: Synthetic epitope
ARRSEAETLS

SEQ ID NO: 13259 - protein, 10 aa, Artificial Sequence
  Description of Artificial Sequence: Synthetic epitope
ARRVGWTVRR

SEQ ID NO: 13260 - protein, 10 aa, Artificial Sequence
  Description of Artificial Sequence: Synthetic epitope
ARSDQLDVGD

SEQ ID NO: 13261 - protein, 10 aa, Artificial Sequence
  Description of Artificial Sequence: Synthetic epitope
ARSEHKVWSP

SEQ ID NO: 13262 - protein, 10 aa, Artificial Sequence
  Description of Artificial Sequence: Synthetic epitope
ARSREEAERQ

SEQ ID NO: 13263 - protein, 10 aa, Artificial Sequence
  Description of Artificial Sequence: Synthetic epitope
ARSSIQITGA

SEQ ID NO: 13264 - protein, 10 aa, Artificial Sequence
  Description of Artificial Sequence: Synthetic epitope
ARSVSPTTEM

SEQ ID NO: 13265 - protein, 10 aa, Artificial Sequence
  Description of Artificial Sequence: Synthetic epitope
ARTILRAFLE

SEQ ID NO: 13266 - protein, 10 aa, Artificial Sequence
  Description of Artificial Sequence: Synthetic epitope
ARTRSLVGSD

SEQ ID NO: 13267 - protein, 10 aa, Artificial Sequence
  Description of Artificial Sequence: Synthetic epitope
ARTVADLQRD

SEQ ID NO: 13268 - protein, 10 aa, Artificial Sequence
  Description of Artificial Sequence: Synthetic epitope
ARVARLNPTW

SEQ ID NO: 13269 - protein, 10 aa, Artificial Sequence
  Description of Artificial Sequence: Synthetic epitope
ARVASRAEML

SEQ ID NO: 13270 - protein, 10 aa, Artificial Sequence
  Description of Artificial Sequence: Synthetic epitope
ARVEINRKDE

SEQ ID NO: 13271 - protein, 10 aa, Artificial Sequence
  Description of Artificial Sequence: Synthetic epitope
ARVHEEAKRA

SEQ ID NO: 13272 - protein, 10 aa, Artificial Sequence
  Description of Artificial Sequence: Synthetic epitope
ARVTSNKTKV

SEQ ID NO: 13273 - protein, 10 aa, Artificial Sequence
  Description of Artificial Sequence: Synthetic epitope
ARWESALDRQ

SEQ ID NO: 13274 - protein, 10 aa, Artificial Sequence
  Description of Artificial Sequence: Synthetic epitope
ARYKEEYAVL

SEQ ID NO: 13275 - protein, 10 aa, Artificial Sequence
  Description of Artificial Sequence: Synthetic epitope
ARYQEADSEE

SEQ ID NO: 13276 - protein, 10 aa, Artificial Sequence
  Description of Artificial Sequence: Synthetic epitope
ARYQPKQRSM

SEQ ID NO: 13277 - protein, 10 aa, Artificial Sequence
  Description of Artificial Sequence: Synthetic epitope
ARYRARTTNY

SEQ ID NO: 13278 - protein, 10 aa, Artificial Sequence
  Description of Artificial Sequence: Synthetic epitope
ASAAQTDPTT

SEQ ID NO: 13279 - protein, 10 aa, Artificial Sequence
  Description of Artificial Sequence: Synthetic epitope
ASAASAVESL

SEQ ID NO: 13280 - protein, 10 aa, Artificial Sequence
  Description of Artificial Sequence: Synthetic epitope
ASAASRVATS

SEQ ID NO: 13281 - protein, 10 aa, Artificial Sequence
  Description of Artificial Sequence: Synthetic epitope
ASAEDKELAK

SEQ ID NO: 13282 - protein, 10 aa, Artificial Sequence
  Description of Artificial Sequence: Synthetic epitope
ASAGSVEELP

SEQ ID NO: 13283 - protein, 10 aa, Artificial Sequence
  Description of Artificial Sequence: Synthetic epitope
ASAKFYASVV

SEQ ID NO: 13284 - protein, 10 aa, Artificial Sequence
  Description of Artificial Sequence: Synthetic epitope
ASALKAVNYK

SEQ ID NO: 13285 - protein, 10 aa, Artificial Sequence
  Description of Artificial Sequence: Synthetic epitope
ASALLNLYEA

SEQ ID NO: 13286 - protein, 10 aa, Artificial Sequence
  Description of Artificial Sequence: Synthetic epitope
ASAQSGMSQP

SEQ ID NO: 13287 - protein, 10 aa, Artificial Sequence
  Description of Artificial Sequence: Synthetic epitope
ASARKVVNRD

SEQ ID NO: 13288 - protein, 10 aa, Artificial Sequence
  Description of Artificial Sequence: Synthetic epitope
ASASARGNQD

SEQ ID NO: 13289 - protein, 10 aa, Artificial Sequence
  Description of Artificial Sequence: Synthetic epitope
ASASASAERS

SEQ ID NO: 13290 - protein, 10 aa, Artificial Sequence
  Description of Artificial Sequence: Synthetic epitope
ASASASASGP

SEQ ID NO: 13291 - protein, 10 aa, Artificial Sequence
  Description of Artificial Sequence: Synthetic epitope
ASASLLDAQP

SEQ ID NO: 13292 - protein, 10 aa, Artificial Sequence
  Description of Artificial Sequence: Synthetic epitope
ASASQAVGET

SEQ ID NO: 13293 - protein, 10 aa, Artificial Sequence
  Description of Artificial Sequence: Synthetic epitope
ASASSVENEP

SEQ ID NO: 13294 - protein, 10 aa, Artificial Sequence
  Description of Artificial Sequence: Synthetic epitope
ASATSAVAPI

SEQ ID NO: 13295 - protein, 10 aa, Artificial Sequence
  Description of Artificial Sequence: Synthetic epitope
ASATSAVAPI

SEQ ID NO: 13296 - protein, 10 aa, Artificial Sequence
  Description of Artificial Sequence: Synthetic epitope
ASAVGVIDKQ

SEQ ID NO: 13297 - protein, 10 aa, Artificial Sequence
  Description of Artificial Sequence: Synthetic epitope
ASAVLKVRPE

SEQ ID NO: 13298 - protein, 10 aa, Artificial Sequence
  Description of Artificial Sequence: Synthetic epitope
ASDDGKLTDP

SEQ ID NO: 13299 - protein, 10 aa, Artificial Sequence
  Description of Artificial Sequence: Synthetic epitope
ASDFDISEIQ

SEQ ID NO: 13300 - protein, 10 aa, Artificial Sequence
  Description of Artificial Sequence: Synthetic epitope
ASDKQRSKLS

SEQ ID NO: 13301 - protein, 10 aa, Artificial Sequence
  Description of Artificial Sequence: Synthetic epitope
ASDPEKDEDD

SEQ ID NO: 13302 - protein, 10 aa, Artificial Sequence
  Description of Artificial Sequence: Synthetic epitope
ASDSDETSMS

SEQ ID NO: 13303 - protein, 10 aa, Artificial Sequence
  Description of Artificial Sequence: Synthetic epitope
ASDVDHMVRW

SEQ ID NO: 13304 - protein, 10 aa, Artificial Sequence
  Description of Artificial Sequence: Synthetic epitope
ASDVQLNKLG

SEQ ID NO: 13305 - protein, 10 aa, Artificial Sequence
  Description of Artificial Sequence: Synthetic epitope
ASEALAKFPF

SEQ ID NO: 13306 - protein, 10 aa, Artificial Sequence
  Description of Artificial Sequence: Synthetic epitope
ASEESLALEV

SEQ ID NO: 13307 - protein, 10 aa, Artificial Sequence
  Description of Artificial Sequence: Synthetic epitope
ASEGDSVNSE

SEQ ID NO: 13308 - protein, 10 aa, Artificial Sequence
  Description of Artificial Sequence: Synthetic epitope
ASEKAGSSPA

SEQ ID NO: 13309 - protein, 10 aa, Artificial Sequence
  Description of Artificial Sequence: Synthetic epitope
ASEKNKEELK

SEQ ID NO: 13310 - protein, 10 aa, Artificial Sequence
  Description of Artificial Sequence: Synthetic epitope
ASEKTVVEAL

SEQ ID NO: 13311 - protein, 10 aa, Artificial Sequence
  Description of Artificial Sequence: Synthetic epitope
ASEKYEEGER

SEQ ID NO: 13312 - protein, 10 aa, Artificial Sequence
  Description of Artificial Sequence: Synthetic epitope
ASELLRSGLD

SEQ ID NO: 13313 - protein, 10 aa, Artificial Sequence
  Description of Artificial Sequence: Synthetic epitope
ASELSNLSSL

SEQ ID NO: 13314 - protein, 10 aa, Artificial Sequence
  Description of Artificial Sequence: Synthetic epitope
ASEMVVEKHR

SEQ ID NO: 13315 - protein, 10 aa, Artificial Sequence
  Description of Artificial Sequence: Synthetic epitope
ASEPVEQSEA

SEQ ID NO: 13316 - protein, 10 aa, Artificial Sequence
  Description of Artificial Sequence: Synthetic epitope
ASEQVKMLQR

SEQ ID NO: 13317 - protein, 10 aa, Artificial Sequence
  Description of Artificial Sequence: Synthetic epitope
ASERTALSPQ

SEQ ID NO: 13318 - protein, 10 aa, Artificial Sequence
  Description of Artificial Sequence: Synthetic epitope
ASESEDRLVA

SEQ ID NO: 13319 - protein, 10 aa, Artificial Sequence
  Description of Artificial Sequence: Synthetic epitope
ASESELWKGP

SEQ ID NO: 13320 - protein, 10 aa, Artificial Sequence
  Description of Artificial Sequence: Synthetic epitope
ASESERSKLI

SEQ ID NO: 13321 - protein, 10 aa, Artificial Sequence
  Description of Artificial Sequence: Synthetic epitope
ASESPQHDVV

SEQ ID NO: 13322 - protein, 10 aa, Artificial Sequence
  Description of Artificial Sequence: Synthetic epitope
ASEVEVSSTS

SEQ ID NO: 13323 - protein, 10 aa, Artificial Sequence
  Description of Artificial Sequence: Synthetic epitope
ASEVEVSSTS

SEQ ID NO: 13324 - protein, 10 aa, Artificial Sequence
  Description of Artificial Sequence: Synthetic epitope
ASEYESLISK

SEQ ID NO: 13325 - protein, 10 aa, Artificial Sequence
  Description of Artificial Sequence: Synthetic epitope
ASFENESIEE

SEQ ID NO: 13326 - protein, 10 aa, Artificial Sequence
  Description of Artificial Sequence: Synthetic epitope
ASFFSINKEV

SEQ ID NO: 13327 - protein, 10 aa, Artificial Sequence
  Description of Artificial Sequence: Synthetic epitope
ASFIRSKRTA

SEQ ID NO: 13328 - protein, 10 aa, Artificial Sequence
  Description of Artificial Sequence: Synthetic epitope
ASFKSESAQS

SEQ ID NO: 13329 - protein, 10 aa, Artificial Sequence
  Description of Artificial Sequence: Synthetic epitope
ASFKVTNIKY

SEQ ID NO: 13330 - protein, 10 aa, Artificial Sequence
  Description of Artificial Sequence: Synthetic epitope
ASFTQLQLAS

SEQ ID NO: 13331 - protein, 10 aa, Artificial Sequence
  Description of Artificial Sequence: Synthetic epitope
ASGASSTTDV

SEQ ID NO: 13332 - protein, 10 aa, Artificial Sequence
  Description of Artificial Sequence: Synthetic epitope
ASGDRSARQA

SEQ ID NO: 13333 - protein, 10 aa, Artificial Sequence
  Description of Artificial Sequence: Synthetic epitope
ASGDRSRQKQ

SEQ ID NO: 13334 - protein, 10 aa, Artificial Sequence
  Description of Artificial Sequence: Synthetic epitope
ASGDTVRTAD

SEQ ID NO: 13335 - protein, 10 aa, Artificial Sequence
  Description of Artificial Sequence: Synthetic epitope
ASGEELNTLE

SEQ ID NO: 13336 - protein, 10 aa, Artificial Sequence
  Description of Artificial Sequence: Synthetic epitope
ASGKLVEQAN

SEQ ID NO: 13337 - protein, 10 aa, Artificial Sequence
  Description of Artificial Sequence: Synthetic epitope
ASGLASASSV

SEQ ID NO: 13338 - protein, 10 aa, Artificial Sequence
  Description of Artificial Sequence: Synthetic epitope
ASGMMSSMPQ

SEQ ID NO: 13339 - protein, 10 aa, Artificial Sequence
  Description of Artificial Sequence: Synthetic epitope
ASGQSQQSSH

SEQ ID NO: 13340 - protein, 10 aa, Artificial Sequence
  Description of Artificial Sequence: Synthetic epitope
ASGSVGRVAM

SEQ ID NO: 13341 - protein, 10 aa, Artificial Sequence
  Description of Artificial Sequence: Synthetic epitope
ASGYSALEPP

SEQ ID NO: 13342 - protein, 10 aa, Artificial Sequence
  Description of Artificial Sequence: Synthetic epitope
ASHQTEPEAY

SEQ ID NO: 13343 - protein, 10 aa, Artificial Sequence
  Description of Artificial Sequence: Synthetic epitope
ASHVRDAVAV

SEQ ID NO: 13344 - protein, 10 aa, Artificial Sequence
  Description of Artificial Sequence: Synthetic epitope
ASIANIVKSS

SEQ ID NO: 13345 - protein, 10 aa, Artificial Sequence
  Description of Artificial Sequence: Synthetic epitope
ASIETMMLNL

SEQ ID NO: 13346 - protein, 10 aa, Artificial Sequence
  Description of Artificial Sequence: Synthetic epitope
ASIGATSSKE

SEQ ID NO: 13347 - protein, 10 aa, Artificial Sequence
  Description of Artificial Sequence: Synthetic epitope
ASIKAREDEA

SEQ ID NO: 13348 - protein, 10 aa, Artificial Sequence
  Description of Artificial Sequence: Synthetic epitope
ASIKKTYTTS

SEQ ID NO: 13349 - protein, 10 aa, Artificial Sequence
  Description of Artificial Sequence: Synthetic epitope
ASIKSSERDR

SEQ ID NO: 13350 - protein, 10 aa, Artificial Sequence
  Description of Artificial Sequence: Synthetic epitope
ASKAKDSHYQ

SEQ ID NO: 13351 - protein, 10 aa, Artificial Sequence
  Description of Artificial Sequence: Synthetic epitope
ASKASIGQSP

SEQ ID NO: 13352 - protein, 10 aa, Artificial Sequence
  Description of Artificial Sequence: Synthetic epitope
ASKEEATTFS

SEQ ID NO: 13353 - protein, 10 aa, Artificial Sequence
  Description of Artificial Sequence: Synthetic epitope
ASKEIAENAL

SEQ ID NO: 13354 - protein, 10 aa, Artificial Sequence
  Description of Artificial Sequence: Synthetic epitope
ASKGHSEKEV

SEQ ID NO: 13355 - protein, 10 aa, Artificial Sequence
  Description of Artificial Sequence: Synthetic epitope
ASKIKEVQGR

SEQ ID NO: 13356 - protein, 10 aa, Artificial Sequence
  Description of Artificial Sequence: Synthetic epitope
ASKKSTDHPK

SEQ ID NO: 13357 - protein, 10 aa, Artificial Sequence
  Description of Artificial Sequence: Synthetic epitope
ASKLTRAPDS

SEQ ID NO: 13358 - protein, 10 aa, Artificial Sequence
  Description of Artificial Sequence: Synthetic epitope
ASKPSLVQQK

SEQ ID NO: 13359 - protein, 10 aa, Artificial Sequence
  Description of Artificial Sequence: Synthetic epitope
ASKQSMVNSL

SEQ ID NO: 13360 - protein, 10 aa, Artificial Sequence
  Description of Artificial Sequence: Synthetic epitope
ASKRERRDEQ

SEQ ID NO: 13361 - protein, 10 aa, Artificial Sequence
  Description of Artificial Sequence: Synthetic epitope
ASKRSRFQFL

SEQ ID NO: 13362 - protein, 10 aa, Artificial Sequence
  Description of Artificial Sequence: Synthetic epitope
ASKSAEEGKQ

SEQ ID NO: 13363 - protein, 10 aa, Artificial Sequence
  Description of Artificial Sequence: Synthetic epitope
ASKSHATTEP

SEQ ID NO: 13364 - protein, 10 aa, Artificial Sequence
  Description of Artificial Sequence: Synthetic epitope
ASKSLTTKTS

SEQ ID NO: 13365 - protein, 10 aa, Artificial Sequence
  Description of Artificial Sequence: Synthetic epitope
ASKTKEIEQV

SEQ ID NO: 13366 - protein, 10 aa, Artificial Sequence
  Description of Artificial Sequence: Synthetic epitope
ASKTQEAQAG

SEQ ID NO: 13367 - protein, 10 aa, Artificial Sequence
  Description of Artificial Sequence: Synthetic epitope
ASKTQSEAKQ

SEQ ID NO: 13368 - protein, 10 aa, Artificial Sequence
  Description of Artificial Sequence: Synthetic epitope
ASKTTYKTTG

SEQ ID NO: 13369 - protein, 10 aa, Artificial Sequence
  Description of Artificial Sequence: Synthetic epitope
ASLAQALQEL

SEQ ID NO: 13370 - protein, 10 aa, Artificial Sequence
  Description of Artificial Sequence: Synthetic epitope
ASLEEQVAQT

SEQ ID NO: 13371 - protein, 10 aa, Artificial Sequence
  Description of Artificial Sequence: Synthetic epitope
ASLEQEVVAT

SEQ ID NO: 13372 - protein, 10 aa, Artificial Sequence
  Description of Artificial Sequence: Synthetic epitope
ASLESIVNEA

SEQ ID NO: 13373 - protein, 10 aa, Artificial Sequence
  Description of Artificial Sequence: Synthetic epitope
ASLFAEQKLR

SEQ ID NO: 13374 - protein, 10 aa, Artificial Sequence
  Description of Artificial Sequence: Synthetic epitope
ASLIKKEIHG

SEQ ID NO: 13375 - protein, 10 aa, Artificial Sequence
  Description of Artificial Sequence: Synthetic epitope
ASLLAVLSRE

SEQ ID NO: 13376 - protein, 10 aa, Artificial Sequence
  Description of Artificial Sequence: Synthetic epitope
ASLNKNQSSR

SEQ ID NO: 13377 - protein, 10 aa, Artificial Sequence
  Description of Artificial Sequence: Synthetic epitope
ASLNSTTLSD

SEQ ID NO: 13378 - protein, 10 aa, Artificial Sequence
  Description of Artificial Sequence: Synthetic epitope
ASLQLGLSHE

SEQ ID NO: 13379 - protein, 10 aa, Artificial Sequence
  Description of Artificial Sequence: Synthetic epitope
ASLQMKRESQ

SEQ ID NO: 13380 - protein, 10 aa, Artificial Sequence
  Description of Artificial Sequence: Synthetic epitope
ASLQVQLDAV

SEQ ID NO: 13381 - protein, 10 aa, Artificial Sequence
  Description of Artificial Sequence: Synthetic epitope
ASLRKSANKL

SEQ ID NO: 13382 - protein, 10 aa, Artificial Sequence
  Description of Artificial Sequence: Synthetic epitope
ASLSFLVKLE

SEQ ID NO: 13383 - protein, 10 aa, Artificial Sequence
  Description of Artificial Sequence: Synthetic epitope
ASLSLNQISS

SEQ ID NO: 13384 - protein, 10 aa, Artificial Sequence
  Description of Artificial Sequence: Synthetic epitope
ASLSMDEAAQ

SEQ ID NO: 13385 - protein, 10 aa, Artificial Sequence
  Description of Artificial Sequence: Synthetic epitope
ASLTQATSRK

SEQ ID NO: 13386 - protein, 10 aa, Artificial Sequence
  Description of Artificial Sequence: Synthetic epitope
ASLVSKSYSE

SEQ ID NO: 13387 - protein, 10 aa, Artificial Sequence
  Description of Artificial Sequence: Synthetic epitope
ASMELVIQFQ

SEQ ID NO: 13388 - protein, 10 aa, Artificial Sequence
  Description of Artificial Sequence: Synthetic epitope
ASMEQQIVHL

SEQ ID NO: 13389 - protein, 10 aa, Artificial Sequence
  Description of Artificial Sequence: Synthetic epitope
ASMKPGNVQQ

SEQ ID NO: 13390 - protein, 10 aa, Artificial Sequence
  Description of Artificial Sequence: Synthetic epitope
ASMSIVKATS

SEQ ID NO: 13391 - protein, 10 aa, Artificial Sequence
  Description of Artificial Sequence: Synthetic epitope
ASMTSDNADD

SEQ ID NO: 13392 - protein, 10 aa, Artificial Sequence
  Description of Artificial Sequence: Synthetic epitope
ASNAQTRLES

SEQ ID NO: 13393 - protein, 10 aa, Artificial Sequence
  Description of Artificial Sequence: Synthetic epitope
ASNEKESAAP

SEQ ID NO: 13394 - protein, 10 aa, Artificial Sequence
  Description of Artificial Sequence: Synthetic epitope
ASNLTLSETQ

SEQ ID NO: 13395 - protein, 10 aa, Artificial Sequence
  Description of Artificial Sequence: Synthetic epitope
ASNTTSTKNN

SEQ ID NO: 13396 - protein, 10 aa, Artificial Sequence
  Description of Artificial Sequence: Synthetic epitope
ASPAASSVRP

SEQ ID NO: 13397 - protein, 10 aa, Artificial Sequence
  Description of Artificial Sequence: Synthetic epitope
ASPEKVSNTT

SEQ ID NO: 13398 - protein, 10 aa, Artificial Sequence
  Description of Artificial Sequence: Synthetic epitope
ASPEVEAGPQ

SEQ ID NO: 13399 - protein, 10 aa, Artificial Sequence
  Description of Artificial Sequence: Synthetic epitope
ASPHGSSEKS

SEQ ID NO: 13400 - protein, 10 aa, Artificial Sequence
  Description of Artificial Sequence: Synthetic epitope
ASPLNSRKSD

SEQ ID NO: 13401 - protein, 10 aa, Artificial Sequence
  Description of Artificial Sequence: Synthetic epitope
ASPTSSVASA

SEQ ID NO: 13402 - protein, 10 aa, Artificial Sequence
  Description of Artificial Sequence: Synthetic epitope
ASQARGSDSE

SEQ ID NO: 13403 - protein, 10 aa, Artificial Sequence
  Description of Artificial Sequence: Synthetic epitope
ASQEYHIVKK

SEQ ID NO: 13404 - protein, 10 aa, Artificial Sequence
  Description of Artificial Sequence: Synthetic epitope
ASQIRYVDQE

SEQ ID NO: 13405 - protein, 10 aa, Artificial Sequence
  Description of Artificial Sequence: Synthetic epitope
ASQISQLEQQ

SEQ ID NO: 13406 - protein, 10 aa, Artificial Sequence
  Description of Artificial Sequence: Synthetic epitope
ASQKVTKKTK

SEQ ID NO: 13407 - protein, 10 aa, Artificial Sequence
  Description of Artificial Sequence: Synthetic epitope
ASQMNTLEES

SEQ ID NO: 13408 - protein, 10 aa, Artificial Sequence
  Description of Artificial Sequence: Synthetic epitope
ASQMSSVSMA

SEQ ID NO: 13409 - protein, 10 aa, Artificial Sequence
  Description of Artificial Sequence: Synthetic epitope
ASQQSVASHP

SEQ ID NO: 13410 - protein, 10 aa, Artificial Sequence
  Description of Artificial Sequence: Synthetic epitope
ASQRSKQSSF

SEQ ID NO: 13411 - protein, 10 aa, Artificial Sequence
  Description of Artificial Sequence: Synthetic epitope
ASQSRKRSLA

SEQ ID NO: 13412 - protein, 10 aa, Artificial Sequence
  Description of Artificial Sequence: Synthetic epitope
ASQSSLKDIN

SEQ ID NO: 13413 - protein, 10 aa, Artificial Sequence
  Description of Artificial Sequence: Synthetic epitope
ASQSSQGRDS

SEQ ID NO: 13414 - protein, 10 aa, Artificial Sequence
  Description of Artificial Sequence: Synthetic epitope
ASQTTSSEIS

SEQ ID NO: 13415 - protein, 10 aa, Artificial Sequence
  Description of Artificial Sequence: Synthetic epitope
ASQVESLRHS

SEQ ID NO: 13416 - protein, 10 aa, Artificial Sequence
  Description of Artificial Sequence: Synthetic epitope
ASRAAGSGST

SEQ ID NO: 13417 - protein, 10 aa, Artificial Sequence
  Description of Artificial Sequence: Synthetic epitope
ASRHQDQNSV

SEQ ID NO: 13418 - protein, 10 aa, Artificial Sequence
  Description of Artificial Sequence: Synthetic epitope
ASRKLDAVAI

SEQ ID NO: 13419 - protein, 10 aa, Artificial Sequence
  Description of Artificial Sequence: Synthetic epitope
ASRKLIKKRE

SEQ ID NO: 13420 - protein, 10 aa, Artificial Sequence
  Description of Artificial Sequence: Synthetic epitope
ASRKMLSETS

SEQ ID NO: 13421 - protein, 10 aa, Artificial Sequence
  Description of Artificial Sequence: Synthetic epitope
ASRNSKAKLR

SEQ ID NO: 13422 - protein, 10 aa, Artificial Sequence
  Description of Artificial Sequence: Synthetic epitope
ASRQESTTDH

SEQ ID NO: 13423 - protein, 10 aa, Artificial Sequence
  Description of Artificial Sequence: Synthetic epitope
ASRRKSEAKQ

SEQ ID NO: 13424 - protein, 10 aa, Artificial Sequence
  Description of Artificial Sequence: Synthetic epitope
ASRSEANAVF

SEQ ID NO: 13425 - protein, 10 aa, Artificial Sequence
  Description of Artificial Sequence: Synthetic epitope
ASRTKTKEKK

SEQ ID NO: 13426 - protein, 10 aa, Artificial Sequence
  Description of Artificial Sequence: Synthetic epitope
ASRVLMTKSA

SEQ ID NO: 13427 - protein, 10 aa, Artificial Sequence
  Description of Artificial Sequence: Synthetic epitope
ASSESQIFEL

SEQ ID NO: 13428 - protein, 10 aa, Artificial Sequence
  Description of Artificial Sequence: Synthetic epitope
ASSGATQAEL

SEQ ID NO: 13429 - protein, 10 aa, Artificial Sequence
  Description of Artificial Sequence: Synthetic epitope
ASSGENSKNQ

SEQ ID NO: 13430 - protein, 10 aa, Artificial Sequence
  Description of Artificial Sequence: Synthetic epitope
ASSISLPIGH

SEQ ID NO: 13431 - protein, 10 aa, Artificial Sequence
  Description of Artificial Sequence: Synthetic epitope
ASSKLKSPSQ

SEQ ID NO: 13432 - protein, 10 aa, Artificial Sequence
  Description of Artificial Sequence: Synthetic epitope
ASSLISDLNQ

SEQ ID NO: 13433 - protein, 10 aa, Artificial Sequence
  Description of Artificial Sequence: Synthetic epitope
ASSLLAVESS

SEQ ID NO: 13434 - protein, 10 aa, Artificial Sequence
  Description of Artificial Sequence: Synthetic epitope
ASSLSSLGAA

SEQ ID NO: 13435 - protein, 10 aa, Artificial Sequence
  Description of Artificial Sequence: Synthetic epitope
ASSLSSRAPP

SEQ ID NO: 13436 - protein, 10 aa, Artificial Sequence
  Description of Artificial Sequence: Synthetic epitope
ASSPTNSNMA

SEQ ID NO: 13437 - protein, 10 aa, Artificial Sequence
  Description of Artificial Sequence: Synthetic epitope
ASSQENHSSQ

SEQ ID NO: 13438 - protein, 10 aa, Artificial Sequence
  Description of Artificial Sequence: Synthetic epitope
ASSQRISQNS

SEQ ID NO: 13439 - protein, 10 aa, Artificial Sequence
  Description of Artificial Sequence: Synthetic epitope
ASSQSATEVR

SEQ ID NO: 13440 - protein, 10 aa, Artificial Sequence
  Description of Artificial Sequence: Synthetic epitope
ASSQSSATNM

SEQ ID NO: 13441 - protein, 10 aa, Artificial Sequence
  Description of Artificial Sequence: Synthetic epitope
ASSQSSQGAQ

SEQ ID NO: 13442 - protein, 10 aa, Artificial Sequence
  Description of Artificial Sequence: Synthetic epitope
ASSRYSEQES

SEQ ID NO: 13443 - protein, 10 aa, Artificial Sequence
  Description of Artificial Sequence: Synthetic epitope
ASSTGALQKK

SEQ ID NO: 13444 - protein, 10 aa, Artificial Sequence
  Description of Artificial Sequence: Synthetic epitope
ASSTMAKSEN

SEQ ID NO: 13445 - protein, 10 aa, Artificial Sequence
  Description of Artificial Sequence: Synthetic epitope
ASTEKGKPSY

SEQ ID NO: 13446 - protein, 10 aa, Artificial Sequence
  Description of Artificial Sequence: Synthetic epitope
ASTGSQAQSA

SEQ ID NO: 13447 - protein, 10 aa, Artificial Sequence
  Description of Artificial Sequence: Synthetic epitope
ASTLKIKAAS

SEQ ID NO: 13448 - protein, 10 aa, Artificial Sequence
  Description of Artificial Sequence: Synthetic epitope
ASTLQELKLW

SEQ ID NO: 13449 - protein, 10 aa, Artificial Sequence
  Description of Artificial Sequence: Synthetic epitope
ASTNTMELPD

SEQ ID NO: 13450 - protein, 10 aa, Artificial Sequence
  Description of Artificial Sequence: Synthetic epitope
ASTPKVNKQG

SEQ ID NO: 13451 - protein, 10 aa, Artificial Sequence
  Description of Artificial Sequence: Synthetic epitope
ASTQKVNRAT

SEQ ID NO: 13452 - protein, 10 aa, Artificial Sequence
  Description of Artificial Sequence: Synthetic epitope
ASTQPAYLRL

SEQ ID NO: 13453 - protein, 10 aa, Artificial Sequence
  Description of Artificial Sequence: Synthetic epitope
ASTTASSEVL

SEQ ID NO: 13454 - protein, 10 aa, Artificial Sequence
  Description of Artificial Sequence: Synthetic epitope
ASTTELKKES

SEQ ID NO: 13455 - protein, 10 aa, Artificial Sequence
  Description of Artificial Sequence: Synthetic epitope
ASTTSNANAV

SEQ ID NO: 13456 - protein, 10 aa, Artificial Sequence
  Description of Artificial Sequence: Synthetic epitope
ASTVDNIRSI

SEQ ID NO: 13457 - protein, 10 aa, Artificial Sequence
  Description of Artificial Sequence: Synthetic epitope
ASTVSASPEA

SEQ ID NO: 13458 - protein, 10 aa, Artificial Sequence
  Description of Artificial Sequence: Synthetic epitope
ASVDSSAEAS

SEQ ID NO: 13459 - protein, 10 aa, Artificial Sequence
  Description of Artificial Sequence: Synthetic epitope
ASVEEAISSG

SEQ ID NO: 13460 - protein, 10 aa, Artificial Sequence
  Description of Artificial Sequence: Synthetic epitope
ASVESASSHQ

SEQ ID NO: 13461 - protein, 10 aa, Artificial Sequence
  Description of Artificial Sequence: Synthetic epitope
ASVHNTDNNK

SEQ ID NO: 13462 - protein, 10 aa, Artificial Sequence
  Description of Artificial Sequence: Synthetic epitope
ASVIEILGIE

SEQ ID NO: 13463 - protein, 10 aa, Artificial Sequence
  Description of Artificial Sequence: Synthetic epitope
ASVKSKKPSS

SEQ ID NO: 13464 - protein, 10 aa, Artificial Sequence
  Description of Artificial Sequence: Synthetic epitope
ASVKTSGSPR

SEQ ID NO: 13465 - protein, 10 aa, Artificial Sequence
  Description of Artificial Sequence: Synthetic epitope
ASVKVLADNK

SEQ ID NO: 13466 - protein, 10 aa, Artificial Sequence
  Description of Artificial Sequence: Synthetic epitope
ASVLDALDPP

SEQ ID NO: 13467 - protein, 10 aa, Artificial Sequence
  Description of Artificial Sequence: Synthetic epitope
ASVLRREIVS

SEQ ID NO: 13468 - protein, 10 aa, Artificial Sequence
  Description of Artificial Sequence: Synthetic epitope
ASVPEYRYSQ

SEQ ID NO: 13469 - protein, 10 aa, Artificial Sequence
  Description of Artificial Sequence: Synthetic epitope
ASVQKSAAQT

SEQ ID NO: 13470 - protein, 10 aa, Artificial Sequence
  Description of Artificial Sequence: Synthetic epitope
ASVSAASGSH

SEQ ID NO: 13471 - protein, 10 aa, Artificial Sequence
  Description of Artificial Sequence: Synthetic epitope
ASVSTVLTSK

SEQ ID NO: 13472 - protein, 10 aa, Artificial Sequence
  Description of Artificial Sequence: Synthetic epitope
ASVTALTDAR

SEQ ID NO: 13473 - protein, 10 aa, Artificial Sequence
  Description of Artificial Sequence: Synthetic epitope
ASVTSHKSLR

SEQ ID NO: 13474 - protein, 10 aa, Artificial Sequence
  Description of Artificial Sequence: Synthetic epitope
ASYHIEASED

SEQ ID NO: 13475 - protein, 10 aa, Artificial Sequence
  Description of Artificial Sequence: Synthetic epitope
ASYVSMSAQS

SEQ ID NO: 13476 - protein, 10 aa, Artificial Sequence
  Description of Artificial Sequence: Synthetic epitope
ATAAGTKKVA

SEQ ID NO: 13477 - protein, 10 aa, Artificial Sequence
  Description of Artificial Sequence: Synthetic epitope
ATALEAVEKQ

SEQ ID NO: 13478 - protein, 10 aa, Artificial Sequence
  Description of Artificial Sequence: Synthetic epitope
ATATAEVLAT

SEQ ID NO: 13479 - protein, 10 aa, Artificial Sequence
  Description of Artificial Sequence: Synthetic epitope
ATAVRELQLI

SEQ ID NO: 13480 - protein, 10 aa, Artificial Sequence
  Description of Artificial Sequence: Synthetic epitope
ATDLAQTSEK

SEQ ID NO: 13481 - protein, 10 aa, Artificial Sequence
  Description of Artificial Sequence: Synthetic epitope
ATDLMVDVPG

SEQ ID NO: 13482 - protein, 10 aa, Artificial Sequence
  Description of Artificial Sequence: Synthetic epitope
ATEELIAGST

SEQ ID NO: 13483 - protein, 10 aa, Artificial Sequence
  Description of Artificial Sequence: Synthetic epitope
ATEMVEVGAD

SEQ ID NO: 13484 - protein, 10 aa, Artificial Sequence
  Description of Artificial Sequence: Synthetic epitope
ATFEIDLKEA

SEQ ID NO: 13485 - protein, 10 aa, Artificial Sequence
  Description of Artificial Sequence: Synthetic epitope
ATGASKKSVK

SEQ ID NO: 13486 - protein, 10 aa, Artificial Sequence
  Description of Artificial Sequence: Synthetic epitope
ATGATQQDAN

SEQ ID NO: 13487 - protein, 10 aa, Artificial Sequence
  Description of Artificial Sequence: Synthetic epitope
ATGEELKVKA

SEQ ID NO: 13488 - protein, 10 aa, Artificial Sequence
  Description of Artificial Sequence: Synthetic epitope
ATGEIKGPTV

SEQ ID NO: 13489 - protein, 10 aa, Artificial Sequence
  Description of Artificial Sequence: Synthetic epitope
ATGLAVESIK

SEQ ID NO: 13490 - protein, 10 aa, Artificial Sequence
  Description of Artificial Sequence: Synthetic epitope
ATGNDRKEAA

SEQ ID NO: 13491 - protein, 10 aa, Artificial Sequence
  Description of Artificial Sequence: Synthetic epitope
ATGTLSTATS

SEQ ID NO: 13492 - protein, 10 aa, Artificial Sequence
  Description of Artificial Sequence: Synthetic epitope
ATHIFQDTPH

SEQ ID NO: 13493 - protein, 10 aa, Artificial Sequence
  Description of Artificial Sequence: Synthetic epitope
ATHIQNSRSH

SEQ ID NO: 13494 - protein, 10 aa, Artificial Sequence
  Description of Artificial Sequence: Synthetic epitope
ATHLTSKLLK

SEQ ID NO: 13495 - protein, 10 aa, Artificial Sequence
  Description of Artificial Sequence: Synthetic epitope
ATIEALLSKS

SEQ ID NO: 13496 - protein, 10 aa, Artificial Sequence
  Description of Artificial Sequence: Synthetic epitope
ATIKLSKLSK

SEQ ID NO: 13497 - protein, 10 aa, Artificial Sequence
  Description of Artificial Sequence: Synthetic epitope
ATIKLSKSKD

SEQ ID NO: 13498 - protein, 10 aa, Artificial Sequence
  Description of Artificial Sequence: Synthetic epitope
ATISAKPQIT

SEQ ID NO: 13499 - protein, 10 aa, Artificial Sequence
  Description of Artificial Sequence: Synthetic epitope
ATISQAKSEK

SEQ ID NO: 13500 - protein, 10 aa, Artificial Sequence
  Description of Artificial Sequence: Synthetic epitope
ATKADSVDVE

SEQ ID NO: 13501 - protein, 10 aa, Artificial Sequence
  Description of Artificial Sequence: Synthetic epitope
ATKASTDNSP

SEQ ID NO: 13502 - protein, 10 aa, Artificial Sequence
  Description of Artificial Sequence: Synthetic epitope
ATKRSKPTED

SEQ ID NO: 13503 - protein, 10 aa, Artificial Sequence
  Description of Artificial Sequence: Synthetic epitope
ATLESQKKLN

SEQ ID NO: 13504 - protein, 10 aa, Artificial Sequence
  Description of Artificial Sequence: Synthetic epitope
ATLKLASELI

SEQ ID NO: 13505 - protein, 10 aa, Artificial Sequence
  Description of Artificial Sequence: Synthetic epitope
ATLKSTVEAL

SEQ ID NO: 13506 - protein, 10 aa, Artificial Sequence
  Description of Artificial Sequence: Synthetic epitope
ATLPSLAIQS

SEQ ID NO: 13507 - protein, 10 aa, Artificial Sequence
  Description of Artificial Sequence: Synthetic epitope
ATLRAYVLAL

SEQ ID NO: 13508 - protein, 10 aa, Artificial Sequence
  Description of Artificial Sequence: Synthetic epitope
ATLSLSLSLT

SEQ ID NO: 13509 - protein, 10 aa, Artificial Sequence
  Description of Artificial Sequence: Synthetic epitope
ATLSRSELMS

SEQ ID NO: 13510 - protein, 10 aa, Artificial Sequence
  Description of Artificial Sequence: Synthetic epitope
ATMALAAPSS

SEQ ID NO: 13511 - protein, 10 aa, Artificial Sequence
  Description of Artificial Sequence: Synthetic epitope
ATMEEAAEEV

SEQ ID NO: 13512 - protein, 10 aa, Artificial Sequence
  Description of Artificial Sequence: Synthetic epitope
ATMETEVIEQ

SEQ ID NO: 13513 - protein, 10 aa, Artificial Sequence
  Description of Artificial Sequence: Synthetic epitope
ATMMSKATDK

SEQ ID NO: 13514 - protein, 10 aa, Artificial Sequence
  Description of Artificial Sequence: Synthetic epitope
ATMSTAASGT

SEQ ID NO: 13515 - protein, 10 aa, Artificial Sequence
  Description of Artificial Sequence: Synthetic epitope
ATMVVPLASS

SEQ ID NO: 13516 - protein, 10 aa, Artificial Sequence
  Description of Artificial Sequence: Synthetic epitope
ATNAEFAQTL

SEQ ID NO: 13517 - protein, 10 aa, Artificial Sequence
  Description of Artificial Sequence: Synthetic epitope
ATNGEARAEP

SEQ ID NO: 13518 - protein, 10 aa, Artificial Sequence
  Description of Artificial Sequence: Synthetic epitope
ATNSGSSVTS

SEQ ID NO: 13519 - protein, 10 aa, Artificial Sequence
  Description of Artificial Sequence: Synthetic epitope
ATNTERLSTI

SEQ ID NO: 13520 - protein, 10 aa, Artificial Sequence
  Description of Artificial Sequence: Synthetic epitope
ATNVKNLSEQ

SEQ ID NO: 13521 - protein, 10 aa, Artificial Sequence
  Description of Artificial Sequence: Synthetic epitope
ATPAKAVEAR

SEQ ID NO: 13522 - protein, 10 aa, Artificial Sequence
  Description of Artificial Sequence: Synthetic epitope
ATPISMASGD

SEQ ID NO: 13523 - protein, 10 aa, Artificial Sequence
  Description of Artificial Sequence: Synthetic epitope
ATPRIAKAEQ

SEQ ID NO: 13524 - protein, 10 aa, Artificial Sequence
  Description of Artificial Sequence: Synthetic epitope
ATPTTSVIRS

SEQ ID NO: 13525 - protein, 10 aa, Artificial Sequence
  Description of Artificial Sequence: Synthetic epitope
ATQEKASLDK

SEQ ID NO: 13526 - protein, 10 aa, Artificial Sequence
  Description of Artificial Sequence: Synthetic epitope
ATQEPTDNQV

SEQ ID NO: 13527 - protein, 10 aa, Artificial Sequence
  Description of Artificial Sequence: Synthetic epitope
ATQQFESAKR

SEQ ID NO: 13528 - protein, 10 aa, Artificial Sequence
  Description of Artificial Sequence: Synthetic epitope
ATQSNVLSSV

SEQ ID NO: 13529 - protein, 10 aa, Artificial Sequence
  Description of Artificial Sequence: Synthetic epitope
ATQTIEYTTA

SEQ ID NO: 13530 - protein, 10 aa, Artificial Sequence
  Description of Artificial Sequence: Synthetic epitope
ATQTLNAKNG

SEQ ID NO: 13531 - protein, 10 aa, Artificial Sequence
  Description of Artificial Sequence: Synthetic epitope
ATQYEDTGDL

SEQ ID NO: 13532 - protein, 10 aa, Artificial Sequence
  Description of Artificial Sequence: Synthetic epitope
ATRKREQKAA

SEQ ID NO: 13533 - protein, 10 aa, Artificial Sequence
  Description of Artificial Sequence: Synthetic epitope
ATRLHQSASS

SEQ ID NO: 13534 - protein, 10 aa, Artificial Sequence
  Description of Artificial Sequence: Synthetic epitope
ATRQKTQLAS

SEQ ID NO: 13535 - protein, 10 aa, Artificial Sequence
  Description of Artificial Sequence: Synthetic epitope
ATRSVRKRSP

SEQ ID NO: 13536 - protein, 10 aa, Artificial Sequence
  Description of Artificial Sequence: Synthetic epitope
ATSDKREGSS

SEQ ID NO: 13537 - protein, 10 aa, Artificial Sequence
  Description of Artificial Sequence: Synthetic epitope
ATSDLAIIAR

SEQ ID NO: 13538 - protein, 10 aa, Artificial Sequence
  Description of Artificial Sequence: Synthetic epitope
ATSDPRTTEQ

SEQ ID NO: 13539 - protein, 10 aa, Artificial Sequence
  Description of Artificial Sequence: Synthetic epitope
ATSILDASVE

SEQ ID NO: 13540 - protein, 10 aa, Artificial Sequence
  Description of Artificial Sequence: Synthetic epitope
ATSKATLSST

SEQ ID NO: 13541 - protein, 10 aa, Artificial Sequence
  Description of Artificial Sequence: Synthetic epitope
ATSKEEALME

SEQ ID NO: 13542 - protein, 10 aa, Artificial Sequence
  Description of Artificial Sequence: Synthetic epitope
ATSKTAVEDS

SEQ ID NO: 13543 - protein, 10 aa, Artificial Sequence
  Description of Artificial Sequence: Synthetic epitope
ATSLQAKAEK

SEQ ID NO: 13544 - protein, 10 aa, Artificial Sequence
  Description of Artificial Sequence: Synthetic epitope
ATSLSPASNL

SEQ ID NO: 13545 - protein, 10 aa, Artificial Sequence
  Description of Artificial Sequence: Synthetic epitope
ATSNSATGPV

SEQ ID NO: 13546 - protein, 10 aa, Artificial Sequence
  Description of Artificial Sequence: Synthetic epitope
ATSRNSVMSP

SEQ ID NO: 13547 - protein, 10 aa, Artificial Sequence
  Description of Artificial Sequence: Synthetic epitope
ATSSKQLPLE

SEQ ID NO: 13548 - protein, 10 aa, Artificial Sequence
  Description of Artificial Sequence: Synthetic epitope
ATSSTSRALI

SEQ ID NO: 13549 - protein, 10 aa, Artificial Sequence
  Description of Artificial Sequence: Synthetic epitope
ATSVAQTVST

SEQ ID NO: 13550 - protein, 10 aa, Artificial Sequence
  Description of Artificial Sequence: Synthetic epitope
ATTAKSSGAP

SEQ ID NO: 13551 - protein, 10 aa, Artificial Sequence
  Description of Artificial Sequence: Synthetic epitope
ATTAVGSDTE

SEQ ID NO: 13552 - protein, 10 aa, Artificial Sequence
  Description of Artificial Sequence: Synthetic epitope
ATTDTAKNSN

SEQ ID NO: 13553 - protein, 10 aa, Artificial Sequence
  Description of Artificial Sequence: Synthetic epitope
ATTGQGKSSE

SEQ ID NO: 13554 - protein, 10 aa, Artificial Sequence
  Description of Artificial Sequence: Synthetic epitope
ATTISELSEL

SEQ ID NO: 13555 - protein, 10 aa, Artificial Sequence
  Description of Artificial Sequence: Synthetic epitope
ATTKKIEDLT

SEQ ID NO: 13556 - protein, 10 aa, Artificial Sequence
  Description of Artificial Sequence: Synthetic epitope
ATTLAQFQTP

SEQ ID NO: 13557 - protein, 10 aa, Artificial Sequence
  Description of Artificial Sequence: Synthetic epitope
ATTPALEKAP

SEQ ID NO: 13558 - protein, 10 aa, Artificial Sequence
  Description of Artificial Sequence: Synthetic epitope
ATTPTATSSK

SEQ ID NO: 13559 - protein, 10 aa, Artificial Sequence
  Description of Artificial Sequence: Synthetic epitope
ATTQKQEQII

SEQ ID NO: 13560 - protein, 10 aa, Artificial Sequence
  Description of Artificial Sequence: Synthetic epitope
ATTSKVSSTG

SEQ ID NO: 13561 - protein, 10 aa, Artificial Sequence
  Description of Artificial Sequence: Synthetic epitope
ATTYNVADPR

SEQ ID NO: 13562 - protein, 10 aa, Artificial Sequence
  Description of Artificial Sequence: Synthetic epitope
ATVASTLQFG

SEQ ID NO: 13563 - protein, 10 aa, Artificial Sequence
  Description of Artificial Sequence: Synthetic epitope
ATVAVQTLQQ

SEQ ID NO: 13564 - protein, 10 aa, Artificial Sequence
  Description of Artificial Sequence: Synthetic epitope
ATVEAEAALQ

SEQ ID NO: 13565 - protein, 10 aa, Artificial Sequence
  Description of Artificial Sequence: Synthetic epitope
ATVEYQKEVI

SEQ ID NO: 13566 - protein, 10 aa, Artificial Sequence
  Description of Artificial Sequence: Synthetic epitope
ATVIAEVYSQ

SEQ ID NO: 13567 - protein, 10 aa, Artificial Sequence
  Description of Artificial Sequence: Synthetic epitope
ATVISAASVQ

SEQ ID NO: 13568 - protein, 10 aa, Artificial Sequence
  Description of Artificial Sequence: Synthetic epitope
ATVNRNRIST

SEQ ID NO: 13569 - protein, 10 aa, Artificial Sequence
  Description of Artificial Sequence: Synthetic epitope
ATVNRPSSHS

SEQ ID NO: 13570 - protein, 10 aa, Artificial Sequence
  Description of Artificial Sequence: Synthetic epitope
ATVQPAQTLT

SEQ ID NO: 13571 - protein, 10 aa, Artificial Sequence
  Description of Artificial Sequence: Synthetic epitope
ATVVASVGAQ

SEQ ID NO: 13572 - protein, 10 aa, Artificial Sequence
  Description of Artificial Sequence: Synthetic epitope
ATVVSLQQAL

SEQ ID NO: 13573 - protein, 10 aa, Artificial Sequence
  Description of Artificial Sequence: Synthetic epitope
ATYEEQLVAL

SEQ ID NO: 13574 - protein, 10 aa, Artificial Sequence
  Description of Artificial Sequence: Synthetic epitope
ATYTKDKKWN

SEQ ID NO: 13575 - protein, 10 aa, Artificial Sequence
  Description of Artificial Sequence: Synthetic epitope
AVAEAILPKG

SEQ ID NO: 13576 - protein, 10 aa, Artificial Sequence
  Description of Artificial Sequence: Synthetic epitope
AVAEEVLAAI

SEQ ID NO: 13577 - protein, 10 aa, Artificial Sequence
  Description of Artificial Sequence: Synthetic epitope
AVAESILASA

SEQ ID NO: 13578 - protein, 10 aa, Artificial Sequence
  Description of Artificial Sequence: Synthetic epitope
AVAQVFERGN

SEQ ID NO: 13579 - protein, 10 aa, Artificial Sequence
  Description of Artificial Sequence: Synthetic epitope
AVATAVQRVA

SEQ ID NO: 13580 - protein, 10 aa, Artificial Sequence
  Description of Artificial Sequence: Synthetic epitope
AVDDEEAAEV

SEQ ID NO: 13581 - protein, 10 aa, Artificial Sequence
  Description of Artificial Sequence: Synthetic epitope
AVDEAALNQA

SEQ ID NO: 13582 - protein, 10 aa, Artificial Sequence
  Description of Artificial Sequence: Synthetic epitope
AVDVLSTSSA

SEQ ID NO: 13583 - protein, 10 aa, Artificial Sequence
  Description of Artificial Sequence: Synthetic epitope
AVEAEKDMRI

SEQ ID NO: 13584 - protein, 10 aa, Artificial Sequence
  Description of Artificial Sequence: Synthetic epitope
AVEDNSSEQQ

SEQ ID NO: 13585 - protein, 10 aa, Artificial Sequence
  Description of Artificial Sequence: Synthetic epitope
AVEHIVVTAA

SEQ ID NO: 13586 - protein, 10 aa, Artificial Sequence
  Description of Artificial Sequence: Synthetic epitope
AVEIANEKRH

SEQ ID NO: 13587 - protein, 10 aa, Artificial Sequence
  Description of Artificial Sequence: Synthetic epitope
AVEIQIQELT

SEQ ID NO: 13588 - protein, 10 aa, Artificial Sequence
  Description of Artificial Sequence: Synthetic epitope
AVEKASTGLG

SEQ ID NO: 13589 - protein, 10 aa, Artificial Sequence
  Description of Artificial Sequence: Synthetic epitope
AVEMSTPMSA

SEQ ID NO: 13590 - protein, 10 aa, Artificial Sequence
  Description of Artificial Sequence: Synthetic epitope
AVEVKVLTTV

SEQ ID NO: 13591 - protein, 10 aa, Artificial Sequence
  Description of Artificial Sequence: Synthetic epitope
AVEWEETLKS

SEQ ID NO: 13592 - protein, 10 aa, Artificial Sequence
  Description of Artificial Sequence: Synthetic epitope
AVGNSTFAIA

SEQ ID NO: 13593 - protein, 10 aa, Artificial Sequence
  Description of Artificial Sequence: Synthetic epitope
AVHLDLLSLR

SEQ ID NO: 13594 - protein, 10 aa, Artificial Sequence
  Description of Artificial Sequence: Synthetic epitope
AVIESQPNIV

SEQ ID NO: 13595 - protein, 10 aa, Artificial Sequence
  Description of Artificial Sequence: Synthetic epitope
AVIRKNIVSL

SEQ ID NO: 13596 - protein, 10 aa, Artificial Sequence
  Description of Artificial Sequence: Synthetic epitope
AVKASSEFSP

SEQ ID NO: 13597 - protein, 10 aa, Artificial Sequence
  Description of Artificial Sequence: Synthetic epitope
AVKEKLSIEE

SEQ ID NO: 13598 - protein, 10 aa, Artificial Sequence
  Description of Artificial Sequence: Synthetic epitope
AVKIKETKVM

SEQ ID NO: 13599 - protein, 10 aa, Artificial Sequence
  Description of Artificial Sequence: Synthetic epitope
AVKNFMASEL

SEQ ID NO: 13600 - protein, 10 aa, Artificial Sequence
  Description of Artificial Sequence: Synthetic epitope
AVKQAISGTS

SEQ ID NO: 13601 - protein, 10 aa, Artificial Sequence
  Description of Artificial Sequence: Synthetic epitope
AVKSDSPSTS

SEQ ID NO: 13602 - protein, 10 aa, Artificial Sequence
  Description of Artificial Sequence: Synthetic epitope
AVKVLNSQSE

SEQ ID NO: 13603 - protein, 10 aa, Artificial Sequence
  Description of Artificial Sequence: Synthetic epitope
AVKVPKKEKS

SEQ ID NO: 13604 - protein, 10 aa, Artificial Sequence
  Description of Artificial Sequence: Synthetic epitope
AVKVTQLDST

SEQ ID NO: 13605 - protein, 10 aa, Artificial Sequence
  Description of Artificial Sequence: Synthetic epitope
AVLEKMISQG

SEQ ID NO: 13606 - protein, 10 aa, Artificial Sequence
  Description of Artificial Sequence: Synthetic epitope
AVLELAQDNP

SEQ ID NO: 13607 - protein, 10 aa, Artificial Sequence
  Description of Artificial Sequence: Synthetic epitope
AVLGEGLVQT

SEQ ID NO: 13608 - protein, 10 aa, Artificial Sequence
  Description of Artificial Sequence: Synthetic epitope
AVLKALTSAD

SEQ ID NO: 13609 - protein, 10 aa, Artificial Sequence
  Description of Artificial Sequence: Synthetic epitope
AVLLAAENEE

SEQ ID NO: 13610 - protein, 10 aa, Artificial Sequence
  Description of Artificial Sequence: Synthetic epitope
AVLSAQLRSV

SEQ ID NO: 13611 - protein, 10 aa, Artificial Sequence
  Description of Artificial Sequence: Synthetic epitope
AVLSLLQEVE

SEQ ID NO: 13612 - protein, 10 aa, Artificial Sequence
  Description of Artificial Sequence: Synthetic epitope
AVLVIGVTLY

SEQ ID NO: 13613 - protein, 10 aa, Artificial Sequence
  Description of Artificial Sequence: Synthetic epitope
AVNKQSFQTS

SEQ ID NO: 13614 - protein, 10 aa, Artificial Sequence
  Description of Artificial Sequence: Synthetic epitope
AVNNTGKVLE

SEQ ID NO: 13615 - protein, 10 aa, Artificial Sequence
  Description of Artificial Sequence: Synthetic epitope
AVNSVSEGAK

SEQ ID NO: 13616 - protein, 10 aa, Artificial Sequence
  Description of Artificial Sequence: Synthetic epitope
AVPVSAADST

SEQ ID NO: 13617 - protein, 10 aa, Artificial Sequence
  Description of Artificial Sequence: Synthetic epitope
AVQALSRISD

SEQ ID NO: 13618 - protein, 10 aa, Artificial Sequence
  Description of Artificial Sequence: Synthetic epitope
AVQERAARSQ

SEQ ID NO: 13619 - protein, 10 aa, Artificial Sequence
  Description of Artificial Sequence: Synthetic epitope
AVQGSKSSLS

SEQ ID NO: 13620 - protein, 10 aa, Artificial Sequence
  Description of Artificial Sequence: Synthetic epitope
AVQKMKAKEE

SEQ ID NO: 13621 - protein, 10 aa, Artificial Sequence
  Description of Artificial Sequence: Synthetic epitope
AVQNLQAKET

SEQ ID NO: 13622 - protein, 10 aa, Artificial Sequence
  Description of Artificial Sequence: Synthetic epitope
AVQPSSLEMS

SEQ ID NO: 13623 - protein, 10 aa, Artificial Sequence
  Description of Artificial Sequence: Synthetic epitope
AVRGSPAINV

SEQ ID NO: 13624 - protein, 10 aa, Artificial Sequence
  Description of Artificial Sequence: Synthetic epitope
AVRMRALESS

SEQ ID NO: 13625 - protein, 10 aa, Artificial Sequence
  Description of Artificial Sequence: Synthetic epitope
AVRNTQHQRA

SEQ ID NO: 13626 - protein, 10 aa, Artificial Sequence
  Description of Artificial Sequence: Synthetic epitope
AVRPLLSASY

SEQ ID NO: 13627 - protein, 10 aa, Artificial Sequence
  Description of Artificial Sequence: Synthetic epitope
AVRQQRARTE

SEQ ID NO: 13628 - protein, 10 aa, Artificial Sequence
  Description of Artificial Sequence: Synthetic epitope
AVSAESLPET

SEQ ID NO: 13629 - protein, 10 aa, Artificial Sequence
  Description of Artificial Sequence: Synthetic epitope
AVSEVSINRS

SEQ ID NO: 13630 - protein, 10 aa, Artificial Sequence
  Description of Artificial Sequence: Synthetic epitope
AVSSQMIGKK

SEQ ID NO: 13631 - protein, 10 aa, Artificial Sequence
  Description of Artificial Sequence: Synthetic epitope
AVSSVLSTGV

SEQ ID NO: 13632 - protein, 10 aa, Artificial Sequence
  Description of Artificial Sequence: Synthetic epitope
AVSTPSPSAD

SEQ ID NO: 13633 - protein, 10 aa, Artificial Sequence
  Description of Artificial Sequence: Synthetic epitope
AVSTSNKITR

SEQ ID NO: 13634 - protein, 10 aa, Artificial Sequence
  Description of Artificial Sequence: Synthetic epitope
AVSVLAGPRW

SEQ ID NO: 13635 - protein, 10 aa, Artificial Sequence
  Description of Artificial Sequence: Synthetic epitope
AVTAAGAVKS

SEQ ID NO: 13636 - protein, 10 aa, Artificial Sequence
  Description of Artificial Sequence: Synthetic epitope
AVTDELATSV

SEQ ID NO: 13637 - protein, 10 aa, Artificial Sequence
  Description of Artificial Sequence: Synthetic epitope
AVTEANEALK

SEQ ID NO: 13638 - protein, 10 aa, Artificial Sequence
  Description of Artificial Sequence: Synthetic epitope
AVTKTNSDIL

SEQ ID NO: 13639 - protein, 10 aa, Artificial Sequence
  Description of Artificial Sequence: Synthetic epitope
AVTLAVQPRL

SEQ ID NO: 13640 - protein, 10 aa, Artificial Sequence
  Description of Artificial Sequence: Synthetic epitope
AVTRSRSSDK

SEQ ID NO: 13641 - protein, 10 aa, Artificial Sequence
  Description of Artificial Sequence: Synthetic epitope
AWDLDVKQIS

SEQ ID NO: 13642 - protein, 10 aa, Artificial Sequence
  Description of Artificial Sequence: Synthetic epitope
AWENVDSTAE

SEQ ID NO: 13643 - protein, 10 aa, Artificial Sequence
  Description of Artificial Sequence: Synthetic epitope
AWFQRARVSS

SEQ ID NO: 13644 - protein, 10 aa, Artificial Sequence
  Description of Artificial Sequence: Synthetic epitope
AWKKTSLLSE

SEQ ID NO: 13645 - protein, 10 aa, Artificial Sequence
  Description of Artificial Sequence: Synthetic epitope
AWLLSMIQSK

SEQ ID NO: 13646 - protein, 10 aa, Artificial Sequence
  Description of Artificial Sequence: Synthetic epitope
AWQNSNEENS

SEQ ID NO: 13647 - protein, 10 aa, Artificial Sequence
  Description of Artificial Sequence: Synthetic epitope
AWRLVNAAKI

SEQ ID NO: 13648 - protein, 10 aa, Artificial Sequence
  Description of Artificial Sequence: Synthetic epitope
AWWANMFSYD

SEQ ID NO: 13649 - protein, 10 aa, Artificial Sequence
  Description of Artificial Sequence: Synthetic epitope
AWWKLENSTA

SEQ ID NO: 13650 - protein, 10 aa, Artificial Sequence
  Description of Artificial Sequence: Synthetic epitope
AWWLQLGKFA

SEQ ID NO: 13651 - protein, 10 aa, Artificial Sequence
  Description of Artificial Sequence: Synthetic epitope
AWWRVKVQVK

SEQ ID NO: 13652 - protein, 10 aa, Artificial Sequence
  Description of Artificial Sequence: Synthetic epitope
AYAAELAGLS

SEQ ID NO: 13653 - protein, 10 aa, Artificial Sequence
  Description of Artificial Sequence: Synthetic epitope
AYEQYGASAI

SEQ ID NO: 13654 - protein, 10 aa, Artificial Sequence
  Description of Artificial Sequence: Synthetic epitope
AYFLSNLKQL

SEQ ID NO: 13655 - protein, 10 aa, Artificial Sequence
  Description of Artificial Sequence: Synthetic epitope
AYHMEMISHQ

SEQ ID NO: 13656 - protein, 10 aa, Artificial Sequence
  Description of Artificial Sequence: Synthetic epitope
AYLRSAAIEE

SEQ ID NO: 13657 - protein, 10 aa, Artificial Sequence
  Description of Artificial Sequence: Synthetic epitope
AYQVGAVLGS

SEQ ID NO: 13658 - protein, 10 aa, Artificial Sequence
  Description of Artificial Sequence: Synthetic epitope
AYSQIQKLRG

SEQ ID NO: 13659 - protein, 10 aa, Artificial Sequence
  Description of Artificial Sequence: Synthetic epitope
AYVVKTTENK

SEQ ID NO: 13660 - protein, 10 aa, Artificial Sequence
  Description of Artificial Sequence: Synthetic epitope
BBDKFYWSTS

SEQ ID NO: 13661 - protein, 10 aa, Artificial Sequence
  Description of Artificial Sequence: Synthetic epitope
CGTFAILHVR

SEQ ID NO: 13662 - protein, 10 aa, Artificial Sequence
  Description of Artificial Sequence: Synthetic epitope
CMEIMNVEAG

SEQ ID NO: 13663 - protein, 10 aa, Artificial Sequence
  Description of Artificial Sequence: Synthetic epitope
CQEMKMVQPR

SEQ ID NO: 13664 - protein, 10 aa, Artificial Sequence
  Description of Artificial Sequence: Synthetic epitope
CRKNKKRNSN

SEQ ID NO: 13665 - protein, 10 aa, Artificial Sequence
  Description of Artificial Sequence: Synthetic epitope
CRKSVMIGTA

SEQ ID NO: 13666 - protein, 10 aa, Artificial Sequence
  Description of Artificial Sequence: Synthetic epitope
CSDNSVLQTE

SEQ ID NO: 13667 - protein, 10 aa, Artificial Sequence
  Description of Artificial Sequence: Synthetic epitope
DAAKIVKQKA

SEQ ID NO: 13668 - protein, 10 aa, Artificial Sequence
  Description of Artificial Sequence: Synthetic epitope
DAAMEESSTS

SEQ ID NO: 13669 - protein, 10 aa, Artificial Sequence
  Description of Artificial Sequence: Synthetic epitope
DAARPARRSA

SEQ ID NO: 13670 - protein, 10 aa, Artificial Sequence
  Description of Artificial Sequence: Synthetic epitope
DAARRETRAE

SEQ ID NO: 13671 - protein, 10 aa, Artificial Sequence
  Description of Artificial Sequence: Synthetic epitope
DAARTYVVDF

SEQ ID NO: 13672 - protein, 10 aa, Artificial Sequence
  Description of Artificial Sequence: Synthetic epitope
DAASRALTGS

SEQ ID NO: 13673 - protein, 10 aa, Artificial Sequence
  Description of Artificial Sequence: Synthetic epitope
DAAVAASFSP

SEQ ID NO: 13674 - protein, 10 aa, Artificial Sequence
  Description of Artificial Sequence: Synthetic epitope
DAAVNSGELW

SEQ ID NO: 13675 - protein, 10 aa, Artificial Sequence
  Description of Artificial Sequence: Synthetic epitope
DAAVVLLKNG

SEQ ID NO: 13676 - protein, 10 aa, Artificial Sequence
  Description of Artificial Sequence: Synthetic epitope
DAAYAVKVEL

SEQ ID NO: 13677 - protein, 10 aa, Artificial Sequence
  Description of Artificial Sequence: Synthetic epitope
DADENVSASD

SEQ ID NO: 13678 - protein, 10 aa, Artificial Sequence
  Description of Artificial Sequence: Synthetic epitope
DADLAMSKSA

SEQ ID NO: 13679 - protein, 10 aa, Artificial Sequence
  Description of Artificial Sequence: Synthetic epitope
DADTTRSSRK

SEQ ID NO: 13680 - protein, 10 aa, Artificial Sequence
  Description of Artificial Sequence: Synthetic epitope
DAEAFNLRGQ

SEQ ID NO: 13681 - protein, 10 aa, Artificial Sequence
  Description of Artificial Sequence: Synthetic epitope
DAEALTKNDR

SEQ ID NO: 13682 - protein, 10 aa, Artificial Sequence
  Description of Artificial Sequence: Synthetic epitope
DAEAMNKESP

SEQ ID NO: 13683 - protein, 10 aa, Artificial Sequence
  Description of Artificial Sequence: Synthetic epitope
DAEIEVDEVF

SEQ ID NO: 13684 - protein, 10 aa, Artificial Sequence
  Description of Artificial Sequence: Synthetic epitope
DAEIVVKDNG

SEQ ID NO: 13685 - protein, 10 aa, Artificial Sequence
  Description of Artificial Sequence: Synthetic epitope
DAELVKYKDQ

SEQ ID NO: 13686 - protein, 10 aa, Artificial Sequence
  Description of Artificial Sequence: Synthetic epitope
DAERTNTRAK

SEQ ID NO: 13687 - protein, 10 aa, Artificial Sequence
  Description of Artificial Sequence: Synthetic epitope
DAEVDESESV

SEQ ID NO: 13688 - protein, 10 aa, Artificial Sequence
  Description of Artificial Sequence: Synthetic epitope
DAEVQNMAFQ

SEQ ID NO: 13689 - protein, 10 aa, Artificial Sequence
  Description of Artificial Sequence: Synthetic epitope
DAFTIAETEL

SEQ ID NO: 13690 - protein, 10 aa, Artificial Sequence
  Description of Artificial Sequence: Synthetic epitope
DAGLTENPLT

SEQ ID NO: 13691 - protein, 10 aa, Artificial Sequence
  Description of Artificial Sequence: Synthetic epitope
DAHRDANLHH

SEQ ID NO: 13692 - protein, 10 aa, Artificial Sequence
  Description of Artificial Sequence: Synthetic epitope
DAIDINSQGT

SEQ ID NO: 13693 - protein, 10 aa, Artificial Sequence
  Description of Artificial Sequence: Synthetic epitope
DAIEQTFQRR

SEQ ID NO: 13694 - protein, 10 aa, Artificial Sequence
  Description of Artificial Sequence: Synthetic epitope
DAIEVLIAEK

SEQ ID NO: 13695 - protein, 10 aa, Artificial Sequence
  Description of Artificial Sequence: Synthetic epitope
DAIILALPED

SEQ ID NO: 13696 - protein, 10 aa, Artificial Sequence
  Description of Artificial Sequence: Synthetic epitope
DAIKHQKSSN

SEQ ID NO: 13697 - protein, 10 aa, Artificial Sequence
  Description of Artificial Sequence: Synthetic epitope
DAILEYKLYE

SEQ ID NO: 13698 - protein, 10 aa, Artificial Sequence
  Description of Artificial Sequence: Synthetic epitope
DAISKAGEII

SEQ ID NO: 13699 - protein, 10 aa, Artificial Sequence
  Description of Artificial Sequence: Synthetic epitope
DAISSLLYLP

SEQ ID NO: 13700 - protein, 10 aa, Artificial Sequence
  Description of Artificial Sequence: Synthetic epitope
DAITAYKKYN

SEQ ID NO: 13701 - protein, 10 aa, Artificial Sequence
  Description of Artificial Sequence: Synthetic epitope
DAIVEAHQAE

SEQ ID NO: 13702 - protein, 10 aa, Artificial Sequence
  Description of Artificial Sequence: Synthetic epitope
DAKATKAKSK

SEQ ID NO: 13703 - protein, 10 aa, Artificial Sequence
  Description of Artificial Sequence: Synthetic epitope
DAKIIYEKRR

SEQ ID NO: 13704 - protein, 10 aa, Artificial Sequence
  Description of Artificial Sequence: Synthetic epitope
DAKINKAEKE

SEQ ID NO: 13705 - protein, 10 aa, Artificial Sequence
  Description of Artificial Sequence: Synthetic epitope
DAKKDAKKNA

SEQ ID NO: 13706 - protein, 10 aa, Artificial Sequence
  Description of Artificial Sequence: Synthetic epitope
DAKKLEAKTQ

SEQ ID NO: 13707 - protein, 10 aa, Artificial Sequence
  Description of Artificial Sequence: Synthetic epitope
DAKKMAVKEE

SEQ ID NO: 13708 - protein, 10 aa, Artificial Sequence
  Description of Artificial Sequence: Synthetic epitope
DAKKQIKQVQ

SEQ ID NO: 13709 - protein, 10 aa, Artificial Sequence
  Description of Artificial Sequence: Synthetic epitope
DAKLARVQTK

SEQ ID NO: 13710 - protein, 10 aa, Artificial Sequence
  Description of Artificial Sequence: Synthetic epitope
DAKRSLLQTE

SEQ ID NO: 13711 - protein, 10 aa, Artificial Sequence
  Description of Artificial Sequence: Synthetic epitope
DAKSETQSDD

SEQ ID NO: 13712 - protein, 10 aa, Artificial Sequence
  Description of Artificial Sequence: Synthetic epitope
DAKSSMVIKV

SEQ ID NO: 13713 - protein, 10 aa, Artificial Sequence
  Description of Artificial Sequence: Synthetic epitope
DAKSVTLERS

SEQ ID NO: 13714 - protein, 10 aa, Artificial Sequence
  Description of Artificial Sequence: Synthetic epitope
DAKTKAQLDE

SEQ ID NO: 13715 - protein, 10 aa, Artificial Sequence
  Description of Artificial Sequence: Synthetic epitope
DALAKVSRKP

SEQ ID NO: 13716 - protein, 10 aa, Artificial Sequence
  Description of Artificial Sequence: Synthetic epitope
DALANLKVSQ

SEQ ID NO: 13717 - protein, 10 aa, Artificial Sequence
  Description of Artificial Sequence: Synthetic epitope
DALERNSLSS

SEQ ID NO: 13718 - protein, 10 aa, Artificial Sequence
  Description of Artificial Sequence: Synthetic epitope
DALFTVVRVI

SEQ ID NO: 13719 - protein, 10 aa, Artificial Sequence
  Description of Artificial Sequence: Synthetic epitope
DALGASLQAL

SEQ ID NO: 13720 - protein, 10 aa, Artificial Sequence
  Description of Artificial Sequence: Synthetic epitope
DALLEMNEAK

SEQ ID NO: 13721 - protein, 10 aa, Artificial Sequence
  Description of Artificial Sequence: Synthetic epitope
DALLKKSEAQ

SEQ ID NO: 13722 - protein, 10 aa, Artificial Sequence
  Description of Artificial Sequence: Synthetic epitope
DALLSLLAGD

SEQ ID NO: 13723 - protein, 10 aa, Artificial Sequence
  Description of Artificial Sequence: Synthetic epitope
DALLTTAKEG

SEQ ID NO: 13724 - protein, 10 aa, Artificial Sequence
  Description of Artificial Sequence: Synthetic epitope
DALSTIRLPH

SEQ ID NO: 13725 - protein, 10 aa, Artificial Sequence
  Description of Artificial Sequence: Synthetic epitope
DALTNLTVLS

SEQ ID NO: 13726 - protein, 10 aa, Artificial Sequence
  Description of Artificial Sequence: Synthetic epitope
DALVFYASST

SEQ ID NO: 13727 - protein, 10 aa, Artificial Sequence
  Description of Artificial Sequence: Synthetic epitope
DAMWKKDKKD

SEQ ID NO: 13728 - protein, 10 aa, Artificial Sequence
  Description of Artificial Sequence: Synthetic epitope
DANNSRASEI

SEQ ID NO: 13729 - protein, 10 aa, Artificial Sequence
  Description of Artificial Sequence: Synthetic epitope
DAPAVDTAEQ

SEQ ID NO: 13730 - protein, 10 aa, Artificial Sequence
  Description of Artificial Sequence: Synthetic epitope
DAPLRARPAA

SEQ ID NO: 13731 - protein, 10 aa, Artificial Sequence
  Description of Artificial Sequence: Synthetic epitope
DAPRREQIRA

SEQ ID NO: 13732 - protein, 10 aa, Artificial Sequence
  Description of Artificial Sequence: Synthetic epitope
DAQAQAKDSE

SEQ ID NO: 13733 - protein, 10 aa, Artificial Sequence
  Description of Artificial Sequence: Synthetic epitope
DAQASKINDD

SEQ ID NO: 13734 - protein, 10 aa, Artificial Sequence
  Description of Artificial Sequence: Synthetic epitope
DAQASSKGSA

SEQ ID NO: 13735 - protein, 10 aa, Artificial Sequence
  Description of Artificial Sequence: Synthetic epitope
DAQESSLGLT

SEQ ID NO: 13736 - protein, 10 aa, Artificial Sequence
  Description of Artificial Sequence: Synthetic epitope
DAQIAQLSKE

SEQ ID NO: 13737 - protein, 10 aa, Artificial Sequence
  Description of Artificial Sequence: Synthetic epitope
DAQISNALNA

SEQ ID NO: 13738 - protein, 10 aa, Artificial Sequence
  Description of Artificial Sequence: Synthetic epitope
DAQLTGRISQ

SEQ ID NO: 13739 - protein, 10 aa, Artificial Sequence
  Description of Artificial Sequence: Synthetic epitope
DAQSLKNILL

SEQ ID NO: 13740 - protein, 10 aa, Artificial Sequence
  Description of Artificial Sequence: Synthetic epitope
DARPFAEATS

SEQ ID NO: 13741 - protein, 10 aa, Artificial Sequence
  Description of Artificial Sequence: Synthetic epitope
DARSSKPAAK

SEQ ID NO: 13742 - protein, 10 aa, Artificial Sequence
  Description of Artificial Sequence: Synthetic epitope
DASAKFKELG

SEQ ID NO: 13743 - protein, 10 aa, Artificial Sequence
  Description of Artificial Sequence: Synthetic epitope
DASAVSLSES

SEQ ID NO: 13744 - protein, 10 aa, Artificial Sequence
  Description of Artificial Sequence: Synthetic epitope
DASDKKAHTH

SEQ ID NO: 13745 - protein, 10 aa, Artificial Sequence
  Description of Artificial Sequence: Synthetic epitope
DASEDKSAEK

SEQ ID NO: 13746 - protein, 10 aa, Artificial Sequence
  Description of Artificial Sequence: Synthetic epitope
DASENTGNKQ

SEQ ID NO: 13747 - protein, 10 aa, Artificial Sequence
  Description of Artificial Sequence: Synthetic epitope
DASKAKKPSQ

SEQ ID NO: 13748 - protein, 10 aa, Artificial Sequence
  Description of Artificial Sequence: Synthetic epitope
DASKTLRTLL

SEQ ID NO: 13749 - protein, 10 aa, Artificial Sequence
  Description of Artificial Sequence: Synthetic epitope
DASLEITNVT

SEQ ID NO: 13750 - protein, 10 aa, Artificial Sequence
  Description of Artificial Sequence: Synthetic epitope
DASMLNDELS

SEQ ID NO: 13751 - protein, 10 aa, Artificial Sequence
  Description of Artificial Sequence: Synthetic epitope
DASQVSSTSN

SEQ ID NO: 13752 - protein, 10 aa, Artificial Sequence
  Description of Artificial Sequence: Synthetic epitope
DASSAMDTSE

SEQ ID NO: 13753 - protein, 10 aa, Artificial Sequence
  Description of Artificial Sequence: Synthetic epitope
DASSFESTAN

SEQ ID NO: 13754 - protein, 10 aa, Artificial Sequence
  Description of Artificial Sequence: Synthetic epitope
DASVIATVKH

SEQ ID NO: 13755 - protein, 10 aa, Artificial Sequence
  Description of Artificial Sequence: Synthetic epitope
DASVKEVGSS

SEQ ID NO: 13756 - protein, 10 aa, Artificial Sequence
  Description of Artificial Sequence: Synthetic epitope
DATDPAALIA

SEQ ID NO: 13757 - protein, 10 aa, Artificial Sequence
  Description of Artificial Sequence: Synthetic epitope
DATELSIRKA

SEQ ID NO: 13758 - protein, 10 aa, Artificial Sequence
  Description of Artificial Sequence: Synthetic epitope
DATNISIDKV

SEQ ID NO: 13759 - protein, 10 aa, Artificial Sequence
  Description of Artificial Sequence: Synthetic epitope
DATSTESESE

SEQ ID NO: 13760 - protein, 10 aa, Artificial Sequence
  Description of Artificial Sequence: Synthetic epitope
DATTKFVSEN

SEQ ID NO: 13761 - protein, 10 aa, Artificial Sequence
  Description of Artificial Sequence: Synthetic epitope
DAVAARSLEE

SEQ ID NO: 13762 - protein, 10 aa, Artificial Sequence
  Description of Artificial Sequence: Synthetic epitope
DAVADSVFQS

SEQ ID NO: 13763 - protein, 10 aa, Artificial Sequence
  Description of Artificial Sequence: Synthetic epitope
DAVAELARKA

SEQ ID NO: 13764 - protein, 10 aa, Artificial Sequence
  Description of Artificial Sequence: Synthetic epitope
DAVAKASKET

SEQ ID NO: 13765 - protein, 10 aa, Artificial Sequence
  Description of Artificial Sequence: Synthetic epitope
DAVDSAQSSA

SEQ ID NO: 13766 - protein, 10 aa, Artificial Sequence
  Description of Artificial Sequence: Synthetic epitope
DAVEAELKSS

SEQ ID NO: 13767 - protein, 10 aa, Artificial Sequence
  Description of Artificial Sequence: Synthetic epitope
DAVFKTLSRL

SEQ ID NO: 13768 - protein, 10 aa, Artificial Sequence
  Description of Artificial Sequence: Synthetic epitope
DAVIGYKMKA

SEQ ID NO: 13769 - protein, 10 aa, Artificial Sequence
  Description of Artificial Sequence: Synthetic epitope
DAVKAKAQKR

SEQ ID NO: 13770 - protein, 10 aa, Artificial Sequence
  Description of Artificial Sequence: Synthetic epitope
DAVKIVSAKN

SEQ ID NO: 13771 - protein, 10 aa, Artificial Sequence
  Description of Artificial Sequence: Synthetic epitope
DAVLMEVEVE

SEQ ID NO: 13772 - protein, 10 aa, Artificial Sequence
  Description of Artificial Sequence: Synthetic epitope
DAVNSSTKEE

SEQ ID NO: 13773 - protein, 10 aa, Artificial Sequence
  Description of Artificial Sequence: Synthetic epitope
DAVNVQKISN

SEQ ID NO: 13774 - protein, 10 aa, Artificial Sequence
  Description of Artificial Sequence: Synthetic epitope
DAVPAQKHLA

SEQ ID NO: 13775 - protein, 10 aa, Artificial Sequence
  Description of Artificial Sequence: Synthetic epitope
DAVVETSLTK

SEQ ID NO: 13776 - protein, 10 aa, Artificial Sequence
  Description of Artificial Sequence: Synthetic epitope
DAVVMPKIDT

SEQ ID NO: 13777 - protein, 10 aa, Artificial Sequence
  Description of Artificial Sequence: Synthetic epitope
DAWRVDINKN

SEQ ID NO: 13778 - protein, 10 aa, Artificial Sequence
  Description of Artificial Sequence: Synthetic epitope
DCQGRRSRQQ

SEQ ID NO: 13779 - protein, 10 aa, Artificial Sequence
  Description of Artificial Sequence: Synthetic epitope
DDAEKKLNLA

SEQ ID NO: 13780 - protein, 10 aa, Artificial Sequence
  Description of Artificial Sequence: Synthetic epitope
DDAELQKYSK

SEQ ID NO: 13781 - protein, 10 aa, Artificial Sequence
  Description of Artificial Sequence: Synthetic epitope
DDAKRQRVTA

SEQ ID NO: 13782 - protein, 10 aa, Artificial Sequence
  Description of Artificial Sequence: Synthetic epitope
DDANNAKAVV

SEQ ID NO: 13783 - protein, 10 aa, Artificial Sequence
  Description of Artificial Sequence: Synthetic epitope
DDAQAQHPRK

SEQ ID NO: 13784 - protein, 10 aa, Artificial Sequence
  Description of Artificial Sequence: Synthetic epitope
DDATSGTEVR

SEQ ID NO: 13785 - protein, 10 aa, Artificial Sequence
  Description of Artificial Sequence: Synthetic epitope
DDEAKAPDLM

SEQ ID NO: 13786 - protein, 10 aa, Artificial Sequence
  Description of Artificial Sequence: Synthetic epitope
DDEDLNDTNY

SEQ ID NO: 13787 - protein, 10 aa, Artificial Sequence
  Description of Artificial Sequence: Synthetic epitope
DDEDSAEWEQ

SEQ ID NO: 13788 - protein, 10 aa, Artificial Sequence
  Description of Artificial Sequence: Synthetic epitope
DDEGAAQNST

SEQ ID NO: 13789 - protein, 10 aa, Artificial Sequence
  Description of Artificial Sequence: Synthetic epitope
DDEHLSLTDQ

SEQ ID NO: 13790 - protein, 10 aa, Artificial Sequence
  Description of Artificial Sequence: Synthetic epitope
DDEQQAATPS

SEQ ID NO: 13791 - protein, 10 aa, Artificial Sequence
  Description of Artificial Sequence: Synthetic epitope
DDESESVLSD

SEQ ID NO: 13792 - protein, 10 aa, Artificial Sequence
  Description of Artificial Sequence: Synthetic epitope
DDESKEAKST

SEQ ID NO: 13793 - protein, 10 aa, Artificial Sequence
  Description of Artificial Sequence: Synthetic epitope
DDEVWSKKSN

SEQ ID NO: 13794 - protein, 10 aa, Artificial Sequence
  Description of Artificial Sequence: Synthetic epitope
DDFIDKHIAE

SEQ ID NO: 13795 - protein, 10 aa, Artificial Sequence
  Description of Artificial Sequence: Synthetic epitope
DDFMLVIRSI

SEQ ID NO: 13796 - protein, 10 aa, Artificial Sequence
  Description of Artificial Sequence: Synthetic epitope
DDGDSSTMRN

SEQ ID NO: 13797 - protein, 10 aa, Artificial Sequence
  Description of Artificial Sequence: Synthetic epitope
DDGFSMKHTA

SEQ ID NO: 13798 - protein, 10 aa, Artificial Sequence
  Description of Artificial Sequence: Synthetic epitope
DDHNIVETVL

SEQ ID NO: 13799 - protein, 10 aa, Artificial Sequence
  Description of Artificial Sequence: Synthetic epitope
DDHTRSKVFK

SEQ ID NO: 13800 - protein, 10 aa, Artificial Sequence
  Description of Artificial Sequence: Synthetic epitope
DDIETTKVEM

SEQ ID NO: 13801 - protein, 10 aa, Artificial Sequence
  Description of Artificial Sequence: Synthetic epitope
DDISTKTGIT

SEQ ID NO: 13802 - protein, 10 aa, Artificial Sequence
  Description of Artificial Sequence: Synthetic epitope
DDITETAQIA

SEQ ID NO: 13803 - protein, 10 aa, Artificial Sequence
  Description of Artificial Sequence: Synthetic epitope
DDKDESIRLR

SEQ ID NO: 13804 - protein, 10 aa, Artificial Sequence
  Description of Artificial Sequence: Synthetic epitope
DDKKNKFANT

SEQ ID NO: 13805 - protein, 10 aa, Artificial Sequence
  Description of Artificial Sequence: Synthetic epitope
DDKKRLVRKE

SEQ ID NO: 13806 - protein, 10 aa, Artificial Sequence
  Description of Artificial Sequence: Synthetic epitope
DDKNRRNSSE

SEQ ID NO: 13807 - protein, 10 aa, Artificial Sequence
  Description of Artificial Sequence: Synthetic epitope
DDKQSQQAKN

SEQ ID NO: 13808 - protein, 10 aa, Artificial Sequence
  Description of Artificial Sequence: Synthetic epitope
DDKQSQQAKN

SEQ ID NO: 13809 - protein, 10 aa, Artificial Sequence
  Description of Artificial Sequence: Synthetic epitope
DDKSKSNDPK

SEQ ID NO: 13810 - protein, 10 aa, Artificial Sequence
  Description of Artificial Sequence: Synthetic epitope
DDKVSALMQP

SEQ ID NO: 13811 - protein, 10 aa, Artificial Sequence
  Description of Artificial Sequence: Synthetic epitope
DDLEAIANDS

SEQ ID NO: 13812 - protein, 10 aa, Artificial Sequence
  Description of Artificial Sequence: Synthetic epitope
DDLEGAQETD

SEQ ID NO: 13813 - protein, 10 aa, Artificial Sequence
  Description of Artificial Sequence: Synthetic epitope
DDLFNTNATI

SEQ ID NO: 13814 - protein, 10 aa, Artificial Sequence
  Description of Artificial Sequence: Synthetic epitope
DDLIISQDTD

SEQ ID NO: 13815 - protein, 10 aa, Artificial Sequence
  Description of Artificial Sequence: Synthetic epitope
DDLIVAKNLM

SEQ ID NO: 13816 - protein, 10 aa, Artificial Sequence
  Description of Artificial Sequence: Synthetic epitope
DDLKRATELS

SEQ ID NO: 13817 - protein, 10 aa, Artificial Sequence
  Description of Artificial Sequence: Synthetic epitope
DDLLSSITYS

SEQ ID NO: 13818 - protein, 10 aa, Artificial Sequence
  Description of Artificial Sequence: Synthetic epitope
DDLSSKAKTA

SEQ ID NO: 13819 - protein, 10 aa, Artificial Sequence
  Description of Artificial Sequence: Synthetic epitope
DDMNLKRRTS

SEQ ID NO: 13820 - protein, 10 aa, Artificial Sequence
  Description of Artificial Sequence: Synthetic epitope
DDMSSIVQKA

SEQ ID NO: 13821 - protein, 10 aa, Artificial Sequence
  Description of Artificial Sequence: Synthetic epitope
DDNIEDSTAR

SEQ ID NO: 13822 - protein, 10 aa, Artificial Sequence
  Description of Artificial Sequence: Synthetic epitope
DDNNKFVDDV

SEQ ID NO: 13823 - protein, 10 aa, Artificial Sequence
  Description of Artificial Sequence: Synthetic epitope
DDNSAKQTAH

SEQ ID NO: 13824 - protein, 10 aa, Artificial Sequence
  Description of Artificial Sequence: Synthetic epitope
DDPASQEIER

SEQ ID NO: 13825 - protein, 10 aa, Artificial Sequence
  Description of Artificial Sequence: Synthetic epitope
DDPQEKAMHS

SEQ ID NO: 13826 - protein, 10 aa, Artificial Sequence
  Description of Artificial Sequence: Synthetic epitope
DDPYSSAEPH

SEQ ID NO: 13827 - protein, 10 aa, Artificial Sequence
  Description of Artificial Sequence: Synthetic epitope
DDQKDSVEEM

SEQ ID NO: 13828 - protein, 10 aa, Artificial Sequence
  Description of Artificial Sequence: Synthetic epitope
DDQLGPRELK

SEQ ID NO: 13829 - protein, 10 aa, Artificial Sequence
  Description of Artificial Sequence: Synthetic epitope
DDQQTEWQRY

SEQ ID NO: 13830 - protein, 10 aa, Artificial Sequence
  Description of Artificial Sequence: Synthetic epitope
DDQSTVILPA

SEQ ID NO: 13831 - protein, 10 aa, Artificial Sequence
  Description of Artificial Sequence: Synthetic epitope
DDRKEVVNIQ

SEQ ID NO: 13832 - protein, 10 aa, Artificial Sequence
  Description of Artificial Sequence: Synthetic epitope
DDRKQTIDNS

SEQ ID NO: 13833 - protein, 10 aa, Artificial Sequence
  Description of Artificial Sequence: Synthetic epitope
DDRVLLDLSA

SEQ ID NO: 13834 - protein, 10 aa, Artificial Sequence
  Description of Artificial Sequence: Synthetic epitope
DDSDDKPQIQ

SEQ ID NO: 13835 - protein, 10 aa, Artificial Sequence
  Description of Artificial Sequence: Synthetic epitope
DDSDGSTAAS

SEQ ID NO: 13836 - protein, 10 aa, Artificial Sequence
  Description of Artificial Sequence: Synthetic epitope
DDSDSITVSE

SEQ ID NO: 13837 - protein, 10 aa, Artificial Sequence
  Description of Artificial Sequence: Synthetic epitope
DDSDSTSDTN

SEQ ID NO: 13838 - protein, 10 aa, Artificial Sequence
  Description of Artificial Sequence: Synthetic epitope
DDSEEAPSTS

SEQ ID NO: 13839 - protein, 10 aa, Artificial Sequence
  Description of Artificial Sequence: Synthetic epitope
DDSHTSSITQ

SEQ ID NO: 13840 - protein, 10 aa, Artificial Sequence
  Description of Artificial Sequence: Synthetic epitope
DDSKRDVVKT

SEQ ID NO: 13841 - protein, 10 aa, Artificial Sequence
  Description of Artificial Sequence: Synthetic epitope
DDSLSEASHS

SEQ ID NO: 13842 - protein, 10 aa, Artificial Sequence
  Description of Artificial Sequence: Synthetic epitope
DDSPNVTDDA

SEQ ID NO: 13843 - protein, 10 aa, Artificial Sequence
  Description of Artificial Sequence: Synthetic epitope
DDSPSLNIVK

SEQ ID NO: 13844 - protein, 10 aa, Artificial Sequence
  Description of Artificial Sequence: Synthetic epitope
DDSQLSEDSL

SEQ ID NO: 13845 - protein, 10 aa, Artificial Sequence
  Description of Artificial Sequence: Synthetic epitope
DDSSQAFIST

SEQ ID NO: 13846 - protein, 10 aa, Artificial Sequence
  Description of Artificial Sequence: Synthetic epitope
DDSSTASDSD

SEQ ID NO: 13847 - protein, 10 aa, Artificial Sequence
  Description of Artificial Sequence: Synthetic epitope
DDSVGVEVSS

SEQ ID NO: 13848 - protein, 10 aa, Artificial Sequence
  Description of Artificial Sequence: Synthetic epitope
DDTASQQSVS

SEQ ID NO: 13849 - protein, 10 aa, Artificial Sequence
  Description of Artificial Sequence: Synthetic epitope
DDTFMVEDAV

SEQ ID NO: 13850 - protein, 10 aa, Artificial Sequence
  Description of Artificial Sequence: Synthetic epitope
DDTIKIAEAL

SEQ ID NO: 13851 - protein, 10 aa, Artificial Sequence
  Description of Artificial Sequence: Synthetic epitope
DDTILKTNKH

SEQ ID NO: 13852 - protein, 10 aa, Artificial Sequence
  Description of Artificial Sequence: Synthetic epitope
DDTLAVAQEK

SEQ ID NO: 13853 - protein, 10 aa, Artificial Sequence
  Description of Artificial Sequence: Synthetic epitope
DDTQSRALRG

SEQ ID NO: 13854 - protein, 10 aa, Artificial Sequence
  Description of Artificial Sequence: Synthetic epitope
DDTSAATIEK

SEQ ID NO: 13855 - protein, 10 aa, Artificial Sequence
  Description of Artificial Sequence: Synthetic epitope
DDTSRETFAS

SEQ ID NO: 13856 - protein, 10 aa, Artificial Sequence
  Description of Artificial Sequence: Synthetic epitope
DDTVPQQSPE

SEQ ID NO: 13857 - protein, 10 aa, Artificial Sequence
  Description of Artificial Sequence: Synthetic epitope
DDVFAETEEP

SEQ ID NO: 13858 - protein, 10 aa, Artificial Sequence
  Description of Artificial Sequence: Synthetic epitope
DDVQVQIKIS

SEQ ID NO: 13859 - protein, 10 aa, Artificial Sequence
  Description of Artificial Sequence: Synthetic epitope
DDVTGSVKSE

SEQ ID NO: 13860 - protein, 10 aa, Artificial Sequence
  Description of Artificial Sequence: Synthetic epitope
DDVVSLSSLD

SEQ ID NO: 13861 - protein, 10 aa, Artificial Sequence
  Description of Artificial Sequence: Synthetic epitope
DDWIKLQISH

SEQ ID NO: 13862 - protein, 10 aa, Artificial Sequence
  Description of Artificial Sequence: Synthetic epitope
DDYVTLSDQD

SEQ ID NO: 13863 - protein, 10 aa, Artificial Sequence
  Description of Artificial Sequence: Synthetic epitope
DEAEIKEDLS

SEQ ID NO: 13864 - protein, 10 aa, Artificial Sequence
  Description of Artificial Sequence: Synthetic epitope
DEAKGNEIPQ

SEQ ID NO: 13865 - protein, 10 aa, Artificial Sequence
  Description of Artificial Sequence: Synthetic epitope
DEAKKTFQAS

SEQ ID NO: 13866 - protein, 10 aa, Artificial Sequence
  Description of Artificial Sequence: Synthetic epitope
DEALISRQAP

SEQ ID NO: 13867 - protein, 10 aa, Artificial Sequence
  Description of Artificial Sequence: Synthetic epitope
DEALRAKNLL

SEQ ID NO: 13868 - protein, 10 aa, Artificial Sequence
  Description of Artificial Sequence: Synthetic epitope
DEAPSVQQAA

SEQ ID NO: 13869 - protein, 10 aa, Artificial Sequence
  Description of Artificial Sequence: Synthetic epitope
DEAQFVDSTS

SEQ ID NO: 13870 - protein, 10 aa, Artificial Sequence
  Description of Artificial Sequence: Synthetic epitope
DEATLQKGSW

SEQ ID NO: 13871 - protein, 10 aa, Artificial Sequence
  Description of Artificial Sequence: Synthetic epitope
DEAVAAPLVE

SEQ ID NO: 13872 - protein, 10 aa, Artificial Sequence
  Description of Artificial Sequence: Synthetic epitope
DEDLTQVNVN

SEQ ID NO: 13873 - protein, 10 aa, Artificial Sequence
  Description of Artificial Sequence: Synthetic epitope
DEEAANAPTK

SEQ ID NO: 13874 - protein, 10 aa, Artificial Sequence
  Description of Artificial Sequence: Synthetic epitope
DEEAAQQSKK

SEQ ID NO: 13875 - protein, 10 aa, Artificial Sequence
  Description of Artificial Sequence: Synthetic epitope
DEEAATLAEP

SEQ ID NO: 13876 - protein, 10 aa, Artificial Sequence
  Description of Artificial Sequence: Synthetic epitope
DEEALQNSIL

SEQ ID NO: 13877 - protein, 10 aa, Artificial Sequence
  Description of Artificial Sequence: Synthetic epitope
DEEDEASSDE

SEQ ID NO: 13878 - protein, 10 aa, Artificial Sequence
  Description of Artificial Sequence: Synthetic epitope
DEEIDPIPKV

SEQ ID NO: 13879 - protein, 10 aa, Artificial Sequence
  Description of Artificial Sequence: Synthetic epitope
DEEKTNMEEM

SEQ ID NO: 13880 - protein, 10 aa, Artificial Sequence
  Description of Artificial Sequence: Synthetic epitope
DEELSTSSDS

SEQ ID NO: 13881 - protein, 10 aa, Artificial Sequence
  Description of Artificial Sequence: Synthetic epitope
DEENDSISMP

SEQ ID NO: 13882 - protein, 10 aa, Artificial Sequence
  Description of Artificial Sequence: Synthetic epitope
DEEQQIYTEQ

SEQ ID NO: 13883 - protein, 10 aa, Artificial Sequence
  Description of Artificial Sequence: Synthetic epitope
DEEQQPSQPQ

SEQ ID NO: 13884 - protein, 10 aa, Artificial Sequence
  Description of Artificial Sequence: Synthetic epitope
DEESILSRFD

SEQ ID NO: 13885 - protein, 10 aa, Artificial Sequence
  Description of Artificial Sequence: Synthetic epitope
DEETEAQTGE

SEQ ID NO: 13886 - protein, 10 aa, Artificial Sequence
  Description of Artificial Sequence: Synthetic epitope
DEETQRAKVY

SEQ ID NO: 13887 - protein, 10 aa, Artificial Sequence
  Description of Artificial Sequence: Synthetic epitope
DEFAKGRKVA

SEQ ID NO: 13888 - protein, 10 aa, Artificial Sequence
  Description of Artificial Sequence: Synthetic epitope
DEFILKLKAE

SEQ ID NO: 13889 - protein, 10 aa, Artificial Sequence
  Description of Artificial Sequence: Synthetic epitope
DEFKVKIDQT

SEQ ID NO: 13890 - protein, 10 aa, Artificial Sequence
  Description of Artificial Sequence: Synthetic epitope
DEFLKMMEGV

SEQ ID NO: 13891 - protein, 10 aa, Artificial Sequence
  Description of Artificial Sequence: Synthetic epitope
DEFVEAASKL

SEQ ID NO: 13892 - protein, 10 aa, Artificial Sequence
  Description of Artificial Sequence: Synthetic epitope
DEGDQISSND

SEQ ID NO: 13893 - protein, 10 aa, Artificial Sequence
  Description of Artificial Sequence: Synthetic epitope
DEGFAYSSQE

SEQ ID NO: 13894 - protein, 10 aa, Artificial Sequence
  Description of Artificial Sequence: Synthetic epitope
DEGGSDTESL

SEQ ID NO: 13895 - protein, 10 aa, Artificial Sequence
  Description of Artificial Sequence: Synthetic epitope
DEGIEQVQQS

SEQ ID NO: 13896 - protein, 10 aa, Artificial Sequence
  Description of Artificial Sequence: Synthetic epitope
DEGKASSAKQ

SEQ ID NO: 13897 - protein, 10 aa, Artificial Sequence
  Description of Artificial Sequence: Synthetic epitope
DEGKLKAGQS

SEQ ID NO: 13898 - protein, 10 aa, Artificial Sequence
  Description of Artificial Sequence: Synthetic epitope
DEGRDTSINE

SEQ ID NO: 13899 - protein, 10 aa, Artificial Sequence
  Description of Artificial Sequence: Synthetic epitope
DEGTISSVSR

SEQ ID NO: 13900 - protein, 10 aa, Artificial Sequence
  Description of Artificial Sequence: Synthetic epitope
DEHVATVTQD

SEQ ID NO: 13901 - protein, 10 aa, Artificial Sequence
  Description of Artificial Sequence: Synthetic epitope
DEIDINVDEL

SEQ ID NO: 13902 - protein, 10 aa, Artificial Sequence
  Description of Artificial Sequence: Synthetic epitope
DEIETIISVK

SEQ ID NO: 13903 - protein, 10 aa, Artificial Sequence
  Description of Artificial Sequence: Synthetic epitope
DEIHWIIVQS

SEQ ID NO: 13904 - protein, 10 aa, Artificial Sequence
  Description of Artificial Sequence: Synthetic epitope
DEIILLRSQQ

SEQ ID NO: 13905 - protein, 10 aa, Artificial Sequence
  Description of Artificial Sequence: Synthetic epitope
DEILSDTIGE

SEQ ID NO: 13906 - protein, 10 aa, Artificial Sequence
  Description of Artificial Sequence: Synthetic epitope
DEIMSGRTDR

SEQ ID NO: 13907 - protein, 10 aa, Artificial Sequence
  Description of Artificial Sequence: Synthetic epitope
DEIPAIRNHD

SEQ ID NO: 13908 - protein, 10 aa, Artificial Sequence
  Description of Artificial Sequence: Synthetic epitope
DEISTENLSP

SEQ ID NO: 13909 - protein, 10 aa, Artificial Sequence
  Description of Artificial Sequence: Synthetic epitope
DEITEKKAKK

SEQ ID NO: 13910 - protein, 10 aa, Artificial Sequence
  Description of Artificial Sequence: Synthetic epitope
DEITVSSDFE

SEQ ID NO: 13911 - protein, 10 aa, Artificial Sequence
  Description of Artificial Sequence: Synthetic epitope
DEKEQSEKAA

SEQ ID NO: 13912 - protein, 10 aa, Artificial Sequence
  Description of Artificial Sequence: Synthetic epitope
DEKIQLLELQ

SEQ ID NO: 13913 - protein, 10 aa, Artificial Sequence
  Description of Artificial Sequence: Synthetic epitope
DEKKIKKIPS

SEQ ID NO: 13914 - protein, 10 aa, Artificial Sequence
  Description of Artificial Sequence: Synthetic epitope
DEKNLMRERI

SEQ ID NO: 13915 - protein, 10 aa, Artificial Sequence
  Description of Artificial Sequence: Synthetic epitope
DEKSAQEEVE

SEQ ID NO: 13916 - protein, 10 aa, Artificial Sequence
  Description of Artificial Sequence: Synthetic epitope
DEKVQQKLLR

SEQ ID NO: 13917 - protein, 10 aa, Artificial Sequence
  Description of Artificial Sequence: Synthetic epitope
DELAALQITG

SEQ ID NO: 13918 - protein, 10 aa, Artificial Sequence
  Description of Artificial Sequence: Synthetic epitope
DELELKRSLL

SEQ ID NO: 13919 - protein, 10 aa, Artificial Sequence
  Description of Artificial Sequence: Synthetic epitope
DELKVLKIHI

SEQ ID NO: 13920 - protein, 10 aa, Artificial Sequence
  Description of Artificial Sequence: Synthetic epitope
DEMDVNIGHE

SEQ ID NO: 13921 - protein, 10 aa, Artificial Sequence
  Description of Artificial Sequence: Synthetic epitope
DEMMDKPTSS

SEQ ID NO: 13922 - protein, 10 aa, Artificial Sequence
  Description of Artificial Sequence: Synthetic epitope
DEMNEVETAP

SEQ ID NO: 13923 - protein, 10 aa, Artificial Sequence
  Description of Artificial Sequence: Synthetic epitope
DEMVKTGEAQ

SEQ ID NO: 13924 - protein, 10 aa, Artificial Sequence
  Description of Artificial Sequence: Synthetic epitope
DEMVMIMGGK

SEQ ID NO: 13925 - protein, 10 aa, Artificial Sequence
  Description of Artificial Sequence: Synthetic epitope
DENAMDANMD

SEQ ID NO: 13926 - protein, 10 aa, Artificial Sequence
  Description of Artificial Sequence: Synthetic epitope
DENEEIQVTN

SEQ ID NO: 13927 - protein, 10 aa, Artificial Sequence
  Description of Artificial Sequence: Synthetic epitope
DENLVEVKFA

SEQ ID NO: 13928 - protein, 10 aa, Artificial Sequence
  Description of Artificial Sequence: Synthetic epitope
DENQTHEMIM

SEQ ID NO: 13929 - protein, 10 aa, Artificial Sequence
  Description of Artificial Sequence: Synthetic epitope
DENSVELTMA

SEQ ID NO: 13930 - protein, 10 aa, Artificial Sequence
  Description of Artificial Sequence: Synthetic epitope
DEPSTKQSDP

SEQ ID NO: 13931 - protein, 10 aa, Artificial Sequence
  Description of Artificial Sequence: Synthetic epitope
DEQEASEEKA

SEQ ID NO: 13932 - protein, 10 aa, Artificial Sequence
  Description of Artificial Sequence: Synthetic epitope
DEQEESLREL

SEQ ID NO: 13933 - protein, 10 aa, Artificial Sequence
  Description of Artificial Sequence: Synthetic epitope
DEQKKVPSEA

SEQ ID NO: 13934 - protein, 10 aa, Artificial Sequence
  Description of Artificial Sequence: Synthetic epitope
DEQKVSTSQA

SEQ ID NO: 13935 - protein, 10 aa, Artificial Sequence
  Description of Artificial Sequence: Synthetic epitope
DEQQASLDYL

SEQ ID NO: 13936 - protein, 10 aa, Artificial Sequence
  Description of Artificial Sequence: Synthetic epitope
DEQVEESLQD

SEQ ID NO: 13937 - protein, 10 aa, Artificial Sequence
  Description of Artificial Sequence: Synthetic epitope
DERDVNYWTS

SEQ ID NO: 13938 - protein, 10 aa, Artificial Sequence
  Description of Artificial Sequence: Synthetic epitope
DEREAGITEK

SEQ ID NO: 13939 - protein, 10 aa, Artificial Sequence
  Description of Artificial Sequence: Synthetic epitope
DERLASLKTD

SEQ ID NO: 13940 - protein, 10 aa, Artificial Sequence
  Description of Artificial Sequence: Synthetic epitope
DERMTGSDDV

SEQ ID NO: 13941 - protein, 10 aa, Artificial Sequence
  Description of Artificial Sequence: Synthetic epitope
DERNTGESAS

SEQ ID NO: 13942 - protein, 10 aa, Artificial Sequence
  Description of Artificial Sequence: Synthetic epitope
DERQSQALIL

SEQ ID NO: 13943 - protein, 10 aa, Artificial Sequence
  Description of Artificial Sequence: Synthetic epitope
DERRKEKREE

SEQ ID NO: 13944 - protein, 10 aa, Artificial Sequence
  Description of Artificial Sequence: Synthetic epitope
DERTNAQVVR

SEQ ID NO: 13945 - protein, 10 aa, Artificial Sequence
  Description of Artificial Sequence: Synthetic epitope
DERVASTSQE

SEQ ID NO: 13946 - protein, 10 aa, Artificial Sequence
  Description of Artificial Sequence: Synthetic epitope
DERVDSDSKS

SEQ ID NO: 13947 - protein, 10 aa, Artificial Sequence
  Description of Artificial Sequence: Synthetic epitope
DESAQRVTAS

SEQ ID NO: 13948 - protein, 10 aa, Artificial Sequence
  Description of Artificial Sequence: Synthetic epitope
DESDSQSKSG

SEQ ID NO: 13949 - protein, 10 aa, Artificial Sequence
  Description of Artificial Sequence: Synthetic epitope
DESEILEESP

SEQ ID NO: 13950 - protein, 10 aa, Artificial Sequence
  Description of Artificial Sequence: Synthetic epitope
DESETSDDSA

SEQ ID NO: 13951 - protein, 10 aa, Artificial Sequence
  Description of Artificial Sequence: Synthetic epitope
DESETTVTGS

SEQ ID NO: 13952 - protein, 10 aa, Artificial Sequence
  Description of Artificial Sequence: Synthetic epitope
DESIIKSRNN

SEQ ID NO: 13953 - protein, 10 aa, Artificial Sequence
  Description of Artificial Sequence: Synthetic epitope
DESISSLSEL

SEQ ID NO: 13954 - protein, 10 aa, Artificial Sequence
  Description of Artificial Sequence: Synthetic epitope
DESIYNSQRE

SEQ ID NO: 13955 - protein, 10 aa, Artificial Sequence
  Description of Artificial Sequence: Synthetic epitope
DESLSEETQK

SEQ ID NO: 13956 - protein, 10 aa, Artificial Sequence
  Description of Artificial Sequence: Synthetic epitope
DESRSDRLQV

SEQ ID NO: 13957 - protein, 10 aa, Artificial Sequence
  Description of Artificial Sequence: Synthetic epitope
DESSATAKPL

SEQ ID NO: 13958 - protein, 10 aa, Artificial Sequence
  Description of Artificial Sequence: Synthetic epitope
DESSVESLFH

SEQ ID NO: 13959 - protein, 10 aa, Artificial Sequence
  Description of Artificial Sequence: Synthetic epitope
DETLATLHTA

SEQ ID NO: 13960 - protein, 10 aa, Artificial Sequence
  Description of Artificial Sequence: Synthetic epitope
DETNHASATS

SEQ ID NO: 13961 - protein, 10 aa, Artificial Sequence
  Description of Artificial Sequence: Synthetic epitope
DETQYGTETL

SEQ ID NO: 13962 - protein, 10 aa, Artificial Sequence
  Description of Artificial Sequence: Synthetic epitope
DETRSNETQN

SEQ ID NO: 13963 - protein, 10 aa, Artificial Sequence
  Description of Artificial Sequence: Synthetic epitope
DETSDGQASG

SEQ ID NO: 13964 - protein, 10 aa, Artificial Sequence
  Description of Artificial Sequence: Synthetic epitope
DETSSATTIS

SEQ ID NO: 13965 - protein, 10 aa, Artificial Sequence
  Description of Artificial Sequence: Synthetic epitope
DEVANQVVQA

SEQ ID NO: 13966 - protein, 10 aa, Artificial Sequence
  Description of Artificial Sequence: Synthetic epitope
DEVEKELGKQ

SEQ ID NO: 13967 - protein, 10 aa, Artificial Sequence
  Description of Artificial Sequence: Synthetic epitope
DEVKAARTRR

SEQ ID NO: 13968 - protein, 10 aa, Artificial Sequence
  Description of Artificial Sequence: Synthetic epitope
DEVKAASPGR

SEQ ID NO: 13969 - protein, 10 aa, Artificial Sequence
  Description of Artificial Sequence: Synthetic epitope
DEVKIENEGL

SEQ ID NO: 13970 - protein, 10 aa, Artificial Sequence
  Description of Artificial Sequence: Synthetic epitope
DEVKSSLSAS

SEQ ID NO: 13971 - protein, 10 aa, Artificial Sequence
  Description of Artificial Sequence: Synthetic epitope
DEVLDILESV

SEQ ID NO: 13972 - protein, 10 aa, Artificial Sequence
  Description of Artificial Sequence: Synthetic epitope
DEYHLRATSS

SEQ ID NO: 13973 - protein, 10 aa, Artificial Sequence
  Description of Artificial Sequence: Synthetic epitope
DEYTGKIMML

SEQ ID NO: 13974 - protein, 10 aa, Artificial Sequence
  Description of Artificial Sequence: Synthetic epitope
DEYVRTLEET

SEQ ID NO: 13975 - protein, 10 aa, Artificial Sequence
  Description of Artificial Sequence: Synthetic epitope
DFAQSLLRDP

SEQ ID NO: 13976 - protein, 10 aa, Artificial Sequence
  Description of Artificial Sequence: Synthetic epitope
DFDSIRPEVR

SEQ ID NO: 13977 - protein, 10 aa, Artificial Sequence
  Description of Artificial Sequence: Synthetic epitope
DFEVSAEPIQ

SEQ ID NO: 13978 - protein, 10 aa, Artificial Sequence
  Description of Artificial Sequence: Synthetic epitope
DFEWVYTDQP

SEQ ID NO: 13979 - protein, 10 aa, Artificial Sequence
  Description of Artificial Sequence: Synthetic epitope
DFFKGGIIND

SEQ ID NO: 13980 - protein, 10 aa, Artificial Sequence
  Description of Artificial Sequence: Synthetic epitope
DFGKETQWPL

SEQ ID NO: 13981 - protein, 10 aa, Artificial Sequence
  Description of Artificial Sequence: Synthetic epitope
DFGLESTAGE

SEQ ID NO: 13982 - protein, 10 aa, Artificial Sequence
  Description of Artificial Sequence: Synthetic epitope
DFKKMQDKTQ

SEQ ID NO: 13983 - protein, 10 aa, Artificial Sequence
  Description of Artificial Sequence: Synthetic epitope
DFLIKSINLV

SEQ ID NO: 13984 - protein, 10 aa, Artificial Sequence
  Description of Artificial Sequence: Synthetic epitope
DFLTRGIAKI

SEQ ID NO: 13985 - protein, 10 aa, Artificial Sequence
  Description of Artificial Sequence: Synthetic epitope
DFLTSREIVN

SEQ ID NO: 13986 - protein, 10 aa, Artificial Sequence
  Description of Artificial Sequence: Synthetic epitope
DFNLELAIKT

SEQ ID NO: 13987 - protein, 10 aa, Artificial Sequence
  Description of Artificial Sequence: Synthetic epitope
DFPLSAMLEA

SEQ ID NO: 13988 - protein, 10 aa, Artificial Sequence
  Description of Artificial Sequence: Synthetic epitope
DFPQTVSQQS

SEQ ID NO: 13989 - protein, 10 aa, Artificial Sequence
  Description of Artificial Sequence: Synthetic epitope
DFRDNTVRVQ

SEQ ID NO: 13990 - protein, 10 aa, Artificial Sequence
  Description of Artificial Sequence: Synthetic epitope
DFRSRTNSNA

SEQ ID NO: 13991 - protein, 10 aa, Artificial Sequence
  Description of Artificial Sequence: Synthetic epitope
DFRSVFSTKE

SEQ ID NO: 13992 - protein, 10 aa, Artificial Sequence
  Description of Artificial Sequence: Synthetic epitope
DFSDKEANTA

SEQ ID NO: 13993 - protein, 10 aa, Artificial Sequence
  Description of Artificial Sequence: Synthetic epitope
DFSSKEVKDR

SEQ ID NO: 13994 - protein, 10 aa, Artificial Sequence
  Description of Artificial Sequence: Synthetic epitope
DFTASRVIRE

SEQ ID NO: 13995 - protein, 10 aa, Artificial Sequence
  Description of Artificial Sequence: Synthetic epitope
DFTSASQMSD

SEQ ID NO: 13996 - protein, 10 aa, Artificial Sequence
  Description of Artificial Sequence: Synthetic epitope
DFTYHANIDH

SEQ ID NO: 13997 - protein, 10 aa, Artificial Sequence
  Description of Artificial Sequence: Synthetic epitope
DFVAALTVKE

SEQ ID NO: 13998 - protein, 10 aa, Artificial Sequence
  Description of Artificial Sequence: Synthetic epitope
DFVPYIASIN

SEQ ID NO: 13999 - protein, 10 aa, Artificial Sequence
  Description of Artificial Sequence: Synthetic epitope
DFVVSDLEHI

SEQ ID NO: 14000 - protein, 10 aa, Artificial Sequence
  Description of Artificial Sequence: Synthetic epitope
DGDELSESSM

SEQ ID NO: 14001 - protein, 10 aa, Artificial Sequence
  Description of Artificial Sequence: Synthetic epitope
DGDLLSMESE

SEQ ID NO: 14002 - protein, 10 aa, Artificial Sequence
  Description of Artificial Sequence: Synthetic epitope
DGDVIKTEGA

SEQ ID NO: 14003 - protein, 10 aa, Artificial Sequence
  Description of Artificial Sequence: Synthetic epitope
DGEASKSTNS

SEQ ID NO: 14004 - protein, 10 aa, Artificial Sequence
  Description of Artificial Sequence: Synthetic epitope
DGEFAQSLSD

SEQ ID NO: 14005 - protein, 10 aa, Artificial Sequence
  Description of Artificial Sequence: Synthetic epitope
DGEIGAKGLM

SEQ ID NO: 14006 - protein, 10 aa, Artificial Sequence
  Description of Artificial Sequence: Synthetic epitope
DGEITKTAKS

SEQ ID NO: 14007 - protein, 10 aa, Artificial Sequence
  Description of Artificial Sequence: Synthetic epitope
DGEKLTSETD

SEQ ID NO: 14008 - protein, 10 aa, Artificial Sequence
  Description of Artificial Sequence: Synthetic epitope
DGEKQAEPVV

SEQ ID NO: 14009 - protein, 10 aa, Artificial Sequence
  Description of Artificial Sequence: Synthetic epitope
DGESKASSAP

SEQ ID NO: 14010 - protein, 10 aa, Artificial Sequence
  Description of Artificial Sequence: Synthetic epitope
DGETGESFPA

SEQ ID NO: 14011 - protein, 10 aa, Artificial Sequence
  Description of Artificial Sequence: Synthetic epitope
DGEVTKIMSP

SEQ ID NO: 14012 - protein, 10 aa, Artificial Sequence
  Description of Artificial Sequence: Synthetic epitope
DGFEASTDAA

SEQ ID NO: 14013 - protein, 10 aa, Artificial Sequence
  Description of Artificial Sequence: Synthetic epitope
DGFKSSQLNN

SEQ ID NO: 14014 - protein, 10 aa, Artificial Sequence
  Description of Artificial Sequence: Synthetic epitope
DGFLSELTQQ

SEQ ID NO: 14015 - protein, 10 aa, Artificial Sequence
  Description of Artificial Sequence: Synthetic epitope
DGFQMIKDEL

SEQ ID NO: 14016 - protein, 10 aa, Artificial Sequence
  Description of Artificial Sequence: Synthetic epitope
DGGEENLEKN

SEQ ID NO: 14017 - protein, 10 aa, Artificial Sequence
  Description of Artificial Sequence: Synthetic epitope
DGIRREEFVQ

SEQ ID NO: 14018 - protein, 10 aa, Artificial Sequence
  Description of Artificial Sequence: Synthetic epitope
DGISDLQQLQ

SEQ ID NO: 14019 - protein, 10 aa, Artificial Sequence
  Description of Artificial Sequence: Synthetic epitope
DGISTSATTN

SEQ ID NO: 14020 - protein, 10 aa, Artificial Sequence
  Description of Artificial Sequence: Synthetic epitope
DGKLEMSRDD

SEQ ID NO: 14021 - protein, 10 aa, Artificial Sequence
  Description of Artificial Sequence: Synthetic epitope
DGKRIQYQLV

SEQ ID NO: 14022 - protein, 10 aa, Artificial Sequence
  Description of Artificial Sequence: Synthetic epitope
DGLAQAQAEG

SEQ ID NO: 14023 - protein, 10 aa, Artificial Sequence
  Description of Artificial Sequence: Synthetic epitope
DGLKGSRTAA

SEQ ID NO: 14024 - protein, 10 aa, Artificial Sequence
  Description of Artificial Sequence: Synthetic epitope
DGLKQVMAIK

SEQ ID NO: 14025 - protein, 10 aa, Artificial Sequence
  Description of Artificial Sequence: Synthetic epitope
DGLSAEEKYG

SEQ ID NO: 14026 - protein, 10 aa, Artificial Sequence
  Description of Artificial Sequence: Synthetic epitope
DGLSKSSQGS

SEQ ID NO: 14027 - protein, 10 aa, Artificial Sequence
  Description of Artificial Sequence: Synthetic epitope
DGLSLKSISS

SEQ ID NO: 14028 - protein, 10 aa, Artificial Sequence
  Description of Artificial Sequence: Synthetic epitope
DGMIKWVKVS

SEQ ID NO: 14029 - protein, 10 aa, Artificial Sequence
  Description of Artificial Sequence: Synthetic epitope
DGMNGVINRN

SEQ ID NO: 14030 - protein, 10 aa, Artificial Sequence
  Description of Artificial Sequence: Synthetic epitope
DGNAFIGDIK

SEQ ID NO: 14031 - protein, 10 aa, Artificial Sequence
  Description of Artificial Sequence: Synthetic epitope
DGNSRAISKA

SEQ ID NO: 14032 - protein, 10 aa, Artificial Sequence
  Description of Artificial Sequence: Synthetic epitope
DGNWFPNTLN

SEQ ID NO: 14033 - protein, 10 aa, Artificial Sequence
  Description of Artificial Sequence: Synthetic epitope
DGPTKKVGNQ

SEQ ID NO: 14034 - protein, 10 aa, Artificial Sequence
  Description of Artificial Sequence: Synthetic epitope
DGQFILLEYN

SEQ ID NO: 14035 - protein, 10 aa, Artificial Sequence
  Description of Artificial Sequence: Synthetic epitope
DGQVKDQQTD

SEQ ID NO: 14036 - protein, 10 aa, Artificial Sequence
  Description of Artificial Sequence: Synthetic epitope
DGRIYIRNWQ

SEQ ID NO: 14037 - protein, 10 aa, Artificial Sequence
  Description of Artificial Sequence: Synthetic epitope
DGRLRNSRGA

SEQ ID NO: 14038 - protein, 10 aa, Artificial Sequence
  Description of Artificial Sequence: Synthetic epitope
DGSFTSSEGS

SEQ ID NO: 14039 - protein, 10 aa, Artificial Sequence
  Description of Artificial Sequence: Synthetic epitope
DGSGVFEIAE

SEQ ID NO: 14040 - protein, 10 aa, Artificial Sequence
  Description of Artificial Sequence: Synthetic epitope
DGSSQSDSGE

SEQ ID NO: 14041 - protein, 10 aa, Artificial Sequence
  Description of Artificial Sequence: Synthetic epitope
DGTAEVETRE

SEQ ID NO: 14042 - protein, 10 aa, Artificial Sequence
  Description of Artificial Sequence: Synthetic epitope
DGTASLALAR

SEQ ID NO: 14043 - protein, 10 aa, Artificial Sequence
  Description of Artificial Sequence: Synthetic epitope
DGTKATKMAH

SEQ ID NO: 14044 - protein, 10 aa, Artificial Sequence
  Description of Artificial Sequence: Synthetic epitope
DGTKGMTRSK

SEQ ID NO: 14045 - protein, 10 aa, Artificial Sequence
  Description of Artificial Sequence: Synthetic epitope
DGTSGATLQA

SEQ ID NO: 14046 - protein, 10 aa, Artificial Sequence
  Description of Artificial Sequence: Synthetic epitope
DGTTNAIQRP

SEQ ID NO: 14047 - protein, 10 aa, Artificial Sequence
  Description of Artificial Sequence: Synthetic epitope
DGVLWAHDLQ

SEQ ID NO: 14048 - protein, 10 aa, Artificial Sequence
  Description of Artificial Sequence: Synthetic epitope
DGVRKSSALA

SEQ ID NO: 14049 - protein, 10 aa, Artificial Sequence
  Description of Artificial Sequence: Synthetic epitope
DGVSTNRLKQ

SEQ ID NO: 14050 - protein, 10 aa, Artificial Sequence
  Description of Artificial Sequence: Synthetic epitope
DGVTATAADE

SEQ ID NO: 14051 - protein, 10 aa, Artificial Sequence
  Description of Artificial Sequence: Synthetic epitope
DGYIKQKEID

SEQ ID NO: 14052 - protein, 10 aa, Artificial Sequence
  Description of Artificial Sequence: Synthetic epitope
DGYVISQKES

SEQ ID NO: 14053 - protein, 10 aa, Artificial Sequence
  Description of Artificial Sequence: Synthetic epitope
DHALHFVQHH

SEQ ID NO: 14054 - protein, 10 aa, Artificial Sequence
  Description of Artificial Sequence: Synthetic epitope
DHANEELDEL

SEQ ID NO: 14055 - protein, 10 aa, Artificial Sequence
  Description of Artificial Sequence: Synthetic epitope
DHANMFPHLK

SEQ ID NO: 14056 - protein, 10 aa, Artificial Sequence
  Description of Artificial Sequence: Synthetic epitope
DHASSMPNAE

SEQ ID NO: 14057 - protein, 10 aa, Artificial Sequence
  Description of Artificial Sequence: Synthetic epitope
DHDLYFLFSF

SEQ ID NO: 14058 - protein, 10 aa, Artificial Sequence
  Description of Artificial Sequence: Synthetic epitope
DHEYSIKSVQ

SEQ ID NO: 14059 - protein, 10 aa, Artificial Sequence
  Description of Artificial Sequence: Synthetic epitope
DHFASNSQEP

SEQ ID NO: 14060 - protein, 10 aa, Artificial Sequence
  Description of Artificial Sequence: Synthetic epitope
DHGIKSLSSP

SEQ ID NO: 14061 - protein, 10 aa, Artificial Sequence
  Description of Artificial Sequence: Synthetic epitope
DHHVQGRDSQ

SEQ ID NO: 14062 - protein, 10 aa, Artificial Sequence
  Description of Artificial Sequence: Synthetic epitope
DHISAQLQNT

SEQ ID NO: 14063 - protein, 10 aa, Artificial Sequence
  Description of Artificial Sequence: Synthetic epitope
DHITTDVQGQ

SEQ ID NO: 14064 - protein, 10 aa, Artificial Sequence
  Description of Artificial Sequence: Synthetic epitope
DHITTLLRPG

SEQ ID NO: 14065 - protein, 10 aa, Artificial Sequence
  Description of Artificial Sequence: Synthetic epitope
DHKEKSTEIN

SEQ ID NO: 14066 - protein, 10 aa, Artificial Sequence
  Description of Artificial Sequence: Synthetic epitope
DHKLAEVSQN

SEQ ID NO: 14067 - protein, 10 aa, Artificial Sequence
  Description of Artificial Sequence: Synthetic epitope
DHKLNLRGKA

SEQ ID NO: 14068 - protein, 10 aa, Artificial Sequence
  Description of Artificial Sequence: Synthetic epitope
DHLLVENIER

SEQ ID NO: 14069 - protein, 10 aa, Artificial Sequence
  Description of Artificial Sequence: Synthetic epitope
DHMGMTASYT

SEQ ID NO: 14070 - protein, 10 aa, Artificial Sequence
  Description of Artificial Sequence: Synthetic epitope
DHNATSILQQ

SEQ ID NO: 14071 - protein, 10 aa, Artificial Sequence
  Description of Artificial Sequence: Synthetic epitope
DHNTRRTSWI

SEQ ID NO: 14072 - protein, 10 aa, Artificial Sequence
  Description of Artificial Sequence: Synthetic epitope
DHPIEATERV

SEQ ID NO: 14073 - protein, 10 aa, Artificial Sequence
  Description of Artificial Sequence: Synthetic epitope
DHPLSASLPT

SEQ ID NO: 14074 - protein, 10 aa, Artificial Sequence
  Description of Artificial Sequence: Synthetic epitope
DHQMASTGGT

SEQ ID NO: 14075 - protein, 10 aa, Artificial Sequence
  Description of Artificial Sequence: Synthetic epitope
DHQQYKKDQN

SEQ ID NO: 14076 - protein, 10 aa, Artificial Sequence
  Description of Artificial Sequence: Synthetic epitope
DHRESKKSRS

SEQ ID NO: 14077 - protein, 10 aa, Artificial Sequence
  Description of Artificial Sequence: Synthetic epitope
DHRQFEIERD

SEQ ID NO: 14078 - protein, 10 aa, Artificial Sequence
  Description of Artificial Sequence: Synthetic epitope
DHRVKLQELE

SEQ ID NO: 14079 - protein, 10 aa, Artificial Sequence
  Description of Artificial Sequence: Synthetic epitope
DHSEGGLVEN

SEQ ID NO: 14080 - protein, 10 aa, Artificial Sequence
  Description of Artificial Sequence: Synthetic epitope
DHTGAASQKK

SEQ ID NO: 14081 - protein, 10 aa, Artificial Sequence
  Description of Artificial Sequence: Synthetic epitope
DHTGHTSSKS

SEQ ID NO: 14082 - protein, 10 aa, Artificial Sequence
  Description of Artificial Sequence: Synthetic epitope
DHTVSMQYGL

SEQ ID NO: 14083 - protein, 10 aa, Artificial Sequence
  Description of Artificial Sequence: Synthetic epitope
DHWAQYVSHN

SEQ ID NO: 14084 - protein, 10 aa, Artificial Sequence
  Description of Artificial Sequence: Synthetic epitope
DHYKEYSQMQ

SEQ ID NO: 14085 - protein, 10 aa, Artificial Sequence
  Description of Artificial Sequence: Synthetic epitope
DIALNNLTYI

SEQ ID NO: 14086 - protein, 10 aa, Artificial Sequence
  Description of Artificial Sequence: Synthetic epitope
DIAMAKSAKL

SEQ ID NO: 14087 - protein, 10 aa, Artificial Sequence
  Description of Artificial Sequence: Synthetic epitope
DIASSKAKKG

SEQ ID NO: 14088 - protein, 10 aa, Artificial Sequence
  Description of Artificial Sequence: Synthetic epitope
DIATGISSQI

SEQ ID NO: 14089 - protein, 10 aa, Artificial Sequence
  Description of Artificial Sequence: Synthetic epitope
DIATMVSGSS

SEQ ID NO: 14090 - protein, 10 aa, Artificial Sequence
  Description of Artificial Sequence: Synthetic epitope
DIAVSNSSPN

SEQ ID NO: 14091 - protein, 10 aa, Artificial Sequence
  Description of Artificial Sequence: Synthetic epitope
DIDFIILDWF

SEQ ID NO: 14092 - protein, 10 aa, Artificial Sequence
  Description of Artificial Sequence: Synthetic epitope
DIDNSAESAI

SEQ ID NO: 14093 - protein, 10 aa, Artificial Sequence
  Description of Artificial Sequence: Synthetic epitope
DIEAKSKLSL

SEQ ID NO: 14094 - protein, 10 aa, Artificial Sequence
  Description of Artificial Sequence: Synthetic epitope
DIEALLSQGP

SEQ ID NO: 14095 - protein, 10 aa, Artificial Sequence
  Description of Artificial Sequence: Synthetic epitope
DIELEASQLD

SEQ ID NO: 14096 - protein, 10 aa, Artificial Sequence
  Description of Artificial Sequence: Synthetic epitope
DIEREQVKEQ

SEQ ID NO: 14097 - protein, 10 aa, Artificial Sequence
  Description of Artificial Sequence: Synthetic epitope
DIIKSTVHRD

SEQ ID NO: 14098 - protein, 10 aa, Artificial Sequence
  Description of Artificial Sequence: Synthetic epitope
DIILTKEKNS

SEQ ID NO: 14099 - protein, 10 aa, Artificial Sequence
  Description of Artificial Sequence: Synthetic epitope
DIISEKEENI

SEQ ID NO: 14100 - protein, 10 aa, Artificial Sequence
  Description of Artificial Sequence: Synthetic epitope
DIITASSPND

SEQ ID NO: 14101 - protein, 10 aa, Artificial Sequence
  Description of Artificial Sequence: Synthetic epitope
DIITASYAPE

SEQ ID NO: 14102 - protein, 10 aa, Artificial Sequence
  Description of Artificial Sequence: Synthetic epitope
DIKAMVEQEY

SEQ ID NO: 14103 - protein, 10 aa, Artificial Sequence
  Description of Artificial Sequence: Synthetic epitope
DIKLSVKSFH

SEQ ID NO: 14104 - protein, 10 aa, Artificial Sequence
  Description of Artificial Sequence: Synthetic epitope
DIKLYDMADV

SEQ ID NO: 14105 - protein, 10 aa, Artificial Sequence
  Description of Artificial Sequence: Synthetic epitope
DIKQEESILM

SEQ ID NO: 14106 - protein, 10 aa, Artificial Sequence
  Description of Artificial Sequence: Synthetic epitope
DIKSEQSDLS

SEQ ID NO: 14107 - protein, 10 aa, Artificial Sequence
  Description of Artificial Sequence: Synthetic epitope
DIKSESGLRV

SEQ ID NO: 14108 - protein, 10 aa, Artificial Sequence
  Description of Artificial Sequence: Synthetic epitope
DIKSPKFKAE

SEQ ID NO: 14109 - protein, 10 aa, Artificial Sequence
  Description of Artificial Sequence: Synthetic epitope
DIKTELESKE

SEQ ID NO: 14110 - protein, 10 aa, Artificial Sequence
  Description of Artificial Sequence: Synthetic epitope
DILAANTVNV

SEQ ID NO: 14111 - protein, 10 aa, Artificial Sequence
  Description of Artificial Sequence: Synthetic epitope
DILETTSFQA

SEQ ID NO: 14112 - protein, 10 aa, Artificial Sequence
  Description of Artificial Sequence: Synthetic epitope
DILLEQSLQS

SEQ ID NO: 14113 - protein, 10 aa, Artificial Sequence
  Description of Artificial Sequence: Synthetic epitope
DILQMIELHA

SEQ ID NO: 14114 - protein, 10 aa, Artificial Sequence
  Description of Artificial Sequence: Synthetic epitope
DILQSAISKH

SEQ ID NO: 14115 - protein, 10 aa, Artificial Sequence
  Description of Artificial Sequence: Synthetic epitope
DILQTIMSFT

SEQ ID NO: 14116 - protein, 10 aa, Artificial Sequence
  Description of Artificial Sequence: Synthetic epitope
DILQYDASLT

SEQ ID NO: 14117 - protein, 10 aa, Artificial Sequence
  Description of Artificial Sequence: Synthetic epitope
DILRDVSDLK

SEQ ID NO: 14118 - protein, 10 aa, Artificial Sequence
  Description of Artificial Sequence: Synthetic epitope
DILRMETTER

SEQ ID NO: 14119 - protein, 10 aa, Artificial Sequence
  Description of Artificial Sequence: Synthetic epitope
DILTAIAADL

SEQ ID NO: 14120 - protein, 10 aa, Artificial Sequence
  Description of Artificial Sequence: Synthetic epitope
DINLEVSFAE

SEQ ID NO: 14121 - protein, 10 aa, Artificial Sequence
  Description of Artificial Sequence: Synthetic epitope
DINLQKVDID

SEQ ID NO: 14122 - protein, 10 aa, Artificial Sequence
  Description of Artificial Sequence: Synthetic epitope
DIPERSQREM

SEQ ID NO: 14123 - protein, 10 aa, Artificial Sequence
  Description of Artificial Sequence: Synthetic epitope
DIPVQEEVEP

SEQ ID NO: 14124 - protein, 10 aa, Artificial Sequence
  Description of Artificial Sequence: Synthetic epitope
DIQDSHVSIS

SEQ ID NO: 14125 - protein, 10 aa, Artificial Sequence
  Description of Artificial Sequence: Synthetic epitope
DIQVLAAPQL

SEQ ID NO: 14126 - protein, 10 aa, Artificial Sequence
  Description of Artificial Sequence: Synthetic epitope
DIRAKVAHVI

SEQ ID NO: 14127 - protein, 10 aa, Artificial Sequence
  Description of Artificial Sequence: Synthetic epitope
DIRGETLNHH

SEQ ID NO: 14128 - protein, 10 aa, Artificial Sequence
  Description of Artificial Sequence: Synthetic epitope
DIRPAIETHE

SEQ ID NO: 14129 - protein, 10 aa, Artificial Sequence
  Description of Artificial Sequence: Synthetic epitope
DISAKTKALK

SEQ ID NO: 14130 - protein, 10 aa, Artificial Sequence
  Description of Artificial Sequence: Synthetic epitope
DISATDLANQ

SEQ ID NO: 14131 - protein, 10 aa, Artificial Sequence
  Description of Artificial Sequence: Synthetic epitope
DISDHVEQIH

SEQ ID NO: 14132 - protein, 10 aa, Artificial Sequence
  Description of Artificial Sequence: Synthetic epitope
DISLIFAALK

SEQ ID NO: 14133 - protein, 10 aa, Artificial Sequence
  Description of Artificial Sequence: Synthetic epitope
DISQVLQVQE

SEQ ID NO: 14134 - protein, 10 aa, Artificial Sequence
  Description of Artificial Sequence: Synthetic epitope
DISTSGQEQI

SEQ ID NO: 14135 - protein, 10 aa, Artificial Sequence
  Description of Artificial Sequence: Synthetic epitope
DISVALNTRK

SEQ ID NO: 14136 - protein, 10 aa, Artificial Sequence
  Description of Artificial Sequence: Synthetic epitope
DISVLKLKVD

SEQ ID NO: 14137 - protein, 10 aa, Artificial Sequence
  Description of Artificial Sequence: Synthetic epitope
DITDLELLDK

SEQ ID NO: 14138 - protein, 10 aa, Artificial Sequence
  Description of Artificial Sequence: Synthetic epitope
DITLSTAETQ

SEQ ID NO: 14139 - protein, 10 aa, Artificial Sequence
  Description of Artificial Sequence: Synthetic epitope
DITSAADSEA

SEQ ID NO: 14140 - protein, 10 aa, Artificial Sequence
  Description of Artificial Sequence: Synthetic epitope
DITTSADQIA

SEQ ID NO: 14141 - protein, 10 aa, Artificial Sequence
  Description of Artificial Sequence: Synthetic epitope
DIVETETSKE

SEQ ID NO: 14142 - protein, 10 aa, Artificial Sequence
  Description of Artificial Sequence: Synthetic epitope
DIVGKIVGKH

SEQ ID NO: 14143 - protein, 10 aa, Artificial Sequence
  Description of Artificial Sequence: Synthetic epitope
DIVIPSAAVI

SEQ ID NO: 14144 - protein, 10 aa, Artificial Sequence
  Description of Artificial Sequence: Synthetic epitope
DIVKEVAKII

SEQ ID NO: 14145 - protein, 10 aa, Artificial Sequence
  Description of Artificial Sequence: Synthetic epitope
DIVTVQVLPQ

SEQ ID NO: 14146 - protein, 10 aa, Artificial Sequence
  Description of Artificial Sequence: Synthetic epitope
DIWAKTPPIT

SEQ ID NO: 14147 - protein, 10 aa, Artificial Sequence
  Description of Artificial Sequence: Synthetic epitope
DIWTKMADTN

SEQ ID NO: 14148 - protein, 10 aa, Artificial Sequence
  Description of Artificial Sequence: Synthetic epitope
DIYEKQTKEE

SEQ ID NO: 14149 - protein, 10 aa, Artificial Sequence
  Description of Artificial Sequence: Synthetic epitope
DIYIQLTGEK

SEQ ID NO: 14150 - protein, 10 aa, Artificial Sequence
  Description of Artificial Sequence: Synthetic epitope
DIYQKSTVLK

SEQ ID NO: 14151 - protein, 10 aa, Artificial Sequence
  Description of Artificial Sequence: Synthetic epitope
DKAAQRDNEE

SEQ ID NO: 14152 - protein, 10 aa, Artificial Sequence
  Description of Artificial Sequence: Synthetic epitope
DKAEALAALQ

SEQ ID NO: 14153 - protein, 10 aa, Artificial Sequence
  Description of Artificial Sequence: Synthetic epitope
DKAEDHEFSK

SEQ ID NO: 14154 - protein, 10 aa, Artificial Sequence
  Description of Artificial Sequence: Synthetic epitope
DKAEEVMLAE

SEQ ID NO: 14155 - protein, 10 aa, Artificial Sequence
  Description of Artificial Sequence: Synthetic epitope
DKAEKQALLS

SEQ ID NO: 14156 - protein, 10 aa, Artificial Sequence
  Description of Artificial Sequence: Synthetic epitope
DKAETVQRII

SEQ ID NO: 14157 - protein, 10 aa, Artificial Sequence
  Description of Artificial Sequence: Synthetic epitope
DKAISARKIN

SEQ ID NO: 14158 - protein, 10 aa, Artificial Sequence
  Description of Artificial Sequence: Synthetic epitope
DKAISNSHYV

SEQ ID NO: 14159 - protein, 10 aa, Artificial Sequence
  Description of Artificial Sequence: Synthetic epitope
DKALELNMLS

SEQ ID NO: 14160 - protein, 10 aa, Artificial Sequence
  Description of Artificial Sequence: Synthetic epitope
DKALGSAQYE

SEQ ID NO: 14161 - protein, 10 aa, Artificial Sequence
  Description of Artificial Sequence: Synthetic epitope
DKALVPKRMP

SEQ ID NO: 14162 - protein, 10 aa, Artificial Sequence
  Description of Artificial Sequence: Synthetic epitope
DKASDAAPNL

SEQ ID NO: 14163 - protein, 10 aa, Artificial Sequence
  Description of Artificial Sequence: Synthetic epitope
DKASYAVSET

SEQ ID NO: 14164 - protein, 10 aa, Artificial Sequence
  Description of Artificial Sequence: Synthetic epitope
DKAVEMALQA

SEQ ID NO: 14165 - protein, 10 aa, Artificial Sequence
  Description of Artificial Sequence: Synthetic epitope
DKAVQAARLA

SEQ ID NO: 14166 - protein, 10 aa, Artificial Sequence
  Description of Artificial Sequence: Synthetic epitope
DKAVQVSNKK

SEQ ID NO: 14167 - protein, 10 aa, Artificial Sequence
  Description of Artificial Sequence: Synthetic epitope
DKAYFQTDRP

SEQ ID NO: 14168 - protein, 10 aa, Artificial Sequence
  Description of Artificial Sequence: Synthetic epitope
DKDAMNAAIQ

SEQ ID NO: 14169 - protein, 10 aa, Artificial Sequence
  Description of Artificial Sequence: Synthetic epitope
DKDEAEQAVS

SEQ ID NO: 14170 - protein, 10 aa, Artificial Sequence
  Description of Artificial Sequence: Synthetic epitope
DKDIYQDEKT

SEQ ID NO: 14171 - protein, 10 aa, Artificial Sequence
  Description of Artificial Sequence: Synthetic epitope
DKDKSPESHK

SEQ ID NO: 14172 - protein, 10 aa, Artificial Sequence
  Description of Artificial Sequence: Synthetic epitope
DKEAVPKESK

SEQ ID NO: 14173 - protein, 10 aa, Artificial Sequence
  Description of Artificial Sequence: Synthetic epitope
DKEEVTALAM

SEQ ID NO: 14174 - protein, 10 aa, Artificial Sequence
  Description of Artificial Sequence: Synthetic epitope
DKELTGLNEA

SEQ ID NO: 14175 - protein, 10 aa, Artificial Sequence
  Description of Artificial Sequence: Synthetic epitope
DKEMATKSAV

SEQ ID NO: 14176 - protein, 10 aa, Artificial Sequence
  Description of Artificial Sequence: Synthetic epitope
DKEQKLSKRE

SEQ ID NO: 14177 - protein, 10 aa, Artificial Sequence
  Description of Artificial Sequence: Synthetic epitope
DKESEQKKGQ

SEQ ID NO: 14178 - protein, 10 aa, Artificial Sequence
  Description of Artificial Sequence: Synthetic epitope
DKEVILSSEE

SEQ ID NO: 14179 - protein, 10 aa, Artificial Sequence
  Description of Artificial Sequence: Synthetic epitope
DKFASLIGKV

SEQ ID NO: 14180 - protein, 10 aa, Artificial Sequence
  Description of Artificial Sequence: Synthetic epitope
DKFSAMKYEQ

SEQ ID NO: 14181 - protein, 10 aa, Artificial Sequence
  Description of Artificial Sequence: Synthetic epitope
DKFSKKLQPE

SEQ ID NO: 14182 - protein, 10 aa, Artificial Sequence
  Description of Artificial Sequence: Synthetic epitope
DKGAIKFVLS

SEQ ID NO: 14183 - protein, 10 aa, Artificial Sequence
  Description of Artificial Sequence: Synthetic epitope
DKGDNVNISF

SEQ ID NO: 14184 - protein, 10 aa, Artificial Sequence
  Description of Artificial Sequence: Synthetic epitope
DKGELALAEV

SEQ ID NO: 14185 - protein, 10 aa, Artificial Sequence
  Description of Artificial Sequence: Synthetic epitope
DKGLKKNDSK

SEQ ID NO: 14186 - protein, 10 aa, Artificial Sequence
  Description of Artificial Sequence: Synthetic epitope
DKGLQVAQKE

SEQ ID NO: 14187 - protein, 10 aa, Artificial Sequence
  Description of Artificial Sequence: Synthetic epitope
DKGLTDESEI

SEQ ID NO: 14188 - protein, 10 aa, Artificial Sequence
  Description of Artificial Sequence: Synthetic epitope
DKGNHSITQF

SEQ ID NO: 14189 - protein, 10 aa, Artificial Sequence
  Description of Artificial Sequence: Synthetic epitope
DKGNMISGKG

SEQ ID NO: 14190 - protein, 10 aa, Artificial Sequence
  Description of Artificial Sequence: Synthetic epitope
DKGRFSRTNI

SEQ ID NO: 14191 - protein, 10 aa, Artificial Sequence
  Description of Artificial Sequence: Synthetic epitope
DKGRSQKTPT

SEQ ID NO: 14192 - protein, 10 aa, Artificial Sequence
  Description of Artificial Sequence: Synthetic epitope
DKGYRIAEGN

SEQ ID NO: 14193 - protein, 10 aa, Artificial Sequence
  Description of Artificial Sequence: Synthetic epitope
DKHKDKTVEE

SEQ ID NO: 14194 - protein, 10 aa, Artificial Sequence
  Description of Artificial Sequence: Synthetic epitope
DKHKQPGFQQ

SEQ ID NO: 14195 - protein, 10 aa, Artificial Sequence
  Description of Artificial Sequence: Synthetic epitope
DKHLIILPFK

SEQ ID NO: 14196 - protein, 10 aa, Artificial Sequence
  Description of Artificial Sequence: Synthetic epitope
DKHSVTAATP

SEQ ID NO: 14197 - protein, 10 aa, Artificial Sequence
  Description of Artificial Sequence: Synthetic epitope
DKHVVSKVFD

SEQ ID NO: 14198 - protein, 10 aa, Artificial Sequence
  Description of Artificial Sequence: Synthetic epitope
DKIAIVQKVI

SEQ ID NO: 14199 - protein, 10 aa, Artificial Sequence
  Description of Artificial Sequence: Synthetic epitope
DKIERSKIVS

SEQ ID NO: 14200 - protein, 10 aa, Artificial Sequence
  Description of Artificial Sequence: Synthetic epitope
DKILSVMELD

SEQ ID NO: 14201 - protein, 10 aa, Artificial Sequence
  Description of Artificial Sequence: Synthetic epitope
DKIMSSIDVG

SEQ ID NO: 14202 - protein, 10 aa, Artificial Sequence
  Description of Artificial Sequence: Synthetic epitope
DKINSMVQQH

SEQ ID NO: 14203 - protein, 10 aa, Artificial Sequence
  Description of Artificial Sequence: Synthetic epitope
DKIQSSKREV

SEQ ID NO: 14204 - protein, 10 aa, Artificial Sequence
  Description of Artificial Sequence: Synthetic epitope
DKITAKHAAK

SEQ ID NO: 14205 - protein, 10 aa, Artificial Sequence
  Description of Artificial Sequence: Synthetic epitope
DKKEKMGQPQ

SEQ ID NO: 14206 - protein, 10 aa, Artificial Sequence
  Description of Artificial Sequence: Synthetic epitope
DKKESVSSVA

SEQ ID NO: 14207 - protein, 10 aa, Artificial Sequence
  Description of Artificial Sequence: Synthetic epitope
DKKFLAEAAI

SEQ ID NO: 14208 - protein, 10 aa, Artificial Sequence
  Description of Artificial Sequence: Synthetic epitope
DKKLIAEGPG

SEQ ID NO: 14209 - protein, 10 aa, Artificial Sequence
  Description of Artificial Sequence: Synthetic epitope
DKKQQENIDK

SEQ ID NO: 14210 - protein, 10 aa, Artificial Sequence
  Description of Artificial Sequence: Synthetic epitope
DKKSMDDQEK

SEQ ID NO: 14211 - protein, 10 aa, Artificial Sequence
  Description of Artificial Sequence: Synthetic epitope
DKKVLVPVTT

SEQ ID NO: 14212 - protein, 10 aa, Artificial Sequence
  Description of Artificial Sequence: Synthetic epitope
DKLGDDEVRT

SEQ ID NO: 14213 - protein, 10 aa, Artificial Sequence
  Description of Artificial Sequence: Synthetic epitope
DKLKFNRADA

SEQ ID NO: 14214 - protein, 10 aa, Artificial Sequence
  Description of Artificial Sequence: Synthetic epitope
DKLKISLASR

SEQ ID NO: 14215 - protein, 10 aa, Artificial Sequence
  Description of Artificial Sequence: Synthetic epitope
DKLKSTESEL

SEQ ID NO: 14216 - protein, 10 aa, Artificial Sequence
  Description of Artificial Sequence: Synthetic epitope
DKLLETPSTL

SEQ ID NO: 14217 - protein, 10 aa, Artificial Sequence
  Description of Artificial Sequence: Synthetic epitope
DKLQKTVSSE

SEQ ID NO: 14218 - protein, 10 aa, Artificial Sequence
  Description of Artificial Sequence: Synthetic epitope
DKLSENSVAK

SEQ ID NO: 14219 - protein, 10 aa, Artificial Sequence
  Description of Artificial Sequence: Synthetic epitope
DKLTILIKKI

SEQ ID NO: 14220 - protein, 10 aa, Artificial Sequence
  Description of Artificial Sequence: Synthetic epitope
DKLTSVKQQL

SEQ ID NO: 14221 - protein, 10 aa, Artificial Sequence
  Description of Artificial Sequence: Synthetic epitope
DKLVATSKIT

SEQ ID NO: 14222 - protein, 10 aa, Artificial Sequence
  Description of Artificial Sequence: Synthetic epitope
DKLVKLSEYN

SEQ ID NO: 14223 - protein, 10 aa, Artificial Sequence
  Description of Artificial Sequence: Synthetic epitope
DKMFLSSVGS

SEQ ID NO: 14224 - protein, 10 aa, Artificial Sequence
  Description of Artificial Sequence: Synthetic epitope
DKMHKKNVEN

SEQ ID NO: 14225 - protein, 10 aa, Artificial Sequence
  Description of Artificial Sequence: Synthetic epitope
DKMLSTVAVL

SEQ ID NO: 14226 - protein, 10 aa, Artificial Sequence
  Description of Artificial Sequence: Synthetic epitope
DKMPQDARKI

SEQ ID NO: 14227 - protein, 10 aa, Artificial Sequence
  Description of Artificial Sequence: Synthetic epitope
DKMRLEMWER

SEQ ID NO: 14228 - protein, 10 aa, Artificial Sequence
  Description of Artificial Sequence: Synthetic epitope
DKMVETTELM

SEQ ID NO: 14229 - protein, 10 aa, Artificial Sequence
  Description of Artificial Sequence: Synthetic epitope
DKMVSNKEMP

SEQ ID NO: 14230 - protein, 10 aa, Artificial Sequence
  Description of Artificial Sequence: Synthetic epitope
DKNAIAITNI

SEQ ID NO: 14231 - protein, 10 aa, Artificial Sequence
  Description of Artificial Sequence: Synthetic epitope
DKNPNLGEDQ

SEQ ID NO: 14232 - protein, 10 aa, Artificial Sequence
  Description of Artificial Sequence: Synthetic epitope
DKNRQVSLKM

SEQ ID NO: 14233 - protein, 10 aa, Artificial Sequence
  Description of Artificial Sequence: Synthetic epitope
DKNVSNEKNT

SEQ ID NO: 14234 - protein, 10 aa, Artificial Sequence
  Description of Artificial Sequence: Synthetic epitope
DKPEMNVVLK

SEQ ID NO: 14235 - protein, 10 aa, Artificial Sequence
  Description of Artificial Sequence: Synthetic epitope
DKPKTASEHR

SEQ ID NO: 14236 - protein, 10 aa, Artificial Sequence
  Description of Artificial Sequence: Synthetic epitope
DKQAIINDLM

SEQ ID NO: 14237 - protein, 10 aa, Artificial Sequence
  Description of Artificial Sequence: Synthetic epitope
DKQEGSQEAN

SEQ ID NO: 14238 - protein, 10 aa, Artificial Sequence
  Description of Artificial Sequence: Synthetic epitope
DKQGSDLEGA

SEQ ID NO: 14239 - protein, 10 aa, Artificial Sequence
  Description of Artificial Sequence: Synthetic epitope
DKQTESLVEK

SEQ ID NO: 14240 - protein, 10 aa, Artificial Sequence
  Description of Artificial Sequence: Synthetic epitope
DKRAREAGNI

SEQ ID NO: 14241 - protein, 10 aa, Artificial Sequence
  Description of Artificial Sequence: Synthetic epitope
DKRLAAKQSS

SEQ ID NO: 14242 - protein, 10 aa, Artificial Sequence
  Description of Artificial Sequence: Synthetic epitope
DKRSNLESSQ

SEQ ID NO: 14243 - protein, 10 aa, Artificial Sequence
  Description of Artificial Sequence: Synthetic epitope
DKSAGSGHKS

SEQ ID NO: 14244 - protein, 10 aa, Artificial Sequence
  Description of Artificial Sequence: Synthetic epitope
DKSDQNNTAE

SEQ ID NO: 14245 - protein, 10 aa, Artificial Sequence
  Description of Artificial Sequence: Synthetic epitope
DKSDTIKQVL

SEQ ID NO: 14246 - protein, 10 aa, Artificial Sequence
  Description of Artificial Sequence: Synthetic epitope
DKSFKTEKAM

SEQ ID NO: 14247 - protein, 10 aa, Artificial Sequence
  Description of Artificial Sequence: Synthetic epitope
DKSGSNASSD

SEQ ID NO: 14248 - protein, 10 aa, Artificial Sequence
  Description of Artificial Sequence: Synthetic epitope
DKSHEYIKSP

SEQ ID NO: 14249 - protein, 10 aa, Artificial Sequence
  Description of Artificial Sequence: Synthetic epitope
DKSIIQSAQQ

SEQ ID NO: 14250 - protein, 10 aa, Artificial Sequence
  Description of Artificial Sequence: Synthetic epitope
DKSLARVTHA

SEQ ID NO: 14251 - protein, 10 aa, Artificial Sequence
  Description of Artificial Sequence: Synthetic epitope
DKSNDIKQDK

SEQ ID NO: 14252 - protein, 10 aa, Artificial Sequence
  Description of Artificial Sequence: Synthetic epitope
DKSNPTSKHK

SEQ ID NO: 14253 - protein, 10 aa, Artificial Sequence
  Description of Artificial Sequence: Synthetic epitope
DKSQSVFSGN

SEQ ID NO: 14254 - protein, 10 aa, Artificial Sequence
  Description of Artificial Sequence: Synthetic epitope
DKSTAIPKAS

SEQ ID NO: 14255 - protein, 10 aa, Artificial Sequence
  Description of Artificial Sequence: Synthetic epitope
DKSTKGKHVK

SEQ ID NO: 14256 - protein, 10 aa, Artificial Sequence
  Description of Artificial Sequence: Synthetic epitope
DKSTQASSGE

SEQ ID NO: 14257 - protein, 10 aa, Artificial Sequence
  Description of Artificial Sequence: Synthetic epitope
DKSTYNVNHP

SEQ ID NO: 14258 - protein, 10 aa, Artificial Sequence
  Description of Artificial Sequence: Synthetic epitope
DKSVIYAIES

SEQ ID NO: 14259 - protein, 10 aa, Artificial Sequence
  Description of Artificial Sequence: Synthetic epitope
DKTANQASDT

SEQ ID NO: 14260 - protein, 10 aa, Artificial Sequence
  Description of Artificial Sequence: Synthetic epitope
DKTIIRVPMI

SEQ ID NO: 14261 - protein, 10 aa, Artificial Sequence
  Description of Artificial Sequence: Synthetic epitope
DKTKVQNIHP

SEQ ID NO: 14262 - protein, 10 aa, Artificial Sequence
  Description of Artificial Sequence: Synthetic epitope
DKTLATQRRL

SEQ ID NO: 14263 - protein, 10 aa, Artificial Sequence
  Description of Artificial Sequence: Synthetic epitope
DKTLKSLMAA

SEQ ID NO: 14264 - protein, 10 aa, Artificial Sequence
  Description of Artificial Sequence: Synthetic epitope
DKTNILNSEQ

SEQ ID NO: 14265 - protein, 10 aa, Artificial Sequence
  Description of Artificial Sequence: Synthetic epitope
DKTPKAEEVK

SEQ ID NO: 14266 - protein, 10 aa, Artificial Sequence
  Description of Artificial Sequence: Synthetic epitope
DKTTLTKKMT

SEQ ID NO: 14267 - protein, 10 aa, Artificial Sequence
  Description of Artificial Sequence: Synthetic epitope
DKVASIVDSV

SEQ ID NO: 14268 - protein, 10 aa, Artificial Sequence
  Description of Artificial Sequence: Synthetic epitope
DKVEGYKKTK

SEQ ID NO: 14269 - protein, 10 aa, Artificial Sequence
  Description of Artificial Sequence: Synthetic epitope
DKVKAIANLY

SEQ ID NO: 14270 - protein, 10 aa, Artificial Sequence
  Description of Artificial Sequence: Synthetic epitope
DKVKAITAAT

SEQ ID NO: 14271 - protein, 10 aa, Artificial Sequence
  Description of Artificial Sequence: Synthetic epitope
DKVKALLSHD

SEQ ID NO: 14272 - protein, 10 aa, Artificial Sequence
  Description of Artificial Sequence: Synthetic epitope
DKVSQQGMDV

SEQ ID NO: 14273 - protein, 10 aa, Artificial Sequence
  Description of Artificial Sequence: Synthetic epitope
DKVSSVRWIS

SEQ ID NO: 14274 - protein, 10 aa, Artificial Sequence
  Description of Artificial Sequence: Synthetic epitope
DKVTSAETKV

SEQ ID NO: 14275 - protein, 10 aa, Artificial Sequence
  Description of Artificial Sequence: Synthetic epitope
DKYKLQQTFS

SEQ ID NO: 14276 - protein, 10 aa, Artificial Sequence
  Description of Artificial Sequence: Synthetic epitope
DKYSISLSPP

SEQ ID NO: 14277 - protein, 10 aa, Artificial Sequence
  Description of Artificial Sequence: Synthetic epitope
DLAETKAESE

SEQ ID NO: 14278 - protein, 10 aa, Artificial Sequence
  Description of Artificial Sequence: Synthetic epitope
DLAFQLATPN

SEQ ID NO: 14279 - protein, 10 aa, Artificial Sequence
  Description of Artificial Sequence: Synthetic epitope
DLAGSTGLAK

SEQ ID NO: 14280 - protein, 10 aa, Artificial Sequence
  Description of Artificial Sequence: Synthetic epitope
DLALSSATSS

SEQ ID NO: 14281 - protein, 10 aa, Artificial Sequence
  Description of Artificial Sequence: Synthetic epitope
DLASETSSRD

SEQ ID NO: 14282 - protein, 10 aa, Artificial Sequence
  Description of Artificial Sequence: Synthetic epitope
DLATVKANGL

SEQ ID NO: 14283 - protein, 10 aa, Artificial Sequence
  Description of Artificial Sequence: Synthetic epitope
DLAVDALATK

SEQ ID NO: 14284 - protein, 10 aa, Artificial Sequence
  Description of Artificial Sequence: Synthetic epitope
DLAVVTQSAE

SEQ ID NO: 14285 - protein, 10 aa, Artificial Sequence
  Description of Artificial Sequence: Synthetic epitope
DLDQAHLLNR

SEQ ID NO: 14286 - protein, 10 aa, Artificial Sequence
  Description of Artificial Sequence: Synthetic epitope
DLDSKQLEWP

SEQ ID NO: 14287 - protein, 10 aa, Artificial Sequence
  Description of Artificial Sequence: Synthetic epitope
DLDSNSFELD

SEQ ID NO: 14288 - protein, 10 aa, Artificial Sequence
  Description of Artificial Sequence: Synthetic epitope
DLDSSLLHLK

SEQ ID NO: 14289 - protein, 10 aa, Artificial Sequence
  Description of Artificial Sequence: Synthetic epitope
DLDVANARPQ

SEQ ID NO: 14290 - protein, 10 aa, Artificial Sequence
  Description of Artificial Sequence: Synthetic epitope
DLDVATITKT

SEQ ID NO: 14291 - protein, 10 aa, Artificial Sequence
  Description of Artificial Sequence: Synthetic epitope
DLEDETIDAE

SEQ ID NO: 14292 - protein, 10 aa, Artificial Sequence
  Description of Artificial Sequence: Synthetic epitope
DLEGESVSEL

SEQ ID NO: 14293 - protein, 10 aa, Artificial Sequence
  Description of Artificial Sequence: Synthetic epitope
DLENKEMSKE

SEQ ID NO: 14294 - protein, 10 aa, Artificial Sequence
  Description of Artificial Sequence: Synthetic epitope
DLEQTQQRPL

SEQ ID NO: 14295 - protein, 10 aa, Artificial Sequence
  Description of Artificial Sequence: Synthetic epitope
DLESQKSTAA

SEQ ID NO: 14296 - protein, 10 aa, Artificial Sequence
  Description of Artificial Sequence: Synthetic epitope
DLEVSKIQEA

SEQ ID NO: 14297 - protein, 10 aa, Artificial Sequence
  Description of Artificial Sequence: Synthetic epitope
DLEVSLITTW

SEQ ID NO: 14298 - protein, 10 aa, Artificial Sequence
  Description of Artificial Sequence: Synthetic epitope
DLFQTSEEKS

SEQ ID NO: 14299 - protein, 10 aa, Artificial Sequence
  Description of Artificial Sequence: Synthetic epitope
DLFTKTASPL

SEQ ID NO: 14300 - protein, 10 aa, Artificial Sequence
  Description of Artificial Sequence: Synthetic epitope
DLGEEASALL

SEQ ID NO: 14301 - protein, 10 aa, Artificial Sequence
  Description of Artificial Sequence: Synthetic epitope
DLGLLSQAIV

SEQ ID NO: 14302 - protein, 10 aa, Artificial Sequence
  Description of Artificial Sequence: Synthetic epitope
DLGQFSQEDP

SEQ ID NO: 14303 - protein, 10 aa, Artificial Sequence
  Description of Artificial Sequence: Synthetic epitope
DLHEAVSMKL

SEQ ID NO: 14304 - protein, 10 aa, Artificial Sequence
  Description of Artificial Sequence: Synthetic epitope
DLIDFASTSQ

SEQ ID NO: 14305 - protein, 10 aa, Artificial Sequence
  Description of Artificial Sequence: Synthetic epitope
DLIEAKLVGI

SEQ ID NO: 14306 - protein, 10 aa, Artificial Sequence
  Description of Artificial Sequence: Synthetic epitope
DLIKGEVVPE

SEQ ID NO: 14307 - protein, 10 aa, Artificial Sequence
  Description of Artificial Sequence: Synthetic epitope
DLKAVSVESL

SEQ ID NO: 14308 - protein, 10 aa, Artificial Sequence
  Description of Artificial Sequence: Synthetic epitope
DLKKSGSTTS

SEQ ID NO: 14309 - protein, 10 aa, Artificial Sequence
  Description of Artificial Sequence: Synthetic epitope
DLKKSLEKAQ

SEQ ID NO: 14310 - protein, 10 aa, Artificial Sequence
  Description of Artificial Sequence: Synthetic epitope
DLKSAIKWFD

SEQ ID NO: 14311 - protein, 10 aa, Artificial Sequence
  Description of Artificial Sequence: Synthetic epitope
DLLDASAVSA

SEQ ID NO: 14312 - protein, 10 aa, Artificial Sequence
  Description of Artificial Sequence: Synthetic epitope
DLLEASMPSS

SEQ ID NO: 14313 - protein, 10 aa, Artificial Sequence
  Description of Artificial Sequence: Synthetic epitope
DLLETNKTAL

SEQ ID NO: 14314 - protein, 10 aa, Artificial Sequence
  Description of Artificial Sequence: Synthetic epitope
DLLMKLSKTA

SEQ ID NO: 14315 - protein, 10 aa, Artificial Sequence
  Description of Artificial Sequence: Synthetic epitope
DLLMKMSQEN

SEQ ID NO: 14316 - protein, 10 aa, Artificial Sequence
  Description of Artificial Sequence: Synthetic epitope
DLLMNTMLIE

SEQ ID NO: 14317 - protein, 10 aa, Artificial Sequence
  Description of Artificial Sequence: Synthetic epitope
DLLNSQSQSG

SEQ ID NO: 14318 - protein, 10 aa, Artificial Sequence
  Description of Artificial Sequence: Synthetic epitope
DLLRQSLVHR

SEQ ID NO: 14319 - protein, 10 aa, Artificial Sequence
  Description of Artificial Sequence: Synthetic epitope
DLLSARLLSQ

SEQ ID NO: 14320 - protein, 10 aa, Artificial Sequence
  Description of Artificial Sequence: Synthetic epitope
DLLSVELSTS

SEQ ID NO: 14321 - protein, 10 aa, Artificial Sequence
  Description of Artificial Sequence: Synthetic epitope
DLLTAAPASE

SEQ ID NO: 14322 - protein, 10 aa, Artificial Sequence
  Description of Artificial Sequence: Synthetic epitope
DLLTTQQITV

SEQ ID NO: 14323 - protein, 10 aa, Artificial Sequence
  Description of Artificial Sequence: Synthetic epitope
DLLYKSLVPV

SEQ ID NO: 14324 - protein, 10 aa, Artificial Sequence
  Description of Artificial Sequence: Synthetic epitope
DLLYKSLVPV

SEQ ID NO: 14325 - protein, 10 aa, Artificial Sequence
  Description of Artificial Sequence: Synthetic epitope
DLMIAKITSD

SEQ ID NO: 14326 - protein, 10 aa, Artificial Sequence
  Description of Artificial Sequence: Synthetic epitope
DLMMRGVKHH

SEQ ID NO: 14327 - protein, 10 aa, Artificial Sequence
  Description of Artificial Sequence: Synthetic epitope
DLMTTAARNG

SEQ ID NO: 14328 - protein, 10 aa, Artificial Sequence
  Description of Artificial Sequence: Synthetic epitope
DLNASMTSQH

SEQ ID NO: 14329 - protein, 10 aa, Artificial Sequence
  Description of Artificial Sequence: Synthetic epitope
DLPQNKSSQE

SEQ ID NO: 14330 - protein, 10 aa, Artificial Sequence
  Description of Artificial Sequence: Synthetic epitope
DLQAKMGMQP

SEQ ID NO: 14331 - protein, 10 aa, Artificial Sequence
  Description of Artificial Sequence: Synthetic epitope
DLQAMISKEF

SEQ ID NO: 14332 - protein, 10 aa, Artificial Sequence
  Description of Artificial Sequence: Synthetic epitope
DLQQNIALPA

SEQ ID NO: 14333 - protein, 10 aa, Artificial Sequence
  Description of Artificial Sequence: Synthetic epitope
DLQSQSETQG

SEQ ID NO: 14334 - protein, 10 aa, Artificial Sequence
  Description of Artificial Sequence: Synthetic epitope
DLQSSVLNAS

SEQ ID NO: 14335 - protein, 10 aa, Artificial Sequence
  Description of Artificial Sequence: Synthetic epitope
DLRMSAMAPT

SEQ ID NO: 14336 - protein, 10 aa, Artificial Sequence
  Description of Artificial Sequence: Synthetic epitope
DLRNSQRNHT

SEQ ID NO: 14337 - protein, 10 aa, Artificial Sequence
  Description of Artificial Sequence: Synthetic epitope
DLRQRPEWDK

SEQ ID NO: 14338 - protein, 10 aa, Artificial Sequence
  Description of Artificial Sequence: Synthetic epitope
DLSAMSAERD

SEQ ID NO: 14339 - protein, 10 aa, Artificial Sequence
  Description of Artificial Sequence: Synthetic epitope
DLSESSKPLQ

SEQ ID NO: 14340 - protein, 10 aa, Artificial Sequence
  Description of Artificial Sequence: Synthetic epitope
DLSIMSKFKL

SEQ ID NO: 14341 - protein, 10 aa, Artificial Sequence
  Description of Artificial Sequence: Synthetic epitope
DLSISEQSTK

SEQ ID NO: 14342 - protein, 10 aa, Artificial Sequence
  Description of Artificial Sequence: Synthetic epitope
DLSLKDLTQE

SEQ ID NO: 14343 - protein, 10 aa, Artificial Sequence
  Description of Artificial Sequence: Synthetic epitope
DLSNSVIEVS

SEQ ID NO: 14344 - protein, 10 aa, Artificial Sequence
  Description of Artificial Sequence: Synthetic epitope
DLSRETVKRI

SEQ ID NO: 14345 - protein, 10 aa, Artificial Sequence
  Description of Artificial Sequence: Synthetic epitope
DLSVKSSLSG

SEQ ID NO: 14346 - protein, 10 aa, Artificial Sequence
  Description of Artificial Sequence: Synthetic epitope
DLSVTTVTDY

SEQ ID NO: 14347 - protein, 10 aa, Artificial Sequence
  Description of Artificial Sequence: Synthetic epitope
DLTAAQEKLA

SEQ ID NO: 14348 - protein, 10 aa, Artificial Sequence
  Description of Artificial Sequence: Synthetic epitope
DLTAAVTKTV

SEQ ID NO: 14349 - protein, 10 aa, Artificial Sequence
  Description of Artificial Sequence: Synthetic epitope
DLTARSSLEE

SEQ ID NO: 14350 - protein, 10 aa, Artificial Sequence
  Description of Artificial Sequence: Synthetic epitope
DLTIALSAST

SEQ ID NO: 14351 - protein, 10 aa, Artificial Sequence
  Description of Artificial Sequence: Synthetic epitope
DLTKSLEVGS

SEQ ID NO: 14352 - protein, 10 aa, Artificial Sequence
  Description of Artificial Sequence: Synthetic epitope
DLTLAVLSQQ

SEQ ID NO: 14353 - protein, 10 aa, Artificial Sequence
  Description of Artificial Sequence: Synthetic epitope
DLTSTKAEHL

SEQ ID NO: 14354 - protein, 10 aa, Artificial Sequence
  Description of Artificial Sequence: Synthetic epitope
DLTTAGAVTQ

SEQ ID NO: 14355 - protein, 10 aa, Artificial Sequence
  Description of Artificial Sequence: Synthetic epitope
DLVASFVKNQ

SEQ ID NO: 14356 - protein, 10 aa, Artificial Sequence
  Description of Artificial Sequence: Synthetic epitope
DLVMKTLSSH

SEQ ID NO: 14357 - protein, 10 aa, Artificial Sequence
  Description of Artificial Sequence: Synthetic epitope
DLVTSMDHQE

SEQ ID NO: 14358 - protein, 10 aa, Artificial Sequence
  Description of Artificial Sequence: Synthetic epitope
DLWDNKHVKM

SEQ ID NO: 14359 - protein, 10 aa, Artificial Sequence
  Description of Artificial Sequence: Synthetic epitope
DLYIKINQNF

SEQ ID NO: 14360 - protein, 10 aa, Artificial Sequence
  Description of Artificial Sequence: Synthetic epitope
DLYMSFLLTA

SEQ ID NO: 14361 - protein, 10 aa, Artificial Sequence
  Description of Artificial Sequence: Synthetic epitope
DMASRRLSAQ

SEQ ID NO: 14362 - protein, 10 aa, Artificial Sequence
  Description of Artificial Sequence: Synthetic epitope
DMEKVERQAV

SEQ ID NO: 14363 - protein, 10 aa, Artificial Sequence
  Description of Artificial Sequence: Synthetic epitope
DMFNDEIEEV

SEQ ID NO: 14364 - protein, 10 aa, Artificial Sequence
  Description of Artificial Sequence: Synthetic epitope
DMHLSKSVSK

SEQ ID NO: 14365 - protein, 10 aa, Artificial Sequence
  Description of Artificial Sequence: Synthetic epitope
DMIGQRSRSS

SEQ ID NO: 14366 - protein, 10 aa, Artificial Sequence
  Description of Artificial Sequence: Synthetic epitope
DMIKMGVSHD

SEQ ID NO: 14367 - protein, 10 aa, Artificial Sequence
  Description of Artificial Sequence: Synthetic epitope
DMKKSQVTPN

SEQ ID NO: 14368 - protein, 10 aa, Artificial Sequence
  Description of Artificial Sequence: Synthetic epitope
DMKMRSFSPT

SEQ ID NO: 14369 - protein, 10 aa, Artificial Sequence
  Description of Artificial Sequence: Synthetic epitope
DMKNVPEAFK

SEQ ID NO: 14370 - protein, 10 aa, Artificial Sequence
  Description of Artificial Sequence: Synthetic epitope
DMKSEGQATV

SEQ ID NO: 14371 - protein, 10 aa, Artificial Sequence
  Description of Artificial Sequence: Synthetic epitope
DMKSVTDRAA

SEQ ID NO: 14372 - protein, 10 aa, Artificial Sequence
  Description of Artificial Sequence: Synthetic epitope
DMLASIKSGD

SEQ ID NO: 14373 - protein, 10 aa, Artificial Sequence
  Description of Artificial Sequence: Synthetic epitope
DMNEEVERTG

SEQ ID NO: 14374 - protein, 10 aa, Artificial Sequence
  Description of Artificial Sequence: Synthetic epitope
DMPYYRSQFK

SEQ ID NO: 14375 - protein, 10 aa, Artificial Sequence
  Description of Artificial Sequence: Synthetic epitope
DMRIMENNLE

SEQ ID NO: 14376 - protein, 10 aa, Artificial Sequence
  Description of Artificial Sequence: Synthetic epitope
DMSPPNQKHI

SEQ ID NO: 14377 - protein, 10 aa, Artificial Sequence
  Description of Artificial Sequence: Synthetic epitope
DMSSDQIAAN

SEQ ID NO: 14378 - protein, 10 aa, Artificial Sequence
  Description of Artificial Sequence: Synthetic epitope
DMVISELIST

SEQ ID NO: 14379 - protein, 10 aa, Artificial Sequence
  Description of Artificial Sequence: Synthetic epitope
DMVTTAGVSS

SEQ ID NO: 14380 - protein, 10 aa, Artificial Sequence
  Description of Artificial Sequence: Synthetic epitope
DNALSTLRPE

SEQ ID NO: 14381 - protein, 10 aa, Artificial Sequence
  Description of Artificial Sequence: Synthetic epitope
DNANANKGTL

SEQ ID NO: 14382 - protein, 10 aa, Artificial Sequence
  Description of Artificial Sequence: Synthetic epitope
DNATKQLDMV

SEQ ID NO: 14383 - protein, 10 aa, Artificial Sequence
  Description of Artificial Sequence: Synthetic epitope
DNDGKKNNPA

SEQ ID NO: 14384 - protein, 10 aa, Artificial Sequence
  Description of Artificial Sequence: Synthetic epitope
DNDVYVGYES

SEQ ID NO: 14385 - protein, 10 aa, Artificial Sequence
  Description of Artificial Sequence: Synthetic epitope
DNEASINQTT

SEQ ID NO: 14386 - protein, 10 aa, Artificial Sequence
  Description of Artificial Sequence: Synthetic epitope
DNEREGTENG

SEQ ID NO: 14387 - protein, 10 aa, Artificial Sequence
  Description of Artificial Sequence: Synthetic epitope
DNEVEIEVEL

SEQ ID NO: 14388 - protein, 10 aa, Artificial Sequence
  Description of Artificial Sequence: Synthetic epitope
DNEVSSATFQ

SEQ ID NO: 14389 - protein, 10 aa, Artificial Sequence
  Description of Artificial Sequence: Synthetic epitope
DNGGEQTALS

SEQ ID NO: 14390 - protein, 10 aa, Artificial Sequence
  Description of Artificial Sequence: Synthetic epitope
DNIMSNIVLT

SEQ ID NO: 14391 - protein, 10 aa, Artificial Sequence
  Description of Artificial Sequence: Synthetic epitope
DNISNNLLIG

SEQ ID NO: 14392 - protein, 10 aa, Artificial Sequence
  Description of Artificial Sequence: Synthetic epitope
DNITLLQSVS

SEQ ID NO: 14393 - protein, 10 aa, Artificial Sequence
  Description of Artificial Sequence: Synthetic epitope
DNKDKKVNYS

SEQ ID NO: 14394 - protein, 10 aa, Artificial Sequence
  Description of Artificial Sequence: Synthetic epitope
DNKEIQSKSG

SEQ ID NO: 14395 - protein, 10 aa, Artificial Sequence
  Description of Artificial Sequence: Synthetic epitope
DNKGIDSDAS

SEQ ID NO: 14396 - protein, 10 aa, Artificial Sequence
  Description of Artificial Sequence: Synthetic epitope
DNKITTKKRS

SEQ ID NO: 14397 - protein, 10 aa, Artificial Sequence
  Description of Artificial Sequence: Synthetic epitope
DNKLVIKQEY

SEQ ID NO: 14398 - protein, 10 aa, Artificial Sequence
  Description of Artificial Sequence: Synthetic epitope
DNKNVNVNKY

SEQ ID NO: 14399 - protein, 10 aa, Artificial Sequence
  Description of Artificial Sequence: Synthetic epitope
DNKSATVELE

SEQ ID NO: 14400 - protein, 10 aa, Artificial Sequence
  Description of Artificial Sequence: Synthetic epitope
DNKTATTEVR

SEQ ID NO: 14401 - protein, 10 aa, Artificial Sequence
  Description of Artificial Sequence: Synthetic epitope
DNLIKMASTD

SEQ ID NO: 14402 - protein, 10 aa, Artificial Sequence
  Description of Artificial Sequence: Synthetic epitope
DNLISEVEKD

SEQ ID NO: 14403 - protein, 10 aa, Artificial Sequence
  Description of Artificial Sequence: Synthetic epitope
DNLKSDIGDK

SEQ ID NO: 14404 - protein, 10 aa, Artificial Sequence
  Description of Artificial Sequence: Synthetic epitope
DNMELSKSAT

SEQ ID NO: 14405 - protein, 10 aa, Artificial Sequence
  Description of Artificial Sequence: Synthetic epitope
DNNTVDMVDP

SEQ ID NO: 14406 - protein, 10 aa, Artificial Sequence
  Description of Artificial Sequence: Synthetic epitope
DNPAITSDQE

SEQ ID NO: 14407 - protein, 10 aa, Artificial Sequence
  Description of Artificial Sequence: Synthetic epitope
DNPMQQKWTK

SEQ ID NO: 14408 - protein, 10 aa, Artificial Sequence
  Description of Artificial Sequence: Synthetic epitope
DNPTQRNKDQ

SEQ ID NO: 14409 - protein, 10 aa, Artificial Sequence
  Description of Artificial Sequence: Synthetic epitope
DNQKKLSKPQ

SEQ ID NO: 14410 - protein, 10 aa, Artificial Sequence
  Description of Artificial Sequence: Synthetic epitope
DNRAHAASSG

SEQ ID NO: 14411 - protein, 10 aa, Artificial Sequence
  Description of Artificial Sequence: Synthetic epitope
DNRRQAESLS

SEQ ID NO: 14412 - protein, 10 aa, Artificial Sequence
  Description of Artificial Sequence: Synthetic epitope
DNRYQPMEPN

SEQ ID NO: 14413 - protein, 10 aa, Artificial Sequence
  Description of Artificial Sequence: Synthetic epitope
DNSGRYQGLE

SEQ ID NO: 14414 - protein, 10 aa, Artificial Sequence
  Description of Artificial Sequence: Synthetic epitope
DNSKKNESPF

SEQ ID NO: 14415 - protein, 10 aa, Artificial Sequence
  Description of Artificial Sequence: Synthetic epitope
DNSLASATPT

SEQ ID NO: 14416 - protein, 10 aa, Artificial Sequence
  Description of Artificial Sequence: Synthetic epitope
DNSMQFGTRT

SEQ ID NO: 14417 - protein, 10 aa, Artificial Sequence
  Description of Artificial Sequence: Synthetic epitope
DNSNQSSIAD

SEQ ID NO: 14418 - protein, 10 aa, Artificial Sequence
  Description of Artificial Sequence: Synthetic epitope
DNSRKASSTR

SEQ ID NO: 14419 - protein, 10 aa, Artificial Sequence
  Description of Artificial Sequence: Synthetic epitope
DNSTKSLMVD

SEQ ID NO: 14420 - protein, 10 aa, Artificial Sequence
  Description of Artificial Sequence: Synthetic epitope
DNSTRGTDVK

SEQ ID NO: 14421 - protein, 10 aa, Artificial Sequence
  Description of Artificial Sequence: Synthetic epitope
DNTEKNEKLK

SEQ ID NO: 14422 - protein, 10 aa, Artificial Sequence
  Description of Artificial Sequence: Synthetic epitope
DNTKDKNTVV

SEQ ID NO: 14423 - protein, 10 aa, Artificial Sequence
  Description of Artificial Sequence: Synthetic epitope
DNTKSSAQPE

SEQ ID NO: 14424 - protein, 10 aa, Artificial Sequence
  Description of Artificial Sequence: Synthetic epitope
DNTNLQIHRE

SEQ ID NO: 14425 - protein, 10 aa, Artificial Sequence
  Description of Artificial Sequence: Synthetic epitope
DNTSTQVSPD

SEQ ID NO: 14426 - protein, 10 aa, Artificial Sequence
  Description of Artificial Sequence: Synthetic epitope
DNTTRASTRL

SEQ ID NO: 14427 - protein, 10 aa, Artificial Sequence
  Description of Artificial Sequence: Synthetic epitope
DNVGQPNEYD

SEQ ID NO: 14428 - protein, 10 aa, Artificial Sequence
  Description of Artificial Sequence: Synthetic epitope
DNVNFMYSPG

SEQ ID NO: 14429 - protein, 10 aa, Artificial Sequence
  Description of Artificial Sequence: Synthetic epitope
DNVNSENELI

SEQ ID NO: 14430 - protein, 10 aa, Artificial Sequence
  Description of Artificial Sequence: Synthetic epitope
DNYAEPIDTI

SEQ ID NO: 14431 - protein, 10 aa, Artificial Sequence
  Description of Artificial Sequence: Synthetic epitope
DNYDLASEWA

SEQ ID NO: 14432 - protein, 10 aa, Artificial Sequence
  Description of Artificial Sequence: Synthetic epitope
DNYERAEKRP

SEQ ID NO: 14433 - protein, 10 aa, Artificial Sequence
  Description of Artificial Sequence: Synthetic epitope
DNYRTSNYIY

SEQ ID NO: 14434 - protein, 10 aa, Artificial Sequence
  Description of Artificial Sequence: Synthetic epitope
DPAAFESRLE

SEQ ID NO: 14435 - protein, 10 aa, Artificial Sequence
  Description of Artificial Sequence: Synthetic epitope
DPASKIASLL

SEQ ID NO: 14436 - protein, 10 aa, Artificial Sequence
  Description of Artificial Sequence: Synthetic epitope
DPASSQAMEL

SEQ ID NO: 14437 - protein, 10 aa, Artificial Sequence
  Description of Artificial Sequence: Synthetic epitope
DPDESARISS

SEQ ID NO: 14438 - protein, 10 aa, Artificial Sequence
  Description of Artificial Sequence: Synthetic epitope
DPEILSILES

SEQ ID NO: 14439 - protein, 10 aa, Artificial Sequence
  Description of Artificial Sequence: Synthetic epitope
DPEVNAAGAA

SEQ ID NO: 14440 - protein, 10 aa, Artificial Sequence
  Description of Artificial Sequence: Synthetic epitope
DPFDIKAANY

SEQ ID NO: 14441 - protein, 10 aa, Artificial Sequence
  Description of Artificial Sequence: Synthetic epitope
DPFRSTAEAL

SEQ ID NO: 14442 - protein, 10 aa, Artificial Sequence
  Description of Artificial Sequence: Synthetic epitope
DPHRNLEQES

SEQ ID NO: 14443 - protein, 10 aa, Artificial Sequence
  Description of Artificial Sequence: Synthetic epitope
DPIAETMNVP

SEQ ID NO: 14444 - protein, 10 aa, Artificial Sequence
  Description of Artificial Sequence: Synthetic epitope
DPIENEEDRK

SEQ ID NO: 14445 - protein, 10 aa, Artificial Sequence
  Description of Artificial Sequence: Synthetic epitope
DPIVLQEREF

SEQ ID NO: 14446 - protein, 10 aa, Artificial Sequence
  Description of Artificial Sequence: Synthetic epitope
DPKEAATIDR

SEQ ID NO: 14447 - protein, 10 aa, Artificial Sequence
  Description of Artificial Sequence: Synthetic epitope
DPLAELVKIE

SEQ ID NO: 14448 - protein, 10 aa, Artificial Sequence
  Description of Artificial Sequence: Synthetic epitope
DPLASLLSPM

SEQ ID NO: 14449 - protein, 10 aa, Artificial Sequence
  Description of Artificial Sequence: Synthetic epitope
DPLDQMKAEA

SEQ ID NO: 14450 - protein, 10 aa, Artificial Sequence
  Description of Artificial Sequence: Synthetic epitope
DPLIQAQAEE

SEQ ID NO: 14451 - protein, 10 aa, Artificial Sequence
  Description of Artificial Sequence: Synthetic epitope
DPLTLLQADT

SEQ ID NO: 14452 - protein, 10 aa, Artificial Sequence
  Description of Artificial Sequence: Synthetic epitope
DPMTTSRANQ

SEQ ID NO: 14453 - protein, 10 aa, Artificial Sequence
  Description of Artificial Sequence: Synthetic epitope
DPNMFADGQM

SEQ ID NO: 14454 - protein, 10 aa, Artificial Sequence
  Description of Artificial Sequence: Synthetic epitope
DPQELVTPVK

SEQ ID NO: 14455 - protein, 10 aa, Artificial Sequence
  Description of Artificial Sequence: Synthetic epitope
DPQSQAEDQS

SEQ ID NO: 14456 - protein, 10 aa, Artificial Sequence
  Description of Artificial Sequence: Synthetic epitope
DPRERVKEDD

SEQ ID NO: 14457 - protein, 10 aa, Artificial Sequence
  Description of Artificial Sequence: Synthetic epitope
DPSDAASVIQ

SEQ ID NO: 14458 - protein, 10 aa, Artificial Sequence
  Description of Artificial Sequence: Synthetic epitope
DPSEVEKAKE

SEQ ID NO: 14459 - protein, 10 aa, Artificial Sequence
  Description of Artificial Sequence: Synthetic epitope
DPSISQKPSN

SEQ ID NO: 14460 - protein, 10 aa, Artificial Sequence
  Description of Artificial Sequence: Synthetic epitope
DPSTRSVFSV

SEQ ID NO: 14461 - protein, 10 aa, Artificial Sequence
  Description of Artificial Sequence: Synthetic epitope
DPTFASATLL

SEQ ID NO: 14462 - protein, 10 aa, Artificial Sequence
  Description of Artificial Sequence: Synthetic epitope
DPTFATFMYE

SEQ ID NO: 14463 - protein, 10 aa, Artificial Sequence
  Description of Artificial Sequence: Synthetic epitope
DPTRRARVKE

SEQ ID NO: 14464 - protein, 10 aa, Artificial Sequence
  Description of Artificial Sequence: Synthetic epitope
DPTSAPWATA

SEQ ID NO: 14465 - protein, 10 aa, Artificial Sequence
  Description of Artificial Sequence: Synthetic epitope
DPVAADLEMA

SEQ ID NO: 14466 - protein, 10 aa, Artificial Sequence
  Description of Artificial Sequence: Synthetic epitope
DPVDTVVRTE

SEQ ID NO: 14467 - protein, 10 aa, Artificial Sequence
  Description of Artificial Sequence: Synthetic epitope
DPVPTSIDES

SEQ ID NO: 14468 - protein, 10 aa, Artificial Sequence
  Description of Artificial Sequence: Synthetic epitope
DPVTFAIVPT

SEQ ID NO: 14469 - protein, 10 aa, Artificial Sequence
  Description of Artificial Sequence: Synthetic epitope
DPWIEDWAEM

SEQ ID NO: 14470 - protein, 10 aa, Artificial Sequence
  Description of Artificial Sequence: Synthetic epitope
DQAATASKLL

SEQ ID NO: 14471 - protein, 10 aa, Artificial Sequence
  Description of Artificial Sequence: Synthetic epitope
DQAEQVLKQA

SEQ ID NO: 14472 - protein, 10 aa, Artificial Sequence
  Description of Artificial Sequence: Synthetic epitope
DQAFKKEKEA

SEQ ID NO: 14473 - protein, 10 aa, Artificial Sequence
  Description of Artificial Sequence: Synthetic epitope
DQAHLLAAIP

SEQ ID NO: 14474 - protein, 10 aa, Artificial Sequence
  Description of Artificial Sequence: Synthetic epitope
DQALQAQKEV

SEQ ID NO: 14475 - protein, 10 aa, Artificial Sequence
  Description of Artificial Sequence: Synthetic epitope
DQASFASQNR

SEQ ID NO: 14476 - protein, 10 aa, Artificial Sequence
  Description of Artificial Sequence: Synthetic epitope
DQASQAAGRA

SEQ ID NO: 14477 - protein, 10 aa, Artificial Sequence
  Description of Artificial Sequence: Synthetic epitope
DQASRKSYIS

SEQ ID NO: 14478 - protein, 10 aa, Artificial Sequence
  Description of Artificial Sequence: Synthetic epitope
DQDFKSQKNF

SEQ ID NO: 14479 - protein, 10 aa, Artificial Sequence
  Description of Artificial Sequence: Synthetic epitope
DQDMFKSAIM

SEQ ID NO: 14480 - protein, 10 aa, Artificial Sequence
  Description of Artificial Sequence: Synthetic epitope
DQEEFRYDMD

SEQ ID NO: 14481 - protein, 10 aa, Artificial Sequence
  Description of Artificial Sequence: Synthetic epitope
DQEKEKEKEK

SEQ ID NO: 14482 - protein, 10 aa, Artificial Sequence
  Description of Artificial Sequence: Synthetic epitope
DQELAQESPP

SEQ ID NO: 14483 - protein, 10 aa, Artificial Sequence
  Description of Artificial Sequence: Synthetic epitope
DQELIKAERE

SEQ ID NO: 14484 - protein, 10 aa, Artificial Sequence
  Description of Artificial Sequence: Synthetic epitope
DQELSSLVAS

SEQ ID NO: 14485 - protein, 10 aa, Artificial Sequence
  Description of Artificial Sequence: Synthetic epitope
DQEQVELEGE

SEQ ID NO: 14486 - protein, 10 aa, Artificial Sequence
  Description of Artificial Sequence: Synthetic epitope
DQERENISTE

SEQ ID NO: 14487 - protein, 10 aa, Artificial Sequence
  Description of Artificial Sequence: Synthetic epitope
DQFEPKASMK

SEQ ID NO: 14488 - protein, 10 aa, Artificial Sequence
  Description of Artificial Sequence: Synthetic epitope
DQGATGASQG

SEQ ID NO: 14489 - protein, 10 aa, Artificial Sequence
  Description of Artificial Sequence: Synthetic epitope
DQGKVMIDGH

SEQ ID NO: 14490 - protein, 10 aa, Artificial Sequence
  Description of Artificial Sequence: Synthetic epitope
DQGLTRQMRL

SEQ ID NO: 14491 - protein, 10 aa, Artificial Sequence
  Description of Artificial Sequence: Synthetic epitope
DQGRRSQSRR

SEQ ID NO: 14492 - protein, 10 aa, Artificial Sequence
  Description of Artificial Sequence: Synthetic epitope
DQGTSVQSKS

SEQ ID NO: 14493 - protein, 10 aa, Artificial Sequence
  Description of Artificial Sequence: Synthetic epitope
DQHKIMQQFQ

SEQ ID NO: 14494 - protein, 10 aa, Artificial Sequence
  Description of Artificial Sequence: Synthetic epitope
DQHQNLRRNP

SEQ ID NO: 14495 - protein, 10 aa, Artificial Sequence
  Description of Artificial Sequence: Synthetic epitope
DQIISALEED

SEQ ID NO: 14496 - protein, 10 aa, Artificial Sequence
  Description of Artificial Sequence: Synthetic epitope
DQIKILMKNV

SEQ ID NO: 14497 - protein, 10 aa, Artificial Sequence
  Description of Artificial Sequence: Synthetic epitope
DQIKTWVASN

SEQ ID NO: 14498 - protein, 10 aa, Artificial Sequence
  Description of Artificial Sequence: Synthetic epitope
DQISASKPAF

SEQ ID NO: 14499 - protein, 10 aa, Artificial Sequence
  Description of Artificial Sequence: Synthetic epitope
DQISERESVV

SEQ ID NO: 14500 - protein, 10 aa, Artificial Sequence
  Description of Artificial Sequence: Synthetic epitope
DQISMKEAGY

SEQ ID NO: 14501 - protein, 10 aa, Artificial Sequence
  Description of Artificial Sequence: Synthetic epitope
DQITAIADSP

SEQ ID NO: 14502 - protein, 10 aa, Artificial Sequence
  Description of Artificial Sequence: Synthetic epitope
DQKAASAMDA

SEQ ID NO: 14503 - protein, 10 aa, Artificial Sequence
  Description of Artificial Sequence: Synthetic epitope
DQKESDPTED

SEQ ID NO: 14504 - protein, 10 aa, Artificial Sequence
  Description of Artificial Sequence: Synthetic epitope
DQKKSEEVRP

SEQ ID NO: 14505 - protein, 10 aa, Artificial Sequence
  Description of Artificial Sequence: Synthetic epitope
DQKLTLQPVD

SEQ ID NO: 14506 - protein, 10 aa, Artificial Sequence
  Description of Artificial Sequence: Synthetic epitope
DQKMLADLDD

SEQ ID NO: 14507 - protein, 10 aa, Artificial Sequence
  Description of Artificial Sequence: Synthetic epitope
DQKNKSKNKS

SEQ ID NO: 14508 - protein, 10 aa, Artificial Sequence
  Description of Artificial Sequence: Synthetic epitope
DQKNSEVDSP

SEQ ID NO: 14509 - protein, 10 aa, Artificial Sequence
  Description of Artificial Sequence: Synthetic epitope
DQKQIAVYLP

SEQ ID NO: 14510 - protein, 10 aa, Artificial Sequence
  Description of Artificial Sequence: Synthetic epitope
DQKQLQSGKA

SEQ ID NO: 14511 - protein, 10 aa, Artificial Sequence
  Description of Artificial Sequence: Synthetic epitope
DQKSAASQKP

SEQ ID NO: 14512 - protein, 10 aa, Artificial Sequence
  Description of Artificial Sequence: Synthetic epitope
DQKSVSSHTE

SEQ ID NO: 14513 - protein, 10 aa, Artificial Sequence
  Description of Artificial Sequence: Synthetic epitope
DQKVSSRGTR

SEQ ID NO: 14514 - protein, 10 aa, Artificial Sequence
  Description of Artificial Sequence: Synthetic epitope
DQKYSMDNTP

SEQ ID NO: 14515 - protein, 10 aa, Artificial Sequence
  Description of Artificial Sequence: Synthetic epitope
DQLAKELTAE

SEQ ID NO: 14516 - protein, 10 aa, Artificial Sequence
  Description of Artificial Sequence: Synthetic epitope
DQLIRAAVKF

SEQ ID NO: 14517 - protein, 10 aa, Artificial Sequence
  Description of Artificial Sequence: Synthetic epitope
DQLISILDSD

SEQ ID NO: 14518 - protein, 10 aa, Artificial Sequence
  Description of Artificial Sequence: Synthetic epitope
DQLKLKVSRL

SEQ ID NO: 14519 - protein, 10 aa, Artificial Sequence
  Description of Artificial Sequence: Synthetic epitope
DQLLARADAA

SEQ ID NO: 14520 - protein, 10 aa, Artificial Sequence
  Description of Artificial Sequence: Synthetic epitope
DQLNVSNIDQ

SEQ ID NO: 14521 - protein, 10 aa, Artificial Sequence
  Description of Artificial Sequence: Synthetic epitope
DQLQQKSKEI

SEQ ID NO: 14522 - protein, 10 aa, Artificial Sequence
  Description of Artificial Sequence: Synthetic epitope
DQLQRTSKVY

SEQ ID NO: 14523 - protein, 10 aa, Artificial Sequence
  Description of Artificial Sequence: Synthetic epitope
DQLVSEEQAQ

SEQ ID NO: 14524 - protein, 10 aa, Artificial Sequence
  Description of Artificial Sequence: Synthetic epitope
DQMKADLTAL

SEQ ID NO: 14525 - protein, 10 aa, Artificial Sequence
  Description of Artificial Sequence: Synthetic epitope
DQMLKKEEAI

SEQ ID NO: 14526 - protein, 10 aa, Artificial Sequence
  Description of Artificial Sequence: Synthetic epitope
DQMMPGKTKA

SEQ ID NO: 14527 - protein, 10 aa, Artificial Sequence
  Description of Artificial Sequence: Synthetic epitope
DQMSEVEALS

SEQ ID NO: 14528 - protein, 10 aa, Artificial Sequence
  Description of Artificial Sequence: Synthetic epitope
DQMTQTASDV

SEQ ID NO: 14529 - protein, 10 aa, Artificial Sequence
  Description of Artificial Sequence: Synthetic epitope
DQMVESKEKD

SEQ ID NO: 14530 - protein, 10 aa, Artificial Sequence
  Description of Artificial Sequence: Synthetic epitope
DQMWRQFTDT

SEQ ID NO: 14531 - protein, 10 aa, Artificial Sequence
  Description of Artificial Sequence: Synthetic epitope
DQNQEIRASQ

SEQ ID NO: 14532 - protein, 10 aa, Artificial Sequence
  Description of Artificial Sequence: Synthetic epitope
DQPALLKRPQ

SEQ ID NO: 14533 - protein, 10 aa, Artificial Sequence
  Description of Artificial Sequence: Synthetic epitope
DQPKQGAETV

SEQ ID NO: 14534 - protein, 10 aa, Artificial Sequence
  Description of Artificial Sequence: Synthetic epitope
DQPLLTSDLL

SEQ ID NO: 14535 - protein, 10 aa, Artificial Sequence
  Description of Artificial Sequence: Synthetic epitope
DQPNRMMSNT

SEQ ID NO: 14536 - protein, 10 aa, Artificial Sequence
  Description of Artificial Sequence: Synthetic epitope
DQPSRRSESS

SEQ ID NO: 14537 - protein, 10 aa, Artificial Sequence
  Description of Artificial Sequence: Synthetic epitope
DQQETLGMSG

SEQ ID NO: 14538 - protein, 10 aa, Artificial Sequence
  Description of Artificial Sequence: Synthetic epitope
DQQLLDQVLA

SEQ ID NO: 14539 - protein, 10 aa, Artificial Sequence
  Description of Artificial Sequence: Synthetic epitope
DQQRFSRPRN

SEQ ID NO: 14540 - protein, 10 aa, Artificial Sequence
  Description of Artificial Sequence: Synthetic epitope
DQRLKAAENK

SEQ ID NO: 14541 - protein, 10 aa, Artificial Sequence
  Description of Artificial Sequence: Synthetic epitope
DQRSLINSNV

SEQ ID NO: 14542 - protein, 10 aa, Artificial Sequence
  Description of Artificial Sequence: Synthetic epitope
DQSAAEIGDK

SEQ ID NO: 14543 - protein, 10 aa, Artificial Sequence
  Description of Artificial Sequence: Synthetic epitope
DQSDIVSTME

SEQ ID NO: 14544 - protein, 10 aa, Artificial Sequence
  Description of Artificial Sequence: Synthetic epitope
DQSDSVDSSP

SEQ ID NO: 14545 - protein, 10 aa, Artificial Sequence
  Description of Artificial Sequence: Synthetic epitope
DQSELVTTVD

SEQ ID NO: 14546 - protein, 10 aa, Artificial Sequence
  Description of Artificial Sequence: Synthetic epitope
DQSESINTSN

SEQ ID NO: 14547 - protein, 10 aa, Artificial Sequence
  Description of Artificial Sequence: Synthetic epitope
DQSETRELAE

SEQ ID NO: 14548 - protein, 10 aa, Artificial Sequence
  Description of Artificial Sequence: Synthetic epitope
DQSGTNVAKV

SEQ ID NO: 14549 - protein, 10 aa, Artificial Sequence
  Description of Artificial Sequence: Synthetic epitope
DQSKARTDQA

SEQ ID NO: 14550 - protein, 10 aa, Artificial Sequence
  Description of Artificial Sequence: Synthetic epitope
DQSKETSIKT

SEQ ID NO: 14551 - protein, 10 aa, Artificial Sequence
  Description of Artificial Sequence: Synthetic epitope
DQSKKVVHVP

SEQ ID NO: 14552 - protein, 10 aa, Artificial Sequence
  Description of Artificial Sequence: Synthetic epitope
DQSLTIYEYR

SEQ ID NO: 14553 - protein, 10 aa, Artificial Sequence
  Description of Artificial Sequence: Synthetic epitope
DQSSLVLEEY

SEQ ID NO: 14554 - protein, 10 aa, Artificial Sequence
  Description of Artificial Sequence: Synthetic epitope
DQSSRLSVKE

SEQ ID NO: 14555 - protein, 10 aa, Artificial Sequence
  Description of Artificial Sequence: Synthetic epitope
DQTADQTPGA

SEQ ID NO: 14556 - protein, 10 aa, Artificial Sequence
  Description of Artificial Sequence: Synthetic epitope
DQTGSKSDKE

SEQ ID NO: 14557 - protein, 10 aa, Artificial Sequence
  Description of Artificial Sequence: Synthetic epitope
DQTKEQKAEE

SEQ ID NO: 14558 - protein, 10 aa, Artificial Sequence
  Description of Artificial Sequence: Synthetic epitope
DQTKKRMAKP

SEQ ID NO: 14559 - protein, 10 aa, Artificial Sequence
  Description of Artificial Sequence: Synthetic epitope
DQTQKAATGP

SEQ ID NO: 14560 - protein, 10 aa, Artificial Sequence
  Description of Artificial Sequence: Synthetic epitope
DQTQRSIKAQ

SEQ ID NO: 14561 - protein, 10 aa, Artificial Sequence
  Description of Artificial Sequence: Synthetic epitope
DQTRQNIEDK

SEQ ID NO: 14562 - protein, 10 aa, Artificial Sequence
  Description of Artificial Sequence: Synthetic epitope
DQVIKAVRKI

SEQ ID NO: 14563 - protein, 10 aa, Artificial Sequence
  Description of Artificial Sequence: Synthetic epitope
DQVLSLSHEI

SEQ ID NO: 14564 - protein, 10 aa, Artificial Sequence
  Description of Artificial Sequence: Synthetic epitope
DQVNQTPSEQ

SEQ ID NO: 14565 - protein, 10 aa, Artificial Sequence
  Description of Artificial Sequence: Synthetic epitope
DQVSNLNKTS

SEQ ID NO: 14566 - protein, 10 aa, Artificial Sequence
  Description of Artificial Sequence: Synthetic epitope
DQVSVFKSIR

SEQ ID NO: 14567 - protein, 10 aa, Artificial Sequence
  Description of Artificial Sequence: Synthetic epitope
DRADQQKYGD

SEQ ID NO: 14568 - protein, 10 aa, Artificial Sequence
  Description of Artificial Sequence: Synthetic epitope
DRALSVTATV

SEQ ID NO: 14569 - protein, 10 aa, Artificial Sequence
  Description of Artificial Sequence: Synthetic epitope
DRARQAREER

SEQ ID NO: 14570 - protein, 10 aa, Artificial Sequence
  Description of Artificial Sequence: Synthetic epitope
DRAYLPLERR

SEQ ID NO: 14571 - protein, 10 aa, Artificial Sequence
  Description of Artificial Sequence: Synthetic epitope
DRDLQSSASS

SEQ ID NO: 14572 - protein, 10 aa, Artificial Sequence
  Description of Artificial Sequence: Synthetic epitope
DRDVSLSTGA

SEQ ID NO: 14573 - protein, 10 aa, Artificial Sequence
  Description of Artificial Sequence: Synthetic epitope
DREAATSSRP

SEQ ID NO: 14574 - protein, 10 aa, Artificial Sequence
  Description of Artificial Sequence: Synthetic epitope
DRESQNQKST

SEQ ID NO: 14575 - protein, 10 aa, Artificial Sequence
  Description of Artificial Sequence: Synthetic epitope
DREVTNKNGT

SEQ ID NO: 14576 - protein, 10 aa, Artificial Sequence
  Description of Artificial Sequence: Synthetic epitope
DREYLRKKNE

SEQ ID NO: 14577 - protein, 10 aa, Artificial Sequence
  Description of Artificial Sequence: Synthetic epitope
DRFDNVSYLD

SEQ ID NO: 14578 - protein, 10 aa, Artificial Sequence
  Description of Artificial Sequence: Synthetic epitope
DRFKQFVNNV

SEQ ID NO: 14579 - protein, 10 aa, Artificial Sequence
  Description of Artificial Sequence: Synthetic epitope
DRFPAARFKK

SEQ ID NO: 14580 - protein, 10 aa, Artificial Sequence
  Description of Artificial Sequence: Synthetic epitope
DRGSLKSIMQ

SEQ ID NO: 14581 - protein, 10 aa, Artificial Sequence
  Description of Artificial Sequence: Synthetic epitope
DRHKVALGKT

SEQ ID NO: 14582 - protein, 10 aa, Artificial Sequence
  Description of Artificial Sequence: Synthetic epitope
DRHLELPGQP

SEQ ID NO: 14583 - protein, 10 aa, Artificial Sequence
  Description of Artificial Sequence: Synthetic epitope
DRIAQMGSEA

SEQ ID NO: 14584 - protein, 10 aa, Artificial Sequence
  Description of Artificial Sequence: Synthetic epitope
DRILSQTAND

SEQ ID NO: 14585 - protein, 10 aa, Artificial Sequence
  Description of Artificial Sequence: Synthetic epitope
DRINSMAAMQ

SEQ ID NO: 14586 - protein, 10 aa, Artificial Sequence
  Description of Artificial Sequence: Synthetic epitope
DRIVKQAQYE

SEQ ID NO: 14587 - protein, 10 aa, Artificial Sequence
  Description of Artificial Sequence: Synthetic epitope
DRIVKSATQV

SEQ ID NO: 14588 - protein, 10 aa, Artificial Sequence
  Description of Artificial Sequence: Synthetic epitope
DRIVTGLSES

SEQ ID NO: 14589 - protein, 10 aa, Artificial Sequence
  Description of Artificial Sequence: Synthetic epitope
DRKASANARK

SEQ ID NO: 14590 - protein, 10 aa, Artificial Sequence
  Description of Artificial Sequence: Synthetic epitope
DRKDAMITVD

SEQ ID NO: 14591 - protein, 10 aa, Artificial Sequence
  Description of Artificial Sequence: Synthetic epitope
DRKDVGATAV

SEQ ID NO: 14592 - protein, 10 aa, Artificial Sequence
  Description of Artificial Sequence: Synthetic epitope
DRKEEKGDSA

SEQ ID NO: 14593 - protein, 10 aa, Artificial Sequence
  Description of Artificial Sequence: Synthetic epitope
DRKEQINLLY

SEQ ID NO: 14594 - protein, 10 aa, Artificial Sequence
  Description of Artificial Sequence: Synthetic epitope
DRKLQMAPNS

SEQ ID NO: 14595 - protein, 10 aa, Artificial Sequence
  Description of Artificial Sequence: Synthetic epitope
DRKLVQVEEA

SEQ ID NO: 14596 - protein, 10 aa, Artificial Sequence
  Description of Artificial Sequence: Synthetic epitope
DRKNSASAER

SEQ ID NO: 14597 - protein, 10 aa, Artificial Sequence
  Description of Artificial Sequence: Synthetic epitope
DRKQKMAFLK

SEQ ID NO: 14598 - protein, 10 aa, Artificial Sequence
  Description of Artificial Sequence: Synthetic epitope
DRKSNTRNNM

SEQ ID NO: 14599 - protein, 10 aa, Artificial Sequence
  Description of Artificial Sequence: Synthetic epitope
DRLLKSVTPL

SEQ ID NO: 14600 - protein, 10 aa, Artificial Sequence
  Description of Artificial Sequence: Synthetic epitope
DRLTKKLVHD

SEQ ID NO: 14601 - protein, 10 aa, Artificial Sequence
  Description of Artificial Sequence: Synthetic epitope
DRLTTKVDKL

SEQ ID NO: 14602 - protein, 10 aa, Artificial Sequence
  Description of Artificial Sequence: Synthetic epitope
DRMKIDDMMF

SEQ ID NO: 14603 - protein, 10 aa, Artificial Sequence
  Description of Artificial Sequence: Synthetic epitope
DRMNSSPYQP

SEQ ID NO: 14604 - protein, 10 aa, Artificial Sequence
  Description of Artificial Sequence: Synthetic epitope
DRMTQKTPFE

SEQ ID NO: 14605 - protein, 10 aa, Artificial Sequence
  Description of Artificial Sequence: Synthetic epitope
DRPEDTRGRR

SEQ ID NO: 14606 - protein, 10 aa, Artificial Sequence
  Description of Artificial Sequence: Synthetic epitope
DRPTTAFELG

SEQ ID NO: 14607 - protein, 10 aa, Artificial Sequence
  Description of Artificial Sequence: Synthetic epitope
DRQASDSLAQ

SEQ ID NO: 14608 - protein, 10 aa, Artificial Sequence
  Description of Artificial Sequence: Synthetic epitope
DRQGAVAVTS

SEQ ID NO: 14609 - protein, 10 aa, Artificial Sequence
  Description of Artificial Sequence: Synthetic epitope
DRQRASAALQ

SEQ ID NO: 14610 - protein, 10 aa, Artificial Sequence
  Description of Artificial Sequence: Synthetic epitope
DRQRSDDESP

SEQ ID NO: 14611 - protein, 10 aa, Artificial Sequence
  Description of Artificial Sequence: Synthetic epitope
DRRASRSSQS

SEQ ID NO: 14612 - protein, 10 aa, Artificial Sequence
  Description of Artificial Sequence: Synthetic epitope
DRRSESSRNK

SEQ ID NO: 14613 - protein, 10 aa, Artificial Sequence
  Description of Artificial Sequence: Synthetic epitope
DRRVPSIRSG

SEQ ID NO: 14614 - protein, 10 aa, Artificial Sequence
  Description of Artificial Sequence: Synthetic epitope
DRSGQAQERQ

SEQ ID NO: 14615 - protein, 10 aa, Artificial Sequence
  Description of Artificial Sequence: Synthetic epitope
DRSKNEKVSR

SEQ ID NO: 14616 - protein, 10 aa, Artificial Sequence
  Description of Artificial Sequence: Synthetic epitope
DRSLLRSLLS

SEQ ID NO: 14617 - protein, 10 aa, Artificial Sequence
  Description of Artificial Sequence: Synthetic epitope
DRSTNNVERH

SEQ ID NO: 14618 - protein, 10 aa, Artificial Sequence
  Description of Artificial Sequence: Synthetic epitope
DRTAVKSLKS

SEQ ID NO: 14619 - protein, 10 aa, Artificial Sequence
  Description of Artificial Sequence: Synthetic epitope
DRTPWNKAKG

SEQ ID NO: 14620 - protein, 10 aa, Artificial Sequence
  Description of Artificial Sequence: Synthetic epitope
DRVMKQLEAS

SEQ ID NO: 14621 - protein, 10 aa, Artificial Sequence
  Description of Artificial Sequence: Synthetic epitope
DRVQKSKLSL

SEQ ID NO: 14622 - protein, 10 aa, Artificial Sequence
  Description of Artificial Sequence: Synthetic epitope
DRVSQSVVSA

SEQ ID NO: 14623 - protein, 10 aa, Artificial Sequence
  Description of Artificial Sequence: Synthetic epitope
DSAAERKQES

SEQ ID NO: 14624 - protein, 10 aa, Artificial Sequence
  Description of Artificial Sequence: Synthetic epitope
DSADKVNKNP

SEQ ID NO: 14625 - protein, 10 aa, Artificial Sequence
  Description of Artificial Sequence: Synthetic epitope
DSAETEQEEN

SEQ ID NO: 14626 - protein, 10 aa, Artificial Sequence
  Description of Artificial Sequence: Synthetic epitope
DSAKVPSDEY

SEQ ID NO: 14627 - protein, 10 aa, Artificial Sequence
  Description of Artificial Sequence: Synthetic epitope
DSALLAEVKD

SEQ ID NO: 14628 - protein, 10 aa, Artificial Sequence
  Description of Artificial Sequence: Synthetic epitope
DSALQMGSIK

SEQ ID NO: 14629 - protein, 10 aa, Artificial Sequence
  Description of Artificial Sequence: Synthetic epitope
DSAMLQAQQL

SEQ ID NO: 14630 - protein, 10 aa, Artificial Sequence
  Description of Artificial Sequence: Synthetic epitope
DSAQDDQAKQ

SEQ ID NO: 14631 - protein, 10 aa, Artificial Sequence
  Description of Artificial Sequence: Synthetic epitope
DSASAGLYLR

SEQ ID NO: 14632 - protein, 10 aa, Artificial Sequence
  Description of Artificial Sequence: Synthetic epitope
DSASAPRSVA

SEQ ID NO: 14633 - protein, 10 aa, Artificial Sequence
  Description of Artificial Sequence: Synthetic epitope
DSASEKMAQG

SEQ ID NO: 14634 - protein, 10 aa, Artificial Sequence
  Description of Artificial Sequence: Synthetic epitope
DSASLAGLHA

SEQ ID NO: 14635 - protein, 10 aa, Artificial Sequence
  Description of Artificial Sequence: Synthetic epitope
DSASLELSAE

SEQ ID NO: 14636 - protein, 10 aa, Artificial Sequence
  Description of Artificial Sequence: Synthetic epitope
DSASRKQEVQ

SEQ ID NO: 14637 - protein, 10 aa, Artificial Sequence
  Description of Artificial Sequence: Synthetic epitope
DSASSASPTV

SEQ ID NO: 14638 - protein, 10 aa, Artificial Sequence
  Description of Artificial Sequence: Synthetic epitope
DSASTVLDGT

SEQ ID NO: 14639 - protein, 10 aa, Artificial Sequence
  Description of Artificial Sequence: Synthetic epitope
DSASVRIIKP

SEQ ID NO: 14640 - protein, 10 aa, Artificial Sequence
  Description of Artificial Sequence: Synthetic epitope
DSATGIATET

SEQ ID NO: 14641 - protein, 10 aa, Artificial Sequence
  Description of Artificial Sequence: Synthetic epitope
DSAVEKVSID

SEQ ID NO: 14642 - protein, 10 aa, Artificial Sequence
  Description of Artificial Sequence: Synthetic epitope
DSAVKPDRAA

SEQ ID NO: 14643 - protein, 10 aa, Artificial Sequence
  Description of Artificial Sequence: Synthetic epitope
DSAVSDSASK

SEQ ID NO: 14644 - protein, 10 aa, Artificial Sequence
  Description of Artificial Sequence: Synthetic epitope
DSAVSTDSSM

SEQ ID NO: 14645 - protein, 10 aa, Artificial Sequence
  Description of Artificial Sequence: Synthetic epitope
DSDNILLSEE

SEQ ID NO: 14646 - protein, 10 aa, Artificial Sequence
  Description of Artificial Sequence: Synthetic epitope
DSDQSSGSTT

SEQ ID NO: 14647 - protein, 10 aa, Artificial Sequence
  Description of Artificial Sequence: Synthetic epitope
DSDRSVSSKV

SEQ ID NO: 14648 - protein, 10 aa, Artificial Sequence
  Description of Artificial Sequence: Synthetic epitope
DSDSETDSSD

SEQ ID NO: 14649 - protein, 10 aa, Artificial Sequence
  Description of Artificial Sequence: Synthetic epitope
DSDSEVSEES

SEQ ID NO: 14650 - protein, 10 aa, Artificial Sequence
  Description of Artificial Sequence: Synthetic epitope
DSDTAKERKG

SEQ ID NO: 14651 - protein, 10 aa, Artificial Sequence
  Description of Artificial Sequence: Synthetic epitope
DSDTVRSLKP

SEQ ID NO: 14652 - protein, 10 aa, Artificial Sequence
  Description of Artificial Sequence: Synthetic epitope
DSDYRSETSN

SEQ ID NO: 14653 - protein, 10 aa, Artificial Sequence
  Description of Artificial Sequence: Synthetic epitope
DSEAEVTEED

SEQ ID NO: 14654 - protein, 10 aa, Artificial Sequence
  Description of Artificial Sequence: Synthetic epitope
DSEANSDEKG

SEQ ID NO: 14655 - protein, 10 aa, Artificial Sequence
  Description of Artificial Sequence: Synthetic epitope
DSEATVGAIS

SEQ ID NO: 14656 - protein, 10 aa, Artificial Sequence
  Description of Artificial Sequence: Synthetic epitope
DSEESEAYKS

SEQ ID NO: 14657 - protein, 10 aa, Artificial Sequence
  Description of Artificial Sequence: Synthetic epitope
DSEESTIESG

SEQ ID NO: 14658 - protein, 10 aa, Artificial Sequence
  Description of Artificial Sequence: Synthetic epitope
DSEKEQISSG

SEQ ID NO: 14659 - protein, 10 aa, Artificial Sequence
  Description of Artificial Sequence: Synthetic epitope
DSELSQLSLR

SEQ ID NO: 14660 - protein, 10 aa, Artificial Sequence
  Description of Artificial Sequence: Synthetic epitope
DSENLASPSE

SEQ ID NO: 14661 - protein, 10 aa, Artificial Sequence
  Description of Artificial Sequence: Synthetic epitope
DSEQEQVNIS

SEQ ID NO: 14662 - protein, 10 aa, Artificial Sequence
  Description of Artificial Sequence: Synthetic epitope
DSESAIRLLA

SEQ ID NO: 14663 - protein, 10 aa, Artificial Sequence
  Description of Artificial Sequence: Synthetic epitope
DSESEASEKK

SEQ ID NO: 14664 - protein, 10 aa, Artificial Sequence
  Description of Artificial Sequence: Synthetic epitope
DSESGVQLSG

SEQ ID NO: 14665 - protein, 10 aa, Artificial Sequence
  Description of Artificial Sequence: Synthetic epitope
DSESSVSEGE

SEQ ID NO: 14666 - protein, 10 aa, Artificial Sequence
  Description of Artificial Sequence: Synthetic epitope
DSEVTGLDTR

SEQ ID NO: 14667 - protein, 10 aa, Artificial Sequence
  Description of Artificial Sequence: Synthetic epitope
DSFNVVSTRG

SEQ ID NO: 14668 - protein, 10 aa, Artificial Sequence
  Description of Artificial Sequence: Synthetic epitope
DSGDKNLVIQ

SEQ ID NO: 14669 - protein, 10 aa, Artificial Sequence
  Description of Artificial Sequence: Synthetic epitope
DSGEASSATT

SEQ ID NO: 14670 - protein, 10 aa, Artificial Sequence
  Description of Artificial Sequence: Synthetic epitope
DSGFETRSEK

SEQ ID NO: 14671 - protein, 10 aa, Artificial Sequence
  Description of Artificial Sequence: Synthetic epitope
DSGIDSISSP

SEQ ID NO: 14672 - protein, 10 aa, Artificial Sequence
  Description of Artificial Sequence: Synthetic epitope
DSGKASADTH

SEQ ID NO: 14673 - protein, 10 aa, Artificial Sequence
  Description of Artificial Sequence: Synthetic epitope
DSGSDKANSP

SEQ ID NO: 14674 - protein, 10 aa, Artificial Sequence
  Description of Artificial Sequence: Synthetic epitope
DSGTEMQSNK

SEQ ID NO: 14675 - protein, 10 aa, Artificial Sequence
  Description of Artificial Sequence: Synthetic epitope
DSHAKALERA

SEQ ID NO: 14676 - protein, 10 aa, Artificial Sequence
  Description of Artificial Sequence: Synthetic epitope
DSHVSERVKN

SEQ ID NO: 14677 - protein, 10 aa, Artificial Sequence
  Description of Artificial Sequence: Synthetic epitope
DSIARQVAPE

SEQ ID NO: 14678 - protein, 10 aa, Artificial Sequence
  Description of Artificial Sequence: Synthetic epitope
DSIETSNQSN

SEQ ID NO: 14679 - protein, 10 aa, Artificial Sequence
  Description of Artificial Sequence: Synthetic epitope
DSIGLSKMVF

SEQ ID NO: 14680 - protein, 10 aa, Artificial Sequence
  Description of Artificial Sequence: Synthetic epitope
DSIHRRQGSS

SEQ ID NO: 14681 - protein, 10 aa, Artificial Sequence
  Description of Artificial Sequence: Synthetic epitope
DSIISKLKQD

SEQ ID NO: 14682 - protein, 10 aa, Artificial Sequence
  Description of Artificial Sequence: Synthetic epitope
DSIKRIAFLS

SEQ ID NO: 14683 - protein, 10 aa, Artificial Sequence
  Description of Artificial Sequence: Synthetic epitope
DSILKIMESK

SEQ ID NO: 14684 - protein, 10 aa, Artificial Sequence
  Description of Artificial Sequence: Synthetic epitope
DSIMTRGNAK

SEQ ID NO: 14685 - protein, 10 aa, Artificial Sequence
  Description of Artificial Sequence: Synthetic epitope
DSIPKVVKNP

SEQ ID NO: 14686 - protein, 10 aa, Artificial Sequence
  Description of Artificial Sequence: Synthetic epitope
DSISAVSSEK

SEQ ID NO: 14687 - protein, 10 aa, Artificial Sequence
  Description of Artificial Sequence: Synthetic epitope
DSKAAELIAN

SEQ ID NO: 14688 - protein, 10 aa, Artificial Sequence
  Description of Artificial Sequence: Synthetic epitope
DSKEKASEER

SEQ ID NO: 14689 - protein, 10 aa, Artificial Sequence
  Description of Artificial Sequence: Synthetic epitope
DSKESGQNAQ

SEQ ID NO: 14690 - protein, 10 aa, Artificial Sequence
  Description of Artificial Sequence: Synthetic epitope
DSKGQELAAM

SEQ ID NO: 14691 - protein, 10 aa, Artificial Sequence
  Description of Artificial Sequence: Synthetic epitope
DSKLASSMRY

SEQ ID NO: 14692 - protein, 10 aa, Artificial Sequence
  Description of Artificial Sequence: Synthetic epitope
DSKMFAEIMM

SEQ ID NO: 14693 - protein, 10 aa, Artificial Sequence
  Description of Artificial Sequence: Synthetic epitope
DSKMFETEAD

SEQ ID NO: 14694 - protein, 10 aa, Artificial Sequence
  Description of Artificial Sequence: Synthetic epitope
DSKPSDRERS

SEQ ID NO: 14695 - protein, 10 aa, Artificial Sequence
  Description of Artificial Sequence: Synthetic epitope
DSKPTATFIL

SEQ ID NO: 14696 - protein, 10 aa, Artificial Sequence
  Description of Artificial Sequence: Synthetic epitope
DSKQITMVPF

SEQ ID NO: 14697 - protein, 10 aa, Artificial Sequence
  Description of Artificial Sequence: Synthetic epitope
DSKRGEAPFA

SEQ ID NO: 14698 - protein, 10 aa, Artificial Sequence
  Description of Artificial Sequence: Synthetic epitope
DSKRQVEKEE

SEQ ID NO: 14699 - protein, 10 aa, Artificial Sequence
  Description of Artificial Sequence: Synthetic epitope
DSKSIMRMKS

SEQ ID NO: 14700 - protein, 10 aa, Artificial Sequence
  Description of Artificial Sequence: Synthetic epitope
DSKSREDETK

SEQ ID NO: 14701 - protein, 10 aa, Artificial Sequence
  Description of Artificial Sequence: Synthetic epitope
DSLAAEIVTP

SEQ ID NO: 14702 - protein, 10 aa, Artificial Sequence
  Description of Artificial Sequence: Synthetic epitope
DSLAATQFQQ

SEQ ID NO: 14703 - protein, 10 aa, Artificial Sequence
  Description of Artificial Sequence: Synthetic epitope
DSLADTASAA

SEQ ID NO: 14704 - protein, 10 aa, Artificial Sequence
  Description of Artificial Sequence: Synthetic epitope
DSLAQAAEDD

SEQ ID NO: 14705 - protein, 10 aa, Artificial Sequence
  Description of Artificial Sequence: Synthetic epitope
DSLAQSVVQH

SEQ ID NO: 14706 - protein, 10 aa, Artificial Sequence
  Description of Artificial Sequence: Synthetic epitope
DSLEITKLDS

SEQ ID NO: 14707 - protein, 10 aa, Artificial Sequence
  Description of Artificial Sequence: Synthetic epitope
DSLEKFIVSR

SEQ ID NO: 14708 - protein, 10 aa, Artificial Sequence
  Description of Artificial Sequence: Synthetic epitope
DSLEPRLQRE

SEQ ID NO: 14709 - protein, 10 aa, Artificial Sequence
  Description of Artificial Sequence: Synthetic epitope
DSLERSLEAE

SEQ ID NO: 14710 - protein, 10 aa, Artificial Sequence
  Description of Artificial Sequence: Synthetic epitope
DSLHTSFNIQ

SEQ ID NO: 14711 - protein, 10 aa, Artificial Sequence
  Description of Artificial Sequence: Synthetic epitope
DSLKADAVVP

SEQ ID NO: 14712 - protein, 10 aa, Artificial Sequence
  Description of Artificial Sequence: Synthetic epitope
DSLNSGSASD

SEQ ID NO: 14713 - protein, 10 aa, Artificial Sequence
  Description of Artificial Sequence: Synthetic epitope
DSLPLAKSQP

SEQ ID NO: 14714 - protein, 10 aa, Artificial Sequence
  Description of Artificial Sequence: Synthetic epitope
DSLRAASQST

SEQ ID NO: 14715 - protein, 10 aa, Artificial Sequence
  Description of Artificial Sequence: Synthetic epitope
DSLRFQLETS

SEQ ID NO: 14716 - protein, 10 aa, Artificial Sequence
  Description of Artificial Sequence: Synthetic epitope
DSLRSQPDAS

SEQ ID NO: 14717 - protein, 10 aa, Artificial Sequence
  Description of Artificial Sequence: Synthetic epitope
DSLSASTAQA

SEQ ID NO: 14718 - protein, 10 aa, Artificial Sequence
  Description of Artificial Sequence: Synthetic epitope
DSLSGGMQLL

SEQ ID NO: 14719 - protein, 10 aa, Artificial Sequence
  Description of Artificial Sequence: Synthetic epitope
DSLSMTSEAG

SEQ ID NO: 14720 - protein, 10 aa, Artificial Sequence
  Description of Artificial Sequence: Synthetic epitope
DSLSSEEVHK

SEQ ID NO: 14721 - protein, 10 aa, Artificial Sequence
  Description of Artificial Sequence: Synthetic epitope
DSLSSQFMAY

SEQ ID NO: 14722 - protein, 10 aa, Artificial Sequence
  Description of Artificial Sequence: Synthetic epitope
DSLSTSAATE

SEQ ID NO: 14723 - protein, 10 aa, Artificial Sequence
  Description of Artificial Sequence: Synthetic epitope
DSLSVSVVQT

SEQ ID NO: 14724 - protein, 10 aa, Artificial Sequence
  Description of Artificial Sequence: Synthetic epitope
DSLTSDKASV

SEQ ID NO: 14725 - protein, 10 aa, Artificial Sequence
  Description of Artificial Sequence: Synthetic epitope
DSLVQSQARE

SEQ ID NO: 14726 - protein, 10 aa, Artificial Sequence
  Description of Artificial Sequence: Synthetic epitope
DSMLVANLQP

SEQ ID NO: 14727 - protein, 10 aa, Artificial Sequence
  Description of Artificial Sequence: Synthetic epitope
DSMQLRRQEM

SEQ ID NO: 14728 - protein, 10 aa, Artificial Sequence
  Description of Artificial Sequence: Synthetic epitope
DSMSPDSDTE

SEQ ID NO: 14729 - protein, 10 aa, Artificial Sequence
  Description of Artificial Sequence: Synthetic epitope
DSNAVVQLKG

SEQ ID NO: 14730 - protein, 10 aa, Artificial Sequence
  Description of Artificial Sequence: Synthetic epitope
DSNGQVITTE

SEQ ID NO: 14731 - protein, 10 aa, Artificial Sequence
  Description of Artificial Sequence: Synthetic epitope
DSNSASNMKQ

SEQ ID NO: 14732 - protein, 10 aa, Artificial Sequence
  Description of Artificial Sequence: Synthetic epitope
DSNSNLSVTN

SEQ ID NO: 14733 - protein, 10 aa, Artificial Sequence
  Description of Artificial Sequence: Synthetic epitope
DSPALASVAT

SEQ ID NO: 14734 - protein, 10 aa, Artificial Sequence
  Description of Artificial Sequence: Synthetic epitope
DSPHAHESAG

SEQ ID NO: 14735 - protein, 10 aa, Artificial Sequence
  Description of Artificial Sequence: Synthetic epitope
DSPQTIPTYT

SEQ ID NO: 14736 - protein, 10 aa, Artificial Sequence
  Description of Artificial Sequence: Synthetic epitope
DSQASKYPPK

SEQ ID NO: 14737 - protein, 10 aa, Artificial Sequence
  Description of Artificial Sequence: Synthetic epitope
DSQESKWTAR

SEQ ID NO: 14738 - protein, 10 aa, Artificial Sequence
  Description of Artificial Sequence: Synthetic epitope
DSQGQIEFLR

SEQ ID NO: 14739 - protein, 10 aa, Artificial Sequence
  Description of Artificial Sequence: Synthetic epitope
DSQIKLSIKR

SEQ ID NO: 14740 - protein, 10 aa, Artificial Sequence
  Description of Artificial Sequence: Synthetic epitope
DSQISKPTVE

SEQ ID NO: 14741 - protein, 10 aa, Artificial Sequence
  Description of Artificial Sequence: Synthetic epitope
DSQVKEKSTM

SEQ ID NO: 14742 - protein, 10 aa, Artificial Sequence
  Description of Artificial Sequence: Synthetic epitope
DSQVMTALKM

SEQ ID NO: 14743 - protein, 10 aa, Artificial Sequence
  Description of Artificial Sequence: Synthetic epitope
DSRANIRAQM

SEQ ID NO: 14744 - protein, 10 aa, Artificial Sequence
  Description of Artificial Sequence: Synthetic epitope
DSRDSQVKSE

SEQ ID NO: 14745 - protein, 10 aa, Artificial Sequence
  Description of Artificial Sequence: Synthetic epitope
DSREEREYEQ

SEQ ID NO: 14746 - protein, 10 aa, Artificial Sequence
  Description of Artificial Sequence: Synthetic epitope
DSRESASSRR

SEQ ID NO: 14747 - protein, 10 aa, Artificial Sequence
  Description of Artificial Sequence: Synthetic epitope
DSRIETAQRQ

SEQ ID NO: 14748 - protein, 10 aa, Artificial Sequence
  Description of Artificial Sequence: Synthetic epitope
DSRLGYEVSR

SEQ ID NO: 14749 - protein, 10 aa, Artificial Sequence
  Description of Artificial Sequence: Synthetic epitope
DSRLQAASQM

SEQ ID NO: 14750 - protein, 10 aa, Artificial Sequence
  Description of Artificial Sequence: Synthetic epitope
DSRTHARVMT

SEQ ID NO: 14751 - protein, 10 aa, Artificial Sequence
  Description of Artificial Sequence: Synthetic epitope
DSRTLKLEAL

SEQ ID NO: 14752 - protein, 10 aa, Artificial Sequence
  Description of Artificial Sequence: Synthetic epitope
DSSAATSKAK

SEQ ID NO: 14753 - protein, 10 aa, Artificial Sequence
  Description of Artificial Sequence: Synthetic epitope
DSSESQLAST

SEQ ID NO: 14754 - protein, 10 aa, Artificial Sequence
  Description of Artificial Sequence: Synthetic epitope
DSSEVSLQTG

SEQ ID NO: 14755 - protein, 10 aa, Artificial Sequence
  Description of Artificial Sequence: Synthetic epitope
DSSHKVLSNV

SEQ ID NO: 14756 - protein, 10 aa, Artificial Sequence
  Description of Artificial Sequence: Synthetic epitope
DSSIILTETI

SEQ ID NO: 14757 - protein, 10 aa, Artificial Sequence
  Description of Artificial Sequence: Synthetic epitope
DSSILTSGFQ

SEQ ID NO: 14758 - protein, 10 aa, Artificial Sequence
  Description of Artificial Sequence: Synthetic epitope
DSSISTLKSR

SEQ ID NO: 14759 - protein, 10 aa, Artificial Sequence
  Description of Artificial Sequence: Synthetic epitope
DSSLYGVNPR

SEQ ID NO: 14760 - protein, 10 aa, Artificial Sequence
  Description of Artificial Sequence: Synthetic epitope
DSSMSMADSE

SEQ ID NO: 14761 - protein, 10 aa, Artificial Sequence
  Description of Artificial Sequence: Synthetic epitope
DSSNEMVPNL

SEQ ID NO: 14762 - protein, 10 aa, Artificial Sequence
  Description of Artificial Sequence: Synthetic epitope
DSSNMLNTSS

SEQ ID NO: 14763 - protein, 10 aa, Artificial Sequence
  Description of Artificial Sequence: Synthetic epitope
DSSQHKDENT

SEQ ID NO: 14764 - protein, 10 aa, Artificial Sequence
  Description of Artificial Sequence: Synthetic epitope
DSSRVLQAML

SEQ ID NO: 14765 - protein, 10 aa, Artificial Sequence
  Description of Artificial Sequence: Synthetic epitope
DSSTQAKDAH

SEQ ID NO: 14766 - protein, 10 aa, Artificial Sequence
  Description of Artificial Sequence: Synthetic epitope
DSSVNVQGSV

SEQ ID NO: 14767 - protein, 10 aa, Artificial Sequence
  Description of Artificial Sequence: Synthetic epitope
DSSVSPAATT

SEQ ID NO: 14768 - protein, 10 aa, Artificial Sequence
  Description of Artificial Sequence: Synthetic epitope
DSSYSMAPGP

SEQ ID NO: 14769 - protein, 10 aa, Artificial Sequence
  Description of Artificial Sequence: Synthetic epitope
DSTAIYLDTH

SEQ ID NO: 14770 - protein, 10 aa, Artificial Sequence
  Description of Artificial Sequence: Synthetic epitope
DSTGHSKAKN

SEQ ID NO: 14771 - protein, 10 aa, Artificial Sequence
  Description of Artificial Sequence: Synthetic epitope
DSTGSITTEE

SEQ ID NO: 14772 - protein, 10 aa, Artificial Sequence
  Description of Artificial Sequence: Synthetic epitope
DSTLLASLLQ

SEQ ID NO: 14773 - protein, 10 aa, Artificial Sequence
  Description of Artificial Sequence: Synthetic epitope
DSTMKGKETL

SEQ ID NO: 14774 - protein, 10 aa, Artificial Sequence
  Description of Artificial Sequence: Synthetic epitope
DSTQRLEKIY

SEQ ID NO: 14775 - protein, 10 aa, Artificial Sequence
  Description of Artificial Sequence: Synthetic epitope
DSTTKLYGKD

SEQ ID NO: 14776 - protein, 10 aa, Artificial Sequence
  Description of Artificial Sequence: Synthetic epitope
DSTVATFNLS

SEQ ID NO: 14777 - protein, 10 aa, Artificial Sequence
  Description of Artificial Sequence: Synthetic epitope
DSTVKMASPP

SEQ ID NO: 14778 - protein, 10 aa, Artificial Sequence
  Description of Artificial Sequence: Synthetic epitope
DSTVTSTSSR

SEQ ID NO: 14779 - protein, 10 aa, Artificial Sequence
  Description of Artificial Sequence: Synthetic epitope
DSTYRKFSTK

SEQ ID NO: 14780 - protein, 10 aa, Artificial Sequence
  Description of Artificial Sequence: Synthetic epitope
DSTYSVASPY

SEQ ID NO: 14781 - protein, 10 aa, Artificial Sequence
  Description of Artificial Sequence: Synthetic epitope
DSVAASGTSS

SEQ ID NO: 14782 - protein, 10 aa, Artificial Sequence
  Description of Artificial Sequence: Synthetic epitope
DSVASNNKDQ

SEQ ID NO: 14783 - protein, 10 aa, Artificial Sequence
  Description of Artificial Sequence: Synthetic epitope
DSVDLSRVHK

SEQ ID NO: 14784 - protein, 10 aa, Artificial Sequence
  Description of Artificial Sequence: Synthetic epitope
DSVELSQNEQ

SEQ ID NO: 14785 - protein, 10 aa, Artificial Sequence
  Description of Artificial Sequence: Synthetic epitope
DSVKGTSSEA

SEQ ID NO: 14786 - protein, 10 aa, Artificial Sequence
  Description of Artificial Sequence: Synthetic epitope
DSVKNSMESM

SEQ ID NO: 14787 - protein, 10 aa, Artificial Sequence
  Description of Artificial Sequence: Synthetic epitope
DSVLTNKIGT

SEQ ID NO: 14788 - protein, 10 aa, Artificial Sequence
  Description of Artificial Sequence: Synthetic epitope
DSVLYIAREK

SEQ ID NO: 14789 - protein, 10 aa, Artificial Sequence
  Description of Artificial Sequence: Synthetic epitope
DSVNATSKTG

SEQ ID NO: 14790 - protein, 10 aa, Artificial Sequence
  Description of Artificial Sequence: Synthetic epitope
DSVQSSTRNA

SEQ ID NO: 14791 - protein, 10 aa, Artificial Sequence
  Description of Artificial Sequence: Synthetic epitope
DSVSASQGTK

SEQ ID NO: 14792 - protein, 10 aa, Artificial Sequence
  Description of Artificial Sequence: Synthetic epitope
DSVTAEVAYQ

SEQ ID NO: 14793 - protein, 10 aa, Artificial Sequence
  Description of Artificial Sequence: Synthetic epitope
DSWVLKFQPE

SEQ ID NO: 14794 - protein, 10 aa, Artificial Sequence
  Description of Artificial Sequence: Synthetic epitope
DSYAESRQLT

SEQ ID NO: 14795 - protein, 10 aa, Artificial Sequence
  Description of Artificial Sequence: Synthetic epitope
DSYLDQTSSA

SEQ ID NO: 14796 - protein, 10 aa, Artificial Sequence
  Description of Artificial Sequence: Synthetic epitope
DSYPVRTLQQ

SEQ ID NO: 14797 - protein, 10 aa, Artificial Sequence
  Description of Artificial Sequence: Synthetic epitope
DSYQGANSNE

SEQ ID NO: 14798 - protein, 10 aa, Artificial Sequence
  Description of Artificial Sequence: Synthetic epitope
DSYVDGSSFD

SEQ ID NO: 14799 - protein, 10 aa, Artificial Sequence
  Description of Artificial Sequence: Synthetic epitope
DSYVETQRAA

SEQ ID NO: 14800 - protein, 10 aa, Artificial Sequence
  Description of Artificial Sequence: Synthetic epitope
DTAPAADKLR

SEQ ID NO: 14801 - protein, 10 aa, Artificial Sequence
  Description of Artificial Sequence: Synthetic epitope
DTAQSIMKGV

SEQ ID NO: 14802 - protein, 10 aa, Artificial Sequence
  Description of Artificial Sequence: Synthetic epitope
DTARARIGRK

SEQ ID NO: 14803 - protein, 10 aa, Artificial Sequence
  Description of Artificial Sequence: Synthetic epitope
DTASRKKAVG

SEQ ID NO: 14804 - protein, 10 aa, Artificial Sequence
  Description of Artificial Sequence: Synthetic epitope
DTDASSEVER

SEQ ID NO: 14805 - protein, 10 aa, Artificial Sequence
  Description of Artificial Sequence: Synthetic epitope
DTDKTQGAQT

SEQ ID NO: 14806 - protein, 10 aa, Artificial Sequence
  Description of Artificial Sequence: Synthetic epitope
DTDSLQSQIE

SEQ ID NO: 14807 - protein, 10 aa, Artificial Sequence
  Description of Artificial Sequence: Synthetic epitope
DTEEAKTKSE

SEQ ID NO: 14808 - protein, 10 aa, Artificial Sequence
  Description of Artificial Sequence: Synthetic epitope
DTEEAQTEDP

SEQ ID NO: 14809 - protein, 10 aa, Artificial Sequence
  Description of Artificial Sequence: Synthetic epitope
DTEKLKAREQ

SEQ ID NO: 14810 - protein, 10 aa, Artificial Sequence
  Description of Artificial Sequence: Synthetic epitope
DTETRLNAAY

SEQ ID NO: 14811 - protein, 10 aa, Artificial Sequence
  Description of Artificial Sequence: Synthetic epitope
DTGKHIKEND

SEQ ID NO: 14812 - protein, 10 aa, Artificial Sequence
  Description of Artificial Sequence: Synthetic epitope
DTGSLILADG

SEQ ID NO: 14813 - protein, 10 aa, Artificial Sequence
  Description of Artificial Sequence: Synthetic epitope
DTGTNYDYVR

SEQ ID NO: 14814 - protein, 10 aa, Artificial Sequence
  Description of Artificial Sequence: Synthetic epitope
DTHLTKEKEV

SEQ ID NO: 14815 - protein, 10 aa, Artificial Sequence
  Description of Artificial Sequence: Synthetic epitope
DTHNRVSKED

SEQ ID NO: 14816 - protein, 10 aa, Artificial Sequence
  Description of Artificial Sequence: Synthetic epitope
DTIASEIGEL

SEQ ID NO: 14817 - protein, 10 aa, Artificial Sequence
  Description of Artificial Sequence: Synthetic epitope
DTIELVSDKP

SEQ ID NO: 14818 - protein, 10 aa, Artificial Sequence
  Description of Artificial Sequence: Synthetic epitope
DTIGSVTKTP

SEQ ID NO: 14819 - protein, 10 aa, Artificial Sequence
  Description of Artificial Sequence: Synthetic epitope
DTISRTEKQV

SEQ ID NO: 14820 - protein, 10 aa, Artificial Sequence
  Description of Artificial Sequence: Synthetic epitope
DTISSKRKAK

SEQ ID NO: 14821 - protein, 10 aa, Artificial Sequence
  Description of Artificial Sequence: Synthetic epitope
DTKIADSKRA

SEQ ID NO: 14822 - protein, 10 aa, Artificial Sequence
  Description of Artificial Sequence: Synthetic epitope
DTKKIEGKDE

SEQ ID NO: 14823 - protein, 10 aa, Artificial Sequence
  Description of Artificial Sequence: Synthetic epitope
DTKQLIQQGD

SEQ ID NO: 14824 - protein, 10 aa, Artificial Sequence
  Description of Artificial Sequence: Synthetic epitope
DTLAEEKSII

SEQ ID NO: 14825 - protein, 10 aa, Artificial Sequence
  Description of Artificial Sequence: Synthetic epitope
DTLAIEAAGT

SEQ ID NO: 14826 - protein, 10 aa, Artificial Sequence
  Description of Artificial Sequence: Synthetic epitope
DTLAVASFRS

SEQ ID NO: 14827 - protein, 10 aa, Artificial Sequence
  Description of Artificial Sequence: Synthetic epitope
DTLEFTMASR

SEQ ID NO: 14828 - protein, 10 aa, Artificial Sequence
  Description of Artificial Sequence: Synthetic epitope
DTLIRAKREK

SEQ ID NO: 14829 - protein, 10 aa, Artificial Sequence
  Description of Artificial Sequence: Synthetic epitope
DTLISLMEHL

SEQ ID NO: 14830 - protein, 10 aa, Artificial Sequence
  Description of Artificial Sequence: Synthetic epitope
DTLKAIENNV

SEQ ID NO: 14831 - protein, 10 aa, Artificial Sequence
  Description of Artificial Sequence: Synthetic epitope
DTLLSLLHAS

SEQ ID NO: 14832 - protein, 10 aa, Artificial Sequence
  Description of Artificial Sequence: Synthetic epitope
DTLMISRTPE

SEQ ID NO: 14833 - protein, 10 aa, Artificial Sequence
  Description of Artificial Sequence: Synthetic epitope
DTLSANISQE

SEQ ID NO: 14834 - protein, 10 aa, Artificial Sequence
  Description of Artificial Sequence: Synthetic epitope
DTLVKSGMYE

SEQ ID NO: 14835 - protein, 10 aa, Artificial Sequence
  Description of Artificial Sequence: Synthetic epitope
DTMAIKKQKR

SEQ ID NO: 14836 - protein, 10 aa, Artificial Sequence
  Description of Artificial Sequence: Synthetic epitope
DTMAKALTTM

SEQ ID NO: 14837 - protein, 10 aa, Artificial Sequence
  Description of Artificial Sequence: Synthetic epitope
DTMEQMSRED

SEQ ID NO: 14838 - protein, 10 aa, Artificial Sequence
  Description of Artificial Sequence: Synthetic epitope
DTMIMDSIAA

SEQ ID NO: 14839 - protein, 10 aa, Artificial Sequence
  Description of Artificial Sequence: Synthetic epitope
DTMPVMESIS

SEQ ID NO: 14840 - protein, 10 aa, Artificial Sequence
  Description of Artificial Sequence: Synthetic epitope
DTNARSLAER

SEQ ID NO: 14841 - protein, 10 aa, Artificial Sequence
  Description of Artificial Sequence: Synthetic epitope
DTNTSLESTS

SEQ ID NO: 14842 - protein, 10 aa, Artificial Sequence
  Description of Artificial Sequence: Synthetic epitope
DTNTTRKVMH

SEQ ID NO: 14843 - protein, 10 aa, Artificial Sequence
  Description of Artificial Sequence: Synthetic epitope
DTPKVATKGN

SEQ ID NO: 14844 - protein, 10 aa, Artificial Sequence
  Description of Artificial Sequence: Synthetic epitope
DTQDETQKSD

SEQ ID NO: 14845 - protein, 10 aa, Artificial Sequence
  Description of Artificial Sequence: Synthetic epitope
DTQDSNVDNQ

SEQ ID NO: 14846 - protein, 10 aa, Artificial Sequence
  Description of Artificial Sequence: Synthetic epitope
DTQGARRTQA

SEQ ID NO: 14847 - protein, 10 aa, Artificial Sequence
  Description of Artificial Sequence: Synthetic epitope
DTRKKDASDD

SEQ ID NO: 14848 - protein, 10 aa, Artificial Sequence
  Description of Artificial Sequence: Synthetic epitope
DTRKKDASDD

SEQ ID NO: 14849 - protein, 10 aa, Artificial Sequence
  Description of Artificial Sequence: Synthetic epitope
DTRQRRMNAR

SEQ ID NO: 14850 - protein, 10 aa, Artificial Sequence
  Description of Artificial Sequence: Synthetic epitope
DTRVTQVLSG

SEQ ID NO: 14851 - protein, 10 aa, Artificial Sequence
  Description of Artificial Sequence: Synthetic epitope
DTSAFVSLSQ

SEQ ID NO: 14852 - protein, 10 aa, Artificial Sequence
  Description of Artificial Sequence: Synthetic epitope
DTSALAAPSA

SEQ ID NO: 14853 - protein, 10 aa, Artificial Sequence
  Description of Artificial Sequence: Synthetic epitope
DTSDLTSEAV

SEQ ID NO: 14854 - protein, 10 aa, Artificial Sequence
  Description of Artificial Sequence: Synthetic epitope
DTSDSEQGTE

SEQ ID NO: 14855 - protein, 10 aa, Artificial Sequence
  Description of Artificial Sequence: Synthetic epitope
DTSFSGLSLE

SEQ ID NO: 14856 - protein, 10 aa, Artificial Sequence
  Description of Artificial Sequence: Synthetic epitope
DTSGMEESYS

SEQ ID NO: 14857 - protein, 10 aa, Artificial Sequence
  Description of Artificial Sequence: Synthetic epitope
DTSLKSNAST

SEQ ID NO: 14858 - protein, 10 aa, Artificial Sequence
  Description of Artificial Sequence: Synthetic epitope
DTSRSRSRSA

SEQ ID NO: 14859 - protein, 10 aa, Artificial Sequence
  Description of Artificial Sequence: Synthetic epitope
DTSSRVIQSV

SEQ ID NO: 14860 - protein, 10 aa, Artificial Sequence
  Description of Artificial Sequence: Synthetic epitope
DTSTTSTDSS

SEQ ID NO: 14861 - protein, 10 aa, Artificial Sequence
  Description of Artificial Sequence: Synthetic epitope
DTSVKFSFIT

SEQ ID NO: 14862 - protein, 10 aa, Artificial Sequence
  Description of Artificial Sequence: Synthetic epitope
DTTADSFSSL

SEQ ID NO: 14863 - protein, 10 aa, Artificial Sequence
  Description of Artificial Sequence: Synthetic epitope
DTTAKLSKGA

SEQ ID NO: 14864 - protein, 10 aa, Artificial Sequence
  Description of Artificial Sequence: Synthetic epitope
DTTKAVITLQ

SEQ ID NO: 14865 - protein, 10 aa, Artificial Sequence
  Description of Artificial Sequence: Synthetic epitope
DTTLAVSTFA

SEQ ID NO: 14866 - protein, 10 aa, Artificial Sequence
  Description of Artificial Sequence: Synthetic epitope
DTTRVTRVTQ

SEQ ID NO: 14867 - protein, 10 aa, Artificial Sequence
  Description of Artificial Sequence: Synthetic epitope
DTTSSKTTEG

SEQ ID NO: 14868 - protein, 10 aa, Artificial Sequence
  Description of Artificial Sequence: Synthetic epitope
DTTVIVKNQP

SEQ ID NO: 14869 - protein, 10 aa, Artificial Sequence
  Description of Artificial Sequence: Synthetic epitope
DTVARARESG

SEQ ID NO: 14870 - protein, 10 aa, Artificial Sequence
  Description of Artificial Sequence: Synthetic epitope
DTVFVNHMEE

SEQ ID NO: 14871 - protein, 10 aa, Artificial Sequence
  Description of Artificial Sequence: Synthetic epitope
DTVIQAAMRK

SEQ ID NO: 14872 - protein, 10 aa, Artificial Sequence
  Description of Artificial Sequence: Synthetic epitope
DTVMMGKKLK

SEQ ID NO: 14873 - protein, 10 aa, Artificial Sequence
  Description of Artificial Sequence: Synthetic epitope
DTVTEGKRFS

SEQ ID NO: 14874 - protein, 10 aa, Artificial Sequence
  Description of Artificial Sequence: Synthetic epitope
DTVVGEDMRM

SEQ ID NO: 14875 - protein, 10 aa, Artificial Sequence
  Description of Artificial Sequence: Synthetic epitope
DTWKDGARNT

SEQ ID NO: 14876 - protein, 10 aa, Artificial Sequence
  Description of Artificial Sequence: Synthetic epitope
DTYMSTLTSN

SEQ ID NO: 14877 - protein, 10 aa, Artificial Sequence
  Description of Artificial Sequence: Synthetic epitope
DVAAIQARVD

SEQ ID NO: 14878 - protein, 10 aa, Artificial Sequence
  Description of Artificial Sequence: Synthetic epitope
DVAFTQQASQ

SEQ ID NO: 14879 - protein, 10 aa, Artificial Sequence
  Description of Artificial Sequence: Synthetic epitope
DVAIKLVSLY

SEQ ID NO: 14880 - protein, 10 aa, Artificial Sequence
  Description of Artificial Sequence: Synthetic epitope
DVAISANIAD

SEQ ID NO: 14881 - protein, 10 aa, Artificial Sequence
  Description of Artificial Sequence: Synthetic epitope
DVAKTLGDQT

SEQ ID NO: 14882 - protein, 10 aa, Artificial Sequence
  Description of Artificial Sequence: Synthetic epitope
DVALAVSTTP

SEQ ID NO: 14883 - protein, 10 aa, Artificial Sequence
  Description of Artificial Sequence: Synthetic epitope
DVALEIRQAA

SEQ ID NO: 14884 - protein, 10 aa, Artificial Sequence
  Description of Artificial Sequence: Synthetic epitope
DVALELTEQK

SEQ ID NO: 14885 - protein, 10 aa, Artificial Sequence
  Description of Artificial Sequence: Synthetic epitope
DVASDQNLFQ

SEQ ID NO: 14886 - protein, 10 aa, Artificial Sequence
  Description of Artificial Sequence: Synthetic epitope
DVDANSLNSN

SEQ ID NO: 14887 - protein, 10 aa, Artificial Sequence
  Description of Artificial Sequence: Synthetic epitope
DVDMSEYLDR

SEQ ID NO: 14888 - protein, 10 aa, Artificial Sequence
  Description of Artificial Sequence: Synthetic epitope
DVDNGNTNAN

SEQ ID NO: 14889 - protein, 10 aa, Artificial Sequence
  Description of Artificial Sequence: Synthetic epitope
DVDPKTKVMQ

SEQ ID NO: 14890 - protein, 10 aa, Artificial Sequence
  Description of Artificial Sequence: Synthetic epitope
DVDRAAQGER

SEQ ID NO: 14891 - protein, 10 aa, Artificial Sequence
  Description of Artificial Sequence: Synthetic epitope
DVDTLASLLS

SEQ ID NO: 14892 - protein, 10 aa, Artificial Sequence
  Description of Artificial Sequence: Synthetic epitope
DVDYVNSTEA

SEQ ID NO: 14893 - protein, 10 aa, Artificial Sequence
  Description of Artificial Sequence: Synthetic epitope
DVEATKKGSG

SEQ ID NO: 14894 - protein, 10 aa, Artificial Sequence
  Description of Artificial Sequence: Synthetic epitope
DVEHNLFKQR

SEQ ID NO: 14895 - protein, 10 aa, Artificial Sequence
  Description of Artificial Sequence: Synthetic epitope
DVEKPVGVAA

SEQ ID NO: 14896 - protein, 10 aa, Artificial Sequence
  Description of Artificial Sequence: Synthetic epitope
DVEQQVIVIE

SEQ ID NO: 14897 - protein, 10 aa, Artificial Sequence
  Description of Artificial Sequence: Synthetic epitope
DVESDSAKQF

SEQ ID NO: 14898 - protein, 10 aa, Artificial Sequence
  Description of Artificial Sequence: Synthetic epitope
DVESGDEANP

SEQ ID NO: 14899 - protein, 10 aa, Artificial Sequence
  Description of Artificial Sequence: Synthetic epitope
DVGEKTSEFK

SEQ ID NO: 14900 - protein, 10 aa, Artificial Sequence
  Description of Artificial Sequence: Synthetic epitope
DVGMSDTAMT

SEQ ID NO: 14901 - protein, 10 aa, Artificial Sequence
  Description of Artificial Sequence: Synthetic epitope
DVHASDSSDS

SEQ ID NO: 14902 - protein, 10 aa, Artificial Sequence
  Description of Artificial Sequence: Synthetic epitope
DVISLSHSLA

SEQ ID NO: 14903 - protein, 10 aa, Artificial Sequence
  Description of Artificial Sequence: Synthetic epitope
DVISPHSYKS

SEQ ID NO: 14904 - protein, 10 aa, Artificial Sequence
  Description of Artificial Sequence: Synthetic epitope
DVKGTSQENI

SEQ ID NO: 14905 - protein, 10 aa, Artificial Sequence
  Description of Artificial Sequence: Synthetic epitope
DVKNIAHQNK

SEQ ID NO: 14906 - protein, 10 aa, Artificial Sequence
  Description of Artificial Sequence: Synthetic epitope
DVKSSKHDKM

SEQ ID NO: 14907 - protein, 10 aa, Artificial Sequence
  Description of Artificial Sequence: Synthetic epitope
DVKSSNKNPS

SEQ ID NO: 14908 - protein, 10 aa, Artificial Sequence
  Description of Artificial Sequence: Synthetic epitope
DVKSTMLPAA

SEQ ID NO: 14909 - protein, 10 aa, Artificial Sequence
  Description of Artificial Sequence: Synthetic epitope
DVKYSDSKVE

SEQ ID NO: 14910 - protein, 10 aa, Artificial Sequence
  Description of Artificial Sequence: Synthetic epitope
DVLSIKRDLD

SEQ ID NO: 14911 - protein, 10 aa, Artificial Sequence
  Description of Artificial Sequence: Synthetic epitope
DVLVTLSTPG

SEQ ID NO: 14912 - protein, 10 aa, Artificial Sequence
  Description of Artificial Sequence: Synthetic epitope
DVNAVTTVHS

SEQ ID NO: 14913 - protein, 10 aa, Artificial Sequence
  Description of Artificial Sequence: Synthetic epitope
DVNAWERRAP

SEQ ID NO: 14914 - protein, 10 aa, Artificial Sequence
  Description of Artificial Sequence: Synthetic epitope
DVNSHKIEKT

SEQ ID NO: 14915 - protein, 10 aa, Artificial Sequence
  Description of Artificial Sequence: Synthetic epitope
DVPIRLTGSQ

SEQ ID NO: 14916 - protein, 10 aa, Artificial Sequence
  Description of Artificial Sequence: Synthetic epitope
DVPRLQQMAS

SEQ ID NO: 14917 - protein, 10 aa, Artificial Sequence
  Description of Artificial Sequence: Synthetic epitope
DVPRQASSEA

SEQ ID NO: 14918 - protein, 10 aa, Artificial Sequence
  Description of Artificial Sequence: Synthetic epitope
DVQKTQPRSA

SEQ ID NO: 14919 - protein, 10 aa, Artificial Sequence
  Description of Artificial Sequence: Synthetic epitope
DVQTQQMEDT

SEQ ID NO: 14920 - protein, 10 aa, Artificial Sequence
  Description of Artificial Sequence: Synthetic epitope
DVRPKTSRSR

SEQ ID NO: 14921 - protein, 10 aa, Artificial Sequence
  Description of Artificial Sequence: Synthetic epitope
DVRVNSSQVL

SEQ ID NO: 14922 - protein, 10 aa, Artificial Sequence
  Description of Artificial Sequence: Synthetic epitope
DVSASAKGVS

SEQ ID NO: 14923 - protein, 10 aa, Artificial Sequence
  Description of Artificial Sequence: Synthetic epitope
DVSASEVSKA

SEQ ID NO: 14924 - protein, 10 aa, Artificial Sequence
  Description of Artificial Sequence: Synthetic epitope
DVSDIRDDIS

SEQ ID NO: 14925 - protein, 10 aa, Artificial Sequence
  Description of Artificial Sequence: Synthetic epitope
DVSEVSSVEH

SEQ ID NO: 14926 - protein, 10 aa, Artificial Sequence
  Description of Artificial Sequence: Synthetic epitope
DVSKTSLKQA

SEQ ID NO: 14927 - protein, 10 aa, Artificial Sequence
  Description of Artificial Sequence: Synthetic epitope
DVSLSRATDL

SEQ ID NO: 14928 - protein, 10 aa, Artificial Sequence
  Description of Artificial Sequence: Synthetic epitope
DVSNLESSGG

SEQ ID NO: 14929 - protein, 10 aa, Artificial Sequence
  Description of Artificial Sequence: Synthetic epitope
DVSNMWKADV

SEQ ID NO: 14930 - protein, 10 aa, Artificial Sequence
  Description of Artificial Sequence: Synthetic epitope
DVSQATLASV

SEQ ID NO: 14931 - protein, 10 aa, Artificial Sequence
  Description of Artificial Sequence: Synthetic epitope
DVSSAAEAEA

SEQ ID NO: 14932 - protein, 10 aa, Artificial Sequence
  Description of Artificial Sequence: Synthetic epitope
DVSSLNDADE

SEQ ID NO: 14933 - protein, 10 aa, Artificial Sequence
  Description of Artificial Sequence: Synthetic epitope
DVTASTYHQV

SEQ ID NO: 14934 - protein, 10 aa, Artificial Sequence
  Description of Artificial Sequence: Synthetic epitope
DVTDAMVDQA

SEQ ID NO: 14935 - protein, 10 aa, Artificial Sequence
  Description of Artificial Sequence: Synthetic epitope
DVTKSKKGKD

SEQ ID NO: 14936 - protein, 10 aa, Artificial Sequence
  Description of Artificial Sequence: Synthetic epitope
DVTLLKETER

SEQ ID NO: 14937 - protein, 10 aa, Artificial Sequence
  Description of Artificial Sequence: Synthetic epitope
DVTQKIGITL

SEQ ID NO: 14938 - protein, 10 aa, Artificial Sequence
  Description of Artificial Sequence: Synthetic epitope
DVTTRDLSST

SEQ ID NO: 14939 - protein, 10 aa, Artificial Sequence
  Description of Artificial Sequence: Synthetic epitope
DVTTSIGRRQ

SEQ ID NO: 14940 - protein, 10 aa, Artificial Sequence
  Description of Artificial Sequence: Synthetic epitope
DVVRASRNAK

SEQ ID NO: 14941 - protein, 10 aa, Artificial Sequence
  Description of Artificial Sequence: Synthetic epitope
DVVSPIPANK

SEQ ID NO: 14942 - protein, 10 aa, Artificial Sequence
  Description of Artificial Sequence: Synthetic epitope
DVVTRLAGPS

SEQ ID NO: 14943 - protein, 10 aa, Artificial Sequence
  Description of Artificial Sequence: Synthetic epitope
DVWTIMPTLE

SEQ ID NO: 14944 - protein, 10 aa, Artificial Sequence
  Description of Artificial Sequence: Synthetic epitope
DWALAKKYDQ

SEQ ID NO: 14945 - protein, 10 aa, Artificial Sequence
  Description of Artificial Sequence: Synthetic epitope
DWIEAQINNE

SEQ ID NO: 14946 - protein, 10 aa, Artificial Sequence
  Description of Artificial Sequence: Synthetic epitope
DWIVKHVNTN

SEQ ID NO: 14947 - protein, 10 aa, Artificial Sequence
  Description of Artificial Sequence: Synthetic epitope
DWLARLGTAS

SEQ ID NO: 14948 - protein, 10 aa, Artificial Sequence
  Description of Artificial Sequence: Synthetic epitope
DWNMFVKLRS

SEQ ID NO: 14949 - protein, 10 aa, Artificial Sequence
  Description of Artificial Sequence: Synthetic epitope
DWQEVIGGEI

SEQ ID NO: 14950 - protein, 10 aa, Artificial Sequence
  Description of Artificial Sequence: Synthetic epitope
DWRSTAFRQK

SEQ ID NO: 14951 - protein, 10 aa, Artificial Sequence
  Description of Artificial Sequence: Synthetic epitope
DWSSLIDSRT

SEQ ID NO: 14952 - protein, 10 aa, Artificial Sequence
  Description of Artificial Sequence: Synthetic epitope
DWTTRVKQIA

SEQ ID NO: 14953 - protein, 10 aa, Artificial Sequence
  Description of Artificial Sequence: Synthetic epitope
DWTVKMMQKV

SEQ ID NO: 14954 - protein, 10 aa, Artificial Sequence
  Description of Artificial Sequence: Synthetic epitope
DWWEAVSETV

SEQ ID NO: 14955 - protein, 10 aa, Artificial Sequence
  Description of Artificial Sequence: Synthetic epitope
DWYQVKRMQD

SEQ ID NO: 14956 - protein, 10 aa, Artificial Sequence
  Description of Artificial Sequence: Synthetic epitope
DYAASTMTEF

SEQ ID NO: 14957 - protein, 10 aa, Artificial Sequence
  Description of Artificial Sequence: Synthetic epitope
DYARLKLSDV

SEQ ID NO: 14958 - protein, 10 aa, Artificial Sequence
  Description of Artificial Sequence: Synthetic epitope
DYASEAIKGA

SEQ ID NO: 14959 - protein, 10 aa, Artificial Sequence
  Description of Artificial Sequence: Synthetic epitope
DYFTHQNQGS

SEQ ID NO: 14960 - protein, 10 aa, Artificial Sequence
  Description of Artificial Sequence: Synthetic epitope
DYGLESEVAQ

SEQ ID NO: 14961 - protein, 10 aa, Artificial Sequence
  Description of Artificial Sequence: Synthetic epitope
DYISKEVNEI

SEQ ID NO: 14962 - protein, 10 aa, Artificial Sequence
  Description of Artificial Sequence: Synthetic epitope
DYISSNNRQT

SEQ ID NO: 14963 - protein, 10 aa, Artificial Sequence
  Description of Artificial Sequence: Synthetic epitope
DYLINASTLV

SEQ ID NO: 14964 - protein, 10 aa, Artificial Sequence
  Description of Artificial Sequence: Synthetic epitope
DYLRASIEQL

SEQ ID NO: 14965 - protein, 10 aa, Artificial Sequence
  Description of Artificial Sequence: Synthetic epitope
DYMKVILGRS

SEQ ID NO: 14966 - protein, 10 aa, Artificial Sequence
  Description of Artificial Sequence: Synthetic epitope
DYMLGDGIQE

SEQ ID NO: 14967 - protein, 10 aa, Artificial Sequence
  Description of Artificial Sequence: Synthetic epitope
DYNASASTIS

SEQ ID NO: 14968 - protein, 10 aa, Artificial Sequence
  Description of Artificial Sequence: Synthetic epitope
DYQDHKGADS

SEQ ID NO: 14969 - protein, 10 aa, Artificial Sequence
  Description of Artificial Sequence: Synthetic epitope
DYRRAAKYDV

SEQ ID NO: 14970 - protein, 10 aa, Artificial Sequence
  Description of Artificial Sequence: Synthetic epitope
DYSMVATVSS

SEQ ID NO: 14971 - protein, 10 aa, Artificial Sequence
  Description of Artificial Sequence: Synthetic epitope
DYSVAEISRS

SEQ ID NO: 14972 - protein, 10 aa, Artificial Sequence
  Description of Artificial Sequence: Synthetic epitope
DYTKRSLGIF

SEQ ID NO: 14973 - protein, 10 aa, Artificial Sequence
  Description of Artificial Sequence: Synthetic epitope
DYTNDLSIEL

SEQ ID NO: 14974 - protein, 10 aa, Artificial Sequence
  Description of Artificial Sequence: Synthetic epitope
DYTYANMTFQ

SEQ ID NO: 14975 - protein, 10 aa, Artificial Sequence
  Description of Artificial Sequence: Synthetic epitope
DYVRHKKFRS

SEQ ID NO: 14976 - protein, 10 aa, Artificial Sequence
  Description of Artificial Sequence: Synthetic epitope
EAADVGAQMI

SEQ ID NO: 14977 - protein, 10 aa, Artificial Sequence
  Description of Artificial Sequence: Synthetic epitope
EAAEAETAKD

SEQ ID NO: 14978 - protein, 10 aa, Artificial Sequence
  Description of Artificial Sequence: Synthetic epitope
EAAEAGNLAV

SEQ ID NO: 14979 - protein, 10 aa, Artificial Sequence
  Description of Artificial Sequence: Synthetic epitope
EAAEKSLQTR

SEQ ID NO: 14980 - protein, 10 aa, Artificial Sequence
  Description of Artificial Sequence: Synthetic epitope
EAAELPQKNQ

SEQ ID NO: 14981 - protein, 10 aa, Artificial Sequence
  Description of Artificial Sequence: Synthetic epitope
EAAEQNVSRI

SEQ ID NO: 14982 - protein, 10 aa, Artificial Sequence
  Description of Artificial Sequence: Synthetic epitope
EAAEREETQQ

SEQ ID NO: 14983 - protein, 10 aa, Artificial Sequence
  Description of Artificial Sequence: Synthetic epitope
EAAESEEDDN

SEQ ID NO: 14984 - protein, 10 aa, Artificial Sequence
  Description of Artificial Sequence: Synthetic epitope
EAAFQSAQAQ

SEQ ID NO: 14985 - protein, 10 aa, Artificial Sequence
  Description of Artificial Sequence: Synthetic epitope
EAAFRKVVQA

SEQ ID NO: 14986 - protein, 10 aa, Artificial Sequence
  Description of Artificial Sequence: Synthetic epitope
EAAGAVQVAY

SEQ ID NO: 14987 - protein, 10 aa, Artificial Sequence
  Description of Artificial Sequence: Synthetic epitope
EAAGEAVLGA

SEQ ID NO: 14988 - protein, 10 aa, Artificial Sequence
  Description of Artificial Sequence: Synthetic epitope
EAAGVESLSQ

SEQ ID NO: 14989 - protein, 10 aa, Artificial Sequence
  Description of Artificial Sequence: Synthetic epitope
EAAMKEIESI

SEQ ID NO: 14990 - protein, 10 aa, Artificial Sequence
  Description of Artificial Sequence: Synthetic epitope
EAANLPALVL

SEQ ID NO: 14991 - protein, 10 aa, Artificial Sequence
  Description of Artificial Sequence: Synthetic epitope
EAAQENASDY

SEQ ID NO: 14992 - protein, 10 aa, Artificial Sequence
  Description of Artificial Sequence: Synthetic epitope
EAAQKINGQD

SEQ ID NO: 14993 - protein, 10 aa, Artificial Sequence
  Description of Artificial Sequence: Synthetic epitope
EAAQLFVVDV

SEQ ID NO: 14994 - protein, 10 aa, Artificial Sequence
  Description of Artificial Sequence: Synthetic epitope
EAARATREAK

SEQ ID NO: 14995 - protein, 10 aa, Artificial Sequence
  Description of Artificial Sequence: Synthetic epitope
EAARHKREKR

SEQ ID NO: 14996 - protein, 10 aa, Artificial Sequence
  Description of Artificial Sequence: Synthetic epitope
EAARVSKNAH

SEQ ID NO: 14997 - protein, 10 aa, Artificial Sequence
  Description of Artificial Sequence: Synthetic epitope
EAASEKYSEK

SEQ ID NO: 14998 - protein, 10 aa, Artificial Sequence
  Description of Artificial Sequence: Synthetic epitope
EAASREMSTQ

SEQ ID NO: 14999 - protein, 10 aa, Artificial Sequence
  Description of Artificial Sequence: Synthetic epitope
EAASSQKENQ

SEQ ID NO: 15000 - protein, 10 aa, Artificial Sequence
  Description of Artificial Sequence: Synthetic epitope
EAASVRMRGE

SEQ ID NO: 15001 - protein, 10 aa, Artificial Sequence
  Description of Artificial Sequence: Synthetic epitope
EAATESLAKY

SEQ ID NO: 15002 - protein, 10 aa, Artificial Sequence
  Description of Artificial Sequence: Synthetic epitope
EAAVAQSEQQ

SEQ ID NO: 15003 - protein, 10 aa, Artificial Sequence
  Description of Artificial Sequence: Synthetic epitope
EAAVAQSEQQ

SEQ ID NO: 15004 - protein, 10 aa, Artificial Sequence
  Description of Artificial Sequence: Synthetic epitope
EAAVEVLAAV

SEQ ID NO: 15005 - protein, 10 aa, Artificial Sequence
  Description of Artificial Sequence: Synthetic epitope
EAAVTPAEPY

SEQ ID NO: 15006 - protein, 10 aa, Artificial Sequence
  Description of Artificial Sequence: Synthetic epitope
EAAVVAEQED

SEQ ID NO: 15007 - protein, 10 aa, Artificial Sequence
  Description of Artificial Sequence: Synthetic epitope
EAAWHHMPHP

SEQ ID NO: 15008 - protein, 10 aa, Artificial Sequence
  Description of Artificial Sequence: Synthetic epitope
EADAESSPSQ

SEQ ID NO: 15009 - protein, 10 aa, Artificial Sequence
  Description of Artificial Sequence: Synthetic epitope
EADFAKRGYK

SEQ ID NO: 15010 - protein, 10 aa, Artificial Sequence
  Description of Artificial Sequence: Synthetic epitope
EADIDRRDED

SEQ ID NO: 15011 - protein, 10 aa, Artificial Sequence
  Description of Artificial Sequence: Synthetic epitope
EADKIFLERN

SEQ ID NO: 15012 - protein, 10 aa, Artificial Sequence
  Description of Artificial Sequence: Synthetic epitope
EADKIFLERN

SEQ ID NO: 15013 - protein, 10 aa, Artificial Sequence
  Description of Artificial Sequence: Synthetic epitope
EADKTAKEES

SEQ ID NO: 15014 - protein, 10 aa, Artificial Sequence
  Description of Artificial Sequence: Synthetic epitope
EADMALAKEE

SEQ ID NO: 15015 - protein, 10 aa, Artificial Sequence
  Description of Artificial Sequence: Synthetic epitope
EADNAERPRA

SEQ ID NO: 15016 - protein, 10 aa, Artificial Sequence
  Description of Artificial Sequence: Synthetic epitope
EADREKSRAV

SEQ ID NO: 15017 - protein, 10 aa, Artificial Sequence
  Description of Artificial Sequence: Synthetic epitope
EADSKKSIIK

SEQ ID NO: 15018 - protein, 10 aa, Artificial Sequence
  Description of Artificial Sequence: Synthetic epitope
EADSKPSKNV

SEQ ID NO: 15019 - protein, 10 aa, Artificial Sequence
  Description of Artificial Sequence: Synthetic epitope
EADSKSAVED

SEQ ID NO: 15020 - protein, 10 aa, Artificial Sequence
  Description of Artificial Sequence: Synthetic epitope
EAEAASVGEG

SEQ ID NO: 15021 - protein, 10 aa, Artificial Sequence
  Description of Artificial Sequence: Synthetic epitope
EAEARMRQAS

SEQ ID NO: 15022 - protein, 10 aa, Artificial Sequence
  Description of Artificial Sequence: Synthetic epitope
EAEEKIKVLH

SEQ ID NO: 15023 - protein, 10 aa, Artificial Sequence
  Description of Artificial Sequence: Synthetic epitope
EAEELDKASS

SEQ ID NO: 15024 - protein, 10 aa, Artificial Sequence
  Description of Artificial Sequence: Synthetic epitope
EAEEVRLSQS

SEQ ID NO: 15025 - protein, 10 aa, Artificial Sequence
  Description of Artificial Sequence: Synthetic epitope
EAEGEATVIE

SEQ ID NO: 15026 - protein, 10 aa, Artificial Sequence
  Description of Artificial Sequence: Synthetic epitope
EAEKEKASDK

SEQ ID NO: 15027 - protein, 10 aa, Artificial Sequence
  Description of Artificial Sequence: Synthetic epitope
EAEKKAKAEA

SEQ ID NO: 15028 - protein, 10 aa, Artificial Sequence
  Description of Artificial Sequence: Synthetic epitope
EAEKQAVYQQ

SEQ ID NO: 15029 - protein, 10 aa, Artificial Sequence
  Description of Artificial Sequence: Synthetic epitope
EAEKQSANLR

SEQ ID NO: 15030 - protein, 10 aa, Artificial Sequence
  Description of Artificial Sequence: Synthetic epitope
EAEKVSAMLD

SEQ ID NO: 15031 - protein, 10 aa, Artificial Sequence
  Description of Artificial Sequence: Synthetic epitope
EAEKVVESPD

SEQ ID NO: 15032 - protein, 10 aa, Artificial Sequence
  Description of Artificial Sequence: Synthetic epitope
EAELDTEANS

SEQ ID NO: 15033 - protein, 10 aa, Artificial Sequence
  Description of Artificial Sequence: Synthetic epitope
EAELETLQEP

SEQ ID NO: 15034 - protein, 10 aa, Artificial Sequence
  Description of Artificial Sequence: Synthetic epitope
EAELKAEQDE

SEQ ID NO: 15035 - protein, 10 aa, Artificial Sequence
  Description of Artificial Sequence: Synthetic epitope
EAELKVLKEN

SEQ ID NO: 15036 - protein, 10 aa, Artificial Sequence
  Description of Artificial Sequence: Synthetic epitope
EAELLQLEKL

SEQ ID NO: 15037 - protein, 10 aa, Artificial Sequence
  Description of Artificial Sequence: Synthetic epitope
EAEMKAATEL

SEQ ID NO: 15038 - protein, 10 aa, Artificial Sequence
  Description of Artificial Sequence: Synthetic epitope
EAENSALAQA

SEQ ID NO: 15039 - protein, 10 aa, Artificial Sequence
  Description of Artificial Sequence: Synthetic epitope
EAEQARASMQ

SEQ ID NO: 15040 - protein, 10 aa, Artificial Sequence
  Description of Artificial Sequence: Synthetic epitope
EAERHELGKV

SEQ ID NO: 15041 - protein, 10 aa, Artificial Sequence
  Description of Artificial Sequence: Synthetic epitope
EAERKKQSEK

SEQ ID NO: 15042 - protein, 10 aa, Artificial Sequence
  Description of Artificial Sequence: Synthetic epitope
EAERKKQSEK

SEQ ID NO: 15043 - protein, 10 aa, Artificial Sequence
  Description of Artificial Sequence: Synthetic epitope
EAERKSGLDQ

SEQ ID NO: 15044 - protein, 10 aa, Artificial Sequence
  Description of Artificial Sequence: Synthetic epitope
EAESKSELSQ

SEQ ID NO: 15045 - protein, 10 aa, Artificial Sequence
  Description of Artificial Sequence: Synthetic epitope
EAESMATHHL

SEQ ID NO: 15046 - protein, 10 aa, Artificial Sequence
  Description of Artificial Sequence: Synthetic epitope
EAESTKSFQY

SEQ ID NO: 15047 - protein, 10 aa, Artificial Sequence
  Description of Artificial Sequence: Synthetic epitope
EAETEEITQG

SEQ ID NO: 15048 - protein, 10 aa, Artificial Sequence
  Description of Artificial Sequence: Synthetic epitope
EAEVELSARR

SEQ ID NO: 15049 - protein, 10 aa, Artificial Sequence
  Description of Artificial Sequence: Synthetic epitope
EAEVNAASQE

SEQ ID NO: 15050 - protein, 10 aa, Artificial Sequence
  Description of Artificial Sequence: Synthetic epitope
EAEVRAEETT

SEQ ID NO: 15051 - protein, 10 aa, Artificial Sequence
  Description of Artificial Sequence: Synthetic epitope
EAEVSQLTGE

SEQ ID NO: 15052 - protein, 10 aa, Artificial Sequence
  Description of Artificial Sequence: Synthetic epitope
EAFAANDSVF

SEQ ID NO: 15053 - protein, 10 aa, Artificial Sequence
  Description of Artificial Sequence: Synthetic epitope
EAFAQNVLSK

SEQ ID NO: 15054 - protein, 10 aa, Artificial Sequence
  Description of Artificial Sequence: Synthetic epitope
EAFEMMEKDE

SEQ ID NO: 15055 - protein, 10 aa, Artificial Sequence
  Description of Artificial Sequence: Synthetic epitope
EAFIQHDETR

SEQ ID NO: 15056 - protein, 10 aa, Artificial Sequence
  Description of Artificial Sequence: Synthetic epitope
EAFKDMSAKE

SEQ ID NO: 15057 - protein, 10 aa, Artificial Sequence
  Description of Artificial Sequence: Synthetic epitope
EAFKVALDKD

SEQ ID NO: 15058 - protein, 10 aa, Artificial Sequence
  Description of Artificial Sequence: Synthetic epitope
EAGAAEKTSG

SEQ ID NO: 15059 - protein, 10 aa, Artificial Sequence
  Description of Artificial Sequence: Synthetic epitope
EAGAQMSRHP

SEQ ID NO: 15060 - protein, 10 aa, Artificial Sequence
  Description of Artificial Sequence: Synthetic epitope
EAGERIDASQ

SEQ ID NO: 15061 - protein, 10 aa, Artificial Sequence
  Description of Artificial Sequence: Synthetic epitope
EAGKESEMTD

SEQ ID NO: 15062 - protein, 10 aa, Artificial Sequence
  Description of Artificial Sequence: Synthetic epitope
EAGLAYQKEA

SEQ ID NO: 15063 - protein, 10 aa, Artificial Sequence
  Description of Artificial Sequence: Synthetic epitope
EAGSAVEAEE

SEQ ID NO: 15064 - protein, 10 aa, Artificial Sequence
  Description of Artificial Sequence: Synthetic epitope
EAGTLKHEEK

SEQ ID NO: 15065 - protein, 10 aa, Artificial Sequence
  Description of Artificial Sequence: Synthetic epitope
EAGTVATLAP

SEQ ID NO: 15066 - protein, 10 aa, Artificial Sequence
  Description of Artificial Sequence: Synthetic epitope
EAGVLKMTLR

SEQ ID NO: 15067 - protein, 10 aa, Artificial Sequence
  Description of Artificial Sequence: Synthetic epitope
EAHLKKSAKT

SEQ ID NO: 15068 - protein, 10 aa, Artificial Sequence
  Description of Artificial Sequence: Synthetic epitope
EAHQSELLVQ

SEQ ID NO: 15069 - protein, 10 aa, Artificial Sequence
  Description of Artificial Sequence: Synthetic epitope
EAIEALPLAN

SEQ ID NO: 15070 - protein, 10 aa, Artificial Sequence
  Description of Artificial Sequence: Synthetic epitope
EAIEAVSGVD

SEQ ID NO: 15071 - protein, 10 aa, Artificial Sequence
  Description of Artificial Sequence: Synthetic epitope
EAIEEVKTRT

SEQ ID NO: 15072 - protein, 10 aa, Artificial Sequence
  Description of Artificial Sequence: Synthetic epitope
EAIERIHKTL

SEQ ID NO: 15073 - protein, 10 aa, Artificial Sequence
  Description of Artificial Sequence: Synthetic epitope
EAIKATRPIA

SEQ ID NO: 15074 - protein, 10 aa, Artificial Sequence
  Description of Artificial Sequence: Synthetic epitope
EAIKNAIANA

SEQ ID NO: 15075 - protein, 10 aa, Artificial Sequence
  Description of Artificial Sequence: Synthetic epitope
EAILAAVPAR

SEQ ID NO: 15076 - protein, 10 aa, Artificial Sequence
  Description of Artificial Sequence: Synthetic epitope
EAIMKVGQMQ

SEQ ID NO: 15077 - protein, 10 aa, Artificial Sequence
  Description of Artificial Sequence: Synthetic epitope
EAIQHPADEK

SEQ ID NO: 15078 - protein, 10 aa, Artificial Sequence
  Description of Artificial Sequence: Synthetic epitope
EAIQNKEQEV

SEQ ID NO: 15079 - protein, 10 aa, Artificial Sequence
  Description of Artificial Sequence: Synthetic epitope
EAIRQEREQQ

SEQ ID NO: 15080 - protein, 10 aa, Artificial Sequence
  Description of Artificial Sequence: Synthetic epitope
EAIRSRTQEA

SEQ ID NO: 15081 - protein, 10 aa, Artificial Sequence
  Description of Artificial Sequence: Synthetic epitope
EAIRSSGQPE

SEQ ID NO: 15082 - protein, 10 aa, Artificial Sequence
  Description of Artificial Sequence: Synthetic epitope
EAISSVQNSS

SEQ ID NO: 15083 - protein, 10 aa, Artificial Sequence
  Description of Artificial Sequence: Synthetic epitope
EAKASRPDAT

SEQ ID NO: 15084 - protein, 10 aa, Artificial Sequence
  Description of Artificial Sequence: Synthetic epitope
EAKAVVEETR

SEQ ID NO: 15085 - protein, 10 aa, Artificial Sequence
  Description of Artificial Sequence: Synthetic epitope
EAKFIIQMEK

SEQ ID NO: 15086 - protein, 10 aa, Artificial Sequence
  Description of Artificial Sequence: Synthetic epitope
EAKFSAQKEL

SEQ ID NO: 15087 - protein, 10 aa, Artificial Sequence
  Description of Artificial Sequence: Synthetic epitope
EAKGIFSQAD

SEQ ID NO: 15088 - protein, 10 aa, Artificial Sequence
  Description of Artificial Sequence: Synthetic epitope
EAKGTLNGEK

SEQ ID NO: 15089 - protein, 10 aa, Artificial Sequence
  Description of Artificial Sequence: Synthetic epitope
EAKIAEKTAA

SEQ ID NO: 15090 - protein, 10 aa, Artificial Sequence
  Description of Artificial Sequence: Synthetic epitope
EAKIKVEELQ

SEQ ID NO: 15091 - protein, 10 aa, Artificial Sequence
  Description of Artificial Sequence: Synthetic epitope
EAKITEAPAS

SEQ ID NO: 15092 - protein, 10 aa, Artificial Sequence
  Description of Artificial Sequence: Synthetic epitope
EAKLKAMASE

SEQ ID NO: 15093 - protein, 10 aa, Artificial Sequence
  Description of Artificial Sequence: Synthetic epitope
EAKLQALEAT

SEQ ID NO: 15094 - protein, 10 aa, Artificial Sequence
  Description of Artificial Sequence: Synthetic epitope
EAKMYVQPFR

SEQ ID NO: 15095 - protein, 10 aa, Artificial Sequence
  Description of Artificial Sequence: Synthetic epitope
EAKNASLASS

SEQ ID NO: 15096 - protein, 10 aa, Artificial Sequence
  Description of Artificial Sequence: Synthetic epitope
EAKQEKEEAD

SEQ ID NO: 15097 - protein, 10 aa, Artificial Sequence
  Description of Artificial Sequence: Synthetic epitope
EAKQEKSMYG

SEQ ID NO: 15098 - protein, 10 aa, Artificial Sequence
  Description of Artificial Sequence: Synthetic epitope
EAKQQKLEAE

SEQ ID NO: 15099 - protein, 10 aa, Artificial Sequence
  Description of Artificial Sequence: Synthetic epitope
EAKQQKLEAE

SEQ ID NO: 15100 - protein, 10 aa, Artificial Sequence
  Description of Artificial Sequence: Synthetic epitope
EAKTALDADD

SEQ ID NO: 15101 - protein, 10 aa, Artificial Sequence
  Description of Artificial Sequence: Synthetic epitope
EALAAEASKD

SEQ ID NO: 15102 - protein, 10 aa, Artificial Sequence
  Description of Artificial Sequence: Synthetic epitope
EALAANHQQL

SEQ ID NO: 15103 - protein, 10 aa, Artificial Sequence
  Description of Artificial Sequence: Synthetic epitope
EALATKLNKE

SEQ ID NO: 15104 - protein, 10 aa, Artificial Sequence
  Description of Artificial Sequence: Synthetic epitope
EALAVEETLS

SEQ ID NO: 15105 - protein, 10 aa, Artificial Sequence
  Description of Artificial Sequence: Synthetic epitope
EALEKASKQL

SEQ ID NO: 15106 - protein, 10 aa, Artificial Sequence
  Description of Artificial Sequence: Synthetic epitope
EALEVDDISP

SEQ ID NO: 15107 - protein, 10 aa, Artificial Sequence
  Description of Artificial Sequence: Synthetic epitope
EALFSEKSVG

SEQ ID NO: 15108 - protein, 10 aa, Artificial Sequence
  Description of Artificial Sequence: Synthetic epitope
EALGDSKSKK

SEQ ID NO: 15109 - protein, 10 aa, Artificial Sequence
  Description of Artificial Sequence: Synthetic epitope
EALIKSLKVL

SEQ ID NO: 15110 - protein, 10 aa, Artificial Sequence
  Description of Artificial Sequence: Synthetic epitope
EALISTLKVE

SEQ ID NO: 15111 - protein, 10 aa, Artificial Sequence
  Description of Artificial Sequence: Synthetic epitope
EALKSFSKSD

SEQ ID NO: 15112 - protein, 10 aa, Artificial Sequence
  Description of Artificial Sequence: Synthetic epitope
EALKSGIQGK

SEQ ID NO: 15113 - protein, 10 aa, Artificial Sequence
  Description of Artificial Sequence: Synthetic epitope
EALKVGEIGK

SEQ ID NO: 15114 - protein, 10 aa, Artificial Sequence
  Description of Artificial Sequence: Synthetic epitope
EALKVRVLRP

SEQ ID NO: 15115 - protein, 10 aa, Artificial Sequence
  Description of Artificial Sequence: Synthetic epitope
EALLAQAALL

SEQ ID NO: 15116 - protein, 10 aa, Artificial Sequence
  Description of Artificial Sequence: Synthetic epitope
EALLEAEKQM

SEQ ID NO: 15117 - protein, 10 aa, Artificial Sequence
  Description of Artificial Sequence: Synthetic epitope
EALLEAKTNE

SEQ ID NO: 15118 - protein, 10 aa, Artificial Sequence
  Description of Artificial Sequence: Synthetic epitope
EALLKALKSE

SEQ ID NO: 15119 - protein, 10 aa, Artificial Sequence
  Description of Artificial Sequence: Synthetic epitope
EALLNTSTME

SEQ ID NO: 15120 - protein, 10 aa, Artificial Sequence
  Description of Artificial Sequence: Synthetic epitope
EALLQAIKAR

SEQ ID NO: 15121 - protein, 10 aa, Artificial Sequence
  Description of Artificial Sequence: Synthetic epitope
EALMGLEAEK

SEQ ID NO: 15122 - protein, 10 aa, Artificial Sequence
  Description of Artificial Sequence: Synthetic epitope
EALNSAISHT

SEQ ID NO: 15123 - protein, 10 aa, Artificial Sequence
  Description of Artificial Sequence: Synthetic epitope
EALQKAQTQE

SEQ ID NO: 15124 - protein, 10 aa, Artificial Sequence
  Description of Artificial Sequence: Synthetic epitope
EALQLMVSSE

SEQ ID NO: 15125 - protein, 10 aa, Artificial Sequence
  Description of Artificial Sequence: Synthetic epitope
EALQRDAFQA

SEQ ID NO: 15126 - protein, 10 aa, Artificial Sequence
  Description of Artificial Sequence: Synthetic epitope
EALRAATSLE

SEQ ID NO: 15127 - protein, 10 aa, Artificial Sequence
  Description of Artificial Sequence: Synthetic epitope
EALRATSAEH

SEQ ID NO: 15128 - protein, 10 aa, Artificial Sequence
  Description of Artificial Sequence: Synthetic epitope
EALRSESPYQ

SEQ ID NO: 15129 - protein, 10 aa, Artificial Sequence
  Description of Artificial Sequence: Synthetic epitope
EALSELATAV

SEQ ID NO: 15130 - protein, 10 aa, Artificial Sequence
  Description of Artificial Sequence: Synthetic epitope
EALSLEASQA

SEQ ID NO: 15131 - protein, 10 aa, Artificial Sequence
  Description of Artificial Sequence: Synthetic epitope
EALSQAVARY

SEQ ID NO: 15132 - protein, 10 aa, Artificial Sequence
  Description of Artificial Sequence: Synthetic epitope
EALTSSTAMQ

SEQ ID NO: 15133 - protein, 10 aa, Artificial Sequence
  Description of Artificial Sequence: Synthetic epitope
EALVANVKQR

SEQ ID NO: 15134 - protein, 10 aa, Artificial Sequence
  Description of Artificial Sequence: Synthetic epitope
EALVGLKDSS

SEQ ID NO: 15135 - protein, 10 aa, Artificial Sequence
  Description of Artificial Sequence: Synthetic epitope
EALVTEAENM

SEQ ID NO: 15136 - protein, 10 aa, Artificial Sequence
  Description of Artificial Sequence: Synthetic epitope
EALYTETRLQ

SEQ ID NO: 15137 - protein, 10 aa, Artificial Sequence
  Description of Artificial Sequence: Synthetic epitope
EAMAKEPMAR

SEQ ID NO: 15138 - protein, 10 aa, Artificial Sequence
  Description of Artificial Sequence: Synthetic epitope
EAMALKSTID

SEQ ID NO: 15139 - protein, 10 aa, Artificial Sequence
  Description of Artificial Sequence: Synthetic epitope
EAMALLDEVI

SEQ ID NO: 15140 - protein, 10 aa, Artificial Sequence
  Description of Artificial Sequence: Synthetic epitope
EAMAPVVNSA

SEQ ID NO: 15141 - protein, 10 aa, Artificial Sequence
  Description of Artificial Sequence: Synthetic epitope
EAMEALNREQ

SEQ ID NO: 15142 - protein, 10 aa, Artificial Sequence
  Description of Artificial Sequence: Synthetic epitope
EAMNVGPPEQ

SEQ ID NO: 15143 - protein, 10 aa, Artificial Sequence
  Description of Artificial Sequence: Synthetic epitope
EAMRAMSDEF

SEQ ID NO: 15144 - protein, 10 aa, Artificial Sequence
  Description of Artificial Sequence: Synthetic epitope
EAMSAIVGYP

SEQ ID NO: 15145 - protein, 10 aa, Artificial Sequence
  Description of Artificial Sequence: Synthetic epitope
EAMSVRSKAL

SEQ ID NO: 15146 - protein, 10 aa, Artificial Sequence
  Description of Artificial Sequence: Synthetic epitope
EAMTAVDTEA

SEQ ID NO: 15147 - protein, 10 aa, Artificial Sequence
  Description of Artificial Sequence: Synthetic epitope
EAMVSKIEKM

SEQ ID NO: 15148 - protein, 10 aa, Artificial Sequence
  Description of Artificial Sequence: Synthetic epitope
EANARRQAGT

SEQ ID NO: 15149 - protein, 10 aa, Artificial Sequence
  Description of Artificial Sequence: Synthetic epitope
EANFSASRAA

SEQ ID NO: 15150 - protein, 10 aa, Artificial Sequence
  Description of Artificial Sequence: Synthetic epitope
EANITEQTLA

SEQ ID NO: 15151 - protein, 10 aa, Artificial Sequence
  Description of Artificial Sequence: Synthetic epitope
EANLAASFGK

SEQ ID NO: 15152 - protein, 10 aa, Artificial Sequence
  Description of Artificial Sequence: Synthetic epitope
EANNLSFPLE

SEQ ID NO: 15153 - protein, 10 aa, Artificial Sequence
  Description of Artificial Sequence: Synthetic epitope
EANPTARRTQ

SEQ ID NO: 15154 - protein, 10 aa, Artificial Sequence
  Description of Artificial Sequence: Synthetic epitope
EANQAAKEDT

SEQ ID NO: 15155 - protein, 10 aa, Artificial Sequence
  Description of Artificial Sequence: Synthetic epitope
EANQGFPAVQ

SEQ ID NO: 15156 - protein, 10 aa, Artificial Sequence
  Description of Artificial Sequence: Synthetic epitope
EANSTTSQKQ

SEQ ID NO: 15157 - protein, 10 aa, Artificial Sequence
  Description of Artificial Sequence: Synthetic epitope
EANTRRISIV

SEQ ID NO: 15158 - protein, 10 aa, Artificial Sequence
  Description of Artificial Sequence: Synthetic epitope
EAPALATKQT

SEQ ID NO: 15159 - protein, 10 aa, Artificial Sequence
  Description of Artificial Sequence: Synthetic epitope
EAPAMAGAPK

SEQ ID NO: 15160 - protein, 10 aa, Artificial Sequence
  Description of Artificial Sequence: Synthetic epitope
EAPGASAEEI

SEQ ID NO: 15161 - protein, 10 aa, Artificial Sequence
  Description of Artificial Sequence: Synthetic epitope
EAPINYTNVA

SEQ ID NO: 15162 - protein, 10 aa, Artificial Sequence
  Description of Artificial Sequence: Synthetic epitope
EAPKKLSLSF

SEQ ID NO: 15163 - protein, 10 aa, Artificial Sequence
  Description of Artificial Sequence: Synthetic epitope
EAPRSSVTET

SEQ ID NO: 15164 - protein, 10 aa, Artificial Sequence
  Description of Artificial Sequence: Synthetic epitope
EAPSKSLKKR

SEQ ID NO: 15165 - protein, 10 aa, Artificial Sequence
  Description of Artificial Sequence: Synthetic epitope
EAPTYVNTQQ

SEQ ID NO: 15166 - protein, 10 aa, Artificial Sequence
  Description of Artificial Sequence: Synthetic epitope
EAQAEAGREA

SEQ ID NO: 15167 - protein, 10 aa, Artificial Sequence
  Description of Artificial Sequence: Synthetic epitope
EAQALKLVEG

SEQ ID NO: 15168 - protein, 10 aa, Artificial Sequence
  Description of Artificial Sequence: Synthetic epitope
EAQESSTTDE

SEQ ID NO: 15169 - protein, 10 aa, Artificial Sequence
  Description of Artificial Sequence: Synthetic epitope
EAQGALANIA

SEQ ID NO: 15170 - protein, 10 aa, Artificial Sequence
  Description of Artificial Sequence: Synthetic epitope
EAQGEAQKPQ

SEQ ID NO: 15171 - protein, 10 aa, Artificial Sequence
  Description of Artificial Sequence: Synthetic epitope
EAQGEDNMET

SEQ ID NO: 15172 - protein, 10 aa, Artificial Sequence
  Description of Artificial Sequence: Synthetic epitope
EAQITALKQE

SEQ ID NO: 15173 - protein, 10 aa, Artificial Sequence
  Description of Artificial Sequence: Synthetic epitope
EAQITTWSTG

SEQ ID NO: 15174 - protein, 10 aa, Artificial Sequence
  Description of Artificial Sequence: Synthetic epitope
EAQKAAHKRK

SEQ ID NO: 15175 - protein, 10 aa, Artificial Sequence
  Description of Artificial Sequence: Synthetic epitope
EAQKSAVPGD

SEQ ID NO: 15176 - protein, 10 aa, Artificial Sequence
  Description of Artificial Sequence: Synthetic epitope
EAQLARQKEE

SEQ ID NO: 15177 - protein, 10 aa, Artificial Sequence
  Description of Artificial Sequence: Synthetic epitope
EAQLLSLSKE

SEQ ID NO: 15178 - protein, 10 aa, Artificial Sequence
  Description of Artificial Sequence: Synthetic epitope
EAQLSLAIPE

SEQ ID NO: 15179 - protein, 10 aa, Artificial Sequence
  Description of Artificial Sequence: Synthetic epitope
EAQMQSEALS

SEQ ID NO: 15180 - protein, 10 aa, Artificial Sequence
  Description of Artificial Sequence: Synthetic epitope
EAQRDAVEQM

SEQ ID NO: 15181 - protein, 10 aa, Artificial Sequence
  Description of Artificial Sequence: Synthetic epitope
EAQRGNKDAA

SEQ ID NO: 15182 - protein, 10 aa, Artificial Sequence
  Description of Artificial Sequence: Synthetic epitope
EAQRSQAVQD

SEQ ID NO: 15183 - protein, 10 aa, Artificial Sequence
  Description of Artificial Sequence: Synthetic epitope
EAQVDAEAQR

SEQ ID NO: 15184 - protein, 10 aa, Artificial Sequence
  Description of Artificial Sequence: Synthetic epitope
EAQVLASQMR

SEQ ID NO: 15185 - protein, 10 aa, Artificial Sequence
  Description of Artificial Sequence: Synthetic epitope
EAQVSAARVA

SEQ ID NO: 15186 - protein, 10 aa, Artificial Sequence
  Description of Artificial Sequence: Synthetic epitope
EARAEARAQM

SEQ ID NO: 15187 - protein, 10 aa, Artificial Sequence
  Description of Artificial Sequence: Synthetic epitope
EARAGNAHDE

SEQ ID NO: 15188 - protein, 10 aa, Artificial Sequence
  Description of Artificial Sequence: Synthetic epitope
EARANLRLTL

SEQ ID NO: 15189 - protein, 10 aa, Artificial Sequence
  Description of Artificial Sequence: Synthetic epitope
EARKKASVEA

SEQ ID NO: 15190 - protein, 10 aa, Artificial Sequence
  Description of Artificial Sequence: Synthetic epitope
EARPLIKVKQ

SEQ ID NO: 15191 - protein, 10 aa, Artificial Sequence
  Description of Artificial Sequence: Synthetic epitope
EARQEKEAMV

SEQ ID NO: 15192 - protein, 10 aa, Artificial Sequence
  Description of Artificial Sequence: Synthetic epitope
EARRQQASPT

SEQ ID NO: 15193 - protein, 10 aa, Artificial Sequence
  Description of Artificial Sequence: Synthetic epitope
EARVPWSIMG

SEQ ID NO: 15194 - protein, 10 aa, Artificial Sequence
  Description of Artificial Sequence: Synthetic epitope
EARVRDIAIA

SEQ ID NO: 15195 - protein, 10 aa, Artificial Sequence
  Description of Artificial Sequence: Synthetic epitope
EARWNHELAG

SEQ ID NO: 15196 - protein, 10 aa, Artificial Sequence
  Description of Artificial Sequence: Synthetic epitope
EARYQESQAG

SEQ ID NO: 15197 - protein, 10 aa, Artificial Sequence
  Description of Artificial Sequence: Synthetic epitope
EASAAGGAQG

SEQ ID NO: 15198 - protein, 10 aa, Artificial Sequence
  Description of Artificial Sequence: Synthetic epitope
EASAARETDA

SEQ ID NO: 15199 - protein, 10 aa, Artificial Sequence
  Description of Artificial Sequence: Synthetic epitope
EASAAVRSGA

SEQ ID NO: 15200 - protein, 10 aa, Artificial Sequence
  Description of Artificial Sequence: Synthetic epitope
EASAELAKAS

SEQ ID NO: 15201 - protein, 10 aa, Artificial Sequence
  Description of Artificial Sequence: Synthetic epitope
EASAIAGVRA

SEQ ID NO: 15202 - protein, 10 aa, Artificial Sequence
  Description of Artificial Sequence: Synthetic epitope
EASAKEHEAE

SEQ ID NO: 15203 - protein, 10 aa, Artificial Sequence
  Description of Artificial Sequence: Synthetic epitope
EASASASKDA

SEQ ID NO: 15204 - protein, 10 aa, Artificial Sequence
  Description of Artificial Sequence: Synthetic epitope
EASDVISPAS

SEQ ID NO: 15205 - protein, 10 aa, Artificial Sequence
  Description of Artificial Sequence: Synthetic epitope
EASEVMLSTR

SEQ ID NO: 15206 - protein, 10 aa, Artificial Sequence
  Description of Artificial Sequence: Synthetic epitope
EASIGTADSS

SEQ ID NO: 15207 - protein, 10 aa, Artificial Sequence
  Description of Artificial Sequence: Synthetic epitope
EASLAAVKSG

SEQ ID NO: 15208 - protein, 10 aa, Artificial Sequence
  Description of Artificial Sequence: Synthetic epitope
EASLDKADSE

SEQ ID NO: 15209 - protein, 10 aa, Artificial Sequence
  Description of Artificial Sequence: Synthetic epitope
EASLELRGLA

SEQ ID NO: 15210 - protein, 10 aa, Artificial Sequence
  Description of Artificial Sequence: Synthetic epitope
EASLSKLSPT

SEQ ID NO: 15211 - protein, 10 aa, Artificial Sequence
  Description of Artificial Sequence: Synthetic epitope
EASPQASSAE

SEQ ID NO: 15212 - protein, 10 aa, Artificial Sequence
  Description of Artificial Sequence: Synthetic epitope
EASPYVRSRE

SEQ ID NO: 15213 - protein, 10 aa, Artificial Sequence
  Description of Artificial Sequence: Synthetic epitope
EASQQEKLAK

SEQ ID NO: 15214 - protein, 10 aa, Artificial Sequence
  Description of Artificial Sequence: Synthetic epitope
EASQQLLNEM

SEQ ID NO: 15215 - protein, 10 aa, Artificial Sequence
  Description of Artificial Sequence: Synthetic epitope
EASQTETVSE

SEQ ID NO: 15216 - protein, 10 aa, Artificial Sequence
  Description of Artificial Sequence: Synthetic epitope
EASRAFEVSE

SEQ ID NO: 15217 - protein, 10 aa, Artificial Sequence
  Description of Artificial Sequence: Synthetic epitope
EASSAESVSQ

SEQ ID NO: 15218 - protein, 10 aa, Artificial Sequence
  Description of Artificial Sequence: Synthetic epitope
EASSKIQREP

SEQ ID NO: 15219 - protein, 10 aa, Artificial Sequence
  Description of Artificial Sequence: Synthetic epitope
EASSPQETVI

SEQ ID NO: 15220 - protein, 10 aa, Artificial Sequence
  Description of Artificial Sequence: Synthetic epitope
EASSTSQAVE

SEQ ID NO: 15221 - protein, 10 aa, Artificial Sequence
  Description of Artificial Sequence: Synthetic epitope
EASSYESNYS

SEQ ID NO: 15222 - protein, 10 aa, Artificial Sequence
  Description of Artificial Sequence: Synthetic epitope
EASTMQLLQQ

SEQ ID NO: 15223 - protein, 10 aa, Artificial Sequence
  Description of Artificial Sequence: Synthetic epitope
EASVKQEVLI

SEQ ID NO: 15224 - protein, 10 aa, Artificial Sequence
  Description of Artificial Sequence: Synthetic epitope
EATAASTSRS

SEQ ID NO: 15225 - protein, 10 aa, Artificial Sequence
  Description of Artificial Sequence: Synthetic epitope
EATAKVKAEE

SEQ ID NO: 15226 - protein, 10 aa, Artificial Sequence
  Description of Artificial Sequence: Synthetic epitope
EATAKYLDDR

SEQ ID NO: 15227 - protein, 10 aa, Artificial Sequence
  Description of Artificial Sequence: Synthetic epitope
EATATSTSPS

SEQ ID NO: 15228 - protein, 10 aa, Artificial Sequence
  Description of Artificial Sequence: Synthetic epitope
EATESFLSKE

SEQ ID NO: 15229 - protein, 10 aa, Artificial Sequence
  Description of Artificial Sequence: Synthetic epitope
EATKKAESSR

SEQ ID NO: 15230 - protein, 10 aa, Artificial Sequence
  Description of Artificial Sequence: Synthetic epitope
EATKQYALGR

SEQ ID NO: 15231 - protein, 10 aa, Artificial Sequence
  Description of Artificial Sequence: Synthetic epitope
EATKTTVAEI

SEQ ID NO: 15232 - protein, 10 aa, Artificial Sequence
  Description of Artificial Sequence: Synthetic epitope
EATNSLITAP

SEQ ID NO: 15233 - protein, 10 aa, Artificial Sequence
  Description of Artificial Sequence: Synthetic epitope
EATNTTSEPS

SEQ ID NO: 15234 - protein, 10 aa, Artificial Sequence
  Description of Artificial Sequence: Synthetic epitope
EATPMLKTLS

SEQ ID NO: 15235 - protein, 10 aa, Artificial Sequence
  Description of Artificial Sequence: Synthetic epitope
EATPMLKTLS

SEQ ID NO: 15236 - protein, 10 aa, Artificial Sequence
  Description of Artificial Sequence: Synthetic epitope
EATQAGQRLL

SEQ ID NO: 15237 - protein, 10 aa, Artificial Sequence
  Description of Artificial Sequence: Synthetic epitope
EATRNPIAEV

SEQ ID NO: 15238 - protein, 10 aa, Artificial Sequence
  Description of Artificial Sequence: Synthetic epitope
EATSKKSAKR

SEQ ID NO: 15239 - protein, 10 aa, Artificial Sequence
  Description of Artificial Sequence: Synthetic epitope
EATSNVLGGM

SEQ ID NO: 15240 - protein, 10 aa, Artificial Sequence
  Description of Artificial Sequence: Synthetic epitope
EATSVTLVEE

SEQ ID NO: 15241 - protein, 10 aa, Artificial Sequence
  Description of Artificial Sequence: Synthetic epitope
EATTLGALEF

SEQ ID NO: 15242 - protein, 10 aa, Artificial Sequence
  Description of Artificial Sequence: Synthetic epitope
EATTSLGARS

SEQ ID NO: 15243 - protein, 10 aa, Artificial Sequence
  Description of Artificial Sequence: Synthetic epitope
EATTVKRKAS

SEQ ID NO: 15244 - protein, 10 aa, Artificial Sequence
  Description of Artificial Sequence: Synthetic epitope
EATVLTSSNY

SEQ ID NO: 15245 - protein, 10 aa, Artificial Sequence
  Description of Artificial Sequence: Synthetic epitope
EAVAAQGKAK

SEQ ID NO: 15246 - protein, 10 aa, Artificial Sequence
  Description of Artificial Sequence: Synthetic epitope
EAVAAQGKAK

SEQ ID NO: 15247 - protein, 10 aa, Artificial Sequence
  Description of Artificial Sequence: Synthetic epitope
EAVATRFKEQ

SEQ ID NO: 15248 - protein, 10 aa, Artificial Sequence
  Description of Artificial Sequence: Synthetic epitope
EAVDKNIFRD

SEQ ID NO: 15249 - protein, 10 aa, Artificial Sequence
  Description of Artificial Sequence: Synthetic epitope
EAVDVGLVNE

SEQ ID NO: 15250 - protein, 10 aa, Artificial Sequence
  Description of Artificial Sequence: Synthetic epitope
EAVESPESLA

SEQ ID NO: 15251 - protein, 10 aa, Artificial Sequence
  Description of Artificial Sequence: Synthetic epitope
EAVFNRIVQK

SEQ ID NO: 15252 - protein, 10 aa, Artificial Sequence
  Description of Artificial Sequence: Synthetic epitope
EAVINKLTDA

SEQ ID NO: 15253 - protein, 10 aa, Artificial Sequence
  Description of Artificial Sequence: Synthetic epitope
EAVKAQFKIN

SEQ ID NO: 15254 - protein, 10 aa, Artificial Sequence
  Description of Artificial Sequence: Synthetic epitope
EAVKLQMEPK

SEQ ID NO: 15255 - protein, 10 aa, Artificial Sequence
  Description of Artificial Sequence: Synthetic epitope
EAVKMELPII

SEQ ID NO: 15256 - protein, 10 aa, Artificial Sequence
  Description of Artificial Sequence: Synthetic epitope
EAVKQQAPIL

SEQ ID NO: 15257 - protein, 10 aa, Artificial Sequence
  Description of Artificial Sequence: Synthetic epitope
EAVLLGIEQQ

SEQ ID NO: 15258 - protein, 10 aa, Artificial Sequence
  Description of Artificial Sequence: Synthetic epitope
EAVMKNKEKP

SEQ ID NO: 15259 - protein, 10 aa, Artificial Sequence
  Description of Artificial Sequence: Synthetic epitope
EAVMKSLTQT

SEQ ID NO: 15260 - protein, 10 aa, Artificial Sequence
  Description of Artificial Sequence: Synthetic epitope
EAVMNVKKQT

SEQ ID NO: 15261 - protein, 10 aa, Artificial Sequence
  Description of Artificial Sequence: Synthetic epitope
EAVNADTDKI

SEQ ID NO: 15262 - protein, 10 aa, Artificial Sequence
  Description of Artificial Sequence: Synthetic epitope
EAVNKVIKSY

SEQ ID NO: 15263 - protein, 10 aa, Artificial Sequence
  Description of Artificial Sequence: Synthetic epitope
EAVNTYEGTH

SEQ ID NO: 15264 - protein, 10 aa, Artificial Sequence
  Description of Artificial Sequence: Synthetic epitope
EAVRESSRII

SEQ ID NO: 15265 - protein, 10 aa, Artificial Sequence
  Description of Artificial Sequence: Synthetic epitope
EAVSSNVIDY

SEQ ID NO: 15266 - protein, 10 aa, Artificial Sequence
  Description of Artificial Sequence: Synthetic epitope
EAVSTQMEKW

SEQ ID NO: 15267 - protein, 10 aa, Artificial Sequence
  Description of Artificial Sequence: Synthetic epitope
EAVTPLTKAA

SEQ ID NO: 15268 - protein, 10 aa, Artificial Sequence
  Description of Artificial Sequence: Synthetic epitope
EAWKRGTQLE

SEQ ID NO: 15269 - protein, 10 aa, Artificial Sequence
  Description of Artificial Sequence: Synthetic epitope
EAWVTSTGLQ

SEQ ID NO: 15270 - protein, 10 aa, Artificial Sequence
  Description of Artificial Sequence: Synthetic epitope
EAYATKARAH

SEQ ID NO: 15271 - protein, 10 aa, Artificial Sequence
  Description of Artificial Sequence: Synthetic epitope
EAYLARVKAL

SEQ ID NO: 15272 - protein, 10 aa, Artificial Sequence
  Description of Artificial Sequence: Synthetic epitope
EAYSQSDEQY

SEQ ID NO: 15273 - protein, 10 aa, Artificial Sequence
  Description of Artificial Sequence: Synthetic epitope
EAYVQSVRSR

SEQ ID NO: 15274 - protein, 10 aa, Artificial Sequence
  Description of Artificial Sequence: Synthetic epitope
EDAASESSRE

SEQ ID NO: 15275 - protein, 10 aa, Artificial Sequence
  Description of Artificial Sequence: Synthetic epitope
EDAEDSSANI

SEQ ID NO: 15276 - protein, 10 aa, Artificial Sequence
  Description of Artificial Sequence: Synthetic epitope
EDAITVVSVM

SEQ ID NO: 15277 - protein, 10 aa, Artificial Sequence
  Description of Artificial Sequence: Synthetic epitope
EDALKLVQLK

SEQ ID NO: 15278 - protein, 10 aa, Artificial Sequence
  Description of Artificial Sequence: Synthetic epitope
EDASGSASGN

SEQ ID NO: 15279 - protein, 10 aa, Artificial Sequence
  Description of Artificial Sequence: Synthetic epitope
EDASQLIFPK

SEQ ID NO: 15280 - protein, 10 aa, Artificial Sequence
  Description of Artificial Sequence: Synthetic epitope
EDASSDSTGA

SEQ ID NO: 15281 - protein, 10 aa, Artificial Sequence
  Description of Artificial Sequence: Synthetic epitope
EDAVATSGVS

SEQ ID NO: 15282 - protein, 10 aa, Artificial Sequence
  Description of Artificial Sequence: Synthetic epitope
EDAVKVGLVG

SEQ ID NO: 15283 - protein, 10 aa, Artificial Sequence
  Description of Artificial Sequence: Synthetic epitope
EDDERSTDSS

SEQ ID NO: 15284 - protein, 10 aa, Artificial Sequence
  Description of Artificial Sequence: Synthetic epitope
EDDHERAVSV

SEQ ID NO: 15285 - protein, 10 aa, Artificial Sequence
  Description of Artificial Sequence: Synthetic epitope
EDDISMKVIP

SEQ ID NO: 15286 - protein, 10 aa, Artificial Sequence
  Description of Artificial Sequence: Synthetic epitope
EDDKEKKELG

SEQ ID NO: 15287 - protein, 10 aa, Artificial Sequence
  Description of Artificial Sequence: Synthetic epitope
EDDKMDITKE

SEQ ID NO: 15288 - protein, 10 aa, Artificial Sequence
  Description of Artificial Sequence: Synthetic epitope
EDDKVSEKLE

SEQ ID NO: 15289 - protein, 10 aa, Artificial Sequence
  Description of Artificial Sequence: Synthetic epitope
EDDMEISKKI

SEQ ID NO: 15290 - protein, 10 aa, Artificial Sequence
  Description of Artificial Sequence: Synthetic epitope
EDDMSSQASK

SEQ ID NO: 15291 - protein, 10 aa, Artificial Sequence
  Description of Artificial Sequence: Synthetic epitope
EDDNAGTEMK

SEQ ID NO: 15292 - protein, 10 aa, Artificial Sequence
  Description of Artificial Sequence: Synthetic epitope
EDEEAIQQYG

SEQ ID NO: 15293 - protein, 10 aa, Artificial Sequence
  Description of Artificial Sequence: Synthetic epitope
EDEEARAKSE

SEQ ID NO: 15294 - protein, 10 aa, Artificial Sequence
  Description of Artificial Sequence: Synthetic epitope
EDEENRSESD

SEQ ID NO: 15295 - protein, 10 aa, Artificial Sequence
  Description of Artificial Sequence: Synthetic epitope
EDEGDLDTNS

SEQ ID NO: 15296 - protein, 10 aa, Artificial Sequence
  Description of Artificial Sequence: Synthetic epitope
EDEGRSKARR

SEQ ID NO: 15297 - protein, 10 aa, Artificial Sequence
  Description of Artificial Sequence: Synthetic epitope
EDEISDSKAQ

SEQ ID NO: 15298 - protein, 10 aa, Artificial Sequence
  Description of Artificial Sequence: Synthetic epitope
EDEKVTMFLQ

SEQ ID NO: 15299 - protein, 10 aa, Artificial Sequence
  Description of Artificial Sequence: Synthetic epitope
EDEMEVEDQD

SEQ ID NO: 15300 - protein, 10 aa, Artificial Sequence
  Description of Artificial Sequence: Synthetic epitope
EDENKAAVRI

SEQ ID NO: 15301 - protein, 10 aa, Artificial Sequence
  Description of Artificial Sequence: Synthetic epitope
EDENVKKPKH

SEQ ID NO: 15302 - protein, 10 aa, Artificial Sequence
  Description of Artificial Sequence: Synthetic epitope
EDERERREKK

SEQ ID NO: 15303 - protein, 10 aa, Artificial Sequence
  Description of Artificial Sequence: Synthetic epitope
EDESELELSH

SEQ ID NO: 15304 - protein, 10 aa, Artificial Sequence
  Description of Artificial Sequence: Synthetic epitope
EDEVSIKEAA

SEQ ID NO: 15305 - protein, 10 aa, Artificial Sequence
  Description of Artificial Sequence: Synthetic epitope
EDEWQKEWNE

SEQ ID NO: 15306 - protein, 10 aa, Artificial Sequence
  Description of Artificial Sequence: Synthetic epitope
EDFAIVASDT

SEQ ID NO: 15307 - protein, 10 aa, Artificial Sequence
  Description of Artificial Sequence: Synthetic epitope
EDFEQSKSQA

SEQ ID NO: 15308 - protein, 10 aa, Artificial Sequence
  Description of Artificial Sequence: Synthetic epitope
EDFVAALTVK

SEQ ID NO: 15309 - protein, 10 aa, Artificial Sequence
  Description of Artificial Sequence: Synthetic epitope
EDGDLSKSTV

SEQ ID NO: 15310 - protein, 10 aa, Artificial Sequence
  Description of Artificial Sequence: Synthetic epitope
EDGKVSSDSV

SEQ ID NO: 15311 - protein, 10 aa, Artificial Sequence
  Description of Artificial Sequence: Synthetic epitope
EDGSESEESA

SEQ ID NO: 15312 - protein, 10 aa, Artificial Sequence
  Description of Artificial Sequence: Synthetic epitope
EDGTQKVQNN

SEQ ID NO: 15313 - protein, 10 aa, Artificial Sequence
  Description of Artificial Sequence: Synthetic epitope
EDHAALVNQE

SEQ ID NO: 15314 - protein, 10 aa, Artificial Sequence
  Description of Artificial Sequence: Synthetic epitope
EDHASNVKYT

SEQ ID NO: 15315 - protein, 10 aa, Artificial Sequence
  Description of Artificial Sequence: Synthetic epitope
EDHVASVKKS

SEQ ID NO: 15316 - protein, 10 aa, Artificial Sequence
  Description of Artificial Sequence: Synthetic epitope
EDIEMDEIIE

SEQ ID NO: 15317 - protein, 10 aa, Artificial Sequence
  Description of Artificial Sequence: Synthetic epitope
EDIILHMFQY

SEQ ID NO: 15318 - protein, 10 aa, Artificial Sequence
  Description of Artificial Sequence: Synthetic epitope
EDIISATITP

SEQ ID NO: 15319 - protein, 10 aa, Artificial Sequence
  Description of Artificial Sequence: Synthetic epitope
EDILVASIVS

SEQ ID NO: 15320 - protein, 10 aa, Artificial Sequence
  Description of Artificial Sequence: Synthetic epitope
EDIMRDRIEQ

SEQ ID NO: 15321 - protein, 10 aa, Artificial Sequence
  Description of Artificial Sequence: Synthetic epitope
EDIRGQSDIA

SEQ ID NO: 15322 - protein, 10 aa, Artificial Sequence
  Description of Artificial Sequence: Synthetic epitope
EDISMSLSDG

SEQ ID NO: 15323 - protein, 10 aa, Artificial Sequence
  Description of Artificial Sequence: Synthetic epitope
EDISSIKGVS

SEQ ID NO: 15324 - protein, 10 aa, Artificial Sequence
  Description of Artificial Sequence: Synthetic epitope
EDISVATVAA

SEQ ID NO: 15325 - protein, 10 aa, Artificial Sequence
  Description of Artificial Sequence: Synthetic epitope
EDITPKNQNS

SEQ ID NO: 15326 - protein, 10 aa, Artificial Sequence
  Description of Artificial Sequence: Synthetic epitope
EDIVSSANNS

SEQ ID NO: 15327 - protein, 10 aa, Artificial Sequence
  Description of Artificial Sequence: Synthetic epitope
EDKAAEGHYA

SEQ ID NO: 15328 - protein, 10 aa, Artificial Sequence
  Description of Artificial Sequence: Synthetic epitope
EDKDMQQKEQ

SEQ ID NO: 15329 - protein, 10 aa, Artificial Sequence
  Description of Artificial Sequence: Synthetic epitope
EDKDSKSKKT

SEQ ID NO: 15330 - protein, 10 aa, Artificial Sequence
  Description of Artificial Sequence: Synthetic epitope
EDKEKQTLKA

SEQ ID NO: 15331 - protein, 10 aa, Artificial Sequence
  Description of Artificial Sequence: Synthetic epitope
EDKESKIFRI

SEQ ID NO: 15332 - protein, 10 aa, Artificial Sequence
  Description of Artificial Sequence: Synthetic epitope
EDKKQSLENF

SEQ ID NO: 15333 - protein, 10 aa, Artificial Sequence
  Description of Artificial Sequence: Synthetic epitope
EDKKVAPKEP

SEQ ID NO: 15334 - protein, 10 aa, Artificial Sequence
  Description of Artificial Sequence: Synthetic epitope
EDKLIAQNLE

SEQ ID NO: 15335 - protein, 10 aa, Artificial Sequence
  Description of Artificial Sequence: Synthetic epitope
EDKQSKIKED

SEQ ID NO: 15336 - protein, 10 aa, Artificial Sequence
  Description of Artificial Sequence: Synthetic epitope
EDKQTFQVTD

SEQ ID NO: 15337 - protein, 10 aa, Artificial Sequence
  Description of Artificial Sequence: Synthetic epitope
EDKRKDDSKD

SEQ ID NO: 15338 - protein, 10 aa, Artificial Sequence
  Description of Artificial Sequence: Synthetic epitope
EDKRQVSSPK

SEQ ID NO: 15339 - protein, 10 aa, Artificial Sequence
  Description of Artificial Sequence: Synthetic epitope
EDKSDAASNS

SEQ ID NO: 15340 - protein, 10 aa, Artificial Sequence
  Description of Artificial Sequence: Synthetic epitope
EDKSDAASNS

SEQ ID NO: 15341 - protein, 10 aa, Artificial Sequence
  Description of Artificial Sequence: Synthetic epitope
EDKTKVLNIV

SEQ ID NO: 15342 - protein, 10 aa, Artificial Sequence
  Description of Artificial Sequence: Synthetic epitope
EDKVQIAANE

SEQ ID NO: 15343 - protein, 10 aa, Artificial Sequence
  Description of Artificial Sequence: Synthetic epitope
EDLAGTTDEK

SEQ ID NO: 15344 - protein, 10 aa, Artificial Sequence
  Description of Artificial Sequence: Synthetic epitope
EDLAISASTS

SEQ ID NO: 15345 - protein, 10 aa, Artificial Sequence
  Description of Artificial Sequence: Synthetic epitope
EDLAKMNLEN

SEQ ID NO: 15346 - protein, 10 aa, Artificial Sequence
  Description of Artificial Sequence: Synthetic epitope
EDLELVLGDL

SEQ ID NO: 15347 - protein, 10 aa, Artificial Sequence
  Description of Artificial Sequence: Synthetic epitope
EDLESSLEQE

SEQ ID NO: 15348 - protein, 10 aa, Artificial Sequence
  Description of Artificial Sequence: Synthetic epitope
EDLKQPMAER

SEQ ID NO: 15349 - protein, 10 aa, Artificial Sequence
  Description of Artificial Sequence: Synthetic epitope
EDLLQEYTEQ

SEQ ID NO: 15350 - protein, 10 aa, Artificial Sequence
  Description of Artificial Sequence: Synthetic epitope
EDLNSLSALA

SEQ ID NO: 15351 - protein, 10 aa, Artificial Sequence
  Description of Artificial Sequence: Synthetic epitope
EDLSHLAESK

SEQ ID NO: 15352 - protein, 10 aa, Artificial Sequence
  Description of Artificial Sequence: Synthetic epitope
EDLTIEDKAV

SEQ ID NO: 15353 - protein, 10 aa, Artificial Sequence
  Description of Artificial Sequence: Synthetic epitope
EDLVLEKLKS

SEQ ID NO: 15354 - protein, 10 aa, Artificial Sequence
  Description of Artificial Sequence: Synthetic epitope
EDMASTRYES

SEQ ID NO: 15355 - protein, 10 aa, Artificial Sequence
  Description of Artificial Sequence: Synthetic epitope
EDMHNRDAND

SEQ ID NO: 15356 - protein, 10 aa, Artificial Sequence
  Description of Artificial Sequence: Synthetic epitope
EDMIIHSSEQ

SEQ ID NO: 15357 - protein, 10 aa, Artificial Sequence
  Description of Artificial Sequence: Synthetic epitope
EDMNASAQGA

SEQ ID NO: 15358 - protein, 10 aa, Artificial Sequence
  Description of Artificial Sequence: Synthetic epitope
EDMSASDSDD

SEQ ID NO: 15359 - protein, 10 aa, Artificial Sequence
  Description of Artificial Sequence: Synthetic epitope
EDMTQKATDT

SEQ ID NO: 15360 - protein, 10 aa, Artificial Sequence
  Description of Artificial Sequence: Synthetic epitope
EDNAESMQLE

SEQ ID NO: 15361 - protein, 10 aa, Artificial Sequence
  Description of Artificial Sequence: Synthetic epitope
EDNALKVLHN

SEQ ID NO: 15362 - protein, 10 aa, Artificial Sequence
  Description of Artificial Sequence: Synthetic epitope
EDNASAVEEQ

SEQ ID NO: 15363 - protein, 10 aa, Artificial Sequence
  Description of Artificial Sequence: Synthetic epitope
EDNDEKENKN

SEQ ID NO: 15364 - protein, 10 aa, Artificial Sequence
  Description of Artificial Sequence: Synthetic epitope
EDNLIEARKE

SEQ ID NO: 15365 - protein, 10 aa, Artificial Sequence
  Description of Artificial Sequence: Synthetic epitope
EDNNEMIPME

SEQ ID NO: 15366 - protein, 10 aa, Artificial Sequence
  Description of Artificial Sequence: Synthetic epitope
EDNSQRTKWK

SEQ ID NO: 15367 - protein, 10 aa, Artificial Sequence
  Description of Artificial Sequence: Synthetic epitope
EDNTSEAENG

SEQ ID NO: 15368 - protein, 10 aa, Artificial Sequence
  Description of Artificial Sequence: Synthetic epitope
EDNTTSIKTQ

SEQ ID NO: 15369 - protein, 10 aa, Artificial Sequence
  Description of Artificial Sequence: Synthetic epitope
EDNTTSIKTQ

SEQ ID NO: 15370 - protein, 10 aa, Artificial Sequence
  Description of Artificial Sequence: Synthetic epitope
EDPDWRGFFW

SEQ ID NO: 15371 - protein, 10 aa, Artificial Sequence
  Description of Artificial Sequence: Synthetic epitope
EDPEDKESRL

SEQ ID NO: 15372 - protein, 10 aa, Artificial Sequence
  Description of Artificial Sequence: Synthetic epitope
EDPETTRQMQ

SEQ ID NO: 15373 - protein, 10 aa, Artificial Sequence
  Description of Artificial Sequence: Synthetic epitope
EDPHYSELTN

SEQ ID NO: 15374 - protein, 10 aa, Artificial Sequence
  Description of Artificial Sequence: Synthetic epitope
EDPKLGKVTL

SEQ ID NO: 15375 - protein, 10 aa, Artificial Sequence
  Description of Artificial Sequence: Synthetic epitope
EDQEITKADV

SEQ ID NO: 15376 - protein, 10 aa, Artificial Sequence
  Description of Artificial Sequence: Synthetic epitope
EDQIELKEKQ

SEQ ID NO: 15377 - protein, 10 aa, Artificial Sequence
  Description of Artificial Sequence: Synthetic epitope
EDQNLKDQDH

SEQ ID NO: 15378 - protein, 10 aa, Artificial Sequence
  Description of Artificial Sequence: Synthetic epitope
EDQQAFTQGE

SEQ ID NO: 15379 - protein, 10 aa, Artificial Sequence
  Description of Artificial Sequence: Synthetic epitope
EDQQDKYTSR

SEQ ID NO: 15380 - protein, 10 aa, Artificial Sequence
  Description of Artificial Sequence: Synthetic epitope
EDQTRHVTSR

SEQ ID NO: 15381 - protein, 10 aa, Artificial Sequence
  Description of Artificial Sequence: Synthetic epitope
EDRIDYLNDY

SEQ ID NO: 15382 - protein, 10 aa, Artificial Sequence
  Description of Artificial Sequence: Synthetic epitope
EDRKYGTTNL

SEQ ID NO: 15383 - protein, 10 aa, Artificial Sequence
  Description of Artificial Sequence: Synthetic epitope
EDRNALLSEE

SEQ ID NO: 15384 - protein, 10 aa, Artificial Sequence
  Description of Artificial Sequence: Synthetic epitope
EDRNDLKASP

SEQ ID NO: 15385 - protein, 10 aa, Artificial Sequence
  Description of Artificial Sequence: Synthetic epitope
EDRPEVKDEN

SEQ ID NO: 15386 - protein, 10 aa, Artificial Sequence
  Description of Artificial Sequence: Synthetic epitope
EDRRPKERIS

SEQ ID NO: 15387 - protein, 10 aa, Artificial Sequence
  Description of Artificial Sequence: Synthetic epitope
EDRSKLANMN

SEQ ID NO: 15388 - protein, 10 aa, Artificial Sequence
  Description of Artificial Sequence: Synthetic epitope
EDRVVSVSFR

SEQ ID NO: 15389 - protein, 10 aa, Artificial Sequence
  Description of Artificial Sequence: Synthetic epitope
EDSADGAATS

SEQ ID NO: 15390 - protein, 10 aa, Artificial Sequence
  Description of Artificial Sequence: Synthetic epitope
EDSARMSAGL

SEQ ID NO: 15391 - protein, 10 aa, Artificial Sequence
  Description of Artificial Sequence: Synthetic epitope
EDSASENQEG

SEQ ID NO: 15392 - protein, 10 aa, Artificial Sequence
  Description of Artificial Sequence: Synthetic epitope
EDSDMLQEVS

SEQ ID NO: 15393 - protein, 10 aa, Artificial Sequence
  Description of Artificial Sequence: Synthetic epitope
EDSDVSLTSS

SEQ ID NO: 15394 - protein, 10 aa, Artificial Sequence
  Description of Artificial Sequence: Synthetic epitope
EDSEEAHSAS

SEQ ID NO: 15395 - protein, 10 aa, Artificial Sequence
  Description of Artificial Sequence: Synthetic epitope
EDSEEKDNRK

SEQ ID NO: 15396 - protein, 10 aa, Artificial Sequence
  Description of Artificial Sequence: Synthetic epitope
EDSEFTLASD

SEQ ID NO: 15397 - protein, 10 aa, Artificial Sequence
  Description of Artificial Sequence: Synthetic epitope
EDSKGKVQEH

SEQ ID NO: 15398 - protein, 10 aa, Artificial Sequence
  Description of Artificial Sequence: Synthetic epitope
EDSKLSLVLD

SEQ ID NO: 15399 - protein, 10 aa, Artificial Sequence
  Description of Artificial Sequence: Synthetic epitope
EDSKQVSEHP

SEQ ID NO: 15400 - protein, 10 aa, Artificial Sequence
  Description of Artificial Sequence: Synthetic epitope
EDSKSSHSHT

SEQ ID NO: 15401 - protein, 10 aa, Artificial Sequence
  Description of Artificial Sequence: Synthetic epitope
EDSMSSATTL

SEQ ID NO: 15402 - protein, 10 aa, Artificial Sequence
  Description of Artificial Sequence: Synthetic epitope
EDSQASMKQV

SEQ ID NO: 15403 - protein, 10 aa, Artificial Sequence
  Description of Artificial Sequence: Synthetic epitope
EDSQKKEDTA

SEQ ID NO: 15404 - protein, 10 aa, Artificial Sequence
  Description of Artificial Sequence: Synthetic epitope
EDSSLRERTR

SEQ ID NO: 15405 - protein, 10 aa, Artificial Sequence
  Description of Artificial Sequence: Synthetic epitope
EDSSRGASQQ

SEQ ID NO: 15406 - protein, 10 aa, Artificial Sequence
  Description of Artificial Sequence: Synthetic epitope
EDSTLSKSVK

SEQ ID NO: 15407 - protein, 10 aa, Artificial Sequence
  Description of Artificial Sequence: Synthetic epitope
EDSTSDEDRS

SEQ ID NO: 15408 - protein, 10 aa, Artificial Sequence
  Description of Artificial Sequence: Synthetic epitope
EDSTTGGVQQ

SEQ ID NO: 15409 - protein, 10 aa, Artificial Sequence
  Description of Artificial Sequence: Synthetic epitope
EDSVISLSGD

SEQ ID NO: 15410 - protein, 10 aa, Artificial Sequence
  Description of Artificial Sequence: Synthetic epitope
EDSVRIMDRM

SEQ ID NO: 15411 - protein, 10 aa, Artificial Sequence
  Description of Artificial Sequence: Synthetic epitope
EDTASKREDG

SEQ ID NO: 15412 - protein, 10 aa, Artificial Sequence
  Description of Artificial Sequence: Synthetic epitope
EDTDLSRLYT

SEQ ID NO: 15413 - protein, 10 aa, Artificial Sequence
  Description of Artificial Sequence: Synthetic epitope
EDTDSMSRRQ

SEQ ID NO: 15414 - protein, 10 aa, Artificial Sequence
  Description of Artificial Sequence: Synthetic epitope
EDTDTEEKQA

SEQ ID NO: 15415 - protein, 10 aa, Artificial Sequence
  Description of Artificial Sequence: Synthetic epitope
EDTEINPGNY

SEQ ID NO: 15416 - protein, 10 aa, Artificial Sequence
  Description of Artificial Sequence: Synthetic epitope
EDTESEASEP

SEQ ID NO: 15417 - protein, 10 aa, Artificial Sequence
  Description of Artificial Sequence: Synthetic epitope
EDTKAAVLLH

SEQ ID NO: 15418 - protein, 10 aa, Artificial Sequence
  Description of Artificial Sequence: Synthetic epitope
EDTMNDKAND

SEQ ID NO: 15419 - protein, 10 aa, Artificial Sequence
  Description of Artificial Sequence: Synthetic epitope
EDTSLEGSSL

SEQ ID NO: 15420 - protein, 10 aa, Artificial Sequence
  Description of Artificial Sequence: Synthetic epitope
EDTSTETINS

SEQ ID NO: 15421 - protein, 10 aa, Artificial Sequence
  Description of Artificial Sequence: Synthetic epitope
EDTTAIDVQV

SEQ ID NO: 15422 - protein, 10 aa, Artificial Sequence
  Description of Artificial Sequence: Synthetic epitope
EDTTLTITVP

SEQ ID NO: 15423 - protein, 10 aa, Artificial Sequence
  Description of Artificial Sequence: Synthetic epitope
EDVALIKDHT

SEQ ID NO: 15424 - protein, 10 aa, Artificial Sequence
  Description of Artificial Sequence: Synthetic epitope
EDVDAAELYP

SEQ ID NO: 15425 - protein, 10 aa, Artificial Sequence
  Description of Artificial Sequence: Synthetic epitope
EDVDSTKNRK

SEQ ID NO: 15426 - protein, 10 aa, Artificial Sequence
  Description of Artificial Sequence: Synthetic epitope
EDVEAVSANA

SEQ ID NO: 15427 - protein, 10 aa, Artificial Sequence
  Description of Artificial Sequence: Synthetic epitope
EDVLDPLKMS

SEQ ID NO: 15428 - protein, 10 aa, Artificial Sequence
  Description of Artificial Sequence: Synthetic epitope
EDVLKVSTIP

SEQ ID NO: 15429 - protein, 10 aa, Artificial Sequence
  Description of Artificial Sequence: Synthetic epitope
EDVLQTDDNM

SEQ ID NO: 15430 - protein, 10 aa, Artificial Sequence
  Description of Artificial Sequence: Synthetic epitope
EDVQDQVVTS

SEQ ID NO: 15431 - protein, 10 aa, Artificial Sequence
  Description of Artificial Sequence: Synthetic epitope
EDVRATEKDK

SEQ ID NO: 15432 - protein, 10 aa, Artificial Sequence
  Description of Artificial Sequence: Synthetic epitope
EDVRKYAGSN

SEQ ID NO: 15433 - protein, 10 aa, Artificial Sequence
  Description of Artificial Sequence: Synthetic epitope
EDVSSAAPSP

SEQ ID NO: 15434 - protein, 10 aa, Artificial Sequence
  Description of Artificial Sequence: Synthetic epitope
EDVSSEVSTL

SEQ ID NO: 15435 - protein, 10 aa, Artificial Sequence
  Description of Artificial Sequence: Synthetic epitope
EDVSTAVQNL

SEQ ID NO: 15436 - protein, 10 aa, Artificial Sequence
  Description of Artificial Sequence: Synthetic epitope
EDWHGIQEIA

SEQ ID NO: 15437 - protein, 10 aa, Artificial Sequence
  Description of Artificial Sequence: Synthetic epitope
EDWKKAANQL

SEQ ID NO: 15438 - protein, 10 aa, Artificial Sequence
  Description of Artificial Sequence: Synthetic epitope
EDWNNESSMP

SEQ ID NO: 15439 - protein, 10 aa, Artificial Sequence
  Description of Artificial Sequence: Synthetic epitope
EDYNQINTAK

SEQ ID NO: 15440 - protein, 10 aa, Artificial Sequence
  Description of Artificial Sequence: Synthetic epitope
EDYRKIAVDK

SEQ ID NO: 15441 - protein, 10 aa, Artificial Sequence
  Description of Artificial Sequence: Synthetic epitope
EDYSNSSLVA

SEQ ID NO: 15442 - protein, 10 aa, Artificial Sequence
  Description of Artificial Sequence: Synthetic epitope
EDYVSVAAFQ

SEQ ID NO: 15443 - protein, 10 aa, Artificial Sequence
  Description of Artificial Sequence: Synthetic epitope
EEAALLRLEE

SEQ ID NO: 15444 - protein, 10 aa, Artificial Sequence
  Description of Artificial Sequence: Synthetic epitope
EEAAQITGKK

SEQ ID NO: 15445 - protein, 10 aa, Artificial Sequence
  Description of Artificial Sequence: Synthetic epitope
EEAATAEAVG

SEQ ID NO: 15446 - protein, 10 aa, Artificial Sequence
  Description of Artificial Sequence: Synthetic epitope
EEAEASYPIL

SEQ ID NO: 15447 - protein, 10 aa, Artificial Sequence
  Description of Artificial Sequence: Synthetic epitope
EEAEAYSRSQ

SEQ ID NO: 15448 - protein, 10 aa, Artificial Sequence
  Description of Artificial Sequence: Synthetic epitope
EEAEEARVQA

SEQ ID NO: 15449 - protein, 10 aa, Artificial Sequence
  Description of Artificial Sequence: Synthetic epitope
EEAEKVLESS

SEQ ID NO: 15450 - protein, 10 aa, Artificial Sequence
  Description of Artificial Sequence: Synthetic epitope
EEAEKVQELY

SEQ ID NO: 15451 - protein, 10 aa, Artificial Sequence
  Description of Artificial Sequence: Synthetic epitope
EEAELVRLMD

SEQ ID NO: 15452 - protein, 10 aa, Artificial Sequence
  Description of Artificial Sequence: Synthetic epitope
EEAEMILKNM

SEQ ID NO: 15453 - protein, 10 aa, Artificial Sequence
  Description of Artificial Sequence: Synthetic epitope
EEAESAARQP

SEQ ID NO: 15454 - protein, 10 aa, Artificial Sequence
  Description of Artificial Sequence: Synthetic epitope
EEAGSAHSDE

SEQ ID NO: 15455 - protein, 10 aa, Artificial Sequence
  Description of Artificial Sequence: Synthetic epitope
EEAGSSDLSS

SEQ ID NO: 15456 - protein, 10 aa, Artificial Sequence
  Description of Artificial Sequence: Synthetic epitope
EEAIASAIAE

SEQ ID NO: 15457 - protein, 10 aa, Artificial Sequence
  Description of Artificial Sequence: Synthetic epitope
EEAIKEKIRA

SEQ ID NO: 15458 - protein, 10 aa, Artificial Sequence
  Description of Artificial Sequence: Synthetic epitope
EEAISKAEAY

SEQ ID NO: 15459 - protein, 10 aa, Artificial Sequence
  Description of Artificial Sequence: Synthetic epitope
EEAKAKMGLL

SEQ ID NO: 15460 - protein, 10 aa, Artificial Sequence
  Description of Artificial Sequence: Synthetic epitope
EEAKKMKTNS

SEQ ID NO: 15461 - protein, 10 aa, Artificial Sequence
  Description of Artificial Sequence: Synthetic epitope
EEAKNRDHRK

SEQ ID NO: 15462 - protein, 10 aa, Artificial Sequence
  Description of Artificial Sequence: Synthetic epitope
EEAKRASKSA

SEQ ID NO: 15463 - protein, 10 aa, Artificial Sequence
  Description of Artificial Sequence: Synthetic epitope
EEALAHATDA

SEQ ID NO: 15464 - protein, 10 aa, Artificial Sequence
  Description of Artificial Sequence: Synthetic epitope
EEALETMAWG

SEQ ID NO: 15465 - protein, 10 aa, Artificial Sequence
  Description of Artificial Sequence: Synthetic epitope
EEALKIKEND

SEQ ID NO: 15466 - protein, 10 aa, Artificial Sequence
  Description of Artificial Sequence: Synthetic epitope
EEALPEQSEG

SEQ ID NO: 15467 - protein, 10 aa, Artificial Sequence
  Description of Artificial Sequence: Synthetic epitope
EEALQLVKEG

SEQ ID NO: 15468 - protein, 10 aa, Artificial Sequence
  Description of Artificial Sequence: Synthetic epitope
EEALRESVQI

SEQ ID NO: 15469 - protein, 10 aa, Artificial Sequence
  Description of Artificial Sequence: Synthetic epitope
EEALSSLTSK

SEQ ID NO: 15470 - protein, 10 aa, Artificial Sequence
  Description of Artificial Sequence: Synthetic epitope
EEALTILSKK

SEQ ID NO: 15471 - protein, 10 aa, Artificial Sequence
  Description of Artificial Sequence: Synthetic epitope
EEAMAVLEEV

SEQ ID NO: 15472 - protein, 10 aa, Artificial Sequence
  Description of Artificial Sequence: Synthetic epitope
EEAMIQSYYQ

SEQ ID NO: 15473 - protein, 10 aa, Artificial Sequence
  Description of Artificial Sequence: Synthetic epitope
EEANLQKSQA

SEQ ID NO: 15474 - protein, 10 aa, Artificial Sequence
  Description of Artificial Sequence: Synthetic epitope
EEAQKRESTT

SEQ ID NO: 15475 - protein, 10 aa, Artificial Sequence
  Description of Artificial Sequence: Synthetic epitope
EEAQLSSQLY

SEQ ID NO: 15476 - protein, 10 aa, Artificial Sequence
  Description of Artificial Sequence: Synthetic epitope
EEAQQTRLQL

SEQ ID NO: 15477 - protein, 10 aa, Artificial Sequence
  Description of Artificial Sequence: Synthetic epitope
EEAQRANASR

SEQ ID NO: 15478 - protein, 10 aa, Artificial Sequence
  Description of Artificial Sequence: Synthetic epitope
EEAQRQLEQE

SEQ ID NO: 15479 - protein, 10 aa, Artificial Sequence
  Description of Artificial Sequence: Synthetic epitope
EEARLVQELE

SEQ ID NO: 15480 - protein, 10 aa, Artificial Sequence
  Description of Artificial Sequence: Synthetic epitope
EEASLDADQA

SEQ ID NO: 15481 - protein, 10 aa, Artificial Sequence
  Description of Artificial Sequence: Synthetic epitope
EEASLDEASG

SEQ ID NO: 15482 - protein, 10 aa, Artificial Sequence
  Description of Artificial Sequence: Synthetic epitope
EEASSAQQGP

SEQ ID NO: 15483 - protein, 10 aa, Artificial Sequence
  Description of Artificial Sequence: Synthetic epitope
EEASSKLEEF

SEQ ID NO: 15484 - protein, 10 aa, Artificial Sequence
  Description of Artificial Sequence: Synthetic epitope
EEATALLRKA

SEQ ID NO: 15485 - protein, 10 aa, Artificial Sequence
  Description of Artificial Sequence: Synthetic epitope
EEATASYKEE

SEQ ID NO: 15486 - protein, 10 aa, Artificial Sequence
  Description of Artificial Sequence: Synthetic epitope
EEATEDKASA

SEQ ID NO: 15487 - protein, 10 aa, Artificial Sequence
  Description of Artificial Sequence: Synthetic epitope
EEATKKLKQS

SEQ ID NO: 15488 - protein, 10 aa, Artificial Sequence
  Description of Artificial Sequence: Synthetic epitope
EEATKSIEPG

SEQ ID NO: 15489 - protein, 10 aa, Artificial Sequence
  Description of Artificial Sequence: Synthetic epitope
EEATQNAEEQ

SEQ ID NO: 15490 - protein, 10 aa, Artificial Sequence
  Description of Artificial Sequence: Synthetic epitope
EEATSSRRYG

SEQ ID NO: 15491 - protein, 10 aa, Artificial Sequence
  Description of Artificial Sequence: Synthetic epitope
EEAVDLALQV

SEQ ID NO: 15492 - protein, 10 aa, Artificial Sequence
  Description of Artificial Sequence: Synthetic epitope
EEAVIADKNN

SEQ ID NO: 15493 - protein, 10 aa, Artificial Sequence
  Description of Artificial Sequence: Synthetic epitope
EEAVQVKEQS

SEQ ID NO: 15494 - protein, 10 aa, Artificial Sequence
  Description of Artificial Sequence: Synthetic epitope
EEAVVSIQDI

SEQ ID NO: 15495 - protein, 10 aa, Artificial Sequence
  Description of Artificial Sequence: Synthetic epitope
EEDAFKSKKE

SEQ ID NO: 15496 - protein, 10 aa, Artificial Sequence
  Description of Artificial Sequence: Synthetic epitope
EEDDTSSEAT

SEQ ID NO: 15497 - protein, 10 aa, Artificial Sequence
  Description of Artificial Sequence: Synthetic epitope
EEDEAAREVR

SEQ ID NO: 15498 - protein, 10 aa, Artificial Sequence
  Description of Artificial Sequence: Synthetic epitope
EEDEENKTSK

SEQ ID NO: 15499 - protein, 10 aa, Artificial Sequence
  Description of Artificial Sequence: Synthetic epitope
EEDEVIDDQE

SEQ ID NO: 15500 - protein, 10 aa, Artificial Sequence
  Description of Artificial Sequence: Synthetic epitope
EEDGTAQKMQ

SEQ ID NO: 15501 - protein, 10 aa, Artificial Sequence
  Description of Artificial Sequence: Synthetic epitope
EEDIQANLIM

SEQ ID NO: 15502 - protein, 10 aa, Artificial Sequence
  Description of Artificial Sequence: Synthetic epitope
EEDLAAGVGR

SEQ ID NO: 15503 - protein, 10 aa, Artificial Sequence
  Description of Artificial Sequence: Synthetic epitope
EEDLAFSTKE

SEQ ID NO: 15504 - protein, 10 aa, Artificial Sequence
  Description of Artificial Sequence: Synthetic epitope
EEDLQSQLLQ

SEQ ID NO: 15505 - protein, 10 aa, Artificial Sequence
  Description of Artificial Sequence: Synthetic epitope
EEDNESRSWR

SEQ ID NO: 15506 - protein, 10 aa, Artificial Sequence
  Description of Artificial Sequence: Synthetic epitope
EEDPAMKPQS

SEQ ID NO: 15507 - protein, 10 aa, Artificial Sequence
  Description of Artificial Sequence: Synthetic epitope
EEDQTVVSVD

SEQ ID NO: 15508 - protein, 10 aa, Artificial Sequence
  Description of Artificial Sequence: Synthetic epitope
EEDRKAMVPE

SEQ ID NO: 15509 - protein, 10 aa, Artificial Sequence
  Description of Artificial Sequence: Synthetic epitope
EEDSQAETKS

SEQ ID NO: 15510 - protein, 10 aa, Artificial Sequence
  Description of Artificial Sequence: Synthetic epitope
EEDSSKVPAV

SEQ ID NO: 15511 - protein, 10 aa, Artificial Sequence
  Description of Artificial Sequence: Synthetic epitope
EEDSSTESDS

SEQ ID NO: 15512 - protein, 10 aa, Artificial Sequence
  Description of Artificial Sequence: Synthetic epitope
EEDTEESSRS

SEQ ID NO: 15513 - protein, 10 aa, Artificial Sequence
  Description of Artificial Sequence: Synthetic epitope
EEDTNLSALD

SEQ ID NO: 15514 - protein, 10 aa, Artificial Sequence
  Description of Artificial Sequence: Synthetic epitope
EEDVWLVNKI

SEQ ID NO: 15515 - protein, 10 aa, Artificial Sequence
  Description of Artificial Sequence: Synthetic epitope
EEFELPISSA

SEQ ID NO: 15516 - protein, 10 aa, Artificial Sequence
  Description of Artificial Sequence: Synthetic epitope
EEFELTNIDM

SEQ ID NO: 15517 - protein, 10 aa, Artificial Sequence
  Description of Artificial Sequence: Synthetic epitope
EEFKEKRTVQ

SEQ ID NO: 15518 - protein, 10 aa, Artificial Sequence
  Description of Artificial Sequence: Synthetic epitope
EEFKSARTAR

SEQ ID NO: 15519 - protein, 10 aa, Artificial Sequence
  Description of Artificial Sequence: Synthetic epitope
EEFMNFDLKQ

SEQ ID NO: 15520 - protein, 10 aa, Artificial Sequence
  Description of Artificial Sequence: Synthetic epitope
EEFQLMRGEP

SEQ ID NO: 15521 - protein, 10 aa, Artificial Sequence
  Description of Artificial Sequence: Synthetic epitope
EEFYKKNHSG

SEQ ID NO: 15522 - protein, 10 aa, Artificial Sequence
  Description of Artificial Sequence: Synthetic epitope
EEGASEEGQH

SEQ ID NO: 15523 - protein, 10 aa, Artificial Sequence
  Description of Artificial Sequence: Synthetic epitope
EEGATKKAPS

SEQ ID NO: 15524 - protein, 10 aa, Artificial Sequence
  Description of Artificial Sequence: Synthetic epitope
EEGAVSTRGT

SEQ ID NO: 15525 - protein, 10 aa, Artificial Sequence
  Description of Artificial Sequence: Synthetic epitope
EEGENDIGEY

SEQ ID NO: 15526 - protein, 10 aa, Artificial Sequence
  Description of Artificial Sequence: Synthetic epitope
EEGEVSASTN

SEQ ID NO: 15527 - protein, 10 aa, Artificial Sequence
  Description of Artificial Sequence: Synthetic epitope
EEGGAHSLKD

SEQ ID NO: 15528 - protein, 10 aa, Artificial Sequence
  Description of Artificial Sequence: Synthetic epitope
EEGGDQAGQN

SEQ ID NO: 15529 - protein, 10 aa, Artificial Sequence
  Description of Artificial Sequence: Synthetic epitope
EEGINREDKT

SEQ ID NO: 15530 - protein, 10 aa, Artificial Sequence
  Description of Artificial Sequence: Synthetic epitope
EEGKAQLVSK

SEQ ID NO: 15531 - protein, 10 aa, Artificial Sequence
  Description of Artificial Sequence: Synthetic epitope
EEGMMINISI

SEQ ID NO: 15532 - protein, 10 aa, Artificial Sequence
  Description of Artificial Sequence: Synthetic epitope
EEGQATETDT

SEQ ID NO: 15533 - protein, 10 aa, Artificial Sequence
  Description of Artificial Sequence: Synthetic epitope
EEGRQKESVK

SEQ ID NO: 15534 - protein, 10 aa, Artificial Sequence
  Description of Artificial Sequence: Synthetic epitope
EEGSESESRS

SEQ ID NO: 15535 - protein, 10 aa, Artificial Sequence
  Description of Artificial Sequence: Synthetic epitope
EEGSRQLEEQ

SEQ ID NO: 15536 - protein, 10 aa, Artificial Sequence
  Description of Artificial Sequence: Synthetic epitope
EEGSSVKSIL

SEQ ID NO: 15537 - protein, 10 aa, Artificial Sequence
  Description of Artificial Sequence: Synthetic epitope
EEGTRKRVSL

SEQ ID NO: 15538 - protein, 10 aa, Artificial Sequence
  Description of Artificial Sequence: Synthetic epitope
EEGTVQIQEG

SEQ ID NO: 15539 - protein, 10 aa, Artificial Sequence
  Description of Artificial Sequence: Synthetic epitope
EEGVSDVESE

SEQ ID NO: 15540 - protein, 10 aa, Artificial Sequence
  Description of Artificial Sequence: Synthetic epitope
EEHAYLGPTV

SEQ ID NO: 15541 - protein, 10 aa, Artificial Sequence
  Description of Artificial Sequence: Synthetic epitope
EEHEILTKSY

SEQ ID NO: 15542 - protein, 10 aa, Artificial Sequence
  Description of Artificial Sequence: Synthetic epitope
EEHLQLRQEE

SEQ ID NO: 15543 - protein, 10 aa, Artificial Sequence
  Description of Artificial Sequence: Synthetic epitope
EEHQQSKSSG

SEQ ID NO: 15544 - protein, 10 aa, Artificial Sequence
  Description of Artificial Sequence: Synthetic epitope
EEHSHDSMIR

SEQ ID NO: 15545 - protein, 10 aa, Artificial Sequence
  Description of Artificial Sequence: Synthetic epitope
EEHVILSMFK

SEQ ID NO: 15546 - protein, 10 aa, Artificial Sequence
  Description of Artificial Sequence: Synthetic epitope
EEIASQEKNI

SEQ ID NO: 15547 - protein, 10 aa, Artificial Sequence
  Description of Artificial Sequence: Synthetic epitope
EEIDQLRGFI

SEQ ID NO: 15548 - protein, 10 aa, Artificial Sequence
  Description of Artificial Sequence: Synthetic epitope
EEIDVNESEL

SEQ ID NO: 15549 - protein, 10 aa, Artificial Sequence
  Description of Artificial Sequence: Synthetic epitope
EEIIAEDYDD

SEQ ID NO: 15550 - protein, 10 aa, Artificial Sequence
  Description of Artificial Sequence: Synthetic epitope
EEIKASIKNN

SEQ ID NO: 15551 - protein, 10 aa, Artificial Sequence
  Description of Artificial Sequence: Synthetic epitope
EEILAADDKE

SEQ ID NO: 15552 - protein, 10 aa, Artificial Sequence
  Description of Artificial Sequence: Synthetic epitope
EEILERVTDE

SEQ ID NO: 15553 - protein, 10 aa, Artificial Sequence
  Description of Artificial Sequence: Synthetic epitope
EEILKTRFMV

SEQ ID NO: 15554 - protein, 10 aa, Artificial Sequence
  Description of Artificial Sequence: Synthetic epitope
EEILRSSMAG

SEQ ID NO: 15555 - protein, 10 aa, Artificial Sequence
  Description of Artificial Sequence: Synthetic epitope
EEILSILEEK

SEQ ID NO: 15556 - protein, 10 aa, Artificial Sequence
  Description of Artificial Sequence: Synthetic epitope
EEIMITSEPS

SEQ ID NO: 15557 - protein, 10 aa, Artificial Sequence
  Description of Artificial Sequence: Synthetic epitope
EEINPASQTN

SEQ ID NO: 15558 - protein, 10 aa, Artificial Sequence
  Description of Artificial Sequence: Synthetic epitope
EEIQIAMKHD

SEQ ID NO: 15559 - protein, 10 aa, Artificial Sequence
  Description of Artificial Sequence: Synthetic epitope
EEIRASVRDK

SEQ ID NO: 15560 - protein, 10 aa, Artificial Sequence
  Description of Artificial Sequence: Synthetic epitope
EEIRDVSNLG

SEQ ID NO: 15561 - protein, 10 aa, Artificial Sequence
  Description of Artificial Sequence: Synthetic epitope
EEIRKVEKRA

SEQ ID NO: 15562 - protein, 10 aa, Artificial Sequence
  Description of Artificial Sequence: Synthetic epitope
EEIRSMLEAV

SEQ ID NO: 15563 - protein, 10 aa, Artificial Sequence
  Description of Artificial Sequence: Synthetic epitope
EEITQIVLSE

SEQ ID NO: 15564 - protein, 10 aa, Artificial Sequence
  Description of Artificial Sequence: Synthetic epitope
EEITTGSAWF

SEQ ID NO: 15565 - protein, 10 aa, Artificial Sequence
  Description of Artificial Sequence: Synthetic epitope
EEKAADESER

SEQ ID NO: 15566 - protein, 10 aa, Artificial Sequence
  Description of Artificial Sequence: Synthetic epitope
EEKAAHAKTK

SEQ ID NO: 15567 - protein, 10 aa, Artificial Sequence
  Description of Artificial Sequence: Synthetic epitope
EEKAAIGTVE

SEQ ID NO: 15568 - protein, 10 aa, Artificial Sequence
  Description of Artificial Sequence: Synthetic epitope
EEKALRAKEY

SEQ ID NO: 15569 - protein, 10 aa, Artificial Sequence
  Description of Artificial Sequence: Synthetic epitope
EEKAQKVSRS

SEQ ID NO: 15570 - protein, 10 aa, Artificial Sequence
  Description of Artificial Sequence: Synthetic epitope
EEKAQVMLEL

SEQ ID NO: 15571 - protein, 10 aa, Artificial Sequence
  Description of Artificial Sequence: Synthetic epitope
EEKDVVNVLQ

SEQ ID NO: 15572 - protein, 10 aa, Artificial Sequence
  Description of Artificial Sequence: Synthetic epitope
EEKEAAKYVE

SEQ ID NO: 15573 - protein, 10 aa, Artificial Sequence
  Description of Artificial Sequence: Synthetic epitope
EEKEADAYTP

SEQ ID NO: 15574 - protein, 10 aa, Artificial Sequence
  Description of Artificial Sequence: Synthetic epitope
EEKEKMSGSA

SEQ ID NO: 15575 - protein, 10 aa, Artificial Sequence
  Description of Artificial Sequence: Synthetic epitope
EEKEQAALSQ

SEQ ID NO: 15576 - protein, 10 aa, Artificial Sequence
  Description of Artificial Sequence: Synthetic epitope
EEKESLVLSL

SEQ ID NO: 15577 - protein, 10 aa, Artificial Sequence
  Description of Artificial Sequence: Synthetic epitope
EEKETKLKNR

SEQ ID NO: 15578 - protein, 10 aa, Artificial Sequence
  Description of Artificial Sequence: Synthetic epitope
EEKEWRKRET

SEQ ID NO: 15579 - protein, 10 aa, Artificial Sequence
  Description of Artificial Sequence: Synthetic epitope
EEKFPERTTV

SEQ ID NO: 15580 - protein, 10 aa, Artificial Sequence
  Description of Artificial Sequence: Synthetic epitope
EEKFTSSQTQ

SEQ ID NO: 15581 - protein, 10 aa, Artificial Sequence
  Description of Artificial Sequence: Synthetic epitope
EEKGIRAEDL

SEQ ID NO: 15582 - protein, 10 aa, Artificial Sequence
  Description of Artificial Sequence: Synthetic epitope
EEKGKYQLAT

SEQ ID NO: 15583 - protein, 10 aa, Artificial Sequence
  Description of Artificial Sequence: Synthetic epitope
EEKGSISLAG

SEQ ID NO: 15584 - protein, 10 aa, Artificial Sequence
  Description of Artificial Sequence: Synthetic epitope
EEKIESQTQE

SEQ ID NO: 15585 - protein, 10 aa, Artificial Sequence
  Description of Artificial Sequence: Synthetic epitope
EEKIEVETRS

SEQ ID NO: 15586 - protein, 10 aa, Artificial Sequence
  Description of Artificial Sequence: Synthetic epitope
EEKIKVKSTE

SEQ ID NO: 15587 - protein, 10 aa, Artificial Sequence
  Description of Artificial Sequence: Synthetic epitope
EEKILTLENQ

SEQ ID NO: 15588 - protein, 10 aa, Artificial Sequence
  Description of Artificial Sequence: Synthetic epitope
EEKIQSAQIN

SEQ ID NO: 15589 - protein, 10 aa, Artificial Sequence
  Description of Artificial Sequence: Synthetic epitope
EEKIQSAQIN

SEQ ID NO: 15590 - protein, 10 aa, Artificial Sequence
  Description of Artificial Sequence: Synthetic epitope
EEKIQSAQIN

SEQ ID NO: 15591 - protein, 10 aa, Artificial Sequence
  Description of Artificial Sequence: Synthetic epitope
EEKISETFQL

SEQ ID NO: 15592 - protein, 10 aa, Artificial Sequence
  Description of Artificial Sequence: Synthetic epitope
EEKISRATEG

SEQ ID NO: 15593 - protein, 10 aa, Artificial Sequence
  Description of Artificial Sequence: Synthetic epitope
EEKITTLQQE

SEQ ID NO: 15594 - protein, 10 aa, Artificial Sequence
  Description of Artificial Sequence: Synthetic epitope
EEKKGVAASL

SEQ ID NO: 15595 - protein, 10 aa, Artificial Sequence
  Description of Artificial Sequence: Synthetic epitope
EEKKIRLRLQ

SEQ ID NO: 15596 - protein, 10 aa, Artificial Sequence
  Description of Artificial Sequence: Synthetic epitope
EEKKSVTSHS

SEQ ID NO: 15597 - protein, 10 aa, Artificial Sequence
  Description of Artificial Sequence: Synthetic epitope
EEKKTRAARE

SEQ ID NO: 15598 - protein, 10 aa, Artificial Sequence
  Description of Artificial Sequence: Synthetic epitope
EEKKWEGVLR

SEQ ID NO: 15599 - protein, 10 aa, Artificial Sequence
  Description of Artificial Sequence: Synthetic epitope
EEKLENVKAI

SEQ ID NO: 15600 - protein, 10 aa, Artificial Sequence
  Description of Artificial Sequence: Synthetic epitope
EEKLNKLQKL

SEQ ID NO: 15601 - protein, 10 aa, Artificial Sequence
  Description of Artificial Sequence: Synthetic epitope
EEKLSKMKLE

SEQ ID NO: 15602 - protein, 10 aa, Artificial Sequence
  Description of Artificial Sequence: Synthetic epitope
EEKLTLMLLE

SEQ ID NO: 15603 - protein, 10 aa, Artificial Sequence
  Description of Artificial Sequence: Synthetic epitope
EEKMEHSVAA

SEQ ID NO: 15604 - protein, 10 aa, Artificial Sequence
  Description of Artificial Sequence: Synthetic epitope
EEKNENSKSL

SEQ ID NO: 15605 - protein, 10 aa, Artificial Sequence
  Description of Artificial Sequence: Synthetic epitope
EEKNFKAFAS

SEQ ID NO: 15606 - protein, 10 aa, Artificial Sequence
  Description of Artificial Sequence: Synthetic epitope
EEKNKEKEKG

SEQ ID NO: 15607 - protein, 10 aa, Artificial Sequence
  Description of Artificial Sequence: Synthetic epitope
EEKQARTALV

SEQ ID NO: 15608 - protein, 10 aa, Artificial Sequence
  Description of Artificial Sequence: Synthetic epitope
EEKQLKFVKK

SEQ ID NO: 15609 - protein, 10 aa, Artificial Sequence
  Description of Artificial Sequence: Synthetic epitope
EEKQRSSIKT

SEQ ID NO: 15610 - protein, 10 aa, Artificial Sequence
  Description of Artificial Sequence: Synthetic epitope
EEKRGSVSRG

SEQ ID NO: 15611 - protein, 10 aa, Artificial Sequence
  Description of Artificial Sequence: Synthetic epitope
EEKRPLVSSR

SEQ ID NO: 15612 - protein, 10 aa, Artificial Sequence
  Description of Artificial Sequence: Synthetic epitope
EEKRSEEKRI

SEQ ID NO: 15613 - protein, 10 aa, Artificial Sequence
  Description of Artificial Sequence: Synthetic epitope
EEKRVGKDDS

SEQ ID NO: 15614 - protein, 10 aa, Artificial Sequence
  Description of Artificial Sequence: Synthetic epitope
EEKSKSLAKL

SEQ ID NO: 15615 - protein, 10 aa, Artificial Sequence
  Description of Artificial Sequence: Synthetic epitope
EEKSSDFSGE

SEQ ID NO: 15616 - protein, 10 aa, Artificial Sequence
  Description of Artificial Sequence: Synthetic epitope
EEKSSKAESG

SEQ ID NO: 15617 - protein, 10 aa, Artificial Sequence
  Description of Artificial Sequence: Synthetic epitope
EEKTKLPSSV

SEQ ID NO: 15618 - protein, 10 aa, Artificial Sequence
  Description of Artificial Sequence: Synthetic epitope
EEKVAALNIQ

SEQ ID NO: 15619 - protein, 10 aa, Artificial Sequence
  Description of Artificial Sequence: Synthetic epitope
EEKVKKALAQ

SEQ ID NO: 15620 - protein, 10 aa, Artificial Sequence
  Description of Artificial Sequence: Synthetic epitope
EEKVSRLETE

SEQ ID NO: 15621 - protein, 10 aa, Artificial Sequence
  Description of Artificial Sequence: Synthetic epitope
EEKVTTIMEM

SEQ ID NO: 15622 - protein, 10 aa, Artificial Sequence
  Description of Artificial Sequence: Synthetic epitope
EEKVVEAKIT

SEQ ID NO: 15623 - protein, 10 aa, Artificial Sequence
  Description of Artificial Sequence: Synthetic epitope
EELALSRQAT

SEQ ID NO: 15624 - protein, 10 aa, Artificial Sequence
  Description of Artificial Sequence: Synthetic epitope
EELASKELAA

SEQ ID NO: 15625 - protein, 10 aa, Artificial Sequence
  Description of Artificial Sequence: Synthetic epitope
EELDADKAEM

SEQ ID NO: 15626 - protein, 10 aa, Artificial Sequence
  Description of Artificial Sequence: Synthetic epitope
EELEAVELKK

SEQ ID NO: 15627 - protein, 10 aa, Artificial Sequence
  Description of Artificial Sequence: Synthetic epitope
EELEAVLQLT

SEQ ID NO: 15628 - protein, 10 aa, Artificial Sequence
  Description of Artificial Sequence: Synthetic epitope
EELGKAKPTT

SEQ ID NO: 15629 - protein, 10 aa, Artificial Sequence
  Description of Artificial Sequence: Synthetic epitope
EELIAVKLRE

SEQ ID NO: 15630 - protein, 10 aa, Artificial Sequence
  Description of Artificial Sequence: Synthetic epitope
EELIEENNDM

SEQ ID NO: 15631 - protein, 10 aa, Artificial Sequence
  Description of Artificial Sequence: Synthetic epitope
EELISARIRT

SEQ ID NO: 15632 - protein, 10 aa, Artificial Sequence
  Description of Artificial Sequence: Synthetic epitope
EELKAASRGN

SEQ ID NO: 15633 - protein, 10 aa, Artificial Sequence
  Description of Artificial Sequence: Synthetic epitope
EELKASDVLA

SEQ ID NO: 15634 - protein, 10 aa, Artificial Sequence
  Description of Artificial Sequence: Synthetic epitope
EELKLEKKIK

SEQ ID NO: 15635 - protein, 10 aa, Artificial Sequence
  Description of Artificial Sequence: Synthetic epitope
EELLESLINE

SEQ ID NO: 15636 - protein, 10 aa, Artificial Sequence
  Description of Artificial Sequence: Synthetic epitope
EELLFAFRKE

SEQ ID NO: 15637 - protein, 10 aa, Artificial Sequence
  Description of Artificial Sequence: Synthetic epitope
EELLIERVSH

SEQ ID NO: 15638 - protein, 10 aa, Artificial Sequence
  Description of Artificial Sequence: Synthetic epitope
EELLKLATSI

SEQ ID NO: 15639 - protein, 10 aa, Artificial Sequence
  Description of Artificial Sequence: Synthetic epitope
EELMQMLIQM

SEQ ID NO: 15640 - protein, 10 aa, Artificial Sequence
  Description of Artificial Sequence: Synthetic epitope
EELMVKGVGV

SEQ ID NO: 15641 - protein, 10 aa, Artificial Sequence
  Description of Artificial Sequence: Synthetic epitope
EELQAVESSP

SEQ ID NO: 15642 - protein, 10 aa, Artificial Sequence
  Description of Artificial Sequence: Synthetic epitope
EELQKQAAQE

SEQ ID NO: 15643 - protein, 10 aa, Artificial Sequence
  Description of Artificial Sequence: Synthetic epitope
EELQQALIVK

SEQ ID NO: 15644 - protein, 10 aa, Artificial Sequence
  Description of Artificial Sequence: Synthetic epitope
EELQSTDSLE

SEQ ID NO: 15645 - protein, 10 aa, Artificial Sequence
  Description of Artificial Sequence: Synthetic epitope
EELQSVSGTT

SEQ ID NO: 15646 - protein, 10 aa, Artificial Sequence
  Description of Artificial Sequence: Synthetic epitope
EELQVVQVSE

SEQ ID NO: 15647 - protein, 10 aa, Artificial Sequence
  Description of Artificial Sequence: Synthetic epitope
EELRADSAHW

SEQ ID NO: 15648 - protein, 10 aa, Artificial Sequence
  Description of Artificial Sequence: Synthetic epitope
EELRQEFFHM

SEQ ID NO: 15649 - protein, 10 aa, Artificial Sequence
  Description of Artificial Sequence: Synthetic epitope
EELSESVHGL

SEQ ID NO: 15650 - protein, 10 aa, Artificial Sequence
  Description of Artificial Sequence: Synthetic epitope
EELSKAVKMP

SEQ ID NO: 15651 - protein, 10 aa, Artificial Sequence
  Description of Artificial Sequence: Synthetic epitope
EELSLVASEA

SEQ ID NO: 15652 - protein, 10 aa, Artificial Sequence
  Description of Artificial Sequence: Synthetic epitope
EELSMVMSSK

SEQ ID NO: 15653 - protein, 10 aa, Artificial Sequence
  Description of Artificial Sequence: Synthetic epitope
EELSVQQETE

SEQ ID NO: 15654 - protein, 10 aa, Artificial Sequence
  Description of Artificial Sequence: Synthetic epitope
EELSVVNHAY

SEQ ID NO: 15655 - protein, 10 aa, Artificial Sequence
  Description of Artificial Sequence: Synthetic epitope
EELTSPLKDP

SEQ ID NO: 15656 - protein, 10 aa, Artificial Sequence
  Description of Artificial Sequence: Synthetic epitope
EELTSTLIDR

SEQ ID NO: 15657 - protein, 10 aa, Artificial Sequence
  Description of Artificial Sequence: Synthetic epitope
EELVAKRVEE

SEQ ID NO: 15658 - protein, 10 aa, Artificial Sequence
  Description of Artificial Sequence: Synthetic epitope
EELVKKVTEK

SEQ ID NO: 15659 - protein, 10 aa, Artificial Sequence
  Description of Artificial Sequence: Synthetic epitope
EELVTISSFL

SEQ ID NO: 15660 - protein, 10 aa, Artificial Sequence
  Description of Artificial Sequence: Synthetic epitope
EEMEMTTNKL

SEQ ID NO: 15661 - protein, 10 aa, Artificial Sequence
  Description of Artificial Sequence: Synthetic epitope
EEMIRHREQE

SEQ ID NO: 15662 - protein, 10 aa, Artificial Sequence
  Description of Artificial Sequence: Synthetic epitope
EEMKAKNTSQ

SEQ ID NO: 15663 - protein, 10 aa, Artificial Sequence
  Description of Artificial Sequence: Synthetic epitope
EEMKTTLKNR

SEQ ID NO: 15664 - protein, 10 aa, Artificial Sequence
  Description of Artificial Sequence: Synthetic epitope
EEMLERRAQE

SEQ ID NO: 15665 - protein, 10 aa, Artificial Sequence
  Description of Artificial Sequence: Synthetic epitope
EEMMDSSTFK

SEQ ID NO: 15666 - protein, 10 aa, Artificial Sequence
  Description of Artificial Sequence: Synthetic epitope
EEMPESGAGS

SEQ ID NO: 15667 - protein, 10 aa, Artificial Sequence
  Description of Artificial Sequence: Synthetic epitope
EEMPSETKAK

SEQ ID NO: 15668 - protein, 10 aa, Artificial Sequence
  Description of Artificial Sequence: Synthetic epitope
EEMQVKEVVE

SEQ ID NO: 15669 - protein, 10 aa, Artificial Sequence
  Description of Artificial Sequence: Synthetic epitope
EEMTKRDDKR

SEQ ID NO: 15670 - protein, 10 aa, Artificial Sequence
  Description of Artificial Sequence: Synthetic epitope
EEMVIEVGEM

SEQ ID NO: 15671 - protein, 10 aa, Artificial Sequence
  Description of Artificial Sequence: Synthetic epitope
EENAQSRQES

SEQ ID NO: 15672 - protein, 10 aa, Artificial Sequence
  Description of Artificial Sequence: Synthetic epitope
EENDASLANS

SEQ ID NO: 15673 - protein, 10 aa, Artificial Sequence
  Description of Artificial Sequence: Synthetic epitope
EENDDKITQA

SEQ ID NO: 15674 - protein, 10 aa, Artificial Sequence
  Description of Artificial Sequence: Synthetic epitope
EENDETASPA

SEQ ID NO: 15675 - protein, 10 aa, Artificial Sequence
  Description of Artificial Sequence: Synthetic epitope
EENEKETAVS

SEQ ID NO: 15676 - protein, 10 aa, Artificial Sequence
  Description of Artificial Sequence: Synthetic epitope
EENGTVKKAI

SEQ ID NO: 15677 - protein, 10 aa, Artificial Sequence
  Description of Artificial Sequence: Synthetic epitope
EENIDKILPI

SEQ ID NO: 15678 - protein, 10 aa, Artificial Sequence
  Description of Artificial Sequence: Synthetic epitope
EENIEAERAA

SEQ ID NO: 15679 - protein, 10 aa, Artificial Sequence
  Description of Artificial Sequence: Synthetic epitope
EENKALKIQT

SEQ ID NO: 15680 - protein, 10 aa, Artificial Sequence
  Description of Artificial Sequence: Synthetic epitope
EENKAVEKMP

SEQ ID NO: 15681 - protein, 10 aa, Artificial Sequence
  Description of Artificial Sequence: Synthetic epitope
EENKIPISPI

SEQ ID NO: 15682 - protein, 10 aa, Artificial Sequence
  Description of Artificial Sequence: Synthetic epitope
EENKKAVDKT

SEQ ID NO: 15683 - protein, 10 aa, Artificial Sequence
  Description of Artificial Sequence: Synthetic epitope
EENLSTKTEA

SEQ ID NO: 15684 - protein, 10 aa, Artificial Sequence
  Description of Artificial Sequence: Synthetic epitope
EENQTIRRMA

SEQ ID NO: 15685 - protein, 10 aa, Artificial Sequence
  Description of Artificial Sequence: Synthetic epitope
EENRLSKQLL

SEQ ID NO: 15686 - protein, 10 aa, Artificial Sequence
  Description of Artificial Sequence: Synthetic epitope
EENSFQQGMD

SEQ ID NO: 15687 - protein, 10 aa, Artificial Sequence
  Description of Artificial Sequence: Synthetic epitope
EENSVRSPRK

SEQ ID NO: 15688 - protein, 10 aa, Artificial Sequence
  Description of Artificial Sequence: Synthetic epitope
EENTKEEKPD

SEQ ID NO: 15689 - protein, 10 aa, Artificial Sequence
  Description of Artificial Sequence: Synthetic epitope
EEPAEALALE

SEQ ID NO: 15690 - protein, 10 aa, Artificial Sequence
  Description of Artificial Sequence: Synthetic epitope
EEPAQPEVVE

SEQ ID NO: 15691 - protein, 10 aa, Artificial Sequence
  Description of Artificial Sequence: Synthetic epitope
EEPKTAIKHP

SEQ ID NO: 15692 - protein, 10 aa, Artificial Sequence
  Description of Artificial Sequence: Synthetic epitope
EEPKTITDEF

SEQ ID NO: 15693 - protein, 10 aa, Artificial Sequence
  Description of Artificial Sequence: Synthetic epitope
EEPLKTVQEK

SEQ ID NO: 15694 - protein, 10 aa, Artificial Sequence
  Description of Artificial Sequence: Synthetic epitope
EEPLQMSTNF

SEQ ID NO: 15695 - protein, 10 aa, Artificial Sequence
  Description of Artificial Sequence: Synthetic epitope
EEPLVANVPL

SEQ ID NO: 15696 - protein, 10 aa, Artificial Sequence
  Description of Artificial Sequence: Synthetic epitope
EEPQSGSTAD

SEQ ID NO: 15697 - protein, 10 aa, Artificial Sequence
  Description of Artificial Sequence: Synthetic epitope
EEPRYKKDKQ

SEQ ID NO: 15698 - protein, 10 aa, Artificial Sequence
  Description of Artificial Sequence: Synthetic epitope
EEPSASSPQY

SEQ ID NO: 15699 - protein, 10 aa, Artificial Sequence
  Description of Artificial Sequence: Synthetic epitope
EEPSSGNGTA

SEQ ID NO: 15700 - protein, 10 aa, Artificial Sequence
  Description of Artificial Sequence: Synthetic epitope
EEPTDTLSKH

SEQ ID NO: 15701 - protein, 10 aa, Artificial Sequence
  Description of Artificial Sequence: Synthetic epitope
EEPVLKKWPK

SEQ ID NO: 15702 - protein, 10 aa, Artificial Sequence
  Description of Artificial Sequence: Synthetic epitope
EEPVSYVSGE

SEQ ID NO: 15703 - protein, 10 aa, Artificial Sequence
  Description of Artificial Sequence: Synthetic epitope
EEQALELLSE

SEQ ID NO: 15704 - protein, 10 aa, Artificial Sequence
  Description of Artificial Sequence: Synthetic epitope
EEQATESVSL

SEQ ID NO: 15705 - protein, 10 aa, Artificial Sequence
  Description of Artificial Sequence: Synthetic epitope
EEQATGSKSL

SEQ ID NO: 15706 - protein, 10 aa, Artificial Sequence
  Description of Artificial Sequence: Synthetic epitope
EEQDFKEEDF

SEQ ID NO: 15707 - protein, 10 aa, Artificial Sequence
  Description of Artificial Sequence: Synthetic epitope
EEQDLKFQIG

SEQ ID NO: 15708 - protein, 10 aa, Artificial Sequence
  Description of Artificial Sequence: Synthetic epitope
EEQEKANSVQ

SEQ ID NO: 15709 - protein, 10 aa, Artificial Sequence
  Description of Artificial Sequence: Synthetic epitope
EEQELRAQLE

SEQ ID NO: 15710 - protein, 10 aa, Artificial Sequence
  Description of Artificial Sequence: Synthetic epitope
EEQGMILKQT

SEQ ID NO: 15711 - protein, 10 aa, Artificial Sequence
  Description of Artificial Sequence: Synthetic epitope
EEQIKTKPPK

SEQ ID NO: 15712 - protein, 10 aa, Artificial Sequence
  Description of Artificial Sequence: Synthetic epitope
EEQILAKIVE

SEQ ID NO: 15713 - protein, 10 aa, Artificial Sequence
  Description of Artificial Sequence: Synthetic epitope
EEQKAFTNEN

SEQ ID NO: 15714 - protein, 10 aa, Artificial Sequence
  Description of Artificial Sequence: Synthetic epitope
EEQKTVLQEK

SEQ ID NO: 15715 - protein, 10 aa, Artificial Sequence
  Description of Artificial Sequence: Synthetic epitope
EEQLKIDEAE

SEQ ID NO: 15716 - protein, 10 aa, Artificial Sequence
  Description of Artificial Sequence: Synthetic epitope
EEQLKKETAA

SEQ ID NO: 15717 - protein, 10 aa, Artificial Sequence
  Description of Artificial Sequence: Synthetic epitope
EEQLLKQKMD

SEQ ID NO: 15718 - protein, 10 aa, Artificial Sequence
  Description of Artificial Sequence: Synthetic epitope
EEQLTEGQIA

SEQ ID NO: 15719 - protein, 10 aa, Artificial Sequence
  Description of Artificial Sequence: Synthetic epitope
EEQLTTVNGS

SEQ ID NO: 15720 - protein, 10 aa, Artificial Sequence
  Description of Artificial Sequence: Synthetic epitope
EEQMASIKKD

SEQ ID NO: 15721 - protein, 10 aa, Artificial Sequence
  Description of Artificial Sequence: Synthetic epitope
EEQMAYLQQK

SEQ ID NO: 15722 - protein, 10 aa, Artificial Sequence
  Description of Artificial Sequence: Synthetic epitope
EEQPNSATNL

SEQ ID NO: 15723 - protein, 10 aa, Artificial Sequence
  Description of Artificial Sequence: Synthetic epitope
EEQPSYKDSQ

SEQ ID NO: 15724 - protein, 10 aa, Artificial Sequence
  Description of Artificial Sequence: Synthetic epitope
EEQQSKDDKN

SEQ ID NO: 15725 - protein, 10 aa, Artificial Sequence
  Description of Artificial Sequence: Synthetic epitope
EEQTSEQDST

SEQ ID NO: 15726 - protein, 10 aa, Artificial Sequence
  Description of Artificial Sequence: Synthetic epitope
EEQTVELSTE

SEQ ID NO: 15727 - protein, 10 aa, Artificial Sequence
  Description of Artificial Sequence: Synthetic epitope
EEQVAQDTEE

SEQ ID NO: 15728 - protein, 10 aa, Artificial Sequence
  Description of Artificial Sequence: Synthetic epitope
EEQVASILNG

SEQ ID NO: 15729 - protein, 10 aa, Artificial Sequence
  Description of Artificial Sequence: Synthetic epitope
EEQVILTEKD

SEQ ID NO: 15730 - protein, 10 aa, Artificial Sequence
  Description of Artificial Sequence: Synthetic epitope
EEQYLQSGDQ

SEQ ID NO: 15731 - protein, 10 aa, Artificial Sequence
  Description of Artificial Sequence: Synthetic epitope
EERAALAAEN

SEQ ID NO: 15732 - protein, 10 aa, Artificial Sequence
  Description of Artificial Sequence: Synthetic epitope
EERAEVSELK

SEQ ID NO: 15733 - protein, 10 aa, Artificial Sequence
  Description of Artificial Sequence: Synthetic epitope
EERANQIDEK

SEQ ID NO: 15734 - protein, 10 aa, Artificial Sequence
  Description of Artificial Sequence: Synthetic epitope
EERDAQSWTI

SEQ ID NO: 15735 - protein, 10 aa, Artificial Sequence
  Description of Artificial Sequence: Synthetic epitope
EERDIKKTRK

SEQ ID NO: 15736 - protein, 10 aa, Artificial Sequence
  Description of Artificial Sequence: Synthetic epitope
EEREREALML

SEQ ID NO: 15737 - protein, 10 aa, Artificial Sequence
  Description of Artificial Sequence: Synthetic epitope
EERGSALAAE

SEQ ID NO: 15738 - protein, 10 aa, Artificial Sequence
  Description of Artificial Sequence: Synthetic epitope
EERGSTDKAR

SEQ ID NO: 15739 - protein, 10 aa, Artificial Sequence
  Description of Artificial Sequence: Synthetic epitope
EERHEQKHEQ

SEQ ID NO: 15740 - protein, 10 aa, Artificial Sequence
  Description of Artificial Sequence: Synthetic epitope
EERIISATSQ

SEQ ID NO: 15741 - protein, 10 aa, Artificial Sequence
  Description of Artificial Sequence: Synthetic epitope
EERKGTLNRD

SEQ ID NO: 15742 - protein, 10 aa, Artificial Sequence
  Description of Artificial Sequence: Synthetic epitope
EERKLLDADA

SEQ ID NO: 15743 - protein, 10 aa, Artificial Sequence
  Description of Artificial Sequence: Synthetic epitope
EERKVVEARA

SEQ ID NO: 15744 - protein, 10 aa, Artificial Sequence
  Description of Artificial Sequence: Synthetic epitope
EERLAEFISS

SEQ ID NO: 15745 - protein, 10 aa, Artificial Sequence
  Description of Artificial Sequence: Synthetic epitope
EERLTDTEAE

SEQ ID NO: 15746 - protein, 10 aa, Artificial Sequence
  Description of Artificial Sequence: Synthetic epitope
EERQEQTKRM

SEQ ID NO: 15747 - protein, 10 aa, Artificial Sequence
  Description of Artificial Sequence: Synthetic epitope
EERRPADSAQ

SEQ ID NO: 15748 - protein, 10 aa, Artificial Sequence
  Description of Artificial Sequence: Synthetic epitope
EERRSSAAGK

SEQ ID NO: 15749 - protein, 10 aa, Artificial Sequence
  Description of Artificial Sequence: Synthetic epitope
EERSLQSSAA

SEQ ID NO: 15750 - protein, 10 aa, Artificial Sequence
  Description of Artificial Sequence: Synthetic epitope
EERSQELQAQ

SEQ ID NO: 15751 - protein, 10 aa, Artificial Sequence
  Description of Artificial Sequence: Synthetic epitope
EERTAVKLNT

SEQ ID NO: 15752 - protein, 10 aa, Artificial Sequence
  Description of Artificial Sequence: Synthetic epitope
EESAETGASS

SEQ ID NO: 15753 - protein, 10 aa, Artificial Sequence
  Description of Artificial Sequence: Synthetic epitope
EESAKEAPPS

SEQ ID NO: 15754 - protein, 10 aa, Artificial Sequence
  Description of Artificial Sequence: Synthetic epitope
EESDSSETEK

SEQ ID NO: 15755 - protein, 10 aa, Artificial Sequence
  Description of Artificial Sequence: Synthetic epitope
EESDYISTKK

SEQ ID NO: 15756 - protein, 10 aa, Artificial Sequence
  Description of Artificial Sequence: Synthetic epitope
EESEAMAEKF

SEQ ID NO: 15757 - protein, 10 aa, Artificial Sequence
  Description of Artificial Sequence: Synthetic epitope
EESEETSSPP

SEQ ID NO: 15758 - protein, 10 aa, Artificial Sequence
  Description of Artificial Sequence: Synthetic epitope
EESEKTEDSR

SEQ ID NO: 15759 - protein, 10 aa, Artificial Sequence
  Description of Artificial Sequence: Synthetic epitope
EESEMAEASR

SEQ ID NO: 15760 - protein, 10 aa, Artificial Sequence
  Description of Artificial Sequence: Synthetic epitope
EESEMSEKKS

SEQ ID NO: 15761 - protein, 10 aa, Artificial Sequence
  Description of Artificial Sequence: Synthetic epitope
EESGAKVDSP

SEQ ID NO: 15762 - protein, 10 aa, Artificial Sequence
  Description of Artificial Sequence: Synthetic epitope
EESGITNSAS

SEQ ID NO: 15763 - protein, 10 aa, Artificial Sequence
  Description of Artificial Sequence: Synthetic epitope
EESHQEATEK

SEQ ID NO: 15764 - protein, 10 aa, Artificial Sequence
  Description of Artificial Sequence: Synthetic epitope
EESHVPVIEE

SEQ ID NO: 15765 - protein, 10 aa, Artificial Sequence
  Description of Artificial Sequence: Synthetic epitope
EESIAAVPGR

SEQ ID NO: 15766 - protein, 10 aa, Artificial Sequence
  Description of Artificial Sequence: Synthetic epitope
EESITVSDKE

SEQ ID NO: 15767 - protein, 10 aa, Artificial Sequence
  Description of Artificial Sequence: Synthetic epitope
EESKEPVADE

SEQ ID NO: 15768 - protein, 10 aa, Artificial Sequence
  Description of Artificial Sequence: Synthetic epitope
EESLAVQDVN

SEQ ID NO: 15769 - protein, 10 aa, Artificial Sequence
  Description of Artificial Sequence: Synthetic epitope
EESLLANVAS

SEQ ID NO: 15770 - protein, 10 aa, Artificial Sequence
  Description of Artificial Sequence: Synthetic epitope
EESLRHVDAS

SEQ ID NO: 15771 - protein, 10 aa, Artificial Sequence
  Description of Artificial Sequence: Synthetic epitope
EESLRTSERK

SEQ ID NO: 15772 - protein, 10 aa, Artificial Sequence
  Description of Artificial Sequence: Synthetic epitope
EESLSSQASG

SEQ ID NO: 15773 - protein, 10 aa, Artificial Sequence
  Description of Artificial Sequence: Synthetic epitope
EESMMVRLSV

SEQ ID NO: 15774 - protein, 10 aa, Artificial Sequence
  Description of Artificial Sequence: Synthetic epitope
EESNADLTTL

SEQ ID NO: 15775 - protein, 10 aa, Artificial Sequence
  Description of Artificial Sequence: Synthetic epitope
EESNALQSTV

SEQ ID NO: 15776 - protein, 10 aa, Artificial Sequence
  Description of Artificial Sequence: Synthetic epitope
EESNKKLALE

SEQ ID NO: 15777 - protein, 10 aa, Artificial Sequence
  Description of Artificial Sequence: Synthetic epitope
EESNMKENVD

SEQ ID NO: 15778 - protein, 10 aa, Artificial Sequence
  Description of Artificial Sequence: Synthetic epitope
EESNTSKVPT

SEQ ID NO: 15779 - protein, 10 aa, Artificial Sequence
  Description of Artificial Sequence: Synthetic epitope
EESQSAPVQK

SEQ ID NO: 15780 - protein, 10 aa, Artificial Sequence
  Description of Artificial Sequence: Synthetic epitope
EESQSLTIPM

SEQ ID NO: 15781 - protein, 10 aa, Artificial Sequence
  Description of Artificial Sequence: Synthetic epitope
EESRKTNEET

SEQ ID NO: 15782 - protein, 10 aa, Artificial Sequence
  Description of Artificial Sequence: Synthetic epitope
EESRSTRTLE

SEQ ID NO: 15783 - protein, 10 aa, Artificial Sequence
  Description of Artificial Sequence: Synthetic epitope
EESRSTSEKS

SEQ ID NO: 15784 - protein, 10 aa, Artificial Sequence
  Description of Artificial Sequence: Synthetic epitope
EESRSYGRNH

SEQ ID NO: 15785 - protein, 10 aa, Artificial Sequence
  Description of Artificial Sequence: Synthetic epitope
EESSEAGNQR

SEQ ID NO: 15786 - protein, 10 aa, Artificial Sequence
  Description of Artificial Sequence: Synthetic epitope
EESSGNISKD

SEQ ID NO: 15787 - protein, 10 aa, Artificial Sequence
  Description of Artificial Sequence: Synthetic epitope
EESSITNTPK

SEQ ID NO: 15788 - protein, 10 aa, Artificial Sequence
  Description of Artificial Sequence: Synthetic epitope
EESSKSSDPF

SEQ ID NO: 15789 - protein, 10 aa, Artificial Sequence
  Description of Artificial Sequence: Synthetic epitope
EESSRLLGPD

SEQ ID NO: 15790 - protein, 10 aa, Artificial Sequence
  Description of Artificial Sequence: Synthetic epitope
EESTNMVEFM

SEQ ID NO: 15791 - protein, 10 aa, Artificial Sequence
  Description of Artificial Sequence: Synthetic epitope
EESVSASTPA

SEQ ID NO: 15792 - protein, 10 aa, Artificial Sequence
  Description of Artificial Sequence: Synthetic epitope
EESVTESTKQ

SEQ ID NO: 15793 - protein, 10 aa, Artificial Sequence
  Description of Artificial Sequence: Synthetic epitope
EESWLQSEYD

SEQ ID NO: 15794 - protein, 10 aa, Artificial Sequence
  Description of Artificial Sequence: Synthetic epitope
EESYESKQSH

SEQ ID NO: 15795 - protein, 10 aa, Artificial Sequence
  Description of Artificial Sequence: Synthetic epitope
EESYNMELEA

SEQ ID NO: 15796 - protein, 10 aa, Artificial Sequence
  Description of Artificial Sequence: Synthetic epitope
EETAALTEKV

SEQ ID NO: 15797 - protein, 10 aa, Artificial Sequence
  Description of Artificial Sequence: Synthetic epitope
EETAEVGRGA

SEQ ID NO: 15798 - protein, 10 aa, Artificial Sequence
  Description of Artificial Sequence: Synthetic epitope
EETAGGQTLA

SEQ ID NO: 15799 - protein, 10 aa, Artificial Sequence
  Description of Artificial Sequence: Synthetic epitope
EETARALYSL

SEQ ID NO: 15800 - protein, 10 aa, Artificial Sequence
  Description of Artificial Sequence: Synthetic epitope
EETASKAERT

SEQ ID NO: 15801 - protein, 10 aa, Artificial Sequence
  Description of Artificial Sequence: Synthetic epitope
EETATRSTEE

SEQ ID NO: 15802 - protein, 10 aa, Artificial Sequence
  Description of Artificial Sequence: Synthetic epitope
EETEHNVLKI

SEQ ID NO: 15803 - protein, 10 aa, Artificial Sequence
  Description of Artificial Sequence: Synthetic epitope
EETELDNLTE

SEQ ID NO: 15804 - protein, 10 aa, Artificial Sequence
  Description of Artificial Sequence: Synthetic epitope
EETETEKMTH

SEQ ID NO: 15805 - protein, 10 aa, Artificial Sequence
  Description of Artificial Sequence: Synthetic epitope
EETISSLERK

SEQ ID NO: 15806 - protein, 10 aa, Artificial Sequence
  Description of Artificial Sequence: Synthetic epitope
EETITESFGN

SEQ ID NO: 15807 - protein, 10 aa, Artificial Sequence
  Description of Artificial Sequence: Synthetic epitope
EETKKLANKY

SEQ ID NO: 15808 - protein, 10 aa, Artificial Sequence
  Description of Artificial Sequence: Synthetic epitope
EETLLFQTEL

SEQ ID NO: 15809 - protein, 10 aa, Artificial Sequence
  Description of Artificial Sequence: Synthetic epitope
EETLTIEARF

SEQ ID NO: 15810 - protein, 10 aa, Artificial Sequence
  Description of Artificial Sequence: Synthetic epitope
EETMMVMTED

SEQ ID NO: 15811 - protein, 10 aa, Artificial Sequence
  Description of Artificial Sequence: Synthetic epitope
EETNDFKQET

SEQ ID NO: 15812 - protein, 10 aa, Artificial Sequence
  Description of Artificial Sequence: Synthetic epitope
EETNEWPLES

SEQ ID NO: 15813 - protein, 10 aa, Artificial Sequence
  Description of Artificial Sequence: Synthetic epitope
EETNSFLKAI

SEQ ID NO: 15814 - protein, 10 aa, Artificial Sequence
  Description of Artificial Sequence: Synthetic epitope
EETNSVATLS

SEQ ID NO: 15815 - protein, 10 aa, Artificial Sequence
  Description of Artificial Sequence: Synthetic epitope
EETPAAVLSS

SEQ ID NO: 15816 - protein, 10 aa, Artificial Sequence
  Description of Artificial Sequence: Synthetic epitope
EETPEEKQTT

SEQ ID NO: 15817 - protein, 10 aa, Artificial Sequence
  Description of Artificial Sequence: Synthetic epitope
EETPKIEKED

SEQ ID NO: 15818 - protein, 10 aa, Artificial Sequence
  Description of Artificial Sequence: Synthetic epitope
EETPYSYPTG

SEQ ID NO: 15819 - protein, 10 aa, Artificial Sequence
  Description of Artificial Sequence: Synthetic epitope
EETQKLLEDQ

SEQ ID NO: 15820 - protein, 10 aa, Artificial Sequence
  Description of Artificial Sequence: Synthetic epitope
EETQVQEMTL

SEQ ID NO: 15821 - protein, 10 aa, Artificial Sequence
  Description of Artificial Sequence: Synthetic epitope
EETRIQIPKL

SEQ ID NO: 15822 - protein, 10 aa, Artificial Sequence
  Description of Artificial Sequence: Synthetic epitope
EETRKIRKLL

SEQ ID NO: 15823 - protein, 10 aa, Artificial Sequence
  Description of Artificial Sequence: Synthetic epitope
EETSRSKQKS

SEQ ID NO: 15824 - protein, 10 aa, Artificial Sequence
  Description of Artificial Sequence: Synthetic epitope
EETSSDVKSS

SEQ ID NO: 15825 - protein, 10 aa, Artificial Sequence
  Description of Artificial Sequence: Synthetic epitope
EETSSEVKPP

SEQ ID NO: 15826 - protein, 10 aa, Artificial Sequence
  Description of Artificial Sequence: Synthetic epitope
EETTGSAEST

SEQ ID NO: 15827 - protein, 10 aa, Artificial Sequence
  Description of Artificial Sequence: Synthetic epitope
EETTSTPTRE

SEQ ID NO: 15828 - protein, 10 aa, Artificial Sequence
  Description of Artificial Sequence: Synthetic epitope
EETVDLESKS

SEQ ID NO: 15829 - protein, 10 aa, Artificial Sequence
  Description of Artificial Sequence: Synthetic epitope
EETYLILKDQ

SEQ ID NO: 15830 - protein, 10 aa, Artificial Sequence
  Description of Artificial Sequence: Synthetic epitope
EEVADGARQQ

SEQ ID NO: 15831 - protein, 10 aa, Artificial Sequence
  Description of Artificial Sequence: Synthetic epitope
EEVAIERDQA

SEQ ID NO: 15832 - protein, 10 aa, Artificial Sequence
  Description of Artificial Sequence: Synthetic epitope
EEVALKIIND

SEQ ID NO: 15833 - protein, 10 aa, Artificial Sequence
  Description of Artificial Sequence: Synthetic epitope
EEVASDIQMQ

SEQ ID NO: 15834 - protein, 10 aa, Artificial Sequence
  Description of Artificial Sequence: Synthetic epitope
EEVATPTTDE

SEQ ID NO: 15835 - protein, 10 aa, Artificial Sequence
  Description of Artificial Sequence: Synthetic epitope
EEVDITMSEE

SEQ ID NO: 15836 - protein, 10 aa, Artificial Sequence
  Description of Artificial Sequence: Synthetic epitope
EEVEKDVHAA

SEQ ID NO: 15837 - protein, 10 aa, Artificial Sequence
  Description of Artificial Sequence: Synthetic epitope
EEVELVLAPS

SEQ ID NO: 15838 - protein, 10 aa, Artificial Sequence
  Description of Artificial Sequence: Synthetic epitope
EEVEMKLQKN

SEQ ID NO: 15839 - protein, 10 aa, Artificial Sequence
  Description of Artificial Sequence: Synthetic epitope
EEVEQKIAGQ

SEQ ID NO: 15840 - protein, 10 aa, Artificial Sequence
  Description of Artificial Sequence: Synthetic epitope
EEVESAISNG

SEQ ID NO: 15841 - protein, 10 aa, Artificial Sequence
  Description of Artificial Sequence: Synthetic epitope
EEVESRAYAD

SEQ ID NO: 15842 - protein, 10 aa, Artificial Sequence
  Description of Artificial Sequence: Synthetic epitope
EEVIEKSKVV

SEQ ID NO: 15843 - protein, 10 aa, Artificial Sequence
  Description of Artificial Sequence: Synthetic epitope
EEVIGSELKH

SEQ ID NO: 15844 - protein, 10 aa, Artificial Sequence
  Description of Artificial Sequence: Synthetic epitope
EEVIREESAA

SEQ ID NO: 15845 - protein, 10 aa, Artificial Sequence
  Description of Artificial Sequence: Synthetic epitope
EEVKARAAQM

SEQ ID NO: 15846 - protein, 10 aa, Artificial Sequence
  Description of Artificial Sequence: Synthetic epitope
EEVKLSTLTG

SEQ ID NO: 15847 - protein, 10 aa, Artificial Sequence
  Description of Artificial Sequence: Synthetic epitope
EEVKNFITRE

SEQ ID NO: 15848 - protein, 10 aa, Artificial Sequence
  Description of Artificial Sequence: Synthetic epitope
EEVLETADKE

SEQ ID NO: 15849 - protein, 10 aa, Artificial Sequence
  Description of Artificial Sequence: Synthetic epitope
EEVLSLKVTE

SEQ ID NO: 15850 - protein, 10 aa, Artificial Sequence
  Description of Artificial Sequence: Synthetic epitope
EEVMAEESTD

SEQ ID NO: 15851 - protein, 10 aa, Artificial Sequence
  Description of Artificial Sequence: Synthetic epitope
EEVMSVEDES

SEQ ID NO: 15852 - protein, 10 aa, Artificial Sequence
  Description of Artificial Sequence: Synthetic epitope
EEVNTDEDQK

SEQ ID NO: 15853 - protein, 10 aa, Artificial Sequence
  Description of Artificial Sequence: Synthetic epitope
EEVQSALYNK

SEQ ID NO: 15854 - protein, 10 aa, Artificial Sequence
  Description of Artificial Sequence: Synthetic epitope
EEVSAPAQKQ

SEQ ID NO: 15855 - protein, 10 aa, Artificial Sequence
  Description of Artificial Sequence: Synthetic epitope
EEVSATEAAP

SEQ ID NO: 15856 - protein, 10 aa, Artificial Sequence
  Description of Artificial Sequence: Synthetic epitope
EEVSRSELRS

SEQ ID NO: 15857 - protein, 10 aa, Artificial Sequence
  Description of Artificial Sequence: Synthetic epitope
EEVSSADISS

SEQ ID NO: 15858 - protein, 10 aa, Artificial Sequence
  Description of Artificial Sequence: Synthetic epitope
EEVSYESAGY

SEQ ID NO: 15859 - protein, 10 aa, Artificial Sequence
  Description of Artificial Sequence: Synthetic epitope
EEVTAQKTED

SEQ ID NO: 15860 - protein, 10 aa, Artificial Sequence
  Description of Artificial Sequence: Synthetic epitope
EEVTPIAVEM

SEQ ID NO: 15861 - protein, 10 aa, Artificial Sequence
  Description of Artificial Sequence: Synthetic epitope
EEVTQSQLDS

SEQ ID NO: 15862 - protein, 10 aa, Artificial Sequence
  Description of Artificial Sequence: Synthetic epitope
EEVTSSEDKR

SEQ ID NO: 15863 - protein, 10 aa, Artificial Sequence
  Description of Artificial Sequence: Synthetic epitope
EEVVQTLANS

SEQ ID NO: 15864 - protein, 10 aa, Artificial Sequence
  Description of Artificial Sequence: Synthetic epitope
EEVVTLDEET

SEQ ID NO: 15865 - protein, 10 aa, Artificial Sequence
  Description of Artificial Sequence: Synthetic epitope
EEVYRFGAES

SEQ ID NO: 15866 - protein, 10 aa, Artificial Sequence
  Description of Artificial Sequence: Synthetic epitope
EEWQVSDVEK

SEQ ID NO: 15867 - protein, 10 aa, Artificial Sequence
  Description of Artificial Sequence: Synthetic epitope
EEYEDKKHAG

SEQ ID NO: 15868 - protein, 10 aa, Artificial Sequence
  Description of Artificial Sequence: Synthetic epitope
EEYEHAVQRR

SEQ ID NO: 15869 - protein, 10 aa, Artificial Sequence
  Description of Artificial Sequence: Synthetic epitope
EEYETALTVL

SEQ ID NO: 15870 - protein, 10 aa, Artificial Sequence
  Description of Artificial Sequence: Synthetic epitope
EEYETQSSAE

SEQ ID NO: 15871 - protein, 10 aa, Artificial Sequence
  Description of Artificial Sequence: Synthetic epitope
EEYFARQISS

SEQ ID NO: 15872 - protein, 10 aa, Artificial Sequence
  Description of Artificial Sequence: Synthetic epitope
EEYNKEFAEV

SEQ ID NO: 15873 - protein, 10 aa, Artificial Sequence
  Description of Artificial Sequence: Synthetic epitope
EEYQKSLLEQ

SEQ ID NO: 15874 - protein, 10 aa, Artificial Sequence
  Description of Artificial Sequence: Synthetic epitope
EFAKQTSLDA

SEQ ID NO: 15875 - protein, 10 aa, Artificial Sequence
  Description of Artificial Sequence: Synthetic epitope
EFALVKHEKE

SEQ ID NO: 15876 - protein, 10 aa, Artificial Sequence
  Description of Artificial Sequence: Synthetic epitope
EFAPFQKAAK

SEQ ID NO: 15877 - protein, 10 aa, Artificial Sequence
  Description of Artificial Sequence: Synthetic epitope
EFDEKVTGGP

SEQ ID NO: 15878 - protein, 10 aa, Artificial Sequence
  Description of Artificial Sequence: Synthetic epitope
EFDIHQVIKE

SEQ ID NO: 15879 - protein, 10 aa, Artificial Sequence
  Description of Artificial Sequence: Synthetic epitope
EFEAIKNKQD

SEQ ID NO: 15880 - protein, 10 aa, Artificial Sequence
  Description of Artificial Sequence: Synthetic epitope
EFEANKILHQ

SEQ ID NO: 15881 - protein, 10 aa, Artificial Sequence
  Description of Artificial Sequence: Synthetic epitope
EFEDSLATDD

SEQ ID NO: 15882 - protein, 10 aa, Artificial Sequence
  Description of Artificial Sequence: Synthetic epitope
EFEEPHNYEA

SEQ ID NO: 15883 - protein, 10 aa, Artificial Sequence
  Description of Artificial Sequence: Synthetic epitope
EFELPKTMNN

SEQ ID NO: 15884 - protein, 10 aa, Artificial Sequence
  Description of Artificial Sequence: Synthetic epitope
EFELSKLQQR

SEQ ID NO: 15885 - protein, 10 aa, Artificial Sequence
  Description of Artificial Sequence: Synthetic epitope
EFENAESEAD

SEQ ID NO: 15886 - protein, 10 aa, Artificial Sequence
  Description of Artificial Sequence: Synthetic epitope
EFENAESEAD

SEQ ID NO: 15887 - protein, 10 aa, Artificial Sequence
  Description of Artificial Sequence: Synthetic epitope
EFERRNWVKI

SEQ ID NO: 15888 - protein, 10 aa, Artificial Sequence
  Description of Artificial Sequence: Synthetic epitope
EFFGISQVDA

SEQ ID NO: 15889 - protein, 10 aa, Artificial Sequence
  Description of Artificial Sequence: Synthetic epitope
EFHVRLQMLL

SEQ ID NO: 15890 - protein, 10 aa, Artificial Sequence
  Description of Artificial Sequence: Synthetic epitope
EFIDKAKLSS

SEQ ID NO: 15891 - protein, 10 aa, Artificial Sequence
  Description of Artificial Sequence: Synthetic epitope
EFILKAFSKK

SEQ ID NO: 15892 - protein, 10 aa, Artificial Sequence
  Description of Artificial Sequence: Synthetic epitope
EFITQEENRI

SEQ ID NO: 15893 - protein, 10 aa, Artificial Sequence
  Description of Artificial Sequence: Synthetic epitope
EFKAENSRQS

SEQ ID NO: 15894 - protein, 10 aa, Artificial Sequence
  Description of Artificial Sequence: Synthetic epitope
EFKDMDATSE

SEQ ID NO: 15895 - protein, 10 aa, Artificial Sequence
  Description of Artificial Sequence: Synthetic epitope
EFKIQSTGIW

SEQ ID NO: 15896 - protein, 10 aa, Artificial Sequence
  Description of Artificial Sequence: Synthetic epitope
EFKLELVEKL

SEQ ID NO: 15897 - protein, 10 aa, Artificial Sequence
  Description of Artificial Sequence: Synthetic epitope
EFLASSFEVS

SEQ ID NO: 15898 - protein, 10 aa, Artificial Sequence
  Description of Artificial Sequence: Synthetic epitope
EFLHEQMVHF

SEQ ID NO: 15899 - protein, 10 aa, Artificial Sequence
  Description of Artificial Sequence: Synthetic epitope
EFLKAAMSVE

SEQ ID NO: 15900 - protein, 10 aa, Artificial Sequence
  Description of Artificial Sequence: Synthetic epitope
EFLRAEMARE

SEQ ID NO: 15901 - protein, 10 aa, Artificial Sequence
  Description of Artificial Sequence: Synthetic epitope
EFLRVAKKEK

SEQ ID NO: 15902 - protein, 10 aa, Artificial Sequence
  Description of Artificial Sequence: Synthetic epitope
EFLSLARSKA

SEQ ID NO: 15903 - protein, 10 aa, Artificial Sequence
  Description of Artificial Sequence: Synthetic epitope
EFLSTLYSLD

SEQ ID NO: 15904 - protein, 10 aa, Artificial Sequence
  Description of Artificial Sequence: Synthetic epitope
EFMIKNSVTD

SEQ ID NO: 15905 - protein, 10 aa, Artificial Sequence
  Description of Artificial Sequence: Synthetic epitope
EFNEVSEDYA

SEQ ID NO: 15906 - protein, 10 aa, Artificial Sequence
  Description of Artificial Sequence: Synthetic epitope
EFNTEVATPP

SEQ ID NO: 15907 - protein, 10 aa, Artificial Sequence
  Description of Artificial Sequence: Synthetic epitope
EFNTSQTNED

SEQ ID NO: 15908 - protein, 10 aa, Artificial Sequence
  Description of Artificial Sequence: Synthetic epitope
EFPNRRAHGG

SEQ ID NO: 15909 - protein, 10 aa, Artificial Sequence
  Description of Artificial Sequence: Synthetic epitope
EFPRWVHSAE

SEQ ID NO: 15910 - protein, 10 aa, Artificial Sequence
  Description of Artificial Sequence: Synthetic epitope
EFQQKLSAEE

SEQ ID NO: 15911 - protein, 10 aa, Artificial Sequence
  Description of Artificial Sequence: Synthetic epitope
EFSERAAKER

SEQ ID NO: 15912 - protein, 10 aa, Artificial Sequence
  Description of Artificial Sequence: Synthetic epitope
EFSKAAQSFS

SEQ ID NO: 15913 - protein, 10 aa, Artificial Sequence
  Description of Artificial Sequence: Synthetic epitope
EFSRSKSDNS

SEQ ID NO: 15914 - protein, 10 aa, Artificial Sequence
  Description of Artificial Sequence: Synthetic epitope
EFSSLKFQSA

SEQ ID NO: 15915 - protein, 10 aa, Artificial Sequence
  Description of Artificial Sequence: Synthetic epitope
EFSSPFQMLP

SEQ ID NO: 15916 - protein, 10 aa, Artificial Sequence
  Description of Artificial Sequence: Synthetic epitope
EFTASMESKI

SEQ ID NO: 15917 - protein, 10 aa, Artificial Sequence
  Description of Artificial Sequence: Synthetic epitope
EFTDTLAIKQ

SEQ ID NO: 15918 - protein, 10 aa, Artificial Sequence
  Description of Artificial Sequence: Synthetic epitope
EFTNDWGEKI

SEQ ID NO: 15919 - protein, 10 aa, Artificial Sequence
  Description of Artificial Sequence: Synthetic epitope
EFVIEENLSS

SEQ ID NO: 15920 - protein, 10 aa, Artificial Sequence
  Description of Artificial Sequence: Synthetic epitope
EFVIQEALEE

SEQ ID NO: 15921 - protein, 10 aa, Artificial Sequence
  Description of Artificial Sequence: Synthetic epitope
EFVKSQTTYY

SEQ ID NO: 15922 - protein, 10 aa, Artificial Sequence
  Description of Artificial Sequence: Synthetic epitope
EFVKVSLSRI

SEQ ID NO: 15923 - protein, 10 aa, Artificial Sequence
  Description of Artificial Sequence: Synthetic epitope
EFVLEMSSPQ

SEQ ID NO: 15924 - protein, 10 aa, Artificial Sequence
  Description of Artificial Sequence: Synthetic epitope
EFVRGTLGSM

SEQ ID NO: 15925 - protein, 10 aa, Artificial Sequence
  Description of Artificial Sequence: Synthetic epitope
EFVSDRFVQI

SEQ ID NO: 15926 - protein, 10 aa, Artificial Sequence
  Description of Artificial Sequence: Synthetic epitope
EFWSGALSQP

SEQ ID NO: 15927 - protein, 10 aa, Artificial Sequence
  Description of Artificial Sequence: Synthetic epitope
EFWVMFKMDA

SEQ ID NO: 15928 - protein, 10 aa, Artificial Sequence
  Description of Artificial Sequence: Synthetic epitope
EFYDETLLRS

SEQ ID NO: 15929 - protein, 10 aa, Artificial Sequence
  Description of Artificial Sequence: Synthetic epitope
EFYQKKLRKS

SEQ ID NO: 15930 - protein, 10 aa, Artificial Sequence
  Description of Artificial Sequence: Synthetic epitope
EGAASSAGEQ

SEQ ID NO: 15931 - protein, 10 aa, Artificial Sequence
  Description of Artificial Sequence: Synthetic epitope
EGADSSEADV

SEQ ID NO: 15932 - protein, 10 aa, Artificial Sequence
  Description of Artificial Sequence: Synthetic epitope
EGAENRQVHP

SEQ ID NO: 15933 - protein, 10 aa, Artificial Sequence
  Description of Artificial Sequence: Synthetic epitope
EGAHTEQAEA

SEQ ID NO: 15934 - protein, 10 aa, Artificial Sequence
  Description of Artificial Sequence: Synthetic epitope
EGAISEKLHE

SEQ ID NO: 15935 - protein, 10 aa, Artificial Sequence
  Description of Artificial Sequence: Synthetic epitope
EGAKEALKEA

SEQ ID NO: 15936 - protein, 10 aa, Artificial Sequence
  Description of Artificial Sequence: Synthetic epitope
EGALSNSLIQ

SEQ ID NO: 15937 - protein, 10 aa, Artificial Sequence
  Description of Artificial Sequence: Synthetic epitope
EGALTKGSQE

SEQ ID NO: 15938 - protein, 10 aa, Artificial Sequence
  Description of Artificial Sequence: Synthetic epitope
EGAPVKAAED

SEQ ID NO: 15939 - protein, 10 aa, Artificial Sequence
  Description of Artificial Sequence: Synthetic epitope
EGATEAEISM

SEQ ID NO: 15940 - protein, 10 aa, Artificial Sequence
  Description of Artificial Sequence: Synthetic epitope
EGATSQRKGD

SEQ ID NO: 15941 - protein, 10 aa, Artificial Sequence
  Description of Artificial Sequence: Synthetic epitope
EGAVAVSGMQ

SEQ ID NO: 15942 - protein, 10 aa, Artificial Sequence
  Description of Artificial Sequence: Synthetic epitope
EGAVQLLEST

SEQ ID NO: 15943 - protein, 10 aa, Artificial Sequence
  Description of Artificial Sequence: Synthetic epitope
EGAVQVSRRT

SEQ ID NO: 15944 - protein, 10 aa, Artificial Sequence
  Description of Artificial Sequence: Synthetic epitope
EGDEEQSLET

SEQ ID NO: 15945 - protein, 10 aa, Artificial Sequence
  Description of Artificial Sequence: Synthetic epitope
EGDGSNMDQE

SEQ ID NO: 15946 - protein, 10 aa, Artificial Sequence
  Description of Artificial Sequence: Synthetic epitope
EGDLEQIVET

SEQ ID NO: 15947 - protein, 10 aa, Artificial Sequence
  Description of Artificial Sequence: Synthetic epitope
EGDQEYVSPD

SEQ ID NO: 15948 - protein, 10 aa, Artificial Sequence
  Description of Artificial Sequence: Synthetic epitope
EGDQVSHRGA

SEQ ID NO: 15949 - protein, 10 aa, Artificial Sequence
  Description of Artificial Sequence: Synthetic epitope
EGDSEVIMES

SEQ ID NO: 15950 - protein, 10 aa, Artificial Sequence
  Description of Artificial Sequence: Synthetic epitope
EGDVTSVKDA

SEQ ID NO: 15951 - protein, 10 aa, Artificial Sequence
  Description of Artificial Sequence: Synthetic epitope
EGEEAINSGQ

SEQ ID NO: 15952 - protein, 10 aa, Artificial Sequence
  Description of Artificial Sequence: Synthetic epitope
EGEKTEDESL

SEQ ID NO: 15953 - protein, 10 aa, Artificial Sequence
  Description of Artificial Sequence: Synthetic epitope
EGELTVAQGR

SEQ ID NO: 15954 - protein, 10 aa, Artificial Sequence
  Description of Artificial Sequence: Synthetic epitope
EGEQVAIVAQ

SEQ ID NO: 15955 - protein, 10 aa, Artificial Sequence
  Description of Artificial Sequence: Synthetic epitope
EGERRVGTAS

SEQ ID NO: 15956 - protein, 10 aa, Artificial Sequence
  Description of Artificial Sequence: Synthetic epitope
EGESLVGQMV

SEQ ID NO: 15957 - protein, 10 aa, Artificial Sequence
  Description of Artificial Sequence: Synthetic epitope
EGESNSSETP

SEQ ID NO: 15958 - protein, 10 aa, Artificial Sequence
  Description of Artificial Sequence: Synthetic epitope
EGESVKLSSQ

SEQ ID NO: 15959 - protein, 10 aa, Artificial Sequence
  Description of Artificial Sequence: Synthetic epitope
EGFQMLVEKE

SEQ ID NO: 15960 - protein, 10 aa, Artificial Sequence
  Description of Artificial Sequence: Synthetic epitope
EGGKNASTSA

SEQ ID NO: 15961 - protein, 10 aa, Artificial Sequence
  Description of Artificial Sequence: Synthetic epitope
EGGSAESEGA

SEQ ID NO: 15962 - protein, 10 aa, Artificial Sequence
  Description of Artificial Sequence: Synthetic epitope
EGGSVLEKLE

SEQ ID NO: 15963 - protein, 10 aa, Artificial Sequence
  Description of Artificial Sequence: Synthetic epitope
EGHLQSAQKE

SEQ ID NO: 15964 - protein, 10 aa, Artificial Sequence
  Description of Artificial Sequence: Synthetic epitope
EGHSINTREN

SEQ ID NO: 15965 - protein, 10 aa, Artificial Sequence
  Description of Artificial Sequence: Synthetic epitope
EGHSVMDTLA

SEQ ID NO: 15966 - protein, 10 aa, Artificial Sequence
  Description of Artificial Sequence: Synthetic epitope
EGINSNEKET

SEQ ID NO: 15967 - protein, 10 aa, Artificial Sequence
  Description of Artificial Sequence: Synthetic epitope
EGISLGNSEA

SEQ ID NO: 15968 - protein, 10 aa, Artificial Sequence
  Description of Artificial Sequence: Synthetic epitope
EGISTSSLEV

SEQ ID NO: 15969 - protein, 10 aa, Artificial Sequence
  Description of Artificial Sequence: Synthetic epitope
EGITKSTLTK

SEQ ID NO: 15970 - protein, 10 aa, Artificial Sequence
  Description of Artificial Sequence: Synthetic epitope
EGIYNVPVAA

SEQ ID NO: 15971 - protein, 10 aa, Artificial Sequence
  Description of Artificial Sequence: Synthetic epitope
EGKAKKPEKE

SEQ ID NO: 15972 - protein, 10 aa, Artificial Sequence
  Description of Artificial Sequence: Synthetic epitope
EGKEQEVPTF

SEQ ID NO: 15973 - protein, 10 aa, Artificial Sequence
  Description of Artificial Sequence: Synthetic epitope
EGKERVLAAV

SEQ ID NO: 15974 - protein, 10 aa, Artificial Sequence
  Description of Artificial Sequence: Synthetic epitope
EGKIIKKSSG

SEQ ID NO: 15975 - protein, 10 aa, Artificial Sequence
  Description of Artificial Sequence: Synthetic epitope
EGKKSREQPS

SEQ ID NO: 15976 - protein, 10 aa, Artificial Sequence
  Description of Artificial Sequence: Synthetic epitope
EGKKYIVAYH

SEQ ID NO: 15977 - protein, 10 aa, Artificial Sequence
  Description of Artificial Sequence: Synthetic epitope
EGKLRDREAE

SEQ ID NO: 15978 - protein, 10 aa, Artificial Sequence
  Description of Artificial Sequence: Synthetic epitope
EGKLVESGAE

SEQ ID NO: 15979 - protein, 10 aa, Artificial Sequence
  Description of Artificial Sequence: Synthetic epitope
EGKQVSSLSS

SEQ ID NO: 15980 - protein, 10 aa, Artificial Sequence
  Description of Artificial Sequence: Synthetic epitope
EGKRKAALVP

SEQ ID NO: 15981 - protein, 10 aa, Artificial Sequence
  Description of Artificial Sequence: Synthetic epitope
EGKSRTTLPE

SEQ ID NO: 15982 - protein, 10 aa, Artificial Sequence
  Description of Artificial Sequence: Synthetic epitope
EGKSSKDILK

SEQ ID NO: 15983 - protein, 10 aa, Artificial Sequence
  Description of Artificial Sequence: Synthetic epitope
EGKVVLSSKS

SEQ ID NO: 15984 - protein, 10 aa, Artificial Sequence
  Description of Artificial Sequence: Synthetic epitope
EGLALGSSAS

SEQ ID NO: 15985 - protein, 10 aa, Artificial Sequence
  Description of Artificial Sequence: Synthetic epitope
EGLAVAEEAL

SEQ ID NO: 15986 - protein, 10 aa, Artificial Sequence
  Description of Artificial Sequence: Synthetic epitope
EGLKARSLPS

SEQ ID NO: 15987 - protein, 10 aa, Artificial Sequence
  Description of Artificial Sequence: Synthetic epitope
EGLLKLISPE

SEQ ID NO: 15988 - protein, 10 aa, Artificial Sequence
  Description of Artificial Sequence: Synthetic epitope
EGLNSTLKDH

SEQ ID NO: 15989 - protein, 10 aa, Artificial Sequence
  Description of Artificial Sequence: Synthetic epitope
EGLQISKSLS

SEQ ID NO: 15990 - protein, 10 aa, Artificial Sequence
  Description of Artificial Sequence: Synthetic epitope
EGMKTSDIKE

SEQ ID NO: 15991 - protein, 10 aa, Artificial Sequence
  Description of Artificial Sequence: Synthetic epitope
EGMTNHETLQ

SEQ ID NO: 15992 - protein, 10 aa, Artificial Sequence
  Description of Artificial Sequence: Synthetic epitope
EGNPSHSQKE

SEQ ID NO: 15993 - protein, 10 aa, Artificial Sequence
  Description of Artificial Sequence: Synthetic epitope
EGNQNLFVVQ

SEQ ID NO: 15994 - protein, 10 aa, Artificial Sequence
  Description of Artificial Sequence: Synthetic epitope
EGPFNRDVVE

SEQ ID NO: 15995 - protein, 10 aa, Artificial Sequence
  Description of Artificial Sequence: Synthetic epitope
EGPLMNGMKI

SEQ ID NO: 15996 - protein, 10 aa, Artificial Sequence
  Description of Artificial Sequence: Synthetic epitope
EGPNSLKVAR

SEQ ID NO: 15997 - protein, 10 aa, Artificial Sequence
  Description of Artificial Sequence: Synthetic epitope
EGQEIQVKAK

SEQ ID NO: 15998 - protein, 10 aa, Artificial Sequence
  Description of Artificial Sequence: Synthetic epitope
EGQEQEPVMT

SEQ ID NO: 15999 - protein, 10 aa, Artificial Sequence
  Description of Artificial Sequence: Synthetic epitope
EGQKQKVIQP

SEQ ID NO: 16000 - protein, 10 aa, Artificial Sequence
  Description of Artificial Sequence: Synthetic epitope
EGQLRVQREE

SEQ ID NO: 16001 - protein, 10 aa, Artificial Sequence
  Description of Artificial Sequence: Synthetic epitope
EGQLSRLIRK

SEQ ID NO: 16002 - protein, 10 aa, Artificial Sequence
  Description of Artificial Sequence: Synthetic epitope
EGQNGSKSNS

SEQ ID NO: 16003 - protein, 10 aa, Artificial Sequence
  Description of Artificial Sequence: Synthetic epitope
EGQRSATSQA

SEQ ID NO: 16004 - protein, 10 aa, Artificial Sequence
  Description of Artificial Sequence: Synthetic epitope
EGQSSLSSLE

SEQ ID NO: 16005 - protein, 10 aa, Artificial Sequence
  Description of Artificial Sequence: Synthetic epitope
EGRAPKIEKQ

SEQ ID NO: 16006 - protein, 10 aa, Artificial Sequence
  Description of Artificial Sequence: Synthetic epitope
EGREIKLVMT

SEQ ID NO: 16007 - protein, 10 aa, Artificial Sequence
  Description of Artificial Sequence: Synthetic epitope
EGRKKEARSK

SEQ ID NO: 16008 - protein, 10 aa, Artificial Sequence
  Description of Artificial Sequence: Synthetic epitope
EGRLAVLMEA

SEQ ID NO: 16009 - protein, 10 aa, Artificial Sequence
  Description of Artificial Sequence: Synthetic epitope
EGRSLESRAA

SEQ ID NO: 16010 - protein, 10 aa, Artificial Sequence
  Description of Artificial Sequence: Synthetic epitope
EGRSSKAKKP

SEQ ID NO: 16011 - protein, 10 aa, Artificial Sequence
  Description of Artificial Sequence: Synthetic epitope
EGRTKELGYT

SEQ ID NO: 16012 - protein, 10 aa, Artificial Sequence
  Description of Artificial Sequence: Synthetic epitope
EGSEESFTFQ

SEQ ID NO: 16013 - protein, 10 aa, Artificial Sequence
  Description of Artificial Sequence: Synthetic epitope
EGSGLESIIS

SEQ ID NO: 16014 - protein, 10 aa, Artificial Sequence
  Description of Artificial Sequence: Synthetic epitope
EGSKQSQTEP

SEQ ID NO: 16015 - protein, 10 aa, Artificial Sequence
  Description of Artificial Sequence: Synthetic epitope
EGSKTLVDGL

SEQ ID NO: 16016 - protein, 10 aa, Artificial Sequence
  Description of Artificial Sequence: Synthetic epitope
EGSKVSSEEQ

SEQ ID NO: 16017 - protein, 10 aa, Artificial Sequence
  Description of Artificial Sequence: Synthetic epitope
EGSLAKEAFL

SEQ ID NO: 16018 - protein, 10 aa, Artificial Sequence
  Description of Artificial Sequence: Synthetic epitope
EGSLAKEKTQ

SEQ ID NO: 16019 - protein, 10 aa, Artificial Sequence
  Description of Artificial Sequence: Synthetic epitope
EGSLESVSAT

SEQ ID NO: 16020 - protein, 10 aa, Artificial Sequence
  Description of Artificial Sequence: Synthetic epitope
EGSLLSKQEE

SEQ ID NO: 16021 - protein, 10 aa, Artificial Sequence
  Description of Artificial Sequence: Synthetic epitope
EGSMTQKLEN

SEQ ID NO: 16022 - protein, 10 aa, Artificial Sequence
  Description of Artificial Sequence: Synthetic epitope
EGSREQEDRG

SEQ ID NO: 16023 - protein, 10 aa, Artificial Sequence
  Description of Artificial Sequence: Synthetic epitope
EGSRRAADAK

SEQ ID NO: 16024 - protein, 10 aa, Artificial Sequence
  Description of Artificial Sequence: Synthetic epitope
EGSRRETSIT

SEQ ID NO: 16025 - protein, 10 aa, Artificial Sequence
  Description of Artificial Sequence: Synthetic epitope
EGSSDNQLKD

SEQ ID NO: 16026 - protein, 10 aa, Artificial Sequence
  Description of Artificial Sequence: Synthetic epitope
EGSSEKTVLD

SEQ ID NO: 16027 - protein, 10 aa, Artificial Sequence
  Description of Artificial Sequence: Synthetic epitope
EGSTESESTQ

SEQ ID NO: 16028 - protein, 10 aa, Artificial Sequence
  Description of Artificial Sequence: Synthetic epitope
EGSTQQLQTT

SEQ ID NO: 16029 - protein, 10 aa, Artificial Sequence
  Description of Artificial Sequence: Synthetic epitope
EGSTQTYASQ

SEQ ID NO: 16030 - protein, 10 aa, Artificial Sequence
  Description of Artificial Sequence: Synthetic epitope
EGTAVATRGF

SEQ ID NO: 16031 - protein, 10 aa, Artificial Sequence
  Description of Artificial Sequence: Synthetic epitope
EGTGVEANAT

SEQ ID NO: 16032 - protein, 10 aa, Artificial Sequence
  Description of Artificial Sequence: Synthetic epitope
EGTISQQTKL

SEQ ID NO: 16033 - protein, 10 aa, Artificial Sequence
  Description of Artificial Sequence: Synthetic epitope
EGTKVLKLKT

SEQ ID NO: 16034 - protein, 10 aa, Artificial Sequence
  Description of Artificial Sequence: Synthetic epitope
EGTLKRKTSS

SEQ ID NO: 16035 - protein, 10 aa, Artificial Sequence
  Description of Artificial Sequence: Synthetic epitope
EGTRPNKKFK

SEQ ID NO: 16036 - protein, 10 aa, Artificial Sequence
  Description of Artificial Sequence: Synthetic epitope
EGTRSSVTNR

SEQ ID NO: 16037 - protein, 10 aa, Artificial Sequence
  Description of Artificial Sequence: Synthetic epitope
EGTVEIETVK

SEQ ID NO: 16038 - protein, 10 aa, Artificial Sequence
  Description of Artificial Sequence: Synthetic epitope
EGVEVQTDYV

SEQ ID NO: 16039 - protein, 10 aa, Artificial Sequence
  Description of Artificial Sequence: Synthetic epitope
EGVFGLASTA

SEQ ID NO: 16040 - protein, 10 aa, Artificial Sequence
  Description of Artificial Sequence: Synthetic epitope
EGVIEIKATK

SEQ ID NO: 16041 - protein, 10 aa, Artificial Sequence
  Description of Artificial Sequence: Synthetic epitope
EGVILTNESA

SEQ ID NO: 16042 - protein, 10 aa, Artificial Sequence
  Description of Artificial Sequence: Synthetic epitope
EGVKQHVKET

SEQ ID NO: 16043 - protein, 10 aa, Artificial Sequence
  Description of Artificial Sequence: Synthetic epitope
EGWSNSSMKK

SEQ ID NO: 16044 - protein, 10 aa, Artificial Sequence
  Description of Artificial Sequence: Synthetic epitope
EGWVSKERIS

SEQ ID NO: 16045 - protein, 10 aa, Artificial Sequence
  Description of Artificial Sequence: Synthetic epitope
EGYATVTDAP

SEQ ID NO: 16046 - protein, 10 aa, Artificial Sequence
  Description of Artificial Sequence: Synthetic epitope
EGYVKVQVKK

SEQ ID NO: 16047 - protein, 10 aa, Artificial Sequence
  Description of Artificial Sequence: Synthetic epitope
EHAKAQTAVS

SEQ ID NO: 16048 - protein, 10 aa, Artificial Sequence
  Description of Artificial Sequence: Synthetic epitope
EHASQSVPMV

SEQ ID NO: 16049 - protein, 10 aa, Artificial Sequence
  Description of Artificial Sequence: Synthetic epitope
EHDKASKDAK

SEQ ID NO: 16050 - protein, 10 aa, Artificial Sequence
  Description of Artificial Sequence: Synthetic epitope
EHDMASGDGN

SEQ ID NO: 16051 - protein, 10 aa, Artificial Sequence
  Description of Artificial Sequence: Synthetic epitope
EHEAMKLVTM

SEQ ID NO: 16052 - protein, 10 aa, Artificial Sequence
  Description of Artificial Sequence: Synthetic epitope
EHEKKQKLET

SEQ ID NO: 16053 - protein, 10 aa, Artificial Sequence
  Description of Artificial Sequence: Synthetic epitope
EHELQSRLNR

SEQ ID NO: 16054 - protein, 10 aa, Artificial Sequence
  Description of Artificial Sequence: Synthetic epitope
EHEQATTQDN

SEQ ID NO: 16055 - protein, 10 aa, Artificial Sequence
  Description of Artificial Sequence: Synthetic epitope
EHFAETSYYF

SEQ ID NO: 16056 - protein, 10 aa, Artificial Sequence
  Description of Artificial Sequence: Synthetic epitope
EHFISQVVQD

SEQ ID NO: 16057 - protein, 10 aa, Artificial Sequence
  Description of Artificial Sequence: Synthetic epitope
EHGRSKSRAS

SEQ ID NO: 16058 - protein, 10 aa, Artificial Sequence
  Description of Artificial Sequence: Synthetic epitope
EHGTAVERGT

SEQ ID NO: 16059 - protein, 10 aa, Artificial Sequence
  Description of Artificial Sequence: Synthetic epitope
EHHRVDRNTV

SEQ ID NO: 16060 - protein, 10 aa, Artificial Sequence
  Description of Artificial Sequence: Synthetic epitope
EHIVTGSQSK

SEQ ID NO: 16061 - protein, 10 aa, Artificial Sequence
  Description of Artificial Sequence: Synthetic epitope
EHKERLITLG

SEQ ID NO: 16062 - protein, 10 aa, Artificial Sequence
  Description of Artificial Sequence: Synthetic epitope
EHKKLAARLE

SEQ ID NO: 16063 - protein, 10 aa, Artificial Sequence
  Description of Artificial Sequence: Synthetic epitope
EHKSTFSISN

SEQ ID NO: 16064 - protein, 10 aa, Artificial Sequence
  Description of Artificial Sequence: Synthetic epitope
EHLASSLKLT

SEQ ID NO: 16065 - protein, 10 aa, Artificial Sequence
  Description of Artificial Sequence: Synthetic epitope
EHLDKISDSV

SEQ ID NO: 16066 - protein, 10 aa, Artificial Sequence
  Description of Artificial Sequence: Synthetic epitope
EHLGEAEVAA

SEQ ID NO: 16067 - protein, 10 aa, Artificial Sequence
  Description of Artificial Sequence: Synthetic epitope
EHLKWNDMME

SEQ ID NO: 16068 - protein, 10 aa, Artificial Sequence
  Description of Artificial Sequence: Synthetic epitope
EHLVQYSQQG

SEQ ID NO: 16069 - protein, 10 aa, Artificial Sequence
  Description of Artificial Sequence: Synthetic epitope
EHNEKVEVPM

SEQ ID NO: 16070 - protein, 10 aa, Artificial Sequence
  Description of Artificial Sequence: Synthetic epitope
EHNMKTQVEQ

SEQ ID NO: 16071 - protein, 10 aa, Artificial Sequence
  Description of Artificial Sequence: Synthetic epitope
EHNTKNLLHR

SEQ ID NO: 16072 - protein, 10 aa, Artificial Sequence
  Description of Artificial Sequence: Synthetic epitope
EHNVMARYLP

SEQ ID NO: 16073 - protein, 10 aa, Artificial Sequence
  Description of Artificial Sequence: Synthetic epitope
EHPDALAKKA

SEQ ID NO: 16074 - protein, 10 aa, Artificial Sequence
  Description of Artificial Sequence: Synthetic epitope
EHPFSAVKQE

SEQ ID NO: 16075 - protein, 10 aa, Artificial Sequence
  Description of Artificial Sequence: Synthetic epitope
EHQEARQQAL

SEQ ID NO: 16076 - protein, 10 aa, Artificial Sequence
  Description of Artificial Sequence: Synthetic epitope
EHQLVEVEET

SEQ ID NO: 16077 - protein, 10 aa, Artificial Sequence
  Description of Artificial Sequence: Synthetic epitope
EHRDTGVSNA

SEQ ID NO: 16078 - protein, 10 aa, Artificial Sequence
  Description of Artificial Sequence: Synthetic epitope
EHRFSDISST

SEQ ID NO: 16079 - protein, 10 aa, Artificial Sequence
  Description of Artificial Sequence: Synthetic epitope
EHRLSATLEE

SEQ ID NO: 16080 - protein, 10 aa, Artificial Sequence
  Description of Artificial Sequence: Synthetic epitope
EHSLQMEAYE

SEQ ID NO: 16081 - protein, 10 aa, Artificial Sequence
  Description of Artificial Sequence: Synthetic epitope
EHSQSDEYDI

SEQ ID NO: 16082 - protein, 10 aa, Artificial Sequence
  Description of Artificial Sequence: Synthetic epitope
EHSTAAKLDK

SEQ ID NO: 16083 - protein, 10 aa, Artificial Sequence
  Description of Artificial Sequence: Synthetic epitope
EHSVRAAGKE

SEQ ID NO: 16084 - protein, 10 aa, Artificial Sequence
  Description of Artificial Sequence: Synthetic epitope
EHSYVSVKAK

SEQ ID NO: 16085 - protein, 10 aa, Artificial Sequence
  Description of Artificial Sequence: Synthetic epitope
EHTFISQTKS

SEQ ID NO: 16086 - protein, 10 aa, Artificial Sequence
  Description of Artificial Sequence: Synthetic epitope
EHTHAATAAL

SEQ ID NO: 16087 - protein, 10 aa, Artificial Sequence
  Description of Artificial Sequence: Synthetic epitope
EHTSKITTGG

SEQ ID NO: 16088 - protein, 10 aa, Artificial Sequence
  Description of Artificial Sequence: Synthetic epitope
EHTTQKAHLG

SEQ ID NO: 16089 - protein, 10 aa, Artificial Sequence
  Description of Artificial Sequence: Synthetic epitope
EHTVSAESIP

SEQ ID NO: 16090 - protein, 10 aa, Artificial Sequence
  Description of Artificial Sequence: Synthetic epitope
EHVAEKAKTA

SEQ ID NO: 16091 - protein, 10 aa, Artificial Sequence
  Description of Artificial Sequence: Synthetic epitope
EHVSWWANSS

SEQ ID NO: 16092 - protein, 10 aa, Artificial Sequence
  Description of Artificial Sequence: Synthetic epitope
EHVYNGQVME

SEQ ID NO: 16093 - protein, 10 aa, Artificial Sequence
  Description of Artificial Sequence: Synthetic epitope
EHYNATQKGH

SEQ ID NO: 16094 - protein, 10 aa, Artificial Sequence
  Description of Artificial Sequence: Synthetic epitope
EHYSGYSISE

SEQ ID NO: 16095 - protein, 10 aa, Artificial Sequence
  Description of Artificial Sequence: Synthetic epitope
EHYSQASEWA

SEQ ID NO: 16096 - protein, 10 aa, Artificial Sequence
  Description of Artificial Sequence: Synthetic epitope
EIAETVSRTD

SEQ ID NO: 16097 - protein, 10 aa, Artificial Sequence
  Description of Artificial Sequence: Synthetic epitope
EIAIHNSDGQ

SEQ ID NO: 16098 - protein, 10 aa, Artificial Sequence
  Description of Artificial Sequence: Synthetic epitope
EIAKKRLEFE

SEQ ID NO: 16099 - protein, 10 aa, Artificial Sequence
  Description of Artificial Sequence: Synthetic epitope
EIAKLDKLLN

SEQ ID NO: 16100 - protein, 10 aa, Artificial Sequence
  Description of Artificial Sequence: Synthetic epitope
EIAKQLQIRS

SEQ ID NO: 16101 - protein, 10 aa, Artificial Sequence
  Description of Artificial Sequence: Synthetic epitope
EIAKTSNKFG

SEQ ID NO: 16102 - protein, 10 aa, Artificial Sequence
  Description of Artificial Sequence: Synthetic epitope
EIALPRESNI

SEQ ID NO: 16103 - protein, 10 aa, Artificial Sequence
  Description of Artificial Sequence: Synthetic epitope
EIARSLDSFL

SEQ ID NO: 16104 - protein, 10 aa, Artificial Sequence
  Description of Artificial Sequence: Synthetic epitope
EIASLTSGHE

SEQ ID NO: 16105 - protein, 10 aa, Artificial Sequence
  Description of Artificial Sequence: Synthetic epitope
EIASTLMESE

SEQ ID NO: 16106 - protein, 10 aa, Artificial Sequence
  Description of Artificial Sequence: Synthetic epitope
EIDAISVEKR

SEQ ID NO: 16107 - protein, 10 aa, Artificial Sequence
  Description of Artificial Sequence: Synthetic epitope
EIDEASASSE

SEQ ID NO: 16108 - protein, 10 aa, Artificial Sequence
  Description of Artificial Sequence: Synthetic epitope
EIDIEAISGR

SEQ ID NO: 16109 - protein, 10 aa, Artificial Sequence
  Description of Artificial Sequence: Synthetic epitope
EIDKNSKEQD

SEQ ID NO: 16110 - protein, 10 aa, Artificial Sequence
  Description of Artificial Sequence: Synthetic epitope
EIDTSAQNKH

SEQ ID NO: 16111 - protein, 10 aa, Artificial Sequence
  Description of Artificial Sequence: Synthetic epitope
EIDVINSRTQ

SEQ ID NO: 16112 - protein, 10 aa, Artificial Sequence
  Description of Artificial Sequence: Synthetic epitope
EIEESLGLEK

SEQ ID NO: 16113 - protein, 10 aa, Artificial Sequence
  Description of Artificial Sequence: Synthetic epitope
EIEINQTLEI

SEQ ID NO: 16114 - protein, 10 aa, Artificial Sequence
  Description of Artificial Sequence: Synthetic epitope
EIEISRMKDQ

SEQ ID NO: 16115 - protein, 10 aa, Artificial Sequence
  Description of Artificial Sequence: Synthetic epitope
EIEKATLKML

SEQ ID NO: 16116 - protein, 10 aa, Artificial Sequence
  Description of Artificial Sequence: Synthetic epitope
EIELENDLKS

SEQ ID NO: 16117 - protein, 10 aa, Artificial Sequence
  Description of Artificial Sequence: Synthetic epitope
EIELKVMKFQ

SEQ ID NO: 16118 - protein, 10 aa, Artificial Sequence
  Description of Artificial Sequence: Synthetic epitope
EIELRSKAGK

SEQ ID NO: 16119 - protein, 10 aa, Artificial Sequence
  Description of Artificial Sequence: Synthetic epitope
EIELSVGNDR

SEQ ID NO: 16120 - protein, 10 aa, Artificial Sequence
  Description of Artificial Sequence: Synthetic epitope
EIEMIMTDLE

SEQ ID NO: 16121 - protein, 10 aa, Artificial Sequence
  Description of Artificial Sequence: Synthetic epitope
EIEMKQSKMD

SEQ ID NO: 16122 - protein, 10 aa, Artificial Sequence
  Description of Artificial Sequence: Synthetic epitope
EIEMNRQQRF

SEQ ID NO: 16123 - protein, 10 aa, Artificial Sequence
  Description of Artificial Sequence: Synthetic epitope
EIEQTSLSSK

SEQ ID NO: 16124 - protein, 10 aa, Artificial Sequence
  Description of Artificial Sequence: Synthetic epitope
EIERHGEKVE

SEQ ID NO: 16125 - protein, 10 aa, Artificial Sequence
  Description of Artificial Sequence: Synthetic epitope
EIESLSRYVP

SEQ ID NO: 16126 - protein, 10 aa, Artificial Sequence
  Description of Artificial Sequence: Synthetic epitope
EIESPHINEN

SEQ ID NO: 16127 - protein, 10 aa, Artificial Sequence
  Description of Artificial Sequence: Synthetic epitope
EIESRLPKAK

SEQ ID NO: 16128 - protein, 10 aa, Artificial Sequence
  Description of Artificial Sequence: Synthetic epitope
EIETLISMLQ

SEQ ID NO: 16129 - protein, 10 aa, Artificial Sequence
  Description of Artificial Sequence: Synthetic epitope
EIEVAQANDI

SEQ ID NO: 16130 - protein, 10 aa, Artificial Sequence
  Description of Artificial Sequence: Synthetic epitope
EIFEVRFDPQ

SEQ ID NO: 16131 - protein, 10 aa, Artificial Sequence
  Description of Artificial Sequence: Synthetic epitope
EIFLNDSATE

SEQ ID NO: 16132 - protein, 10 aa, Artificial Sequence
  Description of Artificial Sequence: Synthetic epitope
EIFLSRAKER

SEQ ID NO: 16133 - protein, 10 aa, Artificial Sequence
  Description of Artificial Sequence: Synthetic epitope
EIFYELIDND

SEQ ID NO: 16134 - protein, 10 aa, Artificial Sequence
  Description of Artificial Sequence: Synthetic epitope
EIGADRSDMD

SEQ ID NO: 16135 - protein, 10 aa, Artificial Sequence
  Description of Artificial Sequence: Synthetic epitope
EIGEHVAPSE

SEQ ID NO: 16136 - protein, 10 aa, Artificial Sequence
  Description of Artificial Sequence: Synthetic epitope
EIGEKQDTEL

SEQ ID NO: 16137 - protein, 10 aa, Artificial Sequence
  Description of Artificial Sequence: Synthetic epitope
EIGLLSEEVE

SEQ ID NO: 16138 - protein, 10 aa, Artificial Sequence
  Description of Artificial Sequence: Synthetic epitope
EIGNLKSSHS

SEQ ID NO: 16139 - protein, 10 aa, Artificial Sequence
  Description of Artificial Sequence: Synthetic epitope
EIGQTSANIT

SEQ ID NO: 16140 - protein, 10 aa, Artificial Sequence
  Description of Artificial Sequence: Synthetic epitope
EIIFKIMEQM

SEQ ID NO: 16141 - protein, 10 aa, Artificial Sequence
  Description of Artificial Sequence: Synthetic epitope
EIIGNSKNVA

SEQ ID NO: 16142 - protein, 10 aa, Artificial Sequence
  Description of Artificial Sequence: Synthetic epitope
EIIKNVMIPA

SEQ ID NO: 16143 - protein, 10 aa, Artificial Sequence
  Description of Artificial Sequence: Synthetic epitope
EIIRKATSQS

SEQ ID NO: 16144 - protein, 10 aa, Artificial Sequence
  Description of Artificial Sequence: Synthetic epitope
EIISFKSMED

SEQ ID NO: 16145 - protein, 10 aa, Artificial Sequence
  Description of Artificial Sequence: Synthetic epitope
EIIVETVAGT

SEQ ID NO: 16146 - protein, 10 aa, Artificial Sequence
  Description of Artificial Sequence: Synthetic epitope
EIKALYTATE

SEQ ID NO: 16147 - protein, 10 aa, Artificial Sequence
  Description of Artificial Sequence: Synthetic epitope
EIKQRMMEME

SEQ ID NO: 16148 - protein, 10 aa, Artificial Sequence
  Description of Artificial Sequence: Synthetic epitope
EIKSKLASLK

SEQ ID NO: 16149 - protein, 10 aa, Artificial Sequence
  Description of Artificial Sequence: Synthetic epitope
EILAEVRDYK

SEQ ID NO: 16150 - protein, 10 aa, Artificial Sequence
  Description of Artificial Sequence: Synthetic epitope
EILEAIIATG

SEQ ID NO: 16151 - protein, 10 aa, Artificial Sequence
  Description of Artificial Sequence: Synthetic epitope
EILESEEKGD

SEQ ID NO: 16152 - protein, 10 aa, Artificial Sequence
  Description of Artificial Sequence: Synthetic epitope
EILKQVARDN

SEQ ID NO: 16153 - protein, 10 aa, Artificial Sequence
  Description of Artificial Sequence: Synthetic epitope
EILNVKNVMV

SEQ ID NO: 16154 - protein, 10 aa, Artificial Sequence
  Description of Artificial Sequence: Synthetic epitope
EILRKSLSTL

SEQ ID NO: 16155 - protein, 10 aa, Artificial Sequence
  Description of Artificial Sequence: Synthetic epitope
EILRKSTLKL

SEQ ID NO: 16156 - protein, 10 aa, Artificial Sequence
  Description of Artificial Sequence: Synthetic epitope
EILSAVLSQE

SEQ ID NO: 16157 - protein, 10 aa, Artificial Sequence
  Description of Artificial Sequence: Synthetic epitope
EILVLRREPP

SEQ ID NO: 16158 - protein, 10 aa, Artificial Sequence
  Description of Artificial Sequence: Synthetic epitope
EIMAKAAEKT

SEQ ID NO: 16159 - protein, 10 aa, Artificial Sequence
  Description of Artificial Sequence: Synthetic epitope
EIMQKNSNRS

SEQ ID NO: 16160 - protein, 10 aa, Artificial Sequence
  Description of Artificial Sequence: Synthetic epitope
EIMSRFAVIE

SEQ ID NO: 16161 - protein, 10 aa, Artificial Sequence
  Description of Artificial Sequence: Synthetic epitope
EINEKSSQLK

SEQ ID NO: 16162 - protein, 10 aa, Artificial Sequence
  Description of Artificial Sequence: Synthetic epitope
EINEVSVKHT

SEQ ID NO: 16163 - protein, 10 aa, Artificial Sequence
  Description of Artificial Sequence: Synthetic epitope
EINIYAVTEE

SEQ ID NO: 16164 - protein, 10 aa, Artificial Sequence
  Description of Artificial Sequence: Synthetic epitope
EINMQQTVIY

SEQ ID NO: 16165 - protein, 10 aa, Artificial Sequence
  Description of Artificial Sequence: Synthetic epitope
EINTKSAFLK

SEQ ID NO: 16166 - protein, 10 aa, Artificial Sequence
  Description of Artificial Sequence: Synthetic epitope
EIPALTEAVR

SEQ ID NO: 16167 - protein, 10 aa, Artificial Sequence
  Description of Artificial Sequence: Synthetic epitope
EIPQQGIIRS

SEQ ID NO: 16168 - protein, 10 aa, Artificial Sequence
  Description of Artificial Sequence: Synthetic epitope
EIPTKKEASK

SEQ ID NO: 16169 - protein, 10 aa, Artificial Sequence
  Description of Artificial Sequence: Synthetic epitope
EIQENTLNSN

SEQ ID NO: 16170 - protein, 10 aa, Artificial Sequence
  Description of Artificial Sequence: Synthetic epitope
EIQEWTSKPM

SEQ ID NO: 16171 - protein, 10 aa, Artificial Sequence
  Description of Artificial Sequence: Synthetic epitope
EIQLQALDIR

SEQ ID NO: 16172 - protein, 10 aa, Artificial Sequence
  Description of Artificial Sequence: Synthetic epitope
EIQMFPQAQE

SEQ ID NO: 16173 - protein, 10 aa, Artificial Sequence
  Description of Artificial Sequence: Synthetic epitope
EIQVMQMMSP

SEQ ID NO: 16174 - protein, 10 aa, Artificial Sequence
  Description of Artificial Sequence: Synthetic epitope
EIRIGNAVVE

SEQ ID NO: 16175 - protein, 10 aa, Artificial Sequence
  Description of Artificial Sequence: Synthetic epitope
EIRKEAQKSQ

SEQ ID NO: 16176 - protein, 10 aa, Artificial Sequence
  Description of Artificial Sequence: Synthetic epitope
EISDAEALQS

SEQ ID NO: 16177 - protein, 10 aa, Artificial Sequence
  Description of Artificial Sequence: Synthetic epitope
EISDAVGQSK

SEQ ID NO: 16178 - protein, 10 aa, Artificial Sequence
  Description of Artificial Sequence: Synthetic epitope
EISEIYPSFS

SEQ ID NO: 16179 - protein, 10 aa, Artificial Sequence
  Description of Artificial Sequence: Synthetic epitope
EISELALTGA

SEQ ID NO: 16180 - protein, 10 aa, Artificial Sequence
  Description of Artificial Sequence: Synthetic epitope
EISEMKGVEE

SEQ ID NO: 16181 - protein, 10 aa, Artificial Sequence
  Description of Artificial Sequence: Synthetic epitope
EISESRVVSG

SEQ ID NO: 16182 - protein, 10 aa, Artificial Sequence
  Description of Artificial Sequence: Synthetic epitope
EISFETSPKS

SEQ ID NO: 16183 - protein, 10 aa, Artificial Sequence
  Description of Artificial Sequence: Synthetic epitope
EISMLDTKVS

SEQ ID NO: 16184 - protein, 10 aa, Artificial Sequence
  Description of Artificial Sequence: Synthetic epitope
EISMQVARAK

SEQ ID NO: 16185 - protein, 10 aa, Artificial Sequence
  Description of Artificial Sequence: Synthetic epitope
EISNASTTEV

SEQ ID NO: 16186 - protein, 10 aa, Artificial Sequence
  Description of Artificial Sequence: Synthetic epitope
EISNRALINV

SEQ ID NO: 16187 - protein, 10 aa, Artificial Sequence
  Description of Artificial Sequence: Synthetic epitope
EISSEKDSQE

SEQ ID NO: 16188 - protein, 10 aa, Artificial Sequence
  Description of Artificial Sequence: Synthetic epitope
EISVSEMNEK

SEQ ID NO: 16189 - protein, 10 aa, Artificial Sequence
  Description of Artificial Sequence: Synthetic epitope
EITALQTMLA

SEQ ID NO: 16190 - protein, 10 aa, Artificial Sequence
  Description of Artificial Sequence: Synthetic epitope
EITDRVEMGQ

SEQ ID NO: 16191 - protein, 10 aa, Artificial Sequence
  Description of Artificial Sequence: Synthetic epitope
EITEEQVQPD

SEQ ID NO: 16192 - protein, 10 aa, Artificial Sequence
  Description of Artificial Sequence: Synthetic epitope
EITESASLYF

SEQ ID NO: 16193 - protein, 10 aa, Artificial Sequence
  Description of Artificial Sequence: Synthetic epitope
EITESLSLKS

SEQ ID NO: 16194 - protein, 10 aa, Artificial Sequence
  Description of Artificial Sequence: Synthetic epitope
EITKVKLKQI

SEQ ID NO: 16195 - protein, 10 aa, Artificial Sequence
  Description of Artificial Sequence: Synthetic epitope
EITNKSALKL

SEQ ID NO: 16196 - protein, 10 aa, Artificial Sequence
  Description of Artificial Sequence: Synthetic epitope
EITNQLSVSD

SEQ ID NO: 16197 - protein, 10 aa, Artificial Sequence
  Description of Artificial Sequence: Synthetic epitope
EITQNIKTTQ

SEQ ID NO: 16198 - protein, 10 aa, Artificial Sequence
  Description of Artificial Sequence: Synthetic epitope
EITSATQTSS

SEQ ID NO: 16199 - protein, 10 aa, Artificial Sequence
  Description of Artificial Sequence: Synthetic epitope
EITSDAQAQD

SEQ ID NO: 16200 - protein, 10 aa, Artificial Sequence
  Description of Artificial Sequence: Synthetic epitope
EITSDRKLSS

SEQ ID NO: 16201 - protein, 10 aa, Artificial Sequence
  Description of Artificial Sequence: Synthetic epitope
EITSLLPSRS

SEQ ID NO: 16202 - protein, 10 aa, Artificial Sequence
  Description of Artificial Sequence: Synthetic epitope
EITTSLSEEM

SEQ ID NO: 16203 - protein, 10 aa, Artificial Sequence
  Description of Artificial Sequence: Synthetic epitope
EIVALHAQQD

SEQ ID NO: 16204 - protein, 10 aa, Artificial Sequence
  Description of Artificial Sequence: Synthetic epitope
EIVDEKLDTS

SEQ ID NO: 16205 - protein, 10 aa, Artificial Sequence
  Description of Artificial Sequence: Synthetic epitope
EIVEGMKQKM

SEQ ID NO: 16206 - protein, 10 aa, Artificial Sequence
  Description of Artificial Sequence: Synthetic epitope
EIVINELDLQ

SEQ ID NO: 16207 - protein, 10 aa, Artificial Sequence
  Description of Artificial Sequence: Synthetic epitope
EIVQQNGASD

SEQ ID NO: 16208 - protein, 10 aa, Artificial Sequence
  Description of Artificial Sequence: Synthetic epitope
EIVQSNLFKK

SEQ ID NO: 16209 - protein, 10 aa, Artificial Sequence
  Description of Artificial Sequence: Synthetic epitope
EIVSEKSRYS

SEQ ID NO: 16210 - protein, 10 aa, Artificial Sequence
  Description of Artificial Sequence: Synthetic epitope
EIYMDTIMEL

SEQ ID NO: 16211 - protein, 10 aa, Artificial Sequence
  Description of Artificial Sequence: Synthetic epitope
EIYRTRSVNG

SEQ ID NO: 16212 - protein, 10 aa, Artificial Sequence
  Description of Artificial Sequence: Synthetic epitope
EIYVAQFSEI

SEQ ID NO: 16213 - protein, 10 aa, Artificial Sequence
  Description of Artificial Sequence: Synthetic epitope
EKAAGSVSKS

SEQ ID NO: 16214 - protein, 10 aa, Artificial Sequence
  Description of Artificial Sequence: Synthetic epitope
EKAALVTSNS

SEQ ID NO: 16215 - protein, 10 aa, Artificial Sequence
  Description of Artificial Sequence: Synthetic epitope
EKAASQRRDV

SEQ ID NO: 16216 - protein, 10 aa, Artificial Sequence
  Description of Artificial Sequence: Synthetic epitope
EKAAVKSKKA

SEQ ID NO: 16217 - protein, 10 aa, Artificial Sequence
  Description of Artificial Sequence: Synthetic epitope
EKADQKADEE

SEQ ID NO: 16218 - protein, 10 aa, Artificial Sequence
  Description of Artificial Sequence: Synthetic epitope
EKAEARLKAK

SEQ ID NO: 16219 - protein, 10 aa, Artificial Sequence
  Description of Artificial Sequence: Synthetic epitope
EKAEKVTEKV

SEQ ID NO: 16220 - protein, 10 aa, Artificial Sequence
  Description of Artificial Sequence: Synthetic epitope
EKAEQIAGRM

SEQ ID NO: 16221 - protein, 10 aa, Artificial Sequence
  Description of Artificial Sequence: Synthetic epitope
EKAEVIAGRM

SEQ ID NO: 16222 - protein, 10 aa, Artificial Sequence
  Description of Artificial Sequence: Synthetic epitope
EKAFLASEAV

SEQ ID NO: 16223 - protein, 10 aa, Artificial Sequence
  Description of Artificial Sequence: Synthetic epitope
EKAFNMLKKN

SEQ ID NO: 16224 - protein, 10 aa, Artificial Sequence
  Description of Artificial Sequence: Synthetic epitope
EKAIKHKDKL

SEQ ID NO: 16225 - protein, 10 aa, Artificial Sequence
  Description of Artificial Sequence: Synthetic epitope
EKAKKAAIEA

SEQ ID NO: 16226 - protein, 10 aa, Artificial Sequence
  Description of Artificial Sequence: Synthetic epitope
EKAKKIHLEQ

SEQ ID NO: 16227 - protein, 10 aa, Artificial Sequence
  Description of Artificial Sequence: Synthetic epitope
EKAKLSVGWS

SEQ ID NO: 16228 - protein, 10 aa, Artificial Sequence
  Description of Artificial Sequence: Synthetic epitope
EKAKTKEVPK

SEQ ID NO: 16229 - protein, 10 aa, Artificial Sequence
  Description of Artificial Sequence: Synthetic epitope
EKALGKAASH

SEQ ID NO: 16230 - protein, 10 aa, Artificial Sequence
  Description of Artificial Sequence: Synthetic epitope
EKAMKPVETH

SEQ ID NO: 16231 - protein, 10 aa, Artificial Sequence
  Description of Artificial Sequence: Synthetic epitope
EKAMKVLKKQ

SEQ ID NO: 16232 - protein, 10 aa, Artificial Sequence
  Description of Artificial Sequence: Synthetic epitope
EKAMNTMIGT

SEQ ID NO: 16233 - protein, 10 aa, Artificial Sequence
  Description of Artificial Sequence: Synthetic epitope
EKANKTVDDT

SEQ ID NO: 16234 - protein, 10 aa, Artificial Sequence
  Description of Artificial Sequence: Synthetic epitope
EKAPMKYKTA

SEQ ID NO: 16235 - protein, 10 aa, Artificial Sequence
  Description of Artificial Sequence: Synthetic epitope
EKAPTNIVYK

SEQ ID NO: 16236 - protein, 10 aa, Artificial Sequence
  Description of Artificial Sequence: Synthetic epitope
EKAQAKTSRK

SEQ ID NO: 16237 - protein, 10 aa, Artificial Sequence
  Description of Artificial Sequence: Synthetic epitope
EKAQDEIPAL

SEQ ID NO: 16238 - protein, 10 aa, Artificial Sequence
  Description of Artificial Sequence: Synthetic epitope
EKARTVGIEE

SEQ ID NO: 16239 - protein, 10 aa, Artificial Sequence
  Description of Artificial Sequence: Synthetic epitope
EKASETEENG

SEQ ID NO: 16240 - protein, 10 aa, Artificial Sequence
  Description of Artificial Sequence: Synthetic epitope
EKASFTNSEL

SEQ ID NO: 16241 - protein, 10 aa, Artificial Sequence
  Description of Artificial Sequence: Synthetic epitope
EKASREESAK

SEQ ID NO: 16242 - protein, 10 aa, Artificial Sequence
  Description of Artificial Sequence: Synthetic epitope
EKASRTFEQD

SEQ ID NO: 16243 - protein, 10 aa, Artificial Sequence
  Description of Artificial Sequence: Synthetic epitope
EKASVETLTE

SEQ ID NO: 16244 - protein, 10 aa, Artificial Sequence
  Description of Artificial Sequence: Synthetic epitope
EKAVAQMKIM

SEQ ID NO: 16245 - protein, 10 aa, Artificial Sequence
  Description of Artificial Sequence: Synthetic epitope
EKAVQEAQRA

SEQ ID NO: 16246 - protein, 10 aa, Artificial Sequence
  Description of Artificial Sequence: Synthetic epitope
EKAVSAAEEV

SEQ ID NO: 16247 - protein, 10 aa, Artificial Sequence
  Description of Artificial Sequence: Synthetic epitope
EKAVTASNDE

SEQ ID NO: 16248 - protein, 10 aa, Artificial Sequence
  Description of Artificial Sequence: Synthetic epitope
EKDAVVTSAK

SEQ ID NO: 16249 - protein, 10 aa, Artificial Sequence
  Description of Artificial Sequence: Synthetic epitope
EKDEESEQRT

SEQ ID NO: 16250 - protein, 10 aa, Artificial Sequence
  Description of Artificial Sequence: Synthetic epitope
EKDHSSKSAT

SEQ ID NO: 16251 - protein, 10 aa, Artificial Sequence
  Description of Artificial Sequence: Synthetic epitope
EKDILSSYEV

SEQ ID NO: 16252 - protein, 10 aa, Artificial Sequence
  Description of Artificial Sequence: Synthetic epitope
EKDKRTQQMR

SEQ ID NO: 16253 - protein, 10 aa, Artificial Sequence
  Description of Artificial Sequence: Synthetic epitope
EKDNAGKNQK

SEQ ID NO: 16254 - protein, 10 aa, Artificial Sequence
  Description of Artificial Sequence: Synthetic epitope
EKDSPLTTEI

SEQ ID NO: 16255 - protein, 10 aa, Artificial Sequence
  Description of Artificial Sequence: Synthetic epitope
EKDSSLEARQ

SEQ ID NO: 16256 - protein, 10 aa, Artificial Sequence
  Description of Artificial Sequence: Synthetic epitope
EKDTTELMEK

SEQ ID NO: 16257 - protein, 10 aa, Artificial Sequence
  Description of Artificial Sequence: Synthetic epitope
EKEAALVQQE

SEQ ID NO: 16258 - protein, 10 aa, Artificial Sequence
  Description of Artificial Sequence: Synthetic epitope
EKEAKGVESS

SEQ ID NO: 16259 - protein, 10 aa, Artificial Sequence
  Description of Artificial Sequence: Synthetic epitope
EKEAKSQKRA

SEQ ID NO: 16260 - protein, 10 aa, Artificial Sequence
  Description of Artificial Sequence: Synthetic epitope
EKEALIQALD

SEQ ID NO: 16261 - protein, 10 aa, Artificial Sequence
  Description of Artificial Sequence: Synthetic epitope
EKEAQKKREE

SEQ ID NO: 16262 - protein, 10 aa, Artificial Sequence
  Description of Artificial Sequence: Synthetic epitope
EKEAVLAMEK

SEQ ID NO: 16263 - protein, 10 aa, Artificial Sequence
  Description of Artificial Sequence: Synthetic epitope
EKEDTEVELD

SEQ ID NO: 16264 - protein, 10 aa, Artificial Sequence
  Description of Artificial Sequence: Synthetic epitope
EKEEIRKSKS

SEQ ID NO: 16265 - protein, 10 aa, Artificial Sequence
  Description of Artificial Sequence: Synthetic epitope
EKEESSHYIG

SEQ ID NO: 16266 - protein, 10 aa, Artificial Sequence
  Description of Artificial Sequence: Synthetic epitope
EKEIEALNFK

SEQ ID NO: 16267 - protein, 10 aa, Artificial Sequence
  Description of Artificial Sequence: Synthetic epitope
EKEIELLQAQ

SEQ ID NO: 16268 - protein, 10 aa, Artificial Sequence
  Description of Artificial Sequence: Synthetic epitope
EKEINNMGNT

SEQ ID NO: 16269 - protein, 10 aa, Artificial Sequence
  Description of Artificial Sequence: Synthetic epitope
EKEITKLNEE

SEQ ID NO: 16270 - protein, 10 aa, Artificial Sequence
  Description of Artificial Sequence: Synthetic epitope
EKEIVKSRFA

SEQ ID NO: 16271 - protein, 10 aa, Artificial Sequence
  Description of Artificial Sequence: Synthetic epitope
EKEKAKTPVA

SEQ ID NO: 16272 - protein, 10 aa, Artificial Sequence
  Description of Artificial Sequence: Synthetic epitope
EKEKHKVKAE

SEQ ID NO: 16273 - protein, 10 aa, Artificial Sequence
  Description of Artificial Sequence: Synthetic epitope
EKEKTVSANK

SEQ ID NO: 16274 - protein, 10 aa, Artificial Sequence
  Description of Artificial Sequence: Synthetic epitope
EKELAVASIK

SEQ ID NO: 16275 - protein, 10 aa, Artificial Sequence
  Description of Artificial Sequence: Synthetic epitope
EKELESIKET

SEQ ID NO: 16276 - protein, 10 aa, Artificial Sequence
  Description of Artificial Sequence: Synthetic epitope
EKELKSEKEQ

SEQ ID NO: 16277 - protein, 10 aa, Artificial Sequence
  Description of Artificial Sequence: Synthetic epitope
EKELLVKESE

SEQ ID NO: 16278 - protein, 10 aa, Artificial Sequence
  Description of Artificial Sequence: Synthetic epitope
EKELNALETS

SEQ ID NO: 16279 - protein, 10 aa, Artificial Sequence
  Description of Artificial Sequence: Synthetic epitope
EKELQEVIAL

SEQ ID NO: 16280 - protein, 10 aa, Artificial Sequence
  Description of Artificial Sequence: Synthetic epitope
EKELTDQKSK

SEQ ID NO: 16281 - protein, 10 aa, Artificial Sequence
  Description of Artificial Sequence: Synthetic epitope
EKELVPDQAV

SEQ ID NO: 16282 - protein, 10 aa, Artificial Sequence
  Description of Artificial Sequence: Synthetic epitope
EKELVTIIPN

SEQ ID NO: 16283 - protein, 10 aa, Artificial Sequence
  Description of Artificial Sequence: Synthetic epitope
EKEPRKSSEE

SEQ ID NO: 16284 - protein, 10 aa, Artificial Sequence
  Description of Artificial Sequence: Synthetic epitope
EKEQIYSSLD

SEQ ID NO: 16285 - protein, 10 aa, Artificial Sequence
  Description of Artificial Sequence: Synthetic epitope
EKESAIVSRP

SEQ ID NO: 16286 - protein, 10 aa, Artificial Sequence
  Description of Artificial Sequence: Synthetic epitope
EKESQHQRYQ

SEQ ID NO: 16287 - protein, 10 aa, Artificial Sequence
  Description of Artificial Sequence: Synthetic epitope
EKESTVNSIF

SEQ ID NO: 16288 - protein, 10 aa, Artificial Sequence
  Description of Artificial Sequence: Synthetic epitope
EKETKAKIEK

SEQ ID NO: 16289 - protein, 10 aa, Artificial Sequence
  Description of Artificial Sequence: Synthetic epitope
EKETKLAEIA

SEQ ID NO: 16290 - protein, 10 aa, Artificial Sequence
  Description of Artificial Sequence: Synthetic epitope
EKETSKIKAD

SEQ ID NO: 16291 - protein, 10 aa, Artificial Sequence
  Description of Artificial Sequence: Synthetic epitope
EKETYVPAAE

SEQ ID NO: 16292 - protein, 10 aa, Artificial Sequence
  Description of Artificial Sequence: Synthetic epitope
EKEVISGKGQ

SEQ ID NO: 16293 - protein, 10 aa, Artificial Sequence
  Description of Artificial Sequence: Synthetic epitope
EKEYAAMKSK

SEQ ID NO: 16294 - protein, 10 aa, Artificial Sequence
  Description of Artificial Sequence: Synthetic epitope
EKEYVPFQAE

SEQ ID NO: 16295 - protein, 10 aa, Artificial Sequence
  Description of Artificial Sequence: Synthetic epitope
EKFAASKDPT

SEQ ID NO: 16296 - protein, 10 aa, Artificial Sequence
  Description of Artificial Sequence: Synthetic epitope
EKFEKEAAEM

SEQ ID NO: 16297 - protein, 10 aa, Artificial Sequence
  Description of Artificial Sequence: Synthetic epitope
EKFETKVTTL

SEQ ID NO: 16298 - protein, 10 aa, Artificial Sequence
  Description of Artificial Sequence: Synthetic epitope
EKFGLEKRQG

SEQ ID NO: 16299 - protein, 10 aa, Artificial Sequence
  Description of Artificial Sequence: Synthetic epitope
EKFLKILQVV

SEQ ID NO: 16300 - protein, 10 aa, Artificial Sequence
  Description of Artificial Sequence: Synthetic epitope
EKFQEQLQTR

SEQ ID NO: 16301 - protein, 10 aa, Artificial Sequence
  Description of Artificial Sequence: Synthetic epitope
EKFQIFFKEN

SEQ ID NO: 16302 - protein, 10 aa, Artificial Sequence
  Description of Artificial Sequence: Synthetic epitope
EKFRKHEKSE

SEQ ID NO: 16303 - protein, 10 aa, Artificial Sequence
  Description of Artificial Sequence: Synthetic epitope
EKFSISAHGK

SEQ ID NO: 16304 - protein, 10 aa, Artificial Sequence
  Description of Artificial Sequence: Synthetic epitope
EKFVELSQET

SEQ ID NO: 16305 - protein, 10 aa, Artificial Sequence
  Description of Artificial Sequence: Synthetic epitope
EKGAKATERT

SEQ ID NO: 16306 - protein, 10 aa, Artificial Sequence
  Description of Artificial Sequence: Synthetic epitope
EKGEATQKLK

SEQ ID NO: 16307 - protein, 10 aa, Artificial Sequence
  Description of Artificial Sequence: Synthetic epitope
EKGEQTFKRP

SEQ ID NO: 16308 - protein, 10 aa, Artificial Sequence
  Description of Artificial Sequence: Synthetic epitope
EKGETDLIQK

SEQ ID NO: 16309 - protein, 10 aa, Artificial Sequence
  Description of Artificial Sequence: Synthetic epitope
EKGIDGNMHV

SEQ ID NO: 16310 - protein, 10 aa, Artificial Sequence
  Description of Artificial Sequence: Synthetic epitope
EKGKTEVLFL

SEQ ID NO: 16311 - protein, 10 aa, Artificial Sequence
  Description of Artificial Sequence: Synthetic epitope
EKGLELRSQQ

SEQ ID NO: 16312 - protein, 10 aa, Artificial Sequence
  Description of Artificial Sequence: Synthetic epitope
EKGLKVREYE

SEQ ID NO: 16313 - protein, 10 aa, Artificial Sequence
  Description of Artificial Sequence: Synthetic epitope
EKGLMGRMEI

SEQ ID NO: 16314 - protein, 10 aa, Artificial Sequence
  Description of Artificial Sequence: Synthetic epitope
EKGLSSQSSK

SEQ ID NO: 16315 - protein, 10 aa, Artificial Sequence
  Description of Artificial Sequence: Synthetic epitope
EKGSMNLMLQ

SEQ ID NO: 16316 - protein, 10 aa, Artificial Sequence
  Description of Artificial Sequence: Synthetic epitope
EKGSVAEAED

SEQ ID NO: 16317 - protein, 10 aa, Artificial Sequence
  Description of Artificial Sequence: Synthetic epitope
EKGSVVEGSN

SEQ ID NO: 16318 - protein, 10 aa, Artificial Sequence
  Description of Artificial Sequence: Synthetic epitope
EKGTQERSRS

SEQ ID NO: 16319 - protein, 10 aa, Artificial Sequence
  Description of Artificial Sequence: Synthetic epitope
EKGVEIEGPL

SEQ ID NO: 16320 - protein, 10 aa, Artificial Sequence
  Description of Artificial Sequence: Synthetic epitope
EKGVQSASSL

SEQ ID NO: 16321 - protein, 10 aa, Artificial Sequence
  Description of Artificial Sequence: Synthetic epitope
EKGVVKEEKN

SEQ ID NO: 16322 - protein, 10 aa, Artificial Sequence
  Description of Artificial Sequence: Synthetic epitope
EKHDNEDTAS

SEQ ID NO: 16323 - protein, 10 aa, Artificial Sequence
  Description of Artificial Sequence: Synthetic epitope
EKHITKTEVE

SEQ ID NO: 16324 - protein, 10 aa, Artificial Sequence
  Description of Artificial Sequence: Synthetic epitope
EKHREEFPGW

SEQ ID NO: 16325 - protein, 10 aa, Artificial Sequence
  Description of Artificial Sequence: Synthetic epitope
EKHVSMLQPQ

SEQ ID NO: 16326 - protein, 10 aa, Artificial Sequence
  Description of Artificial Sequence: Synthetic epitope
EKIAIPGSEE

SEQ ID NO: 16327 - protein, 10 aa, Artificial Sequence
  Description of Artificial Sequence: Synthetic epitope
EKIANTAAEK

SEQ ID NO: 16328 - protein, 10 aa, Artificial Sequence
  Description of Artificial Sequence: Synthetic epitope
EKIATAPKKE

SEQ ID NO: 16329 - protein, 10 aa, Artificial Sequence
  Description of Artificial Sequence: Synthetic epitope
EKIAVMLMER

SEQ ID NO: 16330 - protein, 10 aa, Artificial Sequence
  Description of Artificial Sequence: Synthetic epitope
EKIAYLLTNL

SEQ ID NO: 16331 - protein, 10 aa, Artificial Sequence
  Description of Artificial Sequence: Synthetic epitope
EKIEIIGKSI

SEQ ID NO: 16332 - protein, 10 aa, Artificial Sequence
  Description of Artificial Sequence: Synthetic epitope
EKIHLISTQS

SEQ ID NO: 16333 - protein, 10 aa, Artificial Sequence
  Description of Artificial Sequence: Synthetic epitope
EKIKEEAKKE

SEQ ID NO: 16334 - protein, 10 aa, Artificial Sequence
  Description of Artificial Sequence: Synthetic epitope
EKIKNSMDGK

SEQ ID NO: 16335 - protein, 10 aa, Artificial Sequence
  Description of Artificial Sequence: Synthetic epitope
EKIKVKFMTM

SEQ ID NO: 16336 - protein, 10 aa, Artificial Sequence
  Description of Artificial Sequence: Synthetic epitope
EKILMMINQY

SEQ ID NO: 16337 - protein, 10 aa, Artificial Sequence
  Description of Artificial Sequence: Synthetic epitope
EKILNSQSSK

SEQ ID NO: 16338 - protein, 10 aa, Artificial Sequence
  Description of Artificial Sequence: Synthetic epitope
EKILTTASSH

SEQ ID NO: 16339 - protein, 10 aa, Artificial Sequence
  Description of Artificial Sequence: Synthetic epitope
EKIMSSIGEG

SEQ ID NO: 16340 - protein, 10 aa, Artificial Sequence
  Description of Artificial Sequence: Synthetic epitope
EKINKTRNAR

SEQ ID NO: 16341 - protein, 10 aa, Artificial Sequence
  Description of Artificial Sequence: Synthetic epitope
EKIQTKAGEA

SEQ ID NO: 16342 - protein, 10 aa, Artificial Sequence
  Description of Artificial Sequence: Synthetic epitope
EKIQTNTNDS

SEQ ID NO: 16343 - protein, 10 aa, Artificial Sequence
  Description of Artificial Sequence: Synthetic epitope
EKIRAENSLV

SEQ ID NO: 16344 - protein, 10 aa, Artificial Sequence
  Description of Artificial Sequence: Synthetic epitope
EKIRSFVAYS

SEQ ID NO: 16345 - protein, 10 aa, Artificial Sequence
  Description of Artificial Sequence: Synthetic epitope
EKISNEQKIV

SEQ ID NO: 16346 - protein, 10 aa, Artificial Sequence
  Description of Artificial Sequence: Synthetic epitope
EKISSLSGAH

SEQ ID NO: 16347 - protein, 10 aa, Artificial Sequence
  Description of Artificial Sequence: Synthetic epitope
EKISSQQNPN

SEQ ID NO: 16348 - protein, 10 aa, Artificial Sequence
  Description of Artificial Sequence: Synthetic epitope
EKITSRQEKR

SEQ ID NO: 16349 - protein, 10 aa, Artificial Sequence
  Description of Artificial Sequence: Synthetic epitope
EKITTSKKPN

SEQ ID NO: 16350 - protein, 10 aa, Artificial Sequence
  Description of Artificial Sequence: Synthetic epitope
EKITVTTSTG

SEQ ID NO: 16351 - protein, 10 aa, Artificial Sequence
  Description of Artificial Sequence: Synthetic epitope
EKIVIEKTEL

SEQ ID NO: 16352 - protein, 10 aa, Artificial Sequence
  Description of Artificial Sequence: Synthetic epitope
EKKAADAEAE

SEQ ID NO: 16353 - protein, 10 aa, Artificial Sequence
  Description of Artificial Sequence: Synthetic epitope
EKKAAVEDSG

SEQ ID NO: 16354 - protein, 10 aa, Artificial Sequence
  Description of Artificial Sequence: Synthetic epitope
EKKAKYQYGG

SEQ ID NO: 16355 - protein, 10 aa, Artificial Sequence
  Description of Artificial Sequence: Synthetic epitope
EKKDAMYWEK

SEQ ID NO: 16356 - protein, 10 aa, Artificial Sequence
  Description of Artificial Sequence: Synthetic epitope
EKKEREYSEQ

SEQ ID NO: 16357 - protein, 10 aa, Artificial Sequence
  Description of Artificial Sequence: Synthetic epitope
EKKESNLETE

SEQ ID NO: 16358 - protein, 10 aa, Artificial Sequence
  Description of Artificial Sequence: Synthetic epitope
EKKETKEKSH

SEQ ID NO: 16359 - protein, 10 aa, Artificial Sequence
  Description of Artificial Sequence: Synthetic epitope
EKKFLRKAPM

SEQ ID NO: 16360 - protein, 10 aa, Artificial Sequence
  Description of Artificial Sequence: Synthetic epitope
EKKHDKYRVE

SEQ ID NO: 16361 - protein, 10 aa, Artificial Sequence
  Description of Artificial Sequence: Synthetic epitope
EKKHDKYRVE

SEQ ID NO: 16362 - protein, 10 aa, Artificial Sequence
  Description of Artificial Sequence: Synthetic epitope
EKKIRTLLNA

SEQ ID NO: 16363 - protein, 10 aa, Artificial Sequence
  Description of Artificial Sequence: Synthetic epitope
EKKISSIQSI

SEQ ID NO: 16364 - protein, 10 aa, Artificial Sequence
  Description of Artificial Sequence: Synthetic epitope
EKKLKAERDK

SEQ ID NO: 16365 - protein, 10 aa, Artificial Sequence
  Description of Artificial Sequence: Synthetic epitope
EKKLKIILEE

SEQ ID NO: 16366 - protein, 10 aa, Artificial Sequence
  Description of Artificial Sequence: Synthetic epitope
EKKLRIKSSF

SEQ ID NO: 16367 - protein, 10 aa, Artificial Sequence
  Description of Artificial Sequence: Synthetic epitope
EKKLTGSTVG

SEQ ID NO: 16368 - protein, 10 aa, Artificial Sequence
  Description of Artificial Sequence: Synthetic epitope
EKKMERVSEP

SEQ ID NO: 16369 - protein, 10 aa, Artificial Sequence
  Description of Artificial Sequence: Synthetic epitope
EKKPKKEANQ

SEQ ID NO: 16370 - protein, 10 aa, Artificial Sequence
  Description of Artificial Sequence: Synthetic epitope
EKKQKVVLGK

SEQ ID NO: 16371 - protein, 10 aa, Artificial Sequence
  Description of Artificial Sequence: Synthetic epitope
EKKQVFTSEK

SEQ ID NO: 16372 - protein, 10 aa, Artificial Sequence
  Description of Artificial Sequence: Synthetic epitope
EKKSFETNKY

SEQ ID NO: 16373 - protein, 10 aa, Artificial Sequence
  Description of Artificial Sequence: Synthetic epitope
EKKSKAIIEE

SEQ ID NO: 16374 - protein, 10 aa, Artificial Sequence
  Description of Artificial Sequence: Synthetic epitope
EKKSPDKTES

SEQ ID NO: 16375 - protein, 10 aa, Artificial Sequence
  Description of Artificial Sequence: Synthetic epitope
EKKSSARSTQ

SEQ ID NO: 16376 - protein, 10 aa, Artificial Sequence
  Description of Artificial Sequence: Synthetic epitope
EKKTATFENI

SEQ ID NO: 16377 - protein, 10 aa, Artificial Sequence
  Description of Artificial Sequence: Synthetic epitope
EKKTETAAHS

SEQ ID NO: 16378 - protein, 10 aa, Artificial Sequence
  Description of Artificial Sequence: Synthetic epitope
EKKTSVVTQR

SEQ ID NO: 16379 - protein, 10 aa, Artificial Sequence
  Description of Artificial Sequence: Synthetic epitope
EKKTTKELVH

SEQ ID NO: 16380 - protein, 10 aa, Artificial Sequence
  Description of Artificial Sequence: Synthetic epitope
EKKVKSPRAA

SEQ ID NO: 16381 - protein, 10 aa, Artificial Sequence
  Description of Artificial Sequence: Synthetic epitope
EKLAEAESEA

SEQ ID NO: 16382 - protein, 10 aa, Artificial Sequence
  Description of Artificial Sequence: Synthetic epitope
EKLAESLRHE

SEQ ID NO: 16383 - protein, 10 aa, Artificial Sequence
  Description of Artificial Sequence: Synthetic epitope
EKLAKVYQPK

SEQ ID NO: 16384 - protein, 10 aa, Artificial Sequence
  Description of Artificial Sequence: Synthetic epitope
EKLARVNENL

SEQ ID NO: 16385 - protein, 10 aa, Artificial Sequence
  Description of Artificial Sequence: Synthetic epitope
EKLASMLETL

SEQ ID NO: 16386 - protein, 10 aa, Artificial Sequence
  Description of Artificial Sequence: Synthetic epitope
EKLAVAKDRM

SEQ ID NO: 16387 - protein, 10 aa, Artificial Sequence
  Description of Artificial Sequence: Synthetic epitope
EKLEIEKRAI

SEQ ID NO: 16388 - protein, 10 aa, Artificial Sequence
  Description of Artificial Sequence: Synthetic epitope
EKLEKEKETI

SEQ ID NO: 16389 - protein, 10 aa, Artificial Sequence
  Description of Artificial Sequence: Synthetic epitope
EKLEVTRTDH

SEQ ID NO: 16390 - protein, 10 aa, Artificial Sequence
  Description of Artificial Sequence: Synthetic epitope
EKLGQALTEV

SEQ ID NO: 16391 - protein, 10 aa, Artificial Sequence
  Description of Artificial Sequence: Synthetic epitope
EKLHVAAETE

SEQ ID NO: 16392 - protein, 10 aa, Artificial Sequence
  Description of Artificial Sequence: Synthetic epitope
EKLKKQAPEL

SEQ ID NO: 16393 - protein, 10 aa, Artificial Sequence
  Description of Artificial Sequence: Synthetic epitope
EKLKLDLQEL

SEQ ID NO: 16394 - protein, 10 aa, Artificial Sequence
  Description of Artificial Sequence: Synthetic epitope
EKLKLELESR

SEQ ID NO: 16395 - protein, 10 aa, Artificial Sequence
  Description of Artificial Sequence: Synthetic epitope
EKLKNAENNV

SEQ ID NO: 16396 - protein, 10 aa, Artificial Sequence
  Description of Artificial Sequence: Synthetic epitope
EKLKSQVTSQ

SEQ ID NO: 16397 - protein, 10 aa, Artificial Sequence
  Description of Artificial Sequence: Synthetic epitope
EKLKSSQMEQ

SEQ ID NO: 16398 - protein, 10 aa, Artificial Sequence
  Description of Artificial Sequence: Synthetic epitope
EKLKTIVPQT

SEQ ID NO: 16399 - protein, 10 aa, Artificial Sequence
  Description of Artificial Sequence: Synthetic epitope
EKLLAEQHQR

SEQ ID NO: 16400 - protein, 10 aa, Artificial Sequence
  Description of Artificial Sequence: Synthetic epitope
EKLLTMVSGQ

SEQ ID NO: 16401 - protein, 10 aa, Artificial Sequence
  Description of Artificial Sequence: Synthetic epitope
EKLLTQMESE

SEQ ID NO: 16402 - protein, 10 aa, Artificial Sequence
  Description of Artificial Sequence: Synthetic epitope
EKLMLAQDEE

SEQ ID NO: 16403 - protein, 10 aa, Artificial Sequence
  Description of Artificial Sequence: Synthetic epitope
EKLNKMEIPI

SEQ ID NO: 16404 - protein, 10 aa, Artificial Sequence
  Description of Artificial Sequence: Synthetic epitope
EKLQAVVAGV

SEQ ID NO: 16405 - protein, 10 aa, Artificial Sequence
  Description of Artificial Sequence: Synthetic epitope
EKLRLKVDKE

SEQ ID NO: 16406 - protein, 10 aa, Artificial Sequence
  Description of Artificial Sequence: Synthetic epitope
EKLRQAKQSS

SEQ ID NO: 16407 - protein, 10 aa, Artificial Sequence
  Description of Artificial Sequence: Synthetic epitope
EKLRSGMAQQ

SEQ ID NO: 16408 - protein, 10 aa, Artificial Sequence
  Description of Artificial Sequence: Synthetic epitope
EKLRTLIDLV

SEQ ID NO: 16409 - protein, 10 aa, Artificial Sequence
  Description of Artificial Sequence: Synthetic epitope
EKLRTSMIDD

SEQ ID NO: 16410 - protein, 10 aa, Artificial Sequence
  Description of Artificial Sequence: Synthetic epitope
EKLSRAKSAK

SEQ ID NO: 16411 - protein, 10 aa, Artificial Sequence
  Description of Artificial Sequence: Synthetic epitope
EKLSTKLPEQ

SEQ ID NO: 16412 - protein, 10 aa, Artificial Sequence
  Description of Artificial Sequence: Synthetic epitope
EKLTVKSQQA

SEQ ID NO: 16413 - protein, 10 aa, Artificial Sequence
  Description of Artificial Sequence: Synthetic epitope
EKLVEQTAAQ

SEQ ID NO: 16414 - protein, 10 aa, Artificial Sequence
  Description of Artificial Sequence: Synthetic epitope
EKLVKLESGL

SEQ ID NO: 16415 - protein, 10 aa, Artificial Sequence
  Description of Artificial Sequence: Synthetic epitope
EKLVKSISQL

SEQ ID NO: 16416 - protein, 10 aa, Artificial Sequence
  Description of Artificial Sequence: Synthetic epitope
EKMEREKQKK

SEQ ID NO: 16417 - protein, 10 aa, Artificial Sequence
  Description of Artificial Sequence: Synthetic epitope
EKMKDKLQKI

SEQ ID NO: 16418 - protein, 10 aa, Artificial Sequence
  Description of Artificial Sequence: Synthetic epitope
EKMKIDKRNY

SEQ ID NO: 16419 - protein, 10 aa, Artificial Sequence
  Description of Artificial Sequence: Synthetic epitope
EKMKSLEKIS

SEQ ID NO: 16420 - protein, 10 aa, Artificial Sequence
  Description of Artificial Sequence: Synthetic epitope
EKMQAQMQQS

SEQ ID NO: 16421 - protein, 10 aa, Artificial Sequence
  Description of Artificial Sequence: Synthetic epitope
EKMSMTERQD

SEQ ID NO: 16422 - protein, 10 aa, Artificial Sequence
  Description of Artificial Sequence: Synthetic epitope
EKMSPTIGKQ

SEQ ID NO: 16423 - protein, 10 aa, Artificial Sequence
  Description of Artificial Sequence: Synthetic epitope
EKMVEPQYQE

SEQ ID NO: 16424 - protein, 10 aa, Artificial Sequence
  Description of Artificial Sequence: Synthetic epitope
EKMVIITTKS

SEQ ID NO: 16425 - protein, 10 aa, Artificial Sequence
  Description of Artificial Sequence: Synthetic epitope
EKMVQLNEEK

SEQ ID NO: 16426 - protein, 10 aa, Artificial Sequence
  Description of Artificial Sequence: Synthetic epitope
EKMYSKTNTS

SEQ ID NO: 16427 - protein, 10 aa, Artificial Sequence
  Description of Artificial Sequence: Synthetic epitope
EKNATENESQ

SEQ ID NO: 16428 - protein, 10 aa, Artificial Sequence
  Description of Artificial Sequence: Synthetic epitope
EKNEVIATVL

SEQ ID NO: 16429 - protein, 10 aa, Artificial Sequence
  Description of Artificial Sequence: Synthetic epitope
EKNFAKGSEE

SEQ ID NO: 16430 - protein, 10 aa, Artificial Sequence
  Description of Artificial Sequence: Synthetic epitope
EKNILSSADY

SEQ ID NO: 16431 - protein, 10 aa, Artificial Sequence
  Description of Artificial Sequence: Synthetic epitope
EKNINQLKSE

SEQ ID NO: 16432 - protein, 10 aa, Artificial Sequence
  Description of Artificial Sequence: Synthetic epitope
EKNKKEMNIQ

SEQ ID NO: 16433 - protein, 10 aa, Artificial Sequence
  Description of Artificial Sequence: Synthetic epitope
EKNKTKQDKG

SEQ ID NO: 16434 - protein, 10 aa, Artificial Sequence
  Description of Artificial Sequence: Synthetic epitope
EKNLAMSDAA

SEQ ID NO: 16435 - protein, 10 aa, Artificial Sequence
  Description of Artificial Sequence: Synthetic epitope
EKNMILEQQA

SEQ ID NO: 16436 - protein, 10 aa, Artificial Sequence
  Description of Artificial Sequence: Synthetic epitope
EKNQWGEIVE

SEQ ID NO: 16437 - protein, 10 aa, Artificial Sequence
  Description of Artificial Sequence: Synthetic epitope
EKNRMGNKTV

SEQ ID NO: 16438 - protein, 10 aa, Artificial Sequence
  Description of Artificial Sequence: Synthetic epitope
EKNTESSENM

SEQ ID NO: 16439 - protein, 10 aa, Artificial Sequence
  Description of Artificial Sequence: Synthetic epitope
EKNVMNDAWR

SEQ ID NO: 16440 - protein, 10 aa, Artificial Sequence
  Description of Artificial Sequence: Synthetic epitope
EKNVRSSESQ

SEQ ID NO: 16441 - protein, 10 aa, Artificial Sequence
  Description of Artificial Sequence: Synthetic epitope
EKPHMHTDSN

SEQ ID NO: 16442 - protein, 10 aa, Artificial Sequence
  Description of Artificial Sequence: Synthetic epitope
EKPKIRMLSK

SEQ ID NO: 16443 - protein, 10 aa, Artificial Sequence
  Description of Artificial Sequence: Synthetic epitope
EKQADTLNVI

SEQ ID NO: 16444 - protein, 10 aa, Artificial Sequence
  Description of Artificial Sequence: Synthetic epitope
EKQALAVGNK

SEQ ID NO: 16445 - protein, 10 aa, Artificial Sequence
  Description of Artificial Sequence: Synthetic epitope
EKQALSDLMI

SEQ ID NO: 16446 - protein, 10 aa, Artificial Sequence
  Description of Artificial Sequence: Synthetic epitope
EKQAQLQEPI

SEQ ID NO: 16447 - protein, 10 aa, Artificial Sequence
  Description of Artificial Sequence: Synthetic epitope
EKQAVNNQFP

SEQ ID NO: 16448 - protein, 10 aa, Artificial Sequence
  Description of Artificial Sequence: Synthetic epitope
EKQEATRQDH

SEQ ID NO: 16449 - protein, 10 aa, Artificial Sequence
  Description of Artificial Sequence: Synthetic epitope
EKQESELKLK

SEQ ID NO: 16450 - protein, 10 aa, Artificial Sequence
  Description of Artificial Sequence: Synthetic epitope
EKQIEEINEQ

SEQ ID NO: 16451 - protein, 10 aa, Artificial Sequence
  Description of Artificial Sequence: Synthetic epitope
EKQIEVAENE

SEQ ID NO: 16452 - protein, 10 aa, Artificial Sequence
  Description of Artificial Sequence: Synthetic epitope
EKQKAELQQE

SEQ ID NO: 16453 - protein, 10 aa, Artificial Sequence
  Description of Artificial Sequence: Synthetic epitope
EKQKEAAETK

SEQ ID NO: 16454 - protein, 10 aa, Artificial Sequence
  Description of Artificial Sequence: Synthetic epitope
EKQKRQKGSL

SEQ ID NO: 16455 - protein, 10 aa, Artificial Sequence
  Description of Artificial Sequence: Synthetic epitope
EKQKTGTVMD

SEQ ID NO: 16456 - protein, 10 aa, Artificial Sequence
  Description of Artificial Sequence: Synthetic epitope
EKQLGQARSQ

SEQ ID NO: 16457 - protein, 10 aa, Artificial Sequence
  Description of Artificial Sequence: Synthetic epitope
EKQLLKLEQQ

SEQ ID NO: 16458 - protein, 10 aa, Artificial Sequence
  Description of Artificial Sequence: Synthetic epitope
EKQLMIENGK

SEQ ID NO: 16459 - protein, 10 aa, Artificial Sequence
  Description of Artificial Sequence: Synthetic epitope
EKQMKQEINT

SEQ ID NO: 16460 - protein, 10 aa, Artificial Sequence
  Description of Artificial Sequence: Synthetic epitope
EKQNIEAKVE

SEQ ID NO: 16461 - protein, 10 aa, Artificial Sequence
  Description of Artificial Sequence: Synthetic epitope
EKQNPAEGLQ

SEQ ID NO: 16462 - protein, 10 aa, Artificial Sequence
  Description of Artificial Sequence: Synthetic epitope
EKQPDVILEA

SEQ ID NO: 16463 - protein, 10 aa, Artificial Sequence
  Description of Artificial Sequence: Synthetic epitope
EKQPLALVQG

SEQ ID NO: 16464 - protein, 10 aa, Artificial Sequence
  Description of Artificial Sequence: Synthetic epitope
EKQPSLSFGL

SEQ ID NO: 16465 - protein, 10 aa, Artificial Sequence
  Description of Artificial Sequence: Synthetic epitope
EKQQSGSELE

SEQ ID NO: 16466 - protein, 10 aa, Artificial Sequence
  Description of Artificial Sequence: Synthetic epitope
EKQSAQLTEI

SEQ ID NO: 16467 - protein, 10 aa, Artificial Sequence
  Description of Artificial Sequence: Synthetic epitope
EKQSGGASTA

SEQ ID NO: 16468 - protein, 10 aa, Artificial Sequence
  Description of Artificial Sequence: Synthetic epitope
EKQSNEFGKP

SEQ ID NO: 16469 - protein, 10 aa, Artificial Sequence
  Description of Artificial Sequence: Synthetic epitope
EKQTISLPVS

SEQ ID NO: 16470 - protein, 10 aa, Artificial Sequence
  Description of Artificial Sequence: Synthetic epitope
EKQVEELLMA

SEQ ID NO: 16471 - protein, 10 aa, Artificial Sequence
  Description of Artificial Sequence: Synthetic epitope
EKQWQLFLKK

SEQ ID NO: 16472 - protein, 10 aa, Artificial Sequence
  Description of Artificial Sequence: Synthetic epitope
EKRAKRLSSA

SEQ ID NO: 16473 - protein, 10 aa, Artificial Sequence
  Description of Artificial Sequence: Synthetic epitope
EKRALNIKQN

SEQ ID NO: 16474 - protein, 10 aa, Artificial Sequence
  Description of Artificial Sequence: Synthetic epitope
EKRAQRRIAR

SEQ ID NO: 16475 - protein, 10 aa, Artificial Sequence
  Description of Artificial Sequence: Synthetic epitope
EKRASRKSSH

SEQ ID NO: 16476 - protein, 10 aa, Artificial Sequence
  Description of Artificial Sequence: Synthetic epitope
EKRKEVNAKS

SEQ ID NO: 16477 - protein, 10 aa, Artificial Sequence
  Description of Artificial Sequence: Synthetic epitope
EKRKQANLAQ

SEQ ID NO: 16478 - protein, 10 aa, Artificial Sequence
  Description of Artificial Sequence: Synthetic epitope
EKRKTSLLDQ

SEQ ID NO: 16479 - protein, 10 aa, Artificial Sequence
  Description of Artificial Sequence: Synthetic epitope
EKRMKASESS

SEQ ID NO: 16480 - protein, 10 aa, Artificial Sequence
  Description of Artificial Sequence: Synthetic epitope
EKRQEKMNEK

SEQ ID NO: 16481 - protein, 10 aa, Artificial Sequence
  Description of Artificial Sequence: Synthetic epitope
EKRSRIKKSK

SEQ ID NO: 16482 - protein, 10 aa, Artificial Sequence
  Description of Artificial Sequence: Synthetic epitope
EKRSTRTRLS

SEQ ID NO: 16483 - protein, 10 aa, Artificial Sequence
  Description of Artificial Sequence: Synthetic epitope
EKRVKDTESE

SEQ ID NO: 16484 - protein, 10 aa, Artificial Sequence
  Description of Artificial Sequence: Synthetic epitope
EKRVSTKTSA

SEQ ID NO: 16485 - protein, 10 aa, Artificial Sequence
  Description of Artificial Sequence: Synthetic epitope
EKSAEEVTMS

SEQ ID NO: 16486 - protein, 10 aa, Artificial Sequence
  Description of Artificial Sequence: Synthetic epitope
EKSALEKIKE

SEQ ID NO: 16487 - protein, 10 aa, Artificial Sequence
  Description of Artificial Sequence: Synthetic epitope
EKSATLISKT

SEQ ID NO: 16488 - protein, 10 aa, Artificial Sequence
  Description of Artificial Sequence: Synthetic epitope
EKSAVSTSVP

SEQ ID NO: 16489 - protein, 10 aa, Artificial Sequence
  Description of Artificial Sequence: Synthetic epitope
EKSEETHASQ

SEQ ID NO: 16490 - protein, 10 aa, Artificial Sequence
  Description of Artificial Sequence: Synthetic epitope
EKSEKETTSK

SEQ ID NO: 16491 - protein, 10 aa, Artificial Sequence
  Description of Artificial Sequence: Synthetic epitope
EKSEQVQGAQ

SEQ ID NO: 16492 - protein, 10 aa, Artificial Sequence
  Description of Artificial Sequence: Synthetic epitope
EKSESKGTRR

SEQ ID NO: 16493 - protein, 10 aa, Artificial Sequence
  Description of Artificial Sequence: Synthetic epitope
EKSFVASNDE

SEQ ID NO: 16494 - protein, 10 aa, Artificial Sequence
  Description of Artificial Sequence: Synthetic epitope
EKSGKMDVAE

SEQ ID NO: 16495 - protein, 10 aa, Artificial Sequence
  Description of Artificial Sequence: Synthetic epitope
EKSHSYRTDN

SEQ ID NO: 16496 - protein, 10 aa, Artificial Sequence
  Description of Artificial Sequence: Synthetic epitope
EKSIKSDDSQ

SEQ ID NO: 16497 - protein, 10 aa, Artificial Sequence
  Description of Artificial Sequence: Synthetic epitope
EKSKAAKELA

SEQ ID NO: 16498 - protein, 10 aa, Artificial Sequence
  Description of Artificial Sequence: Synthetic epitope
EKSKLAEIEE

SEQ ID NO: 16499 - protein, 10 aa, Artificial Sequence
  Description of Artificial Sequence: Synthetic epitope
EKSLKASQDA

SEQ ID NO: 16500 - protein, 10 aa, Artificial Sequence
  Description of Artificial Sequence: Synthetic epitope
EKSLTKYLLK

SEQ ID NO: 16501 - protein, 10 aa, Artificial Sequence
  Description of Artificial Sequence: Synthetic epitope
EKSNKSLEDK

SEQ ID NO: 16502 - protein, 10 aa, Artificial Sequence
  Description of Artificial Sequence: Synthetic epitope
EKSQLIMQAE

SEQ ID NO: 16503 - protein, 10 aa, Artificial Sequence
  Description of Artificial Sequence: Synthetic epitope
EKSSEKEKTA

SEQ ID NO: 16504 - protein, 10 aa, Artificial Sequence
  Description of Artificial Sequence: Synthetic epitope
EKSSNLVLQV

SEQ ID NO: 16505 - protein, 10 aa, Artificial Sequence
  Description of Artificial Sequence: Synthetic epitope
EKSSRYSEQS

SEQ ID NO: 16506 - protein, 10 aa, Artificial Sequence
  Description of Artificial Sequence: Synthetic epitope
EKSSVSRNPE

SEQ ID NO: 16507 - protein, 10 aa, Artificial Sequence
  Description of Artificial Sequence: Synthetic epitope
EKSVQPLADE

SEQ ID NO: 16508 - protein, 10 aa, Artificial Sequence
  Description of Artificial Sequence: Synthetic epitope
EKSVRRVMAQ

SEQ ID NO: 16509 - protein, 10 aa, Artificial Sequence
  Description of Artificial Sequence: Synthetic epitope
EKSVSQKVAA

SEQ ID NO: 16510 - protein, 10 aa, Artificial Sequence
  Description of Artificial Sequence: Synthetic epitope
EKTALLQARP

SEQ ID NO: 16511 - protein, 10 aa, Artificial Sequence
  Description of Artificial Sequence: Synthetic epitope
EKTASATFES

SEQ ID NO: 16512 - protein, 10 aa, Artificial Sequence
  Description of Artificial Sequence: Synthetic epitope
EKTDSETMHG

SEQ ID NO: 16513 - protein, 10 aa, Artificial Sequence
  Description of Artificial Sequence: Synthetic epitope
EKTETTFTFP

SEQ ID NO: 16514 - protein, 10 aa, Artificial Sequence
  Description of Artificial Sequence: Synthetic epitope
EKTFEDAQKS

SEQ ID NO: 16515 - protein, 10 aa, Artificial Sequence
  Description of Artificial Sequence: Synthetic epitope
EKTKSTETEH

SEQ ID NO: 16516 - protein, 10 aa, Artificial Sequence
  Description of Artificial Sequence: Synthetic epitope
EKTMSVEEKA

SEQ ID NO: 16517 - protein, 10 aa, Artificial Sequence
  Description of Artificial Sequence: Synthetic epitope
EKTPEEAQKE

SEQ ID NO: 16518 - protein, 10 aa, Artificial Sequence
  Description of Artificial Sequence: Synthetic epitope
EKTQIKEKDR

SEQ ID NO: 16519 - protein, 10 aa, Artificial Sequence
  Description of Artificial Sequence: Synthetic epitope
EKTRDPVEED

SEQ ID NO: 16520 - protein, 10 aa, Artificial Sequence
  Description of Artificial Sequence: Synthetic epitope
EKTSALLGAR

SEQ ID NO: 16521 - protein, 10 aa, Artificial Sequence
  Description of Artificial Sequence: Synthetic epitope
EKTSKSAVKK

SEQ ID NO: 16522 - protein, 10 aa, Artificial Sequence
  Description of Artificial Sequence: Synthetic epitope
EKTSSVQSDK

SEQ ID NO: 16523 - protein, 10 aa, Artificial Sequence
  Description of Artificial Sequence: Synthetic epitope
EKTSVKSDAE

SEQ ID NO: 16524 - protein, 10 aa, Artificial Sequence
  Description of Artificial Sequence: Synthetic epitope
EKTSVSEKSL

SEQ ID NO: 16525 - protein, 10 aa, Artificial Sequence
  Description of Artificial Sequence: Synthetic epitope
EKTTALNNMD

SEQ ID NO: 16526 - protein, 10 aa, Artificial Sequence
  Description of Artificial Sequence: Synthetic epitope
EKTVGRLFTI

SEQ ID NO: 16527 - protein, 10 aa, Artificial Sequence
  Description of Artificial Sequence: Synthetic epitope
EKTVLNSEVL

SEQ ID NO: 16528 - protein, 10 aa, Artificial Sequence
  Description of Artificial Sequence: Synthetic epitope
EKVANQIKEE

SEQ ID NO: 16529 - protein, 10 aa, Artificial Sequence
  Description of Artificial Sequence: Synthetic epitope
EKVDDVVKRL

SEQ ID NO: 16530 - protein, 10 aa, Artificial Sequence
  Description of Artificial Sequence: Synthetic epitope
EKVERSVVTL

SEQ ID NO: 16531 - protein, 10 aa, Artificial Sequence
  Description of Artificial Sequence: Synthetic epitope
EKVFTAITKH

SEQ ID NO: 16532 - protein, 10 aa, Artificial Sequence
  Description of Artificial Sequence: Synthetic epitope
EKVIQTSHDD

SEQ ID NO: 16533 - protein, 10 aa, Artificial Sequence
  Description of Artificial Sequence: Synthetic epitope
EKVKETLSME

SEQ ID NO: 16534 - protein, 10 aa, Artificial Sequence
  Description of Artificial Sequence: Synthetic epitope
EKVKNSEEQY

SEQ ID NO: 16535 - protein, 10 aa, Artificial Sequence
  Description of Artificial Sequence: Synthetic epitope
EKVKTITQVK

SEQ ID NO: 16536 - protein, 10 aa, Artificial Sequence
  Description of Artificial Sequence: Synthetic epitope
EKVKVDDLEG

SEQ ID NO: 16537 - protein, 10 aa, Artificial Sequence
  Description of Artificial Sequence: Synthetic epitope
EKVLASTIST

SEQ ID NO: 16538 - protein, 10 aa, Artificial Sequence
  Description of Artificial Sequence: Synthetic epitope
EKVLNMLRAL

SEQ ID NO: 16539 - protein, 10 aa, Artificial Sequence
  Description of Artificial Sequence: Synthetic epitope
EKVMAKQMEF

SEQ ID NO: 16540 - protein, 10 aa, Artificial Sequence
  Description of Artificial Sequence: Synthetic epitope
EKVNQTQPED

SEQ ID NO: 16541 - protein, 10 aa, Artificial Sequence
  Description of Artificial Sequence: Synthetic epitope
EKVQAGAVRN

SEQ ID NO: 16542 - protein, 10 aa, Artificial Sequence
  Description of Artificial Sequence: Synthetic epitope
EKVQLSESSV

SEQ ID NO: 16543 - protein, 10 aa, Artificial Sequence
  Description of Artificial Sequence: Synthetic epitope
EKVRKKEKEI

SEQ ID NO: 16544 - protein, 10 aa, Artificial Sequence
  Description of Artificial Sequence: Synthetic epitope
EKVSALYKNP

SEQ ID NO: 16545 - protein, 10 aa, Artificial Sequence
  Description of Artificial Sequence: Synthetic epitope
EKVSITQLQA

SEQ ID NO: 16546 - protein, 10 aa, Artificial Sequence
  Description of Artificial Sequence: Synthetic epitope
EKVSVDESVM

SEQ ID NO: 16547 - protein, 10 aa, Artificial Sequence
  Description of Artificial Sequence: Synthetic epitope
EKVTSVQNHI

SEQ ID NO: 16548 - protein, 10 aa, Artificial Sequence
  Description of Artificial Sequence: Synthetic epitope
EKVTTPAIRH

SEQ ID NO: 16549 - protein, 10 aa, Artificial Sequence
  Description of Artificial Sequence: Synthetic epitope
EKVVEATNSV

SEQ ID NO: 16550 - protein, 10 aa, Artificial Sequence
  Description of Artificial Sequence: Synthetic epitope
EKYDRSEIQE

SEQ ID NO: 16551 - protein, 10 aa, Artificial Sequence
  Description of Artificial Sequence: Synthetic epitope
EKYEEKEKTG

SEQ ID NO: 16552 - protein, 10 aa, Artificial Sequence
  Description of Artificial Sequence: Synthetic epitope
EKYSTLPAED

SEQ ID NO: 16553 - protein, 10 aa, Artificial Sequence
  Description of Artificial Sequence: Synthetic epitope
ELAAHKSLAG

SEQ ID NO: 16554 - protein, 10 aa, Artificial Sequence
  Description of Artificial Sequence: Synthetic epitope
ELAAKESLIF

SEQ ID NO: 16555 - protein, 10 aa, Artificial Sequence
  Description of Artificial Sequence: Synthetic epitope
ELAAQQRQEE

SEQ ID NO: 16556 - protein, 10 aa, Artificial Sequence
  Description of Artificial Sequence: Synthetic epitope
ELAASTSVQE

SEQ ID NO: 16557 - protein, 10 aa, Artificial Sequence
  Description of Artificial Sequence: Synthetic epitope
ELAINYQEQA

SEQ ID NO: 16558 - protein, 10 aa, Artificial Sequence
  Description of Artificial Sequence: Synthetic epitope
ELAKKSEDSG

SEQ ID NO: 16559 - protein, 10 aa, Artificial Sequence
  Description of Artificial Sequence: Synthetic epitope
ELAKSKAEVA

SEQ ID NO: 16560 - protein, 10 aa, Artificial Sequence
  Description of Artificial Sequence: Synthetic epitope
ELAKSLKVDP

SEQ ID NO: 16561 - protein, 10 aa, Artificial Sequence
  Description of Artificial Sequence: Synthetic epitope
ELALARMKDL

SEQ ID NO: 16562 - protein, 10 aa, Artificial Sequence
  Description of Artificial Sequence: Synthetic epitope
ELALKEAETD

SEQ ID NO: 16563 - protein, 10 aa, Artificial Sequence
  Description of Artificial Sequence: Synthetic epitope
ELALSKQRRS

SEQ ID NO: 16564 - protein, 10 aa, Artificial Sequence
  Description of Artificial Sequence: Synthetic epitope
ELANEQKVRA

SEQ ID NO: 16565 - protein, 10 aa, Artificial Sequence
  Description of Artificial Sequence: Synthetic epitope
ELAQSTMSMR

SEQ ID NO: 16566 - protein, 10 aa, Artificial Sequence
  Description of Artificial Sequence: Synthetic epitope
ELAQTAKEPY

SEQ ID NO: 16567 - protein, 10 aa, Artificial Sequence
  Description of Artificial Sequence: Synthetic epitope
ELAQVRTALQ

SEQ ID NO: 16568 - protein, 10 aa, Artificial Sequence
  Description of Artificial Sequence: Synthetic epitope
ELASAQQRPD

SEQ ID NO: 16569 - protein, 10 aa, Artificial Sequence
  Description of Artificial Sequence: Synthetic epitope
ELASILDVRN

SEQ ID NO: 16570 - protein, 10 aa, Artificial Sequence
  Description of Artificial Sequence: Synthetic epitope
ELAVAMTAVK

SEQ ID NO: 16571 - protein, 10 aa, Artificial Sequence
  Description of Artificial Sequence: Synthetic epitope
ELAVQVSMKH

SEQ ID NO: 16572 - protein, 10 aa, Artificial Sequence
  Description of Artificial Sequence: Synthetic epitope
ELAVRVSESM

SEQ ID NO: 16573 - protein, 10 aa, Artificial Sequence
  Description of Artificial Sequence: Synthetic epitope
ELDKASQEPP

SEQ ID NO: 16574 - protein, 10 aa, Artificial Sequence
  Description of Artificial Sequence: Synthetic epitope
ELDSLVQSSQ

SEQ ID NO: 16575 - protein, 10 aa, Artificial Sequence
  Description of Artificial Sequence: Synthetic epitope
ELDTASRKTQ

SEQ ID NO: 16576 - protein, 10 aa, Artificial Sequence
  Description of Artificial Sequence: Synthetic epitope
ELEAASFPAG

SEQ ID NO: 16577 - protein, 10 aa, Artificial Sequence
  Description of Artificial Sequence: Synthetic epitope
ELEAELLELQ

SEQ ID NO: 16578 - protein, 10 aa, Artificial Sequence
  Description of Artificial Sequence: Synthetic epitope
ELEAQRVATE

SEQ ID NO: 16579 - protein, 10 aa, Artificial Sequence
  Description of Artificial Sequence: Synthetic epitope
ELEATLKEAE

SEQ ID NO: 16580 - protein, 10 aa, Artificial Sequence
  Description of Artificial Sequence: Synthetic epitope
ELEATLRTQS

SEQ ID NO: 16581 - protein, 10 aa, Artificial Sequence
  Description of Artificial Sequence: Synthetic epitope
ELEELSLEAQ

SEQ ID NO: 16582 - protein, 10 aa, Artificial Sequence
  Description of Artificial Sequence: Synthetic epitope
ELEITKSSTS

SEQ ID NO: 16583 - protein, 10 aa, Artificial Sequence
  Description of Artificial Sequence: Synthetic epitope
ELEKIQLLQQ

SEQ ID NO: 16584 - protein, 10 aa, Artificial Sequence
  Description of Artificial Sequence: Synthetic epitope
ELEKLDVIST

SEQ ID NO: 16585 - protein, 10 aa, Artificial Sequence
  Description of Artificial Sequence: Synthetic epitope
ELELIEGQAK

SEQ ID NO: 16586 - protein, 10 aa, Artificial Sequence
  Description of Artificial Sequence: Synthetic epitope
ELEMEQQNEA

SEQ ID NO: 16587 - protein, 10 aa, Artificial Sequence
  Description of Artificial Sequence: Synthetic epitope
ELENAKNMLV

SEQ ID NO: 16588 - protein, 10 aa, Artificial Sequence
  Description of Artificial Sequence: Synthetic epitope
ELENIKKSSE

SEQ ID NO: 16589 - protein, 10 aa, Artificial Sequence
  Description of Artificial Sequence: Synthetic epitope
ELEQNVVLVQ

SEQ ID NO: 16590 - protein, 10 aa, Artificial Sequence
  Description of Artificial Sequence: Synthetic epitope
ELERTQAEDN

SEQ ID NO: 16591 - protein, 10 aa, Artificial Sequence
  Description of Artificial Sequence: Synthetic epitope
ELESEKEQLK

SEQ ID NO: 16592 - protein, 10 aa, Artificial Sequence
  Description of Artificial Sequence: Synthetic epitope
ELESSTSNSP

SEQ ID NO: 16593 - protein, 10 aa, Artificial Sequence
  Description of Artificial Sequence: Synthetic epitope
ELESVKAQSL

SEQ ID NO: 16594 - protein, 10 aa, Artificial Sequence
  Description of Artificial Sequence: Synthetic epitope
ELFPTSLSTS

SEQ ID NO: 16595 - protein, 10 aa, Artificial Sequence
  Description of Artificial Sequence: Synthetic epitope
ELFTNTRSDL

SEQ ID NO: 16596 - protein, 10 aa, Artificial Sequence
  Description of Artificial Sequence: Synthetic epitope
ELGDMSLSDN

SEQ ID NO: 16597 - protein, 10 aa, Artificial Sequence
  Description of Artificial Sequence: Synthetic epitope
ELGIQEFFTE

SEQ ID NO: 16598 - protein, 10 aa, Artificial Sequence
  Description of Artificial Sequence: Synthetic epitope
ELGMPVQTQN

SEQ ID NO: 16599 - protein, 10 aa, Artificial Sequence
  Description of Artificial Sequence: Synthetic epitope
ELGYDLKENA

SEQ ID NO: 16600 - protein, 10 aa, Artificial Sequence
  Description of Artificial Sequence: Synthetic epitope
ELHQMRVQDN

SEQ ID NO: 16601 - protein, 10 aa, Artificial Sequence
  Description of Artificial Sequence: Synthetic epitope
ELHQNVNVKN

SEQ ID NO: 16602 - protein, 10 aa, Artificial Sequence
  Description of Artificial Sequence: Synthetic epitope
ELHSGGAIVS

SEQ ID NO: 16603 - protein, 10 aa, Artificial Sequence
  Description of Artificial Sequence: Synthetic epitope
ELIADIYKLI

SEQ ID NO: 16604 - protein, 10 aa, Artificial Sequence
  Description of Artificial Sequence: Synthetic epitope
ELIDSREIGA

SEQ ID NO: 16605 - protein, 10 aa, Artificial Sequence
  Description of Artificial Sequence: Synthetic epitope
ELIGTEEIIK

SEQ ID NO: 16606 - protein, 10 aa, Artificial Sequence
  Description of Artificial Sequence: Synthetic epitope
ELIKNTQTYT

SEQ ID NO: 16607 - protein, 10 aa, Artificial Sequence
  Description of Artificial Sequence: Synthetic epitope
ELILEMNVQS

SEQ ID NO: 16608 - protein, 10 aa, Artificial Sequence
  Description of Artificial Sequence: Synthetic epitope
ELILLELSSI

SEQ ID NO: 16609 - protein, 10 aa, Artificial Sequence
  Description of Artificial Sequence: Synthetic epitope
ELISKAIEID

SEQ ID NO: 16610 - protein, 10 aa, Artificial Sequence
  Description of Artificial Sequence: Synthetic epitope
ELISLVEDVS

SEQ ID NO: 16611 - protein, 10 aa, Artificial Sequence
  Description of Artificial Sequence: Synthetic epitope
ELIVKQGSKG

SEQ ID NO: 16612 - protein, 10 aa, Artificial Sequence
  Description of Artificial Sequence: Synthetic epitope
ELIVTRELSA

SEQ ID NO: 16613 - protein, 10 aa, Artificial Sequence
  Description of Artificial Sequence: Synthetic epitope
ELKAVLERQE

SEQ ID NO: 16614 - protein, 10 aa, Artificial Sequence
  Description of Artificial Sequence: Synthetic epitope
ELKEIIQQGP

SEQ ID NO: 16615 - protein, 10 aa, Artificial Sequence
  Description of Artificial Sequence: Synthetic epitope
ELKERVSEDD

SEQ ID NO: 16616 - protein, 10 aa, Artificial Sequence
  Description of Artificial Sequence: Synthetic epitope
ELKINISRLE

SEQ ID NO: 16617 - protein, 10 aa, Artificial Sequence
  Description of Artificial Sequence: Synthetic epitope
ELKLKEIKEQ

SEQ ID NO: 16618 - protein, 10 aa, Artificial Sequence
  Description of Artificial Sequence: Synthetic epitope
ELKLLTSAIG

SEQ ID NO: 16619 - protein, 10 aa, Artificial Sequence
  Description of Artificial Sequence: Synthetic epitope
ELKLQESEKE

SEQ ID NO: 16620 - protein, 10 aa, Artificial Sequence
  Description of Artificial Sequence: Synthetic epitope
ELKQIREQQD

SEQ ID NO: 16621 - protein, 10 aa, Artificial Sequence
  Description of Artificial Sequence: Synthetic epitope
ELKQNVNKVQ

SEQ ID NO: 16622 - protein, 10 aa, Artificial Sequence
  Description of Artificial Sequence: Synthetic epitope
ELKQVEGEAS

SEQ ID NO: 16623 - protein, 10 aa, Artificial Sequence
  Description of Artificial Sequence: Synthetic epitope
ELKRAKENQK

SEQ ID NO: 16624 - protein, 10 aa, Artificial Sequence
  Description of Artificial Sequence: Synthetic epitope
ELKTKSNAGA

SEQ ID NO: 16625 - protein, 10 aa, Artificial Sequence
  Description of Artificial Sequence: Synthetic epitope
ELKTSSRRTT

SEQ ID NO: 16626 - protein, 10 aa, Artificial Sequence
  Description of Artificial Sequence: Synthetic epitope
ELKVQLPHAG

SEQ ID NO: 16627 - protein, 10 aa, Artificial Sequence
  Description of Artificial Sequence: Synthetic epitope
ELLAKITNTD

SEQ ID NO: 16628 - protein, 10 aa, Artificial Sequence
  Description of Artificial Sequence: Synthetic epitope
ELLASTAVKL

SEQ ID NO: 16629 - protein, 10 aa, Artificial Sequence
  Description of Artificial Sequence: Synthetic epitope
ELLATTLKQA

SEQ ID NO: 16630 - protein, 10 aa, Artificial Sequence
  Description of Artificial Sequence: Synthetic epitope
ELLAVSAPAL

SEQ ID NO: 16631 - protein, 10 aa, Artificial Sequence
  Description of Artificial Sequence: Synthetic epitope
ELLEAEAPEA

SEQ ID NO: 16632 - protein, 10 aa, Artificial Sequence
  Description of Artificial Sequence: Synthetic epitope
ELLEQAAVGP

SEQ ID NO: 16633 - protein, 10 aa, Artificial Sequence
  Description of Artificial Sequence: Synthetic epitope
ELLERVKIVE

SEQ ID NO: 16634 - protein, 10 aa, Artificial Sequence
  Description of Artificial Sequence: Synthetic epitope
ELLGGDMVNQ

SEQ ID NO: 16635 - protein, 10 aa, Artificial Sequence
  Description of Artificial Sequence: Synthetic epitope
ELLKIIEKYQ

SEQ ID NO: 16636 - protein, 10 aa, Artificial Sequence
  Description of Artificial Sequence: Synthetic epitope
ELLMQKRLAM

SEQ ID NO: 16637 - protein, 10 aa, Artificial Sequence
  Description of Artificial Sequence: Synthetic epitope
ELLMTYFIQL

SEQ ID NO: 16638 - protein, 10 aa, Artificial Sequence
  Description of Artificial Sequence: Synthetic epitope
ELLNKFKSSM

SEQ ID NO: 16639 - protein, 10 aa, Artificial Sequence
  Description of Artificial Sequence: Synthetic epitope
ELLNSSLEEV

SEQ ID NO: 16640 - protein, 10 aa, Artificial Sequence
  Description of Artificial Sequence: Synthetic epitope
ELLQAYLSVY

SEQ ID NO: 16641 - protein, 10 aa, Artificial Sequence
  Description of Artificial Sequence: Synthetic epitope
ELLQMVKAPD

SEQ ID NO: 16642 - protein, 10 aa, Artificial Sequence
  Description of Artificial Sequence: Synthetic epitope
ELLREELASE

SEQ ID NO: 16643 - protein, 10 aa, Artificial Sequence
  Description of Artificial Sequence: Synthetic epitope
ELLRLELAEM

SEQ ID NO: 16644 - protein, 10 aa, Artificial Sequence
  Description of Artificial Sequence: Synthetic epitope
ELLRLRQHWK

SEQ ID NO: 16645 - protein, 10 aa, Artificial Sequence
  Description of Artificial Sequence: Synthetic epitope
ELLSGSTRTA

SEQ ID NO: 16646 - protein, 10 aa, Artificial Sequence
  Description of Artificial Sequence: Synthetic epitope
ELLSKARNAH

SEQ ID NO: 16647 - protein, 10 aa, Artificial Sequence
  Description of Artificial Sequence: Synthetic epitope
ELLSKVLEVL

SEQ ID NO: 16648 - protein, 10 aa, Artificial Sequence
  Description of Artificial Sequence: Synthetic epitope
ELLSVARKER

SEQ ID NO: 16649 - protein, 10 aa, Artificial Sequence
  Description of Artificial Sequence: Synthetic epitope
ELLTEVASVR

SEQ ID NO: 16650 - protein, 10 aa, Artificial Sequence
  Description of Artificial Sequence: Synthetic epitope
ELLTSLLRTE

SEQ ID NO: 16651 - protein, 10 aa, Artificial Sequence
  Description of Artificial Sequence: Synthetic epitope
ELLVTETQEV

SEQ ID NO: 16652 - protein, 10 aa, Artificial Sequence
  Description of Artificial Sequence: Synthetic epitope
ELMASLAESS

SEQ ID NO: 16653 - protein, 10 aa, Artificial Sequence
  Description of Artificial Sequence: Synthetic epitope
ELMFKTAKVE

SEQ ID NO: 16654 - protein, 10 aa, Artificial Sequence
  Description of Artificial Sequence: Synthetic epitope
ELMIGFKKQL

SEQ ID NO: 16655 - protein, 10 aa, Artificial Sequence
  Description of Artificial Sequence: Synthetic epitope
ELMMESHQLM

SEQ ID NO: 16656 - protein, 10 aa, Artificial Sequence
  Description of Artificial Sequence: Synthetic epitope
ELMQDGASLS

SEQ ID NO: 16657 - protein, 10 aa, Artificial Sequence
  Description of Artificial Sequence: Synthetic epitope
ELMTKLITET

SEQ ID NO: 16658 - protein, 10 aa, Artificial Sequence
  Description of Artificial Sequence: Synthetic epitope
ELMVRLARAE

SEQ ID NO: 16659 - protein, 10 aa, Artificial Sequence
  Description of Artificial Sequence: Synthetic epitope
ELNDQKFNEL

SEQ ID NO: 16660 - protein, 10 aa, Artificial Sequence
  Description of Artificial Sequence: Synthetic epitope
ELNEVLGEEQ

SEQ ID NO: 16661 - protein, 10 aa, Artificial Sequence
  Description of Artificial Sequence: Synthetic epitope
ELNKANELFY

SEQ ID NO: 16662 - protein, 10 aa, Artificial Sequence
  Description of Artificial Sequence: Synthetic epitope
ELNKATTMGD

SEQ ID NO: 16663 - protein, 10 aa, Artificial Sequence
  Description of Artificial Sequence: Synthetic epitope
ELNKDLALLK

SEQ ID NO: 16664 - protein, 10 aa, Artificial Sequence
  Description of Artificial Sequence: Synthetic epitope
ELNKKSMYSR

SEQ ID NO: 16665 - protein, 10 aa, Artificial Sequence
  Description of Artificial Sequence: Synthetic epitope
ELNKTALDTM

SEQ ID NO: 16666 - protein, 10 aa, Artificial Sequence
  Description of Artificial Sequence: Synthetic epitope
ELNMEEMVKN

SEQ ID NO: 16667 - protein, 10 aa, Artificial Sequence
  Description of Artificial Sequence: Synthetic epitope
ELNNVHTAVR

SEQ ID NO: 16668 - protein, 10 aa, Artificial Sequence
  Description of Artificial Sequence: Synthetic epitope
ELNSSITSQD

SEQ ID NO: 16669 - protein, 10 aa, Artificial Sequence
  Description of Artificial Sequence: Synthetic epitope
ELNTETVKAE

SEQ ID NO: 16670 - protein, 10 aa, Artificial Sequence
  Description of Artificial Sequence: Synthetic epitope
ELNVQISERK

SEQ ID NO: 16671 - protein, 10 aa, Artificial Sequence
  Description of Artificial Sequence: Synthetic epitope
ELPVKVNVPK

SEQ ID NO: 16672 - protein, 10 aa, Artificial Sequence
  Description of Artificial Sequence: Synthetic epitope
ELQAALAMEP

SEQ ID NO: 16673 - protein, 10 aa, Artificial Sequence
  Description of Artificial Sequence: Synthetic epitope
ELQAEATVSG

SEQ ID NO: 16674 - protein, 10 aa, Artificial Sequence
  Description of Artificial Sequence: Synthetic epitope
ELQAITTATT

SEQ ID NO: 16675 - protein, 10 aa, Artificial Sequence
  Description of Artificial Sequence: Synthetic epitope
ELQFARRENS

SEQ ID NO: 16676 - protein, 10 aa, Artificial Sequence
  Description of Artificial Sequence: Synthetic epitope
ELQGIGLNEK

SEQ ID NO: 16677 - protein, 10 aa, Artificial Sequence
  Description of Artificial Sequence: Synthetic epitope
ELQIQVEHYE

SEQ ID NO: 16678 - protein, 10 aa, Artificial Sequence
  Description of Artificial Sequence: Synthetic epitope
ELQMSKITNI

SEQ ID NO: 16679 - protein, 10 aa, Artificial Sequence
  Description of Artificial Sequence: Synthetic epitope
ELQTAKKTYQ

SEQ ID NO: 16680 - protein, 10 aa, Artificial Sequence
  Description of Artificial Sequence: Synthetic epitope
ELQTEKSLSS

SEQ ID NO: 16681 - protein, 10 aa, Artificial Sequence
  Description of Artificial Sequence: Synthetic epitope
ELQTSSAGLE

SEQ ID NO: 16682 - protein, 10 aa, Artificial Sequence
  Description of Artificial Sequence: Synthetic epitope
ELRDKIAKGE

SEQ ID NO: 16683 - protein, 10 aa, Artificial Sequence
  Description of Artificial Sequence: Synthetic epitope
ELREAEASES

SEQ ID NO: 16684 - protein, 10 aa, Artificial Sequence
  Description of Artificial Sequence: Synthetic epitope
ELRITNQVIY

SEQ ID NO: 16685 - protein, 10 aa, Artificial Sequence
  Description of Artificial Sequence: Synthetic epitope
ELRKALSEKS

SEQ ID NO: 16686 - protein, 10 aa, Artificial Sequence
  Description of Artificial Sequence: Synthetic epitope
ELRNSSTQTQ

SEQ ID NO: 16687 - protein, 10 aa, Artificial Sequence
  Description of Artificial Sequence: Synthetic epitope
ELRSVGDIEQ

SEQ ID NO: 16688 - protein, 10 aa, Artificial Sequence
  Description of Artificial Sequence: Synthetic epitope
ELRTEKTLQA

SEQ ID NO: 16689 - protein, 10 aa, Artificial Sequence
  Description of Artificial Sequence: Synthetic epitope
ELRVAVAKVE

SEQ ID NO: 16690 - protein, 10 aa, Artificial Sequence
  Description of Artificial Sequence: Synthetic epitope
ELRVTKRNIL

SEQ ID NO: 16691 - protein, 10 aa, Artificial Sequence
  Description of Artificial Sequence: Synthetic epitope
ELSAQEQEER

SEQ ID NO: 16692 - protein, 10 aa, Artificial Sequence
  Description of Artificial Sequence: Synthetic epitope
ELSAQETVED

SEQ ID NO: 16693 - protein, 10 aa, Artificial Sequence
  Description of Artificial Sequence: Synthetic epitope
ELSASMQRTG

SEQ ID NO: 16694 - protein, 10 aa, Artificial Sequence
  Description of Artificial Sequence: Synthetic epitope
ELSATKKDRV

SEQ ID NO: 16695 - protein, 10 aa, Artificial Sequence
  Description of Artificial Sequence: Synthetic epitope
ELSGRKSQKM

SEQ ID NO: 16696 - protein, 10 aa, Artificial Sequence
  Description of Artificial Sequence: Synthetic epitope
ELSGSKVMEQ

SEQ ID NO: 16697 - protein, 10 aa, Artificial Sequence
  Description of Artificial Sequence: Synthetic epitope
ELSIEFQEPV

SEQ ID NO: 16698 - protein, 10 aa, Artificial Sequence
  Description of Artificial Sequence: Synthetic epitope
ELSIPKESSI

SEQ ID NO: 16699 - protein, 10 aa, Artificial Sequence
  Description of Artificial Sequence: Synthetic epitope
ELSKGEDSAL

SEQ ID NO: 16700 - protein, 10 aa, Artificial Sequence
  Description of Artificial Sequence: Synthetic epitope
ELSKSTKATS

SEQ ID NO: 16701 - protein, 10 aa, Artificial Sequence
  Description of Artificial Sequence: Synthetic epitope
ELSLARGTIE

SEQ ID NO: 16702 - protein, 10 aa, Artificial Sequence
  Description of Artificial Sequence: Synthetic epitope
ELSLSAVKDL

SEQ ID NO: 16703 - protein, 10 aa, Artificial Sequence
  Description of Artificial Sequence: Synthetic epitope
ELSLSLARTK

SEQ ID NO: 16704 - protein, 10 aa, Artificial Sequence
  Description of Artificial Sequence: Synthetic epitope
ELSPMMVKLT

SEQ ID NO: 16705 - protein, 10 aa, Artificial Sequence
  Description of Artificial Sequence: Synthetic epitope
ELSQAIETSD

SEQ ID NO: 16706 - protein, 10 aa, Artificial Sequence
  Description of Artificial Sequence: Synthetic epitope
ELSSADEKRY

SEQ ID NO: 16707 - protein, 10 aa, Artificial Sequence
  Description of Artificial Sequence: Synthetic epitope
ELSSLLVRNV

SEQ ID NO: 16708 - protein, 10 aa, Artificial Sequence
  Description of Artificial Sequence: Synthetic epitope
ELSSPSTNEE

SEQ ID NO: 16709 - protein, 10 aa, Artificial Sequence
  Description of Artificial Sequence: Synthetic epitope
ELSSRRAALK

SEQ ID NO: 16710 - protein, 10 aa, Artificial Sequence
  Description of Artificial Sequence: Synthetic epitope
ELSTTLSQAE

SEQ ID NO: 16711 - protein, 10 aa, Artificial Sequence
  Description of Artificial Sequence: Synthetic epitope
ELSVLQLNTN

SEQ ID NO: 16712 - protein, 10 aa, Artificial Sequence
  Description of Artificial Sequence: Synthetic epitope
ELSYDQKKAP

SEQ ID NO: 16713 - protein, 10 aa, Artificial Sequence
  Description of Artificial Sequence: Synthetic epitope
ELSYQSVSAE

SEQ ID NO: 16714 - protein, 10 aa, Artificial Sequence
  Description of Artificial Sequence: Synthetic epitope
ELTATMQVEE

SEQ ID NO: 16715 - protein, 10 aa, Artificial Sequence
  Description of Artificial Sequence: Synthetic epitope
ELTDQIFEGP

SEQ ID NO: 16716 - protein, 10 aa, Artificial Sequence
  Description of Artificial Sequence: Synthetic epitope
ELTDTGLLSG

SEQ ID NO: 16717 - protein, 10 aa, Artificial Sequence
  Description of Artificial Sequence: Synthetic epitope
ELTGVRFKAQ

SEQ ID NO: 16718 - protein, 10 aa, Artificial Sequence
  Description of Artificial Sequence: Synthetic epitope
ELTKLSDQTG

SEQ ID NO: 16719 - protein, 10 aa, Artificial Sequence
  Description of Artificial Sequence: Synthetic epitope
ELTLREAEGE

SEQ ID NO: 16720 - protein, 10 aa, Artificial Sequence
  Description of Artificial Sequence: Synthetic epitope
ELTSETTAEV

SEQ ID NO: 16721 - protein, 10 aa, Artificial Sequence
  Description of Artificial Sequence: Synthetic epitope
ELTVEQRASI

SEQ ID NO: 16722 - protein, 10 aa, Artificial Sequence
  Description of Artificial Sequence: Synthetic epitope
ELTVQQKVFH

SEQ ID NO: 16723 - protein, 10 aa, Artificial Sequence
  Description of Artificial Sequence: Synthetic epitope
ELTVTSASES

SEQ ID NO: 16724 - protein, 10 aa, Artificial Sequence
  Description of Artificial Sequence: Synthetic epitope
ELTYTLATEE

SEQ ID NO: 16725 - protein, 10 aa, Artificial Sequence
  Description of Artificial Sequence: Synthetic epitope
ELVARLIQEA

SEQ ID NO: 16726 - protein, 10 aa, Artificial Sequence
  Description of Artificial Sequence: Synthetic epitope
ELVEAEVSEL

SEQ ID NO: 16727 - protein, 10 aa, Artificial Sequence
  Description of Artificial Sequence: Synthetic epitope
ELVIQRLSLV

SEQ ID NO: 16728 - protein, 10 aa, Artificial Sequence
  Description of Artificial Sequence: Synthetic epitope
ELVRSKRLRQ

SEQ ID NO: 16729 - protein, 10 aa, Artificial Sequence
  Description of Artificial Sequence: Synthetic epitope
ELVTVATMFF

SEQ ID NO: 16730 - protein, 10 aa, Artificial Sequence
  Description of Artificial Sequence: Synthetic epitope
ELVVATKQSR

SEQ ID NO: 16731 - protein, 10 aa, Artificial Sequence
  Description of Artificial Sequence: Synthetic epitope
ELVVNKVESE

SEQ ID NO: 16732 - protein, 10 aa, Artificial Sequence
  Description of Artificial Sequence: Synthetic epitope
ELWKSSLRAG

SEQ ID NO: 16733 - protein, 10 aa, Artificial Sequence
  Description of Artificial Sequence: Synthetic epitope
ELYAQATEAL

SEQ ID NO: 16734 - protein, 10 aa, Artificial Sequence
  Description of Artificial Sequence: Synthetic epitope
ELYIESVIEP

SEQ ID NO: 16735 - protein, 10 aa, Artificial Sequence
  Description of Artificial Sequence: Synthetic epitope
ELYNEVKVEE

SEQ ID NO: 16736 - protein, 10 aa, Artificial Sequence
  Description of Artificial Sequence: Synthetic epitope
ELYSKEQEHK

SEQ ID NO: 16737 - protein, 10 aa, Artificial Sequence
  Description of Artificial Sequence: Synthetic epitope
EMAAIAAEQE

SEQ ID NO: 16738 - protein, 10 aa, Artificial Sequence
  Description of Artificial Sequence: Synthetic epitope
EMAAQDLASK

SEQ ID NO: 16739 - protein, 10 aa, Artificial Sequence
  Description of Artificial Sequence: Synthetic epitope
EMAESLLQVL

SEQ ID NO: 16740 - protein, 10 aa, Artificial Sequence
  Description of Artificial Sequence: Synthetic epitope
EMDNHMSDKD

SEQ ID NO: 16741 - protein, 10 aa, Artificial Sequence
  Description of Artificial Sequence: Synthetic epitope
EMDRQSHPVA

SEQ ID NO: 16742 - protein, 10 aa, Artificial Sequence
  Description of Artificial Sequence: Synthetic epitope
EMEKAAKQGD

SEQ ID NO: 16743 - protein, 10 aa, Artificial Sequence
  Description of Artificial Sequence: Synthetic epitope
EMEMTEMLKQ

SEQ ID NO: 16744 - protein, 10 aa, Artificial Sequence
  Description of Artificial Sequence: Synthetic epitope
EMERTSVLEK

SEQ ID NO: 16745 - protein, 10 aa, Artificial Sequence
  Description of Artificial Sequence: Synthetic epitope
EMETETKNLE

SEQ ID NO: 16746 - protein, 10 aa, Artificial Sequence
  Description of Artificial Sequence: Synthetic epitope
EMEVLSSLAN

SEQ ID NO: 16747 - protein, 10 aa, Artificial Sequence
  Description of Artificial Sequence: Synthetic epitope
EMFFKLSEEA

SEQ ID NO: 16748 - protein, 10 aa, Artificial Sequence
  Description of Artificial Sequence: Synthetic epitope
EMGLSMIKTI

SEQ ID NO: 16749 - protein, 10 aa, Artificial Sequence
  Description of Artificial Sequence: Synthetic epitope
EMGVDWSLRE

SEQ ID NO: 16750 - protein, 10 aa, Artificial Sequence
  Description of Artificial Sequence: Synthetic epitope
EMHRVVQESS

SEQ ID NO: 16751 - protein, 10 aa, Artificial Sequence
  Description of Artificial Sequence: Synthetic epitope
EMIDITRSII

SEQ ID NO: 16752 - protein, 10 aa, Artificial Sequence
  Description of Artificial Sequence: Synthetic epitope
EMIETNDTMR

SEQ ID NO: 16753 - protein, 10 aa, Artificial Sequence
  Description of Artificial Sequence: Synthetic epitope
EMIMKKRLEE

SEQ ID NO: 16754 - protein, 10 aa, Artificial Sequence
  Description of Artificial Sequence: Synthetic epitope
EMIRNRQVLP

SEQ ID NO: 16755 - protein, 10 aa, Artificial Sequence
  Description of Artificial Sequence: Synthetic epitope
EMIRQHQKSQ

SEQ ID NO: 16756 - protein, 10 aa, Artificial Sequence
  Description of Artificial Sequence: Synthetic epitope
EMIWAEALGH

SEQ ID NO: 16757 - protein, 10 aa, Artificial Sequence
  Description of Artificial Sequence: Synthetic epitope
EMKAKVVQSE

SEQ ID NO: 16758 - protein, 10 aa, Artificial Sequence
  Description of Artificial Sequence: Synthetic epitope
EMKLKSVSQP

SEQ ID NO: 16759 - protein, 10 aa, Artificial Sequence
  Description of Artificial Sequence: Synthetic epitope
EMKQTSQMAA

SEQ ID NO: 16760 - protein, 10 aa, Artificial Sequence
  Description of Artificial Sequence: Synthetic epitope
EMKRLEEKHE

SEQ ID NO: 16761 - protein, 10 aa, Artificial Sequence
  Description of Artificial Sequence: Synthetic epitope
EMKSNTSDPE

SEQ ID NO: 16762 - protein, 10 aa, Artificial Sequence
  Description of Artificial Sequence: Synthetic epitope
EMKVLVLSQD

SEQ ID NO: 16763 - protein, 10 aa, Artificial Sequence
  Description of Artificial Sequence: Synthetic epitope
EMLLVVIRRF

SEQ ID NO: 16764 - protein, 10 aa, Artificial Sequence
  Description of Artificial Sequence: Synthetic epitope
EMLPGSASKV

SEQ ID NO: 16765 - protein, 10 aa, Artificial Sequence
  Description of Artificial Sequence: Synthetic epitope
EMLQMEQQFQ

SEQ ID NO: 16766 - protein, 10 aa, Artificial Sequence
  Description of Artificial Sequence: Synthetic epitope
EMLYMRLDTM

SEQ ID NO: 16767 - protein, 10 aa, Artificial Sequence
  Description of Artificial Sequence: Synthetic epitope
EMMASLLKDL

SEQ ID NO: 16768 - protein, 10 aa, Artificial Sequence
  Description of Artificial Sequence: Synthetic epitope
EMMLQNLMTT

SEQ ID NO: 16769 - protein, 10 aa, Artificial Sequence
  Description of Artificial Sequence: Synthetic epitope
EMMRSVIADS

SEQ ID NO: 16770 - protein, 10 aa, Artificial Sequence
  Description of Artificial Sequence: Synthetic epitope
EMMSQKIQQL

SEQ ID NO: 16771 - protein, 10 aa, Artificial Sequence
  Description of Artificial Sequence: Synthetic epitope
EMMTNKAMKQ

SEQ ID NO: 16772 - protein, 10 aa, Artificial Sequence
  Description of Artificial Sequence: Synthetic epitope
EMMVKDSRTE

SEQ ID NO: 16773 - protein, 10 aa, Artificial Sequence
  Description of Artificial Sequence: Synthetic epitope
EMNATKTQSN

SEQ ID NO: 16774 - protein, 10 aa, Artificial Sequence
  Description of Artificial Sequence: Synthetic epitope
EMNERTNVGI

SEQ ID NO: 16775 - protein, 10 aa, Artificial Sequence
  Description of Artificial Sequence: Synthetic epitope
EMNNQASRVA

SEQ ID NO: 16776 - protein, 10 aa, Artificial Sequence
  Description of Artificial Sequence: Synthetic epitope
EMNNSSINNQ

SEQ ID NO: 16777 - protein, 10 aa, Artificial Sequence
  Description of Artificial Sequence: Synthetic epitope
EMNQVFSPET

SEQ ID NO: 16778 - protein, 10 aa, Artificial Sequence
  Description of Artificial Sequence: Synthetic epitope
EMNTNEAESR

SEQ ID NO: 16779 - protein, 10 aa, Artificial Sequence
  Description of Artificial Sequence: Synthetic epitope
EMPADAREDH

SEQ ID NO: 16780 - protein, 10 aa, Artificial Sequence
  Description of Artificial Sequence: Synthetic epitope
EMPAEVGQKS

SEQ ID NO: 16781 - protein, 10 aa, Artificial Sequence
  Description of Artificial Sequence: Synthetic epitope
EMPGTVEVES

SEQ ID NO: 16782 - protein, 10 aa, Artificial Sequence
  Description of Artificial Sequence: Synthetic epitope
EMPKQTRHRK

SEQ ID NO: 16783 - protein, 10 aa, Artificial Sequence
  Description of Artificial Sequence: Synthetic epitope
EMPRASTPRP

SEQ ID NO: 16784 - protein, 10 aa, Artificial Sequence
  Description of Artificial Sequence: Synthetic epitope
EMPTQITGFE

SEQ ID NO: 16785 - protein, 10 aa, Artificial Sequence
  Description of Artificial Sequence: Synthetic epitope
EMQNSLNNDK

SEQ ID NO: 16786 - protein, 10 aa, Artificial Sequence
  Description of Artificial Sequence: Synthetic epitope
EMQQDEENLP

SEQ ID NO: 16787 - protein, 10 aa, Artificial Sequence
  Description of Artificial Sequence: Synthetic epitope
EMRAYPIEQY

SEQ ID NO: 16788 - protein, 10 aa, Artificial Sequence
  Description of Artificial Sequence: Synthetic epitope
EMRMYSDIIA

SEQ ID NO: 16789 - protein, 10 aa, Artificial Sequence
  Description of Artificial Sequence: Synthetic epitope
EMRPFRSSFQ

SEQ ID NO: 16790 - protein, 10 aa, Artificial Sequence
  Description of Artificial Sequence: Synthetic epitope
EMSLRAATSS

SEQ ID NO: 16791 - protein, 10 aa, Artificial Sequence
  Description of Artificial Sequence: Synthetic epitope
EMSSDKQAKK

SEQ ID NO: 16792 - protein, 10 aa, Artificial Sequence
  Description of Artificial Sequence: Synthetic epitope
EMSSHEALTR

SEQ ID NO: 16793 - protein, 10 aa, Artificial Sequence
  Description of Artificial Sequence: Synthetic epitope
EMSSVAEISS

SEQ ID NO: 16794 - protein, 10 aa, Artificial Sequence
  Description of Artificial Sequence: Synthetic epitope
EMSTFASVGT

SEQ ID NO: 16795 - protein, 10 aa, Artificial Sequence
  Description of Artificial Sequence: Synthetic epitope
EMSTKRHKRQ

SEQ ID NO: 16796 - protein, 10 aa, Artificial Sequence
  Description of Artificial Sequence: Synthetic epitope
EMSTSLAAVT

SEQ ID NO: 16797 - protein, 10 aa, Artificial Sequence
  Description of Artificial Sequence: Synthetic epitope
EMSVNDKAEA

SEQ ID NO: 16798 - protein, 10 aa, Artificial Sequence
  Description of Artificial Sequence: Synthetic epitope
EMTLLSSQSS

SEQ ID NO: 16799 - protein, 10 aa, Artificial Sequence
  Description of Artificial Sequence: Synthetic epitope
EMTSMSAELK

SEQ ID NO: 16800 - protein, 10 aa, Artificial Sequence
  Description of Artificial Sequence: Synthetic epitope
EMTVVIDQLE

SEQ ID NO: 16801 - protein, 10 aa, Artificial Sequence
  Description of Artificial Sequence: Synthetic epitope
EMVEKSDTYY

SEQ ID NO: 16802 - protein, 10 aa, Artificial Sequence
  Description of Artificial Sequence: Synthetic epitope
EMVIMRPGNK

SEQ ID NO: 16803 - protein, 10 aa, Artificial Sequence
  Description of Artificial Sequence: Synthetic epitope
EMVKDQETTA

SEQ ID NO: 16804 - protein, 10 aa, Artificial Sequence
  Description of Artificial Sequence: Synthetic epitope
EMVLKVVLSW

SEQ ID NO: 16805 - protein, 10 aa, Artificial Sequence
  Description of Artificial Sequence: Synthetic epitope
EMVLQLSLSS

SEQ ID NO: 16806 - protein, 10 aa, Artificial Sequence
  Description of Artificial Sequence: Synthetic epitope
EMVVKVLIKL

SEQ ID NO: 16807 - protein, 10 aa, Artificial Sequence
  Description of Artificial Sequence: Synthetic epitope
EMYAPHSIRI

SEQ ID NO: 16808 - protein, 10 aa, Artificial Sequence
  Description of Artificial Sequence: Synthetic epitope
EMYTQKNDGK

SEQ ID NO: 16809 - protein, 10 aa, Artificial Sequence
  Description of Artificial Sequence: Synthetic epitope
ENAEQAESTE

SEQ ID NO: 16810 - protein, 10 aa, Artificial Sequence
  Description of Artificial Sequence: Synthetic epitope
ENAETLAKSS

SEQ ID NO: 16811 - protein, 10 aa, Artificial Sequence
  Description of Artificial Sequence: Synthetic epitope
ENAIRKKNEG

SEQ ID NO: 16812 - protein, 10 aa, Artificial Sequence
  Description of Artificial Sequence: Synthetic epitope
ENAKQVGRLE

SEQ ID NO: 16813 - protein, 10 aa, Artificial Sequence
  Description of Artificial Sequence: Synthetic epitope
ENAKTPKEQF

SEQ ID NO: 16814 - protein, 10 aa, Artificial Sequence
  Description of Artificial Sequence: Synthetic epitope
ENAKVTSLDS

SEQ ID NO: 16815 - protein, 10 aa, Artificial Sequence
  Description of Artificial Sequence: Synthetic epitope
ENALSKIKGV

SEQ ID NO: 16816 - protein, 10 aa, Artificial Sequence
  Description of Artificial Sequence: Synthetic epitope
ENASEVLITP

SEQ ID NO: 16817 - protein, 10 aa, Artificial Sequence
  Description of Artificial Sequence: Synthetic epitope
ENATTLLHKV

SEQ ID NO: 16818 - protein, 10 aa, Artificial Sequence
  Description of Artificial Sequence: Synthetic epitope
ENAVRVVKTS

SEQ ID NO: 16819 - protein, 10 aa, Artificial Sequence
  Description of Artificial Sequence: Synthetic epitope
ENAVTALAQL

SEQ ID NO: 16820 - protein, 10 aa, Artificial Sequence
  Description of Artificial Sequence: Synthetic epitope
ENDAQSSDNI

SEQ ID NO: 16821 - protein, 10 aa, Artificial Sequence
  Description of Artificial Sequence: Synthetic epitope
ENDEDEKINK

SEQ ID NO: 16822 - protein, 10 aa, Artificial Sequence
  Description of Artificial Sequence: Synthetic epitope
ENDIEEQQDE

SEQ ID NO: 16823 - protein, 10 aa, Artificial Sequence
  Description of Artificial Sequence: Synthetic epitope
ENDSLSKDVS

SEQ ID NO: 16824 - protein, 10 aa, Artificial Sequence
  Description of Artificial Sequence: Synthetic epitope
ENDSLSVDKH

SEQ ID NO: 16825 - protein, 10 aa, Artificial Sequence
  Description of Artificial Sequence: Synthetic epitope
ENEAIASEQS

SEQ ID NO: 16826 - protein, 10 aa, Artificial Sequence
  Description of Artificial Sequence: Synthetic epitope
ENEALGRNTA

SEQ ID NO: 16827 - protein, 10 aa, Artificial Sequence
  Description of Artificial Sequence: Synthetic epitope
ENEANNIKME

SEQ ID NO: 16828 - protein, 10 aa, Artificial Sequence
  Description of Artificial Sequence: Synthetic epitope
ENEKEKSALA

SEQ ID NO: 16829 - protein, 10 aa, Artificial Sequence
  Description of Artificial Sequence: Synthetic epitope
ENELKSSISA

SEQ ID NO: 16830 - protein, 10 aa, Artificial Sequence
  Description of Artificial Sequence: Synthetic epitope
ENELTSLAED

SEQ ID NO: 16831 - protein, 10 aa, Artificial Sequence
  Description of Artificial Sequence: Synthetic epitope
ENEQDQSASV

SEQ ID NO: 16832 - protein, 10 aa, Artificial Sequence
  Description of Artificial Sequence: Synthetic epitope
ENEQSKENEQ

SEQ ID NO: 16833 - protein, 10 aa, Artificial Sequence
  Description of Artificial Sequence: Synthetic epitope
ENEQVEKPRI

SEQ ID NO: 16834 - protein, 10 aa, Artificial Sequence
  Description of Artificial Sequence: Synthetic epitope
ENESKVSKKE

SEQ ID NO: 16835 - protein, 10 aa, Artificial Sequence
  Description of Artificial Sequence: Synthetic epitope
ENETILSTSM

SEQ ID NO: 16836 - protein, 10 aa, Artificial Sequence
  Description of Artificial Sequence: Synthetic epitope
ENETVSELNQ

SEQ ID NO: 16837 - protein, 10 aa, Artificial Sequence
  Description of Artificial Sequence: Synthetic epitope
ENEVALTSKE

SEQ ID NO: 16838 - protein, 10 aa, Artificial Sequence
  Description of Artificial Sequence: Synthetic epitope
ENEVLKVLSE

SEQ ID NO: 16839 - protein, 10 aa, Artificial Sequence
  Description of Artificial Sequence: Synthetic epitope
ENEVSTLYKG

SEQ ID NO: 16840 - protein, 10 aa, Artificial Sequence
  Description of Artificial Sequence: Synthetic epitope
ENEVSTSATD

SEQ ID NO: 16841 - protein, 10 aa, Artificial Sequence
  Description of Artificial Sequence: Synthetic epitope
ENFAVMASLG

SEQ ID NO: 16842 - protein, 10 aa, Artificial Sequence
  Description of Artificial Sequence: Synthetic epitope
ENFLSFSESL

SEQ ID NO: 16843 - protein, 10 aa, Artificial Sequence
  Description of Artificial Sequence: Synthetic epitope
ENFMTVDQDG

SEQ ID NO: 16844 - protein, 10 aa, Artificial Sequence
  Description of Artificial Sequence: Synthetic epitope
ENFSTLRQRA

SEQ ID NO: 16845 - protein, 10 aa, Artificial Sequence
  Description of Artificial Sequence: Synthetic epitope
ENFVATLANG

SEQ ID NO: 16846 - protein, 10 aa, Artificial Sequence
  Description of Artificial Sequence: Synthetic epitope
ENFVQFRSMR

SEQ ID NO: 16847 - protein, 10 aa, Artificial Sequence
  Description of Artificial Sequence: Synthetic epitope
ENGAANLHSK

SEQ ID NO: 16848 - protein, 10 aa, Artificial Sequence
  Description of Artificial Sequence: Synthetic epitope
ENGEELNAIN

SEQ ID NO: 16849 - protein, 10 aa, Artificial Sequence
  Description of Artificial Sequence: Synthetic epitope
ENHATDVHQA

SEQ ID NO: 16850 - protein, 10 aa, Artificial Sequence
  Description of Artificial Sequence: Synthetic epitope
ENHDQARERK

SEQ ID NO: 16851 - protein, 10 aa, Artificial Sequence
  Description of Artificial Sequence: Synthetic epitope
ENHTQNSSEV

SEQ ID NO: 16852 - protein, 10 aa, Artificial Sequence
  Description of Artificial Sequence: Synthetic epitope
ENIASVEEAE

SEQ ID NO: 16853 - protein, 10 aa, Artificial Sequence
  Description of Artificial Sequence: Synthetic epitope
ENIKLQLQEN

SEQ ID NO: 16854 - protein, 10 aa, Artificial Sequence
  Description of Artificial Sequence: Synthetic epitope
ENIKNRTLLT

SEQ ID NO: 16855 - protein, 10 aa, Artificial Sequence
  Description of Artificial Sequence: Synthetic epitope
ENILLNAAWL

SEQ ID NO: 16856 - protein, 10 aa, Artificial Sequence
  Description of Artificial Sequence: Synthetic epitope
ENIRQAASSL

SEQ ID NO: 16857 - protein, 10 aa, Artificial Sequence
  Description of Artificial Sequence: Synthetic epitope
ENIRSLTMSG

SEQ ID NO: 16858 - protein, 10 aa, Artificial Sequence
  Description of Artificial Sequence: Synthetic epitope
ENISELLKKS

SEQ ID NO: 16859 - protein, 10 aa, Artificial Sequence
  Description of Artificial Sequence: Synthetic epitope
ENISGESTKS

SEQ ID NO: 16860 - protein, 10 aa, Artificial Sequence
  Description of Artificial Sequence: Synthetic epitope
ENISLIEFEN

SEQ ID NO: 16861 - protein, 10 aa, Artificial Sequence
  Description of Artificial Sequence: Synthetic epitope
ENITRNQDLT

SEQ ID NO: 16862 - protein, 10 aa, Artificial Sequence
  Description of Artificial Sequence: Synthetic epitope
ENKAKAVRKD

SEQ ID NO: 16863 - protein, 10 aa, Artificial Sequence
  Description of Artificial Sequence: Synthetic epitope
ENKARQSEAD

SEQ ID NO: 16864 - protein, 10 aa, Artificial Sequence
  Description of Artificial Sequence: Synthetic epitope
ENKIPPSKTS

SEQ ID NO: 16865 - protein, 10 aa, Artificial Sequence
  Description of Artificial Sequence: Synthetic epitope
ENKITNLEIY

SEQ ID NO: 16866 - protein, 10 aa, Artificial Sequence
  Description of Artificial Sequence: Synthetic epitope
ENKKLVEDQE

SEQ ID NO: 16867 - protein, 10 aa, Artificial Sequence
  Description of Artificial Sequence: Synthetic epitope
ENKKQGKYPE

SEQ ID NO: 16868 - protein, 10 aa, Artificial Sequence
  Description of Artificial Sequence: Synthetic epitope
ENKLEMKLTM

SEQ ID NO: 16869 - protein, 10 aa, Artificial Sequence
  Description of Artificial Sequence: Synthetic epitope
ENKLKAFSIG

SEQ ID NO: 16870 - protein, 10 aa, Artificial Sequence
  Description of Artificial Sequence: Synthetic epitope
ENKQKRRMVA

SEQ ID NO: 16871 - protein, 10 aa, Artificial Sequence
  Description of Artificial Sequence: Synthetic epitope
ENKQKVQKKN

SEQ ID NO: 16872 - protein, 10 aa, Artificial Sequence
  Description of Artificial Sequence: Synthetic epitope
ENKRSASLET

SEQ ID NO: 16873 - protein, 10 aa, Artificial Sequence
  Description of Artificial Sequence: Synthetic epitope
ENKTETDDNQ

SEQ ID NO: 16874 - protein, 10 aa, Artificial Sequence
  Description of Artificial Sequence: Synthetic epitope
ENKTSDKANN

SEQ ID NO: 16875 - protein, 10 aa, Artificial Sequence
  Description of Artificial Sequence: Synthetic epitope
ENKVLQTADI

SEQ ID NO: 16876 - protein, 10 aa, Artificial Sequence
  Description of Artificial Sequence: Synthetic epitope
ENKVSAIVDE

SEQ ID NO: 16877 - protein, 10 aa, Artificial Sequence
  Description of Artificial Sequence: Synthetic epitope
ENLESSVRDR

SEQ ID NO: 16878 - protein, 10 aa, Artificial Sequence
  Description of Artificial Sequence: Synthetic epitope
ENLGEKIAHR

SEQ ID NO: 16879 - protein, 10 aa, Artificial Sequence
  Description of Artificial Sequence: Synthetic epitope
ENLGEKIAHR

SEQ ID NO: 16880 - protein, 10 aa, Artificial Sequence
  Description of Artificial Sequence: Synthetic epitope
ENLLAEKVEQ

SEQ ID NO: 16881 - protein, 10 aa, Artificial Sequence
  Description of Artificial Sequence: Synthetic epitope
ENLLMILHEY

SEQ ID NO: 16882 - protein, 10 aa, Artificial Sequence
  Description of Artificial Sequence: Synthetic epitope
ENLMSTIQES

SEQ ID NO: 16883 - protein, 10 aa, Artificial Sequence
  Description of Artificial Sequence: Synthetic epitope
ENLSKQKFTR

SEQ ID NO: 16884 - protein, 10 aa, Artificial Sequence
  Description of Artificial Sequence: Synthetic epitope
ENLSNSLGKL

SEQ ID NO: 16885 - protein, 10 aa, Artificial Sequence
  Description of Artificial Sequence: Synthetic epitope
ENLTILAVQQ

SEQ ID NO: 16886 - protein, 10 aa, Artificial Sequence
  Description of Artificial Sequence: Synthetic epitope
ENLTQKDNVL

SEQ ID NO: 16887 - protein, 10 aa, Artificial Sequence
  Description of Artificial Sequence: Synthetic epitope
ENLTSAVNSL

SEQ ID NO: 16888 - protein, 10 aa, Artificial Sequence
  Description of Artificial Sequence: Synthetic epitope
ENLVNEEVTR

SEQ ID NO: 16889 - protein, 10 aa, Artificial Sequence
  Description of Artificial Sequence: Synthetic epitope
ENMKAVLKTS

SEQ ID NO: 16890 - protein, 10 aa, Artificial Sequence
  Description of Artificial Sequence: Synthetic epitope
ENMLVAARKT

SEQ ID NO: 16891 - protein, 10 aa, Artificial Sequence
  Description of Artificial Sequence: Synthetic epitope
ENMNLQFENQ

SEQ ID NO: 16892 - protein, 10 aa, Artificial Sequence
  Description of Artificial Sequence: Synthetic epitope
ENNRAEIKNG

SEQ ID NO: 16893 - protein, 10 aa, Artificial Sequence
  Description of Artificial Sequence: Synthetic epitope
ENNSGMNSME

SEQ ID NO: 16894 - protein, 10 aa, Artificial Sequence
  Description of Artificial Sequence: Synthetic epitope
ENNVDSMSGT

SEQ ID NO: 16895 - protein, 10 aa, Artificial Sequence
  Description of Artificial Sequence: Synthetic epitope
ENNVVFNRFF

SEQ ID NO: 16896 - protein, 10 aa, Artificial Sequence
  Description of Artificial Sequence: Synthetic epitope
ENPNEWSQEA

SEQ ID NO: 16897 - protein, 10 aa, Artificial Sequence
  Description of Artificial Sequence: Synthetic epitope
ENPPKSIRRV

SEQ ID NO: 16898 - protein, 10 aa, Artificial Sequence
  Description of Artificial Sequence: Synthetic epitope
ENQDINTTQN

SEQ ID NO: 16899 - protein, 10 aa, Artificial Sequence
  Description of Artificial Sequence: Synthetic epitope
ENQGLEAVQS

SEQ ID NO: 16900 - protein, 10 aa, Artificial Sequence
  Description of Artificial Sequence: Synthetic epitope
ENQIKMAKMV

SEQ ID NO: 16901 - protein, 10 aa, Artificial Sequence
  Description of Artificial Sequence: Synthetic epitope
ENQKSSHSQY

SEQ ID NO: 16902 - protein, 10 aa, Artificial Sequence
  Description of Artificial Sequence: Synthetic epitope
ENQMYGTNKM

SEQ ID NO: 16903 - protein, 10 aa, Artificial Sequence
  Description of Artificial Sequence: Synthetic epitope
ENQSTMVTAD

SEQ ID NO: 16904 - protein, 10 aa, Artificial Sequence
  Description of Artificial Sequence: Synthetic epitope
ENRGNEKEFM

SEQ ID NO: 16905 - protein, 10 aa, Artificial Sequence
  Description of Artificial Sequence: Synthetic epitope
ENRIANIQDA

SEQ ID NO: 16906 - protein, 10 aa, Artificial Sequence
  Description of Artificial Sequence: Synthetic epitope
ENSDLEFGFQ

SEQ ID NO: 16907 - protein, 10 aa, Artificial Sequence
  Description of Artificial Sequence: Synthetic epitope
ENSEFRAFSS

SEQ ID NO: 16908 - protein, 10 aa, Artificial Sequence
  Description of Artificial Sequence: Synthetic epitope
ENSESQLTSK

SEQ ID NO: 16909 - protein, 10 aa, Artificial Sequence
  Description of Artificial Sequence: Synthetic epitope
ENSISDASRT

SEQ ID NO: 16910 - protein, 10 aa, Artificial Sequence
  Description of Artificial Sequence: Synthetic epitope
ENSIVNYDSQ

SEQ ID NO: 16911 - protein, 10 aa, Artificial Sequence
  Description of Artificial Sequence: Synthetic epitope
ENSRIERTAD

SEQ ID NO: 16912 - protein, 10 aa, Artificial Sequence
  Description of Artificial Sequence: Synthetic epitope
ENSSALKKPQ

SEQ ID NO: 16913 - protein, 10 aa, Artificial Sequence
  Description of Artificial Sequence: Synthetic epitope
ENSSKVVRDY

SEQ ID NO: 16914 - protein, 10 aa, Artificial Sequence
  Description of Artificial Sequence: Synthetic epitope
ENSSRPTSTI

SEQ ID NO: 16915 - protein, 10 aa, Artificial Sequence
  Description of Artificial Sequence: Synthetic epitope
ENSSRQSYYT

SEQ ID NO: 16916 - protein, 10 aa, Artificial Sequence
  Description of Artificial Sequence: Synthetic epitope
ENSSVGLASP

SEQ ID NO: 16917 - protein, 10 aa, Artificial Sequence
  Description of Artificial Sequence: Synthetic epitope
ENSTRMSPSS

SEQ ID NO: 16918 - protein, 10 aa, Artificial Sequence
  Description of Artificial Sequence: Synthetic epitope
ENSTSLSFLD

SEQ ID NO: 16919 - protein, 10 aa, Artificial Sequence
  Description of Artificial Sequence: Synthetic epitope
ENSVDISMLK

SEQ ID NO: 16920 - protein, 10 aa, Artificial Sequence
  Description of Artificial Sequence: Synthetic epitope
ENSVKMPSIE

SEQ ID NO: 16921 - protein, 10 aa, Artificial Sequence
  Description of Artificial Sequence: Synthetic epitope
ENSYKTSRIA

SEQ ID NO: 16922 - protein, 10 aa, Artificial Sequence
  Description of Artificial Sequence: Synthetic epitope
ENTGQSNFEE

SEQ ID NO: 16923 - protein, 10 aa, Artificial Sequence
  Description of Artificial Sequence: Synthetic epitope
ENTGSKTESS

SEQ ID NO: 16924 - protein, 10 aa, Artificial Sequence
  Description of Artificial Sequence: Synthetic epitope
ENTIAEATAA

SEQ ID NO: 16925 - protein, 10 aa, Artificial Sequence
  Description of Artificial Sequence: Synthetic epitope
ENTITVTTEQ

SEQ ID NO: 16926 - protein, 10 aa, Artificial Sequence
  Description of Artificial Sequence: Synthetic epitope
ENTKQEAIDE

SEQ ID NO: 16927 - protein, 10 aa, Artificial Sequence
  Description of Artificial Sequence: Synthetic epitope
ENTKREILAQ

SEQ ID NO: 16928 - protein, 10 aa, Artificial Sequence
  Description of Artificial Sequence: Synthetic epitope
ENTLKEASVE

SEQ ID NO: 16929 - protein, 10 aa, Artificial Sequence
  Description of Artificial Sequence: Synthetic epitope
ENTRESFVKK

SEQ ID NO: 16930 - protein, 10 aa, Artificial Sequence
  Description of Artificial Sequence: Synthetic epitope
ENTSSVEQEL

SEQ ID NO: 16931 - protein, 10 aa, Artificial Sequence
  Description of Artificial Sequence: Synthetic epitope
ENTSTLQRKT

SEQ ID NO: 16932 - protein, 10 aa, Artificial Sequence
  Description of Artificial Sequence: Synthetic epitope
ENTSYRMEEK

SEQ ID NO: 16933 - protein, 10 aa, Artificial Sequence
  Description of Artificial Sequence: Synthetic epitope
ENTTAVTPMT

SEQ ID NO: 16934 - protein, 10 aa, Artificial Sequence
  Description of Artificial Sequence: Synthetic epitope
ENTVTKKQEG

SEQ ID NO: 16935 - protein, 10 aa, Artificial Sequence
  Description of Artificial Sequence: Synthetic epitope
ENVASSVLGK

SEQ ID NO: 16936 - protein, 10 aa, Artificial Sequence
  Description of Artificial Sequence: Synthetic epitope
ENVATELAKS

SEQ ID NO: 16937 - protein, 10 aa, Artificial Sequence
  Description of Artificial Sequence: Synthetic epitope
ENVESNFEAD

SEQ ID NO: 16938 - protein, 10 aa, Artificial Sequence
  Description of Artificial Sequence: Synthetic epitope
ENVESRSKKE

SEQ ID NO: 16939 - protein, 10 aa, Artificial Sequence
  Description of Artificial Sequence: Synthetic epitope
ENVFEVSKTQ

SEQ ID NO: 16940 - protein, 10 aa, Artificial Sequence
  Description of Artificial Sequence: Synthetic epitope
ENVIQSTAVT

SEQ ID NO: 16941 - protein, 10 aa, Artificial Sequence
  Description of Artificial Sequence: Synthetic epitope
ENVIRQKKHW

SEQ ID NO: 16942 - protein, 10 aa, Artificial Sequence
  Description of Artificial Sequence: Synthetic epitope
ENVKAMTSLR

SEQ ID NO: 16943 - protein, 10 aa, Artificial Sequence
  Description of Artificial Sequence: Synthetic epitope
ENVKESQRVI

SEQ ID NO: 16944 - protein, 10 aa, Artificial Sequence
  Description of Artificial Sequence: Synthetic epitope
ENVLEASVAE

SEQ ID NO: 16945 - protein, 10 aa, Artificial Sequence
  Description of Artificial Sequence: Synthetic epitope
ENVLSARATR

SEQ ID NO: 16946 - protein, 10 aa, Artificial Sequence
  Description of Artificial Sequence: Synthetic epitope
ENVMVASEDS

SEQ ID NO: 16947 - protein, 10 aa, Artificial Sequence
  Description of Artificial Sequence: Synthetic epitope
ENVTVSESSR

SEQ ID NO: 16948 - protein, 10 aa, Artificial Sequence
  Description of Artificial Sequence: Synthetic epitope
ENWGNFIAKE

SEQ ID NO: 16949 - protein, 10 aa, Artificial Sequence
  Description of Artificial Sequence: Synthetic epitope
ENWPTVQGTS

SEQ ID NO: 16950 - protein, 10 aa, Artificial Sequence
  Description of Artificial Sequence: Synthetic epitope
ENWTTQISND

SEQ ID NO: 16951 - protein, 10 aa, Artificial Sequence
  Description of Artificial Sequence: Synthetic epitope
ENYFLNTKEN

SEQ ID NO: 16952 - protein, 10 aa, Artificial Sequence
  Description of Artificial Sequence: Synthetic epitope
ENYFVKAQKV

SEQ ID NO: 16953 - protein, 10 aa, Artificial Sequence
  Description of Artificial Sequence: Synthetic epitope
ENYGLQEKIS

SEQ ID NO: 16954 - protein, 10 aa, Artificial Sequence
  Description of Artificial Sequence: Synthetic epitope
ENYLSAMDTV

SEQ ID NO: 16955 - protein, 10 aa, Artificial Sequence
  Description of Artificial Sequence: Synthetic epitope
EPAAEALDPF

SEQ ID NO: 16956 - protein, 10 aa, Artificial Sequence
  Description of Artificial Sequence: Synthetic epitope
EPAASDLEPF

SEQ ID NO: 16957 - protein, 10 aa, Artificial Sequence
  Description of Artificial Sequence: Synthetic epitope
EPAKPAMVDD

SEQ ID NO: 16958 - protein, 10 aa, Artificial Sequence
  Description of Artificial Sequence: Synthetic epitope
EPANDSLSSP

SEQ ID NO: 16959 - protein, 10 aa, Artificial Sequence
  Description of Artificial Sequence: Synthetic epitope
EPAREASASA

SEQ ID NO: 16960 - protein, 10 aa, Artificial Sequence
  Description of Artificial Sequence: Synthetic epitope
EPASKVTEQA

SEQ ID NO: 16961 - protein, 10 aa, Artificial Sequence
  Description of Artificial Sequence: Synthetic epitope
EPAVVLRQEG

SEQ ID NO: 16962 - protein, 10 aa, Artificial Sequence
  Description of Artificial Sequence: Synthetic epitope
EPDKKITKRN

SEQ ID NO: 16963 - protein, 10 aa, Artificial Sequence
  Description of Artificial Sequence: Synthetic epitope
EPDSAAKSGE

SEQ ID NO: 16964 - protein, 10 aa, Artificial Sequence
  Description of Artificial Sequence: Synthetic epitope
EPDTTAEVKT

SEQ ID NO: 16965 - protein, 10 aa, Artificial Sequence
  Description of Artificial Sequence: Synthetic epitope
EPDVYETSDL

SEQ ID NO: 16966 - protein, 10 aa, Artificial Sequence
  Description of Artificial Sequence: Synthetic epitope
EPEGARGSKA

SEQ ID NO: 16967 - protein, 10 aa, Artificial Sequence
  Description of Artificial Sequence: Synthetic epitope
EPEMNTLAAQ

SEQ ID NO: 16968 - protein, 10 aa, Artificial Sequence
  Description of Artificial Sequence: Synthetic epitope
EPFRLSLHSL

SEQ ID NO: 16969 - protein, 10 aa, Artificial Sequence
  Description of Artificial Sequence: Synthetic epitope
EPGQVTTGEE

SEQ ID NO: 16970 - protein, 10 aa, Artificial Sequence
  Description of Artificial Sequence: Synthetic epitope
EPHLMVEYKL

SEQ ID NO: 16971 - protein, 10 aa, Artificial Sequence
  Description of Artificial Sequence: Synthetic epitope
EPHVSGVKRS

SEQ ID NO: 16972 - protein, 10 aa, Artificial Sequence
  Description of Artificial Sequence: Synthetic epitope
EPIAEYFVPL

SEQ ID NO: 16973 - protein, 10 aa, Artificial Sequence
  Description of Artificial Sequence: Synthetic epitope
EPIIKPVKTK

SEQ ID NO: 16974 - protein, 10 aa, Artificial Sequence
  Description of Artificial Sequence: Synthetic epitope
EPIIQIKTQA

SEQ ID NO: 16975 - protein, 10 aa, Artificial Sequence
  Description of Artificial Sequence: Synthetic epitope
EPIKVEEPEP

SEQ ID NO: 16976 - protein, 10 aa, Artificial Sequence
  Description of Artificial Sequence: Synthetic epitope
EPITLTFEKN

SEQ ID NO: 16977 - protein, 10 aa, Artificial Sequence
  Description of Artificial Sequence: Synthetic epitope
EPKANLQAAL

SEQ ID NO: 16978 - protein, 10 aa, Artificial Sequence
  Description of Artificial Sequence: Synthetic epitope
EPKASTTSDG

SEQ ID NO: 16979 - protein, 10 aa, Artificial Sequence
  Description of Artificial Sequence: Synthetic epitope
EPKATETSHT

SEQ ID NO: 16980 - protein, 10 aa, Artificial Sequence
  Description of Artificial Sequence: Synthetic epitope
EPKELKTAGE

SEQ ID NO: 16981 - protein, 10 aa, Artificial Sequence
  Description of Artificial Sequence: Synthetic epitope
EPKIKVIEGS

SEQ ID NO: 16982 - protein, 10 aa, Artificial Sequence
  Description of Artificial Sequence: Synthetic epitope
EPKKLAGVHA

SEQ ID NO: 16983 - protein, 10 aa, Artificial Sequence
  Description of Artificial Sequence: Synthetic epitope
EPKNKGLKQQ

SEQ ID NO: 16984 - protein, 10 aa, Artificial Sequence
  Description of Artificial Sequence: Synthetic epitope
EPKRDSSAFP

SEQ ID NO: 16985 - protein, 10 aa, Artificial Sequence
  Description of Artificial Sequence: Synthetic epitope
EPLLNSTQSA

SEQ ID NO: 16986 - protein, 10 aa, Artificial Sequence
  Description of Artificial Sequence: Synthetic epitope
EPLVMDNLDS

SEQ ID NO: 16987 - protein, 10 aa, Artificial Sequence
  Description of Artificial Sequence: Synthetic epitope
EPMSSFDAKI

SEQ ID NO: 16988 - protein, 10 aa, Artificial Sequence
  Description of Artificial Sequence: Synthetic epitope
EPNIDRSRLP

SEQ ID NO: 16989 - protein, 10 aa, Artificial Sequence
  Description of Artificial Sequence: Synthetic epitope
EPNTDQLDYD

SEQ ID NO: 16990 - protein, 10 aa, Artificial Sequence
  Description of Artificial Sequence: Synthetic epitope
EPNTTFLRKS

SEQ ID NO: 16991 - protein, 10 aa, Artificial Sequence
  Description of Artificial Sequence: Synthetic epitope
EPPANTARHS

SEQ ID NO: 16992 - protein, 10 aa, Artificial Sequence
  Description of Artificial Sequence: Synthetic epitope
EPPARALKRS

SEQ ID NO: 16993 - protein, 10 aa, Artificial Sequence
  Description of Artificial Sequence: Synthetic epitope
EPPISALAQD

SEQ ID NO: 16994 - protein, 10 aa, Artificial Sequence
  Description of Artificial Sequence: Synthetic epitope
EPPLFATSFS

SEQ ID NO: 16995 - protein, 10 aa, Artificial Sequence
  Description of Artificial Sequence: Synthetic epitope
EPPSIYQWVS

SEQ ID NO: 16996 - protein, 10 aa, Artificial Sequence
  Description of Artificial Sequence: Synthetic epitope
EPQGQVAEQE

SEQ ID NO: 16997 - protein, 10 aa, Artificial Sequence
  Description of Artificial Sequence: Synthetic epitope
EPQPAEKIGK

SEQ ID NO: 16998 - protein, 10 aa, Artificial Sequence
  Description of Artificial Sequence: Synthetic epitope
EPQVTGTVGL

SEQ ID NO: 16999 - protein, 10 aa, Artificial Sequence
  Description of Artificial Sequence: Synthetic epitope
EPRASALNSG

SEQ ID NO: 17000 - protein, 10 aa, Artificial Sequence
  Description of Artificial Sequence: Synthetic epitope
EPRASKAASM

SEQ ID NO: 17001 - protein, 10 aa, Artificial Sequence
  Description of Artificial Sequence: Synthetic epitope
EPRQEMEKES

SEQ ID NO: 17002 - protein, 10 aa, Artificial Sequence
  Description of Artificial Sequence: Synthetic epitope
EPRQRSTRKQ

SEQ ID NO: 17003 - protein, 10 aa, Artificial Sequence
  Description of Artificial Sequence: Synthetic epitope
EPRRVGSSRA

SEQ ID NO: 17004 - protein, 10 aa, Artificial Sequence
  Description of Artificial Sequence: Synthetic epitope
EPRSLIQGAF

SEQ ID NO: 17005 - protein, 10 aa, Artificial Sequence
  Description of Artificial Sequence: Synthetic epitope
EPRSSIKISA

SEQ ID NO: 17006 - protein, 10 aa, Artificial Sequence
  Description of Artificial Sequence: Synthetic epitope
EPRVEKTRPE

SEQ ID NO: 17007 - protein, 10 aa, Artificial Sequence
  Description of Artificial Sequence: Synthetic epitope
EPSISLSEPL

SEQ ID NO: 17008 - protein, 10 aa, Artificial Sequence
  Description of Artificial Sequence: Synthetic epitope
EPSNVTTIDD

SEQ ID NO: 17009 - protein, 10 aa, Artificial Sequence
  Description of Artificial Sequence: Synthetic epitope
EPSSARIERK

SEQ ID NO: 17010 - protein, 10 aa, Artificial Sequence
  Description of Artificial Sequence: Synthetic epitope
EPSSKNLWEQ

SEQ ID NO: 17011 - protein, 10 aa, Artificial Sequence
  Description of Artificial Sequence: Synthetic epitope
EPSSTQFQVP

SEQ ID NO: 17012 - protein, 10 aa, Artificial Sequence
  Description of Artificial Sequence: Synthetic epitope
EPSTHVSNQK

SEQ ID NO: 17013 - protein, 10 aa, Artificial Sequence
  Description of Artificial Sequence: Synthetic epitope
EPSTKELKEH

SEQ ID NO: 17014 - protein, 10 aa, Artificial Sequence
  Description of Artificial Sequence: Synthetic epitope
EPSTRKNLMN

SEQ ID NO: 17015 - protein, 10 aa, Artificial Sequence
  Description of Artificial Sequence: Synthetic epitope
EPTAMKPAER

SEQ ID NO: 17016 - protein, 10 aa, Artificial Sequence
  Description of Artificial Sequence: Synthetic epitope
EPTEPIIEVP

SEQ ID NO: 17017 - protein, 10 aa, Artificial Sequence
  Description of Artificial Sequence: Synthetic epitope
EPTIISAILK

SEQ ID NO: 17018 - protein, 10 aa, Artificial Sequence
  Description of Artificial Sequence: Synthetic epitope
EPTLEVVEQA

SEQ ID NO: 17019 - protein, 10 aa, Artificial Sequence
  Description of Artificial Sequence: Synthetic epitope
EPTRVSMPTE

SEQ ID NO: 17020 - protein, 10 aa, Artificial Sequence
  Description of Artificial Sequence: Synthetic epitope
EPTVHFAEDA

SEQ ID NO: 17021 - protein, 10 aa, Artificial Sequence
  Description of Artificial Sequence: Synthetic epitope
EPTYARSSKN

SEQ ID NO: 17022 - protein, 10 aa, Artificial Sequence
  Description of Artificial Sequence: Synthetic epitope
EPVAASSLAQ

SEQ ID NO: 17023 - protein, 10 aa, Artificial Sequence
  Description of Artificial Sequence: Synthetic epitope
EPVGTSSNAD

SEQ ID NO: 17024 - protein, 10 aa, Artificial Sequence
  Description of Artificial Sequence: Synthetic epitope
EPVNLPKQKK

SEQ ID NO: 17025 - protein, 10 aa, Artificial Sequence
  Description of Artificial Sequence: Synthetic epitope
EPVQADESQS

SEQ ID NO: 17026 - protein, 10 aa, Artificial Sequence
  Description of Artificial Sequence: Synthetic epitope
EPWFWHDTLT

SEQ ID NO: 17027 - protein, 10 aa, Artificial Sequence
  Description of Artificial Sequence: Synthetic epitope
EPWVRGRHET

SEQ ID NO: 17028 - protein, 10 aa, Artificial Sequence
  Description of Artificial Sequence: Synthetic epitope
EQAADSLDFD

SEQ ID NO: 17029 - protein, 10 aa, Artificial Sequence
  Description of Artificial Sequence: Synthetic epitope
EQAARALSQF

SEQ ID NO: 17030 - protein, 10 aa, Artificial Sequence
  Description of Artificial Sequence: Synthetic epitope
EQAASAISEL

SEQ ID NO: 17031 - protein, 10 aa, Artificial Sequence
  Description of Artificial Sequence: Synthetic epitope
EQAGQAQAEL

SEQ ID NO: 17032 - protein, 10 aa, Artificial Sequence
  Description of Artificial Sequence: Synthetic epitope
EQAIKEGEDM

SEQ ID NO: 17033 - protein, 10 aa, Artificial Sequence
  Description of Artificial Sequence: Synthetic epitope
EQAIRGADAQ

SEQ ID NO: 17034 - protein, 10 aa, Artificial Sequence
  Description of Artificial Sequence: Synthetic epitope
EQAISVRQQV

SEQ ID NO: 17035 - protein, 10 aa, Artificial Sequence
  Description of Artificial Sequence: Synthetic epitope
EQALKAAQEQ

SEQ ID NO: 17036 - protein, 10 aa, Artificial Sequence
  Description of Artificial Sequence: Synthetic epitope
EQAPAAVVEL

SEQ ID NO: 17037 - protein, 10 aa, Artificial Sequence
  Description of Artificial Sequence: Synthetic epitope
EQAPTVKRTE

SEQ ID NO: 17038 - protein, 10 aa, Artificial Sequence
  Description of Artificial Sequence: Synthetic epitope
EQARASAGDT

SEQ ID NO: 17039 - protein, 10 aa, Artificial Sequence
  Description of Artificial Sequence: Synthetic epitope
EQARAVQMST

SEQ ID NO: 17040 - protein, 10 aa, Artificial Sequence
  Description of Artificial Sequence: Synthetic epitope
EQARSYNKQM

SEQ ID NO: 17041 - protein, 10 aa, Artificial Sequence
  Description of Artificial Sequence: Synthetic epitope
EQASNLTQAP

SEQ ID NO: 17042 - protein, 10 aa, Artificial Sequence
  Description of Artificial Sequence: Synthetic epitope
EQASSTQQDQ

SEQ ID NO: 17043 - protein, 10 aa, Artificial Sequence
  Description of Artificial Sequence: Synthetic epitope
EQATVDTNSL

SEQ ID NO: 17044 - protein, 10 aa, Artificial Sequence
  Description of Artificial Sequence: Synthetic epitope
EQAVQAINKL

SEQ ID NO: 17045 - protein, 10 aa, Artificial Sequence
  Description of Artificial Sequence: Synthetic epitope
EQDIKLREMK

SEQ ID NO: 17046 - protein, 10 aa, Artificial Sequence
  Description of Artificial Sequence: Synthetic epitope
EQDKQEDPTN

SEQ ID NO: 17047 - protein, 10 aa, Artificial Sequence
  Description of Artificial Sequence: Synthetic epitope
EQDQEPSEAT

SEQ ID NO: 17048 - protein, 10 aa, Artificial Sequence
  Description of Artificial Sequence: Synthetic epitope
EQDRSALKKR

SEQ ID NO: 17049 - protein, 10 aa, Artificial Sequence
  Description of Artificial Sequence: Synthetic epitope
EQDTEKEHHT

SEQ ID NO: 17050 - protein, 10 aa, Artificial Sequence
  Description of Artificial Sequence: Synthetic epitope
EQDVKALAGP

SEQ ID NO: 17051 - protein, 10 aa, Artificial Sequence
  Description of Artificial Sequence: Synthetic epitope
EQDVLSYQNL

SEQ ID NO: 17052 - protein, 10 aa, Artificial Sequence
  Description of Artificial Sequence: Synthetic epitope
EQEAQTIHEE

SEQ ID NO: 17053 - protein, 10 aa, Artificial Sequence
  Description of Artificial Sequence: Synthetic epitope
EQEARKKQRR

SEQ ID NO: 17054 - protein, 10 aa, Artificial Sequence
  Description of Artificial Sequence: Synthetic epitope
EQEAVAVDSN

SEQ ID NO: 17055 - protein, 10 aa, Artificial Sequence
  Description of Artificial Sequence: Synthetic epitope
EQEILSTRAN

SEQ ID NO: 17056 - protein, 10 aa, Artificial Sequence
  Description of Artificial Sequence: Synthetic epitope
EQEIQAMVSK

SEQ ID NO: 17057 - protein, 10 aa, Artificial Sequence
  Description of Artificial Sequence: Synthetic epitope
EQEKKSLIEK

SEQ ID NO: 17058 - protein, 10 aa, Artificial Sequence
  Description of Artificial Sequence: Synthetic epitope
EQEKQQFQRH

SEQ ID NO: 17059 - protein, 10 aa, Artificial Sequence
  Description of Artificial Sequence: Synthetic epitope
EQEKRERKKQ

SEQ ID NO: 17060 - protein, 10 aa, Artificial Sequence
  Description of Artificial Sequence: Synthetic epitope
EQEKSALIKQ

SEQ ID NO: 17061 - protein, 10 aa, Artificial Sequence
  Description of Artificial Sequence: Synthetic epitope
EQEKVENKTP

SEQ ID NO: 17062 - protein, 10 aa, Artificial Sequence
  Description of Artificial Sequence: Synthetic epitope
EQELTLVGRR

SEQ ID NO: 17063 - protein, 10 aa, Artificial Sequence
  Description of Artificial Sequence: Synthetic epitope
EQEMMSKKRQ

SEQ ID NO: 17064 - protein, 10 aa, Artificial Sequence
  Description of Artificial Sequence: Synthetic epitope
EQEPEKVDTE

SEQ ID NO: 17065 - protein, 10 aa, Artificial Sequence
  Description of Artificial Sequence: Synthetic epitope
EQEPITVDQT

SEQ ID NO: 17066 - protein, 10 aa, Artificial Sequence
  Description of Artificial Sequence: Synthetic epitope
EQEQEVKKQQ

SEQ ID NO: 17067 - protein, 10 aa, Artificial Sequence
  Description of Artificial Sequence: Synthetic epitope
EQEQKSQQAS

SEQ ID NO: 17068 - protein, 10 aa, Artificial Sequence
  Description of Artificial Sequence: Synthetic epitope
EQEQTAEPLM

SEQ ID NO: 17069 - protein, 10 aa, Artificial Sequence
  Description of Artificial Sequence: Synthetic epitope
EQEQVRATSQ

SEQ ID NO: 17070 - protein, 10 aa, Artificial Sequence
  Description of Artificial Sequence: Synthetic epitope
EQEREGSENN

SEQ ID NO: 17071 - protein, 10 aa, Artificial Sequence
  Description of Artificial Sequence: Synthetic epitope
EQESLEVAIQ

SEQ ID NO: 17072 - protein, 10 aa, Artificial Sequence
  Description of Artificial Sequence: Synthetic epitope
EQESLSRLEQ

SEQ ID NO: 17073 - protein, 10 aa, Artificial Sequence
  Description of Artificial Sequence: Synthetic epitope
EQESLSVGEE

SEQ ID NO: 17074 - protein, 10 aa, Artificial Sequence
  Description of Artificial Sequence: Synthetic epitope
EQETNVASEI

SEQ ID NO: 17075 - protein, 10 aa, Artificial Sequence
  Description of Artificial Sequence: Synthetic epitope
EQFEASLLNL

SEQ ID NO: 17076 - protein, 10 aa, Artificial Sequence
  Description of Artificial Sequence: Synthetic epitope
EQFGTSSFKE

SEQ ID NO: 17077 - protein, 10 aa, Artificial Sequence
  Description of Artificial Sequence: Synthetic epitope
EQFQIVPAVE

SEQ ID NO: 17078 - protein, 10 aa, Artificial Sequence
  Description of Artificial Sequence: Synthetic epitope
EQFSEATEEA

SEQ ID NO: 17079 - protein, 10 aa, Artificial Sequence
  Description of Artificial Sequence: Synthetic epitope
EQGAQASVEN

SEQ ID NO: 17080 - protein, 10 aa, Artificial Sequence
  Description of Artificial Sequence: Synthetic epitope
EQGHQQARGE

SEQ ID NO: 17081 - protein, 10 aa, Artificial Sequence
  Description of Artificial Sequence: Synthetic epitope
EQGILVVDKG

SEQ ID NO: 17082 - protein, 10 aa, Artificial Sequence
  Description of Artificial Sequence: Synthetic epitope
EQGRAASARA

SEQ ID NO: 17083 - protein, 10 aa, Artificial Sequence
  Description of Artificial Sequence: Synthetic epitope
EQGTAAGEKL

SEQ ID NO: 17084 - protein, 10 aa, Artificial Sequence
  Description of Artificial Sequence: Synthetic epitope
EQHHTQPVLE

SEQ ID NO: 17085 - protein, 10 aa, Artificial Sequence
  Description of Artificial Sequence: Synthetic epitope
EQHQEVQKAK

SEQ ID NO: 17086 - protein, 10 aa, Artificial Sequence
  Description of Artificial Sequence: Synthetic epitope
EQIAQSLKDE

SEQ ID NO: 17087 - protein, 10 aa, Artificial Sequence
  Description of Artificial Sequence: Synthetic epitope
EQIATSDKMQ

SEQ ID NO: 17088 - protein, 10 aa, Artificial Sequence
  Description of Artificial Sequence: Synthetic epitope
EQINRKQDWS

SEQ ID NO: 17089 - protein, 10 aa, Artificial Sequence
  Description of Artificial Sequence: Synthetic epitope
EQIQEEKSFE

SEQ ID NO: 17090 - protein, 10 aa, Artificial Sequence
  Description of Artificial Sequence: Synthetic epitope
EQIVQQSDAF

SEQ ID NO: 17091 - protein, 10 aa, Artificial Sequence
  Description of Artificial Sequence: Synthetic epitope
EQKAEITLVA

SEQ ID NO: 17092 - protein, 10 aa, Artificial Sequence
  Description of Artificial Sequence: Synthetic epitope
EQKAIDVPGQ

SEQ ID NO: 17093 - protein, 10 aa, Artificial Sequence
  Description of Artificial Sequence: Synthetic epitope
EQKALQEKEA

SEQ ID NO: 17094 - protein, 10 aa, Artificial Sequence
  Description of Artificial Sequence: Synthetic epitope
EQKFGLFSAE

SEQ ID NO: 17095 - protein, 10 aa, Artificial Sequence
  Description of Artificial Sequence: Synthetic epitope
EQKHINESLK

SEQ ID NO: 17096 - protein, 10 aa, Artificial Sequence
  Description of Artificial Sequence: Synthetic epitope
EQKKETERIE

SEQ ID NO: 17097 - protein, 10 aa, Artificial Sequence
  Description of Artificial Sequence: Synthetic epitope
EQKKIDGAEP

SEQ ID NO: 17098 - protein, 10 aa, Artificial Sequence
  Description of Artificial Sequence: Synthetic epitope
EQKKLSSQLE

SEQ ID NO: 17099 - protein, 10 aa, Artificial Sequence
  Description of Artificial Sequence: Synthetic epitope
EQKLSRAKTQ

SEQ ID NO: 17100 - protein, 10 aa, Artificial Sequence
  Description of Artificial Sequence: Synthetic epitope
EQKNIAVETD

SEQ ID NO: 17101 - protein, 10 aa, Artificial Sequence
  Description of Artificial Sequence: Synthetic epitope
EQKNKTSYRH

SEQ ID NO: 17102 - protein, 10 aa, Artificial Sequence
  Description of Artificial Sequence: Synthetic epitope
EQKRGAEALK

SEQ ID NO: 17103 - protein, 10 aa, Artificial Sequence
  Description of Artificial Sequence: Synthetic epitope
EQKRKVVSSN

SEQ ID NO: 17104 - protein, 10 aa, Artificial Sequence
  Description of Artificial Sequence: Synthetic epitope
EQKSGELGKK

SEQ ID NO: 17105 - protein, 10 aa, Artificial Sequence
  Description of Artificial Sequence: Synthetic epitope
EQKTLQKQQN

SEQ ID NO: 17106 - protein, 10 aa, Artificial Sequence
  Description of Artificial Sequence: Synthetic epitope
EQKTQESQKK

SEQ ID NO: 17107 - protein, 10 aa, Artificial Sequence
  Description of Artificial Sequence: Synthetic epitope
EQKTSADGNE

SEQ ID NO: 17108 - protein, 10 aa, Artificial Sequence
  Description of Artificial Sequence: Synthetic epitope
EQKTSLVAKN

SEQ ID NO: 17109 - protein, 10 aa, Artificial Sequence
  Description of Artificial Sequence: Synthetic epitope
EQKVKETKIL

SEQ ID NO: 17110 - protein, 10 aa, Artificial Sequence
  Description of Artificial Sequence: Synthetic epitope
EQKVKQKAAD

SEQ ID NO: 17111 - protein, 10 aa, Artificial Sequence
  Description of Artificial Sequence: Synthetic epitope
EQLAKRKTFS

SEQ ID NO: 17112 - protein, 10 aa, Artificial Sequence
  Description of Artificial Sequence: Synthetic epitope
EQLDTYDKSD

SEQ ID NO: 17113 - protein, 10 aa, Artificial Sequence
  Description of Artificial Sequence: Synthetic epitope
EQLEAASSQK

SEQ ID NO: 17114 - protein, 10 aa, Artificial Sequence
  Description of Artificial Sequence: Synthetic epitope
EQLEAQEARA

SEQ ID NO: 17115 - protein, 10 aa, Artificial Sequence
  Description of Artificial Sequence: Synthetic epitope
EQLFQTRQEM

SEQ ID NO: 17116 - protein, 10 aa, Artificial Sequence
  Description of Artificial Sequence: Synthetic epitope
EQLIQMETEE

SEQ ID NO: 17117 - protein, 10 aa, Artificial Sequence
  Description of Artificial Sequence: Synthetic epitope
EQLIVMEGDK

SEQ ID NO: 17118 - protein, 10 aa, Artificial Sequence
  Description of Artificial Sequence: Synthetic epitope
EQLKKSKTLF

SEQ ID NO: 17119 - protein, 10 aa, Artificial Sequence
  Description of Artificial Sequence: Synthetic epitope
EQLLQVTMTT

SEQ ID NO: 17120 - protein, 10 aa, Artificial Sequence
  Description of Artificial Sequence: Synthetic epitope
EQLMHQAVED

SEQ ID NO: 17121 - protein, 10 aa, Artificial Sequence
  Description of Artificial Sequence: Synthetic epitope
EQLNAKLLQQ

SEQ ID NO: 17122 - protein, 10 aa, Artificial Sequence
  Description of Artificial Sequence: Synthetic epitope
EQLQGPQEME

SEQ ID NO: 17123 - protein, 10 aa, Artificial Sequence
  Description of Artificial Sequence: Synthetic epitope
EQLQVAQMRI

SEQ ID NO: 17124 - protein, 10 aa, Artificial Sequence
  Description of Artificial Sequence: Synthetic epitope
EQLSEVLEQI

SEQ ID NO: 17125 - protein, 10 aa, Artificial Sequence
  Description of Artificial Sequence: Synthetic epitope
EQLSLKQQDK

SEQ ID NO: 17126 - protein, 10 aa, Artificial Sequence
  Description of Artificial Sequence: Synthetic epitope
EQLSNSLPNK

SEQ ID NO: 17127 - protein, 10 aa, Artificial Sequence
  Description of Artificial Sequence: Synthetic epitope
EQLSQRTQEA

SEQ ID NO: 17128 - protein, 10 aa, Artificial Sequence
  Description of Artificial Sequence: Synthetic epitope
EQLSVQSVER

SEQ ID NO: 17129 - protein, 10 aa, Artificial Sequence
  Description of Artificial Sequence: Synthetic epitope
EQLTESEQAA

SEQ ID NO: 17130 - protein, 10 aa, Artificial Sequence
  Description of Artificial Sequence: Synthetic epitope
EQLVEEKDSE

SEQ ID NO: 17131 - protein, 10 aa, Artificial Sequence
  Description of Artificial Sequence: Synthetic epitope
EQLVVLTTSP

SEQ ID NO: 17132 - protein, 10 aa, Artificial Sequence
  Description of Artificial Sequence: Synthetic epitope
EQLYDLTLEY

SEQ ID NO: 17133 - protein, 10 aa, Artificial Sequence
  Description of Artificial Sequence: Synthetic epitope
EQMEMKLDTG

SEQ ID NO: 17134 - protein, 10 aa, Artificial Sequence
  Description of Artificial Sequence: Synthetic epitope
EQMEREMRHK

SEQ ID NO: 17135 - protein, 10 aa, Artificial Sequence
  Description of Artificial Sequence: Synthetic epitope
EQMGIKENDA

SEQ ID NO: 17136 - protein, 10 aa, Artificial Sequence
  Description of Artificial Sequence: Synthetic epitope
EQMLDSGQSE

SEQ ID NO: 17137 - protein, 10 aa, Artificial Sequence
  Description of Artificial Sequence: Synthetic epitope
EQMNSAVLPE

SEQ ID NO: 17138 - protein, 10 aa, Artificial Sequence
  Description of Artificial Sequence: Synthetic epitope
EQMVKIKQPV

SEQ ID NO: 17139 - protein, 10 aa, Artificial Sequence
  Description of Artificial Sequence: Synthetic epitope
EQMYQKSKEE

SEQ ID NO: 17140 - protein, 10 aa, Artificial Sequence
  Description of Artificial Sequence: Synthetic epitope
EQNDEQEERS

SEQ ID NO: 17141 - protein, 10 aa, Artificial Sequence
  Description of Artificial Sequence: Synthetic epitope
EQNKKQPRQD

SEQ ID NO: 17142 - protein, 10 aa, Artificial Sequence
  Description of Artificial Sequence: Synthetic epitope
EQNLQVAAQI

SEQ ID NO: 17143 - protein, 10 aa, Artificial Sequence
  Description of Artificial Sequence: Synthetic epitope
EQNLSVKNRD

SEQ ID NO: 17144 - protein, 10 aa, Artificial Sequence
  Description of Artificial Sequence: Synthetic epitope
EQNNRVTENE

SEQ ID NO: 17145 - protein, 10 aa, Artificial Sequence
  Description of Artificial Sequence: Synthetic epitope
EQNRINTIRQ

SEQ ID NO: 17146 - protein, 10 aa, Artificial Sequence
  Description of Artificial Sequence: Synthetic epitope
EQPDLSSEMS

SEQ ID NO: 17147 - protein, 10 aa, Artificial Sequence
  Description of Artificial Sequence: Synthetic epitope
EQPMEGSHQG

SEQ ID NO: 17148 - protein, 10 aa, Artificial Sequence
  Description of Artificial Sequence: Synthetic epitope
EQPQGALQTR

SEQ ID NO: 17149 - protein, 10 aa, Artificial Sequence
  Description of Artificial Sequence: Synthetic epitope
EQPSVDTAIK

SEQ ID NO: 17150 - protein, 10 aa, Artificial Sequence
  Description of Artificial Sequence: Synthetic epitope
EQPTISSKSH

SEQ ID NO: 17151 - protein, 10 aa, Artificial Sequence
  Description of Artificial Sequence: Synthetic epitope
EQQATELLAA

SEQ ID NO: 17152 - protein, 10 aa, Artificial Sequence
  Description of Artificial Sequence: Synthetic epitope
EQQDGASSRS

SEQ ID NO: 17153 - protein, 10 aa, Artificial Sequence
  Description of Artificial Sequence: Synthetic epitope
EQQEAESDSS

SEQ ID NO: 17154 - protein, 10 aa, Artificial Sequence
  Description of Artificial Sequence: Synthetic epitope
EQQKEGLEIV

SEQ ID NO: 17155 - protein, 10 aa, Artificial Sequence
  Description of Artificial Sequence: Synthetic epitope
EQQKLQSRQL

SEQ ID NO: 17156 - protein, 10 aa, Artificial Sequence
  Description of Artificial Sequence: Synthetic epitope
EQQLADADRQ

SEQ ID NO: 17157 - protein, 10 aa, Artificial Sequence
  Description of Artificial Sequence: Synthetic epitope
EQQLKQEKTQ

SEQ ID NO: 17158 - protein, 10 aa, Artificial Sequence
  Description of Artificial Sequence: Synthetic epitope
EQQLQSIMVL

SEQ ID NO: 17159 - protein, 10 aa, Artificial Sequence
  Description of Artificial Sequence: Synthetic epitope
EQQMMYAGSK

SEQ ID NO: 17160 - protein, 10 aa, Artificial Sequence
  Description of Artificial Sequence: Synthetic epitope
EQQNTIESKM

SEQ ID NO: 17161 - protein, 10 aa, Artificial Sequence
  Description of Artificial Sequence: Synthetic epitope
EQQRQEQEVE

SEQ ID NO: 17162 - protein, 10 aa, Artificial Sequence
  Description of Artificial Sequence: Synthetic epitope
EQQRRILQQD

SEQ ID NO: 17163 - protein, 10 aa, Artificial Sequence
  Description of Artificial Sequence: Synthetic epitope
EQQRRILQQD

SEQ ID NO: 17164 - protein, 10 aa, Artificial Sequence
  Description of Artificial Sequence: Synthetic epitope
EQQRSASLAQ

SEQ ID NO: 17165 - protein, 10 aa, Artificial Sequence
  Description of Artificial Sequence: Synthetic epitope
EQQTEMEAIQ

SEQ ID NO: 17166 - protein, 10 aa, Artificial Sequence
  Description of Artificial Sequence: Synthetic epitope
EQQVASLDKH

SEQ ID NO: 17167 - protein, 10 aa, Artificial Sequence
  Description of Artificial Sequence: Synthetic epitope
EQQVETANEE

SEQ ID NO: 17168 - protein, 10 aa, Artificial Sequence
  Description of Artificial Sequence: Synthetic epitope
EQRARKQHQR

SEQ ID NO: 17169 - protein, 10 aa, Artificial Sequence
  Description of Artificial Sequence: Synthetic epitope
EQRASIRFKT

SEQ ID NO: 17170 - protein, 10 aa, Artificial Sequence
  Description of Artificial Sequence: Synthetic epitope
EQRESQRSRS

SEQ ID NO: 17171 - protein, 10 aa, Artificial Sequence
  Description of Artificial Sequence: Synthetic epitope
EQRIKLIVRI

SEQ ID NO: 17172 - protein, 10 aa, Artificial Sequence
  Description of Artificial Sequence: Synthetic epitope
EQRIRLVVSR

SEQ ID NO: 17173 - protein, 10 aa, Artificial Sequence
  Description of Artificial Sequence: Synthetic epitope
EQRKSLGSSH

SEQ ID NO: 17174 - protein, 10 aa, Artificial Sequence
  Description of Artificial Sequence: Synthetic epitope
EQRLEESSQA

SEQ ID NO: 17175 - protein, 10 aa, Artificial Sequence
  Description of Artificial Sequence: Synthetic epitope
EQRLRSEAVE

SEQ ID NO: 17176 - protein, 10 aa, Artificial Sequence
  Description of Artificial Sequence: Synthetic epitope
EQRQLALAEK

SEQ ID NO: 17177 - protein, 10 aa, Artificial Sequence
  Description of Artificial Sequence: Synthetic epitope
EQRQSVQSDQ

SEQ ID NO: 17178 - protein, 10 aa, Artificial Sequence
  Description of Artificial Sequence: Synthetic epitope
EQRRQVTLFP

SEQ ID NO: 17179 - protein, 10 aa, Artificial Sequence
  Description of Artificial Sequence: Synthetic epitope
EQRRTTASTT

SEQ ID NO: 17180 - protein, 10 aa, Artificial Sequence
  Description of Artificial Sequence: Synthetic epitope
EQRVLLQRDQ

SEQ ID NO: 17181 - protein, 10 aa, Artificial Sequence
  Description of Artificial Sequence: Synthetic epitope
EQSAKAVDTD

SEQ ID NO: 17182 - protein, 10 aa, Artificial Sequence
  Description of Artificial Sequence: Synthetic epitope
EQSDANVEFR

SEQ ID NO: 17183 - protein, 10 aa, Artificial Sequence
  Description of Artificial Sequence: Synthetic epitope
EQSETRKQAE

SEQ ID NO: 17184 - protein, 10 aa, Artificial Sequence
  Description of Artificial Sequence: Synthetic epitope
EQSFRQDETM

SEQ ID NO: 17185 - protein, 10 aa, Artificial Sequence
  Description of Artificial Sequence: Synthetic epitope
EQSIRAADAV

SEQ ID NO: 17186 - protein, 10 aa, Artificial Sequence
  Description of Artificial Sequence: Synthetic epitope
EQSIVSKLGP

SEQ ID NO: 17187 - protein, 10 aa, Artificial Sequence
  Description of Artificial Sequence: Synthetic epitope
EQSKDELVME

SEQ ID NO: 17188 - protein, 10 aa, Artificial Sequence
  Description of Artificial Sequence: Synthetic epitope
EQSKLLKLKE

SEQ ID NO: 17189 - protein, 10 aa, Artificial Sequence
  Description of Artificial Sequence: Synthetic epitope
EQSLLIMKAI

SEQ ID NO: 17190 - protein, 10 aa, Artificial Sequence
  Description of Artificial Sequence: Synthetic epitope
EQSQKMVIEK

SEQ ID NO: 17191 - protein, 10 aa, Artificial Sequence
  Description of Artificial Sequence: Synthetic epitope
EQSQKTQNIS

SEQ ID NO: 17192 - protein, 10 aa, Artificial Sequence
  Description of Artificial Sequence: Synthetic epitope
EQSSQSETEE

SEQ ID NO: 17193 - protein, 10 aa, Artificial Sequence
  Description of Artificial Sequence: Synthetic epitope
EQSSTVNAKK

SEQ ID NO: 17194 - protein, 10 aa, Artificial Sequence
  Description of Artificial Sequence: Synthetic epitope
EQTALNLTKT

SEQ ID NO: 17195 - protein, 10 aa, Artificial Sequence
  Description of Artificial Sequence: Synthetic epitope
EQTAPFNYAM

SEQ ID NO: 17196 - protein, 10 aa, Artificial Sequence
  Description of Artificial Sequence: Synthetic epitope
EQTAVETKKQ

SEQ ID NO: 17197 - protein, 10 aa, Artificial Sequence
  Description of Artificial Sequence: Synthetic epitope
EQTEVTAALA

SEQ ID NO: 17198 - protein, 10 aa, Artificial Sequence
  Description of Artificial Sequence: Synthetic epitope
EQTIKQLENT

SEQ ID NO: 17199 - protein, 10 aa, Artificial Sequence
  Description of Artificial Sequence: Synthetic epitope
EQTKSKSEAK

SEQ ID NO: 17200 - protein, 10 aa, Artificial Sequence
  Description of Artificial Sequence: Synthetic epitope
EQTLSLTPAK

SEQ ID NO: 17201 - protein, 10 aa, Artificial Sequence
  Description of Artificial Sequence: Synthetic epitope
EQTMAVQSQH

SEQ ID NO: 17202 - protein, 10 aa, Artificial Sequence
  Description of Artificial Sequence: Synthetic epitope
EQTPVAAKHH

SEQ ID NO: 17203 - protein, 10 aa, Artificial Sequence
  Description of Artificial Sequence: Synthetic epitope
EQTQKYSVSE

SEQ ID NO: 17204 - protein, 10 aa, Artificial Sequence
  Description of Artificial Sequence: Synthetic epitope
EQTSEQNKLG

SEQ ID NO: 17205 - protein, 10 aa, Artificial Sequence
  Description of Artificial Sequence: Synthetic epitope
EQVEKKNGEL

SEQ ID NO: 17206 - protein, 10 aa, Artificial Sequence
  Description of Artificial Sequence: Synthetic epitope
EQVITLMSLD

SEQ ID NO: 17207 - protein, 10 aa, Artificial Sequence
  Description of Artificial Sequence: Synthetic epitope
EQVKSETISS

SEQ ID NO: 17208 - protein, 10 aa, Artificial Sequence
  Description of Artificial Sequence: Synthetic epitope
EQVLIESEQM

SEQ ID NO: 17209 - protein, 10 aa, Artificial Sequence
  Description of Artificial Sequence: Synthetic epitope
EQVQKAPSAG

SEQ ID NO: 17210 - protein, 10 aa, Artificial Sequence
  Description of Artificial Sequence: Synthetic epitope
EQVRSIMDEA

SEQ ID NO: 17211 - protein, 10 aa, Artificial Sequence
  Description of Artificial Sequence: Synthetic epitope
EQVSEAIKTS

SEQ ID NO: 17212 - protein, 10 aa, Artificial Sequence
  Description of Artificial Sequence: Synthetic epitope
EQVTVNKARA

SEQ ID NO: 17213 - protein, 10 aa, Artificial Sequence
  Description of Artificial Sequence: Synthetic epitope
EQWIILRNLL

SEQ ID NO: 17214 - protein, 10 aa, Artificial Sequence
  Description of Artificial Sequence: Synthetic epitope
EQWLIESLSD

SEQ ID NO: 17215 - protein, 10 aa, Artificial Sequence
  Description of Artificial Sequence: Synthetic epitope
EQYDQAKLSR

SEQ ID NO: 17216 - protein, 10 aa, Artificial Sequence
  Description of Artificial Sequence: Synthetic epitope
EQYKKGTESH

SEQ ID NO: 17217 - protein, 10 aa, Artificial Sequence
  Description of Artificial Sequence: Synthetic epitope
EQYKNDESSF

SEQ ID NO: 17218 - protein, 10 aa, Artificial Sequence
  Description of Artificial Sequence: Synthetic epitope
EQYTEAAGSQ

SEQ ID NO: 17219 - protein, 10 aa, Artificial Sequence
  Description of Artificial Sequence: Synthetic epitope
ERADEKITNI

SEQ ID NO: 17220 - protein, 10 aa, Artificial Sequence
  Description of Artificial Sequence: Synthetic epitope
ERADSTVSRD

SEQ ID NO: 17221 - protein, 10 aa, Artificial Sequence
  Description of Artificial Sequence: Synthetic epitope
ERAGKATRDE

SEQ ID NO: 17222 - protein, 10 aa, Artificial Sequence
  Description of Artificial Sequence: Synthetic epitope
ERAHQVTYSQ

SEQ ID NO: 17223 - protein, 10 aa, Artificial Sequence
  Description of Artificial Sequence: Synthetic epitope
ERAKKEKAEK

SEQ ID NO: 17224 - protein, 10 aa, Artificial Sequence
  Description of Artificial Sequence: Synthetic epitope
ERAKPEMSRM

SEQ ID NO: 17225 - protein, 10 aa, Artificial Sequence
  Description of Artificial Sequence: Synthetic epitope
ERALATARQE

SEQ ID NO: 17226 - protein, 10 aa, Artificial Sequence
  Description of Artificial Sequence: Synthetic epitope
ERALREAKET

SEQ ID NO: 17227 - protein, 10 aa, Artificial Sequence
  Description of Artificial Sequence: Synthetic epitope
ERAMSSHFHQ

SEQ ID NO: 17228 - protein, 10 aa, Artificial Sequence
  Description of Artificial Sequence: Synthetic epitope
ERDGPQADEE

SEQ ID NO: 17229 - protein, 10 aa, Artificial Sequence
  Description of Artificial Sequence: Synthetic epitope
ERDGSQKVSQ

SEQ ID NO: 17230 - protein, 10 aa, Artificial Sequence
  Description of Artificial Sequence: Synthetic epitope
ERDQEQSVIY

SEQ ID NO: 17231 - protein, 10 aa, Artificial Sequence
  Description of Artificial Sequence: Synthetic epitope
ERDQIQKSEA

SEQ ID NO: 17232 - protein, 10 aa, Artificial Sequence
  Description of Artificial Sequence: Synthetic epitope
ERDSSLTLTR

SEQ ID NO: 17233 - protein, 10 aa, Artificial Sequence
  Description of Artificial Sequence: Synthetic epitope
ERDTANEAET

SEQ ID NO: 17234 - protein, 10 aa, Artificial Sequence
  Description of Artificial Sequence: Synthetic epitope
ERDTETVKGV

SEQ ID NO: 17235 - protein, 10 aa, Artificial Sequence
  Description of Artificial Sequence: Synthetic epitope
ERDTSSVAVN

SEQ ID NO: 17236 - protein, 10 aa, Artificial Sequence
  Description of Artificial Sequence: Synthetic epitope
ERDVSEDYEA

SEQ ID NO: 17237 - protein, 10 aa, Artificial Sequence
  Description of Artificial Sequence: Synthetic epitope
EREANVEQGL

SEQ ID NO: 17238 - protein, 10 aa, Artificial Sequence
  Description of Artificial Sequence: Synthetic epitope
EREEAATADP

SEQ ID NO: 17239 - protein, 10 aa, Artificial Sequence
  Description of Artificial Sequence: Synthetic epitope
EREESGAAES

SEQ ID NO: 17240 - protein, 10 aa, Artificial Sequence
  Description of Artificial Sequence: Synthetic epitope
ERELDSLADL

SEQ ID NO: 17241 - protein, 10 aa, Artificial Sequence
  Description of Artificial Sequence: Synthetic epitope
ERELEISVGK

SEQ ID NO: 17242 - protein, 10 aa, Artificial Sequence
  Description of Artificial Sequence: Synthetic epitope
ERELLRRAGP

SEQ ID NO: 17243 - protein, 10 aa, Artificial Sequence
  Description of Artificial Sequence: Synthetic epitope
EREPLQVMQQ

SEQ ID NO: 17244 - protein, 10 aa, Artificial Sequence
  Description of Artificial Sequence: Synthetic epitope
ERERADLTQD

SEQ ID NO: 17245 - protein, 10 aa, Artificial Sequence
  Description of Artificial Sequence: Synthetic epitope
ERETIKMQDK

SEQ ID NO: 17246 - protein, 10 aa, Artificial Sequence
  Description of Artificial Sequence: Synthetic epitope
EREVHLDPYR

SEQ ID NO: 17247 - protein, 10 aa, Artificial Sequence
  Description of Artificial Sequence: Synthetic epitope
ERFAQVLEKE

SEQ ID NO: 17248 - protein, 10 aa, Artificial Sequence
  Description of Artificial Sequence: Synthetic epitope
ERFKSSENIG

SEQ ID NO: 17249 - protein, 10 aa, Artificial Sequence
  Description of Artificial Sequence: Synthetic epitope
ERFLITSNNQ

SEQ ID NO: 17250 - protein, 10 aa, Artificial Sequence
  Description of Artificial Sequence: Synthetic epitope
ERFSLNTVEL

SEQ ID NO: 17251 - protein, 10 aa, Artificial Sequence
  Description of Artificial Sequence: Synthetic epitope
ERGEAKASSP

SEQ ID NO: 17252 - protein, 10 aa, Artificial Sequence
  Description of Artificial Sequence: Synthetic epitope
ERGETAKEAL

SEQ ID NO: 17253 - protein, 10 aa, Artificial Sequence
  Description of Artificial Sequence: Synthetic epitope
ERGKGESTED

SEQ ID NO: 17254 - protein, 10 aa, Artificial Sequence
  Description of Artificial Sequence: Synthetic epitope
ERGLVSVPKY

SEQ ID NO: 17255 - protein, 10 aa, Artificial Sequence
  Description of Artificial Sequence: Synthetic epitope
ERGMVSMRLP

SEQ ID NO: 17256 - protein, 10 aa, Artificial Sequence
  Description of Artificial Sequence: Synthetic epitope
ERGNSASEKW

SEQ ID NO: 17257 - protein, 10 aa, Artificial Sequence
  Description of Artificial Sequence: Synthetic epitope
ERGPIFTTAR

SEQ ID NO: 17258 - protein, 10 aa, Artificial Sequence
  Description of Artificial Sequence: Synthetic epitope
ERGQPMVHGA

SEQ ID NO: 17259 - protein, 10 aa, Artificial Sequence
  Description of Artificial Sequence: Synthetic epitope
ERHRSTLTQA

SEQ ID NO: 17260 - protein, 10 aa, Artificial Sequence
  Description of Artificial Sequence: Synthetic epitope
ERIASRAIDN

SEQ ID NO: 17261 - protein, 10 aa, Artificial Sequence
  Description of Artificial Sequence: Synthetic epitope
ERIEVEKSAS

SEQ ID NO: 17262 - protein, 10 aa, Artificial Sequence
  Description of Artificial Sequence: Synthetic epitope
ERIGETLHEM

SEQ ID NO: 17263 - protein, 10 aa, Artificial Sequence
  Description of Artificial Sequence: Synthetic epitope
ERKAHKAQRD

SEQ ID NO: 17264 - protein, 10 aa, Artificial Sequence
  Description of Artificial Sequence: Synthetic epitope
ERKAISERPS

SEQ ID NO: 17265 - protein, 10 aa, Artificial Sequence
  Description of Artificial Sequence: Synthetic epitope
ERKALVVPEP

SEQ ID NO: 17266 - protein, 10 aa, Artificial Sequence
  Description of Artificial Sequence: Synthetic epitope
ERKAQIAFNE

SEQ ID NO: 17267 - protein, 10 aa, Artificial Sequence
  Description of Artificial Sequence: Synthetic epitope
ERKEERKVPP

SEQ ID NO: 17268 - protein, 10 aa, Artificial Sequence
  Description of Artificial Sequence: Synthetic epitope
ERKKQAARGW

SEQ ID NO: 17269 - protein, 10 aa, Artificial Sequence
  Description of Artificial Sequence: Synthetic epitope
ERKMSAVFKK

SEQ ID NO: 17270 - protein, 10 aa, Artificial Sequence
  Description of Artificial Sequence: Synthetic epitope
ERKRDDKPKE

SEQ ID NO: 17271 - protein, 10 aa, Artificial Sequence
  Description of Artificial Sequence: Synthetic epitope
ERKSLEFAKS

SEQ ID NO: 17272 - protein, 10 aa, Artificial Sequence
  Description of Artificial Sequence: Synthetic epitope
ERKTVEKELV

SEQ ID NO: 17273 - protein, 10 aa, Artificial Sequence
  Description of Artificial Sequence: Synthetic epitope
ERLAIALIAD

SEQ ID NO: 17274 - protein, 10 aa, Artificial Sequence
  Description of Artificial Sequence: Synthetic epitope
ERLARAEEAA

SEQ ID NO: 17275 - protein, 10 aa, Artificial Sequence
  Description of Artificial Sequence: Synthetic epitope
ERLDQMVHPV

SEQ ID NO: 17276 - protein, 10 aa, Artificial Sequence
  Description of Artificial Sequence: Synthetic epitope
ERLEILSSKE

SEQ ID NO: 17277 - protein, 10 aa, Artificial Sequence
  Description of Artificial Sequence: Synthetic epitope
ERLENTEDIE

SEQ ID NO: 17278 - protein, 10 aa, Artificial Sequence
  Description of Artificial Sequence: Synthetic epitope
ERLKAKLQRK

SEQ ID NO: 17279 - protein, 10 aa, Artificial Sequence
  Description of Artificial Sequence: Synthetic epitope
ERLKVLEAKM

SEQ ID NO: 17280 - protein, 10 aa, Artificial Sequence
  Description of Artificial Sequence: Synthetic epitope
ERLLKAREGT

SEQ ID NO: 17281 - protein, 10 aa, Artificial Sequence
  Description of Artificial Sequence: Synthetic epitope
ERLRETVTKG

SEQ ID NO: 17282 - protein, 10 aa, Artificial Sequence
  Description of Artificial Sequence: Synthetic epitope
ERLRVNLRLV

SEQ ID NO: 17283 - protein, 10 aa, Artificial Sequence
  Description of Artificial Sequence: Synthetic epitope
ERLTAEARHS

SEQ ID NO: 17284 - protein, 10 aa, Artificial Sequence
  Description of Artificial Sequence: Synthetic epitope
ERLVEMASSL

SEQ ID NO: 17285 - protein, 10 aa, Artificial Sequence
  Description of Artificial Sequence: Synthetic epitope
ERMKSREQGG

SEQ ID NO: 17286 - protein, 10 aa, Artificial Sequence
  Description of Artificial Sequence: Synthetic epitope
ERMLKVHSRG

SEQ ID NO: 17287 - protein, 10 aa, Artificial Sequence
  Description of Artificial Sequence: Synthetic epitope
ERMNLVGQDE

SEQ ID NO: 17288 - protein, 10 aa, Artificial Sequence
  Description of Artificial Sequence: Synthetic epitope
ERNEGLIASS

SEQ ID NO: 17289 - protein, 10 aa, Artificial Sequence
  Description of Artificial Sequence: Synthetic epitope
ERNEQKMKKV

SEQ ID NO: 17290 - protein, 10 aa, Artificial Sequence
  Description of Artificial Sequence: Synthetic epitope
ERNERLELEA

SEQ ID NO: 17291 - protein, 10 aa, Artificial Sequence
  Description of Artificial Sequence: Synthetic epitope
ERNKFGGKLG

SEQ ID NO: 17292 - protein, 10 aa, Artificial Sequence
  Description of Artificial Sequence: Synthetic epitope
ERPELELSRH

SEQ ID NO: 17293 - protein, 10 aa, Artificial Sequence
  Description of Artificial Sequence: Synthetic epitope
ERPKQKTEPD

SEQ ID NO: 17294 - protein, 10 aa, Artificial Sequence
  Description of Artificial Sequence: Synthetic epitope
ERPNFNIKGI

SEQ ID NO: 17295 - protein, 10 aa, Artificial Sequence
  Description of Artificial Sequence: Synthetic epitope
ERPNSASSQN

SEQ ID NO: 17296 - protein, 10 aa, Artificial Sequence
  Description of Artificial Sequence: Synthetic epitope
ERPRSAVEQL

SEQ ID NO: 17297 - protein, 10 aa, Artificial Sequence
  Description of Artificial Sequence: Synthetic epitope
ERQAEKAFQQ

SEQ ID NO: 17298 - protein, 10 aa, Artificial Sequence
  Description of Artificial Sequence: Synthetic epitope
ERQEQEDYQE

SEQ ID NO: 17299 - protein, 10 aa, Artificial Sequence
  Description of Artificial Sequence: Synthetic epitope
ERQGMLEEVV

SEQ ID NO: 17300 - protein, 10 aa, Artificial Sequence
  Description of Artificial Sequence: Synthetic epitope
ERQHDLGAME

SEQ ID NO: 17301 - protein, 10 aa, Artificial Sequence
  Description of Artificial Sequence: Synthetic epitope
ERQLEREINR

SEQ ID NO: 17302 - protein, 10 aa, Artificial Sequence
  Description of Artificial Sequence: Synthetic epitope
ERQQKEEDSE

SEQ ID NO: 17303 - protein, 10 aa, Artificial Sequence
  Description of Artificial Sequence: Synthetic epitope
ERQRAQEEQA

SEQ ID NO: 17304 - protein, 10 aa, Artificial Sequence
  Description of Artificial Sequence: Synthetic epitope
ERQVIDAERQ

SEQ ID NO: 17305 - protein, 10 aa, Artificial Sequence
  Description of Artificial Sequence: Synthetic epitope
ERQVLTQRLQ

SEQ ID NO: 17306 - protein, 10 aa, Artificial Sequence
  Description of Artificial Sequence: Synthetic epitope
ERRDNYVPEV

SEQ ID NO: 17307 - protein, 10 aa, Artificial Sequence
  Description of Artificial Sequence: Synthetic epitope
ERRELKIQER

SEQ ID NO: 17308 - protein, 10 aa, Artificial Sequence
  Description of Artificial Sequence: Synthetic epitope
ERRGVSEDGK

SEQ ID NO: 17309 - protein, 10 aa, Artificial Sequence
  Description of Artificial Sequence: Synthetic epitope
ERRIGGVFQD

SEQ ID NO: 17310 - protein, 10 aa, Artificial Sequence
  Description of Artificial Sequence: Synthetic epitope
ERRKGEAQQS

SEQ ID NO: 17311 - protein, 10 aa, Artificial Sequence
  Description of Artificial Sequence: Synthetic epitope
ERRLQTSEAA

SEQ ID NO: 17312 - protein, 10 aa, Artificial Sequence
  Description of Artificial Sequence: Synthetic epitope
ERRNEGAARV

SEQ ID NO: 17313 - protein, 10 aa, Artificial Sequence
  Description of Artificial Sequence: Synthetic epitope
ERRQAKLLSN

SEQ ID NO: 17314 - protein, 10 aa, Artificial Sequence
  Description of Artificial Sequence: Synthetic epitope
ERRQQRKNRE

SEQ ID NO: 17315 - protein, 10 aa, Artificial Sequence
  Description of Artificial Sequence: Synthetic epitope
ERRTKSWGEQ

SEQ ID NO: 17316 - protein, 10 aa, Artificial Sequence
  Description of Artificial Sequence: Synthetic epitope
ERRVQAVREI

SEQ ID NO: 17317 - protein, 10 aa, Artificial Sequence
  Description of Artificial Sequence: Synthetic epitope
ERRVSIRMSI

SEQ ID NO: 17318 - protein, 10 aa, Artificial Sequence
  Description of Artificial Sequence: Synthetic epitope
ERSAAETVTK

SEQ ID NO: 17319 - protein, 10 aa, Artificial Sequence
  Description of Artificial Sequence: Synthetic epitope
ERSAVSVASL

SEQ ID NO: 17320 - protein, 10 aa, Artificial Sequence
  Description of Artificial Sequence: Synthetic epitope
ERSLKLLFET

SEQ ID NO: 17321 - protein, 10 aa, Artificial Sequence
  Description of Artificial Sequence: Synthetic epitope
ERSMSENAVR

SEQ ID NO: 17322 - protein, 10 aa, Artificial Sequence
  Description of Artificial Sequence: Synthetic epitope
ERSQNIVTDS

SEQ ID NO: 17323 - protein, 10 aa, Artificial Sequence
  Description of Artificial Sequence: Synthetic epitope
ERSSNAREPH

SEQ ID NO: 17324 - protein, 10 aa, Artificial Sequence
  Description of Artificial Sequence: Synthetic epitope
ERSTQFKVII

SEQ ID NO: 17325 - protein, 10 aa, Artificial Sequence
  Description of Artificial Sequence: Synthetic epitope
ERTDTAADGE

SEQ ID NO: 17326 - protein, 10 aa, Artificial Sequence
  Description of Artificial Sequence: Synthetic epitope
ERTESSRRPP

SEQ ID NO: 17327 - protein, 10 aa, Artificial Sequence
  Description of Artificial Sequence: Synthetic epitope
ERTFVQELER

SEQ ID NO: 17328 - protein, 10 aa, Artificial Sequence
  Description of Artificial Sequence: Synthetic epitope
ERTMKTQNEG

SEQ ID NO: 17329 - protein, 10 aa, Artificial Sequence
  Description of Artificial Sequence: Synthetic epitope
ERTRLSSNST

SEQ ID NO: 17330 - protein, 10 aa, Artificial Sequence
  Description of Artificial Sequence: Synthetic epitope
ERTTRNEKLA

SEQ ID NO: 17331 - protein, 10 aa, Artificial Sequence
  Description of Artificial Sequence: Synthetic epitope
ERVDTDFMQL

SEQ ID NO: 17332 - protein, 10 aa, Artificial Sequence
  Description of Artificial Sequence: Synthetic epitope
ERVEGITGKQ

SEQ ID NO: 17333 - protein, 10 aa, Artificial Sequence
  Description of Artificial Sequence: Synthetic epitope
ERVESLSQVE

SEQ ID NO: 17334 - protein, 10 aa, Artificial Sequence
  Description of Artificial Sequence: Synthetic epitope
ERVKKVKRSL

SEQ ID NO: 17335 - protein, 10 aa, Artificial Sequence
  Description of Artificial Sequence: Synthetic epitope
ERVKMMEEVE

SEQ ID NO: 17336 - protein, 10 aa, Artificial Sequence
  Description of Artificial Sequence: Synthetic epitope
ERVLSLSQAL

SEQ ID NO: 17337 - protein, 10 aa, Artificial Sequence
  Description of Artificial Sequence: Synthetic epitope
ERVNMQIRPY

SEQ ID NO: 17338 - protein, 10 aa, Artificial Sequence
  Description of Artificial Sequence: Synthetic epitope
ERVPKNLATQ

SEQ ID NO: 17339 - protein, 10 aa, Artificial Sequence
  Description of Artificial Sequence: Synthetic epitope
ERVRSAAGAT

SEQ ID NO: 17340 - protein, 10 aa, Artificial Sequence
  Description of Artificial Sequence: Synthetic epitope
ERVRVSLSAP

SEQ ID NO: 17341 - protein, 10 aa, Artificial Sequence
  Description of Artificial Sequence: Synthetic epitope
ERVTSQVSNL

SEQ ID NO: 17342 - protein, 10 aa, Artificial Sequence
  Description of Artificial Sequence: Synthetic epitope
ERVVATESLV

SEQ ID NO: 17343 - protein, 10 aa, Artificial Sequence
  Description of Artificial Sequence: Synthetic epitope
ERYLRSAKRL

SEQ ID NO: 17344 - protein, 10 aa, Artificial Sequence
  Description of Artificial Sequence: Synthetic epitope
ERYSEAARSA

SEQ ID NO: 17345 - protein, 10 aa, Artificial Sequence
  Description of Artificial Sequence: Synthetic epitope
ERYSLSGESG

SEQ ID NO: 17346 - protein, 10 aa, Artificial Sequence
  Description of Artificial Sequence: Synthetic epitope
ESAAESSFLS

SEQ ID NO: 17347 - protein, 10 aa, Artificial Sequence
  Description of Artificial Sequence: Synthetic epitope
ESAAEVGFVR

SEQ ID NO: 17348 - protein, 10 aa, Artificial Sequence
  Description of Artificial Sequence: Synthetic epitope
ESAAYKAVNA

SEQ ID NO: 17349 - protein, 10 aa, Artificial Sequence
  Description of Artificial Sequence: Synthetic epitope
ESADPRVSEP

SEQ ID NO: 17350 - protein, 10 aa, Artificial Sequence
  Description of Artificial Sequence: Synthetic epitope
ESADSRAAGR

SEQ ID NO: 17351 - protein, 10 aa, Artificial Sequence
  Description of Artificial Sequence: Synthetic epitope
ESAEELQAAE

SEQ ID NO: 17352 - protein, 10 aa, Artificial Sequence
  Description of Artificial Sequence: Synthetic epitope
ESAEGKRMQQ

SEQ ID NO: 17353 - protein, 10 aa, Artificial Sequence
  Description of Artificial Sequence: Synthetic epitope
ESAEQLLVED

SEQ ID NO: 17354 - protein, 10 aa, Artificial Sequence
  Description of Artificial Sequence: Synthetic epitope
ESAKEEKISD

SEQ ID NO: 17355 - protein, 10 aa, Artificial Sequence
  Description of Artificial Sequence: Synthetic epitope
ESAKLLPDTP

SEQ ID NO: 17356 - protein, 10 aa, Artificial Sequence
  Description of Artificial Sequence: Synthetic epitope
ESAKRAVHLS

SEQ ID NO: 17357 - protein, 10 aa, Artificial Sequence
  Description of Artificial Sequence: Synthetic epitope
ESALIALDSE

SEQ ID NO: 17358 - protein, 10 aa, Artificial Sequence
  Description of Artificial Sequence: Synthetic epitope
ESALLEPQVR

SEQ ID NO: 17359 - protein, 10 aa, Artificial Sequence
  Description of Artificial Sequence: Synthetic epitope
ESALRMAAKD

SEQ ID NO: 17360 - protein, 10 aa, Artificial Sequence
  Description of Artificial Sequence: Synthetic epitope
ESALSSLKNF

SEQ ID NO: 17361 - protein, 10 aa, Artificial Sequence
  Description of Artificial Sequence: Synthetic epitope
ESANSQIDTE

SEQ ID NO: 17362 - protein, 10 aa, Artificial Sequence
  Description of Artificial Sequence: Synthetic epitope
ESANTAHNGK

SEQ ID NO: 17363 - protein, 10 aa, Artificial Sequence
  Description of Artificial Sequence: Synthetic epitope
ESAQGAQSLL

SEQ ID NO: 17364 - protein, 10 aa, Artificial Sequence
  Description of Artificial Sequence: Synthetic epitope
ESARKPTEFI

SEQ ID NO: 17365 - protein, 10 aa, Artificial Sequence
  Description of Artificial Sequence: Synthetic epitope
ESASLTEVRA

SEQ ID NO: 17366 - protein, 10 aa, Artificial Sequence
  Description of Artificial Sequence: Synthetic epitope
ESASQTAGAE

SEQ ID NO: 17367 - protein, 10 aa, Artificial Sequence
  Description of Artificial Sequence: Synthetic epitope
ESDAAVKEKA

SEQ ID NO: 17368 - protein, 10 aa, Artificial Sequence
  Description of Artificial Sequence: Synthetic epitope
ESDADAVGRG

SEQ ID NO: 17369 - protein, 10 aa, Artificial Sequence
  Description of Artificial Sequence: Synthetic epitope
ESDANTSVTD

SEQ ID NO: 17370 - protein, 10 aa, Artificial Sequence
  Description of Artificial Sequence: Synthetic epitope
ESDASLKQVK

SEQ ID NO: 17371 - protein, 10 aa, Artificial Sequence
  Description of Artificial Sequence: Synthetic epitope
ESDASSASGT

SEQ ID NO: 17372 - protein, 10 aa, Artificial Sequence
  Description of Artificial Sequence: Synthetic epitope
ESDATQQRPA

SEQ ID NO: 17373 - protein, 10 aa, Artificial Sequence
  Description of Artificial Sequence: Synthetic epitope
ESDAVKPKNQ

SEQ ID NO: 17374 - protein, 10 aa, Artificial Sequence
  Description of Artificial Sequence: Synthetic epitope
ESDKSYNNDK

SEQ ID NO: 17375 - protein, 10 aa, Artificial Sequence
  Description of Artificial Sequence: Synthetic epitope
ESDPSQSTVP

SEQ ID NO: 17376 - protein, 10 aa, Artificial Sequence
  Description of Artificial Sequence: Synthetic epitope
ESDQLTVSDQ

SEQ ID NO: 17377 - protein, 10 aa, Artificial Sequence
  Description of Artificial Sequence: Synthetic epitope
ESDQTEEHES

SEQ ID NO: 17378 - protein, 10 aa, Artificial Sequence
  Description of Artificial Sequence: Synthetic epitope
ESDSESLTQE

SEQ ID NO: 17379 - protein, 10 aa, Artificial Sequence
  Description of Artificial Sequence: Synthetic epitope
ESDSSDERVE

SEQ ID NO: 17380 - protein, 10 aa, Artificial Sequence
  Description of Artificial Sequence: Synthetic epitope
ESDSSLNSNV

SEQ ID NO: 17381 - protein, 10 aa, Artificial Sequence
  Description of Artificial Sequence: Synthetic epitope
ESDSVKSEDE

SEQ ID NO: 17382 - protein, 10 aa, Artificial Sequence
  Description of Artificial Sequence: Synthetic epitope
ESDVYKSTYA

SEQ ID NO: 17383 - protein, 10 aa, Artificial Sequence
  Description of Artificial Sequence: Synthetic epitope
ESEAVNLSKV

SEQ ID NO: 17384 - protein, 10 aa, Artificial Sequence
  Description of Artificial Sequence: Synthetic epitope
ESEDNVEEAS

SEQ ID NO: 17385 - protein, 10 aa, Artificial Sequence
  Description of Artificial Sequence: Synthetic epitope
ESEGAKTRVK

SEQ ID NO: 17386 - protein, 10 aa, Artificial Sequence
  Description of Artificial Sequence: Synthetic epitope
ESEHKTKLEQ

SEQ ID NO: 17387 - protein, 10 aa, Artificial Sequence
  Description of Artificial Sequence: Synthetic epitope
ESEIETNTEL

SEQ ID NO: 17388 - protein, 10 aa, Artificial Sequence
  Description of Artificial Sequence: Synthetic epitope
ESEIHVVRGE

SEQ ID NO: 17389 - protein, 10 aa, Artificial Sequence
  Description of Artificial Sequence: Synthetic epitope
ESEKENLQSK

SEQ ID NO: 17390 - protein, 10 aa, Artificial Sequence
  Description of Artificial Sequence: Synthetic epitope
ESEKISNENS

SEQ ID NO: 17391 - protein, 10 aa, Artificial Sequence
  Description of Artificial Sequence: Synthetic epitope
ESEKLSKMSS

SEQ ID NO: 17392 - protein, 10 aa, Artificial Sequence
  Description of Artificial Sequence: Synthetic epitope
ESEKPDTSAE

SEQ ID NO: 17393 - protein, 10 aa, Artificial Sequence
  Description of Artificial Sequence: Synthetic epitope
ESEKQELQEQ

SEQ ID NO: 17394 - protein, 10 aa, Artificial Sequence
  Description of Artificial Sequence: Synthetic epitope
ESEKRATKPK

SEQ ID NO: 17395 - protein, 10 aa, Artificial Sequence
  Description of Artificial Sequence: Synthetic epitope
ESELAGKQHE

SEQ ID NO: 17396 - protein, 10 aa, Artificial Sequence
  Description of Artificial Sequence: Synthetic epitope
ESELAVQLEQ

SEQ ID NO: 17397 - protein, 10 aa, Artificial Sequence
  Description of Artificial Sequence: Synthetic epitope
ESELEALKVK

SEQ ID NO: 17398 - protein, 10 aa, Artificial Sequence
  Description of Artificial Sequence: Synthetic epitope
ESELTKLDAE

SEQ ID NO: 17399 - protein, 10 aa, Artificial Sequence
  Description of Artificial Sequence: Synthetic epitope
ESENKRYSSH

SEQ ID NO: 17400 - protein, 10 aa, Artificial Sequence
  Description of Artificial Sequence: Synthetic epitope
ESENQNAQRI

SEQ ID NO: 17401 - protein, 10 aa, Artificial Sequence
  Description of Artificial Sequence: Synthetic epitope
ESEQTSFSDQ

SEQ ID NO: 17402 - protein, 10 aa, Artificial Sequence
  Description of Artificial Sequence: Synthetic epitope
ESERVWTRTS

SEQ ID NO: 17403 - protein, 10 aa, Artificial Sequence
  Description of Artificial Sequence: Synthetic epitope
ESESAATRLL

SEQ ID NO: 17404 - protein, 10 aa, Artificial Sequence
  Description of Artificial Sequence: Synthetic epitope
ESESEETNAP

SEQ ID NO: 17405 - protein, 10 aa, Artificial Sequence
  Description of Artificial Sequence: Synthetic epitope
ESESESEQSM

SEQ ID NO: 17406 - protein, 10 aa, Artificial Sequence
  Description of Artificial Sequence: Synthetic epitope
ESESLDSKEN

SEQ ID NO: 17407 - protein, 10 aa, Artificial Sequence
  Description of Artificial Sequence: Synthetic epitope
ESESNKVAAE

SEQ ID NO: 17408 - protein, 10 aa, Artificial Sequence
  Description of Artificial Sequence: Synthetic epitope
ESESVSATED

SEQ ID NO: 17409 - protein, 10 aa, Artificial Sequence
  Description of Artificial Sequence: Synthetic epitope
ESETSEEKSP

SEQ ID NO: 17410 - protein, 10 aa, Artificial Sequence
  Description of Artificial Sequence: Synthetic epitope
ESEVAKTKPR

SEQ ID NO: 17411 - protein, 10 aa, Artificial Sequence
  Description of Artificial Sequence: Synthetic epitope
ESEVLDEKES

SEQ ID NO: 17412 - protein, 10 aa, Artificial Sequence
  Description of Artificial Sequence: Synthetic epitope
ESFATERIDS

SEQ ID NO: 17413 - protein, 10 aa, Artificial Sequence
  Description of Artificial Sequence: Synthetic epitope
ESFKVSFLSA

SEQ ID NO: 17414 - protein, 10 aa, Artificial Sequence
  Description of Artificial Sequence: Synthetic epitope
ESFLTSQWVS

SEQ ID NO: 17415 - protein, 10 aa, Artificial Sequence
  Description of Artificial Sequence: Synthetic epitope
ESFSSRVVSL

SEQ ID NO: 17416 - protein, 10 aa, Artificial Sequence
  Description of Artificial Sequence: Synthetic epitope
ESFVVSVSSQ

SEQ ID NO: 17417 - protein, 10 aa, Artificial Sequence
  Description of Artificial Sequence: Synthetic epitope
ESGAANSQST

SEQ ID NO: 17418 - protein, 10 aa, Artificial Sequence
  Description of Artificial Sequence: Synthetic epitope
ESGDRLTRAA

SEQ ID NO: 17419 - protein, 10 aa, Artificial Sequence
  Description of Artificial Sequence: Synthetic epitope
ESGGLEQESG

SEQ ID NO: 17420 - protein, 10 aa, Artificial Sequence
  Description of Artificial Sequence: Synthetic epitope
ESGGTASDSS

SEQ ID NO: 17421 - protein, 10 aa, Artificial Sequence
  Description of Artificial Sequence: Synthetic epitope
ESGIREMHII

SEQ ID NO: 17422 - protein, 10 aa, Artificial Sequence
  Description of Artificial Sequence: Synthetic epitope
ESGSESGDSD

SEQ ID NO: 17423 - protein, 10 aa, Artificial Sequence
  Description of Artificial Sequence: Synthetic epitope
ESGSLIPSAS

SEQ ID NO: 17424 - protein, 10 aa, Artificial Sequence
  Description of Artificial Sequence: Synthetic epitope
ESGTESVVAQ

SEQ ID NO: 17425 - protein, 10 aa, Artificial Sequence
  Description of Artificial Sequence: Synthetic epitope
ESGTLSASSA

SEQ ID NO: 17426 - protein, 10 aa, Artificial Sequence
  Description of Artificial Sequence: Synthetic epitope
ESGVKQLKSE

SEQ ID NO: 17427 - protein, 10 aa, Artificial Sequence
  Description of Artificial Sequence: Synthetic epitope
ESHDADKLNA

SEQ ID NO: 17428 - protein, 10 aa, Artificial Sequence
  Description of Artificial Sequence: Synthetic epitope
ESHNMKNQQM

SEQ ID NO: 17429 - protein, 10 aa, Artificial Sequence
  Description of Artificial Sequence: Synthetic epitope
ESHSTVLARE

SEQ ID NO: 17430 - protein, 10 aa, Artificial Sequence
  Description of Artificial Sequence: Synthetic epitope
ESHTEFIFTT

SEQ ID NO: 17431 - protein, 10 aa, Artificial Sequence
  Description of Artificial Sequence: Synthetic epitope
ESIAESKSPE

SEQ ID NO: 17432 - protein, 10 aa, Artificial Sequence
  Description of Artificial Sequence: Synthetic epitope
ESIEFPVSEA

SEQ ID NO: 17433 - protein, 10 aa, Artificial Sequence
  Description of Artificial Sequence: Synthetic epitope
ESIFSIMIDR

SEQ ID NO: 17434 - protein, 10 aa, Artificial Sequence
  Description of Artificial Sequence: Synthetic epitope
ESIKEFTANY

SEQ ID NO: 17435 - protein, 10 aa, Artificial Sequence
  Description of Artificial Sequence: Synthetic epitope
ESIKGVKEVW

SEQ ID NO: 17436 - protein, 10 aa, Artificial Sequence
  Description of Artificial Sequence: Synthetic epitope
ESIKNDEITH

SEQ ID NO: 17437 - protein, 10 aa, Artificial Sequence
  Description of Artificial Sequence: Synthetic epitope
ESIKQKLTKQ

SEQ ID NO: 17438 - protein, 10 aa, Artificial Sequence
  Description of Artificial Sequence: Synthetic epitope
ESIKQTQEEI

SEQ ID NO: 17439 - protein, 10 aa, Artificial Sequence
  Description of Artificial Sequence: Synthetic epitope
ESILDVLSVM

SEQ ID NO: 17440 - protein, 10 aa, Artificial Sequence
  Description of Artificial Sequence: Synthetic epitope
ESILEILDEE

SEQ ID NO: 17441 - protein, 10 aa, Artificial Sequence
  Description of Artificial Sequence: Synthetic epitope
ESILLTVIQP

SEQ ID NO: 17442 - protein, 10 aa, Artificial Sequence
  Description of Artificial Sequence: Synthetic epitope
ESILSKEQRM

SEQ ID NO: 17443 - protein, 10 aa, Artificial Sequence
  Description of Artificial Sequence: Synthetic epitope
ESINSETQSF

SEQ ID NO: 17444 - protein, 10 aa, Artificial Sequence
  Description of Artificial Sequence: Synthetic epitope
ESISEQAEVS

SEQ ID NO: 17445 - protein, 10 aa, Artificial Sequence
  Description of Artificial Sequence: Synthetic epitope
ESITEKSSIA

SEQ ID NO: 17446 - protein, 10 aa, Artificial Sequence
  Description of Artificial Sequence: Synthetic epitope
ESKAFQEKEQ

SEQ ID NO: 17447 - protein, 10 aa, Artificial Sequence
  Description of Artificial Sequence: Synthetic epitope
ESKARDAAEE

SEQ ID NO: 17448 - protein, 10 aa, Artificial Sequence
  Description of Artificial Sequence: Synthetic epitope
ESKASAVGDD

SEQ ID NO: 17449 - protein, 10 aa, Artificial Sequence
  Description of Artificial Sequence: Synthetic epitope
ESKEDKRARK

SEQ ID NO: 17450 - protein, 10 aa, Artificial Sequence
  Description of Artificial Sequence: Synthetic epitope
ESKEIMASEV

SEQ ID NO: 17451 - protein, 10 aa, Artificial Sequence
  Description of Artificial Sequence: Synthetic epitope
ESKEISNVSS

SEQ ID NO: 17452 - protein, 10 aa, Artificial Sequence
  Description of Artificial Sequence: Synthetic epitope
ESKEKLTKTK

SEQ ID NO: 17453 - protein, 10 aa, Artificial Sequence
  Description of Artificial Sequence: Synthetic epitope
ESKENSAKKE

SEQ ID NO: 17454 - protein, 10 aa, Artificial Sequence
  Description of Artificial Sequence: Synthetic epitope
ESKESDTKNE

SEQ ID NO: 17455 - protein, 10 aa, Artificial Sequence
  Description of Artificial Sequence: Synthetic epitope
ESKESSRARE

SEQ ID NO: 17456 - protein, 10 aa, Artificial Sequence
  Description of Artificial Sequence: Synthetic epitope
ESKFKQVEES

SEQ ID NO: 17457 - protein, 10 aa, Artificial Sequence
  Description of Artificial Sequence: Synthetic epitope
ESKISSLMHV

SEQ ID NO: 17458 - protein, 10 aa, Artificial Sequence
  Description of Artificial Sequence: Synthetic epitope
ESKKGELQSL

SEQ ID NO: 17459 - protein, 10 aa, Artificial Sequence
  Description of Artificial Sequence: Synthetic epitope
ESKKSERDSH

SEQ ID NO: 17460 - protein, 10 aa, Artificial Sequence
  Description of Artificial Sequence: Synthetic epitope
ESKLARKHSE

SEQ ID NO: 17461 - protein, 10 aa, Artificial Sequence
  Description of Artificial Sequence: Synthetic epitope
ESKLTSQSRE

SEQ ID NO: 17462 - protein, 10 aa, Artificial Sequence
  Description of Artificial Sequence: Synthetic epitope
ESKMLEQETI

SEQ ID NO: 17463 - protein, 10 aa, Artificial Sequence
  Description of Artificial Sequence: Synthetic epitope
ESKNEKLKED

SEQ ID NO: 17464 - protein, 10 aa, Artificial Sequence
  Description of Artificial Sequence: Synthetic epitope
ESKNKLAYEN

SEQ ID NO: 17465 - protein, 10 aa, Artificial Sequence
  Description of Artificial Sequence: Synthetic epitope
ESKQLKGATQ

SEQ ID NO: 17466 - protein, 10 aa, Artificial Sequence
  Description of Artificial Sequence: Synthetic epitope
ESKQNAELAK

SEQ ID NO: 17467 - protein, 10 aa, Artificial Sequence
  Description of Artificial Sequence: Synthetic epitope
ESKQQALSNM

SEQ ID NO: 17468 - protein, 10 aa, Artificial Sequence
  Description of Artificial Sequence: Synthetic epitope
ESKRNVSESA

SEQ ID NO: 17469 - protein, 10 aa, Artificial Sequence
  Description of Artificial Sequence: Synthetic epitope
ESKSDETGFY

SEQ ID NO: 17470 - protein, 10 aa, Artificial Sequence
  Description of Artificial Sequence: Synthetic epitope
ESKSLQPFLE

SEQ ID NO: 17471 - protein, 10 aa, Artificial Sequence
  Description of Artificial Sequence: Synthetic epitope
ESKSLQSRLA

SEQ ID NO: 17472 - protein, 10 aa, Artificial Sequence
  Description of Artificial Sequence: Synthetic epitope
ESKSNSVNTI

SEQ ID NO: 17473 - protein, 10 aa, Artificial Sequence
  Description of Artificial Sequence: Synthetic epitope
ESKSRHRSRS

SEQ ID NO: 17474 - protein, 10 aa, Artificial Sequence
  Description of Artificial Sequence: Synthetic epitope
ESKSRIDTPP

SEQ ID NO: 17475 - protein, 10 aa, Artificial Sequence
  Description of Artificial Sequence: Synthetic epitope
ESKSSWPAST

SEQ ID NO: 17476 - protein, 10 aa, Artificial Sequence
  Description of Artificial Sequence: Synthetic epitope
ESKTAASGVE

SEQ ID NO: 17477 - protein, 10 aa, Artificial Sequence
  Description of Artificial Sequence: Synthetic epitope
ESKTSSENQK

SEQ ID NO: 17478 - protein, 10 aa, Artificial Sequence
  Description of Artificial Sequence: Synthetic epitope
ESKTVIVTQE

SEQ ID NO: 17479 - protein, 10 aa, Artificial Sequence
  Description of Artificial Sequence: Synthetic epitope
ESKVTQNAQR

SEQ ID NO: 17480 - protein, 10 aa, Artificial Sequence
  Description of Artificial Sequence: Synthetic epitope
ESLAMAPASA

SEQ ID NO: 17481 - protein, 10 aa, Artificial Sequence
  Description of Artificial Sequence: Synthetic epitope
ESLASQLTAD

SEQ ID NO: 17482 - protein, 10 aa, Artificial Sequence
  Description of Artificial Sequence: Synthetic epitope
ESLDDLQAST

SEQ ID NO: 17483 - protein, 10 aa, Artificial Sequence
  Description of Artificial Sequence: Synthetic epitope
ESLDEVTIKD

SEQ ID NO: 17484 - protein, 10 aa, Artificial Sequence
  Description of Artificial Sequence: Synthetic epitope
ESLDSALNVL

SEQ ID NO: 17485 - protein, 10 aa, Artificial Sequence
  Description of Artificial Sequence: Synthetic epitope
ESLEKSQAEL

SEQ ID NO: 17486 - protein, 10 aa, Artificial Sequence
  Description of Artificial Sequence: Synthetic epitope
ESLERRETAT

SEQ ID NO: 17487 - protein, 10 aa, Artificial Sequence
  Description of Artificial Sequence: Synthetic epitope
ESLFSASKNL

SEQ ID NO: 17488 - protein, 10 aa, Artificial Sequence
  Description of Artificial Sequence: Synthetic epitope
ESLKADKTYV

SEQ ID NO: 17489 - protein, 10 aa, Artificial Sequence
  Description of Artificial Sequence: Synthetic epitope
ESLKEAVSTN

SEQ ID NO: 17490 - protein, 10 aa, Artificial Sequence
  Description of Artificial Sequence: Synthetic epitope
ESLKMVKKLF

SEQ ID NO: 17491 - protein, 10 aa, Artificial Sequence
  Description of Artificial Sequence: Synthetic epitope
ESLKSLSSEL

SEQ ID NO: 17492 - protein, 10 aa, Artificial Sequence
  Description of Artificial Sequence: Synthetic epitope
ESLKSQLQAQ

SEQ ID NO: 17493 - protein, 10 aa, Artificial Sequence
  Description of Artificial Sequence: Synthetic epitope
ESLKSSKIAE

SEQ ID NO: 17494 - protein, 10 aa, Artificial Sequence
  Description of Artificial Sequence: Synthetic epitope
ESLLGSTSIK

SEQ ID NO: 17495 - protein, 10 aa, Artificial Sequence
  Description of Artificial Sequence: Synthetic epitope
ESLLSAERGG

SEQ ID NO: 17496 - protein, 10 aa, Artificial Sequence
  Description of Artificial Sequence: Synthetic epitope
ESLMQSLKMN

SEQ ID NO: 17497 - protein, 10 aa, Artificial Sequence
  Description of Artificial Sequence: Synthetic epitope
ESLNAESKSG

SEQ ID NO: 17498 - protein, 10 aa, Artificial Sequence
  Description of Artificial Sequence: Synthetic epitope
ESLPRVVKRR

SEQ ID NO: 17499 - protein, 10 aa, Artificial Sequence
  Description of Artificial Sequence: Synthetic epitope
ESLQAMGSSA

SEQ ID NO: 17500 - protein, 10 aa, Artificial Sequence
  Description of Artificial Sequence: Synthetic epitope
ESLQEKLASP

SEQ ID NO: 17501 - protein, 10 aa, Artificial Sequence
  Description of Artificial Sequence: Synthetic epitope
ESLQMDSVSS

SEQ ID NO: 17502 - protein, 10 aa, Artificial Sequence
  Description of Artificial Sequence: Synthetic epitope
ESLQVKQARV

SEQ ID NO: 17503 - protein, 10 aa, Artificial Sequence
  Description of Artificial Sequence: Synthetic epitope
ESLRNSARRK

SEQ ID NO: 17504 - protein, 10 aa, Artificial Sequence
  Description of Artificial Sequence: Synthetic epitope
ESLSQSLRDQ

SEQ ID NO: 17505 - protein, 10 aa, Artificial Sequence
  Description of Artificial Sequence: Synthetic epitope
ESLSVLEPQV

SEQ ID NO: 17506 - protein, 10 aa, Artificial Sequence
  Description of Artificial Sequence: Synthetic epitope
ESLTASVQSD

SEQ ID NO: 17507 - protein, 10 aa, Artificial Sequence
  Description of Artificial Sequence: Synthetic epitope
ESLTETQVSD

SEQ ID NO: 17508 - protein, 10 aa, Artificial Sequence
  Description of Artificial Sequence: Synthetic epitope
ESLTEVHRRE

SEQ ID NO: 17509 - protein, 10 aa, Artificial Sequence
  Description of Artificial Sequence: Synthetic epitope
ESLTQSLTSP

SEQ ID NO: 17510 - protein, 10 aa, Artificial Sequence
  Description of Artificial Sequence: Synthetic epitope
ESLTTELSAE

SEQ ID NO: 17511 - protein, 10 aa, Artificial Sequence
  Description of Artificial Sequence: Synthetic epitope
ESLVASRPSP

SEQ ID NO: 17512 - protein, 10 aa, Artificial Sequence
  Description of Artificial Sequence: Synthetic epitope
ESLVDQSAAL

SEQ ID NO: 17513 - protein, 10 aa, Artificial Sequence
  Description of Artificial Sequence: Synthetic epitope
ESLVSFAMQH

SEQ ID NO: 17514 - protein, 10 aa, Artificial Sequence
  Description of Artificial Sequence: Synthetic epitope
ESMAQVYRGS

SEQ ID NO: 17515 - protein, 10 aa, Artificial Sequence
  Description of Artificial Sequence: Synthetic epitope
ESMIPIKMVN

SEQ ID NO: 17516 - protein, 10 aa, Artificial Sequence
  Description of Artificial Sequence: Synthetic epitope
ESMKEMAQAQ

SEQ ID NO: 17517 - protein, 10 aa, Artificial Sequence
  Description of Artificial Sequence: Synthetic epitope
ESMMSEVHER

SEQ ID NO: 17518 - protein, 10 aa, Artificial Sequence
  Description of Artificial Sequence: Synthetic epitope
ESMQAVILGL

SEQ ID NO: 17519 - protein, 10 aa, Artificial Sequence
  Description of Artificial Sequence: Synthetic epitope
ESMSAKERSF

SEQ ID NO: 17520 - protein, 10 aa, Artificial Sequence
  Description of Artificial Sequence: Synthetic epitope
ESNHNPSDSE

SEQ ID NO: 17521 - protein, 10 aa, Artificial Sequence
  Description of Artificial Sequence: Synthetic epitope
ESNIGAISKS

SEQ ID NO: 17522 - protein, 10 aa, Artificial Sequence
  Description of Artificial Sequence: Synthetic epitope
ESNKSVLQFQ

SEQ ID NO: 17523 - protein, 10 aa, Artificial Sequence
  Description of Artificial Sequence: Synthetic epitope
ESNQKSSFQE

SEQ ID NO: 17524 - protein, 10 aa, Artificial Sequence
  Description of Artificial Sequence: Synthetic epitope
ESNSAMVKSK

SEQ ID NO: 17525 - protein, 10 aa, Artificial Sequence
  Description of Artificial Sequence: Synthetic epitope
ESNSVNQVED

SEQ ID NO: 17526 - protein, 10 aa, Artificial Sequence
  Description of Artificial Sequence: Synthetic epitope
ESPETVSQLD

SEQ ID NO: 17527 - protein, 10 aa, Artificial Sequence
  Description of Artificial Sequence: Synthetic epitope
ESPKLESSEG

SEQ ID NO: 17528 - protein, 10 aa, Artificial Sequence
  Description of Artificial Sequence: Synthetic epitope
ESPKSTKSAD

SEQ ID NO: 17529 - protein, 10 aa, Artificial Sequence
  Description of Artificial Sequence: Synthetic epitope
ESPLSATVED

SEQ ID NO: 17530 - protein, 10 aa, Artificial Sequence
  Description of Artificial Sequence: Synthetic epitope
ESPMEKGLSG

SEQ ID NO: 17531 - protein, 10 aa, Artificial Sequence
  Description of Artificial Sequence: Synthetic epitope
ESPVITKAKE

SEQ ID NO: 17532 - protein, 10 aa, Artificial Sequence
  Description of Artificial Sequence: Synthetic epitope
ESQALVSATP

SEQ ID NO: 17533 - protein, 10 aa, Artificial Sequence
  Description of Artificial Sequence: Synthetic epitope
ESQAQAILQQ

SEQ ID NO: 17534 - protein, 10 aa, Artificial Sequence
  Description of Artificial Sequence: Synthetic epitope
ESQERAMSTS

SEQ ID NO: 17535 - protein, 10 aa, Artificial Sequence
  Description of Artificial Sequence: Synthetic epitope
ESQGQDESVD

SEQ ID NO: 17536 - protein, 10 aa, Artificial Sequence
  Description of Artificial Sequence: Synthetic epitope
ESQGQSILED

SEQ ID NO: 17537 - protein, 10 aa, Artificial Sequence
  Description of Artificial Sequence: Synthetic epitope
ESQIMSVAFK

SEQ ID NO: 17538 - protein, 10 aa, Artificial Sequence
  Description of Artificial Sequence: Synthetic epitope
ESQKLTTSES

SEQ ID NO: 17539 - protein, 10 aa, Artificial Sequence
  Description of Artificial Sequence: Synthetic epitope
ESQLTALQAA

SEQ ID NO: 17540 - protein, 10 aa, Artificial Sequence
  Description of Artificial Sequence: Synthetic epitope
ESQNELQNQL

SEQ ID NO: 17541 - protein, 10 aa, Artificial Sequence
  Description of Artificial Sequence: Synthetic epitope
ESQQSNFGTG

SEQ ID NO: 17542 - protein, 10 aa, Artificial Sequence
  Description of Artificial Sequence: Synthetic epitope
ESQSKNALKE

SEQ ID NO: 17543 - protein, 10 aa, Artificial Sequence
  Description of Artificial Sequence: Synthetic epitope
ESQSRAKERL

SEQ ID NO: 17544 - protein, 10 aa, Artificial Sequence
  Description of Artificial Sequence: Synthetic epitope
ESQVSVTSAD

SEQ ID NO: 17545 - protein, 10 aa, Artificial Sequence
  Description of Artificial Sequence: Synthetic epitope
ESRAEAARIE

SEQ ID NO: 17546 - protein, 10 aa, Artificial Sequence
  Description of Artificial Sequence: Synthetic epitope
ESRGEKTTVT

SEQ ID NO: 17547 - protein, 10 aa, Artificial Sequence
  Description of Artificial Sequence: Synthetic epitope
ESRHSLSIPP

SEQ ID NO: 17548 - protein, 10 aa, Artificial Sequence
  Description of Artificial Sequence: Synthetic epitope
ESRKERNERE

SEQ ID NO: 17549 - protein, 10 aa, Artificial Sequence
  Description of Artificial Sequence: Synthetic epitope
ESRKKTERLA

SEQ ID NO: 17550 - protein, 10 aa, Artificial Sequence
  Description of Artificial Sequence: Synthetic epitope
ESRKSKSPPK

SEQ ID NO: 17551 - protein, 10 aa, Artificial Sequence
  Description of Artificial Sequence: Synthetic epitope
ESRMNLENVE

SEQ ID NO: 17552 - protein, 10 aa, Artificial Sequence
  Description of Artificial Sequence: Synthetic epitope
ESRRVAGRTY

SEQ ID NO: 17553 - protein, 10 aa, Artificial Sequence
  Description of Artificial Sequence: Synthetic epitope
ESRSTQYMKE

SEQ ID NO: 17554 - protein, 10 aa, Artificial Sequence
  Description of Artificial Sequence: Synthetic epitope
ESRSVGRISK

SEQ ID NO: 17555 - protein, 10 aa, Artificial Sequence
  Description of Artificial Sequence: Synthetic epitope
ESSAATKKLS

SEQ ID NO: 17556 - protein, 10 aa, Artificial Sequence
  Description of Artificial Sequence: Synthetic epitope
ESSAGEEASN

SEQ ID NO: 17557 - protein, 10 aa, Artificial Sequence
  Description of Artificial Sequence: Synthetic epitope
ESSASSAKED

SEQ ID NO: 17558 - protein, 10 aa, Artificial Sequence
  Description of Artificial Sequence: Synthetic epitope
ESSEGEAAQQ

SEQ ID NO: 17559 - protein, 10 aa, Artificial Sequence
  Description of Artificial Sequence: Synthetic epitope
ESSEPDLESQ

SEQ ID NO: 17560 - protein, 10 aa, Artificial Sequence
  Description of Artificial Sequence: Synthetic epitope
ESSESEVSPT

SEQ ID NO: 17561 - protein, 10 aa, Artificial Sequence
  Description of Artificial Sequence: Synthetic epitope
ESSETKKSVE

SEQ ID NO: 17562 - protein, 10 aa, Artificial Sequence
  Description of Artificial Sequence: Synthetic epitope
ESSFEAVKDP

SEQ ID NO: 17563 - protein, 10 aa, Artificial Sequence
  Description of Artificial Sequence: Synthetic epitope
ESSHKKSRLS

SEQ ID NO: 17564 - protein, 10 aa, Artificial Sequence
  Description of Artificial Sequence: Synthetic epitope
ESSISDINKK

SEQ ID NO: 17565 - protein, 10 aa, Artificial Sequence
  Description of Artificial Sequence: Synthetic epitope
ESSKAKEVTI

SEQ ID NO: 17566 - protein, 10 aa, Artificial Sequence
  Description of Artificial Sequence: Synthetic epitope
ESSLDKVVLS

SEQ ID NO: 17567 - protein, 10 aa, Artificial Sequence
  Description of Artificial Sequence: Synthetic epitope
ESSLEFTQSH

SEQ ID NO: 17568 - protein, 10 aa, Artificial Sequence
  Description of Artificial Sequence: Synthetic epitope
ESSLKEAKIS

SEQ ID NO: 17569 - protein, 10 aa, Artificial Sequence
  Description of Artificial Sequence: Synthetic epitope
ESSLKQSKTS

SEQ ID NO: 17570 - protein, 10 aa, Artificial Sequence
  Description of Artificial Sequence: Synthetic epitope
ESSLQEDEPE

SEQ ID NO: 17571 - protein, 10 aa, Artificial Sequence
  Description of Artificial Sequence: Synthetic epitope
ESSLSNLSLR

SEQ ID NO: 17572 - protein, 10 aa, Artificial Sequence
  Description of Artificial Sequence: Synthetic epitope
ESSMAGRLGE

SEQ ID NO: 17573 - protein, 10 aa, Artificial Sequence
  Description of Artificial Sequence: Synthetic epitope
ESSMFNLLEM

SEQ ID NO: 17574 - protein, 10 aa, Artificial Sequence
  Description of Artificial Sequence: Synthetic epitope
ESSNSTSGGL

SEQ ID NO: 17575 - protein, 10 aa, Artificial Sequence
  Description of Artificial Sequence: Synthetic epitope
ESSNTDSAGA

SEQ ID NO: 17576 - protein, 10 aa, Artificial Sequence
  Description of Artificial Sequence: Synthetic epitope
ESSPRERSAR

SEQ ID NO: 17577 - protein, 10 aa, Artificial Sequence
  Description of Artificial Sequence: Synthetic epitope
ESSPRKGSKK

SEQ ID NO: 17578 - protein, 10 aa, Artificial Sequence
  Description of Artificial Sequence: Synthetic epitope
ESSPYLSLQI

SEQ ID NO: 17579 - protein, 10 aa, Artificial Sequence
  Description of Artificial Sequence: Synthetic epitope
ESSQANLGEQ

SEQ ID NO: 17580 - protein, 10 aa, Artificial Sequence
  Description of Artificial Sequence: Synthetic epitope
ESSQLDKQES

SEQ ID NO: 17581 - protein, 10 aa, Artificial Sequence
  Description of Artificial Sequence: Synthetic epitope
ESSRKNAKEA

SEQ ID NO: 17582 - protein, 10 aa, Artificial Sequence
  Description of Artificial Sequence: Synthetic epitope
ESSRSIREVQ

SEQ ID NO: 17583 - protein, 10 aa, Artificial Sequence
  Description of Artificial Sequence: Synthetic epitope
ESSTESVAEI

SEQ ID NO: 17584 - protein, 10 aa, Artificial Sequence
  Description of Artificial Sequence: Synthetic epitope
ESSTFLGTTS

SEQ ID NO: 17585 - protein, 10 aa, Artificial Sequence
  Description of Artificial Sequence: Synthetic epitope
ESSTIGQDQT

SEQ ID NO: 17586 - protein, 10 aa, Artificial Sequence
  Description of Artificial Sequence: Synthetic epitope
ESSTQRLSDG

SEQ ID NO: 17587 - protein, 10 aa, Artificial Sequence
  Description of Artificial Sequence: Synthetic epitope
ESSTWKGNKE

SEQ ID NO: 17588 - protein, 10 aa, Artificial Sequence
  Description of Artificial Sequence: Synthetic epitope
ESSVDNAASQ

SEQ ID NO: 17589 - protein, 10 aa, Artificial Sequence
  Description of Artificial Sequence: Synthetic epitope
ESSVKVDNES

SEQ ID NO: 17590 - protein, 10 aa, Artificial Sequence
  Description of Artificial Sequence: Synthetic epitope
ESSYLPSIKE

SEQ ID NO: 17591 - protein, 10 aa, Artificial Sequence
  Description of Artificial Sequence: Synthetic epitope
ESTANAGQSD

SEQ ID NO: 17592 - protein, 10 aa, Artificial Sequence
  Description of Artificial Sequence: Synthetic epitope
ESTASQAQSS

SEQ ID NO: 17593 - protein, 10 aa, Artificial Sequence
  Description of Artificial Sequence: Synthetic epitope
ESTDLQTTLQ

SEQ ID NO: 17594 - protein, 10 aa, Artificial Sequence
  Description of Artificial Sequence: Synthetic epitope
ESTEAEDAEA

SEQ ID NO: 17595 - protein, 10 aa, Artificial Sequence
  Description of Artificial Sequence: Synthetic epitope
ESTEDQNNET

SEQ ID NO: 17596 - protein, 10 aa, Artificial Sequence
  Description of Artificial Sequence: Synthetic epitope
ESTEETWQSE

SEQ ID NO: 17597 - protein, 10 aa, Artificial Sequence
  Description of Artificial Sequence: Synthetic epitope
ESTEISELSH

SEQ ID NO: 17598 - protein, 10 aa, Artificial Sequence
  Description of Artificial Sequence: Synthetic epitope
ESTHDAQRKE

SEQ ID NO: 17599 - protein, 10 aa, Artificial Sequence
  Description of Artificial Sequence: Synthetic epitope
ESTLSALEEL

SEQ ID NO: 17600 - protein, 10 aa, Artificial Sequence
  Description of Artificial Sequence: Synthetic epitope
ESTQEHSERA

SEQ ID NO: 17601 - protein, 10 aa, Artificial Sequence
  Description of Artificial Sequence: Synthetic epitope
ESTSAVTNIP

SEQ ID NO: 17602 - protein, 10 aa, Artificial Sequence
  Description of Artificial Sequence: Synthetic epitope
ESTSLGDSDE

SEQ ID NO: 17603 - protein, 10 aa, Artificial Sequence
  Description of Artificial Sequence: Synthetic epitope
ESTVGQGSDT

SEQ ID NO: 17604 - protein, 10 aa, Artificial Sequence
  Description of Artificial Sequence: Synthetic epitope
ESTWTKTNSQ

SEQ ID NO: 17605 - protein, 10 aa, Artificial Sequence
  Description of Artificial Sequence: Synthetic epitope
ESVGKQATGE

SEQ ID NO: 17606 - protein, 10 aa, Artificial Sequence
  Description of Artificial Sequence: Synthetic epitope
ESVIESALDD

SEQ ID NO: 17607 - protein, 10 aa, Artificial Sequence
  Description of Artificial Sequence: Synthetic epitope
ESVKESESLM

SEQ ID NO: 17608 - protein, 10 aa, Artificial Sequence
  Description of Artificial Sequence: Synthetic epitope
ESVLSRKLNP

SEQ ID NO: 17609 - protein, 10 aa, Artificial Sequence
  Description of Artificial Sequence: Synthetic epitope
ESVQMSIFTP

SEQ ID NO: 17610 - protein, 10 aa, Artificial Sequence
  Description of Artificial Sequence: Synthetic epitope
ESVQRNVSKL

SEQ ID NO: 17611 - protein, 10 aa, Artificial Sequence
  Description of Artificial Sequence: Synthetic epitope
ESVQSKVKGP

SEQ ID NO: 17612 - protein, 10 aa, Artificial Sequence
  Description of Artificial Sequence: Synthetic epitope
ESVSQLNSLD

SEQ ID NO: 17613 - protein, 10 aa, Artificial Sequence
  Description of Artificial Sequence: Synthetic epitope
ESVTEVEIFG

SEQ ID NO: 17614 - protein, 10 aa, Artificial Sequence
  Description of Artificial Sequence: Synthetic epitope
ESVVSKEMDK

SEQ ID NO: 17615 - protein, 10 aa, Artificial Sequence
  Description of Artificial Sequence: Synthetic epitope
ESWRVESNEF

SEQ ID NO: 17616 - protein, 10 aa, Artificial Sequence
  Description of Artificial Sequence: Synthetic epitope
ESYEKTTRTS

SEQ ID NO: 17617 - protein, 10 aa, Artificial Sequence
  Description of Artificial Sequence: Synthetic epitope
ESYKLQISLD

SEQ ID NO: 17618 - protein, 10 aa, Artificial Sequence
  Description of Artificial Sequence: Synthetic epitope
ESYTRITNIQ

SEQ ID NO: 17619 - protein, 10 aa, Artificial Sequence
  Description of Artificial Sequence: Synthetic epitope
ETAALKAIGD

SEQ ID NO: 17620 - protein, 10 aa, Artificial Sequence
  Description of Artificial Sequence: Synthetic epitope
ETAAPVEDMA

SEQ ID NO: 17621 - protein, 10 aa, Artificial Sequence
  Description of Artificial Sequence: Synthetic epitope
ETAASKAREE

SEQ ID NO: 17622 - protein, 10 aa, Artificial Sequence
  Description of Artificial Sequence: Synthetic epitope
ETADAKNKIQ

SEQ ID NO: 17623 - protein, 10 aa, Artificial Sequence
  Description of Artificial Sequence: Synthetic epitope
ETADSTTAAV

SEQ ID NO: 17624 - protein, 10 aa, Artificial Sequence
  Description of Artificial Sequence: Synthetic epitope
ETAKKAQNLV

SEQ ID NO: 17625 - protein, 10 aa, Artificial Sequence
  Description of Artificial Sequence: Synthetic epitope
ETAKSYESGI

SEQ ID NO: 17626 - protein, 10 aa, Artificial Sequence
  Description of Artificial Sequence: Synthetic epitope
ETALAEVNLK

SEQ ID NO: 17627 - protein, 10 aa, Artificial Sequence
  Description of Artificial Sequence: Synthetic epitope
ETALHNRIMP

SEQ ID NO: 17628 - protein, 10 aa, Artificial Sequence
  Description of Artificial Sequence: Synthetic epitope
ETALSELVAN

SEQ ID NO: 17629 - protein, 10 aa, Artificial Sequence
  Description of Artificial Sequence: Synthetic epitope
ETAMKAVSGI

SEQ ID NO: 17630 - protein, 10 aa, Artificial Sequence
  Description of Artificial Sequence: Synthetic epitope
ETAPMEFRPL

SEQ ID NO: 17631 - protein, 10 aa, Artificial Sequence
  Description of Artificial Sequence: Synthetic epitope
ETAQKMKQEI

SEQ ID NO: 17632 - protein, 10 aa, Artificial Sequence
  Description of Artificial Sequence: Synthetic epitope
ETAREAVVSV

SEQ ID NO: 17633 - protein, 10 aa, Artificial Sequence
  Description of Artificial Sequence: Synthetic epitope
ETARGVTNMA

SEQ ID NO: 17634 - protein, 10 aa, Artificial Sequence
  Description of Artificial Sequence: Synthetic epitope
ETARTGKRAD

SEQ ID NO: 17635 - protein, 10 aa, Artificial Sequence
  Description of Artificial Sequence: Synthetic epitope
ETASALLAKD

SEQ ID NO: 17636 - protein, 10 aa, Artificial Sequence
  Description of Artificial Sequence: Synthetic epitope
ETASQASDEE

SEQ ID NO: 17637 - protein, 10 aa, Artificial Sequence
  Description of Artificial Sequence: Synthetic epitope
ETASSQRDTV

SEQ ID NO: 17638 - protein, 10 aa, Artificial Sequence
  Description of Artificial Sequence: Synthetic epitope
ETASVLAENA

SEQ ID NO: 17639 - protein, 10 aa, Artificial Sequence
  Description of Artificial Sequence: Synthetic epitope
ETATKQNYKI

SEQ ID NO: 17640 - protein, 10 aa, Artificial Sequence
  Description of Artificial Sequence: Synthetic epitope
ETATPMLKKH

SEQ ID NO: 17641 - protein, 10 aa, Artificial Sequence
  Description of Artificial Sequence: Synthetic epitope
ETATSIGNAK

SEQ ID NO: 17642 - protein, 10 aa, Artificial Sequence
  Description of Artificial Sequence: Synthetic epitope
ETAVKFATQL

SEQ ID NO: 17643 - protein, 10 aa, Artificial Sequence
  Description of Artificial Sequence: Synthetic epitope
ETAVRASISK

SEQ ID NO: 17644 - protein, 10 aa, Artificial Sequence
  Description of Artificial Sequence: Synthetic epitope
ETAYKLILGE

SEQ ID NO: 17645 - protein, 10 aa, Artificial Sequence
  Description of Artificial Sequence: Synthetic epitope
ETDEATLDTR

SEQ ID NO: 17646 - protein, 10 aa, Artificial Sequence
  Description of Artificial Sequence: Synthetic epitope
ETDIAKKNQS

SEQ ID NO: 17647 - protein, 10 aa, Artificial Sequence
  Description of Artificial Sequence: Synthetic epitope
ETDSEMNSQE

SEQ ID NO: 17648 - protein, 10 aa, Artificial Sequence
  Description of Artificial Sequence: Synthetic epitope
ETDSQYTSAV

SEQ ID NO: 17649 - protein, 10 aa, Artificial Sequence
  Description of Artificial Sequence: Synthetic epitope
ETDSSEQDEQ

SEQ ID NO: 17650 - protein, 10 aa, Artificial Sequence
  Description of Artificial Sequence: Synthetic epitope
ETDSTELASI

SEQ ID NO: 17651 - protein, 10 aa, Artificial Sequence
  Description of Artificial Sequence: Synthetic epitope
ETDYEMETQR

SEQ ID NO: 17652 - protein, 10 aa, Artificial Sequence
  Description of Artificial Sequence: Synthetic epitope
ETEAAQMEHQ

SEQ ID NO: 17653 - protein, 10 aa, Artificial Sequence
  Description of Artificial Sequence: Synthetic epitope
ETEDSESSFV

SEQ ID NO: 17654 - protein, 10 aa, Artificial Sequence
  Description of Artificial Sequence: Synthetic epitope
ETEKGASRID

SEQ ID NO: 17655 - protein, 10 aa, Artificial Sequence
  Description of Artificial Sequence: Synthetic epitope
ETEKLQMEQQ

SEQ ID NO: 17656 - protein, 10 aa, Artificial Sequence
  Description of Artificial Sequence: Synthetic epitope
ETEKSDSVTD

SEQ ID NO: 17657 - protein, 10 aa, Artificial Sequence
  Description of Artificial Sequence: Synthetic epitope
ETELALVKES

SEQ ID NO: 17658 - protein, 10 aa, Artificial Sequence
  Description of Artificial Sequence: Synthetic epitope
ETEMSKTALQ

SEQ ID NO: 17659 - protein, 10 aa, Artificial Sequence
  Description of Artificial Sequence: Synthetic epitope
ETENDSKDAE

SEQ ID NO: 17660 - protein, 10 aa, Artificial Sequence
  Description of Artificial Sequence: Synthetic epitope
ETEPSSRTSP

SEQ ID NO: 17661 - protein, 10 aa, Artificial Sequence
  Description of Artificial Sequence: Synthetic epitope
ETEQESILGV

SEQ ID NO: 17662 - protein, 10 aa, Artificial Sequence
  Description of Artificial Sequence: Synthetic epitope
ETEQSSESLR

SEQ ID NO: 17663 - protein, 10 aa, Artificial Sequence
  Description of Artificial Sequence: Synthetic epitope
ETESQSSYME

SEQ ID NO: 17664 - protein, 10 aa, Artificial Sequence
  Description of Artificial Sequence: Synthetic epitope
ETESRGSESG

SEQ ID NO: 17665 - protein, 10 aa, Artificial Sequence
  Description of Artificial Sequence: Synthetic epitope
ETETKKDSEE

SEQ ID NO: 17666 - protein, 10 aa, Artificial Sequence
  Description of Artificial Sequence: Synthetic epitope
ETETSFKNEN

SEQ ID NO: 17667 - protein, 10 aa, Artificial Sequence
  Description of Artificial Sequence: Synthetic epitope
ETETSGMKEV

SEQ ID NO: 17668 - protein, 10 aa, Artificial Sequence
  Description of Artificial Sequence: Synthetic epitope
ETEVSDAKNK

SEQ ID NO: 17669 - protein, 10 aa, Artificial Sequence
  Description of Artificial Sequence: Synthetic epitope
ETEVVEETVA

SEQ ID NO: 17670 - protein, 10 aa, Artificial Sequence
  Description of Artificial Sequence: Synthetic epitope
ETFEVKVDSP

SEQ ID NO: 17671 - protein, 10 aa, Artificial Sequence
  Description of Artificial Sequence: Synthetic epitope
ETFPAVAEKV

SEQ ID NO: 17672 - protein, 10 aa, Artificial Sequence
  Description of Artificial Sequence: Synthetic epitope
ETFQASSRSV

SEQ ID NO: 17673 - protein, 10 aa, Artificial Sequence
  Description of Artificial Sequence: Synthetic epitope
ETGKIFVSTE

SEQ ID NO: 17674 - protein, 10 aa, Artificial Sequence
  Description of Artificial Sequence: Synthetic epitope
ETGKQLALLK

SEQ ID NO: 17675 - protein, 10 aa, Artificial Sequence
  Description of Artificial Sequence: Synthetic epitope
ETGNLTVSSA

SEQ ID NO: 17676 - protein, 10 aa, Artificial Sequence
  Description of Artificial Sequence: Synthetic epitope
ETGRALQTFG

SEQ ID NO: 17677 - protein, 10 aa, Artificial Sequence
  Description of Artificial Sequence: Synthetic epitope
ETGRSAVDES

SEQ ID NO: 17678 - protein, 10 aa, Artificial Sequence
  Description of Artificial Sequence: Synthetic epitope
ETGTEKNTSS

SEQ ID NO: 17679 - protein, 10 aa, Artificial Sequence
  Description of Artificial Sequence: Synthetic epitope
ETGTLVDMKE

SEQ ID NO: 17680 - protein, 10 aa, Artificial Sequence
  Description of Artificial Sequence: Synthetic epitope
ETGVAKMLAE

SEQ ID NO: 17681 - protein, 10 aa, Artificial Sequence
  Description of Artificial Sequence: Synthetic epitope
ETHERETELF

SEQ ID NO: 17682 - protein, 10 aa, Artificial Sequence
  Description of Artificial Sequence: Synthetic epitope
ETHTSKQLRH

SEQ ID NO: 17683 - protein, 10 aa, Artificial Sequence
  Description of Artificial Sequence: Synthetic epitope
ETIDRKPIID

SEQ ID NO: 17684 - protein, 10 aa, Artificial Sequence
  Description of Artificial Sequence: Synthetic epitope
ETIKPLSILK

SEQ ID NO: 17685 - protein, 10 aa, Artificial Sequence
  Description of Artificial Sequence: Synthetic epitope
ETILETQKVE

SEQ ID NO: 17686 - protein, 10 aa, Artificial Sequence
  Description of Artificial Sequence: Synthetic epitope
ETIPESEPSG

SEQ ID NO: 17687 - protein, 10 aa, Artificial Sequence
  Description of Artificial Sequence: Synthetic epitope
ETIRKYETQQ

SEQ ID NO: 17688 - protein, 10 aa, Artificial Sequence
  Description of Artificial Sequence: Synthetic epitope
ETISKELELL

SEQ ID NO: 17689 - protein, 10 aa, Artificial Sequence
  Description of Artificial Sequence: Synthetic epitope
ETITAIILKD

SEQ ID NO: 17690 - protein, 10 aa, Artificial Sequence
  Description of Artificial Sequence: Synthetic epitope
ETITMHKILE

SEQ ID NO: 17691 - protein, 10 aa, Artificial Sequence
  Description of Artificial Sequence: Synthetic epitope
ETKAFEMAGP

SEQ ID NO: 17692 - protein, 10 aa, Artificial Sequence
  Description of Artificial Sequence: Synthetic epitope
ETKAHVIGTP

SEQ ID NO: 17693 - protein, 10 aa, Artificial Sequence
  Description of Artificial Sequence: Synthetic epitope
ETKKDVNDTG

SEQ ID NO: 17694 - protein, 10 aa, Artificial Sequence
  Description of Artificial Sequence: Synthetic epitope
ETKPKTKNID

SEQ ID NO: 17695 - protein, 10 aa, Artificial Sequence
  Description of Artificial Sequence: Synthetic epitope
ETKPVVSISR

SEQ ID NO: 17696 - protein, 10 aa, Artificial Sequence
  Description of Artificial Sequence: Synthetic epitope
ETKQEAEQAI

SEQ ID NO: 17697 - protein, 10 aa, Artificial Sequence
  Description of Artificial Sequence: Synthetic epitope
ETKSSKLVQN

SEQ ID NO: 17698 - protein, 10 aa, Artificial Sequence
  Description of Artificial Sequence: Synthetic epitope
ETKSYRVSED

SEQ ID NO: 17699 - protein, 10 aa, Artificial Sequence
  Description of Artificial Sequence: Synthetic epitope
ETKTTPSQAQ

SEQ ID NO: 17700 - protein, 10 aa, Artificial Sequence
  Description of Artificial Sequence: Synthetic epitope
ETKVMALNGK

SEQ ID NO: 17701 - protein, 10 aa, Artificial Sequence
  Description of Artificial Sequence: Synthetic epitope
ETLAKTQVAG

SEQ ID NO: 17702 - protein, 10 aa, Artificial Sequence
  Description of Artificial Sequence: Synthetic epitope
ETLALAGQDR

SEQ ID NO: 17703 - protein, 10 aa, Artificial Sequence
  Description of Artificial Sequence: Synthetic epitope
ETLDSIALQK

SEQ ID NO: 17704 - protein, 10 aa, Artificial Sequence
  Description of Artificial Sequence: Synthetic epitope
ETLIAKRALM

SEQ ID NO: 17705 - protein, 10 aa, Artificial Sequence
  Description of Artificial Sequence: Synthetic epitope
ETLKAENQPI

SEQ ID NO: 17706 - protein, 10 aa, Artificial Sequence
  Description of Artificial Sequence: Synthetic epitope
ETLKSENEQT

SEQ ID NO: 17707 - protein, 10 aa, Artificial Sequence
  Description of Artificial Sequence: Synthetic epitope
ETLLDLVDRS

SEQ ID NO: 17708 - protein, 10 aa, Artificial Sequence
  Description of Artificial Sequence: Synthetic epitope
ETLLFVSTLD

SEQ ID NO: 17709 - protein, 10 aa, Artificial Sequence
  Description of Artificial Sequence: Synthetic epitope
ETLLNQAIKL

SEQ ID NO: 17710 - protein, 10 aa, Artificial Sequence
  Description of Artificial Sequence: Synthetic epitope
ETLLQSIDLP

SEQ ID NO: 17711 - protein, 10 aa, Artificial Sequence
  Description of Artificial Sequence: Synthetic epitope
ETLLTLKNLT

SEQ ID NO: 17712 - protein, 10 aa, Artificial Sequence
  Description of Artificial Sequence: Synthetic epitope
ETLNTAATKV

SEQ ID NO: 17713 - protein, 10 aa, Artificial Sequence
  Description of Artificial Sequence: Synthetic epitope
ETLREAKKSS

SEQ ID NO: 17714 - protein, 10 aa, Artificial Sequence
  Description of Artificial Sequence: Synthetic epitope
ETLRKEIEET

SEQ ID NO: 17715 - protein, 10 aa, Artificial Sequence
  Description of Artificial Sequence: Synthetic epitope
ETLSSEQKQQ

SEQ ID NO: 17716 - protein, 10 aa, Artificial Sequence
  Description of Artificial Sequence: Synthetic epitope
ETLSTGLALE

SEQ ID NO: 17717 - protein, 10 aa, Artificial Sequence
  Description of Artificial Sequence: Synthetic epitope
ETLTQQLQAK

SEQ ID NO: 17718 - protein, 10 aa, Artificial Sequence
  Description of Artificial Sequence: Synthetic epitope
ETLTTQKGVE

SEQ ID NO: 17719 - protein, 10 aa, Artificial Sequence
  Description of Artificial Sequence: Synthetic epitope
ETMADASTEL

SEQ ID NO: 17720 - protein, 10 aa, Artificial Sequence
  Description of Artificial Sequence: Synthetic epitope
ETMEAVLSVL

SEQ ID NO: 17721 - protein, 10 aa, Artificial Sequence
  Description of Artificial Sequence: Synthetic epitope
ETMLSQETLP

SEQ ID NO: 17722 - protein, 10 aa, Artificial Sequence
  Description of Artificial Sequence: Synthetic epitope
ETMMRVGKRG

SEQ ID NO: 17723 - protein, 10 aa, Artificial Sequence
  Description of Artificial Sequence: Synthetic epitope
ETMTNSSITQ

SEQ ID NO: 17724 - protein, 10 aa, Artificial Sequence
  Description of Artificial Sequence: Synthetic epitope
ETNAARLAHY

SEQ ID NO: 17725 - protein, 10 aa, Artificial Sequence
  Description of Artificial Sequence: Synthetic epitope
ETNAQAALLA

SEQ ID NO: 17726 - protein, 10 aa, Artificial Sequence
  Description of Artificial Sequence: Synthetic epitope
ETNFTASART

SEQ ID NO: 17727 - protein, 10 aa, Artificial Sequence
  Description of Artificial Sequence: Synthetic epitope
ETNHTELMEH

SEQ ID NO: 17728 - protein, 10 aa, Artificial Sequence
  Description of Artificial Sequence: Synthetic epitope
ETNKQISKLT

SEQ ID NO: 17729 - protein, 10 aa, Artificial Sequence
  Description of Artificial Sequence: Synthetic epitope
ETNLLPQSLQ

SEQ ID NO: 17730 - protein, 10 aa, Artificial Sequence
  Description of Artificial Sequence: Synthetic epitope
ETNLRAVPSV

SEQ ID NO: 17731 - protein, 10 aa, Artificial Sequence
  Description of Artificial Sequence: Synthetic epitope
ETNMPTMHDL

SEQ ID NO: 17732 - protein, 10 aa, Artificial Sequence
  Description of Artificial Sequence: Synthetic epitope
ETNMTSLQKD

SEQ ID NO: 17733 - protein, 10 aa, Artificial Sequence
  Description of Artificial Sequence: Synthetic epitope
ETNSTSNSSH

SEQ ID NO: 17734 - protein, 10 aa, Artificial Sequence
  Description of Artificial Sequence: Synthetic epitope
ETPDAEAATA

SEQ ID NO: 17735 - protein, 10 aa, Artificial Sequence
  Description of Artificial Sequence: Synthetic epitope
ETPILSRGTS

SEQ ID NO: 17736 - protein, 10 aa, Artificial Sequence
  Description of Artificial Sequence: Synthetic epitope
ETPKSREITT

SEQ ID NO: 17737 - protein, 10 aa, Artificial Sequence
  Description of Artificial Sequence: Synthetic epitope
ETPQATARPK

SEQ ID NO: 17738 - protein, 10 aa, Artificial Sequence
  Description of Artificial Sequence: Synthetic epitope
ETPRAVAFQD

SEQ ID NO: 17739 - protein, 10 aa, Artificial Sequence
  Description of Artificial Sequence: Synthetic epitope
ETPRLAFKNN

SEQ ID NO: 17740 - protein, 10 aa, Artificial Sequence
  Description of Artificial Sequence: Synthetic epitope
ETPSAAELQD

SEQ ID NO: 17741 - protein, 10 aa, Artificial Sequence
  Description of Artificial Sequence: Synthetic epitope
ETPTKEAVSV

SEQ ID NO: 17742 - protein, 10 aa, Artificial Sequence
  Description of Artificial Sequence: Synthetic epitope
ETQANSTTDA

SEQ ID NO: 17743 - protein, 10 aa, Artificial Sequence
  Description of Artificial Sequence: Synthetic epitope
ETQEATRNKP

SEQ ID NO: 17744 - protein, 10 aa, Artificial Sequence
  Description of Artificial Sequence: Synthetic epitope
ETQHINMTSQ

SEQ ID NO: 17745 - protein, 10 aa, Artificial Sequence
  Description of Artificial Sequence: Synthetic epitope
ETQISSLNEK

SEQ ID NO: 17746 - protein, 10 aa, Artificial Sequence
  Description of Artificial Sequence: Synthetic epitope
ETQLQLSARE

SEQ ID NO: 17747 - protein, 10 aa, Artificial Sequence
  Description of Artificial Sequence: Synthetic epitope
ETQLQQIETR

SEQ ID NO: 17748 - protein, 10 aa, Artificial Sequence
  Description of Artificial Sequence: Synthetic epitope
ETQPSSRIQL

SEQ ID NO: 17749 - protein, 10 aa, Artificial Sequence
  Description of Artificial Sequence: Synthetic epitope
ETQQRILTLE

SEQ ID NO: 17750 - protein, 10 aa, Artificial Sequence
  Description of Artificial Sequence: Synthetic epitope
ETQRDKGQSM

SEQ ID NO: 17751 - protein, 10 aa, Artificial Sequence
  Description of Artificial Sequence: Synthetic epitope
ETQSIISQLP

SEQ ID NO: 17752 - protein, 10 aa, Artificial Sequence
  Description of Artificial Sequence: Synthetic epitope
ETQTTSRGKE

SEQ ID NO: 17753 - protein, 10 aa, Artificial Sequence
  Description of Artificial Sequence: Synthetic epitope
ETRAVSDVHA

SEQ ID NO: 17754 - protein, 10 aa, Artificial Sequence
  Description of Artificial Sequence: Synthetic epitope
ETRFEVAQVE

SEQ ID NO: 17755 - protein, 10 aa, Artificial Sequence
  Description of Artificial Sequence: Synthetic epitope
ETRIFVRVIQ

SEQ ID NO: 17756 - protein, 10 aa, Artificial Sequence
  Description of Artificial Sequence: Synthetic epitope
ETRLAQLQSR

SEQ ID NO: 17757 - protein, 10 aa, Artificial Sequence
  Description of Artificial Sequence: Synthetic epitope
ETRLLQLEST

SEQ ID NO: 17758 - protein, 10 aa, Artificial Sequence
  Description of Artificial Sequence: Synthetic epitope
ETRSKDVALK

SEQ ID NO: 17759 - protein, 10 aa, Artificial Sequence
  Description of Artificial Sequence: Synthetic epitope
ETRSLVIVKK

SEQ ID NO: 17760 - protein, 10 aa, Artificial Sequence
  Description of Artificial Sequence: Synthetic epitope
ETSEQNVILQ

SEQ ID NO: 17761 - protein, 10 aa, Artificial Sequence
  Description of Artificial Sequence: Synthetic epitope
ETSKGLTERK

SEQ ID NO: 17762 - protein, 10 aa, Artificial Sequence
  Description of Artificial Sequence: Synthetic epitope
ETSKKTASAQ

SEQ ID NO: 17763 - protein, 10 aa, Artificial Sequence
  Description of Artificial Sequence: Synthetic epitope
ETSLGRAQRQ

SEQ ID NO: 17764 - protein, 10 aa, Artificial Sequence
  Description of Artificial Sequence: Synthetic epitope
ETSLISGNLH

SEQ ID NO: 17765 - protein, 10 aa, Artificial Sequence
  Description of Artificial Sequence: Synthetic epitope
ETSLSSNRLS

SEQ ID NO: 17766 - protein, 10 aa, Artificial Sequence
  Description of Artificial Sequence: Synthetic epitope
ETSLTNTMGG

SEQ ID NO: 17767 - protein, 10 aa, Artificial Sequence
  Description of Artificial Sequence: Synthetic epitope
ETSPISNSSI

SEQ ID NO: 17768 - protein, 10 aa, Artificial Sequence
  Description of Artificial Sequence: Synthetic epitope
ETSPYLANLL

SEQ ID NO: 17769 - protein, 10 aa, Artificial Sequence
  Description of Artificial Sequence: Synthetic epitope
ETSQAAEGSE

SEQ ID NO: 17770 - protein, 10 aa, Artificial Sequence
  Description of Artificial Sequence: Synthetic epitope
ETSQSLVILS

SEQ ID NO: 17771 - protein, 10 aa, Artificial Sequence
  Description of Artificial Sequence: Synthetic epitope
ETSSAERKRR

SEQ ID NO: 17772 - protein, 10 aa, Artificial Sequence
  Description of Artificial Sequence: Synthetic epitope
ETSSEKSAEP

SEQ ID NO: 17773 - protein, 10 aa, Artificial Sequence
  Description of Artificial Sequence: Synthetic epitope
ETSSKNSEEY

SEQ ID NO: 17774 - protein, 10 aa, Artificial Sequence
  Description of Artificial Sequence: Synthetic epitope
ETSSMFTGDL

SEQ ID NO: 17775 - protein, 10 aa, Artificial Sequence
  Description of Artificial Sequence: Synthetic epitope
ETSSNSKRKK

SEQ ID NO: 17776 - protein, 10 aa, Artificial Sequence
  Description of Artificial Sequence: Synthetic epitope
ETSSTLQSRL

SEQ ID NO: 17777 - protein, 10 aa, Artificial Sequence
  Description of Artificial Sequence: Synthetic epitope
ETSTEALMKS

SEQ ID NO: 17778 - protein, 10 aa, Artificial Sequence
  Description of Artificial Sequence: Synthetic epitope
ETSTFEISAY

SEQ ID NO: 17779 - protein, 10 aa, Artificial Sequence
  Description of Artificial Sequence: Synthetic epitope
ETSTLQGLEG

SEQ ID NO: 17780 - protein, 10 aa, Artificial Sequence
  Description of Artificial Sequence: Synthetic epitope
ETSVVELTAE

SEQ ID NO: 17781 - protein, 10 aa, Artificial Sequence
  Description of Artificial Sequence: Synthetic epitope
ETTANMNSSY

SEQ ID NO: 17782 - protein, 10 aa, Artificial Sequence
  Description of Artificial Sequence: Synthetic epitope
ETTDSTTSKI

SEQ ID NO: 17783 - protein, 10 aa, Artificial Sequence
  Description of Artificial Sequence: Synthetic epitope
ETTEGAESAQ

SEQ ID NO: 17784 - protein, 10 aa, Artificial Sequence
  Description of Artificial Sequence: Synthetic epitope
ETTEKEVAEP

SEQ ID NO: 17785 - protein, 10 aa, Artificial Sequence
  Description of Artificial Sequence: Synthetic epitope
ETTERAKIVI

SEQ ID NO: 17786 - protein, 10 aa, Artificial Sequence
  Description of Artificial Sequence: Synthetic epitope
ETTGLIKLEE

SEQ ID NO: 17787 - protein, 10 aa, Artificial Sequence
  Description of Artificial Sequence: Synthetic epitope
ETTGLSEARE

SEQ ID NO: 17788 - protein, 10 aa, Artificial Sequence
  Description of Artificial Sequence: Synthetic epitope
ETTGVDITKI

SEQ ID NO: 17789 - protein, 10 aa, Artificial Sequence
  Description of Artificial Sequence: Synthetic epitope
ETTKISSHQT

SEQ ID NO: 17790 - protein, 10 aa, Artificial Sequence
  Description of Artificial Sequence: Synthetic epitope
ETTLGKMVPS

SEQ ID NO: 17791 - protein, 10 aa, Artificial Sequence
  Description of Artificial Sequence: Synthetic epitope
ETTLKETEKI

SEQ ID NO: 17792 - protein, 10 aa, Artificial Sequence
  Description of Artificial Sequence: Synthetic epitope
ETTLSTNETQ

SEQ ID NO: 17793 - protein, 10 aa, Artificial Sequence
  Description of Artificial Sequence: Synthetic epitope
ETTPESTTQL

SEQ ID NO: 17794 - protein, 10 aa, Artificial Sequence
  Description of Artificial Sequence: Synthetic epitope
ETTPMWQALK

SEQ ID NO: 17795 - protein, 10 aa, Artificial Sequence
  Description of Artificial Sequence: Synthetic epitope
ETTQKARFEM

SEQ ID NO: 17796 - protein, 10 aa, Artificial Sequence
  Description of Artificial Sequence: Synthetic epitope
ETTRSKIEQF

SEQ ID NO: 17797 - protein, 10 aa, Artificial Sequence
  Description of Artificial Sequence: Synthetic epitope
ETTSVEIASN

SEQ ID NO: 17798 - protein, 10 aa, Artificial Sequence
  Description of Artificial Sequence: Synthetic epitope
ETTVKSEEVD

SEQ ID NO: 17799 - protein, 10 aa, Artificial Sequence
  Description of Artificial Sequence: Synthetic epitope
ETTVSQIAVE

SEQ ID NO: 17800 - protein, 10 aa, Artificial Sequence
  Description of Artificial Sequence: Synthetic epitope
ETTVTSLGED

SEQ ID NO: 17801 - protein, 10 aa, Artificial Sequence
  Description of Artificial Sequence: Synthetic epitope
  MOD_RES (9)..(10): Any amino acid
ETTYPTSPXX

SEQ ID NO: 17802 - protein, 10 aa, Artificial Sequence
  Description of Artificial Sequence: Synthetic epitope
ETVEKAHAEF

SEQ ID NO: 17803 - protein, 10 aa, Artificial Sequence
  Description of Artificial Sequence: Synthetic epitope
ETVENSNSID

SEQ ID NO: 17804 - protein, 10 aa, Artificial Sequence
  Description of Artificial Sequence: Synthetic epitope
ETVLRGLMEL

SEQ ID NO: 17805 - protein, 10 aa, Artificial Sequence
  Description of Artificial Sequence: Synthetic epitope
ETVSRIQGQG

SEQ ID NO: 17806 - protein, 10 aa, Artificial Sequence
  Description of Artificial Sequence: Synthetic epitope
ETVSSETTKF

SEQ ID NO: 17807 - protein, 10 aa, Artificial Sequence
  Description of Artificial Sequence: Synthetic epitope
ETVTTAMSQE

SEQ ID NO: 17808 - protein, 10 aa, Artificial Sequence
  Description of Artificial Sequence: Synthetic epitope
ETVVSMLIEQ

SEQ ID NO: 17809 - protein, 10 aa, Artificial Sequence
  Description of Artificial Sequence: Synthetic epitope
ETWAYGKEQI

SEQ ID NO: 17810 - protein, 10 aa, Artificial Sequence
  Description of Artificial Sequence: Synthetic epitope
ETWGFNTNQE

SEQ ID NO: 17811 - protein, 10 aa, Artificial Sequence
  Description of Artificial Sequence: Synthetic epitope
ETYFESARVE

SEQ ID NO: 17812 - protein, 10 aa, Artificial Sequence
  Description of Artificial Sequence: Synthetic epitope
ETYILTSSVK

SEQ ID NO: 17813 - protein, 10 aa, Artificial Sequence
  Description of Artificial Sequence: Synthetic epitope
ETYRASLPYS

SEQ ID NO: 17814 - protein, 10 aa, Artificial Sequence
  Description of Artificial Sequence: Synthetic epitope
ETYSLKNAKA

SEQ ID NO: 17815 - protein, 10 aa, Artificial Sequence
  Description of Artificial Sequence: Synthetic epitope
EVAALARQAE

SEQ ID NO: 17816 - protein, 10 aa, Artificial Sequence
  Description of Artificial Sequence: Synthetic epitope
EVAAQKPSED

SEQ ID NO: 17817 - protein, 10 aa, Artificial Sequence
  Description of Artificial Sequence: Synthetic epitope
EVAAVDFESN

SEQ ID NO: 17818 - protein, 10 aa, Artificial Sequence
  Description of Artificial Sequence: Synthetic epitope
EVADDSQLEK

SEQ ID NO: 17819 - protein, 10 aa, Artificial Sequence
  Description of Artificial Sequence: Synthetic epitope
EVAEKEREAL

SEQ ID NO: 17820 - protein, 10 aa, Artificial Sequence
  Description of Artificial Sequence: Synthetic epitope
EVAKKSLRSE

SEQ ID NO: 17821 - protein, 10 aa, Artificial Sequence
  Description of Artificial Sequence: Synthetic epitope
EVAKMGATNK

SEQ ID NO: 17822 - protein, 10 aa, Artificial Sequence
  Description of Artificial Sequence: Synthetic epitope
EVAKTQALAQ

SEQ ID NO: 17823 - protein, 10 aa, Artificial Sequence
  Description of Artificial Sequence: Synthetic epitope
EVALEELRSN

SEQ ID NO: 17824 - protein, 10 aa, Artificial Sequence
  Description of Artificial Sequence: Synthetic epitope
EVALLQGNHQ

SEQ ID NO: 17825 - protein, 10 aa, Artificial Sequence
  Description of Artificial Sequence: Synthetic epitope
EVAQNGMAKE

SEQ ID NO: 17826 - protein, 10 aa, Artificial Sequence
  Description of Artificial Sequence: Synthetic epitope
EVAQQEMEYD

SEQ ID NO: 17827 - protein, 10 aa, Artificial Sequence
  Description of Artificial Sequence: Synthetic epitope
EVATALENRS

SEQ ID NO: 17828 - protein, 10 aa, Artificial Sequence
  Description of Artificial Sequence: Synthetic epitope
EVATWDSIAT

SEQ ID NO: 17829 - protein, 10 aa, Artificial Sequence
  Description of Artificial Sequence: Synthetic epitope
EVDENVPTAE

SEQ ID NO: 17830 - protein, 10 aa, Artificial Sequence
  Description of Artificial Sequence: Synthetic epitope
EVDRLKVTFE

SEQ ID NO: 17831 - protein, 10 aa, Artificial Sequence
  Description of Artificial Sequence: Synthetic epitope
EVDRRSVHSE

SEQ ID NO: 17832 - protein, 10 aa, Artificial Sequence
  Description of Artificial Sequence: Synthetic epitope
EVDTITAGIN

SEQ ID NO: 17833 - protein, 10 aa, Artificial Sequence
  Description of Artificial Sequence: Synthetic epitope
EVEASKKQAE

SEQ ID NO: 17834 - protein, 10 aa, Artificial Sequence
  Description of Artificial Sequence: Synthetic epitope
EVEASRVPES

SEQ ID NO: 17835 - protein, 10 aa, Artificial Sequence
  Description of Artificial Sequence: Synthetic epitope
EVEKAGEEQA

SEQ ID NO: 17836 - protein, 10 aa, Artificial Sequence
  Description of Artificial Sequence: Synthetic epitope
EVEKDGEKEA

SEQ ID NO: 17837 - protein, 10 aa, Artificial Sequence
  Description of Artificial Sequence: Synthetic epitope
EVELTTVATQ

SEQ ID NO: 17838 - protein, 10 aa, Artificial Sequence
  Description of Artificial Sequence: Synthetic epitope
EVEQNLDLQY

SEQ ID NO: 17839 - protein, 10 aa, Artificial Sequence
  Description of Artificial Sequence: Synthetic epitope
EVERTEEKVP

SEQ ID NO: 17840 - protein, 10 aa, Artificial Sequence
  Description of Artificial Sequence: Synthetic epitope
EVEVSFEEKQ

SEQ ID NO: 17841 - protein, 10 aa, Artificial Sequence
  Description of Artificial Sequence: Synthetic epitope
EVFESSLSDP

SEQ ID NO: 17842 - protein, 10 aa, Artificial Sequence
  Description of Artificial Sequence: Synthetic epitope
EVFIYIGNIE

SEQ ID NO: 17843 - protein, 10 aa, Artificial Sequence
  Description of Artificial Sequence: Synthetic epitope
EVFLKLILST

SEQ ID NO: 17844 - protein, 10 aa, Artificial Sequence
  Description of Artificial Sequence: Synthetic epitope
EVFVSSLEEF

SEQ ID NO: 17845 - protein, 10 aa, Artificial Sequence
  Description of Artificial Sequence: Synthetic epitope
EVGLASDRGE

SEQ ID NO: 17846 - protein, 10 aa, Artificial Sequence
  Description of Artificial Sequence: Synthetic epitope
EVGVSSKNVS

SEQ ID NO: 17847 - protein, 10 aa, Artificial Sequence
  Description of Artificial Sequence: Synthetic epitope
EVIARSTYQE

SEQ ID NO: 17848 - protein, 10 aa, Artificial Sequence
  Description of Artificial Sequence: Synthetic epitope
EVIASAILNN

SEQ ID NO: 17849 - protein, 10 aa, Artificial Sequence
  Description of Artificial Sequence: Synthetic epitope
EVIASHSSNT

SEQ ID NO: 17850 - protein, 10 aa, Artificial Sequence
  Description of Artificial Sequence: Synthetic epitope
EVIGSKRYLD

SEQ ID NO: 17851 - protein, 10 aa, Artificial Sequence
  Description of Artificial Sequence: Synthetic epitope
EVIHSKTKVN

SEQ ID NO: 17852 - protein, 10 aa, Artificial Sequence
  Description of Artificial Sequence: Synthetic epitope
EVIKSSLMEN

SEQ ID NO: 17853 - protein, 10 aa, Artificial Sequence
  Description of Artificial Sequence: Synthetic epitope
EVISTLLEKM

SEQ ID NO: 17854 - protein, 10 aa, Artificial Sequence
  Description of Artificial Sequence: Synthetic epitope
EVITKDSLNS

SEQ ID NO: 17855 - protein, 10 aa, Artificial Sequence
  Description of Artificial Sequence: Synthetic epitope
EVITLNMIKS

SEQ ID NO: 17856 - protein, 10 aa, Artificial Sequence
  Description of Artificial Sequence: Synthetic epitope
EVIYQPVEIA

SEQ ID NO: 17857 - protein, 10 aa, Artificial Sequence
  Description of Artificial Sequence: Synthetic epitope
EVKAKVKRAA

SEQ ID NO: 17858 - protein, 10 aa, Artificial Sequence
  Description of Artificial Sequence: Synthetic epitope
EVKEEDTEQK

SEQ ID NO: 17859 - protein, 10 aa, Artificial Sequence
  Description of Artificial Sequence: Synthetic epitope
EVKESLFHIH

SEQ ID NO: 17860 - protein, 10 aa, Artificial Sequence
  Description of Artificial Sequence: Synthetic epitope
EVKFSHLSRN

SEQ ID NO: 17861 - protein, 10 aa, Artificial Sequence
  Description of Artificial Sequence: Synthetic epitope
EVKKIEAINV

SEQ ID NO: 17862 - protein, 10 aa, Artificial Sequence
  Description of Artificial Sequence: Synthetic epitope
EVKLNERIIA

SEQ ID NO: 17863 - protein, 10 aa, Artificial Sequence
  Description of Artificial Sequence: Synthetic epitope
EVKQEQILSL

SEQ ID NO: 17864 - protein, 10 aa, Artificial Sequence
  Description of Artificial Sequence: Synthetic epitope
EVKQISTEEI

SEQ ID NO: 17865 - protein, 10 aa, Artificial Sequence
  Description of Artificial Sequence: Synthetic epitope
EVKQSMSSQS

SEQ ID NO: 17866 - protein, 10 aa, Artificial Sequence
  Description of Artificial Sequence: Synthetic epitope
EVKSFEEKEM

SEQ ID NO: 17867 - protein, 10 aa, Artificial Sequence
  Description of Artificial Sequence: Synthetic epitope
EVKSKDASKG

SEQ ID NO: 17868 - protein, 10 aa, Artificial Sequence
  Description of Artificial Sequence: Synthetic epitope
EVKSSEPTED

SEQ ID NO: 17869 - protein, 10 aa, Artificial Sequence
  Description of Artificial Sequence: Synthetic epitope
EVKVEVINKN

SEQ ID NO: 17870 - protein, 10 aa, Artificial Sequence
  Description of Artificial Sequence: Synthetic epitope
EVKVKMEKSD

SEQ ID NO: 17871 - protein, 10 aa, Artificial Sequence
  Description of Artificial Sequence: Synthetic epitope
EVKVSDSRRI

SEQ ID NO: 17872 - protein, 10 aa, Artificial Sequence
  Description of Artificial Sequence: Synthetic epitope
EVLAKTKEGM

SEQ ID NO: 17873 - protein, 10 aa, Artificial Sequence
  Description of Artificial Sequence: Synthetic epitope
EVLASQEQAA

SEQ ID NO: 17874 - protein, 10 aa, Artificial Sequence
  Description of Artificial Sequence: Synthetic epitope
EVLEALGEVM

SEQ ID NO: 17875 - protein, 10 aa, Artificial Sequence
  Description of Artificial Sequence: Synthetic epitope
EVLFVVSVSE

SEQ ID NO: 17876 - protein, 10 aa, Artificial Sequence
  Description of Artificial Sequence: Synthetic epitope
EVLKAAENKK

SEQ ID NO: 17877 - protein, 10 aa, Artificial Sequence
  Description of Artificial Sequence: Synthetic epitope
EVLKFATREN

SEQ ID NO: 17878 - protein, 10 aa, Artificial Sequence
  Description of Artificial Sequence: Synthetic epitope
EVLKNDVKFM

SEQ ID NO: 17879 - protein, 10 aa, Artificial Sequence
  Description of Artificial Sequence: Synthetic epitope
EVLKTSAGLG

SEQ ID NO: 17880 - protein, 10 aa, Artificial Sequence
  Description of Artificial Sequence: Synthetic epitope
EVLKVINATE

SEQ ID NO: 17881 - protein, 10 aa, Artificial Sequence
  Description of Artificial Sequence: Synthetic epitope
EVLLKDETKR

SEQ ID NO: 17882 - protein, 10 aa, Artificial Sequence
  Description of Artificial Sequence: Synthetic epitope
EVLLSEETKR

SEQ ID NO: 17883 - protein, 10 aa, Artificial Sequence
  Description of Artificial Sequence: Synthetic epitope
EVLLSQSYVK

SEQ ID NO: 17884 - protein, 10 aa, Artificial Sequence
  Description of Artificial Sequence: Synthetic epitope
EVLPTKMSYA

SEQ ID NO: 17885 - protein, 10 aa, Artificial Sequence
  Description of Artificial Sequence: Synthetic epitope
EVLTEQQKAL

SEQ ID NO: 17886 - protein, 10 aa, Artificial Sequence
  Description of Artificial Sequence: Synthetic epitope
EVLTTRATQL

SEQ ID NO: 17887 - protein, 10 aa, Artificial Sequence
  Description of Artificial Sequence: Synthetic epitope
EVLYVTLPQM

SEQ ID NO: 17888 - protein, 10 aa, Artificial Sequence
  Description of Artificial Sequence: Synthetic epitope
EVMEKASSEE

SEQ ID NO: 17889 - protein, 10 aa, Artificial Sequence
  Description of Artificial Sequence: Synthetic epitope
EVMFTALIKD

SEQ ID NO: 17890 - protein, 10 aa, Artificial Sequence
  Description of Artificial Sequence: Synthetic epitope
EVMGDQSLVP

SEQ ID NO: 17891 - protein, 10 aa, Artificial Sequence
  Description of Artificial Sequence: Synthetic epitope
EVMNDKNWNP

SEQ ID NO: 17892 - protein, 10 aa, Artificial Sequence
  Description of Artificial Sequence: Synthetic epitope
EVMSASKFTF

SEQ ID NO: 17893 - protein, 10 aa, Artificial Sequence
  Description of Artificial Sequence: Synthetic epitope
EVMVPVKASG

SEQ ID NO: 17894 - protein, 10 aa, Artificial Sequence
  Description of Artificial Sequence: Synthetic epitope
EVNIPVESEV

SEQ ID NO: 17895 - protein, 10 aa, Artificial Sequence
  Description of Artificial Sequence: Synthetic epitope
EVNITTNLDF

SEQ ID NO: 17896 - protein, 10 aa, Artificial Sequence
  Description of Artificial Sequence: Synthetic epitope
EVNLKLQNIM

SEQ ID NO: 17897 - protein, 10 aa, Artificial Sequence
  Description of Artificial Sequence: Synthetic epitope
EVNLTAYKPK

SEQ ID NO: 17898 - protein, 10 aa, Artificial Sequence
  Description of Artificial Sequence: Synthetic epitope
EVNMMTIRFW

SEQ ID NO: 17899 - protein, 10 aa, Artificial Sequence
  Description of Artificial Sequence: Synthetic epitope
EVNPESLAKE

SEQ ID NO: 17900 - protein, 10 aa, Artificial Sequence
  Description of Artificial Sequence: Synthetic epitope
EVNQLEKFDI

SEQ ID NO: 17901 - protein, 10 aa, Artificial Sequence
  Description of Artificial Sequence: Synthetic epitope
EVNTSASEIL

SEQ ID NO: 17902 - protein, 10 aa, Artificial Sequence
  Description of Artificial Sequence: Synthetic epitope
EVPEIKTEGD

SEQ ID NO: 17903 - protein, 10 aa, Artificial Sequence
  Description of Artificial Sequence: Synthetic epitope
EVPLALTAQV

SEQ ID NO: 17904 - protein, 10 aa, Artificial Sequence
  Description of Artificial Sequence: Synthetic epitope
EVQASQHRLE

SEQ ID NO: 17905 - protein, 10 aa, Artificial Sequence
  Description of Artificial Sequence: Synthetic epitope
EVQKSLGKSE

SEQ ID NO: 17906 - protein, 10 aa, Artificial Sequence
  Description of Artificial Sequence: Synthetic epitope
EVQQAVSQGS

SEQ ID NO: 17907 - protein, 10 aa, Artificial Sequence
  Description of Artificial Sequence: Synthetic epitope
EVQQVTVHKP

SEQ ID NO: 17908 - protein, 10 aa, Artificial Sequence
  Description of Artificial Sequence: Synthetic epitope
EVQSNRGLTK

SEQ ID NO: 17909 - protein, 10 aa, Artificial Sequence
  Description of Artificial Sequence: Synthetic epitope
EVQSQNEYIA

SEQ ID NO: 17910 - protein, 10 aa, Artificial Sequence
  Description of Artificial Sequence: Synthetic epitope
EVQVRELIES

SEQ ID NO: 17911 - protein, 10 aa, Artificial Sequence
  Description of Artificial Sequence: Synthetic epitope
EVQVVNTERS

SEQ ID NO: 17912 - protein, 10 aa, Artificial Sequence
  Description of Artificial Sequence: Synthetic epitope
EVRLTQTVAH

SEQ ID NO: 17913 - protein, 10 aa, Artificial Sequence
  Description of Artificial Sequence: Synthetic epitope
EVRQKVQLTI

SEQ ID NO: 17914 - protein, 10 aa, Artificial Sequence
  Description of Artificial Sequence: Synthetic epitope
EVRSHTSIQT

SEQ ID NO: 17915 - protein, 10 aa, Artificial Sequence
  Description of Artificial Sequence: Synthetic epitope
EVRSTEVANG

SEQ ID NO: 17916 - protein, 10 aa, Artificial Sequence
  Description of Artificial Sequence: Synthetic epitope
EVSESHFKYP

SEQ ID NO: 17917 - protein, 10 aa, Artificial Sequence
  Description of Artificial Sequence: Synthetic epitope
EVSETTESTD

SEQ ID NO: 17918 - protein, 10 aa, Artificial Sequence
  Description of Artificial Sequence: Synthetic epitope
EVSITYLVQT

SEQ ID NO: 17919 - protein, 10 aa, Artificial Sequence
  Description of Artificial Sequence: Synthetic epitope
EVSKTEVSAT

SEQ ID NO: 17920 - protein, 10 aa, Artificial Sequence
  Description of Artificial Sequence: Synthetic epitope
EVSMKAEDAQ

SEQ ID NO: 17921 - protein, 10 aa, Artificial Sequence
  Description of Artificial Sequence: Synthetic epitope
EVSMRRAPLM

SEQ ID NO: 17922 - protein, 10 aa, Artificial Sequence
  Description of Artificial Sequence: Synthetic epitope
EVSQELESDD

SEQ ID NO: 17923 - protein, 10 aa, Artificial Sequence
  Description of Artificial Sequence: Synthetic epitope
EVSQPVSASQ

SEQ ID NO: 17924 - protein, 10 aa, Artificial Sequence
  Description of Artificial Sequence: Synthetic epitope
EVSSASMAED

SEQ ID NO: 17925 - protein, 10 aa, Artificial Sequence
  Description of Artificial Sequence: Synthetic epitope
EVSSTENTDK

SEQ ID NO: 17926 - protein, 10 aa, Artificial Sequence
  Description of Artificial Sequence: Synthetic epitope
EVSTNGASEV

SEQ ID NO: 17927 - protein, 10 aa, Artificial Sequence
  Description of Artificial Sequence: Synthetic epitope
EVSVQYSKEE

SEQ ID NO: 17928 - protein, 10 aa, Artificial Sequence
  Description of Artificial Sequence: Synthetic epitope
EVSVSSKKSE

SEQ ID NO: 17929 - protein, 10 aa, Artificial Sequence
  Description of Artificial Sequence: Synthetic epitope
EVSVTFKAKK

SEQ ID NO: 17930 - protein, 10 aa, Artificial Sequence
  Description of Artificial Sequence: Synthetic epitope
EVTAADLFNS

SEQ ID NO: 17931 - protein, 10 aa, Artificial Sequence
  Description of Artificial Sequence: Synthetic epitope
EVTASEGFTV

SEQ ID NO: 17932 - protein, 10 aa, Artificial Sequence
  Description of Artificial Sequence: Synthetic epitope
EVTDVYEMEG

SEQ ID NO: 17933 - protein, 10 aa, Artificial Sequence
  Description of Artificial Sequence: Synthetic epitope
EVTGTKIAYE

SEQ ID NO: 17934 - protein, 10 aa, Artificial Sequence
  Description of Artificial Sequence: Synthetic epitope
EVTLAKGGSQ

SEQ ID NO: 17935 - protein, 10 aa, Artificial Sequence
  Description of Artificial Sequence: Synthetic epitope
EVTNASAAGN

SEQ ID NO: 17936 - protein, 10 aa, Artificial Sequence
  Description of Artificial Sequence: Synthetic epitope
EVTSMKAMED

SEQ ID NO: 17937 - protein, 10 aa, Artificial Sequence
  Description of Artificial Sequence: Synthetic epitope
EVTSQQNDIE

SEQ ID NO: 17938 - protein, 10 aa, Artificial Sequence
  Description of Artificial Sequence: Synthetic epitope
EVTSTVATEK

SEQ ID NO: 17939 - protein, 10 aa, Artificial Sequence
  Description of Artificial Sequence: Synthetic epitope
EVTSTVLHGK

SEQ ID NO: 17940 - protein, 10 aa, Artificial Sequence
  Description of Artificial Sequence: Synthetic epitope
EVTTESDEQP

SEQ ID NO: 17941 - protein, 10 aa, Artificial Sequence
  Description of Artificial Sequence: Synthetic epitope
EVTTSVAENR

SEQ ID NO: 17942 - protein, 10 aa, Artificial Sequence
  Description of Artificial Sequence: Synthetic epitope
EVVEKPAKEE

SEQ ID NO: 17943 - protein, 10 aa, Artificial Sequence
  Description of Artificial Sequence: Synthetic epitope
EVVERLLSVK

SEQ ID NO: 17944 - protein, 10 aa, Artificial Sequence
  Description of Artificial Sequence: Synthetic epitope
EVVGRVTAKA

SEQ ID NO: 17945 - protein, 10 aa, Artificial Sequence
  Description of Artificial Sequence: Synthetic epitope
EVVKMQRLTL

SEQ ID NO: 17946 - protein, 10 aa, Artificial Sequence
  Description of Artificial Sequence: Synthetic epitope
EVVLKLLKAG

SEQ ID NO: 17947 - protein, 10 aa, Artificial Sequence
  Description of Artificial Sequence: Synthetic epitope
EVVLSSNNMD

SEQ ID NO: 17948 - protein, 10 aa, Artificial Sequence
  Description of Artificial Sequence: Synthetic epitope
EVVNLSNKNE

SEQ ID NO: 17949 - protein, 10 aa, Artificial Sequence
  Description of Artificial Sequence: Synthetic epitope
EVVQVHAAES

SEQ ID NO: 17950 - protein, 10 aa, Artificial Sequence
  Description of Artificial Sequence: Synthetic epitope
EVVSETALNF

SEQ ID NO: 17951 - protein, 10 aa, Artificial Sequence
  Description of Artificial Sequence: Synthetic epitope
EVVSSILNVK

SEQ ID NO: 17952 - protein, 10 aa, Artificial Sequence
  Description of Artificial Sequence: Synthetic epitope
EVVYLSEAQK

SEQ ID NO: 17953 - protein, 10 aa, Artificial Sequence
  Description of Artificial Sequence: Synthetic epitope
EWAEKMPKGP

SEQ ID NO: 17954 - protein, 10 aa, Artificial Sequence
  Description of Artificial Sequence: Synthetic epitope
EWDRHRDKDS

SEQ ID NO: 17955 - protein, 10 aa, Artificial Sequence
  Description of Artificial Sequence: Synthetic epitope
EWETPDNQVG

SEQ ID NO: 17956 - protein, 10 aa, Artificial Sequence
  Description of Artificial Sequence: Synthetic epitope
EWFVGTVNTN

SEQ ID NO: 17957 - protein, 10 aa, Artificial Sequence
  Description of Artificial Sequence: Synthetic epitope
EWKASNSVPT

SEQ ID NO: 17958 - protein, 10 aa, Artificial Sequence
  Description of Artificial Sequence: Synthetic epitope
EWKQDVAELM

SEQ ID NO: 17959 - protein, 10 aa, Artificial Sequence
  Description of Artificial Sequence: Synthetic epitope
EWMDVEKLEK

SEQ ID NO: 17960 - protein, 10 aa, Artificial Sequence
  Description of Artificial Sequence: Synthetic epitope
EWNGAISESN

SEQ ID NO: 17961 - protein, 10 aa, Artificial Sequence
  Description of Artificial Sequence: Synthetic epitope
EWQKKEISLA

SEQ ID NO: 17962 - protein, 10 aa, Artificial Sequence
  Description of Artificial Sequence: Synthetic epitope
EWQSQVANKT

SEQ ID NO: 17963 - protein, 10 aa, Artificial Sequence
  Description of Artificial Sequence: Synthetic epitope
EWSSKKVSMS

SEQ ID NO: 17964 - protein, 10 aa, Artificial Sequence
  Description of Artificial Sequence: Synthetic epitope
EWSSLTAMKQ

SEQ ID NO: 17965 - protein, 10 aa, Artificial Sequence
  Description of Artificial Sequence: Synthetic epitope
EWTSKTVGAA

SEQ ID NO: 17966 - protein, 10 aa, Artificial Sequence
  Description of Artificial Sequence: Synthetic epitope
EWVHFFQKLD

SEQ ID NO: 17967 - protein, 10 aa, Artificial Sequence
  Description of Artificial Sequence: Synthetic epitope
EWVNRAPSIH

SEQ ID NO: 17968 - protein, 10 aa, Artificial Sequence
  Description of Artificial Sequence: Synthetic epitope
EWVVDYALKK

SEQ ID NO: 17969 - protein, 10 aa, Artificial Sequence
  Description of Artificial Sequence: Synthetic epitope
EYAKNSRASL

SEQ ID NO: 17970 - protein, 10 aa, Artificial Sequence
  Description of Artificial Sequence: Synthetic epitope
EYATKISRFS

SEQ ID NO: 17971 - protein, 10 aa, Artificial Sequence
  Description of Artificial Sequence: Synthetic epitope
EYEVAQRPAK

SEQ ID NO: 17972 - protein, 10 aa, Artificial Sequence
  Description of Artificial Sequence: Synthetic epitope
EYFNIAMIIP

SEQ ID NO: 17973 - protein, 10 aa, Artificial Sequence
  Description of Artificial Sequence: Synthetic epitope
EYFSKSLNRE

SEQ ID NO: 17974 - protein, 10 aa, Artificial Sequence
  Description of Artificial Sequence: Synthetic epitope
EYFYSSTAQE

SEQ ID NO: 17975 - protein, 10 aa, Artificial Sequence
  Description of Artificial Sequence: Synthetic epitope
EYHNSEQERM

SEQ ID NO: 17976 - protein, 10 aa, Artificial Sequence
  Description of Artificial Sequence: Synthetic epitope
EYHSKQLVQT

SEQ ID NO: 17977 - protein, 10 aa, Artificial Sequence
  Description of Artificial Sequence: Synthetic epitope
EYIAVKAEKS

SEQ ID NO: 17978 - protein, 10 aa, Artificial Sequence
  Description of Artificial Sequence: Synthetic epitope
EYIEAEEVDT

SEQ ID NO: 17979 - protein, 10 aa, Artificial Sequence
  Description of Artificial Sequence: Synthetic epitope
EYIYGENQLQ

SEQ ID NO: 17980 - protein, 10 aa, Artificial Sequence
  Description of Artificial Sequence: Synthetic epitope
EYKAKKAKGD

SEQ ID NO: 17981 - protein, 10 aa, Artificial Sequence
  Description of Artificial Sequence: Synthetic epitope
EYKEFKLTVE

SEQ ID NO: 17982 - protein, 10 aa, Artificial Sequence
  Description of Artificial Sequence: Synthetic epitope
EYKQERTYTR

SEQ ID NO: 17983 - protein, 10 aa, Artificial Sequence
  Description of Artificial Sequence: Synthetic epitope
EYLAITSESK

SEQ ID NO: 17984 - protein, 10 aa, Artificial Sequence
  Description of Artificial Sequence: Synthetic epitope
EYLEQVVHAP

SEQ ID NO: 17985 - protein, 10 aa, Artificial Sequence
  Description of Artificial Sequence: Synthetic epitope
EYLRAVMQKR

SEQ ID NO: 17986 - protein, 10 aa, Artificial Sequence
  Description of Artificial Sequence: Synthetic epitope
EYNESNTKMN

SEQ ID NO: 17987 - protein, 10 aa, Artificial Sequence
  Description of Artificial Sequence: Synthetic epitope
EYNTESRSQY

SEQ ID NO: 17988 - protein, 10 aa, Artificial Sequence
  Description of Artificial Sequence: Synthetic epitope
EYPLNIQNIN

SEQ ID NO: 17989 - protein, 10 aa, Artificial Sequence
  Description of Artificial Sequence: Synthetic epitope
EYPVISKSIM

SEQ ID NO: 17990 - protein, 10 aa, Artificial Sequence
  Description of Artificial Sequence: Synthetic epitope
EYQANADEMA

SEQ ID NO: 17991 - protein, 10 aa, Artificial Sequence
  Description of Artificial Sequence: Synthetic epitope
EYQKATSKLD

SEQ ID NO: 17992 - protein, 10 aa, Artificial Sequence
  Description of Artificial Sequence: Synthetic epitope
EYQQVANSDP

SEQ ID NO: 17993 - protein, 10 aa, Artificial Sequence
  Description of Artificial Sequence: Synthetic epitope
EYRMHKSRMY

SEQ ID NO: 17994 - protein, 10 aa, Artificial Sequence
  Description of Artificial Sequence: Synthetic epitope
EYSEDSNSEP

SEQ ID NO: 17995 - protein, 10 aa, Artificial Sequence
  Description of Artificial Sequence: Synthetic epitope
EYSSISEKLS

SEQ ID NO: 17996 - protein, 10 aa, Artificial Sequence
  Description of Artificial Sequence: Synthetic epitope
EYSTQENGTD

SEQ ID NO: 17997 - protein, 10 aa, Artificial Sequence
  Description of Artificial Sequence: Synthetic epitope
EYTITMYDTK

SEQ ID NO: 17998 - protein, 10 aa, Artificial Sequence
  Description of Artificial Sequence: Synthetic epitope
EYTKSGYESA

SEQ ID NO: 17999 - protein, 10 aa, Artificial Sequence
  Description of Artificial Sequence: Synthetic epitope
EYVEFEVKRA

SEQ ID NO: 18000 - protein, 10 aa, Artificial Sequence
  Description of Artificial Sequence: Synthetic epitope
EYVQREALRV

SEQ ID NO: 18001 - protein, 10 aa, Artificial Sequence
  Description of Artificial Sequence: Synthetic epitope
EYVQVLKKNY

SEQ ID NO: 18002 - protein, 10 aa, Artificial Sequence
  Description of Artificial Sequence: Synthetic epitope
EYVSQVTKVS

SEQ ID NO: 18003 - protein, 10 aa, Artificial Sequence
  Description of Artificial Sequence: Synthetic epitope
EYVSSTLSLR

SEQ ID NO: 18004 - protein, 10 aa, Artificial Sequence
  Description of Artificial Sequence: Synthetic epitope
EYYVDSSQDP

SEQ ID NO: 18005 - protein, 10 aa, Artificial Sequence
  Description of Artificial Sequence: Synthetic epitope
FAAEVVYIPL

SEQ ID NO: 18006 - protein, 10 aa, Artificial Sequence
  Description of Artificial Sequence: Synthetic epitope
FAIANSTAST

SEQ ID NO: 18007 - protein, 10 aa, Artificial Sequence
  Description of Artificial Sequence: Synthetic epitope
FAKSQQSRLE

SEQ ID NO: 18008 - protein, 10 aa, Artificial Sequence
  Description of Artificial Sequence: Synthetic epitope
FALAKQSQQT

SEQ ID NO: 18009 - protein, 10 aa, Artificial Sequence
  Description of Artificial Sequence: Synthetic epitope
FALMVQLKAQ

SEQ ID NO: 18010 - protein, 10 aa, Artificial Sequence
  Description of Artificial Sequence: Synthetic epitope
FANQPSNHTR

SEQ ID NO: 18011 - protein, 10 aa, Artificial Sequence
  Description of Artificial Sequence: Synthetic epitope
FANRRSQQSV

SEQ ID NO: 18012 - protein, 10 aa, Artificial Sequence
  Description of Artificial Sequence: Synthetic epitope
FANTEKLKAQ

SEQ ID NO: 18013 - protein, 10 aa, Artificial Sequence
  Description of Artificial Sequence: Synthetic epitope
FARKTERDEL

SEQ ID NO: 18014 - protein, 10 aa, Artificial Sequence
  Description of Artificial Sequence: Synthetic epitope
FASPLAKSTA

SEQ ID NO: 18015 - protein, 10 aa, Artificial Sequence
  Description of Artificial Sequence: Synthetic epitope
FASQKEVVLY

SEQ ID NO: 18016 - protein, 10 aa, Artificial Sequence
  Description of Artificial Sequence: Synthetic epitope
FATMPSVTSM

SEQ ID NO: 18017 - protein, 10 aa, Artificial Sequence
  Description of Artificial Sequence: Synthetic epitope
FDGSLSSQTS

SEQ ID NO: 18018 - protein, 10 aa, Artificial Sequence
  Description of Artificial Sequence: Synthetic epitope
FDQMVSLEAN

SEQ ID NO: 18019 - protein, 10 aa, Artificial Sequence
  Description of Artificial Sequence: Synthetic epitope
FDSGSSKSGR

SEQ ID NO: 18020 - protein, 10 aa, Artificial Sequence
  Description of Artificial Sequence: Synthetic epitope
FDSTNVSDTA

SEQ ID NO: 18021 - protein, 10 aa, Artificial Sequence
  Description of Artificial Sequence: Synthetic epitope
FEAAPATEES

SEQ ID NO: 18022 - protein, 10 aa, Artificial Sequence
  Description of Artificial Sequence: Synthetic epitope
FEALKQQSQQ

SEQ ID NO: 18023 - protein, 10 aa, Artificial Sequence
  Description of Artificial Sequence: Synthetic epitope
FEAPSELTQR

SEQ ID NO: 18024 - protein, 10 aa, Artificial Sequence
  Description of Artificial Sequence: Synthetic epitope
FEDGAATVGH

SEQ ID NO: 18025 - protein, 10 aa, Artificial Sequence
  Description of Artificial Sequence: Synthetic epitope
FEDSQVDLNS

SEQ ID NO: 18026 - protein, 10 aa, Artificial Sequence
  Description of Artificial Sequence: Synthetic epitope
FEENHVVQEK

SEQ ID NO: 18027 - protein, 10 aa, Artificial Sequence
  Description of Artificial Sequence: Synthetic epitope
FEEPRRSAQD

SEQ ID NO: 18028 - protein, 10 aa, Artificial Sequence
  Description of Artificial Sequence: Synthetic epitope
FEHTSVTYNH

SEQ ID NO: 18029 - protein, 10 aa, Artificial Sequence
  Description of Artificial Sequence: Synthetic epitope
FEIDSGAMED

SEQ ID NO: 18030 - protein, 10 aa, Artificial Sequence
  Description of Artificial Sequence: Synthetic epitope
FEKKWENGTF

SEQ ID NO: 18031 - protein, 10 aa, Artificial Sequence
  Description of Artificial Sequence: Synthetic epitope
FELTQESKKA

SEQ ID NO: 18032 - protein, 10 aa, Artificial Sequence
  Description of Artificial Sequence: Synthetic epitope
FENYMSTDSA

SEQ ID NO: 18033 - protein, 10 aa, Artificial Sequence
  Description of Artificial Sequence: Synthetic epitope
FERIASEASR

SEQ ID NO: 18034 - protein, 10 aa, Artificial Sequence
  Description of Artificial Sequence: Synthetic epitope
FESEKAAVEF

SEQ ID NO: 18035 - protein, 10 aa, Artificial Sequence
  Description of Artificial Sequence: Synthetic epitope
FESSGKVSTA

SEQ ID NO: 18036 - protein, 10 aa, Artificial Sequence
  Description of Artificial Sequence: Synthetic epitope
FETASVKSEN

SEQ ID NO: 18037 - protein, 10 aa, Artificial Sequence
  Description of Artificial Sequence: Synthetic epitope
FETIDTADVI

SEQ ID NO: 18038 - protein, 10 aa, Artificial Sequence
  Description of Artificial Sequence: Synthetic epitope
FETSALKEEA

SEQ ID NO: 18039 - protein, 10 aa, Artificial Sequence
  Description of Artificial Sequence: Synthetic epitope
FEVASTSPED

SEQ ID NO: 18040 - protein, 10 aa, Artificial Sequence
  Description of Artificial Sequence: Synthetic epitope
FEVLSSMVGE

SEQ ID NO: 18041 - protein, 10 aa, Artificial Sequence
  Description of Artificial Sequence: Synthetic epitope
FEVTSRSEMS

SEQ ID NO: 18042 - protein, 10 aa, Artificial Sequence
  Description of Artificial Sequence: Synthetic epitope
FFDGTKLSGR

SEQ ID NO: 18043 - protein, 10 aa, Artificial Sequence
  Description of Artificial Sequence: Synthetic epitope
FGDFQTVFDQ

SEQ ID NO: 18044 - protein, 10 aa, Artificial Sequence
  Description of Artificial Sequence: Synthetic epitope
FGDTRLLSAS

SEQ ID NO: 18045 - protein, 10 aa, Artificial Sequence
  Description of Artificial Sequence: Synthetic epitope
FGFPTATLLD

SEQ ID NO: 18046 - protein, 10 aa, Artificial Sequence
  Description of Artificial Sequence: Synthetic epitope
FGLQNTMSQS

SEQ ID NO: 18047 - protein, 10 aa, Artificial Sequence
  Description of Artificial Sequence: Synthetic epitope
FGNKSQKPYK

SEQ ID NO: 18048 - protein, 10 aa, Artificial Sequence
  Description of Artificial Sequence: Synthetic epitope
FGNRAHNHSD

SEQ ID NO: 18049 - protein, 10 aa, Artificial Sequence
  Description of Artificial Sequence: Synthetic epitope
FGNSEQTKDE

SEQ ID NO: 18050 - protein, 10 aa, Artificial Sequence
  Description of Artificial Sequence: Synthetic epitope
FGRFTSVADT

SEQ ID NO: 18051 - protein, 10 aa, Artificial Sequence
  Description of Artificial Sequence: Synthetic epitope
FGWNRTKTDE

SEQ ID NO: 18052 - protein, 10 aa, Artificial Sequence
  Description of Artificial Sequence: Synthetic epitope
FGYQMDESNQ

SEQ ID NO: 18053 - protein, 10 aa, Artificial Sequence
  Description of Artificial Sequence: Synthetic epitope
FHSDRSKLQK

SEQ ID NO: 18054 - protein, 10 aa, Artificial Sequence
  Description of Artificial Sequence: Synthetic epitope
FIAEMPAVET

SEQ ID NO: 18055 - protein, 10 aa, Artificial Sequence
  Description of Artificial Sequence: Synthetic epitope
FIDAFASPVE

SEQ ID NO: 18056 - protein, 10 aa, Artificial Sequence
  Description of Artificial Sequence: Synthetic epitope
FIKYIKVELL

SEQ ID NO: 18057 - protein, 10 aa, Artificial Sequence
  Description of Artificial Sequence: Synthetic epitope
FISEATVEKL

SEQ ID NO: 18058 - protein, 10 aa, Artificial Sequence
  Description of Artificial Sequence: Synthetic epitope
FISIKKTKSE

SEQ ID NO: 18059 - protein, 10 aa, Artificial Sequence
  Description of Artificial Sequence: Synthetic epitope
FISNSTNSSN

SEQ ID NO: 18060 - protein, 10 aa, Artificial Sequence
  Description of Artificial Sequence: Synthetic epitope
FITAVQSRHT

SEQ ID NO: 18061 - protein, 10 aa, Artificial Sequence
  Description of Artificial Sequence: Synthetic epitope
FITEEVLGQQ

SEQ ID NO: 18062 - protein, 10 aa, Artificial Sequence
  Description of Artificial Sequence: Synthetic epitope
FITVITEAKE

SEQ ID NO: 18063 - protein, 10 aa, Artificial Sequence
  Description of Artificial Sequence: Synthetic epitope
FKALVTLLSE

SEQ ID NO: 18064 - protein, 10 aa, Artificial Sequence
  Description of Artificial Sequence: Synthetic epitope
FKARIYTNRY

SEQ ID NO: 18065 - protein, 10 aa, Artificial Sequence
  Description of Artificial Sequence: Synthetic epitope
FKAWPSSRAQ

SEQ ID NO: 18066 - protein, 10 aa, Artificial Sequence
  Description of Artificial Sequence: Synthetic epitope
FKDSGMKRIP

SEQ ID NO: 18067 - protein, 10 aa, Artificial Sequence
  Description of Artificial Sequence: Synthetic epitope
FKEESKFELS

SEQ ID NO: 18068 - protein, 10 aa, Artificial Sequence
  Description of Artificial Sequence: Synthetic epitope
FKEGSSQSES

SEQ ID NO: 18069 - protein, 10 aa, Artificial Sequence
  Description of Artificial Sequence: Synthetic epitope
FKEKKVAENV

SEQ ID NO: 18070 - protein, 10 aa, Artificial Sequence
  Description of Artificial Sequence: Synthetic epitope
FKENSIVKVT

SEQ ID NO: 18071 - protein, 10 aa, Artificial Sequence
  Description of Artificial Sequence: Synthetic epitope
FKFYESKYAS

SEQ ID NO: 18072 - protein, 10 aa, Artificial Sequence
  Description of Artificial Sequence: Synthetic epitope
FKGTESISKV

SEQ ID NO: 18073 - protein, 10 aa, Artificial Sequence
  Description of Artificial Sequence: Synthetic epitope
FKHYQMSSEA

SEQ ID NO: 18074 - protein, 10 aa, Artificial Sequence
  Description of Artificial Sequence: Synthetic epitope
FKLDKAAHET

SEQ ID NO: 18075 - protein, 10 aa, Artificial Sequence
  Description of Artificial Sequence: Synthetic epitope
FKLKLIDLTK

SEQ ID NO: 18076 - protein, 10 aa, Artificial Sequence
  Description of Artificial Sequence: Synthetic epitope
FKSNNLEREQ

SEQ ID NO: 18077 - protein, 10 aa, Artificial Sequence
  Description of Artificial Sequence: Synthetic epitope
FKSSKQADST

SEQ ID NO: 18078 - protein, 10 aa, Artificial Sequence
  Description of Artificial Sequence: Synthetic epitope
FKTESKLNSL

SEQ ID NO: 18079 - protein, 10 aa, Artificial Sequence
  Description of Artificial Sequence: Synthetic epitope
FLDASTSKQS

SEQ ID NO: 18080 - protein, 10 aa, Artificial Sequence
  Description of Artificial Sequence: Synthetic epitope
FLEEATAEEP

SEQ ID NO: 18081 - protein, 10 aa, Artificial Sequence
  Description of Artificial Sequence: Synthetic epitope
FLIQALSTQL

SEQ ID NO: 18082 - protein, 10 aa, Artificial Sequence
  Description of Artificial Sequence: Synthetic epitope
FLLEKGQHQT

SEQ ID NO: 18083 - protein, 10 aa, Artificial Sequence
  Description of Artificial Sequence: Synthetic epitope
FLLSATVKEQ

SEQ ID NO: 18084 - protein, 10 aa, Artificial Sequence
  Description of Artificial Sequence: Synthetic epitope
FLQKEEQRAQ

SEQ ID NO: 18085 - protein, 10 aa, Artificial Sequence
  Description of Artificial Sequence: Synthetic epitope
FLQLELSEME

SEQ ID NO: 18086 - protein, 10 aa, Artificial Sequence
  Description of Artificial Sequence: Synthetic epitope
FLSDAAVNLQ

SEQ ID NO: 18087 - protein, 10 aa, Artificial Sequence
  Description of Artificial Sequence: Synthetic epitope
FLSEKFALKS

SEQ ID NO: 18088 - protein, 10 aa, Artificial Sequence
  Description of Artificial Sequence: Synthetic epitope
FLTQKAKVGE

SEQ ID NO: 18089 - protein, 10 aa, Artificial Sequence
  Description of Artificial Sequence: Synthetic epitope
FLTSIFVKAG

SEQ ID NO: 18090 - protein, 10 aa, Artificial Sequence
  Description of Artificial Sequence: Synthetic epitope
FLYSQTFSLS

SEQ ID NO: 18091 - protein, 10 aa, Artificial Sequence
  Description of Artificial Sequence: Synthetic epitope
FMDQAGVDKV

SEQ ID NO: 18092 - protein, 10 aa, Artificial Sequence
  Description of Artificial Sequence: Synthetic epitope
FNIKENKSVR

SEQ ID NO: 18093 - protein, 10 aa, Artificial Sequence
  Description of Artificial Sequence: Synthetic epitope
FNIMGDWPSS

SEQ ID NO: 18094 - protein, 10 aa, Artificial Sequence
  Description of Artificial Sequence: Synthetic epitope
FNKSALKEAM

SEQ ID NO: 18095 - protein, 10 aa, Artificial Sequence
  Description of Artificial Sequence: Synthetic epitope
FNNIVGYPKE

SEQ ID NO: 18096 - protein, 10 aa, Artificial Sequence
  Description of Artificial Sequence: Synthetic epitope
FNNKSARSVS

SEQ ID NO: 18097 - protein, 10 aa, Artificial Sequence
  Description of Artificial Sequence: Synthetic epitope
FNPQADTGEQ

SEQ ID NO: 18098 - protein, 10 aa, Artificial Sequence
  Description of Artificial Sequence: Synthetic epitope
FNRTKIASIR

SEQ ID NO: 18099 - protein, 10 aa, Artificial Sequence
  Description of Artificial Sequence: Synthetic epitope
FNSRETSKES

SEQ ID NO: 18100 - protein, 10 aa, Artificial Sequence
  Description of Artificial Sequence: Synthetic epitope
FNTEAMFFIH

SEQ ID NO: 18101 - protein, 10 aa, Artificial Sequence
  Description of Artificial Sequence: Synthetic epitope
FPEMEVTQPT

SEQ ID NO: 18102 - protein, 10 aa, Artificial Sequence
  Description of Artificial Sequence: Synthetic epitope
FPESYVIYPT

SEQ ID NO: 18103 - protein, 10 aa, Artificial Sequence
  Description of Artificial Sequence: Synthetic epitope
FPHTAGSNKT

SEQ ID NO: 18104 - protein, 10 aa, Artificial Sequence
  Description of Artificial Sequence: Synthetic epitope
FPIVESVVHE

SEQ ID NO: 18105 - protein, 10 aa, Artificial Sequence
  Description of Artificial Sequence: Synthetic epitope
FPSLNMAVKR

SEQ ID NO: 18106 - protein, 10 aa, Artificial Sequence
  Description of Artificial Sequence: Synthetic epitope
FPSVSEKMPE

SEQ ID NO: 18107 - protein, 10 aa, Artificial Sequence
  Description of Artificial Sequence: Synthetic epitope
FQDSRMAKRV

SEQ ID NO: 18108 - protein, 10 aa, Artificial Sequence
  Description of Artificial Sequence: Synthetic epitope
FQEESLVDDS

SEQ ID NO: 18109 - protein, 10 aa, Artificial Sequence
  Description of Artificial Sequence: Synthetic epitope
FQEVLSLTES

SEQ ID NO: 18110 - protein, 10 aa, Artificial Sequence
  Description of Artificial Sequence: Synthetic epitope
FQIRALESQK

SEQ ID NO: 18111 - protein, 10 aa, Artificial Sequence
  Description of Artificial Sequence: Synthetic epitope
FQITSEVQSG

SEQ ID NO: 18112 - protein, 10 aa, Artificial Sequence
  Description of Artificial Sequence: Synthetic epitope
FQKLKIVEKN

SEQ ID NO: 18113 - protein, 10 aa, Artificial Sequence
  Description of Artificial Sequence: Synthetic epitope
FQPTTSTGIA

SEQ ID NO: 18114 - protein, 10 aa, Artificial Sequence
  Description of Artificial Sequence: Synthetic epitope
FQQAVKTDNK

SEQ ID NO: 18115 - protein, 10 aa, Artificial Sequence
  Description of Artificial Sequence: Synthetic epitope
FQQDAVVDRI

SEQ ID NO: 18116 - protein, 10 aa, Artificial Sequence
  Description of Artificial Sequence: Synthetic epitope
FQVTMAIVQA

SEQ ID NO: 18117 - protein, 10 aa, Artificial Sequence
  Description of Artificial Sequence: Synthetic epitope
FQYGTAQIKM

SEQ ID NO: 18118 - protein, 10 aa, Artificial Sequence
  Description of Artificial Sequence: Synthetic epitope
FQYTHQTLDS

SEQ ID NO: 18119 - protein, 10 aa, Artificial Sequence
  Description of Artificial Sequence: Synthetic epitope
FRDLVSLQVP

SEQ ID NO: 18120 - protein, 10 aa, Artificial Sequence
  Description of Artificial Sequence: Synthetic epitope
FRDVESQKIL

SEQ ID NO: 18121 - protein, 10 aa, Artificial Sequence
  Description of Artificial Sequence: Synthetic epitope
FREAQAAEGF

SEQ ID NO: 18122 - protein, 10 aa, Artificial Sequence
  Description of Artificial Sequence: Synthetic epitope
FRKLRTVKSE

SEQ ID NO: 18123 - protein, 10 aa, Artificial Sequence
  Description of Artificial Sequence: Synthetic epitope
FRKNEMKEQE

SEQ ID NO: 18124 - protein, 10 aa, Artificial Sequence
  Description of Artificial Sequence: Synthetic epitope
FRLQTEAQED

SEQ ID NO: 18125 - protein, 10 aa, Artificial Sequence
  Description of Artificial Sequence: Synthetic epitope
FRRIKTRTAS

SEQ ID NO: 18126 - protein, 10 aa, Artificial Sequence
  Description of Artificial Sequence: Synthetic epitope
FRSLKMVELF

SEQ ID NO: 18127 - protein, 10 aa, Artificial Sequence
  Description of Artificial Sequence: Synthetic epitope
FSFNKNASVP

SEQ ID NO: 18128 - protein, 10 aa, Artificial Sequence
  Description of Artificial Sequence: Synthetic epitope
FSKEKKQSSD

SEQ ID NO: 18129 - protein, 10 aa, Artificial Sequence
  Description of Artificial Sequence: Synthetic epitope
FSKVLVTIKK

SEQ ID NO: 18130 - protein, 10 aa, Artificial Sequence
  Description of Artificial Sequence: Synthetic epitope
FSLEKESLQQ

SEQ ID NO: 18131 - protein, 10 aa, Artificial Sequence
  Description of Artificial Sequence: Synthetic epitope
FSLNVEYAIQ

SEQ ID NO: 18132 - protein, 10 aa, Artificial Sequence
  Description of Artificial Sequence: Synthetic epitope
FSMKRTVSQQ

SEQ ID NO: 18133 - protein, 10 aa, Artificial Sequence
  Description of Artificial Sequence: Synthetic epitope
FSMKTSSASA

SEQ ID NO: 18134 - protein, 10 aa, Artificial Sequence
  Description of Artificial Sequence: Synthetic epitope
FSNIEALPAN

SEQ ID NO: 18135 - protein, 10 aa, Artificial Sequence
  Description of Artificial Sequence: Synthetic epitope
FSQRQSRRKS

SEQ ID NO: 18136 - protein, 10 aa, Artificial Sequence
  Description of Artificial Sequence: Synthetic epitope
FSSEITHKDV

SEQ ID NO: 18137 - protein, 10 aa, Artificial Sequence
  Description of Artificial Sequence: Synthetic epitope
FSSQKSTPSE

SEQ ID NO: 18138 - protein, 10 aa, Artificial Sequence
  Description of Artificial Sequence: Synthetic epitope
FSTAANSQPQ

SEQ ID NO: 18139 - protein, 10 aa, Artificial Sequence
  Description of Artificial Sequence: Synthetic epitope
FSTKSEVDET

SEQ ID NO: 18140 - protein, 10 aa, Artificial Sequence
  Description of Artificial Sequence: Synthetic epitope
FSTSDVSKLL

SEQ ID NO: 18141 - protein, 10 aa, Artificial Sequence
  Description of Artificial Sequence: Synthetic epitope
FSVVIQASKS

SEQ ID NO: 18142 - protein, 10 aa, Artificial Sequence
  Description of Artificial Sequence: Synthetic epitope
FSYSKSLHVH

SEQ ID NO: 18143 - protein, 10 aa, Artificial Sequence
  Description of Artificial Sequence: Synthetic epitope
FTARQEAQAE

SEQ ID NO: 18144 - protein, 10 aa, Artificial Sequence
  Description of Artificial Sequence: Synthetic epitope
FTFTSTSQMT

SEQ ID NO: 18145 - protein, 10 aa, Artificial Sequence
  Description of Artificial Sequence: Synthetic epitope
FTGMQTLEPS

SEQ ID NO: 18146 - protein, 10 aa, Artificial Sequence
  Description of Artificial Sequence: Synthetic epitope
FTKSSRSSRT

SEQ ID NO: 18147 - protein, 10 aa, Artificial Sequence
  Description of Artificial Sequence: Synthetic epitope
FTLSSELEGG

SEQ ID NO: 18148 - protein, 10 aa, Artificial Sequence
  Description of Artificial Sequence: Synthetic epitope
FTNVNSRMLY

SEQ ID NO: 18149 - protein, 10 aa, Artificial Sequence
  Description of Artificial Sequence: Synthetic epitope
FTSKMDLEKP

SEQ ID NO: 18150 - protein, 10 aa, Artificial Sequence
  Description of Artificial Sequence: Synthetic epitope
FTSSIATTET

SEQ ID NO: 18151 - protein, 10 aa, Artificial Sequence
  Description of Artificial Sequence: Synthetic epitope
FTTQAISQET

SEQ ID NO: 18152 - protein, 10 aa, Artificial Sequence
  Description of Artificial Sequence: Synthetic epitope
FTTSAKSVLK

SEQ ID NO: 18153 - protein, 10 aa, Artificial Sequence
  Description of Artificial Sequence: Synthetic epitope
FTVTDTYHQQ

SEQ ID NO: 18154 - protein, 10 aa, Artificial Sequence
  Description of Artificial Sequence: Synthetic epitope
FVADSRAQNQ

SEQ ID NO: 18155 - protein, 10 aa, Artificial Sequence
  Description of Artificial Sequence: Synthetic epitope
FVIIPELVLP

SEQ ID NO: 18156 - protein, 10 aa, Artificial Sequence
  Description of Artificial Sequence: Synthetic epitope
FVNLASSDIK

SEQ ID NO: 18157 - protein, 10 aa, Artificial Sequence
  Description of Artificial Sequence: Synthetic epitope
FVPSRMKYVY

SEQ ID NO: 18158 - protein, 10 aa, Artificial Sequence
  Description of Artificial Sequence: Synthetic epitope
FVTTSSEASS

SEQ ID NO: 18159 - protein, 10 aa, Artificial Sequence
  Description of Artificial Sequence: Synthetic epitope
FVVEPSEATN

SEQ ID NO: 18160 - protein, 10 aa, Artificial Sequence
  Description of Artificial Sequence: Synthetic epitope
FWAKRAKQRH

SEQ ID NO: 18161 - protein, 10 aa, Artificial Sequence
  Description of Artificial Sequence: Synthetic epitope
FWIESNQKRE

SEQ ID NO: 18162 - protein, 10 aa, Artificial Sequence
  Description of Artificial Sequence: Synthetic epitope
FYAKKMDKPM

SEQ ID NO: 18163 - protein, 10 aa, Artificial Sequence
  Description of Artificial Sequence: Synthetic epitope
FYKARKLNAY

SEQ ID NO: 18164 - protein, 10 aa, Artificial Sequence
  Description of Artificial Sequence: Synthetic epitope
FYLTTLRALY

SEQ ID NO: 18165 - protein, 10 aa, Artificial Sequence
  Description of Artificial Sequence: Synthetic epitope
GAAEKDGEAE

SEQ ID NO: 18166 - protein, 10 aa, Artificial Sequence
  Description of Artificial Sequence: Synthetic epitope
GAAGADASDS

SEQ ID NO: 18167 - protein, 10 aa, Artificial Sequence
  Description of Artificial Sequence: Synthetic epitope
GAAKALADEK

SEQ ID NO: 18168 - protein, 10 aa, Artificial Sequence
  Description of Artificial Sequence: Synthetic epitope
GAALRTARAG

SEQ ID NO: 18169 - protein, 10 aa, Artificial Sequence
  Description of Artificial Sequence: Synthetic epitope
GAAQLALDKS

SEQ ID NO: 18170 - protein, 10 aa, Artificial Sequence
  Description of Artificial Sequence: Synthetic epitope
GAAQVRIKIL

SEQ ID NO: 18171 - protein, 10 aa, Artificial Sequence
  Description of Artificial Sequence: Synthetic epitope
GAASAAFNST

SEQ ID NO: 18172 - protein, 10 aa, Artificial Sequence
  Description of Artificial Sequence: Synthetic epitope
GAASAELASE

SEQ ID NO: 18173 - protein, 10 aa, Artificial Sequence
  Description of Artificial Sequence: Synthetic epitope
GAASAQFVSR

SEQ ID NO: 18174 - protein, 10 aa, Artificial Sequence
  Description of Artificial Sequence: Synthetic epitope
GAAVAKPQAK

SEQ ID NO: 18175 - protein, 10 aa, Artificial Sequence
  Description of Artificial Sequence: Synthetic epitope
GAAVVTVQFE

SEQ ID NO: 18176 - protein, 10 aa, Artificial Sequence
  Description of Artificial Sequence: Synthetic epitope
GADATAEPMI

SEQ ID NO: 18177 - protein, 10 aa, Artificial Sequence
  Description of Artificial Sequence: Synthetic epitope
GADETVQGQG

SEQ ID NO: 18178 - protein, 10 aa, Artificial Sequence
  Description of Artificial Sequence: Synthetic epitope
GADVKAHHEV

SEQ ID NO: 18179 - protein, 10 aa, Artificial Sequence
  Description of Artificial Sequence: Synthetic epitope
GAEAQEAEEA

SEQ ID NO: 18180 - protein, 10 aa, Artificial Sequence
  Description of Artificial Sequence: Synthetic epitope
GAELETSTGP

SEQ ID NO: 18181 - protein, 10 aa, Artificial Sequence
  Description of Artificial Sequence: Synthetic epitope
GAGAAMEKTP

SEQ ID NO: 18182 - protein, 10 aa, Artificial Sequence
  Description of Artificial Sequence: Synthetic epitope
GAGPAVSQAQ

SEQ ID NO: 18183 - protein, 10 aa, Artificial Sequence
  Description of Artificial Sequence: Synthetic epitope
GAGREYSPAA

SEQ ID NO: 18184 - protein, 10 aa, Artificial Sequence
  Description of Artificial Sequence: Synthetic epitope
GAGTASKLTF

SEQ ID NO: 18185 - protein, 10 aa, Artificial Sequence
  Description of Artificial Sequence: Synthetic epitope
GAISQQIRYT

SEQ ID NO: 18186 - protein, 10 aa, Artificial Sequence
  Description of Artificial Sequence: Synthetic epitope
GAKALGKARR

SEQ ID NO: 18187 - protein, 10 aa, Artificial Sequence
  Description of Artificial Sequence: Synthetic epitope
GAKMPTNFVA

SEQ ID NO: 18188 - protein, 10 aa, Artificial Sequence
  Description of Artificial Sequence: Synthetic epitope
GAKQAAVVQV

SEQ ID NO: 18189 - protein, 10 aa, Artificial Sequence
  Description of Artificial Sequence: Synthetic epitope
GAKTNRADPK

SEQ ID NO: 18190 - protein, 10 aa, Artificial Sequence
  Description of Artificial Sequence: Synthetic epitope
GAKTVAARAL

SEQ ID NO: 18191 - protein, 10 aa, Artificial Sequence
  Description of Artificial Sequence: Synthetic epitope
GAKTYKMRYG

SEQ ID NO: 18192 - protein, 10 aa, Artificial Sequence
  Description of Artificial Sequence: Synthetic epitope
GAKVKRLNLE

SEQ ID NO: 18193 - protein, 10 aa, Artificial Sequence
  Description of Artificial Sequence: Synthetic epitope
GAKVNQPRQD

SEQ ID NO: 18194 - protein, 10 aa, Artificial Sequence
  Description of Artificial Sequence: Synthetic epitope
GALAADIDID

SEQ ID NO: 18195 - protein, 10 aa, Artificial Sequence
  Description of Artificial Sequence: Synthetic epitope
GALASSRRSS

SEQ ID NO: 18196 - protein, 10 aa, Artificial Sequence
  Description of Artificial Sequence: Synthetic epitope
GALGALATLN

SEQ ID NO: 18197 - protein, 10 aa, Artificial Sequence
  Description of Artificial Sequence: Synthetic epitope
GALQHSRSMS

SEQ ID NO: 18198 - protein, 10 aa, Artificial Sequence
  Description of Artificial Sequence: Synthetic epitope
GALVARAAVL

SEQ ID NO: 18199 - protein, 10 aa, Artificial Sequence
  Description of Artificial Sequence: Synthetic epitope
GALVNNFAAW

SEQ ID NO: 18200 - protein, 10 aa, Artificial Sequence
  Description of Artificial Sequence: Synthetic epitope
GAMVALAQNW

SEQ ID NO: 18201 - protein, 10 aa, Artificial Sequence
  Description of Artificial Sequence: Synthetic epitope
GANAEDTTET

SEQ ID NO: 18202 - protein, 10 aa, Artificial Sequence
  Description of Artificial Sequence: Synthetic epitope
GANQRETPTS

SEQ ID NO: 18203 - protein, 10 aa, Artificial Sequence
  Description of Artificial Sequence: Synthetic epitope
GANRAEAQQR

SEQ ID NO: 18204 - protein, 10 aa, Artificial Sequence
  Description of Artificial Sequence: Synthetic epitope
GAQAQMDQNP

SEQ ID NO: 18205 - protein, 10 aa, Artificial Sequence
  Description of Artificial Sequence: Synthetic epitope
GAQNVARRIE

SEQ ID NO: 18206 - protein, 10 aa, Artificial Sequence
  Description of Artificial Sequence: Synthetic epitope
GAQRSAEAMS

SEQ ID NO: 18207 - protein, 10 aa, Artificial Sequence
  Description of Artificial Sequence: Synthetic epitope
GAQVALAASV

SEQ ID NO: 18208 - protein, 10 aa, Artificial Sequence
  Description of Artificial Sequence: Synthetic epitope
GARAETQGAN

SEQ ID NO: 18209 - protein, 10 aa, Artificial Sequence
  Description of Artificial Sequence: Synthetic epitope
GARKATKSKL

SEQ ID NO: 18210 - protein, 10 aa, Artificial Sequence
  Description of Artificial Sequence: Synthetic epitope
GARKPASSKY

SEQ ID NO: 18211 - protein, 10 aa, Artificial Sequence
  Description of Artificial Sequence: Synthetic epitope
GARNLLKSIA

SEQ ID NO: 18212 - protein, 10 aa, Artificial Sequence
  Description of Artificial Sequence: Synthetic epitope
GARSKVKSSK

SEQ ID NO: 18213 - protein, 10 aa, Artificial Sequence
  Description of Artificial Sequence: Synthetic epitope
GASDVENNEG

SEQ ID NO: 18214 - protein, 10 aa, Artificial Sequence
  Description of Artificial Sequence: Synthetic epitope
GASEKLSLLS

SEQ ID NO: 18215 - protein, 10 aa, Artificial Sequence
  Description of Artificial Sequence: Synthetic epitope
GASEMVSNQP

SEQ ID NO: 18216 - protein, 10 aa, Artificial Sequence
  Description of Artificial Sequence: Synthetic epitope
GASFAASMQG

SEQ ID NO: 18217 - protein, 10 aa, Artificial Sequence
  Description of Artificial Sequence: Synthetic epitope
GASISVTTDE

SEQ ID NO: 18218 - protein, 10 aa, Artificial Sequence
  Description of Artificial Sequence: Synthetic epitope
GASKKLKKAT

SEQ ID NO: 18219 - protein, 10 aa, Artificial Sequence
  Description of Artificial Sequence: Synthetic epitope
GASLQQTAEE

SEQ ID NO: 18220 - protein, 10 aa, Artificial Sequence
  Description of Artificial Sequence: Synthetic epitope
GASVHAASSD

SEQ ID NO: 18221 - protein, 10 aa, Artificial Sequence
  Description of Artificial Sequence: Synthetic epitope
GATAASKPLQ

SEQ ID NO: 18222 - protein, 10 aa, Artificial Sequence
  Description of Artificial Sequence: Synthetic epitope
GATADAARTR

SEQ ID NO: 18223 - protein, 10 aa, Artificial Sequence
  Description of Artificial Sequence: Synthetic epitope
GATKQRIQDQ

SEQ ID NO: 18224 - protein, 10 aa, Artificial Sequence
  Description of Artificial Sequence: Synthetic epitope
GATSANAPNS

SEQ ID NO: 18225 - protein, 10 aa, Artificial Sequence
  Description of Artificial Sequence: Synthetic epitope
GATSSQAQFH

SEQ ID NO: 18226 - protein, 10 aa, Artificial Sequence
  Description of Artificial Sequence: Synthetic epitope
GAVESTSQAG

SEQ ID NO: 18227 - protein, 10 aa, Artificial Sequence
  Description of Artificial Sequence: Synthetic epitope
GAVMRALDDM

SEQ ID NO: 18228 - protein, 10 aa, Artificial Sequence
  Description of Artificial Sequence: Synthetic epitope
GAVQEIATSE

SEQ ID NO: 18229 - protein, 10 aa, Artificial Sequence
  Description of Artificial Sequence: Synthetic epitope
GAVQRKNVQT

SEQ ID NO: 18230 - protein, 10 aa, Artificial Sequence
  Description of Artificial Sequence: Synthetic epitope
GAVSDDLSIH

SEQ ID NO: 18231 - protein, 10 aa, Artificial Sequence
  Description of Artificial Sequence: Synthetic epitope
GAVSQRIQES

SEQ ID NO: 18232 - protein, 10 aa, Artificial Sequence
  Description of Artificial Sequence: Synthetic epitope
GAYRARALEL

SEQ ID NO: 18233 - protein, 10 aa, Artificial Sequence
  Description of Artificial Sequence: Synthetic epitope
GDAAVALNKG

SEQ ID NO: 18234 - protein, 10 aa, Artificial Sequence
  Description of Artificial Sequence: Synthetic epitope
GDAVLNEAAQ

SEQ ID NO: 18235 - protein, 10 aa, Artificial Sequence
  Description of Artificial Sequence: Synthetic epitope
GDDNGKKANN

SEQ ID NO: 18236 - protein, 10 aa, Artificial Sequence
  Description of Artificial Sequence: Synthetic epitope
GDDQKKVTPQ

SEQ ID NO: 18237 - protein, 10 aa, Artificial Sequence
  Description of Artificial Sequence: Synthetic epitope
GDDVGKAANN

SEQ ID NO: 18238 - protein, 10 aa, Artificial Sequence
  Description of Artificial Sequence: Synthetic epitope
GDEASDMAAE

SEQ ID NO: 18239 - protein, 10 aa, Artificial Sequence
  Description of Artificial Sequence: Synthetic epitope
GDEILQSSKQ

SEQ ID NO: 18240 - protein, 10 aa, Artificial Sequence
  Description of Artificial Sequence: Synthetic epitope
GDEKEEAVVE

SEQ ID NO: 18241 - protein, 10 aa, Artificial Sequence
  Description of Artificial Sequence: Synthetic epitope
GDESEESSTQ

SEQ ID NO: 18242 - protein, 10 aa, Artificial Sequence
  Description of Artificial Sequence: Synthetic epitope
GDEVQTLSGS

SEQ ID NO: 18243 - protein, 10 aa, Artificial Sequence
  Description of Artificial Sequence: Synthetic epitope
GDFAQAAQQL

SEQ ID NO: 18244 - protein, 10 aa, Artificial Sequence
  Description of Artificial Sequence: Synthetic epitope
GDGARSSEDG

SEQ ID NO: 18245 - protein, 10 aa, Artificial Sequence
  Description of Artificial Sequence: Synthetic epitope
GDGRSINVKS

SEQ ID NO: 18246 - protein, 10 aa, Artificial Sequence
  Description of Artificial Sequence: Synthetic epitope
GDKAAVKSEQ

SEQ ID NO: 18247 - protein, 10 aa, Artificial Sequence
  Description of Artificial Sequence: Synthetic epitope
GDKKAAKVQK

SEQ ID NO: 18248 - protein, 10 aa, Artificial Sequence
  Description of Artificial Sequence: Synthetic epitope
GDKKAAKVQK

SEQ ID NO: 18249 - protein, 10 aa, Artificial Sequence
  Description of Artificial Sequence: Synthetic epitope
GDKKNVAWKI

SEQ ID NO: 18250 - protein, 10 aa, Artificial Sequence
  Description of Artificial Sequence: Synthetic epitope
GDKKSKNRST

SEQ ID NO: 18251 - protein, 10 aa, Artificial Sequence
  Description of Artificial Sequence: Synthetic epitope
GDKKSLEGDL

SEQ ID NO: 18252 - protein, 10 aa, Artificial Sequence
  Description of Artificial Sequence: Synthetic epitope
GDKMTKTGSH

SEQ ID NO: 18253 - protein, 10 aa, Artificial Sequence
  Description of Artificial Sequence: Synthetic epitope
GDKQMSQRES

SEQ ID NO: 18254 - protein, 10 aa, Artificial Sequence
  Description of Artificial Sequence: Synthetic epitope
GDLAQMEQSV

SEQ ID NO: 18255 - protein, 10 aa, Artificial Sequence
  Description of Artificial Sequence: Synthetic epitope
GDLLRSEVSS

SEQ ID NO: 18256 - protein, 10 aa, Artificial Sequence
  Description of Artificial Sequence: Synthetic epitope
GDMSLLSNLE

SEQ ID NO: 18257 - protein, 10 aa, Artificial Sequence
  Description of Artificial Sequence: Synthetic epitope
GDPTSLQASS

SEQ ID NO: 18258 - protein, 10 aa, Artificial Sequence
  Description of Artificial Sequence: Synthetic epitope
GDSKMAETSV

SEQ ID NO: 18259 - protein, 10 aa, Artificial Sequence
  Description of Artificial Sequence: Synthetic epitope
GDSLNSDEGD

SEQ ID NO: 18260 - protein, 10 aa, Artificial Sequence
  Description of Artificial Sequence: Synthetic epitope
GDSVASLGTQ

SEQ ID NO: 18261 - protein, 10 aa, Artificial Sequence
  Description of Artificial Sequence: Synthetic epitope
GDSVKTIAKL

SEQ ID NO: 18262 - protein, 10 aa, Artificial Sequence
  Description of Artificial Sequence: Synthetic epitope
GDTAIRVQAD

SEQ ID NO: 18263 - protein, 10 aa, Artificial Sequence
  Description of Artificial Sequence: Synthetic epitope
GDTAISSEEK

SEQ ID NO: 18264 - protein, 10 aa, Artificial Sequence
  Description of Artificial Sequence: Synthetic epitope
GDTPHASNLS

SEQ ID NO: 18265 - protein, 10 aa, Artificial Sequence
  Description of Artificial Sequence: Synthetic epitope
GDTRLGQVSA

SEQ ID NO: 18266 - protein, 10 aa, Artificial Sequence
  Description of Artificial Sequence: Synthetic epitope
GDVQSTIEPR

SEQ ID NO: 18267 - protein, 10 aa, Artificial Sequence
  Description of Artificial Sequence: Synthetic epitope
GDWGVASRQH

SEQ ID NO: 18268 - protein, 10 aa, Artificial Sequence
  Description of Artificial Sequence: Synthetic epitope
GDYSTASLQS

SEQ ID NO: 18269 - protein, 10 aa, Artificial Sequence
  Description of Artificial Sequence: Synthetic epitope
GEAEQSKKDK

SEQ ID NO: 18270 - protein, 10 aa, Artificial Sequence
  Description of Artificial Sequence: Synthetic epitope
GEALKQLPKQ

SEQ ID NO: 18271 - protein, 10 aa, Artificial Sequence
  Description of Artificial Sequence: Synthetic epitope
GEANKAIQDH

SEQ ID NO: 18272 - protein, 10 aa, Artificial Sequence
  Description of Artificial Sequence: Synthetic epitope
GEAQDIVKEP

SEQ ID NO: 18273 - protein, 10 aa, Artificial Sequence
  Description of Artificial Sequence: Synthetic epitope
GEAQIAASAE

SEQ ID NO: 18274 - protein, 10 aa, Artificial Sequence
  Description of Artificial Sequence: Synthetic epitope
GEASRVSVAD

SEQ ID NO: 18275 - protein, 10 aa, Artificial Sequence
  Description of Artificial Sequence: Synthetic epitope
GEAVKTDGKK

SEQ ID NO: 18276 - protein, 10 aa, Artificial Sequence
  Description of Artificial Sequence: Synthetic epitope
GEDASAIQRP

SEQ ID NO: 18277 - protein, 10 aa, Artificial Sequence
  Description of Artificial Sequence: Synthetic epitope
GEDSKALSQK

SEQ ID NO: 18278 - protein, 10 aa, Artificial Sequence
  Description of Artificial Sequence: Synthetic epitope
GEEAALKRPE

SEQ ID NO: 18279 - protein, 10 aa, Artificial Sequence
  Description of Artificial Sequence: Synthetic epitope
GEEGITAEAI

SEQ ID NO: 18280 - protein, 10 aa, Artificial Sequence
  Description of Artificial Sequence: Synthetic epitope
GEEIEAERAS

SEQ ID NO: 18281 - protein, 10 aa, Artificial Sequence
  Description of Artificial Sequence: Synthetic epitope
GEELDASIEP

SEQ ID NO: 18282 - protein, 10 aa, Artificial Sequence
  Description of Artificial Sequence: Synthetic epitope
GEELTSEESV

SEQ ID NO: 18283 - protein, 10 aa, Artificial Sequence
  Description of Artificial Sequence: Synthetic epitope
GEENAEAEGQ

SEQ ID NO: 18284 - protein, 10 aa, Artificial Sequence
  Description of Artificial Sequence: Synthetic epitope
GEEPGIKSQL

SEQ ID NO: 18285 - protein, 10 aa, Artificial Sequence
  Description of Artificial Sequence: Synthetic epitope
GEEPQASAQD

SEQ ID NO: 18286 - protein, 10 aa, Artificial Sequence
  Description of Artificial Sequence: Synthetic epitope
GEERVDSLVS

SEQ ID NO: 18287 - protein, 10 aa, Artificial Sequence
  Description of Artificial Sequence: Synthetic epitope
GEESILEEVL

SEQ ID NO: 18288 - protein, 10 aa, Artificial Sequence
  Description of Artificial Sequence: Synthetic epitope
GEESKVARLK

SEQ ID NO: 18289 - protein, 10 aa, Artificial Sequence
  Description of Artificial Sequence: Synthetic epitope
GEESRQSQAN

SEQ ID NO: 18290 - protein, 10 aa, Artificial Sequence
  Description of Artificial Sequence: Synthetic epitope
GEFVKYSIRD

SEQ ID NO: 18291 - protein, 10 aa, Artificial Sequence
  Description of Artificial Sequence: Synthetic epitope
GEGAKTREYK

SEQ ID NO: 18292 - protein, 10 aa, Artificial Sequence
  Description of Artificial Sequence: Synthetic epitope
GEGEKETSKP

SEQ ID NO: 18293 - protein, 10 aa, Artificial Sequence
  Description of Artificial Sequence: Synthetic epitope
GEGLVLSLEE

SEQ ID NO: 18294 - protein, 10 aa, Artificial Sequence
  Description of Artificial Sequence: Synthetic epitope
GEGVESQSIK

SEQ ID NO: 18295 - protein, 10 aa, Artificial Sequence
  Description of Artificial Sequence: Synthetic epitope
GEHSITTRDL

SEQ ID NO: 18296 - protein, 10 aa, Artificial Sequence
  Description of Artificial Sequence: Synthetic epitope
GEHTQNVPLS

SEQ ID NO: 18297 - protein, 10 aa, Artificial Sequence
  Description of Artificial Sequence: Synthetic epitope
GEHYQQVFNG

SEQ ID NO: 18298 - protein, 10 aa, Artificial Sequence
  Description of Artificial Sequence: Synthetic epitope
GEINQTLVSE

SEQ ID NO: 18299 - protein, 10 aa, Artificial Sequence
  Description of Artificial Sequence: Synthetic epitope
GEIQQYQNQP

SEQ ID NO: 18300 - protein, 10 aa, Artificial Sequence
  Description of Artificial Sequence: Synthetic epitope
GEISKKIEPK

SEQ ID NO: 18301 - protein, 10 aa, Artificial Sequence
  Description of Artificial Sequence: Synthetic epitope
GEKEAAGTTA

SEQ ID NO: 18302 - protein, 10 aa, Artificial Sequence
  Description of Artificial Sequence: Synthetic epitope
GEKEKKRDSS

SEQ ID NO: 18303 - protein, 10 aa, Artificial Sequence
  Description of Artificial Sequence: Synthetic epitope
GEKEQKENSE

SEQ ID NO: 18304 - protein, 10 aa, Artificial Sequence
  Description of Artificial Sequence: Synthetic epitope
GEKKTGAKRQ

SEQ ID NO: 18305 - protein, 10 aa, Artificial Sequence
  Description of Artificial Sequence: Synthetic epitope
GEKLALFQAI

SEQ ID NO: 18306 - protein, 10 aa, Artificial Sequence
  Description of Artificial Sequence: Synthetic epitope
GEKLGTTSSV

SEQ ID NO: 18307 - protein, 10 aa, Artificial Sequence
  Description of Artificial Sequence: Synthetic epitope
GEKNQSKLIT

SEQ ID NO: 18308 - protein, 10 aa, Artificial Sequence
  Description of Artificial Sequence: Synthetic epitope
GEKRASTAKQ

SEQ ID NO: 18309 - protein, 10 aa, Artificial Sequence
  Description of Artificial Sequence: Synthetic epitope
GEKSATPSRK

SEQ ID NO: 18310 - protein, 10 aa, Artificial Sequence
  Description of Artificial Sequence: Synthetic epitope
GEKSESREEK

SEQ ID NO: 18311 - protein, 10 aa, Artificial Sequence
  Description of Artificial Sequence: Synthetic epitope
GEKSKGSKRA

SEQ ID NO: 18312 - protein, 10 aa, Artificial Sequence
  Description of Artificial Sequence: Synthetic epitope
GEKTDTKGTK

SEQ ID NO: 18313 - protein, 10 aa, Artificial Sequence
  Description of Artificial Sequence: Synthetic epitope
GEKVSLAQAK

SEQ ID NO: 18314 - protein, 10 aa, Artificial Sequence
  Description of Artificial Sequence: Synthetic epitope
GEKVSLAQAK

SEQ ID NO: 18315 - protein, 10 aa, Artificial Sequence
  Description of Artificial Sequence: Synthetic epitope
GEKVSLAQAK

SEQ ID NO: 18316 - protein, 10 aa, Artificial Sequence
  Description of Artificial Sequence: Synthetic epitope
GELASLGQEL

SEQ ID NO: 18317 - protein, 10 aa, Artificial Sequence
  Description of Artificial Sequence: Synthetic epitope
GELGSSLSSE

SEQ ID NO: 18318 - protein, 10 aa, Artificial Sequence
  Description of Artificial Sequence: Synthetic epitope
GELQNASPKQ

SEQ ID NO: 18319 - protein, 10 aa, Artificial Sequence
  Description of Artificial Sequence: Synthetic epitope
GELQRSVHAW

SEQ ID NO: 18320 - protein, 10 aa, Artificial Sequence
  Description of Artificial Sequence: Synthetic epitope
GELTASVAKR

SEQ ID NO: 18321 - protein, 10 aa, Artificial Sequence
  Description of Artificial Sequence: Synthetic epitope
GELYVDKEYL

SEQ ID NO: 18322 - protein, 10 aa, Artificial Sequence
  Description of Artificial Sequence: Synthetic epitope
GEMAIELHLQ

SEQ ID NO: 18323 - protein, 10 aa, Artificial Sequence
  Description of Artificial Sequence: Synthetic epitope
GEMASSAQDE

SEQ ID NO: 18324 - protein, 10 aa, Artificial Sequence
  Description of Artificial Sequence: Synthetic epitope
GEMSLEEHSQ

SEQ ID NO: 18325 - protein, 10 aa, Artificial Sequence
  Description of Artificial Sequence: Synthetic epitope
GEMSRELADD

SEQ ID NO: 18326 - protein, 10 aa, Artificial Sequence
  Description of Artificial Sequence: Synthetic epitope
GENAIAVRTK

SEQ ID NO: 18327 - protein, 10 aa, Artificial Sequence
  Description of Artificial Sequence: Synthetic epitope
GENATLSYDQ

SEQ ID NO: 18328 - protein, 10 aa, Artificial Sequence
  Description of Artificial Sequence: Synthetic epitope
GENDSYSRNV

SEQ ID NO: 18329 - protein, 10 aa, Artificial Sequence
  Description of Artificial Sequence: Synthetic epitope
GENEAMESSG

SEQ ID NO: 18330 - protein, 10 aa, Artificial Sequence
  Description of Artificial Sequence: Synthetic epitope
GEPIKREDEE

SEQ ID NO: 18331 - protein, 10 aa, Artificial Sequence
  Description of Artificial Sequence: Synthetic epitope
GEPRAATGDL

SEQ ID NO: 18332 - protein, 10 aa, Artificial Sequence
  Description of Artificial Sequence: Synthetic epitope
GEQIQTISVQ

SEQ ID NO: 18333 - protein, 10 aa, Artificial Sequence
  Description of Artificial Sequence: Synthetic epitope
GEQSKKLLTK

SEQ ID NO: 18334 - protein, 10 aa, Artificial Sequence
  Description of Artificial Sequence: Synthetic epitope
GEQVRSAPEV

SEQ ID NO: 18335 - protein, 10 aa, Artificial Sequence
  Description of Artificial Sequence: Synthetic epitope
GERASAAGAE

SEQ ID NO: 18336 - protein, 10 aa, Artificial Sequence
  Description of Artificial Sequence: Synthetic epitope
GERKTQKAAS

SEQ ID NO: 18337 - protein, 10 aa, Artificial Sequence
  Description of Artificial Sequence: Synthetic epitope
GERSALSSAS

SEQ ID NO: 18338 - protein, 10 aa, Artificial Sequence
  Description of Artificial Sequence: Synthetic epitope
GERTKSVMME

SEQ ID NO: 18339 - protein, 10 aa, Artificial Sequence
  Description of Artificial Sequence: Synthetic epitope
GESAAKKVAQ

SEQ ID NO: 18340 - protein, 10 aa, Artificial Sequence
  Description of Artificial Sequence: Synthetic epitope
GESAGKISQE

SEQ ID NO: 18341 - protein, 10 aa, Artificial Sequence
  Description of Artificial Sequence: Synthetic epitope
GESDTGSSAE

SEQ ID NO: 18342 - protein, 10 aa, Artificial Sequence
  Description of Artificial Sequence: Synthetic epitope
GESEGTREES

SEQ ID NO: 18343 - protein, 10 aa, Artificial Sequence
  Description of Artificial Sequence: Synthetic epitope
GESHWWMKGS

SEQ ID NO: 18344 - protein, 10 aa, Artificial Sequence
  Description of Artificial Sequence: Synthetic epitope
GESLKLRSLR

SEQ ID NO: 18345 - protein, 10 aa, Artificial Sequence
  Description of Artificial Sequence: Synthetic epitope
GESLSLTGDA

SEQ ID NO: 18346 - protein, 10 aa, Artificial Sequence
  Description of Artificial Sequence: Synthetic epitope
GESNTHQDIE

SEQ ID NO: 18347 - protein, 10 aa, Artificial Sequence
  Description of Artificial Sequence: Synthetic epitope
GESRVSLQQH

SEQ ID NO: 18348 - protein, 10 aa, Artificial Sequence
  Description of Artificial Sequence: Synthetic epitope
GESSGNLNDP

SEQ ID NO: 18349 - protein, 10 aa, Artificial Sequence
  Description of Artificial Sequence: Synthetic epitope
GESTKIAGQI

SEQ ID NO: 18350 - protein, 10 aa, Artificial Sequence
  Description of Artificial Sequence: Synthetic epitope
GESVSSGFKL

SEQ ID NO: 18351 - protein, 10 aa, Artificial Sequence
  Description of Artificial Sequence: Synthetic epitope
GETAKVKVEA

SEQ ID NO: 18352 - protein, 10 aa, Artificial Sequence
  Description of Artificial Sequence: Synthetic epitope
GETAQGREAR

SEQ ID NO: 18353 - protein, 10 aa, Artificial Sequence
  Description of Artificial Sequence: Synthetic epitope
GETARSIEST

SEQ ID NO: 18354 - protein, 10 aa, Artificial Sequence
  Description of Artificial Sequence: Synthetic epitope
GETEEDHVQT

SEQ ID NO: 18355 - protein, 10 aa, Artificial Sequence
  Description of Artificial Sequence: Synthetic epitope
GETETEVRAE

SEQ ID NO: 18356 - protein, 10 aa, Artificial Sequence
  Description of Artificial Sequence: Synthetic epitope
GETIAIIETS

SEQ ID NO: 18357 - protein, 10 aa, Artificial Sequence
  Description of Artificial Sequence: Synthetic epitope
GETKESTKTE

SEQ ID NO: 18358 - protein, 10 aa, Artificial Sequence
  Description of Artificial Sequence: Synthetic epitope
GETKSSRSDV

SEQ ID NO: 18359 - protein, 10 aa, Artificial Sequence
  Description of Artificial Sequence: Synthetic epitope
GETKTAERDV

SEQ ID NO: 18360 - protein, 10 aa, Artificial Sequence
  Description of Artificial Sequence: Synthetic epitope
GETRTTSTSV

SEQ ID NO: 18361 - protein, 10 aa, Artificial Sequence
  Description of Artificial Sequence: Synthetic epitope
GETTQKEGTQ

SEQ ID NO: 18362 - protein, 10 aa, Artificial Sequence
  Description of Artificial Sequence: Synthetic epitope
GEVAQAQKVL

SEQ ID NO: 18363 - protein, 10 aa, Artificial Sequence
  Description of Artificial Sequence: Synthetic epitope
GEVEQIAMMK

SEQ ID NO: 18364 - protein, 10 aa, Artificial Sequence
  Description of Artificial Sequence: Synthetic epitope
GEVFEQQVKE

SEQ ID NO: 18365 - protein, 10 aa, Artificial Sequence
  Description of Artificial Sequence: Synthetic epitope
GEVGSKKYLV

SEQ ID NO: 18366 - protein, 10 aa, Artificial Sequence
  Description of Artificial Sequence: Synthetic epitope
GEVKMLEKQT

SEQ ID NO: 18367 - protein, 10 aa, Artificial Sequence
  Description of Artificial Sequence: Synthetic epitope
GEVLQIAANQ

SEQ ID NO: 18368 - protein, 10 aa, Artificial Sequence
  Description of Artificial Sequence: Synthetic epitope
GEVQAMLGQS

SEQ ID NO: 18369 - protein, 10 aa, Artificial Sequence
  Description of Artificial Sequence: Synthetic epitope
GEVQNKLVSL

SEQ ID NO: 18370 - protein, 10 aa, Artificial Sequence
  Description of Artificial Sequence: Synthetic epitope
GEVQTKIFEE

SEQ ID NO: 18371 - protein, 10 aa, Artificial Sequence
  Description of Artificial Sequence: Synthetic epitope
GEVSKTLDLL

SEQ ID NO: 18372 - protein, 10 aa, Artificial Sequence
  Description of Artificial Sequence: Synthetic epitope
GEVSNSSEHE

SEQ ID NO: 18373 - protein, 10 aa, Artificial Sequence
  Description of Artificial Sequence: Synthetic epitope
GEVVEQKRAP

SEQ ID NO: 18374 - protein, 10 aa, Artificial Sequence
  Description of Artificial Sequence: Synthetic epitope
GEWAKYSNFD

SEQ ID NO: 18375 - protein, 10 aa, Artificial Sequence
  Description of Artificial Sequence: Synthetic epitope
GFDQFQLDGA

SEQ ID NO: 18376 - protein, 10 aa, Artificial Sequence
  Description of Artificial Sequence: Synthetic epitope
GFEASVVSES

SEQ ID NO: 18377 - protein, 10 aa, Artificial Sequence
  Description of Artificial Sequence: Synthetic epitope
GFGVKRAYYN

SEQ ID NO: 18378 - protein, 10 aa, Artificial Sequence
  Description of Artificial Sequence: Synthetic epitope
GFHSMKVKVM

SEQ ID NO: 18379 - protein, 10 aa, Artificial Sequence
  Description of Artificial Sequence: Synthetic epitope
GFNIAQVLGQ

SEQ ID NO: 18380 - protein, 10 aa, Artificial Sequence
  Description of Artificial Sequence: Synthetic epitope
GFNNIADIEI

SEQ ID NO: 18381 - protein, 10 aa, Artificial Sequence
  Description of Artificial Sequence: Synthetic epitope
GFNQINVKNQ

SEQ ID NO: 18382 - protein, 10 aa, Artificial Sequence
  Description of Artificial Sequence: Synthetic epitope
GFQPEMAFSM

SEQ ID NO: 18383 - protein, 10 aa, Artificial Sequence
  Description of Artificial Sequence: Synthetic epitope
GFQWEYQSAQ

SEQ ID NO: 18384 - protein, 10 aa, Artificial Sequence
  Description of Artificial Sequence: Synthetic epitope
GFSRSLVKQT

SEQ ID NO: 18385 - protein, 10 aa, Artificial Sequence
  Description of Artificial Sequence: Synthetic epitope
GFSVAQATSS

SEQ ID NO: 18386 - protein, 10 aa, Artificial Sequence
  Description of Artificial Sequence: Synthetic epitope
GFTSQEDQEM

SEQ ID NO: 18387 - protein, 10 aa, Artificial Sequence
  Description of Artificial Sequence: Synthetic epitope
GFVKDIMLNK

SEQ ID NO: 18388 - protein, 10 aa, Artificial Sequence
  Description of Artificial Sequence: Synthetic epitope
GGAEREVALE

SEQ ID NO: 18389 - protein, 10 aa, Artificial Sequence
  Description of Artificial Sequence: Synthetic epitope
GGAEVSEPAE

SEQ ID NO: 18390 - protein, 10 aa, Artificial Sequence
  Description of Artificial Sequence: Synthetic epitope
GGAKAEADGG

SEQ ID NO: 18391 - protein, 10 aa, Artificial Sequence
  Description of Artificial Sequence: Synthetic epitope
GGAQSQGVKE

SEQ ID NO: 18392 - protein, 10 aa, Artificial Sequence
  Description of Artificial Sequence: Synthetic epitope
GGARSTDASL

SEQ ID NO: 18393 - protein, 10 aa, Artificial Sequence
  Description of Artificial Sequence: Synthetic epitope
GGATRDSAAS

SEQ ID NO: 18394 - protein, 10 aa, Artificial Sequence
  Description of Artificial Sequence: Synthetic epitope
GGDIVASSQR

SEQ ID NO: 18395 - protein, 10 aa, Artificial Sequence
  Description of Artificial Sequence: Synthetic epitope
GGDLSQAASP

SEQ ID NO: 18396 - protein, 10 aa, Artificial Sequence
  Description of Artificial Sequence: Synthetic epitope
GGDSAQSKSK

SEQ ID NO: 18397 - protein, 10 aa, Artificial Sequence
  Description of Artificial Sequence: Synthetic epitope
GGEAAKAAPE

SEQ ID NO: 18398 - protein, 10 aa, Artificial Sequence
  Description of Artificial Sequence: Synthetic epitope
GGEAALASAR

SEQ ID NO: 18399 - protein, 10 aa, Artificial Sequence
  Description of Artificial Sequence: Synthetic epitope
GGEASSQSTH

SEQ ID NO: 18400 - protein, 10 aa, Artificial Sequence
  Description of Artificial Sequence: Synthetic epitope
GGETESMLLN

SEQ ID NO: 18401 - protein, 10 aa, Artificial Sequence
  Description of Artificial Sequence: Synthetic epitope
GGHLGESSED

SEQ ID NO: 18402 - protein, 10 aa, Artificial Sequence
  Description of Artificial Sequence: Synthetic epitope
GGHSTSTSTS

SEQ ID NO: 18403 - protein, 10 aa, Artificial Sequence
  Description of Artificial Sequence: Synthetic epitope
GGKELKTQQR

SEQ ID NO: 18404 - protein, 10 aa, Artificial Sequence
  Description of Artificial Sequence: Synthetic epitope
GGLEKAEKKE

SEQ ID NO: 18405 - protein, 10 aa, Artificial Sequence
  Description of Artificial Sequence: Synthetic epitope
GGLIMTSDYQ

SEQ ID NO: 18406 - protein, 10 aa, Artificial Sequence
  Description of Artificial Sequence: Synthetic epitope
GGLRAQSADT

SEQ ID NO: 18407 - protein, 10 aa, Artificial Sequence
  Description of Artificial Sequence: Synthetic epitope
GGLVSIAGEP

SEQ ID NO: 18408 - protein, 10 aa, Artificial Sequence
  Description of Artificial Sequence: Synthetic epitope
GGPTQTMLDR

SEQ ID NO: 18409 - protein, 10 aa, Artificial Sequence
  Description of Artificial Sequence: Synthetic epitope
GGQAVQVQGQ

SEQ ID NO: 18410 - protein, 10 aa, Artificial Sequence
  Description of Artificial Sequence: Synthetic epitope
GGQQKFRVDM

SEQ ID NO: 18411 - protein, 10 aa, Artificial Sequence
  Description of Artificial Sequence: Synthetic epitope
GGRFESSYRN

SEQ ID NO: 18412 - protein, 10 aa, Artificial Sequence
  Description of Artificial Sequence: Synthetic epitope
GGRKEIASDS

SEQ ID NO: 18413 - protein, 10 aa, Artificial Sequence
  Description of Artificial Sequence: Synthetic epitope
GGRLGSSREH

SEQ ID NO: 18414 - protein, 10 aa, Artificial Sequence
  Description of Artificial Sequence: Synthetic epitope
GGRLIRVRGT

SEQ ID NO: 18415 - protein, 10 aa, Artificial Sequence
  Description of Artificial Sequence: Synthetic epitope
GGRTSKRKKT

SEQ ID NO: 18416 - protein, 10 aa, Artificial Sequence
  Description of Artificial Sequence: Synthetic epitope
GGSAAQKQKI

SEQ ID NO: 18417 - protein, 10 aa, Artificial Sequence
  Description of Artificial Sequence: Synthetic epitope
GGSEAEQVQG

SEQ ID NO: 18418 - protein, 10 aa, Artificial Sequence
  Description of Artificial Sequence: Synthetic epitope
GGSEAYRHMK

SEQ ID NO: 18419 - protein, 10 aa, Artificial Sequence
  Description of Artificial Sequence: Synthetic epitope
GGSLETVAEG

SEQ ID NO: 18420 - protein, 10 aa, Artificial Sequence
  Description of Artificial Sequence: Synthetic epitope
GGSLQLQSLQ

SEQ ID NO: 18421 - protein, 10 aa, Artificial Sequence
  Description of Artificial Sequence: Synthetic epitope
GGSSKSRAAP

SEQ ID NO: 18422 - protein, 10 aa, Artificial Sequence
  Description of Artificial Sequence: Synthetic epitope
GGSSTLSRRN

SEQ ID NO: 18423 - protein, 10 aa, Artificial Sequence
  Description of Artificial Sequence: Synthetic epitope
GGSTAAEEAS

SEQ ID NO: 18424 - protein, 10 aa, Artificial Sequence
  Description of Artificial Sequence: Synthetic epitope
GGSVESVSLA

SEQ ID NO: 18425 - protein, 10 aa, Artificial Sequence
  Description of Artificial Sequence: Synthetic epitope
GGSVKETAAE

SEQ ID NO: 18426 - protein, 10 aa, Artificial Sequence
  Description of Artificial Sequence: Synthetic epitope
GGTATQKAKS

SEQ ID NO: 18427 - protein, 10 aa, Artificial Sequence
  Description of Artificial Sequence: Synthetic epitope
GGVEKAVRAA

SEQ ID NO: 18428 - protein, 10 aa, Artificial Sequence
  Description of Artificial Sequence: Synthetic epitope
GGVTRTTNEA

SEQ ID NO: 18429 - protein, 10 aa, Artificial Sequence
  Description of Artificial Sequence: Synthetic epitope
GGWRYAQAHS

SEQ ID NO: 18430 - protein, 10 aa, Artificial Sequence
  Description of Artificial Sequence: Synthetic epitope
GGYANSKAVT

SEQ ID NO: 18431 - protein, 10 aa, Artificial Sequence
  Description of Artificial Sequence: Synthetic epitope
GHAKETIQDQ

SEQ ID NO: 18432 - protein, 10 aa, Artificial Sequence
  Description of Artificial Sequence: Synthetic epitope
GHARLVHVEE

SEQ ID NO: 18433 - protein, 10 aa, Artificial Sequence
  Description of Artificial Sequence: Synthetic epitope
GHETSGKGLE

SEQ ID NO: 18434 - protein, 10 aa, Artificial Sequence
  Description of Artificial Sequence: Synthetic epitope
GHEVENSTTD

SEQ ID NO: 18435 - protein, 10 aa, Artificial Sequence
  Description of Artificial Sequence: Synthetic epitope
GHGNSSTQKY

SEQ ID NO: 18436 - protein, 10 aa, Artificial Sequence
  Description of Artificial Sequence: Synthetic epitope
GHGSEASVSK

SEQ ID NO: 18437 - protein, 10 aa, Artificial Sequence
  Description of Artificial Sequence: Synthetic epitope
GHHSASSTSK

SEQ ID NO: 18438 - protein, 10 aa, Artificial Sequence
  Description of Artificial Sequence: Synthetic epitope
GHKASKNNFE

SEQ ID NO: 18439 - protein, 10 aa, Artificial Sequence
  Description of Artificial Sequence: Synthetic epitope
GHKTGKDAHA

SEQ ID NO: 18440 - protein, 10 aa, Artificial Sequence
  Description of Artificial Sequence: Synthetic epitope
GHLVSSDLSP

SEQ ID NO: 18441 - protein, 10 aa, Artificial Sequence
  Description of Artificial Sequence: Synthetic epitope
GHNKLSREPS

SEQ ID NO: 18442 - protein, 10 aa, Artificial Sequence
  Description of Artificial Sequence: Synthetic epitope
GHNKSSNSLK

SEQ ID NO: 18443 - protein, 10 aa, Artificial Sequence
  Description of Artificial Sequence: Synthetic epitope
GHPKAILGAT

SEQ ID NO: 18444 - protein, 10 aa, Artificial Sequence
  Description of Artificial Sequence: Synthetic epitope
GHRKRASKSP

SEQ ID NO: 18445 - protein, 10 aa, Artificial Sequence
  Description of Artificial Sequence: Synthetic epitope
GHSIQTIQHP

SEQ ID NO: 18446 - protein, 10 aa, Artificial Sequence
  Description of Artificial Sequence: Synthetic epitope
GHSSVSTESE

SEQ ID NO: 18447 - protein, 10 aa, Artificial Sequence
  Description of Artificial Sequence: Synthetic epitope
GHTDSAEAAP

SEQ ID NO: 18448 - protein, 10 aa, Artificial Sequence
  Description of Artificial Sequence: Synthetic epitope
GHVETEDVEI

SEQ ID NO: 18449 - protein, 10 aa, Artificial Sequence
  Description of Artificial Sequence: Synthetic epitope
GHVKTQLIAH

SEQ ID NO: 18450 - protein, 10 aa, Artificial Sequence
  Description of Artificial Sequence: Synthetic epitope
GIDIASAPAL

SEQ ID NO: 18451 - protein, 10 aa, Artificial Sequence
  Description of Artificial Sequence: Synthetic epitope
GIEDKDKQII

SEQ ID NO: 18452 - protein, 10 aa, Artificial Sequence
  Description of Artificial Sequence: Synthetic epitope
GIEGATTDTD

SEQ ID NO: 18453 - protein, 10 aa, Artificial Sequence
  Description of Artificial Sequence: Synthetic epitope
GIEQSLTGLS

SEQ ID NO: 18454 - protein, 10 aa, Artificial Sequence
  Description of Artificial Sequence: Synthetic epitope
GIEVGKSSAT

SEQ ID NO: 18455 - protein, 10 aa, Artificial Sequence
  Description of Artificial Sequence: Synthetic epitope
GIISDAPINE

SEQ ID NO: 18456 - protein, 10 aa, Artificial Sequence
  Description of Artificial Sequence: Synthetic epitope
GIKKVNWKKS

SEQ ID NO: 18457 - protein, 10 aa, Artificial Sequence
  Description of Artificial Sequence: Synthetic epitope
GIKKYVVGLI

SEQ ID NO: 18458 - protein, 10 aa, Artificial Sequence
  Description of Artificial Sequence: Synthetic epitope
GIKREASSAP

SEQ ID NO: 18459 - protein, 10 aa, Artificial Sequence
  Description of Artificial Sequence: Synthetic epitope
GIKSKREEPG

SEQ ID NO: 18460 - protein, 10 aa, Artificial Sequence
  Description of Artificial Sequence: Synthetic epitope
GIKSTSKSIM

SEQ ID NO: 18461 - protein, 10 aa, Artificial Sequence
  Description of Artificial Sequence: Synthetic epitope
GILNTDATAL

SEQ ID NO: 18462 - protein, 10 aa, Artificial Sequence
  Description of Artificial Sequence: Synthetic epitope
GIQNYSTTSS

SEQ ID NO: 18463 - protein, 10 aa, Artificial Sequence
  Description of Artificial Sequence: Synthetic epitope
GIRARQVQRG

SEQ ID NO: 18464 - protein, 10 aa, Artificial Sequence
  Description of Artificial Sequence: Synthetic epitope
GIRSSKSAGA

SEQ ID NO: 18465 - protein, 10 aa, Artificial Sequence
  Description of Artificial Sequence: Synthetic epitope
GITEVSTINA

SEQ ID NO: 18466 - protein, 10 aa, Artificial Sequence
  Description of Artificial Sequence: Synthetic epitope
GITLNQVAVG

SEQ ID NO: 18467 - protein, 10 aa, Artificial Sequence
  Description of Artificial Sequence: Synthetic epitope
GITMESYLSE

SEQ ID NO: 18468 - protein, 10 aa, Artificial Sequence
  Description of Artificial Sequence: Synthetic epitope
GIVARKKQQK

SEQ ID NO: 18469 - protein, 10 aa, Artificial Sequence
  Description of Artificial Sequence: Synthetic epitope
GIVDKAAKEM

SEQ ID NO: 18470 - protein, 10 aa, Artificial Sequence
  Description of Artificial Sequence: Synthetic epitope
GIVFSRVYDE

SEQ ID NO: 18471 - protein, 10 aa, Artificial Sequence
  Description of Artificial Sequence: Synthetic epitope
GIVKEQLAAV

SEQ ID NO: 18472 - protein, 10 aa, Artificial Sequence
  Description of Artificial Sequence: Synthetic epitope
GIVLFFTLIR

SEQ ID NO: 18473 - protein, 10 aa, Artificial Sequence
  Description of Artificial Sequence: Synthetic epitope
GKADDMSDDQ

SEQ ID NO: 18474 - protein, 10 aa, Artificial Sequence
  Description of Artificial Sequence: Synthetic epitope
GKAEQEKLNN

SEQ ID NO: 18475 - protein, 10 aa, Artificial Sequence
  Description of Artificial Sequence: Synthetic epitope
GKAHSVQVRK

SEQ ID NO: 18476 - protein, 10 aa, Artificial Sequence
  Description of Artificial Sequence: Synthetic epitope
GKAKDANNGN

SEQ ID NO: 18477 - protein, 10 aa, Artificial Sequence
  Description of Artificial Sequence: Synthetic epitope
GKAKESSKKT

SEQ ID NO: 18478 - protein, 10 aa, Artificial Sequence
  Description of Artificial Sequence: Synthetic epitope
GKEATDASDH

SEQ ID NO: 18479 - protein, 10 aa, Artificial Sequence
  Description of Artificial Sequence: Synthetic epitope
GKEAVAMESY

SEQ ID NO: 18480 - protein, 10 aa, Artificial Sequence
  Description of Artificial Sequence: Synthetic epitope
GKEEKLDAKK

SEQ ID NO: 18481 - protein, 10 aa, Artificial Sequence
  Description of Artificial Sequence: Synthetic epitope
GKELFEMWKI

SEQ ID NO: 18482 - protein, 10 aa, Artificial Sequence
  Description of Artificial Sequence: Synthetic epitope
GKEMLEQTLQ

SEQ ID NO: 18483 - protein, 10 aa, Artificial Sequence
  Description of Artificial Sequence: Synthetic epitope
GKENLAESSK

SEQ ID NO: 18484 - protein, 10 aa, Artificial Sequence
  Description of Artificial Sequence: Synthetic epitope
GKFAEVEHVV

SEQ ID NO: 18485 - protein, 10 aa, Artificial Sequence
  Description of Artificial Sequence: Synthetic epitope
GKFGKRESRK

SEQ ID NO: 18486 - protein, 10 aa, Artificial Sequence
  Description of Artificial Sequence: Synthetic epitope
GKFTLLKSLS

SEQ ID NO: 18487 - protein, 10 aa, Artificial Sequence
  Description of Artificial Sequence: Synthetic epitope
GKGKNKLPWE

SEQ ID NO: 18488 - protein, 10 aa, Artificial Sequence
  Description of Artificial Sequence: Synthetic epitope
GKIKTIAFAH

SEQ ID NO: 18489 - protein, 10 aa, Artificial Sequence
  Description of Artificial Sequence: Synthetic epitope
GKIQAKKVRP

SEQ ID NO: 18490 - protein, 10 aa, Artificial Sequence
  Description of Artificial Sequence: Synthetic epitope
GKISNIVIKD

SEQ ID NO: 18491 - protein, 10 aa, Artificial Sequence
  Description of Artificial Sequence: Synthetic epitope
GKISSLKRSP

SEQ ID NO: 18492 - protein, 10 aa, Artificial Sequence
  Description of Artificial Sequence: Synthetic epitope
GKITENAANK

SEQ ID NO: 18493 - protein, 10 aa, Artificial Sequence
  Description of Artificial Sequence: Synthetic epitope
GKIVKKEAVT

SEQ ID NO: 18494 - protein, 10 aa, Artificial Sequence
  Description of Artificial Sequence: Synthetic epitope
GKKATSKVPS

SEQ ID NO: 18495 - protein, 10 aa, Artificial Sequence
  Description of Artificial Sequence: Synthetic epitope
GKKFKELNLT

SEQ ID NO: 18496 - protein, 10 aa, Artificial Sequence
  Description of Artificial Sequence: Synthetic epitope
GKKQQAKVMD

SEQ ID NO: 18497 - protein, 10 aa, Artificial Sequence
  Description of Artificial Sequence: Synthetic epitope
GKLEAVQYKT

SEQ ID NO: 18498 - protein, 10 aa, Artificial Sequence
  Description of Artificial Sequence: Synthetic epitope
GKLEGVSAVK

SEQ ID NO: 18499 - protein, 10 aa, Artificial Sequence
  Description of Artificial Sequence: Synthetic epitope
GKLEVAQTQA

SEQ ID NO: 18500 - protein, 10 aa, Artificial Sequence
  Description of Artificial Sequence: Synthetic epitope
GKLIIAMLER

SEQ ID NO: 18501 - protein, 10 aa, Artificial Sequence
  Description of Artificial Sequence: Synthetic epitope
GKLKVLAKST

SEQ ID NO: 18502 - protein, 10 aa, Artificial Sequence
  Description of Artificial Sequence: Synthetic epitope
GKLLAQVSMA

SEQ ID NO: 18503 - protein, 10 aa, Artificial Sequence
  Description of Artificial Sequence: Synthetic epitope
GKLLEREIKA

SEQ ID NO: 18504 - protein, 10 aa, Artificial Sequence
  Description of Artificial Sequence: Synthetic epitope
GKLLKFQLLQ

SEQ ID NO: 18505 - protein, 10 aa, Artificial Sequence
  Description of Artificial Sequence: Synthetic epitope
GKLLTLVSTR

SEQ ID NO: 18506 - protein, 10 aa, Artificial Sequence
  Description of Artificial Sequence: Synthetic epitope
GKLQAMSGEE

SEQ ID NO: 18507 - protein, 10 aa, Artificial Sequence
  Description of Artificial Sequence: Synthetic epitope
GKLRAQASGS

SEQ ID NO: 18508 - protein, 10 aa, Artificial Sequence
  Description of Artificial Sequence: Synthetic epitope
GKLSGATPNG

SEQ ID NO: 18509 - protein, 10 aa, Artificial Sequence
  Description of Artificial Sequence: Synthetic epitope
GKLVQSAQNE

SEQ ID NO: 18510 - protein, 10 aa, Artificial Sequence
  Description of Artificial Sequence: Synthetic epitope
GKLVSSVAAQ

SEQ ID NO: 18511 - protein, 10 aa, Artificial Sequence
  Description of Artificial Sequence: Synthetic epitope
GKMQKKAVAI

SEQ ID NO: 18512 - protein, 10 aa, Artificial Sequence
  Description of Artificial Sequence: Synthetic epitope
GKMSTAKRTL

SEQ ID NO: 18513 - protein, 10 aa, Artificial Sequence
  Description of Artificial Sequence: Synthetic epitope
GKMTTENNIV

SEQ ID NO: 18514 - protein, 10 aa, Artificial Sequence
  Description of Artificial Sequence: Synthetic epitope
GKNKSSLESD

SEQ ID NO: 18515 - protein, 10 aa, Artificial Sequence
  Description of Artificial Sequence: Synthetic epitope
GKNTAKKEFE

SEQ ID NO: 18516 - protein, 10 aa, Artificial Sequence
  Description of Artificial Sequence: Synthetic epitope
GKPDKKMIEP

SEQ ID NO: 18517 - protein, 10 aa, Artificial Sequence
  Description of Artificial Sequence: Synthetic epitope
GKPEIQTAQF

SEQ ID NO: 18518 - protein, 10 aa, Artificial Sequence
  Description of Artificial Sequence: Synthetic epitope
GKPGVTFTSA

SEQ ID NO: 18519 - protein, 10 aa, Artificial Sequence
  Description of Artificial Sequence: Synthetic epitope
GKPLAGIYRK

SEQ ID NO: 18520 - protein, 10 aa, Artificial Sequence
  Description of Artificial Sequence: Synthetic epitope
GKPRFEPSLT

SEQ ID NO: 18521 - protein, 10 aa, Artificial Sequence
  Description of Artificial Sequence: Synthetic epitope
GKPVIEYQEE

SEQ ID NO: 18522 - protein, 10 aa, Artificial Sequence
  Description of Artificial Sequence: Synthetic epitope
GKPVIEYQEE

SEQ ID NO: 18523 - protein, 10 aa, Artificial Sequence
  Description of Artificial Sequence: Synthetic epitope
GKQEMETGQQ

SEQ ID NO: 18524 - protein, 10 aa, Artificial Sequence
  Description of Artificial Sequence: Synthetic epitope
GKQFTIAKPT

SEQ ID NO: 18525 - protein, 10 aa, Artificial Sequence
  Description of Artificial Sequence: Synthetic epitope
GKQHPIEAHH

SEQ ID NO: 18526 - protein, 10 aa, Artificial Sequence
  Description of Artificial Sequence: Synthetic epitope
GKQQSKLKHS

SEQ ID NO: 18527 - protein, 10 aa, Artificial Sequence
  Description of Artificial Sequence: Synthetic epitope
GKRYLTGIGS

SEQ ID NO: 18528 - protein, 10 aa, Artificial Sequence
  Description of Artificial Sequence: Synthetic epitope
GKRYRERQRQ

SEQ ID NO: 18529 - protein, 10 aa, Artificial Sequence
  Description of Artificial Sequence: Synthetic epitope
GKSAKSKEKQ

SEQ ID NO: 18530 - protein, 10 aa, Artificial Sequence
  Description of Artificial Sequence: Synthetic epitope
GKSENSAKSG

SEQ ID NO: 18531 - protein, 10 aa, Artificial Sequence
  Description of Artificial Sequence: Synthetic epitope
GKSIDDNSTK

SEQ ID NO: 18532 - protein, 10 aa, Artificial Sequence
  Description of Artificial Sequence: Synthetic epitope
GKSQKQITIP

SEQ ID NO: 18533 - protein, 10 aa, Artificial Sequence
  Description of Artificial Sequence: Synthetic epitope
GKSRDKYKSS

SEQ ID NO: 18534 - protein, 10 aa, Artificial Sequence
  Description of Artificial Sequence: Synthetic epitope
GKSREGSRTD

SEQ ID NO: 18535 - protein, 10 aa, Artificial Sequence
  Description of Artificial Sequence: Synthetic epitope
GKTAELSDSV

SEQ ID NO: 18536 - protein, 10 aa, Artificial Sequence
  Description of Artificial Sequence: Synthetic epitope
GKTEAEIAHI

SEQ ID NO: 18537 - protein, 10 aa, Artificial Sequence
  Description of Artificial Sequence: Synthetic epitope
GKTKPSSQSQ

SEQ ID NO: 18538 - protein, 10 aa, Artificial Sequence
  Description of Artificial Sequence: Synthetic epitope
GKTQATRHHL

SEQ ID NO: 18539 - protein, 10 aa, Artificial Sequence
  Description of Artificial Sequence: Synthetic epitope
GKTSAVLKAG

SEQ ID NO: 18540 - protein, 10 aa, Artificial Sequence
  Description of Artificial Sequence: Synthetic epitope
GKTSSNSEQR

SEQ ID NO: 18541 - protein, 10 aa, Artificial Sequence
  Description of Artificial Sequence: Synthetic epitope
GKVAATKQAQ

SEQ ID NO: 18542 - protein, 10 aa, Artificial Sequence
  Description of Artificial Sequence: Synthetic epitope
GKVGKQSEQR

SEQ ID NO: 18543 - protein, 10 aa, Artificial Sequence
  Description of Artificial Sequence: Synthetic epitope
GKVKVELKES

SEQ ID NO: 18544 - protein, 10 aa, Artificial Sequence
  Description of Artificial Sequence: Synthetic epitope
GKVKVVSLKP

SEQ ID NO: 18545 - protein, 10 aa, Artificial Sequence
  Description of Artificial Sequence: Synthetic epitope
GKVTTASVKE

SEQ ID NO: 18546 - protein, 10 aa, Artificial Sequence
  Description of Artificial Sequence: Synthetic epitope
GKVTTVVATL

SEQ ID NO: 18547 - protein, 10 aa, Artificial Sequence
  Description of Artificial Sequence: Synthetic epitope
GKYTQSLHSE

SEQ ID NO: 18548 - protein, 10 aa, Artificial Sequence
  Description of Artificial Sequence: Synthetic epitope
GLALNKRRAT

SEQ ID NO: 18549 - protein, 10 aa, Artificial Sequence
  Description of Artificial Sequence: Synthetic epitope
GLDAAVAQLT

SEQ ID NO: 18550 - protein, 10 aa, Artificial Sequence
  Description of Artificial Sequence: Synthetic epitope
GLDATTVKQE

SEQ ID NO: 18551 - protein, 10 aa, Artificial Sequence
  Description of Artificial Sequence: Synthetic epitope
GLDKRQSEAR

SEQ ID NO: 18552 - protein, 10 aa, Artificial Sequence
  Description of Artificial Sequence: Synthetic epitope
GLEIDSQQEE

SEQ ID NO: 18553 - protein, 10 aa, Artificial Sequence
  Description of Artificial Sequence: Synthetic epitope
GLERETEQAE

SEQ ID NO: 18554 - protein, 10 aa, Artificial Sequence
  Description of Artificial Sequence: Synthetic epitope
GLERQNISRT

SEQ ID NO: 18555 - protein, 10 aa, Artificial Sequence
  Description of Artificial Sequence: Synthetic epitope
GLERSQEKSQ

SEQ ID NO: 18556 - protein, 10 aa, Artificial Sequence
  Description of Artificial Sequence: Synthetic epitope
GLETQETEVG

SEQ ID NO: 18557 - protein, 10 aa, Artificial Sequence
  Description of Artificial Sequence: Synthetic epitope
GLFAKQVQKK

SEQ ID NO: 18558 - protein, 10 aa, Artificial Sequence
  Description of Artificial Sequence: Synthetic epitope
GLGDDRSEIS

SEQ ID NO: 18559 - protein, 10 aa, Artificial Sequence
  Description of Artificial Sequence: Synthetic epitope
GLGSEAKEEA

SEQ ID NO: 18560 - protein, 10 aa, Artificial Sequence
  Description of Artificial Sequence: Synthetic epitope
GLGSNIFRLL

SEQ ID NO: 18561 - protein, 10 aa, Artificial Sequence
  Description of Artificial Sequence: Synthetic epitope
GLHNFRTNQL

SEQ ID NO: 18562 - protein, 10 aa, Artificial Sequence
  Description of Artificial Sequence: Synthetic epitope
GLIVSAMPAI

SEQ ID NO: 18563 - protein, 10 aa, Artificial Sequence
  Description of Artificial Sequence: Synthetic epitope
GLIYTVYVDS

SEQ ID NO: 18564 - protein, 10 aa, Artificial Sequence
  Description of Artificial Sequence: Synthetic epitope
GLKATASAFG

SEQ ID NO: 18565 - protein, 10 aa, Artificial Sequence
  Description of Artificial Sequence: Synthetic epitope
GLKKGRGQKE

SEQ ID NO: 18566 - protein, 10 aa, Artificial Sequence
  Description of Artificial Sequence: Synthetic epitope
GLKSSLIRKP

SEQ ID NO: 18567 - protein, 10 aa, Artificial Sequence
  Description of Artificial Sequence: Synthetic epitope
GLKVQAQLNT

SEQ ID NO: 18568 - protein, 10 aa, Artificial Sequence
  Description of Artificial Sequence: Synthetic epitope
GLLDIILAKN

SEQ ID NO: 18569 - protein, 10 aa, Artificial Sequence
  Description of Artificial Sequence: Synthetic epitope
GLLEAELAAL

SEQ ID NO: 18570 - protein, 10 aa, Artificial Sequence
  Description of Artificial Sequence: Synthetic epitope
GLLGASQESS

SEQ ID NO: 18571 - protein, 10 aa, Artificial Sequence
  Description of Artificial Sequence: Synthetic epitope
GLLKKLTTLK

SEQ ID NO: 18572 - protein, 10 aa, Artificial Sequence
  Description of Artificial Sequence: Synthetic epitope
GLLPKLAIST

SEQ ID NO: 18573 - protein, 10 aa, Artificial Sequence
  Description of Artificial Sequence: Synthetic epitope
GLLSVLLTAE

SEQ ID NO: 18574 - protein, 10 aa, Artificial Sequence
  Description of Artificial Sequence: Synthetic epitope
GLLTSGVEFE

SEQ ID NO: 18575 - protein, 10 aa, Artificial Sequence
  Description of Artificial Sequence: Synthetic epitope
GLMDTIVPEK

SEQ ID NO: 18576 - protein, 10 aa, Artificial Sequence
  Description of Artificial Sequence: Synthetic epitope
GLNAALFYEN

SEQ ID NO: 18577 - protein, 10 aa, Artificial Sequence
  Description of Artificial Sequence: Synthetic epitope
GLNGGVSQVA

SEQ ID NO: 18578 - protein, 10 aa, Artificial Sequence
  Description of Artificial Sequence: Synthetic epitope
GLNRQAATAE

SEQ ID NO: 18579 - protein, 10 aa, Artificial Sequence
  Description of Artificial Sequence: Synthetic epitope
GLPLSMLTNP

SEQ ID NO: 18580 - protein, 10 aa, Artificial Sequence
  Description of Artificial Sequence: Synthetic epitope
GLPSATRALE

SEQ ID NO: 18581 - protein, 10 aa, Artificial Sequence
  Description of Artificial Sequence: Synthetic epitope
GLQEKKAQLK

SEQ ID NO: 18582 - protein, 10 aa, Artificial Sequence
  Description of Artificial Sequence: Synthetic epitope
GLQLKKSSAG

SEQ ID NO: 18583 - protein, 10 aa, Artificial Sequence
  Description of Artificial Sequence: Synthetic epitope
GLQSESNIML

SEQ ID NO: 18584 - protein, 10 aa, Artificial Sequence
  Description of Artificial Sequence: Synthetic epitope
GLRDATSTKY

SEQ ID NO: 18585 - protein, 10 aa, Artificial Sequence
  Description of Artificial Sequence: Synthetic epitope
GLRHEISVET

SEQ ID NO: 18586 - protein, 10 aa, Artificial Sequence
  Description of Artificial Sequence: Synthetic epitope
GLRKTTLQKV

SEQ ID NO: 18587 - protein, 10 aa, Artificial Sequence
  Description of Artificial Sequence: Synthetic epitope
GLRTSSLSHS

SEQ ID NO: 18588 - protein, 10 aa, Artificial Sequence
  Description of Artificial Sequence: Synthetic epitope
GLSAGYVDAG

SEQ ID NO: 18589 - protein, 10 aa, Artificial Sequence
  Description of Artificial Sequence: Synthetic epitope
GLSAKTKTAL

SEQ ID NO: 18590 - protein, 10 aa, Artificial Sequence
  Description of Artificial Sequence: Synthetic epitope
GLSDTRLMDM

SEQ ID NO: 18591 - protein, 10 aa, Artificial Sequence
  Description of Artificial Sequence: Synthetic epitope
GLSGSLVQEP

SEQ ID NO: 18592 - protein, 10 aa, Artificial Sequence
  Description of Artificial Sequence: Synthetic epitope
GLSIRSSQEE

SEQ ID NO: 18593 - protein, 10 aa, Artificial Sequence
  Description of Artificial Sequence: Synthetic epitope
GLSKLAATSY

SEQ ID NO: 18594 - protein, 10 aa, Artificial Sequence
  Description of Artificial Sequence: Synthetic epitope
GLSLSQAQQM

SEQ ID NO: 18595 - protein, 10 aa, Artificial Sequence
  Description of Artificial Sequence: Synthetic epitope
GLSTKTTFYE

SEQ ID NO: 18596 - protein, 10 aa, Artificial Sequence
  Description of Artificial Sequence: Synthetic epitope
GLTFESLQQT

SEQ ID NO: 18597 - protein, 10 aa, Artificial Sequence
  Description of Artificial Sequence: Synthetic epitope
GLTLSRRIRR

SEQ ID NO: 18598 - protein, 10 aa, Artificial Sequence
  Description of Artificial Sequence: Synthetic epitope
GLTNGLSSQE

SEQ ID NO: 18599 - protein, 10 aa, Artificial Sequence
  Description of Artificial Sequence: Synthetic epitope
GLTQWSKSTL

SEQ ID NO: 18600 - protein, 10 aa, Artificial Sequence
  Description of Artificial Sequence: Synthetic epitope
GLTVGSAADA

SEQ ID NO: 18601 - protein, 10 aa, Artificial Sequence
  Description of Artificial Sequence: Synthetic epitope
GLVELALALR

SEQ ID NO: 18602 - protein, 10 aa, Artificial Sequence
  Description of Artificial Sequence: Synthetic epitope
GLVETSSASP

SEQ ID NO: 18603 - protein, 10 aa, Artificial Sequence
  Description of Artificial Sequence: Synthetic epitope
GMAKASAAEL

SEQ ID NO: 18604 - protein, 10 aa, Artificial Sequence
  Description of Artificial Sequence: Synthetic epitope
GMALGDANKV

SEQ ID NO: 18605 - protein, 10 aa, Artificial Sequence
  Description of Artificial Sequence: Synthetic epitope
GMASQAAQEA

SEQ ID NO: 18606 - protein, 10 aa, Artificial Sequence
  Description of Artificial Sequence: Synthetic epitope
GMDISAIDLI

SEQ ID NO: 18607 - protein, 10 aa, Artificial Sequence
  Description of Artificial Sequence: Synthetic epitope
GMGLTAAGDA

SEQ ID NO: 18608 - protein, 10 aa, Artificial Sequence
  Description of Artificial Sequence: Synthetic epitope
GMKTITATGV

SEQ ID NO: 18609 - protein, 10 aa, Artificial Sequence
  Description of Artificial Sequence: Synthetic epitope
GMNTDRGKTQ

SEQ ID NO: 18610 - protein, 10 aa, Artificial Sequence
  Description of Artificial Sequence: Synthetic epitope
GMQRSAQLSG

SEQ ID NO: 18611 - protein, 10 aa, Artificial Sequence
  Description of Artificial Sequence: Synthetic epitope
GMQVSASMIS

SEQ ID NO: 18612 - protein, 10 aa, Artificial Sequence
  Description of Artificial Sequence: Synthetic epitope
GMQWDTEHVA

SEQ ID NO: 18613 - protein, 10 aa, Artificial Sequence
  Description of Artificial Sequence: Synthetic epitope
GMRKTSLETS

SEQ ID NO: 18614 - protein, 10 aa, Artificial Sequence
  Description of Artificial Sequence: Synthetic epitope
GMRNDSVETR

SEQ ID NO: 18615 - protein, 10 aa, Artificial Sequence
  Description of Artificial Sequence: Synthetic epitope
GMRQSSLKKD

SEQ ID NO: 18616 - protein, 10 aa, Artificial Sequence
  Description of Artificial Sequence: Synthetic epitope
GMSARRARDM

SEQ ID NO: 18617 - protein, 10 aa, Artificial Sequence
  Description of Artificial Sequence: Synthetic epitope
GMSMRVERST

SEQ ID NO: 18618 - protein, 10 aa, Artificial Sequence
  Description of Artificial Sequence: Synthetic epitope
GMSSRAKGDK

SEQ ID NO: 18619 - protein, 10 aa, Artificial Sequence
  Description of Artificial Sequence: Synthetic epitope
GMTDMFRQFQ

SEQ ID NO: 18620 - protein, 10 aa, Artificial Sequence
  Description of Artificial Sequence: Synthetic epitope
GMTSTTAKGD

SEQ ID NO: 18621 - protein, 10 aa, Artificial Sequence
  Description of Artificial Sequence: Synthetic epitope
GMYVVGIQWN

SEQ ID NO: 18622 - protein, 10 aa, Artificial Sequence
  Description of Artificial Sequence: Synthetic epitope
GNAATSGNAA

SEQ ID NO: 18623 - protein, 10 aa, Artificial Sequence
  Description of Artificial Sequence: Synthetic epitope
GNAGELSEAE

SEQ ID NO: 18624 - protein, 10 aa, Artificial Sequence
  Description of Artificial Sequence: Synthetic epitope
GNANATVTKV

SEQ ID NO: 18625 - protein, 10 aa, Artificial Sequence
  Description of Artificial Sequence: Synthetic epitope
GNDLMQASKG

SEQ ID NO: 18626 - protein, 10 aa, Artificial Sequence
  Description of Artificial Sequence: Synthetic epitope
GNEDTAVEEP

SEQ ID NO: 18627 - protein, 10 aa, Artificial Sequence
  Description of Artificial Sequence: Synthetic epitope
GNEKTARRNQ

SEQ ID NO: 18628 - protein, 10 aa, Artificial Sequence
  Description of Artificial Sequence: Synthetic epitope
GNELESIAFR

SEQ ID NO: 18629 - protein, 10 aa, Artificial Sequence
  Description of Artificial Sequence: Synthetic epitope
GNGWAIEKNL

SEQ ID NO: 18630 - protein, 10 aa, Artificial Sequence
  Description of Artificial Sequence: Synthetic epitope
GNHQNSTVRA

SEQ ID NO: 18631 - protein, 10 aa, Artificial Sequence
  Description of Artificial Sequence: Synthetic epitope
GNHVVMNRRE

SEQ ID NO: 18632 - protein, 10 aa, Artificial Sequence
  Description of Artificial Sequence: Synthetic epitope
GNILGTTMER

SEQ ID NO: 18633 - protein, 10 aa, Artificial Sequence
  Description of Artificial Sequence: Synthetic epitope
GNISTSSKPA

SEQ ID NO: 18634 - protein, 10 aa, Artificial Sequence
  Description of Artificial Sequence: Synthetic epitope
GNKNLILNSK

SEQ ID NO: 18635 - protein, 10 aa, Artificial Sequence
  Description of Artificial Sequence: Synthetic epitope
GNLEKSAERS

SEQ ID NO: 18636 - protein, 10 aa, Artificial Sequence
  Description of Artificial Sequence: Synthetic epitope
GNLKQEVSEE

SEQ ID NO: 18637 - protein, 10 aa, Artificial Sequence
  Description of Artificial Sequence: Synthetic epitope
GNLKTSESKE

SEQ ID NO: 18638 - protein, 10 aa, Artificial Sequence
  Description of Artificial Sequence: Synthetic epitope
GNLSQTTQEQ

SEQ ID NO: 18639 - protein, 10 aa, Artificial Sequence
  Description of Artificial Sequence: Synthetic epitope
GNLSTVLPTE

SEQ ID NO: 18640 - protein, 10 aa, Artificial Sequence
  Description of Artificial Sequence: Synthetic epitope
GNNQDGVVAS

SEQ ID NO: 18641 - protein, 10 aa, Artificial Sequence
  Description of Artificial Sequence: Synthetic epitope
GNPLRVVTKP

SEQ ID NO: 18642 - protein, 10 aa, Artificial Sequence
  Description of Artificial Sequence: Synthetic epitope
GNQKALDSDA

SEQ ID NO: 18643 - protein, 10 aa, Artificial Sequence
  Description of Artificial Sequence: Synthetic epitope
GNQLRSILAS

SEQ ID NO: 18644 - protein, 10 aa, Artificial Sequence
  Description of Artificial Sequence: Synthetic epitope
GNQTSQNQTA

SEQ ID NO: 18645 - protein, 10 aa, Artificial Sequence
  Description of Artificial Sequence: Synthetic epitope
GNQTSQNQTA

SEQ ID NO: 18646 - protein, 10 aa, Artificial Sequence
  Description of Artificial Sequence: Synthetic epitope
GNQVQSVKIS

SEQ ID NO: 18647 - protein, 10 aa, Artificial Sequence
  Description of Artificial Sequence: Synthetic epitope
GNRKAVKSPQ

SEQ ID NO: 18648 - protein, 10 aa, Artificial Sequence
  Description of Artificial Sequence: Synthetic epitope
GNRKEKGVAQ

SEQ ID NO: 18649 - protein, 10 aa, Artificial Sequence
  Description of Artificial Sequence: Synthetic epitope
GNRKTSSQQS

SEQ ID NO: 18650 - protein, 10 aa, Artificial Sequence
  Description of Artificial Sequence: Synthetic epitope
GNRSTKAPDR

SEQ ID NO: 18651 - protein, 10 aa, Artificial Sequence
  Description of Artificial Sequence: Synthetic epitope
GNSETSSDTP

SEQ ID NO: 18652 - protein, 10 aa, Artificial Sequence
  Description of Artificial Sequence: Synthetic epitope
GNSGLSSEKI

SEQ ID NO: 18653 - protein, 10 aa, Artificial Sequence
  Description of Artificial Sequence: Synthetic epitope
GNSKSKVSSQ

SEQ ID NO: 18654 - protein, 10 aa, Artificial Sequence
  Description of Artificial Sequence: Synthetic epitope
GNSKTIDHKS

SEQ ID NO: 18655 - protein, 10 aa, Artificial Sequence
  Description of Artificial Sequence: Synthetic epitope
GNSLAASTAE

SEQ ID NO: 18656 - protein, 10 aa, Artificial Sequence
  Description of Artificial Sequence: Synthetic epitope
GNSMEVSGGT

SEQ ID NO: 18657 - protein, 10 aa, Artificial Sequence
  Description of Artificial Sequence: Synthetic epitope
GNSQTESSLP

SEQ ID NO: 18658 - protein, 10 aa, Artificial Sequence
  Description of Artificial Sequence: Synthetic epitope
GNSTAKSSPQ

SEQ ID NO: 18659 - protein, 10 aa, Artificial Sequence
  Description of Artificial Sequence: Synthetic epitope
GNSTKAVSSA

SEQ ID NO: 18660 - protein, 10 aa, Artificial Sequence
  Description of Artificial Sequence: Synthetic epitope
GNSTKESEST

SEQ ID NO: 18661 - protein, 10 aa, Artificial Sequence
  Description of Artificial Sequence: Synthetic epitope
GNTAESSTSQ

SEQ ID NO: 18662 - protein, 10 aa, Artificial Sequence
  Description of Artificial Sequence: Synthetic epitope
GNVKRERIQK

SEQ ID NO: 18663 - protein, 10 aa, Artificial Sequence
  Description of Artificial Sequence: Synthetic epitope
GPAKKVLTLE

SEQ ID NO: 18664 - protein, 10 aa, Artificial Sequence
  Description of Artificial Sequence: Synthetic epitope
GPDDAQQKIE

SEQ ID NO: 18665 - protein, 10 aa, Artificial Sequence
  Description of Artificial Sequence: Synthetic epitope
GPDSKSSALA

SEQ ID NO: 18666 - protein, 10 aa, Artificial Sequence
  Description of Artificial Sequence: Synthetic epitope
GPEASASKFK

SEQ ID NO: 18667 - protein, 10 aa, Artificial Sequence
  Description of Artificial Sequence: Synthetic epitope
GPEDEARAER

SEQ ID NO: 18668 - protein, 10 aa, Artificial Sequence
  Description of Artificial Sequence: Synthetic epitope
GPEVSNSDGD

SEQ ID NO: 18669 - protein, 10 aa, Artificial Sequence
  Description of Artificial Sequence: Synthetic epitope
GPEVTSSDKS

SEQ ID NO: 18670 - protein, 10 aa, Artificial Sequence
  Description of Artificial Sequence: Synthetic epitope
GPGEATAVEW

SEQ ID NO: 18671 - protein, 10 aa, Artificial Sequence
  Description of Artificial Sequence: Synthetic epitope
GPLNSAVVEE

SEQ ID NO: 18672 - protein, 10 aa, Artificial Sequence
  Description of Artificial Sequence: Synthetic epitope
GPLRKLVLQS

SEQ ID NO: 18673 - protein, 10 aa, Artificial Sequence
  Description of Artificial Sequence: Synthetic epitope
GPMVSAQESQ

SEQ ID NO: 18674 - protein, 10 aa, Artificial Sequence
  Description of Artificial Sequence: Synthetic epitope
GPNNSLVAKE

SEQ ID NO: 18675 - protein, 10 aa, Artificial Sequence
  Description of Artificial Sequence: Synthetic epitope
GPQARMMGSQ

SEQ ID NO: 18676 - protein, 10 aa, Artificial Sequence
  Description of Artificial Sequence: Synthetic epitope
GPQLAAKKAA

SEQ ID NO: 18677 - protein, 10 aa, Artificial Sequence
  Description of Artificial Sequence: Synthetic epitope
GPQVEQKTKE

SEQ ID NO: 18678 - protein, 10 aa, Artificial Sequence
  Description of Artificial Sequence: Synthetic epitope
GPRMRVRDST

SEQ ID NO: 18679 - protein, 10 aa, Artificial Sequence
  Description of Artificial Sequence: Synthetic epitope
GPSAMRLEDE

SEQ ID NO: 18680 - protein, 10 aa, Artificial Sequence
  Description of Artificial Sequence: Synthetic epitope
GPSASKNEYE

SEQ ID NO: 18681 - protein, 10 aa, Artificial Sequence
  Description of Artificial Sequence: Synthetic epitope
GPSHLDSHDS

SEQ ID NO: 18682 - protein, 10 aa, Artificial Sequence
  Description of Artificial Sequence: Synthetic epitope
GPSKAKKTNA

SEQ ID NO: 18683 - protein, 10 aa, Artificial Sequence
  Description of Artificial Sequence: Synthetic epitope
GPSVTESSEA

SEQ ID NO: 18684 - protein, 10 aa, Artificial Sequence
  Description of Artificial Sequence: Synthetic epitope
GPTNSLKYVP

SEQ ID NO: 18685 - protein, 10 aa, Artificial Sequence
  Description of Artificial Sequence: Synthetic epitope
GPTSVSRQRV

SEQ ID NO: 18686 - protein, 10 aa, Artificial Sequence
  Description of Artificial Sequence: Synthetic epitope
GQAAEVPLSS

SEQ ID NO: 18687 - protein, 10 aa, Artificial Sequence
  Description of Artificial Sequence: Synthetic epitope
GQAAHKEEDP

SEQ ID NO: 18688 - protein, 10 aa, Artificial Sequence
  Description of Artificial Sequence: Synthetic epitope
GQADESSENE

SEQ ID NO: 18689 - protein, 10 aa, Artificial Sequence
  Description of Artificial Sequence: Synthetic epitope
GQALTNKNYR

SEQ ID NO: 18690 - protein, 10 aa, Artificial Sequence
  Description of Artificial Sequence: Synthetic epitope
GQARSLQRQQ

SEQ ID NO: 18691 - protein, 10 aa, Artificial Sequence
  Description of Artificial Sequence: Synthetic epitope
GQATAVTPNK

SEQ ID NO: 18692 - protein, 10 aa, Artificial Sequence
  Description of Artificial Sequence: Synthetic epitope
GQEALETSLT

SEQ ID NO: 18693 - protein, 10 aa, Artificial Sequence
  Description of Artificial Sequence: Synthetic epitope
GQEALTTIYN

SEQ ID NO: 18694 - protein, 10 aa, Artificial Sequence
  Description of Artificial Sequence: Synthetic epitope
GQEAQLRDRA

SEQ ID NO: 18695 - protein, 10 aa, Artificial Sequence
  Description of Artificial Sequence: Synthetic epitope
GQEASTHQAQ

SEQ ID NO: 18696 - protein, 10 aa, Artificial Sequence
  Description of Artificial Sequence: Synthetic epitope
GQEIMELDTS

SEQ ID NO: 18697 - protein, 10 aa, Artificial Sequence
  Description of Artificial Sequence: Synthetic epitope
GQEKQEQSYK

SEQ ID NO: 18698 - protein, 10 aa, Artificial Sequence
  Description of Artificial Sequence: Synthetic epitope
GQEQAILSGA

SEQ ID NO: 18699 - protein, 10 aa, Artificial Sequence
  Description of Artificial Sequence: Synthetic epitope
GQFSESRSGR

SEQ ID NO: 18700 - protein, 10 aa, Artificial Sequence
  Description of Artificial Sequence: Synthetic epitope
GQGAKKSAIG

SEQ ID NO: 18701 - protein, 10 aa, Artificial Sequence
  Description of Artificial Sequence: Synthetic epitope
GQGALNSQEE

SEQ ID NO: 18702 - protein, 10 aa, Artificial Sequence
  Description of Artificial Sequence: Synthetic epitope
GQGASDLTNT

SEQ ID NO: 18703 - protein, 10 aa, Artificial Sequence
  Description of Artificial Sequence: Synthetic epitope
GQGDSVSIGK

SEQ ID NO: 18704 - protein, 10 aa, Artificial Sequence
  Description of Artificial Sequence: Synthetic epitope
GQGQIYVHLT

SEQ ID NO: 18705 - protein, 10 aa, Artificial Sequence
  Description of Artificial Sequence: Synthetic epitope
GQGTTSEAIQ

SEQ ID NO: 18706 - protein, 10 aa, Artificial Sequence
  Description of Artificial Sequence: Synthetic epitope
GQIKDKVDHT

SEQ ID NO: 18707 - protein, 10 aa, Artificial Sequence
  Description of Artificial Sequence: Synthetic epitope
GQIKTVYPAS

SEQ ID NO: 18708 - protein, 10 aa, Artificial Sequence
  Description of Artificial Sequence: Synthetic epitope
GQKAVSESEA

SEQ ID NO: 18709 - protein, 10 aa, Artificial Sequence
  Description of Artificial Sequence: Synthetic epitope
GQKKLELKTA

SEQ ID NO: 18710 - protein, 10 aa, Artificial Sequence
  Description of Artificial Sequence: Synthetic epitope
GQKNKYRAPR

SEQ ID NO: 18711 - protein, 10 aa, Artificial Sequence
  Description of Artificial Sequence: Synthetic epitope
GQKQLAILLS

SEQ ID NO: 18712 - protein, 10 aa, Artificial Sequence
  Description of Artificial Sequence: Synthetic epitope
GQKSAVAKHQ

SEQ ID NO: 18713 - protein, 10 aa, Artificial Sequence
  Description of Artificial Sequence: Synthetic epitope
GQKSLTSATS

SEQ ID NO: 18714 - protein, 10 aa, Artificial Sequence
  Description of Artificial Sequence: Synthetic epitope
GQLGSTQSQG

SEQ ID NO: 18715 - protein, 10 aa, Artificial Sequence
  Description of Artificial Sequence: Synthetic epitope
GQLNKSDSNQ

SEQ ID NO: 18716 - protein, 10 aa, Artificial Sequence
  Description of Artificial Sequence: Synthetic epitope
GQLSVLSASQ

SEQ ID NO: 18717 - protein, 10 aa, Artificial Sequence
  Description of Artificial Sequence: Synthetic epitope
GQMTVTRLVN

SEQ ID NO: 18718 - protein, 10 aa, Artificial Sequence
  Description of Artificial Sequence: Synthetic epitope
GQMVIDEELL

SEQ ID NO: 18719 - protein, 10 aa, Artificial Sequence
  Description of Artificial Sequence: Synthetic epitope
GQNGFQQWYD

SEQ ID NO: 18720 - protein, 10 aa, Artificial Sequence
  Description of Artificial Sequence: Synthetic epitope
GQNKASGKRQ

SEQ ID NO: 18721 - protein, 10 aa, Artificial Sequence
  Description of Artificial Sequence: Synthetic epitope
GQNRSARIAK

SEQ ID NO: 18722 - protein, 10 aa, Artificial Sequence
  Description of Artificial Sequence: Synthetic epitope
GQPAFPNIGQ

SEQ ID NO: 18723 - protein, 10 aa, Artificial Sequence
  Description of Artificial Sequence: Synthetic epitope
GQPTQFSDTF

SEQ ID NO: 18724 - protein, 10 aa, Artificial Sequence
  Description of Artificial Sequence: Synthetic epitope
GQQLLWKGSF

SEQ ID NO: 18725 - protein, 10 aa, Artificial Sequence
  Description of Artificial Sequence: Synthetic epitope
GQQSDTAQLE

SEQ ID NO: 18726 - protein, 10 aa, Artificial Sequence
  Description of Artificial Sequence: Synthetic epitope
GQQSSIKVED

SEQ ID NO: 18727 - protein, 10 aa, Artificial Sequence
  Description of Artificial Sequence: Synthetic epitope
GQQTLIMMTK

SEQ ID NO: 18728 - protein, 10 aa, Artificial Sequence
  Description of Artificial Sequence: Synthetic epitope
GQRNKYFKTY

SEQ ID NO: 18729 - protein, 10 aa, Artificial Sequence
  Description of Artificial Sequence: Synthetic epitope
GQRQSLSKTE

SEQ ID NO: 18730 - protein, 10 aa, Artificial Sequence
  Description of Artificial Sequence: Synthetic epitope
GQRRAQARRQ

SEQ ID NO: 18731 - protein, 10 aa, Artificial Sequence
  Description of Artificial Sequence: Synthetic epitope
GQRSVQVSVT

SEQ ID NO: 18732 - protein, 10 aa, Artificial Sequence
  Description of Artificial Sequence: Synthetic epitope
GQSEGSVSLS

SEQ ID NO: 18733 - protein, 10 aa, Artificial Sequence
  Description of Artificial Sequence: Synthetic epitope
GQSFSTDAAG

SEQ ID NO: 18734 - protein, 10 aa, Artificial Sequence
  Description of Artificial Sequence: Synthetic epitope
GQSGDNVVKG

SEQ ID NO: 18735 - protein, 10 aa, Artificial Sequence
  Description of Artificial Sequence: Synthetic epitope
GQSLDSANTS

SEQ ID NO: 18736 - protein, 10 aa, Artificial Sequence
  Description of Artificial Sequence: Synthetic epitope
GQSLSNTLTT

SEQ ID NO: 18737 - protein, 10 aa, Artificial Sequence
  Description of Artificial Sequence: Synthetic epitope
GQSPLTTAAT

SEQ ID NO: 18738 - protein, 10 aa, Artificial Sequence
  Description of Artificial Sequence: Synthetic epitope
GQSQDNEKEL

SEQ ID NO: 18739 - protein, 10 aa, Artificial Sequence
  Description of Artificial Sequence: Synthetic epitope
GQSSKESTST

SEQ ID NO: 18740 - protein, 10 aa, Artificial Sequence
  Description of Artificial Sequence: Synthetic epitope
GQSSRSEQHG

SEQ ID NO: 18741 - protein, 10 aa, Artificial Sequence
  Description of Artificial Sequence: Synthetic epitope
GQSSRSEQHG

SEQ ID NO: 18742 - protein, 10 aa, Artificial Sequence
  Description of Artificial Sequence: Synthetic epitope
GQSTKSDSAE

SEQ ID NO: 18743 - protein, 10 aa, Artificial Sequence
  Description of Artificial Sequence: Synthetic epitope
GQSTSSVIRL

SEQ ID NO: 18744 - protein, 10 aa, Artificial Sequence
  Description of Artificial Sequence: Synthetic epitope
GQTERRSQSD

SEQ ID NO: 18745 - protein, 10 aa, Artificial Sequence
  Description of Artificial Sequence: Synthetic epitope
GQTSLFKTKN

SEQ ID NO: 18746 - protein, 10 aa, Artificial Sequence
  Description of Artificial Sequence: Synthetic epitope
GQTSRLSASS

SEQ ID NO: 18747 - protein, 10 aa, Artificial Sequence
  Description of Artificial Sequence: Synthetic epitope
GQVLAKVTEN

SEQ ID NO: 18748 - protein, 10 aa, Artificial Sequence
  Description of Artificial Sequence: Synthetic epitope
GQVLKNSSAT

SEQ ID NO: 18749 - protein, 10 aa, Artificial Sequence
  Description of Artificial Sequence: Synthetic epitope
GQVLNESLIA

SEQ ID NO: 18750 - protein, 10 aa, Artificial Sequence
  Description of Artificial Sequence: Synthetic epitope
GQWPDVRGSQ

SEQ ID NO: 18751 - protein, 10 aa, Artificial Sequence
  Description of Artificial Sequence: Synthetic epitope
GQYKHMHRTK

SEQ ID NO: 18752 - protein, 10 aa, Artificial Sequence
  Description of Artificial Sequence: Synthetic epitope
GQYPTSTTQQ

SEQ ID NO: 18753 - protein, 10 aa, Artificial Sequence
  Description of Artificial Sequence: Synthetic epitope
GQYSLLSKIT

SEQ ID NO: 18754 - protein, 10 aa, Artificial Sequence
  Description of Artificial Sequence: Synthetic epitope
GQYSTMLYAQ

SEQ ID NO: 18755 - protein, 10 aa, Artificial Sequence
  Description of Artificial Sequence: Synthetic epitope
GQYTMNQEST

SEQ ID NO: 18756 - protein, 10 aa, Artificial Sequence
  Description of Artificial Sequence: Synthetic epitope
GRAIKASQAR

SEQ ID NO: 18757 - protein, 10 aa, Artificial Sequence
  Description of Artificial Sequence: Synthetic epitope
GRAKNTTSSP

SEQ ID NO: 18758 - protein, 10 aa, Artificial Sequence
  Description of Artificial Sequence: Synthetic epitope
GRAQENLNPL

SEQ ID NO: 18759 - protein, 10 aa, Artificial Sequence
  Description of Artificial Sequence: Synthetic epitope
GRARRSQSAE

SEQ ID NO: 18760 - protein, 10 aa, Artificial Sequence
  Description of Artificial Sequence: Synthetic epitope
GRASLTSRSQ

SEQ ID NO: 18761 - protein, 10 aa, Artificial Sequence
  Description of Artificial Sequence: Synthetic epitope
GRESVQVPDD

SEQ ID NO: 18762 - protein, 10 aa, Artificial Sequence
  Description of Artificial Sequence: Synthetic epitope
GRGGSVKLAL

SEQ ID NO: 18763 - protein, 10 aa, Artificial Sequence
  Description of Artificial Sequence: Synthetic epitope
GRGLSKAAVS

SEQ ID NO: 18764 - protein, 10 aa, Artificial Sequence
  Description of Artificial Sequence: Synthetic epitope
GRGSFMLGLE

SEQ ID NO: 18765 - protein, 10 aa, Artificial Sequence
  Description of Artificial Sequence: Synthetic epitope
GRIGNFIVKK

SEQ ID NO: 18766 - protein, 10 aa, Artificial Sequence
  Description of Artificial Sequence: Synthetic epitope
GRKKAAYAGG

SEQ ID NO: 18767 - protein, 10 aa, Artificial Sequence
  Description of Artificial Sequence: Synthetic epitope
GRLEVSMVKP

SEQ ID NO: 18768 - protein, 10 aa, Artificial Sequence
  Description of Artificial Sequence: Synthetic epitope
GRLKKQKDHH

SEQ ID NO: 18769 - protein, 10 aa, Artificial Sequence
  Description of Artificial Sequence: Synthetic epitope
GRLKSKKGTE

SEQ ID NO: 18770 - protein, 10 aa, Artificial Sequence
  Description of Artificial Sequence: Synthetic epitope
GRLSDKSSTS

SEQ ID NO: 18771 - protein, 10 aa, Artificial Sequence
  Description of Artificial Sequence: Synthetic epitope
GRLTLSPLTA

SEQ ID NO: 18772 - protein, 10 aa, Artificial Sequence
  Description of Artificial Sequence: Synthetic epitope
GRLTVLRTIQ

SEQ ID NO: 18773 - protein, 10 aa, Artificial Sequence
  Description of Artificial Sequence: Synthetic epitope
GRLVKLSLAN

SEQ ID NO: 18774 - protein, 10 aa, Artificial Sequence
  Description of Artificial Sequence: Synthetic epitope
GRPGQMAKEH

SEQ ID NO: 18775 - protein, 10 aa, Artificial Sequence
  Description of Artificial Sequence: Synthetic epitope
GRPIWMEKMV

SEQ ID NO: 18776 - protein, 10 aa, Artificial Sequence
  Description of Artificial Sequence: Synthetic epitope
GRQLESVRAE

SEQ ID NO: 18777 - protein, 10 aa, Artificial Sequence
  Description of Artificial Sequence: Synthetic epitope
GRQRRTVQST

SEQ ID NO: 18778 - protein, 10 aa, Artificial Sequence
  Description of Artificial Sequence: Synthetic epitope
GRQTLEQLLQ

SEQ ID NO: 18779 - protein, 10 aa, Artificial Sequence
  Description of Artificial Sequence: Synthetic epitope
GRRILFQAQS

SEQ ID NO: 18780 - protein, 10 aa, Artificial Sequence
  Description of Artificial Sequence: Synthetic epitope
GRRQGIKKME

SEQ ID NO: 18781 - protein, 10 aa, Artificial Sequence
  Description of Artificial Sequence: Synthetic epitope
GRSSGDTSSE

SEQ ID NO: 18782 - protein, 10 aa, Artificial Sequence
  Description of Artificial Sequence: Synthetic epitope
GRSYDSSMES

SEQ ID NO: 18783 - protein, 10 aa, Artificial Sequence
  Description of Artificial Sequence: Synthetic epitope
GRVAQGIMKL

SEQ ID NO: 18784 - protein, 10 aa, Artificial Sequence
  Description of Artificial Sequence: Synthetic epitope
GSAAVHEKAP

SEQ ID NO: 18785 - protein, 10 aa, Artificial Sequence
  Description of Artificial Sequence: Synthetic epitope
GSAFSSVFQS

SEQ ID NO: 18786 - protein, 10 aa, Artificial Sequence
  Description of Artificial Sequence: Synthetic epitope
GSALSSQVSA

SEQ ID NO: 18787 - protein, 10 aa, Artificial Sequence
  Description of Artificial Sequence: Synthetic epitope
GSANDSQHDP

SEQ ID NO: 18788 - protein, 10 aa, Artificial Sequence
  Description of Artificial Sequence: Synthetic epitope
GSAPSLINSS

SEQ ID NO: 18789 - protein, 10 aa, Artificial Sequence
  Description of Artificial Sequence: Synthetic epitope
GSARTAAGKS

SEQ ID NO: 18790 - protein, 10 aa, Artificial Sequence
  Description of Artificial Sequence: Synthetic epitope
GSASDRTSSN

SEQ ID NO: 18791 - protein, 10 aa, Artificial Sequence
  Description of Artificial Sequence: Synthetic epitope
GSATNVASTP

SEQ ID NO: 18792 - protein, 10 aa, Artificial Sequence
  Description of Artificial Sequence: Synthetic epitope
GSAVKVLTSS

SEQ ID NO: 18793 - protein, 10 aa, Artificial Sequence
  Description of Artificial Sequence: Synthetic epitope
GSDQLESTAH

SEQ ID NO: 18794 - protein, 10 aa, Artificial Sequence
  Description of Artificial Sequence: Synthetic epitope
GSEARGLEEK

SEQ ID NO: 18795 - protein, 10 aa, Artificial Sequence
  Description of Artificial Sequence: Synthetic epitope
GSEEFNATKL

SEQ ID NO: 18796 - protein, 10 aa, Artificial Sequence
  Description of Artificial Sequence: Synthetic epitope
GSEQQLSQKV

SEQ ID NO: 18797 - protein, 10 aa, Artificial Sequence
  Description of Artificial Sequence: Synthetic epitope
GSETSTKQSL

SEQ ID NO: 18798 - protein, 10 aa, Artificial Sequence
  Description of Artificial Sequence: Synthetic epitope
GSEVISNTTE

SEQ ID NO: 18799 - protein, 10 aa, Artificial Sequence
  Description of Artificial Sequence: Synthetic epitope
GSEVLMSDLK

SEQ ID NO: 18800 - protein, 10 aa, Artificial Sequence
  Description of Artificial Sequence: Synthetic epitope
GSEVLTSVSD

SEQ ID NO: 18801 - protein, 10 aa, Artificial Sequence
  Description of Artificial Sequence: Synthetic epitope
GSEVSELLRN

SEQ ID NO: 18802 - protein, 10 aa, Artificial Sequence
  Description of Artificial Sequence: Synthetic epitope
GSFANSTDQE

SEQ ID NO: 18803 - protein, 10 aa, Artificial Sequence
  Description of Artificial Sequence: Synthetic epitope
GSFAPSSQSQ

SEQ ID NO: 18804 - protein, 10 aa, Artificial Sequence
  Description of Artificial Sequence: Synthetic epitope
GSGAVSARQK

SEQ ID NO: 18805 - protein, 10 aa, Artificial Sequence
  Description of Artificial Sequence: Synthetic epitope
GSGEASAMQS

SEQ ID NO: 18806 - protein, 10 aa, Artificial Sequence
  Description of Artificial Sequence: Synthetic epitope
GSGMAEASLE

SEQ ID NO: 18807 - protein, 10 aa, Artificial Sequence
  Description of Artificial Sequence: Synthetic epitope
GSGSDQESQS

SEQ ID NO: 18808 - protein, 10 aa, Artificial Sequence
  Description of Artificial Sequence: Synthetic epitope
GSGSEIQFLS

SEQ ID NO: 18809 - protein, 10 aa, Artificial Sequence
  Description of Artificial Sequence: Synthetic epitope
GSGTVAASKS

SEQ ID NO: 18810 - protein, 10 aa, Artificial Sequence
  Description of Artificial Sequence: Synthetic epitope
GSHSQSRSPG

SEQ ID NO: 18811 - protein, 10 aa, Artificial Sequence
  Description of Artificial Sequence: Synthetic epitope
GSHVSVSEGA

SEQ ID NO: 18812 - protein, 10 aa, Artificial Sequence
  Description of Artificial Sequence: Synthetic epitope
GSINRIVNES

SEQ ID NO: 18813 - protein, 10 aa, Artificial Sequence
  Description of Artificial Sequence: Synthetic epitope
GSISVKIIRH

SEQ ID NO: 18814 - protein, 10 aa, Artificial Sequence
  Description of Artificial Sequence: Synthetic epitope
GSKEMSLEEP

SEQ ID NO: 18815 - protein, 10 aa, Artificial Sequence
  Description of Artificial Sequence: Synthetic epitope
GSKPRLAGEN

SEQ ID NO: 18816 - protein, 10 aa, Artificial Sequence
  Description of Artificial Sequence: Synthetic epitope
GSKSAISKPT

SEQ ID NO: 18817 - protein, 10 aa, Artificial Sequence
  Description of Artificial Sequence: Synthetic epitope
GSKSVDVSKL

SEQ ID NO: 18818 - protein, 10 aa, Artificial Sequence
  Description of Artificial Sequence: Synthetic epitope
GSKVMKGRMG

SEQ ID NO: 18819 - protein, 10 aa, Artificial Sequence
  Description of Artificial Sequence: Synthetic epitope
GSLKTSIIHG

SEQ ID NO: 18820 - protein, 10 aa, Artificial Sequence
  Description of Artificial Sequence: Synthetic epitope
GSLLKEKTSK

SEQ ID NO: 18821 - protein, 10 aa, Artificial Sequence
  Description of Artificial Sequence: Synthetic epitope
GSLLMVSDSE

SEQ ID NO: 18822 - protein, 10 aa, Artificial Sequence
  Description of Artificial Sequence: Synthetic epitope
GSLQRALAQL

SEQ ID NO: 18823 - protein, 10 aa, Artificial Sequence
  Description of Artificial Sequence: Synthetic epitope
GSLSASSRAR

SEQ ID NO: 18824 - protein, 10 aa, Artificial Sequence
  Description of Artificial Sequence: Synthetic epitope
GSLSETSDAD

SEQ ID NO: 18825 - protein, 10 aa, Artificial Sequence
  Description of Artificial Sequence: Synthetic epitope
GSLSKIEEYE

SEQ ID NO: 18826 - protein, 10 aa, Artificial Sequence
  Description of Artificial Sequence: Synthetic epitope
GSLSSQSKET

SEQ ID NO: 18827 - protein, 10 aa, Artificial Sequence
  Description of Artificial Sequence: Synthetic epitope
GSLVVITKGQ

SEQ ID NO: 18828 - protein, 10 aa, Artificial Sequence
  Description of Artificial Sequence: Synthetic epitope
GSMPTALLAS

SEQ ID NO: 18829 - protein, 10 aa, Artificial Sequence
  Description of Artificial Sequence: Synthetic epitope
GSNAQAYGTQ

SEQ ID NO: 18830 - protein, 10 aa, Artificial Sequence
  Description of Artificial Sequence: Synthetic epitope
GSNSALTTSN

SEQ ID NO: 18831 - protein, 10 aa, Artificial Sequence
  Description of Artificial Sequence: Synthetic epitope
GSNTETVQPE

SEQ ID NO: 18832 - protein, 10 aa, Artificial Sequence
  Description of Artificial Sequence: Synthetic epitope
GSNVILVRSN

SEQ ID NO: 18833 - protein, 10 aa, Artificial Sequence
  Description of Artificial Sequence: Synthetic epitope
GSPESTKLQT

SEQ ID NO: 18834 - protein, 10 aa, Artificial Sequence
  Description of Artificial Sequence: Synthetic epitope
GSQNSLVEML

SEQ ID NO: 18835 - protein, 10 aa, Artificial Sequence
  Description of Artificial Sequence: Synthetic epitope
GSQSESESDT

SEQ ID NO: 18836 - protein, 10 aa, Artificial Sequence
  Description of Artificial Sequence: Synthetic epitope
GSQSIAIHEP

SEQ ID NO: 18837 - protein, 10 aa, Artificial Sequence
  Description of Artificial Sequence: Synthetic epitope
GSQSLAAPTD

SEQ ID NO: 18838 - protein, 10 aa, Artificial Sequence
  Description of Artificial Sequence: Synthetic epitope
GSQTESLKAR

SEQ ID NO: 18839 - protein, 10 aa, Artificial Sequence
  Description of Artificial Sequence: Synthetic epitope
GSRFASKVAG

SEQ ID NO: 18840 - protein, 10 aa, Artificial Sequence
  Description of Artificial Sequence: Synthetic epitope
GSRSSTRTST

SEQ ID NO: 18841 - protein, 10 aa, Artificial Sequence
  Description of Artificial Sequence: Synthetic epitope
GSRTSLSEPE

SEQ ID NO: 18842 - protein, 10 aa, Artificial Sequence
  Description of Artificial Sequence: Synthetic epitope
GSRTTKKLST

SEQ ID NO: 18843 - protein, 10 aa, Artificial Sequence
  Description of Artificial Sequence: Synthetic epitope
GSSAETETDS

SEQ ID NO: 18844 - protein, 10 aa, Artificial Sequence
  Description of Artificial Sequence: Synthetic epitope
GSSAGDKMKT

SEQ ID NO: 18845 - protein, 10 aa, Artificial Sequence
  Description of Artificial Sequence: Synthetic epitope
GSSASAASEA

SEQ ID NO: 18846 - protein, 10 aa, Artificial Sequence
  Description of Artificial Sequence: Synthetic epitope
GSSEMLLSEM

SEQ ID NO: 18847 - protein, 10 aa, Artificial Sequence
  Description of Artificial Sequence: Synthetic epitope
GSSGFSLVKE

SEQ ID NO: 18848 - protein, 10 aa, Artificial Sequence
  Description of Artificial Sequence: Synthetic epitope
GSSGTETLEK

SEQ ID NO: 18849 - protein, 10 aa, Artificial Sequence
  Description of Artificial Sequence: Synthetic epitope
GSSLSVSVRD

SEQ ID NO: 18850 - protein, 10 aa, Artificial Sequence
  Description of Artificial Sequence: Synthetic epitope
GSSRMILKPK

SEQ ID NO: 18851 - protein, 10 aa, Artificial Sequence
  Description of Artificial Sequence: Synthetic epitope
GSSRSRTASK

SEQ ID NO: 18852 - protein, 10 aa, Artificial Sequence
  Description of Artificial Sequence: Synthetic epitope
GSSTMAQAKR

SEQ ID NO: 18853 - protein, 10 aa, Artificial Sequence
  Description of Artificial Sequence: Synthetic epitope
GSSTPLLSAG

SEQ ID NO: 18854 - protein, 10 aa, Artificial Sequence
  Description of Artificial Sequence: Synthetic epitope
GSSVASATVH

SEQ ID NO: 18855 - protein, 10 aa, Artificial Sequence
  Description of Artificial Sequence: Synthetic epitope
GSSVDLEESI

SEQ ID NO: 18856 - protein, 10 aa, Artificial Sequence
  Description of Artificial Sequence: Synthetic epitope
GSSVVAEETE

SEQ ID NO: 18857 - protein, 10 aa, Artificial Sequence
  Description of Artificial Sequence: Synthetic epitope
GSSVVTASVQ

SEQ ID NO: 18858 - protein, 10 aa, Artificial Sequence
  Description of Artificial Sequence: Synthetic epitope
GSTASKESEK

SEQ ID NO: 18859 - protein, 10 aa, Artificial Sequence
  Description of Artificial Sequence: Synthetic epitope
GSTIVVISAS

SEQ ID NO: 18860 - protein, 10 aa, Artificial Sequence
  Description of Artificial Sequence: Synthetic epitope
GSTLQRAKSA

SEQ ID NO: 18861 - protein, 10 aa, Artificial Sequence
  Description of Artificial Sequence: Synthetic epitope
GSTNARAKIP

SEQ ID NO: 18862 - protein, 10 aa, Artificial Sequence
  Description of Artificial Sequence: Synthetic epitope
GSTSSAERED

SEQ ID NO: 18863 - protein, 10 aa, Artificial Sequence
  Description of Artificial Sequence: Synthetic epitope
GSVAQKVQEF

SEQ ID NO: 18864 - protein, 10 aa, Artificial Sequence
  Description of Artificial Sequence: Synthetic epitope
GSVAYFNASQ

SEQ ID NO: 18865 - protein, 10 aa, Artificial Sequence
  Description of Artificial Sequence: Synthetic epitope
GSVLRLSQAL

SEQ ID NO: 18866 - protein, 10 aa, Artificial Sequence
  Description of Artificial Sequence: Synthetic epitope
GSVTKIFVAE

SEQ ID NO: 18867 - protein, 10 aa, Artificial Sequence
  Description of Artificial Sequence: Synthetic epitope
GSYKVEMARR

SEQ ID NO: 18868 - protein, 10 aa, Artificial Sequence
  Description of Artificial Sequence: Synthetic epitope
GSYMESSVAE

SEQ ID NO: 18869 - protein, 10 aa, Artificial Sequence
  Description of Artificial Sequence: Synthetic epitope
GTAELLMNAL

SEQ ID NO: 18870 - protein, 10 aa, Artificial Sequence
  Description of Artificial Sequence: Synthetic epitope
GTAMSRARRE

SEQ ID NO: 18871 - protein, 10 aa, Artificial Sequence
  Description of Artificial Sequence: Synthetic epitope
GTASAFFAKA

SEQ ID NO: 18872 - protein, 10 aa, Artificial Sequence
  Description of Artificial Sequence: Synthetic epitope
GTASNIKSRV

SEQ ID NO: 18873 - protein, 10 aa, Artificial Sequence
  Description of Artificial Sequence: Synthetic epitope
GTATEPLMLM

SEQ ID NO: 18874 - protein, 10 aa, Artificial Sequence
  Description of Artificial Sequence: Synthetic epitope
GTAYEQLIGK

SEQ ID NO: 18875 - protein, 10 aa, Artificial Sequence
  Description of Artificial Sequence: Synthetic epitope
GTDSAGQAQG

SEQ ID NO: 18876 - protein, 10 aa, Artificial Sequence
  Description of Artificial Sequence: Synthetic epitope
GTEAAPIEME

SEQ ID NO: 18877 - protein, 10 aa, Artificial Sequence
  Description of Artificial Sequence: Synthetic epitope
GTEASAAEET

SEQ ID NO: 18878 - protein, 10 aa, Artificial Sequence
  Description of Artificial Sequence: Synthetic epitope
GTEIINVLAT

SEQ ID NO: 18879 - protein, 10 aa, Artificial Sequence
  Description of Artificial Sequence: Synthetic epitope
GTEKETAQKE

SEQ ID NO: 18880 - protein, 10 aa, Artificial Sequence
  Description of Artificial Sequence: Synthetic epitope
GTERVSLMAD

SEQ ID NO: 18881 - protein, 10 aa, Artificial Sequence
  Description of Artificial Sequence: Synthetic epitope
GTGKALAKTE

SEQ ID NO: 18882 - protein, 10 aa, Artificial Sequence
  Description of Artificial Sequence: Synthetic epitope
GTGRSAKEQV

SEQ ID NO: 18883 - protein, 10 aa, Artificial Sequence
  Description of Artificial Sequence: Synthetic epitope
GTIARSHVRS

SEQ ID NO: 18884 - protein, 10 aa, Artificial Sequence
  Description of Artificial Sequence: Synthetic epitope
GTIELDLISW

SEQ ID NO: 18885 - protein, 10 aa, Artificial Sequence
  Description of Artificial Sequence: Synthetic epitope
GTKQDSSKLQ

SEQ ID NO: 18886 - protein, 10 aa, Artificial Sequence
  Description of Artificial Sequence: Synthetic epitope
GTKTELIERL

SEQ ID NO: 18887 - protein, 10 aa, Artificial Sequence
  Description of Artificial Sequence: Synthetic epitope
GTLKAIVDSP

SEQ ID NO: 18888 - protein, 10 aa, Artificial Sequence
  Description of Artificial Sequence: Synthetic epitope
GTLRTASVPA

SEQ ID NO: 18889 - protein, 10 aa, Artificial Sequence
  Description of Artificial Sequence: Synthetic epitope
GTLSQRITNQ

SEQ ID NO: 18890 - protein, 10 aa, Artificial Sequence
  Description of Artificial Sequence: Synthetic epitope
GTLSSISSLK

SEQ ID NO: 18891 - protein, 10 aa, Artificial Sequence
  Description of Artificial Sequence: Synthetic epitope
GTLVSKQAKS

SEQ ID NO: 18892 - protein, 10 aa, Artificial Sequence
  Description of Artificial Sequence: Synthetic epitope
GTNAKAFELS

SEQ ID NO: 18893 - protein, 10 aa, Artificial Sequence
  Description of Artificial Sequence: Synthetic epitope
GTNQTKEVSS

SEQ ID NO: 18894 - protein, 10 aa, Artificial Sequence
  Description of Artificial Sequence: Synthetic epitope
GTQEALKSGH

SEQ ID NO: 18895 - protein, 10 aa, Artificial Sequence
  Description of Artificial Sequence: Synthetic epitope
GTQEETSEGD

SEQ ID NO: 18896 - protein, 10 aa, Artificial Sequence
  Description of Artificial Sequence: Synthetic epitope
GTQRRGEGSE

SEQ ID NO: 18897 - protein, 10 aa, Artificial Sequence
  Description of Artificial Sequence: Synthetic epitope
GTQSTVGSES

SEQ ID NO: 18898 - protein, 10 aa, Artificial Sequence
  Description of Artificial Sequence: Synthetic epitope
GTQTEALQQL

SEQ ID NO: 18899 - protein, 10 aa, Artificial Sequence
  Description of Artificial Sequence: Synthetic epitope
GTRATKATKD

SEQ ID NO: 18900 - protein, 10 aa, Artificial Sequence
  Description of Artificial Sequence: Synthetic epitope
GTRKKSSNAE

SEQ ID NO: 18901 - protein, 10 aa, Artificial Sequence
  Description of Artificial Sequence: Synthetic epitope
GTRKVARAEE

SEQ ID NO: 18902 - protein, 10 aa, Artificial Sequence
  Description of Artificial Sequence: Synthetic epitope
GTRQQKLTSA

SEQ ID NO: 18903 - protein, 10 aa, Artificial Sequence
  Description of Artificial Sequence: Synthetic epitope
GTSEAQDASS

SEQ ID NO: 18904 - protein, 10 aa, Artificial Sequence
  Description of Artificial Sequence: Synthetic epitope
GTSEHWVDDE

SEQ ID NO: 18905 - protein, 10 aa, Artificial Sequence
  Description of Artificial Sequence: Synthetic epitope
GTSGELSVKE

SEQ ID NO: 18906 - protein, 10 aa, Artificial Sequence
  Description of Artificial Sequence: Synthetic epitope
GTSKNSNVKS

SEQ ID NO: 18907 - protein, 10 aa, Artificial Sequence
  Description of Artificial Sequence: Synthetic epitope
GTSQKSRTEG

SEQ ID NO: 18908 - protein, 10 aa, Artificial Sequence
  Description of Artificial Sequence: Synthetic epitope
GTSSARELVK

SEQ ID NO: 18909 - protein, 10 aa, Artificial Sequence
  Description of Artificial Sequence: Synthetic epitope
GTTESVQSVD

SEQ ID NO: 18910 - protein, 10 aa, Artificial Sequence
  Description of Artificial Sequence: Synthetic epitope
GTTKESKKFA

SEQ ID NO: 18911 - protein, 10 aa, Artificial Sequence
  Description of Artificial Sequence: Synthetic epitope
GTTKSEPQKD

SEQ ID NO: 18912 - protein, 10 aa, Artificial Sequence
  Description of Artificial Sequence: Synthetic epitope
GTTLESAGVV

SEQ ID NO: 18913 - protein, 10 aa, Artificial Sequence
  Description of Artificial Sequence: Synthetic epitope
GTTLRQVSIE

SEQ ID NO: 18914 - protein, 10 aa, Artificial Sequence
  Description of Artificial Sequence: Synthetic epitope
GTTQFLSQAS

SEQ ID NO: 18915 - protein, 10 aa, Artificial Sequence
  Description of Artificial Sequence: Synthetic epitope
GTTRRNPTSH

SEQ ID NO: 18916 - protein, 10 aa, Artificial Sequence
  Description of Artificial Sequence: Synthetic epitope
GTTSKKNSSQ

SEQ ID NO: 18917 - protein, 10 aa, Artificial Sequence
  Description of Artificial Sequence: Synthetic epitope
GTTSVTSNNE

SEQ ID NO: 18918 - protein, 10 aa, Artificial Sequence
  Description of Artificial Sequence: Synthetic epitope
GTTVASGVTA

SEQ ID NO: 18919 - protein, 10 aa, Artificial Sequence
  Description of Artificial Sequence: Synthetic epitope
GTVASSLLSQ

SEQ ID NO: 18920 - protein, 10 aa, Artificial Sequence
  Description of Artificial Sequence: Synthetic epitope
GTVDSRAESI

SEQ ID NO: 18921 - protein, 10 aa, Artificial Sequence
  Description of Artificial Sequence: Synthetic epitope
GTVERATNTA

SEQ ID NO: 18922 - protein, 10 aa, Artificial Sequence
  Description of Artificial Sequence: Synthetic epitope
GTVLTATTSE

SEQ ID NO: 18923 - protein, 10 aa, Artificial Sequence
  Description of Artificial Sequence: Synthetic epitope
GTVMLTSKNI

SEQ ID NO: 18924 - protein, 10 aa, Artificial Sequence
  Description of Artificial Sequence: Synthetic epitope
GTVPSRTIEE

SEQ ID NO: 18925 - protein, 10 aa, Artificial Sequence
  Description of Artificial Sequence: Synthetic epitope
GTVSEAQLAR

SEQ ID NO: 18926 - protein, 10 aa, Artificial Sequence
  Description of Artificial Sequence: Synthetic epitope
GTWESQRQDS

SEQ ID NO: 18927 - protein, 10 aa, Artificial Sequence
  Description of Artificial Sequence: Synthetic epitope
GVADKAQHVF

SEQ ID NO: 18928 - protein, 10 aa, Artificial Sequence
  Description of Artificial Sequence: Synthetic epitope
GVEANSRPLD

SEQ ID NO: 18929 - protein, 10 aa, Artificial Sequence
  Description of Artificial Sequence: Synthetic epitope
GVEEIALMNE

SEQ ID NO: 18930 - protein, 10 aa, Artificial Sequence
  Description of Artificial Sequence: Synthetic epitope
GVEGGNATRI

SEQ ID NO: 18931 - protein, 10 aa, Artificial Sequence
  Description of Artificial Sequence: Synthetic epitope
GVEKQVEHGP

SEQ ID NO: 18932 - protein, 10 aa, Artificial Sequence
  Description of Artificial Sequence: Synthetic epitope
GVESAISSLD

SEQ ID NO: 18933 - protein, 10 aa, Artificial Sequence
  Description of Artificial Sequence: Synthetic epitope
GVESTAAPQK

SEQ ID NO: 18934 - protein, 10 aa, Artificial Sequence
  Description of Artificial Sequence: Synthetic epitope
GVGANSKISA

SEQ ID NO: 18935 - protein, 10 aa, Artificial Sequence
  Description of Artificial Sequence: Synthetic epitope
GVGPQVEEFS

SEQ ID NO: 18936 - protein, 10 aa, Artificial Sequence
  Description of Artificial Sequence: Synthetic epitope
GVHETTSSRN

SEQ ID NO: 18937 - protein, 10 aa, Artificial Sequence
  Description of Artificial Sequence: Synthetic epitope
GVHSVMKHDA

SEQ ID NO: 18938 - protein, 10 aa, Artificial Sequence
  Description of Artificial Sequence: Synthetic epitope
GVIGKEIDAA

SEQ ID NO: 18939 - protein, 10 aa, Artificial Sequence
  Description of Artificial Sequence: Synthetic epitope
GVINVEQSSV

SEQ ID NO: 18940 - protein, 10 aa, Artificial Sequence
  Description of Artificial Sequence: Synthetic epitope
GVKKVLTSFL

SEQ ID NO: 18941 - protein, 10 aa, Artificial Sequence
  Description of Artificial Sequence: Synthetic epitope
GVKMLSTANM

SEQ ID NO: 18942 - protein, 10 aa, Artificial Sequence
  Description of Artificial Sequence: Synthetic epitope
GVKQNIKKEM

SEQ ID NO: 18943 - protein, 10 aa, Artificial Sequence
  Description of Artificial Sequence: Synthetic epitope
GVKRKTQKPV

SEQ ID NO: 18944 - protein, 10 aa, Artificial Sequence
  Description of Artificial Sequence: Synthetic epitope
GVLEESNKIE

SEQ ID NO: 18945 - protein, 10 aa, Artificial Sequence
  Description of Artificial Sequence: Synthetic epitope
GVNDRAEMVE

SEQ ID NO: 18946 - protein, 10 aa, Artificial Sequence
  Description of Artificial Sequence: Synthetic epitope
GVNSSASLSP

SEQ ID NO: 18947 - protein, 10 aa, Artificial Sequence
  Description of Artificial Sequence: Synthetic epitope
GVQEAETATD

SEQ ID NO: 18948 - protein, 10 aa, Artificial Sequence
  Description of Artificial Sequence: Synthetic epitope
GVQESKKEPG

SEQ ID NO: 18949 - protein, 10 aa, Artificial Sequence
  Description of Artificial Sequence: Synthetic epitope
GVQHVNFTNR

SEQ ID NO: 18950 - protein, 10 aa, Artificial Sequence
  Description of Artificial Sequence: Synthetic epitope
GVRKSNAAER

SEQ ID NO: 18951 - protein, 10 aa, Artificial Sequence
  Description of Artificial Sequence: Synthetic epitope
GVSGLVTSRS

SEQ ID NO: 18952 - protein, 10 aa, Artificial Sequence
  Description of Artificial Sequence: Synthetic epitope
GVSKTLDGPE

SEQ ID NO: 18953 - protein, 10 aa, Artificial Sequence
  Description of Artificial Sequence: Synthetic epitope
GVSMENATSA

SEQ ID NO: 18954 - protein, 10 aa, Artificial Sequence
  Description of Artificial Sequence: Synthetic epitope
GVSSVAEAMA

SEQ ID NO: 18955 - protein, 10 aa, Artificial Sequence
  Description of Artificial Sequence: Synthetic epitope
GVSVSQYEEQ

SEQ ID NO: 18956 - protein, 10 aa, Artificial Sequence
  Description of Artificial Sequence: Synthetic epitope
GVTDRTSNTK

SEQ ID NO: 18957 - protein, 10 aa, Artificial Sequence
  Description of Artificial Sequence: Synthetic epitope
GVTETPLMKE

SEQ ID NO: 18958 - protein, 10 aa, Artificial Sequence
  Description of Artificial Sequence: Synthetic epitope
GVTFTIQLEA

SEQ ID NO: 18959 - protein, 10 aa, Artificial Sequence
  Description of Artificial Sequence: Synthetic epitope
GVTGQLNIVQ

SEQ ID NO: 18960 - protein, 10 aa, Artificial Sequence
  Description of Artificial Sequence: Synthetic epitope
GVTTVMAVED

SEQ ID NO: 18961 - protein, 10 aa, Artificial Sequence
  Description of Artificial Sequence: Synthetic epitope
GVTVTAEAVS

SEQ ID NO: 18962 - protein, 10 aa, Artificial Sequence
  Description of Artificial Sequence: Synthetic epitope
GVVAAYAESY

SEQ ID NO: 18963 - protein, 10 aa, Artificial Sequence
  Description of Artificial Sequence: Synthetic epitope
GVVKAATGTS

SEQ ID NO: 18964 - protein, 10 aa, Artificial Sequence
  Description of Artificial Sequence: Synthetic epitope
GVVKRAVASQ

SEQ ID NO: 18965 - protein, 10 aa, Artificial Sequence
  Description of Artificial Sequence: Synthetic epitope
GVWRNTEDEI

SEQ ID NO: 18966 - protein, 10 aa, Artificial Sequence
  Description of Artificial Sequence: Synthetic epitope
GWFIAVSSEG

SEQ ID NO: 18967 - protein, 10 aa, Artificial Sequence
  Description of Artificial Sequence: Synthetic epitope
GWKSVESVPK

SEQ ID NO: 18968 - protein, 10 aa, Artificial Sequence
  Description of Artificial Sequence: Synthetic epitope
GWPITRVGNP

SEQ ID NO: 18969 - protein, 10 aa, Artificial Sequence
  Description of Artificial Sequence: Synthetic epitope
GWYNEIKTIV

SEQ ID NO: 18970 - protein, 10 aa, Artificial Sequence
  Description of Artificial Sequence: Synthetic epitope
GYEPTSMRAI

SEQ ID NO: 18971 - protein, 10 aa, Artificial Sequence
  Description of Artificial Sequence: Synthetic epitope
GYESRDNMEL

SEQ ID NO: 18972 - protein, 10 aa, Artificial Sequence
  Description of Artificial Sequence: Synthetic epitope
GYHTEMVDGE

SEQ ID NO: 18973 - protein, 10 aa, Artificial Sequence
  Description of Artificial Sequence: Synthetic epitope
GYKVVEKMDN

SEQ ID NO: 18974 - protein, 10 aa, Artificial Sequence
  Description of Artificial Sequence: Synthetic epitope
GYLMSVESSE

SEQ ID NO: 18975 - protein, 10 aa, Artificial Sequence
  Description of Artificial Sequence: Synthetic epitope
GYMEIEQSVK

SEQ ID NO: 18976 - protein, 10 aa, Artificial Sequence
  Description of Artificial Sequence: Synthetic epitope
GYQAGAARLE

SEQ ID NO: 18977 - protein, 10 aa, Artificial Sequence
  Description of Artificial Sequence: Synthetic epitope
GYTQENQDTS

SEQ ID NO: 18978 - protein, 10 aa, Artificial Sequence
  Description of Artificial Sequence: Synthetic epitope
HAAGVSLQKT

SEQ ID NO: 18979 - protein, 10 aa, Artificial Sequence
  Description of Artificial Sequence: Synthetic epitope
HAALETQTLS

SEQ ID NO: 18980 - protein, 10 aa, Artificial Sequence
  Description of Artificial Sequence: Synthetic epitope
HAARSLSEIA

SEQ ID NO: 18981 - protein, 10 aa, Artificial Sequence
  Description of Artificial Sequence: Synthetic epitope
HAAWTHMRGF

SEQ ID NO: 18982 - protein, 10 aa, Artificial Sequence
  Description of Artificial Sequence: Synthetic epitope
HADEASRAAE

SEQ ID NO: 18983 - protein, 10 aa, Artificial Sequence
  Description of Artificial Sequence: Synthetic epitope
HADNSSDTEM

SEQ ID NO: 18984 - protein, 10 aa, Artificial Sequence
  Description of Artificial Sequence: Synthetic epitope
HAEATYEEDW

SEQ ID NO: 18985 - protein, 10 aa, Artificial Sequence
  Description of Artificial Sequence: Synthetic epitope
HAEKDNQMKP

SEQ ID NO: 18986 - protein, 10 aa, Artificial Sequence
  Description of Artificial Sequence: Synthetic epitope
HAFEAFQSTR

SEQ ID NO: 18987 - protein, 10 aa, Artificial Sequence
  Description of Artificial Sequence: Synthetic epitope
HAGNIEVGHG

SEQ ID NO: 18988 - protein, 10 aa, Artificial Sequence
  Description of Artificial Sequence: Synthetic epitope
HAGSLTNHRQ

SEQ ID NO: 18989 - protein, 10 aa, Artificial Sequence
  Description of Artificial Sequence: Synthetic epitope
HAHLVKLMEY

SEQ ID NO: 18990 - protein, 10 aa, Artificial Sequence
  Description of Artificial Sequence: Synthetic epitope
HAIILLEKHL

SEQ ID NO: 18991 - protein, 10 aa, Artificial Sequence
  Description of Artificial Sequence: Synthetic epitope
HAKADSAVSQ

SEQ ID NO: 18992 - protein, 10 aa, Artificial Sequence
  Description of Artificial Sequence: Synthetic epitope
HAKIKAVQRS

SEQ ID NO: 18993 - protein, 10 aa, Artificial Sequence
  Description of Artificial Sequence: Synthetic epitope
HAKSEAELQG

SEQ ID NO: 18994 - protein, 10 aa, Artificial Sequence
  Description of Artificial Sequence: Synthetic epitope
HAKTKEKLEV

SEQ ID NO: 18995 - protein, 10 aa, Artificial Sequence
  Description of Artificial Sequence: Synthetic epitope
HALGLKSSEQ

SEQ ID NO: 18996 - protein, 10 aa, Artificial Sequence
  Description of Artificial Sequence: Synthetic epitope
HALKLRSPDA

SEQ ID NO: 18997 - protein, 10 aa, Artificial Sequence
  Description of Artificial Sequence: Synthetic epitope
HALQALLDVP

SEQ ID NO: 18998 - protein, 10 aa, Artificial Sequence
  Description of Artificial Sequence: Synthetic epitope
HALSLVTDVS

SEQ ID NO: 18999 - protein, 10 aa, Artificial Sequence
  Description of Artificial Sequence: Synthetic epitope
HAMEAERLVE

SEQ ID NO: 19000 - protein, 10 aa, Artificial Sequence
  Description of Artificial Sequence: Synthetic epitope
HAMLQRKKNQ

SEQ ID NO: 19001 - protein, 10 aa, Artificial Sequence
  Description of Artificial Sequence: Synthetic epitope
HAPPSSMIRS

SEQ ID NO: 19002 - protein, 10 aa, Artificial Sequence
  Description of Artificial Sequence: Synthetic epitope
HASMKSLLTS

SEQ ID NO: 19003 - protein, 10 aa, Artificial Sequence
  Description of Artificial Sequence: Synthetic epitope
HASQNSARRE

SEQ ID NO: 19004 - protein, 10 aa, Artificial Sequence
  Description of Artificial Sequence: Synthetic epitope
HASTKLSRAT

SEQ ID NO: 19005 - protein, 10 aa, Artificial Sequence
  Description of Artificial Sequence: Synthetic epitope
HATGAESDKT

SEQ ID NO: 19006 - protein, 10 aa, Artificial Sequence
  Description of Artificial Sequence: Synthetic epitope
HDAIVVRKMA

SEQ ID NO: 19007 - protein, 10 aa, Artificial Sequence
  Description of Artificial Sequence: Synthetic epitope
HDASLVSTAQ

SEQ ID NO: 19008 - protein, 10 aa, Artificial Sequence
  Description of Artificial Sequence: Synthetic epitope
HDASLVSTAQ

SEQ ID NO: 19009 - protein, 10 aa, Artificial Sequence
  Description of Artificial Sequence: Synthetic epitope
HDASTSSDSE

SEQ ID NO: 19010 - protein, 10 aa, Artificial Sequence
  Description of Artificial Sequence: Synthetic epitope
HDASWEEQIF

SEQ ID NO: 19011 - protein, 10 aa, Artificial Sequence
  Description of Artificial Sequence: Synthetic epitope
HDEQSTDDSR

SEQ ID NO: 19012 - protein, 10 aa, Artificial Sequence
  Description of Artificial Sequence: Synthetic epitope
HDESNAFESK

SEQ ID NO: 19013 - protein, 10 aa, Artificial Sequence
  Description of Artificial Sequence: Synthetic epitope
HDIQIVSTTR

SEQ ID NO: 19014 - protein, 10 aa, Artificial Sequence
  Description of Artificial Sequence: Synthetic epitope
HDKNKTISSE

SEQ ID NO: 19015 - protein, 10 aa, Artificial Sequence
  Description of Artificial Sequence: Synthetic epitope
HDLGWQNLGR

SEQ ID NO: 19016 - protein, 10 aa, Artificial Sequence
  Description of Artificial Sequence: Synthetic epitope
HDLSQSAFLS

SEQ ID NO: 19017 - protein, 10 aa, Artificial Sequence
  Description of Artificial Sequence: Synthetic epitope
HDMTARTGED

SEQ ID NO: 19018 - protein, 10 aa, Artificial Sequence
  Description of Artificial Sequence: Synthetic epitope
HDQHLQTFSE

SEQ ID NO: 19019 - protein, 10 aa, Artificial Sequence
  Description of Artificial Sequence: Synthetic epitope
HDRDEQFYWI

SEQ ID NO: 19020 - protein, 10 aa, Artificial Sequence
  Description of Artificial Sequence: Synthetic epitope
HDRTAVIKEN

SEQ ID NO: 19021 - protein, 10 aa, Artificial Sequence
  Description of Artificial Sequence: Synthetic epitope
HDSASFTQMS

SEQ ID NO: 19022 - protein, 10 aa, Artificial Sequence
  Description of Artificial Sequence: Synthetic epitope
HDSLSSLQQI

SEQ ID NO: 19023 - protein, 10 aa, Artificial Sequence
  Description of Artificial Sequence: Synthetic epitope
HDSSALSNSF

SEQ ID NO: 19024 - protein, 10 aa, Artificial Sequence
  Description of Artificial Sequence: Synthetic epitope
HDSVNALTLE

SEQ ID NO: 19025 - protein, 10 aa, Artificial Sequence
  Description of Artificial Sequence: Synthetic epitope
HDVSRIIKKP

SEQ ID NO: 19026 - protein, 10 aa, Artificial Sequence
  Description of Artificial Sequence: Synthetic epitope
HDWGGADAKV

SEQ ID NO: 19027 - protein, 10 aa, Artificial Sequence
  Description of Artificial Sequence: Synthetic epitope
HDWNDKEIEV

SEQ ID NO: 19028 - protein, 10 aa, Artificial Sequence
  Description of Artificial Sequence: Synthetic epitope
HEDAASGAEK

SEQ ID NO: 19029 - protein, 10 aa, Artificial Sequence
  Description of Artificial Sequence: Synthetic epitope
HEDPNRMTGG

SEQ ID NO: 19030 - protein, 10 aa, Artificial Sequence
  Description of Artificial Sequence: Synthetic epitope
HEDSEDAEET

SEQ ID NO: 19031 - protein, 10 aa, Artificial Sequence
  Description of Artificial Sequence: Synthetic epitope
HEEAEEMGGY

SEQ ID NO: 19032 - protein, 10 aa, Artificial Sequence
  Description of Artificial Sequence: Synthetic epitope
HEEKVIKDRR

SEQ ID NO: 19033 - protein, 10 aa, Artificial Sequence
  Description of Artificial Sequence: Synthetic epitope
HEEREAEKVR

SEQ ID NO: 19034 - protein, 10 aa, Artificial Sequence
  Description of Artificial Sequence: Synthetic epitope
HEFIFHTRKF

SEQ ID NO: 19035 - protein, 10 aa, Artificial Sequence
  Description of Artificial Sequence: Synthetic epitope
HEFQDETDTE

SEQ ID NO: 19036 - protein, 10 aa, Artificial Sequence
  Description of Artificial Sequence: Synthetic epitope
HEHSVSSAFK

SEQ ID NO: 19037 - protein, 10 aa, Artificial Sequence
  Description of Artificial Sequence: Synthetic epitope
HEILELIIEK

SEQ ID NO: 19038 - protein, 10 aa, Artificial Sequence
  Description of Artificial Sequence: Synthetic epitope
HEKRSELEEQ

SEQ ID NO: 19039 - protein, 10 aa, Artificial Sequence
  Description of Artificial Sequence: Synthetic epitope
HEKVQKASTE

SEQ ID NO: 19040 - protein, 10 aa, Artificial Sequence
  Description of Artificial Sequence: Synthetic epitope
HELAETTREK

SEQ ID NO: 19041 - protein, 10 aa, Artificial Sequence
  Description of Artificial Sequence: Synthetic epitope
HELKMGSADE

SEQ ID NO: 19042 - protein, 10 aa, Artificial Sequence
  Description of Artificial Sequence: Synthetic epitope
HELKSAIKTQ

SEQ ID NO: 19043 - protein, 10 aa, Artificial Sequence
  Description of Artificial Sequence: Synthetic epitope
HELVGLAKDS

SEQ ID NO: 19044 - protein, 10 aa, Artificial Sequence
  Description of Artificial Sequence: Synthetic epitope
HEMEAKASRE

SEQ ID NO: 19045 - protein, 10 aa, Artificial Sequence
  Description of Artificial Sequence: Synthetic epitope
HENIKINQAM

SEQ ID NO: 19046 - protein, 10 aa, Artificial Sequence
  Description of Artificial Sequence: Synthetic epitope
HENQKALELR

SEQ ID NO: 19047 - protein, 10 aa, Artificial Sequence
  Description of Artificial Sequence: Synthetic epitope
HENVPKVKES

SEQ ID NO: 19048 - protein, 10 aa, Artificial Sequence
  Description of Artificial Sequence: Synthetic epitope
HEQATQSQTT

SEQ ID NO: 19049 - protein, 10 aa, Artificial Sequence
  Description of Artificial Sequence: Synthetic epitope
HEQLRAVIVR

SEQ ID NO: 19050 - protein, 10 aa, Artificial Sequence
  Description of Artificial Sequence: Synthetic epitope
HEQMQVFQMI

SEQ ID NO: 19051 - protein, 10 aa, Artificial Sequence
  Description of Artificial Sequence: Synthetic epitope
HEQNVTRPAA

SEQ ID NO: 19052 - protein, 10 aa, Artificial Sequence
  Description of Artificial Sequence: Synthetic epitope
HEQSQQNKSQ

SEQ ID NO: 19053 - protein, 10 aa, Artificial Sequence
  Description of Artificial Sequence: Synthetic epitope
HEQWVNEDRH

SEQ ID NO: 19054 - protein, 10 aa, Artificial Sequence
  Description of Artificial Sequence: Synthetic epitope
HERGASGGQT

SEQ ID NO: 19055 - protein, 10 aa, Artificial Sequence
  Description of Artificial Sequence: Synthetic epitope
HERKDKRSTP

SEQ ID NO: 19056 - protein, 10 aa, Artificial Sequence
  Description of Artificial Sequence: Synthetic epitope
HERPDKMLGP

SEQ ID NO: 19057 - protein, 10 aa, Artificial Sequence
  Description of Artificial Sequence: Synthetic epitope
HESIKETSSK

SEQ ID NO: 19058 - protein, 10 aa, Artificial Sequence
  Description of Artificial Sequence: Synthetic epitope
HESKMTNTEG

SEQ ID NO: 19059 - protein, 10 aa, Artificial Sequence
  Description of Artificial Sequence: Synthetic epitope
HESLEIVSPS

SEQ ID NO: 19060 - protein, 10 aa, Artificial Sequence
  Description of Artificial Sequence: Synthetic epitope
HESQSDRASF

SEQ ID NO: 19061 - protein, 10 aa, Artificial Sequence
  Description of Artificial Sequence: Synthetic epitope
HESRSAVSSR

SEQ ID NO: 19062 - protein, 10 aa, Artificial Sequence
  Description of Artificial Sequence: Synthetic epitope
HESSMSRAQS

SEQ ID NO: 19063 - protein, 10 aa, Artificial Sequence
  Description of Artificial Sequence: Synthetic epitope
HESVKQLNGD

SEQ ID NO: 19064 - protein, 10 aa, Artificial Sequence
  Description of Artificial Sequence: Synthetic epitope
HETNKAVAKG

SEQ ID NO: 19065 - protein, 10 aa, Artificial Sequence
  Description of Artificial Sequence: Synthetic epitope
HETTAELMNT

SEQ ID NO: 19066 - protein, 10 aa, Artificial Sequence
  Description of Artificial Sequence: Synthetic epitope
HEVAAMLKSE

SEQ ID NO: 19067 - protein, 10 aa, Artificial Sequence
  Description of Artificial Sequence: Synthetic epitope
HEVEERKNGQ

SEQ ID NO: 19068 - protein, 10 aa, Artificial Sequence
  Description of Artificial Sequence: Synthetic epitope
HEVIETRKKE

SEQ ID NO: 19069 - protein, 10 aa, Artificial Sequence
  Description of Artificial Sequence: Synthetic epitope
HEVQIIKNMP

SEQ ID NO: 19070 - protein, 10 aa, Artificial Sequence
  Description of Artificial Sequence: Synthetic epitope
HEVTQLRLGE

SEQ ID NO: 19071 - protein, 10 aa, Artificial Sequence
  Description of Artificial Sequence: Synthetic epitope
HEYFPEMQIL

SEQ ID NO: 19072 - protein, 10 aa, Artificial Sequence
  Description of Artificial Sequence: Synthetic epitope
HEYKNEADHG

SEQ ID NO: 19073 - protein, 10 aa, Artificial Sequence
  Description of Artificial Sequence: Synthetic epitope
HEYVAEVEKH

SEQ ID NO: 19074 - protein, 10 aa, Artificial Sequence
  Description of Artificial Sequence: Synthetic epitope
HFANTARKQT

SEQ ID NO: 19075 - protein, 10 aa, Artificial Sequence
  Description of Artificial Sequence: Synthetic epitope
HFGQTEIVDL

SEQ ID NO: 19076 - protein, 10 aa, Artificial Sequence
  Description of Artificial Sequence: Synthetic epitope
HFGSSQTEKS

SEQ ID NO: 19077 - protein, 10 aa, Artificial Sequence
  Description of Artificial Sequence: Synthetic epitope
HFKKLSTQGQ

SEQ ID NO: 19078 - protein, 10 aa, Artificial Sequence
  Description of Artificial Sequence: Synthetic epitope
HFLNTGQNTM

SEQ ID NO: 19079 - protein, 10 aa, Artificial Sequence
  Description of Artificial Sequence: Synthetic epitope
HFLTLSTIKD

SEQ ID NO: 19080 - protein, 10 aa, Artificial Sequence
  Description of Artificial Sequence: Synthetic epitope
HFPDMEIFLR

SEQ ID NO: 19081 - protein, 10 aa, Artificial Sequence
  Description of Artificial Sequence: Synthetic epitope
HFSNESTAVK

SEQ ID NO: 19082 - protein, 10 aa, Artificial Sequence
  Description of Artificial Sequence: Synthetic epitope
HFVEATYKNP

SEQ ID NO: 19083 - protein, 10 aa, Artificial Sequence
  Description of Artificial Sequence: Synthetic epitope
HFVKDEKTRF

SEQ ID NO: 19084 - protein, 10 aa, Artificial Sequence
  Description of Artificial Sequence: Synthetic epitope
HGAMVAVRVQ

SEQ ID NO: 19085 - protein, 10 aa, Artificial Sequence
  Description of Artificial Sequence: Synthetic epitope
HGARSLLQFL

SEQ ID NO: 19086 - protein, 10 aa, Artificial Sequence
  Description of Artificial Sequence: Synthetic epitope
HGEGNFDVDK

SEQ ID NO: 19087 - protein, 10 aa, Artificial Sequence
  Description of Artificial Sequence: Synthetic epitope
HGEPTSDLSD

SEQ ID NO: 19088 - protein, 10 aa, Artificial Sequence
  Description of Artificial Sequence: Synthetic epitope
HGFIQTLLKV

SEQ ID NO: 19089 - protein, 10 aa, Artificial Sequence
  Description of Artificial Sequence: Synthetic epitope
HGGKSSAQSA

SEQ ID NO: 19090 - protein, 10 aa, Artificial Sequence
  Description of Artificial Sequence: Synthetic epitope
HGIMMESFMR

SEQ ID NO: 19091 - protein, 10 aa, Artificial Sequence
  Description of Artificial Sequence: Synthetic epitope
HGKGKITKSE

SEQ ID NO: 19092 - protein, 10 aa, Artificial Sequence
  Description of Artificial Sequence: Synthetic epitope
HGKGKKSSLA

SEQ ID NO: 19093 - protein, 10 aa, Artificial Sequence
  Description of Artificial Sequence: Synthetic epitope
HGKRIGVQGK

SEQ ID NO: 19094 - protein, 10 aa, Artificial Sequence
  Description of Artificial Sequence: Synthetic epitope
HGKTAASKRK

SEQ ID NO: 19095 - protein, 10 aa, Artificial Sequence
  Description of Artificial Sequence: Synthetic epitope
HGLNLDDGKE

SEQ ID NO: 19096 - protein, 10 aa, Artificial Sequence
  Description of Artificial Sequence: Synthetic epitope
HGLSLSRRST

SEQ ID NO: 19097 - protein, 10 aa, Artificial Sequence
  Description of Artificial Sequence: Synthetic epitope
HGMISSHITE

SEQ ID NO: 19098 - protein, 10 aa, Artificial Sequence
  Description of Artificial Sequence: Synthetic epitope
HGNETQLTPH

SEQ ID NO: 19099 - protein, 10 aa, Artificial Sequence
  Description of Artificial Sequence: Synthetic epitope
HGQEEAAQSP

SEQ ID NO: 19100 - protein, 10 aa, Artificial Sequence
  Description of Artificial Sequence: Synthetic epitope
HGREWLFAPD

SEQ ID NO: 19101 - protein, 10 aa, Artificial Sequence
  Description of Artificial Sequence: Synthetic epitope
HGRTSKLKPK

SEQ ID NO: 19102 - protein, 10 aa, Artificial Sequence
  Description of Artificial Sequence: Synthetic epitope
HGSKFSMLAN

SEQ ID NO: 19103 - protein, 10 aa, Artificial Sequence
  Description of Artificial Sequence: Synthetic epitope
HGTLSVEESR

SEQ ID NO: 19104 - protein, 10 aa, Artificial Sequence
  Description of Artificial Sequence: Synthetic epitope
HGVMEYDLSL

SEQ ID NO: 19105 - protein, 10 aa, Artificial Sequence
  Description of Artificial Sequence: Synthetic epitope
HHEAADSSHG

SEQ ID NO: 19106 - protein, 10 aa, Artificial Sequence
  Description of Artificial Sequence: Synthetic epitope
HHLLVTNELL

SEQ ID NO: 19107 - protein, 10 aa, Artificial Sequence
  Description of Artificial Sequence: Synthetic epitope
HHMQQMQQGN

SEQ ID NO: 19108 - protein, 10 aa, Artificial Sequence
  Description of Artificial Sequence: Synthetic epitope
HHPQENTQRL

SEQ ID NO: 19109 - protein, 10 aa, Artificial Sequence
  Description of Artificial Sequence: Synthetic epitope
HHQAEGLVKP

SEQ ID NO: 19110 - protein, 10 aa, Artificial Sequence
  Description of Artificial Sequence: Synthetic epitope
HHRGTQTKAE

SEQ ID NO: 19111 - protein, 10 aa, Artificial Sequence
  Description of Artificial Sequence: Synthetic epitope
HHRPQFLETR

SEQ ID NO: 19112 - protein, 10 aa, Artificial Sequence
  Description of Artificial Sequence: Synthetic epitope
HHSPQAESMI

SEQ ID NO: 19113 - protein, 10 aa, Artificial Sequence
  Description of Artificial Sequence: Synthetic epitope
HHSTDSSVVN

SEQ ID NO: 19114 - protein, 10 aa, Artificial Sequence
  Description of Artificial Sequence: Synthetic epitope
HHTSKDSYDQ

SEQ ID NO: 19115 - protein, 10 aa, Artificial Sequence
  Description of Artificial Sequence: Synthetic epitope
HHVSVKNHSL

SEQ ID NO: 19116 - protein, 10 aa, Artificial Sequence
  Description of Artificial Sequence: Synthetic epitope
HHVVTNVEKE

SEQ ID NO: 19117 - protein, 10 aa, Artificial Sequence
  Description of Artificial Sequence: Synthetic epitope
HIAEESAPNH

SEQ ID NO: 19118 - protein, 10 aa, Artificial Sequence
  Description of Artificial Sequence: Synthetic epitope
HIAKSESKTS

SEQ ID NO: 19119 - protein, 10 aa, Artificial Sequence
  Description of Artificial Sequence: Synthetic epitope
HIATKTRLSE

SEQ ID NO: 19120 - protein, 10 aa, Artificial Sequence
  Description of Artificial Sequence: Synthetic epitope
HIDNQMDRYQ

SEQ ID NO: 19121 - protein, 10 aa, Artificial Sequence
  Description of Artificial Sequence: Synthetic epitope
HIDSEFEENT

SEQ ID NO: 19122 - protein, 10 aa, Artificial Sequence
  Description of Artificial Sequence: Synthetic epitope
HIEHLKSEVE

SEQ ID NO: 19123 - protein, 10 aa, Artificial Sequence
  Description of Artificial Sequence: Synthetic epitope
HIGKAILSQP

SEQ ID NO: 19124 - protein, 10 aa, Artificial Sequence
  Description of Artificial Sequence: Synthetic epitope
HIIPNIQDTQ

SEQ ID NO: 19125 - protein, 10 aa, Artificial Sequence
  Description of Artificial Sequence: Synthetic epitope
HIKNLSFHND

SEQ ID NO: 19126 - protein, 10 aa, Artificial Sequence
  Description of Artificial Sequence: Synthetic epitope
HIMQQALSSH

SEQ ID NO: 19127 - protein, 10 aa, Artificial Sequence
  Description of Artificial Sequence: Synthetic epitope
HIQAHAGKIE

SEQ ID NO: 19128 - protein, 10 aa, Artificial Sequence
  Description of Artificial Sequence: Synthetic epitope
HISPSNMTNQ

SEQ ID NO: 19129 - protein, 10 aa, Artificial Sequence
  Description of Artificial Sequence: Synthetic epitope
HISQRSQTEA

SEQ ID NO: 19130 - protein, 10 aa, Artificial Sequence
  Description of Artificial Sequence: Synthetic epitope
HISQTNAENQ

SEQ ID NO: 19131 - protein, 10 aa, Artificial Sequence
  Description of Artificial Sequence: Synthetic epitope
HITDASDMTR

SEQ ID NO: 19132 - protein, 10 aa, Artificial Sequence
  Description of Artificial Sequence: Synthetic epitope
HITDATRKRE

SEQ ID NO: 19133 - protein, 10 aa, Artificial Sequence
  Description of Artificial Sequence: Synthetic epitope
HITDQVHLYP

SEQ ID NO: 19134 - protein, 10 aa, Artificial Sequence
  Description of Artificial Sequence: Synthetic epitope
HITKLITINE

SEQ ID NO: 19135 - protein, 10 aa, Artificial Sequence
  Description of Artificial Sequence: Synthetic epitope
HITTITSSQK

SEQ ID NO: 19136 - protein, 10 aa, Artificial Sequence
  Description of Artificial Sequence: Synthetic epitope
HKAKNAGSTK

SEQ ID NO: 19137 - protein, 10 aa, Artificial Sequence
  Description of Artificial Sequence: Synthetic epitope
HKALTLTHDN

SEQ ID NO: 19138 - protein, 10 aa, Artificial Sequence
  Description of Artificial Sequence: Synthetic epitope
HKAPSARTAK

SEQ ID NO: 19139 - protein, 10 aa, Artificial Sequence
  Description of Artificial Sequence: Synthetic epitope
HKARRFVEQV

SEQ ID NO: 19140 - protein, 10 aa, Artificial Sequence
  Description of Artificial Sequence: Synthetic epitope
HKDPNAIFLS

SEQ ID NO: 19141 - protein, 10 aa, Artificial Sequence
  Description of Artificial Sequence: Synthetic epitope
HKDVSKREGS

SEQ ID NO: 19142 - protein, 10 aa, Artificial Sequence
  Description of Artificial Sequence: Synthetic epitope
HKEEVIQHQT

SEQ ID NO: 19143 - protein, 10 aa, Artificial Sequence
  Description of Artificial Sequence: Synthetic epitope
HKELMAADRG

SEQ ID NO: 19144 - protein, 10 aa, Artificial Sequence
  Description of Artificial Sequence: Synthetic epitope
HKERHKMGEE

SEQ ID NO: 19145 - protein, 10 aa, Artificial Sequence
  Description of Artificial Sequence: Synthetic epitope
HKFSRSTYNE

SEQ ID NO: 19146 - protein, 10 aa, Artificial Sequence
  Description of Artificial Sequence: Synthetic epitope
HKGKSKKTST

SEQ ID NO: 19147 - protein, 10 aa, Artificial Sequence
  Description of Artificial Sequence: Synthetic epitope
HKHHDKFTNT

SEQ ID NO: 19148 - protein, 10 aa, Artificial Sequence
  Description of Artificial Sequence: Synthetic epitope
HKHHDKFTNT

SEQ ID NO: 19149 - protein, 10 aa, Artificial Sequence
  Description of Artificial Sequence: Synthetic epitope
HKHKNKEKGQ

SEQ ID NO: 19150 - protein, 10 aa, Artificial Sequence
  Description of Artificial Sequence: Synthetic epitope
HKIESSLTKH

SEQ ID NO: 19151 - protein, 10 aa, Artificial Sequence
  Description of Artificial Sequence: Synthetic epitope
HKIGTKSKDL

SEQ ID NO: 19152 - protein, 10 aa, Artificial Sequence
  Description of Artificial Sequence: Synthetic epitope
HKKNKKVESA

SEQ ID NO: 19153 - protein, 10 aa, Artificial Sequence
  Description of Artificial Sequence: Synthetic epitope
HKKPKSDKET

SEQ ID NO: 19154 - protein, 10 aa, Artificial Sequence
  Description of Artificial Sequence: Synthetic epitope
HKLDIKRANI

SEQ ID NO: 19155 - protein, 10 aa, Artificial Sequence
  Description of Artificial Sequence: Synthetic epitope
HKLEAILTEN

SEQ ID NO: 19156 - protein, 10 aa, Artificial Sequence
  Description of Artificial Sequence: Synthetic epitope
HKLENKSSIE

SEQ ID NO: 19157 - protein, 10 aa, Artificial Sequence
  Description of Artificial Sequence: Synthetic epitope
HKLKADKARK

SEQ ID NO: 19158 - protein, 10 aa, Artificial Sequence
  Description of Artificial Sequence: Synthetic epitope
HKLKKRSAGK

SEQ ID NO: 19159 - protein, 10 aa, Artificial Sequence
  Description of Artificial Sequence: Synthetic epitope
HKLKTNVTFP

SEQ ID NO: 19160 - protein, 10 aa, Artificial Sequence
  Description of Artificial Sequence: Synthetic epitope
HKMYRTVKAI

SEQ ID NO: 19161 - protein, 10 aa, Artificial Sequence
  Description of Artificial Sequence: Synthetic epitope
HKPEINSTTH

SEQ ID NO: 19162 - protein, 10 aa, Artificial Sequence
  Description of Artificial Sequence: Synthetic epitope
HKPERSVSPE

SEQ ID NO: 19163 - protein, 10 aa, Artificial Sequence
  Description of Artificial Sequence: Synthetic epitope
HKPKSLTHTQ

SEQ ID NO: 19164 - protein, 10 aa, Artificial Sequence
  Description of Artificial Sequence: Synthetic epitope
HKPKTLTDTL

SEQ ID NO: 19165 - protein, 10 aa, Artificial Sequence
  Description of Artificial Sequence: Synthetic epitope
HKQAQAQFAA

SEQ ID NO: 19166 - protein, 10 aa, Artificial Sequence
  Description of Artificial Sequence: Synthetic epitope
HKQSSMTVME

SEQ ID NO: 19167 - protein, 10 aa, Artificial Sequence
  Description of Artificial Sequence: Synthetic epitope
HKRLNMATLR

SEQ ID NO: 19168 - protein, 10 aa, Artificial Sequence
  Description of Artificial Sequence: Synthetic epitope
HKRSQRSSYT

SEQ ID NO: 19169 - protein, 10 aa, Artificial Sequence
  Description of Artificial Sequence: Synthetic epitope
HKSDSISLSF

SEQ ID NO: 19170 - protein, 10 aa, Artificial Sequence
  Description of Artificial Sequence: Synthetic epitope
HKSGAVASLL

SEQ ID NO: 19171 - protein, 10 aa, Artificial Sequence
  Description of Artificial Sequence: Synthetic epitope
HKSKDKAGTE

SEQ ID NO: 19172 - protein, 10 aa, Artificial Sequence
  Description of Artificial Sequence: Synthetic epitope
HKSQRLASAG

SEQ ID NO: 19173 - protein, 10 aa, Artificial Sequence
  Description of Artificial Sequence: Synthetic epitope
HKTASASKRV

SEQ ID NO: 19174 - protein, 10 aa, Artificial Sequence
  Description of Artificial Sequence: Synthetic epitope
HKTPVHKTKG

SEQ ID NO: 19175 - protein, 10 aa, Artificial Sequence
  Description of Artificial Sequence: Synthetic epitope
HKTRRTRHAS

SEQ ID NO: 19176 - protein, 10 aa, Artificial Sequence
  Description of Artificial Sequence: Synthetic epitope
HKVESESYRK

SEQ ID NO: 19177 - protein, 10 aa, Artificial Sequence
  Description of Artificial Sequence: Synthetic epitope
HKVGDTEGEY

SEQ ID NO: 19178 - protein, 10 aa, Artificial Sequence
  Description of Artificial Sequence: Synthetic epitope
HKVSEPSRSS

SEQ ID NO: 19179 - protein, 10 aa, Artificial Sequence
  Description of Artificial Sequence: Synthetic epitope
HKVTTNRMWE

SEQ ID NO: 19180 - protein, 10 aa, Artificial Sequence
  Description of Artificial Sequence: Synthetic epitope
HKWSSFSSTY

SEQ ID NO: 19181 - protein, 10 aa, Artificial Sequence
  Description of Artificial Sequence: Synthetic epitope
HLAAKLLDAK

SEQ ID NO: 19182 - protein, 10 aa, Artificial Sequence
  Description of Artificial Sequence: Synthetic epitope
HLALSVKRLW

SEQ ID NO: 19183 - protein, 10 aa, Artificial Sequence
  Description of Artificial Sequence: Synthetic epitope
HLGEVQTESA

SEQ ID NO: 19184 - protein, 10 aa, Artificial Sequence
  Description of Artificial Sequence: Synthetic epitope
HLHQWKAKTT

SEQ ID NO: 19185 - protein, 10 aa, Artificial Sequence
  Description of Artificial Sequence: Synthetic epitope
HLITEVTTDT

SEQ ID NO: 19186 - protein, 10 aa, Artificial Sequence
  Description of Artificial Sequence: Synthetic epitope
HLIYDLDVAP

SEQ ID NO: 19187 - protein, 10 aa, Artificial Sequence
  Description of Artificial Sequence: Synthetic epitope
HLLEAAIPER

SEQ ID NO: 19188 - protein, 10 aa, Artificial Sequence
  Description of Artificial Sequence: Synthetic epitope
HLLIKSKVQL

SEQ ID NO: 19189 - protein, 10 aa, Artificial Sequence
  Description of Artificial Sequence: Synthetic epitope
HLLTLVSKFE

SEQ ID NO: 19190 - protein, 10 aa, Artificial Sequence
  Description of Artificial Sequence: Synthetic epitope
HLNSKTAEDK

SEQ ID NO: 19191 - protein, 10 aa, Artificial Sequence
  Description of Artificial Sequence: Synthetic epitope
HLQAASLADS

SEQ ID NO: 19192 - protein, 10 aa, Artificial Sequence
  Description of Artificial Sequence: Synthetic epitope
HLQESIFTKE

SEQ ID NO: 19193 - protein, 10 aa, Artificial Sequence
  Description of Artificial Sequence: Synthetic epitope
HLQETSFTKE

SEQ ID NO: 19194 - protein, 10 aa, Artificial Sequence
  Description of Artificial Sequence: Synthetic epitope
HLQETSFTKE

SEQ ID NO: 19195 - protein, 10 aa, Artificial Sequence
  Description of Artificial Sequence: Synthetic epitope
HLQQKQVVIQ

SEQ ID NO: 19196 - protein, 10 aa, Artificial Sequence
  Description of Artificial Sequence: Synthetic epitope
HLQQSAVQDL

SEQ ID NO: 19197 - protein, 10 aa, Artificial Sequence
  Description of Artificial Sequence: Synthetic epitope
HLQVLQSNSQ

SEQ ID NO: 19198 - protein, 10 aa, Artificial Sequence
  Description of Artificial Sequence: Synthetic epitope
HLRKRIHRPR

SEQ ID NO: 19199 - protein, 10 aa, Artificial Sequence
  Description of Artificial Sequence: Synthetic epitope
HLSGAYSKTA

SEQ ID NO: 19200 - protein, 10 aa, Artificial Sequence
  Description of Artificial Sequence: Synthetic epitope
HLSHDAKSAP

SEQ ID NO: 19201 - protein, 10 aa, Artificial Sequence
  Description of Artificial Sequence: Synthetic epitope
HLSLTLQMNS

SEQ ID NO: 19202 - protein, 10 aa, Artificial Sequence
  Description of Artificial Sequence: Synthetic epitope
HLSQHQQRED

SEQ ID NO: 19203 - protein, 10 aa, Artificial Sequence
  Description of Artificial Sequence: Synthetic epitope
HLSSDVTTIR

SEQ ID NO: 19204 - protein, 10 aa, Artificial Sequence
  Description of Artificial Sequence: Synthetic epitope
HLSTVTSKGF

SEQ ID NO: 19205 - protein, 10 aa, Artificial Sequence
  Description of Artificial Sequence: Synthetic epitope
HLTMKAKSTV

SEQ ID NO: 19206 - protein, 10 aa, Artificial Sequence
  Description of Artificial Sequence: Synthetic epitope
HLVQQLVLRT

SEQ ID NO: 19207 - protein, 10 aa, Artificial Sequence
  Description of Artificial Sequence: Synthetic epitope
HLVSRVAKNQ

SEQ ID NO: 19208 - protein, 10 aa, Artificial Sequence
  Description of Artificial Sequence: Synthetic epitope
HMADIGSVTS

SEQ ID NO: 19209 - protein, 10 aa, Artificial Sequence
  Description of Artificial Sequence: Synthetic epitope
HMDKAEQRKD

SEQ ID NO: 19210 - protein, 10 aa, Artificial Sequence
  Description of Artificial Sequence: Synthetic epitope
HMHQQILSRQ

SEQ ID NO: 19211 - protein, 10 aa, Artificial Sequence
  Description of Artificial Sequence: Synthetic epitope
HMLKLKGDID

SEQ ID NO: 19212 - protein, 10 aa, Artificial Sequence
  Description of Artificial Sequence: Synthetic epitope
HMSIELTTEP

SEQ ID NO: 19213 - protein, 10 aa, Artificial Sequence
  Description of Artificial Sequence: Synthetic epitope
HMYTLSQLAL

SEQ ID NO: 19214 - protein, 10 aa, Artificial Sequence
  Description of Artificial Sequence: Synthetic epitope
HNADIVLNKQ

SEQ ID NO: 19215 - protein, 10 aa, Artificial Sequence
  Description of Artificial Sequence: Synthetic epitope
HNALFETFNW

SEQ ID NO: 19216 - protein, 10 aa, Artificial Sequence
  Description of Artificial Sequence: Synthetic epitope
HNALKQTPKV

SEQ ID NO: 19217 - protein, 10 aa, Artificial Sequence
  Description of Artificial Sequence: Synthetic epitope
HNALVYLPAM

SEQ ID NO: 19218 - protein, 10 aa, Artificial Sequence
  Description of Artificial Sequence: Synthetic epitope
HNDVALDSVE

SEQ ID NO: 19219 - protein, 10 aa, Artificial Sequence
  Description of Artificial Sequence: Synthetic epitope
HNEGQERSSN

SEQ ID NO: 19220 - protein, 10 aa, Artificial Sequence
  Description of Artificial Sequence: Synthetic epitope
HNEVKAIGPH

SEQ ID NO: 19221 - protein, 10 aa, Artificial Sequence
  Description of Artificial Sequence: Synthetic epitope
HNFNAKYTYG

SEQ ID NO: 19222 - protein, 10 aa, Artificial Sequence
  Description of Artificial Sequence: Synthetic epitope
HNHSSESDSE

SEQ ID NO: 19223 - protein, 10 aa, Artificial Sequence
  Description of Artificial Sequence: Synthetic epitope
HNKNITKTQK

SEQ ID NO: 19224 - protein, 10 aa, Artificial Sequence
  Description of Artificial Sequence: Synthetic epitope
HNLESKSPAA

SEQ ID NO: 19225 - protein, 10 aa, Artificial Sequence
  Description of Artificial Sequence: Synthetic epitope
HNLFKFRSQG

SEQ ID NO: 19226 - protein, 10 aa, Artificial Sequence
  Description of Artificial Sequence: Synthetic epitope
HNLINNKIAN

SEQ ID NO: 19227 - protein, 10 aa, Artificial Sequence
  Description of Artificial Sequence: Synthetic epitope
HNLLKAVEIR

SEQ ID NO: 19228 - protein, 10 aa, Artificial Sequence
  Description of Artificial Sequence: Synthetic epitope
HNLSRGEANV

SEQ ID NO: 19229 - protein, 10 aa, Artificial Sequence
  Description of Artificial Sequence: Synthetic epitope
HNNLAAQPVM

SEQ ID NO: 19230 - protein, 10 aa, Artificial Sequence
  Description of Artificial Sequence: Synthetic epitope
HNNLSSTEEQ

SEQ ID NO: 19231 - protein, 10 aa, Artificial Sequence
  Description of Artificial Sequence: Synthetic epitope
HNPKVIVQFQ

SEQ ID NO: 19232 - protein, 10 aa, Artificial Sequence
  Description of Artificial Sequence: Synthetic epitope
HNQLISSVSN

SEQ ID NO: 19233 - protein, 10 aa, Artificial Sequence
  Description of Artificial Sequence: Synthetic epitope
HNQSEIIAQL

SEQ ID NO: 19234 - protein, 10 aa, Artificial Sequence
  Description of Artificial Sequence: Synthetic epitope
HNSKEKIAKM

SEQ ID NO: 19235 - protein, 10 aa, Artificial Sequence
  Description of Artificial Sequence: Synthetic epitope
HNSLEDTDQG

SEQ ID NO: 19236 - protein, 10 aa, Artificial Sequence
  Description of Artificial Sequence: Synthetic epitope
HNSVSHPSAD

SEQ ID NO: 19237 - protein, 10 aa, Artificial Sequence
  Description of Artificial Sequence: Synthetic epitope
HNTENKGKAP

SEQ ID NO: 19238 - protein, 10 aa, Artificial Sequence
  Description of Artificial Sequence: Synthetic epitope
HNTMESLLER

SEQ ID NO: 19239 - protein, 10 aa, Artificial Sequence
  Description of Artificial Sequence: Synthetic epitope
HNTTLTEILK

SEQ ID NO: 19240 - protein, 10 aa, Artificial Sequence
  Description of Artificial Sequence: Synthetic epitope
HNVDRLQGSR

SEQ ID NO: 19241 - protein, 10 aa, Artificial Sequence
  Description of Artificial Sequence: Synthetic epitope
HNYTQKAQPG

SEQ ID NO: 19242 - protein, 10 aa, Artificial Sequence
  Description of Artificial Sequence: Synthetic epitope
HPARSSDSYA

SEQ ID NO: 19243 - protein, 10 aa, Artificial Sequence
  Description of Artificial Sequence: Synthetic epitope
HPEEYYSHYY

SEQ ID NO: 19244 - protein, 10 aa, Artificial Sequence
  Description of Artificial Sequence: Synthetic epitope
HPEKSLSSLP

SEQ ID NO: 19245 - protein, 10 aa, Artificial Sequence
  Description of Artificial Sequence: Synthetic epitope
HPGLETTLQE

SEQ ID NO: 19246 - protein, 10 aa, Artificial Sequence
  Description of Artificial Sequence: Synthetic epitope
HPHSASSPSE

SEQ ID NO: 19247 - protein, 10 aa, Artificial Sequence
  Description of Artificial Sequence: Synthetic epitope
HPKEKLAQSQ

SEQ ID NO: 19248 - protein, 10 aa, Artificial Sequence
  Description of Artificial Sequence: Synthetic epitope
HPKLKSSKGI

SEQ ID NO: 19249 - protein, 10 aa, Artificial Sequence
  Description of Artificial Sequence: Synthetic epitope
HPLGSPGSAS

SEQ ID NO: 19250 - protein, 10 aa, Artificial Sequence
  Description of Artificial Sequence: Synthetic epitope
HPNFALMQQS

SEQ ID NO: 19251 - protein, 10 aa, Artificial Sequence
  Description of Artificial Sequence: Synthetic epitope
HPQVLSMKFK

SEQ ID NO: 19252 - protein, 10 aa, Artificial Sequence
  Description of Artificial Sequence: Synthetic epitope
HPSTKVMKQM

SEQ ID NO: 19253 - protein, 10 aa, Artificial Sequence
  Description of Artificial Sequence: Synthetic epitope
HQALKLSGSS

SEQ ID NO: 19254 - protein, 10 aa, Artificial Sequence
  Description of Artificial Sequence: Synthetic epitope
HQALSKSQTL

SEQ ID NO: 19255 - protein, 10 aa, Artificial Sequence
  Description of Artificial Sequence: Synthetic epitope
HQDQMVQKIT

SEQ ID NO: 19256 - protein, 10 aa, Artificial Sequence
  Description of Artificial Sequence: Synthetic epitope
HQEKVITESK

SEQ ID NO: 19257 - protein, 10 aa, Artificial Sequence
  Description of Artificial Sequence: Synthetic epitope
HQETSTKSSE

SEQ ID NO: 19258 - protein, 10 aa, Artificial Sequence
  Description of Artificial Sequence: Synthetic epitope
HQHRSGIESA

SEQ ID NO: 19259 - protein, 10 aa, Artificial Sequence
  Description of Artificial Sequence: Synthetic epitope
HQIHDHVNPK

SEQ ID NO: 19260 - protein, 10 aa, Artificial Sequence
  Description of Artificial Sequence: Synthetic epitope
HQILNMRGSS

SEQ ID NO: 19261 - protein, 10 aa, Artificial Sequence
  Description of Artificial Sequence: Synthetic epitope
HQIVNIDLML

SEQ ID NO: 19262 - protein, 10 aa, Artificial Sequence
  Description of Artificial Sequence: Synthetic epitope
HQKDNPHRIA

SEQ ID NO: 19263 - protein, 10 aa, Artificial Sequence
  Description of Artificial Sequence: Synthetic epitope
HQKKETVVKE

SEQ ID NO: 19264 - protein, 10 aa, Artificial Sequence
  Description of Artificial Sequence: Synthetic epitope
HQKRSLMEEH

SEQ ID NO: 19265 - protein, 10 aa, Artificial Sequence
  Description of Artificial Sequence: Synthetic epitope
HQKSLSFSKT

SEQ ID NO: 19266 - protein, 10 aa, Artificial Sequence
  Description of Artificial Sequence: Synthetic epitope
HQLASISSPV

SEQ ID NO: 19267 - protein, 10 aa, Artificial Sequence
  Description of Artificial Sequence: Synthetic epitope
HQLEATIAAL

SEQ ID NO: 19268 - protein, 10 aa, Artificial Sequence
  Description of Artificial Sequence: Synthetic epitope
HQLKQQTQNR

SEQ ID NO: 19269 - protein, 10 aa, Artificial Sequence
  Description of Artificial Sequence: Synthetic epitope
HQLKQQVMDE

SEQ ID NO: 19270 - protein, 10 aa, Artificial Sequence
  Description of Artificial Sequence: Synthetic epitope
HQLRVYTAEA

SEQ ID NO: 19271 - protein, 10 aa, Artificial Sequence
  Description of Artificial Sequence: Synthetic epitope
HQLTETLIQK

SEQ ID NO: 19272 - protein, 10 aa, Artificial Sequence
  Description of Artificial Sequence: Synthetic epitope
HQMAAMSAQE

SEQ ID NO: 19273 - protein, 10 aa, Artificial Sequence
  Description of Artificial Sequence: Synthetic epitope
HQNKEDSTSE

SEQ ID NO: 19274 - protein, 10 aa, Artificial Sequence
  Description of Artificial Sequence: Synthetic epitope
HQNTSKNVAA

SEQ ID NO: 19275 - protein, 10 aa, Artificial Sequence
  Description of Artificial Sequence: Synthetic epitope
HQNYIAYQKQ

SEQ ID NO: 19276 - protein, 10 aa, Artificial Sequence
  Description of Artificial Sequence: Synthetic epitope
HQPQSQVILL

SEQ ID NO: 19277 - protein, 10 aa, Artificial Sequence
  Description of Artificial Sequence: Synthetic epitope
HQPTERTGRS

SEQ ID NO: 19278 - protein, 10 aa, Artificial Sequence
  Description of Artificial Sequence: Synthetic epitope
HQQRDVIDEP

SEQ ID NO: 19279 - protein, 10 aa, Artificial Sequence
  Description of Artificial Sequence: Synthetic epitope
HQQTNATQEV

SEQ ID NO: 19280 - protein, 10 aa, Artificial Sequence
  Description of Artificial Sequence: Synthetic epitope
HQSEWVSFNE

SEQ ID NO: 19281 - protein, 10 aa, Artificial Sequence
  Description of Artificial Sequence: Synthetic epitope
HQSHPLQYIG

SEQ ID NO: 19282 - protein, 10 aa, Artificial Sequence
  Description of Artificial Sequence: Synthetic epitope
HQSKKWRIQA

SEQ ID NO: 19283 - protein, 10 aa, Artificial Sequence
  Description of Artificial Sequence: Synthetic epitope
HQSQDSRIKK

SEQ ID NO: 19284 - protein, 10 aa, Artificial Sequence
  Description of Artificial Sequence: Synthetic epitope
HQSSMTSLEG

SEQ ID NO: 19285 - protein, 10 aa, Artificial Sequence
  Description of Artificial Sequence: Synthetic epitope
HQSSPLLKSE

SEQ ID NO: 19286 - protein, 10 aa, Artificial Sequence
  Description of Artificial Sequence: Synthetic epitope
HQSSQAQQPP

SEQ ID NO: 19287 - protein, 10 aa, Artificial Sequence
  Description of Artificial Sequence: Synthetic epitope
HQSVVYRKQA

SEQ ID NO: 19288 - protein, 10 aa, Artificial Sequence
  Description of Artificial Sequence: Synthetic epitope
HQTASILKQL

SEQ ID NO: 19289 - protein, 10 aa, Artificial Sequence
  Description of Artificial Sequence: Synthetic epitope
HQTLSAILQD

SEQ ID NO: 19290 - protein, 10 aa, Artificial Sequence
  Description of Artificial Sequence: Synthetic epitope
HQTSASSLKA

SEQ ID NO: 19291 - protein, 10 aa, Artificial Sequence
  Description of Artificial Sequence: Synthetic epitope
HQTVQATPQE

SEQ ID NO: 19292 - protein, 10 aa, Artificial Sequence
  Description of Artificial Sequence: Synthetic epitope
HQVENKTSEV

SEQ ID NO: 19293 - protein, 10 aa, Artificial Sequence
  Description of Artificial Sequence: Synthetic epitope
HQVSQISKQQ

SEQ ID NO: 19294 - protein, 10 aa, Artificial Sequence
  Description of Artificial Sequence: Synthetic epitope
HRAEDSIQQA

SEQ ID NO: 19295 - protein, 10 aa, Artificial Sequence
  Description of Artificial Sequence: Synthetic epitope
HRAHSSMVGV

SEQ ID NO: 19296 - protein, 10 aa, Artificial Sequence
  Description of Artificial Sequence: Synthetic epitope
HRATSHAGLS

SEQ ID NO: 19297 - protein, 10 aa, Artificial Sequence
  Description of Artificial Sequence: Synthetic epitope
HRDNKAGEKQ

SEQ ID NO: 19298 - protein, 10 aa, Artificial Sequence
  Description of Artificial Sequence: Synthetic epitope
HRDRKSSDSD

SEQ ID NO: 19299 - protein, 10 aa, Artificial Sequence
  Description of Artificial Sequence: Synthetic epitope
HREAMSLKGH

SEQ ID NO: 19300 - protein, 10 aa, Artificial Sequence
  Description of Artificial Sequence: Synthetic epitope
HREKERAKRE

SEQ ID NO: 19301 - protein, 10 aa, Artificial Sequence
  Description of Artificial Sequence: Synthetic epitope
HREQMKSESR

SEQ ID NO: 19302 - protein, 10 aa, Artificial Sequence
  Description of Artificial Sequence: Synthetic epitope
HRERQLLWLE

SEQ ID NO: 19303 - protein, 10 aa, Artificial Sequence
  Description of Artificial Sequence: Synthetic epitope
HRFESIAIAQ

SEQ ID NO: 19304 - protein, 10 aa, Artificial Sequence
  Description of Artificial Sequence: Synthetic epitope
HRFTSRLQEE

SEQ ID NO: 19305 - protein, 10 aa, Artificial Sequence
  Description of Artificial Sequence: Synthetic epitope
HRGRQALKAV

SEQ ID NO: 19306 - protein, 10 aa, Artificial Sequence
  Description of Artificial Sequence: Synthetic epitope
HRGSNQLDTN

SEQ ID NO: 19307 - protein, 10 aa, Artificial Sequence
  Description of Artificial Sequence: Synthetic epitope
HRHEHNAGDM

SEQ ID NO: 19308 - protein, 10 aa, Artificial Sequence
  Description of Artificial Sequence: Synthetic epitope
HRKTTASTRK

SEQ ID NO: 19309 - protein, 10 aa, Artificial Sequence
  Description of Artificial Sequence: Synthetic epitope
HRLAIKVKPS

SEQ ID NO: 19310 - protein, 10 aa, Artificial Sequence
  Description of Artificial Sequence: Synthetic epitope
HRLMQAMGRA

SEQ ID NO: 19311 - protein, 10 aa, Artificial Sequence
  Description of Artificial Sequence: Synthetic epitope
HRLSRELEKE

SEQ ID NO: 19312 - protein, 10 aa, Artificial Sequence
  Description of Artificial Sequence: Synthetic epitope
HRLSSMLGVP

SEQ ID NO: 19313 - protein, 10 aa, Artificial Sequence
  Description of Artificial Sequence: Synthetic epitope
HRNSEVSTRS

SEQ ID NO: 19314 - protein, 10 aa, Artificial Sequence
  Description of Artificial Sequence: Synthetic epitope
HRPQHYKHED

SEQ ID NO: 19315 - protein, 10 aa, Artificial Sequence
  Description of Artificial Sequence: Synthetic epitope
HRQAQAFNFV

SEQ ID NO: 19316 - protein, 10 aa, Artificial Sequence
  Description of Artificial Sequence: Synthetic epitope
HRQDDNNRHA

SEQ ID NO: 19317 - protein, 10 aa, Artificial Sequence
  Description of Artificial Sequence: Synthetic epitope
HRSLARELSG

SEQ ID NO: 19318 - protein, 10 aa, Artificial Sequence
  Description of Artificial Sequence: Synthetic epitope
HRTQSTKSHR

SEQ ID NO: 19319 - protein, 10 aa, Artificial Sequence
  Description of Artificial Sequence: Synthetic epitope
HRTRSVSYSH

SEQ ID NO: 19320 - protein, 10 aa, Artificial Sequence
  Description of Artificial Sequence: Synthetic epitope
HRTSKTSGAQ

SEQ ID NO: 19321 - protein, 10 aa, Artificial Sequence
  Description of Artificial Sequence: Synthetic epitope
HRVSVILKLL

SEQ ID NO: 19322 - protein, 10 aa, Artificial Sequence
  Description of Artificial Sequence: Synthetic epitope
HRVVGIVQTK

SEQ ID NO: 19323 - protein, 10 aa, Artificial Sequence
  Description of Artificial Sequence: Synthetic epitope
HSAADSVTSA

SEQ ID NO: 19324 - protein, 10 aa, Artificial Sequence
  Description of Artificial Sequence: Synthetic epitope
HSAAQAQDRP

SEQ ID NO: 19325 - protein, 10 aa, Artificial Sequence
  Description of Artificial Sequence: Synthetic epitope
HSAPDSLKAK

SEQ ID NO: 19326 - protein, 10 aa, Artificial Sequence
  Description of Artificial Sequence: Synthetic epitope
HSARSKNKTA

SEQ ID NO: 19327 - protein, 10 aa, Artificial Sequence
  Description of Artificial Sequence: Synthetic epitope
HSASKQKAWD

SEQ ID NO: 19328 - protein, 10 aa, Artificial Sequence
  Description of Artificial Sequence: Synthetic epitope
HSATAEEKPA

SEQ ID NO: 19329 - protein, 10 aa, Artificial Sequence
  Description of Artificial Sequence: Synthetic epitope
HSDKIEAKVK

SEQ ID NO: 19330 - protein, 10 aa, Artificial Sequence
  Description of Artificial Sequence: Synthetic epitope
HSDLSKAASW

SEQ ID NO: 19331 - protein, 10 aa, Artificial Sequence
  Description of Artificial Sequence: Synthetic epitope
HSDSDLGRGP

SEQ ID NO: 19332 - protein, 10 aa, Artificial Sequence
  Description of Artificial Sequence: Synthetic epitope
HSEETRSDNE

SEQ ID NO: 19333 - protein, 10 aa, Artificial Sequence
  Description of Artificial Sequence: Synthetic epitope
HSEQSTVAEA

SEQ ID NO: 19334 - protein, 10 aa, Artificial Sequence
  Description of Artificial Sequence: Synthetic epitope
HSESPNSQTD

SEQ ID NO: 19335 - protein, 10 aa, Artificial Sequence
  Description of Artificial Sequence: Synthetic epitope
HSFILKARST

SEQ ID NO: 19336 - protein, 10 aa, Artificial Sequence
  Description of Artificial Sequence: Synthetic epitope
HSFWEIYKMT

SEQ ID NO: 19337 - protein, 10 aa, Artificial Sequence
  Description of Artificial Sequence: Synthetic epitope
HSHGRTDTEE

SEQ ID NO: 19338 - protein, 10 aa, Artificial Sequence
  Description of Artificial Sequence: Synthetic epitope
HSHTQEQTGE

SEQ ID NO: 19339 - protein, 10 aa, Artificial Sequence
  Description of Artificial Sequence: Synthetic epitope
HSIKTETQPH

SEQ ID NO: 19340 - protein, 10 aa, Artificial Sequence
  Description of Artificial Sequence: Synthetic epitope
HSKNITQRGN

SEQ ID NO: 19341 - protein, 10 aa, Artificial Sequence
  Description of Artificial Sequence: Synthetic epitope
HSKNITQRGN

SEQ ID NO: 19342 - protein, 10 aa, Artificial Sequence
  Description of Artificial Sequence: Synthetic epitope
HSKNKVSSEG

SEQ ID NO: 19343 - protein, 10 aa, Artificial Sequence
  Description of Artificial Sequence: Synthetic epitope
HSKPVSDVAR

SEQ ID NO: 19344 - protein, 10 aa, Artificial Sequence
  Description of Artificial Sequence: Synthetic epitope
HSKRQIDRDQ

SEQ ID NO: 19345 - protein, 10 aa, Artificial Sequence
  Description of Artificial Sequence: Synthetic epitope
HSKSKDSAEK

SEQ ID NO: 19346 - protein, 10 aa, Artificial Sequence
  Description of Artificial Sequence: Synthetic epitope
HSKSWAIEIG

SEQ ID NO: 19347 - protein, 10 aa, Artificial Sequence
  Description of Artificial Sequence: Synthetic epitope
HSKTRQEKRT

SEQ ID NO: 19348 - protein, 10 aa, Artificial Sequence
  Description of Artificial Sequence: Synthetic epitope
HSLGKARTAQ

SEQ ID NO: 19349 - protein, 10 aa, Artificial Sequence
  Description of Artificial Sequence: Synthetic epitope
HSLGTLAQEL

SEQ ID NO: 19350 - protein, 10 aa, Artificial Sequence
  Description of Artificial Sequence: Synthetic epitope
HSLQEITSVT

SEQ ID NO: 19351 - protein, 10 aa, Artificial Sequence
  Description of Artificial Sequence: Synthetic epitope
HSLRQLVKLS

SEQ ID NO: 19352 - protein, 10 aa, Artificial Sequence
  Description of Artificial Sequence: Synthetic epitope
HSLSQNSSRL

SEQ ID NO: 19353 - protein, 10 aa, Artificial Sequence
  Description of Artificial Sequence: Synthetic epitope
HSLSTSSDTT

SEQ ID NO: 19354 - protein, 10 aa, Artificial Sequence
  Description of Artificial Sequence: Synthetic epitope
HSMRLVTEFN

SEQ ID NO: 19355 - protein, 10 aa, Artificial Sequence
  Description of Artificial Sequence: Synthetic epitope
HSNTKINGAH

SEQ ID NO: 19356 - protein, 10 aa, Artificial Sequence
  Description of Artificial Sequence: Synthetic epitope
HSPSQPDAAQ

SEQ ID NO: 19357 - protein, 10 aa, Artificial Sequence
  Description of Artificial Sequence: Synthetic epitope
HSQDEQKSMQ

SEQ ID NO: 19358 - protein, 10 aa, Artificial Sequence
  Description of Artificial Sequence: Synthetic epitope
HSQGRVMGDR

SEQ ID NO: 19359 - protein, 10 aa, Artificial Sequence
  Description of Artificial Sequence: Synthetic epitope
HSQNMRANSI

SEQ ID NO: 19360 - protein, 10 aa, Artificial Sequence
  Description of Artificial Sequence: Synthetic epitope
HSRSAQVASQ

SEQ ID NO: 19361 - protein, 10 aa, Artificial Sequence
  Description of Artificial Sequence: Synthetic epitope
HSRVTTMKSN

SEQ ID NO: 19362 - protein, 10 aa, Artificial Sequence
  Description of Artificial Sequence: Synthetic epitope
HSSALTLKSL

SEQ ID NO: 19363 - protein, 10 aa, Artificial Sequence
  Description of Artificial Sequence: Synthetic epitope
HSSDEQSAPV

SEQ ID NO: 19364 - protein, 10 aa, Artificial Sequence
  Description of Artificial Sequence: Synthetic epitope
HSSEDMSKMV

SEQ ID NO: 19365 - protein, 10 aa, Artificial Sequence
  Description of Artificial Sequence: Synthetic epitope
HSSERALERV

SEQ ID NO: 19366 - protein, 10 aa, Artificial Sequence
  Description of Artificial Sequence: Synthetic epitope
HSSNFSRDAH

SEQ ID NO: 19367 - protein, 10 aa, Artificial Sequence
  Description of Artificial Sequence: Synthetic epitope
HSSNKMTASY

SEQ ID NO: 19368 - protein, 10 aa, Artificial Sequence
  Description of Artificial Sequence: Synthetic epitope
HSSQFSSVIM

SEQ ID NO: 19369 - protein, 10 aa, Artificial Sequence
  Description of Artificial Sequence: Synthetic epitope
HSSQVGTSRS

SEQ ID NO: 19370 - protein, 10 aa, Artificial Sequence
  Description of Artificial Sequence: Synthetic epitope
HSSTLAEEVV

SEQ ID NO: 19371 - protein, 10 aa, Artificial Sequence
  Description of Artificial Sequence: Synthetic epitope
HSSTVKDSLI

SEQ ID NO: 19372 - protein, 10 aa, Artificial Sequence
  Description of Artificial Sequence: Synthetic epitope
HSSVSKEEKE

SEQ ID NO: 19373 - protein, 10 aa, Artificial Sequence
  Description of Artificial Sequence: Synthetic epitope
HSSVYIWPSS

SEQ ID NO: 19374 - protein, 10 aa, Artificial Sequence
  Description of Artificial Sequence: Synthetic epitope
HSTSAEAVAM

SEQ ID NO: 19375 - protein, 10 aa, Artificial Sequence
  Description of Artificial Sequence: Synthetic epitope
HSTSAQVDDL

SEQ ID NO: 19376 - protein, 10 aa, Artificial Sequence
  Description of Artificial Sequence: Synthetic epitope
HSVAKETARR

SEQ ID NO: 19377 - protein, 10 aa, Artificial Sequence
  Description of Artificial Sequence: Synthetic epitope
HSVEQIEWKH

SEQ ID NO: 19378 - protein, 10 aa, Artificial Sequence
  Description of Artificial Sequence: Synthetic epitope
HSVGGNSSQS

SEQ ID NO: 19379 - protein, 10 aa, Artificial Sequence
  Description of Artificial Sequence: Synthetic epitope
HSVKASANRF

SEQ ID NO: 19380 - protein, 10 aa, Artificial Sequence
  Description of Artificial Sequence: Synthetic epitope
HSVKSTWESA

SEQ ID NO: 19381 - protein, 10 aa, Artificial Sequence
  Description of Artificial Sequence: Synthetic epitope
HSVQLTRKKE

SEQ ID NO: 19382 - protein, 10 aa, Artificial Sequence
  Description of Artificial Sequence: Synthetic epitope
HSVQNSERGK

SEQ ID NO: 19383 - protein, 10 aa, Artificial Sequence
  Description of Artificial Sequence: Synthetic epitope
HSVRAEDDFK

SEQ ID NO: 19384 - protein, 10 aa, Artificial Sequence
  Description of Artificial Sequence: Synthetic epitope
HSVYATSLQS

SEQ ID NO: 19385 - protein, 10 aa, Artificial Sequence
  Description of Artificial Sequence: Synthetic epitope
HSWVEQIEIS

SEQ ID NO: 19386 - protein, 10 aa, Artificial Sequence
  Description of Artificial Sequence: Synthetic epitope
HSYKKAISDE

SEQ ID NO: 19387 - protein, 10 aa, Artificial Sequence
  Description of Artificial Sequence: Synthetic epitope
HSYRLVKKLK

SEQ ID NO: 19388 - protein, 10 aa, Artificial Sequence
  Description of Artificial Sequence: Synthetic epitope
HSYTAILNQD

SEQ ID NO: 19389 - protein, 10 aa, Artificial Sequence
  Description of Artificial Sequence: Synthetic epitope
HTAKAGERIL

SEQ ID NO: 19390 - protein, 10 aa, Artificial Sequence
  Description of Artificial Sequence: Synthetic epitope
HTDKRRNTTM

SEQ ID NO: 19391 - protein, 10 aa, Artificial Sequence
  Description of Artificial Sequence: Synthetic epitope
HTESNKLQPK

SEQ ID NO: 19392 - protein, 10 aa, Artificial Sequence
  Description of Artificial Sequence: Synthetic epitope
HTETEIQKKA

SEQ ID NO: 19393 - protein, 10 aa, Artificial Sequence
  Description of Artificial Sequence: Synthetic epitope
HTGVANDHEE

SEQ ID NO: 19394 - protein, 10 aa, Artificial Sequence
  Description of Artificial Sequence: Synthetic epitope
HTHENVKETA

SEQ ID NO: 19395 - protein, 10 aa, Artificial Sequence
  Description of Artificial Sequence: Synthetic epitope
HTINNTIPMS

SEQ ID NO: 19396 - protein, 10 aa, Artificial Sequence
  Description of Artificial Sequence: Synthetic epitope
HTINTQDIAS

SEQ ID NO: 19397 - protein, 10 aa, Artificial Sequence
  Description of Artificial Sequence: Synthetic epitope
HTLQKLRMDL

SEQ ID NO: 19398 - protein, 10 aa, Artificial Sequence
  Description of Artificial Sequence: Synthetic epitope
HTLSSNATRE

SEQ ID NO: 19399 - protein, 10 aa, Artificial Sequence
  Description of Artificial Sequence: Synthetic epitope
HTMRKRFMES

SEQ ID NO: 19400 - protein, 10 aa, Artificial Sequence
  Description of Artificial Sequence: Synthetic epitope
HTPKKMSQGP

SEQ ID NO: 19401 - protein, 10 aa, Artificial Sequence
  Description of Artificial Sequence: Synthetic epitope
HTQLQLPEWL

SEQ ID NO: 19402 - protein, 10 aa, Artificial Sequence
  Description of Artificial Sequence: Synthetic epitope
HTQSVSSKQK

SEQ ID NO: 19403 - protein, 10 aa, Artificial Sequence
  Description of Artificial Sequence: Synthetic epitope
HTRDTTGVSQ

SEQ ID NO: 19404 - protein, 10 aa, Artificial Sequence
  Description of Artificial Sequence: Synthetic epitope
HTREARIQTL

SEQ ID NO: 19405 - protein, 10 aa, Artificial Sequence
  Description of Artificial Sequence: Synthetic epitope
HTRMRMFMHL

SEQ ID NO: 19406 - protein, 10 aa, Artificial Sequence
  Description of Artificial Sequence: Synthetic epitope
HTSASSQSGG

SEQ ID NO: 19407 - protein, 10 aa, Artificial Sequence
  Description of Artificial Sequence: Synthetic epitope
HTSNRGVLSY

SEQ ID NO: 19408 - protein, 10 aa, Artificial Sequence
  Description of Artificial Sequence: Synthetic epitope
HTSSENLSKL

SEQ ID NO: 19409 - protein, 10 aa, Artificial Sequence
  Description of Artificial Sequence: Synthetic epitope
HTSTTSSTAS

SEQ ID NO: 19410 - protein, 10 aa, Artificial Sequence
  Description of Artificial Sequence: Synthetic epitope
HTTRVEMDRG

SEQ ID NO: 19411 - protein, 10 aa, Artificial Sequence
  Description of Artificial Sequence: Synthetic epitope
HTVSRLEEAN

SEQ ID NO: 19412 - protein, 10 aa, Artificial Sequence
  Description of Artificial Sequence: Synthetic epitope
HTYQSVKQQL

SEQ ID NO: 19413 - protein, 10 aa, Artificial Sequence
  Description of Artificial Sequence: Synthetic epitope
HVAAVASTKM

SEQ ID NO: 19414 - protein, 10 aa, Artificial Sequence
  Description of Artificial Sequence: Synthetic epitope
HVADMLVKVN

SEQ ID NO: 19415 - protein, 10 aa, Artificial Sequence
  Description of Artificial Sequence: Synthetic epitope
HVADTRFDMV

SEQ ID NO: 19416 - protein, 10 aa, Artificial Sequence
  Description of Artificial Sequence: Synthetic epitope
HVAQKKSRLR

SEQ ID NO: 19417 - protein, 10 aa, Artificial Sequence
  Description of Artificial Sequence: Synthetic epitope
HVDWMTSPEQ

SEQ ID NO: 19418 - protein, 10 aa, Artificial Sequence
  Description of Artificial Sequence: Synthetic epitope
HVHSDSYETE

SEQ ID NO: 19419 - protein, 10 aa, Artificial Sequence
  Description of Artificial Sequence: Synthetic epitope
HVKFQSSNFE

SEQ ID NO: 19420 - protein, 10 aa, Artificial Sequence
  Description of Artificial Sequence: Synthetic epitope
HVLNDETQRK

SEQ ID NO: 19421 - protein, 10 aa, Artificial Sequence
  Description of Artificial Sequence: Synthetic epitope
HVNAKKSVFP

SEQ ID NO: 19422 - protein, 10 aa, Artificial Sequence
  Description of Artificial Sequence: Synthetic epitope
HVPELSLKSL

SEQ ID NO: 19423 - protein, 10 aa, Artificial Sequence
  Description of Artificial Sequence: Synthetic epitope
HVPVGASFAS

SEQ ID NO: 19424 - protein, 10 aa, Artificial Sequence
  Description of Artificial Sequence: Synthetic epitope
HVVAAHLELG

SEQ ID NO: 19425 - protein, 10 aa, Artificial Sequence
  Description of Artificial Sequence: Synthetic epitope
HWDDSTSDSE

SEQ ID NO: 19426 - protein, 10 aa, Artificial Sequence
  Description of Artificial Sequence: Synthetic epitope
HWIVRTLRAS

SEQ ID NO: 19427 - protein, 10 aa, Artificial Sequence
  Description of Artificial Sequence: Synthetic epitope
HWLAEELSEE

SEQ ID NO: 19428 - protein, 10 aa, Artificial Sequence
  Description of Artificial Sequence: Synthetic epitope
HWNDSVKQEV

SEQ ID NO: 19429 - protein, 10 aa, Artificial Sequence
  Description of Artificial Sequence: Synthetic epitope
HWRMQLSIEV

SEQ ID NO: 19430 - protein, 10 aa, Artificial Sequence
  Description of Artificial Sequence: Synthetic epitope
HWTRKIIVEE

SEQ ID NO: 19431 - protein, 10 aa, Artificial Sequence
  Description of Artificial Sequence: Synthetic epitope
HYDETEAERE

SEQ ID NO: 19432 - protein, 10 aa, Artificial Sequence
  Description of Artificial Sequence: Synthetic epitope
HYLAIQKPAD

SEQ ID NO: 19433 - protein, 10 aa, Artificial Sequence
  Description of Artificial Sequence: Synthetic epitope
HYLAMALFQI

SEQ ID NO: 19434 - protein, 10 aa, Artificial Sequence
  Description of Artificial Sequence: Synthetic epitope
HYNRTRQQEE

SEQ ID NO: 19435 - protein, 10 aa, Artificial Sequence
  Description of Artificial Sequence: Synthetic epitope
HYPSTTALQE

SEQ ID NO: 19436 - protein, 10 aa, Artificial Sequence
  Description of Artificial Sequence: Synthetic epitope
HYSRSRSRSR

SEQ ID NO: 19437 - protein, 10 aa, Artificial Sequence
  Description of Artificial Sequence: Synthetic epitope
IAALTKAEET

SEQ ID NO: 19438 - protein, 10 aa, Artificial Sequence
  Description of Artificial Sequence: Synthetic epitope
IAASMSIKSS

SEQ ID NO: 19439 - protein, 10 aa, Artificial Sequence
  Description of Artificial Sequence: Synthetic epitope
IAASPATLAG

SEQ ID NO: 19440 - protein, 10 aa, Artificial Sequence
  Description of Artificial Sequence: Synthetic epitope
IAESDILVAQ

SEQ ID NO: 19441 - protein, 10 aa, Artificial Sequence
  Description of Artificial Sequence: Synthetic epitope
IAIQVSAQAR

SEQ ID NO: 19442 - protein, 10 aa, Artificial Sequence
  Description of Artificial Sequence: Synthetic epitope
IAKESKRDVP

SEQ ID NO: 19443 - protein, 10 aa, Artificial Sequence
  Description of Artificial Sequence: Synthetic epitope
IAKHLEAMLI

SEQ ID NO: 19444 - protein, 10 aa, Artificial Sequence
  Description of Artificial Sequence: Synthetic epitope
IAKIYNANYL

SEQ ID NO: 19445 - protein, 10 aa, Artificial Sequence
  Description of Artificial Sequence: Synthetic epitope
IAKKLKIEQM

SEQ ID NO: 19446 - protein, 10 aa, Artificial Sequence
  Description of Artificial Sequence: Synthetic epitope
IALGKRLKIE

SEQ ID NO: 19447 - protein, 10 aa, Artificial Sequence
  Description of Artificial Sequence: Synthetic epitope
IALIQDMTQQ

SEQ ID NO: 19448 - protein, 10 aa, Artificial Sequence
  Description of Artificial Sequence: Synthetic epitope
IAQDFSSEQG

SEQ ID NO: 19449 - protein, 10 aa, Artificial Sequence
  Description of Artificial Sequence: Synthetic epitope
IAQHSAIKML

SEQ ID NO: 19450 - protein, 10 aa, Artificial Sequence
  Description of Artificial Sequence: Synthetic epitope
IAQIIAAQEE

SEQ ID NO: 19451 - protein, 10 aa, Artificial Sequence
  Description of Artificial Sequence: Synthetic epitope
IARTEEHQET

SEQ ID NO: 19452 - protein, 10 aa, Artificial Sequence
  Description of Artificial Sequence: Synthetic epitope
IASRRSHQQD

SEQ ID NO: 19453 - protein, 10 aa, Artificial Sequence
  Description of Artificial Sequence: Synthetic epitope
IASSRIRETM

SEQ ID NO: 19454 - protein, 10 aa, Artificial Sequence
  Description of Artificial Sequence: Synthetic epitope
IATEKGQMEE

SEQ ID NO: 19455 - protein, 10 aa, Artificial Sequence
  Description of Artificial Sequence: Synthetic epitope
IAVEQQLGAQ

SEQ ID NO: 19456 - protein, 10 aa, Artificial Sequence
  Description of Artificial Sequence: Synthetic epitope
IAVGALFGKV

SEQ ID NO: 19457 - protein, 10 aa, Artificial Sequence
  Description of Artificial Sequence: Synthetic epitope
IAVKSDDQNY

SEQ ID NO: 19458 - protein, 10 aa, Artificial Sequence
  Description of Artificial Sequence: Synthetic epitope
IAVSSIQKAK

SEQ ID NO: 19459 - protein, 10 aa, Artificial Sequence
  Description of Artificial Sequence: Synthetic epitope
IDAVKLLNNE

SEQ ID NO: 19460 - protein, 10 aa, Artificial Sequence
  Description of Artificial Sequence: Synthetic epitope
IDELRTLDSV

SEQ ID NO: 19461 - protein, 10 aa, Artificial Sequence
  Description of Artificial Sequence: Synthetic epitope
IDGGWVARTG

SEQ ID NO: 19462 - protein, 10 aa, Artificial Sequence
  Description of Artificial Sequence: Synthetic epitope
IDKAPSFTSQ

SEQ ID NO: 19463 - protein, 10 aa, Artificial Sequence
  Description of Artificial Sequence: Synthetic epitope
IDLLKLSQSH

SEQ ID NO: 19464 - protein, 10 aa, Artificial Sequence
  Description of Artificial Sequence: Synthetic epitope
IDLSEKIKQG

SEQ ID NO: 19465 - protein, 10 aa, Artificial Sequence
  Description of Artificial Sequence: Synthetic epitope
IDNLNSSDSS

SEQ ID NO: 19466 - protein, 10 aa, Artificial Sequence
  Description of Artificial Sequence: Synthetic epitope
IDQQAEESDP

SEQ ID NO: 19467 - protein, 10 aa, Artificial Sequence
  Description of Artificial Sequence: Synthetic epitope
IDQVKTSHVE

SEQ ID NO: 19468 - protein, 10 aa, Artificial Sequence
  Description of Artificial Sequence: Synthetic epitope
IDRSSLTSLE

SEQ ID NO: 19469 - protein, 10 aa, Artificial Sequence
  Description of Artificial Sequence: Synthetic epitope
IDSALATQKY

SEQ ID NO: 19470 - protein, 10 aa, Artificial Sequence
  Description of Artificial Sequence: Synthetic epitope
IDSEKEAAME

SEQ ID NO: 19471 - protein, 10 aa, Artificial Sequence
  Description of Artificial Sequence: Synthetic epitope
IDSTEKSMGA

SEQ ID NO: 19472 - protein, 10 aa, Artificial Sequence
  Description of Artificial Sequence: Synthetic epitope
IDVAVEKAGE

SEQ ID NO: 19473 - protein, 10 aa, Artificial Sequence
  Description of Artificial Sequence: Synthetic epitope
IDVEEVSSQE

SEQ ID NO: 19474 - protein, 10 aa, Artificial Sequence
  Description of Artificial Sequence: Synthetic epitope
IDVISMYREL

SEQ ID NO: 19475 - protein, 10 aa, Artificial Sequence
  Description of Artificial Sequence: Synthetic epitope
IDVVPMMRKK

SEQ ID NO: 19476 - protein, 10 aa, Artificial Sequence
  Description of Artificial Sequence: Synthetic epitope
IEAKMELEEV

SEQ ID NO: 19477 - protein, 10 aa, Artificial Sequence
  Description of Artificial Sequence: Synthetic epitope
IEFLQVIAKR

SEQ ID NO: 19478 - protein, 10 aa, Artificial Sequence
  Description of Artificial Sequence: Synthetic epitope
IEKESESASE

SEQ ID NO: 19479 - protein, 10 aa, Artificial Sequence
  Description of Artificial Sequence: Synthetic epitope
IEKIMAFREE

SEQ ID NO: 19480 - protein, 10 aa, Artificial Sequence
  Description of Artificial Sequence: Synthetic epitope
IEKLSKTESI

SEQ ID NO: 19481 - protein, 10 aa, Artificial Sequence
  Description of Artificial Sequence: Synthetic epitope
IELKKAQESQ

SEQ ID NO: 19482 - protein, 10 aa, Artificial Sequence
  Description of Artificial Sequence: Synthetic epitope
IELRSAREEA

SEQ ID NO: 19483 - protein, 10 aa, Artificial Sequence
  Description of Artificial Sequence: Synthetic epitope
IELSQAMLER

SEQ ID NO: 19484 - protein, 10 aa, Artificial Sequence
  Description of Artificial Sequence: Synthetic epitope
IELTTQSLSE

SEQ ID NO: 19485 - protein, 10 aa, Artificial Sequence
  Description of Artificial Sequence: Synthetic epitope
IENLAQDETS

SEQ ID NO: 19486 - protein, 10 aa, Artificial Sequence
  Description of Artificial Sequence: Synthetic epitope
IENVIENGSP

SEQ ID NO: 19487 - protein, 10 aa, Artificial Sequence
  Description of Artificial Sequence: Synthetic epitope
IEPKIGLKED

SEQ ID NO: 19488 - protein, 10 aa, Artificial Sequence
  Description of Artificial Sequence: Synthetic epitope
IEPNLTSDAS

SEQ ID NO: 19489 - protein, 10 aa, Artificial Sequence
  Description of Artificial Sequence: Synthetic epitope
IEQEETERTR

SEQ ID NO: 19490 - protein, 10 aa, Artificial Sequence
  Description of Artificial Sequence: Synthetic epitope
IEQELSSIGS

SEQ ID NO: 19491 - protein, 10 aa, Artificial Sequence
  Description of Artificial Sequence: Synthetic epitope
IEQRDVRKAN

SEQ ID NO: 19492 - protein, 10 aa, Artificial Sequence
  Description of Artificial Sequence: Synthetic epitope
IEQRTVSKMQ

SEQ ID NO: 19493 - protein, 10 aa, Artificial Sequence
  Description of Artificial Sequence: Synthetic epitope
IEQYHNHSDH

SEQ ID NO: 19494 - protein, 10 aa, Artificial Sequence
  Description of Artificial Sequence: Synthetic epitope
IERRKTGKEM

SEQ ID NO: 19495 - protein, 10 aa, Artificial Sequence
  Description of Artificial Sequence: Synthetic epitope
IERSQTLSQM

SEQ ID NO: 19496 - protein, 10 aa, Artificial Sequence
  Description of Artificial Sequence: Synthetic epitope
IESASVEDQA

SEQ ID NO: 19497 - protein, 10 aa, Artificial Sequence
  Description of Artificial Sequence: Synthetic epitope
IESLNSKAKL

SEQ ID NO: 19498 - protein, 10 aa, Artificial Sequence
  Description of Artificial Sequence: Synthetic epitope
IESPKSSMKT

SEQ ID NO: 19499 - protein, 10 aa, Artificial Sequence
  Description of Artificial Sequence: Synthetic epitope
IESTSMSTTP

SEQ ID NO: 19500 - protein, 10 aa, Artificial Sequence
  Description of Artificial Sequence: Synthetic epitope
IESVLFLISV

SEQ ID NO: 19501 - protein, 10 aa, Artificial Sequence
  Description of Artificial Sequence: Synthetic epitope
IETIKARMYV

SEQ ID NO: 19502 - protein, 10 aa, Artificial Sequence
  Description of Artificial Sequence: Synthetic epitope
IETKAQVVPP

SEQ ID NO: 19503 - protein, 10 aa, Artificial Sequence
  Description of Artificial Sequence: Synthetic epitope
IETLSRLSRT

SEQ ID NO: 19504 - protein, 10 aa, Artificial Sequence
  Description of Artificial Sequence: Synthetic epitope
IETSSVMPVI

SEQ ID NO: 19505 - protein, 10 aa, Artificial Sequence
  Description of Artificial Sequence: Synthetic epitope
IEVYKARSQR

SEQ ID NO: 19506 - protein, 10 aa, Artificial Sequence
  Description of Artificial Sequence: Synthetic epitope
IFAQEVSLKY

SEQ ID NO: 19507 - protein, 10 aa, Artificial Sequence
  Description of Artificial Sequence: Synthetic epitope
IFDMMAVTKE

SEQ ID NO: 19508 - protein, 10 aa, Artificial Sequence
  Description of Artificial Sequence: Synthetic epitope
IFGRTVSKRS

SEQ ID NO: 19509 - protein, 10 aa, Artificial Sequence
  Description of Artificial Sequence: Synthetic epitope
IFIEAKASKI

SEQ ID NO: 19510 - protein, 10 aa, Artificial Sequence
  Description of Artificial Sequence: Synthetic epitope
IFIKDSNSLA

SEQ ID NO: 19511 - protein, 10 aa, Artificial Sequence
  Description of Artificial Sequence: Synthetic epitope
IFKQNVTDGS

SEQ ID NO: 19512 - protein, 10 aa, Artificial Sequence
  Description of Artificial Sequence: Synthetic epitope
IFSSQQALSQ

SEQ ID NO: 19513 - protein, 10 aa, Artificial Sequence
  Description of Artificial Sequence: Synthetic epitope
IFYESENESS

SEQ ID NO: 19514 - protein, 10 aa, Artificial Sequence
  Description of Artificial Sequence: Synthetic epitope
IGAATLQQTG

SEQ ID NO: 19515 - protein, 10 aa, Artificial Sequence
  Description of Artificial Sequence: Synthetic epitope
IGAISSLQGA

SEQ ID NO: 19516 - protein, 10 aa, Artificial Sequence
  Description of Artificial Sequence: Synthetic epitope
IGAKQNEAFT

SEQ ID NO: 19517 - protein, 10 aa, Artificial Sequence
  Description of Artificial Sequence: Synthetic epitope
IGASDQSPLQ

SEQ ID NO: 19518 - protein, 10 aa, Artificial Sequence
  Description of Artificial Sequence: Synthetic epitope
IGDIKTAEKY

SEQ ID NO: 19519 - protein, 10 aa, Artificial Sequence
  Description of Artificial Sequence: Synthetic epitope
IGEHIVTGSI

SEQ ID NO: 19520 - protein, 10 aa, Artificial Sequence
  Description of Artificial Sequence: Synthetic epitope
IGGIWTWVGT

SEQ ID NO: 19521 - protein, 10 aa, Artificial Sequence
  Description of Artificial Sequence: Synthetic epitope
IGSAHNRSAM

SEQ ID NO: 19522 - protein, 10 aa, Artificial Sequence
  Description of Artificial Sequence: Synthetic epitope
IGTQKEKKAM

SEQ ID NO: 19523 - protein, 10 aa, Artificial Sequence
  Description of Artificial Sequence: Synthetic epitope
IHETQMAKEA

SEQ ID NO: 19524 - protein, 10 aa, Artificial Sequence
  Description of Artificial Sequence: Synthetic epitope
IHHNNSRHVQ

SEQ ID NO: 19525 - protein, 10 aa, Artificial Sequence
  Description of Artificial Sequence: Synthetic epitope
IHMQMSMAVG

SEQ ID NO: 19526 - protein, 10 aa, Artificial Sequence
  Description of Artificial Sequence: Synthetic epitope
IHTTAESALA

SEQ ID NO: 19527 - protein, 10 aa, Artificial Sequence
  Description of Artificial Sequence: Synthetic epitope
IIALNQWPKN

SEQ ID NO: 19528 - protein, 10 aa, Artificial Sequence
  Description of Artificial Sequence: Synthetic epitope
IIDVSAADSQ

SEQ ID NO: 19529 - protein, 10 aa, Artificial Sequence
  Description of Artificial Sequence: Synthetic epitope
IIGSAAKEDR

SEQ ID NO: 19530 - protein, 10 aa, Artificial Sequence
  Description of Artificial Sequence: Synthetic epitope
IIGSEDTTNE

SEQ ID NO: 19531 - protein, 10 aa, Artificial Sequence
  Description of Artificial Sequence: Synthetic epitope
IINRVAEPAQ

SEQ ID NO: 19532 - protein, 10 aa, Artificial Sequence
  Description of Artificial Sequence: Synthetic epitope
IINTSSRLLN

SEQ ID NO: 19533 - protein, 10 aa, Artificial Sequence
  Description of Artificial Sequence: Synthetic epitope
IIQADIAQKM

SEQ ID NO: 19534 - protein, 10 aa, Artificial Sequence
  Description of Artificial Sequence: Synthetic epitope
IIRKAAKANG

SEQ ID NO: 19535 - protein, 10 aa, Artificial Sequence
  Description of Artificial Sequence: Synthetic epitope
IIRLEKLTAF

SEQ ID NO: 19536 - protein, 10 aa, Artificial Sequence
  Description of Artificial Sequence: Synthetic epitope
IISDTKVDAN

SEQ ID NO: 19537 - protein, 10 aa, Artificial Sequence
  Description of Artificial Sequence: Synthetic epitope
IISEGIWSLI

SEQ ID NO: 19538 - protein, 10 aa, Artificial Sequence
  Description of Artificial Sequence: Synthetic epitope
IISGKSWNKY

SEQ ID NO: 19539 - protein, 10 aa, Artificial Sequence
  Description of Artificial Sequence: Synthetic epitope
IISQLLKEED

SEQ ID NO: 19540 - protein, 10 aa, Artificial Sequence
  Description of Artificial Sequence: Synthetic epitope
IKAQELHALT

SEQ ID NO: 19541 - protein, 10 aa, Artificial Sequence
  Description of Artificial Sequence: Synthetic epitope
IKAQELHALT

SEQ ID NO: 19542 - protein, 10 aa, Artificial Sequence
  Description of Artificial Sequence: Synthetic epitope
IKAQELHALT

SEQ ID NO: 19543 - protein, 10 aa, Artificial Sequence
  Description of Artificial Sequence: Synthetic epitope
IKAQELHALT

SEQ ID NO: 19544 - protein, 10 aa, Artificial Sequence
  Description of Artificial Sequence: Synthetic epitope
IKAQELHALT

SEQ ID NO: 19545 - protein, 10 aa, Artificial Sequence
  Description of Artificial Sequence: Synthetic epitope
IKEERKIQKH

SEQ ID NO: 19546 - protein, 10 aa, Artificial Sequence
  Description of Artificial Sequence: Synthetic epitope
IKEQASKISE

SEQ ID NO: 19547 - protein, 10 aa, Artificial Sequence
  Description of Artificial Sequence: Synthetic epitope
IKFIMSLKSF

SEQ ID NO: 19548 - protein, 10 aa, Artificial Sequence
  Description of Artificial Sequence: Synthetic epitope
IKIQTPELGE

SEQ ID NO: 19549 - protein, 10 aa, Artificial Sequence
  Description of Artificial Sequence: Synthetic epitope
IKKETAAEIL

SEQ ID NO: 19550 - protein, 10 aa, Artificial Sequence
  Description of Artificial Sequence: Synthetic epitope
IKKTARREQL

SEQ ID NO: 19551 - protein, 10 aa, Artificial Sequence
  Description of Artificial Sequence: Synthetic epitope
IKKTTARDQD

SEQ ID NO: 19552 - protein, 10 aa, Artificial Sequence
  Description of Artificial Sequence: Synthetic epitope
IKLAVRGAQA

SEQ ID NO: 19553 - protein, 10 aa, Artificial Sequence
  Description of Artificial Sequence: Synthetic epitope
IKLIVSGKVL

SEQ ID NO: 19554 - protein, 10 aa, Artificial Sequence
  Description of Artificial Sequence: Synthetic epitope
IKLKGETKTP

SEQ ID NO: 19555 - protein, 10 aa, Artificial Sequence
  Description of Artificial Sequence: Synthetic epitope
IKLKKQEMET

SEQ ID NO: 19556 - protein, 10 aa, Artificial Sequence
  Description of Artificial Sequence: Synthetic epitope
IKLMEISKAA

SEQ ID NO: 19557 - protein, 10 aa, Artificial Sequence
  Description of Artificial Sequence: Synthetic epitope
IKNPAERADL

SEQ ID NO: 19558 - protein, 10 aa, Artificial Sequence
  Description of Artificial Sequence: Synthetic epitope
IKNVAKTANK

SEQ ID NO: 19559 - protein, 10 aa, Artificial Sequence
  Description of Artificial Sequence: Synthetic epitope
IKQQESAQRA

SEQ ID NO: 19560 - protein, 10 aa, Artificial Sequence
  Description of Artificial Sequence: Synthetic epitope
IKSAIRYEKT

SEQ ID NO: 19561 - protein, 10 aa, Artificial Sequence
  Description of Artificial Sequence: Synthetic epitope
IKSENSVIKA

SEQ ID NO: 19562 - protein, 10 aa, Artificial Sequence
  Description of Artificial Sequence: Synthetic epitope
IKSFKVKQTQ

SEQ ID NO: 19563 - protein, 10 aa, Artificial Sequence
  Description of Artificial Sequence: Synthetic epitope
IKSHEVHWET

SEQ ID NO: 19564 - protein, 10 aa, Artificial Sequence
  Description of Artificial Sequence: Synthetic epitope
IKSKEAMASS

SEQ ID NO: 19565 - protein, 10 aa, Artificial Sequence
  Description of Artificial Sequence: Synthetic epitope
IKTESEYEET

SEQ ID NO: 19566 - protein, 10 aa, Artificial Sequence
  Description of Artificial Sequence: Synthetic epitope
IKVFSSAKYP

SEQ ID NO: 19567 - protein, 10 aa, Artificial Sequence
  Description of Artificial Sequence: Synthetic epitope
IKVFSSAKYP

SEQ ID NO: 19568 - protein, 10 aa, Artificial Sequence
  Description of Artificial Sequence: Synthetic epitope
IKVFSSAKYP

SEQ ID NO: 19569 - protein, 10 aa, Artificial Sequence
  Description of Artificial Sequence: Synthetic epitope
IKVINSSAKA

SEQ ID NO: 19570 - protein, 10 aa, Artificial Sequence
  Description of Artificial Sequence: Synthetic epitope
IKVQKDESST

SEQ ID NO: 19571 - protein, 10 aa, Artificial Sequence
  Description of Artificial Sequence: Synthetic epitope
IKVRTDTKLD

SEQ ID NO: 19572 - protein, 10 aa, Artificial Sequence
  Description of Artificial Sequence: Synthetic epitope
IKVVLSAREN

SEQ ID NO: 19573 - protein, 10 aa, Artificial Sequence
  Description of Artificial Sequence: Synthetic epitope
ILAQQMTAQA

SEQ ID NO: 19574 - protein, 10 aa, Artificial Sequence
  Description of Artificial Sequence: Synthetic epitope
ILEEKQESQQ

SEQ ID NO: 19575 - protein, 10 aa, Artificial Sequence
  Description of Artificial Sequence: Synthetic epitope
ILEITLSASD

SEQ ID NO: 19576 - protein, 10 aa, Artificial Sequence
  Description of Artificial Sequence: Synthetic epitope
ILEKMAAEAG

SEQ ID NO: 19577 - protein, 10 aa, Artificial Sequence
  Description of Artificial Sequence: Synthetic epitope
ILEPMNVNQM

SEQ ID NO: 19578 - protein, 10 aa, Artificial Sequence
  Description of Artificial Sequence: Synthetic epitope
ILESFRALTE

SEQ ID NO: 19579 - protein, 10 aa, Artificial Sequence
  Description of Artificial Sequence: Synthetic epitope
ILGDYFRADE

SEQ ID NO: 19580 - protein, 10 aa, Artificial Sequence
  Description of Artificial Sequence: Synthetic epitope
ILGNIVMREL

SEQ ID NO: 19581 - protein, 10 aa, Artificial Sequence
  Description of Artificial Sequence: Synthetic epitope
ILKEAFNSDL

SEQ ID NO: 19582 - protein, 10 aa, Artificial Sequence
  Description of Artificial Sequence: Synthetic epitope
ILKHIAITEE

SEQ ID NO: 19583 - protein, 10 aa, Artificial Sequence
  Description of Artificial Sequence: Synthetic epitope
ILKKESLRAK

SEQ ID NO: 19584 - protein, 10 aa, Artificial Sequence
  Description of Artificial Sequence: Synthetic epitope
ILKLNASSKS

SEQ ID NO: 19585 - protein, 10 aa, Artificial Sequence
  Description of Artificial Sequence: Synthetic epitope
ILLKKSLFKD

SEQ ID NO: 19586 - protein, 10 aa, Artificial Sequence
  Description of Artificial Sequence: Synthetic epitope
ILLVHATETD

SEQ ID NO: 19587 - protein, 10 aa, Artificial Sequence
  Description of Artificial Sequence: Synthetic epitope
ILMSDKTFPQ

SEQ ID NO: 19588 - protein, 10 aa, Artificial Sequence
  Description of Artificial Sequence: Synthetic epitope
ILNQISNKKN

SEQ ID NO: 19589 - protein, 10 aa, Artificial Sequence
  Description of Artificial Sequence: Synthetic epitope
ILQGAILVHS

SEQ ID NO: 19590 - protein, 10 aa, Artificial Sequence
  Description of Artificial Sequence: Synthetic epitope
ILRELAADLT

SEQ ID NO: 19591 - protein, 10 aa, Artificial Sequence
  Description of Artificial Sequence: Synthetic epitope
ILRETTVKYS

SEQ ID NO: 19592 - protein, 10 aa, Artificial Sequence
  Description of Artificial Sequence: Synthetic epitope
ILSFHEESRP

SEQ ID NO: 19593 - protein, 10 aa, Artificial Sequence
  Description of Artificial Sequence: Synthetic epitope
ILSYAASSQQ

SEQ ID NO: 19594 - protein, 10 aa, Artificial Sequence
  Description of Artificial Sequence: Synthetic epitope
ILSYAASSQQ

SEQ ID NO: 19595 - protein, 10 aa, Artificial Sequence
  Description of Artificial Sequence: Synthetic epitope
ILSYAASSQQ

SEQ ID NO: 19596 - protein, 10 aa, Artificial Sequence
  Description of Artificial Sequence: Synthetic epitope
ILTELTTAAT

SEQ ID NO: 19597 - protein, 10 aa, Artificial Sequence
  Description of Artificial Sequence: Synthetic epitope
ILTSLVSKDL

SEQ ID NO: 19598 - protein, 10 aa, Artificial Sequence
  Description of Artificial Sequence: Synthetic epitope
ILVSTTLLAN

SEQ ID NO: 19599 - protein, 10 aa, Artificial Sequence
  Description of Artificial Sequence: Synthetic epitope
ILVVRRENIV

SEQ ID NO: 19600 - protein, 10 aa, Artificial Sequence
  Description of Artificial Sequence: Synthetic epitope
IMDYESLEKA

SEQ ID NO: 19601 - protein, 10 aa, Artificial Sequence
  Description of Artificial Sequence: Synthetic epitope
IMKAQAYQTG

SEQ ID NO: 19602 - protein, 10 aa, Artificial Sequence
  Description of Artificial Sequence: Synthetic epitope
IMLSLVSTGD

SEQ ID NO: 19603 - protein, 10 aa, Artificial Sequence
  Description of Artificial Sequence: Synthetic epitope
IMRDTSTVSK

SEQ ID NO: 19604 - protein, 10 aa, Artificial Sequence
  Description of Artificial Sequence: Synthetic epitope
IMSVDEQKSL

SEQ ID NO: 19605 - protein, 10 aa, Artificial Sequence
  Description of Artificial Sequence: Synthetic epitope
INARKAAREQ

SEQ ID NO: 19606 - protein, 10 aa, Artificial Sequence
  Description of Artificial Sequence: Synthetic epitope
INATSSGMTE

SEQ ID NO: 19607 - protein, 10 aa, Artificial Sequence
  Description of Artificial Sequence: Synthetic epitope
INEIDRIRAS

SEQ ID NO: 19608 - protein, 10 aa, Artificial Sequence
  Description of Artificial Sequence: Synthetic epitope
INHNTELLPI

SEQ ID NO: 19609 - protein, 10 aa, Artificial Sequence
  Description of Artificial Sequence: Synthetic epitope
INIGVAKNLD

SEQ ID NO: 19610 - protein, 10 aa, Artificial Sequence
  Description of Artificial Sequence: Synthetic epitope
INIITVEDKE

SEQ ID NO: 19611 - protein, 10 aa, Artificial Sequence
  Description of Artificial Sequence: Synthetic epitope
INKAQEVEAE

SEQ ID NO: 19612 - protein, 10 aa, Artificial Sequence
  Description of Artificial Sequence: Synthetic epitope
INLKQSIADR

SEQ ID NO: 19613 - protein, 10 aa, Artificial Sequence
  Description of Artificial Sequence: Synthetic epitope
INLTHLMYLS

SEQ ID NO: 19614 - protein, 10 aa, Artificial Sequence
  Description of Artificial Sequence: Synthetic epitope
INRTSVGSLQ

SEQ ID NO: 19615 - protein, 10 aa, Artificial Sequence
  Description of Artificial Sequence: Synthetic epitope
INSKIQTHST

SEQ ID NO: 19616 - protein, 10 aa, Artificial Sequence
  Description of Artificial Sequence: Synthetic epitope
INSLLSKQAV

SEQ ID NO: 19617 - protein, 10 aa, Artificial Sequence
  Description of Artificial Sequence: Synthetic epitope
INSPIEANSD

SEQ ID NO: 19618 - protein, 10 aa, Artificial Sequence
  Description of Artificial Sequence: Synthetic epitope
INSQRIAAVE

SEQ ID NO: 19619 - protein, 10 aa, Artificial Sequence
  Description of Artificial Sequence: Synthetic epitope
INTIESLKDV

SEQ ID NO: 19620 - protein, 10 aa, Artificial Sequence
  Description of Artificial Sequence: Synthetic epitope
INVNSQRKQQ

SEQ ID NO: 19621 - protein, 10 aa, Artificial Sequence
  Description of Artificial Sequence: Synthetic epitope
IPDKQYTDWS

SEQ ID NO: 19622 - protein, 10 aa, Artificial Sequence
  Description of Artificial Sequence: Synthetic epitope
IPDSVSIQYN

SEQ ID NO: 19623 - protein, 10 aa, Artificial Sequence
  Description of Artificial Sequence: Synthetic epitope
IPEKSLTNNS

SEQ ID NO: 19624 - protein, 10 aa, Artificial Sequence
  Description of Artificial Sequence: Synthetic epitope
IPKLVAIPKP

SEQ ID NO: 19625 - protein, 10 aa, Artificial Sequence
  Description of Artificial Sequence: Synthetic epitope
IPLKSVFLTQ

SEQ ID NO: 19626 - protein, 10 aa, Artificial Sequence
  Description of Artificial Sequence: Synthetic epitope
IPMANKFSSP

SEQ ID NO: 19627 - protein, 10 aa, Artificial Sequence
  Description of Artificial Sequence: Synthetic epitope
IPQTATQPAI

SEQ ID NO: 19628 - protein, 10 aa, Artificial Sequence
  Description of Artificial Sequence: Synthetic epitope
IPTEASASSR

SEQ ID NO: 19629 - protein, 10 aa, Artificial Sequence
  Description of Artificial Sequence: Synthetic epitope
IPTIDTSRKK

SEQ ID NO: 19630 - protein, 10 aa, Artificial Sequence
  Description of Artificial Sequence: Synthetic epitope
IPVQAFEVKL

SEQ ID NO: 19631 - protein, 10 aa, Artificial Sequence
  Description of Artificial Sequence: Synthetic epitope
IQAAIAQLDL

SEQ ID NO: 19632 - protein, 10 aa, Artificial Sequence
  Description of Artificial Sequence: Synthetic epitope
IQALQASEVQ

SEQ ID NO: 19633 - protein, 10 aa, Artificial Sequence
  Description of Artificial Sequence: Synthetic epitope
IQAQSSAIQA

SEQ ID NO: 19634 - protein, 10 aa, Artificial Sequence
  Description of Artificial Sequence: Synthetic epitope
IQASERRVHL

SEQ ID NO: 19635 - protein, 10 aa, Artificial Sequence
  Description of Artificial Sequence: Synthetic epitope
IQATEIAKQQ

SEQ ID NO: 19636 - protein, 10 aa, Artificial Sequence
  Description of Artificial Sequence: Synthetic epitope
IQETAESDGD

SEQ ID NO: 19637 - protein, 10 aa, Artificial Sequence
  Description of Artificial Sequence: Synthetic epitope
IQFTDEIAGS

SEQ ID NO: 19638 - protein, 10 aa, Artificial Sequence
  Description of Artificial Sequence: Synthetic epitope
IQHEVKSSKN

SEQ ID NO: 19639 - protein, 10 aa, Artificial Sequence
  Description of Artificial Sequence: Synthetic epitope
IQIKKATHNR

SEQ ID NO: 19640 - protein, 10 aa, Artificial Sequence
  Description of Artificial Sequence: Synthetic epitope
IQISLLVEEQ

SEQ ID NO: 19641 - protein, 10 aa, Artificial Sequence
  Description of Artificial Sequence: Synthetic epitope
IQKAKEVKSK

SEQ ID NO: 19642 - protein, 10 aa, Artificial Sequence
  Description of Artificial Sequence: Synthetic epitope
IQKLKTTASQ

SEQ ID NO: 19643 - protein, 10 aa, Artificial Sequence
  Description of Artificial Sequence: Synthetic epitope
IQKQSIRHRW

SEQ ID NO: 19644 - protein, 10 aa, Artificial Sequence
  Description of Artificial Sequence: Synthetic epitope
IQKSAFVMEK

SEQ ID NO: 19645 - protein, 10 aa, Artificial Sequence
  Description of Artificial Sequence: Synthetic epitope
IQKSNMQIKS

SEQ ID NO: 19646 - protein, 10 aa, Artificial Sequence
  Description of Artificial Sequence: Synthetic epitope
IQLANELGSL

SEQ ID NO: 19647 - protein, 10 aa, Artificial Sequence
  Description of Artificial Sequence: Synthetic epitope
IQLESKEFAP

SEQ ID NO: 19648 - protein, 10 aa, Artificial Sequence
  Description of Artificial Sequence: Synthetic epitope
IQLKKTKLQS

SEQ ID NO: 19649 - protein, 10 aa, Artificial Sequence
  Description of Artificial Sequence: Synthetic epitope
IQLLKQILSA

SEQ ID NO: 19650 - protein, 10 aa, Artificial Sequence
  Description of Artificial Sequence: Synthetic epitope
IQLNNKVARK

SEQ ID NO: 19651 - protein, 10 aa, Artificial Sequence
  Description of Artificial Sequence: Synthetic epitope
IQLPMINNVM

SEQ ID NO: 19652 - protein, 10 aa, Artificial Sequence
  Description of Artificial Sequence: Synthetic epitope
IQLRVNNSVQ

SEQ ID NO: 19653 - protein, 10 aa, Artificial Sequence
  Description of Artificial Sequence: Synthetic epitope
IQMYDRVIDF

SEQ ID NO: 19654 - protein, 10 aa, Artificial Sequence
  Description of Artificial Sequence: Synthetic epitope
IQNRRSLEAI

SEQ ID NO: 19655 - protein, 10 aa, Artificial Sequence
  Description of Artificial Sequence: Synthetic epitope
IQNSQDMRQI

SEQ ID NO: 19656 - protein, 10 aa, Artificial Sequence
  Description of Artificial Sequence: Synthetic epitope
IQNSVTDRPE

SEQ ID NO: 19657 - protein, 10 aa, Artificial Sequence
  Description of Artificial Sequence: Synthetic epitope
IQQMQRAETR

SEQ ID NO: 19658 - protein, 10 aa, Artificial Sequence
  Description of Artificial Sequence: Synthetic epitope
IQQNEALAAK

SEQ ID NO: 19659 - protein, 10 aa, Artificial Sequence
  Description of Artificial Sequence: Synthetic epitope
IQQRNQYERK

SEQ ID NO: 19660 - protein, 10 aa, Artificial Sequence
  Description of Artificial Sequence: Synthetic epitope
IQQVTATSSK

SEQ ID NO: 19661 - protein, 10 aa, Artificial Sequence
  Description of Artificial Sequence: Synthetic epitope
IQRDVIKKRA

SEQ ID NO: 19662 - protein, 10 aa, Artificial Sequence
  Description of Artificial Sequence: Synthetic epitope
IQRMVISGGN

SEQ ID NO: 19663 - protein, 10 aa, Artificial Sequence
  Description of Artificial Sequence: Synthetic epitope
IQRQDSKSAL

SEQ ID NO: 19664 - protein, 10 aa, Artificial Sequence
  Description of Artificial Sequence: Synthetic epitope
IQSLSVHDSQ

SEQ ID NO: 19665 - protein, 10 aa, Artificial Sequence
  Description of Artificial Sequence: Synthetic epitope
IQSQTQSPQN

SEQ ID NO: 19666 - protein, 10 aa, Artificial Sequence
  Description of Artificial Sequence: Synthetic epitope
IQTAQTTPVQ

SEQ ID NO: 19667 - protein, 10 aa, Artificial Sequence
  Description of Artificial Sequence: Synthetic epitope
IQTELNVTSS

SEQ ID NO: 19668 - protein, 10 aa, Artificial Sequence
  Description of Artificial Sequence: Synthetic epitope
IQTKMIDVDS

SEQ ID NO: 19669 - protein, 10 aa, Artificial Sequence
  Description of Artificial Sequence: Synthetic epitope
IQTTEDNEGQ

SEQ ID NO: 19670 - protein, 10 aa, Artificial Sequence
  Description of Artificial Sequence: Synthetic epitope
IQVDWNSELP

SEQ ID NO: 19671 - protein, 10 aa, Artificial Sequence
  Description of Artificial Sequence: Synthetic epitope
IQVKQLLAQV

SEQ ID NO: 19672 - protein, 10 aa, Artificial Sequence
  Description of Artificial Sequence: Synthetic epitope
IQVKRSRSKG

SEQ ID NO: 19673 - protein, 10 aa, Artificial Sequence
  Description of Artificial Sequence: Synthetic epitope
IQVTTRTRKS

SEQ ID NO: 19674 - protein, 10 aa, Artificial Sequence
  Description of Artificial Sequence: Synthetic epitope
IQYQQHFSRR

SEQ ID NO: 19675 - protein, 10 aa, Artificial Sequence
  Description of Artificial Sequence: Synthetic epitope
IRAALRTTER

SEQ ID NO: 19676 - protein, 10 aa, Artificial Sequence
  Description of Artificial Sequence: Synthetic epitope
IRAASSLEEL

SEQ ID NO: 19677 - protein, 10 aa, Artificial Sequence
  Description of Artificial Sequence: Synthetic epitope
IRAEALLAAG

SEQ ID NO: 19678 - protein, 10 aa, Artificial Sequence
  Description of Artificial Sequence: Synthetic epitope
IREAANAMKL

SEQ ID NO: 19679 - protein, 10 aa, Artificial Sequence
  Description of Artificial Sequence: Synthetic epitope
IRIVAKERDE

SEQ ID NO: 19680 - protein, 10 aa, Artificial Sequence
  Description of Artificial Sequence: Synthetic epitope
IRKRNSLIAD

SEQ ID NO: 19681 - protein, 10 aa, Artificial Sequence
  Description of Artificial Sequence: Synthetic epitope
IRKSSVMTTE

SEQ ID NO: 19682 - protein, 10 aa, Artificial Sequence
  Description of Artificial Sequence: Synthetic epitope
IRLAEVTERL

SEQ ID NO: 19683 - protein, 10 aa, Artificial Sequence
  Description of Artificial Sequence: Synthetic epitope
IRLQHQVKRH

SEQ ID NO: 19684 - protein, 10 aa, Artificial Sequence
  Description of Artificial Sequence: Synthetic epitope
IRMANEKHSK

SEQ ID NO: 19685 - protein, 10 aa, Artificial Sequence
  Description of Artificial Sequence: Synthetic epitope
IRMANEKHSK

SEQ ID NO: 19686 - protein, 10 aa, Artificial Sequence
  Description of Artificial Sequence: Synthetic epitope
IRRTMTNERP

SEQ ID NO: 19687 - protein, 10 aa, Artificial Sequence
  Description of Artificial Sequence: Synthetic epitope
IRSEEPLKTD

SEQ ID NO: 19688 - protein, 10 aa, Artificial Sequence
  Description of Artificial Sequence: Synthetic epitope
IRSLASVSYA

SEQ ID NO: 19689 - protein, 10 aa, Artificial Sequence
  Description of Artificial Sequence: Synthetic epitope
IRSVVALHNL

SEQ ID NO: 19690 - protein, 10 aa, Artificial Sequence
  Description of Artificial Sequence: Synthetic epitope
IRTALEIKLA

SEQ ID NO: 19691 - protein, 10 aa, Artificial Sequence
  Description of Artificial Sequence: Synthetic epitope
IRTSYQSLTE

SEQ ID NO: 19692 - protein, 10 aa, Artificial Sequence
  Description of Artificial Sequence: Synthetic epitope
IRVISEAEKA

SEQ ID NO: 19693 - protein, 10 aa, Artificial Sequence
  Description of Artificial Sequence: Synthetic epitope
IRVKAIRKFA

SEQ ID NO: 19694 - protein, 10 aa, Artificial Sequence
  Description of Artificial Sequence: Synthetic epitope
ISAAEGNKSY

SEQ ID NO: 19695 - protein, 10 aa, Artificial Sequence
  Description of Artificial Sequence: Synthetic epitope
ISAKLSTVKT

SEQ ID NO: 19696 - protein, 10 aa, Artificial Sequence
  Description of Artificial Sequence: Synthetic epitope
ISDAEKVAMD

SEQ ID NO: 19697 - protein, 10 aa, Artificial Sequence
  Description of Artificial Sequence: Synthetic epitope
ISDAGAVEGI

SEQ ID NO: 19698 - protein, 10 aa, Artificial Sequence
  Description of Artificial Sequence: Synthetic epitope
ISDKFVMEAL

SEQ ID NO: 19699 - protein, 10 aa, Artificial Sequence
  Description of Artificial Sequence: Synthetic epitope
ISEDYATAHE

SEQ ID NO: 19700 - protein, 10 aa, Artificial Sequence
  Description of Artificial Sequence: Synthetic epitope
ISEKNELKMK

SEQ ID NO: 19701 - protein, 10 aa, Artificial Sequence
  Description of Artificial Sequence: Synthetic epitope
ISIENKVVPE

SEQ ID NO: 19702 - protein, 10 aa, Artificial Sequence
  Description of Artificial Sequence: Synthetic epitope
ISIKASANMD

SEQ ID NO: 19703 - protein, 10 aa, Artificial Sequence
  Description of Artificial Sequence: Synthetic epitope
ISKDLSASAH

SEQ ID NO: 19704 - protein, 10 aa, Artificial Sequence
  Description of Artificial Sequence: Synthetic epitope
ISKERLKMAQ

SEQ ID NO: 19705 - protein, 10 aa, Artificial Sequence
  Description of Artificial Sequence: Synthetic epitope
ISKESDRTFE

SEQ ID NO: 19706 - protein, 10 aa, Artificial Sequence
  Description of Artificial Sequence: Synthetic epitope
ISKGKRKEDS

SEQ ID NO: 19707 - protein, 10 aa, Artificial Sequence
  Description of Artificial Sequence: Synthetic epitope
ISKKSAEHFK

SEQ ID NO: 19708 - protein, 10 aa, Artificial Sequence
  Description of Artificial Sequence: Synthetic epitope
ISKLTQLTQS

SEQ ID NO: 19709 - protein, 10 aa, Artificial Sequence
  Description of Artificial Sequence: Synthetic epitope
ISKNITVETW

SEQ ID NO: 19710 - protein, 10 aa, Artificial Sequence
  Description of Artificial Sequence: Synthetic epitope
ISKNSEKKME

SEQ ID NO: 19711 - protein, 10 aa, Artificial Sequence
  Description of Artificial Sequence: Synthetic epitope
ISKSNSRKSK

SEQ ID NO: 19712 - protein, 10 aa, Artificial Sequence
  Description of Artificial Sequence: Synthetic epitope
ISLLSSEELK

SEQ ID NO: 19713 - protein, 10 aa, Artificial Sequence
  Description of Artificial Sequence: Synthetic epitope
ISLSYSRISL

SEQ ID NO: 19714 - protein, 10 aa, Artificial Sequence
  Description of Artificial Sequence: Synthetic epitope
ISLVSVYVSS

SEQ ID NO: 19715 - protein, 10 aa, Artificial Sequence
  Description of Artificial Sequence: Synthetic epitope
ISMQQFSQTS

SEQ ID NO: 19716 - protein, 10 aa, Artificial Sequence
  Description of Artificial Sequence: Synthetic epitope
ISNSDLSGSA

SEQ ID NO: 19717 - protein, 10 aa, Artificial Sequence
  Description of Artificial Sequence: Synthetic epitope
ISPSRMLDKS

SEQ ID NO: 19718 - protein, 10 aa, Artificial Sequence
  Description of Artificial Sequence: Synthetic epitope
ISQRFQIMKV

SEQ ID NO: 19719 - protein, 10 aa, Artificial Sequence
  Description of Artificial Sequence: Synthetic epitope
ISRAEFLAGV

SEQ ID NO: 19720 - protein, 10 aa, Artificial Sequence
  Description of Artificial Sequence: Synthetic epitope
ISRKTKRRLR

SEQ ID NO: 19721 - protein, 10 aa, Artificial Sequence
  Description of Artificial Sequence: Synthetic epitope
ISRLSNKSMV

SEQ ID NO: 19722 - protein, 10 aa, Artificial Sequence
  Description of Artificial Sequence: Synthetic epitope
ISRNEETSEE

SEQ ID NO: 19723 - protein, 10 aa, Artificial Sequence
  Description of Artificial Sequence: Synthetic epitope
ISRPRSSRSK

SEQ ID NO: 19724 - protein, 10 aa, Artificial Sequence
  Description of Artificial Sequence: Synthetic epitope
ISRREKLKLS

SEQ ID NO: 19725 - protein, 10 aa, Artificial Sequence
  Description of Artificial Sequence: Synthetic epitope
ISSATDLQPD

SEQ ID NO: 19726 - protein, 10 aa, Artificial Sequence
  Description of Artificial Sequence: Synthetic epitope
ISSDSLHSIN

SEQ ID NO: 19727 - protein, 10 aa, Artificial Sequence
  Description of Artificial Sequence: Synthetic epitope
ISSESARNYI

SEQ ID NO: 19728 - protein, 10 aa, Artificial Sequence
  Description of Artificial Sequence: Synthetic epitope
ISSLSTIQGT

SEQ ID NO: 19729 - protein, 10 aa, Artificial Sequence
  Description of Artificial Sequence: Synthetic epitope
ISSNNSIAED

SEQ ID NO: 19730 - protein, 10 aa, Artificial Sequence
  Description of Artificial Sequence: Synthetic epitope
ISSQESKKSK

SEQ ID NO: 19731 - protein, 10 aa, Artificial Sequence
  Description of Artificial Sequence: Synthetic epitope
ISSVSSAPTL

SEQ ID NO: 19732 - protein, 10 aa, Artificial Sequence
  Description of Artificial Sequence: Synthetic epitope
ISTGTLVSKR

SEQ ID NO: 19733 - protein, 10 aa, Artificial Sequence
  Description of Artificial Sequence: Synthetic epitope
ISTLEILNLE

SEQ ID NO: 19734 - protein, 10 aa, Artificial Sequence
  Description of Artificial Sequence: Synthetic epitope
ISTLESVSTS

SEQ ID NO: 19735 - protein, 10 aa, Artificial Sequence
  Description of Artificial Sequence: Synthetic epitope
ISTQKKVIKK

SEQ ID NO: 19736 - protein, 10 aa, Artificial Sequence
  Description of Artificial Sequence: Synthetic epitope
ISTYSLKKDR

SEQ ID NO: 19737 - protein, 10 aa, Artificial Sequence
  Description of Artificial Sequence: Synthetic epitope
ISVLKLFRMR

SEQ ID NO: 19738 - protein, 10 aa, Artificial Sequence
  Description of Artificial Sequence: Synthetic epitope
ISVQLDSHQP

SEQ ID NO: 19739 - protein, 10 aa, Artificial Sequence
  Description of Artificial Sequence: Synthetic epitope
ISYVFTSEKA

SEQ ID NO: 19740 - protein, 10 aa, Artificial Sequence
  Description of Artificial Sequence: Synthetic epitope
ITAESAQGQG

SEQ ID NO: 19741 - protein, 10 aa, Artificial Sequence
  Description of Artificial Sequence: Synthetic epitope
ITFSELKGFA

SEQ ID NO: 19742 - protein, 10 aa, Artificial Sequence
  Description of Artificial Sequence: Synthetic epitope
ITGDNRLNYQ

SEQ ID NO: 19743 - protein, 10 aa, Artificial Sequence
  Description of Artificial Sequence: Synthetic epitope
ITKKQKMDTL

SEQ ID NO: 19744 - protein, 10 aa, Artificial Sequence
  Description of Artificial Sequence: Synthetic epitope
ITKRVKAKKN

SEQ ID NO: 19745 - protein, 10 aa, Artificial Sequence
  Description of Artificial Sequence: Synthetic epitope
ITKSKMHVSF

SEQ ID NO: 19746 - protein, 10 aa, Artificial Sequence
  Description of Artificial Sequence: Synthetic epitope
ITKSSAVEHD

SEQ ID NO: 19747 - protein, 10 aa, Artificial Sequence
  Description of Artificial Sequence: Synthetic epitope
ITKTKMQTEE

SEQ ID NO: 19748 - protein, 10 aa, Artificial Sequence
  Description of Artificial Sequence: Synthetic epitope
ITLVTSTQSS

SEQ ID NO: 19749 - protein, 10 aa, Artificial Sequence
  Description of Artificial Sequence: Synthetic epitope
ITMASSLSSP

SEQ ID NO: 19750 - protein, 10 aa, Artificial Sequence
  Description of Artificial Sequence: Synthetic epitope
ITMTKKLDVE

SEQ ID NO: 19751 - protein, 10 aa, Artificial Sequence
  Description of Artificial Sequence: Synthetic epitope
ITNQSKIRVT

SEQ ID NO: 19752 - protein, 10 aa, Artificial Sequence
  Description of Artificial Sequence: Synthetic epitope
ITNTTGLAQA

SEQ ID NO: 19753 - protein, 10 aa, Artificial Sequence
  Description of Artificial Sequence: Synthetic epitope
ITPAADKTAA

SEQ ID NO: 19754 - protein, 10 aa, Artificial Sequence
  Description of Artificial Sequence: Synthetic epitope
ITPALATPAS

SEQ ID NO: 19755 - protein, 10 aa, Artificial Sequence
  Description of Artificial Sequence: Synthetic epitope
ITPSRASESS

SEQ ID NO: 19756 - protein, 10 aa, Artificial Sequence
  Description of Artificial Sequence: Synthetic epitope
ITQAISARTV

SEQ ID NO: 19757 - protein, 10 aa, Artificial Sequence
  Description of Artificial Sequence: Synthetic epitope
ITRIRGTSYQ

SEQ ID NO: 19758 - protein, 10 aa, Artificial Sequence
  Description of Artificial Sequence: Synthetic epitope
ITSVNSLGSK

SEQ ID NO: 19759 - protein, 10 aa, Artificial Sequence
  Description of Artificial Sequence: Synthetic epitope
ITTVSEIESK

SEQ ID NO: 19760 - protein, 10 aa, Artificial Sequence
  Description of Artificial Sequence: Synthetic epitope
ITVAYTIPKK

SEQ ID NO: 19761 - protein, 10 aa, Artificial Sequence
  Description of Artificial Sequence: Synthetic epitope
ITVSTSDSEP

SEQ ID NO: 19762 - protein, 10 aa, Artificial Sequence
  Description of Artificial Sequence: Synthetic epitope
ITVVQTYSTL

SEQ ID NO: 19763 - protein, 10 aa, Artificial Sequence
  Description of Artificial Sequence: Synthetic epitope
IVDKQNTIEN

SEQ ID NO: 19764 - protein, 10 aa, Artificial Sequence
  Description of Artificial Sequence: Synthetic epitope
IVEDRSNIVP

SEQ ID NO: 19765 - protein, 10 aa, Artificial Sequence
  Description of Artificial Sequence: Synthetic epitope
IVERSSKGTR

SEQ ID NO: 19766 - protein, 10 aa, Artificial Sequence
  Description of Artificial Sequence: Synthetic epitope
IVKKEKLATA

SEQ ID NO: 19767 - protein, 10 aa, Artificial Sequence
  Description of Artificial Sequence: Synthetic epitope
IVKTEEVINM

SEQ ID NO: 19768 - protein, 10 aa, Artificial Sequence
  Description of Artificial Sequence: Synthetic epitope
IVKYNASSVT

SEQ ID NO: 19769 - protein, 10 aa, Artificial Sequence
  Description of Artificial Sequence: Synthetic epitope
IVLELVAQVL

SEQ ID NO: 19770 - protein, 10 aa, Artificial Sequence
  Description of Artificial Sequence: Synthetic epitope
IVLSTESPAA

SEQ ID NO: 19771 - protein, 10 aa, Artificial Sequence
  Description of Artificial Sequence: Synthetic epitope
IVPAARKATA

SEQ ID NO: 19772 - protein, 10 aa, Artificial Sequence
  Description of Artificial Sequence: Synthetic epitope
IVPEQTIEIP

SEQ ID NO: 19773 - protein, 10 aa, Artificial Sequence
  Description of Artificial Sequence: Synthetic epitope
IVPTAKISED

SEQ ID NO: 19774 - protein, 10 aa, Artificial Sequence
  Description of Artificial Sequence: Synthetic epitope
IVPTDIKIEF

SEQ ID NO: 19775 - protein, 10 aa, Artificial Sequence
  Description of Artificial Sequence: Synthetic epitope
IVQQSMQTSD

SEQ ID NO: 19776 - protein, 10 aa, Artificial Sequence
  Description of Artificial Sequence: Synthetic epitope
IVREESNQEH

SEQ ID NO: 19777 - protein, 10 aa, Artificial Sequence
  Description of Artificial Sequence: Synthetic epitope
IVRFLSKTDK

SEQ ID NO: 19778 - protein, 10 aa, Artificial Sequence
  Description of Artificial Sequence: Synthetic epitope
IVRVTAADAF

SEQ ID NO: 19779 - protein, 10 aa, Artificial Sequence
  Description of Artificial Sequence: Synthetic epitope
IVSLTTAESE

SEQ ID NO: 19780 - protein, 10 aa, Artificial Sequence
  Description of Artificial Sequence: Synthetic epitope
IVSSEGANES

SEQ ID NO: 19781 - protein, 10 aa, Artificial Sequence
  Description of Artificial Sequence: Synthetic epitope
IVSSVRRPMS

SEQ ID NO: 19782 - protein, 10 aa, Artificial Sequence
  Description of Artificial Sequence: Synthetic epitope
IVTEANISSG

SEQ ID NO: 19783 - protein, 10 aa, Artificial Sequence
  Description of Artificial Sequence: Synthetic epitope
IVYGEVSMGQ

SEQ ID NO: 19784 - protein, 10 aa, Artificial Sequence
  Description of Artificial Sequence: Synthetic epitope
IWLSSQQKTS

SEQ ID NO: 19785 - protein, 10 aa, Artificial Sequence
  Description of Artificial Sequence: Synthetic epitope
IWYNEMQLLS

SEQ ID NO: 19786 - protein, 10 aa, Artificial Sequence
  Description of Artificial Sequence: Synthetic epitope
IYDISKAISA

SEQ ID NO: 19787 - protein, 10 aa, Artificial Sequence
  Description of Artificial Sequence: Synthetic epitope
IYGSTGVYFS

SEQ ID NO: 19788 - protein, 10 aa, Artificial Sequence
  Description of Artificial Sequence: Synthetic epitope
IYPRKGKQTR

SEQ ID NO: 19789 - protein, 10 aa, Artificial Sequence
  Description of Artificial Sequence: Synthetic epitope
IYQSVILSKP

SEQ ID NO: 19790 - protein, 10 aa, Artificial Sequence
  Description of Artificial Sequence: Synthetic epitope
IYSTVSTSTT

SEQ ID NO: 19791 - protein, 10 aa, Artificial Sequence
  Description of Artificial Sequence: Synthetic epitope
IYVERAVKQK

SEQ ID NO: 19792 - protein, 10 aa, Artificial Sequence
  Description of Artificial Sequence: Synthetic epitope
IYWPRFIRHK

SEQ ID NO: 19793 - protein, 10 aa, Artificial Sequence
  Description of Artificial Sequence: Synthetic epitope
KAAEARGRVR

SEQ ID NO: 19794 - protein, 10 aa, Artificial Sequence
  Description of Artificial Sequence: Synthetic epitope
KAAEKNSHNE

SEQ ID NO: 19795 - protein, 10 aa, Artificial Sequence
  Description of Artificial Sequence: Synthetic epitope
KAAGGNSREP

SEQ ID NO: 19796 - protein, 10 aa, Artificial Sequence
  Description of Artificial Sequence: Synthetic epitope
KAAIDRLDTQ

SEQ ID NO: 19797 - protein, 10 aa, Artificial Sequence
  Description of Artificial Sequence: Synthetic epitope
KAAKSSTFLP

SEQ ID NO: 19798 - protein, 10 aa, Artificial Sequence
  Description of Artificial Sequence: Synthetic epitope
KAALEGVSKD

SEQ ID NO: 19799 - protein, 10 aa, Artificial Sequence
  Description of Artificial Sequence: Synthetic epitope
KAALRVVEES

SEQ ID NO: 19800 - protein, 10 aa, Artificial Sequence
  Description of Artificial Sequence: Synthetic epitope
KAAMERDSMF

SEQ ID NO: 19801 - protein, 10 aa, Artificial Sequence
  Description of Artificial Sequence: Synthetic epitope
KAAMPRIYEL

SEQ ID NO: 19802 - protein, 10 aa, Artificial Sequence
  Description of Artificial Sequence: Synthetic epitope
KAANGLEADN

SEQ ID NO: 19803 - protein, 10 aa, Artificial Sequence
  Description of Artificial Sequence: Synthetic epitope
KAAQHQANQA

SEQ ID NO: 19804 - protein, 10 aa, Artificial Sequence
  Description of Artificial Sequence: Synthetic epitope
KAAQTTIETA

SEQ ID NO: 19805 - protein, 10 aa, Artificial Sequence
  Description of Artificial Sequence: Synthetic epitope
KAARARGTQS

SEQ ID NO: 19806 - protein, 10 aa, Artificial Sequence
  Description of Artificial Sequence: Synthetic epitope
KAARRSMLQK

SEQ ID NO: 19807 - protein, 10 aa, Artificial Sequence
  Description of Artificial Sequence: Synthetic epitope
KAASGLLSIG

SEQ ID NO: 19808 - protein, 10 aa, Artificial Sequence
  Description of Artificial Sequence: Synthetic epitope
KAASGSLHKD

SEQ ID NO: 19809 - protein, 10 aa, Artificial Sequence
  Description of Artificial Sequence: Synthetic epitope
KAASNDKATK

SEQ ID NO: 19810 - protein, 10 aa, Artificial Sequence
  Description of Artificial Sequence: Synthetic epitope
KAASVQNTVQ

SEQ ID NO: 19811 - protein, 10 aa, Artificial Sequence
  Description of Artificial Sequence: Synthetic epitope
KAATQASKQY

SEQ ID NO: 19812 - protein, 10 aa, Artificial Sequence
  Description of Artificial Sequence: Synthetic epitope
KAAVDSLMTI

SEQ ID NO: 19813 - protein, 10 aa, Artificial Sequence
  Description of Artificial Sequence: Synthetic epitope
KADAISSIGT

SEQ ID NO: 19814 - protein, 10 aa, Artificial Sequence
  Description of Artificial Sequence: Synthetic epitope
KADEAKPKSK

SEQ ID NO: 19815 - protein, 10 aa, Artificial Sequence
  Description of Artificial Sequence: Synthetic epitope
KADIATSKTT

SEQ ID NO: 19816 - protein, 10 aa, Artificial Sequence
  Description of Artificial Sequence: Synthetic epitope
KADIESLVTE

SEQ ID NO: 19817 - protein, 10 aa, Artificial Sequence
  Description of Artificial Sequence: Synthetic epitope
KADIGFSFLS

SEQ ID NO: 19818 - protein, 10 aa, Artificial Sequence
  Description of Artificial Sequence: Synthetic epitope
KADIIASSDI

SEQ ID NO: 19819 - protein, 10 aa, Artificial Sequence
  Description of Artificial Sequence: Synthetic epitope
KADKSALATK

SEQ ID NO: 19820 - protein, 10 aa, Artificial Sequence
  Description of Artificial Sequence: Synthetic epitope
KADNVKLMHL

SEQ ID NO: 19821 - protein, 10 aa, Artificial Sequence
  Description of Artificial Sequence: Synthetic epitope
KADTKMDRKD

SEQ ID NO: 19822 - protein, 10 aa, Artificial Sequence
  Description of Artificial Sequence: Synthetic epitope
KAEAERKRDE

SEQ ID NO: 19823 - protein, 10 aa, Artificial Sequence
  Description of Artificial Sequence: Synthetic epitope
KAEEITSDAA

SEQ ID NO: 19824 - protein, 10 aa, Artificial Sequence
  Description of Artificial Sequence: Synthetic epitope
KAEELVNTAP

SEQ ID NO: 19825 - protein, 10 aa, Artificial Sequence
  Description of Artificial Sequence: Synthetic epitope
KAEENKKEPL

SEQ ID NO: 19826 - protein, 10 aa, Artificial Sequence
  Description of Artificial Sequence: Synthetic epitope
KAEEQLLSKV

SEQ ID NO: 19827 - protein, 10 aa, Artificial Sequence
  Description of Artificial Sequence: Synthetic epitope
KAEFQEEAKR

SEQ ID NO: 19828 - protein, 10 aa, Artificial Sequence
  Description of Artificial Sequence: Synthetic epitope
KAEIDARNDS

SEQ ID NO: 19829 - protein, 10 aa, Artificial Sequence
  Description of Artificial Sequence: Synthetic epitope
KAEIEARADR

SEQ ID NO: 19830 - protein, 10 aa, Artificial Sequence
  Description of Artificial Sequence: Synthetic epitope
KAEISTTRLR

SEQ ID NO: 19831 - protein, 10 aa, Artificial Sequence
  Description of Artificial Sequence: Synthetic epitope
KAEKEKQATE

SEQ ID NO: 19832 - protein, 10 aa, Artificial Sequence
  Description of Artificial Sequence: Synthetic epitope
KAELAELEQL

SEQ ID NO: 19833 - protein, 10 aa, Artificial Sequence
  Description of Artificial Sequence: Synthetic epitope
KAELANSTEV

SEQ ID NO: 19834 - protein, 10 aa, Artificial Sequence
  Description of Artificial Sequence: Synthetic epitope
KAELNNEKKE

SEQ ID NO: 19835 - protein, 10 aa, Artificial Sequence
  Description of Artificial Sequence: Synthetic epitope
KAENKYAGGN

SEQ ID NO: 19836 - protein, 10 aa, Artificial Sequence
  Description of Artificial Sequence: Synthetic epitope
KAEQDMKAKQ

SEQ ID NO: 19837 - protein, 10 aa, Artificial Sequence
  Description of Artificial Sequence: Synthetic epitope
KAEQVAELAE

SEQ ID NO: 19838 - protein, 10 aa, Artificial Sequence
  Description of Artificial Sequence: Synthetic epitope
KAEREAEALK

SEQ ID NO: 19839 - protein, 10 aa, Artificial Sequence
  Description of Artificial Sequence: Synthetic epitope
KAESAQASAK

SEQ ID NO: 19840 - protein, 10 aa, Artificial Sequence
  Description of Artificial Sequence: Synthetic epitope
KAESKSSKPT

SEQ ID NO: 19841 - protein, 10 aa, Artificial Sequence
  Description of Artificial Sequence: Synthetic epitope
KAESSEDETS

SEQ ID NO: 19842 - protein, 10 aa, Artificial Sequence
  Description of Artificial Sequence: Synthetic epitope
KAESSQNSAP

SEQ ID NO: 19843 - protein, 10 aa, Artificial Sequence
  Description of Artificial Sequence: Synthetic epitope
KAETVTQDRT

SEQ ID NO: 19844 - protein, 10 aa, Artificial Sequence
  Description of Artificial Sequence: Synthetic epitope
KAETVTSVAK

SEQ ID NO: 19845 - protein, 10 aa, Artificial Sequence
  Description of Artificial Sequence: Synthetic epitope
KAEVNSSGKT

SEQ ID NO: 19846 - protein, 10 aa, Artificial Sequence
  Description of Artificial Sequence: Synthetic epitope
KAFDLIVDRP

SEQ ID NO: 19847 - protein, 10 aa, Artificial Sequence
  Description of Artificial Sequence: Synthetic epitope
KAFHLFGGFR

SEQ ID NO: 19848 - protein, 10 aa, Artificial Sequence
  Description of Artificial Sequence: Synthetic epitope
KAFLSESSVQ

SEQ ID NO: 19849 - protein, 10 aa, Artificial Sequence
  Description of Artificial Sequence: Synthetic epitope
KAFMDIMSAQ

SEQ ID NO: 19850 - protein, 10 aa, Artificial Sequence
  Description of Artificial Sequence: Synthetic epitope
KAFMKLDFNK

SEQ ID NO: 19851 - protein, 10 aa, Artificial Sequence
  Description of Artificial Sequence: Synthetic epitope
KAFSEKRTSQ

SEQ ID NO: 19852 - protein, 10 aa, Artificial Sequence
  Description of Artificial Sequence: Synthetic epitope
KAFSLKTSTS

SEQ ID NO: 19853 - protein, 10 aa, Artificial Sequence
  Description of Artificial Sequence: Synthetic epitope
KAFTKEFTTG

SEQ ID NO: 19854 - protein, 10 aa, Artificial Sequence
  Description of Artificial Sequence: Synthetic epitope
KAFVEQVANV

SEQ ID NO: 19855 - protein, 10 aa, Artificial Sequence
  Description of Artificial Sequence: Synthetic epitope
KAGAQQALTS

SEQ ID NO: 19856 - protein, 10 aa, Artificial Sequence
  Description of Artificial Sequence: Synthetic epitope
KAGEAETNDT

SEQ ID NO: 19857 - protein, 10 aa, Artificial Sequence
  Description of Artificial Sequence: Synthetic epitope
KAGFSSGSLK

SEQ ID NO: 19858 - protein, 10 aa, Artificial Sequence
  Description of Artificial Sequence: Synthetic epitope
KAGLISLVKM

SEQ ID NO: 19859 - protein, 10 aa, Artificial Sequence
  Description of Artificial Sequence: Synthetic epitope
KAGRINKRNA

SEQ ID NO: 19860 - protein, 10 aa, Artificial Sequence
  Description of Artificial Sequence: Synthetic epitope
KAGTSIMGSH

SEQ ID NO: 19861 - protein, 10 aa, Artificial Sequence
  Description of Artificial Sequence: Synthetic epitope
KAHARKNEKI

SEQ ID NO: 19862 - protein, 10 aa, Artificial Sequence
  Description of Artificial Sequence: Synthetic epitope
KAHMNNIIEP

SEQ ID NO: 19863 - protein, 10 aa, Artificial Sequence
  Description of Artificial Sequence: Synthetic epitope
KAHQSSVMGN

SEQ ID NO: 19864 - protein, 10 aa, Artificial Sequence
  Description of Artificial Sequence: Synthetic epitope
KAIEKADAKP

SEQ ID NO: 19865 - protein, 10 aa, Artificial Sequence
  Description of Artificial Sequence: Synthetic epitope
KAIEQKNLLS

SEQ ID NO: 19866 - protein, 10 aa, Artificial Sequence
  Description of Artificial Sequence: Synthetic epitope
KAIIAKLPQE

SEQ ID NO: 19867 - protein, 10 aa, Artificial Sequence
  Description of Artificial Sequence: Synthetic epitope
KAILQKESDI

SEQ ID NO: 19868 - protein, 10 aa, Artificial Sequence
  Description of Artificial Sequence: Synthetic epitope
KAIQFPRRSS

SEQ ID NO: 19869 - protein, 10 aa, Artificial Sequence
  Description of Artificial Sequence: Synthetic epitope
KAIQREKSNK

SEQ ID NO: 19870 - protein, 10 aa, Artificial Sequence
  Description of Artificial Sequence: Synthetic epitope
KAISEDLSQE

SEQ ID NO: 19871 - protein, 10 aa, Artificial Sequence
  Description of Artificial Sequence: Synthetic epitope
KAISTKVMNS

SEQ ID NO: 19872 - protein, 10 aa, Artificial Sequence
  Description of Artificial Sequence: Synthetic epitope
KAIVHQTDNV

SEQ ID NO: 19873 - protein, 10 aa, Artificial Sequence
  Description of Artificial Sequence: Synthetic epitope
KAIYLRSKPS

SEQ ID NO: 19874 - protein, 10 aa, Artificial Sequence
  Description of Artificial Sequence: Synthetic epitope
KAKAELIMDD

SEQ ID NO: 19875 - protein, 10 aa, Artificial Sequence
  Description of Artificial Sequence: Synthetic epitope
KAKAKAKAVR

SEQ ID NO: 19876 - protein, 10 aa, Artificial Sequence
  Description of Artificial Sequence: Synthetic epitope
KAKAQRAGQR

SEQ ID NO: 19877 - protein, 10 aa, Artificial Sequence
  Description of Artificial Sequence: Synthetic epitope
KAKETLRSTE

SEQ ID NO: 19878 - protein, 10 aa, Artificial Sequence
  Description of Artificial Sequence: Synthetic epitope
KAKGKTQKRG

SEQ ID NO: 19879 - protein, 10 aa, Artificial Sequence
  Description of Artificial Sequence: Synthetic epitope
KAKIAENPAN

SEQ ID NO: 19880 - protein, 10 aa, Artificial Sequence
  Description of Artificial Sequence: Synthetic epitope
KAKKAFQKRR

SEQ ID NO: 19881 - protein, 10 aa, Artificial Sequence
  Description of Artificial Sequence: Synthetic epitope
KAKKSITNSD

SEQ ID NO: 19882 - protein, 10 aa, Artificial Sequence
  Description of Artificial Sequence: Synthetic epitope
KAKKVASVDS

SEQ ID NO: 19883 - protein, 10 aa, Artificial Sequence
  Description of Artificial Sequence: Synthetic epitope
KAKLDVLAHV

SEQ ID NO: 19884 - protein, 10 aa, Artificial Sequence
  Description of Artificial Sequence: Synthetic epitope
KAKLESMETY

SEQ ID NO: 19885 - protein, 10 aa, Artificial Sequence
  Description of Artificial Sequence: Synthetic epitope
KAKLKAEILT

SEQ ID NO: 19886 - protein, 10 aa, Artificial Sequence
  Description of Artificial Sequence: Synthetic epitope
KAKQMKINVQ

SEQ ID NO: 19887 - protein, 10 aa, Artificial Sequence
  Description of Artificial Sequence: Synthetic epitope
KAKRKPSASS

SEQ ID NO: 19888 - protein, 10 aa, Artificial Sequence
  Description of Artificial Sequence: Synthetic epitope
KAKRVFSAAG

SEQ ID NO: 19889 - protein, 10 aa, Artificial Sequence
  Description of Artificial Sequence: Synthetic epitope
KAKSDQLLSS

SEQ ID NO: 19890 - protein, 10 aa, Artificial Sequence
  Description of Artificial Sequence: Synthetic epitope
KAKTNKKMDH

SEQ ID NO: 19891 - protein, 10 aa, Artificial Sequence
  Description of Artificial Sequence: Synthetic epitope
KAKTSAEKIV

SEQ ID NO: 19892 - protein, 10 aa, Artificial Sequence
  Description of Artificial Sequence: Synthetic epitope
KAKTSTRSSA

SEQ ID NO: 19893 - protein, 10 aa, Artificial Sequence
  Description of Artificial Sequence: Synthetic epitope
KALAKSEEDY

SEQ ID NO: 19894 - protein, 10 aa, Artificial Sequence
  Description of Artificial Sequence: Synthetic epitope
KALAYKTVEV

SEQ ID NO: 19895 - protein, 10 aa, Artificial Sequence
  Description of Artificial Sequence: Synthetic epitope
KALDKRQAHL

SEQ ID NO: 19896 - protein, 10 aa, Artificial Sequence
  Description of Artificial Sequence: Synthetic epitope
KALEGALKEA

SEQ ID NO: 19897 - protein, 10 aa, Artificial Sequence
  Description of Artificial Sequence: Synthetic epitope
KALEKKSELK

SEQ ID NO: 19898 - protein, 10 aa, Artificial Sequence
  Description of Artificial Sequence: Synthetic epitope
KALESSDLTE

SEQ ID NO: 19899 - protein, 10 aa, Artificial Sequence
  Description of Artificial Sequence: Synthetic epitope
KALETSKADL

SEQ ID NO: 19900 - protein, 10 aa, Artificial Sequence
  Description of Artificial Sequence: Synthetic epitope
KALFVSFLEE

SEQ ID NO: 19901 - protein, 10 aa, Artificial Sequence
  Description of Artificial Sequence: Synthetic epitope
KALHTQLEMQ

SEQ ID NO: 19902 - protein, 10 aa, Artificial Sequence
  Description of Artificial Sequence: Synthetic epitope
KALIALKKYH

SEQ ID NO: 19903 - protein, 10 aa, Artificial Sequence
  Description of Artificial Sequence: Synthetic epitope
KALKEKEKAS

SEQ ID NO: 19904 - protein, 10 aa, Artificial Sequence
  Description of Artificial Sequence: Synthetic epitope
KALKKVNMKL

SEQ ID NO: 19905 - protein, 10 aa, Artificial Sequence
  Description of Artificial Sequence: Synthetic epitope
KALKTARLQP

SEQ ID NO: 19906 - protein, 10 aa, Artificial Sequence
  Description of Artificial Sequence: Synthetic epitope
KALLKRTAQA

SEQ ID NO: 19907 - protein, 10 aa, Artificial Sequence
  Description of Artificial Sequence: Synthetic epitope
KALLSALELK

SEQ ID NO: 19908 - protein, 10 aa, Artificial Sequence
  Description of Artificial Sequence: Synthetic epitope
KALLTKVNDL

SEQ ID NO: 19909 - protein, 10 aa, Artificial Sequence
  Description of Artificial Sequence: Synthetic epitope
KALPLKLQQT

SEQ ID NO: 19910 - protein, 10 aa, Artificial Sequence
  Description of Artificial Sequence: Synthetic epitope
KALQHMTDFA

SEQ ID NO: 19911 - protein, 10 aa, Artificial Sequence
  Description of Artificial Sequence: Synthetic epitope
KALRKAESLK

SEQ ID NO: 19912 - protein, 10 aa, Artificial Sequence
  Description of Artificial Sequence: Synthetic epitope
KALSEMDEFK

SEQ ID NO: 19913 - protein, 10 aa, Artificial Sequence
  Description of Artificial Sequence: Synthetic epitope
KALSSARMSD

SEQ ID NO: 19914 - protein, 10 aa, Artificial Sequence
  Description of Artificial Sequence: Synthetic epitope
KALTNLIDQQ

SEQ ID NO: 19915 - protein, 10 aa, Artificial Sequence
  Description of Artificial Sequence: Synthetic epitope
KALTSQLRTI

SEQ ID NO: 19916 - protein, 10 aa, Artificial Sequence
  Description of Artificial Sequence: Synthetic epitope
KAMEALATAE

SEQ ID NO: 19917 - protein, 10 aa, Artificial Sequence
  Description of Artificial Sequence: Synthetic epitope
KAMEERQEAT

SEQ ID NO: 19918 - protein, 10 aa, Artificial Sequence
  Description of Artificial Sequence: Synthetic epitope
KAMFARFTEM

SEQ ID NO: 19919 - protein, 10 aa, Artificial Sequence
  Description of Artificial Sequence: Synthetic epitope
KAMNMRYSDR

SEQ ID NO: 19920 - protein, 10 aa, Artificial Sequence
  Description of Artificial Sequence: Synthetic epitope
KAMQMQERDT

SEQ ID NO: 19921 - protein, 10 aa, Artificial Sequence
  Description of Artificial Sequence: Synthetic epitope
KAMQRPETAA

SEQ ID NO: 19922 - protein, 10 aa, Artificial Sequence
  Description of Artificial Sequence: Synthetic epitope
KAMSSNETAA

SEQ ID NO: 19923 - protein, 10 aa, Artificial Sequence
  Description of Artificial Sequence: Synthetic epitope
KAMTAALNSN

SEQ ID NO: 19924 - protein, 10 aa, Artificial Sequence
  Description of Artificial Sequence: Synthetic epitope
KAMTGVEQWP

SEQ ID NO: 19925 - protein, 10 aa, Artificial Sequence
  Description of Artificial Sequence: Synthetic epitope
KAMTKARNFE

SEQ ID NO: 19926 - protein, 10 aa, Artificial Sequence
  Description of Artificial Sequence: Synthetic epitope
KAMVPRKEKL

SEQ ID NO: 19927 - protein, 10 aa, Artificial Sequence
  Description of Artificial Sequence: Synthetic epitope
KANAEELANN

SEQ ID NO: 19928 - protein, 10 aa, Artificial Sequence
  Description of Artificial Sequence: Synthetic epitope
KANDDVAQEI

SEQ ID NO: 19929 - protein, 10 aa, Artificial Sequence
  Description of Artificial Sequence: Synthetic epitope
KANKDSLYKP

SEQ ID NO: 19930 - protein, 10 aa, Artificial Sequence
  Description of Artificial Sequence: Synthetic epitope
KANKLNQVPI

SEQ ID NO: 19931 - protein, 10 aa, Artificial Sequence
  Description of Artificial Sequence: Synthetic epitope
KANLGKNASM

SEQ ID NO: 19932 - protein, 10 aa, Artificial Sequence
  Description of Artificial Sequence: Synthetic epitope
KANPAMKTVY

SEQ ID NO: 19933 - protein, 10 aa, Artificial Sequence
  Description of Artificial Sequence: Synthetic epitope
KANQLASQVE

SEQ ID NO: 19934 - protein, 10 aa, Artificial Sequence
  Description of Artificial Sequence: Synthetic epitope
KANRFSQSVK

SEQ ID NO: 19935 - protein, 10 aa, Artificial Sequence
  Description of Artificial Sequence: Synthetic epitope
KANSFESRLT

SEQ ID NO: 19936 - protein, 10 aa, Artificial Sequence
  Description of Artificial Sequence: Synthetic epitope
KANTYVRSFS

SEQ ID NO: 19937 - protein, 10 aa, Artificial Sequence
  Description of Artificial Sequence: Synthetic epitope
KANYFFDAAK

SEQ ID NO: 19938 - protein, 10 aa, Artificial Sequence
  Description of Artificial Sequence: Synthetic epitope
KAPAMFNIRN

SEQ ID NO: 19939 - protein, 10 aa, Artificial Sequence
  Description of Artificial Sequence: Synthetic epitope
KAPFAIMEPA

SEQ ID NO: 19940 - protein, 10 aa, Artificial Sequence
  Description of Artificial Sequence: Synthetic epitope
KAPLEITEYP

SEQ ID NO: 19941 - protein, 10 aa, Artificial Sequence
  Description of Artificial Sequence: Synthetic epitope
KAQAIFLGNK

SEQ ID NO: 19942 - protein, 10 aa, Artificial Sequence
  Description of Artificial Sequence: Synthetic epitope
KAQDTARGKG

SEQ ID NO: 19943 - protein, 10 aa, Artificial Sequence
  Description of Artificial Sequence: Synthetic epitope
KAQETIKAAE

SEQ ID NO: 19944 - protein, 10 aa, Artificial Sequence
  Description of Artificial Sequence: Synthetic epitope
KAQFKTSNSY

SEQ ID NO: 19945 - protein, 10 aa, Artificial Sequence
  Description of Artificial Sequence: Synthetic epitope
KAQKEQKNGD

SEQ ID NO: 19946 - protein, 10 aa, Artificial Sequence
  Description of Artificial Sequence: Synthetic epitope
KAQLDALAFD

SEQ ID NO: 19947 - protein, 10 aa, Artificial Sequence
  Description of Artificial Sequence: Synthetic epitope
KAQLLQIQTE

SEQ ID NO: 19948 - protein, 10 aa, Artificial Sequence
  Description of Artificial Sequence: Synthetic epitope
KAQMAEKEAI

SEQ ID NO: 19949 - protein, 10 aa, Artificial Sequence
  Description of Artificial Sequence: Synthetic epitope
KAQQLGTEEK

SEQ ID NO: 19950 - protein, 10 aa, Artificial Sequence
  Description of Artificial Sequence: Synthetic epitope
KARAQLLAKG

SEQ ID NO: 19951 - protein, 10 aa, Artificial Sequence
  Description of Artificial Sequence: Synthetic epitope
KARDTAEEKE

SEQ ID NO: 19952 - protein, 10 aa, Artificial Sequence
  Description of Artificial Sequence: Synthetic epitope
KAREEKARQA

SEQ ID NO: 19953 - protein, 10 aa, Artificial Sequence
  Description of Artificial Sequence: Synthetic epitope
KARISQSTKT

SEQ ID NO: 19954 - protein, 10 aa, Artificial Sequence
  Description of Artificial Sequence: Synthetic epitope
KARLASQEAE

SEQ ID NO: 19955 - protein, 10 aa, Artificial Sequence
  Description of Artificial Sequence: Synthetic epitope
KARLETVQAD

SEQ ID NO: 19956 - protein, 10 aa, Artificial Sequence
  Description of Artificial Sequence: Synthetic epitope
KARLQKSTES

SEQ ID NO: 19957 - protein, 10 aa, Artificial Sequence
  Description of Artificial Sequence: Synthetic epitope
KARNLIHARI

SEQ ID NO: 19958 - protein, 10 aa, Artificial Sequence
  Description of Artificial Sequence: Synthetic epitope
KARNSEVRSN

SEQ ID NO: 19959 - protein, 10 aa, Artificial Sequence
  Description of Artificial Sequence: Synthetic epitope
KARQSILQKQ

SEQ ID NO: 19960 - protein, 10 aa, Artificial Sequence
  Description of Artificial Sequence: Synthetic epitope
KARSISLKLD

SEQ ID NO: 19961 - protein, 10 aa, Artificial Sequence
  Description of Artificial Sequence: Synthetic epitope
KARTLLGAES

SEQ ID NO: 19962 - protein, 10 aa, Artificial Sequence
  Description of Artificial Sequence: Synthetic epitope
KARTVLKSTS

SEQ ID NO: 19963 - protein, 10 aa, Artificial Sequence
  Description of Artificial Sequence: Synthetic epitope
KARVALLASL

SEQ ID NO: 19964 - protein, 10 aa, Artificial Sequence
  Description of Artificial Sequence: Synthetic epitope
KARVHLVMEK

SEQ ID NO: 19965 - protein, 10 aa, Artificial Sequence
  Description of Artificial Sequence: Synthetic epitope
KARYLKNIFI

SEQ ID NO: 19966 - protein, 10 aa, Artificial Sequence
  Description of Artificial Sequence: Synthetic epitope
KASDSAVDVA

SEQ ID NO: 19967 - protein, 10 aa, Artificial Sequence
  Description of Artificial Sequence: Synthetic epitope
KASDVAAVRA

SEQ ID NO: 19968 - protein, 10 aa, Artificial Sequence
  Description of Artificial Sequence: Synthetic epitope
KASEESSFEK

SEQ ID NO: 19969 - protein, 10 aa, Artificial Sequence
  Description of Artificial Sequence: Synthetic epitope
KASERSSVQL

SEQ ID NO: 19970 - protein, 10 aa, Artificial Sequence
  Description of Artificial Sequence: Synthetic epitope
KASILHKIAK

SEQ ID NO: 19971 - protein, 10 aa, Artificial Sequence
  Description of Artificial Sequence: Synthetic epitope
KASIPATSAV

SEQ ID NO: 19972 - protein, 10 aa, Artificial Sequence
  Description of Artificial Sequence: Synthetic epitope
KASITALEAK

SEQ ID NO: 19973 - protein, 10 aa, Artificial Sequence
  Description of Artificial Sequence: Synthetic epitope
KASKHAGEEV

SEQ ID NO: 19974 - protein, 10 aa, Artificial Sequence
  Description of Artificial Sequence: Synthetic epitope
KASKSDATSG

SEQ ID NO: 19975 - protein, 10 aa, Artificial Sequence
  Description of Artificial Sequence: Synthetic epitope
KASLAETDKI

SEQ ID NO: 19976 - protein, 10 aa, Artificial Sequence
  Description of Artificial Sequence: Synthetic epitope
KASNAAVKLA

SEQ ID NO: 19977 - protein, 10 aa, Artificial Sequence
  Description of Artificial Sequence: Synthetic epitope
KASNLLRSSG

SEQ ID NO: 19978 - protein, 10 aa, Artificial Sequence
  Description of Artificial Sequence: Synthetic epitope
KASRTRQPSR

SEQ ID NO: 19979 - protein, 10 aa, Artificial Sequence
  Description of Artificial Sequence: Synthetic epitope
KASSALIQES

SEQ ID NO: 19980 - protein, 10 aa, Artificial Sequence
  Description of Artificial Sequence: Synthetic epitope
KASSKAELEI

SEQ ID NO: 19981 - protein, 10 aa, Artificial Sequence
  Description of Artificial Sequence: Synthetic epitope
KASSLEVQKA

SEQ ID NO: 19982 - protein, 10 aa, Artificial Sequence
  Description of Artificial Sequence: Synthetic epitope
KASTLSRREE

SEQ ID NO: 19983 - protein, 10 aa, Artificial Sequence
  Description of Artificial Sequence: Synthetic epitope
KASVRSISVE

SEQ ID NO: 19984 - protein, 10 aa, Artificial Sequence
  Description of Artificial Sequence: Synthetic epitope
KASWTVQESK

SEQ ID NO: 19985 - protein, 10 aa, Artificial Sequence
  Description of Artificial Sequence: Synthetic epitope
KASYEIKKVW

SEQ ID NO: 19986 - protein, 10 aa, Artificial Sequence
  Description of Artificial Sequence: Synthetic epitope
KATEISTAVV

SEQ ID NO: 19987 - protein, 10 aa, Artificial Sequence
  Description of Artificial Sequence: Synthetic epitope
KATEVSLQNP

SEQ ID NO: 19988 - protein, 10 aa, Artificial Sequence
  Description of Artificial Sequence: Synthetic epitope
KATKIISAKT

SEQ ID NO: 19989 - protein, 10 aa, Artificial Sequence
  Description of Artificial Sequence: Synthetic epitope
KATKITLSAI

SEQ ID NO: 19990 - protein, 10 aa, Artificial Sequence
  Description of Artificial Sequence: Synthetic epitope
KATKKTKDSH

SEQ ID NO: 19991 - protein, 10 aa, Artificial Sequence
  Description of Artificial Sequence: Synthetic epitope
KATKQTLQDS

SEQ ID NO: 19992 - protein, 10 aa, Artificial Sequence
  Description of Artificial Sequence: Synthetic epitope
KATLNAEEMA

SEQ ID NO: 19993 - protein, 10 aa, Artificial Sequence
  Description of Artificial Sequence: Synthetic epitope
KATLSRSMTT

SEQ ID NO: 19994 - protein, 10 aa, Artificial Sequence
  Description of Artificial Sequence: Synthetic epitope
KATLTSLAPE

SEQ ID NO: 19995 - protein, 10 aa, Artificial Sequence
  Description of Artificial Sequence: Synthetic epitope
KATPLSSTVT

SEQ ID NO: 19996 - protein, 10 aa, Artificial Sequence
  Description of Artificial Sequence: Synthetic epitope
KATSITVTGS

SEQ ID NO: 19997 - protein, 10 aa, Artificial Sequence
  Description of Artificial Sequence: Synthetic epitope
KATSQDERNV

SEQ ID NO: 19998 - protein, 10 aa, Artificial Sequence
  Description of Artificial Sequence: Synthetic epitope
KATSTVAAPP

SEQ ID NO: 19999 - protein, 10 aa, Artificial Sequence
  Description of Artificial Sequence: Synthetic epitope
KATSVTEKSE

SEQ ID NO: 20000 - protein, 10 aa, Artificial Sequence
  Description of Artificial Sequence: Synthetic epitope
KATSVTTYKI

SEQ ID NO: 20001 - protein, 10 aa, Artificial Sequence
  Description of Artificial Sequence: Synthetic epitope
KATTMMVLSK

SEQ ID NO: 20002 - protein, 10 aa, Artificial Sequence
  Description of Artificial Sequence: Synthetic epitope
KATVASDQIE

SEQ ID NO: 20003 - protein, 10 aa, Artificial Sequence
  Description of Artificial Sequence: Synthetic epitope
KATVIVMVTR

SEQ ID NO: 20004 - protein, 10 aa, Artificial Sequence
  Description of Artificial Sequence: Synthetic epitope
KAVALASGGE

SEQ ID NO: 20005 - protein, 10 aa, Artificial Sequence
  Description of Artificial Sequence: Synthetic epitope
KAVANIYREV

SEQ ID NO: 20006 - protein, 10 aa, Artificial Sequence
  Description of Artificial Sequence: Synthetic epitope
KAVATAQAPG

SEQ ID NO: 20007 - protein, 10 aa, Artificial Sequence
  Description of Artificial Sequence: Synthetic epitope
KAVATEAQVP

SEQ ID NO: 20008 - protein, 10 aa, Artificial Sequence
  Description of Artificial Sequence: Synthetic epitope
KAVDSLEQIS

SEQ ID NO: 20009 - protein, 10 aa, Artificial Sequence
  Description of Artificial Sequence: Synthetic epitope
KAVDSPNIKA

SEQ ID NO: 20010 - protein, 10 aa, Artificial Sequence
  Description of Artificial Sequence: Synthetic epitope
KAVDTNRASV

SEQ ID NO: 20011 - protein, 10 aa, Artificial Sequence
  Description of Artificial Sequence: Synthetic epitope
KAVEDAIARK

SEQ ID NO: 20012 - protein, 10 aa, Artificial Sequence
  Description of Artificial Sequence: Synthetic epitope
KAVETLQAGQ

SEQ ID NO: 20013 - protein, 10 aa, Artificial Sequence
  Description of Artificial Sequence: Synthetic epitope
KAVFHMQSVK

SEQ ID NO: 20014 - protein, 10 aa, Artificial Sequence
  Description of Artificial Sequence: Synthetic epitope
KAVGEVTNSE

SEQ ID NO: 20015 - protein, 10 aa, Artificial Sequence
  Description of Artificial Sequence: Synthetic epitope
KAVGSSMAQL

SEQ ID NO: 20016 - protein, 10 aa, Artificial Sequence
  Description of Artificial Sequence: Synthetic epitope
KAVHNSVAAQ

SEQ ID NO: 20017 - protein, 10 aa, Artificial Sequence
  Description of Artificial Sequence: Synthetic epitope
KAVKDATNTG

SEQ ID NO: 20018 - protein, 10 aa, Artificial Sequence
  Description of Artificial Sequence: Synthetic epitope
KAVKESSIRS

SEQ ID NO: 20019 - protein, 10 aa, Artificial Sequence
  Description of Artificial Sequence: Synthetic epitope
KAVKMLAESD

SEQ ID NO: 20020 - protein, 10 aa, Artificial Sequence
  Description of Artificial Sequence: Synthetic epitope
KAVKSVAASK

SEQ ID NO: 20021 - protein, 10 aa, Artificial Sequence
  Description of Artificial Sequence: Synthetic epitope
KAVKTATKAG

SEQ ID NO: 20022 - protein, 10 aa, Artificial Sequence
  Description of Artificial Sequence: Synthetic epitope
KAVMSKGAHT

SEQ ID NO: 20023 - protein, 10 aa, Artificial Sequence
  Description of Artificial Sequence: Synthetic epitope
KAVMTSIKQL

SEQ ID NO: 20024 - protein, 10 aa, Artificial Sequence
  Description of Artificial Sequence: Synthetic epitope
KAVPKSAVQQ

SEQ ID NO: 20025 - protein, 10 aa, Artificial Sequence
  Description of Artificial Sequence: Synthetic epitope
KAVPMKVSEH

SEQ ID NO: 20026 - protein, 10 aa, Artificial Sequence
  Description of Artificial Sequence: Synthetic epitope
KAVSAVLESD

SEQ ID NO: 20027 - protein, 10 aa, Artificial Sequence
  Description of Artificial Sequence: Synthetic epitope
KAVSDRSFAF

SEQ ID NO: 20028 - protein, 10 aa, Artificial Sequence
  Description of Artificial Sequence: Synthetic epitope
KAVSKSLISE

SEQ ID NO: 20029 - protein, 10 aa, Artificial Sequence
  Description of Artificial Sequence: Synthetic epitope
KAVSKTSRDG

SEQ ID NO: 20030 - protein, 10 aa, Artificial Sequence
  Description of Artificial Sequence: Synthetic epitope
KAVSLKSQLE

SEQ ID NO: 20031 - protein, 10 aa, Artificial Sequence
  Description of Artificial Sequence: Synthetic epitope
KAVSSKSLRH

SEQ ID NO: 20032 - protein, 10 aa, Artificial Sequence
  Description of Artificial Sequence: Synthetic epitope
KAVSVRPEAA

SEQ ID NO: 20033 - protein, 10 aa, Artificial Sequence
  Description of Artificial Sequence: Synthetic epitope
KAVTDAIMSR

SEQ ID NO: 20034 - protein, 10 aa, Artificial Sequence
  Description of Artificial Sequence: Synthetic epitope
KAVVAVLVDD

SEQ ID NO: 20035 - protein, 10 aa, Artificial Sequence
  Description of Artificial Sequence: Synthetic epitope
KAVVNEKVLQ

SEQ ID NO: 20036 - protein, 10 aa, Artificial Sequence
  Description of Artificial Sequence: Synthetic epitope
KAVVSGNARN

SEQ ID NO: 20037 - protein, 10 aa, Artificial Sequence
  Description of Artificial Sequence: Synthetic epitope
KAVYDTNPAK

SEQ ID NO: 20038 - protein, 10 aa, Artificial Sequence
  Description of Artificial Sequence: Synthetic epitope
KAWEWRYRLY

SEQ ID NO: 20039 - protein, 10 aa, Artificial Sequence
  Description of Artificial Sequence: Synthetic epitope
KAYAGDKAEE

SEQ ID NO: 20040 - protein, 10 aa, Artificial Sequence
  Description of Artificial Sequence: Synthetic epitope
KAYHMMNKFL

SEQ ID NO: 20041 - protein, 10 aa, Artificial Sequence
  Description of Artificial Sequence: Synthetic epitope
KAYIQKVEVT

SEQ ID NO: 20042 - protein, 10 aa, Artificial Sequence
  Description of Artificial Sequence: Synthetic epitope
KAYLIDKVRI

SEQ ID NO: 20043 - protein, 10 aa, Artificial Sequence
  Description of Artificial Sequence: Synthetic epitope
KAYNMVDIIH

SEQ ID NO: 20044 - protein, 10 aa, Artificial Sequence
  Description of Artificial Sequence: Synthetic epitope
KAYNQQAKRM

SEQ ID NO: 20045 - protein, 10 aa, Artificial Sequence
  Description of Artificial Sequence: Synthetic epitope
KAYSVLQATV

SEQ ID NO: 20046 - protein, 10 aa, Artificial Sequence
  Description of Artificial Sequence: Synthetic epitope
KAYTKLKLQV

SEQ ID NO: 20047 - protein, 10 aa, Artificial Sequence
  Description of Artificial Sequence: Synthetic epitope
KAYVSTSRLF

SEQ ID NO: 20048 - protein, 10 aa, Artificial Sequence
  Description of Artificial Sequence: Synthetic epitope
KDAAEIVLEA

SEQ ID NO: 20049 - protein, 10 aa, Artificial Sequence
  Description of Artificial Sequence: Synthetic epitope
KDAAITLKAI

SEQ ID NO: 20050 - protein, 10 aa, Artificial Sequence
  Description of Artificial Sequence: Synthetic epitope
KDADERIEKV

SEQ ID NO: 20051 - protein, 10 aa, Artificial Sequence
  Description of Artificial Sequence: Synthetic epitope
KDAFDFESRS

SEQ ID NO: 20052 - protein, 10 aa, Artificial Sequence
  Description of Artificial Sequence: Synthetic epitope
KDAHRKATKA

SEQ ID NO: 20053 - protein, 10 aa, Artificial Sequence
  Description of Artificial Sequence: Synthetic epitope
KDAKGTLQVP

SEQ ID NO: 20054 - protein, 10 aa, Artificial Sequence
  Description of Artificial Sequence: Synthetic epitope
KDAKIQEFEQ

SEQ ID NO: 20055 - protein, 10 aa, Artificial Sequence
  Description of Artificial Sequence: Synthetic epitope
KDAKKDAKEI

SEQ ID NO: 20056 - protein, 10 aa, Artificial Sequence
  Description of Artificial Sequence: Synthetic epitope
KDALENIDPA

SEQ ID NO: 20057 - protein, 10 aa, Artificial Sequence
  Description of Artificial Sequence: Synthetic epitope
KDALLNVEGE

SEQ ID NO: 20058 - protein, 10 aa, Artificial Sequence
  Description of Artificial Sequence: Synthetic epitope
KDANEVEKKE

SEQ ID NO: 20059 - protein, 10 aa, Artificial Sequence
  Description of Artificial Sequence: Synthetic epitope
KDARASTYGV

SEQ ID NO: 20060 - protein, 10 aa, Artificial Sequence
  Description of Artificial Sequence: Synthetic epitope
KDARDAEQLS

SEQ ID NO: 20061 - protein, 10 aa, Artificial Sequence
  Description of Artificial Sequence: Synthetic epitope
KDASAKSDRM

SEQ ID NO: 20062 - protein, 10 aa, Artificial Sequence
  Description of Artificial Sequence: Synthetic epitope
KDASEDSAQS

SEQ ID NO: 20063 - protein, 10 aa, Artificial Sequence
  Description of Artificial Sequence: Synthetic epitope
KDASKKMKNG

SEQ ID NO: 20064 - protein, 10 aa, Artificial Sequence
  Description of Artificial Sequence: Synthetic epitope
KDASLRRMSS

SEQ ID NO: 20065 - protein, 10 aa, Artificial Sequence
  Description of Artificial Sequence: Synthetic epitope
KDATESTARV

SEQ ID NO: 20066 - protein, 10 aa, Artificial Sequence
  Description of Artificial Sequence: Synthetic epitope
KDAVALRPTR

SEQ ID NO: 20067 - protein, 10 aa, Artificial Sequence
  Description of Artificial Sequence: Synthetic epitope
KDAVAVKSQA

SEQ ID NO: 20068 - protein, 10 aa, Artificial Sequence
  Description of Artificial Sequence: Synthetic epitope
KDDAMAAVPA

SEQ ID NO: 20069 - protein, 10 aa, Artificial Sequence
  Description of Artificial Sequence: Synthetic epitope
KDDHDKMFKM

SEQ ID NO: 20070 - protein, 10 aa, Artificial Sequence
  Description of Artificial Sequence: Synthetic epitope
KDDKERESVE

SEQ ID NO: 20071 - protein, 10 aa, Artificial Sequence
  Description of Artificial Sequence: Synthetic epitope
KDDKKELGAA

SEQ ID NO: 20072 - protein, 10 aa, Artificial Sequence
  Description of Artificial Sequence: Synthetic epitope
KDDLVTVKTP

SEQ ID NO: 20073 - protein, 10 aa, Artificial Sequence
  Description of Artificial Sequence: Synthetic epitope
KDDQAKLKKI

SEQ ID NO: 20074 - protein, 10 aa, Artificial Sequence
  Description of Artificial Sequence: Synthetic epitope
KDDQKAENDM

SEQ ID NO: 20075 - protein, 10 aa, Artificial Sequence
  Description of Artificial Sequence: Synthetic epitope
KDDQRSTPDS

SEQ ID NO: 20076 - protein, 10 aa, Artificial Sequence
  Description of Artificial Sequence: Synthetic epitope
KDDQRTSELM

SEQ ID NO: 20077 - protein, 10 aa, Artificial Sequence
  Description of Artificial Sequence: Synthetic epitope
KDDRASMQPA

SEQ ID NO: 20078 - protein, 10 aa, Artificial Sequence
  Description of Artificial Sequence: Synthetic epitope
KDDRKKVDGK

SEQ ID NO: 20079 - protein, 10 aa, Artificial Sequence
  Description of Artificial Sequence: Synthetic epitope
KDDSEETDRT

SEQ ID NO: 20080 - protein, 10 aa, Artificial Sequence
  Description of Artificial Sequence: Synthetic epitope
KDDSIEGIYD

SEQ ID NO: 20081 - protein, 10 aa, Artificial Sequence
  Description of Artificial Sequence: Synthetic epitope
KDDSKEISEL

SEQ ID NO: 20082 - protein, 10 aa, Artificial Sequence
  Description of Artificial Sequence: Synthetic epitope
KDDVSISVEE

SEQ ID NO: 20083 - protein, 10 aa, Artificial Sequence
  Description of Artificial Sequence: Synthetic epitope
KDDYKHRMFW

SEQ ID NO: 20084 - protein, 10 aa, Artificial Sequence
  Description of Artificial Sequence: Synthetic epitope
KDDYMISKDN

SEQ ID NO: 20085 - protein, 10 aa, Artificial Sequence
  Description of Artificial Sequence: Synthetic epitope
KDEAHQAQKD

SEQ ID NO: 20086 - protein, 10 aa, Artificial Sequence
  Description of Artificial Sequence: Synthetic epitope
KDEIAEVANE

SEQ ID NO: 20087 - protein, 10 aa, Artificial Sequence
  Description of Artificial Sequence: Synthetic epitope
KDEIKRYKQK

SEQ ID NO: 20088 - protein, 10 aa, Artificial Sequence
  Description of Artificial Sequence: Synthetic epitope
KDEISSVQKK

SEQ ID NO: 20089 - protein, 10 aa, Artificial Sequence
  Description of Artificial Sequence: Synthetic epitope
KDEKGEESQK

SEQ ID NO: 20090 - protein, 10 aa, Artificial Sequence
  Description of Artificial Sequence: Synthetic epitope
KDEKISLGKE

SEQ ID NO: 20091 - protein, 10 aa, Artificial Sequence
  Description of Artificial Sequence: Synthetic epitope
KDEKLTVTQD

SEQ ID NO: 20092 - protein, 10 aa, Artificial Sequence
  Description of Artificial Sequence: Synthetic epitope
KDEKTSVARL

SEQ ID NO: 20093 - protein, 10 aa, Artificial Sequence
  Description of Artificial Sequence: Synthetic epitope
KDELKLLIQA

SEQ ID NO: 20094 - protein, 10 aa, Artificial Sequence
  Description of Artificial Sequence: Synthetic epitope
KDELKTSSAV

SEQ ID NO: 20095 - protein, 10 aa, Artificial Sequence
  Description of Artificial Sequence: Synthetic epitope
KDEPDDRSWL

SEQ ID NO: 20096 - protein, 10 aa, Artificial Sequence
  Description of Artificial Sequence: Synthetic epitope
KDEQKNLKKE

SEQ ID NO: 20097 - protein, 10 aa, Artificial Sequence
  Description of Artificial Sequence: Synthetic epitope
KDESKESAKR

SEQ ID NO: 20098 - protein, 10 aa, Artificial Sequence
  Description of Artificial Sequence: Synthetic epitope
KDESPYTKSA

SEQ ID NO: 20099 - protein, 10 aa, Artificial Sequence
  Description of Artificial Sequence: Synthetic epitope
KDESQSLLRR

SEQ ID NO: 20100 - protein, 10 aa, Artificial Sequence
  Description of Artificial Sequence: Synthetic epitope
KDESRISKAE

SEQ ID NO: 20101 - protein, 10 aa, Artificial Sequence
  Description of Artificial Sequence: Synthetic epitope
KDETKRNAEK

SEQ ID NO: 20102 - protein, 10 aa, Artificial Sequence
  Description of Artificial Sequence: Synthetic epitope
KDFDALILDL

SEQ ID NO: 20103 - protein, 10 aa, Artificial Sequence
  Description of Artificial Sequence: Synthetic epitope
KDFELNALNA

SEQ ID NO: 20104 - protein, 10 aa, Artificial Sequence
  Description of Artificial Sequence: Synthetic epitope
KDFEVVDSDQ

SEQ ID NO: 20105 - protein, 10 aa, Artificial Sequence
  Description of Artificial Sequence: Synthetic epitope
KDFILFTKKE

SEQ ID NO: 20106 - protein, 10 aa, Artificial Sequence
  Description of Artificial Sequence: Synthetic epitope
KDFILFTKKE

SEQ ID NO: 20107 - protein, 10 aa, Artificial Sequence
  Description of Artificial Sequence: Synthetic epitope
KDFKIPMVLH

SEQ ID NO: 20108 - protein, 10 aa, Artificial Sequence
  Description of Artificial Sequence: Synthetic epitope
KDFKRANMDN

SEQ ID NO: 20109 - protein, 10 aa, Artificial Sequence
  Description of Artificial Sequence: Synthetic epitope
KDFQTQSLTG

SEQ ID NO: 20110 - protein, 10 aa, Artificial Sequence
  Description of Artificial Sequence: Synthetic epitope
KDFSESEFPS

SEQ ID NO: 20111 - protein, 10 aa, Artificial Sequence
  Description of Artificial Sequence: Synthetic epitope
KDFSSKLRIN

SEQ ID NO: 20112 - protein, 10 aa, Artificial Sequence
  Description of Artificial Sequence: Synthetic epitope
KDFTDSQAAK

SEQ ID NO: 20113 - protein, 10 aa, Artificial Sequence
  Description of Artificial Sequence: Synthetic epitope
KDFTRTKWVK

SEQ ID NO: 20114 - protein, 10 aa, Artificial Sequence
  Description of Artificial Sequence: Synthetic epitope
KDFVAANSLS

SEQ ID NO: 20115 - protein, 10 aa, Artificial Sequence
  Description of Artificial Sequence: Synthetic epitope
KDFVASIDAT

SEQ ID NO: 20116 - protein, 10 aa, Artificial Sequence
  Description of Artificial Sequence: Synthetic epitope
KDGEAKIKSD

SEQ ID NO: 20117 - protein, 10 aa, Artificial Sequence
  Description of Artificial Sequence: Synthetic epitope
KDGEERQKNK

SEQ ID NO: 20118 - protein, 10 aa, Artificial Sequence
  Description of Artificial Sequence: Synthetic epitope
KDGFQDSKSS

SEQ ID NO: 20119 - protein, 10 aa, Artificial Sequence
  Description of Artificial Sequence: Synthetic epitope
KDGISSETVT

SEQ ID NO: 20120 - protein, 10 aa, Artificial Sequence
  Description of Artificial Sequence: Synthetic epitope
KDGMDNNHNW

SEQ ID NO: 20121 - protein, 10 aa, Artificial Sequence
  Description of Artificial Sequence: Synthetic epitope
KDGMVSFHDN

SEQ ID NO: 20122 - protein, 10 aa, Artificial Sequence
  Description of Artificial Sequence: Synthetic epitope
KDGQNHMNVV

SEQ ID NO: 20123 - protein, 10 aa, Artificial Sequence
  Description of Artificial Sequence: Synthetic epitope
KDGSATSGED

SEQ ID NO: 20124 - protein, 10 aa, Artificial Sequence
  Description of Artificial Sequence: Synthetic epitope
KDGSSVNTAK

SEQ ID NO: 20125 - protein, 10 aa, Artificial Sequence
  Description of Artificial Sequence: Synthetic epitope
KDGVLNQPNS

SEQ ID NO: 20126 - protein, 10 aa, Artificial Sequence
  Description of Artificial Sequence: Synthetic epitope
KDHAKMGIKE

SEQ ID NO: 20127 - protein, 10 aa, Artificial Sequence
  Description of Artificial Sequence: Synthetic epitope
KDHSKAAGSS

SEQ ID NO: 20128 - protein, 10 aa, Artificial Sequence
  Description of Artificial Sequence: Synthetic epitope
KDHVDIVAFD

SEQ ID NO: 20129 - protein, 10 aa, Artificial Sequence
  Description of Artificial Sequence: Synthetic epitope
KDIAKASDEV

SEQ ID NO: 20130 - protein, 10 aa, Artificial Sequence
  Description of Artificial Sequence: Synthetic epitope
KDIANEEHKK

SEQ ID NO: 20131 - protein, 10 aa, Artificial Sequence
  Description of Artificial Sequence: Synthetic epitope
KDIAWWYYQY

SEQ ID NO: 20132 - protein, 10 aa, Artificial Sequence
  Description of Artificial Sequence: Synthetic epitope
KDIDGYGGIA

SEQ ID NO: 20133 - protein, 10 aa, Artificial Sequence
  Description of Artificial Sequence: Synthetic epitope
KDIEAMDPSI

SEQ ID NO: 20134 - protein, 10 aa, Artificial Sequence
  Description of Artificial Sequence: Synthetic epitope
KDIEQFSTYD

SEQ ID NO: 20135 - protein, 10 aa, Artificial Sequence
  Description of Artificial Sequence: Synthetic epitope
KDIIHVVKDQ

SEQ ID NO: 20136 - protein, 10 aa, Artificial Sequence
  Description of Artificial Sequence: Synthetic epitope
KDIITQEMTT

SEQ ID NO: 20137 - protein, 10 aa, Artificial Sequence
  Description of Artificial Sequence: Synthetic epitope
KDIKAAMLAE

SEQ ID NO: 20138 - protein, 10 aa, Artificial Sequence
  Description of Artificial Sequence: Synthetic epitope
KDIKLSTQFL

SEQ ID NO: 20139 - protein, 10 aa, Artificial Sequence
  Description of Artificial Sequence: Synthetic epitope
KDILISQTEE

SEQ ID NO: 20140 - protein, 10 aa, Artificial Sequence
  Description of Artificial Sequence: Synthetic epitope
KDINRVGKVW

SEQ ID NO: 20141 - protein, 10 aa, Artificial Sequence
  Description of Artificial Sequence: Synthetic epitope
KDISSKLPKL

SEQ ID NO: 20142 - protein, 10 aa, Artificial Sequence
  Description of Artificial Sequence: Synthetic epitope
KDISSLEFAE

SEQ ID NO: 20143 - protein, 10 aa, Artificial Sequence
  Description of Artificial Sequence: Synthetic epitope
KDIVVTMKSD

SEQ ID NO: 20144 - protein, 10 aa, Artificial Sequence
  Description of Artificial Sequence: Synthetic epitope
KDIWLGAQRP

SEQ ID NO: 20145 - protein, 10 aa, Artificial Sequence
  Description of Artificial Sequence: Synthetic epitope
KDIYVDLDMK

SEQ ID NO: 20146 - protein, 10 aa, Artificial Sequence
  Description of Artificial Sequence: Synthetic epitope
KDKAAQQLQQ

SEQ ID NO: 20147 - protein, 10 aa, Artificial Sequence
  Description of Artificial Sequence: Synthetic epitope
KDKAFQTMAT

SEQ ID NO: 20148 - protein, 10 aa, Artificial Sequence
  Description of Artificial Sequence: Synthetic epitope
KDKAKQIAQK

SEQ ID NO: 20149 - protein, 10 aa, Artificial Sequence
  Description of Artificial Sequence: Synthetic epitope
KDKDKVKSNA

SEQ ID NO: 20150 - protein, 10 aa, Artificial Sequence
  Description of Artificial Sequence: Synthetic epitope
KDKEKVSKEE

SEQ ID NO: 20151 - protein, 10 aa, Artificial Sequence
  Description of Artificial Sequence: Synthetic epitope
KDKETTENEN

SEQ ID NO: 20152 - protein, 10 aa, Artificial Sequence
  Description of Artificial Sequence: Synthetic epitope
KDKFKAERIM

SEQ ID NO: 20153 - protein, 10 aa, Artificial Sequence
  Description of Artificial Sequence: Synthetic epitope
KDKFMLQAKV

SEQ ID NO: 20154 - protein, 10 aa, Artificial Sequence
  Description of Artificial Sequence: Synthetic epitope
KDKIPIRKYA

SEQ ID NO: 20155 - protein, 10 aa, Artificial Sequence
  Description of Artificial Sequence: Synthetic epitope
KDKKDSKTDN

SEQ ID NO: 20156 - protein, 10 aa, Artificial Sequence
  Description of Artificial Sequence: Synthetic epitope
KDKKESTDES

SEQ ID NO: 20157 - protein, 10 aa, Artificial Sequence
  Description of Artificial Sequence: Synthetic epitope
KDKKIGALEK

SEQ ID NO: 20158 - protein, 10 aa, Artificial Sequence
  Description of Artificial Sequence: Synthetic epitope
KDKKLSDMHQ

SEQ ID NO: 20159 - protein, 10 aa, Artificial Sequence
  Description of Artificial Sequence: Synthetic epitope
KDKKRADSVA

SEQ ID NO: 20160 - protein, 10 aa, Artificial Sequence
  Description of Artificial Sequence: Synthetic epitope
KDKLARESQE

SEQ ID NO: 20161 - protein, 10 aa, Artificial Sequence
  Description of Artificial Sequence: Synthetic epitope
KDKLSKVSDS

SEQ ID NO: 20162 - protein, 10 aa, Artificial Sequence
  Description of Artificial Sequence: Synthetic epitope
KDKLTEAEDK

SEQ ID NO: 20163 - protein, 10 aa, Artificial Sequence
  Description of Artificial Sequence: Synthetic epitope
KDKLVEKTGK

SEQ ID NO: 20164 - protein, 10 aa, Artificial Sequence
  Description of Artificial Sequence: Synthetic epitope
KDKMDAAIQD

SEQ ID NO: 20165 - protein, 10 aa, Artificial Sequence
  Description of Artificial Sequence: Synthetic epitope
KDKMGKGVDG

SEQ ID NO: 20166 - protein, 10 aa, Artificial Sequence
  Description of Artificial Sequence: Synthetic epitope
KDKNEILKRN

SEQ ID NO: 20167 - protein, 10 aa, Artificial Sequence
  Description of Artificial Sequence: Synthetic epitope
KDKNLAKYSA

SEQ ID NO: 20168 - protein, 10 aa, Artificial Sequence
  Description of Artificial Sequence: Synthetic epitope
KDKNPFNMEV

SEQ ID NO: 20169 - protein, 10 aa, Artificial Sequence
  Description of Artificial Sequence: Synthetic epitope
KDKNSKSGDS

SEQ ID NO: 20170 - protein, 10 aa, Artificial Sequence
  Description of Artificial Sequence: Synthetic epitope
KDKPEAMPLQ

SEQ ID NO: 20171 - protein, 10 aa, Artificial Sequence
  Description of Artificial Sequence: Synthetic epitope
KDKPLSSIKA

SEQ ID NO: 20172 - protein, 10 aa, Artificial Sequence
  Description of Artificial Sequence: Synthetic epitope
KDKRAKAEAA

SEQ ID NO: 20173 - protein, 10 aa, Artificial Sequence
  Description of Artificial Sequence: Synthetic epitope
KDKSERIKGL

SEQ ID NO: 20174 - protein, 10 aa, Artificial Sequence
  Description of Artificial Sequence: Synthetic epitope
KDKSGAIIEK

SEQ ID NO: 20175 - protein, 10 aa, Artificial Sequence
  Description of Artificial Sequence: Synthetic epitope
KDKSQEEDSS

SEQ ID NO: 20176 - protein, 10 aa, Artificial Sequence
  Description of Artificial Sequence: Synthetic epitope
KDKSRVDLDG

SEQ ID NO: 20177 - protein, 10 aa, Artificial Sequence
  Description of Artificial Sequence: Synthetic epitope
KDKSVAFKIF

SEQ ID NO: 20178 - protein, 10 aa, Artificial Sequence
  Description of Artificial Sequence: Synthetic epitope
KDKTMKHVMK

SEQ ID NO: 20179 - protein, 10 aa, Artificial Sequence
  Description of Artificial Sequence: Synthetic epitope
KDKTQLQDVP

SEQ ID NO: 20180 - protein, 10 aa, Artificial Sequence
  Description of Artificial Sequence: Synthetic epitope
KDKVMASPLQ

SEQ ID NO: 20181 - protein, 10 aa, Artificial Sequence
  Description of Artificial Sequence: Synthetic epitope
KDKYRNQESK

SEQ ID NO: 20182 - protein, 10 aa, Artificial Sequence
  Description of Artificial Sequence: Synthetic epitope
KDLAAQVKDV

SEQ ID NO: 20183 - protein, 10 aa, Artificial Sequence
  Description of Artificial Sequence: Synthetic epitope
KDLANIAEVE

SEQ ID NO: 20184 - protein, 10 aa, Artificial Sequence
  Description of Artificial Sequence: Synthetic epitope
KDLASKAATK

SEQ ID NO: 20185 - protein, 10 aa, Artificial Sequence
  Description of Artificial Sequence: Synthetic epitope
KDLASLSRDV

SEQ ID NO: 20186 - protein, 10 aa, Artificial Sequence
  Description of Artificial Sequence: Synthetic epitope
KDLASVSLKN

SEQ ID NO: 20187 - protein, 10 aa, Artificial Sequence
  Description of Artificial Sequence: Synthetic epitope
KDLDTIDDTS

SEQ ID NO: 20188 - protein, 10 aa, Artificial Sequence
  Description of Artificial Sequence: Synthetic epitope
KDLEATKSKT

SEQ ID NO: 20189 - protein, 10 aa, Artificial Sequence
  Description of Artificial Sequence: Synthetic epitope
KDLETSLEKG

SEQ ID NO: 20190 - protein, 10 aa, Artificial Sequence
  Description of Artificial Sequence: Synthetic epitope
KDLIVVDLTQ

SEQ ID NO: 20191 - protein, 10 aa, Artificial Sequence
  Description of Artificial Sequence: Synthetic epitope
KDLKDKIVEK

SEQ ID NO: 20192 - protein, 10 aa, Artificial Sequence
  Description of Artificial Sequence: Synthetic epitope
KDLKDSSIEM

SEQ ID NO: 20193 - protein, 10 aa, Artificial Sequence
  Description of Artificial Sequence: Synthetic epitope
KDLKKLQVID

SEQ ID NO: 20194 - protein, 10 aa, Artificial Sequence
  Description of Artificial Sequence: Synthetic epitope
KDLKRITDSD

SEQ ID NO: 20195 - protein, 10 aa, Artificial Sequence
  Description of Artificial Sequence: Synthetic epitope
KDLLAANKAS

SEQ ID NO: 20196 - protein, 10 aa, Artificial Sequence
  Description of Artificial Sequence: Synthetic epitope
KDLLFKAQQL

SEQ ID NO: 20197 - protein, 10 aa, Artificial Sequence
  Description of Artificial Sequence: Synthetic epitope
KDLLQSLSEK

SEQ ID NO: 20198 - protein, 10 aa, Artificial Sequence
  Description of Artificial Sequence: Synthetic epitope
KDLMDKTQKV

SEQ ID NO: 20199 - protein, 10 aa, Artificial Sequence
  Description of Artificial Sequence: Synthetic epitope
KDLMSKLTEG

SEQ ID NO: 20200 - protein, 10 aa, Artificial Sequence
  Description of Artificial Sequence: Synthetic epitope
KDLNVKELKL

SEQ ID NO: 20201 - protein, 10 aa, Artificial Sequence
  Description of Artificial Sequence: Synthetic epitope
KDLQAETSNS

SEQ ID NO: 20202 - protein, 10 aa, Artificial Sequence
  Description of Artificial Sequence: Synthetic epitope
KDLQSKQEEK

SEQ ID NO: 20203 - protein, 10 aa, Artificial Sequence
  Description of Artificial Sequence: Synthetic epitope
KDLRRSARKR

SEQ ID NO: 20204 - protein, 10 aa, Artificial Sequence
  Description of Artificial Sequence: Synthetic epitope
KDLSRKKDMN

SEQ ID NO: 20205 - protein, 10 aa, Artificial Sequence
  Description of Artificial Sequence: Synthetic epitope
KDLSSRSKTD

SEQ ID NO: 20206 - protein, 10 aa, Artificial Sequence
  Description of Artificial Sequence: Synthetic epitope
KDLTRTERQL

SEQ ID NO: 20207 - protein, 10 aa, Artificial Sequence
  Description of Artificial Sequence: Synthetic epitope
KDLVASLKPG

SEQ ID NO: 20208 - protein, 10 aa, Artificial Sequence
  Description of Artificial Sequence: Synthetic epitope
KDLYLASVFH

SEQ ID NO: 20209 - protein, 10 aa, Artificial Sequence
  Description of Artificial Sequence: Synthetic epitope
KDMEPQLAEM

SEQ ID NO: 20210 - protein, 10 aa, Artificial Sequence
  Description of Artificial Sequence: Synthetic epitope
KDMKLALRNV

SEQ ID NO: 20211 - protein, 10 aa, Artificial Sequence
  Description of Artificial Sequence: Synthetic epitope
KDMLMEGTEE

SEQ ID NO: 20212 - protein, 10 aa, Artificial Sequence
  Description of Artificial Sequence: Synthetic epitope
KDMLYSAQDQ

SEQ ID NO: 20213 - protein, 10 aa, Artificial Sequence
  Description of Artificial Sequence: Synthetic epitope
KDMNKVKLRA

SEQ ID NO: 20214 - protein, 10 aa, Artificial Sequence
  Description of Artificial Sequence: Synthetic epitope
KDMQEQGQFE

SEQ ID NO: 20215 - protein, 10 aa, Artificial Sequence
  Description of Artificial Sequence: Synthetic epitope
KDMVAAMEQE

SEQ ID NO: 20216 - protein, 10 aa, Artificial Sequence
  Description of Artificial Sequence: Synthetic epitope
KDMVEESEAG

SEQ ID NO: 20217 - protein, 10 aa, Artificial Sequence
  Description of Artificial Sequence: Synthetic epitope
KDNAALARET

SEQ ID NO: 20218 - protein, 10 aa, Artificial Sequence
  Description of Artificial Sequence: Synthetic epitope
KDNAALARET

SEQ ID NO: 20219 - protein, 10 aa, Artificial Sequence
  Description of Artificial Sequence: Synthetic epitope
KDNALLTRRD

SEQ ID NO: 20220 - protein, 10 aa, Artificial Sequence
  Description of Artificial Sequence: Synthetic epitope
KDNHEASTKK

SEQ ID NO: 20221 - protein, 10 aa, Artificial Sequence
  Description of Artificial Sequence: Synthetic epitope
KDNIKAGQQG

SEQ ID NO: 20222 - protein, 10 aa, Artificial Sequence
  Description of Artificial Sequence: Synthetic epitope
KDNIKLLAAK

SEQ ID NO: 20223 - protein, 10 aa, Artificial Sequence
  Description of Artificial Sequence: Synthetic epitope
KDNPEHTMSH

SEQ ID NO: 20224 - protein, 10 aa, Artificial Sequence
  Description of Artificial Sequence: Synthetic epitope
KDNQQKLSAN

SEQ ID NO: 20225 - protein, 10 aa, Artificial Sequence
  Description of Artificial Sequence: Synthetic epitope
KDNRVMQLTR

SEQ ID NO: 20226 - protein, 10 aa, Artificial Sequence
  Description of Artificial Sequence: Synthetic epitope
KDNTLALESN

SEQ ID NO: 20227 - protein, 10 aa, Artificial Sequence
  Description of Artificial Sequence: Synthetic epitope
KDPEASKASP

SEQ ID NO: 20228 - protein, 10 aa, Artificial Sequence
  Description of Artificial Sequence: Synthetic epitope
KDPKLYKKTL

SEQ ID NO: 20229 - protein, 10 aa, Artificial Sequence
  Description of Artificial Sequence: Synthetic epitope
KDPLKQRESE

SEQ ID NO: 20230 - protein, 10 aa, Artificial Sequence
  Description of Artificial Sequence: Synthetic epitope
KDPMKSKKQP

SEQ ID NO: 20231 - protein, 10 aa, Artificial Sequence
  Description of Artificial Sequence: Synthetic epitope
KDPNKASAST

SEQ ID NO: 20232 - protein, 10 aa, Artificial Sequence
  Description of Artificial Sequence: Synthetic epitope
KDPSQNINWV

SEQ ID NO: 20233 - protein, 10 aa, Artificial Sequence
  Description of Artificial Sequence: Synthetic epitope
KDQASEIQVT

SEQ ID NO: 20234 - protein, 10 aa, Artificial Sequence
  Description of Artificial Sequence: Synthetic epitope
KDQEALFRHQ

SEQ ID NO: 20235 - protein, 10 aa, Artificial Sequence
  Description of Artificial Sequence: Synthetic epitope
KDQILTSRIN

SEQ ID NO: 20236 - protein, 10 aa, Artificial Sequence
  Description of Artificial Sequence: Synthetic epitope
KDQKASRNES

SEQ ID NO: 20237 - protein, 10 aa, Artificial Sequence
  Description of Artificial Sequence: Synthetic epitope
KDQKSYETAD

SEQ ID NO: 20238 - protein, 10 aa, Artificial Sequence
  Description of Artificial Sequence: Synthetic epitope
KDQLEGVQQA

SEQ ID NO: 20239 - protein, 10 aa, Artificial Sequence
  Description of Artificial Sequence: Synthetic epitope
KDQLSKQQNE

SEQ ID NO: 20240 - protein, 10 aa, Artificial Sequence
  Description of Artificial Sequence: Synthetic epitope
KDQLSSKEQP

SEQ ID NO: 20241 - protein, 10 aa, Artificial Sequence
  Description of Artificial Sequence: Synthetic epitope
KDQLTDLSNS

SEQ ID NO: 20242 - protein, 10 aa, Artificial Sequence
  Description of Artificial Sequence: Synthetic epitope
KDQMSPEPIR

SEQ ID NO: 20243 - protein, 10 aa, Artificial Sequence
  Description of Artificial Sequence: Synthetic epitope
KDQQPQMELP

SEQ ID NO: 20244 - protein, 10 aa, Artificial Sequence
  Description of Artificial Sequence: Synthetic epitope
KDQTDKMKQE

SEQ ID NO: 20245 - protein, 10 aa, Artificial Sequence
  Description of Artificial Sequence: Synthetic epitope
KDQTSKVAFK

SEQ ID NO: 20246 - protein, 10 aa, Artificial Sequence
  Description of Artificial Sequence: Synthetic epitope
KDQVSNKQAQ

SEQ ID NO: 20247 - protein, 10 aa, Artificial Sequence
  Description of Artificial Sequence: Synthetic epitope
KDRAANKDQE

SEQ ID NO: 20248 - protein, 10 aa, Artificial Sequence
  Description of Artificial Sequence: Synthetic epitope
KDREQRGQEN

SEQ ID NO: 20249 - protein, 10 aa, Artificial Sequence
  Description of Artificial Sequence: Synthetic epitope
KDRKHIDVTN

SEQ ID NO: 20250 - protein, 10 aa, Artificial Sequence
  Description of Artificial Sequence: Synthetic epitope
KDRMIFAATF

SEQ ID NO: 20251 - protein, 10 aa, Artificial Sequence
  Description of Artificial Sequence: Synthetic epitope
KDRMNVEKAE

SEQ ID NO: 20252 - protein, 10 aa, Artificial Sequence
  Description of Artificial Sequence: Synthetic epitope
KDRPIRGKEY

SEQ ID NO: 20253 - protein, 10 aa, Artificial Sequence
  Description of Artificial Sequence: Synthetic epitope
KDRSHLRKDD

SEQ ID NO: 20254 - protein, 10 aa, Artificial Sequence
  Description of Artificial Sequence: Synthetic epitope
KDRVYQVTEQ

SEQ ID NO: 20255 - protein, 10 aa, Artificial Sequence
  Description of Artificial Sequence: Synthetic epitope
KDSAFVPLLS

SEQ ID NO: 20256 - protein, 10 aa, Artificial Sequence
  Description of Artificial Sequence: Synthetic epitope
KDSAKQPQMV

SEQ ID NO: 20257 - protein, 10 aa, Artificial Sequence
  Description of Artificial Sequence: Synthetic epitope
KDSATKQKLM

SEQ ID NO: 20258 - protein, 10 aa, Artificial Sequence
  Description of Artificial Sequence: Synthetic epitope
KDSEAEVEVE

SEQ ID NO: 20259 - protein, 10 aa, Artificial Sequence
  Description of Artificial Sequence: Synthetic epitope
KDSELASQNK

SEQ ID NO: 20260 - protein, 10 aa, Artificial Sequence
  Description of Artificial Sequence: Synthetic epitope
KDSESKRGNT

SEQ ID NO: 20261 - protein, 10 aa, Artificial Sequence
  Description of Artificial Sequence: Synthetic epitope
KDSEVGTKKE

SEQ ID NO: 20262 - protein, 10 aa, Artificial Sequence
  Description of Artificial Sequence: Synthetic epitope
KDSFSSALDE

SEQ ID NO: 20263 - protein, 10 aa, Artificial Sequence
  Description of Artificial Sequence: Synthetic epitope
KDSGVDSQGA

SEQ ID NO: 20264 - protein, 10 aa, Artificial Sequence
  Description of Artificial Sequence: Synthetic epitope
KDSIDIDISS

SEQ ID NO: 20265 - protein, 10 aa, Artificial Sequence
  Description of Artificial Sequence: Synthetic epitope
KDSISSYEAQ

SEQ ID NO: 20266 - protein, 10 aa, Artificial Sequence
  Description of Artificial Sequence: Synthetic epitope
KDSITSLKEK

SEQ ID NO: 20267 - protein, 10 aa, Artificial Sequence
  Description of Artificial Sequence: Synthetic epitope
KDSKARTKSG

SEQ ID NO: 20268 - protein, 10 aa, Artificial Sequence
  Description of Artificial Sequence: Synthetic epitope
KDSKKGKDSA

SEQ ID NO: 20269 - protein, 10 aa, Artificial Sequence
  Description of Artificial Sequence: Synthetic epitope
KDSKKSKANL

SEQ ID NO: 20270 - protein, 10 aa, Artificial Sequence
  Description of Artificial Sequence: Synthetic epitope
KDSKMKSKEA

SEQ ID NO: 20271 - protein, 10 aa, Artificial Sequence
  Description of Artificial Sequence: Synthetic epitope
KDSKVEQQDN

SEQ ID NO: 20272 - protein, 10 aa, Artificial Sequence
  Description of Artificial Sequence: Synthetic epitope
KDSLASNIVN

SEQ ID NO: 20273 - protein, 10 aa, Artificial Sequence
  Description of Artificial Sequence: Synthetic epitope
KDSLASQLHV

SEQ ID NO: 20274 - protein, 10 aa, Artificial Sequence
  Description of Artificial Sequence: Synthetic epitope
KDSLESDSST

SEQ ID NO: 20275 - protein, 10 aa, Artificial Sequence
  Description of Artificial Sequence: Synthetic epitope
KDSLSMAARV

SEQ ID NO: 20276 - protein, 10 aa, Artificial Sequence
  Description of Artificial Sequence: Synthetic epitope
KDSLSTSATQ

SEQ ID NO: 20277 - protein, 10 aa, Artificial Sequence
  Description of Artificial Sequence: Synthetic epitope
KDSLVKEANE

SEQ ID NO: 20278 - protein, 10 aa, Artificial Sequence
  Description of Artificial Sequence: Synthetic epitope
KDSLVSSLQF

SEQ ID NO: 20279 - protein, 10 aa, Artificial Sequence
  Description of Artificial Sequence: Synthetic epitope
KDSMKLIVPV

SEQ ID NO: 20280 - protein, 10 aa, Artificial Sequence
  Description of Artificial Sequence: Synthetic epitope
KDSPKSSKSI

SEQ ID NO: 20281 - protein, 10 aa, Artificial Sequence
  Description of Artificial Sequence: Synthetic epitope
KDSQFQIIKQ

SEQ ID NO: 20282 - protein, 10 aa, Artificial Sequence
  Description of Artificial Sequence: Synthetic epitope
KDSQGQAVWQ

SEQ ID NO: 20283 - protein, 10 aa, Artificial Sequence
  Description of Artificial Sequence: Synthetic epitope
KDSQWEQQAE

SEQ ID NO: 20284 - protein, 10 aa, Artificial Sequence
  Description of Artificial Sequence: Synthetic epitope
KDSRTAFSDK

SEQ ID NO: 20285 - protein, 10 aa, Artificial Sequence
  Description of Artificial Sequence: Synthetic epitope
KDSSDVSQTL

SEQ ID NO: 20286 - protein, 10 aa, Artificial Sequence
  Description of Artificial Sequence: Synthetic epitope
KDSSEASDSA

SEQ ID NO: 20287 - protein, 10 aa, Artificial Sequence
  Description of Artificial Sequence: Synthetic epitope
KDSSQVEEGD

SEQ ID NO: 20288 - protein, 10 aa, Artificial Sequence
  Description of Artificial Sequence: Synthetic epitope
KDSTRGVAKM

SEQ ID NO: 20289 - protein, 10 aa, Artificial Sequence
  Description of Artificial Sequence: Synthetic epitope
KDSVAQGTTN

SEQ ID NO: 20290 - protein, 10 aa, Artificial Sequence
  Description of Artificial Sequence: Synthetic epitope
KDSVGHKETK

SEQ ID NO: 20291 - protein, 10 aa, Artificial Sequence
  Description of Artificial Sequence: Synthetic epitope
KDSVNISQKQ

SEQ ID NO: 20292 - protein, 10 aa, Artificial Sequence
  Description of Artificial Sequence: Synthetic epitope
KDSVSASEVT

SEQ ID NO: 20293 - protein, 10 aa, Artificial Sequence
  Description of Artificial Sequence: Synthetic epitope
KDSYTALTSI

SEQ ID NO: 20294 - protein, 10 aa, Artificial Sequence
  Description of Artificial Sequence: Synthetic epitope
KDTEHEESSN

SEQ ID NO: 20295 - protein, 10 aa, Artificial Sequence
  Description of Artificial Sequence: Synthetic epitope
KDTEKGIKEL

SEQ ID NO: 20296 - protein, 10 aa, Artificial Sequence
  Description of Artificial Sequence: Synthetic epitope
KDTELGIADA

SEQ ID NO: 20297 - protein, 10 aa, Artificial Sequence
  Description of Artificial Sequence: Synthetic epitope
KDTEQKELDQ

SEQ ID NO: 20298 - protein, 10 aa, Artificial Sequence
  Description of Artificial Sequence: Synthetic epitope
KDTKIQLQVP

SEQ ID NO: 20299 - protein, 10 aa, Artificial Sequence
  Description of Artificial Sequence: Synthetic epitope
KDTLTNINNQ

SEQ ID NO: 20300 - protein, 10 aa, Artificial Sequence
  Description of Artificial Sequence: Synthetic epitope
KDTQGKSTPA

SEQ ID NO: 20301 - protein, 10 aa, Artificial Sequence
  Description of Artificial Sequence: Synthetic epitope
KDTSKAARVP

SEQ ID NO: 20302 - protein, 10 aa, Artificial Sequence
  Description of Artificial Sequence: Synthetic epitope
KDTSLETRRQ

SEQ ID NO: 20303 - protein, 10 aa, Artificial Sequence
  Description of Artificial Sequence: Synthetic epitope
KDTVSISESQ

SEQ ID NO: 20304 - protein, 10 aa, Artificial Sequence
  Description of Artificial Sequence: Synthetic epitope
KDVASSEPFS

SEQ ID NO: 20305 - protein, 10 aa, Artificial Sequence
  Description of Artificial Sequence: Synthetic epitope
KDVATASPKT

SEQ ID NO: 20306 - protein, 10 aa, Artificial Sequence
  Description of Artificial Sequence: Synthetic epitope
KDVFKQSQSR

SEQ ID NO: 20307 - protein, 10 aa, Artificial Sequence
  Description of Artificial Sequence: Synthetic epitope
KDVFQSSLDG

SEQ ID NO: 20308 - protein, 10 aa, Artificial Sequence
  Description of Artificial Sequence: Synthetic epitope
KDVKTAVHMK

SEQ ID NO: 20309 - protein, 10 aa, Artificial Sequence
  Description of Artificial Sequence: Synthetic epitope
KDVKVQVMGK

SEQ ID NO: 20310 - protein, 10 aa, Artificial Sequence
  Description of Artificial Sequence: Synthetic epitope
KDVLGMAQDE

SEQ ID NO: 20311 - protein, 10 aa, Artificial Sequence
  Description of Artificial Sequence: Synthetic epitope
KDVLQAETSQ

SEQ ID NO: 20312 - protein, 10 aa, Artificial Sequence
  Description of Artificial Sequence: Synthetic epitope
KDVQSKNDLI

SEQ ID NO: 20313 - protein, 10 aa, Artificial Sequence
  Description of Artificial Sequence: Synthetic epitope
KDVRSRSYLE

SEQ ID NO: 20314 - protein, 10 aa, Artificial Sequence
  Description of Artificial Sequence: Synthetic epitope
KDVRTGSHED

SEQ ID NO: 20315 - protein, 10 aa, Artificial Sequence
  Description of Artificial Sequence: Synthetic epitope
KDVSRSSKSG

SEQ ID NO: 20316 - protein, 10 aa, Artificial Sequence
  Description of Artificial Sequence: Synthetic epitope
KDVSVTVGMD

SEQ ID NO: 20317 - protein, 10 aa, Artificial Sequence
  Description of Artificial Sequence: Synthetic epitope
KDVTVEKAES

SEQ ID NO: 20318 - protein, 10 aa, Artificial Sequence
  Description of Artificial Sequence: Synthetic epitope
KDVVMANSKK

SEQ ID NO: 20319 - protein, 10 aa, Artificial Sequence
  Description of Artificial Sequence: Synthetic epitope
KDVYTEKRLE

SEQ ID NO: 20320 - protein, 10 aa, Artificial Sequence
  Description of Artificial Sequence: Synthetic epitope
KDWASNASSG

SEQ ID NO: 20321 - protein, 10 aa, Artificial Sequence
  Description of Artificial Sequence: Synthetic epitope
KDWEESKDDQ

SEQ ID NO: 20322 - protein, 10 aa, Artificial Sequence
  Description of Artificial Sequence: Synthetic epitope
KDWKLTDDTQ

SEQ ID NO: 20323 - protein, 10 aa, Artificial Sequence
  Description of Artificial Sequence: Synthetic epitope
KDWLGGSEVN

SEQ ID NO: 20324 - protein, 10 aa, Artificial Sequence
  Description of Artificial Sequence: Synthetic epitope
KDWLSPKRHS

SEQ ID NO: 20325 - protein, 10 aa, Artificial Sequence
  Description of Artificial Sequence: Synthetic epitope
KDWSPQEGME

SEQ ID NO: 20326 - protein, 10 aa, Artificial Sequence
  Description of Artificial Sequence: Synthetic epitope
KDYADSIHAI

SEQ ID NO: 20327 - protein, 10 aa, Artificial Sequence
  Description of Artificial Sequence: Synthetic epitope
KDYENKNSKM

SEQ ID NO: 20328 - protein, 10 aa, Artificial Sequence
  Description of Artificial Sequence: Synthetic epitope
KDYLDALAGI

SEQ ID NO: 20329 - protein, 10 aa, Artificial Sequence
  Description of Artificial Sequence: Synthetic epitope
KDYRQMIIEP

SEQ ID NO: 20330 - protein, 10 aa, Artificial Sequence
  Description of Artificial Sequence: Synthetic epitope
KEAAEKEQEL

SEQ ID NO: 20331 - protein, 10 aa, Artificial Sequence
  Description of Artificial Sequence: Synthetic epitope
KEAAEKEQEL

SEQ ID NO: 20332 - protein, 10 aa, Artificial Sequence
  Description of Artificial Sequence: Synthetic epitope
KEAAEKGTSK

SEQ ID NO: 20333 - protein, 10 aa, Artificial Sequence
  Description of Artificial Sequence: Synthetic epitope
KEAAGDASDQ

SEQ ID NO: 20334 - protein, 10 aa, Artificial Sequence
  Description of Artificial Sequence: Synthetic epitope
KEAALEPSME

SEQ ID NO: 20335 - protein, 10 aa, Artificial Sequence
  Description of Artificial Sequence: Synthetic epitope
KEAANELQSI

SEQ ID NO: 20336 - protein, 10 aa, Artificial Sequence
  Description of Artificial Sequence: Synthetic epitope
KEAAQLVPND

SEQ ID NO: 20337 - protein, 10 aa, Artificial Sequence
  Description of Artificial Sequence: Synthetic epitope
KEAASDMSPY

SEQ ID NO: 20338 - protein, 10 aa, Artificial Sequence
  Description of Artificial Sequence: Synthetic epitope
KEAAYGTSQV

SEQ ID NO: 20339 - protein, 10 aa, Artificial Sequence
  Description of Artificial Sequence: Synthetic epitope
KEADHKAQLA

SEQ ID NO: 20340 - protein, 10 aa, Artificial Sequence
  Description of Artificial Sequence: Synthetic epitope
KEADMQQKKE

SEQ ID NO: 20341 - protein, 10 aa, Artificial Sequence
  Description of Artificial Sequence: Synthetic epitope
KEAEDVEREA

SEQ ID NO: 20342 - protein, 10 aa, Artificial Sequence
  Description of Artificial Sequence: Synthetic epitope
KEAEEASQKE

SEQ ID NO: 20343 - protein, 10 aa, Artificial Sequence
  Description of Artificial Sequence: Synthetic epitope
KEAEKENLVE

SEQ ID NO: 20344 - protein, 10 aa, Artificial Sequence
  Description of Artificial Sequence: Synthetic epitope
KEAELDVNEE

SEQ ID NO: 20345 - protein, 10 aa, Artificial Sequence
  Description of Artificial Sequence: Synthetic epitope
KEAENLMQEE

SEQ ID NO: 20346 - protein, 10 aa, Artificial Sequence
  Description of Artificial Sequence: Synthetic epitope
KEAESDRESA

SEQ ID NO: 20347 - protein, 10 aa, Artificial Sequence
  Description of Artificial Sequence: Synthetic epitope
KEAESFMRTD

SEQ ID NO: 20348 - protein, 10 aa, Artificial Sequence
  Description of Artificial Sequence: Synthetic epitope
KEAFYTWQYR

SEQ ID NO: 20349 - protein, 10 aa, Artificial Sequence
  Description of Artificial Sequence: Synthetic epitope
KEAGAKAAES

SEQ ID NO: 20350 - protein, 10 aa, Artificial Sequence
  Description of Artificial Sequence: Synthetic epitope
KEAIIGVGKE

SEQ ID NO: 20351 - protein, 10 aa, Artificial Sequence
  Description of Artificial Sequence: Synthetic epitope
KEAIKSSLII

SEQ ID NO: 20352 - protein, 10 aa, Artificial Sequence
  Description of Artificial Sequence: Synthetic epitope
KEAIRISPTF

SEQ ID NO: 20353 - protein, 10 aa, Artificial Sequence
  Description of Artificial Sequence: Synthetic epitope
KEAKAQNEAT

SEQ ID NO: 20354 - protein, 10 aa, Artificial Sequence
  Description of Artificial Sequence: Synthetic epitope
KEAKEQTGAT

SEQ ID NO: 20355 - protein, 10 aa, Artificial Sequence
  Description of Artificial Sequence: Synthetic epitope
KEAKISRSLG

SEQ ID NO: 20356 - protein, 10 aa, Artificial Sequence
  Description of Artificial Sequence: Synthetic epitope
KEAKKPPDVV

SEQ ID NO: 20357 - protein, 10 aa, Artificial Sequence
  Description of Artificial Sequence: Synthetic epitope
KEAKVMSNEE

SEQ ID NO: 20358 - protein, 10 aa, Artificial Sequence
  Description of Artificial Sequence: Synthetic epitope
KEALAAKDFV

SEQ ID NO: 20359 - protein, 10 aa, Artificial Sequence
  Description of Artificial Sequence: Synthetic epitope
KEALEKLQLN

SEQ ID NO: 20360 - protein, 10 aa, Artificial Sequence
  Description of Artificial Sequence: Synthetic epitope
KEALIAASET

SEQ ID NO: 20361 - protein, 10 aa, Artificial Sequence
  Description of Artificial Sequence: Synthetic epitope
KEALNSKNPQ

SEQ ID NO: 20362 - protein, 10 aa, Artificial Sequence
  Description of Artificial Sequence: Synthetic epitope
KEALSSVEAF

SEQ ID NO: 20363 - protein, 10 aa, Artificial Sequence
  Description of Artificial Sequence: Synthetic epitope
KEALVQVEVS

SEQ ID NO: 20364 - protein, 10 aa, Artificial Sequence
  Description of Artificial Sequence: Synthetic epitope
KEAMKVSSQP

SEQ ID NO: 20365 - protein, 10 aa, Artificial Sequence
  Description of Artificial Sequence: Synthetic epitope
KEAMVQAEEA

SEQ ID NO: 20366 - protein, 10 aa, Artificial Sequence
  Description of Artificial Sequence: Synthetic epitope
KEANAISVEL

SEQ ID NO: 20367 - protein, 10 aa, Artificial Sequence
  Description of Artificial Sequence: Synthetic epitope
KEANAISVEL

SEQ ID NO: 20368 - protein, 10 aa, Artificial Sequence
  Description of Artificial Sequence: Synthetic epitope
KEANKKLKLE

SEQ ID NO: 20369 - protein, 10 aa, Artificial Sequence
  Description of Artificial Sequence: Synthetic epitope
KEANRALLND

SEQ ID NO: 20370 - protein, 10 aa, Artificial Sequence
  Description of Artificial Sequence: Synthetic epitope
KEAQKETIKD

SEQ ID NO: 20371 - protein, 10 aa, Artificial Sequence
  Description of Artificial Sequence: Synthetic epitope
KEAQKMQSEK

SEQ ID NO: 20372 - protein, 10 aa, Artificial Sequence
  Description of Artificial Sequence: Synthetic epitope
KEASKPMDLK

SEQ ID NO: 20373 - protein, 10 aa, Artificial Sequence
  Description of Artificial Sequence: Synthetic epitope
KEASNSQNSQ

SEQ ID NO: 20374 - protein, 10 aa, Artificial Sequence
  Description of Artificial Sequence: Synthetic epitope
KEASRRYHAK

SEQ ID NO: 20375 - protein, 10 aa, Artificial Sequence
  Description of Artificial Sequence: Synthetic epitope
KEASSRRIPR

SEQ ID NO: 20376 - protein, 10 aa, Artificial Sequence
  Description of Artificial Sequence: Synthetic epitope
KEASYSNDNQ

SEQ ID NO: 20377 - protein, 10 aa, Artificial Sequence
  Description of Artificial Sequence: Synthetic epitope
KEATEINMKN

SEQ ID NO: 20378 - protein, 10 aa, Artificial Sequence
  Description of Artificial Sequence: Synthetic epitope
KEATPAKEKH

SEQ ID NO: 20379 - protein, 10 aa, Artificial Sequence
  Description of Artificial Sequence: Synthetic epitope
KEATQKVTEQ

SEQ ID NO: 20380 - protein, 10 aa, Artificial Sequence
  Description of Artificial Sequence: Synthetic epitope
KEATSILEEN

SEQ ID NO: 20381 - protein, 10 aa, Artificial Sequence
  Description of Artificial Sequence: Synthetic epitope
KEAVASLRRG

SEQ ID NO: 20382 - protein, 10 aa, Artificial Sequence
  Description of Artificial Sequence: Synthetic epitope
KEAVSLTKDA

SEQ ID NO: 20383 - protein, 10 aa, Artificial Sequence
  Description of Artificial Sequence: Synthetic epitope
KEAVTRAVES

SEQ ID NO: 20384 - protein, 10 aa, Artificial Sequence
  Description of Artificial Sequence: Synthetic epitope
KEDATRRFQI

SEQ ID NO: 20385 - protein, 10 aa, Artificial Sequence
  Description of Artificial Sequence: Synthetic epitope
KEDAVHRQSI

SEQ ID NO: 20386 - protein, 10 aa, Artificial Sequence
  Description of Artificial Sequence: Synthetic epitope
KEDDEKVKGE

SEQ ID NO: 20387 - protein, 10 aa, Artificial Sequence
  Description of Artificial Sequence: Synthetic epitope
KEDDVGIERG

SEQ ID NO: 20388 - protein, 10 aa, Artificial Sequence
  Description of Artificial Sequence: Synthetic epitope
KEDELSESKE

SEQ ID NO: 20389 - protein, 10 aa, Artificial Sequence
  Description of Artificial Sequence: Synthetic epitope
KEDESEKSYE

SEQ ID NO: 20390 - protein, 10 aa, Artificial Sequence
  Description of Artificial Sequence: Synthetic epitope
KEDEVELSEP

SEQ ID NO: 20391 - protein, 10 aa, Artificial Sequence
  Description of Artificial Sequence: Synthetic epitope
KEDEVILYEE

SEQ ID NO: 20392 - protein, 10 aa, Artificial Sequence
  Description of Artificial Sequence: Synthetic epitope
KEDISAKESA

SEQ ID NO: 20393 - protein, 10 aa, Artificial Sequence
  Description of Artificial Sequence: Synthetic epitope
KEDKARQAEV

SEQ ID NO: 20394 - protein, 10 aa, Artificial Sequence
  Description of Artificial Sequence: Synthetic epitope
KEDKIMLDDR

SEQ ID NO: 20395 - protein, 10 aa, Artificial Sequence
  Description of Artificial Sequence: Synthetic epitope
KEDKKAEKVD

SEQ ID NO: 20396 - protein, 10 aa, Artificial Sequence
  Description of Artificial Sequence: Synthetic epitope
KEDLAKAKES

SEQ ID NO: 20397 - protein, 10 aa, Artificial Sequence
  Description of Artificial Sequence: Synthetic epitope
KEDNAVQPNS

SEQ ID NO: 20398 - protein, 10 aa, Artificial Sequence
  Description of Artificial Sequence: Synthetic epitope
KEDSAEVLKK

SEQ ID NO: 20399 - protein, 10 aa, Artificial Sequence
  Description of Artificial Sequence: Synthetic epitope
KEDSHKESND

SEQ ID NO: 20400 - protein, 10 aa, Artificial Sequence
  Description of Artificial Sequence: Synthetic epitope
KEDSKTSTSV

SEQ ID NO: 20401 - protein, 10 aa, Artificial Sequence
  Description of Artificial Sequence: Synthetic epitope
KEDSSEASSQ

SEQ ID NO: 20402 - protein, 10 aa, Artificial Sequence
  Description of Artificial Sequence: Synthetic epitope
KEDSVLMEAT

SEQ ID NO: 20403 - protein, 10 aa, Artificial Sequence
  Description of Artificial Sequence: Synthetic epitope
KEDSVSRDLE

SEQ ID NO: 20404 - protein, 10 aa, Artificial Sequence
  Description of Artificial Sequence: Synthetic epitope
KEDYSFTAYA

SEQ ID NO: 20405 - protein, 10 aa, Artificial Sequence
  Description of Artificial Sequence: Synthetic epitope
KEEAAKEEAT

SEQ ID NO: 20406 - protein, 10 aa, Artificial Sequence
  Description of Artificial Sequence: Synthetic epitope
KEEADNFNQK

SEQ ID NO: 20407 - protein, 10 aa, Artificial Sequence
  Description of Artificial Sequence: Synthetic epitope
KEEAIYQESK

SEQ ID NO: 20408 - protein, 10 aa, Artificial Sequence
  Description of Artificial Sequence: Synthetic epitope
KEEAKMVYLL

SEQ ID NO: 20409 - protein, 10 aa, Artificial Sequence
  Description of Artificial Sequence: Synthetic epitope
KEEDATLSSP

SEQ ID NO: 20410 - protein, 10 aa, Artificial Sequence
  Description of Artificial Sequence: Synthetic epitope
KEEDSEESLL

SEQ ID NO: 20411 - protein, 10 aa, Artificial Sequence
  Description of Artificial Sequence: Synthetic epitope
KEEDVTKTMY

SEQ ID NO: 20412 - protein, 10 aa, Artificial Sequence
  Description of Artificial Sequence: Synthetic epitope
KEEFGMMGDH

SEQ ID NO: 20413 - protein, 10 aa, Artificial Sequence
  Description of Artificial Sequence: Synthetic epitope
KEEFTEALRD

SEQ ID NO: 20414 - protein, 10 aa, Artificial Sequence
  Description of Artificial Sequence: Synthetic epitope
KEEFVGYGQK

SEQ ID NO: 20415 - protein, 10 aa, Artificial Sequence
  Description of Artificial Sequence: Synthetic epitope
KEEGKIREEN

SEQ ID NO: 20416 - protein, 10 aa, Artificial Sequence
  Description of Artificial Sequence: Synthetic epitope
KEEHKWGMEQ

SEQ ID NO: 20417 - protein, 10 aa, Artificial Sequence
  Description of Artificial Sequence: Synthetic epitope
KEEIANREKQ

SEQ ID NO: 20418 - protein, 10 aa, Artificial Sequence
  Description of Artificial Sequence: Synthetic epitope
KEEIIHIAEE

SEQ ID NO: 20419 - protein, 10 aa, Artificial Sequence
  Description of Artificial Sequence: Synthetic epitope
KEEIKDQPQN

SEQ ID NO: 20420 - protein, 10 aa, Artificial Sequence
  Description of Artificial Sequence: Synthetic epitope
KEEISLSTVE

SEQ ID NO: 20421 - protein, 10 aa, Artificial Sequence
  Description of Artificial Sequence: Synthetic epitope
KEEKAELNKQ

SEQ ID NO: 20422 - protein, 10 aa, Artificial Sequence
  Description of Artificial Sequence: Synthetic epitope
KEEKATVEFS

SEQ ID NO: 20423 - protein, 10 aa, Artificial Sequence
  Description of Artificial Sequence: Synthetic epitope
KEEKESEPQP

SEQ ID NO: 20424 - protein, 10 aa, Artificial Sequence
  Description of Artificial Sequence: Synthetic epitope
KEEKIVEQPT

SEQ ID NO: 20425 - protein, 10 aa, Artificial Sequence
  Description of Artificial Sequence: Synthetic epitope
KEEKLSLMQS

SEQ ID NO: 20426 - protein, 10 aa, Artificial Sequence
  Description of Artificial Sequence: Synthetic epitope
KEEKQPKKRS

SEQ ID NO: 20427 - protein, 10 aa, Artificial Sequence
  Description of Artificial Sequence: Synthetic epitope
KEEKRSKPNT

SEQ ID NO: 20428 - protein, 10 aa, Artificial Sequence
  Description of Artificial Sequence: Synthetic epitope
KEEKRSSEKS

SEQ ID NO: 20429 - protein, 10 aa, Artificial Sequence
  Description of Artificial Sequence: Synthetic epitope
KEEKSDLKEK

SEQ ID NO: 20430 - protein, 10 aa, Artificial Sequence
  Description of Artificial Sequence: Synthetic epitope
KEEKSESRQE

SEQ ID NO: 20431 - protein, 10 aa, Artificial Sequence
  Description of Artificial Sequence: Synthetic epitope
KEEKSKLSQE

SEQ ID NO: 20432 - protein, 10 aa, Artificial Sequence
  Description of Artificial Sequence: Synthetic epitope
KEEKTSQREV

SEQ ID NO: 20433 - protein, 10 aa, Artificial Sequence
  Description of Artificial Sequence: Synthetic epitope
KEEKYLKEAM

SEQ ID NO: 20434 - protein, 10 aa, Artificial Sequence
  Description of Artificial Sequence: Synthetic epitope
KEELASTAEK

SEQ ID NO: 20435 - protein, 10 aa, Artificial Sequence
  Description of Artificial Sequence: Synthetic epitope
KEELEIATSQ

SEQ ID NO: 20436 - protein, 10 aa, Artificial Sequence
  Description of Artificial Sequence: Synthetic epitope
KEELEKKDLK

SEQ ID NO: 20437 - protein, 10 aa, Artificial Sequence
  Description of Artificial Sequence: Synthetic epitope
KEELESLDSS

SEQ ID NO: 20438 - protein, 10 aa, Artificial Sequence
  Description of Artificial Sequence: Synthetic epitope
KEELLRVNRQ

SEQ ID NO: 20439 - protein, 10 aa, Artificial Sequence
  Description of Artificial Sequence: Synthetic epitope
KEELNSSVAI

SEQ ID NO: 20440 - protein, 10 aa, Artificial Sequence
  Description of Artificial Sequence: Synthetic epitope
KEELSEVETK

SEQ ID NO: 20441 - protein, 10 aa, Artificial Sequence
  Description of Artificial Sequence: Synthetic epitope
KEELSEVPKV

SEQ ID NO: 20442 - protein, 10 aa, Artificial Sequence
  Description of Artificial Sequence: Synthetic epitope
KEELVAVLEL

SEQ ID NO: 20443 - protein, 10 aa, Artificial Sequence
  Description of Artificial Sequence: Synthetic epitope
KEENKSSEET

SEQ ID NO: 20444 - protein, 10 aa, Artificial Sequence
  Description of Artificial Sequence: Synthetic epitope
KEENSLRIVP

SEQ ID NO: 20445 - protein, 10 aa, Artificial Sequence
  Description of Artificial Sequence: Synthetic epitope
KEENSTEEQA

SEQ ID NO: 20446 - protein, 10 aa, Artificial Sequence
  Description of Artificial Sequence: Synthetic epitope
KEEPKGKEKE

SEQ ID NO: 20447 - protein, 10 aa, Artificial Sequence
  Description of Artificial Sequence: Synthetic epitope
KEEPMESGKE

SEQ ID NO: 20448 - protein, 10 aa, Artificial Sequence
  Description of Artificial Sequence: Synthetic epitope
KEEPQVSQSA

SEQ ID NO: 20449 - protein, 10 aa, Artificial Sequence
  Description of Artificial Sequence: Synthetic epitope
KEEPTIEDET

SEQ ID NO: 20450 - protein, 10 aa, Artificial Sequence
  Description of Artificial Sequence: Synthetic epitope
KEEPVDVEKM

SEQ ID NO: 20451 - protein, 10 aa, Artificial Sequence
  Description of Artificial Sequence: Synthetic epitope
KEEQLSLKSN

SEQ ID NO: 20452 - protein, 10 aa, Artificial Sequence
  Description of Artificial Sequence: Synthetic epitope
KEEQLSLKSN

SEQ ID NO: 20453 - protein, 10 aa, Artificial Sequence
  Description of Artificial Sequence: Synthetic epitope
KEEQNKMQKE

SEQ ID NO: 20454 - protein, 10 aa, Artificial Sequence
  Description of Artificial Sequence: Synthetic epitope
KEEQPILRTK

SEQ ID NO: 20455 - protein, 10 aa, Artificial Sequence
  Description of Artificial Sequence: Synthetic epitope
KEERAVIKAY

SEQ ID NO: 20456 - protein, 10 aa, Artificial Sequence
  Description of Artificial Sequence: Synthetic epitope
KEERERIGAK

SEQ ID NO: 20457 - protein, 10 aa, Artificial Sequence
  Description of Artificial Sequence: Synthetic epitope
KEEREYFDEM

SEQ ID NO: 20458 - protein, 10 aa, Artificial Sequence
  Description of Artificial Sequence: Synthetic epitope
KEESAAKAEL

SEQ ID NO: 20459 - protein, 10 aa, Artificial Sequence
  Description of Artificial Sequence: Synthetic epitope
KEESKFTEKQ

SEQ ID NO: 20460 - protein, 10 aa, Artificial Sequence
  Description of Artificial Sequence: Synthetic epitope
KEESLVEGEK

SEQ ID NO: 20461 - protein, 10 aa, Artificial Sequence
  Description of Artificial Sequence: Synthetic epitope
KEESQVTTQH

SEQ ID NO: 20462 - protein, 10 aa, Artificial Sequence
  Description of Artificial Sequence: Synthetic epitope
KEESRLKLAK

SEQ ID NO: 20463 - protein, 10 aa, Artificial Sequence
  Description of Artificial Sequence: Synthetic epitope
KEESSFATQA

SEQ ID NO: 20464 - protein, 10 aa, Artificial Sequence
  Description of Artificial Sequence: Synthetic epitope
KEESSNQASL

SEQ ID NO: 20465 - protein, 10 aa, Artificial Sequence
  Description of Artificial Sequence: Synthetic epitope
KEESSVTSEE

SEQ ID NO: 20466 - protein, 10 aa, Artificial Sequence
  Description of Artificial Sequence: Synthetic epitope
KEESTTGNAN

SEQ ID NO: 20467 - protein, 10 aa, Artificial Sequence
  Description of Artificial Sequence: Synthetic epitope
KEETKEAGSL

SEQ ID NO: 20468 - protein, 10 aa, Artificial Sequence
  Description of Artificial Sequence: Synthetic epitope
KEETKKLTES

SEQ ID NO: 20469 - protein, 10 aa, Artificial Sequence
  Description of Artificial Sequence: Synthetic epitope
KEETVEDEID

SEQ ID NO: 20470 - protein, 10 aa, Artificial Sequence
  Description of Artificial Sequence: Synthetic epitope
KEEVASAKEP

SEQ ID NO: 20471 - protein, 10 aa, Artificial Sequence
  Description of Artificial Sequence: Synthetic epitope
KEEVELQTLL

SEQ ID NO: 20472 - protein, 10 aa, Artificial Sequence
  Description of Artificial Sequence: Synthetic epitope
KEEVEQKKNE

SEQ ID NO: 20473 - protein, 10 aa, Artificial Sequence
  Description of Artificial Sequence: Synthetic epitope
KEEVGLLREH

SEQ ID NO: 20474 - protein, 10 aa, Artificial Sequence
  Description of Artificial Sequence: Synthetic epitope
KEEVIKRKIP

SEQ ID NO: 20475 - protein, 10 aa, Artificial Sequence
  Description of Artificial Sequence: Synthetic epitope
KEEVKEVSIE

SEQ ID NO: 20476 - protein, 10 aa, Artificial Sequence
  Description of Artificial Sequence: Synthetic epitope
KEEVKVTAES

SEQ ID NO: 20477 - protein, 10 aa, Artificial Sequence
  Description of Artificial Sequence: Synthetic epitope
KEEVQTLQAE

SEQ ID NO: 20478 - protein, 10 aa, Artificial Sequence
  Description of Artificial Sequence: Synthetic epitope
KEEVSSARAS

SEQ ID NO: 20479 - protein, 10 aa, Artificial Sequence
  Description of Artificial Sequence: Synthetic epitope
KEEVVGLTET

SEQ ID NO: 20480 - protein, 10 aa, Artificial Sequence
  Description of Artificial Sequence: Synthetic epitope
KEEVWSFEAG

SEQ ID NO: 20481 - protein, 10 aa, Artificial Sequence
  Description of Artificial Sequence: Synthetic epitope
KEEWEQHYSQ

SEQ ID NO: 20482 - protein, 10 aa, Artificial Sequence
  Description of Artificial Sequence: Synthetic epitope
KEEWNKSDQY

SEQ ID NO: 20483 - protein, 10 aa, Artificial Sequence
  Description of Artificial Sequence: Synthetic epitope
KEFEETAEKV

SEQ ID NO: 20484 - protein, 10 aa, Artificial Sequence
  Description of Artificial Sequence: Synthetic epitope
KEFIVFLKQD

SEQ ID NO: 20485 - protein, 10 aa, Artificial Sequence
  Description of Artificial Sequence: Synthetic epitope
KEFKLSNNLN

SEQ ID NO: 20486 - protein, 10 aa, Artificial Sequence
  Description of Artificial Sequence: Synthetic epitope
KEFKLTKTAM

SEQ ID NO: 20487 - protein, 10 aa, Artificial Sequence
  Description of Artificial Sequence: Synthetic epitope
KEFRKVVEYS

SEQ ID NO: 20488 - protein, 10 aa, Artificial Sequence
  Description of Artificial Sequence: Synthetic epitope
KEFSALFPLT

SEQ ID NO: 20489 - protein, 10 aa, Artificial Sequence
  Description of Artificial Sequence: Synthetic epitope
KEFSIKLSKH

SEQ ID NO: 20490 - protein, 10 aa, Artificial Sequence
  Description of Artificial Sequence: Synthetic epitope
KEFVKVVSKK

SEQ ID NO: 20491 - protein, 10 aa, Artificial Sequence
  Description of Artificial Sequence: Synthetic epitope
KEFVSSDESS

SEQ ID NO: 20492 - protein, 10 aa, Artificial Sequence
  Description of Artificial Sequence: Synthetic epitope
KEGALLAPQD

SEQ ID NO: 20493 - protein, 10 aa, Artificial Sequence
  Description of Artificial Sequence: Synthetic epitope
KEGAMTVETH

SEQ ID NO: 20494 - protein, 10 aa, Artificial Sequence
  Description of Artificial Sequence: Synthetic epitope
KEGATQREIE

SEQ ID NO: 20495 - protein, 10 aa, Artificial Sequence
  Description of Artificial Sequence: Synthetic epitope
KEGEALEVKE

SEQ ID NO: 20496 - protein, 10 aa, Artificial Sequence
  Description of Artificial Sequence: Synthetic epitope
KEGGSLAAKQ

SEQ ID NO: 20497 - protein, 10 aa, Artificial Sequence
  Description of Artificial Sequence: Synthetic epitope
KEGGVVALFK

SEQ ID NO: 20498 - protein, 10 aa, Artificial Sequence
  Description of Artificial Sequence: Synthetic epitope
KEGIFAVDTM

SEQ ID NO: 20499 - protein, 10 aa, Artificial Sequence
  Description of Artificial Sequence: Synthetic epitope
KEGIKLTIRI

SEQ ID NO: 20500 - protein, 10 aa, Artificial Sequence
  Description of Artificial Sequence: Synthetic epitope
KEGKAAQTER

SEQ ID NO: 20501 - protein, 10 aa, Artificial Sequence
  Description of Artificial Sequence: Synthetic epitope
KEGLGVNEVH

SEQ ID NO: 20502 - protein, 10 aa, Artificial Sequence
  Description of Artificial Sequence: Synthetic epitope
KEGLSESSLQ

SEQ ID NO: 20503 - protein, 10 aa, Artificial Sequence
  Description of Artificial Sequence: Synthetic epitope
KEGLVMVEVR

SEQ ID NO: 20504 - protein, 10 aa, Artificial Sequence
  Description of Artificial Sequence: Synthetic epitope
KEGMEAAVEK

SEQ ID NO: 20505 - protein, 10 aa, Artificial Sequence
  Description of Artificial Sequence: Synthetic epitope
KEGNMSRGNS

SEQ ID NO: 20506 - protein, 10 aa, Artificial Sequence
  Description of Artificial Sequence: Synthetic epitope
KEGQMESVEA

SEQ ID NO: 20507 - protein, 10 aa, Artificial Sequence
  Description of Artificial Sequence: Synthetic epitope
KEGRRAVKAG

SEQ ID NO: 20508 - protein, 10 aa, Artificial Sequence
  Description of Artificial Sequence: Synthetic epitope
KEGSIAMQSS

SEQ ID NO: 20509 - protein, 10 aa, Artificial Sequence
  Description of Artificial Sequence: Synthetic epitope
KEGSLNSVSS

SEQ ID NO: 20510 - protein, 10 aa, Artificial Sequence
  Description of Artificial Sequence: Synthetic epitope
KEGSQKALKS

SEQ ID NO: 20511 - protein, 10 aa, Artificial Sequence
  Description of Artificial Sequence: Synthetic epitope
KEGSTSAKVQ

SEQ ID NO: 20512 - protein, 10 aa, Artificial Sequence
  Description of Artificial Sequence: Synthetic epitope
KEGTESIKDQ

SEQ ID NO: 20513 - protein, 10 aa, Artificial Sequence
  Description of Artificial Sequence: Synthetic epitope
KEGYVETEQE

SEQ ID NO: 20514 - protein, 10 aa, Artificial Sequence
  Description of Artificial Sequence: Synthetic epitope
KEHAAQLTQL

SEQ ID NO: 20515 - protein, 10 aa, Artificial Sequence
  Description of Artificial Sequence: Synthetic epitope
KEHARSDSEN

SEQ ID NO: 20516 - protein, 10 aa, Artificial Sequence
  Description of Artificial Sequence: Synthetic epitope
KEHASRSSRK

SEQ ID NO: 20517 - protein, 10 aa, Artificial Sequence
  Description of Artificial Sequence: Synthetic epitope
KEHEERTESD

SEQ ID NO: 20518 - protein, 10 aa, Artificial Sequence
  Description of Artificial Sequence: Synthetic epitope
KEHHEEVRER

SEQ ID NO: 20519 - protein, 10 aa, Artificial Sequence
  Description of Artificial Sequence: Synthetic epitope
KEHIRTEVKD

SEQ ID NO: 20520 - protein, 10 aa, Artificial Sequence
  Description of Artificial Sequence: Synthetic epitope
KEHITAKSKY

SEQ ID NO: 20521 - protein, 10 aa, Artificial Sequence
  Description of Artificial Sequence: Synthetic epitope
KEHKAEKVPA

SEQ ID NO: 20522 - protein, 10 aa, Artificial Sequence
  Description of Artificial Sequence: Synthetic epitope
KEHKPLVLRP

SEQ ID NO: 20523 - protein, 10 aa, Artificial Sequence
  Description of Artificial Sequence: Synthetic epitope
KEHLSSKSPN

SEQ ID NO: 20524 - protein, 10 aa, Artificial Sequence
  Description of Artificial Sequence: Synthetic epitope
KEHLVLVETG

SEQ ID NO: 20525 - protein, 10 aa, Artificial Sequence
  Description of Artificial Sequence: Synthetic epitope
KEHSAAISWA

SEQ ID NO: 20526 - protein, 10 aa, Artificial Sequence
  Description of Artificial Sequence: Synthetic epitope
KEHTLIGSAN

SEQ ID NO: 20527 - protein, 10 aa, Artificial Sequence
  Description of Artificial Sequence: Synthetic epitope
KEHTTKYNEI

SEQ ID NO: 20528 - protein, 10 aa, Artificial Sequence
  Description of Artificial Sequence: Synthetic epitope
KEHYKIEAFT

SEQ ID NO: 20529 - protein, 10 aa, Artificial Sequence
  Description of Artificial Sequence: Synthetic epitope
KEIAEVNEIN

SEQ ID NO: 20530 - protein, 10 aa, Artificial Sequence
  Description of Artificial Sequence: Synthetic epitope
KEIASMRHVT

SEQ ID NO: 20531 - protein, 10 aa, Artificial Sequence
  Description of Artificial Sequence: Synthetic epitope
KEIASRTRRE

SEQ ID NO: 20532 - protein, 10 aa, Artificial Sequence
  Description of Artificial Sequence: Synthetic epitope
KEIAVTVKKA

SEQ ID NO: 20533 - protein, 10 aa, Artificial Sequence
  Description of Artificial Sequence: Synthetic epitope
KEIDHKESKW

SEQ ID NO: 20534 - protein, 10 aa, Artificial Sequence
  Description of Artificial Sequence: Synthetic epitope
KEIDPTSIPT

SEQ ID NO: 20535 - protein, 10 aa, Artificial Sequence
  Description of Artificial Sequence: Synthetic epitope
KEIDTSTKVD

SEQ ID NO: 20536 - protein, 10 aa, Artificial Sequence
  Description of Artificial Sequence: Synthetic epitope
KEIEENPKDN

SEQ ID NO: 20537 - protein, 10 aa, Artificial Sequence
  Description of Artificial Sequence: Synthetic epitope
KEIEKQDDMT

SEQ ID NO: 20538 - protein, 10 aa, Artificial Sequence
  Description of Artificial Sequence: Synthetic epitope
KEIEKYVYVT

SEQ ID NO: 20539 - protein, 10 aa, Artificial Sequence
  Description of Artificial Sequence: Synthetic epitope
KEIESEIDSE

SEQ ID NO: 20540 - protein, 10 aa, Artificial Sequence
  Description of Artificial Sequence: Synthetic epitope
KEIFSDWFHH

SEQ ID NO: 20541 - protein, 10 aa, Artificial Sequence
  Description of Artificial Sequence: Synthetic epitope
KEIGLQMHEE

SEQ ID NO: 20542 - protein, 10 aa, Artificial Sequence
  Description of Artificial Sequence: Synthetic epitope
KEIGTKQSFS

SEQ ID NO: 20543 - protein, 10 aa, Artificial Sequence
  Description of Artificial Sequence: Synthetic epitope
KEIHSQQVKE

SEQ ID NO: 20544 - protein, 10 aa, Artificial Sequence
  Description of Artificial Sequence: Synthetic epitope
KEIISLLVSK

SEQ ID NO: 20545 - protein, 10 aa, Artificial Sequence
  Description of Artificial Sequence: Synthetic epitope
KEIKESLMVL

SEQ ID NO: 20546 - protein, 10 aa, Artificial Sequence
  Description of Artificial Sequence: Synthetic epitope
KEIKIQAEYI

SEQ ID NO: 20547 - protein, 10 aa, Artificial Sequence
  Description of Artificial Sequence: Synthetic epitope
KEIKLYAQIP

SEQ ID NO: 20548 - protein, 10 aa, Artificial Sequence
  Description of Artificial Sequence: Synthetic epitope
KEIKPRLSRN

SEQ ID NO: 20549 - protein, 10 aa, Artificial Sequence
  Description of Artificial Sequence: Synthetic epitope
KEIKRETEFK

SEQ ID NO: 20550 - protein, 10 aa, Artificial Sequence
  Description of Artificial Sequence: Synthetic epitope
KEIKVSYTVY

SEQ ID NO: 20551 - protein, 10 aa, Artificial Sequence
  Description of Artificial Sequence: Synthetic epitope
KEILPKISPQ

SEQ ID NO: 20552 - protein, 10 aa, Artificial Sequence
  Description of Artificial Sequence: Synthetic epitope
KEILRLGFKS

SEQ ID NO: 20553 - protein, 10 aa, Artificial Sequence
  Description of Artificial Sequence: Synthetic epitope
KEILTQVQKT

SEQ ID NO: 20554 - protein, 10 aa, Artificial Sequence
  Description of Artificial Sequence: Synthetic epitope
KEILTTEIAK

SEQ ID NO: 20555 - protein, 10 aa, Artificial Sequence
  Description of Artificial Sequence: Synthetic epitope
KEINASLNQE

SEQ ID NO: 20556 - protein, 10 aa, Artificial Sequence
  Description of Artificial Sequence: Synthetic epitope
KEINKSGEKA

SEQ ID NO: 20557 - protein, 10 aa, Artificial Sequence
  Description of Artificial Sequence: Synthetic epitope
KEINSTANGP

SEQ ID NO: 20558 - protein, 10 aa, Artificial Sequence
  Description of Artificial Sequence: Synthetic epitope
KEINYFMYTM

SEQ ID NO: 20559 - protein, 10 aa, Artificial Sequence
  Description of Artificial Sequence: Synthetic epitope
KEIPVLVTQI

SEQ ID NO: 20560 - protein, 10 aa, Artificial Sequence
  Description of Artificial Sequence: Synthetic epitope
KEIQALKDTK

SEQ ID NO: 20561 - protein, 10 aa, Artificial Sequence
  Description of Artificial Sequence: Synthetic epitope
KEIQLTPQIA

SEQ ID NO: 20562 - protein, 10 aa, Artificial Sequence
  Description of Artificial Sequence: Synthetic epitope
KEIQSTLEGD

SEQ ID NO: 20563 - protein, 10 aa, Artificial Sequence
  Description of Artificial Sequence: Synthetic epitope
KEIQSTRTQR

SEQ ID NO: 20564 - protein, 10 aa, Artificial Sequence
  Description of Artificial Sequence: Synthetic epitope
KEIQTTQQER

SEQ ID NO: 20565 - protein, 10 aa, Artificial Sequence
  Description of Artificial Sequence: Synthetic epitope
KEIRVKAEPF

SEQ ID NO: 20566 - protein, 10 aa, Artificial Sequence
  Description of Artificial Sequence: Synthetic epitope
KEISEKTERE

SEQ ID NO: 20567 - protein, 10 aa, Artificial Sequence
  Description of Artificial Sequence: Synthetic epitope
KEISETSESL

SEQ ID NO: 20568 - protein, 10 aa, Artificial Sequence
  Description of Artificial Sequence: Synthetic epitope
KEISIKEISQ

SEQ ID NO: 20569 - protein, 10 aa, Artificial Sequence
  Description of Artificial Sequence: Synthetic epitope
KEISKRKNQE

SEQ ID NO: 20570 - protein, 10 aa, Artificial Sequence
  Description of Artificial Sequence: Synthetic epitope
KEISLRFKPE

SEQ ID NO: 20571 - protein, 10 aa, Artificial Sequence
  Description of Artificial Sequence: Synthetic epitope
KEISNIDKMD

SEQ ID NO: 20572 - protein, 10 aa, Artificial Sequence
  Description of Artificial Sequence: Synthetic epitope
KEISQLGNIR

SEQ ID NO: 20573 - protein, 10 aa, Artificial Sequence
  Description of Artificial Sequence: Synthetic epitope
KEISVEKKHT

SEQ ID NO: 20574 - protein, 10 aa, Artificial Sequence
  Description of Artificial Sequence: Synthetic epitope
KEITIINPAQ

SEQ ID NO: 20575 - protein, 10 aa, Artificial Sequence
  Description of Artificial Sequence: Synthetic epitope
KEIVAKMKES

SEQ ID NO: 20576 - protein, 10 aa, Artificial Sequence
  Description of Artificial Sequence: Synthetic epitope
KEIVEPELSI

SEQ ID NO: 20577 - protein, 10 aa, Artificial Sequence
  Description of Artificial Sequence: Synthetic epitope
KEIVKVEKMM

SEQ ID NO: 20578 - protein, 10 aa, Artificial Sequence
  Description of Artificial Sequence: Synthetic epitope
KEIVLQLEKN

SEQ ID NO: 20579 - protein, 10 aa, Artificial Sequence
  Description of Artificial Sequence: Synthetic epitope
KEIVNQTKLR

SEQ ID NO: 20580 - protein, 10 aa, Artificial Sequence
  Description of Artificial Sequence: Synthetic epitope
KEIVNSLKKS

SEQ ID NO: 20581 - protein, 10 aa, Artificial Sequence
  Description of Artificial Sequence: Synthetic epitope
KEIYVISAET

SEQ ID NO: 20582 - protein, 10 aa, Artificial Sequence
  Description of Artificial Sequence: Synthetic epitope
KEKAEVRPRG

SEQ ID NO: 20583 - protein, 10 aa, Artificial Sequence
  Description of Artificial Sequence: Synthetic epitope
KEKAILISDD

SEQ ID NO: 20584 - protein, 10 aa, Artificial Sequence
  Description of Artificial Sequence: Synthetic epitope
KEKAKAKAVA

SEQ ID NO: 20585 - protein, 10 aa, Artificial Sequence
  Description of Artificial Sequence: Synthetic epitope
KEKAKEALGK

SEQ ID NO: 20586 - protein, 10 aa, Artificial Sequence
  Description of Artificial Sequence: Synthetic epitope
KEKASIYQNQ

SEQ ID NO: 20587 - protein, 10 aa, Artificial Sequence
  Description of Artificial Sequence: Synthetic epitope
KEKATTEADS

SEQ ID NO: 20588 - protein, 10 aa, Artificial Sequence
  Description of Artificial Sequence: Synthetic epitope
KEKDKDSKLE

SEQ ID NO: 20589 - protein, 10 aa, Artificial Sequence
  Description of Artificial Sequence: Synthetic epitope
KEKDKTRADS

SEQ ID NO: 20590 - protein, 10 aa, Artificial Sequence
  Description of Artificial Sequence: Synthetic epitope
KEKEATFKEA

SEQ ID NO: 20591 - protein, 10 aa, Artificial Sequence
  Description of Artificial Sequence: Synthetic epitope
KEKEGSEVAK

SEQ ID NO: 20592 - protein, 10 aa, Artificial Sequence
  Description of Artificial Sequence: Synthetic epitope
KEKEKAIFPP

SEQ ID NO: 20593 - protein, 10 aa, Artificial Sequence
  Description of Artificial Sequence: Synthetic epitope
KEKETMDNAR

SEQ ID NO: 20594 - protein, 10 aa, Artificial Sequence
  Description of Artificial Sequence: Synthetic epitope
KEKETMDNAR

SEQ ID NO: 20595 - protein, 10 aa, Artificial Sequence
  Description of Artificial Sequence: Synthetic epitope
KEKEVEKIEQ

SEQ ID NO: 20596 - protein, 10 aa, Artificial Sequence
  Description of Artificial Sequence: Synthetic epitope
KEKFAMVAPD

SEQ ID NO: 20597 - protein, 10 aa, Artificial Sequence
  Description of Artificial Sequence: Synthetic epitope
KEKFKSNDVF

SEQ ID NO: 20598 - protein, 10 aa, Artificial Sequence
  Description of Artificial Sequence: Synthetic epitope
KEKFVMRKIQ

SEQ ID NO: 20599 - protein, 10 aa, Artificial Sequence
  Description of Artificial Sequence: Synthetic epitope
KEKGAEIPKT

SEQ ID NO: 20600 - protein, 10 aa, Artificial Sequence
  Description of Artificial Sequence: Synthetic epitope
KEKGQSLLTK

SEQ ID NO: 20601 - protein, 10 aa, Artificial Sequence
  Description of Artificial Sequence: Synthetic epitope
KEKGSNEQEK

SEQ ID NO: 20602 - protein, 10 aa, Artificial Sequence
  Description of Artificial Sequence: Synthetic epitope
KEKHADGATK

SEQ ID NO: 20603 - protein, 10 aa, Artificial Sequence
  Description of Artificial Sequence: Synthetic epitope
KEKHKQSGGS

SEQ ID NO: 20604 - protein, 10 aa, Artificial Sequence
  Description of Artificial Sequence: Synthetic epitope
KEKHKTKTAQ

SEQ ID NO: 20605 - protein, 10 aa, Artificial Sequence
  Description of Artificial Sequence: Synthetic epitope
KEKHSTQAKN

SEQ ID NO: 20606 - protein, 10 aa, Artificial Sequence
  Description of Artificial Sequence: Synthetic epitope
KEKHTHHAPL

SEQ ID NO: 20607 - protein, 10 aa, Artificial Sequence
  Description of Artificial Sequence: Synthetic epitope
KEKIALLKDL

SEQ ID NO: 20608 - protein, 10 aa, Artificial Sequence
  Description of Artificial Sequence: Synthetic epitope
KEKKEAQLNN

SEQ ID NO: 20609 - protein, 10 aa, Artificial Sequence
  Description of Artificial Sequence: Synthetic epitope
KEKKERMSAA

SEQ ID NO: 20610 - protein, 10 aa, Artificial Sequence
  Description of Artificial Sequence: Synthetic epitope
KEKKGYVMAS

SEQ ID NO: 20611 - protein, 10 aa, Artificial Sequence
  Description of Artificial Sequence: Synthetic epitope
KEKKITMQNQ

SEQ ID NO: 20612 - protein, 10 aa, Artificial Sequence
  Description of Artificial Sequence: Synthetic epitope
KEKKQATERL

SEQ ID NO: 20613 - protein, 10 aa, Artificial Sequence
  Description of Artificial Sequence: Synthetic epitope
KEKLLESDKQ

SEQ ID NO: 20614 - protein, 10 aa, Artificial Sequence
  Description of Artificial Sequence: Synthetic epitope
KEKLTNTRKE

SEQ ID NO: 20615 - protein, 10 aa, Artificial Sequence
  Description of Artificial Sequence: Synthetic epitope
KEKMEQKAIS

SEQ ID NO: 20616 - protein, 10 aa, Artificial Sequence
  Description of Artificial Sequence: Synthetic epitope
KEKMRGMRGK

SEQ ID NO: 20617 - protein, 10 aa, Artificial Sequence
  Description of Artificial Sequence: Synthetic epitope
KEKNHDSQSS

SEQ ID NO: 20618 - protein, 10 aa, Artificial Sequence
  Description of Artificial Sequence: Synthetic epitope
KEKNLETDNK

SEQ ID NO: 20619 - protein, 10 aa, Artificial Sequence
  Description of Artificial Sequence: Synthetic epitope
KEKNTEENDS

SEQ ID NO: 20620 - protein, 10 aa, Artificial Sequence
  Description of Artificial Sequence: Synthetic epitope
KEKPKSKTAQ

SEQ ID NO: 20621 - protein, 10 aa, Artificial Sequence
  Description of Artificial Sequence: Synthetic epitope
KEKPTSKAEL

SEQ ID NO: 20622 - protein, 10 aa, Artificial Sequence
  Description of Artificial Sequence: Synthetic epitope
KEKQAQLAQT

SEQ ID NO: 20623 - protein, 10 aa, Artificial Sequence
  Description of Artificial Sequence: Synthetic epitope
KEKQEANKQK

SEQ ID NO: 20624 - protein, 10 aa, Artificial Sequence
  Description of Artificial Sequence: Synthetic epitope
KEKQIKEERK

SEQ ID NO: 20625 - protein, 10 aa, Artificial Sequence
  Description of Artificial Sequence: Synthetic epitope
KEKREVAARH

SEQ ID NO: 20626 - protein, 10 aa, Artificial Sequence
  Description of Artificial Sequence: Synthetic epitope
KEKRISVQTP

SEQ ID NO: 20627 - protein, 10 aa, Artificial Sequence
  Description of Artificial Sequence: Synthetic epitope
KEKRKDSNHH

SEQ ID NO: 20628 - protein, 10 aa, Artificial Sequence
  Description of Artificial Sequence: Synthetic epitope
KEKRKILTTE

SEQ ID NO: 20629 - protein, 10 aa, Artificial Sequence
  Description of Artificial Sequence: Synthetic epitope
KEKRTEGYAA

SEQ ID NO: 20630 - protein, 10 aa, Artificial Sequence
  Description of Artificial Sequence: Synthetic epitope
KEKSKKQGEG

SEQ ID NO: 20631 - protein, 10 aa, Artificial Sequence
  Description of Artificial Sequence: Synthetic epitope
KEKSKSKERD

SEQ ID NO: 20632 - protein, 10 aa, Artificial Sequence
  Description of Artificial Sequence: Synthetic epitope
KEKSKSVKQT

SEQ ID NO: 20633 - protein, 10 aa, Artificial Sequence
  Description of Artificial Sequence: Synthetic epitope
KEKSQRQKIA

SEQ ID NO: 20634 - protein, 10 aa, Artificial Sequence
  Description of Artificial Sequence: Synthetic epitope
KEKSSTAMEM

SEQ ID NO: 20635 - protein, 10 aa, Artificial Sequence
  Description of Artificial Sequence: Synthetic epitope
KEKSTEKGEE

SEQ ID NO: 20636 - protein, 10 aa, Artificial Sequence
  Description of Artificial Sequence: Synthetic epitope
KEKSTSKYEV

SEQ ID NO: 20637 - protein, 10 aa, Artificial Sequence
  Description of Artificial Sequence: Synthetic epitope
KEKSTSTQKD

SEQ ID NO: 20638 - protein, 10 aa, Artificial Sequence
  Description of Artificial Sequence: Synthetic epitope
KEKTIAAKRA

SEQ ID NO: 20639 - protein, 10 aa, Artificial Sequence
  Description of Artificial Sequence: Synthetic epitope
KEKTQELESH

SEQ ID NO: 20640 - protein, 10 aa, Artificial Sequence
  Description of Artificial Sequence: Synthetic epitope
KEKTSDSMTF

SEQ ID NO: 20641 - protein, 10 aa, Artificial Sequence
  Description of Artificial Sequence: Synthetic epitope
KEKTTRSKSK

SEQ ID NO: 20642 - protein, 10 aa, Artificial Sequence
  Description of Artificial Sequence: Synthetic epitope
KEKVDVSLIE

SEQ ID NO: 20643 - protein, 10 aa, Artificial Sequence
  Description of Artificial Sequence: Synthetic epitope
KEKVEEKASR

SEQ ID NO: 20644 - protein, 10 aa, Artificial Sequence
  Description of Artificial Sequence: Synthetic epitope
KEKVLAEPEK

SEQ ID NO: 20645 - protein, 10 aa, Artificial Sequence
  Description of Artificial Sequence: Synthetic epitope
KEKVLTEQAE

SEQ ID NO: 20646 - protein, 10 aa, Artificial Sequence
  Description of Artificial Sequence: Synthetic epitope
KEKVMVANSF

SEQ ID NO: 20647 - protein, 10 aa, Artificial Sequence
  Description of Artificial Sequence: Synthetic epitope
KEKVTRKENS

SEQ ID NO: 20648 - protein, 10 aa, Artificial Sequence
  Description of Artificial Sequence: Synthetic epitope
KEKVTSGSTT

SEQ ID NO: 20649 - protein, 10 aa, Artificial Sequence
  Description of Artificial Sequence: Synthetic epitope
KEKVVTLGGI

SEQ ID NO: 20650 - protein, 10 aa, Artificial Sequence
  Description of Artificial Sequence: Synthetic epitope
KEKYEKLAGR

SEQ ID NO: 20651 - protein, 10 aa, Artificial Sequence
  Description of Artificial Sequence: Synthetic epitope
KELAADAPGN

SEQ ID NO: 20652 - protein, 10 aa, Artificial Sequence
  Description of Artificial Sequence: Synthetic epitope
KELAADVLRA

SEQ ID NO: 20653 - protein, 10 aa, Artificial Sequence
  Description of Artificial Sequence: Synthetic epitope
KELAAPKIRD

SEQ ID NO: 20654 - protein, 10 aa, Artificial Sequence
  Description of Artificial Sequence: Synthetic epitope
KELAAQLNEE

SEQ ID NO: 20655 - protein, 10 aa, Artificial Sequence
  Description of Artificial Sequence: Synthetic epitope
KELAARGKDL

SEQ ID NO: 20656 - protein, 10 aa, Artificial Sequence
  Description of Artificial Sequence: Synthetic epitope
KELAETIAAD

SEQ ID NO: 20657 - protein, 10 aa, Artificial Sequence
  Description of Artificial Sequence: Synthetic epitope
KELAKLVNKR

SEQ ID NO: 20658 - protein, 10 aa, Artificial Sequence
  Description of Artificial Sequence: Synthetic epitope
KELALKLIEE

SEQ ID NO: 20659 - protein, 10 aa, Artificial Sequence
  Description of Artificial Sequence: Synthetic epitope
KELALTSAED

SEQ ID NO: 20660 - protein, 10 aa, Artificial Sequence
  Description of Artificial Sequence: Synthetic epitope
KELAMFVQLL

SEQ ID NO: 20661 - protein, 10 aa, Artificial Sequence
  Description of Artificial Sequence: Synthetic epitope
KELASKSGLK

SEQ ID NO: 20662 - protein, 10 aa, Artificial Sequence
  Description of Artificial Sequence: Synthetic epitope
KELDKVQESP

SEQ ID NO: 20663 - protein, 10 aa, Artificial Sequence
  Description of Artificial Sequence: Synthetic epitope
KELDVKSQKE

SEQ ID NO: 20664 - protein, 10 aa, Artificial Sequence
  Description of Artificial Sequence: Synthetic epitope
KELEGTSQAS

SEQ ID NO: 20665 - protein, 10 aa, Artificial Sequence
  Description of Artificial Sequence: Synthetic epitope
KELESKTVVS

SEQ ID NO: 20666 - protein, 10 aa, Artificial Sequence
  Description of Artificial Sequence: Synthetic epitope
KELESYMMRA

SEQ ID NO: 20667 - protein, 10 aa, Artificial Sequence
  Description of Artificial Sequence: Synthetic epitope
KELEVMLKTQ

SEQ ID NO: 20668 - protein, 10 aa, Artificial Sequence
  Description of Artificial Sequence: Synthetic epitope
KELFYKADGE

SEQ ID NO: 20669 - protein, 10 aa, Artificial Sequence
  Description of Artificial Sequence: Synthetic epitope
KELIAESKKS

SEQ ID NO: 20670 - protein, 10 aa, Artificial Sequence
  Description of Artificial Sequence: Synthetic epitope
KELIEKKEME

SEQ ID NO: 20671 - protein, 10 aa, Artificial Sequence
  Description of Artificial Sequence: Synthetic epitope
KELIKTGNDA

SEQ ID NO: 20672 - protein, 10 aa, Artificial Sequence
  Description of Artificial Sequence: Synthetic epitope
KELKDSKTDR

SEQ ID NO: 20673 - protein, 10 aa, Artificial Sequence
  Description of Artificial Sequence: Synthetic epitope
KELKKEELFT

SEQ ID NO: 20674 - protein, 10 aa, Artificial Sequence
  Description of Artificial Sequence: Synthetic epitope
KELKPLQRKT

SEQ ID NO: 20675 - protein, 10 aa, Artificial Sequence
  Description of Artificial Sequence: Synthetic epitope
KELKQNRSQE

SEQ ID NO: 20676 - protein, 10 aa, Artificial Sequence
  Description of Artificial Sequence: Synthetic epitope
KELKSLKGNT

SEQ ID NO: 20677 - protein, 10 aa, Artificial Sequence
  Description of Artificial Sequence: Synthetic epitope
KELKVLTLQN

SEQ ID NO: 20678 - protein, 10 aa, Artificial Sequence
  Description of Artificial Sequence: Synthetic epitope
KELLAIVKQK

SEQ ID NO: 20679 - protein, 10 aa, Artificial Sequence
  Description of Artificial Sequence: Synthetic epitope
KELLKSLQAT

SEQ ID NO: 20680 - protein, 10 aa, Artificial Sequence
  Description of Artificial Sequence: Synthetic epitope
KELLQNSQSR

SEQ ID NO: 20681 - protein, 10 aa, Artificial Sequence
  Description of Artificial Sequence: Synthetic epitope
KELLQTKLKD

SEQ ID NO: 20682 - protein, 10 aa, Artificial Sequence
  Description of Artificial Sequence: Synthetic epitope
KELLVLKLEE

SEQ ID NO: 20683 - protein, 10 aa, Artificial Sequence
  Description of Artificial Sequence: Synthetic epitope
KELMAQNQPK

SEQ ID NO: 20684 - protein, 10 aa, Artificial Sequence
  Description of Artificial Sequence: Synthetic epitope
KELMTALREL

SEQ ID NO: 20685 - protein, 10 aa, Artificial Sequence
  Description of Artificial Sequence: Synthetic epitope
KELMTEGEHI

SEQ ID NO: 20686 - protein, 10 aa, Artificial Sequence
  Description of Artificial Sequence: Synthetic epitope
KELNAAEKRP

SEQ ID NO: 20687 - protein, 10 aa, Artificial Sequence
  Description of Artificial Sequence: Synthetic epitope
KELNKRLTAP

SEQ ID NO: 20688 - protein, 10 aa, Artificial Sequence
  Description of Artificial Sequence: Synthetic epitope
KELNPSLNFK

SEQ ID NO: 20689 - protein, 10 aa, Artificial Sequence
  Description of Artificial Sequence: Synthetic epitope
KELQASKNLV

SEQ ID NO: 20690 - protein, 10 aa, Artificial Sequence
  Description of Artificial Sequence: Synthetic epitope
KELQERLSQE

SEQ ID NO: 20691 - protein, 10 aa, Artificial Sequence
  Description of Artificial Sequence: Synthetic epitope
KELQGISQIE

SEQ ID NO: 20692 - protein, 10 aa, Artificial Sequence
  Description of Artificial Sequence: Synthetic epitope
KELQSQQSNI

SEQ ID NO: 20693 - protein, 10 aa, Artificial Sequence
  Description of Artificial Sequence: Synthetic epitope
KELQTTLVRG

SEQ ID NO: 20694 - protein, 10 aa, Artificial Sequence
  Description of Artificial Sequence: Synthetic epitope
KELSAALQDK

SEQ ID NO: 20695 - protein, 10 aa, Artificial Sequence
  Description of Artificial Sequence: Synthetic epitope
KELSAKRAIN

SEQ ID NO: 20696 - protein, 10 aa, Artificial Sequence
  Description of Artificial Sequence: Synthetic epitope
KELSANTAAF

SEQ ID NO: 20697 - protein, 10 aa, Artificial Sequence
  Description of Artificial Sequence: Synthetic epitope
KELSATVAES

SEQ ID NO: 20698 - protein, 10 aa, Artificial Sequence
  Description of Artificial Sequence: Synthetic epitope
KELSGKLMKS

SEQ ID NO: 20699 - protein, 10 aa, Artificial Sequence
  Description of Artificial Sequence: Synthetic epitope
KELSKVIRAI

SEQ ID NO: 20700 - protein, 10 aa, Artificial Sequence
  Description of Artificial Sequence: Synthetic epitope
KELSLKIIRD

SEQ ID NO: 20701 - protein, 10 aa, Artificial Sequence
  Description of Artificial Sequence: Synthetic epitope
KELSLKYKQS

SEQ ID NO: 20702 - protein, 10 aa, Artificial Sequence
  Description of Artificial Sequence: Synthetic epitope
KELSLQASLA

SEQ ID NO: 20703 - protein, 10 aa, Artificial Sequence
  Description of Artificial Sequence: Synthetic epitope
KELSLVNKNK

SEQ ID NO: 20704 - protein, 10 aa, Artificial Sequence
  Description of Artificial Sequence: Synthetic epitope
KELSRVDQRH

SEQ ID NO: 20705 - protein, 10 aa, Artificial Sequence
  Description of Artificial Sequence: Synthetic epitope
KELTLSMDEL

SEQ ID NO: 20706 - protein, 10 aa, Artificial Sequence
  Description of Artificial Sequence: Synthetic epitope
KELTSLVKEV

SEQ ID NO: 20707 - protein, 10 aa, Artificial Sequence
  Description of Artificial Sequence: Synthetic epitope
KELTTYEIEE

SEQ ID NO: 20708 - protein, 10 aa, Artificial Sequence
  Description of Artificial Sequence: Synthetic epitope
KELVEKSEAV

SEQ ID NO: 20709 - protein, 10 aa, Artificial Sequence
  Description of Artificial Sequence: Synthetic epitope
KELVPRVLSK

SEQ ID NO: 20710 - protein, 10 aa, Artificial Sequence
  Description of Artificial Sequence: Synthetic epitope
KELVSAAKSD

SEQ ID NO: 20711 - protein, 10 aa, Artificial Sequence
  Description of Artificial Sequence: Synthetic epitope
KELYTLLNEN

SEQ ID NO: 20712 - protein, 10 aa, Artificial Sequence
  Description of Artificial Sequence: Synthetic epitope
KELYTLLNEN

SEQ ID NO: 20713 - protein, 10 aa, Artificial Sequence
  Description of Artificial Sequence: Synthetic epitope
KEMAAEKAKA

SEQ ID NO: 20714 - protein, 10 aa, Artificial Sequence
  Description of Artificial Sequence: Synthetic epitope
KEMADSGTKA

SEQ ID NO: 20715 - protein, 10 aa, Artificial Sequence
  Description of Artificial Sequence: Synthetic epitope
KEMAKTHHQK

SEQ ID NO: 20716 - protein, 10 aa, Artificial Sequence
  Description of Artificial Sequence: Synthetic epitope
KEMALKLEAL

SEQ ID NO: 20717 - protein, 10 aa, Artificial Sequence
  Description of Artificial Sequence: Synthetic epitope
KEMAWKVNMY

SEQ ID NO: 20718 - protein, 10 aa, Artificial Sequence
  Description of Artificial Sequence: Synthetic epitope
KEMEITEVEP

SEQ ID NO: 20719 - protein, 10 aa, Artificial Sequence
  Description of Artificial Sequence: Synthetic epitope
KEMEQPEKKV

SEQ ID NO: 20720 - protein, 10 aa, Artificial Sequence
  Description of Artificial Sequence: Synthetic epitope
KEMHSPGQWR

SEQ ID NO: 20721 - protein, 10 aa, Artificial Sequence
  Description of Artificial Sequence: Synthetic epitope
KEMIRSRKAV

SEQ ID NO: 20722 - protein, 10 aa, Artificial Sequence
  Description of Artificial Sequence: Synthetic epitope
KEMITEEDTQ

SEQ ID NO: 20723 - protein, 10 aa, Artificial Sequence
  Description of Artificial Sequence: Synthetic epitope
KEMLAVDAPR

SEQ ID NO: 20724 - protein, 10 aa, Artificial Sequence
  Description of Artificial Sequence: Synthetic epitope
KEMLKIKQEQ

SEQ ID NO: 20725 - protein, 10 aa, Artificial Sequence
  Description of Artificial Sequence: Synthetic epitope
KEMLKLSEVR

SEQ ID NO: 20726 - protein, 10 aa, Artificial Sequence
  Description of Artificial Sequence: Synthetic epitope
KEMQNHEDVN

SEQ ID NO: 20727 - protein, 10 aa, Artificial Sequence
  Description of Artificial Sequence: Synthetic epitope
KEMRELLEET

SEQ ID NO: 20728 - protein, 10 aa, Artificial Sequence
  Description of Artificial Sequence: Synthetic epitope
KEMREMTKSF

SEQ ID NO: 20729 - protein, 10 aa, Artificial Sequence
  Description of Artificial Sequence: Synthetic epitope
KEMSSNQKSP

SEQ ID NO: 20730 - protein, 10 aa, Artificial Sequence
  Description of Artificial Sequence: Synthetic epitope
KEMVILAGKS

SEQ ID NO: 20731 - protein, 10 aa, Artificial Sequence
  Description of Artificial Sequence: Synthetic epitope
KEMVSLLPTK

SEQ ID NO: 20732 - protein, 10 aa, Artificial Sequence
  Description of Artificial Sequence: Synthetic epitope
KEMVSTSNNK

SEQ ID NO: 20733 - protein, 10 aa, Artificial Sequence
  Description of Artificial Sequence: Synthetic epitope
KENDLSVLRQ

SEQ ID NO: 20734 - protein, 10 aa, Artificial Sequence
  Description of Artificial Sequence: Synthetic epitope
KENEMAAKET

SEQ ID NO: 20735 - protein, 10 aa, Artificial Sequence
  Description of Artificial Sequence: Synthetic epitope
KENENVTVDK

SEQ ID NO: 20736 - protein, 10 aa, Artificial Sequence
  Description of Artificial Sequence: Synthetic epitope
KENEPIKETE

SEQ ID NO: 20737 - protein, 10 aa, Artificial Sequence
  Description of Artificial Sequence: Synthetic epitope
KENERKTSDE

SEQ ID NO: 20738 - protein, 10 aa, Artificial Sequence
  Description of Artificial Sequence: Synthetic epitope
KENESQANLQ

SEQ ID NO: 20739 - protein, 10 aa, Artificial Sequence
  Description of Artificial Sequence: Synthetic epitope
KENESSDSEE

SEQ ID NO: 20740 - protein, 10 aa, Artificial Sequence
  Description of Artificial Sequence: Synthetic epitope
KENGLSTSQQ

SEQ ID NO: 20741 - protein, 10 aa, Artificial Sequence
  Description of Artificial Sequence: Synthetic epitope
KENGQAGAAS

SEQ ID NO: 20742 - protein, 10 aa, Artificial Sequence
  Description of Artificial Sequence: Synthetic epitope
KENIGKVNKK

SEQ ID NO: 20743 - protein, 10 aa, Artificial Sequence
  Description of Artificial Sequence: Synthetic epitope
KENIITKLFR

SEQ ID NO: 20744 - protein, 10 aa, Artificial Sequence
  Description of Artificial Sequence: Synthetic epitope
KENKIAKEKT

SEQ ID NO: 20745 - protein, 10 aa, Artificial Sequence
  Description of Artificial Sequence: Synthetic epitope
KENKILDMQQ

SEQ ID NO: 20746 - protein, 10 aa, Artificial Sequence
  Description of Artificial Sequence: Synthetic epitope
KENKNEKVIE

SEQ ID NO: 20747 - protein, 10 aa, Artificial Sequence
  Description of Artificial Sequence: Synthetic epitope
KENKSPAIKY

SEQ ID NO: 20748 - protein, 10 aa, Artificial Sequence
  Description of Artificial Sequence: Synthetic epitope
KENKTLKRIS

SEQ ID NO: 20749 - protein, 10 aa, Artificial Sequence
  Description of Artificial Sequence: Synthetic epitope
KENLAQAVEH

SEQ ID NO: 20750 - protein, 10 aa, Artificial Sequence
  Description of Artificial Sequence: Synthetic epitope
KENLVKLLNP

SEQ ID NO: 20751 - protein, 10 aa, Artificial Sequence
  Description of Artificial Sequence: Synthetic epitope
KENMAATNWK

SEQ ID NO: 20752 - protein, 10 aa, Artificial Sequence
  Description of Artificial Sequence: Synthetic epitope
KENMLGDAKT

SEQ ID NO: 20753 - protein, 10 aa, Artificial Sequence
  Description of Artificial Sequence: Synthetic epitope
KENNGDSSMV

SEQ ID NO: 20754 - protein, 10 aa, Artificial Sequence
  Description of Artificial Sequence: Synthetic epitope
KENNKKSSTR

SEQ ID NO: 20755 - protein, 10 aa, Artificial Sequence
  Description of Artificial Sequence: Synthetic epitope
KENRLRREKE

SEQ ID NO: 20756 - protein, 10 aa, Artificial Sequence
  Description of Artificial Sequence: Synthetic epitope
KENSENKENR

SEQ ID NO: 20757 - protein, 10 aa, Artificial Sequence
  Description of Artificial Sequence: Synthetic epitope
KENSKSEKIS

SEQ ID NO: 20758 - protein, 10 aa, Artificial Sequence
  Description of Artificial Sequence: Synthetic epitope
KENSQMFQGR

SEQ ID NO: 20759 - protein, 10 aa, Artificial Sequence
  Description of Artificial Sequence: Synthetic epitope
KENSSQSKKY

SEQ ID NO: 20760 - protein, 10 aa, Artificial Sequence
  Description of Artificial Sequence: Synthetic epitope
KENTMARVDE

SEQ ID NO: 20761 - protein, 10 aa, Artificial Sequence
  Description of Artificial Sequence: Synthetic epitope
KEPAKAKVQK

SEQ ID NO: 20762 - protein, 10 aa, Artificial Sequence
  Description of Artificial Sequence: Synthetic epitope
KEPDMTTMGQ

SEQ ID NO: 20763 - protein, 10 aa, Artificial Sequence
  Description of Artificial Sequence: Synthetic epitope
KEPEMSKGKG

SEQ ID NO: 20764 - protein, 10 aa, Artificial Sequence
  Description of Artificial Sequence: Synthetic epitope
KEPETVGAQS

SEQ ID NO: 20765 - protein, 10 aa, Artificial Sequence
  Description of Artificial Sequence: Synthetic epitope
KEPKMALKET

SEQ ID NO: 20766 - protein, 10 aa, Artificial Sequence
  Description of Artificial Sequence: Synthetic epitope
KEPKNIINPH

SEQ ID NO: 20767 - protein, 10 aa, Artificial Sequence
  Description of Artificial Sequence: Synthetic epitope
KEPLEQSPTN

SEQ ID NO: 20768 - protein, 10 aa, Artificial Sequence
  Description of Artificial Sequence: Synthetic epitope
KEPLSRVLRL

SEQ ID NO: 20769 - protein, 10 aa, Artificial Sequence
  Description of Artificial Sequence: Synthetic epitope
KEPSAKSNKF

SEQ ID NO: 20770 - protein, 10 aa, Artificial Sequence
  Description of Artificial Sequence: Synthetic epitope
KEPSAKSNKH

SEQ ID NO: 20771 - protein, 10 aa, Artificial Sequence
  Description of Artificial Sequence: Synthetic epitope
KEPSISSIQM

SEQ ID NO: 20772 - protein, 10 aa, Artificial Sequence
  Description of Artificial Sequence: Synthetic epitope
KEPSQSLLEE

SEQ ID NO: 20773 - protein, 10 aa, Artificial Sequence
  Description of Artificial Sequence: Synthetic epitope
KEPSSKSNKP

SEQ ID NO: 20774 - protein, 10 aa, Artificial Sequence
  Description of Artificial Sequence: Synthetic epitope
KEPSSVTTHS

SEQ ID NO: 20775 - protein, 10 aa, Artificial Sequence
  Description of Artificial Sequence: Synthetic epitope
KEPTTDEAPS

SEQ ID NO: 20776 - protein, 10 aa, Artificial Sequence
  Description of Artificial Sequence: Synthetic epitope
KEQAAKQSVS

SEQ ID NO: 20777 - protein, 10 aa, Artificial Sequence
  Description of Artificial Sequence: Synthetic epitope
KEQAIGEYED

SEQ ID NO: 20778 - protein, 10 aa, Artificial Sequence
  Description of Artificial Sequence: Synthetic epitope
KEQANAVSEA

SEQ ID NO: 20779 - protein, 10 aa, Artificial Sequence
  Description of Artificial Sequence: Synthetic epitope
KEQARLISDA

SEQ ID NO: 20780 - protein, 10 aa, Artificial Sequence
  Description of Artificial Sequence: Synthetic epitope
KEQDKSKTLS

SEQ ID NO: 20781 - protein, 10 aa, Artificial Sequence
  Description of Artificial Sequence: Synthetic epitope
KEQDQMKLYA

SEQ ID NO: 20782 - protein, 10 aa, Artificial Sequence
  Description of Artificial Sequence: Synthetic epitope
KEQEEAEAIA

SEQ ID NO: 20783 - protein, 10 aa, Artificial Sequence
  Description of Artificial Sequence: Synthetic epitope
KEQEEMLLMS

SEQ ID NO: 20784 - protein, 10 aa, Artificial Sequence
  Description of Artificial Sequence: Synthetic epitope
KEQEERAMEQ

SEQ ID NO: 20785 - protein, 10 aa, Artificial Sequence
  Description of Artificial Sequence: Synthetic epitope
KEQEGRKAAR

SEQ ID NO: 20786 - protein, 10 aa, Artificial Sequence
  Description of Artificial Sequence: Synthetic epitope
KEQEKVVSDA

SEQ ID NO: 20787 - protein, 10 aa, Artificial Sequence
  Description of Artificial Sequence: Synthetic epitope
KEQESSQAST

SEQ ID NO: 20788 - protein, 10 aa, Artificial Sequence
  Description of Artificial Sequence: Synthetic epitope
KEQETVLQAQ

SEQ ID NO: 20789 - protein, 10 aa, Artificial Sequence
  Description of Artificial Sequence: Synthetic epitope
KEQIGFTKER

SEQ ID NO: 20790 - protein, 10 aa, Artificial Sequence
  Description of Artificial Sequence: Synthetic epitope
KEQLSRRPVA

SEQ ID NO: 20791 - protein, 10 aa, Artificial Sequence
  Description of Artificial Sequence: Synthetic epitope
KEQMILVKED

SEQ ID NO: 20792 - protein, 10 aa, Artificial Sequence
  Description of Artificial Sequence: Synthetic epitope
KEQNEKSIAQ

SEQ ID NO: 20793 - protein, 10 aa, Artificial Sequence
  Description of Artificial Sequence: Synthetic epitope
KEQNLSSQVE

SEQ ID NO: 20794 - protein, 10 aa, Artificial Sequence
  Description of Artificial Sequence: Synthetic epitope
KEQNQKERDA

SEQ ID NO: 20795 - protein, 10 aa, Artificial Sequence
  Description of Artificial Sequence: Synthetic epitope
KEQQDGEADD

SEQ ID NO: 20796 - protein, 10 aa, Artificial Sequence
  Description of Artificial Sequence: Synthetic epitope
KEQQLDVHEQ

SEQ ID NO: 20797 - protein, 10 aa, Artificial Sequence
  Description of Artificial Sequence: Synthetic epitope
KEQQRQKEQK

SEQ ID NO: 20798 - protein, 10 aa, Artificial Sequence
  Description of Artificial Sequence: Synthetic epitope
KEQQTVTKLH

SEQ ID NO: 20799 - protein, 10 aa, Artificial Sequence
  Description of Artificial Sequence: Synthetic epitope
KEQRKNSSLE

SEQ ID NO: 20800 - protein, 10 aa, Artificial Sequence
  Description of Artificial Sequence: Synthetic epitope
KEQSAAMSQE

SEQ ID NO: 20801 - protein, 10 aa, Artificial Sequence
  Description of Artificial Sequence: Synthetic epitope
KEQSEGSKAQ

SEQ ID NO: 20802 - protein, 10 aa, Artificial Sequence
  Description of Artificial Sequence: Synthetic epitope
KEQSENAQAS

SEQ ID NO: 20803 - protein, 10 aa, Artificial Sequence
  Description of Artificial Sequence: Synthetic epitope
KEQSEVSVSP

SEQ ID NO: 20804 - protein, 10 aa, Artificial Sequence
  Description of Artificial Sequence: Synthetic epitope
KEQSKGVKTE

SEQ ID NO: 20805 - protein, 10 aa, Artificial Sequence
  Description of Artificial Sequence: Synthetic epitope
KEQSKTVVTT

SEQ ID NO: 20806 - protein, 10 aa, Artificial Sequence
  Description of Artificial Sequence: Synthetic epitope
KEQSLQESKE

SEQ ID NO: 20807 - protein, 10 aa, Artificial Sequence
  Description of Artificial Sequence: Synthetic epitope
KEQSTRSSGH

SEQ ID NO: 20808 - protein, 10 aa, Artificial Sequence
  Description of Artificial Sequence: Synthetic epitope
KEQTKLKWMQ

SEQ ID NO: 20809 - protein, 10 aa, Artificial Sequence
  Description of Artificial Sequence: Synthetic epitope
KEQVEKSAYE

SEQ ID NO: 20810 - protein, 10 aa, Artificial Sequence
  Description of Artificial Sequence: Synthetic epitope
KERAHQQKKH

SEQ ID NO: 20811 - protein, 10 aa, Artificial Sequence
  Description of Artificial Sequence: Synthetic epitope
KERAREERPE

SEQ ID NO: 20812 - protein, 10 aa, Artificial Sequence
  Description of Artificial Sequence: Synthetic epitope
KERAYVEQIE

SEQ ID NO: 20813 - protein, 10 aa, Artificial Sequence
  Description of Artificial Sequence: Synthetic epitope
KEREIVEEFL

SEQ ID NO: 20814 - protein, 10 aa, Artificial Sequence
  Description of Artificial Sequence: Synthetic epitope
KEREQKEIEA

SEQ ID NO: 20815 - protein, 10 aa, Artificial Sequence
  Description of Artificial Sequence: Synthetic epitope
KERESAEQSS

SEQ ID NO: 20816 - protein, 10 aa, Artificial Sequence
  Description of Artificial Sequence: Synthetic epitope
KEREVVNKDV

SEQ ID NO: 20817 - protein, 10 aa, Artificial Sequence
  Description of Artificial Sequence: Synthetic epitope
KERKKATSRE

SEQ ID NO: 20818 - protein, 10 aa, Artificial Sequence
  Description of Artificial Sequence: Synthetic epitope
KERKPSAEMN

SEQ ID NO: 20819 - protein, 10 aa, Artificial Sequence
  Description of Artificial Sequence: Synthetic epitope
KERKSSRDKE

SEQ ID NO: 20820 - protein, 10 aa, Artificial Sequence
  Description of Artificial Sequence: Synthetic epitope
KERKTRQVDD

SEQ ID NO: 20821 - protein, 10 aa, Artificial Sequence
  Description of Artificial Sequence: Synthetic epitope
KERLFAAGAL

SEQ ID NO: 20822 - protein, 10 aa, Artificial Sequence
  Description of Artificial Sequence: Synthetic epitope
KERLRSKQQS

SEQ ID NO: 20823 - protein, 10 aa, Artificial Sequence
  Description of Artificial Sequence: Synthetic epitope
KERNVQIAAI

SEQ ID NO: 20824 - protein, 10 aa, Artificial Sequence
  Description of Artificial Sequence: Synthetic epitope
KERNVRIREI

SEQ ID NO: 20825 - protein, 10 aa, Artificial Sequence
  Description of Artificial Sequence: Synthetic epitope
KERNVVHSEI

SEQ ID NO: 20826 - protein, 10 aa, Artificial Sequence
  Description of Artificial Sequence: Synthetic epitope
KERQKTAGDG

SEQ ID NO: 20827 - protein, 10 aa, Artificial Sequence
  Description of Artificial Sequence: Synthetic epitope
KERRELKQAQ

SEQ ID NO: 20828 - protein, 10 aa, Artificial Sequence
  Description of Artificial Sequence: Synthetic epitope
KERRMLATDG

SEQ ID NO: 20829 - protein, 10 aa, Artificial Sequence
  Description of Artificial Sequence: Synthetic epitope
KERSESSEKH

SEQ ID NO: 20830 - protein, 10 aa, Artificial Sequence
  Description of Artificial Sequence: Synthetic epitope
KERSKEKENE

SEQ ID NO: 20831 - protein, 10 aa, Artificial Sequence
  Description of Artificial Sequence: Synthetic epitope
KERSQVRRQS

SEQ ID NO: 20832 - protein, 10 aa, Artificial Sequence
  Description of Artificial Sequence: Synthetic epitope
KERSSLSSRQ

SEQ ID NO: 20833 - protein, 10 aa, Artificial Sequence
  Description of Artificial Sequence: Synthetic epitope
KERTAAVYAD

SEQ ID NO: 20834 - protein, 10 aa, Artificial Sequence
  Description of Artificial Sequence: Synthetic epitope
KERTRSLLRE

SEQ ID NO: 20835 - protein, 10 aa, Artificial Sequence
  Description of Artificial Sequence: Synthetic epitope
KERVALSHSS

SEQ ID NO: 20836 - protein, 10 aa, Artificial Sequence
  Description of Artificial Sequence: Synthetic epitope
KERVKSVFHA

SEQ ID NO: 20837 - protein, 10 aa, Artificial Sequence
  Description of Artificial Sequence: Synthetic epitope
KERVRASLSD

SEQ ID NO: 20838 - protein, 10 aa, Artificial Sequence
  Description of Artificial Sequence: Synthetic epitope
KESAKEAGAA

SEQ ID NO: 20839 - protein, 10 aa, Artificial Sequence
  Description of Artificial Sequence: Synthetic epitope
KESALEAKYQ

SEQ ID NO: 20840 - protein, 10 aa, Artificial Sequence
  Description of Artificial Sequence: Synthetic epitope
KESAMHKESK

SEQ ID NO: 20841 - protein, 10 aa, Artificial Sequence
  Description of Artificial Sequence: Synthetic epitope
KESASQTRDV

SEQ ID NO: 20842 - protein, 10 aa, Artificial Sequence
  Description of Artificial Sequence: Synthetic epitope
KESATEEKLT

SEQ ID NO: 20843 - protein, 10 aa, Artificial Sequence
  Description of Artificial Sequence: Synthetic epitope
KESDAMSTQD

SEQ ID NO: 20844 - protein, 10 aa, Artificial Sequence
  Description of Artificial Sequence: Synthetic epitope
KESDDKPTEH

SEQ ID NO: 20845 - protein, 10 aa, Artificial Sequence
  Description of Artificial Sequence: Synthetic epitope
KESDQTAIDQ

SEQ ID NO: 20846 - protein, 10 aa, Artificial Sequence
  Description of Artificial Sequence: Synthetic epitope
KESEAQRGKT

SEQ ID NO: 20847 - protein, 10 aa, Artificial Sequence
  Description of Artificial Sequence: Synthetic epitope
KESEEIRTPN

SEQ ID NO: 20848 - protein, 10 aa, Artificial Sequence
  Description of Artificial Sequence: Synthetic epitope
KESEHDQQAE

SEQ ID NO: 20849 - protein, 10 aa, Artificial Sequence
  Description of Artificial Sequence: Synthetic epitope
KESETLTEQD

SEQ ID NO: 20850 - protein, 10 aa, Artificial Sequence
  Description of Artificial Sequence: Synthetic epitope
KESETSREDE

SEQ ID NO: 20851 - protein, 10 aa, Artificial Sequence
  Description of Artificial Sequence: Synthetic epitope
KESGHKKETA

SEQ ID NO: 20852 - protein, 10 aa, Artificial Sequence
  Description of Artificial Sequence: Synthetic epitope
KESGPLESEA

SEQ ID NO: 20853 - protein, 10 aa, Artificial Sequence
  Description of Artificial Sequence: Synthetic epitope
KESGPSGIET

SEQ ID NO: 20854 - protein, 10 aa, Artificial Sequence
  Description of Artificial Sequence: Synthetic epitope
KESGTTESSA

SEQ ID NO: 20855 - protein, 10 aa, Artificial Sequence
  Description of Artificial Sequence: Synthetic epitope
KESIARARAG

SEQ ID NO: 20856 - protein, 10 aa, Artificial Sequence
  Description of Artificial Sequence: Synthetic epitope
KESIIKSEGE

SEQ ID NO: 20857 - protein, 10 aa, Artificial Sequence
  Description of Artificial Sequence: Synthetic epitope
KESKKHEKLE

SEQ ID NO: 20858 - protein, 10 aa, Artificial Sequence
  Description of Artificial Sequence: Synthetic epitope
KESKYYTRKI

SEQ ID NO: 20859 - protein, 10 aa, Artificial Sequence
  Description of Artificial Sequence: Synthetic epitope
KESLKVTKGS

SEQ ID NO: 20860 - protein, 10 aa, Artificial Sequence
  Description of Artificial Sequence: Synthetic epitope
KESLQESVED

SEQ ID NO: 20861 - protein, 10 aa, Artificial Sequence
  Description of Artificial Sequence: Synthetic epitope
KESLQETKAR

SEQ ID NO: 20862 - protein, 10 aa, Artificial Sequence
  Description of Artificial Sequence: Synthetic epitope
KESLQINIEE

SEQ ID NO: 20863 - protein, 10 aa, Artificial Sequence
  Description of Artificial Sequence: Synthetic epitope
KESLSEVEEK

SEQ ID NO: 20864 - protein, 10 aa, Artificial Sequence
  Description of Artificial Sequence: Synthetic epitope
KESLSSRTEA

SEQ ID NO: 20865 - protein, 10 aa, Artificial Sequence
  Description of Artificial Sequence: Synthetic epitope
KESLSYVVES

SEQ ID NO: 20866 - protein, 10 aa, Artificial Sequence
  Description of Artificial Sequence: Synthetic epitope
KESLTPLSSE

SEQ ID NO: 20867 - protein, 10 aa, Artificial Sequence
  Description of Artificial Sequence: Synthetic epitope
KESLVAAESG

SEQ ID NO: 20868 - protein, 10 aa, Artificial Sequence
  Description of Artificial Sequence: Synthetic epitope
KESMATGSIP

SEQ ID NO: 20869 - protein, 10 aa, Artificial Sequence
  Description of Artificial Sequence: Synthetic epitope
KESNQSAVQK

SEQ ID NO: 20870 - protein, 10 aa, Artificial Sequence
  Description of Artificial Sequence: Synthetic epitope
KESQDKNDHI

SEQ ID NO: 20871 - protein, 10 aa, Artificial Sequence
  Description of Artificial Sequence: Synthetic epitope
KESQKNSAMS

SEQ ID NO: 20872 - protein, 10 aa, Artificial Sequence
  Description of Artificial Sequence: Synthetic epitope
KESQLPTVMD

SEQ ID NO: 20873 - protein, 10 aa, Artificial Sequence
  Description of Artificial Sequence: Synthetic epitope
KESQMLTNLK

SEQ ID NO: 20874 - protein, 10 aa, Artificial Sequence
  Description of Artificial Sequence: Synthetic epitope
KESQRASQVT

SEQ ID NO: 20875 - protein, 10 aa, Artificial Sequence
  Description of Artificial Sequence: Synthetic epitope
KESQWDPTWL

SEQ ID NO: 20876 - protein, 10 aa, Artificial Sequence
  Description of Artificial Sequence: Synthetic epitope
KESRGAHARE

SEQ ID NO: 20877 - protein, 10 aa, Artificial Sequence
  Description of Artificial Sequence: Synthetic epitope
KESRGARGVR

SEQ ID NO: 20878 - protein, 10 aa, Artificial Sequence
  Description of Artificial Sequence: Synthetic epitope
KESRGSMNAR

SEQ ID NO: 20879 - protein, 10 aa, Artificial Sequence
  Description of Artificial Sequence: Synthetic epitope
KESRQTSKLK

SEQ ID NO: 20880 - protein, 10 aa, Artificial Sequence
  Description of Artificial Sequence: Synthetic epitope
KESRSLKESI

SEQ ID NO: 20881 - protein, 10 aa, Artificial Sequence
  Description of Artificial Sequence: Synthetic epitope
KESRSVHNHL

SEQ ID NO: 20882 - protein, 10 aa, Artificial Sequence
  Description of Artificial Sequence: Synthetic epitope
KESSAVPARS

SEQ ID NO: 20883 - protein, 10 aa, Artificial Sequence
  Description of Artificial Sequence: Synthetic epitope
KESSNNEQDN

SEQ ID NO: 20884 - protein, 10 aa, Artificial Sequence
  Description of Artificial Sequence: Synthetic epitope
KESSNSVSNH

SEQ ID NO: 20885 - protein, 10 aa, Artificial Sequence
  Description of Artificial Sequence: Synthetic epitope
KESSRRYEEQ

SEQ ID NO: 20886 - protein, 10 aa, Artificial Sequence
  Description of Artificial Sequence: Synthetic epitope
KESSTADSEA

SEQ ID NO: 20887 - protein, 10 aa, Artificial Sequence
  Description of Artificial Sequence: Synthetic epitope
KESSVKTVRS

SEQ ID NO: 20888 - protein, 10 aa, Artificial Sequence
  Description of Artificial Sequence: Synthetic epitope
KESTERTVSK

SEQ ID NO: 20889 - protein, 10 aa, Artificial Sequence
  Description of Artificial Sequence: Synthetic epitope
KESTLKFRTE

SEQ ID NO: 20890 - protein, 10 aa, Artificial Sequence
  Description of Artificial Sequence: Synthetic epitope
KESTQTTAPH

SEQ ID NO: 20891 - protein, 10 aa, Artificial Sequence
  Description of Artificial Sequence: Synthetic epitope
KESVDSSLKE

SEQ ID NO: 20892 - protein, 10 aa, Artificial Sequence
  Description of Artificial Sequence: Synthetic epitope
KESVEKAAKP

SEQ ID NO: 20893 - protein, 10 aa, Artificial Sequence
  Description of Artificial Sequence: Synthetic epitope
KESVIISRGE

SEQ ID NO: 20894 - protein, 10 aa, Artificial Sequence
  Description of Artificial Sequence: Synthetic epitope
KESVIRPENN

SEQ ID NO: 20895 - protein, 10 aa, Artificial Sequence
  Description of Artificial Sequence: Synthetic epitope
KESVQIQKKV

SEQ ID NO: 20896 - protein, 10 aa, Artificial Sequence
  Description of Artificial Sequence: Synthetic epitope
KESVRKAAEL

SEQ ID NO: 20897 - protein, 10 aa, Artificial Sequence
  Description of Artificial Sequence: Synthetic epitope
KESWIVSGTQ

SEQ ID NO: 20898 - protein, 10 aa, Artificial Sequence
  Description of Artificial Sequence: Synthetic epitope
KETAAMKADL

SEQ ID NO: 20899 - protein, 10 aa, Artificial Sequence
  Description of Artificial Sequence: Synthetic epitope
KETAGEKLGK

SEQ ID NO: 20900 - protein, 10 aa, Artificial Sequence
  Description of Artificial Sequence: Synthetic epitope
KETAIETKVT

SEQ ID NO: 20901 - protein, 10 aa, Artificial Sequence
  Description of Artificial Sequence: Synthetic epitope
KETDKRHVEQ

SEQ ID NO: 20902 - protein, 10 aa, Artificial Sequence
  Description of Artificial Sequence: Synthetic epitope
KETDTATLRA

SEQ ID NO: 20903 - protein, 10 aa, Artificial Sequence
  Description of Artificial Sequence: Synthetic epitope
KETEAEAQEV

SEQ ID NO: 20904 - protein, 10 aa, Artificial Sequence
  Description of Artificial Sequence: Synthetic epitope
KETEARDEMG

SEQ ID NO: 20905 - protein, 10 aa, Artificial Sequence
  Description of Artificial Sequence: Synthetic epitope
KETEASYKAQ

SEQ ID NO: 20906 - protein, 10 aa, Artificial Sequence
  Description of Artificial Sequence: Synthetic epitope
KETEAVLQVG

SEQ ID NO: 20907 - protein, 10 aa, Artificial Sequence
  Description of Artificial Sequence: Synthetic epitope
KETEKALSRQ

SEQ ID NO: 20908 - protein, 10 aa, Artificial Sequence
  Description of Artificial Sequence: Synthetic epitope
KETELPSSQN

SEQ ID NO: 20909 - protein, 10 aa, Artificial Sequence
  Description of Artificial Sequence: Synthetic epitope
KETEQLEIKE

SEQ ID NO: 20910 - protein, 10 aa, Artificial Sequence
  Description of Artificial Sequence: Synthetic epitope
KETFINTVPH

SEQ ID NO: 20911 - protein, 10 aa, Artificial Sequence
  Description of Artificial Sequence: Synthetic epitope
KETFSGKEKN

SEQ ID NO: 20912 - protein, 10 aa, Artificial Sequence
  Description of Artificial Sequence: Synthetic epitope
KETFSKKAED

SEQ ID NO: 20913 - protein, 10 aa, Artificial Sequence
  Description of Artificial Sequence: Synthetic epitope
KETIKAALSR

SEQ ID NO: 20914 - protein, 10 aa, Artificial Sequence
  Description of Artificial Sequence: Synthetic epitope
KETILALKEE

SEQ ID NO: 20915 - protein, 10 aa, Artificial Sequence
  Description of Artificial Sequence: Synthetic epitope
KETIPLQETS

SEQ ID NO: 20916 - protein, 10 aa, Artificial Sequence
  Description of Artificial Sequence: Synthetic epitope
KETIQALRAN

SEQ ID NO: 20917 - protein, 10 aa, Artificial Sequence
  Description of Artificial Sequence: Synthetic epitope
KETISQATSE

SEQ ID NO: 20918 - protein, 10 aa, Artificial Sequence
  Description of Artificial Sequence: Synthetic epitope
KETISTANKA

SEQ ID NO: 20919 - protein, 10 aa, Artificial Sequence
  Description of Artificial Sequence: Synthetic epitope
KETKWSSTHS

SEQ ID NO: 20920 - protein, 10 aa, Artificial Sequence
  Description of Artificial Sequence: Synthetic epitope
KETLALELHG

SEQ ID NO: 20921 - protein, 10 aa, Artificial Sequence
  Description of Artificial Sequence: Synthetic epitope
KETLAQAQAE

SEQ ID NO: 20922 - protein, 10 aa, Artificial Sequence
  Description of Artificial Sequence: Synthetic epitope
KETLITIMKT

SEQ ID NO: 20923 - protein, 10 aa, Artificial Sequence
  Description of Artificial Sequence: Synthetic epitope
KETLLAMFKY

SEQ ID NO: 20924 - protein, 10 aa, Artificial Sequence
  Description of Artificial Sequence: Synthetic epitope
KETLNANINS

SEQ ID NO: 20925 - protein, 10 aa, Artificial Sequence
  Description of Artificial Sequence: Synthetic epitope
KETLQSEEQQ

SEQ ID NO: 20926 - protein, 10 aa, Artificial Sequence
  Description of Artificial Sequence: Synthetic epitope
KETLSRRGPS

SEQ ID NO: 20927 - protein, 10 aa, Artificial Sequence
  Description of Artificial Sequence: Synthetic epitope
KETLTGELAG

SEQ ID NO: 20928 - protein, 10 aa, Artificial Sequence
  Description of Artificial Sequence: Synthetic epitope
KETLVKRLKK

SEQ ID NO: 20929 - protein, 10 aa, Artificial Sequence
  Description of Artificial Sequence: Synthetic epitope
KETMVTSTTE

SEQ ID NO: 20930 - protein, 10 aa, Artificial Sequence
  Description of Artificial Sequence: Synthetic epitope
KETNQLKTKL

SEQ ID NO: 20931 - protein, 10 aa, Artificial Sequence
  Description of Artificial Sequence: Synthetic epitope
KETNSESEME

SEQ ID NO: 20932 - protein, 10 aa, Artificial Sequence
  Description of Artificial Sequence: Synthetic epitope
KETQEARKSS

SEQ ID NO: 20933 - protein, 10 aa, Artificial Sequence
  Description of Artificial Sequence: Synthetic epitope
KETQELVSEA

SEQ ID NO: 20934 - protein, 10 aa, Artificial Sequence
  Description of Artificial Sequence: Synthetic epitope
KETQGMNYWQ

SEQ ID NO: 20935 - protein, 10 aa, Artificial Sequence
  Description of Artificial Sequence: Synthetic epitope
KETQLVDKIV

SEQ ID NO: 20936 - protein, 10 aa, Artificial Sequence
  Description of Artificial Sequence: Synthetic epitope
KETQMVKIKE

SEQ ID NO: 20937 - protein, 10 aa, Artificial Sequence
  Description of Artificial Sequence: Synthetic epitope
KETRKIMRAL

SEQ ID NO: 20938 - protein, 10 aa, Artificial Sequence
  Description of Artificial Sequence: Synthetic epitope
KETSLVEPEK

SEQ ID NO: 20939 - protein, 10 aa, Artificial Sequence
  Description of Artificial Sequence: Synthetic epitope
KETSNKIKIL

SEQ ID NO: 20940 - protein, 10 aa, Artificial Sequence
  Description of Artificial Sequence: Synthetic epitope
KETSSEYQSR

SEQ ID NO: 20941 - protein, 10 aa, Artificial Sequence
  Description of Artificial Sequence: Synthetic epitope
KETTDQMIKT

SEQ ID NO: 20942 - protein, 10 aa, Artificial Sequence
  Description of Artificial Sequence: Synthetic epitope
KETTEKTKDS

SEQ ID NO: 20943 - protein, 10 aa, Artificial Sequence
  Description of Artificial Sequence: Synthetic epitope
KETTSATSSP

SEQ ID NO: 20944 - protein, 10 aa, Artificial Sequence
  Description of Artificial Sequence: Synthetic epitope
KETTVKKAVV

SEQ ID NO: 20945 - protein, 10 aa, Artificial Sequence
  Description of Artificial Sequence: Synthetic epitope
KETVDQVEEL

SEQ ID NO: 20946 - protein, 10 aa, Artificial Sequence
  Description of Artificial Sequence: Synthetic epitope
KETVIIPNEK

SEQ ID NO: 20947 - protein, 10 aa, Artificial Sequence
  Description of Artificial Sequence: Synthetic epitope
KETVMMGDSM

SEQ ID NO: 20948 - protein, 10 aa, Artificial Sequence
  Description of Artificial Sequence: Synthetic epitope
KETVQTTEDQ

SEQ ID NO: 20949 - protein, 10 aa, Artificial Sequence
  Description of Artificial Sequence: Synthetic epitope
KETYANVHEK

SEQ ID NO: 20950 - protein, 10 aa, Artificial Sequence
  Description of Artificial Sequence: Synthetic epitope
KETYENTSHQ

SEQ ID NO: 20951 - protein, 10 aa, Artificial Sequence
  Description of Artificial Sequence: Synthetic epitope
KETYEVEAST

SEQ ID NO: 20952 - protein, 10 aa, Artificial Sequence
  Description of Artificial Sequence: Synthetic epitope
KEVAAQKPSE

SEQ ID NO: 20953 - protein, 10 aa, Artificial Sequence
  Description of Artificial Sequence: Synthetic epitope
KEVAERLAAN

SEQ ID NO: 20954 - protein, 10 aa, Artificial Sequence
  Description of Artificial Sequence: Synthetic epitope
KEVAHVLTKP

SEQ ID NO: 20955 - protein, 10 aa, Artificial Sequence
  Description of Artificial Sequence: Synthetic epitope
KEVAKGSIGR

SEQ ID NO: 20956 - protein, 10 aa, Artificial Sequence
  Description of Artificial Sequence: Synthetic epitope
KEVATAIRGA

SEQ ID NO: 20957 - protein, 10 aa, Artificial Sequence
  Description of Artificial Sequence: Synthetic epitope
KEVATLSKEL

SEQ ID NO: 20958 - protein, 10 aa, Artificial Sequence
  Description of Artificial Sequence: Synthetic epitope
KEVDGKSRDS

SEQ ID NO: 20959 - protein, 10 aa, Artificial Sequence
  Description of Artificial Sequence: Synthetic epitope
KEVEASLPIA

SEQ ID NO: 20960 - protein, 10 aa, Artificial Sequence
  Description of Artificial Sequence: Synthetic epitope
KEVEKMNKKM

SEQ ID NO: 20961 - protein, 10 aa, Artificial Sequence
  Description of Artificial Sequence: Synthetic epitope
KEVESILKKN

SEQ ID NO: 20962 - protein, 10 aa, Artificial Sequence
  Description of Artificial Sequence: Synthetic epitope
KEVEVQLLPE

SEQ ID NO: 20963 - protein, 10 aa, Artificial Sequence
  Description of Artificial Sequence: Synthetic epitope
KEVFESRNGD

SEQ ID NO: 20964 - protein, 10 aa, Artificial Sequence
  Description of Artificial Sequence: Synthetic epitope
KEVFESSKMD

SEQ ID NO: 20965 - protein, 10 aa, Artificial Sequence
  Description of Artificial Sequence: Synthetic epitope
KEVGSMKADD

SEQ ID NO: 20966 - protein, 10 aa, Artificial Sequence
  Description of Artificial Sequence: Synthetic epitope
KEVIHKHFYL

SEQ ID NO: 20967 - protein, 10 aa, Artificial Sequence
  Description of Artificial Sequence: Synthetic epitope
KEVISQLTRV

SEQ ID NO: 20968 - protein, 10 aa, Artificial Sequence
  Description of Artificial Sequence: Synthetic epitope
KEVKGGKQEK

SEQ ID NO: 20969 - protein, 10 aa, Artificial Sequence
  Description of Artificial Sequence: Synthetic epitope
KEVKNEESEK

SEQ ID NO: 20970 - protein, 10 aa, Artificial Sequence
  Description of Artificial Sequence: Synthetic epitope
KEVKVAKPEE

SEQ ID NO: 20971 - protein, 10 aa, Artificial Sequence
  Description of Artificial Sequence: Synthetic epitope
KEVLASSQEA

SEQ ID NO: 20972 - protein, 10 aa, Artificial Sequence
  Description of Artificial Sequence: Synthetic epitope
KEVLESVTEL

SEQ ID NO: 20973 - protein, 10 aa, Artificial Sequence
  Description of Artificial Sequence: Synthetic epitope
KEVLRSEAGI

SEQ ID NO: 20974 - protein, 10 aa, Artificial Sequence
  Description of Artificial Sequence: Synthetic epitope
KEVQADKEQS

SEQ ID NO: 20975 - protein, 10 aa, Artificial Sequence
  Description of Artificial Sequence: Synthetic epitope
KEVQSNMVPR

SEQ ID NO: 20976 - protein, 10 aa, Artificial Sequence
  Description of Artificial Sequence: Synthetic epitope
KEVQTVTSIQ

SEQ ID NO: 20977 - protein, 10 aa, Artificial Sequence
  Description of Artificial Sequence: Synthetic epitope
KEVRAMVGSD

SEQ ID NO: 20978 - protein, 10 aa, Artificial Sequence
  Description of Artificial Sequence: Synthetic epitope
KEVRLLAVQK

SEQ ID NO: 20979 - protein, 10 aa, Artificial Sequence
  Description of Artificial Sequence: Synthetic epitope
KEVRTGKNTD

SEQ ID NO: 20980 - protein, 10 aa, Artificial Sequence
  Description of Artificial Sequence: Synthetic epitope
KEVSEKAKTL

SEQ ID NO: 20981 - protein, 10 aa, Artificial Sequence
  Description of Artificial Sequence: Synthetic epitope
KEVSFSNKPY

SEQ ID NO: 20982 - protein, 10 aa, Artificial Sequence
  Description of Artificial Sequence: Synthetic epitope
KEVSQEKETD

SEQ ID NO: 20983 - protein, 10 aa, Artificial Sequence
  Description of Artificial Sequence: Synthetic epitope
KEVSRLSDYE

SEQ ID NO: 20984 - protein, 10 aa, Artificial Sequence
  Description of Artificial Sequence: Synthetic epitope
KEVSRMSHSS

SEQ ID NO: 20985 - protein, 10 aa, Artificial Sequence
  Description of Artificial Sequence: Synthetic epitope
KEVSVETVSI

SEQ ID NO: 20986 - protein, 10 aa, Artificial Sequence
  Description of Artificial Sequence: Synthetic epitope
KEVSWREFMK

SEQ ID NO: 20987 - protein, 10 aa, Artificial Sequence
  Description of Artificial Sequence: Synthetic epitope
KEVTAAREAL

SEQ ID NO: 20988 - protein, 10 aa, Artificial Sequence
  Description of Artificial Sequence: Synthetic epitope
KEVTEEVANK

SEQ ID NO: 20989 - protein, 10 aa, Artificial Sequence
  Description of Artificial Sequence: Synthetic epitope
KEVTLAQRKI

SEQ ID NO: 20990 - protein, 10 aa, Artificial Sequence
  Description of Artificial Sequence: Synthetic epitope
KEVVENIMLT

SEQ ID NO: 20991 - protein, 10 aa, Artificial Sequence
  Description of Artificial Sequence: Synthetic epitope
KEVVEVGQKL

SEQ ID NO: 20992 - protein, 10 aa, Artificial Sequence
  Description of Artificial Sequence: Synthetic epitope
KEVVNAIIES

SEQ ID NO: 20993 - protein, 10 aa, Artificial Sequence
  Description of Artificial Sequence: Synthetic epitope
KEWADILNHK

SEQ ID NO: 20994 - protein, 10 aa, Artificial Sequence
  Description of Artificial Sequence: Synthetic epitope
KEWKRNDKIE

SEQ ID NO: 20995 - protein, 10 aa, Artificial Sequence
  Description of Artificial Sequence: Synthetic epitope
KEWSMKTDVT

SEQ ID NO: 20996 - protein, 10 aa, Artificial Sequence
  Description of Artificial Sequence: Synthetic epitope
KEYAASKFIT

SEQ ID NO: 20997 - protein, 10 aa, Artificial Sequence
  Description of Artificial Sequence: Synthetic epitope
KEYEKEQDKP

SEQ ID NO: 20998 - protein, 10 aa, Artificial Sequence
  Description of Artificial Sequence: Synthetic epitope
KEYLQSLSYK

SEQ ID NO: 20999 - protein, 10 aa, Artificial Sequence
  Description of Artificial Sequence: Synthetic epitope
KEYLTTAFEV

SEQ ID NO: 21000 - protein, 10 aa, Artificial Sequence
  Description of Artificial Sequence: Synthetic epitope
KEYLVLTLTK

SEQ ID NO: 21001 - protein, 10 aa, Artificial Sequence
  Description of Artificial Sequence: Synthetic epitope
KEYSQKAVEI

SEQ ID NO: 21002 - protein, 10 aa, Artificial Sequence
  Description of Artificial Sequence: Synthetic epitope
KEYSTRDKVK

SEQ ID NO: 21003 - protein, 10 aa, Artificial Sequence
  Description of Artificial Sequence: Synthetic epitope
KEYTSNVFLQ

SEQ ID NO: 21004 - protein, 10 aa, Artificial Sequence
  Description of Artificial Sequence: Synthetic epitope
KEYTVGTKAM

SEQ ID NO: 21005 - protein, 10 aa, Artificial Sequence
  Description of Artificial Sequence: Synthetic epitope
KFAENLKAGD

SEQ ID NO: 21006 - protein, 10 aa, Artificial Sequence
  Description of Artificial Sequence: Synthetic epitope
KFALRLGSWM

SEQ ID NO: 21007 - protein, 10 aa, Artificial Sequence
  Description of Artificial Sequence: Synthetic epitope
KFAPFEIKEH

SEQ ID NO: 21008 - protein, 10 aa, Artificial Sequence
  Description of Artificial Sequence: Synthetic epitope
KFAPIKREIE

SEQ ID NO: 21009 - protein, 10 aa, Artificial Sequence
  Description of Artificial Sequence: Synthetic epitope
KFATLATDFS

SEQ ID NO: 21010 - protein, 10 aa, Artificial Sequence
  Description of Artificial Sequence: Synthetic epitope
KFDESMTEDE

SEQ ID NO: 21011 - protein, 10 aa, Artificial Sequence
  Description of Artificial Sequence: Synthetic epitope
KFDHRFQPQN

SEQ ID NO: 21012 - protein, 10 aa, Artificial Sequence
  Description of Artificial Sequence: Synthetic epitope
KFDIPSMEST

SEQ ID NO: 21013 - protein, 10 aa, Artificial Sequence
  Description of Artificial Sequence: Synthetic epitope
KFDQLNIQRT

SEQ ID NO: 21014 - protein, 10 aa, Artificial Sequence
  Description of Artificial Sequence: Synthetic epitope
KFDRGALHDE

SEQ ID NO: 21015 - protein, 10 aa, Artificial Sequence
  Description of Artificial Sequence: Synthetic epitope
KFDWAARFSP

SEQ ID NO: 21016 - protein, 10 aa, Artificial Sequence
  Description of Artificial Sequence: Synthetic epitope
KFENGKARAK

SEQ ID NO: 21017 - protein, 10 aa, Artificial Sequence
  Description of Artificial Sequence: Synthetic epitope
KFEQSDLEAF

SEQ ID NO: 21018 - protein, 10 aa, Artificial Sequence
  Description of Artificial Sequence: Synthetic epitope
KFESLTMGAK

SEQ ID NO: 21019 - protein, 10 aa, Artificial Sequence
  Description of Artificial Sequence: Synthetic epitope
KFEVKVQVPK

SEQ ID NO: 21020 - protein, 10 aa, Artificial Sequence
  Description of Artificial Sequence: Synthetic epitope
KFEVNTQSVA

SEQ ID NO: 21021 - protein, 10 aa, Artificial Sequence
  Description of Artificial Sequence: Synthetic epitope
KFFLEEANTN

SEQ ID NO: 21022 - protein, 10 aa, Artificial Sequence
  Description of Artificial Sequence: Synthetic epitope
KFFLMVNKQG

SEQ ID NO: 21023 - protein, 10 aa, Artificial Sequence
  Description of Artificial Sequence: Synthetic epitope
KFFMEQHVEN

SEQ ID NO: 21024 - protein, 10 aa, Artificial Sequence
  Description of Artificial Sequence: Synthetic epitope
KFFREAEETN

SEQ ID NO: 21025 - protein, 10 aa, Artificial Sequence
  Description of Artificial Sequence: Synthetic epitope
KFFRGRSTIK

SEQ ID NO: 21026 - protein, 10 aa, Artificial Sequence
  Description of Artificial Sequence: Synthetic epitope
KFFVVFRHPV

SEQ ID NO: 21027 - protein, 10 aa, Artificial Sequence
  Description of Artificial Sequence: Synthetic epitope
KFGADKADRI

SEQ ID NO: 21028 - protein, 10 aa, Artificial Sequence
  Description of Artificial Sequence: Synthetic epitope
KFGAEIKANV

SEQ ID NO: 21029 - protein, 10 aa, Artificial Sequence
  Description of Artificial Sequence: Synthetic epitope
KFGKGAKKTS

SEQ ID NO: 21030 - protein, 10 aa, Artificial Sequence
  Description of Artificial Sequence: Synthetic epitope
KFGSTKMKKG

SEQ ID NO: 21031 - protein, 10 aa, Artificial Sequence
  Description of Artificial Sequence: Synthetic epitope
KFGWAQKISK

SEQ ID NO: 21032 - protein, 10 aa, Artificial Sequence
  Description of Artificial Sequence: Synthetic epitope
KFHSRALYYK

SEQ ID NO: 21033 - protein, 10 aa, Artificial Sequence
  Description of Artificial Sequence: Synthetic epitope
KFHTEKVSQD

SEQ ID NO: 21034 - protein, 10 aa, Artificial Sequence
  Description of Artificial Sequence: Synthetic epitope
KFIFTSSEIA

SEQ ID NO: 21035 - protein, 10 aa, Artificial Sequence
  Description of Artificial Sequence: Synthetic epitope
KFIQEAKEID

SEQ ID NO: 21036 - protein, 10 aa, Artificial Sequence
  Description of Artificial Sequence: Synthetic epitope
KFISKNKHVS

SEQ ID NO: 21037 - protein, 10 aa, Artificial Sequence
  Description of Artificial Sequence: Synthetic epitope
KFITMRFKRE

SEQ ID NO: 21038 - protein, 10 aa, Artificial Sequence
  Description of Artificial Sequence: Synthetic epitope
KFKAARLQQK

SEQ ID NO: 21039 - protein, 10 aa, Artificial Sequence
  Description of Artificial Sequence: Synthetic epitope
KFKGSIGSSD

SEQ ID NO: 21040 - protein, 10 aa, Artificial Sequence
  Description of Artificial Sequence: Synthetic epitope
KFKLEPHDDQ

SEQ ID NO: 21041 - protein, 10 aa, Artificial Sequence
  Description of Artificial Sequence: Synthetic epitope
KFKLITEDVQ

SEQ ID NO: 21042 - protein, 10 aa, Artificial Sequence
  Description of Artificial Sequence: Synthetic epitope
KFKLQNTSVQ

SEQ ID NO: 21043 - protein, 10 aa, Artificial Sequence
  Description of Artificial Sequence: Synthetic epitope
KFKLRTSKKH

SEQ ID NO: 21044 - protein, 10 aa, Artificial Sequence
  Description of Artificial Sequence: Synthetic epitope
KFKNMLFPMI

SEQ ID NO: 21045 - protein, 10 aa, Artificial Sequence
  Description of Artificial Sequence: Synthetic epitope
KFKRARRVVR

SEQ ID NO: 21046 - protein, 10 aa, Artificial Sequence
  Description of Artificial Sequence: Synthetic epitope
KFLAEKAKES

SEQ ID NO: 21047 - protein, 10 aa, Artificial Sequence
  Description of Artificial Sequence: Synthetic epitope
KFLASRVMAD

SEQ ID NO: 21048 - protein, 10 aa, Artificial Sequence
  Description of Artificial Sequence: Synthetic epitope
KFLDMLIKKL

SEQ ID NO: 21049 - protein, 10 aa, Artificial Sequence
  Description of Artificial Sequence: Synthetic epitope
KFLEEAKQHG

SEQ ID NO: 21050 - protein, 10 aa, Artificial Sequence
  Description of Artificial Sequence: Synthetic epitope
KFLGDASEAY

SEQ ID NO: 21051 - protein, 10 aa, Artificial Sequence
  Description of Artificial Sequence: Synthetic epitope
KFLIKRLAKI

SEQ ID NO: 21052 - protein, 10 aa, Artificial Sequence
  Description of Artificial Sequence: Synthetic epitope
KFLIQILQLM

SEQ ID NO: 21053 - protein, 10 aa, Artificial Sequence
  Description of Artificial Sequence: Synthetic epitope
KFLLKNKQAD

SEQ ID NO: 21054 - protein, 10 aa, Artificial Sequence
  Description of Artificial Sequence: Synthetic epitope
KFLLRLTKGK

SEQ ID NO: 21055 - protein, 10 aa, Artificial Sequence
  Description of Artificial Sequence: Synthetic epitope
KFLLTKMEQQ

SEQ ID NO: 21056 - protein, 10 aa, Artificial Sequence
  Description of Artificial Sequence: Synthetic epitope
KFLMSTKYNK

SEQ ID NO: 21057 - protein, 10 aa, Artificial Sequence
  Description of Artificial Sequence: Synthetic epitope
KFLNALTLNM

SEQ ID NO: 21058 - protein, 10 aa, Artificial Sequence
  Description of Artificial Sequence: Synthetic epitope
KFLNLRSSLS

SEQ ID NO: 21059 - protein, 10 aa, Artificial Sequence
  Description of Artificial Sequence: Synthetic epitope
KFLPWSLARE

SEQ ID NO: 21060 - protein, 10 aa, Artificial Sequence
  Description of Artificial Sequence: Synthetic epitope
KFLQAMAKLY

SEQ ID NO: 21061 - protein, 10 aa, Artificial Sequence
  Description of Artificial Sequence: Synthetic epitope
KFLRSALKEL

SEQ ID NO: 21062 - protein, 10 aa, Artificial Sequence
  Description of Artificial Sequence: Synthetic epitope
KFLRSIIKTT

SEQ ID NO: 21063 - protein, 10 aa, Artificial Sequence
  Description of Artificial Sequence: Synthetic epitope
KFLSAGVKQS

SEQ ID NO: 21064 - protein, 10 aa, Artificial Sequence
  Description of Artificial Sequence: Synthetic epitope
KFLSKLLSIF

SEQ ID NO: 21065 - protein, 10 aa, Artificial Sequence
  Description of Artificial Sequence: Synthetic epitope
KFLSTVLGKS

SEQ ID NO: 21066 - protein, 10 aa, Artificial Sequence
  Description of Artificial Sequence: Synthetic epitope
KFLTNETRER

SEQ ID NO: 21067 - protein, 10 aa, Artificial Sequence
  Description of Artificial Sequence: Synthetic epitope
KFLTQIRAQP

SEQ ID NO: 21068 - protein, 10 aa, Artificial Sequence
  Description of Artificial Sequence: Synthetic epitope
KFLTQIRAQP

SEQ ID NO: 21069 - protein, 10 aa, Artificial Sequence
  Description of Artificial Sequence: Synthetic epitope
KFMMKTAQGG

SEQ ID NO: 21070 - protein, 10 aa, Artificial Sequence
  Description of Artificial Sequence: Synthetic epitope
KFMNLQSART

SEQ ID NO: 21071 - protein, 10 aa, Artificial Sequence
  Description of Artificial Sequence: Synthetic epitope
KFNKTRKIEK

SEQ ID NO: 21072 - protein, 10 aa, Artificial Sequence
  Description of Artificial Sequence: Synthetic epitope
KFNVNRVDNM

SEQ ID NO: 21073 - protein, 10 aa, Artificial Sequence
  Description of Artificial Sequence: Synthetic epitope
KFPLLNSETH

SEQ ID NO: 21074 - protein, 10 aa, Artificial Sequence
  Description of Artificial Sequence: Synthetic epitope
KFPLTARVQK

SEQ ID NO: 21075 - protein, 10 aa, Artificial Sequence
  Description of Artificial Sequence: Synthetic epitope
KFPRMSAAMR

SEQ ID NO: 21076 - protein, 10 aa, Artificial Sequence
  Description of Artificial Sequence: Synthetic epitope
KFPSDQSSKS

SEQ ID NO: 21077 - protein, 10 aa, Artificial Sequence
  Description of Artificial Sequence: Synthetic epitope
KFPSSQSSQP

SEQ ID NO: 21078 - protein, 10 aa, Artificial Sequence
  Description of Artificial Sequence: Synthetic epitope
KFQAREKPNV

SEQ ID NO: 21079 - protein, 10 aa, Artificial Sequence
  Description of Artificial Sequence: Synthetic epitope
KFQKKGASQS

SEQ ID NO: 21080 - protein, 10 aa, Artificial Sequence
  Description of Artificial Sequence: Synthetic epitope
KFQNALLVRY

SEQ ID NO: 21081 - protein, 10 aa, Artificial Sequence
  Description of Artificial Sequence: Synthetic epitope
KFQQKNAATE

SEQ ID NO: 21082 - protein, 10 aa, Artificial Sequence
  Description of Artificial Sequence: Synthetic epitope
KFQSLMSEKD

SEQ ID NO: 21083 - protein, 10 aa, Artificial Sequence
  Description of Artificial Sequence: Synthetic epitope
KFQSQRLDYS

SEQ ID NO: 21084 - protein, 10 aa, Artificial Sequence
  Description of Artificial Sequence: Synthetic epitope
KFQSSVVGSS

SEQ ID NO: 21085 - protein, 10 aa, Artificial Sequence
  Description of Artificial Sequence: Synthetic epitope
KFQTTIVTLN

SEQ ID NO: 21086 - protein, 10 aa, Artificial Sequence
  Description of Artificial Sequence: Synthetic epitope
KFRGSKRSQS

SEQ ID NO: 21087 - protein, 10 aa, Artificial Sequence
  Description of Artificial Sequence: Synthetic epitope
KFRIKQKGEY

SEQ ID NO: 21088 - protein, 10 aa, Artificial Sequence
  Description of Artificial Sequence: Synthetic epitope
KFRLILIESR

SEQ ID NO: 21089 - protein, 10 aa, Artificial Sequence
  Description of Artificial Sequence: Synthetic epitope
KFRNLTRKTE

SEQ ID NO: 21090 - protein, 10 aa, Artificial Sequence
  Description of Artificial Sequence: Synthetic epitope
KFRQGSSTSS

SEQ ID NO: 21091 - protein, 10 aa, Artificial Sequence
  Description of Artificial Sequence: Synthetic epitope
KFRSALLIGK

SEQ ID NO: 21092 - protein, 10 aa, Artificial Sequence
  Description of Artificial Sequence: Synthetic epitope
KFRSLESKEQ

SEQ ID NO: 21093 - protein, 10 aa, Artificial Sequence
  Description of Artificial Sequence: Synthetic epitope
KFSAKKSGVT

SEQ ID NO: 21094 - protein, 10 aa, Artificial Sequence
  Description of Artificial Sequence: Synthetic epitope
KFSDAIQSKE

SEQ ID NO: 21095 - protein, 10 aa, Artificial Sequence
  Description of Artificial Sequence: Synthetic epitope
KFSDQTVIKM

SEQ ID NO: 21096 - protein, 10 aa, Artificial Sequence
  Description of Artificial Sequence: Synthetic epitope
KFSEKLVEFP

SEQ ID NO: 21097 - protein, 10 aa, Artificial Sequence
  Description of Artificial Sequence: Synthetic epitope
KFSIAKGLTQ

SEQ ID NO: 21098 - protein, 10 aa, Artificial Sequence
  Description of Artificial Sequence: Synthetic epitope
KFSKINTGMA

SEQ ID NO: 21099 - protein, 10 aa, Artificial Sequence
  Description of Artificial Sequence: Synthetic epitope
KFSMMLREKE

SEQ ID NO: 21100 - protein, 10 aa, Artificial Sequence
  Description of Artificial Sequence: Synthetic epitope
KFSPAMAQEK

SEQ ID NO: 21101 - protein, 10 aa, Artificial Sequence
  Description of Artificial Sequence: Synthetic epitope
KFSSASGASA

SEQ ID NO: 21102 - protein, 10 aa, Artificial Sequence
  Description of Artificial Sequence: Synthetic epitope
KFSSLKYTAK

SEQ ID NO: 21103 - protein, 10 aa, Artificial Sequence
  Description of Artificial Sequence: Synthetic epitope
KFSSQSRDTL

SEQ ID NO: 21104 - protein, 10 aa, Artificial Sequence
  Description of Artificial Sequence: Synthetic epitope
KFTETLVKLS

SEQ ID NO: 21105 - protein, 10 aa, Artificial Sequence
  Description of Artificial Sequence: Synthetic epitope
KFTIKRAETS

SEQ ID NO: 21106 - protein, 10 aa, Artificial Sequence
  Description of Artificial Sequence: Synthetic epitope
KFTNVDIRLT

SEQ ID NO: 21107 - protein, 10 aa, Artificial Sequence
  Description of Artificial Sequence: Synthetic epitope
KFTQQNYHDR

SEQ ID NO: 21108 - protein, 10 aa, Artificial Sequence
  Description of Artificial Sequence: Synthetic epitope
KFVESILSNN

SEQ ID NO: 21109 - protein, 10 aa, Artificial Sequence
  Description of Artificial Sequence: Synthetic epitope
KFVIRPATAA

SEQ ID NO: 21110 - protein, 10 aa, Artificial Sequence
  Description of Artificial Sequence: Synthetic epitope
KFVLATIAEI

SEQ ID NO: 21111 - protein, 10 aa, Artificial Sequence
  Description of Artificial Sequence: Synthetic epitope
KFVQDRVGSG

SEQ ID NO: 21112 - protein, 10 aa, Artificial Sequence
  Description of Artificial Sequence: Synthetic epitope
KFVQSTQNNG

SEQ ID NO: 21113 - protein, 10 aa, Artificial Sequence
  Description of Artificial Sequence: Synthetic epitope
KFVSFLGRTD

SEQ ID NO: 21114 - protein, 10 aa, Artificial Sequence
  Description of Artificial Sequence: Synthetic epitope
KFVSKRADDF

SEQ ID NO: 21115 - protein, 10 aa, Artificial Sequence
  Description of Artificial Sequence: Synthetic epitope
KFVVIEPISE

SEQ ID NO: 21116 - protein, 10 aa, Artificial Sequence
  Description of Artificial Sequence: Synthetic epitope
KFWAKLSAKK

SEQ ID NO: 21117 - protein, 10 aa, Artificial Sequence
  Description of Artificial Sequence: Synthetic epitope
KFWAQTNTND

SEQ ID NO: 21118 - protein, 10 aa, Artificial Sequence
  Description of Artificial Sequence: Synthetic epitope
KFWQHRIKDY

SEQ ID NO: 21119 - protein, 10 aa, Artificial Sequence
  Description of Artificial Sequence: Synthetic epitope
KFWTNELTDT

SEQ ID NO: 21120 - protein, 10 aa, Artificial Sequence
  Description of Artificial Sequence: Synthetic epitope
KFYITQLKTD

SEQ ID NO: 21121 - protein, 10 aa, Artificial Sequence
  Description of Artificial Sequence: Synthetic epitope
KFYLSRSVVL

SEQ ID NO: 21122 - protein, 10 aa, Artificial Sequence
  Description of Artificial Sequence: Synthetic epitope
KFYQSSNKRL

SEQ ID NO: 21123 - protein, 10 aa, Artificial Sequence
  Description of Artificial Sequence: Synthetic epitope
KGAAKDAAHM

SEQ ID NO: 21124 - protein, 10 aa, Artificial Sequence
  Description of Artificial Sequence: Synthetic epitope
KGAALSSLDK

SEQ ID NO: 21125 - protein, 10 aa, Artificial Sequence
  Description of Artificial Sequence: Synthetic epitope
KGAALVEAGL

SEQ ID NO: 21126 - protein, 10 aa, Artificial Sequence
  Description of Artificial Sequence: Synthetic epitope
KGAASSVLEL

SEQ ID NO: 21127 - protein, 10 aa, Artificial Sequence
  Description of Artificial Sequence: Synthetic epitope
KGAAVSKGQV

SEQ ID NO: 21128 - protein, 10 aa, Artificial Sequence
  Description of Artificial Sequence: Synthetic epitope
KGADKTVKGP

SEQ ID NO: 21129 - protein, 10 aa, Artificial Sequence
  Description of Artificial Sequence: Synthetic epitope
KGADQYKAKK

SEQ ID NO: 21130 - protein, 10 aa, Artificial Sequence
  Description of Artificial Sequence: Synthetic epitope
KGAEKSVLYS

SEQ ID NO: 21131 - protein, 10 aa, Artificial Sequence
  Description of Artificial Sequence: Synthetic epitope
KGAKEKTPDE

SEQ ID NO: 21132 - protein, 10 aa, Artificial Sequence
  Description of Artificial Sequence: Synthetic epitope
KGAKLLGKED

SEQ ID NO: 21133 - protein, 10 aa, Artificial Sequence
  Description of Artificial Sequence: Synthetic epitope
KGALELTVKK

SEQ ID NO: 21134 - protein, 10 aa, Artificial Sequence
  Description of Artificial Sequence: Synthetic epitope
KGALQRSKTL

SEQ ID NO: 21135 - protein, 10 aa, Artificial Sequence
  Description of Artificial Sequence: Synthetic epitope
KGAQAIFNEL

SEQ ID NO: 21136 - protein, 10 aa, Artificial Sequence
  Description of Artificial Sequence: Synthetic epitope
KGAQVNQTER

SEQ ID NO: 21137 - protein, 10 aa, Artificial Sequence
  Description of Artificial Sequence: Synthetic epitope
KGARLTVEQG

SEQ ID NO: 21138 - protein, 10 aa, Artificial Sequence
  Description of Artificial Sequence: Synthetic epitope
KGASAFFITE

SEQ ID NO: 21139 - protein, 10 aa, Artificial Sequence
  Description of Artificial Sequence: Synthetic epitope
KGASNYVAKR

SEQ ID NO: 21140 - protein, 10 aa, Artificial Sequence
  Description of Artificial Sequence: Synthetic epitope
KGATKAEKQA

SEQ ID NO: 21141 - protein, 10 aa, Artificial Sequence
  Description of Artificial Sequence: Synthetic epitope
KGATSELALN

SEQ ID NO: 21142 - protein, 10 aa, Artificial Sequence
  Description of Artificial Sequence: Synthetic epitope
KGAVLRVLNS

SEQ ID NO: 21143 - protein, 10 aa, Artificial Sequence
  Description of Artificial Sequence: Synthetic epitope
KGAVQRKNVQ

SEQ ID NO: 21144 - protein, 10 aa, Artificial Sequence
  Description of Artificial Sequence: Synthetic epitope
KGDASSIVSA

SEQ ID NO: 21145 - protein, 10 aa, Artificial Sequence
  Description of Artificial Sequence: Synthetic epitope
KGDEAKAKET

SEQ ID NO: 21146 - protein, 10 aa, Artificial Sequence
  Description of Artificial Sequence: Synthetic epitope
KGDEVKSGRS

SEQ ID NO: 21147 - protein, 10 aa, Artificial Sequence
  Description of Artificial Sequence: Synthetic epitope
KGDFSFEGEA

SEQ ID NO: 21148 - protein, 10 aa, Artificial Sequence
  Description of Artificial Sequence: Synthetic epitope
KGDGGDRSSA

SEQ ID NO: 21149 - protein, 10 aa, Artificial Sequence
  Description of Artificial Sequence: Synthetic epitope
KGDKTSFSSR

SEQ ID NO: 21150 - protein, 10 aa, Artificial Sequence
  Description of Artificial Sequence: Synthetic epitope
KGDLARDALP

SEQ ID NO: 21151 - protein, 10 aa, Artificial Sequence
  Description of Artificial Sequence: Synthetic epitope
KGDLESKNEE

SEQ ID NO: 21152 - protein, 10 aa, Artificial Sequence
  Description of Artificial Sequence: Synthetic epitope
KGDMTLGEFD

SEQ ID NO: 21153 - protein, 10 aa, Artificial Sequence
  Description of Artificial Sequence: Synthetic epitope
KGDNIKTPHK

SEQ ID NO: 21154 - protein, 10 aa, Artificial Sequence
  Description of Artificial Sequence: Synthetic epitope
KGDNNHDMEL

SEQ ID NO: 21155 - protein, 10 aa, Artificial Sequence
  Description of Artificial Sequence: Synthetic epitope
KGDQEQAMLH

SEQ ID NO: 21156 - protein, 10 aa, Artificial Sequence
  Description of Artificial Sequence: Synthetic epitope
KGDSARAKAQ

SEQ ID NO: 21157 - protein, 10 aa, Artificial Sequence
  Description of Artificial Sequence: Synthetic epitope
KGDVHDIGKN

SEQ ID NO: 21158 - protein, 10 aa, Artificial Sequence
  Description of Artificial Sequence: Synthetic epitope
KGDYYMVKKI

SEQ ID NO: 21159 - protein, 10 aa, Artificial Sequence
  Description of Artificial Sequence: Synthetic epitope
KGEAIEAILA

SEQ ID NO: 21160 - protein, 10 aa, Artificial Sequence
  Description of Artificial Sequence: Synthetic epitope
KGEDKQDRNK

SEQ ID NO: 21161 - protein, 10 aa, Artificial Sequence
  Description of Artificial Sequence: Synthetic epitope
KGEKVKPVFE

SEQ ID NO: 21162 - protein, 10 aa, Artificial Sequence
  Description of Artificial Sequence: Synthetic epitope
KGEMVKVSRN

SEQ ID NO: 21163 - protein, 10 aa, Artificial Sequence
  Description of Artificial Sequence: Synthetic epitope
KGENEQLKIS

SEQ ID NO: 21164 - protein, 10 aa, Artificial Sequence
  Description of Artificial Sequence: Synthetic epitope
KGEQKQKQEQ

SEQ ID NO: 21165 - protein, 10 aa, Artificial Sequence
  Description of Artificial Sequence: Synthetic epitope
KGEQKQKQEQ

SEQ ID NO: 21166 - protein, 10 aa, Artificial Sequence
  Description of Artificial Sequence: Synthetic epitope
KGERAAKEKP

SEQ ID NO: 21167 - protein, 10 aa, Artificial Sequence
  Description of Artificial Sequence: Synthetic epitope
KGESKLEVLN

SEQ ID NO: 21168 - protein, 10 aa, Artificial Sequence
  Description of Artificial Sequence: Synthetic epitope
KGESKQVMKY

SEQ ID NO: 21169 - protein, 10 aa, Artificial Sequence
  Description of Artificial Sequence: Synthetic epitope
KGESQVFKKA

SEQ ID NO: 21170 - protein, 10 aa, Artificial Sequence
  Description of Artificial Sequence: Synthetic epitope
KGESSRSGSD

SEQ ID NO: 21171 - protein, 10 aa, Artificial Sequence
  Description of Artificial Sequence: Synthetic epitope
KGESTSQKVA

SEQ ID NO: 21172 - protein, 10 aa, Artificial Sequence
  Description of Artificial Sequence: Synthetic epitope
KGETLSQEEQ

SEQ ID NO: 21173 - protein, 10 aa, Artificial Sequence
  Description of Artificial Sequence: Synthetic epitope
KGEVSVALKE

SEQ ID NO: 21174 - protein, 10 aa, Artificial Sequence
  Description of Artificial Sequence: Synthetic epitope
KGFEAKSRSS

SEQ ID NO: 21175 - protein, 10 aa, Artificial Sequence
  Description of Artificial Sequence: Synthetic epitope
KGFFQSAKAS

SEQ ID NO: 21176 - protein, 10 aa, Artificial Sequence
  Description of Artificial Sequence: Synthetic epitope
KGFLKYMDNQ

SEQ ID NO: 21177 - protein, 10 aa, Artificial Sequence
  Description of Artificial Sequence: Synthetic epitope
KGFSLLAEPQ

SEQ ID NO: 21178 - protein, 10 aa, Artificial Sequence
  Description of Artificial Sequence: Synthetic epitope
KGFVIVHVAT

SEQ ID NO: 21179 - protein, 10 aa, Artificial Sequence
  Description of Artificial Sequence: Synthetic epitope
KGGASTTSTT

SEQ ID NO: 21180 - protein, 10 aa, Artificial Sequence
  Description of Artificial Sequence: Synthetic epitope
KGGEAAEAEA

SEQ ID NO: 21181 - protein, 10 aa, Artificial Sequence
  Description of Artificial Sequence: Synthetic epitope
KGGEATRMEE

SEQ ID NO: 21182 - protein, 10 aa, Artificial Sequence
  Description of Artificial Sequence: Synthetic epitope
KGGIGSKIGS

SEQ ID NO: 21183 - protein, 10 aa, Artificial Sequence
  Description of Artificial Sequence: Synthetic epitope
KGGIKKRAWP

SEQ ID NO: 21184 - protein, 10 aa, Artificial Sequence
  Description of Artificial Sequence: Synthetic epitope
KGGLASLAKD

SEQ ID NO: 21185 - protein, 10 aa, Artificial Sequence
  Description of Artificial Sequence: Synthetic epitope
KGGSSAKGTA

SEQ ID NO: 21186 - protein, 10 aa, Artificial Sequence
  Description of Artificial Sequence: Synthetic epitope
KGGSSKLTGR

SEQ ID NO: 21187 - protein, 10 aa, Artificial Sequence
  Description of Artificial Sequence: Synthetic epitope
KGGTSRALAA

SEQ ID NO: 21188 - protein, 10 aa, Artificial Sequence
  Description of Artificial Sequence: Synthetic epitope
KGGVNDNFQG

SEQ ID NO: 21189 - protein, 10 aa, Artificial Sequence
  Description of Artificial Sequence: Synthetic epitope
KGHQHNEKYK

SEQ ID NO: 21190 - protein, 10 aa, Artificial Sequence
  Description of Artificial Sequence: Synthetic epitope
KGHVSLAAEL

SEQ ID NO: 21191 - protein, 10 aa, Artificial Sequence
  Description of Artificial Sequence: Synthetic epitope
KGIEQNEQWV

SEQ ID NO: 21192 - protein, 10 aa, Artificial Sequence
  Description of Artificial Sequence: Synthetic epitope
KGIIGNKAFT

SEQ ID NO: 21193 - protein, 10 aa, Artificial Sequence
  Description of Artificial Sequence: Synthetic epitope
KGIKIADSQK

SEQ ID NO: 21194 - protein, 10 aa, Artificial Sequence
  Description of Artificial Sequence: Synthetic epitope
KGIKSSELEE

SEQ ID NO: 21195 - protein, 10 aa, Artificial Sequence
  Description of Artificial Sequence: Synthetic epitope
KGIKTKSPFE

SEQ ID NO: 21196 - protein, 10 aa, Artificial Sequence
  Description of Artificial Sequence: Synthetic epitope
KGILVNMDDN

SEQ ID NO: 21197 - protein, 10 aa, Artificial Sequence
  Description of Artificial Sequence: Synthetic epitope
KGIPYIAAYQ

SEQ ID NO: 21198 - protein, 10 aa, Artificial Sequence
  Description of Artificial Sequence: Synthetic epitope
KGIQVWTNAK

SEQ ID NO: 21199 - protein, 10 aa, Artificial Sequence
  Description of Artificial Sequence: Synthetic epitope
KGISAQIVSA

SEQ ID NO: 21200 - protein, 10 aa, Artificial Sequence
  Description of Artificial Sequence: Synthetic epitope
KGISSKEPRQ

SEQ ID NO: 21201 - protein, 10 aa, Artificial Sequence
  Description of Artificial Sequence: Synthetic epitope
KGITKERQQT

SEQ ID NO: 21202 - protein, 10 aa, Artificial Sequence
  Description of Artificial Sequence: Synthetic epitope
KGITMATAKA

SEQ ID NO: 21203 - protein, 10 aa, Artificial Sequence
  Description of Artificial Sequence: Synthetic epitope
KGITMATAKA

SEQ ID NO: 21204 - protein, 10 aa, Artificial Sequence
  Description of Artificial Sequence: Synthetic epitope
KGIVAAQETQ

SEQ ID NO: 21205 - protein, 10 aa, Artificial Sequence
  Description of Artificial Sequence: Synthetic epitope
KGIVKMTMPQ

SEQ ID NO: 21206 - protein, 10 aa, Artificial Sequence
  Description of Artificial Sequence: Synthetic epitope
KGKAESSNSS

SEQ ID NO: 21207 - protein, 10 aa, Artificial Sequence
  Description of Artificial Sequence: Synthetic epitope
KGKAKFSTSS

SEQ ID NO: 21208 - protein, 10 aa, Artificial Sequence
  Description of Artificial Sequence: Synthetic epitope
KGKASIKDPH

SEQ ID NO: 21209 - protein, 10 aa, Artificial Sequence
  Description of Artificial Sequence: Synthetic epitope
KGKDAMQSFM

SEQ ID NO: 21210 - protein, 10 aa, Artificial Sequence
  Description of Artificial Sequence: Synthetic epitope
KGKDSQNTAH

SEQ ID NO: 21211 - protein, 10 aa, Artificial Sequence
  Description of Artificial Sequence: Synthetic epitope
KGKEKQLAEG

SEQ ID NO: 21212 - protein, 10 aa, Artificial Sequence
  Description of Artificial Sequence: Synthetic epitope
KGKERKTYQR

SEQ ID NO: 21213 - protein, 10 aa, Artificial Sequence
  Description of Artificial Sequence: Synthetic epitope
KGKETSASQG

SEQ ID NO: 21214 - protein, 10 aa, Artificial Sequence
  Description of Artificial Sequence: Synthetic epitope
KGKGDKAQIE

SEQ ID NO: 21215 - protein, 10 aa, Artificial Sequence
  Description of Artificial Sequence: Synthetic epitope
KGKGQASQTQ

SEQ ID NO: 21216 - protein, 10 aa, Artificial Sequence
  Description of Artificial Sequence: Synthetic epitope
KGKGVINDVI

SEQ ID NO: 21217 - protein, 10 aa, Artificial Sequence
  Description of Artificial Sequence: Synthetic epitope
KGKITGALNS

SEQ ID NO: 21218 - protein, 10 aa, Artificial Sequence
  Description of Artificial Sequence: Synthetic epitope
KGKKYKTNSS

SEQ ID NO: 21219 - protein, 10 aa, Artificial Sequence
  Description of Artificial Sequence: Synthetic epitope
KGKLGKSKIG

SEQ ID NO: 21220 - protein, 10 aa, Artificial Sequence
  Description of Artificial Sequence: Synthetic epitope
KGKMRARYVN

SEQ ID NO: 21221 - protein, 10 aa, Artificial Sequence
  Description of Artificial Sequence: Synthetic epitope
KGKNQKVLSK

SEQ ID NO: 21222 - protein, 10 aa, Artificial Sequence
  Description of Artificial Sequence: Synthetic epitope
KGKPASMVKN

SEQ ID NO: 21223 - protein, 10 aa, Artificial Sequence
  Description of Artificial Sequence: Synthetic epitope
KGKQAAQGKG

SEQ ID NO: 21224 - protein, 10 aa, Artificial Sequence
  Description of Artificial Sequence: Synthetic epitope
KGKQISVQMK

SEQ ID NO: 21225 - protein, 10 aa, Artificial Sequence
  Description of Artificial Sequence: Synthetic epitope
KGKQKSRNNE

SEQ ID NO: 21226 - protein, 10 aa, Artificial Sequence
  Description of Artificial Sequence: Synthetic epitope
KGKRQTEGTL

SEQ ID NO: 21227 - protein, 10 aa, Artificial Sequence
  Description of Artificial Sequence: Synthetic epitope
KGKSAGREKK

SEQ ID NO: 21228 - protein, 10 aa, Artificial Sequence
  Description of Artificial Sequence: Synthetic epitope
KGKSLKLNTA

SEQ ID NO: 21229 - protein, 10 aa, Artificial Sequence
  Description of Artificial Sequence: Synthetic epitope
KGKSSKTKPF

SEQ ID NO: 21230 - protein, 10 aa, Artificial Sequence
  Description of Artificial Sequence: Synthetic epitope
KGKSSTQEAT

SEQ ID NO: 21231 - protein, 10 aa, Artificial Sequence
  Description of Artificial Sequence: Synthetic epitope
KGKTATEAAD

SEQ ID NO: 21232 - protein, 10 aa, Artificial Sequence
  Description of Artificial Sequence: Synthetic epitope
KGKTLTNEAS

SEQ ID NO: 21233 - protein, 10 aa, Artificial Sequence
  Description of Artificial Sequence: Synthetic epitope
KGKTSAVEQT

SEQ ID NO: 21234 - protein, 10 aa, Artificial Sequence
  Description of Artificial Sequence: Synthetic epitope
KGKTYKRPPM

SEQ ID NO: 21235 - protein, 10 aa, Artificial Sequence
  Description of Artificial Sequence: Synthetic epitope
KGKTYNQLQV

SEQ ID NO: 21236 - protein, 10 aa, Artificial Sequence
  Description of Artificial Sequence: Synthetic epitope
KGKVASESVS

SEQ ID NO: 21237 - protein, 10 aa, Artificial Sequence
  Description of Artificial Sequence: Synthetic epitope
KGKVKSIDLP

SEQ ID NO: 21238 - protein, 10 aa, Artificial Sequence
  Description of Artificial Sequence: Synthetic epitope
KGKVSSIQDS

SEQ ID NO: 21239 - protein, 10 aa, Artificial Sequence
  Description of Artificial Sequence: Synthetic epitope
KGLALEAESE

SEQ ID NO: 21240 - protein, 10 aa, Artificial Sequence
  Description of Artificial Sequence: Synthetic epitope
KGLANTMKSP

SEQ ID NO: 21241 - protein, 10 aa, Artificial Sequence
  Description of Artificial Sequence: Synthetic epitope
KGLDIAMTDM

SEQ ID NO: 21242 - protein, 10 aa, Artificial Sequence
  Description of Artificial Sequence: Synthetic epitope
KGLFMVLDYL

SEQ ID NO: 21243 - protein, 10 aa, Artificial Sequence
  Description of Artificial Sequence: Synthetic epitope
KGLGKMAPSS

SEQ ID NO: 21244 - protein, 10 aa, Artificial Sequence
  Description of Artificial Sequence: Synthetic epitope
KGLIKLVSKH

SEQ ID NO: 21245 - protein, 10 aa, Artificial Sequence
  Description of Artificial Sequence: Synthetic epitope
KGLIRSASVT

SEQ ID NO: 21246 - protein, 10 aa, Artificial Sequence
  Description of Artificial Sequence: Synthetic epitope
KGLKALVEKL

SEQ ID NO: 21247 - protein, 10 aa, Artificial Sequence
  Description of Artificial Sequence: Synthetic epitope
KGLKSKVRFA

SEQ ID NO: 21248 - protein, 10 aa, Artificial Sequence
  Description of Artificial Sequence: Synthetic epitope
KGLKSSLPDY

SEQ ID NO: 21249 - protein, 10 aa, Artificial Sequence
  Description of Artificial Sequence: Synthetic epitope
KGLLKTLNTT

SEQ ID NO: 21250 - protein, 10 aa, Artificial Sequence
  Description of Artificial Sequence: Synthetic epitope
KGLLQLASKG

SEQ ID NO: 21251 - protein, 10 aa, Artificial Sequence
  Description of Artificial Sequence: Synthetic epitope
KGLLRLVATG

SEQ ID NO: 21252 - protein, 10 aa, Artificial Sequence
  Description of Artificial Sequence: Synthetic epitope
KGLMTALFEV

SEQ ID NO: 21253 - protein, 10 aa, Artificial Sequence
  Description of Artificial Sequence: Synthetic epitope
KGLNKSASLV

SEQ ID NO: 21254 - protein, 10 aa, Artificial Sequence
  Description of Artificial Sequence: Synthetic epitope
KGLQRALLQQ

SEQ ID NO: 21255 - protein, 10 aa, Artificial Sequence
  Description of Artificial Sequence: Synthetic epitope
KGLQVDTFSR

SEQ ID NO: 21256 - protein, 10 aa, Artificial Sequence
  Description of Artificial Sequence: Synthetic epitope
KGLSEKHVKA

SEQ ID NO: 21257 - protein, 10 aa, Artificial Sequence
  Description of Artificial Sequence: Synthetic epitope
KGLVDKGSAG

SEQ ID NO: 21258 - protein, 10 aa, Artificial Sequence
  Description of Artificial Sequence: Synthetic epitope
KGLVKKVQAF

SEQ ID NO: 21259 - protein, 10 aa, Artificial Sequence
  Description of Artificial Sequence: Synthetic epitope
KGMGIRMTEP

SEQ ID NO: 21260 - protein, 10 aa, Artificial Sequence
  Description of Artificial Sequence: Synthetic epitope
KGMTSISLPS

SEQ ID NO: 21261 - protein, 10 aa, Artificial Sequence
  Description of Artificial Sequence: Synthetic epitope
KGMTVKNLID

SEQ ID NO: 21262 - protein, 10 aa, Artificial Sequence
  Description of Artificial Sequence: Synthetic epitope
KGMVAEEIEE

SEQ ID NO: 21263 - protein, 10 aa, Artificial Sequence
  Description of Artificial Sequence: Synthetic epitope
KGNAALAELD

SEQ ID NO: 21264 - protein, 10 aa, Artificial Sequence
  Description of Artificial Sequence: Synthetic epitope
KGNKYSAQGE

SEQ ID NO: 21265 - protein, 10 aa, Artificial Sequence
  Description of Artificial Sequence: Synthetic epitope
KGNLKRQKGE

SEQ ID NO: 21266 - protein, 10 aa, Artificial Sequence
  Description of Artificial Sequence: Synthetic epitope
KGNMPNQVKE

SEQ ID NO: 21267 - protein, 10 aa, Artificial Sequence
  Description of Artificial Sequence: Synthetic epitope
KGNNAKLTAA

SEQ ID NO: 21268 - protein, 10 aa, Artificial Sequence
  Description of Artificial Sequence: Synthetic epitope
KGNPKKPNAN

SEQ ID NO: 21269 - protein, 10 aa, Artificial Sequence
  Description of Artificial Sequence: Synthetic epitope
KGNSSRVHQP

SEQ ID NO: 21270 - protein, 10 aa, Artificial Sequence
  Description of Artificial Sequence: Synthetic epitope
KGNTATQMAQ

SEQ ID NO: 21271 - protein, 10 aa, Artificial Sequence
  Description of Artificial Sequence: Synthetic epitope
KGNTDSSLQS

SEQ ID NO: 21272 - protein, 10 aa, Artificial Sequence
  Description of Artificial Sequence: Synthetic epitope
KGNTHVWGAQ

SEQ ID NO: 21273 - protein, 10 aa, Artificial Sequence
  Description of Artificial Sequence: Synthetic epitope
KGNVNMETEP

SEQ ID NO: 21274 - protein, 10 aa, Artificial Sequence
  Description of Artificial Sequence: Synthetic epitope
KGNVNMETEP

SEQ ID NO: 21275 - protein, 10 aa, Artificial Sequence
  Description of Artificial Sequence: Synthetic epitope
KGPIKASQNK

SEQ ID NO: 21276 - protein, 10 aa, Artificial Sequence
  Description of Artificial Sequence: Synthetic epitope
KGPISMTKNP

SEQ ID NO: 21277 - protein, 10 aa, Artificial Sequence
  Description of Artificial Sequence: Synthetic epitope
KGPKADLKKD

SEQ ID NO: 21278 - protein, 10 aa, Artificial Sequence
  Description of Artificial Sequence: Synthetic epitope
KGPKLLPKYQ

SEQ ID NO: 21279 - protein, 10 aa, Artificial Sequence
  Description of Artificial Sequence: Synthetic epitope
KGPKQIVDHS

SEQ ID NO: 21280 - protein, 10 aa, Artificial Sequence
  Description of Artificial Sequence: Synthetic epitope
KGPLASQISG

SEQ ID NO: 21281 - protein, 10 aa, Artificial Sequence
  Description of Artificial Sequence: Synthetic epitope
KGQASQITAS

SEQ ID NO: 21282 - protein, 10 aa, Artificial Sequence
  Description of Artificial Sequence: Synthetic epitope
KGQAVELMKP

SEQ ID NO: 21283 - protein, 10 aa, Artificial Sequence
  Description of Artificial Sequence: Synthetic epitope
KGQDVDMMDQ

SEQ ID NO: 21284 - protein, 10 aa, Artificial Sequence
  Description of Artificial Sequence: Synthetic epitope
KGQEGVKWSE

SEQ ID NO: 21285 - protein, 10 aa, Artificial Sequence
  Description of Artificial Sequence: Synthetic epitope
KGQEISAKAA

SEQ ID NO: 21286 - protein, 10 aa, Artificial Sequence
  Description of Artificial Sequence: Synthetic epitope
KGQESAIGGS

SEQ ID NO: 21287 - protein, 10 aa, Artificial Sequence
  Description of Artificial Sequence: Synthetic epitope
KGQESLLDDN

SEQ ID NO: 21288 - protein, 10 aa, Artificial Sequence
  Description of Artificial Sequence: Synthetic epitope
KGQGLLSDKV

SEQ ID NO: 21289 - protein, 10 aa, Artificial Sequence
  Description of Artificial Sequence: Synthetic epitope
KGQGVNNVPK

SEQ ID NO: 21290 - protein, 10 aa, Artificial Sequence
  Description of Artificial Sequence: Synthetic epitope
KGQGVSVEVT

SEQ ID NO: 21291 - protein, 10 aa, Artificial Sequence
  Description of Artificial Sequence: Synthetic epitope
KGQIKSLVQK

SEQ ID NO: 21292 - protein, 10 aa, Artificial Sequence
  Description of Artificial Sequence: Synthetic epitope
KGQIPNSKHK

SEQ ID NO: 21293 - protein, 10 aa, Artificial Sequence
  Description of Artificial Sequence: Synthetic epitope
KGQKAANLDL

SEQ ID NO: 21294 - protein, 10 aa, Artificial Sequence
  Description of Artificial Sequence: Synthetic epitope
KGQLLNKGKL

SEQ ID NO: 21295 - protein, 10 aa, Artificial Sequence
  Description of Artificial Sequence: Synthetic epitope
KGQRVIDSTV

SEQ ID NO: 21296 - protein, 10 aa, Artificial Sequence
  Description of Artificial Sequence: Synthetic epitope
KGQSESTEAP

SEQ ID NO: 21297 - protein, 10 aa, Artificial Sequence
  Description of Artificial Sequence: Synthetic epitope
KGQSLAEIDQ

SEQ ID NO: 21298 - protein, 10 aa, Artificial Sequence
  Description of Artificial Sequence: Synthetic epitope
KGQVAKVIQK

SEQ ID NO: 21299 - protein, 10 aa, Artificial Sequence
  Description of Artificial Sequence: Synthetic epitope
KGQVRKYSST

SEQ ID NO: 21300 - protein, 10 aa, Artificial Sequence
  Description of Artificial Sequence: Synthetic epitope
KGRALQSQLE

SEQ ID NO: 21301 - protein, 10 aa, Artificial Sequence
  Description of Artificial Sequence: Synthetic epitope
KGRKSNENSE

SEQ ID NO: 21302 - protein, 10 aa, Artificial Sequence
  Description of Artificial Sequence: Synthetic epitope
KGRLLKAGRQ

SEQ ID NO: 21303 - protein, 10 aa, Artificial Sequence
  Description of Artificial Sequence: Synthetic epitope
KGRMDTRLPG

SEQ ID NO: 21304 - protein, 10 aa, Artificial Sequence
  Description of Artificial Sequence: Synthetic epitope
KGRQNERVVI

SEQ ID NO: 21305 - protein, 10 aa, Artificial Sequence
  Description of Artificial Sequence: Synthetic epitope
KGRRKAEAEN

SEQ ID NO: 21306 - protein, 10 aa, Artificial Sequence
  Description of Artificial Sequence: Synthetic epitope
KGRSASQKEG

SEQ ID NO: 21307 - protein, 10 aa, Artificial Sequence
  Description of Artificial Sequence: Synthetic epitope
KGRSLKQSSE

SEQ ID NO: 21308 - protein, 10 aa, Artificial Sequence
  Description of Artificial Sequence: Synthetic epitope
KGRVAIAVAI

SEQ ID NO: 21309 - protein, 10 aa, Artificial Sequence
  Description of Artificial Sequence: Synthetic epitope
KGRVRLLNNW

SEQ ID NO: 21310 - protein, 10 aa, Artificial Sequence
  Description of Artificial Sequence: Synthetic epitope
KGSARKAGPA

SEQ ID NO: 21311 - protein, 10 aa, Artificial Sequence
  Description of Artificial Sequence: Synthetic epitope
KGSASEAAGG

SEQ ID NO: 21312 - protein, 10 aa, Artificial Sequence
  Description of Artificial Sequence: Synthetic epitope
KGSELEITLT

SEQ ID NO: 21313 - protein, 10 aa, Artificial Sequence
  Description of Artificial Sequence: Synthetic epitope
KGSELRMINK

SEQ ID NO: 21314 - protein, 10 aa, Artificial Sequence
  Description of Artificial Sequence: Synthetic epitope
KGSEVESVKE

SEQ ID NO: 21315 - protein, 10 aa, Artificial Sequence
  Description of Artificial Sequence: Synthetic epitope
KGSGISSYGN

SEQ ID NO: 21316 - protein, 10 aa, Artificial Sequence
  Description of Artificial Sequence: Synthetic epitope
KGSGQQSERG

SEQ ID NO: 21317 - protein, 10 aa, Artificial Sequence
  Description of Artificial Sequence: Synthetic epitope
KGSKKERNSS

SEQ ID NO: 21318 - protein, 10 aa, Artificial Sequence
  Description of Artificial Sequence: Synthetic epitope
KGSLVKDSQY

SEQ ID NO: 21319 - protein, 10 aa, Artificial Sequence
  Description of Artificial Sequence: Synthetic epitope
KGSMQKSKFK

SEQ ID NO: 21320 - protein, 10 aa, Artificial Sequence
  Description of Artificial Sequence: Synthetic epitope
KGSNKVNEAL

SEQ ID NO: 21321 - protein, 10 aa, Artificial Sequence
  Description of Artificial Sequence: Synthetic epitope
KGSNNDMKVL

SEQ ID NO: 21322 - protein, 10 aa, Artificial Sequence
  Description of Artificial Sequence: Synthetic epitope
KGSNRLSMGS

SEQ ID NO: 21323 - protein, 10 aa, Artificial Sequence
  Description of Artificial Sequence: Synthetic epitope
KGSRLLESSL

SEQ ID NO: 21324 - protein, 10 aa, Artificial Sequence
  Description of Artificial Sequence: Synthetic epitope
KGSRSTIKDN

SEQ ID NO: 21325 - protein, 10 aa, Artificial Sequence
  Description of Artificial Sequence: Synthetic epitope
KGSSASLVLK

SEQ ID NO: 21326 - protein, 10 aa, Artificial Sequence
  Description of Artificial Sequence: Synthetic epitope
KGSVLIKENA

SEQ ID NO: 21327 - protein, 10 aa, Artificial Sequence
  Description of Artificial Sequence: Synthetic epitope
KGTAAMRNTK

SEQ ID NO: 21328 - protein, 10 aa, Artificial Sequence
  Description of Artificial Sequence: Synthetic epitope
KGTADDYLWP

SEQ ID NO: 21329 - protein, 10 aa, Artificial Sequence
  Description of Artificial Sequence: Synthetic epitope
KGTAELMQQK

SEQ ID NO: 21330 - protein, 10 aa, Artificial Sequence
  Description of Artificial Sequence: Synthetic epitope
KGTALVLARL

SEQ ID NO: 21331 - protein, 10 aa, Artificial Sequence
  Description of Artificial Sequence: Synthetic epitope
KGTATESSRE

SEQ ID NO: 21332 - protein, 10 aa, Artificial Sequence
  Description of Artificial Sequence: Synthetic epitope
KGTDLEALLA

SEQ ID NO: 21333 - protein, 10 aa, Artificial Sequence
  Description of Artificial Sequence: Synthetic epitope
KGTEKKQKAS

SEQ ID NO: 21334 - protein, 10 aa, Artificial Sequence
  Description of Artificial Sequence: Synthetic epitope
KGTENKLKDD

SEQ ID NO: 21335 - protein, 10 aa, Artificial Sequence
  Description of Artificial Sequence: Synthetic epitope
KGTIQQMIGI

SEQ ID NO: 21336 - protein, 10 aa, Artificial Sequence
  Description of Artificial Sequence: Synthetic epitope
KGTKLVLEQV

SEQ ID NO: 21337 - protein, 10 aa, Artificial Sequence
  Description of Artificial Sequence: Synthetic epitope
KGTKQWVHAR

SEQ ID NO: 21338 - protein, 10 aa, Artificial Sequence
  Description of Artificial Sequence: Synthetic epitope
KGTLKIANKQ

SEQ ID NO: 21339 - protein, 10 aa, Artificial Sequence
  Description of Artificial Sequence: Synthetic epitope
KGTLLGVAMA

SEQ ID NO: 21340 - protein, 10 aa, Artificial Sequence
  Description of Artificial Sequence: Synthetic epitope
KGTLTEGGTQ

SEQ ID NO: 21341 - protein, 10 aa, Artificial Sequence
  Description of Artificial Sequence: Synthetic epitope
KGTNKTNFTS

SEQ ID NO: 21342 - protein, 10 aa, Artificial Sequence
  Description of Artificial Sequence: Synthetic epitope
KGTQAEREGD

SEQ ID NO: 21343 - protein, 10 aa, Artificial Sequence
  Description of Artificial Sequence: Synthetic epitope
KGTQLVPSSH

SEQ ID NO: 21344 - protein, 10 aa, Artificial Sequence
  Description of Artificial Sequence: Synthetic epitope
KGTRSNANIQ

SEQ ID NO: 21345 - protein, 10 aa, Artificial Sequence
  Description of Artificial Sequence: Synthetic epitope
KGTRTTSNNT

SEQ ID NO: 21346 - protein, 10 aa, Artificial Sequence
  Description of Artificial Sequence: Synthetic epitope
KGTSEQETKG

SEQ ID NO: 21347 - protein, 10 aa, Artificial Sequence
  Description of Artificial Sequence: Synthetic epitope
KGTSGVQKKI

SEQ ID NO: 21348 - protein, 10 aa, Artificial Sequence
  Description of Artificial Sequence: Synthetic epitope
KGTSSVSRDV

SEQ ID NO: 21349 - protein, 10 aa, Artificial Sequence
  Description of Artificial Sequence: Synthetic epitope
KGTTASATSA

SEQ ID NO: 21350 - protein, 10 aa, Artificial Sequence
  Description of Artificial Sequence: Synthetic epitope
KGTTQPMKLN

SEQ ID NO: 21351 - protein, 10 aa, Artificial Sequence
  Description of Artificial Sequence: Synthetic epitope
KGTYTSSEES

SEQ ID NO: 21352 - protein, 10 aa, Artificial Sequence
  Description of Artificial Sequence: Synthetic epitope
KGVADMLERE

SEQ ID NO: 21353 - protein, 10 aa, Artificial Sequence
  Description of Artificial Sequence: Synthetic epitope
KGVIGSLGAA

SEQ ID NO: 21354 - protein, 10 aa, Artificial Sequence
  Description of Artificial Sequence: Synthetic epitope
KGVLNMSLTP

SEQ ID NO: 21355 - protein, 10 aa, Artificial Sequence
  Description of Artificial Sequence: Synthetic epitope
KGVMSLVNVR

SEQ ID NO: 21356 - protein, 10 aa, Artificial Sequence
  Description of Artificial Sequence: Synthetic epitope
KGVRVFDVAV

SEQ ID NO: 21357 - protein, 10 aa, Artificial Sequence
  Description of Artificial Sequence: Synthetic epitope
KGVSKSVIKT

SEQ ID NO: 21358 - protein, 10 aa, Artificial Sequence
  Description of Artificial Sequence: Synthetic epitope
KGVSMSLPSS

SEQ ID NO: 21359 - protein, 10 aa, Artificial Sequence
  Description of Artificial Sequence: Synthetic epitope
KGVTDNVVDT

SEQ ID NO: 21360 - protein, 10 aa, Artificial Sequence
  Description of Artificial Sequence: Synthetic epitope
KGVTKAMGTM

SEQ ID NO: 21361 - protein, 10 aa, Artificial Sequence
  Description of Artificial Sequence: Synthetic epitope
KGVVKAEKSK

SEQ ID NO: 21362 - protein, 10 aa, Artificial Sequence
  Description of Artificial Sequence: Synthetic epitope
KGVVKAEKSK

SEQ ID NO: 21363 - protein, 10 aa, Artificial Sequence
  Description of Artificial Sequence: Synthetic epitope
KGVVTEYHDM

SEQ ID NO: 21364 - protein, 10 aa, Artificial Sequence
  Description of Artificial Sequence: Synthetic epitope
KGVVTKGIQD

SEQ ID NO: 21365 - protein, 10 aa, Artificial Sequence
  Description of Artificial Sequence: Synthetic epitope
KGWMDPQSKG

SEQ ID NO: 21366 - protein, 10 aa, Artificial Sequence
  Description of Artificial Sequence: Synthetic epitope
KGWNFMLEDS

SEQ ID NO: 21367 - protein, 10 aa, Artificial Sequence
  Description of Artificial Sequence: Synthetic epitope
KGYEAQTFNW

SEQ ID NO: 21368 - protein, 10 aa, Artificial Sequence
  Description of Artificial Sequence: Synthetic epitope
KGYEREREAV

SEQ ID NO: 21369 - protein, 10 aa, Artificial Sequence
  Description of Artificial Sequence: Synthetic epitope
KGYRNREFTR

SEQ ID NO: 21370 - protein, 10 aa, Artificial Sequence
  Description of Artificial Sequence: Synthetic epitope
KGYSELDIVS

SEQ ID NO: 21371 - protein, 10 aa, Artificial Sequence
  Description of Artificial Sequence: Synthetic epitope
KGYSRIKGTQ

SEQ ID NO: 21372 - protein, 10 aa, Artificial Sequence
  Description of Artificial Sequence: Synthetic epitope
KGYYDINSEV

SEQ ID NO: 21373 - protein, 10 aa, Artificial Sequence
  Description of Artificial Sequence: Synthetic epitope
KHAAPSAFSS

SEQ ID NO: 21374 - protein, 10 aa, Artificial Sequence
  Description of Artificial Sequence: Synthetic epitope
KHARQKQKAD

SEQ ID NO: 21375 - protein, 10 aa, Artificial Sequence
  Description of Artificial Sequence: Synthetic epitope
KHASKTQTSA

SEQ ID NO: 21376 - protein, 10 aa, Artificial Sequence
  Description of Artificial Sequence: Synthetic epitope
KHATADSDVS

SEQ ID NO: 21377 - protein, 10 aa, Artificial Sequence
  Description of Artificial Sequence: Synthetic epitope
KHAVTTSKMD

SEQ ID NO: 21378 - protein, 10 aa, Artificial Sequence
  Description of Artificial Sequence: Synthetic epitope
KHDHERDESS

SEQ ID NO: 21379 - protein, 10 aa, Artificial Sequence
  Description of Artificial Sequence: Synthetic epitope
KHDHFDERSR

SEQ ID NO: 21380 - protein, 10 aa, Artificial Sequence
  Description of Artificial Sequence: Synthetic epitope
KHDIMIQENG

SEQ ID NO: 21381 - protein, 10 aa, Artificial Sequence
  Description of Artificial Sequence: Synthetic epitope
KHDQIASQEY

SEQ ID NO: 21382 - protein, 10 aa, Artificial Sequence
  Description of Artificial Sequence: Synthetic epitope
KHEGDVQEEQ

SEQ ID NO: 21383 - protein, 10 aa, Artificial Sequence
  Description of Artificial Sequence: Synthetic epitope
KHEKNATEIQ

SEQ ID NO: 21384 - protein, 10 aa, Artificial Sequence
  Description of Artificial Sequence: Synthetic epitope
KHEKVQLISE

SEQ ID NO: 21385 - protein, 10 aa, Artificial Sequence
  Description of Artificial Sequence: Synthetic epitope
KHEQTAKDNL

SEQ ID NO: 21386 - protein, 10 aa, Artificial Sequence
  Description of Artificial Sequence: Synthetic epitope
KHETAKNKMN

SEQ ID NO: 21387 - protein, 10 aa, Artificial Sequence
  Description of Artificial Sequence: Synthetic epitope
KHETSTVQKS

SEQ ID NO: 21388 - protein, 10 aa, Artificial Sequence
  Description of Artificial Sequence: Synthetic epitope
KHEVSASTQS

SEQ ID NO: 21389 - protein, 10 aa, Artificial Sequence
  Description of Artificial Sequence: Synthetic epitope
KHFIEKQEAE

SEQ ID NO: 21390 - protein, 10 aa, Artificial Sequence
  Description of Artificial Sequence: Synthetic epitope
KHGAVVNESH

SEQ ID NO: 21391 - protein, 10 aa, Artificial Sequence
  Description of Artificial Sequence: Synthetic epitope
KHGDGTTLDI

SEQ ID NO: 21392 - protein, 10 aa, Artificial Sequence
  Description of Artificial Sequence: Synthetic epitope
KHGKQIQVLS

SEQ ID NO: 21393 - protein, 10 aa, Artificial Sequence
  Description of Artificial Sequence: Synthetic epitope
KHHFMSRFPY

SEQ ID NO: 21394 - protein, 10 aa, Artificial Sequence
  Description of Artificial Sequence: Synthetic epitope
KHHGKKRMKS

SEQ ID NO: 21395 - protein, 10 aa, Artificial Sequence
  Description of Artificial Sequence: Synthetic epitope
KHHQIVKMDL

SEQ ID NO: 21396 - protein, 10 aa, Artificial Sequence
  Description of Artificial Sequence: Synthetic epitope
KHIEYRLKVS

SEQ ID NO: 21397 - protein, 10 aa, Artificial Sequence
  Description of Artificial Sequence: Synthetic epitope
KHIHSPEVAE

SEQ ID NO: 21398 - protein, 10 aa, Artificial Sequence
  Description of Artificial Sequence: Synthetic epitope
KHIHSRSTLE

SEQ ID NO: 21399 - protein, 10 aa, Artificial Sequence
  Description of Artificial Sequence: Synthetic epitope
KHIKATEPTE

SEQ ID NO: 21400 - protein, 10 aa, Artificial Sequence
  Description of Artificial Sequence: Synthetic epitope
KHIKATLVAD

SEQ ID NO: 21401 - protein, 10 aa, Artificial Sequence
  Description of Artificial Sequence: Synthetic epitope
KHILKAALAE

SEQ ID NO: 21402 - protein, 10 aa, Artificial Sequence
  Description of Artificial Sequence: Synthetic epitope
KHIQAPWWKK

SEQ ID NO: 21403 - protein, 10 aa, Artificial Sequence
  Description of Artificial Sequence: Synthetic epitope
KHISQDREWW

SEQ ID NO: 21404 - protein, 10 aa, Artificial Sequence
  Description of Artificial Sequence: Synthetic epitope
KHITNATSEE

SEQ ID NO: 21405 - protein, 10 aa, Artificial Sequence
  Description of Artificial Sequence: Synthetic epitope
KHKAAVAQAS

SEQ ID NO: 21406 - protein, 10 aa, Artificial Sequence
  Description of Artificial Sequence: Synthetic epitope
KHKAKSQNDW

SEQ ID NO: 21407 - protein, 10 aa, Artificial Sequence
  Description of Artificial Sequence: Synthetic epitope
KHKDAATDSR

SEQ ID NO: 21408 - protein, 10 aa, Artificial Sequence
  Description of Artificial Sequence: Synthetic epitope
KHKFTKAYKS

SEQ ID NO: 21409 - protein, 10 aa, Artificial Sequence
  Description of Artificial Sequence: Synthetic epitope
KHKITMKEEW

SEQ ID NO: 21410 - protein, 10 aa, Artificial Sequence
  Description of Artificial Sequence: Synthetic epitope
KHKLEMEKQE

SEQ ID NO: 21411 - protein, 10 aa, Artificial Sequence
  Description of Artificial Sequence: Synthetic epitope
KHKSQVINEM

SEQ ID NO: 21412 - protein, 10 aa, Artificial Sequence
  Description of Artificial Sequence: Synthetic epitope
KHKSSESGNS

SEQ ID NO: 21413 - protein, 10 aa, Artificial Sequence
  Description of Artificial Sequence: Synthetic epitope
KHKVSALVQS

SEQ ID NO: 21414 - protein, 10 aa, Artificial Sequence
  Description of Artificial Sequence: Synthetic epitope
KHLAGSASPS

SEQ ID NO: 21415 - protein, 10 aa, Artificial Sequence
  Description of Artificial Sequence: Synthetic epitope
KHLAKAALDF

SEQ ID NO: 21416 - protein, 10 aa, Artificial Sequence
  Description of Artificial Sequence: Synthetic epitope
KHLAKASPTQ

SEQ ID NO: 21417 - protein, 10 aa, Artificial Sequence
  Description of Artificial Sequence: Synthetic epitope
KHLFKQRGLT

SEQ ID NO: 21418 - protein, 10 aa, Artificial Sequence
  Description of Artificial Sequence: Synthetic epitope
KHLFNEKQTQ

SEQ ID NO: 21419 - protein, 10 aa, Artificial Sequence
  Description of Artificial Sequence: Synthetic epitope
KHLIMAVRGQ

SEQ ID NO: 21420 - protein, 10 aa, Artificial Sequence
  Description of Artificial Sequence: Synthetic epitope
KHLKSNQTDA

SEQ ID NO: 21421 - protein, 10 aa, Artificial Sequence
  Description of Artificial Sequence: Synthetic epitope
KHLKTDDQDI

SEQ ID NO: 21422 - protein, 10 aa, Artificial Sequence
  Description of Artificial Sequence: Synthetic epitope
KHLKVENAPI

SEQ ID NO: 21423 - protein, 10 aa, Artificial Sequence
  Description of Artificial Sequence: Synthetic epitope
KHLQEQKDSQ

SEQ ID NO: 21424 - protein, 10 aa, Artificial Sequence
  Description of Artificial Sequence: Synthetic epitope
KHLSATKPKK

SEQ ID NO: 21425 - protein, 10 aa, Artificial Sequence
  Description of Artificial Sequence: Synthetic epitope
KHLSMKKTAL

SEQ ID NO: 21426 - protein, 10 aa, Artificial Sequence
  Description of Artificial Sequence: Synthetic epitope
KHLTALIKSQ

SEQ ID NO: 21427 - protein, 10 aa, Artificial Sequence
  Description of Artificial Sequence: Synthetic epitope
KHLVSYSIEY

SEQ ID NO: 21428 - protein, 10 aa, Artificial Sequence
  Description of Artificial Sequence: Synthetic epitope
KHMLDYLWQR

SEQ ID NO: 21429 - protein, 10 aa, Artificial Sequence
  Description of Artificial Sequence: Synthetic epitope
KHMSADDLND

SEQ ID NO: 21430 - protein, 10 aa, Artificial Sequence
  Description of Artificial Sequence: Synthetic epitope
KHMSVSSIKQ

SEQ ID NO: 21431 - protein, 10 aa, Artificial Sequence
  Description of Artificial Sequence: Synthetic epitope
KHMVIVKAKL

SEQ ID NO: 21432 - protein, 10 aa, Artificial Sequence
  Description of Artificial Sequence: Synthetic epitope
KHNEIQHMIT

SEQ ID NO: 21433 - protein, 10 aa, Artificial Sequence
  Description of Artificial Sequence: Synthetic epitope
KHNNELKAAE

SEQ ID NO: 21434 - protein, 10 aa, Artificial Sequence
  Description of Artificial Sequence: Synthetic epitope
KHNSNITSSP

SEQ ID NO: 21435 - protein, 10 aa, Artificial Sequence
  Description of Artificial Sequence: Synthetic epitope
KHNTTSAKGF

SEQ ID NO: 21436 - protein, 10 aa, Artificial Sequence
  Description of Artificial Sequence: Synthetic epitope
KHPAAQLEYV

SEQ ID NO: 21437 - protein, 10 aa, Artificial Sequence
  Description of Artificial Sequence: Synthetic epitope
KHPLTANASR

SEQ ID NO: 21438 - protein, 10 aa, Artificial Sequence
  Description of Artificial Sequence: Synthetic epitope
KHPLTQELKE

SEQ ID NO: 21439 - protein, 10 aa, Artificial Sequence
  Description of Artificial Sequence: Synthetic epitope
KHPSVESVVQ

SEQ ID NO: 21440 - protein, 10 aa, Artificial Sequence
  Description of Artificial Sequence: Synthetic epitope
KHQELQAMQM

SEQ ID NO: 21441 - protein, 10 aa, Artificial Sequence
  Description of Artificial Sequence: Synthetic epitope
KHQINIEKYQ

SEQ ID NO: 21442 - protein, 10 aa, Artificial Sequence
  Description of Artificial Sequence: Synthetic epitope
KHQNQARDEK

SEQ ID NO: 21443 - protein, 10 aa, Artificial Sequence
  Description of Artificial Sequence: Synthetic epitope
KHQQSQAQNE

SEQ ID NO: 21444 - protein, 10 aa, Artificial Sequence
  Description of Artificial Sequence: Synthetic epitope
KHRAKESQQG

SEQ ID NO: 21445 - protein, 10 aa, Artificial Sequence
  Description of Artificial Sequence: Synthetic epitope
KHRGTKKTPS

SEQ ID NO: 21446 - protein, 10 aa, Artificial Sequence
  Description of Artificial Sequence: Synthetic epitope
KHRIAEEVVK

SEQ ID NO: 21447 - protein, 10 aa, Artificial Sequence
  Description of Artificial Sequence: Synthetic epitope
KHRKKNSVFE

SEQ ID NO: 21448 - protein, 10 aa, Artificial Sequence
  Description of Artificial Sequence: Synthetic epitope
KHRMIMFLDE

SEQ ID NO: 21449 - protein, 10 aa, Artificial Sequence
  Description of Artificial Sequence: Synthetic epitope
KHRQMINLAE

SEQ ID NO: 21450 - protein, 10 aa, Artificial Sequence
  Description of Artificial Sequence: Synthetic epitope
KHRVATRFTL

SEQ ID NO: 21451 - protein, 10 aa, Artificial Sequence
  Description of Artificial Sequence: Synthetic epitope
KHSNEKKSQS

SEQ ID NO: 21452 - protein, 10 aa, Artificial Sequence
  Description of Artificial Sequence: Synthetic epitope
KHSVLKLQNP

SEQ ID NO: 21453 - protein, 10 aa, Artificial Sequence
  Description of Artificial Sequence: Synthetic epitope
KHSWVADIQG

SEQ ID NO: 21454 - protein, 10 aa, Artificial Sequence
  Description of Artificial Sequence: Synthetic epitope
KHTASNVGHR

SEQ ID NO: 21455 - protein, 10 aa, Artificial Sequence
  Description of Artificial Sequence: Synthetic epitope
KHVALTPLKA

SEQ ID NO: 21456 - protein, 10 aa, Artificial Sequence
  Description of Artificial Sequence: Synthetic epitope
KHVHGKLKKQ

SEQ ID NO: 21457 - protein, 10 aa, Artificial Sequence
  Description of Artificial Sequence: Synthetic epitope
KHVIQTLSQE

SEQ ID NO: 21458 - protein, 10 aa, Artificial Sequence
  Description of Artificial Sequence: Synthetic epitope
KHVKLSSVSL

SEQ ID NO: 21459 - protein, 10 aa, Artificial Sequence
  Description of Artificial Sequence: Synthetic epitope
KHVLEVKVVP

SEQ ID NO: 21460 - protein, 10 aa, Artificial Sequence
  Description of Artificial Sequence: Synthetic epitope
KHVTTQGVEE

SEQ ID NO: 21461 - protein, 10 aa, Artificial Sequence
  Description of Artificial Sequence: Synthetic epitope
KHWASMHVSD

SEQ ID NO: 21462 - protein, 10 aa, Artificial Sequence
  Description of Artificial Sequence: Synthetic epitope
KHWLARKTRH

SEQ ID NO: 21463 - protein, 10 aa, Artificial Sequence
  Description of Artificial Sequence: Synthetic epitope
KHWPSEQDPE

SEQ ID NO: 21464 - protein, 10 aa, Artificial Sequence
  Description of Artificial Sequence: Synthetic epitope
KHYKQIAQAA

SEQ ID NO: 21465 - protein, 10 aa, Artificial Sequence
  Description of Artificial Sequence: Synthetic epitope
KHYQKQQSLP

SEQ ID NO: 21466 - protein, 10 aa, Artificial Sequence
  Description of Artificial Sequence: Synthetic epitope
KHYQLNFLLE

SEQ ID NO: 21467 - protein, 10 aa, Artificial Sequence
  Description of Artificial Sequence: Synthetic epitope
KIAAYLQSDQ

SEQ ID NO: 21468 - protein, 10 aa, Artificial Sequence
  Description of Artificial Sequence: Synthetic epitope
KIAEIMIPHE

SEQ ID NO: 21469 - protein, 10 aa, Artificial Sequence
  Description of Artificial Sequence: Synthetic epitope
KIAEKKVKDS

SEQ ID NO: 21470 - protein, 10 aa, Artificial Sequence
  Description of Artificial Sequence: Synthetic epitope
KIAFDKKAQK

SEQ ID NO: 21471 - protein, 10 aa, Artificial Sequence
  Description of Artificial Sequence: Synthetic epitope
KIAFYRRQKQ

SEQ ID NO: 21472 - protein, 10 aa, Artificial Sequence
  Description of Artificial Sequence: Synthetic epitope
KIAIYLSKSG

SEQ ID NO: 21473 - protein, 10 aa, Artificial Sequence
  Description of Artificial Sequence: Synthetic epitope
KIAKQSLRPF

SEQ ID NO: 21474 - protein, 10 aa, Artificial Sequence
  Description of Artificial Sequence: Synthetic epitope
KIALELSELV

SEQ ID NO: 21475 - protein, 10 aa, Artificial Sequence
  Description of Artificial Sequence: Synthetic epitope
KIALLEPLLG

SEQ ID NO: 21476 - protein, 10 aa, Artificial Sequence
  Description of Artificial Sequence: Synthetic epitope
KIALSDARSM

SEQ ID NO: 21477 - protein, 10 aa, Artificial Sequence
  Description of Artificial Sequence: Synthetic epitope
KIANEVIGEM

SEQ ID NO: 21478 - protein, 10 aa, Artificial Sequence
  Description of Artificial Sequence: Synthetic epitope
KIAPQLSTEE

SEQ ID NO: 21479 - protein, 10 aa, Artificial Sequence
  Description of Artificial Sequence: Synthetic epitope
KIAQLKSGRD

SEQ ID NO: 21480 - protein, 10 aa, Artificial Sequence
  Description of Artificial Sequence: Synthetic epitope
KIARESLLRK

SEQ ID NO: 21481 - protein, 10 aa, Artificial Sequence
  Description of Artificial Sequence: Synthetic epitope
KIASASRVTA

SEQ ID NO: 21482 - protein, 10 aa, Artificial Sequence
  Description of Artificial Sequence: Synthetic epitope
KIASASRVTA

SEQ ID NO: 21483 - protein, 10 aa, Artificial Sequence
  Description of Artificial Sequence: Synthetic epitope
KIASDAASIL

SEQ ID NO: 21484 - protein, 10 aa, Artificial Sequence
  Description of Artificial Sequence: Synthetic epitope
KIASKLSDSM

SEQ ID NO: 21485 - protein, 10 aa, Artificial Sequence
  Description of Artificial Sequence: Synthetic epitope
KIASQMITEG

SEQ ID NO: 21486 - protein, 10 aa, Artificial Sequence
  Description of Artificial Sequence: Synthetic epitope
KIATSLFESG

SEQ ID NO: 21487 - protein, 10 aa, Artificial Sequence
  Description of Artificial Sequence: Synthetic epitope
KIATTRRLTV

SEQ ID NO: 21488 - protein, 10 aa, Artificial Sequence
  Description of Artificial Sequence: Synthetic epitope
KIAVEAQNKY

SEQ ID NO: 21489 - protein, 10 aa, Artificial Sequence
  Description of Artificial Sequence: Synthetic epitope
KIAVLSLSEM

SEQ ID NO: 21490 - protein, 10 aa, Artificial Sequence
  Description of Artificial Sequence: Synthetic epitope
KIAVSNIVTQ

SEQ ID NO: 21491 - protein, 10 aa, Artificial Sequence
  Description of Artificial Sequence: Synthetic epitope
KIDDIDGNVK

SEQ ID NO: 21492 - protein, 10 aa, Artificial Sequence
  Description of Artificial Sequence: Synthetic epitope
KIDETLTIKT

SEQ ID NO: 21493 - protein, 10 aa, Artificial Sequence
  Description of Artificial Sequence: Synthetic epitope
KIDKDFLQGI

SEQ ID NO: 21494 - protein, 10 aa, Artificial Sequence
  Description of Artificial Sequence: Synthetic epitope
KIDLANRETS

SEQ ID NO: 21495 - protein, 10 aa, Artificial Sequence
  Description of Artificial Sequence: Synthetic epitope
KIDPSALVQK

SEQ ID NO: 21496 - protein, 10 aa, Artificial Sequence
  Description of Artificial Sequence: Synthetic epitope
KIDRKKANTQ

SEQ ID NO: 21497 - protein, 10 aa, Artificial Sequence
  Description of Artificial Sequence: Synthetic epitope
KIDRNQALLV

SEQ ID NO: 21498 - protein, 10 aa, Artificial Sequence
  Description of Artificial Sequence: Synthetic epitope
KIDRRLTGAN

SEQ ID NO: 21499 - protein, 10 aa, Artificial Sequence
  Description of Artificial Sequence: Synthetic epitope
KIDTNRIRTE

SEQ ID NO: 21500 - protein, 10 aa, Artificial Sequence
  Description of Artificial Sequence: Synthetic epitope
KIDVGEAEPR

SEQ ID NO: 21501 - protein, 10 aa, Artificial Sequence
  Description of Artificial Sequence: Synthetic epitope
KIEATGVIQS

SEQ ID NO: 21502 - protein, 10 aa, Artificial Sequence
  Description of Artificial Sequence: Synthetic epitope
KIEDSFVIAV

SEQ ID NO: 21503 - protein, 10 aa, Artificial Sequence
  Description of Artificial Sequence: Synthetic epitope
KIEELQLIVN

SEQ ID NO: 21504 - protein, 10 aa, Artificial Sequence
  Description of Artificial Sequence: Synthetic epitope
KIEENFKDTS

SEQ ID NO: 21505 - protein, 10 aa, Artificial Sequence
  Description of Artificial Sequence: Synthetic epitope
KIEETTMTTQ

SEQ ID NO: 21506 - protein, 10 aa, Artificial Sequence
  Description of Artificial Sequence: Synthetic epitope
KIEETVSDSS

SEQ ID NO: 21507 - protein, 10 aa, Artificial Sequence
  Description of Artificial Sequence: Synthetic epitope
KIEEVADVAV

SEQ ID NO: 21508 - protein, 10 aa, Artificial Sequence
  Description of Artificial Sequence: Synthetic epitope
KIEGSKSLAQ

SEQ ID NO: 21509 - protein, 10 aa, Artificial Sequence
  Description of Artificial Sequence: Synthetic epitope
KIELQEQPYQ

SEQ ID NO: 21510 - protein, 10 aa, Artificial Sequence
  Description of Artificial Sequence: Synthetic epitope
KIEPDSEKDE

SEQ ID NO: 21511 - protein, 10 aa, Artificial Sequence
  Description of Artificial Sequence: Synthetic epitope
KIEQASLTRD

SEQ ID NO: 21512 - protein, 10 aa, Artificial Sequence
  Description of Artificial Sequence: Synthetic epitope
KIESETSEKK

SEQ ID NO: 21513 - protein, 10 aa, Artificial Sequence
  Description of Artificial Sequence: Synthetic epitope
KIESTSARAD

SEQ ID NO: 21514 - protein, 10 aa, Artificial Sequence
  Description of Artificial Sequence: Synthetic epitope
KIETDNVQDI

SEQ ID NO: 21515 - protein, 10 aa, Artificial Sequence
  Description of Artificial Sequence: Synthetic epitope
KIETRGRDSP

SEQ ID NO: 21516 - protein, 10 aa, Artificial Sequence
  Description of Artificial Sequence: Synthetic epitope
KIEVAQFVKD

SEQ ID NO: 21517 - protein, 10 aa, Artificial Sequence
  Description of Artificial Sequence: Synthetic epitope
KIEVIITLKE

SEQ ID NO: 21518 - protein, 10 aa, Artificial Sequence
  Description of Artificial Sequence: Synthetic epitope
KIEVSQLLKG

SEQ ID NO: 21519 - protein, 10 aa, Artificial Sequence
  Description of Artificial Sequence: Synthetic epitope
KIFDDAYKSQ

SEQ ID NO: 21520 - protein, 10 aa, Artificial Sequence
  Description of Artificial Sequence: Synthetic epitope
KIFHSNEVMS

SEQ ID NO: 21521 - protein, 10 aa, Artificial Sequence
  Description of Artificial Sequence: Synthetic epitope
KIFMLDIEQQ

SEQ ID NO: 21522 - protein, 10 aa, Artificial Sequence
  Description of Artificial Sequence: Synthetic epitope
KIFRETKENE

SEQ ID NO: 21523 - protein, 10 aa, Artificial Sequence
  Description of Artificial Sequence: Synthetic epitope
KIFYLFLTQE

SEQ ID NO: 21524 - protein, 10 aa, Artificial Sequence
  Description of Artificial Sequence: Synthetic epitope
KIGIVELAHV

SEQ ID NO: 21525 - protein, 10 aa, Artificial Sequence
  Description of Artificial Sequence: Synthetic epitope
KIGKKTSTHI

SEQ ID NO: 21526 - protein, 10 aa, Artificial Sequence
  Description of Artificial Sequence: Synthetic epitope
KIGMEIMSYQ

SEQ ID NO: 21527 - protein, 10 aa, Artificial Sequence
  Description of Artificial Sequence: Synthetic epitope
KIGSAIQRLR

SEQ ID NO: 21528 - protein, 10 aa, Artificial Sequence
  Description of Artificial Sequence: Synthetic epitope
KIGSSRGMVS

SEQ ID NO: 21529 - protein, 10 aa, Artificial Sequence
  Description of Artificial Sequence: Synthetic epitope
KIGTNLSLIQ

SEQ ID NO: 21530 - protein, 10 aa, Artificial Sequence
  Description of Artificial Sequence: Synthetic epitope
KIHARSMSVE

SEQ ID NO: 21531 - protein, 10 aa, Artificial Sequence
  Description of Artificial Sequence: Synthetic epitope
KIHESAGLPF

SEQ ID NO: 21532 - protein, 10 aa, Artificial Sequence
  Description of Artificial Sequence: Synthetic epitope
KIHHDLTKDP

SEQ ID NO: 21533 - protein, 10 aa, Artificial Sequence
  Description of Artificial Sequence: Synthetic epitope
KIHNINKTYE

SEQ ID NO: 21534 - protein, 10 aa, Artificial Sequence
  Description of Artificial Sequence: Synthetic epitope
KIHSDIVKTK

SEQ ID NO: 21535 - protein, 10 aa, Artificial Sequence
  Description of Artificial Sequence: Synthetic epitope
KIHVAHWYNV

SEQ ID NO: 21536 - protein, 10 aa, Artificial Sequence
  Description of Artificial Sequence: Synthetic epitope
KIIATFKHTT

SEQ ID NO: 21537 - protein, 10 aa, Artificial Sequence
  Description of Artificial Sequence: Synthetic epitope
KIIAVMAKEP

SEQ ID NO: 21538 - protein, 10 aa, Artificial Sequence
  Description of Artificial Sequence: Synthetic epitope
KIIDGLLVMR

SEQ ID NO: 21539 - protein, 10 aa, Artificial Sequence
  Description of Artificial Sequence: Synthetic epitope
KIIEARLKMY

SEQ ID NO: 21540 - protein, 10 aa, Artificial Sequence
  Description of Artificial Sequence: Synthetic epitope
KIIESNKVKA

SEQ ID NO: 21541 - protein, 10 aa, Artificial Sequence
  Description of Artificial Sequence: Synthetic epitope
KIIHQETVSK

SEQ ID NO: 21542 - protein, 10 aa, Artificial Sequence
  Description of Artificial Sequence: Synthetic epitope
KIIKEVLLEA

SEQ ID NO: 21543 - protein, 10 aa, Artificial Sequence
  Description of Artificial Sequence: Synthetic epitope
KIIKLTDSNF

SEQ ID NO: 21544 - protein, 10 aa, Artificial Sequence
  Description of Artificial Sequence: Synthetic epitope
KIIKPVLTQE

SEQ ID NO: 21545 - protein, 10 aa, Artificial Sequence
  Description of Artificial Sequence: Synthetic epitope
KIIKQSIVEL

SEQ ID NO: 21546 - protein, 10 aa, Artificial Sequence
  Description of Artificial Sequence: Synthetic epitope
KIILNAVFGF

SEQ ID NO: 21547 - protein, 10 aa, Artificial Sequence
  Description of Artificial Sequence: Synthetic epitope
KIIMSSVSNL

SEQ ID NO: 21548 - protein, 10 aa, Artificial Sequence
  Description of Artificial Sequence: Synthetic epitope
KIINQMKPRQ

SEQ ID NO: 21549 - protein, 10 aa, Artificial Sequence
  Description of Artificial Sequence: Synthetic epitope
KIINQNSVAV

SEQ ID NO: 21550 - protein, 10 aa, Artificial Sequence
  Description of Artificial Sequence: Synthetic epitope
KIIPALSNWE

SEQ ID NO: 21551 - protein, 10 aa, Artificial Sequence
  Description of Artificial Sequence: Synthetic epitope
KIIQVAVELK

SEQ ID NO: 21552 - protein, 10 aa, Artificial Sequence
  Description of Artificial Sequence: Synthetic epitope
KIIRKEIPAK

SEQ ID NO: 21553 - protein, 10 aa, Artificial Sequence
  Description of Artificial Sequence: Synthetic epitope
KIISFAVQKE

SEQ ID NO: 21554 - protein, 10 aa, Artificial Sequence
  Description of Artificial Sequence: Synthetic epitope
KIITKKLGEK

SEQ ID NO: 21555 - protein, 10 aa, Artificial Sequence
  Description of Artificial Sequence: Synthetic epitope
KIITKVVEPK

SEQ ID NO: 21556 - protein, 10 aa, Artificial Sequence
  Description of Artificial Sequence: Synthetic epitope
KIIVSKISDI

SEQ ID NO: 21557 - protein, 10 aa, Artificial Sequence
  Description of Artificial Sequence: Synthetic epitope
KIIYVVEKFY

SEQ ID NO: 21558 - protein, 10 aa, Artificial Sequence
  Description of Artificial Sequence: Synthetic epitope
KIKAAEIRSV

SEQ ID NO: 21559 - protein, 10 aa, Artificial Sequence
  Description of Artificial Sequence: Synthetic epitope
KIKAIARKTK

SEQ ID NO: 21560 - protein, 10 aa, Artificial Sequence
  Description of Artificial Sequence: Synthetic epitope
KIKFSDVLHT

SEQ ID NO: 21561 - protein, 10 aa, Artificial Sequence
  Description of Artificial Sequence: Synthetic epitope
KIKIDKFKQY

SEQ ID NO: 21562 - protein, 10 aa, Artificial Sequence
  Description of Artificial Sequence: Synthetic epitope
KIKIMRSKQE

SEQ ID NO: 21563 - protein, 10 aa, Artificial Sequence
  Description of Artificial Sequence: Synthetic epitope
KIKKDGKEGA

SEQ ID NO: 21564 - protein, 10 aa, Artificial Sequence
  Description of Artificial Sequence: Synthetic epitope
KIKKSLTSNH

SEQ ID NO: 21565 - protein, 10 aa, Artificial Sequence
  Description of Artificial Sequence: Synthetic epitope
KIKLAMMKKN

SEQ ID NO: 21566 - protein, 10 aa, Artificial Sequence
  Description of Artificial Sequence: Synthetic epitope
KIKLKSSELQ

SEQ ID NO: 21567 - protein, 10 aa, Artificial Sequence
  Description of Artificial Sequence: Synthetic epitope
KIKLQASREA

SEQ ID NO: 21568 - protein, 10 aa, Artificial Sequence
  Description of Artificial Sequence: Synthetic epitope
KIKQSSQDNE

SEQ ID NO: 21569 - protein, 10 aa, Artificial Sequence
  Description of Artificial Sequence: Synthetic epitope
KIKSGEVAEG

SEQ ID NO: 21570 - protein, 10 aa, Artificial Sequence
  Description of Artificial Sequence: Synthetic epitope
KIKSILPGRS

SEQ ID NO: 21571 - protein, 10 aa, Artificial Sequence
  Description of Artificial Sequence: Synthetic epitope
KIKSQKIDYG

SEQ ID NO: 21572 - protein, 10 aa, Artificial Sequence
  Description of Artificial Sequence: Synthetic epitope
KIKSRGIKAN

SEQ ID NO: 21573 - protein, 10 aa, Artificial Sequence
  Description of Artificial Sequence: Synthetic epitope
KIKSSVSRKN

SEQ ID NO: 21574 - protein, 10 aa, Artificial Sequence
  Description of Artificial Sequence: Synthetic epitope
KIKSVSASED

SEQ ID NO: 21575 - protein, 10 aa, Artificial Sequence
  Description of Artificial Sequence: Synthetic epitope
KIKTGLAGLE

SEQ ID NO: 21576 - protein, 10 aa, Artificial Sequence
  Description of Artificial Sequence: Synthetic epitope
KIKVPTKKEM

SEQ ID NO: 21577 - protein, 10 aa, Artificial Sequence
  Description of Artificial Sequence: Synthetic epitope
KILAAYRVFM

SEQ ID NO: 21578 - protein, 10 aa, Artificial Sequence
  Description of Artificial Sequence: Synthetic epitope
KILADATAKM

SEQ ID NO: 21579 - protein, 10 aa, Artificial Sequence
  Description of Artificial Sequence: Synthetic epitope
KILALYELEG

SEQ ID NO: 21580 - protein, 10 aa, Artificial Sequence
  Description of Artificial Sequence: Synthetic epitope
KILEATESIK

SEQ ID NO: 21581 - protein, 10 aa, Artificial Sequence
  Description of Artificial Sequence: Synthetic epitope
KILELVVPLM

SEQ ID NO: 21582 - protein, 10 aa, Artificial Sequence
  Description of Artificial Sequence: Synthetic epitope
KILESSQTLL

SEQ ID NO: 21583 - protein, 10 aa, Artificial Sequence
  Description of Artificial Sequence: Synthetic epitope
KILETSRGAD

SEQ ID NO: 21584 - protein, 10 aa, Artificial Sequence
  Description of Artificial Sequence: Synthetic epitope
KILGLQVQQA

SEQ ID NO: 21585 - protein, 10 aa, Artificial Sequence
  Description of Artificial Sequence: Synthetic epitope
KILGYMQLRK

SEQ ID NO: 21586 - protein, 10 aa, Artificial Sequence
  Description of Artificial Sequence: Synthetic epitope
KILKKLSMYQ

SEQ ID NO: 21587 - protein, 10 aa, Artificial Sequence
  Description of Artificial Sequence: Synthetic epitope
KILKRILTPT

SEQ ID NO: 21588 - protein, 10 aa, Artificial Sequence
  Description of Artificial Sequence: Synthetic epitope
KILNTRYGEA

SEQ ID NO: 21589 - protein, 10 aa, Artificial Sequence
  Description of Artificial Sequence: Synthetic epitope
KILRLLTSTS

SEQ ID NO: 21590 - protein, 10 aa, Artificial Sequence
  Description of Artificial Sequence: Synthetic epitope
KILSAKAAVD

SEQ ID NO: 21591 - protein, 10 aa, Artificial Sequence
  Description of Artificial Sequence: Synthetic epitope
KILSEELQQN

SEQ ID NO: 21592 - protein, 10 aa, Artificial Sequence
  Description of Artificial Sequence: Synthetic epitope
KILSEIEKEE

SEQ ID NO: 21593 - protein, 10 aa, Artificial Sequence
  Description of Artificial Sequence: Synthetic epitope
KILSKTLAAL

SEQ ID NO: 21594 - protein, 10 aa, Artificial Sequence
  Description of Artificial Sequence: Synthetic epitope
KILSLTETIE

SEQ ID NO: 21595 - protein, 10 aa, Artificial Sequence
  Description of Artificial Sequence: Synthetic epitope
KILSNQEMLI

SEQ ID NO: 21596 - protein, 10 aa, Artificial Sequence
  Description of Artificial Sequence: Synthetic epitope
KILSNRQHIK

SEQ ID NO: 21597 - protein, 10 aa, Artificial Sequence
  Description of Artificial Sequence: Synthetic epitope
KILSSKSKAY

SEQ ID NO: 21598 - protein, 10 aa, Artificial Sequence
  Description of Artificial Sequence: Synthetic epitope
KILSSVASKK

SEQ ID NO: 21599 - protein, 10 aa, Artificial Sequence
  Description of Artificial Sequence: Synthetic epitope
KILSTHLLES

SEQ ID NO: 21600 - protein, 10 aa, Artificial Sequence
  Description of Artificial Sequence: Synthetic epitope
KILSTIDSQR

SEQ ID NO: 21601 - protein, 10 aa, Artificial Sequence
  Description of Artificial Sequence: Synthetic epitope
KILSVELGKQ

SEQ ID NO: 21602 - protein, 10 aa, Artificial Sequence
  Description of Artificial Sequence: Synthetic epitope
KILTDTQSSK

SEQ ID NO: 21603 - protein, 10 aa, Artificial Sequence
  Description of Artificial Sequence: Synthetic epitope
KILTIVVQLP

SEQ ID NO: 21604 - protein, 10 aa, Artificial Sequence
  Description of Artificial Sequence: Synthetic epitope
KILTSSRLLE

SEQ ID NO: 21605 - protein, 10 aa, Artificial Sequence
  Description of Artificial Sequence: Synthetic epitope
KILVKLKMQL

SEQ ID NO: 21606 - protein, 10 aa, Artificial Sequence
  Description of Artificial Sequence: Synthetic epitope
KILVKQSPML

SEQ ID NO: 21607 - protein, 10 aa, Artificial Sequence
  Description of Artificial Sequence: Synthetic epitope
KILVSLTMKN

SEQ ID NO: 21608 - protein, 10 aa, Artificial Sequence
  Description of Artificial Sequence: Synthetic epitope
KIMKDVQKNT

SEQ ID NO: 21609 - protein, 10 aa, Artificial Sequence
  Description of Artificial Sequence: Synthetic epitope
KIMMERKEKE

SEQ ID NO: 21610 - protein, 10 aa, Artificial Sequence
  Description of Artificial Sequence: Synthetic epitope
KIMNLTEFSM

SEQ ID NO: 21611 - protein, 10 aa, Artificial Sequence
  Description of Artificial Sequence: Synthetic epitope
KIMREKAKER

SEQ ID NO: 21612 - protein, 10 aa, Artificial Sequence
  Description of Artificial Sequence: Synthetic epitope
KIMRKVTTLP

SEQ ID NO: 21613 - protein, 10 aa, Artificial Sequence
  Description of Artificial Sequence: Synthetic epitope
KIMSQSQVSK

SEQ ID NO: 21614 - protein, 10 aa, Artificial Sequence
  Description of Artificial Sequence: Synthetic epitope
KIMVSESLAP

SEQ ID NO: 21615 - protein, 10 aa, Artificial Sequence
  Description of Artificial Sequence: Synthetic epitope
KINAAQEEFR

SEQ ID NO: 21616 - protein, 10 aa, Artificial Sequence
  Description of Artificial Sequence: Synthetic epitope
KINHSKSSLS

SEQ ID NO: 21617 - protein, 10 aa, Artificial Sequence
  Description of Artificial Sequence: Synthetic epitope
KINIKKEQEE

SEQ ID NO: 21618 - protein, 10 aa, Artificial Sequence
  Description of Artificial Sequence: Synthetic epitope
KINQEELASG

SEQ ID NO: 21619 - protein, 10 aa, Artificial Sequence
  Description of Artificial Sequence: Synthetic epitope
KINQLISETE

SEQ ID NO: 21620 - protein, 10 aa, Artificial Sequence
  Description of Artificial Sequence: Synthetic epitope
KINQTKQQED

SEQ ID NO: 21621 - protein, 10 aa, Artificial Sequence
  Description of Artificial Sequence: Synthetic epitope
KINRTEVYNK

SEQ ID NO: 21622 - protein, 10 aa, Artificial Sequence
  Description of Artificial Sequence: Synthetic epitope
KINSFELDRA

SEQ ID NO: 21623 - protein, 10 aa, Artificial Sequence
  Description of Artificial Sequence: Synthetic epitope
KINSIVKSQS

SEQ ID NO: 21624 - protein, 10 aa, Artificial Sequence
  Description of Artificial Sequence: Synthetic epitope
KINSKRSLKQ

SEQ ID NO: 21625 - protein, 10 aa, Artificial Sequence
  Description of Artificial Sequence: Synthetic epitope
KINVKQIAAR

SEQ ID NO: 21626 - protein, 10 aa, Artificial Sequence
  Description of Artificial Sequence: Synthetic epitope
KINVNVNSAA

SEQ ID NO: 21627 - protein, 10 aa, Artificial Sequence
  Description of Artificial Sequence: Synthetic epitope
KINYQLHQHH

SEQ ID NO: 21628 - protein, 10 aa, Artificial Sequence
  Description of Artificial Sequence: Synthetic epitope
KINYTVANEA

SEQ ID NO: 21629 - protein, 10 aa, Artificial Sequence
  Description of Artificial Sequence: Synthetic epitope
KIPAATKEPE

SEQ ID NO: 21630 - protein, 10 aa, Artificial Sequence
  Description of Artificial Sequence: Synthetic epitope
KIPLDVNDMK

SEQ ID NO: 21631 - protein, 10 aa, Artificial Sequence
  Description of Artificial Sequence: Synthetic epitope
KIPLNMEEPP

SEQ ID NO: 21632 - protein, 10 aa, Artificial Sequence
  Description of Artificial Sequence: Synthetic epitope
KIPSKASAKY

SEQ ID NO: 21633 - protein, 10 aa, Artificial Sequence
  Description of Artificial Sequence: Synthetic epitope
KIPSKSLKSA

SEQ ID NO: 21634 - protein, 10 aa, Artificial Sequence
  Description of Artificial Sequence: Synthetic epitope
KIPSTNATRS

SEQ ID NO: 21635 - protein, 10 aa, Artificial Sequence
  Description of Artificial Sequence: Synthetic epitope
KIPTSKIYIS

SEQ ID NO: 21636 - protein, 10 aa, Artificial Sequence
  Description of Artificial Sequence: Synthetic epitope
KIPVALDTIP

SEQ ID NO: 21637 - protein, 10 aa, Artificial Sequence
  Description of Artificial Sequence: Synthetic epitope
KIPVDTYNNI

SEQ ID NO: 21638 - protein, 10 aa, Artificial Sequence
  Description of Artificial Sequence: Synthetic epitope
KIQATNVSEA

SEQ ID NO: 21639 - protein, 10 aa, Artificial Sequence
  Description of Artificial Sequence: Synthetic epitope
KIQESFTSEE

SEQ ID NO: 21640 - protein, 10 aa, Artificial Sequence
  Description of Artificial Sequence: Synthetic epitope
KIQINAKLQE

SEQ ID NO: 21641 - protein, 10 aa, Artificial Sequence
  Description of Artificial Sequence: Synthetic epitope
KIQKGRGHEE

SEQ ID NO: 21642 - protein, 10 aa, Artificial Sequence
  Description of Artificial Sequence: Synthetic epitope
KIQKKEEKAE

SEQ ID NO: 21643 - protein, 10 aa, Artificial Sequence
  Description of Artificial Sequence: Synthetic epitope
KIQMSSMESQ

SEQ ID NO: 21644 - protein, 10 aa, Artificial Sequence
  Description of Artificial Sequence: Synthetic epitope
KIQMTKILEP

SEQ ID NO: 21645 - protein, 10 aa, Artificial Sequence
  Description of Artificial Sequence: Synthetic epitope
KIQRSQLEKN

SEQ ID NO: 21646 - protein, 10 aa, Artificial Sequence
  Description of Artificial Sequence: Synthetic epitope
KIQSERPESR

SEQ ID NO: 21647 - protein, 10 aa, Artificial Sequence
  Description of Artificial Sequence: Synthetic epitope
KIQVSNTKIN

SEQ ID NO: 21648 - protein, 10 aa, Artificial Sequence
  Description of Artificial Sequence: Synthetic epitope
KIQVSVTNLE

SEQ ID NO: 21649 - protein, 10 aa, Artificial Sequence
  Description of Artificial Sequence: Synthetic epitope
KIRALTLQLE

SEQ ID NO: 21650 - protein, 10 aa, Artificial Sequence
  Description of Artificial Sequence: Synthetic epitope
KIRDVRKATD

SEQ ID NO: 21651 - protein, 10 aa, Artificial Sequence
  Description of Artificial Sequence: Synthetic epitope
KIREFEVETE

SEQ ID NO: 21652 - protein, 10 aa, Artificial Sequence
  Description of Artificial Sequence: Synthetic epitope
KIRLISLTDE

SEQ ID NO: 21653 - protein, 10 aa, Artificial Sequence
  Description of Artificial Sequence: Synthetic epitope
KIRLKDKAAD

SEQ ID NO: 21654 - protein, 10 aa, Artificial Sequence
  Description of Artificial Sequence: Synthetic epitope
KIRPQLMVKH

SEQ ID NO: 21655 - protein, 10 aa, Artificial Sequence
  Description of Artificial Sequence: Synthetic epitope
KIRSATKLAS

SEQ ID NO: 21656 - protein, 10 aa, Artificial Sequence
  Description of Artificial Sequence: Synthetic epitope
KIRTEITAHA

SEQ ID NO: 21657 - protein, 10 aa, Artificial Sequence
  Description of Artificial Sequence: Synthetic epitope
KIRVLSLETY

SEQ ID NO: 21658 - protein, 10 aa, Artificial Sequence
  Description of Artificial Sequence: Synthetic epitope
KISAASKMMW

SEQ ID NO: 21659 - protein, 10 aa, Artificial Sequence
  Description of Artificial Sequence: Synthetic epitope
KISATRAQRG

SEQ ID NO: 21660 - protein, 10 aa, Artificial Sequence
  Description of Artificial Sequence: Synthetic epitope
KISDIIYLKA

SEQ ID NO: 21661 - protein, 10 aa, Artificial Sequence
  Description of Artificial Sequence: Synthetic epitope
KISEIQMTAP

SEQ ID NO: 21662 - protein, 10 aa, Artificial Sequence
  Description of Artificial Sequence: Synthetic epitope
KISEKPQNDT

SEQ ID NO: 21663 - protein, 10 aa, Artificial Sequence
  Description of Artificial Sequence: Synthetic epitope
KISENAATEM

SEQ ID NO: 21664 - protein, 10 aa, Artificial Sequence
  Description of Artificial Sequence: Synthetic epitope
KISFNDKSLQ

SEQ ID NO: 21665 - protein, 10 aa, Artificial Sequence
  Description of Artificial Sequence: Synthetic epitope
KISGSAFSKT

SEQ ID NO: 21666 - protein, 10 aa, Artificial Sequence
  Description of Artificial Sequence: Synthetic epitope
KISIKHQATY

SEQ ID NO: 21667 - protein, 10 aa, Artificial Sequence
  Description of Artificial Sequence: Synthetic epitope
KISKEVLAGR

SEQ ID NO: 21668 - protein, 10 aa, Artificial Sequence
  Description of Artificial Sequence: Synthetic epitope
KISKKNAAIA

SEQ ID NO: 21669 - protein, 10 aa, Artificial Sequence
  Description of Artificial Sequence: Synthetic epitope
KISKQKATRR

SEQ ID NO: 21670 - protein, 10 aa, Artificial Sequence
  Description of Artificial Sequence: Synthetic epitope
KISKQTSVLH

SEQ ID NO: 21671 - protein, 10 aa, Artificial Sequence
  Description of Artificial Sequence: Synthetic epitope
KISKRRVSVA

SEQ ID NO: 21672 - protein, 10 aa, Artificial Sequence
  Description of Artificial Sequence: Synthetic epitope
KISKTSEYSN

SEQ ID NO: 21673 - protein, 10 aa, Artificial Sequence
  Description of Artificial Sequence: Synthetic epitope
KISLDSVVKP

SEQ ID NO: 21674 - protein, 10 aa, Artificial Sequence
  Description of Artificial Sequence: Synthetic epitope
KISLTVAAKE

SEQ ID NO: 21675 - protein, 10 aa, Artificial Sequence
  Description of Artificial Sequence: Synthetic epitope
KISNSSKFQV

SEQ ID NO: 21676 - protein, 10 aa, Artificial Sequence
  Description of Artificial Sequence: Synthetic epitope
KISNSTSQGK

SEQ ID NO: 21677 - protein, 10 aa, Artificial Sequence
  Description of Artificial Sequence: Synthetic epitope
KISPKSTGSV

SEQ ID NO: 21678 - protein, 10 aa, Artificial Sequence
  Description of Artificial Sequence: Synthetic epitope
KISPSKKESE

SEQ ID NO: 21679 - protein, 10 aa, Artificial Sequence
  Description of Artificial Sequence: Synthetic epitope
KISQEKEQQE

SEQ ID NO: 21680 - protein, 10 aa, Artificial Sequence
  Description of Artificial Sequence: Synthetic epitope
KISQLTRMGP

SEQ ID NO: 21681 - protein, 10 aa, Artificial Sequence
  Description of Artificial Sequence: Synthetic epitope
KISQSKGQKE

SEQ ID NO: 21682 - protein, 10 aa, Artificial Sequence
  Description of Artificial Sequence: Synthetic epitope
KISSGSNISK

SEQ ID NO: 21683 - protein, 10 aa, Artificial Sequence
  Description of Artificial Sequence: Synthetic epitope
KISSLSFTLE

SEQ ID NO: 21684 - protein, 10 aa, Artificial Sequence
  Description of Artificial Sequence: Synthetic epitope
KISSTLKVEP

SEQ ID NO: 21685 - protein, 10 aa, Artificial Sequence
  Description of Artificial Sequence: Synthetic epitope
KISTASQVSQ

SEQ ID NO: 21686 - protein, 10 aa, Artificial Sequence
  Description of Artificial Sequence: Synthetic epitope
KISVLHQNVL

SEQ ID NO: 21687 - protein, 10 aa, Artificial Sequence
  Description of Artificial Sequence: Synthetic epitope
KISVQQMTRF

SEQ ID NO: 21688 - protein, 10 aa, Artificial Sequence
  Description of Artificial Sequence: Synthetic epitope
KISWVNRLHL

SEQ ID NO: 21689 - protein, 10 aa, Artificial Sequence
  Description of Artificial Sequence: Synthetic epitope
KITALEQKEQ

SEQ ID NO: 21690 - protein, 10 aa, Artificial Sequence
  Description of Artificial Sequence: Synthetic epitope
KITATEVTEQ

SEQ ID NO: 21691 - protein, 10 aa, Artificial Sequence
  Description of Artificial Sequence: Synthetic epitope
KITDTNSRIP

SEQ ID NO: 21692 - protein, 10 aa, Artificial Sequence
  Description of Artificial Sequence: Synthetic epitope
KITENRSKKT

SEQ ID NO: 21693 - protein, 10 aa, Artificial Sequence
  Description of Artificial Sequence: Synthetic epitope
KITIKQSGDQ

SEQ ID NO: 21694 - protein, 10 aa, Artificial Sequence
  Description of Artificial Sequence: Synthetic epitope
KITKIISLGK

SEQ ID NO: 21695 - protein, 10 aa, Artificial Sequence
  Description of Artificial Sequence: Synthetic epitope
KITKIMRQKE

SEQ ID NO: 21696 - protein, 10 aa, Artificial Sequence
  Description of Artificial Sequence: Synthetic epitope
KITKVVLSKG

SEQ ID NO: 21697 - protein, 10 aa, Artificial Sequence
  Description of Artificial Sequence: Synthetic epitope
KITLEDTRKK

SEQ ID NO: 21698 - protein, 10 aa, Artificial Sequence
  Description of Artificial Sequence: Synthetic epitope
KITLIKQLAK

SEQ ID NO: 21699 - protein, 10 aa, Artificial Sequence
  Description of Artificial Sequence: Synthetic epitope
KITLSSQSAS

SEQ ID NO: 21700 - protein, 10 aa, Artificial Sequence
  Description of Artificial Sequence: Synthetic epitope
KITLTADVMT

SEQ ID NO: 21701 - protein, 10 aa, Artificial Sequence
  Description of Artificial Sequence: Synthetic epitope
KITNEDTNYI

SEQ ID NO: 21702 - protein, 10 aa, Artificial Sequence
  Description of Artificial Sequence: Synthetic epitope
KITNSSFVLI

SEQ ID NO: 21703 - protein, 10 aa, Artificial Sequence
  Description of Artificial Sequence: Synthetic epitope
KITRGMTNQS

SEQ ID NO: 21704 - protein, 10 aa, Artificial Sequence
  Description of Artificial Sequence: Synthetic epitope
KITSFVDMVR

SEQ ID NO: 21705 - protein, 10 aa, Artificial Sequence
  Description of Artificial Sequence: Synthetic epitope
KITSGHLSQQ

SEQ ID NO: 21706 - protein, 10 aa, Artificial Sequence
  Description of Artificial Sequence: Synthetic epitope
KITTADVNEK

SEQ ID NO: 21707 - protein, 10 aa, Artificial Sequence
  Description of Artificial Sequence: Synthetic epitope
KITTKLLKAG

SEQ ID NO: 21708 - protein, 10 aa, Artificial Sequence
  Description of Artificial Sequence: Synthetic epitope
KIVESTLFRQ

SEQ ID NO: 21709 - protein, 10 aa, Artificial Sequence
  Description of Artificial Sequence: Synthetic epitope
KIVFQEIVRM

SEQ ID NO: 21710 - protein, 10 aa, Artificial Sequence
  Description of Artificial Sequence: Synthetic epitope
KIVGSEIDST

SEQ ID NO: 21711 - protein, 10 aa, Artificial Sequence
  Description of Artificial Sequence: Synthetic epitope
KIVIKKREPL

SEQ ID NO: 21712 - protein, 10 aa, Artificial Sequence
  Description of Artificial Sequence: Synthetic epitope
KIVKETQGMN

SEQ ID NO: 21713 - protein, 10 aa, Artificial Sequence
  Description of Artificial Sequence: Synthetic epitope
KIVMIRDDLQ

SEQ ID NO: 21714 - protein, 10 aa, Artificial Sequence
  Description of Artificial Sequence: Synthetic epitope
KIVRKSEMEG

SEQ ID NO: 21715 - protein, 10 aa, Artificial Sequence
  Description of Artificial Sequence: Synthetic epitope
KIVRRKRPVK

SEQ ID NO: 21716 - protein, 10 aa, Artificial Sequence
  Description of Artificial Sequence: Synthetic epitope
KIVRTSDQVA

SEQ ID NO: 21717 - protein, 10 aa, Artificial Sequence
  Description of Artificial Sequence: Synthetic epitope
KIVSAVRRSS

SEQ ID NO: 21718 - protein, 10 aa, Artificial Sequence
  Description of Artificial Sequence: Synthetic epitope
KIVSTFAKTE

SEQ ID NO: 21719 - protein, 10 aa, Artificial Sequence
  Description of Artificial Sequence: Synthetic epitope
KIWFNESNRS

SEQ ID NO: 21720 - protein, 10 aa, Artificial Sequence
  Description of Artificial Sequence: Synthetic epitope
KIWSSMEASQ

SEQ ID NO: 21721 - protein, 10 aa, Artificial Sequence
  Description of Artificial Sequence: Synthetic epitope
KIYKIFIKQL

SEQ ID NO: 21722 - protein, 10 aa, Artificial Sequence
  Description of Artificial Sequence: Synthetic epitope
KIYMKKAQDL

SEQ ID NO: 21723 - protein, 10 aa, Artificial Sequence
  Description of Artificial Sequence: Synthetic epitope
KIYNRSLGST

SEQ ID NO: 21724 - protein, 10 aa, Artificial Sequence
  Description of Artificial Sequence: Synthetic epitope
KIYQTEELRS

SEQ ID NO: 21725 - protein, 10 aa, Artificial Sequence
  Description of Artificial Sequence: Synthetic epitope
KIYSSHAKKP

SEQ ID NO: 21726 - protein, 10 aa, Artificial Sequence
  Description of Artificial Sequence: Synthetic epitope
KKAAEVLNKH

SEQ ID NO: 21727 - protein, 10 aa, Artificial Sequence
  Description of Artificial Sequence: Synthetic epitope
KKAAIQAKAG

SEQ ID NO: 21728 - protein, 10 aa, Artificial Sequence
  Description of Artificial Sequence: Synthetic epitope
KKAAKAGLSQ

SEQ ID NO: 21729 - protein, 10 aa, Artificial Sequence
  Description of Artificial Sequence: Synthetic epitope
KKAAQVTFRK

SEQ ID NO: 21730 - protein, 10 aa, Artificial Sequence
  Description of Artificial Sequence: Synthetic epitope
KKAARVIIEK

SEQ ID NO: 21731 - protein, 10 aa, Artificial Sequence
  Description of Artificial Sequence: Synthetic epitope
KKAATALKDV

SEQ ID NO: 21732 - protein, 10 aa, Artificial Sequence
  Description of Artificial Sequence: Synthetic epitope
KKADDVAAIE

SEQ ID NO: 21733 - protein, 10 aa, Artificial Sequence
  Description of Artificial Sequence: Synthetic epitope
KKADPQEAIN

SEQ ID NO: 21734 - protein, 10 aa, Artificial Sequence
  Description of Artificial Sequence: Synthetic epitope
KKADPQEAIN

SEQ ID NO: 21735 - protein, 10 aa, Artificial Sequence
  Description of Artificial Sequence: Synthetic epitope
KKADSSTTKK

SEQ ID NO: 21736 - protein, 10 aa, Artificial Sequence
  Description of Artificial Sequence: Synthetic epitope
KKAEAELPWG

SEQ ID NO: 21737 - protein, 10 aa, Artificial Sequence
  Description of Artificial Sequence: Synthetic epitope
KKAEARLLEE

SEQ ID NO: 21738 - protein, 10 aa, Artificial Sequence
  Description of Artificial Sequence: Synthetic epitope
KKAEESGSEQ

SEQ ID NO: 21739 - protein, 10 aa, Artificial Sequence
  Description of Artificial Sequence: Synthetic epitope
KKAEGAATEE

SEQ ID NO: 21740 - protein, 10 aa, Artificial Sequence
  Description of Artificial Sequence: Synthetic epitope
KKAEGSSRPH

SEQ ID NO: 21741 - protein, 10 aa, Artificial Sequence
  Description of Artificial Sequence: Synthetic epitope
KKAEGSSRPH

SEQ ID NO: 21742 - protein, 10 aa, Artificial Sequence
  Description of Artificial Sequence: Synthetic epitope
KKAELSEAQV

SEQ ID NO: 21743 - protein, 10 aa, Artificial Sequence
  Description of Artificial Sequence: Synthetic epitope
KKAEPVKVLQ

SEQ ID NO: 21744 - protein, 10 aa, Artificial Sequence
  Description of Artificial Sequence: Synthetic epitope
KKAESGDKEK

SEQ ID NO: 21745 - protein, 10 aa, Artificial Sequence
  Description of Artificial Sequence: Synthetic epitope
KKAFEEKRKE

SEQ ID NO: 21746 - protein, 10 aa, Artificial Sequence
  Description of Artificial Sequence: Synthetic epitope
KKAFSLEVQI

SEQ ID NO: 21747 - protein, 10 aa, Artificial Sequence
  Description of Artificial Sequence: Synthetic epitope
KKAGAVTSTP

SEQ ID NO: 21748 - protein, 10 aa, Artificial Sequence
  Description of Artificial Sequence: Synthetic epitope
KKAGHKANSK

SEQ ID NO: 21749 - protein, 10 aa, Artificial Sequence
  Description of Artificial Sequence: Synthetic epitope
KKAGVGIEGD

SEQ ID NO: 21750 - protein, 10 aa, Artificial Sequence
  Description of Artificial Sequence: Synthetic epitope
KKAHELLVLN

SEQ ID NO: 21751 - protein, 10 aa, Artificial Sequence
  Description of Artificial Sequence: Synthetic epitope
KKAHETKAEI

SEQ ID NO: 21752 - protein, 10 aa, Artificial Sequence
  Description of Artificial Sequence: Synthetic epitope
KKAIKDKTAF

SEQ ID NO: 21753 - protein, 10 aa, Artificial Sequence
  Description of Artificial Sequence: Synthetic epitope
KKAIQKGNME

SEQ ID NO: 21754 - protein, 10 aa, Artificial Sequence
  Description of Artificial Sequence: Synthetic epitope
KKAIYILDLQ

SEQ ID NO: 21755 - protein, 10 aa, Artificial Sequence
  Description of Artificial Sequence: Synthetic epitope
KKAKASTVDL

SEQ ID NO: 21756 - protein, 10 aa, Artificial Sequence
  Description of Artificial Sequence: Synthetic epitope
KKAKDSKNSS

SEQ ID NO: 21757 - protein, 10 aa, Artificial Sequence
  Description of Artificial Sequence: Synthetic epitope
KKAKEQAAQE

SEQ ID NO: 21758 - protein, 10 aa, Artificial Sequence
  Description of Artificial Sequence: Synthetic epitope
KKAKESSEKP

SEQ ID NO: 21759 - protein, 10 aa, Artificial Sequence
  Description of Artificial Sequence: Synthetic epitope
KKAKGLSARQ

SEQ ID NO: 21760 - protein, 10 aa, Artificial Sequence
  Description of Artificial Sequence: Synthetic epitope
KKAKGTEAEE

SEQ ID NO: 21761 - protein, 10 aa, Artificial Sequence
  Description of Artificial Sequence: Synthetic epitope
KKAKIISAAF

SEQ ID NO: 21762 - protein, 10 aa, Artificial Sequence
  Description of Artificial Sequence: Synthetic epitope
KKAKKALAEP

SEQ ID NO: 21763 - protein, 10 aa, Artificial Sequence
  Description of Artificial Sequence: Synthetic epitope
KKAKLMLGWE

SEQ ID NO: 21764 - protein, 10 aa, Artificial Sequence
  Description of Artificial Sequence: Synthetic epitope
KKAKSKETAG

SEQ ID NO: 21765 - protein, 10 aa, Artificial Sequence
  Description of Artificial Sequence: Synthetic epitope
KKAKSLAMSV

SEQ ID NO: 21766 - protein, 10 aa, Artificial Sequence
  Description of Artificial Sequence: Synthetic epitope
KKALATSEAK

SEQ ID NO: 21767 - protein, 10 aa, Artificial Sequence
  Description of Artificial Sequence: Synthetic epitope
KKALESVPVM

SEQ ID NO: 21768 - protein, 10 aa, Artificial Sequence
  Description of Artificial Sequence: Synthetic epitope
KKALKLLKTE

SEQ ID NO: 21769 - protein, 10 aa, Artificial Sequence
  Description of Artificial Sequence: Synthetic epitope
KKALKMTIFW

SEQ ID NO: 21770 - protein, 10 aa, Artificial Sequence
  Description of Artificial Sequence: Synthetic epitope
KKALLQKNVE

SEQ ID NO: 21771 - protein, 10 aa, Artificial Sequence
  Description of Artificial Sequence: Synthetic epitope
KKALNLANML

SEQ ID NO: 21772 - protein, 10 aa, Artificial Sequence
  Description of Artificial Sequence: Synthetic epitope
KKALSELRAR

SEQ ID NO: 21773 - protein, 10 aa, Artificial Sequence
  Description of Artificial Sequence: Synthetic epitope
KKALSSMGAN

SEQ ID NO: 21774 - protein, 10 aa, Artificial Sequence
  Description of Artificial Sequence: Synthetic epitope
KKALTNQRIG

SEQ ID NO: 21775 - protein, 10 aa, Artificial Sequence
  Description of Artificial Sequence: Synthetic epitope
KKANAMLDED

SEQ ID NO: 21776 - protein, 10 aa, Artificial Sequence
  Description of Artificial Sequence: Synthetic epitope
KKANKERELK

SEQ ID NO: 21777 - protein, 10 aa, Artificial Sequence
  Description of Artificial Sequence: Synthetic epitope
KKAPDTQSSA

SEQ ID NO: 21778 - protein, 10 aa, Artificial Sequence
  Description of Artificial Sequence: Synthetic epitope
KKAPNKALAS

SEQ ID NO: 21779 - protein, 10 aa, Artificial Sequence
  Description of Artificial Sequence: Synthetic epitope
KKAQEENKKI

SEQ ID NO: 21780 - protein, 10 aa, Artificial Sequence
  Description of Artificial Sequence: Synthetic epitope
KKAQKAKERN

SEQ ID NO: 21781 - protein, 10 aa, Artificial Sequence
  Description of Artificial Sequence: Synthetic epitope
KKAQLRSAPR

SEQ ID NO: 21782 - protein, 10 aa, Artificial Sequence
  Description of Artificial Sequence: Synthetic epitope
KKAQMQTDDR

SEQ ID NO: 21783 - protein, 10 aa, Artificial Sequence
  Description of Artificial Sequence: Synthetic epitope
KKAQTQLKLP

SEQ ID NO: 21784 - protein, 10 aa, Artificial Sequence
  Description of Artificial Sequence: Synthetic epitope
KKAQVRKAGK

SEQ ID NO: 21785 - protein, 10 aa, Artificial Sequence
  Description of Artificial Sequence: Synthetic epitope
KKARKEAALA

SEQ ID NO: 21786 - protein, 10 aa, Artificial Sequence
  Description of Artificial Sequence: Synthetic epitope
KKARTKAAHG

SEQ ID NO: 21787 - protein, 10 aa, Artificial Sequence
  Description of Artificial Sequence: Synthetic epitope
KKARVEEAST

SEQ ID NO: 21788 - protein, 10 aa, Artificial Sequence
  Description of Artificial Sequence: Synthetic epitope
KKASAAQLRI

SEQ ID NO: 21789 - protein, 10 aa, Artificial Sequence
  Description of Artificial Sequence: Synthetic epitope
KKASASGQAQ

SEQ ID NO: 21790 - protein, 10 aa, Artificial Sequence
  Description of Artificial Sequence: Synthetic epitope
KKASASSFAQ

SEQ ID NO: 21791 - protein, 10 aa, Artificial Sequence
  Description of Artificial Sequence: Synthetic epitope
KKASFASASA

SEQ ID NO: 21792 - protein, 10 aa, Artificial Sequence
  Description of Artificial Sequence: Synthetic epitope
KKASGKILEA

SEQ ID NO: 21793 - protein, 10 aa, Artificial Sequence
  Description of Artificial Sequence: Synthetic epitope
KKASLQSGQE

SEQ ID NO: 21794 - protein, 10 aa, Artificial Sequence
  Description of Artificial Sequence: Synthetic epitope
KKASLTSKIP

SEQ ID NO: 21795 - protein, 10 aa, Artificial Sequence
  Description of Artificial Sequence: Synthetic epitope
KKATLIKSSE

SEQ ID NO: 21796 - protein, 10 aa, Artificial Sequence
  Description of Artificial Sequence: Synthetic epitope
KKAVATSDKL

SEQ ID NO: 21797 - protein, 10 aa, Artificial Sequence
  Description of Artificial Sequence: Synthetic epitope
KKAVKQKQIR

SEQ ID NO: 21798 - protein, 10 aa, Artificial Sequence
  Description of Artificial Sequence: Synthetic epitope
KKAVKTVQEE

SEQ ID NO: 21799 - protein, 10 aa, Artificial Sequence
  Description of Artificial Sequence: Synthetic epitope
KKAWTEHQEY

SEQ ID NO: 21800 - protein, 10 aa, Artificial Sequence
  Description of Artificial Sequence: Synthetic epitope
KKAYRVLEEV

SEQ ID NO: 21801 - protein, 10 aa, Artificial Sequence
  Description of Artificial Sequence: Synthetic epitope
KKDAKKNAES

SEQ ID NO: 21802 - protein, 10 aa, Artificial Sequence
  Description of Artificial Sequence: Synthetic epitope
KKDARTLLAR

SEQ ID NO: 21803 - protein, 10 aa, Artificial Sequence
  Description of Artificial Sequence: Synthetic epitope
KKDATASFNT

SEQ ID NO: 21804 - protein, 10 aa, Artificial Sequence
  Description of Artificial Sequence: Synthetic epitope
KKDEAKIAKP

SEQ ID NO: 21805 - protein, 10 aa, Artificial Sequence
  Description of Artificial Sequence: Synthetic epitope
KKDHQSRNLK

SEQ ID NO: 21806 - protein, 10 aa, Artificial Sequence
  Description of Artificial Sequence: Synthetic epitope
KKDKLNTQST

SEQ ID NO: 21807 - protein, 10 aa, Artificial Sequence
  Description of Artificial Sequence: Synthetic epitope
KKDKVNGDKL

SEQ ID NO: 21808 - protein, 10 aa, Artificial Sequence
  Description of Artificial Sequence: Synthetic epitope
KKDNKDSKAT

SEQ ID NO: 21809 - protein, 10 aa, Artificial Sequence
  Description of Artificial Sequence: Synthetic epitope
KKDNKVAVGE

SEQ ID NO: 21810 - protein, 10 aa, Artificial Sequence
  Description of Artificial Sequence: Synthetic epitope
KKDQNILTVD

SEQ ID NO: 21811 - protein, 10 aa, Artificial Sequence
  Description of Artificial Sequence: Synthetic epitope
KKDRSASHLD

SEQ ID NO: 21812 - protein, 10 aa, Artificial Sequence
  Description of Artificial Sequence: Synthetic epitope
KKDSKMKGTL

SEQ ID NO: 21813 - protein, 10 aa, Artificial Sequence
  Description of Artificial Sequence: Synthetic epitope
KKDSRLRITP

SEQ ID NO: 21814 - protein, 10 aa, Artificial Sequence
  Description of Artificial Sequence: Synthetic epitope
KKDSTLDAAE

SEQ ID NO: 21815 - protein, 10 aa, Artificial Sequence
  Description of Artificial Sequence: Synthetic epitope
KKDSTQAEED

SEQ ID NO: 21816 - protein, 10 aa, Artificial Sequence
  Description of Artificial Sequence: Synthetic epitope
KKDSVDTVAI

SEQ ID NO: 21817 - protein, 10 aa, Artificial Sequence
  Description of Artificial Sequence: Synthetic epitope
KKDSVESHPT

SEQ ID NO: 21818 - protein, 10 aa, Artificial Sequence
  Description of Artificial Sequence: Synthetic epitope
KKDYRISRNV

SEQ ID NO: 21819 - protein, 10 aa, Artificial Sequence
  Description of Artificial Sequence: Synthetic epitope
KKDYRKETKS

SEQ ID NO: 21820 - protein, 10 aa, Artificial Sequence
  Description of Artificial Sequence: Synthetic epitope
KKEAARASRK

SEQ ID NO: 21821 - protein, 10 aa, Artificial Sequence
  Description of Artificial Sequence: Synthetic epitope
KKEADAIKLT

SEQ ID NO: 21822 - protein, 10 aa, Artificial Sequence
  Description of Artificial Sequence: Synthetic epitope
KKEAEQVLQK

SEQ ID NO: 21823 - protein, 10 aa, Artificial Sequence
  Description of Artificial Sequence: Synthetic epitope
KKEAFRLQPY

SEQ ID NO: 21824 - protein, 10 aa, Artificial Sequence
  Description of Artificial Sequence: Synthetic epitope
KKEASAETEY

SEQ ID NO: 21825 - protein, 10 aa, Artificial Sequence
  Description of Artificial Sequence: Synthetic epitope
KKEDEIKQWL

SEQ ID NO: 21826 - protein, 10 aa, Artificial Sequence
  Description of Artificial Sequence: Synthetic epitope
KKEDKETSAK

SEQ ID NO: 21827 - protein, 10 aa, Artificial Sequence
  Description of Artificial Sequence: Synthetic epitope
KKEDYVLTKF

SEQ ID NO: 21828 - protein, 10 aa, Artificial Sequence
  Description of Artificial Sequence: Synthetic epitope
KKEEHREDKV

SEQ ID NO: 21829 - protein, 10 aa, Artificial Sequence
  Description of Artificial Sequence: Synthetic epitope
KKEEKMTMMA

SEQ ID NO: 21830 - protein, 10 aa, Artificial Sequence
  Description of Artificial Sequence: Synthetic epitope
KKEGKISSKT

SEQ ID NO: 21831 - protein, 10 aa, Artificial Sequence
  Description of Artificial Sequence: Synthetic epitope
KKEHFWSIDQ

SEQ ID NO: 21832 - protein, 10 aa, Artificial Sequence
  Description of Artificial Sequence: Synthetic epitope
KKEIHIPVRK

SEQ ID NO: 21833 - protein, 10 aa, Artificial Sequence
  Description of Artificial Sequence: Synthetic epitope
KKEITEEVWY

SEQ ID NO: 21834 - protein, 10 aa, Artificial Sequence
  Description of Artificial Sequence: Synthetic epitope
KKEITLLEQR

SEQ ID NO: 21835 - protein, 10 aa, Artificial Sequence
  Description of Artificial Sequence: Synthetic epitope
KKEKARLGQL

SEQ ID NO: 21836 - protein, 10 aa, Artificial Sequence
  Description of Artificial Sequence: Synthetic epitope
KKEKASTETE

SEQ ID NO: 21837 - protein, 10 aa, Artificial Sequence
  Description of Artificial Sequence: Synthetic epitope
KKEKATQPET

SEQ ID NO: 21838 - protein, 10 aa, Artificial Sequence
  Description of Artificial Sequence: Synthetic epitope
KKEKEAEDTQ

SEQ ID NO: 21839 - protein, 10 aa, Artificial Sequence
  Description of Artificial Sequence: Synthetic epitope
KKEKEDEKEL

SEQ ID NO: 21840 - protein, 10 aa, Artificial Sequence
  Description of Artificial Sequence: Synthetic epitope
KKEKFSPTFI

SEQ ID NO: 21841 - protein, 10 aa, Artificial Sequence
  Description of Artificial Sequence: Synthetic epitope
KKEKIVEKVS

SEQ ID NO: 21842 - protein, 10 aa, Artificial Sequence
  Description of Artificial Sequence: Synthetic epitope
KKEKKEDIFR

SEQ ID NO: 21843 - protein, 10 aa, Artificial Sequence
  Description of Artificial Sequence: Synthetic epitope
KKEKKNIVQH

SEQ ID NO: 21844 - protein, 10 aa, Artificial Sequence
  Description of Artificial Sequence: Synthetic epitope
KKEKRETDEE

SEQ ID NO: 21845 - protein, 10 aa, Artificial Sequence
  Description of Artificial Sequence: Synthetic epitope
KKEKRETGKA

SEQ ID NO: 21846 - protein, 10 aa, Artificial Sequence
  Description of Artificial Sequence: Synthetic epitope
KKEKSEMVPS

SEQ ID NO: 21847 - protein, 10 aa, Artificial Sequence
  Description of Artificial Sequence: Synthetic epitope
KKELFKVRPP

SEQ ID NO: 21848 - protein, 10 aa, Artificial Sequence
  Description of Artificial Sequence: Synthetic epitope
KKELHIMEQK

SEQ ID NO: 21849 - protein, 10 aa, Artificial Sequence
  Description of Artificial Sequence: Synthetic epitope
KKELKKAASD

SEQ ID NO: 21850 - protein, 10 aa, Artificial Sequence
  Description of Artificial Sequence: Synthetic epitope
KKELKSLDIY

SEQ ID NO: 21851 - protein, 10 aa, Artificial Sequence
  Description of Artificial Sequence: Synthetic epitope
KKELLQRAEK

SEQ ID NO: 21852 - protein, 10 aa, Artificial Sequence
  Description of Artificial Sequence: Synthetic epitope
KKELLSTELL

SEQ ID NO: 21853 - protein, 10 aa, Artificial Sequence
  Description of Artificial Sequence: Synthetic epitope
KKELPKANKQ

SEQ ID NO: 21854 - protein, 10 aa, Artificial Sequence
  Description of Artificial Sequence: Synthetic epitope
KKELQSNKES

SEQ ID NO: 21855 - protein, 10 aa, Artificial Sequence
  Description of Artificial Sequence: Synthetic epitope
KKELRASGSS

SEQ ID NO: 21856 - protein, 10 aa, Artificial Sequence
  Description of Artificial Sequence: Synthetic epitope
KKELSKSPEK

SEQ ID NO: 21857 - protein, 10 aa, Artificial Sequence
  Description of Artificial Sequence: Synthetic epitope
KKEMASLSAA

SEQ ID NO: 21858 - protein, 10 aa, Artificial Sequence
  Description of Artificial Sequence: Synthetic epitope
KKEMQVAALT

SEQ ID NO: 21859 - protein, 10 aa, Artificial Sequence
  Description of Artificial Sequence: Synthetic epitope
KKEMVKAEED

SEQ ID NO: 21860 - protein, 10 aa, Artificial Sequence
  Description of Artificial Sequence: Synthetic epitope
KKENERAQGK

SEQ ID NO: 21861 - protein, 10 aa, Artificial Sequence
  Description of Artificial Sequence: Synthetic epitope
KKEPSSTKRR

SEQ ID NO: 21862 - protein, 10 aa, Artificial Sequence
  Description of Artificial Sequence: Synthetic epitope
KKEQELASQK

SEQ ID NO: 21863 - protein, 10 aa, Artificial Sequence
  Description of Artificial Sequence: Synthetic epitope
KKEQENKTLV

SEQ ID NO: 21864 - protein, 10 aa, Artificial Sequence
  Description of Artificial Sequence: Synthetic epitope
KKEQKLSTDD

SEQ ID NO: 21865 - protein, 10 aa, Artificial Sequence
  Description of Artificial Sequence: Synthetic epitope
KKEQRRQEFQ

SEQ ID NO: 21866 - protein, 10 aa, Artificial Sequence
  Description of Artificial Sequence: Synthetic epitope
KKERDQAKDQ

SEQ ID NO: 21867 - protein, 10 aa, Artificial Sequence
  Description of Artificial Sequence: Synthetic epitope
KKERKQAMQE

SEQ ID NO: 21868 - protein, 10 aa, Artificial Sequence
  Description of Artificial Sequence: Synthetic epitope
KKESALSTRD

SEQ ID NO: 21869 - protein, 10 aa, Artificial Sequence
  Description of Artificial Sequence: Synthetic epitope
KKESFTVTKK

SEQ ID NO: 21870 - protein, 10 aa, Artificial Sequence
  Description of Artificial Sequence: Synthetic epitope
KKESKVLLED

SEQ ID NO: 21871 - protein, 10 aa, Artificial Sequence
  Description of Artificial Sequence: Synthetic epitope
KKESKVSMSK

SEQ ID NO: 21872 - protein, 10 aa, Artificial Sequence
  Description of Artificial Sequence: Synthetic epitope
KKESQNLENN

SEQ ID NO: 21873 - protein, 10 aa, Artificial Sequence
  Description of Artificial Sequence: Synthetic epitope
KKESSVRSVS

SEQ ID NO: 21874 - protein, 10 aa, Artificial Sequence
  Description of Artificial Sequence: Synthetic epitope
KKESTNSMET

SEQ ID NO: 21875 - protein, 10 aa, Artificial Sequence
  Description of Artificial Sequence: Synthetic epitope
KKESTTRLQE

SEQ ID NO: 21876 - protein, 10 aa, Artificial Sequence
  Description of Artificial Sequence: Synthetic epitope
KKESVRNAEA

SEQ ID NO: 21877 - protein, 10 aa, Artificial Sequence
  Description of Artificial Sequence: Synthetic epitope
KKETDSLKVA

SEQ ID NO: 21878 - protein, 10 aa, Artificial Sequence
  Description of Artificial Sequence: Synthetic epitope
KKETEIRSQQ

SEQ ID NO: 21879 - protein, 10 aa, Artificial Sequence
  Description of Artificial Sequence: Synthetic epitope
KKETKLVLKE

SEQ ID NO: 21880 - protein, 10 aa, Artificial Sequence
  Description of Artificial Sequence: Synthetic epitope
KKETSQRKDT

SEQ ID NO: 21881 - protein, 10 aa, Artificial Sequence
  Description of Artificial Sequence: Synthetic epitope
KKETTADSQT

SEQ ID NO: 21882 - protein, 10 aa, Artificial Sequence
  Description of Artificial Sequence: Synthetic epitope
KKEVAEKSQI

SEQ ID NO: 21883 - protein, 10 aa, Artificial Sequence
  Description of Artificial Sequence: Synthetic epitope
KKEVENSQAA

SEQ ID NO: 21884 - protein, 10 aa, Artificial Sequence
  Description of Artificial Sequence: Synthetic epitope
KKEVKSADTA

SEQ ID NO: 21885 - protein, 10 aa, Artificial Sequence
  Description of Artificial Sequence: Synthetic epitope
KKEVRNKIYS

SEQ ID NO: 21886 - protein, 10 aa, Artificial Sequence
  Description of Artificial Sequence: Synthetic epitope
KKEVSKTVVS

SEQ ID NO: 21887 - protein, 10 aa, Artificial Sequence
  Description of Artificial Sequence: Synthetic epitope
KKEVVAEVVK

SEQ ID NO: 21888 - protein, 10 aa, Artificial Sequence
  Description of Artificial Sequence: Synthetic epitope
KKEYMLGLEA

SEQ ID NO: 21889 - protein, 10 aa, Artificial Sequence
  Description of Artificial Sequence: Synthetic epitope
KKFAADFAAE

SEQ ID NO: 21890 - protein, 10 aa, Artificial Sequence
  Description of Artificial Sequence: Synthetic epitope
KKFDAISAEL

SEQ ID NO: 21891 - protein, 10 aa, Artificial Sequence
  Description of Artificial Sequence: Synthetic epitope
KKFGISANDT

SEQ ID NO: 21892 - protein, 10 aa, Artificial Sequence
  Description of Artificial Sequence: Synthetic epitope
KKFGNVKAIS

SEQ ID NO: 21893 - protein, 10 aa, Artificial Sequence
  Description of Artificial Sequence: Synthetic epitope
KKFGTMTEKQ

SEQ ID NO: 21894 - protein, 10 aa, Artificial Sequence
  Description of Artificial Sequence: Synthetic epitope
KKFHPVNYDV

SEQ ID NO: 21895 - protein, 10 aa, Artificial Sequence
  Description of Artificial Sequence: Synthetic epitope
KKFIKQHLSE

SEQ ID NO: 21896 - protein, 10 aa, Artificial Sequence
  Description of Artificial Sequence: Synthetic epitope
KKFIYALKAP

SEQ ID NO: 21897 - protein, 10 aa, Artificial Sequence
  Description of Artificial Sequence: Synthetic epitope
KKFKITVKQA

SEQ ID NO: 21898 - protein, 10 aa, Artificial Sequence
  Description of Artificial Sequence: Synthetic epitope
KKFKLKLLSV

SEQ ID NO: 21899 - protein, 10 aa, Artificial Sequence
  Description of Artificial Sequence: Synthetic epitope
KKFKQMTEAI

SEQ ID NO: 21900 - protein, 10 aa, Artificial Sequence
  Description of Artificial Sequence: Synthetic epitope
KKFLTESHDR

SEQ ID NO: 21901 - protein, 10 aa, Artificial Sequence
  Description of Artificial Sequence: Synthetic epitope
KKFPTWSVAQ

SEQ ID NO: 21902 - protein, 10 aa, Artificial Sequence
  Description of Artificial Sequence: Synthetic epitope
KKFQKANHKV

SEQ ID NO: 21903 - protein, 10 aa, Artificial Sequence
  Description of Artificial Sequence: Synthetic epitope
KKFQQTAAYR

SEQ ID NO: 21904 - protein, 10 aa, Artificial Sequence
  Description of Artificial Sequence: Synthetic epitope
KKFRQKKQRQ

SEQ ID NO: 21905 - protein, 10 aa, Artificial Sequence
  Description of Artificial Sequence: Synthetic epitope
KKFRYVKLIS

SEQ ID NO: 21906 - protein, 10 aa, Artificial Sequence
  Description of Artificial Sequence: Synthetic epitope
KKFVQEEAFR

SEQ ID NO: 21907 - protein, 10 aa, Artificial Sequence
  Description of Artificial Sequence: Synthetic epitope
KKGDAISYAR

SEQ ID NO: 21908 - protein, 10 aa, Artificial Sequence
  Description of Artificial Sequence: Synthetic epitope
KKGDLQWNAG

SEQ ID NO: 21909 - protein, 10 aa, Artificial Sequence
  Description of Artificial Sequence: Synthetic epitope
KKGFINKIYA

SEQ ID NO: 21910 - protein, 10 aa, Artificial Sequence
  Description of Artificial Sequence: Synthetic epitope
KKGGEMEILN

SEQ ID NO: 21911 - protein, 10 aa, Artificial Sequence
  Description of Artificial Sequence: Synthetic epitope
KKGGSFQLNE

SEQ ID NO: 21912 - protein, 10 aa, Artificial Sequence
  Description of Artificial Sequence: Synthetic epitope
KKGIAAKSSK

SEQ ID NO: 21913 - protein, 10 aa, Artificial Sequence
  Description of Artificial Sequence: Synthetic epitope
KKGIEALKQV

SEQ ID NO: 21914 - protein, 10 aa, Artificial Sequence
  Description of Artificial Sequence: Synthetic epitope
KKGIVNEQFL

SEQ ID NO: 21915 - protein, 10 aa, Artificial Sequence
  Description of Artificial Sequence: Synthetic epitope
KKGKAEAAPP

SEQ ID NO: 21916 - protein, 10 aa, Artificial Sequence
  Description of Artificial Sequence: Synthetic epitope
KKGKEKHEPD

SEQ ID NO: 21917 - protein, 10 aa, Artificial Sequence
  Description of Artificial Sequence: Synthetic epitope
KKGKKQGVPE

SEQ ID NO: 21918 - protein, 10 aa, Artificial Sequence
  Description of Artificial Sequence: Synthetic epitope
KKGLAAKREM

SEQ ID NO: 21919 - protein, 10 aa, Artificial Sequence
  Description of Artificial Sequence: Synthetic epitope
KKGLEAAEVA

SEQ ID NO: 21920 - protein, 10 aa, Artificial Sequence
  Description of Artificial Sequence: Synthetic epitope
KKGLKASFSL

SEQ ID NO: 21921 - protein, 10 aa, Artificial Sequence
  Description of Artificial Sequence: Synthetic epitope
KKGLKGTWEE

SEQ ID NO: 21922 - protein, 10 aa, Artificial Sequence
  Description of Artificial Sequence: Synthetic epitope
KKGLSKSKTH

SEQ ID NO: 21923 - protein, 10 aa, Artificial Sequence
  Description of Artificial Sequence: Synthetic epitope
KKGLTETTKV

SEQ ID NO: 21924 - protein, 10 aa, Artificial Sequence
  Description of Artificial Sequence: Synthetic epitope
KKGLVALARQ

SEQ ID NO: 21925 - protein, 10 aa, Artificial Sequence
  Description of Artificial Sequence: Synthetic epitope
KKGMSSKEIY

SEQ ID NO: 21926 - protein, 10 aa, Artificial Sequence
  Description of Artificial Sequence: Synthetic epitope
KKGMVAEEYN

SEQ ID NO: 21927 - protein, 10 aa, Artificial Sequence
  Description of Artificial Sequence: Synthetic epitope
KKGNKLLEKT

SEQ ID NO: 21928 - protein, 10 aa, Artificial Sequence
  Description of Artificial Sequence: Synthetic epitope
KKGPRASGNL

SEQ ID NO: 21929 - protein, 10 aa, Artificial Sequence
  Description of Artificial Sequence: Synthetic epitope
KKGPSKATVK

SEQ ID NO: 21930 - protein, 10 aa, Artificial Sequence
  Description of Artificial Sequence: Synthetic epitope
KKGQGIMNKE

SEQ ID NO: 21931 - protein, 10 aa, Artificial Sequence
  Description of Artificial Sequence: Synthetic epitope
KKGRMMKDIS

SEQ ID NO: 21932 - protein, 10 aa, Artificial Sequence
  Description of Artificial Sequence: Synthetic epitope
KKGSKALAEF

SEQ ID NO: 21933 - protein, 10 aa, Artificial Sequence
  Description of Artificial Sequence: Synthetic epitope
KKGSKEQAAS

SEQ ID NO: 21934 - protein, 10 aa, Artificial Sequence
  Description of Artificial Sequence: Synthetic epitope
KKGSMSDSAN

SEQ ID NO: 21935 - protein, 10 aa, Artificial Sequence
  Description of Artificial Sequence: Synthetic epitope
KKGTKIQTPA

SEQ ID NO: 21936 - protein, 10 aa, Artificial Sequence
  Description of Artificial Sequence: Synthetic epitope
KKHATSAKNT

SEQ ID NO: 21937 - protein, 10 aa, Artificial Sequence
  Description of Artificial Sequence: Synthetic epitope
KKHDADKVGL

SEQ ID NO: 21938 - protein, 10 aa, Artificial Sequence
  Description of Artificial Sequence: Synthetic epitope
KKHDKLSKQQ

SEQ ID NO: 21939 - protein, 10 aa, Artificial Sequence
  Description of Artificial Sequence: Synthetic epitope
KKHKKRSRTR

SEQ ID NO: 21940 - protein, 10 aa, Artificial Sequence
  Description of Artificial Sequence: Synthetic epitope
KKHMAIPKSS

SEQ ID NO: 21941 - protein, 10 aa, Artificial Sequence
  Description of Artificial Sequence: Synthetic epitope
KKHQAAMEKE

SEQ ID NO: 21942 - protein, 10 aa, Artificial Sequence
  Description of Artificial Sequence: Synthetic epitope
KKHQIIAELK

SEQ ID NO: 21943 - protein, 10 aa, Artificial Sequence
  Description of Artificial Sequence: Synthetic epitope
KKHRISGAKT

SEQ ID NO: 21944 - protein, 10 aa, Artificial Sequence
  Description of Artificial Sequence: Synthetic epitope
KKHRSESESK

SEQ ID NO: 21945 - protein, 10 aa, Artificial Sequence
  Description of Artificial Sequence: Synthetic epitope
KKHSHRQNKK

SEQ ID NO: 21946 - protein, 10 aa, Artificial Sequence
  Description of Artificial Sequence: Synthetic epitope
KKHSKINDTE

SEQ ID NO: 21947 - protein, 10 aa, Artificial Sequence
  Description of Artificial Sequence: Synthetic epitope
KKHSQLIGYP

SEQ ID NO: 21948 - protein, 10 aa, Artificial Sequence
  Description of Artificial Sequence: Synthetic epitope
KKHSRKSKRH

SEQ ID NO: 21949 - protein, 10 aa, Artificial Sequence
  Description of Artificial Sequence: Synthetic epitope
KKIALTSANK

SEQ ID NO: 21950 - protein, 10 aa, Artificial Sequence
  Description of Artificial Sequence: Synthetic epitope
KKIANFVEHK

SEQ ID NO: 21951 - protein, 10 aa, Artificial Sequence
  Description of Artificial Sequence: Synthetic epitope
KKIASAIVQA

SEQ ID NO: 21952 - protein, 10 aa, Artificial Sequence
  Description of Artificial Sequence: Synthetic epitope
KKIDILLKAV

SEQ ID NO: 21953 - protein, 10 aa, Artificial Sequence
  Description of Artificial Sequence: Synthetic epitope
KKIDSTVRLA

SEQ ID NO: 21954 - protein, 10 aa, Artificial Sequence
  Description of Artificial Sequence: Synthetic epitope
KKIEALQVGA

SEQ ID NO: 21955 - protein, 10 aa, Artificial Sequence
  Description of Artificial Sequence: Synthetic epitope
KKIEHETGTK

SEQ ID NO: 21956 - protein, 10 aa, Artificial Sequence
  Description of Artificial Sequence: Synthetic epitope
KKIENAMKTG

SEQ ID NO: 21957 - protein, 10 aa, Artificial Sequence
  Description of Artificial Sequence: Synthetic epitope
KKIFSKTKTH

SEQ ID NO: 21958 - protein, 10 aa, Artificial Sequence
  Description of Artificial Sequence: Synthetic epitope
KKIIAYQQKL

SEQ ID NO: 21959 - protein, 10 aa, Artificial Sequence
  Description of Artificial Sequence: Synthetic epitope
KKIISNLFLG

SEQ ID NO: 21960 - protein, 10 aa, Artificial Sequence
  Description of Artificial Sequence: Synthetic epitope
KKIIVSNKKR

SEQ ID NO: 21961 - protein, 10 aa, Artificial Sequence
  Description of Artificial Sequence: Synthetic epitope
KKIKAAFAEL

SEQ ID NO: 21962 - protein, 10 aa, Artificial Sequence
  Description of Artificial Sequence: Synthetic epitope
KKIKGKDLQL

SEQ ID NO: 21963 - protein, 10 aa, Artificial Sequence
  Description of Artificial Sequence: Synthetic epitope
KKIKKDSAML

SEQ ID NO: 21964 - protein, 10 aa, Artificial Sequence
  Description of Artificial Sequence: Synthetic epitope
KKIKKSVTRN

SEQ ID NO: 21965 - protein, 10 aa, Artificial Sequence
  Description of Artificial Sequence: Synthetic epitope
KKIKSSRDQA

SEQ ID NO: 21966 - protein, 10 aa, Artificial Sequence
  Description of Artificial Sequence: Synthetic epitope
KKILATPPQE

SEQ ID NO: 21967 - protein, 10 aa, Artificial Sequence
  Description of Artificial Sequence: Synthetic epitope
KKILDSLISD

SEQ ID NO: 21968 - protein, 10 aa, Artificial Sequence
  Description of Artificial Sequence: Synthetic epitope
KKILDSVGIE

SEQ ID NO: 21969 - protein, 10 aa, Artificial Sequence
  Description of Artificial Sequence: Synthetic epitope
KKILGMFTSQ

SEQ ID NO: 21970 - protein, 10 aa, Artificial Sequence
  Description of Artificial Sequence: Synthetic epitope
KKILLNIEHR

SEQ ID NO: 21971 - protein, 10 aa, Artificial Sequence
  Description of Artificial Sequence: Synthetic epitope
KKILSNVKKN

SEQ ID NO: 21972 - protein, 10 aa, Artificial Sequence
  Description of Artificial Sequence: Synthetic epitope
KKIMDRMTVS

SEQ ID NO: 21973 - protein, 10 aa, Artificial Sequence
  Description of Artificial Sequence: Synthetic epitope
KKIMTLNDIK

SEQ ID NO: 21974 - protein, 10 aa, Artificial Sequence
  Description of Artificial Sequence: Synthetic epitope
KKINALKKPT

SEQ ID NO: 21975 - protein, 10 aa, Artificial Sequence
  Description of Artificial Sequence: Synthetic epitope
KKIPQKSSHA

SEQ ID NO: 21976 - protein, 10 aa, Artificial Sequence
  Description of Artificial Sequence: Synthetic epitope
KKIQASTMAF

SEQ ID NO: 21977 - protein, 10 aa, Artificial Sequence
  Description of Artificial Sequence: Synthetic epitope
KKIQEAASQG

SEQ ID NO: 21978 - protein, 10 aa, Artificial Sequence
  Description of Artificial Sequence: Synthetic epitope
KKIQERKMAA

SEQ ID NO: 21979 - protein, 10 aa, Artificial Sequence
  Description of Artificial Sequence: Synthetic epitope
KKIREVAQTA

SEQ ID NO: 21980 - protein, 10 aa, Artificial Sequence
  Description of Artificial Sequence: Synthetic epitope
KKIRGFLVQF

SEQ ID NO: 21981 - protein, 10 aa, Artificial Sequence
  Description of Artificial Sequence: Synthetic epitope
KKISAALNGH

SEQ ID NO: 21982 - protein, 10 aa, Artificial Sequence
  Description of Artificial Sequence: Synthetic epitope
KKISAELNSV

SEQ ID NO: 21983 - protein, 10 aa, Artificial Sequence
  Description of Artificial Sequence: Synthetic epitope
KKISAKTLTD

SEQ ID NO: 21984 - protein, 10 aa, Artificial Sequence
  Description of Artificial Sequence: Synthetic epitope
KKISGKVTKS

SEQ ID NO: 21985 - protein, 10 aa, Artificial Sequence
  Description of Artificial Sequence: Synthetic epitope
KKISKNPTFK

SEQ ID NO: 21986 - protein, 10 aa, Artificial Sequence
  Description of Artificial Sequence: Synthetic epitope
KKISRDKSVT

SEQ ID NO: 21987 - protein, 10 aa, Artificial Sequence
  Description of Artificial Sequence: Synthetic epitope
KKISSDATNF

SEQ ID NO: 21988 - protein, 10 aa, Artificial Sequence
  Description of Artificial Sequence: Synthetic epitope
KKISSELEML

SEQ ID NO: 21989 - protein, 10 aa, Artificial Sequence
  Description of Artificial Sequence: Synthetic epitope
KKITLVNTTY

SEQ ID NO: 21990 - protein, 10 aa, Artificial Sequence
  Description of Artificial Sequence: Synthetic epitope
KKIVKTSATA

SEQ ID NO: 21991 - protein, 10 aa, Artificial Sequence
  Description of Artificial Sequence: Synthetic epitope
KKIVTDVSEV

SEQ ID NO: 21992 - protein, 10 aa, Artificial Sequence
  Description of Artificial Sequence: Synthetic epitope
KKLAALNVTE

SEQ ID NO: 21993 - protein, 10 aa, Artificial Sequence
  Description of Artificial Sequence: Synthetic epitope
KKLAAQDITP

SEQ ID NO: 21994 - protein, 10 aa, Artificial Sequence
  Description of Artificial Sequence: Synthetic epitope
KKLAVAIKKP

SEQ ID NO: 21995 - protein, 10 aa, Artificial Sequence
  Description of Artificial Sequence: Synthetic epitope
KKLDASSEKQ

SEQ ID NO: 21996 - protein, 10 aa, Artificial Sequence
  Description of Artificial Sequence: Synthetic epitope
KKLDSTQTTH

SEQ ID NO: 21997 - protein, 10 aa, Artificial Sequence
  Description of Artificial Sequence: Synthetic epitope
KKLDTKQQTN

SEQ ID NO: 21998 - protein, 10 aa, Artificial Sequence
  Description of Artificial Sequence: Synthetic epitope
KKLEESKQLL

SEQ ID NO: 21999 - protein, 10 aa, Artificial Sequence
  Description of Artificial Sequence: Synthetic epitope
KKLEEVKTSA

SEQ ID NO: 22000 - protein, 10 aa, Artificial Sequence
  Description of Artificial Sequence: Synthetic epitope
KKLEKRRALE

SEQ ID NO: 22001 - protein, 10 aa, Artificial Sequence
  Description of Artificial Sequence: Synthetic epitope
KKLELKVKEQ

SEQ ID NO: 22002 - protein, 10 aa, Artificial Sequence
  Description of Artificial Sequence: Synthetic epitope
KKLESILAQD

SEQ ID NO: 22003 - protein, 10 aa, Artificial Sequence
  Description of Artificial Sequence: Synthetic epitope
KKLETLARKE

SEQ ID NO: 22004 - protein, 10 aa, Artificial Sequence
  Description of Artificial Sequence: Synthetic epitope
KKLEVNEAEL

SEQ ID NO: 22005 - protein, 10 aa, Artificial Sequence
  Description of Artificial Sequence: Synthetic epitope
KKLFDAKSEH

SEQ ID NO: 22006 - protein, 10 aa, Artificial Sequence
  Description of Artificial Sequence: Synthetic epitope
KKLFGSQLKT

SEQ ID NO: 22007 - protein, 10 aa, Artificial Sequence
  Description of Artificial Sequence: Synthetic epitope
KKLFSEFVLA

SEQ ID NO: 22008 - protein, 10 aa, Artificial Sequence
  Description of Artificial Sequence: Synthetic epitope
KKLGVSVSPS

SEQ ID NO: 22009 - protein, 10 aa, Artificial Sequence
  Description of Artificial Sequence: Synthetic epitope
KKLIKLVGER

SEQ ID NO: 22010 - protein, 10 aa, Artificial Sequence
  Description of Artificial Sequence: Synthetic epitope
KKLINSFSMT

SEQ ID NO: 22011 - protein, 10 aa, Artificial Sequence
  Description of Artificial Sequence: Synthetic epitope
KKLKADLQAS

SEQ ID NO: 22012 - protein, 10 aa, Artificial Sequence
  Description of Artificial Sequence: Synthetic epitope
KKLKAKLAQY

SEQ ID NO: 22013 - protein, 10 aa, Artificial Sequence
  Description of Artificial Sequence: Synthetic epitope
KKLKLVMADK

SEQ ID NO: 22014 - protein, 10 aa, Artificial Sequence
  Description of Artificial Sequence: Synthetic epitope
KKLKNSLPLR

SEQ ID NO: 22015 - protein, 10 aa, Artificial Sequence
  Description of Artificial Sequence: Synthetic epitope
KKLKQLKQSE

SEQ ID NO: 22016 - protein, 10 aa, Artificial Sequence
  Description of Artificial Sequence: Synthetic epitope
KKLKTQLELE

SEQ ID NO: 22017 - protein, 10 aa, Artificial Sequence
  Description of Artificial Sequence: Synthetic epitope
KKLKYTEAYP

SEQ ID NO: 22018 - protein, 10 aa, Artificial Sequence
  Description of Artificial Sequence: Synthetic epitope
KKLLEGIVKD

SEQ ID NO: 22019 - protein, 10 aa, Artificial Sequence
  Description of Artificial Sequence: Synthetic epitope
KKLLMLIEMS

SEQ ID NO: 22020 - protein, 10 aa, Artificial Sequence
  Description of Artificial Sequence: Synthetic epitope
KKLLQILSKL

SEQ ID NO: 22021 - protein, 10 aa, Artificial Sequence
  Description of Artificial Sequence: Synthetic epitope
KKLLSFAENS

SEQ ID NO: 22022 - protein, 10 aa, Artificial Sequence
  Description of Artificial Sequence: Synthetic epitope
KKLLSMKLSI

SEQ ID NO: 22023 - protein, 10 aa, Artificial Sequence
  Description of Artificial Sequence: Synthetic epitope
KKLLSQTQRE

SEQ ID NO: 22024 - protein, 10 aa, Artificial Sequence
  Description of Artificial Sequence: Synthetic epitope
KKLLVKFQVP

SEQ ID NO: 22025 - protein, 10 aa, Artificial Sequence
  Description of Artificial Sequence: Synthetic epitope
KKLLVVDRTR

SEQ ID NO: 22026 - protein, 10 aa, Artificial Sequence
  Description of Artificial Sequence: Synthetic epitope
KKLMILSTEY

SEQ ID NO: 22027 - protein, 10 aa, Artificial Sequence
  Description of Artificial Sequence: Synthetic epitope
KKLMKQGGAA

SEQ ID NO: 22028 - protein, 10 aa, Artificial Sequence
  Description of Artificial Sequence: Synthetic epitope
KKLNENTLKL

SEQ ID NO: 22029 - protein, 10 aa, Artificial Sequence
  Description of Artificial Sequence: Synthetic epitope
KKLNIARNEQ

SEQ ID NO: 22030 - protein, 10 aa, Artificial Sequence
  Description of Artificial Sequence: Synthetic epitope
KKLNKINTLK

SEQ ID NO: 22031 - protein, 10 aa, Artificial Sequence
  Description of Artificial Sequence: Synthetic epitope
KKLNRVEPNL

SEQ ID NO: 22032 - protein, 10 aa, Artificial Sequence
  Description of Artificial Sequence: Synthetic epitope
KKLPAGIKRK

SEQ ID NO: 22033 - protein, 10 aa, Artificial Sequence
  Description of Artificial Sequence: Synthetic epitope
KKLQAGSIAI

SEQ ID NO: 22034 - protein, 10 aa, Artificial Sequence
  Description of Artificial Sequence: Synthetic epitope
KKLQAIVVQS

SEQ ID NO: 22035 - protein, 10 aa, Artificial Sequence
  Description of Artificial Sequence: Synthetic epitope
KKLQDVLKTE

SEQ ID NO: 22036 - protein, 10 aa, Artificial Sequence
  Description of Artificial Sequence: Synthetic epitope
KKLQEQLMGA

SEQ ID NO: 22037 - protein, 10 aa, Artificial Sequence
  Description of Artificial Sequence: Synthetic epitope
KKLQKAALLK

SEQ ID NO: 22038 - protein, 10 aa, Artificial Sequence
  Description of Artificial Sequence: Synthetic epitope
KKLQKFASTV

SEQ ID NO: 22039 - protein, 10 aa, Artificial Sequence
  Description of Artificial Sequence: Synthetic epitope
KKLQMENNGW

SEQ ID NO: 22040 - protein, 10 aa, Artificial Sequence
  Description of Artificial Sequence: Synthetic epitope
KKLQSKLAQN

SEQ ID NO: 22041 - protein, 10 aa, Artificial Sequence
  Description of Artificial Sequence: Synthetic epitope
KKLQTRAANL

SEQ ID NO: 22042 - protein, 10 aa, Artificial Sequence
  Description of Artificial Sequence: Synthetic epitope
KKLRAKDKEN

SEQ ID NO: 22043 - protein, 10 aa, Artificial Sequence
  Description of Artificial Sequence: Synthetic epitope
KKLRARSQLS

SEQ ID NO: 22044 - protein, 10 aa, Artificial Sequence
  Description of Artificial Sequence: Synthetic epitope
KKLRKIGNVE

SEQ ID NO: 22045 - protein, 10 aa, Artificial Sequence
  Description of Artificial Sequence: Synthetic epitope
KKLSAKRADL

SEQ ID NO: 22046 - protein, 10 aa, Artificial Sequence
  Description of Artificial Sequence: Synthetic epitope
KKLSEAESSD

SEQ ID NO: 22047 - protein, 10 aa, Artificial Sequence
  Description of Artificial Sequence: Synthetic epitope
KKLSKKQSEL

SEQ ID NO: 22048 - protein, 10 aa, Artificial Sequence
  Description of Artificial Sequence: Synthetic epitope
KKLSLSLSPS

SEQ ID NO: 22049 - protein, 10 aa, Artificial Sequence
  Description of Artificial Sequence: Synthetic epitope
KKLSLSSQLG

SEQ ID NO: 22050 - protein, 10 aa, Artificial Sequence
  Description of Artificial Sequence: Synthetic epitope
KKLSMSSIET

SEQ ID NO: 22051 - protein, 10 aa, Artificial Sequence
  Description of Artificial Sequence: Synthetic epitope
KKLSNAIITS

SEQ ID NO: 22052 - protein, 10 aa, Artificial Sequence
  Description of Artificial Sequence: Synthetic epitope
KKLSNRLAQI

SEQ ID NO: 22053 - protein, 10 aa, Artificial Sequence
  Description of Artificial Sequence: Synthetic epitope
KKLSSGNSKL

SEQ ID NO: 22054 - protein, 10 aa, Artificial Sequence
  Description of Artificial Sequence: Synthetic epitope
KKLSSKVMTK

SEQ ID NO: 22055 - protein, 10 aa, Artificial Sequence
  Description of Artificial Sequence: Synthetic epitope
KKLSSLQEGS

SEQ ID NO: 22056 - protein, 10 aa, Artificial Sequence
  Description of Artificial Sequence: Synthetic epitope
KKLSSTSVYD

SEQ ID NO: 22057 - protein, 10 aa, Artificial Sequence
  Description of Artificial Sequence: Synthetic epitope
KKLSTSSNND

SEQ ID NO: 22058 - protein, 10 aa, Artificial Sequence
  Description of Artificial Sequence: Synthetic epitope
KKLSVKSITN

SEQ ID NO: 22059 - protein, 10 aa, Artificial Sequence
  Description of Artificial Sequence: Synthetic epitope
KKLSWTFLNK

SEQ ID NO: 22060 - protein, 10 aa, Artificial Sequence
  Description of Artificial Sequence: Synthetic epitope
KKLTAGRLAA

SEQ ID NO: 22061 - protein, 10 aa, Artificial Sequence
  Description of Artificial Sequence: Synthetic epitope
KKLTAPQKEL

SEQ ID NO: 22062 - protein, 10 aa, Artificial Sequence
  Description of Artificial Sequence: Synthetic epitope
KKLTKSTKQP

SEQ ID NO: 22063 - protein, 10 aa, Artificial Sequence
  Description of Artificial Sequence: Synthetic epitope
KKLTQGEVAA

SEQ ID NO: 22064 - protein, 10 aa, Artificial Sequence
  Description of Artificial Sequence: Synthetic epitope
KKLTSKNKSN

SEQ ID NO: 22065 - protein, 10 aa, Artificial Sequence
  Description of Artificial Sequence: Synthetic epitope
KKLTVASPVT

SEQ ID NO: 22066 - protein, 10 aa, Artificial Sequence
  Description of Artificial Sequence: Synthetic epitope
KKLTVIKAKE

SEQ ID NO: 22067 - protein, 10 aa, Artificial Sequence
  Description of Artificial Sequence: Synthetic epitope
KKLTYAKETV

SEQ ID NO: 22068 - protein, 10 aa, Artificial Sequence
  Description of Artificial Sequence: Synthetic epitope
KKLVAASQAA

SEQ ID NO: 22069 - protein, 10 aa, Artificial Sequence
  Description of Artificial Sequence: Synthetic epitope
KKLVEAEELE

SEQ ID NO: 22070 - protein, 10 aa, Artificial Sequence
  Description of Artificial Sequence: Synthetic epitope
KKLVEGDLSS

SEQ ID NO: 22071 - protein, 10 aa, Artificial Sequence
  Description of Artificial Sequence: Synthetic epitope
KKLVFVTDKG

SEQ ID NO: 22072 - protein, 10 aa, Artificial Sequence
  Description of Artificial Sequence: Synthetic epitope
KKLVSAELKL

SEQ ID NO: 22073 - protein, 10 aa, Artificial Sequence
  Description of Artificial Sequence: Synthetic epitope
KKLVTEHKDT

SEQ ID NO: 22074 - protein, 10 aa, Artificial Sequence
  Description of Artificial Sequence: Synthetic epitope
KKLWKALDKD

SEQ ID NO: 22075 - protein, 10 aa, Artificial Sequence
  Description of Artificial Sequence: Synthetic epitope
KKMASDQEQL

SEQ ID NO: 22076 - protein, 10 aa, Artificial Sequence
  Description of Artificial Sequence: Synthetic epitope
KKMEAAFTKQ

SEQ ID NO: 22077 - protein, 10 aa, Artificial Sequence
  Description of Artificial Sequence: Synthetic epitope
KKMEALSARQ

SEQ ID NO: 22078 - protein, 10 aa, Artificial Sequence
  Description of Artificial Sequence: Synthetic epitope
KKMEESKAKF

SEQ ID NO: 22079 - protein, 10 aa, Artificial Sequence
  Description of Artificial Sequence: Synthetic epitope
KKMHIDDSYQ

SEQ ID NO: 22080 - protein, 10 aa, Artificial Sequence
  Description of Artificial Sequence: Synthetic epitope
KKMISEKMVK

SEQ ID NO: 22081 - protein, 10 aa, Artificial Sequence
  Description of Artificial Sequence: Synthetic epitope
KKMKLQLALQ

SEQ ID NO: 22082 - protein, 10 aa, Artificial Sequence
  Description of Artificial Sequence: Synthetic epitope
KKMKMTNRAA

SEQ ID NO: 22083 - protein, 10 aa, Artificial Sequence
  Description of Artificial Sequence: Synthetic epitope
KKMLGRIFEV

SEQ ID NO: 22084 - protein, 10 aa, Artificial Sequence
  Description of Artificial Sequence: Synthetic epitope
KKMNRSVSLT

SEQ ID NO: 22085 - protein, 10 aa, Artificial Sequence
  Description of Artificial Sequence: Synthetic epitope
KKMQLVNLRN

SEQ ID NO: 22086 - protein, 10 aa, Artificial Sequence
  Description of Artificial Sequence: Synthetic epitope
KKMQSSLKLV

SEQ ID NO: 22087 - protein, 10 aa, Artificial Sequence
  Description of Artificial Sequence: Synthetic epitope
KKMQSWYSML

SEQ ID NO: 22088 - protein, 10 aa, Artificial Sequence
  Description of Artificial Sequence: Synthetic epitope
KKMREQIGQT

SEQ ID NO: 22089 - protein, 10 aa, Artificial Sequence
  Description of Artificial Sequence: Synthetic epitope
KKMRMSEQQD

SEQ ID NO: 22090 - protein, 10 aa, Artificial Sequence
  Description of Artificial Sequence: Synthetic epitope
KKMRSRMDEK

SEQ ID NO: 22091 - protein, 10 aa, Artificial Sequence
  Description of Artificial Sequence: Synthetic epitope
KKMSADNQLQ

SEQ ID NO: 22092 - protein, 10 aa, Artificial Sequence
  Description of Artificial Sequence: Synthetic epitope
KKMSHMAEMM

SEQ ID NO: 22093 - protein, 10 aa, Artificial Sequence
  Description of Artificial Sequence: Synthetic epitope
KKMSKLSRSA

SEQ ID NO: 22094 - protein, 10 aa, Artificial Sequence
  Description of Artificial Sequence: Synthetic epitope
KKMSSKGLSG

SEQ ID NO: 22095 - protein, 10 aa, Artificial Sequence
  Description of Artificial Sequence: Synthetic epitope
KKMTKARLER

SEQ ID NO: 22096 - protein, 10 aa, Artificial Sequence
  Description of Artificial Sequence: Synthetic epitope
KKMTKARLER

SEQ ID NO: 22097 - protein, 10 aa, Artificial Sequence
  Description of Artificial Sequence: Synthetic epitope
KKMTKKFEME

SEQ ID NO: 22098 - protein, 10 aa, Artificial Sequence
  Description of Artificial Sequence: Synthetic epitope
KKMTKMPSAL

SEQ ID NO: 22099 - protein, 10 aa, Artificial Sequence
  Description of Artificial Sequence: Synthetic epitope
KKMTKVAEAK

SEQ ID NO: 22100 - protein, 10 aa, Artificial Sequence
  Description of Artificial Sequence: Synthetic epitope
KKMVATTKPK

SEQ ID NO: 22101 - protein, 10 aa, Artificial Sequence
  Description of Artificial Sequence: Synthetic epitope
KKMVHRSGPT

SEQ ID NO: 22102 - protein, 10 aa, Artificial Sequence
  Description of Artificial Sequence: Synthetic epitope
KKMVRRQPSN

SEQ ID NO: 22103 - protein, 10 aa, Artificial Sequence
  Description of Artificial Sequence: Synthetic epitope
KKNAIEHPVR

SEQ ID NO: 22104 - protein, 10 aa, Artificial Sequence
  Description of Artificial Sequence: Synthetic epitope
KKNAKPLSFK

SEQ ID NO: 22105 - protein, 10 aa, Artificial Sequence
  Description of Artificial Sequence: Synthetic epitope
KKNAVVFKSD

SEQ ID NO: 22106 - protein, 10 aa, Artificial Sequence
  Description of Artificial Sequence: Synthetic epitope
KKNDEKMDPE

SEQ ID NO: 22107 - protein, 10 aa, Artificial Sequence
  Description of Artificial Sequence: Synthetic epitope
KKNDKSPTNR

SEQ ID NO: 22108 - protein, 10 aa, Artificial Sequence
  Description of Artificial Sequence: Synthetic epitope
KKNEVADYEA

SEQ ID NO: 22109 - protein, 10 aa, Artificial Sequence
  Description of Artificial Sequence: Synthetic epitope
KKNEVSVTDS

SEQ ID NO: 22110 - protein, 10 aa, Artificial Sequence
  Description of Artificial Sequence: Synthetic epitope
KKNFYIESKA

SEQ ID NO: 22111 - protein, 10 aa, Artificial Sequence
  Description of Artificial Sequence: Synthetic epitope
KKNGKVRFAD

SEQ ID NO: 22112 - protein, 10 aa, Artificial Sequence
  Description of Artificial Sequence: Synthetic epitope
KKNIQESSVN

SEQ ID NO: 22113 - protein, 10 aa, Artificial Sequence
  Description of Artificial Sequence: Synthetic epitope
KKNISALIKT

SEQ ID NO: 22114 - protein, 10 aa, Artificial Sequence
  Description of Artificial Sequence: Synthetic epitope
KKNKDESSVS

SEQ ID NO: 22115 - protein, 10 aa, Artificial Sequence
  Description of Artificial Sequence: Synthetic epitope
KKNKKAAPRA

SEQ ID NO: 22116 - protein, 10 aa, Artificial Sequence
  Description of Artificial Sequence: Synthetic epitope
KKNKKSAWQA

SEQ ID NO: 22117 - protein, 10 aa, Artificial Sequence
  Description of Artificial Sequence: Synthetic epitope
KKNKKVNGLP

SEQ ID NO: 22118 - protein, 10 aa, Artificial Sequence
  Description of Artificial Sequence: Synthetic epitope
KKNKLTEADL

SEQ ID NO: 22119 - protein, 10 aa, Artificial Sequence
  Description of Artificial Sequence: Synthetic epitope
KKNLAKSQTL

SEQ ID NO: 22120 - protein, 10 aa, Artificial Sequence
  Description of Artificial Sequence: Synthetic epitope
KKNLSKSQIL

SEQ ID NO: 22121 - protein, 10 aa, Artificial Sequence
  Description of Artificial Sequence: Synthetic epitope
KKNMSAHSSQ

SEQ ID NO: 22122 - protein, 10 aa, Artificial Sequence
  Description of Artificial Sequence: Synthetic epitope
KKNMVDRSKL

SEQ ID NO: 22123 - protein, 10 aa, Artificial Sequence
  Description of Artificial Sequence: Synthetic epitope
KKNNKASAFR

SEQ ID NO: 22124 - protein, 10 aa, Artificial Sequence
  Description of Artificial Sequence: Synthetic epitope
KKNNLENKNA

SEQ ID NO: 22125 - protein, 10 aa, Artificial Sequence
  Description of Artificial Sequence: Synthetic epitope
KKNQDAAQQF

SEQ ID NO: 22126 - protein, 10 aa, Artificial Sequence
  Description of Artificial Sequence: Synthetic epitope
KKNQNKKHYG

SEQ ID NO: 22127 - protein, 10 aa, Artificial Sequence
  Description of Artificial Sequence: Synthetic epitope
KKNRGESFES

SEQ ID NO: 22128 - protein, 10 aa, Artificial Sequence
  Description of Artificial Sequence: Synthetic epitope
KKNRILDKSA

SEQ ID NO: 22129 - protein, 10 aa, Artificial Sequence
  Description of Artificial Sequence: Synthetic epitope
KKNRVVLAKQ

SEQ ID NO: 22130 - protein, 10 aa, Artificial Sequence
  Description of Artificial Sequence: Synthetic epitope
KKNSEAQAVI

SEQ ID NO: 22131 - protein, 10 aa, Artificial Sequence
  Description of Artificial Sequence: Synthetic epitope
KKNSMEEQVK

SEQ ID NO: 22132 - protein, 10 aa, Artificial Sequence
  Description of Artificial Sequence: Synthetic epitope
KKNSMSSKYS

SEQ ID NO: 22133 - protein, 10 aa, Artificial Sequence
  Description of Artificial Sequence: Synthetic epitope
KKNTIDVLSS

SEQ ID NO: 22134 - protein, 10 aa, Artificial Sequence
  Description of Artificial Sequence: Synthetic epitope
KKNVLQAENQ

SEQ ID NO: 22135 - protein, 10 aa, Artificial Sequence
  Description of Artificial Sequence: Synthetic epitope
KKNVYEQQKY

SEQ ID NO: 22136 - protein, 10 aa, Artificial Sequence
  Description of Artificial Sequence: Synthetic epitope
KKNYQSMEKH

SEQ ID NO: 22137 - protein, 10 aa, Artificial Sequence
  Description of Artificial Sequence: Synthetic epitope
KKPEDFVRIN

SEQ ID NO: 22138 - protein, 10 aa, Artificial Sequence
  Description of Artificial Sequence: Synthetic epitope
KKPESTTKRS

SEQ ID NO: 22139 - protein, 10 aa, Artificial Sequence
  Description of Artificial Sequence: Synthetic epitope
KKPFADEKNI

SEQ ID NO: 22140 - protein, 10 aa, Artificial Sequence
  Description of Artificial Sequence: Synthetic epitope
KKPFSSNVIA

SEQ ID NO: 22141 - protein, 10 aa, Artificial Sequence
  Description of Artificial Sequence: Synthetic epitope
KKPGAAKVEK

SEQ ID NO: 22142 - protein, 10 aa, Artificial Sequence
  Description of Artificial Sequence: Synthetic epitope
KKPKDSKPML

SEQ ID NO: 22143 - protein, 10 aa, Artificial Sequence
  Description of Artificial Sequence: Synthetic epitope
KKPKKDSSLS

SEQ ID NO: 22144 - protein, 10 aa, Artificial Sequence
  Description of Artificial Sequence: Synthetic epitope
KKPKLSLKAD

SEQ ID NO: 22145 - protein, 10 aa, Artificial Sequence
  Description of Artificial Sequence: Synthetic epitope
KKPKSSENKE

SEQ ID NO: 22146 - protein, 10 aa, Artificial Sequence
  Description of Artificial Sequence: Synthetic epitope
KKPLNTEGVM

SEQ ID NO: 22147 - protein, 10 aa, Artificial Sequence
  Description of Artificial Sequence: Synthetic epitope
KKPMIISYKE

SEQ ID NO: 22148 - protein, 10 aa, Artificial Sequence
  Description of Artificial Sequence: Synthetic epitope
KKPQLRLEKS

SEQ ID NO: 22149 - protein, 10 aa, Artificial Sequence
  Description of Artificial Sequence: Synthetic epitope
KKPQNSLKAS

SEQ ID NO: 22150 - protein, 10 aa, Artificial Sequence
  Description of Artificial Sequence: Synthetic epitope
KKPRATTEVS

SEQ ID NO: 22151 - protein, 10 aa, Artificial Sequence
  Description of Artificial Sequence: Synthetic epitope
KKPRSRTKIS

SEQ ID NO: 22152 - protein, 10 aa, Artificial Sequence
  Description of Artificial Sequence: Synthetic epitope
KKPSNRHEVK

SEQ ID NO: 22153 - protein, 10 aa, Artificial Sequence
  Description of Artificial Sequence: Synthetic epitope
KKPSSTPSST

SEQ ID NO: 22154 - protein, 10 aa, Artificial Sequence
  Description of Artificial Sequence: Synthetic epitope
KKPTTKFELE

SEQ ID NO: 22155 - protein, 10 aa, Artificial Sequence
  Description of Artificial Sequence: Synthetic epitope
KKPVKSNNMA

SEQ ID NO: 22156 - protein, 10 aa, Artificial Sequence
  Description of Artificial Sequence: Synthetic epitope
KKPVSTTNLQ

SEQ ID NO: 22157 - protein, 10 aa, Artificial Sequence
  Description of Artificial Sequence: Synthetic epitope
KKPWMEKNQT

SEQ ID NO: 22158 - protein, 10 aa, Artificial Sequence
  Description of Artificial Sequence: Synthetic epitope
KKQAAKSKEE

SEQ ID NO: 22159 - protein, 10 aa, Artificial Sequence
  Description of Artificial Sequence: Synthetic epitope
KKQAALKEVQ

SEQ ID NO: 22160 - protein, 10 aa, Artificial Sequence
  Description of Artificial Sequence: Synthetic epitope
KKQAQVATGG

SEQ ID NO: 22161 - protein, 10 aa, Artificial Sequence
  Description of Artificial Sequence: Synthetic epitope
KKQDDLAPSE

SEQ ID NO: 22162 - protein, 10 aa, Artificial Sequence
  Description of Artificial Sequence: Synthetic epitope
KKQDTILTHD

SEQ ID NO: 22163 - protein, 10 aa, Artificial Sequence
  Description of Artificial Sequence: Synthetic epitope
KKQEAKADEH

SEQ ID NO: 22164 - protein, 10 aa, Artificial Sequence
  Description of Artificial Sequence: Synthetic epitope
KKQEEGAEIQ

SEQ ID NO: 22165 - protein, 10 aa, Artificial Sequence
  Description of Artificial Sequence: Synthetic epitope
KKQEIEKPVA

SEQ ID NO: 22166 - protein, 10 aa, Artificial Sequence
  Description of Artificial Sequence: Synthetic epitope
KKQEQKLDDE

SEQ ID NO: 22167 - protein, 10 aa, Artificial Sequence
  Description of Artificial Sequence: Synthetic epitope
KKQETSTEQP

SEQ ID NO: 22168 - protein, 10 aa, Artificial Sequence
  Description of Artificial Sequence: Synthetic epitope
KKQGLLASEN

SEQ ID NO: 22169 - protein, 10 aa, Artificial Sequence
  Description of Artificial Sequence: Synthetic epitope
KKQGTSSNNK

SEQ ID NO: 22170 - protein, 10 aa, Artificial Sequence
  Description of Artificial Sequence: Synthetic epitope
KKQIADARKA

SEQ ID NO: 22171 - protein, 10 aa, Artificial Sequence
  Description of Artificial Sequence: Synthetic epitope
KKQIAVEAQE

SEQ ID NO: 22172 - protein, 10 aa, Artificial Sequence
  Description of Artificial Sequence: Synthetic epitope
KKQIDQKEAD

SEQ ID NO: 22173 - protein, 10 aa, Artificial Sequence
  Description of Artificial Sequence: Synthetic epitope
KKQILRTDNI

SEQ ID NO: 22174 - protein, 10 aa, Artificial Sequence
  Description of Artificial Sequence: Synthetic epitope
KKQIRIQYKP

SEQ ID NO: 22175 - protein, 10 aa, Artificial Sequence
  Description of Artificial Sequence: Synthetic epitope
KKQKELGIAS

SEQ ID NO: 22176 - protein, 10 aa, Artificial Sequence
  Description of Artificial Sequence: Synthetic epitope
KKQKKTVAMQ

SEQ ID NO: 22177 - protein, 10 aa, Artificial Sequence
  Description of Artificial Sequence: Synthetic epitope
KKQKRQAELL

SEQ ID NO: 22178 - protein, 10 aa, Artificial Sequence
  Description of Artificial Sequence: Synthetic epitope
KKQKRQENIA

SEQ ID NO: 22179 - protein, 10 aa, Artificial Sequence
  Description of Artificial Sequence: Synthetic epitope
KKQKVFQHNE

SEQ ID NO: 22180 - protein, 10 aa, Artificial Sequence
  Description of Artificial Sequence: Synthetic epitope
KKQLEEVSLE

SEQ ID NO: 22181 - protein, 10 aa, Artificial Sequence
  Description of Artificial Sequence: Synthetic epitope
KKQLKSLQAQ

SEQ ID NO: 22182 - protein, 10 aa, Artificial Sequence
  Description of Artificial Sequence: Synthetic epitope
KKQLNEASEE

SEQ ID NO: 22183 - protein, 10 aa, Artificial Sequence
  Description of Artificial Sequence: Synthetic epitope
KKQLQNLEDA

SEQ ID NO: 22184 - protein, 10 aa, Artificial Sequence
  Description of Artificial Sequence: Synthetic epitope
KKQMTLTRVE

SEQ ID NO: 22185 - protein, 10 aa, Artificial Sequence
  Description of Artificial Sequence: Synthetic epitope
KKQPAMLRVT

SEQ ID NO: 22186 - protein, 10 aa, Artificial Sequence
  Description of Artificial Sequence: Synthetic epitope
KKQRHGEAVV

SEQ ID NO: 22187 - protein, 10 aa, Artificial Sequence
  Description of Artificial Sequence: Synthetic epitope
KKQRKDSASE

SEQ ID NO: 22188 - protein, 10 aa, Artificial Sequence
  Description of Artificial Sequence: Synthetic epitope
KKQRKYGAEE

SEQ ID NO: 22189 - protein, 10 aa, Artificial Sequence
  Description of Artificial Sequence: Synthetic epitope
KKQRLLEAQK

SEQ ID NO: 22190 - protein, 10 aa, Artificial Sequence
  Description of Artificial Sequence: Synthetic epitope
KKQSGGKTQQ

SEQ ID NO: 22191 - protein, 10 aa, Artificial Sequence
  Description of Artificial Sequence: Synthetic epitope
KKQSQDQATQ

SEQ ID NO: 22192 - protein, 10 aa, Artificial Sequence
  Description of Artificial Sequence: Synthetic epitope
KKQSVVQEKK

SEQ ID NO: 22193 - protein, 10 aa, Artificial Sequence
  Description of Artificial Sequence: Synthetic epitope
KKQTQQIDYS

SEQ ID NO: 22194 - protein, 10 aa, Artificial Sequence
  Description of Artificial Sequence: Synthetic epitope
KKQTTVAEAD

SEQ ID NO: 22195 - protein, 10 aa, Artificial Sequence
  Description of Artificial Sequence: Synthetic epitope
KKQTVKKVNQ

SEQ ID NO: 22196 - protein, 10 aa, Artificial Sequence
  Description of Artificial Sequence: Synthetic epitope
KKQVAIIEKE

SEQ ID NO: 22197 - protein, 10 aa, Artificial Sequence
  Description of Artificial Sequence: Synthetic epitope
KKQVKKIREP

SEQ ID NO: 22198 - protein, 10 aa, Artificial Sequence
  Description of Artificial Sequence: Synthetic epitope
KKQVQTSQKN

SEQ ID NO: 22199 - protein, 10 aa, Artificial Sequence
  Description of Artificial Sequence: Synthetic epitope
KKRALASNTS

SEQ ID NO: 22200 - protein, 10 aa, Artificial Sequence
  Description of Artificial Sequence: Synthetic epitope
KKRALASNTS

SEQ ID NO: 22201 - protein, 10 aa, Artificial Sequence
  Description of Artificial Sequence: Synthetic epitope
KKRAPRRNHN

SEQ ID NO: 22202 - protein, 10 aa, Artificial Sequence
  Description of Artificial Sequence: Synthetic epitope
KKRAQLAARL

SEQ ID NO: 22203 - protein, 10 aa, Artificial Sequence
  Description of Artificial Sequence: Synthetic epitope
KKRASKETAD

SEQ ID NO: 22204 - protein, 10 aa, Artificial Sequence
  Description of Artificial Sequence: Synthetic epitope
KKRAVALDEA

SEQ ID NO: 22205 - protein, 10 aa, Artificial Sequence
  Description of Artificial Sequence: Synthetic epitope
KKRDAADKPR

SEQ ID NO: 22206 - protein, 10 aa, Artificial Sequence
  Description of Artificial Sequence: Synthetic epitope
KKREIKLSDD

SEQ ID NO: 22207 - protein, 10 aa, Artificial Sequence
  Description of Artificial Sequence: Synthetic epitope
KKRELANTDK

SEQ ID NO: 22208 - protein, 10 aa, Artificial Sequence
  Description of Artificial Sequence: Synthetic epitope
KKRIIEKVIH

SEQ ID NO: 22209 - protein, 10 aa, Artificial Sequence
  Description of Artificial Sequence: Synthetic epitope
KKRIIKLEKE

SEQ ID NO: 22210 - protein, 10 aa, Artificial Sequence
  Description of Artificial Sequence: Synthetic epitope
KKRISNINRY

SEQ ID NO: 22211 - protein, 10 aa, Artificial Sequence
  Description of Artificial Sequence: Synthetic epitope
KKRISNKLQQ

SEQ ID NO: 22212 - protein, 10 aa, Artificial Sequence
  Description of Artificial Sequence: Synthetic epitope
KKRKARSLLP

SEQ ID NO: 22213 - protein, 10 aa, Artificial Sequence
  Description of Artificial Sequence: Synthetic epitope
KKRKDRTRLK

SEQ ID NO: 22214 - protein, 10 aa, Artificial Sequence
  Description of Artificial Sequence: Synthetic epitope
KKRKKGASFQ

SEQ ID NO: 22215 - protein, 10 aa, Artificial Sequence
  Description of Artificial Sequence: Synthetic epitope
KKRKMYSEDK

SEQ ID NO: 22216 - protein, 10 aa, Artificial Sequence
  Description of Artificial Sequence: Synthetic epitope
KKRLEQQKPT

SEQ ID NO: 22217 - protein, 10 aa, Artificial Sequence
  Description of Artificial Sequence: Synthetic epitope
KKRLSKLEPE

SEQ ID NO: 22218 - protein, 10 aa, Artificial Sequence
  Description of Artificial Sequence: Synthetic epitope
KKRLVINLSS

SEQ ID NO: 22219 - protein, 10 aa, Artificial Sequence
  Description of Artificial Sequence: Synthetic epitope
KKRNALSLAM

SEQ ID NO: 22220 - protein, 10 aa, Artificial Sequence
  Description of Artificial Sequence: Synthetic epitope
KKRNTILKYI

SEQ ID NO: 22221 - protein, 10 aa, Artificial Sequence
  Description of Artificial Sequence: Synthetic epitope
KKRPASAKSR

SEQ ID NO: 22222 - protein, 10 aa, Artificial Sequence
  Description of Artificial Sequence: Synthetic epitope
KKRPGKLNAQ

SEQ ID NO: 22223 - protein, 10 aa, Artificial Sequence
  Description of Artificial Sequence: Synthetic epitope
KKRQSLVERT

SEQ ID NO: 22224 - protein, 10 aa, Artificial Sequence
  Description of Artificial Sequence: Synthetic epitope
KKRQTQSESS

SEQ ID NO: 22225 - protein, 10 aa, Artificial Sequence
  Description of Artificial Sequence: Synthetic epitope
KKRRETVERE

SEQ ID NO: 22226 - protein, 10 aa, Artificial Sequence
  Description of Artificial Sequence: Synthetic epitope
KKRRITRYDA

SEQ ID NO: 22227 - protein, 10 aa, Artificial Sequence
  Description of Artificial Sequence: Synthetic epitope
KKRRSRSRTK

SEQ ID NO: 22228 - protein, 10 aa, Artificial Sequence
  Description of Artificial Sequence: Synthetic epitope
KKRSIGASPN

SEQ ID NO: 22229 - protein, 10 aa, Artificial Sequence
  Description of Artificial Sequence: Synthetic epitope
KKRSILISSR

SEQ ID NO: 22230 - protein, 10 aa, Artificial Sequence
  Description of Artificial Sequence: Synthetic epitope
KKRSLTLRDD

SEQ ID NO: 22231 - protein, 10 aa, Artificial Sequence
  Description of Artificial Sequence: Synthetic epitope
KKRSRSGYKK

SEQ ID NO: 22232 - protein, 10 aa, Artificial Sequence
  Description of Artificial Sequence: Synthetic epitope
KKRTVTAAGA

SEQ ID NO: 22233 - protein, 10 aa, Artificial Sequence
  Description of Artificial Sequence: Synthetic epitope
KKRVAALEAK

SEQ ID NO: 22234 - protein, 10 aa, Artificial Sequence
  Description of Artificial Sequence: Synthetic epitope
KKRVKDELRK

SEQ ID NO: 22235 - protein, 10 aa, Artificial Sequence
  Description of Artificial Sequence: Synthetic epitope
KKRVVKKDHS

SEQ ID NO: 22236 - protein, 10 aa, Artificial Sequence
  Description of Artificial Sequence: Synthetic epitope
KKRVVKKDHS

SEQ ID NO: 22237 - protein, 10 aa, Artificial Sequence
  Description of Artificial Sequence: Synthetic epitope
KKRVVKKDHS

SEQ ID NO: 22238 - protein, 10 aa, Artificial Sequence
  Description of Artificial Sequence: Synthetic epitope
KKRYSSRSRS

SEQ ID NO: 22239 - protein, 10 aa, Artificial Sequence
  Description of Artificial Sequence: Synthetic epitope
KKSAASSTTS

SEQ ID NO: 22240 - protein, 10 aa, Artificial Sequence
  Description of Artificial Sequence: Synthetic epitope
KKSALFEVSE

SEQ ID NO: 22241 - protein, 10 aa, Artificial Sequence
  Description of Artificial Sequence: Synthetic epitope
KKSASQESTL

SEQ ID NO: 22242 - protein, 10 aa, Artificial Sequence
  Description of Artificial Sequence: Synthetic epitope
KKSAVADKHE

SEQ ID NO: 22243 - protein, 10 aa, Artificial Sequence
  Description of Artificial Sequence: Synthetic epitope
KKSDTSQVKA

SEQ ID NO: 22244 - protein, 10 aa, Artificial Sequence
  Description of Artificial Sequence: Synthetic epitope
KKSDVKFEDR

SEQ ID NO: 22245 - protein, 10 aa, Artificial Sequence
  Description of Artificial Sequence: Synthetic epitope
KKSDVNAIIH

SEQ ID NO: 22246 - protein, 10 aa, Artificial Sequence
  Description of Artificial Sequence: Synthetic epitope
KKSEAKSPSN

SEQ ID NO: 22247 - protein, 10 aa, Artificial Sequence
  Description of Artificial Sequence: Synthetic epitope
KKSEKETAID

SEQ ID NO: 22248 - protein, 10 aa, Artificial Sequence
  Description of Artificial Sequence: Synthetic epitope
KKSEKGSKQQ

SEQ ID NO: 22249 - protein, 10 aa, Artificial Sequence
  Description of Artificial Sequence: Synthetic epitope
KKSEPSSKTS

SEQ ID NO: 22250 - protein, 10 aa, Artificial Sequence
  Description of Artificial Sequence: Synthetic epitope
KKSFDINSVS

SEQ ID NO: 22251 - protein, 10 aa, Artificial Sequence
  Description of Artificial Sequence: Synthetic epitope
KKSFKIHQKA

SEQ ID NO: 22252 - protein, 10 aa, Artificial Sequence
  Description of Artificial Sequence: Synthetic epitope
KKSGKKGQAS

SEQ ID NO: 22253 - protein, 10 aa, Artificial Sequence
  Description of Artificial Sequence: Synthetic epitope
KKSGMSKKTN

SEQ ID NO: 22254 - protein, 10 aa, Artificial Sequence
  Description of Artificial Sequence: Synthetic epitope
KKSGSSATKS

SEQ ID NO: 22255 - protein, 10 aa, Artificial Sequence
  Description of Artificial Sequence: Synthetic epitope
KKSGSSISEG

SEQ ID NO: 22256 - protein, 10 aa, Artificial Sequence
  Description of Artificial Sequence: Synthetic epitope
KKSGTEVADE

SEQ ID NO: 22257 - protein, 10 aa, Artificial Sequence
  Description of Artificial Sequence: Synthetic epitope
KKSHDAIIDD

SEQ ID NO: 22258 - protein, 10 aa, Artificial Sequence
  Description of Artificial Sequence: Synthetic epitope
KKSHKRTSKS

SEQ ID NO: 22259 - protein, 10 aa, Artificial Sequence
  Description of Artificial Sequence: Synthetic epitope
KKSHNGAETT

SEQ ID NO: 22260 - protein, 10 aa, Artificial Sequence
  Description of Artificial Sequence: Synthetic epitope
KKSHYYRDQR

SEQ ID NO: 22261 - protein, 10 aa, Artificial Sequence
  Description of Artificial Sequence: Synthetic epitope
KKSIEKQKII

SEQ ID NO: 22262 - protein, 10 aa, Artificial Sequence
  Description of Artificial Sequence: Synthetic epitope
KKSIFETYMS

SEQ ID NO: 22263 - protein, 10 aa, Artificial Sequence
  Description of Artificial Sequence: Synthetic epitope
KKSIKDSEKQ

SEQ ID NO: 22264 - protein, 10 aa, Artificial Sequence
  Description of Artificial Sequence: Synthetic epitope
KKSILALFES

SEQ ID NO: 22265 - protein, 10 aa, Artificial Sequence
  Description of Artificial Sequence: Synthetic epitope
KKSISNAAPS

SEQ ID NO: 22266 - protein, 10 aa, Artificial Sequence
  Description of Artificial Sequence: Synthetic epitope
KKSIVAVEPR

SEQ ID NO: 22267 - protein, 10 aa, Artificial Sequence
  Description of Artificial Sequence: Synthetic epitope
KKSKAEQSPV

SEQ ID NO: 22268 - protein, 10 aa, Artificial Sequence
  Description of Artificial Sequence: Synthetic epitope
KKSKALSGFS

SEQ ID NO: 22269 - protein, 10 aa, Artificial Sequence
  Description of Artificial Sequence: Synthetic epitope
KKSKANTVGG

SEQ ID NO: 22270 - protein, 10 aa, Artificial Sequence
  Description of Artificial Sequence: Synthetic epitope
KKSKARILES

SEQ ID NO: 22271 - protein, 10 aa, Artificial Sequence
  Description of Artificial Sequence: Synthetic epitope
KKSKARPKSG

SEQ ID NO: 22272 - protein, 10 aa, Artificial Sequence
  Description of Artificial Sequence: Synthetic epitope
KKSKEEQMRA

SEQ ID NO: 22273 - protein, 10 aa, Artificial Sequence
  Description of Artificial Sequence: Synthetic epitope
KKSKEGGTEE

SEQ ID NO: 22274 - protein, 10 aa, Artificial Sequence
  Description of Artificial Sequence: Synthetic epitope
KKSKHINYGQ

SEQ ID NO: 22275 - protein, 10 aa, Artificial Sequence
  Description of Artificial Sequence: Synthetic epitope
KKSKKSASSE

SEQ ID NO: 22276 - protein, 10 aa, Artificial Sequence
  Description of Artificial Sequence: Synthetic epitope
KKSKLSMAKH

SEQ ID NO: 22277 - protein, 10 aa, Artificial Sequence
  Description of Artificial Sequence: Synthetic epitope
KKSKNVATEG

SEQ ID NO: 22278 - protein, 10 aa, Artificial Sequence
  Description of Artificial Sequence: Synthetic epitope
KKSKPRYHKR

SEQ ID NO: 22279 - protein, 10 aa, Artificial Sequence
  Description of Artificial Sequence: Synthetic epitope
KKSKQRDQHN

SEQ ID NO: 22280 - protein, 10 aa, Artificial Sequence
  Description of Artificial Sequence: Synthetic epitope
KKSKSDAKAV

SEQ ID NO: 22281 - protein, 10 aa, Artificial Sequence
  Description of Artificial Sequence: Synthetic epitope
KKSKSVKEDS

SEQ ID NO: 22282 - protein, 10 aa, Artificial Sequence
  Description of Artificial Sequence: Synthetic epitope
KKSKTSLTKG

SEQ ID NO: 22283 - protein, 10 aa, Artificial Sequence
  Description of Artificial Sequence: Synthetic epitope
KKSLETEHKA

SEQ ID NO: 22284 - protein, 10 aa, Artificial Sequence
  Description of Artificial Sequence: Synthetic epitope
KKSLLGVKEN

SEQ ID NO: 22285 - protein, 10 aa, Artificial Sequence
  Description of Artificial Sequence: Synthetic epitope
KKSLQVPSIY

SEQ ID NO: 22286 - protein, 10 aa, Artificial Sequence
  Description of Artificial Sequence: Synthetic epitope
KKSMVDHTSA

SEQ ID NO: 22287 - protein, 10 aa, Artificial Sequence
  Description of Artificial Sequence: Synthetic epitope
KKSNELLELI

SEQ ID NO: 22288 - protein, 10 aa, Artificial Sequence
  Description of Artificial Sequence: Synthetic epitope
KKSNLAESFG

SEQ ID NO: 22289 - protein, 10 aa, Artificial Sequence
  Description of Artificial Sequence: Synthetic epitope
KKSNQLENHT

SEQ ID NO: 22290 - protein, 10 aa, Artificial Sequence
  Description of Artificial Sequence: Synthetic epitope
KKSNRLTLSK

SEQ ID NO: 22291 - protein, 10 aa, Artificial Sequence
  Description of Artificial Sequence: Synthetic epitope
KKSNSISVGE

SEQ ID NO: 22292 - protein, 10 aa, Artificial Sequence
  Description of Artificial Sequence: Synthetic epitope
KKSNSNIHPI

SEQ ID NO: 22293 - protein, 10 aa, Artificial Sequence
  Description of Artificial Sequence: Synthetic epitope
KKSNTKAYGE

SEQ ID NO: 22294 - protein, 10 aa, Artificial Sequence
  Description of Artificial Sequence: Synthetic epitope
KKSNTSNEEF

SEQ ID NO: 22295 - protein, 10 aa, Artificial Sequence
  Description of Artificial Sequence: Synthetic epitope
KKSNVKPNSG

SEQ ID NO: 22296 - protein, 10 aa, Artificial Sequence
  Description of Artificial Sequence: Synthetic epitope
KKSPISKSMG

SEQ ID NO: 22297 - protein, 10 aa, Artificial Sequence
  Description of Artificial Sequence: Synthetic epitope
KKSQAMSKSV

SEQ ID NO: 22298 - protein, 10 aa, Artificial Sequence
  Description of Artificial Sequence: Synthetic epitope
KKSQAQDKAK

SEQ ID NO: 22299 - protein, 10 aa, Artificial Sequence
  Description of Artificial Sequence: Synthetic epitope
KKSQEKKTSL

SEQ ID NO: 22300 - protein, 10 aa, Artificial Sequence
  Description of Artificial Sequence: Synthetic epitope
KKSQGEKDSS

SEQ ID NO: 22301 - protein, 10 aa, Artificial Sequence
  Description of Artificial Sequence: Synthetic epitope
KKSQGLAREQ

SEQ ID NO: 22302 - protein, 10 aa, Artificial Sequence
  Description of Artificial Sequence: Synthetic epitope
KKSRISKKPQ

SEQ ID NO: 22303 - protein, 10 aa, Artificial Sequence
  Description of Artificial Sequence: Synthetic epitope
KKSRSASTIS

SEQ ID NO: 22304 - protein, 10 aa, Artificial Sequence
  Description of Artificial Sequence: Synthetic epitope
KKSRSKKVRR

SEQ ID NO: 22305 - protein, 10 aa, Artificial Sequence
  Description of Artificial Sequence: Synthetic epitope
KKSRVKLKSQ

SEQ ID NO: 22306 - protein, 10 aa, Artificial Sequence
  Description of Artificial Sequence: Synthetic epitope
KKSSAPLKSE

SEQ ID NO: 22307 - protein, 10 aa, Artificial Sequence
  Description of Artificial Sequence: Synthetic epitope
KKSSAVTVFK

SEQ ID NO: 22308 - protein, 10 aa, Artificial Sequence
  Description of Artificial Sequence: Synthetic epitope
KKSSDKQKDL

SEQ ID NO: 22309 - protein, 10 aa, Artificial Sequence
  Description of Artificial Sequence: Synthetic epitope
KKSSDTLKLQ

SEQ ID NO: 22310 - protein, 10 aa, Artificial Sequence
  Description of Artificial Sequence: Synthetic epitope
KKSSFANVAA

SEQ ID NO: 22311 - protein, 10 aa, Artificial Sequence
  Description of Artificial Sequence: Synthetic epitope
KKSSGGIFKA

SEQ ID NO: 22312 - protein, 10 aa, Artificial Sequence
  Description of Artificial Sequence: Synthetic epitope
KKSSHAVELA

SEQ ID NO: 22313 - protein, 10 aa, Artificial Sequence
  Description of Artificial Sequence: Synthetic epitope
KKSSKARTGL

SEQ ID NO: 22314 - protein, 10 aa, Artificial Sequence
  Description of Artificial Sequence: Synthetic epitope
KKSSKSTKLQ

SEQ ID NO: 22315 - protein, 10 aa, Artificial Sequence
  Description of Artificial Sequence: Synthetic epitope
KKSSLVPSTA

SEQ ID NO: 22316 - protein, 10 aa, Artificial Sequence
  Description of Artificial Sequence: Synthetic epitope
KKSSNKKPDS

SEQ ID NO: 22317 - protein, 10 aa, Artificial Sequence
  Description of Artificial Sequence: Synthetic epitope
KKSSNREYET

SEQ ID NO: 22318 - protein, 10 aa, Artificial Sequence
  Description of Artificial Sequence: Synthetic epitope
KKSSQSEGIF

SEQ ID NO: 22319 - protein, 10 aa, Artificial Sequence
  Description of Artificial Sequence: Synthetic epitope
KKSSRSKERS

SEQ ID NO: 22320 - protein, 10 aa, Artificial Sequence
  Description of Artificial Sequence: Synthetic epitope
KKSSRWPSML

SEQ ID NO: 22321 - protein, 10 aa, Artificial Sequence
  Description of Artificial Sequence: Synthetic epitope
KKSSTKLRMD

SEQ ID NO: 22322 - protein, 10 aa, Artificial Sequence
  Description of Artificial Sequence: Synthetic epitope
KKSSYSKKIV

SEQ ID NO: 22323 - protein, 10 aa, Artificial Sequence
  Description of Artificial Sequence: Synthetic epitope
KKSTIWQFFS

SEQ ID NO: 22324 - protein, 10 aa, Artificial Sequence
  Description of Artificial Sequence: Synthetic epitope
KKSTKIPESE

SEQ ID NO: 22325 - protein, 10 aa, Artificial Sequence
  Description of Artificial Sequence: Synthetic epitope
KKSTNNRASS

SEQ ID NO: 22326 - protein, 10 aa, Artificial Sequence
  Description of Artificial Sequence: Synthetic epitope
KKSTQKVLDT

SEQ ID NO: 22327 - protein, 10 aa, Artificial Sequence
  Description of Artificial Sequence: Synthetic epitope
KKSTSSTSLN

SEQ ID NO: 22328 - protein, 10 aa, Artificial Sequence
  Description of Artificial Sequence: Synthetic epitope
KKSTSSTSLN

SEQ ID NO: 22329 - protein, 10 aa, Artificial Sequence
  Description of Artificial Sequence: Synthetic epitope
KKSVHKKNTI

SEQ ID NO: 22330 - protein, 10 aa, Artificial Sequence
  Description of Artificial Sequence: Synthetic epitope
KKSVIGSVTL

SEQ ID NO: 22331 - protein, 10 aa, Artificial Sequence
  Description of Artificial Sequence: Synthetic epitope
KKSVSSKGQP

SEQ ID NO: 22332 - protein, 10 aa, Artificial Sequence
  Description of Artificial Sequence: Synthetic epitope
KKSVVSRLKK

SEQ ID NO: 22333 - protein, 10 aa, Artificial Sequence
  Description of Artificial Sequence: Synthetic epitope
KKSWQARHTG

SEQ ID NO: 22334 - protein, 10 aa, Artificial Sequence
  Description of Artificial Sequence: Synthetic epitope
KKSYLLTLSN

SEQ ID NO: 22335 - protein, 10 aa, Artificial Sequence
  Description of Artificial Sequence: Synthetic epitope
KKSYQIDADR

SEQ ID NO: 22336 - protein, 10 aa, Artificial Sequence
  Description of Artificial Sequence: Synthetic epitope
KKTAEAGGVT

SEQ ID NO: 22337 - protein, 10 aa, Artificial Sequence
  Description of Artificial Sequence: Synthetic epitope
KKTAGRTSRS

SEQ ID NO: 22338 - protein, 10 aa, Artificial Sequence
  Description of Artificial Sequence: Synthetic epitope
KKTAKRKGSA

SEQ ID NO: 22339 - protein, 10 aa, Artificial Sequence
  Description of Artificial Sequence: Synthetic epitope
KKTARMMSQI

SEQ ID NO: 22340 - protein, 10 aa, Artificial Sequence
  Description of Artificial Sequence: Synthetic epitope
KKTATALLES

SEQ ID NO: 22341 - protein, 10 aa, Artificial Sequence
  Description of Artificial Sequence: Synthetic epitope
KKTDYSSNIL

SEQ ID NO: 22342 - protein, 10 aa, Artificial Sequence
  Description of Artificial Sequence: Synthetic epitope
KKTELRLSPT

SEQ ID NO: 22343 - protein, 10 aa, Artificial Sequence
  Description of Artificial Sequence: Synthetic epitope
KKTEQKEKVE

SEQ ID NO: 22344 - protein, 10 aa, Artificial Sequence
  Description of Artificial Sequence: Synthetic epitope
KKTESATFRV

SEQ ID NO: 22345 - protein, 10 aa, Artificial Sequence
  Description of Artificial Sequence: Synthetic epitope
KKTFLSVHEV

SEQ ID NO: 22346 - protein, 10 aa, Artificial Sequence
  Description of Artificial Sequence: Synthetic epitope
KKTGKSATTA

SEQ ID NO: 22347 - protein, 10 aa, Artificial Sequence
  Description of Artificial Sequence: Synthetic epitope
KKTGSQTRRT

SEQ ID NO: 22348 - protein, 10 aa, Artificial Sequence
  Description of Artificial Sequence: Synthetic epitope
KKTIKTINKM

SEQ ID NO: 22349 - protein, 10 aa, Artificial Sequence
  Description of Artificial Sequence: Synthetic epitope
KKTIRISPHR

SEQ ID NO: 22350 - protein, 10 aa, Artificial Sequence
  Description of Artificial Sequence: Synthetic epitope
KKTKAGNTKE

SEQ ID NO: 22351 - protein, 10 aa, Artificial Sequence
  Description of Artificial Sequence: Synthetic epitope
KKTKIASTKI

SEQ ID NO: 22352 - protein, 10 aa, Artificial Sequence
  Description of Artificial Sequence: Synthetic epitope
KKTKKESSDS

SEQ ID NO: 22353 - protein, 10 aa, Artificial Sequence
  Description of Artificial Sequence: Synthetic epitope
KKTKKVDNEL

SEQ ID NO: 22354 - protein, 10 aa, Artificial Sequence
  Description of Artificial Sequence: Synthetic epitope
KKTKLVTLSN

SEQ ID NO: 22355 - protein, 10 aa, Artificial Sequence
  Description of Artificial Sequence: Synthetic epitope
KKTKNVTTPI

SEQ ID NO: 22356 - protein, 10 aa, Artificial Sequence
  Description of Artificial Sequence: Synthetic epitope
KKTKPMLETE

SEQ ID NO: 22357 - protein, 10 aa, Artificial Sequence
  Description of Artificial Sequence: Synthetic epitope
KKTKRKVVPP

SEQ ID NO: 22358 - protein, 10 aa, Artificial Sequence
  Description of Artificial Sequence: Synthetic epitope
KKTKSQTHRG

SEQ ID NO: 22359 - protein, 10 aa, Artificial Sequence
  Description of Artificial Sequence: Synthetic epitope
KKTKSSKLDG

SEQ ID NO: 22360 - protein, 10 aa, Artificial Sequence
  Description of Artificial Sequence: Synthetic epitope
KKTKVLKQRT

SEQ ID NO: 22361 - protein, 10 aa, Artificial Sequence
  Description of Artificial Sequence: Synthetic epitope
KKTLASKTIS

SEQ ID NO: 22362 - protein, 10 aa, Artificial Sequence
  Description of Artificial Sequence: Synthetic epitope
KKTLESKKVS

SEQ ID NO: 22363 - protein, 10 aa, Artificial Sequence
  Description of Artificial Sequence: Synthetic epitope
KKTLKATASS

SEQ ID NO: 22364 - protein, 10 aa, Artificial Sequence
  Description of Artificial Sequence: Synthetic epitope
KKTLKSLKAL

SEQ ID NO: 22365 - protein, 10 aa, Artificial Sequence
  Description of Artificial Sequence: Synthetic epitope
KKTMEAKIKQ

SEQ ID NO: 22366 - protein, 10 aa, Artificial Sequence
  Description of Artificial Sequence: Synthetic epitope
KKTMKLMTLS

SEQ ID NO: 22367 - protein, 10 aa, Artificial Sequence
  Description of Artificial Sequence: Synthetic epitope
KKTMSKSPSL

SEQ ID NO: 22368 - protein, 10 aa, Artificial Sequence
  Description of Artificial Sequence: Synthetic epitope
KKTNRFKARP

SEQ ID NO: 22369 - protein, 10 aa, Artificial Sequence
  Description of Artificial Sequence: Synthetic epitope
KKTQMSILEQ

SEQ ID NO: 22370 - protein, 10 aa, Artificial Sequence
  Description of Artificial Sequence: Synthetic epitope
KKTQPKLSAL

SEQ ID NO: 22371 - protein, 10 aa, Artificial Sequence
  Description of Artificial Sequence: Synthetic epitope
KKTRTRSTQQ

SEQ ID NO: 22372 - protein, 10 aa, Artificial Sequence
  Description of Artificial Sequence: Synthetic epitope
KKTSAAEGPE

SEQ ID NO: 22373 - protein, 10 aa, Artificial Sequence
  Description of Artificial Sequence: Synthetic epitope
KKTSAAEGPE

SEQ ID NO: 22374 - protein, 10 aa, Artificial Sequence
  Description of Artificial Sequence: Synthetic epitope
KKTSDITQAR

SEQ ID NO: 22375 - protein, 10 aa, Artificial Sequence
  Description of Artificial Sequence: Synthetic epitope
KKTSKEAVGV

SEQ ID NO: 22376 - protein, 10 aa, Artificial Sequence
  Description of Artificial Sequence: Synthetic epitope
KKTSLKKLHY

SEQ ID NO: 22377 - protein, 10 aa, Artificial Sequence
  Description of Artificial Sequence: Synthetic epitope
KKTSLVELQE

SEQ ID NO: 22378 - protein, 10 aa, Artificial Sequence
  Description of Artificial Sequence: Synthetic epitope
KKTSSAMAGS

SEQ ID NO: 22379 - protein, 10 aa, Artificial Sequence
  Description of Artificial Sequence: Synthetic epitope
KKTSSQLVTM

SEQ ID NO: 22380 - protein, 10 aa, Artificial Sequence
  Description of Artificial Sequence: Synthetic epitope
KKTSTSTETR

SEQ ID NO: 22381 - protein, 10 aa, Artificial Sequence
  Description of Artificial Sequence: Synthetic epitope
KKTTDSDAKE

SEQ ID NO: 22382 - protein, 10 aa, Artificial Sequence
  Description of Artificial Sequence: Synthetic epitope
KKTTGSKASA

SEQ ID NO: 22383 - protein, 10 aa, Artificial Sequence
  Description of Artificial Sequence: Synthetic epitope
KKTTLASAVA

SEQ ID NO: 22384 - protein, 10 aa, Artificial Sequence
  Description of Artificial Sequence: Synthetic epitope
KKTTQDSTDL

SEQ ID NO: 22385 - protein, 10 aa, Artificial Sequence
  Description of Artificial Sequence: Synthetic epitope
KKTTSLLHPD

SEQ ID NO: 22386 - protein, 10 aa, Artificial Sequence
  Description of Artificial Sequence: Synthetic epitope
KKTTSNTPPI

SEQ ID NO: 22387 - protein, 10 aa, Artificial Sequence
  Description of Artificial Sequence: Synthetic epitope
KKTVESSLKT

SEQ ID NO: 22388 - protein, 10 aa, Artificial Sequence
  Description of Artificial Sequence: Synthetic epitope
KKTVQVEQSK

SEQ ID NO: 22389 - protein, 10 aa, Artificial Sequence
  Description of Artificial Sequence: Synthetic epitope
KKVAGAATPK

SEQ ID NO: 22390 - protein, 10 aa, Artificial Sequence
  Description of Artificial Sequence: Synthetic epitope
KKVAKILSQE

SEQ ID NO: 22391 - protein, 10 aa, Artificial Sequence
  Description of Artificial Sequence: Synthetic epitope
KKVASELPQD

SEQ ID NO: 22392 - protein, 10 aa, Artificial Sequence
  Description of Artificial Sequence: Synthetic epitope
KKVAVTPVKK

SEQ ID NO: 22393 - protein, 10 aa, Artificial Sequence
  Description of Artificial Sequence: Synthetic epitope
KKVEETQDED

SEQ ID NO: 22394 - protein, 10 aa, Artificial Sequence
  Description of Artificial Sequence: Synthetic epitope
KKVESESKQE

SEQ ID NO: 22395 - protein, 10 aa, Artificial Sequence
  Description of Artificial Sequence: Synthetic epitope
KKVETKKINP

SEQ ID NO: 22396 - protein, 10 aa, Artificial Sequence
  Description of Artificial Sequence: Synthetic epitope
KKVEYKREEI

SEQ ID NO: 22397 - protein, 10 aa, Artificial Sequence
  Description of Artificial Sequence: Synthetic epitope
KKVGDDIAKA

SEQ ID NO: 22398 - protein, 10 aa, Artificial Sequence
  Description of Artificial Sequence: Synthetic epitope
KKVHIGQTFG

SEQ ID NO: 22399 - protein, 10 aa, Artificial Sequence
  Description of Artificial Sequence: Synthetic epitope
KKVIDTRLYP

SEQ ID NO: 22400 - protein, 10 aa, Artificial Sequence
  Description of Artificial Sequence: Synthetic epitope
KKVIEAIRVE

SEQ ID NO: 22401 - protein, 10 aa, Artificial Sequence
  Description of Artificial Sequence: Synthetic epitope
KKVKALESNQ

SEQ ID NO: 22402 - protein, 10 aa, Artificial Sequence
  Description of Artificial Sequence: Synthetic epitope
KKVKENSAVR

SEQ ID NO: 22403 - protein, 10 aa, Artificial Sequence
  Description of Artificial Sequence: Synthetic epitope
KKVKGILVDI

SEQ ID NO: 22404 - protein, 10 aa, Artificial Sequence
  Description of Artificial Sequence: Synthetic epitope
KKVKKGEIRD

SEQ ID NO: 22405 - protein, 10 aa, Artificial Sequence
  Description of Artificial Sequence: Synthetic epitope
KKVKQSLAQS

SEQ ID NO: 22406 - protein, 10 aa, Artificial Sequence
  Description of Artificial Sequence: Synthetic epitope
KKVLDIRETE

SEQ ID NO: 22407 - protein, 10 aa, Artificial Sequence
  Description of Artificial Sequence: Synthetic epitope
KKVLHAESTK

SEQ ID NO: 22408 - protein, 10 aa, Artificial Sequence
  Description of Artificial Sequence: Synthetic epitope
KKVLISYELK

SEQ ID NO: 22409 - protein, 10 aa, Artificial Sequence
  Description of Artificial Sequence: Synthetic epitope
KKVLYNANKN

SEQ ID NO: 22410 - protein, 10 aa, Artificial Sequence
  Description of Artificial Sequence: Synthetic epitope
KKVMAPSKIK

SEQ ID NO: 22411 - protein, 10 aa, Artificial Sequence
  Description of Artificial Sequence: Synthetic epitope
KKVNEQLALR

SEQ ID NO: 22412 - protein, 10 aa, Artificial Sequence
  Description of Artificial Sequence: Synthetic epitope
KKVNKRIVRN

SEQ ID NO: 22413 - protein, 10 aa, Artificial Sequence
  Description of Artificial Sequence: Synthetic epitope
KKVQIVLRNS

SEQ ID NO: 22414 - protein, 10 aa, Artificial Sequence
  Description of Artificial Sequence: Synthetic epitope
KKVRKDLEDQ

SEQ ID NO: 22415 - protein, 10 aa, Artificial Sequence
  Description of Artificial Sequence: Synthetic epitope
KKVRVTVKPH

SEQ ID NO: 22416 - protein, 10 aa, Artificial Sequence
  Description of Artificial Sequence: Synthetic epitope
KKVSEQESRS

SEQ ID NO: 22417 - protein, 10 aa, Artificial Sequence
  Description of Artificial Sequence: Synthetic epitope
KKVSGFKVYS

SEQ ID NO: 22418 - protein, 10 aa, Artificial Sequence
  Description of Artificial Sequence: Synthetic epitope
KKVSGQGRDQ

SEQ ID NO: 22419 - protein, 10 aa, Artificial Sequence
  Description of Artificial Sequence: Synthetic epitope
KKVSIMVSVD

SEQ ID NO: 22420 - protein, 10 aa, Artificial Sequence
  Description of Artificial Sequence: Synthetic epitope
KKVSKAAILA

SEQ ID NO: 22421 - protein, 10 aa, Artificial Sequence
  Description of Artificial Sequence: Synthetic epitope
KKVSKTVETA

SEQ ID NO: 22422 - protein, 10 aa, Artificial Sequence
  Description of Artificial Sequence: Synthetic epitope
KKVSLIASGK

SEQ ID NO: 22423 - protein, 10 aa, Artificial Sequence
  Description of Artificial Sequence: Synthetic epitope
KKVSMEPSER

SEQ ID NO: 22424 - protein, 10 aa, Artificial Sequence
  Description of Artificial Sequence: Synthetic epitope
KKVSNASEMY

SEQ ID NO: 22425 - protein, 10 aa, Artificial Sequence
  Description of Artificial Sequence: Synthetic epitope
KKVSPMSPKA

SEQ ID NO: 22426 - protein, 10 aa, Artificial Sequence
  Description of Artificial Sequence: Synthetic epitope
KKVTAMQLYE

SEQ ID NO: 22427 - protein, 10 aa, Artificial Sequence
  Description of Artificial Sequence: Synthetic epitope
KKVTLAKMRV

SEQ ID NO: 22428 - protein, 10 aa, Artificial Sequence
  Description of Artificial Sequence: Synthetic epitope
KKVTSVMRTL

SEQ ID NO: 22429 - protein, 10 aa, Artificial Sequence
  Description of Artificial Sequence: Synthetic epitope
KKVVAKAKAP

SEQ ID NO: 22430 - protein, 10 aa, Artificial Sequence
  Description of Artificial Sequence: Synthetic epitope
KKVVGRVVFS

SEQ ID NO: 22431 - protein, 10 aa, Artificial Sequence
  Description of Artificial Sequence: Synthetic epitope
KKVVIKSEAA

SEQ ID NO: 22432 - protein, 10 aa, Artificial Sequence
  Description of Artificial Sequence: Synthetic epitope
KKVVNLETAL

SEQ ID NO: 22433 - protein, 10 aa, Artificial Sequence
  Description of Artificial Sequence: Synthetic epitope
KKVWTKAASQ

SEQ ID NO: 22434 - protein, 10 aa, Artificial Sequence
  Description of Artificial Sequence: Synthetic epitope
KKVYATSQQI

SEQ ID NO: 22435 - protein, 10 aa, Artificial Sequence
  Description of Artificial Sequence: Synthetic epitope
KKWEKQVSQK

SEQ ID NO: 22436 - protein, 10 aa, Artificial Sequence
  Description of Artificial Sequence: Synthetic epitope
KKWNKWALSR

SEQ ID NO: 22437 - protein, 10 aa, Artificial Sequence
  Description of Artificial Sequence: Synthetic epitope
KKWQTMIEAH

SEQ ID NO: 22438 - protein, 10 aa, Artificial Sequence
  Description of Artificial Sequence: Synthetic epitope
KKWQVSREDQ

SEQ ID NO: 22439 - protein, 10 aa, Artificial Sequence
  Description of Artificial Sequence: Synthetic epitope
KKWSRDSKTS

SEQ ID NO: 22440 - protein, 10 aa, Artificial Sequence
  Description of Artificial Sequence: Synthetic epitope
KKYALQSAAG

SEQ ID NO: 22441 - protein, 10 aa, Artificial Sequence
  Description of Artificial Sequence: Synthetic epitope
KKYATYRASA

SEQ ID NO: 22442 - protein, 10 aa, Artificial Sequence
  Description of Artificial Sequence: Synthetic epitope
KKYDLESASA

SEQ ID NO: 22443 - protein, 10 aa, Artificial Sequence
  Description of Artificial Sequence: Synthetic epitope
KKYEEPLQSM

SEQ ID NO: 22444 - protein, 10 aa, Artificial Sequence
  Description of Artificial Sequence: Synthetic epitope
KKYERGSATN

SEQ ID NO: 22445 - protein, 10 aa, Artificial Sequence
  Description of Artificial Sequence: Synthetic epitope
KKYGQPIQMK

SEQ ID NO: 22446 - protein, 10 aa, Artificial Sequence
  Description of Artificial Sequence: Synthetic epitope
KKYGTKQWTL

SEQ ID NO: 22447 - protein, 10 aa, Artificial Sequence
  Description of Artificial Sequence: Synthetic epitope
KKYIAKQESV

SEQ ID NO: 22448 - protein, 10 aa, Artificial Sequence
  Description of Artificial Sequence: Synthetic epitope
KKYILSKDVN

SEQ ID NO: 22449 - protein, 10 aa, Artificial Sequence
  Description of Artificial Sequence: Synthetic epitope
KKYKSAFNKL

SEQ ID NO: 22450 - protein, 10 aa, Artificial Sequence
  Description of Artificial Sequence: Synthetic epitope
KKYLKAQTKE

SEQ ID NO: 22451 - protein, 10 aa, Artificial Sequence
  Description of Artificial Sequence: Synthetic epitope
KKYNMRVEDY

SEQ ID NO: 22452 - protein, 10 aa, Artificial Sequence
  Description of Artificial Sequence: Synthetic epitope
KKYPKLSRNS

SEQ ID NO: 22453 - protein, 10 aa, Artificial Sequence
  Description of Artificial Sequence: Synthetic epitope
KKYQGKEENS

SEQ ID NO: 22454 - protein, 10 aa, Artificial Sequence
  Description of Artificial Sequence: Synthetic epitope
KKYRVAVFRL

SEQ ID NO: 22455 - protein, 10 aa, Artificial Sequence
  Description of Artificial Sequence: Synthetic epitope
KKYSLIVAQH

SEQ ID NO: 22456 - protein, 10 aa, Artificial Sequence
  Description of Artificial Sequence: Synthetic epitope
KKYVAFLKLF

SEQ ID NO: 22457 - protein, 10 aa, Artificial Sequence
  Description of Artificial Sequence: Synthetic epitope
KKYVSYNNLV

SEQ ID NO: 22458 - protein, 10 aa, Artificial Sequence
  Description of Artificial Sequence: Synthetic epitope
KLADAKSQPS

SEQ ID NO: 22459 - protein, 10 aa, Artificial Sequence
  Description of Artificial Sequence: Synthetic epitope
KLADMIASRQ

SEQ ID NO: 22460 - protein, 10 aa, Artificial Sequence
  Description of Artificial Sequence: Synthetic epitope
KLAEAGETGR

SEQ ID NO: 22461 - protein, 10 aa, Artificial Sequence
  Description of Artificial Sequence: Synthetic epitope
KLAEAVTVRN

SEQ ID NO: 22462 - protein, 10 aa, Artificial Sequence
  Description of Artificial Sequence: Synthetic epitope
KLAESEGTKA

SEQ ID NO: 22463 - protein, 10 aa, Artificial Sequence
  Description of Artificial Sequence: Synthetic epitope
KLAESKVSVA

SEQ ID NO: 22464 - protein, 10 aa, Artificial Sequence
  Description of Artificial Sequence: Synthetic epitope
KLAGVTLGQR

SEQ ID NO: 22465 - protein, 10 aa, Artificial Sequence
  Description of Artificial Sequence: Synthetic epitope
KLAHAKSSVA

SEQ ID NO: 22466 - protein, 10 aa, Artificial Sequence
  Description of Artificial Sequence: Synthetic epitope
KLAKAQEKHQ

SEQ ID NO: 22467 - protein, 10 aa, Artificial Sequence
  Description of Artificial Sequence: Synthetic epitope
KLAKKASRTE

SEQ ID NO: 22468 - protein, 10 aa, Artificial Sequence
  Description of Artificial Sequence: Synthetic epitope
KLAKKLAKEE

SEQ ID NO: 22469 - protein, 10 aa, Artificial Sequence
  Description of Artificial Sequence: Synthetic epitope
KLAKNLLKEP

SEQ ID NO: 22470 - protein, 10 aa, Artificial Sequence
  Description of Artificial Sequence: Synthetic epitope
KLAKQLMEGK

SEQ ID NO: 22471 - protein, 10 aa, Artificial Sequence
  Description of Artificial Sequence: Synthetic epitope
KLAKQPETVS

SEQ ID NO: 22472 - protein, 10 aa, Artificial Sequence
  Description of Artificial Sequence: Synthetic epitope
KLAKSASNYS

SEQ ID NO: 22473 - protein, 10 aa, Artificial Sequence
  Description of Artificial Sequence: Synthetic epitope
KLAKVAKSNK

SEQ ID NO: 22474 - protein, 10 aa, Artificial Sequence
  Description of Artificial Sequence: Synthetic epitope
KLALLASIQA

SEQ ID NO: 22475 - protein, 10 aa, Artificial Sequence
  Description of Artificial Sequence: Synthetic epitope
KLANISQDQF

SEQ ID NO: 22476 - protein, 10 aa, Artificial Sequence
  Description of Artificial Sequence: Synthetic epitope
KLAPQQLDIP

SEQ ID NO: 22477 - protein, 10 aa, Artificial Sequence
  Description of Artificial Sequence: Synthetic epitope
KLAQEQSASS

SEQ ID NO: 22478 - protein, 10 aa, Artificial Sequence
  Description of Artificial Sequence: Synthetic epitope
KLAQLKSQGK

SEQ ID NO: 22479 - protein, 10 aa, Artificial Sequence
  Description of Artificial Sequence: Synthetic epitope
KLARKAVARL

SEQ ID NO: 22480 - protein, 10 aa, Artificial Sequence
  Description of Artificial Sequence: Synthetic epitope
KLARQATNLK

SEQ ID NO: 22481 - protein, 10 aa, Artificial Sequence
  Description of Artificial Sequence: Synthetic epitope
KLASASAKLK

SEQ ID NO: 22482 - protein, 10 aa, Artificial Sequence
  Description of Artificial Sequence: Synthetic epitope
KLASTGTSEY

SEQ ID NO: 22483 - protein, 10 aa, Artificial Sequence
  Description of Artificial Sequence: Synthetic epitope
KLASWRIKQV

SEQ ID NO: 22484 - protein, 10 aa, Artificial Sequence
  Description of Artificial Sequence: Synthetic epitope
KLAVADLEKQ

SEQ ID NO: 22485 - protein, 10 aa, Artificial Sequence
  Description of Artificial Sequence: Synthetic epitope
KLAVAKNELE

SEQ ID NO: 22486 - protein, 10 aa, Artificial Sequence
  Description of Artificial Sequence: Synthetic epitope
KLAVEAVLRL

SEQ ID NO: 22487 - protein, 10 aa, Artificial Sequence
  Description of Artificial Sequence: Synthetic epitope
KLAVSNVMPE

SEQ ID NO: 22488 - protein, 10 aa, Artificial Sequence
  Description of Artificial Sequence: Synthetic epitope
KLDKKVSAQE

SEQ ID NO: 22489 - protein, 10 aa, Artificial Sequence
  Description of Artificial Sequence: Synthetic epitope
KLDKQYESLS

SEQ ID NO: 22490 - protein, 10 aa, Artificial Sequence
  Description of Artificial Sequence: Synthetic epitope
KLDMQNSQTA

SEQ ID NO: 22491 - protein, 10 aa, Artificial Sequence
  Description of Artificial Sequence: Synthetic epitope
KLDNMNVSRK

SEQ ID NO: 22492 - protein, 10 aa, Artificial Sequence
  Description of Artificial Sequence: Synthetic epitope
KLDNSSQREI

SEQ ID NO: 22493 - protein, 10 aa, Artificial Sequence
  Description of Artificial Sequence: Synthetic epitope
KLDRQTQATT

SEQ ID NO: 22494 - protein, 10 aa, Artificial Sequence
  Description of Artificial Sequence: Synthetic epitope
KLDSQVSPKL

SEQ ID NO: 22495 - protein, 10 aa, Artificial Sequence
  Description of Artificial Sequence: Synthetic epitope
KLDTKDKPSV

SEQ ID NO: 22496 - protein, 10 aa, Artificial Sequence
  Description of Artificial Sequence: Synthetic epitope
KLEAELEKAA

SEQ ID NO: 22497 - protein, 10 aa, Artificial Sequence
  Description of Artificial Sequence: Synthetic epitope
KLEAKMIKEE

SEQ ID NO: 22498 - protein, 10 aa, Artificial Sequence
  Description of Artificial Sequence: Synthetic epitope
KLEAMQTKQV

SEQ ID NO: 22499 - protein, 10 aa, Artificial Sequence
  Description of Artificial Sequence: Synthetic epitope
KLEAMTNSKQ

SEQ ID NO: 22500 - protein, 10 aa, Artificial Sequence
  Description of Artificial Sequence: Synthetic epitope
KLEANSQKQY

SEQ ID NO: 22501 - protein, 10 aa, Artificial Sequence
  Description of Artificial Sequence: Synthetic epitope
KLEAQRYIAQ

SEQ ID NO: 22502 - protein, 10 aa, Artificial Sequence
  Description of Artificial Sequence: Synthetic epitope
KLEDARREKK

SEQ ID NO: 22503 - protein, 10 aa, Artificial Sequence
  Description of Artificial Sequence: Synthetic epitope
KLEEDDQAKD

SEQ ID NO: 22504 - protein, 10 aa, Artificial Sequence
  Description of Artificial Sequence: Synthetic epitope
KLEETITQAR

SEQ ID NO: 22505 - protein, 10 aa, Artificial Sequence
  Description of Artificial Sequence: Synthetic epitope
KLEFMHILTR

SEQ ID NO: 22506 - protein, 10 aa, Artificial Sequence
  Description of Artificial Sequence: Synthetic epitope
KLEFNKAEKH

SEQ ID NO: 22507 - protein, 10 aa, Artificial Sequence
  Description of Artificial Sequence: Synthetic epitope
KLEFTVDAAM

SEQ ID NO: 22508 - protein, 10 aa, Artificial Sequence
  Description of Artificial Sequence: Synthetic epitope
KLEGELHKRT

SEQ ID NO: 22509 - protein, 10 aa, Artificial Sequence
  Description of Artificial Sequence: Synthetic epitope
KLEHEVVARS

SEQ ID NO: 22510 - protein, 10 aa, Artificial Sequence
  Description of Artificial Sequence: Synthetic epitope
KLEHSKAALS

SEQ ID NO: 22511 - protein, 10 aa, Artificial Sequence
  Description of Artificial Sequence: Synthetic epitope
KLEIELELKH

SEQ ID NO: 22512 - protein, 10 aa, Artificial Sequence
  Description of Artificial Sequence: Synthetic epitope
KLEIRTLAQA

SEQ ID NO: 22513 - protein, 10 aa, Artificial Sequence
  Description of Artificial Sequence: Synthetic epitope
KLEKDTADVV

SEQ ID NO: 22514 - protein, 10 aa, Artificial Sequence
  Description of Artificial Sequence: Synthetic epitope
KLEKLKKRTQ

SEQ ID NO: 22515 - protein, 10 aa, Artificial Sequence
  Description of Artificial Sequence: Synthetic epitope
KLEKVSSLSL

SEQ ID NO: 22516 - protein, 10 aa, Artificial Sequence
  Description of Artificial Sequence: Synthetic epitope
KLEKVSSLSL

SEQ ID NO: 22517 - protein, 10 aa, Artificial Sequence
  Description of Artificial Sequence: Synthetic epitope
KLEKVSSLSL

SEQ ID NO: 22518 - protein, 10 aa, Artificial Sequence
  Description of Artificial Sequence: Synthetic epitope
KLEKVSSLSL

SEQ ID NO: 22519 - protein, 10 aa, Artificial Sequence
  Description of Artificial Sequence: Synthetic epitope
KLEKVSSLSL

SEQ ID NO: 22520 - protein, 10 aa, Artificial Sequence
  Description of Artificial Sequence: Synthetic epitope
KLELAEVQDN

SEQ ID NO: 22521 - protein, 10 aa, Artificial Sequence
  Description of Artificial Sequence: Synthetic epitope
KLELETVKAA

SEQ ID NO: 22522 - protein, 10 aa, Artificial Sequence
  Description of Artificial Sequence: Synthetic epitope
KLEMNKVQVD

SEQ ID NO: 22523 - protein, 10 aa, Artificial Sequence
  Description of Artificial Sequence: Synthetic epitope
KLENDASASE

SEQ ID NO: 22524 - protein, 10 aa, Artificial Sequence
  Description of Artificial Sequence: Synthetic epitope
KLENKKIENP

SEQ ID NO: 22525 - protein, 10 aa, Artificial Sequence
  Description of Artificial Sequence: Synthetic epitope
KLENVSLSQQ

SEQ ID NO: 22526 - protein, 10 aa, Artificial Sequence
  Description of Artificial Sequence: Synthetic epitope
KLEQKKQEGP

SEQ ID NO: 22527 - protein, 10 aa, Artificial Sequence
  Description of Artificial Sequence: Synthetic epitope
KLEQTLGQSQ

SEQ ID NO: 22528 - protein, 10 aa, Artificial Sequence
  Description of Artificial Sequence: Synthetic epitope
KLERALLVTA

SEQ ID NO: 22529 - protein, 10 aa, Artificial Sequence
  Description of Artificial Sequence: Synthetic epitope
KLEREVVEKE

SEQ ID NO: 22530 - protein, 10 aa, Artificial Sequence
  Description of Artificial Sequence: Synthetic epitope
KLERKKAIAS

SEQ ID NO: 22531 - protein, 10 aa, Artificial Sequence
  Description of Artificial Sequence: Synthetic epitope
KLERNFQKQS

SEQ ID NO: 22532 - protein, 10 aa, Artificial Sequence
  Description of Artificial Sequence: Synthetic epitope
KLERPAIVQN

SEQ ID NO: 22533 - protein, 10 aa, Artificial Sequence
  Description of Artificial Sequence: Synthetic epitope
KLESIGQRIA

SEQ ID NO: 22534 - protein, 10 aa, Artificial Sequence
  Description of Artificial Sequence: Synthetic epitope
KLESTESRSS

SEQ ID NO: 22535 - protein, 10 aa, Artificial Sequence
  Description of Artificial Sequence: Synthetic epitope
KLETIILSKL

SEQ ID NO: 22536 - protein, 10 aa, Artificial Sequence
  Description of Artificial Sequence: Synthetic epitope
KLETKLLEEW

SEQ ID NO: 22537 - protein, 10 aa, Artificial Sequence
  Description of Artificial Sequence: Synthetic epitope
KLETVAQRKE

SEQ ID NO: 22538 - protein, 10 aa, Artificial Sequence
  Description of Artificial Sequence: Synthetic epitope
KLEVEEKKQA

SEQ ID NO: 22539 - protein, 10 aa, Artificial Sequence
  Description of Artificial Sequence: Synthetic epitope
KLEVETVIKT

SEQ ID NO: 22540 - protein, 10 aa, Artificial Sequence
  Description of Artificial Sequence: Synthetic epitope
KLFAMDTEAK

SEQ ID NO: 22541 - protein, 10 aa, Artificial Sequence
  Description of Artificial Sequence: Synthetic epitope
KLFDQSMARS

SEQ ID NO: 22542 - protein, 10 aa, Artificial Sequence
  Description of Artificial Sequence: Synthetic epitope
KLFKKSVGVH

SEQ ID NO: 22543 - protein, 10 aa, Artificial Sequence
  Description of Artificial Sequence: Synthetic epitope
KLFKMHSPQT

SEQ ID NO: 22544 - protein, 10 aa, Artificial Sequence
  Description of Artificial Sequence: Synthetic epitope
KLFLEETKAT

SEQ ID NO: 22545 - protein, 10 aa, Artificial Sequence
  Description of Artificial Sequence: Synthetic epitope
KLFQASRVKG

SEQ ID NO: 22546 - protein, 10 aa, Artificial Sequence
  Description of Artificial Sequence: Synthetic epitope
KLFSAKLEQL

SEQ ID NO: 22547 - protein, 10 aa, Artificial Sequence
  Description of Artificial Sequence: Synthetic epitope
KLFSFVKKTL

SEQ ID NO: 22548 - protein, 10 aa, Artificial Sequence
  Description of Artificial Sequence: Synthetic epitope
KLFSTEEVTR

SEQ ID NO: 22549 - protein, 10 aa, Artificial Sequence
  Description of Artificial Sequence: Synthetic epitope
KLGAATESGG

SEQ ID NO: 22550 - protein, 10 aa, Artificial Sequence
  Description of Artificial Sequence: Synthetic epitope
KLGATAEKAA

SEQ ID NO: 22551 - protein, 10 aa, Artificial Sequence
  Description of Artificial Sequence: Synthetic epitope
KLGELGSSAE

SEQ ID NO: 22552 - protein, 10 aa, Artificial Sequence
  Description of Artificial Sequence: Synthetic epitope
KLGEPSEIDQ

SEQ ID NO: 22553 - protein, 10 aa, Artificial Sequence
  Description of Artificial Sequence: Synthetic epitope
KLGESLQSAE

SEQ ID NO: 22554 - protein, 10 aa, Artificial Sequence
  Description of Artificial Sequence: Synthetic epitope
KLGGLVIEKQ

SEQ ID NO: 22555 - protein, 10 aa, Artificial Sequence
  Description of Artificial Sequence: Synthetic epitope
KLGKFSNQKD

SEQ ID NO: 22556 - protein, 10 aa, Artificial Sequence
  Description of Artificial Sequence: Synthetic epitope
KLGKSLQGDP

SEQ ID NO: 22557 - protein, 10 aa, Artificial Sequence
  Description of Artificial Sequence: Synthetic epitope
KLGKSQQKAK

SEQ ID NO: 22558 - protein, 10 aa, Artificial Sequence
  Description of Artificial Sequence: Synthetic epitope
KLGRSNRATA

SEQ ID NO: 22559 - protein, 10 aa, Artificial Sequence
  Description of Artificial Sequence: Synthetic epitope
KLGSKTALNR

SEQ ID NO: 22560 - protein, 10 aa, Artificial Sequence
  Description of Artificial Sequence: Synthetic epitope
KLGSQTLTKT

SEQ ID NO: 22561 - protein, 10 aa, Artificial Sequence
  Description of Artificial Sequence: Synthetic epitope
KLGVQTRGIQ

SEQ ID NO: 22562 - protein, 10 aa, Artificial Sequence
  Description of Artificial Sequence: Synthetic epitope
KLHEEHINAG

SEQ ID NO: 22563 - protein, 10 aa, Artificial Sequence
  Description of Artificial Sequence: Synthetic epitope
KLHKALVKLL

SEQ ID NO: 22564 - protein, 10 aa, Artificial Sequence
  Description of Artificial Sequence: Synthetic epitope
KLHKIQNKAQ

SEQ ID NO: 22565 - protein, 10 aa, Artificial Sequence
  Description of Artificial Sequence: Synthetic epitope
KLHKQADMQE

SEQ ID NO: 22566 - protein, 10 aa, Artificial Sequence
  Description of Artificial Sequence: Synthetic epitope
KLHKQVIYSV

SEQ ID NO: 22567 - protein, 10 aa, Artificial Sequence
  Description of Artificial Sequence: Synthetic epitope
KLHKTMSQGE

SEQ ID NO: 22568 - protein, 10 aa, Artificial Sequence
  Description of Artificial Sequence: Synthetic epitope
KLHLKSDMSE

SEQ ID NO: 22569 - protein, 10 aa, Artificial Sequence
  Description of Artificial Sequence: Synthetic epitope
KLHLLSVLKH

SEQ ID NO: 22570 - protein, 10 aa, Artificial Sequence
  Description of Artificial Sequence: Synthetic epitope
KLHSRSKQMQ

SEQ ID NO: 22571 - protein, 10 aa, Artificial Sequence
  Description of Artificial Sequence: Synthetic epitope
KLIASKANDH

SEQ ID NO: 22572 - protein, 10 aa, Artificial Sequence
  Description of Artificial Sequence: Synthetic epitope
KLIASSRFTD

SEQ ID NO: 22573 - protein, 10 aa, Artificial Sequence
  Description of Artificial Sequence: Synthetic epitope
KLIATSNKPA

SEQ ID NO: 22574 - protein, 10 aa, Artificial Sequence
  Description of Artificial Sequence: Synthetic epitope
KLIEELAATR

SEQ ID NO: 22575 - protein, 10 aa, Artificial Sequence
  Description of Artificial Sequence: Synthetic epitope
KLIEVSAVQP

SEQ ID NO: 22576 - protein, 10 aa, Artificial Sequence
  Description of Artificial Sequence: Synthetic epitope
KLIIEETRSN

SEQ ID NO: 22577 - protein, 10 aa, Artificial Sequence
  Description of Artificial Sequence: Synthetic epitope
KLIIFILKKT

SEQ ID NO: 22578 - protein, 10 aa, Artificial Sequence
  Description of Artificial Sequence: Synthetic epitope
KLIIYDIVDM

SEQ ID NO: 22579 - protein, 10 aa, Artificial Sequence
  Description of Artificial Sequence: Synthetic epitope
KLIKSEEIKD

SEQ ID NO: 22580 - protein, 10 aa, Artificial Sequence
  Description of Artificial Sequence: Synthetic epitope
KLILALQDEV

SEQ ID NO: 22581 - protein, 10 aa, Artificial Sequence
  Description of Artificial Sequence: Synthetic epitope
KLILRKLGPV

SEQ ID NO: 22582 - protein, 10 aa, Artificial Sequence
  Description of Artificial Sequence: Synthetic epitope
KLINAVELKK

SEQ ID NO: 22583 - protein, 10 aa, Artificial Sequence
  Description of Artificial Sequence: Synthetic epitope
KLINDSTNKQ

SEQ ID NO: 22584 - protein, 10 aa, Artificial Sequence
  Description of Artificial Sequence: Synthetic epitope
KLINESVDEA

SEQ ID NO: 22585 - protein, 10 aa, Artificial Sequence
  Description of Artificial Sequence: Synthetic epitope
KLIQMSMQQG

SEQ ID NO: 22586 - protein, 10 aa, Artificial Sequence
  Description of Artificial Sequence: Synthetic epitope
KLIQSLIASG

SEQ ID NO: 22587 - protein, 10 aa, Artificial Sequence
  Description of Artificial Sequence: Synthetic epitope
KLIQSRLKLL

SEQ ID NO: 22588 - protein, 10 aa, Artificial Sequence
  Description of Artificial Sequence: Synthetic epitope
KLIRKSASSR

SEQ ID NO: 22589 - protein, 10 aa, Artificial Sequence
  Description of Artificial Sequence: Synthetic epitope
KLISESSGEK

SEQ ID NO: 22590 - protein, 10 aa, Artificial Sequence
  Description of Artificial Sequence: Synthetic epitope
KLITSDKKVL

SEQ ID NO: 22591 - protein, 10 aa, Artificial Sequence
  Description of Artificial Sequence: Synthetic epitope
KLITTKSLIE

SEQ ID NO: 22592 - protein, 10 aa, Artificial Sequence
  Description of Artificial Sequence: Synthetic epitope
KLIWVRKIHS

SEQ ID NO: 22593 - protein, 10 aa, Artificial Sequence
  Description of Artificial Sequence: Synthetic epitope
KLKAASEAPE

SEQ ID NO: 22594 - protein, 10 aa, Artificial Sequence
  Description of Artificial Sequence: Synthetic epitope
KLKASSTDMP

SEQ ID NO: 22595 - protein, 10 aa, Artificial Sequence
  Description of Artificial Sequence: Synthetic epitope
KLKDSSKLEE

SEQ ID NO: 22596 - protein, 10 aa, Artificial Sequence
  Description of Artificial Sequence: Synthetic epitope
KLKEAAVRQR

SEQ ID NO: 22597 - protein, 10 aa, Artificial Sequence
  Description of Artificial Sequence: Synthetic epitope
KLKEASRSSP

SEQ ID NO: 22598 - protein, 10 aa, Artificial Sequence
  Description of Artificial Sequence: Synthetic epitope
KLKELARERE

SEQ ID NO: 22599 - protein, 10 aa, Artificial Sequence
  Description of Artificial Sequence: Synthetic epitope
KLKEQHSKID

SEQ ID NO: 22600 - protein, 10 aa, Artificial Sequence
  Description of Artificial Sequence: Synthetic epitope
KLKEQWKEQQ

SEQ ID NO: 22601 - protein, 10 aa, Artificial Sequence
  Description of Artificial Sequence: Synthetic epitope
KLKESQTQDN

SEQ ID NO: 22602 - protein, 10 aa, Artificial Sequence
  Description of Artificial Sequence: Synthetic epitope
KLKETLAKVP

SEQ ID NO: 22603 - protein, 10 aa, Artificial Sequence
  Description of Artificial Sequence: Synthetic epitope
KLKEVQMHSF

SEQ ID NO: 22604 - protein, 10 aa, Artificial Sequence
  Description of Artificial Sequence: Synthetic epitope
KLKGNKISIS

SEQ ID NO: 22605 - protein, 10 aa, Artificial Sequence
  Description of Artificial Sequence: Synthetic epitope
KLKGQVSQET

SEQ ID NO: 22606 - protein, 10 aa, Artificial Sequence
  Description of Artificial Sequence: Synthetic epitope
KLKITQKESR

SEQ ID NO: 22607 - protein, 10 aa, Artificial Sequence
  Description of Artificial Sequence: Synthetic epitope
KLKKSSMAKL

SEQ ID NO: 22608 - protein, 10 aa, Artificial Sequence
  Description of Artificial Sequence: Synthetic epitope
KLKKYIAKQE

SEQ ID NO: 22609 - protein, 10 aa, Artificial Sequence
  Description of Artificial Sequence: Synthetic epitope
KLKLMKQRRK

SEQ ID NO: 22610 - protein, 10 aa, Artificial Sequence
  Description of Artificial Sequence: Synthetic epitope
KLKLNKDIVI

SEQ ID NO: 22611 - protein, 10 aa, Artificial Sequence
  Description of Artificial Sequence: Synthetic epitope
KLKLRSEARA

SEQ ID NO: 22612 - protein, 10 aa, Artificial Sequence
  Description of Artificial Sequence: Synthetic epitope
KLKLSSKAVY

SEQ ID NO: 22613 - protein, 10 aa, Artificial Sequence
  Description of Artificial Sequence: Synthetic epitope
KLKLVLTKHQ

SEQ ID NO: 22614 - protein, 10 aa, Artificial Sequence
  Description of Artificial Sequence: Synthetic epitope
KLKMQLKSAQ

SEQ ID NO: 22615 - protein, 10 aa, Artificial Sequence
  Description of Artificial Sequence: Synthetic epitope
KLKNADKVFA

SEQ ID NO: 22616 - protein, 10 aa, Artificial Sequence
  Description of Artificial Sequence: Synthetic epitope
KLKPTMAFMS

SEQ ID NO: 22617 - protein, 10 aa, Artificial Sequence
  Description of Artificial Sequence: Synthetic epitope
KLKQASQKSQ

SEQ ID NO: 22618 - protein, 10 aa, Artificial Sequence
  Description of Artificial Sequence: Synthetic epitope
KLKQDIARQK

SEQ ID NO: 22619 - protein, 10 aa, Artificial Sequence
  Description of Artificial Sequence: Synthetic epitope
KLKQNTSEQF

SEQ ID NO: 22620 - protein, 10 aa, Artificial Sequence
  Description of Artificial Sequence: Synthetic epitope
KLKRKLFTIE

SEQ ID NO: 22621 - protein, 10 aa, Artificial Sequence
  Description of Artificial Sequence: Synthetic epitope
KLKTSTAIKK

SEQ ID NO: 22622 - protein, 10 aa, Artificial Sequence
  Description of Artificial Sequence: Synthetic epitope
KLKYATEKKT

SEQ ID NO: 22623 - protein, 10 aa, Artificial Sequence
  Description of Artificial Sequence: Synthetic epitope
KLLAESLPRR

SEQ ID NO: 22624 - protein, 10 aa, Artificial Sequence
  Description of Artificial Sequence: Synthetic epitope
KLLAKIQALE

SEQ ID NO: 22625 - protein, 10 aa, Artificial Sequence
  Description of Artificial Sequence: Synthetic epitope
KLLANQTGQN

SEQ ID NO: 22626 - protein, 10 aa, Artificial Sequence
  Description of Artificial Sequence: Synthetic epitope
KLLAQSYEQQ

SEQ ID NO: 22627 - protein, 10 aa, Artificial Sequence
  Description of Artificial Sequence: Synthetic epitope
KLLDMKLVGR

SEQ ID NO: 22628 - protein, 10 aa, Artificial Sequence
  Description of Artificial Sequence: Synthetic epitope
KLLEMLSVSS

SEQ ID NO: 22629 - protein, 10 aa, Artificial Sequence
  Description of Artificial Sequence: Synthetic epitope
KLLESVASAA

SEQ ID NO: 22630 - protein, 10 aa, Artificial Sequence
  Description of Artificial Sequence: Synthetic epitope
KLLEVQILEV

SEQ ID NO: 22631 - protein, 10 aa, Artificial Sequence
  Description of Artificial Sequence: Synthetic epitope
KLLFKTVIQA

SEQ ID NO: 22632 - protein, 10 aa, Artificial Sequence
  Description of Artificial Sequence: Synthetic epitope
KLLFTLLSEE

SEQ ID NO: 22633 - protein, 10 aa, Artificial Sequence
  Description of Artificial Sequence: Synthetic epitope
KLLGDVRLNI

SEQ ID NO: 22634 - protein, 10 aa, Artificial Sequence
  Description of Artificial Sequence: Synthetic epitope
KLLGNKRDAK

SEQ ID NO: 22635 - protein, 10 aa, Artificial Sequence
  Description of Artificial Sequence: Synthetic epitope
KLLIAQEPLY

SEQ ID NO: 22636 - protein, 10 aa, Artificial Sequence
  Description of Artificial Sequence: Synthetic epitope
KLLIKASAVL

SEQ ID NO: 22637 - protein, 10 aa, Artificial Sequence
  Description of Artificial Sequence: Synthetic epitope
KLLISELHLR

SEQ ID NO: 22638 - protein, 10 aa, Artificial Sequence
  Description of Artificial Sequence: Synthetic epitope
KLLKLERIKD

SEQ ID NO: 22639 - protein, 10 aa, Artificial Sequence
  Description of Artificial Sequence: Synthetic epitope
KLLMEEDRTS

SEQ ID NO: 22640 - protein, 10 aa, Artificial Sequence
  Description of Artificial Sequence: Synthetic epitope
KLLMIISQKD

SEQ ID NO: 22641 - protein, 10 aa, Artificial Sequence
  Description of Artificial Sequence: Synthetic epitope
KLLMTHKVKL

SEQ ID NO: 22642 - protein, 10 aa, Artificial Sequence
  Description of Artificial Sequence: Synthetic epitope
KLLNDVVSGS

SEQ ID NO: 22643 - protein, 10 aa, Artificial Sequence
  Description of Artificial Sequence: Synthetic epitope
KLLNKIKMDT

SEQ ID NO: 22644 - protein, 10 aa, Artificial Sequence
  Description of Artificial Sequence: Synthetic epitope
KLLNKVVLRE

SEQ ID NO: 22645 - protein, 10 aa, Artificial Sequence
  Description of Artificial Sequence: Synthetic epitope
KLLNSEHEDV

SEQ ID NO: 22646 - protein, 10 aa, Artificial Sequence
  Description of Artificial Sequence: Synthetic epitope
KLLNSELADA

SEQ ID NO: 22647 - protein, 10 aa, Artificial Sequence
  Description of Artificial Sequence: Synthetic epitope
KLLNSQVVRF

SEQ ID NO: 22648 - protein, 10 aa, Artificial Sequence
  Description of Artificial Sequence: Synthetic epitope
KLLQEKSSLL

SEQ ID NO: 22649 - protein, 10 aa, Artificial Sequence
  Description of Artificial Sequence: Synthetic epitope
KLLQLYSEAS

SEQ ID NO: 22650 - protein, 10 aa, Artificial Sequence
  Description of Artificial Sequence: Synthetic epitope
KLLQQTMANG

SEQ ID NO: 22651 - protein, 10 aa, Artificial Sequence
  Description of Artificial Sequence: Synthetic epitope
KLLQSQLQVK

SEQ ID NO: 22652 - protein, 10 aa, Artificial Sequence
  Description of Artificial Sequence: Synthetic epitope
KLLQVIANSG

SEQ ID NO: 22653 - protein, 10 aa, Artificial Sequence
  Description of Artificial Sequence: Synthetic epitope
KLLRLFNSTQ

SEQ ID NO: 22654 - protein, 10 aa, Artificial Sequence
  Description of Artificial Sequence: Synthetic epitope
KLLRLQAAKQ

SEQ ID NO: 22655 - protein, 10 aa, Artificial Sequence
  Description of Artificial Sequence: Synthetic epitope
KLLSASQLSA

SEQ ID NO: 22656 - protein, 10 aa, Artificial Sequence
  Description of Artificial Sequence: Synthetic epitope
KLLSDLSVDS

SEQ ID NO: 22657 - protein, 10 aa, Artificial Sequence
  Description of Artificial Sequence: Synthetic epitope
KLLSFVIQNA

SEQ ID NO: 22658 - protein, 10 aa, Artificial Sequence
  Description of Artificial Sequence: Synthetic epitope
KLLSLEVRKR

SEQ ID NO: 22659 - protein, 10 aa, Artificial Sequence
  Description of Artificial Sequence: Synthetic epitope
KLLSQLLYEF

SEQ ID NO: 22660 - protein, 10 aa, Artificial Sequence
  Description of Artificial Sequence: Synthetic epitope
KLLSQVSGAS

SEQ ID NO: 22661 - protein, 10 aa, Artificial Sequence
  Description of Artificial Sequence: Synthetic epitope
KLLSSEDEVL

SEQ ID NO: 22662 - protein, 10 aa, Artificial Sequence
  Description of Artificial Sequence: Synthetic epitope
KLLSSYLQKK

SEQ ID NO: 22663 - protein, 10 aa, Artificial Sequence
  Description of Artificial Sequence: Synthetic epitope
KLLTKELSVL

SEQ ID NO: 22664 - protein, 10 aa, Artificial Sequence
  Description of Artificial Sequence: Synthetic epitope
KLLTSSLQKS

SEQ ID NO: 22665 - protein, 10 aa, Artificial Sequence
  Description of Artificial Sequence: Synthetic epitope
KLLVAMTEHN

SEQ ID NO: 22666 - protein, 10 aa, Artificial Sequence
  Description of Artificial Sequence: Synthetic epitope
KLLVKAEELE

SEQ ID NO: 22667 - protein, 10 aa, Artificial Sequence
  Description of Artificial Sequence: Synthetic epitope
KLMDWEVVSR

SEQ ID NO: 22668 - protein, 10 aa, Artificial Sequence
  Description of Artificial Sequence: Synthetic epitope
KLMEKIAQSS

SEQ ID NO: 22669 - protein, 10 aa, Artificial Sequence
  Description of Artificial Sequence: Synthetic epitope
KLMLQKREAP

SEQ ID NO: 22670 - protein, 10 aa, Artificial Sequence
  Description of Artificial Sequence: Synthetic epitope
KLMLTVMTKY

SEQ ID NO: 22671 - protein, 10 aa, Artificial Sequence
  Description of Artificial Sequence: Synthetic epitope
KLMPSAPVNT

SEQ ID NO: 22672 - protein, 10 aa, Artificial Sequence
  Description of Artificial Sequence: Synthetic epitope
KLMQIQAVGT

SEQ ID NO: 22673 - protein, 10 aa, Artificial Sequence
  Description of Artificial Sequence: Synthetic epitope
KLMQSSQITE

SEQ ID NO: 22674 - protein, 10 aa, Artificial Sequence
  Description of Artificial Sequence: Synthetic epitope
KLMSDALQHA

SEQ ID NO: 22675 - protein, 10 aa, Artificial Sequence
  Description of Artificial Sequence: Synthetic epitope
KLMSLIQKEA

SEQ ID NO: 22676 - protein, 10 aa, Artificial Sequence
  Description of Artificial Sequence: Synthetic epitope
KLMTAKLLPS

SEQ ID NO: 22677 - protein, 10 aa, Artificial Sequence
  Description of Artificial Sequence: Synthetic epitope
KLMTTGNNTV

SEQ ID NO: 22678 - protein, 10 aa, Artificial Sequence
  Description of Artificial Sequence: Synthetic epitope
KLMVERLSAE

SEQ ID NO: 22679 - protein, 10 aa, Artificial Sequence
  Description of Artificial Sequence: Synthetic epitope
KLNDEVIMNR

SEQ ID NO: 22680 - protein, 10 aa, Artificial Sequence
  Description of Artificial Sequence: Synthetic epitope
KLNGVVLNKS

SEQ ID NO: 22681 - protein, 10 aa, Artificial Sequence
  Description of Artificial Sequence: Synthetic epitope
KLNIHNVVAE

SEQ ID NO: 22682 - protein, 10 aa, Artificial Sequence
  Description of Artificial Sequence: Synthetic epitope
KLNINSMHNR

SEQ ID NO: 22683 - protein, 10 aa, Artificial Sequence
  Description of Artificial Sequence: Synthetic epitope
KLNKSESAEH

SEQ ID NO: 22684 - protein, 10 aa, Artificial Sequence
  Description of Artificial Sequence: Synthetic epitope
KLNLVNMNNI

SEQ ID NO: 22685 - protein, 10 aa, Artificial Sequence
  Description of Artificial Sequence: Synthetic epitope
KLNQVAISQA

SEQ ID NO: 22686 - protein, 10 aa, Artificial Sequence
  Description of Artificial Sequence: Synthetic epitope
KLNRKMNDSN

SEQ ID NO: 22687 - protein, 10 aa, Artificial Sequence
  Description of Artificial Sequence: Synthetic epitope
KLNSEYSMAE

SEQ ID NO: 22688 - protein, 10 aa, Artificial Sequence
  Description of Artificial Sequence: Synthetic epitope
KLNSKILNEK

SEQ ID NO: 22689 - protein, 10 aa, Artificial Sequence
  Description of Artificial Sequence: Synthetic epitope
KLNSKVERSQ

SEQ ID NO: 22690 - protein, 10 aa, Artificial Sequence
  Description of Artificial Sequence: Synthetic epitope
KLNSSEDQEE

SEQ ID NO: 22691 - protein, 10 aa, Artificial Sequence
  Description of Artificial Sequence: Synthetic epitope
KLNSSQEFAQ

SEQ ID NO: 22692 - protein, 10 aa, Artificial Sequence
  Description of Artificial Sequence: Synthetic epitope
KLNTESVSAA

SEQ ID NO: 22693 - protein, 10 aa, Artificial Sequence
  Description of Artificial Sequence: Synthetic epitope
KLNTRLMSQR

SEQ ID NO: 22694 - protein, 10 aa, Artificial Sequence
  Description of Artificial Sequence: Synthetic epitope
KLNVIRRNKH

SEQ ID NO: 22695 - protein, 10 aa, Artificial Sequence
  Description of Artificial Sequence: Synthetic epitope
KLPFNAQRII

SEQ ID NO: 22696 - protein, 10 aa, Artificial Sequence
  Description of Artificial Sequence: Synthetic epitope
KLPHRTERQR

SEQ ID NO: 22697 - protein, 10 aa, Artificial Sequence
  Description of Artificial Sequence: Synthetic epitope
KLPIRTNISK

SEQ ID NO: 22698 - protein, 10 aa, Artificial Sequence
  Description of Artificial Sequence: Synthetic epitope
KLPLQSQVGQ

SEQ ID NO: 22699 - protein, 10 aa, Artificial Sequence
  Description of Artificial Sequence: Synthetic epitope
KLPNSDFSQA

SEQ ID NO: 22700 - protein, 10 aa, Artificial Sequence
  Description of Artificial Sequence: Synthetic epitope
KLPQMETEGM

SEQ ID NO: 22701 - protein, 10 aa, Artificial Sequence
  Description of Artificial Sequence: Synthetic epitope
KLPSSKEKPT

SEQ ID NO: 22702 - protein, 10 aa, Artificial Sequence
  Description of Artificial Sequence: Synthetic epitope
KLPTTAFTRS

SEQ ID NO: 22703 - protein, 10 aa, Artificial Sequence
  Description of Artificial Sequence: Synthetic epitope
KLPVESKSEE

SEQ ID NO: 22704 - protein, 10 aa, Artificial Sequence
  Description of Artificial Sequence: Synthetic epitope
KLQAKILSDP

SEQ ID NO: 22705 - protein, 10 aa, Artificial Sequence
  Description of Artificial Sequence: Synthetic epitope
KLQAKMFTYN

SEQ ID NO: 22706 - protein, 10 aa, Artificial Sequence
  Description of Artificial Sequence: Synthetic epitope
KLQAVQAMYQ

SEQ ID NO: 22707 - protein, 10 aa, Artificial Sequence
  Description of Artificial Sequence: Synthetic epitope
KLQDASAEVE

SEQ ID NO: 22708 - protein, 10 aa, Artificial Sequence
  Description of Artificial Sequence: Synthetic epitope
KLQDKSETHD

SEQ ID NO: 22709 - protein, 10 aa, Artificial Sequence
  Description of Artificial Sequence: Synthetic epitope
KLQEALSKAA

SEQ ID NO: 22710 - protein, 10 aa, Artificial Sequence
  Description of Artificial Sequence: Synthetic epitope
KLQELQVLEE

SEQ ID NO: 22711 - protein, 10 aa, Artificial Sequence
  Description of Artificial Sequence: Synthetic epitope
KLQESTSARG

SEQ ID NO: 22712 - protein, 10 aa, Artificial Sequence
  Description of Artificial Sequence: Synthetic epitope
KLQESTSARG

SEQ ID NO: 22713 - protein, 10 aa, Artificial Sequence
  Description of Artificial Sequence: Synthetic epitope
KLQFGGEAAQ

SEQ ID NO: 22714 - protein, 10 aa, Artificial Sequence
  Description of Artificial Sequence: Synthetic epitope
KLQFLFELPS

SEQ ID NO: 22715 - protein, 10 aa, Artificial Sequence
  Description of Artificial Sequence: Synthetic epitope
KLQKAQTSTD

SEQ ID NO: 22716 - protein, 10 aa, Artificial Sequence
  Description of Artificial Sequence: Synthetic epitope
KLQLQSETSS

SEQ ID NO: 22717 - protein, 10 aa, Artificial Sequence
  Description of Artificial Sequence: Synthetic epitope
KLQLTDFVSK

SEQ ID NO: 22718 - protein, 10 aa, Artificial Sequence
  Description of Artificial Sequence: Synthetic epitope
KLQQEELNKH

SEQ ID NO: 22719 - protein, 10 aa, Artificial Sequence
  Description of Artificial Sequence: Synthetic epitope
KLQSELGVEK

SEQ ID NO: 22720 - protein, 10 aa, Artificial Sequence
  Description of Artificial Sequence: Synthetic epitope
KLQSESQKLE

SEQ ID NO: 22721 - protein, 10 aa, Artificial Sequence
  Description of Artificial Sequence: Synthetic epitope
KLRAAVTSAE

SEQ ID NO: 22722 - protein, 10 aa, Artificial Sequence
  Description of Artificial Sequence: Synthetic epitope
KLRAQSVTRT

SEQ ID NO: 22723 - protein, 10 aa, Artificial Sequence
  Description of Artificial Sequence: Synthetic epitope
KLRAQTTAQA

SEQ ID NO: 22724 - protein, 10 aa, Artificial Sequence
  Description of Artificial Sequence: Synthetic epitope
KLRDFESAVN

SEQ ID NO: 22725 - protein, 10 aa, Artificial Sequence
  Description of Artificial Sequence: Synthetic epitope
KLRDQMKTKR

SEQ ID NO: 22726 - protein, 10 aa, Artificial Sequence
  Description of Artificial Sequence: Synthetic epitope
KLREKIRSFV

SEQ ID NO: 22727 - protein, 10 aa, Artificial Sequence
  Description of Artificial Sequence: Synthetic epitope
KLRESLSRKT

SEQ ID NO: 22728 - protein, 10 aa, Artificial Sequence
  Description of Artificial Sequence: Synthetic epitope
KLRIQARRDE

SEQ ID NO: 22729 - protein, 10 aa, Artificial Sequence
  Description of Artificial Sequence: Synthetic epitope
KLRKARELEA

SEQ ID NO: 22730 - protein, 10 aa, Artificial Sequence
  Description of Artificial Sequence: Synthetic epitope
KLRKKSITKT

SEQ ID NO: 22731 - protein, 10 aa, Artificial Sequence
  Description of Artificial Sequence: Synthetic epitope
KLRKLVIQPV

SEQ ID NO: 22732 - protein, 10 aa, Artificial Sequence
  Description of Artificial Sequence: Synthetic epitope
KLRKQVTESS

SEQ ID NO: 22733 - protein, 10 aa, Artificial Sequence
  Description of Artificial Sequence: Synthetic epitope
KLRKSESKSS

SEQ ID NO: 22734 - protein, 10 aa, Artificial Sequence
  Description of Artificial Sequence: Synthetic epitope
KLRLALHGAS

SEQ ID NO: 22735 - protein, 10 aa, Artificial Sequence
  Description of Artificial Sequence: Synthetic epitope
KLRLLQVREQ

SEQ ID NO: 22736 - protein, 10 aa, Artificial Sequence
  Description of Artificial Sequence: Synthetic epitope
KLRPIAPKWK

SEQ ID NO: 22737 - protein, 10 aa, Artificial Sequence
  Description of Artificial Sequence: Synthetic epitope
KLRRAESRTS

SEQ ID NO: 22738 - protein, 10 aa, Artificial Sequence
  Description of Artificial Sequence: Synthetic epitope
KLRRAVSEVA

SEQ ID NO: 22739 - protein, 10 aa, Artificial Sequence
  Description of Artificial Sequence: Synthetic epitope
KLRRSISASD

SEQ ID NO: 22740 - protein, 10 aa, Artificial Sequence
  Description of Artificial Sequence: Synthetic epitope
KLRSIEVLQK

SEQ ID NO: 22741 - protein, 10 aa, Artificial Sequence
  Description of Artificial Sequence: Synthetic epitope
KLRSIEVLQK

SEQ ID NO: 22742 - protein, 10 aa, Artificial Sequence
  Description of Artificial Sequence: Synthetic epitope
KLRSLASTLD

SEQ ID NO: 22743 - protein, 10 aa, Artificial Sequence
  Description of Artificial Sequence: Synthetic epitope
KLRSQQISKI

SEQ ID NO: 22744 - protein, 10 aa, Artificial Sequence
  Description of Artificial Sequence: Synthetic epitope
KLRSRVQIGV

SEQ ID NO: 22745 - protein, 10 aa, Artificial Sequence
  Description of Artificial Sequence: Synthetic epitope
KLRVQVLQKK

SEQ ID NO: 22746 - protein, 10 aa, Artificial Sequence
  Description of Artificial Sequence: Synthetic epitope
KLRVSGSGEF

SEQ ID NO: 22747 - protein, 10 aa, Artificial Sequence
  Description of Artificial Sequence: Synthetic epitope
KLRYTTEIIK

SEQ ID NO: 22748 - protein, 10 aa, Artificial Sequence
  Description of Artificial Sequence: Synthetic epitope
KLSADNMDPD

SEQ ID NO: 22749 - protein, 10 aa, Artificial Sequence
  Description of Artificial Sequence: Synthetic epitope
KLSAESYKET

SEQ ID NO: 22750 - protein, 10 aa, Artificial Sequence
  Description of Artificial Sequence: Synthetic epitope
KLSAKLSENS

SEQ ID NO: 22751 - protein, 10 aa, Artificial Sequence
  Description of Artificial Sequence: Synthetic epitope
KLSASNQDKL

SEQ ID NO: 22752 - protein, 10 aa, Artificial Sequence
  Description of Artificial Sequence: Synthetic epitope
KLSDKSLSIL

SEQ ID NO: 22753 - protein, 10 aa, Artificial Sequence
  Description of Artificial Sequence: Synthetic epitope
KLSDLQSVNV

SEQ ID NO: 22754 - protein, 10 aa, Artificial Sequence
  Description of Artificial Sequence: Synthetic epitope
KLSDSERLAL

SEQ ID NO: 22755 - protein, 10 aa, Artificial Sequence
  Description of Artificial Sequence: Synthetic epitope
KLSDSTLKET

SEQ ID NO: 22756 - protein, 10 aa, Artificial Sequence
  Description of Artificial Sequence: Synthetic epitope
KLSDTVSMLD

SEQ ID NO: 22757 - protein, 10 aa, Artificial Sequence
  Description of Artificial Sequence: Synthetic epitope
KLSEMEEVKP

SEQ ID NO: 22758 - protein, 10 aa, Artificial Sequence
  Description of Artificial Sequence: Synthetic epitope
KLSEQEELKK

SEQ ID NO: 22759 - protein, 10 aa, Artificial Sequence
  Description of Artificial Sequence: Synthetic epitope
KLSEQRKGDK

SEQ ID NO: 22760 - protein, 10 aa, Artificial Sequence
  Description of Artificial Sequence: Synthetic epitope
KLSETSRMET

SEQ ID NO: 22761 - protein, 10 aa, Artificial Sequence
  Description of Artificial Sequence: Synthetic epitope
KLSFSTAELL

SEQ ID NO: 22762 - protein, 10 aa, Artificial Sequence
  Description of Artificial Sequence: Synthetic epitope
KLSGAKFSRD

SEQ ID NO: 22763 - protein, 10 aa, Artificial Sequence
  Description of Artificial Sequence: Synthetic epitope
KLSISSLEKE

SEQ ID NO: 22764 - protein, 10 aa, Artificial Sequence
  Description of Artificial Sequence: Synthetic epitope
KLSITKKSSP

SEQ ID NO: 22765 - protein, 10 aa, Artificial Sequence
  Description of Artificial Sequence: Synthetic epitope
KLSIVDDEAT

SEQ ID NO: 22766 - protein, 10 aa, Artificial Sequence
  Description of Artificial Sequence: Synthetic epitope
KLSIVRKRVS

SEQ ID NO: 22767 - protein, 10 aa, Artificial Sequence
  Description of Artificial Sequence: Synthetic epitope
KLSKAGSESS

SEQ ID NO: 22768 - protein, 10 aa, Artificial Sequence
  Description of Artificial Sequence: Synthetic epitope
KLSKALFAQM

SEQ ID NO: 22769 - protein, 10 aa, Artificial Sequence
  Description of Artificial Sequence: Synthetic epitope
KLSKALSLEM

SEQ ID NO: 22770 - protein, 10 aa, Artificial Sequence
  Description of Artificial Sequence: Synthetic epitope
KLSKINKDTA

SEQ ID NO: 22771 - protein, 10 aa, Artificial Sequence
  Description of Artificial Sequence: Synthetic epitope
KLSKIVENEK

SEQ ID NO: 22772 - protein, 10 aa, Artificial Sequence
  Description of Artificial Sequence: Synthetic epitope
KLSKKVIPKS

SEQ ID NO: 22773 - protein, 10 aa, Artificial Sequence
  Description of Artificial Sequence: Synthetic epitope
KLSKQMVDVK

SEQ ID NO: 22774 - protein, 10 aa, Artificial Sequence
  Description of Artificial Sequence: Synthetic epitope
KLSKSIASQT

SEQ ID NO: 22775 - protein, 10 aa, Artificial Sequence
  Description of Artificial Sequence: Synthetic epitope
KLSKTRSESS

SEQ ID NO: 22776 - protein, 10 aa, Artificial Sequence
  Description of Artificial Sequence: Synthetic epitope
KLSLASKRKK

SEQ ID NO: 22777 - protein, 10 aa, Artificial Sequence
  Description of Artificial Sequence: Synthetic epitope
KLSLQHTQQN

SEQ ID NO: 22778 - protein, 10 aa, Artificial Sequence
  Description of Artificial Sequence: Synthetic epitope
KLSLTKVVNG

SEQ ID NO: 22779 - protein, 10 aa, Artificial Sequence
  Description of Artificial Sequence: Synthetic epitope
KLSMIIKEEK

SEQ ID NO: 22780 - protein, 10 aa, Artificial Sequence
  Description of Artificial Sequence: Synthetic epitope
KLSNAESKIN

SEQ ID NO: 22781 - protein, 10 aa, Artificial Sequence
  Description of Artificial Sequence: Synthetic epitope
KLSNAESKIN

SEQ ID NO: 22782 - protein, 10 aa, Artificial Sequence
  Description of Artificial Sequence: Synthetic epitope
KLSNHQLKMQ

SEQ ID NO: 22783 - protein, 10 aa, Artificial Sequence
  Description of Artificial Sequence: Synthetic epitope
KLSPQINASN

SEQ ID NO: 22784 - protein, 10 aa, Artificial Sequence
  Description of Artificial Sequence: Synthetic epitope
KLSQDQIGFQ

SEQ ID NO: 22785 - protein, 10 aa, Artificial Sequence
  Description of Artificial Sequence: Synthetic epitope
KLSQTDSATT

SEQ ID NO: 22786 - protein, 10 aa, Artificial Sequence
  Description of Artificial Sequence: Synthetic epitope
KLSRAANTQK

SEQ ID NO: 22787 - protein, 10 aa, Artificial Sequence
  Description of Artificial Sequence: Synthetic epitope
KLSRKYVKAK

SEQ ID NO: 22788 - protein, 10 aa, Artificial Sequence
  Description of Artificial Sequence: Synthetic epitope
KLSRNTKEDH

SEQ ID NO: 22789 - protein, 10 aa, Artificial Sequence
  Description of Artificial Sequence: Synthetic epitope
KLSRRVGRLL

SEQ ID NO: 22790 - protein, 10 aa, Artificial Sequence
  Description of Artificial Sequence: Synthetic epitope
KLSRSVLFTK

SEQ ID NO: 22791 - protein, 10 aa, Artificial Sequence
  Description of Artificial Sequence: Synthetic epitope
KLSSHTSRRL

SEQ ID NO: 22792 - protein, 10 aa, Artificial Sequence
  Description of Artificial Sequence: Synthetic epitope
KLSSILTDIS

SEQ ID NO: 22793 - protein, 10 aa, Artificial Sequence
  Description of Artificial Sequence: Synthetic epitope
KLSSIVGLEE

SEQ ID NO: 22794 - protein, 10 aa, Artificial Sequence
  Description of Artificial Sequence: Synthetic epitope
KLSSKDLKLS

SEQ ID NO: 22795 - protein, 10 aa, Artificial Sequence
  Description of Artificial Sequence: Synthetic epitope
KLSSLLKLAD

SEQ ID NO: 22796 - protein, 10 aa, Artificial Sequence
  Description of Artificial Sequence: Synthetic epitope
KLSSLMLSQG

SEQ ID NO: 22797 - protein, 10 aa, Artificial Sequence
  Description of Artificial Sequence: Synthetic epitope
KLSSTLPSSV

SEQ ID NO: 22798 - protein, 10 aa, Artificial Sequence
  Description of Artificial Sequence: Synthetic epitope
KLSSTYGKIG

SEQ ID NO: 22799 - protein, 10 aa, Artificial Sequence
  Description of Artificial Sequence: Synthetic epitope
KLSSVASNGG

SEQ ID NO: 22800 - protein, 10 aa, Artificial Sequence
  Description of Artificial Sequence: Synthetic epitope
KLSTITLAAG

SEQ ID NO: 22801 - protein, 10 aa, Artificial Sequence
  Description of Artificial Sequence: Synthetic epitope
KLSTLALAAK

SEQ ID NO: 22802 - protein, 10 aa, Artificial Sequence
  Description of Artificial Sequence: Synthetic epitope
KLSTQHLYHP

SEQ ID NO: 22803 - protein, 10 aa, Artificial Sequence
  Description of Artificial Sequence: Synthetic epitope
KLSTSSTLKV

SEQ ID NO: 22804 - protein, 10 aa, Artificial Sequence
  Description of Artificial Sequence: Synthetic epitope
KLSVDEMIHE

SEQ ID NO: 22805 - protein, 10 aa, Artificial Sequence
  Description of Artificial Sequence: Synthetic epitope
KLSVKITSSK

SEQ ID NO: 22806 - protein, 10 aa, Artificial Sequence
  Description of Artificial Sequence: Synthetic epitope
KLSVVATFLI

SEQ ID NO: 22807 - protein, 10 aa, Artificial Sequence
  Description of Artificial Sequence: Synthetic epitope
KLTAADDKTA

SEQ ID NO: 22808 - protein, 10 aa, Artificial Sequence
  Description of Artificial Sequence: Synthetic epitope
KLTARSDRVK

SEQ ID NO: 22809 - protein, 10 aa, Artificial Sequence
  Description of Artificial Sequence: Synthetic epitope
KLTAVRTQAV

SEQ ID NO: 22810 - protein, 10 aa, Artificial Sequence
  Description of Artificial Sequence: Synthetic epitope
KLTDASLAKV

SEQ ID NO: 22811 - protein, 10 aa, Artificial Sequence
  Description of Artificial Sequence: Synthetic epitope
KLTEKAKANL

SEQ ID NO: 22812 - protein, 10 aa, Artificial Sequence
  Description of Artificial Sequence: Synthetic epitope
KLTETKSQQN

SEQ ID NO: 22813 - protein, 10 aa, Artificial Sequence
  Description of Artificial Sequence: Synthetic epitope
KLTETLSEDT

SEQ ID NO: 22814 - protein, 10 aa, Artificial Sequence
  Description of Artificial Sequence: Synthetic epitope
KLTFNNPTED

SEQ ID NO: 22815 - protein, 10 aa, Artificial Sequence
  Description of Artificial Sequence: Synthetic epitope
KLTFQLEPNP

SEQ ID NO: 22816 - protein, 10 aa, Artificial Sequence
  Description of Artificial Sequence: Synthetic epitope
KLTHVQRQEA

SEQ ID NO: 22817 - protein, 10 aa, Artificial Sequence
  Description of Artificial Sequence: Synthetic epitope
KLTIIDLLTE

SEQ ID NO: 22818 - protein, 10 aa, Artificial Sequence
  Description of Artificial Sequence: Synthetic epitope
KLTKAVSASS

SEQ ID NO: 22819 - protein, 10 aa, Artificial Sequence
  Description of Artificial Sequence: Synthetic epitope
KLTKDTTLPV

SEQ ID NO: 22820 - protein, 10 aa, Artificial Sequence
  Description of Artificial Sequence: Synthetic epitope
KLTKNIATDS

SEQ ID NO: 22821 - protein, 10 aa, Artificial Sequence
  Description of Artificial Sequence: Synthetic epitope
KLTLVSRGTR

SEQ ID NO: 22822 - protein, 10 aa, Artificial Sequence
  Description of Artificial Sequence: Synthetic epitope
KLTMGMLKSP

SEQ ID NO: 22823 - protein, 10 aa, Artificial Sequence
  Description of Artificial Sequence: Synthetic epitope
KLTNKNSDRM

SEQ ID NO: 22824 - protein, 10 aa, Artificial Sequence
  Description of Artificial Sequence: Synthetic epitope
KLTQNHKAKG

SEQ ID NO: 22825 - protein, 10 aa, Artificial Sequence
  Description of Artificial Sequence: Synthetic epitope
KLTQSKAESE

SEQ ID NO: 22826 - protein, 10 aa, Artificial Sequence
  Description of Artificial Sequence: Synthetic epitope
KLTRDTFEWH

SEQ ID NO: 22827 - protein, 10 aa, Artificial Sequence
  Description of Artificial Sequence: Synthetic epitope
KLTRKIDNVE

SEQ ID NO: 22828 - protein, 10 aa, Artificial Sequence
  Description of Artificial Sequence: Synthetic epitope
KLTSMESQTD

SEQ ID NO: 22829 - protein, 10 aa, Artificial Sequence
  Description of Artificial Sequence: Synthetic epitope
KLTTEATQTP

SEQ ID NO: 22830 - protein, 10 aa, Artificial Sequence
  Description of Artificial Sequence: Synthetic epitope
KLTVALETAE

SEQ ID NO: 22831 - protein, 10 aa, Artificial Sequence
  Description of Artificial Sequence: Synthetic epitope
KLVADAVERH

SEQ ID NO: 22832 - protein, 10 aa, Artificial Sequence
  Description of Artificial Sequence: Synthetic epitope
KLVASARDAG

SEQ ID NO: 22833 - protein, 10 aa, Artificial Sequence
  Description of Artificial Sequence: Synthetic epitope
KLVDPERDMS

SEQ ID NO: 22834 - protein, 10 aa, Artificial Sequence
  Description of Artificial Sequence: Synthetic epitope
KLVEARPMIH

SEQ ID NO: 22835 - protein, 10 aa, Artificial Sequence
  Description of Artificial Sequence: Synthetic epitope
KLVEKSFETD

SEQ ID NO: 22836 - protein, 10 aa, Artificial Sequence
  Description of Artificial Sequence: Synthetic epitope
KLVESELLEI

SEQ ID NO: 22837 - protein, 10 aa, Artificial Sequence
  Description of Artificial Sequence: Synthetic epitope
KLVGEIKETL

SEQ ID NO: 22838 - protein, 10 aa, Artificial Sequence
  Description of Artificial Sequence: Synthetic epitope
KLVIEEAERS

SEQ ID NO: 22839 - protein, 10 aa, Artificial Sequence
  Description of Artificial Sequence: Synthetic epitope
KLVINKIAYD

SEQ ID NO: 22840 - protein, 10 aa, Artificial Sequence
  Description of Artificial Sequence: Synthetic epitope
KLVIQQSIDE

SEQ ID NO: 22841 - protein, 10 aa, Artificial Sequence
  Description of Artificial Sequence: Synthetic epitope
KLVKAAGFSS

SEQ ID NO: 22842 - protein, 10 aa, Artificial Sequence
  Description of Artificial Sequence: Synthetic epitope
KLVKPTTEKK

SEQ ID NO: 22843 - protein, 10 aa, Artificial Sequence
  Description of Artificial Sequence: Synthetic epitope
KLVKVVSSGA

SEQ ID NO: 22844 - protein, 10 aa, Artificial Sequence
  Description of Artificial Sequence: Synthetic epitope
KLVKYAMQAL

SEQ ID NO: 22845 - protein, 10 aa, Artificial Sequence
  Description of Artificial Sequence: Synthetic epitope
KLVMEIIKLI

SEQ ID NO: 22846 - protein, 10 aa, Artificial Sequence
  Description of Artificial Sequence: Synthetic epitope
KLVMESVTLP

SEQ ID NO: 22847 - protein, 10 aa, Artificial Sequence
  Description of Artificial Sequence: Synthetic epitope
KLVMMFEGKA

SEQ ID NO: 22848 - protein, 10 aa, Artificial Sequence
  Description of Artificial Sequence: Synthetic epitope
KLVMNATLKD

SEQ ID NO: 22849 - protein, 10 aa, Artificial Sequence
  Description of Artificial Sequence: Synthetic epitope
KLVQEKNAMV

SEQ ID NO: 22850 - protein, 10 aa, Artificial Sequence
  Description of Artificial Sequence: Synthetic epitope
KLVSRLRGEA

SEQ ID NO: 22851 - protein, 10 aa, Artificial Sequence
  Description of Artificial Sequence: Synthetic epitope
KLVSRTNNPL

SEQ ID NO: 22852 - protein, 10 aa, Artificial Sequence
  Description of Artificial Sequence: Synthetic epitope
KLVSSKVIGR

SEQ ID NO: 22853 - protein, 10 aa, Artificial Sequence
  Description of Artificial Sequence: Synthetic epitope
KLVTAEISRS

SEQ ID NO: 22854 - protein, 10 aa, Artificial Sequence
  Description of Artificial Sequence: Synthetic epitope
KLVVAILQKF

SEQ ID NO: 22855 - protein, 10 aa, Artificial Sequence
  Description of Artificial Sequence: Synthetic epitope
KLVVQRTKLI

SEQ ID NO: 22856 - protein, 10 aa, Artificial Sequence
  Description of Artificial Sequence: Synthetic epitope
KLWRVKKFLI

SEQ ID NO: 22857 - protein, 10 aa, Artificial Sequence
  Description of Artificial Sequence: Synthetic epitope
KLYHEHYMRN

SEQ ID NO: 22858 - protein, 10 aa, Artificial Sequence
  Description of Artificial Sequence: Synthetic epitope
KLYKAKSNKE

SEQ ID NO: 22859 - protein, 10 aa, Artificial Sequence
  Description of Artificial Sequence: Synthetic epitope
KLYKTKSNKE

SEQ ID NO: 22860 - protein, 10 aa, Artificial Sequence
  Description of Artificial Sequence: Synthetic epitope
KLYRVPISHK

SEQ ID NO: 22861 - protein, 10 aa, Artificial Sequence
  Description of Artificial Sequence: Synthetic epitope
KLYSEQYTSS

SEQ ID NO: 22862 - protein, 10 aa, Artificial Sequence
  Description of Artificial Sequence: Synthetic epitope
KLYSIAAPAR

SEQ ID NO: 22863 - protein, 10 aa, Artificial Sequence
  Description of Artificial Sequence: Synthetic epitope
KLYSISSQVS

SEQ ID NO: 22864 - protein, 10 aa, Artificial Sequence
  Description of Artificial Sequence: Synthetic epitope
KMAALEEGLK

SEQ ID NO: 22865 - protein, 10 aa, Artificial Sequence
  Description of Artificial Sequence: Synthetic epitope
KMADRKDEDR

SEQ ID NO: 22866 - protein, 10 aa, Artificial Sequence
  Description of Artificial Sequence: Synthetic epitope
KMAEKAREKE

SEQ ID NO: 22867 - protein, 10 aa, Artificial Sequence
  Description of Artificial Sequence: Synthetic epitope
KMAGVEDKNM

SEQ ID NO: 22868 - protein, 10 aa, Artificial Sequence
  Description of Artificial Sequence: Synthetic epitope
KMAHKKRSQE

SEQ ID NO: 22869 - protein, 10 aa, Artificial Sequence
  Description of Artificial Sequence: Synthetic epitope
KMAKAPSAAR

SEQ ID NO: 22870 - protein, 10 aa, Artificial Sequence
  Description of Artificial Sequence: Synthetic epitope
KMAKTQSQPI

SEQ ID NO: 22871 - protein, 10 aa, Artificial Sequence
  Description of Artificial Sequence: Synthetic epitope
KMALFMVEGT

SEQ ID NO: 22872 - protein, 10 aa, Artificial Sequence
  Description of Artificial Sequence: Synthetic epitope
KMALLTQTQG

SEQ ID NO: 22873 - protein, 10 aa, Artificial Sequence
  Description of Artificial Sequence: Synthetic epitope
KMANGFATTE

SEQ ID NO: 22874 - protein, 10 aa, Artificial Sequence
  Description of Artificial Sequence: Synthetic epitope
KMASEIEDHI

SEQ ID NO: 22875 - protein, 10 aa, Artificial Sequence
  Description of Artificial Sequence: Synthetic epitope
KMASSEGSTE

SEQ ID NO: 22876 - protein, 10 aa, Artificial Sequence
  Description of Artificial Sequence: Synthetic epitope
KMAVSWHHDE

SEQ ID NO: 22877 - protein, 10 aa, Artificial Sequence
  Description of Artificial Sequence: Synthetic epitope
KMDANDKKIQ

SEQ ID NO: 22878 - protein, 10 aa, Artificial Sequence
  Description of Artificial Sequence: Synthetic epitope
KMDASLGNLF

SEQ ID NO: 22879 - protein, 10 aa, Artificial Sequence
  Description of Artificial Sequence: Synthetic epitope
KMDDASISRN

SEQ ID NO: 22880 - protein, 10 aa, Artificial Sequence
  Description of Artificial Sequence: Synthetic epitope
KMDDKSVPHE

SEQ ID NO: 22881 - protein, 10 aa, Artificial Sequence
  Description of Artificial Sequence: Synthetic epitope
KMDDSSTIQW

SEQ ID NO: 22882 - protein, 10 aa, Artificial Sequence
  Description of Artificial Sequence: Synthetic epitope
KMDEVLYSIA

SEQ ID NO: 22883 - protein, 10 aa, Artificial Sequence
  Description of Artificial Sequence: Synthetic epitope
KMDQTNKAGE

SEQ ID NO: 22884 - protein, 10 aa, Artificial Sequence
  Description of Artificial Sequence: Synthetic epitope
KMDSWNTAGI

SEQ ID NO: 22885 - protein, 10 aa, Artificial Sequence
  Description of Artificial Sequence: Synthetic epitope
KMEANQKAKK

SEQ ID NO: 22886 - protein, 10 aa, Artificial Sequence
  Description of Artificial Sequence: Synthetic epitope
KMEKTLQVVE

SEQ ID NO: 22887 - protein, 10 aa, Artificial Sequence
  Description of Artificial Sequence: Synthetic epitope
KMELLMNSVK

SEQ ID NO: 22888 - protein, 10 aa, Artificial Sequence
  Description of Artificial Sequence: Synthetic epitope
KMEMKHDSKI

SEQ ID NO: 22889 - protein, 10 aa, Artificial Sequence
  Description of Artificial Sequence: Synthetic epitope
KMENVQPAPD

SEQ ID NO: 22890 - protein, 10 aa, Artificial Sequence
  Description of Artificial Sequence: Synthetic epitope
KMEREQHQTE

SEQ ID NO: 22891 - protein, 10 aa, Artificial Sequence
  Description of Artificial Sequence: Synthetic epitope
KMESAQDVQT

SEQ ID NO: 22892 - protein, 10 aa, Artificial Sequence
  Description of Artificial Sequence: Synthetic epitope
KMESEEGKEA

SEQ ID NO: 22893 - protein, 10 aa, Artificial Sequence
  Description of Artificial Sequence: Synthetic epitope
KMETLESELT

SEQ ID NO: 22894 - protein, 10 aa, Artificial Sequence
  Description of Artificial Sequence: Synthetic epitope
KMETRKFNSK

SEQ ID NO: 22895 - protein, 10 aa, Artificial Sequence
  Description of Artificial Sequence: Synthetic epitope
KMEVRSLQQD

SEQ ID NO: 22896 - protein, 10 aa, Artificial Sequence
  Description of Artificial Sequence: Synthetic epitope
KMFAMTLEES

SEQ ID NO: 22897 - protein, 10 aa, Artificial Sequence
  Description of Artificial Sequence: Synthetic epitope
KMFEETAELL

SEQ ID NO: 22898 - protein, 10 aa, Artificial Sequence
  Description of Artificial Sequence: Synthetic epitope
KMGKAEILKY

SEQ ID NO: 22899 - protein, 10 aa, Artificial Sequence
  Description of Artificial Sequence: Synthetic epitope
KMGKKQNGKS

SEQ ID NO: 22900 - protein, 10 aa, Artificial Sequence
  Description of Artificial Sequence: Synthetic epitope
KMGKNNQSAL

SEQ ID NO: 22901 - protein, 10 aa, Artificial Sequence
  Description of Artificial Sequence: Synthetic epitope
KMGLSEMELE

SEQ ID NO: 22902 - protein, 10 aa, Artificial Sequence
  Description of Artificial Sequence: Synthetic epitope
KMGMSIIEQL

SEQ ID NO: 22903 - protein, 10 aa, Artificial Sequence
  Description of Artificial Sequence: Synthetic epitope
KMGQIIQYDK

SEQ ID NO: 22904 - protein, 10 aa, Artificial Sequence
  Description of Artificial Sequence: Synthetic epitope
KMGRKAAETT

SEQ ID NO: 22905 - protein, 10 aa, Artificial Sequence
  Description of Artificial Sequence: Synthetic epitope
KMGSINKNKV

SEQ ID NO: 22906 - protein, 10 aa, Artificial Sequence
  Description of Artificial Sequence: Synthetic epitope
KMGSSTSEKT

SEQ ID NO: 22907 - protein, 10 aa, Artificial Sequence
  Description of Artificial Sequence: Synthetic epitope
KMHETNQGEF

SEQ ID NO: 22908 - protein, 10 aa, Artificial Sequence
  Description of Artificial Sequence: Synthetic epitope
KMHLSSRQSV

SEQ ID NO: 22909 - protein, 10 aa, Artificial Sequence
  Description of Artificial Sequence: Synthetic epitope
KMHNLGHKNN

SEQ ID NO: 22910 - protein, 10 aa, Artificial Sequence
  Description of Artificial Sequence: Synthetic epitope
KMHQSQEESA

SEQ ID NO: 22911 - protein, 10 aa, Artificial Sequence
  Description of Artificial Sequence: Synthetic epitope
KMHQSRISYH

SEQ ID NO: 22912 - protein, 10 aa, Artificial Sequence
  Description of Artificial Sequence: Synthetic epitope
KMHSASVYQK

SEQ ID NO: 22913 - protein, 10 aa, Artificial Sequence
  Description of Artificial Sequence: Synthetic epitope
KMIKAAIEEG

SEQ ID NO: 22914 - protein, 10 aa, Artificial Sequence
  Description of Artificial Sequence: Synthetic epitope
KMIKNEVDMQ

SEQ ID NO: 22915 - protein, 10 aa, Artificial Sequence
  Description of Artificial Sequence: Synthetic epitope
KMILKLLEDK

SEQ ID NO: 22916 - protein, 10 aa, Artificial Sequence
  Description of Artificial Sequence: Synthetic epitope
KMITKTVARY

SEQ ID NO: 22917 - protein, 10 aa, Artificial Sequence
  Description of Artificial Sequence: Synthetic epitope
KMIVSFTIGF

SEQ ID NO: 22918 - protein, 10 aa, Artificial Sequence
  Description of Artificial Sequence: Synthetic epitope
KMKAIRRSLK

SEQ ID NO: 22919 - protein, 10 aa, Artificial Sequence
  Description of Artificial Sequence: Synthetic epitope
KMKESEADSE

SEQ ID NO: 22920 - protein, 10 aa, Artificial Sequence
  Description of Artificial Sequence: Synthetic epitope
KMKGEQESHS

SEQ ID NO: 22921 - protein, 10 aa, Artificial Sequence
  Description of Artificial Sequence: Synthetic epitope
KMKIAEKQRQ

SEQ ID NO: 22922 - protein, 10 aa, Artificial Sequence
  Description of Artificial Sequence: Synthetic epitope
KMKISPKRMS

SEQ ID NO: 22923 - protein, 10 aa, Artificial Sequence
  Description of Artificial Sequence: Synthetic epitope
KMKKQSNNDL

SEQ ID NO: 22924 - protein, 10 aa, Artificial Sequence
  Description of Artificial Sequence: Synthetic epitope
KMKMETTKGQ

SEQ ID NO: 22925 - protein, 10 aa, Artificial Sequence
  Description of Artificial Sequence: Synthetic epitope
KMKNISNHLV

SEQ ID NO: 22926 - protein, 10 aa, Artificial Sequence
  Description of Artificial Sequence: Synthetic epitope
KMKRSKLALS

SEQ ID NO: 22927 - protein, 10 aa, Artificial Sequence
  Description of Artificial Sequence: Synthetic epitope
KMKSEAVMNQ

SEQ ID NO: 22928 - protein, 10 aa, Artificial Sequence
  Description of Artificial Sequence: Synthetic epitope
KMKSISSDPL

SEQ ID NO: 22929 - protein, 10 aa, Artificial Sequence
  Description of Artificial Sequence: Synthetic epitope
KMKSLSSQAS

SEQ ID NO: 22930 - protein, 10 aa, Artificial Sequence
  Description of Artificial Sequence: Synthetic epitope
KMKSYPSSTN

SEQ ID NO: 22931 - protein, 10 aa, Artificial Sequence
  Description of Artificial Sequence: Synthetic epitope
KMKVIKTMEA

SEQ ID NO: 22932 - protein, 10 aa, Artificial Sequence
  Description of Artificial Sequence: Synthetic epitope
KMKVTSGRVQ

SEQ ID NO: 22933 - protein, 10 aa, Artificial Sequence
  Description of Artificial Sequence: Synthetic epitope
KMKWQFEHTK

SEQ ID NO: 22934 - protein, 10 aa, Artificial Sequence
  Description of Artificial Sequence: Synthetic epitope
KMLEDSQRRT

SEQ ID NO: 22935 - protein, 10 aa, Artificial Sequence
  Description of Artificial Sequence: Synthetic epitope
KMLEDSQRRT

SEQ ID NO: 22936 - protein, 10 aa, Artificial Sequence
  Description of Artificial Sequence: Synthetic epitope
KMLEEKSPEK

SEQ ID NO: 22937 - protein, 10 aa, Artificial Sequence
  Description of Artificial Sequence: Synthetic epitope
KMLKKHVKVS

SEQ ID NO: 22938 - protein, 10 aa, Artificial Sequence
  Description of Artificial Sequence: Synthetic epitope
KMLLHEKAEA

SEQ ID NO: 22939 - protein, 10 aa, Artificial Sequence
  Description of Artificial Sequence: Synthetic epitope
KMLLSEKLDV

SEQ ID NO: 22940 - protein, 10 aa, Artificial Sequence
  Description of Artificial Sequence: Synthetic epitope
KMLMKELSKY

SEQ ID NO: 22941 - protein, 10 aa, Artificial Sequence
  Description of Artificial Sequence: Synthetic epitope
KMLNAVKNKS

SEQ ID NO: 22942 - protein, 10 aa, Artificial Sequence
  Description of Artificial Sequence: Synthetic epitope
KMLNSNTESP

SEQ ID NO: 22943 - protein, 10 aa, Artificial Sequence
  Description of Artificial Sequence: Synthetic epitope
KMLRQVLVTS

SEQ ID NO: 22944 - protein, 10 aa, Artificial Sequence
  Description of Artificial Sequence: Synthetic epitope
KMLRTAVDSL

SEQ ID NO: 22945 - protein, 10 aa, Artificial Sequence
  Description of Artificial Sequence: Synthetic epitope
KMLRTLKQEN

SEQ ID NO: 22946 - protein, 10 aa, Artificial Sequence
  Description of Artificial Sequence: Synthetic epitope
KMLSDIITEQ

SEQ ID NO: 22947 - protein, 10 aa, Artificial Sequence
  Description of Artificial Sequence: Synthetic epitope
KMLSENFMSL

SEQ ID NO: 22948 - protein, 10 aa, Artificial Sequence
  Description of Artificial Sequence: Synthetic epitope
KMLSGQALKD

SEQ ID NO: 22949 - protein, 10 aa, Artificial Sequence
  Description of Artificial Sequence: Synthetic epitope
KMLSKAVDAL

SEQ ID NO: 22950 - protein, 10 aa, Artificial Sequence
  Description of Artificial Sequence: Synthetic epitope
KMLSSLLSER

SEQ ID NO: 22951 - protein, 10 aa, Artificial Sequence
  Description of Artificial Sequence: Synthetic epitope
KMMATYKEKK

SEQ ID NO: 22952 - protein, 10 aa, Artificial Sequence
  Description of Artificial Sequence: Synthetic epitope
KMMENLTTLD

SEQ ID NO: 22953 - protein, 10 aa, Artificial Sequence
  Description of Artificial Sequence: Synthetic epitope
KMMVAGFKKQ

SEQ ID NO: 22954 - protein, 10 aa, Artificial Sequence
  Description of Artificial Sequence: Synthetic epitope
KMNFDHKNET

SEQ ID NO: 22955 - protein, 10 aa, Artificial Sequence
  Description of Artificial Sequence: Synthetic epitope
KMNHSITMSQ

SEQ ID NO: 22956 - protein, 10 aa, Artificial Sequence
  Description of Artificial Sequence: Synthetic epitope
KMNIADTAKQ

SEQ ID NO: 22957 - protein, 10 aa, Artificial Sequence
  Description of Artificial Sequence: Synthetic epitope
KMNITSIAPL

SEQ ID NO: 22958 - protein, 10 aa, Artificial Sequence
  Description of Artificial Sequence: Synthetic epitope
KMNKPLKAKE

SEQ ID NO: 22959 - protein, 10 aa, Artificial Sequence
  Description of Artificial Sequence: Synthetic epitope
KMNQALAKMD

SEQ ID NO: 22960 - protein, 10 aa, Artificial Sequence
  Description of Artificial Sequence: Synthetic epitope
KMNRTVNQHA

SEQ ID NO: 22961 - protein, 10 aa, Artificial Sequence
  Description of Artificial Sequence: Synthetic epitope
KMNSDEIKMQ

SEQ ID NO: 22962 - protein, 10 aa, Artificial Sequence
  Description of Artificial Sequence: Synthetic epitope
KMNTAEFKSA

SEQ ID NO: 22963 - protein, 10 aa, Artificial Sequence
  Description of Artificial Sequence: Synthetic epitope
KMNTINAAEP

SEQ ID NO: 22964 - protein, 10 aa, Artificial Sequence
  Description of Artificial Sequence: Synthetic epitope
KMPGQSVRKK

SEQ ID NO: 22965 - protein, 10 aa, Artificial Sequence
  Description of Artificial Sequence: Synthetic epitope
KMPITADLVA

SEQ ID NO: 22966 - protein, 10 aa, Artificial Sequence
  Description of Artificial Sequence: Synthetic epitope
KMPKEKKGQE

SEQ ID NO: 22967 - protein, 10 aa, Artificial Sequence
  Description of Artificial Sequence: Synthetic epitope
KMPKVFDLDQ

SEQ ID NO: 22968 - protein, 10 aa, Artificial Sequence
  Description of Artificial Sequence: Synthetic epitope
KMPSASTESR

SEQ ID NO: 22969 - protein, 10 aa, Artificial Sequence
  Description of Artificial Sequence: Synthetic epitope
KMPSLLSETF

SEQ ID NO: 22970 - protein, 10 aa, Artificial Sequence
  Description of Artificial Sequence: Synthetic epitope
KMPTEAKNPD

SEQ ID NO: 22971 - protein, 10 aa, Artificial Sequence
  Description of Artificial Sequence: Synthetic epitope
KMQASPEYQD

SEQ ID NO: 22972 - protein, 10 aa, Artificial Sequence
  Description of Artificial Sequence: Synthetic epitope
KMQGVYGHYD

SEQ ID NO: 22973 - protein, 10 aa, Artificial Sequence
  Description of Artificial Sequence: Synthetic epitope
KMQNALGRGK

SEQ ID NO: 22974 - protein, 10 aa, Artificial Sequence
  Description of Artificial Sequence: Synthetic epitope
KMQQSKNQSA

SEQ ID NO: 22975 - protein, 10 aa, Artificial Sequence
  Description of Artificial Sequence: Synthetic epitope
KMQSLLISNK

SEQ ID NO: 22976 - protein, 10 aa, Artificial Sequence
  Description of Artificial Sequence: Synthetic epitope
KMQTKAEIRQ

SEQ ID NO: 22977 - protein, 10 aa, Artificial Sequence
  Description of Artificial Sequence: Synthetic epitope
KMQTVKKEQA

SEQ ID NO: 22978 - protein, 10 aa, Artificial Sequence
  Description of Artificial Sequence: Synthetic epitope
KMQVLEMIRK

SEQ ID NO: 22979 - protein, 10 aa, Artificial Sequence
  Description of Artificial Sequence: Synthetic epitope
KMREAALNNQ

SEQ ID NO: 22980 - protein, 10 aa, Artificial Sequence
  Description of Artificial Sequence: Synthetic epitope
KMREKSKGKE

SEQ ID NO: 22981 - protein, 10 aa, Artificial Sequence
  Description of Artificial Sequence: Synthetic epitope
KMRGIDFFEF

SEQ ID NO: 22982 - protein, 10 aa, Artificial Sequence
  Description of Artificial Sequence: Synthetic epitope
KMRSSKKTEV

SEQ ID NO: 22983 - protein, 10 aa, Artificial Sequence
  Description of Artificial Sequence: Synthetic epitope
KMRVLQEKKQ

SEQ ID NO: 22984 - protein, 10 aa, Artificial Sequence
  Description of Artificial Sequence: Synthetic epitope
KMSAALPAGL

SEQ ID NO: 22985 - protein, 10 aa, Artificial Sequence
  Description of Artificial Sequence: Synthetic epitope
KMSALKQSTS

SEQ ID NO: 22986 - protein, 10 aa, Artificial Sequence
  Description of Artificial Sequence: Synthetic epitope
KMSENELDTT

SEQ ID NO: 22987 - protein, 10 aa, Artificial Sequence
  Description of Artificial Sequence: Synthetic epitope
KMSESQAALP

SEQ ID NO: 22988 - protein, 10 aa, Artificial Sequence
  Description of Artificial Sequence: Synthetic epitope
KMSKKEKISE

SEQ ID NO: 22989 - protein, 10 aa, Artificial Sequence
  Description of Artificial Sequence: Synthetic epitope
KMSKSQFDSL

SEQ ID NO: 22990 - protein, 10 aa, Artificial Sequence
  Description of Artificial Sequence: Synthetic epitope
KMSLKSERRG

SEQ ID NO: 22991 - protein, 10 aa, Artificial Sequence
  Description of Artificial Sequence: Synthetic epitope
KMSLNELEIL

SEQ ID NO: 22992 - protein, 10 aa, Artificial Sequence
  Description of Artificial Sequence: Synthetic epitope
KMSNWQGAID

SEQ ID NO: 22993 - protein, 10 aa, Artificial Sequence
  Description of Artificial Sequence: Synthetic epitope
KMSRRSADAS

SEQ ID NO: 22994 - protein, 10 aa, Artificial Sequence
  Description of Artificial Sequence: Synthetic epitope
KMSRSASESA

SEQ ID NO: 22995 - protein, 10 aa, Artificial Sequence
  Description of Artificial Sequence: Synthetic epitope
KMSVFPRDWM

SEQ ID NO: 22996 - protein, 10 aa, Artificial Sequence
  Description of Artificial Sequence: Synthetic epitope
KMTAVNETQE

SEQ ID NO: 22997 - protein, 10 aa, Artificial Sequence
  Description of Artificial Sequence: Synthetic epitope
KMTEIQTPEN

SEQ ID NO: 22998 - protein, 10 aa, Artificial Sequence
  Description of Artificial Sequence: Synthetic epitope
KMTENTLLFA

SEQ ID NO: 22999 - protein, 10 aa, Artificial Sequence
  Description of Artificial Sequence: Synthetic epitope
KMTEVVLKAP

SEQ ID NO: 23000 - protein, 10 aa, Artificial Sequence
  Description of Artificial Sequence: Synthetic epitope
KMTGRYEMYA

SEQ ID NO: 23001 - protein, 10 aa, Artificial Sequence
  Description of Artificial Sequence: Synthetic epitope
KMTIAASASL

SEQ ID NO: 23002 - protein, 10 aa, Artificial Sequence
  Description of Artificial Sequence: Synthetic epitope
KMTKSTQTQD

SEQ ID NO: 23003 - protein, 10 aa, Artificial Sequence
  Description of Artificial Sequence: Synthetic epitope
KMTKVFTHQG

SEQ ID NO: 23004 - protein, 10 aa, Artificial Sequence
  Description of Artificial Sequence: Synthetic epitope
KMTMVDRIEE

SEQ ID NO: 23005 - protein, 10 aa, Artificial Sequence
  Description of Artificial Sequence: Synthetic epitope
KMTNKTTSKE

SEQ ID NO: 23006 - protein, 10 aa, Artificial Sequence
  Description of Artificial Sequence: Synthetic epitope
KMTVAKQGVS

SEQ ID NO: 23007 - protein, 10 aa, Artificial Sequence
  Description of Artificial Sequence: Synthetic epitope
KMTVDASENV

SEQ ID NO: 23008 - protein, 10 aa, Artificial Sequence
  Description of Artificial Sequence: Synthetic epitope
KMVAASIKDG

SEQ ID NO: 23009 - protein, 10 aa, Artificial Sequence
  Description of Artificial Sequence: Synthetic epitope
KMVDLESEKE

SEQ ID NO: 23010 - protein, 10 aa, Artificial Sequence
  Description of Artificial Sequence: Synthetic epitope
KMVEDKKIVI

SEQ ID NO: 23011 - protein, 10 aa, Artificial Sequence
  Description of Artificial Sequence: Synthetic epitope
KMVEDLISVG

SEQ ID NO: 23012 - protein, 10 aa, Artificial Sequence
  Description of Artificial Sequence: Synthetic epitope
KMVEESDEEV

SEQ ID NO: 23013 - protein, 10 aa, Artificial Sequence
  Description of Artificial Sequence: Synthetic epitope
KMVKQETSDK

SEQ ID NO: 23014 - protein, 10 aa, Artificial Sequence
  Description of Artificial Sequence: Synthetic epitope
KMVMETKTDN

SEQ ID NO: 23015 - protein, 10 aa, Artificial Sequence
  Description of Artificial Sequence: Synthetic epitope
KMVQQSDLGQ

SEQ ID NO: 23016 - protein, 10 aa, Artificial Sequence
  Description of Artificial Sequence: Synthetic epitope
KMVSSLTSVQ

SEQ ID NO: 23017 - protein, 10 aa, Artificial Sequence
  Description of Artificial Sequence: Synthetic epitope
KMVTAQTQKA

SEQ ID NO: 23018 - protein, 10 aa, Artificial Sequence
  Description of Artificial Sequence: Synthetic epitope
KMVTEDQSKA

SEQ ID NO: 23019 - protein, 10 aa, Artificial Sequence
  Description of Artificial Sequence: Synthetic epitope
KMVTLGANAK

SEQ ID NO: 23020 - protein, 10 aa, Artificial Sequence
  Description of Artificial Sequence: Synthetic epitope
KMVTRHVTRH

SEQ ID NO: 23021 - protein, 10 aa, Artificial Sequence
  Description of Artificial Sequence: Synthetic epitope
KMVTVEFADE

SEQ ID NO: 23022 - protein, 10 aa, Artificial Sequence
  Description of Artificial Sequence: Synthetic epitope
KMVVAELKSE

SEQ ID NO: 23023 - protein, 10 aa, Artificial Sequence
  Description of Artificial Sequence: Synthetic epitope
KMVVLSLPRI

SEQ ID NO: 23024 - protein, 10 aa, Artificial Sequence
  Description of Artificial Sequence: Synthetic epitope
KMVVSTLEET

SEQ ID NO: 23025 - protein, 10 aa, Artificial Sequence
  Description of Artificial Sequence: Synthetic epitope
KMWLKRTQEN

SEQ ID NO: 23026 - protein, 10 aa, Artificial Sequence
  Description of Artificial Sequence: Synthetic epitope
KMWSTIDDSQ

SEQ ID NO: 23027 - protein, 10 aa, Artificial Sequence
  Description of Artificial Sequence: Synthetic epitope
KMWTFSEKKQ

SEQ ID NO: 23028 - protein, 10 aa, Artificial Sequence
  Description of Artificial Sequence: Synthetic epitope
KMYSTYIKEF

SEQ ID NO: 23029 - protein, 10 aa, Artificial Sequence
  Description of Artificial Sequence: Synthetic epitope
KMYYLRTELE

SEQ ID NO: 23030 - protein, 10 aa, Artificial Sequence
  Description of Artificial Sequence: Synthetic epitope
KNAIQIVQQA

SEQ ID NO: 23031 - protein, 10 aa, Artificial Sequence
  Description of Artificial Sequence: Synthetic epitope
KNAIVVLIPK

SEQ ID NO: 23032 - protein, 10 aa, Artificial Sequence
  Description of Artificial Sequence: Synthetic epitope
KNAKKSSDAE

SEQ ID NO: 23033 - protein, 10 aa, Artificial Sequence
  Description of Artificial Sequence: Synthetic epitope
KNAKQFEQAK

SEQ ID NO: 23034 - protein, 10 aa, Artificial Sequence
  Description of Artificial Sequence: Synthetic epitope
KNAKRASTAA

SEQ ID NO: 23035 - protein, 10 aa, Artificial Sequence
  Description of Artificial Sequence: Synthetic epitope
KNAKSNNESS

SEQ ID NO: 23036 - protein, 10 aa, Artificial Sequence
  Description of Artificial Sequence: Synthetic epitope
KNALASEIQG

SEQ ID NO: 23037 - protein, 10 aa, Artificial Sequence
  Description of Artificial Sequence: Synthetic epitope
KNALDLAALS

SEQ ID NO: 23038 - protein, 10 aa, Artificial Sequence
  Description of Artificial Sequence: Synthetic epitope
KNALLAAQDS

SEQ ID NO: 23039 - protein, 10 aa, Artificial Sequence
  Description of Artificial Sequence: Synthetic epitope
KNALQKLSKA

SEQ ID NO: 23040 - protein, 10 aa, Artificial Sequence
  Description of Artificial Sequence: Synthetic epitope
KNAPNDASYD

SEQ ID NO: 23041 - protein, 10 aa, Artificial Sequence
  Description of Artificial Sequence: Synthetic epitope
KNAQAASWEM

SEQ ID NO: 23042 - protein, 10 aa, Artificial Sequence
  Description of Artificial Sequence: Synthetic epitope
KNAQAQQEFK

SEQ ID NO: 23043 - protein, 10 aa, Artificial Sequence
  Description of Artificial Sequence: Synthetic epitope
KNAQLDADKS

SEQ ID NO: 23044 - protein, 10 aa, Artificial Sequence
  Description of Artificial Sequence: Synthetic epitope
KNARQEVVEK

SEQ ID NO: 23045 - protein, 10 aa, Artificial Sequence
  Description of Artificial Sequence: Synthetic epitope
KNASILLKEL

SEQ ID NO: 23046 - protein, 10 aa, Artificial Sequence
  Description of Artificial Sequence: Synthetic epitope
KNATALRLNH

SEQ ID NO: 23047 - protein, 10 aa, Artificial Sequence
  Description of Artificial Sequence: Synthetic epitope
KNATEKMMAL

SEQ ID NO: 23048 - protein, 10 aa, Artificial Sequence
  Description of Artificial Sequence: Synthetic epitope
KNATNELTKQ

SEQ ID NO: 23049 - protein, 10 aa, Artificial Sequence
  Description of Artificial Sequence: Synthetic epitope
KNAVFQELKV

SEQ ID NO: 23050 - protein, 10 aa, Artificial Sequence
  Description of Artificial Sequence: Synthetic epitope
KNAVVKIPEE

SEQ ID NO: 23051 - protein, 10 aa, Artificial Sequence
  Description of Artificial Sequence: Synthetic epitope
KNDEQSAKTD

SEQ ID NO: 23052 - protein, 10 aa, Artificial Sequence
  Description of Artificial Sequence: Synthetic epitope
KNDESQENIK

SEQ ID NO: 23053 - protein, 10 aa, Artificial Sequence
  Description of Artificial Sequence: Synthetic epitope
KNDETESTET

SEQ ID NO: 23054 - protein, 10 aa, Artificial Sequence
  Description of Artificial Sequence: Synthetic epitope
KNDIESKSLV

SEQ ID NO: 23055 - protein, 10 aa, Artificial Sequence
  Description of Artificial Sequence: Synthetic epitope
KNDKTVNATT

SEQ ID NO: 23056 - protein, 10 aa, Artificial Sequence
  Description of Artificial Sequence: Synthetic epitope
KNDNAEGIIE

SEQ ID NO: 23057 - protein, 10 aa, Artificial Sequence
  Description of Artificial Sequence: Synthetic epitope
KNDPEKQNEN

SEQ ID NO: 23058 - protein, 10 aa, Artificial Sequence
  Description of Artificial Sequence: Synthetic epitope
KNDPIELPTS

SEQ ID NO: 23059 - protein, 10 aa, Artificial Sequence
  Description of Artificial Sequence: Synthetic epitope
KNDQAAKDNP

SEQ ID NO: 23060 - protein, 10 aa, Artificial Sequence
  Description of Artificial Sequence: Synthetic epitope
KNDRSRAWQD

SEQ ID NO: 23061 - protein, 10 aa, Artificial Sequence
  Description of Artificial Sequence: Synthetic epitope
KNEASAVSKA

SEQ ID NO: 23062 - protein, 10 aa, Artificial Sequence
  Description of Artificial Sequence: Synthetic epitope
KNEASKQTLE

SEQ ID NO: 23063 - protein, 10 aa, Artificial Sequence
  Description of Artificial Sequence: Synthetic epitope
KNEASSRDVV

SEQ ID NO: 23064 - protein, 10 aa, Artificial Sequence
  Description of Artificial Sequence: Synthetic epitope
KNEAVSQNEP

SEQ ID NO: 23065 - protein, 10 aa, Artificial Sequence
  Description of Artificial Sequence: Synthetic epitope
KNEFSQTVGE

SEQ ID NO: 23066 - protein, 10 aa, Artificial Sequence
  Description of Artificial Sequence: Synthetic epitope
KNEIKALSEE

SEQ ID NO: 23067 - protein, 10 aa, Artificial Sequence
  Description of Artificial Sequence: Synthetic epitope
KNEIKKENLK

SEQ ID NO: 23068 - protein, 10 aa, Artificial Sequence
  Description of Artificial Sequence: Synthetic epitope
KNEIKQIANE

SEQ ID NO: 23069 - protein, 10 aa, Artificial Sequence
  Description of Artificial Sequence: Synthetic epitope
KNEILSASQP

SEQ ID NO: 23070 - protein, 10 aa, Artificial Sequence
  Description of Artificial Sequence: Synthetic epitope
KNEKESLVID

SEQ ID NO: 23071 - protein, 10 aa, Artificial Sequence
  Description of Artificial Sequence: Synthetic epitope
KNEKEYDTPE

SEQ ID NO: 23072 - protein, 10 aa, Artificial Sequence
  Description of Artificial Sequence: Synthetic epitope
KNEKLRDKER

SEQ ID NO: 23073 - protein, 10 aa, Artificial Sequence
  Description of Artificial Sequence: Synthetic epitope
KNEKSEQLEE

SEQ ID NO: 23074 - protein, 10 aa, Artificial Sequence
  Description of Artificial Sequence: Synthetic epitope
KNEKSRNLKA

SEQ ID NO: 23075 - protein, 10 aa, Artificial Sequence
  Description of Artificial Sequence: Synthetic epitope
KNEKTANREE

SEQ ID NO: 23076 - protein, 10 aa, Artificial Sequence
  Description of Artificial Sequence: Synthetic epitope
KNELLSNNQH

SEQ ID NO: 23077 - protein, 10 aa, Artificial Sequence
  Description of Artificial Sequence: Synthetic epitope
KNELSSLKET

SEQ ID NO: 23078 - protein, 10 aa, Artificial Sequence
  Description of Artificial Sequence: Synthetic epitope
KNENEDKQKE

SEQ ID NO: 23079 - protein, 10 aa, Artificial Sequence
  Description of Artificial Sequence: Synthetic epitope
KNENSSEQLD

SEQ ID NO: 23080 - protein, 10 aa, Artificial Sequence
  Description of Artificial Sequence: Synthetic epitope
KNENVNGESK

SEQ ID NO: 23081 - protein, 10 aa, Artificial Sequence
  Description of Artificial Sequence: Synthetic epitope
KNEQGAMQSA

SEQ ID NO: 23082 - protein, 10 aa, Artificial Sequence
  Description of Artificial Sequence: Synthetic epitope
KNERNFSKHP

SEQ ID NO: 23083 - protein, 10 aa, Artificial Sequence
  Description of Artificial Sequence: Synthetic epitope
KNESEVTIQQ

SEQ ID NO: 23084 - protein, 10 aa, Artificial Sequence
  Description of Artificial Sequence: Synthetic epitope
KNEVAAEVAK

SEQ ID NO: 23085 - protein, 10 aa, Artificial Sequence
  Description of Artificial Sequence: Synthetic epitope
KNFKMQSAAF

SEQ ID NO: 23086 - protein, 10 aa, Artificial Sequence
  Description of Artificial Sequence: Synthetic epitope
KNFKTAATFA

SEQ ID NO: 23087 - protein, 10 aa, Artificial Sequence
  Description of Artificial Sequence: Synthetic epitope
KNFLSQATME

SEQ ID NO: 23088 - protein, 10 aa, Artificial Sequence
  Description of Artificial Sequence: Synthetic epitope
KNFLTAIKKV

SEQ ID NO: 23089 - protein, 10 aa, Artificial Sequence
  Description of Artificial Sequence: Synthetic epitope
KNFMSVAKTI

SEQ ID NO: 23090 - protein, 10 aa, Artificial Sequence
  Description of Artificial Sequence: Synthetic epitope
KNFNNMKSKN

SEQ ID NO: 23091 - protein, 10 aa, Artificial Sequence
  Description of Artificial Sequence: Synthetic epitope
KNFQRDLQFF

SEQ ID NO: 23092 - protein, 10 aa, Artificial Sequence
  Description of Artificial Sequence: Synthetic epitope
KNFSASSIAK

SEQ ID NO: 23093 - protein, 10 aa, Artificial Sequence
  Description of Artificial Sequence: Synthetic epitope
KNFSEAASDF

SEQ ID NO: 23094 - protein, 10 aa, Artificial Sequence
  Description of Artificial Sequence: Synthetic epitope
KNFVIQHKEG

SEQ ID NO: 23095 - protein, 10 aa, Artificial Sequence
  Description of Artificial Sequence: Synthetic epitope
KNGDIKNAQE

SEQ ID NO: 23096 - protein, 10 aa, Artificial Sequence
  Description of Artificial Sequence: Synthetic epitope
KNGENIDSDP

SEQ ID NO: 23097 - protein, 10 aa, Artificial Sequence
  Description of Artificial Sequence: Synthetic epitope
KNGERQDEES

SEQ ID NO: 23098 - protein, 10 aa, Artificial Sequence
  Description of Artificial Sequence: Synthetic epitope
KNGFSKAYFT

SEQ ID NO: 23099 - protein, 10 aa, Artificial Sequence
  Description of Artificial Sequence: Synthetic epitope
KNGIKERFQI

SEQ ID NO: 23100 - protein, 10 aa, Artificial Sequence
  Description of Artificial Sequence: Synthetic epitope
KNGISKRTFE

SEQ ID NO: 23101 - protein, 10 aa, Artificial Sequence
  Description of Artificial Sequence: Synthetic epitope
KNGISVVLEN

SEQ ID NO: 23102 - protein, 10 aa, Artificial Sequence
  Description of Artificial Sequence: Synthetic epitope
KNGKAHHNEW

SEQ ID NO: 23103 - protein, 10 aa, Artificial Sequence
  Description of Artificial Sequence: Synthetic epitope
KNGKNETGNN

SEQ ID NO: 23104 - protein, 10 aa, Artificial Sequence
  Description of Artificial Sequence: Synthetic epitope
KNGLASEEID

SEQ ID NO: 23105 - protein, 10 aa, Artificial Sequence
  Description of Artificial Sequence: Synthetic epitope
KNGQISSEEP

SEQ ID NO: 23106 - protein, 10 aa, Artificial Sequence
  Description of Artificial Sequence: Synthetic epitope
KNGQLAASVE

SEQ ID NO: 23107 - protein, 10 aa, Artificial Sequence
  Description of Artificial Sequence: Synthetic epitope
KNGSQSVRTS

SEQ ID NO: 23108 - protein, 10 aa, Artificial Sequence
  Description of Artificial Sequence: Synthetic epitope
KNGSTEIYGE

SEQ ID NO: 23109 - protein, 10 aa, Artificial Sequence
  Description of Artificial Sequence: Synthetic epitope
KNGYEYEEST

SEQ ID NO: 23110 - protein, 10 aa, Artificial Sequence
  Description of Artificial Sequence: Synthetic epitope
KNHAYPVMQF

SEQ ID NO: 23111 - protein, 10 aa, Artificial Sequence
  Description of Artificial Sequence: Synthetic epitope
KNHGIMLLSA

SEQ ID NO: 23112 - protein, 10 aa, Artificial Sequence
  Description of Artificial Sequence: Synthetic epitope
KNHQSAAEYN

SEQ ID NO: 23113 - protein, 10 aa, Artificial Sequence
  Description of Artificial Sequence: Synthetic epitope
KNHSDSSTSE

SEQ ID NO: 23114 - protein, 10 aa, Artificial Sequence
  Description of Artificial Sequence: Synthetic epitope
KNHSHESMAV

SEQ ID NO: 23115 - protein, 10 aa, Artificial Sequence
  Description of Artificial Sequence: Synthetic epitope
KNHSPTGQSK

SEQ ID NO: 23116 - protein, 10 aa, Artificial Sequence
  Description of Artificial Sequence: Synthetic epitope
KNHVLKVNSA

SEQ ID NO: 23117 - protein, 10 aa, Artificial Sequence
  Description of Artificial Sequence: Synthetic epitope
KNIDDASQMD

SEQ ID NO: 23118 - protein, 10 aa, Artificial Sequence
  Description of Artificial Sequence: Synthetic epitope
KNIEISVHKF

SEQ ID NO: 23119 - protein, 10 aa, Artificial Sequence
  Description of Artificial Sequence: Synthetic epitope
KNIGAKLVQD

SEQ ID NO: 23120 - protein, 10 aa, Artificial Sequence
  Description of Artificial Sequence: Synthetic epitope
KNIIAEMEQA

SEQ ID NO: 23121 - protein, 10 aa, Artificial Sequence
  Description of Artificial Sequence: Synthetic epitope
KNIISRSSNG

SEQ ID NO: 23122 - protein, 10 aa, Artificial Sequence
  Description of Artificial Sequence: Synthetic epitope
KNIITEIIHS

SEQ ID NO: 23123 - protein, 10 aa, Artificial Sequence
  Description of Artificial Sequence: Synthetic epitope
KNIKTRVKQN

SEQ ID NO: 23124 - protein, 10 aa, Artificial Sequence
  Description of Artificial Sequence: Synthetic epitope
KNIQSALQKH

SEQ ID NO: 23125 - protein, 10 aa, Artificial Sequence
  Description of Artificial Sequence: Synthetic epitope
KNISIVDNEK

SEQ ID NO: 23126 - protein, 10 aa, Artificial Sequence
  Description of Artificial Sequence: Synthetic epitope
KNITAKRSRA

SEQ ID NO: 23127 - protein, 10 aa, Artificial Sequence
  Description of Artificial Sequence: Synthetic epitope
KNITKSLASL

SEQ ID NO: 23128 - protein, 10 aa, Artificial Sequence
  Description of Artificial Sequence: Synthetic epitope
KNITLPDKMP

SEQ ID NO: 23129 - protein, 10 aa, Artificial Sequence
  Description of Artificial Sequence: Synthetic epitope
KNIVRSKSAT

SEQ ID NO: 23130 - protein, 10 aa, Artificial Sequence
  Description of Artificial Sequence: Synthetic epitope
KNIWIPMKPY

SEQ ID NO: 23131 - protein, 10 aa, Artificial Sequence
  Description of Artificial Sequence: Synthetic epitope
KNKAAEATEG

SEQ ID NO: 23132 - protein, 10 aa, Artificial Sequence
  Description of Artificial Sequence: Synthetic epitope
KNKAKRSLTS

SEQ ID NO: 23133 - protein, 10 aa, Artificial Sequence
  Description of Artificial Sequence: Synthetic epitope
KNKAVGVMKS

SEQ ID NO: 23134 - protein, 10 aa, Artificial Sequence
  Description of Artificial Sequence: Synthetic epitope
KNKDGKEQSE

SEQ ID NO: 23135 - protein, 10 aa, Artificial Sequence
  Description of Artificial Sequence: Synthetic epitope
KNKEDSNIRE

SEQ ID NO: 23136 - protein, 10 aa, Artificial Sequence
  Description of Artificial Sequence: Synthetic epitope
KNKEGKDARH

SEQ ID NO: 23137 - protein, 10 aa, Artificial Sequence
  Description of Artificial Sequence: Synthetic epitope
KNKESESTAQ

SEQ ID NO: 23138 - protein, 10 aa, Artificial Sequence
  Description of Artificial Sequence: Synthetic epitope
KNKESRNELQ

SEQ ID NO: 23139 - protein, 10 aa, Artificial Sequence
  Description of Artificial Sequence: Synthetic epitope
KNKETSVAIE

SEQ ID NO: 23140 - protein, 10 aa, Artificial Sequence
  Description of Artificial Sequence: Synthetic epitope
KNKFISKTPS

SEQ ID NO: 23141 - protein, 10 aa, Artificial Sequence
  Description of Artificial Sequence: Synthetic epitope
KNKIAKETNN

SEQ ID NO: 23142 - protein, 10 aa, Artificial Sequence
  Description of Artificial Sequence: Synthetic epitope
KNKIQILASE

SEQ ID NO: 23143 - protein, 10 aa, Artificial Sequence
  Description of Artificial Sequence: Synthetic epitope
KNKKARAAEA

SEQ ID NO: 23144 - protein, 10 aa, Artificial Sequence
  Description of Artificial Sequence: Synthetic epitope
KNKKASSFHE

SEQ ID NO: 23145 - protein, 10 aa, Artificial Sequence
  Description of Artificial Sequence: Synthetic epitope
KNKKQRSNLQ

SEQ ID NO: 23146 - protein, 10 aa, Artificial Sequence
  Description of Artificial Sequence: Synthetic epitope
KNKKTDKYSS

SEQ ID NO: 23147 - protein, 10 aa, Artificial Sequence
  Description of Artificial Sequence: Synthetic epitope
KNKNKMLDLM

SEQ ID NO: 23148 - protein, 10 aa, Artificial Sequence
  Description of Artificial Sequence: Synthetic epitope
KNKQFKQQST

SEQ ID NO: 23149 - protein, 10 aa, Artificial Sequence
  Description of Artificial Sequence: Synthetic epitope
KNKQKSVTAK

SEQ ID NO: 23150 - protein, 10 aa, Artificial Sequence
  Description of Artificial Sequence: Synthetic epitope
KNKQNKTKTQ

SEQ ID NO: 23151 - protein, 10 aa, Artificial Sequence
  Description of Artificial Sequence: Synthetic epitope
KNKRDEHLLK

SEQ ID NO: 23152 - protein, 10 aa, Artificial Sequence
  Description of Artificial Sequence: Synthetic epitope
KNKSAQSLEY

SEQ ID NO: 23153 - protein, 10 aa, Artificial Sequence
  Description of Artificial Sequence: Synthetic epitope
KNKSRNADVK

SEQ ID NO: 23154 - protein, 10 aa, Artificial Sequence
  Description of Artificial Sequence: Synthetic epitope
KNKSSASVVF

SEQ ID NO: 23155 - protein, 10 aa, Artificial Sequence
  Description of Artificial Sequence: Synthetic epitope
KNKSTGLTTP

SEQ ID NO: 23156 - protein, 10 aa, Artificial Sequence
  Description of Artificial Sequence: Synthetic epitope
KNKSTTVERI

SEQ ID NO: 23157 - protein, 10 aa, Artificial Sequence
  Description of Artificial Sequence: Synthetic epitope
KNKTAQKAAS

SEQ ID NO: 23158 - protein, 10 aa, Artificial Sequence
  Description of Artificial Sequence: Synthetic epitope
KNKTRNESPP

SEQ ID NO: 23159 - protein, 10 aa, Artificial Sequence
  Description of Artificial Sequence: Synthetic epitope
KNKVKSRKPQ

SEQ ID NO: 23160 - protein, 10 aa, Artificial Sequence
  Description of Artificial Sequence: Synthetic epitope
KNKWLIKIKE

SEQ ID NO: 23161 - protein, 10 aa, Artificial Sequence
  Description of Artificial Sequence: Synthetic epitope
KNKYLNKKYF

SEQ ID NO: 23162 - protein, 10 aa, Artificial Sequence
  Description of Artificial Sequence: Synthetic epitope
KNLAVKVYTP

SEQ ID NO: 23163 - protein, 10 aa, Artificial Sequence
  Description of Artificial Sequence: Synthetic epitope
KNLEEAVEKE

SEQ ID NO: 23164 - protein, 10 aa, Artificial Sequence
  Description of Artificial Sequence: Synthetic epitope
KNLEESVQEM

SEQ ID NO: 23165 - protein, 10 aa, Artificial Sequence
  Description of Artificial Sequence: Synthetic epitope
KNLFAAQTKA

SEQ ID NO: 23166 - protein, 10 aa, Artificial Sequence
  Description of Artificial Sequence: Synthetic epitope
KNLIAATKSL

SEQ ID NO: 23167 - protein, 10 aa, Artificial Sequence
  Description of Artificial Sequence: Synthetic epitope
KNLILVVRGQ

SEQ ID NO: 23168 - protein, 10 aa, Artificial Sequence
  Description of Artificial Sequence: Synthetic epitope
KNLINQTTAK

SEQ ID NO: 23169 - protein, 10 aa, Artificial Sequence
  Description of Artificial Sequence: Synthetic epitope
KNLKIQRSVG

SEQ ID NO: 23170 - protein, 10 aa, Artificial Sequence
  Description of Artificial Sequence: Synthetic epitope
KNLKLESSTH

SEQ ID NO: 23171 - protein, 10 aa, Artificial Sequence
  Description of Artificial Sequence: Synthetic epitope
KNLKMKVEKE

SEQ ID NO: 23172 - protein, 10 aa, Artificial Sequence
  Description of Artificial Sequence: Synthetic epitope
KNLLATLQAY

SEQ ID NO: 23173 - protein, 10 aa, Artificial Sequence
  Description of Artificial Sequence: Synthetic epitope
KNLLEAGKAL

SEQ ID NO: 23174 - protein, 10 aa, Artificial Sequence
  Description of Artificial Sequence: Synthetic epitope
KNLLELDAKK

SEQ ID NO: 23175 - protein, 10 aa, Artificial Sequence
  Description of Artificial Sequence: Synthetic epitope
KNLLEREFGA

SEQ ID NO: 23176 - protein, 10 aa, Artificial Sequence
  Description of Artificial Sequence: Synthetic epitope
KNLLKYSSQA

SEQ ID NO: 23177 - protein, 10 aa, Artificial Sequence
  Description of Artificial Sequence: Synthetic epitope
KNLLVALKDF

SEQ ID NO: 23178 - protein, 10 aa, Artificial Sequence
  Description of Artificial Sequence: Synthetic epitope
KNLMAIKPKS

SEQ ID NO: 23179 - protein, 10 aa, Artificial Sequence
  Description of Artificial Sequence: Synthetic epitope
KNLNNSQSDV

SEQ ID NO: 23180 - protein, 10 aa, Artificial Sequence
  Description of Artificial Sequence: Synthetic epitope
KNLQAFQVLQ

SEQ ID NO: 23181 - protein, 10 aa, Artificial Sequence
  Description of Artificial Sequence: Synthetic epitope
KNLQASGLTT

SEQ ID NO: 23182 - protein, 10 aa, Artificial Sequence
  Description of Artificial Sequence: Synthetic epitope
KNLQTVNVDE

SEQ ID NO: 23183 - protein, 10 aa, Artificial Sequence
  Description of Artificial Sequence: Synthetic epitope
KNLRIKLALL

SEQ ID NO: 23184 - protein, 10 aa, Artificial Sequence
  Description of Artificial Sequence: Synthetic epitope
KNLRMEKDRE

SEQ ID NO: 23185 - protein, 10 aa, Artificial Sequence
  Description of Artificial Sequence: Synthetic epitope
KNLSALSDWY

SEQ ID NO: 23186 - protein, 10 aa, Artificial Sequence
  Description of Artificial Sequence: Synthetic epitope
KNLSDDPLAL

SEQ ID NO: 23187 - protein, 10 aa, Artificial Sequence
  Description of Artificial Sequence: Synthetic epitope
KNLSEETNIV

SEQ ID NO: 23188 - protein, 10 aa, Artificial Sequence
  Description of Artificial Sequence: Synthetic epitope
KNLSINNDLN

SEQ ID NO: 23189 - protein, 10 aa, Artificial Sequence
  Description of Artificial Sequence: Synthetic epitope
KNLVFRILKK

SEQ ID NO: 23190 - protein, 10 aa, Artificial Sequence
  Description of Artificial Sequence: Synthetic epitope
KNLYKIPLRN

SEQ ID NO: 23191 - protein, 10 aa, Artificial Sequence
  Description of Artificial Sequence: Synthetic epitope
KNLYQSEKPQ

SEQ ID NO: 23192 - protein, 10 aa, Artificial Sequence
  Description of Artificial Sequence: Synthetic epitope
KNMAAMLFEK

SEQ ID NO: 23193 - protein, 10 aa, Artificial Sequence
  Description of Artificial Sequence: Synthetic epitope
KNMAKLSPIP

SEQ ID NO: 23194 - protein, 10 aa, Artificial Sequence
  Description of Artificial Sequence: Synthetic epitope
KNMEEMFHKK

SEQ ID NO: 23195 - protein, 10 aa, Artificial Sequence
  Description of Artificial Sequence: Synthetic epitope
KNMETPSTSN

SEQ ID NO: 23196 - protein, 10 aa, Artificial Sequence
  Description of Artificial Sequence: Synthetic epitope
KNMFRTYQDS

SEQ ID NO: 23197 - protein, 10 aa, Artificial Sequence
  Description of Artificial Sequence: Synthetic epitope
KNMIQPDAEQ

SEQ ID NO: 23198 - protein, 10 aa, Artificial Sequence
  Description of Artificial Sequence: Synthetic epitope
KNMRTTPKQE

SEQ ID NO: 23199 - protein, 10 aa, Artificial Sequence
  Description of Artificial Sequence: Synthetic epitope
KNMTSKNRGK

SEQ ID NO: 23200 - protein, 10 aa, Artificial Sequence
  Description of Artificial Sequence: Synthetic epitope
KNMVSTKIQD

SEQ ID NO: 23201 - protein, 10 aa, Artificial Sequence
  Description of Artificial Sequence: Synthetic epitope
KNMVVNQAQS

SEQ ID NO: 23202 - protein, 10 aa, Artificial Sequence
  Description of Artificial Sequence: Synthetic epitope
KNMVVYAGVE

SEQ ID NO: 23203 - protein, 10 aa, Artificial Sequence
  Description of Artificial Sequence: Synthetic epitope
KNNHPSKFED

SEQ ID NO: 23204 - protein, 10 aa, Artificial Sequence
  Description of Artificial Sequence: Synthetic epitope
KNNKKQENNV

SEQ ID NO: 23205 - protein, 10 aa, Artificial Sequence
  Description of Artificial Sequence: Synthetic epitope
KNNKLAVSPN

SEQ ID NO: 23206 - protein, 10 aa, Artificial Sequence
  Description of Artificial Sequence: Synthetic epitope
KNNKSETSSK

SEQ ID NO: 23207 - protein, 10 aa, Artificial Sequence
  Description of Artificial Sequence: Synthetic epitope
KNNKVTMETL

SEQ ID NO: 23208 - protein, 10 aa, Artificial Sequence
  Description of Artificial Sequence: Synthetic epitope
KNNLKDLQES

SEQ ID NO: 23209 - protein, 10 aa, Artificial Sequence
  Description of Artificial Sequence: Synthetic epitope
KNNMFSKFKK

SEQ ID NO: 23210 - protein, 10 aa, Artificial Sequence
  Description of Artificial Sequence: Synthetic epitope
KNNPFVKQKN

SEQ ID NO: 23211 - protein, 10 aa, Artificial Sequence
  Description of Artificial Sequence: Synthetic epitope
KNNPVMSLQD

SEQ ID NO: 23212 - protein, 10 aa, Artificial Sequence
  Description of Artificial Sequence: Synthetic epitope
KNNQHKPKSH

SEQ ID NO: 23213 - protein, 10 aa, Artificial Sequence
  Description of Artificial Sequence: Synthetic epitope
KNNQSKSANS

SEQ ID NO: 23214 - protein, 10 aa, Artificial Sequence
  Description of Artificial Sequence: Synthetic epitope
KNNSLEIDQT

SEQ ID NO: 23215 - protein, 10 aa, Artificial Sequence
  Description of Artificial Sequence: Synthetic epitope
KNNSPMAANQ

SEQ ID NO: 23216 - protein, 10 aa, Artificial Sequence
  Description of Artificial Sequence: Synthetic epitope
KNNSSYIHKK

SEQ ID NO: 23217 - protein, 10 aa, Artificial Sequence
  Description of Artificial Sequence: Synthetic epitope
KNNSVARAVM

SEQ ID NO: 23218 - protein, 10 aa, Artificial Sequence
  Description of Artificial Sequence: Synthetic epitope
KNNTISAKDT

SEQ ID NO: 23219 - protein, 10 aa, Artificial Sequence
  Description of Artificial Sequence: Synthetic epitope
KNNVYVKSTT

SEQ ID NO: 23220 - protein, 10 aa, Artificial Sequence
  Description of Artificial Sequence: Synthetic epitope
KNPAKSNTSK

SEQ ID NO: 23221 - protein, 10 aa, Artificial Sequence
  Description of Artificial Sequence: Synthetic epitope
KNPELDRIAT

SEQ ID NO: 23222 - protein, 10 aa, Artificial Sequence
  Description of Artificial Sequence: Synthetic epitope
KNPIKAPESV

SEQ ID NO: 23223 - protein, 10 aa, Artificial Sequence
  Description of Artificial Sequence: Synthetic epitope
KNPISNKKRK

SEQ ID NO: 23224 - protein, 10 aa, Artificial Sequence
  Description of Artificial Sequence: Synthetic epitope
KNPLKMLAAR

SEQ ID NO: 23225 - protein, 10 aa, Artificial Sequence
  Description of Artificial Sequence: Synthetic epitope
KNPLLGKKRA

SEQ ID NO: 23226 - protein, 10 aa, Artificial Sequence
  Description of Artificial Sequence: Synthetic epitope
KNPNASKEER

SEQ ID NO: 23227 - protein, 10 aa, Artificial Sequence
  Description of Artificial Sequence: Synthetic epitope
KNPNDNDHVE

SEQ ID NO: 23228 - protein, 10 aa, Artificial Sequence
  Description of Artificial Sequence: Synthetic epitope
KNPQTQTEER

SEQ ID NO: 23229 - protein, 10 aa, Artificial Sequence
  Description of Artificial Sequence: Synthetic epitope
KNPSDSAVHS

SEQ ID NO: 23230 - protein, 10 aa, Artificial Sequence
  Description of Artificial Sequence: Synthetic epitope
KNPSFSEEPW

SEQ ID NO: 23231 - protein, 10 aa, Artificial Sequence
  Description of Artificial Sequence: Synthetic epitope
KNPYTIKKQP

SEQ ID NO: 23232 - protein, 10 aa, Artificial Sequence
  Description of Artificial Sequence: Synthetic epitope
KNQAIRQPEV

SEQ ID NO: 23233 - protein, 10 aa, Artificial Sequence
  Description of Artificial Sequence: Synthetic epitope
KNQDQQRKSN

SEQ ID NO: 23234 - protein, 10 aa, Artificial Sequence
  Description of Artificial Sequence: Synthetic epitope
KNQDRSALKD

SEQ ID NO: 23235 - protein, 10 aa, Artificial Sequence
  Description of Artificial Sequence: Synthetic epitope
KNQEETTSIS

SEQ ID NO: 23236 - protein, 10 aa, Artificial Sequence
  Description of Artificial Sequence: Synthetic epitope
KNQENLNEQG

SEQ ID NO: 23237 - protein, 10 aa, Artificial Sequence
  Description of Artificial Sequence: Synthetic epitope
KNQLEESEFT

SEQ ID NO: 23238 - protein, 10 aa, Artificial Sequence
  Description of Artificial Sequence: Synthetic epitope
KNQLLTLKIK

SEQ ID NO: 23239 - protein, 10 aa, Artificial Sequence
  Description of Artificial Sequence: Synthetic epitope
KNQLSNSTQG

SEQ ID NO: 23240 - protein, 10 aa, Artificial Sequence
  Description of Artificial Sequence: Synthetic epitope
KNQMALDLEQ

SEQ ID NO: 23241 - protein, 10 aa, Artificial Sequence
  Description of Artificial Sequence: Synthetic epitope
KNQQLMAKLK

SEQ ID NO: 23242 - protein, 10 aa, Artificial Sequence
  Description of Artificial Sequence: Synthetic epitope
KNQRAASQIN

SEQ ID NO: 23243 - protein, 10 aa, Artificial Sequence
  Description of Artificial Sequence: Synthetic epitope
KNQSAEAKEA

SEQ ID NO: 23244 - protein, 10 aa, Artificial Sequence
  Description of Artificial Sequence: Synthetic epitope
KNQTAALISG

SEQ ID NO: 23245 - protein, 10 aa, Artificial Sequence
  Description of Artificial Sequence: Synthetic epitope
KNQTFKSEQS

SEQ ID NO: 23246 - protein, 10 aa, Artificial Sequence
  Description of Artificial Sequence: Synthetic epitope
KNQTGMSHPG

SEQ ID NO: 23247 - protein, 10 aa, Artificial Sequence
  Description of Artificial Sequence: Synthetic epitope
KNQVHSAVEE

SEQ ID NO: 23248 - protein, 10 aa, Artificial Sequence
  Description of Artificial Sequence: Synthetic epitope
KNQVQASSLD

SEQ ID NO: 23249 - protein, 10 aa, Artificial Sequence
  Description of Artificial Sequence: Synthetic epitope
KNRAQTLTRD

SEQ ID NO: 23250 - protein, 10 aa, Artificial Sequence
  Description of Artificial Sequence: Synthetic epitope
KNRARRQGIN

SEQ ID NO: 23251 - protein, 10 aa, Artificial Sequence
  Description of Artificial Sequence: Synthetic epitope
KNRASQKQKV

SEQ ID NO: 23252 - protein, 10 aa, Artificial Sequence
  Description of Artificial Sequence: Synthetic epitope
KNRETKNKKD

SEQ ID NO: 23253 - protein, 10 aa, Artificial Sequence
  Description of Artificial Sequence: Synthetic epitope
KNRFLASVEE

SEQ ID NO: 23254 - protein, 10 aa, Artificial Sequence
  Description of Artificial Sequence: Synthetic epitope
KNRGRTTAHT

SEQ ID NO: 23255 - protein, 10 aa, Artificial Sequence
  Description of Artificial Sequence: Synthetic epitope
KNRKAKAKPV

SEQ ID NO: 23256 - protein, 10 aa, Artificial Sequence
  Description of Artificial Sequence: Synthetic epitope
KNRLASRRSF

SEQ ID NO: 23257 - protein, 10 aa, Artificial Sequence
  Description of Artificial Sequence: Synthetic epitope
KNRMKKTDWL

SEQ ID NO: 23258 - protein, 10 aa, Artificial Sequence
  Description of Artificial Sequence: Synthetic epitope
KNRNAEVEKE

SEQ ID NO: 23259 - protein, 10 aa, Artificial Sequence
  Description of Artificial Sequence: Synthetic epitope
KNRNSASQVA

SEQ ID NO: 23260 - protein, 10 aa, Artificial Sequence
  Description of Artificial Sequence: Synthetic epitope
KNRRGRNNKD

SEQ ID NO: 23261 - protein, 10 aa, Artificial Sequence
  Description of Artificial Sequence: Synthetic epitope
KNRRSLPVSI

SEQ ID NO: 23262 - protein, 10 aa, Artificial Sequence
  Description of Artificial Sequence: Synthetic epitope
KNRSKAVEEL

SEQ ID NO: 23263 - protein, 10 aa, Artificial Sequence
  Description of Artificial Sequence: Synthetic epitope
KNRSKNQNSK

SEQ ID NO: 23264 - protein, 10 aa, Artificial Sequence
  Description of Artificial Sequence: Synthetic epitope
KNRSQGNIIS

SEQ ID NO: 23265 - protein, 10 aa, Artificial Sequence
  Description of Artificial Sequence: Synthetic epitope
KNRTQQTQNT

SEQ ID NO: 23266 - protein, 10 aa, Artificial Sequence
  Description of Artificial Sequence: Synthetic epitope
KNRTYAEISQ

SEQ ID NO: 23267 - protein, 10 aa, Artificial Sequence
  Description of Artificial Sequence: Synthetic epitope
KNSATSTTNL

SEQ ID NO: 23268 - protein, 10 aa, Artificial Sequence
  Description of Artificial Sequence: Synthetic epitope
KNSAYSHRAS

SEQ ID NO: 23269 - protein, 10 aa, Artificial Sequence
  Description of Artificial Sequence: Synthetic epitope
KNSDIGQAAE

SEQ ID NO: 23270 - protein, 10 aa, Artificial Sequence
  Description of Artificial Sequence: Synthetic epitope
KNSDLGSSKS

SEQ ID NO: 23271 - protein, 10 aa, Artificial Sequence
  Description of Artificial Sequence: Synthetic epitope
KNSFAKLMDK

SEQ ID NO: 23272 - protein, 10 aa, Artificial Sequence
  Description of Artificial Sequence: Synthetic epitope
KNSFTKLSIE

SEQ ID NO: 23273 - protein, 10 aa, Artificial Sequence
  Description of Artificial Sequence: Synthetic epitope
KNSIRTHGAE

SEQ ID NO: 23274 - protein, 10 aa, Artificial Sequence
  Description of Artificial Sequence: Synthetic epitope
KNSISSINVQ

SEQ ID NO: 23275 - protein, 10 aa, Artificial Sequence
  Description of Artificial Sequence: Synthetic epitope
KNSKHEELML

SEQ ID NO: 23276 - protein, 10 aa, Artificial Sequence
  Description of Artificial Sequence: Synthetic epitope
KNSKKSQSWY

SEQ ID NO: 23277 - protein, 10 aa, Artificial Sequence
  Description of Artificial Sequence: Synthetic epitope
KNSKKYAPTE

SEQ ID NO: 23278 - protein, 10 aa, Artificial Sequence
  Description of Artificial Sequence: Synthetic epitope
KNSLFFSAQP

SEQ ID NO: 23279 - protein, 10 aa, Artificial Sequence
  Description of Artificial Sequence: Synthetic epitope
KNSLQSESGN

SEQ ID NO: 23280 - protein, 10 aa, Artificial Sequence
  Description of Artificial Sequence: Synthetic epitope
KNSLSEIGKE

SEQ ID NO: 23281 - protein, 10 aa, Artificial Sequence
  Description of Artificial Sequence: Synthetic epitope
KNSMASMSQQ

SEQ ID NO: 23282 - protein, 10 aa, Artificial Sequence
  Description of Artificial Sequence: Synthetic epitope
KNSMDQSSAP

SEQ ID NO: 23283 - protein, 10 aa, Artificial Sequence
  Description of Artificial Sequence: Synthetic epitope
KNSSDQSASG

SEQ ID NO: 23284 - protein, 10 aa, Artificial Sequence
  Description of Artificial Sequence: Synthetic epitope
KNSSKAAQAP

SEQ ID NO: 23285 - protein, 10 aa, Artificial Sequence
  Description of Artificial Sequence: Synthetic epitope
KNSSLQAESD

SEQ ID NO: 23286 - protein, 10 aa, Artificial Sequence
  Description of Artificial Sequence: Synthetic epitope
KNSSQQDNSS

SEQ ID NO: 23287 - protein, 10 aa, Artificial Sequence
  Description of Artificial Sequence: Synthetic epitope
KNSTSRNPSG

SEQ ID NO: 23288 - protein, 10 aa, Artificial Sequence
  Description of Artificial Sequence: Synthetic epitope
KNSVEAADQK

SEQ ID NO: 23289 - protein, 10 aa, Artificial Sequence
  Description of Artificial Sequence: Synthetic epitope
KNSVQTPVEN

SEQ ID NO: 23290 - protein, 10 aa, Artificial Sequence
  Description of Artificial Sequence: Synthetic epitope
KNSVTSLLSI

SEQ ID NO: 23291 - protein, 10 aa, Artificial Sequence
  Description of Artificial Sequence: Synthetic epitope
KNSYNNSQAP

SEQ ID NO: 23292 - protein, 10 aa, Artificial Sequence
  Description of Artificial Sequence: Synthetic epitope
KNTAGATKVI

SEQ ID NO: 23293 - protein, 10 aa, Artificial Sequence
  Description of Artificial Sequence: Synthetic epitope
KNTANKKMLK

SEQ ID NO: 23294 - protein, 10 aa, Artificial Sequence
  Description of Artificial Sequence: Synthetic epitope
KNTASLKYEN

SEQ ID NO: 23295 - protein, 10 aa, Artificial Sequence
  Description of Artificial Sequence: Synthetic epitope
KNTATTSPIT

SEQ ID NO: 23296 - protein, 10 aa, Artificial Sequence
  Description of Artificial Sequence: Synthetic epitope
KNTEKENATV

SEQ ID NO: 23297 - protein, 10 aa, Artificial Sequence
  Description of Artificial Sequence: Synthetic epitope
KNTEKQLKPA

SEQ ID NO: 23298 - protein, 10 aa, Artificial Sequence
  Description of Artificial Sequence: Synthetic epitope
KNTKARTSAS

SEQ ID NO: 23299 - protein, 10 aa, Artificial Sequence
  Description of Artificial Sequence: Synthetic epitope
KNTKQQNNAA

SEQ ID NO: 23300 - protein, 10 aa, Artificial Sequence
  Description of Artificial Sequence: Synthetic epitope
KNTKTRANFG

SEQ ID NO: 23301 - protein, 10 aa, Artificial Sequence
  Description of Artificial Sequence: Synthetic epitope
KNTLALAAIL

SEQ ID NO: 23302 - protein, 10 aa, Artificial Sequence
  Description of Artificial Sequence: Synthetic epitope
KNTLKTSAAT

SEQ ID NO: 23303 - protein, 10 aa, Artificial Sequence
  Description of Artificial Sequence: Synthetic epitope
KNTLLAAKKI

SEQ ID NO: 23304 - protein, 10 aa, Artificial Sequence
  Description of Artificial Sequence: Synthetic epitope
KNTLSEIKSS

SEQ ID NO: 23305 - protein, 10 aa, Artificial Sequence
  Description of Artificial Sequence: Synthetic epitope
KNTQKEANKN

SEQ ID NO: 23306 - protein, 10 aa, Artificial Sequence
  Description of Artificial Sequence: Synthetic epitope
KNTSELVSSE

SEQ ID NO: 23307 - protein, 10 aa, Artificial Sequence
  Description of Artificial Sequence: Synthetic epitope
KNTSGSNQQA

SEQ ID NO: 23308 - protein, 10 aa, Artificial Sequence
  Description of Artificial Sequence: Synthetic epitope
KNTSLIESAA

SEQ ID NO: 23309 - protein, 10 aa, Artificial Sequence
  Description of Artificial Sequence: Synthetic epitope
KNTSTKTSNP

SEQ ID NO: 23310 - protein, 10 aa, Artificial Sequence
  Description of Artificial Sequence: Synthetic epitope
KNTTDKKNNE

SEQ ID NO: 23311 - protein, 10 aa, Artificial Sequence
  Description of Artificial Sequence: Synthetic epitope
KNTVSHTVSQ

SEQ ID NO: 23312 - protein, 10 aa, Artificial Sequence
  Description of Artificial Sequence: Synthetic epitope
KNTVTIQQEK

SEQ ID NO: 23313 - protein, 10 aa, Artificial Sequence
  Description of Artificial Sequence: Synthetic epitope
KNTVTLVQAT

SEQ ID NO: 23314 - protein, 10 aa, Artificial Sequence
  Description of Artificial Sequence: Synthetic epitope
KNTYRLKLYS

SEQ ID NO: 23315 - protein, 10 aa, Artificial Sequence
  Description of Artificial Sequence: Synthetic epitope
KNVALGGIVT

SEQ ID NO: 23316 - protein, 10 aa, Artificial Sequence
  Description of Artificial Sequence: Synthetic epitope
KNVANINEEM

SEQ ID NO: 23317 - protein, 10 aa, Artificial Sequence
  Description of Artificial Sequence: Synthetic epitope
KNVASDANHS

SEQ ID NO: 23318 - protein, 10 aa, Artificial Sequence
  Description of Artificial Sequence: Synthetic epitope
KNVASKNIEI

SEQ ID NO: 23319 - protein, 10 aa, Artificial Sequence
  Description of Artificial Sequence: Synthetic epitope
KNVELNIHLT

SEQ ID NO: 23320 - protein, 10 aa, Artificial Sequence
  Description of Artificial Sequence: Synthetic epitope
KNVEVNKDKP

SEQ ID NO: 23321 - protein, 10 aa, Artificial Sequence
  Description of Artificial Sequence: Synthetic epitope
KNVGNNSFND

SEQ ID NO: 23322 - protein, 10 aa, Artificial Sequence
  Description of Artificial Sequence: Synthetic epitope
KNVIARAISK

SEQ ID NO: 23323 - protein, 10 aa, Artificial Sequence
  Description of Artificial Sequence: Synthetic epitope
KNVKAEIPLN

SEQ ID NO: 23324 - protein, 10 aa, Artificial Sequence
  Description of Artificial Sequence: Synthetic epitope
KNVKVEVAAT

SEQ ID NO: 23325 - protein, 10 aa, Artificial Sequence
  Description of Artificial Sequence: Synthetic epitope
KNVQEMSQAE

SEQ ID NO: 23326 - protein, 10 aa, Artificial Sequence
  Description of Artificial Sequence: Synthetic epitope
KNVQKNDVNV

SEQ ID NO: 23327 - protein, 10 aa, Artificial Sequence
  Description of Artificial Sequence: Synthetic epitope
KNVQLSESKA

SEQ ID NO: 23328 - protein, 10 aa, Artificial Sequence
  Description of Artificial Sequence: Synthetic epitope
KNVRQKTWRP

SEQ ID NO: 23329 - protein, 10 aa, Artificial Sequence
  Description of Artificial Sequence: Synthetic epitope
KNVRQQRQAA

SEQ ID NO: 23330 - protein, 10 aa, Artificial Sequence
  Description of Artificial Sequence: Synthetic epitope
KNVRSKKITG

SEQ ID NO: 23331 - protein, 10 aa, Artificial Sequence
  Description of Artificial Sequence: Synthetic epitope
KNVSEEKSEN

SEQ ID NO: 23332 - protein, 10 aa, Artificial Sequence
  Description of Artificial Sequence: Synthetic epitope
KNVTANDLQE

SEQ ID NO: 23333 - protein, 10 aa, Artificial Sequence
  Description of Artificial Sequence: Synthetic epitope
KNVTSMINLK

SEQ ID NO: 23334 - protein, 10 aa, Artificial Sequence
  Description of Artificial Sequence: Synthetic epitope
KNVVALATKA

SEQ ID NO: 23335 - protein, 10 aa, Artificial Sequence
  Description of Artificial Sequence: Synthetic epitope
KNWGADVVAE

SEQ ID NO: 23336 - protein, 10 aa, Artificial Sequence
  Description of Artificial Sequence: Synthetic epitope
KNWKNHMGPF

SEQ ID NO: 23337 - protein, 10 aa, Artificial Sequence
  Description of Artificial Sequence: Synthetic epitope
KNWNDYSHQA

SEQ ID NO: 23338 - protein, 10 aa, Artificial Sequence
  Description of Artificial Sequence: Synthetic epitope
KNYASAKLSE

SEQ ID NO: 23339 - protein, 10 aa, Artificial Sequence
  Description of Artificial Sequence: Synthetic epitope
KNYMKQRDDI

SEQ ID NO: 23340 - protein, 10 aa, Artificial Sequence
  Description of Artificial Sequence: Synthetic epitope
KNYQSQADIP

SEQ ID NO: 23341 - protein, 10 aa, Artificial Sequence
  Description of Artificial Sequence: Synthetic epitope
KNYSIAQKRA

SEQ ID NO: 23342 - protein, 10 aa, Artificial Sequence
  Description of Artificial Sequence: Synthetic epitope
KNYVMKVAKK

SEQ ID NO: 23343 - protein, 10 aa, Artificial Sequence
  Description of Artificial Sequence: Synthetic epitope
KNYVSKHRSF

SEQ ID NO: 23344 - protein, 10 aa, Artificial Sequence
  Description of Artificial Sequence: Synthetic epitope
KPADNEIEWN

SEQ ID NO: 23345 - protein, 10 aa, Artificial Sequence
  Description of Artificial Sequence: Synthetic epitope
KPAFGQQHQQ

SEQ ID NO: 23346 - protein, 10 aa, Artificial Sequence
  Description of Artificial Sequence: Synthetic epitope
KPAKTQKTSL

SEQ ID NO: 23347 - protein, 10 aa, Artificial Sequence
  Description of Artificial Sequence: Synthetic epitope
KPAKVAVTKT

SEQ ID NO: 23348 - protein, 10 aa, Artificial Sequence
  Description of Artificial Sequence: Synthetic epitope
KPALAQSQEA

SEQ ID NO: 23349 - protein, 10 aa, Artificial Sequence
  Description of Artificial Sequence: Synthetic epitope
KPALISVGSA

SEQ ID NO: 23350 - protein, 10 aa, Artificial Sequence
  Description of Artificial Sequence: Synthetic epitope
KPALLVLNHE

SEQ ID NO: 23351 - protein, 10 aa, Artificial Sequence
  Description of Artificial Sequence: Synthetic epitope
KPAQEETEET

SEQ ID NO: 23352 - protein, 10 aa, Artificial Sequence
  Description of Artificial Sequence: Synthetic epitope
KPARLLEATA

SEQ ID NO: 23353 - protein, 10 aa, Artificial Sequence
  Description of Artificial Sequence: Synthetic epitope
KPARRKTATD

SEQ ID NO: 23354 - protein, 10 aa, Artificial Sequence
  Description of Artificial Sequence: Synthetic epitope
KPASEMQLQV

SEQ ID NO: 23355 - protein, 10 aa, Artificial Sequence
  Description of Artificial Sequence: Synthetic epitope
KPASNMQTET

SEQ ID NO: 23356 - protein, 10 aa, Artificial Sequence
  Description of Artificial Sequence: Synthetic epitope
KPATANSANE

SEQ ID NO: 23357 - protein, 10 aa, Artificial Sequence
  Description of Artificial Sequence: Synthetic epitope
KPATANSKFP

SEQ ID NO: 23358 - protein, 10 aa, Artificial Sequence
  Description of Artificial Sequence: Synthetic epitope
KPATSHAEPT

SEQ ID NO: 23359 - protein, 10 aa, Artificial Sequence
  Description of Artificial Sequence: Synthetic epitope
KPAVPTVASS

SEQ ID NO: 23360 - protein, 10 aa, Artificial Sequence
  Description of Artificial Sequence: Synthetic epitope
KPDASSISQE

SEQ ID NO: 23361 - protein, 10 aa, Artificial Sequence
  Description of Artificial Sequence: Synthetic epitope
KPDASSISQE

SEQ ID NO: 23362 - protein, 10 aa, Artificial Sequence
  Description of Artificial Sequence: Synthetic epitope
KPDDQQKEVV

SEQ ID NO: 23363 - protein, 10 aa, Artificial Sequence
  Description of Artificial Sequence: Synthetic epitope
KPDEEKKDLS

SEQ ID NO: 23364 - protein, 10 aa, Artificial Sequence
  Description of Artificial Sequence: Synthetic epitope
KPDKANANHH

SEQ ID NO: 23365 - protein, 10 aa, Artificial Sequence
  Description of Artificial Sequence: Synthetic epitope
KPDLQSQDHT

SEQ ID NO: 23366 - protein, 10 aa, Artificial Sequence
  Description of Artificial Sequence: Synthetic epitope
KPDLYKESWK

SEQ ID NO: 23367 - protein, 10 aa, Artificial Sequence
  Description of Artificial Sequence: Synthetic epitope
KPDMDAMEPS

SEQ ID NO: 23368 - protein, 10 aa, Artificial Sequence
  Description of Artificial Sequence: Synthetic epitope
KPDSAFAMLL

SEQ ID NO: 23369 - protein, 10 aa, Artificial Sequence
  Description of Artificial Sequence: Synthetic epitope
KPDSTAAPDQ

SEQ ID NO: 23370 - protein, 10 aa, Artificial Sequence
  Description of Artificial Sequence: Synthetic epitope
KPDTEQASDS

SEQ ID NO: 23371 - protein, 10 aa, Artificial Sequence
  Description of Artificial Sequence: Synthetic epitope
KPDTQAVEMK

SEQ ID NO: 23372 - protein, 10 aa, Artificial Sequence
  Description of Artificial Sequence: Synthetic epitope
KPDVSELMFA

SEQ ID NO: 23373 - protein, 10 aa, Artificial Sequence
  Description of Artificial Sequence: Synthetic epitope
KPEAKKVDAG

SEQ ID NO: 23374 - protein, 10 aa, Artificial Sequence
  Description of Artificial Sequence: Synthetic epitope
KPEAMMSGSI

SEQ ID NO: 23375 - protein, 10 aa, Artificial Sequence
  Description of Artificial Sequence: Synthetic epitope
KPEARTGTET

SEQ ID NO: 23376 - protein, 10 aa, Artificial Sequence
  Description of Artificial Sequence: Synthetic epitope
KPELARQEYN

SEQ ID NO: 23377 - protein, 10 aa, Artificial Sequence
  Description of Artificial Sequence: Synthetic epitope
KPELLSAIEK

SEQ ID NO: 23378 - protein, 10 aa, Artificial Sequence
  Description of Artificial Sequence: Synthetic epitope
KPERVKTESS

SEQ ID NO: 23379 - protein, 10 aa, Artificial Sequence
  Description of Artificial Sequence: Synthetic epitope
KPESKVAKLD

SEQ ID NO: 23380 - protein, 10 aa, Artificial Sequence
  Description of Artificial Sequence: Synthetic epitope
KPESSEERPY

SEQ ID NO: 23381 - protein, 10 aa, Artificial Sequence
  Description of Artificial Sequence: Synthetic epitope
KPETNIKGKL

SEQ ID NO: 23382 - protein, 10 aa, Artificial Sequence
  Description of Artificial Sequence: Synthetic epitope
KPEWFRGRDV

SEQ ID NO: 23383 - protein, 10 aa, Artificial Sequence
  Description of Artificial Sequence: Synthetic epitope
KPFESIDEGQ

SEQ ID NO: 23384 - protein, 10 aa, Artificial Sequence
  Description of Artificial Sequence: Synthetic epitope
KPFHKIETLY

SEQ ID NO: 23385 - protein, 10 aa, Artificial Sequence
  Description of Artificial Sequence: Synthetic epitope
KPFMVSRIDK

SEQ ID NO: 23386 - protein, 10 aa, Artificial Sequence
  Description of Artificial Sequence: Synthetic epitope
KPFNMMAQTE

SEQ ID NO: 23387 - protein, 10 aa, Artificial Sequence
  Description of Artificial Sequence: Synthetic epitope
KPFQKSKFLQ

SEQ ID NO: 23388 - protein, 10 aa, Artificial Sequence
  Description of Artificial Sequence: Synthetic epitope
KPFQNAAKQQ

SEQ ID NO: 23389 - protein, 10 aa, Artificial Sequence
  Description of Artificial Sequence: Synthetic epitope
KPFSFSPSGT

SEQ ID NO: 23390 - protein, 10 aa, Artificial Sequence
  Description of Artificial Sequence: Synthetic epitope
KPFTANMQSD

SEQ ID NO: 23391 - protein, 10 aa, Artificial Sequence
  Description of Artificial Sequence: Synthetic epitope
KPFTTRDFSI

SEQ ID NO: 23392 - protein, 10 aa, Artificial Sequence
  Description of Artificial Sequence: Synthetic epitope
KPGARINQDH

SEQ ID NO: 23393 - protein, 10 aa, Artificial Sequence
  Description of Artificial Sequence: Synthetic epitope
KPGDIRHPKH

SEQ ID NO: 23394 - protein, 10 aa, Artificial Sequence
  Description of Artificial Sequence: Synthetic epitope
KPGEVMKLDN

SEQ ID NO: 23395 - protein, 10 aa, Artificial Sequence
  Description of Artificial Sequence: Synthetic epitope
KPGGSAKDAA

SEQ ID NO: 23396 - protein, 10 aa, Artificial Sequence
  Description of Artificial Sequence: Synthetic epitope
KPGKYHFWES

SEQ ID NO: 23397 - protein, 10 aa, Artificial Sequence
  Description of Artificial Sequence: Synthetic epitope
KPGLMTSSDE

SEQ ID NO: 23398 - protein, 10 aa, Artificial Sequence
  Description of Artificial Sequence: Synthetic epitope
KPGLVKQRTQ

SEQ ID NO: 23399 - protein, 10 aa, Artificial Sequence
  Description of Artificial Sequence: Synthetic epitope
KPGNQNTQVT

SEQ ID NO: 23400 - protein, 10 aa, Artificial Sequence
  Description of Artificial Sequence: Synthetic epitope
KPGSSKSLAK

SEQ ID NO: 23401 - protein, 10 aa, Artificial Sequence
  Description of Artificial Sequence: Synthetic epitope
KPGWIELKAP

SEQ ID NO: 23402 - protein, 10 aa, Artificial Sequence
  Description of Artificial Sequence: Synthetic epitope
KPHEVLKDLP

SEQ ID NO: 23403 - protein, 10 aa, Artificial Sequence
  Description of Artificial Sequence: Synthetic epitope
KPHINFMAAK

SEQ ID NO: 23404 - protein, 10 aa, Artificial Sequence
  Description of Artificial Sequence: Synthetic epitope
KPHIRQMWLK

SEQ ID NO: 23405 - protein, 10 aa, Artificial Sequence
  Description of Artificial Sequence: Synthetic epitope
KPHLMAEDEP

SEQ ID NO: 23406 - protein, 10 aa, Artificial Sequence
  Description of Artificial Sequence: Synthetic epitope
KPHRAAKGAP

SEQ ID NO: 23407 - protein, 10 aa, Artificial Sequence
  Description of Artificial Sequence: Synthetic epitope
KPHSAQFLLP

SEQ ID NO: 23408 - protein, 10 aa, Artificial Sequence
  Description of Artificial Sequence: Synthetic epitope
KPHVQAQQDL

SEQ ID NO: 23409 - protein, 10 aa, Artificial Sequence
  Description of Artificial Sequence: Synthetic epitope
KPIELPVKEE

SEQ ID NO: 23410 - protein, 10 aa, Artificial Sequence
  Description of Artificial Sequence: Synthetic epitope
KPIFHAEERR

SEQ ID NO: 23411 - protein, 10 aa, Artificial Sequence
  Description of Artificial Sequence: Synthetic epitope
KPILDVTKPK

SEQ ID NO: 23412 - protein, 10 aa, Artificial Sequence
  Description of Artificial Sequence: Synthetic epitope
KPIMRMNGNF

SEQ ID NO: 23413 - protein, 10 aa, Artificial Sequence
  Description of Artificial Sequence: Synthetic epitope
KPITKQVKNP

SEQ ID NO: 23414 - protein, 10 aa, Artificial Sequence
  Description of Artificial Sequence: Synthetic epitope
KPKAAKEKTV

SEQ ID NO: 23415 - protein, 10 aa, Artificial Sequence
  Description of Artificial Sequence: Synthetic epitope
KPKAKKAGAA

SEQ ID NO: 23416 - protein, 10 aa, Artificial Sequence
  Description of Artificial Sequence: Synthetic epitope
KPKDQMGGHE

SEQ ID NO: 23417 - protein, 10 aa, Artificial Sequence
  Description of Artificial Sequence: Synthetic epitope
KPKKLKETEE

SEQ ID NO: 23418 - protein, 10 aa, Artificial Sequence
  Description of Artificial Sequence: Synthetic epitope
KPKKMMVEAD

SEQ ID NO: 23419 - protein, 10 aa, Artificial Sequence
  Description of Artificial Sequence: Synthetic epitope
KPKKSDTKVD

SEQ ID NO: 23420 - protein, 10 aa, Artificial Sequence
  Description of Artificial Sequence: Synthetic epitope
KPKKTEITDK

SEQ ID NO: 23421 - protein, 10 aa, Artificial Sequence
  Description of Artificial Sequence: Synthetic epitope
KPKMTAGSHE

SEQ ID NO: 23422 - protein, 10 aa, Artificial Sequence
  Description of Artificial Sequence: Synthetic epitope
KPKRQKSSTK

SEQ ID NO: 23423 - protein, 10 aa, Artificial Sequence
  Description of Artificial Sequence: Synthetic epitope
KPKRSLKGTS

SEQ ID NO: 23424 - protein, 10 aa, Artificial Sequence
  Description of Artificial Sequence: Synthetic epitope
KPKRVKALYN

SEQ ID NO: 23425 - protein, 10 aa, Artificial Sequence
  Description of Artificial Sequence: Synthetic epitope
KPKSRKELIE

SEQ ID NO: 23426 - protein, 10 aa, Artificial Sequence
  Description of Artificial Sequence: Synthetic epitope
KPKVLKADFD

SEQ ID NO: 23427 - protein, 10 aa, Artificial Sequence
  Description of Artificial Sequence: Synthetic epitope
KPLEARSSGR

SEQ ID NO: 23428 - protein, 10 aa, Artificial Sequence
  Description of Artificial Sequence: Synthetic epitope
KPLELELQKT

SEQ ID NO: 23429 - protein, 10 aa, Artificial Sequence
  Description of Artificial Sequence: Synthetic epitope
KPLGMVSSII

SEQ ID NO: 23430 - protein, 10 aa, Artificial Sequence
  Description of Artificial Sequence: Synthetic epitope
KPLIKAVEST

SEQ ID NO: 23431 - protein, 10 aa, Artificial Sequence
  Description of Artificial Sequence: Synthetic epitope
KPLKATALQK

SEQ ID NO: 23432 - protein, 10 aa, Artificial Sequence
  Description of Artificial Sequence: Synthetic epitope
KPLKEFENTT

SEQ ID NO: 23433 - protein, 10 aa, Artificial Sequence
  Description of Artificial Sequence: Synthetic epitope
KPLKKLRFDI

SEQ ID NO: 23434 - protein, 10 aa, Artificial Sequence
  Description of Artificial Sequence: Synthetic epitope
KPLKVSDELV

SEQ ID NO: 23435 - protein, 10 aa, Artificial Sequence
  Description of Artificial Sequence: Synthetic epitope
KPLMSKAPTK

SEQ ID NO: 23436 - protein, 10 aa, Artificial Sequence
  Description of Artificial Sequence: Synthetic epitope
KPLNTSSKKW

SEQ ID NO: 23437 - protein, 10 aa, Artificial Sequence
  Description of Artificial Sequence: Synthetic epitope
KPLSGNSNSS

SEQ ID NO: 23438 - protein, 10 aa, Artificial Sequence
  Description of Artificial Sequence: Synthetic epitope
KPLSIEADDN

SEQ ID NO: 23439 - protein, 10 aa, Artificial Sequence
  Description of Artificial Sequence: Synthetic epitope
KPLSQAVKLM

SEQ ID NO: 23440 - protein, 10 aa, Artificial Sequence
  Description of Artificial Sequence: Synthetic epitope
KPLSRSKLPE

SEQ ID NO: 23441 - protein, 10 aa, Artificial Sequence
  Description of Artificial Sequence: Synthetic epitope
KPLVIQAMPT

SEQ ID NO: 23442 - protein, 10 aa, Artificial Sequence
  Description of Artificial Sequence: Synthetic epitope
KPLWKIIPTT

SEQ ID NO: 23443 - protein, 10 aa, Artificial Sequence
  Description of Artificial Sequence: Synthetic epitope
KPMADAAVKI

SEQ ID NO: 23444 - protein, 10 aa, Artificial Sequence
  Description of Artificial Sequence: Synthetic epitope
KPMAHSELVK

SEQ ID NO: 23445 - protein, 10 aa, Artificial Sequence
  Description of Artificial Sequence: Synthetic epitope
KPMEENHSMS

SEQ ID NO: 23446 - protein, 10 aa, Artificial Sequence
  Description of Artificial Sequence: Synthetic epitope
KPMFSKQTIE

SEQ ID NO: 23447 - protein, 10 aa, Artificial Sequence
  Description of Artificial Sequence: Synthetic epitope
KPMKSIKYMD

SEQ ID NO: 23448 - protein, 10 aa, Artificial Sequence
  Description of Artificial Sequence: Synthetic epitope
KPMQVKTPRA

SEQ ID NO: 23449 - protein, 10 aa, Artificial Sequence
  Description of Artificial Sequence: Synthetic epitope
KPMYHRVVSG

SEQ ID NO: 23450 - protein, 10 aa, Artificial Sequence
  Description of Artificial Sequence: Synthetic epitope
KPNAYNSGDM

SEQ ID NO: 23451 - protein, 10 aa, Artificial Sequence
  Description of Artificial Sequence: Synthetic epitope
KPNDVSVFTT

SEQ ID NO: 23452 - protein, 10 aa, Artificial Sequence
  Description of Artificial Sequence: Synthetic epitope
KPNIGRQSQL

SEQ ID NO: 23453 - protein, 10 aa, Artificial Sequence
  Description of Artificial Sequence: Synthetic epitope
KPNKLPKSKQ

SEQ ID NO: 23454 - protein, 10 aa, Artificial Sequence
  Description of Artificial Sequence: Synthetic epitope
KPNSKVLSTR

SEQ ID NO: 23455 - protein, 10 aa, Artificial Sequence
  Description of Artificial Sequence: Synthetic epitope
KPNVSASTQA

SEQ ID NO: 23456 - protein, 10 aa, Artificial Sequence
  Description of Artificial Sequence: Synthetic epitope
KPPESTETKE

SEQ ID NO: 23457 - protein, 10 aa, Artificial Sequence
  Description of Artificial Sequence: Synthetic epitope
KPPIGESNPD

SEQ ID NO: 23458 - protein, 10 aa, Artificial Sequence
  Description of Artificial Sequence: Synthetic epitope
KPQAIKTEET

SEQ ID NO: 23459 - protein, 10 aa, Artificial Sequence
  Description of Artificial Sequence: Synthetic epitope
KPQDMAEKDT

SEQ ID NO: 23460 - protein, 10 aa, Artificial Sequence
  Description of Artificial Sequence: Synthetic epitope
KPQISHQIVE

SEQ ID NO: 23461 - protein, 10 aa, Artificial Sequence
  Description of Artificial Sequence: Synthetic epitope
KPQKAALEYL

SEQ ID NO: 23462 - protein, 10 aa, Artificial Sequence
  Description of Artificial Sequence: Synthetic epitope
KPQKAASSTS

SEQ ID NO: 23463 - protein, 10 aa, Artificial Sequence
  Description of Artificial Sequence: Synthetic epitope
KPQKTMPTVQ

SEQ ID NO: 23464 - protein, 10 aa, Artificial Sequence
  Description of Artificial Sequence: Synthetic epitope
KPQRVKQNSE

SEQ ID NO: 23465 - protein, 10 aa, Artificial Sequence
  Description of Artificial Sequence: Synthetic epitope
KPQSATVHDF

SEQ ID NO: 23466 - protein, 10 aa, Artificial Sequence
  Description of Artificial Sequence: Synthetic epitope
KPQSLKSSTS

SEQ ID NO: 23467 - protein, 10 aa, Artificial Sequence
  Description of Artificial Sequence: Synthetic epitope
KPQSQAQVEP

SEQ ID NO: 23468 - protein, 10 aa, Artificial Sequence
  Description of Artificial Sequence: Synthetic epitope
KPQTEKTQKK

SEQ ID NO: 23469 - protein, 10 aa, Artificial Sequence
  Description of Artificial Sequence: Synthetic epitope
KPQTKVEADN

SEQ ID NO: 23470 - protein, 10 aa, Artificial Sequence
  Description of Artificial Sequence: Synthetic epitope
KPQTRLKRKQ

SEQ ID NO: 23471 - protein, 10 aa, Artificial Sequence
  Description of Artificial Sequence: Synthetic epitope
KPRMNRKSRS

SEQ ID NO: 23472 - protein, 10 aa, Artificial Sequence
  Description of Artificial Sequence: Synthetic epitope
KPRMSVSADE

SEQ ID NO: 23473 - protein, 10 aa, Artificial Sequence
  Description of Artificial Sequence: Synthetic epitope
KPRQEASSKP

SEQ ID NO: 23474 - protein, 10 aa, Artificial Sequence
  Description of Artificial Sequence: Synthetic epitope
KPRRIQNQNV

SEQ ID NO: 23475 - protein, 10 aa, Artificial Sequence
  Description of Artificial Sequence: Synthetic epitope
KPRSVLTSQV

SEQ ID NO: 23476 - protein, 10 aa, Artificial Sequence
  Description of Artificial Sequence: Synthetic epitope
KPSAFLKSRN

SEQ ID NO: 23477 - protein, 10 aa, Artificial Sequence
  Description of Artificial Sequence: Synthetic epitope
KPSAKSSLSQ

SEQ ID NO: 23478 - protein, 10 aa, Artificial Sequence
  Description of Artificial Sequence: Synthetic epitope
KPSASTKIPA

SEQ ID NO: 23479 - protein, 10 aa, Artificial Sequence
  Description of Artificial Sequence: Synthetic epitope
KPSATFDPGS

SEQ ID NO: 23480 - protein, 10 aa, Artificial Sequence
  Description of Artificial Sequence: Synthetic epitope
KPSHQVHFSK

SEQ ID NO: 23481 - protein, 10 aa, Artificial Sequence
  Description of Artificial Sequence: Synthetic epitope
KPSIMAHKRW

SEQ ID NO: 23482 - protein, 10 aa, Artificial Sequence
  Description of Artificial Sequence: Synthetic epitope
KPSIQKADGT

SEQ ID NO: 23483 - protein, 10 aa, Artificial Sequence
  Description of Artificial Sequence: Synthetic epitope
KPSIRARKIQ

SEQ ID NO: 23484 - protein, 10 aa, Artificial Sequence
  Description of Artificial Sequence: Synthetic epitope
KPSISKSDLM

SEQ ID NO: 23485 - protein, 10 aa, Artificial Sequence
  Description of Artificial Sequence: Synthetic epitope
KPSLQTSSAR

SEQ ID NO: 23486 - protein, 10 aa, Artificial Sequence
  Description of Artificial Sequence: Synthetic epitope
KPSLTISFAQ

SEQ ID NO: 23487 - protein, 10 aa, Artificial Sequence
  Description of Artificial Sequence: Synthetic epitope
KPSLVVELAR

SEQ ID NO: 23488 - protein, 10 aa, Artificial Sequence
  Description of Artificial Sequence: Synthetic epitope
KPSNKTAPEK

SEQ ID NO: 23489 - protein, 10 aa, Artificial Sequence
  Description of Artificial Sequence: Synthetic epitope
KPSPSAAEAD

SEQ ID NO: 23490 - protein, 10 aa, Artificial Sequence
  Description of Artificial Sequence: Synthetic epitope
KPSQPKFMQL

SEQ ID NO: 23491 - protein, 10 aa, Artificial Sequence
  Description of Artificial Sequence: Synthetic epitope
KPSRAAENMA

SEQ ID NO: 23492 - protein, 10 aa, Artificial Sequence
  Description of Artificial Sequence: Synthetic epitope
KPSRSFSRSR

SEQ ID NO: 23493 - protein, 10 aa, Artificial Sequence
  Description of Artificial Sequence: Synthetic epitope
KPSRSTKTKP

SEQ ID NO: 23494 - protein, 10 aa, Artificial Sequence
  Description of Artificial Sequence: Synthetic epitope
KPSSAITVID

SEQ ID NO: 23495 - protein, 10 aa, Artificial Sequence
  Description of Artificial Sequence: Synthetic epitope
KPSSLASNSA

SEQ ID NO: 23496 - protein, 10 aa, Artificial Sequence
  Description of Artificial Sequence: Synthetic epitope
KPSSVNERQI

SEQ ID NO: 23497 - protein, 10 aa, Artificial Sequence
  Description of Artificial Sequence: Synthetic epitope
KPSTRILSIM

SEQ ID NO: 23498 - protein, 10 aa, Artificial Sequence
  Description of Artificial Sequence: Synthetic epitope
KPSVLSSKIS

SEQ ID NO: 23499 - protein, 10 aa, Artificial Sequence
  Description of Artificial Sequence: Synthetic epitope
KPSVVAEVKG

SEQ ID NO: 23500 - protein, 10 aa, Artificial Sequence
  Description of Artificial Sequence: Synthetic epitope
KPTDSKAERA

SEQ ID NO: 23501 - protein, 10 aa, Artificial Sequence
  Description of Artificial Sequence: Synthetic epitope
KPTDSYSSQL

SEQ ID NO: 23502 - protein, 10 aa, Artificial Sequence
  Description of Artificial Sequence: Synthetic epitope
KPTGARTFGE

SEQ ID NO: 23503 - protein, 10 aa, Artificial Sequence
  Description of Artificial Sequence: Synthetic epitope
KPTGTQQSTN

SEQ ID NO: 23504 - protein, 10 aa, Artificial Sequence
  Description of Artificial Sequence: Synthetic epitope
KPTHEQREAD

SEQ ID NO: 23505 - protein, 10 aa, Artificial Sequence
  Description of Artificial Sequence: Synthetic epitope
KPTILDTINK

SEQ ID NO: 23506 - protein, 10 aa, Artificial Sequence
  Description of Artificial Sequence: Synthetic epitope
KPTIQASEMS

SEQ ID NO: 23507 - protein, 10 aa, Artificial Sequence
  Description of Artificial Sequence: Synthetic epitope
KPTKESISSH

SEQ ID NO: 23508 - protein, 10 aa, Artificial Sequence
  Description of Artificial Sequence: Synthetic epitope
KPTKLVKVSR

SEQ ID NO: 23509 - protein, 10 aa, Artificial Sequence
  Description of Artificial Sequence: Synthetic epitope
KPTMIVADGQ

SEQ ID NO: 23510 - protein, 10 aa, Artificial Sequence
  Description of Artificial Sequence: Synthetic epitope
KPTSKTKDNL

SEQ ID NO: 23511 - protein, 10 aa, Artificial Sequence
  Description of Artificial Sequence: Synthetic epitope
KPTTKSSTNT

SEQ ID NO: 23512 - protein, 10 aa, Artificial Sequence
  Description of Artificial Sequence: Synthetic epitope
KPTTLTANNE

SEQ ID NO: 23513 - protein, 10 aa, Artificial Sequence
  Description of Artificial Sequence: Synthetic epitope
KPTVISELSS

SEQ ID NO: 23514 - protein, 10 aa, Artificial Sequence
  Description of Artificial Sequence: Synthetic epitope
KPTVSRVVSS

SEQ ID NO: 23515 - protein, 10 aa, Artificial Sequence
  Description of Artificial Sequence: Synthetic epitope
KPTVSSGNDV

SEQ ID NO: 23516 - protein, 10 aa, Artificial Sequence
  Description of Artificial Sequence: Synthetic epitope
KPTVSVSINN

SEQ ID NO: 23517 - protein, 10 aa, Artificial Sequence
  Description of Artificial Sequence: Synthetic epitope
KPVAIQTYPI

SEQ ID NO: 23518 - protein, 10 aa, Artificial Sequence
  Description of Artificial Sequence: Synthetic epitope
KPVESMQTKL

SEQ ID NO: 23519 - protein, 10 aa, Artificial Sequence
  Description of Artificial Sequence: Synthetic epitope
KPVHELNREA

SEQ ID NO: 23520 - protein, 10 aa, Artificial Sequence
  Description of Artificial Sequence: Synthetic epitope
KPVHSSTNYD

SEQ ID NO: 23521 - protein, 10 aa, Artificial Sequence
  Description of Artificial Sequence: Synthetic epitope
KPVKDPKSKH

SEQ ID NO: 23522 - protein, 10 aa, Artificial Sequence
  Description of Artificial Sequence: Synthetic epitope
KPVKTSASSR

SEQ ID NO: 23523 - protein, 10 aa, Artificial Sequence
  Description of Artificial Sequence: Synthetic epitope
KPVNRDGLSS

SEQ ID NO: 23524 - protein, 10 aa, Artificial Sequence
  Description of Artificial Sequence: Synthetic epitope
KPVQHHRERK

SEQ ID NO: 23525 - protein, 10 aa, Artificial Sequence
  Description of Artificial Sequence: Synthetic epitope
KPVQKTVKPI

SEQ ID NO: 23526 - protein, 10 aa, Artificial Sequence
  Description of Artificial Sequence: Synthetic epitope
KPVQVTFQTQ

SEQ ID NO: 23527 - protein, 10 aa, Artificial Sequence
  Description of Artificial Sequence: Synthetic epitope
KPVSFTVKET

SEQ ID NO: 23528 - protein, 10 aa, Artificial Sequence
  Description of Artificial Sequence: Synthetic epitope
KPVSQAGSQQ

SEQ ID NO: 23529 - protein, 10 aa, Artificial Sequence
  Description of Artificial Sequence: Synthetic epitope
KPVTEKQTDT

SEQ ID NO: 23530 - protein, 10 aa, Artificial Sequence
  Description of Artificial Sequence: Synthetic epitope
KPVTQRTNED

SEQ ID NO: 23531 - protein, 10 aa, Artificial Sequence
  Description of Artificial Sequence: Synthetic epitope
KPVVDDSKGS

SEQ ID NO: 23532 - protein, 10 aa, Artificial Sequence
  Description of Artificial Sequence: Synthetic epitope
KPVVTEVRTP

SEQ ID NO: 23533 - protein, 10 aa, Artificial Sequence
  Description of Artificial Sequence: Synthetic epitope
KPWFASQIPF

SEQ ID NO: 23534 - protein, 10 aa, Artificial Sequence
  Description of Artificial Sequence: Synthetic epitope
KPWGDMMISS

SEQ ID NO: 23535 - protein, 10 aa, Artificial Sequence
  Description of Artificial Sequence: Synthetic epitope
KPWITKRVTE

SEQ ID NO: 23536 - protein, 10 aa, Artificial Sequence
  Description of Artificial Sequence: Synthetic epitope
KPWLGKQGNN

SEQ ID NO: 23537 - protein, 10 aa, Artificial Sequence
  Description of Artificial Sequence: Synthetic epitope
KPWPMVNQAR

SEQ ID NO: 23538 - protein, 10 aa, Artificial Sequence
  Description of Artificial Sequence: Synthetic epitope
KPWQSQKSSM

SEQ ID NO: 23539 - protein, 10 aa, Artificial Sequence
  Description of Artificial Sequence: Synthetic epitope
KPWSNKETDM

SEQ ID NO: 23540 - protein, 10 aa, Artificial Sequence
  Description of Artificial Sequence: Synthetic epitope
KPYAMRWKQH

SEQ ID NO: 23541 - protein, 10 aa, Artificial Sequence
  Description of Artificial Sequence: Synthetic epitope
KPYHLSTSSV

SEQ ID NO: 23542 - protein, 10 aa, Artificial Sequence
  Description of Artificial Sequence: Synthetic epitope
KPYKKVQSRQ

SEQ ID NO: 23543 - protein, 10 aa, Artificial Sequence
  Description of Artificial Sequence: Synthetic epitope
KPYRSKAGLA

SEQ ID NO: 23544 - protein, 10 aa, Artificial Sequence
  Description of Artificial Sequence: Synthetic epitope
KPYSIEMSRE

SEQ ID NO: 23545 - protein, 10 aa, Artificial Sequence
  Description of Artificial Sequence: Synthetic epitope
KPYTGSKSKE

SEQ ID NO: 23546 - protein, 10 aa, Artificial Sequence
  Description of Artificial Sequence: Synthetic epitope
KPYTLMSMVA

SEQ ID NO: 23547 - protein, 10 aa, Artificial Sequence
  Description of Artificial Sequence: Synthetic epitope
KPYVAVFTES

SEQ ID NO: 23548 - protein, 10 aa, Artificial Sequence
  Description of Artificial Sequence: Synthetic epitope
KQAEARLDQR

SEQ ID NO: 23549 - protein, 10 aa, Artificial Sequence
  Description of Artificial Sequence: Synthetic epitope
KQAEEQVEAA

SEQ ID NO: 23550 - protein, 10 aa, Artificial Sequence
  Description of Artificial Sequence: Synthetic epitope
KQAELMSSLI

SEQ ID NO: 23551 - protein, 10 aa, Artificial Sequence
  Description of Artificial Sequence: Synthetic epitope
KQAIKSLKKY

SEQ ID NO: 23552 - protein, 10 aa, Artificial Sequence
  Description of Artificial Sequence: Synthetic epitope
KQAIVDKVPS

SEQ ID NO: 23553 - protein, 10 aa, Artificial Sequence
  Description of Artificial Sequence: Synthetic epitope
KQAKISMGEE

SEQ ID NO: 23554 - protein, 10 aa, Artificial Sequence
  Description of Artificial Sequence: Synthetic epitope
KQAKLKKDEI

SEQ ID NO: 23555 - protein, 10 aa, Artificial Sequence
  Description of Artificial Sequence: Synthetic epitope
KQALEISENA

SEQ ID NO: 23556 - protein, 10 aa, Artificial Sequence
  Description of Artificial Sequence: Synthetic epitope
KQALLAELEE

SEQ ID NO: 23557 - protein, 10 aa, Artificial Sequence
  Description of Artificial Sequence: Synthetic epitope
KQAMKELQLK

SEQ ID NO: 23558 - protein, 10 aa, Artificial Sequence
  Description of Artificial Sequence: Synthetic epitope
KQAMKQTKLE

SEQ ID NO: 23559 - protein, 10 aa, Artificial Sequence
  Description of Artificial Sequence: Synthetic epitope
KQAMLTLELE

SEQ ID NO: 23560 - protein, 10 aa, Artificial Sequence
  Description of Artificial Sequence: Synthetic epitope
KQAMSSNEQE

SEQ ID NO: 23561 - protein, 10 aa, Artificial Sequence
  Description of Artificial Sequence: Synthetic epitope
KQANQEGSNE

SEQ ID NO: 23562 - protein, 10 aa, Artificial Sequence
  Description of Artificial Sequence: Synthetic epitope
KQAQAAKEKK

SEQ ID NO: 23563 - protein, 10 aa, Artificial Sequence
  Description of Artificial Sequence: Synthetic epitope
KQAQENLHDQ

SEQ ID NO: 23564 - protein, 10 aa, Artificial Sequence
  Description of Artificial Sequence: Synthetic epitope
KQAQKEQRKQ

SEQ ID NO: 23565 - protein, 10 aa, Artificial Sequence
  Description of Artificial Sequence: Synthetic epitope
KQAQTLMSSL

SEQ ID NO: 23566 - protein, 10 aa, Artificial Sequence
  Description of Artificial Sequence: Synthetic epitope
KQARAKLQRE

SEQ ID NO: 23567 - protein, 10 aa, Artificial Sequence
  Description of Artificial Sequence: Synthetic epitope
KQARLVLQPQ

SEQ ID NO: 23568 - protein, 10 aa, Artificial Sequence
  Description of Artificial Sequence: Synthetic epitope
KQARNHITKG

SEQ ID NO: 23569 - protein, 10 aa, Artificial Sequence
  Description of Artificial Sequence: Synthetic epitope
KQASAIKKEE

SEQ ID NO: 23570 - protein, 10 aa, Artificial Sequence
  Description of Artificial Sequence: Synthetic epitope
KQASEQENED

SEQ ID NO: 23571 - protein, 10 aa, Artificial Sequence
  Description of Artificial Sequence: Synthetic epitope
KQASVDSGIV

SEQ ID NO: 23572 - protein, 10 aa, Artificial Sequence
  Description of Artificial Sequence: Synthetic epitope
KQATDLKAAQ

SEQ ID NO: 23573 - protein, 10 aa, Artificial Sequence
  Description of Artificial Sequence: Synthetic epitope
KQATGIQQAQ

SEQ ID NO: 23574 - protein, 10 aa, Artificial Sequence
  Description of Artificial Sequence: Synthetic epitope
KQATLHLDQA

SEQ ID NO: 23575 - protein, 10 aa, Artificial Sequence
  Description of Artificial Sequence: Synthetic epitope
KQAVAKMVQQ

SEQ ID NO: 23576 - protein, 10 aa, Artificial Sequence
  Description of Artificial Sequence: Synthetic epitope
KQAVEQQIQS

SEQ ID NO: 23577 - protein, 10 aa, Artificial Sequence
  Description of Artificial Sequence: Synthetic epitope
KQAVLLAREM

SEQ ID NO: 23578 - protein, 10 aa, Artificial Sequence
  Description of Artificial Sequence: Synthetic epitope
KQDAIKRTDK

SEQ ID NO: 23579 - protein, 10 aa, Artificial Sequence
  Description of Artificial Sequence: Synthetic epitope
KQDAKTTDND

SEQ ID NO: 23580 - protein, 10 aa, Artificial Sequence
  Description of Artificial Sequence: Synthetic epitope
KQDDKSSDKQ

SEQ ID NO: 23581 - protein, 10 aa, Artificial Sequence
  Description of Artificial Sequence: Synthetic epitope
KQDGVAAFEV

SEQ ID NO: 23582 - protein, 10 aa, Artificial Sequence
  Description of Artificial Sequence: Synthetic epitope
KQDKKEMAIN

SEQ ID NO: 23583 - protein, 10 aa, Artificial Sequence
  Description of Artificial Sequence: Synthetic epitope
KQDKNKMSAY

SEQ ID NO: 23584 - protein, 10 aa, Artificial Sequence
  Description of Artificial Sequence: Synthetic epitope
KQDKVRKNKD

SEQ ID NO: 23585 - protein, 10 aa, Artificial Sequence
  Description of Artificial Sequence: Synthetic epitope
KQDLSSIKVN

SEQ ID NO: 23586 - protein, 10 aa, Artificial Sequence
  Description of Artificial Sequence: Synthetic epitope
KQDMYLSSKE

SEQ ID NO: 23587 - protein, 10 aa, Artificial Sequence
  Description of Artificial Sequence: Synthetic epitope
KQDNISGGDS

SEQ ID NO: 23588 - protein, 10 aa, Artificial Sequence
  Description of Artificial Sequence: Synthetic epitope
KQDPQQSRAP

SEQ ID NO: 23589 - protein, 10 aa, Artificial Sequence
  Description of Artificial Sequence: Synthetic epitope
KQDQHSQKIT

SEQ ID NO: 23590 - protein, 10 aa, Artificial Sequence
  Description of Artificial Sequence: Synthetic epitope
KQDRETTNEN

SEQ ID NO: 23591 - protein, 10 aa, Artificial Sequence
  Description of Artificial Sequence: Synthetic epitope
KQDSETERLK

SEQ ID NO: 23592 - protein, 10 aa, Artificial Sequence
  Description of Artificial Sequence: Synthetic epitope
KQDSKQIQVD

SEQ ID NO: 23593 - protein, 10 aa, Artificial Sequence
  Description of Artificial Sequence: Synthetic epitope
KQDSMDLKVE

SEQ ID NO: 23594 - protein, 10 aa, Artificial Sequence
  Description of Artificial Sequence: Synthetic epitope
KQDSSKLSSE

SEQ ID NO: 23595 - protein, 10 aa, Artificial Sequence
  Description of Artificial Sequence: Synthetic epitope
KQEAEGLALD

SEQ ID NO: 23596 - protein, 10 aa, Artificial Sequence
  Description of Artificial Sequence: Synthetic epitope
KQEDSKQLLQ

SEQ ID NO: 23597 - protein, 10 aa, Artificial Sequence
  Description of Artificial Sequence: Synthetic epitope
KQEESQAGII

SEQ ID NO: 23598 - protein, 10 aa, Artificial Sequence
  Description of Artificial Sequence: Synthetic epitope
KQEEYQIQQN

SEQ ID NO: 23599 - protein, 10 aa, Artificial Sequence
  Description of Artificial Sequence: Synthetic epitope
KQEFHYIEED

SEQ ID NO: 23600 - protein, 10 aa, Artificial Sequence
  Description of Artificial Sequence: Synthetic epitope
KQEFQRKETD

SEQ ID NO: 23601 - protein, 10 aa, Artificial Sequence
  Description of Artificial Sequence: Synthetic epitope
KQEGVLNSKV

SEQ ID NO: 23602 - protein, 10 aa, Artificial Sequence
  Description of Artificial Sequence: Synthetic epitope
KQEHVEKVKE

SEQ ID NO: 23603 - protein, 10 aa, Artificial Sequence
  Description of Artificial Sequence: Synthetic epitope
KQEIAGKQKE

SEQ ID NO: 23604 - protein, 10 aa, Artificial Sequence
  Description of Artificial Sequence: Synthetic epitope
KQEIMNETFE

SEQ ID NO: 23605 - protein, 10 aa, Artificial Sequence
  Description of Artificial Sequence: Synthetic epitope
KQEKADTQDE

SEQ ID NO: 23606 - protein, 10 aa, Artificial Sequence
  Description of Artificial Sequence: Synthetic epitope
KQEKDQQGII

SEQ ID NO: 23607 - protein, 10 aa, Artificial Sequence
  Description of Artificial Sequence: Synthetic epitope
KQEKKQEQED

SEQ ID NO: 23608 - protein, 10 aa, Artificial Sequence
  Description of Artificial Sequence: Synthetic epitope
KQEKSELEEK

SEQ ID NO: 23609 - protein, 10 aa, Artificial Sequence
  Description of Artificial Sequence: Synthetic epitope
KQELAKKEID

SEQ ID NO: 23610 - protein, 10 aa, Artificial Sequence
  Description of Artificial Sequence: Synthetic epitope
KQELANNLHV

SEQ ID NO: 23611 - protein, 10 aa, Artificial Sequence
  Description of Artificial Sequence: Synthetic epitope
KQELATLKSQ

SEQ ID NO: 23612 - protein, 10 aa, Artificial Sequence
  Description of Artificial Sequence: Synthetic epitope
KQELATSQRE

SEQ ID NO: 23613 - protein, 10 aa, Artificial Sequence
  Description of Artificial Sequence: Synthetic epitope
KQELIAHARE

SEQ ID NO: 23614 - protein, 10 aa, Artificial Sequence
  Description of Artificial Sequence: Synthetic epitope
KQELSSELST

SEQ ID NO: 23615 - protein, 10 aa, Artificial Sequence
  Description of Artificial Sequence: Synthetic epitope
KQELTQDKGA

SEQ ID NO: 23616 - protein, 10 aa, Artificial Sequence
  Description of Artificial Sequence: Synthetic epitope
KQELTVFQSK

SEQ ID NO: 23617 - protein, 10 aa, Artificial Sequence
  Description of Artificial Sequence: Synthetic epitope
KQEMGKLETD

SEQ ID NO: 23618 - protein, 10 aa, Artificial Sequence
  Description of Artificial Sequence: Synthetic epitope
KQENSADDLH

SEQ ID NO: 23619 - protein, 10 aa, Artificial Sequence
  Description of Artificial Sequence: Synthetic epitope
KQEPVAEGHE

SEQ ID NO: 23620 - protein, 10 aa, Artificial Sequence
  Description of Artificial Sequence: Synthetic epitope
KQEQQAFKEA

SEQ ID NO: 23621 - protein, 10 aa, Artificial Sequence
  Description of Artificial Sequence: Synthetic epitope
KQESLVVSEV

SEQ ID NO: 23622 - protein, 10 aa, Artificial Sequence
  Description of Artificial Sequence: Synthetic epitope
KQESSESLPK

SEQ ID NO: 23623 - protein, 10 aa, Artificial Sequence
  Description of Artificial Sequence: Synthetic epitope
KQESSKSLKK

SEQ ID NO: 23624 - protein, 10 aa, Artificial Sequence
  Description of Artificial Sequence: Synthetic epitope
KQESYNSESS

SEQ ID NO: 23625 - protein, 10 aa, Artificial Sequence
  Description of Artificial Sequence: Synthetic epitope
KQETAANLQN

SEQ ID NO: 23626 - protein, 10 aa, Artificial Sequence
  Description of Artificial Sequence: Synthetic epitope
KQETANSLPA

SEQ ID NO: 23627 - protein, 10 aa, Artificial Sequence
  Description of Artificial Sequence: Synthetic epitope
KQETAVVENV

SEQ ID NO: 23628 - protein, 10 aa, Artificial Sequence
  Description of Artificial Sequence: Synthetic epitope
KQETQGLQKE

SEQ ID NO: 23629 - protein, 10 aa, Artificial Sequence
  Description of Artificial Sequence: Synthetic epitope
KQETRTILQK

SEQ ID NO: 23630 - protein, 10 aa, Artificial Sequence
  Description of Artificial Sequence: Synthetic epitope
KQEVKDTVDG

SEQ ID NO: 23631 - protein, 10 aa, Artificial Sequence
  Description of Artificial Sequence: Synthetic epitope
KQFAAWFEEA

SEQ ID NO: 23632 - protein, 10 aa, Artificial Sequence
  Description of Artificial Sequence: Synthetic epitope
KQFELSEQTK

SEQ ID NO: 23633 - protein, 10 aa, Artificial Sequence
  Description of Artificial Sequence: Synthetic epitope
KQFEQGKIQL

SEQ ID NO: 23634 - protein, 10 aa, Artificial Sequence
  Description of Artificial Sequence: Synthetic epitope
KQFEYIEVGQ

SEQ ID NO: 23635 - protein, 10 aa, Artificial Sequence
  Description of Artificial Sequence: Synthetic epitope
KQFNAKMLEM

SEQ ID NO: 23636 - protein, 10 aa, Artificial Sequence
  Description of Artificial Sequence: Synthetic epitope
KQFNATTIPE

SEQ ID NO: 23637 - protein, 10 aa, Artificial Sequence
  Description of Artificial Sequence: Synthetic epitope
KQFQRISKRT

SEQ ID NO: 23638 - protein, 10 aa, Artificial Sequence
  Description of Artificial Sequence: Synthetic epitope
KQFRLFKTAA

SEQ ID NO: 23639 - protein, 10 aa, Artificial Sequence
  Description of Artificial Sequence: Synthetic epitope
KQGAADYSRF

SEQ ID NO: 23640 - protein, 10 aa, Artificial Sequence
  Description of Artificial Sequence: Synthetic epitope
KQGASVASGS

SEQ ID NO: 23641 - protein, 10 aa, Artificial Sequence
  Description of Artificial Sequence: Synthetic epitope
KQGDSSLVFG

SEQ ID NO: 23642 - protein, 10 aa, Artificial Sequence
  Description of Artificial Sequence: Synthetic epitope
KQGEMREMQQ

SEQ ID NO: 23643 - protein, 10 aa, Artificial Sequence
  Description of Artificial Sequence: Synthetic epitope
KQGGIVDKDL

SEQ ID NO: 23644 - protein, 10 aa, Artificial Sequence
  Description of Artificial Sequence: Synthetic epitope
KQGKAGLQMK

SEQ ID NO: 23645 - protein, 10 aa, Artificial Sequence
  Description of Artificial Sequence: Synthetic epitope
KQGKSVKVPI

SEQ ID NO: 23646 - protein, 10 aa, Artificial Sequence
  Description of Artificial Sequence: Synthetic epitope
KQGLRLSQTA

SEQ ID NO: 23647 - protein, 10 aa, Artificial Sequence
  Description of Artificial Sequence: Synthetic epitope
KQGLVSKSSP

SEQ ID NO: 23648 - protein, 10 aa, Artificial Sequence
  Description of Artificial Sequence: Synthetic epitope
KQGNKWYKQH

SEQ ID NO: 23649 - protein, 10 aa, Artificial Sequence
  Description of Artificial Sequence: Synthetic epitope
KQHKQVWWQE

SEQ ID NO: 23650 - protein, 10 aa, Artificial Sequence
  Description of Artificial Sequence: Synthetic epitope
KQHLEMDHPK

SEQ ID NO: 23651 - protein, 10 aa, Artificial Sequence
  Description of Artificial Sequence: Synthetic epitope
KQHNSRLEQS

SEQ ID NO: 23652 - protein, 10 aa, Artificial Sequence
  Description of Artificial Sequence: Synthetic epitope
KQHRKINPKN

SEQ ID NO: 23653 - protein, 10 aa, Artificial Sequence
  Description of Artificial Sequence: Synthetic epitope
KQIATKVHPG

SEQ ID NO: 23654 - protein, 10 aa, Artificial Sequence
  Description of Artificial Sequence: Synthetic epitope
KQIDNKQLQG

SEQ ID NO: 23655 - protein, 10 aa, Artificial Sequence
  Description of Artificial Sequence: Synthetic epitope
KQIEFNFPSQ

SEQ ID NO: 23656 - protein, 10 aa, Artificial Sequence
  Description of Artificial Sequence: Synthetic epitope
KQIEIKKFKY

SEQ ID NO: 23657 - protein, 10 aa, Artificial Sequence
  Description of Artificial Sequence: Synthetic epitope
KQIGIIGIQN

SEQ ID NO: 23658 - protein, 10 aa, Artificial Sequence
  Description of Artificial Sequence: Synthetic epitope
KQIGRSGDPV

SEQ ID NO: 23659 - protein, 10 aa, Artificial Sequence
  Description of Artificial Sequence: Synthetic epitope
KQIITSRNKV

SEQ ID NO: 23660 - protein, 10 aa, Artificial Sequence
  Description of Artificial Sequence: Synthetic epitope
KQIKFVVEKH

SEQ ID NO: 23661 - protein, 10 aa, Artificial Sequence
  Description of Artificial Sequence: Synthetic epitope
KQIKTFAMKY

SEQ ID NO: 23662 - protein, 10 aa, Artificial Sequence
  Description of Artificial Sequence: Synthetic epitope
KQILFPEKSE

SEQ ID NO: 23663 - protein, 10 aa, Artificial Sequence
  Description of Artificial Sequence: Synthetic epitope
KQILQAKRIR

SEQ ID NO: 23664 - protein, 10 aa, Artificial Sequence
  Description of Artificial Sequence: Synthetic epitope
KQIMLAIDSE

SEQ ID NO: 23665 - protein, 10 aa, Artificial Sequence
  Description of Artificial Sequence: Synthetic epitope
KQIQTEAAQL

SEQ ID NO: 23666 - protein, 10 aa, Artificial Sequence
  Description of Artificial Sequence: Synthetic epitope
KQIQTPPDAG

SEQ ID NO: 23667 - protein, 10 aa, Artificial Sequence
  Description of Artificial Sequence: Synthetic epitope
KQIQVAEAQN

SEQ ID NO: 23668 - protein, 10 aa, Artificial Sequence
  Description of Artificial Sequence: Synthetic epitope
KQISKAVHSN

SEQ ID NO: 23669 - protein, 10 aa, Artificial Sequence
  Description of Artificial Sequence: Synthetic epitope
KQISRVEAMR

SEQ ID NO: 23670 - protein, 10 aa, Artificial Sequence
  Description of Artificial Sequence: Synthetic epitope
KQITQTKSTN

SEQ ID NO: 23671 - protein, 10 aa, Artificial Sequence
  Description of Artificial Sequence: Synthetic epitope
KQIVLTGILE

SEQ ID NO: 23672 - protein, 10 aa, Artificial Sequence
  Description of Artificial Sequence: Synthetic epitope
KQKADKRVRS

SEQ ID NO: 23673 - protein, 10 aa, Artificial Sequence
  Description of Artificial Sequence: Synthetic epitope
KQKAELMTDR

SEQ ID NO: 23674 - protein, 10 aa, Artificial Sequence
  Description of Artificial Sequence: Synthetic epitope
KQKAKTAEAT

SEQ ID NO: 23675 - protein, 10 aa, Artificial Sequence
  Description of Artificial Sequence: Synthetic epitope
KQKALIVALV

SEQ ID NO: 23676 - protein, 10 aa, Artificial Sequence
  Description of Artificial Sequence: Synthetic epitope
KQKAQEAEKL

SEQ ID NO: 23677 - protein, 10 aa, Artificial Sequence
  Description of Artificial Sequence: Synthetic epitope
KQKARKKEER

SEQ ID NO: 23678 - protein, 10 aa, Artificial Sequence
  Description of Artificial Sequence: Synthetic epitope
KQKASASTPQ

SEQ ID NO: 23679 - protein, 10 aa, Artificial Sequence
  Description of Artificial Sequence: Synthetic epitope
KQKASQSPQK

SEQ ID NO: 23680 - protein, 10 aa, Artificial Sequence
  Description of Artificial Sequence: Synthetic epitope
KQKDKQNISQ

SEQ ID NO: 23681 - protein, 10 aa, Artificial Sequence
  Description of Artificial Sequence: Synthetic epitope
KQKDLQVTNV

SEQ ID NO: 23682 - protein, 10 aa, Artificial Sequence
  Description of Artificial Sequence: Synthetic epitope
KQKDQIISLM

SEQ ID NO: 23683 - protein, 10 aa, Artificial Sequence
  Description of Artificial Sequence: Synthetic epitope
KQKEHRVYKT

SEQ ID NO: 23684 - protein, 10 aa, Artificial Sequence
  Description of Artificial Sequence: Synthetic epitope
KQKEQEASQL

SEQ ID NO: 23685 - protein, 10 aa, Artificial Sequence
  Description of Artificial Sequence: Synthetic epitope
KQKERKQLND

SEQ ID NO: 23686 - protein, 10 aa, Artificial Sequence
  Description of Artificial Sequence: Synthetic epitope
KQKESSLSQK

SEQ ID NO: 23687 - protein, 10 aa, Artificial Sequence
  Description of Artificial Sequence: Synthetic epitope
KQKETISKKE

SEQ ID NO: 23688 - protein, 10 aa, Artificial Sequence
  Description of Artificial Sequence: Synthetic epitope
KQKFNSEKSE

SEQ ID NO: 23689 - protein, 10 aa, Artificial Sequence
  Description of Artificial Sequence: Synthetic epitope
KQKFSELARK

SEQ ID NO: 23690 - protein, 10 aa, Artificial Sequence
  Description of Artificial Sequence: Synthetic epitope
KQKGHKSQRE

SEQ ID NO: 23691 - protein, 10 aa, Artificial Sequence
  Description of Artificial Sequence: Synthetic epitope
KQKGKASVQA

SEQ ID NO: 23692 - protein, 10 aa, Artificial Sequence
  Description of Artificial Sequence: Synthetic epitope
KQKGSDAVGA

SEQ ID NO: 23693 - protein, 10 aa, Artificial Sequence
  Description of Artificial Sequence: Synthetic epitope
KQKGVGLKTQ

SEQ ID NO: 23694 - protein, 10 aa, Artificial Sequence
  Description of Artificial Sequence: Synthetic epitope
KQKIDNIGKA

SEQ ID NO: 23695 - protein, 10 aa, Artificial Sequence
  Description of Artificial Sequence: Synthetic epitope
KQKIIDAQEK

SEQ ID NO: 23696 - protein, 10 aa, Artificial Sequence
  Description of Artificial Sequence: Synthetic epitope
KQKISEAFVK

SEQ ID NO: 23697 - protein, 10 aa, Artificial Sequence
  Description of Artificial Sequence: Synthetic epitope
KQKKARPSVK

SEQ ID NO: 23698 - protein, 10 aa, Artificial Sequence
  Description of Artificial Sequence: Synthetic epitope
KQKKASFEEA

SEQ ID NO: 23699 - protein, 10 aa, Artificial Sequence
  Description of Artificial Sequence: Synthetic epitope
KQKKRQSVSG

SEQ ID NO: 23700 - protein, 10 aa, Artificial Sequence
  Description of Artificial Sequence: Synthetic epitope
KQKKSMTPAE

SEQ ID NO: 23701 - protein, 10 aa, Artificial Sequence
  Description of Artificial Sequence: Synthetic epitope
KQKLASALLA

SEQ ID NO: 23702 - protein, 10 aa, Artificial Sequence
  Description of Artificial Sequence: Synthetic epitope
KQKLATVQSR

SEQ ID NO: 23703 - protein, 10 aa, Artificial Sequence
  Description of Artificial Sequence: Synthetic epitope
KQKLDESQAE

SEQ ID NO: 23704 - protein, 10 aa, Artificial Sequence
  Description of Artificial Sequence: Synthetic epitope
KQKLFKVTKE

SEQ ID NO: 23705 - protein, 10 aa, Artificial Sequence
  Description of Artificial Sequence: Synthetic epitope
KQKLKALKIE

SEQ ID NO: 23706 - protein, 10 aa, Artificial Sequence
  Description of Artificial Sequence: Synthetic epitope
KQKLQSAPTK

SEQ ID NO: 23707 - protein, 10 aa, Artificial Sequence
  Description of Artificial Sequence: Synthetic epitope
KQKLTDTTFL

SEQ ID NO: 23708 - protein, 10 aa, Artificial Sequence
  Description of Artificial Sequence: Synthetic epitope
KQKLTSIQFS

SEQ ID NO: 23709 - protein, 10 aa, Artificial Sequence
  Description of Artificial Sequence: Synthetic epitope
KQKMRRLGSD

SEQ ID NO: 23710 - protein, 10 aa, Artificial Sequence
  Description of Artificial Sequence: Synthetic epitope
KQKMRSTKLL

SEQ ID NO: 23711 - protein, 10 aa, Artificial Sequence
  Description of Artificial Sequence: Synthetic epitope
KQKNESNSAG

SEQ ID NO: 23712 - protein, 10 aa, Artificial Sequence
  Description of Artificial Sequence: Synthetic epitope
KQKQETLQEE

SEQ ID NO: 23713 - protein, 10 aa, Artificial Sequence
  Description of Artificial Sequence: Synthetic epitope
KQKQKQTMHQ

SEQ ID NO: 23714 - protein, 10 aa, Artificial Sequence
  Description of Artificial Sequence: Synthetic epitope
KQKQREESKK

SEQ ID NO: 23715 - protein, 10 aa, Artificial Sequence
  Description of Artificial Sequence: Synthetic epitope
KQKRREQREQ

SEQ ID NO: 23716 - protein, 10 aa, Artificial Sequence
  Description of Artificial Sequence: Synthetic epitope
KQKSAHVNSL

SEQ ID NO: 23717 - protein, 10 aa, Artificial Sequence
  Description of Artificial Sequence: Synthetic epitope
KQKSEAKDRK

SEQ ID NO: 23718 - protein, 10 aa, Artificial Sequence
  Description of Artificial Sequence: Synthetic epitope
KQKSKKLLNI

SEQ ID NO: 23719 - protein, 10 aa, Artificial Sequence
  Description of Artificial Sequence: Synthetic epitope
KQKSMSLLSQ

SEQ ID NO: 23720 - protein, 10 aa, Artificial Sequence
  Description of Artificial Sequence: Synthetic epitope
KQKSQTPPRR

SEQ ID NO: 23721 - protein, 10 aa, Artificial Sequence
  Description of Artificial Sequence: Synthetic epitope
KQKSVKEISS

SEQ ID NO: 23722 - protein, 10 aa, Artificial Sequence
  Description of Artificial Sequence: Synthetic epitope
KQKSVLLELT

SEQ ID NO: 23723 - protein, 10 aa, Artificial Sequence
  Description of Artificial Sequence: Synthetic epitope
KQKTEQLGLT

SEQ ID NO: 23724 - protein, 10 aa, Artificial Sequence
  Description of Artificial Sequence: Synthetic epitope
KQKTQIPLQA

SEQ ID NO: 23725 - protein, 10 aa, Artificial Sequence
  Description of Artificial Sequence: Synthetic epitope
KQKTTENLDD

SEQ ID NO: 23726 - protein, 10 aa, Artificial Sequence
  Description of Artificial Sequence: Synthetic epitope
KQKVEHIEWF

SEQ ID NO: 23727 - protein, 10 aa, Artificial Sequence
  Description of Artificial Sequence: Synthetic epitope
KQKVLHDTMD

SEQ ID NO: 23728 - protein, 10 aa, Artificial Sequence
  Description of Artificial Sequence: Synthetic epitope
KQKVSRIERS

SEQ ID NO: 23729 - protein, 10 aa, Artificial Sequence
  Description of Artificial Sequence: Synthetic epitope
KQKYKISTKT

SEQ ID NO: 23730 - protein, 10 aa, Artificial Sequence
  Description of Artificial Sequence: Synthetic epitope
KQLAALTLED

SEQ ID NO: 23731 - protein, 10 aa, Artificial Sequence
  Description of Artificial Sequence: Synthetic epitope
KQLAELAISK

SEQ ID NO: 23732 - protein, 10 aa, Artificial Sequence
  Description of Artificial Sequence: Synthetic epitope
KQLAERRTDI

SEQ ID NO: 23733 - protein, 10 aa, Artificial Sequence
  Description of Artificial Sequence: Synthetic epitope
KQLAGDIALE

SEQ ID NO: 23734 - protein, 10 aa, Artificial Sequence
  Description of Artificial Sequence: Synthetic epitope
KQLAGLVANY

SEQ ID NO: 23735 - protein, 10 aa, Artificial Sequence
  Description of Artificial Sequence: Synthetic epitope
KQLEATISEA

SEQ ID NO: 23736 - protein, 10 aa, Artificial Sequence
  Description of Artificial Sequence: Synthetic epitope
KQLEQSEKDL

SEQ ID NO: 23737 - protein, 10 aa, Artificial Sequence
  Description of Artificial Sequence: Synthetic epitope
KQLESAQMDS

SEQ ID NO: 23738 - protein, 10 aa, Artificial Sequence
  Description of Artificial Sequence: Synthetic epitope
KQLESKSNEH

SEQ ID NO: 23739 - protein, 10 aa, Artificial Sequence
  Description of Artificial Sequence: Synthetic epitope
KQLESSQARK

SEQ ID NO: 23740 - protein, 10 aa, Artificial Sequence
  Description of Artificial Sequence: Synthetic epitope
KQLFKGTVEQ

SEQ ID NO: 23741 - protein, 10 aa, Artificial Sequence
  Description of Artificial Sequence: Synthetic epitope
KQLGSVATGS

SEQ ID NO: 23742 - protein, 10 aa, Artificial Sequence
  Description of Artificial Sequence: Synthetic epitope
KQLGVNTVRK

SEQ ID NO: 23743 - protein, 10 aa, Artificial Sequence
  Description of Artificial Sequence: Synthetic epitope
KQLIEKRIGK

SEQ ID NO: 23744 - protein, 10 aa, Artificial Sequence
  Description of Artificial Sequence: Synthetic epitope
KQLIHIEHQP

SEQ ID NO: 23745 - protein, 10 aa, Artificial Sequence
  Description of Artificial Sequence: Synthetic epitope
KQLIKAIQLT

SEQ ID NO: 23746 - protein, 10 aa, Artificial Sequence
  Description of Artificial Sequence: Synthetic epitope
KQLIKAQKGA

SEQ ID NO: 23747 - protein, 10 aa, Artificial Sequence
  Description of Artificial Sequence: Synthetic epitope
KQLIKSIVEA

SEQ ID NO: 23748 - protein, 10 aa, Artificial Sequence
  Description of Artificial Sequence: Synthetic epitope
KQLIQPIAEK

SEQ ID NO: 23749 - protein, 10 aa, Artificial Sequence
  Description of Artificial Sequence: Synthetic epitope
KQLKNLKRKE

SEQ ID NO: 23750 - protein, 10 aa, Artificial Sequence
  Description of Artificial Sequence: Synthetic epitope
KQLLAALEIS

SEQ ID NO: 23751 - protein, 10 aa, Artificial Sequence
  Description of Artificial Sequence: Synthetic epitope
KQLLILLSKV

SEQ ID NO: 23752 - protein, 10 aa, Artificial Sequence
  Description of Artificial Sequence: Synthetic epitope
KQLLKTKSFF

SEQ ID NO: 23753 - protein, 10 aa, Artificial Sequence
  Description of Artificial Sequence: Synthetic epitope
KQLLSDHELT

SEQ ID NO: 23754 - protein, 10 aa, Artificial Sequence
  Description of Artificial Sequence: Synthetic epitope
KQLLVKTKKE

SEQ ID NO: 23755 - protein, 10 aa, Artificial Sequence
  Description of Artificial Sequence: Synthetic epitope
KQLMSSAVQD

SEQ ID NO: 23756 - protein, 10 aa, Artificial Sequence
  Description of Artificial Sequence: Synthetic epitope
KQLMTNLSHK

SEQ ID NO: 23757 - protein, 10 aa, Artificial Sequence
  Description of Artificial Sequence: Synthetic epitope
KQLNPTLKEA

SEQ ID NO: 23758 - protein, 10 aa, Artificial Sequence
  Description of Artificial Sequence: Synthetic epitope
KQLPTLILFQ

SEQ ID NO: 23759 - protein, 10 aa, Artificial Sequence
  Description of Artificial Sequence: Synthetic epitope
KQLQASVSER

SEQ ID NO: 23760 - protein, 10 aa, Artificial Sequence
  Description of Artificial Sequence: Synthetic epitope
KQLQNAGGKS

SEQ ID NO: 23761 - protein, 10 aa, Artificial Sequence
  Description of Artificial Sequence: Synthetic epitope
KQLQNISLAA

SEQ ID NO: 23762 - protein, 10 aa, Artificial Sequence
  Description of Artificial Sequence: Synthetic epitope
KQLQRNAGLV

SEQ ID NO: 23763 - protein, 10 aa, Artificial Sequence
  Description of Artificial Sequence: Synthetic epitope
KQLRETKDKK

SEQ ID NO: 23764 - protein, 10 aa, Artificial Sequence
  Description of Artificial Sequence: Synthetic epitope
KQLRKQHRMA

SEQ ID NO: 23765 - protein, 10 aa, Artificial Sequence
  Description of Artificial Sequence: Synthetic epitope
KQLRQQRFVD

SEQ ID NO: 23766 - protein, 10 aa, Artificial Sequence
  Description of Artificial Sequence: Synthetic epitope
KQLSADSAEA

SEQ ID NO: 23767 - protein, 10 aa, Artificial Sequence
  Description of Artificial Sequence: Synthetic epitope
KQLSKESLQS

SEQ ID NO: 23768 - protein, 10 aa, Artificial Sequence
  Description of Artificial Sequence: Synthetic epitope
KQLSLESSRQ

SEQ ID NO: 23769 - protein, 10 aa, Artificial Sequence
  Description of Artificial Sequence: Synthetic epitope
KQLSLPETGE

SEQ ID NO: 23770 - protein, 10 aa, Artificial Sequence
  Description of Artificial Sequence: Synthetic epitope
KQLSSEELEQ

SEQ ID NO: 23771 - protein, 10 aa, Artificial Sequence
  Description of Artificial Sequence: Synthetic epitope
KQLSSQGTVR

SEQ ID NO: 23772 - protein, 10 aa, Artificial Sequence
  Description of Artificial Sequence: Synthetic epitope
KQLSSRQDTK

SEQ ID NO: 23773 - protein, 10 aa, Artificial Sequence
  Description of Artificial Sequence: Synthetic epitope
KQLSTFEVNS

SEQ ID NO: 23774 - protein, 10 aa, Artificial Sequence
  Description of Artificial Sequence: Synthetic epitope
KQLTVLSDQQ

SEQ ID NO: 23775 - protein, 10 aa, Artificial Sequence
  Description of Artificial Sequence: Synthetic epitope
KQLVAREQEI

SEQ ID NO: 23776 - protein, 10 aa, Artificial Sequence
  Description of Artificial Sequence: Synthetic epitope
KQLVAYVQLN

SEQ ID NO: 23777 - protein, 10 aa, Artificial Sequence
  Description of Artificial Sequence: Synthetic epitope
KQLVQQLEAR

SEQ ID NO: 23778 - protein, 10 aa, Artificial Sequence
  Description of Artificial Sequence: Synthetic epitope
KQLVSRVELS

SEQ ID NO: 23779 - protein, 10 aa, Artificial Sequence
  Description of Artificial Sequence: Synthetic epitope
KQLYEMMKKE

SEQ ID NO: 23780 - protein, 10 aa, Artificial Sequence
  Description of Artificial Sequence: Synthetic epitope
KQLYQASKDE

SEQ ID NO: 23781 - protein, 10 aa, Artificial Sequence
  Description of Artificial Sequence: Synthetic epitope
KQMARNNRNQ

SEQ ID NO: 23782 - protein, 10 aa, Artificial Sequence
  Description of Artificial Sequence: Synthetic epitope
KQMDAILKAV

SEQ ID NO: 23783 - protein, 10 aa, Artificial Sequence
  Description of Artificial Sequence: Synthetic epitope
KQMDMASADK

SEQ ID NO: 23784 - protein, 10 aa, Artificial Sequence
  Description of Artificial Sequence: Synthetic epitope
KQMEVKESYI

SEQ ID NO: 23785 - protein, 10 aa, Artificial Sequence
  Description of Artificial Sequence: Synthetic epitope
KQMIKKLDAS

SEQ ID NO: 23786 - protein, 10 aa, Artificial Sequence
  Description of Artificial Sequence: Synthetic epitope
KQMKEKSVKT

SEQ ID NO: 23787 - protein, 10 aa, Artificial Sequence
  Description of Artificial Sequence: Synthetic epitope
KQMKETESHS

SEQ ID NO: 23788 - protein, 10 aa, Artificial Sequence
  Description of Artificial Sequence: Synthetic epitope
KQMLIDQRAQ

SEQ ID NO: 23789 - protein, 10 aa, Artificial Sequence
  Description of Artificial Sequence: Synthetic epitope
KQMLQLMVAK

SEQ ID NO: 23790 - protein, 10 aa, Artificial Sequence
  Description of Artificial Sequence: Synthetic epitope
KQMLRTRSKR

SEQ ID NO: 23791 - protein, 10 aa, Artificial Sequence
  Description of Artificial Sequence: Synthetic epitope
KQMMLIQKAK

SEQ ID NO: 23792 - protein, 10 aa, Artificial Sequence
  Description of Artificial Sequence: Synthetic epitope
KQMMTMHNTK

SEQ ID NO: 23793 - protein, 10 aa, Artificial Sequence
  Description of Artificial Sequence: Synthetic epitope
KQMQDKYSKS

SEQ ID NO: 23794 - protein, 10 aa, Artificial Sequence
  Description of Artificial Sequence: Synthetic epitope
KQMQLSKNEQ

SEQ ID NO: 23795 - protein, 10 aa, Artificial Sequence
  Description of Artificial Sequence: Synthetic epitope
KQMRLQNTKE

SEQ ID NO: 23796 - protein, 10 aa, Artificial Sequence
  Description of Artificial Sequence: Synthetic epitope
KQMSISTGLS

SEQ ID NO: 23797 - protein, 10 aa, Artificial Sequence
  Description of Artificial Sequence: Synthetic epitope
KQMVITKREN

SEQ ID NO: 23798 - protein, 10 aa, Artificial Sequence
  Description of Artificial Sequence: Synthetic epitope
KQNASKVAQI

SEQ ID NO: 23799 - protein, 10 aa, Artificial Sequence
  Description of Artificial Sequence: Synthetic epitope
KQNELLEPNS

SEQ ID NO: 23800 - protein, 10 aa, Artificial Sequence
  Description of Artificial Sequence: Synthetic epitope
KQNEMIVEEF

SEQ ID NO: 23801 - protein, 10 aa, Artificial Sequence
  Description of Artificial Sequence: Synthetic epitope
KQNETSTSKN

SEQ ID NO: 23802 - protein, 10 aa, Artificial Sequence
  Description of Artificial Sequence: Synthetic epitope
KQNKGIEELF

SEQ ID NO: 23803 - protein, 10 aa, Artificial Sequence
  Description of Artificial Sequence: Synthetic epitope
KQNKSNSAYK

SEQ ID NO: 23804 - protein, 10 aa, Artificial Sequence
  Description of Artificial Sequence: Synthetic epitope
KQNLLNVSYH

SEQ ID NO: 23805 - protein, 10 aa, Artificial Sequence
  Description of Artificial Sequence: Synthetic epitope
KQNLSDRSRQ

SEQ ID NO: 23806 - protein, 10 aa, Artificial Sequence
  Description of Artificial Sequence: Synthetic epitope
KQNPIEVTSE

SEQ ID NO: 23807 - protein, 10 aa, Artificial Sequence
  Description of Artificial Sequence: Synthetic epitope
KQNPLDEQHI

SEQ ID NO: 23808 - protein, 10 aa, Artificial Sequence
  Description of Artificial Sequence: Synthetic epitope
KQNRNSKELG

SEQ ID NO: 23809 - protein, 10 aa, Artificial Sequence
  Description of Artificial Sequence: Synthetic epitope
KQNRSLKELM

SEQ ID NO: 23810 - protein, 10 aa, Artificial Sequence
  Description of Artificial Sequence: Synthetic epitope
KQNSEKETNE

SEQ ID NO: 23811 - protein, 10 aa, Artificial Sequence
  Description of Artificial Sequence: Synthetic epitope
KQNSQMIVKR

SEQ ID NO: 23812 - protein, 10 aa, Artificial Sequence
  Description of Artificial Sequence: Synthetic epitope
KQNYSSKNEN

SEQ ID NO: 23813 - protein, 10 aa, Artificial Sequence
  Description of Artificial Sequence: Synthetic epitope
KQPGVSVNAQ

SEQ ID NO: 23814 - protein, 10 aa, Artificial Sequence
  Description of Artificial Sequence: Synthetic epitope
KQPIHQKENI

SEQ ID NO: 23815 - protein, 10 aa, Artificial Sequence
  Description of Artificial Sequence: Synthetic epitope
KQPIRENDDQ

SEQ ID NO: 23816 - protein, 10 aa, Artificial Sequence
  Description of Artificial Sequence: Synthetic epitope
KQPITVREGQ

SEQ ID NO: 23817 - protein, 10 aa, Artificial Sequence
  Description of Artificial Sequence: Synthetic epitope
KQPKTEPSTS

SEQ ID NO: 23818 - protein, 10 aa, Artificial Sequence
  Description of Artificial Sequence: Synthetic epitope
KQPLEVHETV

SEQ ID NO: 23819 - protein, 10 aa, Artificial Sequence
  Description of Artificial Sequence: Synthetic epitope
KQPPAIAKDK

SEQ ID NO: 23820 - protein, 10 aa, Artificial Sequence
  Description of Artificial Sequence: Synthetic epitope
KQPSSNKLHN

SEQ ID NO: 23821 - protein, 10 aa, Artificial Sequence
  Description of Artificial Sequence: Synthetic epitope
KQPSTQSDTY

SEQ ID NO: 23822 - protein, 10 aa, Artificial Sequence
  Description of Artificial Sequence: Synthetic epitope
KQQAIKIETT

SEQ ID NO: 23823 - protein, 10 aa, Artificial Sequence
  Description of Artificial Sequence: Synthetic epitope
KQQALSLKES

SEQ ID NO: 23824 - protein, 10 aa, Artificial Sequence
  Description of Artificial Sequence: Synthetic epitope
KQQATQHSMA

SEQ ID NO: 23825 - protein, 10 aa, Artificial Sequence
  Description of Artificial Sequence: Synthetic epitope
KQQEATAEQE

SEQ ID NO: 23826 - protein, 10 aa, Artificial Sequence
  Description of Artificial Sequence: Synthetic epitope
KQQEEQTRVA

SEQ ID NO: 23827 - protein, 10 aa, Artificial Sequence
  Description of Artificial Sequence: Synthetic epitope
KQQEETLVDE

SEQ ID NO: 23828 - protein, 10 aa, Artificial Sequence
  Description of Artificial Sequence: Synthetic epitope
KQQEILTKSG

SEQ ID NO: 23829 - protein, 10 aa, Artificial Sequence
  Description of Artificial Sequence: Synthetic epitope
KQQEILTKSG

SEQ ID NO: 23830 - protein, 10 aa, Artificial Sequence
  Description of Artificial Sequence: Synthetic epitope
KQQEQLLQLE

SEQ ID NO: 23831 - protein, 10 aa, Artificial Sequence
  Description of Artificial Sequence: Synthetic epitope
KQQERAQSQS

SEQ ID NO: 23832 - protein, 10 aa, Artificial Sequence
  Description of Artificial Sequence: Synthetic epitope
KQQFLREQRQ

SEQ ID NO: 23833 - protein, 10 aa, Artificial Sequence
  Description of Artificial Sequence: Synthetic epitope
KQQILISRKH

SEQ ID NO: 23834 - protein, 10 aa, Artificial Sequence
  Description of Artificial Sequence: Synthetic epitope
KQQISLATQM

SEQ ID NO: 23835 - protein, 10 aa, Artificial Sequence
  Description of Artificial Sequence: Synthetic epitope
KQQITMEMSA

SEQ ID NO: 23836 - protein, 10 aa, Artificial Sequence
  Description of Artificial Sequence: Synthetic epitope
KQQKAVSGST

SEQ ID NO: 23837 - protein, 10 aa, Artificial Sequence
  Description of Artificial Sequence: Synthetic epitope
KQQLEEKDMD

SEQ ID NO: 23838 - protein, 10 aa, Artificial Sequence
  Description of Artificial Sequence: Synthetic epitope
KQQLQKQKSM

SEQ ID NO: 23839 - protein, 10 aa, Artificial Sequence
  Description of Artificial Sequence: Synthetic epitope
KQQLQLMQSK

SEQ ID NO: 23840 - protein, 10 aa, Artificial Sequence
  Description of Artificial Sequence: Synthetic epitope
KQQLSDNQRQ

SEQ ID NO: 23841 - protein, 10 aa, Artificial Sequence
  Description of Artificial Sequence: Synthetic epitope
KQQLSLTQQF

SEQ ID NO: 23842 - protein, 10 aa, Artificial Sequence
  Description of Artificial Sequence: Synthetic epitope
KQQMHIDSHE

SEQ ID NO: 23843 - protein, 10 aa, Artificial Sequence
  Description of Artificial Sequence: Synthetic epitope
KQQMRSVISV

SEQ ID NO: 23844 - protein, 10 aa, Artificial Sequence
  Description of Artificial Sequence: Synthetic epitope
KQQNVQSASQ

SEQ ID NO: 23845 - protein, 10 aa, Artificial Sequence
  Description of Artificial Sequence: Synthetic epitope
KQQNVRGMKK

SEQ ID NO: 23846 - protein, 10 aa, Artificial Sequence
  Description of Artificial Sequence: Synthetic epitope
KQQRETKNSH

SEQ ID NO: 23847 - protein, 10 aa, Artificial Sequence
  Description of Artificial Sequence: Synthetic epitope
KQQRGKQKWF

SEQ ID NO: 23848 - protein, 10 aa, Artificial Sequence
  Description of Artificial Sequence: Synthetic epitope
KQQSDLQFLN

SEQ ID NO: 23849 - protein, 10 aa, Artificial Sequence
  Description of Artificial Sequence: Synthetic epitope
KQQSHPEQNS

SEQ ID NO: 23850 - protein, 10 aa, Artificial Sequence
  Description of Artificial Sequence: Synthetic epitope
KQQSRESVEE

SEQ ID NO: 23851 - protein, 10 aa, Artificial Sequence
  Description of Artificial Sequence: Synthetic epitope
KQQSSLEGGD

SEQ ID NO: 23852 - protein, 10 aa, Artificial Sequence
  Description of Artificial Sequence: Synthetic epitope
KQQTIILDDE

SEQ ID NO: 23853 - protein, 10 aa, Artificial Sequence
  Description of Artificial Sequence: Synthetic epitope
KQQTIILDDE

SEQ ID NO: 23854 - protein, 10 aa, Artificial Sequence
  Description of Artificial Sequence: Synthetic epitope
KQQVAAVDQS

SEQ ID NO: 23855 - protein, 10 aa, Artificial Sequence
  Description of Artificial Sequence: Synthetic epitope
KQQVEGTAQE

SEQ ID NO: 23856 - protein, 10 aa, Artificial Sequence
  Description of Artificial Sequence: Synthetic epitope
KQQYEQKITE

SEQ ID NO: 23857 - protein, 10 aa, Artificial Sequence
  Description of Artificial Sequence: Synthetic epitope
KQRAAKYANS

SEQ ID NO: 23858 - protein, 10 aa, Artificial Sequence
  Description of Artificial Sequence: Synthetic epitope
KQRAENTQEE

SEQ ID NO: 23859 - protein, 10 aa, Artificial Sequence
  Description of Artificial Sequence: Synthetic epitope
KQRARMQSLM

SEQ ID NO: 23860 - protein, 10 aa, Artificial Sequence
  Description of Artificial Sequence: Synthetic epitope
KQREKLVSQS

SEQ ID NO: 23861 - protein, 10 aa, Artificial Sequence
  Description of Artificial Sequence: Synthetic epitope
KQRKKRTFPQ

SEQ ID NO: 23862 - protein, 10 aa, Artificial Sequence
  Description of Artificial Sequence: Synthetic epitope
KQRKMQSQVK

SEQ ID NO: 23863 - protein, 10 aa, Artificial Sequence
  Description of Artificial Sequence: Synthetic epitope
KQRKQQATAI

SEQ ID NO: 23864 - protein, 10 aa, Artificial Sequence
  Description of Artificial Sequence: Synthetic epitope
KQRKQSVYTP

SEQ ID NO: 23865 - protein, 10 aa, Artificial Sequence
  Description of Artificial Sequence: Synthetic epitope
KQRKTEELEE

SEQ ID NO: 23866 - protein, 10 aa, Artificial Sequence
  Description of Artificial Sequence: Synthetic epitope
KQRKVVDHPK

SEQ ID NO: 23867 - protein, 10 aa, Artificial Sequence
  Description of Artificial Sequence: Synthetic epitope
KQRLLSVTSD

SEQ ID NO: 23868 - protein, 10 aa, Artificial Sequence
  Description of Artificial Sequence: Synthetic epitope
KQRLTKVEKF

SEQ ID NO: 23869 - protein, 10 aa, Artificial Sequence
  Description of Artificial Sequence: Synthetic epitope
KQRMAAKELA

SEQ ID NO: 23870 - protein, 10 aa, Artificial Sequence
  Description of Artificial Sequence: Synthetic epitope
KQRQKMGRTA

SEQ ID NO: 23871 - protein, 10 aa, Artificial Sequence
  Description of Artificial Sequence: Synthetic epitope
KQRRGVISPN

SEQ ID NO: 23872 - protein, 10 aa, Artificial Sequence
  Description of Artificial Sequence: Synthetic epitope
KQRRKFMAKP

SEQ ID NO: 23873 - protein, 10 aa, Artificial Sequence
  Description of Artificial Sequence: Synthetic epitope
KQRRSPKETV

SEQ ID NO: 23874 - protein, 10 aa, Artificial Sequence
  Description of Artificial Sequence: Synthetic epitope
KQRRVEHNQS

SEQ ID NO: 23875 - protein, 10 aa, Artificial Sequence
  Description of Artificial Sequence: Synthetic epitope
KQRSIYKIQD

SEQ ID NO: 23876 - protein, 10 aa, Artificial Sequence
  Description of Artificial Sequence: Synthetic epitope
KQRSMAVAAR

SEQ ID NO: 23877 - protein, 10 aa, Artificial Sequence
  Description of Artificial Sequence: Synthetic epitope
KQRTEMSSKA

SEQ ID NO: 23878 - protein, 10 aa, Artificial Sequence
  Description of Artificial Sequence: Synthetic epitope
KQRTISPAES

SEQ ID NO: 23879 - protein, 10 aa, Artificial Sequence
  Description of Artificial Sequence: Synthetic epitope
KQRYRMIDFL

SEQ ID NO: 23880 - protein, 10 aa, Artificial Sequence
  Description of Artificial Sequence: Synthetic epitope
KQSAAKEKDL

SEQ ID NO: 23881 - protein, 10 aa, Artificial Sequence
  Description of Artificial Sequence: Synthetic epitope
KQSDQMTAKL

SEQ ID NO: 23882 - protein, 10 aa, Artificial Sequence
  Description of Artificial Sequence: Synthetic epitope
KQSDWPVESE

SEQ ID NO: 23883 - protein, 10 aa, Artificial Sequence
  Description of Artificial Sequence: Synthetic epitope
KQSEAENTEQ

SEQ ID NO: 23884 - protein, 10 aa, Artificial Sequence
  Description of Artificial Sequence: Synthetic epitope
KQSESEDTLP

SEQ ID NO: 23885 - protein, 10 aa, Artificial Sequence
  Description of Artificial Sequence: Synthetic epitope
KQSGQKKSYT

SEQ ID NO: 23886 - protein, 10 aa, Artificial Sequence
  Description of Artificial Sequence: Synthetic epitope
KQSGSPTLDT

SEQ ID NO: 23887 - protein, 10 aa, Artificial Sequence
  Description of Artificial Sequence: Synthetic epitope
KQSHKSSATI

SEQ ID NO: 23888 - protein, 10 aa, Artificial Sequence
  Description of Artificial Sequence: Synthetic epitope
KQSISNSESG

SEQ ID NO: 23889 - protein, 10 aa, Artificial Sequence
  Description of Artificial Sequence: Synthetic epitope
KQSKAKIPSA

SEQ ID NO: 23890 - protein, 10 aa, Artificial Sequence
  Description of Artificial Sequence: Synthetic epitope
KQSKAVTKMF

SEQ ID NO: 23891 - protein, 10 aa, Artificial Sequence
  Description of Artificial Sequence: Synthetic epitope
KQSLANRSGV

SEQ ID NO: 23892 - protein, 10 aa, Artificial Sequence
  Description of Artificial Sequence: Synthetic epitope
KQSPDYKSNA

SEQ ID NO: 23893 - protein, 10 aa, Artificial Sequence
  Description of Artificial Sequence: Synthetic epitope
KQSPRVAKTQ

SEQ ID NO: 23894 - protein, 10 aa, Artificial Sequence
  Description of Artificial Sequence: Synthetic epitope
KQSQQFNQKS

SEQ ID NO: 23895 - protein, 10 aa, Artificial Sequence
  Description of Artificial Sequence: Synthetic epitope
KQSQQIAQDE

SEQ ID NO: 23896 - protein, 10 aa, Artificial Sequence
  Description of Artificial Sequence: Synthetic epitope
KQSREIVLED

SEQ ID NO: 23897 - protein, 10 aa, Artificial Sequence
  Description of Artificial Sequence: Synthetic epitope
KQSRGADLKN

SEQ ID NO: 23898 - protein, 10 aa, Artificial Sequence
  Description of Artificial Sequence: Synthetic epitope
KQSRLLEEKV

SEQ ID NO: 23899 - protein, 10 aa, Artificial Sequence
  Description of Artificial Sequence: Synthetic epitope
KQSSEDSSHQ

SEQ ID NO: 23900 - protein, 10 aa, Artificial Sequence
  Description of Artificial Sequence: Synthetic epitope
KQSSLAEPVS

SEQ ID NO: 23901 - protein, 10 aa, Artificial Sequence
  Description of Artificial Sequence: Synthetic epitope
KQSSLRSRKL

SEQ ID NO: 23902 - protein, 10 aa, Artificial Sequence
  Description of Artificial Sequence: Synthetic epitope
KQSSNVKTLK

SEQ ID NO: 23903 - protein, 10 aa, Artificial Sequence
  Description of Artificial Sequence: Synthetic epitope
KQSSVMQRLL

SEQ ID NO: 23904 - protein, 10 aa, Artificial Sequence
  Description of Artificial Sequence: Synthetic epitope
KQSTAIQKQE

SEQ ID NO: 23905 - protein, 10 aa, Artificial Sequence
  Description of Artificial Sequence: Synthetic epitope
KQSVGNKSMS

SEQ ID NO: 23906 - protein, 10 aa, Artificial Sequence
  Description of Artificial Sequence: Synthetic epitope
KQSVGRSRRA

SEQ ID NO: 23907 - protein, 10 aa, Artificial Sequence
  Description of Artificial Sequence: Synthetic epitope
KQTDAQSASS

SEQ ID NO: 23908 - protein, 10 aa, Artificial Sequence
  Description of Artificial Sequence: Synthetic epitope
KQTDYQQVQS

SEQ ID NO: 23909 - protein, 10 aa, Artificial Sequence
  Description of Artificial Sequence: Synthetic epitope
KQTETLRNQQ

SEQ ID NO: 23910 - protein, 10 aa, Artificial Sequence
  Description of Artificial Sequence: Synthetic epitope
KQTGSRSIEA

SEQ ID NO: 23911 - protein, 10 aa, Artificial Sequence
  Description of Artificial Sequence: Synthetic epitope
KQTGTFSNDS

SEQ ID NO: 23912 - protein, 10 aa, Artificial Sequence
  Description of Artificial Sequence: Synthetic epitope
KQTKLKQRAD

SEQ ID NO: 23913 - protein, 10 aa, Artificial Sequence
  Description of Artificial Sequence: Synthetic epitope
KQTLLAESEA

SEQ ID NO: 23914 - protein, 10 aa, Artificial Sequence
  Description of Artificial Sequence: Synthetic epitope
KQTLSIQQES

SEQ ID NO: 23915 - protein, 10 aa, Artificial Sequence
  Description of Artificial Sequence: Synthetic epitope
KQTLSSIMMP

SEQ ID NO: 23916 - protein, 10 aa, Artificial Sequence
  Description of Artificial Sequence: Synthetic epitope
KQTLSSLKLD

SEQ ID NO: 23917 - protein, 10 aa, Artificial Sequence
  Description of Artificial Sequence: Synthetic epitope
KQTMGFEVPG

SEQ ID NO: 23918 - protein, 10 aa, Artificial Sequence
  Description of Artificial Sequence: Synthetic epitope
KQTQKGNSKK

SEQ ID NO: 23919 - protein, 10 aa, Artificial Sequence
  Description of Artificial Sequence: Synthetic epitope
KQTQRAQSEN

SEQ ID NO: 23920 - protein, 10 aa, Artificial Sequence
  Description of Artificial Sequence: Synthetic epitope
KQTRTLQLDE

SEQ ID NO: 23921 - protein, 10 aa, Artificial Sequence
  Description of Artificial Sequence: Synthetic epitope
KQTSDRVDKT

SEQ ID NO: 23922 - protein, 10 aa, Artificial Sequence
  Description of Artificial Sequence: Synthetic epitope
KQTSLNLKDT

SEQ ID NO: 23923 - protein, 10 aa, Artificial Sequence
  Description of Artificial Sequence: Synthetic epitope
KQTSLSVSRE

SEQ ID NO: 23924 - protein, 10 aa, Artificial Sequence
  Description of Artificial Sequence: Synthetic epitope
KQTSVASANQ

SEQ ID NO: 23925 - protein, 10 aa, Artificial Sequence
  Description of Artificial Sequence: Synthetic epitope
KQTVRQVQET

SEQ ID NO: 23926 - protein, 10 aa, Artificial Sequence
  Description of Artificial Sequence: Synthetic epitope
KQTVVAVKKE

SEQ ID NO: 23927 - protein, 10 aa, Artificial Sequence
  Description of Artificial Sequence: Synthetic epitope
KQVAALSKGK

SEQ ID NO: 23928 - protein, 10 aa, Artificial Sequence
  Description of Artificial Sequence: Synthetic epitope
KQVADQPYVQ

SEQ ID NO: 23929 - protein, 10 aa, Artificial Sequence
  Description of Artificial Sequence: Synthetic epitope
KQVAGTMKLE

SEQ ID NO: 23930 - protein, 10 aa, Artificial Sequence
  Description of Artificial Sequence: Synthetic epitope
KQVASEMRFV

SEQ ID NO: 23931 - protein, 10 aa, Artificial Sequence
  Description of Artificial Sequence: Synthetic epitope
KQVEKVLRKS

SEQ ID NO: 23932 - protein, 10 aa, Artificial Sequence
  Description of Artificial Sequence: Synthetic epitope
KQVEQKSSAT

SEQ ID NO: 23933 - protein, 10 aa, Artificial Sequence
  Description of Artificial Sequence: Synthetic epitope
KQVFTRKLEE

SEQ ID NO: 23934 - protein, 10 aa, Artificial Sequence
  Description of Artificial Sequence: Synthetic epitope
KQVGVSLNRI

SEQ ID NO: 23935 - protein, 10 aa, Artificial Sequence
  Description of Artificial Sequence: Synthetic epitope
KQVISTSSDA

SEQ ID NO: 23936 - protein, 10 aa, Artificial Sequence
  Description of Artificial Sequence: Synthetic epitope
KQVKENKTQP

SEQ ID NO: 23937 - protein, 10 aa, Artificial Sequence
  Description of Artificial Sequence: Synthetic epitope
KQVKIDQIED

SEQ ID NO: 23938 - protein, 10 aa, Artificial Sequence
  Description of Artificial Sequence: Synthetic epitope
KQVKSTGEAL

SEQ ID NO: 23939 - protein, 10 aa, Artificial Sequence
  Description of Artificial Sequence: Synthetic epitope
KQVLKDSSAA

SEQ ID NO: 23940 - protein, 10 aa, Artificial Sequence
  Description of Artificial Sequence: Synthetic epitope
KQVLTIMEKS

SEQ ID NO: 23941 - protein, 10 aa, Artificial Sequence
  Description of Artificial Sequence: Synthetic epitope
KQVNDAVSKG

SEQ ID NO: 23942 - protein, 10 aa, Artificial Sequence
  Description of Artificial Sequence: Synthetic epitope
KQVNVVAKAM

SEQ ID NO: 23943 - protein, 10 aa, Artificial Sequence
  Description of Artificial Sequence: Synthetic epitope
KQVQLKTSIS

SEQ ID NO: 23944 - protein, 10 aa, Artificial Sequence
  Description of Artificial Sequence: Synthetic epitope
KQVQNKPKTG

SEQ ID NO: 23945 - protein, 10 aa, Artificial Sequence
  Description of Artificial Sequence: Synthetic epitope
KQVSVLRQNQ

SEQ ID NO: 23946 - protein, 10 aa, Artificial Sequence
  Description of Artificial Sequence: Synthetic epitope
KQVTITETLW

SEQ ID NO: 23947 - protein, 10 aa, Artificial Sequence
  Description of Artificial Sequence: Synthetic epitope
KQVTSASLEK

SEQ ID NO: 23948 - protein, 10 aa, Artificial Sequence
  Description of Artificial Sequence: Synthetic epitope
KQVTSTLFQP

SEQ ID NO: 23949 - protein, 10 aa, Artificial Sequence
  Description of Artificial Sequence: Synthetic epitope
KQVVAEAQTR

SEQ ID NO: 23950 - protein, 10 aa, Artificial Sequence
  Description of Artificial Sequence: Synthetic epitope
KQVVNQVWEA

SEQ ID NO: 23951 - protein, 10 aa, Artificial Sequence
  Description of Artificial Sequence: Synthetic epitope
KQVVSKALQQ

SEQ ID NO: 23952 - protein, 10 aa, Artificial Sequence
  Description of Artificial Sequence: Synthetic epitope
KQWILRAQSH

SEQ ID NO: 23953 - protein, 10 aa, Artificial Sequence
  Description of Artificial Sequence: Synthetic epitope
KQWTGAQMTG

SEQ ID NO: 23954 - protein, 10 aa, Artificial Sequence
  Description of Artificial Sequence: Synthetic epitope
KQWVQEKPNG

SEQ ID NO: 23955 - protein, 10 aa, Artificial Sequence
  Description of Artificial Sequence: Synthetic epitope
KQYAQADEMD

SEQ ID NO: 23956 - protein, 10 aa, Artificial Sequence
  Description of Artificial Sequence: Synthetic epitope
KQYAVQSQLP

SEQ ID NO: 23957 - protein, 10 aa, Artificial Sequence
  Description of Artificial Sequence: Synthetic epitope
KQYLPTKRVR

SEQ ID NO: 23958 - protein, 10 aa, Artificial Sequence
  Description of Artificial Sequence: Synthetic epitope
KQYMSGSAVD

SEQ ID NO: 23959 - protein, 10 aa, Artificial Sequence
  Description of Artificial Sequence: Synthetic epitope
KQYREAAQTA

SEQ ID NO: 23960 - protein, 10 aa, Artificial Sequence
  Description of Artificial Sequence: Synthetic epitope
KRAADEVLAE

SEQ ID NO: 23961 - protein, 10 aa, Artificial Sequence
  Description of Artificial Sequence: Synthetic epitope
KRAARAEARE

SEQ ID NO: 23962 - protein, 10 aa, Artificial Sequence
  Description of Artificial Sequence: Synthetic epitope
KRAEALQSIA

SEQ ID NO: 23963 - protein, 10 aa, Artificial Sequence
  Description of Artificial Sequence: Synthetic epitope
KRAEGAIAGF

SEQ ID NO: 23964 - protein, 10 aa, Artificial Sequence
  Description of Artificial Sequence: Synthetic epitope
KRAEQSLQAA

SEQ ID NO: 23965 - protein, 10 aa, Artificial Sequence
  Description of Artificial Sequence: Synthetic epitope
KRAESLSRSR

SEQ ID NO: 23966 - protein, 10 aa, Artificial Sequence
  Description of Artificial Sequence: Synthetic epitope
KRAFQKSASV

SEQ ID NO: 23967 - protein, 10 aa, Artificial Sequence
  Description of Artificial Sequence: Synthetic epitope
KRAILITQKG

SEQ ID NO: 23968 - protein, 10 aa, Artificial Sequence
  Description of Artificial Sequence: Synthetic epitope
KRAINKSKPY

SEQ ID NO: 23969 - protein, 10 aa, Artificial Sequence
  Description of Artificial Sequence: Synthetic epitope
KRAKAELAKE

SEQ ID NO: 23970 - protein, 10 aa, Artificial Sequence
  Description of Artificial Sequence: Synthetic epitope
KRAKAERSGG

SEQ ID NO: 23971 - protein, 10 aa, Artificial Sequence
  Description of Artificial Sequence: Synthetic epitope
KRAKALAGQS

SEQ ID NO: 23972 - protein, 10 aa, Artificial Sequence
  Description of Artificial Sequence: Synthetic epitope
KRAKLKEEAQ

SEQ ID NO: 23973 - protein, 10 aa, Artificial Sequence
  Description of Artificial Sequence: Synthetic epitope
KRALEIAQNN

SEQ ID NO: 23974 - protein, 10 aa, Artificial Sequence
  Description of Artificial Sequence: Synthetic epitope
KRALEKNESS

SEQ ID NO: 23975 - protein, 10 aa, Artificial Sequence
  Description of Artificial Sequence: Synthetic epitope
KRALLAANEE

SEQ ID NO: 23976 - protein, 10 aa, Artificial Sequence
  Description of Artificial Sequence: Synthetic epitope
KRALNSVAYE

SEQ ID NO: 23977 - protein, 10 aa, Artificial Sequence
  Description of Artificial Sequence: Synthetic epitope
KRALRARALA

SEQ ID NO: 23978 - protein, 10 aa, Artificial Sequence
  Description of Artificial Sequence: Synthetic epitope
KRALSELTQG

SEQ ID NO: 23979 - protein, 10 aa, Artificial Sequence
  Description of Artificial Sequence: Synthetic epitope
KRALTLTVVS

SEQ ID NO: 23980 - protein, 10 aa, Artificial Sequence
  Description of Artificial Sequence: Synthetic epitope
KRANKVYHAG

SEQ ID NO: 23981 - protein, 10 aa, Artificial Sequence
  Description of Artificial Sequence: Synthetic epitope
KRANYLAPFD

SEQ ID NO: 23982 - protein, 10 aa, Artificial Sequence
  Description of Artificial Sequence: Synthetic epitope
KRAQKDKGLH

SEQ ID NO: 23983 - protein, 10 aa, Artificial Sequence
  Description of Artificial Sequence: Synthetic epitope
KRAQQETKST

SEQ ID NO: 23984 - protein, 10 aa, Artificial Sequence
  Description of Artificial Sequence: Synthetic epitope
KRARKASSDL

SEQ ID NO: 23985 - protein, 10 aa, Artificial Sequence
  Description of Artificial Sequence: Synthetic epitope
KRASASARLL

SEQ ID NO: 23986 - protein, 10 aa, Artificial Sequence
  Description of Artificial Sequence: Synthetic epitope
KRASELHQRD

SEQ ID NO: 23987 - protein, 10 aa, Artificial Sequence
  Description of Artificial Sequence: Synthetic epitope
KRASGLRIND

SEQ ID NO: 23988 - protein, 10 aa, Artificial Sequence
  Description of Artificial Sequence: Synthetic epitope
KRASLGVASQ

SEQ ID NO: 23989 - protein, 10 aa, Artificial Sequence
  Description of Artificial Sequence: Synthetic epitope
KRASLQASTA

SEQ ID NO: 23990 - protein, 10 aa, Artificial Sequence
  Description of Artificial Sequence: Synthetic epitope
KRASNNLQHS

SEQ ID NO: 23991 - protein, 10 aa, Artificial Sequence
  Description of Artificial Sequence: Synthetic epitope
KRASSDLSIA

SEQ ID NO: 23992 - protein, 10 aa, Artificial Sequence
  Description of Artificial Sequence: Synthetic epitope
KRATDVMIAG

SEQ ID NO: 23993 - protein, 10 aa, Artificial Sequence
  Description of Artificial Sequence: Synthetic epitope
KRATKPMIEA

SEQ ID NO: 23994 - protein, 10 aa, Artificial Sequence
  Description of Artificial Sequence: Synthetic epitope
KRATVLESEG

SEQ ID NO: 23995 - protein, 10 aa, Artificial Sequence
  Description of Artificial Sequence: Synthetic epitope
KRAVLATKTT

SEQ ID NO: 23996 - protein, 10 aa, Artificial Sequence
  Description of Artificial Sequence: Synthetic epitope
KRAVTEMLQL

SEQ ID NO: 23997 - protein, 10 aa, Artificial Sequence
  Description of Artificial Sequence: Synthetic epitope
KRDAALAVAE

SEQ ID NO: 23998 - protein, 10 aa, Artificial Sequence
  Description of Artificial Sequence: Synthetic epitope
KRDADSSIEK

SEQ ID NO: 23999 - protein, 10 aa, Artificial Sequence
  Description of Artificial Sequence: Synthetic epitope
KRDHANYEED

SEQ ID NO: 24000 - protein, 10 aa, Artificial Sequence
  Description of Artificial Sequence: Synthetic epitope
KRDILVAFKG

SEQ ID NO: 24001 - protein, 10 aa, Artificial Sequence
  Description of Artificial Sequence: Synthetic epitope
KRDWMHTGRR

SEQ ID NO: 24002 - protein, 10 aa, Artificial Sequence
  Description of Artificial Sequence: Synthetic epitope
KREAAEVTRK

SEQ ID NO: 24003 - protein, 10 aa, Artificial Sequence
  Description of Artificial Sequence: Synthetic epitope
KREAANLRHK

SEQ ID NO: 24004 - protein, 10 aa, Artificial Sequence
  Description of Artificial Sequence: Synthetic epitope
KREDDKLVVE

SEQ ID NO: 24005 - protein, 10 aa, Artificial Sequence
  Description of Artificial Sequence: Synthetic epitope
KREDIALQKK

SEQ ID NO: 24006 - protein, 10 aa, Artificial Sequence
  Description of Artificial Sequence: Synthetic epitope
KREDVFKAVQ

SEQ ID NO: 24007 - protein, 10 aa, Artificial Sequence
  Description of Artificial Sequence: Synthetic epitope
KREENTSNES

SEQ ID NO: 24008 - protein, 10 aa, Artificial Sequence
  Description of Artificial Sequence: Synthetic epitope
KREGTQLSSQ

SEQ ID NO: 24009 - protein, 10 aa, Artificial Sequence
  Description of Artificial Sequence: Synthetic epitope
KREHAQTVFD

SEQ ID NO: 24010 - protein, 10 aa, Artificial Sequence
  Description of Artificial Sequence: Synthetic epitope
KREILSLMVK

SEQ ID NO: 24011 - protein, 10 aa, Artificial Sequence
  Description of Artificial Sequence: Synthetic epitope
KREKASKING

SEQ ID NO: 24012 - protein, 10 aa, Artificial Sequence
  Description of Artificial Sequence: Synthetic epitope
KREKKIDSEE

SEQ ID NO: 24013 - protein, 10 aa, Artificial Sequence
  Description of Artificial Sequence: Synthetic epitope
KREKRVADPT

SEQ ID NO: 24014 - protein, 10 aa, Artificial Sequence
  Description of Artificial Sequence: Synthetic epitope
KREKTELSQA

SEQ ID NO: 24015 - protein, 10 aa, Artificial Sequence
  Description of Artificial Sequence: Synthetic epitope
KRELQQAVLH

SEQ ID NO: 24016 - protein, 10 aa, Artificial Sequence
  Description of Artificial Sequence: Synthetic epitope
KRENKTTSVS

SEQ ID NO: 24017 - protein, 10 aa, Artificial Sequence
  Description of Artificial Sequence: Synthetic epitope
KREQAAQKKE

SEQ ID NO: 24018 - protein, 10 aa, Artificial Sequence
  Description of Artificial Sequence: Synthetic epitope
KREQSLVSGG

SEQ ID NO: 24019 - protein, 10 aa, Artificial Sequence
  Description of Artificial Sequence: Synthetic epitope
KRERSRSHDS

SEQ ID NO: 24020 - protein, 10 aa, Artificial Sequence
  Description of Artificial Sequence: Synthetic epitope
KRESKISLQP

SEQ ID NO: 24021 - protein, 10 aa, Artificial Sequence
  Description of Artificial Sequence: Synthetic epitope
KRESKSRSRS

SEQ ID NO: 24022 - protein, 10 aa, Artificial Sequence
  Description of Artificial Sequence: Synthetic epitope
KRESQSVEEA

SEQ ID NO: 24023 - protein, 10 aa, Artificial Sequence
  Description of Artificial Sequence: Synthetic epitope
KRESQVSGLT

SEQ ID NO: 24024 - protein, 10 aa, Artificial Sequence
  Description of Artificial Sequence: Synthetic epitope
KRETEASSIN

SEQ ID NO: 24025 - protein, 10 aa, Artificial Sequence
  Description of Artificial Sequence: Synthetic epitope
KRETMRPSSR

SEQ ID NO: 24026 - protein, 10 aa, Artificial Sequence
  Description of Artificial Sequence: Synthetic epitope
KREVKKEVNE

SEQ ID NO: 24027 - protein, 10 aa, Artificial Sequence
  Description of Artificial Sequence: Synthetic epitope
KREVRTSDSS

SEQ ID NO: 24028 - protein, 10 aa, Artificial Sequence
  Description of Artificial Sequence: Synthetic epitope
KRFEKQKEVI

SEQ ID NO: 24029 - protein, 10 aa, Artificial Sequence
  Description of Artificial Sequence: Synthetic epitope
KRFETTAVNT

SEQ ID NO: 24030 - protein, 10 aa, Artificial Sequence
  Description of Artificial Sequence: Synthetic epitope
KRFILHAKKT

SEQ ID NO: 24031 - protein, 10 aa, Artificial Sequence
  Description of Artificial Sequence: Synthetic epitope
KRFKDATEVG

SEQ ID NO: 24032 - protein, 10 aa, Artificial Sequence
  Description of Artificial Sequence: Synthetic epitope
KRFKMDRQGV

SEQ ID NO: 24033 - protein, 10 aa, Artificial Sequence
  Description of Artificial Sequence: Synthetic epitope
KRFREPKHER

SEQ ID NO: 24034 - protein, 10 aa, Artificial Sequence
  Description of Artificial Sequence: Synthetic epitope
KRFTPDIPTM

SEQ ID NO: 24035 - protein, 10 aa, Artificial Sequence
  Description of Artificial Sequence: Synthetic epitope
KRFTTKKVIP

SEQ ID NO: 24036 - protein, 10 aa, Artificial Sequence
  Description of Artificial Sequence: Synthetic epitope
KRGHDERISR

SEQ ID NO: 24037 - protein, 10 aa, Artificial Sequence
  Description of Artificial Sequence: Synthetic epitope
KRGKLTARER

SEQ ID NO: 24038 - protein, 10 aa, Artificial Sequence
  Description of Artificial Sequence: Synthetic epitope
KRGQKATLLQ

SEQ ID NO: 24039 - protein, 10 aa, Artificial Sequence
  Description of Artificial Sequence: Synthetic epitope
KRGRLVLSSR

SEQ ID NO: 24040 - protein, 10 aa, Artificial Sequence
  Description of Artificial Sequence: Synthetic epitope
KRGTTESKEV

SEQ ID NO: 24041 - protein, 10 aa, Artificial Sequence
  Description of Artificial Sequence: Synthetic epitope
KRGVFNVQME

SEQ ID NO: 24042 - protein, 10 aa, Artificial Sequence
  Description of Artificial Sequence: Synthetic epitope
KRGVQSYKSK

SEQ ID NO: 24043 - protein, 10 aa, Artificial Sequence
  Description of Artificial Sequence: Synthetic epitope
KRGVSMSSLS

SEQ ID NO: 24044 - protein, 10 aa, Artificial Sequence
  Description of Artificial Sequence: Synthetic epitope
KRHLALFRSE

SEQ ID NO: 24045 - protein, 10 aa, Artificial Sequence
  Description of Artificial Sequence: Synthetic epitope
KRHQKALVRE

SEQ ID NO: 24046 - protein, 10 aa, Artificial Sequence
  Description of Artificial Sequence: Synthetic epitope
KRHRLFNHTA

SEQ ID NO: 24047 - protein, 10 aa, Artificial Sequence
  Description of Artificial Sequence: Synthetic epitope
KRHSSTSGEE

SEQ ID NO: 24048 - protein, 10 aa, Artificial Sequence
  Description of Artificial Sequence: Synthetic epitope
KRHTHRKQRR

SEQ ID NO: 24049 - protein, 10 aa, Artificial Sequence
  Description of Artificial Sequence: Synthetic epitope
KRIAKVSAEA

SEQ ID NO: 24050 - protein, 10 aa, Artificial Sequence
  Description of Artificial Sequence: Synthetic epitope
KRIENAKILI

SEQ ID NO: 24051 - protein, 10 aa, Artificial Sequence
  Description of Artificial Sequence: Synthetic epitope
KRIERAVEEK

SEQ ID NO: 24052 - protein, 10 aa, Artificial Sequence
  Description of Artificial Sequence: Synthetic epitope
KRIKKSKMIA

SEQ ID NO: 24053 - protein, 10 aa, Artificial Sequence
  Description of Artificial Sequence: Synthetic epitope
KRIKVLTADS

SEQ ID NO: 24054 - protein, 10 aa, Artificial Sequence
  Description of Artificial Sequence: Synthetic epitope
KRIQERESKK

SEQ ID NO: 24055 - protein, 10 aa, Artificial Sequence
  Description of Artificial Sequence: Synthetic epitope
KRIQSLASSR

SEQ ID NO: 24056 - protein, 10 aa, Artificial Sequence
  Description of Artificial Sequence: Synthetic epitope
KRIRKSHKRP

SEQ ID NO: 24057 - protein, 10 aa, Artificial Sequence
  Description of Artificial Sequence: Synthetic epitope
KRISAVKTNS

SEQ ID NO: 24058 - protein, 10 aa, Artificial Sequence
  Description of Artificial Sequence: Synthetic epitope
KRISLVEAGV

SEQ ID NO: 24059 - protein, 10 aa, Artificial Sequence
  Description of Artificial Sequence: Synthetic epitope
KRIVATAKAS

SEQ ID NO: 24060 - protein, 10 aa, Artificial Sequence
  Description of Artificial Sequence: Synthetic epitope
KRIVQALNAN

SEQ ID NO: 24061 - protein, 10 aa, Artificial Sequence
  Description of Artificial Sequence: Synthetic epitope
KRKAAQNSGE

SEQ ID NO: 24062 - protein, 10 aa, Artificial Sequence
  Description of Artificial Sequence: Synthetic epitope
KRKAMEAAQL

SEQ ID NO: 24063 - protein, 10 aa, Artificial Sequence
  Description of Artificial Sequence: Synthetic epitope
KRKANSTKRD

SEQ ID NO: 24064 - protein, 10 aa, Artificial Sequence
  Description of Artificial Sequence: Synthetic epitope
KRKASMGMLR

SEQ ID NO: 24065 - protein, 10 aa, Artificial Sequence
  Description of Artificial Sequence: Synthetic epitope
KRKDVGDLML

SEQ ID NO: 24066 - protein, 10 aa, Artificial Sequence
  Description of Artificial Sequence: Synthetic epitope
KRKEAKRGDK

SEQ ID NO: 24067 - protein, 10 aa, Artificial Sequence
  Description of Artificial Sequence: Synthetic epitope
KRKFAVEAHQ

SEQ ID NO: 24068 - protein, 10 aa, Artificial Sequence
  Description of Artificial Sequence: Synthetic epitope
KRKGAAKLQD

SEQ ID NO: 24069 - protein, 10 aa, Artificial Sequence
  Description of Artificial Sequence: Synthetic epitope
KRKGDKVKAS

SEQ ID NO: 24070 - protein, 10 aa, Artificial Sequence
  Description of Artificial Sequence: Synthetic epitope
KRKKDPSKGR

SEQ ID NO: 24071 - protein, 10 aa, Artificial Sequence
  Description of Artificial Sequence: Synthetic epitope
KRKKQLSEAK

SEQ ID NO: 24072 - protein, 10 aa, Artificial Sequence
  Description of Artificial Sequence: Synthetic epitope
KRKKQTLKIG

SEQ ID NO: 24073 - protein, 10 aa, Artificial Sequence
  Description of Artificial Sequence: Synthetic epitope
KRKLETLDLD

SEQ ID NO: 24074 - protein, 10 aa, Artificial Sequence
  Description of Artificial Sequence: Synthetic epitope
KRKLKIMIHQ

SEQ ID NO: 24075 - protein, 10 aa, Artificial Sequence
  Description of Artificial Sequence: Synthetic epitope
KRKLSKRAEG

SEQ ID NO: 24076 - protein, 10 aa, Artificial Sequence
  Description of Artificial Sequence: Synthetic epitope
KRKLTSSTSN

SEQ ID NO: 24077 - protein, 10 aa, Artificial Sequence
  Description of Artificial Sequence: Synthetic epitope
KRKMRSKKED

SEQ ID NO: 24078 - protein, 10 aa, Artificial Sequence
  Description of Artificial Sequence: Synthetic epitope
KRKNAELAVI

SEQ ID NO: 24079 - protein, 10 aa, Artificial Sequence
  Description of Artificial Sequence: Synthetic epitope
KRKNSAVKSK

SEQ ID NO: 24080 - protein, 10 aa, Artificial Sequence
  Description of Artificial Sequence: Synthetic epitope
KRKNVLKEAY

SEQ ID NO: 24081 - protein, 10 aa, Artificial Sequence
  Description of Artificial Sequence: Synthetic epitope
KRKQKSVKNH

SEQ ID NO: 24082 - protein, 10 aa, Artificial Sequence
  Description of Artificial Sequence: Synthetic epitope
KRKRITGRKR

SEQ ID NO: 24083 - protein, 10 aa, Artificial Sequence
  Description of Artificial Sequence: Synthetic epitope
KRKRLTASKS

SEQ ID NO: 24084 - protein, 10 aa, Artificial Sequence
  Description of Artificial Sequence: Synthetic epitope
KRKSDAAKEH

SEQ ID NO: 24085 - protein, 10 aa, Artificial Sequence
  Description of Artificial Sequence: Synthetic epitope
KRKSSKLIME

SEQ ID NO: 24086 - protein, 10 aa, Artificial Sequence
  Description of Artificial Sequence: Synthetic epitope
KRKSWARFKD

SEQ ID NO: 24087 - protein, 10 aa, Artificial Sequence
  Description of Artificial Sequence: Synthetic epitope
KRKTKVQKDE

SEQ ID NO: 24088 - protein, 10 aa, Artificial Sequence
  Description of Artificial Sequence: Synthetic epitope
KRKVSDVKVP

SEQ ID NO: 24089 - protein, 10 aa, Artificial Sequence
  Description of Artificial Sequence: Synthetic epitope
KRLAANDLQG

SEQ ID NO: 24090 - protein, 10 aa, Artificial Sequence
  Description of Artificial Sequence: Synthetic epitope
KRLAEKDLDE

SEQ ID NO: 24091 - protein, 10 aa, Artificial Sequence
  Description of Artificial Sequence: Synthetic epitope
KRLALDSEAA

SEQ ID NO: 24092 - protein, 10 aa, Artificial Sequence
  Description of Artificial Sequence: Synthetic epitope
KRLAQVKLLN

SEQ ID NO: 24093 - protein, 10 aa, Artificial Sequence
  Description of Artificial Sequence: Synthetic epitope
KRLARAAEAW

SEQ ID NO: 24094 - protein, 10 aa, Artificial Sequence
  Description of Artificial Sequence: Synthetic epitope
KRLATVAPMS

SEQ ID NO: 24095 - protein, 10 aa, Artificial Sequence
  Description of Artificial Sequence: Synthetic epitope
KRLDTLEFKQ

SEQ ID NO: 24096 - protein, 10 aa, Artificial Sequence
  Description of Artificial Sequence: Synthetic epitope
KRLERIKSSR

SEQ ID NO: 24097 - protein, 10 aa, Artificial Sequence
  Description of Artificial Sequence: Synthetic epitope
KRLESASKNT

SEQ ID NO: 24098 - protein, 10 aa, Artificial Sequence
  Description of Artificial Sequence: Synthetic epitope
KRLFKIQNLN

SEQ ID NO: 24099 - protein, 10 aa, Artificial Sequence
  Description of Artificial Sequence: Synthetic epitope
KRLGKLLSES

SEQ ID NO: 24100 - protein, 10 aa, Artificial Sequence
  Description of Artificial Sequence: Synthetic epitope
KRLGKQNARF

SEQ ID NO: 24101 - protein, 10 aa, Artificial Sequence
  Description of Artificial Sequence: Synthetic epitope
KRLIALSVRY

SEQ ID NO: 24102 - protein, 10 aa, Artificial Sequence
  Description of Artificial Sequence: Synthetic epitope
KRLIEKSKTR

SEQ ID NO: 24103 - protein, 10 aa, Artificial Sequence
  Description of Artificial Sequence: Synthetic epitope
KRLISKALEE

SEQ ID NO: 24104 - protein, 10 aa, Artificial Sequence
  Description of Artificial Sequence: Synthetic epitope
KRLKAQKEDD

SEQ ID NO: 24105 - protein, 10 aa, Artificial Sequence
  Description of Artificial Sequence: Synthetic epitope
KRLKAVSKQA

SEQ ID NO: 24106 - protein, 10 aa, Artificial Sequence
  Description of Artificial Sequence: Synthetic epitope
KRLKEESLKG

SEQ ID NO: 24107 - protein, 10 aa, Artificial Sequence
  Description of Artificial Sequence: Synthetic epitope
KRLKNTLTQT

SEQ ID NO: 24108 - protein, 10 aa, Artificial Sequence
  Description of Artificial Sequence: Synthetic epitope
KRLLALTSSD

SEQ ID NO: 24109 - protein, 10 aa, Artificial Sequence
  Description of Artificial Sequence: Synthetic epitope
KRLLASTASS

SEQ ID NO: 24110 - protein, 10 aa, Artificial Sequence
  Description of Artificial Sequence: Synthetic epitope
KRLLSLKEKG

SEQ ID NO: 24111 - protein, 10 aa, Artificial Sequence
  Description of Artificial Sequence: Synthetic epitope
KRLLSLKEKG

SEQ ID NO: 24112 - protein, 10 aa, Artificial Sequence
  Description of Artificial Sequence: Synthetic epitope
KRLSELLTES

SEQ ID NO: 24113 - protein, 10 aa, Artificial Sequence
  Description of Artificial Sequence: Synthetic epitope
KRLTELETAV

SEQ ID NO: 24114 - protein, 10 aa, Artificial Sequence
  Description of Artificial Sequence: Synthetic epitope
KRLTESKSTV

SEQ ID NO: 24115 - protein, 10 aa, Artificial Sequence
  Description of Artificial Sequence: Synthetic epitope
KRLVEDILSS

SEQ ID NO: 24116 - protein, 10 aa, Artificial Sequence
  Description of Artificial Sequence: Synthetic epitope
KRLVKSESSE

SEQ ID NO: 24117 - protein, 10 aa, Artificial Sequence
  Description of Artificial Sequence: Synthetic epitope
KRLVYLNEAW

SEQ ID NO: 24118 - protein, 10 aa, Artificial Sequence
  Description of Artificial Sequence: Synthetic epitope
KRLYRNLSEK

SEQ ID NO: 24119 - protein, 10 aa, Artificial Sequence
  Description of Artificial Sequence: Synthetic epitope
KRMISKLEAQ

SEQ ID NO: 24120 - protein, 10 aa, Artificial Sequence
  Description of Artificial Sequence: Synthetic epitope
KRMKALMTMM

SEQ ID NO: 24121 - protein, 10 aa, Artificial Sequence
  Description of Artificial Sequence: Synthetic epitope
KRMKPLMMDR

SEQ ID NO: 24122 - protein, 10 aa, Artificial Sequence
  Description of Artificial Sequence: Synthetic epitope
KRMPVAEAPQ

SEQ ID NO: 24123 - protein, 10 aa, Artificial Sequence
  Description of Artificial Sequence: Synthetic epitope
KRMQEIEEME

SEQ ID NO: 24124 - protein, 10 aa, Artificial Sequence
  Description of Artificial Sequence: Synthetic epitope
KRMQKAAKIK

SEQ ID NO: 24125 - protein, 10 aa, Artificial Sequence
  Description of Artificial Sequence: Synthetic epitope
KRMQPVITEQ

SEQ ID NO: 24126 - protein, 10 aa, Artificial Sequence
  Description of Artificial Sequence: Synthetic epitope
KRMRESAMQK

SEQ ID NO: 24127 - protein, 10 aa, Artificial Sequence
  Description of Artificial Sequence: Synthetic epitope
KRMVELKEMV

SEQ ID NO: 24128 - protein, 10 aa, Artificial Sequence
  Description of Artificial Sequence: Synthetic epitope
KRNAILHRNE

SEQ ID NO: 24129 - protein, 10 aa, Artificial Sequence
  Description of Artificial Sequence: Synthetic epitope
KRNDKQPALQ

SEQ ID NO: 24130 - protein, 10 aa, Artificial Sequence
  Description of Artificial Sequence: Synthetic epitope
KRNEEFSLQK

SEQ ID NO: 24131 - protein, 10 aa, Artificial Sequence
  Description of Artificial Sequence: Synthetic epitope
KRNFRNKSEE

SEQ ID NO: 24132 - protein, 10 aa, Artificial Sequence
  Description of Artificial Sequence: Synthetic epitope
KRNKETRLTK

SEQ ID NO: 24133 - protein, 10 aa, Artificial Sequence
  Description of Artificial Sequence: Synthetic epitope
KRNKSSVRHT

SEQ ID NO: 24134 - protein, 10 aa, Artificial Sequence
  Description of Artificial Sequence: Synthetic epitope
KRNKSVSNME

SEQ ID NO: 24135 - protein, 10 aa, Artificial Sequence
  Description of Artificial Sequence: Synthetic epitope
KRNKTGKHDV

SEQ ID NO: 24136 - protein, 10 aa, Artificial Sequence
  Description of Artificial Sequence: Synthetic epitope
KRNLDKSKVL

SEQ ID NO: 24137 - protein, 10 aa, Artificial Sequence
  Description of Artificial Sequence: Synthetic epitope
KRNLKRKEKR

SEQ ID NO: 24138 - protein, 10 aa, Artificial Sequence
  Description of Artificial Sequence: Synthetic epitope
KRNLSSEFAN

SEQ ID NO: 24139 - protein, 10 aa, Artificial Sequence
  Description of Artificial Sequence: Synthetic epitope
KRNMKLIESK

SEQ ID NO: 24140 - protein, 10 aa, Artificial Sequence
  Description of Artificial Sequence: Synthetic epitope
KRNNSRLMDE

SEQ ID NO: 24141 - protein, 10 aa, Artificial Sequence
  Description of Artificial Sequence: Synthetic epitope
KRNRERNIEA

SEQ ID NO: 24142 - protein, 10 aa, Artificial Sequence
  Description of Artificial Sequence: Synthetic epitope
KRNSELLTVE

SEQ ID NO: 24143 - protein, 10 aa, Artificial Sequence
  Description of Artificial Sequence: Synthetic epitope
KRNSERKTPE

SEQ ID NO: 24144 - protein, 10 aa, Artificial Sequence
  Description of Artificial Sequence: Synthetic epitope
KRNTDVPESQ

SEQ ID NO: 24145 - protein, 10 aa, Artificial Sequence
  Description of Artificial Sequence: Synthetic epitope
KRNTKANGSS

SEQ ID NO: 24146 - protein, 10 aa, Artificial Sequence
  Description of Artificial Sequence: Synthetic epitope
KRNWSNAGKY

SEQ ID NO: 24147 - protein, 10 aa, Artificial Sequence
  Description of Artificial Sequence: Synthetic epitope
KRPFSESKQT

SEQ ID NO: 24148 - protein, 10 aa, Artificial Sequence
  Description of Artificial Sequence: Synthetic epitope
KRPGAVLEAG

SEQ ID NO: 24149 - protein, 10 aa, Artificial Sequence
  Description of Artificial Sequence: Synthetic epitope
KRPKTVRHKS

SEQ ID NO: 24150 - protein, 10 aa, Artificial Sequence
  Description of Artificial Sequence: Synthetic epitope
KRPRSSNAET

SEQ ID NO: 24151 - protein, 10 aa, Artificial Sequence
  Description of Artificial Sequence: Synthetic epitope
KRPSQEEDTQ

SEQ ID NO: 24152 - protein, 10 aa, Artificial Sequence
  Description of Artificial Sequence: Synthetic epitope
KRPSQLSRKN

SEQ ID NO: 24153 - protein, 10 aa, Artificial Sequence
  Description of Artificial Sequence: Synthetic epitope
KRPTRISTSN

SEQ ID NO: 24154 - protein, 10 aa, Artificial Sequence
  Description of Artificial Sequence: Synthetic epitope
KRPVSIAKKS

SEQ ID NO: 24155 - protein, 10 aa, Artificial Sequence
  Description of Artificial Sequence: Synthetic epitope
KRQANKKSEG

SEQ ID NO: 24156 - protein, 10 aa, Artificial Sequence
  Description of Artificial Sequence: Synthetic epitope
KRQASRAFSL

SEQ ID NO: 24157 - protein, 10 aa, Artificial Sequence
  Description of Artificial Sequence: Synthetic epitope
KRQISLVDEL

SEQ ID NO: 24158 - protein, 10 aa, Artificial Sequence
  Description of Artificial Sequence: Synthetic epitope
KRQISTERYE

SEQ ID NO: 24159 - protein, 10 aa, Artificial Sequence
  Description of Artificial Sequence: Synthetic epitope
KRQKERKRQE

SEQ ID NO: 24160 - protein, 10 aa, Artificial Sequence
  Description of Artificial Sequence: Synthetic epitope
KRQKSKSSQS

SEQ ID NO: 24161 - protein, 10 aa, Artificial Sequence
  Description of Artificial Sequence: Synthetic epitope
KRQKTGRFAT

SEQ ID NO: 24162 - protein, 10 aa, Artificial Sequence
  Description of Artificial Sequence: Synthetic epitope
KRQLEIAQGQ

SEQ ID NO: 24163 - protein, 10 aa, Artificial Sequence
  Description of Artificial Sequence: Synthetic epitope
KRQLSLDALW

SEQ ID NO: 24164 - protein, 10 aa, Artificial Sequence
  Description of Artificial Sequence: Synthetic epitope
KRQLTKQQKS

SEQ ID NO: 24165 - protein, 10 aa, Artificial Sequence
  Description of Artificial Sequence: Synthetic epitope
KRQNKESGET

SEQ ID NO: 24166 - protein, 10 aa, Artificial Sequence
  Description of Artificial Sequence: Synthetic epitope
KRQNSKSKKG

SEQ ID NO: 24167 - protein, 10 aa, Artificial Sequence
  Description of Artificial Sequence: Synthetic epitope
KRQNVELKAE

SEQ ID NO: 24168 - protein, 10 aa, Artificial Sequence
  Description of Artificial Sequence: Synthetic epitope
KRQQVRSISA

SEQ ID NO: 24169 - protein, 10 aa, Artificial Sequence
  Description of Artificial Sequence: Synthetic epitope
KRQSDLRAER

SEQ ID NO: 24170 - protein, 10 aa, Artificial Sequence
  Description of Artificial Sequence: Synthetic epitope
KRQSLKQMTP

SEQ ID NO: 24171 - protein, 10 aa, Artificial Sequence
  Description of Artificial Sequence: Synthetic epitope
KRQSSESDIE

SEQ ID NO: 24172 - protein, 10 aa, Artificial Sequence
  Description of Artificial Sequence: Synthetic epitope
KRQVSVSISS

SEQ ID NO: 24173 - protein, 10 aa, Artificial Sequence
  Description of Artificial Sequence: Synthetic epitope
KRQYVFPVSQ

SEQ ID NO: 24174 - protein, 10 aa, Artificial Sequence
  Description of Artificial Sequence: Synthetic epitope
KRRATSASRS

SEQ ID NO: 24175 - protein, 10 aa, Artificial Sequence
  Description of Artificial Sequence: Synthetic epitope
KRRIMQQWAS

SEQ ID NO: 24176 - protein, 10 aa, Artificial Sequence
  Description of Artificial Sequence: Synthetic epitope
KRRKKNQSDH

SEQ ID NO: 24177 - protein, 10 aa, Artificial Sequence
  Description of Artificial Sequence: Synthetic epitope
KRRKVTRKEP

SEQ ID NO: 24178 - protein, 10 aa, Artificial Sequence
  Description of Artificial Sequence: Synthetic epitope
KRRLKSESVE

SEQ ID NO: 24179 - protein, 10 aa, Artificial Sequence
  Description of Artificial Sequence: Synthetic epitope
KRRLPTIQSS

SEQ ID NO: 24180 - protein, 10 aa, Artificial Sequence
  Description of Artificial Sequence: Synthetic epitope
KRRLRSSGKK

SEQ ID NO: 24181 - protein, 10 aa, Artificial Sequence
  Description of Artificial Sequence: Synthetic epitope
KRRLSSRSRS

SEQ ID NO: 24182 - protein, 10 aa, Artificial Sequence
  Description of Artificial Sequence: Synthetic epitope
KRRLTEVADF

SEQ ID NO: 24183 - protein, 10 aa, Artificial Sequence
  Description of Artificial Sequence: Synthetic epitope
KRRNNMMDKM

SEQ ID NO: 24184 - protein, 10 aa, Artificial Sequence
  Description of Artificial Sequence: Synthetic epitope
KRRPLKSSLG

SEQ ID NO: 24185 - protein, 10 aa, Artificial Sequence
  Description of Artificial Sequence: Synthetic epitope
KRRPRISKQK

SEQ ID NO: 24186 - protein, 10 aa, Artificial Sequence
  Description of Artificial Sequence: Synthetic epitope
KRRQARRTAV

SEQ ID NO: 24187 - protein, 10 aa, Artificial Sequence
  Description of Artificial Sequence: Synthetic epitope
KRRQSQEKID

SEQ ID NO: 24188 - protein, 10 aa, Artificial Sequence
  Description of Artificial Sequence: Synthetic epitope
KRRSETNAET

SEQ ID NO: 24189 - protein, 10 aa, Artificial Sequence
  Description of Artificial Sequence: Synthetic epitope
KRRSRLRNSS

SEQ ID NO: 24190 - protein, 10 aa, Artificial Sequence
  Description of Artificial Sequence: Synthetic epitope
KRRSRSRSGS

SEQ ID NO: 24191 - protein, 10 aa, Artificial Sequence
  Description of Artificial Sequence: Synthetic epitope
KRRSSLSPPS

SEQ ID NO: 24192 - protein, 10 aa, Artificial Sequence
  Description of Artificial Sequence: Synthetic epitope
KRSADLQTNG

SEQ ID NO: 24193 - protein, 10 aa, Artificial Sequence
  Description of Artificial Sequence: Synthetic epitope
KRSAEDIYKI

SEQ ID NO: 24194 - protein, 10 aa, Artificial Sequence
  Description of Artificial Sequence: Synthetic epitope
KRSAEKTDSS

SEQ ID NO: 24195 - protein, 10 aa, Artificial Sequence
  Description of Artificial Sequence: Synthetic epitope
KRSAIEDNKY

SEQ ID NO: 24196 - protein, 10 aa, Artificial Sequence
  Description of Artificial Sequence: Synthetic epitope
KRSDQKVQMT

SEQ ID NO: 24197 - protein, 10 aa, Artificial Sequence
  Description of Artificial Sequence: Synthetic epitope
KRSENINHNS

SEQ ID NO: 24198 - protein, 10 aa, Artificial Sequence
  Description of Artificial Sequence: Synthetic epitope
KRSFSLDIKS

SEQ ID NO: 24199 - protein, 10 aa, Artificial Sequence
  Description of Artificial Sequence: Synthetic epitope
KRSISKRKSH

SEQ ID NO: 24200 - protein, 10 aa, Artificial Sequence
  Description of Artificial Sequence: Synthetic epitope
KRSKKSTPVS

SEQ ID NO: 24201 - protein, 10 aa, Artificial Sequence
  Description of Artificial Sequence: Synthetic epitope
KRSKMATSVV

SEQ ID NO: 24202 - protein, 10 aa, Artificial Sequence
  Description of Artificial Sequence: Synthetic epitope
KRSLEQARME

SEQ ID NO: 24203 - protein, 10 aa, Artificial Sequence
  Description of Artificial Sequence: Synthetic epitope
KRSLSSINKK

SEQ ID NO: 24204 - protein, 10 aa, Artificial Sequence
  Description of Artificial Sequence: Synthetic epitope
KRSPSVSRDQ

SEQ ID NO: 24205 - protein, 10 aa, Artificial Sequence
  Description of Artificial Sequence: Synthetic epitope
KRSRPYKAKR

SEQ ID NO: 24206 - protein, 10 aa, Artificial Sequence
  Description of Artificial Sequence: Synthetic epitope
KRSSFLSVPH

SEQ ID NO: 24207 - protein, 10 aa, Artificial Sequence
  Description of Artificial Sequence: Synthetic epitope
KRSSFLSVPH

SEQ ID NO: 24208 - protein, 10 aa, Artificial Sequence
  Description of Artificial Sequence: Synthetic epitope
KRSSNSSAVN

SEQ ID NO: 24209 - protein, 10 aa, Artificial Sequence
  Description of Artificial Sequence: Synthetic epitope
KRSSRRQATV

SEQ ID NO: 24210 - protein, 10 aa, Artificial Sequence
  Description of Artificial Sequence: Synthetic epitope
KRSVQKKELN

SEQ ID NO: 24211 - protein, 10 aa, Artificial Sequence
  Description of Artificial Sequence: Synthetic epitope
KRTASTDLKQ

SEQ ID NO: 24212 - protein, 10 aa, Artificial Sequence
  Description of Artificial Sequence: Synthetic epitope
KRTESIAVQA

SEQ ID NO: 24213 - protein, 10 aa, Artificial Sequence
  Description of Artificial Sequence: Synthetic epitope
KRTGDAISVM

SEQ ID NO: 24214 - protein, 10 aa, Artificial Sequence
  Description of Artificial Sequence: Synthetic epitope
KRTGGLSSTK

SEQ ID NO: 24215 - protein, 10 aa, Artificial Sequence
  Description of Artificial Sequence: Synthetic epitope
KRTHQMSSAY

SEQ ID NO: 24216 - protein, 10 aa, Artificial Sequence
  Description of Artificial Sequence: Synthetic epitope
KRTINALLKP

SEQ ID NO: 24217 - protein, 10 aa, Artificial Sequence
  Description of Artificial Sequence: Synthetic epitope
KRTKASMSEF

SEQ ID NO: 24218 - protein, 10 aa, Artificial Sequence
  Description of Artificial Sequence: Synthetic epitope
KRTKSVSSMS

SEQ ID NO: 24219 - protein, 10 aa, Artificial Sequence
  Description of Artificial Sequence: Synthetic epitope
KRTKYDNLHL

SEQ ID NO: 24220 - protein, 10 aa, Artificial Sequence
  Description of Artificial Sequence: Synthetic epitope
KRTNEIVEEQ

SEQ ID NO: 24221 - protein, 10 aa, Artificial Sequence
  Description of Artificial Sequence: Synthetic epitope
KRTPRSESVE

SEQ ID NO: 24222 - protein, 10 aa, Artificial Sequence
  Description of Artificial Sequence: Synthetic epitope
KRTQESKEYK

SEQ ID NO: 24223 - protein, 10 aa, Artificial Sequence
  Description of Artificial Sequence: Synthetic epitope
KRTQRIQDEI

SEQ ID NO: 24224 - protein, 10 aa, Artificial Sequence
  Description of Artificial Sequence: Synthetic epitope
KRTRIDEIAS

SEQ ID NO: 24225 - protein, 10 aa, Artificial Sequence
  Description of Artificial Sequence: Synthetic epitope
KRTRRSINSA

SEQ ID NO: 24226 - protein, 10 aa, Artificial Sequence
  Description of Artificial Sequence: Synthetic epitope
KRTSEATKMH

SEQ ID NO: 24227 - protein, 10 aa, Artificial Sequence
  Description of Artificial Sequence: Synthetic epitope
KRTSKTNPKK

SEQ ID NO: 24228 - protein, 10 aa, Artificial Sequence
  Description of Artificial Sequence: Synthetic epitope
KRTSRSDGFR

SEQ ID NO: 24229 - protein, 10 aa, Artificial Sequence
  Description of Artificial Sequence: Synthetic epitope
KRTSSIADEG

SEQ ID NO: 24230 - protein, 10 aa, Artificial Sequence
  Description of Artificial Sequence: Synthetic epitope
KRTTINTEDV

SEQ ID NO: 24231 - protein, 10 aa, Artificial Sequence
  Description of Artificial Sequence: Synthetic epitope
KRTTMLKIAT

SEQ ID NO: 24232 - protein, 10 aa, Artificial Sequence
  Description of Artificial Sequence: Synthetic epitope
KRTTRKEQTA

SEQ ID NO: 24233 - protein, 10 aa, Artificial Sequence
  Description of Artificial Sequence: Synthetic epitope
KRTTRSASRK

SEQ ID NO: 24234 - protein, 10 aa, Artificial Sequence
  Description of Artificial Sequence: Synthetic epitope
KRTVESMSAP

SEQ ID NO: 24235 - protein, 10 aa, Artificial Sequence
  Description of Artificial Sequence: Synthetic epitope
KRTVLSRAAD

SEQ ID NO: 24236 - protein, 10 aa, Artificial Sequence
  Description of Artificial Sequence: Synthetic epitope
KRTVLTESGS

SEQ ID NO: 24237 - protein, 10 aa, Artificial Sequence
  Description of Artificial Sequence: Synthetic epitope
KRTVSIMNNS

SEQ ID NO: 24238 - protein, 10 aa, Artificial Sequence
  Description of Artificial Sequence: Synthetic epitope
KRTYSGVSQD

SEQ ID NO: 24239 - protein, 10 aa, Artificial Sequence
  Description of Artificial Sequence: Synthetic epitope
KRVAEEQLVE

SEQ ID NO: 24240 - protein, 10 aa, Artificial Sequence
  Description of Artificial Sequence: Synthetic epitope
KRVAIQFLKD

SEQ ID NO: 24241 - protein, 10 aa, Artificial Sequence
  Description of Artificial Sequence: Synthetic epitope
KRVDRLDQRR

SEQ ID NO: 24242 - protein, 10 aa, Artificial Sequence
  Description of Artificial Sequence: Synthetic epitope
KRVDRLDQRR

SEQ ID NO: 24243 - protein, 10 aa, Artificial Sequence
  Description of Artificial Sequence: Synthetic epitope
KRVEERSERE

SEQ ID NO: 24244 - protein, 10 aa, Artificial Sequence
  Description of Artificial Sequence: Synthetic epitope
KRVETNQDWS

SEQ ID NO: 24245 - protein, 10 aa, Artificial Sequence
  Description of Artificial Sequence: Synthetic epitope
KRVFKEESSE

SEQ ID NO: 24246 - protein, 10 aa, Artificial Sequence
  Description of Artificial Sequence: Synthetic epitope
KRVGAETNGS

SEQ ID NO: 24247 - protein, 10 aa, Artificial Sequence
  Description of Artificial Sequence: Synthetic epitope
KRVKAKLEGR

SEQ ID NO: 24248 - protein, 10 aa, Artificial Sequence
  Description of Artificial Sequence: Synthetic epitope
KRVKLISNKG

SEQ ID NO: 24249 - protein, 10 aa, Artificial Sequence
  Description of Artificial Sequence: Synthetic epitope
KRVKSLSKSR

SEQ ID NO: 24250 - protein, 10 aa, Artificial Sequence
  Description of Artificial Sequence: Synthetic epitope
KRVKSLVVQH

SEQ ID NO: 24251 - protein, 10 aa, Artificial Sequence
  Description of Artificial Sequence: Synthetic epitope
KRVLEMRKKA

SEQ ID NO: 24252 - protein, 10 aa, Artificial Sequence
  Description of Artificial Sequence: Synthetic epitope
KRVLSGATLP

SEQ ID NO: 24253 - protein, 10 aa, Artificial Sequence
  Description of Artificial Sequence: Synthetic epitope
KRVLSKLQSP

SEQ ID NO: 24254 - protein, 10 aa, Artificial Sequence
  Description of Artificial Sequence: Synthetic epitope
KRVNRPQASA

SEQ ID NO: 24255 - protein, 10 aa, Artificial Sequence
  Description of Artificial Sequence: Synthetic epitope
KRVRPSRDAG

SEQ ID NO: 24256 - protein, 10 aa, Artificial Sequence
  Description of Artificial Sequence: Synthetic epitope
KRVSHGQIKQ

SEQ ID NO: 24257 - protein, 10 aa, Artificial Sequence
  Description of Artificial Sequence: Synthetic epitope
KRVSVLELSS

SEQ ID NO: 24258 - protein, 10 aa, Artificial Sequence
  Description of Artificial Sequence: Synthetic epitope
KRVTESRESQ

SEQ ID NO: 24259 - protein, 10 aa, Artificial Sequence
  Description of Artificial Sequence: Synthetic epitope
KRVTNNAEKE

SEQ ID NO: 24260 - protein, 10 aa, Artificial Sequence
  Description of Artificial Sequence: Synthetic epitope
KRVVRVFQSG

SEQ ID NO: 24261 - protein, 10 aa, Artificial Sequence
  Description of Artificial Sequence: Synthetic epitope
KRWAAELDGR

SEQ ID NO: 24262 - protein, 10 aa, Artificial Sequence
  Description of Artificial Sequence: Synthetic epitope
KRWESEIPDK

SEQ ID NO: 24263 - protein, 10 aa, Artificial Sequence
  Description of Artificial Sequence: Synthetic epitope
KRWMGDWHSQ

SEQ ID NO: 24264 - protein, 10 aa, Artificial Sequence
  Description of Artificial Sequence: Synthetic epitope
KRWQATLDKH

SEQ ID NO: 24265 - protein, 10 aa, Artificial Sequence
  Description of Artificial Sequence: Synthetic epitope
KRYETLEVDV

SEQ ID NO: 24266 - protein, 10 aa, Artificial Sequence
  Description of Artificial Sequence: Synthetic epitope
KRYNKVKLEQ

SEQ ID NO: 24267 - protein, 10 aa, Artificial Sequence
  Description of Artificial Sequence: Synthetic epitope
KRYQSSALTV

SEQ ID NO: 24268 - protein, 10 aa, Artificial Sequence
  Description of Artificial Sequence: Synthetic epitope
KRYRQSMNNF

SEQ ID NO: 24269 - protein, 10 aa, Artificial Sequence
  Description of Artificial Sequence: Synthetic epitope
KSAADDSEAK

SEQ ID NO: 24270 - protein, 10 aa, Artificial Sequence
  Description of Artificial Sequence: Synthetic epitope
KSAAELEKLM

SEQ ID NO: 24271 - protein, 10 aa, Artificial Sequence
  Description of Artificial Sequence: Synthetic epitope
KSAAENLKNN

SEQ ID NO: 24272 - protein, 10 aa, Artificial Sequence
  Description of Artificial Sequence: Synthetic epitope
KSAAKAVKPK

SEQ ID NO: 24273 - protein, 10 aa, Artificial Sequence
  Description of Artificial Sequence: Synthetic epitope
KSAAKVIADA

SEQ ID NO: 24274 - protein, 10 aa, Artificial Sequence
  Description of Artificial Sequence: Synthetic epitope
KSAAQALASD

SEQ ID NO: 24275 - protein, 10 aa, Artificial Sequence
  Description of Artificial Sequence: Synthetic epitope
KSAASIEGYY

SEQ ID NO: 24276 - protein, 10 aa, Artificial Sequence
  Description of Artificial Sequence: Synthetic epitope
KSAATKVTTV

SEQ ID NO: 24277 - protein, 10 aa, Artificial Sequence
  Description of Artificial Sequence: Synthetic epitope
KSADKVTDKT

SEQ ID NO: 24278 - protein, 10 aa, Artificial Sequence
  Description of Artificial Sequence: Synthetic epitope
KSAEAEKEMA

SEQ ID NO: 24279 - protein, 10 aa, Artificial Sequence
  Description of Artificial Sequence: Synthetic epitope
KSAEEINSEA

SEQ ID NO: 24280 - protein, 10 aa, Artificial Sequence
  Description of Artificial Sequence: Synthetic epitope
KSAEHKRTQY

SEQ ID NO: 24281 - protein, 10 aa, Artificial Sequence
  Description of Artificial Sequence: Synthetic epitope
KSAEKISTQR

SEQ ID NO: 24282 - protein, 10 aa, Artificial Sequence
  Description of Artificial Sequence: Synthetic epitope
KSAESIGESR

SEQ ID NO: 24283 - protein, 10 aa, Artificial Sequence
  Description of Artificial Sequence: Synthetic epitope
KSAETNIDQD

SEQ ID NO: 24284 - protein, 10 aa, Artificial Sequence
  Description of Artificial Sequence: Synthetic epitope
KSAEVQGMKV

SEQ ID NO: 24285 - protein, 10 aa, Artificial Sequence
  Description of Artificial Sequence: Synthetic epitope
KSAFESEVSE

SEQ ID NO: 24286 - protein, 10 aa, Artificial Sequence
  Description of Artificial Sequence: Synthetic epitope
KSAFPAQSKS

SEQ ID NO: 24287 - protein, 10 aa, Artificial Sequence
  Description of Artificial Sequence: Synthetic epitope
KSAFTQGSAM

SEQ ID NO: 24288 - protein, 10 aa, Artificial Sequence
  Description of Artificial Sequence: Synthetic epitope
KSAGASIIEA

SEQ ID NO: 24289 - protein, 10 aa, Artificial Sequence
  Description of Artificial Sequence: Synthetic epitope
KSAIAKQAAD

SEQ ID NO: 24290 - protein, 10 aa, Artificial Sequence
  Description of Artificial Sequence: Synthetic epitope
KSAIDISILQ

SEQ ID NO: 24291 - protein, 10 aa, Artificial Sequence
  Description of Artificial Sequence: Synthetic epitope
KSAIEKAMIS

SEQ ID NO: 24292 - protein, 10 aa, Artificial Sequence
  Description of Artificial Sequence: Synthetic epitope
KSAIEQAMKM

SEQ ID NO: 24293 - protein, 10 aa, Artificial Sequence
  Description of Artificial Sequence: Synthetic epitope
KSAILSAQSA

SEQ ID NO: 24294 - protein, 10 aa, Artificial Sequence
  Description of Artificial Sequence: Synthetic epitope
KSALGKATTL

SEQ ID NO: 24295 - protein, 10 aa, Artificial Sequence
  Description of Artificial Sequence: Synthetic epitope
KSALGLELSN

SEQ ID NO: 24296 - protein, 10 aa, Artificial Sequence
  Description of Artificial Sequence: Synthetic epitope
KSALHRRADK

SEQ ID NO: 24297 - protein, 10 aa, Artificial Sequence
  Description of Artificial Sequence: Synthetic epitope
KSAMSTIDLD

SEQ ID NO: 24298 - protein, 10 aa, Artificial Sequence
  Description of Artificial Sequence: Synthetic epitope
KSANMKLTDL

SEQ ID NO: 24299 - protein, 10 aa, Artificial Sequence
  Description of Artificial Sequence: Synthetic epitope
KSAQKAQKAG

SEQ ID NO: 24300 - protein, 10 aa, Artificial Sequence
  Description of Artificial Sequence: Synthetic epitope
KSAQMIVETE

SEQ ID NO: 24301 - protein, 10 aa, Artificial Sequence
  Description of Artificial Sequence: Synthetic epitope
KSARAAIRLE

SEQ ID NO: 24302 - protein, 10 aa, Artificial Sequence
  Description of Artificial Sequence: Synthetic epitope
KSARTRKENK

SEQ ID NO: 24303 - protein, 10 aa, Artificial Sequence
  Description of Artificial Sequence: Synthetic epitope
KSASDDQSDQ

SEQ ID NO: 24304 - protein, 10 aa, Artificial Sequence
  Description of Artificial Sequence: Synthetic epitope
KSASFSVKSQ

SEQ ID NO: 24305 - protein, 10 aa, Artificial Sequence
  Description of Artificial Sequence: Synthetic epitope
KSASGYLTDE

SEQ ID NO: 24306 - protein, 10 aa, Artificial Sequence
  Description of Artificial Sequence: Synthetic epitope
KSASVTASSE

SEQ ID NO: 24307 - protein, 10 aa, Artificial Sequence
  Description of Artificial Sequence: Synthetic epitope
KSATGSVVST

SEQ ID NO: 24308 - protein, 10 aa, Artificial Sequence
  Description of Artificial Sequence: Synthetic epitope
KSATIVADLS

SEQ ID NO: 24309 - protein, 10 aa, Artificial Sequence
  Description of Artificial Sequence: Synthetic epitope
KSATLASIDA

SEQ ID NO: 24310 - protein, 10 aa, Artificial Sequence
  Description of Artificial Sequence: Synthetic epitope
KSATLAYRWD

SEQ ID NO: 24311 - protein, 10 aa, Artificial Sequence
  Description of Artificial Sequence: Synthetic epitope
KSATLSSTES

SEQ ID NO: 24312 - protein, 10 aa, Artificial Sequence
  Description of Artificial Sequence: Synthetic epitope
KSATQFTGRY

SEQ ID NO: 24313 - protein, 10 aa, Artificial Sequence
  Description of Artificial Sequence: Synthetic epitope
KSATVIPEIE

SEQ ID NO: 24314 - protein, 10 aa, Artificial Sequence
  Description of Artificial Sequence: Synthetic epitope
KSAVEKKLAE

SEQ ID NO: 24315 - protein, 10 aa, Artificial Sequence
  Description of Artificial Sequence: Synthetic epitope
KSAVNVASIQ

SEQ ID NO: 24316 - protein, 10 aa, Artificial Sequence
  Description of Artificial Sequence: Synthetic epitope
KSAVSDKQDR

SEQ ID NO: 24317 - protein, 10 aa, Artificial Sequence
  Description of Artificial Sequence: Synthetic epitope
KSAWQTLNEF

SEQ ID NO: 24318 - protein, 10 aa, Artificial Sequence
  Description of Artificial Sequence: Synthetic epitope
KSAYAVSLLR

SEQ ID NO: 24319 - protein, 10 aa, Artificial Sequence
  Description of Artificial Sequence: Synthetic epitope
KSDAASKVMV

SEQ ID NO: 24320 - protein, 10 aa, Artificial Sequence
  Description of Artificial Sequence: Synthetic epitope
KSDASQKQLS

SEQ ID NO: 24321 - protein, 10 aa, Artificial Sequence
  Description of Artificial Sequence: Synthetic epitope
KSDAVEMDEM

SEQ ID NO: 24322 - protein, 10 aa, Artificial Sequence
  Description of Artificial Sequence: Synthetic epitope
KSDDKHMHDH

SEQ ID NO: 24323 - protein, 10 aa, Artificial Sequence
  Description of Artificial Sequence: Synthetic epitope
KSDDKNTVNL

SEQ ID NO: 24324 - protein, 10 aa, Artificial Sequence
  Description of Artificial Sequence: Synthetic epitope
KSDDRPNALL

SEQ ID NO: 24325 - protein, 10 aa, Artificial Sequence
  Description of Artificial Sequence: Synthetic epitope
KSDEKASVVS

SEQ ID NO: 24326 - protein, 10 aa, Artificial Sequence
  Description of Artificial Sequence: Synthetic epitope
KSDEVDEQVA

SEQ ID NO: 24327 - protein, 10 aa, Artificial Sequence
  Description of Artificial Sequence: Synthetic epitope
KSDFAAQKLS

SEQ ID NO: 24328 - protein, 10 aa, Artificial Sequence
  Description of Artificial Sequence: Synthetic epitope
KSDKDSTSTR

SEQ ID NO: 24329 - protein, 10 aa, Artificial Sequence
  Description of Artificial Sequence: Synthetic epitope
KSDNEEVREA

SEQ ID NO: 24330 - protein, 10 aa, Artificial Sequence
  Description of Artificial Sequence: Synthetic epitope
KSDNIDGKAS

SEQ ID NO: 24331 - protein, 10 aa, Artificial Sequence
  Description of Artificial Sequence: Synthetic epitope
KSDQSLPNAS

SEQ ID NO: 24332 - protein, 10 aa, Artificial Sequence
  Description of Artificial Sequence: Synthetic epitope
KSDRNDSEDP

SEQ ID NO: 24333 - protein, 10 aa, Artificial Sequence
  Description of Artificial Sequence: Synthetic epitope
KSDRQAAGKI

SEQ ID NO: 24334 - protein, 10 aa, Artificial Sequence
  Description of Artificial Sequence: Synthetic epitope
KSDSKAGAAN

SEQ ID NO: 24335 - protein, 10 aa, Artificial Sequence
  Description of Artificial Sequence: Synthetic epitope
KSDSSAKAET

SEQ ID NO: 24336 - protein, 10 aa, Artificial Sequence
  Description of Artificial Sequence: Synthetic epitope
KSDSSTSAAP

SEQ ID NO: 24337 - protein, 10 aa, Artificial Sequence
  Description of Artificial Sequence: Synthetic epitope
KSDVTSILSE

SEQ ID NO: 24338 - protein, 10 aa, Artificial Sequence
  Description of Artificial Sequence: Synthetic epitope
KSEAEDLAEP

SEQ ID NO: 24339 - protein, 10 aa, Artificial Sequence
  Description of Artificial Sequence: Synthetic epitope
KSEAKEQSND

SEQ ID NO: 24340 - protein, 10 aa, Artificial Sequence
  Description of Artificial Sequence: Synthetic epitope
KSEAKLSRKQ

SEQ ID NO: 24341 - protein, 10 aa, Artificial Sequence
  Description of Artificial Sequence: Synthetic epitope
KSEAKVQLKG

SEQ ID NO: 24342 - protein, 10 aa, Artificial Sequence
  Description of Artificial Sequence: Synthetic epitope
KSEAQVLNPE

SEQ ID NO: 24343 - protein, 10 aa, Artificial Sequence
  Description of Artificial Sequence: Synthetic epitope
KSEASKRVKS

SEQ ID NO: 24344 - protein, 10 aa, Artificial Sequence
  Description of Artificial Sequence: Synthetic epitope
KSEDQKALLS

SEQ ID NO: 24345 - protein, 10 aa, Artificial Sequence
  Description of Artificial Sequence: Synthetic epitope
KSEDRLSEQD

SEQ ID NO: 24346 - protein, 10 aa, Artificial Sequence
  Description of Artificial Sequence: Synthetic epitope
KSEEGNVHDG

SEQ ID NO: 24347 - protein, 10 aa, Artificial Sequence
  Description of Artificial Sequence: Synthetic epitope
KSEEMLKERQ

SEQ ID NO: 24348 - protein, 10 aa, Artificial Sequence
  Description of Artificial Sequence: Synthetic epitope
KSEEQAMKAE

SEQ ID NO: 24349 - protein, 10 aa, Artificial Sequence
  Description of Artificial Sequence: Synthetic epitope
KSEESEATSW

SEQ ID NO: 24350 - protein, 10 aa, Artificial Sequence
  Description of Artificial Sequence: Synthetic epitope
KSEESENRQM

SEQ ID NO: 24351 - protein, 10 aa, Artificial Sequence
  Description of Artificial Sequence: Synthetic epitope
KSEESVSPKK

SEQ ID NO: 24352 - protein, 10 aa, Artificial Sequence
  Description of Artificial Sequence: Synthetic epitope
KSEGEASEEG

SEQ ID NO: 24353 - protein, 10 aa, Artificial Sequence
  Description of Artificial Sequence: Synthetic epitope
KSEGGLEVEV

SEQ ID NO: 24354 - protein, 10 aa, Artificial Sequence
  Description of Artificial Sequence: Synthetic epitope
KSEGSMSTDK

SEQ ID NO: 24355 - protein, 10 aa, Artificial Sequence
  Description of Artificial Sequence: Synthetic epitope
KSEHIRLEKE

SEQ ID NO: 24356 - protein, 10 aa, Artificial Sequence
  Description of Artificial Sequence: Synthetic epitope
KSEIGSSMSE

SEQ ID NO: 24357 - protein, 10 aa, Artificial Sequence
  Description of Artificial Sequence: Synthetic epitope
KSEIHNEKEK

SEQ ID NO: 24358 - protein, 10 aa, Artificial Sequence
  Description of Artificial Sequence: Synthetic epitope
KSEILSKKQN

SEQ ID NO: 24359 - protein, 10 aa, Artificial Sequence
  Description of Artificial Sequence: Synthetic epitope
KSEISRFEDT

SEQ ID NO: 24360 - protein, 10 aa, Artificial Sequence
  Description of Artificial Sequence: Synthetic epitope
KSELSESADL

SEQ ID NO: 24361 - protein, 10 aa, Artificial Sequence
  Description of Artificial Sequence: Synthetic epitope
KSELTAGSTW

SEQ ID NO: 24362 - protein, 10 aa, Artificial Sequence
  Description of Artificial Sequence: Synthetic epitope
KSELVAMLEE

SEQ ID NO: 24363 - protein, 10 aa, Artificial Sequence
  Description of Artificial Sequence: Synthetic epitope
KSEMAQIQQN

SEQ ID NO: 24364 - protein, 10 aa, Artificial Sequence
  Description of Artificial Sequence: Synthetic epitope
KSENQPPKAQ

SEQ ID NO: 24365 - protein, 10 aa, Artificial Sequence
  Description of Artificial Sequence: Synthetic epitope
KSEPPSEENE

SEQ ID NO: 24366 - protein, 10 aa, Artificial Sequence
  Description of Artificial Sequence: Synthetic epitope
KSEQEKTLLE

SEQ ID NO: 24367 - protein, 10 aa, Artificial Sequence
  Description of Artificial Sequence: Synthetic epitope
KSEQLVLHTA

SEQ ID NO: 24368 - protein, 10 aa, Artificial Sequence
  Description of Artificial Sequence: Synthetic epitope
KSEQQLSAES

SEQ ID NO: 24369 - protein, 10 aa, Artificial Sequence
  Description of Artificial Sequence: Synthetic epitope
KSEQQLSAES

SEQ ID NO: 24370 - protein, 10 aa, Artificial Sequence
  Description of Artificial Sequence: Synthetic epitope
KSEQTEASTR

SEQ ID NO: 24371 - protein, 10 aa, Artificial Sequence
  Description of Artificial Sequence: Synthetic epitope
KSERHFSSRR

SEQ ID NO: 24372 - protein, 10 aa, Artificial Sequence
  Description of Artificial Sequence: Synthetic epitope
KSESDKDVKQ

SEQ ID NO: 24373 - protein, 10 aa, Artificial Sequence
  Description of Artificial Sequence: Synthetic epitope
KSESQSLPKK

SEQ ID NO: 24374 - protein, 10 aa, Artificial Sequence
  Description of Artificial Sequence: Synthetic epitope
KSESRTIGEQ

SEQ ID NO: 24375 - protein, 10 aa, Artificial Sequence
  Description of Artificial Sequence: Synthetic epitope
KSESSDESDT

SEQ ID NO: 24376 - protein, 10 aa, Artificial Sequence
  Description of Artificial Sequence: Synthetic epitope
KSEVEMVIKT

SEQ ID NO: 24377 - protein, 10 aa, Artificial Sequence
  Description of Artificial Sequence: Synthetic epitope
KSFARSKAIH

SEQ ID NO: 24378 - protein, 10 aa, Artificial Sequence
  Description of Artificial Sequence: Synthetic epitope
KSFASASRLS

SEQ ID NO: 24379 - protein, 10 aa, Artificial Sequence
  Description of Artificial Sequence: Synthetic epitope
KSFATKANVR

SEQ ID NO: 24380 - protein, 10 aa, Artificial Sequence
  Description of Artificial Sequence: Synthetic epitope
KSFEAARKRN

SEQ ID NO: 24381 - protein, 10 aa, Artificial Sequence
  Description of Artificial Sequence: Synthetic epitope
KSFELLSESD

SEQ ID NO: 24382 - protein, 10 aa, Artificial Sequence
  Description of Artificial Sequence: Synthetic epitope
KSFEQAASAS

SEQ ID NO: 24383 - protein, 10 aa, Artificial Sequence
  Description of Artificial Sequence: Synthetic epitope
KSFETAVAPN

SEQ ID NO: 24384 - protein, 10 aa, Artificial Sequence
  Description of Artificial Sequence: Synthetic epitope
KSFKKAKNEN

SEQ ID NO: 24385 - protein, 10 aa, Artificial Sequence
  Description of Artificial Sequence: Synthetic epitope
KSFKNAIQDK

SEQ ID NO: 24386 - protein, 10 aa, Artificial Sequence
  Description of Artificial Sequence: Synthetic epitope
KSFKTIGVKI

SEQ ID NO: 24387 - protein, 10 aa, Artificial Sequence
  Description of Artificial Sequence: Synthetic epitope
KSFMETEVKP

SEQ ID NO: 24388 - protein, 10 aa, Artificial Sequence
  Description of Artificial Sequence: Synthetic epitope
KSFMKEFQSD

SEQ ID NO: 24389 - protein, 10 aa, Artificial Sequence
  Description of Artificial Sequence: Synthetic epitope
KSFNMQRKLV

SEQ ID NO: 24390 - protein, 10 aa, Artificial Sequence
  Description of Artificial Sequence: Synthetic epitope
KSFSDATAPT

SEQ ID NO: 24391 - protein, 10 aa, Artificial Sequence
  Description of Artificial Sequence: Synthetic epitope
KSFTPKTKTK

SEQ ID NO: 24392 - protein, 10 aa, Artificial Sequence
  Description of Artificial Sequence: Synthetic epitope
KSFTQIQATF

SEQ ID NO: 24393 - protein, 10 aa, Artificial Sequence
  Description of Artificial Sequence: Synthetic epitope
KSFTVDIRAK

SEQ ID NO: 24394 - protein, 10 aa, Artificial Sequence
  Description of Artificial Sequence: Synthetic epitope
KSGAASLGEE

SEQ ID NO: 24395 - protein, 10 aa, Artificial Sequence
  Description of Artificial Sequence: Synthetic epitope
KSGAKLDAAG

SEQ ID NO: 24396 - protein, 10 aa, Artificial Sequence
  Description of Artificial Sequence: Synthetic epitope
KSGALKQSSD

SEQ ID NO: 24397 - protein, 10 aa, Artificial Sequence
  Description of Artificial Sequence: Synthetic epitope
KSGESKSSAM

SEQ ID NO: 24398 - protein, 10 aa, Artificial Sequence
  Description of Artificial Sequence: Synthetic epitope
KSGESSANQG

SEQ ID NO: 24399 - protein, 10 aa, Artificial Sequence
  Description of Artificial Sequence: Synthetic epitope
KSGETTSTHN

SEQ ID NO: 24400 - protein, 10 aa, Artificial Sequence
  Description of Artificial Sequence: Synthetic epitope
KSGGEMLKVG

SEQ ID NO: 24401 - protein, 10 aa, Artificial Sequence
  Description of Artificial Sequence: Synthetic epitope
KSGGRGTSTV

SEQ ID NO: 24402 - protein, 10 aa, Artificial Sequence
  Description of Artificial Sequence: Synthetic epitope
KSGIEAIATP

SEQ ID NO: 24403 - protein, 10 aa, Artificial Sequence
  Description of Artificial Sequence: Synthetic epitope
KSGIRMSEAF

SEQ ID NO: 24404 - protein, 10 aa, Artificial Sequence
  Description of Artificial Sequence: Synthetic epitope
KSGKEKTQPS

SEQ ID NO: 24405 - protein, 10 aa, Artificial Sequence
  Description of Artificial Sequence: Synthetic epitope
KSGKQYSIEA

SEQ ID NO: 24406 - protein, 10 aa, Artificial Sequence
  Description of Artificial Sequence: Synthetic epitope
KSGKTNSVES

SEQ ID NO: 24407 - protein, 10 aa, Artificial Sequence
  Description of Artificial Sequence: Synthetic epitope
KSGLLEITLK

SEQ ID NO: 24408 - protein, 10 aa, Artificial Sequence
  Description of Artificial Sequence: Synthetic epitope
KSGLSLAMVI

SEQ ID NO: 24409 - protein, 10 aa, Artificial Sequence
  Description of Artificial Sequence: Synthetic epitope
KSGNLEDRSD

SEQ ID NO: 24410 - protein, 10 aa, Artificial Sequence
  Description of Artificial Sequence: Synthetic epitope
KSGNWESSEG

SEQ ID NO: 24411 - protein, 10 aa, Artificial Sequence
  Description of Artificial Sequence: Synthetic epitope
KSGPKLMDFT

SEQ ID NO: 24412 - protein, 10 aa, Artificial Sequence
  Description of Artificial Sequence: Synthetic epitope
KSGQDVSQAQ

SEQ ID NO: 24413 - protein, 10 aa, Artificial Sequence
  Description of Artificial Sequence: Synthetic epitope
KSGQDVSQAQ

SEQ ID NO: 24414 - protein, 10 aa, Artificial Sequence
  Description of Artificial Sequence: Synthetic epitope
KSGQDVSQAQ

SEQ ID NO: 24415 - protein, 10 aa, Artificial Sequence
  Description of Artificial Sequence: Synthetic epitope
KSGQTALIEK

SEQ ID NO: 24416 - protein, 10 aa, Artificial Sequence
  Description of Artificial Sequence: Synthetic epitope
KSGRLSKELD

SEQ ID NO: 24417 - protein, 10 aa, Artificial Sequence
  Description of Artificial Sequence: Synthetic epitope
KSGRYKSYSP

SEQ ID NO: 24418 - protein, 10 aa, Artificial Sequence
  Description of Artificial Sequence: Synthetic epitope
KSGSAGKKAK

SEQ ID NO: 24419 - protein, 10 aa, Artificial Sequence
  Description of Artificial Sequence: Synthetic epitope
KSGSLKKRKQ

SEQ ID NO: 24420 - protein, 10 aa, Artificial Sequence
  Description of Artificial Sequence: Synthetic epitope
KSGTPMQSAA

SEQ ID NO: 24421 - protein, 10 aa, Artificial Sequence
  Description of Artificial Sequence: Synthetic epitope
KSGTVTVAQQ

SEQ ID NO: 24422 - protein, 10 aa, Artificial Sequence
  Description of Artificial Sequence: Synthetic epitope
KSHEANSNAV

SEQ ID NO: 24423 - protein, 10 aa, Artificial Sequence
  Description of Artificial Sequence: Synthetic epitope
KSHENEIRYH

SEQ ID NO: 24424 - protein, 10 aa, Artificial Sequence
  Description of Artificial Sequence: Synthetic epitope
KSHKSAVEYN

SEQ ID NO: 24425 - protein, 10 aa, Artificial Sequence
  Description of Artificial Sequence: Synthetic epitope
KSHKTKIRES

SEQ ID NO: 24426 - protein, 10 aa, Artificial Sequence
  Description of Artificial Sequence: Synthetic epitope
KSHKTRNQDE

SEQ ID NO: 24427 - protein, 10 aa, Artificial Sequence
  Description of Artificial Sequence: Synthetic epitope
KSHLKEIQSA

SEQ ID NO: 24428 - protein, 10 aa, Artificial Sequence
  Description of Artificial Sequence: Synthetic epitope
KSHLKSQTAE

SEQ ID NO: 24429 - protein, 10 aa, Artificial Sequence
  Description of Artificial Sequence: Synthetic epitope
KSHSKEDLIK

SEQ ID NO: 24430 - protein, 10 aa, Artificial Sequence
  Description of Artificial Sequence: Synthetic epitope
KSHSQSYSRG

SEQ ID NO: 24431 - protein, 10 aa, Artificial Sequence
  Description of Artificial Sequence: Synthetic epitope
KSHSRAASAL

SEQ ID NO: 24432 - protein, 10 aa, Artificial Sequence
  Description of Artificial Sequence: Synthetic epitope
KSHSSYRATQ

SEQ ID NO: 24433 - protein, 10 aa, Artificial Sequence
  Description of Artificial Sequence: Synthetic epitope
KSHTQSQSQH

SEQ ID NO: 24434 - protein, 10 aa, Artificial Sequence
  Description of Artificial Sequence: Synthetic epitope
KSHTSRSVRH

SEQ ID NO: 24435 - protein, 10 aa, Artificial Sequence
  Description of Artificial Sequence: Synthetic epitope
KSHVKMGKVK

SEQ ID NO: 24436 - protein, 10 aa, Artificial Sequence
  Description of Artificial Sequence: Synthetic epitope
KSIAEQKRFP

SEQ ID NO: 24437 - protein, 10 aa, Artificial Sequence
  Description of Artificial Sequence: Synthetic epitope
KSIANLIERR

SEQ ID NO: 24438 - protein, 10 aa, Artificial Sequence
  Description of Artificial Sequence: Synthetic epitope
KSIAQSGVNM

SEQ ID NO: 24439 - protein, 10 aa, Artificial Sequence
  Description of Artificial Sequence: Synthetic epitope
KSIFSKAQVE

SEQ ID NO: 24440 - protein, 10 aa, Artificial Sequence
  Description of Artificial Sequence: Synthetic epitope
KSIGELKMTQ

SEQ ID NO: 24441 - protein, 10 aa, Artificial Sequence
  Description of Artificial Sequence: Synthetic epitope
KSIGFEWNYP

SEQ ID NO: 24442 - protein, 10 aa, Artificial Sequence
  Description of Artificial Sequence: Synthetic epitope
KSIIAPGRLV

SEQ ID NO: 24443 - protein, 10 aa, Artificial Sequence
  Description of Artificial Sequence: Synthetic epitope
KSIIATKNKT

SEQ ID NO: 24444 - protein, 10 aa, Artificial Sequence
  Description of Artificial Sequence: Synthetic epitope
KSIIRVGIVK

SEQ ID NO: 24445 - protein, 10 aa, Artificial Sequence
  Description of Artificial Sequence: Synthetic epitope
KSIKDTTMFY

SEQ ID NO: 24446 - protein, 10 aa, Artificial Sequence
  Description of Artificial Sequence: Synthetic epitope
KSIKENASAG

SEQ ID NO: 24447 - protein, 10 aa, Artificial Sequence
  Description of Artificial Sequence: Synthetic epitope
KSIKLSSETE

SEQ ID NO: 24448 - protein, 10 aa, Artificial Sequence
  Description of Artificial Sequence: Synthetic epitope
KSIKTKTQMQ

SEQ ID NO: 24449 - protein, 10 aa, Artificial Sequence
  Description of Artificial Sequence: Synthetic epitope
KSILLALVEK

SEQ ID NO: 24450 - protein, 10 aa, Artificial Sequence
  Description of Artificial Sequence: Synthetic epitope
KSILNSVAST

SEQ ID NO: 24451 - protein, 10 aa, Artificial Sequence
  Description of Artificial Sequence: Synthetic epitope
KSILTSIKKE

SEQ ID NO: 24452 - protein, 10 aa, Artificial Sequence
  Description of Artificial Sequence: Synthetic epitope
KSINPMTNAQ

SEQ ID NO: 24453 - protein, 10 aa, Artificial Sequence
  Description of Artificial Sequence: Synthetic epitope
KSIPVSLDEK

SEQ ID NO: 24454 - protein, 10 aa, Artificial Sequence
  Description of Artificial Sequence: Synthetic epitope
KSIQKQNSLG

SEQ ID NO: 24455 - protein, 10 aa, Artificial Sequence
  Description of Artificial Sequence: Synthetic epitope
KSIRNSLTRR

SEQ ID NO: 24456 - protein, 10 aa, Artificial Sequence
  Description of Artificial Sequence: Synthetic epitope
KSISASALLK

SEQ ID NO: 24457 - protein, 10 aa, Artificial Sequence
  Description of Artificial Sequence: Synthetic epitope
KSISELRTSL

SEQ ID NO: 24458 - protein, 10 aa, Artificial Sequence
  Description of Artificial Sequence: Synthetic epitope
KSISGLVKSK

SEQ ID NO: 24459 - protein, 10 aa, Artificial Sequence
  Description of Artificial Sequence: Synthetic epitope
KSISGNKKDN

SEQ ID NO: 24460 - protein, 10 aa, Artificial Sequence
  Description of Artificial Sequence: Synthetic epitope
KSISIETANL

SEQ ID NO: 24461 - protein, 10 aa, Artificial Sequence
  Description of Artificial Sequence: Synthetic epitope
KSISIQRVSQ

SEQ ID NO: 24462 - protein, 10 aa, Artificial Sequence
  Description of Artificial Sequence: Synthetic epitope
KSITAKEALI

SEQ ID NO: 24463 - protein, 10 aa, Artificial Sequence
  Description of Artificial Sequence: Synthetic epitope
KSITSSADQY

SEQ ID NO: 24464 - protein, 10 aa, Artificial Sequence
  Description of Artificial Sequence: Synthetic epitope
KSITVKVETE

SEQ ID NO: 24465 - protein, 10 aa, Artificial Sequence
  Description of Artificial Sequence: Synthetic epitope
KSIVTLSMAK

SEQ ID NO: 24466 - protein, 10 aa, Artificial Sequence
  Description of Artificial Sequence: Synthetic epitope
KSKAKAIPVS

SEQ ID NO: 24467 - protein, 10 aa, Artificial Sequence
  Description of Artificial Sequence: Synthetic epitope
KSKASDKRSL

SEQ ID NO: 24468 - protein, 10 aa, Artificial Sequence
  Description of Artificial Sequence: Synthetic epitope
KSKDASTSPP

SEQ ID NO: 24469 - protein, 10 aa, Artificial Sequence
  Description of Artificial Sequence: Synthetic epitope
KSKDATTETD

SEQ ID NO: 24470 - protein, 10 aa, Artificial Sequence
  Description of Artificial Sequence: Synthetic epitope
KSKDLTAADV

SEQ ID NO: 24471 - protein, 10 aa, Artificial Sequence
  Description of Artificial Sequence: Synthetic epitope
KSKDRTTSFF

SEQ ID NO: 24472 - protein, 10 aa, Artificial Sequence
  Description of Artificial Sequence: Synthetic epitope
KSKEAHISDE

SEQ ID NO: 24473 - protein, 10 aa, Artificial Sequence
  Description of Artificial Sequence: Synthetic epitope
KSKEKENDLQ

SEQ ID NO: 24474 - protein, 10 aa, Artificial Sequence
  Description of Artificial Sequence: Synthetic epitope
KSKELSVSKK

SEQ ID NO: 24475 - protein, 10 aa, Artificial Sequence
  Description of Artificial Sequence: Synthetic epitope
KSKENAKAVA

SEQ ID NO: 24476 - protein, 10 aa, Artificial Sequence
  Description of Artificial Sequence: Synthetic epitope
KSKEQEQSSL

SEQ ID NO: 24477 - protein, 10 aa, Artificial Sequence
  Description of Artificial Sequence: Synthetic epitope
KSKEQQYKDE

SEQ ID NO: 24478 - protein, 10 aa, Artificial Sequence
  Description of Artificial Sequence: Synthetic epitope
KSKETALSHL

SEQ ID NO: 24479 - protein, 10 aa, Artificial Sequence
  Description of Artificial Sequence: Synthetic epitope
KSKETTITAE

SEQ ID NO: 24480 - protein, 10 aa, Artificial Sequence
  Description of Artificial Sequence: Synthetic epitope
KSKEVESALQ

SEQ ID NO: 24481 - protein, 10 aa, Artificial Sequence
  Description of Artificial Sequence: Synthetic epitope
KSKGASAGRE

SEQ ID NO: 24482 - protein, 10 aa, Artificial Sequence
  Description of Artificial Sequence: Synthetic epitope
KSKGIVSEEA

SEQ ID NO: 24483 - protein, 10 aa, Artificial Sequence
  Description of Artificial Sequence: Synthetic epitope
KSKHALIWAQ

SEQ ID NO: 24484 - protein, 10 aa, Artificial Sequence
  Description of Artificial Sequence: Synthetic epitope
KSKIAVPTSQ

SEQ ID NO: 24485 - protein, 10 aa, Artificial Sequence
  Description of Artificial Sequence: Synthetic epitope
KSKIDALSSE

SEQ ID NO: 24486 - protein, 10 aa, Artificial Sequence
  Description of Artificial Sequence: Synthetic epitope
KSKIHQYKVR

SEQ ID NO: 24487 - protein, 10 aa, Artificial Sequence
  Description of Artificial Sequence: Synthetic epitope
KSKIKIAKDD

SEQ ID NO: 24488 - protein, 10 aa, Artificial Sequence
  Description of Artificial Sequence: Synthetic epitope
KSKKERSEGV

SEQ ID NO: 24489 - protein, 10 aa, Artificial Sequence
  Description of Artificial Sequence: Synthetic epitope
KSKKISLKYT

SEQ ID NO: 24490 - protein, 10 aa, Artificial Sequence
  Description of Artificial Sequence: Synthetic epitope
KSKKLAALAE

SEQ ID NO: 24491 - protein, 10 aa, Artificial Sequence
  Description of Artificial Sequence: Synthetic epitope
KSKKRKLTSV

SEQ ID NO: 24492 - protein, 10 aa, Artificial Sequence
  Description of Artificial Sequence: Synthetic epitope
KSKKSEKSGA

SEQ ID NO: 24493 - protein, 10 aa, Artificial Sequence
  Description of Artificial Sequence: Synthetic epitope
KSKKSVKSAN

SEQ ID NO: 24494 - protein, 10 aa, Artificial Sequence
  Description of Artificial Sequence: Synthetic epitope
KSKKTFRSQA

SEQ ID NO: 24495 - protein, 10 aa, Artificial Sequence
  Description of Artificial Sequence: Synthetic epitope
KSKKTVKVTR

SEQ ID NO: 24496 - protein, 10 aa, Artificial Sequence
  Description of Artificial Sequence: Synthetic epitope
KSKLNVLTLK

SEQ ID NO: 24497 - protein, 10 aa, Artificial Sequence
  Description of Artificial Sequence: Synthetic epitope
KSKLTQAIAE

SEQ ID NO: 24498 - protein, 10 aa, Artificial Sequence
  Description of Artificial Sequence: Synthetic epitope
KSKLVEVIEE

SEQ ID NO: 24499 - protein, 10 aa, Artificial Sequence
  Description of Artificial Sequence: Synthetic epitope
KSKMLAKKLL

SEQ ID NO: 24500 - protein, 10 aa, Artificial Sequence
  Description of Artificial Sequence: Synthetic epitope
KSKMVKAGSS

SEQ ID NO: 24501 - protein, 10 aa, Artificial Sequence
  Description of Artificial Sequence: Synthetic epitope
KSKNAKDLPK

SEQ ID NO: 24502 - protein, 10 aa, Artificial Sequence
  Description of Artificial Sequence: Synthetic epitope
KSKNLAKDMK

SEQ ID NO: 24503 - protein, 10 aa, Artificial Sequence
  Description of Artificial Sequence: Synthetic epitope
KSKNLTDAIA

SEQ ID NO: 24504 - protein, 10 aa, Artificial Sequence
  Description of Artificial Sequence: Synthetic epitope
KSKNNTKQKL

SEQ ID NO: 24505 - protein, 10 aa, Artificial Sequence
  Description of Artificial Sequence: Synthetic epitope
KSKNQVKEKY

SEQ ID NO: 24506 - protein, 10 aa, Artificial Sequence
  Description of Artificial Sequence: Synthetic epitope
KSKNSKQRAE

SEQ ID NO: 24507 - protein, 10 aa, Artificial Sequence
  Description of Artificial Sequence: Synthetic epitope
KSKNVDVNVK

SEQ ID NO: 24508 - protein, 10 aa, Artificial Sequence
  Description of Artificial Sequence: Synthetic epitope
KSKPASTVRE

SEQ ID NO: 24509 - protein, 10 aa, Artificial Sequence
  Description of Artificial Sequence: Synthetic epitope
KSKPLDNASK

SEQ ID NO: 24510 - protein, 10 aa, Artificial Sequence
  Description of Artificial Sequence: Synthetic epitope
KSKPLTSSRS

SEQ ID NO: 24511 - protein, 10 aa, Artificial Sequence
  Description of Artificial Sequence: Synthetic epitope
KSKQERLLNQ

SEQ ID NO: 24512 - protein, 10 aa, Artificial Sequence
  Description of Artificial Sequence: Synthetic epitope
KSKQERTNSE

SEQ ID NO: 24513 - protein, 10 aa, Artificial Sequence
  Description of Artificial Sequence: Synthetic epitope
KSKQGSRSLA

SEQ ID NO: 24514 - protein, 10 aa, Artificial Sequence
  Description of Artificial Sequence: Synthetic epitope
KSKQTTNFEN

SEQ ID NO: 24515 - protein, 10 aa, Artificial Sequence
  Description of Artificial Sequence: Synthetic epitope
KSKRNDVNQK

SEQ ID NO: 24516 - protein, 10 aa, Artificial Sequence
  Description of Artificial Sequence: Synthetic epitope
KSKRRVSVLK

SEQ ID NO: 24517 - protein, 10 aa, Artificial Sequence
  Description of Artificial Sequence: Synthetic epitope
KSKSAASEQH

SEQ ID NO: 24518 - protein, 10 aa, Artificial Sequence
  Description of Artificial Sequence: Synthetic epitope
KSKSADNQEY

SEQ ID NO: 24519 - protein, 10 aa, Artificial Sequence
  Description of Artificial Sequence: Synthetic epitope
KSKSAGAGQG

SEQ ID NO: 24520 - protein, 10 aa, Artificial Sequence
  Description of Artificial Sequence: Synthetic epitope
KSKSETEQET

SEQ ID NO: 24521 - protein, 10 aa, Artificial Sequence
  Description of Artificial Sequence: Synthetic epitope
KSKSKISPKS

SEQ ID NO: 24522 - protein, 10 aa, Artificial Sequence
  Description of Artificial Sequence: Synthetic epitope
KSKSKLKSEQ

SEQ ID NO: 24523 - protein, 10 aa, Artificial Sequence
  Description of Artificial Sequence: Synthetic epitope
KSKSKSERAN

SEQ ID NO: 24524 - protein, 10 aa, Artificial Sequence
  Description of Artificial Sequence: Synthetic epitope
KSKSMDAIRS

SEQ ID NO: 24525 - protein, 10 aa, Artificial Sequence
  Description of Artificial Sequence: Synthetic epitope
KSKSQLTSQS

SEQ ID NO: 24526 - protein, 10 aa, Artificial Sequence
  Description of Artificial Sequence: Synthetic epitope
KSKTDNSSLS

SEQ ID NO: 24527 - protein, 10 aa, Artificial Sequence
  Description of Artificial Sequence: Synthetic epitope
KSKTDYNDTK

SEQ ID NO: 24528 - protein, 10 aa, Artificial Sequence
  Description of Artificial Sequence: Synthetic epitope
KSKTENGDKA

SEQ ID NO: 24529 - protein, 10 aa, Artificial Sequence
  Description of Artificial Sequence: Synthetic epitope
KSKTNSQKGA

SEQ ID NO: 24530 - protein, 10 aa, Artificial Sequence
  Description of Artificial Sequence: Synthetic epitope
KSKVLIMKET

SEQ ID NO: 24531 - protein, 10 aa, Artificial Sequence
  Description of Artificial Sequence: Synthetic epitope
KSKVLNESVS

SEQ ID NO: 24532 - protein, 10 aa, Artificial Sequence
  Description of Artificial Sequence: Synthetic epitope
KSKVLSRNSA

SEQ ID NO: 24533 - protein, 10 aa, Artificial Sequence
  Description of Artificial Sequence: Synthetic epitope
KSKVNTALRN

SEQ ID NO: 24534 - protein, 10 aa, Artificial Sequence
  Description of Artificial Sequence: Synthetic epitope
KSKVSSDALD

SEQ ID NO: 24535 - protein, 10 aa, Artificial Sequence
  Description of Artificial Sequence: Synthetic epitope
KSKVTLDKES

SEQ ID NO: 24536 - protein, 10 aa, Artificial Sequence
  Description of Artificial Sequence: Synthetic epitope
KSKVTNGVGK

SEQ ID NO: 24537 - protein, 10 aa, Artificial Sequence
  Description of Artificial Sequence: Synthetic epitope
KSLAEVEAGK

SEQ ID NO: 24538 - protein, 10 aa, Artificial Sequence
  Description of Artificial Sequence: Synthetic epitope
KSLAKDLSEA

SEQ ID NO: 24539 - protein, 10 aa, Artificial Sequence
  Description of Artificial Sequence: Synthetic epitope
KSLANAESQQ

SEQ ID NO: 24540 - protein, 10 aa, Artificial Sequence
  Description of Artificial Sequence: Synthetic epitope
KSLAVKAEAM

SEQ ID NO: 24541 - protein, 10 aa, Artificial Sequence
  Description of Artificial Sequence: Synthetic epitope
KSLDVVKEVV

SEQ ID NO: 24542 - protein, 10 aa, Artificial Sequence
  Description of Artificial Sequence: Synthetic epitope
KSLEGEMPSE

SEQ ID NO: 24543 - protein, 10 aa, Artificial Sequence
  Description of Artificial Sequence: Synthetic epitope
KSLESALKDL

SEQ ID NO: 24544 - protein, 10 aa, Artificial Sequence
  Description of Artificial Sequence: Synthetic epitope
KSLESIVKSE

SEQ ID NO: 24545 - protein, 10 aa, Artificial Sequence
  Description of Artificial Sequence: Synthetic epitope
KSLESSYKDS

SEQ ID NO: 24546 - protein, 10 aa, Artificial Sequence
  Description of Artificial Sequence: Synthetic epitope
KSLFAVNKTQ

SEQ ID NO: 24547 - protein, 10 aa, Artificial Sequence
  Description of Artificial Sequence: Synthetic epitope
KSLGKAEQTF

SEQ ID NO: 24548 - protein, 10 aa, Artificial Sequence
  Description of Artificial Sequence: Synthetic epitope
KSLGSSREAE

SEQ ID NO: 24549 - protein, 10 aa, Artificial Sequence
  Description of Artificial Sequence: Synthetic epitope
KSLIAKLHQH

SEQ ID NO: 24550 - protein, 10 aa, Artificial Sequence
  Description of Artificial Sequence: Synthetic epitope
KSLIEQEAAH

SEQ ID NO: 24551 - protein, 10 aa, Artificial Sequence
  Description of Artificial Sequence: Synthetic epitope
KSLIGAARTK

SEQ ID NO: 24552 - protein, 10 aa, Artificial Sequence
  Description of Artificial Sequence: Synthetic epitope
KSLKARKSAT

SEQ ID NO: 24553 - protein, 10 aa, Artificial Sequence
  Description of Artificial Sequence: Synthetic epitope
KSLKATERKH

SEQ ID NO: 24554 - protein, 10 aa, Artificial Sequence
  Description of Artificial Sequence: Synthetic epitope
KSLKERLTKI

SEQ ID NO: 24555 - protein, 10 aa, Artificial Sequence
  Description of Artificial Sequence: Synthetic epitope
KSLKESEQES

SEQ ID NO: 24556 - protein, 10 aa, Artificial Sequence
  Description of Artificial Sequence: Synthetic epitope
KSLKLTQSST

SEQ ID NO: 24557 - protein, 10 aa, Artificial Sequence
  Description of Artificial Sequence: Synthetic epitope
KSLKVDMTTE

SEQ ID NO: 24558 - protein, 10 aa, Artificial Sequence
  Description of Artificial Sequence: Synthetic epitope
KSLLAALAAL

SEQ ID NO: 24559 - protein, 10 aa, Artificial Sequence
  Description of Artificial Sequence: Synthetic epitope
KSLLHIKLEK

SEQ ID NO: 24560 - protein, 10 aa, Artificial Sequence
  Description of Artificial Sequence: Synthetic epitope
KSLLQALNEV

SEQ ID NO: 24561 - protein, 10 aa, Artificial Sequence
  Description of Artificial Sequence: Synthetic epitope
KSLLSSELRQ

SEQ ID NO: 24562 - protein, 10 aa, Artificial Sequence
  Description of Artificial Sequence: Synthetic epitope
KSLLSSTSTT

SEQ ID NO: 24563 - protein, 10 aa, Artificial Sequence
  Description of Artificial Sequence: Synthetic epitope
KSLMIKDSIQ

SEQ ID NO: 24564 - protein, 10 aa, Artificial Sequence
  Description of Artificial Sequence: Synthetic epitope
KSLMLAKAKE

SEQ ID NO: 24565 - protein, 10 aa, Artificial Sequence
  Description of Artificial Sequence: Synthetic epitope
KSLNDITAKE

SEQ ID NO: 24566 - protein, 10 aa, Artificial Sequence
  Description of Artificial Sequence: Synthetic epitope
KSLPLNDMPE

SEQ ID NO: 24567 - protein, 10 aa, Artificial Sequence
  Description of Artificial Sequence: Synthetic epitope
KSLPSLVPLR

SEQ ID NO: 24568 - protein, 10 aa, Artificial Sequence
  Description of Artificial Sequence: Synthetic epitope
KSLQSLQSTV

SEQ ID NO: 24569 - protein, 10 aa, Artificial Sequence
  Description of Artificial Sequence: Synthetic epitope
KSLRQNLGKK

SEQ ID NO: 24570 - protein, 10 aa, Artificial Sequence
  Description of Artificial Sequence: Synthetic epitope
KSLRRQSAGN

SEQ ID NO: 24571 - protein, 10 aa, Artificial Sequence
  Description of Artificial Sequence: Synthetic epitope
KSLRTTAPSH

SEQ ID NO: 24572 - protein, 10 aa, Artificial Sequence
  Description of Artificial Sequence: Synthetic epitope
KSLSAEKYDV

SEQ ID NO: 24573 - protein, 10 aa, Artificial Sequence
  Description of Artificial Sequence: Synthetic epitope
KSLSAELLKA

SEQ ID NO: 24574 - protein, 10 aa, Artificial Sequence
  Description of Artificial Sequence: Synthetic epitope
KSLSDSESDD

SEQ ID NO: 24575 - protein, 10 aa, Artificial Sequence
  Description of Artificial Sequence: Synthetic epitope
KSLSEVLSQQ

SEQ ID NO: 24576 - protein, 10 aa, Artificial Sequence
  Description of Artificial Sequence: Synthetic epitope
KSLSIISTRS

SEQ ID NO: 24577 - protein, 10 aa, Artificial Sequence
  Description of Artificial Sequence: Synthetic epitope
KSLSKIASEL

SEQ ID NO: 24578 - protein, 10 aa, Artificial Sequence
  Description of Artificial Sequence: Synthetic epitope
KSLSLSAKTH

SEQ ID NO: 24579 - protein, 10 aa, Artificial Sequence
  Description of Artificial Sequence: Synthetic epitope
KSLSLSILKV

SEQ ID NO: 24580 - protein, 10 aa, Artificial Sequence
  Description of Artificial Sequence: Synthetic epitope
KSLSMVTANK

SEQ ID NO: 24581 - protein, 10 aa, Artificial Sequence
  Description of Artificial Sequence: Synthetic epitope
KSLSQSSKEA

SEQ ID NO: 24582 - protein, 10 aa, Artificial Sequence
  Description of Artificial Sequence: Synthetic epitope
KSLSRANAQL

SEQ ID NO: 24583 - protein, 10 aa, Artificial Sequence
  Description of Artificial Sequence: Synthetic epitope
KSLSRVLKVK

SEQ ID NO: 24584 - protein, 10 aa, Artificial Sequence
  Description of Artificial Sequence: Synthetic epitope
KSLSSEMYVK

SEQ ID NO: 24585 - protein, 10 aa, Artificial Sequence
  Description of Artificial Sequence: Synthetic epitope
KSLSSFESGK

SEQ ID NO: 24586 - protein, 10 aa, Artificial Sequence
  Description of Artificial Sequence: Synthetic epitope
KSLSSFESGK

SEQ ID NO: 24587 - protein, 10 aa, Artificial Sequence
  Description of Artificial Sequence: Synthetic epitope
KSLSSKKSYE

SEQ ID NO: 24588 - protein, 10 aa, Artificial Sequence
  Description of Artificial Sequence: Synthetic epitope
KSLSSLQLDS

SEQ ID NO: 24589 - protein, 10 aa, Artificial Sequence
  Description of Artificial Sequence: Synthetic epitope
KSLSTEVEPK

SEQ ID NO: 24590 - protein, 10 aa, Artificial Sequence
  Description of Artificial Sequence: Synthetic epitope
KSLSVAQRKF

SEQ ID NO: 24591 - protein, 10 aa, Artificial Sequence
  Description of Artificial Sequence: Synthetic epitope
KSLSVNEMTL

SEQ ID NO: 24592 - protein, 10 aa, Artificial Sequence
  Description of Artificial Sequence: Synthetic epitope
KSLTATILTM

SEQ ID NO: 24593 - protein, 10 aa, Artificial Sequence
  Description of Artificial Sequence: Synthetic epitope
KSLTFEKLTA

SEQ ID NO: 24594 - protein, 10 aa, Artificial Sequence
  Description of Artificial Sequence: Synthetic epitope
KSLTLSQRAL

SEQ ID NO: 24595 - protein, 10 aa, Artificial Sequence
  Description of Artificial Sequence: Synthetic epitope
KSLTMQVLNS

SEQ ID NO: 24596 - protein, 10 aa, Artificial Sequence
  Description of Artificial Sequence: Synthetic epitope
KSLTVKESAI

SEQ ID NO: 24597 - protein, 10 aa, Artificial Sequence
  Description of Artificial Sequence: Synthetic epitope
KSLVASRKEA

SEQ ID NO: 24598 - protein, 10 aa, Artificial Sequence
  Description of Artificial Sequence: Synthetic epitope
KSLVKKTRAE

SEQ ID NO: 24599 - protein, 10 aa, Artificial Sequence
  Description of Artificial Sequence: Synthetic epitope
KSLVRRSYRR

SEQ ID NO: 24600 - protein, 10 aa, Artificial Sequence
  Description of Artificial Sequence: Synthetic epitope
KSLVSRKDHV

SEQ ID NO: 24601 - protein, 10 aa, Artificial Sequence
  Description of Artificial Sequence: Synthetic epitope
KSLYFKLRSM

SEQ ID NO: 24602 - protein, 10 aa, Artificial Sequence
  Description of Artificial Sequence: Synthetic epitope
KSLYQKRGSS

SEQ ID NO: 24603 - protein, 10 aa, Artificial Sequence
  Description of Artificial Sequence: Synthetic epitope
KSMAEQIEAD

SEQ ID NO: 24604 - protein, 10 aa, Artificial Sequence
  Description of Artificial Sequence: Synthetic epitope
KSMEKHIEED

SEQ ID NO: 24605 - protein, 10 aa, Artificial Sequence
  Description of Artificial Sequence: Synthetic epitope
KSMEKKILPV

SEQ ID NO: 24606 - protein, 10 aa, Artificial Sequence
  Description of Artificial Sequence: Synthetic epitope
KSMGESQSKK

SEQ ID NO: 24607 - protein, 10 aa, Artificial Sequence
  Description of Artificial Sequence: Synthetic epitope
KSMGMIRKPG

SEQ ID NO: 24608 - protein, 10 aa, Artificial Sequence
  Description of Artificial Sequence: Synthetic epitope
KSMISSLSIM

SEQ ID NO: 24609 - protein, 10 aa, Artificial Sequence
  Description of Artificial Sequence: Synthetic epitope
KSMKKRMSEL

SEQ ID NO: 24610 - protein, 10 aa, Artificial Sequence
  Description of Artificial Sequence: Synthetic epitope
KSMKSRSRSP

SEQ ID NO: 24611 - protein, 10 aa, Artificial Sequence
  Description of Artificial Sequence: Synthetic epitope
KSMLRKDDAP

SEQ ID NO: 24612 - protein, 10 aa, Artificial Sequence
  Description of Artificial Sequence: Synthetic epitope
KSMMKMLLDP

SEQ ID NO: 24613 - protein, 10 aa, Artificial Sequence
  Description of Artificial Sequence: Synthetic epitope
KSMNSRRSLA

SEQ ID NO: 24614 - protein, 10 aa, Artificial Sequence
  Description of Artificial Sequence: Synthetic epitope
KSMRGSDQNA

SEQ ID NO: 24615 - protein, 10 aa, Artificial Sequence
  Description of Artificial Sequence: Synthetic epitope
KSMSEDESEM

SEQ ID NO: 24616 - protein, 10 aa, Artificial Sequence
  Description of Artificial Sequence: Synthetic epitope
KSMSQVDVDS

SEQ ID NO: 24617 - protein, 10 aa, Artificial Sequence
  Description of Artificial Sequence: Synthetic epitope
KSMSTFIEEA

SEQ ID NO: 24618 - protein, 10 aa, Artificial Sequence
  Description of Artificial Sequence: Synthetic epitope
KSMTQPFTSA

SEQ ID NO: 24619 - protein, 10 aa, Artificial Sequence
  Description of Artificial Sequence: Synthetic epitope
KSNDDLDVSE

SEQ ID NO: 24620 - protein, 10 aa, Artificial Sequence
  Description of Artificial Sequence: Synthetic epitope
KSNEAASKEL

SEQ ID NO: 24621 - protein, 10 aa, Artificial Sequence
  Description of Artificial Sequence: Synthetic epitope
KSNEQATSLN

SEQ ID NO: 24622 - protein, 10 aa, Artificial Sequence
  Description of Artificial Sequence: Synthetic epitope
KSNFRAAPIR

SEQ ID NO: 24623 - protein, 10 aa, Artificial Sequence
  Description of Artificial Sequence: Synthetic epitope
KSNGALSTEE

SEQ ID NO: 24624 - protein, 10 aa, Artificial Sequence
  Description of Artificial Sequence: Synthetic epitope
KSNGKTKALN

SEQ ID NO: 24625 - protein, 10 aa, Artificial Sequence
  Description of Artificial Sequence: Synthetic epitope
KSNKRQREKV

SEQ ID NO: 24626 - protein, 10 aa, Artificial Sequence
  Description of Artificial Sequence: Synthetic epitope
KSNLINSVSN

SEQ ID NO: 24627 - protein, 10 aa, Artificial Sequence
  Description of Artificial Sequence: Synthetic epitope
KSNLSALEDK

SEQ ID NO: 24628 - protein, 10 aa, Artificial Sequence
  Description of Artificial Sequence: Synthetic epitope
KSNLTLVNQS

SEQ ID NO: 24629 - protein, 10 aa, Artificial Sequence
  Description of Artificial Sequence: Synthetic epitope
KSNNPLSSEL

SEQ ID NO: 24630 - protein, 10 aa, Artificial Sequence
  Description of Artificial Sequence: Synthetic epitope
KSNNSESPHP

SEQ ID NO: 24631 - protein, 10 aa, Artificial Sequence
  Description of Artificial Sequence: Synthetic epitope
KSNQVSRSVS

SEQ ID NO: 24632 - protein, 10 aa, Artificial Sequence
  Description of Artificial Sequence: Synthetic epitope
KSNRKEDDVM

SEQ ID NO: 24633 - protein, 10 aa, Artificial Sequence
  Description of Artificial Sequence: Synthetic epitope
KSNRPSYYMF

SEQ ID NO: 24634 - protein, 10 aa, Artificial Sequence
  Description of Artificial Sequence: Synthetic epitope
KSNRSSNMTA

SEQ ID NO: 24635 - protein, 10 aa, Artificial Sequence
  Description of Artificial Sequence: Synthetic epitope
KSNSISEELE

SEQ ID NO: 24636 - protein, 10 aa, Artificial Sequence
  Description of Artificial Sequence: Synthetic epitope
KSNSPRLMDE

SEQ ID NO: 24637 - protein, 10 aa, Artificial Sequence
  Description of Artificial Sequence: Synthetic epitope
KSNSSAAREP

SEQ ID NO: 24638 - protein, 10 aa, Artificial Sequence
  Description of Artificial Sequence: Synthetic epitope
KSNSSKIDTN

SEQ ID NO: 24639 - protein, 10 aa, Artificial Sequence
  Description of Artificial Sequence: Synthetic epitope
KSNTAIKGSD

SEQ ID NO: 24640 - protein, 10 aa, Artificial Sequence
  Description of Artificial Sequence: Synthetic epitope
KSNTSKKRKV

SEQ ID NO: 24641 - protein, 10 aa, Artificial Sequence
  Description of Artificial Sequence: Synthetic epitope
KSNVSAPNKK

SEQ ID NO: 24642 - protein, 10 aa, Artificial Sequence
  Description of Artificial Sequence: Synthetic epitope
KSPEIAASLW

SEQ ID NO: 24643 - protein, 10 aa, Artificial Sequence
  Description of Artificial Sequence: Synthetic epitope
KSPEVKLMDR

SEQ ID NO: 24644 - protein, 10 aa, Artificial Sequence
  Description of Artificial Sequence: Synthetic epitope
KSPLNDMSDD

SEQ ID NO: 24645 - protein, 10 aa, Artificial Sequence
  Description of Artificial Sequence: Synthetic epitope
KSPRSYTPKP

SEQ ID NO: 24646 - protein, 10 aa, Artificial Sequence
  Description of Artificial Sequence: Synthetic epitope
KSPSMSISEP

SEQ ID NO: 24647 - protein, 10 aa, Artificial Sequence
  Description of Artificial Sequence: Synthetic epitope
KSPSSESTKT

SEQ ID NO: 24648 - protein, 10 aa, Artificial Sequence
  Description of Artificial Sequence: Synthetic epitope
KSPVEAIITL

SEQ ID NO: 24649 - protein, 10 aa, Artificial Sequence
  Description of Artificial Sequence: Synthetic epitope
KSQAASQKVS

SEQ ID NO: 24650 - protein, 10 aa, Artificial Sequence
  Description of Artificial Sequence: Synthetic epitope
KSQAIATKKI

SEQ ID NO: 24651 - protein, 10 aa, Artificial Sequence
  Description of Artificial Sequence: Synthetic epitope
KSQAKIEHAA

SEQ ID NO: 24652 - protein, 10 aa, Artificial Sequence
  Description of Artificial Sequence: Synthetic epitope
KSQDSTQTQS

SEQ ID NO: 24653 - protein, 10 aa, Artificial Sequence
  Description of Artificial Sequence: Synthetic epitope
KSQDVFSPSH

SEQ ID NO: 24654 - protein, 10 aa, Artificial Sequence
  Description of Artificial Sequence: Synthetic epitope
KSQDVTRNIK

SEQ ID NO: 24655 - protein, 10 aa, Artificial Sequence
  Description of Artificial Sequence: Synthetic epitope
KSQEAALRAA

SEQ ID NO: 24656 - protein, 10 aa, Artificial Sequence
  Description of Artificial Sequence: Synthetic epitope
KSQEIIPFPS

SEQ ID NO: 24657 - protein, 10 aa, Artificial Sequence
  Description of Artificial Sequence: Synthetic epitope
KSQEMVMEQA

SEQ ID NO: 24658 - protein, 10 aa, Artificial Sequence
  Description of Artificial Sequence: Synthetic epitope
KSQEQEFKAH

SEQ ID NO: 24659 - protein, 10 aa, Artificial Sequence
  Description of Artificial Sequence: Synthetic epitope
KSQETKKISL

SEQ ID NO: 24660 - protein, 10 aa, Artificial Sequence
  Description of Artificial Sequence: Synthetic epitope
KSQGHKDKAK

SEQ ID NO: 24661 - protein, 10 aa, Artificial Sequence
  Description of Artificial Sequence: Synthetic epitope
KSQGTSAEGS

SEQ ID NO: 24662 - protein, 10 aa, Artificial Sequence
  Description of Artificial Sequence: Synthetic epitope
KSQHQTKEEQ

SEQ ID NO: 24663 - protein, 10 aa, Artificial Sequence
  Description of Artificial Sequence: Synthetic epitope
KSQKFATEKQ

SEQ ID NO: 24664 - protein, 10 aa, Artificial Sequence
  Description of Artificial Sequence: Synthetic epitope
KSQKQETTEE

SEQ ID NO: 24665 - protein, 10 aa, Artificial Sequence
  Description of Artificial Sequence: Synthetic epitope
KSQKYKESEA

SEQ ID NO: 24666 - protein, 10 aa, Artificial Sequence
  Description of Artificial Sequence: Synthetic epitope
KSQLALKEKQ

SEQ ID NO: 24667 - protein, 10 aa, Artificial Sequence
  Description of Artificial Sequence: Synthetic epitope
KSQLNTTQQG

SEQ ID NO: 24668 - protein, 10 aa, Artificial Sequence
  Description of Artificial Sequence: Synthetic epitope
KSQMKQKDED

SEQ ID NO: 24669 - protein, 10 aa, Artificial Sequence
  Description of Artificial Sequence: Synthetic epitope
KSQMSRFSTK

SEQ ID NO: 24670 - protein, 10 aa, Artificial Sequence
  Description of Artificial Sequence: Synthetic epitope
KSQNGMENGD

SEQ ID NO: 24671 - protein, 10 aa, Artificial Sequence
  Description of Artificial Sequence: Synthetic epitope
KSQNKDKDHQ

SEQ ID NO: 24672 - protein, 10 aa, Artificial Sequence
  Description of Artificial Sequence: Synthetic epitope
KSQNNSSVDP

SEQ ID NO: 24673 - protein, 10 aa, Artificial Sequence
  Description of Artificial Sequence: Synthetic epitope
KSQNNSSVDP

SEQ ID NO: 24674 - protein, 10 aa, Artificial Sequence
  Description of Artificial Sequence: Synthetic epitope
KSQNRKKEKE

SEQ ID NO: 24675 - protein, 10 aa, Artificial Sequence
  Description of Artificial Sequence: Synthetic epitope
KSQQNDEEPV

SEQ ID NO: 24676 - protein, 10 aa, Artificial Sequence
  Description of Artificial Sequence: Synthetic epitope
KSQQPESKMQ

SEQ ID NO: 24677 - protein, 10 aa, Artificial Sequence
  Description of Artificial Sequence: Synthetic epitope
KSQRDSALGA

SEQ ID NO: 24678 - protein, 10 aa, Artificial Sequence
  Description of Artificial Sequence: Synthetic epitope
KSQSEMSLEG

SEQ ID NO: 24679 - protein, 10 aa, Artificial Sequence
  Description of Artificial Sequence: Synthetic epitope
KSQSGQIKEE

SEQ ID NO: 24680 - protein, 10 aa, Artificial Sequence
  Description of Artificial Sequence: Synthetic epitope
KSQSKRAVSA

SEQ ID NO: 24681 - protein, 10 aa, Artificial Sequence
  Description of Artificial Sequence: Synthetic epitope
KSQSKTTQSA

SEQ ID NO: 24682 - protein, 10 aa, Artificial Sequence
  Description of Artificial Sequence: Synthetic epitope
KSQSKYSEAA

SEQ ID NO: 24683 - protein, 10 aa, Artificial Sequence
  Description of Artificial Sequence: Synthetic epitope
KSQSLTALPS

SEQ ID NO: 24684 - protein, 10 aa, Artificial Sequence
  Description of Artificial Sequence: Synthetic epitope
KSQSLTSQSQ

SEQ ID NO: 24685 - protein, 10 aa, Artificial Sequence
  Description of Artificial Sequence: Synthetic epitope
KSQSSNMLTP

SEQ ID NO: 24686 - protein, 10 aa, Artificial Sequence
  Description of Artificial Sequence: Synthetic epitope
KSQSSTSPEG

SEQ ID NO: 24687 - protein, 10 aa, Artificial Sequence
  Description of Artificial Sequence: Synthetic epitope
KSQSTSDSLT

SEQ ID NO: 24688 - protein, 10 aa, Artificial Sequence
  Description of Artificial Sequence: Synthetic epitope
KSQTDRGASA

SEQ ID NO: 24689 - protein, 10 aa, Artificial Sequence
  Description of Artificial Sequence: Synthetic epitope
KSQTMSSAQA

SEQ ID NO: 24690 - protein, 10 aa, Artificial Sequence
  Description of Artificial Sequence: Synthetic epitope
KSQTREKVYK

SEQ ID NO: 24691 - protein, 10 aa, Artificial Sequence
  Description of Artificial Sequence: Synthetic epitope
KSQTSQNSHF

SEQ ID NO: 24692 - protein, 10 aa, Artificial Sequence
  Description of Artificial Sequence: Synthetic epitope
KSQVAAKLQE

SEQ ID NO: 24693 - protein, 10 aa, Artificial Sequence
  Description of Artificial Sequence: Synthetic epitope
KSQVAEAKMT

SEQ ID NO: 24694 - protein, 10 aa, Artificial Sequence
  Description of Artificial Sequence: Synthetic epitope
KSQVISNAKN

SEQ ID NO: 24695 - protein, 10 aa, Artificial Sequence
  Description of Artificial Sequence: Synthetic epitope
KSQVKVEDDE

SEQ ID NO: 24696 - protein, 10 aa, Artificial Sequence
  Description of Artificial Sequence: Synthetic epitope
KSQVRRIEME

SEQ ID NO: 24697 - protein, 10 aa, Artificial Sequence
  Description of Artificial Sequence: Synthetic epitope
KSQVSSVRKN

SEQ ID NO: 24698 - protein, 10 aa, Artificial Sequence
  Description of Artificial Sequence: Synthetic epitope
KSQVTLDVEK

SEQ ID NO: 24699 - protein, 10 aa, Artificial Sequence
  Description of Artificial Sequence: Synthetic epitope
KSQVTTVKLT

SEQ ID NO: 24700 - protein, 10 aa, Artificial Sequence
  Description of Artificial Sequence: Synthetic epitope
KSQYKTTILL

SEQ ID NO: 24701 - protein, 10 aa, Artificial Sequence
  Description of Artificial Sequence: Synthetic epitope
KSRASHTRTP

SEQ ID NO: 24702 - protein, 10 aa, Artificial Sequence
  Description of Artificial Sequence: Synthetic epitope
KSRESKRNRR

SEQ ID NO: 24703 - protein, 10 aa, Artificial Sequence
  Description of Artificial Sequence: Synthetic epitope
KSREVATEGI

SEQ ID NO: 24704 - protein, 10 aa, Artificial Sequence
  Description of Artificial Sequence: Synthetic epitope
KSRFTVLTES

SEQ ID NO: 24705 - protein, 10 aa, Artificial Sequence
  Description of Artificial Sequence: Synthetic epitope
KSRGFSNEVS

SEQ ID NO: 24706 - protein, 10 aa, Artificial Sequence
  Description of Artificial Sequence: Synthetic epitope
KSRKLALTVK

SEQ ID NO: 24707 - protein, 10 aa, Artificial Sequence
  Description of Artificial Sequence: Synthetic epitope
KSRKTLLVED

SEQ ID NO: 24708 - protein, 10 aa, Artificial Sequence
  Description of Artificial Sequence: Synthetic epitope
KSRLHDSNSK

SEQ ID NO: 24709 - protein, 10 aa, Artificial Sequence
  Description of Artificial Sequence: Synthetic epitope
KSRLISLEQL

SEQ ID NO: 24710 - protein, 10 aa, Artificial Sequence
  Description of Artificial Sequence: Synthetic epitope
KSRLKSLTNK

SEQ ID NO: 24711 - protein, 10 aa, Artificial Sequence
  Description of Artificial Sequence: Synthetic epitope
KSRLVNTSEN

SEQ ID NO: 24712 - protein, 10 aa, Artificial Sequence
  Description of Artificial Sequence: Synthetic epitope
KSRNATRSRI

SEQ ID NO: 24713 - protein, 10 aa, Artificial Sequence
  Description of Artificial Sequence: Synthetic epitope
KSRNLRLESK

SEQ ID NO: 24714 - protein, 10 aa, Artificial Sequence
  Description of Artificial Sequence: Synthetic epitope
KSRNVEALKT

SEQ ID NO: 24715 - protein, 10 aa, Artificial Sequence
  Description of Artificial Sequence: Synthetic epitope
KSRPTKQKLK

SEQ ID NO: 24716 - protein, 10 aa, Artificial Sequence
  Description of Artificial Sequence: Synthetic epitope
KSRQEKAIAI

SEQ ID NO: 24717 - protein, 10 aa, Artificial Sequence
  Description of Artificial Sequence: Synthetic epitope
KSRRLVSAKQ

SEQ ID NO: 24718 - protein, 10 aa, Artificial Sequence
  Description of Artificial Sequence: Synthetic epitope
KSRRNRSKLR

SEQ ID NO: 24719 - protein, 10 aa, Artificial Sequence
  Description of Artificial Sequence: Synthetic epitope
KSRRSRSESE

SEQ ID NO: 24720 - protein, 10 aa, Artificial Sequence
  Description of Artificial Sequence: Synthetic epitope
KSRSHSARSH

SEQ ID NO: 24721 - protein, 10 aa, Artificial Sequence
  Description of Artificial Sequence: Synthetic epitope
KSRSKSKSKP

SEQ ID NO: 24722 - protein, 10 aa, Artificial Sequence
  Description of Artificial Sequence: Synthetic epitope
KSRSRNLSMD

SEQ ID NO: 24723 - protein, 10 aa, Artificial Sequence
  Description of Artificial Sequence: Synthetic epitope
KSRSTGQREE

SEQ ID NO: 24724 - protein, 10 aa, Artificial Sequence
  Description of Artificial Sequence: Synthetic epitope
KSRSVLEKKR

SEQ ID NO: 24725 - protein, 10 aa, Artificial Sequence
  Description of Artificial Sequence: Synthetic epitope
KSRSVSEDSD

SEQ ID NO: 24726 - protein, 10 aa, Artificial Sequence
  Description of Artificial Sequence: Synthetic epitope
KSRTHSVSAD

SEQ ID NO: 24727 - protein, 10 aa, Artificial Sequence
  Description of Artificial Sequence: Synthetic epitope
KSRTSFSKIS

SEQ ID NO: 24728 - protein, 10 aa, Artificial Sequence
  Description of Artificial Sequence: Synthetic epitope
KSRVAAQNSA

SEQ ID NO: 24729 - protein, 10 aa, Artificial Sequence
  Description of Artificial Sequence: Synthetic epitope
KSRVERSAEG

SEQ ID NO: 24730 - protein, 10 aa, Artificial Sequence
  Description of Artificial Sequence: Synthetic epitope
KSRVQQTTVS

SEQ ID NO: 24731 - protein, 10 aa, Artificial Sequence
  Description of Artificial Sequence: Synthetic epitope
KSRWKRKVSS

SEQ ID NO: 24732 - protein, 10 aa, Artificial Sequence
  Description of Artificial Sequence: Synthetic epitope
KSSAAKEGAG

SEQ ID NO: 24733 - protein, 10 aa, Artificial Sequence
  Description of Artificial Sequence: Synthetic epitope
KSSAEISYEE

SEQ ID NO: 24734 - protein, 10 aa, Artificial Sequence
  Description of Artificial Sequence: Synthetic epitope
KSSANAKLTS

SEQ ID NO: 24735 - protein, 10 aa, Artificial Sequence
  Description of Artificial Sequence: Synthetic epitope
KSSAPKRHNK

SEQ ID NO: 24736 - protein, 10 aa, Artificial Sequence
  Description of Artificial Sequence: Synthetic epitope
KSSATVTGEP

SEQ ID NO: 24737 - protein, 10 aa, Artificial Sequence
  Description of Artificial Sequence: Synthetic epitope
KSSAVDILLS

SEQ ID NO: 24738 - protein, 10 aa, Artificial Sequence
  Description of Artificial Sequence: Synthetic epitope
KSSAVIEQGD

SEQ ID NO: 24739 - protein, 10 aa, Artificial Sequence
  Description of Artificial Sequence: Synthetic epitope
KSSAVLEIHE

SEQ ID NO: 24740 - protein, 10 aa, Artificial Sequence
  Description of Artificial Sequence: Synthetic epitope
KSSDFAVLKQ

SEQ ID NO: 24741 - protein, 10 aa, Artificial Sequence
  Description of Artificial Sequence: Synthetic epitope
KSSEASPTAQ

SEQ ID NO: 24742 - protein, 10 aa, Artificial Sequence
  Description of Artificial Sequence: Synthetic epitope
KSSEDDAASE

SEQ ID NO: 24743 - protein, 10 aa, Artificial Sequence
  Description of Artificial Sequence: Synthetic epitope
KSSEDDAASE

SEQ ID NO: 24744 - protein, 10 aa, Artificial Sequence
  Description of Artificial Sequence: Synthetic epitope
KSSEDIRTEA

SEQ ID NO: 24745 - protein, 10 aa, Artificial Sequence
  Description of Artificial Sequence: Synthetic epitope
KSSEDKKLDD

SEQ ID NO: 24746 - protein, 10 aa, Artificial Sequence
  Description of Artificial Sequence: Synthetic epitope
KSSEKAELAS

SEQ ID NO: 24747 - protein, 10 aa, Artificial Sequence
  Description of Artificial Sequence: Synthetic epitope
KSSESLASKL

SEQ ID NO: 24748 - protein, 10 aa, Artificial Sequence
  Description of Artificial Sequence: Synthetic epitope
KSSEVQIKQS

SEQ ID NO: 24749 - protein, 10 aa, Artificial Sequence
  Description of Artificial Sequence: Synthetic epitope
KSSFLNRSQV

SEQ ID NO: 24750 - protein, 10 aa, Artificial Sequence
  Description of Artificial Sequence: Synthetic epitope
KSSGANTSKD

SEQ ID NO: 24751 - protein, 10 aa, Artificial Sequence
  Description of Artificial Sequence: Synthetic epitope
KSSGHDSKQP

SEQ ID NO: 24752 - protein, 10 aa, Artificial Sequence
  Description of Artificial Sequence: Synthetic epitope
KSSGHMQTQS

SEQ ID NO: 24753 - protein, 10 aa, Artificial Sequence
  Description of Artificial Sequence: Synthetic epitope
KSSGIIANRP

SEQ ID NO: 24754 - protein, 10 aa, Artificial Sequence
  Description of Artificial Sequence: Synthetic epitope
KSSGQLNKQE

SEQ ID NO: 24755 - protein, 10 aa, Artificial Sequence
  Description of Artificial Sequence: Synthetic epitope
KSSHLEETGS

SEQ ID NO: 24756 - protein, 10 aa, Artificial Sequence
  Description of Artificial Sequence: Synthetic epitope
KSSIKAAVPG

SEQ ID NO: 24757 - protein, 10 aa, Artificial Sequence
  Description of Artificial Sequence: Synthetic epitope
KSSILTRAGE

SEQ ID NO: 24758 - protein, 10 aa, Artificial Sequence
  Description of Artificial Sequence: Synthetic epitope
KSSITLKTVN

SEQ ID NO: 24759 - protein, 10 aa, Artificial Sequence
  Description of Artificial Sequence: Synthetic epitope
KSSKAEDEYE

SEQ ID NO: 24760 - protein, 10 aa, Artificial Sequence
  Description of Artificial Sequence: Synthetic epitope
KSSKAILIKE

SEQ ID NO: 24761 - protein, 10 aa, Artificial Sequence
  Description of Artificial Sequence: Synthetic epitope
KSSKEELNNS

SEQ ID NO: 24762 - protein, 10 aa, Artificial Sequence
  Description of Artificial Sequence: Synthetic epitope
KSSKEMRESG

SEQ ID NO: 24763 - protein, 10 aa, Artificial Sequence
  Description of Artificial Sequence: Synthetic epitope
KSSKSEAKGT

SEQ ID NO: 24764 - protein, 10 aa, Artificial Sequence
  Description of Artificial Sequence: Synthetic epitope
KSSKSNKTPP

SEQ ID NO: 24765 - protein, 10 aa, Artificial Sequence
  Description of Artificial Sequence: Synthetic epitope
KSSLAAELNK

SEQ ID NO: 24766 - protein, 10 aa, Artificial Sequence
  Description of Artificial Sequence: Synthetic epitope
KSSLKGVSNQ

SEQ ID NO: 24767 - protein, 10 aa, Artificial Sequence
  Description of Artificial Sequence: Synthetic epitope
KSSLKSNVLN

SEQ ID NO: 24768 - protein, 10 aa, Artificial Sequence
  Description of Artificial Sequence: Synthetic epitope
KSSLLRAISN

SEQ ID NO: 24769 - protein, 10 aa, Artificial Sequence
  Description of Artificial Sequence: Synthetic epitope
KSSMKVSATP

SEQ ID NO: 24770 - protein, 10 aa, Artificial Sequence
  Description of Artificial Sequence: Synthetic epitope
KSSMRLDEHD

SEQ ID NO: 24771 - protein, 10 aa, Artificial Sequence
  Description of Artificial Sequence: Synthetic epitope
KSSNNVASKI

SEQ ID NO: 24772 - protein, 10 aa, Artificial Sequence
  Description of Artificial Sequence: Synthetic epitope
KSSNQTAPSL

SEQ ID NO: 24773 - protein, 10 aa, Artificial Sequence
  Description of Artificial Sequence: Synthetic epitope
KSSQHLLTKN

SEQ ID NO: 24774 - protein, 10 aa, Artificial Sequence
  Description of Artificial Sequence: Synthetic epitope
KSSQQNSGAR

SEQ ID NO: 24775 - protein, 10 aa, Artificial Sequence
  Description of Artificial Sequence: Synthetic epitope
KSSQQPAAST

SEQ ID NO: 24776 - protein, 10 aa, Artificial Sequence
  Description of Artificial Sequence: Synthetic epitope
KSSQTIKSRE

SEQ ID NO: 24777 - protein, 10 aa, Artificial Sequence
  Description of Artificial Sequence: Synthetic epitope
KSSQTPKLSG

SEQ ID NO: 24778 - protein, 10 aa, Artificial Sequence
  Description of Artificial Sequence: Synthetic epitope
KSSQVQRRFF

SEQ ID NO: 24779 - protein, 10 aa, Artificial Sequence
  Description of Artificial Sequence: Synthetic epitope
KSSREKTMKN

SEQ ID NO: 24780 - protein, 10 aa, Artificial Sequence
  Description of Artificial Sequence: Synthetic epitope
KSSRIKVKDT

SEQ ID NO: 24781 - protein, 10 aa, Artificial Sequence
  Description of Artificial Sequence: Synthetic epitope
KSSTAISSIA

SEQ ID NO: 24782 - protein, 10 aa, Artificial Sequence
  Description of Artificial Sequence: Synthetic epitope
KSSTHSSTKK

SEQ ID NO: 24783 - protein, 10 aa, Artificial Sequence
  Description of Artificial Sequence: Synthetic epitope
KSSTSIDEDA

SEQ ID NO: 24784 - protein, 10 aa, Artificial Sequence
  Description of Artificial Sequence: Synthetic epitope
KSSTSTLQTA

SEQ ID NO: 24785 - protein, 10 aa, Artificial Sequence
  Description of Artificial Sequence: Synthetic epitope
KSSTSVGQLQ

SEQ ID NO: 24786 - protein, 10 aa, Artificial Sequence
  Description of Artificial Sequence: Synthetic epitope
KSSTTFFELQ

SEQ ID NO: 24787 - protein, 10 aa, Artificial Sequence
  Description of Artificial Sequence: Synthetic epitope
KSSVESLSQD

SEQ ID NO: 24788 - protein, 10 aa, Artificial Sequence
  Description of Artificial Sequence: Synthetic epitope
KSSVIGASSQ

SEQ ID NO: 24789 - protein, 10 aa, Artificial Sequence
  Description of Artificial Sequence: Synthetic epitope
KSSVKVNSAL

SEQ ID NO: 24790 - protein, 10 aa, Artificial Sequence
  Description of Artificial Sequence: Synthetic epitope
KSSVSSLRLQ

SEQ ID NO: 24791 - protein, 10 aa, Artificial Sequence
  Description of Artificial Sequence: Synthetic epitope
KSSVVIKQTG

SEQ ID NO: 24792 - protein, 10 aa, Artificial Sequence
  Description of Artificial Sequence: Synthetic epitope
KSSVVSLADQ

SEQ ID NO: 24793 - protein, 10 aa, Artificial Sequence
  Description of Artificial Sequence: Synthetic epitope
KSSVYANAFP

SEQ ID NO: 24794 - protein, 10 aa, Artificial Sequence
  Description of Artificial Sequence: Synthetic epitope
KSSYFQTTEI

SEQ ID NO: 24795 - protein, 10 aa, Artificial Sequence
  Description of Artificial Sequence: Synthetic epitope
KSTAKELEAV

SEQ ID NO: 24796 - protein, 10 aa, Artificial Sequence
  Description of Artificial Sequence: Synthetic epitope
KSTAMEETAI

SEQ ID NO: 24797 - protein, 10 aa, Artificial Sequence
  Description of Artificial Sequence: Synthetic epitope
KSTAPETAIE

SEQ ID NO: 24798 - protein, 10 aa, Artificial Sequence
  Description of Artificial Sequence: Synthetic epitope
KSTASLTKPH

SEQ ID NO: 24799 - protein, 10 aa, Artificial Sequence
  Description of Artificial Sequence: Synthetic epitope
KSTASNDLIK

SEQ ID NO: 24800 - protein, 10 aa, Artificial Sequence
  Description of Artificial Sequence: Synthetic epitope
KSTEEGEVAA

SEQ ID NO: 24801 - protein, 10 aa, Artificial Sequence
  Description of Artificial Sequence: Synthetic epitope
KSTEKQSVKQ

SEQ ID NO: 24802 - protein, 10 aa, Artificial Sequence
  Description of Artificial Sequence: Synthetic epitope
KSTEPSQSVP

SEQ ID NO: 24803 - protein, 10 aa, Artificial Sequence
  Description of Artificial Sequence: Synthetic epitope
KSTEQLTEEV

SEQ ID NO: 24804 - protein, 10 aa, Artificial Sequence
  Description of Artificial Sequence: Synthetic epitope
KSTFSKTDSI

SEQ ID NO: 24805 - protein, 10 aa, Artificial Sequence
  Description of Artificial Sequence: Synthetic epitope
KSTINEALPK

SEQ ID NO: 24806 - protein, 10 aa, Artificial Sequence
  Description of Artificial Sequence: Synthetic epitope
KSTIYLVRSG

SEQ ID NO: 24807 - protein, 10 aa, Artificial Sequence
  Description of Artificial Sequence: Synthetic epitope
KSTKKDFEID

SEQ ID NO: 24808 - protein, 10 aa, Artificial Sequence
  Description of Artificial Sequence: Synthetic epitope
KSTKKFWIQK

SEQ ID NO: 24809 - protein, 10 aa, Artificial Sequence
  Description of Artificial Sequence: Synthetic epitope
KSTKLGLNQN

SEQ ID NO: 24810 - protein, 10 aa, Artificial Sequence
  Description of Artificial Sequence: Synthetic epitope
KSTKQAEKQT

SEQ ID NO: 24811 - protein, 10 aa, Artificial Sequence
  Description of Artificial Sequence: Synthetic epitope
KSTKTSRSAK

SEQ ID NO: 24812 - protein, 10 aa, Artificial Sequence
  Description of Artificial Sequence: Synthetic epitope
KSTKVFHENQ

SEQ ID NO: 24813 - protein, 10 aa, Artificial Sequence
  Description of Artificial Sequence: Synthetic epitope
KSTLDIVLAN

SEQ ID NO: 24814 - protein, 10 aa, Artificial Sequence
  Description of Artificial Sequence: Synthetic epitope
KSTLGASTTS

SEQ ID NO: 24815 - protein, 10 aa, Artificial Sequence
  Description of Artificial Sequence: Synthetic epitope
KSTLKDEIIE

SEQ ID NO: 24816 - protein, 10 aa, Artificial Sequence
  Description of Artificial Sequence: Synthetic epitope
KSTNQQTATD

SEQ ID NO: 24817 - protein, 10 aa, Artificial Sequence
  Description of Artificial Sequence: Synthetic epitope
KSTNSHKNAT

SEQ ID NO: 24818 - protein, 10 aa, Artificial Sequence
  Description of Artificial Sequence: Synthetic epitope
KSTPPTISVT

SEQ ID NO: 24819 - protein, 10 aa, Artificial Sequence
  Description of Artificial Sequence: Synthetic epitope
KSTPVTSAVQ

SEQ ID NO: 24820 - protein, 10 aa, Artificial Sequence
  Description of Artificial Sequence: Synthetic epitope
KSTQTILGQQ

SEQ ID NO: 24821 - protein, 10 aa, Artificial Sequence
  Description of Artificial Sequence: Synthetic epitope
KSTQTVAKTT

SEQ ID NO: 24822 - protein, 10 aa, Artificial Sequence
  Description of Artificial Sequence: Synthetic epitope
KSTRAHYLKK

SEQ ID NO: 24823 - protein, 10 aa, Artificial Sequence
  Description of Artificial Sequence: Synthetic epitope
KSTSEENIGI

SEQ ID NO: 24824 - protein, 10 aa, Artificial Sequence
  Description of Artificial Sequence: Synthetic epitope
KSTSHFRTGE

SEQ ID NO: 24825 - protein, 10 aa, Artificial Sequence
  Description of Artificial Sequence: Synthetic epitope
KSTSRDAVLY

SEQ ID NO: 24826 - protein, 10 aa, Artificial Sequence
  Description of Artificial Sequence: Synthetic epitope
KSTSTSEPTT

SEQ ID NO: 24827 - protein, 10 aa, Artificial Sequence
  Description of Artificial Sequence: Synthetic epitope
KSTSTTGGLT

SEQ ID NO: 24828 - protein, 10 aa, Artificial Sequence
  Description of Artificial Sequence: Synthetic epitope
KSTSYTKIAS

SEQ ID NO: 24829 - protein, 10 aa, Artificial Sequence
  Description of Artificial Sequence: Synthetic epitope
KSTTKMSLNE

SEQ ID NO: 24830 - protein, 10 aa, Artificial Sequence
  Description of Artificial Sequence: Synthetic epitope
KSTTKRESLD

SEQ ID NO: 24831 - protein, 10 aa, Artificial Sequence
  Description of Artificial Sequence: Synthetic epitope
KSTTLAVDYP

SEQ ID NO: 24832 - protein, 10 aa, Artificial Sequence
  Description of Artificial Sequence: Synthetic epitope
KSTTQKIVEE

SEQ ID NO: 24833 - protein, 10 aa, Artificial Sequence
  Description of Artificial Sequence: Synthetic epitope
KSTTSITDAK

SEQ ID NO: 24834 - protein, 10 aa, Artificial Sequence
  Description of Artificial Sequence: Synthetic epitope
KSTTSVSEED

SEQ ID NO: 24835 - protein, 10 aa, Artificial Sequence
  Description of Artificial Sequence: Synthetic epitope
KSTVKIAKVT

SEQ ID NO: 24836 - protein, 10 aa, Artificial Sequence
  Description of Artificial Sequence: Synthetic epitope
KSTVPVRAAE

SEQ ID NO: 24837 - protein, 10 aa, Artificial Sequence
  Description of Artificial Sequence: Synthetic epitope
KSTVYIIENA

SEQ ID NO: 24838 - protein, 10 aa, Artificial Sequence
  Description of Artificial Sequence: Synthetic epitope
KSVAEASELT

SEQ ID NO: 24839 - protein, 10 aa, Artificial Sequence
  Description of Artificial Sequence: Synthetic epitope
KSVASKSIRR

SEQ ID NO: 24840 - protein, 10 aa, Artificial Sequence
  Description of Artificial Sequence: Synthetic epitope
KSVDKSSNRE

SEQ ID NO: 24841 - protein, 10 aa, Artificial Sequence
  Description of Artificial Sequence: Synthetic epitope
KSVELLEILL

SEQ ID NO: 24842 - protein, 10 aa, Artificial Sequence
  Description of Artificial Sequence: Synthetic epitope
KSVEVFPLKA

SEQ ID NO: 24843 - protein, 10 aa, Artificial Sequence
  Description of Artificial Sequence: Synthetic epitope
KSVGYKLPNK

SEQ ID NO: 24844 - protein, 10 aa, Artificial Sequence
  Description of Artificial Sequence: Synthetic epitope
KSVKIEEREG

SEQ ID NO: 24845 - protein, 10 aa, Artificial Sequence
  Description of Artificial Sequence: Synthetic epitope
KSVKQNTSSV

SEQ ID NO: 24846 - protein, 10 aa, Artificial Sequence
  Description of Artificial Sequence: Synthetic epitope
KSVLNARLSS

SEQ ID NO: 24847 - protein, 10 aa, Artificial Sequence
  Description of Artificial Sequence: Synthetic epitope
KSVLRLEIKI

SEQ ID NO: 24848 - protein, 10 aa, Artificial Sequence
  Description of Artificial Sequence: Synthetic epitope
KSVLTRVHSN

SEQ ID NO: 24849 - protein, 10 aa, Artificial Sequence
  Description of Artificial Sequence: Synthetic epitope
KSVLVTLKAG

SEQ ID NO: 24850 - protein, 10 aa, Artificial Sequence
  Description of Artificial Sequence: Synthetic epitope
KSVMDKQYEI

SEQ ID NO: 24851 - protein, 10 aa, Artificial Sequence
  Description of Artificial Sequence: Synthetic epitope
KSVNKEEDDK

SEQ ID NO: 24852 - protein, 10 aa, Artificial Sequence
  Description of Artificial Sequence: Synthetic epitope
KSVNKTDSQT

SEQ ID NO: 24853 - protein, 10 aa, Artificial Sequence
  Description of Artificial Sequence: Synthetic epitope
KSVRETNPHH

SEQ ID NO: 24854 - protein, 10 aa, Artificial Sequence
  Description of Artificial Sequence: Synthetic epitope
KSVSEVRVST

SEQ ID NO: 24855 - protein, 10 aa, Artificial Sequence
  Description of Artificial Sequence: Synthetic epitope
KSVSGKASIK

SEQ ID NO: 24856 - protein, 10 aa, Artificial Sequence
  Description of Artificial Sequence: Synthetic epitope
KSVSMLSLNT

SEQ ID NO: 24857 - protein, 10 aa, Artificial Sequence
  Description of Artificial Sequence: Synthetic epitope
KSVSQVTKSV

SEQ ID NO: 24858 - protein, 10 aa, Artificial Sequence
  Description of Artificial Sequence: Synthetic epitope
KSVSTSLEKK

SEQ ID NO: 24859 - protein, 10 aa, Artificial Sequence
  Description of Artificial Sequence: Synthetic epitope
KSVTKDIWKE

SEQ ID NO: 24860 - protein, 10 aa, Artificial Sequence
  Description of Artificial Sequence: Synthetic epitope
KSVTQQIHFK

SEQ ID NO: 24861 - protein, 10 aa, Artificial Sequence
  Description of Artificial Sequence: Synthetic epitope
KSVTQSSKRL

SEQ ID NO: 24862 - protein, 10 aa, Artificial Sequence
  Description of Artificial Sequence: Synthetic epitope
KSVTSAHSHA

SEQ ID NO: 24863 - protein, 10 aa, Artificial Sequence
  Description of Artificial Sequence: Synthetic epitope
KSVTSANFSN

SEQ ID NO: 24864 - protein, 10 aa, Artificial Sequence
  Description of Artificial Sequence: Synthetic epitope
KSVVEKTTSG

SEQ ID NO: 24865 - protein, 10 aa, Artificial Sequence
  Description of Artificial Sequence: Synthetic epitope
KSVVFTSAQA

SEQ ID NO: 24866 - protein, 10 aa, Artificial Sequence
  Description of Artificial Sequence: Synthetic epitope
KSVVKSADEV

SEQ ID NO: 24867 - protein, 10 aa, Artificial Sequence
  Description of Artificial Sequence: Synthetic epitope
KSVVLQLADG

SEQ ID NO: 24868 - protein, 10 aa, Artificial Sequence
  Description of Artificial Sequence: Synthetic epitope
KSVVSEIDKN

SEQ ID NO: 24869 - protein, 10 aa, Artificial Sequence
  Description of Artificial Sequence: Synthetic epitope
KSVVSLKNEE

SEQ ID NO: 24870 - protein, 10 aa, Artificial Sequence
  Description of Artificial Sequence: Synthetic epitope
KSWLAKLLEP

SEQ ID NO: 24871 - protein, 10 aa, Artificial Sequence
  Description of Artificial Sequence: Synthetic epitope
KSWSNTSPVG

SEQ ID NO: 24872 - protein, 10 aa, Artificial Sequence
  Description of Artificial Sequence: Synthetic epitope
KSWSWNYYRI

SEQ ID NO: 24873 - protein, 10 aa, Artificial Sequence
  Description of Artificial Sequence: Synthetic epitope
KSYAIRDSRQ

SEQ ID NO: 24874 - protein, 10 aa, Artificial Sequence
  Description of Artificial Sequence: Synthetic epitope
KSYDIMAKRI

SEQ ID NO: 24875 - protein, 10 aa, Artificial Sequence
  Description of Artificial Sequence: Synthetic epitope
KSYEDATKIT

SEQ ID NO: 24876 - protein, 10 aa, Artificial Sequence
  Description of Artificial Sequence: Synthetic epitope
KSYEKHLVEF

SEQ ID NO: 24877 - protein, 10 aa, Artificial Sequence
  Description of Artificial Sequence: Synthetic epitope
KSYERAQKEG

SEQ ID NO: 24878 - protein, 10 aa, Artificial Sequence
  Description of Artificial Sequence: Synthetic epitope
KSYESSLPQT

SEQ ID NO: 24879 - protein, 10 aa, Artificial Sequence
  Description of Artificial Sequence: Synthetic epitope
KSYFEKSKEQ

SEQ ID NO: 24880 - protein, 10 aa, Artificial Sequence
  Description of Artificial Sequence: Synthetic epitope
KSYIEEKKNN

SEQ ID NO: 24881 - protein, 10 aa, Artificial Sequence
  Description of Artificial Sequence: Synthetic epitope
KSYITIFNKS

SEQ ID NO: 24882 - protein, 10 aa, Artificial Sequence
  Description of Artificial Sequence: Synthetic epitope
KSYLPNAHLE

SEQ ID NO: 24883 - protein, 10 aa, Artificial Sequence
  Description of Artificial Sequence: Synthetic epitope
KSYQAQAEGE

SEQ ID NO: 24884 - protein, 10 aa, Artificial Sequence
  Description of Artificial Sequence: Synthetic epitope
KSYQGKSLGT

SEQ ID NO: 24885 - protein, 10 aa, Artificial Sequence
  Description of Artificial Sequence: Synthetic epitope
KSYSMPISIE

SEQ ID NO: 24886 - protein, 10 aa, Artificial Sequence
  Description of Artificial Sequence: Synthetic epitope
KSYSVQGQSV

SEQ ID NO: 24887 - protein, 10 aa, Artificial Sequence
  Description of Artificial Sequence: Synthetic epitope
KSYTSQKNER

SEQ ID NO: 24888 - protein, 10 aa, Artificial Sequence
  Description of Artificial Sequence: Synthetic epitope
KSYTSTQTSS

SEQ ID NO: 24889 - protein, 10 aa, Artificial Sequence
  Description of Artificial Sequence: Synthetic epitope
KTAALQNVNI

SEQ ID NO: 24890 - protein, 10 aa, Artificial Sequence
  Description of Artificial Sequence: Synthetic epitope
KTAAVLKWNR

SEQ ID NO: 24891 - protein, 10 aa, Artificial Sequence
  Description of Artificial Sequence: Synthetic epitope
KTADTKKASR

SEQ ID NO: 24892 - protein, 10 aa, Artificial Sequence
  Description of Artificial Sequence: Synthetic epitope
KTAEDRRMSD

SEQ ID NO: 24893 - protein, 10 aa, Artificial Sequence
  Description of Artificial Sequence: Synthetic epitope
KTAEISSTAL

SEQ ID NO: 24894 - protein, 10 aa, Artificial Sequence
  Description of Artificial Sequence: Synthetic epitope
KTAEKITQQR

SEQ ID NO: 24895 - protein, 10 aa, Artificial Sequence
  Description of Artificial Sequence: Synthetic epitope
KTAENAAKAL

SEQ ID NO: 24896 - protein, 10 aa, Artificial Sequence
  Description of Artificial Sequence: Synthetic epitope
KTAESASSEK

SEQ ID NO: 24897 - protein, 10 aa, Artificial Sequence
  Description of Artificial Sequence: Synthetic epitope
KTAESSLLED

SEQ ID NO: 24898 - protein, 10 aa, Artificial Sequence
  Description of Artificial Sequence: Synthetic epitope
KTAFSAMTQN

SEQ ID NO: 24899 - protein, 10 aa, Artificial Sequence
  Description of Artificial Sequence: Synthetic epitope
KTAGTAKVRE

SEQ ID NO: 24900 - protein, 10 aa, Artificial Sequence
  Description of Artificial Sequence: Synthetic epitope
KTAIGAVEKD

SEQ ID NO: 24901 - protein, 10 aa, Artificial Sequence
  Description of Artificial Sequence: Synthetic epitope
KTAIGNTLVQ

SEQ ID NO: 24902 - protein, 10 aa, Artificial Sequence
  Description of Artificial Sequence: Synthetic epitope
KTAKALMEAV

SEQ ID NO: 24903 - protein, 10 aa, Artificial Sequence
  Description of Artificial Sequence: Synthetic epitope
KTAKIKVKEN

SEQ ID NO: 24904 - protein, 10 aa, Artificial Sequence
  Description of Artificial Sequence: Synthetic epitope
KTALARKEEA

SEQ ID NO: 24905 - protein, 10 aa, Artificial Sequence
  Description of Artificial Sequence: Synthetic epitope
KTALLTEARE

SEQ ID NO: 24906 - protein, 10 aa, Artificial Sequence
  Description of Artificial Sequence: Synthetic epitope
KTALSSVKTS

SEQ ID NO: 24907 - protein, 10 aa, Artificial Sequence
  Description of Artificial Sequence: Synthetic epitope
KTAMTLDETS

SEQ ID NO: 24908 - protein, 10 aa, Artificial Sequence
  Description of Artificial Sequence: Synthetic epitope
KTANDTSTEA

SEQ ID NO: 24909 - protein, 10 aa, Artificial Sequence
  Description of Artificial Sequence: Synthetic epitope
KTAQNARALK

SEQ ID NO: 24910 - protein, 10 aa, Artificial Sequence
  Description of Artificial Sequence: Synthetic epitope
KTARKKHKSS

SEQ ID NO: 24911 - protein, 10 aa, Artificial Sequence
  Description of Artificial Sequence: Synthetic epitope
KTASDQATTA

SEQ ID NO: 24912 - protein, 10 aa, Artificial Sequence
  Description of Artificial Sequence: Synthetic epitope
KTASEMERVR

SEQ ID NO: 24913 - protein, 10 aa, Artificial Sequence
  Description of Artificial Sequence: Synthetic epitope
KTASSLSYDI

SEQ ID NO: 24914 - protein, 10 aa, Artificial Sequence
  Description of Artificial Sequence: Synthetic epitope
KTASTIANSS

SEQ ID NO: 24915 - protein, 10 aa, Artificial Sequence
  Description of Artificial Sequence: Synthetic epitope
KTATGVQGKE

SEQ ID NO: 24916 - protein, 10 aa, Artificial Sequence
  Description of Artificial Sequence: Synthetic epitope
KTATKLIGDD

SEQ ID NO: 24917 - protein, 10 aa, Artificial Sequence
  Description of Artificial Sequence: Synthetic epitope
KTAVITVENG

SEQ ID NO: 24918 - protein, 10 aa, Artificial Sequence
  Description of Artificial Sequence: Synthetic epitope
KTAVSSELRT

SEQ ID NO: 24919 - protein, 10 aa, Artificial Sequence
  Description of Artificial Sequence: Synthetic epitope
KTAVTAAHAV

SEQ ID NO: 24920 - protein, 10 aa, Artificial Sequence
  Description of Artificial Sequence: Synthetic epitope
KTAVTTVPSM

SEQ ID NO: 24921 - protein, 10 aa, Artificial Sequence
  Description of Artificial Sequence: Synthetic epitope
KTAYYKGNLV

SEQ ID NO: 24922 - protein, 10 aa, Artificial Sequence
  Description of Artificial Sequence: Synthetic epitope
KTDAEEDSLK

SEQ ID NO: 24923 - protein, 10 aa, Artificial Sequence
  Description of Artificial Sequence: Synthetic epitope
KTDAPLNIRS

SEQ ID NO: 24924 - protein, 10 aa, Artificial Sequence
  Description of Artificial Sequence: Synthetic epitope
KTDDSTSGLT

SEQ ID NO: 24925 - protein, 10 aa, Artificial Sequence
  Description of Artificial Sequence: Synthetic epitope
KTDESVVDRA

SEQ ID NO: 24926 - protein, 10 aa, Artificial Sequence
  Description of Artificial Sequence: Synthetic epitope
KTDEVVTLTP

SEQ ID NO: 24927 - protein, 10 aa, Artificial Sequence
  Description of Artificial Sequence: Synthetic epitope
KTDFDKNKIW

SEQ ID NO: 24928 - protein, 10 aa, Artificial Sequence
  Description of Artificial Sequence: Synthetic epitope
KTDGATVKAA

SEQ ID NO: 24929 - protein, 10 aa, Artificial Sequence
  Description of Artificial Sequence: Synthetic epitope
KTDGRMREIV

SEQ ID NO: 24930 - protein, 10 aa, Artificial Sequence
  Description of Artificial Sequence: Synthetic epitope
KTDHLSLDKA

SEQ ID NO: 24931 - protein, 10 aa, Artificial Sequence
  Description of Artificial Sequence: Synthetic epitope
KTDIKVVDRD

SEQ ID NO: 24932 - protein, 10 aa, Artificial Sequence
  Description of Artificial Sequence: Synthetic epitope
KTDILSLTSQ

SEQ ID NO: 24933 - protein, 10 aa, Artificial Sequence
  Description of Artificial Sequence: Synthetic epitope
KTDKASEEVS

SEQ ID NO: 24934 - protein, 10 aa, Artificial Sequence
  Description of Artificial Sequence: Synthetic epitope
KTDKELAVQY

SEQ ID NO: 24935 - protein, 10 aa, Artificial Sequence
  Description of Artificial Sequence: Synthetic epitope
KTDKLLRAMQ

SEQ ID NO: 24936 - protein, 10 aa, Artificial Sequence
  Description of Artificial Sequence: Synthetic epitope
KTDNVATSSP

SEQ ID NO: 24937 - protein, 10 aa, Artificial Sequence
  Description of Artificial Sequence: Synthetic epitope
KTDSHFDWWE

SEQ ID NO: 24938 - protein, 10 aa, Artificial Sequence
  Description of Artificial Sequence: Synthetic epitope
KTDSKTEEKT

SEQ ID NO: 24939 - protein, 10 aa, Artificial Sequence
  Description of Artificial Sequence: Synthetic epitope
KTDTVSIQAS

SEQ ID NO: 24940 - protein, 10 aa, Artificial Sequence
  Description of Artificial Sequence: Synthetic epitope
KTDVAVKDDP

SEQ ID NO: 24941 - protein, 10 aa, Artificial Sequence
  Description of Artificial Sequence: Synthetic epitope
KTDVILDRKK

SEQ ID NO: 24942 - protein, 10 aa, Artificial Sequence
  Description of Artificial Sequence: Synthetic epitope
KTDVSKIVME

SEQ ID NO: 24943 - protein, 10 aa, Artificial Sequence
  Description of Artificial Sequence: Synthetic epitope
KTDVTVVRFP

SEQ ID NO: 24944 - protein, 10 aa, Artificial Sequence
  Description of Artificial Sequence: Synthetic epitope
KTEAKREAMT

SEQ ID NO: 24945 - protein, 10 aa, Artificial Sequence
  Description of Artificial Sequence: Synthetic epitope
KTEASSQTSS

SEQ ID NO: 24946 - protein, 10 aa, Artificial Sequence
  Description of Artificial Sequence: Synthetic epitope
KTEDLTEGNK

SEQ ID NO: 24947 - protein, 10 aa, Artificial Sequence
  Description of Artificial Sequence: Synthetic epitope
KTEDMVSQLH

SEQ ID NO: 24948 - protein, 10 aa, Artificial Sequence
  Description of Artificial Sequence: Synthetic epitope
KTEESESQVE

SEQ ID NO: 24949 - protein, 10 aa, Artificial Sequence
  Description of Artificial Sequence: Synthetic epitope
KTEFSESAAL

SEQ ID NO: 24950 - protein, 10 aa, Artificial Sequence
  Description of Artificial Sequence: Synthetic epitope
KTEHAKDQEK

SEQ ID NO: 24951 - protein, 10 aa, Artificial Sequence
  Description of Artificial Sequence: Synthetic epitope
KTEIAERKIK

SEQ ID NO: 24952 - protein, 10 aa, Artificial Sequence
  Description of Artificial Sequence: Synthetic epitope
KTEISVESKH

SEQ ID NO: 24953 - protein, 10 aa, Artificial Sequence
  Description of Artificial Sequence: Synthetic epitope
KTEKKEEVVK

SEQ ID NO: 24954 - protein, 10 aa, Artificial Sequence
  Description of Artificial Sequence: Synthetic epitope
KTEKKSSGMD

SEQ ID NO: 24955 - protein, 10 aa, Artificial Sequence
  Description of Artificial Sequence: Synthetic epitope
KTEKSQMDRK

SEQ ID NO: 24956 - protein, 10 aa, Artificial Sequence
  Description of Artificial Sequence: Synthetic epitope
KTELNKIASQ

SEQ ID NO: 24957 - protein, 10 aa, Artificial Sequence
  Description of Artificial Sequence: Synthetic epitope
KTELNLSKGS

SEQ ID NO: 24958 - protein, 10 aa, Artificial Sequence
  Description of Artificial Sequence: Synthetic epitope
KTEMSEVLTE

SEQ ID NO: 24959 - protein, 10 aa, Artificial Sequence
  Description of Artificial Sequence: Synthetic epitope
KTENTDASWN

SEQ ID NO: 24960 - protein, 10 aa, Artificial Sequence
  Description of Artificial Sequence: Synthetic epitope
KTEQEAAQRA

SEQ ID NO: 24961 - protein, 10 aa, Artificial Sequence
  Description of Artificial Sequence: Synthetic epitope
KTEQSEDKPE

SEQ ID NO: 24962 - protein, 10 aa, Artificial Sequence
  Description of Artificial Sequence: Synthetic epitope
KTERHNREIE

SEQ ID NO: 24963 - protein, 10 aa, Artificial Sequence
  Description of Artificial Sequence: Synthetic epitope
KTERSDLEYQ

SEQ ID NO: 24964 - protein, 10 aa, Artificial Sequence
  Description of Artificial Sequence: Synthetic epitope
KTESSGIETE

SEQ ID NO: 24965 - protein, 10 aa, Artificial Sequence
  Description of Artificial Sequence: Synthetic epitope
KTESTLKTTQ

SEQ ID NO: 24966 - protein, 10 aa, Artificial Sequence
  Description of Artificial Sequence: Synthetic epitope
KTESTLKTTQ

SEQ ID NO: 24967 - protein, 10 aa, Artificial Sequence
  Description of Artificial Sequence: Synthetic epitope
KTETEVQNPD

SEQ ID NO: 24968 - protein, 10 aa, Artificial Sequence
  Description of Artificial Sequence: Synthetic epitope
KTETIIYSRE

SEQ ID NO: 24969 - protein, 10 aa, Artificial Sequence
  Description of Artificial Sequence: Synthetic epitope
KTETILKTRS

SEQ ID NO: 24970 - protein, 10 aa, Artificial Sequence
  Description of Artificial Sequence: Synthetic epitope
KTEVDIYNSD

SEQ ID NO: 24971 - protein, 10 aa, Artificial Sequence
  Description of Artificial Sequence: Synthetic epitope
KTEVEAGASG

SEQ ID NO: 24972 - protein, 10 aa, Artificial Sequence
  Description of Artificial Sequence: Synthetic epitope
KTEVRRKVAQ

SEQ ID NO: 24973 - protein, 10 aa, Artificial Sequence
  Description of Artificial Sequence: Synthetic epitope
KTEVSDKSIA

SEQ ID NO: 24974 - protein, 10 aa, Artificial Sequence
  Description of Artificial Sequence: Synthetic epitope
KTEVSSVSSV

SEQ ID NO: 24975 - protein, 10 aa, Artificial Sequence
  Description of Artificial Sequence: Synthetic epitope
KTEYEEAQDA

SEQ ID NO: 24976 - protein, 10 aa, Artificial Sequence
  Description of Artificial Sequence: Synthetic epitope
KTFGTLVSIP

SEQ ID NO: 24977 - protein, 10 aa, Artificial Sequence
  Description of Artificial Sequence: Synthetic epitope
KTFIFMEVLG

SEQ ID NO: 24978 - protein, 10 aa, Artificial Sequence
  Description of Artificial Sequence: Synthetic epitope
KTFKALKEEG

SEQ ID NO: 24979 - protein, 10 aa, Artificial Sequence
  Description of Artificial Sequence: Synthetic epitope
KTFLIPVLFN

SEQ ID NO: 24980 - protein, 10 aa, Artificial Sequence
  Description of Artificial Sequence: Synthetic epitope
KTFLLTVKHL

SEQ ID NO: 24981 - protein, 10 aa, Artificial Sequence
  Description of Artificial Sequence: Synthetic epitope
KTFPTMKMFE

SEQ ID NO: 24982 - protein, 10 aa, Artificial Sequence
  Description of Artificial Sequence: Synthetic epitope
KTFVQTQSAQ

SEQ ID NO: 24983 - protein, 10 aa, Artificial Sequence
  Description of Artificial Sequence: Synthetic epitope
KTFVRSQTTQ

SEQ ID NO: 24984 - protein, 10 aa, Artificial Sequence
  Description of Artificial Sequence: Synthetic epitope
KTFVSSVNKH

SEQ ID NO: 24985 - protein, 10 aa, Artificial Sequence
  Description of Artificial Sequence: Synthetic epitope
KTFWQSVSKE

SEQ ID NO: 24986 - protein, 10 aa, Artificial Sequence
  Description of Artificial Sequence: Synthetic epitope
KTGELEKETA

SEQ ID NO: 24987 - protein, 10 aa, Artificial Sequence
  Description of Artificial Sequence: Synthetic epitope
KTGESQNQLA

SEQ ID NO: 24988 - protein, 10 aa, Artificial Sequence
  Description of Artificial Sequence: Synthetic epitope
KTGETMIQWS

SEQ ID NO: 24989 - protein, 10 aa, Artificial Sequence
  Description of Artificial Sequence: Synthetic epitope
KTGEVKLASA

SEQ ID NO: 24990 - protein, 10 aa, Artificial Sequence
  Description of Artificial Sequence: Synthetic epitope
KTGGIAEWLN

SEQ ID NO: 24991 - protein, 10 aa, Artificial Sequence
  Description of Artificial Sequence: Synthetic epitope
KTGIAQLVKY

SEQ ID NO: 24992 - protein, 10 aa, Artificial Sequence
  Description of Artificial Sequence: Synthetic epitope
KTGIVEKVKG

SEQ ID NO: 24993 - protein, 10 aa, Artificial Sequence
  Description of Artificial Sequence: Synthetic epitope
KTGKESNSIE

SEQ ID NO: 24994 - protein, 10 aa, Artificial Sequence
  Description of Artificial Sequence: Synthetic epitope
KTGKFKDDKL

SEQ ID NO: 24995 - protein, 10 aa, Artificial Sequence
  Description of Artificial Sequence: Synthetic epitope
KTGMKNNATK

SEQ ID NO: 24996 - protein, 10 aa, Artificial Sequence
  Description of Artificial Sequence: Synthetic epitope
KTGNVSKINA

SEQ ID NO: 24997 - protein, 10 aa, Artificial Sequence
  Description of Artificial Sequence: Synthetic epitope
KTGQAAELGG

SEQ ID NO: 24998 - protein, 10 aa, Artificial Sequence
  Description of Artificial Sequence: Synthetic epitope
KTGQIDRRET

SEQ ID NO: 24999 - protein, 10 aa, Artificial Sequence
  Description of Artificial Sequence: Synthetic epitope
KTHGKSTLKK

SEQ ID NO: 25000 - protein, 10 aa, Artificial Sequence
  Description of Artificial Sequence: Synthetic epitope
KTHGQSQSIN

SEQ ID NO: 25001 - protein, 10 aa, Artificial Sequence
  Description of Artificial Sequence: Synthetic epitope
KTHGSKDSET

SEQ ID NO: 25002 - protein, 10 aa, Artificial Sequence
  Description of Artificial Sequence: Synthetic epitope
KTHLQVKNSF

SEQ ID NO: 25003 - protein, 10 aa, Artificial Sequence
  Description of Artificial Sequence: Synthetic epitope
KTHNLKAGPS

SEQ ID NO: 25004 - protein, 10 aa, Artificial Sequence
  Description of Artificial Sequence: Synthetic epitope
KTHRQQEEQQ

SEQ ID NO: 25005 - protein, 10 aa, Artificial Sequence
  Description of Artificial Sequence: Synthetic epitope
KTHTAAIDER

SEQ ID NO: 25006 - protein, 10 aa, Artificial Sequence
  Description of Artificial Sequence: Synthetic epitope
KTHTHSDSAL

SEQ ID NO: 25007 - protein, 10 aa, Artificial Sequence
  Description of Artificial Sequence: Synthetic epitope
KTHTRVSVQR

SEQ ID NO: 25008 - protein, 10 aa, Artificial Sequence
  Description of Artificial Sequence: Synthetic epitope
KTHTTVIHQL

SEQ ID NO: 25009 - protein, 10 aa, Artificial Sequence
  Description of Artificial Sequence: Synthetic epitope
KTIAEIFGNP

SEQ ID NO: 25010 - protein, 10 aa, Artificial Sequence
  Description of Artificial Sequence: Synthetic epitope
KTIALNGVED

SEQ ID NO: 25011 - protein, 10 aa, Artificial Sequence
  Description of Artificial Sequence: Synthetic epitope
KTIASSADPK

SEQ ID NO: 25012 - protein, 10 aa, Artificial Sequence
  Description of Artificial Sequence: Synthetic epitope
KTIDSFTQNQ

SEQ ID NO: 25013 - protein, 10 aa, Artificial Sequence
  Description of Artificial Sequence: Synthetic epitope
KTIEKKLANL

SEQ ID NO: 25014 - protein, 10 aa, Artificial Sequence
  Description of Artificial Sequence: Synthetic epitope
KTIELIEFEK

SEQ ID NO: 25015 - protein, 10 aa, Artificial Sequence
  Description of Artificial Sequence: Synthetic epitope
KTIESANQQT

SEQ ID NO: 25016 - protein, 10 aa, Artificial Sequence
  Description of Artificial Sequence: Synthetic epitope
KTIETVKAAE

SEQ ID NO: 25017 - protein, 10 aa, Artificial Sequence
  Description of Artificial Sequence: Synthetic epitope
KTIGISKIYI

SEQ ID NO: 25018 - protein, 10 aa, Artificial Sequence
  Description of Artificial Sequence: Synthetic epitope
KTIHLLTSLD

SEQ ID NO: 25019 - protein, 10 aa, Artificial Sequence
  Description of Artificial Sequence: Synthetic epitope
KTIKTKLPVT

SEQ ID NO: 25020 - protein, 10 aa, Artificial Sequence
  Description of Artificial Sequence: Synthetic epitope
KTILRGTEEK

SEQ ID NO: 25021 - protein, 10 aa, Artificial Sequence
  Description of Artificial Sequence: Synthetic epitope
KTIMREKYSK

SEQ ID NO: 25022 - protein, 10 aa, Artificial Sequence
  Description of Artificial Sequence: Synthetic epitope
KTINKSALET

SEQ ID NO: 25023 - protein, 10 aa, Artificial Sequence
  Description of Artificial Sequence: Synthetic epitope
KTIQAEDIKK

SEQ ID NO: 25024 - protein, 10 aa, Artificial Sequence
  Description of Artificial Sequence: Synthetic epitope
KTIQNSSVSP

SEQ ID NO: 25025 - protein, 10 aa, Artificial Sequence
  Description of Artificial Sequence: Synthetic epitope
KTIREVQPDV

SEQ ID NO: 25026 - protein, 10 aa, Artificial Sequence
  Description of Artificial Sequence: Synthetic epitope
KTISEVIKAQ

SEQ ID NO: 25027 - protein, 10 aa, Artificial Sequence
  Description of Artificial Sequence: Synthetic epitope
KTISKIEGQL

SEQ ID NO: 25028 - protein, 10 aa, Artificial Sequence
  Description of Artificial Sequence: Synthetic epitope
KTITVTPNRI

SEQ ID NO: 25029 - protein, 10 aa, Artificial Sequence
  Description of Artificial Sequence: Synthetic epitope
KTIVKLQNTS

SEQ ID NO: 25030 - protein, 10 aa, Artificial Sequence
  Description of Artificial Sequence: Synthetic epitope
KTIVMATKMA

SEQ ID NO: 25031 - protein, 10 aa, Artificial Sequence
  Description of Artificial Sequence: Synthetic epitope
KTKADASSKK

SEQ ID NO: 25032 - protein, 10 aa, Artificial Sequence
  Description of Artificial Sequence: Synthetic epitope
KTKAIQAQKL

SEQ ID NO: 25033 - protein, 10 aa, Artificial Sequence
  Description of Artificial Sequence: Synthetic epitope
KTKASSISLD

SEQ ID NO: 25034 - protein, 10 aa, Artificial Sequence
  Description of Artificial Sequence: Synthetic epitope
KTKDMKKPVR

SEQ ID NO: 25035 - protein, 10 aa, Artificial Sequence
  Description of Artificial Sequence: Synthetic epitope
KTKDYKTRDV

SEQ ID NO: 25036 - protein, 10 aa, Artificial Sequence
  Description of Artificial Sequence: Synthetic epitope
KTKEGKGPNA

SEQ ID NO: 25037 - protein, 10 aa, Artificial Sequence
  Description of Artificial Sequence: Synthetic epitope
KTKETRSVEE

SEQ ID NO: 25038 - protein, 10 aa, Artificial Sequence
  Description of Artificial Sequence: Synthetic epitope
KTKGANQSQT

SEQ ID NO: 25039 - protein, 10 aa, Artificial Sequence
  Description of Artificial Sequence: Synthetic epitope
KTKGQEIKER

SEQ ID NO: 25040 - protein, 10 aa, Artificial Sequence
  Description of Artificial Sequence: Synthetic epitope
KTKKQAVGSP

SEQ ID NO: 25041 - protein, 10 aa, Artificial Sequence
  Description of Artificial Sequence: Synthetic epitope
KTKKSHIANE

SEQ ID NO: 25042 - protein, 10 aa, Artificial Sequence
  Description of Artificial Sequence: Synthetic epitope
KTKKVTPFPM

SEQ ID NO: 25043 - protein, 10 aa, Artificial Sequence
  Description of Artificial Sequence: Synthetic epitope
KTKLEEQVQE

SEQ ID NO: 25044 - protein, 10 aa, Artificial Sequence
  Description of Artificial Sequence: Synthetic epitope
KTKLKSILEI

SEQ ID NO: 25045 - protein, 10 aa, Artificial Sequence
  Description of Artificial Sequence: Synthetic epitope
KTKPTQAAGP

SEQ ID NO: 25046 - protein, 10 aa, Artificial Sequence
  Description of Artificial Sequence: Synthetic epitope
KTKQAVPIVE

SEQ ID NO: 25047 - protein, 10 aa, Artificial Sequence
  Description of Artificial Sequence: Synthetic epitope
KTKREFLKAS

SEQ ID NO: 25048 - protein, 10 aa, Artificial Sequence
  Description of Artificial Sequence: Synthetic epitope
KTKRKQLLQD

SEQ ID NO: 25049 - protein, 10 aa, Artificial Sequence
  Description of Artificial Sequence: Synthetic epitope
KTKRQKNMLH

SEQ ID NO: 25050 - protein, 10 aa, Artificial Sequence
  Description of Artificial Sequence: Synthetic epitope
KTKRTDRDQE

SEQ ID NO: 25051 - protein, 10 aa, Artificial Sequence
  Description of Artificial Sequence: Synthetic epitope
KTKSEESLSD

SEQ ID NO: 25052 - protein, 10 aa, Artificial Sequence
  Description of Artificial Sequence: Synthetic epitope
KTKSLEITGE

SEQ ID NO: 25053 - protein, 10 aa, Artificial Sequence
  Description of Artificial Sequence: Synthetic epitope
KTKSLSRAHK

SEQ ID NO: 25054 - protein, 10 aa, Artificial Sequence
  Description of Artificial Sequence: Synthetic epitope
KTKSREAETS

SEQ ID NO: 25055 - protein, 10 aa, Artificial Sequence
  Description of Artificial Sequence: Synthetic epitope
KTKTEEAKLS

SEQ ID NO: 25056 - protein, 10 aa, Artificial Sequence
  Description of Artificial Sequence: Synthetic epitope
KTKTKESALQ

SEQ ID NO: 25057 - protein, 10 aa, Artificial Sequence
  Description of Artificial Sequence: Synthetic epitope
KTKTNGQLAQ

SEQ ID NO: 25058 - protein, 10 aa, Artificial Sequence
  Description of Artificial Sequence: Synthetic epitope
KTKTSKKTPQ

SEQ ID NO: 25059 - protein, 10 aa, Artificial Sequence
  Description of Artificial Sequence: Synthetic epitope
KTKVKKTTSD

SEQ ID NO: 25060 - protein, 10 aa, Artificial Sequence
  Description of Artificial Sequence: Synthetic epitope
KTLAAFGKSP

SEQ ID NO: 25061 - protein, 10 aa, Artificial Sequence
  Description of Artificial Sequence: Synthetic epitope
KTLAAGSISM

SEQ ID NO: 25062 - protein, 10 aa, Artificial Sequence
  Description of Artificial Sequence: Synthetic epitope
KTLALSSAQP

SEQ ID NO: 25063 - protein, 10 aa, Artificial Sequence
  Description of Artificial Sequence: Synthetic epitope
KTLARSLEEQ

SEQ ID NO: 25064 - protein, 10 aa, Artificial Sequence
  Description of Artificial Sequence: Synthetic epitope
KTLAVNFRIR

SEQ ID NO: 25065 - protein, 10 aa, Artificial Sequence
  Description of Artificial Sequence: Synthetic epitope
KTLDQAKAVL

SEQ ID NO: 25066 - protein, 10 aa, Artificial Sequence
  Description of Artificial Sequence: Synthetic epitope
KTLEAQLTPR

SEQ ID NO: 25067 - protein, 10 aa, Artificial Sequence
  Description of Artificial Sequence: Synthetic epitope
KTLEAREKEE

SEQ ID NO: 25068 - protein, 10 aa, Artificial Sequence
  Description of Artificial Sequence: Synthetic epitope
KTLEKVQART

SEQ ID NO: 25069 - protein, 10 aa, Artificial Sequence
  Description of Artificial Sequence: Synthetic epitope
KTLELEALTR

SEQ ID NO: 25070 - protein, 10 aa, Artificial Sequence
  Description of Artificial Sequence: Synthetic epitope
KTLELLNNIR

SEQ ID NO: 25071 - protein, 10 aa, Artificial Sequence
  Description of Artificial Sequence: Synthetic epitope
KTLELRETSV

SEQ ID NO: 25072 - protein, 10 aa, Artificial Sequence
  Description of Artificial Sequence: Synthetic epitope
KTLEMELKLK

SEQ ID NO: 25073 - protein, 10 aa, Artificial Sequence
  Description of Artificial Sequence: Synthetic epitope
KTLENAQAQQ

SEQ ID NO: 25074 - protein, 10 aa, Artificial Sequence
  Description of Artificial Sequence: Synthetic epitope
KTLESSIQGL

SEQ ID NO: 25075 - protein, 10 aa, Artificial Sequence
  Description of Artificial Sequence: Synthetic epitope
KTLHKVKTTS

SEQ ID NO: 25076 - protein, 10 aa, Artificial Sequence
  Description of Artificial Sequence: Synthetic epitope
KTLIAGQKSA

SEQ ID NO: 25077 - protein, 10 aa, Artificial Sequence
  Description of Artificial Sequence: Synthetic epitope
KTLILSLQQL

SEQ ID NO: 25078 - protein, 10 aa, Artificial Sequence
  Description of Artificial Sequence: Synthetic epitope
KTLILSLQQL

SEQ ID NO: 25079 - protein, 10 aa, Artificial Sequence
  Description of Artificial Sequence: Synthetic epitope
KTLKDESSVT

SEQ ID NO: 25080 - protein, 10 aa, Artificial Sequence
  Description of Artificial Sequence: Synthetic epitope
KTLKTEQDEI

SEQ ID NO: 25081 - protein, 10 aa, Artificial Sequence
  Description of Artificial Sequence: Synthetic epitope
KTLLASLTKE

SEQ ID NO: 25082 - protein, 10 aa, Artificial Sequence
  Description of Artificial Sequence: Synthetic epitope
KTLLKTKLSE

SEQ ID NO: 25083 - protein, 10 aa, Artificial Sequence
  Description of Artificial Sequence: Synthetic epitope
KTLMSLDAEG

SEQ ID NO: 25084 - protein, 10 aa, Artificial Sequence
  Description of Artificial Sequence: Synthetic epitope
KTLPAKAKIQ

SEQ ID NO: 25085 - protein, 10 aa, Artificial Sequence
  Description of Artificial Sequence: Synthetic epitope
KTLQKKSGIV

SEQ ID NO: 25086 - protein, 10 aa, Artificial Sequence
  Description of Artificial Sequence: Synthetic epitope
KTLQMEKIKA

SEQ ID NO: 25087 - protein, 10 aa, Artificial Sequence
  Description of Artificial Sequence: Synthetic epitope
KTLQNENELD

SEQ ID NO: 25088 - protein, 10 aa, Artificial Sequence
  Description of Artificial Sequence: Synthetic epitope
KTLQQLNLTL

SEQ ID NO: 25089 - protein, 10 aa, Artificial Sequence
  Description of Artificial Sequence: Synthetic epitope
KTLSESAEGA

SEQ ID NO: 25090 - protein, 10 aa, Artificial Sequence
  Description of Artificial Sequence: Synthetic epitope
KTLSETLLEM

SEQ ID NO: 25091 - protein, 10 aa, Artificial Sequence
  Description of Artificial Sequence: Synthetic epitope
KTLSHPQQMA

SEQ ID NO: 25092 - protein, 10 aa, Artificial Sequence
  Description of Artificial Sequence: Synthetic epitope
KTLSIDQDEF

SEQ ID NO: 25093 - protein, 10 aa, Artificial Sequence
  Description of Artificial Sequence: Synthetic epitope
KTLSKTVFSE

SEQ ID NO: 25094 - protein, 10 aa, Artificial Sequence
  Description of Artificial Sequence: Synthetic epitope
KTLSTSEQFY

SEQ ID NO: 25095 - protein, 10 aa, Artificial Sequence
  Description of Artificial Sequence: Synthetic epitope
KTLTKIPSLI

SEQ ID NO: 25096 - protein, 10 aa, Artificial Sequence
  Description of Artificial Sequence: Synthetic epitope
KTLTQEEKIK

SEQ ID NO: 25097 - protein, 10 aa, Artificial Sequence
  Description of Artificial Sequence: Synthetic epitope
KTLVFASNKL

SEQ ID NO: 25098 - protein, 10 aa, Artificial Sequence
  Description of Artificial Sequence: Synthetic epitope
KTLVKSLMNR

SEQ ID NO: 25099 - protein, 10 aa, Artificial Sequence
  Description of Artificial Sequence: Synthetic epitope
KTLVPELIKE

SEQ ID NO: 25100 - protein, 10 aa, Artificial Sequence
  Description of Artificial Sequence: Synthetic epitope
KTLVSMRHDL

SEQ ID NO: 25101 - protein, 10 aa, Artificial Sequence
  Description of Artificial Sequence: Synthetic epitope
KTMATVYQEE

SEQ ID NO: 25102 - protein, 10 aa, Artificial Sequence
  Description of Artificial Sequence: Synthetic epitope
KTMKKFESPN

SEQ ID NO: 25103 - protein, 10 aa, Artificial Sequence
  Description of Artificial Sequence: Synthetic epitope
KTMMWDNVNA

SEQ ID NO: 25104 - protein, 10 aa, Artificial Sequence
  Description of Artificial Sequence: Synthetic epitope
KTMNIYFPKK

SEQ ID NO: 25105 - protein, 10 aa, Artificial Sequence
  Description of Artificial Sequence: Synthetic epitope
KTMNLEKISA

SEQ ID NO: 25106 - protein, 10 aa, Artificial Sequence
  Description of Artificial Sequence: Synthetic epitope
KTMNVLAESD

SEQ ID NO: 25107 - protein, 10 aa, Artificial Sequence
  Description of Artificial Sequence: Synthetic epitope
KTMSAALKIP

SEQ ID NO: 25108 - protein, 10 aa, Artificial Sequence
  Description of Artificial Sequence: Synthetic epitope
KTMSLQQVIN

SEQ ID NO: 25109 - protein, 10 aa, Artificial Sequence
  Description of Artificial Sequence: Synthetic epitope
KTMVQSMTLL

SEQ ID NO: 25110 - protein, 10 aa, Artificial Sequence
  Description of Artificial Sequence: Synthetic epitope
KTNAVVKDPS

SEQ ID NO: 25111 - protein, 10 aa, Artificial Sequence
  Description of Artificial Sequence: Synthetic epitope
KTNELFQTMQ

SEQ ID NO: 25112 - protein, 10 aa, Artificial Sequence
  Description of Artificial Sequence: Synthetic epitope
KTNETGYQEA

SEQ ID NO: 25113 - protein, 10 aa, Artificial Sequence
  Description of Artificial Sequence: Synthetic epitope
KTNFKTLSSM

SEQ ID NO: 25114 - protein, 10 aa, Artificial Sequence
  Description of Artificial Sequence: Synthetic epitope
KTNLKQMDSL

SEQ ID NO: 25115 - protein, 10 aa, Artificial Sequence
  Description of Artificial Sequence: Synthetic epitope
KTNLTTEQIA

SEQ ID NO: 25116 - protein, 10 aa, Artificial Sequence
  Description of Artificial Sequence: Synthetic epitope
KTNLYQDDAV

SEQ ID NO: 25117 - protein, 10 aa, Artificial Sequence
  Description of Artificial Sequence: Synthetic epitope
KTNMSTQNRG

SEQ ID NO: 25118 - protein, 10 aa, Artificial Sequence
  Description of Artificial Sequence: Synthetic epitope
KTNNAFPQQR

SEQ ID NO: 25119 - protein, 10 aa, Artificial Sequence
  Description of Artificial Sequence: Synthetic epitope
KTNNAQNGHL

SEQ ID NO: 25120 - protein, 10 aa, Artificial Sequence
  Description of Artificial Sequence: Synthetic epitope
KTNRQTEAIR

SEQ ID NO: 25121 - protein, 10 aa, Artificial Sequence
  Description of Artificial Sequence: Synthetic epitope
KTNSHGETVK

SEQ ID NO: 25122 - protein, 10 aa, Artificial Sequence
  Description of Artificial Sequence: Synthetic epitope
KTNSHSSALH

SEQ ID NO: 25123 - protein, 10 aa, Artificial Sequence
  Description of Artificial Sequence: Synthetic epitope
KTNSKDEQIT

SEQ ID NO: 25124 - protein, 10 aa, Artificial Sequence
  Description of Artificial Sequence: Synthetic epitope
KTNSQMSGSR

SEQ ID NO: 25125 - protein, 10 aa, Artificial Sequence
  Description of Artificial Sequence: Synthetic epitope
KTNSSEGKVF

SEQ ID NO: 25126 - protein, 10 aa, Artificial Sequence
  Description of Artificial Sequence: Synthetic epitope
KTNSTVTKSN

SEQ ID NO: 25127 - protein, 10 aa, Artificial Sequence
  Description of Artificial Sequence: Synthetic epitope
KTNTRITDSG

SEQ ID NO: 25128 - protein, 10 aa, Artificial Sequence
  Description of Artificial Sequence: Synthetic epitope
KTNTVAKQEQ

SEQ ID NO: 25129 - protein, 10 aa, Artificial Sequence
  Description of Artificial Sequence: Synthetic epitope
KTPASSTAPP

SEQ ID NO: 25130 - protein, 10 aa, Artificial Sequence
  Description of Artificial Sequence: Synthetic epitope
KTPATKIRED

SEQ ID NO: 25131 - protein, 10 aa, Artificial Sequence
  Description of Artificial Sequence: Synthetic epitope
KTPFQVEQVA

SEQ ID NO: 25132 - protein, 10 aa, Artificial Sequence
  Description of Artificial Sequence: Synthetic epitope
KTPHKSEIHA

SEQ ID NO: 25133 - protein, 10 aa, Artificial Sequence
  Description of Artificial Sequence: Synthetic epitope
KTPIKKQEAK

SEQ ID NO: 25134 - protein, 10 aa, Artificial Sequence
  Description of Artificial Sequence: Synthetic epitope
KTPPDKKLEP

SEQ ID NO: 25135 - protein, 10 aa, Artificial Sequence
  Description of Artificial Sequence: Synthetic epitope
KTPQTEKKLK

SEQ ID NO: 25136 - protein, 10 aa, Artificial Sequence
  Description of Artificial Sequence: Synthetic epitope
KTPSALALNQ

SEQ ID NO: 25137 - protein, 10 aa, Artificial Sequence
  Description of Artificial Sequence: Synthetic epitope
KTPSERQLTP

SEQ ID NO: 25138 - protein, 10 aa, Artificial Sequence
  Description of Artificial Sequence: Synthetic epitope
KTPSERQLTP

SEQ ID NO: 25139 - protein, 10 aa, Artificial Sequence
  Description of Artificial Sequence: Synthetic epitope
KTPSGIKLTI

SEQ ID NO: 25140 - protein, 10 aa, Artificial Sequence
  Description of Artificial Sequence: Synthetic epitope
KTPTATVTNE

SEQ ID NO: 25141 - protein, 10 aa, Artificial Sequence
  Description of Artificial Sequence: Synthetic epitope
KTPTKPKLQQ

SEQ ID NO: 25142 - protein, 10 aa, Artificial Sequence
  Description of Artificial Sequence: Synthetic epitope
KTPTQSLPKN

SEQ ID NO: 25143 - protein, 10 aa, Artificial Sequence
  Description of Artificial Sequence: Synthetic epitope
KTQAGKDDKG

SEQ ID NO: 25144 - protein, 10 aa, Artificial Sequence
  Description of Artificial Sequence: Synthetic epitope
KTQAIAKQPI

SEQ ID NO: 25145 - protein, 10 aa, Artificial Sequence
  Description of Artificial Sequence: Synthetic epitope
KTQAVNKLAE

SEQ ID NO: 25146 - protein, 10 aa, Artificial Sequence
  Description of Artificial Sequence: Synthetic epitope
KTQEAAKEKE

SEQ ID NO: 25147 - protein, 10 aa, Artificial Sequence
  Description of Artificial Sequence: Synthetic epitope
KTQEQNNLEE

SEQ ID NO: 25148 - protein, 10 aa, Artificial Sequence
  Description of Artificial Sequence: Synthetic epitope
KTQFNSEEQW

SEQ ID NO: 25149 - protein, 10 aa, Artificial Sequence
  Description of Artificial Sequence: Synthetic epitope
KTQFPQLKKV

SEQ ID NO: 25150 - protein, 10 aa, Artificial Sequence
  Description of Artificial Sequence: Synthetic epitope
KTQHSSLDQS

SEQ ID NO: 25151 - protein, 10 aa, Artificial Sequence
  Description of Artificial Sequence: Synthetic epitope
KTQIKHFESL

SEQ ID NO: 25152 - protein, 10 aa, Artificial Sequence
  Description of Artificial Sequence: Synthetic epitope
KTQIQSQESD

SEQ ID NO: 25153 - protein, 10 aa, Artificial Sequence
  Description of Artificial Sequence: Synthetic epitope
KTQKTAITVE

SEQ ID NO: 25154 - protein, 10 aa, Artificial Sequence
  Description of Artificial Sequence: Synthetic epitope
KTQLATLTSS

SEQ ID NO: 25155 - protein, 10 aa, Artificial Sequence
  Description of Artificial Sequence: Synthetic epitope
KTQLSTSDSE

SEQ ID NO: 25156 - protein, 10 aa, Artificial Sequence
  Description of Artificial Sequence: Synthetic epitope
KTQMIYQQHQ

SEQ ID NO: 25157 - protein, 10 aa, Artificial Sequence
  Description of Artificial Sequence: Synthetic epitope
KTQQASKHIR

SEQ ID NO: 25158 - protein, 10 aa, Artificial Sequence
  Description of Artificial Sequence: Synthetic epitope
KTQQTIWKET

SEQ ID NO: 25159 - protein, 10 aa, Artificial Sequence
  Description of Artificial Sequence: Synthetic epitope
KTQQTSPDKV

SEQ ID NO: 25160 - protein, 10 aa, Artificial Sequence
  Description of Artificial Sequence: Synthetic epitope
KTQRKAKQAE

SEQ ID NO: 25161 - protein, 10 aa, Artificial Sequence
  Description of Artificial Sequence: Synthetic epitope
KTQRLDVAKV

SEQ ID NO: 25162 - protein, 10 aa, Artificial Sequence
  Description of Artificial Sequence: Synthetic epitope
KTQSLSETLE

SEQ ID NO: 25163 - protein, 10 aa, Artificial Sequence
  Description of Artificial Sequence: Synthetic epitope
KTQVEASEES

SEQ ID NO: 25164 - protein, 10 aa, Artificial Sequence
  Description of Artificial Sequence: Synthetic epitope
KTQVEASEES

SEQ ID NO: 25165 - protein, 10 aa, Artificial Sequence
  Description of Artificial Sequence: Synthetic epitope
KTQVSSRFAE

SEQ ID NO: 25166 - protein, 10 aa, Artificial Sequence
  Description of Artificial Sequence: Synthetic epitope
KTQWTEFNGI

SEQ ID NO: 25167 - protein, 10 aa, Artificial Sequence
  Description of Artificial Sequence: Synthetic epitope
KTRATQGQGQ

SEQ ID NO: 25168 - protein, 10 aa, Artificial Sequence
  Description of Artificial Sequence: Synthetic epitope
KTRDDSADYI

SEQ ID NO: 25169 - protein, 10 aa, Artificial Sequence
  Description of Artificial Sequence: Synthetic epitope
KTREAIQHES

SEQ ID NO: 25170 - protein, 10 aa, Artificial Sequence
  Description of Artificial Sequence: Synthetic epitope
KTREKASATR

SEQ ID NO: 25171 - protein, 10 aa, Artificial Sequence
  Description of Artificial Sequence: Synthetic epitope
KTREYEKEAE

SEQ ID NO: 25172 - protein, 10 aa, Artificial Sequence
  Description of Artificial Sequence: Synthetic epitope
KTRGMLTQQE

SEQ ID NO: 25173 - protein, 10 aa, Artificial Sequence
  Description of Artificial Sequence: Synthetic epitope
KTRIISDGLK

SEQ ID NO: 25174 - protein, 10 aa, Artificial Sequence
  Description of Artificial Sequence: Synthetic epitope
KTRISQFNMH

SEQ ID NO: 25175 - protein, 10 aa, Artificial Sequence
  Description of Artificial Sequence: Synthetic epitope
KTRKASAQAS

SEQ ID NO: 25176 - protein, 10 aa, Artificial Sequence
  Description of Artificial Sequence: Synthetic epitope
KTRLAVMSME

SEQ ID NO: 25177 - protein, 10 aa, Artificial Sequence
  Description of Artificial Sequence: Synthetic epitope
KTRLVRELTV

SEQ ID NO: 25178 - protein, 10 aa, Artificial Sequence
  Description of Artificial Sequence: Synthetic epitope
KTRNRASVAN

SEQ ID NO: 25179 - protein, 10 aa, Artificial Sequence
  Description of Artificial Sequence: Synthetic epitope
KTRPSSLESV

SEQ ID NO: 25180 - protein, 10 aa, Artificial Sequence
  Description of Artificial Sequence: Synthetic epitope
KTRQRQNASS

SEQ ID NO: 25181 - protein, 10 aa, Artificial Sequence
  Description of Artificial Sequence: Synthetic epitope
KTRQVSLEVI

SEQ ID NO: 25182 - protein, 10 aa, Artificial Sequence
  Description of Artificial Sequence: Synthetic epitope
KTRRKLTSTS

SEQ ID NO: 25183 - protein, 10 aa, Artificial Sequence
  Description of Artificial Sequence: Synthetic epitope
KTRRKNQTTK

SEQ ID NO: 25184 - protein, 10 aa, Artificial Sequence
  Description of Artificial Sequence: Synthetic epitope
KTRSKGRNEQ

SEQ ID NO: 25185 - protein, 10 aa, Artificial Sequence
  Description of Artificial Sequence: Synthetic epitope
KTRSKPKIIP

SEQ ID NO: 25186 - protein, 10 aa, Artificial Sequence
  Description of Artificial Sequence: Synthetic epitope
KTRSLISMDE

SEQ ID NO: 25187 - protein, 10 aa, Artificial Sequence
  Description of Artificial Sequence: Synthetic epitope
KTRSRNSRFR

SEQ ID NO: 25188 - protein, 10 aa, Artificial Sequence
  Description of Artificial Sequence: Synthetic epitope
KTRSRSKSRS

SEQ ID NO: 25189 - protein, 10 aa, Artificial Sequence
  Description of Artificial Sequence: Synthetic epitope
KTRTEELIVQ

SEQ ID NO: 25190 - protein, 10 aa, Artificial Sequence
  Description of Artificial Sequence: Synthetic epitope
KTRTLNAEEA

SEQ ID NO: 25191 - protein, 10 aa, Artificial Sequence
  Description of Artificial Sequence: Synthetic epitope
KTRTQKTGGA

SEQ ID NO: 25192 - protein, 10 aa, Artificial Sequence
  Description of Artificial Sequence: Synthetic epitope
KTRTRRGKST

SEQ ID NO: 25193 - protein, 10 aa, Artificial Sequence
  Description of Artificial Sequence: Synthetic epitope
KTRVNVTHKE

SEQ ID NO: 25194 - protein, 10 aa, Artificial Sequence
  Description of Artificial Sequence: Synthetic epitope
KTSAKADPAL

SEQ ID NO: 25195 - protein, 10 aa, Artificial Sequence
  Description of Artificial Sequence: Synthetic epitope
KTSASRTQKS

SEQ ID NO: 25196 - protein, 10 aa, Artificial Sequence
  Description of Artificial Sequence: Synthetic epitope
KTSENVVINH

SEQ ID NO: 25197 - protein, 10 aa, Artificial Sequence
  Description of Artificial Sequence: Synthetic epitope
KTSEPKDAAS

SEQ ID NO: 25198 - protein, 10 aa, Artificial Sequence
  Description of Artificial Sequence: Synthetic epitope
KTSERLASGE

SEQ ID NO: 25199 - protein, 10 aa, Artificial Sequence
  Description of Artificial Sequence: Synthetic epitope
KTSIKTQIFP

SEQ ID NO: 25200 - protein, 10 aa, Artificial Sequence
  Description of Artificial Sequence: Synthetic epitope
KTSIRTVLPR

SEQ ID NO: 25201 - protein, 10 aa, Artificial Sequence
  Description of Artificial Sequence: Synthetic epitope
KTSISKATGK

SEQ ID NO: 25202 - protein, 10 aa, Artificial Sequence
  Description of Artificial Sequence: Synthetic epitope
KTSISKERVQ

SEQ ID NO: 25203 - protein, 10 aa, Artificial Sequence
  Description of Artificial Sequence: Synthetic epitope
KTSISTVGTS

SEQ ID NO: 25204 - protein, 10 aa, Artificial Sequence
  Description of Artificial Sequence: Synthetic epitope
KTSKEGVDES

SEQ ID NO: 25205 - protein, 10 aa, Artificial Sequence
  Description of Artificial Sequence: Synthetic epitope
KTSKIKSSGE

SEQ ID NO: 25206 - protein, 10 aa, Artificial Sequence
  Description of Artificial Sequence: Synthetic epitope
KTSKINVKPE

SEQ ID NO: 25207 - protein, 10 aa, Artificial Sequence
  Description of Artificial Sequence: Synthetic epitope
KTSKLANMGS

SEQ ID NO: 25208 - protein, 10 aa, Artificial Sequence
  Description of Artificial Sequence: Synthetic epitope
KTSKSKNFET

SEQ ID NO: 25209 - protein, 10 aa, Artificial Sequence
  Description of Artificial Sequence: Synthetic epitope
KTSKTIPSEK

SEQ ID NO: 25210 - protein, 10 aa, Artificial Sequence
  Description of Artificial Sequence: Synthetic epitope
KTSLNNAQLE

SEQ ID NO: 25211 - protein, 10 aa, Artificial Sequence
  Description of Artificial Sequence: Synthetic epitope
KTSLSALTQL

SEQ ID NO: 25212 - protein, 10 aa, Artificial Sequence
  Description of Artificial Sequence: Synthetic epitope
KTSMEVKMQM

SEQ ID NO: 25213 - protein, 10 aa, Artificial Sequence
  Description of Artificial Sequence: Synthetic epitope
KTSNKLTIQT

SEQ ID NO: 25214 - protein, 10 aa, Artificial Sequence
  Description of Artificial Sequence: Synthetic epitope
KTSPATNQAA

SEQ ID NO: 25215 - protein, 10 aa, Artificial Sequence
  Description of Artificial Sequence: Synthetic epitope
KTSQASDTLT

SEQ ID NO: 25216 - protein, 10 aa, Artificial Sequence
  Description of Artificial Sequence: Synthetic epitope
KTSQGTVPTA

SEQ ID NO: 25217 - protein, 10 aa, Artificial Sequence
  Description of Artificial Sequence: Synthetic epitope
KTSQLQLSVE

SEQ ID NO: 25218 - protein, 10 aa, Artificial Sequence
  Description of Artificial Sequence: Synthetic epitope
KTSRALVADS

SEQ ID NO: 25219 - protein, 10 aa, Artificial Sequence
  Description of Artificial Sequence: Synthetic epitope
KTSRQIKESR

SEQ ID NO: 25220 - protein, 10 aa, Artificial Sequence
  Description of Artificial Sequence: Synthetic epitope
KTSRVTDASI

SEQ ID NO: 25221 - protein, 10 aa, Artificial Sequence
  Description of Artificial Sequence: Synthetic epitope
KTSSDSISRM

SEQ ID NO: 25222 - protein, 10 aa, Artificial Sequence
  Description of Artificial Sequence: Synthetic epitope
KTSSFVSQSN

SEQ ID NO: 25223 - protein, 10 aa, Artificial Sequence
  Description of Artificial Sequence: Synthetic epitope
KTSSGDASSL

SEQ ID NO: 25224 - protein, 10 aa, Artificial Sequence
  Description of Artificial Sequence: Synthetic epitope
KTSSGSLVQK

SEQ ID NO: 25225 - protein, 10 aa, Artificial Sequence
  Description of Artificial Sequence: Synthetic epitope
KTSSKLDSGT

SEQ ID NO: 25226 - protein, 10 aa, Artificial Sequence
  Description of Artificial Sequence: Synthetic epitope
KTSSKVAQAT

SEQ ID NO: 25227 - protein, 10 aa, Artificial Sequence
  Description of Artificial Sequence: Synthetic epitope
KTSSLTKAKE

SEQ ID NO: 25228 - protein, 10 aa, Artificial Sequence
  Description of Artificial Sequence: Synthetic epitope
KTSSNLYNLP

SEQ ID NO: 25229 - protein, 10 aa, Artificial Sequence
  Description of Artificial Sequence: Synthetic epitope
KTSTELAEEP

SEQ ID NO: 25230 - protein, 10 aa, Artificial Sequence
  Description of Artificial Sequence: Synthetic epitope
KTSTKKLKTA

SEQ ID NO: 25231 - protein, 10 aa, Artificial Sequence
  Description of Artificial Sequence: Synthetic epitope
KTSTLSHSTL

SEQ ID NO: 25232 - protein, 10 aa, Artificial Sequence
  Description of Artificial Sequence: Synthetic epitope
KTSTRQTYFL

SEQ ID NO: 25233 - protein, 10 aa, Artificial Sequence
  Description of Artificial Sequence: Synthetic epitope
KTSTSNVEQY

SEQ ID NO: 25234 - protein, 10 aa, Artificial Sequence
  Description of Artificial Sequence: Synthetic epitope
KTSVAASLYH

SEQ ID NO: 25235 - protein, 10 aa, Artificial Sequence
  Description of Artificial Sequence: Synthetic epitope
KTSVDEITSG

SEQ ID NO: 25236 - protein, 10 aa, Artificial Sequence
  Description of Artificial Sequence: Synthetic epitope
KTSVEKANAQ

SEQ ID NO: 25237 - protein, 10 aa, Artificial Sequence
  Description of Artificial Sequence: Synthetic epitope
KTSVESVGTM

SEQ ID NO: 25238 - protein, 10 aa, Artificial Sequence
  Description of Artificial Sequence: Synthetic epitope
KTSVTRQADF

SEQ ID NO: 25239 - protein, 10 aa, Artificial Sequence
  Description of Artificial Sequence: Synthetic epitope
KTSYETADKV

SEQ ID NO: 25240 - protein, 10 aa, Artificial Sequence
  Description of Artificial Sequence: Synthetic epitope
KTTAAKKESL

SEQ ID NO: 25241 - protein, 10 aa, Artificial Sequence
  Description of Artificial Sequence: Synthetic epitope
KTTAEKLAVQ

SEQ ID NO: 25242 - protein, 10 aa, Artificial Sequence
  Description of Artificial Sequence: Synthetic epitope
KTTAENVNTQ

SEQ ID NO: 25243 - protein, 10 aa, Artificial Sequence
  Description of Artificial Sequence: Synthetic epitope
KTTASVLPNQ

SEQ ID NO: 25244 - protein, 10 aa, Artificial Sequence
  Description of Artificial Sequence: Synthetic epitope
KTTATTSSKR

SEQ ID NO: 25245 - protein, 10 aa, Artificial Sequence
  Description of Artificial Sequence: Synthetic epitope
KTTDASNEEY

SEQ ID NO: 25246 - protein, 10 aa, Artificial Sequence
  Description of Artificial Sequence: Synthetic epitope
KTTEASAKDK

SEQ ID NO: 25247 - protein, 10 aa, Artificial Sequence
  Description of Artificial Sequence: Synthetic epitope
KTTEEDLSID

SEQ ID NO: 25248 - protein, 10 aa, Artificial Sequence
  Description of Artificial Sequence: Synthetic epitope
KTTEKSTDKQ

SEQ ID NO: 25249 - protein, 10 aa, Artificial Sequence
  Description of Artificial Sequence: Synthetic epitope
KTTETGAQQE

SEQ ID NO: 25250 - protein, 10 aa, Artificial Sequence
  Description of Artificial Sequence: Synthetic epitope
KTTGMSQSTE

SEQ ID NO: 25251 - protein, 10 aa, Artificial Sequence
  Description of Artificial Sequence: Synthetic epitope
KTTIKEISMQ

SEQ ID NO: 25252 - protein, 10 aa, Artificial Sequence
  Description of Artificial Sequence: Synthetic epitope
KTTINNEYNY

SEQ ID NO: 25253 - protein, 10 aa, Artificial Sequence
  Description of Artificial Sequence: Synthetic epitope
KTTIWNAQQK

SEQ ID NO: 25254 - protein, 10 aa, Artificial Sequence
  Description of Artificial Sequence: Synthetic epitope
KTTNESMENS

SEQ ID NO: 25255 - protein, 10 aa, Artificial Sequence
  Description of Artificial Sequence: Synthetic epitope
KTTPALNMHE

SEQ ID NO: 25256 - protein, 10 aa, Artificial Sequence
  Description of Artificial Sequence: Synthetic epitope
KTTQETIDKT

SEQ ID NO: 25257 - protein, 10 aa, Artificial Sequence
  Description of Artificial Sequence: Synthetic epitope
KTTQKTKKQR

SEQ ID NO: 25258 - protein, 10 aa, Artificial Sequence
  Description of Artificial Sequence: Synthetic epitope
KTTQLEHKSQ

SEQ ID NO: 25259 - protein, 10 aa, Artificial Sequence
  Description of Artificial Sequence: Synthetic epitope
KTTQNLAQKK

SEQ ID NO: 25260 - protein, 10 aa, Artificial Sequence
  Description of Artificial Sequence: Synthetic epitope
KTTRISTVTA

SEQ ID NO: 25261 - protein, 10 aa, Artificial Sequence
  Description of Artificial Sequence: Synthetic epitope
KTTRYEFEQQ

SEQ ID NO: 25262 - protein, 10 aa, Artificial Sequence
  Description of Artificial Sequence: Synthetic epitope
KTTSKPYIDS

SEQ ID NO: 25263 - protein, 10 aa, Artificial Sequence
  Description of Artificial Sequence: Synthetic epitope
KTTSLFSTIE

SEQ ID NO: 25264 - protein, 10 aa, Artificial Sequence
  Description of Artificial Sequence: Synthetic epitope
KTTSNLLSSK

SEQ ID NO: 25265 - protein, 10 aa, Artificial Sequence
  Description of Artificial Sequence: Synthetic epitope
KTTSQKVARK

SEQ ID NO: 25266 - protein, 10 aa, Artificial Sequence
  Description of Artificial Sequence: Synthetic epitope
KTTSRNLARA

SEQ ID NO: 25267 - protein, 10 aa, Artificial Sequence
  Description of Artificial Sequence: Synthetic epitope
KTTSRSYQAK

SEQ ID NO: 25268 - protein, 10 aa, Artificial Sequence
  Description of Artificial Sequence: Synthetic epitope
KTTVQVSEPK

SEQ ID NO: 25269 - protein, 10 aa, Artificial Sequence
  Description of Artificial Sequence: Synthetic epitope
KTTYIKQNHY

SEQ ID NO: 25270 - protein, 10 aa, Artificial Sequence
  Description of Artificial Sequence: Synthetic epitope
KTTYKVSSLS

SEQ ID NO: 25271 - protein, 10 aa, Artificial Sequence
  Description of Artificial Sequence: Synthetic epitope
KTVAQSQQLE

SEQ ID NO: 25272 - protein, 10 aa, Artificial Sequence
  Description of Artificial Sequence: Synthetic epitope
KTVASEKLKQ

SEQ ID NO: 25273 - protein, 10 aa, Artificial Sequence
  Description of Artificial Sequence: Synthetic epitope
KTVASVLAAD

SEQ ID NO: 25274 - protein, 10 aa, Artificial Sequence
  Description of Artificial Sequence: Synthetic epitope
KTVATTKTGV

SEQ ID NO: 25275 - protein, 10 aa, Artificial Sequence
  Description of Artificial Sequence: Synthetic epitope
KTVDYKKLSA

SEQ ID NO: 25276 - protein, 10 aa, Artificial Sequence
  Description of Artificial Sequence: Synthetic epitope
KTVEFTRLRI

SEQ ID NO: 25277 - protein, 10 aa, Artificial Sequence
  Description of Artificial Sequence: Synthetic epitope
KTVKEAHLTK

SEQ ID NO: 25278 - protein, 10 aa, Artificial Sequence
  Description of Artificial Sequence: Synthetic epitope
KTVKHMWPFI

SEQ ID NO: 25279 - protein, 10 aa, Artificial Sequence
  Description of Artificial Sequence: Synthetic epitope
KTVKKILSDI

SEQ ID NO: 25280 - protein, 10 aa, Artificial Sequence
  Description of Artificial Sequence: Synthetic epitope
KTVKPIDTSK

SEQ ID NO: 25281 - protein, 10 aa, Artificial Sequence
  Description of Artificial Sequence: Synthetic epitope
KTVLISLPES

SEQ ID NO: 25282 - protein, 10 aa, Artificial Sequence
  Description of Artificial Sequence: Synthetic epitope
KTVLISRLKQ

SEQ ID NO: 25283 - protein, 10 aa, Artificial Sequence
  Description of Artificial Sequence: Synthetic epitope
KTVLSKAIEK

SEQ ID NO: 25284 - protein, 10 aa, Artificial Sequence
  Description of Artificial Sequence: Synthetic epitope
KTVNEDVEEM

SEQ ID NO: 25285 - protein, 10 aa, Artificial Sequence
  Description of Artificial Sequence: Synthetic epitope
KTVNQQTMAA

SEQ ID NO: 25286 - protein, 10 aa, Artificial Sequence
  Description of Artificial Sequence: Synthetic epitope
KTVPIIQNQM

SEQ ID NO: 25287 - protein, 10 aa, Artificial Sequence
  Description of Artificial Sequence: Synthetic epitope
KTVPQSSLTM

SEQ ID NO: 25288 - protein, 10 aa, Artificial Sequence
  Description of Artificial Sequence: Synthetic epitope
KTVQKRQDMK

SEQ ID NO: 25289 - protein, 10 aa, Artificial Sequence
  Description of Artificial Sequence: Synthetic epitope
KTVQSQIGPP

SEQ ID NO: 25290 - protein, 10 aa, Artificial Sequence
  Description of Artificial Sequence: Synthetic epitope
KTVRQGNSLL

SEQ ID NO: 25291 - protein, 10 aa, Artificial Sequence
  Description of Artificial Sequence: Synthetic epitope
KTVSTKGKTT

SEQ ID NO: 25292 - protein, 10 aa, Artificial Sequence
  Description of Artificial Sequence: Synthetic epitope
KTVVNAASEL

SEQ ID NO: 25293 - protein, 10 aa, Artificial Sequence
  Description of Artificial Sequence: Synthetic epitope
KTVVSHSLTT

SEQ ID NO: 25294 - protein, 10 aa, Artificial Sequence
  Description of Artificial Sequence: Synthetic epitope
KTVYKKPQEK

SEQ ID NO: 25295 - protein, 10 aa, Artificial Sequence
  Description of Artificial Sequence: Synthetic epitope
KTWGKSTETM

SEQ ID NO: 25296 - protein, 10 aa, Artificial Sequence
  Description of Artificial Sequence: Synthetic epitope
KTWGVVFREL

SEQ ID NO: 25297 - protein, 10 aa, Artificial Sequence
  Description of Artificial Sequence: Synthetic epitope
KTWMRTQQKR

SEQ ID NO: 25298 - protein, 10 aa, Artificial Sequence
  Description of Artificial Sequence: Synthetic epitope
KTWRSSATGD

SEQ ID NO: 25299 - protein, 10 aa, Artificial Sequence
  Description of Artificial Sequence: Synthetic epitope
KTYPVNTPER

SEQ ID NO: 25300 - protein, 10 aa, Artificial Sequence
  Description of Artificial Sequence: Synthetic epitope
KTYRAVPNMP

SEQ ID NO: 25301 - protein, 10 aa, Artificial Sequence
  Description of Artificial Sequence: Synthetic epitope
KTYRSKAGHD

SEQ ID NO: 25302 - protein, 10 aa, Artificial Sequence
  Description of Artificial Sequence: Synthetic epitope
KTYTISHTSV

SEQ ID NO: 25303 - protein, 10 aa, Artificial Sequence
  Description of Artificial Sequence: Synthetic epitope
KTYVSKLNAE

SEQ ID NO: 25304 - protein, 10 aa, Artificial Sequence
  Description of Artificial Sequence: Synthetic epitope
KVAAERRASE

SEQ ID NO: 25305 - protein, 10 aa, Artificial Sequence
  Description of Artificial Sequence: Synthetic epitope
KVAEQIKAQE

SEQ ID NO: 25306 - protein, 10 aa, Artificial Sequence
  Description of Artificial Sequence: Synthetic epitope
KVAERVLMRL

SEQ ID NO: 25307 - protein, 10 aa, Artificial Sequence
  Description of Artificial Sequence: Synthetic epitope
KVAEVAGKEY

SEQ ID NO: 25308 - protein, 10 aa, Artificial Sequence
  Description of Artificial Sequence: Synthetic epitope
KVAFATALKN

SEQ ID NO: 25309 - protein, 10 aa, Artificial Sequence
  Description of Artificial Sequence: Synthetic epitope
KVAHRERKQD

SEQ ID NO: 25310 - protein, 10 aa, Artificial Sequence
  Description of Artificial Sequence: Synthetic epitope
KVAHSSTTKK

SEQ ID NO: 25311 - protein, 10 aa, Artificial Sequence
  Description of Artificial Sequence: Synthetic epitope
KVAIITDIDL

SEQ ID NO: 25312 - protein, 10 aa, Artificial Sequence
  Description of Artificial Sequence: Synthetic epitope
KVAKIDLRTL

SEQ ID NO: 25313 - protein, 10 aa, Artificial Sequence
  Description of Artificial Sequence: Synthetic epitope
KVAKLNIQSL

SEQ ID NO: 25314 - protein, 10 aa, Artificial Sequence
  Description of Artificial Sequence: Synthetic epitope
KVAKQMAAEE

SEQ ID NO: 25315 - protein, 10 aa, Artificial Sequence
  Description of Artificial Sequence: Synthetic epitope
KVALATAAQV

SEQ ID NO: 25316 - protein, 10 aa, Artificial Sequence
  Description of Artificial Sequence: Synthetic epitope
KVANVSLLAL

SEQ ID NO: 25317 - protein, 10 aa, Artificial Sequence
  Description of Artificial Sequence: Synthetic epitope
KVAPANTAVQ

SEQ ID NO: 25318 - protein, 10 aa, Artificial Sequence
  Description of Artificial Sequence: Synthetic epitope
KVAQRVLATQ

SEQ ID NO: 25319 - protein, 10 aa, Artificial Sequence
  Description of Artificial Sequence: Synthetic epitope
KVAQVDSLKD

SEQ ID NO: 25320 - protein, 10 aa, Artificial Sequence
  Description of Artificial Sequence: Synthetic epitope
KVAREMHSLR

SEQ ID NO: 25321 - protein, 10 aa, Artificial Sequence
  Description of Artificial Sequence: Synthetic epitope
KVARLLDKGL

SEQ ID NO: 25322 - protein, 10 aa, Artificial Sequence
  Description of Artificial Sequence: Synthetic epitope
KVARRHRMSP

SEQ ID NO: 25323 - protein, 10 aa, Artificial Sequence
  Description of Artificial Sequence: Synthetic epitope
KVASAISPIK

SEQ ID NO: 25324 - protein, 10 aa, Artificial Sequence
  Description of Artificial Sequence: Synthetic epitope
KVASSAGASH

SEQ ID NO: 25325 - protein, 10 aa, Artificial Sequence
  Description of Artificial Sequence: Synthetic epitope
KVATGRSAKD

SEQ ID NO: 25326 - protein, 10 aa, Artificial Sequence
  Description of Artificial Sequence: Synthetic epitope
KVATQEGKEI

SEQ ID NO: 25327 - protein, 10 aa, Artificial Sequence
  Description of Artificial Sequence: Synthetic epitope
KVAVAQFSQE

SEQ ID NO: 25328 - protein, 10 aa, Artificial Sequence
  Description of Artificial Sequence: Synthetic epitope
KVAVDDSESL

SEQ ID NO: 25329 - protein, 10 aa, Artificial Sequence
  Description of Artificial Sequence: Synthetic epitope
KVDAQEAKTE

SEQ ID NO: 25330 - protein, 10 aa, Artificial Sequence
  Description of Artificial Sequence: Synthetic epitope
KVDAQFGGID

SEQ ID NO: 25331 - protein, 10 aa, Artificial Sequence
  Description of Artificial Sequence: Synthetic epitope
KVDISKVSSK

SEQ ID NO: 25332 - protein, 10 aa, Artificial Sequence
  Description of Artificial Sequence: Synthetic epitope
KVDKKRDKIE

SEQ ID NO: 25333 - protein, 10 aa, Artificial Sequence
  Description of Artificial Sequence: Synthetic epitope
KVDQDSALHN

SEQ ID NO: 25334 - protein, 10 aa, Artificial Sequence
  Description of Artificial Sequence: Synthetic epitope
KVDRKSLYAA

SEQ ID NO: 25335 - protein, 10 aa, Artificial Sequence
  Description of Artificial Sequence: Synthetic epitope
KVDSSAESAE

SEQ ID NO: 25336 - protein, 10 aa, Artificial Sequence
  Description of Artificial Sequence: Synthetic epitope
KVDSSKESAE

SEQ ID NO: 25337 - protein, 10 aa, Artificial Sequence
  Description of Artificial Sequence: Synthetic epitope
KVDSSTNSSP

SEQ ID NO: 25338 - protein, 10 aa, Artificial Sequence
  Description of Artificial Sequence: Synthetic epitope
KVDTAIAEET

SEQ ID NO: 25339 - protein, 10 aa, Artificial Sequence
  Description of Artificial Sequence: Synthetic epitope
KVDYLTKIEE

SEQ ID NO: 25340 - protein, 10 aa, Artificial Sequence
  Description of Artificial Sequence: Synthetic epitope
KVEAMALKPD

SEQ ID NO: 25341 - protein, 10 aa, Artificial Sequence
  Description of Artificial Sequence: Synthetic epitope
KVEATEVKLD

SEQ ID NO: 25342 - protein, 10 aa, Artificial Sequence
  Description of Artificial Sequence: Synthetic epitope
KVEEDGAEES

SEQ ID NO: 25343 - protein, 10 aa, Artificial Sequence
  Description of Artificial Sequence: Synthetic epitope
KVEEISKAGE

SEQ ID NO: 25344 - protein, 10 aa, Artificial Sequence
  Description of Artificial Sequence: Synthetic epitope
KVEEKLYWQG

SEQ ID NO: 25345 - protein, 10 aa, Artificial Sequence
  Description of Artificial Sequence: Synthetic epitope
KVEENKKQNT

SEQ ID NO: 25346 - protein, 10 aa, Artificial Sequence
  Description of Artificial Sequence: Synthetic epitope
KVEERNTISL

SEQ ID NO: 25347 - protein, 10 aa, Artificial Sequence
  Description of Artificial Sequence: Synthetic epitope
KVEKALSAGD

SEQ ID NO: 25348 - protein, 10 aa, Artificial Sequence
  Description of Artificial Sequence: Synthetic epitope
KVEKETEKEA

SEQ ID NO: 25349 - protein, 10 aa, Artificial Sequence
  Description of Artificial Sequence: Synthetic epitope
KVEKLNTDQG

SEQ ID NO: 25350 - protein, 10 aa, Artificial Sequence
  Description of Artificial Sequence: Synthetic epitope
KVEKMSSNSN

SEQ ID NO: 25351 - protein, 10 aa, Artificial Sequence
  Description of Artificial Sequence: Synthetic epitope
KVEKTDSDLT

SEQ ID NO: 25352 - protein, 10 aa, Artificial Sequence
  Description of Artificial Sequence: Synthetic epitope
KVEKVKHEDQ

SEQ ID NO: 25353 - protein, 10 aa, Artificial Sequence
  Description of Artificial Sequence: Synthetic epitope
KVELRSAVEQ

SEQ ID NO: 25354 - protein, 10 aa, Artificial Sequence
  Description of Artificial Sequence: Synthetic epitope
KVEPPHSSHE

SEQ ID NO: 25355 - protein, 10 aa, Artificial Sequence
  Description of Artificial Sequence: Synthetic epitope
KVEQERKKAI

SEQ ID NO: 25356 - protein, 10 aa, Artificial Sequence
  Description of Artificial Sequence: Synthetic epitope
KVEQTAFSFL

SEQ ID NO: 25357 - protein, 10 aa, Artificial Sequence
  Description of Artificial Sequence: Synthetic epitope
KVERQFSTAS

SEQ ID NO: 25358 - protein, 10 aa, Artificial Sequence
  Description of Artificial Sequence: Synthetic epitope
KVERVDFTNH

SEQ ID NO: 25359 - protein, 10 aa, Artificial Sequence
  Description of Artificial Sequence: Synthetic epitope
KVERVHYSST

SEQ ID NO: 25360 - protein, 10 aa, Artificial Sequence
  Description of Artificial Sequence: Synthetic epitope
KVESFSARMN

SEQ ID NO: 25361 - protein, 10 aa, Artificial Sequence
  Description of Artificial Sequence: Synthetic epitope
KVESKGLEKV

SEQ ID NO: 25362 - protein, 10 aa, Artificial Sequence
  Description of Artificial Sequence: Synthetic epitope
KVESKNAYGI

SEQ ID NO: 25363 - protein, 10 aa, Artificial Sequence
  Description of Artificial Sequence: Synthetic epitope
KVEVESIAET

SEQ ID NO: 25364 - protein, 10 aa, Artificial Sequence
  Description of Artificial Sequence: Synthetic epitope
KVEVEVEVKE

SEQ ID NO: 25365 - protein, 10 aa, Artificial Sequence
  Description of Artificial Sequence: Synthetic epitope
KVFASEVKDE

SEQ ID NO: 25366 - protein, 10 aa, Artificial Sequence
  Description of Artificial Sequence: Synthetic epitope
KVFGRQQTLS

SEQ ID NO: 25367 - protein, 10 aa, Artificial Sequence
  Description of Artificial Sequence: Synthetic epitope
KVFKATLSAE

SEQ ID NO: 25368 - protein, 10 aa, Artificial Sequence
  Description of Artificial Sequence: Synthetic epitope
KVFKRIMGET

SEQ ID NO: 25369 - protein, 10 aa, Artificial Sequence
  Description of Artificial Sequence: Synthetic epitope
KVFLAIKESA

SEQ ID NO: 25370 - protein, 10 aa, Artificial Sequence
  Description of Artificial Sequence: Synthetic epitope
KVFLSSLAPS

SEQ ID NO: 25371 - protein, 10 aa, Artificial Sequence
  Description of Artificial Sequence: Synthetic epitope
KVFQNEVLGT

SEQ ID NO: 25372 - protein, 10 aa, Artificial Sequence
  Description of Artificial Sequence: Synthetic epitope
KVFREAFLSD

SEQ ID NO: 25373 - protein, 10 aa, Artificial Sequence
  Description of Artificial Sequence: Synthetic epitope
KVFSGKSERS

SEQ ID NO: 25374 - protein, 10 aa, Artificial Sequence
  Description of Artificial Sequence: Synthetic epitope
KVGAEELTAD

SEQ ID NO: 25375 - protein, 10 aa, Artificial Sequence
  Description of Artificial Sequence: Synthetic epitope
KVGAISINIP

SEQ ID NO: 25376 - protein, 10 aa, Artificial Sequence
  Description of Artificial Sequence: Synthetic epitope
KVGEMINVSV

SEQ ID NO: 25377 - protein, 10 aa, Artificial Sequence
  Description of Artificial Sequence: Synthetic epitope
KVGFMKTGTV

SEQ ID NO: 25378 - protein, 10 aa, Artificial Sequence
  Description of Artificial Sequence: Synthetic epitope
KVGISSGKEI

SEQ ID NO: 25379 - protein, 10 aa, Artificial Sequence
  Description of Artificial Sequence: Synthetic epitope
KVGKQKALAQ

SEQ ID NO: 25380 - protein, 10 aa, Artificial Sequence
  Description of Artificial Sequence: Synthetic epitope
KVGLSWKTDI

SEQ ID NO: 25381 - protein, 10 aa, Artificial Sequence
  Description of Artificial Sequence: Synthetic epitope
KVGSDDLERI

SEQ ID NO: 25382 - protein, 10 aa, Artificial Sequence
  Description of Artificial Sequence: Synthetic epitope
KVGTGMSKSA

SEQ ID NO: 25383 - protein, 10 aa, Artificial Sequence
  Description of Artificial Sequence: Synthetic epitope
KVGVLVDEVI

SEQ ID NO: 25384 - protein, 10 aa, Artificial Sequence
  Description of Artificial Sequence: Synthetic epitope
KVGVRYYETH

SEQ ID NO: 25385 - protein, 10 aa, Artificial Sequence
  Description of Artificial Sequence: Synthetic epitope
KVGYLRKPKS

SEQ ID NO: 25386 - protein, 10 aa, Artificial Sequence
  Description of Artificial Sequence: Synthetic epitope
KVHAEKVAKA

SEQ ID NO: 25387 - protein, 10 aa, Artificial Sequence
  Description of Artificial Sequence: Synthetic epitope
KVHKNEQRTS

SEQ ID NO: 25388 - protein, 10 aa, Artificial Sequence
  Description of Artificial Sequence: Synthetic epitope
KVHLSEKIHP

SEQ ID NO: 25389 - protein, 10 aa, Artificial Sequence
  Description of Artificial Sequence: Synthetic epitope
KVHPRKSVHN

SEQ ID NO: 25390 - protein, 10 aa, Artificial Sequence
  Description of Artificial Sequence: Synthetic epitope
KVHQETAADE

SEQ ID NO: 25391 - protein, 10 aa, Artificial Sequence
  Description of Artificial Sequence: Synthetic epitope
KVHSSGKPIP

SEQ ID NO: 25392 - protein, 10 aa, Artificial Sequence
  Description of Artificial Sequence: Synthetic epitope
KVHTQETSEG

SEQ ID NO: 25393 - protein, 10 aa, Artificial Sequence
  Description of Artificial Sequence: Synthetic epitope
KVIAAQAQQA

SEQ ID NO: 25394 - protein, 10 aa, Artificial Sequence
  Description of Artificial Sequence: Synthetic epitope
KVIALTVLAS

SEQ ID NO: 25395 - protein, 10 aa, Artificial Sequence
  Description of Artificial Sequence: Synthetic epitope
KVIANESKNR

SEQ ID NO: 25396 - protein, 10 aa, Artificial Sequence
  Description of Artificial Sequence: Synthetic epitope
KVIAQQVQLQ

SEQ ID NO: 25397 - protein, 10 aa, Artificial Sequence
  Description of Artificial Sequence: Synthetic epitope
KVIEKLVERE

SEQ ID NO: 25398 - protein, 10 aa, Artificial Sequence
  Description of Artificial Sequence: Synthetic epitope
KVIELTGTAR

SEQ ID NO: 25399 - protein, 10 aa, Artificial Sequence
  Description of Artificial Sequence: Synthetic epitope
KVIENIRDQT

SEQ ID NO: 25400 - protein, 10 aa, Artificial Sequence
  Description of Artificial Sequence: Synthetic epitope
KVIEVFIRAE

SEQ ID NO: 25401 - protein, 10 aa, Artificial Sequence
  Description of Artificial Sequence: Synthetic epitope
KVIIDSSRAS

SEQ ID NO: 25402 - protein, 10 aa, Artificial Sequence
  Description of Artificial Sequence: Synthetic epitope
KVIIKNMGWN

SEQ ID NO: 25403 - protein, 10 aa, Artificial Sequence
  Description of Artificial Sequence: Synthetic epitope
KVIKMEQQYE

SEQ ID NO: 25404 - protein, 10 aa, Artificial Sequence
  Description of Artificial Sequence: Synthetic epitope
KVILERKDKV

SEQ ID NO: 25405 - protein, 10 aa, Artificial Sequence
  Description of Artificial Sequence: Synthetic epitope
KVINSETEGA

SEQ ID NO: 25406 - protein, 10 aa, Artificial Sequence
  Description of Artificial Sequence: Synthetic epitope
KVIPTVFKAM

SEQ ID NO: 25407 - protein, 10 aa, Artificial Sequence
  Description of Artificial Sequence: Synthetic epitope
KVIQIQTQEL

SEQ ID NO: 25408 - protein, 10 aa, Artificial Sequence
  Description of Artificial Sequence: Synthetic epitope
KVIQVDEMIV

SEQ ID NO: 25409 - protein, 10 aa, Artificial Sequence
  Description of Artificial Sequence: Synthetic epitope
KVIRDQKQVF

SEQ ID NO: 25410 - protein, 10 aa, Artificial Sequence
  Description of Artificial Sequence: Synthetic epitope
KVISALSEQA

SEQ ID NO: 25411 - protein, 10 aa, Artificial Sequence
  Description of Artificial Sequence: Synthetic epitope
KVISDKDLEL

SEQ ID NO: 25412 - protein, 10 aa, Artificial Sequence
  Description of Artificial Sequence: Synthetic epitope
KVISQYLQST

SEQ ID NO: 25413 - protein, 10 aa, Artificial Sequence
  Description of Artificial Sequence: Synthetic epitope
KVISSIVHFP

SEQ ID NO: 25414 - protein, 10 aa, Artificial Sequence
  Description of Artificial Sequence: Synthetic epitope
KVISTVKRKT

SEQ ID NO: 25415 - protein, 10 aa, Artificial Sequence
  Description of Artificial Sequence: Synthetic epitope
KVITKLAGME

SEQ ID NO: 25416 - protein, 10 aa, Artificial Sequence
  Description of Artificial Sequence: Synthetic epitope
KVITMFVQRQ

SEQ ID NO: 25417 - protein, 10 aa, Artificial Sequence
  Description of Artificial Sequence: Synthetic epitope
KVIVMPTTKE

SEQ ID NO: 25418 - protein, 10 aa, Artificial Sequence
  Description of Artificial Sequence: Synthetic epitope
KVIVQKLKDN

SEQ ID NO: 25419 - protein, 10 aa, Artificial Sequence
  Description of Artificial Sequence: Synthetic epitope
KVKADKDSPN

SEQ ID NO: 25420 - protein, 10 aa, Artificial Sequence
  Description of Artificial Sequence: Synthetic epitope
KVKAFQMKAS

SEQ ID NO: 25421 - protein, 10 aa, Artificial Sequence
  Description of Artificial Sequence: Synthetic epitope
KVKAPITQFL

SEQ ID NO: 25422 - protein, 10 aa, Artificial Sequence
  Description of Artificial Sequence: Synthetic epitope
KVKARLTKKD

SEQ ID NO: 25423 - protein, 10 aa, Artificial Sequence
  Description of Artificial Sequence: Synthetic epitope
KVKEELLKTD

SEQ ID NO: 25424 - protein, 10 aa, Artificial Sequence
  Description of Artificial Sequence: Synthetic epitope
KVKEKVRSPK

SEQ ID NO: 25425 - protein, 10 aa, Artificial Sequence
  Description of Artificial Sequence: Synthetic epitope
KVKESQRMSD

SEQ ID NO: 25426 - protein, 10 aa, Artificial Sequence
  Description of Artificial Sequence: Synthetic epitope
KVKESSDRDY

SEQ ID NO: 25427 - protein, 10 aa, Artificial Sequence
  Description of Artificial Sequence: Synthetic epitope
KVKIKKQENV

SEQ ID NO: 25428 - protein, 10 aa, Artificial Sequence
  Description of Artificial Sequence: Synthetic epitope
KVKISTMEHE

SEQ ID NO: 25429 - protein, 10 aa, Artificial Sequence
  Description of Artificial Sequence: Synthetic epitope
KVKKIYLDEK

SEQ ID NO: 25430 - protein, 10 aa, Artificial Sequence
  Description of Artificial Sequence: Synthetic epitope
KVKLIEAKEA

SEQ ID NO: 25431 - protein, 10 aa, Artificial Sequence
  Description of Artificial Sequence: Synthetic epitope
KVKMEEISQL

SEQ ID NO: 25432 - protein, 10 aa, Artificial Sequence
  Description of Artificial Sequence: Synthetic epitope
KVKMQRPDSY

SEQ ID NO: 25433 - protein, 10 aa, Artificial Sequence
  Description of Artificial Sequence: Synthetic epitope
KVKNENVAFA

SEQ ID NO: 25434 - protein, 10 aa, Artificial Sequence
  Description of Artificial Sequence: Synthetic epitope
KVKNVDLIEM

SEQ ID NO: 25435 - protein, 10 aa, Artificial Sequence
  Description of Artificial Sequence: Synthetic epitope
KVKPKKIQQG

SEQ ID NO: 25436 - protein, 10 aa, Artificial Sequence
  Description of Artificial Sequence: Synthetic epitope
KVKQDPSNSK

SEQ ID NO: 25437 - protein, 10 aa, Artificial Sequence
  Description of Artificial Sequence: Synthetic epitope
KVKSAKLLEV

SEQ ID NO: 25438 - protein, 10 aa, Artificial Sequence
  Description of Artificial Sequence: Synthetic epitope
KVKTDTENNE

SEQ ID NO: 25439 - protein, 10 aa, Artificial Sequence
  Description of Artificial Sequence: Synthetic epitope
KVKTLEGIAA

SEQ ID NO: 25440 - protein, 10 aa, Artificial Sequence
  Description of Artificial Sequence: Synthetic epitope
KVKVIKLVNK

SEQ ID NO: 25441 - protein, 10 aa, Artificial Sequence
  Description of Artificial Sequence: Synthetic epitope
KVKVLKVLTK

SEQ ID NO: 25442 - protein, 10 aa, Artificial Sequence
  Description of Artificial Sequence: Synthetic epitope
KVKYFVAKED

SEQ ID NO: 25443 - protein, 10 aa, Artificial Sequence
  Description of Artificial Sequence: Synthetic epitope
KVLADSERYT

SEQ ID NO: 25444 - protein, 10 aa, Artificial Sequence
  Description of Artificial Sequence: Synthetic epitope
KVLAIMREHG

SEQ ID NO: 25445 - protein, 10 aa, Artificial Sequence
  Description of Artificial Sequence: Synthetic epitope
KVLALVKEVP

SEQ ID NO: 25446 - protein, 10 aa, Artificial Sequence
  Description of Artificial Sequence: Synthetic epitope
KVLEENAQKK

SEQ ID NO: 25447 - protein, 10 aa, Artificial Sequence
  Description of Artificial Sequence: Synthetic epitope
KVLEKSDQTN

SEQ ID NO: 25448 - protein, 10 aa, Artificial Sequence
  Description of Artificial Sequence: Synthetic epitope
KVLEMETTVE

SEQ ID NO: 25449 - protein, 10 aa, Artificial Sequence
  Description of Artificial Sequence: Synthetic epitope
KVLGASSETF

SEQ ID NO: 25450 - protein, 10 aa, Artificial Sequence
  Description of Artificial Sequence: Synthetic epitope
KVLGSSNSDS

SEQ ID NO: 25451 - protein, 10 aa, Artificial Sequence
  Description of Artificial Sequence: Synthetic epitope
KVLIAQKLHE

SEQ ID NO: 25452 - protein, 10 aa, Artificial Sequence
  Description of Artificial Sequence: Synthetic epitope
KVLIKLTTAM

SEQ ID NO: 25453 - protein, 10 aa, Artificial Sequence
  Description of Artificial Sequence: Synthetic epitope
KVLKAQAQSQ

SEQ ID NO: 25454 - protein, 10 aa, Artificial Sequence
  Description of Artificial Sequence: Synthetic epitope
KVLKATLAEK

SEQ ID NO: 25455 - protein, 10 aa, Artificial Sequence
  Description of Artificial Sequence: Synthetic epitope
KVLKLSKVQE

SEQ ID NO: 25456 - protein, 10 aa, Artificial Sequence
  Description of Artificial Sequence: Synthetic epitope
KVLKPMQPKA

SEQ ID NO: 25457 - protein, 10 aa, Artificial Sequence
  Description of Artificial Sequence: Synthetic epitope
KVLKQAFSAN

SEQ ID NO: 25458 - protein, 10 aa, Artificial Sequence
  Description of Artificial Sequence: Synthetic epitope
KVLKSLNPAV

SEQ ID NO: 25459 - protein, 10 aa, Artificial Sequence
  Description of Artificial Sequence: Synthetic epitope
KVLKSLNPAV

SEQ ID NO: 25460 - protein, 10 aa, Artificial Sequence
  Description of Artificial Sequence: Synthetic epitope
KVLKVVAKVI

SEQ ID NO: 25461 - protein, 10 aa, Artificial Sequence
  Description of Artificial Sequence: Synthetic epitope
KVLLKKLKAL

SEQ ID NO: 25462 - protein, 10 aa, Artificial Sequence
  Description of Artificial Sequence: Synthetic epitope
KVLLNLKTSP

SEQ ID NO: 25463 - protein, 10 aa, Artificial Sequence
  Description of Artificial Sequence: Synthetic epitope
KVLQIIPESM

SEQ ID NO: 25464 - protein, 10 aa, Artificial Sequence
  Description of Artificial Sequence: Synthetic epitope
KVLQNKQAEI

SEQ ID NO: 25465 - protein, 10 aa, Artificial Sequence
  Description of Artificial Sequence: Synthetic epitope
KVLQPRTSKL

SEQ ID NO: 25466 - protein, 10 aa, Artificial Sequence
  Description of Artificial Sequence: Synthetic epitope
KVLQSYSNIE

SEQ ID NO: 25467 - protein, 10 aa, Artificial Sequence
  Description of Artificial Sequence: Synthetic epitope
KVLRTDSSTT

SEQ ID NO: 25468 - protein, 10 aa, Artificial Sequence
  Description of Artificial Sequence: Synthetic epitope
KVLSEAGSAA

SEQ ID NO: 25469 - protein, 10 aa, Artificial Sequence
  Description of Artificial Sequence: Synthetic epitope
KVLSEEISEK

SEQ ID NO: 25470 - protein, 10 aa, Artificial Sequence
  Description of Artificial Sequence: Synthetic epitope
KVLSMVKQSE

SEQ ID NO: 25471 - protein, 10 aa, Artificial Sequence
  Description of Artificial Sequence: Synthetic epitope
KVLSSLTPEK

SEQ ID NO: 25472 - protein, 10 aa, Artificial Sequence
  Description of Artificial Sequence: Synthetic epitope
KVLSTASAMQ

SEQ ID NO: 25473 - protein, 10 aa, Artificial Sequence
  Description of Artificial Sequence: Synthetic epitope
KVLTNKASVM

SEQ ID NO: 25474 - protein, 10 aa, Artificial Sequence
  Description of Artificial Sequence: Synthetic epitope
KVLVAEPLLT

SEQ ID NO: 25475 - protein, 10 aa, Artificial Sequence
  Description of Artificial Sequence: Synthetic epitope
KVLVDMSRVQ

SEQ ID NO: 25476 - protein, 10 aa, Artificial Sequence
  Description of Artificial Sequence: Synthetic epitope
KVLVIVMTTR

SEQ ID NO: 25477 - protein, 10 aa, Artificial Sequence
  Description of Artificial Sequence: Synthetic epitope
KVLVKLAENT

SEQ ID NO: 25478 - protein, 10 aa, Artificial Sequence
  Description of Artificial Sequence: Synthetic epitope
KVLVQNEEDE

SEQ ID NO: 25479 - protein, 10 aa, Artificial Sequence
  Description of Artificial Sequence: Synthetic epitope
KVLVVGSTQD

SEQ ID NO: 25480 - protein, 10 aa, Artificial Sequence
  Description of Artificial Sequence: Synthetic epitope
KVLYEKEQKG

SEQ ID NO: 25481 - protein, 10 aa, Artificial Sequence
  Description of Artificial Sequence: Synthetic epitope
KVMAESTIQS

SEQ ID NO: 25482 - protein, 10 aa, Artificial Sequence
  Description of Artificial Sequence: Synthetic epitope
KVMGQYLVQY

SEQ ID NO: 25483 - protein, 10 aa, Artificial Sequence
  Description of Artificial Sequence: Synthetic epitope
KVMHESSKRV

SEQ ID NO: 25484 - protein, 10 aa, Artificial Sequence
  Description of Artificial Sequence: Synthetic epitope
KVMMEVGQGK

SEQ ID NO: 25485 - protein, 10 aa, Artificial Sequence
  Description of Artificial Sequence: Synthetic epitope
KVMMHIRNHP

SEQ ID NO: 25486 - protein, 10 aa, Artificial Sequence
  Description of Artificial Sequence: Synthetic epitope
KVMQKIRMKG

SEQ ID NO: 25487 - protein, 10 aa, Artificial Sequence
  Description of Artificial Sequence: Synthetic epitope
KVMSQEIQEQ

SEQ ID NO: 25488 - protein, 10 aa, Artificial Sequence
  Description of Artificial Sequence: Synthetic epitope
KVMTTRILSV

SEQ ID NO: 25489 - protein, 10 aa, Artificial Sequence
  Description of Artificial Sequence: Synthetic epitope
KVMYNQSTAT

SEQ ID NO: 25490 - protein, 10 aa, Artificial Sequence
  Description of Artificial Sequence: Synthetic epitope
KVNASEFSKQ

SEQ ID NO: 25491 - protein, 10 aa, Artificial Sequence
  Description of Artificial Sequence: Synthetic epitope
KVNENELLRQ

SEQ ID NO: 25492 - protein, 10 aa, Artificial Sequence
  Description of Artificial Sequence: Synthetic epitope
KVNEVTVEQL

SEQ ID NO: 25493 - protein, 10 aa, Artificial Sequence
  Description of Artificial Sequence: Synthetic epitope
KVNIIQEEYQ

SEQ ID NO: 25494 - protein, 10 aa, Artificial Sequence
  Description of Artificial Sequence: Synthetic epitope
KVNKGKTEGS

SEQ ID NO: 25495 - protein, 10 aa, Artificial Sequence
  Description of Artificial Sequence: Synthetic epitope
KVNKTASGRE

SEQ ID NO: 25496 - protein, 10 aa, Artificial Sequence
  Description of Artificial Sequence: Synthetic epitope
KVNNYEHGKE

SEQ ID NO: 25497 - protein, 10 aa, Artificial Sequence
  Description of Artificial Sequence: Synthetic epitope
KVNPEFNMNP

SEQ ID NO: 25498 - protein, 10 aa, Artificial Sequence
  Description of Artificial Sequence: Synthetic epitope
KVNSRSQVQE

SEQ ID NO: 25499 - protein, 10 aa, Artificial Sequence
  Description of Artificial Sequence: Synthetic epitope
KVNSSLSDEL

SEQ ID NO: 25500 - protein, 10 aa, Artificial Sequence
  Description of Artificial Sequence: Synthetic epitope
KVPDPQMSME

SEQ ID NO: 25501 - protein, 10 aa, Artificial Sequence
  Description of Artificial Sequence: Synthetic epitope
KVPKNPSAKR

SEQ ID NO: 25502 - protein, 10 aa, Artificial Sequence
  Description of Artificial Sequence: Synthetic epitope
KVPPRAITEA

SEQ ID NO: 25503 - protein, 10 aa, Artificial Sequence
  Description of Artificial Sequence: Synthetic epitope
KVPSASMSSE

SEQ ID NO: 25504 - protein, 10 aa, Artificial Sequence
  Description of Artificial Sequence: Synthetic epitope
KVPTLVEELI

SEQ ID NO: 25505 - protein, 10 aa, Artificial Sequence
  Description of Artificial Sequence: Synthetic epitope
KVPTRHSMSQ

SEQ ID NO: 25506 - protein, 10 aa, Artificial Sequence
  Description of Artificial Sequence: Synthetic epitope
KVQAESAQHQ

SEQ ID NO: 25507 - protein, 10 aa, Artificial Sequence
  Description of Artificial Sequence: Synthetic epitope
KVQATEQMAY

SEQ ID NO: 25508 - protein, 10 aa, Artificial Sequence
  Description of Artificial Sequence: Synthetic epitope
KVQEFREQKQ

SEQ ID NO: 25509 - protein, 10 aa, Artificial Sequence
  Description of Artificial Sequence: Synthetic epitope
KVQEKSTWKM

SEQ ID NO: 25510 - protein, 10 aa, Artificial Sequence
  Description of Artificial Sequence: Synthetic epitope
KVQGLVISQM

SEQ ID NO: 25511 - protein, 10 aa, Artificial Sequence
  Description of Artificial Sequence: Synthetic epitope
KVQIAEAINL

SEQ ID NO: 25512 - protein, 10 aa, Artificial Sequence
  Description of Artificial Sequence: Synthetic epitope
KVQISSQNPP

SEQ ID NO: 25513 - protein, 10 aa, Artificial Sequence
  Description of Artificial Sequence: Synthetic epitope
KVQKQKKMQE

SEQ ID NO: 25514 - protein, 10 aa, Artificial Sequence
  Description of Artificial Sequence: Synthetic epitope
KVQKVMVQPI

SEQ ID NO: 25515 - protein, 10 aa, Artificial Sequence
  Description of Artificial Sequence: Synthetic epitope
KVQLFKIDQQ

SEQ ID NO: 25516 - protein, 10 aa, Artificial Sequence
  Description of Artificial Sequence: Synthetic epitope
KVQMKAIDDN

SEQ ID NO: 25517 - protein, 10 aa, Artificial Sequence
  Description of Artificial Sequence: Synthetic epitope
KVQSVSQNKS

SEQ ID NO: 25518 - protein, 10 aa, Artificial Sequence
  Description of Artificial Sequence: Synthetic epitope
KVQTASSANT

SEQ ID NO: 25519 - protein, 10 aa, Artificial Sequence
  Description of Artificial Sequence: Synthetic epitope
KVQTTPKVEE

SEQ ID NO: 25520 - protein, 10 aa, Artificial Sequence
  Description of Artificial Sequence: Synthetic epitope
KVRAIQRQQT

SEQ ID NO: 25521 - protein, 10 aa, Artificial Sequence
  Description of Artificial Sequence: Synthetic epitope
KVRDLMHVHS

SEQ ID NO: 25522 - protein, 10 aa, Artificial Sequence
  Description of Artificial Sequence: Synthetic epitope
KVREESLDVQ

SEQ ID NO: 25523 - protein, 10 aa, Artificial Sequence
  Description of Artificial Sequence: Synthetic epitope
KVRELISDNQ

SEQ ID NO: 25524 - protein, 10 aa, Artificial Sequence
  Description of Artificial Sequence: Synthetic epitope
KVRENQVSIE

SEQ ID NO: 25525 - protein, 10 aa, Artificial Sequence
  Description of Artificial Sequence: Synthetic epitope
KVRFHLVGED

SEQ ID NO: 25526 - protein, 10 aa, Artificial Sequence
  Description of Artificial Sequence: Synthetic epitope
KVRHQMDTMA

SEQ ID NO: 25527 - protein, 10 aa, Artificial Sequence
  Description of Artificial Sequence: Synthetic epitope
KVRIKTIKTS

SEQ ID NO: 25528 - protein, 10 aa, Artificial Sequence
  Description of Artificial Sequence: Synthetic epitope
KVRKSQLKEV

SEQ ID NO: 25529 - protein, 10 aa, Artificial Sequence
  Description of Artificial Sequence: Synthetic epitope
KVRQFRERSE

SEQ ID NO: 25530 - protein, 10 aa, Artificial Sequence
  Description of Artificial Sequence: Synthetic epitope
KVRQRSKKAK

SEQ ID NO: 25531 - protein, 10 aa, Artificial Sequence
  Description of Artificial Sequence: Synthetic epitope
KVRRSRNAQV

SEQ ID NO: 25532 - protein, 10 aa, Artificial Sequence
  Description of Artificial Sequence: Synthetic epitope
KVRRTRKKES

SEQ ID NO: 25533 - protein, 10 aa, Artificial Sequence
  Description of Artificial Sequence: Synthetic epitope
KVRSEEAPAG

SEQ ID NO: 25534 - protein, 10 aa, Artificial Sequence
  Description of Artificial Sequence: Synthetic epitope
KVSAEAEVAP

SEQ ID NO: 25535 - protein, 10 aa, Artificial Sequence
  Description of Artificial Sequence: Synthetic epitope
KVSAQQVQGV

SEQ ID NO: 25536 - protein, 10 aa, Artificial Sequence
  Description of Artificial Sequence: Synthetic epitope
KVSATAAELA

SEQ ID NO: 25537 - protein, 10 aa, Artificial Sequence
  Description of Artificial Sequence: Synthetic epitope
KVSDKNALFN

SEQ ID NO: 25538 - protein, 10 aa, Artificial Sequence
  Description of Artificial Sequence: Synthetic epitope
KVSDLTIPKH

SEQ ID NO: 25539 - protein, 10 aa, Artificial Sequence
  Description of Artificial Sequence: Synthetic epitope
KVSDYSETLR

SEQ ID NO: 25540 - protein, 10 aa, Artificial Sequence
  Description of Artificial Sequence: Synthetic epitope
KVSEANSQTE

SEQ ID NO: 25541 - protein, 10 aa, Artificial Sequence
  Description of Artificial Sequence: Synthetic epitope
KVSELAAFKV

SEQ ID NO: 25542 - protein, 10 aa, Artificial Sequence
  Description of Artificial Sequence: Synthetic epitope
KVSFNEKAVT

SEQ ID NO: 25543 - protein, 10 aa, Artificial Sequence
  Description of Artificial Sequence: Synthetic epitope
KVSFTIKPKE

SEQ ID NO: 25544 - protein, 10 aa, Artificial Sequence
  Description of Artificial Sequence: Synthetic epitope
KVSHNNKVNL

SEQ ID NO: 25545 - protein, 10 aa, Artificial Sequence
  Description of Artificial Sequence: Synthetic epitope
KVSIAIEEVT

SEQ ID NO: 25546 - protein, 10 aa, Artificial Sequence
  Description of Artificial Sequence: Synthetic epitope
KVSIIETKEK

SEQ ID NO: 25547 - protein, 10 aa, Artificial Sequence
  Description of Artificial Sequence: Synthetic epitope
KVSIISQPQK

SEQ ID NO: 25548 - protein, 10 aa, Artificial Sequence
  Description of Artificial Sequence: Synthetic epitope
KVSISKSTYN

SEQ ID NO: 25549 - protein, 10 aa, Artificial Sequence
  Description of Artificial Sequence: Synthetic epitope
KVSKEIKKDQ

SEQ ID NO: 25550 - protein, 10 aa, Artificial Sequence
  Description of Artificial Sequence: Synthetic epitope
KVSKESSVEP

SEQ ID NO: 25551 - protein, 10 aa, Artificial Sequence
  Description of Artificial Sequence: Synthetic epitope
KVSKLAVSAQ

SEQ ID NO: 25552 - protein, 10 aa, Artificial Sequence
  Description of Artificial Sequence: Synthetic epitope
KVSKSPLVMD

SEQ ID NO: 25553 - protein, 10 aa, Artificial Sequence
  Description of Artificial Sequence: Synthetic epitope
KVSLDNQAML

SEQ ID NO: 25554 - protein, 10 aa, Artificial Sequence
  Description of Artificial Sequence: Synthetic epitope
KVSLGIRRLH

SEQ ID NO: 25555 - protein, 10 aa, Artificial Sequence
  Description of Artificial Sequence: Synthetic epitope
KVSMAFTPSA

SEQ ID NO: 25556 - protein, 10 aa, Artificial Sequence
  Description of Artificial Sequence: Synthetic epitope
KVSNAQSVTS

SEQ ID NO: 25557 - protein, 10 aa, Artificial Sequence
  Description of Artificial Sequence: Synthetic epitope
KVSPATRSDT

SEQ ID NO: 25558 - protein, 10 aa, Artificial Sequence
  Description of Artificial Sequence: Synthetic epitope
KVSPDKMIEM

SEQ ID NO: 25559 - protein, 10 aa, Artificial Sequence
  Description of Artificial Sequence: Synthetic epitope
KVSQKSDSSA

SEQ ID NO: 25560 - protein, 10 aa, Artificial Sequence
  Description of Artificial Sequence: Synthetic epitope
KVSQVESPEA

SEQ ID NO: 25561 - protein, 10 aa, Artificial Sequence
  Description of Artificial Sequence: Synthetic epitope
KVSRSLENDG

SEQ ID NO: 25562 - protein, 10 aa, Artificial Sequence
  Description of Artificial Sequence: Synthetic epitope
KVSSNKTGFS

SEQ ID NO: 25563 - protein, 10 aa, Artificial Sequence
  Description of Artificial Sequence: Synthetic epitope
KVSTEMGLRE

SEQ ID NO: 25564 - protein, 10 aa, Artificial Sequence
  Description of Artificial Sequence: Synthetic epitope
KVSTLRESSA

SEQ ID NO: 25565 - protein, 10 aa, Artificial Sequence
  Description of Artificial Sequence: Synthetic epitope
KVSTMPLSTS

SEQ ID NO: 25566 - protein, 10 aa, Artificial Sequence
  Description of Artificial Sequence: Synthetic epitope
KVSTSGSSVD

SEQ ID NO: 25567 - protein, 10 aa, Artificial Sequence
  Description of Artificial Sequence: Synthetic epitope
KVSTTGMQFL

SEQ ID NO: 25568 - protein, 10 aa, Artificial Sequence
  Description of Artificial Sequence: Synthetic epitope
KVSVDKSFSR

SEQ ID NO: 25569 - protein, 10 aa, Artificial Sequence
  Description of Artificial Sequence: Synthetic epitope
KVSVIVMLVS

SEQ ID NO: 25570 - protein, 10 aa, Artificial Sequence
  Description of Artificial Sequence: Synthetic epitope
KVSVTQRRTR

SEQ ID NO: 25571 - protein, 10 aa, Artificial Sequence
  Description of Artificial Sequence: Synthetic epitope
KVSVVNPTAQ

SEQ ID NO: 25572 - protein, 10 aa, Artificial Sequence
  Description of Artificial Sequence: Synthetic epitope
KVTARVVSRR

SEQ ID NO: 25573 - protein, 10 aa, Artificial Sequence
  Description of Artificial Sequence: Synthetic epitope
KVTDDEEASQ

SEQ ID NO: 25574 - protein, 10 aa, Artificial Sequence
  Description of Artificial Sequence: Synthetic epitope
KVTELQLTSS

SEQ ID NO: 25575 - protein, 10 aa, Artificial Sequence
  Description of Artificial Sequence: Synthetic epitope
KVTHSKSLDT

SEQ ID NO: 25576 - protein, 10 aa, Artificial Sequence
  Description of Artificial Sequence: Synthetic epitope
KVTHSKSLDT

SEQ ID NO: 25577 - protein, 10 aa, Artificial Sequence
  Description of Artificial Sequence: Synthetic epitope
KVTHTLTMRQ

SEQ ID NO: 25578 - protein, 10 aa, Artificial Sequence
  Description of Artificial Sequence: Synthetic epitope
KVTIDKLSED

SEQ ID NO: 25579 - protein, 10 aa, Artificial Sequence
  Description of Artificial Sequence: Synthetic epitope
KVTKAKKAAP

SEQ ID NO: 25580 - protein, 10 aa, Artificial Sequence
  Description of Artificial Sequence: Synthetic epitope
KVTLSDAILP

SEQ ID NO: 25581 - protein, 10 aa, Artificial Sequence
  Description of Artificial Sequence: Synthetic epitope
KVTQGKEETR

SEQ ID NO: 25582 - protein, 10 aa, Artificial Sequence
  Description of Artificial Sequence: Synthetic epitope
KVTRDALTEP

SEQ ID NO: 25583 - protein, 10 aa, Artificial Sequence
  Description of Artificial Sequence: Synthetic epitope
KVTSEHLSLI

SEQ ID NO: 25584 - protein, 10 aa, Artificial Sequence
  Description of Artificial Sequence: Synthetic epitope
KVTSSPITSE

SEQ ID NO: 25585 - protein, 10 aa, Artificial Sequence
  Description of Artificial Sequence: Synthetic epitope
KVTSVKAHSD

SEQ ID NO: 25586 - protein, 10 aa, Artificial Sequence
  Description of Artificial Sequence: Synthetic epitope
KVTSVSTLKS

SEQ ID NO: 25587 - protein, 10 aa, Artificial Sequence
  Description of Artificial Sequence: Synthetic epitope
KVTTDSDTQE

SEQ ID NO: 25588 - protein, 10 aa, Artificial Sequence
  Description of Artificial Sequence: Synthetic epitope
KVTTELAQAD

SEQ ID NO: 25589 - protein, 10 aa, Artificial Sequence
  Description of Artificial Sequence: Synthetic epitope
KVTTKIQGNA

SEQ ID NO: 25590 - protein, 10 aa, Artificial Sequence
  Description of Artificial Sequence: Synthetic epitope
KVTTSQDMLS

SEQ ID NO: 25591 - protein, 10 aa, Artificial Sequence
  Description of Artificial Sequence: Synthetic epitope
KVTVTQITVA

SEQ ID NO: 25592 - protein, 10 aa, Artificial Sequence
  Description of Artificial Sequence: Synthetic epitope
KVTVTSLAGQ

SEQ ID NO: 25593 - protein, 10 aa, Artificial Sequence
  Description of Artificial Sequence: Synthetic epitope
KVTWAVHQAL

SEQ ID NO: 25594 - protein, 10 aa, Artificial Sequence
  Description of Artificial Sequence: Synthetic epitope
KVVAQQIRQL

SEQ ID NO: 25595 - protein, 10 aa, Artificial Sequence
  Description of Artificial Sequence: Synthetic epitope
KVVAVKFFSV

SEQ ID NO: 25596 - protein, 10 aa, Artificial Sequence
  Description of Artificial Sequence: Synthetic epitope
KVVDKSEYRT

SEQ ID NO: 25597 - protein, 10 aa, Artificial Sequence
  Description of Artificial Sequence: Synthetic epitope
KVVDVEEQQL

SEQ ID NO: 25598 - protein, 10 aa, Artificial Sequence
  Description of Artificial Sequence: Synthetic epitope
KVVEKKTKPY

SEQ ID NO: 25599 - protein, 10 aa, Artificial Sequence
  Description of Artificial Sequence: Synthetic epitope
KVVERELISK

SEQ ID NO: 25600 - protein, 10 aa, Artificial Sequence
  Description of Artificial Sequence: Synthetic epitope
KVVFPLQREK

SEQ ID NO: 25601 - protein, 10 aa, Artificial Sequence
  Description of Artificial Sequence: Synthetic epitope
KVVGQISGLQ

SEQ ID NO: 25602 - protein, 10 aa, Artificial Sequence
  Description of Artificial Sequence: Synthetic epitope
KVVHDAKMTP

SEQ ID NO: 25603 - protein, 10 aa, Artificial Sequence
  Description of Artificial Sequence: Synthetic epitope
KVVILRYNEN

SEQ ID NO: 25604 - protein, 10 aa, Artificial Sequence
  Description of Artificial Sequence: Synthetic epitope
KVVKKAMKSN

SEQ ID NO: 25605 - protein, 10 aa, Artificial Sequence
  Description of Artificial Sequence: Synthetic epitope
KVVKTRAEGE

SEQ ID NO: 25606 - protein, 10 aa, Artificial Sequence
  Description of Artificial Sequence: Synthetic epitope
KVVKTSKKIT

SEQ ID NO: 25607 - protein, 10 aa, Artificial Sequence
  Description of Artificial Sequence: Synthetic epitope
KVVLKSKDDQ

SEQ ID NO: 25608 - protein, 10 aa, Artificial Sequence
  Description of Artificial Sequence: Synthetic epitope
KVVLVSLQSG

SEQ ID NO: 25609 - protein, 10 aa, Artificial Sequence
  Description of Artificial Sequence: Synthetic epitope
KVVMATSSAT

SEQ ID NO: 25610 - protein, 10 aa, Artificial Sequence
  Description of Artificial Sequence: Synthetic epitope
KVVNPQEYSS

SEQ ID NO: 25611 - protein, 10 aa, Artificial Sequence
  Description of Artificial Sequence: Synthetic epitope
KVVNVEIVEE

SEQ ID NO: 25612 - protein, 10 aa, Artificial Sequence
  Description of Artificial Sequence: Synthetic epitope
KVVPGETIDP

SEQ ID NO: 25613 - protein, 10 aa, Artificial Sequence
  Description of Artificial Sequence: Synthetic epitope
KVVQYDGYDR

SEQ ID NO: 25614 - protein, 10 aa, Artificial Sequence
  Description of Artificial Sequence: Synthetic epitope
KVVRLKPTRK

SEQ ID NO: 25615 - protein, 10 aa, Artificial Sequence
  Description of Artificial Sequence: Synthetic epitope
KVVRLKPTRK

SEQ ID NO: 25616 - protein, 10 aa, Artificial Sequence
  Description of Artificial Sequence: Synthetic epitope
KVVRNLNYQK

SEQ ID NO: 25617 - protein, 10 aa, Artificial Sequence
  Description of Artificial Sequence: Synthetic epitope
KVVRSAATSG

SEQ ID NO: 25618 - protein, 10 aa, Artificial Sequence
  Description of Artificial Sequence: Synthetic epitope
KVVRSTEQGT

SEQ ID NO: 25619 - protein, 10 aa, Artificial Sequence
  Description of Artificial Sequence: Synthetic epitope
KVVSMQADNP

SEQ ID NO: 25620 - protein, 10 aa, Artificial Sequence
  Description of Artificial Sequence: Synthetic epitope
KVVSQYSSLL

SEQ ID NO: 25621 - protein, 10 aa, Artificial Sequence
  Description of Artificial Sequence: Synthetic epitope
KVWANKAKGE

SEQ ID NO: 25622 - protein, 10 aa, Artificial Sequence
  Description of Artificial Sequence: Synthetic epitope
KVWDGLMEID

SEQ ID NO: 25623 - protein, 10 aa, Artificial Sequence
  Description of Artificial Sequence: Synthetic epitope
KVWIKQTEQV

SEQ ID NO: 25624 - protein, 10 aa, Artificial Sequence
  Description of Artificial Sequence: Synthetic epitope
KVYEARLTEE

SEQ ID NO: 25625 - protein, 10 aa, Artificial Sequence
  Description of Artificial Sequence: Synthetic epitope
KVYELIDALS

SEQ ID NO: 25626 - protein, 10 aa, Artificial Sequence
  Description of Artificial Sequence: Synthetic epitope
KVYKQATIES

SEQ ID NO: 25627 - protein, 10 aa, Artificial Sequence
  Description of Artificial Sequence: Synthetic epitope
KVYPRFATNE

SEQ ID NO: 25628 - protein, 10 aa, Artificial Sequence
  Description of Artificial Sequence: Synthetic epitope
KVYQVSSKEH

SEQ ID NO: 25629 - protein, 10 aa, Artificial Sequence
  Description of Artificial Sequence: Synthetic epitope
KVYWRLNQQL

SEQ ID NO: 25630 - protein, 10 aa, Artificial Sequence
  Description of Artificial Sequence: Synthetic epitope
KWAIAQLNYA

SEQ ID NO: 25631 - protein, 10 aa, Artificial Sequence
  Description of Artificial Sequence: Synthetic epitope
KWDMSAENAR

SEQ ID NO: 25632 - protein, 10 aa, Artificial Sequence
  Description of Artificial Sequence: Synthetic epitope
KWEPVKWEND

SEQ ID NO: 25633 - protein, 10 aa, Artificial Sequence
  Description of Artificial Sequence: Synthetic epitope
KWERFETNKE

SEQ ID NO: 25634 - protein, 10 aa, Artificial Sequence
  Description of Artificial Sequence: Synthetic epitope
KWEVDQKERE

SEQ ID NO: 25635 - protein, 10 aa, Artificial Sequence
  Description of Artificial Sequence: Synthetic epitope
KWFDFKLFFN

SEQ ID NO: 25636 - protein, 10 aa, Artificial Sequence
  Description of Artificial Sequence: Synthetic epitope
KWFQPLQEQK

SEQ ID NO: 25637 - protein, 10 aa, Artificial Sequence
  Description of Artificial Sequence: Synthetic epitope
KWINATISRA

SEQ ID NO: 25638 - protein, 10 aa, Artificial Sequence
  Description of Artificial Sequence: Synthetic epitope
KWINDTMKKH

SEQ ID NO: 25639 - protein, 10 aa, Artificial Sequence
  Description of Artificial Sequence: Synthetic epitope
KWIVGIAKSQ

SEQ ID NO: 25640 - protein, 10 aa, Artificial Sequence
  Description of Artificial Sequence: Synthetic epitope
KWKASLKSEK

SEQ ID NO: 25641 - protein, 10 aa, Artificial Sequence
  Description of Artificial Sequence: Synthetic epitope
KWLIMRKSLI

SEQ ID NO: 25642 - protein, 10 aa, Artificial Sequence
  Description of Artificial Sequence: Synthetic epitope
KWLKAAEKTV

SEQ ID NO: 25643 - protein, 10 aa, Artificial Sequence
  Description of Artificial Sequence: Synthetic epitope
KWLKMFKKRQ

SEQ ID NO: 25644 - protein, 10 aa, Artificial Sequence
  Description of Artificial Sequence: Synthetic epitope
KWMGIAFRIQ

SEQ ID NO: 25645 - protein, 10 aa, Artificial Sequence
  Description of Artificial Sequence: Synthetic epitope
KWMKDREPFQ

SEQ ID NO: 25646 - protein, 10 aa, Artificial Sequence
  Description of Artificial Sequence: Synthetic epitope
KWNSINSTKT

SEQ ID NO: 25647 - protein, 10 aa, Artificial Sequence
  Description of Artificial Sequence: Synthetic epitope
KWQPHQQNKW

SEQ ID NO: 25648 - protein, 10 aa, Artificial Sequence
  Description of Artificial Sequence: Synthetic epitope
KWQWEPEKEN

SEQ ID NO: 25649 - protein, 10 aa, Artificial Sequence
  Description of Artificial Sequence: Synthetic epitope
KWRALGYAKA

SEQ ID NO: 25650 - protein, 10 aa, Artificial Sequence
  Description of Artificial Sequence: Synthetic epitope
KWRMMSLSQS

SEQ ID NO: 25651 - protein, 10 aa, Artificial Sequence
  Description of Artificial Sequence: Synthetic epitope
KWRMRVDIEV

SEQ ID NO: 25652 - protein, 10 aa, Artificial Sequence
  Description of Artificial Sequence: Synthetic epitope
KWSMEALWAM

SEQ ID NO: 25653 - protein, 10 aa, Artificial Sequence
  Description of Artificial Sequence: Synthetic epitope
KWSSALTTLT

SEQ ID NO: 25654 - protein, 10 aa, Artificial Sequence
  Description of Artificial Sequence: Synthetic epitope
KWSTSTKSQE

SEQ ID NO: 25655 - protein, 10 aa, Artificial Sequence
  Description of Artificial Sequence: Synthetic epitope
KWVKQMINRN

SEQ ID NO: 25656 - protein, 10 aa, Artificial Sequence
  Description of Artificial Sequence: Synthetic epitope
KWWNNLSDGQ

SEQ ID NO: 25657 - protein, 10 aa, Artificial Sequence
  Description of Artificial Sequence: Synthetic epitope
KWYQLTAATY

SEQ ID NO: 25658 - protein, 10 aa, Artificial Sequence
  Description of Artificial Sequence: Synthetic epitope
KYAAKITPRS

SEQ ID NO: 25659 - protein, 10 aa, Artificial Sequence
  Description of Artificial Sequence: Synthetic epitope
KYAAKVGVNI

SEQ ID NO: 25660 - protein, 10 aa, Artificial Sequence
  Description of Artificial Sequence: Synthetic epitope
KYADEKSERA

SEQ ID NO: 25661 - protein, 10 aa, Artificial Sequence
  Description of Artificial Sequence: Synthetic epitope
KYAESEKIKK

SEQ ID NO: 25662 - protein, 10 aa, Artificial Sequence
  Description of Artificial Sequence: Synthetic epitope
KYAGAMESEP

SEQ ID NO: 25663 - protein, 10 aa, Artificial Sequence
  Description of Artificial Sequence: Synthetic epitope
KYAMTRIKAA

SEQ ID NO: 25664 - protein, 10 aa, Artificial Sequence
  Description of Artificial Sequence: Synthetic epitope
KYARVKEVEE

SEQ ID NO: 25665 - protein, 10 aa, Artificial Sequence
  Description of Artificial Sequence: Synthetic epitope
KYATLISNSK

SEQ ID NO: 25666 - protein, 10 aa, Artificial Sequence
  Description of Artificial Sequence: Synthetic epitope
KYDAYKNIDK

SEQ ID NO: 25667 - protein, 10 aa, Artificial Sequence
  Description of Artificial Sequence: Synthetic epitope
KYDDYKIRLG

SEQ ID NO: 25668 - protein, 10 aa, Artificial Sequence
  Description of Artificial Sequence: Synthetic epitope
KYDKKTGNFQ

SEQ ID NO: 25669 - protein, 10 aa, Artificial Sequence
  Description of Artificial Sequence: Synthetic epitope
KYDLTPAIQT

SEQ ID NO: 25670 - protein, 10 aa, Artificial Sequence
  Description of Artificial Sequence: Synthetic epitope
KYDSKSQSEE

SEQ ID NO: 25671 - protein, 10 aa, Artificial Sequence
  Description of Artificial Sequence: Synthetic epitope
KYDSVEAIKA

SEQ ID NO: 25672 - protein, 10 aa, Artificial Sequence
  Description of Artificial Sequence: Synthetic epitope
KYEAIITVVK

SEQ ID NO: 25673 - protein, 10 aa, Artificial Sequence
  Description of Artificial Sequence: Synthetic epitope
KYEIQSAMEI

SEQ ID NO: 25674 - protein, 10 aa, Artificial Sequence
  Description of Artificial Sequence: Synthetic epitope
KYEITKREIL

SEQ ID NO: 25675 - protein, 10 aa, Artificial Sequence
  Description of Artificial Sequence: Synthetic epitope
KYELVKALAN

SEQ ID NO: 25676 - protein, 10 aa, Artificial Sequence
  Description of Artificial Sequence: Synthetic epitope
KYERDSNYHL

SEQ ID NO: 25677 - protein, 10 aa, Artificial Sequence
  Description of Artificial Sequence: Synthetic epitope
KYESNATALR

SEQ ID NO: 25678 - protein, 10 aa, Artificial Sequence
  Description of Artificial Sequence: Synthetic epitope
KYFDAATTEY

SEQ ID NO: 25679 - protein, 10 aa, Artificial Sequence
  Description of Artificial Sequence: Synthetic epitope
KYFNMRVFRQ

SEQ ID NO: 25680 - protein, 10 aa, Artificial Sequence
  Description of Artificial Sequence: Synthetic epitope
KYFQKDIAEP

SEQ ID NO: 25681 - protein, 10 aa, Artificial Sequence
  Description of Artificial Sequence: Synthetic epitope
KYFSTELTSS

SEQ ID NO: 25682 - protein, 10 aa, Artificial Sequence
  Description of Artificial Sequence: Synthetic epitope
KYGFEGALWK

SEQ ID NO: 25683 - protein, 10 aa, Artificial Sequence
  Description of Artificial Sequence: Synthetic epitope
KYGKQASANH

SEQ ID NO: 25684 - protein, 10 aa, Artificial Sequence
  Description of Artificial Sequence: Synthetic epitope
KYGLVKSIEI

SEQ ID NO: 25685 - protein, 10 aa, Artificial Sequence
  Description of Artificial Sequence: Synthetic epitope
KYGNKKQSMI

SEQ ID NO: 25686 - protein, 10 aa, Artificial Sequence
  Description of Artificial Sequence: Synthetic epitope
KYGTLQGKQM

SEQ ID NO: 25687 - protein, 10 aa, Artificial Sequence
  Description of Artificial Sequence: Synthetic epitope
KYGVSLIDPK

SEQ ID NO: 25688 - protein, 10 aa, Artificial Sequence
  Description of Artificial Sequence: Synthetic epitope
KYGVTMEQIK

SEQ ID NO: 25689 - protein, 10 aa, Artificial Sequence
  Description of Artificial Sequence: Synthetic epitope
KYGVTMEQIK

SEQ ID NO: 25690 - protein, 10 aa, Artificial Sequence
  Description of Artificial Sequence: Synthetic epitope
KYIEKVSSRA

SEQ ID NO: 25691 - protein, 10 aa, Artificial Sequence
  Description of Artificial Sequence: Synthetic epitope
KYIETLAKQM

SEQ ID NO: 25692 - protein, 10 aa, Artificial Sequence
  Description of Artificial Sequence: Synthetic epitope
KYIISEESVF

SEQ ID NO: 25693 - protein, 10 aa, Artificial Sequence
  Description of Artificial Sequence: Synthetic epitope
KYIKRNTKEN

SEQ ID NO: 25694 - protein, 10 aa, Artificial Sequence
  Description of Artificial Sequence: Synthetic epitope
KYILPTETIY

SEQ ID NO: 25695 - protein, 10 aa, Artificial Sequence
  Description of Artificial Sequence: Synthetic epitope
KYINLSLHYL

SEQ ID NO: 25696 - protein, 10 aa, Artificial Sequence
  Description of Artificial Sequence: Synthetic epitope
KYINTDAKFQ

SEQ ID NO: 25697 - protein, 10 aa, Artificial Sequence
  Description of Artificial Sequence: Synthetic epitope
KYIRTKTKPH

SEQ ID NO: 25698 - protein, 10 aa, Artificial Sequence
  Description of Artificial Sequence: Synthetic epitope
KYISSTIVNL

SEQ ID NO: 25699 - protein, 10 aa, Artificial Sequence
  Description of Artificial Sequence: Synthetic epitope
KYIYNRSPAI

SEQ ID NO: 25700 - protein, 10 aa, Artificial Sequence
  Description of Artificial Sequence: Synthetic epitope
KYKATKSDLE

SEQ ID NO: 25701 - protein, 10 aa, Artificial Sequence
  Description of Artificial Sequence: Synthetic epitope
KYKFTSVVAQ

SEQ ID NO: 25702 - protein, 10 aa, Artificial Sequence
  Description of Artificial Sequence: Synthetic epitope
KYKINVKENS

SEQ ID NO: 25703 - protein, 10 aa, Artificial Sequence
  Description of Artificial Sequence: Synthetic epitope
KYKNITAQKS

SEQ ID NO: 25704 - protein, 10 aa, Artificial Sequence
  Description of Artificial Sequence: Synthetic epitope
KYKQEVWKDL

SEQ ID NO: 25705 - protein, 10 aa, Artificial Sequence
  Description of Artificial Sequence: Synthetic epitope
KYKRMNSNER

SEQ ID NO: 25706 - protein, 10 aa, Artificial Sequence
  Description of Artificial Sequence: Synthetic epitope
KYKSTSKSSQ

SEQ ID NO: 25707 - protein, 10 aa, Artificial Sequence
  Description of Artificial Sequence: Synthetic epitope
KYKYSELTTV

SEQ ID NO: 25708 - protein, 10 aa, Artificial Sequence
  Description of Artificial Sequence: Synthetic epitope
KYLGAATSLT

SEQ ID NO: 25709 - protein, 10 aa, Artificial Sequence
  Description of Artificial Sequence: Synthetic epitope
KYLKEPKASY

SEQ ID NO: 25710 - protein, 10 aa, Artificial Sequence
  Description of Artificial Sequence: Synthetic epitope
KYLKSPLIRM

SEQ ID NO: 25711 - protein, 10 aa, Artificial Sequence
  Description of Artificial Sequence: Synthetic epitope
KYLLKNYDRF

SEQ ID NO: 25712 - protein, 10 aa, Artificial Sequence
  Description of Artificial Sequence: Synthetic epitope
KYLLKQALAT

SEQ ID NO: 25713 - protein, 10 aa, Artificial Sequence
  Description of Artificial Sequence: Synthetic epitope
KYLLMLKKQD

SEQ ID NO: 25714 - protein, 10 aa, Artificial Sequence
  Description of Artificial Sequence: Synthetic epitope
KYLLSLAQSL

SEQ ID NO: 25715 - protein, 10 aa, Artificial Sequence
  Description of Artificial Sequence: Synthetic epitope
KYMESNAAQY

SEQ ID NO: 25716 - protein, 10 aa, Artificial Sequence
  Description of Artificial Sequence: Synthetic epitope
KYMESVMNQL

SEQ ID NO: 25717 - protein, 10 aa, Artificial Sequence
  Description of Artificial Sequence: Synthetic epitope
KYMIGNSVQK

SEQ ID NO: 25718 - protein, 10 aa, Artificial Sequence
  Description of Artificial Sequence: Synthetic epitope
KYMMDHMDAS

SEQ ID NO: 25719 - protein, 10 aa, Artificial Sequence
  Description of Artificial Sequence: Synthetic epitope
KYMQMMNILK

SEQ ID NO: 25720 - protein, 10 aa, Artificial Sequence
  Description of Artificial Sequence: Synthetic epitope
KYNGESSEYT

SEQ ID NO: 25721 - protein, 10 aa, Artificial Sequence
  Description of Artificial Sequence: Synthetic epitope
KYNIEQISSI

SEQ ID NO: 25722 - protein, 10 aa, Artificial Sequence
  Description of Artificial Sequence: Synthetic epitope
KYNSALDTNA

SEQ ID NO: 25723 - protein, 10 aa, Artificial Sequence
  Description of Artificial Sequence: Synthetic epitope
KYPQRVSAQQ

SEQ ID NO: 25724 - protein, 10 aa, Artificial Sequence
  Description of Artificial Sequence: Synthetic epitope
KYQANITETQ

SEQ ID NO: 25725 - protein, 10 aa, Artificial Sequence
  Description of Artificial Sequence: Synthetic epitope
KYQIRIQIQE

SEQ ID NO: 25726 - protein, 10 aa, Artificial Sequence
  Description of Artificial Sequence: Synthetic epitope
KYQLETISEN

SEQ ID NO: 25727 - protein, 10 aa, Artificial Sequence
  Description of Artificial Sequence: Synthetic epitope
KYQNEISDRR

SEQ ID NO: 25728 - protein, 10 aa, Artificial Sequence
  Description of Artificial Sequence: Synthetic epitope
KYQQVKTDTS

SEQ ID NO: 25729 - protein, 10 aa, Artificial Sequence
  Description of Artificial Sequence: Synthetic epitope
KYQSYFSRGG

SEQ ID NO: 25730 - protein, 10 aa, Artificial Sequence
  Description of Artificial Sequence: Synthetic epitope
KYQVLYQLNP

SEQ ID NO: 25731 - protein, 10 aa, Artificial Sequence
  Description of Artificial Sequence: Synthetic epitope
KYRIGIQSAK

SEQ ID NO: 25732 - protein, 10 aa, Artificial Sequence
  Description of Artificial Sequence: Synthetic epitope
KYRLKAESEA

SEQ ID NO: 25733 - protein, 10 aa, Artificial Sequence
  Description of Artificial Sequence: Synthetic epitope
KYRNLKRKLK

SEQ ID NO: 25734 - protein, 10 aa, Artificial Sequence
  Description of Artificial Sequence: Synthetic epitope
KYRRDQKMSI

SEQ ID NO: 25735 - protein, 10 aa, Artificial Sequence
  Description of Artificial Sequence: Synthetic epitope
KYRYGEILES

SEQ ID NO: 25736 - protein, 10 aa, Artificial Sequence
  Description of Artificial Sequence: Synthetic epitope
KYSEIMAEKA

SEQ ID NO: 25737 - protein, 10 aa, Artificial Sequence
  Description of Artificial Sequence: Synthetic epitope
KYSESRSSLD

SEQ ID NO: 25738 - protein, 10 aa, Artificial Sequence
  Description of Artificial Sequence: Synthetic epitope
KYSETATAIA

SEQ ID NO: 25739 - protein, 10 aa, Artificial Sequence
  Description of Artificial Sequence: Synthetic epitope
KYSIKLTEKL

SEQ ID NO: 25740 - protein, 10 aa, Artificial Sequence
  Description of Artificial Sequence: Synthetic epitope
KYSNKKTGSN

SEQ ID NO: 25741 - protein, 10 aa, Artificial Sequence
  Description of Artificial Sequence: Synthetic epitope
KYSQNELEMI

SEQ ID NO: 25742 - protein, 10 aa, Artificial Sequence
  Description of Artificial Sequence: Synthetic epitope
KYSRWRAKGQ

SEQ ID NO: 25743 - protein, 10 aa, Artificial Sequence
  Description of Artificial Sequence: Synthetic epitope
KYSSIVMQDT

SEQ ID NO: 25744 - protein, 10 aa, Artificial Sequence
  Description of Artificial Sequence: Synthetic epitope
KYSSKEILSA

SEQ ID NO: 25745 - protein, 10 aa, Artificial Sequence
  Description of Artificial Sequence: Synthetic epitope
KYSSQKQGLL

SEQ ID NO: 25746 - protein, 10 aa, Artificial Sequence
  Description of Artificial Sequence: Synthetic epitope
KYSTSLYASP

SEQ ID NO: 25747 - protein, 10 aa, Artificial Sequence
  Description of Artificial Sequence: Synthetic epitope
KYSYDALEKK

SEQ ID NO: 25748 - protein, 10 aa, Artificial Sequence
  Description of Artificial Sequence: Synthetic epitope
KYTATVTKGA

SEQ ID NO: 25749 - protein, 10 aa, Artificial Sequence
  Description of Artificial Sequence: Synthetic epitope
KYTKSSQPAK

SEQ ID NO: 25750 - protein, 10 aa, Artificial Sequence
  Description of Artificial Sequence: Synthetic epitope
KYTRANNRTE

SEQ ID NO: 25751 - protein, 10 aa, Artificial Sequence
  Description of Artificial Sequence: Synthetic epitope
KYTSLASSAN

SEQ ID NO: 25752 - protein, 10 aa, Artificial Sequence
  Description of Artificial Sequence: Synthetic epitope
KYTTVTKRSR

SEQ ID NO: 25753 - protein, 10 aa, Artificial Sequence
  Description of Artificial Sequence: Synthetic epitope
KYTYRTTKSK

SEQ ID NO: 25754 - protein, 10 aa, Artificial Sequence
  Description of Artificial Sequence: Synthetic epitope
KYVAVELKSA

SEQ ID NO: 25755 - protein, 10 aa, Artificial Sequence
  Description of Artificial Sequence: Synthetic epitope
KYVVEMTIWE

SEQ ID NO: 25756 - protein, 10 aa, Artificial Sequence
  Description of Artificial Sequence: Synthetic epitope
KYVWAATAGG

SEQ ID NO: 25757 - protein, 10 aa, Artificial Sequence
  Description of Artificial Sequence: Synthetic epitope
KYYASSMVTS

SEQ ID NO: 25758 - protein, 10 aa, Artificial Sequence
  Description of Artificial Sequence: Synthetic epitope
KYYKENNVEK

SEQ ID NO: 25759 - protein, 10 aa, Artificial Sequence
  Description of Artificial Sequence: Synthetic epitope
LAAELTKALK

SEQ ID NO: 25760 - protein, 10 aa, Artificial Sequence
  Description of Artificial Sequence: Synthetic epitope
LAAGSQLDTV

SEQ ID NO: 25761 - protein, 10 aa, Artificial Sequence
  Description of Artificial Sequence: Synthetic epitope
LAALQALGEA

SEQ ID NO: 25762 - protein, 10 aa, Artificial Sequence
  Description of Artificial Sequence: Synthetic epitope
LAALSSVPSE

SEQ ID NO: 25763 - protein, 10 aa, Artificial Sequence
  Description of Artificial Sequence: Synthetic epitope
LAANTSLDER

SEQ ID NO: 25764 - protein, 10 aa, Artificial Sequence
  Description of Artificial Sequence: Synthetic epitope
LAAQKAQSQL

SEQ ID NO: 25765 - protein, 10 aa, Artificial Sequence
  Description of Artificial Sequence: Synthetic epitope
LAAQSVIKKD

SEQ ID NO: 25766 - protein, 10 aa, Artificial Sequence
  Description of Artificial Sequence: Synthetic epitope
LAAREVIAYI

SEQ ID NO: 25767 - protein, 10 aa, Artificial Sequence
  Description of Artificial Sequence: Synthetic epitope
LAASAVTQVA

SEQ ID NO: 25768 - protein, 10 aa, Artificial Sequence
  Description of Artificial Sequence: Synthetic epitope
LAASMEAKAS

SEQ ID NO: 25769 - protein, 10 aa, Artificial Sequence
  Description of Artificial Sequence: Synthetic epitope
LAASQVVNRA

SEQ ID NO: 25770 - protein, 10 aa, Artificial Sequence
  Description of Artificial Sequence: Synthetic epitope
LAASTRQDET

SEQ ID NO: 25771 - protein, 10 aa, Artificial Sequence
  Description of Artificial Sequence: Synthetic epitope
LAASVEQTLD

SEQ ID NO: 25772 - protein, 10 aa, Artificial Sequence
  Description of Artificial Sequence: Synthetic epitope
LAATAEAKIS

SEQ ID NO: 25773 - protein, 10 aa, Artificial Sequence
  Description of Artificial Sequence: Synthetic epitope
LAATEKAKDL

SEQ ID NO: 25774 - protein, 10 aa, Artificial Sequence
  Description of Artificial Sequence: Synthetic epitope
LAATKKTQYQ

SEQ ID NO: 25775 - protein, 10 aa, Artificial Sequence
  Description of Artificial Sequence: Synthetic epitope
LAATQNLKSP

SEQ ID NO: 25776 - protein, 10 aa, Artificial Sequence
  Description of Artificial Sequence: Synthetic epitope
LAAVESSMKA

SEQ ID NO: 25777 - protein, 10 aa, Artificial Sequence
  Description of Artificial Sequence: Synthetic epitope
LAAYSKMMSP

SEQ ID NO: 25778 - protein, 10 aa, Artificial Sequence
  Description of Artificial Sequence: Synthetic epitope
LADEHDLGED

SEQ ID NO: 25779 - protein, 10 aa, Artificial Sequence
  Description of Artificial Sequence: Synthetic epitope
LADEQRFTEP

SEQ ID NO: 25780 - protein, 10 aa, Artificial Sequence
  Description of Artificial Sequence: Synthetic epitope
LADSDTLSSA

SEQ ID NO: 25781 - protein, 10 aa, Artificial Sequence
  Description of Artificial Sequence: Synthetic epitope
LADSEVDNQK

SEQ ID NO: 25782 - protein, 10 aa, Artificial Sequence
  Description of Artificial Sequence: Synthetic epitope
LADSTKALGD

SEQ ID NO: 25783 - protein, 10 aa, Artificial Sequence
  Description of Artificial Sequence: Synthetic epitope
LAEADSTKKE

SEQ ID NO: 25784 - protein, 10 aa, Artificial Sequence
  Description of Artificial Sequence: Synthetic epitope
LAEAPAQAQK

SEQ ID NO: 25785 - protein, 10 aa, Artificial Sequence
  Description of Artificial Sequence: Synthetic epitope
LAEAQEVEPQ

SEQ ID NO: 25786 - protein, 10 aa, Artificial Sequence
  Description of Artificial Sequence: Synthetic epitope
LAEASSEELA

SEQ ID NO: 25787 - protein, 10 aa, Artificial Sequence
  Description of Artificial Sequence: Synthetic epitope
LAEEASSLPL

SEQ ID NO: 25788 - protein, 10 aa, Artificial Sequence
  Description of Artificial Sequence: Synthetic epitope
LAEEKAQASS

SEQ ID NO: 25789 - protein, 10 aa, Artificial Sequence
  Description of Artificial Sequence: Synthetic epitope
LAEKWAKMNK

SEQ ID NO: 25790 - protein, 10 aa, Artificial Sequence
  Description of Artificial Sequence: Synthetic epitope
LAELTKSQKV

SEQ ID NO: 25791 - protein, 10 aa, Artificial Sequence
  Description of Artificial Sequence: Synthetic epitope
LAEPAALASP

SEQ ID NO: 25792 - protein, 10 aa, Artificial Sequence
  Description of Artificial Sequence: Synthetic epitope
LAEPNLSAIQ

SEQ ID NO: 25793 - protein, 10 aa, Artificial Sequence
  Description of Artificial Sequence: Synthetic epitope
LAEQMTIEEN

SEQ ID NO: 25794 - protein, 10 aa, Artificial Sequence
  Description of Artificial Sequence: Synthetic epitope
LAEQQPKSMK

SEQ ID NO: 25795 - protein, 10 aa, Artificial Sequence
  Description of Artificial Sequence: Synthetic epitope
LAERAASQGS

SEQ ID NO: 25796 - protein, 10 aa, Artificial Sequence
  Description of Artificial Sequence: Synthetic epitope
LAERIKLQRL

SEQ ID NO: 25797 - protein, 10 aa, Artificial Sequence
  Description of Artificial Sequence: Synthetic epitope
LAERNLFQQK

SEQ ID NO: 25798 - protein, 10 aa, Artificial Sequence
  Description of Artificial Sequence: Synthetic epitope
LAETMVASAD

SEQ ID NO: 25799 - protein, 10 aa, Artificial Sequence
  Description of Artificial Sequence: Synthetic epitope
LAETVLADRF

SEQ ID NO: 25800 - protein, 10 aa, Artificial Sequence
  Description of Artificial Sequence: Synthetic epitope
LAEVALDLKI

SEQ ID NO: 25801 - protein, 10 aa, Artificial Sequence
  Description of Artificial Sequence: Synthetic epitope
LAEVQAAPVS

SEQ ID NO: 25802 - protein, 10 aa, Artificial Sequence
  Description of Artificial Sequence: Synthetic epitope
LAFAASNVRG

SEQ ID NO: 25803 - protein, 10 aa, Artificial Sequence
  Description of Artificial Sequence: Synthetic epitope
LAFEAQLSVI

SEQ ID NO: 25804 - protein, 10 aa, Artificial Sequence
  Description of Artificial Sequence: Synthetic epitope
LAGEELAGEE

SEQ ID NO: 25805 - protein, 10 aa, Artificial Sequence
  Description of Artificial Sequence: Synthetic epitope
LAGPADARRS

SEQ ID NO: 25806 - protein, 10 aa, Artificial Sequence
  Description of Artificial Sequence: Synthetic epitope
LAGRAYAAEQ

SEQ ID NO: 25807 - protein, 10 aa, Artificial Sequence
  Description of Artificial Sequence: Synthetic epitope
LAGVAATESV

SEQ ID NO: 25808 - protein, 10 aa, Artificial Sequence
  Description of Artificial Sequence: Synthetic epitope
LAHDKVAEQE

SEQ ID NO: 25809 - protein, 10 aa, Artificial Sequence
  Description of Artificial Sequence: Synthetic epitope
LAHELVTSKI

SEQ ID NO: 25810 - protein, 10 aa, Artificial Sequence
  Description of Artificial Sequence: Synthetic epitope
LAHLENSNPS

SEQ ID NO: 25811 - protein, 10 aa, Artificial Sequence
  Description of Artificial Sequence: Synthetic epitope
LAHSKQVFRE

SEQ ID NO: 25812 - protein, 10 aa, Artificial Sequence
  Description of Artificial Sequence: Synthetic epitope
LAIKYASRSR

SEQ ID NO: 25813 - protein, 10 aa, Artificial Sequence
  Description of Artificial Sequence: Synthetic epitope
LAIQTAILDI

SEQ ID NO: 25814 - protein, 10 aa, Artificial Sequence
  Description of Artificial Sequence: Synthetic epitope
LAIREQMSAL

SEQ ID NO: 25815 - protein, 10 aa, Artificial Sequence
  Description of Artificial Sequence: Synthetic epitope
LAITKVLLPA

SEQ ID NO: 25816 - protein, 10 aa, Artificial Sequence
  Description of Artificial Sequence: Synthetic epitope
LAITQEASDT

SEQ ID NO: 25817 - protein, 10 aa, Artificial Sequence
  Description of Artificial Sequence: Synthetic epitope
LAKAMVSQIS

SEQ ID NO: 25818 - protein, 10 aa, Artificial Sequence
  Description of Artificial Sequence: Synthetic epitope
LAKARESASA

SEQ ID NO: 25819 - protein, 10 aa, Artificial Sequence
  Description of Artificial Sequence: Synthetic epitope
LAKAVISKHP

SEQ ID NO: 25820 - protein, 10 aa, Artificial Sequence
  Description of Artificial Sequence: Synthetic epitope
LAKDQTNEGK

SEQ ID NO: 25821 - protein, 10 aa, Artificial Sequence
  Description of Artificial Sequence: Synthetic epitope
LAKEAKSETS

SEQ ID NO: 25822 - protein, 10 aa, Artificial Sequence
  Description of Artificial Sequence: Synthetic epitope
LAKEMFAMKT

SEQ ID NO: 25823 - protein, 10 aa, Artificial Sequence
  Description of Artificial Sequence: Synthetic epitope
LAKEQKANEQ

SEQ ID NO: 25824 - protein, 10 aa, Artificial Sequence
  Description of Artificial Sequence: Synthetic epitope
LAKESQIKGE

SEQ ID NO: 25825 - protein, 10 aa, Artificial Sequence
  Description of Artificial Sequence: Synthetic epitope
LAKIFELEKK

SEQ ID NO: 25826 - protein, 10 aa, Artificial Sequence
  Description of Artificial Sequence: Synthetic epitope
LAKLRRLDSL

SEQ ID NO: 25827 - protein, 10 aa, Artificial Sequence
  Description of Artificial Sequence: Synthetic epitope
LAKNVTNKAA

SEQ ID NO: 25828 - protein, 10 aa, Artificial Sequence
  Description of Artificial Sequence: Synthetic epitope
LAKRSKLEAQ

SEQ ID NO: 25829 - protein, 10 aa, Artificial Sequence
  Description of Artificial Sequence: Synthetic epitope
LAKSALAMAD

SEQ ID NO: 25830 - protein, 10 aa, Artificial Sequence
  Description of Artificial Sequence: Synthetic epitope
LAKSIAKESA

SEQ ID NO: 25831 - protein, 10 aa, Artificial Sequence
  Description of Artificial Sequence: Synthetic epitope
LAKSSTRAKG

SEQ ID NO: 25832 - protein, 10 aa, Artificial Sequence
  Description of Artificial Sequence: Synthetic epitope
LAKTASNIID

SEQ ID NO: 25833 - protein, 10 aa, Artificial Sequence
  Description of Artificial Sequence: Synthetic epitope
LAKTESTYLA

SEQ ID NO: 25834 - protein, 10 aa, Artificial Sequence
  Description of Artificial Sequence: Synthetic epitope
LALAASSRSP

SEQ ID NO: 25835 - protein, 10 aa, Artificial Sequence
  Description of Artificial Sequence: Synthetic epitope
LALAATEARQ

SEQ ID NO: 25836 - protein, 10 aa, Artificial Sequence
  Description of Artificial Sequence: Synthetic epitope
LALASLAESQ

SEQ ID NO: 25837 - protein, 10 aa, Artificial Sequence
  Description of Artificial Sequence: Synthetic epitope
LALASNRSEN

SEQ ID NO: 25838 - protein, 10 aa, Artificial Sequence
  Description of Artificial Sequence: Synthetic epitope
LALATSMKSE

SEQ ID NO: 25839 - protein, 10 aa, Artificial Sequence
  Description of Artificial Sequence: Synthetic epitope
LALGAQVASL

SEQ ID NO: 25840 - protein, 10 aa, Artificial Sequence
  Description of Artificial Sequence: Synthetic epitope
LALGTQLAGV

SEQ ID NO: 25841 - protein, 10 aa, Artificial Sequence
  Description of Artificial Sequence: Synthetic epitope
LALISNKRLT

SEQ ID NO: 25842 - protein, 10 aa, Artificial Sequence
  Description of Artificial Sequence: Synthetic epitope
LALLNEAKEV

SEQ ID NO: 25843 - protein, 10 aa, Artificial Sequence
  Description of Artificial Sequence: Synthetic epitope
LALNELNAGM

SEQ ID NO: 25844 - protein, 10 aa, Artificial Sequence
  Description of Artificial Sequence: Synthetic epitope
LALNLQEKSK

SEQ ID NO: 25845 - protein, 10 aa, Artificial Sequence
  Description of Artificial Sequence: Synthetic epitope
LALQTQRVLL

SEQ ID NO: 25846 - protein, 10 aa, Artificial Sequence
  Description of Artificial Sequence: Synthetic epitope
LALRRLTAFL

SEQ ID NO: 25847 - protein, 10 aa, Artificial Sequence
  Description of Artificial Sequence: Synthetic epitope
LALRTIQVRQ

SEQ ID NO: 25848 - protein, 10 aa, Artificial Sequence
  Description of Artificial Sequence: Synthetic epitope
LALSASIGRV

SEQ ID NO: 25849 - protein, 10 aa, Artificial Sequence
  Description of Artificial Sequence: Synthetic epitope
LALSLGVDII

SEQ ID NO: 25850 - protein, 10 aa, Artificial Sequence
  Description of Artificial Sequence: Synthetic epitope
LALSNESDSE

SEQ ID NO: 25851 - protein, 10 aa, Artificial Sequence
  Description of Artificial Sequence: Synthetic epitope
LALSNLTKEK

SEQ ID NO: 25852 - protein, 10 aa, Artificial Sequence
  Description of Artificial Sequence: Synthetic epitope
LALSRVELHK

SEQ ID NO: 25853 - protein, 10 aa, Artificial Sequence
  Description of Artificial Sequence: Synthetic epitope
LALSVVSQMK

SEQ ID NO: 25854 - protein, 10 aa, Artificial Sequence
  Description of Artificial Sequence: Synthetic epitope
LALTAGVLVD

SEQ ID NO: 25855 - protein, 10 aa, Artificial Sequence
  Description of Artificial Sequence: Synthetic epitope
LALTAISLGT

SEQ ID NO: 25856 - protein, 10 aa, Artificial Sequence
  Description of Artificial Sequence: Synthetic epitope
LALTESIQEI

SEQ ID NO: 25857 - protein, 10 aa, Artificial Sequence
  Description of Artificial Sequence: Synthetic epitope
LAMAAKRKAE

SEQ ID NO: 25858 - protein, 10 aa, Artificial Sequence
  Description of Artificial Sequence: Synthetic epitope
LAMAVIRKKH

SEQ ID NO: 25859 - protein, 10 aa, Artificial Sequence
  Description of Artificial Sequence: Synthetic epitope
LAMESNKILQ

SEQ ID NO: 25860 - protein, 10 aa, Artificial Sequence
  Description of Artificial Sequence: Synthetic epitope
LAMFSKLRAS

SEQ ID NO: 25861 - protein, 10 aa, Artificial Sequence
  Description of Artificial Sequence: Synthetic epitope
LAMLMVDKEK

SEQ ID NO: 25862 - protein, 10 aa, Artificial Sequence
  Description of Artificial Sequence: Synthetic epitope
LAMNRSRGKV

SEQ ID NO: 25863 - protein, 10 aa, Artificial Sequence
  Description of Artificial Sequence: Synthetic epitope
LANLLSTLAQ

SEQ ID NO: 25864 - protein, 10 aa, Artificial Sequence
  Description of Artificial Sequence: Synthetic epitope
LAPATAELEP

SEQ ID NO: 25865 - protein, 10 aa, Artificial Sequence
  Description of Artificial Sequence: Synthetic epitope
LAPDATAADK

SEQ ID NO: 25866 - protein, 10 aa, Artificial Sequence
  Description of Artificial Sequence: Synthetic epitope
LAPLPVQSQS

SEQ ID NO: 25867 - protein, 10 aa, Artificial Sequence
  Description of Artificial Sequence: Synthetic epitope
LAQAMLNNAQ

SEQ ID NO: 25868 - protein, 10 aa, Artificial Sequence
  Description of Artificial Sequence: Synthetic epitope
LAQDAQITSL

SEQ ID NO: 25869 - protein, 10 aa, Artificial Sequence
  Description of Artificial Sequence: Synthetic epitope
LAQDLVVEAS

SEQ ID NO: 25870 - protein, 10 aa, Artificial Sequence
  Description of Artificial Sequence: Synthetic epitope
LAQKAEEKEN

SEQ ID NO: 25871 - protein, 10 aa, Artificial Sequence
  Description of Artificial Sequence: Synthetic epitope
LAQKQKTQAY

SEQ ID NO: 25872 - protein, 10 aa, Artificial Sequence
  Description of Artificial Sequence: Synthetic epitope
LAQLEKAKTK

SEQ ID NO: 25873 - protein, 10 aa, Artificial Sequence
  Description of Artificial Sequence: Synthetic epitope
LAQLERAEQE

SEQ ID NO: 25874 - protein, 10 aa, Artificial Sequence
  Description of Artificial Sequence: Synthetic epitope
LAQNKQSSKL

SEQ ID NO: 25875 - protein, 10 aa, Artificial Sequence
  Description of Artificial Sequence: Synthetic epitope
LAQQAILSLE

SEQ ID NO: 25876 - protein, 10 aa, Artificial Sequence
  Description of Artificial Sequence: Synthetic epitope
LAQQASASGS

SEQ ID NO: 25877 - protein, 10 aa, Artificial Sequence
  Description of Artificial Sequence: Synthetic epitope
LAQRSSRDSR

SEQ ID NO: 25878 - protein, 10 aa, Artificial Sequence
  Description of Artificial Sequence: Synthetic epitope
LAQSKTEKAE

SEQ ID NO: 25879 - protein, 10 aa, Artificial Sequence
  Description of Artificial Sequence: Synthetic epitope
LAQSSTSEEP

SEQ ID NO: 25880 - protein, 10 aa, Artificial Sequence
  Description of Artificial Sequence: Synthetic epitope
LAQWSQAQLS

SEQ ID NO: 25881 - protein, 10 aa, Artificial Sequence
  Description of Artificial Sequence: Synthetic epitope
LARDTQRQES

SEQ ID NO: 25882 - protein, 10 aa, Artificial Sequence
  Description of Artificial Sequence: Synthetic epitope
LAREKKLYAN

SEQ ID NO: 25883 - protein, 10 aa, Artificial Sequence
  Description of Artificial Sequence: Synthetic epitope
LARKQSARLD

SEQ ID NO: 25884 - protein, 10 aa, Artificial Sequence
  Description of Artificial Sequence: Synthetic epitope
LARLEQKQSR

SEQ ID NO: 25885 - protein, 10 aa, Artificial Sequence
  Description of Artificial Sequence: Synthetic epitope
LARLSSRKMF

SEQ ID NO: 25886 - protein, 10 aa, Artificial Sequence
  Description of Artificial Sequence: Synthetic epitope
LARNGQIDKE

SEQ ID NO: 25887 - protein, 10 aa, Artificial Sequence
  Description of Artificial Sequence: Synthetic epitope
LARNTVLRPS

SEQ ID NO: 25888 - protein, 10 aa, Artificial Sequence
  Description of Artificial Sequence: Synthetic epitope
LARSLVTGRE

SEQ ID NO: 25889 - protein, 10 aa, Artificial Sequence
  Description of Artificial Sequence: Synthetic epitope
LARSSLDATK

SEQ ID NO: 25890 - protein, 10 aa, Artificial Sequence
  Description of Artificial Sequence: Synthetic epitope
LARSTSMPQL

SEQ ID NO: 25891 - protein, 10 aa, Artificial Sequence
  Description of Artificial Sequence: Synthetic epitope
LARVKPHRTF

SEQ ID NO: 25892 - protein, 10 aa, Artificial Sequence
  Description of Artificial Sequence: Synthetic epitope
LARVSSVKLI

SEQ ID NO: 25893 - protein, 10 aa, Artificial Sequence
  Description of Artificial Sequence: Synthetic epitope
LASAGHAGQS

SEQ ID NO: 25894 - protein, 10 aa, Artificial Sequence
  Description of Artificial Sequence: Synthetic epitope
LASATEVPST

SEQ ID NO: 25895 - protein, 10 aa, Artificial Sequence
  Description of Artificial Sequence: Synthetic epitope
LASDLMMAVD

SEQ ID NO: 25896 - protein, 10 aa, Artificial Sequence
  Description of Artificial Sequence: Synthetic epitope
LASDVIHAQS

SEQ ID NO: 25897 - protein, 10 aa, Artificial Sequence
  Description of Artificial Sequence: Synthetic epitope
LASEQQHSAQ

SEQ ID NO: 25898 - protein, 10 aa, Artificial Sequence
  Description of Artificial Sequence: Synthetic epitope
LASGELTAKR

SEQ ID NO: 25899 - protein, 10 aa, Artificial Sequence
  Description of Artificial Sequence: Synthetic epitope
LASGLSTTSL

SEQ ID NO: 25900 - protein, 10 aa, Artificial Sequence
  Description of Artificial Sequence: Synthetic epitope
LASIIGVKSL

SEQ ID NO: 25901 - protein, 10 aa, Artificial Sequence
  Description of Artificial Sequence: Synthetic epitope
LASKVDVEQV

SEQ ID NO: 25902 - protein, 10 aa, Artificial Sequence
  Description of Artificial Sequence: Synthetic epitope
LASLISSTNT

SEQ ID NO: 25903 - protein, 10 aa, Artificial Sequence
  Description of Artificial Sequence: Synthetic epitope
LASLLVSVTS

SEQ ID NO: 25904 - protein, 10 aa, Artificial Sequence
  Description of Artificial Sequence: Synthetic epitope
LASLMSVKPS

SEQ ID NO: 25905 - protein, 10 aa, Artificial Sequence
  Description of Artificial Sequence: Synthetic epitope
LASLRKSTKK

SEQ ID NO: 25906 - protein, 10 aa, Artificial Sequence
  Description of Artificial Sequence: Synthetic epitope
LASLSSLTLQ

SEQ ID NO: 25907 - protein, 10 aa, Artificial Sequence
  Description of Artificial Sequence: Synthetic epitope
LASMDNENMH

SEQ ID NO: 25908 - protein, 10 aa, Artificial Sequence
  Description of Artificial Sequence: Synthetic epitope
LASNLYSAPT

SEQ ID NO: 25909 - protein, 10 aa, Artificial Sequence
  Description of Artificial Sequence: Synthetic epitope
LASPTSSKNT

SEQ ID NO: 25910 - protein, 10 aa, Artificial Sequence
  Description of Artificial Sequence: Synthetic epitope
LASQANRKEE

SEQ ID NO: 25911 - protein, 10 aa, Artificial Sequence
  Description of Artificial Sequence: Synthetic epitope
LASQATKDSK

SEQ ID NO: 25912 - protein, 10 aa, Artificial Sequence
  Description of Artificial Sequence: Synthetic epitope
LASQATRKHG

SEQ ID NO: 25913 - protein, 10 aa, Artificial Sequence
  Description of Artificial Sequence: Synthetic epitope
LASSGELVEP

SEQ ID NO: 25914 - protein, 10 aa, Artificial Sequence
  Description of Artificial Sequence: Synthetic epitope
LASTSKALGP

SEQ ID NO: 25915 - protein, 10 aa, Artificial Sequence
  Description of Artificial Sequence: Synthetic epitope
LASTSKEEKD

SEQ ID NO: 25916 - protein, 10 aa, Artificial Sequence
  Description of Artificial Sequence: Synthetic epitope
LASTSQAAGI

SEQ ID NO: 25917 - protein, 10 aa, Artificial Sequence
  Description of Artificial Sequence: Synthetic epitope
LASTSTKVRV

SEQ ID NO: 25918 - protein, 10 aa, Artificial Sequence
  Description of Artificial Sequence: Synthetic epitope
LATEKVISSL

SEQ ID NO: 25919 - protein, 10 aa, Artificial Sequence
  Description of Artificial Sequence: Synthetic epitope
LATGGEAAFE

SEQ ID NO: 25920 - protein, 10 aa, Artificial Sequence
  Description of Artificial Sequence: Synthetic epitope
LATGTMKERS

SEQ ID NO: 25921 - protein, 10 aa, Artificial Sequence
  Description of Artificial Sequence: Synthetic epitope
LATIANFSAL

SEQ ID NO: 25922 - protein, 10 aa, Artificial Sequence
  Description of Artificial Sequence: Synthetic epitope
LATMAKLLET

SEQ ID NO: 25923 - protein, 10 aa, Artificial Sequence
  Description of Artificial Sequence: Synthetic epitope
LATMSRSNTG

SEQ ID NO: 25924 - protein, 10 aa, Artificial Sequence
  Description of Artificial Sequence: Synthetic epitope
LATNAQQGQR

SEQ ID NO: 25925 - protein, 10 aa, Artificial Sequence
  Description of Artificial Sequence: Synthetic epitope
LATPAAVSGR

SEQ ID NO: 25926 - protein, 10 aa, Artificial Sequence
  Description of Artificial Sequence: Synthetic epitope
LATQVEGQAT

SEQ ID NO: 25927 - protein, 10 aa, Artificial Sequence
  Description of Artificial Sequence: Synthetic epitope
LATSRNAADS

SEQ ID NO: 25928 - protein, 10 aa, Artificial Sequence
  Description of Artificial Sequence: Synthetic epitope
LATSRNDVRE

SEQ ID NO: 25929 - protein, 10 aa, Artificial Sequence
  Description of Artificial Sequence: Synthetic epitope
LATSTAVSEQ

SEQ ID NO: 25930 - protein, 10 aa, Artificial Sequence
  Description of Artificial Sequence: Synthetic epitope
LATSTSDPAQ

SEQ ID NO: 25931 - protein, 10 aa, Artificial Sequence
  Description of Artificial Sequence: Synthetic epitope
LAVALIAGWG

SEQ ID NO: 25932 - protein, 10 aa, Artificial Sequence
  Description of Artificial Sequence: Synthetic epitope
LAVAVASSRT

SEQ ID NO: 25933 - protein, 10 aa, Artificial Sequence
  Description of Artificial Sequence: Synthetic epitope
LAVAVPARAL

SEQ ID NO: 25934 - protein, 10 aa, Artificial Sequence
  Description of Artificial Sequence: Synthetic epitope
LAVEQKSDQG

SEQ ID NO: 25935 - protein, 10 aa, Artificial Sequence
  Description of Artificial Sequence: Synthetic epitope
LAVGKEKFMQ

SEQ ID NO: 25936 - protein, 10 aa, Artificial Sequence
  Description of Artificial Sequence: Synthetic epitope
LAVGRSSEKE

SEQ ID NO: 25937 - protein, 10 aa, Artificial Sequence
  Description of Artificial Sequence: Synthetic epitope
LAVQQVEEAQ

SEQ ID NO: 25938 - protein, 10 aa, Artificial Sequence
  Description of Artificial Sequence: Synthetic epitope
LAVQSVISGR

SEQ ID NO: 25939 - protein, 10 aa, Artificial Sequence
  Description of Artificial Sequence: Synthetic epitope
LAVRATMKRT

SEQ ID NO: 25940 - protein, 10 aa, Artificial Sequence
  Description of Artificial Sequence: Synthetic epitope
LAVRSQLGFT

SEQ ID NO: 25941 - protein, 10 aa, Artificial Sequence
  Description of Artificial Sequence: Synthetic epitope
LAVRSRQRAT

SEQ ID NO: 25942 - protein, 10 aa, Artificial Sequence
  Description of Artificial Sequence: Synthetic epitope
LAVSLSVQQE

SEQ ID NO: 25943 - protein, 10 aa, Artificial Sequence
  Description of Artificial Sequence: Synthetic epitope
LAVSSVLKSR

SEQ ID NO: 25944 - protein, 10 aa, Artificial Sequence
  Description of Artificial Sequence: Synthetic epitope
LAWDSSVTAA

SEQ ID NO: 25945 - protein, 10 aa, Artificial Sequence
  Description of Artificial Sequence: Synthetic epitope
LAWQAEKEQV

SEQ ID NO: 25946 - protein, 10 aa, Artificial Sequence
  Description of Artificial Sequence: Synthetic epitope
LAYEQVAKAL

SEQ ID NO: 25947 - protein, 10 aa, Artificial Sequence
  Description of Artificial Sequence: Synthetic epitope
LDAALVQTEP

SEQ ID NO: 25948 - protein, 10 aa, Artificial Sequence
  Description of Artificial Sequence: Synthetic epitope
LDADISEQNR

SEQ ID NO: 25949 - protein, 10 aa, Artificial Sequence
  Description of Artificial Sequence: Synthetic epitope
LDAESDQKVN

SEQ ID NO: 25950 - protein, 10 aa, Artificial Sequence
  Description of Artificial Sequence: Synthetic epitope
LDAKAKAQKV

SEQ ID NO: 25951 - protein, 10 aa, Artificial Sequence
  Description of Artificial Sequence: Synthetic epitope
LDAKQLQNEN

SEQ ID NO: 25952 - protein, 10 aa, Artificial Sequence
  Description of Artificial Sequence: Synthetic epitope
LDAMELTAAD

SEQ ID NO: 25953 - protein, 10 aa, Artificial Sequence
  Description of Artificial Sequence: Synthetic epitope
LDAQSGLASA

SEQ ID NO: 25954 - protein, 10 aa, Artificial Sequence
  Description of Artificial Sequence: Synthetic epitope
LDAVIKRDQQ

SEQ ID NO: 25955 - protein, 10 aa, Artificial Sequence
  Description of Artificial Sequence: Synthetic epitope
LDDILSLKSG

SEQ ID NO: 25956 - protein, 10 aa, Artificial Sequence
  Description of Artificial Sequence: Synthetic epitope
LDDLFILVEP

SEQ ID NO: 25957 - protein, 10 aa, Artificial Sequence
  Description of Artificial Sequence: Synthetic epitope
LDDTITASQT

SEQ ID NO: 25958 - protein, 10 aa, Artificial Sequence
  Description of Artificial Sequence: Synthetic epitope
LDEELALDGS

SEQ ID NO: 25959 - protein, 10 aa, Artificial Sequence
  Description of Artificial Sequence: Synthetic epitope
LDEIEAAELE

SEQ ID NO: 25960 - protein, 10 aa, Artificial Sequence
  Description of Artificial Sequence: Synthetic epitope
LDEISQRNRQ

SEQ ID NO: 25961 - protein, 10 aa, Artificial Sequence
  Description of Artificial Sequence: Synthetic epitope
LDETSAITLT

SEQ ID NO: 25962 - protein, 10 aa, Artificial Sequence
  Description of Artificial Sequence: Synthetic epitope
LDEVNASKQS

SEQ ID NO: 25963 - protein, 10 aa, Artificial Sequence
  Description of Artificial Sequence: Synthetic epitope
LDFGTWTSMV

SEQ ID NO: 25964 - protein, 10 aa, Artificial Sequence
  Description of Artificial Sequence: Synthetic epitope
LDFKVSSTSN

SEQ ID NO: 25965 - protein, 10 aa, Artificial Sequence
  Description of Artificial Sequence: Synthetic epitope
LDGGVASAAS

SEQ ID NO: 25966 - protein, 10 aa, Artificial Sequence
  Description of Artificial Sequence: Synthetic epitope
LDGVAKELGS

SEQ ID NO: 25967 - protein, 10 aa, Artificial Sequence
  Description of Artificial Sequence: Synthetic epitope
LDIHIFMKVF

SEQ ID NO: 25968 - protein, 10 aa, Artificial Sequence
  Description of Artificial Sequence: Synthetic epitope
LDILNTATRD

SEQ ID NO: 25969 - protein, 10 aa, Artificial Sequence
  Description of Artificial Sequence: Synthetic epitope
LDINTVLEKW

SEQ ID NO: 25970 - protein, 10 aa, Artificial Sequence
  Description of Artificial Sequence: Synthetic epitope
LDISADSEIE

SEQ ID NO: 25971 - protein, 10 aa, Artificial Sequence
  Description of Artificial Sequence: Synthetic epitope
LDKALSLTKQ

SEQ ID NO: 25972 - protein, 10 aa, Artificial Sequence
  Description of Artificial Sequence: Synthetic epitope
LDKASMKRKG

SEQ ID NO: 25973 - protein, 10 aa, Artificial Sequence
  Description of Artificial Sequence: Synthetic epitope
LDKKFAWMDG

SEQ ID NO: 25974 - protein, 10 aa, Artificial Sequence
  Description of Artificial Sequence: Synthetic epitope
LDKKFAWMDG

SEQ ID NO: 25975 - protein, 10 aa, Artificial Sequence
  Description of Artificial Sequence: Synthetic epitope
LDKKSQRTML

SEQ ID NO: 25976 - protein, 10 aa, Artificial Sequence
  Description of Artificial Sequence: Synthetic epitope
LDKQRQVENQ

SEQ ID NO: 25977 - protein, 10 aa, Artificial Sequence
  Description of Artificial Sequence: Synthetic epitope
LDLDAAKTRL

SEQ ID NO: 25978 - protein, 10 aa, Artificial Sequence
  Description of Artificial Sequence: Synthetic epitope
LDLEQEQLTI

SEQ ID NO: 25979 - protein, 10 aa, Artificial Sequence
  Description of Artificial Sequence: Synthetic epitope
LDLKVRTQKG

SEQ ID NO: 25980 - protein, 10 aa, Artificial Sequence
  Description of Artificial Sequence: Synthetic epitope
LDLLSQSQRR

SEQ ID NO: 25981 - protein, 10 aa, Artificial Sequence
  Description of Artificial Sequence: Synthetic epitope
LDLNDISSAL

SEQ ID NO: 25982 - protein, 10 aa, Artificial Sequence
  Description of Artificial Sequence: Synthetic epitope
LDLSALKSKA

SEQ ID NO: 25983 - protein, 10 aa, Artificial Sequence
  Description of Artificial Sequence: Synthetic epitope
LDLSTKKTSI

SEQ ID NO: 25984 - protein, 10 aa, Artificial Sequence
  Description of Artificial Sequence: Synthetic epitope
LDMLMTSEER

SEQ ID NO: 25985 - protein, 10 aa, Artificial Sequence
  Description of Artificial Sequence: Synthetic epitope
LDMTMELVSM

SEQ ID NO: 25986 - protein, 10 aa, Artificial Sequence
  Description of Artificial Sequence: Synthetic epitope
LDMVLPEVAS

SEQ ID NO: 25987 - protein, 10 aa, Artificial Sequence
  Description of Artificial Sequence: Synthetic epitope
LDMVSSRSSD

SEQ ID NO: 25988 - protein, 10 aa, Artificial Sequence
  Description of Artificial Sequence: Synthetic epitope
LDNAQTSGIE

SEQ ID NO: 25989 - protein, 10 aa, Artificial Sequence
  Description of Artificial Sequence: Synthetic epitope
LDNMSDSFYV

SEQ ID NO: 25990 - protein, 10 aa, Artificial Sequence
  Description of Artificial Sequence: Synthetic epitope
LDNSTAQASI

SEQ ID NO: 25991 - protein, 10 aa, Artificial Sequence
  Description of Artificial Sequence: Synthetic epitope
LDNSVASIEA

SEQ ID NO: 25992 - protein, 10 aa, Artificial Sequence
  Description of Artificial Sequence: Synthetic epitope
LDNTQQLKIL

SEQ ID NO: 25993 - protein, 10 aa, Artificial Sequence
  Description of Artificial Sequence: Synthetic epitope
LDPHVASEHE

SEQ ID NO: 25994 - protein, 10 aa, Artificial Sequence
  Description of Artificial Sequence: Synthetic epitope
LDPKQTNQPD

SEQ ID NO: 25995 - protein, 10 aa, Artificial Sequence
  Description of Artificial Sequence: Synthetic epitope
LDPKVKAAFT

SEQ ID NO: 25996 - protein, 10 aa, Artificial Sequence
  Description of Artificial Sequence: Synthetic epitope
LDPMVKEENS

SEQ ID NO: 25997 - protein, 10 aa, Artificial Sequence
  Description of Artificial Sequence: Synthetic epitope
LDPSSLASDR

SEQ ID NO: 25998 - protein, 10 aa, Artificial Sequence
  Description of Artificial Sequence: Synthetic epitope
LDQAQGYQQL

SEQ ID NO: 25999 - protein, 10 aa, Artificial Sequence
  Description of Artificial Sequence: Synthetic epitope
LDQFRTKENS

SEQ ID NO: 26000 - protein, 10 aa, Artificial Sequence
  Description of Artificial Sequence: Synthetic epitope
LDQISDADNI

SEQ ID NO: 26001 - protein, 10 aa, Artificial Sequence
  Description of Artificial Sequence: Synthetic epitope
LDQMTIDEDK

SEQ ID NO: 26002 - protein, 10 aa, Artificial Sequence
  Description of Artificial Sequence: Synthetic epitope
LDQQSIVHIV

SEQ ID NO: 26003 - protein, 10 aa, Artificial Sequence
  Description of Artificial Sequence: Synthetic epitope
LDQSASFKDE

SEQ ID NO: 26004 - protein, 10 aa, Artificial Sequence
  Description of Artificial Sequence: Synthetic epitope
LDQYKLRQAS

SEQ ID NO: 26005 - protein, 10 aa, Artificial Sequence
  Description of Artificial Sequence: Synthetic epitope
LDRKTTALKQ

SEQ ID NO: 26006 - protein, 10 aa, Artificial Sequence
  Description of Artificial Sequence: Synthetic epitope
LDRQILAADA

SEQ ID NO: 26007 - protein, 10 aa, Artificial Sequence
  Description of Artificial Sequence: Synthetic epitope
LDSAKARKLL

SEQ ID NO: 26008 - protein, 10 aa, Artificial Sequence
  Description of Artificial Sequence: Synthetic epitope
LDSEESRMRI

SEQ ID NO: 26009 - protein, 10 aa, Artificial Sequence
  Description of Artificial Sequence: Synthetic epitope
LDSGIRISSV

SEQ ID NO: 26010 - protein, 10 aa, Artificial Sequence
  Description of Artificial Sequence: Synthetic epitope
LDSLKTASME

SEQ ID NO: 26011 - protein, 10 aa, Artificial Sequence
  Description of Artificial Sequence: Synthetic epitope
LDSMVVSHGN

SEQ ID NO: 26012 - protein, 10 aa, Artificial Sequence
  Description of Artificial Sequence: Synthetic epitope
LDSSTSSQEH

SEQ ID NO: 26013 - protein, 10 aa, Artificial Sequence
  Description of Artificial Sequence: Synthetic epitope
LDSTAVGLGR

SEQ ID NO: 26014 - protein, 10 aa, Artificial Sequence
  Description of Artificial Sequence: Synthetic epitope
LDSTSAQAGE

SEQ ID NO: 26015 - protein, 10 aa, Artificial Sequence
  Description of Artificial Sequence: Synthetic epitope
LDSVAEVNLD

SEQ ID NO: 26016 - protein, 10 aa, Artificial Sequence
  Description of Artificial Sequence: Synthetic epitope
LDSVRAIQAA

SEQ ID NO: 26017 - protein, 10 aa, Artificial Sequence
  Description of Artificial Sequence: Synthetic epitope
LDSYRTAREF

SEQ ID NO: 26018 - protein, 10 aa, Artificial Sequence
  Description of Artificial Sequence: Synthetic epitope
LDTAISEEAR

SEQ ID NO: 26019 - protein, 10 aa, Artificial Sequence
  Description of Artificial Sequence: Synthetic epitope
LDTAKMMTSS

SEQ ID NO: 26020 - protein, 10 aa, Artificial Sequence
  Description of Artificial Sequence: Synthetic epitope
LDTHDVFQYR

SEQ ID NO: 26021 - protein, 10 aa, Artificial Sequence
  Description of Artificial Sequence: Synthetic epitope
LDTNTAEEID

SEQ ID NO: 26022 - protein, 10 aa, Artificial Sequence
  Description of Artificial Sequence: Synthetic epitope
LDTTSSQPAE

SEQ ID NO: 26023 - protein, 10 aa, Artificial Sequence
  Description of Artificial Sequence: Synthetic epitope
LDVKKFSNTG

SEQ ID NO: 26024 - protein, 10 aa, Artificial Sequence
  Description of Artificial Sequence: Synthetic epitope
LDVLASKKVQ

SEQ ID NO: 26025 - protein, 10 aa, Artificial Sequence
  Description of Artificial Sequence: Synthetic epitope
LDVLAVSERF

SEQ ID NO: 26026 - protein, 10 aa, Artificial Sequence
  Description of Artificial Sequence: Synthetic epitope
LDVSALKVEA

SEQ ID NO: 26027 - protein, 10 aa, Artificial Sequence
  Description of Artificial Sequence: Synthetic epitope
LDVTSTMLQQ

SEQ ID NO: 26028 - protein, 10 aa, Artificial Sequence
  Description of Artificial Sequence: Synthetic epitope
LDWNQRAMDL

SEQ ID NO: 26029 - protein, 10 aa, Artificial Sequence
  Description of Artificial Sequence: Synthetic epitope
LDWVTSVGSS

SEQ ID NO: 26030 - protein, 10 aa, Artificial Sequence
  Description of Artificial Sequence: Synthetic epitope
LDWVTSVGSS

SEQ ID NO: 26031 - protein, 10 aa, Artificial Sequence
  Description of Artificial Sequence: Synthetic epitope
LDYEMQNSNE

SEQ ID NO: 26032 - protein, 10 aa, Artificial Sequence
  Description of Artificial Sequence: Synthetic epitope
LDYTQPLSDE

SEQ ID NO: 26033 - protein, 10 aa, Artificial Sequence
  Description of Artificial Sequence: Synthetic epitope
LDYVPYQANH

SEQ ID NO: 26034 - protein, 10 aa, Artificial Sequence
  Description of Artificial Sequence: Synthetic epitope
LEAAKSILTD

SEQ ID NO: 26035 - protein, 10 aa, Artificial Sequence
  Description of Artificial Sequence: Synthetic epitope
LEAAKTEKQV

SEQ ID NO: 26036 - protein, 10 aa, Artificial Sequence
  Description of Artificial Sequence: Synthetic epitope
LEAAVEAETV

SEQ ID NO: 26037 - protein, 10 aa, Artificial Sequence
  Description of Artificial Sequence: Synthetic epitope
LEAGFIDVEA

SEQ ID NO: 26038 - protein, 10 aa, Artificial Sequence
  Description of Artificial Sequence: Synthetic epitope
LEAIILRAKQ

SEQ ID NO: 26039 - protein, 10 aa, Artificial Sequence
  Description of Artificial Sequence: Synthetic epitope
LEAKTLAKKM

SEQ ID NO: 26040 - protein, 10 aa, Artificial Sequence
  Description of Artificial Sequence: Synthetic epitope
LEALAMLDIK

SEQ ID NO: 26041 - protein, 10 aa, Artificial Sequence
  Description of Artificial Sequence: Synthetic epitope
LEALARSESK

SEQ ID NO: 26042 - protein, 10 aa, Artificial Sequence
  Description of Artificial Sequence: Synthetic epitope
LEAPQVMSLH

SEQ ID NO: 26043 - protein, 10 aa, Artificial Sequence
  Description of Artificial Sequence: Synthetic epitope
LEAQALVKQD

SEQ ID NO: 26044 - protein, 10 aa, Artificial Sequence
  Description of Artificial Sequence: Synthetic epitope
LEAQEARKAQ

SEQ ID NO: 26045 - protein, 10 aa, Artificial Sequence
  Description of Artificial Sequence: Synthetic epitope
LEARQSLEVK

SEQ ID NO: 26046 - protein, 10 aa, Artificial Sequence
  Description of Artificial Sequence: Synthetic epitope
LEASEETGKR

SEQ ID NO: 26047 - protein, 10 aa, Artificial Sequence
  Description of Artificial Sequence: Synthetic epitope
LEATAASSVK

SEQ ID NO: 26048 - protein, 10 aa, Artificial Sequence
  Description of Artificial Sequence: Synthetic epitope
LEAVASVTPT

SEQ ID NO: 26049 - protein, 10 aa, Artificial Sequence
  Description of Artificial Sequence: Synthetic epitope
LEDASGEIHP

SEQ ID NO: 26050 - protein, 10 aa, Artificial Sequence
  Description of Artificial Sequence: Synthetic epitope
LEDDTSAVAT

SEQ ID NO: 26051 - protein, 10 aa, Artificial Sequence
  Description of Artificial Sequence: Synthetic epitope
LEDEAEVSGS

SEQ ID NO: 26052 - protein, 10 aa, Artificial Sequence
  Description of Artificial Sequence: Synthetic epitope
LEDEQTQRQK

SEQ ID NO: 26053 - protein, 10 aa, Artificial Sequence
  Description of Artificial Sequence: Synthetic epitope
LEDIKAAGAE

SEQ ID NO: 26054 - protein, 10 aa, Artificial Sequence
  Description of Artificial Sequence: Synthetic epitope
LEDKKTKKVI

SEQ ID NO: 26055 - protein, 10 aa, Artificial Sequence
  Description of Artificial Sequence: Synthetic epitope
LEDSSTSGAS

SEQ ID NO: 26056 - protein, 10 aa, Artificial Sequence
  Description of Artificial Sequence: Synthetic epitope
LEDVAKNETS

SEQ ID NO: 26057 - protein, 10 aa, Artificial Sequence
  Description of Artificial Sequence: Synthetic epitope
LEEAGKAEKI

SEQ ID NO: 26058 - protein, 10 aa, Artificial Sequence
  Description of Artificial Sequence: Synthetic epitope
LEEALLSREH

SEQ ID NO: 26059 - protein, 10 aa, Artificial Sequence
  Description of Artificial Sequence: Synthetic epitope
LEEASELLSS

SEQ ID NO: 26060 - protein, 10 aa, Artificial Sequence
  Description of Artificial Sequence: Synthetic epitope
LEEDKSLKVT

SEQ ID NO: 26061 - protein, 10 aa, Artificial Sequence
  Description of Artificial Sequence: Synthetic epitope
LEEKASFKTI

SEQ ID NO: 26062 - protein, 10 aa, Artificial Sequence
  Description of Artificial Sequence: Synthetic epitope
LEEKLTVSAG

SEQ ID NO: 26063 - protein, 10 aa, Artificial Sequence
  Description of Artificial Sequence: Synthetic epitope
LEEKLVLKSK

SEQ ID NO: 26064 - protein, 10 aa, Artificial Sequence
  Description of Artificial Sequence: Synthetic epitope
LEEKQARKAQ

SEQ ID NO: 26065 - protein, 10 aa, Artificial Sequence
  Description of Artificial Sequence: Synthetic epitope
LEEKSKISKN

SEQ ID NO: 26066 - protein, 10 aa, Artificial Sequence
  Description of Artificial Sequence: Synthetic epitope
LEEKSLSLKI

SEQ ID NO: 26067 - protein, 10 aa, Artificial Sequence
  Description of Artificial Sequence: Synthetic epitope
LEEKSSLQPK

SEQ ID NO: 26068 - protein, 10 aa, Artificial Sequence
  Description of Artificial Sequence: Synthetic epitope
LEEKVALEQQ

SEQ ID NO: 26069 - protein, 10 aa, Artificial Sequence
  Description of Artificial Sequence: Synthetic epitope
LEELATIASE

SEQ ID NO: 26070 - protein, 10 aa, Artificial Sequence
  Description of Artificial Sequence: Synthetic epitope
LEEQAALEPK

SEQ ID NO: 26071 - protein, 10 aa, Artificial Sequence
  Description of Artificial Sequence: Synthetic epitope
LEEQSSREEI

SEQ ID NO: 26072 - protein, 10 aa, Artificial Sequence
  Description of Artificial Sequence: Synthetic epitope
LEERQLSGST

SEQ ID NO: 26073 - protein, 10 aa, Artificial Sequence
  Description of Artificial Sequence: Synthetic epitope
LEESSTKSLE

SEQ ID NO: 26074 - protein, 10 aa, Artificial Sequence
  Description of Artificial Sequence: Synthetic epitope
LEETRKETAP

SEQ ID NO: 26075 - protein, 10 aa, Artificial Sequence
  Description of Artificial Sequence: Synthetic epitope
LEEVETTKEA

SEQ ID NO: 26076 - protein, 10 aa, Artificial Sequence
  Description of Artificial Sequence: Synthetic epitope
LEEVFHSEKE

SEQ ID NO: 26077 - protein, 10 aa, Artificial Sequence
  Description of Artificial Sequence: Synthetic epitope
LEEVQNINRR

SEQ ID NO: 26078 - protein, 10 aa, Artificial Sequence
  Description of Artificial Sequence: Synthetic epitope
LEEVQQSTND

SEQ ID NO: 26079 - protein, 10 aa, Artificial Sequence
  Description of Artificial Sequence: Synthetic epitope
LEFAQDAAPI

SEQ ID NO: 26080 - protein, 10 aa, Artificial Sequence
  Description of Artificial Sequence: Synthetic epitope
LEFEEALATS

SEQ ID NO: 26081 - protein, 10 aa, Artificial Sequence
  Description of Artificial Sequence: Synthetic epitope
LEFHSWHTRE

SEQ ID NO: 26082 - protein, 10 aa, Artificial Sequence
  Description of Artificial Sequence: Synthetic epitope
LEGAKKAKAD

SEQ ID NO: 26083 - protein, 10 aa, Artificial Sequence
  Description of Artificial Sequence: Synthetic epitope
LEGPISSQET

SEQ ID NO: 26084 - protein, 10 aa, Artificial Sequence
  Description of Artificial Sequence: Synthetic epitope
LEGQQSLPSQ

SEQ ID NO: 26085 - protein, 10 aa, Artificial Sequence
  Description of Artificial Sequence: Synthetic epitope
LEGRRQKKTK

SEQ ID NO: 26086 - protein, 10 aa, Artificial Sequence
  Description of Artificial Sequence: Synthetic epitope
LEHESVAGVV

SEQ ID NO: 26087 - protein, 10 aa, Artificial Sequence
  Description of Artificial Sequence: Synthetic epitope
LEIATELQDE

SEQ ID NO: 26088 - protein, 10 aa, Artificial Sequence
  Description of Artificial Sequence: Synthetic epitope
LEIFTFTELE

SEQ ID NO: 26089 - protein, 10 aa, Artificial Sequence
  Description of Artificial Sequence: Synthetic epitope
LEIGFNLVYN

SEQ ID NO: 26090 - protein, 10 aa, Artificial Sequence
  Description of Artificial Sequence: Synthetic epitope
LEIGNITITA

SEQ ID NO: 26091 - protein, 10 aa, Artificial Sequence
  Description of Artificial Sequence: Synthetic epitope
LEIISSIKEE

SEQ ID NO: 26092 - protein, 10 aa, Artificial Sequence
  Description of Artificial Sequence: Synthetic epitope
LEILESNKTQ

SEQ ID NO: 26093 - protein, 10 aa, Artificial Sequence
  Description of Artificial Sequence: Synthetic epitope
LEIQLSQSQT

SEQ ID NO: 26094 - protein, 10 aa, Artificial Sequence
  Description of Artificial Sequence: Synthetic epitope
LEITTKHNAE

SEQ ID NO: 26095 - protein, 10 aa, Artificial Sequence
  Description of Artificial Sequence: Synthetic epitope
LEKALKYKEQ

SEQ ID NO: 26096 - protein, 10 aa, Artificial Sequence
  Description of Artificial Sequence: Synthetic epitope
LEKARSSAQL

SEQ ID NO: 26097 - protein, 10 aa, Artificial Sequence
  Description of Artificial Sequence: Synthetic epitope
LEKASASERR

SEQ ID NO: 26098 - protein, 10 aa, Artificial Sequence
  Description of Artificial Sequence: Synthetic epitope
LEKAVAQPKK

SEQ ID NO: 26099 - protein, 10 aa, Artificial Sequence
  Description of Artificial Sequence: Synthetic epitope
LEKEAKKVEG

SEQ ID NO: 26100 - protein, 10 aa, Artificial Sequence
  Description of Artificial Sequence: Synthetic epitope
LEKEASKMQQ

SEQ ID NO: 26101 - protein, 10 aa, Artificial Sequence
  Description of Artificial Sequence: Synthetic epitope
LEKEKAKLGR

SEQ ID NO: 26102 - protein, 10 aa, Artificial Sequence
  Description of Artificial Sequence: Synthetic epitope
LEKEQMLTSD

SEQ ID NO: 26103 - protein, 10 aa, Artificial Sequence
  Description of Artificial Sequence: Synthetic epitope
LEKETVTERK

SEQ ID NO: 26104 - protein, 10 aa, Artificial Sequence
  Description of Artificial Sequence: Synthetic epitope
LEKKDISKSE

SEQ ID NO: 26105 - protein, 10 aa, Artificial Sequence
  Description of Artificial Sequence: Synthetic epitope
LEKKSLGKDS

SEQ ID NO: 26106 - protein, 10 aa, Artificial Sequence
  Description of Artificial Sequence: Synthetic epitope
LEKLDVKQTE

SEQ ID NO: 26107 - protein, 10 aa, Artificial Sequence
  Description of Artificial Sequence: Synthetic epitope
LEKLESMRQQ

SEQ ID NO: 26108 - protein, 10 aa, Artificial Sequence
  Description of Artificial Sequence: Synthetic epitope
LEKMMVKRRD

SEQ ID NO: 26109 - protein, 10 aa, Artificial Sequence
  Description of Artificial Sequence: Synthetic epitope
LEKNSLTEQN

SEQ ID NO: 26110 - protein, 10 aa, Artificial Sequence
  Description of Artificial Sequence: Synthetic epitope
LEKPLRTKRK

SEQ ID NO: 26111 - protein, 10 aa, Artificial Sequence
  Description of Artificial Sequence: Synthetic epitope
LEKQASVAAE

SEQ ID NO: 26112 - protein, 10 aa, Artificial Sequence
  Description of Artificial Sequence: Synthetic epitope
LEKRAPSIAL

SEQ ID NO: 26113 - protein, 10 aa, Artificial Sequence
  Description of Artificial Sequence: Synthetic epitope
LEKRKLNKAP

SEQ ID NO: 26114 - protein, 10 aa, Artificial Sequence
  Description of Artificial Sequence: Synthetic epitope
LEKRLTNESW

SEQ ID NO: 26115 - protein, 10 aa, Artificial Sequence
  Description of Artificial Sequence: Synthetic epitope
LEKSAKKDSK

SEQ ID NO: 26116 - protein, 10 aa, Artificial Sequence
  Description of Artificial Sequence: Synthetic epitope
LEKSAVLQEA

SEQ ID NO: 26117 - protein, 10 aa, Artificial Sequence
  Description of Artificial Sequence: Synthetic epitope
LEKSQNEQEA

SEQ ID NO: 26118 - protein, 10 aa, Artificial Sequence
  Description of Artificial Sequence: Synthetic epitope
LEKVSASGTP

SEQ ID NO: 26119 - protein, 10 aa, Artificial Sequence
  Description of Artificial Sequence: Synthetic epitope
LELAVLEAGS

SEQ ID NO: 26120 - protein, 10 aa, Artificial Sequence
  Description of Artificial Sequence: Synthetic epitope
LELDASTSAV

SEQ ID NO: 26121 - protein, 10 aa, Artificial Sequence
  Description of Artificial Sequence: Synthetic epitope
LELDKAAQDF

SEQ ID NO: 26122 - protein, 10 aa, Artificial Sequence
  Description of Artificial Sequence: Synthetic epitope
LELEAEVAEM

SEQ ID NO: 26123 - protein, 10 aa, Artificial Sequence
  Description of Artificial Sequence: Synthetic epitope
LELEESLEAS

SEQ ID NO: 26124 - protein, 10 aa, Artificial Sequence
  Description of Artificial Sequence: Synthetic epitope
LELEIKQDYT

SEQ ID NO: 26125 - protein, 10 aa, Artificial Sequence
  Description of Artificial Sequence: Synthetic epitope
LELENSKGPS

SEQ ID NO: 26126 - protein, 10 aa, Artificial Sequence
  Description of Artificial Sequence: Synthetic epitope
LELGLETEAA

SEQ ID NO: 26127 - protein, 10 aa, Artificial Sequence
  Description of Artificial Sequence: Synthetic epitope
LELIETELTE

SEQ ID NO: 26128 - protein, 10 aa, Artificial Sequence
  Description of Artificial Sequence: Synthetic epitope
LELKELKASH

SEQ ID NO: 26129 - protein, 10 aa, Artificial Sequence
  Description of Artificial Sequence: Synthetic epitope
LELKSLISKS

SEQ ID NO: 26130 - protein, 10 aa, Artificial Sequence
  Description of Artificial Sequence: Synthetic epitope
LELKSVILEA

SEQ ID NO: 26131 - protein, 10 aa, Artificial Sequence
  Description of Artificial Sequence: Synthetic epitope
LELQAVKSKK

SEQ ID NO: 26132 - protein, 10 aa, Artificial Sequence
  Description of Artificial Sequence: Synthetic epitope
LELQEQSLRT

SEQ ID NO: 26133 - protein, 10 aa, Artificial Sequence
  Description of Artificial Sequence: Synthetic epitope
LELQRSANSN

SEQ ID NO: 26134 - protein, 10 aa, Artificial Sequence
  Description of Artificial Sequence: Synthetic epitope
LELQSQVGTK

SEQ ID NO: 26135 - protein, 10 aa, Artificial Sequence
  Description of Artificial Sequence: Synthetic epitope
LELRETQQRN

SEQ ID NO: 26136 - protein, 10 aa, Artificial Sequence
  Description of Artificial Sequence: Synthetic epitope
LELSKQAAQL

SEQ ID NO: 26137 - protein, 10 aa, Artificial Sequence
  Description of Artificial Sequence: Synthetic epitope
LELSQKEKQF

SEQ ID NO: 26138 - protein, 10 aa, Artificial Sequence
  Description of Artificial Sequence: Synthetic epitope
LELSVMKKRR

SEQ ID NO: 26139 - protein, 10 aa, Artificial Sequence
  Description of Artificial Sequence: Synthetic epitope
LEMAQANSAG

SEQ ID NO: 26140 - protein, 10 aa, Artificial Sequence
  Description of Artificial Sequence: Synthetic epitope
LEMEGASESL

SEQ ID NO: 26141 - protein, 10 aa, Artificial Sequence
  Description of Artificial Sequence: Synthetic epitope
LEMEQMAKTA

SEQ ID NO: 26142 - protein, 10 aa, Artificial Sequence
  Description of Artificial Sequence: Synthetic epitope
LEMESKLAAE

SEQ ID NO: 26143 - protein, 10 aa, Artificial Sequence
  Description of Artificial Sequence: Synthetic epitope
LEMFRTQKKE

SEQ ID NO: 26144 - protein, 10 aa, Artificial Sequence
  Description of Artificial Sequence: Synthetic epitope
LEMKEAQEEI

SEQ ID NO: 26145 - protein, 10 aa, Artificial Sequence
  Description of Artificial Sequence: Synthetic epitope
LEMKSRLQMR

SEQ ID NO: 26146 - protein, 10 aa, Artificial Sequence
  Description of Artificial Sequence: Synthetic epitope
LEMMARQTSS

SEQ ID NO: 26147 - protein, 10 aa, Artificial Sequence
  Description of Artificial Sequence: Synthetic epitope
LEMSSNDSRS

SEQ ID NO: 26148 - protein, 10 aa, Artificial Sequence
  Description of Artificial Sequence: Synthetic epitope
LEMTKRLALS

SEQ ID NO: 26149 - protein, 10 aa, Artificial Sequence
  Description of Artificial Sequence: Synthetic epitope
LENDSIEAAE

SEQ ID NO: 26150 - protein, 10 aa, Artificial Sequence
  Description of Artificial Sequence: Synthetic epitope
LENLKAVTTE

SEQ ID NO: 26151 - protein, 10 aa, Artificial Sequence
  Description of Artificial Sequence: Synthetic epitope
LENLKLISNA

SEQ ID NO: 26152 - protein, 10 aa, Artificial Sequence
  Description of Artificial Sequence: Synthetic epitope
LENQKKARKK

SEQ ID NO: 26153 - protein, 10 aa, Artificial Sequence
  Description of Artificial Sequence: Synthetic epitope
LEPAQQLSSL

SEQ ID NO: 26154 - protein, 10 aa, Artificial Sequence
  Description of Artificial Sequence: Synthetic epitope
LEPIRSVSFL

SEQ ID NO: 26155 - protein, 10 aa, Artificial Sequence
  Description of Artificial Sequence: Synthetic epitope
LEPITLLQQT

SEQ ID NO: 26156 - protein, 10 aa, Artificial Sequence
  Description of Artificial Sequence: Synthetic epitope
LEPLNLSSGS

SEQ ID NO: 26157 - protein, 10 aa, Artificial Sequence
  Description of Artificial Sequence: Synthetic epitope
LEPQAEVFTK

SEQ ID NO: 26158 - protein, 10 aa, Artificial Sequence
  Description of Artificial Sequence: Synthetic epitope
LEPRSQTVTV

SEQ ID NO: 26159 - protein, 10 aa, Artificial Sequence
  Description of Artificial Sequence: Synthetic epitope
LEPSLKKMKT

SEQ ID NO: 26160 - protein, 10 aa, Artificial Sequence
  Description of Artificial Sequence: Synthetic epitope
LEPSTTSTSQ

SEQ ID NO: 26161 - protein, 10 aa, Artificial Sequence
  Description of Artificial Sequence: Synthetic epitope
LEPVKKSRLQ

SEQ ID NO: 26162 - protein, 10 aa, Artificial Sequence
  Description of Artificial Sequence: Synthetic epitope
LEPVVSMSDM

SEQ ID NO: 26163 - protein, 10 aa, Artificial Sequence
  Description of Artificial Sequence: Synthetic epitope
LEQALSSEGT

SEQ ID NO: 26164 - protein, 10 aa, Artificial Sequence
  Description of Artificial Sequence: Synthetic epitope
LEQDASKEQQ

SEQ ID NO: 26165 - protein, 10 aa, Artificial Sequence
  Description of Artificial Sequence: Synthetic epitope
LEQLKALQMD

SEQ ID NO: 26166 - protein, 10 aa, Artificial Sequence
  Description of Artificial Sequence: Synthetic epitope
LEQLKVINKM

SEQ ID NO: 26167 - protein, 10 aa, Artificial Sequence
  Description of Artificial Sequence: Synthetic epitope
LEQLSQIPLL

SEQ ID NO: 26168 - protein, 10 aa, Artificial Sequence
  Description of Artificial Sequence: Synthetic epitope
LEQMNEESLE

SEQ ID NO: 26169 - protein, 10 aa, Artificial Sequence
  Description of Artificial Sequence: Synthetic epitope
LEQNAQFRNQ

SEQ ID NO: 26170 - protein, 10 aa, Artificial Sequence
  Description of Artificial Sequence: Synthetic epitope
LEQQTTSSEK

SEQ ID NO: 26171 - protein, 10 aa, Artificial Sequence
  Description of Artificial Sequence: Synthetic epitope
LEQRSESVRR

SEQ ID NO: 26172 - protein, 10 aa, Artificial Sequence
  Description of Artificial Sequence: Synthetic epitope
LEQSRQQRGW

SEQ ID NO: 26173 - protein, 10 aa, Artificial Sequence
  Description of Artificial Sequence: Synthetic epitope
LEQTLQASEE

SEQ ID NO: 26174 - protein, 10 aa, Artificial Sequence
  Description of Artificial Sequence: Synthetic epitope
LEREERNQTQ

SEQ ID NO: 26175 - protein, 10 aa, Artificial Sequence
  Description of Artificial Sequence: Synthetic epitope
LERETMTNLH

SEQ ID NO: 26176 - protein, 10 aa, Artificial Sequence
  Description of Artificial Sequence: Synthetic epitope
LERETQALEN

SEQ ID NO: 26177 - protein, 10 aa, Artificial Sequence
  Description of Artificial Sequence: Synthetic epitope
LERIILTEQA

SEQ ID NO: 26178 - protein, 10 aa, Artificial Sequence
  Description of Artificial Sequence: Synthetic epitope
LERKELIKNR

SEQ ID NO: 26179 - protein, 10 aa, Artificial Sequence
  Description of Artificial Sequence: Synthetic epitope
LERKINKMTD

SEQ ID NO: 26180 - protein, 10 aa, Artificial Sequence
  Description of Artificial Sequence: Synthetic epitope
LERLAEAEKS

SEQ ID NO: 26181 - protein, 10 aa, Artificial Sequence
  Description of Artificial Sequence: Synthetic epitope
LERLQALKTM

SEQ ID NO: 26182 - protein, 10 aa, Artificial Sequence
  Description of Artificial Sequence: Synthetic epitope
LERLSSARNF

SEQ ID NO: 26183 - protein, 10 aa, Artificial Sequence
  Description of Artificial Sequence: Synthetic epitope
LERNSTNVKN

SEQ ID NO: 26184 - protein, 10 aa, Artificial Sequence
  Description of Artificial Sequence: Synthetic epitope
LERNSTNVKN

SEQ ID NO: 26185 - protein, 10 aa, Artificial Sequence
  Description of Artificial Sequence: Synthetic epitope
LERQESSEQE

SEQ ID NO: 26186 - protein, 10 aa, Artificial Sequence
  Description of Artificial Sequence: Synthetic epitope
LERTPTKMTT

SEQ ID NO: 26187 - protein, 10 aa, Artificial Sequence
  Description of Artificial Sequence: Synthetic epitope
LERVSLSAES

SEQ ID NO: 26188 - protein, 10 aa, Artificial Sequence
  Description of Artificial Sequence: Synthetic epitope
LERVSSTSPS

SEQ ID NO: 26189 - protein, 10 aa, Artificial Sequence
  Description of Artificial Sequence: Synthetic epitope
LERVVRISAK

SEQ ID NO: 26190 - protein, 10 aa, Artificial Sequence
  Description of Artificial Sequence: Synthetic epitope
LESAELEAAQ

SEQ ID NO: 26191 - protein, 10 aa, Artificial Sequence
  Description of Artificial Sequence: Synthetic epitope
LESAMSGKYL

SEQ ID NO: 26192 - protein, 10 aa, Artificial Sequence
  Description of Artificial Sequence: Synthetic epitope
LESDELQAQQ

SEQ ID NO: 26193 - protein, 10 aa, Artificial Sequence
  Description of Artificial Sequence: Synthetic epitope
LESDSSRSEI

SEQ ID NO: 26194 - protein, 10 aa, Artificial Sequence
  Description of Artificial Sequence: Synthetic epitope
LESENESKSS

SEQ ID NO: 26195 - protein, 10 aa, Artificial Sequence
  Description of Artificial Sequence: Synthetic epitope
LESKLKADKL

SEQ ID NO: 26196 - protein, 10 aa, Artificial Sequence
  Description of Artificial Sequence: Synthetic epitope
LESLEKTLQA

SEQ ID NO: 26197 - protein, 10 aa, Artificial Sequence
  Description of Artificial Sequence: Synthetic epitope
LESLGLIKQS

SEQ ID NO: 26198 - protein, 10 aa, Artificial Sequence
  Description of Artificial Sequence: Synthetic epitope
LESLLSEGRL

SEQ ID NO: 26199 - protein, 10 aa, Artificial Sequence
  Description of Artificial Sequence: Synthetic epitope
LESMSLMSRT

SEQ ID NO: 26200 - protein, 10 aa, Artificial Sequence
  Description of Artificial Sequence: Synthetic epitope
LESNGKGAEK

SEQ ID NO: 26201 - protein, 10 aa, Artificial Sequence
  Description of Artificial Sequence: Synthetic epitope
LESNTIIDHV

SEQ ID NO: 26202 - protein, 10 aa, Artificial Sequence
  Description of Artificial Sequence: Synthetic epitope
LESPKKAKSR

SEQ ID NO: 26203 - protein, 10 aa, Artificial Sequence
  Description of Artificial Sequence: Synthetic epitope
LESQASLPML

SEQ ID NO: 26204 - protein, 10 aa, Artificial Sequence
  Description of Artificial Sequence: Synthetic epitope
LESQQENQRM

SEQ ID NO: 26205 - protein, 10 aa, Artificial Sequence
  Description of Artificial Sequence: Synthetic epitope
LESQSQLDAA

SEQ ID NO: 26206 - protein, 10 aa, Artificial Sequence
  Description of Artificial Sequence: Synthetic epitope
LESQSTSLRG

SEQ ID NO: 26207 - protein, 10 aa, Artificial Sequence
  Description of Artificial Sequence: Synthetic epitope
LESQTTKQAD

SEQ ID NO: 26208 - protein, 10 aa, Artificial Sequence
  Description of Artificial Sequence: Synthetic epitope
LESSAGAELS

SEQ ID NO: 26209 - protein, 10 aa, Artificial Sequence
  Description of Artificial Sequence: Synthetic epitope
LESSAKVVDH

SEQ ID NO: 26210 - protein, 10 aa, Artificial Sequence
  Description of Artificial Sequence: Synthetic epitope
LESSFVSMEE

SEQ ID NO: 26211 - protein, 10 aa, Artificial Sequence
  Description of Artificial Sequence: Synthetic epitope
LESSLSSTIQ

SEQ ID NO: 26212 - protein, 10 aa, Artificial Sequence
  Description of Artificial Sequence: Synthetic epitope
LESSQALEPK

SEQ ID NO: 26213 - protein, 10 aa, Artificial Sequence
  Description of Artificial Sequence: Synthetic epitope
LESTNTEKET

SEQ ID NO: 26214 - protein, 10 aa, Artificial Sequence
  Description of Artificial Sequence: Synthetic epitope
LESTSSKVKQ

SEQ ID NO: 26215 - protein, 10 aa, Artificial Sequence
  Description of Artificial Sequence: Synthetic epitope
LESTTAILQQ

SEQ ID NO: 26216 - protein, 10 aa, Artificial Sequence
  Description of Artificial Sequence: Synthetic epitope
LESVKSALRA

SEQ ID NO: 26217 - protein, 10 aa, Artificial Sequence
  Description of Artificial Sequence: Synthetic epitope
LETEAVDQPD

SEQ ID NO: 26218 - protein, 10 aa, Artificial Sequence
  Description of Artificial Sequence: Synthetic epitope
LETEIQKDQR

SEQ ID NO: 26219 - protein, 10 aa, Artificial Sequence
  Description of Artificial Sequence: Synthetic epitope
LETERKVSAS

SEQ ID NO: 26220 - protein, 10 aa, Artificial Sequence
  Description of Artificial Sequence: Synthetic epitope
LETKKFRFEE

SEQ ID NO: 26221 - protein, 10 aa, Artificial Sequence
  Description of Artificial Sequence: Synthetic epitope
LETKQSLEAA

SEQ ID NO: 26222 - protein, 10 aa, Artificial Sequence
  Description of Artificial Sequence: Synthetic epitope
LETKTMLEDQ

SEQ ID NO: 26223 - protein, 10 aa, Artificial Sequence
  Description of Artificial Sequence: Synthetic epitope
LETLATKEEA

SEQ ID NO: 26224 - protein, 10 aa, Artificial Sequence
  Description of Artificial Sequence: Synthetic epitope
LETQLKKALQ

SEQ ID NO: 26225 - protein, 10 aa, Artificial Sequence
  Description of Artificial Sequence: Synthetic epitope
LETRQKARAM

SEQ ID NO: 26226 - protein, 10 aa, Artificial Sequence
  Description of Artificial Sequence: Synthetic epitope
LETRVIGTSE

SEQ ID NO: 26227 - protein, 10 aa, Artificial Sequence
  Description of Artificial Sequence: Synthetic epitope
LETSGHESNS

SEQ ID NO: 26228 - protein, 10 aa, Artificial Sequence
  Description of Artificial Sequence: Synthetic epitope
LETSNQLLKK

SEQ ID NO: 26229 - protein, 10 aa, Artificial Sequence
  Description of Artificial Sequence: Synthetic epitope
LETSSLNFKV

SEQ ID NO: 26230 - protein, 10 aa, Artificial Sequence
  Description of Artificial Sequence: Synthetic epitope
LETVIDVSTA

SEQ ID NO: 26231 - protein, 10 aa, Artificial Sequence
  Description of Artificial Sequence: Synthetic epitope
LETVLELEVE

SEQ ID NO: 26232 - protein, 10 aa, Artificial Sequence
  Description of Artificial Sequence: Synthetic epitope
LEVAEVRAQV

SEQ ID NO: 26233 - protein, 10 aa, Artificial Sequence
  Description of Artificial Sequence: Synthetic epitope
LEVAKQSQHD

SEQ ID NO: 26234 - protein, 10 aa, Artificial Sequence
  Description of Artificial Sequence: Synthetic epitope
LEVEAKVALE

SEQ ID NO: 26235 - protein, 10 aa, Artificial Sequence
  Description of Artificial Sequence: Synthetic epitope
LEVEESTVYS

SEQ ID NO: 26236 - protein, 10 aa, Artificial Sequence
  Description of Artificial Sequence: Synthetic epitope
LEVEVETQEA

SEQ ID NO: 26237 - protein, 10 aa, Artificial Sequence
  Description of Artificial Sequence: Synthetic epitope
LEVGEKSQAP

SEQ ID NO: 26238 - protein, 10 aa, Artificial Sequence
  Description of Artificial Sequence: Synthetic epitope
LEVGIQAMEH

SEQ ID NO: 26239 - protein, 10 aa, Artificial Sequence
  Description of Artificial Sequence: Synthetic epitope
LEVISALQLD

SEQ ID NO: 26240 - protein, 10 aa, Artificial Sequence
  Description of Artificial Sequence: Synthetic epitope
LEVKMESSKQ

SEQ ID NO: 26241 - protein, 10 aa, Artificial Sequence
  Description of Artificial Sequence: Synthetic epitope
LEVLLKLADK

SEQ ID NO: 26242 - protein, 10 aa, Artificial Sequence
  Description of Artificial Sequence: Synthetic epitope
LEVLTAAVEY

SEQ ID NO: 26243 - protein, 10 aa, Artificial Sequence
  Description of Artificial Sequence: Synthetic epitope
LEVSEVEQEL

SEQ ID NO: 26244 - protein, 10 aa, Artificial Sequence
  Description of Artificial Sequence: Synthetic epitope
LEVSQGLSRN

SEQ ID NO: 26245 - protein, 10 aa, Artificial Sequence
  Description of Artificial Sequence: Synthetic epitope
LEVSSVSSLV

SEQ ID NO: 26246 - protein, 10 aa, Artificial Sequence
  Description of Artificial Sequence: Synthetic epitope
LEVTESNTTS

SEQ ID NO: 26247 - protein, 10 aa, Artificial Sequence
  Description of Artificial Sequence: Synthetic epitope
LEVVAIDSSE

SEQ ID NO: 26248 - protein, 10 aa, Artificial Sequence
  Description of Artificial Sequence: Synthetic epitope
LEWFASEEPT

SEQ ID NO: 26249 - protein, 10 aa, Artificial Sequence
  Description of Artificial Sequence: Synthetic epitope
LEWLSSKTVF

SEQ ID NO: 26250 - protein, 10 aa, Artificial Sequence
  Description of Artificial Sequence: Synthetic epitope
LEWNWNLIGT

SEQ ID NO: 26251 - protein, 10 aa, Artificial Sequence
  Description of Artificial Sequence: Synthetic epitope
LEYALNARSY

SEQ ID NO: 26252 - protein, 10 aa, Artificial Sequence
  Description of Artificial Sequence: Synthetic epitope
LEYRSSENPV

SEQ ID NO: 26253 - protein, 10 aa, Artificial Sequence
  Description of Artificial Sequence: Synthetic epitope
LEYTIKEEKS

SEQ ID NO: 26254 - protein, 10 aa, Artificial Sequence
  Description of Artificial Sequence: Synthetic epitope
LFAKTILQGN

SEQ ID NO: 26255 - protein, 10 aa, Artificial Sequence
  Description of Artificial Sequence: Synthetic epitope
LFALSQKELA

SEQ ID NO: 26256 - protein, 10 aa, Artificial Sequence
  Description of Artificial Sequence: Synthetic epitope
LFAQKRTMLE

SEQ ID NO: 26257 - protein, 10 aa, Artificial Sequence
  Description of Artificial Sequence: Synthetic epitope
LFDDWMASNG

SEQ ID NO: 26258 - protein, 10 aa, Artificial Sequence
  Description of Artificial Sequence: Synthetic epitope
LFEIFIKATT

SEQ ID NO: 26259 - protein, 10 aa, Artificial Sequence
  Description of Artificial Sequence: Synthetic epitope
LFEKKVYLSE

SEQ ID NO: 26260 - protein, 10 aa, Artificial Sequence
  Description of Artificial Sequence: Synthetic epitope
LFEQALSVSG

SEQ ID NO: 26261 - protein, 10 aa, Artificial Sequence
  Description of Artificial Sequence: Synthetic epitope
LFETSTAPPA

SEQ ID NO: 26262 - protein, 10 aa, Artificial Sequence
  Description of Artificial Sequence: Synthetic epitope
LFFEALFITS

SEQ ID NO: 26263 - protein, 10 aa, Artificial Sequence
  Description of Artificial Sequence: Synthetic epitope
LFGFQITKLI

SEQ ID NO: 26264 - protein, 10 aa, Artificial Sequence
  Description of Artificial Sequence: Synthetic epitope
LFKETANVTV

SEQ ID NO: 26265 - protein, 10 aa, Artificial Sequence
  Description of Artificial Sequence: Synthetic epitope
LFKIKGSKID

SEQ ID NO: 26266 - protein, 10 aa, Artificial Sequence
  Description of Artificial Sequence: Synthetic epitope
LFKLAEQKRP

SEQ ID NO: 26267 - protein, 10 aa, Artificial Sequence
  Description of Artificial Sequence: Synthetic epitope
LFKQKAQQKR

SEQ ID NO: 26268 - protein, 10 aa, Artificial Sequence
  Description of Artificial Sequence: Synthetic epitope
LFKTSQLAPA

SEQ ID NO: 26269 - protein, 10 aa, Artificial Sequence
  Description of Artificial Sequence: Synthetic epitope
LFLNMVAPGR

SEQ ID NO: 26270 - protein, 10 aa, Artificial Sequence
  Description of Artificial Sequence: Synthetic epitope
LFLNSLDAKE

SEQ ID NO: 26271 - protein, 10 aa, Artificial Sequence
  Description of Artificial Sequence: Synthetic epitope
LFLTKEATSV

SEQ ID NO: 26272 - protein, 10 aa, Artificial Sequence
  Description of Artificial Sequence: Synthetic epitope
LFMEHRAQMA

SEQ ID NO: 26273 - protein, 10 aa, Artificial Sequence
  Description of Artificial Sequence: Synthetic epitope
LFNSAVNQEG

SEQ ID NO: 26274 - protein, 10 aa, Artificial Sequence
  Description of Artificial Sequence: Synthetic epitope
LFPRKMTSHN

SEQ ID NO: 26275 - protein, 10 aa, Artificial Sequence
  Description of Artificial Sequence: Synthetic epitope
LFQQKLLAEE

SEQ ID NO: 26276 - protein, 10 aa, Artificial Sequence
  Description of Artificial Sequence: Synthetic epitope
LFRVQFSGES

SEQ ID NO: 26277 - protein, 10 aa, Artificial Sequence
  Description of Artificial Sequence: Synthetic epitope
LFSKLFSRSK

SEQ ID NO: 26278 - protein, 10 aa, Artificial Sequence
  Description of Artificial Sequence: Synthetic epitope
LFSLPIKESE

SEQ ID NO: 26279 - protein, 10 aa, Artificial Sequence
  Description of Artificial Sequence: Synthetic epitope
LFSQSQLESF

SEQ ID NO: 26280 - protein, 10 aa, Artificial Sequence
  Description of Artificial Sequence: Synthetic epitope
LFSRRTSKQQ

SEQ ID NO: 26281 - protein, 10 aa, Artificial Sequence
  Description of Artificial Sequence: Synthetic epitope
LFSSLLSSLP

SEQ ID NO: 26282 - protein, 10 aa, Artificial Sequence
  Description of Artificial Sequence: Synthetic epitope
LFTKSTYQAE

SEQ ID NO: 26283 - protein, 10 aa, Artificial Sequence
  Description of Artificial Sequence: Synthetic epitope
LFTNTALVTQ

SEQ ID NO: 26284 - protein, 10 aa, Artificial Sequence
  Description of Artificial Sequence: Synthetic epitope
LFVLLQTSKK

SEQ ID NO: 26285 - protein, 10 aa, Artificial Sequence
  Description of Artificial Sequence: Synthetic epitope
LFVQTRKGQE

SEQ ID NO: 26286 - protein, 10 aa, Artificial Sequence
  Description of Artificial Sequence: Synthetic epitope
LFVRSRTRVV

SEQ ID NO: 26287 - protein, 10 aa, Artificial Sequence
  Description of Artificial Sequence: Synthetic epitope
LGAFDSTIFQ

SEQ ID NO: 26288 - protein, 10 aa, Artificial Sequence
  Description of Artificial Sequence: Synthetic epitope
LGAKSEIATD

SEQ ID NO: 26289 - protein, 10 aa, Artificial Sequence
  Description of Artificial Sequence: Synthetic epitope
LGALSVVSGK

SEQ ID NO: 26290 - protein, 10 aa, Artificial Sequence
  Description of Artificial Sequence: Synthetic epitope
LGARDAISKA

SEQ ID NO: 26291 - protein, 10 aa, Artificial Sequence
  Description of Artificial Sequence: Synthetic epitope
LGDKASIPGN

SEQ ID NO: 26292 - protein, 10 aa, Artificial Sequence
  Description of Artificial Sequence: Synthetic epitope
LGDMLVTQAL

SEQ ID NO: 26293 - protein, 10 aa, Artificial Sequence
  Description of Artificial Sequence: Synthetic epitope
LGDSSLSRKD

SEQ ID NO: 26294 - protein, 10 aa, Artificial Sequence
  Description of Artificial Sequence: Synthetic epitope
LGEAASFSNA

SEQ ID NO: 26295 - protein, 10 aa, Artificial Sequence
  Description of Artificial Sequence: Synthetic epitope
LGEAITLKPS

SEQ ID NO: 26296 - protein, 10 aa, Artificial Sequence
  Description of Artificial Sequence: Synthetic epitope
LGEARTADFR

SEQ ID NO: 26297 - protein, 10 aa, Artificial Sequence
  Description of Artificial Sequence: Synthetic epitope
LGEETTKSQD

SEQ ID NO: 26298 - protein, 10 aa, Artificial Sequence
  Description of Artificial Sequence: Synthetic epitope
LGERALSKGL

SEQ ID NO: 26299 - protein, 10 aa, Artificial Sequence
  Description of Artificial Sequence: Synthetic epitope
LGESFMSIME

SEQ ID NO: 26300 - protein, 10 aa, Artificial Sequence
  Description of Artificial Sequence: Synthetic epitope
LGESSTEASK

SEQ ID NO: 26301 - protein, 10 aa, Artificial Sequence
  Description of Artificial Sequence: Synthetic epitope
LGETSASKKS

SEQ ID NO: 26302 - protein, 10 aa, Artificial Sequence
  Description of Artificial Sequence: Synthetic epitope
LGETTEKINA

SEQ ID NO: 26303 - protein, 10 aa, Artificial Sequence
  Description of Artificial Sequence: Synthetic epitope
LGFKEGVNSH

SEQ ID NO: 26304 - protein, 10 aa, Artificial Sequence
  Description of Artificial Sequence: Synthetic epitope
LGFLSARQTG

SEQ ID NO: 26305 - protein, 10 aa, Artificial Sequence
  Description of Artificial Sequence: Synthetic epitope
LGFQAEASVE

SEQ ID NO: 26306 - protein, 10 aa, Artificial Sequence
  Description of Artificial Sequence: Synthetic epitope
LGGQLMRQAV

SEQ ID NO: 26307 - protein, 10 aa, Artificial Sequence
  Description of Artificial Sequence: Synthetic epitope
LGGSSTTGAE

SEQ ID NO: 26308 - protein, 10 aa, Artificial Sequence
  Description of Artificial Sequence: Synthetic epitope
LGIKRRISKE

SEQ ID NO: 26309 - protein, 10 aa, Artificial Sequence
  Description of Artificial Sequence: Synthetic epitope
LGILGIKKVI

SEQ ID NO: 26310 - protein, 10 aa, Artificial Sequence
  Description of Artificial Sequence: Synthetic epitope
LGINNQSNLT

SEQ ID NO: 26311 - protein, 10 aa, Artificial Sequence
  Description of Artificial Sequence: Synthetic epitope
LGISKVVKAV

SEQ ID NO: 26312 - protein, 10 aa, Artificial Sequence
  Description of Artificial Sequence: Synthetic epitope
LGIVSNNSVE

SEQ ID NO: 26313 - protein, 10 aa, Artificial Sequence
  Description of Artificial Sequence: Synthetic epitope
LGKLDIISPQ

SEQ ID NO: 26314 - protein, 10 aa, Artificial Sequence
  Description of Artificial Sequence: Synthetic epitope
LGKLSTQIST

SEQ ID NO: 26315 - protein, 10 aa, Artificial Sequence
  Description of Artificial Sequence: Synthetic epitope
LGKLYKIPEL

SEQ ID NO: 26316 - protein, 10 aa, Artificial Sequence
  Description of Artificial Sequence: Synthetic epitope
LGKSPGKTQL

SEQ ID NO: 26317 - protein, 10 aa, Artificial Sequence
  Description of Artificial Sequence: Synthetic epitope
LGLDLESGEE

SEQ ID NO: 26318 - protein, 10 aa, Artificial Sequence
  Description of Artificial Sequence: Synthetic epitope
LGLEILSLQE

SEQ ID NO: 26319 - protein, 10 aa, Artificial Sequence
  Description of Artificial Sequence: Synthetic epitope
LGLQAASAQE

SEQ ID NO: 26320 - protein, 10 aa, Artificial Sequence
  Description of Artificial Sequence: Synthetic epitope
LGLQLASMLG

SEQ ID NO: 26321 - protein, 10 aa, Artificial Sequence
  Description of Artificial Sequence: Synthetic epitope
LGLRRLSETM

SEQ ID NO: 26322 - protein, 10 aa, Artificial Sequence
  Description of Artificial Sequence: Synthetic epitope
LGMEPRYARP

SEQ ID NO: 26323 - protein, 10 aa, Artificial Sequence
  Description of Artificial Sequence: Synthetic epitope
LGMRKLMASI

SEQ ID NO: 26324 - protein, 10 aa, Artificial Sequence
  Description of Artificial Sequence: Synthetic epitope
LGNGKAAEEA

SEQ ID NO: 26325 - protein, 10 aa, Artificial Sequence
  Description of Artificial Sequence: Synthetic epitope
LGNKSEADQT

SEQ ID NO: 26326 - protein, 10 aa, Artificial Sequence
  Description of Artificial Sequence: Synthetic epitope
LGNLNAATDD

SEQ ID NO: 26327 - protein, 10 aa, Artificial Sequence
  Description of Artificial Sequence: Synthetic epitope
LGNQSQVNHT

SEQ ID NO: 26328 - protein, 10 aa, Artificial Sequence
  Description of Artificial Sequence: Synthetic epitope
LGNWKAIMAH

SEQ ID NO: 26329 - protein, 10 aa, Artificial Sequence
  Description of Artificial Sequence: Synthetic epitope
LGPALKDAML

SEQ ID NO: 26330 - protein, 10 aa, Artificial Sequence
  Description of Artificial Sequence: Synthetic epitope
LGPASLSFEL

SEQ ID NO: 26331 - protein, 10 aa, Artificial Sequence
  Description of Artificial Sequence: Synthetic epitope
LGPKITYQVP

SEQ ID NO: 26332 - protein, 10 aa, Artificial Sequence
  Description of Artificial Sequence: Synthetic epitope
LGQITKGKDG

SEQ ID NO: 26333 - protein, 10 aa, Artificial Sequence
  Description of Artificial Sequence: Synthetic epitope
LGQKFFMERS

SEQ ID NO: 26334 - protein, 10 aa, Artificial Sequence
  Description of Artificial Sequence: Synthetic epitope
LGQLNAEHAE

SEQ ID NO: 26335 - protein, 10 aa, Artificial Sequence
  Description of Artificial Sequence: Synthetic epitope
LGQNVSTKSP

SEQ ID NO: 26336 - protein, 10 aa, Artificial Sequence
  Description of Artificial Sequence: Synthetic epitope
LGQSQSQADE

SEQ ID NO: 26337 - protein, 10 aa, Artificial Sequence
  Description of Artificial Sequence: Synthetic epitope
LGRADALRVL

SEQ ID NO: 26338 - protein, 10 aa, Artificial Sequence
  Description of Artificial Sequence: Synthetic epitope
LGREGVQKED

SEQ ID NO: 26339 - protein, 10 aa, Artificial Sequence
  Description of Artificial Sequence: Synthetic epitope
LGRILSLTSS

SEQ ID NO: 26340 - protein, 10 aa, Artificial Sequence
  Description of Artificial Sequence: Synthetic epitope
LGRKKAKVDE

SEQ ID NO: 26341 - protein, 10 aa, Artificial Sequence
  Description of Artificial Sequence: Synthetic epitope
LGRKNEMEKQ

SEQ ID NO: 26342 - protein, 10 aa, Artificial Sequence
  Description of Artificial Sequence: Synthetic epitope
LGRLEAAEAA

SEQ ID NO: 26343 - protein, 10 aa, Artificial Sequence
  Description of Artificial Sequence: Synthetic epitope
LGRQTMLTQS

SEQ ID NO: 26344 - protein, 10 aa, Artificial Sequence
  Description of Artificial Sequence: Synthetic epitope
LGRTNISDEE

SEQ ID NO: 26345 - protein, 10 aa, Artificial Sequence
  Description of Artificial Sequence: Synthetic epitope
LGRYQTKTML

SEQ ID NO: 26346 - protein, 10 aa, Artificial Sequence
  Description of Artificial Sequence: Synthetic epitope
LGSASVTTRS

SEQ ID NO: 26347 - protein, 10 aa, Artificial Sequence
  Description of Artificial Sequence: Synthetic epitope
LGSKSKGHYE

SEQ ID NO: 26348 - protein, 10 aa, Artificial Sequence
  Description of Artificial Sequence: Synthetic epitope
LGSLRTAQTQ

SEQ ID NO: 26349 - protein, 10 aa, Artificial Sequence
  Description of Artificial Sequence: Synthetic epitope
LGSQRQAIQQ

SEQ ID NO: 26350 - protein, 10 aa, Artificial Sequence
  Description of Artificial Sequence: Synthetic epitope
LGSVLLSPTS

SEQ ID NO: 26351 - protein, 10 aa, Artificial Sequence
  Description of Artificial Sequence: Synthetic epitope
LGSYATYNQS

SEQ ID NO: 26352 - protein, 10 aa, Artificial Sequence
  Description of Artificial Sequence: Synthetic epitope
LGTNSSESRK

SEQ ID NO: 26353 - protein, 10 aa, Artificial Sequence
  Description of Artificial Sequence: Synthetic epitope
LGTRAQAANG

SEQ ID NO: 26354 - protein, 10 aa, Artificial Sequence
  Description of Artificial Sequence: Synthetic epitope
LGTYISLIAE

SEQ ID NO: 26355 - protein, 10 aa, Artificial Sequence
  Description of Artificial Sequence: Synthetic epitope
LGVATSKNNS

SEQ ID NO: 26356 - protein, 10 aa, Artificial Sequence
  Description of Artificial Sequence: Synthetic epitope
LGVSAPQMQK

SEQ ID NO: 26357 - protein, 10 aa, Artificial Sequence
  Description of Artificial Sequence: Synthetic epitope
LGVSVRSWDE

SEQ ID NO: 26358 - protein, 10 aa, Artificial Sequence
  Description of Artificial Sequence: Synthetic epitope
LHDEMLHWFR

SEQ ID NO: 26359 - protein, 10 aa, Artificial Sequence
  Description of Artificial Sequence: Synthetic epitope
LHDTSLTQKD

SEQ ID NO: 26360 - protein, 10 aa, Artificial Sequence
  Description of Artificial Sequence: Synthetic epitope
LHEAQEKNEK

SEQ ID NO: 26361 - protein, 10 aa, Artificial Sequence
  Description of Artificial Sequence: Synthetic epitope
LHELLSRKLA

SEQ ID NO: 26362 - protein, 10 aa, Artificial Sequence
  Description of Artificial Sequence: Synthetic epitope
LHEQKKRKSQ

SEQ ID NO: 26363 - protein, 10 aa, Artificial Sequence
  Description of Artificial Sequence: Synthetic epitope
LHETVDATSE

SEQ ID NO: 26364 - protein, 10 aa, Artificial Sequence
  Description of Artificial Sequence: Synthetic epitope
LHFETTSASL

SEQ ID NO: 26365 - protein, 10 aa, Artificial Sequence
  Description of Artificial Sequence: Synthetic epitope
LHFTLRFDEL

SEQ ID NO: 26366 - protein, 10 aa, Artificial Sequence
  Description of Artificial Sequence: Synthetic epitope
LHHKKAISEA

SEQ ID NO: 26367 - protein, 10 aa, Artificial Sequence
  Description of Artificial Sequence: Synthetic epitope
LHIVRKLSAE

SEQ ID NO: 26368 - protein, 10 aa, Artificial Sequence
  Description of Artificial Sequence: Synthetic epitope
LHKGTNDMKQ

SEQ ID NO: 26369 - protein, 10 aa, Artificial Sequence
  Description of Artificial Sequence: Synthetic epitope
LHKKTQSKHS

SEQ ID NO: 26370 - protein, 10 aa, Artificial Sequence
  Description of Artificial Sequence: Synthetic epitope
LHKREIKNNQ

SEQ ID NO: 26371 - protein, 10 aa, Artificial Sequence
  Description of Artificial Sequence: Synthetic epitope
LHLKIDVEKN

SEQ ID NO: 26372 - protein, 10 aa, Artificial Sequence
  Description of Artificial Sequence: Synthetic epitope
LHLKSDAEFK

SEQ ID NO: 26373 - protein, 10 aa, Artificial Sequence
  Description of Artificial Sequence: Synthetic epitope
LHLLQSLMAQ

SEQ ID NO: 26374 - protein, 10 aa, Artificial Sequence
  Description of Artificial Sequence: Synthetic epitope
LHLSQFNSMS

SEQ ID NO: 26375 - protein, 10 aa, Artificial Sequence
  Description of Artificial Sequence: Synthetic epitope
LHMSNMSDQG

SEQ ID NO: 26376 - protein, 10 aa, Artificial Sequence
  Description of Artificial Sequence: Synthetic epitope
LHNESKGSPT

SEQ ID NO: 26377 - protein, 10 aa, Artificial Sequence
  Description of Artificial Sequence: Synthetic epitope
LHPSSKIAKE

SEQ ID NO: 26378 - protein, 10 aa, Artificial Sequence
  Description of Artificial Sequence: Synthetic epitope
LHQQLKIKNP

SEQ ID NO: 26379 - protein, 10 aa, Artificial Sequence
  Description of Artificial Sequence: Synthetic epitope
LHRALAVDAD

SEQ ID NO: 26380 - protein, 10 aa, Artificial Sequence
  Description of Artificial Sequence: Synthetic epitope
LHRTQKRHSR

SEQ ID NO: 26381 - protein, 10 aa, Artificial Sequence
  Description of Artificial Sequence: Synthetic epitope
LHSSLRLGRN

SEQ ID NO: 26382 - protein, 10 aa, Artificial Sequence
  Description of Artificial Sequence: Synthetic epitope
LHTEARARHA

SEQ ID NO: 26383 - protein, 10 aa, Artificial Sequence
  Description of Artificial Sequence: Synthetic epitope
LHTRAEAEAP

SEQ ID NO: 26384 - protein, 10 aa, Artificial Sequence
  Description of Artificial Sequence: Synthetic epitope
LHVLESLSSR

SEQ ID NO: 26385 - protein, 10 aa, Artificial Sequence
  Description of Artificial Sequence: Synthetic epitope
LIAASQSFLQ

SEQ ID NO: 26386 - protein, 10 aa, Artificial Sequence
  Description of Artificial Sequence: Synthetic epitope
LIAESKQSDS

SEQ ID NO: 26387 - protein, 10 aa, Artificial Sequence
  Description of Artificial Sequence: Synthetic epitope
LIAQGLLESE

SEQ ID NO: 26388 - protein, 10 aa, Artificial Sequence
  Description of Artificial Sequence: Synthetic epitope
LIAQSISPAA

SEQ ID NO: 26389 - protein, 10 aa, Artificial Sequence
  Description of Artificial Sequence: Synthetic epitope
LIASTVAGVV

SEQ ID NO: 26390 - protein, 10 aa, Artificial Sequence
  Description of Artificial Sequence: Synthetic epitope
LIATSSTAAT

SEQ ID NO: 26391 - protein, 10 aa, Artificial Sequence
  Description of Artificial Sequence: Synthetic epitope
LIDDIEVQGH

SEQ ID NO: 26392 - protein, 10 aa, Artificial Sequence
  Description of Artificial Sequence: Synthetic epitope
LIDEDRLLSR

SEQ ID NO: 26393 - protein, 10 aa, Artificial Sequence
  Description of Artificial Sequence: Synthetic epitope
LIEAVETAVM

SEQ ID NO: 26394 - protein, 10 aa, Artificial Sequence
  Description of Artificial Sequence: Synthetic epitope
LIFQVRHTYE

SEQ ID NO: 26395 - protein, 10 aa, Artificial Sequence
  Description of Artificial Sequence: Synthetic epitope
LIGNESKGEH

SEQ ID NO: 26396 - protein, 10 aa, Artificial Sequence
  Description of Artificial Sequence: Synthetic epitope
LIIKKVERKN

SEQ ID NO: 26397 - protein, 10 aa, Artificial Sequence
  Description of Artificial Sequence: Synthetic epitope
LIILWITLPP

SEQ ID NO: 26398 - protein, 10 aa, Artificial Sequence
  Description of Artificial Sequence: Synthetic epitope
LIKESEVKAL

SEQ ID NO: 26399 - protein, 10 aa, Artificial Sequence
  Description of Artificial Sequence: Synthetic epitope
LIKEVKEAKA

SEQ ID NO: 26400 - protein, 10 aa, Artificial Sequence
  Description of Artificial Sequence: Synthetic epitope
LIKIMSMQGQ

SEQ ID NO: 26401 - protein, 10 aa, Artificial Sequence
  Description of Artificial Sequence: Synthetic epitope
LIKMGEELSQ

SEQ ID NO: 26402 - protein, 10 aa, Artificial Sequence
  Description of Artificial Sequence: Synthetic epitope
LIKRVQVSQE

SEQ ID NO: 26403 - protein, 10 aa, Artificial Sequence
  Description of Artificial Sequence: Synthetic epitope
LIKVAEAEKQ

SEQ ID NO: 26404 - protein, 10 aa, Artificial Sequence
  Description of Artificial Sequence: Synthetic epitope
LILEATSVPD

SEQ ID NO: 26405 - protein, 10 aa, Artificial Sequence
  Description of Artificial Sequence: Synthetic epitope
LILEKLELQS

SEQ ID NO: 26406 - protein, 10 aa, Artificial Sequence
  Description of Artificial Sequence: Synthetic epitope
LILKSAMSEI

SEQ ID NO: 26407 - protein, 10 aa, Artificial Sequence
  Description of Artificial Sequence: Synthetic epitope
LILMNARGSS

SEQ ID NO: 26408 - protein, 10 aa, Artificial Sequence
  Description of Artificial Sequence: Synthetic epitope
LILRKASELG

SEQ ID NO: 26409 - protein, 10 aa, Artificial Sequence
  Description of Artificial Sequence: Synthetic epitope
LINSRASAPS

SEQ ID NO: 26410 - protein, 10 aa, Artificial Sequence
  Description of Artificial Sequence: Synthetic epitope
LIPEMRTDTY

SEQ ID NO: 26411 - protein, 10 aa, Artificial Sequence
  Description of Artificial Sequence: Synthetic epitope
LIQEKEFRTM

SEQ ID NO: 26412 - protein, 10 aa, Artificial Sequence
  Description of Artificial Sequence: Synthetic epitope
LIQQLASDLG

SEQ ID NO: 26413 - protein, 10 aa, Artificial Sequence
  Description of Artificial Sequence: Synthetic epitope
LIQYVRDRSP

SEQ ID NO: 26414 - protein, 10 aa, Artificial Sequence
  Description of Artificial Sequence: Synthetic epitope
LIREDKSNAK

SEQ ID NO: 26415 - protein, 10 aa, Artificial Sequence
  Description of Artificial Sequence: Synthetic epitope
LIRELTASHA

SEQ ID NO: 26416 - protein, 10 aa, Artificial Sequence
  Description of Artificial Sequence: Synthetic epitope
LIRIKPLKLP

SEQ ID NO: 26417 - protein, 10 aa, Artificial Sequence
  Description of Artificial Sequence: Synthetic epitope
LISEKDPVKK

SEQ ID NO: 26418 - protein, 10 aa, Artificial Sequence
  Description of Artificial Sequence: Synthetic epitope
LISMAALENL

SEQ ID NO: 26419 - protein, 10 aa, Artificial Sequence
  Description of Artificial Sequence: Synthetic epitope
LISNSTLLKD

SEQ ID NO: 26420 - protein, 10 aa, Artificial Sequence
  Description of Artificial Sequence: Synthetic epitope
LISPISVMSP

SEQ ID NO: 26421 - protein, 10 aa, Artificial Sequence
  Description of Artificial Sequence: Synthetic epitope
LISQAGLKAD

SEQ ID NO: 26422 - protein, 10 aa, Artificial Sequence
  Description of Artificial Sequence: Synthetic epitope
LITKMTDELY

SEQ ID NO: 26423 - protein, 10 aa, Artificial Sequence
  Description of Artificial Sequence: Synthetic epitope
LIVKQKLKAE

SEQ ID NO: 26424 - protein, 10 aa, Artificial Sequence
  Description of Artificial Sequence: Synthetic epitope
LKAADEQMAL

SEQ ID NO: 26425 - protein, 10 aa, Artificial Sequence
  Description of Artificial Sequence: Synthetic epitope
LKAEALIKLS

SEQ ID NO: 26426 - protein, 10 aa, Artificial Sequence
  Description of Artificial Sequence: Synthetic epitope
LKAEESRSLR

SEQ ID NO: 26427 - protein, 10 aa, Artificial Sequence
  Description of Artificial Sequence: Synthetic epitope
LKAEISKAVK

SEQ ID NO: 26428 - protein, 10 aa, Artificial Sequence
  Description of Artificial Sequence: Synthetic epitope
LKAEKLAAQE

SEQ ID NO: 26429 - protein, 10 aa, Artificial Sequence
  Description of Artificial Sequence: Synthetic epitope
LKAEKRKLIK

SEQ ID NO: 26430 - protein, 10 aa, Artificial Sequence
  Description of Artificial Sequence: Synthetic epitope
LKAELSLEAI

SEQ ID NO: 26431 - protein, 10 aa, Artificial Sequence
  Description of Artificial Sequence: Synthetic epitope
LKAFVGAFKK

SEQ ID NO: 26432 - protein, 10 aa, Artificial Sequence
  Description of Artificial Sequence: Synthetic epitope
LKAIVAFKTL

SEQ ID NO: 26433 - protein, 10 aa, Artificial Sequence
  Description of Artificial Sequence: Synthetic epitope
LKAKLQMTEA

SEQ ID NO: 26434 - protein, 10 aa, Artificial Sequence
  Description of Artificial Sequence: Synthetic epitope
LKAKQLIKKD

SEQ ID NO: 26435 - protein, 10 aa, Artificial Sequence
  Description of Artificial Sequence: Synthetic epitope
LKAKQRTEKR

SEQ ID NO: 26436 - protein, 10 aa, Artificial Sequence
  Description of Artificial Sequence: Synthetic epitope
LKALEAMKNK

SEQ ID NO: 26437 - protein, 10 aa, Artificial Sequence
  Description of Artificial Sequence: Synthetic epitope
LKALEIAQEM

SEQ ID NO: 26438 - protein, 10 aa, Artificial Sequence
  Description of Artificial Sequence: Synthetic epitope
LKALKTEFTT

SEQ ID NO: 26439 - protein, 10 aa, Artificial Sequence
  Description of Artificial Sequence: Synthetic epitope
LKALVTSRSA

SEQ ID NO: 26440 - protein, 10 aa, Artificial Sequence
  Description of Artificial Sequence: Synthetic epitope
LKANHVVKRD

SEQ ID NO: 26441 - protein, 10 aa, Artificial Sequence
  Description of Artificial Sequence: Synthetic epitope
LKARAVSDKF

SEQ ID NO: 26442 - protein, 10 aa, Artificial Sequence
  Description of Artificial Sequence: Synthetic epitope
LKARTTINFS

SEQ ID NO: 26443 - protein, 10 aa, Artificial Sequence
  Description of Artificial Sequence: Synthetic epitope
LKASFKKTER

SEQ ID NO: 26444 - protein, 10 aa, Artificial Sequence
  Description of Artificial Sequence: Synthetic epitope
LKATDVNEKV

SEQ ID NO: 26445 - protein, 10 aa, Artificial Sequence
  Description of Artificial Sequence: Synthetic epitope
LKDSSAGVAD

SEQ ID NO: 26446 - protein, 10 aa, Artificial Sequence
  Description of Artificial Sequence: Synthetic epitope
LKDSSLLTLP

SEQ ID NO: 26447 - protein, 10 aa, Artificial Sequence
  Description of Artificial Sequence: Synthetic epitope
LKEAQLISKQ

SEQ ID NO: 26448 - protein, 10 aa, Artificial Sequence
  Description of Artificial Sequence: Synthetic epitope
LKEASMVITE

SEQ ID NO: 26449 - protein, 10 aa, Artificial Sequence
  Description of Artificial Sequence: Synthetic epitope
LKEEAAMKAK

SEQ ID NO: 26450 - protein, 10 aa, Artificial Sequence
  Description of Artificial Sequence: Synthetic epitope
LKEERKILEN

SEQ ID NO: 26451 - protein, 10 aa, Artificial Sequence
  Description of Artificial Sequence: Synthetic epitope
LKEFKAMAPA

SEQ ID NO: 26452 - protein, 10 aa, Artificial Sequence
  Description of Artificial Sequence: Synthetic epitope
LKEHQTSAYS

SEQ ID NO: 26453 - protein, 10 aa, Artificial Sequence
  Description of Artificial Sequence: Synthetic epitope
LKEIPYTKIE

SEQ ID NO: 26454 - protein, 10 aa, Artificial Sequence
  Description of Artificial Sequence: Synthetic epitope
LKEKKAMTAE

SEQ ID NO: 26455 - protein, 10 aa, Artificial Sequence
  Description of Artificial Sequence: Synthetic epitope
LKEKQALKSQ

SEQ ID NO: 26456 - protein, 10 aa, Artificial Sequence
  Description of Artificial Sequence: Synthetic epitope
LKENSSEVVQ

SEQ ID NO: 26457 - protein, 10 aa, Artificial Sequence
  Description of Artificial Sequence: Synthetic epitope
LKEQLTKVKE

SEQ ID NO: 26458 - protein, 10 aa, Artificial Sequence
  Description of Artificial Sequence: Synthetic epitope
LKEQLVLSSK

SEQ ID NO: 26459 - protein, 10 aa, Artificial Sequence
  Description of Artificial Sequence: Synthetic epitope
LKEQMRVSHE

SEQ ID NO: 26460 - protein, 10 aa, Artificial Sequence
  Description of Artificial Sequence: Synthetic epitope
LKEQSLAAES

SEQ ID NO: 26461 - protein, 10 aa, Artificial Sequence
  Description of Artificial Sequence: Synthetic epitope
LKESMKLALR

SEQ ID NO: 26462 - protein, 10 aa, Artificial Sequence
  Description of Artificial Sequence: Synthetic epitope
LKETEPVEAY

SEQ ID NO: 26463 - protein, 10 aa, Artificial Sequence
  Description of Artificial Sequence: Synthetic epitope
LKFATNEAIQ

SEQ ID NO: 26464 - protein, 10 aa, Artificial Sequence
  Description of Artificial Sequence: Synthetic epitope
LKFKQTADDS

SEQ ID NO: 26465 - protein, 10 aa, Artificial Sequence
  Description of Artificial Sequence: Synthetic epitope
LKFRSQLISQ

SEQ ID NO: 26466 - protein, 10 aa, Artificial Sequence
  Description of Artificial Sequence: Synthetic epitope
LKGEENKTTL

SEQ ID NO: 26467 - protein, 10 aa, Artificial Sequence
  Description of Artificial Sequence: Synthetic epitope
LKGEVISSGS

SEQ ID NO: 26468 - protein, 10 aa, Artificial Sequence
  Description of Artificial Sequence: Synthetic epitope
LKGMQAASSK

SEQ ID NO: 26469 - protein, 10 aa, Artificial Sequence
  Description of Artificial Sequence: Synthetic epitope
LKGNTAILKV

SEQ ID NO: 26470 - protein, 10 aa, Artificial Sequence
  Description of Artificial Sequence: Synthetic epitope
LKHEATSEEV

SEQ ID NO: 26471 - protein, 10 aa, Artificial Sequence
  Description of Artificial Sequence: Synthetic epitope
LKHQSIIKSQ

SEQ ID NO: 26472 - protein, 10 aa, Artificial Sequence
  Description of Artificial Sequence: Synthetic epitope
LKHVRNSRGL

SEQ ID NO: 26473 - protein, 10 aa, Artificial Sequence
  Description of Artificial Sequence: Synthetic epitope
LKIAANVARS

SEQ ID NO: 26474 - protein, 10 aa, Artificial Sequence
  Description of Artificial Sequence: Synthetic epitope
LKIDTKEKKE

SEQ ID NO: 26475 - protein, 10 aa, Artificial Sequence
  Description of Artificial Sequence: Synthetic epitope
LKIEDTIQSE

SEQ ID NO: 26476 - protein, 10 aa, Artificial Sequence
  Description of Artificial Sequence: Synthetic epitope
LKIKPRNITR

SEQ ID NO: 26477 - protein, 10 aa, Artificial Sequence
  Description of Artificial Sequence: Synthetic epitope
LKIKSQGSVN

SEQ ID NO: 26478 - protein, 10 aa, Artificial Sequence
  Description of Artificial Sequence: Synthetic epitope
LKINRYSSAE

SEQ ID NO: 26479 - protein, 10 aa, Artificial Sequence
  Description of Artificial Sequence: Synthetic epitope
LKISRALQAR

SEQ ID NO: 26480 - protein, 10 aa, Artificial Sequence
  Description of Artificial Sequence: Synthetic epitope
LKISTRLNLL

SEQ ID NO: 26481 - protein, 10 aa, Artificial Sequence
  Description of Artificial Sequence: Synthetic epitope
LKITQELTFL

SEQ ID NO: 26482 - protein, 10 aa, Artificial Sequence
  Description of Artificial Sequence: Synthetic epitope
LKKAIFSPEL

SEQ ID NO: 26483 - protein, 10 aa, Artificial Sequence
  Description of Artificial Sequence: Synthetic epitope
LKKATIRKEQ

SEQ ID NO: 26484 - protein, 10 aa, Artificial Sequence
  Description of Artificial Sequence: Synthetic epitope
LKKDLVQGEH

SEQ ID NO: 26485 - protein, 10 aa, Artificial Sequence
  Description of Artificial Sequence: Synthetic epitope
LKKDTYIENE

SEQ ID NO: 26486 - protein, 10 aa, Artificial Sequence
  Description of Artificial Sequence: Synthetic epitope
LKKEATLHDR

SEQ ID NO: 26487 - protein, 10 aa, Artificial Sequence
  Description of Artificial Sequence: Synthetic epitope
LKKENIKMKQ

SEQ ID NO: 26488 - protein, 10 aa, Artificial Sequence
  Description of Artificial Sequence: Synthetic epitope
LKKIDRIPER

SEQ ID NO: 26489 - protein, 10 aa, Artificial Sequence
  Description of Artificial Sequence: Synthetic epitope
LKKLDVAKKS

SEQ ID NO: 26490 - protein, 10 aa, Artificial Sequence
  Description of Artificial Sequence: Synthetic epitope
LKKLIRRTKD

SEQ ID NO: 26491 - protein, 10 aa, Artificial Sequence
  Description of Artificial Sequence: Synthetic epitope
LKKLLGMQQE

SEQ ID NO: 26492 - protein, 10 aa, Artificial Sequence
  Description of Artificial Sequence: Synthetic epitope
LKKLTAEINQ

SEQ ID NO: 26493 - protein, 10 aa, Artificial Sequence
  Description of Artificial Sequence: Synthetic epitope
LKKQVSVSST

SEQ ID NO: 26494 - protein, 10 aa, Artificial Sequence
  Description of Artificial Sequence: Synthetic epitope
LKKRKKMRVM

SEQ ID NO: 26495 - protein, 10 aa, Artificial Sequence
  Description of Artificial Sequence: Synthetic epitope
LKKSISSRLG

SEQ ID NO: 26496 - protein, 10 aa, Artificial Sequence
  Description of Artificial Sequence: Synthetic epitope
LKKSKESESF

SEQ ID NO: 26497 - protein, 10 aa, Artificial Sequence
  Description of Artificial Sequence: Synthetic epitope
LKKSLEIKEE

SEQ ID NO: 26498 - protein, 10 aa, Artificial Sequence
  Description of Artificial Sequence: Synthetic epitope
LKKSLKVKTR

SEQ ID NO: 26499 - protein, 10 aa, Artificial Sequence
  Description of Artificial Sequence: Synthetic epitope
LKKSLLATMK

SEQ ID NO: 26500 - protein, 10 aa, Artificial Sequence
  Description of Artificial Sequence: Synthetic epitope
LKKSRKEEAG

SEQ ID NO: 26501 - protein, 10 aa, Artificial Sequence
  Description of Artificial Sequence: Synthetic epitope
LKKTSITQQP

SEQ ID NO: 26502 - protein, 10 aa, Artificial Sequence
  Description of Artificial Sequence: Synthetic epitope
LKKTVAMSNL

SEQ ID NO: 26503 - protein, 10 aa, Artificial Sequence
  Description of Artificial Sequence: Synthetic epitope
LKLAEVKAVV

SEQ ID NO: 26504 - protein, 10 aa, Artificial Sequence
  Description of Artificial Sequence: Synthetic epitope
LKLAKDSSAD

SEQ ID NO: 26505 - protein, 10 aa, Artificial Sequence
  Description of Artificial Sequence: Synthetic epitope
LKLARTVSRQ

SEQ ID NO: 26506 - protein, 10 aa, Artificial Sequence
  Description of Artificial Sequence: Synthetic epitope
LKLDELQASD

SEQ ID NO: 26507 - protein, 10 aa, Artificial Sequence
  Description of Artificial Sequence: Synthetic epitope
LKLDTEAQTK

SEQ ID NO: 26508 - protein, 10 aa, Artificial Sequence
  Description of Artificial Sequence: Synthetic epitope
LKLDVNASRQ

SEQ ID NO: 26509 - protein, 10 aa, Artificial Sequence
  Description of Artificial Sequence: Synthetic epitope
LKLDVNASRQ

SEQ ID NO: 26510 - protein, 10 aa, Artificial Sequence
  Description of Artificial Sequence: Synthetic epitope
LKLESELENK

SEQ ID NO: 26511 - protein, 10 aa, Artificial Sequence
  Description of Artificial Sequence: Synthetic epitope
LKLFRLSFKK

SEQ ID NO: 26512 - protein, 10 aa, Artificial Sequence
  Description of Artificial Sequence: Synthetic epitope
LKLGIENKAM

SEQ ID NO: 26513 - protein, 10 aa, Artificial Sequence
  Description of Artificial Sequence: Synthetic epitope
LKLKESTERT

SEQ ID NO: 26514 - protein, 10 aa, Artificial Sequence
  Description of Artificial Sequence: Synthetic epitope
LKLKIKQEAG

SEQ ID NO: 26515 - protein, 10 aa, Artificial Sequence
  Description of Artificial Sequence: Synthetic epitope
LKLKSLLSTK

SEQ ID NO: 26516 - protein, 10 aa, Artificial Sequence
  Description of Artificial Sequence: Synthetic epitope
LKLKSLLSTK

SEQ ID NO: 26517 - protein, 10 aa, Artificial Sequence
  Description of Artificial Sequence: Synthetic epitope
LKLLAALQGD

SEQ ID NO: 26518 - protein, 10 aa, Artificial Sequence
  Description of Artificial Sequence: Synthetic epitope
LKLMSTSNTW

SEQ ID NO: 26519 - protein, 10 aa, Artificial Sequence
  Description of Artificial Sequence: Synthetic epitope
LKLNQLKFRK

SEQ ID NO: 26520 - protein, 10 aa, Artificial Sequence
  Description of Artificial Sequence: Synthetic epitope
LKLNRSVQGT

SEQ ID NO: 26521 - protein, 10 aa, Artificial Sequence
  Description of Artificial Sequence: Synthetic epitope
LKLPAAMLAA

SEQ ID NO: 26522 - protein, 10 aa, Artificial Sequence
  Description of Artificial Sequence: Synthetic epitope
LKLQSAAQSV

SEQ ID NO: 26523 - protein, 10 aa, Artificial Sequence
  Description of Artificial Sequence: Synthetic epitope
LKLRASVSTK

SEQ ID NO: 26524 - protein, 10 aa, Artificial Sequence
  Description of Artificial Sequence: Synthetic epitope
LKLRKSSGKG

SEQ ID NO: 26525 - protein, 10 aa, Artificial Sequence
  Description of Artificial Sequence: Synthetic epitope
LKLRSKVTNS

SEQ ID NO: 26526 - protein, 10 aa, Artificial Sequence
  Description of Artificial Sequence: Synthetic epitope
LKLTHVTALK

SEQ ID NO: 26527 - protein, 10 aa, Artificial Sequence
  Description of Artificial Sequence: Synthetic epitope
LKLVLRKEKA

SEQ ID NO: 26528 - protein, 10 aa, Artificial Sequence
  Description of Artificial Sequence: Synthetic epitope
LKMAQLADSP

SEQ ID NO: 26529 - protein, 10 aa, Artificial Sequence
  Description of Artificial Sequence: Synthetic epitope
LKMFGERARS

SEQ ID NO: 26530 - protein, 10 aa, Artificial Sequence
  Description of Artificial Sequence: Synthetic epitope
LKMLNLFYQT

SEQ ID NO: 26531 - protein, 10 aa, Artificial Sequence
  Description of Artificial Sequence: Synthetic epitope
LKMLSELKDE

SEQ ID NO: 26532 - protein, 10 aa, Artificial Sequence
  Description of Artificial Sequence: Synthetic epitope
LKMPGVNAKN

SEQ ID NO: 26533 - protein, 10 aa, Artificial Sequence
  Description of Artificial Sequence: Synthetic epitope
LKMRVVFPEG

SEQ ID NO: 26534 - protein, 10 aa, Artificial Sequence
  Description of Artificial Sequence: Synthetic epitope
LKMTAHQKKE

SEQ ID NO: 26535 - protein, 10 aa, Artificial Sequence
  Description of Artificial Sequence: Synthetic epitope
LKNARIAPAA

SEQ ID NO: 26536 - protein, 10 aa, Artificial Sequence
  Description of Artificial Sequence: Synthetic epitope
LKNESSEVKS

SEQ ID NO: 26537 - protein, 10 aa, Artificial Sequence
  Description of Artificial Sequence: Synthetic epitope
LKNIKAATNH

SEQ ID NO: 26538 - protein, 10 aa, Artificial Sequence
  Description of Artificial Sequence: Synthetic epitope
LKNTISVKAV

SEQ ID NO: 26539 - protein, 10 aa, Artificial Sequence
  Description of Artificial Sequence: Synthetic epitope
LKNVQKVAQS

SEQ ID NO: 26540 - protein, 10 aa, Artificial Sequence
  Description of Artificial Sequence: Synthetic epitope
LKPATKTAEL

SEQ ID NO: 26541 - protein, 10 aa, Artificial Sequence
  Description of Artificial Sequence: Synthetic epitope
LKPGNSKAAK

SEQ ID NO: 26542 - protein, 10 aa, Artificial Sequence
  Description of Artificial Sequence: Synthetic epitope
LKPINTTGTL

SEQ ID NO: 26543 - protein, 10 aa, Artificial Sequence
  Description of Artificial Sequence: Synthetic epitope
LKPKVQAVQL

SEQ ID NO: 26544 - protein, 10 aa, Artificial Sequence
  Description of Artificial Sequence: Synthetic epitope
LKPSQAAQAI

SEQ ID NO: 26545 - protein, 10 aa, Artificial Sequence
  Description of Artificial Sequence: Synthetic epitope
LKPTASKLGA

SEQ ID NO: 26546 - protein, 10 aa, Artificial Sequence
  Description of Artificial Sequence: Synthetic epitope
LKPTVKMLER

SEQ ID NO: 26547 - protein, 10 aa, Artificial Sequence
  Description of Artificial Sequence: Synthetic epitope
LKQAADLTQE

SEQ ID NO: 26548 - protein, 10 aa, Artificial Sequence
  Description of Artificial Sequence: Synthetic epitope
LKQESIDKKR

SEQ ID NO: 26549 - protein, 10 aa, Artificial Sequence
  Description of Artificial Sequence: Synthetic epitope
LKQLLALKGS

SEQ ID NO: 26550 - protein, 10 aa, Artificial Sequence
  Description of Artificial Sequence: Synthetic epitope
LKQLTKTGKA

SEQ ID NO: 26551 - protein, 10 aa, Artificial Sequence
  Description of Artificial Sequence: Synthetic epitope
LKQQKKDVVK

SEQ ID NO: 26552 - protein, 10 aa, Artificial Sequence
  Description of Artificial Sequence: Synthetic epitope
LKQQRESTQA

SEQ ID NO: 26553 - protein, 10 aa, Artificial Sequence
  Description of Artificial Sequence: Synthetic epitope
LKQQSTKVEA

SEQ ID NO: 26554 - protein, 10 aa, Artificial Sequence
  Description of Artificial Sequence: Synthetic epitope
LKQTEMLTQQ

SEQ ID NO: 26555 - protein, 10 aa, Artificial Sequence
  Description of Artificial Sequence: Synthetic epitope
LKQTKLVQLL

SEQ ID NO: 26556 - protein, 10 aa, Artificial Sequence
  Description of Artificial Sequence: Synthetic epitope
LKRETTESEK

SEQ ID NO: 26557 - protein, 10 aa, Artificial Sequence
  Description of Artificial Sequence: Synthetic epitope
LKRNKLKKSE

SEQ ID NO: 26558 - protein, 10 aa, Artificial Sequence
  Description of Artificial Sequence: Synthetic epitope
LKRQEQMAIK

SEQ ID NO: 26559 - protein, 10 aa, Artificial Sequence
  Description of Artificial Sequence: Synthetic epitope
LKRQSNVAAP

SEQ ID NO: 26560 - protein, 10 aa, Artificial Sequence
  Description of Artificial Sequence: Synthetic epitope
LKRSEENSSK

SEQ ID NO: 26561 - protein, 10 aa, Artificial Sequence
  Description of Artificial Sequence: Synthetic epitope
LKRSRSKFQK

SEQ ID NO: 26562 - protein, 10 aa, Artificial Sequence
  Description of Artificial Sequence: Synthetic epitope
LKRTEIISRS

SEQ ID NO: 26563 - protein, 10 aa, Artificial Sequence
  Description of Artificial Sequence: Synthetic epitope
LKRTKQTATK

SEQ ID NO: 26564 - protein, 10 aa, Artificial Sequence
  Description of Artificial Sequence: Synthetic epitope
LKSASMVLAE

SEQ ID NO: 26565 - protein, 10 aa, Artificial Sequence
  Description of Artificial Sequence: Synthetic epitope
LKSEDIKIRQ

SEQ ID NO: 26566 - protein, 10 aa, Artificial Sequence
  Description of Artificial Sequence: Synthetic epitope
LKSEETSKNQ

SEQ ID NO: 26567 - protein, 10 aa, Artificial Sequence
  Description of Artificial Sequence: Synthetic epitope
LKSEIKKSSG

SEQ ID NO: 26568 - protein, 10 aa, Artificial Sequence
  Description of Artificial Sequence: Synthetic epitope
LKSIASADMD

SEQ ID NO: 26569 - protein, 10 aa, Artificial Sequence
  Description of Artificial Sequence: Synthetic epitope
LKSIEIMPSQ

SEQ ID NO: 26570 - protein, 10 aa, Artificial Sequence
  Description of Artificial Sequence: Synthetic epitope
LKSKAAEDKN

SEQ ID NO: 26571 - protein, 10 aa, Artificial Sequence
  Description of Artificial Sequence: Synthetic epitope
LKSKEISSPV

SEQ ID NO: 26572 - protein, 10 aa, Artificial Sequence
  Description of Artificial Sequence: Synthetic epitope
LKSKRISTKK

SEQ ID NO: 26573 - protein, 10 aa, Artificial Sequence
  Description of Artificial Sequence: Synthetic epitope
LKSKRQSHKY

SEQ ID NO: 26574 - protein, 10 aa, Artificial Sequence
  Description of Artificial Sequence: Synthetic epitope
LKSKRSTEKK

SEQ ID NO: 26575 - protein, 10 aa, Artificial Sequence
  Description of Artificial Sequence: Synthetic epitope
LKSKSTKAAT

SEQ ID NO: 26576 - protein, 10 aa, Artificial Sequence
  Description of Artificial Sequence: Synthetic epitope
LKSKSVLSGG

SEQ ID NO: 26577 - protein, 10 aa, Artificial Sequence
  Description of Artificial Sequence: Synthetic epitope
LKSLIMALSN

SEQ ID NO: 26578 - protein, 10 aa, Artificial Sequence
  Description of Artificial Sequence: Synthetic epitope
LKSLKTVKPS

SEQ ID NO: 26579 - protein, 10 aa, Artificial Sequence
  Description of Artificial Sequence: Synthetic epitope
LKSLTGLLSS

SEQ ID NO: 26580 - protein, 10 aa, Artificial Sequence
  Description of Artificial Sequence: Synthetic epitope
LKSNAKNMVT

SEQ ID NO: 26581 - protein, 10 aa, Artificial Sequence
  Description of Artificial Sequence: Synthetic epitope
LKSNAVQEAD

SEQ ID NO: 26582 - protein, 10 aa, Artificial Sequence
  Description of Artificial Sequence: Synthetic epitope
LKSPPSKNSD

SEQ ID NO: 26583 - protein, 10 aa, Artificial Sequence
  Description of Artificial Sequence: Synthetic epitope
LKSQLYINAS

SEQ ID NO: 26584 - protein, 10 aa, Artificial Sequence
  Description of Artificial Sequence: Synthetic epitope
LKSSRNSTSV

SEQ ID NO: 26585 - protein, 10 aa, Artificial Sequence
  Description of Artificial Sequence: Synthetic epitope
LKSTKSATPN

SEQ ID NO: 26586 - protein, 10 aa, Artificial Sequence
  Description of Artificial Sequence: Synthetic epitope
LKSTVSASPL

SEQ ID NO: 26587 - protein, 10 aa, Artificial Sequence
  Description of Artificial Sequence: Synthetic epitope
LKSVDSSIKK

SEQ ID NO: 26588 - protein, 10 aa, Artificial Sequence
  Description of Artificial Sequence: Synthetic epitope
LKSVEKATDG

SEQ ID NO: 26589 - protein, 10 aa, Artificial Sequence
  Description of Artificial Sequence: Synthetic epitope
LKSVLSQEYD

SEQ ID NO: 26590 - protein, 10 aa, Artificial Sequence
  Description of Artificial Sequence: Synthetic epitope
LKSVQNSHFK

SEQ ID NO: 26591 - protein, 10 aa, Artificial Sequence
  Description of Artificial Sequence: Synthetic epitope
LKSVSFRSFT

SEQ ID NO: 26592 - protein, 10 aa, Artificial Sequence
  Description of Artificial Sequence: Synthetic epitope
LKSVTNIKLG

SEQ ID NO: 26593 - protein, 10 aa, Artificial Sequence
  Description of Artificial Sequence: Synthetic epitope
LKTAAEAEEI

SEQ ID NO: 26594 - protein, 10 aa, Artificial Sequence
  Description of Artificial Sequence: Synthetic epitope
LKTAKALVED

SEQ ID NO: 26595 - protein, 10 aa, Artificial Sequence
  Description of Artificial Sequence: Synthetic epitope
LKTEKDEKEL

SEQ ID NO: 26596 - protein, 10 aa, Artificial Sequence
  Description of Artificial Sequence: Synthetic epitope
LKTEKSSEED

SEQ ID NO: 26597 - protein, 10 aa, Artificial Sequence
  Description of Artificial Sequence: Synthetic epitope
LKTHRQFSKT

SEQ ID NO: 26598 - protein, 10 aa, Artificial Sequence
  Description of Artificial Sequence: Synthetic epitope
LKTHVQVIKR

SEQ ID NO: 26599 - protein, 10 aa, Artificial Sequence
  Description of Artificial Sequence: Synthetic epitope
LKTISSLKQE

SEQ ID NO: 26600 - protein, 10 aa, Artificial Sequence
  Description of Artificial Sequence: Synthetic epitope
LKTKGVTDIK

SEQ ID NO: 26601 - protein, 10 aa, Artificial Sequence
  Description of Artificial Sequence: Synthetic epitope
LKTLAETLVN

SEQ ID NO: 26602 - protein, 10 aa, Artificial Sequence
  Description of Artificial Sequence: Synthetic epitope
LKTRTLSGMA

SEQ ID NO: 26603 - protein, 10 aa, Artificial Sequence
  Description of Artificial Sequence: Synthetic epitope
LKTSDALQLE

SEQ ID NO: 26604 - protein, 10 aa, Artificial Sequence
  Description of Artificial Sequence: Synthetic epitope
LKTSESITSN

SEQ ID NO: 26605 - protein, 10 aa, Artificial Sequence
  Description of Artificial Sequence: Synthetic epitope
LKVAADLQLS

SEQ ID NO: 26606 - protein, 10 aa, Artificial Sequence
  Description of Artificial Sequence: Synthetic epitope
LKVAAILQTH

SEQ ID NO: 26607 - protein, 10 aa, Artificial Sequence
  Description of Artificial Sequence: Synthetic epitope
LKVAEARFGG

SEQ ID NO: 26608 - protein, 10 aa, Artificial Sequence
  Description of Artificial Sequence: Synthetic epitope
LKVAGSLKEL

SEQ ID NO: 26609 - protein, 10 aa, Artificial Sequence
  Description of Artificial Sequence: Synthetic epitope
LKVEKDAATE

SEQ ID NO: 26610 - protein, 10 aa, Artificial Sequence
  Description of Artificial Sequence: Synthetic epitope
LKVGSTTNEA

SEQ ID NO: 26611 - protein, 10 aa, Artificial Sequence
  Description of Artificial Sequence: Synthetic epitope
LKVKKSREKR

SEQ ID NO: 26612 - protein, 10 aa, Artificial Sequence
  Description of Artificial Sequence: Synthetic epitope
LKVLNKVLAI

SEQ ID NO: 26613 - protein, 10 aa, Artificial Sequence
  Description of Artificial Sequence: Synthetic epitope
LKVLTEVSSE

SEQ ID NO: 26614 - protein, 10 aa, Artificial Sequence
  Description of Artificial Sequence: Synthetic epitope
LKVRPDATTK

SEQ ID NO: 26615 - protein, 10 aa, Artificial Sequence
  Description of Artificial Sequence: Synthetic epitope
LKVSHKHFEE

SEQ ID NO: 26616 - protein, 10 aa, Artificial Sequence
  Description of Artificial Sequence: Synthetic epitope
LKWEYQRASS

SEQ ID NO: 26617 - protein, 10 aa, Artificial Sequence
  Description of Artificial Sequence: Synthetic epitope
LKWFVVLEET

SEQ ID NO: 26618 - protein, 10 aa, Artificial Sequence
  Description of Artificial Sequence: Synthetic epitope
LKWSSDLKQE

SEQ ID NO: 26619 - protein, 10 aa, Artificial Sequence
  Description of Artificial Sequence: Synthetic epitope
LKYVMVVYKR

SEQ ID NO: 26620 - protein, 10 aa, Artificial Sequence
  Description of Artificial Sequence: Synthetic epitope
LLAAKALEPS

SEQ ID NO: 26621 - protein, 10 aa, Artificial Sequence
  Description of Artificial Sequence: Synthetic epitope
LLAARAIVAI

SEQ ID NO: 26622 - protein, 10 aa, Artificial Sequence
  Description of Artificial Sequence: Synthetic epitope
LLAFLKLIDE

SEQ ID NO: 26623 - protein, 10 aa, Artificial Sequence
  Description of Artificial Sequence: Synthetic epitope
LLAITAVLVA

SEQ ID NO: 26624 - protein, 10 aa, Artificial Sequence
  Description of Artificial Sequence: Synthetic epitope
LLAKEEDVAT

SEQ ID NO: 26625 - protein, 10 aa, Artificial Sequence
  Description of Artificial Sequence: Synthetic epitope
LLAKKAQAQP

SEQ ID NO: 26626 - protein, 10 aa, Artificial Sequence
  Description of Artificial Sequence: Synthetic epitope
LLAKKISQLG

SEQ ID NO: 26627 - protein, 10 aa, Artificial Sequence
  Description of Artificial Sequence: Synthetic epitope
LLAKQSKDEL

SEQ ID NO: 26628 - protein, 10 aa, Artificial Sequence
  Description of Artificial Sequence: Synthetic epitope
LLAKSAKGAA

SEQ ID NO: 26629 - protein, 10 aa, Artificial Sequence
  Description of Artificial Sequence: Synthetic epitope
LLANQRIADD

SEQ ID NO: 26630 - protein, 10 aa, Artificial Sequence
  Description of Artificial Sequence: Synthetic epitope
LLASFLKADV

SEQ ID NO: 26631 - protein, 10 aa, Artificial Sequence
  Description of Artificial Sequence: Synthetic epitope
LLATEQEDAA

SEQ ID NO: 26632 - protein, 10 aa, Artificial Sequence
  Description of Artificial Sequence: Synthetic epitope
LLAVSASKVI

SEQ ID NO: 26633 - protein, 10 aa, Artificial Sequence
  Description of Artificial Sequence: Synthetic epitope
LLDDVARESW

SEQ ID NO: 26634 - protein, 10 aa, Artificial Sequence
  Description of Artificial Sequence: Synthetic epitope
LLDKKEQISS

SEQ ID NO: 26635 - protein, 10 aa, Artificial Sequence
  Description of Artificial Sequence: Synthetic epitope
LLDTSSVSEP

SEQ ID NO: 26636 - protein, 10 aa, Artificial Sequence
  Description of Artificial Sequence: Synthetic epitope
LLDTVTSIPS

SEQ ID NO: 26637 - protein, 10 aa, Artificial Sequence
  Description of Artificial Sequence: Synthetic epitope
LLEAEGMSKS

SEQ ID NO: 26638 - protein, 10 aa, Artificial Sequence
  Description of Artificial Sequence: Synthetic epitope
LLEDAILIIQ

SEQ ID NO: 26639 - protein, 10 aa, Artificial Sequence
  Description of Artificial Sequence: Synthetic epitope
LLEEAKLVSE

SEQ ID NO: 26640 - protein, 10 aa, Artificial Sequence
  Description of Artificial Sequence: Synthetic epitope
LLEEVMNSST

SEQ ID NO: 26641 - protein, 10 aa, Artificial Sequence
  Description of Artificial Sequence: Synthetic epitope
LLEIIMKNGS

SEQ ID NO: 26642 - protein, 10 aa, Artificial Sequence
  Description of Artificial Sequence: Synthetic epitope
LLEKAQAERL

SEQ ID NO: 26643 - protein, 10 aa, Artificial Sequence
  Description of Artificial Sequence: Synthetic epitope
LLEKISKEER

SEQ ID NO: 26644 - protein, 10 aa, Artificial Sequence
  Description of Artificial Sequence: Synthetic epitope
LLELSREKAQ

SEQ ID NO: 26645 - protein, 10 aa, Artificial Sequence
  Description of Artificial Sequence: Synthetic epitope
LLENKSNNTK

SEQ ID NO: 26646 - protein, 10 aa, Artificial Sequence
  Description of Artificial Sequence: Synthetic epitope
LLEQEALMEQ

SEQ ID NO: 26647 - protein, 10 aa, Artificial Sequence
  Description of Artificial Sequence: Synthetic epitope
LLEQILVAEN

SEQ ID NO: 26648 - protein, 10 aa, Artificial Sequence
  Description of Artificial Sequence: Synthetic epitope
LLEQMMRKKQ

SEQ ID NO: 26649 - protein, 10 aa, Artificial Sequence
  Description of Artificial Sequence: Synthetic epitope
LLEQSTTVRE

SEQ ID NO: 26650 - protein, 10 aa, Artificial Sequence
  Description of Artificial Sequence: Synthetic epitope
LLERQSLSEE

SEQ ID NO: 26651 - protein, 10 aa, Artificial Sequence
  Description of Artificial Sequence: Synthetic epitope
LLESEQSTSN

SEQ ID NO: 26652 - protein, 10 aa, Artificial Sequence
  Description of Artificial Sequence: Synthetic epitope
LLESIVSDLE

SEQ ID NO: 26653 - protein, 10 aa, Artificial Sequence
  Description of Artificial Sequence: Synthetic epitope
LLESLKVATM

SEQ ID NO: 26654 - protein, 10 aa, Artificial Sequence
  Description of Artificial Sequence: Synthetic epitope
LLEVDASGWH

SEQ ID NO: 26655 - protein, 10 aa, Artificial Sequence
  Description of Artificial Sequence: Synthetic epitope
LLFSELLKSV

SEQ ID NO: 26656 - protein, 10 aa, Artificial Sequence
  Description of Artificial Sequence: Synthetic epitope
LLGERNLLKE

SEQ ID NO: 26657 - protein, 10 aa, Artificial Sequence
  Description of Artificial Sequence: Synthetic epitope
LLGINKATPK

SEQ ID NO: 26658 - protein, 10 aa, Artificial Sequence
  Description of Artificial Sequence: Synthetic epitope
LLGMDFVAQQ

SEQ ID NO: 26659 - protein, 10 aa, Artificial Sequence
  Description of Artificial Sequence: Synthetic epitope
LLGMDFVAQQ

SEQ ID NO: 26660 - protein, 10 aa, Artificial Sequence
  Description of Artificial Sequence: Synthetic epitope
LLGRAKQDRG

SEQ ID NO: 26661 - protein, 10 aa, Artificial Sequence
  Description of Artificial Sequence: Synthetic epitope
LLHKEQTVSE

SEQ ID NO: 26662 - protein, 10 aa, Artificial Sequence
  Description of Artificial Sequence: Synthetic epitope
LLHKSERAEE

SEQ ID NO: 26663 - protein, 10 aa, Artificial Sequence
  Description of Artificial Sequence: Synthetic epitope
LLIQQAIDPK

SEQ ID NO: 26664 - protein, 10 aa, Artificial Sequence
  Description of Artificial Sequence: Synthetic epitope
LLIQVEEVSQ

SEQ ID NO: 26665 - protein, 10 aa, Artificial Sequence
  Description of Artificial Sequence: Synthetic epitope
LLISSLLQTN

SEQ ID NO: 26666 - protein, 10 aa, Artificial Sequence
  Description of Artificial Sequence: Synthetic epitope
LLITKPNFIS

SEQ ID NO: 26667 - protein, 10 aa, Artificial Sequence
  Description of Artificial Sequence: Synthetic epitope
LLITSASAAT

SEQ ID NO: 26668 - protein, 10 aa, Artificial Sequence
  Description of Artificial Sequence: Synthetic epitope
LLKAASQSRM

SEQ ID NO: 26669 - protein, 10 aa, Artificial Sequence
  Description of Artificial Sequence: Synthetic epitope
LLKAKLTDPK

SEQ ID NO: 26670 - protein, 10 aa, Artificial Sequence
  Description of Artificial Sequence: Synthetic epitope
LLKDKITQYE

SEQ ID NO: 26671 - protein, 10 aa, Artificial Sequence
  Description of Artificial Sequence: Synthetic epitope
LLKEKIISKS

SEQ ID NO: 26672 - protein, 10 aa, Artificial Sequence
  Description of Artificial Sequence: Synthetic epitope
LLKELTLGAS

SEQ ID NO: 26673 - protein, 10 aa, Artificial Sequence
  Description of Artificial Sequence: Synthetic epitope
LLKENSVKRK

SEQ ID NO: 26674 - protein, 10 aa, Artificial Sequence
  Description of Artificial Sequence: Synthetic epitope
LLKEQMLRKQ

SEQ ID NO: 26675 - protein, 10 aa, Artificial Sequence
  Description of Artificial Sequence: Synthetic epitope
LLKESVSTED

SEQ ID NO: 26676 - protein, 10 aa, Artificial Sequence
  Description of Artificial Sequence: Synthetic epitope
LLKETNIWTV

SEQ ID NO: 26677 - protein, 10 aa, Artificial Sequence
  Description of Artificial Sequence: Synthetic epitope
LLKGVISEQG

SEQ ID NO: 26678 - protein, 10 aa, Artificial Sequence
  Description of Artificial Sequence: Synthetic epitope
LLKIELSQKT

SEQ ID NO: 26679 - protein, 10 aa, Artificial Sequence
  Description of Artificial Sequence: Synthetic epitope
LLKIMLGDEA

SEQ ID NO: 26680 - protein, 10 aa, Artificial Sequence
  Description of Artificial Sequence: Synthetic epitope
LLKIVKVEHE

SEQ ID NO: 26681 - protein, 10 aa, Artificial Sequence
  Description of Artificial Sequence: Synthetic epitope
LLKKLQIVQQ

SEQ ID NO: 26682 - protein, 10 aa, Artificial Sequence
  Description of Artificial Sequence: Synthetic epitope
LLKKSDLQKD

SEQ ID NO: 26683 - protein, 10 aa, Artificial Sequence
  Description of Artificial Sequence: Synthetic epitope
LLKQTLRSPE

SEQ ID NO: 26684 - protein, 10 aa, Artificial Sequence
  Description of Artificial Sequence: Synthetic epitope
LLKRTVAKEL

SEQ ID NO: 26685 - protein, 10 aa, Artificial Sequence
  Description of Artificial Sequence: Synthetic epitope
LLKSLSSNDQ

SEQ ID NO: 26686 - protein, 10 aa, Artificial Sequence
  Description of Artificial Sequence: Synthetic epitope
LLKSTSVFAR

SEQ ID NO: 26687 - protein, 10 aa, Artificial Sequence
  Description of Artificial Sequence: Synthetic epitope
LLKTGILKLS

SEQ ID NO: 26688 - protein, 10 aa, Artificial Sequence
  Description of Artificial Sequence: Synthetic epitope
LLKTLTASEM

SEQ ID NO: 26689 - protein, 10 aa, Artificial Sequence
  Description of Artificial Sequence: Synthetic epitope
LLKTNKTSNN

SEQ ID NO: 26690 - protein, 10 aa, Artificial Sequence
  Description of Artificial Sequence: Synthetic epitope
LLKVPAKVES

SEQ ID NO: 26691 - protein, 10 aa, Artificial Sequence
  Description of Artificial Sequence: Synthetic epitope
LLMTVANNFV

SEQ ID NO: 26692 - protein, 10 aa, Artificial Sequence
  Description of Artificial Sequence: Synthetic epitope
LLNESNRAEL

SEQ ID NO: 26693 - protein, 10 aa, Artificial Sequence
  Description of Artificial Sequence: Synthetic epitope
LLNIESEMIK

SEQ ID NO: 26694 - protein, 10 aa, Artificial Sequence
  Description of Artificial Sequence: Synthetic epitope
LLNLTVAAEA

SEQ ID NO: 26695 - protein, 10 aa, Artificial Sequence
  Description of Artificial Sequence: Synthetic epitope
LLNQVRLLRV

SEQ ID NO: 26696 - protein, 10 aa, Artificial Sequence
  Description of Artificial Sequence: Synthetic epitope
LLNSTNREDE

SEQ ID NO: 26697 - protein, 10 aa, Artificial Sequence
  Description of Artificial Sequence: Synthetic epitope
LLNTEDLRAA

SEQ ID NO: 26698 - protein, 10 aa, Artificial Sequence
  Description of Artificial Sequence: Synthetic epitope
LLPLSTSLDH

SEQ ID NO: 26699 - protein, 10 aa, Artificial Sequence
  Description of Artificial Sequence: Synthetic epitope
LLPRREESEA

SEQ ID NO: 26700 - protein, 10 aa, Artificial Sequence
  Description of Artificial Sequence: Synthetic epitope
LLPSLSASSD

SEQ ID NO: 26701 - protein, 10 aa, Artificial Sequence
  Description of Artificial Sequence: Synthetic epitope
LLQAAKVALQ

SEQ ID NO: 26702 - protein, 10 aa, Artificial Sequence
  Description of Artificial Sequence: Synthetic epitope
LLQDAAIEEV

SEQ ID NO: 26703 - protein, 10 aa, Artificial Sequence
  Description of Artificial Sequence: Synthetic epitope
LLQDRSAESQ

SEQ ID NO: 26704 - protein, 10 aa, Artificial Sequence
  Description of Artificial Sequence: Synthetic epitope
LLQDYSVKKS

SEQ ID NO: 26705 - protein, 10 aa, Artificial Sequence
  Description of Artificial Sequence: Synthetic epitope
LLQHTSEQEE

SEQ ID NO: 26706 - protein, 10 aa, Artificial Sequence
  Description of Artificial Sequence: Synthetic epitope
LLQLDLIEQQ

SEQ ID NO: 26707 - protein, 10 aa, Artificial Sequence
  Description of Artificial Sequence: Synthetic epitope
LLQLRLAESQ

SEQ ID NO: 26708 - protein, 10 aa, Artificial Sequence
  Description of Artificial Sequence: Synthetic epitope
LLQLSKRQEK

SEQ ID NO: 26709 - protein, 10 aa, Artificial Sequence
  Description of Artificial Sequence: Synthetic epitope
LLQMSGRLVA

SEQ ID NO: 26710 - protein, 10 aa, Artificial Sequence
  Description of Artificial Sequence: Synthetic epitope
LLQNTKVVEL

SEQ ID NO: 26711 - protein, 10 aa, Artificial Sequence
  Description of Artificial Sequence: Synthetic epitope
LLQQKLAAEV

SEQ ID NO: 26712 - protein, 10 aa, Artificial Sequence
  Description of Artificial Sequence: Synthetic epitope
LLQRSISSLL

SEQ ID NO: 26713 - protein, 10 aa, Artificial Sequence
  Description of Artificial Sequence: Synthetic epitope
LLQSPSSILS

SEQ ID NO: 26714 - protein, 10 aa, Artificial Sequence
  Description of Artificial Sequence: Synthetic epitope
LLQSSLSLGG

SEQ ID NO: 26715 - protein, 10 aa, Artificial Sequence
  Description of Artificial Sequence: Synthetic epitope
LLQSTKSNKR

SEQ ID NO: 26716 - protein, 10 aa, Artificial Sequence
  Description of Artificial Sequence: Synthetic epitope
LLQTELSGFL

SEQ ID NO: 26717 - protein, 10 aa, Artificial Sequence
  Description of Artificial Sequence: Synthetic epitope
LLRHSSMADK

SEQ ID NO: 26718 - protein, 10 aa, Artificial Sequence
  Description of Artificial Sequence: Synthetic epitope
LLRIVITSSD

SEQ ID NO: 26719 - protein, 10 aa, Artificial Sequence
  Description of Artificial Sequence: Synthetic epitope
LLRKGSTGTK

SEQ ID NO: 26720 - protein, 10 aa, Artificial Sequence
  Description of Artificial Sequence: Synthetic epitope
LLRKIITSEA

SEQ ID NO: 26721 - protein, 10 aa, Artificial Sequence
  Description of Artificial Sequence: Synthetic epitope
LLRLTELESH

SEQ ID NO: 26722 - protein, 10 aa, Artificial Sequence
  Description of Artificial Sequence: Synthetic epitope
LLRSSKNAFI

SEQ ID NO: 26723 - protein, 10 aa, Artificial Sequence
  Description of Artificial Sequence: Synthetic epitope
LLSAQIASYQ

SEQ ID NO: 26724 - protein, 10 aa, Artificial Sequence
  Description of Artificial Sequence: Synthetic epitope
LLSASEFQVR

SEQ ID NO: 26725 - protein, 10 aa, Artificial Sequence
  Description of Artificial Sequence: Synthetic epitope
LLSDISKGKK

SEQ ID NO: 26726 - protein, 10 aa, Artificial Sequence
  Description of Artificial Sequence: Synthetic epitope
LLSEAVSRAA

SEQ ID NO: 26727 - protein, 10 aa, Artificial Sequence
  Description of Artificial Sequence: Synthetic epitope
LLSESVASSQ

SEQ ID NO: 26728 - protein, 10 aa, Artificial Sequence
  Description of Artificial Sequence: Synthetic epitope
LLSKMRFALV

SEQ ID NO: 26729 - protein, 10 aa, Artificial Sequence
  Description of Artificial Sequence: Synthetic epitope
LLSLEVSRIK

SEQ ID NO: 26730 - protein, 10 aa, Artificial Sequence
  Description of Artificial Sequence: Synthetic epitope
LLSLMKSSRN

SEQ ID NO: 26731 - protein, 10 aa, Artificial Sequence
  Description of Artificial Sequence: Synthetic epitope
LLSMEVSDTS

SEQ ID NO: 26732 - protein, 10 aa, Artificial Sequence
  Description of Artificial Sequence: Synthetic epitope
LLSMLQSLAA

SEQ ID NO: 26733 - protein, 10 aa, Artificial Sequence
  Description of Artificial Sequence: Synthetic epitope
LLSNRMSKSF

SEQ ID NO: 26734 - protein, 10 aa, Artificial Sequence
  Description of Artificial Sequence: Synthetic epitope
LLSQMTSSPT

SEQ ID NO: 26735 - protein, 10 aa, Artificial Sequence
  Description of Artificial Sequence: Synthetic epitope
LLSTEQVSDQ

SEQ ID NO: 26736 - protein, 10 aa, Artificial Sequence
  Description of Artificial Sequence: Synthetic epitope
LLSTQLTFQA

SEQ ID NO: 26737 - protein, 10 aa, Artificial Sequence
  Description of Artificial Sequence: Synthetic epitope
LLSVGAEQAQ

SEQ ID NO: 26738 - protein, 10 aa, Artificial Sequence
  Description of Artificial Sequence: Synthetic epitope
LLSVKMENSW

SEQ ID NO: 26739 - protein, 10 aa, Artificial Sequence
  Description of Artificial Sequence: Synthetic epitope
LLSVSSTYSI

SEQ ID NO: 26740 - protein, 10 aa, Artificial Sequence
  Description of Artificial Sequence: Synthetic epitope
LLTARQRALL

SEQ ID NO: 26741 - protein, 10 aa, Artificial Sequence
  Description of Artificial Sequence: Synthetic epitope
LLTASMASES

SEQ ID NO: 26742 - protein, 10 aa, Artificial Sequence
  Description of Artificial Sequence: Synthetic epitope
LLTAVSRQLQ

SEQ ID NO: 26743 - protein, 10 aa, Artificial Sequence
  Description of Artificial Sequence: Synthetic epitope
LLTEKALMEL

SEQ ID NO: 26744 - protein, 10 aa, Artificial Sequence
  Description of Artificial Sequence: Synthetic epitope
LLTIMSKSHA

SEQ ID NO: 26745 - protein, 10 aa, Artificial Sequence
  Description of Artificial Sequence: Synthetic epitope
LLTKTAVSRP

SEQ ID NO: 26746 - protein, 10 aa, Artificial Sequence
  Description of Artificial Sequence: Synthetic epitope
LLTMAKKALK

SEQ ID NO: 26747 - protein, 10 aa, Artificial Sequence
  Description of Artificial Sequence: Synthetic epitope
LLTSASVAPA

SEQ ID NO: 26748 - protein, 10 aa, Artificial Sequence
  Description of Artificial Sequence: Synthetic epitope
LLTSSEASTL

SEQ ID NO: 26749 - protein, 10 aa, Artificial Sequence
  Description of Artificial Sequence: Synthetic epitope
LLTSVEVDNI

SEQ ID NO: 26750 - protein, 10 aa, Artificial Sequence
  Description of Artificial Sequence: Synthetic epitope
LLTVRVIRMK

SEQ ID NO: 26751 - protein, 10 aa, Artificial Sequence
  Description of Artificial Sequence: Synthetic epitope
LLVAEKSRRQ

SEQ ID NO: 26752 - protein, 10 aa, Artificial Sequence
  Description of Artificial Sequence: Synthetic epitope
LLVGKATSKG

SEQ ID NO: 26753 - protein, 10 aa, Artificial Sequence
  Description of Artificial Sequence: Synthetic epitope
LLVKQKKQAA

SEQ ID NO: 26754 - protein, 10 aa, Artificial Sequence
  Description of Artificial Sequence: Synthetic epitope
LLVKRISQQA

SEQ ID NO: 26755 - protein, 10 aa, Artificial Sequence
  Description of Artificial Sequence: Synthetic epitope
LLVQQASSQS

SEQ ID NO: 26756 - protein, 10 aa, Artificial Sequence
  Description of Artificial Sequence: Synthetic epitope
LLWKQSEEHN

SEQ ID NO: 26757 - protein, 10 aa, Artificial Sequence
  Description of Artificial Sequence: Synthetic epitope
LMALSIVRTG

SEQ ID NO: 26758 - protein, 10 aa, Artificial Sequence
  Description of Artificial Sequence: Synthetic epitope
LMAMEKVKQE

SEQ ID NO: 26759 - protein, 10 aa, Artificial Sequence
  Description of Artificial Sequence: Synthetic epitope
LMDTAVTKKP

SEQ ID NO: 26760 - protein, 10 aa, Artificial Sequence
  Description of Artificial Sequence: Synthetic epitope
LMDVGETAMV

SEQ ID NO: 26761 - protein, 10 aa, Artificial Sequence
  Description of Artificial Sequence: Synthetic epitope
LMELNALDKQ

SEQ ID NO: 26762 - protein, 10 aa, Artificial Sequence
  Description of Artificial Sequence: Synthetic epitope
LMEQHNIEGE

SEQ ID NO: 26763 - protein, 10 aa, Artificial Sequence
  Description of Artificial Sequence: Synthetic epitope
LMEQQHYVDQ

SEQ ID NO: 26764 - protein, 10 aa, Artificial Sequence
  Description of Artificial Sequence: Synthetic epitope
LMEQQNNIKD

SEQ ID NO: 26765 - protein, 10 aa, Artificial Sequence
  Description of Artificial Sequence: Synthetic epitope
LMEQQRTRNE

SEQ ID NO: 26766 - protein, 10 aa, Artificial Sequence
  Description of Artificial Sequence: Synthetic epitope
LMESSRLKEL

SEQ ID NO: 26767 - protein, 10 aa, Artificial Sequence
  Description of Artificial Sequence: Synthetic epitope
LMESTLQQEL

SEQ ID NO: 26768 - protein, 10 aa, Artificial Sequence
  Description of Artificial Sequence: Synthetic epitope
LMHMMLEAGA

SEQ ID NO: 26769 - protein, 10 aa, Artificial Sequence
  Description of Artificial Sequence: Synthetic epitope
LMIMKMISAT

SEQ ID NO: 26770 - protein, 10 aa, Artificial Sequence
  Description of Artificial Sequence: Synthetic epitope
LMISSIVQYS

SEQ ID NO: 26771 - protein, 10 aa, Artificial Sequence
  Description of Artificial Sequence: Synthetic epitope
LMITDAARHK

SEQ ID NO: 26772 - protein, 10 aa, Artificial Sequence
  Description of Artificial Sequence: Synthetic epitope
LMIVIKYKDY

SEQ ID NO: 26773 - protein, 10 aa, Artificial Sequence
  Description of Artificial Sequence: Synthetic epitope
LMKENVKIEI

SEQ ID NO: 26774 - protein, 10 aa, Artificial Sequence
  Description of Artificial Sequence: Synthetic epitope
LMKVALQDLQ

SEQ ID NO: 26775 - protein, 10 aa, Artificial Sequence
  Description of Artificial Sequence: Synthetic epitope
LMLKKEKLEK

SEQ ID NO: 26776 - protein, 10 aa, Artificial Sequence
  Description of Artificial Sequence: Synthetic epitope
LMLVNLKVNL

SEQ ID NO: 26777 - protein, 10 aa, Artificial Sequence
  Description of Artificial Sequence: Synthetic epitope
LMMNQLEEDL

SEQ ID NO: 26778 - protein, 10 aa, Artificial Sequence
  Description of Artificial Sequence: Synthetic epitope
LMMQRRKMTL

SEQ ID NO: 26779 - protein, 10 aa, Artificial Sequence
  Description of Artificial Sequence: Synthetic epitope
LMNLPQSAAT

SEQ ID NO: 26780 - protein, 10 aa, Artificial Sequence
  Description of Artificial Sequence: Synthetic epitope
LMNSSEAAMK

SEQ ID NO: 26781 - protein, 10 aa, Artificial Sequence
  Description of Artificial Sequence: Synthetic epitope
LMQGYMQPLK

SEQ ID NO: 26782 - protein, 10 aa, Artificial Sequence
  Description of Artificial Sequence: Synthetic epitope
LMQQRIPSIK

SEQ ID NO: 26783 - protein, 10 aa, Artificial Sequence
  Description of Artificial Sequence: Synthetic epitope
LMQREMSMDE

SEQ ID NO: 26784 - protein, 10 aa, Artificial Sequence
  Description of Artificial Sequence: Synthetic epitope
LMQRMKSANQ

SEQ ID NO: 26785 - protein, 10 aa, Artificial Sequence
  Description of Artificial Sequence: Synthetic epitope
LMQRRADQLI

SEQ ID NO: 26786 - protein, 10 aa, Artificial Sequence
  Description of Artificial Sequence: Synthetic epitope
LMQSEEVEDS

SEQ ID NO: 26787 - protein, 10 aa, Artificial Sequence
  Description of Artificial Sequence: Synthetic epitope
LMQVSSLDSH

SEQ ID NO: 26788 - protein, 10 aa, Artificial Sequence
  Description of Artificial Sequence: Synthetic epitope
LMRAESISSL

SEQ ID NO: 26789 - protein, 10 aa, Artificial Sequence
  Description of Artificial Sequence: Synthetic epitope
LMRASSRSFT

SEQ ID NO: 26790 - protein, 10 aa, Artificial Sequence
  Description of Artificial Sequence: Synthetic epitope
LMRSKSLQLT

SEQ ID NO: 26791 - protein, 10 aa, Artificial Sequence
  Description of Artificial Sequence: Synthetic epitope
LMSASQTKSE

SEQ ID NO: 26792 - protein, 10 aa, Artificial Sequence
  Description of Artificial Sequence: Synthetic epitope
LMSKMNKSRQ

SEQ ID NO: 26793 - protein, 10 aa, Artificial Sequence
  Description of Artificial Sequence: Synthetic epitope
LMSSKDLAYQ

SEQ ID NO: 26794 - protein, 10 aa, Artificial Sequence
  Description of Artificial Sequence: Synthetic epitope
LMSTSATATE

SEQ ID NO: 26795 - protein, 10 aa, Artificial Sequence
  Description of Artificial Sequence: Synthetic epitope
LMTELEIEKS

SEQ ID NO: 26796 - protein, 10 aa, Artificial Sequence
  Description of Artificial Sequence: Synthetic epitope
LMTVRIVKHA

SEQ ID NO: 26797 - protein, 10 aa, Artificial Sequence
  Description of Artificial Sequence: Synthetic epitope
LMVAPDSAEI

SEQ ID NO: 26798 - protein, 10 aa, Artificial Sequence
  Description of Artificial Sequence: Synthetic epitope
LMVLPAVAAP

SEQ ID NO: 26799 - protein, 10 aa, Artificial Sequence
  Description of Artificial Sequence: Synthetic epitope
LMVMSAIEKL

SEQ ID NO: 26800 - protein, 10 aa, Artificial Sequence
  Description of Artificial Sequence: Synthetic epitope
LMWKQSIWTS

SEQ ID NO: 26801 - protein, 10 aa, Artificial Sequence
  Description of Artificial Sequence: Synthetic epitope
LMYLLKAEDS

SEQ ID NO: 26802 - protein, 10 aa, Artificial Sequence
  Description of Artificial Sequence: Synthetic epitope
LNAHSAAEKA

SEQ ID NO: 26803 - protein, 10 aa, Artificial Sequence
  Description of Artificial Sequence: Synthetic epitope
LNDEMRFVTQ

SEQ ID NO: 26804 - protein, 10 aa, Artificial Sequence
  Description of Artificial Sequence: Synthetic epitope
LNDWKMMESP

SEQ ID NO: 26805 - protein, 10 aa, Artificial Sequence
  Description of Artificial Sequence: Synthetic epitope
LNEARVRKPV

SEQ ID NO: 26806 - protein, 10 aa, Artificial Sequence
  Description of Artificial Sequence: Synthetic epitope
LNEKKQIYAI

SEQ ID NO: 26807 - protein, 10 aa, Artificial Sequence
  Description of Artificial Sequence: Synthetic epitope
LNERAKYVTY

SEQ ID NO: 26808 - protein, 10 aa, Artificial Sequence
  Description of Artificial Sequence: Synthetic epitope
LNESPTDDSE

SEQ ID NO: 26809 - protein, 10 aa, Artificial Sequence
  Description of Artificial Sequence: Synthetic epitope
LNEVKTSRSE

SEQ ID NO: 26810 - protein, 10 aa, Artificial Sequence
  Description of Artificial Sequence: Synthetic epitope
LNFRSASMIS

SEQ ID NO: 26811 - protein, 10 aa, Artificial Sequence
  Description of Artificial Sequence: Synthetic epitope
LNGSISSHTM

SEQ ID NO: 26812 - protein, 10 aa, Artificial Sequence
  Description of Artificial Sequence: Synthetic epitope
LNHIEPLKIQ

SEQ ID NO: 26813 - protein, 10 aa, Artificial Sequence
  Description of Artificial Sequence: Synthetic epitope
LNHKEVRLSK

SEQ ID NO: 26814 - protein, 10 aa, Artificial Sequence
  Description of Artificial Sequence: Synthetic epitope
LNIKLYKAVK

SEQ ID NO: 26815 - protein, 10 aa, Artificial Sequence
  Description of Artificial Sequence: Synthetic epitope
LNILSELVEK

SEQ ID NO: 26816 - protein, 10 aa, Artificial Sequence
  Description of Artificial Sequence: Synthetic epitope
LNIPWSRMPP

SEQ ID NO: 26817 - protein, 10 aa, Artificial Sequence
  Description of Artificial Sequence: Synthetic epitope
LNISALIALR

SEQ ID NO: 26818 - protein, 10 aa, Artificial Sequence
  Description of Artificial Sequence: Synthetic epitope
LNISNALIRS

SEQ ID NO: 26819 - protein, 10 aa, Artificial Sequence
  Description of Artificial Sequence: Synthetic epitope
LNISSRLQAA

SEQ ID NO: 26820 - protein, 10 aa, Artificial Sequence
  Description of Artificial Sequence: Synthetic epitope
LNITGSNSSY

SEQ ID NO: 26821 - protein, 10 aa, Artificial Sequence
  Description of Artificial Sequence: Synthetic epitope
LNITPELYEI

SEQ ID NO: 26822 - protein, 10 aa, Artificial Sequence
  Description of Artificial Sequence: Synthetic epitope
LNKARASRSS

SEQ ID NO: 26823 - protein, 10 aa, Artificial Sequence
  Description of Artificial Sequence: Synthetic epitope
LNKATVKEKK

SEQ ID NO: 26824 - protein, 10 aa, Artificial Sequence
  Description of Artificial Sequence: Synthetic epitope
LNKEETKKEN

SEQ ID NO: 26825 - protein, 10 aa, Artificial Sequence
  Description of Artificial Sequence: Synthetic epitope
LNKIKFKSEA

SEQ ID NO: 26826 - protein, 10 aa, Artificial Sequence
  Description of Artificial Sequence: Synthetic epitope
LNKKSQTGVK

SEQ ID NO: 26827 - protein, 10 aa, Artificial Sequence
  Description of Artificial Sequence: Synthetic epitope
LNKLKTVDVI

SEQ ID NO: 26828 - protein, 10 aa, Artificial Sequence
  Description of Artificial Sequence: Synthetic epitope
LNKLSVKNKS

SEQ ID NO: 26829 - protein, 10 aa, Artificial Sequence
  Description of Artificial Sequence: Synthetic epitope
LNKNEATTKN

SEQ ID NO: 26830 - protein, 10 aa, Artificial Sequence
  Description of Artificial Sequence: Synthetic epitope
LNKQATNPQH

SEQ ID NO: 26831 - protein, 10 aa, Artificial Sequence
  Description of Artificial Sequence: Synthetic epitope
LNKRISTQPG

SEQ ID NO: 26832 - protein, 10 aa, Artificial Sequence
  Description of Artificial Sequence: Synthetic epitope
LNKTISKVSH

SEQ ID NO: 26833 - protein, 10 aa, Artificial Sequence
  Description of Artificial Sequence: Synthetic epitope
LNKTSQIQGQ

SEQ ID NO: 26834 - protein, 10 aa, Artificial Sequence
  Description of Artificial Sequence: Synthetic epitope
LNLESQMVFS

SEQ ID NO: 26835 - protein, 10 aa, Artificial Sequence
  Description of Artificial Sequence: Synthetic epitope
LNLKGSSEQL

SEQ ID NO: 26836 - protein, 10 aa, Artificial Sequence
  Description of Artificial Sequence: Synthetic epitope
LNLLESLRAT

SEQ ID NO: 26837 - protein, 10 aa, Artificial Sequence
  Description of Artificial Sequence: Synthetic epitope
LNLLSQAQLQ

SEQ ID NO: 26838 - protein, 10 aa, Artificial Sequence
  Description of Artificial Sequence: Synthetic epitope
LNLSSIILDV

SEQ ID NO: 26839 - protein, 10 aa, Artificial Sequence
  Description of Artificial Sequence: Synthetic epitope
LNLTEVVKRQ

SEQ ID NO: 26840 - protein, 10 aa, Artificial Sequence
  Description of Artificial Sequence: Synthetic epitope
LNLTKLKVLS

SEQ ID NO: 26841 - protein, 10 aa, Artificial Sequence
  Description of Artificial Sequence: Synthetic epitope
LNMIAQSQRT

SEQ ID NO: 26842 - protein, 10 aa, Artificial Sequence
  Description of Artificial Sequence: Synthetic epitope
LNMKFKAEVQ

SEQ ID NO: 26843 - protein, 10 aa, Artificial Sequence
  Description of Artificial Sequence: Synthetic epitope
LNMMLSKGEL

SEQ ID NO: 26844 - protein, 10 aa, Artificial Sequence
  Description of Artificial Sequence: Synthetic epitope
LNNDMSEMEL

SEQ ID NO: 26845 - protein, 10 aa, Artificial Sequence
  Description of Artificial Sequence: Synthetic epitope
LNNEIVANKR

SEQ ID NO: 26846 - protein, 10 aa, Artificial Sequence
  Description of Artificial Sequence: Synthetic epitope
LNNGLTMLHT

SEQ ID NO: 26847 - protein, 10 aa, Artificial Sequence
  Description of Artificial Sequence: Synthetic epitope
LNPKINREKM

SEQ ID NO: 26848 - protein, 10 aa, Artificial Sequence
  Description of Artificial Sequence: Synthetic epitope
LNPSESDSGV

SEQ ID NO: 26849 - protein, 10 aa, Artificial Sequence
  Description of Artificial Sequence: Synthetic epitope
LNPYVKRSIK

SEQ ID NO: 26850 - protein, 10 aa, Artificial Sequence
  Description of Artificial Sequence: Synthetic epitope
LNQDAQNKSP

SEQ ID NO: 26851 - protein, 10 aa, Artificial Sequence
  Description of Artificial Sequence: Synthetic epitope
LNQDAQNKSP

SEQ ID NO: 26852 - protein, 10 aa, Artificial Sequence
  Description of Artificial Sequence: Synthetic epitope
LNQDSTDSKT

SEQ ID NO: 26853 - protein, 10 aa, Artificial Sequence
  Description of Artificial Sequence: Synthetic epitope
LNQKESSKEK

SEQ ID NO: 26854 - protein, 10 aa, Artificial Sequence
  Description of Artificial Sequence: Synthetic epitope
LNQKQVRDAA

SEQ ID NO: 26855 - protein, 10 aa, Artificial Sequence
  Description of Artificial Sequence: Synthetic epitope
LNQLNKEIYK

SEQ ID NO: 26856 - protein, 10 aa, Artificial Sequence
  Description of Artificial Sequence: Synthetic epitope
LNQQSTKEQQ

SEQ ID NO: 26857 - protein, 10 aa, Artificial Sequence
  Description of Artificial Sequence: Synthetic epitope
LNQSKKLPSA

SEQ ID NO: 26858 - protein, 10 aa, Artificial Sequence
  Description of Artificial Sequence: Synthetic epitope
LNRLMKFDIP

SEQ ID NO: 26859 - protein, 10 aa, Artificial Sequence
  Description of Artificial Sequence: Synthetic epitope
LNRTVVANEI

SEQ ID NO: 26860 - protein, 10 aa, Artificial Sequence
  Description of Artificial Sequence: Synthetic epitope
LNSAAVTKTT

SEQ ID NO: 26861 - protein, 10 aa, Artificial Sequence
  Description of Artificial Sequence: Synthetic epitope
LNSESEVGTP

SEQ ID NO: 26862 - protein, 10 aa, Artificial Sequence
  Description of Artificial Sequence: Synthetic epitope
LNSFLSSMTA

SEQ ID NO: 26863 - protein, 10 aa, Artificial Sequence
  Description of Artificial Sequence: Synthetic epitope
LNSHGNIMPM

SEQ ID NO: 26864 - protein, 10 aa, Artificial Sequence
  Description of Artificial Sequence: Synthetic epitope
LNSIFFIGPN

SEQ ID NO: 26865 - protein, 10 aa, Artificial Sequence
  Description of Artificial Sequence: Synthetic epitope
LNSKVRNKEK

SEQ ID NO: 26866 - protein, 10 aa, Artificial Sequence
  Description of Artificial Sequence: Synthetic epitope
LNSNAASNAT

SEQ ID NO: 26867 - protein, 10 aa, Artificial Sequence
  Description of Artificial Sequence: Synthetic epitope
LNSSAEAPQS

SEQ ID NO: 26868 - protein, 10 aa, Artificial Sequence
  Description of Artificial Sequence: Synthetic epitope
LNSSITLKDD

SEQ ID NO: 26869 - protein, 10 aa, Artificial Sequence
  Description of Artificial Sequence: Synthetic epitope
LNSSMEDKML

SEQ ID NO: 26870 - protein, 10 aa, Artificial Sequence
  Description of Artificial Sequence: Synthetic epitope
LNSSVLTDEE

SEQ ID NO: 26871 - protein, 10 aa, Artificial Sequence
  Description of Artificial Sequence: Synthetic epitope
LNSVQVAKTH

SEQ ID NO: 26872 - protein, 10 aa, Artificial Sequence
  Description of Artificial Sequence: Synthetic epitope
LNTALKTRTG

SEQ ID NO: 26873 - protein, 10 aa, Artificial Sequence
  Description of Artificial Sequence: Synthetic epitope
LNTENLSSTP

SEQ ID NO: 26874 - protein, 10 aa, Artificial Sequence
  Description of Artificial Sequence: Synthetic epitope
LNTSNKGELN

SEQ ID NO: 26875 - protein, 10 aa, Artificial Sequence
  Description of Artificial Sequence: Synthetic epitope
LNTSSKDNDE

SEQ ID NO: 26876 - protein, 10 aa, Artificial Sequence
  Description of Artificial Sequence: Synthetic epitope
LNVHKAIQHL

SEQ ID NO: 26877 - protein, 10 aa, Artificial Sequence
  Description of Artificial Sequence: Synthetic epitope
LNVRLSLREP

SEQ ID NO: 26878 - protein, 10 aa, Artificial Sequence
  Description of Artificial Sequence: Synthetic epitope
LNYINLKSEN

SEQ ID NO: 26879 - protein, 10 aa, Artificial Sequence
  Description of Artificial Sequence: Synthetic epitope
LPAKKTSVKE

SEQ ID NO: 26880 - protein, 10 aa, Artificial Sequence
  Description of Artificial Sequence: Synthetic epitope
LPALEASQRF

SEQ ID NO: 26881 - protein, 10 aa, Artificial Sequence
  Description of Artificial Sequence: Synthetic epitope
LPALGVKHSE

SEQ ID NO: 26882 - protein, 10 aa, Artificial Sequence
  Description of Artificial Sequence: Synthetic epitope
LPALVMSKGH

SEQ ID NO: 26883 - protein, 10 aa, Artificial Sequence
  Description of Artificial Sequence: Synthetic epitope
LPAREKVAEP

SEQ ID NO: 26884 - protein, 10 aa, Artificial Sequence
  Description of Artificial Sequence: Synthetic epitope
LPASSALSAN

SEQ ID NO: 26885 - protein, 10 aa, Artificial Sequence
  Description of Artificial Sequence: Synthetic epitope
LPATLTSSKP

SEQ ID NO: 26886 - protein, 10 aa, Artificial Sequence
  Description of Artificial Sequence: Synthetic epitope
LPAVTSLKSD

SEQ ID NO: 26887 - protein, 10 aa, Artificial Sequence
  Description of Artificial Sequence: Synthetic epitope
LPDEQATIQY

SEQ ID NO: 26888 - protein, 10 aa, Artificial Sequence
  Description of Artificial Sequence: Synthetic epitope
LPDRYTVSEE

SEQ ID NO: 26889 - protein, 10 aa, Artificial Sequence
  Description of Artificial Sequence: Synthetic epitope
LPEESVAIKG

SEQ ID NO: 26890 - protein, 10 aa, Artificial Sequence
  Description of Artificial Sequence: Synthetic epitope
LPEKAEKKHA

SEQ ID NO: 26891 - protein, 10 aa, Artificial Sequence
  Description of Artificial Sequence: Synthetic epitope
LPEQQVLQLK

SEQ ID NO: 26892 - protein, 10 aa, Artificial Sequence
  Description of Artificial Sequence: Synthetic epitope
LPFLQSLQES

SEQ ID NO: 26893 - protein, 10 aa, Artificial Sequence
  Description of Artificial Sequence: Synthetic epitope
LPFVQALKAR

SEQ ID NO: 26894 - protein, 10 aa, Artificial Sequence
  Description of Artificial Sequence: Synthetic epitope
LPGAKVQFEL

SEQ ID NO: 26895 - protein, 10 aa, Artificial Sequence
  Description of Artificial Sequence: Synthetic epitope
LPGEVLGAQP

SEQ ID NO: 26896 - protein, 10 aa, Artificial Sequence
  Description of Artificial Sequence: Synthetic epitope
LPGLQLRQPS

SEQ ID NO: 26897 - protein, 10 aa, Artificial Sequence
  Description of Artificial Sequence: Synthetic epitope
LPGNSAISNV

SEQ ID NO: 26898 - protein, 10 aa, Artificial Sequence
  Description of Artificial Sequence: Synthetic epitope
LPGSSAEKAS

SEQ ID NO: 26899 - protein, 10 aa, Artificial Sequence
  Description of Artificial Sequence: Synthetic epitope
LPIAASSEGH

SEQ ID NO: 26900 - protein, 10 aa, Artificial Sequence
  Description of Artificial Sequence: Synthetic epitope
LPIDAVQWDI

SEQ ID NO: 26901 - protein, 10 aa, Artificial Sequence
  Description of Artificial Sequence: Synthetic epitope
LPIQVTLEEV

SEQ ID NO: 26902 - protein, 10 aa, Artificial Sequence
  Description of Artificial Sequence: Synthetic epitope
LPKAESSAGD

SEQ ID NO: 26903 - protein, 10 aa, Artificial Sequence
  Description of Artificial Sequence: Synthetic epitope
LPKALLSKNT

SEQ ID NO: 26904 - protein, 10 aa, Artificial Sequence
  Description of Artificial Sequence: Synthetic epitope
LPKEVASAKP

SEQ ID NO: 26905 - protein, 10 aa, Artificial Sequence
  Description of Artificial Sequence: Synthetic epitope
LPKKQIHVWS

SEQ ID NO: 26906 - protein, 10 aa, Artificial Sequence
  Description of Artificial Sequence: Synthetic epitope
LPKLDELRDE

SEQ ID NO: 26907 - protein, 10 aa, Artificial Sequence
  Description of Artificial Sequence: Synthetic epitope
LPKREAVVQA

SEQ ID NO: 26908 - protein, 10 aa, Artificial Sequence
  Description of Artificial Sequence: Synthetic epitope
LPKSAALSEK

SEQ ID NO: 26909 - protein, 10 aa, Artificial Sequence
  Description of Artificial Sequence: Synthetic epitope
LPLAAGSDHP

SEQ ID NO: 26910 - protein, 10 aa, Artificial Sequence
  Description of Artificial Sequence: Synthetic epitope
LPLAQSADYG

SEQ ID NO: 26911 - protein, 10 aa, Artificial Sequence
  Description of Artificial Sequence: Synthetic epitope
LPLDRASEYK

SEQ ID NO: 26912 - protein, 10 aa, Artificial Sequence
  Description of Artificial Sequence: Synthetic epitope
LPLKSIYMRQ

SEQ ID NO: 26913 - protein, 10 aa, Artificial Sequence
  Description of Artificial Sequence: Synthetic epitope
LPLLQLVPAK

SEQ ID NO: 26914 - protein, 10 aa, Artificial Sequence
  Description of Artificial Sequence: Synthetic epitope
LPLLTQDSNS

SEQ ID NO: 26915 - protein, 10 aa, Artificial Sequence
  Description of Artificial Sequence: Synthetic epitope
LPLMSALMTP

SEQ ID NO: 26916 - protein, 10 aa, Artificial Sequence
  Description of Artificial Sequence: Synthetic epitope
LPLQKVNTQS

SEQ ID NO: 26917 - protein, 10 aa, Artificial Sequence
  Description of Artificial Sequence: Synthetic epitope
LPLVNETKTK

SEQ ID NO: 26918 - protein, 10 aa, Artificial Sequence
  Description of Artificial Sequence: Synthetic epitope
LPMAENEVRK

SEQ ID NO: 26919 - protein, 10 aa, Artificial Sequence
  Description of Artificial Sequence: Synthetic epitope
LPMASSMEHG

SEQ ID NO: 26920 - protein, 10 aa, Artificial Sequence
  Description of Artificial Sequence: Synthetic epitope
LPNAALAEAP

SEQ ID NO: 26921 - protein, 10 aa, Artificial Sequence
  Description of Artificial Sequence: Synthetic epitope
LPPKKLSKTS

SEQ ID NO: 26922 - protein, 10 aa, Artificial Sequence
  Description of Artificial Sequence: Synthetic epitope
LPPSLTTSTL

SEQ ID NO: 26923 - protein, 10 aa, Artificial Sequence
  Description of Artificial Sequence: Synthetic epitope
LPQGELSSQL

SEQ ID NO: 26924 - protein, 10 aa, Artificial Sequence
  Description of Artificial Sequence: Synthetic epitope
LPQVQVVEVG

SEQ ID NO: 26925 - protein, 10 aa, Artificial Sequence
  Description of Artificial Sequence: Synthetic epitope
LPQVRAMGKF

SEQ ID NO: 26926 - protein, 10 aa, Artificial Sequence
  Description of Artificial Sequence: Synthetic epitope
LPRAQNIQSR

SEQ ID NO: 26927 - protein, 10 aa, Artificial Sequence
  Description of Artificial Sequence: Synthetic epitope
LPRFQTQVDR

SEQ ID NO: 26928 - protein, 10 aa, Artificial Sequence
  Description of Artificial Sequence: Synthetic epitope
LPRLSLMEPE

SEQ ID NO: 26929 - protein, 10 aa, Artificial Sequence
  Description of Artificial Sequence: Synthetic epitope
LPRQNRLRIE

SEQ ID NO: 26930 - protein, 10 aa, Artificial Sequence
  Description of Artificial Sequence: Synthetic epitope
LPSAVATEAS

SEQ ID NO: 26931 - protein, 10 aa, Artificial Sequence
  Description of Artificial Sequence: Synthetic epitope
LPSFLVREQD

SEQ ID NO: 26932 - protein, 10 aa, Artificial Sequence
  Description of Artificial Sequence: Synthetic epitope
LPSKSSVTKI

SEQ ID NO: 26933 - protein, 10 aa, Artificial Sequence
  Description of Artificial Sequence: Synthetic epitope
LPSKSVAMQQ

SEQ ID NO: 26934 - protein, 10 aa, Artificial Sequence
  Description of Artificial Sequence: Synthetic epitope
LPSQKTASLK

SEQ ID NO: 26935 - protein, 10 aa, Artificial Sequence
  Description of Artificial Sequence: Synthetic epitope
LPSQTLNSQG

SEQ ID NO: 26936 - protein, 10 aa, Artificial Sequence
  Description of Artificial Sequence: Synthetic epitope
LPSRLVDVVA

SEQ ID NO: 26937 - protein, 10 aa, Artificial Sequence
  Description of Artificial Sequence: Synthetic epitope
LPSVSSIAEH

SEQ ID NO: 26938 - protein, 10 aa, Artificial Sequence
  Description of Artificial Sequence: Synthetic epitope
LPTQKIDNEE

SEQ ID NO: 26939 - protein, 10 aa, Artificial Sequence
  Description of Artificial Sequence: Synthetic epitope
LPTTAEATSM

SEQ ID NO: 26940 - protein, 10 aa, Artificial Sequence
  Description of Artificial Sequence: Synthetic epitope
LPTVKKLATA

SEQ ID NO: 26941 - protein, 10 aa, Artificial Sequence
  Description of Artificial Sequence: Synthetic epitope
LPVDSTQARR

SEQ ID NO: 26942 - protein, 10 aa, Artificial Sequence
  Description of Artificial Sequence: Synthetic epitope
LPVRSLTYFS

SEQ ID NO: 26943 - protein, 10 aa, Artificial Sequence
  Description of Artificial Sequence: Synthetic epitope
LPWQIVQISE

SEQ ID NO: 26944 - protein, 10 aa, Artificial Sequence
  Description of Artificial Sequence: Synthetic epitope
LPWSMRQTSS

SEQ ID NO: 26945 - protein, 10 aa, Artificial Sequence
  Description of Artificial Sequence: Synthetic epitope
LPYPVAGNMA

SEQ ID NO: 26946 - protein, 10 aa, Artificial Sequence
  Description of Artificial Sequence: Synthetic epitope
LQAAKMAQEK

SEQ ID NO: 26947 - protein, 10 aa, Artificial Sequence
  Description of Artificial Sequence: Synthetic epitope
LQAALTASKV

SEQ ID NO: 26948 - protein, 10 aa, Artificial Sequence
  Description of Artificial Sequence: Synthetic epitope
LQAELAAQEA

SEQ ID NO: 26949 - protein, 10 aa, Artificial Sequence
  Description of Artificial Sequence: Synthetic epitope
LQAGFSSRSQ

SEQ ID NO: 26950 - protein, 10 aa, Artificial Sequence
  Description of Artificial Sequence: Synthetic epitope
LQAGSANASA

SEQ ID NO: 26951 - protein, 10 aa, Artificial Sequence
  Description of Artificial Sequence: Synthetic epitope
LQALANLEAR

SEQ ID NO: 26952 - protein, 10 aa, Artificial Sequence
  Description of Artificial Sequence: Synthetic epitope
LQAMNDIRPS

SEQ ID NO: 26953 - protein, 10 aa, Artificial Sequence
  Description of Artificial Sequence: Synthetic epitope
LQAQAARRGY

SEQ ID NO: 26954 - protein, 10 aa, Artificial Sequence
  Description of Artificial Sequence: Synthetic epitope
LQAQDSHNMQ

SEQ ID NO: 26955 - protein, 10 aa, Artificial Sequence
  Description of Artificial Sequence: Synthetic epitope
LQAQNQMSEA

SEQ ID NO: 26956 - protein, 10 aa, Artificial Sequence
  Description of Artificial Sequence: Synthetic epitope
LQASKELQQA

SEQ ID NO: 26957 - protein, 10 aa, Artificial Sequence
  Description of Artificial Sequence: Synthetic epitope
LQASLSSPQP

SEQ ID NO: 26958 - protein, 10 aa, Artificial Sequence
  Description of Artificial Sequence: Synthetic epitope
LQAVQAAEDA

SEQ ID NO: 26959 - protein, 10 aa, Artificial Sequence
  Description of Artificial Sequence: Synthetic epitope
LQAVQTNELA

SEQ ID NO: 26960 - protein, 10 aa, Artificial Sequence
  Description of Artificial Sequence: Synthetic epitope
LQAVTAVQTA

SEQ ID NO: 26961 - protein, 10 aa, Artificial Sequence
  Description of Artificial Sequence: Synthetic epitope
LQDGIKSERS

SEQ ID NO: 26962 - protein, 10 aa, Artificial Sequence
  Description of Artificial Sequence: Synthetic epitope
LQDGSIKMKP

SEQ ID NO: 26963 - protein, 10 aa, Artificial Sequence
  Description of Artificial Sequence: Synthetic epitope
LQDITLSQQT

SEQ ID NO: 26964 - protein, 10 aa, Artificial Sequence
  Description of Artificial Sequence: Synthetic epitope
LQDKLKVPES

SEQ ID NO: 26965 - protein, 10 aa, Artificial Sequence
  Description of Artificial Sequence: Synthetic epitope
LQDNAKLVPV

SEQ ID NO: 26966 - protein, 10 aa, Artificial Sequence
  Description of Artificial Sequence: Synthetic epitope
LQDTFFAKLH

SEQ ID NO: 26967 - protein, 10 aa, Artificial Sequence
  Description of Artificial Sequence: Synthetic epitope
LQDTQESSTT

SEQ ID NO: 26968 - protein, 10 aa, Artificial Sequence
  Description of Artificial Sequence: Synthetic epitope
LQDYSVIEPQ

SEQ ID NO: 26969 - protein, 10 aa, Artificial Sequence
  Description of Artificial Sequence: Synthetic epitope
LQEATELGDP

SEQ ID NO: 26970 - protein, 10 aa, Artificial Sequence
  Description of Artificial Sequence: Synthetic epitope
LQEESEVLQK

SEQ ID NO: 26971 - protein, 10 aa, Artificial Sequence
  Description of Artificial Sequence: Synthetic epitope
LQEETTVSLN

SEQ ID NO: 26972 - protein, 10 aa, Artificial Sequence
  Description of Artificial Sequence: Synthetic epitope
LQEKNLLKGS

SEQ ID NO: 26973 - protein, 10 aa, Artificial Sequence
  Description of Artificial Sequence: Synthetic epitope
LQENESSTLK

SEQ ID NO: 26974 - protein, 10 aa, Artificial Sequence
  Description of Artificial Sequence: Synthetic epitope
LQENKIKTTD

SEQ ID NO: 26975 - protein, 10 aa, Artificial Sequence
  Description of Artificial Sequence: Synthetic epitope
LQEQLTQGAS

SEQ ID NO: 26976 - protein, 10 aa, Artificial Sequence
  Description of Artificial Sequence: Synthetic epitope
LQESESSAPA

SEQ ID NO: 26977 - protein, 10 aa, Artificial Sequence
  Description of Artificial Sequence: Synthetic epitope
LQESISSAIS

SEQ ID NO: 26978 - protein, 10 aa, Artificial Sequence
  Description of Artificial Sequence: Synthetic epitope
LQESVLSEQD

SEQ ID NO: 26979 - protein, 10 aa, Artificial Sequence
  Description of Artificial Sequence: Synthetic epitope
LQETQALQQS

SEQ ID NO: 26980 - protein, 10 aa, Artificial Sequence
  Description of Artificial Sequence: Synthetic epitope
LQETRKAKSS

SEQ ID NO: 26981 - protein, 10 aa, Artificial Sequence
  Description of Artificial Sequence: Synthetic epitope
LQETSVAPFA

SEQ ID NO: 26982 - protein, 10 aa, Artificial Sequence
  Description of Artificial Sequence: Synthetic epitope
LQFLSVLLTE

SEQ ID NO: 26983 - protein, 10 aa, Artificial Sequence
  Description of Artificial Sequence: Synthetic epitope
LQFSVSLQTE

SEQ ID NO: 26984 - protein, 10 aa, Artificial Sequence
  Description of Artificial Sequence: Synthetic epitope
LQGASQVKEE

SEQ ID NO: 26985 - protein, 10 aa, Artificial Sequence
  Description of Artificial Sequence: Synthetic epitope
LQGRATEADS

SEQ ID NO: 26986 - protein, 10 aa, Artificial Sequence
  Description of Artificial Sequence: Synthetic epitope
LQGVATLTQI

SEQ ID NO: 26987 - protein, 10 aa, Artificial Sequence
  Description of Artificial Sequence: Synthetic epitope
LQHNNQTRVQ

SEQ ID NO: 26988 - protein, 10 aa, Artificial Sequence
  Description of Artificial Sequence: Synthetic epitope
LQHRSKVQGE

SEQ ID NO: 26989 - protein, 10 aa, Artificial Sequence
  Description of Artificial Sequence: Synthetic epitope
LQHSSALTAS

SEQ ID NO: 26990 - protein, 10 aa, Artificial Sequence
  Description of Artificial Sequence: Synthetic epitope
LQIDQPSTSI

SEQ ID NO: 26991 - protein, 10 aa, Artificial Sequence
  Description of Artificial Sequence: Synthetic epitope
LQIKNSLTSK

SEQ ID NO: 26992 - protein, 10 aa, Artificial Sequence
  Description of Artificial Sequence: Synthetic epitope
LQILANMDSQ

SEQ ID NO: 26993 - protein, 10 aa, Artificial Sequence
  Description of Artificial Sequence: Synthetic epitope
LQIPRIEMKI

SEQ ID NO: 26994 - protein, 10 aa, Artificial Sequence
  Description of Artificial Sequence: Synthetic epitope
LQISYFRDPY

SEQ ID NO: 26995 - protein, 10 aa, Artificial Sequence
  Description of Artificial Sequence: Synthetic epitope
LQKAALTGAK

SEQ ID NO: 26996 - protein, 10 aa, Artificial Sequence
  Description of Artificial Sequence: Synthetic epitope
LQKADVVAQS

SEQ ID NO: 26997 - protein, 10 aa, Artificial Sequence
  Description of Artificial Sequence: Synthetic epitope
LQKAELAQID

SEQ ID NO: 26998 - protein, 10 aa, Artificial Sequence
  Description of Artificial Sequence: Synthetic epitope
LQKAKTREEI

SEQ ID NO: 26999 - protein, 10 aa, Artificial Sequence
  Description of Artificial Sequence: Synthetic epitope
LQKDILRSGV

SEQ ID NO: 27000 - protein, 10 aa, Artificial Sequence
  Description of Artificial Sequence: Synthetic epitope
LQKDSLLTAA

SEQ ID NO: 27001 - protein, 10 aa, Artificial Sequence
  Description of Artificial Sequence: Synthetic epitope
LQKEEAALAP

SEQ ID NO: 27002 - protein, 10 aa, Artificial Sequence
  Description of Artificial Sequence: Synthetic epitope
LQKKASTSAG

SEQ ID NO: 27003 - protein, 10 aa, Artificial Sequence
  Description of Artificial Sequence: Synthetic epitope
LQKKSIGAKE

SEQ ID NO: 27004 - protein, 10 aa, Artificial Sequence
  Description of Artificial Sequence: Synthetic epitope
LQKLRTKVTD

SEQ ID NO: 27005 - protein, 10 aa, Artificial Sequence
  Description of Artificial Sequence: Synthetic epitope
LQKQSQLQAY

SEQ ID NO: 27006 - protein, 10 aa, Artificial Sequence
  Description of Artificial Sequence: Synthetic epitope
LQKRLISKTE

SEQ ID NO: 27007 - protein, 10 aa, Artificial Sequence
  Description of Artificial Sequence: Synthetic epitope
LQKRSLKAHL

SEQ ID NO: 27008 - protein, 10 aa, Artificial Sequence
  Description of Artificial Sequence: Synthetic epitope
LQKRSSRHPR

SEQ ID NO: 27009 - protein, 10 aa, Artificial Sequence
  Description of Artificial Sequence: Synthetic epitope
LQKSKAISQR

SEQ ID NO: 27010 - protein, 10 aa, Artificial Sequence
  Description of Artificial Sequence: Synthetic epitope
LQKSQAAKEY

SEQ ID NO: 27011 - protein, 10 aa, Artificial Sequence
  Description of Artificial Sequence: Synthetic epitope
LQLANSAKLS

SEQ ID NO: 27012 - protein, 10 aa, Artificial Sequence
  Description of Artificial Sequence: Synthetic epitope
LQLGQQPRHN

SEQ ID NO: 27013 - protein, 10 aa, Artificial Sequence
  Description of Artificial Sequence: Synthetic epitope
LQLITKVGEE

SEQ ID NO: 27014 - protein, 10 aa, Artificial Sequence
  Description of Artificial Sequence: Synthetic epitope
LQLNTSSTNH

SEQ ID NO: 27015 - protein, 10 aa, Artificial Sequence
  Description of Artificial Sequence: Synthetic epitope
LQLRSMLSSK

SEQ ID NO: 27016 - protein, 10 aa, Artificial Sequence
  Description of Artificial Sequence: Synthetic epitope
LQLRVVKEGD

SEQ ID NO: 27017 - protein, 10 aa, Artificial Sequence
  Description of Artificial Sequence: Synthetic epitope
LQLSKRPLVA

SEQ ID NO: 27018 - protein, 10 aa, Artificial Sequence
  Description of Artificial Sequence: Synthetic epitope
LQLSQYRQLK

SEQ ID NO: 27019 - protein, 10 aa, Artificial Sequence
  Description of Artificial Sequence: Synthetic epitope
LQMAVLVEKQ

SEQ ID NO: 27020 - protein, 10 aa, Artificial Sequence
  Description of Artificial Sequence: Synthetic epitope
LQMEFKAVQQ

SEQ ID NO: 27021 - protein, 10 aa, Artificial Sequence
  Description of Artificial Sequence: Synthetic epitope
LQMEQALAGE

SEQ ID NO: 27022 - protein, 10 aa, Artificial Sequence
  Description of Artificial Sequence: Synthetic epitope
LQMETSNERV

SEQ ID NO: 27023 - protein, 10 aa, Artificial Sequence
  Description of Artificial Sequence: Synthetic epitope
LQMETSNERV

SEQ ID NO: 27024 - protein, 10 aa, Artificial Sequence
  Description of Artificial Sequence: Synthetic epitope
LQMLRQATKR

SEQ ID NO: 27025 - protein, 10 aa, Artificial Sequence
  Description of Artificial Sequence: Synthetic epitope
LQMNKNTSVL

SEQ ID NO: 27026 - protein, 10 aa, Artificial Sequence
  Description of Artificial Sequence: Synthetic epitope
LQMSLLKLNN

SEQ ID NO: 27027 - protein, 10 aa, Artificial Sequence
  Description of Artificial Sequence: Synthetic epitope
LQNAKALESA

SEQ ID NO: 27028 - protein, 10 aa, Artificial Sequence
  Description of Artificial Sequence: Synthetic epitope
LQNASSLDAT

SEQ ID NO: 27029 - protein, 10 aa, Artificial Sequence
  Description of Artificial Sequence: Synthetic epitope
LQNEKNESRL

SEQ ID NO: 27030 - protein, 10 aa, Artificial Sequence
  Description of Artificial Sequence: Synthetic epitope
LQNELKVDQL

SEQ ID NO: 27031 - protein, 10 aa, Artificial Sequence
  Description of Artificial Sequence: Synthetic epitope
LQNHKMWKKV

SEQ ID NO: 27032 - protein, 10 aa, Artificial Sequence
  Description of Artificial Sequence: Synthetic epitope
LQNLFSLSQL

SEQ ID NO: 27033 - protein, 10 aa, Artificial Sequence
  Description of Artificial Sequence: Synthetic epitope
LQNLNAMQAG

SEQ ID NO: 27034 - protein, 10 aa, Artificial Sequence
  Description of Artificial Sequence: Synthetic epitope
LQNLQATSSL

SEQ ID NO: 27035 - protein, 10 aa, Artificial Sequence
  Description of Artificial Sequence: Synthetic epitope
LQNQSIQKSV

SEQ ID NO: 27036 - protein, 10 aa, Artificial Sequence
  Description of Artificial Sequence: Synthetic epitope
LQNSDSSASA

SEQ ID NO: 27037 - protein, 10 aa, Artificial Sequence
  Description of Artificial Sequence: Synthetic epitope
LQNSPAVSLP

SEQ ID NO: 27038 - protein, 10 aa, Artificial Sequence
  Description of Artificial Sequence: Synthetic epitope
LQPDNSTLTW

SEQ ID NO: 27039 - protein, 10 aa, Artificial Sequence
  Description of Artificial Sequence: Synthetic epitope
LQPKEMKSSA

SEQ ID NO: 27040 - protein, 10 aa, Artificial Sequence
  Description of Artificial Sequence: Synthetic epitope
LQPSRRVKRS

SEQ ID NO: 27041 - protein, 10 aa, Artificial Sequence
  Description of Artificial Sequence: Synthetic epitope
LQQAALLPQE

SEQ ID NO: 27042 - protein, 10 aa, Artificial Sequence
  Description of Artificial Sequence: Synthetic epitope
LQQEAETMAE

SEQ ID NO: 27043 - protein, 10 aa, Artificial Sequence
  Description of Artificial Sequence: Synthetic epitope
LQQFGLVKDT

SEQ ID NO: 27044 - protein, 10 aa, Artificial Sequence
  Description of Artificial Sequence: Synthetic epitope
LQQGSDLSEQ

SEQ ID NO: 27045 - protein, 10 aa, Artificial Sequence
  Description of Artificial Sequence: Synthetic epitope
LQQILSLKVV

SEQ ID NO: 27046 - protein, 10 aa, Artificial Sequence
  Description of Artificial Sequence: Synthetic epitope
LQQIREDEER

SEQ ID NO: 27047 - protein, 10 aa, Artificial Sequence
  Description of Artificial Sequence: Synthetic epitope
LQQKLETERE

SEQ ID NO: 27048 - protein, 10 aa, Artificial Sequence
  Description of Artificial Sequence: Synthetic epitope
LQQKPVNKDQ

SEQ ID NO: 27049 - protein, 10 aa, Artificial Sequence
  Description of Artificial Sequence: Synthetic epitope
LQQKRALRAQ

SEQ ID NO: 27050 - protein, 10 aa, Artificial Sequence
  Description of Artificial Sequence: Synthetic epitope
LQQMAAKDRG

SEQ ID NO: 27051 - protein, 10 aa, Artificial Sequence
  Description of Artificial Sequence: Synthetic epitope
LQQPMNARVK

SEQ ID NO: 27052 - protein, 10 aa, Artificial Sequence
  Description of Artificial Sequence: Synthetic epitope
LQQRISIGSA

SEQ ID NO: 27053 - protein, 10 aa, Artificial Sequence
  Description of Artificial Sequence: Synthetic epitope
LQQRKVADVS

SEQ ID NO: 27054 - protein, 10 aa, Artificial Sequence
  Description of Artificial Sequence: Synthetic epitope
LQQSDALHSA

SEQ ID NO: 27055 - protein, 10 aa, Artificial Sequence
  Description of Artificial Sequence: Synthetic epitope
LQQSSLSSQF

SEQ ID NO: 27056 - protein, 10 aa, Artificial Sequence
  Description of Artificial Sequence: Synthetic epitope
LQQTTVKEKL

SEQ ID NO: 27057 - protein, 10 aa, Artificial Sequence
  Description of Artificial Sequence: Synthetic epitope
LQQVASQEDI

SEQ ID NO: 27058 - protein, 10 aa, Artificial Sequence
  Description of Artificial Sequence: Synthetic epitope
LQRELQSLSQ

SEQ ID NO: 27059 - protein, 10 aa, Artificial Sequence
  Description of Artificial Sequence: Synthetic epitope
LQRESQSAKA

SEQ ID NO: 27060 - protein, 10 aa, Artificial Sequence
  Description of Artificial Sequence: Synthetic epitope
LQRMEGSQEV

SEQ ID NO: 27061 - protein, 10 aa, Artificial Sequence
  Description of Artificial Sequence: Synthetic epitope
LQRNSSTMDL

SEQ ID NO: 27062 - protein, 10 aa, Artificial Sequence
  Description of Artificial Sequence: Synthetic epitope
LQRQIALRNQ

SEQ ID NO: 27063 - protein, 10 aa, Artificial Sequence
  Description of Artificial Sequence: Synthetic epitope
LQRQQATAAE

SEQ ID NO: 27064 - protein, 10 aa, Artificial Sequence
  Description of Artificial Sequence: Synthetic epitope
LQRSKETQEE

SEQ ID NO: 27065 - protein, 10 aa, Artificial Sequence
  Description of Artificial Sequence: Synthetic epitope
LQRSNSIQQM

SEQ ID NO: 27066 - protein, 10 aa, Artificial Sequence
  Description of Artificial Sequence: Synthetic epitope
LQRVKAVKIV

SEQ ID NO: 27067 - protein, 10 aa, Artificial Sequence
  Description of Artificial Sequence: Synthetic epitope
LQSAKTQIKL

SEQ ID NO: 27068 - protein, 10 aa, Artificial Sequence
  Description of Artificial Sequence: Synthetic epitope
LQSDKALTAG

SEQ ID NO: 27069 - protein, 10 aa, Artificial Sequence
  Description of Artificial Sequence: Synthetic epitope
LQSEKESLLK

SEQ ID NO: 27070 - protein, 10 aa, Artificial Sequence
  Description of Artificial Sequence: Synthetic epitope
LQSETQLPLL

SEQ ID NO: 27071 - protein, 10 aa, Artificial Sequence
  Description of Artificial Sequence: Synthetic epitope
LQSHLEAESS

SEQ ID NO: 27072 - protein, 10 aa, Artificial Sequence
  Description of Artificial Sequence: Synthetic epitope
LQSKSSTAPS

SEQ ID NO: 27073 - protein, 10 aa, Artificial Sequence
  Description of Artificial Sequence: Synthetic epitope
LQSLEAAEIE

SEQ ID NO: 27074 - protein, 10 aa, Artificial Sequence
  Description of Artificial Sequence: Synthetic epitope
LQSLVSIKQE

SEQ ID NO: 27075 - protein, 10 aa, Artificial Sequence
  Description of Artificial Sequence: Synthetic epitope
LQSMAILGKA

SEQ ID NO: 27076 - protein, 10 aa, Artificial Sequence
  Description of Artificial Sequence: Synthetic epitope
LQSMRSSQQT

SEQ ID NO: 27077 - protein, 10 aa, Artificial Sequence
  Description of Artificial Sequence: Synthetic epitope
LQSPAILSSF

SEQ ID NO: 27078 - protein, 10 aa, Artificial Sequence
  Description of Artificial Sequence: Synthetic epitope
LQSTLKAKLQ

SEQ ID NO: 27079 - protein, 10 aa, Artificial Sequence
  Description of Artificial Sequence: Synthetic epitope
LQSVSSAIHL

SEQ ID NO: 27080 - protein, 10 aa, Artificial Sequence
  Description of Artificial Sequence: Synthetic epitope
LQTAGESGSS

SEQ ID NO: 27081 - protein, 10 aa, Artificial Sequence
  Description of Artificial Sequence: Synthetic epitope
LQTAQREKQE

SEQ ID NO: 27082 - protein, 10 aa, Artificial Sequence
  Description of Artificial Sequence: Synthetic epitope
LQTDYATEKE

SEQ ID NO: 27083 - protein, 10 aa, Artificial Sequence
  Description of Artificial Sequence: Synthetic epitope
LQTEAQVEKQ

SEQ ID NO: 27084 - protein, 10 aa, Artificial Sequence
  Description of Artificial Sequence: Synthetic epitope
LQTEASLDSV

SEQ ID NO: 27085 - protein, 10 aa, Artificial Sequence
  Description of Artificial Sequence: Synthetic epitope
LQTEDSLKAA

SEQ ID NO: 27086 - protein, 10 aa, Artificial Sequence
  Description of Artificial Sequence: Synthetic epitope
LQTEGSLSTR

SEQ ID NO: 27087 - protein, 10 aa, Artificial Sequence
  Description of Artificial Sequence: Synthetic epitope
LQTKRTASDS

SEQ ID NO: 27088 - protein, 10 aa, Artificial Sequence
  Description of Artificial Sequence: Synthetic epitope
LQTLRALSEV

SEQ ID NO: 27089 - protein, 10 aa, Artificial Sequence
  Description of Artificial Sequence: Synthetic epitope
LQTNLKVSGA

SEQ ID NO: 27090 - protein, 10 aa, Artificial Sequence
  Description of Artificial Sequence: Synthetic epitope
LQTQLVDQLQ

SEQ ID NO: 27091 - protein, 10 aa, Artificial Sequence
  Description of Artificial Sequence: Synthetic epitope
LQTQTVTVNP

SEQ ID NO: 27092 - protein, 10 aa, Artificial Sequence
  Description of Artificial Sequence: Synthetic epitope
LQTRKQRNEQ

SEQ ID NO: 27093 - protein, 10 aa, Artificial Sequence
  Description of Artificial Sequence: Synthetic epitope
LQTSSPYKQA

SEQ ID NO: 27094 - protein, 10 aa, Artificial Sequence
  Description of Artificial Sequence: Synthetic epitope
LQTSTSVHEL

SEQ ID NO: 27095 - protein, 10 aa, Artificial Sequence
  Description of Artificial Sequence: Synthetic epitope
LQVELKTRKT

SEQ ID NO: 27096 - protein, 10 aa, Artificial Sequence
  Description of Artificial Sequence: Synthetic epitope
LQVESQEQPE

SEQ ID NO: 27097 - protein, 10 aa, Artificial Sequence
  Description of Artificial Sequence: Synthetic epitope
LQVKIPSKEE

SEQ ID NO: 27098 - protein, 10 aa, Artificial Sequence
  Description of Artificial Sequence: Synthetic epitope
LQVLQKVQLD

SEQ ID NO: 27099 - protein, 10 aa, Artificial Sequence
  Description of Artificial Sequence: Synthetic epitope
LQVLSESAGK

SEQ ID NO: 27100 - protein, 10 aa, Artificial Sequence
  Description of Artificial Sequence: Synthetic epitope
LQVLTKAVKS

SEQ ID NO: 27101 - protein, 10 aa, Artificial Sequence
  Description of Artificial Sequence: Synthetic epitope
LQVRQRVKPD

SEQ ID NO: 27102 - protein, 10 aa, Artificial Sequence
  Description of Artificial Sequence: Synthetic epitope
LQVTKKRVAN

SEQ ID NO: 27103 - protein, 10 aa, Artificial Sequence
  Description of Artificial Sequence: Synthetic epitope
LQVTKQITQE

SEQ ID NO: 27104 - protein, 10 aa, Artificial Sequence
  Description of Artificial Sequence: Synthetic epitope
LQVVEAISEG

SEQ ID NO: 27105 - protein, 10 aa, Artificial Sequence
  Description of Artificial Sequence: Synthetic epitope
LQYKSKVTEE

SEQ ID NO: 27106 - protein, 10 aa, Artificial Sequence
  Description of Artificial Sequence: Synthetic epitope
LRAAMEALVV

SEQ ID NO: 27107 - protein, 10 aa, Artificial Sequence
  Description of Artificial Sequence: Synthetic epitope
LRAANLAKMT

SEQ ID NO: 27108 - protein, 10 aa, Artificial Sequence
  Description of Artificial Sequence: Synthetic epitope
LRAEQAIEVG

SEQ ID NO: 27109 - protein, 10 aa, Artificial Sequence
  Description of Artificial Sequence: Synthetic epitope
LRALTTVTAL

SEQ ID NO: 27110 - protein, 10 aa, Artificial Sequence
  Description of Artificial Sequence: Synthetic epitope
LRASIRRESQ

SEQ ID NO: 27111 - protein, 10 aa, Artificial Sequence
  Description of Artificial Sequence: Synthetic epitope
LRASSEFKSV

SEQ ID NO: 27112 - protein, 10 aa, Artificial Sequence
  Description of Artificial Sequence: Synthetic epitope
LRATVASSTQ

SEQ ID NO: 27113 - protein, 10 aa, Artificial Sequence
  Description of Artificial Sequence: Synthetic epitope
LRDEIADKAE

SEQ ID NO: 27114 - protein, 10 aa, Artificial Sequence
  Description of Artificial Sequence: Synthetic epitope
LRDLSDAGKR

SEQ ID NO: 27115 - protein, 10 aa, Artificial Sequence
  Description of Artificial Sequence: Synthetic epitope
LRDSASSAED

SEQ ID NO: 27116 - protein, 10 aa, Artificial Sequence
  Description of Artificial Sequence: Synthetic epitope
LRDTLSIAST

SEQ ID NO: 27117 - protein, 10 aa, Artificial Sequence
  Description of Artificial Sequence: Synthetic epitope
LREALAEQEA

SEQ ID NO: 27118 - protein, 10 aa, Artificial Sequence
  Description of Artificial Sequence: Synthetic epitope
LREELQFKEE

SEQ ID NO: 27119 - protein, 10 aa, Artificial Sequence
  Description of Artificial Sequence: Synthetic epitope
LREESSRTEI

SEQ ID NO: 27120 - protein, 10 aa, Artificial Sequence
  Description of Artificial Sequence: Synthetic epitope
LREEVDLSPA

SEQ ID NO: 27121 - protein, 10 aa, Artificial Sequence
  Description of Artificial Sequence: Synthetic epitope
LREEVTKLRM

SEQ ID NO: 27122 - protein, 10 aa, Artificial Sequence
  Description of Artificial Sequence: Synthetic epitope
LREKLTLLHY

SEQ ID NO: 27123 - protein, 10 aa, Artificial Sequence
  Description of Artificial Sequence: Synthetic epitope
LREKSSADLK

SEQ ID NO: 27124 - protein, 10 aa, Artificial Sequence
  Description of Artificial Sequence: Synthetic epitope
LRERHTSTSN

SEQ ID NO: 27125 - protein, 10 aa, Artificial Sequence
  Description of Artificial Sequence: Synthetic epitope
LREVMVKENK

SEQ ID NO: 27126 - protein, 10 aa, Artificial Sequence
  Description of Artificial Sequence: Synthetic epitope
LREYTSRESK

SEQ ID NO: 27127 - protein, 10 aa, Artificial Sequence
  Description of Artificial Sequence: Synthetic epitope
LRFAASMKAS

SEQ ID NO: 27128 - protein, 10 aa, Artificial Sequence
  Description of Artificial Sequence: Synthetic epitope
LRFKSGRPTA

SEQ ID NO: 27129 - protein, 10 aa, Artificial Sequence
  Description of Artificial Sequence: Synthetic epitope
LRGAAQRSLT

SEQ ID NO: 27130 - protein, 10 aa, Artificial Sequence
  Description of Artificial Sequence: Synthetic epitope
LRGESLSSGK

SEQ ID NO: 27131 - protein, 10 aa, Artificial Sequence
  Description of Artificial Sequence: Synthetic epitope
LRGKPMEHVS

SEQ ID NO: 27132 - protein, 10 aa, Artificial Sequence
  Description of Artificial Sequence: Synthetic epitope
LRIAPAFSSM

SEQ ID NO: 27133 - protein, 10 aa, Artificial Sequence
  Description of Artificial Sequence: Synthetic epitope
LRIGLTESRV

SEQ ID NO: 27134 - protein, 10 aa, Artificial Sequence
  Description of Artificial Sequence: Synthetic epitope
LRIKGKASKK

SEQ ID NO: 27135 - protein, 10 aa, Artificial Sequence
  Description of Artificial Sequence: Synthetic epitope
LRIVQAIKAP

SEQ ID NO: 27136 - protein, 10 aa, Artificial Sequence
  Description of Artificial Sequence: Synthetic epitope
LRKALLQDSA

SEQ ID NO: 27137 - protein, 10 aa, Artificial Sequence
  Description of Artificial Sequence: Synthetic epitope
LRKFIPVMVQ

SEQ ID NO: 27138 - protein, 10 aa, Artificial Sequence
  Description of Artificial Sequence: Synthetic epitope
LRKIRARTQK

SEQ ID NO: 27139 - protein, 10 aa, Artificial Sequence
  Description of Artificial Sequence: Synthetic epitope
LRKLNTMTAA

SEQ ID NO: 27140 - protein, 10 aa, Artificial Sequence
  Description of Artificial Sequence: Synthetic epitope
LRKNELETEN

SEQ ID NO: 27141 - protein, 10 aa, Artificial Sequence
  Description of Artificial Sequence: Synthetic epitope
LRKQLISEKP

SEQ ID NO: 27142 - protein, 10 aa, Artificial Sequence
  Description of Artificial Sequence: Synthetic epitope
LRKQSINETP

SEQ ID NO: 27143 - protein, 10 aa, Artificial Sequence
  Description of Artificial Sequence: Synthetic epitope
LRKSSLLKKY

SEQ ID NO: 27144 - protein, 10 aa, Artificial Sequence
  Description of Artificial Sequence: Synthetic epitope
LRKSSNLDKD

SEQ ID NO: 27145 - protein, 10 aa, Artificial Sequence
  Description of Artificial Sequence: Synthetic epitope
LRLEKHISEQ

SEQ ID NO: 27146 - protein, 10 aa, Artificial Sequence
  Description of Artificial Sequence: Synthetic epitope
LRLESQQLIE

SEQ ID NO: 27147 - protein, 10 aa, Artificial Sequence
  Description of Artificial Sequence: Synthetic epitope
LRLKQQSELQ

SEQ ID NO: 27148 - protein, 10 aa, Artificial Sequence
  Description of Artificial Sequence: Synthetic epitope
LRLQAAIKYS

SEQ ID NO: 27149 - protein, 10 aa, Artificial Sequence
  Description of Artificial Sequence: Synthetic epitope
LRLQQSLESS

SEQ ID NO: 27150 - protein, 10 aa, Artificial Sequence
  Description of Artificial Sequence: Synthetic epitope
LRLRLTQHQQ

SEQ ID NO: 27151 - protein, 10 aa, Artificial Sequence
  Description of Artificial Sequence: Synthetic epitope
LRLRQAQAQH

SEQ ID NO: 27152 - protein, 10 aa, Artificial Sequence
  Description of Artificial Sequence: Synthetic epitope
LRLSIDYALT

SEQ ID NO: 27153 - protein, 10 aa, Artificial Sequence
  Description of Artificial Sequence: Synthetic epitope
LRLTARSQAA

SEQ ID NO: 27154 - protein, 10 aa, Artificial Sequence
  Description of Artificial Sequence: Synthetic epitope
LRMELQVSSG

SEQ ID NO: 27155 - protein, 10 aa, Artificial Sequence
  Description of Artificial Sequence: Synthetic epitope
LRMLIKAKDE

SEQ ID NO: 27156 - protein, 10 aa, Artificial Sequence
  Description of Artificial Sequence: Synthetic epitope
LRMPHGYDTQ

SEQ ID NO: 27157 - protein, 10 aa, Artificial Sequence
  Description of Artificial Sequence: Synthetic epitope
LRMSDPSHTT

SEQ ID NO: 27158 - protein, 10 aa, Artificial Sequence
  Description of Artificial Sequence: Synthetic epitope
LRNITNSQAP

SEQ ID NO: 27159 - protein, 10 aa, Artificial Sequence
  Description of Artificial Sequence: Synthetic epitope
LRNKIEFKRP

SEQ ID NO: 27160 - protein, 10 aa, Artificial Sequence
  Description of Artificial Sequence: Synthetic epitope
LRNKMTIPKN

SEQ ID NO: 27161 - protein, 10 aa, Artificial Sequence
  Description of Artificial Sequence: Synthetic epitope
LRNLQRAQMT

SEQ ID NO: 27162 - protein, 10 aa, Artificial Sequence
  Description of Artificial Sequence: Synthetic epitope
LRNQLSSQKS

SEQ ID NO: 27163 - protein, 10 aa, Artificial Sequence
  Description of Artificial Sequence: Synthetic epitope
LRNTEASSEE

SEQ ID NO: 27164 - protein, 10 aa, Artificial Sequence
  Description of Artificial Sequence: Synthetic epitope
LRNVAQRLFE

SEQ ID NO: 27165 - protein, 10 aa, Artificial Sequence
  Description of Artificial Sequence: Synthetic epitope
LRNVMVLQDE

SEQ ID NO: 27166 - protein, 10 aa, Artificial Sequence
  Description of Artificial Sequence: Synthetic epitope
LRPSIAATQL

SEQ ID NO: 27167 - protein, 10 aa, Artificial Sequence
  Description of Artificial Sequence: Synthetic epitope
LRPTAATTGD

SEQ ID NO: 27168 - protein, 10 aa, Artificial Sequence
  Description of Artificial Sequence: Synthetic epitope
LRPTKAKSER

SEQ ID NO: 27169 - protein, 10 aa, Artificial Sequence
  Description of Artificial Sequence: Synthetic epitope
LRPTKTESSL

SEQ ID NO: 27170 - protein, 10 aa, Artificial Sequence
  Description of Artificial Sequence: Synthetic epitope
LRQAQTRPFQ

SEQ ID NO: 27171 - protein, 10 aa, Artificial Sequence
  Description of Artificial Sequence: Synthetic epitope
LRQEMVIEVK

SEQ ID NO: 27172 - protein, 10 aa, Artificial Sequence
  Description of Artificial Sequence: Synthetic epitope
LRQEVTLELQ

SEQ ID NO: 27173 - protein, 10 aa, Artificial Sequence
  Description of Artificial Sequence: Synthetic epitope
LRQIATLVEA

SEQ ID NO: 27174 - protein, 10 aa, Artificial Sequence
  Description of Artificial Sequence: Synthetic epitope
LRQITTAQSV

SEQ ID NO: 27175 - protein, 10 aa, Artificial Sequence
  Description of Artificial Sequence: Synthetic epitope
LRQKSPSDQQ

SEQ ID NO: 27176 - protein, 10 aa, Artificial Sequence
  Description of Artificial Sequence: Synthetic epitope
LRQTIAATRS

SEQ ID NO: 27177 - protein, 10 aa, Artificial Sequence
  Description of Artificial Sequence: Synthetic epitope
LRQTRTVPQS

SEQ ID NO: 27178 - protein, 10 aa, Artificial Sequence
  Description of Artificial Sequence: Synthetic epitope
LRQTSKASSE

SEQ ID NO: 27179 - protein, 10 aa, Artificial Sequence
  Description of Artificial Sequence: Synthetic epitope
LRQTVKQLKE

SEQ ID NO: 27180 - protein, 10 aa, Artificial Sequence
  Description of Artificial Sequence: Synthetic epitope
LRRARTVELP

SEQ ID NO: 27181 - protein, 10 aa, Artificial Sequence
  Description of Artificial Sequence: Synthetic epitope
LRRIERWQAT

SEQ ID NO: 27182 - protein, 10 aa, Artificial Sequence
  Description of Artificial Sequence: Synthetic epitope
LRRLALSSRS

SEQ ID NO: 27183 - protein, 10 aa, Artificial Sequence
  Description of Artificial Sequence: Synthetic epitope
LRRQKLKQQK

SEQ ID NO: 27184 - protein, 10 aa, Artificial Sequence
  Description of Artificial Sequence: Synthetic epitope
LRRQLSEEPS

SEQ ID NO: 27185 - protein, 10 aa, Artificial Sequence
  Description of Artificial Sequence: Synthetic epitope
LRSESSYDID

SEQ ID NO: 27186 - protein, 10 aa, Artificial Sequence
  Description of Artificial Sequence: Synthetic epitope
LRSGSERKQL

SEQ ID NO: 27187 - protein, 10 aa, Artificial Sequence
  Description of Artificial Sequence: Synthetic epitope
LRSIAIGKKL

SEQ ID NO: 27188 - protein, 10 aa, Artificial Sequence
  Description of Artificial Sequence: Synthetic epitope
LRSIRLKMNA

SEQ ID NO: 27189 - protein, 10 aa, Artificial Sequence
  Description of Artificial Sequence: Synthetic epitope
LRSLNSLVLY

SEQ ID NO: 27190 - protein, 10 aa, Artificial Sequence
  Description of Artificial Sequence: Synthetic epitope
LRSNKKREMD

SEQ ID NO: 27191 - protein, 10 aa, Artificial Sequence
  Description of Artificial Sequence: Synthetic epitope
LRSQHEKAAL

SEQ ID NO: 27192 - protein, 10 aa, Artificial Sequence
  Description of Artificial Sequence: Synthetic epitope
LRSQTSRGSA

SEQ ID NO: 27193 - protein, 10 aa, Artificial Sequence
  Description of Artificial Sequence: Synthetic epitope
LRSRAKGAYI

SEQ ID NO: 27194 - protein, 10 aa, Artificial Sequence
  Description of Artificial Sequence: Synthetic epitope
LRSSQIRLHE

SEQ ID NO: 27195 - protein, 10 aa, Artificial Sequence
  Description of Artificial Sequence: Synthetic epitope
LRSSTVRAMP

SEQ ID NO: 27196 - protein, 10 aa, Artificial Sequence
  Description of Artificial Sequence: Synthetic epitope
LRSVQKYHVF

SEQ ID NO: 27197 - protein, 10 aa, Artificial Sequence
  Description of Artificial Sequence: Synthetic epitope
LRTALTSAEA

SEQ ID NO: 27198 - protein, 10 aa, Artificial Sequence
  Description of Artificial Sequence: Synthetic epitope
LRTSEETIST

SEQ ID NO: 27199 - protein, 10 aa, Artificial Sequence
  Description of Artificial Sequence: Synthetic epitope
LRTSLASLRS

SEQ ID NO: 27200 - protein, 10 aa, Artificial Sequence
  Description of Artificial Sequence: Synthetic epitope
LRTSRISSKA

SEQ ID NO: 27201 - protein, 10 aa, Artificial Sequence
  Description of Artificial Sequence: Synthetic epitope
LRTTVSAQSR

SEQ ID NO: 27202 - protein, 10 aa, Artificial Sequence
  Description of Artificial Sequence: Synthetic epitope
LRVESKIEQE

SEQ ID NO: 27203 - protein, 10 aa, Artificial Sequence
  Description of Artificial Sequence: Synthetic epitope
LRVIPPKWPK

SEQ ID NO: 27204 - protein, 10 aa, Artificial Sequence
  Description of Artificial Sequence: Synthetic epitope
LRVKAEEDKI

SEQ ID NO: 27205 - protein, 10 aa, Artificial Sequence
  Description of Artificial Sequence: Synthetic epitope
LRVKETSNEN

SEQ ID NO: 27206 - protein, 10 aa, Artificial Sequence
  Description of Artificial Sequence: Synthetic epitope
LRVNQEELSE

SEQ ID NO: 27207 - protein, 10 aa, Artificial Sequence
  Description of Artificial Sequence: Synthetic epitope
LRVVLSLHHP

SEQ ID NO: 27208 - protein, 10 aa, Artificial Sequence
  Description of Artificial Sequence: Synthetic epitope
LRWDASTRSD

SEQ ID NO: 27209 - protein, 10 aa, Artificial Sequence
  Description of Artificial Sequence: Synthetic epitope
LSAAGQAREE

SEQ ID NO: 27210 - protein, 10 aa, Artificial Sequence
  Description of Artificial Sequence: Synthetic epitope
LSAAQESLEG

SEQ ID NO: 27211 - protein, 10 aa, Artificial Sequence
  Description of Artificial Sequence: Synthetic epitope
LSADGKGSKG

SEQ ID NO: 27212 - protein, 10 aa, Artificial Sequence
  Description of Artificial Sequence: Synthetic epitope
LSADKEFTRA

SEQ ID NO: 27213 - protein, 10 aa, Artificial Sequence
  Description of Artificial Sequence: Synthetic epitope
LSADKEFTRA

SEQ ID NO: 27214 - protein, 10 aa, Artificial Sequence
  Description of Artificial Sequence: Synthetic epitope
LSAEAAKTAQ

SEQ ID NO: 27215 - protein, 10 aa, Artificial Sequence
  Description of Artificial Sequence: Synthetic epitope
LSAEALKPGM

SEQ ID NO: 27216 - protein, 10 aa, Artificial Sequence
  Description of Artificial Sequence: Synthetic epitope
LSAEGTTGLA

SEQ ID NO: 27217 - protein, 10 aa, Artificial Sequence
  Description of Artificial Sequence: Synthetic epitope
LSAEKTKAEH

SEQ ID NO: 27218 - protein, 10 aa, Artificial Sequence
  Description of Artificial Sequence: Synthetic epitope
LSAESLDKNS

SEQ ID NO: 27219 - protein, 10 aa, Artificial Sequence
  Description of Artificial Sequence: Synthetic epitope
LSAGLYRQSS

SEQ ID NO: 27220 - protein, 10 aa, Artificial Sequence
  Description of Artificial Sequence: Synthetic epitope
LSALEEYTKK

SEQ ID NO: 27221 - protein, 10 aa, Artificial Sequence
  Description of Artificial Sequence: Synthetic epitope
LSALSDRQMS

SEQ ID NO: 27222 - protein, 10 aa, Artificial Sequence
  Description of Artificial Sequence: Synthetic epitope
LSAMEEMEFQ

SEQ ID NO: 27223 - protein, 10 aa, Artificial Sequence
  Description of Artificial Sequence: Synthetic epitope
LSAMESTASL

SEQ ID NO: 27224 - protein, 10 aa, Artificial Sequence
  Description of Artificial Sequence: Synthetic epitope
LSAQTLVRAE

SEQ ID NO: 27225 - protein, 10 aa, Artificial Sequence
  Description of Artificial Sequence: Synthetic epitope
LSASEVAALS

SEQ ID NO: 27226 - protein, 10 aa, Artificial Sequence
  Description of Artificial Sequence: Synthetic epitope
LSASKSSLIR

SEQ ID NO: 27227 - protein, 10 aa, Artificial Sequence
  Description of Artificial Sequence: Synthetic epitope
LSASRKSAEQ

SEQ ID NO: 27228 - protein, 10 aa, Artificial Sequence
  Description of Artificial Sequence: Synthetic epitope
LSATDLKTKR

SEQ ID NO: 27229 - protein, 10 aa, Artificial Sequence
  Description of Artificial Sequence: Synthetic epitope
LSAYQLNVHQ

SEQ ID NO: 27230 - protein, 10 aa, Artificial Sequence
  Description of Artificial Sequence: Synthetic epitope
LSDANGQEKQ

SEQ ID NO: 27231 - protein, 10 aa, Artificial Sequence
  Description of Artificial Sequence: Synthetic epitope
LSDDASKAGM

SEQ ID NO: 27232 - protein, 10 aa, Artificial Sequence
  Description of Artificial Sequence: Synthetic epitope
LSDEFNIATG

SEQ ID NO: 27233 - protein, 10 aa, Artificial Sequence
  Description of Artificial Sequence: Synthetic epitope
LSDGSNTLSV

SEQ ID NO: 27234 - protein, 10 aa, Artificial Sequence
  Description of Artificial Sequence: Synthetic epitope
LSDLSATSSR

SEQ ID NO: 27235 - protein, 10 aa, Artificial Sequence
  Description of Artificial Sequence: Synthetic epitope
LSDSESRSRG

SEQ ID NO: 27236 - protein, 10 aa, Artificial Sequence
  Description of Artificial Sequence: Synthetic epitope
LSDSIASEGS

SEQ ID NO: 27237 - protein, 10 aa, Artificial Sequence
  Description of Artificial Sequence: Synthetic epitope
LSDSVIATIQ

SEQ ID NO: 27238 - protein, 10 aa, Artificial Sequence
  Description of Artificial Sequence: Synthetic epitope
LSEAAISASL

SEQ ID NO: 27239 - protein, 10 aa, Artificial Sequence
  Description of Artificial Sequence: Synthetic epitope
LSEAASDTTQ

SEQ ID NO: 27240 - protein, 10 aa, Artificial Sequence
  Description of Artificial Sequence: Synthetic epitope
LSEARLSQRD

SEQ ID NO: 27241 - protein, 10 aa, Artificial Sequence
  Description of Artificial Sequence: Synthetic epitope
LSEEGMSKAE

SEQ ID NO: 27242 - protein, 10 aa, Artificial Sequence
  Description of Artificial Sequence: Synthetic epitope
LSEELMFSSE

SEQ ID NO: 27243 - protein, 10 aa, Artificial Sequence
  Description of Artificial Sequence: Synthetic epitope
LSEEVELSST

SEQ ID NO: 27244 - protein, 10 aa, Artificial Sequence
  Description of Artificial Sequence: Synthetic epitope
LSEFATTNQI

SEQ ID NO: 27245 - protein, 10 aa, Artificial Sequence
  Description of Artificial Sequence: Synthetic epitope
LSEIESDSLA

SEQ ID NO: 27246 - protein, 10 aa, Artificial Sequence
  Description of Artificial Sequence: Synthetic epitope
LSEKEALIKP

SEQ ID NO: 27247 - protein, 10 aa, Artificial Sequence
  Description of Artificial Sequence: Synthetic epitope
LSEKSQVELS

SEQ ID NO: 27248 - protein, 10 aa, Artificial Sequence
  Description of Artificial Sequence: Synthetic epitope
LSELIKKSSG

SEQ ID NO: 27249 - protein, 10 aa, Artificial Sequence
  Description of Artificial Sequence: Synthetic epitope
LSELSVLQAK

SEQ ID NO: 27250 - protein, 10 aa, Artificial Sequence
  Description of Artificial Sequence: Synthetic epitope
LSELVSINKE

SEQ ID NO: 27251 - protein, 10 aa, Artificial Sequence
  Description of Artificial Sequence: Synthetic epitope
LSEQARAAGA

SEQ ID NO: 27252 - protein, 10 aa, Artificial Sequence
  Description of Artificial Sequence: Synthetic epitope
LSEQFLESEQ

SEQ ID NO: 27253 - protein, 10 aa, Artificial Sequence
  Description of Artificial Sequence: Synthetic epitope
LSERLSSADK

SEQ ID NO: 27254 - protein, 10 aa, Artificial Sequence
  Description of Artificial Sequence: Synthetic epitope
LSERRAVLAS

SEQ ID NO: 27255 - protein, 10 aa, Artificial Sequence
  Description of Artificial Sequence: Synthetic epitope
LSESSALKQP

SEQ ID NO: 27256 - protein, 10 aa, Artificial Sequence
  Description of Artificial Sequence: Synthetic epitope
LSESVQLPTL

SEQ ID NO: 27257 - protein, 10 aa, Artificial Sequence
  Description of Artificial Sequence: Synthetic epitope
LSETKKTKLQ

SEQ ID NO: 27258 - protein, 10 aa, Artificial Sequence
  Description of Artificial Sequence: Synthetic epitope
LSETKKTKLQ

SEQ ID NO: 27259 - protein, 10 aa, Artificial Sequence
  Description of Artificial Sequence: Synthetic epitope
LSETTLAQPQ

SEQ ID NO: 27260 - protein, 10 aa, Artificial Sequence
  Description of Artificial Sequence: Synthetic epitope
LSEVVKLRES

SEQ ID NO: 27261 - protein, 10 aa, Artificial Sequence
  Description of Artificial Sequence: Synthetic epitope
LSFKLNVDSH

SEQ ID NO: 27262 - protein, 10 aa, Artificial Sequence
  Description of Artificial Sequence: Synthetic epitope
LSFKVLKHPD

SEQ ID NO: 27263 - protein, 10 aa, Artificial Sequence
  Description of Artificial Sequence: Synthetic epitope
LSFQEIALLK

SEQ ID NO: 27264 - protein, 10 aa, Artificial Sequence
  Description of Artificial Sequence: Synthetic epitope
LSGLQVAVET

SEQ ID NO: 27265 - protein, 10 aa, Artificial Sequence
  Description of Artificial Sequence: Synthetic epitope
LSGSQMSLSG

SEQ ID NO: 27266 - protein, 10 aa, Artificial Sequence
  Description of Artificial Sequence: Synthetic epitope
LSGTRVLASK

SEQ ID NO: 27267 - protein, 10 aa, Artificial Sequence
  Description of Artificial Sequence: Synthetic epitope
LSGTVVSERE

SEQ ID NO: 27268 - protein, 10 aa, Artificial Sequence
  Description of Artificial Sequence: Synthetic epitope
LSGVQSSAPG

SEQ ID NO: 27269 - protein, 10 aa, Artificial Sequence
  Description of Artificial Sequence: Synthetic epitope
LSGVVRLSSY

SEQ ID NO: 27270 - protein, 10 aa, Artificial Sequence
  Description of Artificial Sequence: Synthetic epitope
LSHEFSLVAP

SEQ ID NO: 27271 - protein, 10 aa, Artificial Sequence
  Description of Artificial Sequence: Synthetic epitope
LSHEGVLQEI

SEQ ID NO: 27272 - protein, 10 aa, Artificial Sequence
  Description of Artificial Sequence: Synthetic epitope
LSHVKVLIKE

SEQ ID NO: 27273 - protein, 10 aa, Artificial Sequence
  Description of Artificial Sequence: Synthetic epitope
LSIEESLALQ

SEQ ID NO: 27274 - protein, 10 aa, Artificial Sequence
  Description of Artificial Sequence: Synthetic epitope
LSIEESLALQ

SEQ ID NO: 27275 - protein, 10 aa, Artificial Sequence
  Description of Artificial Sequence: Synthetic epitope
LSIKSTSSAE

SEQ ID NO: 27276 - protein, 10 aa, Artificial Sequence
  Description of Artificial Sequence: Synthetic epitope
LSILTTLSLE

SEQ ID NO: 27277 - protein, 10 aa, Artificial Sequence
  Description of Artificial Sequence: Synthetic epitope
LSIQNGEQKA

SEQ ID NO: 27278 - protein, 10 aa, Artificial Sequence
  Description of Artificial Sequence: Synthetic epitope
LSIRQDDKVV

SEQ ID NO: 27279 - protein, 10 aa, Artificial Sequence
  Description of Artificial Sequence: Synthetic epitope
LSKAAMKEDA

SEQ ID NO: 27280 - protein, 10 aa, Artificial Sequence
  Description of Artificial Sequence: Synthetic epitope
LSKARIVEYE

SEQ ID NO: 27281 - protein, 10 aa, Artificial Sequence
  Description of Artificial Sequence: Synthetic epitope
LSKEMERPWV

SEQ ID NO: 27282 - protein, 10 aa, Artificial Sequence
  Description of Artificial Sequence: Synthetic epitope
LSKENHMQGK

SEQ ID NO: 27283 - protein, 10 aa, Artificial Sequence
  Description of Artificial Sequence: Synthetic epitope
LSKEQASASG

SEQ ID NO: 27284 - protein, 10 aa, Artificial Sequence
  Description of Artificial Sequence: Synthetic epitope
LSKEWISVSP

SEQ ID NO: 27285 - protein, 10 aa, Artificial Sequence
  Description of Artificial Sequence: Synthetic epitope
LSKIAAIDSL

SEQ ID NO: 27286 - protein, 10 aa, Artificial Sequence
  Description of Artificial Sequence: Synthetic epitope
LSKKLVIVNG

SEQ ID NO: 27287 - protein, 10 aa, Artificial Sequence
  Description of Artificial Sequence: Synthetic epitope
LSKKVNVPPE

SEQ ID NO: 27288 - protein, 10 aa, Artificial Sequence
  Description of Artificial Sequence: Synthetic epitope
LSKMMGSPKS

SEQ ID NO: 27289 - protein, 10 aa, Artificial Sequence
  Description of Artificial Sequence: Synthetic epitope
LSKNLSSISN

SEQ ID NO: 27290 - protein, 10 aa, Artificial Sequence
  Description of Artificial Sequence: Synthetic epitope
LSKPEKMSMQ

SEQ ID NO: 27291 - protein, 10 aa, Artificial Sequence
  Description of Artificial Sequence: Synthetic epitope
LSKQKKLMAK

SEQ ID NO: 27292 - protein, 10 aa, Artificial Sequence
  Description of Artificial Sequence: Synthetic epitope
LSKSDLLANQ

SEQ ID NO: 27293 - protein, 10 aa, Artificial Sequence
  Description of Artificial Sequence: Synthetic epitope
LSKSESAISR

SEQ ID NO: 27294 - protein, 10 aa, Artificial Sequence
  Description of Artificial Sequence: Synthetic epitope
LSKSQEHEQR

SEQ ID NO: 27295 - protein, 10 aa, Artificial Sequence
  Description of Artificial Sequence: Synthetic epitope
LSKTAETDVL

SEQ ID NO: 27296 - protein, 10 aa, Artificial Sequence
  Description of Artificial Sequence: Synthetic epitope
LSKTRSLQQG

SEQ ID NO: 27297 - protein, 10 aa, Artificial Sequence
  Description of Artificial Sequence: Synthetic epitope
LSKTVGTQDT

SEQ ID NO: 27298 - protein, 10 aa, Artificial Sequence
  Description of Artificial Sequence: Synthetic epitope
LSLAKRKRSD

SEQ ID NO: 27299 - protein, 10 aa, Artificial Sequence
  Description of Artificial Sequence: Synthetic epitope
LSLARLADLD

SEQ ID NO: 27300 - protein, 10 aa, Artificial Sequence
  Description of Artificial Sequence: Synthetic epitope
LSLAVEPLTA

SEQ ID NO: 27301 - protein, 10 aa, Artificial Sequence
  Description of Artificial Sequence: Synthetic epitope
LSLELDAASG

SEQ ID NO: 27302 - protein, 10 aa, Artificial Sequence
  Description of Artificial Sequence: Synthetic epitope
LSLESANVED

SEQ ID NO: 27303 - protein, 10 aa, Artificial Sequence
  Description of Artificial Sequence: Synthetic epitope
LSLGLQSQLV

SEQ ID NO: 27304 - protein, 10 aa, Artificial Sequence
  Description of Artificial Sequence: Synthetic epitope
LSLGVRAKRI

SEQ ID NO: 27305 - protein, 10 aa, Artificial Sequence
  Description of Artificial Sequence: Synthetic epitope
LSLKEASTIA

SEQ ID NO: 27306 - protein, 10 aa, Artificial Sequence
  Description of Artificial Sequence: Synthetic epitope
LSLKEQRQQS

SEQ ID NO: 27307 - protein, 10 aa, Artificial Sequence
  Description of Artificial Sequence: Synthetic epitope
LSLKHSLSQN

SEQ ID NO: 27308 - protein, 10 aa, Artificial Sequence
  Description of Artificial Sequence: Synthetic epitope
LSLKLETDTL

SEQ ID NO: 27309 - protein, 10 aa, Artificial Sequence
  Description of Artificial Sequence: Synthetic epitope
LSLKSLVNKG

SEQ ID NO: 27310 - protein, 10 aa, Artificial Sequence
  Description of Artificial Sequence: Synthetic epitope
LSLLSEVTSG

SEQ ID NO: 27311 - protein, 10 aa, Artificial Sequence
  Description of Artificial Sequence: Synthetic epitope
LSLLSLEPAQ

SEQ ID NO: 27312 - protein, 10 aa, Artificial Sequence
  Description of Artificial Sequence: Synthetic epitope
LSLLSMMLGI

SEQ ID NO: 27313 - protein, 10 aa, Artificial Sequence
  Description of Artificial Sequence: Synthetic epitope
LSLLVLAESK

SEQ ID NO: 27314 - protein, 10 aa, Artificial Sequence
  Description of Artificial Sequence: Synthetic epitope
LSLPESIKEN

SEQ ID NO: 27315 - protein, 10 aa, Artificial Sequence
  Description of Artificial Sequence: Synthetic epitope
LSLRDSFSSK

SEQ ID NO: 27316 - protein, 10 aa, Artificial Sequence
  Description of Artificial Sequence: Synthetic epitope
LSLSNSSENA

SEQ ID NO: 27317 - protein, 10 aa, Artificial Sequence
  Description of Artificial Sequence: Synthetic epitope
LSLSTKLKQV

SEQ ID NO: 27318 - protein, 10 aa, Artificial Sequence
  Description of Artificial Sequence: Synthetic epitope
LSLTALKLKA

SEQ ID NO: 27319 - protein, 10 aa, Artificial Sequence
  Description of Artificial Sequence: Synthetic epitope
LSLVEASSES

SEQ ID NO: 27320 - protein, 10 aa, Artificial Sequence
  Description of Artificial Sequence: Synthetic epitope
LSMQKSMQNH

SEQ ID NO: 27321 - protein, 10 aa, Artificial Sequence
  Description of Artificial Sequence: Synthetic epitope
LSMTQQDSHA

SEQ ID NO: 27322 - protein, 10 aa, Artificial Sequence
  Description of Artificial Sequence: Synthetic epitope
LSNASVKTTA

SEQ ID NO: 27323 - protein, 10 aa, Artificial Sequence
  Description of Artificial Sequence: Synthetic epitope
LSNEVFQESE

SEQ ID NO: 27324 - protein, 10 aa, Artificial Sequence
  Description of Artificial Sequence: Synthetic epitope
LSNKKIYQEE

SEQ ID NO: 27325 - protein, 10 aa, Artificial Sequence
  Description of Artificial Sequence: Synthetic epitope
LSNKTNAVEE

SEQ ID NO: 27326 - protein, 10 aa, Artificial Sequence
  Description of Artificial Sequence: Synthetic epitope
LSNLSSTSHV

SEQ ID NO: 27327 - protein, 10 aa, Artificial Sequence
  Description of Artificial Sequence: Synthetic epitope
LSNLTRASFV

SEQ ID NO: 27328 - protein, 10 aa, Artificial Sequence
  Description of Artificial Sequence: Synthetic epitope
LSNRLYISQE

SEQ ID NO: 27329 - protein, 10 aa, Artificial Sequence
  Description of Artificial Sequence: Synthetic epitope
LSNSILSLQP

SEQ ID NO: 27330 - protein, 10 aa, Artificial Sequence
  Description of Artificial Sequence: Synthetic epitope
LSNTEMNNIK

SEQ ID NO: 27331 - protein, 10 aa, Artificial Sequence
  Description of Artificial Sequence: Synthetic epitope
LSNTSKEPSV

SEQ ID NO: 27332 - protein, 10 aa, Artificial Sequence
  Description of Artificial Sequence: Synthetic epitope
LSNVISKSTR

SEQ ID NO: 27333 - protein, 10 aa, Artificial Sequence
  Description of Artificial Sequence: Synthetic epitope
LSPKAATLAE

SEQ ID NO: 27334 - protein, 10 aa, Artificial Sequence
  Description of Artificial Sequence: Synthetic epitope
LSPLTSSILS

SEQ ID NO: 27335 - protein, 10 aa, Artificial Sequence
  Description of Artificial Sequence: Synthetic epitope
LSPRARDAAT

SEQ ID NO: 27336 - protein, 10 aa, Artificial Sequence
  Description of Artificial Sequence: Synthetic epitope
LSPTVVGLSS

SEQ ID NO: 27337 - protein, 10 aa, Artificial Sequence
  Description of Artificial Sequence: Synthetic epitope
LSPVAAILPK

SEQ ID NO: 27338 - protein, 10 aa, Artificial Sequence
  Description of Artificial Sequence: Synthetic epitope
LSQAATMPAP

SEQ ID NO: 27339 - protein, 10 aa, Artificial Sequence
  Description of Artificial Sequence: Synthetic epitope
LSQAATSESQ

SEQ ID NO: 27340 - protein, 10 aa, Artificial Sequence
  Description of Artificial Sequence: Synthetic epitope
LSQAMSLEKP

SEQ ID NO: 27341 - protein, 10 aa, Artificial Sequence
  Description of Artificial Sequence: Synthetic epitope
LSQDAYRRNS

SEQ ID NO: 27342 - protein, 10 aa, Artificial Sequence
  Description of Artificial Sequence: Synthetic epitope
LSQEISFPAP

SEQ ID NO: 27343 - protein, 10 aa, Artificial Sequence
  Description of Artificial Sequence: Synthetic epitope
LSQESGVAQT

SEQ ID NO: 27344 - protein, 10 aa, Artificial Sequence
  Description of Artificial Sequence: Synthetic epitope
LSQESLMASS

SEQ ID NO: 27345 - protein, 10 aa, Artificial Sequence
  Description of Artificial Sequence: Synthetic epitope
LSQEVEIVEE

SEQ ID NO: 27346 - protein, 10 aa, Artificial Sequence
  Description of Artificial Sequence: Synthetic epitope
LSQFNKTAVP

SEQ ID NO: 27347 - protein, 10 aa, Artificial Sequence
  Description of Artificial Sequence: Synthetic epitope
LSQGSSKGNH

SEQ ID NO: 27348 - protein, 10 aa, Artificial Sequence
  Description of Artificial Sequence: Synthetic epitope
LSQGWWDEEQ

SEQ ID NO: 27349 - protein, 10 aa, Artificial Sequence
  Description of Artificial Sequence: Synthetic epitope
LSQISSAATS

SEQ ID NO: 27350 - protein, 10 aa, Artificial Sequence
  Description of Artificial Sequence: Synthetic epitope
LSQMSFASQS

SEQ ID NO: 27351 - protein, 10 aa, Artificial Sequence
  Description of Artificial Sequence: Synthetic epitope
LSQNIAVQTD

SEQ ID NO: 27352 - protein, 10 aa, Artificial Sequence
  Description of Artificial Sequence: Synthetic epitope
LSQNRTENAQ

SEQ ID NO: 27353 - protein, 10 aa, Artificial Sequence
  Description of Artificial Sequence: Synthetic epitope
LSQRSKLRQE

SEQ ID NO: 27354 - protein, 10 aa, Artificial Sequence
  Description of Artificial Sequence: Synthetic epitope
LSQSALSIAK

SEQ ID NO: 27355 - protein, 10 aa, Artificial Sequence
  Description of Artificial Sequence: Synthetic epitope
LSQSNIQQSD

SEQ ID NO: 27356 - protein, 10 aa, Artificial Sequence
  Description of Artificial Sequence: Synthetic epitope
LSQSSELDPP

SEQ ID NO: 27357 - protein, 10 aa, Artificial Sequence
  Description of Artificial Sequence: Synthetic epitope
LSQTAARFQV

SEQ ID NO: 27358 - protein, 10 aa, Artificial Sequence
  Description of Artificial Sequence: Synthetic epitope
LSRASSDADH

SEQ ID NO: 27359 - protein, 10 aa, Artificial Sequence
  Description of Artificial Sequence: Synthetic epitope
LSRASSVQSA

SEQ ID NO: 27360 - protein, 10 aa, Artificial Sequence
  Description of Artificial Sequence: Synthetic epitope
LSRESSLSHT

SEQ ID NO: 27361 - protein, 10 aa, Artificial Sequence
  Description of Artificial Sequence: Synthetic epitope
LSREVAVVMP

SEQ ID NO: 27362 - protein, 10 aa, Artificial Sequence
  Description of Artificial Sequence: Synthetic epitope
LSRIDLKNKK

SEQ ID NO: 27363 - protein, 10 aa, Artificial Sequence
  Description of Artificial Sequence: Synthetic epitope
LSRLGVSASE

SEQ ID NO: 27364 - protein, 10 aa, Artificial Sequence
  Description of Artificial Sequence: Synthetic epitope
LSRLVVKTAL

SEQ ID NO: 27365 - protein, 10 aa, Artificial Sequence
  Description of Artificial Sequence: Synthetic epitope
LSRMSVQLGN

SEQ ID NO: 27366 - protein, 10 aa, Artificial Sequence
  Description of Artificial Sequence: Synthetic epitope
LSRQKTQTEP

SEQ ID NO: 27367 - protein, 10 aa, Artificial Sequence
  Description of Artificial Sequence: Synthetic epitope
LSRRLESIAT

SEQ ID NO: 27368 - protein, 10 aa, Artificial Sequence
  Description of Artificial Sequence: Synthetic epitope
LSRRMASQHS

SEQ ID NO: 27369 - protein, 10 aa, Artificial Sequence
  Description of Artificial Sequence: Synthetic epitope
LSRSLSISRN

SEQ ID NO: 27370 - protein, 10 aa, Artificial Sequence
  Description of Artificial Sequence: Synthetic epitope
LSRSQHEESR

SEQ ID NO: 27371 - protein, 10 aa, Artificial Sequence
  Description of Artificial Sequence: Synthetic epitope
LSRTAQRSAL

SEQ ID NO: 27372 - protein, 10 aa, Artificial Sequence
  Description of Artificial Sequence: Synthetic epitope
LSRWNRKPDN

SEQ ID NO: 27373 - protein, 10 aa, Artificial Sequence
  Description of Artificial Sequence: Synthetic epitope
LSSAEEASKK

SEQ ID NO: 27374 - protein, 10 aa, Artificial Sequence
  Description of Artificial Sequence: Synthetic epitope
LSSAIIAAPR

SEQ ID NO: 27375 - protein, 10 aa, Artificial Sequence
  Description of Artificial Sequence: Synthetic epitope
LSSAIITEEM

SEQ ID NO: 27376 - protein, 10 aa, Artificial Sequence
  Description of Artificial Sequence: Synthetic epitope
LSSAKSNYAQ

SEQ ID NO: 27377 - protein, 10 aa, Artificial Sequence
  Description of Artificial Sequence: Synthetic epitope
LSSAMDASQL

SEQ ID NO: 27378 - protein, 10 aa, Artificial Sequence
  Description of Artificial Sequence: Synthetic epitope
LSSAQSAPLQ

SEQ ID NO: 27379 - protein, 10 aa, Artificial Sequence
  Description of Artificial Sequence: Synthetic epitope
LSSASKFEAE

SEQ ID NO: 27380 - protein, 10 aa, Artificial Sequence
  Description of Artificial Sequence: Synthetic epitope
LSSEAKTKSE

SEQ ID NO: 27381 - protein, 10 aa, Artificial Sequence
  Description of Artificial Sequence: Synthetic epitope
LSSEMSELSA

SEQ ID NO: 27382 - protein, 10 aa, Artificial Sequence
  Description of Artificial Sequence: Synthetic epitope
LSSERYYLQS

SEQ ID NO: 27383 - protein, 10 aa, Artificial Sequence
  Description of Artificial Sequence: Synthetic epitope
LSSGVTKEVL

SEQ ID NO: 27384 - protein, 10 aa, Artificial Sequence
  Description of Artificial Sequence: Synthetic epitope
LSSIGKLSEY

SEQ ID NO: 27385 - protein, 10 aa, Artificial Sequence
  Description of Artificial Sequence: Synthetic epitope
LSSLALVASK

SEQ ID NO: 27386 - protein, 10 aa, Artificial Sequence
  Description of Artificial Sequence: Synthetic epitope
LSSLQLAKKA

SEQ ID NO: 27387 - protein, 10 aa, Artificial Sequence
  Description of Artificial Sequence: Synthetic epitope
LSSLRAVAEL

SEQ ID NO: 27388 - protein, 10 aa, Artificial Sequence
  Description of Artificial Sequence: Synthetic epitope
LSSLRSRSTQ

SEQ ID NO: 27389 - protein, 10 aa, Artificial Sequence
  Description of Artificial Sequence: Synthetic epitope
LSSLSANKEK

SEQ ID NO: 27390 - protein, 10 aa, Artificial Sequence
  Description of Artificial Sequence: Synthetic epitope
LSSLSQDSKL

SEQ ID NO: 27391 - protein, 10 aa, Artificial Sequence
  Description of Artificial Sequence: Synthetic epitope
LSSLSSTPGE

SEQ ID NO: 27392 - protein, 10 aa, Artificial Sequence
  Description of Artificial Sequence: Synthetic epitope
LSSLTSVMKN

SEQ ID NO: 27393 - protein, 10 aa, Artificial Sequence
  Description of Artificial Sequence: Synthetic epitope
LSSLVIYLKS

SEQ ID NO: 27394 - protein, 10 aa, Artificial Sequence
  Description of Artificial Sequence: Synthetic epitope
LSSNSLYAKA

SEQ ID NO: 27395 - protein, 10 aa, Artificial Sequence
  Description of Artificial Sequence: Synthetic epitope
LSSPDSTLST

SEQ ID NO: 27396 - protein, 10 aa, Artificial Sequence
  Description of Artificial Sequence: Synthetic epitope
LSSQTPQKNS

SEQ ID NO: 27397 - protein, 10 aa, Artificial Sequence
  Description of Artificial Sequence: Synthetic epitope
LSSRQRRTKQ

SEQ ID NO: 27398 - protein, 10 aa, Artificial Sequence
  Description of Artificial Sequence: Synthetic epitope
LSSTAQSTSA

SEQ ID NO: 27399 - protein, 10 aa, Artificial Sequence
  Description of Artificial Sequence: Synthetic epitope
LSSTILPSTY

SEQ ID NO: 27400 - protein, 10 aa, Artificial Sequence
  Description of Artificial Sequence: Synthetic epitope
LSSTSSLAGI

SEQ ID NO: 27401 - protein, 10 aa, Artificial Sequence
  Description of Artificial Sequence: Synthetic epitope
LSSTTAQVTQ

SEQ ID NO: 27402 - protein, 10 aa, Artificial Sequence
  Description of Artificial Sequence: Synthetic epitope
LSSTTKSGTA

SEQ ID NO: 27403 - protein, 10 aa, Artificial Sequence
  Description of Artificial Sequence: Synthetic epitope
LSSTTRTDQE

SEQ ID NO: 27404 - protein, 10 aa, Artificial Sequence
  Description of Artificial Sequence: Synthetic epitope
LSSTTRTDQE

SEQ ID NO: 27405 - protein, 10 aa, Artificial Sequence
  Description of Artificial Sequence: Synthetic epitope
LSSTVETITH

SEQ ID NO: 27406 - protein, 10 aa, Artificial Sequence
  Description of Artificial Sequence: Synthetic epitope
LSSTVTLEHS

SEQ ID NO: 27407 - protein, 10 aa, Artificial Sequence
  Description of Artificial Sequence: Synthetic epitope
LSSVGSISEE

SEQ ID NO: 27408 - protein, 10 aa, Artificial Sequence
  Description of Artificial Sequence: Synthetic epitope
LSSVLSEKGM

SEQ ID NO: 27409 - protein, 10 aa, Artificial Sequence
  Description of Artificial Sequence: Synthetic epitope
LSSVQEAGSM

SEQ ID NO: 27410 - protein, 10 aa, Artificial Sequence
  Description of Artificial Sequence: Synthetic epitope
LSSVSSEDAT

SEQ ID NO: 27411 - protein, 10 aa, Artificial Sequence
  Description of Artificial Sequence: Synthetic epitope
LSTANLPNSS

SEQ ID NO: 27412 - protein, 10 aa, Artificial Sequence
  Description of Artificial Sequence: Synthetic epitope
LSTDAPEFLS

SEQ ID NO: 27413 - protein, 10 aa, Artificial Sequence
  Description of Artificial Sequence: Synthetic epitope
LSTEEIFLAK

SEQ ID NO: 27414 - protein, 10 aa, Artificial Sequence
  Description of Artificial Sequence: Synthetic epitope
LSTELQRVEE

SEQ ID NO: 27415 - protein, 10 aa, Artificial Sequence
  Description of Artificial Sequence: Synthetic epitope
LSTFKETENT

SEQ ID NO: 27416 - protein, 10 aa, Artificial Sequence
  Description of Artificial Sequence: Synthetic epitope
LSTKLLAVDF

SEQ ID NO: 27417 - protein, 10 aa, Artificial Sequence
  Description of Artificial Sequence: Synthetic epitope
LSTLANLEGE

SEQ ID NO: 27418 - protein, 10 aa, Artificial Sequence
  Description of Artificial Sequence: Synthetic epitope
LSTLATKTLE

SEQ ID NO: 27419 - protein, 10 aa, Artificial Sequence
  Description of Artificial Sequence: Synthetic epitope
LSTMFRVEYA

SEQ ID NO: 27420 - protein, 10 aa, Artificial Sequence
  Description of Artificial Sequence: Synthetic epitope
LSTNKKMKSD

SEQ ID NO: 27421 - protein, 10 aa, Artificial Sequence
  Description of Artificial Sequence: Synthetic epitope
LSTSLRAITS

SEQ ID NO: 27422 - protein, 10 aa, Artificial Sequence
  Description of Artificial Sequence: Synthetic epitope
LSTSLRATLS

SEQ ID NO: 27423 - protein, 10 aa, Artificial Sequence
  Description of Artificial Sequence: Synthetic epitope
LSTSQVQKEL

SEQ ID NO: 27424 - protein, 10 aa, Artificial Sequence
  Description of Artificial Sequence: Synthetic epitope
LSTSVPSETT

SEQ ID NO: 27425 - protein, 10 aa, Artificial Sequence
  Description of Artificial Sequence: Synthetic epitope
LSTVTKMSHG

SEQ ID NO: 27426 - protein, 10 aa, Artificial Sequence
  Description of Artificial Sequence: Synthetic epitope
LSTYEVSAEG

SEQ ID NO: 27427 - protein, 10 aa, Artificial Sequence
  Description of Artificial Sequence: Synthetic epitope
LSVDTSMSRF

SEQ ID NO: 27428 - protein, 10 aa, Artificial Sequence
  Description of Artificial Sequence: Synthetic epitope
LSVEKSTVLQ

SEQ ID NO: 27429 - protein, 10 aa, Artificial Sequence
  Description of Artificial Sequence: Synthetic epitope
LSVIAEDSES

SEQ ID NO: 27430 - protein, 10 aa, Artificial Sequence
  Description of Artificial Sequence: Synthetic epitope
LSVISLVPKS

SEQ ID NO: 27431 - protein, 10 aa, Artificial Sequence
  Description of Artificial Sequence: Synthetic epitope
LSVKLKVKVK

SEQ ID NO: 27432 - protein, 10 aa, Artificial Sequence
  Description of Artificial Sequence: Synthetic epitope
LSVKQVRNLR

SEQ ID NO: 27433 - protein, 10 aa, Artificial Sequence
  Description of Artificial Sequence: Synthetic epitope
LSVLFDVSIM

SEQ ID NO: 27434 - protein, 10 aa, Artificial Sequence
  Description of Artificial Sequence: Synthetic epitope
LSVLSLSGVM

SEQ ID NO: 27435 - protein, 10 aa, Artificial Sequence
  Description of Artificial Sequence: Synthetic epitope
LSVQRTSPPT

SEQ ID NO: 27436 - protein, 10 aa, Artificial Sequence
  Description of Artificial Sequence: Synthetic epitope
LSVSARARSS

SEQ ID NO: 27437 - protein, 10 aa, Artificial Sequence
  Description of Artificial Sequence: Synthetic epitope
LSWEVSVSLS

SEQ ID NO: 27438 - protein, 10 aa, Artificial Sequence
  Description of Artificial Sequence: Synthetic epitope
LSYIGVSKIF

SEQ ID NO: 27439 - protein, 10 aa, Artificial Sequence
  Description of Artificial Sequence: Synthetic epitope
LSYQAQMEQL

SEQ ID NO: 27440 - protein, 10 aa, Artificial Sequence
  Description of Artificial Sequence: Synthetic epitope
LSYSMEAEKS

SEQ ID NO: 27441 - protein, 10 aa, Artificial Sequence
  Description of Artificial Sequence: Synthetic epitope
LSYTELAAKS

SEQ ID NO: 27442 - protein, 10 aa, Artificial Sequence
  Description of Artificial Sequence: Synthetic epitope
LSYTSKAIEG

SEQ ID NO: 27443 - protein, 10 aa, Artificial Sequence
  Description of Artificial Sequence: Synthetic epitope
LTAALKRNAL

SEQ ID NO: 27444 - protein, 10 aa, Artificial Sequence
  Description of Artificial Sequence: Synthetic epitope
LTAHGSTPAS

SEQ ID NO: 27445 - protein, 10 aa, Artificial Sequence
  Description of Artificial Sequence: Synthetic epitope
LTAIAESPVI

SEQ ID NO: 27446 - protein, 10 aa, Artificial Sequence
  Description of Artificial Sequence: Synthetic epitope
LTAKNAKTPQ

SEQ ID NO: 27447 - protein, 10 aa, Artificial Sequence
  Description of Artificial Sequence: Synthetic epitope
LTAKQALSEV

SEQ ID NO: 27448 - protein, 10 aa, Artificial Sequence
  Description of Artificial Sequence: Synthetic epitope
LTALTASNNT

SEQ ID NO: 27449 - protein, 10 aa, Artificial Sequence
  Description of Artificial Sequence: Synthetic epitope
LTALTNSVAT

SEQ ID NO: 27450 - protein, 10 aa, Artificial Sequence
  Description of Artificial Sequence: Synthetic epitope
LTASVEVPVD

SEQ ID NO: 27451 - protein, 10 aa, Artificial Sequence
  Description of Artificial Sequence: Synthetic epitope
LTATLKPQDQ

SEQ ID NO: 27452 - protein, 10 aa, Artificial Sequence
  Description of Artificial Sequence: Synthetic epitope
LTDSATTAKE

SEQ ID NO: 27453 - protein, 10 aa, Artificial Sequence
  Description of Artificial Sequence: Synthetic epitope
LTEDTSEKAG

SEQ ID NO: 27454 - protein, 10 aa, Artificial Sequence
  Description of Artificial Sequence: Synthetic epitope
LTEIGSKVTQ

SEQ ID NO: 27455 - protein, 10 aa, Artificial Sequence
  Description of Artificial Sequence: Synthetic epitope
LTEQVAMTLA

SEQ ID NO: 27456 - protein, 10 aa, Artificial Sequence
  Description of Artificial Sequence: Synthetic epitope
LTERRKGNEG

SEQ ID NO: 27457 - protein, 10 aa, Artificial Sequence
  Description of Artificial Sequence: Synthetic epitope
LTESQSASSM

SEQ ID NO: 27458 - protein, 10 aa, Artificial Sequence
  Description of Artificial Sequence: Synthetic epitope
LTEVLKEIAG

SEQ ID NO: 27459 - protein, 10 aa, Artificial Sequence
  Description of Artificial Sequence: Synthetic epitope
LTEVTVADTE

SEQ ID NO: 27460 - protein, 10 aa, Artificial Sequence
  Description of Artificial Sequence: Synthetic epitope
LTFNSSAVFT

SEQ ID NO: 27461 - protein, 10 aa, Artificial Sequence
  Description of Artificial Sequence: Synthetic epitope
LTGAKSSTSR

SEQ ID NO: 27462 - protein, 10 aa, Artificial Sequence
  Description of Artificial Sequence: Synthetic epitope
LTGEKAIYKR

SEQ ID NO: 27463 - protein, 10 aa, Artificial Sequence
  Description of Artificial Sequence: Synthetic epitope
LTGINIRNHS

SEQ ID NO: 27464 - protein, 10 aa, Artificial Sequence
  Description of Artificial Sequence: Synthetic epitope
LTGQVVQEGT

SEQ ID NO: 27465 - protein, 10 aa, Artificial Sequence
  Description of Artificial Sequence: Synthetic epitope
LTGSSAQEEA

SEQ ID NO: 27466 - protein, 10 aa, Artificial Sequence
  Description of Artificial Sequence: Synthetic epitope
LTHRTTSTPS

SEQ ID NO: 27467 - protein, 10 aa, Artificial Sequence
  Description of Artificial Sequence: Synthetic epitope
LTHSNTKDYM

SEQ ID NO: 27468 - protein, 10 aa, Artificial Sequence
  Description of Artificial Sequence: Synthetic epitope
LTIAAKIKGQ

SEQ ID NO: 27469 - protein, 10 aa, Artificial Sequence
  Description of Artificial Sequence: Synthetic epitope
LTIELSRTQK

SEQ ID NO: 27470 - protein, 10 aa, Artificial Sequence
  Description of Artificial Sequence: Synthetic epitope
LTIENELKNE

SEQ ID NO: 27471 - protein, 10 aa, Artificial Sequence
  Description of Artificial Sequence: Synthetic epitope
LTIGRSAAQK

SEQ ID NO: 27472 - protein, 10 aa, Artificial Sequence
  Description of Artificial Sequence: Synthetic epitope
LTIIRSKRWD

SEQ ID NO: 27473 - protein, 10 aa, Artificial Sequence
  Description of Artificial Sequence: Synthetic epitope
LTISSLLKEK

SEQ ID NO: 27474 - protein, 10 aa, Artificial Sequence
  Description of Artificial Sequence: Synthetic epitope
LTITSILETQ

SEQ ID NO: 27475 - protein, 10 aa, Artificial Sequence
  Description of Artificial Sequence: Synthetic epitope
LTKASQTQQE

SEQ ID NO: 27476 - protein, 10 aa, Artificial Sequence
  Description of Artificial Sequence: Synthetic epitope
LTKDRSLTGK

SEQ ID NO: 27477 - protein, 10 aa, Artificial Sequence
  Description of Artificial Sequence: Synthetic epitope
LTKEVMSSYI

SEQ ID NO: 27478 - protein, 10 aa, Artificial Sequence
  Description of Artificial Sequence: Synthetic epitope
LTKKFLLKKA

SEQ ID NO: 27479 - protein, 10 aa, Artificial Sequence
  Description of Artificial Sequence: Synthetic epitope
LTKLKEAKEQ

SEQ ID NO: 27480 - protein, 10 aa, Artificial Sequence
  Description of Artificial Sequence: Synthetic epitope
LTKLLETNIL

SEQ ID NO: 27481 - protein, 10 aa, Artificial Sequence
  Description of Artificial Sequence: Synthetic epitope
LTKNSKRKKR

SEQ ID NO: 27482 - protein, 10 aa, Artificial Sequence
  Description of Artificial Sequence: Synthetic epitope
LTKPLSNHEK

SEQ ID NO: 27483 - protein, 10 aa, Artificial Sequence
  Description of Artificial Sequence: Synthetic epitope
LTKQSLSKPA

SEQ ID NO: 27484 - protein, 10 aa, Artificial Sequence
  Description of Artificial Sequence: Synthetic epitope
LTKREYTMHD

SEQ ID NO: 27485 - protein, 10 aa, Artificial Sequence
  Description of Artificial Sequence: Synthetic epitope
LTKRKSRSLN

SEQ ID NO: 27486 - protein, 10 aa, Artificial Sequence
  Description of Artificial Sequence: Synthetic epitope
LTKSKSYTKS

SEQ ID NO: 27487 - protein, 10 aa, Artificial Sequence
  Description of Artificial Sequence: Synthetic epitope
LTKTVKDAVQ

SEQ ID NO: 27488 - protein, 10 aa, Artificial Sequence
  Description of Artificial Sequence: Synthetic epitope
LTLAETVASL

SEQ ID NO: 27489 - protein, 10 aa, Artificial Sequence
  Description of Artificial Sequence: Synthetic epitope
LTLGNQERDY

SEQ ID NO: 27490 - protein, 10 aa, Artificial Sequence
  Description of Artificial Sequence: Synthetic epitope
LTLKIEQRER

SEQ ID NO: 27491 - protein, 10 aa, Artificial Sequence
  Description of Artificial Sequence: Synthetic epitope
LTLLNKAADK

SEQ ID NO: 27492 - protein, 10 aa, Artificial Sequence
  Description of Artificial Sequence: Synthetic epitope
LTLNYKIASV

SEQ ID NO: 27493 - protein, 10 aa, Artificial Sequence
  Description of Artificial Sequence: Synthetic epitope
LTLTNGLERR

SEQ ID NO: 27494 - protein, 10 aa, Artificial Sequence
  Description of Artificial Sequence: Synthetic epitope
LTMANQVLAV

SEQ ID NO: 27495 - protein, 10 aa, Artificial Sequence
  Description of Artificial Sequence: Synthetic epitope
LTMARKLSLE

SEQ ID NO: 27496 - protein, 10 aa, Artificial Sequence
  Description of Artificial Sequence: Synthetic epitope
LTMEKEVAQS

SEQ ID NO: 27497 - protein, 10 aa, Artificial Sequence
  Description of Artificial Sequence: Synthetic epitope
LTMLQTQQKS

SEQ ID NO: 27498 - protein, 10 aa, Artificial Sequence
  Description of Artificial Sequence: Synthetic epitope
LTMMIKDKQQ

SEQ ID NO: 27499 - protein, 10 aa, Artificial Sequence
  Description of Artificial Sequence: Synthetic epitope
LTMSAVVKKV

SEQ ID NO: 27500 - protein, 10 aa, Artificial Sequence
  Description of Artificial Sequence: Synthetic epitope
LTNLALSRRS

SEQ ID NO: 27501 - protein, 10 aa, Artificial Sequence
  Description of Artificial Sequence: Synthetic epitope
LTNQEPIAVE

SEQ ID NO: 27502 - protein, 10 aa, Artificial Sequence
  Description of Artificial Sequence: Synthetic epitope
LTNQFYLAAP

SEQ ID NO: 27503 - protein, 10 aa, Artificial Sequence
  Description of Artificial Sequence: Synthetic epitope
LTNVKALQKS

SEQ ID NO: 27504 - protein, 10 aa, Artificial Sequence
  Description of Artificial Sequence: Synthetic epitope
LTPIKEKTLT

SEQ ID NO: 27505 - protein, 10 aa, Artificial Sequence
  Description of Artificial Sequence: Synthetic epitope
LTPLTVLLRS

SEQ ID NO: 27506 - protein, 10 aa, Artificial Sequence
  Description of Artificial Sequence: Synthetic epitope
LTPMRAWTTQ

SEQ ID NO: 27507 - protein, 10 aa, Artificial Sequence
  Description of Artificial Sequence: Synthetic epitope
LTPQKQSNSN

SEQ ID NO: 27508 - protein, 10 aa, Artificial Sequence
  Description of Artificial Sequence: Synthetic epitope
LTPVLLAKQL

SEQ ID NO: 27509 - protein, 10 aa, Artificial Sequence
  Description of Artificial Sequence: Synthetic epitope
LTPYVAIEDK

SEQ ID NO: 27510 - protein, 10 aa, Artificial Sequence
  Description of Artificial Sequence: Synthetic epitope
LTQEALQSRE

SEQ ID NO: 27511 - protein, 10 aa, Artificial Sequence
  Description of Artificial Sequence: Synthetic epitope
LTQETQTQLL

SEQ ID NO: 27512 - protein, 10 aa, Artificial Sequence
  Description of Artificial Sequence: Synthetic epitope
LTQLASIIKI

SEQ ID NO: 27513 - protein, 10 aa, Artificial Sequence
  Description of Artificial Sequence: Synthetic epitope
LTQQLLRQPQ

SEQ ID NO: 27514 - protein, 10 aa, Artificial Sequence
  Description of Artificial Sequence: Synthetic epitope
LTQVSTKRQQ

SEQ ID NO: 27515 - protein, 10 aa, Artificial Sequence
  Description of Artificial Sequence: Synthetic epitope
LTRLQDAEEM

SEQ ID NO: 27516 - protein, 10 aa, Artificial Sequence
  Description of Artificial Sequence: Synthetic epitope
LTRQQLGQAT

SEQ ID NO: 27517 - protein, 10 aa, Artificial Sequence
  Description of Artificial Sequence: Synthetic epitope
LTSEAQTNDA

SEQ ID NO: 27518 - protein, 10 aa, Artificial Sequence
  Description of Artificial Sequence: Synthetic epitope
LTSFEGMAAR

SEQ ID NO: 27519 - protein, 10 aa, Artificial Sequence
  Description of Artificial Sequence: Synthetic epitope
LTSFELVKVP

SEQ ID NO: 27520 - protein, 10 aa, Artificial Sequence
  Description of Artificial Sequence: Synthetic epitope
LTSGIASSPD

SEQ ID NO: 27521 - protein, 10 aa, Artificial Sequence
  Description of Artificial Sequence: Synthetic epitope
LTSHASAQAD

SEQ ID NO: 27522 - protein, 10 aa, Artificial Sequence
  Description of Artificial Sequence: Synthetic epitope
LTSIAVSTWT

SEQ ID NO: 27523 - protein, 10 aa, Artificial Sequence
  Description of Artificial Sequence: Synthetic epitope
LTSRAQRVRV

SEQ ID NO: 27524 - protein, 10 aa, Artificial Sequence
  Description of Artificial Sequence: Synthetic epitope
LTSSDELNTI

SEQ ID NO: 27525 - protein, 10 aa, Artificial Sequence
  Description of Artificial Sequence: Synthetic epitope
LTSSDLLAAI

SEQ ID NO: 27526 - protein, 10 aa, Artificial Sequence
  Description of Artificial Sequence: Synthetic epitope
LTSVAISAST

SEQ ID NO: 27527 - protein, 10 aa, Artificial Sequence
  Description of Artificial Sequence: Synthetic epitope
LTSVSLGKEV

SEQ ID NO: 27528 - protein, 10 aa, Artificial Sequence
  Description of Artificial Sequence: Synthetic epitope
LTTAEDLASS

SEQ ID NO: 27529 - protein, 10 aa, Artificial Sequence
  Description of Artificial Sequence: Synthetic epitope
LTTDISIDLK

SEQ ID NO: 27530 - protein, 10 aa, Artificial Sequence
  Description of Artificial Sequence: Synthetic epitope
LTTDLTAELS

SEQ ID NO: 27531 - protein, 10 aa, Artificial Sequence
  Description of Artificial Sequence: Synthetic epitope
LTTDSRRQIS

SEQ ID NO: 27532 - protein, 10 aa, Artificial Sequence
  Description of Artificial Sequence: Synthetic epitope
LTTETIKAPV

SEQ ID NO: 27533 - protein, 10 aa, Artificial Sequence
  Description of Artificial Sequence: Synthetic epitope
LTTIFQKYLR

SEQ ID NO: 27534 - protein, 10 aa, Artificial Sequence
  Description of Artificial Sequence: Synthetic epitope
LTTLEAKVLL

SEQ ID NO: 27535 - protein, 10 aa, Artificial Sequence
  Description of Artificial Sequence: Synthetic epitope
LTTLSSQSST

SEQ ID NO: 27536 - protein, 10 aa, Artificial Sequence
  Description of Artificial Sequence: Synthetic epitope
LTTMELSQQK

SEQ ID NO: 27537 - protein, 10 aa, Artificial Sequence
  Description of Artificial Sequence: Synthetic epitope
LTTMQALAEK

SEQ ID NO: 27538 - protein, 10 aa, Artificial Sequence
  Description of Artificial Sequence: Synthetic epitope
LTTMQLFSKQ

SEQ ID NO: 27539 - protein, 10 aa, Artificial Sequence
  Description of Artificial Sequence: Synthetic epitope
LTTRKIDPPA

SEQ ID NO: 27540 - protein, 10 aa, Artificial Sequence
  Description of Artificial Sequence: Synthetic epitope
LTTRRATGRH

SEQ ID NO: 27541 - protein, 10 aa, Artificial Sequence
  Description of Artificial Sequence: Synthetic epitope
LTTRTNEKVE

SEQ ID NO: 27542 - protein, 10 aa, Artificial Sequence
  Description of Artificial Sequence: Synthetic epitope
LTTSLTSTSS

SEQ ID NO: 27543 - protein, 10 aa, Artificial Sequence
  Description of Artificial Sequence: Synthetic epitope
LTTSTSAPLS

SEQ ID NO: 27544 - protein, 10 aa, Artificial Sequence
  Description of Artificial Sequence: Synthetic epitope
LTTVAEVDES

SEQ ID NO: 27545 - protein, 10 aa, Artificial Sequence
  Description of Artificial Sequence: Synthetic epitope
LTTVKLANAK

SEQ ID NO: 27546 - protein, 10 aa, Artificial Sequence
  Description of Artificial Sequence: Synthetic epitope
LTVATVVESA

SEQ ID NO: 27547 - protein, 10 aa, Artificial Sequence
  Description of Artificial Sequence: Synthetic epitope
LTVEKPSSRS

SEQ ID NO: 27548 - protein, 10 aa, Artificial Sequence
  Description of Artificial Sequence: Synthetic epitope
LTVKLKKTQS

SEQ ID NO: 27549 - protein, 10 aa, Artificial Sequence
  Description of Artificial Sequence: Synthetic epitope
LTVRYKRVTT

SEQ ID NO: 27550 - protein, 10 aa, Artificial Sequence
  Description of Artificial Sequence: Synthetic epitope
LTVSLNYGEV

SEQ ID NO: 27551 - protein, 10 aa, Artificial Sequence
  Description of Artificial Sequence: Synthetic epitope
LTVTQQSQEE

SEQ ID NO: 27552 - protein, 10 aa, Artificial Sequence
  Description of Artificial Sequence: Synthetic epitope
LTYTTSVALG

SEQ ID NO: 27553 - protein, 10 aa, Artificial Sequence
  Description of Artificial Sequence: Synthetic epitope
LVAKLISSPK

SEQ ID NO: 27554 - protein, 10 aa, Artificial Sequence
  Description of Artificial Sequence: Synthetic epitope
LVANLVTASL

SEQ ID NO: 27555 - protein, 10 aa, Artificial Sequence
  Description of Artificial Sequence: Synthetic epitope
LVANVITAGD

SEQ ID NO: 27556 - protein, 10 aa, Artificial Sequence
  Description of Artificial Sequence: Synthetic epitope
LVAQIVTKVK

SEQ ID NO: 27557 - protein, 10 aa, Artificial Sequence
  Description of Artificial Sequence: Synthetic epitope
LVASSVVAGE

SEQ ID NO: 27558 - protein, 10 aa, Artificial Sequence
  Description of Artificial Sequence: Synthetic epitope
LVASVSGPPT

SEQ ID NO: 27559 - protein, 10 aa, Artificial Sequence
  Description of Artificial Sequence: Synthetic epitope
LVDELKASNP

SEQ ID NO: 27560 - protein, 10 aa, Artificial Sequence
  Description of Artificial Sequence: Synthetic epitope
LVDHKTSVKT

SEQ ID NO: 27561 - protein, 10 aa, Artificial Sequence
  Description of Artificial Sequence: Synthetic epitope
LVDKVSRRQR

SEQ ID NO: 27562 - protein, 10 aa, Artificial Sequence
  Description of Artificial Sequence: Synthetic epitope
LVDPSARIGQ

SEQ ID NO: 27563 - protein, 10 aa, Artificial Sequence
  Description of Artificial Sequence: Synthetic epitope
LVDSAVEVAF

SEQ ID NO: 27564 - protein, 10 aa, Artificial Sequence
  Description of Artificial Sequence: Synthetic epitope
LVDVYAIEKS

SEQ ID NO: 27565 - protein, 10 aa, Artificial Sequence
  Description of Artificial Sequence: Synthetic epitope
LVEEDKHKSE

SEQ ID NO: 27566 - protein, 10 aa, Artificial Sequence
  Description of Artificial Sequence: Synthetic epitope
LVEKSLVKAS

SEQ ID NO: 27567 - protein, 10 aa, Artificial Sequence
  Description of Artificial Sequence: Synthetic epitope
LVEMALDMLQ

SEQ ID NO: 27568 - protein, 10 aa, Artificial Sequence
  Description of Artificial Sequence: Synthetic epitope
LVERAMKIDH

SEQ ID NO: 27569 - protein, 10 aa, Artificial Sequence
  Description of Artificial Sequence: Synthetic epitope
LVESKDTLVE

SEQ ID NO: 27570 - protein, 10 aa, Artificial Sequence
  Description of Artificial Sequence: Synthetic epitope
LVETLMTGKR

SEQ ID NO: 27571 - protein, 10 aa, Artificial Sequence
  Description of Artificial Sequence: Synthetic epitope
LVGKEVAALL

SEQ ID NO: 27572 - protein, 10 aa, Artificial Sequence
  Description of Artificial Sequence: Synthetic epitope
LVGRMLLVTK

SEQ ID NO: 27573 - protein, 10 aa, Artificial Sequence
  Description of Artificial Sequence: Synthetic epitope
LVGSASSKKA

SEQ ID NO: 27574 - protein, 10 aa, Artificial Sequence
  Description of Artificial Sequence: Synthetic epitope
LVGSSKIAAR

SEQ ID NO: 27575 - protein, 10 aa, Artificial Sequence
  Description of Artificial Sequence: Synthetic epitope
LVILSLKSQT

SEQ ID NO: 27576 - protein, 10 aa, Artificial Sequence
  Description of Artificial Sequence: Synthetic epitope
LVIMALSNKE

SEQ ID NO: 27577 - protein, 10 aa, Artificial Sequence
  Description of Artificial Sequence: Synthetic epitope
LVIPSTRSEG

SEQ ID NO: 27578 - protein, 10 aa, Artificial Sequence
  Description of Artificial Sequence: Synthetic epitope
LVKAARRGSQ

SEQ ID NO: 27579 - protein, 10 aa, Artificial Sequence
  Description of Artificial Sequence: Synthetic epitope
LVKEEAAKLK

SEQ ID NO: 27580 - protein, 10 aa, Artificial Sequence
  Description of Artificial Sequence: Synthetic epitope
LVKFGSAIPI

SEQ ID NO: 27581 - protein, 10 aa, Artificial Sequence
  Description of Artificial Sequence: Synthetic epitope
LVKIDAVKFM

SEQ ID NO: 27582 - protein, 10 aa, Artificial Sequence
  Description of Artificial Sequence: Synthetic epitope
LVKIDTALIK

SEQ ID NO: 27583 - protein, 10 aa, Artificial Sequence
  Description of Artificial Sequence: Synthetic epitope
LVKISKSAGA

SEQ ID NO: 27584 - protein, 10 aa, Artificial Sequence
  Description of Artificial Sequence: Synthetic epitope
LVKITSASSQ

SEQ ID NO: 27585 - protein, 10 aa, Artificial Sequence
  Description of Artificial Sequence: Synthetic epitope
LVKQLSSTVL

SEQ ID NO: 27586 - protein, 10 aa, Artificial Sequence
  Description of Artificial Sequence: Synthetic epitope
LVLFEAEIEK

SEQ ID NO: 27587 - protein, 10 aa, Artificial Sequence
  Description of Artificial Sequence: Synthetic epitope
LVLGVSESSI

SEQ ID NO: 27588 - protein, 10 aa, Artificial Sequence
  Description of Artificial Sequence: Synthetic epitope
LVLLFEGRKA

SEQ ID NO: 27589 - protein, 10 aa, Artificial Sequence
  Description of Artificial Sequence: Synthetic epitope
LVLTIREKIN

SEQ ID NO: 27590 - protein, 10 aa, Artificial Sequence
  Description of Artificial Sequence: Synthetic epitope
LVMNMLKSSF

SEQ ID NO: 27591 - protein, 10 aa, Artificial Sequence
  Description of Artificial Sequence: Synthetic epitope
LVNAKITTAK

SEQ ID NO: 27592 - protein, 10 aa, Artificial Sequence
  Description of Artificial Sequence: Synthetic epitope
LVNDEENQIR

SEQ ID NO: 27593 - protein, 10 aa, Artificial Sequence
  Description of Artificial Sequence: Synthetic epitope
LVNETTLIKY

SEQ ID NO: 27594 - protein, 10 aa, Artificial Sequence
  Description of Artificial Sequence: Synthetic epitope
LVNFLSHETV

SEQ ID NO: 27595 - protein, 10 aa, Artificial Sequence
  Description of Artificial Sequence: Synthetic epitope
LVNGDVALLG

SEQ ID NO: 27596 - protein, 10 aa, Artificial Sequence
  Description of Artificial Sequence: Synthetic epitope
LVNKLLVAGA

SEQ ID NO: 27597 - protein, 10 aa, Artificial Sequence
  Description of Artificial Sequence: Synthetic epitope
LVNRSLTSLD

SEQ ID NO: 27598 - protein, 10 aa, Artificial Sequence
  Description of Artificial Sequence: Synthetic epitope
LVNSASAQKR

SEQ ID NO: 27599 - protein, 10 aa, Artificial Sequence
  Description of Artificial Sequence: Synthetic epitope
LVPEAAEITA

SEQ ID NO: 27600 - protein, 10 aa, Artificial Sequence
  Description of Artificial Sequence: Synthetic epitope
LVPNRQLTAD

SEQ ID NO: 27601 - protein, 10 aa, Artificial Sequence
  Description of Artificial Sequence: Synthetic epitope
LVPVVEIGIS

SEQ ID NO: 27602 - protein, 10 aa, Artificial Sequence
  Description of Artificial Sequence: Synthetic epitope
LVQEQQMQKL

SEQ ID NO: 27603 - protein, 10 aa, Artificial Sequence
  Description of Artificial Sequence: Synthetic epitope
LVQGSERQRA

SEQ ID NO: 27604 - protein, 10 aa, Artificial Sequence
  Description of Artificial Sequence: Synthetic epitope
LVQKNVTSES

SEQ ID NO: 27605 - protein, 10 aa, Artificial Sequence
  Description of Artificial Sequence: Synthetic epitope
LVQKVASKIP

SEQ ID NO: 27606 - protein, 10 aa, Artificial Sequence
  Description of Artificial Sequence: Synthetic epitope
LVQQYQIKNQ

SEQ ID NO: 27607 - protein, 10 aa, Artificial Sequence
  Description of Artificial Sequence: Synthetic epitope
LVQSGLTIAV

SEQ ID NO: 27608 - protein, 10 aa, Artificial Sequence
  Description of Artificial Sequence: Synthetic epitope
LVQSSAVKMI

SEQ ID NO: 27609 - protein, 10 aa, Artificial Sequence
  Description of Artificial Sequence: Synthetic epitope
LVQTKRRALE

SEQ ID NO: 27610 - protein, 10 aa, Artificial Sequence
  Description of Artificial Sequence: Synthetic epitope
LVRDEIALLH

SEQ ID NO: 27611 - protein, 10 aa, Artificial Sequence
  Description of Artificial Sequence: Synthetic epitope
LVRKVTSISK

SEQ ID NO: 27612 - protein, 10 aa, Artificial Sequence
  Description of Artificial Sequence: Synthetic epitope
LVRLSKFLQA

SEQ ID NO: 27613 - protein, 10 aa, Artificial Sequence
  Description of Artificial Sequence: Synthetic epitope
LVRSILTAHG

SEQ ID NO: 27614 - protein, 10 aa, Artificial Sequence
  Description of Artificial Sequence: Synthetic epitope
LVRSISTNVR

SEQ ID NO: 27615 - protein, 10 aa, Artificial Sequence
  Description of Artificial Sequence: Synthetic epitope
LVSARASKDD

SEQ ID NO: 27616 - protein, 10 aa, Artificial Sequence
  Description of Artificial Sequence: Synthetic epitope
LVSEDQETSM

SEQ ID NO: 27617 - protein, 10 aa, Artificial Sequence
  Description of Artificial Sequence: Synthetic epitope
LVSEQTRVNA

SEQ ID NO: 27618 - protein, 10 aa, Artificial Sequence
  Description of Artificial Sequence: Synthetic epitope
LVSGFEATIN

SEQ ID NO: 27619 - protein, 10 aa, Artificial Sequence
  Description of Artificial Sequence: Synthetic epitope
LVSLQQLQQP

SEQ ID NO: 27620 - protein, 10 aa, Artificial Sequence
  Description of Artificial Sequence: Synthetic epitope
LVSNEHETQA

SEQ ID NO: 27621 - protein, 10 aa, Artificial Sequence
  Description of Artificial Sequence: Synthetic epitope
LVSQTTAQMG

SEQ ID NO: 27622 - protein, 10 aa, Artificial Sequence
  Description of Artificial Sequence: Synthetic epitope
LVSRFLVVQP

SEQ ID NO: 27623 - protein, 10 aa, Artificial Sequence
  Description of Artificial Sequence: Synthetic epitope
LVSTGLKVRI

SEQ ID NO: 27624 - protein, 10 aa, Artificial Sequence
  Description of Artificial Sequence: Synthetic epitope
LVTAEKLSSN

SEQ ID NO: 27625 - protein, 10 aa, Artificial Sequence
  Description of Artificial Sequence: Synthetic epitope
LVTAISKASA

SEQ ID NO: 27626 - protein, 10 aa, Artificial Sequence
  Description of Artificial Sequence: Synthetic epitope
LVTDTEAFWQ

SEQ ID NO: 27627 - protein, 10 aa, Artificial Sequence
  Description of Artificial Sequence: Synthetic epitope
LVTPVLNSRL

SEQ ID NO: 27628 - protein, 10 aa, Artificial Sequence
  Description of Artificial Sequence: Synthetic epitope
LVTRAVAMKV

SEQ ID NO: 27629 - protein, 10 aa, Artificial Sequence
  Description of Artificial Sequence: Synthetic epitope
LVTSRARSVS

SEQ ID NO: 27630 - protein, 10 aa, Artificial Sequence
  Description of Artificial Sequence: Synthetic epitope
LVTSVTSETP

SEQ ID NO: 27631 - protein, 10 aa, Artificial Sequence
  Description of Artificial Sequence: Synthetic epitope
LVTTASSAQT

SEQ ID NO: 27632 - protein, 10 aa, Artificial Sequence
  Description of Artificial Sequence: Synthetic epitope
LVTTSNASEV

SEQ ID NO: 27633 - protein, 10 aa, Artificial Sequence
  Description of Artificial Sequence: Synthetic epitope
LVTTSTEPSS

SEQ ID NO: 27634 - protein, 10 aa, Artificial Sequence
  Description of Artificial Sequence: Synthetic epitope
LVTTSTGTSS

SEQ ID NO: 27635 - protein, 10 aa, Artificial Sequence
  Description of Artificial Sequence: Synthetic epitope
LVTVTSSQST

SEQ ID NO: 27636 - protein, 10 aa, Artificial Sequence
  Description of Artificial Sequence: Synthetic epitope
LVVAGFSIHV

SEQ ID NO: 27637 - protein, 10 aa, Artificial Sequence
  Description of Artificial Sequence: Synthetic epitope
LVVEVTKQPA

SEQ ID NO: 27638 - protein, 10 aa, Artificial Sequence
  Description of Artificial Sequence: Synthetic epitope
LVVSVAANVA

SEQ ID NO: 27639 - protein, 10 aa, Artificial Sequence
  Description of Artificial Sequence: Synthetic epitope
LVVTRLLSKE

SEQ ID NO: 27640 - protein, 10 aa, Artificial Sequence
  Description of Artificial Sequence: Synthetic epitope
LVWRKTSQST

SEQ ID NO: 27641 - protein, 10 aa, Artificial Sequence
  Description of Artificial Sequence: Synthetic epitope
LVYTSFSQVQ

SEQ ID NO: 27642 - protein, 10 aa, Artificial Sequence
  Description of Artificial Sequence: Synthetic epitope
LVYVTSNDTT

SEQ ID NO: 27643 - protein, 10 aa, Artificial Sequence
  Description of Artificial Sequence: Synthetic epitope
LWAASLAEKY

SEQ ID NO: 27644 - protein, 10 aa, Artificial Sequence
  Description of Artificial Sequence: Synthetic epitope
LWAKLKLQKA

SEQ ID NO: 27645 - protein, 10 aa, Artificial Sequence
  Description of Artificial Sequence: Synthetic epitope
LWERVRLSKN

SEQ ID NO: 27646 - protein, 10 aa, Artificial Sequence
  Description of Artificial Sequence: Synthetic epitope
LWKKSYLSES

SEQ ID NO: 27647 - protein, 10 aa, Artificial Sequence
  Description of Artificial Sequence: Synthetic epitope
LWKPASSAEI

SEQ ID NO: 27648 - protein, 10 aa, Artificial Sequence
  Description of Artificial Sequence: Synthetic epitope
LWRQRSVNKE

SEQ ID NO: 27649 - protein, 10 aa, Artificial Sequence
  Description of Artificial Sequence: Synthetic epitope
LWWASSKKTE

SEQ ID NO: 27650 - protein, 10 aa, Artificial Sequence
  Description of Artificial Sequence: Synthetic epitope
LYEELKTSTA

SEQ ID NO: 27651 - protein, 10 aa, Artificial Sequence
  Description of Artificial Sequence: Synthetic epitope
LYEETEQLRE

SEQ ID NO: 27652 - protein, 10 aa, Artificial Sequence
  Description of Artificial Sequence: Synthetic epitope
LYELIYVLDK

SEQ ID NO: 27653 - protein, 10 aa, Artificial Sequence
  Description of Artificial Sequence: Synthetic epitope
LYEQIEIEGG

SEQ ID NO: 27654 - protein, 10 aa, Artificial Sequence
  Description of Artificial Sequence: Synthetic epitope
LYGKALSRLI

SEQ ID NO: 27655 - protein, 10 aa, Artificial Sequence
  Description of Artificial Sequence: Synthetic epitope
LYIDETVNSN

SEQ ID NO: 27656 - protein, 10 aa, Artificial Sequence
  Description of Artificial Sequence: Synthetic epitope
LYIKRQSEHS

SEQ ID NO: 27657 - protein, 10 aa, Artificial Sequence
  Description of Artificial Sequence: Synthetic epitope
LYILKVLDSG

SEQ ID NO: 27658 - protein, 10 aa, Artificial Sequence
  Description of Artificial Sequence: Synthetic epitope
LYKSKVIYKN

SEQ ID NO: 27659 - protein, 10 aa, Artificial Sequence
  Description of Artificial Sequence: Synthetic epitope
LYKTGARAGT

SEQ ID NO: 27660 - protein, 10 aa, Artificial Sequence
  Description of Artificial Sequence: Synthetic epitope
LYKYMYIHRP

SEQ ID NO: 27661 - protein, 10 aa, Artificial Sequence
  Description of Artificial Sequence: Synthetic epitope
LYMSELIQEQ

SEQ ID NO: 27662 - protein, 10 aa, Artificial Sequence
  Description of Artificial Sequence: Synthetic epitope
LYPALKLEAE

SEQ ID NO: 27663 - protein, 10 aa, Artificial Sequence
  Description of Artificial Sequence: Synthetic epitope
LYPGAIKKAK

SEQ ID NO: 27664 - protein, 10 aa, Artificial Sequence
  Description of Artificial Sequence: Synthetic epitope
LYPLAKFTAE

SEQ ID NO: 27665 - protein, 10 aa, Artificial Sequence
  Description of Artificial Sequence: Synthetic epitope
LYPPSVLSKS

SEQ ID NO: 27666 - protein, 10 aa, Artificial Sequence
  Description of Artificial Sequence: Synthetic epitope
LYRGNDQIMT

SEQ ID NO: 27667 - protein, 10 aa, Artificial Sequence
  Description of Artificial Sequence: Synthetic epitope
LYSGSAQSSR

SEQ ID NO: 27668 - protein, 10 aa, Artificial Sequence
  Description of Artificial Sequence: Synthetic epitope
LYSSASRSTD

SEQ ID NO: 27669 - protein, 10 aa, Artificial Sequence
  Description of Artificial Sequence: Synthetic epitope
LYTQLEAKKA

SEQ ID NO: 27670 - protein, 10 aa, Artificial Sequence
  Description of Artificial Sequence: Synthetic epitope
LYVMHPFWNT

SEQ ID NO: 27671 - protein, 10 aa, Artificial Sequence
  Description of Artificial Sequence: Synthetic epitope
LYWGIAEDHL

SEQ ID NO: 27672 - protein, 10 aa, Artificial Sequence
  Description of Artificial Sequence: Synthetic epitope
LYYWQQTEDD

SEQ ID NO: 27673 - protein, 10 aa, Artificial Sequence
  Description of Artificial Sequence: Synthetic epitope
MAADESSQNT

SEQ ID NO: 27674 - protein, 10 aa, Artificial Sequence
  Description of Artificial Sequence: Synthetic epitope
MAADTQVSET

SEQ ID NO: 27675 - protein, 10 aa, Artificial Sequence
  Description of Artificial Sequence: Synthetic epitope
MAAEAQKQVK

SEQ ID NO: 27676 - protein, 10 aa, Artificial Sequence
  Description of Artificial Sequence: Synthetic epitope
MAAEAQKQVK

SEQ ID NO: 27677 - protein, 10 aa, Artificial Sequence
  Description of Artificial Sequence: Synthetic epitope
MAAELAMGAE

SEQ ID NO: 27678 - protein, 10 aa, Artificial Sequence
  Description of Artificial Sequence: Synthetic epitope
MAAELVEAKN

SEQ ID NO: 27679 - protein, 10 aa, Artificial Sequence
  Description of Artificial Sequence: Synthetic epitope
MAAENSSFVT

SEQ ID NO: 27680 - protein, 10 aa, Artificial Sequence
  Description of Artificial Sequence: Synthetic epitope
MAAEPLTELE

SEQ ID NO: 27681 - protein, 10 aa, Artificial Sequence
  Description of Artificial Sequence: Synthetic epitope
MAAEPNKTEI

SEQ ID NO: 27682 - protein, 10 aa, Artificial Sequence
  Description of Artificial Sequence: Synthetic epitope
MAAERKTRLS

SEQ ID NO: 27683 - protein, 10 aa, Artificial Sequence
  Description of Artificial Sequence: Synthetic epitope
MAAERQEALR

SEQ ID NO: 27684 - protein, 10 aa, Artificial Sequence
  Description of Artificial Sequence: Synthetic epitope
MAAFLKMSVS

SEQ ID NO: 27685 - protein, 10 aa, Artificial Sequence
  Description of Artificial Sequence: Synthetic epitope
MAAGGSTQQR

SEQ ID NO: 27686 - protein, 10 aa, Artificial Sequence
  Description of Artificial Sequence: Synthetic epitope
MAAGHALRKK

SEQ ID NO: 27687 - protein, 10 aa, Artificial Sequence
  Description of Artificial Sequence: Synthetic epitope
MAAGRTDRAT

SEQ ID NO: 27688 - protein, 10 aa, Artificial Sequence
  Description of Artificial Sequence: Synthetic epitope
MAAHEWDWFQ

SEQ ID NO: 27689 - protein, 10 aa, Artificial Sequence
  Description of Artificial Sequence: Synthetic epitope
MAAKAVANTM

SEQ ID NO: 27690 - protein, 10 aa, Artificial Sequence
  Description of Artificial Sequence: Synthetic epitope
MAAKDQLEVQ

SEQ ID NO: 27691 - protein, 10 aa, Artificial Sequence
  Description of Artificial Sequence: Synthetic epitope
MAAKMEITLS

SEQ ID NO: 27692 - protein, 10 aa, Artificial Sequence
  Description of Artificial Sequence: Synthetic epitope
MAAKNSSVTE

SEQ ID NO: 27693 - protein, 10 aa, Artificial Sequence
  Description of Artificial Sequence: Synthetic epitope
MAAKSEMADL

SEQ ID NO: 27694 - protein, 10 aa, Artificial Sequence
  Description of Artificial Sequence: Synthetic epitope
MAALAEEQTE

SEQ ID NO: 27695 - protein, 10 aa, Artificial Sequence
  Description of Artificial Sequence: Synthetic epitope
MAALGDAEGA

SEQ ID NO: 27696 - protein, 10 aa, Artificial Sequence
  Description of Artificial Sequence: Synthetic epitope
MAALGVLESD

SEQ ID NO: 27697 - protein, 10 aa, Artificial Sequence
  Description of Artificial Sequence: Synthetic epitope
MAALIAENFR

SEQ ID NO: 27698 - protein, 10 aa, Artificial Sequence
  Description of Artificial Sequence: Synthetic epitope
MAALRDAEIQ

SEQ ID NO: 27699 - protein, 10 aa, Artificial Sequence
  Description of Artificial Sequence: Synthetic epitope
MAALTAEHFA

SEQ ID NO: 27700 - protein, 10 aa, Artificial Sequence
  Description of Artificial Sequence: Synthetic epitope
MAAMAVALRG

SEQ ID NO: 27701 - protein, 10 aa, Artificial Sequence
  Description of Artificial Sequence: Synthetic epitope
MAANATSGRP

SEQ ID NO: 27702 - protein, 10 aa, Artificial Sequence
  Description of Artificial Sequence: Synthetic epitope
MAAPAQQTTQ

SEQ ID NO: 27703 - protein, 10 aa, Artificial Sequence
  Description of Artificial Sequence: Synthetic epitope
MAAPASRQVR

SEQ ID NO: 27704 - protein, 10 aa, Artificial Sequence
  Description of Artificial Sequence: Synthetic epitope
MAAQALALLR

SEQ ID NO: 27705 - protein, 10 aa, Artificial Sequence
  Description of Artificial Sequence: Synthetic epitope
MAAQEMELAG

SEQ ID NO: 27706 - protein, 10 aa, Artificial Sequence
  Description of Artificial Sequence: Synthetic epitope
MAAQRRSLLQ

SEQ ID NO: 27707 - protein, 10 aa, Artificial Sequence
  Description of Artificial Sequence: Synthetic epitope
MAARQANALS

SEQ ID NO: 27708 - protein, 10 aa, Artificial Sequence
  Description of Artificial Sequence: Synthetic epitope
MAARRITQET

SEQ ID NO: 27709 - protein, 10 aa, Artificial Sequence
  Description of Artificial Sequence: Synthetic epitope
MAARSVSGIT

SEQ ID NO: 27710 - protein, 10 aa, Artificial Sequence
  Description of Artificial Sequence: Synthetic epitope
MAASAAETRV

SEQ ID NO: 27711 - protein, 10 aa, Artificial Sequence
  Description of Artificial Sequence: Synthetic epitope
MAASGESGTS

SEQ ID NO: 27712 - protein, 10 aa, Artificial Sequence
  Description of Artificial Sequence: Synthetic epitope
MAASGVEKSS

SEQ ID NO: 27713 - protein, 10 aa, Artificial Sequence
  Description of Artificial Sequence: Synthetic epitope
MAASKTQGAV

SEQ ID NO: 27714 - protein, 10 aa, Artificial Sequence
  Description of Artificial Sequence: Synthetic epitope
MAASLNAGET

SEQ ID NO: 27715 - protein, 10 aa, Artificial Sequence
  Description of Artificial Sequence: Synthetic epitope
MAASQAVEEM

SEQ ID NO: 27716 - protein, 10 aa, Artificial Sequence
  Description of Artificial Sequence: Synthetic epitope
MAASRLELNL

SEQ ID NO: 27717 - protein, 10 aa, Artificial Sequence
  Description of Artificial Sequence: Synthetic epitope
MAASRRLMKE

SEQ ID NO: 27718 - protein, 10 aa, Artificial Sequence
  Description of Artificial Sequence: Synthetic epitope
MAASRSAGEA

SEQ ID NO: 27719 - protein, 10 aa, Artificial Sequence
  Description of Artificial Sequence: Synthetic epitope
MAASRSTRVT

SEQ ID NO: 27720 - protein, 10 aa, Artificial Sequence
  Description of Artificial Sequence: Synthetic epitope
MAASSLEQKL

SEQ ID NO: 27721 - protein, 10 aa, Artificial Sequence
  Description of Artificial Sequence: Synthetic epitope
MAASTDMAGL

SEQ ID NO: 27722 - protein, 10 aa, Artificial Sequence
  Description of Artificial Sequence: Synthetic epitope
MAASVEQREG

SEQ ID NO: 27723 - protein, 10 aa, Artificial Sequence
  Description of Artificial Sequence: Synthetic epitope
MAASVKEQST

SEQ ID NO: 27724 - protein, 10 aa, Artificial Sequence
  Description of Artificial Sequence: Synthetic epitope
MAATKTASYD

SEQ ID NO: 27725 - protein, 10 aa, Artificial Sequence
  Description of Artificial Sequence: Synthetic epitope
MAATRSPTRA

SEQ ID NO: 27726 - protein, 10 aa, Artificial Sequence
  Description of Artificial Sequence: Synthetic epitope
MAAVILESIF

SEQ ID NO: 27727 - protein, 10 aa, Artificial Sequence
  Description of Artificial Sequence: Synthetic epitope
MAAVKASTSK

SEQ ID NO: 27728 - protein, 10 aa, Artificial Sequence
  Description of Artificial Sequence: Synthetic epitope
MAAVLNAERL

SEQ ID NO: 27729 - protein, 10 aa, Artificial Sequence
  Description of Artificial Sequence: Synthetic epitope
MAAVQAAEVK

SEQ ID NO: 27730 - protein, 10 aa, Artificial Sequence
  Description of Artificial Sequence: Synthetic epitope
MAAVSLRLGD

SEQ ID NO: 27731 - protein, 10 aa, Artificial Sequence
  Description of Artificial Sequence: Synthetic epitope
MAAVVENVVK

SEQ ID NO: 27732 - protein, 10 aa, Artificial Sequence
  Description of Artificial Sequence: Synthetic epitope
MADFKVLSSQ

SEQ ID NO: 27733 - protein, 10 aa, Artificial Sequence
  Description of Artificial Sequence: Synthetic epitope
MADKAISGVL

SEQ ID NO: 27734 - protein, 10 aa, Artificial Sequence
  Description of Artificial Sequence: Synthetic epitope
MADKAKPAKA

SEQ ID NO: 27735 - protein, 10 aa, Artificial Sequence
  Description of Artificial Sequence: Synthetic epitope
MADKEAAFDD

SEQ ID NO: 27736 - protein, 10 aa, Artificial Sequence
  Description of Artificial Sequence: Synthetic epitope
MADKIIMYDQ

SEQ ID NO: 27737 - protein, 10 aa, Artificial Sequence
  Description of Artificial Sequence: Synthetic epitope
MADKMVRTPK

SEQ ID NO: 27738 - protein, 10 aa, Artificial Sequence
  Description of Artificial Sequence: Synthetic epitope
MADKRKLQGE

SEQ ID NO: 27739 - protein, 10 aa, Artificial Sequence
  Description of Artificial Sequence: Synthetic epitope
MADNEQVLTT

SEQ ID NO: 27740 - protein, 10 aa, Artificial Sequence
  Description of Artificial Sequence: Synthetic epitope
MADQRMDISS

SEQ ID NO: 27741 - protein, 10 aa, Artificial Sequence
  Description of Artificial Sequence: Synthetic epitope
MADSRDPASD

SEQ ID NO: 27742 - protein, 10 aa, Artificial Sequence
  Description of Artificial Sequence: Synthetic epitope
MADSVKTFLQ

SEQ ID NO: 27743 - protein, 10 aa, Artificial Sequence
  Description of Artificial Sequence: Synthetic epitope
MADTQTQVAP

SEQ ID NO: 27744 - protein, 10 aa, Artificial Sequence
  Description of Artificial Sequence: Synthetic epitope
MAEASSDPGA

SEQ ID NO: 27745 - protein, 10 aa, Artificial Sequence
  Description of Artificial Sequence: Synthetic epitope
MAEASSLGRQ

SEQ ID NO: 27746 - protein, 10 aa, Artificial Sequence
  Description of Artificial Sequence: Synthetic epitope
MAEASVDAST

SEQ ID NO: 27747 - protein, 10 aa, Artificial Sequence
  Description of Artificial Sequence: Synthetic epitope
MAEAVERTDE

SEQ ID NO: 27748 - protein, 10 aa, Artificial Sequence
  Description of Artificial Sequence: Synthetic epitope
MAEDADMRNE

SEQ ID NO: 27749 - protein, 10 aa, Artificial Sequence
  Description of Artificial Sequence: Synthetic epitope
MAEEKKAYKK

SEQ ID NO: 27750 - protein, 10 aa, Artificial Sequence
  Description of Artificial Sequence: Synthetic epitope
MAEEQEFTQL

SEQ ID NO: 27751 - protein, 10 aa, Artificial Sequence
  Description of Artificial Sequence: Synthetic epitope
MAEEQVNRSA

SEQ ID NO: 27752 - protein, 10 aa, Artificial Sequence
  Description of Artificial Sequence: Synthetic epitope
MAEFPSKVST

SEQ ID NO: 27753 - protein, 10 aa, Artificial Sequence
  Description of Artificial Sequence: Synthetic epitope
MAEGEKNQDF

SEQ ID NO: 27754 - protein, 10 aa, Artificial Sequence
  Description of Artificial Sequence: Synthetic epitope
MAEKKTRALQ

SEQ ID NO: 27755 - protein, 10 aa, Artificial Sequence
  Description of Artificial Sequence: Synthetic epitope
MAEKTQKSVK

SEQ ID NO: 27756 - protein, 10 aa, Artificial Sequence
  Description of Artificial Sequence: Synthetic epitope
MAELGELKHM

SEQ ID NO: 27757 - protein, 10 aa, Artificial Sequence
  Description of Artificial Sequence: Synthetic epitope
MAELKSLSGD

SEQ ID NO: 27758 - protein, 10 aa, Artificial Sequence
  Description of Artificial Sequence: Synthetic epitope
MAELTALESL

SEQ ID NO: 27759 - protein, 10 aa, Artificial Sequence
  Description of Artificial Sequence: Synthetic epitope
MAELTDSARG

SEQ ID NO: 27760 - protein, 10 aa, Artificial Sequence
  Description of Artificial Sequence: Synthetic epitope
MAELTVEVRG

SEQ ID NO: 27761 - protein, 10 aa, Artificial Sequence
  Description of Artificial Sequence: Synthetic epitope
MAENELSRSV

SEQ ID NO: 27762 - protein, 10 aa, Artificial Sequence
  Description of Artificial Sequence: Synthetic epitope
MAENSESLGT

SEQ ID NO: 27763 - protein, 10 aa, Artificial Sequence
  Description of Artificial Sequence: Synthetic epitope
MAEPASVAAE

SEQ ID NO: 27764 - protein, 10 aa, Artificial Sequence
  Description of Artificial Sequence: Synthetic epitope
MAEQESLEFG

SEQ ID NO: 27765 - protein, 10 aa, Artificial Sequence
  Description of Artificial Sequence: Synthetic epitope
MAEQKNIKDK

SEQ ID NO: 27766 - protein, 10 aa, Artificial Sequence
  Description of Artificial Sequence: Synthetic epitope
MAEQVALSRT

SEQ ID NO: 27767 - protein, 10 aa, Artificial Sequence
  Description of Artificial Sequence: Synthetic epitope
MAERALEPEA

SEQ ID NO: 27768 - protein, 10 aa, Artificial Sequence
  Description of Artificial Sequence: Synthetic epitope
MAERKGTAKV

SEQ ID NO: 27769 - protein, 10 aa, Artificial Sequence
  Description of Artificial Sequence: Synthetic epitope
MAESENRKEL

SEQ ID NO: 27770 - protein, 10 aa, Artificial Sequence
  Description of Artificial Sequence: Synthetic epitope
MAESGKEKIK

SEQ ID NO: 27771 - protein, 10 aa, Artificial Sequence
  Description of Artificial Sequence: Synthetic epitope
MAESPTEEAA

SEQ ID NO: 27772 - protein, 10 aa, Artificial Sequence
  Description of Artificial Sequence: Synthetic epitope
MAESSESFTM

SEQ ID NO: 27773 - protein, 10 aa, Artificial Sequence
  Description of Artificial Sequence: Synthetic epitope
MAETLNQSKE

SEQ ID NO: 27774 - protein, 10 aa, Artificial Sequence
  Description of Artificial Sequence: Synthetic epitope
MAETSEEVAV

SEQ ID NO: 27775 - protein, 10 aa, Artificial Sequence
  Description of Artificial Sequence: Synthetic epitope
MAETSLPELG

SEQ ID NO: 27776 - protein, 10 aa, Artificial Sequence
  Description of Artificial Sequence: Synthetic epitope
MAEVASRDPK

SEQ ID NO: 27777 - protein, 10 aa, Artificial Sequence
  Description of Artificial Sequence: Synthetic epitope
MAEVEAQKAQ

SEQ ID NO: 27778 - protein, 10 aa, Artificial Sequence
  Description of Artificial Sequence: Synthetic epitope
MAEVEAVQLK

SEQ ID NO: 27779 - protein, 10 aa, Artificial Sequence
  Description of Artificial Sequence: Synthetic epitope
MAEVNIIYVT

SEQ ID NO: 27780 - protein, 10 aa, Artificial Sequence
  Description of Artificial Sequence: Synthetic epitope
MAEYSYVKST

SEQ ID NO: 27781 - protein, 10 aa, Artificial Sequence
  Description of Artificial Sequence: Synthetic epitope
MAFIRKKQQE

SEQ ID NO: 27782 - protein, 10 aa, Artificial Sequence
  Description of Artificial Sequence: Synthetic epitope
MAGASVNRVV

SEQ ID NO: 27783 - protein, 10 aa, Artificial Sequence
  Description of Artificial Sequence: Synthetic epitope
MAGKAHRLSA

SEQ ID NO: 27784 - protein, 10 aa, Artificial Sequence
  Description of Artificial Sequence: Synthetic epitope
MAGKQAVSAS

SEQ ID NO: 27785 - protein, 10 aa, Artificial Sequence
  Description of Artificial Sequence: Synthetic epitope
MAGMALARAW

SEQ ID NO: 27786 - protein, 10 aa, Artificial Sequence
  Description of Artificial Sequence: Synthetic epitope
MAGMKTASGD

SEQ ID NO: 27787 - protein, 10 aa, Artificial Sequence
  Description of Artificial Sequence: Synthetic epitope
MAGMSESSFL

SEQ ID NO: 27788 - protein, 10 aa, Artificial Sequence
  Description of Artificial Sequence: Synthetic epitope
MAGNFWQSSH

SEQ ID NO: 27789 - protein, 10 aa, Artificial Sequence
  Description of Artificial Sequence: Synthetic epitope
MAGRSLTSKA

SEQ ID NO: 27790 - protein, 10 aa, Artificial Sequence
  Description of Artificial Sequence: Synthetic epitope
MAGTALKRLM

SEQ ID NO: 27791 - protein, 10 aa, Artificial Sequence
  Description of Artificial Sequence: Synthetic epitope
MAGTRRKSLQ

SEQ ID NO: 27792 - protein, 10 aa, Artificial Sequence
  Description of Artificial Sequence: Synthetic epitope
MAGVEEVAAS

SEQ ID NO: 27793 - protein, 10 aa, Artificial Sequence
  Description of Artificial Sequence: Synthetic epitope
MAHAGRTGYD

SEQ ID NO: 27794 - protein, 10 aa, Artificial Sequence
  Description of Artificial Sequence: Synthetic epitope
MAHAMENSWT

SEQ ID NO: 27795 - protein, 10 aa, Artificial Sequence
  Description of Artificial Sequence: Synthetic epitope
MAHEMIGTQI

SEQ ID NO: 27796 - protein, 10 aa, Artificial Sequence
  Description of Artificial Sequence: Synthetic epitope
MAHLLSTGLH

SEQ ID NO: 27797 - protein, 10 aa, Artificial Sequence
  Description of Artificial Sequence: Synthetic epitope
MAHRLQIRLL

SEQ ID NO: 27798 - protein, 10 aa, Artificial Sequence
  Description of Artificial Sequence: Synthetic epitope
MAIAGTSVPQ

SEQ ID NO: 27799 - protein, 10 aa, Artificial Sequence
  Description of Artificial Sequence: Synthetic epitope
MAIATSTQLA

SEQ ID NO: 27800 - protein, 10 aa, Artificial Sequence
  Description of Artificial Sequence: Synthetic epitope
MAIDLAEKSS

SEQ ID NO: 27801 - protein, 10 aa, Artificial Sequence
  Description of Artificial Sequence: Synthetic epitope
MAIPVLEARA

SEQ ID NO: 27802 - protein, 10 aa, Artificial Sequence
  Description of Artificial Sequence: Synthetic epitope
MAKAKKVGAR

SEQ ID NO: 27803 - protein, 10 aa, Artificial Sequence
  Description of Artificial Sequence: Synthetic epitope
MAKATTIKEA

SEQ ID NO: 27804 - protein, 10 aa, Artificial Sequence
  Description of Artificial Sequence: Synthetic epitope
MAKEEDEEKK

SEQ ID NO: 27805 - protein, 10 aa, Artificial Sequence
  Description of Artificial Sequence: Synthetic epitope
MAKESGISLK

SEQ ID NO: 27806 - protein, 10 aa, Artificial Sequence
  Description of Artificial Sequence: Synthetic epitope
MAKEWGYASH

SEQ ID NO: 27807 - protein, 10 aa, Artificial Sequence
  Description of Artificial Sequence: Synthetic epitope
MAKIAKTHED

SEQ ID NO: 27808 - protein, 10 aa, Artificial Sequence
  Description of Artificial Sequence: Synthetic epitope
MAKIEKNAPT

SEQ ID NO: 27809 - protein, 10 aa, Artificial Sequence
  Description of Artificial Sequence: Synthetic epitope
MAKIKSTMMT

SEQ ID NO: 27810 - protein, 10 aa, Artificial Sequence
  Description of Artificial Sequence: Synthetic epitope
MAKISSPTET

SEQ ID NO: 27811 - protein, 10 aa, Artificial Sequence
  Description of Artificial Sequence: Synthetic epitope
MAKKSAENGI

SEQ ID NO: 27812 - protein, 10 aa, Artificial Sequence
  Description of Artificial Sequence: Synthetic epitope
MAKLDNADFL

SEQ ID NO: 27813 - protein, 10 aa, Artificial Sequence
  Description of Artificial Sequence: Synthetic epitope
MAKMSKVGKV

SEQ ID NO: 27814 - protein, 10 aa, Artificial Sequence
  Description of Artificial Sequence: Synthetic epitope
MAKNKARRKE

SEQ ID NO: 27815 - protein, 10 aa, Artificial Sequence
  Description of Artificial Sequence: Synthetic epitope
MAKPSVELTR

SEQ ID NO: 27816 - protein, 10 aa, Artificial Sequence
  Description of Artificial Sequence: Synthetic epitope
MAKRNAEKEL

SEQ ID NO: 27817 - protein, 10 aa, Artificial Sequence
  Description of Artificial Sequence: Synthetic epitope
MAKRSRSEDE

SEQ ID NO: 27818 - protein, 10 aa, Artificial Sequence
  Description of Artificial Sequence: Synthetic epitope
MAKSKNHTTH

SEQ ID NO: 27819 - protein, 10 aa, Artificial Sequence
  Description of Artificial Sequence: Synthetic epitope
MAKSKSKETT

SEQ ID NO: 27820 - protein, 10 aa, Artificial Sequence
  Description of Artificial Sequence: Synthetic epitope
MAKSSRASAA

SEQ ID NO: 27821 - protein, 10 aa, Artificial Sequence
  Description of Artificial Sequence: Synthetic epitope
MAKSSVKIHI

SEQ ID NO: 27822 - protein, 10 aa, Artificial Sequence
  Description of Artificial Sequence: Synthetic epitope
MAKVSELYDV

SEQ ID NO: 27823 - protein, 10 aa, Artificial Sequence
  Description of Artificial Sequence: Synthetic epitope
MALAARLLPQ

SEQ ID NO: 27824 - protein, 10 aa, Artificial Sequence
  Description of Artificial Sequence: Synthetic epitope
MALADSTRGL

SEQ ID NO: 27825 - protein, 10 aa, Artificial Sequence
  Description of Artificial Sequence: Synthetic epitope
MALAKLSEID

SEQ ID NO: 27826 - protein, 10 aa, Artificial Sequence
  Description of Artificial Sequence: Synthetic epitope
MALFTPWKLS

SEQ ID NO: 27827 - protein, 10 aa, Artificial Sequence
  Description of Artificial Sequence: Synthetic epitope
MALHSMRKAR

SEQ ID NO: 27828 - protein, 10 aa, Artificial Sequence
  Description of Artificial Sequence: Synthetic epitope
MALKAEGAAL

SEQ ID NO: 27829 - protein, 10 aa, Artificial Sequence
  Description of Artificial Sequence: Synthetic epitope
MALKDYALEK

SEQ ID NO: 27830 - protein, 10 aa, Artificial Sequence
  Description of Artificial Sequence: Synthetic epitope
MALKQISSNK

SEQ ID NO: 27831 - protein, 10 aa, Artificial Sequence
  Description of Artificial Sequence: Synthetic epitope
MALKTSLGSV

SEQ ID NO: 27832 - protein, 10 aa, Artificial Sequence
  Description of Artificial Sequence: Synthetic epitope
MALLRDVSLQ

SEQ ID NO: 27833 - protein, 10 aa, Artificial Sequence
  Description of Artificial Sequence: Synthetic epitope
MALNGAEVDD

SEQ ID NO: 27834 - protein, 10 aa, Artificial Sequence
  Description of Artificial Sequence: Synthetic epitope
MALPTQAQVV

SEQ ID NO: 27835 - protein, 10 aa, Artificial Sequence
  Description of Artificial Sequence: Synthetic epitope
MALQQGIQER

SEQ ID NO: 27836 - protein, 10 aa, Artificial Sequence
  Description of Artificial Sequence: Synthetic epitope
MALQSQASEE

SEQ ID NO: 27837 - protein, 10 aa, Artificial Sequence
  Description of Artificial Sequence: Synthetic epitope
MALRKELLKS

SEQ ID NO: 27838 - protein, 10 aa, Artificial Sequence
  Description of Artificial Sequence: Synthetic epitope
MALRLLKLAA

SEQ ID NO: 27839 - protein, 10 aa, Artificial Sequence
  Description of Artificial Sequence: Synthetic epitope
MALRVTRNSK

SEQ ID NO: 27840 - protein, 10 aa, Artificial Sequence
  Description of Artificial Sequence: Synthetic epitope
MALSAETESH

SEQ ID NO: 27841 - protein, 10 aa, Artificial Sequence
  Description of Artificial Sequence: Synthetic epitope
MALSAQQIPR

SEQ ID NO: 27842 - protein, 10 aa, Artificial Sequence
  Description of Artificial Sequence: Synthetic epitope
MALSKSMHAR

SEQ ID NO: 27843 - protein, 10 aa, Artificial Sequence
  Description of Artificial Sequence: Synthetic epitope
MALSMPLNGL

SEQ ID NO: 27844 - protein, 10 aa, Artificial Sequence
  Description of Artificial Sequence: Synthetic epitope
MALSMSLSSD

SEQ ID NO: 27845 - protein, 10 aa, Artificial Sequence
  Description of Artificial Sequence: Synthetic epitope
MALSTIVSQR

SEQ ID NO: 27846 - protein, 10 aa, Artificial Sequence
  Description of Artificial Sequence: Synthetic epitope
MALTKASSVA

SEQ ID NO: 27847 - protein, 10 aa, Artificial Sequence
  Description of Artificial Sequence: Synthetic epitope
MALVQALVPR

SEQ ID NO: 27848 - protein, 10 aa, Artificial Sequence
  Description of Artificial Sequence: Synthetic epitope
MAMAMSDSGA

SEQ ID NO: 27849 - protein, 10 aa, Artificial Sequence
  Description of Artificial Sequence: Synthetic epitope
MAMAQKLSHL

SEQ ID NO: 27850 - protein, 10 aa, Artificial Sequence
  Description of Artificial Sequence: Synthetic epitope
MAMEKSKATP

SEQ ID NO: 27851 - protein, 10 aa, Artificial Sequence
  Description of Artificial Sequence: Synthetic epitope
MAMKEEMAEL

SEQ ID NO: 27852 - protein, 10 aa, Artificial Sequence
  Description of Artificial Sequence: Synthetic epitope
MAMKKDPVKK

SEQ ID NO: 27853 - protein, 10 aa, Artificial Sequence
  Description of Artificial Sequence: Synthetic epitope
MAMPEVKKRR

SEQ ID NO: 27854 - protein, 10 aa, Artificial Sequence
  Description of Artificial Sequence: Synthetic epitope
MAMPTQIPAD

SEQ ID NO: 27855 - protein, 10 aa, Artificial Sequence
  Description of Artificial Sequence: Synthetic epitope
MANMNSDSRH

SEQ ID NO: 27856 - protein, 10 aa, Artificial Sequence
  Description of Artificial Sequence: Synthetic epitope
MANQVNGNAV

SEQ ID NO: 27857 - protein, 10 aa, Artificial Sequence
  Description of Artificial Sequence: Synthetic epitope
MANSALSTSS

SEQ ID NO: 27858 - protein, 10 aa, Artificial Sequence
  Description of Artificial Sequence: Synthetic epitope
MANSLRGEVL

SEQ ID NO: 27859 - protein, 10 aa, Artificial Sequence
  Description of Artificial Sequence: Synthetic epitope
MANTIKLLDL

SEQ ID NO: 27860 - protein, 10 aa, Artificial Sequence
  Description of Artificial Sequence: Synthetic epitope
MANTTGEPEE

SEQ ID NO: 27861 - protein, 10 aa, Artificial Sequence
  Description of Artificial Sequence: Synthetic epitope
MANVADTKLY

SEQ ID NO: 27862 - protein, 10 aa, Artificial Sequence
  Description of Artificial Sequence: Synthetic epitope
MAPASESSAS

SEQ ID NO: 27863 - protein, 10 aa, Artificial Sequence
  Description of Artificial Sequence: Synthetic epitope
MAPEMDQFYR

SEQ ID NO: 27864 - protein, 10 aa, Artificial Sequence
  Description of Artificial Sequence: Synthetic epitope
MAPESNAAQI

SEQ ID NO: 27865 - protein, 10 aa, Artificial Sequence
  Description of Artificial Sequence: Synthetic epitope
MAPITTSREE

SEQ ID NO: 27866 - protein, 10 aa, Artificial Sequence
  Description of Artificial Sequence: Synthetic epitope
MAPRLQLEKA

SEQ ID NO: 27867 - protein, 10 aa, Artificial Sequence
  Description of Artificial Sequence: Synthetic epitope
MAPSHLSVRE

SEQ ID NO: 27868 - protein, 10 aa, Artificial Sequence
  Description of Artificial Sequence: Synthetic epitope
MAPTLATAHR

SEQ ID NO: 27869 - protein, 10 aa, Artificial Sequence
  Description of Artificial Sequence: Synthetic epitope
MAPVKISHVV

SEQ ID NO: 27870 - protein, 10 aa, Artificial Sequence
  Description of Artificial Sequence: Synthetic epitope
MAPVKKLVVK

SEQ ID NO: 27871 - protein, 10 aa, Artificial Sequence
  Description of Artificial Sequence: Synthetic epitope
MAPWRKADKE

SEQ ID NO: 27872 - protein, 10 aa, Artificial Sequence
  Description of Artificial Sequence: Synthetic epitope
MAQASRSGSL

SEQ ID NO: 27873 - protein, 10 aa, Artificial Sequence
  Description of Artificial Sequence: Synthetic epitope
MAQFAFESDL

SEQ ID NO: 27874 - protein, 10 aa, Artificial Sequence
  Description of Artificial Sequence: Synthetic epitope
MAQFDAKKFA

SEQ ID NO: 27875 - protein, 10 aa, Artificial Sequence
  Description of Artificial Sequence: Synthetic epitope
MAQISSNSGF

SEQ ID NO: 27876 - protein, 10 aa, Artificial Sequence
  Description of Artificial Sequence: Synthetic epitope
MAQKPLRLLA

SEQ ID NO: 27877 - protein, 10 aa, Artificial Sequence
  Description of Artificial Sequence: Synthetic epitope
MAQQKVTKEE

SEQ ID NO: 27878 - protein, 10 aa, Artificial Sequence
  Description of Artificial Sequence: Synthetic epitope
MAQRHSDSSL

SEQ ID NO: 27879 - protein, 10 aa, Artificial Sequence
  Description of Artificial Sequence: Synthetic epitope
MAQSNMFTVA

SEQ ID NO: 27880 - protein, 10 aa, Artificial Sequence
  Description of Artificial Sequence: Synthetic epitope
MAQTPAFDKP

SEQ ID NO: 27881 - protein, 10 aa, Artificial Sequence
  Description of Artificial Sequence: Synthetic epitope
MAQVDSQDRW

SEQ ID NO: 27882 - protein, 10 aa, Artificial Sequence
  Description of Artificial Sequence: Synthetic epitope
MAQVEIQSSE

SEQ ID NO: 27883 - protein, 10 aa, Artificial Sequence
  Description of Artificial Sequence: Synthetic epitope
MARELSESTA

SEQ ID NO: 27884 - protein, 10 aa, Artificial Sequence
  Description of Artificial Sequence: Synthetic epitope
MARELSQEAL

SEQ ID NO: 27885 - protein, 10 aa, Artificial Sequence
  Description of Artificial Sequence: Synthetic epitope
MARETFPFTS

SEQ ID NO: 27886 - protein, 10 aa, Artificial Sequence
  Description of Artificial Sequence: Synthetic epitope
MARHVFLTGP

SEQ ID NO: 27887 - protein, 10 aa, Artificial Sequence
  Description of Artificial Sequence: Synthetic epitope
MARKKVRPRL

SEQ ID NO: 27888 - protein, 10 aa, Artificial Sequence
  Description of Artificial Sequence: Synthetic epitope
MARKVVSRKR

SEQ ID NO: 27889 - protein, 10 aa, Artificial Sequence
  Description of Artificial Sequence: Synthetic epitope
MARNAEKAMT

SEQ ID NO: 27890 - protein, 10 aa, Artificial Sequence
  Description of Artificial Sequence: Synthetic epitope
MARNEVIADI

SEQ ID NO: 27891 - protein, 10 aa, Artificial Sequence
  Description of Artificial Sequence: Synthetic epitope
MARSISTSGP

SEQ ID NO: 27892 - protein, 10 aa, Artificial Sequence
  Description of Artificial Sequence: Synthetic epitope
MARSKLLKKE

SEQ ID NO: 27893 - protein, 10 aa, Artificial Sequence
  Description of Artificial Sequence: Synthetic epitope
MARSLVHDTV

SEQ ID NO: 27894 - protein, 10 aa, Artificial Sequence
  Description of Artificial Sequence: Synthetic epitope
MARTPQTVAG

SEQ ID NO: 27895 - protein, 10 aa, Artificial Sequence
  Description of Artificial Sequence: Synthetic epitope
MARVHIWPQH

SEQ ID NO: 27896 - protein, 10 aa, Artificial Sequence
  Description of Artificial Sequence: Synthetic epitope
MARYEEVSVS

SEQ ID NO: 27897 - protein, 10 aa, Artificial Sequence
  Description of Artificial Sequence: Synthetic epitope
MASAEPLTAL

SEQ ID NO: 27898 - protein, 10 aa, Artificial Sequence
  Description of Artificial Sequence: Synthetic epitope
MASAKDANEN

SEQ ID NO: 27899 - protein, 10 aa, Artificial Sequence
  Description of Artificial Sequence: Synthetic epitope
MASARGAKQS

SEQ ID NO: 27900 - protein, 10 aa, Artificial Sequence
  Description of Artificial Sequence: Synthetic epitope
MASASTSKYN

SEQ ID NO: 27901 - protein, 10 aa, Artificial Sequence
  Description of Artificial Sequence: Synthetic epitope
MASASYHISN

SEQ ID NO: 27902 - protein, 10 aa, Artificial Sequence
  Description of Artificial Sequence: Synthetic epitope
MASATRLIQR

SEQ ID NO: 27903 - protein, 10 aa, Artificial Sequence
  Description of Artificial Sequence: Synthetic epitope
MASAVLSSVP

SEQ ID NO: 27904 - protein, 10 aa, Artificial Sequence
  Description of Artificial Sequence: Synthetic epitope
MASDASHALE

SEQ ID NO: 27905 - protein, 10 aa, Artificial Sequence
  Description of Artificial Sequence: Synthetic epitope
MASDLESSLT

SEQ ID NO: 27906 - protein, 10 aa, Artificial Sequence
  Description of Artificial Sequence: Synthetic epitope
MASDSMSSKQ

SEQ ID NO: 27907 - protein, 10 aa, Artificial Sequence
  Description of Artificial Sequence: Synthetic epitope
MASEAEFTVS

SEQ ID NO: 27908 - protein, 10 aa, Artificial Sequence
  Description of Artificial Sequence: Synthetic epitope
MASEDIAKLA

SEQ ID NO: 27909 - protein, 10 aa, Artificial Sequence
  Description of Artificial Sequence: Synthetic epitope
MASEEASLRA

SEQ ID NO: 27910 - protein, 10 aa, Artificial Sequence
  Description of Artificial Sequence: Synthetic epitope
MASELAKYGL

SEQ ID NO: 27911 - protein, 10 aa, Artificial Sequence
  Description of Artificial Sequence: Synthetic epitope
MASELAMSNS

SEQ ID NO: 27912 - protein, 10 aa, Artificial Sequence
  Description of Artificial Sequence: Synthetic epitope
MASELGARDD

SEQ ID NO: 27913 - protein, 10 aa, Artificial Sequence
  Description of Artificial Sequence: Synthetic epitope
MASESSPLLA

SEQ ID NO: 27914 - protein, 10 aa, Artificial Sequence
  Description of Artificial Sequence: Synthetic epitope
MASETEKTHA

SEQ ID NO: 27915 - protein, 10 aa, Artificial Sequence
  Description of Artificial Sequence: Synthetic epitope
MASFRTDRTP

SEQ ID NO: 27916 - protein, 10 aa, Artificial Sequence
  Description of Artificial Sequence: Synthetic epitope
MASGVQVADE

SEQ ID NO: 27917 - protein, 10 aa, Artificial Sequence
  Description of Artificial Sequence: Synthetic epitope
MASHEVDNAE

SEQ ID NO: 27918 - protein, 10 aa, Artificial Sequence
  Description of Artificial Sequence: Synthetic epitope
MASKTKASEA

SEQ ID NO: 27919 - protein, 10 aa, Artificial Sequence
  Description of Artificial Sequence: Synthetic epitope
MASLLQDQLT

SEQ ID NO: 27920 - protein, 10 aa, Artificial Sequence
  Description of Artificial Sequence: Synthetic epitope
MASLQRSRVL

SEQ ID NO: 27921 - protein, 10 aa, Artificial Sequence
  Description of Artificial Sequence: Synthetic epitope
MASLSGLASA

SEQ ID NO: 27922 - protein, 10 aa, Artificial Sequence
  Description of Artificial Sequence: Synthetic epitope
MASNERDAIS

SEQ ID NO: 27923 - protein, 10 aa, Artificial Sequence
  Description of Artificial Sequence: Synthetic epitope
MASNHKSSAA

SEQ ID NO: 27924 - protein, 10 aa, Artificial Sequence
  Description of Artificial Sequence: Synthetic epitope
MASNNTASIA

SEQ ID NO: 27925 - protein, 10 aa, Artificial Sequence
  Description of Artificial Sequence: Synthetic epitope
MASNSWNASS

SEQ ID NO: 27926 - protein, 10 aa, Artificial Sequence
  Description of Artificial Sequence: Synthetic epitope
MASPDRSKRK

SEQ ID NO: 27927 - protein, 10 aa, Artificial Sequence
  Description of Artificial Sequence: Synthetic epitope
MASPLSEMYQ

SEQ ID NO: 27928 - protein, 10 aa, Artificial Sequence
  Description of Artificial Sequence: Synthetic epitope
MASQADQKEE

SEQ ID NO: 27929 - protein, 10 aa, Artificial Sequence
  Description of Artificial Sequence: Synthetic epitope
MASQASETLQ

SEQ ID NO: 27930 - protein, 10 aa, Artificial Sequence
  Description of Artificial Sequence: Synthetic epitope
MASQPNSSAK

SEQ ID NO: 27931 - protein, 10 aa, Artificial Sequence
  Description of Artificial Sequence: Synthetic epitope
MASQVLTQSA

SEQ ID NO: 27932 - protein, 10 aa, Artificial Sequence
  Description of Artificial Sequence: Synthetic epitope
MASRTSSEMS

SEQ ID NO: 27933 - protein, 10 aa, Artificial Sequence
  Description of Artificial Sequence: Synthetic epitope
MASSAASSEH

SEQ ID NO: 27934 - protein, 10 aa, Artificial Sequence
  Description of Artificial Sequence: Synthetic epitope
MASSDVKPKS

SEQ ID NO: 27935 - protein, 10 aa, Artificial Sequence
  Description of Artificial Sequence: Synthetic epitope
MASSETEIRW

SEQ ID NO: 27936 - protein, 10 aa, Artificial Sequence
  Description of Artificial Sequence: Synthetic epitope
MASSLNEDPE

SEQ ID NO: 27937 - protein, 10 aa, Artificial Sequence
  Description of Artificial Sequence: Synthetic epitope
MASSNTVLMR

SEQ ID NO: 27938 - protein, 10 aa, Artificial Sequence
  Description of Artificial Sequence: Synthetic epitope
MASSRASSTQ

SEQ ID NO: 27939 - protein, 10 aa, Artificial Sequence
  Description of Artificial Sequence: Synthetic epitope
MASSTGDRSQ

SEQ ID NO: 27940 - protein, 10 aa, Artificial Sequence
  Description of Artificial Sequence: Synthetic epitope
MASSVDEEAL

SEQ ID NO: 27941 - protein, 10 aa, Artificial Sequence
  Description of Artificial Sequence: Synthetic epitope
MASSVGNVAD

SEQ ID NO: 27942 - protein, 10 aa, Artificial Sequence
  Description of Artificial Sequence: Synthetic epitope
MASTEEQYDL

SEQ ID NO: 27943 - protein, 10 aa, Artificial Sequence
  Description of Artificial Sequence: Synthetic epitope
MASTEGANNM

SEQ ID NO: 27944 - protein, 10 aa, Artificial Sequence
  Description of Artificial Sequence: Synthetic epitope
MASTKLSPWD

SEQ ID NO: 27945 - protein, 10 aa, Artificial Sequence
  Description of Artificial Sequence: Synthetic epitope
MASTSTTIRS

SEQ ID NO: 27946 - protein, 10 aa, Artificial Sequence
  Description of Artificial Sequence: Synthetic epitope
MASTSTTIRS

SEQ ID NO: 27947 - protein, 10 aa, Artificial Sequence
  Description of Artificial Sequence: Synthetic epitope
MASTSTTIRS

SEQ ID NO: 27948 - protein, 10 aa, Artificial Sequence
  Description of Artificial Sequence: Synthetic epitope
MASTWAIQAH

SEQ ID NO: 27949 - protein, 10 aa, Artificial Sequence
  Description of Artificial Sequence: Synthetic epitope
MASVQASRRQ

SEQ ID NO: 27950 - protein, 10 aa, Artificial Sequence
  Description of Artificial Sequence: Synthetic epitope
MASVQQGEKQ

SEQ ID NO: 27951 - protein, 10 aa, Artificial Sequence
  Description of Artificial Sequence: Synthetic epitope
MASVSSATFS

SEQ ID NO: 27952 - protein, 10 aa, Artificial Sequence
  Description of Artificial Sequence: Synthetic epitope
MASVTLSEAE

SEQ ID NO: 27953 - protein, 10 aa, Artificial Sequence
  Description of Artificial Sequence: Synthetic epitope
MATAAQGPLS

SEQ ID NO: 27954 - protein, 10 aa, Artificial Sequence
  Description of Artificial Sequence: Synthetic epitope
MATAEASGSD

SEQ ID NO: 27955 - protein, 10 aa, Artificial Sequence
  Description of Artificial Sequence: Synthetic epitope
MATAETALPS

SEQ ID NO: 27956 - protein, 10 aa, Artificial Sequence
  Description of Artificial Sequence: Synthetic epitope
MATAPIRASA

SEQ ID NO: 27957 - protein, 10 aa, Artificial Sequence
  Description of Artificial Sequence: Synthetic epitope
MATAPYNYSY

SEQ ID NO: 27958 - protein, 10 aa, Artificial Sequence
  Description of Artificial Sequence: Synthetic epitope
MATAQPSQVR

SEQ ID NO: 27959 - protein, 10 aa, Artificial Sequence
  Description of Artificial Sequence: Synthetic epitope
MATDAALRRL

SEQ ID NO: 27960 - protein, 10 aa, Artificial Sequence
  Description of Artificial Sequence: Synthetic epitope
MATDMQRKRS

SEQ ID NO: 27961 - protein, 10 aa, Artificial Sequence
  Description of Artificial Sequence: Synthetic epitope
MATELEYESV

SEQ ID NO: 27962 - protein, 10 aa, Artificial Sequence
  Description of Artificial Sequence: Synthetic epitope
MATEQRPFHL

SEQ ID NO: 27963 - protein, 10 aa, Artificial Sequence
  Description of Artificial Sequence: Synthetic epitope
MATERSRSAM

SEQ ID NO: 27964 - protein, 10 aa, Artificial Sequence
  Description of Artificial Sequence: Synthetic epitope
MATFRNNHMK

SEQ ID NO: 27965 - protein, 10 aa, Artificial Sequence
  Description of Artificial Sequence: Synthetic epitope
MATFVSELEA

SEQ ID NO: 27966 - protein, 10 aa, Artificial Sequence
  Description of Artificial Sequence: Synthetic epitope
MATKRLARQL

SEQ ID NO: 27967 - protein, 10 aa, Artificial Sequence
  Description of Artificial Sequence: Synthetic epitope
MATKTELSPT

SEQ ID NO: 27968 - protein, 10 aa, Artificial Sequence
  Description of Artificial Sequence: Synthetic epitope
MATLARLQAR

SEQ ID NO: 27969 - protein, 10 aa, Artificial Sequence
  Description of Artificial Sequence: Synthetic epitope
MATLKAKNME

SEQ ID NO: 27970 - protein, 10 aa, Artificial Sequence
  Description of Artificial Sequence: Synthetic epitope
MATNYSANQY

SEQ ID NO: 27971 - protein, 10 aa, Artificial Sequence
  Description of Artificial Sequence: Synthetic epitope
MATPNNLTPT

SEQ ID NO: 27972 - protein, 10 aa, Artificial Sequence
  Description of Artificial Sequence: Synthetic epitope
MATQVMGQSS

SEQ ID NO: 27973 - protein, 10 aa, Artificial Sequence
  Description of Artificial Sequence: Synthetic epitope
MATRVLSMSA

SEQ ID NO: 27974 - protein, 10 aa, Artificial Sequence
  Description of Artificial Sequence: Synthetic epitope
MATSAVPSDN

SEQ ID NO: 27975 - protein, 10 aa, Artificial Sequence
  Description of Artificial Sequence: Synthetic epitope
MATSHRVAKL

SEQ ID NO: 27976 - protein, 10 aa, Artificial Sequence
  Description of Artificial Sequence: Synthetic epitope
MATSNHSSGA

SEQ ID NO: 27977 - protein, 10 aa, Artificial Sequence
  Description of Artificial Sequence: Synthetic epitope
MATSSEEVLL

SEQ ID NO: 27978 - protein, 10 aa, Artificial Sequence
  Description of Artificial Sequence: Synthetic epitope
MATSTSTEAK

SEQ ID NO: 27979 - protein, 10 aa, Artificial Sequence
  Description of Artificial Sequence: Synthetic epitope
MATTAQYLPR

SEQ ID NO: 27980 - protein, 10 aa, Artificial Sequence
  Description of Artificial Sequence: Synthetic epitope
MATVAELKAV

SEQ ID NO: 27981 - protein, 10 aa, Artificial Sequence
  Description of Artificial Sequence: Synthetic epitope
MAVAELYTQY

SEQ ID NO: 27982 - protein, 10 aa, Artificial Sequence
  Description of Artificial Sequence: Synthetic epitope
MAVASTSTSD

SEQ ID NO: 27983 - protein, 10 aa, Artificial Sequence
  Description of Artificial Sequence: Synthetic epitope
MAVDITLLFR

SEQ ID NO: 27984 - protein, 10 aa, Artificial Sequence
  Description of Artificial Sequence: Synthetic epitope
MAVEELQSII

SEQ ID NO: 27985 - protein, 10 aa, Artificial Sequence
  Description of Artificial Sequence: Synthetic epitope
MAVEGSTITS

SEQ ID NO: 27986 - protein, 10 aa, Artificial Sequence
  Description of Artificial Sequence: Synthetic epitope
MAVEIIEQLH

SEQ ID NO: 27987 - protein, 10 aa, Artificial Sequence
  Description of Artificial Sequence: Synthetic epitope
MAVETRAELV

SEQ ID NO: 27988 - protein, 10 aa, Artificial Sequence
  Description of Artificial Sequence: Synthetic epitope
MAVFIGSHKR

SEQ ID NO: 27989 - protein, 10 aa, Artificial Sequence
  Description of Artificial Sequence: Synthetic epitope
MAVFNQKSVS

SEQ ID NO: 27990 - protein, 10 aa, Artificial Sequence
  Description of Artificial Sequence: Synthetic epitope
MAVKVQTTKR

SEQ ID NO: 27991 - protein, 10 aa, Artificial Sequence
  Description of Artificial Sequence: Synthetic epitope
MAVLARQLQR

SEQ ID NO: 27992 - protein, 10 aa, Artificial Sequence
  Description of Artificial Sequence: Synthetic epitope
MAVLGKSEGA

SEQ ID NO: 27993 - protein, 10 aa, Artificial Sequence
  Description of Artificial Sequence: Synthetic epitope
MAVQISKKRK

SEQ ID NO: 27994 - protein, 10 aa, Artificial Sequence
  Description of Artificial Sequence: Synthetic epitope
MAVQVVQAVQ

SEQ ID NO: 27995 - protein, 10 aa, Artificial Sequence
  Description of Artificial Sequence: Synthetic epitope
MAVSAGSART

SEQ ID NO: 27996 - protein, 10 aa, Artificial Sequence
  Description of Artificial Sequence: Synthetic epitope
MAVSEAVRQL

SEQ ID NO: 27997 - protein, 10 aa, Artificial Sequence
  Description of Artificial Sequence: Synthetic epitope
MAVYVGMLRL

SEQ ID NO: 27998 - protein, 10 aa, Artificial Sequence
  Description of Artificial Sequence: Synthetic epitope
MAWAAKIDGT

SEQ ID NO: 27999 - protein, 10 aa, Artificial Sequence
  Description of Artificial Sequence: Synthetic epitope
MAWMTYISNW

SEQ ID NO: 28000 - protein, 10 aa, Artificial Sequence
  Description of Artificial Sequence: Synthetic epitope
MAWREKSKKR

SEQ ID NO: 28001 - protein, 10 aa, Artificial Sequence
  Description of Artificial Sequence: Synthetic epitope
MAWSNQSAVT

SEQ ID NO: 28002 - protein, 10 aa, Artificial Sequence
  Description of Artificial Sequence: Synthetic epitope
MAYGPAQHAI

SEQ ID NO: 28003 - protein, 10 aa, Artificial Sequence
  Description of Artificial Sequence: Synthetic epitope
MDADDSRAPK

SEQ ID NO: 28004 - protein, 10 aa, Artificial Sequence
  Description of Artificial Sequence: Synthetic epitope
MDALVRISTS

SEQ ID NO: 28005 - protein, 10 aa, Artificial Sequence
  Description of Artificial Sequence: Synthetic epitope
MDARRVPQKD

SEQ ID NO: 28006 - protein, 10 aa, Artificial Sequence
  Description of Artificial Sequence: Synthetic epitope
MDASLEKIAD

SEQ ID NO: 28007 - protein, 10 aa, Artificial Sequence
  Description of Artificial Sequence: Synthetic epitope
MDASLEKIAD

SEQ ID NO: 28008 - protein, 10 aa, Artificial Sequence
  Description of Artificial Sequence: Synthetic epitope
MDAVDATMEK

SEQ ID NO: 28009 - protein, 10 aa, Artificial Sequence
  Description of Artificial Sequence: Synthetic epitope
MDAVSQVPME

SEQ ID NO: 28010 - protein, 10 aa, Artificial Sequence
  Description of Artificial Sequence: Synthetic epitope
MDAVVALKGS

SEQ ID NO: 28011 - protein, 10 aa, Artificial Sequence
  Description of Artificial Sequence: Synthetic epitope
MDDPKSEQQR

SEQ ID NO: 28012 - protein, 10 aa, Artificial Sequence
  Description of Artificial Sequence: Synthetic epitope
MDDQSPAEKK

SEQ ID NO: 28013 - protein, 10 aa, Artificial Sequence
  Description of Artificial Sequence: Synthetic epitope
MDDSEVESTA

SEQ ID NO: 28014 - protein, 10 aa, Artificial Sequence
  Description of Artificial Sequence: Synthetic epitope
MDEDEFELQP

SEQ ID NO: 28015 - protein, 10 aa, Artificial Sequence
  Description of Artificial Sequence: Synthetic epitope
MDENESNQSL

SEQ ID NO: 28016 - protein, 10 aa, Artificial Sequence
  Description of Artificial Sequence: Synthetic epitope
MDESALTLGT

SEQ ID NO: 28017 - protein, 10 aa, Artificial Sequence
  Description of Artificial Sequence: Synthetic epitope
MDESKYTSAP

SEQ ID NO: 28018 - protein, 10 aa, Artificial Sequence
  Description of Artificial Sequence: Synthetic epitope
MDETEWIHRH

SEQ ID NO: 28019 - protein, 10 aa, Artificial Sequence
  Description of Artificial Sequence: Synthetic epitope
MDFKAIAQQT

SEQ ID NO: 28020 - protein, 10 aa, Artificial Sequence
  Description of Artificial Sequence: Synthetic epitope
MDFKINTDEI

SEQ ID NO: 28021 - protein, 10 aa, Artificial Sequence
  Description of Artificial Sequence: Synthetic epitope
MDFRQISPTT

SEQ ID NO: 28022 - protein, 10 aa, Artificial Sequence
  Description of Artificial Sequence: Synthetic epitope
MDFSIIQYSK

SEQ ID NO: 28023 - protein, 10 aa, Artificial Sequence
  Description of Artificial Sequence: Synthetic epitope
MDGASIVGPP

SEQ ID NO: 28024 - protein, 10 aa, Artificial Sequence
  Description of Artificial Sequence: Synthetic epitope
MDGTIKEALS

SEQ ID NO: 28025 - protein, 10 aa, Artificial Sequence
  Description of Artificial Sequence: Synthetic epitope
MDHEAAQLEK

SEQ ID NO: 28026 - protein, 10 aa, Artificial Sequence
  Description of Artificial Sequence: Synthetic epitope
MDHSKVETET

SEQ ID NO: 28027 - protein, 10 aa, Artificial Sequence
  Description of Artificial Sequence: Synthetic epitope
MDIKGQFWND

SEQ ID NO: 28028 - protein, 10 aa, Artificial Sequence
  Description of Artificial Sequence: Synthetic epitope
MDKESALDKS

SEQ ID NO: 28029 - protein, 10 aa, Artificial Sequence
  Description of Artificial Sequence: Synthetic epitope
MDKGLQSISE

SEQ ID NO: 28030 - protein, 10 aa, Artificial Sequence
  Description of Artificial Sequence: Synthetic epitope
MDKHGVKTPL

SEQ ID NO: 28031 - protein, 10 aa, Artificial Sequence
  Description of Artificial Sequence: Synthetic epitope
MDKIETINFH

SEQ ID NO: 28032 - protein, 10 aa, Artificial Sequence
  Description of Artificial Sequence: Synthetic epitope
MDKKSFEMVL

SEQ ID NO: 28033 - protein, 10 aa, Artificial Sequence
  Description of Artificial Sequence: Synthetic epitope
MDKKSTHRNP

SEQ ID NO: 28034 - protein, 10 aa, Artificial Sequence
  Description of Artificial Sequence: Synthetic epitope
MDKLEVVKKD

SEQ ID NO: 28035 - protein, 10 aa, Artificial Sequence
  Description of Artificial Sequence: Synthetic epitope
MDKLNKITVP

SEQ ID NO: 28036 - protein, 10 aa, Artificial Sequence
  Description of Artificial Sequence: Synthetic epitope
MDKVPNPKMA

SEQ ID NO: 28037 - protein, 10 aa, Artificial Sequence
  Description of Artificial Sequence: Synthetic epitope
MDKYETEESS

SEQ ID NO: 28038 - protein, 10 aa, Artificial Sequence
  Description of Artificial Sequence: Synthetic epitope
MDKYNFDTMI

SEQ ID NO: 28039 - protein, 10 aa, Artificial Sequence
  Description of Artificial Sequence: Synthetic epitope
MDLAALFSDT

SEQ ID NO: 28040 - protein, 10 aa, Artificial Sequence
  Description of Artificial Sequence: Synthetic epitope
MDLASRLVTR

SEQ ID NO: 28041 - protein, 10 aa, Artificial Sequence
  Description of Artificial Sequence: Synthetic epitope
MDLMNGQASS

SEQ ID NO: 28042 - protein, 10 aa, Artificial Sequence
  Description of Artificial Sequence: Synthetic epitope
MDLNSASTVV

SEQ ID NO: 28043 - protein, 10 aa, Artificial Sequence
  Description of Artificial Sequence: Synthetic epitope
MDLQQSTTIT

SEQ ID NO: 28044 - protein, 10 aa, Artificial Sequence
  Description of Artificial Sequence: Synthetic epitope
MDMMSLNSQL

SEQ ID NO: 28045 - protein, 10 aa, Artificial Sequence
  Description of Artificial Sequence: Synthetic epitope
MDMNSIKEPQ

SEQ ID NO: 28046 - protein, 10 aa, Artificial Sequence
  Description of Artificial Sequence: Synthetic epitope
MDNGDWGYMM

SEQ ID NO: 28047 - protein, 10 aa, Artificial Sequence
  Description of Artificial Sequence: Synthetic epitope
MDNLSSEEIQ

SEQ ID NO: 28048 - protein, 10 aa, Artificial Sequence
  Description of Artificial Sequence: Synthetic epitope
MDNMTSSAQI

SEQ ID NO: 28049 - protein, 10 aa, Artificial Sequence
  Description of Artificial Sequence: Synthetic epitope
MDNQAERESE

SEQ ID NO: 28050 - protein, 10 aa, Artificial Sequence
  Description of Artificial Sequence: Synthetic epitope
MDNSYAFNQR

SEQ ID NO: 28051 - protein, 10 aa, Artificial Sequence
  Description of Artificial Sequence: Synthetic epitope
MDPAKVKGDG

SEQ ID NO: 28052 - protein, 10 aa, Artificial Sequence
  Description of Artificial Sequence: Synthetic epitope
MDPALAAQMS

SEQ ID NO: 28053 - protein, 10 aa, Artificial Sequence
  Description of Artificial Sequence: Synthetic epitope
MDQKLSKLVE

SEQ ID NO: 28054 - protein, 10 aa, Artificial Sequence
  Description of Artificial Sequence: Synthetic epitope
MDQPAVATAS

SEQ ID NO: 28055 - protein, 10 aa, Artificial Sequence
  Description of Artificial Sequence: Synthetic epitope
MDQPSGRSFM

SEQ ID NO: 28056 - protein, 10 aa, Artificial Sequence
  Description of Artificial Sequence: Synthetic epitope
MDQSAKEPLI

SEQ ID NO: 28057 - protein, 10 aa, Artificial Sequence
  Description of Artificial Sequence: Synthetic epitope
MDQVATLRLE

SEQ ID NO: 28058 - protein, 10 aa, Artificial Sequence
  Description of Artificial Sequence: Synthetic epitope
MDRKKFHSSD

SEQ ID NO: 28059 - protein, 10 aa, Artificial Sequence
  Description of Artificial Sequence: Synthetic epitope
MDSAEKIMIY

SEQ ID NO: 28060 - protein, 10 aa, Artificial Sequence
  Description of Artificial Sequence: Synthetic epitope
MDSDSGEQSE

SEQ ID NO: 28061 - protein, 10 aa, Artificial Sequence
  Description of Artificial Sequence: Synthetic epitope
MDSEKSSEWR

SEQ ID NO: 28062 - protein, 10 aa, Artificial Sequence
  Description of Artificial Sequence: Synthetic epitope
MDSELAYDDK

SEQ ID NO: 28063 - protein, 10 aa, Artificial Sequence
  Description of Artificial Sequence: Synthetic epitope
MDSKDESSHV

SEQ ID NO: 28064 - protein, 10 aa, Artificial Sequence
  Description of Artificial Sequence: Synthetic epitope
MDSLATSINQ

SEQ ID NO: 28065 - protein, 10 aa, Artificial Sequence
  Description of Artificial Sequence: Synthetic epitope
MDSLVTANTK

SEQ ID NO: 28066 - protein, 10 aa, Artificial Sequence
  Description of Artificial Sequence: Synthetic epitope
MDSNHQSNYK

SEQ ID NO: 28067 - protein, 10 aa, Artificial Sequence
  Description of Artificial Sequence: Synthetic epitope
MDSQQLVSLV

SEQ ID NO: 28068 - protein, 10 aa, Artificial Sequence
  Description of Artificial Sequence: Synthetic epitope
MDSRAQLWGL

SEQ ID NO: 28069 - protein, 10 aa, Artificial Sequence
  Description of Artificial Sequence: Synthetic epitope
MDSRVSGTTS

SEQ ID NO: 28070 - protein, 10 aa, Artificial Sequence
  Description of Artificial Sequence: Synthetic epitope
MDSRVSSPEK

SEQ ID NO: 28071 - protein, 10 aa, Artificial Sequence
  Description of Artificial Sequence: Synthetic epitope
MDSSQQKTFR

SEQ ID NO: 28072 - protein, 10 aa, Artificial Sequence
  Description of Artificial Sequence: Synthetic epitope
MDSTEDAQEE

SEQ ID NO: 28073 - protein, 10 aa, Artificial Sequence
  Description of Artificial Sequence: Synthetic epitope
MDSTLTASEI

SEQ ID NO: 28074 - protein, 10 aa, Artificial Sequence
  Description of Artificial Sequence: Synthetic epitope
MDTAYPREDT

SEQ ID NO: 28075 - protein, 10 aa, Artificial Sequence
  Description of Artificial Sequence: Synthetic epitope
MDTHGSNEKF

SEQ ID NO: 28076 - protein, 10 aa, Artificial Sequence
  Description of Artificial Sequence: Synthetic epitope
MDTIQLPAKY

SEQ ID NO: 28077 - protein, 10 aa, Artificial Sequence
  Description of Artificial Sequence: Synthetic epitope
MDTKLEVAVL

SEQ ID NO: 28078 - protein, 10 aa, Artificial Sequence
  Description of Artificial Sequence: Synthetic epitope
MDTSRVQPIK

SEQ ID NO: 28079 - protein, 10 aa, Artificial Sequence
  Description of Artificial Sequence: Synthetic epitope
MDTSYAIAMH

SEQ ID NO: 28080 - protein, 10 aa, Artificial Sequence
  Description of Artificial Sequence: Synthetic epitope
MDVHTRWKAR

SEQ ID NO: 28081 - protein, 10 aa, Artificial Sequence
  Description of Artificial Sequence: Synthetic epitope
MDVMSTATQH

SEQ ID NO: 28082 - protein, 10 aa, Artificial Sequence
  Description of Artificial Sequence: Synthetic epitope
MDVSKVKLKK

SEQ ID NO: 28083 - protein, 10 aa, Artificial Sequence
  Description of Artificial Sequence: Synthetic epitope
MDVVDSLLVN

SEQ ID NO: 28084 - protein, 10 aa, Artificial Sequence
  Description of Artificial Sequence: Synthetic epitope
MDWSDKMEAY

SEQ ID NO: 28085 - protein, 10 aa, Artificial Sequence
  Description of Artificial Sequence: Synthetic epitope
MDYGDMAVDV

SEQ ID NO: 28086 - protein, 10 aa, Artificial Sequence
  Description of Artificial Sequence: Synthetic epitope
MDYKSSLIQD

SEQ ID NO: 28087 - protein, 10 aa, Artificial Sequence
  Description of Artificial Sequence: Synthetic epitope
MEAADASRSN

SEQ ID NO: 28088 - protein, 10 aa, Artificial Sequence
  Description of Artificial Sequence: Synthetic epitope
MEAAETEAEA

SEQ ID NO: 28089 - protein, 10 aa, Artificial Sequence
  Description of Artificial Sequence: Synthetic epitope
MEAAHAKTTE

SEQ ID NO: 28090 - protein, 10 aa, Artificial Sequence
  Description of Artificial Sequence: Synthetic epitope
MEAANESSEG

SEQ ID NO: 28091 - protein, 10 aa, Artificial Sequence
  Description of Artificial Sequence: Synthetic epitope
MEAAPRTLAA

SEQ ID NO: 28092 - protein, 10 aa, Artificial Sequence
  Description of Artificial Sequence: Synthetic epitope
MEAAVKEEIS

SEQ ID NO: 28093 - protein, 10 aa, Artificial Sequence
  Description of Artificial Sequence: Synthetic epitope
MEADASVDMF

SEQ ID NO: 28094 - protein, 10 aa, Artificial Sequence
  Description of Artificial Sequence: Synthetic epitope
MEAEAVLQDE

SEQ ID NO: 28095 - protein, 10 aa, Artificial Sequence
  Description of Artificial Sequence: Synthetic epitope
MEAENMALKR

SEQ ID NO: 28096 - protein, 10 aa, Artificial Sequence
  Description of Artificial Sequence: Synthetic epitope
MEAETGSSVE

SEQ ID NO: 28097 - protein, 10 aa, Artificial Sequence
  Description of Artificial Sequence: Synthetic epitope
MEAGTLAKLN

SEQ ID NO: 28098 - protein, 10 aa, Artificial Sequence
  Description of Artificial Sequence: Synthetic epitope
MEAKTLGTVT

SEQ ID NO: 28099 - protein, 10 aa, Artificial Sequence
  Description of Artificial Sequence: Synthetic epitope
MEALDQLKSK

SEQ ID NO: 28100 - protein, 10 aa, Artificial Sequence
  Description of Artificial Sequence: Synthetic epitope
MEALLSTPIN

SEQ ID NO: 28101 - protein, 10 aa, Artificial Sequence
  Description of Artificial Sequence: Synthetic epitope
MEALQAMKAV

SEQ ID NO: 28102 - protein, 10 aa, Artificial Sequence
  Description of Artificial Sequence: Synthetic epitope
MEALVYAVSQ

SEQ ID NO: 28103 - protein, 10 aa, Artificial Sequence
  Description of Artificial Sequence: Synthetic epitope
MEAPAQKAGQ

SEQ ID NO: 28104 - protein, 10 aa, Artificial Sequence
  Description of Artificial Sequence: Synthetic epitope
MEAPPVTMMP

SEQ ID NO: 28105 - protein, 10 aa, Artificial Sequence
  Description of Artificial Sequence: Synthetic epitope
MEARRSKSYD

SEQ ID NO: 28106 - protein, 10 aa, Artificial Sequence
  Description of Artificial Sequence: Synthetic epitope
MEARSRSAEE

SEQ ID NO: 28107 - protein, 10 aa, Artificial Sequence
  Description of Artificial Sequence: Synthetic epitope
MEASLTRRLL

SEQ ID NO: 28108 - protein, 10 aa, Artificial Sequence
  Description of Artificial Sequence: Synthetic epitope
MEASTMPISA

SEQ ID NO: 28109 - protein, 10 aa, Artificial Sequence
  Description of Artificial Sequence: Synthetic epitope
MEASVILPIL

SEQ ID NO: 28110 - protein, 10 aa, Artificial Sequence
  Description of Artificial Sequence: Synthetic epitope
MEAWESSQPL

SEQ ID NO: 28111 - protein, 10 aa, Artificial Sequence
  Description of Artificial Sequence: Synthetic epitope
MEDEEAMAEV

SEQ ID NO: 28112 - protein, 10 aa, Artificial Sequence
  Description of Artificial Sequence: Synthetic epitope
MEDEERQKKL

SEQ ID NO: 28113 - protein, 10 aa, Artificial Sequence
  Description of Artificial Sequence: Synthetic epitope
MEDEEVAESW

SEQ ID NO: 28114 - protein, 10 aa, Artificial Sequence
  Description of Artificial Sequence: Synthetic epitope
MEDGPIVKLA

SEQ ID NO: 28115 - protein, 10 aa, Artificial Sequence
  Description of Artificial Sequence: Synthetic epitope
MEDPEKKLNQ

SEQ ID NO: 28116 - protein, 10 aa, Artificial Sequence
  Description of Artificial Sequence: Synthetic epitope
MEDPQSKEPA

SEQ ID NO: 28117 - protein, 10 aa, Artificial Sequence
  Description of Artificial Sequence: Synthetic epitope
MEDSASASLS

SEQ ID NO: 28118 - protein, 10 aa, Artificial Sequence
  Description of Artificial Sequence: Synthetic epitope
MEDVNSNVNA

SEQ ID NO: 28119 - protein, 10 aa, Artificial Sequence
  Description of Artificial Sequence: Synthetic epitope
MEEAKSQSLE

SEQ ID NO: 28120 - protein, 10 aa, Artificial Sequence
  Description of Artificial Sequence: Synthetic epitope
MEEATSGVNE

SEQ ID NO: 28121 - protein, 10 aa, Artificial Sequence
  Description of Artificial Sequence: Synthetic epitope
MEEKNKRKKA

SEQ ID NO: 28122 - protein, 10 aa, Artificial Sequence
  Description of Artificial Sequence: Synthetic epitope
MEEKTTQSVE

SEQ ID NO: 28123 - protein, 10 aa, Artificial Sequence
  Description of Artificial Sequence: Synthetic epitope
MEELSSVGEQ

SEQ ID NO: 28124 - protein, 10 aa, Artificial Sequence
  Description of Artificial Sequence: Synthetic epitope
MEEMSGESVV

SEQ ID NO: 28125 - protein, 10 aa, Artificial Sequence
  Description of Artificial Sequence: Synthetic epitope
MEENLISMRE

SEQ ID NO: 28126 - protein, 10 aa, Artificial Sequence
  Description of Artificial Sequence: Synthetic epitope
MEENSKKDHR

SEQ ID NO: 28127 - protein, 10 aa, Artificial Sequence
  Description of Artificial Sequence: Synthetic epitope
MEEPEMQLKG

SEQ ID NO: 28128 - protein, 10 aa, Artificial Sequence
  Description of Artificial Sequence: Synthetic epitope
MEEPSYTQDN

SEQ ID NO: 28129 - protein, 10 aa, Artificial Sequence
  Description of Artificial Sequence: Synthetic epitope
MEEPTVDHYQ

SEQ ID NO: 28130 - protein, 10 aa, Artificial Sequence
  Description of Artificial Sequence: Synthetic epitope
MEEQQPEPKS

SEQ ID NO: 28131 - protein, 10 aa, Artificial Sequence
  Description of Artificial Sequence: Synthetic epitope
MEERLRSARE

SEQ ID NO: 28132 - protein, 10 aa, Artificial Sequence
  Description of Artificial Sequence: Synthetic epitope
MEESAEYEAA

SEQ ID NO: 28133 - protein, 10 aa, Artificial Sequence
  Description of Artificial Sequence: Synthetic epitope
MEESGMAHES

SEQ ID NO: 28134 - protein, 10 aa, Artificial Sequence
  Description of Artificial Sequence: Synthetic epitope
MEESKTLKSE

SEQ ID NO: 28135 - protein, 10 aa, Artificial Sequence
  Description of Artificial Sequence: Synthetic epitope
MEFVENSRKA

SEQ ID NO: 28136 - protein, 10 aa, Artificial Sequence
  Description of Artificial Sequence: Synthetic epitope
MEFVFLAYPS

SEQ ID NO: 28137 - protein, 10 aa, Artificial Sequence
  Description of Artificial Sequence: Synthetic epitope
MEGDGVTQEL

SEQ ID NO: 28138 - protein, 10 aa, Artificial Sequence
  Description of Artificial Sequence: Synthetic epitope
MEGKYSVAEV

SEQ ID NO: 28139 - protein, 10 aa, Artificial Sequence
  Description of Artificial Sequence: Synthetic epitope
MEGSLEFKQH

SEQ ID NO: 28140 - protein, 10 aa, Artificial Sequence
  Description of Artificial Sequence: Synthetic epitope
MEGSSKTLQE

SEQ ID NO: 28141 - protein, 10 aa, Artificial Sequence
  Description of Artificial Sequence: Synthetic epitope
MEHAQMEGAQ

SEQ ID NO: 28142 - protein, 10 aa, Artificial Sequence
  Description of Artificial Sequence: Synthetic epitope
MEIASQRTKE

SEQ ID NO: 28143 - protein, 10 aa, Artificial Sequence
  Description of Artificial Sequence: Synthetic epitope
MEIDKKRSEI

SEQ ID NO: 28144 - protein, 10 aa, Artificial Sequence
  Description of Artificial Sequence: Synthetic epitope
MEIDQGEKNE

SEQ ID NO: 28145 - protein, 10 aa, Artificial Sequence
  Description of Artificial Sequence: Synthetic epitope
MEIFIEVFSH

SEQ ID NO: 28146 - protein, 10 aa, Artificial Sequence
  Description of Artificial Sequence: Synthetic epitope
MEIKDQGAQM

SEQ ID NO: 28147 - protein, 10 aa, Artificial Sequence
  Description of Artificial Sequence: Synthetic epitope
MEIKSRKKVE

SEQ ID NO: 28148 - protein, 10 aa, Artificial Sequence
  Description of Artificial Sequence: Synthetic epitope
MEILAKAKAD

SEQ ID NO: 28149 - protein, 10 aa, Artificial Sequence
  Description of Artificial Sequence: Synthetic epitope
MEIPPTNYPA

SEQ ID NO: 28150 - protein, 10 aa, Artificial Sequence
  Description of Artificial Sequence: Synthetic epitope
MEIQFNYESQ

SEQ ID NO: 28151 - protein, 10 aa, Artificial Sequence
  Description of Artificial Sequence: Synthetic epitope
MEKAANARNH

SEQ ID NO: 28152 - protein, 10 aa, Artificial Sequence
  Description of Artificial Sequence: Synthetic epitope
MEKATEVKGE

SEQ ID NO: 28153 - protein, 10 aa, Artificial Sequence
  Description of Artificial Sequence: Synthetic epitope
MEKELMMGVL

SEQ ID NO: 28154 - protein, 10 aa, Artificial Sequence
  Description of Artificial Sequence: Synthetic epitope
MEKELMMGVL

SEQ ID NO: 28155 - protein, 10 aa, Artificial Sequence
  Description of Artificial Sequence: Synthetic epitope
MEKELRSTIL

SEQ ID NO: 28156 - protein, 10 aa, Artificial Sequence
  Description of Artificial Sequence: Synthetic epitope
MEKKEVALQE

SEQ ID NO: 28157 - protein, 10 aa, Artificial Sequence
  Description of Artificial Sequence: Synthetic epitope
MEKKSVVASE

SEQ ID NO: 28158 - protein, 10 aa, Artificial Sequence
  Description of Artificial Sequence: Synthetic epitope
MEKLSAASGY

SEQ ID NO: 28159 - protein, 10 aa, Artificial Sequence
  Description of Artificial Sequence: Synthetic epitope
MEKQSSMDSE

SEQ ID NO: 28160 - protein, 10 aa, Artificial Sequence
  Description of Artificial Sequence: Synthetic epitope
MEKRETFVQA

SEQ ID NO: 28161 - protein, 10 aa, Artificial Sequence
  Description of Artificial Sequence: Synthetic epitope
MEKRGRGVKS

SEQ ID NO: 28162 - protein, 10 aa, Artificial Sequence
  Description of Artificial Sequence: Synthetic epitope
MEKSNEIVNI

SEQ ID NO: 28163 - protein, 10 aa, Artificial Sequence
  Description of Artificial Sequence: Synthetic epitope
MEKTKTKQGE

SEQ ID NO: 28164 - protein, 10 aa, Artificial Sequence
  Description of Artificial Sequence: Synthetic epitope
MEKVKLSAGE

SEQ ID NO: 28165 - protein, 10 aa, Artificial Sequence
  Description of Artificial Sequence: Synthetic epitope
MELAQEAREL

SEQ ID NO: 28166 - protein, 10 aa, Artificial Sequence
  Description of Artificial Sequence: Synthetic epitope
MELERIVSAA

SEQ ID NO: 28167 - protein, 10 aa, Artificial Sequence
  Description of Artificial Sequence: Synthetic epitope
MELETFFAKE

SEQ ID NO: 28168 - protein, 10 aa, Artificial Sequence
  Description of Artificial Sequence: Synthetic epitope
MELFQAKDHY

SEQ ID NO: 28169 - protein, 10 aa, Artificial Sequence
  Description of Artificial Sequence: Synthetic epitope
MELGEERVYQ

SEQ ID NO: 28170 - protein, 10 aa, Artificial Sequence
  Description of Artificial Sequence: Synthetic epitope
MELHETMASL

SEQ ID NO: 28171 - protein, 10 aa, Artificial Sequence
  Description of Artificial Sequence: Synthetic epitope
MELHYLAKKS

SEQ ID NO: 28172 - protein, 10 aa, Artificial Sequence
  Description of Artificial Sequence: Synthetic epitope
MELKQSLSTH

SEQ ID NO: 28173 - protein, 10 aa, Artificial Sequence
  Description of Artificial Sequence: Synthetic epitope
MELMNVLELR

SEQ ID NO: 28174 - protein, 10 aa, Artificial Sequence
  Description of Artificial Sequence: Synthetic epitope
MELMYTTGEE

SEQ ID NO: 28175 - protein, 10 aa, Artificial Sequence
  Description of Artificial Sequence: Synthetic epitope
MELQKKQLQQ

SEQ ID NO: 28176 - protein, 10 aa, Artificial Sequence
  Description of Artificial Sequence: Synthetic epitope
MELQKKSSEL

SEQ ID NO: 28177 - protein, 10 aa, Artificial Sequence
  Description of Artificial Sequence: Synthetic epitope
MELSLESLGG

SEQ ID NO: 28178 - protein, 10 aa, Artificial Sequence
  Description of Artificial Sequence: Synthetic epitope
MELVHKQSKA

SEQ ID NO: 28179 - protein, 10 aa, Artificial Sequence
  Description of Artificial Sequence: Synthetic epitope
MEMEQVFEMK

SEQ ID NO: 28180 - protein, 10 aa, Artificial Sequence
  Description of Artificial Sequence: Synthetic epitope
MEMGKWIHLE

SEQ ID NO: 28181 - protein, 10 aa, Artificial Sequence
  Description of Artificial Sequence: Synthetic epitope
MEMTKLFSYI

SEQ ID NO: 28182 - protein, 10 aa, Artificial Sequence
  Description of Artificial Sequence: Synthetic epitope
MENESATEGE

SEQ ID NO: 28183 - protein, 10 aa, Artificial Sequence
  Description of Artificial Sequence: Synthetic epitope
MENHKSNNKE

SEQ ID NO: 28184 - protein, 10 aa, Artificial Sequence
  Description of Artificial Sequence: Synthetic epitope
MENHVSQASV

SEQ ID NO: 28185 - protein, 10 aa, Artificial Sequence
  Description of Artificial Sequence: Synthetic epitope
MENISSIMPS

SEQ ID NO: 28186 - protein, 10 aa, Artificial Sequence
  Description of Artificial Sequence: Synthetic epitope
MENMFLQSSM

SEQ ID NO: 28187 - protein, 10 aa, Artificial Sequence
  Description of Artificial Sequence: Synthetic epitope
MENNIKLSEV

SEQ ID NO: 28188 - protein, 10 aa, Artificial Sequence
  Description of Artificial Sequence: Synthetic epitope
MENQHWNQLI

SEQ ID NO: 28189 - protein, 10 aa, Artificial Sequence
  Description of Artificial Sequence: Synthetic epitope
MENQNSENTA

SEQ ID NO: 28190 - protein, 10 aa, Artificial Sequence
  Description of Artificial Sequence: Synthetic epitope
MENQRSSPLS

SEQ ID NO: 28191 - protein, 10 aa, Artificial Sequence
  Description of Artificial Sequence: Synthetic epitope
MENVTVLGED

SEQ ID NO: 28192 - protein, 10 aa, Artificial Sequence
  Description of Artificial Sequence: Synthetic epitope
MEPAAGIQRR

SEQ ID NO: 28193 - protein, 10 aa, Artificial Sequence
  Description of Artificial Sequence: Synthetic epitope
MEPGSKSVSR

SEQ ID NO: 28194 - protein, 10 aa, Artificial Sequence
  Description of Artificial Sequence: Synthetic epitope
MEPHKKGDGN

SEQ ID NO: 28195 - protein, 10 aa, Artificial Sequence
  Description of Artificial Sequence: Synthetic epitope
MEPKEATGKE

SEQ ID NO: 28196 - protein, 10 aa, Artificial Sequence
  Description of Artificial Sequence: Synthetic epitope
MEPLKVEKFA

SEQ ID NO: 28197 - protein, 10 aa, Artificial Sequence
  Description of Artificial Sequence: Synthetic epitope
MEPPLSKRNP

SEQ ID NO: 28198 - protein, 10 aa, Artificial Sequence
  Description of Artificial Sequence: Synthetic epitope
MEPRAVGVSK

SEQ ID NO: 28199 - protein, 10 aa, Artificial Sequence
  Description of Artificial Sequence: Synthetic epitope
MEPVDAALLS

SEQ ID NO: 28200 - protein, 10 aa, Artificial Sequence
  Description of Artificial Sequence: Synthetic epitope
MEQDRTNHVE

SEQ ID NO: 28201 - protein, 10 aa, Artificial Sequence
  Description of Artificial Sequence: Synthetic epitope
MEQDTAAVAA

SEQ ID NO: 28202 - protein, 10 aa, Artificial Sequence
  Description of Artificial Sequence: Synthetic epitope
MEQFPKETVV

SEQ ID NO: 28203 - protein, 10 aa, Artificial Sequence
  Description of Artificial Sequence: Synthetic epitope
MEQHRALIEK

SEQ ID NO: 28204 - protein, 10 aa, Artificial Sequence
  Description of Artificial Sequence: Synthetic epitope
MEQIEQRKEK

SEQ ID NO: 28205 - protein, 10 aa, Artificial Sequence
  Description of Artificial Sequence: Synthetic epitope
MEQLSSANTR

SEQ ID NO: 28206 - protein, 10 aa, Artificial Sequence
  Description of Artificial Sequence: Synthetic epitope
MEQNEQKEQK

SEQ ID NO: 28207 - protein, 10 aa, Artificial Sequence
  Description of Artificial Sequence: Synthetic epitope
MEQNRSLEKE

SEQ ID NO: 28208 - protein, 10 aa, Artificial Sequence
  Description of Artificial Sequence: Synthetic epitope
MEQQEMAQQE

SEQ ID NO: 28209 - protein, 10 aa, Artificial Sequence
  Description of Artificial Sequence: Synthetic epitope
MEQSNDSLRV

SEQ ID NO: 28210 - protein, 10 aa, Artificial Sequence
  Description of Artificial Sequence: Synthetic epitope
MEQSQLLSES

SEQ ID NO: 28211 - protein, 10 aa, Artificial Sequence
  Description of Artificial Sequence: Synthetic epitope
MEQSRSQQRG

SEQ ID NO: 28212 - protein, 10 aa, Artificial Sequence
  Description of Artificial Sequence: Synthetic epitope
MEQTEKSKVY

SEQ ID NO: 28213 - protein, 10 aa, Artificial Sequence
  Description of Artificial Sequence: Synthetic epitope
MEQVSSRPTS

SEQ ID NO: 28214 - protein, 10 aa, Artificial Sequence
  Description of Artificial Sequence: Synthetic epitope
MERHGRASAT

SEQ ID NO: 28215 - protein, 10 aa, Artificial Sequence
  Description of Artificial Sequence: Synthetic epitope
MERKINRREK

SEQ ID NO: 28216 - protein, 10 aa, Artificial Sequence
  Description of Artificial Sequence: Synthetic epitope
MERSHQRQKE

SEQ ID NO: 28217 - protein, 10 aa, Artificial Sequence
  Description of Artificial Sequence: Synthetic epitope
MERVKMINVQ

SEQ ID NO: 28218 - protein, 10 aa, Artificial Sequence
  Description of Artificial Sequence: Synthetic epitope
MESDRVTEIV

SEQ ID NO: 28219 - protein, 10 aa, Artificial Sequence
  Description of Artificial Sequence: Synthetic epitope
MESEDTKKTQ

SEQ ID NO: 28220 - protein, 10 aa, Artificial Sequence
  Description of Artificial Sequence: Synthetic epitope
MESGAVLLES

SEQ ID NO: 28221 - protein, 10 aa, Artificial Sequence
  Description of Artificial Sequence: Synthetic epitope
MESGFTSKDT

SEQ ID NO: 28222 - protein, 10 aa, Artificial Sequence
  Description of Artificial Sequence: Synthetic epitope
MESGIEPSVD

SEQ ID NO: 28223 - protein, 10 aa, Artificial Sequence
  Description of Artificial Sequence: Synthetic epitope
MESGSTAASE

SEQ ID NO: 28224 - protein, 10 aa, Artificial Sequence
  Description of Artificial Sequence: Synthetic epitope
MESHSRAGKS

SEQ ID NO: 28225 - protein, 10 aa, Artificial Sequence
  Description of Artificial Sequence: Synthetic epitope
MESLAAVKAA

SEQ ID NO: 28226 - protein, 10 aa, Artificial Sequence
  Description of Artificial Sequence: Synthetic epitope
MESLVFARRS

SEQ ID NO: 28227 - protein, 10 aa, Artificial Sequence
  Description of Artificial Sequence: Synthetic epitope
MESSDVELDL

SEQ ID NO: 28228 - protein, 10 aa, Artificial Sequence
  Description of Artificial Sequence: Synthetic epitope
MESTKSGQSK

SEQ ID NO: 28229 - protein, 10 aa, Artificial Sequence
  Description of Artificial Sequence: Synthetic epitope
MESTVSITRT

SEQ ID NO: 28230 - protein, 10 aa, Artificial Sequence
  Description of Artificial Sequence: Synthetic epitope
MESVDQKIEH

SEQ ID NO: 28231 - protein, 10 aa, Artificial Sequence
  Description of Artificial Sequence: Synthetic epitope
MESVNKNSAA

SEQ ID NO: 28232 - protein, 10 aa, Artificial Sequence
  Description of Artificial Sequence: Synthetic epitope
MESVRIEQML

SEQ ID NO: 28233 - protein, 10 aa, Artificial Sequence
  Description of Artificial Sequence: Synthetic epitope
METANYTKVT

SEQ ID NO: 28234 - protein, 10 aa, Artificial Sequence
  Description of Artificial Sequence: Synthetic epitope
METANYTKVT

SEQ ID NO: 28235 - protein, 10 aa, Artificial Sequence
  Description of Artificial Sequence: Synthetic epitope
METEELSSNQ

SEQ ID NO: 28236 - protein, 10 aa, Artificial Sequence
  Description of Artificial Sequence: Synthetic epitope
METESGNQEK

SEQ ID NO: 28237 - protein, 10 aa, Artificial Sequence
  Description of Artificial Sequence: Synthetic epitope
METKETVTSE

SEQ ID NO: 28238 - protein, 10 aa, Artificial Sequence
  Description of Artificial Sequence: Synthetic epitope
METLKDKTLQ

SEQ ID NO: 28239 - protein, 10 aa, Artificial Sequence
  Description of Artificial Sequence: Synthetic epitope
METLQSETKT

SEQ ID NO: 28240 - protein, 10 aa, Artificial Sequence
  Description of Artificial Sequence: Synthetic epitope
METLSNASGT

SEQ ID NO: 28241 - protein, 10 aa, Artificial Sequence
  Description of Artificial Sequence: Synthetic epitope
METPGASASS

SEQ ID NO: 28242 - protein, 10 aa, Artificial Sequence
  Description of Artificial Sequence: Synthetic epitope
METPNTTEDY

SEQ ID NO: 28243 - protein, 10 aa, Artificial Sequence
  Description of Artificial Sequence: Synthetic epitope
METQTSSTFN

SEQ ID NO: 28244 - protein, 10 aa, Artificial Sequence
  Description of Artificial Sequence: Synthetic epitope
METRESEDLE

SEQ ID NO: 28245 - protein, 10 aa, Artificial Sequence
  Description of Artificial Sequence: Synthetic epitope
METSAQSSGD

SEQ ID NO: 28246 - protein, 10 aa, Artificial Sequence
  Description of Artificial Sequence: Synthetic epitope
METSQALNDV

SEQ ID NO: 28247 - protein, 10 aa, Artificial Sequence
  Description of Artificial Sequence: Synthetic epitope
METSSMLSSL

SEQ ID NO: 28248 - protein, 10 aa, Artificial Sequence
  Description of Artificial Sequence: Synthetic epitope
METSSRELQA

SEQ ID NO: 28249 - protein, 10 aa, Artificial Sequence
  Description of Artificial Sequence: Synthetic epitope
METVELLQAK

SEQ ID NO: 28250 - protein, 10 aa, Artificial Sequence
  Description of Artificial Sequence: Synthetic epitope
MEVAEALEAG

SEQ ID NO: 28251 - protein, 10 aa, Artificial Sequence
  Description of Artificial Sequence: Synthetic epitope
MEVAMVSAES

SEQ ID NO: 28252 - protein, 10 aa, Artificial Sequence
  Description of Artificial Sequence: Synthetic epitope
MEVKDANSAL

SEQ ID NO: 28253 - protein, 10 aa, Artificial Sequence
  Description of Artificial Sequence: Synthetic epitope
MEVLAAETTS

SEQ ID NO: 28254 - protein, 10 aa, Artificial Sequence
  Description of Artificial Sequence: Synthetic epitope
MEVLSGVAKG

SEQ ID NO: 28255 - protein, 10 aa, Artificial Sequence
  Description of Artificial Sequence: Synthetic epitope
MEVMNLMEQP

SEQ ID NO: 28256 - protein, 10 aa, Artificial Sequence
  Description of Artificial Sequence: Synthetic epitope
MEVNSEFIVE

SEQ ID NO: 28257 - protein, 10 aa, Artificial Sequence
  Description of Artificial Sequence: Synthetic epitope
MEVTKTQLEQ

SEQ ID NO: 28258 - protein, 10 aa, Artificial Sequence
  Description of Artificial Sequence: Synthetic epitope
MEVVEKSEEP

SEQ ID NO: 28259 - protein, 10 aa, Artificial Sequence
  Description of Artificial Sequence: Synthetic epitope
MEVVNTEVKP

SEQ ID NO: 28260 - protein, 10 aa, Artificial Sequence
  Description of Artificial Sequence: Synthetic epitope
MEYESYYFVK

SEQ ID NO: 28261 - protein, 10 aa, Artificial Sequence
  Description of Artificial Sequence: Synthetic epitope
MEYLQSASRI

SEQ ID NO: 28262 - protein, 10 aa, Artificial Sequence
  Description of Artificial Sequence: Synthetic epitope
MEYLSLMHAI

SEQ ID NO: 28263 - protein, 10 aa, Artificial Sequence
  Description of Artificial Sequence: Synthetic epitope
MEYMAESTDR

SEQ ID NO: 28264 - protein, 10 aa, Artificial Sequence
  Description of Artificial Sequence: Synthetic epitope
MFAEIQIQDK

SEQ ID NO: 28265 - protein, 10 aa, Artificial Sequence
  Description of Artificial Sequence: Synthetic epitope
MFDERMAYYT

SEQ ID NO: 28266 - protein, 10 aa, Artificial Sequence
  Description of Artificial Sequence: Synthetic epitope
MFFRSEPKWE

SEQ ID NO: 28267 - protein, 10 aa, Artificial Sequence
  Description of Artificial Sequence: Synthetic epitope
MFHSSAMVNS

SEQ ID NO: 28268 - protein, 10 aa, Artificial Sequence
  Description of Artificial Sequence: Synthetic epitope
MFIFIKHGDN

SEQ ID NO: 28269 - protein, 10 aa, Artificial Sequence
  Description of Artificial Sequence: Synthetic epitope
MFKFETTMTS

SEQ ID NO: 28270 - protein, 10 aa, Artificial Sequence
  Description of Artificial Sequence: Synthetic epitope
MFKFHQMKHI

SEQ ID NO: 28271 - protein, 10 aa, Artificial Sequence
  Description of Artificial Sequence: Synthetic epitope
MFLMAFENKA

SEQ ID NO: 28272 - protein, 10 aa, Artificial Sequence
  Description of Artificial Sequence: Synthetic epitope
MFLQVDKSWK

SEQ ID NO: 28273 - protein, 10 aa, Artificial Sequence
  Description of Artificial Sequence: Synthetic epitope
MFLTALLWRG

SEQ ID NO: 28274 - protein, 10 aa, Artificial Sequence
  Description of Artificial Sequence: Synthetic epitope
MFLTRSEYDR

SEQ ID NO: 28275 - protein, 10 aa, Artificial Sequence
  Description of Artificial Sequence: Synthetic epitope
MFNWTTEEVE

SEQ ID NO: 28276 - protein, 10 aa, Artificial Sequence
  Description of Artificial Sequence: Synthetic epitope
MFPEQQKEEF

SEQ ID NO: 28277 - protein, 10 aa, Artificial Sequence
  Description of Artificial Sequence: Synthetic epitope
MFPRREFTKE

SEQ ID NO: 28278 - protein, 10 aa, Artificial Sequence
  Description of Artificial Sequence: Synthetic epitope
MFPTIKTPEA

SEQ ID NO: 28279 - protein, 10 aa, Artificial Sequence
  Description of Artificial Sequence: Synthetic epitope
MFQAAERPQE

SEQ ID NO: 28280 - protein, 10 aa, Artificial Sequence
  Description of Artificial Sequence: Synthetic epitope
MFQKWIKAGD

SEQ ID NO: 28281 - protein, 10 aa, Artificial Sequence
  Description of Artificial Sequence: Synthetic epitope
MFQSAGIRMI

SEQ ID NO: 28282 - protein, 10 aa, Artificial Sequence
  Description of Artificial Sequence: Synthetic epitope
MFQTKFKAHF

SEQ ID NO: 28283 - protein, 10 aa, Artificial Sequence
  Description of Artificial Sequence: Synthetic epitope
MFSTNYSHME

SEQ ID NO: 28284 - protein, 10 aa, Artificial Sequence
  Description of Artificial Sequence: Synthetic epitope
MFSVESLERA

SEQ ID NO: 28285 - protein, 10 aa, Artificial Sequence
  Description of Artificial Sequence: Synthetic epitope
MFTEKTLQSI

SEQ ID NO: 28286 - protein, 10 aa, Artificial Sequence
  Description of Artificial Sequence: Synthetic epitope
MFTLAEVASL

SEQ ID NO: 28287 - protein, 10 aa, Artificial Sequence
  Description of Artificial Sequence: Synthetic epitope
MFTLSQTSRA

SEQ ID NO: 28288 - protein, 10 aa, Artificial Sequence
  Description of Artificial Sequence: Synthetic epitope
MFVKSETLEL

SEQ ID NO: 28289 - protein, 10 aa, Artificial Sequence
  Description of Artificial Sequence: Synthetic epitope
MGASSQPSEA

SEQ ID NO: 28290 - protein, 10 aa, Artificial Sequence
  Description of Artificial Sequence: Synthetic epitope
MGASVEALTT

SEQ ID NO: 28291 - protein, 10 aa, Artificial Sequence
  Description of Artificial Sequence: Synthetic epitope
MGDIKTSVDS

SEQ ID NO: 28292 - protein, 10 aa, Artificial Sequence
  Description of Artificial Sequence: Synthetic epitope
MGDQEYQSRS

SEQ ID NO: 28293 - protein, 10 aa, Artificial Sequence
  Description of Artificial Sequence: Synthetic epitope
MGDVNQSVAS

SEQ ID NO: 28294 - protein, 10 aa, Artificial Sequence
  Description of Artificial Sequence: Synthetic epitope
MGEKNGDAKT

SEQ ID NO: 28295 - protein, 10 aa, Artificial Sequence
  Description of Artificial Sequence: Synthetic epitope
MGENTMKTEP

SEQ ID NO: 28296 - protein, 10 aa, Artificial Sequence
  Description of Artificial Sequence: Synthetic epitope
MGFIQAMSAL

SEQ ID NO: 28297 - protein, 10 aa, Artificial Sequence
  Description of Artificial Sequence: Synthetic epitope
MGFSKSVNEA

SEQ ID NO: 28298 - protein, 10 aa, Artificial Sequence
  Description of Artificial Sequence: Synthetic epitope
MGGKQSTAAR

SEQ ID NO: 28299 - protein, 10 aa, Artificial Sequence
  Description of Artificial Sequence: Synthetic epitope
MGGQSSAAQA

SEQ ID NO: 28300 - protein, 10 aa, Artificial Sequence
  Description of Artificial Sequence: Synthetic epitope
MGGSASSQLD

SEQ ID NO: 28301 - protein, 10 aa, Artificial Sequence
  Description of Artificial Sequence: Synthetic epitope
MGILEKISEI

SEQ ID NO: 28302 - protein, 10 aa, Artificial Sequence
  Description of Artificial Sequence: Synthetic epitope
MGKAKVPASK

SEQ ID NO: 28303 - protein, 10 aa, Artificial Sequence
  Description of Artificial Sequence: Synthetic epitope
MGKKSRVKTQ

SEQ ID NO: 28304 - protein, 10 aa, Artificial Sequence
  Description of Artificial Sequence: Synthetic epitope
MGKKYKNIVL

SEQ ID NO: 28305 - protein, 10 aa, Artificial Sequence
  Description of Artificial Sequence: Synthetic epitope
MGKLIRMGPQ

SEQ ID NO: 28306 - protein, 10 aa, Artificial Sequence
  Description of Artificial Sequence: Synthetic epitope
MGKSASKQFH

SEQ ID NO: 28307 - protein, 10 aa, Artificial Sequence
  Description of Artificial Sequence: Synthetic epitope
MGKTANSPGS

SEQ ID NO: 28308 - protein, 10 aa, Artificial Sequence
  Description of Artificial Sequence: Synthetic epitope
MGKVLSKIFG

SEQ ID NO: 28309 - protein, 10 aa, Artificial Sequence
  Description of Artificial Sequence: Synthetic epitope
MGLARALRRL

SEQ ID NO: 28310 - protein, 10 aa, Artificial Sequence
  Description of Artificial Sequence: Synthetic epitope
MGLKSFIQAS

SEQ ID NO: 28311 - protein, 10 aa, Artificial Sequence
  Description of Artificial Sequence: Synthetic epitope
MGLLSILRKL

SEQ ID NO: 28312 - protein, 10 aa, Artificial Sequence
  Description of Artificial Sequence: Synthetic epitope
MGLLTILKKM

SEQ ID NO: 28313 - protein, 10 aa, Artificial Sequence
  Description of Artificial Sequence: Synthetic epitope
MGLRTAKKRG

SEQ ID NO: 28314 - protein, 10 aa, Artificial Sequence
  Description of Artificial Sequence: Synthetic epitope
MGLVSSKKPD

SEQ ID NO: 28315 - protein, 10 aa, Artificial Sequence
  Description of Artificial Sequence: Synthetic epitope
MGMDWKGSQE

SEQ ID NO: 28316 - protein, 10 aa, Artificial Sequence
  Description of Artificial Sequence: Synthetic epitope
MGMQSFSLMK

SEQ ID NO: 28317 - protein, 10 aa, Artificial Sequence
  Description of Artificial Sequence: Synthetic epitope
MGMRQTSMDY

SEQ ID NO: 28318 - protein, 10 aa, Artificial Sequence
  Description of Artificial Sequence: Synthetic epitope
MGNAAGSAEQ

SEQ ID NO: 28319 - protein, 10 aa, Artificial Sequence
  Description of Artificial Sequence: Synthetic epitope
MGNASNDSQS

SEQ ID NO: 28320 - protein, 10 aa, Artificial Sequence
  Description of Artificial Sequence: Synthetic epitope
MGNENSTSDN

SEQ ID NO: 28321 - protein, 10 aa, Artificial Sequence
  Description of Artificial Sequence: Synthetic epitope
MGNLSLKQSE

SEQ ID NO: 28322 - protein, 10 aa, Artificial Sequence
  Description of Artificial Sequence: Synthetic epitope
MGNLSTDSAA

SEQ ID NO: 28323 - protein, 10 aa, Artificial Sequence
  Description of Artificial Sequence: Synthetic epitope
MGNSASRSDF

SEQ ID NO: 28324 - protein, 10 aa, Artificial Sequence
  Description of Artificial Sequence: Synthetic epitope
MGNSKSGALS

SEQ ID NO: 28325 - protein, 10 aa, Artificial Sequence
  Description of Artificial Sequence: Synthetic epitope
MGNTSSERAA

SEQ ID NO: 28326 - protein, 10 aa, Artificial Sequence
  Description of Artificial Sequence: Synthetic epitope
MGNYKSRPTQ

SEQ ID NO: 28327 - protein, 10 aa, Artificial Sequence
  Description of Artificial Sequence: Synthetic epitope
MGPRASLSRL

SEQ ID NO: 28328 - protein, 10 aa, Artificial Sequence
  Description of Artificial Sequence: Synthetic epitope
MGPRKKSVKT

SEQ ID NO: 28329 - protein, 10 aa, Artificial Sequence
  Description of Artificial Sequence: Synthetic epitope
MGQDQTKQQI

SEQ ID NO: 28330 - protein, 10 aa, Artificial Sequence
  Description of Artificial Sequence: Synthetic epitope
MGQKNEKNGI

SEQ ID NO: 28331 - protein, 10 aa, Artificial Sequence
  Description of Artificial Sequence: Synthetic epitope
MGQKQAQQVM

SEQ ID NO: 28332 - protein, 10 aa, Artificial Sequence
  Description of Artificial Sequence: Synthetic epitope
MGQQISDQTQ

SEQ ID NO: 28333 - protein, 10 aa, Artificial Sequence
  Description of Artificial Sequence: Synthetic epitope
MGRAVKVLQL

SEQ ID NO: 28334 - protein, 10 aa, Artificial Sequence
  Description of Artificial Sequence: Synthetic epitope
MGREMKKTGT

SEQ ID NO: 28335 - protein, 10 aa, Artificial Sequence
  Description of Artificial Sequence: Synthetic epitope
MGRFRTLSQS

SEQ ID NO: 28336 - protein, 10 aa, Artificial Sequence
  Description of Artificial Sequence: Synthetic epitope
MGRGSQEQME

SEQ ID NO: 28337 - protein, 10 aa, Artificial Sequence
  Description of Artificial Sequence: Synthetic epitope
MGRKSSKAKE

SEQ ID NO: 28338 - protein, 10 aa, Artificial Sequence
  Description of Artificial Sequence: Synthetic epitope
MGSAVMDTKK

SEQ ID NO: 28339 - protein, 10 aa, Artificial Sequence
  Description of Artificial Sequence: Synthetic epitope
MGSEAAQLLE

SEQ ID NO: 28340 - protein, 10 aa, Artificial Sequence
  Description of Artificial Sequence: Synthetic epitope
MGSEQSSEAE

SEQ ID NO: 28341 - protein, 10 aa, Artificial Sequence
  Description of Artificial Sequence: Synthetic epitope
MGSGAKMKTS

SEQ ID NO: 28342 - protein, 10 aa, Artificial Sequence
  Description of Artificial Sequence: Synthetic epitope
MGSIEQTTEI

SEQ ID NO: 28343 - protein, 10 aa, Artificial Sequence
  Description of Artificial Sequence: Synthetic epitope
MGSSEVSIIP

SEQ ID NO: 28344 - protein, 10 aa, Artificial Sequence
  Description of Artificial Sequence: Synthetic epitope
MGSSKKVTLS

SEQ ID NO: 28345 - protein, 10 aa, Artificial Sequence
  Description of Artificial Sequence: Synthetic epitope
MGSSMSAATA

SEQ ID NO: 28346 - protein, 10 aa, Artificial Sequence
  Description of Artificial Sequence: Synthetic epitope
MGSTHIYDMS

SEQ ID NO: 28347 - protein, 10 aa, Artificial Sequence
  Description of Artificial Sequence: Synthetic epitope
MGSTQQAQNT

SEQ ID NO: 28348 - protein, 10 aa, Artificial Sequence
  Description of Artificial Sequence: Synthetic epitope
MGSVFGRSTA

SEQ ID NO: 28349 - protein, 10 aa, Artificial Sequence
  Description of Artificial Sequence: Synthetic epitope
MGTALDIKIK

SEQ ID NO: 28350 - protein, 10 aa, Artificial Sequence
  Description of Artificial Sequence: Synthetic epitope
MGTDSRAAKA

SEQ ID NO: 28351 - protein, 10 aa, Artificial Sequence
  Description of Artificial Sequence: Synthetic epitope
MGTFDLWTDY

SEQ ID NO: 28352 - protein, 10 aa, Artificial Sequence
  Description of Artificial Sequence: Synthetic epitope
MGTRQTKGSL

SEQ ID NO: 28353 - protein, 10 aa, Artificial Sequence
  Description of Artificial Sequence: Synthetic epitope
MGTSNQAADD

SEQ ID NO: 28354 - protein, 10 aa, Artificial Sequence
  Description of Artificial Sequence: Synthetic epitope
MGTTASTAQQ

SEQ ID NO: 28355 - protein, 10 aa, Artificial Sequence
  Description of Artificial Sequence: Synthetic epitope
MGVQMETFML

SEQ ID NO: 28356 - protein, 10 aa, Artificial Sequence
  Description of Artificial Sequence: Synthetic epitope
MGWEGPNSRV

SEQ ID NO: 28357 - protein, 10 aa, Artificial Sequence
  Description of Artificial Sequence: Synthetic epitope
MHAPPINMES

SEQ ID NO: 28358 - protein, 10 aa, Artificial Sequence
  Description of Artificial Sequence: Synthetic epitope
MHEEKQESAI

SEQ ID NO: 28359 - protein, 10 aa, Artificial Sequence
  Description of Artificial Sequence: Synthetic epitope
MHFGEVAKQE

SEQ ID NO: 28360 - protein, 10 aa, Artificial Sequence
  Description of Artificial Sequence: Synthetic epitope
MHHVSFSLVT

SEQ ID NO: 28361 - protein, 10 aa, Artificial Sequence
  Description of Artificial Sequence: Synthetic epitope
MHKAGSLAGR

SEQ ID NO: 28362 - protein, 10 aa, Artificial Sequence
  Description of Artificial Sequence: Synthetic epitope
MHKYHFVAKA

SEQ ID NO: 28363 - protein, 10 aa, Artificial Sequence
  Description of Artificial Sequence: Synthetic epitope
MHKYKISEAK

SEQ ID NO: 28364 - protein, 10 aa, Artificial Sequence
  Description of Artificial Sequence: Synthetic epitope
MHLRRVRTMP

SEQ ID NO: 28365 - protein, 10 aa, Artificial Sequence
  Description of Artificial Sequence: Synthetic epitope
MHMSQRNAVD

SEQ ID NO: 28366 - protein, 10 aa, Artificial Sequence
  Description of Artificial Sequence: Synthetic epitope
MHPINVRRDP

SEQ ID NO: 28367 - protein, 10 aa, Artificial Sequence
  Description of Artificial Sequence: Synthetic epitope
MHQVQSPMLG

SEQ ID NO: 28368 - protein, 10 aa, Artificial Sequence
  Description of Artificial Sequence: Synthetic epitope
MHRLMGVNST

SEQ ID NO: 28369 - protein, 10 aa, Artificial Sequence
  Description of Artificial Sequence: Synthetic epitope
MHSEAEESKE

SEQ ID NO: 28370 - protein, 10 aa, Artificial Sequence
  Description of Artificial Sequence: Synthetic epitope
MHTGQVRWLN

SEQ ID NO: 28371 - protein, 10 aa, Artificial Sequence
  Description of Artificial Sequence: Synthetic epitope
MHTTESKNEH

SEQ ID NO: 28372 - protein, 10 aa, Artificial Sequence
  Description of Artificial Sequence: Synthetic epitope
MHTVGESRYN

SEQ ID NO: 28373 - protein, 10 aa, Artificial Sequence
  Description of Artificial Sequence: Synthetic epitope
MHWQNDSVQI

SEQ ID NO: 28374 - protein, 10 aa, Artificial Sequence
  Description of Artificial Sequence: Synthetic epitope
MIAGQVSKPL

SEQ ID NO: 28375 - protein, 10 aa, Artificial Sequence
  Description of Artificial Sequence: Synthetic epitope
MIAHKQKKTK

SEQ ID NO: 28376 - protein, 10 aa, Artificial Sequence
  Description of Artificial Sequence: Synthetic epitope
MIAMMAGSDF

SEQ ID NO: 28377 - protein, 10 aa, Artificial Sequence
  Description of Artificial Sequence: Synthetic epitope
MIEDLELSNK

SEQ ID NO: 28378 - protein, 10 aa, Artificial Sequence
  Description of Artificial Sequence: Synthetic epitope
MIEMAAEKEP

SEQ ID NO: 28379 - protein, 10 aa, Artificial Sequence
  Description of Artificial Sequence: Synthetic epitope
MIEPSEDSFE

SEQ ID NO: 28380 - protein, 10 aa, Artificial Sequence
  Description of Artificial Sequence: Synthetic epitope
MIEVVTSEMK

SEQ ID NO: 28381 - protein, 10 aa, Artificial Sequence
  Description of Artificial Sequence: Synthetic epitope
MIGLYEPELG

SEQ ID NO: 28382 - protein, 10 aa, Artificial Sequence
  Description of Artificial Sequence: Synthetic epitope
MIIESMLTSS

SEQ ID NO: 28383 - protein, 10 aa, Artificial Sequence
  Description of Artificial Sequence: Synthetic epitope
MIKFQERVTF

SEQ ID NO: 28384 - protein, 10 aa, Artificial Sequence
  Description of Artificial Sequence: Synthetic epitope
MIKVRVGQET

SEQ ID NO: 28385 - protein, 10 aa, Artificial Sequence
  Description of Artificial Sequence: Synthetic epitope
MILESKTEKK

SEQ ID NO: 28386 - protein, 10 aa, Artificial Sequence
  Description of Artificial Sequence: Synthetic epitope
MILSSYNTIQ

SEQ ID NO: 28387 - protein, 10 aa, Artificial Sequence
  Description of Artificial Sequence: Synthetic epitope
MIMELTMNKK

SEQ ID NO: 28388 - protein, 10 aa, Artificial Sequence
  Description of Artificial Sequence: Synthetic epitope
MINKQNEQMH

SEQ ID NO: 28389 - protein, 10 aa, Artificial Sequence
  Description of Artificial Sequence: Synthetic epitope
MIPTMAEDKE

SEQ ID NO: 28390 - protein, 10 aa, Artificial Sequence
  Description of Artificial Sequence: Synthetic epitope
MIQDTKQVPH

SEQ ID NO: 28391 - protein, 10 aa, Artificial Sequence
  Description of Artificial Sequence: Synthetic epitope
MIQETVQQAS

SEQ ID NO: 28392 - protein, 10 aa, Artificial Sequence
  Description of Artificial Sequence: Synthetic epitope
MIQRRIMESV

SEQ ID NO: 28393 - protein, 10 aa, Artificial Sequence
  Description of Artificial Sequence: Synthetic epitope
MIQSSQPMSL

SEQ ID NO: 28394 - protein, 10 aa, Artificial Sequence
  Description of Artificial Sequence: Synthetic epitope
MISARSSEPF

SEQ ID NO: 28395 - protein, 10 aa, Artificial Sequence
  Description of Artificial Sequence: Synthetic epitope
MISNHQNSNR

SEQ ID NO: 28396 - protein, 10 aa, Artificial Sequence
  Description of Artificial Sequence: Synthetic epitope
MISTMTPMSA

SEQ ID NO: 28397 - protein, 10 aa, Artificial Sequence
  Description of Artificial Sequence: Synthetic epitope
MITANSKEQR

SEQ ID NO: 28398 - protein, 10 aa, Artificial Sequence
  Description of Artificial Sequence: Synthetic epitope
MITETAAEPT

SEQ ID NO: 28399 - protein, 10 aa, Artificial Sequence
  Description of Artificial Sequence: Synthetic epitope
MITSAAGIIS

SEQ ID NO: 28400 - protein, 10 aa, Artificial Sequence
  Description of Artificial Sequence: Synthetic epitope
MIYSISHYYN

SEQ ID NO: 28401 - protein, 10 aa, Artificial Sequence
  Description of Artificial Sequence: Synthetic epitope
MKAAELSIKF

SEQ ID NO: 28402 - protein, 10 aa, Artificial Sequence
  Description of Artificial Sequence: Synthetic epitope
MKAHPKEMVP

SEQ ID NO: 28403 - protein, 10 aa, Artificial Sequence
  Description of Artificial Sequence: Synthetic epitope
MKALMNEKAQ

SEQ ID NO: 28404 - protein, 10 aa, Artificial Sequence
  Description of Artificial Sequence: Synthetic epitope
MKALNKIKEE

SEQ ID NO: 28405 - protein, 10 aa, Artificial Sequence
  Description of Artificial Sequence: Synthetic epitope
MKAMQSLKSR

SEQ ID NO: 28406 - protein, 10 aa, Artificial Sequence
  Description of Artificial Sequence: Synthetic epitope
MKAQEAEHIT

SEQ ID NO: 28407 - protein, 10 aa, Artificial Sequence
  Description of Artificial Sequence: Synthetic epitope
MKAQEKAKKE

SEQ ID NO: 28408 - protein, 10 aa, Artificial Sequence
  Description of Artificial Sequence: Synthetic epitope
MKASQQAIER

SEQ ID NO: 28409 - protein, 10 aa, Artificial Sequence
  Description of Artificial Sequence: Synthetic epitope
MKAVRKVADS

SEQ ID NO: 28410 - protein, 10 aa, Artificial Sequence
  Description of Artificial Sequence: Synthetic epitope
MKDDSQELPK

SEQ ID NO: 28411 - protein, 10 aa, Artificial Sequence
  Description of Artificial Sequence: Synthetic epitope
MKDEQHQKSE

SEQ ID NO: 28412 - protein, 10 aa, Artificial Sequence
  Description of Artificial Sequence: Synthetic epitope
MKEATTNAPF

SEQ ID NO: 28413 - protein, 10 aa, Artificial Sequence
  Description of Artificial Sequence: Synthetic epitope
MKEESAAQLG

SEQ ID NO: 28414 - protein, 10 aa, Artificial Sequence
  Description of Artificial Sequence: Synthetic epitope
MKEETAEERL

SEQ ID NO: 28415 - protein, 10 aa, Artificial Sequence
  Description of Artificial Sequence: Synthetic epitope
MKEKLSKKRA

SEQ ID NO: 28416 - protein, 10 aa, Artificial Sequence
  Description of Artificial Sequence: Synthetic epitope
MKELQVLTKK

SEQ ID NO: 28417 - protein, 10 aa, Artificial Sequence
  Description of Artificial Sequence: Synthetic epitope
MKESAFQSEP

SEQ ID NO: 28418 - protein, 10 aa, Artificial Sequence
  Description of Artificial Sequence: Synthetic epitope
MKESSPLSSR

SEQ ID NO: 28419 - protein, 10 aa, Artificial Sequence
  Description of Artificial Sequence: Synthetic epitope
MKESVAPTEH

SEQ ID NO: 28420 - protein, 10 aa, Artificial Sequence
  Description of Artificial Sequence: Synthetic epitope
MKEVKSTEKE

SEQ ID NO: 28421 - protein, 10 aa, Artificial Sequence
  Description of Artificial Sequence: Synthetic epitope
MKEVQEITHN

SEQ ID NO: 28422 - protein, 10 aa, Artificial Sequence
  Description of Artificial Sequence: Synthetic epitope
MKGASEEKLA

SEQ ID NO: 28423 - protein, 10 aa, Artificial Sequence
  Description of Artificial Sequence: Synthetic epitope
MKGDQAKGKK

SEQ ID NO: 28424 - protein, 10 aa, Artificial Sequence
  Description of Artificial Sequence: Synthetic epitope
MKGLSLVLSE

SEQ ID NO: 28425 - protein, 10 aa, Artificial Sequence
  Description of Artificial Sequence: Synthetic epitope
MKGNSTLATT

SEQ ID NO: 28426 - protein, 10 aa, Artificial Sequence
  Description of Artificial Sequence: Synthetic epitope
MKGQEGAASK

SEQ ID NO: 28427 - protein, 10 aa, Artificial Sequence
  Description of Artificial Sequence: Synthetic epitope
MKGQQKTAET

SEQ ID NO: 28428 - protein, 10 aa, Artificial Sequence
  Description of Artificial Sequence: Synthetic epitope
MKGSKAIRQT

SEQ ID NO: 28429 - protein, 10 aa, Artificial Sequence
  Description of Artificial Sequence: Synthetic epitope
MKHIINSYEN

SEQ ID NO: 28430 - protein, 10 aa, Artificial Sequence
  Description of Artificial Sequence: Synthetic epitope
MKHNSPQQNK

SEQ ID NO: 28431 - protein, 10 aa, Artificial Sequence
  Description of Artificial Sequence: Synthetic epitope
MKIHTSLQSK

SEQ ID NO: 28432 - protein, 10 aa, Artificial Sequence
  Description of Artificial Sequence: Synthetic epitope
MKIINLKLER

SEQ ID NO: 28433 - protein, 10 aa, Artificial Sequence
  Description of Artificial Sequence: Synthetic epitope
MKIISALSGG

SEQ ID NO: 28434 - protein, 10 aa, Artificial Sequence
  Description of Artificial Sequence: Synthetic epitope
MKIMSTVKKV

SEQ ID NO: 28435 - protein, 10 aa, Artificial Sequence
  Description of Artificial Sequence: Synthetic epitope
MKINMLVIEL

SEQ ID NO: 28436 - protein, 10 aa, Artificial Sequence
  Description of Artificial Sequence: Synthetic epitope
MKITRQKHAK

SEQ ID NO: 28437 - protein, 10 aa, Artificial Sequence
  Description of Artificial Sequence: Synthetic epitope
MKITSAYLQD

SEQ ID NO: 28438 - protein, 10 aa, Artificial Sequence
  Description of Artificial Sequence: Synthetic epitope
MKKAKLSGEQ

SEQ ID NO: 28439 - protein, 10 aa, Artificial Sequence
  Description of Artificial Sequence: Synthetic epitope
MKKDFAAKAR

SEQ ID NO: 28440 - protein, 10 aa, Artificial Sequence
  Description of Artificial Sequence: Synthetic epitope
MKKISLKTLR

SEQ ID NO: 28441 - protein, 10 aa, Artificial Sequence
  Description of Artificial Sequence: Synthetic epitope
MKKNTSKTTM

SEQ ID NO: 28442 - protein, 10 aa, Artificial Sequence
  Description of Artificial Sequence: Synthetic epitope
MKKQDEDKDK

SEQ ID NO: 28443 - protein, 10 aa, Artificial Sequence
  Description of Artificial Sequence: Synthetic epitope
MKKSQAANKQ

SEQ ID NO: 28444 - protein, 10 aa, Artificial Sequence
  Description of Artificial Sequence: Synthetic epitope
MKKSQSRPLQ

SEQ ID NO: 28445 - protein, 10 aa, Artificial Sequence
  Description of Artificial Sequence: Synthetic epitope
MKKSSAKQLQ

SEQ ID NO: 28446 - protein, 10 aa, Artificial Sequence
  Description of Artificial Sequence: Synthetic epitope
MKKTAVPPSR

SEQ ID NO: 28447 - protein, 10 aa, Artificial Sequence
  Description of Artificial Sequence: Synthetic epitope
MKKTIKMHEK

SEQ ID NO: 28448 - protein, 10 aa, Artificial Sequence
  Description of Artificial Sequence: Synthetic epitope
MKKTINFARF

SEQ ID NO: 28449 - protein, 10 aa, Artificial Sequence
  Description of Artificial Sequence: Synthetic epitope
MKKTRSTTLR

SEQ ID NO: 28450 - protein, 10 aa, Artificial Sequence
  Description of Artificial Sequence: Synthetic epitope
MKLEAVLRAL

SEQ ID NO: 28451 - protein, 10 aa, Artificial Sequence
  Description of Artificial Sequence: Synthetic epitope
MKLKKLESSV

SEQ ID NO: 28452 - protein, 10 aa, Artificial Sequence
  Description of Artificial Sequence: Synthetic epitope
MKLLEVIPSQ

SEQ ID NO: 28453 - protein, 10 aa, Artificial Sequence
  Description of Artificial Sequence: Synthetic epitope
MKLQAVMETL

SEQ ID NO: 28454 - protein, 10 aa, Artificial Sequence
  Description of Artificial Sequence: Synthetic epitope
MKLQSTASQV

SEQ ID NO: 28455 - protein, 10 aa, Artificial Sequence
  Description of Artificial Sequence: Synthetic epitope
MKLSVNEAQL

SEQ ID NO: 28456 - protein, 10 aa, Artificial Sequence
  Description of Artificial Sequence: Synthetic epitope
MKLTKGLIKD

SEQ ID NO: 28457 - protein, 10 aa, Artificial Sequence
  Description of Artificial Sequence: Synthetic epitope
MKLTRKMVLT

SEQ ID NO: 28458 - protein, 10 aa, Artificial Sequence
  Description of Artificial Sequence: Synthetic epitope
MKMADAKQKR

SEQ ID NO: 28459 - protein, 10 aa, Artificial Sequence
  Description of Artificial Sequence: Synthetic epitope
MKMARLLARF

SEQ ID NO: 28460 - protein, 10 aa, Artificial Sequence
  Description of Artificial Sequence: Synthetic epitope
MKMEMTEEMI

SEQ ID NO: 28461 - protein, 10 aa, Artificial Sequence
  Description of Artificial Sequence: Synthetic epitope
MKMKQIKVKA

SEQ ID NO: 28462 - protein, 10 aa, Artificial Sequence
  Description of Artificial Sequence: Synthetic epitope
MKMPLNLKGE

SEQ ID NO: 28463 - protein, 10 aa, Artificial Sequence
  Description of Artificial Sequence: Synthetic epitope
MKMVSQSFTQ

SEQ ID NO: 28464 - protein, 10 aa, Artificial Sequence
  Description of Artificial Sequence: Synthetic epitope
MKNATIVMSV

SEQ ID NO: 28465 - protein, 10 aa, Artificial Sequence
  Description of Artificial Sequence: Synthetic epitope
MKNKGAKQKL

SEQ ID NO: 28466 - protein, 10 aa, Artificial Sequence
  Description of Artificial Sequence: Synthetic epitope
MKNNANLKSL

SEQ ID NO: 28467 - protein, 10 aa, Artificial Sequence
  Description of Artificial Sequence: Synthetic epitope
MKNQSLIPLL

SEQ ID NO: 28468 - protein, 10 aa, Artificial Sequence
  Description of Artificial Sequence: Synthetic epitope
MKNRQVNHAR

SEQ ID NO: 28469 - protein, 10 aa, Artificial Sequence
  Description of Artificial Sequence: Synthetic epitope
MKNVAHMTKD

SEQ ID NO: 28470 - protein, 10 aa, Artificial Sequence
  Description of Artificial Sequence: Synthetic epitope
MKPIHAADKQ

SEQ ID NO: 28471 - protein, 10 aa, Artificial Sequence
  Description of Artificial Sequence: Synthetic epitope
MKPLLRMETH

SEQ ID NO: 28472 - protein, 10 aa, Artificial Sequence
  Description of Artificial Sequence: Synthetic epitope
MKPPSSIQTS

SEQ ID NO: 28473 - protein, 10 aa, Artificial Sequence
  Description of Artificial Sequence: Synthetic epitope
MKPVQMVPAI

SEQ ID NO: 28474 - protein, 10 aa, Artificial Sequence
  Description of Artificial Sequence: Synthetic epitope
MKQASRQFQS

SEQ ID NO: 28475 - protein, 10 aa, Artificial Sequence
  Description of Artificial Sequence: Synthetic epitope
MKQASYMYRH

SEQ ID NO: 28476 - protein, 10 aa, Artificial Sequence
  Description of Artificial Sequence: Synthetic epitope
MKQGASGIKE

SEQ ID NO: 28477 - protein, 10 aa, Artificial Sequence
  Description of Artificial Sequence: Synthetic epitope
MKQLSALGAR

SEQ ID NO: 28478 - protein, 10 aa, Artificial Sequence
  Description of Artificial Sequence: Synthetic epitope
MKQLSALGAR

SEQ ID NO: 28479 - protein, 10 aa, Artificial Sequence
  Description of Artificial Sequence: Synthetic epitope
MKQNKMMTGE

SEQ ID NO: 28480 - protein, 10 aa, Artificial Sequence
  Description of Artificial Sequence: Synthetic epitope
MKQPIMADGP

SEQ ID NO: 28481 - protein, 10 aa, Artificial Sequence
  Description of Artificial Sequence: Synthetic epitope
MKQPNRKRKL

SEQ ID NO: 28482 - protein, 10 aa, Artificial Sequence
  Description of Artificial Sequence: Synthetic epitope
MKQSESRLAE

SEQ ID NO: 28483 - protein, 10 aa, Artificial Sequence
  Description of Artificial Sequence: Synthetic epitope
MKQTREQETP

SEQ ID NO: 28484 - protein, 10 aa, Artificial Sequence
  Description of Artificial Sequence: Synthetic epitope
MKQVSQSEKT

SEQ ID NO: 28485 - protein, 10 aa, Artificial Sequence
  Description of Artificial Sequence: Synthetic epitope
MKRESRMAEE

SEQ ID NO: 28486 - protein, 10 aa, Artificial Sequence
  Description of Artificial Sequence: Synthetic epitope
MKRKERIARR

SEQ ID NO: 28487 - protein, 10 aa, Artificial Sequence
  Description of Artificial Sequence: Synthetic epitope
MKRKESAFKS

SEQ ID NO: 28488 - protein, 10 aa, Artificial Sequence
  Description of Artificial Sequence: Synthetic epitope
MKRLRNIMDT

SEQ ID NO: 28489 - protein, 10 aa, Artificial Sequence
  Description of Artificial Sequence: Synthetic epitope
MKRQEERGIQ

SEQ ID NO: 28490 - protein, 10 aa, Artificial Sequence
  Description of Artificial Sequence: Synthetic epitope
MKRSRPTSEG

SEQ ID NO: 28491 - protein, 10 aa, Artificial Sequence
  Description of Artificial Sequence: Synthetic epitope
MKSVKVSENF

SEQ ID NO: 28492 - protein, 10 aa, Artificial Sequence
  Description of Artificial Sequence: Synthetic epitope
MKSWNNTIIL

SEQ ID NO: 28493 - protein, 10 aa, Artificial Sequence
  Description of Artificial Sequence: Synthetic epitope
MKTAKVAASD

SEQ ID NO: 28494 - protein, 10 aa, Artificial Sequence
  Description of Artificial Sequence: Synthetic epitope
MKTDRIVGQN

SEQ ID NO: 28495 - protein, 10 aa, Artificial Sequence
  Description of Artificial Sequence: Synthetic epitope
MKTEAQPSTS

SEQ ID NO: 28496 - protein, 10 aa, Artificial Sequence
  Description of Artificial Sequence: Synthetic epitope
MKTESSGPLF

SEQ ID NO: 28497 - protein, 10 aa, Artificial Sequence
  Description of Artificial Sequence: Synthetic epitope
MKTKAALAIW

SEQ ID NO: 28498 - protein, 10 aa, Artificial Sequence
  Description of Artificial Sequence: Synthetic epitope
MKTQKLDADL

SEQ ID NO: 28499 - protein, 10 aa, Artificial Sequence
  Description of Artificial Sequence: Synthetic epitope
MKTQQIPSKV

SEQ ID NO: 28500 - protein, 10 aa, Artificial Sequence
  Description of Artificial Sequence: Synthetic epitope
MKTQSFVAKM

SEQ ID NO: 28501 - protein, 10 aa, Artificial Sequence
  Description of Artificial Sequence: Synthetic epitope
MKTRQNKDSM

SEQ ID NO: 28502 - protein, 10 aa, Artificial Sequence
  Description of Artificial Sequence: Synthetic epitope
MKTSKASQRY

SEQ ID NO: 28503 - protein, 10 aa, Artificial Sequence
  Description of Artificial Sequence: Synthetic epitope
MKTSSWTRSQ

SEQ ID NO: 28504 - protein, 10 aa, Artificial Sequence
  Description of Artificial Sequence: Synthetic epitope
MKTSTFDSDE

SEQ ID NO: 28505 - protein, 10 aa, Artificial Sequence
  Description of Artificial Sequence: Synthetic epitope
MKTSTVSTAH

SEQ ID NO: 28506 - protein, 10 aa, Artificial Sequence
  Description of Artificial Sequence: Synthetic epitope
MKVAMGMQKQ

SEQ ID NO: 28507 - protein, 10 aa, Artificial Sequence
  Description of Artificial Sequence: Synthetic epitope
MKVFSKNVSK

SEQ ID NO: 28508 - protein, 10 aa, Artificial Sequence
  Description of Artificial Sequence: Synthetic epitope
MKVKHDDHYE

SEQ ID NO: 28509 - protein, 10 aa, Artificial Sequence
  Description of Artificial Sequence: Synthetic epitope
MKVKHVKKLP

SEQ ID NO: 28510 - protein, 10 aa, Artificial Sequence
  Description of Artificial Sequence: Synthetic epitope
MKVKMLSRNP

SEQ ID NO: 28511 - protein, 10 aa, Artificial Sequence
  Description of Artificial Sequence: Synthetic epitope
MKVNGTKTDN

SEQ ID NO: 28512 - protein, 10 aa, Artificial Sequence
  Description of Artificial Sequence: Synthetic epitope
MKVRLLRQLS

SEQ ID NO: 28513 - protein, 10 aa, Artificial Sequence
  Description of Artificial Sequence: Synthetic epitope
MKVTLSALDT

SEQ ID NO: 28514 - protein, 10 aa, Artificial Sequence
  Description of Artificial Sequence: Synthetic epitope
MKVVNLKQAI

SEQ ID NO: 28515 - protein, 10 aa, Artificial Sequence
  Description of Artificial Sequence: Synthetic epitope
MKYGKNQWSR

SEQ ID NO: 28516 - protein, 10 aa, Artificial Sequence
  Description of Artificial Sequence: Synthetic epitope
MKYLDNLSTS

SEQ ID NO: 28517 - protein, 10 aa, Artificial Sequence
  Description of Artificial Sequence: Synthetic epitope
MKYRDQRAGK

SEQ ID NO: 28518 - protein, 10 aa, Artificial Sequence
  Description of Artificial Sequence: Synthetic epitope
MKYSQANMDA

SEQ ID NO: 28519 - protein, 10 aa, Artificial Sequence
  Description of Artificial Sequence: Synthetic epitope
MKYTTATGRN

SEQ ID NO: 28520 - protein, 10 aa, Artificial Sequence
  Description of Artificial Sequence: Synthetic epitope
MLAAFISRVL

SEQ ID NO: 28521 - protein, 10 aa, Artificial Sequence
  Description of Artificial Sequence: Synthetic epitope
MLALISRLLD

SEQ ID NO: 28522 - protein, 10 aa, Artificial Sequence
  Description of Artificial Sequence: Synthetic epitope
MLANDVRHQQ

SEQ ID NO: 28523 - protein, 10 aa, Artificial Sequence
  Description of Artificial Sequence: Synthetic epitope
MLANSASVRI

SEQ ID NO: 28524 - protein, 10 aa, Artificial Sequence
  Description of Artificial Sequence: Synthetic epitope
MLAQTQLIEQ

SEQ ID NO: 28525 - protein, 10 aa, Artificial Sequence
  Description of Artificial Sequence: Synthetic epitope
MLARAARGTG

SEQ ID NO: 28526 - protein, 10 aa, Artificial Sequence
  Description of Artificial Sequence: Synthetic epitope
MLASLKVKKQ

SEQ ID NO: 28527 - protein, 10 aa, Artificial Sequence
  Description of Artificial Sequence: Synthetic epitope
MLAVEVSEAE

SEQ ID NO: 28528 - protein, 10 aa, Artificial Sequence
  Description of Artificial Sequence: Synthetic epitope
MLAVHTEPAA

SEQ ID NO: 28529 - protein, 10 aa, Artificial Sequence
  Description of Artificial Sequence: Synthetic epitope
MLDDRARMEA

SEQ ID NO: 28530 - protein, 10 aa, Artificial Sequence
  Description of Artificial Sequence: Synthetic epitope
MLDTIARALQ

SEQ ID NO: 28531 - protein, 10 aa, Artificial Sequence
  Description of Artificial Sequence: Synthetic epitope
MLDTVRQQWP

SEQ ID NO: 28532 - protein, 10 aa, Artificial Sequence
  Description of Artificial Sequence: Synthetic epitope
MLEKKIRTSS

SEQ ID NO: 28533 - protein, 10 aa, Artificial Sequence
  Description of Artificial Sequence: Synthetic epitope
MLELETSQSP

SEQ ID NO: 28534 - protein, 10 aa, Artificial Sequence
  Description of Artificial Sequence: Synthetic epitope
MLERAERRSY

SEQ ID NO: 28535 - protein, 10 aa, Artificial Sequence
  Description of Artificial Sequence: Synthetic epitope
MLFEETMGID

SEQ ID NO: 28536 - protein, 10 aa, Artificial Sequence
  Description of Artificial Sequence: Synthetic epitope
MLGIMAWNAT

SEQ ID NO: 28537 - protein, 10 aa, Artificial Sequence
  Description of Artificial Sequence: Synthetic epitope
MLGLKSLQNN

SEQ ID NO: 28538 - protein, 10 aa, Artificial Sequence
  Description of Artificial Sequence: Synthetic epitope
MLGLTSALDG

SEQ ID NO: 28539 - protein, 10 aa, Artificial Sequence
  Description of Artificial Sequence: Synthetic epitope
MLGQSQLQLV

SEQ ID NO: 28540 - protein, 10 aa, Artificial Sequence
  Description of Artificial Sequence: Synthetic epitope
MLGSLVLRRK

SEQ ID NO: 28541 - protein, 10 aa, Artificial Sequence
  Description of Artificial Sequence: Synthetic epitope
MLGSSKNTRL

SEQ ID NO: 28542 - protein, 10 aa, Artificial Sequence
  Description of Artificial Sequence: Synthetic epitope
MLGTAAVKAQ

SEQ ID NO: 28543 - protein, 10 aa, Artificial Sequence
  Description of Artificial Sequence: Synthetic epitope
MLIAQALQTI

SEQ ID NO: 28544 - protein, 10 aa, Artificial Sequence
  Description of Artificial Sequence: Synthetic epitope
MLISKIDVQV

SEQ ID NO: 28545 - protein, 10 aa, Artificial Sequence
  Description of Artificial Sequence: Synthetic epitope
MLISKNMPWR

SEQ ID NO: 28546 - protein, 10 aa, Artificial Sequence
  Description of Artificial Sequence: Synthetic epitope
MLITRLQSGI

SEQ ID NO: 28547 - protein, 10 aa, Artificial Sequence
  Description of Artificial Sequence: Synthetic epitope
MLITRLQSGI

SEQ ID NO: 28548 - protein, 10 aa, Artificial Sequence
  Description of Artificial Sequence: Synthetic epitope
MLKAQLDLSV

SEQ ID NO: 28549 - protein, 10 aa, Artificial Sequence
  Description of Artificial Sequence: Synthetic epitope
MLKEEKREED

SEQ ID NO: 28550 - protein, 10 aa, Artificial Sequence
  Description of Artificial Sequence: Synthetic epitope
MLKIAVMEVS

SEQ ID NO: 28551 - protein, 10 aa, Artificial Sequence
  Description of Artificial Sequence: Synthetic epitope
MLKKLKSAER

SEQ ID NO: 28552 - protein, 10 aa, Artificial Sequence
  Description of Artificial Sequence: Synthetic epitope
MLKKSAFKKL

SEQ ID NO: 28553 - protein, 10 aa, Artificial Sequence
  Description of Artificial Sequence: Synthetic epitope
MLKPSVTSAP

SEQ ID NO: 28554 - protein, 10 aa, Artificial Sequence
  Description of Artificial Sequence: Synthetic epitope
MLKSLTYPER

SEQ ID NO: 28555 - protein, 10 aa, Artificial Sequence
  Description of Artificial Sequence: Synthetic epitope
MLLEKALTHS

SEQ ID NO: 28556 - protein, 10 aa, Artificial Sequence
  Description of Artificial Sequence: Synthetic epitope
MLLEKETQNE

SEQ ID NO: 28557 - protein, 10 aa, Artificial Sequence
  Description of Artificial Sequence: Synthetic epitope
MLLEQRSSMP

SEQ ID NO: 28558 - protein, 10 aa, Artificial Sequence
  Description of Artificial Sequence: Synthetic epitope
MLLGASLVGV

SEQ ID NO: 28559 - protein, 10 aa, Artificial Sequence
  Description of Artificial Sequence: Synthetic epitope
MLLISSENEM

SEQ ID NO: 28560 - protein, 10 aa, Artificial Sequence
  Description of Artificial Sequence: Synthetic epitope
MLLKSSQSGS

SEQ ID NO: 28561 - protein, 10 aa, Artificial Sequence
  Description of Artificial Sequence: Synthetic epitope
MLLRKAGAIT

SEQ ID NO: 28562 - protein, 10 aa, Artificial Sequence
  Description of Artificial Sequence: Synthetic epitope
MLLSKVKAKA

SEQ ID NO: 28563 - protein, 10 aa, Artificial Sequence
  Description of Artificial Sequence: Synthetic epitope
MLLSVTSRPG

SEQ ID NO: 28564 - protein, 10 aa, Artificial Sequence
  Description of Artificial Sequence: Synthetic epitope
MLMASTTSAV

SEQ ID NO: 28565 - protein, 10 aa, Artificial Sequence
  Description of Artificial Sequence: Synthetic epitope
MLMELSAGAA

SEQ ID NO: 28566 - protein, 10 aa, Artificial Sequence
  Description of Artificial Sequence: Synthetic epitope
MLMTRVKKAQ

SEQ ID NO: 28567 - protein, 10 aa, Artificial Sequence
  Description of Artificial Sequence: Synthetic epitope
MLNASLETAN

SEQ ID NO: 28568 - protein, 10 aa, Artificial Sequence
  Description of Artificial Sequence: Synthetic epitope
MLNAYKPKSK

SEQ ID NO: 28569 - protein, 10 aa, Artificial Sequence
  Description of Artificial Sequence: Synthetic epitope
MLNGMIKQEP

SEQ ID NO: 28570 - protein, 10 aa, Artificial Sequence
  Description of Artificial Sequence: Synthetic epitope
MLNTLTSNMS

SEQ ID NO: 28571 - protein, 10 aa, Artificial Sequence
  Description of Artificial Sequence: Synthetic epitope
MLQATMTKQE

SEQ ID NO: 28572 - protein, 10 aa, Artificial Sequence
  Description of Artificial Sequence: Synthetic epitope
MLQMNAKHKA

SEQ ID NO: 28573 - protein, 10 aa, Artificial Sequence
  Description of Artificial Sequence: Synthetic epitope
MLRGSASSTS

SEQ ID NO: 28574 - protein, 10 aa, Artificial Sequence
  Description of Artificial Sequence: Synthetic epitope
MLRLSQDVKG

SEQ ID NO: 28575 - protein, 10 aa, Artificial Sequence
  Description of Artificial Sequence: Synthetic epitope
MLRQVSRDKN

SEQ ID NO: 28576 - protein, 10 aa, Artificial Sequence
  Description of Artificial Sequence: Synthetic epitope
MLRVIVESAS

SEQ ID NO: 28577 - protein, 10 aa, Artificial Sequence
  Description of Artificial Sequence: Synthetic epitope
MLSASTMKEV

SEQ ID NO: 28578 - protein, 10 aa, Artificial Sequence
  Description of Artificial Sequence: Synthetic epitope
MLSDELESKP

SEQ ID NO: 28579 - protein, 10 aa, Artificial Sequence
  Description of Artificial Sequence: Synthetic epitope
MLSESTAESH

SEQ ID NO: 28580 - protein, 10 aa, Artificial Sequence
  Description of Artificial Sequence: Synthetic epitope
MLSGAAGAAR

SEQ ID NO: 28581 - protein, 10 aa, Artificial Sequence
  Description of Artificial Sequence: Synthetic epitope
MLSHNTMMKQ

SEQ ID NO: 28582 - protein, 10 aa, Artificial Sequence
  Description of Artificial Sequence: Synthetic epitope
MLSIQKWQFS

SEQ ID NO: 28583 - protein, 10 aa, Artificial Sequence
  Description of Artificial Sequence: Synthetic epitope
MLSLAAKLVA

SEQ ID NO: 28584 - protein, 10 aa, Artificial Sequence
  Description of Artificial Sequence: Synthetic epitope
MLSMGKKMMQ

SEQ ID NO: 28585 - protein, 10 aa, Artificial Sequence
  Description of Artificial Sequence: Synthetic epitope
MLSRLRVVST

SEQ ID NO: 28586 - protein, 10 aa, Artificial Sequence
  Description of Artificial Sequence: Synthetic epitope
MLSTDTKKAS

SEQ ID NO: 28587 - protein, 10 aa, Artificial Sequence
  Description of Artificial Sequence: Synthetic epitope
MLTATAMPTV

SEQ ID NO: 28588 - protein, 10 aa, Artificial Sequence
  Description of Artificial Sequence: Synthetic epitope
MLTKIIRDKG

SEQ ID NO: 28589 - protein, 10 aa, Artificial Sequence
  Description of Artificial Sequence: Synthetic epitope
MLTMSVTLSP

SEQ ID NO: 28590 - protein, 10 aa, Artificial Sequence
  Description of Artificial Sequence: Synthetic epitope
MLTSMLSGSK

SEQ ID NO: 28591 - protein, 10 aa, Artificial Sequence
  Description of Artificial Sequence: Synthetic epitope
MLVKRDYRYD

SEQ ID NO: 28592 - protein, 10 aa, Artificial Sequence
  Description of Artificial Sequence: Synthetic epitope
MLVLEKLATD

SEQ ID NO: 28593 - protein, 10 aa, Artificial Sequence
  Description of Artificial Sequence: Synthetic epitope
MLVNSAITQQ

SEQ ID NO: 28594 - protein, 10 aa, Artificial Sequence
  Description of Artificial Sequence: Synthetic epitope
MLVSAVESLE

SEQ ID NO: 28595 - protein, 10 aa, Artificial Sequence
  Description of Artificial Sequence: Synthetic epitope
MLVVEVANGR

SEQ ID NO: 28596 - protein, 10 aa, Artificial Sequence
  Description of Artificial Sequence: Synthetic epitope
MLWMDKEKEE

SEQ ID NO: 28597 - protein, 10 aa, Artificial Sequence
  Description of Artificial Sequence: Synthetic epitope
MLWVTESEPS

SEQ ID NO: 28598 - protein, 10 aa, Artificial Sequence
  Description of Artificial Sequence: Synthetic epitope
MMAAEAGSEE

SEQ ID NO: 28599 - protein, 10 aa, Artificial Sequence
  Description of Artificial Sequence: Synthetic epitope
MMAAKAIQEA

SEQ ID NO: 28600 - protein, 10 aa, Artificial Sequence
  Description of Artificial Sequence: Synthetic epitope
MMAFLEKSQE

SEQ ID NO: 28601 - protein, 10 aa, Artificial Sequence
  Description of Artificial Sequence: Synthetic epitope
MMAKAALVDY

SEQ ID NO: 28602 - protein, 10 aa, Artificial Sequence
  Description of Artificial Sequence: Synthetic epitope
MMAKSALREN

SEQ ID NO: 28603 - protein, 10 aa, Artificial Sequence
  Description of Artificial Sequence: Synthetic epitope
MMAKSLMPQI

SEQ ID NO: 28604 - protein, 10 aa, Artificial Sequence
  Description of Artificial Sequence: Synthetic epitope
MMAQKSQGSD

SEQ ID NO: 28605 - protein, 10 aa, Artificial Sequence
  Description of Artificial Sequence: Synthetic epitope
MMASERNQSS

SEQ ID NO: 28606 - protein, 10 aa, Artificial Sequence
  Description of Artificial Sequence: Synthetic epitope
MMASMRVVKE

SEQ ID NO: 28607 - protein, 10 aa, Artificial Sequence
  Description of Artificial Sequence: Synthetic epitope
MMDVSELGES

SEQ ID NO: 28608 - protein, 10 aa, Artificial Sequence
  Description of Artificial Sequence: Synthetic epitope
MMDVSRTQTA

SEQ ID NO: 28609 - protein, 10 aa, Artificial Sequence
  Description of Artificial Sequence: Synthetic epitope
MMEGSRQTRV

SEQ ID NO: 28610 - protein, 10 aa, Artificial Sequence
  Description of Artificial Sequence: Synthetic epitope
MMGNIAAVAA

SEQ ID NO: 28611 - protein, 10 aa, Artificial Sequence
  Description of Artificial Sequence: Synthetic epitope
MMGSKMASAS

SEQ ID NO: 28612 - protein, 10 aa, Artificial Sequence
  Description of Artificial Sequence: Synthetic epitope
MMIASTAVNY

SEQ ID NO: 28613 - protein, 10 aa, Artificial Sequence
  Description of Artificial Sequence: Synthetic epitope
MMIIALEFPH

SEQ ID NO: 28614 - protein, 10 aa, Artificial Sequence
  Description of Artificial Sequence: Synthetic epitope
MMISSMLQAS

SEQ ID NO: 28615 - protein, 10 aa, Artificial Sequence
  Description of Artificial Sequence: Synthetic epitope
MMKAAISETE

SEQ ID NO: 28616 - protein, 10 aa, Artificial Sequence
  Description of Artificial Sequence: Synthetic epitope
MMKKSADHKN

SEQ ID NO: 28617 - protein, 10 aa, Artificial Sequence
  Description of Artificial Sequence: Synthetic epitope
MMKSAKLPQT

SEQ ID NO: 28618 - protein, 10 aa, Artificial Sequence
  Description of Artificial Sequence: Synthetic epitope
MMLITQAKEA

SEQ ID NO: 28619 - protein, 10 aa, Artificial Sequence
  Description of Artificial Sequence: Synthetic epitope
MMLKSITESF

SEQ ID NO: 28620 - protein, 10 aa, Artificial Sequence
  Description of Artificial Sequence: Synthetic epitope
MMLLILFLVI

SEQ ID NO: 28621 - protein, 10 aa, Artificial Sequence
  Description of Artificial Sequence: Synthetic epitope
MMLMLAQSNP

SEQ ID NO: 28622 - protein, 10 aa, Artificial Sequence
  Description of Artificial Sequence: Synthetic epitope
MMPAKGKKTD

SEQ ID NO: 28623 - protein, 10 aa, Artificial Sequence
  Description of Artificial Sequence: Synthetic epitope
MMPEEVKESS

SEQ ID NO: 28624 - protein, 10 aa, Artificial Sequence
  Description of Artificial Sequence: Synthetic epitope
MMPIIHYPNE

SEQ ID NO: 28625 - protein, 10 aa, Artificial Sequence
  Description of Artificial Sequence: Synthetic epitope
MMQESGTETK

SEQ ID NO: 28626 - protein, 10 aa, Artificial Sequence
  Description of Artificial Sequence: Synthetic epitope
MMQPQVSSQQ

SEQ ID NO: 28627 - protein, 10 aa, Artificial Sequence
  Description of Artificial Sequence: Synthetic epitope
MMSDNAKGRA

SEQ ID NO: 28628 - protein, 10 aa, Artificial Sequence
  Description of Artificial Sequence: Synthetic epitope
MMSTEQMQPL

SEQ ID NO: 28629 - protein, 10 aa, Artificial Sequence
  Description of Artificial Sequence: Synthetic epitope
MMSTLEADSI

SEQ ID NO: 28630 - protein, 10 aa, Artificial Sequence
  Description of Artificial Sequence: Synthetic epitope
MMTQEQIQKE

SEQ ID NO: 28631 - protein, 10 aa, Artificial Sequence
  Description of Artificial Sequence: Synthetic epitope
MMTTLQNKEE

SEQ ID NO: 28632 - protein, 10 aa, Artificial Sequence
  Description of Artificial Sequence: Synthetic epitope
MMVSEELIRV

SEQ ID NO: 28633 - protein, 10 aa, Artificial Sequence
  Description of Artificial Sequence: Synthetic epitope
MNAEMFGSTY

SEQ ID NO: 28634 - protein, 10 aa, Artificial Sequence
  Description of Artificial Sequence: Synthetic epitope
MNAGEPLNEV

SEQ ID NO: 28635 - protein, 10 aa, Artificial Sequence
  Description of Artificial Sequence: Synthetic epitope
MNDEWMQGVP

SEQ ID NO: 28636 - protein, 10 aa, Artificial Sequence
  Description of Artificial Sequence: Synthetic epitope
MNDKIVIEKQ

SEQ ID NO: 28637 - protein, 10 aa, Artificial Sequence
  Description of Artificial Sequence: Synthetic epitope
MNDQVLEPQN

SEQ ID NO: 28638 - protein, 10 aa, Artificial Sequence
  Description of Artificial Sequence: Synthetic epitope
MNDSRQQSLF

SEQ ID NO: 28639 - protein, 10 aa, Artificial Sequence
  Description of Artificial Sequence: Synthetic epitope
MNEFIHKEQN

SEQ ID NO: 28640 - protein, 10 aa, Artificial Sequence
  Description of Artificial Sequence: Synthetic epitope
MNFSITETEK

SEQ ID NO: 28641 - protein, 10 aa, Artificial Sequence
  Description of Artificial Sequence: Synthetic epitope
MNGLSSLRGH

SEQ ID NO: 28642 - protein, 10 aa, Artificial Sequence
  Description of Artificial Sequence: Synthetic epitope
MNGPISQTTS

SEQ ID NO: 28643 - protein, 10 aa, Artificial Sequence
  Description of Artificial Sequence: Synthetic epitope
MNGSEIQYKI

SEQ ID NO: 28644 - protein, 10 aa, Artificial Sequence
  Description of Artificial Sequence: Synthetic epitope
MNHQNQLEIF

SEQ ID NO: 28645 - protein, 10 aa, Artificial Sequence
  Description of Artificial Sequence: Synthetic epitope
MNIQLVTSQI

SEQ ID NO: 28646 - protein, 10 aa, Artificial Sequence
  Description of Artificial Sequence: Synthetic epitope
MNKHDWYEEY

SEQ ID NO: 28647 - protein, 10 aa, Artificial Sequence
  Description of Artificial Sequence: Synthetic epitope
MNKLFSFWKR

SEQ ID NO: 28648 - protein, 10 aa, Artificial Sequence
  Description of Artificial Sequence: Synthetic epitope
MNKMALASFM

SEQ ID NO: 28649 - protein, 10 aa, Artificial Sequence
  Description of Artificial Sequence: Synthetic epitope
MNKSPSAMQQ

SEQ ID NO: 28650 - protein, 10 aa, Artificial Sequence
  Description of Artificial Sequence: Synthetic epitope
MNKSQEQVSF

SEQ ID NO: 28651 - protein, 10 aa, Artificial Sequence
  Description of Artificial Sequence: Synthetic epitope
MNLAYVKAAD

SEQ ID NO: 28652 - protein, 10 aa, Artificial Sequence
  Description of Artificial Sequence: Synthetic epitope
MNLDSLSLAL

SEQ ID NO: 28653 - protein, 10 aa, Artificial Sequence
  Description of Artificial Sequence: Synthetic epitope
MNLDTASEKQ

SEQ ID NO: 28654 - protein, 10 aa, Artificial Sequence
  Description of Artificial Sequence: Synthetic epitope
MNLEQSPLEE

SEQ ID NO: 28655 - protein, 10 aa, Artificial Sequence
  Description of Artificial Sequence: Synthetic epitope
MNLGQEITRA

SEQ ID NO: 28656 - protein, 10 aa, Artificial Sequence
  Description of Artificial Sequence: Synthetic epitope
MNLMAKLSYL

SEQ ID NO: 28657 - protein, 10 aa, Artificial Sequence
  Description of Artificial Sequence: Synthetic epitope
MNLPFKANVN

SEQ ID NO: 28658 - protein, 10 aa, Artificial Sequence
  Description of Artificial Sequence: Synthetic epitope
MNLSSASSTE

SEQ ID NO: 28659 - protein, 10 aa, Artificial Sequence
  Description of Artificial Sequence: Synthetic epitope
MNLSSKLAQL

SEQ ID NO: 28660 - protein, 10 aa, Artificial Sequence
  Description of Artificial Sequence: Synthetic epitope
MNMSKQPVSN

SEQ ID NO: 28661 - protein, 10 aa, Artificial Sequence
  Description of Artificial Sequence: Synthetic epitope
MNNEEDLLQE

SEQ ID NO: 28662 - protein, 10 aa, Artificial Sequence
  Description of Artificial Sequence: Synthetic epitope
MNNGLMEKMV

SEQ ID NO: 28663 - protein, 10 aa, Artificial Sequence
  Description of Artificial Sequence: Synthetic epitope
MNNKTSAGET

SEQ ID NO: 28664 - protein, 10 aa, Artificial Sequence
  Description of Artificial Sequence: Synthetic epitope
MNNQKQQKPT

SEQ ID NO: 28665 - protein, 10 aa, Artificial Sequence
  Description of Artificial Sequence: Synthetic epitope
MNNQKVVAVL

SEQ ID NO: 28666 - protein, 10 aa, Artificial Sequence
  Description of Artificial Sequence: Synthetic epitope
MNNSLENTIS

SEQ ID NO: 28667 - protein, 10 aa, Artificial Sequence
  Description of Artificial Sequence: Synthetic epitope
MNPQREAAPK

SEQ ID NO: 28668 - protein, 10 aa, Artificial Sequence
  Description of Artificial Sequence: Synthetic epitope
MNPSMKQKQE

SEQ ID NO: 28669 - protein, 10 aa, Artificial Sequence
  Description of Artificial Sequence: Synthetic epitope
MNPVNATALY

SEQ ID NO: 28670 - protein, 10 aa, Artificial Sequence
  Description of Artificial Sequence: Synthetic epitope
MNQASEFYLA

SEQ ID NO: 28671 - protein, 10 aa, Artificial Sequence
  Description of Artificial Sequence: Synthetic epitope
MNQEYQLPLS

SEQ ID NO: 28672 - protein, 10 aa, Artificial Sequence
  Description of Artificial Sequence: Synthetic epitope
MNRITTKEAT

SEQ ID NO: 28673 - protein, 10 aa, Artificial Sequence
  Description of Artificial Sequence: Synthetic epitope
MNRKAIREDG

SEQ ID NO: 28674 - protein, 10 aa, Artificial Sequence
  Description of Artificial Sequence: Synthetic epitope
MNRRETDLHT

SEQ ID NO: 28675 - protein, 10 aa, Artificial Sequence
  Description of Artificial Sequence: Synthetic epitope
MNRVNDPLIF

SEQ ID NO: 28676 - protein, 10 aa, Artificial Sequence
  Description of Artificial Sequence: Synthetic epitope
MNSDQVTLVG

SEQ ID NO: 28677 - protein, 10 aa, Artificial Sequence
  Description of Artificial Sequence: Synthetic epitope
MNSETLLSGE

SEQ ID NO: 28678 - protein, 10 aa, Artificial Sequence
  Description of Artificial Sequence: Synthetic epitope
MNSLSEANTK

SEQ ID NO: 28679 - protein, 10 aa, Artificial Sequence
  Description of Artificial Sequence: Synthetic epitope
MNSLSEANTK

SEQ ID NO: 28680 - protein, 10 aa, Artificial Sequence
  Description of Artificial Sequence: Synthetic epitope
MNSNTIASKM

SEQ ID NO: 28681 - protein, 10 aa, Artificial Sequence
  Description of Artificial Sequence: Synthetic epitope
MNSQNLSTTK

SEQ ID NO: 28682 - protein, 10 aa, Artificial Sequence
  Description of Artificial Sequence: Synthetic epitope
MNSRVFKKIQ

SEQ ID NO: 28683 - protein, 10 aa, Artificial Sequence
  Description of Artificial Sequence: Synthetic epitope
MNSSKSSETQ

SEQ ID NO: 28684 - protein, 10 aa, Artificial Sequence
  Description of Artificial Sequence: Synthetic epitope
MNTDLAAGKM

SEQ ID NO: 28685 - protein, 10 aa, Artificial Sequence
  Description of Artificial Sequence: Synthetic epitope
MNTEELELLS

SEQ ID NO: 28686 - protein, 10 aa, Artificial Sequence
  Description of Artificial Sequence: Synthetic epitope
MNTHRAGWAR

SEQ ID NO: 28687 - protein, 10 aa, Artificial Sequence
  Description of Artificial Sequence: Synthetic epitope
MNTLSSNRAN

SEQ ID NO: 28688 - protein, 10 aa, Artificial Sequence
  Description of Artificial Sequence: Synthetic epitope
MNTSDMMGRM

SEQ ID NO: 28689 - protein, 10 aa, Artificial Sequence
  Description of Artificial Sequence: Synthetic epitope
MNTSTVNSAR

SEQ ID NO: 28690 - protein, 10 aa, Artificial Sequence
  Description of Artificial Sequence: Synthetic epitope
MNVKFSSGYY

SEQ ID NO: 28691 - protein, 10 aa, Artificial Sequence
  Description of Artificial Sequence: Synthetic epitope
MNVQKFASNI

SEQ ID NO: 28692 - protein, 10 aa, Artificial Sequence
  Description of Artificial Sequence: Synthetic epitope
MNVSEKLSNM

SEQ ID NO: 28693 - protein, 10 aa, Artificial Sequence
  Description of Artificial Sequence: Synthetic epitope
MNVTTRLIQE

SEQ ID NO: 28694 - protein, 10 aa, Artificial Sequence
  Description of Artificial Sequence: Synthetic epitope
MNYARFITAA

SEQ ID NO: 28695 - protein, 10 aa, Artificial Sequence
  Description of Artificial Sequence: Synthetic epitope
MNYSRKNQDS

SEQ ID NO: 28696 - protein, 10 aa, Artificial Sequence
  Description of Artificial Sequence: Synthetic epitope
MPAESGKRFK

SEQ ID NO: 28697 - protein, 10 aa, Artificial Sequence
  Description of Artificial Sequence: Synthetic epitope
MPAILVASKM

SEQ ID NO: 28698 - protein, 10 aa, Artificial Sequence
  Description of Artificial Sequence: Synthetic epitope
MPAQRSSAET

SEQ ID NO: 28699 - protein, 10 aa, Artificial Sequence
  Description of Artificial Sequence: Synthetic epitope
MPASELKASE

SEQ ID NO: 28700 - protein, 10 aa, Artificial Sequence
  Description of Artificial Sequence: Synthetic epitope
MPAYVEGDVY

SEQ ID NO: 28701 - protein, 10 aa, Artificial Sequence
  Description of Artificial Sequence: Synthetic epitope
MPEAHMQPAK

SEQ ID NO: 28702 - protein, 10 aa, Artificial Sequence
  Description of Artificial Sequence: Synthetic epitope
MPEDQAGAAM

SEQ ID NO: 28703 - protein, 10 aa, Artificial Sequence
  Description of Artificial Sequence: Synthetic epitope
MPEHSTLMKD

SEQ ID NO: 28704 - protein, 10 aa, Artificial Sequence
  Description of Artificial Sequence: Synthetic epitope
MPEINTNHLD

SEQ ID NO: 28705 - protein, 10 aa, Artificial Sequence
  Description of Artificial Sequence: Synthetic epitope
MPEMSIKPQK

SEQ ID NO: 28706 - protein, 10 aa, Artificial Sequence
  Description of Artificial Sequence: Synthetic epitope
MPESVNVLQI

SEQ ID NO: 28707 - protein, 10 aa, Artificial Sequence
  Description of Artificial Sequence: Synthetic epitope
MPEVSSKGAT

SEQ ID NO: 28708 - protein, 10 aa, Artificial Sequence
  Description of Artificial Sequence: Synthetic epitope
MPFAKRIVEP

SEQ ID NO: 28709 - protein, 10 aa, Artificial Sequence
  Description of Artificial Sequence: Synthetic epitope
MPFKDRATSM

SEQ ID NO: 28710 - protein, 10 aa, Artificial Sequence
  Description of Artificial Sequence: Synthetic epitope
MPGIVELPTL

SEQ ID NO: 28711 - protein, 10 aa, Artificial Sequence
  Description of Artificial Sequence: Synthetic epitope
MPGQLTISDI

SEQ ID NO: 28712 - protein, 10 aa, Artificial Sequence
  Description of Artificial Sequence: Synthetic epitope
MPGRARTRAR

SEQ ID NO: 28713 - protein, 10 aa, Artificial Sequence
  Description of Artificial Sequence: Synthetic epitope
MPHDVSHTEA

SEQ ID NO: 28714 - protein, 10 aa, Artificial Sequence
  Description of Artificial Sequence: Synthetic epitope
MPHESVVEQE

SEQ ID NO: 28715 - protein, 10 aa, Artificial Sequence
  Description of Artificial Sequence: Synthetic epitope
MPIVMVTEDE

SEQ ID NO: 28716 - protein, 10 aa, Artificial Sequence
  Description of Artificial Sequence: Synthetic epitope
MPKDVIISPH

SEQ ID NO: 28717 - protein, 10 aa, Artificial Sequence
  Description of Artificial Sequence: Synthetic epitope
MPKHEFSVDM

SEQ ID NO: 28718 - protein, 10 aa, Artificial Sequence
  Description of Artificial Sequence: Synthetic epitope
MPKKEKMAKT

SEQ ID NO: 28719 - protein, 10 aa, Artificial Sequence
  Description of Artificial Sequence: Synthetic epitope
MPKLATQSNE

SEQ ID NO: 28720 - protein, 10 aa, Artificial Sequence
  Description of Artificial Sequence: Synthetic epitope
MPKLETSLSH

SEQ ID NO: 28721 - protein, 10 aa, Artificial Sequence
  Description of Artificial Sequence: Synthetic epitope
MPKMDQDSLS

SEQ ID NO: 28722 - protein, 10 aa, Artificial Sequence
  Description of Artificial Sequence: Synthetic epitope
MPKSKELVSS

SEQ ID NO: 28723 - protein, 10 aa, Artificial Sequence
  Description of Artificial Sequence: Synthetic epitope
MPKSKRDKKV

SEQ ID NO: 28724 - protein, 10 aa, Artificial Sequence
  Description of Artificial Sequence: Synthetic epitope
MPLASLLWKS

SEQ ID NO: 28725 - protein, 10 aa, Artificial Sequence
  Description of Artificial Sequence: Synthetic epitope
MPLMSAMASG

SEQ ID NO: 28726 - protein, 10 aa, Artificial Sequence
  Description of Artificial Sequence: Synthetic epitope
MPLSDALRVS

SEQ ID NO: 28727 - protein, 10 aa, Artificial Sequence
  Description of Artificial Sequence: Synthetic epitope
MPLTAQQAQE

SEQ ID NO: 28728 - protein, 10 aa, Artificial Sequence
  Description of Artificial Sequence: Synthetic epitope
MPMDIKGIAR

SEQ ID NO: 28729 - protein, 10 aa, Artificial Sequence
  Description of Artificial Sequence: Synthetic epitope
MPNRKASRNA

SEQ ID NO: 28730 - protein, 10 aa, Artificial Sequence
  Description of Artificial Sequence: Synthetic epitope
MPNRRNMYTV

SEQ ID NO: 28731 - protein, 10 aa, Artificial Sequence
  Description of Artificial Sequence: Synthetic epitope
MPPKKQAQAG

SEQ ID NO: 28732 - protein, 10 aa, Artificial Sequence
  Description of Artificial Sequence: Synthetic epitope
MPPKVTSELL

SEQ ID NO: 28733 - protein, 10 aa, Artificial Sequence
  Description of Artificial Sequence: Synthetic epitope
MPQTRSQAQA

SEQ ID NO: 28734 - protein, 10 aa, Artificial Sequence
  Description of Artificial Sequence: Synthetic epitope
MPQYQTWEEF

SEQ ID NO: 28735 - protein, 10 aa, Artificial Sequence
  Description of Artificial Sequence: Synthetic epitope
MPRLSGKSVR

SEQ ID NO: 28736 - protein, 10 aa, Artificial Sequence
  Description of Artificial Sequence: Synthetic epitope
MPRNAARISE

SEQ ID NO: 28737 - protein, 10 aa, Artificial Sequence
  Description of Artificial Sequence: Synthetic epitope
MPRRAENWDE

SEQ ID NO: 28738 - protein, 10 aa, Artificial Sequence
  Description of Artificial Sequence: Synthetic epitope
MPRSADYFMQ

SEQ ID NO: 28739 - protein, 10 aa, Artificial Sequence
  Description of Artificial Sequence: Synthetic epitope
MPRSLKRAQL

SEQ ID NO: 28740 - protein, 10 aa, Artificial Sequence
  Description of Artificial Sequence: Synthetic epitope
MPSDEASESS

SEQ ID NO: 28741 - protein, 10 aa, Artificial Sequence
  Description of Artificial Sequence: Synthetic epitope
MPSISSDRAA

SEQ ID NO: 28742 - protein, 10 aa, Artificial Sequence
  Description of Artificial Sequence: Synthetic epitope
MPSRNSVAET

SEQ ID NO: 28743 - protein, 10 aa, Artificial Sequence
  Description of Artificial Sequence: Synthetic epitope
MPSSDLADEK

SEQ ID NO: 28744 - protein, 10 aa, Artificial Sequence
  Description of Artificial Sequence: Synthetic epitope
MPTFNGSVFM

SEQ ID NO: 28745 - protein, 10 aa, Artificial Sequence
  Description of Artificial Sequence: Synthetic epitope
MPTNSTETTP

SEQ ID NO: 28746 - protein, 10 aa, Artificial Sequence
  Description of Artificial Sequence: Synthetic epitope
MPTVKTRKLN

SEQ ID NO: 28747 - protein, 10 aa, Artificial Sequence
  Description of Artificial Sequence: Synthetic epitope
MPVAATNSET

SEQ ID NO: 28748 - protein, 10 aa, Artificial Sequence
  Description of Artificial Sequence: Synthetic epitope
MPVAVMAESA

SEQ ID NO: 28749 - protein, 10 aa, Artificial Sequence
  Description of Artificial Sequence: Synthetic epitope
MPVRAADKLA

SEQ ID NO: 28750 - protein, 10 aa, Artificial Sequence
  Description of Artificial Sequence: Synthetic epitope
MPVSTTSVTI

SEQ ID NO: 28751 - protein, 10 aa, Artificial Sequence
  Description of Artificial Sequence: Synthetic epitope
MPYANQPTVR

SEQ ID NO: 28752 - protein, 10 aa, Artificial Sequence
  Description of Artificial Sequence: Synthetic epitope
MQAALEVTAR

SEQ ID NO: 28753 - protein, 10 aa, Artificial Sequence
  Description of Artificial Sequence: Synthetic epitope
MQAGKKFKDS

SEQ ID NO: 28754 - protein, 10 aa, Artificial Sequence
  Description of Artificial Sequence: Synthetic epitope
MQAKYSSTRD

SEQ ID NO: 28755 - protein, 10 aa, Artificial Sequence
  Description of Artificial Sequence: Synthetic epitope
MQAPRELAVG

SEQ ID NO: 28756 - protein, 10 aa, Artificial Sequence
  Description of Artificial Sequence: Synthetic epitope
MQAPRELAVG

SEQ ID NO: 28757 - protein, 10 aa, Artificial Sequence
  Description of Artificial Sequence: Synthetic epitope
MQAVKTTPRQ

SEQ ID NO: 28758 - protein, 10 aa, Artificial Sequence
  Description of Artificial Sequence: Synthetic epitope
MQEEMKGSVE

SEQ ID NO: 28759 - protein, 10 aa, Artificial Sequence
  Description of Artificial Sequence: Synthetic epitope
MQEEMVLLVK

SEQ ID NO: 28760 - protein, 10 aa, Artificial Sequence
  Description of Artificial Sequence: Synthetic epitope
MQEIIASVDH

SEQ ID NO: 28761 - protein, 10 aa, Artificial Sequence
  Description of Artificial Sequence: Synthetic epitope
MQEKKSLLEE

SEQ ID NO: 28762 - protein, 10 aa, Artificial Sequence
  Description of Artificial Sequence: Synthetic epitope
MQEMKNSQQE

SEQ ID NO: 28763 - protein, 10 aa, Artificial Sequence
  Description of Artificial Sequence: Synthetic epitope
MQEPLRLNIQ

SEQ ID NO: 28764 - protein, 10 aa, Artificial Sequence
  Description of Artificial Sequence: Synthetic epitope
MQEQNTQQGD

SEQ ID NO: 28765 - protein, 10 aa, Artificial Sequence
  Description of Artificial Sequence: Synthetic epitope
MQEQSYLKSE

SEQ ID NO: 28766 - protein, 10 aa, Artificial Sequence
  Description of Artificial Sequence: Synthetic epitope
MQERASYVRS

SEQ ID NO: 28767 - protein, 10 aa, Artificial Sequence
  Description of Artificial Sequence: Synthetic epitope
MQERSARQDL

SEQ ID NO: 28768 - protein, 10 aa, Artificial Sequence
  Description of Artificial Sequence: Synthetic epitope
MQETKIKGEK

SEQ ID NO: 28769 - protein, 10 aa, Artificial Sequence
  Description of Artificial Sequence: Synthetic epitope
MQFIKDSRQH

SEQ ID NO: 28770 - protein, 10 aa, Artificial Sequence
  Description of Artificial Sequence: Synthetic epitope
MQGLLTSGRK

SEQ ID NO: 28771 - protein, 10 aa, Artificial Sequence
  Description of Artificial Sequence: Synthetic epitope
MQGRKTTASS

SEQ ID NO: 28772 - protein, 10 aa, Artificial Sequence
  Description of Artificial Sequence: Synthetic epitope
MQGYMMRDLN

SEQ ID NO: 28773 - protein, 10 aa, Artificial Sequence
  Description of Artificial Sequence: Synthetic epitope
MQHKRAMQDM

SEQ ID NO: 28774 - protein, 10 aa, Artificial Sequence
  Description of Artificial Sequence: Synthetic epitope
MQINDAKKTE

SEQ ID NO: 28775 - protein, 10 aa, Artificial Sequence
  Description of Artificial Sequence: Synthetic epitope
MQIQRAAETQ

SEQ ID NO: 28776 - protein, 10 aa, Artificial Sequence
  Description of Artificial Sequence: Synthetic epitope
MQISMLQQST

SEQ ID NO: 28777 - protein, 10 aa, Artificial Sequence
  Description of Artificial Sequence: Synthetic epitope
MQIVEIHTFV

SEQ ID NO: 28778 - protein, 10 aa, Artificial Sequence
  Description of Artificial Sequence: Synthetic epitope
MQKASHKNKK

SEQ ID NO: 28779 - protein, 10 aa, Artificial Sequence
  Description of Artificial Sequence: Synthetic epitope
MQKFEMLNAE

SEQ ID NO: 28780 - protein, 10 aa, Artificial Sequence
  Description of Artificial Sequence: Synthetic epitope
MQKLAGSSAA

SEQ ID NO: 28781 - protein, 10 aa, Artificial Sequence
  Description of Artificial Sequence: Synthetic epitope
MQKMPDQFDQ

SEQ ID NO: 28782 - protein, 10 aa, Artificial Sequence
  Description of Artificial Sequence: Synthetic epitope
MQKNKWDATR

SEQ ID NO: 28783 - protein, 10 aa, Artificial Sequence
  Description of Artificial Sequence: Synthetic epitope
MQKQKMNDSM

SEQ ID NO: 28784 - protein, 10 aa, Artificial Sequence
  Description of Artificial Sequence: Synthetic epitope
MQKSTNSDTS

SEQ ID NO: 28785 - protein, 10 aa, Artificial Sequence
  Description of Artificial Sequence: Synthetic epitope
MQKSVRYNEG

SEQ ID NO: 28786 - protein, 10 aa, Artificial Sequence
  Description of Artificial Sequence: Synthetic epitope
MQKVDGVADG

SEQ ID NO: 28787 - protein, 10 aa, Artificial Sequence
  Description of Artificial Sequence: Synthetic epitope
MQLAQATAVA

SEQ ID NO: 28788 - protein, 10 aa, Artificial Sequence
  Description of Artificial Sequence: Synthetic epitope
MQLESDSHET

SEQ ID NO: 28789 - protein, 10 aa, Artificial Sequence
  Description of Artificial Sequence: Synthetic epitope
MQLGEQLLVS

SEQ ID NO: 28790 - protein, 10 aa, Artificial Sequence
  Description of Artificial Sequence: Synthetic epitope
MQLISLQFHQ

SEQ ID NO: 28791 - protein, 10 aa, Artificial Sequence
  Description of Artificial Sequence: Synthetic epitope
MQLKLQLEGQ

SEQ ID NO: 28792 - protein, 10 aa, Artificial Sequence
  Description of Artificial Sequence: Synthetic epitope
MQLKSEIKQV

SEQ ID NO: 28793 - protein, 10 aa, Artificial Sequence
  Description of Artificial Sequence: Synthetic epitope
MQLLQVRTTN

SEQ ID NO: 28794 - protein, 10 aa, Artificial Sequence
  Description of Artificial Sequence: Synthetic epitope
MQLPPFDMWK

SEQ ID NO: 28795 - protein, 10 aa, Artificial Sequence
  Description of Artificial Sequence: Synthetic epitope
MQLSPFVYSE

SEQ ID NO: 28796 - protein, 10 aa, Artificial Sequence
  Description of Artificial Sequence: Synthetic epitope
MQLSTVSGTS

SEQ ID NO: 28797 - protein, 10 aa, Artificial Sequence
  Description of Artificial Sequence: Synthetic epitope
MQMFKALGSD

SEQ ID NO: 28798 - protein, 10 aa, Artificial Sequence
  Description of Artificial Sequence: Synthetic epitope
MQNLSSIQAL

SEQ ID NO: 28799 - protein, 10 aa, Artificial Sequence
  Description of Artificial Sequence: Synthetic epitope
MQNSTKAPLK

SEQ ID NO: 28800 - protein, 10 aa, Artificial Sequence
  Description of Artificial Sequence: Synthetic epitope
MQNWDAAMED

SEQ ID NO: 28801 - protein, 10 aa, Artificial Sequence
  Description of Artificial Sequence: Synthetic epitope
MQNYKYDKAI

SEQ ID NO: 28802 - protein, 10 aa, Artificial Sequence
  Description of Artificial Sequence: Synthetic epitope
MQPQDQLIRD

SEQ ID NO: 28803 - protein, 10 aa, Artificial Sequence
  Description of Artificial Sequence: Synthetic epitope
MQPYTKNWTQ

SEQ ID NO: 28804 - protein, 10 aa, Artificial Sequence
  Description of Artificial Sequence: Synthetic epitope
MQQKAQITSQ

SEQ ID NO: 28805 - protein, 10 aa, Artificial Sequence
  Description of Artificial Sequence: Synthetic epitope
MQQKSQKKAE

SEQ ID NO: 28806 - protein, 10 aa, Artificial Sequence
  Description of Artificial Sequence: Synthetic epitope
MQQSEAQINT

SEQ ID NO: 28807 - protein, 10 aa, Artificial Sequence
  Description of Artificial Sequence: Synthetic epitope
MQQSQVEKYK

SEQ ID NO: 28808 - protein, 10 aa, Artificial Sequence
  Description of Artificial Sequence: Synthetic epitope
MQQTRTEAVA

SEQ ID NO: 28809 - protein, 10 aa, Artificial Sequence
  Description of Artificial Sequence: Synthetic epitope
MQREEKQLEA

SEQ ID NO: 28810 - protein, 10 aa, Artificial Sequence
  Description of Artificial Sequence: Synthetic epitope
MQRLKTNILQ

SEQ ID NO: 28811 - protein, 10 aa, Artificial Sequence
  Description of Artificial Sequence: Synthetic epitope
MQRLLTPVKR

SEQ ID NO: 28812 - protein, 10 aa, Artificial Sequence
  Description of Artificial Sequence: Synthetic epitope
MQRVNMIMAE

SEQ ID NO: 28813 - protein, 10 aa, Artificial Sequence
  Description of Artificial Sequence: Synthetic epitope
MQSINEDLKD

SEQ ID NO: 28814 - protein, 10 aa, Artificial Sequence
  Description of Artificial Sequence: Synthetic epitope
MQSIQSKYSL

SEQ ID NO: 28815 - protein, 10 aa, Artificial Sequence
  Description of Artificial Sequence: Synthetic epitope
MQSLSEAPNS

SEQ ID NO: 28816 - protein, 10 aa, Artificial Sequence
  Description of Artificial Sequence: Synthetic epitope
MQSNTLTKDE

SEQ ID NO: 28817 - protein, 10 aa, Artificial Sequence
  Description of Artificial Sequence: Synthetic epitope
MQSQRIPGRK

SEQ ID NO: 28818 - protein, 10 aa, Artificial Sequence
  Description of Artificial Sequence: Synthetic epitope
MQSSALVESL

SEQ ID NO: 28819 - protein, 10 aa, Artificial Sequence
  Description of Artificial Sequence: Synthetic epitope
MQSSNSESKK

SEQ ID NO: 28820 - protein, 10 aa, Artificial Sequence
  Description of Artificial Sequence: Synthetic epitope
MQSTTVEQSH

SEQ ID NO: 28821 - protein, 10 aa, Artificial Sequence
  Description of Artificial Sequence: Synthetic epitope
MQSYASAMLS

SEQ ID NO: 28822 - protein, 10 aa, Artificial Sequence
  Description of Artificial Sequence: Synthetic epitope
MQSYSVEMPT

SEQ ID NO: 28823 - protein, 10 aa, Artificial Sequence
  Description of Artificial Sequence: Synthetic epitope
MQTKAKAVID

SEQ ID NO: 28824 - protein, 10 aa, Artificial Sequence
  Description of Artificial Sequence: Synthetic epitope
MQTQQMLLNK

SEQ ID NO: 28825 - protein, 10 aa, Artificial Sequence
  Description of Artificial Sequence: Synthetic epitope
MQTRKSLELK

SEQ ID NO: 28826 - protein, 10 aa, Artificial Sequence
  Description of Artificial Sequence: Synthetic epitope
MQVEVEKQNR

SEQ ID NO: 28827 - protein, 10 aa, Artificial Sequence
  Description of Artificial Sequence: Synthetic epitope
MQVPAQAQST

SEQ ID NO: 28828 - protein, 10 aa, Artificial Sequence
  Description of Artificial Sequence: Synthetic epitope
MQVTARSLEE

SEQ ID NO: 28829 - protein, 10 aa, Artificial Sequence
  Description of Artificial Sequence: Synthetic epitope
MQVTLKTLQQ

SEQ ID NO: 28830 - protein, 10 aa, Artificial Sequence
  Description of Artificial Sequence: Synthetic epitope
MQVVNYVLAQ

SEQ ID NO: 28831 - protein, 10 aa, Artificial Sequence
  Description of Artificial Sequence: Synthetic epitope
MQWSQSLEKL

SEQ ID NO: 28832 - protein, 10 aa, Artificial Sequence
  Description of Artificial Sequence: Synthetic epitope
MRAETVIQTV

SEQ ID NO: 28833 - protein, 10 aa, Artificial Sequence
  Description of Artificial Sequence: Synthetic epitope
MRALAALSAP

SEQ ID NO: 28834 - protein, 10 aa, Artificial Sequence
  Description of Artificial Sequence: Synthetic epitope
MRALQVVPRE

SEQ ID NO: 28835 - protein, 10 aa, Artificial Sequence
  Description of Artificial Sequence: Synthetic epitope
MRALTVQRVK

SEQ ID NO: 28836 - protein, 10 aa, Artificial Sequence
  Description of Artificial Sequence: Synthetic epitope
MRAMASLRAR

SEQ ID NO: 28837 - protein, 10 aa, Artificial Sequence
  Description of Artificial Sequence: Synthetic epitope
MRAQQLLGQR

SEQ ID NO: 28838 - protein, 10 aa, Artificial Sequence
  Description of Artificial Sequence: Synthetic epitope
MRASKRQSEK

SEQ ID NO: 28839 - protein, 10 aa, Artificial Sequence
  Description of Artificial Sequence: Synthetic epitope
MRASNELALA

SEQ ID NO: 28840 - protein, 10 aa, Artificial Sequence
  Description of Artificial Sequence: Synthetic epitope
MRASNVSSDG

SEQ ID NO: 28841 - protein, 10 aa, Artificial Sequence
  Description of Artificial Sequence: Synthetic epitope
MRAVSANYST

SEQ ID NO: 28842 - protein, 10 aa, Artificial Sequence
  Description of Artificial Sequence: Synthetic epitope
MRDGEVIKES

SEQ ID NO: 28843 - protein, 10 aa, Artificial Sequence
  Description of Artificial Sequence: Synthetic epitope
MREIAIDVPN

SEQ ID NO: 28844 - protein, 10 aa, Artificial Sequence
  Description of Artificial Sequence: Synthetic epitope
MRELEAKATK

SEQ ID NO: 28845 - protein, 10 aa, Artificial Sequence
  Description of Artificial Sequence: Synthetic epitope
MRELSEVKDS

SEQ ID NO: 28846 - protein, 10 aa, Artificial Sequence
  Description of Artificial Sequence: Synthetic epitope
MRENNQSSTL

SEQ ID NO: 28847 - protein, 10 aa, Artificial Sequence
  Description of Artificial Sequence: Synthetic epitope
MRERTGYTKT

SEQ ID NO: 28848 - protein, 10 aa, Artificial Sequence
  Description of Artificial Sequence: Synthetic epitope
MREVRARLAA

SEQ ID NO: 28849 - protein, 10 aa, Artificial Sequence
  Description of Artificial Sequence: Synthetic epitope
MRFQEYHIQQ

SEQ ID NO: 28850 - protein, 10 aa, Artificial Sequence
  Description of Artificial Sequence: Synthetic epitope
MRGKTFRFEM

SEQ ID NO: 28851 - protein, 10 aa, Artificial Sequence
  Description of Artificial Sequence: Synthetic epitope
MRGLQSSKEL

SEQ ID NO: 28852 - protein, 10 aa, Artificial Sequence
  Description of Artificial Sequence: Synthetic epitope
MRHEAPMQMA

SEQ ID NO: 28853 - protein, 10 aa, Artificial Sequence
  Description of Artificial Sequence: Synthetic epitope
MRHMDSAKET

SEQ ID NO: 28854 - protein, 10 aa, Artificial Sequence
  Description of Artificial Sequence: Synthetic epitope
MRHRFQTQQL

SEQ ID NO: 28855 - protein, 10 aa, Artificial Sequence
  Description of Artificial Sequence: Synthetic epitope
MRHRKVRGEK

SEQ ID NO: 28856 - protein, 10 aa, Artificial Sequence
  Description of Artificial Sequence: Synthetic epitope
MRHSLTKLLA

SEQ ID NO: 28857 - protein, 10 aa, Artificial Sequence
  Description of Artificial Sequence: Synthetic epitope
MRHSVAVMTV

SEQ ID NO: 28858 - protein, 10 aa, Artificial Sequence
  Description of Artificial Sequence: Synthetic epitope
MRIKNANSHH

SEQ ID NO: 28859 - protein, 10 aa, Artificial Sequence
  Description of Artificial Sequence: Synthetic epitope
MRILSALVQF

SEQ ID NO: 28860 - protein, 10 aa, Artificial Sequence
  Description of Artificial Sequence: Synthetic epitope
MRIRLSTNSA

SEQ ID NO: 28861 - protein, 10 aa, Artificial Sequence
  Description of Artificial Sequence: Synthetic epitope
MRISTEFSKL

SEQ ID NO: 28862 - protein, 10 aa, Artificial Sequence
  Description of Artificial Sequence: Synthetic epitope
MRKRTEPVAL

SEQ ID NO: 28863 - protein, 10 aa, Artificial Sequence
  Description of Artificial Sequence: Synthetic epitope
MRKTVQVTGK

SEQ ID NO: 28864 - protein, 10 aa, Artificial Sequence
  Description of Artificial Sequence: Synthetic epitope
MRLEASKLNE

SEQ ID NO: 28865 - protein, 10 aa, Artificial Sequence
  Description of Artificial Sequence: Synthetic epitope
MRLLPIKKST

SEQ ID NO: 28866 - protein, 10 aa, Artificial Sequence
  Description of Artificial Sequence: Synthetic epitope
MRLTELAEVK

SEQ ID NO: 28867 - protein, 10 aa, Artificial Sequence
  Description of Artificial Sequence: Synthetic epitope
MRLTEVQDDK

SEQ ID NO: 28868 - protein, 10 aa, Artificial Sequence
  Description of Artificial Sequence: Synthetic epitope
MRLVASAYSI

SEQ ID NO: 28869 - protein, 10 aa, Artificial Sequence
  Description of Artificial Sequence: Synthetic epitope
MRMAPTESTE

SEQ ID NO: 28870 - protein, 10 aa, Artificial Sequence
  Description of Artificial Sequence: Synthetic epitope
MRMASKFMGK

SEQ ID NO: 28871 - protein, 10 aa, Artificial Sequence
  Description of Artificial Sequence: Synthetic epitope
MRMLYMIEQV

SEQ ID NO: 28872 - protein, 10 aa, Artificial Sequence
  Description of Artificial Sequence: Synthetic epitope
MRMSDTVTVK

SEQ ID NO: 28873 - protein, 10 aa, Artificial Sequence
  Description of Artificial Sequence: Synthetic epitope
MRMVEISHFL

SEQ ID NO: 28874 - protein, 10 aa, Artificial Sequence
  Description of Artificial Sequence: Synthetic epitope
MRNSTTEKIE

SEQ ID NO: 28875 - protein, 10 aa, Artificial Sequence
  Description of Artificial Sequence: Synthetic epitope
MRNTSKELQG

SEQ ID NO: 28876 - protein, 10 aa, Artificial Sequence
  Description of Artificial Sequence: Synthetic epitope
MRPDASLQVD

SEQ ID NO: 28877 - protein, 10 aa, Artificial Sequence
  Description of Artificial Sequence: Synthetic epitope
MRPEVGREPA

SEQ ID NO: 28878 - protein, 10 aa, Artificial Sequence
  Description of Artificial Sequence: Synthetic epitope
MRPKVMWHLL

SEQ ID NO: 28879 - protein, 10 aa, Artificial Sequence
  Description of Artificial Sequence: Synthetic epitope
MRPRGAAFAA

SEQ ID NO: 28880 - protein, 10 aa, Artificial Sequence
  Description of Artificial Sequence: Synthetic epitope
MRPTISIRGQ

SEQ ID NO: 28881 - protein, 10 aa, Artificial Sequence
  Description of Artificial Sequence: Synthetic epitope
MRPVQTTQEE

SEQ ID NO: 28882 - protein, 10 aa, Artificial Sequence
  Description of Artificial Sequence: Synthetic epitope
MRQAWSKSGR

SEQ ID NO: 28883 - protein, 10 aa, Artificial Sequence
  Description of Artificial Sequence: Synthetic epitope
MRQQAHIQVV

SEQ ID NO: 28884 - protein, 10 aa, Artificial Sequence
  Description of Artificial Sequence: Synthetic epitope
MRRAARRPNL

SEQ ID NO: 28885 - protein, 10 aa, Artificial Sequence
  Description of Artificial Sequence: Synthetic epitope
MRRASRDYTK

SEQ ID NO: 28886 - protein, 10 aa, Artificial Sequence
  Description of Artificial Sequence: Synthetic epitope
MRRKNIIGQV

SEQ ID NO: 28887 - protein, 10 aa, Artificial Sequence
  Description of Artificial Sequence: Synthetic epitope
MRRKRIAETK

SEQ ID NO: 28888 - protein, 10 aa, Artificial Sequence
  Description of Artificial Sequence: Synthetic epitope
MRRLSSIKRD

SEQ ID NO: 28889 - protein, 10 aa, Artificial Sequence
  Description of Artificial Sequence: Synthetic epitope
MRRNTQDENM

SEQ ID NO: 28890 - protein, 10 aa, Artificial Sequence
  Description of Artificial Sequence: Synthetic epitope
MRRQWGSAMR

SEQ ID NO: 28891 - protein, 10 aa, Artificial Sequence
  Description of Artificial Sequence: Synthetic epitope
MRSAAKPWNP

SEQ ID NO: 28892 - protein, 10 aa, Artificial Sequence
  Description of Artificial Sequence: Synthetic epitope
MRSEATDVKS

SEQ ID NO: 28893 - protein, 10 aa, Artificial Sequence
  Description of Artificial Sequence: Synthetic epitope
MRSGKRNQSK

SEQ ID NO: 28894 - protein, 10 aa, Artificial Sequence
  Description of Artificial Sequence: Synthetic epitope
MRSMKALQKA

SEQ ID NO: 28895 - protein, 10 aa, Artificial Sequence
  Description of Artificial Sequence: Synthetic epitope
MRSRQEMKNP

SEQ ID NO: 28896 - protein, 10 aa, Artificial Sequence
  Description of Artificial Sequence: Synthetic epitope
MRVEQFELWA

SEQ ID NO: 28897 - protein, 10 aa, Artificial Sequence
  Description of Artificial Sequence: Synthetic epitope
MRVGPVRSAM

SEQ ID NO: 28898 - protein, 10 aa, Artificial Sequence
  Description of Artificial Sequence: Synthetic epitope
MRVKDAAEAT

SEQ ID NO: 28899 - protein, 10 aa, Artificial Sequence
  Description of Artificial Sequence: Synthetic epitope
MRYKRTKAAL

SEQ ID NO: 28900 - protein, 10 aa, Artificial Sequence
  Description of Artificial Sequence: Synthetic epitope
MSAAGARGLR

SEQ ID NO: 28901 - protein, 10 aa, Artificial Sequence
  Description of Artificial Sequence: Synthetic epitope
MSAAMRERFD

SEQ ID NO: 28902 - protein, 10 aa, Artificial Sequence
  Description of Artificial Sequence: Synthetic epitope
MSAEVETSEG

SEQ ID NO: 28903 - protein, 10 aa, Artificial Sequence
  Description of Artificial Sequence: Synthetic epitope
MSAFSEAALE

SEQ ID NO: 28904 - protein, 10 aa, Artificial Sequence
  Description of Artificial Sequence: Synthetic epitope
MSAKAISEQT

SEQ ID NO: 28905 - protein, 10 aa, Artificial Sequence
  Description of Artificial Sequence: Synthetic epitope
MSAKSAISKE

SEQ ID NO: 28906 - protein, 10 aa, Artificial Sequence
  Description of Artificial Sequence: Synthetic epitope
MSAKSRTIGI

SEQ ID NO: 28907 - protein, 10 aa, Artificial Sequence
  Description of Artificial Sequence: Synthetic epitope
MSALGQITIT

SEQ ID NO: 28908 - protein, 10 aa, Artificial Sequence
  Description of Artificial Sequence: Synthetic epitope
MSALKVNKNN

SEQ ID NO: 28909 - protein, 10 aa, Artificial Sequence
  Description of Artificial Sequence: Synthetic epitope
MSALSLKGDQ

SEQ ID NO: 28910 - protein, 10 aa, Artificial Sequence
  Description of Artificial Sequence: Synthetic epitope
MSANTSMVTE

SEQ ID NO: 28911 - protein, 10 aa, Artificial Sequence
  Description of Artificial Sequence: Synthetic epitope
MSARATRPRS

SEQ ID NO: 28912 - protein, 10 aa, Artificial Sequence
  Description of Artificial Sequence: Synthetic epitope
MSARVLLPST

SEQ ID NO: 28913 - protein, 10 aa, Artificial Sequence
  Description of Artificial Sequence: Synthetic epitope
MSARVRSRSR

SEQ ID NO: 28914 - protein, 10 aa, Artificial Sequence
  Description of Artificial Sequence: Synthetic epitope
MSASEMRNIR

SEQ ID NO: 28915 - protein, 10 aa, Artificial Sequence
  Description of Artificial Sequence: Synthetic epitope
MSASQDALPI

SEQ ID NO: 28916 - protein, 10 aa, Artificial Sequence
  Description of Artificial Sequence: Synthetic epitope
MSASQDLEPK

SEQ ID NO: 28917 - protein, 10 aa, Artificial Sequence
  Description of Artificial Sequence: Synthetic epitope
MSASQDSRSR

SEQ ID NO: 28918 - protein, 10 aa, Artificial Sequence
  Description of Artificial Sequence: Synthetic epitope
MSASSAGTTH

SEQ ID NO: 28919 - protein, 10 aa, Artificial Sequence
  Description of Artificial Sequence: Synthetic epitope
MSASVKESLQ

SEQ ID NO: 28920 - protein, 10 aa, Artificial Sequence
  Description of Artificial Sequence: Synthetic epitope
MSASVVSVIS

SEQ ID NO: 28921 - protein, 10 aa, Artificial Sequence
  Description of Artificial Sequence: Synthetic epitope
MSATRAKKVK

SEQ ID NO: 28922 - protein, 10 aa, Artificial Sequence
  Description of Artificial Sequence: Synthetic epitope
MSATRSAYME

SEQ ID NO: 28923 - protein, 10 aa, Artificial Sequence
  Description of Artificial Sequence: Synthetic epitope
MSAVAAEIKQ

SEQ ID NO: 28924 - protein, 10 aa, Artificial Sequence
  Description of Artificial Sequence: Synthetic epitope
MSDASLRSTS

SEQ ID NO: 28925 - protein, 10 aa, Artificial Sequence
  Description of Artificial Sequence: Synthetic epitope
MSDEASAITS

SEQ ID NO: 28926 - protein, 10 aa, Artificial Sequence
  Description of Artificial Sequence: Synthetic epitope
MSDEREVAEA

SEQ ID NO: 28927 - protein, 10 aa, Artificial Sequence
  Description of Artificial Sequence: Synthetic epitope
MSDFQILKTT

SEQ ID NO: 28928 - protein, 10 aa, Artificial Sequence
  Description of Artificial Sequence: Synthetic epitope
MSDKLKERKV

SEQ ID NO: 28929 - protein, 10 aa, Artificial Sequence
  Description of Artificial Sequence: Synthetic epitope
MSDKYPIQDT

SEQ ID NO: 28930 - protein, 10 aa, Artificial Sequence
  Description of Artificial Sequence: Synthetic epitope
MSDTRVHMSL

SEQ ID NO: 28931 - protein, 10 aa, Artificial Sequence
  Description of Artificial Sequence: Synthetic epitope
MSDVSTSVQS

SEQ ID NO: 28932 - protein, 10 aa, Artificial Sequence
  Description of Artificial Sequence: Synthetic epitope
MSDVYGANLF

SEQ ID NO: 28933 - protein, 10 aa, Artificial Sequence
  Description of Artificial Sequence: Synthetic epitope
MSEDASVADM

SEQ ID NO: 28934 - protein, 10 aa, Artificial Sequence
  Description of Artificial Sequence: Synthetic epitope
MSEEIALQEK

SEQ ID NO: 28935 - protein, 10 aa, Artificial Sequence
  Description of Artificial Sequence: Synthetic epitope
MSEETATSDN

SEQ ID NO: 28936 - protein, 10 aa, Artificial Sequence
  Description of Artificial Sequence: Synthetic epitope
MSEIPSTIVS

SEQ ID NO: 28937 - protein, 10 aa, Artificial Sequence
  Description of Artificial Sequence: Synthetic epitope
MSELDKMSGT

SEQ ID NO: 28938 - protein, 10 aa, Artificial Sequence
  Description of Artificial Sequence: Synthetic epitope
MSEPAGDVRQ

SEQ ID NO: 28939 - protein, 10 aa, Artificial Sequence
  Description of Artificial Sequence: Synthetic epitope
MSESTSNIDQ

SEQ ID NO: 28940 - protein, 10 aa, Artificial Sequence
  Description of Artificial Sequence: Synthetic epitope
MSEYLKQEES

SEQ ID NO: 28941 - protein, 10 aa, Artificial Sequence
  Description of Artificial Sequence: Synthetic epitope
MSFAEIKHKY

SEQ ID NO: 28942 - protein, 10 aa, Artificial Sequence
  Description of Artificial Sequence: Synthetic epitope
MSFQSIIHLS

SEQ ID NO: 28943 - protein, 10 aa, Artificial Sequence
  Description of Artificial Sequence: Synthetic epitope
MSGADRSPNA

SEQ ID NO: 28944 - protein, 10 aa, Artificial Sequence
  Description of Artificial Sequence: Synthetic epitope
MSGDEMIFDP

SEQ ID NO: 28945 - protein, 10 aa, Artificial Sequence
  Description of Artificial Sequence: Synthetic epitope
MSGDEMIFDP

SEQ ID NO: 28946 - protein, 10 aa, Artificial Sequence
  Description of Artificial Sequence: Synthetic epitope
MSGGDTRAAI

SEQ ID NO: 28947 - protein, 10 aa, Artificial Sequence
  Description of Artificial Sequence: Synthetic epitope
MSGHRSTRKR

SEQ ID NO: 28948 - protein, 10 aa, Artificial Sequence
  Description of Artificial Sequence: Synthetic epitope
MSGKDRIEIF

SEQ ID NO: 28949 - protein, 10 aa, Artificial Sequence
  Description of Artificial Sequence: Synthetic epitope
MSGKNMRLSS

SEQ ID NO: 28950 - protein, 10 aa, Artificial Sequence
  Description of Artificial Sequence: Synthetic epitope
MSGLSESKQT

SEQ ID NO: 28951 - protein, 10 aa, Artificial Sequence
  Description of Artificial Sequence: Synthetic epitope
MSGMMTNAIG

SEQ ID NO: 28952 - protein, 10 aa, Artificial Sequence
  Description of Artificial Sequence: Synthetic epitope
MSGSSRSLER

SEQ ID NO: 28953 - protein, 10 aa, Artificial Sequence
  Description of Artificial Sequence: Synthetic epitope
MSGVRAVRIS

SEQ ID NO: 28954 - protein, 10 aa, Artificial Sequence
  Description of Artificial Sequence: Synthetic epitope
MSGWIATSKT

SEQ ID NO: 28955 - protein, 10 aa, Artificial Sequence
  Description of Artificial Sequence: Synthetic epitope
MSHKKINEME

SEQ ID NO: 28956 - protein, 10 aa, Artificial Sequence
  Description of Artificial Sequence: Synthetic epitope
MSHQFSSQSA

SEQ ID NO: 28957 - protein, 10 aa, Artificial Sequence
  Description of Artificial Sequence: Synthetic epitope
MSHQTLEHME

SEQ ID NO: 28958 - protein, 10 aa, Artificial Sequence
  Description of Artificial Sequence: Synthetic epitope
MSIAGVAAQE

SEQ ID NO: 28959 - protein, 10 aa, Artificial Sequence
  Description of Artificial Sequence: Synthetic epitope
MSIEIESSDV

SEQ ID NO: 28960 - protein, 10 aa, Artificial Sequence
  Description of Artificial Sequence: Synthetic epitope
MSIETLLEAA

SEQ ID NO: 28961 - protein, 10 aa, Artificial Sequence
  Description of Artificial Sequence: Synthetic epitope
MSIINTSYVE

SEQ ID NO: 28962 - protein, 10 aa, Artificial Sequence
  Description of Artificial Sequence: Synthetic epitope
MSIINTSYVE

SEQ ID NO: 28963 - protein, 10 aa, Artificial Sequence
  Description of Artificial Sequence: Synthetic epitope
MSIMTQMKES

SEQ ID NO: 28964 - protein, 10 aa, Artificial Sequence
  Description of Artificial Sequence: Synthetic epitope
MSIRVTQKSY

SEQ ID NO: 28965 - protein, 10 aa, Artificial Sequence
  Description of Artificial Sequence: Synthetic epitope
MSISNITVYM

SEQ ID NO: 28966 - protein, 10 aa, Artificial Sequence
  Description of Artificial Sequence: Synthetic epitope
MSKDIKSVEH

SEQ ID NO: 28967 - protein, 10 aa, Artificial Sequence
  Description of Artificial Sequence: Synthetic epitope
MSKGTSSDTS

SEQ ID NO: 28968 - protein, 10 aa, Artificial Sequence
  Description of Artificial Sequence: Synthetic epitope
MSKIGAARTT

SEQ ID NO: 28969 - protein, 10 aa, Artificial Sequence
  Description of Artificial Sequence: Synthetic epitope
MSKKISGGSV

SEQ ID NO: 28970 - protein, 10 aa, Artificial Sequence
  Description of Artificial Sequence: Synthetic epitope
MSKLKSSESV

SEQ ID NO: 28971 - protein, 10 aa, Artificial Sequence
  Description of Artificial Sequence: Synthetic epitope
MSKNTVSSAR

SEQ ID NO: 28972 - protein, 10 aa, Artificial Sequence
  Description of Artificial Sequence: Synthetic epitope
MSKRRMSVGQ

SEQ ID NO: 28973 - protein, 10 aa, Artificial Sequence
  Description of Artificial Sequence: Synthetic epitope
MSKSASPKEP

SEQ ID NO: 28974 - protein, 10 aa, Artificial Sequence
  Description of Artificial Sequence: Synthetic epitope
MSKSKDDAPH

SEQ ID NO: 28975 - protein, 10 aa, Artificial Sequence
  Description of Artificial Sequence: Synthetic epitope
MSKSLKKLVE

SEQ ID NO: 28976 - protein, 10 aa, Artificial Sequence
  Description of Artificial Sequence: Synthetic epitope
MSKSVIPSSP

SEQ ID NO: 28977 - protein, 10 aa, Artificial Sequence
  Description of Artificial Sequence: Synthetic epitope
MSKTFVKSKE

SEQ ID NO: 28978 - protein, 10 aa, Artificial Sequence
  Description of Artificial Sequence: Synthetic epitope
MSKTVLSQTM

SEQ ID NO: 28979 - protein, 10 aa, Artificial Sequence
  Description of Artificial Sequence: Synthetic epitope
MSLALRSELV

SEQ ID NO: 28980 - protein, 10 aa, Artificial Sequence
  Description of Artificial Sequence: Synthetic epitope
MSLARSVSAS

SEQ ID NO: 28981 - protein, 10 aa, Artificial Sequence
  Description of Artificial Sequence: Synthetic epitope
MSLGKAEDNQ

SEQ ID NO: 28982 - protein, 10 aa, Artificial Sequence
  Description of Artificial Sequence: Synthetic epitope
MSLGLARAQE

SEQ ID NO: 28983 - protein, 10 aa, Artificial Sequence
  Description of Artificial Sequence: Synthetic epitope
MSLHSTHNRN

SEQ ID NO: 28984 - protein, 10 aa, Artificial Sequence
  Description of Artificial Sequence: Synthetic epitope
MSLIVTIKDT

SEQ ID NO: 28985 - protein, 10 aa, Artificial Sequence
  Description of Artificial Sequence: Synthetic epitope
MSLKLQASNV

SEQ ID NO: 28986 - protein, 10 aa, Artificial Sequence
  Description of Artificial Sequence: Synthetic epitope
MSLKMDNRDV

SEQ ID NO: 28987 - protein, 10 aa, Artificial Sequence
  Description of Artificial Sequence: Synthetic epitope
MSLLSAIDTS

SEQ ID NO: 28988 - protein, 10 aa, Artificial Sequence
  Description of Artificial Sequence: Synthetic epitope
MSLMSSLRVP

SEQ ID NO: 28989 - protein, 10 aa, Artificial Sequence
  Description of Artificial Sequence: Synthetic epitope
MSLNAKTKVR

SEQ ID NO: 28990 - protein, 10 aa, Artificial Sequence
  Description of Artificial Sequence: Synthetic epitope
MSLNNSSNVF

SEQ ID NO: 28991 - protein, 10 aa, Artificial Sequence
  Description of Artificial Sequence: Synthetic epitope
MSLQMVTVSN

SEQ ID NO: 28992 - protein, 10 aa, Artificial Sequence
  Description of Artificial Sequence: Synthetic epitope
MSLQRIVRVS

SEQ ID NO: 28993 - protein, 10 aa, Artificial Sequence
  Description of Artificial Sequence: Synthetic epitope
MSLQVLNDKN

SEQ ID NO: 28994 - protein, 10 aa, Artificial Sequence
  Description of Artificial Sequence: Synthetic epitope
MSLSEEQARS

SEQ ID NO: 28995 - protein, 10 aa, Artificial Sequence
  Description of Artificial Sequence: Synthetic epitope
MSLTIADLSE

SEQ ID NO: 28996 - protein, 10 aa, Artificial Sequence
  Description of Artificial Sequence: Synthetic epitope
MSLVAYASSD

SEQ ID NO: 28997 - protein, 10 aa, Artificial Sequence
  Description of Artificial Sequence: Synthetic epitope
MSLVKQLSGQ

SEQ ID NO: 28998 - protein, 10 aa, Artificial Sequence
  Description of Artificial Sequence: Synthetic epitope
MSLVLNDLLI

SEQ ID NO: 28999 - protein, 10 aa, Artificial Sequence
  Description of Artificial Sequence: Synthetic epitope
MSMLQMRAPV

SEQ ID NO: 29000 - protein, 10 aa, Artificial Sequence
  Description of Artificial Sequence: Synthetic epitope
MSNAETLLKS

SEQ ID NO: 29001 - protein, 10 aa, Artificial Sequence
  Description of Artificial Sequence: Synthetic epitope
MSNDSMKRQQ

SEQ ID NO: 29002 - protein, 10 aa, Artificial Sequence
  Description of Artificial Sequence: Synthetic epitope
MSNEVETSAT

SEQ ID NO: 29003 - protein, 10 aa, Artificial Sequence
  Description of Artificial Sequence: Synthetic epitope
MSNITDPQMW

SEQ ID NO: 29004 - protein, 10 aa, Artificial Sequence
  Description of Artificial Sequence: Synthetic epitope
MSNSNTTQET

SEQ ID NO: 29005 - protein, 10 aa, Artificial Sequence
  Description of Artificial Sequence: Synthetic epitope
MSNTQAERSI

SEQ ID NO: 29006 - protein, 10 aa, Artificial Sequence
  Description of Artificial Sequence: Synthetic epitope
MSNTQAERSI

SEQ ID NO: 29007 - protein, 10 aa, Artificial Sequence
  Description of Artificial Sequence: Synthetic epitope
MSNTTVVPST

SEQ ID NO: 29008 - protein, 10 aa, Artificial Sequence
  Description of Artificial Sequence: Synthetic epitope
MSPHSAEDVD

SEQ ID NO: 29009 - protein, 10 aa, Artificial Sequence
  Description of Artificial Sequence: Synthetic epitope
MSPKKVQIKV

SEQ ID NO: 29010 - protein, 10 aa, Artificial Sequence
  Description of Artificial Sequence: Synthetic epitope
MSPVVKIEQV

SEQ ID NO: 29011 - protein, 10 aa, Artificial Sequence
  Description of Artificial Sequence: Synthetic epitope
MSQAAKASAS

SEQ ID NO: 29012 - protein, 10 aa, Artificial Sequence
  Description of Artificial Sequence: Synthetic epitope
MSQADKMTAE

SEQ ID NO: 29013 - protein, 10 aa, Artificial Sequence
  Description of Artificial Sequence: Synthetic epitope
MSQEKNEMFE

SEQ ID NO: 29014 - protein, 10 aa, Artificial Sequence
  Description of Artificial Sequence: Synthetic epitope
MSQETIHRNL

SEQ ID NO: 29015 - protein, 10 aa, Artificial Sequence
  Description of Artificial Sequence: Synthetic epitope
MSQLEEKERR

SEQ ID NO: 29016 - protein, 10 aa, Artificial Sequence
  Description of Artificial Sequence: Synthetic epitope
MSQQDAVAAL

SEQ ID NO: 29017 - protein, 10 aa, Artificial Sequence
  Description of Artificial Sequence: Synthetic epitope
MSQQVSAAVA

SEQ ID NO: 29018 - protein, 10 aa, Artificial Sequence
  Description of Artificial Sequence: Synthetic epitope
MSQSQNAIFT

SEQ ID NO: 29019 - protein, 10 aa, Artificial Sequence
  Description of Artificial Sequence: Synthetic epitope
MSQTRKKTSS

SEQ ID NO: 29020 - protein, 10 aa, Artificial Sequence
  Description of Artificial Sequence: Synthetic epitope
MSQVMVQYGA

SEQ ID NO: 29021 - protein, 10 aa, Artificial Sequence
  Description of Artificial Sequence: Synthetic epitope
MSQWTPEYNE

SEQ ID NO: 29022 - protein, 10 aa, Artificial Sequence
  Description of Artificial Sequence: Synthetic epitope
MSRAEQEIAA

SEQ ID NO: 29023 - protein, 10 aa, Artificial Sequence
  Description of Artificial Sequence: Synthetic epitope
MSRIEKMSIL

SEQ ID NO: 29024 - protein, 10 aa, Artificial Sequence
  Description of Artificial Sequence: Synthetic epitope
MSRIESLTRA

SEQ ID NO: 29025 - protein, 10 aa, Artificial Sequence
  Description of Artificial Sequence: Synthetic epitope
MSRKASENVE

SEQ ID NO: 29026 - protein, 10 aa, Artificial Sequence
  Description of Artificial Sequence: Synthetic epitope
MSRKISKESK

SEQ ID NO: 29027 - protein, 10 aa, Artificial Sequence
  Description of Artificial Sequence: Synthetic epitope
MSRKQAAKSR

SEQ ID NO: 29028 - protein, 10 aa, Artificial Sequence
  Description of Artificial Sequence: Synthetic epitope
MSRKQNQKDS

SEQ ID NO: 29029 - protein, 10 aa, Artificial Sequence
  Description of Artificial Sequence: Synthetic epitope
MSRLEAKKPS

SEQ ID NO: 29030 - protein, 10 aa, Artificial Sequence
  Description of Artificial Sequence: Synthetic epitope
MSRQASKTSG

SEQ ID NO: 29031 - protein, 10 aa, Artificial Sequence
  Description of Artificial Sequence: Synthetic epitope
MSRQSTLYSF

SEQ ID NO: 29032 - protein, 10 aa, Artificial Sequence
  Description of Artificial Sequence: Synthetic epitope
MSRQTTSVGS

SEQ ID NO: 29033 - protein, 10 aa, Artificial Sequence
  Description of Artificial Sequence: Synthetic epitope
MSRSVSVTAA

SEQ ID NO: 29034 - protein, 10 aa, Artificial Sequence
  Description of Artificial Sequence: Synthetic epitope
MSRTVKVRDG

SEQ ID NO: 29035 - protein, 10 aa, Artificial Sequence
  Description of Artificial Sequence: Synthetic epitope
MSRWLWPWSN

SEQ ID NO: 29036 - protein, 10 aa, Artificial Sequence
  Description of Artificial Sequence: Synthetic epitope
MSSARFDSSD

SEQ ID NO: 29037 - protein, 10 aa, Artificial Sequence
  Description of Artificial Sequence: Synthetic epitope
MSSASVTAFE

SEQ ID NO: 29038 - protein, 10 aa, Artificial Sequence
  Description of Artificial Sequence: Synthetic epitope
MSSESKEQHN

SEQ ID NO: 29039 - protein, 10 aa, Artificial Sequence
  Description of Artificial Sequence: Synthetic epitope
MSSEVSARRD

SEQ ID NO: 29040 - protein, 10 aa, Artificial Sequence
  Description of Artificial Sequence: Synthetic epitope
MSSFSESALE

SEQ ID NO: 29041 - protein, 10 aa, Artificial Sequence
  Description of Artificial Sequence: Synthetic epitope
MSSFSRAPQQ

SEQ ID NO: 29042 - protein, 10 aa, Artificial Sequence
  Description of Artificial Sequence: Synthetic epitope
MSSFSYEPYY

SEQ ID NO: 29043 - protein, 10 aa, Artificial Sequence
  Description of Artificial Sequence: Synthetic epitope
MSSGAPQKSS

SEQ ID NO: 29044 - protein, 10 aa, Artificial Sequence
  Description of Artificial Sequence: Synthetic epitope
MSSGYSSLEE

SEQ ID NO: 29045 - protein, 10 aa, Artificial Sequence
  Description of Artificial Sequence: Synthetic epitope
MSSHTETSSF

SEQ ID NO: 29046 - protein, 10 aa, Artificial Sequence
  Description of Artificial Sequence: Synthetic epitope
MSSKAEKKQR

SEQ ID NO: 29047 - protein, 10 aa, Artificial Sequence
  Description of Artificial Sequence: Synthetic epitope
MSSKKAKTKT

SEQ ID NO: 29048 - protein, 10 aa, Artificial Sequence
  Description of Artificial Sequence: Synthetic epitope
MSSKKTTFNE

SEQ ID NO: 29049 - protein, 10 aa, Artificial Sequence
  Description of Artificial Sequence: Synthetic epitope
MSSKRAKAKT

SEQ ID NO: 29050 - protein, 10 aa, Artificial Sequence
  Description of Artificial Sequence: Synthetic epitope
MSSKRTKTKT

SEQ ID NO: 29051 - protein, 10 aa, Artificial Sequence
  Description of Artificial Sequence: Synthetic epitope
MSSKTASTNN

SEQ ID NO: 29052 - protein, 10 aa, Artificial Sequence
  Description of Artificial Sequence: Synthetic epitope
MSSNDSSLMA

SEQ ID NO: 29053 - protein, 10 aa, Artificial Sequence
  Description of Artificial Sequence: Synthetic epitope
MSSNTMLQKT

SEQ ID NO: 29054 - protein, 10 aa, Artificial Sequence
  Description of Artificial Sequence: Synthetic epitope
MSSPKKAKPT

SEQ ID NO: 29055 - protein, 10 aa, Artificial Sequence
  Description of Artificial Sequence: Synthetic epitope
MSSQKGNVAR

SEQ ID NO: 29056 - protein, 10 aa, Artificial Sequence
  Description of Artificial Sequence: Synthetic epitope
MSSRSTKDLI

SEQ ID NO: 29057 - protein, 10 aa, Artificial Sequence
  Description of Artificial Sequence: Synthetic epitope
MSSTLGKLSN

SEQ ID NO: 29058 - protein, 10 aa, Artificial Sequence
  Description of Artificial Sequence: Synthetic epitope
MSSVSEVNVD

SEQ ID NO: 29059 - protein, 10 aa, Artificial Sequence
  Description of Artificial Sequence: Synthetic epitope
MSSYTVAGRN

SEQ ID NO: 29060 - protein, 10 aa, Artificial Sequence
  Description of Artificial Sequence: Synthetic epitope
MSTADALDDE

SEQ ID NO: 29061 - protein, 10 aa, Artificial Sequence
  Description of Artificial Sequence: Synthetic epitope
MSTAMNFGTK

SEQ ID NO: 29062 - protein, 10 aa, Artificial Sequence
  Description of Artificial Sequence: Synthetic epitope
MSTAQSLKSV

SEQ ID NO: 29063 - protein, 10 aa, Artificial Sequence
  Description of Artificial Sequence: Synthetic epitope
MSTASVEIDD

SEQ ID NO: 29064 - protein, 10 aa, Artificial Sequence
  Description of Artificial Sequence: Synthetic epitope
MSTATTVAPA

SEQ ID NO: 29065 - protein, 10 aa, Artificial Sequence
  Description of Artificial Sequence: Synthetic epitope
MSTDSNSLAR

SEQ ID NO: 29066 - protein, 10 aa, Artificial Sequence
  Description of Artificial Sequence: Synthetic epitope
MSTESMIRDV

SEQ ID NO: 29067 - protein, 10 aa, Artificial Sequence
  Description of Artificial Sequence: Synthetic epitope
MSTESSEDLQ

SEQ ID NO: 29068 - protein, 10 aa, Artificial Sequence
  Description of Artificial Sequence: Synthetic epitope
MSTGRAALQK

SEQ ID NO: 29069 - protein, 10 aa, Artificial Sequence
  Description of Artificial Sequence: Synthetic epitope
MSTHGKVRFR

SEQ ID NO: 29070 - protein, 10 aa, Artificial Sequence
  Description of Artificial Sequence: Synthetic epitope
MSTINEAVLF

SEQ ID NO: 29071 - protein, 10 aa, Artificial Sequence
  Description of Artificial Sequence: Synthetic epitope
MSTKAEQFAS

SEQ ID NO: 29072 - protein, 10 aa, Artificial Sequence
  Description of Artificial Sequence: Synthetic epitope
MSTNENANTP

SEQ ID NO: 29073 - protein, 10 aa, Artificial Sequence
  Description of Artificial Sequence: Synthetic epitope
MSTRESFNPE

SEQ ID NO: 29074 - protein, 10 aa, Artificial Sequence
  Description of Artificial Sequence: Synthetic epitope
MSTRFKESED

SEQ ID NO: 29075 - protein, 10 aa, Artificial Sequence
  Description of Artificial Sequence: Synthetic epitope
MSVAIRKRSW

SEQ ID NO: 29076 - protein, 10 aa, Artificial Sequence
  Description of Artificial Sequence: Synthetic epitope
MSVATGSSET

SEQ ID NO: 29077 - protein, 10 aa, Artificial Sequence
  Description of Artificial Sequence: Synthetic epitope
MSVKYHYELL

SEQ ID NO: 29078 - protein, 10 aa, Artificial Sequence
  Description of Artificial Sequence: Synthetic epitope
MSVLNNSEVK

SEQ ID NO: 29079 - protein, 10 aa, Artificial Sequence
  Description of Artificial Sequence: Synthetic epitope
MSVNLSDSDK

SEQ ID NO: 29080 - protein, 10 aa, Artificial Sequence
  Description of Artificial Sequence: Synthetic epitope
MSVNYAAGLS

SEQ ID NO: 29081 - protein, 10 aa, Artificial Sequence
  Description of Artificial Sequence: Synthetic epitope
MSVPAFIDIS

SEQ ID NO: 29082 - protein, 10 aa, Artificial Sequence
  Description of Artificial Sequence: Synthetic epitope
MSVRFFLSQE

SEQ ID NO: 29083 - protein, 10 aa, Artificial Sequence
  Description of Artificial Sequence: Synthetic epitope
MSVSEIFVEL

SEQ ID NO: 29084 - protein, 10 aa, Artificial Sequence
  Description of Artificial Sequence: Synthetic epitope
MSVSRTMEDS

SEQ ID NO: 29085 - protein, 10 aa, Artificial Sequence
  Description of Artificial Sequence: Synthetic epitope
MSVSSKVTKP

SEQ ID NO: 29086 - protein, 10 aa, Artificial Sequence
  Description of Artificial Sequence: Synthetic epitope
MSVTTSGFSE

SEQ ID NO: 29087 - protein, 10 aa, Artificial Sequence
  Description of Artificial Sequence: Synthetic epitope
MSVTVSAPKP

SEQ ID NO: 29088 - protein, 10 aa, Artificial Sequence
  Description of Artificial Sequence: Synthetic epitope
MSVVKASVGI

SEQ ID NO: 29089 - protein, 10 aa, Artificial Sequence
  Description of Artificial Sequence: Synthetic epitope
MSVVTNTLVE

SEQ ID NO: 29090 - protein, 10 aa, Artificial Sequence
  Description of Artificial Sequence: Synthetic epitope
MSWDRESTEI

SEQ ID NO: 29091 - protein, 10 aa, Artificial Sequence
  Description of Artificial Sequence: Synthetic epitope
MSWIPFKIGQ

SEQ ID NO: 29092 - protein, 10 aa, Artificial Sequence
  Description of Artificial Sequence: Synthetic epitope
MSYAEKPDEI

SEQ ID NO: 29093 - protein, 10 aa, Artificial Sequence
  Description of Artificial Sequence: Synthetic epitope
MSYQRMENPG

SEQ ID NO: 29094 - protein, 10 aa, Artificial Sequence
  Description of Artificial Sequence: Synthetic epitope
MTAFATTPPI

SEQ ID NO: 29095 - protein, 10 aa, Artificial Sequence
  Description of Artificial Sequence: Synthetic epitope
MTAIRLREFI

SEQ ID NO: 29096 - protein, 10 aa, Artificial Sequence
  Description of Artificial Sequence: Synthetic epitope
MTAISDVETK

SEQ ID NO: 29097 - protein, 10 aa, Artificial Sequence
  Description of Artificial Sequence: Synthetic epitope
MTALSPYASL

SEQ ID NO: 29098 - protein, 10 aa, Artificial Sequence
  Description of Artificial Sequence: Synthetic epitope
MTALSSKLIS

SEQ ID NO: 29099 - protein, 10 aa, Artificial Sequence
  Description of Artificial Sequence: Synthetic epitope
MTAQAVEEDK

SEQ ID NO: 29100 - protein, 10 aa, Artificial Sequence
  Description of Artificial Sequence: Synthetic epitope
MTAQHYVTEF

SEQ ID NO: 29101 - protein, 10 aa, Artificial Sequence
  Description of Artificial Sequence: Synthetic epitope
MTAWTMGARG

SEQ ID NO: 29102 - protein, 10 aa, Artificial Sequence
  Description of Artificial Sequence: Synthetic epitope
MTDDKDVLRD

SEQ ID NO: 29103 - protein, 10 aa, Artificial Sequence
  Description of Artificial Sequence: Synthetic epitope
MTDGKLSTST

SEQ ID NO: 29104 - protein, 10 aa, Artificial Sequence
  Description of Artificial Sequence: Synthetic epitope
MTDQQAEARS

SEQ ID NO: 29105 - protein, 10 aa, Artificial Sequence
  Description of Artificial Sequence: Synthetic epitope
MTDTSVLDQW

SEQ ID NO: 29106 - protein, 10 aa, Artificial Sequence
  Description of Artificial Sequence: Synthetic epitope
MTEAHHKYDH

SEQ ID NO: 29107 - protein, 10 aa, Artificial Sequence
  Description of Artificial Sequence: Synthetic epitope
MTEGSTVNTE

SEQ ID NO: 29108 - protein, 10 aa, Artificial Sequence
  Description of Artificial Sequence: Synthetic epitope
MTEKTNGVKS

(The sequence listing continues in the following parts.)
